United States Patent Application Publication US 2011/0277190 A1 - sequence listing, part 6

SEQ ID NO: 22506 - protein, 566 aa, Gossypium arboreum
MGLQQGLVTWFVGVLFLSTLLLSNADVHHYEFFVRESNFTKLCNTTTLLVVNDSYPGPEIRVHRGDTVFVNVHNQGNYGFTIHWHGVKQPRNPWSDGPEFVTQCPIQPGTNFTYEIVLSDEIGTLWWHAHSDWTRGSVHGAFVILPAKKETYPFPTPDADQTIILESWYDGDYKQIIDDALAAGVSPRQPSAYAISGHVGDTYGCPNDTIFRMQVDSEKIYLLRIINAAMNEHFFFTIANHTLTVVAQDASYVRRFTRDYILISPGQTMDVLVSANRNVGQYYMAIRPFSDSSAAPVDNITTGIFEYTNSEGGLNASLITLPVMNDTDAMINFLNQIRNTKVSQNPRINVPADKDIKRRVFMTLAVNNLPCNTCVVGSRLVASLNNVSYVSPSIDILQAYYNRNMSGVYTEDFPLNPPVIYDFTGNLTNLNTPVEEGTRVIVVNYGEGVEMVLQATQMGAGGSHPIHLHGSSFYWVGTGFGNFNNKTDPRTYNLVDPPLINTVHVPGRRWVAIRFFATNPGVWFMHCHLERHSSWGMDTVLIVRNGKTKKTSIRPPPSTMPRCPGT

SEQ ID NO: 22507 - protein, 231 aa, Halobacterium sp. NRC-1
MGRLLDTDITALLTAGHAEPSPLLAEMAAHGEDRSFPTVGPDVGRFLRVLATLSDAERVFEFGSGFGYSAAWMLPVLPADGELVLTDHDSDRLADARSFLDRADADATAVFEAGDALDTVTDYEGPFDVVFIDHDKARYPAAFEHAVDVLAPGGLIVADNVMAGPVTAPAVTDAVRDGGGAADDATAGVAAYVRRVRDASGFETALVPLGEGIAVSAATDDTEPPSEPTDG

SEQ ID NO: 22508 - protein, 315 aa, uncultured crenarchaeote DeepAnt-EC39
MNEPIKNIRLLLEEITIKCDASWIAFSGGLDSSILAEIKKEQNLNAITIISKDFLATDLSYSQITAKHIDIPLEIKYVSIDQMLGAIESTIKILKNFNDIEIRNSIVPYLYMNALKEKNITNVITGDGADEIFAGYNFLLKKDHNELKNELKRIKKIMHFTSQKIANKLGMSIQMPFIDEKIIELVETLPINLLINQKNGIKFGKWVLRKAFENTLPTNVIWRKKTAMQDGSGTTNLTKLFDSIITDDIFTKKVKKIKSECNIKIRTKESLYYYELFKENFIIPECEDKKNICPDCNAEIVSNSKFCRMCGKFPI

SEQ ID NO: 22509 - protein, 160 aa, Yarrowia lipolytica CLIB122
TRSGQWQSDFVLVPCRFTTNSDNVTLGPQAREGELVFGVARIFASFNDTFVHITDLTGRETISRVTGGMKVKADRDENTPYAAMLAAQDAVEKAKEVGINALHIRIRATGGTSTKTPGPGCQSAVRALARAGMRIGRIEDVTPVPSDSTRRKGGRRGRRL

SEQ ID NO: 22510 - protein, 259 aa, Triticum aestivum
  misc_feature (185)..(185): Xaa can be any naturally occurring amino acid
  misc_feature (193)..(193): Xaa can be any naturally occurring amino acid
  unsure (1)..(259): unsure at all Xaa locations
LLEQVCTKNRPYRSGIPGISSTHASGKLERLHSHEAYEMIENHLNLILGQRQADGTVAAISKLRVGQVYAASVMYGYFLKRVDKRFQLEKSMKSLPWGSEDDALNQVMTTDSRPSDQTYSSHPEVESWTSPDLSAGGLGQSVKPSRLRSYVMSFDSDTLQTYATIRSKVAFGIIEKHTEALFGKXEIVITPEXTVDSPRMSMSGIAFSGLKKADLKGWPLSGSFLWGRRELLGTPRYHFVPHLIGIIGENPGHVMKFRP

SEQ ID NO: 22511 - protein, 247 aa, Petunia integrifolia subsp. inflata
MVFPNQEFESSSSQRKSGRGKIEIKRIENTTNRQVTFCKRRNGLLKKAYELSVLCDAEVALIVFSSRGRLYEYANNSVRATIDRYKKHHADSTSTGSVSEANTQYYQQEAAKLRRQIRDIQTYNRQIVGEALSSLSPRDLKNLEGKLEKAIGRVRSKKNELLFSEIELMQKREIEMQNANMYLRAKIAEVERATQQMNLMPGGGSEYQQQPMSSTSQPYDARNFLPVNLLEPNPHYSRQDQTALQLV

SEQ ID NO: 22512 - protein, 1412 aa, Cryptococcus neoformans var. neoformans JEC21
MHQQRAPAAHHHSYSYAPYPHASVSAENTVPSMAQPQVYYQQPPADFYPHVPGHNPHTGASHGTQAGPSQSAENNAFAMPDVRQSKSARPRPPPSSVTMPMIPTSLPDPSMHSYAPVQAPVPQQQTRTANRRSHNPAATLNSPSAPRPEELTDEYVLHPSVYAFKQEYPRRAMVGLGPYIVLQTLGEGEFGKVKLGVHADYGVEVAIKLIRRGDLQEEAHASKVEREINVLKTLKHPNIVRMFDVLDTHKYIGIVLEFAGGGELFEYILANEYLKDKEGQRIFAQLISGVDYLHKKGVIHRDLKLENLLLDKNRNLIITDFGFANQFDLSKGDLMSTSCGSPCYAAPELVVLDTPYHGSAVDIWSCGVILYAMLAGYLPYDDDPDNPDAGNVVELYRYIMNTELHYPDHVSPLGKNLLQHMLILHPEHRIKIPVIVKHPWLKSYHDMFNKSVEECEAAFQDAMYRKSRQARKELQERRRVQTQARESLQTKERAHVQRSQSSAPGTIINAAALDQIRRRPHSAMPGSTPLPEIIAKHSESVDDVALTMRSATPPTALSQPTEIRSPTTESPRPRSESMAPRLSFTTSVSTPTAMTVETPSSVPVQSPTDALPPAAMTVMQPSVEAAPPMRDHKNRNTIQVEHAGEGLHDRAKEAFDANHGRADGSMETTSTADTGMVASSLLDVKREESTDIEMESGSSDSEQPKPANDGISQQPGEKSMDIPPIVPITIPLAPPAESGTATAANDSSQVLEPQEKLSPALVEHGSASIDEMASPSTPRVSTSVEQEPVNITPRAKMRAPPVATTPKASLVNERKRHGSMPPPMGPSFVSDSRPESSLTATGLPKLPKKDRYRKGMSLDKFGLAKLLGHASQAHTTVHGEGKMAPPSASSSALALQHQLQQHGGQSQAVSESDSVKKSRRRTLQFGFHSRKDSKASSAAVATPGTPLMDKDTNGENRLSSITGGTASLRDKRRKTVQIGLSTQSEQKDTTVNVPGLSSSGHLVKNPATEPPQGISIGPVVGTDASALSQSSPSAVALEAFAAQQGHYPSYRGSSSRASKVMDWFRRKTFVKETLPEPKSPVIKSDSQSSFVRIGEVASPASKTQESAQASTVSQENTDKAEEKIDSTADQENAAKTTPTKSPVLPQPIGATATTPSVMITPPRPTAATTPTIGSSTQQSPPTTIRTRSASTFTFDESKIRVHTGLVDQSALSTKPPQDVFVEVIQVLRGMGVEMKRESDFKLRCTRAKKKAAGTSIGLGSVVSTGSGMSPFSIMNNASASKTDSRGLPRPTSPSAVANRSSAGIKGLLRRGSSRSSAHPARLTRTGDEVPNPPSQSTPNLELPESSMASKPEPLYGKELMDAGDEVKFTVELCKMKNLPGLFILKIKRTKGNLWSFKFIYQTVIERTTTLTH

SEQ ID NO: 22513 - protein, 261 aa, Oryza sativa
MESDCQFLVAPPQPHMYYDTAAAAVDEAQFLRQMVAAADHHAAAAGRGGGDGDGGGGGGGGGERKRRFTEEQVRSLETTFHARRAKLEPREKAELARELGLQPRQVAIWFQNKRARWRSKQIEHDYAALRAQYDALHARVESLRQEKLALADQVDELRGKLNERQDQSGSCDGGGAEGDDDDKRNSVMNASSSGLVEEDYVSCLAVPVVDVSEDGSAACGGSSYEYDHHLDYLGGGQLPDPFCGMPDLWEIWPMVEWNAVA

SEQ ID NO: 22514 - protein, 84 aa, Oryza meridionalis
ARYVKFHWKPTCGVSCLMDDEATLVGGKNHSHATQDLYDSIAAGNFPEWKLFVQVIDPEEEERFDFDPLDDTKTWPEDEVPLRP

SEQ ID NO: 22515 - protein, 495 aa, Arabidopsis thaliana
MFVNFKYFSFFIRTKMDGVTGGGTNIGEAVTAPPPRNPHPATLLNANSLPPPFLSKTYDMVEDPATDAIVSWSPTNNSFIVWDPPEFSRDLLPKYFKHNNFSSFVRQLNTYGFRKVDPDRWEFANEGFLRGQKHLLKKISRRKSVQGHGSSSSNPQSQQLSQGQGSMAALSSCVEVGKFGLEEEVEQLKRDKNVLMQELVKLRQQQQTTDNKLQVLVKHLQVMEQRQQQIMSFLAKAVQNPTFLSQFIQKQTDSNMHVTEANKKRRLREDSTAATESNSHSHSLEASDGQIVKYQPLRNDSMMWNMMKTDDKYPFLDGFSSPNQVSGVTLQEVLPITSGQSQAYASVPSGQPLSYLPSTSTSLPDTIMPETSQIPQLTRESINDFPTENFMDTEKNVPEAFISPSPFLDGGSVPIQLEGIPEDPEIDELMSNFEFLEEYMPESPVFGDATTLENNNNNNNNNNNNNNNNNNNNTNGRHMDKLIEELGLLTSETEH

SEQ ID NO: 22516 - protein, 85 aa, Oryza barthii
KARYVKFHWKPTCGVSCLMDDEATIVGGKNHSHATQDLYDSIAAGNFPEWKLFVQVIDPEEEERFDFDPLDDTKTWPEDEVPLRP

SEQ ID NO: 22517 - protein, 528 aa, Glycine max
MEAKGVRFLAYQSIFSSVGSGDFDGVKKLVEEVKKEEGSSLSDVMSLQNDAGETALYIAAENNLQEMFSFLLSICHFEVVKIRSKADMNAFHVAAKRGNLDIVRELLNIWPEVCKLCDSSNTSPLYSAAVQDHLDVVDAILGVDVSSMFIVRKNGKTSLHNAARYGVHRIVKTLIARDPGIVCIKDKKGQTALHMAVKGQCTSVVEEILLADPSILNERDKKGNTALHMATRKCRSQIVGLLLSYSAVDVNAINKQQETALDLADKLPYGDSALEIKEALAEYGAKHARYVGKEDDAMELKRTVSDIKHEVQSQLIQNETTRRRVSGIAKELKKLHREAVQNTINSVTLVAVLFASIAFLAIFNLPGQYITDEGKEIGKAKIADHVSFQVFCLLNSTSLFISLAVVVVQITLVAWDTRAQKQIVSVVNKLMWAACACTCGAFLAIAFEVVGKKTWMAITITLLGVPVLVGTLASMCYFVFRQHFGIFRSDSQRRIKRASGSKSFSWSYSANISDLDEYNSDIEKIYAL

SEQ ID NO: 22518 - protein, 355 aa, Paxillus involutus
MAASTYHNDLLAPFLALPQGDKVQAEYVWIDGDSGLRSKTTTVSKKVTDIGQLRIWDFDGSSTNQAPGHDSDVYLRPAAIFKDPFRGGDNILVLAETYNSDGTPNRTNYRHHASKVMDLAKDSVPWFGLEQEYTLFDADGSPFGWPKGGFPGPQGPYYCGAGTGKVVARDLIEAHYRACLYSGINISGINAEVMPSQWEFQVGPYEGISMGDHLWMARYLLVRIAEQWGIKVSFHPKPLQGDWNGAGCHTNYSTLPMREPGGMKHIDAAIEKLAKRHNEHIAVYGEDNELRLTGRHETGHIGDFSSGVANRGASIRVPRHVAAQGYGYLEDRRPASNIDPYRVTGIIVETTLLDK

SEQ ID NO: 22519 - protein, 84 aa, Oryza glaberrima
ARYVKFHWKPTCGVSCLMDDEATIVGGKNHSHATQDLYDSIAAGNFPEWKLFVQVIDPEEEERFDFDPLDDTKTWPEDEVPLRP

SEQ ID NO: 22520 - protein, 539 aa, Paxillus involutus
MSLSKHVNAESLIRESKDKKHPHHHRSTTTSISTISYGARYGTQSIPKFHLPSKGTSAENAYQLIHDELALDGSPSLNLASFVHTWMPEPANKLMVENMSKNLIDQDEYPMTQLIHTRCVSILADLWHAPSTKQAIGTATTGSSEAIQLGGLAMKRIWQEHRKAAGKSIHEPGPNIVMGANAQVALEKFARYFEVECRLVPVSAESKYRLDPKKAMEYIDENTIGVFVILGSTYTGHYEPVKEMADLLDEYEKQTGHSVPIHVDGASGAFIAPFAQPKLLWDFKIPRVVSINTSGHKFGLAYVGVGWVVWRSKEYLPKDLIFELHYLGSVEYSFSLNFSRPAAPIIAQYFNFLHLGFEGYRAVALDDLKNARLLSRVLEGTGWYTVLSDIHRQKSNSLLTKGMQATIGIDEEHLENYMEGLPVVSFRFSDKFQEQYPEIQQKWIQTLLRAKGWIVPNYELPPNLEKVQILRVVVRENCTEVLIDRLVTDIVEITQNLVDRDSSTHALDMLGNGQHCKTVIGQMEEGSGSRSSGTYAKQC

SEQ ID NO: 22521 - protein, 86 aa, Oryza glaberrima
GKARYVKFHWKPTCGVSCLMDDEATIVGGKNHSHATQDLYDSIAAGNFPEWKLFVQVIDPEEEERFDFDPLDDTKTWPEDEVPLRP

SEQ ID NO: 22522 - protein, 327 aa, Halobacterium sp. NRC-1
MGRMIDGDWRTEADMNEHSDDGAFERDTTSFRHWVGDDVPPAAGRYHLYVSYACPWAHRTLLVRALLGLEDAISVSVVDPVRYDQGWTFDPEKPGCTPDHVFGGTHLRDVYTEADPEYTGRVTVPVLYDTDADTIVNNESEEIMRMLDVAFDDHAARDVDLYPEGYRDEVDRLIEDIYDPINNGVYRAGFADSQRAYDNAVDDLFEALAHYDDVLAEQRYLAGDVLTEADVAMFTTLYRFDEVYHTHFKCNRKRISDYDNLWPYLRELCQLPGVADTLYMEHVKQHYYRSHGHLNPKRLVPTGPNPAFFAPHDRDQLPGGPPAALNQ

SEQ ID NO: 22523 - protein, 402 aa, Xanthomonas axonopodis pv. citri str. 306
MRRVVITGMGITSCLGNDLDTVSSALRESRSGITALPDHAEAGLRSQVGGAVALDLDSLIDRKLKRFMGDASAYAYLAMRDAIADAGLDAELVSGLRTGVIAGSGGGSSQWQVETADLLRNRGVRKVGPYMVPRTMCSSVSASLATAFKIRGLSYSLSAACATSAHCIGAAADLIRHGAQDVMFAGGGEELHWTMSVMFDAMGALSTGSNDRPAVASRPYDAQRDGFVIGSGGGMLVLEDYDHAIARGARIHAELLGYGVTSDGADMVAPSGEGAVRCMRMAMQGLQRPIDYLNTHGTSTPLGDVTELGAVREVFGDNVPPLSSTKGLSGHSLGAASVHEAIYSLLMLRDGFMAGSAHIDDLDPRAEGFPILRQTQDATLNTVMSNSFGFGGTNAALVFGRT

SEQ ID NO: 22524 - protein, 73 aa, Brassica napus
  misc_feature (47)..(47): Xaa can be any naturally occurring amino acid
  unsure (1)..(73): unsure at all Xaa locations
MFKQFLSKLPRKSSKPDSTSDPSGSSVVRSNSVKRMSSAVFPSSVVXGIEPLVPFKDVPTSEKLNLFVSKLSL

SEQ ID NO: 22525 - protein, 294 aa, Glycine max
MEDMNNMSGEITLPGFRFHPTEEELLDFYLKNMVVGKKLRYDVIGFLNIYQHDPWDLPGLAKVGEREWYFFVPRDKKHGSGGRPNRTTEKGFWKATGSDRKIVTLSDPKRIIGLRKTLVFYQGRAPRGCKTDWVMNEYRLPDNCKLPKEIVLCKIYRKATSLKVLEQRAALEEEREMKQMVGSPASPSSTDTMSFSSPQEEQNMPLPLLQHVLKKESETEDMVVPKQEKITNQLVLKDTNKSTCGTSLQMPFGKEKLPDLQLPMLSDWTQDTFWAQLNSPWLQNFTPTNILNFY

SEQ ID NO: 22526 - protein, 264 aa, Poa pratensis
MSRKKKVRRRSTGPDSVAEIIKKWKEQNQKLQEENGSRKAPAKGSKKGCMAGKGGPENSNCKYRGVRQRTWGKWVAEIREPNRGNRLWLGSFPTAVEAAHAYDEAARAMYGATARVNFSERSPDANSGCTSAPPVLMSNGPTAVSYPSDEKDESESPPSLMSDAPTATLHRSDAKGEPESAGTLVHEVKTEVSNDSRSIREERKTVEVFQPEGKALHKEEKVSYDYFNVEEVLDMIIVELSADRKMEVHEEYQDGDDGFSLFSY

SEQ ID NO: 22527 - protein, 593 aa, Xanthomonas axonopodis pv. citri str. 306
MSFDPPFSHGSTASGLSRRRFVQGLALGGIAASGLWRNDARAAAQANTPVLRGSSQSLQIGRLPVNFTGRPRSAITVNQSLPAPTLRWREGDTVSVRVRNALTDQPTSVHWHGLLLPANMDGVPGMSFDGIAPGQEYHYRFALRQSGTYWYHSHSMFQEQSGLYGAIVIDPLVPPPYRHDREHVVLLSDWTDLDPAALFRRLKQMPSHDNYAQRTVGDFLRDARDDGLRATLADRGMWGRMRMTPTDLSDVNANTYTYLLNGVAPAGNWTGLFKPGEKVLLRFINGSSMTYFDIRIPGLRMTVVAADGQYVHPVSVDELRIAAAETFDVIVEPLGQDAFTLFAQDMGRTGFACGTLAVQHGLQAPIPALDPRAILTMQDMGHGDGMDHALPAMHGAPGMLAAHGMHTMHSHDDAKAHDKAPHHSASETGNPLIDMRSNATAPRLDDPGVGLRDNGRRVLCYADLHSVFDDPDGREPGRDIELHLTGHMEKFAWSFDGIAFASAQPLQLQYGERLRIVLVNDTMMQHPIHLHGMWSDLEDAHGNFQVRKHTIDMPPGTRRTYRVRADALGRWAYHCHLLYHMEAGMMREVRVEA

SEQ ID NO: 22528 - protein, 163 aa, Triticum aestivum
  misc_feature (63)..(63): Xaa can be any naturally occurring amino acid
  unsure (1)..(163): unsure at all Xaa locations
RKSQSKQHRQLVSIVRRSNVFDPFADLWADPFDTFRSIVPAISGGSSETAAFANARVDWKETXPEAHVFKADLPGVKKEEVKVEVEDGNVLVVSGERTKEEEDKNDKWHRVERSSGKFVRRFRLPEDAKVGEVKAGLENGVLTVTVPKAEVKKPEVKAIEISV

SEQ ID NO: 22529 - protein, 367 aa, Zea mays
MTSMSSDFLSREIATQSLHTSSLHVSCHCLSGKDISRHCLSVWASFLKGATFLRRFRIFHSSSSLLRRDPSCVSRALRTVLEHDLAMAAAQVVAKGSVVSPCGNRAVPGLLGRRRDVVAAQMTPSAVQIGGSWRKNMFPGVRLALGTRRSRPASRSFSASPVQMNMNLAIGKSMRWWEKGLQPNMREIESAQDLVDSLTNAGERLVVVDFFSPGCGGCRALHPKICQFAERNPDVLFLQVNYEEHKSMCYSLRVHVLPFFRFYRGAQGRLCSFSCTNATIKKFKDALAKHKPDRCTFGPTRGLDESELLALAANKELQFTYTREPELTPMGDTPGEVIAPEPAKLPAATKPLVKLGSEERSLVSPGR

SEQ ID NO: 22530 - protein, 316 aa, Oryza sativa
MAAAVAVAGPSMEVEQDLPGFRFHPTEEELLDFYLSRVVLGKKLHFNIIGTLNIYRHDPWDLPGMAKIGEREWYFFVPRDRKAGNGGRPNRTTERGFWKATGSDRAIRSSGDPKRVIGLKKTLVFYQGRAPRGTKTDWVMNEYRLPDYGAARAAAPPPKEDMVLCKIYRKATPLKELEQRASAMEEMQRGSSHGDYTATRASLVHDASASTGDDYFSSDDVHDSGFLIQSSSSSAAPSGSSSKNGGAGAPREAKKEEADVTVTVASATSLQLPAVSQLPSLQLPAMDWLQDPFLTQLRSPWQDQHCLSPYAHLLYY

SEQ ID NO: 22531 - protein, 200 aa, Zea mays
MDPNYGEWNFSEIKIAKALIASHNAKSSYSSDMNNKQTDIIDMLQARFPTKEKHKVTKLYVDLMLEKMQMILSGNQHATMGKKLVNDKFGMSIEDPAIDFMGGDLVEKRTAKRKAREDMNTHLDSQKERRYRRFWTIDEHRNFLYGLRAYGRSDWKNISKHFVTTRTPMQISSHAQKYLHRMVFFARRQRSSINDIGPSR

SEQ ID NO: 22532 - protein, 93 aa, Arabidopsis thaliana
  misc_feature (25)..(25): Xaa can be any naturally occurring amino acid
  unsure (1)..(93): unsure at all Xaa locations
YRIRHELGYPFGLMASILFGRHHKXILSSPKPKLFVMGTQDGFTSVSQLKKKLKSAVGRTETHLIEGVSHFQMEGPEYDSQVTDIICKFISSL

SEQ ID NO: 22533 - protein, 949 aa, Shigella flexneri 2a str. 2457T
MKYLASFRTTLKASRYMFRALALVLWLLIAFSSVFYIVNALHQRESEIRQEFNLSSDQAQRFIQRTSDVMKELKYIAENRLSAENGVLSPRGRETQADVPAFEPLFADSDCSAMSNTWRGSLESLAWFMRYWRDNFSAAYDLNRVFLIGSDNLCMANFGLRDMPVERDTALKALHERINKYRNAPQDDSGSNLYWISEGPRPCVGYFYALTPVYLANRLQALLGVEQTIRMENFFLPGTLPMGVTILDENGHTLISLTGPESKIKGDPRWMQERSWFGYTEGFRELVLKKNLPPSSLSIVYSVPVDKVLERIRMLILNAILLNVLAGAALFTLARMYERRIFIPAESDALRLEEHEQFNRKIVASAPVGICILRTADGVNILSNELAHTYLNMLTHEDRQRLTQIICGQQVNFVDVLTSNNTNLQISFVHSRYRNENVAICVLVDVSSRVKMEESLQEMAQAAEQASQSKSMFLATVSHELRTPLYGIIGNLDLLQTKELPKGVDRLVTAMNNSSSLLLKIISDILDFSKIESEQLKIEPREFSPREVMNHITANYLPLVVRKQLGLYCFIEPDVPVALNGDPMRLQQVISNLLSNAIKFTDTGCIVLHVRADGDYLSIRVRDTGVGIPAKEVVRLFDPFFQVGTGVQRNFQGTGLGLAICEKLISMMDGDISVDSEPGMGSQFTVRIPLYGAQYPQKKGVEGLSGKRCWLAVRNASLCQFLETSLQRSGIVVTTYEGQEPTPEDVLITDEVVSKKWQGRAVVTFCRRHIGIPLEKAPGEWVHSVAAPHELPALLARIYLIEMESDDPANALPSTDKAVSDNDDMMILVVDDHPINRRLLADQLGSLGYQCKTANDGVDALNVLSKNHIDIVLSDVNMPNMDGYRLTQRIRQLGLTLPVIGVTANALAEEKQRCLESGMDSCLSKPVTLDVIKQTLTVYAERVRKSRDS

SEQ ID NO: 22534 - protein, 120 aa, Brassica napus
MTKNSFKLSNPLEIRMAESTRIREKYQDRVPVIVEKAEQSDVPDIDKKKYLVPADLTVGQFVYVVRKRIKLGAEKAIFVFVKNTLPPTAALMSAIYEEHKDEDGFLYMTYSGENTFGSAC

SEQ ID NO: 22535 - protein, 490 aa, Podospora anserina
MLSQRLLLGRTAVRSALKPSGCAEEKDLVIIGGGVAGYVAAIKAGQEGMKVACIEKRGTLGGTCLNVGCIPSKSLLNNSHLYHQILHDTKHRGIEVGDVKLNLQQLMKAKETSVTGLTKGVEFLLKKNGVEYIKGTGSFQDEHTVKVELNDGGETSVTGKNILIATGSEVTPFPGLTIDEQTVISSTGAIALEKVPEKLVVIGGGIIGLEMASVWSRLGSKVTVVEYLDQIGGPGMDTEVAKGIQKILKKQGITFKTGTKVLSGEKTGDEVKVQTEAAKGGKEETLDADVVLVAIGRRPYTGGLGLENIGLELDERGRVIIDAEYRTKIPHIRCVGDATFGPMLAHKAEEEAVAVVEYIKKGYGHVNYGCIPSVMYTFPEVAWVGQSEQDLKKADIPYRVGTFPFSANSRAKTNLDTEGFVKILADPETDRLLGIHIIGPNAGEMIAEGTLALEYGASSEDIARTCHAHPTLSEAFKEAAMATHAKAIHF

SEQ ID NO: 22536 - protein, 286 aa, Petunia x hybrida
MAKNVGSEGSFTTKDYQDPPPAPLIDPAELTQWSFYRALIAEFIATLLFLYITVLTVIGYKSESDPAKNADPCSGVGILGIAWAFGGMIFILVYCTAGISGGHINPAVTFGLFLARKVSLIRAVMYMVAQCLGAICGVGLVKAFQSAYYHRYDGGANMLSDGYSKSVGLSAEIIGTFVLVYTVFSATDPKRNARDSHVPVLAPLPIGFAVFMVHLATIPITGTGINPARSLGAAVIFNQDKAWKDHWIFWVGPFIGAAIAAFYHQFILRAGAAKALGSFRSSTSQA

SEQ ID NO: 22537 - protein, 408 aa, Triticum aestivum
  misc_feature (69)..(69): Xaa can be any naturally occurring amino acid
  misc_feature (79)..(80): Xaa can be any naturally occurring amino acid
  misc_feature (82)..(82): Xaa can be any naturally occurring amino acid
  misc_feature (86)..(86): Xaa can be any naturally occurring amino acid
  misc_feature (100)..(100): Xaa can be any naturally occurring amino acid
  misc_feature (121)..(121): Xaa can be any naturally occurring amino acid
  misc_feature (135)..(135): Xaa can be any naturally occurring amino acid
  unsure (1)..(408): unsure at all Xaa locations
MASPSVFAGIAQGPEDPILGVTVAYNKDPSPVKVNLGVGAYRTEEGKPLVLNVVRRAEQMLIQNESRVXEYLPITGLAXXHXLSAXLIFGADSPAIQENXVATVQCLSGTCSLRVGSEFLXKHYHERTIYIPQPXTWGNQPKVFILPGLTARSYRYYDPATRGLDFQGLLEDLSSAPSGAIVLLHACAHNPTGVDPTLEQWEQIRQLMRSKALLPFFDSAYQGFASGSLDKDAQSVRMFVADGGELLVAQSYAKNMGLYGERVGALSIVCGSADIAVKVESQLKLVIRPMYSNPPLHGASIVATILKDSAMFDEWTVELKAMADRIISMREQLFDALKIRETPGDWSHIIKQIGMFTFTGLNSEQVAFMRQEYHIYMTSDGRISMAGLSSRTVPHLADAIHAAVTKLK

SEQ ID NO: 22538 - protein, 860 aa, Oryza sativa
MDLAINPFSSGTRLRDMIRAIRACKTAAEERAVVRRECAAIRAAISEGDQDYRHRNMAKLMFIHMLGYPTHFGQMECLKLIAAAGFPEKRIGYLGLMLLLDERQENAMFCFEHLVVLNADRDLNHSNQFIVGLALCALGNICSAEMARDLSPEVERLLQSREPNTKKKAALCSIRIVRKVPDLAENFMGSAVSLLKEKHHGVLISAVQLCAELCKASKEALEYLRKNCLDGLVRILRDVSNSSYAPEYDIAGITDPFLHIRVLKLMRILGQGDADCSEFVNDILAQVATKTESNKNAGNAILYECVETIMGIEATSGLRVLAINILGRFLSNRDNNIRYVALNMLMKAMEVDTQAVQRHRATILECVKDADVSIRKRALELVYLLVNDANAKSLTKELVDYLEVSDQDFKDDLTAKICSIVEKFSQDKLWYLDQMFKVLSLAGNYVKDDVWHALIVLISNASELQGYSVRSLYKALLACGEQESLVRVAVWCIGEYGEMLVNNVGMLDIEEPITVTESDAVDAVEVSLKRYSADVTTRAMCLVSLLKLSSRFPPTSERIKEIVAQNKGNTVLELQQRSSLLERMPVIDEASYLAKRAASTQATISSDKLAAAATPGSSLKLPNGVAKPPPAPLADLLDLSSDDAPATTSAPTTAPNDFLQDLLGIGLTDTSTAGGAPSASTDILMDLLSIGSSPVQNGPPTVSNFSLPGQAETKVAPVTPQVVDLLDGLSSSTSLSDENTAYPPITAFQSAALKITFNFKKQSGKPQETTIHASFTNLTSNTFTDFIFQAAVPKFIQLRLDPASSNTLPASGNDSVTQSLSVTNNQHGQKPLAMRIRITYKVNGEDRLEQGQINNFPAGL

SEQ ID NO: 22539 - protein, 250 aa, Petunia x hybrida
MPINQISLGSHEELRHSGALKAALAEFISTLIFVFAGQGSGMAYNKLTADGAASPAGLISASLAHAFGLFVAVSVGANISGGHVNPAVTFGAFIGGNITFFRGILYIIAQLLGSTAACFILEFTTGMSTGSFALSDGVGVWNALVFEIVMTFGLVYTVYATAVDPKKGDLGVIAPIAIGFIVGANILAGGAFTGASMNPAVSFGPSLVSWTWTHQWIYWAGPIIGGGLAGVVYELLFINHSHEPLPSGDF

SEQ ID NO: 22540 - protein, 301 aa, Oenococcus oeni PSU-1
MKNKDHIFKYFLIGLLSAIIGATVVLGCFYLFYLAPAQNKAAKSSSIAAGMTKVVNLTGTSSSQATKAYNKVKNAVVTVENYQKPSTEASDYFFEWFGSQSGGSSSSSSSSTEDQLAAEGTGLIYETDGNYSYIVTNNHVIKGANEIEIIMANGTKVKAKLIGKNATKDIAVLRISSASVTTTGTFVNSSKVQAGQQVLAIGSPLGSDYASSLTSGIVSATNRQIDDSPIKLSAIQTDVALNPGNSGGPLINMAGEVIGINSMKISSTEDGSEDVEGMSFSIPSNTVVATIKSIISSASGN

SEQ ID NO: 22541 - protein, 152 aa, Arabidopsis thaliana
  misc_feature (3)..(3): Xaa can be any naturally occurring amino acid
  misc_feature (27)..(27): Xaa can be any naturally occurring amino acid
  misc_feature (91)..(91): Xaa can be any naturally occurring amino acid
  misc_feature (100)..(100): Xaa can be any naturally occurring amino acid
  misc_feature (118)..(118): Xaa can be any naturally occurring amino acid
  misc_feature (132)..(132): Xaa can be any naturally occurring amino acid
  unsure (1)..(152): unsure at all Xaa locations
MSXDEAVAAPVVPPVAEAAVIPEDMDXSTALELTVRKSRAYGGVVRGLHESAKLIEKRNAQLCVLAEDCNQPDYVKLVKALCADHSIKLLXVPSAKTLGXEWAGLCKIDSEGNARKVXGCSCLVIKDFGEGXTDLNIARRFYLIKKASFRFF

SEQ ID NO: 22542 - protein, 411 aa, Anaplasma platys
MKENAVLMCGDKKVSLPMLSGTDGIQLIDITTLYRDHKVLTYDPGFMSTAACSSEITFIDGEKGILRHRGLDIADLIGIKGGFCSVAHLLLYGVLPSDTVFEQFSAAIGAQHALSSDVLGVISSFRRDAHPMAILMACFSTLAAKYHGDNRGNEELAVLAIAQVPSLVAAIYRHRMGLELVSPDTSLSYTGNFVKMMFGALEKTRADAIEEALDAIFIMHADHEQNASTATVRMAGSAGTELFACLAAGTATLWGPAHGGANEAVIRMLESIGSPDKVEEFIGFVKDNNSKVRLMGFGHRVYKSYDPRAKILGQISRSVLDNLGCSDELLGVAEELERCALQDEYFVERKLYPNVDFYSGIVLRAMGVPVEMYTTFFALARTAGWVSQWCELLRGSESLKICRPRQLYAGK

SEQ ID NO: 22543 - protein, 238 aa, Arabidopsis thaliana
MATREERDKYRSVLEDAGQVQWRYDNPPDFNSVNQLFEEGQTKVWPEGSLEETVQNAIKSWEMEFSHKIRLQDFKTINPEKFKLFVNGREGLSAEETLRLGSYNALLKNSLPEEFQYYKPEEESFESSHDAFRSALPRGFAWEILSVYSGPPVIAFKFRHWGYFEGTFKGHAPTGEMVQFLGLGVLKVDESLRAEEIEIYYDPGELFGGLLKGPPISETKTTDSGDNTAEKQSCPFTH

SEQ ID NO: 22544 - protein, 619 aa, Zea mays
  misc_feature (149)..(149): Xaa can be any naturally occurring amino acid
  misc_feature (173)..(173): Xaa can be any naturally occurring amino acid
  unsure (1)..(619): unsure at all Xaa locations
EAQARHGEQGTRGVVAPSEAAATPSPPFVRPFPFSFPFASLAFLLPTPLHSNATASPRFIGRRPRHIATVSHRRGHPFSLVHRIAPAPSAIDPSVPRCASAMQFSSVLPLEGKACMSPVRRGSGGYGSERMRINCCSIRRNKALRRMCXVQGGAVSSTQCVLTSDAGPDTLVXRTSFRRNYADPNEVAAVILGGGTGTQLFPLTSTRATPAVPIGGCYRLIDIPMSNCFNSGINKIFVMTQFNSASLNRHIHRTYLGGGINFTDGSVEVLAATQMPGEAAGWFQGTADAVRKFIWVLEDYYKHKAIEHILILSGDQLYRMDYMELVQKHVDDNADITLSCAPVGESRASDYGLVKFDSSGRVIQFSEKPKGAALEEMKVDTSFLNFAIDSPAEYPYIASMGVYVFKRDVLLDLLKSRYAELHDFGSEILPKALHEHNVQAYVFTDYWEDIGTIRSFFDANMALCEQPPKFEFYDPKTPFFTSPRYLPPTKSDKCRIKDAIISHGCFLRECAIEHSIVGVRSRLNSGCELKNTMMMGADLYETEDEISRLLAEGKVPIGVGENTKISNCIIDMNARVGRNVSITNKEGVQEADRPDEGYYIRSGIVVVLKNATIKDGTVI

SEQ ID NO: 22545 - protein, 190 aa, Glycine max
  misc_feature (132)..(132): Xaa can be any naturally occurring amino acid
  misc_feature (157)..(157): Xaa can be any naturally occurring amino acid
  unsure (1)..(190): unsure at all Xaa locations
LSQPPDTINGSIRVTVQGEVIEFCFGEEHLCFQTLQRFTAATLEHGMHPPVSPKPEWRKLMDEMAVVATEEYRSVVVKEARFVEYFRSATPETEYGRMNIGSRPAKRRPGGGITTLRAIPWIFSWTQTRFHXPVWLGVGAAFKFAIDKDVRNFQVLXEMYHEWPFFRVTLDLLEMVFAKGDPRIAGLYDE

SEQ ID NO: 22546 - protein, 550 aa, Zea mays
SSEETGDRKVGTFSQVNSSKELTSQERTSLMCPSTESVDIIAGSHRILDTPLEDALTVPQGSLSGASAADRTSQYGEHNDDPSKLATHQENLVVSDINVPPNSSCSKAIDDIVEFGDMCDVQIEEERVTKFQPKVQTKLLKEIAKSRKTNQKVETSTVDVVTQNGKGNNIQTRLHGDQVQDPKSHESVQIPDSEELLATDNSKGCNLAKLNNVLEESVQEETIAKFRSDLQPKPRKASSHVAVIKINGAACAPIVGVCDSNNDMYKEPKDQETITGPVVWSPQAVHADVDLDNHNEPINPPIDGTQSMIGEVPSTAFTGREKGKSKSVSFALSDASGVATPIDTNSEMGNIGDSCSDKLTDENLSNSSRHIAEKHSITKDQYSNEQDHEREPLDHAVQQQPKSDVGERASSMKRRCRKKVQKVGTPNHTVDDYFGEDCVEPSLAEEDNDTGDHYTTGNKHKARKKSRGGVEESQQQKAQKNKSKVSSRGRKRTLKDESTEKPEKKLTHRIRQRIPKEVKVLLETPREQIKPMKLCASHLRLLQEARERVD

SEQ ID NO: 22547 - protein, 87 aa, Leersia perrieri
KARYVKFHWKPTCGVSCLMDDEATLVGGKNRSHATQDLYDSIAAGNFPEWKLFVQVIDPEEEERFDFDPLDDTKTWPEDEVPLRPVG

SEQ ID NO: 22548 - protein, 375 aa, Synechococcus elongatus PCC 6301
MLLLSQELPETVRPAVRDRHAQIVAWRQQLHRRPELGFQEQETAAFIAARLTELGVSFQAGVAGTGIVAEIAGQRSGPTLAIRADMDALPILEANEIPYRSEIDGRMHACGHDGHVAIALGTAACLQANSDFAGRVKIIFQPAEEGPGGAAPMIAEGVLENPAVDAIIGLHLWNYLPLGKVGVRSGPLMAAVELFDLTIQGRGGHAAIPQNCIDAVLVASQIVTLLQSIVSRNVDPLHSAVVTIGSLHAGTTYNVIADRAQLKGTVRYFDDRYQGFLQERIEQIVAGVYNSHGATYELNYRKLYPAVINDSAIAVLVRSVAEEVLEPPLGVVPDCQTMGAEDMSYFLQKVARLLLLFGQRQPRSRLEFSASPSPL

SEQ ID NO: 22549 - protein, 283 aa, Ralstonia solanacearum
MRRIQHRTQGNAMNDTFTMPAFGLGTFRLTGEAAIDSVRTALELGYRAIDTAQIYANEAEVGQAIAASGVPRRDLFLTTKIWVDNLAADRLIPSLKASLARLRTEQVDLALIHWPSPGGAVPMAEYLGALDEARREGLTRALGVSNFTVALLREAIETVGAAQIATNQIELHPYLQNRKVAAFAQSQGIHVTSYMTLGVGRVLADPVLADIARAHGATPAQVVLAWAMQLGCSVIPSSTRRANLQSNLAARDLRLTGDDMARIGALDRGERIADPAGIAPDWD

SEQ ID NO: 22550 - protein, 437 aa, uncultured crenarchaeote DeepAnt-EC39
MKNNIEIYKSKTRKSSKLFEKSKKYHVNGVHHNIRFFEPYPFVTKSANSKFLVDIDSNKYVDYWMGHWSLILGHKPKKIINVIKKQLNYDWMHGVLNKNSIELSEKISKVVPVAEKIRYASTGTEATMYAVRLARTVTKRKIIAKIDGGWHGYTTDLLKTVNWPFSKSESSGLTDEKYIISLPYNDLENSIKILKSKKNELAAVIIEPVLGGGGCIPATKEYMFGIQEFCRKNKTVFILDEIVTGFRFRFGCLYNTMKLDPDLLTLGKIVGGGLPIGVICGKDELMKYANTEIYSKIERAYIGGGTFSANPLTMIAGNSMLSTIKNKSNQLYRKLNSFGTETRKMLDKKFDGKVITTGMGSLFLTHFLNDSICEINNATDVAKCNIKKLHDYHFHMIANDDIFFLPGKLGAFSDVHTKSDIKTMERSTDEFLTKFKK

SEQ ID NO: 22551 - protein, 210 aa, Paxillus involutus
MPPPHYDFLIKLLLIGDSGVGKSCLLLRFCDDAWTPSFITTIGIDFKIRTIELDGKRIKLQIWDTAGQERFRTITTAYYRGAMGILLVYDVTDERSFNNIRTWHANIEQHASDGVNKILIGNKSDWTDKRAVTEDQGRELANELGIRFMETSAKVNDGVEDAFFTLARDCKTRLIDSQADATGSPGSAGNADGSVKVNQPTTQAAGGCCS

SEQ ID NO: 22552 - protein, 90 aa, Oryza coarctata
RDGKARYVKFHWKPTCGVSCLMDDEATLVGGKNHSHATQDLYDSIAAGNFPEWKLFVQVINPEEEERFDFDPLDDTKTWPEDEVPLRPVG

SEQ ID NO: 22553 - protein, 171 aa, Triticum aestivum
MSDQTAAAAGAAGGDALFSRCLLALYVISPVTVFLLRFVSAPYGKLSRPGWGPAIPAALAWCAMESPTLWLPPLVSPLPLLLAAAASVSPLAALPPALYALHYVNRTVLHPLRILRLRRAAAPVPVLVAACAFGFNLLNAYVQARSWALHADRPASGFALPRCLAGLDLFA

SEQ ID NO: 22554 - protein, 285 aa, Glycine max
SYHKHTHLLVFFQISPVPVPRTKAKQKEEMAGESYEEAIASLTKLLSEKADLGGVAAAKIKDLTAELDAAGSKPFNPEERIRTGFIQFKNEKFEKNPDLYGELAKGQSPKFMVFACSDSRVCPSHILDFQPGEAFMVRNIANMVPPYDKTKYSGAGAAIEYAVLHLKVENIVVIGHSCCGGIKGLMSIPDDGTTASEFIEQWVQICTPAKSKVKAGKSDLSFSEQCTNCEKEAVNVSLGNLLTYPFVRDGVVNKTLALKGAHYDFVNGTFELWDLNFKLFPTVSV

SEQ ID NO: 22555 - protein, 488 aa, Arabidopsis thaliana
MRLIVPLRGVIQGRGGLFVGSLIPCCLFYFLQLYLKRRRPPPSDPTDLPRTFSRTNLFSRGNSIGRVRVSSRAVPVAKPSDSPYYIGLERVKTDPYDRITNTDGIIQLGLAESTRWMSENLMESMMQSDDGEFDISSIAMYKPFEGLLELRVAFADFMSRIMGGNVSFDPSNMVITAGGTPAIEVLAFCLADHGNAFLIPTPYYPGFDRDIKFRTGVELIPVHCRSSDNFTVTVSALEQALNQARKRGSKVSGILFSNPSNPVGNILSRETLCDILRFAQEKNIHVISDEIFAGSVYGDKEFVSMAEIAGSGEFDKTRVHIIYGLSKDLSIPGFRAGVIYSFHEDVVNAAKKLMRFSSVPVLVQRILISLLSDVRFIEGYMAAHRQRIRDKHIRFVEGLKQLGIPCAESGGGLYCWVDMSSLLTSYSEKGELELFEKLLTVAKINATPGTACYCIEPGWFRCCFTALADEDIPVIMERIRQLAESFRS

SEQ ID NO: 22556 - protein, 486 aa, Pichia angusta
MEMAYTQINIDQEERDFQKEVEEIKKWWAEPRLEGHQESLSGRGDCEKTVHHQKPQRFRHDGKEGVQVARGAPKNKTVSFTFGALDPIHVTQMAKYLDTIYVSGWQCSATASTSTSLHQILPLPYGHCSNKVQHSVFVFAQLFHDRKQRHERFSLSKEERAKLPYIDFMRPIIADADTGHGGITAIVKLTKLFIEAGAAGIHIEDQAAGTKKCGHMAGKVLVPIQEHINRLIAIRTSADIFGSDLLCVARTDSEAATLITSTIDTRDHYFIIGATNPDVEPLVEVMNRAEQEGAYGAELEEIEKQWTEKAGLKLFHEAVIDEIKASDIKNKDEAIKKFTSTVTPLSGHSHRQARELAKSILGKDIFFDWDAPRVREGYYRYQGGTQCAINRARAVRSVRRHCCGWRRSYQSTKQAKEFAEGVLAKYPEKWLAYNLSPSFNWNAAMSPADQETYIKKLADLGFICNSFSCWFHTTVPAVQRRGVPLL

SEQ ID NO: 22557 - protein, 300 aa, Gloeobacter violaceus
RIGRLVLRAGLDNPDLEFVGINDLVPPDNLAYLLKHDSTHGRFKGTVEAHPDGMVVNGRFIPCTAIKNPVELPWGSLGVDYVVESTGLFTGYDGASHHLAAGARRVVITAPTKDPEKVPTLLMGVNHDQFDPDQDLIVSNASCTTNCLAPVAKVIHERFGLAEGLMTTVHAMTATQPTVDGPSKKDWRGGRGAAQNVIPSSTGAAKAVTLVLPELKGRLTGMAFRVPVPNVSVVDLTFKTEQPTSYKAICAAMKEASENELAGILGYTEEQVVSSDFIGDAHSSIFDAGAGIELNSQFFK

SEQ ID NO: 22558 - protein, 490 aa, Ipomoea batatas
LNNNVLLSQSRKSLRLDGNKRKIKPGVAFSVLTRENGTETLTVEAPILERRRANPKNVAAIILPGGAGTQLFPLTNRAATPAVPLGGCYRLIDIPMSNCINSGVNKIFVLTQFNSASLNRHISRTYFGNGVSFGDGFVEVLAATQTQGETGMKWFQGTADAVRQFTWVFEDAKNKDIDNIVILSGDQLYRMDYMDLVQNHIERNSDITLSCATVGDSRASDFGLVKIDRRGRVVQFCEKPKGTDLKAMQVDTTLLGLPPQDARLNPYIASMGVYVFKTDVLLRLLRWRYPTSNDFGSEILPAAVMEHNVQAYIFRDYWEDIGTIKSFYDANLALTEEFPKFEFYDPKTPFYTSPRFLPPTKIDNCKIKDAIISHGCFLRECTVEHSIIGERSRLDCGVELKDTLMMGADNYETESEIASLLADGKVPIGVGENTKIRNAIIDKNVRIGKHVVITNKDGVQESDRPDEGFYIRSGITIIMEKATIRYGTVI

SEQ ID NO: 22559 - protein, 673 aa, Yarrowia lipolytica CLIB122
MFNLNTKSSKEPEVTEVAVDSTPSSPVTRESSPESSPDNSAVDLEKGKKSKFEMHDQTNLLPRSQLFLVFGAMAFCMLVSFMDQNGISVALPDIAKDLNATDTISWAGTSGLIANTVFQVLYGRLSDIFGRKLVFMIVVCTLVCADIGCACAQTSTQLYIFRAFSGIANGGMSCLTMIVVSDIVTLKERGKYQGILGACVGLGNTIGPFLGAAFTENVSWRAIFYLLAPMGGLCAVVIFFILPSKKPQGSAIQKAKAIDYPGLFCSSVALVFLLVPIAGGGSYYEWDSPMVISMLCIGGVFFIAFFVIEGFFAKLPMMPLRIFGTKALFALMMHSVLLGIAYYGDLYYLPMYMRNIRGWSSMKAAGMSCALVTTQAVTTVISGQYLSRMGRYLEVIYFGFGIWTVGAIMKCFWKRDSNMALLIFSLLFEGAGVGCCFQPTLVAAQALSRKEDRSVVISSRNFLRSFGGAVGLAVCSAILANSLKADLKTKNLPSELYELIVKAPFSLPDLSHYPEYRDQVLDAYMNGSHTVFVFLCPIVGACLLVTVFVKDHGLQTHEKKAAEAKTVEDKDKDESGTDCEDMTKGEVLVSEKEGKLSRNSSSQSMHFGDHTAVNTPAPTGYNTPVVGTLCHNSPNFPPMDHNDVITPLEDFDESPLPPHSPNSSGKRVTIQEE

SEQ ID NO: 22560 - protein, 284 aa, Xanthomonas oryzae pv. oryzae KACC10331
MTTSISPGACAGARLPRQIPFIIGNDACERFSFYGMRNILVQFLITWLLLQEISGPGREAEAKHILHSFMIGVHFFPLPGGWLADRFLGNYNTILWFSLVSCAAHACLALFEGSRDGFFLGLGLIALGAGGIKPLVASFVGDQFDQSNKHLAKLVFDAFYWIINFGALFASLLIAPALKSLGPAWAFGIPGILMLVATLVFWPGRKRYVLVPLPPKDPHAVGAAIERCGAQRDGDRAYRRYWAQRRGILDVLLRGFCVPGGPGLRPVRAPVSPGRQLPYCLRSA

SEQ ID NO: 22561 - protein, 485 aa, Rhodospirillum rubrum
MKVLFVTSEAYPLVKTGGLGDVAGALPAALRDIGVDARILLPAYPDAMRRARLTGKTVPLGNPLGVGETRLLEGTMPDTGCPLWLLDCPAMYERTGGPYMMYSGVDWPDNFRRFALLSKVAAMIGTAGDLMDWRPDVLHGHDWQTGLVPAYLNAWGARRPPFLFSIHNMEYRGLFGPEILDLIGLPRSQFSINGLEFHGLVSTLKAGIVYAQAVATVSPSYAAEIKTPVGGQGLEGLLQARAGDLSGILNGIDSNAWNPQTDPYLAAPIDGADPAPGKRINKDMLKRRMGLDADGDRPLFGLVSRFVAQKGIDLVVAALPGMIAGGAQVAILGAGDTGLEAALNDIVGRYPGAAAVHVGYDEHLAHLIEGAADFLLVPSRFEPCGLTQLYALRYGTIPVVRRTGGLADSVSHLDDGPNGTGIVFDHALPDALEWAIGRAMTLYRDKATLNKVRQRGMSQDFSWKRSAKEYLRVYGSMVGGDVHRP

SEQ ID NO: 22562 - protein, 255 aa, Photobacterium profundum SS9
MQRDKLLAGKVALISGITSGIGEATARLFSQQGASLVLVARNENKGQMLAEELNAQYPTLFIKADITQANQVDQVFEQTMAEFGGIDCAFNNAGIDGSKQPISETSDEIWNQIINTNLNGTWNMLNRQLSIMSKQGHGTIVNMASICSVLARPNRAAYNTSRHAVLGLTRSAAVEYAKQGVRVNAVAPGAIDTPIFERSTQKDPQLIAKYHQAHPIGRIGQPREVAEAALWLCSDLSSFVVGHTLMVDGGFSISG

SEQ ID NO: 22563 - protein, 182 aa, Pseudomonas fluorescens PfO-1
MFKYIGDIVKGTGTQLRSLVMVFGHGFRKRDTLQYPEEQVYLPPRYRGRIVLTRDPDGEERCVACNLCAVACPVGCISLQKAETEDGRWYPDFFRINFSRCIFCGLCEEACPTTAIQLTPDFEMAEFKRQDLVYEKEDLLISGPGKNPDYNFYRVAGMAVAGKPKGAAQNEAEPINVKSLLP

SEQ ID NO: 22564 - protein, 455 aa, Thermus thermophilus HB8
MYDLLVIGAGPGGYVAAIRAAQLGMKVGVVEKEKALGGTCLRVGCIPSKALLETTERIYEAKKGLLGAKVKGVELDLPALMAHKDKVVQANTQGVEFLFKKNGIARHQGTARFLSERKVLVEETGEELEARYILIATGSAPLIPPWAQVDYERVVTSTEALSFPEVPKRLIVVGGGVIGLELGVVWHRLGAEVIVLEYMDRILPTMDLEVSRAAERVFKKQGLTIRTGVRVTAVVPEAKGARVELEGGEVLEADRVLVAVGRRPYTEGLSLENAGLSTDERGRIPVDEHLRTRVPHIYAIGDVVRGPMLAHKASEEGIAAVEHMVRGFGHVDYQAIPSVVYTHPEIAAVGYTEEELKAQGIPYKVGKFPYSASGRARAMGETEGFIKVLAHAKTDRILGVHGIGARVGDVLAEAALALFFKASAEDLGRAPHAHPSLSEILKEAALAAWERPIHL

SEQ ID NO: 22565 - protein, 717 aa, Arabidopsis thaliana
MEELDRSRAFARDVKRIVVKVGTAVVTGKGGRLALGRLGALFEQLAELNSDGFKVILVSSGAVGLGRQRLRYRQLVNSSFADLQKPQTELDGKACAGVGQSSLMAYYETMFDQLDVTAAQLLVNDSSFRDKDFRKQLNETVKSMLDLRVIPIFNENDAISTRRAPYQDSSGIFWDNDSLAALLALELKADLLILLSDVEGLYTGPPSDPNSKLIHTFVKEKHQDEITFGDKSRLGRGGMTAKVKAAVNAAYAGIPVIITSGYSAENIDKVLRGLRVGTLFHQDARLWAPITDSNARDMAVAARESSRKLQALSSEDRKKILLDIADALEANVTTIKAENELDVASAQEAGLEESMVARLVMTPGKISSLAASVRKLADMEEPIGRVLKKTEVADGLVLEKTSSPLGVLLIVFESRPDALVQIASLAIRSGNGLLLKGGKEARRSNAILHKVITDAIPETVGGKLIGFVTSREEIPDLLKLDDVIDLVIPRGSNKLVTQIKNTTKIPVLGHADGICHVYVDKACDTDMAKRIVSDAKLDYPAACNAMETLLVHKDLEQNAVLNELIFALQSNGVTLYGGPRASKILNIPEARSFNHEYCAKACTVEVVEDVYGAIDHIHRHGSAHTDCIVTEDHEVAELFLRQVDSAAVFHNASTRFSDGFRFGLGAEVGVSTGRIYARGPVGVEGLLTTRWIMRGKGQVVDGDNGIVYTHQDIPIQA

SEQ ID NO: 22566 - protein, 415 aa, Glycine max
  misc_feature (152)..(152): Xaa can be any naturally occurring amino acid
  unsure (1)..(415): unsure at all Xaa locations
MGSSEMDKTTKEKESKTPPPPTSQEQSSTTGTGTINPEWPGFQAYSPIPPHGFLASSPQAHPYMWGVQQFMPPYGTPPHPYVAMYPPGGIYAHPSMPPGSYPFNPFAMPSPNGIAEASGNTPGSMEADGKPSEVKEKLPIKRSKGSLGSLNXMITGKNNEHGKTLGTSANGIHSKSGESASEGEGTSEGSDANSQNDSQLKSGGRQDSFEDEPSQNGSSAYTPQNGGLNIPHTVVNQTMSIIPISAGGAPGAVPGPTTNLNIGMDYWGTPGSSNIPGLGRKVPSTAVAGGMVTVGSRDSAQSQLWLQDERELKRQRRKQSNRESARRSRLRKQAECDELAQRAEALKEENASLRSEVNRIRSDYEQLLSENAALKERLGELPPNDDHHHRSGRNDQHVGNDTQQSGQTEAVQGGH

SEQ ID NO: 22567 - protein, 412 aa, Alkalilimnicola ehrlichei MLHE-1
MSKRRVAVTGLGLVCPQGNTVDEAWENILAGRSAARSIDRFDASEFPVQFAAMLQGFDVGRYLSPKEARKMDPFIHYAIAAGVQAMEDSGLAVSDENADRIGVSIGSGIGGISGIEANMAVLNRSGARRISPFFVPSSIINMASGHLSIRYGLKGPNLATVTACAAGTHNIGQAARAIAYGDVDAMLAGGSEMPISPLGLAGFAAARALSNRNDEPAQASRPFEKGRDGFVLGEGAGIVVLEEMEAAKRRGATIYGELAGFGMSGDAYHITLPAEGGDGARRCMVHALRDAHITPDQVDYINAHGTSTPAGDRVEVEAVRTAFGDHADRLAMSSTKSMTGHLLGAAGGVEAIFSLLALRDQVAPPTINYEEPDPDCRLDFVPNEARDLTMNVALSNSFGFGGTNGSLVFRRV

SEQ ID NO: 22568 - protein, 413 aa, Brassica napus
YPNVTVMDPETLREIMSRHELFPKPKIGYHVFLSGLLNHEGPTWSKHRSILNPAFRIDSLKSILPAFNSSCKEMLEEWEKLASPKGTVELDAWTYCHDLARNMLARASFGDFYKDGINIFQIHQEQIDLSLQTIRSVYIPGSKFLPTKFNKRLRETERDMRAMFKAMIETKEKEIQRGRNTNKNADLLCSMLASNTKQMIEQGPASGLSLDDLIDDCKAFYLAGQSVTASLFVWTLVALSQHQEWQNKARDEISKAFGNNEPGFEGLGHLKVVSMILHEVLRFYSPAYFTCRITNQEVKLERFSLPEGVVITIPMILVHHDPDLWGEDVKQFKPERFVNGVASATKGRLSFLPFGSGPRTCIGQNFSMLQAKLFVAKVLQMFSVELSPSYTHAPFPAATTFPQHGVHLIIKKV

SEQ ID NO: 22569 - protein, 636 aa, Podospora anserina
MLEDPSYNSVVRWSPEGDSFVVLEKFTKTILPKHFKHSNFASFVRQLNKYDFHKVRHNEESGEAPYGRDAWEFKHPEFRADRKDQLDNIRRKAPAPRKPPPTEDAFPASQQIVVLSESLNATNVQIQTLQEQYLELDRTNRLLVAEVLSLQKMLRAQSQASNELISHLNNMEDRRRNSRHSAQSSHSSHSGTNYHQGTLGLLPDGTDEPAPELRRAREILNGVSPDSQADRELERLSMAYHQNGSPAESAGSSVMFTHAGPQTSMNVVHDPFSDPRHLVYPVGQTQGIDPFHADHIHNIPYSRPLSNPNVMTEAPSQISPPPGKEQNGSLWRGKKPQILLVEDDKTCARIGSKFLTNMDCSVETARDGLEAVEKINTDADRFDLVFMDIIMPNLDGVSATAMIRMVTPQIPIIAMTSNIRQEDIQTYFQFAKPFTRDGMVRILKKHLTRMLKDPQSAGVLNDPNDPTSAGNGGGGQQTAGGPGPPTGGYANANMAASMQAAINQAAQVQVKYEQTPIPSPSTTASWHSPGTTMQQVQHQQVQQQQQHASPRLDQGGYMNAVGSGQGVGGMVLTPGGSQRGPGPGQQQQQQYAGYMQAGPGPVTRLPEMGGMGGGAGDDRPEKRQRLYGPGQGGYVG

SEQ ID NO: 22570 - protein, 471 aa, Lycopersicon esculentum
MKLLSDMASCNSHGQDSSYFLGWQEYEKNPYDEIQNPKGIIQMGLAENQLSFDLLESWLAQNPDTAGFKRNGESIFRELALFQDYHGLPDFKNALVQFMSEIRGNKVTFNPNKLVLTAGATSANETLMFCLANPGDAFLLPTPYYPGFDRDLKWRTGAEIVPIQCTSSNGFRITQSALEESYKLAKTRNLRVKGILVTNPSNPLGTTLTRNELELLVSFVAEKGIHLISDEIYSGTVFNSPKFVSVMEVLIENNYMYTEVWDRVHIVYSLSKDLGLPGFRIGAIYSNDAVIVSAATKMSSFGLISSQTQYLLSAMLTDKKFTKKYISENQKRLKKRHAMLVKGLESSGISCLESNAGLFCWVDMRHLLKTNTFEAEIELWKKIVYEVRLNISPGSSCHCTEPGWFRACFANMSEDTLNLAIQRIKSFVDSSDVIGINVDQSNQTNQNTSTSPKKKLFAKWGFRLSFNDRER

SEQ ID NO: 22571 - protein, 588 aa, Glycine max
  misc_feature (431)..(431): Xaa can be any naturally occurring amino acid
  misc_feature (481)..(481): Xaa can be any naturally occurring amino acid
  unsure (1)..(588): unsure at all Xaa locations
MAMVDQPLYPIAVLIDELKNEDIQLRLNSIRRLSTIARALGEDRTRKELIPFLSENNDDDDEVLLAMAEELGVFIPYVGGVEHANVLLPPLETLCTVEETSVRDKSVESLCRIGAQMREQDLVEYLIPLVKRLAAGEWFTARVSSCGLFHIAYPSAPEAVKTELRAIYGQLCQDDMPMVRRSAATNLGKFAATVEAPHLKSDIMSVFEDLTHDDQDSVRLLAVEGCAALGKLLEPQDCVAHILPVIVNFSQDKSWRVRYMVANQLYELCEAVGPDPTRSELVPAYVRLLRDNEAEVRIAAAGKVTKFSRILNPDLAIQHILPCVKELSTDSSQHVRSALASVIMGMAPVLGKDATIEQLLPIFLSLLKDEFPDVRLNIISKLDQVNQVIGIDLLSQSLLPAIVELAEDRHWRVRLAIIEYIPLLASQLGVXFFDDKLGALCMQWLKDKVYSIRDAAANNIKRLAEEFGPDWAMQHIIPQVXLDMVTDPHYLYRMTILQSISLLAPVLGSEISSSKLLPLVINASKDRVPNIKFNVAKVLQSLIPIVDQSVVESTIRPCLVELSEDPDVDVRFFASQALQSCDQVKMSS

SEQ ID NO: 22572 - protein, 400 aa, ASPERGILLUS NIDULANS FGSC A4
MASRGLPRALRVARVAAPRSVVSAALPRPSLAKIAANAVPRVAAPVVPVRGVKTISFADSQETVYERADWPREKLQEYFKNDTLALIGYGSQGHGQGLNLRDQGLNVIVGVRKDGASWKEAIQDGWVPGKNLFEVTEAVQKGTIVMNLLSDAAQSETWPTLKPLITKGKTLYFSHGFSPVFKEKTKVDVPSDVDVILVAPKGSGRTVRTLFREGRGINSSIAVFQDVTGNAKEKAIAMGVAVGSGYLYETTFEKEVYSDLYGERGCLMGGIHGMFLAQYEVLRERGHSPSEAFNETVEEATQSLYPLIGANGMDWMYAACSTTARRGAIDWSSRFKDNLKPLFNELYDSVRDGTETQRSLDYNSQKDYREKYEKEMQEIRDLEIWRAGKAVRSLRPENQK

SEQ ID NO: 22573 - protein, 251 aa, Brassica oleracea var. botrytis
MPIRNIAVGRTDEATRPDALKAALAEFISTMIFVFAGSGSGMAFNKLTENGATTPSGLVAAALAHAFGLFVAVSVGANISGGHVNPAVTFGAFVGGNITLLRGILYWIAQLLGSVVACLLLKFATGGLVVPAFGLSAGVGVSNALVFEIVMTFGLVYTVYATAVDPKNGSLGTIAPIAIGFIVGANILAGGAFSGASMNPAVAFGPAVVSWSWNNHWVYWAGPLIGGGVAGLIYEVFFINTTHEQLPTTDY

SEQ ID NO: 22574 - protein, 372 aa, Arabidopsis thaliana
MKKGGFSNNLKLAIPVAGEQSITKFLRKGFGSLCRTQSGTFKDGDLRVNKDGVRIISQLEPEVLSPIKPADDQLSLSDLDMVKVIGKGSSGVVQLVQHKWTGQFFALKVIQLNIDEAIRKAIAQELKINQSSQCPNLVTSYQSFYDNGAISLILEYMDGGSLADFLKSVKAIPDSYLSAIFRQVLQGLIYLHHDRHIIHRDLKPSNLLINHRGEVKITDFGVSTVMTNTAGLANTFVGTYNYMSPERIVGNKYGNKSDIWSLGLVVLECATGKFPYAPPNQEETWTSVFELMEAIVDQPPPALPSGNFSPELSSFISTCLQKDPNSRSSAKELMEHPFLNKYDYSGINLASYFTDAGSPLATLGNLSGTFSV

SEQ ID NO: 22575 - protein, 348 aa, Synechococcus elongatus PCC 7942
MSQGQQSDRRFPAEWEAQDGVLIAWPHADSDWRSLLDQVDRVYRDLAEAVTRFEQLLIVTPEPDRVAEQLAQTTANCDRIQIVELPTNDTWSRDFGPLTVETPAGLRLLDWGFNGWGLKFAANHDNQVTRRLWQQGIFGTTPLETVPLIFEGGSIESDGRGTLLTTSQCLLEANRNPGLSREAIAQIIQRQLGGDRLLWLEHGHLEGDDTDAHIDTLVRIAPNDTLIYVACDDPSDSHAAELTALEAELKALRAADGQPYHLIPLPWPQPCFDADGQRLPTTYANYLVINGAVLVPTYNDPADEAAIAAIAAAFPDRLAIGINCRPLLEQHGSLHCITMQLPAGLLSR

SEQ ID NO: 22576 - protein, 635 aa, Candida glabrata CBS138
MMVPLLLSTYFITAVYGATHTFHWTTGWGNRNVDGIKERPVITCNGEYPWPDVRVAKGDRIEVYLTNGFNNTNTSLHFHGMFQRGTNQMDGVPYLTQCPIGPGDTMLYNFTVDENVGTYWYHSHTDGQYEDGMRGLFVIEDGENNKNFPYEYDEDVMLSIGEWYDTTVDVLTRKFLNLNNPTGAEPIPQNLILNNTMNLTWEVQPDTTYLLRIVNVGGFVSQYFWIEDHEMEVVEVDGVYVEKNTTNMLYITVAQRYAVLVHTKNDTSKNFAIMQKFDDTMLDVIPKDLQLNATSYLVYDKSKPMPEQNYVDSIDDYLDDFYLVPMDKEELYPEADHVITIDVIMDNLINGVNYAFFNNITYTTPKVPTLLTVLSAGQDALNPFIYGTNTNTFVLKKGEVVDLIVNNQDTGKHPFHLHGHVFQTILRDREFDDAKGEKPHSFNDSDHAAYPSIPMKRDTVYLNPQSNMVLRFKADNPGVWFFHCHIEWHLLQGLAVVMVEDPISIQNTASQHLTANGLQVCGNVKVPTQGNAAANDSDFFNLEGQNVQHKSIPTGFTKKGIIAMTFSCLAGVLGITMIAIYGFSEIPEPEIKVMRNLHLNPEDVLEKTSSSSVISASNSSSLEDSRNQKKKFIFF

SEQ ID NO: 22577 - protein, 1192 aa, Candida glabrata CBS138
MERDYHVNTGFQMGRREEERGIAMAPASLRMMGKSGARELMEPATVNAGVQDIDANAEMQATDMPGAPASVPAERKSQGQGQSQGQGQGQGQGQGQMKQFHRKSLGDWDFLETVGAGSMGKVKLAKHRRTGEVCAIKIVNRATKAFLHKEQNSPPPVNNQEIMERQKKLEKEISRDKRAIREASLGQIFYHPHICRLFEMCTMSNHFYMLFEYVAGGQLLDYIIQHGSLREHHARKFARGVASALQYLHANNIVHRDLKIENIMISNSGEIKIIDFGLSNVYDTRKQLHTFCGSLYFAAPELLKAHPYTGPEVDVWSFGVVLYVLVCGKVPFDDENSSVLHEKIKRGKVEYPQHLSIEVMSLLSKMLVVDPSRRASLKQVVEHPWMTKGYDTPAPSYVPNRIPLTPEMLDSTVLREMFRLEFIEDIEETRKLLATIVSDPTYLTLSNEYWTRLQSITETTGQGKTTHFEIQGVSINFHLTSGVNKIPFEDPTRAFHPLLSIYYLVAEMLQRKMAKLQKKQALIQQQQQQIQKQQQQRVQQQQPQQQKQPLTPKEPEQTEFAYSKTPNTSDKSAGLTVPSRPTDIINEMKAKSDRTDYIMNTPKQDTGSNTTVEKLYTPKEQQSVERKTAPLHIMVPPKLTMPEQAHTSPTTRKSSDIHDELNTAMSPKVLSKEYEQRPNTQLDSPEKKRFPALFGKLSQKRQPSSQQSPQSNNNPQFQVHAAPNLEPAKRSTKTHTRTVSEYVPGPSNNKEFIETYLPSNYANKNNSPSRSVSTKVANTERFPALPANANTMVEQQLAKDMDNLNVNNNTNRAPDTSSADYDENKPLPPLTVTKGRKLHPSARAKSVGHSRRESLKFTRPPVPTNVQGYDNDDAGFLEYSDDNRNDSAIIRTPNSSKYLSPPTPNTRFGFGSTEELTDEQILEQASRAPPGTMPSIDYPRSLFLKGFFSVQTTSSKPLPIVRYKIMHLLKKMHVEFKEVKGGFVCTHEGQLSFLNNDNELPEYNPLAETDENNIDNRLTINTNLSPHPSQNHLQLPTPIENQAVTYRSIRSGSRQNSIRRQGSTKISPNIPTTPMATTEHHRNISEVMSPVAQNINLGSTLSDEHSTTSLDNIANQEDILTTSRVQNMNRPDLDLEQQAIAKASNEKSRVKFEIHIVKVRIVGLAGVHFKKVSGNTWLYKELASHILKNLNL

SEQ ID NO: 22578 - protein, 353 aa, Synechococcus elongatus PCC 6301
MSKIRVGINGFGRIGRLCLRAGFDDPQLDFVAINDLVPAKNLAYLLHYDSTHGRLQQTVRAEEDRICAGDRCIQCFSETDPAAIPWGELGVDVVIEATGRFTDYAAASRHLEAGAQRVVISAPTSEKDPDRVPTFVYGVNHQNYDPQQHRILSNASCTTNCLAPIAKVLQEHCGIEDGLMTTIHAVTATQPTVDGPSRKDMRGGRSAAQNIIPASTGAAKAVGLVLPELQGHLTGMALRVPTADVSVVDLTFRSRQSTTYAAICEVMQKAANTQLQGILGYTEDDLVSSDFIGDARSSIFDATAGMALNDRFFKVIAWYDNEWGYSNRMLDLIRYMRSVEQQPAWAPRSLTPA

SEQ ID NO: 22579 - protein, 1071 aa, Ashbya gossypii ATCC 10895
MPSSTQDYHVNSQFRMGGSPQAAVAPATPRMMGKAGEEERRMPKPFHRKSLGDWDFLETVGAGSMGKVKLAKHRYTNELCAIKIVNRATKSFMHKQQLQGLPPPATEEELLERRKKLEKEVSRDKRTIREASLGQILYHPHICRLFEMCTMSNHFYMLFEYVSGGQLLDYIIQHGSLRERHARKFARGIASALQYLHLNNIVHRDLKIENIMISSSGEIRIIDFGLSNMYDPKKQLHTFCGSLYFAAPELLKAHPYTGPEVDIWSFGVVLYVLVCGKVPFDDENASVLHEKIKQGKVEYPQHLSIDVISLLSKMLVVDPYKRATLKQVVHHQWMQKGYDFPPPSYLPPCVPLTPDRINMDIITEMYRLELIHDVAETAQWLEKIITSPEYLELSRQYWENAANMKPEDAPIRGYSPLLSMYHLVDEMLKRKRSKMQKRGQASAQTPATAGANSGLPSSAALISADTTSAGSYASTAAGPQKLAAAVTPENSDRMSGPHVLVSQLDSEKSRTLQPAVSPHDETSSTYITVTTPSKQKQNVLVPPRLAIPEQAHTTTPRKAINVDGEIDQKVLSPTPQSHDFETSNKYSTTSNATHSAAVSAGSTEKHIFGTLFRRFSQRHRHTTSQGGSQCAYHPEVNTLQSSAQYQTSKTSTQAAKTKTHTRTVSEYTPASKYANMGPPAAADSTRSTTNYLEARSPLPALPVNAESLVKEQQRLQDNLQGLDISGGGQSSHANNNRNSTSSYNNNGPEVIDEDKPLRQLSVPKGRKLHPSARAKSVGHARRESLKFMRPAIASQLSPQDINDEGFLEQGSDTESENIFGGSSSGAVASVDEELTDKQILELAARAPPGSMPSIDYPRSLFLKGFFSVQTTSSKPLPIVRYKIISTLKKLNIEFKEVKGGFVCVHRQSYMTNRASPTQPNIFVTDSTSITSSTNGTASSTHRRQLSVPSRHNSLRRQQQAGANNLGTSMHERTSSTASHSIAGSGCITEELSTASLESLHGDDILTTSKAQHMNTKDLEMQLQKERPPLKFEIHIVKVRIVGLAGVHFKKVSGNTWMYKELASHILKELNL

SEQ ID NO: 22580 - protein, 427 aa, Erwinia carotovora subsp. atroseptica SCRI1043
MTVRTSTLTAEGQASIALEMRSGVLGKTAVDIRPLGEHGLCSYDPGFANTAGCESAITYIDAANSVLLHRGFPVEQLAEQCDFTEVCYILLHGDAPSPEAYAKFADNITRHTLVHEQITRMFSGFRRDSHPMALMCAVVGALAAFYHDVLDINNAEHRELAAVRLLSKMPTLAAMCYKYSVEQPSVYPRNSLSYTGNFLHMLFSIPAEKYEVNPVLERAMNRILILHADHGQCPSTMAVRASGSSGANPFACIAAGLASMWGPLHGGANEACMRMLEEIKTVDRVPEFVRRAKDRCDSFRLMGFGNSVYQHFDPRAAILRKTCYEVLNELGMEDSLLQVAMELEHIAMTDAYFLENKLYPSVDFYTSVILKAMGLPSSMFTVISTVGRTIGWIAHWDEMHKQQEISIYRPRQIYTGQPQRDYVSLKG

SEQ ID NO: 22581 - protein, 528 aa, Paxillus involutus
MAHTSALHAQYQQDILKAINDQLTISDDTLLNITRTFLREVTDGLSSYGHPMAMIPTFVKGVPDGSETGTFLALDLGGTNLRVCEVTLHGDKSFSLRQQKYKVSETLKTGEVTTLFDYLADSVDAFLTDSGSPTAALPPSLTHESHANVLGNGDTDQPYISLALTFSFPVEQTALDSGKLLTWTKGFAAKNAIGKDVVKLLQDAFDRKHIHVKCVALVNDTVGALLSRAYTSGGCILGAIFGTGTNGAYVEDVANITKLGNEPTVAEGGYMIVNTEWGGFNNTRSALPSTPYDNKLDRESINPRFQAFEKFISGMYLGEITRNIILSLIDSSPKPLLFGGRSTGLLNKQWGLDTAVLSEIEEAWQGIGRFASSKAATTDASDEVELSRVRDVIVQRLGFSDARASDVSLADADTVRQVCTLVAARAARLSACAVAAVLVQTGRAQLVGSGAPGSGSLRDDGKRIGVGVDGSLVEFYPQFEPKLRASLRVLIGPEVESRVDIGMAKDGSGAGAALCALVAQRQDRAKRS

SEQ ID NO: 22582 - protein, 547 aa, Lactobacillus plantarum WCFS1
MTKTASEILNNPFLNKGTAFTKEERQALGLTGTLPSKVQTIDEQATQAYAQFKSKPSRLEQRIFLMNLFNENRTLFFHLMDEHVVEFMPIVYDPVVADSIEQYNELFLDPQNAAFVSVDAPEDIEATLKNAADGRDIRLVVVTDAEGILGMGDWGVNGVDIAIGKLMVYTAAAGIDPSQVLPVSIDAGTNNQKLLDDPLYLGNRHKCVSGEQYYDVIDKFVAAEQQLFPDSLLHFEDFGRDNAQVILDKYKDQIATFNDDIQGTGMVVLAGILGALNISKESIKDQKILSFGAGTAGMGIANQILDELMQAGLTEEEAKQHFYAVDKQGLLFDDTEGLTPAQKAFTRKRSEFSNADELTNLEAVVKAVHPTVMIGTSTQPGTFTESIIKEMAAHTERPIIFPLSNPTKLAEAKAEDLIKWTDGRALVATGIPADDVEYKGVTYQIGQGNNALMYPGLGFGLIASTAKVLNAETLSAACHALGGIVDTSKPGAAVLPPVAKITEFSQKLAEVVAQSVIDQKLNKEPIADAKQAVADMKWVPEYRAISK

SEQ ID NO: 22583 - protein, 230 aa, Cucumis sativus
MEKKKMGFEETELRLGLPGNNNIGSSELGEVAARKRGFAETVSSETISKVDLKLNLSSKETVGVGDDDLVADSNPSNKDKAVLTADPAKPPAKAQVVGWPPVRSFRKNNMLAFVKVSMDGAPYLRKVDLKMYKSYKQLSDALAAMFGSFTTIGNCGSQEMKDFMNESKLMDLLSGSDYVPTYEDKDGDWMLVGDVPWEMFVESCKRLRIMKGKEAIGLAPRAMEKCKNRS

SEQ ID NO: 22584 - protein, 397 aa, Oryza sativa
MIHSHQLKEQGHGVTVVRTRIEGGAKAVRTNGTLALQHVRAIYSRSSVFFWFEVGERHLARDTVHFDIKLLWAQPDVPASSSEVSMMDSISIGLSMASVTYLDDAHSEVIDPPKNEEMLDVTELVDDHTQHSPKPNAMVSGNVRELLECPVCLNAMYPPIHQCSNGHTLCSGCKPRVHNRCPTCRHELGNIRCLALEKVAASLELPCKYQNFGCLGIYPYYCKLKHESQCQYRPYTCPYAGSECTVAGDIQYLVSHLKDDHKVDMHNGSTFNHRYVKSNPHEVENATWMLTVFSCFGQYFCLHFEAFQLGMAPVYIAFLRFMGDDAEAKNYSYSLEVGGSGRKMTWQGVPRSIRDSHRKVRDSYDGLIIQRNMALFFSGGDKKELKLRVTGRIWKEQ

SEQ ID NO: 22585 - protein, 249 aa, Thermus thermophilus HB8
MKLLLLDLDDTLLQDLPVSRAVLEDLGRKAGVEGFFARVKARAEALFREAPFYPWAEAIGHSALEALWARYSTPGLEALAAWAGPFRERVFREALEEAGGPPERARELAEAFFRERRRYPLYPEAEAFLAEARRRGLALALLTNGVPDLQREKLVGAGLAHHFSLVLISGEVGIGKPDPRLFRMALCAFGVAPEEAAMVGDNPQKDVRGARLAGVRAVWVDRGLRPEDPEASPDLRVGDLREVFLAEAL

SEQ ID NO: 22586 - protein, 223 aa, Magnetospirillum magnetotacticum MS-1
MAGRLTYSISGGAPLGERLGHFYRGVGLRILEGYGLTETTAPTAVNLPGLTKIGTVGPAFPGTSLRIDADGELLVKGDHIFRGYRNQPELTAEALQDGWFRTGDLGAFDDDGYLRITGRKKEIIVTAGGKNVAPAVLEDRLRAHPLVSQVVVVGDQRPFIGALVTLDAEMLPGWLATHGLRPMDVETAAHDADVLAALDRAVAHANEAVSRAESIRKITVLTT

SEQ ID NO: 22587 - protein, 490 aa, Streptococcus sinensis
RGVDILADTVKVTLGPKGRNVVLEKSFGSPLITNDGVTIAKEIELEDHFENMGAKLVSEVASKTNDIAGDGTTTATVLTQAIVREGIKNVTAGANPIGIRRGIEAAVATAVSALKETAIPVSNKEAIAQVAAVSSRSEKVGEYISEAMEKVGNDGVITIEESKGMETELDVVEGMQFDRGYLSQYMVTDSEKMVADLDNPYILITDKKISNIQEILPLLESILKTNRPLLIIADDVDGEALPTLVLNKIRGTFNVVAVKAPGFGDRRKAMLEDIAILTGGTVITEDLGLELKDATIEALGQASKVTVDKESTVIVEGSGNPEAIANRVVVIKSQIESTTSEFDKEKLQERLAKLSGGVAVIKVGAATETELKEMKLRIEDALNATRAAVEEGIVSGGGTAFVSVLGAVAALELTGDEATGRNIVLRALEEPVRQIALNAGFEGSIVIDRLKNSEAGTGFNAATGEWVNMIEAGIIDPVKVTRSALQNAAQ

SEQ ID NO: 22588 - protein, 678 aa, Chlamydophila abortus S26/3
MVAIQHELGSSIKEVLKLVWSLRFAENKMLLLSRQSDSGGTFQLSCAGHELVGVVAGKSLLRGKDWSFPYYRDQGFPVGLGCDLSEIFASFLGRLAPNHSSGRMMPYHYSHKKLRICCQSSVVGSQFLQAAGRAWAVKHTKSNEVVYVSGGDGSTSQGEFHEMLNYVALHKLPLVTVVQNNAWAISVPFKDQCSTDLVRLGESYQGLSVYEVDGGDYFKLVDTFSKAVDQARHTSVPALILVDVMRLEPHSNSDNHEKYRSREDLDHCKSHDPLIRLERLMIDECGISPAEILDIKAEAEAEVTRACEIAEGMPFPSKGSTSHDVFSPHTTSLIDYENSLEAQRLRDTQPKVMRDAITEALIEEMSRDSGVVVFGEDVAGDKGGVFGVTRNLTDRFGSERCFNTPLAEATIIGTAIGMAMDGIHKPVAEIQFADYIWPGINQLFSEASSIYYRSAGEWEVPLVIRAPCGGYIQGGPYHSQSIEAFLAHCPGIKVAYPSNAADAKALLKAAIRDPNPVVFLEHKALYQRRIFSACPVFSSDYVLPFGKAAITQVGSDLTIVSWGMSLVMSMEVAKELAALDISAEVIDLRTIVPCDFSTVIESVKKTSKLLIAHEASEFCGFGAELAATVAEQAYAYLDAPIRRVAGLHAPVPYSKILENEVLPQKEKIFQAAKSLAEF

SEQ ID NO: 22589 - protein, 337 aa, Gloeobacter violaceus PCC 7421
MTLRVFVTGGTGFVGANLVRLLLTEGYSVRALVREPAKAQDLAALGAEVVAGDLGSRALAGQMAGCRALFHVAAHYSLLQADRERLWQSNVLGTRNVLAAAREAGVERTVYTSSVAAIGVKSPRADENHQSPPDKLVGVYKQSKYWAEQEARRAAARGQDVVIVNPTAPVGPFDSKPTPTGDIVLRFLRRQMPFYLETGLNFVHVRDVVQGHLAALERGRSGERYILGHRDLSFKALLDTLAEVTGIPAPQMAVPDWLPLGVAWIDEQLLSPLLGRPPSVPIDGVRMAAQPMYYDASKAVRELGLPQTPVREALVDAVDWFRKNGYIGNGGGFRHGG

SEQ ID NO: 22590 - protein, 416 aa, Crocosphaera watsonii WH 8501
MTNSQLKRVVVTGLGAITPIGNTLTDYWQGLMNGKSGIAEITNFDPSKHACRIAGEVKGFDPQDYLDRKEAKRMDRFAQFGVSASLQALADSKLVINDLNAEQIGVIIGTGVGGIKVLEDQQEVYLNKGPSRCSPFMIPMMIGNMASGLTAINTGAKGPNTCTVTACAAGSNAIGDAFRLVQRGYAKAMICGGTEASVTPLSLAGFASARALSTRNDEPQKASRPFDKDRDGFVMGEGSGILILEELEHALARGATIYGEMVGYAMTCDAYHMTAPVPDGAGATRAMELALKDGGISPEQVTYINAHGTSTAANDVTETKAIKKALGDRAYAIAVSSTKSMTGHLLGGSGGIEAVATLMAIANDRIPPTLNLDNPDPDCDLDYVPYESRPLEIDVALSNSFGFGGHNVTLVFRKYR

SEQ ID NO: 22591 - protein, 362 aa, Bacteroides fragilis YCH46
MKPYLLLTPGPLTTSETVKETMMTDWCTWDEDYNLHIVEALRKELVGIATRNTEEYTSVLLQGSGTYCVEAVIGAAIGKNDKLLICSNGAYGDRMGNIAEYYHIDYELLAFDETEQVSVDYVDDYLSNNSDVTHVAFVHCETTTGILNPLKELAHVVKMHGKKLIVDAMSSFGGIPMDVSELGIDFLISSANKCIQGVPGFGFIIARRSELVRCKGVARSLSLDIYDQWETMEKGHGKWRFTSPTHVVRAFKQALTELIEEGGVEARHRRYCENHRVLVEGMRSLGFVTLLDDAIQSPIITSFLYPKTGFDFKAFYTALKSKGFVIYPGKISKADTFRIGNIGDVHPEDFARLVEVVRETEY

SEQ ID NO: 22592 - protein, 575 aa, Staphylococcus epidermidis ATCC 12228
MKEQNPLFFLFKRLSWPYGLIIAAVIITSLGSLSGLLVPLFTGRLVDKFSVSSINWGMIAIFGSIFLVNALLSGIGLYLLSKIGEKIIYAIRSLLWEHIIQLKMPFFDKNESGQLMSRLTDDTKVINEFISQKLPNLLPSVLTLIGSLVMLFIMDWKLTLLTFITIPVFILIIVPLGRVMQKISTNTQSEIANFSGLLGRVLTEMRLVKVSNTERLELDNAHTNLKKIYRLGLKQAKISAVVQPISGVVMLLTIAIILGFGALEIGTGAITPGTLIAMIFYVIQLSMPLINLSTLVTDYKKAVGASSRIYEIMQEPIEPTEALSESKDVTIIDGELVFEHVDFKYDVKKILEDVSFSIPQGEVSAFVGPSGSGKSTIFNLIERMYDIERGDIKYGNQSIFDIPLSKWRTKIGYVMQSNSMMSGTIRDNILYGINRKVDDEELIEYAKLANCHDFIIQFDEGYDTMVGERGLKLSGGQRQRIDIARSFVKNPDILLLDEATANLDSESELKIQEALETLMEGRTTVVIAHRLSTIKKAGQIVFIDKGEVTGKGTHHELMASHDKYRHFVTSQKLSD

SEQ ID NO: 22593 - protein, 541 aa, Arabidopsis thaliana
MGNCIACVKFDPDNSKPNQKKKPPRGRQRNPYDDPDGLRTHAPLRVIPMSHQSQISDKYILGRELGRGEFGITYLCTDRETREALACKSISKRKLRTAVDVEDVRREVTIMSTLPEHPNVVKLKATYEDNENVHLVMELCEGGELFDRIVARGHYTERAAATVARTIAEVVRMCHVNGVMHRDLKPENFLFANKKENSALKAIDFGLSVLFKPGERFTEIVGSPYYMAPEVLKRNYGPEVDVWSAGVILYILLCGVPPFWAETEQGVALAILRGVLDFKRDPWSQISESAKSLVKQMLEPDSTKRLTAQQVLDHPWIQNAKKAPNVPLGDIVRSRLKQFSMMNRLKKKALRVIAEHLSIQEVEVIRNMFTLMDDDNDGKISYLELRAGLRKVGSQLGEPEIKLLMEVADVNGNGCLDYGEFVAVIIHLQKMENDEHFRQAFMFFDKDGSGYIESEELREALTDELGEPDNSVIIDIMREVDTDKDGKINYDEFVVMMKAGTDWRKASRQYSRERFKSLSLNLMKDGSMHLHDALTGQSIAV

SEQ ID NO: 22594 - protein, 443 aa, Nostoc punctiforme PCC 73102
MNQLIEQLQTKLFTGRLNLEARDGPTWTLYFRLGRLIWQAGGSNADERWRRHLLRYCSNVDVTQLEQLVSPQENYREYSILAKLREQKLIEQQQLVSLIASSIAEVLFDIMQYIEAKRNGDNPAGQLSHTTVVGEVPGVLLAVIPTEEVLKRATQAWQEWRDAGLATYSPNLFPIIQQIELLQGQASSKQIIALVDGTKTLRGLGQKSGRDVLALTRLLMTLVKTGAIAFSPIPKLRQVVISKETGNPSSAVNNSNSSLKTEEDTVLQFAPNFNKVVPPATSKEIVSPSSAVNNFNSSLKKEENTVIQVAPPAASKAIIDLSRPLVACVDDSPTICRSLEEIMTHQGYRFVGIQDSLTAVLNLIKSKPDFIFLDLLMPKVNGYEICSQIRKTPSLKNVPVVILTGKDGIVDRMRAKLVGATDFLGKPVEADKVLNMLHKYLTV

SEQ ID NO: 22595 - protein, 148 aa, Burkholderia fungorum LB400
MAYSDKVIDHYENPRNVGAFDPDAANVGTGMVGAPACGDVMRLQIRVNREGVIEDAKFKTYGCGSAIASSSLVTEWVRGRTLDEALAIRNTQIAEELALPPVKIHCSILAEDAIKAAVADFRSRQAIQGTAADSLQLADQPVCSSNPN

SEQ ID NO: 22596 - protein, 412 aa, Arabidopsis thaliana
MIAQELGIYVVESKGGAILCLLLSLLCLGTWPALMALLERRGRLPQHTYLDYSITNFLAAIFIAFVFGGIGESTHEAPSFITQLTQIQDNWPSVLFAMAGGVGLSIGNLATQYSLAFVGLSVTEVTAASITVVVGTTVNYFLDNGLNRADILFSGVGCFMVAVCLGSAVHSSNSADIKAKLGKLSGDCETVTPEECQRLFGVEEEEEEEKEMENVKEGSAAFLIALENKRAIKVLGKSMVVGLGITFFAGLSFSLFSPLFNLATNDQWHTLKQGVPKLIVYTAFFYFSLSCFVIAVALNISFLYKPVLDSPRSSFREYLSDWNGRGWALAAGLLCGFGNGLQFMGGQAAGYAASDAVQALPLVSTFWGIYLFGEYRRSSTRTYALLVGMLVMFTVAVGLLMASAGERETRFT

SEQ ID NO: 22597 - protein, 546 aa, Burkholderia thailandensis
MAAKDVVFGDSARAKMVEGVNILANAVKVTLGPKGRNVVLERSFGGPTVTKDGVSVAKEIELKDKLQNMGAQMVKEVASKTSDNAGDGTTTATVLAQSIVREGMKYVASGMNPMDLKRGIDKAVAAAVEELKKISKPCTTNKEIAQVGSISANSDSSIGDRIAEAMDKVGKEGVITVEDGKSLADELDVVEGMQFDRGYLSPYFINNPDKQVAVLENPFVLLHDKKVSNIRDLLPVLEQVAKAGRPLLIIAEDVEGEALATLVVNNIRGILKTVAVKAPGFGDRRKAMLEDIAILTGGQVIAEETGLTLEKATLAELGQAKRIEVGKENTTIIDGAGEAVNIEARVKQIRTQIEEATSDYDREKLQERVAKLAGGVAVIKVGAATEVEMKEKKARVEDALHATRAAVEEGIVPGGGVALIRARTAIAALTGVNADQNAGIKIVLRAMEEPLRQIVTNGGEEASVVVAAVAAGKGNYGYNAATGEYVDMVEAGVVDPTKVTRTALQNAASVAGLLLTTDAAVAELPKEDAPMPGGMPGGMGGMGMDM

SEQ ID NO: 22598 - protein, 487 aa, Silene latifolia
MSTQAHRNRLLGTENGNGGGGVKVVNNPKLTKKRPPLSNLTNHPRPSLVPSAITKSTKAKRDSSTGVRSTSFPAENPSATLNSKPSAVVPLKTAFTRSNVLVSCKASLPNGKGEQSHITRHPASCTMDTTPTPEDAQSVSMDESMSTCDSLKSPEVEYMDENDVAALCSIERKTSKNLYISDDMETTGSFCKREIVSAMEIDKVVDVDDNHMDPQFCSTIACDIYKHLRESETQKRPSTDFMEQTQKDINASMRAILVDWLVEVAEEYRLVPDTLYLTVNYIDRYLSGNAMNRQRLQLLGVACMMIAAKYEEICAPQVEEFCYITDNTYFKEEVLQMESGVLNFLKFEMTAPTTKNFLRRFVRAAQVMNEVPAFQLECLANYVAELSLLEYSMLKYAPSLIAASSVFLAKYMLTSSRPWNATLRHYTLYEASDLEECVKALHQLCLNSHISSLPAIREKYSHHKYKSVAKKHCPSSIPAEYFQNSSC

SEQ ID NO: 22599 - protein, 324 aa, Yarrowia lipolytica CLIB122
MFYVVAALVALILAVYAAVFAFSHKPRPVHKHEQFFETTVADGSVSPKQPLVALEKQAHGRKDTDADDDDDYVFISVVVPCYNETKRLGVMLEDAVPVLDALKQPYEVIIVDDGSRDKTPEFALEWASQHMKPGSLRVTRLAKNRGKGGAVAHGMRFSRGKYVLFADADGASDFKDMPRLLEAVKVNDGVAIGSRAHMVGTDAVVKRSFIRNFLMRGLHLLVWTFGVRTIRDTQCGFKLFSRRATENIFPYMHTEGWIFDVEVLMLAQRKGLAIAEIPISWHEVEGSKIDLAADSIKMAIDLVVTRVAYIIGVYGDREVNFKVE

SEQ ID NO: 22600 - protein, 237 aa, Mycobacterium avium subsp. paratuberculosis K-10
MSSTPHPAEPHIGSVSSKLNWLRAGVLGANDGIVSTAGIVVGVAAATALRAPILTAGSAGLVAGAVSMALGEYVSVSTQRDTEKALLIQEHQELRDDPAAELDELAALYEAKGLTAATARTVAEELTDQNPLLAHAEVELGINPEELTNPWHAASSSALSFAIGALLPLIAILLPPPTWRIPVTVVAVLIALVITGAVSARLGGAPQLRAVARNAIGGSLALAVTYTIGHVVGAAID

SEQ ID NO: 22601 - protein, 523 aa, Triticum aestivum
MARGGGNGEVELSVGVGGGGGGAAGGGEQPAVDISLGRLILAGMVAGGVQYGWALQLSLLTPYVQTLGLSHALTSFMWLCGPIAGLVVQPCVGLYSDKCTSRWGRRRPFILTGCILICIAVVVVGFSADIGAALGDSKEECSLYHGPRWHAAIVYVLGFWLLDFSNNTVQGPARALMADLSAQHGPSAANSIFCSWMALGNILGYSSGSTNNWHKWFPFLRTRACCEACANLKGAFLVAVLFLAFCLVITVIFAKEIPYKAIAPLPTKANGQVEVEPTGPLAVFKGFKNLPPGMPSVLLVTGLTWLSWFPFILYDTDWMGREIYHGDPKGTPDEANAFQAGVRAGAFGLLLNSVVLGFSSFLIEPLCKRLGPRVVWVSSNFLVCLSMAAICIISWWATQDLHGYIQHAITASKEIKIVSLALFAFLGIPLAILYSVPFAVTAQLAAKRGGGQGLCTGVLNIAIVIPQVIIAVGAGPWDELFGKGNIPAFGMASAFALIGGIVGIFLLPKISRRQFRAVSGGGH

SEQ ID NO: 22602 - protein, 388 aa, Arabidopsis thaliana
MTTISDLSDDLVGDILSRVPFTSLISVRSTCKKWNALSKNQIFGRKTAARNQFLEFMILDSRVCSLRLDLQGIRNEDKEDFVDPSMKLISIPSNDDQVEISQVYHCDGLLLCIAKENSNVFVWNPYLGQTKWIRPRNTFHRYDRFALGYDNNRNHKILRFLYDEESNESSRRTHIDVYDFSSDSWRVLDVNPDCDIPFYQTGVSLKGNTYFFGQEVTQATKVTEIETCLLCFDFTTERFGPCLPLLFYPPCPSFETVTLSWVRDEKLAVLYNHYVTAEIIEIRISTKIEPNAVSWSSFLTVDMSLVNGLPDHFSMYFEAKSFFIDEEKKVVVLFDSKEIKTCRYQMAYIVGDDGYFKSVNIGVSPNSQRKPGRLVCSSYVPSLVQLQD

SEQ ID NO: 22603 - protein, 561 aa, Bacillus cereus ATCC 10987
MIHLKTQYTVSTYLLDRLSELEIEHIFGVPGDYNLAFLDDVVAHEKLEWVGNCNELNAAYAADGYARIKGIAALITTFGVGELSAINGVAGSYAENVPVIKITGTPPTTVMENGALVHHTLGDGKFDHFSNMYREITVAQTNLTPEHAAEEIDRVLRACWSEKRPVHIQLPIDVYNKPINKPTESILHKPVVSNKDALDKMLLHATSKINSARKPVILADFEVARFHAEEYLHQFVEKTGFPIATLSMGKGIFPEKHPQFIGIYTGDVSPSYLRKRIDESDCIISIGVKLTDTITGGFTQGFKKEQVIEIHPYTVKIMDKKYGPVVMKDVLKQLNDLIEHRKEDTLEIKPFISESLPITEEFNPKAQMITQKRFWQQIYHFLQENDVLIAEQGTPFFGSATIPLPNNTTYVAQPLWGSIGYTLPALLGTQLANLSRRNILIIGDGSFQLTVQELSTILRKNLKPIIFLINNNGYTVERAIHGQNEPYNDIQMWDYTKLANVFGTEEKSLTWKVENETELAEVLMNITVNNNQLIFIEVVMSQGDQPELLANLGKRFGMQNS

SEQ ID NO: 22604 - protein, 245 aa, Bacillus cereus ATCC 10987
MIKLVLIRHGQSLWNLENRFTGWTDVDLSENGLSEAREAGAILKKNGYTFDVAYTSVLKRAIRTLWIVLHEMDLAWIPVHKCWKLNERHYGALQGLNKDETAKKYGEEQVHIWRRSIDVRPPALTEDDPRYEMNDPRYKALKKGELPLTECLVDTEKRVLAYWHSEIAPSLKSGEKVIISSHGNTIRSLVKYLDNLSSDGVVSLNIPTSIPLVYELDDNLRPIRHYYLSMDGEVPEGEIPKHISF

SEQ ID NO: 22605 - protein, 638 aa, Yarrowia lipolytica CLIB122
MNLKELDEKAKYVFDTKDRVADKFFESMSPKPRKLMKFLFSPDYDYSSATENFDPNDTVDDLQLTHSEIVRKVWNKKQLIMGWGFLLFMSLVSTIMSSSFPSYIVYASSEFSQMGALASVQIVQSCIFLIARALCGKLADNFGRFEAMFISVCSLTVGCGLYMGTHNIVTYFAALAFYSIGDIGIQMMYEIFAADTCDLRDRTFFQTITLFANLFTPWIAGPMVQSMLQHSTWQWGMGMWAIIVPVCSIPFLVTLLYFRIKAYKMGLRIRRGDPNRTWWQNTITGIIRMDLPGLCFLCAGLILFFVPISFCAGTDNWKQPGNIAMLTVGTFLLYVAFPLWEFFVTKHPFLKYKLMSKRLVTIPGFIILFYNMSFAIYHPYFQVWLLLAKGLKQAKATNLHMAMFVSLTGTTLLFSPLMRWRAKLKSVMVWGTILYFIGMGLTYEFRKPEKPLHTMILAQVFEGVGAGLLVIPVMVYIQVVCKQSDAAAAITVYYFFNSTGTILGNVISAAVYRNHFPKLLRETGSFTDREIQAIFGSIYAGLRYPVGSPQRAAIGTSLNTVIRSLLIGPLILCAIMFCLSLTNADINLDTAQRIKEESEHVKADESTDDNGLVVETDSIEKPPSYDEKKQVEEMVQKA

SEQ ID NO: 22606 - protein, 212 aa, Oryza sativa
RFDFDPLDVTKTWPEDIIPLQPVGRMVLNKNIDNFFAENEQLAFCPAIIVPGIHYSDDKLLQTRIFSYADTQRHRLGPNYLMLPVNAPKCAYHNNHHDGSMNFMHRDEEVNYFPSRFDAARHAEKVPIPPRVLTGCREKCVIDKENNFKQAGERYRSFDPARQDRFLQRWVDALSDPRITHELRGIWISYWSQCDASLGQKLASRLNLKPNM

SEQ ID NO: 22607 - protein, 324 aa, Lactobacillus plantarum WCFS1
MSKTYRWAIVGLGNIAHSFVKYFDQPDGEIYAVCSRSQDKANAFAAEHNIPKAYGNLDELLADEQVDIVYVATPHNYHIDTILPALRAGKHVLSEKAITMSSTQLAIAKEVAASNHLILAEAMTLYHMPLYEKLHDFAAERHLGDLKMIQASFGSFKEPDPTNRFFNPDLAGGALLDIGVYALAFVEEFLTAKPYITGTTMHRFSSGVDESSTITLRNANDELATVALTFRAKMPKRGIVAYENGYFTVDTYPRADSATFTDSEGHTETITAGDSTNAMNYEIADMQKMVAGELHNTSLAKTTDVMDIMTAARAQWDFRYPFEN

SEQ ID NO: 22608 - protein, 724 aa, Neurospora crassa
MMSWWSSGANTALDEQIEKATSSSLEDIALNLEISDVIRSKTVQPKEAMRSLKKRINHKNPNTQLSALNLTDTCVKNGGAHFLAEIASREFMENLVGLLKAVGPAAPNPDVRNKILDLIQSWAMAAEGRYELSYIGEVYKTLQREGYSFPPKPTVASSMIDSSAPPEWVDSDVCMRCRTAFTFTNRKHHCRNCGNCFDQQCSSKSLPLPHLGIMQAVRVDDGCYAKLTDKGGKSGGSDRKHHSSSRHHHHHHKHKSSSSMQPRDARVDDSFDEDLKRALAMSLEEVKSYSRGHSEPANSTQYKPDKQSTSVSKIAEEEDEDLKAAIAASLADMEEQKKRHAAALKEQTSNVGSSSSAAPFTLPKNDYELTPVEAENINLFATLVDRLQTQPPGTILREPQIQELYDSIGALRPKLARTYGETMSKHDTLLDLHAKLSTVVRYYDRMLEERLSKAYGQHSIGGYNLPAPRQPTGPYPTLDPSAPSAPGAAENFYTGEQQADYSHAPYGQYPPQPPQSQYMPYDRRSSMVGPPNPQYPQQQMPQRTGSWGNAPPAQAPQYNYSGNEVAPSQPGHAQQAQPGAPESAPGAPNNDPNASYYYNPGQPQQQQQQSAQQAPAAAPDHSYPTLPQQGHSYQPSVPQTPASVPVQPSQTPQQAHQRVPPPQQAPQQPYWQHSAAQQTPLPPVWQAPQQTTTYPGYDQEAFPSAPQHAPAPKQPVVEEALIEL

SEQ ID NO: 22609 - protein, 238 aa, Glycine max
  misc_feature (80)..(80): Xaa can be any naturally occurring amino acid
  misc_feature (119)..(119): Xaa can be any naturally occurring amino acid
  unsure (1)..(238): unsure at all Xaa locations
MKIQCDVCEKAPATVICCADEAALCAKCDVEVHAANKLASKHQRLLLQSLSNKLPRCDICQDKPAFIFCVEDRALFCKDXCDEPIHLASSLSANHQRFLATGIRVALGSNCTKAMKKSXEPSKPKAQEVPAKIPSQQVPSFTSSWAVDDLLELTDFESPDKVQKQSLEFGELEWLADVGLFGEQFPHEALAAAEVPQLPMTSSVGSHKAPKSLLSYKKPRIEVLDEDDDEHFTVPDLG

SEQ ID NO: 22610 - protein, 327 aa, Triticum aestivum
  misc_feature (303)..(303): Xaa can be any naturally occurring amino acid
  misc_feature (313)..(313): Xaa can be any naturally occurring amino acid
  unsure (1)..(327): unsure at all Xaa locations
VTLQNKFVQKSRLVPVRNSRDIVDPRVRLQGPARALMADLSAQHGPSAANSIFCSWMALGNILGYSSGSTNNWHKWFPFLRTRACCEACANLKGAFLVAVLFLAFCLVITVIFAKEIPYKAIAPLPTKANGQVEVEPTGPLAVFKGFKNLPPGMPSVLLVTGLTWLSWFPFILYDTDWMGREIYHGDPKGTPDEANAFQAGVRARAFGLLLNSVVLGFSSFLIEPLCKRLGPRGVWVSSNFLVCLSMAAICIISWWATQDLHGYIQHPITASKEIKIVSLALFAFLGIPLAILYSVPFAVTAXLAAKERRWQXLCTGVLNIAIVIPK

SEQ ID NO: 22611 - protein, 822 aa, Neurospora crassa
MSESDKYELLEKIGHGSFGIIRKVRRKADGMILCRKEISYLKMSQKEREQLHAEFSILSTLRHPNIVGYYHREHLKATQDLHLYMEYCGNGDLGRVIRNLIKNNQYAEESFVWSIFSQLVTALYRCHYGVDPPEVGKTVLGLGSTARPKPPSGGMTILHRDLKPENVFLGEDNSVKLGDFGLSKVMQSHDFASTYVGTPFYMSPEICAAEKYTLKSDIWSLGCIIYELCAREPPFNAKTHYQLVQKIKEGKIAPLPSVYSGELFATIKDCLRVNPDRRPDTATLLNLPIVRLMRKEKEVVEFSRTLRTKEETLNKRIRELDSKLSALETEKSSIRAEIDASLRREWEVKARLEIDRLVAQEIESLQQKFEQEVQARVEAELQRHGRGPMFNSHGQQGSFSSTAATLVSDYNLSSVGSGDGDFPSTTDITDISIAESTDGSDITKKIPRTPFHRAQTYSSAPAESVLGTPMDIEMASPSPITIASLSLSPRRMALTKAPTTNPRMIFGEEPTSTDKSNWEVPRETEMIDSGDESEAEALVPSPKRITKSSKNPFSTVTTRSRPSLNSQQNSNVLPIHGLRSKQTLATRSKTVSGVSSIGQHPLRSAPSAPSLRDRKPSPTRRLSRIPSVTGVGRRLSANNINNSSNGGSDAPSSTVTSNITVRTRGLKRMSSTCDESSFSQQQNNQPQQSLPQAPPLKKIGLMAAKNIRGSSLVELHQARAGGRPISAIISNEAKLRAFKEHATIAASAVDSSSSSSSSSGQSQLPTRPRSQPQPITANFEQQQQQQQINAMAGSSRMESGGGDGGNAQSVYCEDLEKAGELC

SEQ ID NO: 22612 - protein, 607 aa, Xanthomonas axonopodis pv. citri str. 306
MAVIEIKVPDIGDYSDVPVIEVLVAVGDSVAKDQGLVTLESDKATLEVPSSAAGVVKELKVKVGDTLSEGALVLLLETEGEAAAPAKAEPKAAPAAAAPAAAPGSKPPVTPSHRAPAEPAAPKPALASGKPADIECKMVVLGAGPGGYTAAFRAADLGLDTVLIERYASLGGVCLNVGCIPSKALLHAAAVIDEVAHAGDFGVDFGQPKITLDKLREYKEKVVGKLTGGLASMAKQRKVRTVTGVASFVSPNELEIVGDDGKTQLLRFEHCIIAAGSQAVKLPNFPWDDKRVMDSTDALELHDIPKTLLVVGGGIIGLEMATVYSALGSKVTVVEFMDQLMPGADKDLVKPLADRLKKQGVEVHLKTKATDVKADKSGITVSFEAAVEGEKPGLQATAYDRVLVAVGRSPNGKKIGAEKAGVTITERGFIPVDRQMRTNVPHIFAIGDIVGNPMLAHKATHEGKLAAEVAAGEKKEWVARVIPSVAYTNPEIAWVGVTETEAKAKGLKVGVAKFPWAASGRAIGIGRTEGFTKLIFDEQTHRVIGGAIVGVHAGDLLAEIGLAIEMGAEAEDIGHTIHAHPTLSESVGMAAEVYDGTITDLYIPKKK

SEQ ID NO: 22613 - protein, 266 aa, Thermus thermophilus HB8
MGAVASAVFFRGLFQMVPVLVGVGAGYLLALLLGRVDLSPVREAPWFALPAFTPATLEWGAVLLIAPVALVTVMEHIGDILTNGRVVGKDFFVKPGLHRTLLGDGLATSLAGLLGGPANTTYSENTGVLAVTRVYDPLVLRIAAGFAILLAFIPKLSALLQTLPQGVLGGISMLLFGMIASIGIRTLAEAEIDFTQSRNLIVVSAILVLGLGGAVANLGTVQVAGAAVPLKVSGMALAALVGVVLNLLLPPRLEPRTLLEEEERLP

SEQ ID NO: 22614 - protein, 456 aa, Glycine max
MRPPVILKTTTSLLDSSSSSPPCDRRLNTLARHFLPQMASHDSISASPTSASDSVFNHLVRAPEDPILGVTVAYNKDPSPVKLNLGVGAYRTEEGKPLVLNVVRRVEQQLINDVSRNKEYIPIVGLADFNKLSAKLIFGADSPAIQDNRVTTVQCLSGTGSLRVGGEFLAKHYHQRTIYLPTPTWGNHPKVFNLAGLSVKTYRYYAPATRGLDFQGLLEDLGSAPSGSIVLLHACAHNPTGVDPTLEQWEQIRQLIRSKALLPFFDSAYQGFASGSLDADAQPVRLFVADGGELLVAQSYAKNLGLYGERVGALSIVCKSADVASRVESQLKLVIRPMYSSPPIHGASIVAAILKDRNLFNDWTIELKAMADRIISMRQELFDALCSRGTPGDWSHIIKQIGMFTFTGLNAEQVSFMTKEFHIYMTSDGRISMAGLSSKTVPLLADAIHAAVTRVV

SEQ ID NO: 22615 - protein, 367 aa, Yersinia pestis KIM
MSGSQTLVVKLGTSVLTGGSRRLNRAHIVELVRQCAQQHAKGHRIVIVTSGAIAAGREHLGYPELPATIASKQLLAAVGQSRLIQLWEQLFSIYGIHIGQMLLTRADLEDRERFLNARDTMNALLDNRIVPVINENDAVATAEIKVGDNDNLSALAAILASADKLLLLTDQAGLYTADPRNNPEAELIREVHGIDDVLRGMAGDSVSGLGTGGMATKLQAADVACRAGIDVVIAAGSQVGVIADVIDGTPVGTRFHSLETPLENRKRWIFGAPPAGEITVDDGAVFAIMERGSSLLPKGIRSVKGDFSRGEVIRIRNLNGRDLAHGVSRYNSDALRMLAGHHSQQISEILGYEYGPVAVHRDDMIVS

SEQ ID NO: 22616 - protein, 419 aa, Yersinia pestis KIM
MNLLEHMGKAAKQASWQLAMLSTAKKNQALAVIANLLESESQTILQANERDMAAARESGMSEALLDRLLLTPARLAAIANDVRQVCRLNDPVGRVIDGSLLDSGLKLERRRVPLGVIGVIYEARPNVTIDVASLCLKTGNAVILRGGKETHYTNQATVNVIQRALEQCGLPAAAVQAIESPDRQLVNELLRLDRYVDMLIPRGGASLHKLCREQSTIPVITGGIGVCHTFVDENADFEKALLVIENAKIQRPSACNSLETLLVHQAVAKTFLPLLSARMHAFGVTLHASPLAMPYLADGKAKVVAVEAADYDDEWLSLDLNVDIVTDIDAAIDHIREHGTSHSDAILTRSLSHAEYFVRAVDSSAVYVNASTRFTDGGQFGLGAEVAVSTQKLHARGPMGLDALTTYKWIGYGDDLVRS

SEQ ID NO: 22617 - protein, 446 aa, Pirellula sp. 1
MQPEHVAGANMPNAVGNHDPMMRQTVTVILAGGRGSRLEPLTRDRAKPAVPIGGAYRIIDFVLSNCLNSDMRRLLLLTQYKAQSLDRHINVAWRNYFCRELGEFIDVVPPQQRIDDNWYQGTADAVYQNIYAIEREAPEYVVILAGDHLYKMNYESMVNFHHRKGADVTVGALRVSREEARQFGVMQVDTDNRLVEFQEKPENPRPTLDDPDVCLASMGIYVFNTRFLFERLCDDATQPDSDHDFGKNIIPGAIEDSQVFAFPFTDENRKRDAYWRDVGTLEAYYEANMDLVGVDPQLNLYDRQWPIRSFQPQLPPPKFVFGSEGRSSRRGEALDSIVCQGAIISGGCVRRSVIGTGCRINSYAQVEDSILFDDVNVGRHSRIRRAIIDKGVQIPPETEIGYDLALDRARGLTVTDSGLVVIARGEMIASPVSTNGSHDPTSSLTS

SEQ ID NO: 22618 - protein, 629 aa, Pirellula sp. 1
MTLVLSLSAQQLTGPPPSAPRGRLVRGRLVSSVIQSQHISDQIRSLDWRRAEAGLLAWETFSTTCLRFKVNQMGTGRSSTASRKLMGASAIRRRATHGNCLDEVAKHCVDFATVRAKYHSPAHPPLENTLTMRNQWKPISFALGSLWVATLTAAVVVSLPDGLRSDAMADQTTQRAGAIDPGQGLNTAQDLSASFRTVAEAMRPSVVSVSSKTSAKAVASRLPPGLRSQLPPGFEKYFEDPSQGGRQMPEREGQGSGVIVREDGYILTNNHVVEDADEVYVELSDDRRLEAEVVGTDPETDLAVLKIEADNLRAIAFGDSDAIQVGDWVLAIGSPFGLDQTVTAGIISGKNRNRRIVNNGNGFEDFLQTDAAINPGNSGGPLVNLRGELVGINTAILSRSGASAGIGFAIPVSLARPVLTSIIEYGQVRRGFLGAQVRDVTPELVAEMGLKVDDGALIQGVLDKQPAANANLQPGDVVVSVDGKKVRSSSQLVNYIASRPPGASVAMVINRDGETLTKTVNLQERTSEAMAMFNGGSVLGAKLEPITPESAQRYGYSGMDSGLIVLSVEDGGIADESGLMAGDVIESAGGNAVSSVTALQAIITEAKRQGIPLRLIIRRGNTRMIVPLQ

SEQ ID NO: 22619 - protein, 225 aa, Populus x canadensis
MAEGNKSHEYETKVGEESGAVETKDRGLFDFLGKKEEEKPQEEVIATDFEEKLQVSEPETKVEEEHKKKEEEEKKPTLFEKLHRSGSSSSSSSSDEEEGDDEEKKKKKKEKRSLKEKMKISGEKGEEKEHEDTSVPVEVVHTETPHEPEDKKGFLDKIKEKLPGHKKADEVPPPAPEHVSPEAAVSHEGDAKEKKGLLEKIKEKIPGYHPKTEEEKEKEKESASQ

SEQ ID NO: 22620 - protein, 616 aa, Populus x canadensis
MAGVNKSHEYETKTSAGEESGATETKDRGLFGFMGKKKEEVPATEYEEKIHRSDNNYPGDGEKKHEDTTVPSNTETPLTQEKKKSYFEQAKDMIPAYKKIEEVPPPTEAVYPSETPLTPEKKKSYFEQAKDMIPAYKKTEEVPPPTESETPLTPEKKKSYFEQAKGIIPAYKKTEDGPPSPAEAAVHPTGTPLEPEKKSYFEQAKDIIPAYKKTEDSPPSPAEAAVHPTGSRPLEPEKKKSYLEQAKDIIPAYKKTEDSPPSPAEAAAHPTGSRPLEPEKKKSYFEQAKDIIPAYKKTEDSPPSPAEAAAHPTGSRPLEPEKKSYFEQAKERTPGYKKTEEVSPRPAEAVVHHTETPLEPEKKGFLDQAKERTPGYKKTEEVSPRPAKAAVHHTETPLEPEEKKGFFDQAKERTSGFKKTEEVSPRPAKAAAHLTETPLEPEDKKSFFDLAKERIPSHKKTEEVPPHPAKSASNEGAFSQTETPFEPEEKGFLDKVKEKVPAHKTEEVPPPAEEKRGFLKEKVPTHKKTEEFPFPAKPAYTEAAVSNTNTPLEPEEKRGLLDKIKEKMPGHKKTEEIPPSEFDSIENVVSHKGEPMVKKGMMEKIKEKLPGHRPQI

SEQ ID NO: 22621 - protein, 711 aa, Geobacillus stearothermophilus
MKRWLSVVLSMSLVFSAFFLVSDTQKVTVEAAGNLNKVNFTSDIVYQIVVDRFVDGNTSNNPSGSLFSSGCTNLRKYCGGDWQGIINKINDGYLTEMGVTAIWISQPVENVFAVMNDADGSTSYHGYWARDFKKTNPFFGTLSDFQRLVDAAHAKGIKVIIDFAPNHTSPASETNPSYMENGRLYDNGTLIGGYTNDTNSYFHHNGGTTFSNLEDGIYRNLFDLADFNHQNQFIDKYLKDAIKLWLDMGIDGIRMDAVKHMPFGWQKSFMDEVYDYRPVFTFGEWFLSENEVDSNNHFFANESGMSLLDFRFGQKLRQVLRNNSDDWYGFNQMIQDTASAYDEVIDQVTFIDNHDMDRFMADEGDPRKVDIALAVLLTSRGVPNIYYGTEQYMTGNGDPNNRKMMTSFNKNTRAYQVIQKLSSLRRSNPALSYGDTEQRWINSDVYIYERQFGKDVVLVAVNRSLSKSYSITGLFTALPSGTYTDQLGALLDGNTIQVGSNGAVNAFNLGPGEVGVWTYSAAESVPIIGHIGPMMGQVGHKLTIDGEGFGTNVGTVKFGNTVASVVSWSNNQITVTVPNIPAGKYNITVQTSGGQVSAAYDNFEVLTNDQVSVRFVVNNANTNWGENIYLVGNVHELGNWNTSKAIGPLFNQVIYSYPTWYVDVSVPEGKTIEFKFIKKDGSGNVIWESGSNHVYTTPTSTTGTVNVNWQY

SEQ ID NO: 22622 - protein, 1042 aa, Podospora anserina
MNNNNFYTTQLAQEEAQRRGQQQNAGRNLGMISTTGLSGVSDSLDEIVRQNNNELQRRRRSIPQSFQGGAMLTTDTDRRLSMMDFGSPDHYQDFQFGNMNSPQMAGFGAMPTSMPGSSGPYSQPGLMAMSDQNDFASLSPDIMGNMMAFSSLNMEAMGTDPASLNLFNSPGLGHQYPPTTMDSVTPDFSMDMGMGTTPLTLTSDDMSGVEDAFGNRPQQRPHNLTLESQMNQFQPSMPPPLTREISGTTAYRSPASGTSHTLSGMGAAQPSAVATVSTPQTPATTVGPALPDSLHASKEKSIYSKSGFDMLRALWYVATRKNAQLQIGAVDMSCAFVVCDVELQDCPIIYVSDNFQNLTGYVRHEIVGQNCRFLQSPTGKVEAGTKREFVENHAVFKLKNAIAEGREIQQSLINYRKGGKPFLNLLTMIPIPWDDPNTIRYFIGFQIDLVECPDAISGQESGGAMHVNYVHSDIGQYIWTPPSSTQWEPENGQTLAIDDVSSLLQQFNPKGAVSDWHRQSWDKMLLENADDVVHVLSLKGLFLYLSPSCKKILEYDTNDLMGNSLASICHPSDIVPVTRELKEAQANVPVNIVFRIRRKNSGYTWFESHGTLFSEQGKGRKCIILVGRKRPIFALSKRNLDQHGGIGDSEIWSKVSTSGMFLYVASNVRSLLDLERKDLEGTSMQDLMRKESRVEFGRTIEKSRRGKIASCKHEIQNKRGQVLQAHTTFYPGDAEEGQKPTFLLAQTKLLKASSRAIAPAGKTGASVASVSDDGQQMTGIVMGHTKTISTEGALISQPAGQLIGGTQDIALASDDNIFDELKTTRCTSWQYELRQMEKVNRLLAEELAQLLSNRKKRKRRKGGGNMVRDCANCHTRNTPEWRRGPSGQRDLCNSCGLRWAKQRDAQTGRVSPRNSNRGGDAQSKKSNSPSHASPLQREVNSNSTKPATTDTPPTEPGSKSTTATPTNVLTPSDNGSSGFPTPTAGGNGSSKTGATSSASPDIKSENGGGGPPQSQPMLEGGSGLGGSGMEMTSIREEREMSA

SEQ ID NO: 22623 - protein, 294 aa, Populus tremula x Populus tremuloides
MDQYEKVEKIGEGTYGVVYKARDRVTNETIALKKIRLEQEDEGVPSTAIREISLLKEMQHGNIVRLQDVVHSEKRLYLVFEYLDLDLKKHMDSSPEFAKDPRLVKTFLYQILRGIAYCHSHRVLHRDLKPQNLLIDRRTNALKLADFGLARAFGIPVRTFTHEVVTLWYRAPEILLGSRHYSTPVDVWSVGCIFAEMVNQKPLFPGDSEIDELFKIFRILGTPNEDTWPGVTSLPDFKSAFPKWPSKDLATVVPTLEKAGVDLLSKMLFLDPTKRITARSALEHEYFKDIGFVP

SEQ ID NO: 22624 - protein, 164 aa, Crocosphaera watsonii WH 8501
MKRLFALILVAALWFSFAPTATAAYDNLTPCSENPAYQQKSKNFLNTTNDPLSGQKRAERYAEALCGPEGYPHLVVDGNFAHAGDFTIPGLMFLYIAGWIGWVGRAYLIAVRDEKNSEMKEIIIDVPLAISKMLTGFIWPVAAFRELVTGKLTAKDSEINVSPR

SEQ ID NO: 22625 - protein, 314 aa, Phytophthora richardiae
HYTEGAELIDSVLDVVRKEAESCDCLQGFQITHSLGGGTGSGMGTLLISKIREEYPDRIMCTYSVCPSPKVSDTVVEPYNATLSVHQLVENADEVMCLDNEALYDICFRTLKLTTPTYGDLNHLVCAAMSGITTCLRFPGQLNSDLRKLAVNLIPFPRLHFFMIGFAPLTSRGSQQYRALTVPELTQQQFDAKNMMCAADPRHGRYLTCSCMFRGRMSTKEVDEQMLNVQNKNSSYFVEWIPNNIKASVCDIPPKGLKMSTTFIGNSTAIQEMFKRVSEQFTAMFRRKAFLHWYTGEGMDEMEFTEAESNMNDL

SEQ ID NO: 22626 - protein, 378 aa, Triticum aestivum
MASSSDEQPKPPEPPAAAVAVATAAPQSHAEWAASMQAFYASGGHPYAAWPAQHLMAAAAASGTSYGAPVPFPMYHPGAAMAYYAHASMAAGVPYPTAEAVAAAAAAPVVAEGKGKAKGGGLSSEKGSSAAPSGDDRSQSCDSGSDESSDTRDYDTDQKDSSAPKKRKSGNTSAEGEPSQAAAVPYAAVESPYQLKGRSASKLPVSAPGRAALPNATPNLNIGIDLWSASQSLAVIPVQGEANPGLALARCDGVGQLDEREIKRERRKQSNRESARRSRLRKQQECEELSRKVAELTTENNALRTELDQLKKACEDMEAQNARLMSQEPAAVTTTLGMSIAAPKVQQHDDEGKLHKKANNNSNGKYVGGSRKLEANPR

SEQ ID NO: 22627 - protein, 157 aa, Brassica napus
MMDGVTGGDSKSGEATTAPPLRNPHPATLLGANALPPPFLSKTYDMVEDPASDAIVSWSPANNSFVVWDPPEFSRSLLPRYFKHNNFSSFVRQLNTYGFRKVDPDRWEFANEGFLRGQKHLLKTISRRKSTHGHGTSSSNTQSHQGSHGFVIFMRRG

SEQ ID NO: 22628 - protein, 170 aa, Zea mays
AAVDGDGADVEDGGGDSSERDFPSYGSGGKNVYVEGSWDNWKSRKAMQKSGKDHSLLLVLPAGVYRYRFVVDGERRCLPDLPCEIDAMGNAVNLLDVNDYVPESVESVAEFEPPPSPDSSYSFQAPEDKDFAKEPPVLPSQLHLGGLNSQNSEESCARPQHIVLNHLFIE

SEQ ID NO: 22629 - protein, 484 aa, Mycobacterium avium subsp. paratuberculosis K-10
MSRDDWISADEGPRRTVSTTIPVFNPSTEEQIAEVPDSDQAAVDAAVARARETFELGVWRKAPASHRANVLFRAARIIEERKDELAALESQDNGMNLTAAGHIIPVSVDMLKYYAGWVGKIHGESANLVSDGLLGTWETYHTFTQLEPVGVVGLIIPWNGPFFVAMLKVAPALAAGCSAVLKPAEETPLTALKLEEIFREAGLPDGVLNVITGYGETTGAALTAHPDVDKISFTGSTEVGRLIVKAAAGNLKRLTLELGGKSPLIMFDDANLDKAIMGAGMGLLAGSGQNCSCTSRIYVQRGIYDQVVEGLAEFAKMLPMGGSDDPNSVLGPLISEKQRQRVEGIVNDGVAAGAKVITGGKPMDRKGYFYEATIITNTTPDMRLIREEIFGPVGCVIPFDDEDEVIAAANDTHYGLAGAIWTENLSRAHRVVNELRAGQIWVNSALAADPSMPISGHKQSGWGGERGRKGIEAYFNTKAVYIGL

SEQ ID NO: 22630 - protein, 448 aa, Ralstonia solanacearum
MFLADIRSIAALAWPVLVGQLAVIAFGVLDTAMAGRASAADLAAIGLGGSIYVTVYISLMGVLQALSPIAGQLYGAGRHGEIGEEVRQAAWLGLALSAIGMLLLWFPAPLLRLADASPELTSKATAYLRYEALALPAALGFRIYSALNNALSRPVMVTVLQLGGLALKFPLNALFLYGGLGLPAMGGPGCALASMIIGWLWCIAGALILMRNPVYRPFRIFTQFSPPHLGRLWGLVRLGVPMGLTYLIEITSFTLMAIFIARMGTVVLAGHQIAANVGAVAYMVPLSLSIATSTLVAQMIGARDRDAARRIAWNGLKLAAACAIAVGGCVLLLRRDLVGLYTRDATVMAIAVPLLPFIAFYQLFDALQVTAAFILRAYKIALIPTVIYALSLWGVGLGGGYLLGFGLLGESAAALRGAAGFWAANALSLAVAGTLLVGYFNRISRAAD

SEQ ID NO: 22631 - protein, 432 aa, Haemophilus somnus 2336
MKKFILLGLLLSFSSSSIAELSDWIKPISDISSGDTAWVMISAILVLFMTIPGLALFYGGMVRKKNVLSTMAQSFAVSGLIAVIWLCFGYSLSFTPNNAFIGGMDRFFLQGLNVFTEQKMLTVYPGAGTIPESVFMIFQMTFAIIAGAIITGATVERMKFSALLLFVGLWSLLIYVPTAHWVWGIGGWLVNDGVLDYAGGTVIHINAGVAGLVAAIVIGKRVGYRHEVMMPHNLVLTLIGTAMLQIGWFGFNAGSALAADARAGMALATTQISASVGALTWILVEVFCKHKPSALGLASGAVAGLVGITPAAGFVSVQSALFIGMITSAVCFVGVMKLKYWFRYDDTLDAFGIHGLGGIVGAVLTGIFVSPDISATETTLWTQIESVLITIIFSASGSFVLLKIIDKTVGLRVERDEERQGLDLSCHGERIE

SEQ ID NO: 22632 - protein, 129 aa, Glycine max
IKVSDAELEFLTGSDKIDDESALSLWHPNLKLLLVTLGEHGSRYYTKSFKGSVDAFHVNTVDTTGAGDSFVGALLAKIVDDQSILEDEPRLREVLKFANACGAITTTQKGAIPALPKEEAALKLIKGGS

SEQ ID NO: 22633 - protein, 718 aa, Kluyveromyces lactis NRRL Y-1140
MYGGYSNQNYYQQPSGRPNDFQQQGNMPFSEPSQPMFSTNYMKQQGSQPSLQDRLTQQQSQPQSHNNQYYPNGGFTDVPNLNYPATPPPTQSIYSHNNNSNSKVYQSAQHTSPGQYSVASESGLYIPPPLQQQQNGQQSPVRSVHQQTQQTPPTFTQQQSSSQPQSPQHNTYHAQQQQQQQQQQQQTQQAQQQGQRQTQQQSQQQAQQQNGSANNYMYFERRPDLLTKTTQDKAAAVKLKIENFYQSSVGYAIERNQRRLELESELASQDWSEERKNRQLASLGKKESQFLRLRRTRLSLDDFNSVKVIGKGAFGEVRLVQKKDTGKIYAMKTLLKSEMYNKDQLAHVKAERDVLAGSDSPWVVSLYYSFQDSQYLYLIMEFLPGGDLMTMLIRWQIFTEDVTRFYMAECILAIEVIHKLGFIHRDIKPDNILIDIRGHIKLSDFGLSTGFHKTHDSSYYKKLLQEDEAKKQQQQQQQQQQLNLQKPQLPNETNNGNRNTMLVDAIHLTMTNRQQMQTWRKSRRLMAYSTVGTPDYIAPEIFLYQGYGQECDWWSLGAIMYECLIGWPPFCSETPQETYRKIMNFEQTLQFPDDIHISYEAEDLIRRLLTHSENRLGRHGGADEIKAHPFFSGVDWNTIRQVEAPYIPKLSSVTDTRFFPTDELENVPDSPAMAQAARQREQMMTQQQGVPQSNAKEDLPFIGYTYSRFDYLTRKNAL

SEQ ID NO: 22634 - protein, 1470 aa, Ustilago maydis 521
MGALSAATTLSTPPQAAPASVTVPAPAPAPAPAPAQQLHDQIIHLEPQPDSAAKSAHQVILSDPQPAHALDDDNDDNDDNLEAQQQSVAHDPEPSPSAHPHQAQPQSHHLQIAIEPTPRRQHTSTCHRTSEKIDIGSTDSTRSSSDARQSDQSTTKPRRTKRKSKHPDDDATVDRVGFRELYRYATVWDHIFNLIGLIAAAAAGAVQPLMTIVFGSLTTAFLEYSNALLFNGDILTARDHLDHEIVHGVLFLVYIGIAMLVATYVYMAAWVYTGEVITRRTREKYLEAILRQDIAYFDLVGAGEITTRIQTDIQLIQEGISDKIPMSVMFISAFVTGFIVAYVKSWQLALALSSMIPCIIIAGALMNAVTAKLQQAELDRVSKAASIAEEALATLRTAKAFGIEHDLVQLYDQSNRQATRFGIKRSLYQGIGMGVFFFVIYSGYALAFYFGAKLLASGHIASGTVMNVIFSILIGAFSMAMMAPNMQALSYAFAAGAKVFETIDRVPPIDSSDPSGLRPEACQGHLEFHQIDFSYPTRPDVPVLEAFSLQVPAGKVTALVGASGSGKSTIVSLVERFYDPDAGAVLLDCVDVRDLNLKWLRTQIGLVSQEPTLFSTTIRANIAHGLINTPFQHASEQEQQKLIIDAANMANAHGFISQLPNGYDTMVGERGFLLSGGQKQRIAIARAIVKNPSILLLDEATSALDTQSEAVVQDALEQASQNRTTITIAHRLSTIKNADKIVVMGKGVILETGQHNELLELNGAYAQLVDAQNIRAKVGNKIVEEGVIDDDDDDDDQQAAQPAKFVASNAKVPLAVTDDAKAAVRQEAKAEMPAGLEKSVTHQSVASAILHQRQREQATRDEEPEKIPSIFYLLYRLAKINRDHVFTLYVPGVIASICSGAAYPCFSLLFGHALQNFSLCSAIGGGACPEPARSTMLHDANLWALYFFVIAILCTLAISIQTYTLMKASCVLMERMRRMSLFAYLRADVSYHDQDAHSSGALSNSLADNSQKINGLVGVTLGTIIQSISTLVTGAIIALANGWKLSLVVIACIPLTLSAGFVRLHLVVLKDARLKTAYEGSAAKACEAAGAMRVVASLTREQDCLEIYRRELDAPSRISRNTAFYGNFLYAVSQALQFWIIGLGFWYGSKLLISGEYTSGQYFTILTAVVFGSIQASNAFSFVPDISNAKTAAWDSIKLLDMVPEIDVTSDQGEVLDKVEGHVRLDKVHFRYPTRPTVKVLRGVDIEVKPGTFVALVGASGCGKSTTVQLMQRFYDPLSGRVLIDGKDIRTLNLAEIRKHMALVSQEPTLYDGSIEFNIRLGAFQDASSVSMDDLRAAAASANILAFIESLPDKWDTQVGAKGTQLSGGQKQRIAIARALIRNPRILLLDEATSALDSDSEKLVQEALDKAAAGRTTIAIAHRLSTISRADLIYVLKDGKVHEHGSHIDLLNRNGVYADLVRMQHLHAHD

SEQ ID NO: 22635 - protein, 399 aa, Bordetella parapertussis 12822
MSKQIQDAYIVAATRLPVGKRNGAYATTRPDDMLAAVLRAVLAQVPALLPERINDVITGCAMPEAEQGMNVSRIGLLLAGLPQSVAGVTVNRFCASGLQAVADAANRIRLGMADVMIGAGTESMSAMPQIMGNKVAMNPAVFAHEENLGMAFGMGLTGEKVAEQWKVSREDQDAFSLSSHQKACAAIAAGHFKAEITPYQVRTHLAGGRDGAVRVAERWIEQDEGPRPDSTAEALARLRPVFAARGSVTAGNSSQMSDGAAAVVLVSERVLREYGLQPLARFVDFAVAGVPPEIMGIGPRMAIPKVLARSGIAQQDLDWIELNEAFAAQSLAVMRDLELDPAKVNPLGGAIALGHPLGATGAIRTATIVHGLRRTGGKYGMVTMCIGTGMGAAGIFEAL

SEQ ID NO: 22636 - protein, 248 aa, Candida glabrata CBS138
MSTSPVSLKVNAALFDVDGTIIISQPAIAAFWRDFGKDKPYFDAEHVIHISHGWRTYDAIAKFAPDYADEEYVNKLEGEIPEKYGEHSIEVPGAVKLCTDLNKLPKEKWAVATSGTRDMAQKWFKILNIERPEYFITANDVKQGKPFPEPYLKGREGLGFPINKEDPSKSKVVVFEDAPAGIAAGKAAGCKIIGIATTFDVDFLKEKGCDIIVKNHESIRVGGYNPETDEVEFIFDDYLYAKDDLLEW

SEQ ID NO: 22637 - protein, 136 aa, Brassica napus
  misc_feature (133)..(133): Xaa can be any naturally occurring amino acid
  unsure (1)..(136): unsure at all Xaa locations
INSVAVTTCGLAREALRLLRERKDGYDIVISDVNMPDMDGFKLLEHVGLELDLPVIMMSVDGETKRVMKGVQHGACDYLLKPIRMKELKIIWQHVLRKKLQEVRDIEGCYEGGADWFTRNDEAHLLGGGGEDXSFG

SEQ ID NO: 22638 - protein, 433 aa, Neisseria meningitidis Z2491
MPSETARPLYADTCAAHTLVWFRQNLRIRDNAALCAAVAEGLPVIGIWIDDAETDNPRRAAFYRQSAAELAQGLAGRGIPLYTAASPAELVRLAVRLNIRAVIADESHTFADKLADNALWHELNKHGIALTFVNDRAVFGKTDLIPDGGTAHTDFDRYREVWLDRFSKQPPAGPDLFAAYRQPFPENLSAPPPAALSDGIFLPQNSGETAAWRQWRRFLEQADSYSVLKDFPSRKHTSLMGAYLSAGCISPRLLARESLERRLNAWADNIIRRDFFLQLALQHTDDDPSDGNPEHTLRLTLWQQGRTGIPIIDAAMRCLHKTGSLHPALRRLSADFFCHVLNLPRREGEIWFARQLTDFDAAINQGNWRLAASRHTCPDIAAAAHKTDPDGTFVRRHIPELAHLSADTVHTPWRFACSVDTHGYPAHPVAGIP

SEQ ID NO: 22639 - protein, 306 aa, Photobacterium profundum SS9
MNKLVVLGSVNADHVLQVASFPRPGETLHGHSYCVIPGGKGANQAVAAARLGADIAFIASVGDDSFGHQMLEAFANEGMNTEAVMVEENMPTGIAMIQVAATGENSICISAEANACLTAERIKPHHALIANANTLLMQLETPIETIEAAATIAKQSGTKVVLNPAPAQPLTDDLLQLVDMITPNETEAELLTGIKVEDMASAQQAADTLHAKGIKCVMITLGSKGVWISQDGKGQQVEGFRVDATDTTGAGDTFNGALLTGLQAGRKMDDAIRFAHAAAAISVTRMGAQTSIPHLSEVERFLTEHS

SEQ ID NO: 22640 - protein, 382 aa, Glycine max
MDRNGPKIKSTILHHLYEKQRQSPYYDNLCRPVSDLLPFIANGIRGVTTNPAIFERAISSSNAYDDQLRELVGAGKDIESAYWELVVKDIQDTCKLLEPIYNETDGEDGHVSLAVSPKLANDTKGTIEAAKWLHNMVGSPCVYMKIPATDESISSMKEVISLGISVNATLIFCLPKYEAVIDAYLDGLESCGMTDLSKVSSAAAFYISRVDVTLDKKLEQIGTTEALDLKGKGAVAQAVLAYQLYQKKFSGPRWERLENRGAKKQRLMWASTNVKNPSYPDTFYVNSLIGPDTISTLPVQALQAFMDHGILSRTLDAKVSEAQDIYNAIEKLGIDWSSVGSELEHEVLDSFTKSFDNVLECMQKKAKLRDFSRAYEPCFQDN

SEQ ID NO: 22641 - protein, 198 aa, Cucumis sativus
AIPWIFAWTQTRFHLPVWLGFGAAFKHIIQKNVKNLQMLQEMYNEWPFFRVTIDLVEMVFAKGDPGIAALYDKLLVSEDLWSFGERLRANYEETKSLLLKIAGHSDLLEGDPYLKQRLRLRDSYITTLNVCQAYTLKRIRDPNYHVKVRPHISKEIMEASKPADELIHLNPQSEYAPGLEDTLILTMKGIAAGMQNTG

SEQ ID NO: 22642 - protein, 394 aa, Pseudomonas putida KT2440
MKDAVIVATARTPIGKAMRGAFNDLKTPSMTAVAIRAAVERAGIEPAQVDDLVLGTAMQSGTAAINPGRLSALAAGLPQSVSGQTVDRQCASGLMAIATAAKQIMVDGMQVTIGAGQEQISLVQQVHNQLASEAYDPAVLRMSEHAYMPMLQTAERVARRYGISREAQDVYALQSQQRTAAAQAAGLFAAEIVPVIARKKVVDKLTGVVSHEEVRLTQDEGNRPATTLADLQGLKPVVEGGCVTAGNASQLSDGASACVLMEGALAARSGIAALGLYRGIAVAGLAPEEMGIGPVLAVPKLLRQQGLTVDDIGLWELNEAFACQVLYCAQQLQIDPAKLNVNGGAIAIGHPYGMSGARMVGHALLEGKRRKVKYVVVTMCVGGGMGAAGLFEVL

SEQ ID NO: 22643 - protein, 223 aa, Triticum aestivum
MAAVGAAPLLYQQQAQAVGDGCYFSSMSSHFSHGGISSTSSSPASSFSAALGATPPAAPAIAADITAQFDISEYLFEEGAFAATLPPVVSVPAVGAAAASSATAVTARSAESAAAAERPRTERIAFRTRTEIEILDDGYKWRKYGKKSVKNSPNPRNYYRCSTEGCSVKKRVERDRDDPAYVVTTYEGTHSHVSPSTVYYASQDAASGRFFVAGTHPPPGSLN

SEQ ID NO: 22644 - protein, 136 aa, Brassica napus
HASAHASAHASEISQLFKAKNHFAFFDMAYQGFASGDPARDAKSIRIFLEDGHHIGISQSYAKNMGLYGQRVGCLSVLCENEKQAVTVKSQLQQLARPMYSNPPLHGAQIVSTILGDPELKSLWLKEVKIMADRII

SEQ ID NO: 22645 - protein, 110 aa, Cryptococcus neoformans var. neoformans B-3501A
MSTTASLDLHYLPDDKPVFACHSCSKVVLMPKKALQDELVSKAFNGRSGRAYLMNSTINTSLGKIEERKLLTGTHTVADLLCASCKESLGWMYIKAPNGDQRYKEGGALP

SEQ ID NO: 22646 - protein, 563 aa, Vibrio cholerae O1 biovar eltor str. N16961
MRMIQPNQFNHPPCALPPPNEMLLRWAKERPNEVYLKQIINRQFVEFTYAEVADKALRLVSALRALGADPGDKVALISKNCAEWFICDLAMMLGDYISVPIFPTAGSETIDYCLEHSESKILIVGKLDDNKATAHVLAERPNLISISLPYPSAAKCQYEFQTLIKQHQPSEERPTHFDEKLMSIVYTSGTSGQPKGAMLTYGAFTWSAQQLINHIGIEENDRLFSYLPLAHITERVYIFGSSIIGGVLTAFPESLDTFIEDVKMHRPTLFISVPRLWTLFQQRIQDKLPQKKLNILLKIPFVNSLIKRKLADGLGLDQARVLGCGSAPVSPALLEWYRSVGLNITEAWGMTESFAYSTLNYPFRADKIGTVGNAGPGIELKIAEDEEILVRSKGLFAGYYKNDTATAESFNDDGWLHTGDIGSLDSEGYLTIQGRKKDTFKTAKGKFVAPVPIEKKLFEYSRVEMMCLIGSGLPAPILLAVPHNFPHFDRARYERTTQKVIARINSELESHEQIKGVLMIKDPWSIDNGILTPTLKIKRHVLEKKYHDVGQNWPKGQLVVWEE

SEQ ID NO: 22647 - protein, 314 aa, Phytophthora tentaculata
  misc_feature (4)..(4): Xaa can be any naturally occurring amino acid
  unsure (1)..(314): unsure at all Xaa locations
HYTXGAELIDSVLDVVRKEAESCDCLQGFQITHSLGGGTGSGMGTLLISKIREEYPDRIMCTYSVCPSPKVSDTVVEPYNATLSVHQLVENADEVMCLDNEALYDICFRTLKLTTPTYGDLNHLVCAAMSGITTCLRFPGQLNSDLRKLAVNLIPFPRLHFFMIGFAPLTSRGSQQYRALTVPELTQQQFDAKNMMCAADPRHGRYLTAACMFRGRMSTKEVDEQMLNVQNKNSSYFVEWIPNNIKASVCDIPPKGLKMSTTFIGNSTAIQEMFKRVSEQFTAMFRRKAFLHWYTGEGMDEMEFTEAESNMNDL

SEQ ID NO: 22648 - protein, 484 aa, SYNECHOCOCCUS SP. WH 8102
MGQFDQNRRTKIVATIGPATESSERIKELVQAGATTFRLNFSHGDHSEHAARISTIRQVSEELGINIGILQDLQGPKIRLGRFAEGPITLANGDSFSLTSRPVSCNQSIATVTYDKLADEVTAGSRILLDDGRVEMKVEQVDQAEQTLHCTVTVGGVLSNNKGVNFPDVQLSVRALTDKDKVDLEFGLSQGVDWVALSFVRNPSDMEEIRGLIREHGHETPVVAKIEKFEAIDQIDAILPLCDGVMVARGDLGVEMPAEEVPLLQKELIRKANSLGIPIITATQMLDSMASSPRPTRAEVSDVANAILDGTDAVMLSNETAVGDFPVEAVQTMATIACRIEKDYPQRSVDSHLASTVPNALSGAVSTIASQLNASAILPLTKSGATAKNVSKFRPASPILAITPDPTVACRLQLVWGVKPLVIPQHELTTHTFLAAMTQAKTMGLLKEGDLVVQTAGTHTGVSGSTDLVKVGIVSSEEAPVNMI

SEQ ID NO: 22649 - protein, 434 aa, Lactococcus lactis subsp. lactis Il1403
MSQKNEQSQEQSNSKSAVLGLQHLLAMYSGSILVPIMIAGALNYSATQLTYLISADIFMCGLATFLQLQLRKHFGIGLPVVLGVAFQSVAPLIIIGQRHGSGAMFGSLMVAGVFVILVSGIFSKIRKLFPPIVTGSVITTIGLSLIPVAIGNMGNNVDKPTIQSLILAVSTIVIILLINIFTTGFIRSIAILIGLIAGTILAASMGLVDFSVVSQAPWAHLPQPFYFSAPKFYLADSLMMIIIAIVSLVESTGVYLALADITGENLDEKRLRNGYRAEGFAVFLGGVFNTFPYTGFSQNVGLVQLSGIKTRKPIYFTAGFLIVLGLIPKFAAVAQLIPTPVLGGAMLIMFGMVATQGIRMLAKVEFEGNQNLLIAAVAIAMGVGFNSTNLFTALPSFIQPFVSNGIVMSTVSAIILNLVFNHGKKDELVTDETK

SEQ ID NO: 22650 - protein, 463 aa, Yersinia pestis KIM
MELPVKNKLKRGLTTRHIRFIALGSAIGTGLFYGSADAIRMAGPSVLLAYLIGGVVAFVIMRALGEMSVNNPQASSFSRYAQDYLGPMAGYITGWTYCFEILIVAIADVTAFGIYMGLWFPDVAHWVWVLSVVLIIGAVNMMSVKVFGELEFWFSFFKVATIIIMILAGIGIIVWGIGNGGQPTGIHNLWTNGGFFSNGFVGMLLSLQLVMFAYGGIEIIGITAGEAEDPKKSIPKAINSVPWRILVFYVGTLFVIMSIYPWNQVGTNGSPFVLTFQHMGITIAAGILNFVVITASVSAINSDVFGVGRMLNGMAEQGHAPKAFTAISKRGVPWVTVLVMMCAMLIAVYLNYIMPENVFLVIASLATFATVWVWIMILFSQIAFRRSLSKDQVKALDFPLRGGTFTSVLAIIFLVFIIGLIGWFPTTRISLYVGLVWIVLLLVGYYFKVKYQKKQATLIKNAD

SEQ ID NO: 22651 - protein, 179 aa, Medicago truncatula
MGYSNSYLFLGLNLFVFLSSQALADIHVLPMLTVEPNLPSMTDQLNDKQISKIKAYFRLLDKDQDFSIDNDELQTLIRSLGLNPTFFGLMVAMNKFDADGNGTIDFTEEDFIISFPKPDKDHNGFVSASELHYYLTNHGTKVTKEEVDEYVREADVDGDGQINFEEFVKAVTMGGSIVV

SEQ ID NO: 22652 - protein, 406 aa, Haemophilus somnus 2336
MRRAVVTGFGIISSIGNNKQEVLEALKKGKSGIEVMPDFVKMGMRSHIAGTIKLNPAELIERKIFRFMGDAAAYAYLSMKEAIEDAGLTEDQVSNDRTGLVIGAGTGSGHNQMVACDAVRGPRGVKAIGPYAVTKTMASSVSACLATPYKIRGVNYSISSACATSAHCIGHAVELIQLGKQDVVFAGGAEELSWECATEFDAMGAVSTKYNETPEKASRAYDAHRDGFVIAGGGAVVVVEELEHALARGAKIYAEIVGYGATSDGYDMVAPSGEGAERCMKQALATVDTPVDYINVHGTSTPVGDVKELGAIRNVFADQKPAISSTKSMTGHSLGAAGAHEAIYSLLMLEHDFIAPSINIETLDEQAVGMNIVTETKENAGLETVMSNSFGFGGTNACLVFKRYKK

SEQ ID NO: 22653 - protein, 314 aa, Phytophthora ramorum
HYTEGAELIDSVLDVVRKEAESCDCLQGFQITHSLGGGTGSGMGTLLISKIREEYPDRIMCTYSVCPSPKVSDTVVEPYNATLSVHQLVENADEVMCLDNEALYDICFRTLKLTTPTYGDLNHLVCAAMSGITTCLRFPGQLNSDLRKLAVNLIPFPRLHFFMIGFAPLTSRGSQQYRALTVPELTQQQFDAKNMMCAADPRHGRYLTAACMFRGRMSTKEVDEQMLNVQNKNSSYFVEWIPNNIKASVCDIPPKGLKMSTTFIGNSTAIQEMFKRVSEQFTAMFRRKAFLHWYTGEGMDEMEFTEAESNMNDL

SEQ ID NO: 22654 - protein, 467 aa, Listeria monocytogenes str. 1/2a F6854
MLYSEDDKRKQESYRIPLFGSEEESTSIPKYVLKKEPMEPRIAYQLVKDQLMDEGNARQNLATFCQTYMEKEAEILMAETLEKNAIDKSEYPQTAELENRCVNILADLWNAPKDMSYLGTSTVGSSEACMLGGLAMKFRWRNNAEKRGLDIQAKRPNLIISSGYQVCWEKFCVYWDVDMRVVPMDKNHLSLDVDKVFDLVDEYTIGVVGILGITYTGKFDDIQLLDEKVEAYNATNEHQLVIHIDGASGAMFTPFVNPELPWDFRLKNVVSINTSGHKYGLVYPGVGWILWKDKEYLPKELIFEVSYLGGSMPTMAINFSRSASQIIGQYYNFLRYGFEGYREIHEKTKKTALYLAKTVEKSGYFEIINDGANLPIVCYKMKEGLDVEWTLYDLADQLLMKGWQVPAYPLPADLSDTIIQRFVCRADLGYNVAEEFAADFADAIHNLEHARVLYHDKERNDSYGFTH

SEQ ID NO: 22655 - protein, 193 aa, Streptomyces coelicolor A3(2)
MRARPRDPGKIQTAPPSILCMTSAPNTRNDDNLPLDVEIGALQGGAADLSQYAGRVVLVVNVASKCGLTPQYAGLERLHERYAEQGFTVLGVPCNQFMGQEPGSADEIAEFCSATYGVTFPMTGKAEVNGEGRHPLYDRLTGFADAEGHSGDIRWNFEKFLIGRDGKVAARFSPQTEPEAAEVVAAVEERLAG

SEQ ID NO: 22656 - protein, 112 aa, Zea mays
MASLVASTAMVDAVVMMHLTQRDAAEIDEQLMGPLGFSVDQLMELAGLSVAAALAEVYKLNEHARVLVICGPGNNGGDGLVAARHLYHFGYRPSICYPKRTPKPLYSGLVTQ

SEQ ID NO: 22657 - protein, 412 aa, Mycobacterium avium subsp. paratuberculosis K-10
MTILDGQLTATRVDSAIRLAEKRAAHNYSPLPIVAASAQGAWITDVDGRRYLDCLSAYSAVNFGHRHPEIVATAHAQLDTVTLVSRAVHSDKLGPFCAALAYLCDKDMVLPMNSGAEAVESGLKVARKWGAEVKGVPAGQANIIVADNNFHGRTISIVSFSSDAAARDGFGPFTPGFRSVPFGDAGTLAQAIDDNTVAVLLEPIQGEAGIVVPPDDYLPAVRALCSEHNVLMIADEIQSGLARTGYTFACDRWRVVPDVYLLGKALGGGVVPLSAVVADREILGVLHPGEHGSTFGGNPLAAAIGTTVVSMLARGEYQARATALGAHLQRRLRALVGHGVDEVRGLGLWAGVDIDPSLGSGREMSLRLAERGVLVKDTHGATLRFAPPLVVTAQEIDWAVGQLAAVLREAAS

SEQ ID NO: 22658 - protein, 153 aa, Funaria hygrometrica
MALSLFGGRGSSILDPFEFGSVWDPFSVLENGPSRRFASDAHAVANTRIDWRETPEAHVFKADLPGLKKEEVKVQVVEGRTLEISGERKKEEVQKGDTWHRVERAQGSFMRRFRLPEGTNVDEVKAQVQDGVLTVTIPKLQKPKPQVRQIEIA

SEQ ID NO: 22659 - protein, 445 aa, Triticum aestivum
MREILHIQGGQCGNQIGAKFWEVICDEHGIDGTGRYAGDSDLQLERINVYYNEASGGRFVPRAVLMDLEPGTMDSVRSGPFGQIFRPDNFVFGQSGAGNNWAKGHYTEGAELIDSVLDVVRKEAENCDCLQGFQVCHSLGGGTGSGMGTLLISKIREEYPDRMMLTFSVFPSPKVSDTVVEPYNATLSVHQLVENADECMVLDNEALYDICFRTLKLATPSFGELNHLISATMSGVTCCLRFPGQLNSDLRKLAVNLIPFPRLHFFMVGFAPLTSRGSQMYRALTVPELTQQMWDAKNMMCAADPRHGRYLTASACFRGKMSTKEVDEQMLNVQNKNSSYFVEWIPNNVKSSVCDMPPRGLKMAGTFVGNSTSIQEMFRRVSEQFTAMFRRKAFLHWYTGEGMDEMEFTEAESNMNDLVAEYQQYQDATADEEYDEEEEEERDAE

SEQ ID NO: 22660 - protein, 521 aa, Ashbya gossypii ATCC 10895
MAIGMLRRNSSGTAVSVLQGRVLRTRRLSSVKDGSRFVPAEPMTLADVNENVVKAKYAVRGKIPTRAEELERRLEEHPGSLPFSKIIQANIGNPQQLGQKPLTFYRQVISLMQNPQLLEMPAEWLQQAFKADVVVRARRMLQDAGGSVGAYSASQGVKGYRRTVAQFIERRDGIPANPDNVYLTAGASSAVSCLLSTFCKGPETGVLIPIPQYPLYTATITQNNAVALPYYLNEADGWSTNPDEMERVILDSKKRNIAPKCLVVINPGNPTGSVLSVKDMEAILTLAAKYGIVVIADEVYQDNVFGDAKFHSMRKVLKNLQLREPTLYKNVQLASLHSISKGLSGECGQRGGYMELIGFREELRKVFVKLASISLCPVVTGQALVDLMVGPPSQGDPSYEQYTQETRSIYHELEERSQLLWKTFCSLEGIECNMPQGALYLFPKLHLPQKAIEAAQKLGIPADELYCSELLDETGICTVPGTGFGQIPGTYHVRTTFLPPGTKWIESWKDFHKKFYDKYRD

SEQ ID NO: 22661 - protein, 278 aa, Shewanella sp. ANA-3
MSNTATQTIPQQGGRYHAAFSRLKAEGRGAFVPFVTLGDPSPELSLKIIDTLVQNGADALELGFPFSDPLADGPVIQGANLRALAAGTTPTQCFNLLAQIRAKYPELPIGLLLYANLVFANGIDAFYAKAQQAGVDSVLIADVPVEEAAPFIQAAKAHGIAPIFIAPPNADSETLEKVSQSGEGYTYLLSRAGVTGTDTKAGTPVEEILAKLQAFNAPPPLLGFGIAEPAQVSAAIKAGAAGAISGSAVVKIIEAHQQDEAKLLSTLGEFTRAMKAAT

SEQ ID NO: 22662 - protein, 479 aa, Erwinia carotovora subsp. atroseptica SCRI1043
MRVLHVCSELFPLLKTGGLADVAGALPGAQIAAGMDVRVILPAFPDLKKGIANLQVVRELDTFAGHVTLLFGHFNGVGIYLIDVPELYERAGSPYHDPALYAYADNYLRFALLGWMGCEMACGLDHYWRPDIVHAHDWHAGLTCAYLAARNRPAKSVFTVHNLAYQGLFAAGHMANLHLPSDFFQVYGLEFYGQISYLKAGLFYADHITTVSPTYAHEITLPAYGYGMEGLLKTREEEGRLSGILNGVDETIWNPTHDPLLTNHYSREALANKAENKRHLQTAMGLKVDDKAPVFAIVSRLTSQKGLDIALSAIPDLLEQGGQLVVLGAGDADLQEGFLAAAAEYHGQVGVQIGYHEAFSHRIIGGADVIMVPSRFEPCGLTQLYGLKYGTLPLVRRTGGLADTVSDCSLENLADGLASGFVFNDCSVGSLSRAIRRVFVLWSRPTLWRYVQRQAMAMDFGWQVSAQAYGALYQRLHTH

SEQ ID NO: 22663 - protein, 451 aa, Volvox carteri f. nagariensis
MREVISIHIGQAGIQVGNACWELYCLEHGIQPDGQMPSDKTIGGGDDAFNTFFSETGAGKHVPRCIFLDLEPTVVDEVRTGTYRQLFHPEQLISGKEDAANNFARGHYTIGKEIVDLALDRIRKLADNCTGLQGFLVFNAVGGGTGSGLGSLLLERLSVDYGKKSKLGFTVYPSPQVSTAVVEPYNSVLSTHSLLEHTDVAVMLDNEAIYDICRRSLDIERPTYTNLNRLIAQVISSLTASLRFDGALNVDVTEFQTNLVPYPRIHFMLSSYAPIISAEKAYHEQLSVAEITNAAFEPASMMVKCDPRHGKYMACCLMYRGDVVPKDVNAAVATIKTKRTIQFVDWCPTGFKCGINYQPPTVVPGGDLAKVQRAVCMISNSTAIGEIFSRLDHKFDLMYAKRAFVHWYVGEGMEEGEFSEAREDLAALEKDFEEVGAESAEGAGEGEGEEY

SEQ ID NO: 22664 - protein, 425 aa, Erwinia carotovora subsp. atroseptica SCRI1043
MVNNDKHDPLMLARQLPLKSVALILAGGRGTRLKGLTALRAKPAVHFGGKFRIIDFALSNCLNSGIRRIGVITQYQSHTLVQHIQRGWSFLNAEMNEFVDLLPAQQRYSTDHWYRGTADAVCQNLDIIRRYRAEYMVILAGDHIYKMDYSRMLIDHVEKGAECTVACLPVPLEEASAFGVMSVDKQHRILDFAEKPDNPTPMPDNPDMALASMGIYVFNADYLYQLLETDRNASDSAHDFGQDLIPKIVSQRLAWAHPFTLSCVTSGEDEHQYWRDVGTLEAYWRANLDLASVTPELDVYDRHWPIRSAIESLPPAKFVQDRSGSHGMTMNSLVSGGCIVSGSVVTHSVLFPRVRVNSFCSIDSTVILPDVNVGRSCRLRRCVIDRACHLPEGMVIGENAEEDSRRFYRSEEGIVLVTRSMLEKL

SEQ ID NO: 22665 - protein, 443 aa, Volvox carteri f. nagariensis
MREIVHIQGGQCGNQIGAKFWEVVSDEHGIDPTGTYHGDSDLQLERINVYFNEATGGRYVPRAILMDLEPGTMDSVRSGPYGQIFRPDNFVFGQTGAGNNWAKGHYTEGAELIDSVLDVVRKEAESCDCLQGFQVCHSLGGGTGSGMGTLLISKIREEYPDRMMLTFSVVPSPKVSDTVVEPYNATLSVHQLVENADECMVLDNEALYDICFRTLKLTTPTFGDLNHLISAVMSGITCCLRFPGQLNADLRKLAVNLIPFPRLHFFMVGFTPLTSRGSQQYRALTVPELTQQMWDAKNMMCAADPRHGRYLTASALFRGRMSTKEVDEQMLNVQNKNSSYFVEWIPNNVKSSVCDIPPKGLKMSATFIGNSTAIQEMFKRVSEQFTAMFRRKAFLHWYTGEGMDEMEFTEAESNMNDLVSEYQQYQDASAEEEGEFEGEEEEN

SEQ ID NO: 22666 - protein, 249 aa, Xanthomonas oryzae pv. oryzae KACC10331
MTRKLVLLRHGQSQWNLDNRFTGWVDVELTDQGRQEAVAAGKLMKDEGLQFDVAHTSVLKRAIHTLQGALKELDQDWLPVSKSWRLNERHYGGLQGLDKAETAAKHGEEQVKIWRRSYDIPPPAMDVDDPGHPCHDRRYATLDRNALPGTESLATTLVRVLPYWHDAIAPQLKAGQTVLVTAHGNSLRALYKYLNDVSNEQILELNIPTGIPLLFELDDNLQVRSFRYLGDPEAAKRAAEAVANQGKAK

SEQ ID NO: 22667 - protein, 361 aa, Candida glabrata CBS138
MEVTRVLGGIYMGGFTPLANHTPLKAEYNITHILSVIKLDTIPEYLVRKGYTLKSIPIDDDDTTDILQYFNESNKFLDHCLYPYEQEYDPALVDFRKKKQDPQNAVYVHCQAGISRSTSFVVAYLMYRFGLRLKDALHAVRRKRPQVEPNPNFMEQLQVYAEMGANRVDPDNQLYKTWKLAQSIKVDPTGRDILSKDDTYKDSSNEDQELDKLTKEELSQTTVIRCKNCRKRLALSTSFIKHDPPSKQSSEGHFIRRAAGSRRIIDIQESSTTCSHFFVEPLNWMKQELQGKQELEGKFSCPGCSYKVGGYNWKGSRCSCGKWVIPAIHLQSSKVDHFPLAERTLPNMVNFKPSNVPLPKN

SEQ ID NO: 22668 - protein, 305 aa, Brassica napus
MQIFVKTLTGKTITLEVESSDTIDNVKAKIQDKEGIPPDQQRLIFAGKQLEDGRTLADYNIQKESTLHLVLRLRGGMQIFVKTLTGKTITLEVESSDTIDNVKAKIQDKEGIPPDQQRLIFAGKQLEDGRTLADYNIQKESTSTHASGLRGGMQIFVKTLTGKTITLEVESSDTIDNVKAKIQDKEGIPPDQQRLIFAGKQLEDGRTLADYNIQKESTLHLVLRLRGGMQIFVKTLTGKTITLEVESSDTIDNVKAKIQDKEGIPPDQQRLIFAGKQLEDGRTLADYNIQKESTLHLVLRLRGGF

SEQ ID NO: 22669 - protein, 482 aa, Kitasatospora griseola
MKGNLPAMSTATSSSVTGSVTTPRTATTPGRRPGLAPGGVPVLGHLPMILRSRFEFIETVRNAGPVTRVKLGPKTAYFVNDYELLAQILVSDADKFVRGIHFKKMRNMVGNGVVTTSGDLHRRQRRIMLPSFSQRRLAMHLPVMRKIMSEFVASVPERRPYDLMGPVMGVGCDIVTSTMLGEKTPPEVLRLVREAVPVFVENAAIQAVDVTGIYKHLPTKSNRDFERLLNAFNEYMYSVIDDKFRNGAGEEAGLLDMLINATDPETGEKFDRTEVRDQAATILLASTETTANTISWACYELARHPRIFAECRAEIDALVKDRDWLDIEIGRHDLPALKRVLFEALRMYPSSYLLSRQASVDTTLGGYAIPKDAAILYSHYGQQRDERNFPHGDEFDPDRWLDKDGAEVTASAFMPFGFGAYRCLGESVAVLEATYCLAMMVHQWDFALSDYSEPKMNATITLSPKDLEFLFTKRTESGAHDE

SEQ ID NO: 22670 - protein, 591 aa, Bacillus anthracis str. 'Ames Ancestor'
MLWRSVVGKLWMTILLLVSFVLGFVAILLSQFFRTYYVDMSEARLQKVATSVSELIEEGADVKTIENIAYKFSDPLSRIIIVEEGKEISSSPKQEGLVTLTIDDLKEDKELAAVFTDKKEIKNKVRKASNSRKNKNTENDIMIVGKPVQSKNESAVFVYESLQVPIQGMERTTDFIFLSAGIAIILTTFFAFFLSTRITAPLRKMREVAFEVSRGKFDAKAPMVSQDEIGELATALNQMGKQLKFNMNALQQEKEQLASILSSMADGVITLNQEGEVVVINPPAEHFLQVWQEEKEIELSKKLPSELVELFHLVVESEQQQVVGINLQKGNYVVLMTPLYNQTKIRGAVAVLRDMTEERRLEKMRQDFIANVSHELRTPMVMLQGYSEAILDDIVQTKEEINEFVQIIYDESVRLGKLVNELLDLARMESGNVELHIGEVDIHPFVEKIGRKFQGIAKDKEVALTVDFKDSIEQYPFDADRMEQVLTNLIDNAIRHTNAGGHVTLVIDTKNNGLIFEVQDSGAGIPEEDIPFLFDRFYKADKARTRGKKGGTGLGLAIAKNIVQGHGGKISVSSVVGEGTTFSVYLPNRII

SEQ ID NO: 22671 - protein, 587 aa, Brassica napus
MYRLISSIASKARVARNCTSQIGSRLSSTRNYAAKDIRFGVEGRALMLRGVEELADAVKVTIPPKGRNVIIEQSWGAPKVTKDGVTVAKSIEFKDRVKNVGASLVKQVANRPTQLNRCLGDGTTCATVLTRAIFTEGCKSVAAGMNAMDLRRGIKLAVDTVVTKLKSRARMISTSEEIAQVGTISANGDRELVTDCKAMESVGKEGVITIQDGKTLFNELEVVEGMKIDRGYISPYFITNQKNQKCELEDPLILIHEKKISNLNSMVKVLELALKSQRSLLIVAADLESDALAVLILNKLRAGIKVCAVKAPGFGENRKANMHDLATLTGAQVITEELGMNLEKIDLSMLGNCKKITVSKDDTVFLGWGAGDKKAIGERCEQIRSMVEASESDYDKEKLQERLAKLSGGVAVLKIGGASESEVGEKKDRVTDALNATKAAVEEGIVPGGGVALLYASKELDKLSTANFDHKIGVQIIQNALKTPVYTIASNAGVEGAVIVGKLLESDNPDLGYDAAKGEYVDMVKSGIIDPVKVIRTALVDAASVSSLLTTTEAVVTEIPTKEDASPAMGGGGGGMGGMGGMGGMGF

SEQ ID NO: 22672 - protein, 634 aa, Photorhabdus luminescens subsp. laumondii TTO1
MEQQKKFDVICMGRIAVDLYGQQIGARLEDMGSFAKYLGGSSGNVAYGTARQGLKSSMLARVGDEHMGRFLREELQSVGCDTSHLTTDKERLTALVLLGIKDKTTFPLIFYRDNCADMAITGDDFSEEYIASARCLAITGTHLSHPNTRDAVLTALNYARRNRVKTVMDIDYRPVLWGLTSLGDGETRYITSEQVTAQLQEVLSLFDLIVGTEEEFHIAGGSTDTIEALRNIRKLTSAALVCKRGSLGCSIFTAEIPNDLNDSITIQGVSVDVLNVLGAGDAFMSGLLRGYLNNEGWEKACTYANACGALVVSRHGCAPAMPDKTELDNYLSRANQILRPDLDETLNHLHRISARKNQWDELCVMAFDHRIQFIELARQANASIKRISSLKQLLLRASREVATEAGLQGKIGLLCDSTFGQDVLNEITGQGWWIGRPIELPGSRPLCLEHGNIGSQLIDWPLEHIVKCLVFFHPEDAHPLRLEQEKKIREIYAACCKSGHELLLEVILPAEMKHSDEFYIRALRRFYNLGVKPDWWKLPPLSSESWDNINYLIEQRDPYCRGVVILGLDAPQEELEMGFNAAAGKSIVKGFAVGRTLFGQPSLKWLKNEIDDNRLIQKIKTNYHNLISLWRQRG

SEQ ID NO: 22673 - protein, 213 aa, Arabidopsis thaliana
  misc_feature (31)..(31): Xaa can be any naturally occurring amino acid
  unsure (1)..(213): unsure at all Xaa locations
MYGQCNIESDYALLESITRHLLGGGGHVGVXALLKDAFHFDTSSSDLSCLFDFPAVKVEPTENFTAMEEKPKKAIPVTETAVKAKHYRGVRQRPWGKFAAEIRDPAKNGARVWLGTFETAEDAALAYDIAAFRMRGSRALLNFPLRVNSGEPDPVRITSKRSSSSSSSSSSSTSSSENGKLKRRRKAENLTSEVVQVKCEVGDETRVDELLVS

SEQ ID NO: 22674 - protein, 377 aa, Photorhabdus luminescens subsp. laumondii TTO1
MEEIRIGLIGTGYIGRTHAIAYAQAPTVFPLAGKLVCEMVAEVSAELAAKRSEQLGFRRFTDNWRKLVSDPDIHVVDICSPNFLHKEMALEAIKHGKHVYCEKPLALNSHDAKLMVEAAKKARVKTLVGFNYMKNPTAQLAKEIISNGEIGEVIHFYGTHNEDYMADPFTPIHWHCFKDKAGLGALGDLAAHIINMAQYLVGDIQTVCADMTTVIKQRPEKTGSSIMVAVENEDQAHAMVRFNSGARGIIETSRIACGRKMGLSYTITGTKGALSFTQERMAELKLYRHDEPANRQGFKTILIGPEHPDYAPFCLGAGHGIGFNDQKTVEIRDLINGIASNKAIWPDFTEGWKVSRILDAIAHSYQEQRWVNVTEIN

SEQ ID NO: 22675 - protein, 329 aa, Desulfovibrio desulfuricans G20
MKVYYEQDANLEVLKGKTVAIIGYGSQGHAHAQNLRDSGVNVIVGQRPGGPNFELAKEHGFQPLSAAEAAAQADLIMILLPDQYQASVYENDIKPHLTAGKSLVFAHGFNIHFNQIVPPKDVDVFMIAPKGPGHLVRRTYTEGGGVPCLVAIHQDASGQAMEKALAYAMGVGGTRSGVIETTFREETETDLFGEQAVLCGGISALIQAGFETLVEAGYQPEIAYFECLHETKLIVDLIYEGGLAKMRHSISDTAEYGDYVTGRRIVTEETKKEMKAALKDIQEGRFARDFILECKANYPTFTARRRIEAEHPIEEVGARLRSMMPWLKK

SEQ ID NO: 22676 - protein, 641 aa, Rhodospirillum rubrum
MDGVSDAARQVENYLAHHEDKGLLRLLTCGSVDDGKSTLIGRLLHDCKLIFDDLMGALERDSKTSGTTGPGKLDFALLLDGLQAEREQGITIDIAYRYFATDKRKFIVADAPGHEQYTRNMATAASTAELAILLIDARKGVITQTRRHTAVCAMMGVRKLVLAVNKMDLVGYEQATFDRIVADYRAFAAKLGIEAVTAIPLSALEGQNMIVRSPAMPWYTGPALLPYLEEVDVTTDRELLPMRFPVQWVNRPNLDFRGFSGTLVSGAVSVGDGVSVLPGGQTSRVKRIVTKDGDLPRAVAGQAITLTLADEIDISRGDLLVPTGDQPAQADHFAAHLLWMDAKALMPGRDYLVRMGPLQMRGQITAIKHKIDVNTMEERPAPTLELNDVGSVNLQVDRAVPFDPYDQNRDTGSFILIDRLTNATVGAGMIRFSLWRSTNLVWQHIEVGAAQRAAQKGQKPCVIWLTGLSGSGKSTIANLLDKRLYAEAHHTTMLDGDNVRHGLNRDLGFTEQDRVENIRRVAEVAKLMADAGLITLVSFISPYREERLAARARIGEERFVEVYVKASVADCAARDPKGLYRKAMAGEIRNFTGIDAPYEEPVTPDLLIDTAVLTPEAAVEVLMAWLRAKGYLSAESEGSGI

SEQ ID NO: 22677 - protein, 609 aa, Yersinia pestis KIM
MLSGWHLPVSPFVRLADDALHITLWLQGDSLPAQVFLRCEPDNEEWLLTMEGHESHDRWRYSVSLPLYEGQPTRRYCFKLLWDDRQQWFGPLGFSVIPPAQLAQFAVDVPDSGPDWVADQVFYQIFPDRFASSQADHGVQEGSYIHHAAGCPVSRREWQQPLDDVHAASTFYGGDLAGISQKIPYFQQLGVTALYLNPIFTAPSVHKYDTEDYYQVDPYLGGERDFLQLRAATREVGIKLVLDGVFNHTGDSHRWFDRYQQGENGACHHEDSPYRGWFTFLPDGRALDWKGNASLPKLNFANEEVAERIYRSDDSVVRYWLRPPYSIDGWRLDVVHMLGEDGGAKGNLHHLHGIYQAAKEENPQAYILGEHFGDARNWLHAGVEDAAMNYMGFALPVRSFLAELDVACHPIKLDAADCAYWMDEYRAGLPHSQQLRLFNQLDSHDTARFLTLLKGDKTRMQMALIWLFSWIGVPCLFYGDEIGLDGGNDPFCRKPFPWDEAQWDHDLLSLCQRMAALRHKSIALRRGGCQVIHASGDSLVFIRSYQTERVMVAIQRSDDADIFLPASPLLNVAEWQRLEGGGDLAVSETGVNMGLEGKSVTLWCGVGEC

SEQ ID NO: 22678 - protein, 529 aa, Neurospora crassa
MFRSPATPALKTVRGFHSTPAASGDEDSDCCLSPDPRKGLATKSSRSTLMVDDVVSANCSPSLRPVVSPAMSGISMLRMHQDIQALSLDTAASSRASSMTSKLGRRVLSGGPARQTGYKRSNSSGTSSGDETASVATESYEINLEHDFAVDGNLSTTIGSTEAVEIGSDGGVARSQKMTADDFEPLRCLGKGTYGTVLLVKQRTTGRLFAQKQFKKASLVVHKKLVEQTKTERQILESVNRHPFVVKLFYAFQDQEKLYLILEYGQGGELFTHLNTEKMFSESTAAFYMAEMVLALSHLHTTLGVVYRDLKPENCLLDSEGHLLLTDFGLSKVAIESEECNSMLGTVEYMAPEVIQGKKYGRSVDWWSLGALGFDLMTGNPPFRGGNNAKIQENIVKQKLIMPYFLTAEAKDLLTRLLRKDPAKRLGSNMPKDLDTIKKHRFFRKIDWKKLAARELEPPIQPMITDPELAENFAPEFTELSLSPVVSRLEERYAAAAAKDDLFGGFSFVASNSLLDGDGFGMRVGTNML

SEQ ID NO: 22679 - protein, 175 aa, Triticum aestivum
MGPTVMASSATSVAPFQGLKSTAGLPVSRRSNGASLGSVSNGGRIRCMQVWPIEGIKKFETLSYLPPLSTEALLKQVDYLIRSKWVPCLEFSKVGFIFREHNASPGYYDGRYWTMWKLPMFGCTDATQVINEVEEVKKEYPDAYVRIIGFDNMRQVQCVSFIAFKPPGCEESGKA

SEQ ID NO: 22680 - protein, 350 aa, Lycopersicon esculentum
MANYNFKYIAIFLLLISILAPRVLSVVEDCGAEEDNSCVNKSKALPLKIIAIVSILITSMIGVCLPLVTRSIPALSPERNLFVIVKAFAAGIILATGFMHVLPDSFDMLSSSCLKEHPWHKFPFTGFVAMLSAIVTMAIDSIATSLYSKKHNGGVVNPEGDQEMAVAGNHVHSHHHHGSLSTKDGLDGKKLLRYRVIAMVLELGIIVHSIVIGLSLGASSNTCTIKGLVAALCFHQMFEGMGLGGCILQAEYKFMKKAIMAFFFAVTTPFGIALGIALSTTYEENSPRALITVGLLNASSAGLLIYMALVDLLAADFMGDKLQGSVKLQIKSYMAVLLGAGGMSVMAIWA

SEQ ID NO: 22681 - protein, 352 aa, Lycopersicon esculentum
MSDYNFKHIAIIFILISIFIPRVLSVVEDCGAQEDNSCVNKSKALPLKIIAIVSILITSMIGVCLPLVTRSIPALSPERNLFVIVKAFAAGIILATGFMHVLPDSFDMLSSSCLKENPWHKFPFTGFVAMLSAIVTMAIDSIATSMYSKKHRAGLVNPETGGADQEMGAVNGGHSHHHHGSLSTKDGVEGTKLLRYRVIAMVLELGIIVHSIVIGISLGASNNTCTIKGLVAALCFHQMFEGMGLGGCILQAEYKFLKKTLMAFFFAVTTPFGIALGMALSTTYEETSPRALITVGLLNASSAGLLIYMALVDLLAADFMGDKLQGSVKLQIKSYMAVLLGAGGMSLMAKWA

SEQ ID NO: 22682 - protein, 327 aa, Gloeobacter violaceus PCC 7421
MKAFVLAAGKGTRLRPFTDALPKPLMPVINKPVMAHILGLCRKHGFDEIVANLHYRGEKIVERFADGHDHGVCLQYSWEEQLLGTAGGVRRQAGFLAGGPFLVISGDVMTDLDLGALVRFHKQSGAVATMAVKEVGDPSRFGVVVADPDGRVRSFQEKPAKGTERSRLANTGIYVLEPEVFEYIPEAAFFDFGNDLFPLLVCKGAPVYAMGTGAYWSDVGTLSQYLYTHWELLTHPEIAQRIGEGTVVQAGAVVSEQALIGSGCTIEKGARVLGYSCVSDGCTIRADSVVVDSVVWTSERWGHKLKGDLVRSIWGDGMQVSLGLPNL

SEQ ID NO: 22683 - protein, 679 aa, Oenococcus oeni PSU-1
MIDTQFENIPLKELNRQDEQQAVNAIRFLSLDMIQKANSGHPGLPLDAAPMAYTLFQKFLNFNNRDPYWINRDRFVLSAGHGSALLYSLLHLNGFKVGIDDLKRFRQLDSLTPGHPEWKHTPGIDATTGPLGQGLTMAVGMAMAEKHLSAIYNRPGFNIFDHETYVIVGDGDLMEGISQESMAIAGEKRLSKLIVLFDSNDVSLDGSLKLSTGEKIQDRIIGNGWDYQFVADGNNLSDIDEAIREAKKSDKPSFIEIKTIIGYGTPLQGSSKVHGAAIGEENVAKTRDFYHWPYQPFEIPKDVYDLFNDSHQAKDRYYKSWQESFQLYAEAFPRLAEQLENNDSTLNTDNLKLAENNDQELATRVSSSEVMQQIADQNRTFWGGSADLSSSNKTYLKDQGDFTDLTPQGSNVFYGVREFAMAAITNGILLHGNSRAFASTFFIFSDYMKPAIRLAALQKLASIFIFSHDSLAVGEDGPTHQPVEQLETLRTTPGIDVYRPADQNETLAAWKAIAKTTNRPTALVTSRQKLPVLRETKDAPVERGAYIVSSAKKDLPDAILIASGSELHLALEAKRELEKEGYDLSVVSMPSMEAFQRQSEEYQASVLPKQVVNRLSIEMASSLAWGRYTGIFGKNLAVDTFGKSGKANDVIDDYGFNLAHISRMVKKMIDENKNLQIVK

SEQ ID NO: 22684 - protein, 739 aa, ASPERGILLUS NIDULANS FGSC A4
MASPGRYDNGEGSSTPKLGSSPIATSAHRSRSPAPDSVRHASIARLASPVPSISNSVSSRQIPVPVSVGESQDLSRVDNLSSLPGPGQSMIASALQDSLGRSPPRFGTPPRRTESPVSNQNPQIRSNYGSFDQKPWREGSEYSAAPYEDPEIVKRHLVQPLESRDTQSSGYGTDNADDEFSSLRLQGGDITRQVYRWAEDAEEGGSVRKPQRSRSFHLNRPTPEEDTMNINSIRVPGGFRRDYLRRAVGSPRPGQSDAGDGASPAPRQLPTSSFLEFLTLYGHFAGEELEEDDEVLGPHEYFSSDTWDEAEEREPGEDSALLHPEAPGKRRRKPRGGTGTNTRTGAALLLLKSFVGTGVLFLPRAFLNGGMLFSSLVLLAVSLLSFYCFVLLVNARLKIEGSFGDIGGALYGKNMRRIILGSIVLSQLGFVSAYIVFTAENLQAFVLAVSNCKSFIDIKFMVLMQLIIFLPLSLIRDISKLGFTALIADLFILLGLVYLFYYDFLTISTQGVAEIASFNPSTWTLFIGTAIFTYEGVGLIIPIQESMKHPKQFTGVLAGVMVIITIIFLAAGAVSYAAYGHATKTVILLNLPQDDKLVNAVQFLYSLAILLSTPLQLFPAIRIMENELFTRSGKYNPGIKWKKNGFRFFLVMICAFVAWGGADDLDKFVSLVGSFACVPLIYVYPPLLHLKACAETKRQKLADIALTVLGVVSCIYTTALTLNNWVNGNNSKAPGYCDS

SEQ ID NO: 22685 - protein, 326 aa, Zea mays
MRPILMKGHERPLTFLRYNRDGDLLFSCAKDHTPTVWYADNGDRLGTYRGHNGAVWTCDVSRDSARLITGSADQTAKLWEVSTGKELFSFRFDAPARSVEFAIGDALAVVTTDNFMDHVPTVQVKRIAEDIDDQTEESALVITGIKGRINRAVWGPLNRTIITAGEDATIRIWDSETGQLLNESDKESGHQKTISSLSKSLDWSHFITGSLDKSAKLWDTRTLTLIKTYVTERPVNAVDISPTHDTVVLGGGQDAMNVTMTDRRAGKFEAKFYHKILQEEIGGVKGHFGPINAGAFNPDGRSFSSGGEDGYVRLHHFDSDYFSIKM

SEQ ID NO: 22686 - protein, 153 aa, Funaria hygrometrica
MALSLFGGRGNSVFDPFEFGSVWDPFTVLESGPSRQLASDVQAVASTRIDWRETPEAHIFKADLPGLTKEEVKVQVLEGRTLEICGERKKEEVQKSDTWHRMERAQGSFMRRFRLPEGTNTDDVKAQVQDGVLTVTVPKVQKPKPQVRQIEIA

SEQ ID NO: 22687 - protein, 489 aa, Bordetella parapertussis 12822
MTQLTQPLSRAELLRDACYIDGKWVGAGNGPSIPVDNPSTGKTIISVPKLGRKEAEQAIDAAEAALPAWSARTGKERAAILLKWAQLTMENQQDLAVIMTSEQGKPVAEAAGEIAYAASFLEWFAEEAKRIDGDILQSPKGGQRLMVLKQPIGVTAAITPWNFPAAMITRKVGPALAAGCTMVVKPAQQTPLTALALAVLAEQAGVPAGVFQVVTGSSREIGAALCESEVVRKLSFTGSTEVGRTLMEQCAPTIKKLSLELGGNAPFIVFDDADLDRAIDGILASKYRNAGQTCVCANRIYVQAGVYEEVAKRLVEKVNAMKVGDGFEQGVTQGPLIDTAAVAKVQEHIADATAHGAKVIAGGQPHALGGSFFQPTVVRDVTQSMRFAVEETFGPVAPLFKFESEDEVIGMANNTIFGLAAYFYTRDYARIWRVSEALEYGIVGINTGIISNEVGPFGGVKQSGLGREGSKYGIEDYLELKYLCVDLGA

SEQ ID NO: 22688 - protein, 149 aa, Funaria hygrometrica
MAIYVNRRNNIWNMPDPMDIMMNFFEDTPARSIARDAHALASTNVDWKETPTEHVIKADLPGLKKEEVHVQVEGDRTLSISGQRKHEEVQKTDTWHRVERSSGQFMRKFRLPENANLEQISAQVQDGVLTVKIPKLEKQKPHSRTIEIG

SEQ ID NO: 22689 - protein, 146 aa, Funaria hygrometrica
MALSLFGRGSGSFFDPFDLSLLESGPSRQFARDAHAVPNTQIDWRETPEAQSSKADLPGLKKEEVKVQLVDGKTLEISGERRKEEVHKDDTWHRVERAHGSFLRRFRLPDNSNVEAVEAQVQDGVLTVTIPKIQKPKPQVRQIEIA

SEQ ID NO: 22690 - protein, 373 aa, Pseudomonas fluorescens PfO-1
MMRSKVTGAQRWVVKIGSALLTADGKGLDRTAMGVWVEQMVALHEAGVELVLVSSGAVAAGMSRLGWTARPSAMHELQAAAAIGQMGLVQAWESSFAEHGRHTAQILLTHDDLSDRKRYLNARSTLRALVELKVIPVINENDTVVTDEIRFGDNDTLAALVANLVEADLLVILTDRDGMFDADPRSNPDAQLIYEARADDPTLDAVAGGTGGALGRGGMQTKLRAARLAARSGAHTIIVGGRLERVLDRLKAGERIGTLLSPERGMLAARKQWLAGHLQTRGTLVLDDGAVSALSQGNKSLLPVGVKLVQGSFRRGEMVVCVAPDGREIARGLANYSALEAQKIIGQSSDAIVGLLGYMAEPELVHRDNLILV

SEQ ID NO: 22691 - protein, 230 aa, Triticum aestivum
  misc_feature (208)..(208): Xaa can be any naturally occurring amino acid
  unsure (1)..(230): unsure at all Xaa locations
MTSKEEKVDIGTHTPPSHEVAPGHQKDVFTGDIEGVREDFREDDFMTRNGLNLKSFQRRDYGTGVVELDRSMKKRHLHMIAIGGSIGAGFFVGSGGAFTKGGPGAVLICFMIAGVMIFNVVHALGELAVMYPVSGGFYTYSTRFIDPSWGFAMGWNYVFQWVIVLPLELTVASFTVQYWNPNINEGIWITVFWLFIIFINVFGTLGYXEEGVWSSCFKLAAIIIFMIVAV

SEQ ID NO: 22692 - protein, 281 aa, Arabidopsis halleri subsp. halleri
SWEATPTQTYGFFRIEILGALVSIQLIWLLTGILVYEAIIRIVTETSEVNGFLMFLVAVFGLVVNIIMAVMLGHDHGHSHGHGHSHGVTDTTHPHDHDHDHEHGHSHGEDQHHAHGDVTEQLLDKSKTQVAAKEKRKRNINVQGAYLHVLGDSIQSVGVMIGGAIIWYNPEWKIVDLICTLVFSVIVMGTTINMSRNILEVLMESTPREIDAAKLEKGLLEMEEVVAVHELHIWAITVGKVLLACHVNIRPEADADMVLNKVMDYIRREYNISHVTIQIER

SEQ ID NO: 22693 - protein, 215 aa, Pseudomonas syringae pv. syringae B728a
MTLRSEILVNKNVLPTAEQALPGRETPMALPEFHFVNGNPLLGPFSSNVEFAIFGMGCFWGAERRLWQQEGVVSTVAGYAGGFTPNPTYEEVCSGLTGHTEVVLVVYEPAKISYEELLKVFWEVHNPTQGMRQGNDIGTQYRSVIYCTTPEQLDAAKASAETFQAQLNKAGKGTITTEIEQAPTVYFAEAYHQQYLAKNPQGYCGLGGTGVCMPA

SEQ ID NO: 22694 - protein, 278 aa, Bacillus cereus ATCC 14579
MWRDTMSAFLGELIGTALLIVLGGGVCAGVSLKKSFAKDSGWIVITMGWGLAVAVAAYAVGSISGAHLNPALTIGLAFKGAFPWSDVPGYIVAQMIGAIIGAVIVYLHYLPHWKETEDPGTKLGVFATGPAIPNTFANLLSEMIGTFVLVFGILAIGANKFADGLNPFIVGFLIVSIGLSLGGTTGYAINPARDLGPRIAHFFLPIAGKGGSNWKYAWIPVVGPILGGSLAGLFHQVVFEGKQNSALIYVIIATVIVLAISYMTSKKSGSNTNSRKVA

SEQ ID NO: 22695 - protein, 283 aa, Arabidopsis halleri subsp. halleri
SWEATPTQTYGFFRIEILGALVSIQLIWLLTGILVYEAIIRIVTETSEVNGFLMFLVAVFGLVVNIIMAVMLGHDHGHSHGDGHSHGVTDTTHPHDHDHDHDHEHGHSHGEDQHHAHGDVTEKLLDKSKTQVAAKEKKKRNINVQGAYLHVLGDSIQSFGVMIGGAIIWYNPEWKIVDLICTLVFSVIVMGTTINMSRNILEVLMESTPREIDATKLEKGLLEMEEVVAVHELHIWAITVGKVLLACHVNIRPEADADMVLNKVMDYIRREYNISHVTIQIER

SEQ ID NO: 22696 - protein, 425 aa, Ustilago maydis 521
MPFHNPLAKQPDSYVKKKEYDFKKTLGEGTFGIVRQATWKAADPPINVAVKVISKRILRGHDEIVKDEMNVLKGLDQPHVVKFLDWFESKDKYYLVFEEATGGELFERILSRGRFTELDACRTIRAVLSAIQYLHHHNIVHRDIKPENILYRTKAEDANVVLVDFGIAAHMKDDNEVLTSVCGSFGYAAPEILAKKGHGKAVDMWSLGVITYTMLCGYTPFRSDDAAALAAETQRGKVEFHDRYWKNVSNEAKDFVKACLTVDPKKRLTADQGMSHPWLTEHSEETQGVHDISAGLRENYRKRWKSAIAAVRASTKFRTFAQLASESRSGSQASLQTSDSSTAFADDPGKISPPTKRELYSESEDEQDGEDNQWFDTEDGSAARGNDATLADAASSQSENEPGWVEKLENKLDDLHLHSSSKSSE

SEQ ID NO: 22697 - protein, 321 aa, Bacillus licheniformis ATCC 14580
MSLDVMTFGESMAMFYANEAGGLHEASSFSKALAGAETNVAVGLSRLGFRVGWMSKVGADSLGTFILNELKKEGVDISEVKRTADRQTGILLKSKVESGDPDVTYYRSGSAASTMSIDDYPAEYFKQAKHMHVTGIPPALSREMRGFARHAVHQMKKDGKTISFDPNLRFQLWPDQQTMVHTINEIAAQADWFLPGINEGKLLTGCNSPEDIAKHYVMQGVKVIVIKLGKEGAYYRTSEKEGYVPGYQVEKVVDTVGAGDGFAVGMISGLLDGLPLEEAVQRANAIGALAVMAPGDMDGLPSRDQLKAFMAGEKNNQKIGG

SEQ ID NO: 22698 - protein, 348 aa, Azospirillum brasilense
MTDQTAASPRVLVTGGAGYIGSHVLHALTDAGIPAVTIDDLSAGRREAIPAAVPLVEGDIGSAELLDRVMRDHRVDAVMHFAGSIVVPESVVKPLDYYRNNTANSLTLLGACLRAGIDKVVFSSTAAVYGAPESVPIREDAPTVPINPYGASKLMTEQMLRDAGAAHGLRSVILRYFNVAGADPAGRTGQATPVATHLIKVACQALLGRRPPLAIFGTDYDTPDGTCIRDYIHVSDLADAHVLALLHLRRGGGSLLMNCGYGRGASVREVVRTLEEVSGEQVPATFADRRPGDPPQLVAGADRIREQLGWVPKHDRLDGIVRSALSWERSLEQSVGQAGAPGGSASRS

SEQ ID NO: 22699 - protein, 448 aa, Lactobacillus plantarum WCFS1
MSQATDYVQHVYQVIEHRDPNQTEFLEAINDVFKTITPVLEQHPEYIEANILERLTEPERIIQFRVPWLDDAGHARVNRGFRVQFNSAIGPYKGGLRLHPSVNLSIVKFLGFEQIFKNALTGLPIGGGKGGSDFDPKGKSDNEIMRFCQSFMTELSKYIGLDTDVPAGDIGVGGREIGFLYGQYKRLRGADRGVLTGKGLNYGGSLARTEATGYGLAYYTNEMLKANQLSFPGQRVAISGAGNVAIYAIQKVEELGGKVITCSDSNGYVIDENGIDFKIVKQIKEVERGRIKDYADRVASASYYEGSVWDAQVAYDIALPCATQNEISGDQAKNLIANGAKVVAEGANMPSSPEAIATYQAASLLYGPAKAANAGGVAVSALEMSQNSMRLSWTFEEVDNRLKQIMQDIFAHSVAAADEYHVSGDYLSGANIAGFTKVADAMLAQGLV

SEQ ID NO: 22700 - protein, 760 aa, Oryza sativa
MASTVTTPSRPVSAGCHRRSPRRSAPVVLSLGGGPRRRTPSSTSCSALASPAKQGTAKLPPPQPTASRTAAADAERERERTDYNEVAAALESIYKLSPAVVEEKDADEEDEKSKQTKRKRKGRVGRSRNATVTVRSSRRRRRGQRMDLGKRVEMRRREEEEGGGGAGKVEDEERGFEEMLLREHAVSTDMGSLDWKRMKIPPVLTSAQSIRLFRIMQPMKAIMEMKENLENEVQSEPNDAQLAEAMNMSVLQMRRHLEVGRAARNKLIKHNLRLVLYTINKYYPDMSNDERFDDICQAGANGLITAIDRFEPKRGFRISTYALFWIRHSIVRAITLSNFTRFPFAMESERQEIHRAREELAFELGRAPTEEEVMKKVGLSPARYRDVVRMTRPTYSLHARNRVTQEELINEVTDDDAIGVDTSSHNTLLRLAIDDLLDSLKPKESVVIRQRFGLDGRGKRTLSEIAGNLNISREMITDTKYTEMIPCYRYRNGRRACTVRRWRVRRWEYINAGAYVFAALLLAVALTALSADGGGGGGASRTALAVAAVALALVAAVNAHDLAAHLAGVDCRVGLVRYDAQLGLVELLVPALHVAGCVLAVVAMAFLLSQGERETHAANTLLAAALVWLLGSILNSCQVYERADGRAQLLQSSVQVPMLLGSLLFLVGAVVNRRRRPEPPVLVGRSWAWTMCVLGSVLWLVAAVFNMGKVFVMHQSDAPRLEKLRGGAQERLSRDREGRLPLNWEEAARSRRVALPAELR

SEQ ID NO: 22701 - protein, 429 aa, Bacillus anthracis str. A2012
MGFILRRWIKKEEIKMNEVLAKGKKAKEIARELVLKSTEQKNEALSAIADQLILETAYILEENKKDIEEGKAKGFSDSLLDRLMLNEQRIVDMTEGIKQLIELRDPVGECVSAWERPNGLSIQEMRVPLGVVGMIYEARPNVTVDAATICLKTGNAVILRGSSSAIHSNKAIVAVIHRALKQTSLPQESVQLIEDTTRDSAKQLFTMNDYLDVLIPRGGKQLIDTVVREASVPVLETGAGNCHVFIDETADKQMAFDIINAKTQRPSVCNAIETIVLHEKWAEQYGSELFSSLKKRGVELRGDQKALAMDSTIVLASEEDWGTEFLSLTPAVKLVSSIEEAIHHINTYGSMHSEAIISENEEKVSKFFVSVDAAALYHNASTRFTDGSEFGSGAEIGISTQKLHVRGPMGLPALTSTKYVIRGNGQIRK

SEQ ID NO: 22702 - protein, 238 aa, Lactobacillus plantarum WCFS1
MIHQLLAEFMGTALMIIFGVGVHCSEVLKGTKYRGSGHIFAITTWGFGITIALFIFGNVCINPAMVLAQCILGNLSWSLFIPYSVAEVLGGVVGAVIVWIMYADHFAASADEISPITIRNLFSTAPAVRNLPRNFFVEFFDTFIFISGILAISEVKTPGIVPIGVGLLVWAIGMGLGGPTGFAMNLARDMGPRIAHAILPIKNKADSDWQYGIIVPGIAPFVGAACAALFMHGFFGIG

SEQ ID NO: 22703 - protein, 911 aa, Neurospora crassa
MEDINKRSRPAATEEDGSDQIGLDSPRSGVATPQPDLHDKRLPGIMSYFNQVRSQSSFSRFLPFKANEQTTAASEAVAPQTEESPRASLTPRLPSSAVEQETHSVSGDEGSLLLAHEALGSVADGTPPADDQMHPYPTPPTSQRSSVRNFKGDAGSEKPRDATPPPSSRPASLHQMNVPDGGRGIGVARRSSLLAPLTATVDGSSVPAPHLSNPASPAPNVPNSTSLLRGSSGEPEDLSYPSPSVAHLTKLTDVTATKSGASTPTRALSTTQPSQSEEKQPQETSRTNSEGSTERDNRTASQTPTPSTSSGGAPASRGKLTIKVGEARGLRRCRDPYVVVVFQRSELISPGPRRAAENDDDAAIAAVQTGGIPIQRQSSDSGRPMAIPMRSRQSSNTSLTDFNTFRRRNSSQSRRSFTNPTWDAEAVFDVVDSDMLVDISVYGQGPSGEEFLGHVDFQANKAEPIRGWFPLQGHADTMAENAPTGELYVEAHYQRAEQKHFGPEDFQILRLIGKGTFGQVYQVRKKDTGRIYAMKVLSKKVIVQKKEVAHTVGERNILVRTAMSDSPFIVGLKFSFQTPSDLYLVTDYMSGGELFWHLQKDGKFEEKRAKFYIAELILAIQHLHENDIVYRDLKPENILLDANGHIALCDFGLSKANLTKNDTTNTFCGTTEYLAPEVLLDEAGYTKMVDFWSLGVLVFEMCCGWSPFYAEDTQQMYKNIAFGKVRFPRDTLSLEGRNFVKGLLNRNPKHRLGATDDAEELKRHAFFADIDWDALSKKLITPPFKPQLKSDTDVSYFDPEFTNALNANGSLNERAAALARGYATSTPLSPSVQANFQGFTFVDESALEENMHDRHYNRYEDDEMDDVADRRRTDDWEDVHGADQRAANRMSGVVKSNTTEDQMFGGTNFDP

SEQ ID NO: 22704 - protein, 414 aa, Bacillus anthracis str. A2012
MKGEAVIFILLLNRLGAALIKIEIAASCMNKSVMYKKTLILDLGDIKVKKQRIVVKIGSSSLADSHEGISKEQLSDHVAALARLKEEGHEVLLITSGAVAAGFSALGYPSRPVTIKGKQAAAAVGQSLLMQAYTEEFRKYGIVTAQLLLTRSDFSRKEQYSNAYATLGELLNRSALPIINENDSISLEELTFGDNDMLSALVSGLVSADMLMIFTDVNGLYDKNPQKNEDAKKYYFLPEVTEEIASLAGDAGSKLGTGGMKSKVDAAKTALSLGVSVFIGTGRGQEKFVDVLKGKGDGTYVGNAPQKEMKINKQWIALHSVVSGQIEIDAGAATAIIQHGKSLLPAGVTNVSGFFQVGEVVEVMTQQGRVIGKGQCTYSAEELRDVKGMQSQQIQARGERHNYEVIHRDYWVSF

SEQ ID NO: 22705 - protein, 512 aa, Photorhabdus luminescens subsp. laumondii TTO1
MQSSINNTKTRTFFGHPYPLSSLFFTEMWERFSYYGIRPLLILFMAATIYDGGMGIPREQAAAIVGIFAGSVYLTALPGGWLADNWLGQRQAVWYGSIIIALGHLSIALSAFFSHYLFFIGLLLIVLGTGLFKTCVTVMVGTLYKKDDPRRDGGFSLFYMGINIGSFIAPLTTGLLVRDYGWHWGFGIGGLGMLVALLIFRFYTIPLMRQYDKEGGLDSSWDHPTVKRENVGKWVFTTVIAIIAIIALLILGVIPFNPVAVASAMVYVISSCVTLYFAYLFLFAGLSSSDRSRLLVCFILLVSAAFFWSAYEQTPTSFNLFANDYTNRIVMGFEIPTVWFQSINALFIILLAPVFSWFWPRLAKNNINPSSISKFIIGILFAAGGFGVMILAAQNVLATGETVSPFWLISSSLFLTLGELCLSPIGLATMTILAPSRMRGQVMGLWFCASALGNLAAGLIGGHVRADQLDNLPDLFSRVSLALVICAAVLMVLIVPIRRLLNSADKSEAKAQ

SEQ ID NO: 22706 - protein, 460 aa, Frankia sp. CcI3
MTGTFETTGSTGESIPVQHHQPGWLGPDGGRPRPVLDVVIPVYNEENDLAPCVRRLYAHLTGTFPYPFQITIADNASTDGTLAIAQALEKELPEVAAIHLEAKGRGRALRAAWGLSPAPVLAYMDVDLSTDLAALLPLVAPLISGHSDLAIGTRLSPASRVVRGPRREVISRCYNLILRRTLAARFSDAQCGFKAIRADAAAGLLPLVEDSGWFFDTELLVLAERAGMRIHEVPVDWIDDPDSRVDVLATAIADLKGVVRLLRAFGSGKLPLAKLHQEFGRGPLTAGHAEEGKVVEVPGVPKGLAGQLLRFAAIGVASTLSYLVLFVLLRTVTGAQIANLLSLLLTAVANTAANRRLTFGLTGPRRAGRHHLQGLVVFAVGLGLTSGSLALLHAASTNPGRGLELSVLVLANLASTVIRFLLLRAWVFRPDREARNVAGMPPATTPPRRRAPTGEIRNAE

SEQ ID NO: 22707 - protein, 853 aa, Methylococcus capsulatus str. Bath
MKEPSLARQEFPRALLDAFDEALCLVDSAGSLVEMNAAAERLLGCGRRALVGKKFLPAPVSGASARRMRVSLGSGKDRLLEGEIRPLAGAGSAISLVRLSDPALESGRGRDSEATLRAVLDTLVDGIIVIDEQGLVQLFTPAAARMFGYHADEVLGRNVALLMPSPHREEHDAYIGRYLRTGEPRIIGIGREVQGRRKDGRLFPLHLSVGEFRRHQRRWFVGVTRDLTVRKQTEDRLLMLSSAVDQSPSGVLIADSQGCIQYVNRGYTTLTGYGAEELVGTRCSGAGRADRLGRLREVIRSGTAWRGEVQDRRRNGEVYWALESITPILDGHGEATHYLLIQQDITEQKRDKEALAESEERFRQVAEMAGEWLWEQDPEGRYLYSSAAVRAILGFEPEEVRGKHYFDLLTPEDRQHWMSALPPAKASEKPFFRLINRYRHKDGHEVYTESTGAPIFGERGELVKWRGVDHDITTRKRYEDELRVRNRAIESASVGINIADAQTKGLPNVYINPALSAITGYSKEELLHHSMRMLQGAGTDPASVEEIREAIRAGRSCRLTIRNYRKDGTPFWNELLISPVKDEAGVITHYIGIQTDVTELRRAEEERHELEIAKQIQLSLLPKAPLHLTTVEIAGFCVPATHVGGDYFDYFHRGDCVDLVIADVSGHSVGAALIMAEVRSVLRTEARRTPVEPSGGEGVAPILAGINDALHEDLSGADLFITMFYVRYDCRTRRLSYANAGHNFALLLPSGEDSCVPLDADGLVLGVRKGVSFEEKAENLKAGDWLLLYTDGVIEAQNGEGEFFGIARLCRQFSARRSLSPEAMVAGLLSELRAFAGNDPLRDDVSMVALRVR

SEQ ID NO: 22708 - protein, 405 aa, Alkalilimnicola ehrlichei MLHE-1
MRRVVVTGMGVVSCIGNDRETVTEALRAGRSGIKYKPEYEEVGLRSQVAGSVDIDLSDHIPRKSLRFMGDAAAFSYIAMEQAMRDAGLSADEISNPRVGLIAGSGGASTANVVQAAETLKNRGVRKIGPYGVTRTMGSTVSACLATPFRIKGLNYSITSACATSAHCIGSAMEQIQLGKQDLIFAGGGEEEHWSLSMLFDGMGALSTKYNETPEKASRTYDADRDGFVIAGGGGMLVIEALDHALARGAKIYAELVGYGATSDGHDMVAPSGEGAARCMRQALETVEGPVDYVNAHGTSTPVGDLAELKAMREVFGEQVPPVSATKSLTGHSLGAAGVQEAIYSLAMLEEGFIAPSINIETMDPEAEGMPIVTEPREGVELNTVMSNSFGFGGTNSTLVFRRYDG

SEQ ID NO: 22709 - protein, 449 aa, Bacillus subtilis subsp. subtilis str. 168
MDNYRDENRTKGNENEVFLTKENDQSASYSARNVIHDQEKKKRGFGWFRPLLGGVIGGSLALGIYTFTPLGNHDSQDTAKQSSSQQQTQSVTATSTSSESKKSSSSSSAFKSEDSSKISDMVEDLSPAIVGITNLQAQSNSSLFGSSSSDSSEDTESGSGSGVIFKKENGKAYIITNNHVVEGASSLKVSLYDGTEVTAKLVGSDSLTDLAVLQISDDHVTKVANFGDSSDLRTGETVIAIGDPLGKDLSRTVTQGIVSGVDRTVSMSTSAGETSINVIQTDAAINPGNSGGPLLNTDGKIVGINSMKISEDDVEGIGFAIPSNDVKPIAEELLSKGQIERPYIGVSMLDLEQVPQNYQEGTLGLFGSQLNKGVYIREVASGSPAEKAGLKAEDIIIGLKGKEIDTGSELRNILYKDAKIGDTVEVKILRNGKEMTKKIKLDQKEEKTS

SEQ ID NO: 22710 - protein, 364 aa, Pseudomonas fluorescens PfO-1
MVDRSSSPGGPQRPPLSAASLVLRLGGIAVVVAALAGAFAYVHGSFDPQRLTPKALVDVLEKNNGVHPGFRRNHAKGVCVIGHFESSGEARAYSVAQVFNEPRTRVVGRFALPAGSPYAPDSAVPIRSLALRFTQANGQQWRTGMNSMPVFPVGTPEAFYQLQQAQSPDPATGKPDPTKVPAFFAAHPEAVPFLTWIKTAKPSASYATETYNSVNAFYLVDASGKKQAVRWSMTPLAQDAAGATAPEGSDFLEKDLVQRLAEGPLRFQLNITLANADDPVNDASKTWPAGRKVLNAGTLVLEKTQPQLSGECRDINYDPLVLPAGIQGSDDPLLAARSAGYADSYLRRTSEVSQLPTGKKEARP

SEQ ID NO: 22711 - protein, 70 aa, Glycine max
PKLPYTDLSTMIRRQRQAIDEKIRELSNCHIVYAGIDFQKKEAGIPKKIIDDIPGLSKYLIPNLSLITWQ

SEQ ID NO: 22712 - protein, 446 aa, Fusobacterium nucleatum subsp. vincentii ATCC 49256
MISNLSELQKKDLKYVFHPCAQMKDFEENPPLVITKGDGIYLIDENGNRYMDCISSWWVNLFGHCNKRINKVITEQVNTLEHVIFANFAHEPAAELCEELTKVLPKGINKFLFSDNGSSCIEMALKLSFQYHLQTGNPQKTKFISLENAYHGETIGALGVGDVDIFTETYRPLIKEGRKVRVPYINSKLSDEEFTKLEDECIKELEDLIKKKHNEIACMIVEPMVQGAAGIKIYSARFLKAARDLTKKYNIHLIDDEIAMGFGRTGKMFACEHAGIEPDMMCIAKGLSSGYYPIAMLCITTDIFNAFYADYKEGKSFLHSHTYSGNPLGCRIALEVLKIFKDDDVLRTINKKGTHLKNKMEEIFKDKSYIKDIRNIGLIGAIELKDNLLPNVRIGREIYNLALKKGIFVRPIANSVYFMPPYIITYEEINKMLQVCKESIEEILKI

SEQ ID NO: 22713 - protein, 308 aa, Staphylococcus epidermidis ATCC 12228
MKNNKNEKLKITIVSGFLGSGKTTFLTHYINELLKIDEKITVIMNEFGSFDVDGNHLSELVKVYPLLNGCVCCDMKSDLVQQIEMLSHNHETDHIIIEATGIAHPIELIMACQDPRIVQFVERPHVVSIVDALRFLQRQQYTDSTKRLMEEQLEVSDVLVVNKLDLISVEDRDALKNQLNEVNKYSSKIYTTYGQVNIEELSQFRDQLVMTHTHSHHHGINSMQYTFTTAIDRQLFYQFILRMPDNVLRLKGYVQFKDEPNVTYEFQYSFGMPDYEVINGDYPLTIVLIGEQLDVNRLKNKLDVLQFS

SEQ ID NO: 22714 - protein, 442 aa, Zea mays
MASRNHNAAAPQLHHHNRAGVPALGKAKAVPARADALNRRPPLGDIGNLVSVRPATGNPQEQVNRPITRSFGAQLVKKAQAKAAIKNAAILPARHAPRQERKAPVKQQPPPEDIIVLSSDSEQSRAQSESSASSVRSRRKAINTLSSVLSARSKAACGIAGKPRQVVDDIDKLDVNNELAVVEYIEDIYTFYKIAQHERRPCDYIDAQLEINSKMRAILADWIIEVHHKFELMPETLYLTMYIIDQYLSLQPVLRKELQLVGVSSMLIACKYEEIWAPEVNDFILISDSAYSREQILSMEKGILNRLEWNLTVPTVYMFLVRFLKAATLGGKVEKEMENMVFFFAELALMQYDLVTRLPSLVAASAVYAARLTLKRAPLWTDTLKHHTGFRESEAELIECTKMLVIAHSTAPESKLRVVYKKYSSEQFGGVALRPPAEEICK

SEQ ID NO: 22715 - protein, 147 aa, Funaria hygrometrica
MDFPLFQILSFPDELEKSLNPQSQKYVRDTKAMVSTAVDVKELPDAYIFVADMPGLKSADVKVQLENDNVLVIGGTRKREEPDPKVKYIRMERNSGSFMRKFTLPQNSNLDKIAASCVNGILTVTVPKIPPPEPAKPRTIEVTMGNQ

SEQ ID NO: 22716 - protein, 84 aa, Triticum aestivum
EVPVSESQPRPTRPCRYDIDMTKCIYCGFCQEACPVDAIVEGPNFEFSTETHEELLYDKEKLLENGDRWETEIAENLKSEALYR

SEQ ID NO: 22717 - protein, 174 aa, Pteris vittata
MATMLAAMAVSAPSCAAAAESLSKSFSGLKANTLFAPKCANPLAISNGSRISAMLVWKPYDNKKFETLSYLPPLTNDQIAKQVEYMVRKGWTPCIEFDTIGSVYREHFHGSGYYDGRYWIMWKLPMFGCTDSGSVLREIAECAKEYPTAFIRVLGFDAKRQVQVAGFLVKKPSQ

SEQ ID NO: 22718 - protein, 161 aa, Funaria hygrometrica
MDFVVFDTDPFLTTLHQLVHEPGSDLERKIKRQRRNHHDEPRHVTIATPVDVKEIKDAYLFVADVPGLQKTDIEVQVENENVLTMRGKRKLDEKVNEKEEDTKFIRMERSPVKLLRKFTLPSDANADAITANCVDGVLTVTVPKIPPPEPAKSKTVQIAVD

SEQ ID NO: 22719 - protein, 465 aa, Crocosphaera watsonii WH 8501
MGSITAVAFSEDNQFIATGSHIGIVRIWGAISGQEWRCLEDHQTAVESLSFSPDSKLLASGGRDKKIRLWDVTSGKFQQILEGHQDWVTALIFDKNADHLASASAINDKDICIWSLAQRQKPQKLKGDSNSIQAIAFCPDERYLISAASDNTIRLWDRETGEEIKQMQQHSNWVYSLACSKDGRWVAIAYSDGIIHLWDIIKQREINCLEGHESVISSLAFCPDNQHLVSGSWDGTVRVWDIHTRKCKRILQGHQNWVSSVAVSPNGEWVASGSWDKTVCLWEITNSWPNFKGSKPTRILQGHLEDIEGVAFSPDNQLIASCSNDKTIKIWEVASGQQVQQLEGHKYSVEDIVFSPDGQFIASVSRDKTVRVWHIISGKEIHRFQGHTNYVNCVAFSLEGRYLASGGKDKMIAIWDLVSGELTQLIQGHTNYINSLAFTGDGSFLVSGDNDGVVRLWKLELGKLE

SEQ ID NO: 22720 - protein, 490 aa, Burkholderia fungorum LB400
MTRTFELGELIRSDNFIDGAWTPAQDNLRFAVTNPASGEIIAEVADSSPADARAATDAAARALPAWRARLPKERAAVLHRWHALIMANLDALGALISLEQGKPLAEGKGEVAYGASYVAWFAEEATRIYGDLIPQQQRGKRMTAVKEPVGVVAAITPWNFPLAMIARKIAPALAAGCTVVAKPAEDTPLTASALVLLAHEAGVPPGVLNLITASRDHAVAAVAEWLHDARVRKITFTGSTPVGKYLARESAETLKKLSLELGGNAPFIVFDDADLEAAVAGLMAAKFRNGGQTCVCPNRVYVQAGVYERFGALLAERVGALKVAPATDPAAQIGPMINSRALDKIARHVDDAVAHGARVLTGGKRLAELGPHYYAPTVLADATAAMQLNSEETFGPIVPLFRFEDEAEAVNAANDTPFGLAAYFYSEGVKRIDRVARALEAGIVGINEGAVASEAAPFGGVKESGYGREGSKYGLDDYLSIKYLCQGNLE

SEQ ID NO: 22721 - protein, 379 aa, Vibrio vulnificus CMCP6
MTTNQQSVAASQPKTIVVKLGTSVLTGGTLALDRAHMVELARQCAELKKQGHSVVVVSSGAIAAGREHLGYPALPNAMASKQLLAAVGQSQLIQTWESLFALYGIKIGQMLLTRADLEDRERFLNARDTINALVDNGIIPVVNENDAVATSEIKVGDNDNLSALVGILCGADKLLLLTDQKGLYTADPRKDPNAELIKEVKVIDDTLRKIAGGSGTTLGTGGMATKLQAADIARRAGIEVIIAAGRGQNVIFDALSPAPQGTRFLPCEEALENRKRWILAGPAASGDIVIDQGAVKAVVEKGSSLLAKGVTKVLGEFSRGEVVRVTDAQGHLVARGIASYSNQDMAKIAGKHSKDIISILGYDYGSEVIHRDDMVVIQE

SEQ ID NO: 22722 - protein, 246 aa, Methanothermobacter marburgensis str. Marburg
MVSLTKRCIAEFIGTFILVFFGAGSAAVTLMIASGGTSPNPFNIGIGLLGGLGDWVAIGLAFGFAIAASIYALGNISGCHINPAVTIGLWSVKKFPGREVVPYIIAQLLGAAFGSFIFLQCAGIGAATVGGLGATAPFPGISYWQAMLAEVVGTFLLMITIMGIAVDERAPKGFAGIIIGLTVAGIITTLGNISGSSLNPARTFGPYLNDMIFAGTDLWNYYSIYVIGPIVGAVLAALTYQYLTSE

SEQ ID NO: 22723 - protein, 327 aa, Eucalyptus gunnii
MSAAGGAGKVVCVTGASRYIASWLVKLLLQRGYTVKASVRDPNDPKKTEHLLGLDGAKDRLQLFKANLLEEGSFDPIVEGCAGVFHTASPFYHDVKDPQAELLDPAVKGTLNVLKSCSKAPSLQRVVLTSSMAAVAYNRQPRTPEVVVDESWFSDPDLCRQTNAWYVLSKTLAEDAAWKFVKEKGIDMVTINPAMVIGPLLQPTLNTSAAAIGNLINGAPTFPNASFGWVNVKDVANAHILAFEVPSASGRYCLVERIAHYSEIVRILRELYPSAQLPEKSADDKPFVPIYQVSKEKVKSLGINYIPLEQNLKETVESLKEKGFVKF

SEQ ID NO: 22724 - protein, 242 aa, Escherichia coli
LKERKEGAFVPFVTPGDPGIEQSLKIIDTLIEAGADALELGIPFSDPLADGPTIQNATLRAFAAGVTPAQCFEMLALIRQKHPTIPIGLLMYANLVFNKGIDEFYAQCEKVGVDSVLVADVPIEESAPFRQAALRHNVAPIFICPPNADDDLLRQIASYGRGYTYLLSRAGVTGAENRAALPLNHLVAKLKEYNAAPPLQGFGISAPDQVKAAIDAGAAGAISGSAIVKIIEQHINEPEKML

SEQ ID NO: 22725 - protein, 377 aa, Bacillus licheniformis ATCC 14580
MKAVTFQGPQHVEVSQVEDAKIEKSDDIVVRITSTAICGSDLHLYQGNFPLPKGFQLGHEPMGIVEETGPDVTKVKKGDRVVIPFTVACGHCFYCENKLESQCDNANPHYDSGGYFGYSEKFGNHPGGQAEYLKVPFGNFTPFVIPESCEMEDESLLFLSDVLPTAYWSVLHAGVKKGDTVIVLGCGPVGLMAQKFAWMEGAKRVIAVDYLDYRLKQAEALNRVEVFDFTKYPDMGEHLKEITKGGADVVIDCVGMDGKKSPLEYLEQKLKLQGGTLGPIQISTKAVRKCGTVQITGVYGSNYNMFPLGAFFSRNVTLKMGQAPVIHLMPEIYKKIEENQFDPKEIITHQLPLEEAGRAYHLFNDHEDDCIKVILKP

SEQ ID NO: 22726 - protein, 117 aa, Legionella pneumophila
MLDFSLNRDPQTGELYIETSLCGKPLLTTPQLNKGTAFTQEERKDFGLLGKLPHRVETLDEQVKRAYLQYSSYTTRLQQHIYLNNLHDKNQIVFYKLLSRHLGEMLPIIYTPIVGAA

SEQ ID NO: 22727 - protein, 447 aa, Zea mays
MGKEKTHINIVVIGHVDSGKSTTTGHLIYKLGGIDKRVIERFEKEAAEMNKRSFKYAWVLDKLKAERERGITIDIALWKFETTKYYCTVIDAPGHRDFIKNMITGTSQADCAVLIIDSTTGGFEAGISKDGQTREHALLAFTLGVKQMICCCNKMDATTPKYSKARYDEIVKEVSSYLKKVGYNPDKIHFVPISGFEGDNMIERSTNLDWYKGPTLLEALDLINEPKRPSDKPLRLPLQDVYKIGGIGTVPVGRVETGIIKPGMVVTFGPSGLTTEVKSVEMHHEALQEALPGDNVGFNVKNVAVKDLKRGYVASNSKDDPAKEAASFTSQVIIMNHPGQIGNGYAPVLDCHTSHIAVKFAELITKIDRRSGKELEKEPKFLKNGDAGMVKMVPTKPMVVETFSEYPPLGRFAVRDMRQTVAVGVIKSVEKKDPTGAKVTKAAAKKK

SEQ ID NO: 22728 - protein, 457 aa, Oryza sativa
MDHVLGCATSLVSCQKVFEGPLVNSLLSIRQGGLKMYIIEDKGGAIALMLASLFFLGTWPAVLTLLERRGRLPQHTYLDYSITNLLAAVLIALTFGQLGDSKPNMPNFFTQLSQDNWPSVLFAMAGGVVLSIGNLSTQYAWAYVGLSVTEVISSSMGGGIGSRSENSHVGSSGTTLNYFLDNRINRAEILFPGVACFLVAVILGSAVHASNAADNEEKLNGSTNIYKLGENGSVEPNKEVIEKDAPKDLENGASATKYVAKAEAGTAEYLIELEERRSIKVFGSSTFIGLGIVFFSGVCFSLFSPAFNLATNDQWHTLKQGVPHLVVYTAFFYFSISCFVIGIGLNILFLYRPMAGVPKSSFKAYLNDWEGRQWALLAGFLCGFGNGFQFMGGQAAGYAAADAVQALPLVSTFWGILLFGEYRKSSRKTYILLGFMLFMFIVAVAVLMASSGHRSTK

SEQ ID NO: 22729 - protein, 271 aa, Sambucus canadensis
VFIANDWHTALLPCYLKSIYKTNGIYKNAKVAFCIHNIAYQGRFAFSDFSLFNLPDEFRSSFDSIDGYDKPVKGRKINWMKAGLLESDRVFTVSPYYAQELVSGVDKGVELDNIIRKTGITGIVNGMGTQEWNPSTDKYVGVKYDITTAVDAKPLLKEALQAEVGLPVDSNIPLIGFIGRLEEQKGSDILAAAIPKFIGQNVQIVVLGTGKKYMEKQLEQLEILYPDKARGVAKFNVPLAHMIIAGADFMMIPSRFEPCGLIQLHAMRYGT

SEQ ID NO: 22730 - protein, 765 aa, Glycine max
MGAVILPDLGTEILIPVCAIIGIGFALFQWVLVSKVKLSAARDASPNAAGKNGYNDYLIEEEEGLNDHNVVLKCAEIQNAISEGATSFLFTEYKYVGIFMVAFAILIFLFLGSVEGFSTSYQPCTYDQTKMCKPALATAVFSTISFLLGGVTSLISGFLGMKIATYANARTTLEARKGVGKAFITAFRSGAVMGFLLAANGLLVLYIAINLFKIYYGDDWGGLFEAITGYGLGGSSMALFGRVGGGIYTKAADVGADLVGKVERNIPEDDPRNPAVIADNVGDNVGDIAGMGSDLFGSYAESSCAALVVASISSFGVNHELTAMLYPLIISSVGILVCLLTTLFATDFFEIKAVKEIEPALKKQLIISTALMTIGIAIVSWIALPTSFTIFNFGVQKDVKNWQLFLCVAVGLWAGLIIGFVTEYYTSNAYSPVQDVADSCRTGAATNVIFGLALGYKSVIIPIFAIAISIFVSFTFAAMYGIAVAALGMLSTIATGLAIDAYGPISDNAGGIAEMAGMSHRIRERTDALDAAGNTTAAIGKGFAIGSAALVSLALFGAFVSRAAITTVDVLTPKVFIGLIVGAMLPYWFSAMTMKSVGSAALKMVEEVRRQFNTIPGLMEGTAKPDYATCVKISTDASIKEMIPPGALVMLTPLVVGILFGVETLSGVLAGSLVSGVQIAISASNTGGAWDNAKKYIEAGASEHARSLGPKGSDCHKAAVIGDTIGDPLKDTSGPSLNILIKLMAVESLVFAPFFATHGGLLFKI

SEQ ID NO: 22731 - protein, 452 aa, Escherichia coli
MTQRRDLQALIDAAPVGKMQWRVIICCFLVVMLDGFDTAAIGFIAPDIRTHWQLTAGDLAPLFGAGLLGLTAGALLCGPLSDRFGRKRVIELCVFLFGALSLASAFSPDLQTLVFLRFLTGLGLGGAMPNTITMTSEYLPARRRGALVTLMFCGFTLGSAVGGIVSAQLVPVIGWHGILVLGGVLPLMLFVALLVVLPESPRWQVRRQLPQAVIAKTVSAITRERYVDTQFYLIESASVTKGSIRQLFMGRQLPITLMLWVVFFMSLLIIYLLSSWMPTLLNHRGIDLQHASWVTAAFQIGGTLGALALGVLMDKFNPFRVLALSYATGAICIVMIGLSQDGLWLMALAIFGTGIGISGSQVGLNALTATLYPTQSRATGVSWSNAVGRCGAIVGSLSGGVMMAMNFSFDTLFFIIAVPAAISAVMLTLLITVVRQSTSIPDSLPHAGVVNE

SEQ ID NO: 22732 - protein, 465 aa, Canavalia lineata
MASSVLSGANQSSPSSTVLNTHLKGKPRLGDNALRFSGNKGGSNAFSSRSRGRISMAVADNVSRFEGIPMAPPDPILGVSEAFKADNSDVKLNLGVGAYRTEELQPYVLNVVKKAENLMLERGQNKEYLPIEGLAAFNKATAELLLGADNPAIKQQRVATVQGLSGLVSLRLGAALIERYFPGAKVLISSPTWGNHKNIFNDARVPWSEYRYYDPKTVGLDFEGMIEDIKSAPEGTFVLLHGCAHNPTGIDPTPEQWEKIADVIEEKNHRPFFDVAYQGFASGSLDEDAASVRLLVARGIELFIAQSYSKNLGLYAQRIGAINVISSSPESAARLTSQLKRIARPMYSNPPVHGARIVADLVGNPLLFEEWKAFMEMMAGRIKNVRQLLYDSISSKDKSGKDWSFILKQIGMFSFTGLNKEQSDNMTNKWHVYMTKDGRISLAGLSLAKCEYLADAIIDSYHNVS

SEQ ID NO: 22733 - protein, 472 aa, Hordeum vulgare
  misc_feature (118)..(118): Xaa can be any naturally occurring amino acid
  unsure (1)..(472): unsure at all Xaa locations
MDVPLASKVPLPSPSKHEQCNVYSHKSSSKHADLNPHAIDSVLGIILGGGAGTRLYPLTKKRAKPAVPLGANYRLIDIPVSNCLNSNISKIYVLTQFNSASLNRHLSRAYGSNIGGYXNEGFVEVLAAQQSPDNPDWFQGTADAVRQYLWLFEEHNVMEYLILAGDHLYRMDYEKFIQAHRETDADITVAALPMDEERATAFGLMKIDEEGRIIEFAEKPKGEQLKAMMVDTTILGLEDARAKEMPYIASMGIYVISKHVMLQLLREQFPGANDFGSEVIPGATSTGMRVQAYLYDGYWEDIGTIEAFYNANLGITKKPIPDFSFYDRSAPIYTQPRHLPPSKVLDADVTDSVIGEGCVIKNCKIHHSVVGLRSCISEGAIIEDTLLMGADYYETEADKKLLAEKGGIPIGIGKNSHIKRAIIDKNARIGDNVMIINVDNVQEAARETDGYFIKSGIVTVIKDALLPSGTVI

SEQ ID NO: 22734 - protein, 326 aa, Triticum aestivum
  misc_feature (174)..(174): Xaa can be any naturally occurring amino acid
  misc_feature (242)..(242): Xaa can be any naturally occurring amino acid
  misc_feature (257)..(257): Xaa can be any naturally occurring amino acid
  misc_feature (264)..(264): Xaa can be any naturally occurring amino acid
  unsure (1)..(326): unsure at all Xaa locations
MAMSRAAAAVGQRRCGPLLPAARSMASWFGHVEPAAKDPILGVSEAFLADPSPDKVNVGVGAYRDDDGKPVVLQCVREAERRIAGSTNMEYLPMGGSVKMIEESLKLAYGEDSEFIKDKRIAAVQALSGTGACRLFADFQKPFLPDSQIYIPTPTWANHHTFGRDAPGPQRTFXYYHPRSQEDWNFAGLMGWISGRPQKGSSHMLHACAHNPTGGDPSEEQWREISHQFRVKNQFPFFEDAXYRALAVGDPERESKXIKILLEXIGIQLDCAHPIPRNIGNLMGERTGCPQYFLVTNKIKASGVEKAHSHKMAKLFFRHPPPLGGA

SEQ ID NO: 22735 - protein, 380 aa, Thermoplasma volcanium GSS1
MLRKLMHVGPSMTSYEVQLEGVRENVGFASPEFLEAMRNSLEGLRIVVGADNSYLPFILPGSGTVAMESVTSILPRKGKVLVASNGVFGNRWKPILDAHRMEYEVLEAEPGKSVDPASIKDKLSSGNFASLVFTHVETSTGVRADIEEICRKARPLVDRIVVDGVASVGGETLKVKEWGIDAIITASQKGLASPPGAALLVVAKDSLNNTAGDGYFFDLKNWVEPMNTYLKGENGYLSTEPVGVVMALSHVFNDIRAEGLENTIKRHRVFSEALNEGLEEIGLKVLADREHWSNTVTAVVAERSDDIVKFALSMGIEFATGVHPKLKGKYFRIGHMGYFNYYDVFSALSVIERSALRAGINIKLGSGLTRAQEILIKNGV

SEQ ID NO: 22736 - protein, 513 aa, Hordeum vulgare
  misc_feature (159)..(159): Xaa can be any naturally occurring amino acid
  unsure (1)..(513): unsure at all Xaa locations
MAMAAAASPSKILIPPHRASAVTAAASTSCDSLRLLCAPRGRPGPRGLVARPVPRRPFFFSPRAVSDSKSSQTCLDPDASTSVLGIILGGGAGTRLYPLTKKRAKPAVPLGANYRLIDIPVSNCLNSNISKIYVLTQFNSASLNRHLSRAYGSNIGGYXNEGFVEVLAAQQSPDNPDWFQGTADAVRQYLWLFEEHNVMEYLILAGDHLYRMDYEKFIQAHRETDADITVAALPMDEERATAFGLMKIDEEGRIIEFAEKPKGEQLKAMMVDTTILGLEDARAKEMPYIASMGIYVISKHVMLQLLREQFPGANDFGSEVIPGATSTGMRVQAYLYDGYWEDIGTIEAFYNANLGITKKPIPDFSFYDRSAPIYTQPRHLPPSKVLDADVTDSVIGEGCVIKNCKIHHSVVGLRSCISEGAIIEDTLLMGADYYETEADKKLLAEKGGIPIGIGKNSHIKRAIIDKNARIGDNVMIINVDNVQEAARETDGYFIKSGIVTVIKDALLPSGTVI

SEQ ID NO: 22737 - protein, 474 aa, Bacillus anthracis str. A2012
  misc_feature (470)..(470): Xaa can be any naturally occurring amino acid
  unsure (1)..(474): unsure at all Xaa locations
MLPRNNTNNELKRTMKSRHLFMIALGGVIGTELFNGSGFIISQAGPGGSVLAFMAGGLLMYFVMLCLGELAVAMPVSGSFQEYATKFINPATGFTIGWLYWLSWANTTGLEFTTAGITMQRWFPDIPVWVWCLIFGVTIFMINALSARSYAETEFWFSSIKVSAIIAFIILGGAAMFGLIDLKGDEPAPLLSNFVNHGGLFPNGLAAILLTMVTVNYSFQGTELVGIAAGESEDPAKTLPRSIRNIIWRTMFFFVLAIFVLVALIPWEEAGLTKSPFVAVFDNISIPYAADIMNFVILTAVLSVANSGLYAATRMLWSLSKNEMAPAFLKKLSSRGIPLNALILTISISAFSLLTSVVAAETVYLWLISISGVITIIVWMSICVSQFFFRKHYVADGGRLEDLKFKTPLYPLVPILGFGLYGIILVSLIFIPDQRLGIYCTVPFIIFCYTYYHFKVKKRISTNTSSENKXSETI

SEQ ID NO: 22738 - protein, 330 aa, Kluyveromyces marxianus
VRIAINGFGRIGRLVLRIALSRKNIEVVAINDPFITVDYAAYMFKYDSTHGRFDGEVSHDGKSLIIDGKKVLVFQERDPATLPWGAEKIDIAIDSTGIFKELDSAQKHIDAGAKKVVITAPSSTAPMFVVGVNEDKYAGQTIVSNASCTTNCLAPLAKIINNAFGIEEGLMTTVHSITATQKTVDGPSHKDWRGGRTASGNIIPSSTGAAKAVGKVLPELQGKLTGMAFRVPTVDVSVVDLTVKLAKPATYEEIKAVVKKASENELKGVMGYTEDAVVSSDFLGDTHSSIFDAAAGIQLSPQFVKLVSWYDNEFGYSTRVVDLVELVAKN

SEQ ID NO: 22739 - protein, 194 aa, Monacrosporium haptotylum
MTTQSLKCVVTGDGAVGKTCLLISYTTNAFPGEYIPTVFDNYSASVMVDGKPISLGLWDTAGQEDYDRLRPLSYPQTDVFLICFSLVSPPSFENVKTKWFPEISHHAPNVPIILVGTKLDLRDDPKIQQSLKDKKMAPIQFTNGVAIAKDIGAVKYLECSALTQKGLKNVFDEAIRAVLSPPPKPTKSKKCTIL

SEQ ID NO: 22740 - protein, 238 aa, Vibrio sp. Ex25
MINHKIYQTAEQVVESLANDMKAFSEMGRPVHISLSGGSTPKMLFKLLASEAYATSIQWQNLHFWWGDERCVAPDDAESNYGEANALLFSQVNIPTENIHRIHGEDDPKVEAERFAKEMSEVIPTENGTPVFDWILLGVGADGHTASLFPGQTNYDDANLSLVASHPESGQLRVSKTARVLEAAKRISYLVLGAGKADIVEEINSSPAHALPYPAAKIQAKSGLTEWYLDLDAAAKIA

SEQ ID NO: 22741 - protein, 496 aa, Lycopersicon esculentum
  misc_feature (398)..(398): Xaa can be any naturally occurring amino acid
  unsure (1)..(496): unsure at all Xaa locations
MKKATVGAVVVGTAAAVAVAALVMRHRMGKSSKWARARAILKEFEEKCATPDAKLKQVADAMTVEMHAGLASEGGSKLKMLISYVDNLPTGDEAGVFYALDLGGTNFRVLRVQLGGKDGGIMHQEFAEASIPPNLMVGTSEALFDYIAAELAKFVDEEGEKFHPPPGKQRELGFTFSFPIMQTSINSGTLIRWTKGFSIDDTVGKDVVAELTKAMQKREIDMRVSALVNDTVGTLAGGRFTDKDVSIAVILGTGTNAAYVERAQAIPKWHGPLPNSGEMVINMEWGNFRSSHLPLTQYDNAMDTDSLNPGEQIFEKICSGMYLGEILRRVLLRMAKEAGIFGEEVPPKLKNSFILRTPEMSAMHHDTSSDLRVVGDKLKDILEISNTSLKTRRLVVEXCNIVATRGARLAAAGILGIIKKMGKDTPRESGPEKIVVAMDGGLYEHYTEYSKCLENTLVELLGKEMATSIVFKHANDGSGIGAALLAASNSVYVEDK

SEQ ID NO: 22742 - protein, 487 aa, Porphyra yezoensis
MPTLPPPLFLPLPQLAFRLSTPPTAIMSGLSAKLQPVFDSIKARNPNEPEFLQAAEEILHSLGPVVEAEGGDKFIPVTKALFEPERVIQFRVAWYDDAGELQVNRGFRVQMNSAIGPYKGGLRLHPTVNLSILKFLATEQVLKNAVTTLPLGGGKGGSDFNPKGRSEAEVRRFCQSFMGALARHIGPDTDVPAGDIGVSGREIGYLFGAYKRVTNRFEGILTGKGPTFGGSLIRPESTGYGVVMFVREMLKVKGDTLEGKVVVISGSGNVAQYATQKVNALGGKVIALSDSKGVLVDEEGITDKKLAEVMDIKNVRRTSLKAFTEKFSTAKWTDFSEQYTDEDEKSNPLWEIKCDVALPCATQNELNADGARALVDNGVSIVAEGANMPSTPGAIEVLRSAKVAFAPGKASNAGGVATSGLEMSQNSQRMAWSAEKVEEELDGIMTRIHADCVETAKAYDRAGDYVFGANVTGFLKVAEAMLAQGLA

SEQ ID NO: 22743 - protein, 450 aa, Bacillus anthracis str. 'Ames Ancestor'
MMKTKQTDELLAKDEQYVWHGMRPFSPNSTMVGAKAEGCWVEDIQGKRYLDGMSGLWCVNSGYGRKELAEAAYKQLQTLSYFPMSQSHEPAIKLAEKLNEWLGGEYVIFFSNSGSEANETAFKIARQYYAQKGEPHRYKFMSRYRGYHGNTMATMAATGQAQRRYQYEPFASGFLHVTPPDCYRMPGIERENIYDVECVKEVDRVMTWELSETIAAFIMEPIITGGGILMPPQDYMKAVHETCQKHGALLISDEVICGFGRTGKAFGFMNYDVKPDIITMAKGITSAYLPLSATAVKREIYEAFKGKGEYEFFRHINTFGGNPAACALALKNLEIIENENLIERSAQMGSLLLEQLKEEIGEHPLVGDIRGKGLLVGIELVNDKETKEPIDNDKIASVVNACKEKGLIIGRNGMTTAGYNNILTLAPPLVISSEEIAFVIGTLKTAMERI

SEQ ID NO: 22744 - protein, 395 aa, Phytophthora infestans
MKTLMEPERLIQFRVPWIDDEGSSRVNRGFRVQFSSALGPYMGGLRFHPETTHGTAKFLGFETIFRNALAGPYGGAHGGSDFNPMDKSESEIMRFCQSYMTELVNYIGPHTDVPTAGVGVGPQEIGYMFGQYKRMRQLHPGGTEGILSGGAYHYPQVTGYGVAHFANRILETRGETLKGKRCLISGSGTVALNVARKLLDFGAIPIGMSDNFGYVIEDQGFSSKSLEELKRIKEERNARLGAYIMSSTTANYHPSEEGRLWETPCDYAFPCAIQNDVDADAVRLLVKNGCKGIFEGANFPCTDEAISLIKQHGLAFGPNKASNGGSFALITKNLGSSTQMLDDEVDVIVKEYMDKLHDRVAASAEEFNAGGDLHVGANITAFMSVAAAMFRQGVV

SEQ ID NO: 22745 - protein, 367 aa, Streptomyces avermitilis MA-4680
MDPVRLALTRRLVDAFGLDREIEVVSAKPAGESTLRLVHREDYIEAVKAASAEPDAADGKYGLGTLDDPAFAGMHEVSALIAGQSVGAAEAVWHGDALHAVNFAGGLHHAMPGGASGFCIYNDASLAIARLLELGAERVAYIDVDVHHGDGVQAAFWEDPRVLTISLHEHPQTLFPQTGWPTETGADRAEGSAVNVALPAGTGDAGWLRAFHAVVPELIADFRPQVLVTQHGADTHFEDPLAHLAVSLDAQRAVQLACHDLAHQYADGRWVALGGGGYAVVDVVPRSWTHLVAIAAGRPLEPESMIPESWRQEVFARTRQLAPMRMTDGRWPVSWADWESGYDPADRLDQAVLATRKAAFPLRGMLP

SEQ ID NO: 22746 - protein, 145 aa, Zea mays
  misc_feature (68)..(68): Xaa can be any naturally occurring amino acid
  misc_feature (121)..(121): Xaa can be any naturally occurring amino acid
  unsure (1)..(145): unsure at all Xaa locations
MTSSATTLKGQPLDKAVLESILRRRMFYTPSFEIYGGVGGLFDYGPPGCALQAAVIDQWRKHFILEEXMLEVDCSVLTPHEVLKTSGHVDKFADWMCKDPKNGEILRADHFVEAILEARLXGDKEARGQKVRKKERTPKKKKKPR

SEQ ID NO: 22747 - protein, 1367 aa, Neurospora crassa
MASELSPRAVRFSQTDDEPIARLDKHKTVSRPNPRANDSDNSNPSTDAHDDLHVREQIDELGSLSRYVESHSGSVPSLVPGSLTSSLPLANGSSSRRGASSETYANGTPSRPQRPTAPARTPSNTYQPYNQRRPPQGQPSSYMANNPHARDGSRPRPLAGTSTFRAQEREYVRRLRQQDYNNDYFDAYGSGEQYDSDSEGETPSSEGAFDSYDDAHIMFASNEDIQITEEDLRDPESRERLEWHGMLEAVLTGDVVRQEKKRLIGSNDEAFGKSAHNVELWLGIRARLCGRHLPVQKRVVEDARAALDRSINDIINFAIAGESEAGKPPFEQVRDVVNKIERIESLYPSSRELMTALKPGVYSAYQETCDAVISWYNVNEMINTELSILKKWVGNDALDFSRTKEKSPSGNGLSDESSFLDRLMKEEGLKSLHEDKGSEPKSLKKKSRLDGISRVITKAKDTLIQNAEGFQKRHLPPYIEELLTLISFPSRLIEEIIKMRLAYAKKMKDSAQQNPMMQDQMISQFQVLLKLAIKIKREYMEIARPEPGWDLPPCIDEDFDRVILEALKYYFKLLNWKLSGNKNTFKEAELLFQEWGFGNEIGRYLAHGDVEVAEQFSSLTYKAWNRLSQTFEKEVQRRPKESVPEMTKRYKQILDSVRVRQRMLQRFSRMLNDNYENACDYTIAFEQPQMLHQLYDRLIETGHFQVYSASPEHKDILIIASPTLHNRDDEIQVLMGTFTYEAAIEDPSDPYLLIIKAEDPPQWLGPVHTLRVRNEPLDIKLGHMRLIAGGCQPRLLNARKAFVDRIDMQVDPVVEQRSNLQKVNFRLMEIRKVAFKLSNAFMDSVEAIRRQTRGLNCQELIQTCFIFATEFGQRSLLYMDNNRRTMNNLKLTKLALDWVSFICDDCISSDRKTFRWAVQALEFAMGMTRGRHILGLGEDEYARLRAKVAGCMALLISHFDIMGARSSVAAQAEKKRLEGLVNQIKRLNKGQMLDDNEAAKYYQEHRLEELAKVDNYRKEILLQQSAMGRVLEASNEVDRSLAWLSSTATNFTMRWQQGHFVGGGTFGNVYAAVNLDTGQLMAVKEIRLQDPKLIPTIAGQIRDEMRVLETVDHPNVVSYYGIEVHRDRVYMFMEFCSGGSLANLLEHGRIEDEQVIMVYALQLLEGLAYLHELKIAHRDIKPENILLDHNGIIKYVDFGAAKLIARQGRTLVQDVASTKPNKSMTGTPMYMSPEVIKGENAGHFGAVDIWSLGCVILEMATGRRPWANLDNEWAIMYNIAQGNPPQLPSQDQLSPEGIDFLRRCFMRDSTKRATAMELLQHEWIMTIRNRVVEPATPSSDAGSSTTSQGALNPGNSSRGGFPGDGMY

SEQ ID NO: 22748 - protein, 457 aa, Staphylococcus epidermidis ATCC 12228
MAIGVILNRVFRLNNNPLFDYIYSNKESINHCYFIIPTEEFEEEAKKKAQYYYGSIQKFMYELQRYDIEPFLMSYDKLIDFCKKQAIDKVVVAGDIMSYHHEEYDILHQRKRFKQANIQVISLRANHYFNPRKTYNKQGEPYKVFTSFYRKWRPYLMIRDEYDYHLEDISKVVVKSQHKIKEDYHSYGISERDVQNRWSEFLSQDIENYKENREYLPEVLTSQLSIYLAYGMIDIIQVFNDLLQNYDKNEQNYETFIRELIFREFYYVLMTNYPETAHVAFKEKYQQLKWSYNEENFKLWKDGNTGFPIIDAAMEELKTTGFMHNRMRMVVSQFLTKDLFIDWIWGESFFKQKLIDYYAASNVHGWQWSASTGTDAVPYFRMFNPIRQSERFDNNARYIKTYIPRLNQVDAKYLHDTHKFEQQIKGQGVEIGKDYPKQMIDHKESRQRVMSEFKALD

SEQ ID NO: 22749 - protein, 242 aa, Escherichia coli
LKERKEGAFVPFVTLGDPGIEQSLKIIDTLIEAGADALELGIPFSDPLADGPTIQNATLRAFAAGVTPAQCFEMLALIRQKHPTIPIGLLMYANLVFNKGIDEFYAQCEKVGVDSVLVADVPVEESAPFRQAALRHNVAPIFICPPNADDDLLRQIASYGRGYTYLLSRAGVTGAENRAALPLNHLVAKLKEYNAAPPLQGFGISAPDQVKAAIDAGAAGAISGSAIVKIIEQHFNEPEKML

SEQ ID NO: 22750 - protein, 279 aa, Bacillus cereus E33L
MKNLQSTTTLHNGVEMPWFGLGVFKVEEGPELVEAIKSAIKAGYRSIDTAAIYGNEAAVGEGIRAGIEATGISREELFITSKVWNADQGYEETIAAYEESLKKLQLDYLDLYLVHWPVEGKYKDTWRALETLYKEKRVRAIGVSNFQIHHLQDVIKDAEIKPMINQVEYHPRLTQKELQAFCKEQGIQMEAWSPLMQGQLLDNETLQEIAEKHGKTTAQVILRWDLQNGVITIPKSTKEQRIIANADVFNFELTKEDMEKIDALNQNHRVGPDPDNFDF

SEQ ID NO: 22751 - protein, 341 aa, Legionella pneumophila
MQDDEEPIKDKEFKEEEWSEPDDESLLSEEDVEPDIEKMEEELDELPEFTDDETFPSFQRGKNIAKALDATQLYLGEIGFSPLLTAEEEIHYATLALKGDMEARKKMIESNLRLVVKIARRYLNRGLPLLDLIEEGNLGLMKSVEKFDPKRGFRFSTYATWWIRQTIERAIMNQTRTIRLPIHVVKELNVYLRAARQLTQKLDHEPSPEEIAEMVDKPLEDVQKLLGLNDKVASVDTPIGFDETKSLLDTIADENSLNPAELLTNENLRQHIESLLDKLTENQQQVIARRFGLRGFEKATLEDVGKEIDLTRERVRQIQVEALKTLRTLLERVGLTQEDLF

SEQ ID NO: 22752 - protein, 242 aa, Escherichia coli
LKERKEGAFVPFVTLGDPGIEQSLKIIDTLIEAGADALELGIPFSDPLADGPTIQNATLRAFAAGVTPAQCFEMLALIRQKHPTIPIGLLMYANLVFNKGIDEFYAECEKVGVDSVLVADVPVEESAPFRQAALRHNVAPIFICPPNADDDLLRQIASYGRGYTYLLSRAGVTGAENRAALPLNHLVAKLKEYNAAPPLQGFGISAPDQVKAAIDAGAAGAISGSAIVKIIEQHINEPEKML

SEQ ID NO: 22753 - protein, 429 aa, Zea mays
MTGTVSKLAAPRPAAPPLRPASLRTAALAFAPSPRRVRVSVAGRARSPIIAMASAKEGSGAPTKRTALHDLYELQGLSPWYDNLCRPVTDLLPIIASGVRGVTSNPTIFQKAISSSSAYDDQFKQLISAGKDAESAYWELVIKDIQDACKLFEPIYDETDGADGYVSVEVSPRLANDTQGTVEAAKWLHKVVNRPNVYIKIPATAECVPSIQEVIANGISVNVTLIFSIARYEAVIDAYLDGLEASGLSDLSRVTSVASFFVSRVDTLIDKMLDKIGTPEALALRGKAAVAQAKLANRLYQKKFSGPRWEALAKKGAKKQRLLWASTGVKNPAYPDTLYVDSLIGPDTVNTMPDQALQAFIDHGTVSRTVDANVSEAEGVYSALEKLGIDWEEVGKQLELEGVDSFKKSFDSLLVSLQEKGNSLKMASV

SEQ ID NO: 22754 - protein, 445 aa, Pseudomonas fluorescens PfO-1; identical to SEQ ID NO: 757

SEQ ID NO: 22755 - protein, 158 aa, Streptococcus pneumoniae TIGR4
MTSLYDFSVLNQNNQATPLDSYRGKVLLIVNTATGCGLTPQYQGLQELYERYQDQGFEILDFPCNQFMGQAPGSAEEINAFCSLHFQTTFPRFAKIKVNGKEADPLYVWLQDQKSGPLGKRVEWNFAKFLIGRDGQVFERFSSKTDPKQIEEAIQTLL

SEQ ID NO: 22756 - protein, 534 aa, Methanosarcina barkeri str. fusaro
MKYIIVTGGVMSGLGKGITIASIGRNLKDKGYKVTAIKIDPYINIDAGTMSPYQHGEVFVLKDGGEVDLDLGNYERFLDTELTRDHNLTTGKIYLEVISKERRGDYLGKTVQIIPHVTNEIKSRIRKVAARSGADICLIEIGGTVGDIESMPFLEAVRQMHREEPSENIAFIHVTLAMEDLQGEQKTKPSQHSVKELRALGLSPEVIVVRSKSPLQESAKEKIALFCDVPQELVISAHDADDIYEVPLEIEEQGLTTQLMKHLQLESSVENGAWKKMVSRMHSTTNTVKLAIVGKYTNLEDSYLSILEAVKHGGIDNGCRVEVNMVEAEILEENPAEIEKLIQYDGILIPGGFGGRGTEGKMMAIKFARENDIPFLGICLGMQLAVIEFARNVAKLKGANSTEFDEDSPYPVIDLLPEQTGVAEMGGTMRLGDYEAILTEGSIAAKIYGTNYIVERHRHRYEVNPEFVDRLESYGIVFSGKNKNRMEIAEIPGKRFFFGSQFHPEFRSRPGRPSPPFNGLVAAMCKYRKEREGR

SEQ ID NO: 22757 - protein, 406 aa, Pseudomonas aeruginosa PAO1
MARHRHIVAWLEEVADDLRSLRQDIHAHPELGFEERRTAALVAECLRGWGYEVHEGIGRTGVVGVLRQGDGTRRLGLRADMDALPIVEATGLGYSSCHGGRMHACGHDGHTAMLLGAARYLAATRRFDGTLVLIFQPAEEGQGGAEAMLADGLLERFPCDALFGMHNMPGLEAGHLGFRAGPMMASQDLLSVTLEGVGGHGSMPHLSVDPLLAASSAVMALQSVVARNVDPQKAAVVTVGALQAGEAANVIPQRAVLRLSLRALDGQVREQVLQRVRQIIELQAASYGCQASIEHYPAYPVLVNSVEETEFARQVGVELAGAEQVDGDTPKLMGSEDFAWMLQRCPGSYLFIGNGRGRPMVHNPAYDFNDDILVRGAAYWGALAETWLAAPAASGLRLTAANNGAA

SEQ ID NO: 22758 - protein, 578 aa, Streptococcus pneumoniae TIGR4
MSLQKLENYSNKSVVQEEVLILTELLEDITKNMLAPETFEKIIQLKELSTQEDYQGLNRLVTSLSNDEMVYISRYFSILPLLINISEDVDLAYEINHQNNIDQDYLGKLSTTIKLVAEKENAVEILEHLNVVPVLTAHPTQVQRKSMLDLTNHIHSLLRKYRDVKLGLINKDKWYNDLRRYIEIIMQTDMIREKKLKVTNEITNAMEYYNSSFLKAVPHLTTEYKRLAQAHGLNLKQAKPITMGMWIGGDRDGNPFVTAKTLKQSALTQCEVIMNYYDKKIYQLYREFSLSTSIVNVSKQVREMARQSKDNSIYREKELYRRALFDIQSKIQATKTYLIEDEEVGTRYETANDFYKDLIAIRDSLLENKGESLISGDFVELLQAVEIFGFYLASIDMRQDSSVYEACVAELLKSAGIHSRYSELSEEEKCDLLLKELEEDPRILSATHAEKSELLAKELAIFKTARVLKDKLGDDVIRQTIISHATSLSDMLELAILLKEVGLVDTERARVQIVPLFETIEDLDHSEETMRKYLSLSLAKKWIDSRNNYQEIMLGYSDSNKDGGYLSSCWTSTRLNNN

SEQ ID NO: 22759 - protein, 247 aa, Gerbera hybrid cultivar
MGRGRVELKRIENKINRQVTFSKRRNGLLKKAYELSVLCDAEVGLIIFSSRDKLYEFGSVGVMKTLERYQRCCFNPQDNNNERETQSWYQEVSKLKAKFESLQRTQRHLLGEDLGPLSVKELHNLEKQLEGALTQARQRKTQIMVEQMEELRRKERELGDMNKHLKIKVSHELSTFDAEGQGYRAQLPCPWNSGTNNTFTMHPSQSNPMDCQQEPILQIGYNQFMHGEGSSVQRNMVGENGIHGWVL

SEQ ID NO: 22760 - protein, 327 aa, Desulfovibrio desulfuricans G20
MQPQKVLVCGGAGYIGSHMVRALMRAGHLPVVFDNLSTGHLESIGQAEFVRGDLLDMQALRRVFGEYCFDAVMHFSAKSLVGESVVHPALYYTNNVTGTCNLLEAMRESGVGRLVFSSTAAVYGDPQAPVIAEDHPCLPVNPYGRSKLMVETMLADHAAAYGLRSVSLRYFNAAGADEDGGIGEAHSPETHLLPNVLLAALGRNDGLKIFGDDYTTPDGTCVRDYIHVTDLCSAHLAALEYMTLHAGAAVFNLGNGNGFSVREILDAACRVTGVDIPFTVEGRRAGDPPMLVADAARARTALGWTPVYTDIDRIIETAWRWHSDQRY

SEQ ID NO: 22761 - protein, 142 aa, Staphylococcus aureus subsp. aureus MRSA252
MLKKDKSELTDIEYIVTQENGTEPPFMNEYWNHFAKGIYVDKISGKPLFTSEEKFHSECGWPSFSKALDDDEIIELVDKSFGMVRTEVRSEESNSHLGHVFNDGPKESGGLRYCINSAAIQFIPYEKLEELGYGDLISHFDK

SEQ ID NO: 22762 - protein, 177 aa, Staphylococcus aureus subsp. aureus MRSA252
MTKEYATLAGGCFWCMVKPFTSYPGIKSVVSGYSGGHADNPTYEQVCTNQTGHVEAVQITFDPEVTSFENILDIYFKTFDPTDDQGQFFDRGESYQPVIFYHDKHQKKAAEFKKQQLNEQGIFKKPVITPIKPYKNFYPAEDYHQDYYKKNPVHYYQYQRGSGRKAFIESHWGNQNA

SEQ ID NO: 22763 - protein, 806 aa, Vicia faba
MATERLTRVHSLRERLDETLTANRNEILALLSRIEAKGKGILQHHQVIAEFEEIPEENRQKLTDGAFGEVLRSTQEAIVLPPWVALAVRPRPGVWEYLRVNVHALVVENLQPAEFLKFKEELVDGSANGNFVLELDFEPFTASFPRPTLNKSIGNGVQFLNRHLSAKLFHDKESLHPLLEFLRLHSYKGKTLMLNDRIQNPDSLQHVLRKAEEYLSTVDPETPYSEFEHRFQEIGLERGWGDSAERVLESIQLLLDLLEAPDPCTLETFLDRIPMVFNVVILSPHGYFAQDDVLGYPDTGGQVVYILDQVRALESEMLNRIKKQGLDIVPRILIITRLLPDAVGTTCGQRLEKVYGTEHCHILRVPFRDQKGIVRKWISRFEVWPYLETYTEDVAHELAKELQGKPDLIVGNYSDGNIVASLLAHKLGVTQCTIAHALEKTKYPESDIYWKKFEEKYHFSCQFTADLFAMNHTDFIITSTFQEIAGSKDTVGQYESHTAFTLPGLYRVVHGIDVFDPKFNIVSPGADQTIYFPYTETSRRLTSFYPEIEELLYSTVENEEHICVLKDRSKPIIFTMARLDRVKNITGLVEWYGKNAKLRELVNLVVVAGDRRKESKDLEEKAEMKKMYELIETYKLNGQFRWISSQMNRVRNGELYRVICDTKGAFVQPAVYEAFGLTVVEAMATGLPTFATLNGGPAEIIVHGKSGFHIDPYHGDRAADLLVEFFEKVKADPSHWDKISLGGLQRIEEKYTWQIYSQRLLTLTGVYGFWKHVSNLDRLESRRYLEMFYALKYRKLAESVPLAVEE

SEQ ID NO: 22764 - protein, 145 aa, Oryza sativa (japonica cultivar-group)
MSSSSLSPAGSSDGDSAGVVVAADHRREKRRLSNRESARRSRLRKQQHLDELVQEVARLQADNARVLARASEIAGQYARVEQENTVLRARAAELGDRLRSVNEVLRVVEEFSGVAMDIQEECPPDDPLLRPWQIPCPAAAHMLQY

SEQ ID NO: 22765 - protein, 406 aa, Zea mays
MDSTSCLVDDASSGASTGKKPAPAPAAATGKPLQRVGSGTSAVMDAAEPGAEADSGGAGRAPGGVSGKLPSSKYKGVVPQPNGRWGAQIYERHQRVWLGTFTGEAEAARAYDVAAQRFRGRDAVTNFRPLAESEPEAAVELRFLASRSKAEVVDMLRKHTYGEELAHNRRAFAAASPAASPPPENNRRPPAASSSSSPAAAREHLFDKTVTPSDVGKLNRLVIPKQHAEKHFPLQLPAAAAAGVGSGGECKGVLLNFEDAAGKAWRFRYSYWNSSQSYVLTKGWSRFVKEKGLHAGDAVGFYRSAGGKQQLFIDCKLRPNKTTTTAAAFVNVNAMTTTAAPPLAAVKAVRLFGVDLLTTPRPAAVAPEQEEVTVANKRARDAMATAASTPAPVHMVFKKQCIDFAR

SEQ ID NO: 22766 - protein, 357 aa, Pinus sylvestris
MSSVLTDLLNLDLSDVTEKVIAEYIWIGGSGMDMRSKARSLSGPVSSVKELPKWNYDGSSTGQAQGHDSEVILYPQAIFRDPFRRGKHILVICDAYSPNGTAIPSNKRAAAAKIFNEKAVSDEETWYGLEQEYTLLQKDVKWPLGWPIGGYPGPQGPYYCGVGADKAWGRDIVDAHYKACLYAGINISGINGEVMPGQWEFQVGPSVGISAADELWCARFIMERITEKAGVVLSFDPKPIEGDWNGAGCHTNYSTKSMRKEGGFEVIKKAIEKLKLRHKEHISAYGEGNERRLTGRHETADMNTFSRGVANRGASVRVGRDTEKEGKGYFEDRRPASNMDPYIVTSMIAETTILWKP

SEQ ID NO: 22767 - protein, 118 aa, Glycine max
  misc_feature (62)..(62): Xaa can be any naturally occurring amino acid
  misc_feature (64)..(64): Xaa can be any naturally occurring amino acid
  misc_feature (71)..(71): Xaa can be any naturally occurring amino acid
  unsure (1)..(118): unsure at all Xaa locations
MKNEEQARSLFGISLSDRPRWQQFLICSSRFFFGYLVNGICEEYVYNRLHFSYGWYFTFVQXGXVYLFLIXYLQGFTSKQMVNPCETYVKLSAALMGSHGLTKGSLALLNYPAQIMFK

SEQ ID NO: 22768 - protein, 274 aa, Porphyra yezoensis
REFLSNKTVATAAGLPTPWSIPASTFAIQGLGNVGYWAAHFIAKNGGRITTVGERDGTVSDPAGVDVEALKLHLTNNGGSVVGFANGGSPSLSVVADPAAVLSADVDVLIPAALEGAITTANAKAVRAKVVAEAANGPVTAGADVVLAAAGVVVLPDLVMNAGGVTVSYFEVAKNLAGLRFGRLTQRAEEAAMANLLATLQSHGVTITDRDRRRLIIGADERAHVYSGLEDSMCAACGETVKVAAELGVSLRIAAYFTAIRRVAETFESRGLWP

SEQ ID NO: 22769 - protein, 608 aa, Gaeumannomyces graminis var. tritici
MKFLVVSLFALVCGSAALATPANSSVSSSSGQHHPKPHHPHQPLDSGCKNGPKSRNCWGKHSIDTNYYETAPDTGVTREYWLSVEEGICNNDGYKRYCQTFNGSFPGPLIWANWGDNLVIHVTNNMKTNGTAIHWHGLHQRGSVEYDGVPGVTQCPIAPGKSLTYKFRVTQYGTTWYHSHFSLQYTEGLFGPMIFYGPTTANYDEDLGTLFLQDWDHDTAWHGWENVASKGAGPLPANGLINGTNTFDCKNSTDTNCLGGGKKFSATFKKGKKHLIRIINNSADAHFQFSIDGHSLIVVSNDLVPIKPFKTQSVRVSIGQRYDVIVEANAKPGDYWLRSGMSCVPGDTGALRERVTGIIRYDKKSKADPKTTSDVVVDETCSDEDPKKLVPHVALDVTHMGEIVQSDLGFKPNGTPAEGQNWFQWTLNNSSLVLDWHDPTLERIFDRQSIFPTKYNVIKAEPPATAPASKWFTLVIQSNEILLTPLPSHSLTHPIHLHGHDFWVLSQSKAKWDGTPRGFNTKNPARRDTAMLPAGGHLAIAFQLDNPGAWLVHCHIAWHAGQGLSLEFVESQGRIALGMPDHHVFQQTCREWDAVRNKMPFPQHDSGI

SEQ ID NO: 22770 - protein, 578 aa, Gaeumannomyces graminis var. tritici
MVAHHSFMLLSLAALALGSPFGELQQRAEPRIQQRAACAGNTATTRSKWCDFDIKSDYYTGQHPNTGVTREFWLELTDSVKLAPDGVPRYAQAFNGTVPGPTLVMDWGDDVVIHVTNKLTQSINGTSVHWHGLHQKDTVLSDGVVSVTQCPAVPGTTQTYKFKATNYGSSWYHSHFALQAWQGVFGGIIINGPASANYDEDVGMVVLSDWGHKTPDELWHQAETQGPPTLENALINGMNVYGAEGNQTGKRWETSFESGKSYRVRLVNTAIDTHFKFGIDNHTLTVIALDFIPVEPYEATMINIGMGQRVDVIVKADQAAVASDFWMRAIPQSACGTIQMAKNTRAIVHYGASKGVPATTGHTYVDACEDEPLEKLKPIIRIDAEEATYQQLKIATAGVNAKSVFRWYLNSTTMELDWSKPTVSQLANNASVAFSNSNAVMELPEADKWAYVIIQTNFGVAHPVHLHGHDYSVLAQGSGAYQPGVTKLITTNPMRRDTAILPAAGHLVLAFKTDNPGAWLMHCHIGWHTAQGFAMQFVERRSEMFSKNIINNNDIEGLCEPWRTHVGKHNIKLEDSGI

SEQ ID NO: 22771 - protein, 581 aa, Gaeumannomyces graminis var. tritici
MKSFGLIKGLALLAGLVASAPVASRDESLDLFPQLAGLRASTSTRDYESNTPNTGVTRRYNLVVTEVDNYVGGDGLVKSKAMLINNQFPGPIIKADWGDWVEVTVTNRLRTNGTSMHWHGVRMLNNNPNDGANGITECPIPPNASKVYRFRVEQYGTAWYHSHFSGQYGNGVVGTLLFNGPASLPYQEDLGVYPITDWYYRGADEIQFSLIPSPGVPPPSDNILFNGSHVNAQGGGSYNRVKLKPGRRHRLRIINTSVDNTFTVSLVGHQFTVIQTDFVPVNAFTTSQIFLGIGQRYDVTIEANQPVGNDWFNVTFAASGLCGTSLIQKPASIFQYEGASDTALPTNPGPTPTESLCEDLNSWTPVVAKNVPRASFSAVPGNTLEANTNVENWEGRQRVYWEINGSDMNITWDEPTLEYLVKGNMNFPQNFNVFQVPQGNQWSFWIIQNPTVAPHPMHLHGHDFYLLGRSPAQTNPFAGPVRRFNAATDLATLRFDNPVRRDVTMLPANGWIVVAFRTDNPGAWLFHCHIAWHVAQGLSVQFLERVQDIPSAFPLSAIEPTCSQWTAYYATSPHKQHDSGL

SEQ ID NO: 22772 - protein, 389 aa, Nocardia farcinica IFM 10152
MRSAVIVDVVRTPSGKGKAGGGLSEVHPATLLAGVLAELVARNDLDPAVVDDVIGGCVTQSGEQALNITRTAVLAAGFPETVPATTVDRQCGSSQQAAHFAAQGVISGAYDVAIACGVEMMSRAPMFSNAQDKDTNRGPLAHRYPDGLIQQGIAAEILAARWKFDRAALDEFAARSHRLAAATAAAGGFDRELVAAGALTADETIRPGTTVEGLAGLRPAFADDAYQARFPEIDWSITPGNSSPLTDGASAALIMTEEAAAKLGLTPRARFHSFAVVGDDPLLMLTAVVPATRKVLERTGLGIEDIDAYEVNEAFASVPLVWQHELAADPAKLNPRGGAIALGHPLGASGTRILATLVNHLEQSGGRFGLQTMCEAGGLANATIIERLG

SEQ ID NO: 22773 - protein, 365 aa, Bacillus subtilis subsp. subtilis str. 168
MKKQRIVVKIGSSSLTNSKGSIDEAKIREHVQAISVLKKAGHEMILITSGPVARGFSSLGYPSRPVTIKGKQAAAAVGQTLLMQQYMNQFKQYSLTPGQILLTRNDFSKRERYRNAYATIMELLERGVIPIINENDSTSVEELTFGDNDMLSALVSGLIHADQLMILTDINGLYDANPNENPEAKRFDYLPEITPELLGYAGSAGSKVGTGGMKSKLLATQTALSLGVKVFIGTGSGEQKLADILDGRGDGTYIGDKELSSVNNTRQWIQFHSPISGEIIIDAGAEEAMIHNGSSLLPAGVVGVNGSFPKGAVVEVRGPGGVIGKGQTHYSSEEIMEAKGKRSDELDFEKTFEVIHRNDWVNVKD

SEQ ID NO: 22774 - protein, 334 aa, Mycobacterium avium subsp. paratuberculosis K-10
MASYVAGSGEFTRDTDYITTRITADGRDGYPVEPGRYRLVVARACPWANRAIIVRRLLGLESVLSIGFCGPTHDERSWTFDLDPGGVDPVLKIPRLQDAYFKRFPGYPKGITVPAIVDVGTGAVVTNDFAQMTLDLSTEWSAYHRDGAPELYPERLRAEIDEVNKRVYTEINNGVYRCGFAGSQQAYEAAYDRLFTALDWVSDRLADRRYLVGDTITEADVRLFTTLARFDAVYHGHFKCNRSKLSEMPVLWAYARDLFQTPGFGDTVDFVQIKQHYYIVHSDINPTGIVPKGPDLAGWLTPHGREALGGKPFGDGTPPGPPVEAERVPAGHGA

SEQ ID NO: 22775 - protein, 275 aa, Arabidopsis thaliana
MDLLKTPSSTVGLSETFARLKSQGKVALIPYITAGDPDLSTTAKALKVLDSCGSDIIELGVPYSDPLADGPAIQAAARRSLLKGTNFNSIISMLKEVIPQLSCPIALFTYYNPILRRGVENYMTVIKNAGVHGLLVPDVPLEETETLRNEARKHQIELVLLTTPTTPKERMNAIVEASEGFIYLVSSVGVTGTRESVNEKVQSLLQQIKEATSKPVAVGFGISKPEHVKQVAEWGADGVIVGSAMVKILGESESPEQGLKELEFFTKSLKSALVS

SEQ ID NO: 22776 - protein, 415 aa, Bacillus subtilis subsp. subtilis str. 168 [sequence omitted]

SEQ ID NO: 22777 - protein, 666 aa, Thermoactinomyces vulgaris
MIKLLKPMSLSILLVFILSFSFPFPTAKAAANDNNVEWNGLFHDQGPLFDNAPEPTSTQSVTLKLRTFKGDITSANIKYWDTADNAFHWVPMVWDSNDPTGTFDYWKGTIPASPSIKYYRFQINDGTSTAWYNGNGPSSTEPNADDFYIIPNFKTPDWLKNGVMYQIFPDRFYNGDSSNDVQTGSYTYNGTPTEKKAWGSSVYADPGYDNSLVFFGGDLAGIDQKLGYIKKTLGANILYLNPIFKAPTNHKYDTQDYMAVDPAFGDNSTLQTLINDIHSTANGPKGYLILDGVFNHTGDSHPWFDKYNNFSSQGAYESQSSPWYNYYTFYTWPDSYASFLGFNSLPKLNYGNSGSAVRGVIYNNSNSVAKTYLNPPYSVDGWRLDAAQYVDANGNNGSDVTNHQIWSEFRNAVKGVNSNAAIIGEYWGNANPWTAQGNQWDAATNFDGFTQPVSEWITGKDYQNNSASISTTQFDSWLRGTRANYPTNVQQSMMNFLSNHDITRFATRSGGDLWKTYLALIFQMTYVGTPTIYYGDEYGMQGGADPDNRRSFDWSQATPSNSAVALTQKLITIRNQYPALRTGSFMTLITDDTNKIYSYGRFDNVNRIAVVLNNDSVSHTVNVPVWQLSMPNGSTVTDKITGHSYTVQNGMVTVAVDGHYGAVLAQ

SEQ ID NO: 22778 - protein, 242 aa, Escherichia coli
LKERKEGAFVPFVTLGDPGIRQSLKIIDTLIEAGADALELGIPFSDPLADGPTIQNATLRAFAAGVTPAQCFEVLALIRQKHPTIPIGLLMYANLVFNKGIDEFYAECEKVGVDSVLVADVPVEESAPFRQAALRHNVAPIFICPPNADDDLLRQIASYGRGYTYLLSRAGVTGAENRAALPLNHLVAKLKEYNAAPPLQGFGISAPDQVKAAIDAGAAGAISGSAIVKIIEQHINEPEKML

SEQ ID NO: 22779 - protein, 242 aa, Escherichia coli
LKERKEGAFVPFVTPGDPGIEQSLKIIDTLIEAGADALELGIPFSDPLADGPTIQNATLRAFAAGVTPAQCFEVLALIRQKHPTIPIGLLMYANLVFNKGIDEFYAECEKVGVDSVLVADVPVEESAPFRQAALRHNVAPIFICPPNADDDLLRQIASYGRGYTYLLSRAGVTGAENRAALPLNHLVAKLKEYNAAPPLQGFGISAPDQVKAAIDAGAAGAISGSAIVKIIEQHINEPEKML

SEQ ID NO: 22780 - protein, 330 aa, Streptococcus pneumoniae TIGR4
MLDLYKAQQQLTAIGDEFGVKVTFFHGRGGTVGRGGGPTYEAITSQPLKSIKDRIRLTEQGEVIGNKYGNKDAAYYNLEMLVSAAINRMITQKKSDTNTPNRYETIMDQVVDRSYDIYRDLVFGNEHFYDYFFESSPIKAISSFNIGSRPAARKTITEIGGLRAIPWVFSWSQSRVMFPGWYGVGSSFKEFINKNPENIAILRDMYQNWPFFQSLLSNVDMVLSKSNMNIAFEYAKLCEDEQVKAIYETILNEWQVTKNVILAIEGHDELLADNPYLKASLDYRMPYFNILNYIQLELIKRQRRGELSSDQERLIHITINGIATGLRNSG

SEQ ID NO: 22781 - protein, 151 aa, Schizosaccharomyces pombe
MDPSKLAKLQAGARIGGKGTPRRKVKKPSKSAMSAADDKKVQGALKKLNMQNLAGIQEVNMFKEDGGVINFRAPTVHSSLPNETTAIYGKAEEKTLSEILPGNLNNLGPESLTALRQMAEQLKVSEGEKGADAQADDGEIPDLVEKFDEQD

SEQ ID NO: 22782 - protein, 242 aa, Escherichia coli
LKERHEGAFVPFVTLGDPGIEQSLKIIDTLIEAGADALELGIPFSDPLADGPTIQNATLRAFAAGVTPAQCFEMLALIRQKHPTIPIGLLMYANLVFNKGVDEFYAQCEKVGVDSVLVADVPVEESAPFRQAALRHNVAPIFICPPNADDDLLRQIASYGRGYTYLLSRAGVTGAENRAALPLNHLVTKLKEYNAAPPLQGFGISAPDQVKAAIDAGAAGAISGSAIVKIIEQHINEPEKML

SEQ ID NO: 22783 - protein, 242 aa, Escherichia coli
LKERHEGAFVPFVTVGDPGIEQSLKIIDTLIEAGADALELGIPFSDPLADGPTIQNATLRAFAAGVTPAQCFEMLALIRQKHPTIPIGLLMYANLVFNKGVDEFYAQCEKVGVDSVLVADVPVEESAPFRQAALRHNVAPIFICPPNADDDLLRQIASYGRGYTYLLSRAGVTGAENRAALPLNHLVTKLKEYNAAPPLQGFGISAPDQVKAAIDAGAAGAISGSAIVKIIEQHINEPEKML

SEQ ID NO: 22784 - protein, 661 aa, Streptococcus agalactiae 2603V/R
MTFDTIDQLAVNTVRTLSIDAIQAANSGHPGLPMGAAPMAYVLWNKFLNVNPKTSRNWTNRDRFVLSAGHGSALLYSLLHLAGYDLSIDDLKQFRQWGSKTPGHPEVNHTDGVEATTGPLGQGIANAVGMAMAEAHLAAKFNKPGFDLVDHYTYTLHGDGCLMEGVSQEAASLAGHLKLGKLVLLYDSNDISLDGPTSQSFTEDVKGRFESYGWQHILVKDGNDLEAIAAAIEAAKAETDKPTIIEVKTIIGFGAEKQGTSSVHGAPLGAEGITFAKKAYVWEYPDFTVPAEVADRFASDLQARGAKAEEAWNDLFAKYEVEYPELATEYKEAFAGQAETVELKAHDLGSSVASRVSSQQAIQQLSTQLPNLWGGSADLSASNNTMVAAETDFQASNYAGRNIWFGVREFAMAAAMNGIALHGGTRVYGGTFFVFSNYLLPAVRMAALQNLPTVYVMTHDSIAVGEDGPTHEPIEQLASVRSMPNLNVIRPADGNETNAAWQRAVSETDRPTMLVLTRQNLPVLEGTSELAQEGVNKGAYILSEAKGELDGIIIATGSEVKLALDTQDKLESEGIHVRVVSMPAQNIFDEQEASYQEQVLPSAVTKRLAIEAGSSFGWGKYVGLNGLTLTIDTWGASAPGNRIFEEYGFTVENAVSLYKEL

SEQ ID NO: 22785 - protein, 401 aa, Rickettsia sibirica 246
MSIISTRLSSIKPSPTLAIVKKTLELKQAGVDIITLGAGEPDFDTPDNIKEAAIKAIKDGFTKYTNVEGMPLLKQAIKDKFKRENNIDYELDEIIVSTGGKQVIYNLFMASLDQGDEVIIPAPYWVSYPDMVALSTGTPVFVNCGIENNFKLSAEALERSITDKTKWLIINSPSNPTGASYNFEELENIAKVLRKYSHVNIMSDDIYEHITFDDFKFYTLAQIAPDLKKRIFTVNGVSKAYSMTGWRIGYGAGSKTLIKAMTIIQSQSTSNPCSISQMAAIEALNGPQDYIKPNALNCQKKRDLALSILKRVKYFECYKPEGAFYLFVKCDKIFGHKTKSGTIIANSNDFAEYLLEEAKVAVVPGIAFGLEGYFRISYATSMEELEKACIRIERTIDVIPA

SEQ ID NO: 22786 - protein, 369 aa, Streptococcus pneumoniae TIGR4
MATKQKEVTTFDVQVAEFIRNHKQKGTATDDEINASLVIPFTLDADGIEDLLQRIQDAGISITDNEGNPSARVLSNEEEPELSDEDLIGSTSAKVNDPVRMYLKEIGVVPLLTNEEEKELALAVEAGDIEAKQRLAEANLRLVVSIAKRYVGRGMQFLDLIQEGNMGLMKAVDKFDYSKGFKFSTYATWWIRQAITRAIADQARTIRIPVHMVETINKLVREQRNLLQELGQDPTPEQIAERMDMTPDKVREILKIAQEPVSLETPIGEEDDSHLGDFIEDEVIENPVDYTTRIVLREQLDEILDTLTDREENVLRLRFGLDDGKMRTLEDVGKVFNVTRERIRQIEAKALRKLRQPSRSKPLRDFIED

SEQ ID NO: 22787 - protein, 448 aa, Chlamydomonas reinhardtii
MEARTVSVLAGLAHRVASAAWRSASGLRTCTTTTPTYGRTSVYVKEALDLLDFDPQVEKAILNPDREVTVNLVVPMDNGEVNMFPAYRVQHNNALGPFKGGIIYHPGVTLENMRNLASLNTWKFSLLNVQFGGAKGGVGVDPRSLSERETEKLTRKYVQALQEVIGPHTDIPAPDINTDEHHMAWIFDQYSRLRGFAPAAVTGKPTWLHGIVGRDKAGGRGAAIATREFLTRSLRRKVAGTSFLIQGFGKLGSWTAQILQQEMGAKIVGVSCSETAVYNEEGLDIPALRAHVAAGGLLKDFPGGTGVLNDDSFLDLPADVFIPCAVDGTIHAGNVHRCVNFKAVVEAANGALTPEADAALRKAGVPVLPDLIANGGAVVVSFFEWVQNNQNMQWEEDDVKRELDRYLTDAFEALLREQSLHAGCSLRTAGYLVALRRLQQADSVRGHS

SEQ ID NO: 22788 - protein, 362 aa, Glycine max
MEVMCGAKVGNMVHKAKPYVLTVGLQFGMAGTYLFTMASLNHGMSRLVFIVYRNAIAALALAPFALIFERKVRPKMTWTVFIQILVLGFLEPVVDQGFTFLGMQYTSASFASAVMNAVPSVTFVLAVIFRLEHIKIRELRSQAKVIGTLVTFAGALLMTLYKGPQFDLFHHSNTTHQQGGSHTQNHSHWVAGTLFICLGCLAWSSFYILQSITVKRYPAELSLSSLICLAGALQSAVVALIADHNPRAWAIGFDYSLYGPLYTGIMSSGIAYYIQGLVMQSRGPVFVTSFNPLCMIIVTALGSFLLGEHLYLGSIIGGIIIAVGLYSVVWGKGKDYKDDTSSPATTKETETMQLPITLPNNK

SEQ ID NO: 22789 - protein, 538 aa, Zea mays
MAEVKPEEISHPPMEQLQGFEYCIDSNPPWGEAIILGFQHYILALGTAVMIPTVLVPMMGGDDGDRVRVVQTLLFVTGINTLLQSLFGTRLPTVIGGSYAFVIPIMAIIQDPSLSGIPDGHERFLETMKAIQGALIVSSSIQIILGYSQLWGIFSRFFSPVGMTPVVALLGFGLFERGFPVVGRCVEIGLPMLILFVVLSQYLKNIQIKEIPILERFSLFICVALVWAYAQILTSGGAYKNSAEVTQNNCRTDRANLISSAPWIKIPYPLQWGAPTFNAGQSFGIVSAVLVSLVESTASYKAAARLASATPPPAHILSRGIGWQTFKTEKKRCSCERQGIGILLDGLFGTGTGSTVSVENVGLLGSTRIGSRRVIQISAGFMIFFSMLGKFGALFASIPFTIFAAVYCVLFGLVAAVGLSFLQFTNMNSMRNLFIVGVSIFLGLSVPEYFFRYTMAAHRGPAHTKAGWFNDYINTIFSSPPTVGLMVAVFLDNTLEVKQAGMDRGMPWWQRFRTFKGDSRNEEFYRLPFNLNRFFPPA

SEQ ID NO: 22790 - protein, 361 aa, Methylococcus capsulatus str. Bath
MRLNWLLVFVPIALGLDWRDAHPTLVFLASALAIVPLAALMGDATESLASYLGPTYGGLLSATLGNAPEIIVGLFALQQGLVEVVKASLTGSIIGNLLLGLGLSLFAGGMKHGEQQFDSKTARRNAASLMLAAIALIIPAVFHFSASSDEEISVHIAAVLFFVYCSSIVLTLRSQKAVFGVAAAAEELEEKGKAEPEPLGGELGWSRNRALAVLAVVTIALGVMSEIMTDAVQPAADAMGLTPLFAGVFLLAIVGNAAETFNSIRFARSNQVELALGVTVGASTQVALVVAPVLVFFSMLIGRDMDLLFSQFEIVAVMLAVVVTRDLVRDGQSTWFDGLLLIGVYCILAIGFFYIPVTPAS

SEQ ID NO: 22791 - protein, 387 aa, Bacillus anthracis str. A2012
  misc_feature (343)..(343): Xaa can be any naturally occurring amino acid
  unsure (1)..(387): unsure at all Xaa locations
MGENHDKQRQSLLGKDFNENGERNEQAILHSQTVGSRGPVLEQDSVLHEALQEFIHEKILERPVHVKGFGAFGYFQTIYPMSEHTKLSFLQHSNEKVPVMVRFSLAVSTKGTPDTARNVRGFSTKFYTKEGIFDLLCNHIPVFSVRDPMRFPETIQALSPSPKNNLLDPNRFWSFVARAPESIHFVVHLYSDNGTAKSFRRIPGHSVNTYVWRNAEGNRKYVKYHWYPFEGVQSITNEEANKLAAENPDYSGKDLYDAIANGKPVEYGLYVQLMDPKDEAHLSYDPLDDTKAWDEKAYPLIPVGKMVLNKNPENYMEQVEKVAFSPSNLLNGAELSDDKMLQXRANIYSDSQRRRIGPEFRKLAINQQQDWTPANQITSGDGRYVER

SEQ ID NO: 22792 - protein, 412 aa, Shewanella sp. MR-4
MKRLAIPLQGAQMLFVAFGALVLMPLLTGLDTSVALFTAGIGTLLFQLITKRQVPIFLASSFAFIAPILYGVQTWGIPSTMGGIIAAGLVYILLGALVKVRGTDFIHRLLPPVVVGPVIIIIGLGLAPVAVNMALGKSGDGSLTLVPTNTALIISLASLCTTIAVAIFAKGLLKVMPILAGIVVGYGLSLAFGIVDFAVVTAASWIAIPKFVAPEFNWHAIAFMIPVAIAPAVEHIGDILAISNVTGKDFMKKPGLHRTLTGDGVATIAAAAFGGPPNTTYSEVTGAVTLTRNFDPRIMTWTAITAITLAFVGKLGALMQTIPVPVMGGIMCLLFGSIAAVGLNTLIRNHVDLSEPRNLSIVGVTLVFGIGGMAFGIGSFSLTGISLCGIVAITMNLLLPASKHHERDAASH

SEQ ID NO: 22793 - protein, 155 aa, Brassica napus
TDGVYQPLLQPDQLSALPESKNCELERVLADVETPLFLRLRKATMIETKLLFNLAAPAVVVYMINYLMSMSTQIFSGHLGNLELAAASLGNRGIQVFAYGLMLGMGSAVETLCGQAFGGRKYEMLGVYLQRSIVLLTLTGVLLTSIYVFSENILL

SEQ ID NO: 22794 - protein, 762 aa, Bacillus subtilis subsp. subtilis str. 168
MTTIKTSNLGFPRIDLNREWKKALEAYWKGSTDKDTFLKQIDELFLSAVKTQIDQQIDVVPVSDFTQYDHVLDTAVSFNWIPKRFRHLTDATDTYFAIARGIKDAVSSEMTKWFNTNYHYIVPEYDESIEFRLTRNKQLEDYRRIKQEYGVETKPVIVGPYTFVTLAKGYEPSEAKAIQKRLVPLYVQLLKELEEEGVKWVQIDEPALVTASSEDVRGAKELFESITSELSSLNVLLQTYFDSVDAYEELISYPVQGIGLDFVHDKGRNLEQLKTHGFPTDKVLAAGVIDGRNIWKADLEESLDAVLDVLSIAKVDELWIQPSSSLLDVPVAKHPDEHLEKDLLNGLSYAKEKLAELTALKEGLVSGKAAISEEIQQAKADIQALKQFATGANSEQKKELEQLTDKDFKRPIPFEERLALQNESLGLPLLPTTTIGSFPQSAEVRRARQKWRKAEWSDEQYQNFINAETKRWIDIQEELELDVLVHGEFERTDMVEYFGEKLAGFAFTKYAWVQSYGSRCVRPPVIYGDVEFIEPMTVKDTVYAQSLTSKHVKGMLTGPVTILNWSFPRNDISRKEIAFQIGLALRKEVKALEDAGIQIIQVDEPALREGLPLKTRDWDEYLTWAAEAFRLTTSSVKNETQIHTHMCYSNFEDIVDTINDLDADVITIEHSRSHGGFLDYLKNHPYLKGLGLGVYDIHSPRVPSTEEMYNIIVDALAVCPTDRFWVNPDCGLKTRQQEETVAALKNMVEAAKQARAQQTQLV

SEQ ID NO: 22795 - protein, 481 aa, Alkalilimnicola ehrlichei MLHE-1
MNRPSSYGYLAALLALALLTFGASAGAKSHLPDFTELVEENSPAVVNISTRQTPESRGGSGRLPDHFDIPEDHPLRDFMERFFGERGERPPEHGQRRPRSLGSGFIISEDGYVLTNHHVIDGADEVNVRLSDRREFVAEVIGSDERSDVAVLKIDAEGLPTVRIGQSDTLRVGEWVLAIGSPFGFEHSATAGIVSAKGRSLPSGNYVPYLQTDVAINPGNSGGPLFNLDGEVVGINSQIYSRTGGFMGVSFSIPIELAMDVATQLRETGRVARGWLGVIIQDVTRDLAESFDMDRPRGALVAQVLSDSPALEADLQPGDIIVEFDGEAVETSGSLPPMVGATPVGAEVQVKVLREGREVMVDVTIGELPEEQARAQRPPRGEPERAPDTAAERLGLRVEPVPAERLEELRVDSGVLVRRVESGPAREAGIRPGDVITSIDQQSVEGVEQFAELVEGLASGRSVPVLVLREGGARFFALRIP

SEQ ID NO: 22796 - protein, 151 aa, Brassica napus
  misc_feature (123)..(123): Xaa can be any naturally occurring amino acid
  misc_feature (140)..(140): Xaa can be any naturally occurring amino acid
  unsure (1)..(151): unsure at all Xaa locations
TGPEGVLQGTTALVTGGASGIGHAIVVELAGFGCRVHACDLSETLLNQSLCEWKKKGFQVSGSVCDVSCRSEREKLMQTVSTMFNGKLNILVNNVGSVRVKPTTEYLEDDFSFHISTDLEPAXHLSQLSHPFPRASGSGXIVFISSVAGVV

SEQ ID NO: 22797 - protein, 237 aa, Gloeobacter violaceus PCC 7421
MIFKGFCHTMPLRRLAFVRFLGRALPIVALSAGTLACSASSATTPDPATDAALTSAVGPQTAVFAGGCFWGVEAVFEHLKGVEDAVSGYAGGDASTAKYAAVGSGRSGHAEAVRITYDPSKITYGQLLKVFFQVAHDPTQLNRQGPDQGTQYRSAIFFTDGEQQRIAQTYIEQLDKARVFPQPIVTQLAPLQKFYLAEPYHQDFVKLNPAHPYVVFHDLPKLAQLRKQFSNLYQDQS

SEQ ID NO: 22798 - protein, 100 aa, Brassica napus
VDPRVRLGVDRKRLGRYAVESYLEQILSHGFFHADPHPGNIAVDDVNGGRLIFYDFGMMGSISPNIREGLLEAFYGVYEKDPDKVIQAMVQMGVLVPTAD

SEQ ID NO: 22799 - protein, 554 aa, Oryza sativa
  misc_feature (29)..(29): Xaa can be any naturally occurring amino acid
  unsure (1)..(554): unsure at all Xaa locations
MAAATSTSSTALAHPKTLNPAAAAAPWPXKVSSPQVIGATMPSLDFETSVFKKEKVSLAGHDEYIVRGGRNLFPLLPEAFKGIKQIGVIGWGSQGPAQAQNLRDSLAEAKSDIVVKIGLRKGSKSFEEARAAGFTEESGTLGDIWETISSSDLLLLLISDAAQADNYEEIFSHMKPNSILGLSHGFLLGHLQSVGLDFPKNISVVAVCPKGMGPSVRRLYVQGKEVNGAGINSSFAVHQDVDGRATDVALGWSVALGSPFTFATTLEQEYRSDIFGERGILLGAVHGIVEALFRRYTEHGLDEDSAYKNTVECITGIISKTISKKGMLEVYNSLTEEGKKQFIEAYSAAYYPCMDILYECYEDVSSGSEIRSVVLAGRRFYEKEGLPAFPMGNIDQTRMWKVGERVRSTRPAGDLGPLHPFTAGVYVALMMAQIEVLRKKGHSYSEIINESLIESVDSLNPFMHARGVAFMVDNCSTTARLGSRKWAPRFDYILTQQAFVTVDKNAPVNQDLISNFFSDPVHSAIEVCAQLRPTVDISVPADADFVRPELRQSS

SEQ ID NO: 22800 - protein, 409 aa, Triticum aestivum
NKFVQKSRLVPVRNSRDIVDPRVRSSSSSSSNQTSSASQRYQLPSFLPSSRKISIGNGGVFTCCPRARVPVCVCLGLDVGEIGMPLDLGLDLKLFVAKTAGRLAKEAPAVDACIRGLVGRSACKIEVFRRELPLCARLLADVIEFMKEEAAKRSERRDADDNDKRKWMSTAQLWVDTRATDAADPVKEQKKESSLSKPMLLGGAIGAPMAVSCRAMPPPAAPQYFGRDDKIVGSQGLLALPMISPAANRQFSPPADDRHQAFAAKFAAPMPPPGPGLQTHDQQSRKTRRCWSPELHRHFVAALHQLGGPQVATPKQIREVMKVDGLTNDEVKSHLQKYRLHNQRCPSSSSASHPVMLVGDLWAHQEQSSSQSRSPEGPLQLSVSGVAVSALTGSDSSEEDDRSVGYSRR

SEQ ID NO: 22801 - protein, 249 aa, Populus tremula x Populus tremuloides
MTSIMGAEPAGTYSMMNFEETELRLGLPGGVSNGNDSEAAKSNGKRGFSETVDLKLNLSTKETGKDGSDQEKVVMKEKTVAPRPNDPAKPPSKAQVVGWPPIRSFRKNVMAVQKNSNDEGEKASSSGATGAAFVKVSMDGAPYLRKVDLKLYKSYRELSDALGKMFSSFTIGNCGSQGTKDFMNESKLIDLLNSSEYVPTYEDKDGDWMLVGDVPWGMFVDSCKRLRIMKGSEAIGLAPRAVEKCKNRS

SEQ ID NO: 22802 - protein, 163 aa, Gossypium hirsutum
MATYEGKVFTEEQEALVVKSWTVMKKKTAELGLKFFLKIFEIAPSAKKLFSFLRDSNVPLEQNTKLKPHAMSVFVMTCESAVQLRKAGKVTVRESNLKKLGATHFKYGVVDEHFEVTKFALLETIKEAVPDMWSDEMKNAWGEAYDRLVAAIKIEMKACSQAA

SEQ ID NO: 22803 - protein, 269 aa, Zea mays
  misc_feature (52)..(52): Xaa can be any naturally occurring amino acid
  unsure (1)..(269): unsure at all Xaa locations
RTLKDESTEKPEKKLTHRIRQRIPKEVKALLETPREQIKPMKLCASHLSQKXIPSGPSSNTRNFQLDDMDDLGYRDEEARFFDNDITEEHVQNATKLNYHSYMNKPARGKWSKSDTDLFYEGLRQFGIDFAMIQQLFPDKTRHQVRQKFKSEERKNPLLVHDAIVHRSGDNLYFKKVIKQLNIEDVVLPDIKSTQKQDGASSERGPGNENVLDDLYGEENSSNWLNEEHDVQMADVEEEHGEQMDDVEEEHDLGNDGGDDDLGDVFDWY

SEQ ID NO: 22804 - protein, 427 aa, Desulfitobacterium hafniense DCB-2
MAQVFFTVLLQRLSWPVPQITFSYLIGGLVIFFIMRMLGEMAVDEPVSGSFSHFAYKYWGEFPGFLSGWNYWFNYIVVSMAELTAVGIYINFWFPDIPHWLTALVCLVLVTLLNLISVGTFGEFEFWFAIVKVVAIIGMIVFGLFLIFSGINGEATGFDNLWIHGGFIPNGMIGILFSLVPVMFSFGGIELIGITAGEADNPQKSIPKAINQVMWRILIFYVGALSVLMVLYPWNQVGADGSPFVMIFSKIGIPAAATLLNIVVLTAALSVYNSGVYSNGRMLYSLAMQGNAPKLFAKLNKRGIPVAGVLVSSGITLVGVILNFLLPGKIFTYLMAVAIIAAVITWTTIIIVNLKFRKAKIAQGEGDALHFKTPLHPYTNYFCAAFLVMIVILMAFTESMKMAVLVLPIWLLILWISFKIKKSRESK

SEQ ID NO: 22805 - protein, 242 aa, Escherichia fergusonii
LKKRKEGAFVPFVTLGDPGIEQSLKIIDTLIEAGADALKLGIPFSDPLADGPTIQNATLRAFAAGVTPAQCFEMLALIRQKHPNIPIGLLMYANLVFNKGIDEFYAQCEKVGVHSVLVADVPVEESAPFRQAALRHNVAPIFICPPNADEDLLRQIASYGRGYTYLLSRAGVTGAENRAALPLNHLVAKLKEYNAAPPLQGFGISAPDQVKAAIDAGAAGAISGSAIVKIIEQHINEPEKML

SEQ ID NO: 22806 - protein, 411 aa, Glycine max
MNALAATNRNFRRAAHILGLDTKLENSLLIPFREIKVECTIPKDDGTLVSYVGFRIQHDNARGPMKGGIRYHPEVDPDEVNALAQLMTWKTAVADIPYGGAKGGIGCNPRDLSVSELERLTRVFTQKIHDLIGIQRDVPAPDMGTNSQTMAWILDEYSKFHGHSPAVVTGKPIDLGGSLGREAATGLGVIFATEALFAEYGKSISDMTFVIQGFGNVGTWAAKSIYERGGKVIAVSDISGAIRNPNGIDIPALLKHKEGNGNLKEFSGADIMDPDELLVHECDVLIPCALGGVLNKENAADVKAKFIIEAANHPTDPDADEILSKKGVIILPDIYANAGGVTVSYFEWVQNIQGFMWDEEKVNRELKKYMTKAFRNIKAMCQIHNCDLRMGAFSLGVNRVARATLLRGWEA

SEQ ID NO: 22807 - protein, 240 aa, Nostoc punctiforme PCC 73102
MNKTVEVLPDQPTLVARALELILSKLDTAIEQRGRFTIALSGGSTPKPLYEAIANQKLPWDKINVFWGDERYVPPDHPDSNELMTRRAWLDRVDIPAANIHPVPTLEANPELAAAKYEQHLKEFFNSSGVEFPALDLVLLGMGDDAHTASLFPHTEALKVRDRLVTVGNKDGNPRISFTYPFINSALSVIFLVAGANKRPALAQVFAPVADDFAYPSRLIRPQGELWWLLDAAAGSELQH

SEQ ID NO: 22808 - protein, 96 aa, Zea diploperennis
MGRRACCEKEGVKRGAWTTKEDDALAAYVKAHGEGKWREVPQKAGLRRCGKSCRLRWLNYLRPNIRRGNISCDEEDLIIRLHKLLGNRWSLIAGRL

SEQ ID NO: 22809 - protein, 141 aa, Methylobacillus flagellatus KT
MAVERTLSIIKPDAVAKNVIGKIYTRFEDAGLKIIASKMVQLSQADAEGFYAVHKERPFFNDLVKFMISGPVVVQVLEGENAVLKHRELMGATDPKKAEPGTIRADFADSIDANAVHGSDSLENAAVEIAYFFAQSNIYSR

SEQ ID NO: 22810 - protein, 218 aa, Zea mays
MSAAAAASSVTKFIKCVTVGDGAVGKTCMLICYTCNKFPTDYIPTVFDNFSANVSVGGSIVNLGLWDTAGQEDYSRLRPLSYRGADVFILSFSLVSRASYENVLKKWMPELRRFSPTVPVVLVGTKLDLREDRSYLADHSAASIISTEQGEELRKQIGAVAYIECSSKTQRNVKAVFDTAIKVVLQPPRRREVTRKKMKARSNQSLRRYLCGSGCFTS

SEQ ID NO: 22811 - protein, 431 aa, Mycobacterium avium subsp. paratuberculosis K-10
MADTDDIATLKYPGGETDLEIVSATEGADGIALGSLLSKTGYTTFDNGFVNTASCKSAITYIDGDAGILRYRGYPIEQLAEKSTFLEVSYLLIYGELPDKDQLAEFTKRIQLHTMLHEDLKRFFDGFPRNAHPMPVLSSAVNALSAYYPDSLDPMDTEDVELSTIRLLAKLPTIAAYAYKKSVGQPFLYPDNKLSLVENFLRMTFGLPAEPYQADPEVVRALDMLLILHADHEQNCSTSTVRLVGSSQANLFTSISGGINALWGPLHGGANQAVLEMLEKIRQSDDDVSEFVRKVKNREAGVKLMGFGHRVYKNYDPRARIVKEQADKILAKLGGDDDLLDIAKQLEEAALTDEYFIERKLYPNVDFYTGLIYRALGFPTRMFTVLFALGRLPGWIAHWREMHDEGDSKIGRPRQIYTGYTERDYVTIDAR

SEQ ID NO: 22812 - protein, 136 aa, Brassica napus
MSISKVLGFLILTCLLIASAMAQSPSPAPFIGGGRRVISPSPSKTPTPESSVASPPSLPQADSPSIDSAAVTPSSISDSPSEAPAPSQQSSAVSNQYTVFAGSITVILYAAVFGFLISNGASFIYVIFSENYYVGR

SEQ ID NO: 22813 - protein, 456 aa, Triticum aestivum
MHTAYLKLLHSLCAAASPLLSPLTTLRRYSARRRGGSGGGISSSRMNALAATSRNFKQAAKLLGLDSKLEKSLLIPFREIKVECTIPKDDGTLASYVGFRVQHDNARGPMKGGIRYHHEVDPDEVNALAQLMTWKTAVANIPYGGAKGGIGCSPGDLSISELERLTRVFTQKIHDLIGIHTDVPAPDMGTNAQTMAWILDEYSKFHGYSPAVVTGKPVDLGGSLGRDAATGRGVLFATEALLAEHGKGIAGQRFVIQGFGNVGSWAAQLITEAGGKVIAISDVTGAVKNSNGIDIAKLMKHSAENRGIKGFDGGDAVDPTSLLTEECDVLIPAALGGVINKDNADAIKAKYIIEAANHPTDPEADEILAKKGVLILPDILANSGGVTVSYFEWVQNIQGFMWDEEKVNRELKTYMTRAFRDTKEMCRSHHCDLRMGAFTLGVNRVARATVLRGWEA

SEQ ID NO: 22814 - protein, 524 aa, Zea mays
MKNDASYFWCWGKPPHHRAVLRRPRPPPPPSCPFYRPPPLRRLGKTCPRACNPTTTGRRSSCPSRSWTPPPTTSRKSPTIRPTRLALVRSSFLLICALLAYSFFPSSAKHKFSDPWYQVGFVLTTGVNSAYVLGYSGSIMVPLGWIGGTCGLLLAAAISMYANALLARLHEVGGKRHIRYRDLAGHIYGPKIYGLTWALQYINLFMINTGFIILAGQALKATYGLFSDDGVLKLPYCIAISGFVCALFAIGIPYLSALRIWLGFSTLFSLMYIVIAVVLSSRDGITAPARDYSIPKSSQSTRVFTTIGSIADLVFAYNTGMLPEIQATIRPPVVKNMEKALWFQFTIGSLPLYAVVFVGYWAYGSSTSGYLLNSVTGPVWVKAVANLSAFFQTVIALHIFASPMYEFLDTKYGSGRGGPFEIHNVAFRVAVRGGYLTVNTLVAAVLPFLGDFMSLTGALSTFPLTFVLANHMYLMVKGPKLGAIQKSWHWLNVLGFTALAVAAAVSAIRLIMRDSSTYHFFADL

SEQ ID NO: 22815 - protein, 425 aa, Taxus wallichiana var. chinensis
MVKPSIPLPKTVLHLSTVDNLPVLRGNLFNSLIVYKASDKISADPVKVIREALSKVLVYYFPFAGRLRYKENGDLEVDCNGEGAAFVEAMVDCNLSVLGDLDDLNPSYEDLLFALPQNTDIVDLHLLVVQVTRFACGGFVVGVSFHHSICDGRGAGQFLQSLAEIARGEDKLSYEPIWNRELLKSEDPIHLQFYHLYSLRPSGPTFEEWVHASLVISPATIKHMKQSIMEECNKVCSSFEIVAALAWRARTKALQIPQTQIVKLLFAVDMRKSFNPPFPKGYYGNAIGFACAMDNAHDLINGSLLHAVNIIRKAKAYLFEQCSKSSVAVNPSALDANTGQESVVALTDWRRLGFNEVNFGWGDAVNVCPVQRMTNGLVMPNYFLFLRPSEDMPDGIKILMCMASSMVKSFKFEVEDMINKYVTAV

SEQ ID NO: 22816 - protein, 461 aa, Zea mays
MLEVSTLRGPTSSGSKAEQHCGGGGGFVGDHHVVFPTSGDCFAMVDDNLLDYIDFSCDVPFFDADGDILPDLEVDTTELLAEFSSTPPADDLLAVAVFGADDQPAAAVAQEKPSSSLEQTCGDDKGVAVAAARRKLQTTTTTTTTEEEDSSPAGSGANKSSASAEGHSSKKKSAGKNSNGGKRKVKVDWTPELHRRFVQAVEQLGIDKAVPSRILEIMGTDCLTRHNIASHLQKYRSHRKHLMAREAEAATWAQKRHMYAPPAPRTTTTTDAARPPWVVPTTIGFPPPRFCRPLHVWGHPPPHAAAAEAAAATPMLPVWPRHLAPPRHLAPWAHPTPVDPAFWHQQYSAARKWGPQAAAVTQGTPCVPLPRFPVPHPIYSRPAMVPPPPSTTKLAQLHLELQAHPSKESIDAAIGDVLVKPWLPLPLGLKPPSLDSVMSELHKQGVPKIPPAAATTTGATG

SEQ ID NO: 22817 - protein, 98 aa, Dianthus caryophyllus
MATVGGIKDSGGSSAISLEIDELAKFAVDHYNSIENALLEFPRVVNTKEQVVAGTIYYITLEATDGGVKKLYEANVWVKPGVNFKEVQVFKYVGDAFG

SEQ ID NO: 22818 - protein, 530 aa, Brassica napus
  misc_feature (60)..(60): Xaa can be any naturally occurring amino acid
  misc_feature (296)..(296): Xaa can be any naturally occurring amino acid
  misc_feature (320)..(320): Xaa can be any naturally occurring amino acid
  misc_feature (360)..(360): Xaa can be any naturally occurring amino acid
  unsure (1)..(530): unsure at all Xaa locations
MLLGTSLLIYKGFVFCFPWFSDSYQGNESLLVGKHLVAGVVASRIICSHDFPASQTILHXLEGPCCNTLDLWAQPPCSLLQAPVDLVIATKLDDEIKSWLAFTALKDVEVNALAKALAGQKDEALFSANAAALASRSSSPRVTNEGVQKAAAALKGSDHRRATNAATNVSARLDAQQKKLNLPILPTTTIGSFPQTVELRRVRREYKAKKVSEEDYVKAMKEEIKKVVDLQEELDIDVLVHGEPERNDMVEYFGEQLSGFAFTANGWVQSYGSRCVKPPVIYGDVSRPKAMTVFWXRMARMTSRRSMRECSMLAGPVSRXVLRHPLVRNDQPRHETCYQIALAIRSRAARTLGNPGCGLXKGGIGVIQIDEAALREGLPLRKSEHAFYLDWAVHSFRITNCGVQDSTQIHTHMCYSHFNDIIHSIIDMDADVITIENSRSDEKLLSVFREGVKYGAGIGPGVYDIHSPRIPSSEEIADRVNKMLAVLEQNILWVNPDCGLKTRKYTEVKPALKNMVDAAKLIRSQLASAK

SEQ ID NO: 22819 - protein, 128 aa, Zea mays
  misc_feature (76)..(76): Xaa can be any naturally occurring amino acid
  unsure (1)..(128): unsure at all Xaa locations
MGPTELRPSTSHDTTVTTTNAGAPVWNDNEALTVVPRGPILLEDYHLIEKVAHFARERILERVVHARGAFANGFFXCTHDVTSLTCADFLRAPGVRTPVIVRFSTVIHERRSTETIRDLRRIVLKFYT

SEQ ID NO: 22820 - protein, 263 aa, Rubrobacter xylanophilus DSM 9941
MGGRERLLGAFSKGRPALIPYLTAGYPSLEGAREVARAYLEAGADVLEIGVPFSDPLADGPTIQDTTARALENGADMDYCLGLAGEFSGRAPVVLLVYYNLIFARGVERFVREAAGAGVSGVVVPDLPVDEAGEPARAVEKGGMAFCPLAAPTSTDERLEKIGSLASGFVYCVSVAGVTGVREKLPPGAVELLRRVRARVSAPVALGFGIGSAEAAREAAGEADGIIIGSRLMQLVGEGGPERAGEWLRGVREALSRTAGRSH

SEQ ID NO: 22821 - protein, 596 aa, Alkalilimnicola ehrlichei MLHE-1
MAGDYKIIDHHYDVVVVGAGGAGLRATFGMAEKGLKTACVTKVFPTRSHTVAAQGGVSAALGNMGEDDWRYHAYDTIKGSDWLGDQDAIEYMCREAIPAIIELEHYGVPFSRTEEGKIYQRPFGGMTVRYGEGTAQRTCAAADRTGHAILHTLYQQALAHQAEFFIEYFAIDLIMEDDRCRGVVALNLADGTIHRFIGQITVLATGGYGRSYFSCTSAHTCTGDGSGMVLRAGLPLQDMEFVQFHPTGVYGSGCLITEGVRGEGGYLTNSEGERFMERYAPNAKDLASRDVVSRSMTVEIREGRGVGPKKDHIHLHLEHLGAEVIHERLPGIAETARIFAGVDVTKEPIPVIPTVHYNMGGIPTNYQGEVVTLKDGNPDQVVPGLMAIGEAACVSVHGANRLGSNSLLDLVVFGRAAAIRAAELIKEGDTVQRALQPGAGDLALERLERLRNAKGSKPTAEIRDGMQETMQNFAAVFRTGESLQEGCERMAAVYASFEDVAVSDRSLIWNSDLVETLELENLLGNAVATIESARNREESRGAHAREDFPERDDDNWHKHTLSWVGQDGKVKLDYRPVHMYTLTDEMEVIPPKARVY

SEQ ID NO: 22822 - protein, 499 aa, Silicibacter sp. TM1040
MHPISSSKAIGRARVHEGAHSGWRLFWISVLGTALLVMQSLSAAARPESLAPLAEKVSPAVVNITTSTVVEGRTGPQGIVPEGSPFEDFFREFQDRNGGGTRPRRSSALGSGFVISEDGYIVTNNHVIEGADEIEIEFFPGEGQPADLLPATVVGTDPNTDIALLKVDAPMPLSFVKFGDSDKARVGDWVVAMGNPLGQGFSLSAGIVSARNRALSGSYDDYIQTDAAINRGNSGGPLFNMDGEVVGVNTAILSPNGGSIGIGFSMASNVVTKVVSQLKEFGETRRGWLGVRIQDVTDDLAEAIGLASDEGVLITDVPEGPAKEAGLLARDVITSFDGFEVKDTRDLVRRVGDTEVGKTVRVVVFRDGKTETIRVTLGRREDAVGNGTEGGGAEAVPDEGEKELLGLTVGVVRDDMREDLNLDAGTTGLVILSVDETSGAWEKGLRAGDVITEAGQNKLSSIADLEAQIAAAEEGGRKSIFLMVRRAGEPRFVALNLED

SEQ ID NO: 22823 - protein, 451 aa, ASPERGILLUS NIDULANS FGSC A4
MLQVPVREYNSVASGVSTKAIILVGGPSRGTRFRPLSLDVPKPLFEVAGHPIIHHCLKALAKVPELHEVILIGYYDETVFRDFIKDSAKEFPQFRISYLREYTALGTAGGLYHFRDPILKGKPERIFVLNADVCCSFPLGEMLRLFEEKDAEAVILGTRVHNDAATNFGCIVSDSHTKRVLHYVEKPESHISNLINCGVYLFATECIFPSIRSTIKRRTTRPRLLSYPSSDNLEASFVADDDSERTEVLRLEQDILSDLADSNRFFVHETKDFWRQIKTAGSAVPANALYLQKAFQAQSEELAAPSATIVPPVYIHPTASVDPTAKLGPNVSIGPRAIVGAGARVKDSIVLEDAEIKHDACVMHSIIGWSSRVGAWARVEGTPIPMGSHSTSIIKNGVKVQSITILGKECGVGDEVRVQNCVCLPYKELKRDVANEVIMSSKQNASADGQS

SEQ ID NO: 22824 - protein, 664 aa, Bacillus cereus E33L
MIQNINQLAVNTIRTLSIDAINAANSGHPGLPMGAAPMAYALWANHLNHNPNHPKWFNRDRFVLSAGHGSSLLYSLLHLAGYDVSIDDLKNFRKLNSKTPGHPEFGHTSGVEATTGPLGQGIANAVGMAMAEAHLAAKFNKDGHSIIDHNTYALVGDGDLMEGVAYEAMSMAGHMKLGKLIVLYDSNEISLDGELNIAFSEDMQKRVESAHWQYIRVEDGNDVDAITKAIQLAKDNADQPTLIEIRTIIGYGSPKVAGTNKAHGNPLGLEEATATKQVYGWHYEEDFFVPEEVTAHFNELKQKGIEKENGWNEQFNLYRESNPALADELEKAITGEVLIEAKDILSFDTEKTISTRVASGEAINHYVKSIPSIFGGSADLSHSTMTDIKGEAVYAVESYAGRNIYFGVREHAMGAAANGLALHGGVKPFVSTFFVFNDYLRPSIRLAALQKLPVTYVFTHDSIAVGEDGPTHEPIEHLAALRAIPGLTVIRPSDANETASAWAYALQQTDGPVVLVLSRQNLPVFNETKANIENLSKGAYVLTQTNENPDVILIATGSEVSLAASAKAKLEEDNVSVRIVAMPSWELFDHQSKEYKESVLPSSVTKRVSLEMGVSLGWERYVGQEGNILSIETFGASGTGAEVMNLFGFTTENVVQITKNVLNS

SEQ ID NO: 22825 - protein, 274 aa, Triticum aestivum
  misc_feature (225)..(225): Xaa can be any naturally occurring amino acid
  unsure (1)..(274): unsure at all Xaa locations
MRKRERENPCGVCGHYHKCEEGEICGVCGHRPAAADAVAPARVDSAFPSEVLKGFLFLGSYDNASRSEVLKTLNITHILNTVPDCHNLYRNSFTYHCLQDDKTLDFDGATQFLEQCERGASRVLVHCMSGKNRSAAVVTAFLMKSRGWRLAPSLQWVKDRRPQVQITEASQCQLVEYEQKLFGPSAGSPAQTTVLTESFPSLGFGFPQPSGDIQVPAFNQTPVPXIFERAGPNNVPSNFTFGADGSMGVGVGPAAGINNGAVTPASTDNQMDSS

SEQ ID NO: 22826 - protein, 77 aa, Citrullus lanatus
MSCCGGNCGCGSGCKCGSGCGGCKMFPDMSFSEATATIETFVVGFAPHKMSFEVAEMGAENGCKCGDNCTCDPCNCK

SEQ ID NO: 22827 - protein, 451 aa, Silicibacter sp. TM1040
MSFDYDLFVIGGGSGGVRAARVAAAGGASVALAEEDRYGGTCVIRGCVPKKLMVFASEYSGMVEDGRAYGWDLENKGFDWDHFKQKLNTELDRLEGIYRNLLKNSGVESFDARAKLADAHTVELSDGTRKTAKHILIATGGRPWVPEFPGSELAITSNEMFHLEKLPESILIVGGGYIASEFAGIMNGLGVKTTQYYRGAQILRGFDDEARGLVAQEMIQSGIDLKLGTNVLEMRREGDKIWVKATNGDEGLFDQVMFATGRKPNADNLGLEELGIARGRGGEIEVDQYSQTAVPSVYAIGDVTDRVNLTPVAIREGMAFVETVFNGNPTSPDHDLIPTAIFTQPEMGTVGLSEEEAAKQETIEVYATSFKPMQQSFAGRAQRVLMKLIVSQATRKVLGCHIVAPGAGEMIQLAGIAVKMGATKEDFDRTVAVHPTMSEELVTLKTPVRTI

SEQ ID NO: 22828 - protein, 233 aa, Mycobacterium avium subsp. paratuberculosis K-10
MDTAASSPRVLVVDDDSDVLASLERGLRLSGFEVSTAVDGAEALRSATETRPDAIVLDINMPVLDGVSVVTALRAMDNDVPVCVLSARSSVDDRVAGLEAGADDYLVKPFVLAELVARVKALLRRRGATATSSSETITVGPLEVDIPGRRARVNGVDVDLTKREFDLLAVLAEHKTAVLSRAQLLELVWGYDFAADTNVVDVFIGYLRRKLEANGGPRLLHTVRGVGFVLRMQ

SEQ ID NO: 22829 - protein, 160 aa, Citrullus lanatus
IIAKGHYTERAAASLLRTIVQIVHTCHSMGVIHRDLKPENFLLLSKDEDSPLKATDFGLSVFYKQGEVFKDIVGSAYYIAPEVLKRRYGPEVDIWSVGVMLYILLCGVPPFWAESEHGIFNAILRGHIDFTSDPWPTISPAAKDLVRKMLNSDPKQRLTA

SEQ ID NO: 22830 - protein, 96 aa, Zea diploperennis
MRRRACCEKEGVKRGAWTTKEDDALAAYVKAHGEGKWREVPQKAGLRRCGKSCRLRWLNYLRPNIRRGNISYDEEDLIIRLHKLLGNRWSLIAGRL

SEQ ID NO: 22831 - protein, 349 aa, Arabidopsis thaliana
MPIMHDSDRYDFVKDIGSGNFGVARLMRDKLTKELVAVKYIERGDKIDENVQREIINHRSLRHPNIVRFKEVILTPTHLAIIMEYASGGELYERICNAGRFSEDEARFFFQQLLSGVSYCHSMQICHRDLKLENTLLDGSPAPRLKICDFGYSKSSVLHSQPKSTVGTPAYIAPEVLLRQEYDGKIADVWSCGVTLYVMLVGAYPFEDPEEPRDYRKTIQRILSVKYSIPDDIRISPECCHLISRIFVANPATRISIPEIKTHSWFLKNLPADLMNESNTGSQFQEPEQPMQSLDTIMQIISEATIPAVRNRCLDDFMTDNLDLDDDMDDFDSESEIDIDSSGEIVYAL

SEQ ID NO: 22832 - protein, 168 aa, Citrullus lanatus
DRIAKLDKTCKFVKGDFMKMPFEDNSFDAIYAIEATCHAPDYGCFKEIYRVLKPGQHFAAYEWCLTNSFDPNNQDHQRIKAEIEIGSGLPDIKTIGKCLEALKQAGFEVIWGKDLAEDSPVPWYLPLDGGQFSITNFRATAIGRCVTKYMVRALEYIHLAPKGSERVQ

SEQ ID NO: 22833 - protein, 593 aa, Bdellovibrio bacteriovorus HD100
MTKPTTLGHSILSMRSRNPHHVAVKYKVNDSWKEKSWNEYYSDIEAVGCALLSLGIKPGDRVAIMANTRVEWSTTDLGIFGIKAITVPIYQNNTADDVEYILNNSESRILICESRGPLKTFESVRSKCPKVEKVIVFDETCPNPDVVTWPKLLQMGKDYLAKHPSQFQELCASLTQEDIATILYTSGTTGRPKGVVMTHLQAISEVSEAFPLCGATEADTSLSFLPYAHILGRIEHWGHAYIGFTLAFAESLEKIRGNLTEVRPTFMISVPRIFEKIYAAVIAQIQTQPLKMKVFNWALEIGTKVGEYKMSGQVLPLDLLVKYELAKKLVLDKIPTAFGGRLRFAISGGAPIPREIALFFHAAGILILEGYGLTETTAAVTVNTPFNYKFGSVGRPIGEVKLKIAEDGEILVKSDKVMKEYYKNPEATKEAFTDGWFHTGDIGEILPGGDLKITDRKKDLIKTAGGKYVAPQRLEGLLSLSPYIANVLVHGDQRKYIVALVTLDRPTVENLAKEKQVSYSDWNSLVQSPFVQDLIRKAVAETNSQLASFESIKKYVILPNEFTVEGGELTPSLKVKRKVLDQRFKDKIEELYL

SEQ ID NO: 22834 - protein, 467 aa, Listeria monocytogenes str. 1/2a F6854
MTSVMWFRRDLRVSDNKALYHACKEDDLLLLFQVNPAQFITGSPSHQAFFASVAHFKQEVDKTALLQIMFGEPVECLKQLKETLPSWDKVYFNRDETGYGAERDEAAKTFFDEQEIEVQAFHDSYLHSAEEVKKSPTEYYKIFTPYYKKWREEIKETPFKVTLKADNIRKENLFPKYEEQFAEMTCDLPILDSGEKTANTRLANFIKHDVADYDKARDFPELDKTSHLSRYLRTGEISVRTIWQALQENEATEGRAIFEKELCWRDFYNMIYVSFPNQKNEPIQENYRFIEWENNREFFKAWQDGKTGFPLVDAAMRQLKETGWMHNRLRMVTASFLTKDLLIDWRFGEKYFQQMLIDYDPASNIGGWQWAASTGTDAVPYFRIFNPTTQSQKFDPTGKFIRKYVKELANLPDKYIHQPEKMSEIEQKEYGLLLGKDYPFPLIDHKERRKLAIARYEFSKEHYRGNI

SEQ ID NO: 22835 - protein, 521 aa, Desulfitobacterium hafniense DCB-2
MRVVSAHQMRELEERAIRDFGIPSLLLMENAALAVIQEVRQMLEDRHIQLSAGRATVFVGKGNNGGDGLAVARHLLILGMDITVYSFARAEEFKGDAALNYRLYQNTGGKLFTIEGEKQRRLVRISLAQADVIIDAIYGTGFRGALPSLIDEYVEEINRAQVPVVAVDIPSGVEADTGKVYRKAIMADATVTFGLPKLGHFLGVGPEYAGRVSVDPISIPERFLDDEKLTTSILTEDVCQYLPIRSLQGHKGTHGRGVLVAGSEGMTGAALLAGKAALRSGIGLLQMVVPRGLAEGIDLALTEATVWGAESEKALNGNAWPVIYERAEKAQALAIGPGLGQEPELLLVIEEVLRNLPLPVILDADALNVLAKEPGILGWRQGRGPLILTPHPGEMARLCGCTTEEVQANRLELAISKAVEWESIIVLKGAITIIAAPDGRAFLNPTGNPGLGTGGTGDVLTGSILAWLAQGVEPLAAACLGVYLHGKAADQLTGEFGLSGYTAGEVADQLPKARRSLENNH

SEQ ID NO: 22836 - protein, 493 aa, Candida albicans SC5314
MTETSISGLRGPKSMYFMEIVDVSSQESSVLSSIVESFTSAVSASNLGVYSDEVLCDIKSSLKENSPITMLPNYNVSPTGDEHGQYLVIDLGGSTLRIAVVDISKPHPNLSRSERITIVVEKSWIIGNDFKRIDGEFFKYIGSKINEILMGQNVIDVKSVINTGITWSFPLETTDYNRGKIKHVSKGYTVGEDIYDKDLKMVLEDTLRQEYGLTLDVQSILNDSLAVYSAGCFIDSKMKLAMVLGTGINMCCSLKRSSDIHPSKMLADATLFNCELSLFGQNLCKDFATKYDIIIDKRFAGLSHHFKTFMEPDPITKTLFQPHELMTSGRYLPELTRLVVVDLIEAGEIFQNVDHQQMYQEYGGFSGELICFVHENDDYDDIHDKLCKAYGWTTVGLSDIVCLKEVVSCIIKRAAFIVANAIIAFFKLLGSDELGGDVTIGYVGSVLNYFHKYRRLIVEYVNSAEEAKGIKVDLKLIENSSIIGAAIGAAYHK

SEQ ID NO: 22837 - protein, 441 aa, Arabidopsis thaliana [sequence omitted]

SEQ ID NO: 22838 - protein, 424 aa, Hordeum vulgare
MVVTVAATGPDTAETLHSTTFASRYVRDQLPRYRMPENSIPKEAAYQIISDELMLDGNPRLNLASFVTTWMEPECGKLIMDSVNKNYVDMDEYPVTTELQVCWEKFARYFEVELKEVKLTEGYYVMDPKKAVEMVDENTICVAAILGSTLTGEYEDVKLLNDLLVEKNKETGWNVPIHVDAASGGFIAPFLQPELEWDFRLPLVKSINVSGHKYGLVYPGVGWVIWRSKDDLPEELIFHINYLGADQPTFTLNFSKGASQIIAQYYQLIRLGFEGYKHIMENCKLNAAVLKEGIDATGRFDVLSKADGVPLVAIRLKDSTNFSVFDISENLRRFGWIVPAYTMPADAEHVAVLRIVIREDFNRSLAQRLLADINKIIGELDAHAVHAIKLSTAAAGGDGASKSAVDAATEAFKDLAGKKKAGVC

SEQ ID NO: 22839 - protein, 175 aa, Oryza sativa
MGPTVMASSATSVAPFQGLKSTAGLPVSRRSTNSGFGNVSNGGRIKCMQVWPIEGIKKFETLSYLPPLTVEDLLKQIEYLLRSKWVPCLEFSKVGFVYRENHRSPGYYDGRYWTMWKLPMFGCTDATQVLKELEDAKKAYPDAFVRIIGFDNVRQVQLISLIANKPPGRAEFGGN

SEQ ID NO: 22840 - protein, 109 aa, Streptococcus mitis
LLYALLHLSGFEDVSMNEVKNFRQWGSKTPGHPEFGHTAGVDATTGPLGQGISTATGFAQAERFLAAKYNREGFNIFDHYTYVICGDGDLMEGVSSEAASYAGLQKLDK

SEQ ID NO: 22841 - protein, 113 aa, Streptococcus mitis
TYVFTHDSIAVGEDGPTHEPVEHLAGLRAMPNLNVFRPADARETQAAWYLAVTSEKTPTALVLTRQNLTVEEGTDFDKVAKGAYVVFENAADFDTILIATGSEVNLAVAAAKE

SEQ ID NO: 22842 - protein, 529 aa, Plantago major
MTADHQKSSVASFAVSSGDAGKLGLSSTLDTLPKKPLKRNKYALAISILASMTSVLLGYDCGVMSGATQFIQEDLIITDVQVELLVGTINIYSLVGSAVAGRTSDWVGRRYTIVFASTIFFLGAILMGFATNYAFLMVGRFVAGIGVGYALMIAPVYAAEVAPASCRGFLTSFPEVFINFGVLLGYVSNFAFAKLPLTLGWRMMLGVGAVPSVLLGVGVLYMPESPRWLVLQGRLGDAKKVLDKTSDSLEESKLRLADIKEAAGVPLDCHDEIVQVQKRSQGQGVWKELLLHPTKPVLHILICGVGIHFFQQGIGIDSVVLYSPRIYEKAGIKNTSDKLLATIAVGVSKTFFILITTFFVDRFGRRPLLLTSCAGVALSMFALGTSLTIIDRNPDGNIKGLLIFAVILTMAIVGFFSMGLGPIAWVYSSEIFPLKLRAQGCSMGVAMNRFMSGVILMSFISLYKAITIGGAFFLFGGITTVAFIFFYTLFPETQGRTLEEMEELFGTFFSWRTRMKELDAKKKTGSEAT

SEQ ID NO: 22843 - protein, 368 aa, Vigna radiata var. radiata
QMGLAENQLTSDLVEDWILNNPEASICTPEGINDFRAIANFQDYHGLAEFRNAVAKFMARTRGNRITFDPDRIVMSGGATGAHEVTAFCLADPGEAFLVPIPYYPGFDRDLRWRTGVKLVPVMCDSSNNFVLTKEALEDAYEKAREDNIRVKGLLITNPSNPLGTIMDRKTLRTVVSFINEKRIHLVCDEIYAATVFSQPGFISIAEILEDETDIECDRNLVHIVYSLSKDMGFPGFRVGIIYSYNDAVVNCARKMSSFGLVSTQTQYLLASMLNDDEFVERFLAESAKRLAQRFRVFTGGLAKVGIKCLQSNAGLFVWMDLRQLLKKPTFDSETELWKVIIHEVKINVSPGYSFHCTEPGWFRVCFA

SEQ ID NO: 22844 - protein, 131 aa, Brassica napus
  misc_feature (32)..(32): Xaa can be any naturally occurring amino acid
  misc_feature (68)..(68): Xaa can be any naturally occurring amino acid
  unsure (1)..(131): unsure at all Xaa locations
TRPIRRMPLKGKQFNGLQPRVEPDMLAFPGCXYGGGDKGGGKLAAIKRRMETLHINNPEKHRRQGRCXLTPEEVGLMLRALGYGSDVHIYVASGEVYGGEESLAPLKALFPHFYSKDTIATKEELEPFASY

SEQ ID NO: 22845 - protein, 530 aa, Plantago major
MNSEHHNSGGLASFSVDAGKSQKPDAASVLDTLPKKPVTRNKYALAISILASMTSVLLGYDTGVMSGATLYIKDDLKISDVQVELLVGTINIYSLVGSAVAGRTSDWVGRRYTTVFASVVFFVGAILMGIATNYVFLMAGRFVAGIGVGYALMIAPVYAAEVAPASCRGFLTSFPEVFINFGVLLGFVSNYAFAKFPLKLGWRMMLGVGAIPAVFLAIGVIYMPESPRWLVLQGRLGDARRVLDKTSDSLEESKLRLADIKEAAGIPEDCNDDFVQVQKHSQGQGVWRELLLHPTKPVLHILICGVGIHFFQQGIGIDSVVLYSPRIYDRAGITDTSDKLLATIAVGISKTFFILITTFYVDRFGRRFLLLVSCAGVALSMFALGTVLTIIDRNPDAKQTGVLVLVVLLTMVIVGFFSMGLGPIAWVYSSEIFPLKLRAQGCGLGVAMNRFMSGVILMSFISLYKEITIGGSFFLFGGITTLGWIFFFTLFPETRGRTLEEMEGLFGTFFKWRTTMKELDAKKRSGTDGA

SEQ ID NO: 22846 - protein, 157 aa, Triticum aestivum
  misc_feature (40)..(40): Xaa can be any naturally occurring amino acid
  misc_feature (46)..(46): Xaa can be any naturally occurring amino acid
  misc_feature (52)..(52): Xaa can be any naturally occurring amino acid
  unsure (1)..(157): unsure at all Xaa locations
STHYHFSADVGSEASPVGLPGRVFIGKLPEWSPDVRLFTXYEYPRXNMLRDXDVHGTMGLPVFEKGSYSCLGVMELIMTRQKLNFTSEINDICRALQAVNLRSTEVSSTPRATKFNSASYKDALPEILEVLRAACVTHNLPLAQTWVTCAQQGKGGS

SEQ ID NO: 22847 - protein, 372 aa, Bacillus anthracis str. 'Ames Ancestor'
MKAEEKFSPGLDGIVAAETKISFLDTVKGEIVIQGYDLIELSKTKEYLDIVHLLLEEHLPNEDEKATLEKKLKEEYAVPEGVFNVLKALPKETHPMDGLRTGVSALAGYDNDIENRSLEVNKSRGYKLLSKVPNIVANSYHILNNEEPIEPLKELSYSANFFYMLTGKKPTELEEKIFDRSLVLYSEHEMPNSTFTARVIASTQSDLYGALTGAVASLKGSLHGGANEAVMYMLLEAGNVEKFEELLQKKLYNKEKIMGFGHRVYMKKMDPRALMMKEALKQLCDVKGDYTLYEMCEAGEKIMEKEKGIYPNLDYYAAPVYWMLGIPIQLYTPIFFSSRTVGLCAHVIEQHTNNRLFRPRVNYIGERHVLSK

SEQ ID NO: 22848 - protein, 776 aa, Brassica oleracea
MMVREVASGLLILFSILIWVSPAAAGNGGGCNCEDEGVSFWSTENILETQRVSDFLIAVAYFSIPIELLYFVSCSNVPFKWVLFEFIAFIVLCGMTHLLHGWTYGPHPFKLMVALTVFKMLTALVSCATAITLITLIPLLLKVKVREFMLKKKAHELGREVGLIMIQKETGVHVRMLTQEIRKSLDRHTILYTTLVELSKTLALQNCAVWMENEGKSEMNLTHELRGSSGRSGYGYSVSMHDVDVVRVRESNDVNILSVDSLIARASGGDVSEIGPVAAIRMPMLRVSDFKGGTPELIQTCYAILVCVLPSGQPRDWSYQEIEIVKVVADQVAVALSHAAVLEESQMMRDKLADQNRALQIAKRDAMRASQARNVLQKAMSEGMRRPMHSILGLLSMIQDEKLSNEQKMIVDTMVKTGNVMSNLVGDAMDVSDGRFVTEMKPFSLHRTVREAACLARCLCLYNGFRFTVDAEMSLPDNVVGDERRVFQVILHMVGSLVKPRKCREGSLSSSVIFKVFKERGSLDRSDQRWAAWRSPTCSADGDVYIRFEMSVENDGSGSQSFASVSSRDQEVGEVRLSGYGLGQDLSFDVCKKVVQLIQGNISVVPGSDGSPETMSLLLRFRRRPSISVHGTGEAPAPDHHLHPHSDSLLRGLQVLLVDTNDSNRAVTRKLLEKLGCIVTAVSSGFDCLTAIAPSSSSSSSTFQVVVLDLQMAEMDGYEVAMRIRSRSWPLMVAMTVSLDEEMWDKCMQIGINGVVRKPVMLRAMESELRRVLLQA

SEQ ID NO: 22849 - protein, 433 aa, Methylococcus capsulatus str. Bath
MPLIFGVCCLVVAAAHMVPAARAAAGEFFNGLLGKRMTKSADVLFVLLGAIMVLAMHAGFAFLEVGTVRRKNQVNALVKILSDFAMSTIAYFFIGYELAYGVDFFDSALALTVDNGYGLVKFFFLLTFAAAIPAIVSGGIAERSKFNPQLAATFLLVGFVYPLFEGIAWNSNLGFQGWLQTRFGAQFHDFAGSVVVHAVGGWIGLAAVLLLGPRRGRYHRDGMIAAHPPSSIPFLALGAWILTVGWFGFNVMSAQNLNGISGLVAVNSLMAMVGGTLAALLAGRNDPGFVHNGPLAGLVAVCAGSDLMHPIGALAVGAVAGFLFVYLFTLTQNRWKIDDVLGVWPLHGLCGAWGGIAAGIFGQSALGGIGGISFMAQVLGTGLGVAIALAGGLAVYGAAKTLIGLRLTPEEEFDGADLTLHRISSSPEKEAGW

SEQ ID NO: 22850 - protein, 292 aa, Triticum aestivum
ERPWEQRTAGGGSSLLPNVQKGLQSFTWSQARGLNSHQQKFGNGILIVSNEATHGNNRTADSSTTTQFQLQKAPQLQKLPLLQKPPQLVKPLQMVNQQQLQPQAPRQIDFSAGTSSKSGVLVTRAAVLDGDSSEVNGLCKEEGTTPVIEDRRPRKRGRKPANGREEPLNHVEAERQRREKLNQRFYALRAVVPNISKMDKASLLGDAIAYITDLQKKLKDMETERERFLESGMVDPRERAPRPEVDIQVVQDEVLVRVMSPLENHPVKKVFEAFEEADVRVGESKLTGNNGT

SEQ ID NO: 22851 - protein, 183 aa, Pseudomonas syringae pv. tomato str. DC3000
MKIRFVSIPLLLLSMSGAVMAADCPPLLQGELPKLRAKENIDLCKRFAGKPLVVVNTASFCGFAPQFKGLEELSQRYKGQGLEVLGLPSNDFKQEAKDGEETAKVCYVNYGVTFTMTEPQAVRGDDATHLFKVLAEQSSAPRWNFYKYVVDRQGKVVANFSSMTKPDDPELIAAIEKAIASKP

SEQ ID NO: 22852 - protein, 344 aa, Shewanella sp. MR-4
MAVFNHVSFDEHEQVVFCHDKESGLKAIVAIHNTNLGPAVGGCRMWNYQSDDEALTDVLRLSRGMTYKNALAGLTMGGGKSVIIADPKRPDREALFRAFGRFINSLGGRYYSAEDVGTTTADIMIAHQETPYMAGLEGKSGDPSPFTALGTYLGIKAAVKHKLGLDSLKGLKIAVQGVGHVGYYLCKHLHEEGAELIVTDIHQASLDKVATDFGAIVVAPQDIYAQDVDVYAPCALGATLNDVTLPQLKAKIVAGCANNQLAEVRHGEQLKEMGILYAPDYVINAGGIINVSFEKDYDAAKSEAKVREIYNTLLKIFTKADAENRTTAAVADEMARAIYQAAKD

SEQ ID NO: 22853 - protein, 313 aa, Glycine max
MAKLIKFFELNTGAKIPSVGLGTWQAEPGVVAKAVTTAILVGYRHIDCAQAYNNQAEIGSALKKLFDDGVVKREDLWITSKLWCSDHASEDVPKALDKTLQDLQLDYLDLYLIHWPVRMKSGSVGFKKEYLDQPDIPSTWKAMEALYDSGKARAIGVSNFSSKKLQDLMNIARVPPAVNQVELHPGWQQPKLHAFCESKGVHLSGYSPLGSPGVLKSDILKNPVVIEIAEKLGKTPAQVALRWGLQTGHSVLPKSTNESRIKGNFDVFDWSIPEEVMDKFSEIKQDRLIKGTFFVDETYGAFKTVEELWDGEL

SEQ ID NO: 22854 - protein, 199 aa, Colletotrichum trifolii
MAQPGVQSLKCVVTGDGAVGKTCLLISYTTNAFPGEYIPTVFDNYSASVMVDGKPISLGLWDTAGQEDYDRLRPLSYPQTDVFLICFSIVSPPSFDNVKAKWYPEIDHHAPNIPIILVGTKLDLREDPNTLESLRQKRMEPVSYDQALICAKEIKAHKYLECSALTQRNLKSVFDEAIRAVLNPRPVAQQKKKSKCTIL

SEQ ID NO: 22855 - protein, 582 aa, Arabidopsis thaliana
MGSCVSSPLKGSPFGKRPVRRRHSSNSRTSSVPRFDSSTNLSRRLIFQPPSRVLPEPIGDGIHLKYDLGKELGRGEFGVTHECIEISTRERFACKRISKEKLRTEIDVEDVRREVEIMRCLPKHPNIVSFKEAFEDKDAVYLVMEICEGGELFDRIVSRGHYTERAAASVAKTILEVVKVCHEHGVIHRDLKPENFLFSNGTETAQLKAIDFGLSIFFKPAQRFNEIVGSPYYMAPEVLRRNYGPEIDVWSAGVILYILLCGVPPFWAETEEGIAHAIVRGNIDFERDPWPKVSHEAKELVKNMLDANPYSRLTVQEVLEHPWIRNAERAPNVNLGDNVRTKIQQFLLMNRFKKKVLRIVADNLPNEEIAAIVQMFQTMDADKNGHLTFEELRDGLKKIGQVVPDGDVKMLMDAADTDGNGMLSCDEFVTLSIHLKRMGCDEHLQEAFKYFDKNGNGFIELDELKVALCDDKLGHANGNDQWIKDIFFDVDLNKDGRISFDEFKAMMKSGTDWKMASRQYSRALLNALSIKMFKEDFGDNGPKSHSMEFPIARKRAKLLDAPKNKSMELQISKTYKPSGLRN

SEQ ID NO: 22856 - protein, 113 aa, Streptococcus mitis
TYVFTHDSIAVGEDGPTHEPVEHLAGLRAMPNLNVFRPADARETQAAWYLAVTSEKTPTALVLTRQNLTVEEGTDFDKVAKGAYVVYENAVDFDTILIATGSEVNLAVSAAKE

SEQ ID NO: 22857 - protein, 484 aa, Vigna radiata var. radiata
MGFKAMDQTPLLSKMAIGDGHGESSPYFDGWKAYDQNPFHPTDNPNGVMQMGLAENQLTSDLVEDWILNNPEASICTPEGINDFRAIANFQDYHGLAEFRNAVAKFMARTRGNRITFDPDRIVMSGGATGAHEVTAFCLADPGEAFLVPIPYYPGFDRDLRWRTGVKLVPVMCDSSNNFVLTKEALEDAYEKAREDNIRVKGLLITNPSNPLGTIMDRKTLRTVVSFINEKRIHLVCDEIYAATVFSQPGFISIAEILEDETDIECDRNLVHIVYSLSKDMGFPGFRVGIIYSYNDAVVNCARKMSSFGLVSTQTQYLLASMLNDDEFVERFLAESAKRLAQRFRVFTGGLAKVGIKCLQSNAGLFVWMDLRQLLKKPTFDSETELWKVIIHEVKINVSPGYSFHCTEPGWFRVCYANMDDMAVQIALQRIRNFVLQNKEVVVSNKKHCWHSNLRLSLKTRRFDDITMSPHSPLPQSPMVKATN

SEQ ID NO: 22858 - protein, 132 aa, Rickettsia sibirica 246
MIKPDAIKRNKIGQVNTYLENAGLKIVAQKMKFLTKYEAACFYDEHRARPFFNSLVEYITSGAVVLQVLKGEDAITLNRTVMGATNPAEAEAGTIRKDLGESIEANSIHGSDSENSAKREIEFFFNKSEIIE

SEQ ID NO: 22859 - protein, 510 aa, Eustoma grandiflorum
MAVGNGVLLHIARSLMLFFHVQKLVQYLWMNSRRHRLPPGPIGWPVLGALPLLGTMPHVALANMAKKYGPVMYLKVGSCGLAVASTPEAAKAFLKTLDMNFSNRPPNAGATHLAYNAQDMVFADYGPRWKLLRKLSNIHILGGKALQGWEEVRKKELGYMLYAMAESGRHGQPVVVSEMLTYAMANMLGQVMLSKRVFGSQGSESNEFKDMVVELMTVAGYFNIGDFIPSIAWMDLQGIQGGMKRLHKKFDALLTRLLEEHTASAHERKGSPDFLDFVVANRDNSEGERLHTVNIKALLLNMFTAGTDTSSSVIEWALAELLKNPIILKRAQEEMDGVIGRDRRFLEADISKLPYLQAICKEAFRKHPSTPLNLPRIASQACEVNGHYIPKGTRLSVNIWAIGRDPSLWENPNEFNPDRFLERKNAKIDPRGNDFELIPFGAGRRICAGTRLGILLVEYILGTLVHSFDWELPSSVIELNMDEPFGLALQKAVPLAAMVTPRLPLHIYCP

SEQ ID NO: 22860 - protein, 200 aa, Zea mays
MHVVTQELFLASPARAVLLLGFHAGRSSWSLPPERRRNLRGLPELRASSDKAAAGTAMPVPLAPYPAPPAPFTPPNGAQSQLVCTGCRNLLMYPAGATSVCCAVCSTVTAVPAPGTEMAQLVCGGCHTLLMYIRGATSVQCSCCHTVNLAMEANQVAHVNCGNCRMLLMYQYGARSVKCAVCSFVTSVGTSPGAEQKPSS

SEQ ID NO: 22861 - protein, 523 aa, Campanula medium
MSIDISTLFYELVAAISLYLATYSFIRFLFKPSHHHHLPPGPTGWPIIGALPLLGTMPHVSLADMAVKYGPIMYLKLGSKGTVVASNPKAARAFLKTHDANFSNRPIDGGPTYLAYNAQDMVFAEYGPKWKLLRKLCSLHMLGPKALEDWAHVKVSEVGHMLKEMYEQSSKSVPVPVVVPEMLTYAMANMIGRIILSRRPFVITSKLDSSASASASVSEFQYMVMELMRMAGLFNIGDFIPYIAWMDLQGIQRDMKVIQKKFDVLLNKMIKEHTESAHDRKDNPDFLDILMAATQENTEGIQLNLVNVKALLLDLFTAGTDTSSSVIEWALAEMLNHRQILNRAHEEMDQVIGRNRRLEQSDIPNLPYFQAICKETFRKHPSTPLNLPRISTEACEVDGFHIPKNTRLIVNIWAIGRDPKVWENPLDFTPERFLSEKHAKIDPRGNHFELIPFGAGRRICAGARMGAASVEYILGTLVHSFDWKLPDGVVEVNMEESFGIALQKKVPLSAIVTPRLPPSSYTV

SEQ ID NO: 22862 - protein, 334 aa, Ralstonia metallidurans CH34
MTDMKPSILVTRAIFPDVIERLAQYFDVDDNQEDLVLDSGALRERLAGKVGVLANAADRIDGELVGALPQLRAVCNMAVGYNNLDLPALTAAGIVATNTPDVLTETTADFGWALLMATARRVTEGEHYLRAGKWERWSYDMLVGMDVQGSTLGILGMGRIGQGLARRAAGFDMQVLYHNRSQLPDDVERSLNARYVSKAELLQQSDHLILVLPYSVESHHAIGAAEIAQMKPTATLINLARGGIVDDAALAAALRARKIFAAGLDVFEGEPSVHPDLLTVPNVVLTPHIASASEKTRRAMANLAADNLIAALDVGPQAGKPPTVVNPEVMARRR

SEQ ID NO: 22863 - protein, 806 aa, Oryza sativa
MALSTAQTGESMHSSTFASRYVRTALPRFRMPEKSIPKDAAYQIINDELMLDGNPRLNLASFVTTWMEPECDKLMMAAINKNYVDMDEYPVTTELQNRCVNMIAHLFNAPIGDDETAVGVGTVGSSEAIMLAGLAFKRKWQNRMKAEGKPHDKPNIVTGANVQVCWEKFARYFEVELKEVKLTQGYYVMNPEKAVEMVDENTICVAAILGSTLNGEFEDVKMLNDLLTAKNAETGWNTPIHVDAASGGFIAPFIYPELEWDFRLPLVKSINVSGHKYGLVYAGVGWVIWRNKEDLPDELIFHINYLGADQPTFTLNFSKGSNQIIAQYYQLIRLGFEGYKDIMQNCRDNATVLREGIEKTGHFDVVSKDSGVPLVAFSLKDSSRYTVFEVAESLRRFGWIVPAYTMPADAEHVAVMRVVIREDFSRGLAERLITDLTKTVADMDAHAVKKAAAEPAKKTVREIEKEVTTYWRSFVARKKSSLWEDEGNGGSGGPRCCSSSSPSQLPVRSSTARESLDHISINCTGGVGATSGCRSVHSRRSAPTRRARLLVPAQPRLCLDSPDWRQSAAGREWEQERDDGDDRRGSWLASESWWFVGDDATAAAATRVRREKRRACAGAGGAGGDGAARAPPSSSSASTRAAASTPGGGMRGSRMHYLRYYDAAFDAVDAAGLLETRPARAKVEEMFAREIRNAVAFEGAERFERHESFAGRRRRMEDGGGLQWGSKAEEKCLLPSSSLARRPRRQPSPPVSLRPDGSLPPAVAAAPLVLPLPRASAAEPPRCAPMPPTAAPLVLPPPLPTEKERI

SEQ ID NO: 22864 - protein, 113 aa, Streptococcus mitis
TYVFTHDSIAVGEDGPTHEPVEHLAGLRAMPNLNVFRPADARETQAAWYLAVTSKKTPTALVLTRQNLTVEDGTDFDKVAKGAYVVYENAADFDTILIATGSEVNLAVSAAKE

SEQ ID NO: 22865 - protein, 193 aa, Brassica napus
  misc_feature (161)..(161): Xaa can be any naturally occurring amino acid
  misc_feature (170)..(170): Xaa can be any naturally occurring amino acid
  misc_feature (185)..(185): Xaa can be any naturally occurring amino acid
  unsure (1)..(193): unsure at all Xaa locations
MVQNLISDESFSSTTMVMQEHCESLCDRASDELIISSTDAFCLKTRKPYTITKQREKWTEAEHEKFVEALKLYGRAWRRIEEHVGTKTAVQIRSHAQKFFTKVARDCGVTSEKSIEIPPPRPKRKPMHPYPRKLVIPDAKEMAYAGKLVPDEDSRSPTSVXSAHGSDGLXSIGSNSPNSSSADYXVHELSSHT

SEQ ID NO: 22866 - protein, 149 aa, Staphylococcus aureus subsp. aureus MRSA252
MERTFLMIKPDAVQRNLIGEVISRIERKGLKLVGGKLMQVPMELAETHYGEHQGKPFYNDLISFITSAPVFAMVVEGEDAVNVSRHIIGSTNPSEASPGSIRGDLGLTVGRNIIHGSDSLESAEREINLWFNENEITSYASPRDAWLYE

SEQ ID NO: 22867 - protein, 90 aa, Zea mays
QTVPDCHNLYKNSFTYHSLQRDRPLDFDEANQYLEKCERDKSRVLVHCMTGKNRSAAIVAAFLMKSRGWRLAQSFQWVKDRRPQVQLTDG

SEQ ID NO: 22868 - protein, 364 aa, Nicotiana tabacum
MGSTSESQSNSLTHTEDEAFLFAMQLCSASVLPMVLKSAVELDLLELMAKAGPGAAISPSELAAQLSTQNPEAPVMLDRMLRLLASYSVLNCTLRTLPDSSVERLYSLAPVCKYLTKNADGVSVAPLLLMNQDKVLMESWYHLKDAVLDGGIPFNKAYGMTAFEYHGTDPRFNKVFNRGMSDHSTMSMKKILEDYKGFEGLNSIVDVGGGTGATVNMIVSKYPSIKGINFDLPHVIGDAPTYPGVEHVGGDMFASVPKADAIFMKWICHDWSDEHCLKFLKNCYEALPANGKVIIAECILPEAPDTSLATKNTVHVDIVMLAHNPGGKERTEKEFEALAKGAGFTGFARLVALTTLGSWNSTSN

SEQ ID NO: 22869 - protein, 343 aa, Chrysosplenium americanum
MLFAMQLASASVLPMVLKSAIELDLLEIIRGQDTCMSPTEIASHLPTTNPDAPAMVDRILRLLSCYSVVTCSVRSVDDQRVYGLAPVCKYLTKNQDGVSIAALCLMNQDKVLMESWYHLKDAVLDGGIPFNKAYGMSSFEYHGTDPRFNKVFNRGMSDHSTITMKKVFQAYQGFQGLTSLVDVGGGTGATLTMILSKYPTIRCINFDLPHVIEDAPEYPGIEHVGGDMFVSVPKGDAIFMKWICHDWSDEHCLKLLKNCYDALPNNGKVILAECILPEVPDSSLATKGVVHIDVITVAHNPGGKERTEKEFEALAKAAGFQGFQVFCNAFNTYIIEFSKQICN

SEQ ID NO: 22870 - protein, 547 aa, Silicibacter sp. TM1040
MARFIFITGGVVSSLGKGLASAALGALLQARGYSVRLRKLDPYLNVDPGTMSPFEHGEVFVTDDGAETDLDLGHYERFTGVPARKTDSISSGRIYTNVLEKERRGDYLGKTIQVIPHVTNEIKDFISIGEDEVDFMLCEIGGTVGDIEGLPFFEAIRQFSQDKPRGQCIFMHLTLLPYIKASGELKTKPTQHSVKELRSIGLAPDILVCRSEGPIPVKEREKLALFCNVRADSVIAAQDLKSIYEAPLAYHREGLDQAVLDAFGIAPAPRPTLDTWEDVADRIYNPEGEVKVAIVGKYTQLEDAYKSIAEALTHGGMANRVKVRIEWVDAELFDKEDATPYLQGFHAILVPGGFGERGTEGKIKAAQYAREHKVPYLGICLGMQMAVIEAARNVAGIEEAGSEEFDHEAGKKRFEPVVYHLKEWVQGNHKVSRSADDDKGGTMRLGAYDAALTEGSKVAEVYGSNAIEERHRHRYEVDIKYREQLEACGLKFTGMSPDGRLPEIVEWTDHPWFIGVQFHPELKSKPFDPHPLFKDFVRAAKDTSRLV

SEQ ID NO: 22871 - protein, 93 aa, Oceanobacillus iheyensis HTE831
MIKPLGDRVVIELVEQEETTASGIVLPDSAKEKPQEGKVVAVGSGRVENGEKIALEVSEGDRIIFSKFAGTEVKYEGTEYLILRENDILAIIG

SEQ ID NO: 22872 - protein, 545 aa, Oceanobacillus iheyensis HTE831
MAKDLKFSEDARRAMLRGVDTLADAVKVTLGPKGRNVVLDKKFGSPLITNDGVTIAKEIELEDAFENMGAQLVSEVASKTNDVAGDGTTTATVLAQAMIREGLKNVTSGANPVGIRRGIEKAVELAVQELKGISQPIESKEAISQIAAVSSGDEEVGQLIAEAMERVGNDGVITIEESKGFNTELEVVEGMQFDRGYASPYMVTDQDKMEAVLEDPYILITDKKIGNIQEVLPVLEQVVQQGKPLLMIAEDVEGEALATLVVNKLRGTFNAVAVKAPGFGDRRKAMLEDIAVLTGAEVITEDLGLDLKSASIDQLGRASKVVVTKENTTVVEGSGDPEAISSRVAQIRAQAEESTSDFDKEKLQERLAKLAGGVAVIKVGAATETELKERKLRIEDALNSTRAGVEEGMVPGGGTALVNIHRQVSELTLEGDEATGASIVLRALEEPVRQIVHNAGLEGSIIVERLKGEKVGIGYNAATDEWVNMVEAGIVDPTKVTRSALQNAASVAAMFLTTEAVVADKPEENGGAGGGMPDMGGMGGMGGMM

SEQ ID NO: 22873 - protein, 562 aa, Zea mays
MAGRDSLPEGSLFLGLDSSTQSLKATVLNNELTIVASEIVNFDSELPHYKTEGGVYRDPADDRHIFSPTIMWVEALDVLIEKLKPKINFCKVVAVSGSGQQHGSVYWKKGSHAVLSSLDASKSLLSQLKDAFSTMNSPLWMDSSTTKQCREIENAVGGALELAKLTGSRAYERFTGPQIRKIYQTAPDVYEDTERISLVSSFMASILVGSYASIDETDGAGMNLMDIKQRTWSKSALEATAPGLEAKLGNLAPAYSAAGRIAPYFVERFQFDKNCLVIQWSGDNPNSLAGLTLNTPGDLAISLGTSDTVFGITTEAKPSLEGHVFPNPVEPNGYMVMLCYKNGSLTREDVRNRCADKSWDVFNSYLEKTPPLNGGKLGFYYKDHEILPPLPVGFHRYTVENLNDVSSDALLEREVEEFDPPSEVRAIIEGQMLSMRGHAERFGMPNPPKRIIATGGASSNESILKSVAQIFGCPVFTVQRPDSASLGAALRAAHGWLCNAQGSFVPISCLYQGNLEKTSLGSKLAVPAGDKEQDRELLQKYTILMRKRMEIERRLVEKIGRS

SEQ ID NO: 22874 - protein, 300 aa, Silicibacter sp. TM1040
MATDPAIQQQQFDRIATGKGFIAALDQSGGSTPKALALYGVMEDAYSNDDEMFAEIQKMRARIITAPDFNSDKILGAILFEKTMDNAIDGTAVPVYLWEKCGVVPFLKVDKGLADEANGVQLMKPMPELDALLSRAVAAGIFGTKMRSVIKEANADGIKAVVAQQFEVGLQIARAGLVPIIEPEVDINSATKDEAEALLKGEIAAQLDALPEGTQVALKLTIPSEAGLYDSLADHPAVVRVVALSGGYSTDDACARLSQNSKMIASFSRALTEGLNVAMSDDEYNAALGSNIDKIYNASL

SEQ ID NO: 22875 - protein, 126 aa, Methanosarcina acetivorans C2A
MYNKKVMDHFMNPRNVGEIEDADGIGEAGNPHGDQMKIFLKIRDNRIEDVKFKTFGCAAAIASSSMATELIKGKTLEEAWELTNEDVAEALEGLPPGKLECSVVSREATHMAINDYRKKQGLEPLK

SEQ ID NO: 22876 - protein, 155 aa, Pisum sativum
IIPRVFGTGRRTNAFDPFSLDLWDPFQNFQLARSATGTTNETAAFANAHIDWKETPEAHVFKADLPGVKKEEVKVEIEEDRVLKISGERKTEKEDKNDTWHRVERSQGSFLRRFRLPENAKVDQVKAAMENGVLTVTVPKEEVKKPEAKPIQITG

SEQ ID NO: 22877 - protein, 189 aa, Lycopersicon esculentum
MESALKDLSTPTGGVEDVYGEDCATEDQVITPWTIAVSGYNLLRDPRYNKGLAFTERERDADYLRGLLPPVISSQELQEKKLMQSIRQYDVPLHKYVAMMELQERNERLFYKLLIDNVEELLPIVYTPTVGEACQKYGSLFKRPQGLYISLNEKGRILEVLKNWPEKSIQVIVVTDGERILGLGDLGCQ

SEQ ID NO: 22878 - protein, 158 aa, Geobacillus kaustophilus HTA426
MSVYEFSVKTIRGEEQPLSAYRGKVLLIVNTASRCGFTPQYKELQELYDEYRDRGFVVLGFPCNQFGGQEPGTEAEIEQFCQLNYGVTFPLFAKVDVNGDHAHPLFQYLKEEAPGALGTKAIKWNFTKFLVDRHGRVVARFAPQTKPSELKEDIEKLL

SEQ ID NO: 22879 - protein, 227 aa, Capsella rubella
RGKIEIKRIENTTNRQVTFCKRRNGLLKKAYELSVLCDAEVALIVFSSRGRLYEYSNNSVKGTIERYKKAISDNSNTGSVAEINAQYYQQESAKLRQQIISIQNSNRQLMGETIGSMSPKELRNLEGRLERSITRIRSKKNELLFSEIDYMQKREVDLHNDNQILRAKIAENERNNPSISLMPGGSNYEQLMPPPQTQPQPFDSRNYFQVAALQPNNHHYSSAGGRQ

SEQ ID NO: 22880 - protein, 226 aa, Capsella bursa-pastoris
RGKIEIKRIENTTNRQVTFCKRRNGLLKKAYELSVLCDAEVALIVFSSRGRLYEYSNNSVKGTIERYKKAISDNSNTGSVAEINAQYYQQESAKLRQQIISIQNSNRQLMGETIGSMSPKELRNLEGRLERSITRIRSKKNELLFSEIDYMQKREVDLHNDNQILRAKIAENEKNNPSISLMPGGSNYEQIMPPPQTQPQPFDSRNYFQVAALQPNNHHYSSAGRQ

SEQ ID NO: 22881 - protein, 227 aa, Oryza sativa (japonica cultivar-group)
MSLHTVVHHKFTTGVCEAGEEEGVGDRRPATDHVAAGEGAVCGRPGAERRPLVAFSLKDRSLHDEFEIDMLRRFGWIVPAYTMPPDAMVLRFVIREEFSRTLAERLVLDIEKVMCQLDALPSRLMPPVPPAPPSVSMGAHRAPPRRRAPHGPPLHSMDLALRVDLLSAGGRHASPSPPPLAGAIEAPPSSSPASHCWPQQTHSRREQRERNEMGDKRGKERRLMWQC

SEQ ID NO: 22882 - protein, 226 aa, Capsella bursa-pastoris
RGKTEIKRIENTTNRQVTFCKRRNGLLKKAYELSVLCDAEVALIVFSSRGRLYEYSNNSVKGTIERYKKAISDNSNTGSVAEINAQYYQQESAKLRQQIISIQNSNRQLMGETIGSMSPKELRNLEGRLERSITRIRSKKNELLFSEIDYMQKREVDLHNDNQILRAKIAENERNNPSISLMPGGSNYEQIMPPPQTQPQQFDSRNYFQVAALQPNNHHYSSAGRQ

SEQ ID NO: 22883 - protein, 113 aa, Streptococcus mitis
TYVFTHDSIAVGEDGPTHEPVEHLAGLRAMPNLNVFRPADARETQAAWYLAVTSEKTPTALVLTRQNLTVEEGTDFGKVAKGAYVVYENAADFDTILIATGSEVNLAVSAAKE

SEQ ID NO: 22884 - protein, 340 aa, Streptococcus pneumoniae TIGR4
MTVQMEYEKDVKVAALDGKKIAVIGYGSQGHAHAQNLRDSGRDVIIGVRPGKSFDKAKEDGFDTYTVAEATKLADVIMILAPDEIQQELYEAEIAPNLEAGNAVGFAHGFNIHFEFIKVPADVDVFMCAPKGPGHLVRRTYEEGFGVPALYAVYQDATGNAKNIAMDWCKGVGAARVGLLETTYKEETEEDLFGEQAVLCGGLTALIEAGFEVLTEAGYAPELAYFEVLHEMKLIVDLIYEGGFKKMRQSISNTAEYGDYVSGPRVITEQVKENMKAVLADIQNGKFANDFVNDYKAGRPKLTAYREQAANLEIEKVGAELRKAMPFVGKNDDDAFKIYN

SEQ ID NO: 22885 - protein, 790 aa, Triticum aestivum
MTMMAMPEAPCLCARPSLAARARRPGSGPAPRLRRWRPNATAGKGVGEVCAAVVEAATKVEDEGEEDEPVAEDRYALGGACRVLAGMPAPLGATALAGGVNFAVYSGGATAAALCLFTPEDLKADRVTEEVPLDPLMNRTGNVWHVFIEGELHNMLYGYRFDGTFAPHCGHYLDVSNVVVDPYAKAVISRGEYGVPARGNNCWPQMAGMIPLPYSTFDWEGDLPLRYPQKDLVIYEMHLRGFTKHDSSNVEHPGTFIGAVSKLDYLKELGVNCIELMPCHEFNELEYSTSSSKMNFWGYSTINFFSPMTRYTSGGIKNCGRDAINEFKTFVREAHKRGIEVILDVVFNHTAEGNENGPILSFRGVDNTTYYMLAPKGEFYNYSGCGNTFNCNHPVVRQFIVDCLRYWVTEMHVDGFRFDLASIMTRGSSLWDPVNVYGAPIEGDMITTGTPLVTPPLIDMISNDPILGGVKLIAEAWDAGGLYQVGQFPHWNVWSEWNGKYRDIVRQFIKGTDGFAGGFAECLCGSPHLYQAGGRKPWHSINFVCAHDGFTLADLVTYNKKYNLPNGENNRDGENHNLSWNCGEEGEFARLSVKRLRKRQMRNFFVCLMVSQGVPMFYMGDEYGHTKGGNNNIYCHDSYVNYFRWDKKEQYSELHRFCCLMTKFRKECEGLGLEDFPTAKRLQWHGHQPGKPDWSENSRFVAFSMKDERQGEIYVAFNTSHLPAVVELPERAGRRWEPVVDTGKPAPYDFLTDDLPDRALTIHQFSHFLYSNLYPMLSYSSVILVLRPDV

SEQ ID NO: 22886 - protein, 494 aa, Arabidopsis thaliana
MVSETTKSSPLHFVLFPFMAQGHMIPMVDIARLLAQRGVIITIVTTPHNAARFKNVLNRAIESGLPINLVQVKFPYLEAGLQEGQENIDSLDTMERMIPFFKAVNFLEEPVQKLIEEMNPRPSCLISDFCLPYTSKIAKKFNIPKILFHGMGCFCLLCMHVLRKNREILDNLKSDKELFTVPDFPDRVEFTRTQVPVETYVPGDWKDILDGMVEADETSYGVIVNSFQELEPAYAKDFKEARSGKAWTIGPVSLCNKVGVDKAERGNKSDIDQDECLEWLDSKEPGSVLYVCLGSICNLPLSQLLELGLGLEESQRPFIWVIRGWEKYKELVEWFSESGFEDRIQDRGLLIKGWSPQMLILSHPSVGGFLTHCGWNSTLEGITAGLPLLTWPLFADQFCNEKLVVEVLKAGVRSGVEQPMKWGEEEKIGVLVDKEGVKKAVEELMGESDDAKERRRRAKELGDSAHKAVEEGGSSHSNISFLLQDIMELAEPNN

SEQ ID NO: 22887 - protein, 142 aa, Glycine max
  misc_feature (26)..(27): Xaa can be any naturally occurring amino acid
  misc_feature (29)..(29): Xaa can be any naturally occurring amino acid
  misc_feature (34)..(34): Xaa can be any naturally occurring amino acid
  misc_feature (49)..(50): Xaa can be any naturally occurring amino acid
  misc_feature (53)..(53): Xaa can be any naturally occurring amino acid
  misc_feature (60)..(60): Xaa can be any naturally occurring amino acid
  misc_feature (73)..(73): Xaa can be any naturally occurring amino acid
  misc_feature (75)..(76): Xaa can be any naturally occurring amino acid
  misc_feature (78)..(78): Xaa can be any naturally occurring amino acid
  misc_feature (80)..(80): Xaa can be any naturally occurring amino acid
  misc_feature (85)..(85): Xaa can be any naturally occurring amino acid
  misc_feature (89)..(89): Xaa can be any naturally occurring amino acid
  misc_feature (91)..(92): Xaa can be any naturally occurring amino acid
  misc_feature (94)..(94): Xaa can be any naturally occurring amino acid
  misc_feature (96)..(96): Xaa can be any naturally occurring amino acid
  misc_feature (98)..(99): Xaa can be any naturally occurring amino acid
  misc_feature (101)..(102): Xaa can be any naturally occurring amino acid
  misc_feature (109)..(109): Xaa can be any naturally occurring amino acid
  misc_feature (111)..(111): Xaa can be any naturally occurring amino acid
  unsure (1)..(142): unsure at all Xaa locations
LRLLGTAPSSQLPPPPNAPVDVDNSXXFXAINVXPIEYGHVLLIPRIIXXLPXRIDRESXLLALQMAVESDNXYXXLXYXSLGAXATIXHXXFXDXYXXLXXLCTRRPXLXRRSWYRNKISLFRLLFDVYGCCMFEVEDLFD

SEQ ID NO: 22888 - protein, 68 aa, Petunia sp.
HASPGYYDGRYWTMWKLPMFGCTDATQVLGELQEAKKAYPNAGSGIIGFDNVRQVQCISFIAYKPPGF

SEQ ID NO: 22889 - protein, 364 aa, Nicotiana tabacum
MGSTSQSQSKSLTHTEDEAFLFAMQLASASVLPMVLKSALELDLLELMAKAGPGAAISPSELAAQLSTQNPEAPVILDRMLRLLATYSVLNCTLRTLSDGSVERLYSLAPVCKFLTKNADGVSVAPLLLMNQDKVLMESWYHLKDAVLDGGIPFNKAYGMTAFEYHGTDPRFNKVFNRGMSDHSTMSMKKILEDYKGFEGLNSIVDVGGGTGATVNMIVSKHPSIKGINFDLPHVIGDAPAYPGVEHVGGDMFASVPKADAIFMKWICHDWSDEHCLKFLKNCYEALPANGKVIIAECILPEAPDTSLATKNTVHVDIVMLAHNPGGKERTEKEFEALAKGAGFTGFARLVALTTLGSWNSTNN

SEQ ID NO: 22890 - protein, 106 aa, Petunia sp.
YETLSYLPDLTGEQLLKEVEYLLDKGWVPCLEFELKHKFIYREYHASPGYYDGRYWTMWKLPMFGCTDATQVLGELQEAKKAYPNAGSGIIGFDNVRQVQCISFIA

SEQ ID NO: 22891 - protein, 113 aa, Streptococcus mitis
TYVFTHDSIAVGEDGPTHEPVEHLAGLRAMPNLNVFRPADARETQAAWYLAVTSKKTPTALVLTRQNLTVEEGTDFDKVAKGAYVVYENAADFDTILIATGSEVNLAVSAAKE

SEQ ID NO: 22892 - protein, 827 aa, Geobacter metallireducens GS-15
MVLQKQASSIKARLLRINLLLLGVTSLVIVLVVNVAQKRLALNDAGRDAERILVRYLAIHAYINKELKPRLLDFTASLRDKDYFDPVWMSSTYAVREIDKIFQSRHGKGYYYKECAINARSPRNEADPFEREFLERASHNPAVTTFNGVREIDGKLFFVAMARGEAMEKSCLLCHSNPETAPGGLVRTYGPNRSFSRHENELVSAISIRIPLSEAYAEANSFSLRLSALLLAVIASFFAIKNWFFGRVVLSPLASVTESARRIAHDRRYLGEQIPLGRDREMNELAASFNVMSTELHAFINNLEEKVEEKTAELVQAREEAEEANRVKGEFLATMSHEIRTPMNAIIGINQLLQETHLSQQQRRLVDDSSNAAESLLTIINDILDFSRVEARRLELSDEALELRSFVESLRRLFAVKAERENISLSILVGDEAPQFICGDPARLRQVLTNLLSNAIKFTPTGGRVTLAADADPAGGNLLFTVSDTGIGIEKDKHERIFEMFRQADSSTTRNYGGTGLGLAITRGLVELMGGTIEVESEAGKGAVFRVLLPLRPATGPPADKTAGEELSDSVLPSLSVLVVEDNELNRTVAIGLLTALKQRVAAVANGREAVDALRDGTYDLVLMDISMPEMDGIEATRAIRRGDAGEKARAIPIVALTAHALKDDRDRFLAAGMSDYLSKPLIRGELQRMLLRIAGERGELPPEERCPMRDAPDEGSPFDLEFQQSQFHDAGIGDCLAEVLSIFAQSTATECERMEEYLATGKYAELAAAAHSVKGAAATIGAPHVSRYAADVETAARKSDGVAVARTIPLLRREVRRVEAAVGEMS

SEQ ID NO: 22893 - protein, 420 aa, Thermoplasma volcanium GSS1
MSSKELFELAAKLFPMGVNSPVRYFKDYPFYVKEGKGSTILDVDGNKYIDYCLGYGPLILGHSDPDVTRAVIEQAEKGLLFGEPSENEIKLAEMIKETSKNIEMMRFTNSGTEATMHAIRLARAITGRKLIVKMEGGFHGAHDYSLIKSGSGTLTFGSPSSPGIPDEVAQTVIVGKYNDENNIKEIFQKYGDKIAAVITEPIMGNAGVILPKQGFLEFLRDITQKHGSLLIFDEVITGYRFAFSPFQDIMRIDPDITTMGKIIGGGLPIGLFGGSEEIMKNISPSGNVYEAGTFSGNPMSMAAGYAAMEKLSKQDYSILKKRTQKLVSGIDDILDRKHITHTIKYYGTMFQVFFADHVNNYDDALKARKEVYFKLFKALSKNGVYLPPSQYETNFVSFAHSDSDIDATLAAFEKAVAEMD

SEQ ID NO: 22894 - protein, 456 aa, Vitis labrusca x Vitis vinifera
MSQTTTNPHVAVLAFPFSTHAAPLLAVVRRLAAAAPHAVFSFFSTSESNASISHDSMHTMQCNIKSYDVSDGVPEGYVFAGRPQEDIELFMRAAPESFRQGMVMAVAETGRPVSCLVADAFIWFAADMAAEMGVAWLPFWTAGPNSLSTHVYTDEIREKIGVSGIQGREDELLNFIPGMYEVRFRDLQEGIVFGNLNSLFSRMLHRMGQVLPKATAVFINSFEELDDSLTNDLKSKLKTYLNIGPFNLITPPPVVPNTTGCLQWLKERKPTSVVYISFGTVTTPPPAELVALAEALEASRVPFIWSLRDKARVHLPEGFLEKTRGYGMVVPWAPQAEVLAHEAVGAFVTHCGWNSLWESVAGGVPLICRPFFGDQRLNGRMVEDVLEIGVRIEGGVFTKSGLMSCFDQILSQEKGKKLRENLRALRETADRAVGPKGSSTENFKTLVDLVSKPKDV

SEQ ID NO: 22895 - protein, 456 aa, Vitis labrusca x Vitis vinifera
MSHTATNPHVAVLAFPFSTHAAPLLAVVRRLAAAAPHAVFSFFSTSQSNASIFHDSMHTMQCNIKSYDVSDGVPEGYVFAGRPQEDIELFMRAAPESFRQGMVMAVAETGRPVSCLVADAFIWFAADMAAEMGVAWLPFWTAGPNSLSTHVYIDEIREKIGVSGIQGREDELLNFIPGMSKVRFRDLQEGIVFGNLNSLFSRMPHRMGQVLPKATAVFINSFEELDDSLTNDLKSKLKTYLNIGPFNLITPPPVVPNTTGCLQWLKERKPTSVVYISFGTVTTPPPAEVVALAEALEASRVPFIWSLRDKARVHLPEGFLEKTRGHGMVVPWAPQAEVLAHEAVGAFVTHCGWNSLWESVAGGVPLICRPFFGDQRLNGRMVEDVLEIGVRIEGGVFTKSGLMSCFDQILSQEKGKKLRENLRALRETADRAAGPKGSSTENFKTLVDFVSKPKDV

SEQ ID NO: 22896 - protein, 284 aa, Zea mays
  misc_feature (256)..(256): Xaa can be any naturally occurring amino acid
  unsure (1)..(284): unsure at all Xaa locations
MQQLYVDFFSPAFIRYLFAWYCFFCRCSPCCLVLLLQMQIFVKTLTGKTITLEVESSDTIDNVKAKIQDKEGIPPDQQRLIFAGKQLEDGRTLADYNIQKESTLHLVLRLRGGMQIFVKTLTGKTITLEVESSDTIDNVKAKIQDKEGIPPDQQRLIFAGKQLEDGRTLADYNIQKESTLHLVLRLRGGMQIFVKTLTGKTITLEVESSDTIDNVKAKIQDKEGIPPDQQRLIFAGKQLEDGRTLADYNIQKESTXHLVLRLRGGMQIFVKTLTGKTITLESLL

SEQ ID NO: 22897 - protein, 136 aa, Cyanophora paradoxa
MADEAIQEGEAAPSGTMDVMTALKEVLKKAMVVDGLKRGLHECAKALDQRSAQLCVLAANVNEPAYTRLVEALCAEHGINLIKVPENKQLGEWVGLCKIDKEGKARKVVGCSCAVITKFGEESEARQVLMEYLKKR

SEQ ID NO: 22898 - protein, 376 aa, Oryza sativa
MDVAEAASPGVGAWAAIRGYFTPATLFLVVNIVIGTIALTSRTHQRRRRQVYQYHHDGEILHHDQLQPPPPLLHQQYYGGGEHQQMMMQETLYAPPPAPAPLARTSSVLDRLRSFGLYRFRSGDFPPEYATAAAAATSQLHHQRTEEVVSSSPVDEVKLQGHYARSRSEPAAAPAQEERKAASRLRNSSSEVRRAEVVRAPARVVEAFPEEAAAAVDATAEDDFTPKQQRDLPLQQEYVPPPAPAPAPLARTSSVLDRLRSFTLYSFRSGDLATDDIPADAAAAATPAQAHYGRTRSEPAREQDKKAKKQAASEAKTMTKSSSEARKDTAAEDADDGGVDARADDFINKFRQQLQLQRLNSLLNYKEMLNRGSSKQ

SEQ ID NO: 22899 - protein, 499 aa, ASPERGILLUS NIDULANS FGSC A4
MTTRTTVPNASQRALSTAAVRCLTLDNINSNVKAAKYAVRGELAVKAEEYRVRLAQGDKTLPFDSVIFANIGNPQQLDQKPITFFRQVLSLMENPLLLSNKDALRTSFGYQDDVIERAEKLLAEVQSVGAYSHSQGAPLIRESVAKFIEERDGFPADPQSLYLTGGASSGVNTILNVICNGPNAGVLVPIPQYPLYTATLSLLNAQCVPYHLEEQKAWGTDIGTIKKSLEQAKAAGTDVRAIVVINPGNPTGASLSPADIKSVLDIAAEEKLVVIADEVYQTNVFIGEFTSFKKRLRELQQEVPGKYDNVELVSLHSTSKGMVGECGHRGGYFELVGFDPLVAAQVYKFISIMLCPPVIGQCLVELMVNPPKEGEPSHELYQKEYNGIREGLRQRAFALYEAFQRMEGVECQEPQGAMYLFPTISLPPKAIEAAAAENRAADEFYCLRLLDATGVCVVPGSGFGQKENTLHFRTTFLAPGTDWVERIVKFHSEFMAKYK

SEQ ID NO: 22900 - protein, 378 aa, Arabidopsis thaliana
MAVLFYRTCFKCNMESRCKKGYFRLAVIGLSKAKDCWEKNACAVTFIGDGGTSEGDFHAGLNFAAVMEAPVVFICRNNGWAISTHISEQFRSDGIVVKGQAYGIRSIRVDGNDALAVYSAVCSAREMAVTEQRPVLIEMMIYRVGHHSTSDDSTKYRAADEIQYWKMSRNSVNRFRKSVEDNGWWSEEDESKLRSNARKQLLQAIQAAEKWEKQPLTELFNDVYDVKPKNLEEEELGLKELIEKQPQDYMMLKELIPNWILGIGTLALRYDFQETLFNGWHAIAELQQLKLKIKLNSLLNDQADTESLKAARNSALNVIQAMIIHLVLTLKGRFSLPLTEETVRFNEPIQLNQNMVKDGGYTAELFPIRKEEQGEVRR

SEQ ID NO: 22901 - protein, 220 aa, Rubrobacter xylanophilus DSM 9941
MDAGLLRRVEDYIEALFAPPDPALEAALEESRRAGLPEIQISPNQGRILQLLAALAGARRALEIGTLGGYSAIHLARALPEDGSLVSLEIEERHAEVARRNIERAGLGGRVEVRVGEARGLLSEMIRRGEGPFDAVFIDADKRGYPDYLELSLRLSRPGTLILADNLIRGGDVLEPRDEAACAVSRFNEMLARDRRLDATIVPLLRERLDGFAVARVTGL

SEQ ID NO: 22902 - protein, 404 aa, Silicibacter sp. TM1040
MRDSVKLSSGRSYLAIPGPSVMPDQVLQAMHRASPNIYAGELVEMTGTLPADLRRVARTQHHVAIYIANGHGAWEAALSNTLQEGDKVLVPASGRFAYGWSEMAEALGINVEVMDFGLQAPFDLARVAERLAADKAYEIKAVLGVHTDTSTSIRNDINGLRAAMDEVGHPALLMADCIASLGCDRFEMDAWGVDVMVTGCQKGLMVPAGMSFVFFNDKAAEARARLPRISRYWDWVPRANPEYFYQFFGGTAPTHHLYGLRAALDLIHAEGIEQIWTRHETLARAIWAACDRWSEGGALAMNVADPALRSHAVTALRLPSPRATDLRVWLEENLGLTLGIGLGMAPPDSAEWHGFFRLGHMGHVNGHMIMGLLGGIETGLRALDIPHGAGALESAAKVLAGAPS

SEQ ID NO: 22903 - protein, 418 aa, Triticum aestivum
  misc_feature (355)..(355): Xaa can be any naturally occurring amino acid
  unsure (1)..(418): unsure at all Xaa locations
MIGGGGGGALRRVGKYEVGRTIGEGTFAKVKFAQNTETGESVAMKVLDRSSILKHKMVDQIKREISIMKLVRHPNVVRLHEVLASRKKIFIILEFITGGELFDKIIRHGRLSEADARKYFQQLIDGVDFCHSKGVYHRDLKPENLLLDSQGNLKISDFGLSAWPAQGAALLRTTCGTPNYVAPEVLSHKGYDGALADTWSCGVILYVLLAGYLPFDEVDLTTLYGKIETAEYSFPAVFPSGAKSLIRRILDPSPDTRIRIEEIRKDEWFKKDYEPVREVENEEVNLDDVNAAFDDPEEDNQHTFDDEAGPLTLNAFDLIILSQGLNLSALFDRRQDYGQLHNRFLSRKTSKCYIXSSMEVVAQSMGVKTHIRHYKMRVGGSKCEQDLAISQLCLKFLKLPHPPLWWELERSAGRFFRV

SEQ ID NO: 22904 - protein, 130 aa, Magnetococcus sp. MC-1
MAYNEKVLDHYEKPRNVGSMDKDADDVGTGMVGAPSCGDVMKLQIKVDDNGVIEDAKFKTFGCGSAIASSSLVTEWIKGKTIDEALTIKNKDVAEELALPPVKVHCSVLAEDAIKAAVKDYREKQQKKGA

SEQ ID NO: 22905 - protein, 176 aa, Dendrobium grex Madame Thong-IN
LPSLNAGGARLMKSTGTIGNRVASINVENAETNRRALRELLFCAPGALQYLSGVILFEETLYQKTAGGKPFVEVLNEGGVLPGIKVDKGTVELAGTNGETTTQGLDDLGKRCAKYYEAGARFAKWRAVLKIKSHSAFPAFYQSECLWTSSHAIICQENGLEAKHGHQKKRISLSII

SEQ ID NO: 22906 - protein, 226 aa, Capsella bursa-pastoris
RGKIEIKRIENTTNRQVTFCKRRNGLLKKAYELSVLCDAEVALIVFSSRGRLYEYSNNSVKGTIERYKKAISDNSNTGSVAEINAQYYQQESAKLRQQIISIQNSNRQLMGETIGSMSPKELRNLEGRLERSITRIRSKKNELLFSEIDYMQKREVDLHNDNQILRAKIAENERNNPSISLMPGGSNYEQIMPPPQTQPQQFDSRNYFQVAALQPNNHHYSSAGRQ

SEQ ID NO: 22907 - protein, 631 aa, Pseudomonas fluorescens Pf-5
MLHPMCTRSGFRPTDRTLRAADKPIRQRDRLFYPVFSTSRAALKPSVEERRIGPGLVSTRALGRLYRPARSQYPSALRAIARVDGWGNSEWKTVYNPMDSCLGCCIQCAHNKNREPHTMNTPQVSQQRPEDENLGVGANMAYGLQHVLTMYGGIVAVPLIVGQAAGLSPSEIGLLIAASLFAGGLATLLQTLGVPFFGCKLPLVQGVSFAGVSTMVAIVTSGGEGGFQSILGAVIVASLIGLLITPVFSRITKFFPPLVTGIVITTIGLTLMPVAARWAMGGNSRAPDFGSMSNIGLAAVTLVLVLLLSKIGSAAISRLSILLAMIIGTVIALFLGMADFSGVTQGPMFGLPTPFHFGMPTFHVAAILSMCIVVMVTLVETSADILAVGEIIHTKVDSKRLGNGLRADMLSSMIAPIFGSFTQSAFAQNVGLVAVTGIKSRFVVATGGLFLVILGLLPFMGRVIAAVPTSVLGGAGIVLFGTVAASGIRTLSRVDYRNNMNLIIVATSIGFGMIPIAAPSFYDHFPSWFATIFHSGISSSAIMAILLNLAFNHFTAGNSDQQSVFVAGTERSLRFQDVAVLREGDYFSGGKLHDAEGNEVPLVGEEPGHSPNQAGDGSQPSHARGSVEATH

SEQ ID NO: 22908 - protein, 224 aa, Camelina sativa
RGKIEIKRIENTTNRQVTFCKRRNGLLKKAYELSVLCDAEVALIVFSSRGRLYEYSNNSVKGTIERYKKAISDNSNTGSVAEINAQYYQQESAKLRQQIISIQNSNRQLMGETLGSMSPKELRNLEGRLERSITRIRSKKNELLFSEIDYVQKRESDLHNDNQLLRAKIAENERNHPSISLMPGGSNYEQLMPPPQTQPFDSRNYFQVAALQPNNHHYSSAGRQ

SEQ ID NO: 22909 - protein, 427 aa, Burkholderia vietnamiensis G4
MSNNQILFERAQKTIPGGVNSPVRAFRSVGGTPRFVARAQGPYFWDADGKQYIDYIGSWGPMIVGHVHPEVLAAVQRVLADGFSFGAPTEAEIEIAEEICKLVPSIEQVRMVSSGTEATMSALRLARGFTGRSRIVKFEGCYHGHADSLLVKAGSGLLTFGNPTSAGVPADIAKHTTVLEYNNVAALEEAFGAFGDEIAAVIVEPVAGNMNLVRGTPEFLNALRALCTKHGAVLIFDEVMCGFRVALGGAQQHYGIAADLTCLGKVIGGGMPAAAFGGRRDIMAHLAPLGGVYQAGTLSGNPIAVAAGLKTLQLIQAPGFYDALTAQTKRLADGLAAEARAAGVPFAADSIGAMFGLYFAERVPASFAEVTKSDVERFNRFFHLMLDEGVYFAPSAYEAGFVSSTHDDAVIDATLAAARRAFAALAA

SEQ ID NO: 22910 - protein, 450 aa, Methanosarcina barkeri str. fusaro
MEKDYDIIIIGTGTAGRTLADKVAHSGLKIAIIDSGEYGGISPPRGCDTKKMFTDLAGVTDSNNRLIEKGVGTNYPLKIDWPSLIEFKGKVTKECPGRIENHFVEMGIDTYHGKAYFENQNTIVAGEDKIKGEYIFLATGSKPRKLNISGEEYVTTSEEFMKTEKLPERIIFIGGGHISLEFAHVARRAMSEVTILHRSERLLRHSDVDMVNLLIKATEAAGIKILMNKPVASIEKDANGFLVRTGSKSGTESETQSFRADMVIHGAGRVPNIEELHLEKAGIKIEKGAIVVDKYMRTSNPRIYAGGDCTSESLKLNSVAALQGEVAAANILNENSLEVDYTGVPSAVHAIPVLASVGTSASKNSDKYKVIYQDRSNWYTTRKAGMEFAASKVIIDEANNRIVGAYILGPNAEEAINIFAAVIRLGLKASDIKKLVFTYPTTCSDIRYML

SEQ ID NO: 22911 - protein, 228 aa, Lepidium squamatum
RGKIEIKRIENTTNRQVTFCKRRNGLLKKAYELSVLCDAEVALVVFSSRGRLYEYSNNSVKGTIERYKKAISDNTNTGSVAEINAQYYQQESAKLRQQIVSIQNSNRQLMGETIGSMSPKELRNLEGRLERSITRIRSKKNELLFAEIDYMQKREVDLHNDNQLLRAKIAENERNNPSISLMPGGSNYEQIMPPPQTQPQPQQFDSRNYFQVAALQPNNHHYSSAGRQ

SEQ ID NO: 22912 - protein, 445 aa, Glycine max
  misc_feature (72)..(72): Xaa can be any naturally occurring amino acid
  unsure (1)..(445): unsure at all Xaa locations
TDTIIITHIIRISSYTEGSAIDSFCVFDFDQSVGYRIEDCVALRGNSVFDSLKVSSQTISRGPVEVDSFDKXLPTSLNKNPLTSQTERQRLQLQKVQLSNLVSGDTEHQEESAMADASPRTDISTDVDTDDKNPRFDRSQSLVAVVSDSSDRSKDKSDQKTLRRLAQNREAARKSRLRKKAYVQQLESSRLKLTQLEQELQRARQQGIIISNSGDQAHSMSGNGAMAFDVEYARWLEEQNRQVNELRAAVNSHAGDTELRMIIDGIMAHYDEIFRLKADAAKADVFHLLSGMWKTPAERCFLWLGGFRSSELLKLLVNQLEPLTEQQLVGITNLQQSSQQAEDALSQGMEALQQSLSETLSTGSLGSSGSSGNVANYMGQMAMAMGKLGTLEGFIKQADNLRQQTLQQIHRILTTRQSARALLAIHDYFSRLRALSSLWLARPRD

SEQ ID NO: 22913 - protein, 398 aa, Pseudomonas fluorescens Pf-5
MSLFSAVEMAPRDPILGLNEAFNTDTRTDKVNLGVGVYCNEEGRIPLLRAVVEAETIRAAQHASRGYLPIDGIAAYDQAVQKLLFGNDSPLLAAGRVVTTQAVGGTGALKIGADFLKQLLPNAVVAISDPSWENHRALFETAGFPVQNYRYYDAATHDVNRAGLLEDLNALPAQSIVVLHACCHNPTGVDLSPQDWKDVLEVVKAKNLVPFLDMAYQGFGDGIDEDAAAVRLFAESGLTFFVSSSFSKSFSLYGERVGALSIVSSSKEESARVLSQVKRVIRTNYSNPPTHGATIVAAVLNSPELRAQWEQELAQMRLRIRGMRTQMVDLLAKGAPEHDFSFVGRQRGMFSYSGLTVEQVTRLRNEFGIYALDTGRICVAALNQNNIHVVTQAILQVI

SEQ ID NO: 22914 - protein, 230 aa, Lepidium squamatum
RGKIEIKRIENTTNRQVTFCKRRNGLLKKAYELSVLCDAEVALVVFSSRGRLYEYSNNSVKGTIERYKKAISDNTNTGSVAEINAQYYQQESAKLRQQIVSIQNSNRQLMGETIGSMSPKELRNLEGRLERSITRIRSKKNELLFAEIDYMQKREVDLHNDNQLLRAKIAENERNNPSISLMPGGSNYEQIMPPPQTQPQPQSQSFDSRNYFQVAALQPNNHHYSSADRQ

SEQ ID NO: 22915 - protein, 300 aa, Solanum tuberosum
RIGRLVARVALQRDDVELVAVNDPFISTDYMTYMFKYDSVHGQWKHHELKVKDEKTLLFGEKAVTVFGIRNPEDIPWAEAGADFVVESTGVFTDKDKAAAHLKGGAKKVAISAPSKDAPMFVVGVNENEYKPELDIVSNASCTTNCLAPLAKVINDRFGIVEGLMTTVHAMTATQKTVDRPSMKDWRGGRAASFNIIPSSTGAAKAVGKVLPSLNGKLTGMAFRVPTADVSVVDLTVRLEKEASYEDIQAAIKEESEGKLKGILGYTEDDVVSTDFVGDSRSSIFDAKAGLALSKNFVKL

SEQ ID NO: 22916 - protein, 263 aa, Mycobacterium avium subsp. paratuberculosis K-10
MILDRFRLDDKVAVITGAGRGLGAAIAVAFAEAGADVLIASRTESQLEAVAEQVRAAGRRAHVVAADLAHPESTAELAARAVEAFGKLDIVVNNVGGTMPNTLLTTSTKDLKDAFTFNVATAHALTVAAVPLMLEHSGGGNIIKITSTMGRLAGRGFAAYGTAKAALSHYTRLTALDLCPRIRVNAIAPGSILTSALDVVASNDELRAPMEKATPLRRLGDPVDIAAAAVYLASPAGEFLTGKTLEVDGGLTYPNLDIPVPDL

SEQ ID NO: 22917 - protein, 304 aa, Zea mays
MATYFTLNTGARIPSVGLGTYKAGPGVVADAITAAVKAGYRHIDCAPLYKNEKEIGVALNKLFDDGVVKREDLFITSKIWCSDLAPEDVPLAIDSTLNDLQLDYLDLYLIHWPFQIKRGSELSPENFVHLDMPKTWQAMERLYGSGKARAVGVSNFSTRKLADLLAVARVPPAVDQVECHPGWQQARLRAFCCSSGVHFSAYAPLGRMKAVASDPVVASVAESLGKTPAQVALRWGIQQGQSVLPKSANESRLKENIDLFGWSIPDELCAKFSEIEQVKQIRNDAFVHPQSIYKTIDELWDGEI

SEQ ID NO: 22918 - protein, 226 aa, Lepidium phlebopetalum
RGKIEIKRIENTTNRQVTFCKRRNGLLKKAYELSVLCDAEVALIVFSSRGRLYEYSNNSVKGTIERYKKTKSDNSNTGSVAEINAQYYQQESVKLRQHIVSIQNSNRQLMGETIGSMSAKELKNLEGRLERSIARIRSKKNELLFAEIDYMQKREVDLHNDNQLLRAKIAENERNNPSISLMPGGSNYEQIMPPPQTQTQPFDSRNYFQVAALQPNNHHYSSAGRQ

SEQ ID NO: 22919 - protein, 501 aa, Solanum chacoense
MQLISIFLFICFLFLLRKWKKYSKNSQTKKLPPGPWKLPFIGSMHHLAGGRPHRVLRDLAKKYGPLMHLQLGEVSAVVVTSPDMAKEVLKTHDIAFASRPKLLAMDIICYDRCDIAFSPYGEYWKQMRKICVTEVLSAKSVRSFSSIRCDEVVRLIDSIQSSSSSGELVNFKERVIWFTSSMTCRSAFGQLPKEQDMFIKLIREVIRLAEGFDVADIFPSYKFLHVFGRAKRKLLNVHRKVDAIVEDVINEHKKNFATRKNDDHALGGENLIDVLLKLMNDKSLQFPINNDNIKAIIIDMFAAGTETSSTTTVWAMVEMLKNPRVLAKAQAEVREAFRNKVTFDENDVEDLKYLKLVIKETMRLHAPIPLLVPRECRKETEINGYTIPVKTKVMVNVWALGRDPKYWDDVECFKPERFEQCSIDFIGNNFEYLPFGGGRRICPGTSFGLANDYLPLAQLLCHFDWKLPTGMEPKDLDLTELAGMSAASKDDLYLIATPYQP

SEQ ID NO: 22920 - protein, 500 aa, Solanum chacoense
MQLVSIFLFISFLFLLRKWKKYLNNSQTKKLPPGPWKLPFIGGMHHLAGGLPHRVLRDLAEKYGPLMHLQLGEVSAVVVTSPEMAKQVLKTHDIAFASRPKLLAMDIICYNRRDIAFSPYGDYWRQMRKICIMEVLSAKSVRSFSSIRHDEVVRLIDSIQPCFTSGELVNFTERIIWFTSSMTCRSAFGQVLKEQEVFIKLIREVISLAEGFDVADIFPSYKFLHGFGGAKQKLLNAHRKVDSIVEDVIKEHKKNLATRKSDDAIGGEDLVDALVRLMNDKSLQFPINNDNIKAVIIDLFAAGTETSSTTTVWAMAEMLKNPSVFAKAQAKVREAFRDKVTFDENDVEELKYLKLVIKETMRLHAPVPLLVPRECREETEINGYTIPVKTKVMVNVWALGRDPKYWDDAESFKPERFEQCSIDFIGNNFEYLPFGGGRRICPGISFGLANVYLPLAQLLYHFDWKLPTGMEPKDLDLTESAGITAARKGDLYLIATPHQP

SEQ ID NO: 22921 - protein, 507 aa, Oryza sativa
MAGSMVDRATSDMLIGPDWAKNMEICDICNRDPGQSKDVVKALKKRIGHKNPKVQILALTLLETAIKNCGDIFHMHVAERDVLHEMVKIVKKKSDQNVKEKVLTMIDTWQEAFGGPRARYPQYYAAYHDLVRAGAAFPKRSDRPAPLFNGQSPAGRNMRSPDQQDEAESSAGNDFPALSMSEIQNARGIMDVLAEMLNALDPGNREGLRQEVIVELVDQCRTYKQRVVLLVNATADEELMSQGLALNDDLQRVLAKHDAIAAGIAVRVEKKPKSLQALVDTEDSMNQDSKKEQALVDIEDPTTQETNKEPSQSASVQSPFEQLALPAPPVSNGSATPAPKSDLGVDLLSWDDNPSTTENSLALVPVTDPVVDSTPSQNALAIVDIFSQNNTTNNIAKPADPFGVNSSSTLPGSQPYNAPTQHPLQAQQQPQQVGLYPNGGAVNPGTSYPTSSGWNGQIANNATPPAQQTVNYGIAIYLYIYISQPFSYTIIPIIGCQNHACPCLCSV

SEQ ID NO: 22922 - protein, 716 aa, Methanosarcina mazei Go1
MFGINISKKIFIITLLIFAVLITSFALTYNMQLSNFLTLEEADTLNDVERLQNAIYTQQGYLDNMVQDWACWDDTYRFIEDRNQEYINVNLQNETLAGVKVNIMLFINETGSLVYAKSINFSTVEEKPVPEELLKLVESGQLSIKSEDDVIRGYVLLDEAPMFISCHPILTTKYEGPVKGTLVFGKYFDDDVLSSEENTDSSISILRVDEDLPPDFQGKFQQFTEAPDSTIVEPLSKEVIAGYFGLMDISGKSAVIIRTDFPRILYLNNENTLNYMYFFLLLTGLVTGVGVKFALDNFFVSRLIDIDNFVTKVRSEKDLSRRLPLEGNDELYRLSREINGMLSEIELAEQELKSQEREKKVLLDSLNELAIFVDPDFKIIWANKAALEHMKIDLEKAKGMCVKTTPDINGSLFGHMQLEKIFNSGNKESGEFSLENGTYWFVQAIPVTDDSGKIIGILGTFRDITERKAIEKLLQEKQVAEIANRTKSEFLANMSHELRTPLNSIIGFSDLLCDQIYGKLNEKQLKYTNNISKSGKHLLNLINDILDLSKVEAGKMELDYREFELADRLNSVKSLLSPIAARKNIKIEINVNKDLTTICADEARFVQIMYNLVDNAIKFSFENNPVRIEARRKGEFLETTVTDIGIGIKPEDQHKLFQPFSQVAAFSSKKFQGTGLGLSLVKQIVNLHGGYVWFRSIPGEGSTFAFAIPINGNKKD

SEQ ID NO: 22923 - protein, 338 aa, Neurospora crassa
MVVKVGINGFGRIGRIVFRNAIEHDDIHIVAVNDPFIEPKYAAYMLRYDTTHGNFKGTIEVDGADLVVNGKKVKFYTERDPAAIPWSETGADYIVESTGVFTTTEKASAHLKGGAKKVIISAPSADAPMYVMGVNNETYDGSADVISNASCTTNCLAPLAKVIHDNFTIVEGLMTTVHSYTATQKTVDGPSAKDWRGGRTAAQNIIPSSTGSAKAVGKVIPDLNGKLTGMAMRVPTANVSVVDLTARIEKGATYDEIKEVIKKASEGPLAGILAYTEDEVVSSDMNGNPASSIFDAKAGISLNKNFVKLVSWYDNEWGYSRRVLDLISYISKVDAKKA

SEQ ID NO: 22924 - protein, 550 aa, Candida albicans SC5314
MPYTPIDIQKEEADFQKEVAEIKKWWSEPRWRKTKRIYSAEDIAKKRGTLKINHPSSQQADKLFKLLEKHDADKTVSFTFGALDPIHVAQMAKYLDSIYVSGWQCSSTASTSNEPSPDLADYPMDTVPNKVEHLWFAQLFHDRKQREERLTLSKEERAKTPYIDFLRPIIADADTGHGGITAIIKLTKMFIERGAAGIHIEDQAPGTKKCGHMAGKVLVPVQEHINRLVAIRASADIFGSNLLAVARTDSEAATLITSTIDHRDHYFIIGATNPEAGDLAALMAEAESKGIYGNELAAIESEWTKKAGLKLFHEAVIDEIKNGNYSNKDALIKKFTDKVNPLSHTSHKEAKKLAKELTGKDIYFNWDVARAREGYYRYQGGTQCAVMRGRAFAPYADLIWMESALPDYAQAKEFADGVKAAVPDQWLAYNLSPSFNWNKAMPADEQETYIKRLGKLGYVWQFITLAGLHTTALAVDDFSNQYSQIGMKAYGQTVQQPEIEKGVEVVKHQKWSGATYIDGLLKMVSGGVTSTAAMGQGVTEDQFKESKAKA

SEQ ID NO: 22925 - protein, 113 aa, Streptococcus mitis
TYVFTHDSIAVGEDGPTHEPVEHLAGLRAMPNLNVFRPADARETQAAWYLAVTSEKTPTALVLTRQNLTVEEGTDFDKVVKGAYVVYENAADFDTILIATGSEVNLAVSAAKE

SEQ ID NO: 22926 - protein, 410 aa, Ralstonia metallidurans CH34
MSRRRVVVTGLGLVSPVGNTVAEGWANLVAGKSGIATITKFDHSPFAVHFAGEVKGFNAEDYIPAKEARNMDTFIHFGIAAGSQALKDSGLEVTEANAERIGVLVGSGIGGLPMIEDTQMTLAERGPRRISPFFVPGSIINMISGHLSIIHGLKGPNLAAVTACTTGLHSIGLAARLIQAGDCDAMLAGGAESTVSPLGIGGFAAARALSTRNDDPAAASRPWDKDRDGFVLGEGAGVMMLEEYESAKARGARIYAELIGFGMSGDAFHMTAPNTDGPRRCMVAAIKDAGINPDEVQYLNAHGTSTPLGDKNETDAVKLAFGDHAYKMVVNSTKSMTGHLLGGAGGLESVFTVLAIHNQISPPTINIFNQDPECDLDYVANTARDMKIDVAVKNNFGFGGTNGTLVFRRV

SEQ ID NO: 22927 - protein, 275 aa, Candida albicans SC5314
MKELDHENIVTLYDVIHTENKLTLVFEYMDKDLKKYMEVHGQQSALDLKVVKSFMFQLLKGIMFCHDNRVLHRDLKPQNLLINNKGELKLGDFGLARAFGIPFNTFSNEVVTLWYRAPDVLLGSRAYTTSIDIWSAGCIFAEMCTGKPLFPGTANEDQLIKIFRLMGTPNERTWPGISQYTNYKNNWQIFVPQDLRLIVPNLDSMGLNLLQSLLQMRPESRITARQALQHPWFHEITMPNAVPQHLSDPYQQQQQQQQQQQQQQHPHQPIIDQQY

SEQ ID NO: 22928 - protein, 278 aa, Zea mays
MSHASPQVVYNNSEKKRSCCWDGCIYAGTPLPAATTGWVVVKPGRCGWLVQRRQAAVRAMSAAAAAASSVTKFIKCVTVGDGAVGKTCMLICYTCNKFPTDYIPTVFDNFSANVSVGGSIVNLGLWDTAGQEDYSRLRPLSYRGADVFILSFSLVSRASYENVLKKWMPELRRFSPTVPVVLVGTKLDLREDRSYLADHSAASIISAEQGEELRKQIGAVAYIECSSKTQRNVKAVFDTAIKVVLQPPRRREVTTKKMKTSSNQSLRRYLCGSGCFTS

SEQ ID NO: 22929 - protein, 375 aa, Triticum aestivum
MKKHIHIALFLLLVSPLIPIAVAQAQSQPNDFSDANLNQFSPSIAIIIVILVAALFLMAFFSIYVRHCADSPSTTVSPLTTARSRRAARGLDPAVIQTFPILEYSEVKIHKIGKEALECAVCLCEFEDTETLRLIPKCDHVFHPECIDEWLGSHTTCPVCRANLVPTDSEDAIANGNANGVVPVPETFTRDIEAQNDAVEAAPEQQNAEADPVLPEPEVVSLDKTLNRNRTRGSRSNRPRRFPRSHSTGHSLVQPGENTDRFTLRLPLEVRKQLINRQLQRASSLIVLPREGSLRQGYRTGGEGSSRGKISRRLDRSLKSDRWIFSMAAPFFARALSIRSPRVRNNDVEGTASSSSSSTAPILPPTAVDSARPLV

SEQ ID NO: 22930 - protein, 109 aa, Streptococcus mitis
LLYTLLHLSGFEDVSMDEIKSFRQWGSKTPGHPEFGHTAGIDATTGPLGQGISTATGFAQAERFLAAKYNREGYNIFDHYTYVICGDGDLMEGVSSEAASYAGLQKLDK

SEQ ID NO: 22931 - protein, 216 aa, Colwellia psychrerythraea 34H
MSKDFTLYYNPITVNSIKVMLLCNALKIVPEYKNIELQKGEHKSASFLQLNPDGRVPVLIDGGFVLNESAAILQYLAHKYQSTLWPNELEHQAQVLKWLFWQGNEWNKVVGAYAHHQVVLPHWRNSQPESFSAQHLAKFKQVMSTFNRALNGKEYLVGNHLTIADISIGSYLIFADEANMPLDKYQHVRRWLENLQVTPWWQETQAQLLKTLIVKL

SEQ ID NO: 22932 - protein, 220 aa, Euphorbia esula
MGRRPARCYRQIKNKPYPKSRFCRGVPDPKIRIYDVGMKKKGVDEFPFCVHLVSWEKENVSSEALEAARIACNKYMTKFAGKDAFHLRVRVHPFHVLRINKMLSCAGADRLQTGMRGAFGKPQGVCARVAIGQVLLSVRCKDNNSHNAQEALRRAKFKFPGRQKIIVSRKWGFTKINRADYPRLKSENRILPDGVNAKLLGCHGRLANRKPGRAFIDAVA

SEQ ID NO: 22933 - protein, 456 aa, Vitis vinifera
MSQTTTNPHVAVLAFPFSTHAAPLLAVVRRLAAAAPHAVFSFFSTSQSNASIFHDSMHTMQCNIKSYDVSDGVPEGYVFAGRPQEDIELFMRAAPESFRQGMVMAVAETGRPVSCLVADAFIWFAADMAAEMGVAWLPFWTAGPNSLSTHVYTDEIREKIGVSGIQGREDELLNFIPGMSKVRFRDLQEGIVFGNLNSLFSRMLHRMGQVLPKATAVFINSFEELDDSLTNDLKSKLKTYLNIGPFNLITPPPVIPNTTGCLQWLKERKPTSVVYISFGTVTTPPPAELVALAEALEASRVPFIWSLRDKARVHLPEGFLEKTRGYGMVVPWAPQAEVLAHEAVGAFVTHCGWNSLWESVAGGVPLICRPFFGDQRLNGRMVEDALEIGVRIEGGVFTKSGLMSCFDQILSQEKGKKLRENLRALRETADRAVGPKGSSTENFKTLVDLVSKPKDV

SEQ ID NO: 22934 - protein, 469 aa, Desulfovibrio vulgaris subsp. vulgaris str. Hildenborough
MRTKIIATIGPASRSHEVLSRLVNAGVGIFRLNFSHGDASMFVELIGLLRELERESGRPLTILQDLSGPKIRIGEIAKGALSVSKGDRLLLGPAPAPADNRPFIPFDHPAVLAEFEIGDRVVLSDGGLQFRVVDKGPNGTFELEANNNGMITSRKGLALPGKSVKLAALTAKDRKDLADGLALGVDAVALSYVQTPDDIRDAKEIIRAAGRNIPVIAKLERQNAVDRLDEILAETDIVMVARGDLGVECPLPELPAMQKRIIRACNRAAKPVIVATQMLLSMVNSPSPTRAETTDVANAVLDGADCVMLSEETAMGSFPVETVNFMKEIAMKAEELHFELQRLREPDVGRGSADFLAYSACLLAEKANADAIVSHSLSGSSARLISSRRPQQPVYAITPDPAAQRWLNFSWGVFPEGGDEGISGHLERAEAFIERCPDIPDGADVVITAGQPKPGDTPRGTNLVKIYRK

SEQ ID NO: 22935 - protein, 585 aa, Magnetospirillum magnetotacticum MS-1
MCGIAGLMTPGGPPDETVLDKLADALAHRGPDGRGRHVQGNVGLVQNRLSIIDLEGGRQPILDGQGNAIVANGEVYNYLELKSDMAGQAFATGSDCEPPLHLYRHQGPAFARSLRGMYALAIHDGKAEKLILCRDPFGIKPLYLAEGSPGLAFASEPQALLAAGLVKPELDPVALAELLQLQFTTGTRTIFKGIRRLAPGETVVAEEGCVAESRRLPALPAGGPNEGGLDQLLDQLDDTLTESVELHQRSDVPYGMFLSGGIDSSVVLALMARLNPRGILAFTAGFPGTKVHDEREHARDLARAVGARHVEVEFTQSDFWALLPQVAAAMDDPAADYACLPTFKLAQEARKEVKVILSGEGGDELFGGYGRYRHAMRPWPLTKSMRRKGTFDGLDVLRDGILSHWRHGMKLAERVEAMPGRTRLQVAQAVDCADWLPNDLLAKADRCLMANGIEGRVPFLDPVVAAFAFRLPDHLKVRKGLGKWILRRWLETALPASRPFEKKRGFTVPVAEWIAARPEIGHLVAHQPGIEEICHPGKVKRLFKDCTKDTGFACWTLLFYALWHQRHVLGKIPDGDAFSALAERI

SEQ ID NO: 22936 - protein, 572 aa, ASPERGILLUS NIDULANS FGSC A4
MPTKKHPNDSTHLPTKIKNFFRINSSSSTSSHQSSNHVNSSDRDTGSSTPVKHEPKSTFRQSRFLPMIGRNRSATVASEGNPLDEAISPTATANPYFVHQGQPALQHRNDGSIPSSPPDTPELQVDGVSAAEQATTANKEELARKLRRVASAPNAQGLFTATDSDGRPQTAELGKEPLVHSGAAGSPVGLVEVSSNTDQDGNLTVPQPGSGKLPAVTQVRTSSGGFRRTYSSNSIKVRNVEVGPASFDKIKLIGKGDVGKVYLVREKKSTRLYAMKVLSKKEMIKRNKIKRALAEQEILATSNHPFIVTLYHSFQSEDYLYLCMEYCSGGEFFRALQTRPGKCISEDAARFYAAEVTAALEYLHLMGFIYRDLKPENILLHQSGHIMLSDFDLSKQSGPGGAPTMIPARSGNSNTSLPTIDTKSCIADFRTNSFVGTEEYIAPEVIKGCGHTSAVDWWTLGILIYEMLYGTTPFKGKNRNATFGNILRDEVPFPEQGGAQQISKYVITEFCRGNETVNFRNVKESASVDIGEKNPSKMKGVPLNSGLATPNGEIADPFEEFNSVTLHHDGDF

SEQ ID NO: 22937 - protein, 206 aa, Saccharomyces cerevisiae
MASTDFSKIETLKQLNASLADKSYIEGTAVSQADVTVFKAFQSAYPEFFRWFNHIAFKADEFDSFPAASAAAAEEEEDDDVDLFGSDDEEADAEAEKWKAERIAAYNAKKAAKPAKPAAKSIVTLDVKPWDDETNLEEMVANVKAIEMEGLTWGAHQFIPIGFGIKKLQINCVVEDDKVSLDDLQQSIEEDEDHVQSTDIAAMQKL

SEQ ID NO: 22938 - protein, 145 aa, Enterococcus faecalis V583
MTKPTEEELKQTLTDLQYAVTQENATERPFSGEYDDFYQDGIYVDIVSGEPLFSSLDKYDAGCGWPSFTKPIEKRGVKEKADFSHGMHRVEVRSQEADSHLGHVFTDGPLQEGGLRYCINAAALRFVPVADLEKEGYGEYLSLFK

SEQ ID NO: 22939 - protein, 475 aa, Rubrobacter xylanophilus DSM 9941
MRRTKIVATLGPATSSEESIGALVRAGVDVMRLNFSHGTHDMHLDNARTVREAAAEAGRNVAIMQDLQGPKIRTGEVEGGTELVEGSRVVIAPGDFVGDASRLSTSYDRLAQDVKPGHRLLIDDGLIGLRVESIKENGEIVCEVLEGGPVSSHKGLNFPDSSLSISGLTEKDLEDLRFGLEELRPDWVAISFVRTGEEVLDVKERIRELGGDVPVISKIEKHEAIDNIEEVIEASDGVMVARGDLAVELSAERVPIEQKRIVARCRRRGRPVIVATQMLDSMMRNPRPTRAEVSDVANAIFDRTDAVMLSGETAVGRYPTQSVMEMDRICRAAEGAIDYGRDIAASTAWGRGDRYDAVTHAACELAEVLEAQAILTSTQTGLSCIRVARFRPPNRILAVSPIEATVRRLALVWGVTAVRGEQAGSIEERFRESVEAAEARGHLKKGDRLVFTGGTAGSLPGSTNLLQVHTVGENG

SEQ ID NO: 22940 - protein, 427 aa, Burkholderia fungorum LB400
MSKNETLFERAQRTIPGGVNSPVRAFRSVGGTPRFIERAQGAYFWDADGQRYIDYIGSWGPMILGHVHPEVLEAVQRVLGNGFSFGAPTESEVEIAEEICKLVPSIEQVRMVSSGTEATMSALRLARGFTNRTRIVKFEGCYHGHADSLLVKAGSGLLTFGNPTSAGVPADIAKHTTVLEYNNVAELEEAFKAFGNEIASVIVEPVAGNMNLVRATPEFLQALRRLCSEYGSVLIFDEVMCGFRVALGGAQEVYGITPDLTCLGKVIGGGMPAAAFGGRRDIMAHLAPLGGVYQAGTLSGNPIAVAAGLKTLQLIQAPGFYDTLAARTTRLAQGLANVAREARVPFAADSLGGMFGLYFTESIPTSFAEVTQSDVPRFNAFFHKMLDAGVYFAPSAYEAGFVSIVHDDAIIDATIDAARGAFASLAA

SEQ ID NO: 22941 - protein, 391 aa, Oceanobacillus iheyensis HTE831
MNRGRDAVIVSAVRTAIARQGGALATVPAHVFGAEVIKESVKRAKVDPELIDDVIMGNVLSGGGNIARLAALQADLSLHLPGLTIDRQCGSGINAIVLAQQAIQSGMGDIYVAGGMESMSRAPYLMDRPDKAFSPVPPTIRKSKLSPEHIGDPPMGITAENLAKKYNISREEQDEYALSSQQRMEEAMREGRFKEQIVPISVPLRKEAAIVFDTDEHPRPNSTMEGLKKLPPAFVKEGTVTAGSSSGLNDAASALVIMSREKAEELNLTPLAIVRNAAVAGVDPNVMGIGPVPATQKLLRKANLSLRDIDLIELNEAFAAQVIACDRELAFNRNKLNVNGGAIAHGHPLGATGAILITKMVYELQRIGGNYGLVTACIGGGQGISALIERE

SEQ ID NO: 22942 - protein, 1284 aa, Arabidopsis thaliana
MSTAPSPGTTPSPSPPSPPTNSTTTTPPPAASSPPPTTTPSSPPPSPSTNSTSPPPSSPLPPSLPPPSPPGSLTPPLPQPSPSAPITPSPPSPTTPSNPRSPPSPNQGPPNTPSGSTPRTPSNTKPSPPSDSSDGLSTGVVVGIAIGGVAILVILTLICLLCKKKRRRRHDDEAAYYVPPPPPSGPKAGGPYGGQQQYWQQQNASRPSDNHVVTSLPPPKPPSPPRKPPPPPPPPAFMSSSGGSDYSDLPVLPPPSPGLVLGFSKSTFTYEELSRATNGFSEANLLGQGGFGYVHKGILPSGKEVAVKQLKAGSGQGEREFQAEVEIISRVHHRHLVSLIGYCMAGVQRLLVYEFVPNNNLEFHLHGKGRPTMEWSTRLKIALGSAKGLSYLHEDCNPKIIHRDIKASNILIDFKFEAKVADFGLAKIASDTNTHVSTRVMGTFGYLAPEYAASGKLTEKSDVFSFGVVLLELITGRRPVDANNVYVDDSLVDWARPLLNRASEEGDFEGLADSKMGNEYDREEMARMVACAAACVRHSARRRPRMSQIVRALEGNVSLSDLNEGMRPGHSNVYSSYGGSTDYDTSQYNDDMIKFRKMALGTQEYGTTGEYSNPTSDYGLYPSGSSSEGQATREMEMGKIKKTGQGLSLCSNGRKSSTLLSNSIPRVSISFSPKTLFTCSYPLQSRHPKFSQRLFCNHACVPETVDETRYKELFNKRMDMAGLKPHNRIALGVSGGPDSMALCVLTAKWKTEGLSCVNKTDGFIDGLVAIVVDHGLRQESKDEAELVCSRVSQMGIRCEIASCDWVDGRPKLGHLQEAAREMRYEMISNVCFRQQIEVLLIAHHADDQAELFILRLSRSSGVLGLAGTAFASEIFSRNLQLDAKHMKNQSIRLVRPLLDLWKEDMYKICQWGRQDWVEDPTNRSSFKSELQAVISECRRTRSFVDKVCTDLIHQTVTVTDKGYAILDLERLNPSGVKDICLSKYLFAVLQFISQRQRPIRGNTSKLLLNYIRAIPCRTSLTAAGCYLSPAPGSKGTKIIVSCSVDCPLPSKTELLNISFNETPSDDLGQIIADAKSFSDHVAPTSLFEVQFLDVASESVLSKARELNLLSESTYTTIGLLQRDETKRFLTKTEEKSVELEHGTNIAASSDKVHLCLGQNLYFMNRFLIRWNLSDHQCNEADCRNCPVSTATSMEVRHMVEPDWLYLAELSKCSTSNHSISSSQKALRSLKLIPAAARKSLPVLVNHCGLLLCIPAIGFSYCSCLEASAVFLPRIPLGGGHSSFL

SEQ ID NO: 22943 - protein, 473 aa, Corynebacterium efficiens YS-314
MNCPSTWRRASDVAQQSIIDTVVNLCKRRGLVYPCGEIYGGTRSAWDYGPLGVELKENIKRQWWRTMVTSRPDVVGVDTSVILPRQVWVTSGHVEVFTDPLVESLHTHKRYRADHLLEAYEEKHGHPPANGLADINDPETGQPGKWTEPKAFSGLLKTFLGPVDDEEGLHYLRPETAQGIFVNFKNVMNSSRMKPPFGIANIGKSFRNEITPGNFIFRTREFEQMEMEFFVKPGEDEEWHQHWIDARHQWYIDLGVNPDNLRLYEHPQEKLSHYSKRTVDIEYAFNFANSKWGELEGIANRTDYDLRVHSEGSGEDLSYFDQETGERWIPYVIEPAAGLGRAMMVFLMDAYHEDEAPNSKGGVDKRVVLKLDRRLAPVKVAVLPLSKKPELSGPAEKLAAELRQFWNVEYDTSGAIGRRYRRQDEIGTPFCVTVDFDTLEDNAVTVRERDTMEQIRVPLDELQGYLAQQLIGC

SEQ ID NO: 22944 - protein, 96 aa, Zea perennis
MGRRACCEKEGVKRGAWTTKEDDALAAYVKAHGEGKWREVPQKAGLRRCGKSCRLRWLNYLRPNIRRGNISYDEEDLIIRLHKLLGNRWSLIAGRL

SEQ ID NO: 22945 - protein, 150 aa, Glycine max
MSLIPSFFGGRRSNVFDPFSLDVWDPFKDLSFPSAEDSAFLKTRVDWKETPEAHVFKADIPGLKKEQVKVEIEDDKVLQISGERSVEKEDKNDKWHRVERSSGKFLRKFRLPENAKVDQVKASIENGVLTVTVPKEEVKKPDVKAVQISG

SEQ ID NO: 22946 - protein, 94 aa, Streptococcus oralis
MLKPLGDRVVLKIEEKEQTVGGFVLAGSAQEKTKTAQVVATGQGVRTLNGDLVAPSVKPGDRVLVEAHAGIDVKDGDEKYIIVGEANILAIIEE

SEQ ID NO: 22947 - protein, 534 aa, Streptococcus oralis
MSKEIKFSSDARSAMVRGVDILADTVKVTLGPKGRNVVLEKSFGSPLITNDGVTIAKEIELEDHFENMGAKLVSEVASKTNDIAGDGTTTATVLTQAIVREGIKNVTAGANPIGIRRGIEAAVAAAVEALKNNAIPVANKEAIAQVAAVSSRSEKVGEYISEAMEKVGKDGVITIEESRGMETELEVVEGMQFDRGYLSQYMVTDSEKMVADLENPYILITDKKISNIQEILPLLESILQSNRPLLIIADDVDGEALPTLVLNKIRGTFNVVAVKAPGFGDRRKAMLEDIAILTGGTVITEDLGLELKDATIEALGQAARVTVDKDSAVIVEGAGNPEAISHRVAVIKSQIETTTSEFDREKLQERLAKLSGGVAVIKVGAATETELKEMKLRIEDALNATRAAVEEGIVAGGGTALANVIPAVADLELTGDEATGRNIVLRALEEPVRQIAHNAGFEGSIVIDRLKNAEVGTGFNAATGEWVNMIEEGIIDPVKVSRSALQNAASVASLILTTEAVVANKPEPAAPAPAMDPS

SEQ ID NO: 22948 - protein, 368 aa, Corynebacterium efficiens YS-314
MSEDPDPDQPATAPPTPDQVRRWQRYLANERAEAEVYRDLARKRTGEEREILLKLAEAESRHEAHWRGLLGDAGGGPVKPDLRTRVLGMLTRRFGSVFSLALMQSAESRSPYSSDDDATEQMSADERIHAEVIRGLATRGRERMSGNFRAAVFGVNDGLVSNLALVIGVMASGVAPQIVLITGVSGLLSGALSMAAGEYISVRSQLELLDASTPDPETRTAIPELDVDANELELVYRARGMGEQEAAARAAAVFGALVSSRGELDDAHLIPTTDREETGSARSAALFSFLSFSVGAFIPIIPLLFGLAGVAAGVLALVLVGISLLFTGGLTGVLSGKPPLYRAIRQLLVGLGAASITYVLGLAFGTML

SEQ ID NO: 22949 - protein, 228 aa, Eruca sativa
RGKIEIKRIENTTNRQVTFCKRRNGLLKKAYELSVLCDAEVALIVFSSRGRLYEYSNNSVKGTIERYKKAISDNSNTGSVAEINAQYYQQESAKLRQQIISIQNSNRQLMGETIGSMSPKELRNLEGRLDRSVNRIRSKKNELLFAEIDYMQKREVDLHNDNQLLRAKIAENERNNPGMISLMPGGSSNYEQIMPPPQTQPQTFDSRNYFQVAALQPNNHHYSSAGRE

SEQ ID NO: 22950 - protein, 96 aa, Zea perennis
MGRRACCEKEGVKRGAWTTKEDDALAAYVKAHGECKWREVPQKAGLRRCGKSCRLRWLNYLRPNIRRGNISYDEEDLIIRLHRLLGNRWSLIAGRL

SEQ ID NO: 22951 - protein, 231 aa, Eruca sativa
RGKIEIKRIENTTNRQVTFCKRRNGLLKKAYELSVLCDAEVALIVFSSRGRLYEYSNNSVKGTIERYKKAISDNSNTGSVAEINAQYYQQESAKLRQQIISIQNSNRQLMGETIGSMSPKELRNLEGRLDRSVNRIRSKKNELLFAEIDYMQKRSLQEVDLHNDNQLLRAKIAENERNNPGMINLMPGGSSNYEQIMPPPQTQPQTFDSRNYFQVAALQPNNHHYSSAGRE

SEQ ID NO: 22952 - protein, 302 aa, Mycobacterium avium subsp. paratuberculosis K-10
MTRGLVIGESLIDIVEDAEYVGGSPLNVAVGLGRLGRDVDFLTYLADDDHGRRIAAYLKDAGVQLVSESRAAERTATARSTIAADGSADYEFDLDWRLSGTPPVAPPLFVHTGSIAAVRDPGCLAVAALIDTYRVSATVTFDPNVRPSLIADRELAVSRIEHLVERSDIVKVSAEDLHWIDPDRSPEQLAQTWLGLGPAIVAVTMADRGAVGYCAAGTARVPTRAVRVVDTVGAGDSFMAGLLDALWEAGLLGGDRRGALRDIGIDTLTSALDAASLSSALTIARAGADLPDRAAVQAALRR

SEQ ID NO: 22953 - protein, 96 aa, Zea perennis
MGRRACCEKEGVKRGAWTTKEDDALAAYVKAHGEGKWREVPQKAGLRRCGKSCRLRWLNYLRPNIRRGNISYDEEDLIIRLHRLLGNRWSLIAGRL

SEQ ID NO: 22954 - protein, 226 aa, Guillenia flavescens
RGKIEIKRIENTTNRQVTFCKRRNGLLKKAYELSVLCDAEVALIVFSSRGRLYEYSNNSVKGTIERYKKAISDNSNTGSVAEINAQYYQQESAKLRQNIISIQNSNRQLMGETIGSMSAKELRNLEGRLDRSINRIRSKKNELLFAEIDYMQKREVDLHNDNQLLRAKIAENERNHPSMSLMPGGSNYEQIMPPPQTQSQPFDSRNYFQVAALQPNNHHYSSAGRQ

SEQ ID NO: 22955 - protein, 499 aa, Glycyrrhiza echinata
MEILSLLSYSVFYLALFFIFNIVIRARKFKNLPPGPPSLPIIGNLHHLKRPLHRTFKGLSEKYGHVFSLWFGSRLVVVVSSASEFQQCFTKNDVVLANRPRFLSGKYIFYNYTTLGSTSYGEHWRNLRRITALDVLSNHRINSFSGIRRDETQRLITRLADDSSTNFAEMELSSRLYDMTFNNIMRMISGKRYYGEDCDTSDLQEASQFRDMVSELLQLSGANNKTDFMPLLRFLDFENLEKRLKDISGKTDAFLRGLIEEHRTKKERANTMIDHLLNLQDSQPEYYTDQIIKGLALAMLLAGTDSSAVTLEWSMSNLLNHPEVLKKVKDELDTHVGQDRLVDESDLPKLTYLKNVINETLRLYTPAPLLLPHSTSDECNIGGYKVPQDTIVLINAWAIHRDPELWTEATTFKPERFEKKGELEKLIAFGMGRRACPGEGLAIRAISMTLALLIQCFDWKLINGDKIDLAERDGFTLTKLVPLKAMCKSRPVINKVFKQ

SEQ ID NO: 22956 - protein, 296 aa, Streptococcus pneumoniae TIGR4
MKAKYAVWVAFFLNLTYAIVEFIAGGVFGSSAVLADSVHDLGDAIAIGISAFLETISNREEDNQYTLGYKRFSLLGALVTAVILVTGSVLVILENVTKILHPQPVNDEGILWLGIIAITINLLASLVVGKGKTKNESILSLHFLEDTLGWVAVILMAIVLRFTDWYILDPLLSLVISFFILSKALPRFWSTLKIFLDAVPEGLDIKQVKSGLERLDNVASLNQLNLWTMDALEKNAIVHVCLKEMEHMETCKESIRIFLKDCGFQNITIEIDADLETHQTHKRKVCDLERSYEHQH

SEQ ID NO: 22957 - protein, 226 aa, Thlaspi arvense
RGKIEIKRIENTTNRQVTFCKRRNGLLKKAYELSVLCDAEVALIVFSSRGRLYEYSNNSVKGTIERYKKAISDNSNTGSVAEINAQYYQQESAKLRQQIISIQNSNRQLMGETIGSMSPKELRNLEGRLDRSITRIRSKKNELLFSEIDYMQKREVDLHNDNQLLRAKIAENERSNPSMNLMPGGSNYEQLMPPPQTQSQPFDSRNYFQVAALQPNNHHYSSAGRQ

SEQ ID NO: 22958 - protein, 362 aa, Zea mays
MGLDVGEIGMGLDLGLDLRLFAARSAGGMAKGAAPAGIQSCIRSLEVERRKIEVFRRELPLCLRLLADVIDELKEEAAKRGEYDDGAATVDDGDKRKWMSTAQLWVDSDAKSDESDKEQQSEITSPPEPKLLGGGAPTPIRAAVSAVAVPQPLPPPLFRREDSSASSGLSGLSLVSLSPATKAAVPISPPVVAASGTTTSARFCGTTMPPSGSEVINMHSQAQQQASRKARRCWSPELHRRFVAALHELGGPQVATPKQIREVMQVDGLTNDEVKSHLQKYRLHNRRSSPGAAAAPVSQSIMLVDGVWAAQEQSSGSQSGSRQGPLQFSRAGMAVGGGDDSSSSDDDEDDDKSEDGYSLKCV

SEQ ID NO: 22959 - protein, 461 aa, Chlamydophila pneumoniae AR39
MTQEFDCVVIGAGPSGYVAAITAAQSKLRTALIEEDQAGGTCLNRGCIPSKALIAGANVVSHIKHAEQFGIHVDGYTIDYPAMAKRKNTVVQGIRQGLEGLIRSNKITVLKGTGSLVSSTEVKVIGQDTTIIKANHIILATGSEPRPFPGVPFSSRILSSTGILELEVLPKKLAIIGGGVIGCEFASLFHTLGVEITVIEALDHILAVNNKEVSQTVTNKFTKQGIRILTKASISAIEESQNQVRITVNDQVEEFDYVLVAIGRQFNTASIGLDNAGVIRDDRGVIPVDETMRTNVPNIYAIGDITGKWLLAHVASHQGVIAAKNISGHHEVMDYSAIPSVIFTHPEIAMVGLSLQEAEQQNLPAKLTKFPFKAIGKAVALGASDGFAAIVSHEITQQILGAYVIGPHASSLIGEMTLAIRNELTLPCIYETVHAHPTLSEVWAEGALLATNHPLHFPPKS

SEQ ID NO: 22960 - protein, 226 aa, Thlaspi arvense
RGKIEIKRIGNTTNRQVTFCKRRNGLLKKAYELSVLCDAEVALIVFSSRGRLYEYSNNSVKGTIERYKKAISDNSNTGSVAEINAQYYQQESAKLRQQIISIQNSNRQLMGETIGSMSPKELRNLEGRLDRSITRIRSKKNELLFSEIDYMQKREVDLHNDNQLLRAKIAENERSNPSMNLMPGGPNYEQLMPPPQTQSQPFDSRNYFQVAALQPNNHHYSSAGRQ

SEQ ID NO: 22961 - protein, 319 aa, Bdellovibrio bacteriovorus HD100
MKNTLLFSFLPPASVLERALSQFKATISAKELSVEEMLDQVHKIQPAAIVVVPRQKITAEVIKALPDSVKIIATSSVGFDHLDIAAAKERGILLSNTPDVLTECTADLGMMLLLNACRRGREYLSIMQEGWRKTYSQTDMLGLQVSGRTLGILGMGRIGRALADRARGFGMKIIYCNNKRLPPELEKDAVYFKNFHDMLPHCQIISLNAPNTPETKGIMNSKSFSLLPKNAVLVNVARGTLVDEDALIKALESGHLFAAGLDVFCHEPDYNLRLRDFPNVFLTPHMGSATVETRSAMGHRALDNVTAALEGQRPGDFLY

SEQ ID NO: 22962 - protein, 501 aa, Ralstonia metallidurans CH34
MISRSPALARVVVMVAMLVFGPAVSELGHAQAAAQNYNLPDFTDLVEKVSPAVVNIRTTERVRSRGGNSPDDDEMAEFFRRFFGVPMPGTPGQPRRGQPPQGQGQSQGQGEEMSRGVGSGFIISQDGYVMTNAHVVAEADTIYVTLPDKREFKAKLIGADKRTDVALLKIDATGLPRLPLGDSDKVRTGEWVLAIGSPFGLDSSVTAGIVSAKARDTGDYLPLIQTDVAVNPGNSGGPLINLRGEVIGINSQIYSRSGGYMGISFATPIDEAMRVTEQLKATGKVTRGRIAVAIGDVTKEVADSLGLGRTRGALVGSVEPGGPAEKAGIEAGDIILKYNGRDIEKAADLPRMVGDTKPGTRVPMQVWRKGQTREVMITVAELEPDTPRATPRRGDKRGGGNEEAPAPKPNALGLIVNDIPEARMRELKLKSGVEVDTVDGPAARAGIRPGDIILRLGDTDVTSARQFNDLVKGLDKNKMAAVFVRRGDATQVLTLRPNQTR

SEQ ID NO: 22963 - protein, 154 aa, Medicago sativa
AVKMLLIPWKWGMKYFWDTLLDADLESDILGWQYISGSLPDGHELERLDDPEIQGTKYDSEGEYVRQWLPELARIPTEWIHHPWNAPPTVLRASGVELGQNYPKPIIDIDLAREQLTQAIFKMWEDEAASKSSTSENKHEVVDDSENLSIPKFS

SEQ ID NO: 22964 - protein, 470 aa, Salmonella enterica subsp. enterica serovar Typhi Ty2
MKKTKIVCTIGPKTESEEMLSKMLDAGMNVMRLNFSHGDYAEHGQRIQNLRNVMSKTGKKAAILLDTKGPEIRTIKLEGGNDVSLKAGQTFTFTTDKSVVGNNEIVAVTYEGFTSDLSVGNTVLVDDGLIGMEVTAIEGNKVICKVLNNGDLGENKGVNLPGVSIALPALAEKDKQDLIFGCEQGVDFVAASFIRKRSDVVEIREHLKAHGGENIQIISKIENQEGLNNFDEILEASDGIMVARGDLGVEIPVEEVIFAQKMMIEKCIRARKVVITATQMLDSMIKNPRPTRAEAGDVANAILDGTDAVMLSGESAKGKYPLEAVSIMATICERTDRVMNSRLDYNNDSRKLRITEAVCRGAVETAEKLEAPLIVVATQGGKSARAVRKYFPDATILALTTNEVTARQLVLSKGVVSQLVKEINSTDDFYRLGKDVALQSGLAQKGDVVVMVSGALVPSGTTNTASVHVL

SEQ ID NO: 22965 - protein, 152 aa, Triticum aestivum
MGALDHLSRLCNFTHTREAIRIKKRRPLTTVNIKVKMDCDGCERRVKNAVKSIRGVTTVVVNRKINKVTVTGYVEPRKVLARVKRTGKTTADMWPYVPYTVATYPYVGGSYDKKAPAGLVRNVPQAMADPAAPEVKYMNMFNDEDVTACTVM

SEQ ID NO: 22966 - protein, 923 aa, GIBBERELLA ZEAE PH-1
MGSISWDEHHQYAGTHPWWKAASFYQVYPASFKDSNSDGWGDLPGLISKLDYLSDLGIDVVWVSPIFESPQKDMGYDVSDYQKIYEPYGSVEDVDTLIDQCHARGLKIILDLVVNHTSVEHEWFKESRSSKDNPKRDWYIWQPARYDTNGVRQPPTNWRGYFACSTWTWDEHTQEYYLHLYAPDQPDLNWDNEECREAIYDNTMRFWLDRGVDGFRIDTVNKYSKRKDFVDAAVTDPSSPHQPAPEMWCNGPRIHEFIHEMNEKVLRPYNAVSVGELSNTPHPSQVIPYVSAAAKELDMVFEFSMIRLGNGNGFGDKYIYQDFPLSKLKSFVERWQRFIEGTDAWTTVFCENHDNGRAVDRFGDTSSSEWWLKSAKTIAMWQATLTGTLFLYQGQEIGMTNMPRSWGIEEYKDIESSNFFAEAVESGNEKRVKDTMHGLQIMARDHSRIPFQWDDSPNAGFTNAQAKPWMKVHDEYRDINVARQLKDPDSILSFYKEVLRLRKRYQDLFVFGSFKLVDPDDEFLFVYLKESVLPIKGSQGQKRKVLVVLNMSQEERPCPDAYTYLKCSANEAKVLLSTTDRFTDIQKTTLAGWEGRLYTLLTLNLIHLSIPAIMSPFISLDELPQGSSVTFYDSSFFKRGSETITLPTPSEVLARPNFIQHPRAENMKLRIPAVFQELGLAVKHSDSTNTIISEGQCLWAVRRFLPKVPVPEVYGWTQENGIAFLYMEYIDGATLKDRWDSLTVTEKEGVCQELKTNITEISRLRQAPDDEFIGNISRRPLSDMVFTGTNFPPVGPFSSATELHDCMSNMFKWPAKVRQPDIDLADVLDPYRDMLPDDCAIHFTHADLNPVNIMVSKDSPCRVIAIIDWEQSGWYPAYWDFFKVEMTTKPGSEWQTEYLPKLLKEPDPDCCEAFYSYVNSYAP

SEQ ID NO: 22967 - protein, 277 aa, Streptomyces coelicolor A3(2)
MSSKVPPIILNNGVEMPQLGFGVWQVPDDDAQTAVALALEAGYRSIDTAAIYGNEEGTGRAIAASGLAREDLFVTTKLWNSDQGYDSTLRAFDTSMAKLGLEYLDLYLIHWPMPAKERYVDTYKAFEKLLADGRVRAIGVSNFLPEHLERLTAETSVIPAVNQIELHPHLQQHAAREVHAEQGIATEAWSPLGSGKGILDIPAIVAIAQKHGRTPAQVVLRWHLQLGNVVIPKSVTPSRIKENIDVFGFSLDTEDLAAISALNEDRRLGSDPADVNS

SEQ ID NO: 22968 - protein, 456 aa, Vitis vinifera
MSQTTTNPHVAVLAFPFSTHAAPLLAVVRRLAAAAPHAVFSFFSTSQSNASIFHDSMHTMQCNIKSYDISDGVPEGYVFAGRPQEDIELFTRAAPESFRQGMVMAVAETGRPVSCLVADAFIWFAADMAAEMGVAWLPFWTAGPNSLSTHVYIDEIREKIGVSGIQGREDELLNFIPGMSKVRFRDLQEGIVFGNLNSLFSRMLHRMGQVLPKATAVFINSFEELDDSLTNDLKSKLKTYLNIGPFNLITPPPVVPNTTGCLQWLKERKPTSVVYISFGTVTTPPPAELVALAEALEASRVPFIWSLRDKARVHLPEGFLEKTRGYGMVVPWAPQAEVLAHEAVGAFVTHCGWNSLWESVAGGVPLICRPFFGDQRLNGRMVEDALEIGVRIEGGVFTESGLMSCFDQILSQEKGKKLRENLRALRETADRAVGPKGSSTENFKTLVDLVSKPKDV

SEQ ID NO: 22969 - protein, 78 aa, Zea mays
MGGLSPNLFVVPLLLVCYTGTQGGPVIMVSARKCKSQSFRFKGPCSRDPNCPNVCLTKGFPGGVCKGLRPPCFCPRDC

SEQ ID NO: 22970 - protein, 356 aa, Oryza sativa
MPHLVRERLFFGDINDAIAALTTTAADTGGFTHLLSVVSSASISFITDCRPGLSIPTEEVRRVVAGEEGAPPVSAVAPGRLLRVVERAGVGLRVTRMAVPLRDTEEENLLDHLEPCLDFIDEGRKEGNVLVHCFAGVSRSATIIVAYLMRTEQKSLEEALESLKEVNESACPNDGFLEQLKLFEEMGFKVDTSSPLYKRFRLKLLGQSYKIGEKIGSYVFEDDPGLSGQPNSSTQDLPNKQTQQTAYRCKKCRRIVAVQGNVVSHTPGEGESCFQWQNKRKGERSYSKEQDCSSLFVEPLKWMTPVEDGALEGKLSCIHCGARLGYFNWSGIQCNCGSWITPAFQISKSKVDISTT

SEQ ID NO: 22971 - protein, 379 aa, Rickettsia prowazekii str. Madrid E
MARKLIYKSFIDHCKGEKSADAIISEHKQNVEKHSTNTCNVSLPFLHFDNNPIAAASISQVHKAQLITGGYVALKILRPDIRKKYNRDIKLLYFFAKIISKFSKAKRLKPITVIDKFHETMRFELDLRLEAAAASELKDNMRHDINVIIPKIYWDLTSENILTTEWLDGTSIYDISLLKEMNLEPKKIAQDFAVMFFNQAYRDGFFHADLHAGNILVNNQGKIILLDFGIMGRLKEKDRLSVAEILFAFLKRDYKLVAKVHLRAGYIPANTDLDLFAGSCRAVTEPIVGTPTKNISIGKLLTHLFKITEDFGMEVQPDLLILQKTLIMVEGIGRQLDSNVNMWQLAEPWIKKWAVKNLSPEAKLLRLIKHYLNSVNDIT

SEQ ID NO: 22972 - protein, 456 aa, Vitis vinifera
MSQTTTNPHVAVLAFPFSTHAAPLLAVVRRLAAAAPHAVFSFFSTSQSNASIFHDSMHTMQCNIKSYDISDGVPEGYVFAGRPQEDIELFMRAAPESFRQGMVMAVAETGRPVSCLVADAFIWFAADMAAEMGVAWLPFWTAGPNSLSTHVYTDEIREKIGVSGIQGREDELLNFIPGMSKVRFRDLQEGIVFGNLNSLFSRMLHRMGQVLPKATAVFINSFEELDDSLTNDLKSKLKTYLNIGPFNLITPPPVVPNTTGCLQWLKERKPTSVVYISFGTVTTPPPAELVALAEALEASRVPFIWSLRDKASVHLPEGFLEKTRGYGMVVPWAPQAEVLAHEAVGAFVTHCGWNSLWESVAGGVPLICRPFFGDQRLNGRMVEDALEIGVRIEGGVFTENGLMSCFDQILSQEKGKKLRENLRALRETADRAVGPKGSSTENFKTLVDLVSKPKDV

SEQ ID NO: 22973 - protein, 369 aa, Helicobacter pylori J99
MLLFTPGPVAINEEMRSSFSQPMPHHRTKDFEKIFQSVRENLKKMTGLEEVLLLSSSGTGAMEASVISLCQKELLFVNAGKFGERFGKIAKAHSIKAHELVYEWDTPAQVDGILNALKANPNIDAFCIQACESSGGLRHPVEKIAQAIKETNPNVFVIVDAITALGVEPLEITHVDALIGGSQKAFMLPPAMSLIALSQKAIDRIEERNVGFYFNLKSELKNQKNNTTSYTAPILHTLGLQRYFELVQNLGGFEALYQETKRVALASQKAVLALGLKIFPKSPSLSMTTIVSEHAKELKNLLKEKYQVQFAGGQEPYKDTLIRINHMGIIPVYKSAYALNALELALNDLDLREFDGMANTTFLKQYYEI

SEQ ID NO: 22974 - protein, 424 aa, Dechloromonas aromatica RCB
MAKPPRRKIRMKHVKKSAKLANVCYDIRGPVLQKAKQMEEEGHKIIKLNIGNLAAFGFDSPEEIQQDMIRNLPNAAGYTDSKGIFAARKAIMHYTQQKGIKGVTLEDIYVGNGVSELIVMAMNALLDAGDEVLVPAPDYPLWTAAISLSGGTPKHYLCDESKGWLPDLDDIRSKINAHTKAIVLINPNNPTGALYPDDLLYEIIDIARQHHLTIYADEVYDKVLYDDVKHTSIASLAEDVLMITFNGLSKNYRSCGYRAGWMVVSGDKRHAKDYIEGLDMLASMRLCANAPGQHGIQTALGGYQSINDLIKDGGRLRRQRDIAHELITAIPGVTCVKPKAALYMFPRLDPKIYPIKNDQQFISELLQEEKVLLVQGTGFNWPHPDHFRLVFLPHEDDLREAVARIARFLENYRKRHNTNQLIKD

SEQ ID NO: 22975 - protein, 159 aa, Euphorbia esula
MAEQTEKAFLKQPKVFLASKKTGKGKRPGKGGNRFWKSIGLGFKTPREAIDGTYIDKKCPFTGTVSIRGRILAGTCHSAKMNRTIIVRRNYLHFIKKYQRYEKRHSNIPAHVSPCFRVKEGDHVIIGQCRPLSKTVRFNVLKVIPAGSSGGVKKAFTAI

SEQ ID NO: 22976 - protein, 153 aa, ASPERGILLUS NIDULANS FGSC A4
MAPPPVNKSEDEWRAVLSPGKQACPAHSKSPPWAMAAGCSIEMESEYDSHYPSKGVYTCAGCHAPLYKASHKFKSGCGWPAYFDSIPGAVQRHVDNSFGMERTEITCTNCGGHLGHVFKGEGYPTPTDERHCVNSISLKFTENEEGEGAKAKA

SEQ ID NO: 22977 - protein, 320 aa, Leifsonia xyli subsp. xyli str. CTCB07
MAWLVTGGAGYIGAHVVRAFLAEGIDVVVADDLSSGHREFVPAGVSFYRGTILDGTLLEAVFSENRISGVVHVAGYKYAGVSVQRPLHTYEQNVTATAVLLAVMQEAGVGSIVFSSSAAVYGTPEVELVTEDTPKNPESPYGESKLIGEWLLRDQGVARGLRHTSLRYFNVVGSGDPALRDTSPHNLFPLVFDALVAGRTPRINGDDYATPDGTCVRDYIHVADLAVSHVAAAKRLEAGEDIRAVYNLGSGDGVSVGEIMATVAEVTGIDFTPEMGPRRPGDPARIVASGELAARDLGWKMSHSLAEMVRSAWEARQAAS

SEQ ID NO: 22978 - protein, 537 aa, Pyrococcus horikoshii
MTKFIFVTGGVVSGLGKGITSASIGLLMKARGYKTTNIKIDPYINYDAGTMNPYQHGEVFVLDDGGEVDLDLGNYERFLDTNLTFEHNITTGKVYSTVIEKERRGEYLGATVQVIPHITDEIKRRIREIAKDYDIVVVEIGGTVGDIESMPFLEAARQMQLEEGRENVAFVHVTYVPKLKVVGEQKTKPTQHSVKELRSLGIQPDAIVARSEDPLEEEARKKISLFTNVPREAVVSAYDVEDTYEVPLLLEREGLGKYLIKRLKLEDREPDLREWEKMVAKYKALKETVEIAIVGKYVKLTDSYLSIKEALKHASVSNDVKVKIRWIEAEDIEEHGTKLLEGVDGIIVPGGFGARGAEGKIMTIKYARENDIPFLGICFGFQLTVVEFARNVLGMKGAHSTEIDPQTPYPVVDLMPEQRNLEKLGGTMRLGAYPVKIKKGTLAYRLYKKELVYERHRHRWEVNPDYIEAFEKAGLVFSGVAGDDERRMEILELPDKRYFIATQFHPEFKSRPMRPAPVFHGLVRAAKEYKQEKNATN

SEQ ID NO: 22979 - protein, 231 aa, Rubrobacter xylanophilus DSM 9941
MGERVDRERAAGRGGVEAVVFDLDGVLVDSEQLWDAARRELAGESGGRWHERATRDMMGMSSPEWSRYMHEELGVPLPPEEISRAVVERLLALYEERLPLLPGAREAVERLAGRWPLGLASSSNRPVIDRVLELSGLGRHFRATVSSEEVRRGKPAPDVYLEAARRLGAEPGRCAAVEDSTSGILAAKRAGMRVISIPNRAFPPEEEALRAADAVVPSLKKLLPETVAGER

SEQ ID NO: 22980 - protein, 306 aa, Thermococcus kodakarensis KOD1
MIESFREAFGRALVELGEENPNIVVLDADVKSSTKTAYFERAFPERFIQVGISEQDMVSMAGGLAIGGKIPVVSAFAAFLMRAWEQIRNTIARDNLNVKLIPTHSGFSDHMDGSSHQCLEDIALMRVLPNMTVVVPADAPSVPVLLKQVIELEGPVYMRLGRDHAPRVYDSPKLKLGKASVLRKGSDVLLVAAGVMVSVALETARKLEERGISAGVVDMHTIKPLDEETLLRLAAKVDLVVTLEEHSIHGGLGGAVAEVLSEKMPKRLIRIGTTEFGRSSRDYFSLLERYGLTAESVVKKVEVMLT

SEQ ID NO: 22981 - protein, 219 aa, Thermococcus kodakarensis KOD1
MSEALDPRTKLQSMLQPVNNFHLESSETCLEILSAVLEEKGEKDVVILSKGHSAPAFYVMLHEMGLLSDEELYSFADIDGLPSHVIRGLPFIEVSSGSLGQGLSVANGIAMAKRMDGEEGYVYVILGDGELDEGQVWEAAMTASHHRLDRVIAIVDRNYFQLTGGTEEILSKEPLADKWRAFGWEVMGVPNRKEELKKALETAKKLGGRPKVIIARWEV

SEQ ID NO: 22982 - protein, 82 aa, Triticum aestivum
MALSRRMAASALLLLVLLVATEMGAARTKVAEARDCLSQSFKFKGACLSSSNCAAVCRTEDFPDGECHAQHWDRKCFCKRPC

SEQ ID NO: 22983 - protein, 352 aa, Bacillus cereus E33L
MTIDRVCTIGPASNNKETLAQLINNGMKIVRLNLSHGTHESHKDIIRLVKSLDASIKILGDVQGPKIRLGEIKGEQITLQAGDSFMLRTQPGTGSNREASIDYEGIANDVKVGSRILMNDGEVELIVEKVSTDKIETKVKTGGNISSHKGVNLPGAIVSLPAITEKDKKDIQFLLEEDVDFIACSFVRKPSHIKEIRDFIQQYKETSPNLIAKIETMEAIENFQDICKEADGIMIARGDLGVELPFQFIPLLQKMMIQECNRTNTYVITATQMLQSMVDHSIPTRAEVTDVFQAVLDGTNAVMLSAESASGEHPVESVSTLRLVSEFAVHVKKDGPFVMKDVLELLHKSLDE

SEQ ID NO: 22984 - protein, 225 aa, Eruca sativa
GRGKIEIKRIENTTNRQVTFCKRRNGLLKKAYELSVLCDAEVALVVFSSRGRLYEYSNNSVKGTIERYKKAISDNTNTGTVAEINAQYYQQESAKLRQQIISIQNSNRQLMGETIGSMSPKELRNLEGRLDRSINRIRSKKNELLFAEIDYMHKREVDLHSDNQLLRTKIAENERNNPSMNLTPGGYEQIMQPSQTQSQPFDSRNYFQVAALQPNNHHYSSAGRQ

SEQ ID NO: 22985 - protein, 229 aa, Guillenia flavescens
RGKIEIKRIDNTTNRQVTFRKRRNGLLKKAYELSVLCDAEVALIVFSSRGRLYEYSNNSVKGTIERYKKAISDNSNTGSVAEINAQYYQQESAKLRQQIVSIQNSNRQLMGETIGSMIPKDLKTLESKLDKSITRIRSKKNELLFAEIDYMQKRSLQEVDLHNDNQLLRAKIAENERNNPSMNLMPGGSNYEQIMPLPQTQSQPFDSRNYFQVAALQPNNHHYSSAGRH

SEQ ID NO: 22986 - protein, 322 aa, Glycine max
MGSQGGAVQEPKTTTPLARQGSLYNLTLDEVHNQLGNLGKPLGSMNLDELLKSVWSAEAGGGGEASGWDFGVGDATNMPHGKAAASGSSLNPQGSLTLSRDLSRKTVDEVWKDMQLKKVTNRDKKIQERQATLGEMTLEDFLVKAGVVAEALPTTRGRAMSGVDSNGASSQHGHWLQYQQLPSSVQQPNVMGGYVAGHAIQQPFQVGVNLVLDAAYSETPASLKGALSDTQTLGRKRGVSGIVVEKTVERRQKRMIKNRESAARSRARRQAYTQELEIKVSRLEEENERLRRLNEMERALPSVPPPEPKPKHQLRRTSSAIF

SEQ ID NO: 22987 - protein, 250 aa, Lactobacillus acidophilus NCFM
MEHTWMMKYFAEFFGTIILVVFGNGAVANSVLTKTGGNSHDGQANGGWLLIAFSFGFGVMLPAMMFGSISGNHLNPAVTLAQACAGAFPWNQVLPYILVQMLGAIVGQLLLVAVYWPFIAKTSSDDAVFASFSTGDIADSKLNGFITEFVGTAILLFVAVGLYRGMFFKQSEDIANIGVGFLITALVMAVGGPTGPALNPARDLGPRIVYALCPLPHKGSAHWDYGWIPVVAPIAGGICGALLYKLAFGL

SEQ ID NO: 22988 - protein, 111 aa, Arabidopsis thaliana
  misc_feature (9)..(9): Xaa can be any naturally occurring amino acid
  misc_feature (46)..(46): Xaa can be any naturally occurring amino acid
  unsure (1)..(111): unsure at all Xaa locations
MKIQCDVCXKAPATVICCADEAALCPQCDIEIHAANKLASKHQRLXLIPSSTKFPRCDICQEKAAFIFCVEDRALLCRDSDESIHVANSRSANHQRSLGTGVKVASDLNYM

SEQ ID NO: 22989 - protein, 682 aa, Corynebacterium efficiens YS-314
MIWCRSFNEVTLVVPAGAGTETLWINEPIGPGEHTPGGSRGPHTPRAPMPRWIRGEPTTHGRREHEMTSASQPREFTVEAEYTIGENETCLTALIDQVKTRPYGVLFTRPANFEWVNVTAQEFLNEVFAVAKGIIATGVEQGDRVALLADTRYEWSVLDYAIWAAGAVSVPIYSSSSLSQVQWIIEDSGAVLAITETPDHTDLMKHLVLTEDGTPALKGSTSKLRRILEINSSALDTLRFEGRELSDDLVRERIEATRSADLASLVYTSGTTGRPKGCELTHHNWLAEVRALLTHPIGAIAVPGSRVLTFLPLAHVLARAVSLAFTIGGATQSHWSDFSTLALELQRARPNFILGVPRVFEKVRNSAATNAADGGPVKAALFARAEKAAIDYSRAQDTEEGPSRVLAAAHKVFDRLVYAKIRAAVGNSVQYAVTGGSAMSHDLLHFYRGIGIPIYEGYGLTETAAAAAIDFEDQKIGTVGKPLPGMTIRINDQGEILLKGQMLFRGYWNNPKATAESIVDGWFNTGDLGELLDSGHLVITGRKKDLIVTAGGKNVSPGPLEDIIRAHPLISQAMVVGDGKPFVGLLVTLDPDALKRWKLNRNIPESRTIEELATEPALRGEIQDAINNANATVSHSEAIKRFYILDRDLTEEDDELTPTLKVKRNVVYRRYADAIEHIYRGK

SEQ ID NO: 22990 - protein, 226 aa, Guillenia flavescens
RGKIEIKRIENTTNRQVTFCKRRNGLLKKAYELSVLCDAEVALIVFSSRGRLYEYSNNSVKGTIERYKKAISDNSNTGSVAEINAQYYQQESAKLRQQIVSIQNSNRQLMGETIGSMIPKDLKTLESKLDKSITRIRSKKNELLFAEIDYMQKREVDLHNDNQLLRAKIAENERNNPSMNLMPGGSNYEQIMPLPQTQSQPFDSRNYFQVAALQPNNHHYSSAGRH

SEQ ID NO: 22991 - protein, 621 aa, Corynebacterium efficiens YS-314
MRLLGRILKSTSALWPYYLGIVLASIVVAGLSLVSPFILREATDTIVAALQGEVTVESVTQTILVLAVALFVADILNTLMSNVGGYLGDIMSERMRQILSTRYYAKLLALPQKYFDNQVTGTIIARLDRSITGITQFMKGFSNNFFPMIITMVAVLIITAIFYWPLTILLALLFPIYMWVTALTSVRWQKMEREKNAQIDLANGRFAEVVGQMKVVKSFVSETRELDDFGSRYGKVVTIARPQSNWWHRMDFLRGAALNLIFLGIYLMLFYRTLNGFFSLGDMVLLIQLVNMAKQPVFMMSFIVDAAQRAVAGSRDYFDVMSEPVEPTANKELVRTTETSDTPALTLTVPEPLPPAEPALKFENVTFAYEENKPVIRDVTIEARHGERIALVGESGGGKSTLVNLLLGLYEPSAGRMLVCGEDVSSLTTEKLRASVGVVFQDASLFSGSIAENIAYGRPGASLDEIVAVAKKANAHEFIEAFPDGYDTVIGERGLKLSGGQKQRVAVARAMLKDAPVLVLDEATSALDTKSERAVQAGLEQLMANRTTLMIAHRLSTIADVDTIVTIRDGEVDEIGSPAELAVSGGIYAELLRLTQSTAEADRERLRSFGFTGDAPVEETD

SEQ ID NO: 22992 - protein, 608 aa, Streptomyces coelicolor A3(2)
MREFTSPPLALAPPVGGLADVVFEHALDDPRHIALGRKDDAGQWRDVTAGAFRDEVLALAKGLLAQGIRFGDRVAIMSRTRYEWTLFDFALWTIGAQVVPIYPTSSAEQCMWMLYDAEVTAAVVEHEDHAMTIATVIDRLPHLRGLWQLDSGAVQELYDAGAHLDDEVVHRHRKAVTPESVATVIYTSGTTGRPKGCVLTHGSFMYEADTVIERWEPVFHSKRGDEAATLLFLPLAHVFGRMVEVAAIRGRVRFGHQPQLNAAALLPDLAAFRPTFILAVPYIFEKVFNAARRKAEKEGKAGPFEKAVDVAVKYAEAVEAKAWGDGPGPSAGLRMQHQFFDKLVYSKVRAAMGGRIRNAMSGGSAMDRRLGLFFAGAGVQIYEGYGLTESTAAATANPPERTRYGTVGQPIPGTTVHIADDGEIWLNGDNVFEGYLNNPKATDETLHDGWLATGDLGALDEDGYLTITGRKKEILVTSGGKSVSPGLLEERVRDHPLVNQCIVVGNDRPYVAALITLDQEAVEHWLTMRNKPRMSPADLVHDADLETEVRRAVVAANTLVSQAESIRTFRILAQPFTEEHGLLTPSLKLKRKAIENAYGTEVEALYTA

SEQ ID NO: 22993 - protein, 788 aa, Rhodopseudomonas palustris CGA009
MSSHTVSTSLAVATLGTPRIGPRRELKSALESFWAGKSTEADLLKVAAALRAANWARQSARGVSVIPSNDFSLYDQVLDTSVMVGAIPEIYGWRGGPVSLATYFAMARGTQAEIAGHGCANGHHHGDSTPQGVPAQEMTKWFDTNYHYMVPEFSAGQSFQLASVKPLEEYREAKALGYDTRPVLLGPVTYLKLGKSADAGLDVLSLLPKLVPVYIEILGRLAAAGAKWVQLDEPALVLDLDDRERLAFRDAYGQIARELPHLDIMLTTYFGGLGDNLDTALALPIAGLHLDLVRAPKQINAVIAKGPKDLVLSLGVVDGRNIWRADLPDLLDRVEPIVQQRGAERVQLAPSCSLLHVPVDLELETGLDPDLKSWLSFSLQKMGELSTLSRALSGDRAAVQDQLSASAKAAATRRKSPKVHDMAVSSRAAAVTPAMTQRNSGFAARATLQHQRLQLPAFPTTTIGSFPQTAQIRQARAAHAKGAISDADYNTFLRGETARAIQWQEKVGLDVLVHGEFERNDMVQYFGEQLSGFAFTKEGWVQSYGSRCVRPPILFGDVSRPKPMTVGWWKYAQSLTGRPMKGMLTGPVTILNWSFVRDDVPRSTACLQIALAIRDEVGDLEQAGATMIQIDEAALREGLPLRRSEWKGYLDWAVECFRLCSSGVKDETQIHTHMCYSEFNDIIDAIAAMDADVISIETSRSKMELLDAFKTYKYPNEIGPGVYDIHSPRVPSVEEMTTLLQLARQRLSDGQLWVNPDCGLKTRGWDEVQGALVNMVEAARQIRQVSAG

SEQ ID NO: 22994 - protein, 191 aa, Schizosaccharomyces pombe
MTENYGSMEHRKKSFRNNENLEQQFHPLREELDNAGPINDRTSELSLEGVSKAEAIASTWSKRSIIVAYLGLYLLSFASSLEQQTTYSLQRYATSNFSAHSNLATINLVGNILLAVVRAPMVKAADVFGRSESLSLALGMTVLGYLSLAFSRNIQMFTVAYILYICGQTGLGLLSQLIIADTSSLLNRGIL

SEQ ID NO: 22995 - protein, 434 aa, Triticum aestivum
  misc_feature (233)..(233): Xaa can be any naturally occurring amino acid
  misc_feature (358)..(358): Xaa can be any naturally occurring amino acid
  misc_feature (368)..(368): Xaa can be any naturally occurring amino acid
  misc_feature (373)..(373): Xaa can be any naturally occurring amino acid
  misc_feature (405)..(405): Xaa can be any naturally occurring amino acid
  misc_feature (410)..(410): Xaa can be any naturally occurring amino acid
  misc_feature (417)..(417): Xaa can be any naturally occurring amino acid
  misc_feature (419)..(420): Xaa can be any naturally occurring amino acid
  misc_feature (424)..(424): Xaa can be any naturally occurring amino acid
  unsure (1)..(434): unsure at all Xaa locations
TASSIKAYPGDIVEQVCTKKQAGTGPEFPGYRRPTRPISMATSPSDVLAVELLQRECHIKTPLRVVPLFEKLADLEAAPAALARLFSIDWYRERINGKQEVMIGYSDSGKDAGRLSAAWQMYKAQEDLVKVAKQFGVKLTMFHGRGGTVGRGGGPTHLAILSQPPDTINGSLRVTVQGEVIEQSFGEEHLCFRTLQRFTAATLEHGMRPPISPKPEWRALLDEMAVVATEEIXYRSIVFQEPRFVEYFPLATPETEYGRMNIGSRPSKRKPSGGIESLRAIPWIFAWTQTRFHLPVWLGFGGAFKHILKKDIRNFHMLQEMYNEWPFFRVTIDLVEMVFAKGNPGIAALYDRLLVSRXLQPLGEKLRXNYEEXQKLLLQVAGHKDLLKVILPEAAVRLRDAYITXMNVCXAYTLKRXVXXLHVXSPHLQGVWHR

SEQ ID NO: 22996 - protein, 327 aa, Schizosaccharomyces pombe
MTSGSPKITNLLTRVKRIIPPLLDTFHKGQAGRVGVFGGCQHYTGAPYYSSMSSMLFGSDQSHIFCEKEAANVIKSYSPDLIVHPFLREKDKAGPEDSVDKCFELIKPMMGRLHAIVIGPGLGRDEWMQEIMAKVIEYARKNDMPMVIDADGLWLIQQRPELVSGYHNVILTPNVIEFKRLCDKLDIKSDGPDACNQLAGKLNLLIIQKGQSDIISDGATAYACSVPGGLKRCGGQGDILTGILATFLAWRHAYLSKEWDTEGNMDAKECLFLAAFGASACTRWCSRLAFKECGRATQSTDLVRHVGKAYNALMEDEIPSVEEKIKD

SEQ ID NO: 22997 - protein, 499 aa, GIBBERELLA ZEAE PH-1
MANPFQRPFQLENESLFHCTSLINGDFVSAKEGKTFNVVDPGSGKTWASCPDCTASDVDSAVASSYETFKTYSKTTPRFRAQTLMKWHNLILAAREDLARILVHETGKTLVEARGEIDYALTFVWWFSGEADRAHGTSMSCAIPGRRAVTIKQPIGVAAALVPWNFPIALALRKAAAALAAGCTMVVKPSPETPLTCVSIAHLALEAGFPRGALNVVTTSLENTPTVAEALCLDARVKKVSFTGSTRVGKIIASFCAPNLKKTTFELGGNCPFIVFDDADVGQAVSQLMPLKWRHAGQACITSNRVFVHSSIYDTFVEKVVQETRGLKLGHGMEEGSTMGALTTPRGLDKAEELYQDAISKGAKTVLGTGKREEGQGYFMAPTILTEMEDDMLMTHEEIFAPVLGFYRFESEEEVVQRANDTPLGLASYIFTKNVDRLWRLFENLDAGMIGLNAGNSSSAEAPFGGIKDSGHGKESGKDVAIDEFLITKTATLTIDGHY

SEQ ID NO: 22998 - protein, 664 aa, Desulfovibrio vulgaris subsp. vulgaris str. Hildenborough
MPSRKDFANAIRVLSMDAVEKAKSGHPGAPMGMANIAEALWRGPLRHNPANPHWPDRDRFVLSNGHGSMLIYALLHLTGYAVSMDDIRDFRQMGSRTPGHPEYGITPGVETTTGPLGQGIATAVGMAMAERMLATGFNRDGFPVVDHHTYVFLGDGCMMEGISHEACSLAGTLGLGKLIAFYDDNGISIDGEVKGWFADDTPARFEAYGWHVVRDVDGHDAAALDAALAAARAQTGKPSLICCKTCIGSGAPNKCGSHDCHGSPLGEAEIAAAREAMNWPHPPFEIPADIYAAWDCRDKGAKDEAAWREMFEGYRKAYPDLAAAFERRMSGELPANWEAEVEACIAATDSAAEKLATRVASRNALNGIAPLLPELVGGSADLTGSVGTWHKGSVRLTPDNWDANYISYGVREFAMGAIMNGLTLHGGFIPYAGTFLIFSDYAKNAIRLSALMGIRVVWVLTHDSIGVGEDGPTHQPVEQLGGLRLIPNVSVWRPCDTVETVAAWKSAIECATGPTCISLTRQGVPHIARTAEQRAAIGRGGYILRDCAGKPEAIIMATGSEVQLAVEAAAELEKRGRRVRVVSMPSSSVFDRQDAAYRESVLPSDVRVRVAVEAAASDAWWKYVGLDGKVVGMTGFGESAPGGVLFKHFGFTVDNVVDTVTSLL

SEQ ID NO: 22999 - protein, 318 aa, Corynebacterium glutamicum ATCC 13032
MTNLTSTHEVLAIGRLGVDIYPLQSGVGLADVQSFGKYLGGSAANVSVAAARHGHNSALLSRVGNDPFGEYLLAELERLGVDNQYVATDQTFKTPVTFCEIFPPDDFPLYFYREPKAPDLNIESADVSLDDVREADILWFTLTGFSEEPSRGTHREILTTRANRRHTIFDLDYRPMFWESPEEATKQAEWALQHSTVAVGNKEECEIAVGETEPERAGRALLERGVELAIVKQGPKGVMAMTKDETVEVPPFFVDVINGLGAGDAFGGALCHGLLSEWPLEKVLRFANTAGALVASRLECSTAMPTTDEVEASLNQKV

SEQ ID NO: 23000 - protein, 251 aa, Campylobacter jejuni RM1221
MKRIVVKVGSHVISEENTLSFERLKNLVAFLAKLMEKYEVILVTSAAISAGHTKLDIDRKNLINKQVLAAIGQPFLISVYNELLAKFNKLGGQILLTGKDFDSRKATKHAKNAIDMMINLGILPIINENDATAIEEIVFGDNDSLSAYATHFFDVDLLVILSDIDGFYDKNPSEFSDAKRLEKITHIKEEWLQATIKTGSEHGTGGIVTKLKAAKFLLEHNKKMFLASGFDLSVAKTFLLEDKQIGGTLFE

SEQ ID NO: 23001 - protein, 223 aa, Thermoplasma volcanium GSS1
MKIFLDTANISEIKEGIDLGLVDGVTTNPTLISKEAGGSKKYAEIIKEILKIVDGPVSVEVVSTKSDGMVEEARKIHALGDNAVVKIPMTDEGLKAIRKLSQENIETNCTLVFNPIQALLAAKSGATYVSPFVGRLDDIGQDGMQIIDEIKTIFNNYIIKTQILVASVRNPIHVLRAAIIGADVVTIPFSVLKLLIKHPKTDEGLTRFLEDWKKVSPDGKFII

SEQ ID NO: 23002 - protein, 437 aa, Saccharomyces cerevisiae
MLEHQLTQEDLEFDKKHIWHPYTSITTPLKVYPITKAEGSYLYLDNGTKVVDGMASWWCVQQGYNNHRLNAAAISQINKMSHVMFGGITHKAGIDFCKKLLALLPDTLECALLADSGSISVDIAMKMALRYHHSLGNTTKKRFLTIKKGYHGDAFGAVSVCDPVNSRHNTYNGFLAENIFCKAPEVRFDCREKDVEKLVEELDVKPFAEIIDKHHSEISGVVMESIVQGAGGLRMYHPYFLKRVRALCNDFNILLILDEVAVGLGRTGMLFGFEHAGIVPDIVCLGKTLTAGYLTLSATVTTREIGDQISSGPEGCFMHGQTYMANPLACAVASENLSILMEGKWKSQVRQIEVQLKKELVPLLEHPIVADVRILGAIGVVEVTKRVNVEVLQEKFIKAGAWIRPFGNIIYILPPYIITSEELTVLTEAIRSVLDFI

SEQ ID NO: 23003 - protein, 227 aa, Leifsonia xyli subsp. xyli str. CTCB07
MTSRILVVDDDTALAEMIGIVLRTEGFDPVFCEDGSEAVGIFRESKPDLVLLDLMLPGLDGIEVCSSIRAESGTPIIMLTAKSDTADVVKGLESGADDYMVKPFNPKELVARIRTRLRPAPVAPPAEQLCIGDLLVDVAGHEVRRGEARIALTPLEFDLLLALAAKPQQVFTREMLLEQVWGYHYKADTRLVNVHVQRLRAKVERDPDNPKIVMTVRGVGYRAGTAT

SEQ ID NO: 23004 - protein, 316 aa, Thermoplasma volcanium GSS1
MKTESLRDTYGKELVELGRKDPDIVVLDADLSSSTKTGYFAKEFPERFFNMGISEQSMVTTAAGLAISGKKPFVSTFAIFLMRTYEQIRQSICYNDVPVRFVVTHGGITVGEDGATHQIVEDVGIMSGLPNMSVIVPSDSVETKSVIDYLENIKHPHYVRLSREKFPVINDLSYEFKIGRGYVVKDGSDATVIANGIMVSKALEAANALKDKGIDLRIINMPSVKPIDKDIIIKAARETGRIITAEEHSIYNGLGSRVSEVVSENYPVIVKRIGMRDTFGKSGKAMELFSYFHMDVKDIIDYVIQSLEEKSYENIS

SEQ ID NO: 23005 - protein, 265 aa, Rosa hybrid cultivar
LVQFGAFIVLCGATHLINLWTFSVYSRTVAIVMATAKVFTAAVSCATALMLVHIIPDLLSVKTRELFLKNKAAELDREMGLIRTQEETGRHVRMLTHEIRSTLDRHIILKTTLVELGRILTLEECALWMPTRTGLELQLSYTLHQQNPVGYTVPIHLPVINQVFNNNGTVKISPNSPVARLRPIAGKHIPGEVVAVRVPLLHLSNFQINDWPELSTKRYALMVLVLPSDSARQWHVHELELVEVVADQVAVALSHAAILEESMRA

SEQ ID NO: 23006 - protein, 273 aa, Thermoplasma volcanium GSS1
MEATQIDLSDIALKIRREIIRMVYNAQSGHPGGSLSVTDILTVLYFKEMNIDPNKPKDPKRDRLILSKGHASPALYATLAIRGFFPVSDLSGFRKLDSHLEGHVTREVPGVEVSTGSLGQGLGIGVGMALAGRLDGMQYRVYVILGDGEMEEGNVWESLMAGYKYNLNNITAILDKNGIQLDGYTKDIMPMHDIKSMVESFGWNVIEIDGHNYDQIHEAVQASKNSDRPTFIIANTVKGKGVDFMENNPKYHGSPPESKELFERAMKQLGEQI

SEQ ID NO: 23007 - protein, 346 aa, GIBBERELLA ZEAE PH-1
MASGLKPTILHIGDPIKYNHKLYQKLEEKFTIIRPSAEERQRGLFLEALRQKKWGDFQAVMRPFWITGGEMGRWDRELIPLLPTSVKVYASAGAGYDWADVDVMAEAGILYCNGAAASSEAVADMALYHIISVFRNMQWSNMAARGSEEEFRDAHAHTQLTAYNPRGHTLGMIGLGNIGYQIALKTHKALGMRIAYHDPFRKSPEQEAAVEATHYAKLGDMLAIADCVVIAAPGAGGKKILGRAEIAKMKEGSRLVNIARGSLVDEEAVADAMDSGHLFAVGLDVFEDEPRPNPRLQKMRNATLTCHTAGGALDTSIGFERLAMENIIAVLEGREPLTPVNKHLLN

SEQ ID NO: 23008 - protein, 402 aa, Vigna radiata
MEFQCLALFFSLIVILMAAQAALPPEVYWERMLPNTPIPKVIRQFSELDGGQEIASKDEFLLFGSGDKKNKDKLFHFGCGDKKNELQDDVKDISPEDENALLFYTKYANKKNELQDDVQDISPEDENALLFYTKYANKKNELQDDVQDISPEDENALLLYTKYANKKNGVVLRRIGPIVNHHHHDHLKPSNFFSEERLRRGAKLDVLFRKRNFSTPLLTREIAEHLPFSSEKINEILEILAVKPDSKDAKNVEETLNHCEKPALKGEEKQCATSVESMVDFVTSKLGNNARVTSTELEIGSKFQKFIVKDGVKILAEEKIIACHPMSYPYVVFYCHKMANSTAHFLPLEGEDGTRVKAVAICHKDTSQWDPHHVAFQVLKVKPGTSSACHFFPEGHLVWYAK

SEQ ID NO: 23009 - protein, 437 aa, Saccharomyces cerevisiae
MCEHQLTQEDLEFDKKHIWHPYTSITTPLKVYPVTKAEGSYLYLDNGTKVVDGMASWWCVQQGYNNHRLNAAAISQINKMSHVMFGGITHKAGIDFCKKLLALLPDTLECALLADSGSISVDIAMKMALRYHHSLGNTTKKRFLTIKKGYHGDAFGAVSVCDPVNSRHNTYNGFLAENIFCKAPEVRFDCREKDVEKLVEELDVKPFAEIIDKHHSEISGVVMESIVQGAGGLRMYHPYFLKRVRALCNDFNILLILDEVAVGLGRTGMLFGFEHAGIVPDIVCLGKTLTAGYLTLSATVTTREIGDQISSGPEGCFMHGQTYMANPLACAVASENLSILMEGKWKSQVRQIEVQLKKELVPLLEHPIVADVRILGAIGVVEVTKRVNVEVLQEQFIKAGAWIRPFGNIIYILPPYIITSEELTVLTEAIRSVLDFI

SEQ ID NO: 23010 - protein, 440 aa, Vigna radiata
MEFQCLALFFSLIVILMAAQASLPSEVYWERKLPNTPIPKVIRQFSKQDGGKDIASKDEFLLFGSGDKKNKDKLLRFGCGDKENKLQDDVQDISPEDENLLLIYDRYAKNKLQDDLQDISPEDENFLLFYDRYAKNKLQDDVQDISPEDENLLLFYDRYAKNKLQDNVQDISPEDENLLDYEKSKLQDDVQDISPEDENLSGYKKNGVVLRGIGPIANHHHHDHLKPSSYFSEEGLRRGAKLVMLFHKRKFSTPLLTREIAEHLPFSSEKINEILEILAVKPDSKNAKNVEKTLNNCEEPALKGEEKHCATSVESMVDFVTSKLGNNARVTSTELEIESKFQKFIVKDGVKILAEEEIIACHPMSYPYVVFYCHKMSNSTAHVVPLEGEDGTRVKAIVICHKDTSQWDPDHVAFQVLKVKPGTSPVCHFFPNGHLLWYAK

SEQ ID NO: 23011 - protein, 506 aa, Saccharomyces cerevisiae
MASMFRPPESNRSHQKTPKLTLPVNLVQNAKSTNDGQHLNRSPYSSVNESPYSNNSTSATSTTSSMASNSTLLYNRSSTTTIKNRPVPPPLPPLVLTQKKDGIEYRVAGDSQLSERFSNLHVDITYKELLSSAPISTKLSNIDTTFIKKDLDTPEGEDSYPSTLLSAYDFSSSGSNSAPLSANNIISCSNLIQGKDVDQLEEEAWRFGHLKDEITTLGILGEGAGGSVAKCRLKNGKKVFALKTINTMNTDSEYQKQIFRELQFNKSFKSDYIVQYYGMFTDEQSSSIYIAMEYMGGKSLEATYKNLLKRGGRISERVIGKIAESVLRGLSYLHERKVIHRDIKPQNILLNEKGEIKLCDFGVSGEAVNSLAMTFTGTSFYMAPERIQGQPYSVTCDVWSLGLTLLEVAGGRFPFESDKITQNVAPIELLTMILTFSPQLKDEPELDISWSKTFRSFIDYCLKKDARERPSPRQMLKHPWIVGQMKKKVNMERFVKKCWEKEKDGI

SEQ ID NO: 23012 - protein, 464 aa, Listeria innocua Clip11262
MLYSKENKESYLEPVFGSSAEDRDIPKYTLAKEPLEPRIAYRLVKDELLDEGSARQNLATFCQTYMEDEATKLMSETLEKNAIDKSEYPRTAELENRCVNIIADLWHAPKDQKFMGTSTIGSSEACMLGGMAMKFAWRKRAEKLGLDIYAQKPNLVISSGYQVCWEKFCVYWDIDMRVVPMDKDHMQLNTDQVLDYVDEYTIGVVGILGITYTGRYDDIYALNEKLEEYNSKTDYKVYIHVDAASGGFFTPFVEPDIIWDFRLKNVISINTSGHKYGLVYPGIGWVLWKDESYLPEELIFKVSYLGGEMPTMQINFSRSASHIIGQYYNFLRYGFEGYRTIHQKTSDVAQYLAHAVEQTGYFDIYNDGSHLPIVCYKLKDDANVKWTLYDLADRLQMRGWQVPAYPLPKNLENIIIQRYVCRADLGFNMAEEFIQDFQASIQELNNAHILFHDTQQSGVHGFTH

SEQ ID NO: 23013 - protein, 282 aa, Lactobacillus acidophilus NCFM
MTELTEDILKKVIKKRSSNTHKGNYGRILLIGGSENYGGAIIMSTEAAVNSGAGLTAVATHHLNLSALHSRIPEAMFIDWHDAKLADLIKNMDVVVCGSGLGMSDFAKQILVILRRCTSEKQTVILDASALDLISEDKSLLPVNAGHLILTPHQMEWQRLSQIRIPFQTDSANIDALKQLIPDSNAVLVLKSNHTHIYDGTGRTFVNPIGNPGMATGGMGDTLAGIIGGFVAQFGPSVDTISAAVYIHSLAGDLINKDNYVVKPTEVSKVLPKLMKKYSELE

SEQ ID NO: 23014 - protein, 149 aa, Zea mays
  misc_feature (39)..(39): Xaa can be any naturally occurring amino acid
  misc_feature (74)..(74): Xaa can be any naturally occurring amino acid
  unsure (1)..(149): unsure at all Xaa locations
FLMFPRELQLSGESVKLMKLGEAVAKGTINNETLGYFTXRVYLFLTCLGIDKDRLHSRQHLPNEMAHYIVDCWXAEIDYSYGWIECVGITDRSAYDLITHSEKSGVSWKNRRKRIRLVYSCRYICPSLKFYVVSSEIICAALIMFLRHQ

SEQ ID NO: 23015 - protein, 148 aa, Oryza sativa
TRVTSSSHLTFPLSPPIARAWRLMGAVAARSMASWFGHVEPAAKDPILGVTEAFLADPSPDKVNVGVGAYRDDSGKPVVLECVREAERRIAGSMNMEYLPMGGSIKMIEESLKLAYGENCEFIKDQRIAAVQALSGTGACRLFADFQK

SEQ ID NO: 23016 - protein, 498 aa, Mycobacterium abscessus
MDAVEAAQRPGGTMTNHLLAPAHHVKERLSSVIMVPAPHAVDDRWRRWSRDWPVRELAPAPAGSGLKAVRGDAGLPFVGHTLDYIRFGSDFSRERYDRLGSVSWMGAFGTKMVVIAGPDATREAFTSEAKAFSQDGWSFLIDAFFHRGLMLMSFDEHLMHRRIMQEAFTRPRLTGYVEQVTPCVRSAVPAWPVGPSVRIYPLLKELTLDIATDVFMGGRGKDESDAVNKAFVATVRAASSLVRAPLPGTRFRAGVQGRRVLEDYFFRHLPAARAGETEDLFAALCQATTEDGERFSDEDVVNHMIFLMMAAHDTSTITTTAVTYFLAKYPQWQEAAAAEAAAIGDGLPDIEALEKMTVIDRVIKEALRLLAPVPLVMRKTVRDVAIDGYHIPSNTLCAITPAVNHFDRTIWNDPERFDPSRFDEPRREDQHHRFAWVPFGGGAHKCIGMQFGTLEVKAILHRMLRSFTWKVPENYHVRWDNTSLPIPVDGLPLEMKRR

SEQ ID NO: 23017 - protein, 218 aa, Eustoma grandiflorum
MGRGKIDIKRIENNTNRQVTFCKRRNGLLKKAYELSVLCDAEVALIIFSSRGRVYEYANNNIKSTIDRYRKATSDASTVFTTQEINAQFYQQESKKLRQQIQVLQNSNRHLMGEGLSSLNVKELKQLESRLERGISRTRSKKHEMILAEVEYLQKREIQLEQENACIRSKIAEQERLQELSMMPPGQDYNAMQAYLAQNFMQVNGLMEGPPVYSMLHK

SEQ ID NO: 23018 - protein, 612 aa, Corynebacterium efficiens YS-314
MQGRRDVENVSTLVGMTDTTPLSSDLIPESTARPVVDAEGFIIEHESEEYHTPTPAPGEQPWEKHDREWYKDAVFYEVLVRAFYDPDNTGSGTLKGLTEKLDYIQWLGVDCIWVPPFYDSPLRDGGYDIRNFREILPEFGTVEDFVELVDQAHRRGLRVITDLVMNHTSDQHPWFQQSRTDPDGPYGDFYVWGDDPEMYKEARIIFVDTEESNWTYDPVRKQYYWHRFFSHQPDLNYDNPAVQEAMLDVLRFWLDLGLDGFRLDAVPYLFEREGTNGENLPETHEFLKRCRRVIDEEYPGRIVLAEANQWPHDVVEYFGEKEKGDECHMAFHFPLMPRIFMGVRQGSRTPVSEILEHTPDIPKTAQWGIFLRNHDELTLEMVSEEERAYMYQQFAPEPRMRANVGIRRRLATLVDGDRNQLELLHGLLLSLPGSPVLYYGDEIGMGDNIWLPDRDGVRTPMQWSNDRNGGFSKADPERLYLPAIQNDRFGYAQVNVETQLKQENSLLQWIRNQIMIRKQYKAFGKGTYREIDSTNEAVLTFLREYKGQTILCVNNMSKLPQAVALDLSEFAGITPREVSGGQYFPTIGERQCVFTLAPHGFFWLDLTGEEEE

SEQ ID NO: 23019 - protein, 225 aa, Nicotiana tabacum
MAVKNKVSNGNLKGGNVKTDGVKEVHYRGVRKRPWGRYAAEIRDPGKKSRVWLGTFDTAEEAAKAYDTAAREFRGPKAKTNFPSPTENQSPSHSSTVESSSGENGVHAPPHAPLELDLTRRLGSVAADGGDNCRRSGEVGYPIFHQQPTVAVLPNGQPVLLFDSLWRAGVVNRPQPYHVTPMGFNGVNAGVGPTVSDSSSAVEENQYDGKRGIDLDLNLAPPMEF

SEQ ID NO: 23020 - protein, 291 aa, Nicotiana tabacum
MASPQENCTTLDLIRQHLLDDNVFMEHYCPQPILYSQSSSSSESLNSIASELNNETFSFEPTLKYADTAQSSNLDISSFFNNSKTEFDSFEFETKPNVSAARISSNSPKQTSFKERKPSLNIAIPMKQQEVVQKVEVVPTEKKHYRGVRQRPWGKFAAEIRDPNRKGTRVWLGTFDTAIEAAKAYDRAAFKLRGSKAIVNFPLEVANFKQQDNEILQPANSGRKRMRETENEEIVIKKEVKREERVPAAAAPLTPSSWSAIWEGEDGKGIFEVPPLSPLSPHMAYSQLVMI

SEQ ID NO: 23021 - protein, 233 aa, Nicotiana tabacum
MYQPISTELPPTSFSSLMPCLTDTWGDLPLKVDDSEDMVIYGLLSDALTAGWTPFNLTSTEIKAEPREEIEPATIPVPSVAPPAETTTAQAVVPKGRHYRGVRQRPWGKFAAEIRDPAKNGARVWLGTYETAEEAALAYDKAAYRMRGSKALLNFPHRIGLNEPEPVRLTAKRRSPEPASSSISSALENGSPKRRRKAVAAKKAELEVQSRSNAMQVGCQMEQFPVGEQLLVS

SEQ ID NO: 23022 - protein, 356 aa, Glycine max
MKKGNLGLGLKLSVPVSDQSNFARFLTESGTFKDGDLLVNRDGVRIVSQNDVEAPPPIKPTDNQLTLADIDVIKVVGKGNGGVVQLVQHKWTSQFFALKVIQMNIEESMRKQIAQELKINQQAQCPYVVVCYQSFYENGVISIILEYMDGGSLADLLKKVKTIPEDYLAAICKQVLKGLVYLHHEKHIIHRDLKPSNLLINHIGEVKITDFGVSAIMESTSGQANTFIGTYNYMSPERINGSQRGYNYKSDIWSLGLILLECALGRFPYAPPDQSETWESIFELIETIVDKPPPIPPSEQFSTEFCSFISACLQKDPKDRLSAQELMAHPFVNMYDDLEVDLSAYFSNAGSPLATL

SEQ ID NO: 23023 - protein, 217 aa, Arabidopsis thaliana
MGGRFGVLLVLFLLSWSCHATNPILLEPFESAHDDNQVCELCDKYVTLVIDYLQDYDNQNELVEALHISCSQIPPLKKQCLSMVDHYTQLFFTQVSTIKSDQICKRLNLCQAVTPAFASQVHQGNCEACRETVSEVVTKLKDPETKLKIIRLLLKECKSLNNYQDKCKKMVFEYGPLMLTDLQKFLEKKDVCTILHVCPGPATHRDYVPAVESLADS

SEQ ID NO: 23024 - protein, 136 aa, Pisum sativum
NTDITSNGERVKCMQVWPPIGKKKFETLSYLPPLTRDQLLKEVEYLLRKGWVPCLEFELLKGFVYGEHNKSPRYYDGRYWTMWKLPMFGTTDPAQVVKEVDEVVAAYPEAFVRVIGFNNVRQVQCISFIAHTPESY

SEQ ID NO: 23025 - protein, 394 aa, Pisum sativum
MEGGGGAPAADAVMEDAAPQQQEPQQQAAMGIENIPATLSHGGRFIQYNIFGNIFEVTAKYRPPIMPIGKGAYGIVCSAHNSETNEHVAVKKIANAFDNKIDAKRTLREIKLVRHMDHENVVAIRDIVPPPQREVFNDVYIAYELMDTDLHQIIRSNQALSEEHCQYFLYQILRGLKYIHSANVLHRDLKPSNLLLNANCDLKICDFGLARVTSETDFMTEYVVTRWYRAPELLLNSSDYTAAIDVWSVGCIFMELMDRKPLFPGRDHVHQLRLLMELIGTPSEADLGFLNENAKRYIRQLPLYRRQSFQEKFPHVHPEAIDLVEKMLTFDPRQRITVENALAHPYLTSLHDISDEPVCTTPFSFDFEQHALTEEQMKELIYREALAFNPEYQQ

SEQ ID NO: 23026 - protein, 96 aa, Tatlockia micdadei
MKIRPLHDRVVVRRMEEERTTAGGIVIPDSATEKPTRGEIIAVGPGKVLENGDVRALAVKVGDVVLFGKYSGTEVKISGQELVVMREDDIMGVIEK

SEQ ID NO: 23027 - protein, 423 aa, Colwellia psychrerythraea 34H
MKAFFTLVIILLSSTTFASEQAEEIFAQLTPSLYQIKLIDKASGEKSSIGSGFQISEDGIIATNYHVISSYARHPEKYRIEYLDHQGKMAEVELVSVDVINDLALVKRQVEGEMPYFLLSDQKPIKGEKLFALGNPHDLGMIVVPGTYNGLKKESFNERIHFTGSINSGMSGGPVVNKSEKVVGINVATSGNQIGFLVPHDKLVKLFNDYNKEAPTDIKQQMAEQLLANQNKLMTALLNNTWQSKELAGKAMIPIIEVPFIRCWGDSNADKTDALILAAIANCSLDENTYLSSHFFTGSVEIEFRYMQAKNLSDNKFYHLYQQQIARAGAGNRAGKNDVSEYQCHNDLVTPSSTANTNKAINNKSIFCTRAYKDFPGLFDVLYLGASVDKNQQALVSHFTIAGVSQENAMAFTGKFMEAVSWK

SEQ ID NO: 23028 - protein, 278 aa, Ralstonia metallidurans CH34
MMRIKVAAIQIDSRQDREANLAALEHWILAAASDGAKLIVTPEYSDVRGDANALQAAASAVPGPVSEHISSLAQRTGCWIHLGSMHERLPGETRLGNSGITFAPDGGIAARYRKVHLYDAVVNGKPYRESADFAPGDGLHTVDAAGLTLGLSICYDLRFGELYRTLRARGANVLLVPAAFNVHTGRDHWETLLRARAIENQCYVIAAAQIGGPGPALPCLGRSMIIDPWGTVLACMPDTTGFITAELDTERVAGLREALPAWEHRRTDLYFGGIQNSG

SEQ ID NO: 23029 - protein, 275 aa, Vigna radiata
MEFQCLALFFSLIVILMAAQAALPPEVYWERMLPNTPIPKVIRQFSELGPIVNHHHHDHLKPSNFFSEERLRRGAKLDVLFRKRNFSTPLLTREIAEHLPFSSEKINEILEILAVKPDSKDAKNVEETLNHCEKPALKGEEKQCATSVESMVDFVTSKLGNNARVTSTELEIGSKFQKFIVKDGVKILAEEKIIACHPMSYPYVVFYCHKMANSTAHFLPLEGEDGTRVKAVAICHKDTSQWDPHHVAFQVLKVKPGTSSACHFFPEGHLVWYAK

SEQ ID NO: 23030 - protein, 332 aa, uncultured archaeon GZfos26G2
MEILHDEDVDDSILRDKTIAVMGYGAQGDAQANCLKDSGINVVIGETEILGGNKNPSWEKAKEDGFEVLPIDKAAEKGDVVHILLPDEVQPAIYENQIKPQLKAGKALCFSHGFNICFKRIVPPEDVDVIMVAPKAPGTEERKAYLEGFGVPGLVAVKQNPSGEAREVALAMTKAMHWTKAGILECTFEQETYEDLFGEQCVLCGGLVELMRNGFEVLVEAGYPPEMAYFECVHEMKLIVDLVWQGGIKRMAEVISNTAEYGMWAVGHQIIGPEVKEKMKEALKRVENGEFANEWVDEYKRGIPFLKASREKMGEHQVETVGAEIRKLFAQK

SEQ ID NO: 23031 - protein, 330 aa, Escherichia coli
TIKVGINGFGRIGRIVFRAAQKRSDIEIVAINDLLDADYMAYMLKYDSTHGRFDGTVEVKDGHLIVNGKKIRVTAERDPANLKWDEVGVDVVAEATGLFLTDETARKHITAGAKKVVMTGPSKDNTPMFVKGANFDKYAGQDIVSNASCTTNCLAPLAKVINDNFGIIEGLMTTVHATTATQKTVDGPSHKDWRGGRGASQNIIPSSTGAAKAVGKVLPELNGKLTGMAFRVPTPNVSVVDLTVRLEKAATYEQIKAAVKAAAEGEMKGVLGYTEDDVVSTDFNGEVCTSVFDAKAGIALNDNFVKLVSWYDTETGYSNKVLDLIAHISK

SEQ ID NO: 23032 - protein, 131 aa, GIBBERELLA ZEAE PH-1
MVSGDAPKGQMSILDALKGVLKLSLMHDGLARGLREASKALDRRQAHMCVLNENCEEEAYKKLVVALCNEHNIPLIQIPDGKQLGEWAGLCVLDREGNARKVVNCSCVVVKDWGEESQERSILLNYFQTEQ

SEQ ID NO: 23033 - protein, 261 aa, Corynebacterium diphtheriae NCTC 13129
MLALLRFVANLTSMTTGKLILLRHGQSEWNASNQFTGWVDVNLTEKGEAEAKRGGELLKAQGVLPSVVYTSLLRRAIRTANIALNAADRHWIPVVRDWRLNERHYGALQGLNKAETKEKYGDEQFMAWRRSYGTPPPELEDSSEFSQANDPRYANLDVVPRTECLKDVVERFVPYFKEEILPRVKNGETVLIAAHGNSLRALVKHLDNISDADIAELNIPTGIPLVYELDEAGTVLNPGGTYLDPEAAAAGAAAVAAQGAK

SEQ ID NO: 23034 - protein, 292 aa, Helicobacter pylori J99
MIRASVLQHAYCGSRKKTIEHTANLLEQALKKHPKTNLVVLQELNPYSYFCQSENPKFFDLGEYFEEDKAFFSALAQKFQVVLIASLFEKRAKGLYHNSAVVFEKDGSIAGVYRKMHIPDDPGFYEKFYFTPGDLGFEPIATSVGKLGLMVCWDQWYPEAARIMALKGAEILIYPSAIGFLEEDSNEEKKRQQNAWETIQRGHAIANGLPLIATNRVGVELDPSGAIKGGITFFGSSFVVGALGEFLAKASDKEEILYAEIELERTEEVRRMWPFLRDRRIDFYNDLLKRYI

SEQ ID NO: 23035 - protein, 332 aa, ASPERGILLUS NIDULANS FGSC A4
MPPLSTMKAIVTEKTGGPEVLEVRTHHPVPTASEGQLLVKNQIIGINYIDTYFRTGLYPSSKPEILGREAVGEVVAVGPGANPYNFQIGDRVAWLSTGSYAEYTAVPQAFAVKVPEGISNEDVMGSFLSGLTVLTLAKETYPVQRGDWVLLHAAAGGAGFLMTQVLKSIGAIVIGTAGGPEKVELVKSLGADYVIDYRSEEGKDWVKKVKEITNGRGVDVVYDSVGKDTWEGSLEAVKRKGMIVWFGNASGPVPPLPLAKLSPKCVKVARPQLFGYIQAREEFEFYVNELFNMLKSGNLKVKIHKVYPLEQVAEAHSDLEGRKTTGKLLLKA

SEQ ID NO: 23036 - protein, 976 aa, Phaseolus vulgaris
MEAFPRDQRGSLEVFNPSSSSYSNEKPVISPLRTQSTWKTWVDSRVEEQPEKQQRGGGPDEVTATSWMALKDSTPPPPSQTLAAVLGEPPAEVGNAAKRAAEWGLVLKTDTETGKPQGVAVQTSGGEEPGVKVTGGSRRDSGNSVRSSGESSDDGREYRGGIPRVSEDLRDALSAFQQTFVVSDATKPDYPIMYASAGFFKMTGYTSKEVIGRNCRFMQGADTDPDDVAKIREALQTGQTYCGRLLNYKKDGTPFWNLLTIAPIKDHDGRVLKFIGMQVEVSKHTEGNKENMLRPNGLPESLIRYDARQKEKANSSVSELLLAVRRPRALSESGGRPLIRKSASGDDDQDKPEKSSRRKSESVASFRRKSHAGDRTSMEKITEIPENKHKTSRRRSFMGFIRKNQSKFGSFNDEAVIEGSSESSDEDGERSGSFDGKVQRKEKRKGLDLATTLERIEKNFVITDPRLPDNPIIFASDSFLELTEYSREEILGRNCRFLQGPETDPATVRKIREAIDTQTDVTVQLINYTKTGKKFWNLFHLQPMRDQKGEVQYFIGVQLDGSQHVEPLHNRIAENTAKEGEKLVKDTAENVDDALRELPDANLKPEDLWMNHSKVVHPKPHRRDEAAWKAIQKILESGEQIGLNHFKPVKPLGSGDTGSVYLVELGETGQYFAMKAMEKGIMLNRNKVHRACTEREILDMLDHPFLPALYASFQTKTHVCLITDYCSGGELFLLLDRQPAKVLREDAVRFYAAEVVVALEYLHCQGIIYRDLKPENVLLQSSGHVSLTDFDLSCLTSCKPQLLVPSINEKKKAQKGHQPPIFMAEPMRASNSFVGTEEYIAPEIITGSGHSSAVDWWALGILLYEMFFGYTPFRGKTRQRTFTNILHKDLKFPKSKQVSFSAKQLMYRLLNRDPKSRLGSREGANEIKNHPFFRGVNWALVRCTKPPELDAPLFDTTRGEKEANFEDQVQEEMNVF

SEQ ID NO: 23037 - protein, 987 aa, Phaseolus vulgaris
MEPSEKSPKKVSSVRSSFPRDPRGSLEVFNPNTSTAANSRVRSQPLWKSYTESEESRDEIAATSWMAINPAPQAEVECGAAAQRAAEWGLVLRTDTETGRPQGVAARNSGGEEPNVAKLAAAASSSRKNSQNSARTSGDSSSDGGGDVVGGIPRISEDVMGALSAFQQTFVVSDATKPDCPILYASAGFFKMTGYTSKEVIGRNCRFLQGAETDCGDVAKIREALEAGKIYCGRLLNYKKDGTPFWNLLTITPIKDEDGKVLKFIGMLVEVSKHTEGLKEKTLRPNGLPESLIRYDARQKEKATNSVSELLQIMKRPRALSESAGRPSITKSGFAEEEKQSLHEEEEEEEEEEEKEKAKRTLRRKSESEASLGRKSEGGKKISMQRISEVPENKLKNSQRRSFMGFRRKSESNDESMENDVIEDVSSDSEDGERPDSFDVDDKEKQREKRKGLDLATTLERIEKNFVITDPRLPDNPIIFASDSFLELTEYSREEILGRNCRFLQGPETDPATVRKIREAIDNQTEVTVQLINYTKSGKKFWNLFHLQPMRDQKGEVQYFIGVQLDGSQHVEPLQNGIAEDTAKEGEQMVKQTAENVDVAVRDLPDANMKPDDLWTNHSKAVHPKPHRKDNPAWKAIQKVLESGEQISLKHFRPIKPLGSGDTGSVHLVELRGTGQYFAMKAMDKGVMLNRNKVHRVCAEREILDQLDHPFLPALYASFQTKSHVCLITDYCPGGELFMLLDQQPTKVLKEDAARFYAAEVVIALEYLHCQGIIYRDLKPENVLIQSNGHVSLTDFDLSCLTSSKPQLIIPASNSKKKKKKKQRNQEVPVFMAEPMRASNSFVGTEEYIAPEIITGSGHTSAVDWWALGILVYEMFYGYTPFRGKTRQKTFANILHKDLKFPKSKPVSLQGKQLIYWLLQRDPKERLGSREGANEIKRHPFFKGVNWALVRCMKPPQLDAPLLPKTEEEKEAKDIDPGLEDLQTNVF

SEQ ID NO: 23038 - protein, 996 aa, Phaseolus vulgaris
MEKVKVSTKHDSDGSSDQTDSFPIFELRESQNVAQQRIRREEGDTKAVKLDGGSAIAFSNSVSNKESANKWMAFAGKPNFAVDGNSAKKDKSTTEDNYLRNHLKEKSSSDQQILTEATIAERAAEWGVVVNTGNFRAMGEENTGASFDGDRTRNLSDRFAESTRTSGESNFGSDSTSGLFPRVSQELKEALATLQQTFVVSDATKPDCPIMYASSGFFSMTGYSSKEIIGRNCRFLQGPDTDKNEVDKIRDAIRNGRSYCGRLLNYKKNGTPFWNLLTVTPIKDDKGNTIKFIGMQVEVSKYTEGVNEKALRPNGLPKSLIRYDARQKETAMGSITEVVQTVKDPKSIINKRNDDTASKQEEEEKMNLDFVLPKSADAGNTSTPGRQPSPLNIQSMSSNQEKSRTSRSGRISLKGFKGKSQSSAGRDEEKTIVEPEVLMTKEIEWSNNWEHSLRERDIRQGIDLATTLERIEKNFVISDPRLPDNPIIFASDSFLELTEYTREEILGRNCRFLQGPETDQATVSRIRDAIREQREITVQLINYTKSGKKFWNLFHLQPMRDQKGELQYFIGVQLDGSDHVEPLKNRLSETTEFQSAKLVKATAENVDEAVRELPDANLRPEDLWAIHSQPVFPRPHKRDNPSWIAIQKVVARGEKIGLQHFVPIRPLGCGDTGSVHLVELKGTGELYAMKAMEKTVMLNRNKVHRSCIEREIISLLDHPFLPTLYTSFQTSTHVCLISDFCHGGELFALLDKQPMKIFKEESARFYAAEVVIGLEYLHCLGIIYRDLKPENILLQKDGHVVLTDFDLSSMTSCKPQVVKQALPGKRRSRSGPPPILVAEPVTQSNSFVGTEEYIAPEIITGAGHTSAIDWWTLGILLYEMLYGRTPFRGKNRQKTFSNILHKDLTFPSSIPASLAARQLINALLQRDPTSRLGSTTGANEIKQHPFFRGITWPLIRNMTPPPLEVPLKLIGKEPVAKDIKWEDDGVLVNSIDMDIF

SEQ ID NO: 23039 - protein, 170 aa, Triticum turgidum subsp. durum
MASSATSVAPFQGLKSTDGLPISRRSSSAGLSSVSNGGRIRCMQVWPIEGIKKFETLSYLPPLSTEALLKQVDYLIRSKWVPCLEFSKVGFVFREHNSSPGYYDGRYWTMWKLPMFGCTDATQVLNEVEEVKKEYPDAYVRVIGFDNLRQVQCVSFIAFRPPGCEESGKA

SEQ ID NO: 23040 - protein, 169 aa, Triticum aestivum
  misc_feature (9)..(9): Xaa can be any naturally occurring amino acid
  unsure (1)..(169): unsure at all Xaa locations
MAPTVMASXDTSVAPFQGFKSTAGLPVSRRSNGASLGSVSNGGRIRCMQVWPIEGIKKFETLSYLPPLSTEALLKQVDYLIRSKWVPCLEFSKVGFIFREHNASPGYYDGRYWTMWKLPMFGCTDATQVINEVEEVKKEYPDAYVRIIGFDNMRQVQCVSFIAFKPPGC

SEQ ID NO: 23041 - protein, 254 aa, Magnetococcus sp. MC-1
MRDPLTLISPYSSSEEAAQVLAQSLTQAMLAKGDCPFHLAISGGSTPKRLFEILGISTIGQRLPWHRLVIYWADERCVPTDHPDSNHGMLMSAIGGDLPHHELTYHRIHGEDAPRREVLRYAQLLRDNVPGTPLPQLDWIWLGMGLDGHVASLFPESVLEEEPHGICGISTNPYSGEQRITLTEAMIMAAKQVTFLVTGHAKAEIVQRVLTASAADSVLPAARITYRHSKVDWLLDMEAASTLPVGEATPPRHL

SEQ ID NO: 23042 - protein, 232 aa, Lilium longiflorum
MGRGKIEIKRIENTTNRQVTFCKRRNGLLKKAYELSVLCDAEVALIVFSSRGRVYEYSNNSIKQTIDRYKKACDSSNSNSLIQVNSQQYFQQESAKLRHQIQILTNANRHLVGEALSSLTVKELKQLENRLERGLTRIRSKKHELLFAEIEFSQKREVELQSDNMYLRAKIAENERTQAAIVQARAEFDALPTFDSRNFYQVNNMLEAPPHYHHQDQTALHLGYEAKDDSVP

SEQ ID NO: 23043 - protein, 138 aa, Nymphaea alba
MTKPIPKIGSRRNSRISSRKSGCRTPIGVIHVQASFNNTIVTVTDPQGRVVSWSSAGTCGFKGTRRGTPFAAQTAAGNAIRAVVDQGMQRAEVMIKGPGLGRDAALRAIRRSGILLNFVRDVTPMPHNGCRPPKKRRV

SEQ ID NO: 23044 - protein, 365 aa, Rubrobacter xylanophilus DSM 9941
MQPQRDLREIEEVRELFEAGQEAGVLESGEVLDLLQEVDLSTEEIQQVYGLLREQGVEIVDSGFLSESPEEEEEDVQVVEEVLEGDLKSRYTGDAVQMYLDEIGKTPLLSKAQEVYLAKRIERGDRRAKAHLTRANLRLVVSIAKKYAGRGVSLLDLIQEGNIGLMRAVEKFDYRKGYKFSTYATWWIRQAVTRAIADKGRTIRVPVHMVEKINKYYRVQRTLASELNRDPTDEEVAREMGVEVEEVERIRQVSRRSISLETPVGEDHSSELGDFIADEESESPHDLAKSSLLKARMREALNGLPERERMVLEYRFGLTGGQPKTLEEVGERFDVTRERIRQIQLTALAKIKSSPHAASLRDLLD

SEQ ID NO: 23045 - protein, 1092 aa, Adiantum capillus-veneris
MSTSSSMNDQRRDAYSLRAPPNEGKLHPLARDSRGSLEVFNPGNPSSLTAASIGAGMQYTPSWQQQQPPEDENYDLPLNQREKEENIYNQTHGGPERERGPDKGTSPSDHKRGMSTGTSPPTRSKYSEIFTSHDTIDKEGKFQAYQTNEESTHDWLSSTPAGQGPMLGGGFGGGEGARGSYLLGTREHPKARCDSLAERAAGWGLVLKTDGDSGRVDGVRTRTSEEEREFRRLSEERRSLNSSTVRTSDDSGFTSDTSNASRIPRVSKDVLQALEGFQQTFVIADGTKPDLPIMYASAGFFKMTGYTSSEVIGRNCRFLQGKETDPEEIDRIRECISKGSGYCGRLLNYKKDGSAFWNLLTISPIKDVDGSVLKYIGMQVEVSQFTEGTKENAMRPNGLSESLIKYDARQKERASFQVTELVEAIKDPKQVGDDKKTSISLGVVRPVAPSGPRKGPDLRELLTAQQYTPRSATSVQPKGSNLTEPGSHRESISKRNRSSGFFSFLGLDKLAGKGPGNQHDAAEFIEPEILMTKDEDSSEASFELDKARLKEIRRGIDLATTLERIEKNFVITDPRLPDNPIIFASDNFLELTEYSREEILGRNCRFLQGPDTNRETVKLIRDAIDNEKEVTVQLLNYTKTGRTFWNLFHLQPMRDHKGELQYFTGVQLDGTEYLEPLTKRLSQQIASEGAKIIRETAANVNEALRELPDANLKVEDLWRIHSRLVLPKPHKLNHDSWGVIRKIHASGEKVKLKHFRPLRPLGYGDTGSVHLVELRGTGKLFAMKAMEKNVMVKRNKVHRVCAEREILGMMDHPFLPTLYASFETQTHVCLITDFCAGGELFLLLERQPTKIFREETARFYTSEVVVALEYLHCQGVIYRDLKPENILLQQDGHVMLSDFDLSYLSSSNPRLVVPPRLHKKRSKRKNFPPPIFRAEPIGACNSFVGTEEYIAPEVITGSGHNSSVDWWALGILMYEMLYGRTPFRGKTRQKTFGNILHKDLVFPRRIPTSLAARQLINGLLQKDPENRLGSQGGANEIKGHPFFQGVNWTLIRCMRPPTFDAPVCFAGSELDVEGDEALDWDDVEASNPIEYF

SEQ ID NO: 23046 - protein, 287 aa, Arabidopsis thaliana
MGRPPCCDKIGIKKGPWTPEEDIILVSYIQEHGPGNWRSVPTNTGHYLFSTWLLRCSKSCRLRWTNYLRPGIKRGNFTPHEEGMIIHLQALLGNKWASIASYLPQRTDNDIKNYWNTHLKKKLNKSDSDERSRSENIALQTSSTRNTINHRSTYASSTENISRLLEGWMRASPKSSTSTTFLEHKMQNRTNNFIDHHSDQFPYEQLQGSWEEGHSKGINGDDDQGIKNSENNNGDDVHHEDGDHEDDDDHNATPPLTFIEKWLLEETSTTGGQMEEMSHLMELSNML

SEQ ID NO: 23047 - protein, 403 aa, Pseudomonas syringae pv. tomato str. DC3000
MQFNKSNKLANVCYDIRGPVLKHAKRLEEEGHRILKLNIGNPAPFGFEAPDEILQDVIRNLPTAQGYSDSKGLFSARKAVMQYYQQKQVEGVGIEDIYLGNGVSELIVMSMQALLNNGDEVLVPAPDYPLWTAAVALSGGSPVHYLCDEQANWWPDLEDIKAKITPNTKAMVIINPNNPTGAVYSREVLLGMLELARQHNLVVFSDEIYDKILYDDAVHICTASLAPDLLCLTFNGLSKSYRVAGFRSGWIAISGPKHNAQSYIEGIDILANMRLCANVPSQHAIQTALGGYQSINDLILPPGRLLEQRNRTWELLNDIPGVSCVKPMGALYAFPRIDPKVCPIFNDEKFVLDLLLSEKLLVVQGTAFNWPYPDHFRVVTLPRVDELEQAIGRIGNFLKGYRQ

SEQ ID NO: 23048 - protein, 131 aa, Pseudomonas syringae pv. tomato str. DC3000
MDKLQKTLEEWKEMLDPAQYSVCRLKGTERPFSGKYNDTKTAGVYHCICCNEALFDSTTKFDSGCGWPSFYAPLEGSAVVEVRDVSHGMIRTEVVCARCDAHLGHVFPDGPPPTGLRYCINSVCLELVPRE

SEQ ID NO: 23049 - protein, 161 aa, Pseudomonas syringae pv. tomato str. DC3000
MSENLLNIPVTTIKGEQKTLADFAGKAVLVVNTASKCGFTPQYKGLEKLWQDYKDQGLVVLGFPCNQFGKQEPGDEGAISGFCELNYGVSFPLFKKVDVNGDQAHPLFVQLKEQAPGLLGTERIKWNFTKFLIGQDGKLVKRFAPLTKPEELTDEIEALLR

SEQ ID NO: 23050 - protein, 1241 aa, Amycolatopsis orientalis
MGRRERPLDPDAGSLQRFAFELRQLRSVAGQPGYRELSRRAHYSITALAEAAGGQTLPSLAVTLAYVQACGGDRQVWETRWRELAEELALANGDSADPDASPYLGLAAFQPDDADRYFGRDSLVEHVVHKVAQTPVVAVFGASGSGKSSLIRAGLIPATRTHSAFSGNQWTCVLLTPTSQPLRELAHAVTELCGTEPDRSEPGWLGRALHHAHHPRVLLVVDQFEELFTLCPNPDERVEFIDALLDAARSPDGMVHVVLGVRADFYGHCATHPGLLKTLGEGAQVLVGPMTKDELRSAITGPAAMAGLTVERELVATMIADIADEPGGLPLLSHALLETWRHRRNSTMTKAGYHVCGGVHGALAQTAERLYAEFDAAEQEVAHRIFLRLTALGDGTEDTRRRARHGELATVGDSSTVTRVLDKLAAARLVVIGTDSVEVAHEALIRAWPRLRRWLTDDREGVLLHRRITDATQLWQSSGRDPGLLYQATQLDQAIAWADQTHRASALNADEREFLDAATLLRDKQIRSRKQRTLRLRVATAAVVAVLAAASVITWQQRNEARDQHRVAVARQLVAEATALREIDPLRAAQLSLIAWQIAPDVPATRDSLLSVQAYPLPTRLLGHTGEVRDVAFSPDGRVLATAAGDSSVRLWDIASRQPLGNPLTGHTGMVNGLAFSPDGTTLATASADRTVRLWDVARHRPIGEPMSGHTNTVTSIAFSSDGRLLVTGSADGTVRTWDITSRTPIGEPMVGHKGPITAVALSPDGVTAATSSNDKTVRLWNVATRAPIGDPLTGHTSVTNGVAFSPDGQILASTSGDKTVRLWNVATRAPIGDPLTGHTNVTYGVAFSPDGRTLATSSWDKTVRIWDTTSRRQQGTALIGSTSSVFNIAFSPDGSALAGGDSDSSTLVWSLRGTLVPAHADAVYAVALSPEGRVLGTGADDRKVRLWETSTHRELVAPLTGHTAEVRSMAFSPQGGILATGSWDGTLRLWDAANRAPIGSPLTGHVDWVRGLAFSPDGHFVATAGMDMTVRLWNVATRAPFGPPLTGHTNSVTGIAFSPDGRSLATAANDKTIRLWDVPSRSPIGEPLTGHTSVVRDVVFSPDGKLLASAGDDKTVRLWDVASRTLIATLEGHTGEVLKLAISPDGRELASTSLDKTVRLWDTANRSTTTVLSASTGLAGVAYTPDGLVTGGVTGNVLLWTTDVTRLAGQVCAATGSELSDDEWRRYLPTWPRMKVCAGT

SEQ ID NO: 23051 - protein, 156 aa, Pisum sativum
GPFGGLKFMTGFPVKKVNTDITSITSNGGRVKCMQVWPPIGKKKFETLSYLPPLTRDQLLKEVEYLLRKGWVPCLEFELEKGFVYREHNKSPRYYDGRYWTMWKLPMFGTTDASQVLKELDEVVAAYPQAFVRIIGFDNVRQVQCISFIAHTPESY

SEQ ID NO: 23052 - protein, 278 aa, Shewanella oneidensis MR-1
MNSISNQTIPHQASRYQAAFSRLKAEGRGAFVPFVTLGDPSPELSLKIIDTLVQNGADALELGFPFSDPLADGPVIQGANLRALAAGTTPTACFELLAKIRAKYPELPIGLLLYANLVFANGIDAFYAKAQQAGVDSVLIADVPVEEAAPFIQAAKAHGIAPIFIAPPNADSDTLAKVSQSGEGYTYLLSRAGVTGADTKAGTPVEEILAKLQEFNAPPPLLGFGIAEPAQVSAAIKAGAAGAISGSAVVKIIETHQQDEVKLLAALGEFTRTMKAAT

SEQ ID NO: 23053 - protein, 478 aa, Lactobacillus sakei
MTNQLTTNEGQPWADNQHSQTAGQRGPVLIQDYQLLEKLAHFNRERIPERVVHAKGAGAKGYFKVTKDMSAYTKAAVFSGVGKKTPLITRFSQVAGEAGYPDTYRDVRGFAVKFYTEEGNYDIVGNNTPVFFVNDPLKFPDFIHSQKRDPRTHARSQDMQWDFWSLSPESVHQVTILMSDRGIPASYRMMHGFGSHTFKWVNAQGEQFWVKYHFKTNQGIHNLSNELADELAGKDTDYLQNDLFDAIETGDYPSWTVAVQLVPYEDGLNYPQDIFDVTKVISQKDYPLIEIGQMVLDENPTNNFEDIQELAFSPANLVPGIEASPDKLLQGRLFGYKDAERYRLGANYEQLPVNRPKVPVHNYERDGAMAQNQATGVNYEPNSQDGPTEVPAAKIHGDQLSGTTGNFSADPDYYSAAGKLYRLLSADEQTRLIENIRMNLGQVTKPEIQIREVKQFYQADPEYGRRVATSVKLRFSSV

SEQ ID NO: 23054 - protein, 159 aa, Nicotiana tabacum
MSLIPSFFDGRRSNIFDPFSLNIWDPFEGFPFSGTVANIPTSTRETAAFSSARIDWKETPESHVFKVDLPGIKKEEVKVEVEEGRVLQISGERSREQEEKNDKWHSMERSSGKFLRRFRLPENIKMEEIKATMENGVLTVTVPKMEEKKPEVKAIDISG

SEQ ID NO: 23055 - protein, 670 aa, Methylococcus capsulatus str. Bath
MPSRRELANAIRALSMDAVQKANSGHPGAPMGMADIAEVLWNDYLCHNPANPKWPNRDRFVLSNGHGSMLIYSLLHLTGYDLPIEELQNFRQLHSKTPGHPEYGYTPGVETTTGPLGQGITNAVGMALAERTLAGQFNRPGHTIVDHYTYVFLGDGCLMEGISHEACSLAGSMKLGKLIAFYDDNNISIDGEVRGHGGVPGWFMDDTPRRFEAYGWHVIPKVDGHDPDAVKAAIEEARAVTDKPSLICCQTIIGWGSPNKQGKEDCHGAALGTDEVALTRENIGWSHPPFEIPADIYEAWSARETGAKAEGEWNDRFENYRREFPELAAEFERRMAGELPRDWAEKSAAFVAQVNEKAETIASRKASQNALNGFGPLLPEILGGSADLAGSNLTLWSGCKDVNAPGHDGNYVYYGVREFGMSAIMNGIALHGGFKPYGATFLMFSEYARNALRMSALMKIPVIYVYTHDSIGLGEDGPTHQPVEQTATLRLIPNMQVWRPCDAVESAVAWKCAIERRDGPSALIFSRQNLPHMPRTPEQIAAIAKGGYVLVDCTGTPDLILMATGSEVELAVKAAEALTAKGRQVRVVSMASTNVFDAQEPAYRDSVLPPAVTRRLAIEAGVSDGWWKYVGSHGKVIGLDRFGESAPAGVLFKTFGFTVDNVVGQAEALF

SEQ ID NO: 23056 - protein, 98 aa, Zea mays
  misc_feature (22)..(22): Xaa can be any naturally occurring amino acid
  unsure (1)..(98): unsure at all Xaa locations
MFNQWTLELKAMAHRILNMRHXLFNPLKSRGTPGDWSQIIKQIGMFTFTRLNSEQVAFIRQEYPIYMSSHGRISMAGLSIRTGPHLPDARPGAVTHLK

SEQ ID NO: 23057 - protein, 329 aa, Methylococcus capsulatus str. Bath
MSKNLLDQLREVTVVVADTGDIEAIEKFKPRDATTNPSLITAAAQMPQYQDIVDDTLKGARQTLGPGASAAQVANRAFDRLAVSFGLKILQIIEGRVSTEVDARLSYDTEGTIEKAREIIKQYEAAGVSKERVLIKIAATWEGIEAAAVLEKEGIHCNLTLLFGLHQAIACAENGITLISPFVGRILDWYKKDTGRESYAPHEDPGVLSVTQIYNYYKKFGYKTEVMGASFRNIGEITELAGCDLLTIAPSLLAELQATEGELPRKLDPAKAKDYPIEKIHVNKYTFDKMHAENRMATEKLEEGIQGFTKALEQLEKLLADRLAHLEAA

SEQ ID NO: 23058 - protein, 525 aa, Triticum aestivum
  misc_feature (519)..(519): Xaa can be any naturally occurring amino acid
  unsure (1)..(525): unsure at all Xaa locations
MAAIKPPPPDRPPQAARLPSPSSSSSAVAAAKRGATGSRGLLMGRYELGRVLGKGTFAKVYHARHVQTGESVAIKVLDREKAVRSGLVSHIKREIAVLRCVRHPNIVHLFEVMATKTKIYFVMELVRGGELFSRVSKGRLKEDIARRYFQHLISAVGFCHTRGVFHRDLKPENLLVDEAGNLKVSDFGLSAVAEPFQPEGLLHTFCGTPAYVAPEVLARRGYEGAKADIWSCGVILFVLMAGYLPFHDQNLMAMYRKVYKGEFRCPRWFSKDLTSLIMRFLDTNPSTRITLPEVMESRWFKKGFRPVKFYIEDDQLYNVIDAENDMLDLGLPDPLPQPLLPPPSSPSPQEVDGDDSGSESDASVVSCPATSSFEERHRLRGPLPRPASLNAFDIISFSRGFNLSGLFEEKGDEVRFISSEPMSGIITKLEEIANVKSFAVRKKDWRVSLEGTREGVKGPLTICAEIFELTPSLVVVEVKKKAGDKEEYDDFCNKELKPGMQHLVHQMAPVPITPTISEXAERPSR

SEQ ID NO: 23059 - protein, 348 aa, Silicibacter sp. TM1040
MRPNTMKALEKSKPQEGLWMVQAPVPEIGPDEVLIKINKTGICGTDIHIWNWDDWAAHTVPVPMITGHEFAGEIVELGRNVTGLTVGQRCSGEGHLIGTESRQSRSGKFHLDPGTRGIGVNEQGAFAQYLRLPAFNVVPLPDDIPDDIGAILDPLGNAVHTALSFDLLGEDVLITGAGPIGIMAAAVARHAGARHVVITDVNADRLALASEVTRVRTVNVAVEDLNDVMHELGLREGFDVGLEMSGNQQALDQMVEALVMGGKIALLGIPPGKSPVDWSRIVFKAITIKGVYGREMFETWYKMIAMLQNGLDVSGVITHRFAVDEFEQGFAAMKSGQSGKVVLDWTGG

SEQ ID NO: 23060 - protein, 394 aa, Silicibacter sp. TM1040
MSNAFLSHISETLTQIEADGLYKRERMITSPQGGEIRVGDREVINLCANNYLGLADHPDLIAAAKSVMDEKGYGMASVRFICGTQDLHRTLEQKIANFLGKDDSILFAACFDANGGLFEPLLGPEDAIISDSLNHASIIDGIRLCKAQRYRYANNDMEDLEAKLKDARAKGVRHIMIATDGVFSMDGYLANLPAIREIADRHDAMVMVDDCHATGFMGPKGAGTPDHFGVDVDILTGTLGKALGGAIGGYIAGPQPVIDLLRQRARPYLFSNSLPPAVVAAGLEAIRLVEEGESLRRQLFENATIWREGLTRLGFDLLPGEHPIIPVMLGDAKLAQEMANKLFEEGVYVSGFFFPVVPKGQARIRTQMNAALTQDELNRALNAFERAGKACGVI

SEQ ID NO: 23061 - protein, 324 aa, Enterococcus faecalis V583
MGIPITIVSGFLGAGKTTLINHALAQSPFPKEEIIIIENEFGQTGVDHALLLQTTERIIQLNNGCMCCSLRGDLLASLSAILEVYQEEQQPIAQVILETTGIADPQPIIQTILTTPHIKNHFYIDSLLTVVDGHHWQQQLQEAEAIKQLALADRLFFSVKEPADSTQLPTFQETLRTINPFADILSFQANEPLLASDFFQLNKFTATLTEHEMTHSPHEHAHEHHHHTFHSLTLTASSAINEPLFTRWLDWLMYTHQEKLYRFKGILALQEHDLAIAMQGVNQQVAFQMTNQPPQETTIVLIGKELETKKIQETFQTLNKIATP

SEQ ID NO: 23062 - protein, 573 aa, Leifsonia xyli subsp. xyli str. CTCB07
MDNSDAGLSIKRAQLGGTTKHIFVTGGVVSSLGKGLTAASLGNLLTARGLRVVMQKLDPYLNVDPGTMNPFQHGEVFVTDDGAETDLDIGHYERFLDINLGQSANVTTGQIYSNVIAKERRGEYLGDTVQVIPHITDEIKRRMRLQAQPGPDGDPAPDVIITEIGGTVGDIESQPFIESARQVRHELGRKNCFFVHVSLVPFMNASGEQKTKPTQHSVAALRSIGIQPDALVLRSDRPVSEPNKRKIALMCDVDEAAVVNAVDVPSIYDIPSMLHDQGLDAYIIDQLGLTQAADVDWAGWSRLLEAVHDPKHTVTIGLVGKYIDLPDAYLSVTEALCSGGFAHDAKVALKWIASDECQTADGAAAQLSDVDGICVPGGFGVRGIEGKLGALRFARENGIPALGLCLGLQCMVIEYARNEAGLAGASSSEFDPDTAFPVIATMAEQVDIIAGGDLGGTMRLGLYPAALAGGSIVAELYGAAEVSERHRHRYEVNKAYRAQIADAGLWFSGTSPDGHLVECVELPRDVHPFYVGTQAHPELRSRPNRAHPLFAGLIGAALDRQKASLLFDVAADA

SEQ ID NO: 23063 - protein, 223 aa, Vitis vinifera
MGRGKIEIKRIENTTNRQVTFCKRRNGLLKKAYELSVLCDAEVALIVFSSRGRVYEYSNNNIKSTIDRYKKASSDSTNGGFTMEINAQYYQQESAKLRQQIQMLQNSNRHLMGDSLASLTVKELKQLENRLERGITRIRSKKHELLLAEIEYLQKREIELENESVYLRTKIAEVERLQQANMVSTHEFNAIQALVSRNFFQPNMIEGGSTGYPLHDKKVLHLG

SEQ ID NO: 23064 - protein, 508 aa, Silicibacter sp. TM1040
MRGPHNIIRLIRTGATLVRTGAMNVVLDAFDAPAPLRMVAYTLGWPFQWLGYKGDPEMPPATRAITALGPAYIKFGQVLSTRPDVVGDDMARQLRVLQDKLPPFPREVAMAEVAKELGRPVDEIFSEFSEPIAAASIAQVHRARLKETGQDVAVKVLRPGIERAFHKDVDAFYFAARIAELFAPGAKRLRPMDVITHFDGVVRGELDLRLESAAASEFADNTAEDAGFQLPPVLWDYSARRVMTLGWADGLPIGDNDALDSAGHDRRALGERVLSLFLNHALRDGYFHADMHQGNMKVAANGDIIAYDFGIMGHIDLYTRRVYAEILYGFIKRDYKRVAEVHFEAGYVPASQDVDEFARALRAVGEPIFGMDATHISMGRLLNYLFEVTERFGMETRTELILLQRTMVVVEGVARSLDPRINIWDVAKPVVEDYIKASIGPRAIAADLGKTARVLARFGPRLPTLVERALIAQAHEPEPQNKRRPWKRAASAGAALGILATLLFTHLT

SEQ ID NO: 23065 - protein, 444 aa, Saccharomyces cerevisiae
MQSMNVQPRVLAVGGEQFFSQRQASEQHQQQNMGPQVYSPKVNRARMFPQGMPVNTINGSVNQEMNNAYLLKQKNEPLLTQQQQQQQQQQQQQQQQQQQQQQQQQQQPFNIGTPVSVASLPPGLNVLQQQQQQQQQQGVGLNRPLASQLPKHLTNQSMPPIFLPPPNYLFVRDVWKSNLYSEFAVIRQLVSQYNHVSISTEFVGTLARPIGTFRSKVDYHYQTMRANVDFLNPIQLGLSLSDANGNKPDNGPSTWQFNFEFDPKKEIMSTESLELLRKSGINFEKHENSGIDVFEFSQLLMDSGLMMDDSVTWITYHAAYDLGFLINILMNDSMPNNKEDFEWWVHQYMPNFYDLNLVYKIIQEFKNPQLQQSSQQQQQQQYSLTTLADELGLPRFSIFTTTGGQSLLMLLSFCQLSKLSMHKFPNGTDFAKYQGVIYGIDGDQ

SEQ ID NO: 23066 - protein, 433 aa, Saccharomyces cerevisiae
MQSMNVQPRVLAVGGEQFFSQRQASEQHQQQNMGPQVYSPKVNRARMFPQGMPVNTINGSVNQEMNNAYLLKQKNEPLLTQQQQQQQQQQQPFNIGTPVSVASLPPGLNVLQQQQQQQQQQQQQQQGVGLNRPLASQLPKHLTNQSMPPIFLPPPNYLFVRDVWKSNLYSEFAVIRQLVSQYNHVSISTEFVGTLARPIGTFRSKVDYHYQTMRANVDFLNPIQLGLSLSDANGNKPDNGPSTWQFNFEFDPKKEIMSTESLELLRKSGINFEKHENLGIDVFEFSQLLMDSGLMMDDSVTWITYHAAYDLGFLINILMNDSMPNNKEDFEWWVHQYMPNFYDLNLVYKIIQEFKNPQLQQSSQQQQQQQYSLTTLADELGLPRFSIFTTTGGQSLLMLLSFCQLSKLSMHMFPNGTDFAKYQGVIYGIDGDQ

SEQ ID NO: 23067 - protein, 273 aa, Zea mays
MGRSPCCEKAHTNRGAWTKEEDERLVAYVRAHGEGCWRSLPRAAGLLRCGKSCRLRWINYLRPDLKRGNFTADEDDLIVKLHSLLGNNQTKQASKLKNVLRWSLIAARLPGRTDNEIKNYWNTHIRRKLLGSGIDPVTHRRVAGGAATTISFQPSPNTAVAAAAETAAQAPIKAEETAAVKAPRCPDLNLDLCISPPCQHEDDGEEEEEELDLIKPAVVKREALQAGHGHGHGLCLGCGLGGQKGAAGCSCSNGHHFLGLRTSVLDFRGLEMK

SEQ ID NO: 23068 - protein, 314 aa, Zea mays
  misc_feature (47)..(47): Xaa can be any naturally occurring amino acid
  misc_feature (249)..(249): Xaa can be any naturally occurring amino acid
  misc_feature (262)..(262): Xaa can be any naturally occurring amino acid
  misc_feature (269)..(269): Xaa can be any naturally occurring amino acid
  misc_feature (281)..(281): Xaa can be any naturally occurring amino acid
  unsure (1)..(314): unsure at all Xaa locations
MQVTPAATLRPAAAHALRLSTDHCREGPKIRVRFRSRKLSWTETLAXLDATSPTRATGRQHRHSSVPKVSCWAAAHHQHNSNPQQFQAIGIRIAKTLHAFYQFCRPHTIFGTIIGITSVSLLPVKSLDDFTLIAIWGFLEALAAALCMNVYVVGLNQLFDIEIDKVNKPTLPLASGEFSVPTAVLLVVAFLVMSISIGIRSKCAPLMCALLVSFLLGSAYSIDVPLLRWKRHAFLAAFCIIFVRAVVVXQHVLKRPLAPTRXVVFATCXMCCFAAVIALFXDIPDVDGDRDFGIQSMTVRLGQQREKGSLRPFP

SEQ ID NO: 23069 - protein, 471 aa, Burkholderia fungorum LB400
MIDIHTLGRNLNSAQQQDGLKRGLKNRHIQLIALGGAIGTGLFLGSASVLQAAGPSMILGYAIGGVIAFMIMRQLGEMVAQEPVAGSFSHFAYKYWGDFPGFLSGWNYWVLYVLVSMAELTAVGTYVHYWWPGVPTWVSALVCFAAINAINLANVKAYGETEFWFAIIKVAAVIGMIVFGGYLLISGHGGPQASISNLWAHGGFFPHGFHGLFMMLAVIMFSFGGLELIGITAAEADEPQKSIPKAVNQVIYRILIFYICSLTVLLSLYPWNEVAAGGSPFVMIFSQIGSTLTANVLNVVVLTAALSVYNSGVYANSRMLYGLAEQGNAPRALMKVDRRGVPYMAIGLSALATFTCVIVNYLIPAEALGLLMALVVAALVLNWALISITHLKSRKAMVAAGETLVFKSFWFPVSNWICLAFMALILVILAMTPGLSVSVWLVPAWLVVMWAGYVFKRRRAAVQGGARVVGR

SEQ ID NO: 23070 - protein, 551 aa, Methanosarcina barkeri str. fusaro
MLGKTKRYLEVMRVLLKYNLIPELYRDLRTDYISNPECTCTFDLENRQTAIKLRKAFEDLGPTFIKIGQTMSKRPDLVPHPYVIEMSNLQDKVKPIPFEEMAESLDLACVCEFETLEERKRKKTDAELKASRERKAKAFIEIFDSFDPEPIASGSIAQVYKGVLEGKTVAVKILRPNLIDIINIDLSILDDFRPVMIKVLGLGSNFDIDAFSLEIREMLTREVDLRTEAVNMRRFEDNFKNVKNVSVPRIYPDYCSANVLTMEFIKGTQIKDITNMPVPQSKKSEYTRIITKSYLKQVYIDGFYHADPHGGNMLVQENNTIAFIDFGAVGSIDDELKKNMLKFYYAINNRDVEGATQGFLKIGGADVRDVDIRRLRKDMDSLIANQNYGLEGRQSDNYAKLGLKYDIRLPGEFSTLQRAILLIEGVCLELDPKYNIKTIAIPVLMDAYKKLNTPKGTALHIEFSTEPMDEKAELRDAIREVTDKMEGMGDKFLFLKQKETRKTTFSKELYLAVLLIVSTYILLNGGVFSWVGLAGFAGSVLIALLLAFRGK

SEQ ID NO: 23071 - protein, 165 aa, Zea mays
  misc_feature (41)..(41): Xaa can be any naturally occurring amino acid
  misc_feature (141)..(141): Xaa can be any naturally occurring amino acid
  misc_feature (154)..(154): Xaa can be any naturally occurring amino acid
  unsure (1)..(165): unsure at all Xaa locations
MRPILMKGHERPLTFLRYNRDGDMLFSCAKDHTPTLWYADXGERHGTFRGHNGALWGCGGSRDSLRLITGSADQSAKLWDVKTGQQLFSFKFGSPARSVDFALGDKLAVITTDPFMERTSAIHVKRIAEDPEDQVRESVAXVLRALTGRKRINXLVWGPLKQTIG

SEQ ID NO: 23072 - protein, 291 aa, Brassica napus
RPTVPKRVRGCSPILISLSILSCSALILAGDFRKDIDIVWGSDKAKILENGQAITLSLDKASGSGFESKAQFLFGKVSMELKLVPGNSAGTVTSYYLASKGTMWDEIDFEFLGNLSGDPYTVHTNVITQGKGDREQQFRLWFDPTVDFHTYSILWNPKTIVFYVDGTPIREFKKMNTKNVAYPEKQAMRVHSSLWNGDDWATRGGLVKTDWSKAPFTAYYRNFEVQDCDWSAPGSNVSSGGGGPNSWLNEGIDENSRKRLKWVQSNFIIYNYCNDAKRFRLGSPPECVVMN

SEQ ID NO: 23073 - protein, 391 aa, Zea mays
MWATSPPPLPVQLRRPPHPRFIARRRNKRLDRIAASQDPLTALTRVLWGGALPPAQLVVAVRHGWTTAWQLLMRQLAPSDPATGGFARAPARFPAVVGKPSSRLHLYVGLPCPWAHRALVVRALLGLEARLPVSVAVPGDDGAWSFTPGSPDLLYGKRKLREVYALRGGGFEGRASVPMLWDAERCEVVCNESIEIVKFLCDLAGDGAGDLDLWPPELRQDIDRWYSIIYPSVNNGVYRYIRSSIAATGFSGNDAAASELFGALDRLEAHLAGCRYLCGDRLTLADVCLFTTLIRFDLVYNTLFRCTRRKLAEYPSLHAYTRDIYQMPKVAETCDMEAIMAGYFKTLFPLNPGGIQPHPPATCDRESLLRPHGREALSSAAGTPLEAAAVS

SEQ ID NO: 23074 - protein, 340 aa, Burkholderia vietnamiensis G4
MTAKGTILVTGGAGYIGSHTAVELLDNGYDVVIVDNLVNSKVEAVRRIERITGKTPAFHQVDVCDEAALAKVFDAHPITGTIHFAALKAVGESVAKPLEYYQNNLGGLLAVLKVMRERNVRQFVFSSSATVYGVPERSPIDESFPLSATNPYGQSKLIAEQILRDLEVSDPSWRIATLRYFNPVGAHSSGLIGEDPAGIPNNLMPYVAQVAVGKLEKLRVFGSDYPTPDGTGVRDYIHVVDLAKGHIAALDALATRDASFVVNLGTGQGYSVLEVVRAFEKASGRPVPYELVARRPGDIAECYANPQAAADIIGWRATLGIEEMCVDHWKWQEGNPRGFV

SEQ ID NO: 23075 - protein, 870 aa, Arabidopsis thaliana
MSFMFASPIITPTIGSFTFSSRRSNYIVMSAVRTNSASTCPILTKFQKDCEIFFWNHGVSYVRDPNGAALRFVNVLMLKTVFIRNQIINTEWGGFSKVLPQTIFDQEMDAESPNRGEHVIEFILSLDAFMFLYEKMVSGMYLGEIVRRVLLQMCETSDLFGQFVPGGNLSKPFALKTEHLNKMQEDTTDDLQTVGLVLYNILEVEANLQERRRVVEVCDTVVKRGGRLAGAGVNARIKQAAYVPLERDQATRSSYRDKRARPLLEEGLAIVEKIEEETKRMDSGKRTVVAMDGSLYENYPQYQQYMEEALVELLGDNRSYINQTSTMSLMFSSPVVTPALGSFTFSSRPRSNYIVMSAVRSNSASTCPILTKFQKDCATPTPYLRNVANAIADDMRDGLAVEGGGDLEMILTFVDALPSGNEEGLFYALDLGGTNFRVRSVQLGGKKERVLATESEQISISQKLMIGTSEELFGFIASKLANFVAKEKPGRFLLEEGRKRELGFTFSFPVKQTSIDSGTLSKWTKGFKVSGMEGKNVVACLNEAMEAHGLDMRVSALVCFFFCSRKVVDGISCLVHIVNDGVGTLAGARYWDEDVMVGVILGTGTNACYVEQKHAIPKLRSKSSSGTTIINTEWGGFSKILPQTIFDLEMDETSLNPGEHVVKFYPFFSNIMFFAWWMYLGEIVRRVLLHMCETSDLFGHFAPAKLSTPLALRYLYPIVDLVRMCSLVYGLVSAQTEHLCKMQEDNTDDLRDVGSILYDFLDVEANMNARRRVVEVCDTVVKRGGRLAGAGIVAILEKIEKDTKRMGSGKRTVVAMDGALYEKYPQYRQYMQDALVELLGHKLASHVAIKHTKDVSGLGAALLAATNSIY

SEQ ID NO: 23076 - protein, 253 aa, Rumex acetosa
MEFSNELSRDMEDGSPQRKMGRGKIEIKRIENVTNRQVTFCKRRNGLLKKAYELSVLCDAEVALIVFSSRGRLYEYANHSVKATIERYKKTCSDSTGVTSVEEANAQQEAAKLRNQIRTLQNQTRNTSRNLMGEGLTSMNMKDLKNLETRLEKGISRVRAKKNELLFGEIEFMQKKEIELHNNNQFLRAKIAESERSQQSMNLMPGSSSGEQHYELMPQSQAGPFDSRNFFQVSDLQPDERYSCQNQTPLQLV

SEQ ID NO: 23077 - protein, 909 aa, Arabidopsis thaliana
MEDDGGSDGGEGNGGFSPNSSFGAFADTAMDLDFMDELLFDGCWLETTDSKSLKQTEQSPSASTAMNDNSPFLCFGENPSQDNFSNEETERMFPQAEKFLLEEAEVGKSWWIAPSASEGPSSSVKERLLQAISGLNEAVQDKDFLVQIWVPIQQEGKSFLTTWAQPHLFNQEYSSLAEYRHVSETYNFPADEGMKDFVGLPGRVFLQKFPEWTPDVRFFRRDEYPRIKEAQKCDVRGSLALPVFERGSGTCLGVVEIVTTTQKMNYRQELEKMCKALEAVDLRSSSNLNTPSSEFLQVYSDFYCAALPEIKDFLATICRSYDFPLALSWAPCARQGKVGSRHSDENFSECVSTIDSACSVPDEQSKSFWEACSEHHLLQGEGIVGKAFEATKLFFVPEVATFSKTNYPLAHHAKISGLHAALAVPLKSKSGLVEFVLEFFFPKACLDTEAQQEMLKSLCVTLQQDFRSSNLFIKDLELEVVLPVRETMLFSENLLCGAETVESLTEIQMQESSWIAHMIKANEKGKDVSLSWEYQKEDPKELSSGRENSQLDPVPNNVPLEAEQLQQASTPGLRVDIGPSTESASTGGGNMLSSRRPGEKKRAKTEKTIGLEVLRQYFAGSLKDAAKSIGVCPTTLKRICRQHGIMRWPSRKIKKVGHSLKKLQLVMDSVQGAQGSIQLDSFYTSFPELNSPNMSSNGPSLKSNEQPSHLNAQTDNGIMAEENPRSPSSSCSKSSGSSNNNENTGNILVAEDADAVLKRAHSEAQLHNVNQEETKCLARTQSHKTFKEPLVLDNSSPLTGSSNTSLRARGAIKVKATFGEARIRFTLLPSWGFAELKQEIARRFNIDDISWFDLKYLDDDKEWVLLTCEADLVECIDIYRLTQTHTIKISLNEASQVKLSGSFGNTGLS

SEQ ID NO: 23078 - protein, 414 aa, Rhodopseudomonas palustris CGA009
MKHTTFAARLVHPPRKALPRKDLLARALAALMFVGSIAYAAEARCGNLNIDKSFGKVSGWDVGFSKSVGGCLAAATYQDRTTVWFGFAGDKPSAYIAFTNPRWASVEVDGQYDMQLIMGRTRWNGEFIGFERSTEKGVFSSNLKTEFMVELAESGGVGVFLNRRRVAALSLDGSRRALEAVLSCQKAFMTAQSDTRDEPSTDTKPKRHTKSSGTGFYVSDSGHIVTNHHVIAECSTINVLPPGGAAVSATLVAKDKTNDLAILKTASSPAAIPGLRSQMRLGEAVYVFGFPLTGILSTSGNFTAGAITATTGMEDDTRLAQISAPVQPGNSGGPLLDKYGNVIGVIVSKLNALNIAAATKDIPQNVNFAIKTGIATNFLDSSGVVPTGKVSTRELAPEAIADLAKIFTVQVLCN

SEQ ID NO: 23079 - protein, 135 aa, Desulfitobacterium hafniense DCB-2
MLGKGLLTGMGIVLKKMLGPNITEFYPEVMPNLPKTVRSSMGLEPDKCISCTLCALACPNKVITLTSEKDENNKKVLKTYHMDVGRCLFCGLCTEACPTNALTVTQEFENSVFYPEDLYWDMIERSKRNGKEGNE

SEQ ID NO: 23080 - protein, 269 aa, Geobacter metallireducens GS-15
MSRITGTFAELKRTGKKALVTFITAGDPDLATTEELIPLLAENGADIIELGVPFSDPMADGPTIQLSSERALAAGTTLSRILATVKSVRGRTQVPIVLMGYFNPIFSYGLERFAADAAAAGVDGVLLVDLPPEEAGEFKACADRHGIDVIFLLTPTSDETRIRTVTNRARGFIYYVSVTGVTGVRSGIEASVAGNVNIIKECSKVPVAVGFGIATPEQAGEVAATADGVVVGSAIVKLFEKHRGEELKGALATFVSSLKQAVDRGRYDN

SEQ ID NO: 23081 - protein, 491 aa, Corynebacterium glutamicum ATCC 13032
MASTFIQADSPEKSKKLPPLTEGPYRKRLFYVALVATFGGLLFGYDTGVINGALNPMTRELGLTAFTEGVVTSSLLFGAAAGAMFFGRISDNWGRRKTIISLAVAFFVGTMICVFAPSFAVMVVGRVLLGLAVGGASTVVPVYLAELAPFEIRGSLAGRNELMIVVGQLAAFVINAIIGNVFGHHDGVWRYMLAIAAIPAIALFFGMLRVPESPRWLVERGRIDEARAVLETIRPLERAHAEVADVEHLAREEHAVSEKSMGLREILSSKWLVRILLVGIGLGVAQQLTGINSIMYYGQVVLIEAGFSENAALIANVAPGVIAVVGAFIALWMMDRINRRTTLITGYSLTTISHVLIGIASVAFPVGDPLRPYVILTLVVVFVGSMQTFLNVATWVMLSELFPLAMRGFAIGISVFFLWIANAFLGLFFPTIMEAVGLTGTFFMFAGIGVVALIFIYTQVPETRGRTLEEIDEDVTSGVIFNKDIRKGKVH

SEQ ID NO: 23082 - protein, 222 aa, Methylococcus capsulatus str. Bath
MWFKSAGSALPDPHDALPGRATPLQVTETHFVHGRRIRPPFPSGTARAFFGMGCFWGAERRFWTLPGVYSTAVGYAGGSTPNPTYDEVCTGRTGHAEVVLVVYEPDKVGFDALLQVFWTSHDPTQGMRQGNDVGTQYRSVIFATTPEQLQWALVSRDAYERALERAGRGGITTEIRMAPDFYYAESYHQQYLAQHPNGYCGLRGTGVECPPFRIEQSRADPI

SEQ ID NO: 23083 - protein, 454 aa, Neurospora crassa
MTVSPVLAAWEACDKTDTLFVLICTVICWTIVPTVGIAYSGYTWKRNALHAAMPAILTIATCSIQWFIVGYTLAYGEGGWFFGSLKHFFHKDVLSEPVGRIPAILFSEFQLVFEATVCAIAVGGFCERGRLLPVIPFIFLWATFIYCPLAHMVWGGGLLGENLGVLDFAGGTPVHVCSGATATAISIYLSYPLFRSRKSDVRTPTHIRIHRPGNSFFQLLSLIIIWGSWLAFDAGTTLALNFQSVMALCVTNLCAASGALTWNLITFYETGKWSVDSTFMGAISGLVMITPSAGFIDMPTACFFGIFGAVLCRQALRIKFTKFAHHWRWVDNGDTFATHCIGGVAATIMTGLFAQKELAAYGGVEVAGGVIFDGNIRQLWVQMVEAVVGFTWAFCGSYIIIALIDCVPGLEVLAVDKHISQGLDMNEVEEFLGNLEYPDEVDYAPTARGTISLE

SEQ ID NO: 23084 - protein, 844 aa, Arabidopsis thaliana
MMLASQSEAQLNRDFYKESCPSLFLVVRRVVKRAVAREPRMGASLLRLFFHDCFVNGCDGSLLLDDTPSFLGEKTSGPSNNSVRGFEVIDKIKFKVEKMCPGIVSCADILAITARDSVLLVSTSTLLLFVMSYIDACGPGWSVKLGRRDSTTANFAAANSGVIPPPITTLSNLINRFKAQGLSTRDMVALSGAHTIGRAQCVTFRNRIYNASNIDTSFAISKRRNCPATSGSGDNKKANLDVRSPDRFDHGFYKQLLSKKGLLTSDQVLFNNGPTDSLVIAYSHNLNAFYRDFARAMIKMGDISPLTGSNERNKEEKGPLGADREIYTLNSTKFLRGLFIFGIETQKWWRMCPPITRGLAARAHEVMTHELPPTLSYLWIKLLGQGTFAKVYYGRSILTNQSVAIKMIDKEKVMKVGLIEQIKREISVMRIARHPNVVELYEVMATKTRIYFVMEYCKGGELFNKVAKGKLRDDVAWKYFYQLINAVDFCHSREVYHRDIKPENLLLDDNENLKVSDFGLSALADCKRQDGLLHTTCGTPAYVAPEVINRKGYDGTKADIWSCGVVLFVLLAGYLPFHDSNLMEMYRKIGKADFKAPSWFAPEVRRLLCKMLDPNPETRITIARIRESSWFRKGLHMKQKKMEKRVKEINSVEAGTAGTNENGAGPSENGAGPSENGDRVTEENHTDEPTNLNAFDLIALSAGFDLAGLFGDDNKRESRFTSQKPASVIISKLEEVAQRLKLSIRKREAGLFKLERLKEGRKGILSMDAEIFQVTPNFHLVEVKKSNGDTLEYQKLVAEDLRPALSDIVWVWQGEKDELTSQQETEYQQQQQQEQQEQEEPLKF

SEQ ID NO: 23085 - protein, 285 aa, GIBBERELLA ZEAE PH-1
MFPLPSTTVLVTGANGYLGLHVLNQLLRDDKTVCAVVRSDKAIETVRANFKAYIESNQLRIITVEDLTKPESFQNVLDETIASIAHIASPCPMGKNIRDNVRDMLSPAITGTTPILNAAKTYASPSLRRVVQISSFSAMLDLSKGSRPRYVYTEADWNPMTYKEAMVKKNKPRLDIVCLCPSTIFGPHIETIDSMVRLQLTASLLWNLVNAPEVPSLDFAGAVDVRDAALMVVAAIDKPEAGGRRFLLAEHFDWQSAANAARDGLSNEGRSRIPAGEPGFNIGHW

SEQ ID NO: 23086 - protein, 542 aa, Desulfovibrio vulgaris subsp. vulgaris str. Hildenborough
MSTSPFNSRVAPMPHDDATAPVLHYAHDAAGAHDAADAAGAHDAADAAGTPPCAASRTARLRSLDAAHVWHPFTQMRDWMGSEPCIIDAADGNHLIDTDGNRYLDGVSSLWTNVHGHRHPHIDEAIRRQLDRVAHSTLLGLGGTPSIELAARLTAIAPAGLTRVFYSDSGSTAVEAALKIAFQYHRQAPEGDARRTRVMAFSNAYHGDTIGSVSLGGMSLFHGIYGPLLFDPVRAPAPHCYRCPADLRPETCGMACLGEVERLMRHHGHELCAVVVEPLVQGAAGMLVQPRGWLRGLRDLCDRHGVFMVADEVAVGFGKTGTMFACEQEGVVPDMLCLAKGITGGYLPLAATLVTEHIHDGFLGGYADFRTFFHGHTYTGNALACAAALASLDVFEEERTLETLRPRIERLATLLAPLNDLPHVGDIRRVGVMTGIELVADRETRTPYRPEERIGHRVTLEARRRGVIVRPLGDVMVLMPPLSITETELETLVHTVRGAIIAVTEHGADGGLWTKRPDGPDNPDKANTPDTPDGARTGETVV

SEQ ID NO: 23087 - protein, 623 aa, GIBBERELLA ZEAE PH-1
MEKVNNFHAIMKMGNVRAISLTFDRNYMSTLFLKVANNCYPTPTMDPSYQSSETLFEGLPIDTLGNGLSASAVKSGIDRLLEHDIEPEHNLGRIHDRCVETLGAVWGSSCNDKPTGCAASGSSEAILLGILAMKRKWETENGGMASSNGSALNLITGSHAHVAVTNAAKANDIEIRSVPVRPEGNYSFDPSKMQGLLDRFTRHFDPIEDTSTVLDNYEQSHGHSIPIHVDAASCDFVAPFNGGKCSRWDFSVPRVISINASGHKFGLTAAALGWIIWRDQRFLSSDMLHESPYLSGHHGLPTLRYSQPSSSVLIQYYYLAHLGRKGFENIIQALLQRSSALSRTLEGTGIFACISESHRTAANTLPVVVFRVNSAVREQRPKFNEQWISDQLFHKGYSVPCSKLPIDGEDIEVLRVVIVLKVILVDKAVITRLAYDHVEIAIEDETGHLHIRKYEQYYKTIGVELRQNQHPPSTHYCERLQSPDHLRVIMSNRHVPTRRLKSGVLFSAPDDILRVPSDESTRRPKRKKFNNIRKMIPGVRKKGVGEEMALDASPALGHQESIAMFAKFVDPSSYGSSNHPNNPPVSSQKKETLCLSVLKVSLTATVEGTLAHMVLKQSFYNPL

SEQ ID NO: 23088 - protein, 386 aa, Zea mays
MAEICCEEAKSTPATAVAAASVSATAAAAAAVAVASSALERRRRRLEMRRFRVASDPEELVAEDVRAAKRQRLARTLSGSCPDAGSDSDRPALPRYGVTSVCGRRREMEDTVSIRPDFLPGTSKHNFFGVFDGHGCSHVATMCQDNMHEVVADEHTKAASGEETAWKGVMERSFSRLDEQAASWATSRSRDEPACRCEQQMPLRCDHVGSTAVVAVVSPSHVVVANAGDSRAVLSRGGVPVPLSVDHKPDRPDELARIEAAGDRYLKPFVSSEPEVTVTERTDDDECLILASDGLWDVVTNEMACEVVRACFRSNGPPAPAARPNGVALPAAGAGAEDGSAVVKGVGKEDSDKACSDAAMLLAKLALARRSADNVSVVVVDLRRGI

SEQ ID NO: 23089 - protein, 430 aa, Corynebacterium diphtheriae NCTC 13129
MTSTQRSQELFARAQQFTPGGVNSPVRAFGSVGGHARFIQSAKGSKLYDVDGNEYVDLVCSWGPMLLGNAHPEIVEAVQKAATNGLSFGAPTEAEVKIAEMIVDRTSVEEVRMVNSGTEATMSAVRLARGFTGRPKVIKFDGCYHGHVDALLASAGSGVATFALPDSPGVTGASAADTIVVPYNDSEAVRAAFEAHPDQIACVIAEAAAGNMGTVAPQDNFNAKLKEVAHEHGALLILDEVMTGFRTSYNGWYGVDGVAGDLTTFGKVISGGLPAAAFGGRADIMRYLAPEGPVYQAGTLSGNPVAMAAGMKSLELATPEVYDMVRANADRLAGLLHEALDREGVAHHIQRAATMLSVRFAEGEGHNFDDMKAADTFRFPAFFHALLDNGIYASPSVFETWFVSAALTDDDFDKIEKALRPAAQAAGKAK

SEQ ID NO: 23090 - protein, 377 aa, Lilium hybrid cv. 'Acapulco'
MENAKGPVVVTGASGYVGSWLVMKLLQYGYTIRATVRDPRDLRKTKPLLDIPGADERLTIWKADLSEDASFDEAINGCTGVYHVATPMDFDSKDPENEVFQPTINGVLGIMKSCKKAGTVKRVIFTSSAGTVNVQENQMPEYDESSWSDVDFCRRVKMTGWMYFVSKTLAEKAAWEFAKENDIQLISIIPTLVVGPFITSTMPPSMLTALSLITGNEAHYSILKQIQLVHLDDVCKAHIFLFENPEASGRYICSSYDATIYDLARKIKDRYPKYAIPQKFEGIDDQIKPVHFSSKKLMDLGFKYQYTFEEMFDEGIRSCIEKKLIPHQTQERYYVHDELDLGCSKMTNDKLDLGGSKLNSMDEMVRGHNERVSVALQ

SEQ ID NO: 23091 - protein, 670 aa, Methylococcus capsulatus str. Bath
MRTRRELANAIRALSMDAVQKANSGHPGAPMGMADIAEVLWNDYLCHNPANPKWPNRDRFVLSNGHGSMLIYSLLHLTGYDLPIEELQNFRQLHSKTPGHPEYGYTPGVETTTGPLGQGITNAVGMALAERTLAGQFNRPGHTIVDHYTYVFLGDGCLMEGISHEACSLAGSMKLGKLIAFYDDNNISIDGEVRGHGGVPGWFMDDTPRRFEAYGWHVIPKVDGHDPDAVKAAIEEARAVTDKPSLICCQTIIGWGSPNKQGKEDCHGAALGTDEVALTRENIGWSHPPFEIPADIYEAWSARETGAKAEGEWNDRFENYRREFPELAAEFERRMAGELPRDWAEKSAAFVAQVNEKAETIASRKASQNALNGFGPLLPEILGGSADLAGSNLTLWSGCKDVNAPGHDGNYVYYGVREFGMSAIMNGIALHGGFKPYGATFLMFSEYARNALRMSALMKIPVIYVYTHDSIGLGEDGPTHQPVEQTATLRLIPNMQVWRPCDAVESAVAWKCAIERRDGPSALIFSRQNLPHMPRTPEQIAAIAKGGYVLVDCTGTPDLILMATGSEVELAVKAAEALTAKGRQVRVVSMASTNVFDAQEPAYRDSVLPPAVTRRLAIEAGVSDGWWKYVGSHGKVIGLDRFGESAPAGVLFKTFGFTVDNVVGQAEALF

SEQ ID NO: 23092 - protein, 424 aa, Desulfovibrio vulgaris subsp. vulgaris str. Hildenborough
MAHPFLHRLTLRLDAQRAAGLDRTVMTPETRTTRHVILDGQRLCNFASNDYLGLADDAAWRAEVADCFARHPASGTASRLAAGHSALVAEAEAAWAEHFGYESCLFLPSGYQANLAVVTGLLHTGDTLFIDRRIHASMARAVPLCGAHPVTYPHGDLARLDRRLTAWRHETTAETASAAPLTEGAPLSSPPATCPTASPPPHGDASPVILTESLFSMDGTVTSMDALATLRSRHGAFVILDEAHACGALGQGGRGLAWGQTENAPAADVIVGTLGKGPGFFGAFVLMPRIVRESLENFASAVMHSTALPEAHAAAVLRLLPRMAGMDDARARLARNARALREGLAGCGLPVHGDAHILCIETGDEAQATQLARRLRTQGVLALSARHPTVPHGHAIVRFSVTAAHTDDDITYCKETVHTCLHTR

SEQ ID NO: 23093 - protein, 327 aa, Streptococcus agalactiae NEM316
MIEKYYNWATLGTGVIANELAQALEARGQKLYSVANRTYDKGLEFATKYGIQKVYDHIDQVFEDPEVDIIYISTPHNTHISFLRKALANGKHVLCEKSITLNSTELKEAIDLAETNHVVLAEAMTIFHMPIYRQLKTLVDSGKLGPLKMIQMNFGSYKEYDMTNRFFSRDLAGGALLDIGVYALSCIRWFMSEAPHNITSQVTFAPTGVDEQVGILLTNPANEMATVSLSLHAKQPKRATIAYDKGYIELFEYPRGQKAVITYTEDGHQDILEAGKTENALQYEVADMEEAVSGKTNHMYLNYTKDVMDIMTQLRQEWGFTYPEEEK

SEQ ID NO: 23094 - protein, 264 aa, Kluyveromyces lactis NRRL Y-1140
MCNIQMDLWTELFLLNASSKFDFDDKNNASNGNAWYKDRSDTQEKIVPKGFNDEESFDTSGGSSFIESLMSNMDGFFSTASTIMESLSPLKEYTTDYSKIENRESVYGIPHGSKFFVIKSFNERNVKLALQNSVWSSTRKGNRRLEREYHSLAPGAKLFLLFSVNKSGKFCGIAEMCSDLIENDPRANIWETHTDSYTFPHLFQIKWWYVNDVKVRRFNHLVWETDGEQKSLGHGRDTEIVPFNIGHEIVAIFHNSYTKSSLLF

SEQ ID NO: 23095 - protein, 329 aa, Clostridium acetobutylicum ATCC 824
MGRIVTLGEIMLRLSPQGYNRFVQAKQFNAFYGGSEANVAVSLAVFGKDVSYTTKLPDNAIAQCAINELRKYGVNTKDIVRGGDRIGLYFCENGESQRPAKLVYDRKDSAIAKAKREDFNWDKIFDGADWFHFSGITPALSDECAKITLDAVKAAKAKGLTVSIDLNYRENLWDAAAFSKAIRELLQYCDVALGSIEEAELAIGEGDGDDCNTVLKKLVEKFQLKYATIILRNRFTAEDVDWTAVLYDGSKFYNAKKYDIHVVDNIGGGDAFAASLIYAITSNFSNQEIIEFATAGSCLKYSMNGDVNLSTVDEIIKLMNGDGSGKVSR

SEQ ID NO: 23096 - protein, 451 aa, Clostridium acetobutylicum ATCC 824
MPWFKKAIFYHIYPLGLCGAPLSNDFTSKPIPRLKEIENWIPYLKSLGITALYLGPVFESTSHGYDTADYYTVDRRLGTNDTLKKLINKLHKNGIKVVLDGVFNHVGRNFPQFMDLIINKQTSSFATWFSGVDFNSKSPYNDDFSYDTWNGCYDLVKLNFNNNEVKSFILNAINFWISEFKIDGIRLDAADCIDINFLREISNFSKSISDDFFLLGEIIFGDYTRFASKNILDSVTNYECYKGLYSSHNSLNYFEIAYSLNRQFGDGGIYKNIPLYNFVDNHDVNRIASTLIDAANIYPIYTILFTIPGIPSIYYGSDFGITGVKQNNSDKYLRPRLKINELKNSKENKPLNNFIKKLCHIRINSEALTEGLYKQLFISNKLFAFLRYTDSEKIIVALNCSKECSQIEFSNDMNATSLFDLIEKKSLKLEPNGTISITLQENQARIFKVSF

SEQ ID NO: 23097 - protein, 490 aa, Guillardia theta
MNQLKNEKTLAFQKFGNFGSSIFLGDLISTNQNFFRNNKKDFNVEKSKKFLPLFGQIHKSKMNLNLDSSIISKDSLVNNTRKVFHELTEGEMEEVIRSFGIHNGARNDTGEEDGSITKPQTVKGLHKADDSVRWYLQLIGRVRLLRPEEEIQLAREISQLLHWEHVKISLREKLQREPTSSEWTAACKVSDVKKFRSILHNARRAKERMVAANLRLVVSIAKRYVNRGMSLQDLIQEGSLGLIRAAEKFDSEKGFKFSTYATWWVKQAVTRAIADHSRTIRLPVHLYDTISAIRKTTRTLNIEIGRSPTEEEIAEKMDMSVEKLRSVLQSAQPTLSLERPLKNDDDASQLSDFIEADQESPEEHVEKSMLRDDLENVINSLSPRERDVVRMRYGLDDGRIKTLEEIGQIFSVTRERVRQIEAKAIRKLRQPYRSSILRDYVLATPSNLDRNLNTNLSNLTLSHRTLSRGSLHTRMIRPKRNGRISRFNHN

SEQ ID NO: 23098 - protein, 411 aa, Arabidopsis thaliana
MNALAATNRNFKLAARLLGLDSKLEKSLLIPFREIKVECTIPKDDGTLASFVGFRVQHDNARGPMKGGIRYHPEVDPDEVNALAQLMTWKTAVAKIPYGGAKGGIGCDPSKLSISELERLTRVFTQKIHDLIGIHTDVPAPDMGTGPQTMAWILDEYSKFHGYSPAVVTGKPIDLGGSLGRDAATGRGVMFGTEALLNEHGKTISGQRFVIQGFGNVGSWAAKLISEKGGKIVAVSDITGAIKNKDGIDIPALLKHTKEHRGVKGFDGADPIDPNSILVEDCDILVPAALGGVINRENANEIKAKFIIEAANHPTDPDADEILSKKGVVILPDIYANSGGVTVSYFEWVQNIQGFMWEEEKVNDELKTYMTRSFKDLKEMCKTHSCDLRMGAFTLGVNRVAQATILRGWGA

SEQ ID NO: 23099 - protein, 431 aa, Cyanophora paradoxa
MPSAFVSGLPGRSAAAVSLQAPGIAHVALAVRPSRDRPAIVELDRQFLGSSLRRPSTQFVGRIKRPERLVDVAPAPPPASPHASAAVLVEEVAAPVAPPRAPRVARKGLSEDSGRRYLQEIGEISLLKAEDEIELAKRIETFRKLEKVKEHMKWKTGVEPTDEEWARAAALSDAEELRHMVRVGTLARDRLVRANLRWVVAVAKKYHKQRGTMSMQDLIQEGNIGLIRAVEKFDPRMGYRFTTYATWWIRQAITRSIQNSSREIRLPAHRHEKINRIKRATVALSRSLGRQPTEAEIAEHVGLDPSRMRKFVESAAAVATVSLDVPINESDNQSATIGDFIRSENEGPADRAERELMRESVARTLAKALSEREYMVLRMRFGLDDGEPKTLNQVGETLGVTRERVRQIEMKALRKLRRPGFSSALRDLSSD

SEQ ID NO: 23100 - protein, 179 aa, Nymphaea alba
MFPMVTGFMNYGQQTVRAARYIGQSFMITLSHANRLPVTIQYPYEKSITSERFRGRIHFEFDKCIACEVCVRVCPIDLPVVDWRLETDIRKKRLLNYSIDFGICIFCGNCVEYCPTNCLSMTEEYELSTYDRHELNYNQIALGRLPMSVIGDYTVRTIMNSTQIKISMDKPLDSRTITN

SEQ ID NO: 23101 - protein, 427 aa, Cyanophora paradoxa
MMEAAFAVPAAVRQASNAAPSPAPRDIGFCSLLAPAPRRRIARTWAGEQVSGPRFEHSGRKSLQWVSSSVRMEAAAPPETKEEKPKVSMPVERRGRRAGGSSDSFNSFIKEVGSFELLSAEEEIELSRQIRDLVQLETVKKRLAARIGREPREDEWAMAAGTQPGPAFQSRILKGRRARARLVQSNLRWVVSIAKKYANKHTMPLQDLIQEGSIGLMKAAERFDLDKGFKFLTYATWWIRQAIFRSLQDQGRTIRLPVHVHDSLYLIKKTRQQLASRLGRIPTPEELADELNIPVSRLAFITQAASLPISLESPISSETSSTKARNNLGDFIESECLQPDEQLERTMLREDLENVLATLKARERDIIRMRYGLVDGSPKTLDEIGEIVGLTRERIRQIEQSAMRKLKAPYRKAILCDYIGQEFRRFK

SEQ ID NO: 23102 - protein, 457 aa, Salmonella enterica subsp. enterica serovar Typhi Ty2
MQKYTSEARQLLALAIPVILAQVAQTAMGFVDTVMAGGYSATDMAAVAIGTSIWLPAILFGHGLLLALTPVIAQLNGSGRRERIAHQVRQGFWLAGFVSVLVMIVLWNAGYIIRSMHNIDPALADKAVGYLRALLWGAPGYLFFQVARNQCEGLAKTKPGMVMGFLGLLVNIPVNYIFIYGHFGMPELGGIGCGVATAAVYWVMFIAMLSYIKHARSMRDIRNEKGFGKPDSVVMKRLIQLGLPIALALFFEVTLFAVVALLVSPLGIVDVAGHQIALNFSSLMFVLPMSLAAAVTIRVGYRLGQGSTLDAQTAARTGLGVGICMAVVTAIFTVTLRKHIALLYNDNPEVVALAAQLMLLAAVYQISDSIQVIGSGILRGYKDTRSIFFITFTAYWVLGLPSGYILALTDLVVDRMGPAGFWMGFIIGLTSAAVLMMLRMRYLQRQPSAIILQRAAR

SEQ ID NO: 23103 - protein, 173 aa, Oceanobacillus iheyensis HTE831
MTLQKATFAGGCFWCMVKPFDQWDGVHQVISGYTGGKVINPTYEQVKKGNTGHYEAVEITYDDAIIDYNTILDLYWKQIDPTDDGGQFQDRGEQYRAAIFYHTKEQWGLAEASKEELATSGRFSKPIVTEIKPATPFYPAEEYHQDFYKKNKEEYEEDRAKSGRDEFIEDNWE

SEQ ID NO: 23104 - protein, 360 aa, Oryza sativa
MEKYEAVRDIGSGNFGVARLMRNRETRELVAVKCIERGHRIDENVYREIINHRSLRHPNIIRFKEVILTPTHLMIVMEFAAGGELFDRICDRGRFSEDEARYFFQQLICGVSYCHHMQICHRDLKLENVLLDGSPAPRLKICDFGYSKSSVLHSRPKSAVGTPAYIAPEVLSRREYDGKLADVWSCGVTLYVMLVGAYPFEDQDDPKNIRKTIQRIMSVQYKIPDYVHISAECKQLIARIFVNNPLRRITMKEIKSHPWFLKNLPRELTETAQAMYYRRDNSVPSFSDQTSEEIMKIVQEARTMPKSSRTGYWSDAGSDEEEKEEEERPEENEEEEEDEYDKRVKEVHASGELRMSSLRI

SEQ ID NO: 23105 - protein, 442 aa, Candida albicans
MVNLLKKLHITKSHQSNHSNSDSNSLNSNTSMDNHQQQQQLQQYQQQFQQPQQQLYPGEQIVHPAAAQTGQNTTNVTAVSSSNITQSATSSLHSQQLQHVDVSKSAAEEAIRRSLLPERSTVSKGKYSLTDFSIMRTLGTGSFGRVHLVRSVHNGRYYAIKVLKKHQVVKMKQVEHTNDERRMLKLVEHPFLIRMWGTFQDSKNLFMVMDYIEGGELFSLLRKSQRFPNPVAKFYAAEVTLALEYLHSHDIIYRDLKPENILLDRNGHIKITDFGFAKEVSTVTWTLCGTPDYIAPEVITTKPYNKSVDWWSLGVLIFEMLAGYTPFYDSTPMKTYEKILAGKIHYPSFFQPDVIDLLTKLITADLTRRLGNLINGPADIRNHPWFSEVVWEKLLAKDIETPYEPPITAGVGDSSLFDHYPEEQLDYGSQGEDPYASYFLDF

SEQ ID NO: 23106 - protein, 280 aa, Rhizoplaca chrysoleuca
VEHGDVKVVAVNDPFIEPHYAAYMLKYDSQHGQFKGTIEVNGNDLIVNGTTVKFYTEKDPANIPWKDTGAYYIVESTGVFTTTEKAKAHLKGGAKKVVISAPSADAAMFVMGVNEKEYKPDIEIISNASCTTNCLAPLAKVMHDNYTIIEGLMTTIHSYTATQKTVDGPSSKDWRGGRTAAQNIIPSSTGAAKAVGKVIPSLNGKLTGMSMRVPTSNVSVVDLTCRLEKAVSYDEIKATMKKASEGELKGIMAYSEDALVSTDLNGDNHSCIFDATAGIS

SEQ ID NO: 23107 - protein, 394 aa, Bordetella bronchiseptica RB50
MSDDIVIVSTARTPIGKAYRGAFNNTHGATLGGHAVEHAVRRAGIEPAEVDDLIMGCGRPEGTAGENIARQAALRAGLPVEVPGVTVNRLCSSGLQAIAMGAQSILCGSADIVVAGGLDSISCVQNEHMNHHMEQDPWLARHLPEIFLPMIDTAEVVARRYGISRQRQDEYAARSQQRAAQARAAGRMRDEIAPMRVSHLAADPHGAPPVETEMLVAEDEGVRPGTTSEKLAALKSVREGGCITAGNASQLSDGASACVLMRAAAARARGLRPLGRFRGFAVAGCRPDEMGIGPVQAVPRLLARAGLAIGDIGLWELNEAFAVQVIYCRDRLGLPDERLNVNGGAIALGHPYGMSGARLVGHALLEGRARGVRYVVVTMCVGGGMGAAGLFEVL

SEQ ID NO: 23108 - protein, 449 aa, Debaryomyces hansenii CBS767
MREVISINVGQAGCQIGNACWELYSKEHGIRPDGYLEDSSDSRPKGGEEGFSTFFSETGSGKYVPRALYVDLEPNVIDEVRTGAYKDLFHPEQLIAGKEDAANNYARGHYTVGREMLDDILDRVRRMSDQCDGLQGFLFTHSLGGGTGSGLGSLLLEQLSIDYGKKSKLEFAVYPAPQVSTSVVEPYNTVLTTHTTLEHADCTFMVDNEAIYDMCRRNLDIARPNFDSLNSLIAQVVSSVTASLRFDGSLNVDLNEFQTNLVPYPRIHFPLVSYAPVFSKNRANHESNSVSEITSSCFEPGNQMVKCDPRTGKYMATCLLYRGDVVTRDVQNSVAQIKAKTTVQMVDWCPTGFKIGICYQPPTAIPGSELASAKRAVCMLSNTTAIAEAWRRIDRKFDLMYSKRAFVHWYVGEGMEEGEFTEAREDLAALERDYIEVGTDSYPEEEEEY

SEQ ID NO: 23109 - protein, 811 aa, Burkholderia pseudomallei
MKSSGSARATRRNAVSSSSAPAHAEPPARRAAKPARKLDGAAARPLAPTNAASAKPQGRTREDKDRPLFEDIRYLGRLLGDVVREQEGDAVFDVVETIRQTAVKFRREDDKAAAQTLEKMLRKLTPEQTVSVVRAFSYFSHLANIAEDRHHNRRRRIHALAGSAAQAGTVAYALDKLKQAGDASSKTIKQFFEGALIVPVLTAHPTEVQRKSILDAQHDIARLLAERDQPLTARELAHHEALLRARVTTLWQTRMLRDARLTVADEIENALSYYRATFLDELPALYADIEEALAEHGLRARVPAFFQMGSWIGGDRDGNPNVTAATLDEAISRQAAVIFEHYLEQVHKLGAELSVSNLLVGASDALKALAAASPDQSPHRVDEPYRRALIGVYTRLAASARVRLGEGTVPVRSAGRGAAPVRATPYADAEEFAADLRVLTDSLALHHGESLATPRLAPLMRAAEVFGFHLASIDLRQSSDIHEAVVAELLARGGVEADYAALPEADKLRVLLAALADPRPLRSPYLDYSDLAKSELGVLERAHAIRAQFGARAVRNYIISHTETVSDLVEVLLLQKETGLFEGTLGTPHANARNGLMVIPLFETIADLRNASDIMRAFFALPGVGELLAHQGHEQEVMLGYSDSNKDGGFLTSNWELYRAELALVDLFDERGIKLRLFHGRGGTVGRGGGPTYQAILSQPPGTVNGQIRLTEQGEVIASKFANPEIGRRNLETVVAATLEATLAPHSNAPKQLPAFEAAMQTLSDAAMASYRALVYETPGFTDYFFSSTPITEIAGLNIGSRPASRKLQDP

SEQ ID NO: 23110 - protein, 280 aa, Rhizoplaca chrysoleuca
VEHGDVKVVAVNDPFIEPHYAAYMLKYDSQHGQFKGTIEVKGNDLIVNGTTVKFYTEKDPANIPWKDTGAYYIVESTGVFTTTEKAKAHLKGGAKKVVISAPSADAAMFVMGVNEKEYKPDIEIISNASCTTNCLAPLAKVMHDNYTIIEGLMTTIHSYTATQKTVDGPSSKDWRGGRTAAQNIIPSSTGAAKAVGKVIPSLNGKLTGMSMRVPTSNVSVVDLTCRLEKAVSYDEIKATMKKASEGELKGIMAYSEDALVSTDLNGDNHSCIFDATAGIS

SEQ ID NO: 23111 - protein, 247 aa, Triticum aestivum
MGRSPCCEKEHTNKGAWTKEEDQRLIAYIRVNGEGCWRSLPKAAGLLRCGKSCRLRWMNYLRPDLKRGNFTDDEDELIIRLHSLLGNKWSLIAGQLPGRTDNEIKNYWNTHIKRKLLSRGMDPHTHRPLTPVDGAAASRPAHIAVPARAAPPTMFAPLTTKQPPMESSSDDGSSGATSTGEPRCPDLNLDLSVGPPAADTPTSHPVCLCRHLGLRGGAVCSCRQADSPGSQGGGFRYFRPLEEGQYI

SEQ ID NO: 23112 - protein, 407 aa, Silicibacter pomeroyi DSS-3
MDYSVKLDAAIQKLHDEGRYRTFIDIERRKGHFPHAVWTRPDGSEKEITVWCGNDYLGMGQNPVVLDAMQEALVAAGAGSGGTRNISGTTVYHKRLEAELADLHGKEAALLFTSAYIANDATLSTLPKLFPGLIIYSDALNHASMIEGVRRNGGAKRIFRHNDVAHLRELLAADDPAAPKLIVFESVYSMDGDFGPIADICDLADEFGALTYIDEVHAVGMYGPRGGGVTERDNLAHRIDIINGTLAKAYGVMGGYIAASAKMCDAIRSYAPGFIFTTSLPPAVAAGAAASVAYLKGAQELRDQHQTQARILKLRLKGLGLPLIDHGSHIVPVIVGDPVHTKKLSDMLLEDFGIYVQPINFPTVPRGTERLRFTPSPVHGPKEVDKLVHAMDALWSHCALNRAELAG

SEQ ID NO: 23113 - protein, 277 aa, Rhizoplaca chrysoleuca
VEHGDVKVVAVNDPFIEPHYAAYMLKYDSQHGQFKGTIEVKGNDLIVNGTTVKFYTEKDPANIPWKDTGAYYIVESTGVFTTTEKAKAHLKGGAKKVVISAPSEDAAMFVMGVNEKEYKPDIEIISNASCTTNCLAPLAKVMHDNYTIIEGLMTTIHSYTATQKTVDGPSSKDGRGGRTAAQNIIPSSTGAAKAVGKVIPSLNGKLTGMSMRVPTSNVSVVDLTCRLEKAVSYDEIKATMKKASEGELKGIMAYSEDALVSTDLNGDNHSCIFDATA

SEQ ID NO: 23114 - protein, 292 aa, Brassica napus
MAANGSAQLSQKEADIKMMCAAEVHLGTKNCNYQMERYVFKRRNDGIYIFNLGKTWEKLMMAARVIVAIENPQDIIVQSARPYGQRAVLKFAQYTGANAIAGRHTPGTFTNQMQTSFSEPRLLILTDPRTDHQPIKEGALGNIPIIAFCDTDSPMRFVDIGIPANNKGKHSIGCLFWLLARMVLQMRGTIRPAQKWDVMVDLFFYREPEEAKPEDEDEVAPQAEFGLPAPEYGGGDQWTTAAIPDAAWPGEAQAPISAAPAAGSWNDSAAPAAAEGGWDAAVPPTTAVTNWE

SEQ ID NO: 23115 - protein, 518 aa, Pycnoporus coccineus
MSRFQSLLSFVLVSLAAVANAAIGPVADLTLTNAAVSPDGFSREAVVVNGQTPGPLIAGQKGDRFQLNVIDNLTNHTMLKTTSIHWHGFFQHGTNWADGPAFINQCPIASGHSFLYDFQVPDQAGTFWYHSHLSTQYCDGLRGPFVVYDPNDPQASLYDIDNDDTVITLVDWYHVAAKLGPRFPLGADATLINGLGRSPGTTAADLAVIKVTQGKRYRFRLVSLSCDPNHTFSIDGHTMTIIEADSVNTQPLEVDSIQIFAAQRYSFVLDASQPVDNYWIRANPSFGNTGFAGGINSAILRYDGAPEVEPTTTQTTSTKPLNEVDLHPLTPMAVPGRPEPGGVDTPLNMVFNFNGTNFFINDHSFVPPSVPVLLQILSGAQAAQDLAPSGSVYVLPSNSSIEISFPATANAPGAPHPFHLHGHTFAVVRSAGSSEYNYDNPIFRDVVSTGTPGDNVTIRFQTNNPGPWFLHCHIDFHLDAGFAVVMAEDTPDTAAANPVPQSWSDLCPIYDALDPSDL

SEQ ID NO: 23116 - protein, 412 aa, Desulfovibrio vulgaris subsp. vulgaris str. Hildenborough
MSGHTAHSGTRHPHTGATVQRLAAEVESHIIAHRRALHAIPETGFEERCTAAYVAETLSGLGLPVRTGIATTGVTALLDTGLEGPVVMLRADMDALPVTEATGLPFASRHEGRMHACGHDAHMAMLLGAAEMLSAIVREEPGRLRGKVLFLFQPAEEGPGGAAPMIAEGVLDEPKVDVCLGAHVWPSLPVGTVGVKPGPLMAAMDRFELAVHGRGGHAATPHLCVDALETATQVVGALQRVVSRMTDPLEPVILTIGELHAGTAYNVIPGEARMAGTVRTFSPDVRAAWEDRIRTVADGVCAAMGATATLDFHYCHGPVINTPRVAEVVRRAVVEARGEQAVTTPTPTLGGEDFSCFLERIPGCFFFVGCGGDVPIHNPRFDLDERCLALGAETFVRAALLFTEGGATGMTA

SEQ ID NO: 23117 - protein, 518 aa, Pycnoporus coccineus
MSRFQSLLSFVLVSLAAVANAAIGPMADLTLTNAAVSPDGFSREAVVVNGQTPGPLIAGQKGDRFQLNVIDNLTNHTMLKTTSIHWHGFFQHGTNWADGPAFINQCPIASGHSFLYDFQVPDQAGTFWYHSHLSTQYCDGLRGPFVVYDPNDPQASLYDIDNDDTVITLVDWYHVAAKLGPRFPLGADATLINGLGRSPGTTAADLAVIKVTQGKRYRFRLVSLSCDPNHTFSIDGHTMTIIEADSVNTQPLEVDSIQIFAAQRYSFVLDASQPVDNYWIRANPSFGNTGFAGGINSAILRYDGAPEVEPTTTQTTSTKPLNEVDLHPLTPMAVPGRPEPGGVDTPLNMVFNFNGTNFFINDHSFVPPSVPVLLQILSGAQAAQDLAPSGSVYVLPSNSSIEISFPATANAPGAPHPFHLHGHTFAVVRSAGSSEYNYDNPIFRDVVSTGTPGDNVTIRFQTNNPGPWFLHCHIDFHLDAGFAVVMAEDTPDTAAANPVPQSWSDLCPIYDALDPSDL

SEQ ID NO: 23118 - protein, 235 aa, Methylococcus capsulatus str. Bath
MYPRQQKRWHVYPTAEDFEIRVVKGILRMAWEAIAIRGAFHIVLAGGRTPEPIYRRLAAARAEAEWRQWHVYWGDEFCLPAGNPGRNSILARDVWLDQGAIPRTQIHPIPAELGPQRGAELYAEVIAGVEEFDLVLLGLGTDGHTAALFPGRDWGAEPDSPDVLAVTDAPGFCAERVSLSAARLSRSREVIFLATGFGKFSAVQRWRCGEPLPAAAITPACGVDICVTLEAFDFA

SEQ ID NO: 23119 - protein, 480 aa, Lactobacillus acidophilus
MKLQNKAILITYPDSLGHNLKDLDHVMDRYFNKTIGGIHLLPFFPSNGDRGFSPTRYDVVEPKFGSWEDVEKLSQKYYLMFDFMINHLSKKSSYFEDFEAKHDKSKYSDLFLSWDKFWPKGRPTKEDIDLIYKRKDKAPYQNIKFEDGTHEKMWNTFGPDQMDLDVRTKTTQDFIKHNLQNLSKHGASLIRLDAFAYAIKKLDTNDFFVEPEIWNLLEKVNDYLKDTPTTILPEIHEHYTMPFKVAEHGYFIYDFALPMVLLYSLYSGNSTQLAAWLKKCPMKQFTTLDTHDGLGVVDAKDILTDDQISYTTNELYKIGANVKKKYSSAEYHNLDIYQINTTYYSALGNDDKKYFIARLLQIFAPGIPQIYYVGLLAGENDIQLLEKTKEGRDINRHYYDLDEIAEQVQRPVVKSLIKLLEFRNSVPAFDLEGSIKVETPSEHEIIVTRSNKAGTEVASTYVDFKNLDYQVKYNDQVFNF

SEQ ID NO: 23120 - protein, 630 aa, Triticum aestivum
  misc_feature (14)..(14): Xaa can be any naturally occurring amino acid
  unsure (1)..(630): unsure at all Xaa locations
SANQKAAFTEILDXLRAICHAHMLPLALTWVPSSNGSDGGYVGHDSVLDSQSGKAILRIHESPTHVNDAKMQGFFHACTETHLEKGQGIAGRALKSNLPFFSPNIREYGIKDYPLAHHARKFGLHAAVAIRLRSTYTGDDDYILEFFLPINCTGSEEQQMLLNNLSSTMQRICKSLRTVSEAEVDTARACTAVMYKATSGSCLPTGQSESSSRGDQPATEEAFQDLSLIDKQRGMSEQAQSSTMRLAEKKRSTAEKNIGMDVLRKYFSGSLKDAAKSLGVCPTTLKRICRTHGISRWPSRKINKVNRSLKKIQTVINSVHGVDSSLQYDPATGSLVPAVSLPEKTSFPSCDAVSSPSVGKTVDEKSGPKSEQGYSSPEGWERESCQLQRSDAQKGEGGEFHMQTTNYSGSGDHGSYGPNITHHISSEGTQGPLYPTGAVSALHDKETGCIEPLPCVLPSIKTTRDQIVGRNSPPMQQADIDMFDDREGREHTHPSTSGMTDSSSGSASSHPTFKKNPARPLKDKSSPALTVKATYNGDTVRFKFLPSMGWYNLLEEIAKRFKLSMGVFQLKYKDDEDEWVIMANDSDLQECVDVMDSMGTRNVKLQVRDLPCLISSSGSSSCLQLEGHNS

SEQ ID NO: 23121 - protein, 130 aa, Brassica napus
  misc_feature (128)..(129): Xaa can be any naturally occurring amino acid
  unsure (1)..(130): unsure at all Xaa locations
MDVYGLSSPDLLRIDDLLDFSNDEIFSSSSTVASSAASSSENPFSFHASPPPPPPLLTDFTHDLCVPSDDAAHLEWLSRFVDDSFSDYPANPLTVNVRPDVTFTGKPRSRRSRAPSSPSLAGTWAPMXXS

SEQ ID NO: 23122 - protein, 145 aa, Xylella fastidiosa 9a5c
MRMRILAMIKSVASGKELAGLRVMVIDDSKTIRRTAETLLKREGCEVVTAIDGFEALAKIADQKSQIIFVDIMMPRLDGYQTCALIKNNNLFKSTPVIMLSSKDGLFDKARGRVVGSEQYLTKPFTREELLSAIRTYVNPLKLAV

SEQ ID NO: 23123 - protein, 738 aa, Magnetospirillum gryphiswaldense
MLLFGGTLMTIATDAANAPPDPGLACLAMLARFFEKPCDYDQLRHAHGDPGKAADEVDLLRHAKGIGFKASAISSDFTRLARTPLPCLARHRDGGWFILAKVAEGKVLIQDPRVGRPEELTAEQLDERWDGRLLLVATRAQMAALGSHFDLTWFIPAVVKYRKLFGEVLIASFFLQLFGLISPLFFQVVTDKVLVHRALTSLDVLMIALIAVGLFEVVLGYLRTYLFSHTTNRVDVELGARLFRHLLALPIAYHGARRVGDTVARVRELENIRSFLTGSALTLVMDLLFTVVFFAVMFWYAPLLAWIVVGSLPFYIGLSILATPVLKTMTEEKFKRGAENQALLVETCNGMETVKALAVEPQMQRKWEEQLAAYVQISFKSANFNALAGQGVQSIQKVSMALTLWFGASLVMEGELTIGGLVAFNMLAGRVSQPILRLAQLWQDFQQMRISVDRLGDILNAKPEPSAAARAAPPPLKGMMEFKEVVFRYRPDRPPVLKGIALTVPAGQVVGIVGPSGSGKSTLTKLIQRLYLPETGRITVDGMDLAALDPAWLRRQIGVVLQENWLFNRSVKDNIALADPSISVDRVIAAAKVAGAHDFIAELPEGYDTILGERGGSLSGGQRQRVAIARALVTNPRILIFDEATSALDYESEKAIQDNMRDICADRTVFIIAHRLSTVRDADRIIVIDKGEIVEDGSHAELINTEGGRYAHLWQAQTGTVQVIRRPVALKMAEGGLP

SEQ ID NO: 23124 - protein, 327 aa, Silicibacter sp. TM1040
MANVLVTGGAGYIGSHACKALKQAGYTPVTYDNLVTGWQDAVKFGPFEQGDLTDRGRLDEVFAQYKPVAVMHFAALSQVGEAMSEPGRYWANNVGGSLCLIEAAVAAGCLDFVFSSTCATYGEHDNVVLDENTPQQPLNAYGASKRAVEDILKDFEAAHGLRSVIFRYFNVAGADPEAEVGEFHQPETHLVPLMIQAIKGERAALTVFGTDYDTPDGTCIRDYVHVCDLVDAHILGLKWLEDGKGSRVFNLGTGTGFSVKEVLSHSHAVTNTEVPHVIGPRRAGDCTKLVSGSVRAGEELGWEPKRSTMDQMISDAWRWHQSGHYER

SEQ ID NO: 23125 - protein, 476 aa, Caulobacter crescentus CB15
MIRARRSRIVATLGPASSSFDMIVTLAKAGADVFRLNFSHGAHETHAAVYAAIREAEKVVNRPLGVLADLQGPKLRVGKFADGPVMLKAGQAFRFDSDPAPGDETRVHLPHPEILTAMRPGATLLLDDGKLRMTVTDAGPGYANTKVVNSGKLSERKGVAVPDVVIPMSPLTAKDREDLAFALRLGVDWVALSFVQAPEDMAELRRIVEGRAAVLAKIEKPQALKVLGPILDLCDGVMVARGDLGVEMAPEEVPVAQKEILRAARERGIPVIVATQMLESMTSSPTPTRAEASDVANAVYEGADAVMLSAESAAGDYPEESVSMMNRIIERVERDPKWPELMYAEQSHDDVDADVLVVAAAGAAKSGSTKCLVAFTTTGATARRLSRERPLQPVLALSPEISAVRRMCLVWGVEPRVSAQPDSLEVVTTDASSKALELGLVAPGERLLVVAGTPFGAPGAANLLRLAHAPAPARRR

SEQ ID NO: 23126 - protein, 529 aa, Marchantia polymorpha
MDSRAQNRDGGEDVKQELLSAGDDGKVPCPTVAIGIRQRLPDFLQSVNMKYVKLGYHYLITHAMFLLTLPAFFLVAAEIGRLGHERIYRELWTHLHLNLVSIMACSSALVAGATLYFMSRPRPVYLVEFACYRPDERLKVSKDFFLDMSRRTGLFSSSSMDFQTKITQRSGLGDETYLPPAILASPPNPCMREAREEAAMVMFGALDELFEQTGVKPKEIGVLVVNCSLFNPTPSMSAMIVNHYHMRGNIKSLNLGGMGCSAGLISIDLARDLLQVHGNTYAVVVSTENITLNWYFGDDRSKLMSNCIFRMGGAAVLLSNKRRERRRAKYELLHTVRTHKGADDKCFRCVYQEEDSTGSLGVSLSRELMAVAGNALKANITTLGPLVLPLSEQILFFASLVARKFLNMKMKPYIPDFKLAFEHFCIHAGGRAVLDELEKNLDLTEWHMEPSRMTLYRFGNTSSSSLWYELAYTEAQGRVKRGDRLWQIAFGSGFKCNSAVWRALRTVKPPVNNAWSDVIDRFPVKLPQF

SEQ ID NO: 23127 - protein, 399 aa, Brassica napus
MALKLNPLVSRPCKLASSARPPVSTFRSPKFLCLASSSSPALSSKEVESLKKPFTPPREVHLQVLHSMPPQKIEIFKSMEDWAEQNLLPHLKDVEKSWQPQDFLPDPASDGFEDQVKELRERARELPDDYFVVLVGDMITEEALPTYQTWWNTLDGVRDETGAGPTSWAVGTRAWTAEENRHGDLLNKYLYLSGRVAMRQIEKTIQSLIGSGMDPPTENNPYLGFIYTSFQERATFVSHGNTARQAKEHGDLRLAQICGTIAADEKRHETAYTKIVEKLLEIDPDGTVVAFADMMRKKISMPAHLMYDGRDDNLFDNFSSVAQRLGVYTAKDYADILEFLVGRWKIESLSGLSGEGNKAQEYLCGLTPRIRRLDERAQARAKKGPKIPFSWIHDREVQL

SEQ ID NO: 23128 - protein, 444 aa, Prochlorococcus marinus
GGGSTTATVLAQVMVHEGLKNTAAGASPIDIRGGMEKAVSHIVDNLQQQSKKFSGDKVLQVATVSSGGDEEIGAMAAEAMDNVSVDGVITVEESKSLNNELEITEGMAFDRGYSSPYFVTDAERQICEFENPLLLITDRKISSIADLVPVLETVQKSSSPLVILAEEVDGEALATLVVNKNRGVLQVASVRAPSFGERRKAALADIAVLTKGTLISEDKAMTLDKVSLADLGKARKITITKESTTIVANDDTKKEVASRVASIKRELDQTDSDYDKEKLNERIAKLAGGVAVIKVGAPTETELKNRKLRIEDALNATRAAVERGIVAGSGSTLIKLGEELDSLSKKVLDGDQATGVDIIKKALSASAKQNALNAGENGDVVVSEIQRLGKGFNAATGQYEDLISAGIIDAVKVIRLALQDAVSIASLLITTEVIIADKPEPPPS

SEQ ID NO: 23129 - protein, 480 aa, Yersinia pestis KIM
MSRRLRRTKIVTTLGPATDRDNNLEKIIAAGANVVRLNFSHGSAEDHELRANKVREIAARLGRHVAILGDLQGPKIRVSTFKEGKVFLNINDKFLLDANMAKGEGDKNKVGIDYKGLPADVVPGDILLLDDGRVQLKVVEVQGMKVFTEVTVGGPLSNNKGINKLGGGLSAEALTEKDKADIVTAAKIGVDFLAVSFPRTGEDLHYARRLARDAGCNAQIVAKVERAEAVATDEAMDDIILASDVVMVARGDLGVEIGDPELVGIQKKLIRRARQLNRAVITATQMMESMITNPMPTRAEVMDVANAVLDGTDAVMLSAETAAGQYPAETVAAMARVCLGAEKIPSINVSKHRLDVQFDNVEEAIAMSTMYAANHLKGITAIIAMTESGRTALMMSRISSGLPIFAMSRHDHTLNLTAIYRGVTPVYCDPHTDGVLAATEAVKRLQDKGFLVSGDLVIVTQGDVMGTIGTTNTSRIIRVE

SEQ ID NO: 23130 - protein, 280 aa, Rhizoplaca chrysoleuca
VEHGDVKVVAVNDPFIEPHYAAYMLKYDSQHGQFKGTIEVKGNDLIVNGTTVKFYTEKDPANIPWKDTGAYYIVESTGVFTTTEKAKAHLKGGAKKVVISAPSEDAAMFVMGVNEKEYKPDIEIISNASCTTNCLAPLAKVMHDNYTIIEGLMTTIHSYTATQKTVDGPSSKDWRGGRTAAQNIIPSSTGAAKAVGKVIPSLNGKLTGMSMRVPTSNVSVVDLTCRLEKAVSYDEIKATMKKASEGELKGIMAYSEDALVSTDLNGDNHSCIFDATAGIS

SEQ ID NO: 23131 - protein, 173 aa, Triticum aestivum
  misc_feature (31)..(31): Xaa can be any naturally occurring amino acid
  misc_feature (47)..(47): Xaa can be any naturally occurring amino acid
  misc_feature (61)..(61): Xaa can be any naturally occurring amino acid
  misc_feature (75)..(75): Xaa can be any naturally occurring amino acid
  misc_feature (94)..(94): Xaa can be any naturally occurring amino acid
  misc_feature (108)..(108): Xaa can be any naturally occurring amino acid
  unsure (1)..(173): unsure at all Xaa locations
MAPTGRPLGPPRWSFRGGKSNAGLPVNPGSXGNPGSVRNGGRLSACXVWPIEGIKKFENCXLLPPLSTEALLRQXDYLIRSKWVPCLEFSKVGXIFREHNASPGYYDXRYWTMWKLPMFGCTDATQVINEVEEVKKEYPDAYVRIIGFDNMRQVQCVSFIAFKPPGCEESGKA

SEQ ID NO: 23132 - protein, 167 aa, Oryza sativa
MAFASASNGAVRFTEEQEALVLKSWAIMKDDSANIGHRFFLKIFEVAPSARHLFSFLRNSDVPLEKNPNLKKHAMAVFVMTCEAAAQLRKTGRVTVRDTTIKRLGSTHFKNGVSDTHFEVARFALLETIKDGIPASMWSPEMKNAWGEAYEHLVAAIKEGMKPVALL

SEQ ID NO: 23133 - protein, 277 aa, Rhizoplaca chrysoleuca
VEHGDVKVVAVNDPFIEPHYAAYMLKYDSQHGQFKGTIEVNGNDLIVNGTTVKFYTEKDPANIPWKDTGAYYIVESTGVFTTTEKAKAHLKGGAKKVVISAPSADAAMFVMGVNEKEYKPDIEIISNASCTTNCLAPLAKVMHDNYTIIEGLMTTIHSYTATQKTVDGPSSKDWRGGRTAAQNIIPSSTGAAKAVGKVIPSLNGKLTGMSMRVPTSNVSVVDLTCRLEKAVSYDEIKATMKKASEGELKGIMAYSEDALVSTDLNGDNHSCIFDATA

SEQ ID NO: 23134 - protein, 231 aa, Brassica napus
STHASGEVESDYALLESIRRHLLGGEAELWFAESIPSSCFTESWGDLPLKENDSEDMLVYGLLNDPYDTSSPSSDLSCITDFLDLETSSKRPSDPPVVKAEPAESFAAATVEKQKAATAKGKHYRGVRQRPWGKFAAEIRDPAKNGARVWLGTFETAEDAAFAYDRAAFRMRGSRALLNFPLRVNSGEPDPVRITSKRSYTSSSSSDNGKLKRRRNTEEVPSEFQVKCEVA

SEQ ID NO: 23135 - protein, 429 aa, Debaryomyces hansenii CBS767
MFSVNRLFQVWGLFQLAAFAVASDGFVKVDFDVYQGLNLSAALSSYSQISRRDGSYDVSLVNERLFYVSKLQIGTPESEVSVLIDTGSSDLWVMSTKNPQCQDNGGSIDCEKYGTYNESASSTFHDNKTDFSIQYVDQSYAKGTWGTDTISLNEALKLENASFAVADDSDSDVGVFGIGFKGLESNPEQYSNLPITMKEQGFIKKIAYSLYLTSAESESGSILFGAIDHAKYDGELAVIDISKINGDYGYLQIPLTSVSVDVKSNVDSQPSDNTVPSTGSSLRSFNNSGAQPIEANNSQALLDSGTTLTYLPDSLVQQVLEQADKNASYSPLAGGYIVSCTLRQPDNSMTFRFNDEKDIKVPFSDLVMQSGQDPNTGKAICLLGLLPSQDVILGDNFLRSSYTVFNLDDKTISLAQLKQTNDEDIEVIN

SEQ ID NO: 23136 - protein, 304 aa, Neurospora crassa
MPYNTTAIPPRKEVTGQTQLPLTRVKKIIAVDPDITVCSNNAAFVITLATEMFIQHLASEAQNMAKAERKPRRNVQYKDVAAAVSHHDNLEFLEDVVPKTSSYKAIKAQAAAARARVKGGSDVVVPPAGTAAAVVLAPGPVMGGLAAPEGVMLSLEQGQVGDHGDERDRMAMLPNAKKQKGSGGLQQTSILMSMNGGLPAGTGSGASGSIGGLAAPVNGLGAGGVNTGITNMGVTTGVVGMSSASGRPFSSTPGVMSGMNRGILSASPPATTSDEDPSAQLQMEMRQAASQQYRGHDGDVDMTG

SEQ ID NO: 23137 - protein, 176 aa, Brassica napus
MGEQPDPFSTSTLPDFISSQKIGRPVTLEGQSNRGHPYSGLKKRGQSSRSWVKIDENGNSTVLELDKATIMKRCSLPSRDLRLLDPLFIYPSSILGRERAMVVSLEKIRCIITAEEVILMNARDASVVQYQSELCKRLQSNQNLAVKDDSPFEFKALELGLELSCLSLDAQDLTPL

SEQ ID NO: 23138 - protein, 185 aa, Anabaena variabilis ATCC 29413
MLKLYGGAFSRASIVKWYLEEIEVPYEFVLLDMQAGEHRQPEYLKINPIGKVPAIVDGDLQLWESGAILLYLRDKYGKAPLSPEERGILAQWVVFANATLGPGIFVEANREKEMPRLLTPLNEIFERQPFLLGNEFSVADVAVGSILAYIPIMLKLDLGDYPAVVNYIKQMTERPAFQKSIGGRS

SEQ ID NO: 23139 - protein, 480 aa, Lactobacillus acidophilus
MPIENKVMLITYPDSLGKNLKELDEILSEDLKGAVGGIHLLPFFPSTGDRGFAPTGYTEVDPKFGDWSDIEKIGKKYYLMFDFMINHISRQSKFYKDFKQKKDKSKYADLFLSWDKFWPEGRPTRKDIDLIYKRKDRAPYQEITFTDGSKEKLWNTFGEEQIDMDVRKEVTQKFIKDTLRALIDHGADIIRLDAFAYAVKKLDTNDFFVEPEIWDLLKQVQDDISDKGAMILPEIHEHYSMPFKISKHGYYIYDFALPMVTLYSLYSGKSNRLADWLKKCPMKQFTTLDTHDGIGVVDARDILSPDEIKYTSNELYKVGANVKKKYSSAEYHNLDIYQINTTYYSALGNDDKKYFIARLIQMFAPGIPQVYYVGMLAGKNDIELLEKTKEGRNINRHYYGREEVAEETKRPLVAALLKLFNFRNNEAAFDLDGSIEITTPNENVIQITRMNKDKTRKARAVINLKNLTYQVTVNNEVINF

SEQ ID NO: 23140 - protein, 1478 aa, Saccharomyces cerevisiae
MPFLRKIAGTAHTHSRSDSNSSVKFGHQPTSSVASTKSSSKSPRATSRKSIYDDIRSQFPNLTPNSTSSQFYESTPVIVQSFNWTTDDHISAGTLENPTSFTNSSYKNDNGPSSLSDSRKSSGGNSVNSLSFDKLILSWDPTDPDEWTMHRVTSWFKFHDFPESWILFFKKHQLFGHRFIKLLAYDNFAVYEKYLPQTKTASYTRFQQLLKKTMTKNVTNSHIRQKSASKLKSSRSSSESIKSKLKNSKSQEDISNSRSTSESALSPTKSGPSKTDEKNFLHSTSTHQKTKSASSLYRRSFISLRGSSSSNASSAKSPSNIKLSIPARPHSIIESNSTLTKSASPPASPSYPSIFRRHHKSSSSESSLLNSLFGSGIGEEAPTKPNPQGHSLSSENLAKGKSKHYETNVSSPLKQSSLPTSDDKGNLWNKFKRKSQIGVPSPNTVAYVTSQETPSLKSNSSTATLTVQTADVNIPSPSSSPPPIPKTANRSLEVISTEDTPKISSTTASFKETYPDCINPDKTVPVPVNNQKYSVKNFLLDQKFYPLKKTGLNDSENKYILVTKDNVSFVPLNLKSVAKLSSFKESALTKLGINHKNVTFHMTDFDCDIGAAIPDDTLEFLKKSLFLNTSGKIYIKDQMKLQQKPKPAPLTSENNVPLKSVKSKSSMRSGTSSLIASTDDVSIVTSSSDITSFDEHASGSGRRYPQTPSYYYDRVSNTNPTEELNYWNIKEVLSHEENAPKMVFKTSPKLELNLPDKGSKLNIPTPITENESKSSFQVLRKDEGTEIDFNHRRESPYTKPELAPKREAPKPPANTSPQRTLSTSKQNKPIRLVRASTKISRSKRSKPLPPQLLSSPIEASSSSPDSLTSSYTPASTHVLIPQPYKGANDVMRRLKTDQDSTSTSPSLKMKQKVNRSNSTVSTSNSIFYSPSPLLKRGNSKRVVSSTSAADIFEENDITFADAPPMFDSDDSDDDSSSSDDIIWSKKKTAPETNNENKKDEKSDNSSTHSDEIFYDSQTQDKMERKMTFRPSPEVVYQNLEKFFPRANLDKPITEGIASPTSPKSLDSLLSPKNVASSRTEPSTPSRPVPPDSSYEFIQDGLNGKNKPLNQAKTPKRTKTIRTIAHEASLARKNSVKLKRQNTKMWGTRMVEVTENHMVSINKAKNSKGEYKEFAWMKGEMIGKGSFGAVYLCLNVTTGEMMAVKQVEVPKYSSQNEAILSTVEALRSEVSTLKDLDHLNIVQYLGFENKNNIYSLFLEYVAGGSVGSLIRMYGRFDEPLIKHLTTQVLKGLAYLHSKGILHRDMKADNLLLDQDGICKISDFGISRKSKDIYSNSDMTMRGTVFWMAPEMVDTKQGYSAKVDIWSLGCIVLEMFAGKRPWSNLEVVAAMFKIGKSKSAPPIPEDTLPLISQIGRNFLDACFEINPEKRPTANELLSHPFSEVNETFNFKSTRLAKFIKSNDKLNSSKLRITSQENKTE

SEQ ID NO: 23141 - protein, 232 aa, Caulobacter crescentus CB15
MPFTPIKLEAFGSREDLYDAAASVLVGALTTAVARHGRVGFAATGGTTPAPVYDRMATMTAPWDKVTVTLTDERFVPATDASSNEGLVRRHLLVGEAAKASFAPLFFDGVSHDESARKAEAGVNAATPFGVVLLGVGPDGHFASLFPGNPMLDQGLDLATDRSVLAVPPSDPAPDLPRLSLTLAALTRTDLIVLLVTGAAKKALLDGDVDPALPVAAILKQDRAKVRILWAE

SEQ ID NO: 23142 - protein, 418 aa, Zea mays
MAEAAASSSSSGSCAPRRLHGAGIVRDALTYNGLAALPPPLPPAQVQVTAYGSGGGGGGGGGGGGKISPAVLFIIVILAVVFFISGLLHLLVRVLMKKQRRRGGTASAAARGSGGEGGGADAALQRQLQQLFHLHDSGLDQAFIDALPVFAYREIVVGGGGDGDKEPFDCAVCLCEFDAEDRLRLLPLCGHAFHLNCIDTWLLSNSTCPLCRGVLFVPGLMGEDSPMFDFEEGLEEGRLSEDCDDGFGLPGRKASGLAQTPVAEKKVFPVRLGKFKNVGTHGAVEGGNANANANPRVLTRDEGESSSSRLDGRRCFSMGTYQYVLGTSELRVALQPGCIRNDTGGAMRGMPPGLSSINADIMEGKKICARNKGESFSVSKIWQWSNLKGKLPAGSDECSDAGSLPWMKKGGAVDTSNL

SEQ ID NO: 23143 - protein, 631 aa, Kluyveromyces lactis NRRL Y-1140
MSPVQLDEKSLRTKSPRSDSPVHGQSTVVKNIPFGHYVFERLLNSGAKSIFGVPGDFNLPLLEYLYDEDLVANGLQWIGTCNELNGAYAADGYSRYTNKLGCVITTYGVGELSALNGVAGAFAEDVKVLHIIGVSPSRFRENEQFRSHNVHHLVPAIDSQQPPNHQVYFDMVKDRVCCSSAFLDDINTAADRLDQVIVDICKNSKPGYVFIPVDFADKLVSNKNLIQNPIIDMDTVIESYKDENATKIAGDRLLQWIYESNAPSVFSDLLVDRFNLRKELRQFIETADVWNYNTAMGKSTLDERNPKYLGLYKGAETGKEMQATVDSSDLILHFGPAKNEINCGYYSFHFNENARIIELSNNIIQFIDIKDKNASTVEEANFVSVLKYVNDNLDKSKLSFSYPPVPKSNHSCEYDNNDSITQKSLKEIIPNYFNDGDVLIVETGSFQFGVPNMQFAREMKYITQSFYLSIGMALPAALGVGCGMRDYPRSHIVDQALVPKDYIPRLILCEGDGAAQMTIQEFASYIRYKIPMEILVWNNNGYTVERAINGPTRSYNDIAPFKWTALLNVFGDFENKFNESVTVEKNDELVQLLNKWKSCKERANIKLAEVMLPVMDIPQELNAMLVNGKPN

SEQ ID NO: 23144 - protein, 185 aa, Guillardia theta
MSEKSNLAPFIKKLYQLVNDPMTNDYICWEKNETCFIVNKPTELSVYILPRYFKHNNFSSFVRQLNQYGFHKLEPNEWVFGHPYFKGGDKLKLSSIKRKKQWSSQKNVSVDFYNNEIFKKLIYELDTLKKYKQVLTKDILDVCRRQERFLIKQQSIETKIKKIEEELNNLKYLVFGYFGKILKSN

SEQ ID NO: 23145 - protein, 543 aa, Clostridium acetobutylicum ATCC 824
MAKQILYGEEARRSMQKGVDKLADTVKVTLGPKGRNVVLDKKFGAPLITNDGVSIAKEIELEDPYENMGAQLVKEVATKTNDVAGDGTTTATLLAQAIIREGLKNVTAGANPMLIRNGIRLAVDKTVEGLKKVSKNVNGKEDIARVASISAADPEIGKLIADAMEKVGNEGVITVEESKSMGTELDVVEGMQFDRGYLSPYMVTDQEKMEAVLDDPYILITDKKIANIQEILPLLEQIVQQGKKLLIIADDVEGEALATLVVNKLRGTFNCVAVKAPGFGDRRKDMLRDIAILTGGEVISEELGKDLKDVKVEDLGSAESVKISKENTTIVNGRGDKSAIHDRVAQIRGQIEETTSDFDREKLQERLAKLAGGVAVVKVGAASETELKERKMRIEDALAATKAAVEEGIIAGGGTAYINVLPEVRELTSDEPDVQVGINIIVKALEEPVRQIAANAGLEGSVIIEKIINSEKGIGFDALHEKYVDMLSVGIVDPTKVTRSALQNAASVASTFLTTECAVADIPEKDKPEMPGGAPGMGMGGMY

SEQ ID NO: 23146 - protein, 328 aa, Hordeum vulgare
MCGGAILAQLIPPSAGRPSKQAAAGGRAPPTSSKKGGVSKSRHSSTPDADDDVFEAAFEDFDDHFDLRAEEDGGDDHVVFASKPAFSPRPAYDGGRAAHAASRKKRTGHLHGIRQRPWGKWAAEIRDPHKGTRVWLGTFDTADDAARAYDVAARRLRGSKAKVNFPDAARTGARPRRASRRTAQKPQCPPARTTAYSATAAARAQPEQDAMMVKPELMEFFNVDAIVHLTTAVAALPPVTASTFADTMPRVDEDSSVGSGGGAMLGFADELGFDPFMMFLLPCSDMYESADSIFAGDAVIPDALSVDSGMDAVSLWSFDEFPMDSAIF

SEQ ID NO: 23147 - protein, 95 aa, Clostridium acetobutylicum ATCC 824
MKIRPLGDRVVIKRLEAEETTKSGIVLPSSAKEKPQMAEVVAVGPGGVVDGKEIQMQVKTGDKVFFSKYSGTEIKVDNEELLILRQDDILGIVEE

SEQ ID NO: 23148 - protein, 955 aa, Picea abies
MASIDAQMRLLVPGKVSEDDKLIEYDALLLDRFLDILQDLHGEDIREMVQECYERSGEYEGKNDPHKLEELGNVLTSLDPGDSIVVASSFSHMLNLANLAEEVQIAYRRRNKIKRGGFADESNATTESDIEETFKRLVNQLGKSPAEVFDALKNQTVDLVLTAHPTQSVRRSLLQKHARIRNCLSQLYGKDITPDEKQELDEALLREIQAAFRTDEIRRTPPTPQDEMRAGMSYFHETIWKGVPKFLRRIDTALKSIGINERVPYNAPLIQFSSWMGGDRDGNPRVTPEVTRDVCLLARMMAANLYYSQIEDLMFELSMWRCSDELRARALQLHSASKKDAKHYIEFWKQIPPNEPFRVILGDVRDKLYNTRERTRQLLSNGISDIPEEVTFTNIDEFLEPLELCYRSLCSTGDQPIADGSLLDFMRQVSTFGLSFVKLDIRQESDRHSDVADAITRHLGIGSYKEWSEEQRQAWLLSELQGKRPLFGPDLPKTDEVRDVLDTFHVISELPADNFGAYIISMATAASDVLVVELLQRECHVKKPLRVVPLFEKLADLEAAPAALARLFSINWYRNRIDGKQEVMIGYSDSGKDAGRLSAGWALYKAQEDLIKVAKEFGIKLTMFHGRGGTVGRGGGPTHLAILSQPPDTIHGSFRVTVQGEVIEQSFGEEHLCFRTLQRFTAATLEHGMRPPVAPKPEWRELMDEMAVVATKEYRSIVFQDPRFVEYFRSATPELEYGRMNIGSRPSKRKPSGGIESLRAIPWIFAWTQTRFHLPVWLGFGAAFKHVMEKDIRNLHMLQQMYNEWPFFRVTIDLIEMVFAKGDPGIAALYDKLLVSDDLWAIGEKLRANYGETKDLLLQVAGHKDLLEGDPYLKQRLRLRDSYITTLNVCQAYTLKRIRDPNYHVNLRPHLSKESSTKPAAELVKLNPTSEYAPGLEDTLILTMKGIAAGMQNTG

SEQ ID NO: 23149 - protein, 346 aa, Arabidopsis thaliana
MVTSSDQIQNGSEEQSKRSEIYTYEAPWQIYAMNWSIRRDKKYRLAITSLIEQYPNRVEIVQLDESNGEVRSDPNLCFEHPYPPTKTSFIPDKECQRPDLLATSSDFLRLWRISDDESRVELKSCLSSDKNSEFSGPITSFDWNEAEPRRIGTSSIDTTCTIWDIEREVVDTQLIAHDKEVYDIAWGGVGVFASVSEDGSVRVFDLRDKEHSTIIYESGEPSTPLVRLSWNKQDPRYMATVIMGSAKIVVLDIRFPALPVVELQRHQASVNAIAWAPHSSSHICSAGDDSQALIWDISSMGQHVEGGLDPILAYTAGAEVEQLQWSSSQPDWVAIAFSNKLQILRV

SEQ ID NO: 23150 - protein, 431 aa, Burkholderia sp. 383
MVSRRQFLSGSGAALLGAAMVSKAGAASLPEAPTMAKTATQPPLVPPNGRPYTPVATLNGWTLPWRMKNGWKEFHLTAEPVVREMAPGMNAHLWGYNGQSPGPTIEAVEGDKVRIFVTNRLPEHTTIHWHGLRLPNGMDGVGGLTQPHIPPGKTFVYEFQLESHGTFMYHPHADEMVQMAMGMMGMFIVHPKDRGTMPVDRDFVFLLAAYDIDPGSYTPRVNEMTDFNMWTFNSRVFPGIDPLPVRAGDRVRIRFGNLTMTNHPIHLHGYSFEVAGTDGGWIPPAARWPEVTADVAVGQMRAIEFTADRPGDWAFHCHKSHHTMNAMGHQVPNLIGVPQKDLAKRIGKLVPDYMAMGSTGGAMGGMEMPLPDNTLPMMTGTGPFGPLEMGGMFTVCKVRQGLGRNDYRDPGWFRHPKGTVAYEYTGELPDG

SEQ ID NO: 23151 - protein, 133 aa, Saccharum hybrid cultivar R570
PGIAAVYDKLLVAEDLQSFGEQLRKNYEETKELLLQVAGHKDVLEGDPYLKQRLRLRESYITTLNVCQAYTLKRIRDPSFQVSPQPPLSKEFTDESQPAELVQLNQQSEYAPGLEDTLILTMKGIAAGMQDTG

SEQ ID NO: 23152 - protein, 546 aa, Burkholderia vietnamiensis G4
MAAKDVVFGDSARSKMVEGVNILANAVKVTLGPKGRNVVLERSFGGPTVTKDGVSVAKEIELKDKLQNMGAQMVKEVASKTSDNAGDGTTTATVLAQSIVREGMKYVASGMNPMDLKRGIDKAVAAAVEELKKISKPCTTNKEIAQVGSISANSDSSIGDRIAEAMDKVGKEGVITVEDGKSLADELDVVEGMQFDRGYLSPYFINNPDKQVAVLDNPFVLLHDKKVSNIRDLLPVLEQVAKAGRPLLIIAEDVEGEALATLVVNNIRGILKTVAVKAPGFGDRRKAMLEDIAILTGGQVIAEETGLTLEKATLAELGQAKRIEVGKENTTIIDGAGEAASIEARVKQVRTQIEEATSDYDREKLQERVAKLAGGVAVIKVGAATEVEMKEKKARVEDALHATRAAVEEGIVAGGGVALIRARTAIAGLTGANADQNAGIKIVLRAMEEPLRQIVTNGGEEASVVVAAVAAGKGNYGYNAATGEYVDMVEAGVVDPTKVTRTALQNAASVAGLLLTTDAAVAELPKEDAPMPGGMPGGMGGMGMDM

SEQ ID NO: 23153 - protein, 133 aa, Saccharum hybrid cultivar R570
PGIAAVYDKLLVAEDLQSFGEQLRKNYEETKELLLQVAGHKDVLEGDPYLKQRLRLRESYITTLNVCQAYTLKRIRDPSFQVSPQPPLSKEFTDESQPAELVQLNQQSEYAPGLEDTLILTMKGIAAGMQNTG

SEQ ID NO: 23154 - protein, 146 aa, Triticum aestivum
MPVPLAPYPTPPVPFTPPAPNAGAQSQLVCSGCRNLLMYPAGATSVCCAVCSTVTAVPAPGTEMAQLVCGGCHTLLMYIRGATSVQCSCCHTVNLAMEANQVAHVNCGSCRMLLMYQYGARSVKCAVCSFVTSVGASSGAEQKPSN

SEQ ID NO: 23155 - protein, 129 aa, Saccharum hybrid cultivar R570
LYDKLLVSEELQPLGEKLRANYEETQNLLLQVAGHRDLLEGDPYLKQRLRLRDAYITTLNVCQAYTLKRIRDPDYHVALRPHLSKEIMDSTKAAAELVKLNPGSEYAPGLEDTLILTMKGIAAGLQNTG

SEQ ID NO: 23156 - protein, 129 aa, Saccharum hybrid cultivar R570
LYDKLLVSEELQPLGEKLRANYEETQKLLLQVAGHRDLLEGDPYLKQRLRLRDAYITTLNVCQAYTLKRIRDPDYHVALRPHLSKEVMDSTKAAAELVKLNPGSEYAPGLEDTLILTMKGIAAGLQNTG

SEQ ID NO: 23157 - protein, 402 aa, Pisum sativum
MESRVLSRATTLSSLPTLNKLHRLPLANASLPSVKSFGSVSDGGNLVWGRQLRPELCSPVLKKGASLLRPCPATAGGNDSAGEEKVAPVGFFSRYPALTTGFFFFTWYFLNVIFNILNKKIYNYFPYPYFVSVIHLAVGVVYCLVSWTVGLPKRAPIDGNLLKLLIPVAVCHALGHVTSNVSFAAVAVSFTHTVKALEPFFNAAASQFILGQSIPITLWLSLAPVVIGVSMASLTELSFNWLGFISAMISNISFTYRSIYSKKAMTDMDSTNIYAYISIIALIVCIPPALIIEGPTLLKTGFNDAIAKVGLVKFVSDLFWVGMFYHLYNQVATNTLERVAPLTHAVGNVLKRVFVIGFSIIIFGNKISTQTGIGTGIAIAGVALYSFIKAQIEEEKRQAKAA

SEQ ID NO: 23158 - protein, 389 aa, Staphylococcus aureus subsp. aureus Mu50
MQQHSSKTAYVYSDKLLQYRFHDQHPFNQMRLKLTTELLLNANLLSPEQIVQPRIATGDELMLIHKYDYVEAIKHASHGIISEDEAKKYGLNDEENGQFKHMHRHSATIVGGALTLADLIMSGKVLNGCHLGGGLHHAQPGRASGFCIYNDIAITAQYIAKEYNQRVLIIDTDAHHGDGTQWSFYADNHVTTYSIHETGKFLFPGSGHYTERGEDIGYGHTVNVPLEPYTEDASFLECFKLTVEPVVKSFKPDIILSVNGVDIHYRDPLTHLNCTLHSLYEIPYFVKYLADSYTNGKVIMFGGGGYNIWRVVPRAWSHVFLSLIDQPIQSGYLPLEWINKWKHYSSELLPKRWEDRLNDYTYVPRTKEISEKNKKLALHIASWYESTRQ

SEQ ID NO: 23159 - protein, 218 aa, Glycine max
  misc_feature (176)..(176): Xaa can be any naturally occurring amino acid
  misc_feature (198)..(198): Xaa can be any naturally occurring amino acid
  unsure (1)..(218): unsure at all Xaa locations
KSINKFLNSYLSRELRFKMQIFVKTLTGKTITLEVESSDTIDNVKAKIQDKEGIPPDQQRLIFAGKQLEDGRTLADYNIQKESTLHLVLRLRGGMQIFVKTLTGKTITLEVESSDTIDNVKAKIQDKEGIPPDQQRLIFAGKQLEDGRTLADYNIQKESTLHLVLRLRGGMQIFVXKTLTGKTITLEVESSDTIDNVXAKIQDKEGIPPDQQRLIFAG

SEQ ID NO: 23160 - protein, 561 aa, Debaryomyces hansenii CBS767
MKFSMVATMVFLSQLLLVSGSISLAKFSPFDSPDFCSQIITPTCNTTFSYIDRLNEQIRPYLTSLVETPYFRYFKLNFDKQCKFWDTQHFCATENCAVEILPPSQYNWSNISNDNLKPSKLGQIKRPESTGLADDSASGAETCEDFDYCHIDDDHQCVYVNLLDNPERFTGYGGSQSYDVWKAIYSENCFPNTNPMSMKDVNAEPEQCVEKKLFYRLISGMHASIAVHLSNEYLSPGSGNFEPNLKVFMERVGSFNDRLSNIYFNFALISESIVKLSNFPKLLDTIDHGDDFNQHFLSNSDQNYKQLLSNIVPELSSNLLYNSSTLFNPEVVSPTLKDEFRARFKNVSAIMDCVGCDRCRMWGKLQTIGYGTAFKILFEGDNIDKLKFRRIELVALFNTFDRLSKSIEAINNFKQMYLAHLEDVKKGLVKPGDYEKADAKENGGLDFPFLLSVNFGQDTDKSTKEKTSNSEDLKPAGTSAAKKQPMTFKEEFNKALLEVIDAFFFVITSYKRLPKTIYNISLFKLNHWWNIFIGREEYNQYMEYQLLQNKEQNDYINLFSN

SEQ ID NO: 23161 - protein, 180 aa, Pisum sativum
MASMISSSAVTTVSRASTVQSAAVAPFGGLKSMTGFPVKKVNTDITSITSNGGRVKCMQVWPPIGKKKFETLSYLPPLTRDQLLKEVEYLLRKGWVPCLEFELEKGFVYREHNKSPGYYDGRYWTMWKLPMFGTTDASQVLKELDEVVAAYPQAFVRIIGFDNVRQVQCISFIAHTPESY

SEQ ID NO: 23162 - protein, 180 aa, Pisum sativum
MASMISSSAVTTVSRASRGQSAAVAPFGGLKSMTGFPVKKVNTDITSITSNGGRVKCMQVWPPIGKKKFETLSYLPPLTRDQLLKEVEYLLRKGWVPCLEFELEKGFVYREHNKSPGYYDGRYWTMWKLPMFGTTDASQVLKELDEVVAAYPQAFVRIIGFDNVRQVQCISFIAHTPESY

SEQ ID NO: 23163 - protein, 448 aa, Triticum aestivum
  misc_feature (68)..(68): Xaa can be any naturally occurring amino acid
  misc_feature (146)..(146): Xaa can be any naturally occurring amino acid
  misc_feature (197)..(197): Xaa can be any naturally occurring amino acid
  misc_feature (214)..(214): Xaa can be any naturally occurring amino acid
  unsure (1)..(448): unsure at all Xaa locations
PYFLVRDDKIKNELLGLGISMQSFNGDLLYEPWEVYDENGLAFTTFNKYWEKCMKLPIEISPFLAPWXIENICSSSIDNLGLESSKDEESSNALLSRAWSPGWRNAEKTLEDFVSHGLLDYSKDRMKVTGTTTSLLSPYLHYGEVXLLGNLKHYPWRADEDRFKSWRQGMTGYPLVDAGMRELWATGWTHNRIRYIXSGCLPDGHELGRLDNPXGQKYDPDGEYVRTWIPELARMPGEWIHHPWDAPSSILEVAGVELGFNYPMPIVELHMARECLDDAISTMWQLDTAEKLAELDGEVVEDNLSHIKSFDVPKVVLKELSPSAPRCDQKVPTDNGRNLELQPKELKGTDKQTICVNVIKASKMEDSGSMANSPISRKRSSSGSVFNVPSYSSSVEVRSQNQHPGGYSVGSSGYIVQNAERNCVGKAEDDDSADSCTSAATTLKRPAA

SEQ ID NO: 23164 - protein, 123 aa, Zea mays
  misc_feature (21)..(21): Xaa can be any naturally occurring amino acid
  unsure (1)..(123): unsure at all Xaa locations
AQYYQLILLVYEGYKNIVESXQYNATALNQGLDKTDKFNIESKDNGVPLLGLSLKDRSRHSEFEILDLLRRFGWIVPGYTKPPDAHHVTVLRLFIREDFSRTLTERLVLDIEKVLHELDALHA

SEQ ID NO: 23165 - protein, 403 aa, Leifsonia xyli subsp. xyli str. CTCB07
MSGDPNGRIDGAEWKPRYAEVMMRTLAMPKLLLERGQGCRVWDVDGNEYLDFLAGIAVNSLGHAHPALVEAVSSQVATLAHVSNYFSTAPQLELAERLRAITGAGEQGRVLFANSGAEANEAAFKLARLNRGPHGVRTRVLALRGAFHGRTMGALALTGKPPMREAFEPLPGGVEHIDSTIDALEHAIDDRVAALFVEPVKGEAGVLALPDGFLRRARELTEQHGVLLILDEIQTGVGRTGAWFAYQHEGILPDAVTVAKGIAGGIPIGALVTFGWASDLFTQGQHGSTFGGNPLATAAGNAVLAEIERAGLVENAARRGGELRAIIRSYDSPLIGEVRGAGLLVGIGLTGGEANRLADAALAQGLIVNAPNESSIRLAPPLIVGGAELAEFRERFGRALAAL

SEQ ID NO: 23166 - protein, 488 aa, Anabaena variabilis ATCC 29413
MQIQTPDWVKNAVFYQIFPDRFAISKQSRKRLLRDVRWEDWDAMPTLQGYKGGDLWGIMEQLDYIQDLGIDAIYFTPIFQSASNHRYHTHDYYQVDPMLGGNAAFKELLDAAHERNIKVVLDGVFNHSSRGFFFFHDVLENGPHSPWVNWFKIEGWPLAPYTGELPANYVGWADNRALPVFNHDNPDVREYIMEIAEYWLKFGIDGWRLDVPFEIKTPGFWQEFRDRVKAINPEAYIVGEVWGDSREWLDGTQFDGVMNYLFAGPTIAFTAGDRVVLEQVQSRDYQPYPPLFAAEYATKIQEVLQLYPWEIQLTQLNLLASHDTARLMTIAGGDQASIELATLLLLTFPGAPSIYYGDEVGLPGGIDPDSRRGFPLEANWDREIYQTHRQLIALRHAYPALRTGEYQVIWAQGALYVFARTLGKEELIIAVNVGTAPAQANVDVASLQTQPDKILYGEAEFSWHNTEETKQLSLNLPPRSGCILGLGD

SEQ ID NO: 23167 - protein, 331 aa, Streptococcus agalactiae NEM316
MAVLILGGAGYIGSHMVDQLITQGKEKVIVVDNLVTGHRQAVHSDAIFYEGDLSDKTFMRQVFRENPDVDAVIHFAAFSLVAESMENPLKYFDNNTAGMIKLLEVMNECDIKNIVFSSTAATYGIPEQVPILETAPQNPINPYGESKLMMETIMKWADQAYGIKFVALRYFNVAGDKPDGSIGEDHKPETHLLPIILQVAQGVRDKIMIFGDDYNTPDGTNVRDYVHPFDLADAHILAVDYLRQGNESNVFNLGSSTGFSNLQMLEAARRITGKEIPAQKAARRPGDPDTLIASSEKARQILGWEPKFDNIDKIISSAWAWHSSHPNGYED

SEQ ID NO: 23168 - protein, 426 aa, Rickettsia prowazekii str. Madrid E
MSNQNINKRVVITGLGLVTPVGLNVSSTWKNIVGGVSGIKTITEFDTSKLACKIAGVIDNSEQNGFKLENFTQADDINRLSKMDKFIHYGIAAATEAVEDSGWLPKDEKSRDRTGLILGSGIGGLKMIEDTSIKLYKENNGKVSPFFIPASLINLLSGLVSIKYGFSGPNQAAVTACSTGAHAIGDAMRMIKHGYADVMIAGGAEAPVTPVGIAGFVAARALCTKYNDNPEKASRPWDKDRSGFVMGEGAGIVVLEEYEHAINRGAKIYCEVIGYGSTGDAYHMTAPHPKGRGAYRAMSEALQDADITPSMIDYINAHGTSTPLGDMIELDATQKLFLESNPKILMSSTKSSIGHLLGAAGSVEFIFSVLTIRDQIAPPTLNLENPIDDVKIDLVKFKARETVIDYVLSNSFGFGGTNASLVIKKI

SEQ ID NO: 23169 - protein, 509 aa, Exiguobacterium sp. 255-15
MRRGVMLLLLPLLLSIGIFPQTSEAAGWEKERMYFIMVDRFENGDKSNDLEANPDDPKAFQGGDLAGVTKRLDYIKDQGFTSIWLTPIFKNRPNGYHGYWTDDYYEIDPHFGTKEEFKTLVKEAHKRDLKVVLDLVVNHLGPNHPLVKEKPDWFHKEQTIMNWNNQAEVENNWLFDLPDFNTENKEVVKYLVDVANYWVDETGIDGYRLDTVRHVPPAFWKTFIPAVKKEHPDLFLLGEVFDGDPRKIAIYSKLGFDSVTNFPFYYGIKDQFARKNGSAEELDSVYNRDTTFNPKAMSLANFIDNHDLKRFITEAKIGGAADEERQLRLALFALYAAPGMPIVYQGTEVAMPGGEDPGNRMMMEFDKNDKMQEYVQTLNKMRKNYPAFETGKQRLVAKTDHMAVFERKVKDQSVLYAINLGEKKTTLRVKASEIGDDQRLRGLLFSDVVRQDGDAYEVTLDAGSANGYVVEHSQVNWMSLVAIGSIAPILALIILFVHRRRINRTKETH

SEQ ID NO: 23170 - protein, 407 aa, Zygosaccharomyces rouxii
MATHEEFIRTQVFGTVFEITNRYTDLNPVGMGAFGLVCSATDTLAGQPVAIKKIMKPFSTAVLAKRTYRELKLLKHLRHENLICLQDIFLSPLEDIYFVTELQGTDLHRLLQTRPLEKQFVQYFLYQILRGLKYVHSAGVIHRDLKPSNILINENCDLKICDFGLARIQDPQMTGYVSTRYYRAPEIMLTWQKYDVEVDIWSAGCIFSEMIEGKPLFPGKVHVHQFSIITDLLGSPPRDVIITICSEDTLKFVTSLPHRDPVPFQERFKAVEPDAVDLLGRMLVFDPKKRITAADALVHPYLAPYHDPTDEPIAEAQFDWDFNDADLPVDTWRVMMYSEILDFHKIGGSDGQIDTNAAFDDQVAAATAGPMLPLWLNSNININNSHPVNIQVQLLRHQQPRITVVYQ

SEQ ID NO: 23171 - protein, 840 aa, Arabidopsis thaliana
MKPIFDINETFEKQLKDLTSNVKPIQDNLLEEIITPNTKTEYLQRFLIDRFDKELFKKNVPIVSYEDIKPYLDRVVNGESSDVISARTITGFLLSSGTSGGAQKMMPWNNKYLDNLTFIYDLRMQVITKHVKGVEEGKGMMFLFTKQESMTPSGLPARVATSSYFKSDYFKNRPSNWYYSYTSPDEVILCPNNTESLYCHLLCGLVQRDEVVRTGSIFASVMVRAIEVLKNSWEELCSNIRSGHLSNWVTDLGCQNSVSLVLGGPRPELADTIEEICNQNSWKGIVKRLWPNTKYIETVVTGSMGQYVPMLNYYCNDLPLVSTTYGSSETTFGINLDPLCKPEDVSYTFMPNMSYFEFIPMDGGDKNDVVDLEDVKLGCTYEPVVTNFAGLYRMRVGDIVLVTGFYNNAPQFKFVRRENVVLSIDSDKTNEEDLFKAVSQAKLVLESSGLDLKDFTSYADTSTFPGHYVVYLEVDTKEGEEKETAQFELDEEALSTCCLVMEESLDNVYKRCRFKDGSIGPLEIRVVRQGTFDSLMDFFISQGASTGQYKTPRCIKSGKALQVLETSFRKIIATLQNSLQAKEKIGLVNRSRPGPKGVDRRYGKGPVPPETSAAADDNSSWNETDVTAMVSALSRVIENPTDPPVKQELDKSDQHQPDQDQPRRRHYRGVRQRPWGKWAAEIRDPKKAARVWLGTFETAEEAALAYDRAALKFKGTKAKLNFPERVQGPTTTTTISHAPRGVSESMNSPPPRPGPPSTTTTSWPMTYNQDILQYAQLLTSNNEVDLSYYTSTLFSQPFSTPSSSSSSSQQTQQQQLQQQQQQREEEEKNYGYNYYNYPRE

SEQ ID NO: 23172 - protein, 595 aa, Exiguobacterium sp. 255-15
MLKEAVFHRAMSPFVYKYDDKTIHVRLQTKKNDVDHVDLIWGDPYDWHTENPDDADWNFDPSKSNYWNTFETPMKRSGSDELFDYWFIDVVPPFRRLRYGFRLHDGHSSQVFTERGWFDEKPLDDTGYYFCVPFLNKVDVFHAPDWVKDTVWYQIFPDRFANGDSTNDPAGTLPWNSTAPTTTNLFGGDFQGVIDKIDYLVDLGITGIYFCPIFEAKSNHKYDTIDYLEIDPQFGTKEKFKEMVDLLHANGIRIMLDAVFNHAGFHHKAFADIREHGSNSSYRDWFHLRNFPLVTEPMPNYDTFAFVPEMPKFNTENPEVKEYLLHVARYWVEEFGIDGWRLDVANEVDHAFWRDFRSVVKEADPETYILGEIWHDSQEWLLGDQFDAVMNYPFTNAALNFFALDKTSASTYANDMSHVLFSNTVNVNEVSFNLIGSHDTPRALTRAGNDKNKMRLLLLSMLTFSGSPVIYYGDEIGLDGDQDPGCRKCMPWNPEEQDLNLLMYTKHLLQLRKQHRTLANHGQISFVHADDETNTIVMRRMSQDGTYYVYFNNSNHQATIPAPQSGQGMDLFSNTPLPSLEVTLAPYTGTIIQVI

SEQ ID NO: 23173 - protein, 99 aa, Glycine max
MTELQRSVTSFRRQGSSGLVWDDKFIAGIENQNKQESGDDGSSPSLQRSRSAGAPPYRTVNVAPQAMDPPSPKLATCGFCALFRKPVSAKPNKSKRRTR

SEQ ID NO: 23174 - protein, 264 aa, Corynebacterium glutamicum ATCC 13032
MQSAETRSPYDDDADASRQISADERIHAEVVRGLASRGRERMSGNFRAAVFGINDGLVSNVALVMGVMATGVPAQIVLITGISGLLSGALSMAAGEYISVRSQTELLDASLPDPKAREALHALDVESNELELVYRARGMSEDEARAKASQVFQRISDQKRISDNVLGSTEIQSAGSARSAATFSFLSFAIGAFLPIVPYVFGMEGLAGAVVSLVLVGLSLMATGATTGLLSGKPPGIRAVRQLSIGYGAALVTYVLGLLFGMIL

SEQ ID NO: 23175 - protein, 403 aa, Shewanella oneidensis MR-1
MKRVVITGMGVVSSIGNNKQEVTESLKAGRSGITHSAQFEEMQLRSHVWGNIKLDPSELIDRKALRFMGDAAAYAYIAMQEAIKDAQLTEEQYSNPRVGLIVGTGGASSSNQVQAADILREKGVKRVGPYIVPRIMASTASACLATPFKIKGMNYSISSACATSAHCIGHAVELIQMGKQDMVFAGGAEELDWTLTMGFDAMGALSTKYNATPDKASRTYDADRDGFVISGGGGILIVEELEHALARGAKIYAEVIGYGASSDGYDMVAPSGEGAVRCMRLALADVDTPIDYINTHGTSTPVGDVRELEALREVFKDKCPPVASTKSMTGHALGAAGVHEAIYSLIMMENSFIAPSINIDNLDEAAKDMPIVREYRDAELNTVMSNSFGFGGTNATLVMRKYK

SEQ ID NO: 23176 - protein, 423 aa, Methanosarcina barkeri str. fusaro
MRENPSADELEAWIIQLRREFHRYPELSFGEYETQKKILKILGELGVEARKIADTGVLASIRGKLPGPCIALRSDTDGLQVQEELTERNSDYISRNDGVMHACGHDGHMAMLFGAARLFQENRNFPGEVRLIFQPAEEIPPGGSEKVIAEGGLEGVDAVMGIHIFTNHESGSVGFRPGPFMASTNRFEVIVKGKGGHISKPKSCIDPVRIVTDFLSNLYPALEKQLEPDKYIIGVGRIRGGAQFNRIPDTVEVLGSYRSFDRETTDIIDRTMKECLDEVIKRYVKPGDEFSGFPDYELDILHGYPVLVNDPMFTNAVNSKMQESFPKLTIYPELEKTFAAEDFASYLQKVPGIFISLGDLNPEKKIVEINHSCKFDIDEDILITGTEIFYTVSLDFLKNPEKYLSSQSYLNSESLKKSLKTDK

SEQ ID NO: 23177 - protein, 301 aa, Vigna unguiculata
TGYGLGGSSMALFGRVGGGIYTKAADVGADLVGKVERNIPEDDPRNPAVIADNVGDNVGDIAGMGSDLFGSYAESSCAALVVASISSFGLNHEFTAMLYPLIVSSVGILVCLLTTLFATDFFEIKAVKEIEPALKKQLVISTVLMTIGVAVVSFVALPTSFTIFNFGVQKDVKSWQLFLCVAVGLWAGLIIGFVTEYYTSNAYSPVQDVADSCRTGAATNVIFGLALGYKSVIIPIFAIAISIFVSFTFAAMYGIAVAALGMLSTIATGLAIDAYGPISDNAGGIAEMAGMSHRIRERTDA

SEQ ID NO: 23178 - protein, 642 aa, Debaryomyces hansenii CBS767
MVRMSSYDDDPIIEIFDNDNSDDIQVINRDNTQYDQNLMNSTGNTPHNYYNDIYDNSQHEHTQQNRQHQPQEQLSSLSSILQLQAETHSNQQEPSGLTPILSSNDYNQLTTVSQPKYTTSLPPLAPLSESVIPNNLNIPPTLSLPKASESQDKKTNTVTTTTKKRKEASSSKTRPAFVMKIWSMVNDPANHDYIRWNDNGKTFQVFHREEFMKLILPKYFKHNNFASFVRQLNMYGWHKVQDISNGTLNKDDKSNDEIWQFENPYFIRGREDLLDKIVRNKTISQESDHLEAGNLNFQSVLNELDQIKVNQFAIGEDLRRVRNDNKTLWQENFLTRERHQQQAQTLEKILKFLAAVYGNSAGKLLEVDNGSIGLDDFNSNNQMTTYNYQQPPQAHNQAPHQPIQVPSMTDQPSQPPSPFNRPRLMLMDQAYQKSPSNNPSPRETAQRNSNSGSIEEIIRSYENTPNDSPNSNVNKIYQQLMNNEPGVSSPRHYFPELNSQNNSYFGVPNTPGQQYIKSGTPLGSSNNTSEVMNGLEQNIFKQGQSIQQVQDWIQKLAAQQQQQQQQQQQLQNLQSLHQNHKQNSDDYEKPDIDEFDVNEFLDNSNASNSQASNSVNSDLNDASSNKRSIDEVNDGNAKRKKQ

SEQ ID NO: 23179 - protein, 591 aa, Chlamydophila pneumoniae AR39
MTKLSSKARNPLVLFQVRKLFMNTQNSQATEVSSEEESQKKLEELVALAKEQGFITYEEINEILPMSFDTPEQIDQVLIFLTGMDIQVLNQIDVERQKEKKKEAKELEGLARRTEGTPDDPVRMYLKEMGTVPLLTREEEVEISKRIEKAQVQIERIILRFRYSAKEAISIAHYLISGKERFDKIISEKEVEDKTHFLKLLPKLITLLKEEDTYLENLLLSLKQPDLSKQEAAKLNDSLEKCRIRTQAYLRCFHCRHNVTEDFGEVVFKAYDSFLHLEQQINDLKVRAERNKFAAAKLAAAKRKLYKREVAAGRTLEEFKKDVRMLQRWMDKSQEAKKEMVESNLRLVISIAKKYTNRGLSFLDLIQEGNMGLMKAVEKFEYRRGYKFSTYATWWIRQAVTRAIADQARTIRIPVHMIETINKVLRGAKKLMMETGKEPTPEELAEELGLTPDRVREIYKIAQHPISLQAEVGEGSESSFGDFLEDTAVESPAEATGYSMLKDKMKEVLKTLTDRERFVLIHRFGLLDGKPKTLEEVGSAFNVTRERIRQIEAKALRKMRHPIRSKQLRAFLDLLEEEKTGTSKVKSLKSK

SEQ ID NO: 23180 - protein, 371 aa, Salmonella enterica subsp. enterica serovar Typhi Ty2
MMVRTLLRLVARWCGIAISKTGGSEMNDKIRVGLIGYGYASKTFHAPLIMGTPGLELAAVSSSDETKVKADWPAVSVVSEPRHLFNDPHIDLIVIPTPNDTHFPLAKAALEAGKHVVVDKPFTVTLSQARELDALARSTGRVLSVFHNRRWDSDFLTLKALLADGVLGEVSLFESHFDRFRPQVRDRWREQGGPGSGIWYDLAPHLLDQAIQLFGLPVSMTVDLAQLRPGAQSTDYFHAILSYPQRRVILHGTMLAAAESARYIVHGSRGSYVKYGLDPQEERLKNGERLPQEDWGYDMRDGVLTLVEGETRKEENWLTLPGNYPAYYAAIRDALNGNGENPVPASQAIQIMELIELGMESAKHRATLCLA

SEQ ID NO: 23181 - protein, 250 aa, Triticum aestivum
  misc_feature (108)..(108): Xaa can be any naturally occurring amino acid
  unsure (1)..(250): unsure at all Xaa locations
MAKTYPVVSAEYQEAVEKARQKLRALIAEKNCSPLMLRLAWHSAGTFDVSSKTGGPFGTMKKPAEQAHAANAGLDIAVRMLEPIKEEIPTISYADLYQLAGVVAVEVXGGPVIPFHPGREDKPQPPPEGRLPDATKGSDHLRQVFGKQMGLSDQDIVALSGGHTLGRCHKERSGFEGPWTRNPLKFDNSYFTELLSGDKEGLLQLPSDKTLLTDPVFRPLVEKYAADEKAFFEDYKEAHLRLSELGYAEA

SEQ ID NO: 23182 - protein, 506 aa, Thermus thermophilus
MPASSLDELVALCKRRGFIFQSSEIYGGLQGVYDYGPLGVELKNNLKQAWWRRNVYERDDMEGLDASVLTHRLVLHYSGHEATFADPMVDNRITKKRYRLDHLLKEQPEEVLKRLTGPWRVEEENLHALVQAMMQAPERAGGAMTAAGVLDPASGEPGDWTPPRYFNMMFQDLRGPRGGRGLLAYLRPETARASSSTSRTVLDATSRKLGFGIAQSARPSRNEITPRNFIFRVREFEQMEIEYFVRPGEDEYWHRYWVEERLKWWQRMGLSRENLVPYQQPPEELAHYAKATVDILYRFPHGLEELEGIANRTDFDLGSHTKDQEALGITARVLRNEHSTQRLAYRDPETGKWFVPYVIEPSAGVDRGVLALLAEAFTREELPNGEERIVLKLKPQLAPIKVAVIPLVKNRPEITEYAKRLKARLLALGLGRVLYEDTGNIGKAYRRHDEVGTPFAVTVDYDTIGQSKDGTTRLKDTVTVRDRDTMEQIRLHVDELEGFLRERLRW

SEQ ID NO: 23183 - protein, 429 aa, Anabaena variabilis ATCC 29413
MKKVLAIILGGGAGTRLYPLTKLRAKPAVPVAGKYRLIDIPVSNCINSEIFKIYVLTQFNSASLNRHIARTYNFSGFSEGFVEVLAAQQTPENPNWFQGTADAVRQYLWMLQEWDVDEFLILSGDHLYRMDYRLFIQRHRETNADITLSVIPIDDRRASDFGLMKIDNSGRVIDFSEKPKGEALTKMRVDTTVLGLTPEQAASQPYIASMGIYVFKKDVLIKLLKESLERTDFGKEIIPDASKDHNVQAYLFDDYWEDIGTIEAFYNANLALTQQPMPPFSFYDEEAPIYTRARYLPPTKLLDCHVTESIIGEGCILKNCRIQHSVLGVRSRIETGCVIEESLLMGADFYQASVERQCSIDKGDIPVGIGPDTIIRRAIIDKNARIGHDVKIINKDNVQEADRESQGFYIRSGIVVVLKNAVITDGTII

SEQ ID NO: 23184 - protein, 535 aa, Streptococcus agalactiae NEM316
MKKHWWHKATIYQIYPRSFMDSDGDGVGDIKGITSKLDYLEKLGITAIWLSPVYQSPMDDNGYDISDYQAIADIFGDMNDMDQLLQEANQRGIKIIMDLVVNHTSDEHAWFVEARENPNSPERDFYIWRDEPNDLTSIFSGSAWEYDKVSGQYYLHLFSKRQPDLNWENEALRHKIYDMMNFWIDKGIGGFRMDVIDLIGKIPDKGITGNGPKLHDYLKEMNRASFGKHDLLTVGETWGATPDIAKQYSNPDNEELSMVFQFEHVGLQHKPDAPKWDYSDGLDVPALKDIFTKWQTQLELGQGWNSLFWNNHDLPRVLSIWGNDSDNRKQSAKALAILLHLMRGTPYIYQGEEIGMTNYPFECLADVDDIESLNYAKEAMDNGVSEATILDSIRKVGRDNARTPMQWSQEHQAGFTKGTPWLAVNPNYQEINVEAALNDTESIFYTYQKLVALRKEHDWLVDADFKLLETADKVFAYVRQTDKERYLIVANLSDQNQSFEFPEAVKETIISNTEVQEVLSSNTLKPWDAFCIELF

SEQ ID NO: 23185 - protein, 550 aa, Hebeloma cylindrosporum
MENEKTEHEKRESSSNLEKGDHVVAQTNPQFHFDVHDLDRVQRRLKQRHVQMIAIAGTIGTGLFLGSGGALEAAGPLGALIAYALVGTVAYSSLCAVGEMSTWAPISGTFPHFAARWVDPALGFATGWNYFYTNAISTPVEITAAVILLTFWDHNSKHISLYTAILCVLVCMINIFGVRYFGESEFIFAIIKLTLIIGLLLVGLIVDLGGGPQGDRIGFRYWKNPGAIAGSGLDRNIFGLDRFLAILSVIVQAAFSFQGMELVVIAASETESPRRNIAKAVRRVFYRILVFYILGILMIGMLVAYNDKDLLFLQGNNTAAKSPFVIAINRAGIKVLPHIVNGAIFTSAFSAGNSFLFCSSRVLYGLALRGQAPKVLTYCTKKGLPLYAVLVASAFSFLSFMSVSSGSNRVFGWFVNLSTTGGFTSWFVMNVTYIFFRRGLLAQGYDPTTNSYHNRFQPYIAYWGAGWTLFFILINGFSVFWKFTAAGFLTAYINIPIFLVLYFGYKIVFRTKFWKPLEMDFVTGIPTLEETETPEKPPKNLGERIANIIF

SEQ ID NO: 23186 - protein, 288 aa, Glycine max
  misc_feature (199)..(199): Xaa can be any naturally occurring amino acid
  unsure (1)..(288): unsure at all Xaa locations
EGMELSSQEGEIPIPINSSTTYGHGNGHGHGHGHGLMIHHDHNHIISSSAPSNGIPTTMQQQEEEEEEEDRYKKVVRYRECLKNHAAAMGGNATDGCGEFMPSGKEGSIEALNCSACHCHRNFHRKEVEGEPQHHLNINRRRLILGPHPEALGYPTAAARSVPPHQMIMPYNIGIGHHLPSESDEQEDAAAGAGMMQLXSRPSSAQLVKKRFRTKFSQDQKDKMLNFAEKVGWKIQKQEESVVQHFCQEIGVKRRVLKVWMHNNKHNLAKKINPPTTTAPPPPPPPPP

SEQ ID NO: 23187 - protein, 467 aa, Listeria innocua Clip11262
MLYSENDKRKHESYRIPLFGSEEESTSIPKYVLKKEPMEPRIAYQLVKDQLMDEGNARQNLATFCQTYMEKEAEILMAETLEKNAIDKSEYPQTAELENRCVNILADLWNAPKEMSYLGTSTVGSSEACMLGGLAMKFRWRNNAEKRGLDIQAKRPNLIISSGYQVCWEKFCVYWDVDMRVVPMDKEHLSLDVEKVFELVDEYTIGIVGILGITYTGKFDDIALLDEKVEAYNEANEHQLVIHIDGASGAMFTPFVNPELPWDFRLKNVVSINTSGHKYGLVYPGVGWILWKDKEYLPKELIFEVSYLGGSMPTMAINFSRSASQIIGQYYNFLRYGFEGYREIHEKTKKTALYLSKTVEKSGYFEIINDGSNLPIVCYKLKDDLDVEWTLYDLADQLLMKGWQVPAYPLPADLSDTIIQRFVCRADLGYNVAEEFAADFADALHNLEHARVLYHDKERNDSYGFTH

SEQ ID NO: 23188 - protein, 446 aa, Lactobacillus plantarum WCFS1
MKEVSAAPKITNVKAAILGFQHLLAMYSGDVLVPLLIGAALHFSQEQLTYLVSIDIFMCGIATFLQLKRTPLTGIGLPVVLGCAVQAVNPLIQIGKTYGLGTMYGSIIGAGIFIFLIAGLFSKIKNLFPPVVTGSLITIIGFTLIPVAFQNLGGGDTSAKDFGNLQALGIGFLTIAIILLISVFARGFMKSVSILIGILVGTLIAGAMGMVSLKPVAEASWFHLPTLFYFGTPHFEWSSILTMILVSLTTMVESTGVFFALGDITGRKIEGDDLKRGYRAEGIAVILGGLFSTFPYSTFSENVGVVQLSGVKTRKPIYFSAAFLVVLGLLPKIGALATIIPDPVLGGAMVVMFGIVGIQGIRMLAQVDFRNNNNLLVAAVSIGLGLGVTVQTNIFQFLPGALQIMLSNGVVVGSVAAVGLNLLFNRHAAENTVDDESVGLNETEQP

SEQ ID NO: 23189 - protein, 345 aa, Bradyrhizobium sp. BTAi1
MGLAHPKYKVAVVQAAPAWLDLDASIKKTIALIEEAADKGAKLIAFPEVFIPGYPWHIWMDSPAWCIGRGFVQRYFDNSLAYDSPQAEALRAAVRKAQLTAVLGLSERDGGSLYIAQWLIGADGETIAKRRKLRPTHAERTVYGEGDGSDLAVHERPDIGRIGALCCWEHLQPLSKYAMYAQNEQVHVAAWPSFSLYDPFAPALGAEVNNAASRVYAVEGSCFVLAPCATVSQAMIDELCDRPDKHALLHAGGGHAAIFGPDGSALAAQLPPDQEGLLIAEIDLGMIGIAKNAADPAGHYSRPDVTRLLLNKKPLNRVEHFSLPVDSAAAALPGEAAVARPDQSI

SEQ ID NO: 23190 - protein, 396 aa, Shewanella sp. ANA-3
MFNSLVAMPADPILGLLTQYREDSHPQKVDLGVGVYKDPAGNTPILNCVKKAEKFRLDTETTKVYIGPTGSPQFNTLITELAFGSDHSAIITNRIRTVSTPGGTGALRVAGDFIKRCNPNAVLWVSDPTWANHIGLFEAAGLTVKTYPYYDYDTKSLKFDEMLSALAQIGPNDVVLFHACCHNPSGMDLTTEQWDKVVALTKEQGFTPLIDMAYQGFGDGVDIDAYGVRKMAAAVDNMILCSSCSKNFGLYRERIGSCSVVAKDANTANIAQSVLLYVVRCLYSMPPAHGAAIVETILGSAELKQEWLDELKVMRDRINGNRAILVEKLKTNGVDRDFSFIARQKGMFSFLGVNPEQVARLQKEFSIYMVGSSRISIAGISEDNVDYLAKSIAKVL

SEQ ID NO: 23191 - protein, 140 aa, Litchi chinensis
AWHSAGTFDLRSKTGGPFGTIRHPDELAHEANNGLDIAVRLLEPIKEQFAILSYADFYQLAGVVTVEITGGPEIPFHPGRPDKSDPPPEGRLPAATEGSDHLRDVFGHMGLSDKDIVALSGGHTLGRCHKERSGFEGPWT

SEQ ID NO: 23192 - protein, 143 aa, Brassica napus
MTEAMIRKKPGMASVKDMPLLQDGPPPGGFAPVRYARRISNTGPSAMAIFLTVSGAFAWGMYQVGQGNKIRRALKEEKYAARRAILPILQAEEDERFVSEWKKYLDYEAYVMKDVPGWKVGENVYNSGRWMPPATGELRPDVW

SEQ ID NO: 23193 - protein, 351 aa, Passiflora edulis
QVSFDLLEAYLEQHPEASTWGNGAPGFRDNALFQDYHGLKSFRQAMASFMEQIRGGRAKFDPDRIVLTAGATAANELLTFILADPGDALLVPTPYYPGFDRDLRWRTGVKIVPIHCDSSNNFQVTPQALEAAYKNAEAMNLKVRGVLLTNPSNPLGATIQRSVLEEIFDFVTRKNIHLVSDEIYSGSTFSSAEFVSIAEILEARGYTEAERVHIVYSLSKDLGLPGFRVGTIYSYNDKVVTTARRMSSFTLISSQTQHPLACMLSNKEFAENYIKTNRERLRKRYDMIIQGLKDAGIECLKGNAGLFCWMNLSPLLETPTKEGELALWESIVHEVKLNISPGSSCHCSEPG

SEQ ID NO: 23194 - protein, 250 aa, Sphingomonas paucimobilis
MSDLSGKTIIVTGGGSGIGRATVELLVASGANVAVADINDEAGEAVVAASGGKAAYFRCDIAQEEDVKALVAQTLAAFGGLDGAFNNAAIPQAGLPLAEVSLERFRQSMDINVTGTFLCMKYQILAMIERGTKGSIVNTASAAGVVGVPMHGEYVGAKHAVVGLTRVAAADYGKHGIRVNALVPGAVRTPMLQRAMDNDAGLEPYLNSIHPIGRFSEPHEQAQAAVWLLSDAASFVTGSCLAADGGFTAI

SEQ ID NO: 23195 - protein, 354 aa, Passiflora edulis
QLCFDLVEEWLKNNPEASICTAEGLSEFRDIAIFQDYHGLPEFRNAVAKFMAKVRGDRVTFDPDRIVMSGGATGAHETIAFCLADPGERFLVPTPYYPGFDRDLRWRTGVKLIPVECESSNNFKVTRESLESAHEMAQLDGIRVKGLLITNPSNPLGTILDRDTLRSIVHFVNEKNIHLVCDEIYAATVFRQPDFVSISEILQEDDIECNLDLIHIVYSLSKDMGFPGFRVGIIYSYNDAVVSCARKMSSFGLVSAQTQHLIASMLSDDEFIEGFIKESRRRLAKRYQVFTRGLAQVGIKCLKTSNAGLFMWMDLRDPLKEKTFDGEMMLWRLIINEVKLNVSPGCSFHCPEPG

SEQ ID NO: 23196 - protein, 680 aa, Brucella melitensis biovar Suis
MQEIAEAIREGASAYLTRQYSTIAIVGIVVFLLAWYLLSLNAAMGFLIGAVLSGVTGFIEMHVSVRANVRTAQAVSLSLAGGLELAFKSGAITGLLVAGLALLGVSVYYFVLTVWLGYAPADRTVIDSLVSLGFGASLISIFARLGGGIFTKGADVGGDLVGKVEAGIPEDDPRNPATIADNVGDNVGDCAGMAADLFETYAVTVVATMVLGAIFFHGSDALTNVMLYPLMICGACVITSIVGTFFVKLGVNGSIMGALYKGLIATGLLSIVGLGVANTLTVGWGEIGTVAGKSITGTNLFVCGLIGLIVTGLIVVITEYYTGTNKRPVNSIAQASVTGHGTNVIQGLAVSLESTALPAIVIVGGIISTYQLAGLFGTAIAVTAMLGIAGMIVALDAFGPVTDNAGGIAEMAGLDPEVRKATDALDAVGNTTKAVTKGYAIGSAGLGALVLFAAYSNDLAYFAANGQIYPYFADMGPVSFDLSNPYVVAGLIFGGLIPYLFGGMAMTAVGRAGGAVVQEVRRQFREKPGIMTGKERPDYARAVDLLTKAAIREMIIPSLLPVLAPIVVYFGVLLISGSKAAAFAALGASLLGVIINGLFVAISMTSGGGAWDNAKKSFEDGFTDADGVKHMKGSEAHKASVTGDTVGDPYKDTAGPAVNPAIKITNIVALLLLAVLAHMA

SEQ ID NO: 23197 - protein, 624 aa, Debaryomyces hansenii CBS767
MDNKSTKESELDFSLRSKELNSREASDISLNKGNGNSENSLDEVKEHNKFVYLGAWNKKLLYVAYAVLIITAFVESFANNSTSSLDSYATSSFNEHALIATVAVVYKITAICAYPILAKIADLLGRAEGFTLSMILYSLAYVLYASCQNVDTYVCAEIFFAIGRNGYRIFQLIFIADTSSLINRGILSQLPNAIGAIPSLYAGSYVQDAFLEHSTWRWGYGSFAIILAAFCFPLGGIMFYLDRRAKQNGQKKVYQILENIPKDAKWYEKAYQILFVELDLIGGVLLLCGFALFFVPFTVTGKSSSYKWHEPKLIVMLVIGFVIFCCFLVWNTKFAKKPFVPTQALKSKTVVIIVVLVALDLCENSSFATYFKTVLQVAGYYSAGAATRIDNSKKVTVDIFNVFGGLLMKYTKRSKIYALIGIPMLVLGHGLLVWFMRRGDGEMASYALLVMAEVFIGFGRGMYQCALQVTIQAIAGIEGIAMSTAFFLAFQSIGSLIGSAISGGIWNTVVLSKLNLYLPEDDKDLAKKIYKSITVAMSYEKGSDIRDGINRAYAETIQIIGWTGLGIIAPMLILMFFIKEVKLSEAKDIYSVSISEEEIKIKEEKEIEIKEEKESLKKNTSRGQ

SEQ ID NO: 23198 - protein, 125 aa, Zea mays
VTDSVIGEGCVIKNCKIHHSVVGLRSCISEGAIIEDTLLMGADYYAETEADKKLLAENGGIPIGIGKNSHIRKAIIDKNARIGDNVKILNADNVQEAARETDGYFIKGGIVTVIKDALLPSGTVI

SEQ ID NO: 23199 - protein, 214 aa, Ochrobactrum anthropi
TVVATMVLGAIFFNGSDVLSSVMLYPLMICGACVITSIVGTFFVKLSVDGSIMGALYKGLIATGLLSIVGLAVANTLTIGWGEIGTVAGKSITGTNLFICGLIGLIVTGLIVVITEYYTGTNKRPVNSIAQASVTGHGTNVIQGLAVSLESTALPAIVIVGGIISTYQLAGLFGTAIAVTAMLGIAGMIVALDAFGPVTDNAGGIAEMAGLDPE

SEQ ID NO: 23200 - protein, 141 aa, Anaplasma marginale
  misc_feature (81)..(81): Xaa can be any naturally occurring amino acid
  misc_feature (117)..(117): Xaa can be any naturally occurring amino acid
  unsure (1)..(141): unsure at all Xaa locations
NGSIMGALYKGLIATGLLSIVGLGVANTLTVGWGEIGTVAGKSITGTNLFVCGLIGLIVTGLIVVITEYYTGTNKRPVNSXAQASVTGHGTNVIQGLAVSLESTALPAIVIVGGIIXTYQLAGLFGTAIAVTAMLGIAGMI

SEQ ID NO: 23201 - protein, 413 aa, Bacillus clausii KSM-K16
MEKRRVVVTGLGAVTPLGLDAKTSWEQAKAGKSGIGYLTRIDAAAFPMKVAAEIADFDPTAAIDRKEVRKMDRFTQFAVVSAQEALADAGLEITPENADRVGVWIGSGIGGMETYENQFRIFLEKGQRRVSPFFVPMMIPDMASGQVSIFTGAKGPNSCSVTACASGTNSIGDAFKVIQRGNADVMITGGSEAPITNMAVAGFSSAKAITTSDDPATASRPFDANRSGFVMGEGAGILILESLESAKARGAHIYAEIVGYGSTGDAFHVTSPAPEGEGGARSMQAAIDDAGLAPEEVSYINAHGTSTELNDPYETKAIKTVFGEHAYKLAISSTKSMTGHLLGAAGAVEAIFSVKAIDEDIIPPTINLETPDPECDLDYVPNEARQAPVHVALSNSLGFGGHNASLVFKKWVE

SEQ ID NO: 23202 - protein, 353 aa, Lupinus luteus
MSVLSDLINLNLSDTTEKIIAEYIWVGGSGVDLRSKARTLSGPVNDPSKLPKWNYDGSSTGQAPGKDSEVILWPQAIFKDPFRRGNNILVMCDTYTPAGEPIPTNKRHAAAKIFSHPDVVAEEPWFGIEQEYTLLQKDIHWPIGWPLGGFPGPQGPYYCGTGAEKAFGRDIVDSHYKACLYAGINISGINAEVMPGQWEFQVGPSVGISAGDELWVARYILERITEIAGVVLSLDPKPIPGDWNGAGAHTNYSTKSMRNDGGYEVIKKAIEKLGKRHNEHIAAYGEGNERRLTGRHETADISTFFWGVANRGASIRVGRDTEKEGKGYFEDRRPASNMDPYVVTSMIAETTLL

SEQ ID NO: 23203 - protein, 418 aa, Candida albicans SC5314
MFLKNILSVLAFALLIDAAPVKRSPGFVTLDFNVKRSLVDPDDPTVESKRSPLFLDLDPTQIPVDDTGRNDGVDKRGPVAVKLDNEIITYSADITVGSNNQKLSVIVDTGSSDLWIPDSKAICIPKWRGDRGDFCKNNGSYSPAASSTSKNLNTRFEIKYADGSYAKGNLYQDTVGIGGASVKNQLFANVWSTSAHKGILGIGFQTNEATRTPYDNLPISLKKQGIIAKNAYSLFLNSPEASSGQIIFGGIDKAKYSGSLVELPITSDRTLSVGLRSVNVMGRNVNVNAGVLLDSGTTISYFTPSIARSIIYALGGQVHFDSAGNKAYVADCKTSGTVDFQFDKNLKISVPASEFLYQLYYTNGKPYPKCEIRVRESEDNILGDNFMRSAYIVYDLDDKKISMAQVKYTSESNIVAIN

SEQ ID NO: 23204 - protein, 420 aa, Mesorhizobium loti MAFF303099
MRRVVVTGLGLLSPFGMGFEHSWKELLTGRSAAKRITEFEVEDLACKIAHVVPRGDGSNATFNPESVLEPKELRKIGDFILYGIAAADEALKDSGWEPKTHEEQCATGVLIGSGIGGIEGIAENAMILKERGPRRISPFFIPGQIINLVSGQVSIRHGLKGPNHAVVTACSTGAHAIGDAARLIMWGDADVMVAGGAEAPVTRLSIAGFAACRALSTERNDTPQTASRPYDRDRDGFVMGEGAGVVVLEELEHAKARGAKIYAEVTGYGLTGDAYHITAPAEDGDGAFRCMTAALNRAKLTPADVDYINAHGTSTMADTIELGAVERLVGNAASKISMSSTKSSIGHLLGAAGAAEAIFSILAIRDNVAPATINLDNPERETAIDLVPNKPRSRQIDVALSNSFGFGGTNASLVFQRYNG

SEQ ID NO: 23205 - protein, 353 aa, Caulobacter crescentus CB15
MTLFDSPDFEGHEGVHAFFDEKTGLKSIIAVHSTARGPAAGGCRMWDYSSADAALTDALRLSRGMSYKNAMADLDFGGGKAVIIGDSRSQKTPELFEAFGRAVDSLGGQYWTAEDVGVSPSDLESTRKTTRFVAGLEGHAAASGDPSPVTAEGVFRGVRLCVERALNRDLKGVRVAIQGVGHVGAYLAEKLHAAGAELIIADVNQVALAEVAAKTGATIVPTDAIFDVEADVFAPCALGGAISNATLPRLKVKVIAGGANNQLADAMIGQTVFDRGILYAPDYVINGGGIINVAAEIRALEAGGAFDGGWVASKLDRLAQTLAEVIDQSISEKRPANLVADEIARARIAAARG

SEQ ID NO: 23206 - protein, 476 aa, Phaseolus vulgaris
MGGGFRVLHLVRPFLSFLPEVQTADRKVPFREKVIYTVISLFIFLVCSQLPLYGIHSTTGADPFYWMRVILASNRGTVMELGITPIVTSGLVMQLLAGSKIIEVDNNVREDRALLNGAQKLLGILIAIGEAVAYVLSGMYGSVGQLGVGNAILIILQLCFAGIIVICLDELLQKGYGLGSGISLFIATNICENIIWKAFSPTTINSGRGAEFEGAVIALFHLLITRSDKVRALREAFYRQNLPNVTNLLATVLIFLIVIYFQGFRVVLPVRSKNARGQQGSYPIKLFYTSNMPIILQSALVSNLYFISQLLHRKYSGNFFVDLLGKWKESEYGGGQSAPVGGIAYYITAPSSLADMAANPFHALFYLVFMLSACALFSKTWIEVSGSSAKDVAKQLKEQQMVMPGHRESNLQKELNRYIPTAAAFGGICIGALTVLADFMGAIGSGTGILLAVTIIYQYFETFEKERASELGFFGF

SEQ ID NO: 23207 - protein, 433 aa, Solanum melongena
MTTSQLHIAFLAFPFGTHATPLLTLVQKISPFLPSSTIFSFFNTSSSNSSIFSKVPNQENIKIYNVWDGVKEGNDTPFGLEAIKLFIQSTLLISKITEEAEEETGVKFSCIFSDAFLWCFLVKLPKKMNAPGVAYWTGGSCSLAVHLYTDLIRSNKETSLKIPGFSSTLSINDIPPEVTAEDLEGPMSSMLYNMALNLHKADAVVLNSFQELDRDPLINKDLQKNLQKVFNIGPLVLQSSRKLDESGCIQWLDKQKEKSVVYLSFGTVTTLPPNEIGSIAEALETKKTPFIWSLRNNGVKNLPKGFLERTKEFGKIVSWAPQLEILAHKSVGVFVTHCGWNSILEGISFGVPMICRPFFGDQKLNSRMVESVWEIGLQIEGGIFTKSGIISALDTFFNEEKGKILRENVEGLKEKALEAVNQMMEVQQKISRF

SEQ ID NO: 23208 - protein, 540 aa, Kluyveromyces lactis NRRL Y-1140
MVDDIVRSSSPQRDSSVEDVYSDLYSTFSQMTTTTANDIEQRPYPFTWRTGIMFVSSTIGGMLFGYDTGVISGVLIAMNPKDLNFHSLEIWQKEIITSITCAGSFIGSIIAFPLADRCGRKHTLTVCCIIFAASSMLMAVSYTFEMLVTGRLVVGIAVGIAAQCIPIYLTEISPAKIRGTMLTLNSISITGGQFAAYVIAYFMIDNDHPQSTAAWRYLFALGSIPAIVFLLTLDFIPESPRWLLSKSRLVEAELALHKVYPAATVPEIRHKLRKLTSDLNKLRYHNDETDPLLFPVNKRRSVASTRTGRSSLGATYYNEQLGKKRHRWEGKSKRALIIGCVLMFFQQTSGFNAFMYYSATIFEQVGFTNPLVPAIIVAFTNFSFTLLAMKLIDTMGKRTLLLMTIWIMTVGLLLCSVGFELNNLALLVVSVIVYVGAYATGMGVVPWSSVEFLPLNRRAVGGSMISCTNWLTNSVLSLTYLTITDRIGNENTMLLFALFTIFNWLFVYIWYPEVKGLSLEEIGQVFENGVDVHFIYRNYH

SEQ ID NO: 23209 - protein, 210 aa, Caulobacter crescentus CB15
MLIYGSSLSPFVRKTMVFATEKGLAYDTKVVRLGQPDPEFEACSPFGKIPGFQDGDFKISDSSAIITYLDAAYPEPNLIPTEPKARARTVWYEEYADSIFVGAAGPIFFNRVVGPRFMGAEPDQAAIDKGINVAMPPVLDYLERTIPASGFLVEDRFTLADIAVASPFVNLEHAGFDFAKWPKSKAYADAILARPSFEGIIKRERRMLGA

SEQ ID NO: 23210 - protein, 337 aa, Coccidioides posadasii
MVVKVGINGFGRIGRIVFRNAVEHPEVEIVAVNDPFIETHYAAYMLKYDSTHGRFKGDVKFSENGLDVDGKHVRFYQERDPANIPWAETGADYVIESTGVFTTTEKASAHLKGGAKKVIISAPSADAPMFVMGVNNETYKSDIKVLSNASCTTNCLAPLAKVVNDNFGLVEGLMTTVHSYTATQKTVDGPSSKDWRGGRTAAQNIIPSSTGAAKAVGKVIPSLNGKLTGMSMRVPTSNVSVVDLTCRTDKSVTYDQIKEAMKKASANELKGIMSYSEDALVSSDLNGDPHSCIFDATAGIALNDHFIKLVAWYDNEWGYSRRVIDLIAYIAGVDAGK

SEQ ID NO: 23211 - protein, 392 aa, Methanosarcina barkeri str. fusaro
MKACIMCGGAGTRLRPLTFKHPKPSIPILNKPSVRHLIEHLSREGFNEIVMTLGYMGERIEEQLGDGHMFGVHIDYVYEKEKLGTAGGVKNAEEYLKDEPFIVLGGDHVLNLDLREMYRFHEANDAPVTIGLLSIDDPREFGIADMDINNRIHRFLEKPKAGQIFSNLASTGIYICSPSIFEWIPKGKKYDFAKDLFPFMLAADKKINGVLVRGKWTDVGSSAAYRQAQRWMLDALPGTTIEGNFTTRNARIKGPLSIGNNVCIGSNSSLVGPIVIGENTTIGDNVLIGPYSVIGSNCTIENNTKILSSYLFDNVFIGKDSNLSGGVVSDETIIGEHCFLENGTVIGHKVLIGSNSTIHSGVKIWPEIVIDKNSSIQETVINSGYDAAHEGS

SEQ ID NO: 23212 - protein, 460 aa, Legionella pneumophila subsp. pneumophila str. Philadelphia 1
MNMIKSLLYLSTKIFKMVNTDQLIAKDLKHIWHPCSQMKDFETFPPIVVNKAQGSYLYTNKGPVIDAISSWWCKSLGHGHPAVIAAIKNQLDCFEHVISANTTHPAAVELAEKLSEITGKQHVFFASDGSSAVEIAMKLAIHASQIKGHKNKNQFIALKNGYHGETIGTMSVSDLGLYKTPYASFGVQCHYIDDIPYVSGLKDPLWTNCDAYWNKVVQQLNKICDKVCAILLEPIIQGAGGMLCYSADFLSKISSWAKEKDIYLIADEIMTGIGRTGEWLACDHARIQPDLICLSKGLTSGSIPFSCVMIDSTLFDLFYDDYHTGKSFLHSHTYSGNPLAIVAALATIKTIEQDNLLMHSQELGKIMFSYLQDIARDSRKLVNVRGVGAVVAADFIESSQARIGFKIYQEAIKQGALIRPIGNTLYWLPPLNTDKEIIGKLAEITLNSIEKAYNKAQGYE

SEQ ID NO: 23213 - protein, 625 aa, Solibacter usitatus Ellin6076
MIVIDIDHVERRRRIDPGETPERDQAIVVGARKVLRPSAAHSPVAVATPAAIPGVVAKSAEEEFRRDGLVGLIVRLKPSGGRAAEPLPAGEFEGRHQQQAGHKQGPRQFHAPSAFVILKRITNGPRDEDPCESFSMPSPTSRPIHIDRRDFLKLAGAAAAAAPLAGQEMPMPGHAAPAAARTNEISGTVFNLEIAPVTVELAPNRIVSTIGYNGMSPGPLLRMKEGAPVTVNVVNKTDTPEYVHFHGLLIPADVDGSEEEGTPPVPPHGTRSYKFTPTPAGTRWYHTHAMSMDDLHRGSYTGQFGFLIVEGGANPGNYDQEHYLALRDWEPYFTTQYMDTDDLDPSGPKPEKPAVLDTRPPGLEVAADLYSINDKALGSGEPIRVRAGERVMFHFLNASAIENRHLALPGHKFNIVGLDGNPVPRSAAVDVLMLGPGERIDAWVTMNQPGVWVMGAPEDMVRDGGLGVVIEYANQRRSPQWMPPPQSGWDYTIFGKPASGPAPSEHLEMIFEKVPRGAGKFNLFTVNGAPYPHDREFVLKQGARYRLTFRNRTDDSHPLHLHRHQFEIAEIYGKPTAGIIKDTVVAPSYGRVSVDFTADQPGPALFHCHIQHHMDYGFKALLKYA

SEQ ID NO: 23214 - protein, 213 aa, Zea mays
MAPMKLYGAVMSWNVTRCATALEEAGSDYEIVPINFATAEHKSPEHLVRNPFGQVPALQDGDLYLFESRAICKYAARKNKPELLREGNLEEAAMVDVWIEVEANQYTAALNPILFVLISPMLGGTTDQKVVDENLEKLKKVLEVYEARLTKCKYLAGDFLSLADLNHVSVTLCLFATPYASVLDAYPHVKAWWSGLMERPSVQKVAALMKPSA

SEQ ID NO: 23215 - protein, 381 aa, Legionella pneumophila subsp. pneumophila str. Philadelphia 1
MTLNIKINEYTAQLQEQGLLRTRQILETDKIDYIRFDSNDYLSLIEDRRIAEAYQKGYELYPCGSGASMVLSGYHSSHQTLERAFAEMLGVDDCLLFSSGYCANLAITALLGRLGTHCFIDKSVHASIYDGLALSRVTYSRYIHNDMNALSALLKSHLGDSVLITEGIFSMSGQIAPLSTINTLCKENGSELFVDEAHAFGVIGPQGMGSVPGHGLTQNEVPLRVIPFGKAFASQGAVVGGRKDWINALLQTARSFVYSTAISPALCYGLLKTLEIIAAADSRRAKLNQLVAQFKELIKSSPLNWLDSDTPIQQLRLGCPHKALHYASELKKDGIYCSAIRAPTVNSASSGLRIIINYKHTIEQIIELFNKLHLIHEYSSR

SEQ ID NO: 23216 - protein, 332 aa, Streptomyces viridifaciens
MATRAVARRQSATGETADSASSVRAHGGEIADRDLVGMYLDEIARTPLLDAAKEVELSQTIEAGVFAQQVLDGEEESRTDATREELQALVDAGERAKDVFIRSNLRLVVAVARRYPRSGLPLLDLIQEGNAGLVRAVEKFDYRKGFKFSTYATWWIRQAITRSIADQSRTIRLPVHLVEELGRIRRVQREFNREHGRDPEPAEVAAELGSTPERVIDVLDWARDPVSLNMAVDDAGETQFGDLLEDTSAVSPEQSVLTLLRSEELDDLIGRLDQRTASIIKMRYGIDDGRERTLTEVGKEHGLTRERIRQIEKHALLELKKLARDTGFDAAA

SEQ ID NO: 23217 - protein, 109 aa, Glycine max
MSIVRRSNVFDPFADLWADPFDTFRSIVPAISGGSSETAAFANARVDWKETPEAHVFKADLPGVKKEEVKVEVEDGNVLVVSGERTKEEEDKNDKWHRVERSSGKFVRR

SEQ ID NO: 23218 - protein, 592 aa, Debaryomyces hansenii CBS767
MSFNERTHQFTHSNSQRRASVVYGSIGKGGLFTPSDFIRPHGDNAGISFDDDQGVAPHTPDESSQLLDRPAVLSSRKNRRQSSVTREIVEQERLFLRDSNIKVPSKGSEDDVIDTFEEAIISKKLSTTTASIELKSLVISSIPLIVTFLLQNSLSTVSVFTVGHLGAVELAAVSMGSMTANITGYATIQGIATALDTLCPQAFGAKKYLLVGVYLQKCTALIFTVMAPVLVIWLFFGYGLITLILPDKETAKYAAVYLQYIAPGIPAYILFECGKRFLQAQGIYHISTVVLLFAAPSNLLMNWLFVKHLGYIGAPIAVAINYWLMAIGLFVAVVYFVKPESTPTGLHPLVCWSGLNIRDSFRAWDKLIYLAIPGLIMLEAEFLAFEILTLLASYLGTVALAAQSIGTTMASLTYQVPFAIGIASSTRIANFLGAGLSSPAKTATRVSLCFGLVISTFNFLVLFCFQTQIAELFTNDKKVIKTVEGVMWLIALMQISDAMNANSAGCLRGQGQTKIGGIVNLVSYYVVGLPLSIYLTFYSNFGGTLHGLWIGSTVALTIIGVVQSYYSLFADFDKLCAEARERTSDEGPGFAV

SEQ ID NO: 23219 - protein, 204 aa, Triticum aestivum
  misc_feature (57)..(57): Xaa can be any naturally occurring amino acid
  unsure (1)..(204): unsure at all Xaa locations
MAATFNVNAEAGLKKLDGYLLSRSYISGYQASKDDLAVYSEFSVAPPSTCTNVARFXSSVVPETSTTDVAEAPAADDDDDSDVDLFGEETEEEKKAAEERAAKAKASTKKKESGKSSVLLDVKPWDDETDMVKLEEAVRSIKMEGLLWGASKLMPVGYGIKKLQIMMTIIDDLVSVDTLIEDHLCVEPANEYIQSCDIVAFNKI

SEQ ID NO: 23220 - protein, 426 aa, Arabidopsis thaliana
MTTTISHLPTELLDEIISRVPLKSTRAVRLTCKNWDSLFKNRSFMKEEAAAKEGESRMIVLMDKNLFAMSIFFNGIDIDPSAEQRGKLTCLYDDSEQVKISQVFHCEGLLLCVLEDDKCSLVVWNPYWGQTRWIEPRYFSRIQNCYGRYMYVYALGYNNKSRSHKILRFIDGAFDFPFWYEIYDFDSDLWTTLDVTPQWFINFPPRGCYNRGVTLKGNTYWCAIRRKSNTNWFVDLDHIICFDFTSERFGPLMPLPFVRYTSGSLVTLSCVREEKLAVLFCNNATVEVWITTKIETDKISWSKFLTVNMYVDLLEGSFFIDEVKKVAMIFDIPMNRETVYIVGEAGNVKELHLGQPVDVDKHFSPLFVCSYVPSLVQIKQPPGCQRKQESSLEKRRCDDENISRLIAHEETYVVYGRYVPSRKKPR

SEQ ID NO: 23221 - protein, 354 aa, Triticum aestivum
  misc_feature (198)..(198): Xaa can be any naturally occurring amino acid
  unsure (1)..(354): unsure at all Xaa locations
LEEIDRLLPFQRGVTSCKLLFGLLRTAIFLKASSSCMSNLERRIGLHLDKATLEDLLITNMSESIEMLYDVDCVHRILDHFLAMDQETGGASPGIGKDGHLLASPSLLPITMVAKLIDGYLAEVAPDANLKLPKFRSLAAAIPDYARPIDDGLYRAVDIYLKAHPHLSESEKEELCRVMDSQKLSLEACTHPAQERAXLPCRVIVQVLFFEQLQLRSSIAECLMISENLEGGSRQLGMPTSSEQHRGGGGWPLAARENQALREGMDGMKQRVAELEKECSTMREEIARLGRSRSTGKSRLFSLGAKPQICSTAKDAAPAKAATSSDDDKLAVVKADATPRLKLSRHKKNLSIEA

SEQ ID NO: 23222 - protein, 228 aa, Arabidopsis thaliana
MGEELSVGFRFYPTEVELLTYYLRIQLGGGNATIHSLIPILDVFSVEPTQLPNLAGERCRGDAEQWIFFVPRQEREARGGRPSRTTGSGYWKATGSPGPVFSPDNRVIGVKKTMVFYTGKAPTGRKTKWKMNEYKAVETASVSTIPKSGSSRAFDRRPTEAYAIERNLPSNGVETSSRATISTSPETSHSGGNQVDLPVNATTITQSISDMVDELSQPFWEWEQMNWS

SEQ ID NO: 23223 - protein, 996 aa, Arabidopsis thaliana
MEPTEKPSTKPSSRTLPRDTRGSLEVFNPSTQLTRPDNPVFRPEPPAWQNLSDPRGTSPQPRPQQEPAPSNPVRSDQEIAVTTSWMALKDPSPETISKKTITAEKPQKSAVAAEQRAAEWGLVLKTDTKTGKPQGVGVRNSGGTENDPNGKKTTSQRNSQNSCRSSGEMSDGDVPGGRSGIPRVSEDLKDALSTFQQTFVVSDATKPDYPIMYASAGFFNMTGYTSKEVVGRNCRFLQGSGTDADELAKIRETLAAGNNYCGRILNYKKDGTSFWNLLTIAPIKDESGKVLKFIGMQVEVSKHTEGAKEKALRPNGLPESLIRYDARQKDMATNSVTELVEAVKRPRALSESTNLHPFMTKSESDELPKKPARRMSENVVPSGRRNSGGGRRNSMQRINEIPEKKSRKSSLSFMGIKKKSESLDESIDDGFIEYGEEDDEISDRDERPESVDDKVRQKEMRKGIDLATTLERIEKNFVITDPRLPDNPIIFASDSFLELTEYSREEILGRNCRFLQGPETDLTTVKKIRNAIDNQTEVTVQLINYTKSGKKFWNIFHLQPMRDQKGEVQYFIGVQLDGSKHVEPVRNVIEETAVKEGEDLVKKTAVNIDEAVRELPDANMTPEDLWANHSKVVHCKPHRKDSPPWIAIQKVLESGEPIGLKHFKPVKPLGSGDTGSVHLVELVGTDQLFAMKAMDKAVMLNRNKVHRARAEREILDLLDHPFLPALYASFQTKTHICLITDYYPGGELFMLLDRQPRKVLKEDAVRFYAAQVVVALEYLHCQGIIYRDLKPENVLIQGNGDISLSDFDLSCLTSCKPQLLIPSIDEKKKKKQQKSQQTPIFMAEPMRASNSFVGTEEYIAPEIISGAGHTSAVDWWALGILMYEMLYGYTPFRGKTRQKTFTNVLQKDLKFPASIPASLQVKQLIFRLLQRDPKKRLGCFEGANEVKQHSFFKGINWALIRCTNPPELETPIFSGEAENGEKVVDPELEDLQTNVF

SEQ ID NO: 23224 - protein, 266 aa, Anabaena variabilis ATCC 29413
MSQIDIEKLHLWVQDRDTVLKYSTHVDWRYGEKPDYTHSNEKLAQESTRNHPSNSLETLVQNLVRTFDIEANFKTNPAQWLSVVPDQFRMSTNGGSRHTITDLINSGTYKLMIGNTKNYKATEENFETSTGLFHTAFPNGFLWEVLEVYSGPPEIVFKWRHWGEFKGEFKGYAPTDEMIEVIGTSVVRVTDDLKILSLEHYYDNTQFLAKLTSGGKLLKTPQNQQKKSNSLWRRFWNFIRKLWGKREKSASANLQTSRCPFAAVMK

SEQ ID NO: 23225 - protein, 207 aa, Caulobacter crescentus CB15
MKLYDCLRAPNPRRVRWFMAEKGIDDVEIVTLSIMGGEHRSPEYRGKAGLAHVPALELDDGTVITESVAICRYLESVYPEPNMFGRDPKETAIIEMWLRRTEMMVATPIMQGVRHSHPGMAALEAQVPEVAAYNLESVRKSLKVLDDRLAESPFIATDRVTIVDVIAVTSLDFGRMIKWRPDPERVHVNRWLDAMLARPAAAAGMTA

SEQ ID NO: 23226 - protein, 472 aa, Guillardia theta
MNKLFSIKIGPYYLGKTLGVGSFGKVKLGEHELCGQKVAVKILNRKKIKNLKMEEKVKREICILKLFMHPHIIRLYEVIETPTDIFVVTEYITGGELFDYIVERGRLNEDESRKFFQQMISGIEYCHNHMVVHRDLKPENILLDAHLNVKIADFGLSNIMKDGNFLKTSCGSPNYAAPEVINGKSYLGPEVDVWSCGVIMYALLCGSLPFDDENIPNLFKKIKSGIYILPGYLSDLSRDMIAKMLITNPLLRITINEIRDHPWFNSRLPKYLSFPTFKKNFVIQKKLNIDDNILELVSNKTFLSKKYIKLGIMKHERNSTAIIYHLIRESITPFDMITVDNSYIRDIIKKENVIKKSNEKEHNTSLHQAFLGIESPRENLKDILNEIQRAIKTFRSKTHNLNHFSVIIVINTNSLFETKYKKKKEIILRTTTILIQIFKRSMKYLIDLQKINGDSFFFLSTCNFIKQELNLK

SEQ ID NO: 23227 - protein, 805 aa, Phaseolus vulgaris
MAADRLTRVHSLRERLDETLSANRNEILALLSRIEAKGTGILQHHQVIAEFEEIPEESRQKLIDGAFGEVLRSTQEAIVLPPWVALAVRPRPGVWEYLRVNVHALVVEVLQPAEYLRFKEELVDGSSNGNFVLELDFEPFTASFPRPTLNKSIGNGVQFLNRHLSAKLFHDKESLHPLLEFLRLHSVNGKTLMLNDRIQNPDALQHVLRKAEEYLGTVPPETPYSEFEHKFQDIGLERGWGANAELVLESIQLLLDLLEAPDPCTLETFLGRIPMVFNVVILSPHGYFAQDNVLGYPDTGGQVVYILDQVRALENEMLHRIKQQGLDIVPRILIITRLLPDAVGTTCGQRLEKVFGTEHSHILRVPFRTENGIVRKWISRFEVWPYLETYTEDVAHELAKELQGKPDLIVGNYSDGNIVASLLAHKLGVTQCTIAHALEKTKYPESDIYWKKLEERYHFSCQFTADLFAMNHTDFIITSTFQEIAGSKDTVGQYESHTAFTLPGLYRVVHGIDVFDPKFTIVSPGADQTIYFSPKETSRRLTSFHPEIEELLYSSVENEEHICVLKDRTKPIIFTMARLDRVKNIPGLVEWYGKNEKLRELVNLVVVAGDRRKESKDLEEKAEMKKMYSLIETYKLNGQFRWISSQMNRVRNGELYRVISDTRGAFVQPAVYEAFGLTVVEAMTCGLPTFATCNGGPAEIIVHGKSGFHIDPYHGDRAADLLVEFFEKCKVEPSHWDTISQAGLQRIEEKYTWQIYSQRLLTLTGVYGFWKHVSNLDRLESRRYLEMFYALKYRKLAESVPLAVE

SEQ ID NO: 23228 - protein, 404 aa, Shewanella sp. ANA-3
MRPIIKSNKLDTVCYDIRGPVHKEARRLEDEGHRILKLNIGNPAPFGFEAPEEIVRDVILNLPSAQGYCESKGLFSARKAIVQHYQAQGIKGVDIEDVYIGNGVSELIMMAMQGLLNTDDEVLLPSPDYPLWTAAANLAGGKAVHYRCDEEADWFPDLDDIKSKISSRTRGIVLINPNNPTGAVYSKELLLQVIELCREHNLILFADEIYDKILYDEAKHIPAASLSDDILTVTFNGLSKAYRAAGFRVGWMMLSGNLKAAKSYIEGLEMLSSMRLCANVPNQHAIQTALGGYQSINELILPSGRLTVQRDTCYELLNQIPGVSVKKPKGALYAFPKLDMKKFNLRDDERLVLDLLRDKKILLVHGSAFNWPEPDHLRVVFLPYKEDLTKALTEFGNFLETYKQ

SEQ ID NO: 23229 - protein, 461 aa, Phaseolus vulgaris
MASSVLSAALNSLSPSYSLSSRQTHKGKPKIGGNALRFNKSFPNARSSGRVMAVAVNGSRFEGIPMAPPDPILGVSEAFKADTSDVKLNLGVGAYRTEELQPYVLNVVKKAENLMLERGDNKEYLSIEGLAAFNKATAELLLGADNPAIKQQRVATVQGLSGTGSLRLAAALIERYFAGAKVLISSPTWGNHKNIFNDARVPWSEYRYYDPKTVGLDFEGMIEDIKSAPEGSFVLLHGCAHNPTGIDPTPEQWEKIADLIQEKNHIPFFDVAYQGFASGSLDEDAASVRLFVARGMEVLVAQSYSKNLGLYAERIGAINVISSSPESAARVKSQLKRLARPMYSNPPVHGARIVADVVGNPVLFNEWRAEMEMMAGRIKNVRQQLYNSITSKDNSGKDWSFILKQIGMFSFTGLNKEQTDNMTNKWHVYMTKDGRISLAGLSLAKCEYLADAIIDSYHNVS

SEQ ID NO: 23230 - protein, 374 aa, Guillardia theta
MTQKKTVLAENSKIGNFAYSRFHPMQPIRLSMTSELIYSYGMEKFLRIIRTEKKTNSEMFNIHSSIFEFNVIKKKNFESINYITIDKYDADCPIFKGLNEYLLLYSSASLLSLDELTNNNCQIAINWSGGLHHSKIDEKSGFCYLNDINLCILNLLKHFNYILYIDIDVHHGDGVEEVFYATNRVFVLSFHFYNKNFFPGSGSITNKGISIGKYASYNVPIKKNIGDENYCNIFESIVREIIESVRPDIIILQSGADSLSFDVIGRFNLSINGHSNCLNFLKKFNIPILVLGGGGYIKDRVSKCWTFETSIAIDKKIKYNIPNNIYWKLYRPNFHLDIEKKDKANDFNTKKYLDFIDSEIKKNIRFHKNNIKLF

SEQ ID NO: 23231 - protein, 272 aa, Bradyrhizobium sp. BTAi1
MLMIEANGARIPALGLGTWELRGRTCARIVEQALTLGYRHIDTAQVYENEQEVGEGLRASRVRRSELFLTTKVWTTHFAPNDLERSTKESLVRLRVSDVDLLLLHWPNSHVPLAETLGALAHAKTLGLTRHIGVSNFTVALLDEAVALSPEPLVCNQVEYHPYLEQTKIREACARHGIAMVAYSPIAKGKIRNDPTLTRIGHAHGKSPAQICLRWLVQQNVVAIPRTSKIERLSENLDVFDFELSEQDMTDIFAMGSAGGRMTDFAFAPKWD

SEQ ID NO: 23232 - protein, 440 aa, Photorhabdus luminescens subsp. laumondii TTO1
MNSTKTVSIQHVINNQKFSKVQWQVLILCFLIVVIDGFDTVLMGYIAPAVVNDFKVEGAILGPAMSAALVGLSLGSIFAGPLADRFGRKSVLTISVTVFGLLSLATAIADSIQTLTILRFLTGLGLGAAMSNAITLISEYAPENRRSLLINIVFCGFPLGAAVGGIISAWIIPHFGWQGVLILGGILPLFLSLFLFSLLPESLRYLVSKGGAEGNIRRILSKMTGNTLNDINKFTFDGEEIIHKSSIKTVLSNRFLIGTAMLWITYCMGALVFYVLTSWMPFLMNDVGFSVSMAATLTALFPLGGVISTVFSGWLMDRINPHKVVATNYALAGILVFFIGQEENVLLLSILIFLAGITMNGAQASMGSISAQFYPTHCRATGVAWMLGFGRFGGIFGTLFGAELIRLELSYSTIFAILSIPAIIAALSLTFKDVSYRRHK

SEQ ID NO: 23233 - protein, 770 aa, Kluyveromyces lactis NRRL Y-1140
MSEQKSEISAVKNQEHPDTEPKQEQEGESPNKRIHLDTRDGKEQPEKSGQEKKDDKSNGSNATEGTSNVKSEVQPTVQNSSTPQNPHFIHKLYSMLEDDDLKNLIWWSPSCDSFLIRPTERFSKALSAFFKHTNVASFVRQLNMYGFQKVSDHKSTWAANTDDSDEPSINLWEFKHSSGYFRKGDTESLKSIKRGSSKYHMSNNRKNSAPTASTFSGSGSQDSASWNEFPPPNRSHSYTSHDAAHIMPNPLYNTQDGLALYPTGANYPVNLVPSVDYYNSPQHHIKNKQQQQQQHQHQQQQQQQQSIDTNVHELHQSISGLRNEHSDLQHSYEMAVEELRATNIDMIKMLDIVQKTMVERIGSPLNEDGSVPRPRTPLSNATRKGSMLSPGSKPPAHTLKTNKEFNSDEQRASTMNELAKIRESIFARFQKFHETMQHSISVMDLKPQSFSSLQPNMNSSTLPSSVNLLQHQYNAFNGNAGPSPQSYHMNPRGSQSDQHVNLMMNPFERRISSTGSSKKRHMSVLMDPLAPAPPQQPLQAQIQLQPQQQPQQQSQQQSQQQQQQQQQQQPHQQQHQQQHQQLQANQNPQQAFTIAQGSSQPNVISYKPYYPYGTVPVSNFSGSQLYSNTPINSTPGHSSVPSEYGLAIEAQGNFVINGPQTPVNIIKPIPAKVPYTVLSDHTTPTGLGPLHGSATQLPQVLSQHQHQHPAFQPAHTLVQPQPISQPQSLSQPPQAPPSMNTSQFSVSKQPQHQSGSNSGLHSLLTHDSRN

SEQ ID NO: 23234 - protein, 243 aa, Clostridium acetobutylicum ATCC 824
MRKLVLLRHGQSEWNKENRFTGWTDVDLSVDGVSEAAQAGRILKKNNYTFDAAYTSVLKRAIRTLQIVLYEMDLLWIPVYKSWKLNERHYGALQGLNKDETRDKYGEDQVHLWRRSVEVRPPALEKSDKRYPGNEKKYASLKEEELPVTENLEDTEKRVLQDWRELIAPNIKGGKNIIISAHGNTLRALVKYLDNIPSDGIANLNIPTGTPLVYELDENLEPITRYYLGMDGKIEDDKFPKKV

SEQ ID NO: 23235 - protein, 403 aa, Photorhabdus luminescens subsp. laumondii TTO1
MTSKILARSINEFFEVQQLSDQTILKPNRKIKMKILDEGLMQTAICRSNIGRIDEKELKLEYRGHNVRDLANNYSFSDVVYLLITGKLNSEGSEEFLDMLHNNYLSALKHIEKLTPVIFDTTPTDFLTIAVLSSQGKWLSDCSVKTKDERLIITASILAAIAAAIAIYAQKYAISEPVFKTFFGTKHRFFASFLATCFGQQCDDVAEEMLNKFLILHAEHGLNCSTATVRAVASSGADPFNAVAAGICAFSGPLHGGASGAVGLMIDDIHDNSKNISTFIDELVERKQRLMGFGHRIYKQPDPRASYMSDILIKQKAKFDVISSYVNISQELASEVSKRPYFSQRGLYPNPDLFNGLLLRRAGFKSHMNTALLCFSRAAGWLAHYYDSIDSKAPILRPQELYL

SEQ ID NO: 23236 - protein, 274 aa, Exiguobacterium sp. 255-15
MSPVLAEFLGTALLVAFGNGVGAGVTLSKSYAKDAGWIVITLAWGFAVALSAYAVGQFSGAHLNPAVTLGLAFDGSFAWADVPGYIVAQILGGIAGASIVFVHYLPHWAETKDPAAKLGVFATSPAIPHTFANVMSELIATFLLVIGILSIGANTFSDGLNPLVVGVLIVGLGMSFGGTTGYAMNPARDLGPRIAHFILPIAGKGSSNWGYAWIPVLGPVLGGSLGGLFYRSVFSGKDTPAFVIVGLVTIVILGLCYKFGVRPNKSTSVKSKSA

SEQ ID NO: 23237 - protein, 158 aa, Glycine max
MSLFSDENHFSGLRIDSSKLGADPGMPVEVSSEAEETTKVGNNRRPTYRCKKCRRLVALQEHVIDHVPGEGERAFEFHKRRGGNPFNKSDEFECSSIFIEPLRWMKAVEEGAMEGKLSCAHCDARLGYFNWSGIQCSCGSWITPAFQLHKSWIDVSPM

SEQ ID NO: 23238 - protein, 377 aa, Yersinia pseudotuberculosis IP 32953
MKEVRIGLIGTGYIGKAHAIAYAQAPTVFELRGKLVREMVAEVSPALAAQRAQAFGFNRFTCDWRELVADPAIDVVDICSPNYLHKEMALAAIHHGKHVYAEKPLALNARDASEMAAAATRAGVKTLVGFNYIKNPSAKLAKEIIERGEIGEVIHFYGTHNEDYMADPNTPIHWHCLQATAGLGTLGDLAAHIVSMAQYLVGEITQVCGDLKTVVVTRPASVGSSARVAVENEDQAHAMVRFVNGAQGVIEASRVACGRKMGLSYMITGTQGAISFTQERMAELKLYLHNDPVNRQGFRTLLVGPTHPEYAAFCMAAGHGIGFNDQKTVEVRDLIDGIAMDTPLWPDFAEGWKVSRILDAIALSHQDSRWVNVTDIV

SEQ ID NO: 23239 - protein, 110 aa, Triticum aestivum
MASETVVLKVAMSCGGCSGAVKRVLTKMEGVESFDIDMEQQKVTVKGNVKPEDVFQTVSKTGKKTAFWEAEATPAAAAAEAAPAAPAPEAAAPTADAAPAPEATPANTVA

SEQ ID NO: 23240 - protein, 656 aa, Yersinia pseudotuberculosis IP 32953
MSVEKQFSVSAEKTCNTENKCNTEKKFDVICMGRIAVDLYGQQIGARLEDVASFAKYLGGSSGNVAYGSARQGLRSSMLARVGDEHMGRFLREELHQVGCDTSHLTTDKKRLTALVLLSIKDRDTFPLIFYRDNCADMAITAQDFSEQYIASARCLAITGTHLSHPNTREAVLTALRYARRNGVRTVLDIDYRPVLWGLTSLGDGETRFIESHQVTAELLAVFNLFDVIVGTEEEFHIAGGSTNTLDALRGVREVSDAALVCKRGALGCSVYTEAIPQTLDEGLTVSGVRVKVLNVLGAGDAFMSGLLRGYLNDEGWPQACRYANACGALVVSRHGCAPAMPSKIELDNYLARADAVVRPDLDVHLNHLHRVTTRRRQWPELCVMAFDHRSQLEEMALQCGADLCHISTLKTLILQASREAVHTAGLQGKAGLLCDGTFGQDALNAITGAGWWIGRPIELPGSRPLAMEHGNIGSQLIGWPQEHIVKCLVFFHPEDAYSLRLEQEQKIIEVYRACCQSGHELLLEVILPAGMPRSDELYLRAISRFYNLGVYPDWWKLPPLASEGWAALNKLIERRDPHCRGVVILGFDASLEALRTGFNAAAGYPIVKGFAVGRTLFGDASLAWLKRDIDDTQLIARIRDNYLQLITLWRERGQK

SEQ ID NO: 23241 - protein, 568 aa, Arabidopsis thaliana
  misc_feature (150)..(150): Xaa can be any naturally occurring amino acid
  unsure (1)..(568): unsure at all Xaa locations
MDSARSWFHKFQPRDKPRKKDMFSGSTYGGGVTETTVPDGGNDTETATKLPPLGGDGEALSNSTKQKVAAAKQYIENHYKEQMKNLNERKERRTTLEKKLADADVCEEDQTNLMKFLEKKETEYMRLQRHKMGADDFELLTMIGKGAFGXRVVREINTGHVFAMKKLKKSEMLRRGQVEHVRAERNLLAEVDSNCIVKLYCSFQDNEYLYLIMEYLPGGDMMTLLMRKDTLSEDEAKFYIAESVLAIESIHNRNYIHRDIKPDNLLLDRYGHLRLSDFGLCKPLDCSVIDGEDFTVGNAGSGGGSESVSTTPKRSQQEQLEHWQKNRRMLAYSTVGTPDYIAPEVLLKKGYGMECDWWSLGAIMYEMLVGYPPFYADDPMSTCRKIVNWKTHLKFPEESRLSRGARDLIGKLLCSVNQRLGSTGASQIKAHPWFEGVQWEKIYQMEAAFIPEVNDDLDTQNFEKFDEEDNQTQAPSRTGPWRKMLSSKDINFVGYTYKNFEIVNDYQVPGIAELKKKESKSKRPSVKSLFESESDSSSSGSEQQTINRSYSNPTPRGMEPNLRRLDSE

SEQ ID NO: 23242 - protein, 584 aa, Prosthecochloris aestuarii DSM 271
MDVVYHDVIIVGAGLAGLRAAVELAGSADVAVLSKLHPLRSHSGAAQGGISAALGNVEEDNPDWHAYDTIKGSDYLADQYAVQVMCNDAPRAIIEMEHLGVPFSRLDDGRIAQRPFGGHTRNFGQAPVRRTCFAADRTGHVCLHTLYEQSLKQGVRFYDEIQVLDLCMEDGSVNGVVAMELLTGRIVLMHAKAVMFATGGYGKAWKTTSNAFANTGDGLGIVLRNGLPLQDMEFVQFHPTGLYQLGILITEAARGEGGILLNGNGERFMERYAPSIKDLAPRDIVSRSIYDELKAGRGAGPEKDHVLLDLTSLSHEKIASRLPEIESFAKVYLGIDPSRAPIPVLPTCHYAMGGIPTSVDGRVLGDAEGREVPGFWAAGEVACVSVHGANRLGSNSLLDLIVFGRRSGKDIAQFLKKSGPALPLDMHAADRVKGVISTLLDRQSGESVAAVRRDLQRVMMDDVSVFRQESCLADAVSKLRELQQRASLIRVRDRTRNFNQELTDALELQHMVNYSLTVALSALNRRESRGAHSREDYPDRDDANWLKHSMCRMDEEGGVQLFDRPVDLSLAAANPVFVPKERKY

SEQ ID NO: 23243 - protein, 409 aa, Anabaena variabilis ATCC 29413
MTTDLLTNPAHEIVDVKNTDCCIVGGGPAGAVLALLLARQGVSVILLEAHKDFDRDFRGDTIHPSVMEIMEELELSDRLLQLPHTKMRQIRVKTPQNTFTLADFSRLKTRYPYITMLPQVKFLEFITQEAQKYPSFQLVMGANVQELVEENGVIQGVRYRGGGGWHEIKATLTVGADGRHSRLRQLGDFAATETSPPMDILWFRLPRQPEDGEGGMGRFAPGHIIAMLDRGNEWQMAYVIPKGGYHQLRSQGLEALKKSVVEVVPELANRIHNLHDWSQVAFLSVESNLVQRWYRPGLLLIGDAAHIMSPVGGVGINYAIQDAVVAANVLTKPLQNHHVKLRDLAKVQDRRELPTRIIQAFQTFIQKRVFAPVLADNLTFQPPVLLRLPILRDLPARLIALGVFPVHVK

SEQ ID NO: 23244 - protein, 321 aa, Prosthecochloris aestuarii DSM 271
MKILVIGGAGYIGSHVARAFLDSGYSVTVFDNLATGARENLFEEAQFIHGDIMQPDHLRKAMAHGFDACVHLAALKAAGQSMTDPGSYATANICGTVNILNALVEAGIQTLIFSSSAAVFGSPSFLPIDEDHPKNPENFYGFTKLEIERLLAWYDRLKGLKYGAIRYFNAAGYDVAGRITGREQNPENLLPVVMEVAAGIRPRLSIFGDDYPTRDGSCIRDYVHVNDLARAHVLAFEYILKQKRSLELNLGSERGVTVLEMIKKAREITGQPIAADIAPRRPGDPAELVASSAKALRLIGWKAEHSDVDTLISSTWSVYKK

SEQ ID NO: 23245 - protein, 315 aa, Synechococcus elongatus PCC 7942
INGFGRIGRLCLRAGFDDPQLDFVAINDLVPPKNLAYLLHYDSTHGRLQQTVRAEEDRICAGDRCIQCFSETDPAAIPWGELGVDVVIEATGRFTDYRAASRHLEAGAQRVVISAPTSEKDPDRVPTFVYGVNHQNYDPQQHRILSNASCTTNCLAPIAKVLQEHCGIEDGLMTTIHAVTATQPTVDGPSRKDMRGGRSAAQNIIPASTGAAKAVGLVLPELQGHLTGMALRVPTADVSVVDLTFRSRQSTTYAAICEVMQKAANTQLQGILGYTEDDLVSSDFIGDARSSIFDATAGMALNDRFFKVIAWYDNE

SEQ ID NO: 23246 - protein, 626 aa, Ralstonia eutropha JMP134
MSPDEANARTQQLRALIQLGRQRGYLTHADISDHLQENFTDTAAMESIVTTFAEMGVKIFEQTPDAETLLLSDNAVVASDDQADEEAEVALSTVDSEFGRTTDPVRMYMREMSSATLLTRKEEVELAKRIEDGLNNMVHAISACPSTIATILELSGRVASAEMGIDDLVDGLTDESGADAPVTASADDSDDDSADTADEDDSNEDDDDAEEGSTQQSAEADLAKLRDECLKRFARVSEQFELMRQEYAANGSGSAGFVTARDTVRDELRTIRFTAKTIERLCADVQSMVDDVRVVERQVVQLLVDRCGMDREDVIARFPGNETNLSWGRDLAAASRPYSAAVARALPDLEAHQQKLIDIQARAALPLAELKAVNRKMLAAERQMRQAKHEMTQANLRLVISIAKKYTNRGLQFLDLIQEGNIGLMKAVDKFEYRRGWKFSTYATWWVRQAVTRAIADQARTIRVPVHMIEQINKLNRLSRELMQQTGKEPDPAVLAERMDMPEEKVRAIMKIAREPVSMETPVGEDGDTSLGDMIADSDTATPADAALQASLREVVREMLDELTPREAKVLRMRFGIDMATDYTLEEVGKQFDVTRERIRQIESKAMRKLRHPSRADQLITYLRDA

SEQ ID NO: 23247 - protein, 343 aa, Mesorhizobium loti MAFF303099
MSQPAILVTGGAGFIGSHTCKLLAAAGYLPVAFDNLCRGNRKSVAWGPLVVGDIRDRDALRAAIGTYRPISVIHFAALAYVGESVQEPADYYSTNVTGTIAVLDAARAHAIDNIIFSSSCATYGVPEALPVRETSLQNPISPYGRTKLMGEQIIGDYASAYGMKFAILRYFNACGADPDGELGEWHSPETHLVPRVLMAASGIIDEIEVFGTDYDTPDGTCVRDYIHVSDLARAHLKALQHLEGGGQNLAVNLGTGRGVSIREIIQAVGRITSRPVPAVFRDRRPGDPAELYADPGKARAHLGFVPQLSDIDTIVRTAAPFFGLRTKPMELPPSKAAASLAAG

SEQ ID NO: 23248 - protein, 331 aa, Rubrivivax gelatinosus PM1
MNDEHRWWYPVATAADLGAGPLPAALFGEDLVLWRDEAGTPHAFTDRCPHRGTRLSLGAVRVVDGRAQLECPYHGWRFDGGGRCLRIPALPDFTPATGHAARAHPLREAHGLLWVVLGGDANLETVATACLPDPGPVPGRAVVCGHYDVGTSAPRVVENFLDTSHFAFVHEGWLGDRDHTEVPIYDVVPDANGAPGVPHYRAWQPQASAQSAGGAWVDYRYQVLSPCSALLVKQAGDDAQTTQEAYALWVAPLEPERSRVWFTLFTCDTATPDETLRAFQHGIFTQDQPVLESQRPRRLPLSGSEAHCAADRLSTAYRRYLQAQGHTYGTC

SEQ ID NO: 23249 - protein, 337 aa, Microdochium nivale
MVVKVGINGFGRIGRIVFRNAIEHDDIEIVAVNDPFIETKYAEYMLKYDSTHGNFKGTIEVASDGLVVNGKKVQFFTERDPSAIPWGKAGADYVVESTGVFTTIDKAGAHLKGGAKKVIISAPSADAPMYVMGVNNETYDGKADVISNASCTTNCLAPLAKVIHDKFTIIEGLMTTVHSYTATQKTVDGPSAKDWRGGRTAAQNIIPSSTGAAKAVGKVIPDLNGKLTGMSMRVPTANVSVVDLTVRIEKGASYEQIKEAIKEAANGPLKGVLAYTEDEIVSSDMIGNPHSSIFDAKAGISLNDNFVKLVSWYDNEWGYSRRVLDLLAYIAKVDAGK

SEQ ID NO: 23250 - protein, 551 aa, Streptococcus agalactiae NEM316
MTKKIFRTTLSASLGIVLVTILMIMGFLYNYFNHIQREQLRTQTALASQGISFEGKDYFENLKTSNVRITWVDNKGQVLYDTQSDAKHMKNHANRQEIKEAIKSGYGESTRWSATLTEKSIYAAQRLNNGTIVRLSVAQQTIFYLLLGMISPLAIIILLAIILSVLIARYIAKKVSEPLNNIDLDHPLSNDSYEEITPLLRRLDSHQAKIQHQKLLLQKRQKEFDTIISKIKEGMILLDDQARIVSINAEALKLFQINDDWHGRFMMEVSRDLTLKDLIDQGLKGKKKEANIGIENNHYRVLVRPTTDNNRVTGLVVLLFDVTDQLQMEQLQREFTANVSHELKTPLHVISGYSELLANQMVPNEEVPQFAAKIHKESERLVKLVEDIISLSHLDEQEKLPQETVNLYDLTQKVLEGLQAKADKKHIQINFNGEEAILRGNPVLLNSLVYNLCDNAITYNHEKGQVNVTLKNSPDTITLEVSDTGLGIAEKDKKRIFERFYRVDKSRSKIVGGTGLGLSIVKSALDFHNGSIKVDSHLGQGTTMTVLLHKQ

SEQ ID NO: 23251 - protein, 529 aa, Arabidopsis thaliana
MGHRHSKSKSSDPPPSSSSSSSGNVVHHVKPAGERRGSSGSGTVGSSGSGTGGSRSTTSTQQNGRILGRPMEEVRRTYEFGRELGRGQFGVTYLVTHKETKQQVACKSIPTRRLVHKDDIEDVRREVQIMHHLSGHRNIVDLKGAYEDRHSVNLIMELCEGGELFDRIISKGLYSERAAADLCRQMVMVVHSCHSMGVMHRDLKPENFLFLSKDENSPLKATDFGLSVFFKPGDKFKDLVGSAYYVAPEVLKRNYGPEADIWSAGVILYILLSGVPPFWGENETGIFDAILQGQLDFSADPWPALSDGAKDLVREMLKYDPKDRLTAAEVLNHPWIREDGEASDKPLDNAVLSRMKQFRAMNKLKKMALKVIAENLSEEEIIGLKEMFKSLDTDNNGIVTLEELRTGLPKLGSKISEAEIRQLMEAADMDGDGSIDYLEFISATMHMNRIEREDHLYTAFQFFDNDNSGYITMEELELAMKKYNMGDDKSIKEIIAEVDTDRDGKINYEEFVAMMKKGNPELVPNRRRM

SEQ ID NO: 23252 - protein, 701 aa, Xanthomonas oryzae
MAKSSGKPASAVSVDRSASAPDARGTGDELHQKARGRHPQLTTNQGIPVGDNQNSLRATPRGPTLLEDFILREKITHFDHERIPERIVHARGSASHGYFKLTKSLSQYTTAKIFTEVGEKTPLFTRFSTVAGGAGSVDTPRDVRGFAVKFYTKEGNWDLVGNNIPVFFIQDAIKFPDLIHAVKMEPDRGFPQAASAHDTFWDFISLTPESMHMIMWAMSDRTIPRSLRMIEGFGIHSFRFLNDKGESTFVKFHWRPKLGLQSTIWDEAVKIAGADQDFPPRDLFEAIQNGDFPEWELGVQLFTEAEADAFPFDHLDSTKIIPEELVPLQIVGRMVLDRWPDNFFAETEQVAYCPANIVPGIDFSNDPLLQGRLFSYLDTQLSRLGGPNFHQIPINAPKCPFANNQRDGHMQMDVPKARVAYEPSLLQADAPREALRGFPSHSTPAEDGAKGRVRAERFADHYSQARLFFRSQTAPEQAHMASALVFELSKVETAHVREAIVGHLRHIDQKLAQRVADGMGMTTLPPAPPAAVAPIDMPLSPALQVIGKMKDTLKGRTVGILIHDGSDASTIKAVRKAAEAEGATVKIVAPKLGGAKLSDGKQLAADGQLAGTPSVVFDAVAVLLSSEAAKLLTRESAALDFVSCAWAHLKAIAFDEGAQLLLKAGNIGKDAGVVPAADTKAFISAAKTRQWAREPKVRMLA

SEQ ID NO: 23253 - protein, 107 aa, Oryza sativa
  misc_feature (77)..(77): Xaa can be any naturally occurring amino acid
  misc_feature (94)..(94): Xaa can be any naturally occurring amino acid
  unsure (1)..(107): unsure at all Xaa locations
FIGPPESIGKLPVETPFSEERRVGLTAAMAGKEAVWAEIVAEEKLVATELGEVANWWFVDALFMDKWEFVAPMTKSXKEPGFLGFRNTLRSFEXAWIDKMKLYRIVP

SEQ ID NO: 23254 - protein, 404 aa, Silicibacter sp. TM1040
MSDPRLPVTVLSGFLGAGKTTLLNRILNNREGRRVAVIVNDMSEVNIDADLVREGGADLSQTEETLVEMSNGCICCTLRDDLLAEVRRLAAENRFDYLLIESTGISEPLPVAATFDFRDAEGESLSDVARLDTMVTVVDAVNLLNDFASHDLLADRGETLGEEDERTLVHLLTDQIEFADVVVLNKVSLASAEQVDAARKIIRSLNADAEIIETDFSEVSADKILDTKLFDFEKAHEHPMWAKELYGFADHVPETEEYGIASFVYRARAPFDPSKLHVVLNGNLPGVIRAKGHFWVATRPEWVAEFSLAGALSSVAPLGTWWASVPAERWPTHQQARDYIQTHWQEPFGDRRQELVFIGAGIDWPALKATLDACLIPEATAETLQDYADLDDPFPLWRRADQAA

SEQ ID NO: 23255 - protein, 415 aa, Streptomyces coelicolor A3(2)
MRRIVYLGGLTPRGVPERTLSPHLRSRAEVGPILVRDVLHYLAGAATMPDDIDRAFDVGGPDVPTYREMMRRHATVSGLRRRIIVPAPVLTPGLSSHWVGLVTPVPASIARPLTESLRHEVVCQEHDIARYVPDAPGRPLPFDVALTLALRRVREAQVATRWSSASVPGAPSDPLPTDPDWAGGSLYEDERHLPVDASPEALWKVVEGIGGDNGWYSFPPAWAVRGWLDRFVGGVGLRRGRRDAQRLHPARPVAWRGGRRRGHRRLAGRTGYPVVDAAMRQLRHQGWMHNRARLLVASFLTKTLYVDWRIGARHFLDLLVDGDVVNNQLNWQWAAGTGTDTRPHRVLNPLVQARRFDPDGVYVRRWVPELRSVEGGKVHEPWRLAAAERGELDYPDPLVELADGLARFKHARGRD

SEQ ID NO: 23256 - protein, 333 aa, Propionibacterium acnes KPA171202
MHAITVRPTDKTDSKGRHRPGPECIEWTEVPTPKPGPGEVLVKVKAAGINRGDLLQRQGLYPPPKGVSETMGLEVTGVISSLGQDVTGWSEDDEVIALLAGGGYAEYVIVPAGQLLPIPEGIDPVTASTLIEVTATVISNMDHVGLARGETFLVHGGAGGIGQFAIQYAKSLECTVITTCGTAEKQEFCRTLGADVALDYHEDWVAGVKDATGGRGADVILDVMGAKYLDLNVDALAIGGRLDIIGMQGGIKGELNIAKLLNKRALVTATSLRPRPLEEKAKICQRVREVAWPLYTNGSIKPAPVESFPMSEAGRAHERLESGEVLGKVALTL

SEQ ID NO: 23257 - protein, 445 aa, Halobacterium sp. NRC-1
MNRETSRELYDRSLDVLVGGVNSTVRAAPQPYPTFVQSGDGGHVIDADGNRYIDWVMGLGPLLLGHDLPQPVTAAIQRRASDGPLFGTPTEIEVEHAEFVARHVPSVELLRFVNSGTEATVSAVRLARGYTGRNKIVVMQGGYHGAQESTLVEGDADHRGPSSAGIPPAFAQHTIPVPFNDADAVTEVFETHGDDIAAVLVEPILANKGIVEPVAGYHETLRDLTHDHGALLIWDEVITGFRVGGLGCAQSEFDITPDVTTFGKIIGGGFPVGAIGGRTDVMEEFTPTGDVFQAGTFSGHPVTMAAGLETLQYAAENDVYEHVNRLGGRLREGLAAVVAEHAPAYTVVGRDSMFKVVFTRDGDAQSGACTDGCRQDPDCERHAACPKTGADVGDAAVQRWNRVFRPQLLDAGVLLSQNQFESQFVSYGHTEADVDETIEAYRSAL

SEQ ID NO: 23258 - protein, 213 aa, Methanotorris igneus
MDREKILQAVKEARRLAKPRNFTQSFDLVVNLKELDLSRPENRLKEEVVLPHGRGKEAKIAVIAKGDLAAQAEELGLTVIREEELEELGKDKRKARKVANAHDFFIAQADMMPLVGRYLGPILGPRGKMPKPVPANINLKPLVERLKKTVVVNTRDKPIFHVLVGNEKMSDEQVAENIEAILNTVAKKYEKGLYHVKSAYVKLTMGPAVKIEK

SEQ ID NO: 23259 - protein, 219 aa, Burkholderia sp. 383
MKDIIEGFLKFQRDAYPERAALFRDLARSQNPRALFISCSDSRLVPELVTQREPGDLFVIRNAGNIVPSYGPEPGGVSASVEYAVAALRVTDVVICGHSDCGAMTAIATCQCMDHMPAVGHWLRYADSARVVNEARTHRSERERIDSMVRENVVAQLANLKTHPAVRLALEEGRLALHGWVYDIESGCIDAYDGATGRFVSLADHPAVRATPATLPVAA

SEQ ID NO: 23260 - protein, 564 aa, Arabidopsis thaliana
ESTLGRHLSRRLVQAGVTDVFSVPGDFNLTLLDHLIAEPELNNIGCCNELNAGYAADGYARSRGVGACVVTFTVGGLSVLNAIAGAYSENLPVICIVGGPNSNDFGTNRILHHTIGLPDFSQELRCFQTVTCYQAVVNNLEDAHEQIDKAIATALKESKPVYISISCNLAATPHPTFARDPVPFDLTPRMSNTMGLEAAVEATLEFLNKAVKPVMVGGPKLRVAKASEAFLELADASGYPLAVMPSTKGLVPENHPHFIGTYWGAVSTPFCSEIVESADAYIFAGPIFNDYSSVGYSLLLKKEKAIIVHPDRVVVANGPTFGCVLMSDFFRELAKRVKRNETAYENYERIFVPEGKPLKCKPGEPLRVNAMFQHIQKMLSSETAVIAETGDSWFNCQKLKLPKGCGYEFQMQYGSIGWSVGATLGYAQATPEKRVLSFIGDGSFQVTAQDISTMIRNGQKAIIFLINNGGYTTEVEIHDGPYNVIKNWNYTGLVDAIHNGEGKCWTTKVRYEEELVEAIKTATTEKKDSLCFIEVIVHKDDTSKELLEWGSRVSAANGRPPNPQ

SEQ ID NO: 23261 - protein, 273 aa, Streptococcus pyogenes MGAS8232
MMKRQFEDVTRIVIKIGTSSLVLPTGKINLEKIDQLAFVISSLMNKGKEVILVSSGAMGFGLDILKMEKRPTNLAKQQAVSSVGQVAMMSLYSQIFAHYQTNVSQILLTRDVVVFPESLANVTNAFESLISLGIVPIVNENDAVSVDEMDHATKFGDNDRLSAVVAGITKADLLIMLSDIDGLFDKNPTIYEDAQLRSHVAVVTQEIIASAGGAGSKFGTGGMLSKIQSAQMVFENKGQMVLMNGANPRDILRVLEGQPLGTWFKQIEEVTHD

SEQ ID NO: 23262 - protein, 729 aa, Streptococcus pyogenes MGAS8232
MATVSTGSLIFIVKKNSPMMSKLVFFWQNREKEFRDFGGFSEKSVYFCDTIDNRKRLILVVINREVLLMTFDAIDQLAVNTVRTLSMDAIQAANSGHPGLPMGAAPMAYVLWNHFMNINPKTSRNWSNRDRFILSAGHGSAMLYSLLHLAGYDLSVEDLKNFRQWGSKTPGHPEVNHTDGVEATTGPLGQGIANAVGMAMAEAHLAAKFNKPGFDIVDHYTFALNGDGDLMEGVSQEAASMAGHLKLGKLVLLYDSNDISLDGPTSMAFTEDVKGRFEAYGWQHILVKDGNDLEEIAAAIEAAKAETEKPTIIEVKTIIGFGAEKQGTSAVHGAPLGAEGIAFAKKAYQWTHQDFEVPAEVTERFAQGLQARGEKAEQAWNDLFAAYQAEYPELAAEYQKAFANEAAQVELEAHELGSSMASRVSSQQAIQQISEQVASFWGGSADLSASNNTMVKAETDFQPGHYEGRNIWFGVREFAMAAAMNGIALHGGTRVYGGTFFVFSNYLLPAVRMAALQNLPTVYVMTHDSIAVGEDGPTHEPIEQLASVRSMPNLNVIRPADGNETNAAWKRAIAETDRPTMLVLTRQNLPVLEGTKELAEDGLNKGAYILSEAKGDLDGIIIATGSEVKLAMDTQEALEAEGIHVRVVSMPSQNIFDEQSAEYKESILPAAVTKRLAIEAGSSFGWAKYVGLAGKTLTIDTWGASAPGNRIFEEYGFTVANATELYKSL

SEQ ID NO: 23263 - protein, 1014 aa, Oryza sativa
MEQKDSGGGGGGLARRLMLDASGREMDSPRFRAILRATSGRRKRAPDVKSFSHELNIRGPLLHPLQQRKPRGCVNSPEEFIGAIRTKFIRLKEEVDAELGVFAGDLVGALDKADGDEERVALEDLLVVAQRCAEMSPEELWVKCECIVQGLDDRRQELTAGVLKQAHTRVLFILTRCTRLLQFRKEGGGYVAADDKQHVLSLHQLSDLGLYPFKVAGGSSELGRKSTSSLTELKERLIRRRMLEHKQLTLDFSAGRVISSDTGGDSPGSGGKISSWKKLPSPAEKTLHKVTEPTTEEKTTPTKKKAITRNKVAVDEIVERIDAASIHPDGLSYLGDSAVKLEVPSGFPEAQQIIVDGKPRMICRICDFEIPMVCAEGHFIVCTLADRCDSKGLNTDQRLQRVAEVLGRVLGCFESKSPQTAECNHNETARGSTSSLTESDGSMDHDILSHLLTVPSTELFSEGALTPASGSMPQSPLLTPRTSHAESQLTKHKAFVELENFQQVESLMTIARGIERIKNSEYNSLEDLSSYLEDLNAVIDTRKVDALVVETFGRRIAKLLQEKFIQLCGQIEDSNTDSLGSIDEDGPMESSVSSRTSQMNGKFKDRTSIEDFEIIKPISRGAFGRVFLAKKRVTGDLFAIKVLKKADMIRKNAVESILAERDILISARNPFVVRFFYSFTCRENLYLVMEYLNGGDLYSLLRNLGCLDEDMARTYMAELVLALEYLHSMNVIHRDLKPDNLLISRDGHIKLTDFGLSKVGLINSTDDLSGPDVSNVLVGDHQPADAEQRAQKREQRQKQAAVGTPDYLAPEILLGMTHGPTADWWSVGVILFELLVGIPPFNAEHPQIIFDNIMNREIPWPQVPEELSFEAYDLIDKCYFNSVNFHVRLLIENPVQRLGATGAGEVKAHPFFKDINWDMIARQQADEFGSMEEFGAPSLSVKYSFSNFSFKSNIYAKNACCDWQMEVADLTLKDEFRIGKYFTANYQSFTYTIHDQPQKKRIQTSQEITTHHKN

SEQ ID NO: 23264 - protein, 89 aa, Oryza sativa
MASSRWVRPEVYPLFAAMGVAVGICGFQFFRNITGNPEVRVNKVGRAAGVLENHEEGRRYAEHGLRNYVRDKTPEIMPAINKFFFEPTK

SEQ ID NO: 23265 - protein, 372 aa, Hemerocallis hybrid cultivar
STEIFSPVRIRSLAAVRQEEVKLMITGILASTSTDNSVKVNMKVVFSELMFNVIMKIIAGKRYFGVNTDSEVEEGQKFRVVFDEMFSTLEVASPQDFLPFLKWFGFKRMENRLTKLAKELDQLFQKLIEERRSERGKVQSTVIDVLLSLQETDREQYSDKLIKGMILSLIAAGTHTTAGTMEWAMSLLLNHPEALLKVRDEIDKKVGQDRLIDHSDLQNLSYLNNAIKESLRLFPTAPLLLAHESSAECTVGGFTIPSNTILFANAYALHRDPKVWTDPVSFKPERFENNGQQGSRIYVPFGLGRRSCPGEGLATQVVGLALGTLIQCFEWDRNGEEKVDMTDGSGLAMHMEKPLEAMCKPRQSIVDVINRL

SEQ ID NO: 23266 - protein, 547 aa, Acidithiobacillus ferrooxidans
MTENAPTELAITGMTCDGCAAHVRKALEGVPGVREAQVSYPDATARVVLEGEVPMQRLIKAVVASGYGVHPRSDGASSTNDGQELHIAVIGSGGAAMACALKAVERGARVTLIERSTIGGTCVNIGCVPSKIMIRAAHIAHLRRESPFDGGIQAVAPTIQRTALLVQQQARVDELRHAKYEGILDGNPAITVLRGEARFKDSRSVVVHLNDGGERVVMFDRCLVATGASPAVPPIPGLKDTPYWTSTEGLVSESIPERLAVIGSSVVALELAQAFARLGSHVTILARGTLFLREDPAIGEAITAAFRAEGIEVLEHTQASQVAYADGEFVLATGHGELRADKLLVATGRAPNTRRLNLEAAGVAINAQGAIVIDQGMRTNSPNIYAAGDCTDQPQFVYVAAAAGTRAAINMMGGSAALDLTAMPAVVFTDPQVATVGYSGAEAHRDGIETDSRTLTLDNVPRALANFNTRGFIKLVAEVGSGRLIGVQVVAPEAGELIQTAALAIRNRMTVQELADQLFPYLTMVEGLKLAAQTFTRDVKQLSCCAG

SEQ ID NO: 23267 - protein, 359 aa, Gentiana triflora
MEGGILSNATTVCVTGASGYIGSWLAMRLLERGYTVRATVRDPGNLKKVQHLLELPKASTNLTLLKADLTEEGSFDEAIHGCHGVFHVATPMDFESKDPKNEVIKPTIDGFLSIIRSCVKAKTVKKLVFTSSAGTVDVQEQQKPVYDENDWSDLDFINSTKMTGWMYFVSKILAEKAAWEVTKANDIGFISIIPTLVVGPFITTTFPPSLITALSLITGNEAHYGIIKQGQFVHLDDLCEAHIFLYEHPEAEGRYICSSHDTTIHDLAKMIRQNWPEYYIPTKLKGIDEDIPVVSFSSNKLIDLGFQYKYTLEDMFRGAIDTCKEKRMLPLSIGHQKESTDPEVDEVVKEMELIQDSLD

SEQ ID NO: 23268 - protein, 360 aa, Trametes cervina
MAFQTLFALATLATTVLAVPSPLVSCGGGRSVKNAACCAWFPVLDDIQANLFNGGKCEEEAHEAVRLTFHDAVGFSLAAQKAGKFGGGGADGSILAFSDIETAFIPNFGLEFTTEGFIPFALAHGVSFGDFVQFAGAVGAANCAGGPRLQFLAGRSNISQPSPDGLVPDPTDSADKILARMADIGFSPTEVVHLLASHSIAAQYEVDTDVAGSPFDSTPSVFDTQFFVESLLHGTQFTGSGQGGEVMSPIPGEFRLQSDFALSRDPRTACEWQALVNNQQAMVNNFEAVMSRLAVIGQIPSELVDCSDVIPTPPLAKVAQVGSLPPGKSMADVQVACTNGMPFPSLPTSPGPVQTVAPLG

SEQ ID NO: 23269 - protein, 634 aa, Bacillus clausii KSM-K16
MCGFVGDLLIRNGSHLPDHLWIQTLEAIHHRGPDSTGTYKDETVRFGFKRLSIIDLEHGDQPLAYSKGRYHIVFNGEIYNYIELRSQLIQRGYTFRTDSDTEVLLALYAADGKNAVKQLRGMYAFAIWDKHKKELFCARDRFGIKPFYYLKTDERFFFASEQKSIMPLLEQISIEQEALQHYATFQFVPEPNTLTKGIHKLLPGHTLTVNADFCVQIEAYAERTFQPRSGPTVTELANQTRKLLTDSVEKHMRSDVPVGAFLSSGIDSTSIAALAQQVHPNLLTFTVGFETEGYSEIAVAKETAKALGVKNIHKVISADEFIQELPNIVWHMDEPVADPAAVPLYFVAQEASKHVKVVLSGEGADELFGGYNIYREPLDLAWFKKLPPTFHAGLKRVVAHMPSKLKGRNYIIRGTTPLNERYIGNAFIFSEKEKTQLFRDYDRTKPYTNVTAPLYEQAKGMDESTIMQFVDMHTWLPGDILVKADRMTMAHSIELRVPFLDKDVFAFARMLGQDMKLSHKTTKFVLRQAMKDLIPANIVPRKKLGFPVPIRVWLKNELYDWAKQLIESSNTEDVFHKPFLLQMLQAHRDGHGDYSRRLWTVLTYMMWHDIHVAKRLISTHQQKDAERCKTLAHF

SEQ ID NO: 23270 - protein, 254 aa, Prosthecochloris aestuarii DSM 271
MINHSTKSTIVSNNTKFAFIFDMDGVLVDNMHMHARSWVEVFMDLGLEGMDSDRYLRESAGMKGLDVLRHFLDPDISETDADRLSELKDFLYRVMYRETMCPMPGLESFLDHAASQNIALGVGTGAGERNIAYTLGIPGLRDRFSAVVGSHQVQHGKPHPETFLRVAEMLDADPANCIVFEDALPGIEAANRAGMQAVALTTTNPAEVMSQCSGLLDVVADFTAITPDIIIEKLCGTCNSRSGESIQKKPCKNI

SEQ ID NO: 23271 - protein, 190 aa, Guillardia theta
MSSVKMHKTIASKLLNCGKRKIWIDPNETKNILFTDSRNSIRKLIRDGFILKKKDKNHSRNRIRSRKEEIKLGRHEGLGKRKGSKNSRYSIKLIWIIRIRVMRNLLKRLRNSSKLNRHLYRSLYLKSKGNVFKNKKILTEFIHKAKNEQKRKEEFLDKFKLMREKKKINIEKKKSNFNSRMSEIVSDILV

SEQ ID NO: 23272 - protein, 369 aa, Thermosynechococcus elongatus BP-1
MAQTLVVKIGTSSLAGGKEGNLALATIAQLVEVLCHCQRRGDRVVLVSSGAVGVGAMRLGLTERPQQLAQKQAVAAVGQGHLMRMYDDLFAVLRQPIAQILVTRQNFVDRQSYLNIYNTFQALFELGVIPIVNENDTVAVDELKFGDNDTLSALVASLVEADWLFLLTDVDRLYSADPRIDKTAVPIERVVSLAELAQTIQVGSAGSPWGTGGMATKIRAAEIATEAGVRTVITDGRSPTNLLKILGGEALGTHFEPRPKTINARKRWIARALIPKGELWLDEGAVKAITVGGKSLLAAGITRVEGEFQAQDAVKLCDPTGAEIARGLVNYNSEEIRRVQGQQSTELANILGYAGADTIVHRDNLVVTL

SEQ ID NO: 23273 - protein, 384 aa, Xanthomonas oryzae pv. oryzae KACC10331
MSTPASTSSPFAEQALPPWRRAVLKVGSSLLAADGGGLSPRFALGLAQFVSANLAAGRELVIVSSGAVAAGRAILPKAVDVGAPIAARQALAALGQAQLIALWQRFFERPVAQVLLTHDDLRNRRRYLNARATLGELLRLGALPVINENDTVSVDELKLGDNDNLAAIVAALVDADALFIATDIDGLYSADPRSNPLARPLDDVPELTPEVLAMAGGSGSNVGTGGMRTKLEAAAKAGAAGIETYLFNGRSGEVVRALAQDRLRGTRIHAARTRIAARKYWLRHAPVEAGAILVDAGAAMALSDKGASLLPGGVVGAEGDFRRGDMVEIRLRDDEGERCLARGVSQYSAVDIRRIARRHSREIENVLGYSYGENVVHRDDLVLL

SEQ ID NO: 23274 - protein, 574 aa, Lactobacillus plantarum WCFS1
MQLAGIRHRPESEDTAVLAAHQLQVRLQTARDDVAQVEILFADSYLWQEGTTALERRIMQPGLATQGNQYWQTTLTVPTNRVVYAFLITDTIGATVGYGEGGFFDDVATNWQTVGNYFHMPYMHVSDAELPPAWVKETVWYQIFPERFANGVRQNDPANVQPWGAGRVHRDSFYGGDLPGITAHLDDLAALGVNGLYLCPIFTSPSNHKYDTIDHFEIDPHFGTKADFQALVDGAHARGMRVMLDAVFNHFGEQSPQWQDVIKNGEQSRFADWFHIHGWPVGRDPKTKRLNYETFATGAAMPKVNTQNPAVQAYLIDVTKYWIEQFGIDAWRFDVADEVDHGFWRALCGALRAIKPDVYLLGESWHSSQSLVGNGQFNAVMNYPLTQPILALFNGQLNPEDYVGKTNLELMMYRQPNQQAMFNALDTHDTPRLLTTLHGQLTKFKSALTLLMLLPGSPCIYYGTEVAMAGGADPDNRRCMNWQPDEQEQQVRQFVTRLIKFRRQQADFLATSQLTWTIDGHCLILTRTDVEQTIQGRFNLGAQAVSTVSGVSPILTAGITANEMAPGGFELTVA

SEQ ID NO: 23275 - protein, 515 aa, Arabidopsis thaliana
MSDTKISAVAVAAAVVVVTTVTVWIWKGLNVAWLRPKKNEAYLKRQGLSGTPFTFLVGDIKREASMVEQEKSRPINLTDDYTHRVMPLIQQTVKDHGKTSYMWMGPIASVIVTKPEHIKDVLNRVYDFPKPPVHPIVELFATGVALYEGEKWSKHRKIINPSFHLEKLKIMIPAFYESCSEMISKWEKLVTEQGSSNEIDVWPYLGDLTSDVISRTAFGSSYEEGKRIFELQEEQGRRVLKALELAFIPGMRFLPTKSNLRMRQINKEVKSRLREIIMKRQRGMDTGEAPKNDLLGILLESNSGDHGMSIEDVVEECRLFHFAGQETTAVLLVWTMIMLSHHQKWQDQAREEILKVIGKNNKPNFDALSRLKTMSMILNEVLRLYPPGILLGRTVEKETKLGEDMTLPGGAQVVIPVLMVHRDPELWGEDVHEFNPERFADGISKATKNQVSFLPFGWGPRFCPGQNFALMEAKMALVLILQRFSFELSPSYTHAPHTVLTLHPQFGAPLIFHML

SEQ ID NO: 23276 - protein, 547 aa, Silicibacter pomeroyi DSS-3
MARFIFITGGVVSSLGKGLASAALGALLQARGFSVRLRKLDPYLNVDPGTMSPFEHGEVFVTDDGAETDLDLGHYERFTGVAARKTDSVSSGRIYSNVLEKERRGDYLGKTIQVIPHVTNEIKDFISIGEDEVDFMLCEIGGTVGDIEGLPFFEAIRQFSQDKPRGQCIFMHLTLLPYIKASGELKTKPTQHSVKELRSIGLAPDILVCRSEGPIPQKEREKLALFCNVRPDSVIAAQDLSTIYDAPLAYHREGLDQAVLDAFQISPAPKPDLTKWEDVSDRVHNPEGEVKIAIVGKYVQLEDAYKSIAEALTHGGMANRVKVRIEWVDAEIFEKEDPAPHLEGFHAILVPGGFGERGTEGKIKAAQYAREHQVPYLGICLGMQMAVIEAARNVAGIAGAGSEEFDHEAGKKRFEPVVYHLKEWVQGNYKVSRKVDDDKGGTMRLGAYDAVLKEGSRVAEVYGGTAIEERHRHRYEVDIKYREQLEKAGLCFSGMSPDGRLPEIVEWTDHPWFIGVQYHPELKSKPFDPHPLFADFVRAAKESSRLV

SEQ ID NO: 23277 - protein, 479 aa, Legionella pneumophila subsp. pneumophila str. Philadelphia 1
MMRLLMANKIKTDVVVLGSGPGGYTAAFRAADLDKKVVLVERFDSLGGVCLNVGCIPSKALLHIAKVVDEAHEMSEQGVAFGKPKFDNKKLVAWKNSVVAKLTGGLKALAKQRKVEVITGTGKFSGTHQILVETKEGTVEIEFDNAIIAVGSESIKLPFIPEDKRIFSSTGALELADIKGDLLVLGGGIIGLEMATVYSSLGVNVTVVEFMDQLIPNADADLVNILQKRMTKKGVKFLLKTKVTAVEAKKDGIYVSMEGEHATDKPLCFQQVLVSVGRKPNGGAINAEKAGIKVDERGFIPVDNQLRTNVPHIFAIGDVNGQPMLAHKAIPEGKVAAEVIAGKKHYFEPKCIPSVAYTDPELAWAGLTEKEAKEKGINYEKASFPWAASGRALSMGREEGMTKLLFCPETNRILGAGIVGVNAGDLIAETALAIEMCCDVEDIALTIHPHPTLSETIAQSAEAFEGTITDLYLPKKKKK

SEQ ID NO: 23278 - protein, 277 aa, Staphylococcus aureus subsp. aureus Mu50
MEVKTFYNGNTMPQIGLGTFRVENDENCMESVKYAIEQGYRSIDTAKVYGNEEQVGAGIRAGLESTGIAREDLFITSKLYFEDFGRENVAAAYEASLSRLGLKYLDLYLVHWPGTNEAVMVDTWKGMEDLYKNNKAKNIGVSNFEPEHLEALLAQVSIKPVINQVEYHPYLTQHKLKLYLAAQHIVMESWSPLMNAQILNDETIKDIAQELGKSPAQVVLRWNVQHGVVIIPKSVTPNRISENFQIFDFELSDEQMTRIDGLNQDKRIGPDPKTFEG

SEQ ID NO: 23279 - protein, 251 aa, Arabidopsis thaliana
MVKKSYPEVKEEYKKAVQRCKRKLRGLIAEKHCAPIVLRLAWHSAGTFDVKTKTGGPFGTIRHPQELAHDANNGLDIAVRLLDPIKELFPILSYADFYQLAGVVAVEITGGPEIPFHPGRLDKVEPPPEGRLPQATKGVDHLRDVFGRMGLNDKDIVALSGGHTLGRCHKERSGFEGAWTPNPLIFDNSYFKEILSGEKEGLLQLPTDKALLDDPLFLPFVEKYAADEDASFEDYTEAHLKLSELGFADKE

SEQ ID NO: 23280 - protein, 462 aa, Triticum aestivum
  misc_feature (111)..(111): Xaa can be any naturally occurring amino acid
  unsure (1)..(462): unsure at all Xaa locations
MAVAVLLAAILALSPLPLSLASPSAAAAADRITRLPGQPPVNFSMYSGYVTVDAAAGRALFYWLVESAAAKPESAPLVLWLNGGPGCSSVGYGASEELGAFRINADGRTLXVNPYSWNKMANVLFLDAPAGVGYSYSNTSSDLLAPGDNKTAHDSYTFLVNWLERFPQYKYRDFYIAGESYGGHYVPQLSQLVYRNNKGVRKPILNFKGFMVGNAVIDDYHDFVGTFEYWWTHGLISDDTYQKLQLACEFDSSEHASDACNKIYDVAEAEEGPIDAYSIYTPTCKKTSLHRRRQIKGRRPWLPRGYDPCTEQYSTKYYNLPEVQKAFRANVTGIPYAWTGCSDVLFEYWKDSPRSMLPIYRELIAAGIRIWVFSGDADSVVPLTGTRYSIDALYLPTVTNWYPWYDEEEVAGWCQVYKGLTLVTIRGAGHEVPLHRPRQALKLFEHFLQDKPCLGLYLAFSF

SEQ ID NO: 23281 - protein, 198 aa, Arabidopsis thaliana
MSASRFIKCVTVGDGAVGKTCLLISYTSNTFPTDYVPTVFDNFSANVIVDGNTINLGLWDTAGQEDYNRLRPLSYRGADVFLLAFSLVSKASYENVSKKWVPELRHYAPGVPIILVGTKLDLRDDKQFFAEHPGAVPISTAQGEELKKLIGAPAYIECSAKTQQNVKAMFDAAIKVVLQPPKNKKKKKRKSQKGCSIL

SEQ ID NO: 23282 - protein, 239 aa, Anabaena sp.
MKKTVEVLPDQTRSIRSLDLILTKLDTAIKQQGRFTIALSGGSTPKPLYEAIAAQKLPWDKIHVFWGDERYVSPDHPDSNELMARTAWLDRVDIPAEDIHAVPTLDNNPAVSAAKYEQHLQTFFNSAPGEFPALDVVLLGMGDDAHTASLFPHTEALQVRDRLITVGNKDGNPRITFTYPFINAASSVIFVVAGANKRPALAQVFAPSADDLAYPSRFIQPQGELLWLLDAAARRTLSV

SEQ ID NO: 23283 - protein, 483 aa, Burkholderia sp. 383
MNEFLRTGHYIGGEWHESHGASDATYPVLNPATGETIAKVAKGGADDTQRAIDAAAHAFPAWRALTAKERGARVKRWGELMLENRDALAELLTREQGKPLAEARGEVVYAASFLEWFAEEAKRMYGDVIPSPKPNSQIVVTREPVGVVAAITPWNFPLAMITRKAGPALAAGCTMVLKPSEETPLSAFALAVLAERAGVPAGVFNVVSGDAVAIGETLTSSSVVRKLSFTGSTRVGKLLAKQSADTLKKLSLELGGNAPFIVFDDADLDAAVEGAIASKFRNTGQTCVCVNRFLVQDGVYDAFTRKLADAVRKLRVGNALAGEVDQGPLINEAALGKVERHVADATAKGAHALTGGKRHALGGTFYEPTVLTGMTADMLIAEEETFGPVAGCFRFATEEEAVAAANDTPFGLSAYFYTRDLGRAWRVSGALESGMVGVNDGIISTEVAPFGGVKQSGLGREGSKYGLDEYVELKYTLMAGLGR

SEQ ID NO: 23284 - protein, 307 aa, Triticum aestivum
MPVPVRNSRAGSLSSSSPVPPPLLPRSSLISSPAQPSKSALRPARKQEGGGMKIQCDSCGVAAATVVCCADEAALCARCDVEIHAANKLASKHQRLPLDALGAKLPRCDICQEKAAFIFCVEDRALFCRDCDEPIHVPGTLSGNHQRYLATGIRVGLGPVSACAAGDHGAAHDADHHAPPKVSCEPQPAARAQQVPSPPQFLPQDWAVDELLQFSDYESSDKLHKDSPLAFKELEWFTADMELFHDHAPKGGRATMEVPEFFASQAADDAGYYRPSRVAATAGVRQSKKARVEIPDDEDFFIVPDLG

SEQ ID NO: 23285 - protein, 233 aa, Streptococcus pyogenes MGAS8232
MDIFGEFWDTALLVLLGNGVVAGVVLPKTKTHASGWIVIATGWGIAVAVAVFISGKVAPAHLNPAVSLAFAMSGTIAWSTAIAYSLAQLLGAMVGSTLVFLQFRPHYLAAESQADILGTFATGPAIRDTSSNLLSEIFGTFVLMLGILAFGLYDMPAGLGTLCVGTLVIGIGLSLGGTTGYAINPARDLGPRLVHAILPLNNKGDSDWSYAWIPVVGPIIGVALAVLLFQVMS

SEQ ID NO: 23286 - protein, 244 aa, Magnetospirillum magnetotacticum MS-1
MRKAIDAAGHPALLFVDGVSSIGSLPFKADEWKVDCAIAGSQKGLMLPAGLGVICVSPKALKAAEGQSGRNDRLARVYFDWEDQKKQNPTGYFPYTPPLPLLYGLREALACLFEEGLENVYHRHAVLGEATRQAVAAWGLKTCAKSSEWNSDTVTAILAPEGVDAAKIIKHAYVRYNLALGAGLSQVAGKVFRIGHVGDLNELSLLGAIAGAEMSLIDNGVNVTPGSGVAAASSYLREHPLSKG

SEQ ID NO: 23287 - protein, 877 aa, Shigella flexneri 2a str. 301
MKAVSRVHITPHMHWDREWYFTTEESRILLVNNMEEILCRLEQDNEYKYYVLDGQTAILEDYFAVKPENKDRLKKLVEAGKLIIGPWYTQTDTTIVSAESIVRNLMYGMRDCLAFGEPMKIGYLPDSFGMSGQLPHIYNGFGITCTMFWRGCSERHGTDKTEFLWQSSDGSEVTAQVMPLGYAIGKYLPADENGLRKRLDSYFDVLEKASVTKEILLPNGHDQMPLQQNIFEVMEKLREIYPQRKFVMSRFEEVFEKIEAQRDNLATLKGEFIDGKYMRVHRTIGSTRMDIKVAHARIENKIVNLLEPLATLARTLGFGYHHGLLEKMWKEILKNHAHDSIGCCCRDKVHREIVARFELAEDMADNLLRFYMRKIADNMPQSDADKLVLFNLMPWPREEVINTTVRLRASQFNLRDDRGQPVPYFIRHAREIDPGLIDRQIVHYGNYDPFMEFDIQINQIVPSMGYRTLYIEANQPGNVIAAKSDAEGILENAFWQIALNEDGTLQLVDKDSGVRYDRVLQIEESSDDGDEYDYSPAKEEWVITSANAKPQCEIIHEAWQSRAVIRYEMAVPRNLQQRSARQSTGRVDVELVVTLSHNNRRIDVDINLDNQADDHRLRVLIPTSFNTDSVLADTQFGSLTRPVNDSAMNNWQQESWKEAPVPVWNMLNYAALQEGRNGMAVFSEGLREFEVIGEEKKTFAITLLRGVGLLGKEDLLLRPRRPSGIKMPVPDSQLRGLLSCRLSLLSYTGTPTAAGVAQQARAWLTPVQCYNKIPWDAMKLNKAGFNVPESYSLLKMPPVGCLISALKKAEDRQEVILRLFNPAESATCDATVAFSREVISCSETMMDEHITTEENQGSNLSGPFLPGQSRTFSYRLA

SEQ ID NO: 23288 - protein, 300 aa, Triticum aestivum
  misc_feature (109)..(109): Xaa can be any naturally occurring amino acid
  misc_feature (118)..(118): Xaa can be any naturally occurring amino acid
  misc_feature (165)..(165): Xaa can be any naturally occurring amino acid
  unsure (1)..(300): unsure at all Xaa locations
NKFVQKSRLVPVRNSRDIVDPRVRACLVAVARGGNFIQDSEMTWGDGRGKVVDGGRGLDLTLDKTSGSGSNPEGLLFAKFTSNQAVPGKSAGTSPPLPFVAGTAHDKIXFDFLGNVPXEPYTLHTNVFAQGQGQREQQFRLWFDPTKAFHTYSIIWNPQHVIFAXVDGTAIRDFKNHEARGVSFPKSQPMRLYASLWNADDWATQGGRVKTDWSKAPFVASFRNFNADACVMSGGAQRCPAGTMEASAAGANGSGSWWNQELSGMGYRRIRWVQRKFMIYNYCTDPKRVAQGVPAECKLR

SEQ ID NO: 23289 - protein, 589 aa, Phaseolus vulgaris
MSSISLKENGGEVSVNKDYSNGGGVRDLYGEDSATEDHLITPWTFSVASGCSLLRDPRYNKGLAFTEGERDAHYLRGLLPPSVFNQELQEKRLMHNLRQYEVPLHRYMALMDLQERNERLFYKLLIDNVEELLPVVYTPTVGEACQKYGSIFRRPQGLYISLKEKGKILEVLKNWPEKSIQVIVVTDGERILGLGDLGCQGMGIPVGKLSLYTALGGVRPSSCLPVTIDVGTNNEKLLNDEFYIGLRQRRATGQEYAELLDEFMRAVKQNYGEKVLVQFEDFANHNAFDLLEKYSSSHLVFNDDIQGTASVVLAGLLASLKLVGGTLADHTFLFLGAGEAGTGIAELIALEVSKQTKAPVEETRKKIWLVDSKGLIVSSRLESLQQFKKPWAHEHEPVKGLLEAVKAIKPTVLIGSSGAGKTFTKEVVETMASLNEKPLILALSNPTSQSECTAEEAYTWSKGRAIFASGSPFDPVEYEGKLFVPGQANNAYIFPGFGLGLIMSGAIRVRDEMLLAASEALAAQVSEENYDKGLIYPPFTNIRKISANIAAKVAAKAYDLGLASHLPRPKDLVKYAESCMYSPGYRSYR

SEQ ID NO: 23290 - protein, 338 aa, Synechococcus elongatus PCC 6301
MMSNTMRAVVLEMPGGPEQLQLQSLPWPAIAHPSEVLVQLQAAGLNPIDTKLRQRGSFDPDRRPAILGCDGAGWVAAVGSAVDRFAVGDAVYFCHGGLGLEPGTYADYAVVDQAWLAPKPERLSFVEAAGVPLALITAWEAPYDRGRLQAAQTVLIHAGAGGVGHLAIQLAKLRGARVATTVSTPEKAAIAGHYGADFVIPYRDRDWVAAVLDWTDGKGVDLAFDTVGGAVLEQTFPAVRLYGDLVTILAPDAATNWKVARDRNLRISLELMLTPQLQRVTEARQHQTQILTTASRWFDQEQLHIHIGQVLPISEISQAHQFLERQQGAGKIVIDLTA

SEQ ID NO: 23291 - protein, 210 aa, Brassica napus
  misc_feature (99)..(99): Xaa can be any naturally occurring amino acid
  misc_feature (190)..(190): Xaa can be any naturally occurring amino acid
  unsure (1)..(210): unsure at all Xaa locations
MVASAFLPELWTEILIPVCAVVGIVFSLFQWFIVSRVRVSADQGASSSSGGANNGKNGYGDYLIEEEEGVNDQSVVAKCAEIQTAISEGATSFLFTEYXYVGVFMVIFAAIIFVFLGSVEGFSTENKPCTYDDTNTCKPALATAAFSTIAFILGAVTSVLSGFLGMKIATYANARTTLEARKSVGKAFIXAFRCGAVMGVPLAASGLLGL

SEQ ID NO: 23292 - protein, 561 aa, Vibrio vulnificus CMCP6
MIQPNELSKPQLALPTPSDMILKWAKERPHEVYLKQIINRQFVEFTYSEVADKALRLVTALKELGAEPGDRIALISKNCAEWFICDLAMMLGDYVSVPIFPTAGADTIEYCITHSESKILIAGKLDDAAATQKVIDDLVDVKSIALPYDSSPHCQYQFTTLILQSEPSSDRPQHYDDKLMSLVYTSGTSGLPKGAMLTYGAFSWSVQQLINHIGIQPNDRLFSYLPLAHITERVYIFGSSIMGGVPTAFPESLDTFIEDVKMQRPTLFISVPRLWTLFQQRIQDKLPQKRLNFLLKIPFVSGLIKKKLADGLGLDQARVLGCGSAPVSPALLAWYHSVGLNITEAWGMTESFAYSTLNYPFRADKIGSVGNAGPGIELKIAADDEIMVRGKGLFSGYYKNDIATQEAFDKEGWLHTGDIGRLDAEGYLTIQGRKKDTFKTAKGKFVSPVPIENKLFEYSRVEMMCLIGLGLPAPILLVVPHNFPNFDRDRYERTTKRVIAKMNAELESHEQIKGVLMIKDPWSIDNGILTPTLKIKRHVLEQKYHEVGQNWPKDKLVVWEE

SEQ ID NO: 23293 - protein, 279 aa, Streptococcus pyogenes MGAS8232
MVTTVKMTSGYEIPVLGFGTYQAADGEEAYQSTLAAIKAGYRHIDTAAIYKNEESVGRAIKDSGVLREDLFITTKLWNDAHSYEGAKDALAASLDHLGLDYVDLYLIHWPNPKALRNTWKEANAQAWQYMEEAVEAGLIKSIGVSNFMVHHLEALQETAKITPAINQIRLAPGCYQKEVVDYCKANEILLEAWSPLGQGEIFDNETMQQLANKYDKTVAQVALAWSLAEGFIPLPKSVHDERIKENMAIFDVSLTQEDKKTIRYLSGMSAIPNPDTTSF

SEQ ID NO: 23294 - protein, 256 aa, Arabidopsis thaliana
MATTNIGKEEKKRVEIYDLEENLVIDLAKFTADLSDKFCKERGAFTVVVSGGSLIKSLRKLVESPYVDSIDWARWHFFWVDERVVPKNHDDSNYKLAYDSFLSKVPIPPGNVYAINEALSAEAAADDYETCLKHLVNTNILRVSESTGFPKFDLMLLGMGPDGHVASLFPGHGLCNESKKWVVSISDSPKPPSERITFTFPVINSSAHVALVVCGSGKAEAVEAALKKTGNVPPAGSVSAEDELVWFLDKPASSKL

SEQ ID NO: 23295 - protein, 169 aa, Stigmatella aurantiaca
MADLSVRRGTGSTPQRTREWDPFQQMQELMNWDPFELANHPWFANRQGPPAFVPAFEVRETKEAYIFKADLPGVDEKDIEVTLTGDRVSVSGKREREKREESERFYAYERSFGSFSRAFTLPEGVDGDNVRADLKNGVLTLTLPKRPEVQPKRIQVASSGTEQKEHIKA

SEQ ID NO: 23296 - protein, 223 aa, Prosthecochloris aestuarii DSM 271
MKFFIDTANLDEIKAAAELGLLDGVTTNPSLIAKIVADPANFTYEDFKKHIAAICEIVDGPISAEVTTLEAEEMIREGEDLASIHENVVVKCPVTLEGLKAIRHFSSEGIRTNATLVFSPSQALLAAKAGATYVSPFIGRLDDISTDGMALVEQIVAIYDNYGYHTEVIVASVRHPQHVVEAALAGADIATIPFGVIKQLVRHPLTDAGLTKFMEDASVMKKS

SEQ ID NO: 23297 - protein, 269 aa, Klebsiella aerogenes
MERYETLFAQLKNRQEGAFVPFVTLGDPGPEQSLKIIDALIEGGADALELGIPFSDPLADGPTIQGAALRAFAAGVTPAQCFEMLAAIRQKHPTIPIGLLMYANLVFSPGIDAFYAQCARVGVDSVLVADVPVEESAPFRQAAMRHNIAPIFICPPNADDDLLRQIASYGRGYTYLLSRAGVTGAENRAALPLHHLVEKLAEYHAAPPLQGFGISAPEQVSAAIDAGAAGAISGSAIVKIIERHLDEPQTMLDELKAFVQSLKAATKTA

SEQ ID NO: 23298 - protein, 407 aa, Oryza sativa (japonica cultivar-group)
MNQLRNGKVPQYLSPAITVVPELSEVTFPSFSEHRPSYIEREQCGSSINSFDASTPMCMLASNFTSDLYINKSESPNGKLSSESYAIDTSGCDSSLPPTQSLYKGNPSSLRMVYPKVSEQNSWSQEPLPGPFVCPTSVDFFDQQDMTIFDQQIQDNIAASPSTNLAKQNEWFSSGTSLQYLESSVSAGSVLKAVDATSTTPSNYLHCHAQRNTSNPPNFNEICSGNIASSNIAPTKPRMRWTPELHERFVDAVNKLGGSEKATPKAVQKVMKVDGLTIYHVKSHLQKYRTVHHRPQLSDGESAKSGQTDEVSSQPLKGMETTCEGLRVQIGLQKQLHEQLEIQRKLQLQVEEHSKYLAMIIEKQSESLRQLGALPRSLDAPTQVLDNRETCEGQTGDADSAEQKPEK

SEQ ID NO: 23299 - protein, 1048 aa, Magnaporthe grisea 70-15
MTTAISSNHEPPYPPSSGDRGQAYPPVSRSQSTRHRPSTAQPPAPHRSVSHNHSGSMSSRPSSSARPVQDVLPNNDYETTNVAQKATKDSRPPQSSRDTATRQHRRSGSQRSGHHGHDGNAEAGPSTPSQASHGSSDPRTRKMRTVIPAQSGKWNLGKTIGAGSMGKVKLARKEDGTEQVACKIIPRVTPDDGHTPRAERERADLSKEVRTAREAAIVTLLSHPHICGLRDVVRTNFHWYMLFEYVNGGQMLDYIISHGKLKEKQARKFSRQIASALDYCHRNSIVHRDLKIENILISKTGDIKIIDFGLSNLFAPKSHLKTFCGSLYFAAPELLQARPYTGPEVDVWSFGIVLYVLVCGKVPFDDQNMPALHAKIKKGVVDYPNWLSSECKHLLGRMLVTDPKQRITMAEILSHPWMVKGYSGPPENYLPNREPLTLPLDQEVINGMTGFSFGPPEVIKAQLTRIIESEDYQRSIRAYQREKETQQTPKDPEKKRGFGFYRRRNSFSSKDTLTTPSSEGLALGNDPLNAFNPLVSVYYLVREKQEKDSASRRPATSARPNAVPEIAPPQEAHTNASAYEMPGENATGGRTRPRARTHGEDDAPTEPIRPPQLSPPAAPPPERLEPPKKESAAAGLLRRFSTRRRKEQPERLDKDRSHPPVVQVHSPAENSSQPTSAIRKSFSIRRGRRDREEQASAESQARMRAGSSQPQHSDLLSPPLSAGANTQTFRKGLGRSASVNSGEFSRRRAMGTARTSKDPPPTSGSDHSTIHEKPPKEQQEKRSPTTAGPSQSMTSRAKSLGHARQESIQARRQRREAEKKREANVPEETDAEVNGADDSSKERVTDFDLDKPVYLKGLFSVSTTSGKPVREIRTDIKRVLKQLGVDYTEIKGGFYCRHSPSIDLQNVADNGAASPAQTPSGAKRRFSFGALRSDGKEESNGERVPVTPRTPGRSGGGSGTDRDRHDSSSEVSENSEAREETSRRRDHPAGETRTHVRSDMGESMVSEFEIFIVKVPMISLHGIQFKRLGGNTWQYKNLADQILKELKL

SEQ ID NO: 23300 - protein, 53 aa, Saccharomyces cerevisiae
QNEGHECQCQCGSCKNNEQCQKSCSCPTGCNSDDKCPCGNKSEETKKSCCSGK

SEQ ID NO: 23301 - protein, 844 aa, Arabidopsis thaliana
MEDSFLQSENVVMDADFMDGLLLDGCWLETTDGSEFLNIAPSTSSVSPFDPTSFMWSPTQDTSALCTSGVVSQMYGQDCVERSSLDEFQWNKRWWIGPGGGGSSVTERLVQAVEHIKDYTTARGSLIQLWVPVNRGGKRVLTTKEQPFSHDPLCQRLANYREISVNYHFSAEQDDSKALAGLPGRVFLGKLPEWTPDVRFFKSEEYPRVHHAQDCDVRGTLAIPVFEQGSKICLGVIEVVMTTEMVKLRPELESICRALQAVDLRSTELPIPPSLKGCDLSYKAALPEIRNLLRCACETHKLPLAQTWVSCQQQNKSGCRHNDENYIHCVSTIDDACYVGDPTVREFHEACSEHHLLKGQGVAGQAFLTNGPCFSSDVSNYKKSEYPLSHHANMYGLHGAVAIRLRCIHTGSADFVLEFFLPKDCDDLEEQRKMLNALSTIMAHVPRSLRTVTDKELEEESEVIEREEIVTPKIENASELHGNSPWNASLEEIQRSNNTSNPQNLGLVFDGGDKPNDGFGLKRGFDYTMDSNVNESSTFSSGGFSMMAEKKRTKADKTITLDVLRQYFAGSLKDAAKNIGVCPTTLKRICRQHGIQRWPSRKIKKVGHSLQKIQRVIDSVQGVSGPLPIGSFYANFPNLVSQSQEPSQQAKTTPPPPPPVQLAKSPVSSYSHSSNSSQCCSSETQLNSGATTDPPSTDVGGALKKTSSEIELQSSSLDETILTLSSLENIPQGTNLLSSQDDDFLRIKVSYGEEKIRLRMRNSRRLRDLLWEIGKRFSIEDMSRYDLKYLDEDNEWVLLTCDEDVEECVDVCRTTPSHTIKLLLQASSHHFPERSSATEYSLWH

SEQ ID NO: 23302 - protein, 965 aa, Thermus caldophilus
MDPLWYKDAVIYQLHVRSFFDANNDGYGDFEGLRRKLPYLEELGVNTLWLMPFFQSPLRDDGYDISDYYQILPVHGTLEDFKRLLDEAHGRGMKVIIELVLNHTSIDHPWFQEARKPNSPMRDWYVWSDTPEKYKGVRVIFKDFETSNWTFDPVAKAYYWHRFYWHQPDLNWDNPEVEKAIHQVMFFWADLGVDGFRLDAIPYLYEREGTSCENLPETIEAVKRLRKALEERYGPGKILLAEANMWPEETLPYFGDGDGVHMAYNFPLMPRIFMALRREDRGPIETMLKETEGIPETAQWALFLRNHDELTLEKVTEEEREFMYEAYAPDPKFRINLGIRRRLMPLLGGDRRRYELLTALLLTLKGTPIVYYGDEIGMGDNPFLGDRNGVRTPMQWSQDRNAGFSRAPYHALFLPPVSEGPYSYHFVNVEAQRENPHSLLSFNRRFLALRNQHAKIFGRGSLTLLPVENRRVLAYLREHEGERVLVVANLSRYTQAFDLPLEAYQGLVPVELFSQQPFPPVEGRYRLTLGPHGFALFALKPVEAVLHLPSPDWAEEPAPEEADLPRVHMPGGPEVLLVDTLVHERGREGLLNALAQTLKEKSWLALKPQKVALLDALRFQKDPPLYLTLLQLENHRTLQVFLPLLWSPQRREGPGLFARTHGQPGHFYELSLDPGFYRLLLARLKEGFEGRSLRAYYRGRHPGPVPEAVDLLRPGLAAGEGVWVQLGLGQDGGLDRTERVLPRLDLPWVLRPEGGLFWERGASRRVLALTGSLPPGRPQDLFAALEVRLLESLPRLRGHAPGTPGLLPGALHETEALVRLLGVRLALLHRALGEVEGVEGGHPLLGRGLGAFLELEGEVYLVALGAEKRGAVEEDLARLAYDVERAVHLALEALEAELWAFAEEVADHLHAAFLQAYRSALPEEALEEAGWTRHMAEVAAEHLHREERPARKRIHERWQAKAGKA

SEQ ID NO: 23303 - protein, 652 aa, Schizosaccharomyces pombe
MTEVSKAAAFDRTQFEELMKKRFFFSPSFQIYGGISGLYDYGPPGSALQSNLVDIWRKHFVIEESMLEVDCSMLTPHEVLKTSGHVDKFADWMCKDPATGEIFRADHLVEEVLEARLKGDKEARGQNSNDQPEESDDKKKRKKKVKEIRATRLDDKTVEEYEFILAQIDNYDGDQLGELMKKYDIRNPATNGELETPRQFNLMFETQIGPSGGLKGYLRPETAQGQFLNFSRLLEFNNGKVPFASAMVGKAFRNEISPRSGLLRVREFLMAEVEHFVDPKNKEHDRFDEVSHMPLRLLPRGVQLEGKTDILEMPIGDAVKKGIVDNTTLGYFMARISLFLEKIGIDMNRVRFRQHMSNEMAHYACDCWDAEIQCSYGWIECVGCADRSAYDLSVHSKATKTPLVVQEALPEPVVVEQFEVEVNRKKFGPRFKRDAKAVEEAMISWPESEKVEKSAQLVAEGKIIVNVNGVEHTVESDLVTIEKRKHTEHIRTYTPNVIEPSFGLGRILYVLMEHAYWTRPEDVNRGVLSFPASIAPIKALIVPLSRNAEFAPFVKKLSAKLRNLGISNKIDDSNANIGRRYARNDELGTPFGLTVDFETLQNETITLRERDSTKQVRGSQDEVIAALVSMVEGKSSFEDALAKFGEFKSTQE

SEQ ID NO: 23304 - protein, 557 aa, Parachlamydia sp. UWE25
MAKLLQFNEEALKSILKGVKTLAKAVKVTLGPKGRNVVINKGFGSPLSTKDGVTVAKEVVLKDKFENMGAQLVNQVAAKTSDVAGDGTTTAIVLAEAIYSAGVKNVAAGANPMSLKRGIDQAVETITRSLDHLSTPVNTAQEVRQIATISANNDGEIGRIIGEAMERVGKDGIITVAEAKGIETHVDYVEGMQFDKGYVSPYFITNAEQMSVELSNADILITDKKLSAAKDIIPVLEKIMEKGARPLLIIAEDIDGEALATLVVNKLKAGMTVCAVKAPGFGDRRKAMLQDIAILTGGKVVSEEVGLKLDEVGPEVLGRAKTIKVSKEETTIIDGAGQSNEVKSRLAQIKAELANASTSKYDKEKLEERLAKMVGGVAVVNVGAATETELKEKKARVEDALHATRAAVAQGIVPGGGVALLRAVKSLEKLQLTGDEAIGVTIIKQAAFAPAIAIANNCGKQGNLIAEKIYEATGSYGYDGLTDEFKDLLKAGVIDPVLVTKSALINAASIAGLLLTTAAMITDKPQPKSQPAGMPGMDGMGGMGMGGMGGMGGMGMM

SEQ ID NO: 23305 - protein, 554 aa, Xylella fastidiosa Ann-1
MTPLIFVTGGVVSSLGKGIAAASLASILEARGLKVTMVKLDPYINVDPGTMSPFQHGEVYVTDDGAETDLDLGHYERFVRTRLSRKNSVTTGRIYQNVICKERRGDYLGATVQVIPHITDEIRRCIDEATASFDVALVEIGGTVGDIESLPFLEAIRQVRIERGAERTMFMHLTLVPYIAAAGELKTKPTQHSVKELRSIGIQPDVLLCRSEQVIPDSERRKIALFTNVSERAVIGCPDIDVLYGMPLELRRQGLDEIVIDQFKLSGTASLADLSEWEDVVDAIKRPLDEVTIAVVGKYVDYQDAYKSVGEALKHGGLRQRTKVNLKWVEAQDLEGSDMAALKDIDGILVPGGFGDRGFEGKVLASRYAREQRVPYFGICYGMQAAVVDYARHVAGLEGANSTENDRQSSHPVIALITEWRTTTGEVERRDEKSDLGGTMRLGLQEQRLKAGTLARELYGRDVVGERHRHRYEFNNRYRTQLEDAGLVIAAKSMDDTLVEMIELPREMHPWFLACQAHPEFLSTPRDGHPLFIGFVKATRAHKAGGKLLREVCV

SEQ ID NO: 23306 - protein, 115 aa, Parachlamydia sp. UWE25
MLFFRVNKTDENNRRIDMTTKTKIKPLGDRVVVQRAKAATSKGGILLPDSAQEKPREGHVIAAGPGKMSESGQLEPISVKVGDRILFGAYAGTEVKDNDEDYLILSENDILGILS

SEQ ID NO: 23307 - protein, 571 aa, Arabidopsis thaliana
  misc_feature (401)..(401): Xaa can be any naturally occurring amino acid
  unsure (1)..(571): unsure at all Xaa locations
MEEKDVYTQDGTVDIHKNPANKEKTGNWKACRFILGNECCERLAYYGMGTNLVNYLESRLNQGNATAANNVTNWSGTCYITPLIGAFIADAYLGRYWTIATFVFIYVSGMTLLTLSASVPGLKPGNCNADTCHPNSSQTAVFFVALYMIALGTGGIKPCVSSFGADQFDENDENEKIKKSSFFNWFYFSINVGALIAATVLVWIQMNVGWGWGFGVPTVAMVIAVCFFFFGSRFYRLQRPGGSPLTRIFQVIVAAFRKISVKVPEDKSLLFETADDESNIKGSRKLVHTDNLKFFDKAAVESQSDSIKDGEVNPWRLCSVTQVEELKSIITLLPVWATGIVFATVYSQMSTMFVLQGNTMDQHMGKNFEIPSASLSLFDTVSVLFWTPVYDQFIIPLARKXFTRNERGFTQLQRMGIGLVVSIFAMITAGVLEVVRLDYVKTHNAYDQKQIHMSIFWQIPQYLLIGCAEVFTFIGQLEFFYDQAPDAMRSLCSALSLTTVALGNYLSTVLVTVVMKITKKNGKPGWIPDNLNRGHLDYFFYLLATLSFLNFLVYLWISKRYKYKKAVGRAH

SEQ ID NO: 23308 - protein, 170 aa, Azospirillum brasilense
VRKMNVLSVVMQSFAICCLVSILWFFAGYSIAFTEGTPYFGSLSKFMLAGITKDSLTGVIPETIFVVFQMTFAIITPALITGAFADRMKFSSMLVFTGLWSLIVYAPITHWVWGPGGYLAGDGVLDYAGGTVVHINAGVAGLVAAIVLGKRKGHPNENFAPHNLVLSLIG

SEQ ID NO: 23309 - protein, 403 aa, Mannheimia succiniciproducens MBEL55E
MSNKVNSYGWKALMGSAVGYAMDGFDLLILGFMLSAISADLSLSPTQAGSLVTWTLIGAVAGGIIFGALSDKYGRVRVLTWTIVLFAVFTGLCAFAQGYWDLLIYRTIAGIGLGGEFGIGMALAAEAWPARHRAKASSYVALGWQVGVLAAALLTPLLLPIIGWRGMFLVGIFPAFVAWYLRAKLHEPEVFVQKQAEVATGKRQSPFKLLIKDVATAKVSLGVVVLTSVQNFGYYGIMIWLPNFLSKQLGFSLTKSGVWTAVTVCGMMAGIWIFGRLADRIGRKPSFLLFQIGAVISIIAYSQLTDPAIMLFAGAALGMFVNGMMGGYGALMSEAYPTEARATAQNVLFNLGRAVGGFGPVIVGAVVSAYSFKIAIALLAVIYVIDMIATVFLIPELKGKALK

SEQ ID NO: 23310 - protein, 409 aa, Thermoanaerobacter tengcongensis MB4
MNRVVVTGLGVISPLGNTVEKFWNSLINGENGIGLVTKFDTSEFPTKVAAEVKDFDPTLYIDKKEARRMDRFIQFAVASTKLALEDAGIELDKVDLNRFGVIYGTGIGGIETFENQMKVMYEKGPSKVSPFFIPMMIANMAAGQIAITFGLKGINETIVNACASSTNAIGEAFKAIQRGDADLIVTGGTEAAITPMSFAGFCAMKAMSTNPDPSTASRPFDLNRDGFVMGEGSATLILESLEHAQKRGAKIYAEIIGYGATDDAYHITAPAPEGEGAARAMEAALKDGKVSYDMVDYINAHGTSTEYNDKFETMAIKKVFKDHAYKLCVSSNKSMLGHLLGAAGAVEAVATVLTITHGIVPPTINYQTPDPECDLNYVPNKAIEREVNYAISNSFGFGGHNATLLFKKF

SEQ ID NO: 23311 - protein, 441 aa, Arabidopsis thaliana
MALKALDYDTLNENVKKCQYAVRGELYLRASELQKEGKKIIFTNVGNPHALGQKPLTFPRQVVALCQAPFLLDDPNVGMLFPADAIARAKHYLSLTSGGLGAYSDSRGLPGVRKEVAEFIQRRDGYPSDPELIFLTDGASKGVMQILNCVIRGNGDGILVPVPQYPLYSATISLLGGTLVPYYLDESENWGLDVANLRQSVAQARSQGITVRAMVIINPGNPTGQCLSEANIREILKFCYNEKLVLLGDEVYQQNIYQDERPFISSKKVLMEMGSPFSKEVQLVSFHTVSKGYWGECGQRGGYFEMTNLPPRVVEEIYKVASIALSPNVSAQIFMGLMVNPPKPGDISYDQFARESKGILESLRRRARLMTDGFNSCKNVVCNFTEGAMYSFPQIRLPTGALQAAKQAGKVPDVFYCLKLLEATGISTVPGSGFGQKEGRR

SEQ ID NO: 23312 - protein, 350 aa, Arabidopsis thaliana
  misc_feature (288)..(288): Xaa can be any naturally occurring amino acid
  unsure (1)..(350): unsure at all Xaa locations
MAKSVLVTGGAGYIGSHTVLQLLEGGYSAVVVDNYDNSSAASLQRVKKLAGENRNRLSFHQVDLRDRPALEKIFSETKFDAVIHFAGLKAVGESVEKPLLYYNNNIVGTITLLEVMAQYGCKNLVFSSSATVYGWPKEVPCTEESPISATNPYGRTKLFIEEICRDVHRSDSEWKIILLRYFNPVGAHPSGYIGEDPLGVPNNLMPYVQQVAVGRRPHLTVFGTDYKTKDGTGVRDYIHVMDLADGHIAALRKLDDLKISCEVYNLGTGNGTSVLEMVAAFEKASGKXIPLVMAGRRPGDAEVVYASTEKAERELNWKAKNGIEEMCRDLWNWASNNPYGYNSSSNGSSS

SEQ ID NO: 23313 - protein, 134 aa, Triticum aestivum
  misc_feature (21)..(21): Xaa can be any naturally occurring amino acid
  misc_feature (61)..(61): Xaa can be any naturally occurring amino acid
  misc_feature (100)..(100): Xaa can be any naturally occurring amino acid
  unsure (1)..(134): unsure at all Xaa locations
RKLEVSLKEMLIDFLPTDGGXSLAEAPALVKAPGGAPANVPIGAPRLGGMAVLRLKLGDDXFGQMLDKMLRHNGVNTVGDNFDSGARTALDFVTLTALGXRKLMFYRNRKAIMLLTANELMVDIINKAEVFHYR

SEQ ID NO: 23314 - protein, 455 aa, Bacillus sphaericus
MKQVLTELQEKDLQHVWHPCSQMKDYEAFPPIVIKKGEGVWLYDEQNQRYLDAVSSWWVNLFGHANPRISQALSEQAFTLEHTIFANFSHEPAIKLAQKLVALTPQSLQKVFFADNGSSAIEVALKMSFQYHMQTGKTQKKRFLALTDAYHGETLGALSVGGVDLYNEVYQPLLLDTVRAQGPDCFRCPFKHHPDSCHAQCISFVEDQLRMHHKEITAVIIEPLIQAAAGMKMYPAIYLRRLRELCTQYDVHLIADEIAVGFGRTGTLFACEQANISPDFMCLSKGLTGGYLPLSVVMTTNDVYQAFYDDYATMKAFLHSHSYTGNTLACRVALEVLAIFEEEQYIDVVQDKGERMRKLALEAFSDLPFVGEYRQVGFVGAIELVANRDTKEPLPSEERIGYQIYKRALAKGLLIRPLGNVLYFMPPYIITDDEMQFMIQTTKDTIVQFFEEREG

SEQ ID NO: 23315 - protein, 125 aa, Brassica napus
MSSCLLPNFKCQPDSFSIHFRTSYPVSKHSKGSVFFQPQCAVSTSPPLLTSTLDVSKLTLPSFDTNSDSRTSDRQWNYTQTIGPSTEAKYLEALASETLLTSDEAVVAAAAAEALALGRAALKVA

SEQ ID NO: 23316 - protein, 522 aa, Zea mays
MAGAATPPPSSSSSASCGTDAAYLLFRGETLLPDGVHASLYAVALAYCFVGLSAVTARFFKSMEQIMRHSREVVVGVDPRTGAPVVRRDKVWNYTVADIALLAFGTSFPQISLATIDAIRNLGQLTAGGLGPGTLVGSAAFDLFPIHAVCVLMPRAGSKKKISDLGVWLVELFWSFWAYIWLYVILEVWTPRVITLWEASLTVLQYGLLLLHAARGERPEDWVPPEDVSAVYYAKCDGIDETLPMGADGNDGIVDIFSAHSYYDAAEYSQLAEEDMEGSSTMDQVVKNTQDNMSWLSIWWQQFVDASMLESPESMKMDSVCLRYTRIFWNLIIAPWKFLFAFVPPYHIAHGWIAFICSLIFISGIAYGVTKLTDQISCVTGVSPYVIAFTALAAGTSWPDLVASKIAAERQVTADSAIANITCSNSVNIYVGIGVPWLIDTVYNFFVYREPLYIDNAAGLSFSLLVFFATSFGCITVLVLRRIILGAELGGPRLWAWVTSVYFMILWVVFVVFSSLRVSGVI

SEQ ID NO: 23317 - protein, 358 aa, Brassica napus
MSAFTSKFADELIANAAYIGTPGKGILAADESTGTIGKRLASINVENVETNRRALRELLFTAPGALPCLSGVILFEETLYQKSSDGKLFVDILKEGGVLPGIKVDKGTVELAGTNGETTTQGLDGLGDRCKKYYEAGARFAKWRAVLKIGENEPSELSIHENAYGLARYAVICQENGLVPIVEPEILVDGSHDIHKCAAVTERVLAACYKALSDHHVLLEGTLLKPNMVTPGSDSAKVAPEVIAEHTVRALQRTVPAAVPAIVFLSGGQSEEEATKNLNAMNQLKTKKPWSLSFSFGRALQQSTLKTWAGKEENVKAAQEALYVRCKANSEATLGTYKGDAKLGDGAAESLHVKDYKY

SEQ ID NO: 23318 - protein, 468 aa, Saccharomyces cerevisiae
MGQILSNPIIDKEHHSGTDCLTAFGLCAMQGWRMSMEDAHIVEPNLLAESDEEHLAFYGIFDGHGGSSVAEFCGSKMISILKKQESFKSGMLEQCLIDTFLATDVELLKDEKLKDDHSGCTATVILVSQLKKLLICANSGDSRTVLSTGGNSKAMSFDHKPTLLSEKSRIVAADGFVEMDRVNGNLALSRAIGDFEFKSNTKLGPHEQVVTCVPDIICHNLNYDEDEFVILACDGIWDCLTSQECVDLVHYGISQGNMTLSDISSRIVDVCCSPTTEGSGIGCDNMSISIVALLKENESESQWFERMRSKNYNIQTSFVQRRKSIFDFHDFSDDDNEVFAITTKKLQDRLNRSKDNDDMEIDDLDTELGSSATPSKLSGEDRTGPIDLFSLEALLEAGIQIRQRPSSDSDGNTSYFHGASLSDMLASLSNAAAGETEPNDADDNDDNDGEENGKNENAKKGSKIEEIE

SEQ ID NO: 23319 - protein, 140 aa, Mesorhizobium loti MAFF303099
MALERTFSMIKPDATRRNLTGAITKMLEDAGLRVIASRRVWMSRREAEGFYAVHKDRPFFGELVEFMSSAPTIVQVLEGENAIARNREVMGATNPANAAEGTIRKVHALSIGENSVHGSDAPETAAQEIKYWFSDTEIVG

SEQ ID NO: 23320 - protein, 565 aa, Escherichia coli CFT073
MKSPAPSRPQKMALIPACIFLCFAALSVQAEETSVTPQPPDILLGPLFNDVQNAKLFPDQKTFADAVPNSDPLMILADYRMQQNQSGFDLRHFVNVNFTLPKEGEKYVPPEGQSLREHIDGLWPVLTRSTENTEKWDSLLPLPKPYVVPGGRFREVYYWDSYFTMLGLAESGHWDKVADMVANFAHEIDTYGHIPNGNRSYYLSRSQPPFFALMVELLAQHEGDAALKQYLPQMQKEYAYWMDGVENLQAGQQEKRVVKLQDGTLLNRYWDDRDTPRPESWVEDIATAKSNPNRPATEIYRDLRSAAASGWDFSSRWMDNPQQLNTLRTTSIVPVDLNSLMFKMEKILARASKAAGDNAMANQYETLANARQKGIEKYLWNDQQGWYADYDLKSHKVRNQLTAAALFPLYVNAAAKDRASKMATATKTHLLQPGGLNTTSVKSGQQWDAPNGWAPLQWVATEGLQNYGQKEVAMDISWHFLTNVQHTYDREKKLVEKYDVSATGTGGGGGEYPLQDGFGWTNGVTLKMLDLICPKEQPCDNVPATRPLSESTTQPVKQKEAEPTP

SEQ ID NO: 23321 - protein, 365 aa, Bacillus cereus G9241
MTENHYLLLTPGPLTTTKSVKEVMLYDWCTWDVEYNTMVQEVRAKLVSLATKEEERYTTVLMQGSGTFSVEAVIGSVIPANGKLLVCTNGAYGKRIVQMAEMLHIDVVVSQTEEWEPTNIVEVEKILQQDKDITHIAVVHCETTTGIINPIVDVCKLGKQYGKVTLVDAMSSFGGIEIDIAELQIDFLISSANKCIQGVPGFGFVIAKREELLKCKGQARSLSLDLYDQWETMENQNGKWRFTSPTHVVHAFYQALLELEKEGGVSARYNRYYNNQKLLVNRMGEIGFKPLVDEKYQSPIITSFIYPEGNFEFQQLYNELKRYGFVIYPGKISKVDTFRIGNIGDVHEADINRLVDSIAKGVVIG

SEQ ID NO: 23322 - protein, 542 aa, Rhodospirillum rubrum
MSGQEWWKRAVIYQIYPRSFQDADGDGIGDLAGIAQRLDYLSWLGVDAIWISPFYTSPMKDFGYDIQDYRDVDPIFGTLADFDALAARARALGLKLILDFVPNHTSDRHPWFLESRQSPASAKRDWYIWRDPAADGGPPTNWLAEFGGSAWEYDEASGQYYYHAFLKEQPDLNWRNPEVRAAMYDAMRFWLERGVDGFRVDVMWHLIKDDQFRDNPPNPARPPNAGPANALIPLYTADRPEVHDIVREMRAVVDAYPERVLIGEIWLPTDRLVTYYGHDLRGAHLPFNFQLIGAAWDAGVIKEIVGDYEKALPRGGWPNWVMGNHDKGRIASRLGPRQARLAMLLLLTLRGTPTLYYGDEIAMRDVPIPPDRVCDPYEKNVPGLGLGRDPQRTPMQWEDAPQAGFTRASRSWLPIAADASTVNVAAQRAAPASMLTLVHRLIALRKAEAALTIGDYGALDAPERVVMFLRRVPGRRLLIALNLGESAQSLSLPGDSRQATTLLSTDPERPLGDLAPAFTLGGGEGIVVLLADRETAPPSPAA

SEQ ID NO: 23323 - protein, 499 aa, Yarrowia lipolytica CLIB122
MLRTTRILPSKFGVAARTRAVTQFQRCYSSANEELDVLVIGGGPGGYVAAIKAAQAGLKTGCIEKRGSLGGTCLNVGCIPSKSLLNNSQMYHAIKTDSANRGIEVSDVKMNIAKLQEAKETSVKGLTGGIEMLFKKNKVNYYKGAGSFVSDSEVKVDPIDGGEAVTLKAKNIIIATGSEPTPFPGITIDEKKIVSSTGALALEAVPKKMVIIGGGIIGLEMGSVWSRLGSEVTVVEFQNAIGAGMDDEIAKAAQKMLTKQGIKFKLGTKVLSGAIEGDGVKVEVENVKKGDKETLDADVLLVAIGRRPYSEGLNLEAAGVEKDDKGRIIIDQEYRTNKSNIRCIGDVTFGPMLAHKAEEEGVATAEYIATGHGHVNYAAIPSVMYTHPEVAWVGQTEQQVKEAGIKYNVGKFPFAANSRAKTNLDTEGTVKFIADKETDRILGIHIIGPNAGEMIAEGVLALEYGASCEDIARTCHAHPTLSEAFKEAAMATYDKAIHF

SEQ ID NO: 23324 - protein, 208 aa, Pyrococcus furiosus DSM 3638
MEEVTFRIAPEEKVKKKPSFLKPWFGLKYLFKKPVTIKIPYEFIEPAPRYRGFHTLDWKKCIGCNMCGQICPARAIEMTWIEGEKRPHPKIDYGRCTFCQFCVDVCPTGALGFIETYMLTTTWREEELLLYDWVPIEPEKFKEIQEKFKDYKFPVEKIEFNKETKEVTYYLRDGTTFKFKILGYGLKPPVKPQPTTKQQEEEKKESGQ

SEQ ID NO: 23325 - protein, 576 aa, Halobacterium sp. NRC-1
MSETVSELARRRGFFFQASEAYGGAAGFYTYGPEGAALKRNIEDAWRDRFVTREGNMEIDSPTVTPEPVFQASGHLDDFDDMLVECPDCGESHRADHVIEDNTDVEDAESMPTDEVEALIADHELVCPACGGPLAGQSVTGFNLMFDTTIGPGDGDPGYLRPETAQGMFTEFPRLKEYARNQLPFGVAQVGTGYRNEISPRNALLRTREFTMAELEFFVDPAGDGPALDRVADVELPLYPVDAQQAAGEEYLRLTPQEALAEGVVGGEWVAYFLARSKQWFERVGVDMDRFRFRQHLPGELAHYASDCWDAEGEVDGDWVELEGVASRTDYDLSKHDEHADDSFTVFQAYDEPKTVERASVDPEMSYLGPEFGGAAGDVADALAALAARDRAAFDGDEVTVDVDGEAYTVPTERTGFEVAEETESGRHIIPHVVEPAFGIGRAVYTALAHSYEADEVDGEPRDVLRLPAEVAPTTVGVFPLMDKDGLGERAREIAAELRAAGLAVTYDDSGNIGRRYRRQDEVGTPYCVTVDYEALEEGAVTLRDRDTTTQVRVPIAEVAETLVGLRDGELRFEAL

SEQ ID NO: 23326 - protein, 186 aa, Bordetella parapertussis 12822
MSSSQPAGPATEAAVLGGGCFWCVEAVFKDLRGVTGIEPGYAGGHVEHPTYEQVCGKDTGHIEVARVEFDPAVLSYGDLLRVFFATHDPTTPGRQGNDVGPQYESAIFWQDERQREQAQAVMDELRAQQVFDAPIVTRLLAPAKFWPAEDYHRDYYALHPEQGYCQFVIAPKVAKFRKQFQDRLAR

SEQ ID NO: 23327 - protein, 434 aa, Frankia sp. EAN1pec
MGDEHPSWAARRRAGPSDDQPIRRSAGPATPVPGGDAPNDKPTHGPLHRPHHCGATTRPRRGLRPMSKPLSDLSAAGVAVWLDDISRERIRTGNLAELARTRSVVGVTSNPTIFQKAIGGGETYNEQLRDLAVRGVDVGEAVRAITAADIRDACDILRPAYDASAGVDGRVSLEVDPRLAHETERTVAEARALWWSVDRPNLFIKIPATKSGLPAITATLAQGISVNVTLIFALDRYEAVMDAFMTGLEQALAAGRDISDVASVASFFVSRVDSEVDGRLAKIGTPKAEALRSKAAIANARLAYELYEKIFSTPRWERLAAAGAKPQRPLWASTSTKDPGLPDTLYVTELIAPGTVNTMPEATLEAFADHGVVPGDTITPNYEDARAVLAELTELGVDMADVVEVLEVEGVRKFEDSWNQLLDTIREQLGSAAS

SEQ ID NO: 23328 - protein, 309 aa, Rhodospirillum rubrum
MSGRIAVVGSNMVDLITYVTRMPDKGETIEAPNFALGCGGKGANQAIAAARLGADVLMVTRVGDDIFADNTIANFKANGIDTRFVRKVPGTPSGVAPIFVEQNGENSILIVKGANAHLSPADVEEAGEALKGCALILMQLEVPLETIYATVAFGAAHGIPTLLNPAPAVPELDVERLRTLSFLTPNETELAILSGMPVASETEVEAAARSLIAKGVRTVIVTMGARGALLVEEKGATRIAPVRVTPKDTTGAGDAFIGSFAHYYTQNGDIAAALRKAVRYAADSITRNGTQSSYATLAEFEAFCATIDA

SEQ ID NO: 23329 - protein, 339 aa, Populus balsamifera subsp. trichocarpa x Populus deltoides
MPTKEQVGALSKELRDRALVHDYVFKAIDALPVTAHPMTQFATGVMALQVQSEFQKAYEKGIHKSKYWEPTYEDSLSLIARVPIVASYIYRRIYKDGKVIPMNDSLVIGGNFSHMLGFDSPEMQELMRLYVTNHSDHEGGNVSAHTGHLVASALSDPYLSFAAALNGLAGPLHGLANQEVLLWIKSVVEECGENITTEQLKDYVWKTLNSGKVVPGFGHGVLRKTVPRYTCQREFALKHLPDDPLFQLVSKLYEVVPPVLTQLGKVKNPWPNVDAHSGVLLNYYGLTEARYYTVLFGVSRSIGICSQLIWDRALGLPLERPKSVTMELLENHCKKAPAN

SEQ ID NO: 23330 - protein, 583 aa, Corynebacterium efficiens YS-314
MDQMNRDALCSSSAGSRRSRWVLSSVFMAVIVGRAGAGGWITLAELSRMITNVFTVENQEWAHIMQLPEINRRAFIKGAGATVAMVAASRFLVACAGDSTPRGYGGEPRPLPIPPLAEGEREGNRVIYRLTAQEGQSNILPDVTTRTWGFNGNHLGPTLTARKGEEVTVEITNGLGEMTTIHWHGMKLPGIADGGPHSPIEPGETWSPSWTVSNTAATLWYHPHPHGLTGLHAYRGLAGAFVIEDEVSDSLDIPKDYGVDDIPVVLMDHRFHEDGSLDEEDLPDLGLLGDTPTVNGITGAHFDATTRRVRFRLLDGSNMRFFNLAFSDDRPFQVIAGDSGFLAEPIERTSLIIGPGERWEILVDLEPGEEVTLRSVAFPGNFGVPEDEYTPDFGFADSFDLLTITGPGEDAPSTPAIPGVLDPAARQDPDVIDAPERSFVLNTFSINDQMMDMQRVDVVIDHDGPEIWEITNDNSDWPHNFHIHNSRFKVLSMTGTDIEVPVDGWKDTVGLPPGATARLAVEFGYHPDPAWPYMYHCHMLYHEDQGMMGQFVIVEPGGQPANQLGDSASGSGGGAHAHAHHVV

SEQ ID NO: 23331 - protein, 370 aa, Saccharomyces cerevisiae
MAEASIEKTQILQKYLELDQRGRIIAEYVWIDGTGNLRSKGRTLKKRITSIDQLPEWNFDGSSTNQAPGHDSDIYLKPVAYYPDPFRRGDNIVVLAACYNNDGTPNKFNHRHEAAKLFAAHKDEEIWFGLEQEYTLFDMYDDVYGWPKGGYPAPQGPYYCGVGAGKVYARDMIEAHYRACLYAGLEISGINAEVMPSQWEFQVGPCTGIDMGDQLWMARYFLHRVAEEFGIKISFHPKPLKGDWNGAGCHTNVSTKEMRQPGGMKYIEQAIEKLSKRHAEHIKLYGSDNDMRLTGRHETASMTAFSSGVANRGSSIRIPRSVAKEGYGYFEDRRPASNIDPYLVTGIMCETVCGAIDNADMTKEFERESS

SEQ ID NO: 23332 - protein, 452 aa, Silicibacter pomeroyi DSS-3
MSFDYDLFVIGGGSGGVRAARVAAGETGAKVALAEEDRYGGTCVIRGCVPKKLMVFASEYSGMVEDAQAYGWNIQPGAFDWDVFRSKLYTELDRLEGVYRNILKNNGVETFDMRARLVDAHTVELSDGTRKSAKHILIATGGRPVKPEIKGAELAITSNEIFHLDKLPERMLIVGGGYIACEFVGIMNGMGVEVTQYYRGAQILRGFDDEARGLVSEEMCQNGIKLHLGTNVLEMEREGDRIRVKATNGDEELFDQVMFATGRVPNADHLGLEGLGVELGRKGQIVVDDYSQTAVPSIYAIGDVTDRVNLTPVAIREGMAFVDTVFRGKPTPVDHALIPTAIFTQPEMGTVGLSEEEAAAQEPVEIYATSFKPMQTAFAGRSQRVLMKLIVSKATRKVLGCHIVAPGAGEMIQLVGIAVKMGATKEDFDRTVAVHPVMAEELVTLRQPVRSA

SEQ ID NO: 23333 - protein, 154 aa, Xanthomonas axonopodis pv. citri str. 306
MSQFDLTPPSPAQRDALIAGLSDEEQRVLLHHGTEAPFCGVFLDNKLDGVYTCRLCGLPLFRSSAKFESGTGWPSFFAPYDPAHVREIRDTSYGMIRTEIVCARCDSHLGHVFPDGPPPTGERHCLNSVSLGFTENGQALPNPLHRRGAEAQAA

SEQ ID NO: 23334 - protein, 489 aa, Beta vulgaris subsp. vulgaris
ITVPSTSSKNLQNSLAFSSSSLSGDKIQTTSFLNRRYCRISSRAPIVVSPKAVSDSKNSQTCLDPEASRSVLGIILGGGAGTRLYPLTKKRAKPAVPLGANYRLIDIPVSNCLNSNISKIYVLTQFNSASLNRHLSRAYASNMGGYKNEGFVEVLAAQQSPENPNWFQGTADAVRQYLWLFEEHNVLEYLILAGDHLYRMDYERFVQAHRETDADITVAALPMDEKRATAFGLMKIDEEGRIIEFAEKPKGEQLKAMKVDTTILGLDDERAKEMPFIASMGIYVISKDVMLNLLREQFPGANDFGSEVIPGATSIGLRVQAYLYDGYWEDIGTIEAFYNANLGITKKPVPDFSFYDRSSPIYTQPRYLPPSKMLDADITDSVIGEGCVIKNCKIHHSVIGLRSCISEGAIIEDTLLMGADYYETDADRKFLAAKGSVPIGIGNARIGDDVKIINSDNVQEAARETDGYFIKSGIVTIIKDAMIPSGTVI

SEQ ID NO: 23335 - protein, 434 aa, Zea mays
MATHASDNGSGHAEWRFARAAKEGALAVAGDKMSIRAARFKISASVDGRDPRPVLPLAHGDPSVFPAFRTAAEAEDAVAAALRTGKFNCYPAGVGLPEARRALAEHLSSDLPYKLSTDDIFLTAGGTQAIEVVVSVLAQPGANILLPRPGYPNYEARAGLHNLQVRHFDLIPERGWEIDIDSLESIADKNTTAMVIINPNNPCGSVYTREHLAKVAEVARKLGILVIADEVYGNLVFGDTPYVPMGVFGHIAPVLSIGSLSKRCILPGWRLGWVAVCDPNKILQETKIIASITNFLNVSTDPATFVQGALPHILENTKEDFFRRIIGLLAETSEICYREIKDIKCITCPHKPEGSMFVMVKLNLYLLEGIHDDIDFCCKLAKEESVILCPGSVLGMENWIRITFAIDSSSLLDGLERIKSFCQRHKKKNLLNGH

SEQ ID NO: 23336 - protein, 522 aa, Beta vulgaris subsp. vulgaris
MDASAAAINVNAHLTEVGKKRFLGERISQSLKGKDLRALFSRTESKGRNVNKPGVAFSVLTSDFNQSVKESLKYEPALFESPKADPKNVAAIVLGGGAGTRLFPLTSRRAKPAVPIGGCYRLIDVPMSNCINSGIRKIFILTQFNSFSLNRHLARTYNFGDGVNFGDGFVEVFAATQTPGESGKKWFQGTADAVRQFFWAFEDSKSKDVEHIVILSGDHLYRMDYMSFWQKHIDTNADITVSCIPMDDSRASDYGLMKIDHTGRIVHFAEKPKGSDLTAMQVDTTVLGLSDLEAMSNPYIASMGVYVFRTDVLMELLNRKYPSSNDFGSEIIPSAVGESNVQAYLFNDYWEDIGTIKSFFDSNLALTQQPPKFEFYDPKTPFYTSARFLPPTKVDRCKIVDSIVSHGCFLQESSIQHSIVGVRSRLESGVEFQDTMMMGADYYQTESEIASLLAEGKVPVGVGQNTKIKNCIIDKNAKIGKDVVIANTDGVEEADRPNEGFYIRSGITIILKNATIQDGLVI

SEQ ID NO: 23337 - protein, 644 aa, Propionibacterium acnes KPA171202
MAASTHQPGRAELDPAGELLGKPVPGENFIESHLAHMFRATVANHGFRPATRVRQGGQWIIRTYAETGRRVAGLARAFVTPGLLTEDGLQRGDRISLFAGNCPEWIEADLAGMTIGVIPVPIYPTSTPDQIVHIVTDAGVRVIITAGPKELDRILEARDQMPGLETVILINPADQVGDHDGLTVLSLEQVRQAGVSEEIQTVVEERMGQSCPDDVAALIYTSGTTGEPKGVMISHRAALAELQALDAFFDVTPADHSLSFLPLSHALEWGWSMAVIRHGCLNTFVPNPKTISAMLAEVRPTLFVSVPKLYEQVMSVAREKVSDSPAKLKIFEWSIRIGREWWQAEQEGRRPSVSLRARHGVADRLVLKAIRDAIGGPKTVLAAGGAPLRKEVEEFFAACGLLVCQGYGLTEASPLVSFNSPGGYKFGTAGRPLVGSQMTTTEDGEILYRGPNVMKGYWKAPEATAAAIEDGWLHTGDIGHIDEDGFLVITDRLKDIIVTLNGKNISPQPIENSLMKDPLFEHAVLLGDNRPCLTLLVKPSLPQVEELAERLHITSMTGPEMLRSEELAEEIRRRVAEITEKLPHQEQIRDLRVLWDEFTTDNGLLTPTLKVRRREVEKRFTEIVEEMYARLAARRRAGKRDSKH

SEQ ID NO: 23338 - protein, 485 aa, Silicibacter pomeroyi DSS-3
MTTNARLMALAGLSVLFLLLQTLIAQARPESLAPLADKVSPAVVNITTSTLVEGSTGPQGIVPEGSPFEDFFREFQDRNGGGDRPRRSSALGSGFVISEDGYIVTNNHVIAKADEILIEFFPGDGQPARELPAKVVGTDENTDIALLKVEADGPLKYVKFGNSDTARVGDWVMAMGNPLGQGFSVSAGIVSARNRALSGSYDDYIQTDAAINRGNSGGPLFNMDGEVIGVNTAILSPNGGSIGIGFSMASNVVTKVVGQLREYGETRRGWLGVRIQDVTEDMAEAMGLEKTGGALISDVPEGPAKEAGLKAGDVIVSFDGAEVRDTRDLVRRVGESEVGKSVRVLVFRDGGTQTILVTLGRREDAERAGSGSEEEGEGGQTTPEASKKEFLGLTVSVLTAEMRAELGLAEDATGLAIVAVDEASEAFEKGLRTGDVITEAGQQKVATLADLETRIDEAREAGRKSLLLLVRRGGEPRFVALSLGQ

SEQ ID NO: 23339 - protein, 427 aa, Shigella flexneri 2a str. 301
MADTKAKLNLNGDTAVELDVLKGTLGQDVIDIRTLGSKGVFTFDPGFTSTASCESKITFIDGDEGILLHRGFPIDQLATDSNYLEVCYILLNGEKPTQEQYDEFKTTVTRHTMIHEQITRLFHAFRRDSHPMAVMCGITGALAAFYHDSLDVNNPRHREIAAFRLLSKMPTMAAMCYKYSIGQPFVYPRNDLSYAGNFLNMMFSTPCEPYEVNPILERAMDRILILHADHEQNASTSTVRTAGSSGANPFACIAAGIASLWGPAHGGANEAALKMLEEISSVKHIPEFVRRAKDKNDSFRLMGFGHRVYKNYDPRATVMRETCHEVLKELGTKDDLLEVAMELENIALNDPYFIEKKLYPNVDFYSGIILKAMGIPSSMFTVIFAMARTVGWIAHWSEMHSYGMKIARPRQLYTGYEKRDFKSDIKR

SEQ ID NO: 23340 - protein, 404 aa, Photorhabdus luminescens subsp. laumondii TTO1
MKRVVITGLGIVSSIGNNQKEVLASLKEGRSGITFSEKFKEIGMRSHVWGNVKLDTSGLIDRKIQRFMSDASVYAYLAMEEAIKDSGLADDQVSNIRSGLVVGSGGGSPHNQVAGADGMRTRGLRGVGPYMVTRSMASGVSACLATPFKIKGVNYSISSACSTSAHCIGHAAELIQLGKQDIVFAGGGEELCWEMSCEFDAMGALSTKYNEMPEKASRTYDKSRDGFVIAGGGGIVVVEELEHALARGAHIYAEIVGYGATSDGADMVVPSGEGAVRCMNMALQDVKGSIDYVNTHGTSTPAGDVKELEAIREVFGDTTPAISATKAMTGHSLGAAGVHEAIYSLLMLEHGFIAPSINIEALDDKAVGMNIITKPTEQKLNTVMSNSFGFGGTNASLVMSKYSA

SEQ ID NO: 23341 - protein, 377 aa, Ralstonia solanacearum
MPRQKAATSANPADETIGAVDGPNAPNGRSGRRARGAAPAASDDVEVVDPLIDEAPAAEPADIADTSDANDSADESDEEDEDGEEAAPEEDFRTVLQAELAADTVQHYLNRISIKPLLTPAEELHFSTLAKAGEFAARQVMIERNLRLVVSIAKGYLNRGVPLLDLIEEGNLGLMHAIEKFDPERGFRFSTYATWWIRQSIERAIMNQARTVRLPVHVIRELNQVLRAKRHLEKSGIDGRDASIEDIAHLLGKTTEEVQDVLSLNEHTTSLDTPFDLDPGTSLLDFLSDEHGASPDQEVAHRELSQLMKSWLARLSDKHRYVVERRFGLNHIEPATLEELAAEMGLTRERVRQIQQEALVKLKRHFASQGVRKDAVL

SEQ ID NO: 23342 - protein, 912 aa, Oryza sativa (japonica cultivar-group)
MSRSYTNLLDLAEGNFAALGPGGGGGGRRRSGSFGLKRMSRVMTVPGTLSELDGEDDSEHAATNSVASDVPSSVAGDRVIVVSNQLPVVARRRPDGRGWSFSWDDDSLLLQLRDGIPDEMEVFFVGSLRAEIPVADQEEVSQALLDRFRCAPVFLPDPLNERFYHRFCKRHLWPLFHYMLPFSSSASPSPSSSSSSSSSPSSSSGSGHFDRGAWEAYVLANKFFFEKVVEVINPEDDYVWVHDYHLMALPTFLRRRFNRLRIGFFLHSPFPSSEIYRTLPVREEILKALLNCDLIGFHTFDYARHFLSCCSRMLGIEYQSKRGYIGLDYFGRTVGIKIMPVGVHMGQLKTVLSLPDREWRVSELQQQFEGKTVLLGVDDMDIFKGINLKLLAFENMLRTHPKWQGRAVLVQIANPARGKGKDLEAIQAEIHESCKRINGEFGQSGYSPVVFIDRDVSSVEKIAYYTIAECVVVTAVRDGMNLTPYEYIVCRQGSDSTSEVNGPKKSMLVVSEFIGCSPSLSGAIRVNPWNIEATAEALNEAISMSEQEKHLRHEKHYRYVSTHDVAYWSKSFIQDLERACKDHFRRTCWGIGLGFGFRVVALDPHFTKLNMDSIVMAYERSESRAIFLDYDGTLVPQTSISRTPSAEVLRIINTLCSDRRNKVFLVSGRRRDKLGEWFSSCPDLGIAAEHGYFLRWTRDEEWQTCTQTSDFGWMEMAKPVMNLYTEATDGSYIDPKESALVWHHQDADPGFGSSQAKELLDHLESVLANEPVSVKSGQFIVEVKPQGVSKGVVAEKILVSMKERGKQADFVLCIGDDRSDEDMFENIADTIKKGMVATNTSLFACTVGQKPSKAKFYLDDTFEVVTMLSALADATEPEPETDLTDEFDELAVSVSSVDIDDEQTPSDKLIGG

SEQ ID NO: 23343 - protein, 707 aa, Ustilago maydis
MSQNIVSALHPPLDSSTWSPYQTFLTVTLTLLHHLTSRHPVASRCGRAAPPLLAVHKQRRMLALPVSPPGRSLPPRWCCCRRWSFQASLDRDCATKASVASAASGVLGTRKRAALGDLTNANRTRSAMAGNDDKGKAALKDAIKPRATTSASTSSRSAVGTAASATTTGTGAARRVVRTRPTTASSTTASTTVTDAASDRPFRASRRVAGTTASTASGIPSATSRPTSTTTATSAVTAARKASMVRASSAGSQTDVRRDVSNTSAVTTNTTAPITAASRSSKVQLNEVHDTDDKMEAPQAKRLKTEQTNKPAKDEGWEDLDAEDADDPLMVAEYVNDIFEYMKELEIINMPNGDYMANQKEINWDVRAILIDWLVDVHAKFRLLPETLYLAVNIIDRFLSRRTISLSKLQLVGVTAMCIASKYEEVMCPSIQNFCHLADGGYTDVEILRAERYMLKVLDFSMSYANPMNFLRRISKADNYDIQTRTVAKYFMEISLLDYRLMEHPPSLIAAASVWLAREVLERGEWTPTLVHYSTYSEQELLGTAEIMLDYCLRPIAHQFFHKKYAHKKFMRASTYVIEWAHKAFPEGVVGVDEQQDLNVLRIDLYERNEIERPEMSPVSSSRATSPVSMHGQAHFEVEPSQNVDGDDTVSYAHDDDHEEEDDLVDDAQEIEGDVQLLDDVKAAAQRQDTRQVLRDVTNAYEATETF

SEQ ID NO: 23344 - protein, 141 aa, Ralstonia solanacearum
MAIERTLSIIKPDAVAKNVIGQIYARFEGAGLKVVAAKMIHLSRAEAEQFYAVHKERPFFKDLVDFMISGPVMVQALEGESAIVKNRDLMGATDPKKAEKGTIRADFADSIDANAVHGSDAAETAAVEVAFFFPGLNIYSR

SEQ ID NO: 23345 - protein, 705 aa, Cryptococcus neoformans var. neoformans JEC21
MKGLKKAMNLSRTKSSEKSKSPNPPAHKQSTASSGPSSPSVNSPSRQASDAPGLQGGAPITPRRSPINDKTSPAPPLVVISGAPQPPPINTEMPSDPIPHSPHGRYGSPERTLGADGQPTPPKVGPMNRLRGPKDTIPAVGKTPRKQRSSRFYVTEKVEIEKLPNFADVRPEQRNELFVQKLQQCRVVFDFNDASSDLEGKQIKSQTLHEMLEYITSQRGVITESIYPEVVSMFATNLFRSIPPQVNPTGDAFDPEEDEPVLELAWPHLQIVYEFFLRFVESPDFNTNIGKRYIDQSFVLQLLELFDSEDPRERDFLKTTLHRIYGKFLNLRAFIRRSISHVFFQFVYETERHNGIAELLEILGSIINGFALPLKEEHKTFLTRALIPLHKAKSLALYHPQLAYCVVQFLEKDPALTEEVVLGLLRYWPKVNSPKEVMFLNEVEEILDVIEHNEFIKIMQPLFVQLARCINSAHFQVAERALYYWNNEYIVNLMGEHISIILPIVFPALYQNSKTHWNRTIHGMVYNALKLFMEINQEVFEECQNNYRAQRKAESDRAIERYDEWLQLREQAIQNWESAHPSSPLPERLQEPPPPRPEPYEDEPMMDVSVDMTANGFDPSESFTLDRSIAEETVPVADPGVDRAPPLSPTSPTQLLGQQGQAPSSPTPSGGGTAPHLRRKSVLPIDAGVMRDLQNHRSLENDANP

SEQ ID NO: 23346 - protein, 148 aa, Brassica napus
MATREERDKYRSVLNDVGEVQWRYGHPPAFALVNQLFEEGQTKVWPEGSLEETVQNAIKSWEMEFSHKIRLQDFKTINPDKFKLFVNGREGLSAEETLRLGSYNALLKTSLPGEFQYYKPEAVRCASPLGPVSSASPRRWACALRPLF

SEQ ID NO: 23347 - protein, 311 aa, Glycine max
MALALKSSCFLQLKKPEAGFNVCFSSKKAIISVKRHTPVAAIRTMEAVGLSATFTRLKKEGKVAFIPYVTAGDPDLSTTAEALKVLDSCGSDIIELGVPYSDPLADGPVIQAAATRSLAKGTNLNAIIDMLKEVVPQLSCPIALFTYYNPILKRGTDKFMSTIRDSGVHGLVVPDVPLEETETLRTEAKKHGIELVLLTTPTTPTNRMRAIVDVAEGFVYLVSSVGVTGARASVSGSVQSLLKEIKEATTKPVAVGFGISKPEHVKQVVVWGADGVIVGSAIVKVLGEAKSPQEGLKELEVFTRSLKAALP

SEQ ID NO: 23348 - protein, 327 aa, Listeria monocytogenes
MGIAVLGGAGYIGSHAVNELITRGYEVVVIDNLRTGHRESIHKKAKFYEGDIRDKAFLSSVFEKEKVDGVIHFAASSLVGESMEVPLDYLNNNVYGTQIVLEVMEEFDVKHIVFSSSAATYGEPERVPITEDMPTNPESTYGETKLIMEKMMKWCDKAYDMKYVALRYFNVAGAKADGSIGEDHKPESHLVPIILQVALGQREKLAIYGDDYNTPDGTCIRDYVQVEDLIDAHIKALEYLKNGGESNIFNLGSSNGFSVKEMLEAARTVTGKEIPAEVVPRRAGDPGTLIASSDKAREILGWEPTYTDVKDIIATAWKWHVSHPNGY

SEQ ID NO: 23349 - protein, 382 aa, Synechococcus elongatus PCC 6301
MEDKLMLMIPGPTPVPEQVLLAMAKHPIGHRSADFSRLVADTTAGLKWLHQTTGNVLVLCSSGTGAMEAGIINFLSAGDRVLCCENGKFGERWVKLAQAFGLDVDLVQAPWGKPLDPEAIRAKLEADTDKQIKAVILTHSETSTGVINDLETISGYIRAHGALSIVDAVTSLGAANVPIDAWGLDVVASGSQKGYMIPPGLGFVAVSDRAWKAYETATLPKFYLDLGKYRKAAQKDSNPFTPPVNLYYALDAALKIMQREGLENIFARHAKLTRATRAAIKALNLPLYAADEVGSPAITAVAPVEVAAEDIRSFTKKHFDILLAGGQDDLKGKIFRIGHLGFVSGRDVLTAIAAIEAALTGLGYSNFTSGAGVAAAAAELAK

SEQ ID NO: 23350 - protein, 335 aa, Vibrio vulnificus CMCP6
MTGGMGYIGSHTCVQMMAAGMEPIIVDNLCNAKVDVLSRIEALTGKQPTFYQGDIRDEAFLDSVFAQHDIQAVIHFAGLKAVGESVAKPLEYYDNNVNGSLVLARCMRKAGVKSIVFSSSATVYGDPEIVPITEDSPTGATTNPYGRSKYMVEQCLSDLFHAENDWSITLLRYFNPVGAHPSGSMGEDPQGIPNNLMPFIAQVAVGRREKLSVFGNDYPTPDGTGVRDYIHVMDLADGHIAALKSVGKTSGLHIYNLGTGKGSSVLEMVEAFAAACGKPVPYELCPRRPGDIAECWASTEKAERELGWKATRSVAEMTADTWNWQSNNPNGYSPA

SEQ ID NO: 23351 - protein, 501 aa, Candida glabrata CBS138
MDSRLARLTTLQTSAGEELRRTSIIGTIGPKTNNPETLVALRKAGLNIVRMNFSHGSYEYHKSVIDNARKSEELYPGRPLAIALDTKGPEIRTGTTTNEVDYPIPPNHEMIFTTDDKYAKACDDKIMYLDYKNITKVISAGRIIYVDDGVLSFEVLQVVDDKTLKVKSLNAGKICSHKGVNLPGTDVDLPALSEKDKADLRFGVENGVHMIFASFIRTAQDVLTIREVLGEDGKDIKIVVKIENQQGVNNFDEILKVTDAVMVARGDLGIEIPAPEVLAVQKKLIAKSNLAGKPVICATQMLESMTYNPRPTRAEVSDVGNAVLDGADCVMLSGETAKGNYPINAVTTMAETALIAEQAIAYLPNYDDIRNCTPKPTSTTETVAASAVAAVFEQKAKAIIVLSTSGTTARLVSKYRPNCPIILVTRNARTARFSHLYRGVFPFVYEKESVSDWTEDVEARLNFGIEQAIEFGILKKGDTYVSIQGFKAGVGHSNTLQVSTA

SEQ ID NO: 23352 - protein, 481 aa, Xanthomonas oryzae pv. oryzae KACC10331
MFPGEPMSSASIDGAPDAGENTRFIILISCVATIGGFLFGFDSGVINGTVDGLKQTFQSTAAETGFEVASMLLGCAIGAFFAGRLADRSGRRAVLIISAALFLLSAIGAGASHSSGFFIFARVMGGFAVGAASVISPAYIAEVASARYRGRLATMQQIAIISGLFCAFLSNYLLANAAGASTEPLWAGQAAWRWMFWMQAVPSLLFLLLLLVIPESPRYLVVKGRREQALVVLKRLYGNAAAQTKLGEISASMSADRHKPKFSDLINQATGKIRPIVWIGIGLAVFQQLVGINVVFYYGAVLWQAVGFSEQDALLINVLSGGLSIGACLVTVMLVDKIGRKPLLWIGSAGMAVSLALVTYAFATASLDLNGKLAMSDAMGMLALVAANVYVVFFNASWGPVMWVMLGEMFPNQIRGSGLAIAGAAQWTSNFAITVSFPILLGSIGLAGAYGIYTVAAFISVFFVLKCVYETKGKELEQMEG

SEQ ID NO: 23353 - protein, 1207 aa, Oryza sativa (japonica cultivar-group)
MGAEAEESLDHPGSLSGMSPATPDVAWKPAERRRRRSEADAEGSSCCSLSAATAAWVGAGNVESDDPSVRSVAAGEQSRSVSRPEEEEEECASCTQDSTVSPPVSECGDRTAQQEPSTQEYTVSPPPVSECGDKVVQQESSNQESTVSPPPVSECGDKIAQQGSSTRESTVLLPVSECCNKVAQQESSTQESTVSLPVIECGDKVAQQESSTQESTVSLPSSECGDKVAQQESSTQESTVSLPLSECGDKVAQQESSTQESTVSPPVSECGDKIARQEGAASAIPTPEKVEATPRRPRKRSTKGLTRFKIMKDHKAAQRTATPVEVKIKRKAKDNGRRPLGDKSVRRKLNFEGDAVDFEGNREFSRAKLMEDLRCLAKVHGLRDDLGAGKRSKKGKKRKKMTGEHQDNGESALVPYQKAPAATSSSALVPIQNSTQLAIVHHRNHLKNLRTKVLGLDEKTLQVYNVLRKWDETDSESFEGVDIGSGPEWNETRRHFEHYVDVFIATVHGLLGPRRFSEWGGSVTDSVVGTFLTQNVADNLSSNAFLNLVAKFPPTKRHINAEACSNLSLLIDDMRRKLNLNEQSNGTDSGSSDFTKPVDFEKENGYNEEVKGNYGRDYSTIIENFISIIEKHHKDMSTWDNARLENMVKDKSGTPVCSHRTLRKFMDTFEEKDTSHWDKLREEAYSKGYKIKGTGISDSADWEAVLHAPAVEIANSIAVRGQHYVIALRIQAFLKRVKKDHGNFDLDWLRYVPRESAKNYLISILGLGDKSVDCIRLLSLKHKGFPVDVNVARIVTRLGWVKLQPLPFSAEFHLVGLYPIMRDVQKYLWPRLCTISKEKLYELHCLMITFGKAICTKVSPNCRACPFSAKCKYYNSSLARLSLPPAEGHGHEYGEEQASTATPGRLLLSNDSHIAGFQQVCQPQIKINMPAGRESIYKCEPIIEIPPSPEHEYEESPYEQELYEDDLCDIEDTIPELQYDFEIDLCSLKHTVNNGSWTPNSGKDLALINSQHASVQNKRLKNIGRLRTEHNAYVLPDDHAILEEFEDRVPEDPCPYLLVVISCSDEHTVKGTILIPCRTATRGNFPLNGTYFQDHEVFADHSSSRSPITIPRECIWNLDRCIVYFGSSIQSIMKGQTRQDIEDCYKKGYICVRGFDRNTRYPKPICAKLHATNERNGTGENSRKKKKTSQEGKKIDDKSSFGKLEIN

SEQ ID NO: 23354 - protein, 281 aa, Corynebacterium glutamicum ATCC 13032
MNIHLCCCSRLCGRMVATSQFIDDSEAAQAVRAAIVAGYRNIDTALAYGNERGVGEGIRTAGVPREELFISTKLAAEIKDYDGAVAAIDESLAKIGLDYVDLMLIHSPQPWSDFRGGDYSEGNREAWRALEDAYKAGKIRSIGVSNFLEADLENILDSATVAPHVNQLLVHVGNTPSELISFCDSKGILVEAYSPIAHGEMLKNQQVKAIADKYNVSIPQLCIRYTIQLGTVSLPKTANPDHMSSNAQIDFEISEEDMAALQEVTARDYGEHSGFPVYSGK

SEQ ID NO: 23355 - protein, 372 aa, Legionella pneumophila subsp. pneumophila str. Philadelphia 1
MSSKSGGLAGVVAGQSAIATVGLAGKGLNYRGYSINDLAEYASFEEVAYLLHYGELPTQKELDVYIKKLVNLRHIPDVLKTVLKLIPKNTHPMDVLRTACSFLGTIEPEENFKQQYEIADRLLALFPGIMCYWYTYHFKNKEISGLSEEDTTGGHFLALLHGRKPSKIETDMMNVSLILYAEHEFNASTFAARVTAATLADFYSAITSAIGTLRGPLHGGANEAAMGLIERFKTPDEAAIGIKQMLASKELIMGFGHRVYTTCDPRSDIIKKWSFRLGEEKGNLLLYHISERIEEIMWQEKKLFPNLDFYSASAYHYCDIPTHLFTPIFVMSRITGWSAHVFEQRANNKLIRPTSEYIGPDSRPFPAIETRG

SEQ ID NO: 23356 - protein, 358 aa, Streptomyces cinnamonensis
VTEADNGVLHTLFHSDQGGHEQVVLCQDRASGLKAVIAIHSTALGPALGGTRFYPYATEEEAVADVLNLSRGMSYKNAMAGLDHGGGKAVIIGDPEQIKSEDLLLAFGRFVASLGGRYVTACDVGTYVADMDVVARECRWTTGRSPENGGAGDSSVLTAFGVFQGMRASAEHLWGDPSLRGRKVGVAGVGKVGHHLVEHLLEDGADVVITDVREESVNRSTHKHPSVTAVADTEALIRTEGLDIYAPCALGGALDDDSVPVLTAKVVCGAANNQLAHPGVEKDLADRSILYAPDYVVNAGGVIQVADELRGFDFDRCKAKASKIFDTTLAIFARAKEDGIPPAAAADRIAEQRMSDAR

SEQ ID NO: 23357 - protein, 464 aa, Photorhabdus luminescens subsp. laumondii TTO1
MQASLQLERGLNARHIRFMALGSAIGTGLFYGSAEAINMAGPAVLLAYLVGGAAVFMVMRALGEMAVHRPDAGSFASYAHQYLGPLPGFITGWTYTFEMIIVCLADVTAFGIYMGLWYPEVPRWIWVLSIIFIIGALNLCKVKVFGEMEFWLSILKVAAISAMIIAGTGIILFGFSGHFQATGVQNLWQHGGFMPNGLGGIIESLAVVMFAFGGIEIIGITSSEAKNPAKVIPQAINSIPFRILLFYVLTIFVLMAIYPWNSIGQEGSPFVAIFQGLGIGSAANILNIVVITAAISAINSDIFGAGRMMYGMAEKGLAHKKFMHLSRNGVPWVTIMVMTLALLCAVVLNYLLPKQVFVIVASIATFATVWVWLMILLSQFAMRRKMSPGEAQKLQFPVPMWPVAPILTIVFMIFIIAVLSYFPATRIAFYVGGAWIALLTSAYYLWIRKNVIIVSAQSAKETRC

SEQ ID NO: 23358 - protein, 189 aa, Magnaporthe grisea 70-15
MEAASARYAARDRWGEPGSTSSANSQLLRFIQAACSPENYEPNLALNLEISDLINSKKGTAPREAAMAIVGYINHRNANVALLALHLLDICVKNCGYPFHLQISTKEFLNELVRRFPERPPIRASRVQTKILEAIEEWRSTICETSRYKDDLGFIRDMHRLLSYKGYTFPEVRRDDAAVLNPSDRCAIY

SEQ ID NO: 23359 - protein, 433 aa, Legionella pneumophila subsp. pneumophila str. Philadelphia 1
MGFSMSRSSDLFHKAQTIIPGGVNSPVRAFKGVGGEPVFFKSGKGAYLTDVDDKQYIDYVGSWGPLILGHCHPKVIEAVDNVLHRGMSFGAPTELEIQLAEKIASLMPSIEKIRMVNSGTEATMTAIRLARGFTNKNKFIKFNGCYHGHSDSLLVKAGSGLLTLGIPSTPGIPQSITEHTLTADFNNLEQVAQLFEKYPNDIATVILEPIPGNMGFILPKIEFLKGLRELCDQYNALLIFDEVMTGFRVGLHGAQGLFGIKPDITTLGKIIGGGMPVGALGGKREIMSFLAPEGPVYQAGTLSGNPLAMAAGLATLKEIEKINFFEDLSNTTNKLTEALADAAENANIPFFAASLGGMFGFCFTDKNSVENYLDVASSDEVLFKKFFHAMLAQGVYFAPSMYEAGFVSSMHGDLEIQKTYDAAELVLNQLKSA

SEQ ID NO: 23360 - protein, 539 aa, Ustilago maydis
MPQRAALSDVSNRAGVARANALADGAVKLAPGHNGLRSQHTKSMTRLRDARSRSTSEQRLSGPTRSVSEQRDCAPAAAESMHVEASQLLPPFQSSASVKVGISDEAGSSRLHEDADIRDLAGSQHSDHVEEDEMSDVASTSSSDDDTAEDIGVDKANWLDSERLDAGARPESVTSAEDGDMLDFNIDPEGLVSLHPELEEAARRKVALIKSRYQEEVIQPRAARAQAQHAEAVAAGQLSAELAAHEDELIVMGLDPEEVRDTSMVAEYSNEIFSYMARCERETMANPNYMEFQSEIHWHMRATLVDWLLQVHMRYHMLPETLWIAINVVDRFLSVRVVSLAKLQLVGVTAMFIAAKYEEILAPSVKEFVYMTEGGYSQEEILKGERIILSTLGFNISSYCSPYSWVRKISKADDYDIRTRTLSKFLMELALLDHRFLRARPSLVAAVGMFLAKKMLGGEWDDAFVYYSDFTEEQLVPGANLLLERLLDQGFEEQFVYRKYSNKKFLRASVFARDWAFQNHSALLAAAAAAAGSTQAGQP

SEQ ID NO: 23361 - protein, 449 aa, Arabidopsis thaliana
MKTTHFSSSSSSDRRIGALLRHLNSGSDSDNLSSLYASPTSGGTGGSVFSHLVQAPEDPILGVTVAYNKDPSPVKLNLGVGAYRTEEGKPLVLNVVRKAEQQLINDRTRIKEYLPIVGLVEFNKLSAKLILGADSPAIRENRITTVECLSGTGSLRVGGEFLAKHYHQKTIYITQPTWGNHPKIFTLAGLTVKTYRYYDPATRGLNFQGLLEDLGAAAPGSIVLLHACAHNPTGVDPTIQQWEQIRKLMRSKGLMPFFDSAYQGFASGSLDTDAKPIRMFVADGGECLVAQSYAKNMGLYGERVGALSIVCKSADVAGRVESQLKLVIRPMYSSPPIHGASIVAVILRDKNLFNEWTLELKAMADRIISMRKQLFEALRTRGTPGDWSHIIKQIGMFTFTGLNPAQVSFMTKEYHIYMTSDGRISMAGLSSKTVPHLADAIHAVVTKAV

SEQ ID NO: 23362 - protein, 298 aa, Ustilago maydis
MDKYQRIEKVGEGTYGVVYKAKDLTPGANGRIVALKKIRLETEDEGVPSTAIREISLLKELRDDNIVRLFDIVHQESRLYLVFEFLDLDLRKYMDHVSRNRGGDGMGPEIVRKFTYQLIRGLYYCHAHRILHRDLKPQNLLIDREGNLKLADFGLARAFGIPLRTYTHEVVTLWYRAPEVLLGSRHYSTAIDMWSVGCIFAEMTLGHPLFPGDSEIDQIFKIFRALGTPTDDVWPGVQQLPDYKDSFPKWAGRPLRDAVPGLDEAGLDLLEGMLVYDPAGRTSAKRSLVHPYFRRLLT

SEQ ID NO: 23363 - protein, 472 aa, Shigella flexneri 2a str. 301
MTTHLAWFRQDLRLHDNLALAAACRNSSARVLALYIATPRKWETHNMSPRQAELINAQLNGLQIALAEKGIPLLFREVDDFVASVEIVKQVCAENSVTHLFYNYQYEVNERARDVDVERALRNVVCEGFDDSVILPPGAVMTGNHEMYKVFTPFKNAWLKRLREGMPECVAAPKVRSSGSIKPAPSITLNYPRQSFDTAHFPVEEKAAIAQLRQFCENGAGEYEQQRDFPAVEGTSRLSASLATGGLSPRQCLHRLLAEQPQALDGGAGSVWLSELIWREFYRHLMTYYPSLCKHRPFIAWTDRVQWQSNPAHLQAWQKGKTGYPIIDAAMRQLNSTGWMHNRLRMITASFLVKDLLIDWREGERYFMSQLIDGDLAANNGGWQWAASTGTDAAPYFRIFNPITQGEKFDREGEFIRRWLPELRDVPGKAVHEPWKWAQKAGVKLDYPQPIVEHKEARVQTLAAYEAARKGK

SEQ ID NO: 23364 - protein, 1114 aa, Cryptococcus neoformans var. neoformans JEC21
MSSAILPYPSQPSYPLSRPSTPRPTTTLSAPPTPITPTHLLPVAMERARSTEGVVNGVEQALNQARGIKDNKEPKPGRLKFEWEHIERPKTPESDHGIDDDEEQKMDVDEEQPIQPPYLGLGEPVSTYDEERAQRENAMRQMDIHHEEPPPPIIWGMPKWGREAERQEVAKGVRLLGMEELPQLVKTHSLIDTPSSVMFPWLHGISDDGHKGQEMAQFFGYSPPFGPPPYRGLCLLFCPPHPLDKHHLRPPPQRNDTDLTTVPTSAPYKVPDRKDSESESTSSESYNSSGATELTSPSLGNSLPSPSLSSFKPLPETDTQSMDSSKDDSNGAEVAMHPCYSKRLSPTTVAKGLDEDNHPLPCSSILNAAAEPETQKPSLSSSVSSSSSDVDEAVGQNQNPSCILFNALHVHDIFDLSKIGDDTEKRASFRAAKLPDQINLRNLNIQQIKYATVSDIVLYSKTGLTQGLLHIAEQIAQAQEDLYNQRLQEIYHVNHTGGDGEGSSEPIRYGVWVVLESFNEIEKHYPELVNIDSKGRDKHPHLQTDLFEREAKESREMTKASEVVEGFWVGNDCDVPGATLEGAGSFIRFDLCLKASECSEMPSTSALSSAYRKLLDIDRRRREAGEESQSTSAFNWTASPATHALRNLLSPSSSSVTTEVPSKRTASPTPSDRQLRAKPSLTTDHEYVALDCAGSSRTITGHTRNMVTMTDRVIELVYFLRKLVEGRDNGRKRKILVHCQDGYTESSIIVLAYIMSSLSISLPEAFLHLQVNANRSFFLYPADKPLLRKVDARLAADRKAKAIKLLSATSAGSASSHTDSDGKQSNPSPRWRPWGMNFGAKREQAPNRTSAIGGKERSKSTADVAREMLAEHENGGSAAAQEARLWFDDKRFDGFPSRILPFLYLGNLEHAGNAAMLHSLGITHVVSVGESLMNMDNSVIAYYGHKSENTLAAAVRAGKLSVLDLTDVRDDGNDPLRPVIARACEWIEEARARGGKILVHCRVGVSRSASIVIAYMMQYEHMRLMDAYMVCRARRLNVLIQPNLRFFHELFGWEVELAKREAEAAKARREEAEKQGVRDPEALKLIEGEARKIIYSWPSFCRDLYCLNRRFLCN

SEQ ID NO: 23365 - protein, 237 aa, Triticum aestivum
  misc_feature (87)..(87): Xaa can be any naturally occurring amino acid
  misc_feature (116)..(116): Xaa can be any naturally occurring amino acid
  misc_feature (221)..(221): Xaa can be any naturally occurring amino acid
  unsure (1)..(237): unsure at all Xaa locations
MQIFVKTLTGKTITLEVESSDTIDNVKAKIQDKEGIPPDQQRLIFAGKQLEDGRTLADYNIQKESTLHLVLRLRGGMQIFVKTLTGXKTITLEVESSDTIDNVKAKIQDKEGIPPXDQQRLIFAGKQMEDGRTWPTTTSKRSQPQLVLRLRGAMQIFVKTLTGKTITLDVESSDTIDNVKAKIQDKEGIPPDQQCLIFAGKQLEDGRTLADYIIQKESTLXLVLRLRGGQELPYGPN

SEQ ID NO: 23366 - protein, 320 aa, Burkholderia vietnamiensis G4
MACVGRPASRSDRRTRRPARQDQEDRHARRRRYGQCARRVHDRARRVARRSGRAVRRSSAFHAVSRRGGRGDADSAGARHVSGGTRHALRATDAGRGRTRRGPRDMTHNLDGDIAMKLYGFAGTRSQRALWGLKELDADFEFVSVNLPAGEHKHPEFLRLNPAGKVPVLVDGDLVIPESAAIVLYLADKYPQKALLPTDPALRAQAYRWVMFAVTELEQPLWRIARHTFLYPPEKRLPADIALAREDFVTMAAILERHLEGREFIVGDALSVADCVTAYLIDWAGECQLLDTFPQLQAYLERLYARPKAPQRIAQARQAA

SEQ ID NO: 23367 - protein, 578 aa, Synechococcus elongatus PCC 6301
MIARPMVPTADQLATDDLSLSDRSRFWLAALEASGQGVAIADATHPDLILTYVNSAFKKLTGYNAAEALGKSCRFLQGSDRAQPGITTLRQAIRNGQACEVVLRNYRKDGSLFWNQLTIAPITDGQGKVSHYVALQRDITAFKEQEQALQRQGIYDEHSGLPKRQLFLDRLNQALAWSQFSGVPGALLLIDLGLPAHLDGSPSLSPDAEENLEIIANRLQAYVRPHETLAHLNHHQFGLLLLDPDVQLRAEERAHGIQTLIRDRLAGFEGGAHIGIVPLTPETPATVLLQAAEAAAMTARSQQQGHLSLEASAIVAAPEQYSRDRDWQQAIAAGELTLALQPQMGLRNRQLRGFEVQLRWQHPQQGTLLASQLMEHLEQSQHRETVGRWFLDQAGQLLSQWRNSAQFSGLFALSLLPQQWKSPSFIHDLRSLLETYQIPPEQLELDLPAQSLAESAAESWDWVYAVRDLGIGIGLADFGSRSIGLYDLRNLPLTTLKLERRFVRGLPDDANDRAIVRGVVAMSQALKVRIVARGVDTVDQAKFLARAECDAMQGLAYSAPLTIEEALQVARSPQAPAW

SEQ ID NO: 23368 - protein, 377 aa, Hordeum vulgare subsp. vulgare
MDHRLVAPLLLLVGLLLSPAPATAAAGDEEPLIRQVVGGADPLDNDLELDSQFVGFVQRFGKTYRDAEEHAHRLSVFKANLRRARRHQLLDPSAEHGVTKFSDLTPAEFRRTYLGLKTTRRSFLREMAGSAHDAPVLPTDGLPEDFDWRDHGAVGPVKNQGSCGSCWSFSASGALEGANYLASGKMEVLSEQQLVDCDHECDPSEPDSCDAGCNGGLMTSAFSYLLKSGGLEREKDYPYTGKDGTCKFDKSKIAASVQNYSVVAVDEEQIAANLVKYGPLAIGINAAYMQTYIGGVSCPYICGRHLDHGVLLVGYGASGFAPSRFKEKPYWIIKNSWGENWGDKGYYKICRGSNVRNKCGVDSMVSTVSATHSSKEE

SEQ ID NO: 23369 - protein, 293 aa, Candida albicans SC5314
MKKALPEHAKLSKESKECIQECVSEFISFITSQAADRCLVEKRKTLNGEDILWAMYTLGFENYSETLKIYLAKYRQYEQEQLSLKPPRKKIRKRKTKSSLSQTQSKEQVDQDQDFQQIEQQYDDGEEEEEESENEEGDMSNIESNLILQNLPEYSDDYFDDEDEEEDRQQQREENSDNEPQQHHGDDSQPINLQPQLPSSAVPSLPTQQQQQFSDINPTTESNQQESFFTTQYYPNQTQYVNAAPLPTNPQPRQYQNQNQPNNYQNDQRQNDKQRIIPDLLNITNSYSEDEFI

SEQ ID NO: 23370 - protein, 119 aa, Campylobacter jejuni subsp. jejuni NCTC 11168
MKELNEEEKKVILNKGTEAPFSGKYNDFYEKGIYQCKQCGASLYKSEDKFKSGCGWPSFDDEIKGAIKRIPDKDGIRTEIVCANCNGHLGHVFEGEGFSAKNVRHCVNSISLEFVKTKD

SEQ ID NO: 23371 - protein, 280 aa, Arabidopsis thaliana
MAPAFGKCFMFCCAKTSPEKDEMATESYEAAIKGLNDLLSTKADLGNVAAAKIKALTAELKELDSSNSDAIERIKTGFTQFKTEKYLKNSTLFNHLAKTQTPKFLVFACSDSRVCPSHILNFQPGEAFVVRNIANMVPPFDQKRHSGVGAAVEYAVVHLKVENILVIGHSCCGGIKGLMSIEDDAAPTQSDFIENWVKIGASARNKIKEEHKDLSYDDQCNKCEKEAVNVSLGNLLSYPFVRAEVVKNTLAIRGGHYNFVKGTFDLWELDFKTTPAFAFS

SEQ ID NO: 23372 - protein, 311 aa, Yarrowia lipolytica CLIB122
MRQVSHPNIVELKAFFHSNAEKDDVYLNLVLEYVPETVYRALRHFSKARLSMPNIEVKLYTYQLFRSLAYIHSLGICHRDIKPQNLLLDPATGILKLCDFGSAKILVPGEPNVSYICSRYYRAPELIFGAQNYTTKIDVWSGGCVMAELMLGQPLFPGESGIDQLVEIIKVLGTPSREQIRTMNPNYMEHRFPQIKPHPFSRVFKRGPPDAIELITPLLEYSPGQRLSAIEALVHPYFDELRDPETVLPDSRNPNNAVRQLPALFNFTRHELSIAPELNQKLVPAHAREALGVDLDNFVPLTVQEMAANLS

SEQ ID NO: 23373 - protein, 311 aa, Pyrococcus furiosus DSM 3638
MITAFGEVLIDFIAAEEGDLENVKIFEKHPGGAPANVAVGVSRLGIPSFLVSKVGDDPFGRFLIRRLKEEGVNTEGVLIDNEKHTGVVFVQLKGAKPSFILYDEVAYFNIKLSEVPWEILESSKIVHFGSVLLAREPSRGTMIKVIETLKEKSLVSFDVNIRKDLWRSEEELVETLKRVLSNVDILKLSDEEFNLLKEYGLEPRGKLITAITYGAEGCRIESDEASIFVPAYKVSPVDTTGAGDAFVSALLVGLLALDKQKLEESDMFLLGKFANLVAGLSTQKRGAWSVPRREELEKYEEGRKIFSLITL

SEQ ID NO: 23374 - protein, 413 aa, Frankia sp. EAN1pec
MRSPRVLGLVLAGGAGKRLAPLTADRAKPAVPFGGIYRLVDFVLSNLVNGGYLRIAVLTQYKSHSLDRHITTTWRMSNLLGNYVTPVPAQQRLGPQWFAGSADAIHQSLNLVHDEAPDVVVVFGADHVYRMDPRQMVAQHLETGAGVTVAGLRVPRSEGSAFGVIRTADDGVTIAEFLEKPADPPGLPGSPDEIFASMGNYVFTTDVLIDALRADAADPESVHDMGGSIVPMLVEQGTAAVYDFAANQVPGALERDHGYWRDVGTLDSYFDAHMDLCALDPVFNLYNRDWPIYTNVPPSVPPAKFVHDTPGRVGVATDSIVSNGVIISGGAVRRSVLSPGVRVNSWSVVENAVVMDNSVIGRRAVVRDAILDKNVVVPPGATVGVDKEHDRARGYQVSEAGVTVVGKGVTIAD

SEQ ID NO: 23375 - protein, 544 aa, Agrobacterium tumefaciens
MAAKEVKPGASAREKMLKGVDILADAVKVTLGPKGRNVVIDKSFGAPPITKDGVSVAKEIELEDKFENMGAQLVREVASKTNDIAGDGTTTATVLAQAIVREGAKAVAAGMNPMDLKRGIDLAVAEVVKDLQAKAKKINTSEEVAQVGTISANGERQIGLDIAEAMQRVGNEGVITVEEAKTAETELEVVEGMQFDRGYLSPYFVTNPEKMVADLEDAYILLHEKKLSNLQAMLPVLEAVVQTGKPLVIIAEDVEGERLATLVVNKLRGGLKIAAVKAPGFGDRRKAMLEDIAILTGGTVISEDLGIKLESVTLDMLGKSKKVSISKENTTIVDGAGQKSDIEGRVAQIKAQIEETTSDYDREKLQERLAKLAGGVAVIRVGVSTEVEVKEKKDRIDDALKPTRAAVQEGIVPGGGVALLRSSTKITVKGVNDDQEAGINIVRKALQSLVRQIAENAGDEASIVVGKILDKNEDNYGYNAQTGEYGDLIALGIVDPVKVVRTALQNAASVASVLITTEAMIAELPKKESAMPQMPGGGMGGMDF

SEQ ID NO: 23376 - protein, 332 aa, Triticum aestivum
VTLREQVCTKKQAGTGPEFPGYRRPTRPGGTGYIGRRIVKASLAQGHETYVLMRPEIGLDIDKLQMLLSFKAQGARLLEASLDDHRGLVAAVKQVDVVVSAMSGVHFRSHNLHLQLKLVEAIKEAGNVKRFLPSEFGMDPARMGHALEPGRITFDEKMEIRRAIEEGNIPHTYISANCFAAYFVPNLCQMRTLLPPKEKVNVYGDGNVKAIFMDEDDIATYTIKSIDDPRALNKTVYLRPLENILSQNELIAKWEKLSGKALEKIPIPSAEFLASMEGTDLANQVGVGHYHHIFYEGCLTNFAIGDDGEEEGSLLYPEVQYTRMEEYMERYA

SEQ ID NO: 23377 - protein, 310 aa, Arabidopsis thaliana
MEIASQEDPIPINTSYGNSGGGHGNMNHHHHANSAPSSLNITTSNPLLVSSNSNGLGKNHDHSHHHHVGYNIMVTNIKKEKPVVIKYKECLKNHAATMGGNAIDGCGEFMPSGEEGSIEALTCSVCNCHRNFHRRETEGEEKTFFSPYLNHHQPPPQQRKLMFHHKMIKSPLPQQMIMPIGVTTAGSNSESEDLMEEEGGGSLTFRQPPPPPSPYSYGHNQKKRFRTKFTQEQKEKMISFAERVGWKIQRQEESVVQQLCQEIGIRRRVLKVWMHNNKQNLSKKSNNVSNNVDLSAGNNDITENLASTNP

SEQ ID NO: 23378 - protein, 124 aa, Zea mays
  misc_feature (48)..(48): Xaa can be any naturally occurring amino acid
  unsure (1)..(124): unsure at all Xaa locations
QGSSRQQAATTAARSEAATTADNAEGPGRTHQDEPGPENIPDPGRRAXNRDNEDHRSPAGTALTKDRQEDGKKNNKSTTGTPPRRPTTGTGARESPQTNTQAPGDRGAARPNGQHSRPRNDHQR

SEQ ID NO: 23379 - protein, 386 aa, Rhodospirillum rubrum
MTETTFKPKKSVALSGIAAGNTALCTVGRSGNDLHYRGYNILDIAETCEFEEIAHLLIHGGLPTAAQYASYKAKLKVSRGLPRSVKEALETIPAAAHPMDVMRSGVSALGCALPEAYDHHPVDARDIADRLIASLGSMLLYWYHYAHHGRRIEVETDEDSIGGHFLRLLHGKPPSDDFVQAMHTSLILYAEHEFNASTFTARVIAGTGSDMYSCISGAIGALRGPKHGGANEVAFGIQKRYASLQHAEEDIRRRVEAKEVVIGFGHPVYTTADPRNAVIKRVAKGLADEVRSHLQYDVAERIEQVMWDTKAMFPNLDWYSAVSYHLMGVPTSMFTPLFVIARTCGWAAHVIEQRQDNKIIRPSANYTGPENLAFVPMSARSDHVSM

SEQ ID NO: 23380 - protein, 321 aa, Propionibacterium acnes KPA171202
MARIIVTAPQLMSVVNEELPGHEVVGGDHFMDRQELSRQIATADAILTSLSDPLDAEMIGQGKNLKVIGQCAAGFNNIDLDAAKQAGVVVTSTPGVLHEATADLAFTLLLEVTRRTGEAERWVRAGRAWRYDHTFMLGAGLQGATLGIVGLGQIGEAMARRGAAFGMNVIYNARHEKDVAAIDAVNLNTQPTRRVELDELFATSDVVSLHCPLTDETRHLVDADALAAMKKTAYLVNTARGACVDEAALVEALKTGAIAGAGLDVFEEEPTITADLLTMENVVLLPHLGSAALPTREAMSRLAARNIAKVLDGKPAETPVE

SEQ ID NO: 23381 - protein, 482 aa, Escherichia coli O157:H7 EDL933
MKLNDSNLFRQQALINGEWLDANNGEVIDVTNPANGDKLGSVPKMGADETRAAIDAANRALPVWRALTAKERANILRNWFNLMMEHQDDLARLMTLEQGKPLAEAKGEISYAASFIEWFAEEGKRIYGDTIPGHQADKRLIVIKQPIGVTAAITPWNFPAAMITRKAGPALAAGCTMVLKPASQTPFSALALAELAIRAGIPAGVFNVVTGSAGAVGNELTSNPLVRKLSFTGSTEIGRQLMEQCAKDIKKVSLELGGNAPFIVFDDADLDKAVEGALASKFRNAGQTCVCANRLYVQDGVYDRFAEKLQQAVSKLHIGDGLDKGVTIGPLIDEKAVAKVEEHIADALEKGARVVCGGKAHERGGNFFQPTILVDVPANAKVSKEETFGPLAPLFRFKDEADVIAQANDTEFGLAAYFYARDLSRVFRVGEALEYGIVGINTGIISNEVAPFGGIKASGLGREGSKYGIEDYLEIKYMCIGL

SEQ ID NO: 23382 - protein, 468 aa, Propionibacterium acnes KPA171202
MAVAATGIPAESGEPAMDKPRMKGRHLVMMSLGSAIGTGLFVGSGKGVAAAGPATLVAYIVAGLLVIAIMYMLGEMVAAHPDSGAFSVYTSRAMGSAAGFAMGWVWWIELVVVVAAEAIAAASTLVAMWPIAPVWLLTLIFLVVLTAINLLGADRFGEFEFWFALLKVVAVVVFLTIGVLLICGVLAAPAAGTSNLVGHGGFLPNGWSGVATALLLVAFSFGGIEIMAVAAAETEDPAHNVSRAVRTIVWRILVFYMGSVAIMVIAVPWDDPELGASPFVAVLNRAGIPAASEVMTLVIVLALLSSLNANLYGAARMLGSLAERGMAPRVAMRTRGRSVPTVAVLASVAFGFCCVLATFEWGDAVLGTLLNIVGSTIIVTYFFTICSHYVLRRRAEKEGAPLPMRLKGFPVVNWAAMILLIGIVVLGMFSPDVRAQLMSTGALVVILYVIGVGWSHHAGRSPFHPTTD

SEQ ID NO: 23383 - protein, 413 aa, Lactobacillus helveticus
MVENQNNNQNQPRKKSGNKIIATAAIFGVVGGLVGGGVSYYAMDQMNNGQGNGAAQISISSSSSKVSEKSAKNGGTMTAAYNDVKGAVVSVINLKRQSASSGTDSLYNSLFGDDSDSSSSKNGKLETYSEGSGVVYMKSNGKGYIVTNNHVISGSDAVQVLLANGKTVNAKVVGKDSTTDLAVLSIDAKYVTQTAQFGDSKHLEAGQTVIAVGSPLGSEYASTVTQGIISAPARTISTSSGNQQTVIQTDAAINPGNSGGALVNSAGQVIGINSMKLAQSSDGTSVEGMAFAIPSNEVVTIVNELVKKGKITRPQLGVRVIALQGIPEGYRSRLKIKSNLKNGIYIAFVSRNGSAANAGIKSGDVITKVDGKKVEDVASLHSILYSHKVGDTVNVTVNRNGKDVDMKVKLEGN

SEQ ID NO: 23384 - protein, 323 aa, Pseudomonas fluorescens PfO-1
MSSPIPVTVLSGFLGAGKTTLLRHLLKAEHGLKIAVIENEFSDASIDTQLLGDEPVQVMTLANGCVCCTIHTDLTKALYLLLERLDSGEIAFDRLVIECTGLADPAPVAQTFFIDEELRERYLLDGIITLVDAAHAELHLTQTIAQAQIGFADRLLVSKTDLVDEAAFTALSERLTRINRRAPIRVVEHGNIDLAELLDVRGFNLNADLGGGVSLRPVSKAPSIDRISSLVLRTDQPLDIDQLSEFMNELLEEHGKQLLRYKGVLNIAGEDRRLVFQGVLKLYGFDWDTEWAEGEARESVIVFIADDLPEEKIRAGFARVAAN

SEQ ID NO: 23385 - protein, 348 aa, Saccharomyces cerevisiae
MTTEKTVVFVSGATGFIALHVVDDLLKTGYKVIGSGRSQEKNDGLLKKFKSNPNLSMEIVEDIAAPNAFDKVFQKHGKEIKVVLHIASPVHFNTTDFEKDLLIPAVNGTKSILEAIKNYAADTVEKVVITSSVAALASPGDMKDTSFVVNEESWNKDTWESCQANAVSAYCGSKKFAEKTAWDFLEENQSSIKFTLSTINPGFVFGPQLFADSLRNGINSSSAIIANLVSYKLGDNFYNYSGPFIDVRDVSKAHLLAFEKPECAGQRLFLCEDMFCSQEALDILNEEFPQLKGKIATGEPGSGSTFLTKNCCKCDNRKTKNLLGFQFNKFRDCIVDTASQLLEVQSKS

SEQ ID NO: 23386 - protein, 158 aa, Legionella pneumophila subsp. pneumophila str. Philadelphia 1
MNSCIIMHFKLISLECMMAKELTLSIIKPDAVAKSVIGEIYTRFEKAGLDIVAAKMTQLSREQAESFYDIHRARPFFKDLVDFMISGPVMIQVLKGENAVAKNREIMGATNPKEAAPGTIRADFADSIDANAVHGSDSLENAAREIAFFFEQHELCNR

SEQ ID NO: 23387 - protein, 392 aa, Cryptococcus neoformans var. neoformans JEC21
MTIAITSIPASKYRAHYDPTKVLQHPEFQTLAEDAPELSDPDLNIACAYNPSHEIHMIKKPRFEPGPGEVTIHVRATGICGSDVHFWKHGHIGPTMIVTDECGAGHESAGEIVAIGEGVTQWQVGDRVAIEAGVPCGLASCEPCRTGRYNACPADVFFSTPPYHGTLTRYHNHPAAWCHRLADNMSYEEGSLCEPLTVALAGIDRAGVRLGDPIVICGAGPIGLVTLLAAHAAGCTPIVITDLFASRLEFAKKLLPTVKTVLIEKTAKPEEVAKQIKDVAGMQLSIALDCTGVESSIRSAIFSVKFGGKVFVIGVGPSEQSYPFGYCSAREIDLQFQYRYNNQYPKAIRLISGGLVDLKPLVTHRFTLKEAVKAFHVAADPSQGAIKVQIHD

SEQ ID NO: 23388 - protein, 512 aa, Pseudomonas fluorescens PfO-1
MNSTLGSGIIPRRTIGVLAASLLTLSVNAAPLTRDNGAAVGDNQNSQTAGANGPVLLQDVQLIQKLQRFDRERIPERVVHARGTGAHGTFTTTNDLSDLSKAKVFTAGQVTPVFVRFSAVVHGNHSPETLRDPRGFATKFYTADGNWDLVGNNFPTFFIRDAIKFPDMVHAFKPDPRTNLDDDSRRFDFFSHVPEATRTLTELYSNSGTPASYREMDGNSVHAYKLVNAKGDVHYVKFHWKSLQGIKNLDPKQVEKVQGRDYSHMTHDLVENIQKGNFPKWDLYIQVLNPQDLSKFEFDPLDATKIWPGVPERKVGQMVLNRNPANVFQETEQVAMAPSNVVPGIEPSEDRLLQGRIFAYADTQMYRLGANALQLPINAAKTAVNNGNQDGAMNAGASTSGVNYEPSRLQPREETAGARYSQTALQGSTQQAKIQREQNFKQAGDLYRSFSKKERQDLIESFGGSLASADDESKHIMLSFLYKADPEYGAGVTKVAKGDLSRVKALAAKLAD

SEQ ID NO: 23389 - protein, 189 aa, Triticum aestivum
GHQAWAYLQDMQSNIDLVLTEVFMHGGLSGIDLLGRIMNHEVCKDIPVIMMSSHDSMGTVLSCLSNGAADFLAKPIRKNELKNLWAHVWRRSHSSSGSGSGSAIQTQKCTKSKSADDSNNNSNNRNDDASMGLNARDGSDNGSGTQSSRTKRAVEIDSPQDMSPDQSVDPPDSTCAHVSHLKSEICSNR

SEQ ID NO: 23390 - protein, 319 aa, Ralstonia solanacearum
MTQLDQLKQFTTVVADTGDFQAMRAYAPHDATTNPSLILKAVQKAEYRPLLEQAVRDARSDSVEDIIDAVLVAFGCEILSIIPGRVSTEVDARLSFDTAATVAKARHLIALYEARGVPRERVLIKIASTWEGIRAADQLRAEGIRCNMTLLFSLIQAVACAEAGVQLISPFVGRIYDWYKKDAGAAWDPIAQGGANDPGVQSVVRIYNYYKRFGYTTEVMGASFRNTSQIIELAGCDLLTISPELLAQLQQSDAPVERKLSPEHAHATNLVRLPADEAAFRWHMNADAMATEKLAEGIRLFAADAVKLEGLIGPLRAAA

SEQ ID NO: 23391 - protein, 294 aa, Saccharomyces cerevisiae
TTPLVHVASVEKGRSYEDFQKVYNAIALKLREDDEYDNYIGYGPVLVRLAWHTSGTWDKHDNTGGSYGGTYRFKKEFNDPSNAGLQNGFKFLEPIHKEFPWISSGDLFSLGGVTAVQEMQGPKIPWRCGRVDTPEDTTPDNGRLPDADKDADYVRTFFQRLNMNDREVVALMGAHALGKTHLKNSGYEGPWGAANNVFTNEFYLNLLNEDWKLEKNDANNEQWDSKSGYMMLPTDYSLIQDPKYLSIVKEYANDQDKFFKDFSKAFEKLLEDGITFPKDAPSPFIFKTLEEQGL

SEQ ID NO: 23392 - protein, 414 aa, Candida glabrata CBS138
MNAAAEGLSQVSKGQSPNWKSLILSESNIDRITKKFSQMRGAALKIGQMMSFQDEKILPRELYEILSRVQNSANYMPRRQLEKVMTKELGDNWEAKFKSFDKIPIAAASIGQVHNGELLDGTKIVVKVQYPGVKDSIDSDLNNLLLLLTASRLLPKGLFLDKTVANARTELKWECDYIREAKALQRFELLLKDDPVFVVPHVYEEFTTENVLTMSRMEGTEIMNLKNESNSQEIRNFISENIMRLCLEEIAVFEFMQTDPNWANFLYNAKTNKIELLDFGASRPFPSDFIKKYRKLLTYATQENRAGAYEMSKELGYLTGLESQSMKDAHVDSVMTLGEPFRGSVEDVFDFANQTVSDRIRGNIGLMVNERLCPPPEETYSLHRKFSGIFLLCARMEASVHCAKLFSKYFALKE

SEQ ID NO: 23393 - protein, 463 aa, Mycobacterium avium subsp. paratuberculosis K-10
MHRLVASVIDTVVNLAKRRGFVYPSGEIYGGTRSAWDYGPLGVEFKENIKRQWWRSVVTGREDVVGLDSSIILPRQVWVASGHVEVFHDPLVESLITHKRYRADHLIEAYEAKHGHPPPNGLADIRDPDTGEPGRWTEPREFNMMLKTYLGPIETEEGLHYLRPETAQGIFVNFANVVTTARKKPPFGIGQIGKSFRNEITPGNFIFRTREFEQMEMEFFVEPSTAKEWHQYWIDTRLQWYVELGIDPQNLRLFEHPADKLSHYSDRTVDIEYKFGFAGNPWGELEGVANRTDFDLSTHSKHSGVDLSFYDQATDSRYIPYVIEPAAGLTRSFMAFLIDAYVEDEAPNAKGKMEKRAVLRLDPRLAPVKAAVLPLSRHADLSPKARDLAAELRRFWNIEFDDAGAIGRRYRRQDEIGTPFCVTVDFDSLEDNAVTVRRRDDMSQERIGMDAVADYLSARLKGC

SEQ ID NO: 23394 - protein, 447 aa, Sclerotinia sclerotiorum
MREIVHLQTGQCGNQIGAAFWQTISGEHGLDSNGVYNDTSELQLERMSVYFNEASGNKYVPRAVLVDLEPGTMDAVRAGPFGQLFRPDNFVFGQSGAGNNWAKGHYTEGAELVDQVLDVVRREAEGCDCLQGFQITHSLGGGTGAGMGTLLISKIREEFPDRMMATFSVVPSPKVSDTVVEPYNATLSVHQLVENSDATFCIDNEALYDICMRTLKLSHPSYGDLNHLVSAVMSGVTTCLRFPGQLNSNLRKLAVNMVPFPRLHFFMGGFAPLTSRGAHSFRAVTVPELTQQMYDPKNMMAASDFRNGRYLTCSAIFRGKVSIKEVEDQMRNVQNKNSSYFVEWIPNNVQTALCSIPPRGLKMSSTFVGNSASIQELFKRVGDQFTAMFRRKAFLHWYTGEGMDEMEFTEAESNMNDLVSEYQQYQDASISEGEEEYEEEAPIEGEE

SEQ ID NO: 23395 - protein, 430 aa, Bacillus clausii KSM-K16
MGNWTKSIEAFKEAQPLMPGGVNSPVRAFKSVGMNPVYMKEGKGAKIKDIDGNEYIDYVLSWGPLILGHANDVVVEELKKATELGTSFGAPHEYETRLAKLVIERVPSIDVVRMVNSGTEATMSALRLARGYTGRNKILKFVGCYHGHGDSLLIKAGSGVATLGLPDSPGVPESVAQNTLTVHYNDVESVRYVFETFGDDLAAVIVEPVAGNMGVVPPEPGFLETLRTWTEENGTLLIFDEVMTGFRVGYTCAQGEFGVTPDLTCLGKVIGGGLPVGAFGGKREIMEQIAPSGPIYQAGTLSGNPLAMTAGYYTLSQLTKADYSEFARKAERLEAGLSAAAKQHGIPHSINRAGSMIGLFFTDERVYNFEKAQTSDLDLFAAYFRGMLAEGISLAPSQFEGLFLSTAHSNEDIEATIAAAERVFQAIATK

SEQ ID NO: 23396 - protein, 252 aa, Bacillus clausii KSM-K16
MKPLKGKHILITRDERQNERWAAELAVLGAIPHSLPLIQCVTRNLTPALRETFAHLHQFAWVVFTSANGVRAFFDLYKGQPFMAKVAAVGPKTAQLLEEQGLHCDFIPSEYTGEALAKELVPLLAPHSDVLVVKGQLAKRTVCDILSSSDRQATVTEMIVYDTLCPAGAEEQAKRLQQKTFDYVTLTSTSAAVHYANVAPAAGIRAKTIACIGPVTARAAKQCGLSPLVTASEYTVKGLIDTILNDIGGMKR

SEQ ID NO: 23397 - protein, 383 aa, Pyrococcus furiosus DSM 3638
MEFEEAFKEVYELVKPKYKLFTAGPVACFPEVLEIMKVQMFSHRSKEYRAVHVDTVKRLKNFLEAEKGEVLLVPSSGTGIMEASIRNGVSKGGKVLVTIIGAFGKRYKEVVESNGRKAVVLQKDPGKAVKPEELDDALRKNPDVEAVTITYNETSTGVLNPLPELAKVAKEHDKLVFVDAVSAMGGADIKFDKWDLDVVFSSSQKAFGVPPGLAIGVFSERFLEIAEKMPERGWYFDIPLYVKYLKEKESTPSTPPMPQVFGLNVVLRIIEKMGGKEKWLEMYEKRAKMVREGVKEIGLGILAEPGYESPTITAVLTPPGIKGDEVYEAMRKRGFELAKGYGSVKEITFRIGHMGYMTFDDIREMLDNLREVIEELKREKGIA

SEQ ID NO: 23398 - protein, 653 aa, Ustilago maydis 521
MSRSRSPLAGTSRSASPLPSSSYRIERLDTTSKDLMVTSRSKRSTAGNRLKALLDQELEKDEIFAEVENDVDFEANDNEAVDIVDSDFDRDSDEDRPAQDESEGEREIERQEKEDKRRRRAQARTVGVVKRPFTATAIAQKTPNSAGAEEPKKRRISFAPDHTSSPGTIDAAKRRSSARAATVQSKREVESRLEEASQRRAAQPFKHVVKKKASLTQDALIAEALEVEEENRESLRRFLEQEEERRAKQRQRKERITGPFVRWMSVGFKTKVVEEIRAADQASGGAADTGGQQANAAAVAEHPRSASSVHSAEGEKCEESGAGADVPDSQVAISIPAPLQASADIQNRDTDAGPLAKAALSGTMGTNSLASASASTAESLTLDPVIAARQQAALLRSCTNTHDASTSTSAEATTSGIRFELQARTLLSIERMPEDWEWLDEHNALFGTHCAWDAYPFVPSRNRPLRPRQSICPITGLPAIYKDPRTGIAYGSKHAYAVITRLLHAKWLWTGGHYQDSPQIMEPKPKSKIKHLASIPAGAVPPQSGIYLDDEDERGATDIWLTARATLPAPNPTHPPTHPPTHPFPSARTSEPSACTTTTTPSKLTDKRRSKPHFEVVLTNALAPGDEKAVLAAALELPAGSTRSGRRGRVQRS

SEQ ID NO: 23399 - protein, 466 aa, Escherichia coli O157:H7 EDL933
  misc_feature (345)..(345): Xaa can be any naturally occurring amino acid
  unsure (1)..(466): unsure at all Xaa locations
MGQSSQPHELGGGLKSRHVTMLSIAGVIGASLFVGSSVAIAEAGPAVLLAYLFAGLLVVMIMRMLAEMAVATPDTGSFSTYADKAIGRWAGYTIGWLYWWFWVLVIPLEANIAAMILHSWVPGIPIWLFSLVITLALTGSNLLSVKNYGEFEFWLALCKVIAILAFIFLGAVAISGFYPYADVSGISRLWDSGGFMPNGFGAVLSAMLITMFSFMGAEIVTIAAAESDTPEKHIVRATNSVIWRISIFYLCSIFVVVALIPWNMPGLKAVGSYRSVLELLNIPHAKLIMDCVILLSVTSCLNSALYTASRMLYSLSRRGDAPAVMGKINRSKTPYVAVLLSTGAXFLTVVVNYYAPAKVFKFLIDSSGAIALLVYLVIAVSQLRMRKILRAEGSEIRLRMWLYPWLTWLVIGFITFVLVVMLFRPAQQLEVISTGLLAIGIICTVPIMARWKKLVLWQKTPVHNTR

SEQ ID NO: 23400 - protein, 505 aa, Oryza sativa; identical to SEQ ID NO: 928

SEQ ID NO: 23401 - protein, 965 aa, Phalaenopsis equestris
  misc_feature (212)..(212): Xaa can be any naturally occurring amino acid
  unsure (1)..(965): unsure at all Xaa locations
MSRSTVERHASIDAQLRLLAPRKVSEDDKLVEYDALLLDRFLDILQEIHGEDIRETVQECYELSAEYEATHDSKKLEELGHVLTSLDPGDSIVVAKSFSNMLNLANLAEEVQIAFRRRIKLKKGDFVDENSAATESDIEETLRRLVHELKKSPEEVFDALKNQTIDLVFTAHPTQSVRRSLLQKHGRIRNWLLQLYAKDITPDDEQELDETXQREIQAAFRTDEIRRTAPTPQDEMRAGMSYFHETIWKGVPKFLRRVDTALKNIGINERVPYNAPLIQFSSWMGGDRDGNPRVTPEVTRDVCLLARMMAANLYFSQIEDLMFELSMWRCSDELRVRADELHRASKKDAKHYIEFWKQVPPNEPYRVVLADVRDKLYNTRERSRHLLSSGSSDIPEETTLTNVEQFLEPLELCYSSLCTCGDRPIADGSLLDFMRQVSTFGLSLVRLDIRQESDRHTDVLDAITTHLGIGSYRDWSEEQRQEWLLSELSGKRPLFGPDLPKTEEIADVLDTLRVIAELPHDSFGAYIISMATAASDVLAVELLQRECQVKKPLRVVPLFEKLADLEAAPAALSRLFSINWYRNRIDGKQEVMIGYSDSGKDAGRLSAAWQLYKAQEDLIKVAKEFGVKLTMFHGRGGTVGRGGGPTHLAILSQPPDTIHGSLRVTVQGEVIEQSFGEEHLCFRTLQRFTAATLEHGMHPPISPKPEWRALLDEMAVVATKEYRSIVFQEPRFAEYFRLATPETEYGRMNIGSRPSKRKPSGGIESLRAIPWIFAWTQARFHLPVWLGSGTAFKHVVAKDIKNLYMLQEMYNEWPFFRVTIDLVEMVFAKGDPGIAALYDKLLVSDDLWSFGERLRANFEETKTLLLQVAGHRDLLEGDPYLKQRLRLRDAYITTLNVCQAFTLKRIRDPSFHVNLRSHLSREIMNSNKPAAELVKLNPTSEYAPGLEDTLILAMKGIAAGLQNTG

SEQ ID NO: 23402 - protein, 296 aa, Zea mays
  misc_feature (37)..(37): Xaa can be any naturally occurring amino acid
  misc_feature (123)..(123): Xaa can be any naturally occurring amino acid
  misc_feature (136)..(136): Xaa can be any naturally occurring amino acid
  misc_feature (151)..(151): Xaa can be any naturally occurring amino acid
  unsure (1)..(296): unsure at all Xaa locations
MSPPLLSRLRLVTVDVTGTLIAYRGQLGDYYCMAANXHAKMPCPDYGRVHEGFKLAYPDMGRMHPCFGHAAAMPAAAWWRMCVRDSFEFVRAGYDYDDETFDRIFRRIYSTFGSAAPYAVFPXYARRFLRWLRAGXGLVVGIVSNAEHRYXRDVVLPALGLNQGSEWDFGVFSGVVGVEKPDPRIYEAALRQAAGGGGGVAPGEALHIGDSMRKDYARPGAERWRRSGAPVLPDLVAAQEWLAGGARSQGGIEGQLAPGRPVLLARSSKCLGQQTRIGAIIPALGITECPDIDVVV

SEQ ID NO: 23403 - protein, 476 aa, Lycopersicon esculentum
FYNFSKKLQGMAKTNGFMGHDMLAPFTAAWMIDMGPLVIDKAEGSYVYDVNGKKYLDSLSGLWCSVLGGSEPRLIEAANKQLNKLAFYHSFWNRTTKPSLDLAKELINMFTANKMGKVFFTSSGSEANDTQVKLVWYYNNAIGRPNKKKIISRKNAYHGSTYMTAGLSGLPSLHLKFDLPPPYILHTDCPHYWNYHLPGETEEEYSTRLANNLENLILKEGPETVAAFIAEPVMGGAGVIIPPATYFEKIQAVLKKYDILFIADEVICGFGRLGTMFGCDKYNIKPDLVSIAKALSGGYIPIGAVLVSEEISKVIMSQSNQLGVFCHGFTYSGHPVACAVALEALKIYKEKNITEVVNKLSPKFQEGLKAFIDSPIIGEIRGTGLVLSTEFVDNKSPNDPFPPEWGVGTYFGSQCQKHGMLVSFSGDHVNMAPPFTLSLEELDEMISIYGKALKDTEKKKKKKKKKKKKKKKKKKK

SEQ ID NO: 23404 - protein, 965 aa, Phalaenopsis amabilis
  misc_feature (212)..(212): Xaa can be any naturally occurring amino acid
  unsure (1)..(965): unsure at all Xaa locations
MSRSTVERHASIDAQLRLLAPRKVSEDDKLVEYDALLLDRFLDILQEIHGEDIRETVQECYELSAEYEATHDSKKLEELGHVLTSLDPGDSIVVAKSFSNMLNLANLAEEVQIAFRRRIKLKKGDFVDENSAATESDIEETLRRLVHELKKSPEEVFDALKNQTIDLVFTAHPTQSVRRSLLQKHGRIRNWLLQLYAKDITPDDEQELDETXQREIQAAFRTDEIRRTAPTPQDEMRAGMSYFHETIWKGVPKFLRRVDTALKNIGINERVPYNAPLIQFSSWMGGDRDGNPRVTPEVTRDVCLLARMMAANLYFSQIEDLMFELSMWRCSDELRVRADELHRASKKDAKHYIEFWKQVPPNEPYRVVLADVRDKLYNTRERSRHLLSSGSSDIPEETTLTNVEQFLEPLELCYSSLCTCGDRPIADGSLLDFMRQVSTFGLSLVRLDIRQESDRHTDVLDAITTHLGIGSYRDWSEEQRQEWLLSELSGKRPLFGPDLPKTEEIADVLDTLRVIAELPHDSFGAYIISMATAASDVLAVELLQRECQVKKPLRVVPLFEKLADLEAAPAALSRLFSINWYRNRIDGKQEVMIGYSDSGKDAGRLSAAWQLYKAQEDLIKVAKEFGVKLTMFHGRGGTVGRGGGPTHLAILSQPPDTIHGSLRVTVQGEVIEQSFGEEHLCFRTLQRFTAATLEHGMHPPISPKPEWRALLDEMAVVATKEYRSIVFQEPRFAEYFRLATPETEYGRMNIGSRPSKRKPSGGIESLRAIPWIFAWTQARFHLPVWLGSGTAFKHVVAKDIKNLYMLQEMYNEWPFFRVTIDLVEMVFAKGDPGIAALYDKLLVSDDLWSFGERLRANFEETKTLLLQVAGHRDLLEGDPYLKQRLRLRDAYITTLNVCQAFTLKRIRDPSFHVNLRSHLSREIMNSNKPAAELVKLNPTSEYAPGLEDTLILAMKGIAAGMQNTG

SEQ ID NO: 23405 - protein, 406 aa, Parachlamydia sp. UWE25
MSFEIRDPMPFFNNISLLPPDPILNLSIDFSLDQNPQKINLSAGTYKTADGHSLVFTSVRKAEIDLLQKHLNKDYQPIEGNSVFLKNSLELLFGSDHALFTNKKFFAVQTVGGTSALRLGGEFLNKLTCQKIFISQPSWPNHKQVFEKTGLKIDSYPYFDFNAYKLNFSGMCQAIRQMPTGSVILLHGCCHNPSGVDPTFEQWKELSQLIKKHELIPFFDIAYQGFGKDLELDAQPIRYFASEGHEMLIAYSFSKNFGLYGERVGFLTVVTSQQKQIPSIASQLKVLIRANYSNPPLQGARIVSTILSSPELTEEWKIELKNMRDRVVEMRKTFIASLLVKGEDKNLNYLQQQIGLFGFCGLNYSQVNRLRKEFAIYIPSDGRINIAGLNTQNIEYVVNAISSVME

SEQ ID NO: 23406 - protein, 458 aa, Silicibacter pomeroyi DSS-3
MTFTRRHVLKTATACALMPRLAEAAPITLTAMEARQQIAPEGYPDTAIWGYEGGAPGPEIRVAQGGRLSRRLINRLPQPTAVHWHGIRIDNAMDGVPGLTQQAVPTGGSFDYDFTLPDAGTYWYHSHNRSMEQVARGLHGPLIVDEASAPDIDGEHVLVLDDWRLDPDTAAIGANFDNGHDLSHAGRIGNLLTVNGRFDPAFRARPAERLRLRLINAANARVFEVGLDGMQGWIVALDGMPLEEPLVVSGAFPLAPAQRADLIVDITAETGASASLLSIERDGGYGLCRFDVSGQGAGAARAAPAPLPPNPLPVIEGLADSPLHQMRLQGGAMRWLDSALLGETEMSGRELAQLGKFWALDGRADRSATPFLEAARGSLHRIAFVNETGFDHGMHLHGHHFRLIAPNGALGPWRDTVLVAPGETRQIALVADNPGDWLLHCHMLGHAAAGMTSWFRVT

SEQ ID NO: 23407 - protein, 889 aa, Shewanella sp. MR-4
MAGNVADNVTDMYASLRSNVSMLGQILGDTMRTHLGDSFLEKVEQIRKLAKDSRRGDEAAREQMLELLTALPDEELVPFAKAFNQFLNLANLSEQFHTISRNCDELVCVPDPVEQLLGRMLNGRIDQTKMLDCLKTLDIDLVLTAHPTEISRRTLIQKYAAIVDCLAEQENNQLSDRERRQINLRLRQLIAQIWHTNEIRRERPTPVDEARWGLSTIEESLWHAVPDFLRQLNDQVQDRTGQQLPIDIAPVRFSSWMGGDRDGNPFVTAKVTQEVLDRNRHAAARLFLKDIVLLVGELSMEEANSELMAYTNNSCEPYRFVLRSLRQKLRDTIDYLNARIEGHNPEVDKSTLIWQESDLKAPLEMLYKSLCDCGMRLIANGLLLDILRRLACFGIHMLRLDIRQDAGRHCDVLAELTRYLGMGDFNHWDETEKQAFLLRELSNRRPLIPSNWQPSADVAEVLNTCRLIAKHPAKALGSYVISMASKPSDVLTVLLLLKETGCTHPMRVVPLFETLSDLNNAAECITALLDIDWYRGYTKGMQEVMIGYSDSAKDAGVMAAAWAQYRAQEQLVAVCKQAGVKLTLFHGRGGSIGRGGGPAHKAILSQPLGSVDGRIRVTEQGEMIRFKFGLPKLAVQSLALYTSAVLEATLLPPPEPKQEWRNCMERIAEESVSAYRGIVREEPDFVPYFRAATPEVELGKLPLGSRPAKRRVDGGIESLRAIPWIFAWSQNRLMLPAWLGAGEALQAACQRGEMGLLQDMEREWPFFSTRISMLEMVYAKAEPNLARYYETCLVPPNLHHLGETLRQRLDLGIKVVLELTKSDTLMAHTPWNRESVKLRNPYIDPLNFLQTELLARTRKETTEAPASEHVQLALMLTIAGVAAGMRNTG

SEQ ID NO: 23408 - protein, 497 aa, Geobacillus thermoleovorans
MTMISAQTTEADLWIDGEWRPAASGERFDVIDPATGEVTARVANAGEDDVDAAVAIAEEAFSVRRWLAISPLERGRILRRIAELIRQHHCELAQLMTRENGMPINLALFIEIPLADCFDFFASLVVKPQGEVLPFSVAGSAPDYMAWTMKEPIGVAGLITPWNFPLLMPTWKIAPALAAGCTMVVKPAPETPLTALKLAEICHEAGVPEGVINVLPGLDEAGKALVRHPRVPKIAFTGETETGRHILQAAAPHIKRVTLELGGKSPNIIFADADLEQAAKSALFGVFYNSGQVCQAGSRILVERTVYEPFVERLAERAKKLKVGPGTNPRSDLGPVISREQYEKVLRYIEIGKQEGARLAAGGRALDGGGGGYFIEPTVFADVSPSMRIACEEIFGPVAAVIPFADEEEAVRIANGTMYGLAAAVWTNDIKRALRLARRVKSGTVWLNTYQVLSPTVPFGGYKQSGLGRELGMQALDAYLETKTVICDLNDRPMTLF

SEQ ID NO: 23409 - protein, 340 aa, Silicibacter pomeroyi DSS-3
MRVYYDRDCDINLIKDKKVAILGYGSQGHAHALNLRDSGAKNLVVALREGSASAKKAEGEGLTVMGIAEAAAWCDVIMFTMPDELQAETYKKYVHDNIRPGAAIAFAHGLNVHFGLIEPKEGVDVIMMAPKGPGHTVRGEYTKGGGVPCLVAVHTDATGKALEIGLSYCSAIGGGRSGIIETNFREECETDLFGEQAVLCGGLVELIRCGFETLVEAGYAPEMAYFECLHEVKLIVDLIYEGGIANMDYSISNTAEYGQYVTGPRILPYEQTKASMKAVLTDIQQGKFVRDFMLENAVGQPTIKASRRANDEHQIEQVGQKLRDMMPWISAGKMVDKSKN

SEQ ID NO: 23410 - protein, 541 aa, Methanocaldococcus jannaschii
MCSISGIIVKDNQISAKYSIDMMKILKHRGRDNSGLLLDDEVIYFNDFEDVEDLEEEMIGNLSLAHNRLAIVGRYGVQPIPNEDETIWLVCNGEIYNYIELREYLKQNHEFRTDSDNEVIIHLYEEEKLEELDGDYAFAIYDKSKNVVRLARDMFGVKPLFYVDRDKYFAFASERKALWHLLINIDGCERDLDELNSKIKTLKPNSQLIYYLDDNRFEIIEGFKKLELNYMKERSYEEAKEYLDRALKNSVLKRVRGLDKVGIICSGGVDSSLIAKLASLYCEVILYAVGTENSEDLIYAERLAKDLNLKLRKKIISEEEYEEYVFKVAKAIDEVDLMKIGVGIPIYVASEMANEDGLKVVLSGQGADELFGGYARHERIYRERGEEELKKELLKDVYNLYKVNLERDDHCTMANGVELRVPFLDEEVVEIALSIPIEYKMSELSNRPYAESNISLKSEPINGLKNTNLNIKCVRSVRKKILRDVASQYLPDYIAYRPKKAAQYGSGGEKMIYKVAKKYGFSKKRINEFLDMLKRKIVSEF

SEQ ID NO: 23411 - protein, 309 aa, Burkholderia fungorum LB400
MLPAYISHRDCVKHEMGPMHPESPDRIGAIHDMLLIKGLLDCMQTYEAPLATEEQLAQAHSLPYIRSIAGMAPLEGYVRVDPDTSMNPYTYQAALRAAGAAVLATDLVLAGEACCAFCNIRPPGHHAKYAAAGGFCFFNNVAVGIRHALNVHGLTRVALIDFDVHHGDGSEDILHADARVLMCSIFEDKLYPFCGNEPRGSNMVNVPLPTRSYGDVFRAAVTEKWLPALEAFRPEMIFISAGFDGHREDDMGNLGLVEADYAWVTGRLVDIARRHSGGRIVSCLEGGYELSSLARGVAAHVRELIGMDC

SEQ ID NO: 23412 - protein, 48 aa, Zea mays
IAIILAIILPPLGVFLKFGCGVGFWICLILTFLGYFPGLIYAAWAITK

SEQ ID NO: 23413 - protein, 364 aa, Legionella pneumophila subsp. pneumophila str. Philadelphia 1
MLTRSHVMTTVAQFEITYTQYLNEQGKLVAELPPFADNQSILKELYKIMVLTRTFDKKAIALQRTGKMGTYAPINGQEAISTAIGHALKPEDVLVPYYRDYAAQFQRGVKMSEILAFWGGDERGSHYSNNAEDLPICVPIASQCLHAAGVAFAFKYRNQPRVAVVCIGEGGTSEGDFYEAMNVAGAWKLPVVFVVNNNKWAISVPIEKQTGSQTIAQKAIAAGFSGVQIDGNDIFAARQVIGDAIEKARQGGGPTLIEALTYRLCDHTTADDATRYQPSHEVEEAKAKEPIVRFKHYLMQQNIWTSQDEEKLVIECSETVEKAVEEYLNTKPQPVSSIFDYHYAELPEYLIEQRAIAMEEYSHA

SEQ ID NO: 23414 - protein, 76 aa, Triticum aestivum; identical to SEQ ID NO: 902

SEQ ID NO: 23415 - protein, 399 aa, Burkholderia vietnamiensis G4
MYAFTPSFQNPAGSPIRELFKYLSEPGMISFAGGYPASELFDVDGLNAAAERAYAQPVRCLQYGPTDGLAELKQQLIALMARRNVTCTPAELLVTTSSQQGLDLLLRVMVAPGDVVLTEQPAYPATLAALRLQQAHVVTIPVDGHGLDVERLASQLEAGAIARPKLLYTVPTFANPTGATLSRERRMKLLRLAVQYRFLIVEDDPYGDLRFAGEAVPSMLALASEVDGARDWIVHFASLSKIVAPGLRVGWTIAPAEIARRCVIAKQTVDLCSTPWTQAIAAEYLADGALERHLPRITAAYRRKCDALCDALRDGFGAAIAFHRPEGGMFVWARLGDVSSDALLQRAIANQVVFVPGKAFFADHVDAASLRLSFAAPDVDAIREGVARLVRAYRAALAA

SEQ ID NO: 23416 - protein, 417 aa, Saccharomyces cerevisiae; identical to SEQ ID NO: 850

SEQ ID NO: 23417 - protein, 201 aa, Shewanella sp. MR-4
MKLLKPLFDNNRRWAGRIRQEHPDFFEQLAKQQNPEYLWIGCSDSRVPSNQIIDLMPGEVFVHRNIANMVIHTDLNCLSVLQYAIDVLKVKHIMVVGHYGCGGVRAAMGNQRLGLIDNWLGHLRDVYRLHQDELMQMDEAKRFDRLCELNVIEQVANVTSSTIVQEAWARGQELAIHGWIYGIDNGLLTDLDVTVDRAQKI

SEQ ID NO: 23418 - protein, 294 aa, Oryza sativa
MEQYEKEEKIGEGTYGVVYKARDKVTNETIALKKIRLEQEDEGVPSTAIREISLLKEMHHRNIVRLHDVIHSEKRIGLVFEYLDLDLKKFMDSCPEFAKNPTLIKSYLYQILRGVAYCHSHRVLHRDLKPQNLLIDRRTNTLKLADFGLARAFGIPVRTFTHEVVTLWYRAPEILLGSRQYSTPVDMWSVGCIFAEMVNQKPLFPGDSEIDELFKIFRVLGTPNEQSWPGVSSLPDYKSAFPKWQAQDLATIVPTLDPAGLDLLSKMLRYEPNKRITARQALEHEYFKDLEMVQ

SEQ ID NO: 23419 - protein, 650 aa, Ralstonia solanacearum
MSPLNFPSDRPIDLACLGRVAVDLYAQQIGSRLEDARSFQMYLGGSSGNVAFGVARLGLKTAMISRVGDEQMGRFLRETLEREGCDTSQLQTDPERLTALVLLGLKDRDTFPLLFVRENCADMAVRADGIDEGFIAGCRALAITGTHLSTPTTREASLTALAYARRHGAVRILDIDYRPVLWGLTSRGAGEHRYVPDAHVTRQLQQALGEFDLLVGTEEEFLIAGGVPRDLMASLRAVRQISGAVLVVKRGALGCCVIEGAVPERIEDAPTFPGERVEVLNVLGAGDAFLSGLLSGLLRGKGWAESARIANACGAIVVSRHACSAAMPTPAELAHWFGGSRHPGVDADRELAHLHRVTVARPHWDDLCVMAFDHRSQFYDLAVQAGAGESRIKTLKQLLVRAAEQVERERALHGHVGVLIDGGAYGSDALASATGRGWWVGRPVELPGSRPLRFDDTRSVGSALIHWPTEQVVKCLVHYHPDDPATLRVDQEQKVLELWEATRESGNELLLEIIPPRPFTLAGTEDDAVLRTVARVYNLGVRPEWWKLAPMSADGWTQLEALITERDAHCRGAVILGLNQPLQYLVDSFRSATNPIVKGFMVGRTLWADASLKWLRGDISDQAFIDEVAGNFAQLADAWLGRRADARSAA

SEQ ID NO: 23420 - protein, 323 aa, Candida glabrata CBS138
MRELTEEQRENIAIEQKLAVQSIRSFLQSKTSYDVLPVSYRLVVLDTALLVKKSLNVLLQNSIVSAPLWDSKTSRFAGLLTTTDFINVIQYYFSNPDKFDIVDKLQLDGLKEVEKAIGVDQLDTAYVHPSRPLYDACLKMLESRSGRIPLIDEDEETHREIVVSVLTQYRILKFVSLNCRETHLLQRPIGELGIISEQNMKFCHMSTPVIDVIQLLTQAGVSSVPITDENGVLINVYEAYDVLGLIKGGIYNDLSLSVGEALMRRSDDFEGVYTCTKNDKLSSIMDNIRKSRIHRFFVVDENGRLTGVLTLSDILRYILLGNN

SEQ ID NO: 23421 - protein, 328 aa, Campylobacter jejuni subsp. jejuni NCTC 11168
MKILISGGAGYIGSHTLRQFLKTDHEICVLDNLSKGSKIAIEDLQKTRAFKFFEQDLSDFQGVKALFEREKFDAIVHFAASIEVFESMQNPLKYYMNNTVNTTNLIETCLQTGVNKFIFSSTAATYGEPQTPVVSETSPLAPINPYGRSKLMSEEVLRDASMANPEFKHCILRYFNVAGACMDYTLGQRYPKATLLIKVAAECAAGKRDKLFIFGDDYDTKDGTCIRDFIHVDDISSAHLAALDYLKENESNVFNVGYGHGFSVKEVIEAMKKVSGVDFKVELAPRRAGDPSVLISDASKIRNLTSWQPKYDDLELICKSAFDWEKQC

SEQ ID NO: 23422 - protein, 462 aa, Erwinia carotovora subsp. atroseptica SCRI1043
MAEDVKQEKLHRGLEARHIELIALGGTIGVGLFMGAASALKWAGPSVLLAYIVAGIFVFFIMRSMGEMLYLEPVAGSFAVYAHKYMHPFFGYLTAWGYWFMWMAVGISEITAIGVYVQYWFPELPQWIPAIVAVALVAGANLAAVRLYGEIEFWFAMIKITTIVVMILVGVGIIFFGFGNHGQATGFSNLTEHGGFLAGGWKGLLFALCLVVASYQGVELVGITAGEAKNPQVTLKRAINNILWRILIFYVGAIFVIVTIFPWNEIGTSGSPFVLTFAKIGIVAAAGIINFVVLTAALSGCNSGMYSCGRMLYSLANNRQLPAWLGKVTASGVPAAGVMISILCLVAGSLLNYVIPNPEKVFVYVYSASVLPGMVPWFVVLISQLRFREQHRVALASHPFKSILFPWVNYLTMAFLLCVLVGMYINIDTRMSLLVGVAFLAVVSLCYFALGLGKKTSLAGGK

SEQ ID NO: 23423 - protein, 500 aa, Brassica napus
MDLAFPHVCLWTLLAFVLTWTVFYVNNRRKKVAKLADVATEVRRDGGADVIIVGAGVGGSALAYALAKDGRRVHVIERDMREPVRMMGEFMQPGGRLLLSKLGLEDCLEGIDEQIATGLAVYKDGQKALVSFPEDNDFPYEPTGRAFYNGRFVQRLRQKASSLPTVQLEEGTVKSLIEEKGVIKGVTYKNSAGEETTAFAPLTVVCDGCYSNLRRSVNDNNAEVISYQVGYVSKNCQLEDPEKLKLIMSKPSFTMLYQISSTDVRCVMEIFPGNIPSISNGEMAVYLKNTMAPQVPPELRKIFLKGIDEGAQIKAMPTKRMEATLSEKQGVIVLGDAFNMRHPAIASGMMVVLSDILILRRLLQPLRNLSDANKVSEVIKSFYVIRKPMSATVNTLGNAFSQVLIASTDEAKEAMRQGCFDYLSSGGFRTSGMMALLGGMNPRPLSLIFHLCGITLSSIGQLLSPFPSPLGIWHSLRLFGVSHYLPPYVIYIFFFVLYIL

SEQ ID NO: 23424 - protein, 481 aa, Arabidopsis thaliana
MALKALDYDTLNENVKKCQYAVRGELYLRASELQKEGKKIIFTNVGNPHALGQKPLTFPRQVVALCQAPFLLDDPNVGMLFPADAIARAKHYLSLTSGGLGAYSDSRGLPGVRKEVAEFIQRRDGYPSDPELIFLTDGASKGVMQILNCVIRGNGDGILVPVPQYPLYSATISLLGGTLVPYYLDESENWGLDVANLRQSVAQARSQGITVRAMVIINPGNPTGQCLSEANIREILKFCYNEKLVLLGDEVYQQNIYQDERPFISSKKVLMEMGSPFSKEVQLVSFHTVSKGYWGECGQRGGYFEMTNLPPRVVEEIYKVASIALSPNVSAQIFMGLMVNPPKPGDISYDQFARESKGILESLRRRARLMTDGFNSCKNVVCNFTEGAMYSFPQIRLPTGALQAAKQAGKVPDVFYCLKLLEATGISTVPGSGFGQKEGVFHLRTTILPAEDEMPEIMDSFKKFNDEFMTQYDNNFGYSKM

SEQ ID NO: 23425 - protein, 96 aa, Wolbachia endosymbiont of Drosophila ananassae
MSSISLNVLDDSVLIKPISEEKQGGIVLPSSAEKKPTKGEVIAIGEGSRNSSGERVTLTVKAGDKVFYRQWAGTEIEHNDEKLIVMKESDILAVIK

SEQ ID NO: 23426 - protein, 385 aa, Ipomoea batatas
KIFVLTQFNSASLNRHISRTYFGNGVSFGDGFVEVLAATQTQGETGMKWFQGTADAVRQFTWVFEGAKNKDIDNIVILSGDQLYRMDYMDLVQNHIERNSDITLSCATVGDSRASDFGLVKIDRRGRVVQFCEKPKGTDLKAMQVDTTLLGLPPQDARLNPYIASMGVYVFKTDVLFRLLRWRYPTSNDFGSEILPAAVMEHNVQAYIFRDYWEDIGTIKSFYDANLALTEEFPKFEFYDPKIPFYTSPRFLPPTKIDNCKIKDAIISHGCFLRECTVEHSIIGERSRLDCGVELKDTLMMGADTYETESEIASLLADGKVPIGVGENTKIRNAIIDKNVRIGKDVVITNKDGVQESDRPDEGFYIRSGITIIMEKATIRYGTVI

SEQ ID NO: 23427 - protein, 549 aa, Wolbachia endosymbiont of Drosophila ananassae
MTNVVVSGEQLQEAFREVAAIVDSTVAITAGPRGKTVGINKPYGAPEITKDGYKVMKGIKPEKPLNAAIASIFAQSCSQCNDKVGDGTTTCSILTSNMIMEASKSIAAGNDRVGIKNGIQKAKDVILKEIASMSRTISLEKIDEVAQVAIISANGDKDIGNSIADSVKKVGKEGVITVEESKGSKELEVELTTGMQFDRGYLSPYFITNNEKMIVELDNPYLLITEKKLNIIQPLLPVLEAIVKSGKPLVIIAEDIEGEALSTLVINKLRGGLKVAAVKAPGFGDRRKEMLEDIATLTGAKYVIKDELGIKMEDLTLDDLGTAKNVKITKDNTTVVSENSDSDSVKARIEQIKSQIETSTSDYDKEKLRERLAKLSGGVAVLKVGGATEVEVKERRDRVEDALHATRAAIEEGIVPGGGVALLYASSVLDKLKGASDEEQIGINIIKKVLSAPIRRLVKNAGLESAVIIDYLIKQNDKELIYNVEAMNYANAFTAGVIDPAKVVRIAFETAVSVASVLITTESMIVDVPSKENASSPMGAGEMSGMGGF

SEQ ID NO: 23428 - protein, 206 aa, Brassica napus
  misc_feature (151)..(151): Xaa can be any naturally occurring amino acid
  unsure (1)..(206): unsure at all Xaa locations
MASPPTIPVTNQQAAQSQPPINTPAFRTFFSRLSTSIRDGLSQRRPWAELVDRSSMARPESLTDALSRIRKNLAYFKVNYAAIVSLVLAFSLFSHPLSLLVLVGLLAGWMFLYVFRPADQPLVVFGRTFSDTETLLALPLCLIVLLGLLAXGCSSTSSVRRISRSSSSGAPSRILCLAVLAPALPALPSFRGGSATSAASAVAARV

SEQ ID NO: 23429 - protein, 402 aa, Pseudomonas putida KT2440
MENMHSAMDSLVHGSNTLFILMGAILVLAMHAGFAFLEVGTVRHKNQVNALSKILSDFAISALVYFFIGYWIAYGVNFFQPATTLAVDHGYALVKCFFLLTFAAAIPAIISGGIAERARFVPQLCATALIVAFVYPFFEGVVWNGNLGLQAWLQARFGAPFHDFAGSVVVHAMGGWLALAAVLLLGARRGRYRDGRLVAFAPSSIPFLALGSWILIIGWFGFNVMSAQTLQGVSGLVAINSLMAMVGGTLSALLAGRNDPGFLHNGPLAGLVAICAGSDLMHPVGALATGLVAGALFVWTFTAAQNRWKIDDVLGVWPLHGLCGVWGGIACGVFGQVALGGMGGVSLVSQLLGSLMGVLVALAGGFAVYGAIRALHGLRLSHEQEFQGADLSLHRIGATSQD

SEQ ID NO: 23430 - protein, 327 aa, Oryza sativa
WGSRLTSVRCKLRFCALHPTPELGPLRSLTSLSLWLVSITWAELECLLSNSLALGHLELAQCTKITCLKIPFALQQLSRLNVVECSGLKVIESKAPNLSSLFVRGSRVNFSLVETLQIKKLDMGHAICDARANLPSIMPNLETLVIESGHEVVDAPMLPTKFLYLKHLTIHMITGSTISRPYDYFSLVSFIDASPSLETLILNVTQVRMVHESIFTDSQLRHIPGHRHGHLKSVKITGFSSAKSLVELTCYILNNAVSLECLTLDTIYGPRCDQDKYRRCFPMIDGVLTDAPRGLAAIRTYIEDKVPSTVNLTVLEPCSRCHVRRRG

SEQ ID NO: 23431 - protein, 239 aa, Antirrhinum majus
MEFPNQDSESLRKNGRGKIEIKRIENITNRQVTFCKRRNGLLKKAYELSVLCDAEVALVVFSSRGRLYEYANNSVRATIERYKKASADSSNSVSTSEANTQFYQQEANKLRRQIREIQTSNRQMLGEGVSNMALKDLKSTEAKVEKAISRIRSKKNELLFAEIEHMQKRELELHNANMFLRAKIAEGERAQQQMNLMPGSDYQPMTSQSYDVRNFLPMNLMEPNQQQYSRHDQTALQLV

SEQ ID NO: 23432 - protein, 257 aa, Vicia faba var. minor
MVTGKNNELSKTPGASANGIHSKSGESASEGSSEGSDENSHNVLQDSQLKSGERQDSFEDEPSQNGSSAQAPQNGGLNTPHTVVNQTMSVVPMSVAGPIAAVAGPTTNLNIGMDYWGTPASSTIPAMHGKVPSTAVAGGMVNAGPRDGVHSQPWLQDERELKRQRRKQSNRESARRSRLRKQAECDELAQRADVLSEENASLRAELSRIKSEHAKALAENAALKVKQGEILRNEEIVPGQNDQLVEHVGGGETKQSG

SEQ ID NO: 23433 - protein, 437 aa, Arabidopsis thaliana
MAEIRQRRVLMVPAPFQGHLPSMMNLASYLSSQGFSITIVRNEFNFKDISHNFPGIKFFTIKDGLSESDVKSLGLLEFVLELNSVCEPLLKEFLTNHDDVVDFIIYDEFVYFPRRVAEDMNLPKMVFSPSSAATSISRYARSQLEETVPEFHPFRFKDLPFTAYGSMERLMILYENVSNRASSSGIIHNSSDCLENSFITTAQEKWGVPVYPVGPLHMTNSAMSCPSLFEEERNCLEWLEKQETSSVIYISMGSLAMTQDIEAVEMAMGFVQSNQPFLWVIRPGSINGQESLDFLPEQFNQTVTDGRGFVVKWAPQKEVLRHRAVGGFWNHGGWNSCLESISSGVPMICRPYSGDQRVNTRLMSHVWQTAYEIEGELERGAVEMAVRRLIVDQEGQEMRMRATILKEEVEASVTTEGSSHNSLNNLVHAIMMQIDEQ

SEQ ID NO: 23434 - protein, 202 aa, Triticum aestivum
  misc_feature (69)..(69): Xaa can be any naturally occurring amino acid
  misc_feature (81)..(81): Xaa can be any naturally occurring amino acid
  unsure (1)..(202): unsure at all Xaa locations
MVFGNIGSWAAQLITEAGGKVVSIRDVTGAVKNSNGIDIAKLMKHSAENRGIKGFDGGDPADPTSLLTXEECDVLIPAALXGGVINQDNADPIKAKYIIEAANHPTDPEADEILAKKGVLILPDILANSGGVTVSYFEWVQNIQGFMWDEEKVNRELKTYMTRAFRDTKEMCRSHHCDLRMGAFTLGVNRVARATVLRGWEA

SEQ ID NO: 23435 - protein, 784 aa, Oryza sativa (japonica cultivar-group)
MEAAAAAASAAPHLLHCGGFGRLPGLAASLPGRRRRRPSRRVLAVATEPKPSASAPAPRSRSRTRTPNDISSTRFGEVSKEIQRVRKQMEEDEQLATLMRGLRGQNLRDSQFADDNVRLRLVEVSSMNNNEALPLVYSPEIISAYWGKRPRAVATRIVQLLSVAGGFISHLISDLINNKLKENEVARAIELREIVTSLGPAYIKLGQALSIRPDILSPAAMTELQKLCDKVPSFSDDLAMTLLEEELGRPWHEIYSELSPSPIAAASLGQVYKGRLKETGELVAVKVQRPFVLETVTIDLFIIRNLGLVLRRFPQVSIDVVGLVDEWAARFFEELDYVNEGENGNRFAEMMKKDLPQVVVPKTYQKYTSRKVLTTQWIDGEKLSQSTEDDVGSLVSVGVICYLKQLLDTGFFHADPHPGNMIRTPDGKLAILDFGLVTKLTDDQKYGMIEAIAHLIHRDYDAIVKDFVKLGFIPEGVNLDPILPVLAKVFDQALEGGGAKNINFQELAADLAQITFDYPFRIPPYFALIIRAIGVLEGIALVGDPEFAIVDEAYPYIAQRLLTDESPRLRSALRYTIYGKTGVFDAERFIDVMQAFENFIRAAKSGGGENLKGSMAELAEIGTLPSTSLVPAFPMAISQPEQPVKARAALSFLLSERGDFFREFILDEIVKAIDAVSREQLIQIAASFGLGNATPVFSMVPVRARALLPTITEEDRVILNNVEKVVKFLTAGNNPTTIDGDVNVVYLVQELLPVLPSISSKILPEVMSRLSSRVFARLIREAFL

SEQ ID NO: 23436 - protein, 165 aa, Nostoc punctiforme PCC 73102
MPLVRWNPFRDSERLEPFRDTESWEPFREIDTLQRQMNRLFDRLMPTTNGGERSGFIFSPAAELEETDDAIRLRLEVPGLEAKDINVEATPESISITGERKTETKSEENGITRSEFRYGKFQRVIPLPSQIQNDKVQAEYKNGILQLTLPKAESEKHKAVKVNLG

SEQ ID NO: 23437 - protein, 225 aa, Lactobacillus sakei
EFGVKRIVFSSTAATYGEPKAIPIKESDPQVPTNPYGESKLMMETMMKWADKAYGIKFVALRYFNVVGAKPDGSIGEDHHPETHLLPIVLQVAAGKRDQLSIFGDDYDTPDGTNVRDYVHVLDLADAHILAFEYLKDGHDSNAFNLGSSTGFSNMEIVEAARKVTGKAIPVTMAPRRAGDPSTLIAASDKARETLGWAPKYDNMEAIIETAWNWHLNHPNGYADR

SEQ ID NO: 23438 - protein, 389 aa, Salmonella typhimurium
MTDTTILQNNTHVIKPKKSVALSGVPAGNTALCTVGKSGNDLHYRGYDILDLAEHCEFEEVAHLLIHGKLPTRDELNAYKSKLKALRGLPANVRTVLEALPAASHPMDVMRTGVSALGCTLPEKEGHTVSGARDIADKLLASLNSILLYWYHYSHNGERIQPETDDDSIGGHFLHLLHGEKPTQSWEKAMHISLVLYAEHEFNASTFTSRVIAGTGSDVYSAIIGAIGALRGPKHGGANEVSLEIQQRYETPDEAEADIRKRVENKEVVIGFGHPVYTIADPRHQVIKRVAKQLSEEGGSLKMYHIADRLETVMWETKKMFPNLDWFSAVSYNMMGVPTEMFTPLFVIARVTGWAAHIIEQRQDNKIIRPSANYTGPEDRPFVSIDDRC

SEQ ID NO: 23439 - protein, 217 aa, Corynebacterium melassecola
MAWFFAPEPVMVTADEALKGGRHTVLENPAPHTVLGTPVTGPWKEGQQRIWIGLGCFWGVEQMYWQMDGVEGTSVGYAGGFTPNPTYREVCSGRTGHTEIVEVVYDPSKISLEQLVARGLEAHDPTQGFRQGNDVGTQYRSAYYTENEEGAARVKAVVDAYGETLKQHGFGEITTEIGVISPSEYFLAEDYHQQYLDKNPDGYCPHHSTGIPCGVEA

SEQ ID NO: 23440 - protein, 401 aa, Arabidopsis thaliana
MALKFNPLVASQPYKFPSSTRPPTPSFRSPKFLCLASSSPALSSGPKEVESLKKPFTPPREVHVQVLHSMPPQKIEIFKSMENWAEENLLIHLKDVEKSWQPQDFLPDPASDGFEDQVRELRERARELPDDYFVVLVGDMITEEALPTYQTMLNTLDGVRDETGASPTSWAIWTRAWTAEENRHGDLLNKYLYLSGRVDMRQIEKTIQYLIGSGMDPRTENNPYLGFIYTSFQERATFISHGNTARQAKEHGDIKLAQICGTIAADEKRHETAYTKIVEKLFEIDPDGTVMAFADMMRKKISMPAHLMYDGRNDNLFDNFSSVAQRLGVYTAKDYADILEFLVGRWKIQDLTGLSGEGNKAQDYLCGLAPRIKRLDERAQARAKKGPKIPFSWIHDREVQL

SEQ ID NO: 23441 - protein, 963 aa, Picea abies
MARNNLEKMASIDAQMRLLVPGKVSEDDKLIEYDALLLDRFLDILQDLHGEDIRAMVQECYERSGEYEGKNDPHKLEELGNVLTSLDPGDSIVVASSFSHMLNLANLAEEVQIAYRRRNKIKRGGFADESNATTESDIEETFKRLVNQLGKSPAEVFDALKNQTVDLVLTAHPTQSVRRSLLQKHARIRNCLSQLYGKDITPDEKQELDEALLREIQAAFRTDEIRRTPPTPQDEMRAGMSYFHETIWKGVPKFLRRIDTALKSIGINERVPYNAPLIQFSSWMGGDRDGNPRVTPEVTRDVCLLARMMAANLYYSQIEDLMFELSMWRCSDELRARALQLHSASKKDAKHYIEFWKQIPPNEPFRVILGDVRDKLYNTRERTRQLLSNGISDIPEEVTFTNIDEFLEPLELCYRSLCSTGDQPIADGSLLDFMRQVSTFGLSFVKLDIRQESDRHSDVADAITRHLGIGSYKEWSEEQRQAWLLSELQGKRPLFGPDLPKTDEVRDVLDTFHVISELPADNFGAYIISMATAASDVLVVELLQRECHVKKPLRVVPLFEKLADLEAAPAALARLFSINWYRNRIDGKQEVMIGYSDSGKDAGRLSAGWALYKAQEDLIKVAKEFGIKLTMFHGRGGTVGRGGGPTHLAILSQPPDTIHGSFRVTVQGEVIEQSFGEEHLCFRTLQRFTAATLEHGMRPPVAPKPEWRELMDEMAVVATKEYRSIVFQDPRFVEYFRSATPELEYGRMNIGSRPSKRKPSGGIESLRAIPWIFAWTQTRFHLPVWLGFGAAFKHVMEKDIRNLHMLQQMYNEWPFFRVTIDLIEMVFAKGDPGIAALYDKLLVSDDLWAIGEKLRANYGETKDLLLQVAGHKDLLEGDPYLKQRLRLRDSYITTLNVCQAYTLKRIRDPNYHVNLRPHLSKESSTKPAAELVKLNPTSEYAPGLEDTLILTMKGIAAGMQNTG

SEQ ID NO: 23442 - protein, 499 aa, Parachlamydia sp. UWE25
MQVLSAQAVSELEKSAIKQGFSALDFMEKAGYGIALAIKEFILKHPLINHIVLLCGKGNNGGDAYVAGCYLLNYGYSVSSIQLESLENCSELCKKNALRFENLGGTISQQIQFDSNQLLIDGLFGTGFKGKIQELYTKLIEKANQSHAPILSIDIPSGLNGSTGEINGLAIRANETICLGFPKTGFFLQQGWNVVGQLKFVDFGLPLNVFSKENASFVLLTKSFIKNLLPKLVRNRHKYQAGYVMGLAGSRSMPGAALLSSLAALRAGSGMVHLLYPEDMRCELNNSPYELIKTPYALGDTQKVLQELQKAKAIFVGPGLGLTQPIDHLLRSCLPHLNASCVLDADALTLYTKTPFLLPKRTIFTPHTGEMQKLLQETSHLILNENILKKCQQYAEQHDITLILKGAPTFIFHPNQPIYVNPTGNCGMATAGSGDVLTGIIASFLSQGLESHQAALLGVFLHGLAGDIAKSKRLTERGMIASDLIDHLNLAYHALEQSV

SEQ ID NO: 23443 - protein, 402 aa, Xanthomonas campestris pv. vesicatoria str. 85-10
MRRVVITGMGITSCLGNDLDTVSSALRVSRSGITALPDHAEAGLRSQVGGAVALDLDSLIDRKLKRFMGDASAYAYLAMRDAIADAGLDAEQVSGLRTGVIAGSGGGSSQWQVETADLLRNRGVRKVGPYMVPRTMCSSVSASLATAFKIRGLSYSLSAACATSAHCIGAAADLIRHGAQDVMFAGGGEELHWTMSVMFDAMGALSTGFNDRPAVASRPYDAQRDGFVIGSGGGMLVLEDYEHAIARGARIHAELLGYGVTSDGADMVAPSGEGAVRCMHMAMQGLQRPIDYLNTHGTSTPLGDVTELGAVREVFGDYVPPLSSTKGLSGHSLGAASVHEAIYSLLMLRDGFMAGSAHIDELDPSAEGFPILRQTQDATLNTVMSNSFGFGGTNAALVFGRV

SEQ ID NO: 23444 - protein, 389 aa, Triticum aestivum
MDRYEVVRDIGSGNFGVAKLVRDVRTKEHFAVKFIERGHKIDEHVQREIMNHRSLKHPNIIRFKEVVLTPTHLAIVMEYASGGELFQRICNAGRFSEDEGRFFFQQLISGVSYCHSMQVCHRDLKLENTLLDGSVAPRLKICDFGYSKSSVLHSQPKSTVGTPAYIAPEVLSRREYDGKVADVWSCGVTLYVMLVGAYPFEDPDEPRNFRKTISRILSVQYSVPDYVRVSMDCMHLLSRIFIGNPQQRITMPEIKNHPWFLKQLPVEMTDEYQRSMQLADMNTPSQSMEEAMAIIHEAQKPGDNALGIAGQVACLGSMDLDDIDFDDIDDIELRTAGISCARCDALEWFKIFGDRLPVDGSLFCHAWVGFSSGSHIFCRQYMLISKSVS

SEQ ID NO: 23445 - protein, 214 aa, Silicibacter pomeroyi DSS-3
MVREAFSHVTTWVFDLDNTLYPPAMRLFDQIEVRMTAYVMEALGVTRAEADRLRAHYWRQYGTTLAGLMREHGLDPDPYLVAVHEVDMSHMTPDTALASHIRALPGRRIVYTNGSAPYAERVLAARGLTGLFDAIYGVEHAGYRPKPERAAFEEVFTRDGVIPERAAMFEDDPRNLTAPHEMGMRTVHVAPDPHPADHIHHHTDDLTAFLSRLT

SEQ ID NO: 23446 - protein, 515 aa, Shigella flexneri 2a str. 301
MCSIFGVFDIKTDAVELRKKALELSRLMRHRGPDWSGIYASDNAILAHERLSIVDVNAGAQPLYNQQKNHVLAVNGEIYNHQALRAEYGDRYQFQTGSDCEVILALYQEKGPEFLDDLQGMFAFALYDSEKDAYLIGRDHLGIIPLYMGYDEHGQLYVASEMKSLVPVCRTIKEFPAGSYLWSQDGEIRSYYHRDWFDFDAVKDNVTDKNELRQALEDSVKSHLMSDVPYGVLLSGGLDSSIISAITKKYAARRVHHEIHFTVQEGLDAIRDVIYHIETYDVTTIRASTPMYLMSRKIKAMGIKMVLSGEGSDEVFGGYLYFHKAPNVKELHEETVRKLLALHMYDCARANKAMSAWGVEARVPFLDKKFLDVAMRINPQDKMCGNGKMEKHILRECFESYLPASVAWRQKEQFSDGVGYSWIDTLKEVAAQQVSDQQLETARFRFPYNTPTSKEAYLYREIFEELFPLPSAAECVPGGPSVACSSAKAIEWDEAFKKMDDPSGRAVGVHQSAYK

SEQ ID NO: 23447 - protein, 366 aa, Cryptococcus neoformans var. neoformans JEC21
MTIEIPSSNRKARIGVMGVGRMGKRHARNIAEFAPRAELVAVSDPYPEALEWAKANLPSTVKTYSSSEELINDPDIEGILIATETAFHAEYAIKVIEAGKHALIEKPISVDIELTKPVVAAAKKRPDLKVMVAFSRRFDASYQEAAKRIEDGQLGSAYLIKSCTNDLYDPTGYFLNYAKKSGGIFMDCGIHDIDIGRYLLNVGNTDGLKNPAKQVSKVFATGLNTVYPELAEMEDCDNALGIIEFENGSKLNIHLSRTSIHGHDVVCEVFGTKGKFVINAVPNISRVEIRDEHGVRTESHPSYYERFFEAFKTEVQTFSSCILDDTPVPTPPHDALEAAQIATALTHSFRTGNPVYFDDNGEPILK

SEQ ID NO: 23448 - protein, 334 aa, Burkholderia vietnamiensis G4
MFIENAWYAAALSAEVQREPFARTILNHKVVMYRTLADQVVALEDRCPHRQVPLSRGRVVGDELQCWYHGLRYDCSGACVGIPSQSTIPKGARVRAFPAVEKYGFIWLWTGDPDQADEAAIPNHWVCSAPELAGTMSYCTIACSYLFGIDNILDISHAAFVHAKTLGSLDIVETPPEIVIGEDEVRVRRYLRREKTPPLYTHILKLDYIDRFQEVLYWPIGNTRVETRAHACDDSSGRIFHVYTTTIFTPATDTTTHVFVGMHRDFDVDNERFTEFTAKEVFATVMEDKDVAESLQANWSPTAPMIDIQLDRPAFAARRILERMGARASIRATV

SEQ ID NO: 23449 - protein, 133 aa, Brassica napus
SLSKLNNPYIVECEDSWVDEDNNACIFTAYCEGGSMANAIKKARGKLFPEERIFKWLAQLLLAVNYLHSNRVLHMDLTCSNIFLPKHDHVQLGNYGLAKLINPEKPASLVPGIANSMCPEVLEDEPYGYKSDI

SEQ ID NO: 23450 - protein, 712 aa, Oryza sativa
MTGIDLNTVEEDEEEAAEEVAANGSSPAPARAGAVCLELWHACAGPVAPLPRKGGVVVYLPQGHLEHLGDAPAAAAAAAAVPPHVFCRVVDVTLLADAATDEVYAQLSLVPEKEEVARRADDGEGEDGDGMKQRFARMPHMFCKTLTASDTSTHGGFSVPRRAAEDCFPPLDYSQQRPSQELVAKDLHSTEWRFRHIYRGQPRRHLLTTGWSAFVNKKKLVSGDAVLFLRGDDGELRLGVRRAAQLKNGSAFPALYNQCSNLGTLANVAHAVATESVFNIYYNPRLSQSEFIVPYWKFMKSLSQPFSVGLRFKMRYESEDATERRYTGIITGSGDTDPMWHGSKWKCLLVRWDDDAEFRRPNRVSPWEIELTSSVSGSHLSTPHSKRLKPCLPHVNPEYMVPRGGGCPDFAESAQFHKVLQGQELLGFKSHGGTAAATSQPCEARHLQYIDERSCSSDASNSILGVPRLGDRAPLGNPGFSYHCSGFGESHRLQKVLQGQELFRPYRGTLVDASMGSNGFHQQDSPRAPGVVNKWQAQLHGRAAFHGPPALALPSQSSSPPSVLMFQQANSKMPRLEFGHGQLDKHENDRRVRFGPSEGIERREQRIPLQPYPTSGEVIDGQVTVEKSHSPGRHGKDGPDNKAVGTNSCKIFGISLTEKVPAREELDDGDANYSLQSLKQVPKSLGNSCATVHEQRPVVGRVIDISTMDMMI

SEQ ID NO: 23451 - protein, 482 aa, Salmonella typhimurium LT2
MQLNDSTLFRQQAFIDGDWRDARGGDVIPVSNPANGKPLGNVPKMGAEETRDAINAANRALPAWRALTAKERANILRRWFNLMMEHQDDLARLMTLEQGKPLAEAKGEISYAASFIEWFAEEGKRIYGDTIPGHQADKRLLVIKQPIGVTAAITPWNFPSAMITRKAGPALAAGCTMVLKPASQTPFSALALAELAQRAGIPAGVFNVVTGSAGDIGGELTSNPLVRKLSFTGSTEIGRQLMEQCAKDIKKVSLELGGNAPFIVFDDADLDKAVEGALASKFRNAGQTCVCANRLYVQDGVYDRFAEKLNQAVNKLAVGDGLQADVAIGPLIDEKAVAKVQEHIADALEKGARVITGGEAHKLGGNFFQPTILADVPDNAKVAKEETFGPLAPLFRFSDEADVIRQANDTEFGLAAYFYARDLSRVFRVGEALEYGIVGINTGIISNEVAPFGGIKASGLGREGSKYGIEDYLEIKYMCIGL

SEQ ID NO: 23452 - protein, 252 aa, Lactobacillus kefiri
MTDRLKGKVAIVTGGTLGIGLAIADKFVEEGAKVVITGRHADVGEKAAKSIGGTDVIRFVQHDASDEAGWTKLFDTTEEAFGPVTTVVNNAGIAVSKSVEDTTTEEWRKLLSVNLDGVFFGTRLGIQRMKNKGLGASIINMSSIEGFVGDPTLGAYNASKGAVRIMSKSAALDCALKDYDVRVNTVHPGYIKTPLVDDLEGAEEMMSQRTKTPMGHIGEPNDIAWICVYLASDESKFATGAEFVVDGGYTAQ

SEQ ID NO: 23453 - protein, 214 aa, Oryza sativa
  misc_feature (71)..(71): Xaa can be any naturally occurring amino acid
  unsure (1)..(214): unsure at all Xaa locations
MASVDPSRSFVRDVKRVIIKVGTAVVSRQDGRLALGRVGALCEQVKELNSLGYEVILVTSGAVGVGRQRLXLDVSSSQLLVTDSDFENPKFREQLTETVESLLDLKVIPIFNENDAISTRKAPYEDSSGIFWDNDSLAGLLALELKADLLILLSDVDGLYSGPPSEPSSKIIHTYIKEKHQQEITFGEQSRVGRGGMTAKVKAAVLASNSGTPV

SEQ ID NO: 23454 - protein, 180 aa, Oenococcus oeni PSU-1
MANEIQTAIFAGGCFWCMVEPFDSLPGIIKVRSGYTGGHVDHPTYEQVSSHQTGHTEAVKIWFDPKKISYAELVDLYWQVTDPTDAGGQFQDRGDNYRPVIFVNSDSQHQTALSSKQKLLDSGVFGEDPIVTKIEKAQTFWEAEDYHQDFYKYNQARMKVQDAPREDFIKEHWNKQKADD

SEQ ID NO: 23455 - protein, 334 aa, Xanthomonas oryzae pv. oryzae KACC10331
MSIEQLAETAQAMVAPGKGIIAIDESTSTIAKRFASVGIENIEENRRAYRELLLTTPKLSDYISGAILFDETIRQKTKDGVPFAEYMTAHGIIPGIKVDKGAQPLAGMPGELVTEGLDGLRARLEEYYTLGARFAKWRAVITIGEDIPSGTCIEANSHALARYAALCQEQGLVPMVEPEVIMDGSHDIETCYEVTEATLRSLFGALYEQNVVLEGTILKASMVISGKSCEEQASIEEVAESTVMCLKSTVPAILPGIVFLSGGQTDEQSTAHLNEMHQLGTLPWPLSFSYGRAMQQAALKLWAKDMTVNFAKAQQVIYERAKENGLAALGKWKG

SEQ ID NO: 23456 - protein, 249 aa, Candida glabrata CBS138
MSLAKPVSLKVNAALFDVDGTIIISQPAIAAFWRDFGKDKPYFDAEHVIHISHGWRTYDAIAKFAPDYADEEYVNKLEGEIPEKYGEHSIEVPGAVKLCTDLNKLPKEKWAVATSGTRDMAQKWFKFLNIDRPEYFITANDVKQGKPFPEPYIKGREGLGYPINKEDPSKSKVVVFEDAPAGIAAGQAAGCKIIGIATTFDVDFLKEKGCDIIVKNHESIRVGGYNPETDEVEFIFDDYLYAKDDLLKW

SEQ ID NO: 23457 - protein, 420 aa, Triticum aestivum
MAAASFTAAKFLAPAAARSGGDRAPFPAPSAFSMRSLRHRPARRLSSVLAVSSDVLKAAPAAAAYPAVTREEALELYEDMILGRNFEDMCAQMYYRGKMFGFVHLYNGQEAVSTGFIKQLNQPDCVVSTYRDHVHALSKGVPARAVMAELFGKATGCCRGQGGSMHMFSEPHNLLGGFAFIGEGIPVATGAAFAAKYRHEVLKQSSPDGLDVTLAFFGDGTCNNGQFFECLNMAQLWKLPIIFVVENNLWAIGMSHLRSTSDPEIWKKGPAFGMPGVHVDGMDVLKVREVAKEAIDRARRGEGPTLVECETYRFRGHSLADPDELRRPDEKSHYAARDPITSLKKYIIEQNLASEAELKNIEKKIDDVVEEAVEFADASPLPPRSQLLENVFADPKGFGIGPDGKYRCEDPKFTQGTAQV

SEQ ID NO: 23458 - protein, 341 aa, Sporothrix schenckii
MDNYQKLEKVGEGTYGVVYKARDLTAGGRIVALKKIRLEAEDEGVPSTAIREISLLKEMRDPNIVRLYNIVHAEGHKLYLVFEFLDLDLKKYMDSLPVSDGGRGKALPEGTGTRLHTLGLGDDIIKKFMSQLCAGIRYCHSHRILHRDLKPQNLLINKEGNLKLADFGLARAFGVPLRTYTHEVVTLWYRAPEILLGGHQYSTGVDMWSVGCIFAEMAMRKPLFPGDSEIDEIFKIFRLLGTPTEDVWPGVTTYPDFKASFPRWVQDTETPICPTLDPMGQELLELMLVYDPASRLSAKQACNHPYFDDLEKALPGTAAAAARQHTTTAAAGGAYNGSGYH

SEQ ID NO: 23459 - protein, 701 aa, Xanthomonas oryzae pv. oryzae KACC10331
MAKSSGKPASAVSVDRSASAPDARGTGDELHQKARGRHPQLTTNQGIPVGDNQNSLRATPRGPTLLEDFILREKITHFDHERIPERIVHARGSAAHGYFKLTKSLSQYTTAKIFTEIGEKTPLFTRFSTVAGGAGSVDTPRDVRGFAVKFYTKEGNWDLVGNNIPVFFIQDAIKFPDLIHAVKMEPDRGFPQAASAHDTFWDFISLTPESMHMIMWAMSDRTIPRSLRMIEGFGIHSFRFLNDKGESTFVKFHWRPKLGLQSTIWDEAVKIAGADQDFHRRDLFEAIQNGDFPEWELGVQLFTEAEADAFPFDHLDSTKIIPEELVPLQIVGRMVLDRWPDNFFAETEQVAYCPGNIVPGIDFSNDPLLQGRLFSYLDTQLSRLGGPNFHQIPINAPKCPFVNNQRDGHMQMDVPKGRVAYEPSSLQADAPREALRGFPSHSTPAEDGAKGRVRAERFADHYSQARLFFRSQTAPEQAHMASALVFELSKVETAHVREAIVGHLRHIDQKLAQRVADGMGMTTLPPAPPAAVAPIDMPLSPALQVIGKMKDTLKGRTVGILIHDGSDASTIKAVRKAAEAEGATVKIVAPKLGGAKLSDGKQLAADGQLAGTPSVVFDAVAVLLSSEAAKLLTRESAALDFVSCAWAHLKAIAFDEGAQLLLKAGNIGKDAGVVPAADTKAFISAAKTRQWAREPKVRMLA

SEQ ID NO: 23460 - protein, 389 aa, Bacillus cereus G9241
MNRVWKNLISEENIVKWRRHFHKYPELSFHEKETSQFIYDTLCSFSSYEVTRPTKYSVLAIKRGTEQGKVIAIRADIDALPIQEETSKSYTSVNKGVMHACGHDAHAAILLSTAEALANIKEDFVGEIRLFFQHAEEVYPGGGKEMVEAGVMDGVDYVIGLHVMSGLESGKIGIAYGPMMAAPDVFTVEIQGKGGHAARPEETIDPIAIGAQIITNLQHIVSRNTSAFMQRVVSVTQFHGGMADNIIPSAATLMGTVRSFNQALRIEAEEKIEKIVKGITEAHGGAYTYTYRYGYDPVINDEYMTKVVEESALHLFGNERVVKLEPSMGGEDFSAYLRKAPGCFIKLGTGSEKIDTCYPHHHPKFDVDESALIYGVELFLETTMRLLKS

SEQ ID NO: 23461 - protein, 587 aa, Pseudomonas putida KT2440
MPESVSLRQRRALRLAWQFVRPYRRQVLLALLALVVTAAITLSMGQGIRLLVDQGFMTRSAHQLNQTIGLFLLLVLALAVGTFSRFYLVSWIGERCVADIRRAVFDHLIGLHPGFFEDNRSSEIQSRLTADTTLLQSVIGSSLSMFLRNALMVIGGVVLLFITNPKLTSIVVVTLPLVLAPILLFGRRVRSLSRQSQDRVADVGSYVAETLGQIKTVQAYNHQAHDRELFADTVEAAFTVARKRITQRAWLITLVIVLVLGAVGVMLWVGGMDVIAGRISAGELAAFVFYSLIVGSAFGTLSEVIGELQRAAGAAERIAELLAARSAILPPDVAQVLPQPRASGHIELQQVVFAYPSRPTVAAVDGLSLTIEPGQTVALVGPSGAGKSTLFDLLLRFYDPQQGRILLDGQPVTDFDPDQLRRQFALVAQNPSLFRGTVEANIRYGRPEATLAEVEAAARGAHADEFIRQLPQGYQTPLGEGGIGLSGGQRQRLAIARALLVDAPILLLDEATSALDAQSEYLIQQALPSLMAGRTTLVIAHRLATVQHAERIAVIDQGRLVAVGTHRQLIEDSPLYARLAALQFTTG

SEQ ID NO: 23462 - protein, 543 aa, Western X phytoplasma
MNKNKKQPKFIFVTGGVVSGLGKGIIASSIGQILKQRGLKVFMKKFDPYINVDSGTMSPNQHGEVFVTNDGAETDLDLGHYERFLDENLSRESNVTTGQIYQSVINKERKGEYLGKTIQVIPHITNEIKYRILTIAQNADYDIIIIEIGGTVGDIESLPFLESIRQMRYDLGFHNVLYLHNTLIPYLKSSNETKTKPTQHSVKELRSLGIQPQILILRSEKIITPEMKQKISILCDVQKNAIFDNTDVDILYKIILNLHGQKIDDFILDHFQIKNVPVSDLSQWKQLIHKIEHLKRTITIGLVGKYIDSHDAYLSIEESLKHASYTHDVKVEIKWIDAEYLTNDNIQKQLNTCDGILLPGGFGFRAVEGKIKAVKYARENDIPFFGICFGMQIAVIEYARNVLKLEQANSSEVDSKTPYPVITQKIYNTQLGGSLRLGLYSSELKKDSRSYAIYQQEVINERHRHRYEMNLEYLPLFDKDPYFNVSGFNQEEKVPEIVELKNHFWFVGVQFHPEFLSRPLKPHPLFKDFIKFAIKYNTNKNTQ

SEQ ID NO: 23463 - protein, 596 aa, Oryza sativa
MIDDEADFGNITDATEGQAAAKFRPKARAKPRKTSLPSRSLAPHPTVESTDENVETLNKDSTSQEQSVDKKAASLGCHGSETDGNACASGGILDTPSEDVVTVSLGLVNNPDVALDSSTVFASSAHKVSQNEENNDDVSHVATHKENMVVSDTQAPPTCCSARTIDDLADFEGLCDDTHVEEERVAKFQPKFRVKTSKAASKSQRTNQKAGVSTVDVLSQNKEDGKDQAGCNDKQLHSPTRHQESVQISYSQAHLGTHNSTIDDVANSDSIMEEPAQEEMAAKFQPRLRPKAGGASPGVAETIDAACVATPEFGVSSVDVVSQDTEEDSHREGLSDDSCQKYIDEEAITTSGTGPPQDLDDTVDLDSHAEMVNPHPDGSPLIIEELSDDQECNDPENQYHEGEPYDHVIEQEPERDARETGTSMKLRNRRKLQKDGIPEHTADDIMDEDFGEPPSDEQDNDSGDEYTARGKQKGRRKSREKNINKEPSRGTKRTSGDSTIEESQKQKLQKNKIIKKLNIEDVQPDINNTHEQEGTSNEEDPGNKNIPGGLINEEEENGLDWSDKELDMHRSEVEEKEHVSTNDDDDDDLGDVFDWY

SEQ ID NO: 23464 - protein, 520 aa, Neurospora crassa
MVHLTIIPKEDEIRDGLDIPLTGALKAVHLQLANDEDRFTTSVYGSKFAAADLPRHEMPDEEMPKEVAYRMIKDELSLDGNPLLNLASFVTTYMEEEAEKLMTESLPKNFIDYEEYPQTADIQNRCVSMIGRLFNAPVKDAEASSAVGTSSVGSSEAIMLGVLAMKKRWKNKRIAEGKPADKPNLIMSSAVQVCWEKATRYFEVEEKFVYCTPDRYVIDPKETVDLVDENTIGICCILGTTYTGEYEDVKAVNDLLVERGLDTPIHVDAASGGFVAPFVVPDLEWDFRLKNVVSINVSGHKYGLVYPGVGWVVWRSAEYLPQELVFNINYLGADQASFTLNFSKGASQVIGQYYQLIRLGKHGYRAIMSNLTRTADYLAESLAALGFIIMSQKSGQGLPLVAFRLKEDPDRTYDEFALAHQLRVRGWIVPAYTMAPKTEGLKMLRIVVREDFSRNRCDGLISDIRSCQGILEQMDKETVKKQQEFIHKHHVVSGKASHNHPKYHEKHSLQGKTGKTHSIC

SEQ ID NO: 23465 - protein, 398 aa, Pyrococcus furiosus DSM 3638
MIRASKRALSVEYAIRDVVLPARELEKKGIKVIRLNIGDPVKFDFQPPEHMKEAYCKAIKEGHNYYGDSEGLPELRKAIVEREKRKNGVDITPDDVRVTAAVTEALQLIFGALLDPGDEILVPGPSYPPYTGLVKFYGGKPVEYRTIEEEDWQPDIDDIRKKITDRTKAIAVINPNNPTGALYDKKTLEEILNIAGEYEIPVISDEIYDLMTYEGEHISPGSLTKDVPVIVMNGLSKVYFATGWRLGYMYFVDPENKLSEVREAIDRLARIRLCPNTPAQFAAIAGLTGPMDYLKEYMKKLKERRDYIYKRLNEIPGISTTKPQGAFYIFPKIEVGPWKNDKEFVLDVLHNAHVLFVHGSGFGEYGAGHFRAVFLPPIEILEEAMDRFEKFMKERLKE

SEQ ID NO: 23466 - protein, 232 aa, Alkalilimnicola ehrlichei MLHE-1
MKKLVLLRHGQSIWNQENRFTGWHDVDLTEKGREEAQAAGQLMKRHGLRFDYAYTSVLKRAIRTLWIGLDELDQMWIPVTKAWQLNERHYGALTGLNKAETAEEYGAEQVHIWRRSYDTPPPPLDETSPYHPRHDPRYASLKPEQLPATESLALTLERVLPYWNERIVPTLRDCDNVLIAAHGNSIRALIKHLDGLDDEAIMKVEIATGDPLVYELDDALAVVDKHYLRERD

SEQ ID NO: 23467 - protein, 866 aa, Haemophilus influenzae R2866
MLGRFLGETINDAQGEDILELIENIRKLSRNSRAGDDKARQALLDTLGSISNENIIPVARAFSQFLNLTNIAEQYQTISREHSLAQSSSQSLSELFKRLKEQNASVEEVHKTVEKLLIELVLTAHPTETTRRSLIHKHIEINKCLSKLEHHDLTEKERNIIERLLLRLIAEAWHTNEIRTVRPTPFDEAKWGFAMLENSLWQAVPEFLRQLNETAREFLGYDLSVGLKPVRISSWMGGDRDGNPFVTAQITKKVLYFARWKAADLFLQDISKLADELSMMKCSDEFRDKYGEHLEPYRFVVKNLRNQLTATLAYFDDHLSNRTPRVSESEIILEDNQLWEPLYDCYQSLIQCGMRIIANGSLLNILHRISCFGVTLSQMDIRQESTRHTDAIAEITRYIGLGDYSQWMEDDKQAFLIRELSSRRPLIPQNWTPSPETKEILDTCKVIAQQKQGVIACYVISMARSASDVLAVHLLLKESGVPYHIPVVPLFETLEDLDAAEKVMTQLFNVGWYRGVINNRQMVMIGYSDSAKDAGMMAASWAQYRAQEALVNLTEKLGIELTLFHGRGGTIGRGGAPAHAALLSQPPRSLKNGLRVTEQGEMIRFKLGLPAVAVETFDLYASAILEANLLPPPEPKPEWRTIMDELSTISCDIYRGVVRGDKDFVPYFRSATPEQELSKLPLGSRPAKRNPNGGVESLRAIPWIFAWMQNRLMLPAWLGAGAAIRQIIEQGKGDIIHKMCENWPFFSTRIGMLEMVFSKSDTWLSQQYDQRLVKKELWYLGENLRKQLEDDIQTVLSLSHQSELMSDLPWIADSIALRNIYTDPLNLLQVELLHRFRENPEQVNPDVEQALMITITGIAAGMRNTG

SEQ ID NO: 23468 - protein, 77 aa, Azolla filiculoides
MSCCGGNCGCGSGCRCGKRSFDETAFDAPMEVEVTVFGNEGSNCGFDSSCGFESDAQATSQNGCSCGSNCTCNPCRC

SEQ ID NO: 23469 - protein, 389 aa, Xanthomonas axonopodis pv. citri str. 306
MRILVTGGTGYIGSHTCVELAQRGHEVCIVDNLSNSSERVLDHLQHLMGFRPEFHRMDVRAPELADLLIGKRIDAVLHFAALKAVGESVREPLLYFNNNVTGTLALLRAMRTAKVCNLVFSSSATVYGDANRSPIDESAPLKAINPYGRTKLMMEEMIGDLSAAWPDFNAALLRYFNPVGAHPSGYLGEDPRGVPNNLMPYIAQVAVGRREALQVFGDDYPTDDGTGVRDYLHVMDLARAHVDAIDYLQRQRKGLVVNLGTGRGYSVREVAAAFARASGRRIPLSIAPRRDGDVAVYFASTALANRLLGWTAEYDLDRMCRDTWRWQSMYPDGYAGSRLPRPRTAAAVPEREGARELPAPAPRLSPGPDTRRRSEPVSTLVVATGFSRV

SEQ ID NO: 23470 - protein, 217 aa, Arabidopsis thaliana
MASISNEPKRENRDEEETGANEDEDTGAQVAPIVRLEEVAVTTGEEDEDTILDLKSKLYRFDKDGSQWKERGAGTVKFLKHRVSGKIRLVMRQSKTLKICANHLVGSGMSVQEHAGNDKSCVWHARDFSDGELKDELFCIRFASVENCKAFMQKFKEVAESEEEKEESKDASDTAGLLEKLTVEEKESEKKPVEKAEENKKSEAVEEKKTEESVPSA

SEQ ID NO: 23471 - protein, 386 aa, Guillardia theta
MAYFKAVAYLAALASAAAFNPGSSFVPRLNAPATQPKAAKMTGPTMQAVPCGINGFGRIGRLVARIMIKDPETKLLQVNAGSATPDYMAYQFKYDSIHGRYQGDVVVDGDDLVIDGQRVITTRARDPKDIGWAKTGVEYLCESTGVFLTAEKAQPHIDAGVKKVIFSAPAKDDSLTVVMGVNAEDYKGQTDFISCASCTTNGLAPLVKCINDKWGIEEGLMTTIHAMTATQAVVDSSSRKDWRGGRAASGNIIPSSTGAAKAVAKVIPAVKGKLTGMAFRVPTIDVSVVDLTCRLAKDATYEEICAEVKRRANGDMKGFLGYTDEPLVSTDFETEPISSTFDAEAGISLNPRFVKLVAWYDNEWGYSNRVKDLMVHVAKVDAKVKA

SEQ ID NO: 23472 - protein, 388 aa, Pyrenomonas salina
MYKTVLVGVLSVAAGANAFQMGSSFVPRMGGQAETARRATMTGPVMAEDPVKCGINGFGRIGRLVARIMIKDPETNLIHVNAGSATPDYMAYQFKYDSIHGRFDGAVVVDGEDLVIDGQRVITTRQRDPKDIGWDKTGVEYLCESTGVFLTSEKAQAHIDGGCKKVIFSAPAKDDSLTVVMGVNPDDYKGQTDFVSCASCTTNGLAPLVKCINDKFGIEEGLMTTIHAMTATQAVVDSSSRKDWRGGRAASGNIIPSSTGAAKAVAKVIPDVKGKLTGMAFRVPTIDVSVVDLTCKLKKETTYEEICNEVKKRAAGDMKGVLGYCDEPLVSTDFESESISSTFDAEAGIMLNPSFVKLVAWYDNEWGYSTRVKDLMVHMAKVDAKVSA

SEQ ID NO: 23473 - protein, 390 aa, Lactobacillus sakei
MQTNWWQNAVFYQVYPRSFQDSNGDGIGDIQGIIQRLDYLADLGVNAIWLSPVYQSPNVDNGYDISDYQAINPEYGSMVDMEQLIEAAKIRKIKIVMDLVVNHTSDQHPWFLEARKSKDNPYRDFYIWRDPATDGSVPNDLQSNFKGSAWAFDAVTGQYYLHFYAKEQPDLNWQNPKVREAVYQMMTWWLQKGIGGFRMDVIDLIGKEPDRKIKENGPQLHAYLQEMNARVLSQYDVVTVGETWGATPEIGQMYSNPNRHELSMIFQFEQINLDKQSGMTRWDLKPLIPAELHAVFSKWQLALDGVGWNSLFWSNHDLPRIVSRWGDDSQYREKSAQALAIYLHMLKGTPYIYQGEEIGMTNYPITSYHEIEDIESRRVYQQRQQQGYAI

SEQ ID NO: 23474 - protein, 466 aa, Salmonella typhimurium LT2
MGQLSESHALGGGLKSRHVTMLSIAGVIGASLFVGSSVAIAEAGPAVLLAYLFAGLLVVMIMRMLAEMAVATPDTGSFSTYADKAIGPWAGYTIGWLYWWFWVLVIPLEANIAAIILNSWIPGIPVWLFSLVITLALTGSNLLSVKNYGEFEFWLALCKVIAILAFIALGATAISGFYPYAEVSGISRLWDHGGFMPNGFGAVLSAMLITMFSFMGAEIVTIAAAESDTPDKHIVRATNSVIWRISIFYLCSIFVVVALIPWNMPGLKSVGSYRSVLELLHIPHAKFIMDCVILLSVTSCLNSALYTASRMLYSLSRRGDAPAIMGKTNRSKTPWVAVLLSTGAAFLTVIVNYYAPAKVFKFLIDSSGAIALLVYLVIAISQLRMRKILLAQGGEIKLKMWLYPWLTWLVIGFICFVLVVMLFRPAQQLEVISTGLLGLGIIGTVPIMSRWKKLIRWQKAPLQNLR

SEQ ID NO: 23475 - protein, 209 aa, Solanum tuberosum
MADQYEQNKPSVEETVGANVEATDRGLFDFIGKKKEEKPSHAHEEEAISSEFCEKVKVSEEEHKEEEKKEEKKLHRSSSSSSSSSDEEEEIGEDGQIIKKKKKKGLKEKIKEKISGDHKEEVKTEDTSVPVEKYEETEEKKGFLDKIKEKLPGGGHKKTEEVAAPPPPPPAAVEHEAEGKEKKGFLDKIKEKLPGYHSKTEEEKEKEKN

SEQ ID NO: 23476 - protein, 639 aa, Cryptococcus bacillisporus
MPTLSFLFLASATAASVATAAVHDLYWNITYATANPDQLHNKTQAIGVNGTWPPPPIVVNQGDTLTVHAFNGLGSVGTTLHSHGNYFNGSNYYDGAAAVTQCPIPPGETLVYEIPVNDQWGTYWIHGHYNGQYVDGLRAPLIIMPNKTTERTDITWDEDFTIIMGDWYHDTSPYLVSSYFLNWVNPTGAEPIPDSVAFYVMNTTSGEYMSRNIAQGVDVSADVNNNAAIPFEPGKKYRIRFINMSALSMLHIYMGGHTFDIIEVDAVDIEPYQSTNLTVSVAQRYSILVEALNTTDANYAIMFYQDTDMYDTVPDALAVNNSVTLQYDASLGPADMFNITDDTWPMLDDTRFVPLQAKRSAEADVSYELGAYFDTFDDGTNRAAFNNITYVMPTTPSLFTQISMGTDAWDTRIYGQQTHALMMPHLEMIELVIVNWDTGYHPFHLHGHEFQIMAKSFDVTSNDTSINPPVLEKQSNPARRDTIMVPPGGSVHIRFRADNPGAWIFHCHIDWHMDSGLAVIMITDPSYSQLSLKIPQTMKDHCEYWGYSATGNVVGLNSTTDFKGEAIGPLPLVMDWTPKAKGALAGCIIAALAGFASVVWYGAEHLDEKEIEAEIRRKAEIKAASGGKFGMIKKMAKRE

SEQ ID NO: 23477 - protein, 145 aa, Haemophilus parasuis
KNATIYQINTRQFTPEGTFKAAAGQLPRLKELGVDILWLMPIHPIGEIKRKGSLGSPYAVRDFRAVNPELGTMADLRAFVERAHALGQRVIIDWVGNHTSWDNVLMTQHPEWYARGADGKPQPTPWFNWDDIIDLDYGKPELRRY

SEQ ID NO: 23478 - protein, 339 aa, Arabidopsis thaliana
MSTSENTPFNGVASSTIVRATIVQASTVYNDTPATLEKANKFIVEAASKGSELVVFPEAFIGGYPRGFRFGLGVGVHNEEGRDEFRKYHASAIKVPGPEVEKLAELAGKNNVYLVMGAIEKDGYTLYCTALFFSPQGQFLGKHRKLMPTSLERCIWGQGDGSTIPVYDTPIGKLGAAICWENRMPLYRTALYAKGIELYCAPTADGSKEWQSSMLHIAIEGGCFVLSACQFCLRKDFPDHPDYLFTDWYDDKEPDSIVSQGGSVIISPLGQVLAGPNFESEGLITADLDLGDVARAKLYFDSVGHYSRPDVLHLTVNEHPKKPVTFISKVEKAEDDSNK

SEQ ID NO: 23479 - protein, 277 aa, Pseudomonas fluorescens PfO-1
MQHIVNRQGLNLPKLGLGTWPMLGDECTRAVEQALELGYRHIDTAAAYNNEDAVGQALANTPTPREQIHVTTKVWWDQLQPDAMRHSLDRSLKALRSEYVDLFMIHWPTTDWDLPHTLETLASFKEQGLARNIGVANFPLPLLRKVVEEYGIPLSAIQIEYHVLLGQNALLDYARQHDLALTAYTPLARNKVSEIPQIQQIAEKHGVLPTQVALKWLLDQDNVAAIPKASSKTNQLANLASLQVELDDDDRALIAALSKRERQVSPDFAPVWDAFDR

SEQ ID NO: 23480 - protein, 341 aa, Ralstonia eutropha JMP134
MVGWSTDFTADAIVPFTVMDEPLAIYRKTDGSLAALEDRCCHRLAPLSVGRKEGDELRCMYHGLKFAADGRCTEVPGQDRISPRVCVRAYPIVEKHGAAWVWMGEAEKADEALVPPIIGPDNAEWAMQCSTFDMDVNAELISDNLLDLSHAPFVHEATFGASDPVALKMMKESETKRGVTQLERGVLADRWQLGRQSNPYFGARPCDDHVVSLFLVPGVFILTITSYEPGVLERSEGGDVTETPIFKRCTCQMITPISKNKSRFFFNFGPWAAAADLKQHCFGIADAAFQEDKRIIEAQQDMIHRSPGRKFVLLPMDQPVVRYNEIYARLLAVEKPVAEPA

SEQ ID NO: 23481 - protein, 700 aa, Xanthomonas oryzae pv. oryzae KACC10331
MRAMCLALTSASLRAWRTLSSIGLRHALARARAARDACGARPVTPRCQQAGALTMCGLAGLLLASPRLHGEQLDALVRPMGAALRHRGPDDAGTWCDAQAGVALAHQRLSILDLSPLGHQPMRSADGRYVLAYNGEVYNFAQLRAALSALGHRFRGHSDTEVLLAAVVEWGLDETLTRCNGMFAIALWDERDNCLFLARDRVGKKPLYYGWAGDTLVFGSELKALWQHPDFDNGVDRNALTLLLRLGYIPAPACIHAHTFKLMPGRVLRMDAQAVAAGAAAHRADQAQQPFWNAREAMQRALAAPFTGSDAQAEEQLDSVLRDAVALRMVADVPVGVFLSGGTDSSIVTAMMQAQSAQPVHTFSIGFEGSHHDEAPLAREVATHLHTDHTELYVSGADALAVVPCLPDMFDEPFADASQVPTALVARLARGGVTVALSGDGGDELFFGYGRYQRALRNWRMHGLVPGPLRRLMAVAARRNGESSRTGGLAALVAEAGARGIGDIYRNRISRWRDPAAVVPGATEPDSFYSLADPLHGSGTPADAMMLADFAAYLPDDLLCKVDRTTMAVGLEARAPLLDWRVAEFAWSLPLSLKYRDGMSKYLLKRVLCRYLPDTMVYRGKRGFGAPVSAWLRGDLHGWADDLLAHGALQREGVFAADTVAGLWRDFNGGERKWHTHLWTVLMFQAWQAHWREQRAAITR

SEQ ID NO: 23482 - protein, 549 aa, Cryptococcus neoformans var. neoformans JEC21
MSSEKAEFDAEVKAFEAFAKSPRFARTTRPYTAADVVSKRGTLPISYPSDVQAKKLWKILESKARGEGGGCTATYGALDPVQLTQMAKYLETVYVSGWQCSSTASSSLEPGPDLADYPSNTVPNKVAQLFTAQLYHDRKQRYTRSAALANGQDPGERIDYLRPIVADADTGHGGLTAVMRLTKMMVESGAAGIHIEDQAPGTKKCGHMAGKVLVPISEHINRLVAMRLQCDIMGTTNLVVCRTDSEAATLLSTNIDPRDHSFILGSTNPSLPPLNDLMIAAEMEGKYGQELQKIEDAWTKQAGLKLWPDVLADALSKHGVSSKKITEFREQSIGTSHASTLQLAQSFGLPPSATPYWSWDTPRSREGYYRYQGGTQCAINRAIAFAPYADLLWMETKSPIYAQAKEFAEGVHKVHPGQWLAYNLSPSFNWEKAGLGKKEMKEYVWELGKLGFVFQFITLAGLHSNAYINDLFANAFSKEGMKAYVELIQSREREIGCDVLTHQKWSGADYADAMLMTVTGGVSSTAAMGKGVTENQFVDDKTKDALHKL

SEQ ID NO: 23483 - protein, 66 aa, Ipomoea batatas
MSSGCKCGSDCKCGSDCACEEVTTTVTIIEGVAPVKLTLEGSSEKATEGGHACKCGSNCTCDPCNC

SEQ ID NO: 23484 - protein, 484 aa, Xanthomonas oryzae pv. oryzae KACC10331
MLRSLIVRCRVRMSYAIVWFRRDLRLQDNPALRAALDAGHHPIPLYIDAPHEEGEWTPGAASRTWRHRSLAALEDALRALGSGLVIRAGDSAQVLDAVIAQTGAVAVYWNRKYEPATQPRDAQIKRALRERGIEAQSCNCALLFEPWQLSTQQGGPYKVFTPFWRNALTQLQLPATAPAPRSLPPLPAMLKTDALDTLQLVPSLNWDQGFWEHWHAGEAGAHEMLEFFIDGGLSGYRKNRDRPDRVGTSQLSPHLHFGEIAPWRIASALEAQRTARNGAEIDGYIRQLGWRDFAYHLLHHFPDTTNQNLNPRFEGFDWAKVDPVALQAWQRGRTGIPIVDAGMRQLWHTGWMHNRVRMIVASFLCKHLRIHWIEGARWFWDTLVDADLANNTLGWQWVAGTGADAAPYFRVFNPVTQAEKFDPHATYITRWVPELGKLPVKERFAPWLHPLSLARFAPEYPRTPIIGLAEGRDAALAAYSKSRA

SEQ ID NO: 23485 - protein, 409 aa, Glycine max
MASMPLGPQQQLPPPPPQQPPPAENDAMKVDSRGGSDAGTEKEMSAPVADGNDALTGHIISTTIAGKNGEPKQTISYMAERVVGTGSFGIVFQAKCLETGEAVAIKKVLQDRRYKNRELQLMRVMDHPNIISLSNYFFSTTSRDELFLNLVMEYVPETIFRVIKHYSSMKQRMPLIYVKLYTYQIFRGLAYIHTVPGICHRDLKPQNLLVDRLTHQVKLCDFGSAKVLVEGESNISYICSRYYRAPELIFGAAEYTTSVDIWSAGCVLAELLLGQPLFPGENQVDQLVEIIKILGTPTREEIRCMNPNYTDFRFPHIKAHPWHKVFHKRMPPEAIDLASRLLQYSPKLRYSAVEAMAHPFFDELREPNARLPNGRPLPPLFNFKQELDGAPPELLPKLIPEHVRRQTQM

SEQ ID NO: 23486 - protein, 122 aa, Magnaporthe grisea 70-15
MDRKDPMVGTGLVGAPACGDVMKLQIKVDNGTITDAKFKTFGCGSAIASSSYLTELVKGMRIEDAAKIRNTDIANNLHLPPVKLHCSMLAEDAIRAAIADYHTKNPPTNLGKSEVKTLEMEK

SEQ ID NO: 23487 - protein, 547 aa, Pseudomonas aeruginosa PAO1
MAAKEVKFGDSARKKMLVGVNVLADAVKATLGPKGRNVVLDKSFGAPTITKDGVSVAKEIELKDKFENMGAQLVKDVASKANDAAGDGTTTATVLAQAIVNEGLKAVAAGMNPMDLKRGIDKATVAIVAQLKELAKPCADTKAIAQVGTISANSDESIGQIIAEAMEKVGKEGVITVEEGSGLENELSVVEGMQFDRGYLSPYFVNKPDTMAAELDSPLLLLVDKKISNIREMLPVLEAVAKAGRPLLIVAEDVEGEALATLVVNNMRGIVKVAAVKAPGFGDRRKAMLQDIAILTGGTVISEEVGLSLEGATLEHLGNAKRVVINKENTTIIDGAGVQADIEARVLQIRKQIEETTSDYDREKLQERLAKLAGGVAVIKVGAATEVEMKEKKARVEDALHATRAAVEEGVVPGGGVALVRALQAIEGLKGDNEEQNVGIALLRRAVESPLRQIVANAGDEPSVVVDKVKQGSGNYGFNAATGVYGDMIEMGILDPAKVTRSALQAAASIGGLMITTEAMVAEIVEDKPAMGGMPDMGGMGGMGGMM

SEQ ID NO: 23488 - protein, 404 aa, Oryza sativa
MDSLRLRPSLLAARAPGAASLPPLRRDHFLPPLCSIHRNGKRPVSLSSQRTQGPSFDQCQKFFGWKSSHHRIPHRPTSSSADASGQPLQSSAEAHDSSSIWKPISSSPDAFYRFSRPHTVIGTALSIVSVSLLAVENLSDVSPLFLTGLLEAVVAALFMNIYIVGLNQLFDIEIDKVNKPTLPLASGEYSPATGVALVSAFAAMSFGLGWAVGSQPLFLALFISFILGTAYSINLPFLRWKRSAVVAALCILAVRAVIVQLAFFLHIQTFVFRRPAVFTRPLIFATAFMTFFSVVIALFKDIPDIEGDRIFGIKSFSVRLGQKKVFWICVGLLEMAYCVAILMGATSACLWSKYATVVGHAILAAILWNRSRSIDLTSKTAITSFYMFIWKLFYAEYLLIPLVR

SEQ ID NO: 23489 - protein, 492 aa, Erwinia carotovora subsp. atroseptica SCRI1043
MANYFNTLNLRQQLDQLGKCRFMGRDEFADEASYLKGKKVVIVGCGAQGLNQGLNMRDSGLDIAYALRAEAIAEKRASWRKATENGFTVGTYEDLIPQADLIVNLTPDKQHSAVVQAVQPLMKQGAALGYSHGFNIVEVGEQIRKDITVVMVAPKCPGTEVREEYKRGFGVPTLIAVHPENDPKGEGMAIAKAWAAATGGHRAGVLQSSFVAEVKSDLMGEQTILCGMLQAGSLLGFDKLVSEGTDPAYAEKLIQFGWETITEALKQGGITLMMDRLSNPAKLRAYALSEQLKGIMAPLFQKHMDDIISGEFSGGMMADWANDDVKLLTWREETGKTAFENAPQFDGKIAEQEYFDNGVLMVAMVKAGVELAFETMVSSGIIEESAYYESLHELPLIANTIARKRLYEMNVVISDTAEYGNYLFANAAVPLLKGAFMASLQPGDLGKAVAGTEVDNAQLRDVNEAIRNHPIETVGHTLRGYMKDMKRIAVAG

SEQ ID NO: 23490 - protein, 454 aa, Bacillus cereus G9241
MKETNSLSQKLKQFVLLFFPIFVTQMSLFAMSFFDTTMSGHASPIDLAGVAIGTSIWIPVSTGLTGILMATTPIVAQLVGSKKKEDVPHVVIQAVYLAIFASLVVILIGFFTVTPILNGMRLEEPVERIAAQFLSIIAIGIIPLFTYTVLRGFIDALGKTRTTMIITLLSLPINVVLNYVLIFGNFGFPKLGGVGAAIASAATYWCILIITVIIIRTKEPFASFHIFKQLYRPSLSSWKEFLKLGVPIGFAIFFETSIFAAVTLMMSNFSTTTIAAHQAAMNFASLLYMTPLSLAMAMTISVGFEVGAKRYNNAKQYGFIGIGLALAFALLYSILLYFFDDEIASIYTTDIQVHHLAKEFLIFAILFQISDAIATPVQGALRGYKDVNVALIMTLIAYWVIGLPLGYILATYTDWAAKGYWIGLIISLAFGATFLLVRLFQVQKKYTTEDRRSR

SEQ ID NO: 23491 - protein, 171 aa, Zea mays
  misc_feature (116)..(116): Xaa can be any naturally occurring amino acid
  misc_feature (146)..(146): Xaa can be any naturally occurring amino acid
  unsure (1)..(171): unsure at all Xaa locations
MAGGFRVLHLVRPFLAFLPEVQSADRKIPFREKVIYTVISLFIFLVCSQLPLYGIHSTTGADPFYWMRVILASNRGTVMELGITPIVTSGMVMQLLVGSKIIEVDNSVREDRANLXGNAILIILQLFFAGIIVICLDELLQKGYGXLGSGISLFIATNICENIIWKAFSPT

SEQ ID NO: 23492 - protein, 529 aa, Datura innoxia
MVDLGLSGSVLAVVLGFVAVFWFFIQGNGGGSKDKTDDPATTTTTTTTVYDGESRSKDGNDDVDIIIVGAGVAGAALAHTLGKEGRRVKVIERDLTEPDRIVGELLQPGGYLKLQELGLEDCVEKIDAQRVFGYALFKDGKSTRLSYPLEKFHSDVAGRSFHNGRFIQRMREKAASLPNVKLEQGTVTSLLEENGTIKGVQYKTKSGEELKAYAPLTVVCDGCFSNLRRTLCDPKVEVPSCFVGLVLENCQLPHENHGHVILADPSPILFYPISSTEVRCLVDVPGQKVPSISNGEMAKYLKNVVAPQVPAEIKDAFIAAINKGNIRTMPNRSMPAAPHPTPGALLMGDAFNMRHPLTGGGMTVALSDIVVLRDLLKPLHDLNDAPTLCRYLESFYTLRKPVASTINTLAGALYKVFCASPDQARKEMREACFDYLSLGGVFSEGPVSLLSGLNPRPLSLVCHFFAVAIYGVGRLLLPFPSPKRLWIGARLISGASAIIFPIIKAEGVRQMFFPATIPAYYRAPPEVRL

SEQ ID NO: 23493 - protein, 387 aa, Xanthomonas axonopodis pv. citri str. 306
MLALNYHGSRDVRVETVPGPLLVERDDLILRVTATAICGSDLHLYRGKIPDLRPGDILGHEFMGIVEEVGPDVTAVKPGDRVVIPFVVACGRCFHCVLQEFSACETTNTGKGAALNHKDMRPPAALFGFSHLYGGLSGGQAEYVRVPKANVGPLAVPDALHDEQVLFLSDILPTGYQAVVNAGVKQGSTVAIFGAGPVGLMAAACCRMLGAERVFMVDRHAYRLDFASRTYGVIPINFDEVDDPADVIVSQTNGRGVDASIEAVGFEAEGSAIETALTNLKLEGSSGVAIRQCIAATRRCGVVSVPGVYAGFIHAFMFGDAFDKGLTFKMGQTHVQKHMPHLLECIGNGQLKPSAIISHRMSLADAARGYDLFDKKQDDCRKVVLTP

SEQ ID NO: 23494 - protein, 396 aa, Haemophilus influenzae R2866
MFEHIKAAPADPILGLGEAFKSETRENKINLGIGVYKDAQGTTPIMRAVKEAEKRLFDKEKTKNYLTIDGIADYNEQTKALLFGKDSEVIKSNRARTVQSLGGTGALRIAAEFIKRQTKAQNVWISTPTWPNHNAIFNAVGMTIREYRYYDAERKALDWDHLLEDLSQASEGDVVLLHGCCHNPTGIDPTPEQWQELAALSAKNGWLPLFDFAYQGLANGLDEDAYGLRAFAANHKELLVASSFSKNFGLYNERVGAFTLVAENAEIASTTLTQVKSIIRTLYSNPASHGGATVATVLNDTQLRQEWENELTEMRERIKKMRHLFVQLLKEYGAEQDFSFIIEQNGMFSFSGLTGEQVDRLKEEFAIYAVRSGRINVAGITEDNIRYLCESIVKVL

SEQ ID NO: 23495 - protein, 665 aa, Photorhabdus luminescens subsp. laumondii TTO1
MIDVQINEVPLKEHSPSINDCLDEQKLLYDMLLSREFDNRSAIVTRQGRAWFHVSAAGHEGLAVLPQLMEKNDVLVPYYRDRALVLARGMSIVEMTRELMGKATSHSAGRTMSNHFCSKEHNIFSVVSLTGTQCIPAAGAAWASVLDNKNGLVVCGVGDAATRQGEFYEAVSFAVEKRLPVVFVVSDNKLGISTSTEKMAPYRLGIFNECLIRRVDARKPETLFTVAQEVFNKARFERTPCILVCRMDRLDSHSNSDSHKLYRTPDELEVLQDPIENYVAYLKEKGAITEQALAEQKERIKADVAEIFERVYHEEEPDPASVSTYLCNREGTPTVHVEMEAEETQVKAVNQVLDEALSQHPNVLIFGEDIEDPKGGVFGFTRGLSTRYPDRVINAPLSEATIIGSSVGLSASGWRPIVELQFIDFVGLGLNQLQSQLGTLSWRTVGKWRCPVVIYAPYGAYLPGGGIWHSQSSDGILAHIPGINVLVPTTPADTVALFRTALSLDMPSLILIPKHLMRERHERRLVSPVSLGQANIVRAGKDITLVAWGNTTQLATMAALQAEKDNIDIEVIELRSLVPWDKQRIAESLRKTGRLIVVQEDTRTASVGASIIADILDENDNFFSLLAPPRLVTREDIHIPFNPCLEKAVLPGTDDILASVYAVMS

SEQ ID NO: 23496 - protein, 371 aa, Rubrivivax gelatinosus PM1
MPLPTAFFHDERCLWHSTMGGFALIAPVGGWVQPPAGAGLAESPESKRRMVSLMQVSGLADKVHLRSAPMATEEDLQRVHPTAYLERFKALSDQGGGEIGLYAPFGPGSYEIARQSAGLALHAVDAVLSGAHRNAYSMSRPPGHHCLADMPMGFCLLANIPIAIEAARARHGVKRIAVLDWDVHHGNGTQSIFYERDDVLTVSLHQEGCFPVGYSGAPDRGQGRGLGYNVNVPLLPGGGHDAYLYAMERIVTPAIDRYRPELLIVASGFDANGVDPLARMLLHSESYRQLTERVMALADRHCGGRLVVVHEGGYSEACVPFCGHAVVETLAGERLGVEDPFLHFTGGQQPNERYAAFQRGLIDEMAAEFGF

SEQ ID NO: 23497 - protein, 803 aa, Alnus glutinosa
MAERVLTRVHSLRERLDETLVANRNEIVALLSRIIGKGKGICRNHQLIAEVEAIPEATRKKLLDGAFGEVLRSAQEAIVLPPWVALAVRPRPGVWEYIRVNVHALVVEELRVPEYLHFKEELVDGSTNGNFVLELDFDPFNASFPRPTLSKSIGNGVEFLNRHLSAKLFHDKESMHPLLEFLRVHCYKGKNMMLNDRIQNVNALQYVLRKAEEYLTTIAPETPYVKFEHKFQEIGLVRGWGDTAEGVLEMIQLLLVLLEAPVPCTLEKFLGKSLWLNVVIMSPHGYFAQDNVGYPDTGGQVVYILDQVRALESEMLLRIKQQGLDITPRILIVTRLLPDAVGTTCGQRLERVYGSEHADILRVPFRTEKGIVRQWISRFEVWPYLETYTEDVGVELIKELQGKPDLIIGNYSDGNIVASLLAHKFGVTQCTHAHALEKTKYPESDIYWKKMDEKYHFSSQFTADLIAMNHTDFIITSTFQEIAGSKDTVGQYESHTAFTLPGLYRVVHELCIDPKFNIVSPGADMSIYFPYTEKEKRLTSFHPEIEELLYSPVENEEHLCVLKDRNKPIIFTMARLDRVKNITGLVEWYGKNTRLRELVNLVVVAGNLEKESKDNEEKAEMTKMHGLIETYKLNGQFRWISSQMNRVRNGELYRYIADTKGGLCAGPAIYEAFGLTVVESMTCGLPTFATCKGGPAEIIVHGKSGFHIDPYHGEQAAQLLVDFFEKTKADPSHWAKISLGGLQRIHEKYTWKIYSERLLTLTGVTAFWKHVSNLDRLESRRYIEMFYALKYRKLAESVPLAVE

SEQ ID NO: 23498 - protein, 261 aa, Candida albicans SC5314
MGLKCTNYFENSKYESPNIQIITCKGCSSHLCLSDLILSDNFNGASGPAYLVEDLINIEFNLQSEETPMKTGVYKINKVKCHQCKNQLGWYYKKSYSFAETYKEGKFVIERKFINFTDNLTTTQLLTERALQNKFKRRYSNNSTNSSTSNTSNSSTISNNSISDLEIDESGSPQHESFLTKEKFKLLNRRRSSGTNGNINATLLNHLRIPYHSIRNEGRNGAEEEEDDDDEDHHEHVNIVSGTTTTSRPSNIDDDDIFVDA

SEQ ID NO: 23499 - protein, 325 aa, Zea mays
MENPAPSIVVAIAAPVAAEFVKLTFRALYMRRAGPGSREMTVPGRPSDQLGRRVVTDSPVYDGRGADARLVARIQGVTVLVGNADALFTMVFETDRLKGSTLVINGMVTDGSDEWAIYGGTGVFAMATGVMKRRNLAAGSNDGNSDELALEVFCPVFGASQQPISKQQDSISSVTKIGLWGGQGGSAQDITAEQPPRRLHSITVRAGVAVDSIEFTYTDDAGQRRTAGRWGGLGGNVRTIDLGDAEDVREVSGTYGAFEGAITLTSLRLVTSSRTWGPWGVENGTRFSITAPNGSSIAGFYARAGTRLVDAIGVYIRPVVPGRPR

SEQ ID NO: 23500 - protein, 197 aa, Triticum aestivum
  misc_feature (4)..(4): Xaa can be any naturally occurring amino acid
  unsure (1)..(197): unsure at all Xaa locations
LICXNSIIAPWKLLFALVPPYQIAHGWIAFIFSLIFISGIAYGVTKITDQISCVTGLNPYVIAFTALAAGTSWPDLVASKIAAERQVTADSAIANITCSNSVNIYVGIGVPWSINTVYNFFAYQEPLYIDNAAGLSFSLLVFFATSFGCITVLVLRRIVFGAELGGPRLWAWATSAYFMVLWVVFVLLSSLRVSGVI

SEQ ID NO: 23501 - protein, 184 aa, Alkalilimnicola ehrlichei MLHE-1
MTGEGATTERATLGGGCFWCLEAVFQRLRGVRSVVSGYAGGRRAHPSYAQVCSGATGHAEVVQIEYDPGTISYRELLQVFFTIHDPTTPNRQGADVGSQYRSVIFYHDDQQAAVAREVMSREAGRRADPIVTELTPLPAFYPAEADHQDYYRRHGGQPYCQMVIAPKLEKAARHFGRLTGDDRP

SEQ ID NO: 23502 - protein, 340 aa, Lactococcus lactis subsp. lactis Il1403
MAVTMYYEDDVEVSALAGKQIAVIGYGSQGHAHAQNLRDSGHNVIIGVRHGKSFDKAKEDGFETFEVGEAVAKADVIMVLAPDELQQSIYEEDIKPNLKAGSALGFAHGFNIHFGYIKVPEDVDVFMVAPKAPGHLVRRTYTEGFGTPALFVSHQNASGHAREIAMDWAKGIGCARVGIIETTFKEETEEDLFGEQAVLCGGLTALVEAGFETLTEAGYAGELAYFEVLHEMKLIVDLMYEGGFTKMRQSISNTAEFGDYVTGPRIITDAVKKNMKLVLADIQSGKFAQDFVDDFKAGRPKLTAYREAAKNLEIEKIGAELRKAMPFTQSGDDDAFKIYQ

SEQ ID NO: 23503 - protein, 472 aa, Hordeum vulgare subsp. vulgare
MDVPLASKVPLPSPSKHEQCNVYSHKSSSKHADLNPHAIDSVLGIILGGGAGTRLYPLTKKRAKPAVPLGANYRLIDIPVSNCLNSNISKIYVLTQFNSASLNRHLSRAYGSNIGGYKNEGFVEVLAAQQSPDNPDWFQGTADAVRQYLWLFEEHNVMEYLILAGDHLYRMDYEKFIQAHRETDADITVAALPMDEERATAFGLMKIDEEGRIIEFAEKPKGEQLKAMMVDTTILGLEDARAKEMPYIASMGIYVISKHVMLQLLREQFPGANDFGSEVIPGATSTGMRVQAYLYDGYWEDIGTIEAFYNANLGITKKPIPDFSFYDRSAPIYTQPRHLPPSKVLDADVTDSVIGEGCVIKNCKIHHSVVGLRSCISEGAIIEDTLLMGADYYETEADKKLLAEKGGIPIGIGKNSHIKRAIIDKNARIGDNVMIINVDNVQEAARETDGYFIKSGIVTVIKDALLPSGTVI

SEQ ID NO: 23504 - protein, 513 aa, Hordeum vulgare subsp. vulgare
MAMAAAASPSKILIPPHRASAVTAAASTSCDSLRLLCAPRGRPGPRGLVARPVPRRPFFFSPRAVSDSKSSQTCLDPDASTSVLGIILGGGAGTRLYPLTKKRAKPAVPLGANYRLIDIPVSNCLNSNISKIYVLTQFNSASLNRHLSRAYGSNIGGYKNEGFVEVLAAQQSPDNPDWFQGTADAVRQYLWLFEEHNVMEYLILAGDHLYRMDYEKFIQAHRETDADITVAALPMDEERATAFGLMKIDEEGRIIEFAEKPKGEQLKAMMVDTTILGLEDARAKEMPYIASMGIYVISKHVMLQLLREQFPGANDFGSEVIPGATSTGMRVQAYLYDGYWEDIGTIEAFYNANLGITKKPIPDFSFYDRSAPIYTQPRHLPPSKVLDADVTDSVIGEGCVIKNCKIHHSVVGLRSCISEGAIIEDTLLMGADYYETEADKKLLAEKGGIPIGIGKNSHIKRAIIDKNARIGDNVMIINVDNVQEAARETDGYFIKSGIVTVIKDALLPSGTVI

SEQ ID NO: 23505 - protein, 109 aa, Streptococcus mitis
LLYALLHLSGFEDVSMEEVKNFRQWGSKTPGHPEFGHTAGVDATTGPLGQGISTATGFAQAERFLAAKYNREGFNIFDHYTYVICGDGDLMEGVSSEAASYAGLQKLDS

SEQ ID NO: 23506 - protein, 145 aa, Listeria monocytogenes str. 1/2a F6854
MDESKKNERLQQLTDIQYNVTQKAGTERPFQNEFYDNEAKGIYVDIVSGKPLFSSNDQYDAGCGWPSFTKPIDEAEVIENRDLNHGMIRTEVKSADADSHLGHVFPDGPQDKGGLRYCINSAALRFIPVDKLEEEGYQAYKKIFE

SEQ ID NO: 23507 - protein, 283 aa, Oenococcus oeni PSU-1
MSILTDTYTLNNGTKIPKVAFGTWQTPDGDVAYQAVSSALKFGYRHIDTAKIYGNEKSVGRAIADSDVKREDLWVTTKLPSQDKTRDLVLADFESSLSRLGLDYVDLYLIHAPWPWGEAGSKHFDEENAEAWKTLEELQKSGRVKSIGISNFDVHDMENILKIAEIKPVVNQIQYYIGFTEPKISKFAAEHDIRIEAYSPLATGDILNSEAIRKIAGRYNVSVAQLALRFTLQNGTVTLPKAISERHIQENTQLDFTINDDDMRTLNSMPDAAPAHFHNSTQG

SEQ ID NO: 23508 - protein, 141 aa, Oenococcus oeni PSU-1
MADKDLSHLSKEQYEVTQKGATERAFTGKYDDFYEEGIYVDVVDGTPLFSSKDKYDAGCGWPSFTKPIENPSIVKKIDQSLGMTRTEVRSKDSGSHLGHVFDDGPDDKGGLRYCINSAALKFIPVKELKKAGYGEYLSLFK

SEQ ID NO: 23509 - protein, 667 aa, Cryptococcus neoformans var. neoformans JEC21
MTTMSSDVPNSPTSTSFTGTFSPAATAANTAANARTRDAPSPTTSSSGPKLETNKDQRLIVVSNRLPVTISKDDNGEYHFKMSSGGLVSALSGCKKTMSFTWIGWPGKDIPMQDRETVNRRLLEEYNCYPVYLSDELADSHYNGFSNSILWPLFHYHPGEMNFDSAHWLAYREANMRFADVVSSLVQAGDMVWVQDYHLMLLPMLLRSMITGESAQGEMVRQELGRVKEGVDDTVVKEVLKMGPGVAQAEDEGVEMLDDVEEEGGEMDVKTSPKRPHYGRGMSTFQKQELVAKEKGKEGIRIGFFLHTPFPSSEIYRILPVRREILLGVLQCDLIGFHTYDYARHFLSSCTRILGLETQPNGIEFDGRYCQVGTYPIGIDPNQFIEGLQKESIVKRLRSLEARFDGVKVIIGVDRLDYIKGIPQKLQALETFLTQHPEWIGKVVLVQLAIPSRQDVEEYQDLRACVNELVGRINGRFGTVESVPIHYMHKSVPFEELTAMYALADACLVTSTRDGMNLVAYEYISSQAERHGSMILSEFAGAAQSFNGSLLINPWDVQSTADAINQALTLSPQQRKTNWQKLFNYVSKYTAEAWGVSFVNELNRLSGQRPAGPTGLAGRRKSGSLSRTSSKASMQRRKSSQSGIATGLGAAAGAAVNWAQAQVGTQT

SEQ ID NO: 23510 - protein, 719 aa, Cryptococcus neoformans var. neoformans JEC21
MTTMSSDVPNSPTSTSFTGTFSPAATAANTAANARTRDAPSPTTSSSGPKLETNKDQRLIVVSNRLPVTISKDDNGEYHFKMSSGGLVSALSGCKKTMSFTWIGWPGKDIPMQDRETVNRRLLEEYNCYPVYLSDELADSHYNGFSNSILWPLFHYHPGEMNFDSAHWLAYREANMRFADVVSSLVQAGDMVWVQDYHLMLLPMLLRSMITGESAQGEMVRQELGRVKEGVDDTVVKEVLKMGPGVAQAEDEGVEMLDDVEEEGGEMDVKTSPKRPHYGRGMSTFQKQELVAKEKGKEGIRIGFFLHTPFPSSEIYRILPVRREILLGVLQCDLIGFHTYDYARHFLSSCTRILGLETQPNGIEFDGRYCQVGTYPIGIDPNQFIEGLQKESIVKRLRSLEARFDGVKVIIGVDRLDYIKGIPQKLQALETFLTQHPEWIGKVVLVQLAIPSRQDVEEYQDLRACVNELVGRINGRFGTVESVPIHYMHKSVPFEELTAMYALADACLVTSTRDGMNLVAYEYISSQAERHGSMILSEFAGAAQSFNGSLLINPCMPAFLLLHATVIEADLFFVFLGDVQSTADAINQALTLSPQQRKTNWQKLFNYVSKYTAEAWGVSFVNERAFSVFSLFLSYFNRIDLYKVLTAPSFISVVNRLSGQRPAGPTGLAGRRKSGSLSRTSSKASMQRRKSSQSGIATGLGAAAGAAVNWAQAQVGTQT

SEQ ID NO: 23511 - protein, 478 aa, Ralstonia solanacearum
MSKQFDVLVIGAGPGGYIAAIRAGQLGLNVACCEDNAYDDPKGEPRLGGTCLNVGCIPSKALLASSEEFENVNHHLADHGITVDGARVDVAKMLKRKDDIVGKMTKGIEFLFRKNKVTLLKGHGKFVGKTDAGYQVEIAGKAGTEVVTAKHVIIATGSKARHLPGVPVDNVTIADNEGALKFGEVPKKLGVIGAGVIGLELGSVWRRLGSDVTILEALPSFLGAADESVAKEANKLLNKQGLKINVGVKVGEIESSAKGVKVNYTDATGAAQVLECDKLIVSIGRVPNTDNLGLDAIGLATDQRGFIEVDDHCATKLPNLWAIGDVVRGPMLAHKAEDEGVAVAERIVGQKPHIDYNCIPWVIYTFPEIAWVGKTEQQLKAEGREIKAGQFPFMANGRALGMGASDGFVKVIADAKTDEILGVHVVAANASDLIAEAVVAMEFKAAAEDIGRICHPHPSMSEVMREAALAVDKRQLNM

SEQ ID NO: 23512 - protein, 316 aa, Campylobacter jejuni subsp. jejuni NCTC 11168
MYKFLSHEPLANKSCHHNHEEHSHEHHHSHADARSVDKKILKISLLMTFSMMLVQFIYSILSNSLALLSDTLHMFSDVFALALSFLAIIAVEKWQDHQKTFGYFRLEVLVAFINALTIILSALFIIYEAIEKFINPKEIDAKTMIIVAILGFLVNGINALMMFKGANLENVNMKSAFLHMMSDLLGSLAVIIGGIVVYFSDIVYIDTILAIVLSILLLRWAIILLKQSANVLLESSPVDIEKVRQVLLLNPSVDEVVDLHITQITNKMLVASMHLKVRVCNLKEFEKLSQDLSHKLLHEFEIGHITIQPIRSENEI

SEQ ID NO: 23513 - protein, 350 aa, Microscilla sp. PRE1
MKLKKVVTFGEIMLRLAPPGFLRFSQASSFDVIYGGGESNVAVSLANYGVPVDFVTRLPKNDIGECALMEMRKRGVGTDHIVWGGDRLGIYFLETGAVSRGSKVVYDRAHSAMAEIQSGMVDWKKVFAGAEWFHWTGITPAITQSAADVCLEAVKAASDLGITISTDLNYRAKLWKYCSAEKREEIMTELTSHCDIVLGNEEDAEMHFGIKPEGISVQTEGHNVKAEAFLSVCQQMMKKFPKAKKVITTLRGSISASHNTWAGVLYDGEKMYETRQYQITDIVDRVGGGDSFMGGLIYGLLKYPEDDQNALDFAVAASCLKHTIKGDANLVKVEEVEKLMGGDASGRVAR

SEQ ID NO: 23514 - protein, 1042 aa, Arabidopsis thaliana
KKKKKKTTLPGDYRPISCCNVIYKVISKIIANRLKVMLPTFILQNQSAFVRERLLIENVLLATELVKDYHKDSISPRCAMKIDISKAFDSVQWQFLLNTLEALNFPENFCHWIKLCISTATFSVQVNGELAGFFGSKRGLRQGCALSPYLFVICMNVLSHMIDVAAVHRNRGDLPAAEAPAPAHLWSAVDVIAVVGGPPSAGAGVSVAVKAGAGSSRLHLGVEKPTPFLPGVAVLYRVFVPSACPFAWGQFPGRLFGLPLLTIRRASADSSPRLVIPSSLLTSWTARSLSYAGRLALINSVIVSLSNFWMSAYRLPAGCIKEIEKLCSAFLWSGPELNPKKAKITWTSLCKLKQEGGLGIKSLLEANKVSCLKLIWRLVSRQSSLWVNWVWTYIIRKGSFWSANDRSSLGSWMWKKLLKYRDVAKSMCKVEIKSGSSTSFWYDNWSQLGQLVDVTNARRTIDMGIPLAATVATVLASHRTKHHRTAIYNKIEAEIQSILQRERSGAPDIFLWRSSGDNFRQSFITKVTWHNIRVIHTHRQWYKGVWFSYNTPKYSFLLWLAIHDRLSTGDRIKKWNSGQQVNCVLCGNVEESRNHLFFSCHYTTAIWDNLTRRLLSHEYSTDWDRLLALLCSSTMSKDSLFLFRYVFQASLYHVWRERNARRHGEAHSTTTRLIKLIDKTVRNRISSINDVGDHSYDNCLRDPNGAALRFVNVLMLKTVFIRNQIINTEWGGFSKVLPQTIFDQEMDAESPNRGEHLYEKMVSGMYLGEIVRRVLLQMCETSDLFGQFVPGGNLSKPFALKTEHLNKMQEDTTDDLQTVGLVLYNILEERRRVVEVCDTVVKRGGRLAGAGVNARIKQKGIKPHVVHIAINELGRYWRKVLARHFGRTSKRATQDGWANEVLRTDGRTDELLDGPAGEILRTAACDGRTDELLEADRLARYFGRLLETGELMSYSLSLSVLLARYFGRKIEEETKRMDSGKRTVVAMDGSLYENYPQYQQYMEEALVELLGDNRSYIVIIHAKDVSGLGAALLAATNSIYST

SEQ ID NO: 23515 - protein, 285 aa, Phaseolus vulgaris
MAKDVEVQEQGEYAAKDYQDPPPAPLFDPEELTQWSFYRALIAEFIATLLFLYVTVLTIIGYKRQTDANVGGTECDGVGILGIAWAFGGMIFILVYCTAGISGGHINPAVTFGLFLGRKVSLIRALLYIVAQCAGAICGTGLAKGFQKAYYNRCGGGANSVADGYNKGTALGAEIIGTFALVYTVFSATDPKRNARDSHVPVLAPLPIGFAVFMVHLATIPVTGAGINPARSFGAAVIYNNEKIWDDQWIFWVGPIIGAAVAAFYHQYILRAAAIKALGSFRSNA

SEQ ID NO: 23516 - protein, 164 aa, Prochlorococcus marinus subsp. pastoris str. CCMP1986
MNQFFSRRSFILIPIMSILKFILQPKKVLAAFAASDDDWNLSKEDWKNKLSPESYYILREEGTERAFSSQLNNEKRKGIFYCAGCNQPLFTSDTKFDSGTGWPSFWDPIQGSVETKVDFKLIVPRTEYHCSRCGGHQGHVFNDGPLPTGKRYCNNGLALKFIAE

SEQ ID NO: 23517 - protein, 399 aa, Ustilago maydis 521
MPSQKPRILIPGGAGYIGSHVALVTLLTRKYRVTESMLDRIAMVDRWLMKSRCASTRSVLDNYHNAFPTAVKRLEQIAIDELPEGASQQDKDDCKVDVFKGDLRSKQDIAKVFGSYSGDDKIWGVILCAALKAVGESSEIPIDYYDVNVGGLVNLLKVMHDNGCNRLVYSSSATVYGTPPKVPIPESTRLAPESVYGRTKWMSEIIIRDVCDAYPEFRAIGLRYFNPAGAHKSGKIGEDPRGKPGNLLPLLAQMAVGKYREGGLKVFGNDYPTPDGTCVRDYIHIEDLAGGHVNAVEALDRDEIFAEDKIETKGKYRAFNLGKGVGMSVLNMVDAMKKVSGYEFPYSIVERRTGDVPDLTADPSLAEKELGFKATKNLDDMAQDLWRWQSGNPQGYGEQ

SEQ ID NO: 23518 - protein, 380 aa, Vibrio sp. Ex25
MSQTAEKKAELGGAGLRGQSAGSTALCTVGKTGTGLTYRGYDITDLANNAQFEEVAHLLLRGHLPTQKELDAYKTHLLNLRGLPTELKQALELIPATAHPMDVMRTGCSVLGNLEQEMSFDEQLHSTERMLALFPAIICYWYRFSHDGVRIDTEDQTEDCIGGYFLRLLTDKEPSALHKQVMHCSLILYAEHEFNASTFAARVCASTLSDIHSCITAAIGTLRGPLHGGANEAAMEMIEDWQTPDEAEANIMKMLANKDKIMGFGHAIYRESDPRNALIKRWSKELSQQVGDTHLYAVSERVESVMKREKGLFCNADFFHASAYHFMDIPTKLFTPIFVMSRLTGWAAHVYEQRANNRIIRPSADYTGPDHQEWVPIENR

SEQ ID NO: 23519 - protein, 260 aa, Bacillus cereus G9241
MILLPDELQPEVYEAEIAPNLQAGNSLVFAHGFNVHFDQVKPPANVDVFLVAPKGPGHLVRRTFSEGGAVPALFAVYQDATGVATEKALSYADGIGATRAGVLETTFKEETETDLFGEQAVLCGGVTALVKAGFETLVDAGYQPELAYFECLHELKLIVDLMYEGGLENMRYSVSDTAQWGDFVSGPRVVTEDTKKAMGTVLAEIQDGTFARGWIAEHKAGRPNFHATNEKENEHEIEVVGRKLREMMPFVQPRVKVGMK

SEQ ID NO: 23520 - protein, 131 aa, Brassica napus
  misc_feature (12)..(12): Xaa can be any naturally occurring amino acid
  unsure (1)..(131): unsure at all Xaa locations
SQMETYFPPKKXANIYGDGNVKVVFADEDDIAKYTAKTLDDPRTVNKTVYIRPQDNVLTQNELVKIWEKLTGNELEKTNIAAKDFLANIEHMEIPHQAGIGHFYHIFYEGCLTDHKVGEDEEASSLYPDVK

SEQ ID NO: 23521 - protein, 411 aa, Arabidopsis thaliana
MNALAATNRNFKLASRLLGLDSKLEKSLLIPFREIKVECTIPKDDGTLASFVGFRVQHDNARGPMKGGIRYHPEVEPDEVNALAQLMTWKTAVAKIPYGGAKGGIGCDPSELSLSELERLTRVFTQKIHDLIGIHTDVPAPDMGTGPQTMAWILDEYSKFHGHSPAVVTGKPIDLGGSLGRDAATGRGVLFATEALLNEHGKTISGQRFAIQGFGNVGSWAAKLISDKGGKIVAVSDVTGAIKNNNGIDILSLLEHAEENRGIKGFDGADSIDPDSILVEDCDILVPAALGGVINRENANEIKAKFIIEGANHPTDPEADEILKKKGVMILPDIYANSGGVTVSYFEWVQNIQGFMWDEEKVNRELKTYMTRGFKDLKEMCQTHSCDLRMGAFTLGINRVAQATTIRGWGS

SEQ ID NO: 23522 - protein, 449 aa, Rhodospirillum rubrum
MGATLSLAWPLILTNLAQAALTTTDLLLIGSLGSRSLAAAAMAAGLFQALMLFGLGLVSATLPLLATALGRNRHSVRDVRRTVRQGLWSAGLISLPLWLILWHTEAVLIAFGQEPALAAEAAGFMHTLQWGLLPFLGYIVLRAFLSALERPMWPLLVAGLAIGFNALAAWALIFGHLGLPALGLPGAGVSSSLSSLFMVAGLALVITRQRRLKRYRLFGRFWRPDWPRLVTLWRLGLPMAISFAFEVSIFQASMMMMGILGADALAAHTIALQIATLTFMVPLGLGQAATVRVGRALGAGTIPALRRAGWVAYGAGVAFMGGAALMMLSVPRLLIGAFLDADLAENAPVIDLAVVLMALAALFQIADGAQAVCNGMLRGLHDTKVPMLLAALGYWGLGLPLGALLAFPLGVGAPGVWIGLAGGLSVVAVLMTRRWIRLVAALERASVTA

SEQ ID NO: 23523 - protein, 488 aa, Bacillus anthracis str. A2012
MNSATNQTTSQTETTKGKGELRRGLKSKHLTMISLGGTIGTGLFLASGGVIHSAGPGGALIAYAAIGIMVYFLMTSLAELAAYMPVTGSFSTYATKFVDPSLGFALGWNYWYNWAITIAAELAAVTLIMKFWFPDTPSLIWSGLCLAIIFLLNYLSVKGFGESEYWFALIKVATIIIFLIVGFMMIFGIMGGETVGFKNFTVADAPFNGGIMAIIGVFMAAGFSFQGTELLGVAAGETSDPERNIPKAIRSIFWRILLFYILAILVIGLLIPYTTESLAASDVTVSPFTLIFEKAGVAFAASVMNAVILTAVLSAGNSGMYASTRMLWDLARQGKAPKFLGKLDSRGVPVNALIVTSIVGSIAFIASLFGDGVVYIWLLNASGMSGFIAWVGIAISHYRFRKAYIAQGKDLNDLPYRAKWFPFGPIFAFALCVIVILGQNYGAFMGESIDWNGVLVSYIGLPLFLVLWLGYKFTKKTKVIPLDKCELK

SEQ ID NO: 23524 - protein, 259 aa, Bacillus subtilis subsp. subtilis str. 168
MKWTISCLQFDISYGKPSENIKKAEFFIEKESKHADVLVLPELWTTGYDLANLDELADEDGRSAQSWLKKTAKKHGVHIVAGSVAVRKNSDVYNTMYIADKEGQIIKEYRKAHLFQLMDEHLYLSAGSEDGYFELDGVKSSGLICYDIRFPEWIRKHTTKGANVLFISAEWPLPRLDHWKSLLIARAIENQCFVAACNCTGSNPDNEFAGHSLIIDPWGRVLAEGGREEGIVRAEIDLQESAEVRESIPVFDDIRKDLY

SEQ ID NO: 23525 - protein, 497 aa, Ashbya gossypii ATCC 10895
MSKETSYPKELLCADEKVVYDAIVVGAGVVGPCVATALARKGKKVLIVEREWSQPDRIVGELMQPAGVRALRSLGMVQAINNIDACSTSGYTVIYNGEKISFAYPYKADLSPPEKIPDLVFDGNDKVVDDGTISAKEFEEDEREHGVGFVHGRFLQNLRAICAAEDRVTRLQGNVISILRNDSKEVIGAKVDVPGRGKVDFKAHMTFVCDGIFSRFRKELSTTNTSKVWSSFVGLSLHHADLPTKHHGHVILGSEHMPVIAYQISSTETRILCAYNYPTLPKNVPEWLQKEVQPFIPPSLRKSFDAALESKSYKCMPNSWLPASQNNVTGLCVVGDALNMRHPLTGGGMAVGLMDVVLLVKTIGDMDFSDREEVLNELLGFHYERKAHACVINTLSIALYSLFAADSYYLKKLQKGCFEYLGRGEDWVRQPISFLSGVLPSPYLLTKVFFTVALYSVLINFRGRTPLGFLLAIYEGFAIIFTAAKVFTPFLYEQLLQ

SEQ ID NO: 23526 - protein, 438 aa, Streptomyces avermitilis MA-4680
MACVSYPYEAPVSQTLFERAAAVTPGGVNSPVRAFRAVGGTPRFMVSGNGPYLTDADGRTYVDLVCSWGPMILGHSHPEVIAAVQEAVARGTSFGTPGEGEVALAEEIVARVEPVEQVRLVSSGTEATMSAIRLARGFTRRAKVIKFAGCYHGHVDSLLAAAGSGLATFALPDTPGVTGAQAGDTIVLPYNDLDAVREAFRAHPGEIACVITEASPGNMGVVPPAPGFNQGLKDACAENGALYISDEVMTGFRTSKAGWYGVDGVRPDLMTFGKVMGGGFPAAAFGGRRDVMAHLAPAGPVYQAGTLSGNPVATAAGLAQLRLLDDAAYAKVDAVSAEIRTLVTDALTKEGVAHRLQNASNMFSVFFTDRPVNNYEDAKGQESFRFTAFFHSLLAQGVYLPPSSFESWFVSTAHDEQAVQRIADALPAAARAAAEATA

SEQ ID NO: 23527 - protein, 258 aa, Xylella fastidiosa Ann-1
MTQSRWRLDGRTALITGASTGIGLAVARELLGLGADVLLVARDADLLGRVRDELAEEFPERELHGLAADVADDVDRRAILDWVEDCSNGLHVLINNAGGNVTRAALEYTEDEWREIFEINLFSAFELCRYTQPLLACHASTAIVNIGSVSGLTHVRSGVPYGMSKAALHQMTRNLAVEWAEDGIRVNAVAPWYIRTRRTSEPLSDLYYYEQVIERTPMRRIGEPEEVAAAVAFLCLPASSYVTGECIAVDGGFMRYGF

SEQ ID NO: 23528 - protein, 472 aa, Parachlamydia sp. UWE25
MIVFAFNKSYATVHFLTELYPMGEKMNTLTMLRQRSSQVVETSDSQSVDMRQVASLILSGGEGTRLHPLTLARCKPAINFGGKYRLIDVPISNSLHAGCKKVFLLTQFLSSSLHQHVFQTYMQGPGAGSIEILTAEQKPSKKNWFQGTADAVRQNIDYLLESPFEYFLILSGDQLYNIDFQEMVHFAKKNDSDVVVATIPVNTQDAKRMGILKVDEQNSITSFYEKPQDNDLLQQLRSPSNILEKAGVAPTGERVYLGSMGIYLFKRKALVELLSEDIREDFGKHLIPTKVASGKISAYLYTGYWEDIGTIETFYQANLALTETNPVFNFHNEARPIYTYRYDLPPAKFTTCQIQKSILCEGSIIEADEITHSLLGPRTVIGSGAIIRDSYLMGNDYYVSPVNDHCKLPSEPQIGENCIIKKAIIDKNVRIGKGVQLINKQQLTRYESELVFIRDGIIVVPRGSVLPDGFIL

SEQ ID NO: 23529 - protein, 983 aa, Oryza sativa
  misc_feature (820)..(820): Xaa can be any naturally occurring amino acid
  misc_feature (862)..(862): Xaa can be any naturally occurring amino acid
  unsure (1)..(983): unsure at all Xaa locations
CSRALLLLLEASGIWSRADAMAALVRPAVLPVCAMTGGGGNDKRSPPQQRSWWGGNKQRLPHQPRRQPGGNGGRGGGGGALDQVLGVLRRDGEFLQAAAGAPLRDIFWLRFLEKKKQQRRRKQPKPKPKPPEQQQQQEEAAAAIQAPSFPPPSYRPGLSCLDLMTADFEALKLYIGYSKHAIEQQFLKGERQPQHQQTPKPKLQQQQQQQQKKQQQQEHQNQTLQPPAFPPPSYPPGLCGMELMMADIEALKLYINYYVAILTTPLPQHYDPEILSRYFTSRPHILAFRTIQIIFAFVSAAVKMQISKRTNLITDATYSGNSTGSKGFNASQYMVGQLLKETFLDLGPTFVKVGQSLSTRPDITGSEISEALAELHEKVPPFPRKDAMKIIEGEFELPVSHIFSYISDEPVAAASFGQVYQGRTVDGALVAIKVQRPNLLPSVLRDIYILRLGLSFVRKVAKRKSNIALYADELGKGLVGELDYNIEAANATKFLEYHSRYSFMLVPKVLKQLTRRRVLTMEWVSGENPTDLLSLSKGISSEIAESSEKQKIEATARLLDLVNKGVEASLVQLLETGLLHADPHPGNLRYTPEGRVGFLDFGLLCMMEKKHQHAMLASIVHIVNGDWASLVYDLTAMDVVPPRTNLRRVTMDLEDALGEVTFEDGIPDIKFSRVLGKIWSVAFKYHFRMPPYYTLVLRSLASLEGLAIAADGTFKTFQAAYPYVVRKLLSDNSVATRRLLHQAIFNKRKEFQWNKITVFLKLASARGNFRYNTGVLPERKGLDVAKLVEISDASSSLHLNRATPERALHTANLCLRLCTXSRRALVIRRLVMTANAKSLARDLISKDASIYRVLLSRVLADXVIFQWMVKATGFKRAGQLEPHPRVTAGKNDEDLGLSKEAPALVTFQTAVRDRRLKVIFSKFVRDIREDPILMVRVSWNMFAISVVSAAIGVHRFIVVLSEEFLSTLPPPVPPPRLVQIQSI

SEQ ID NO: 23530 - protein, 412 aa, Cryptococcus neoformans var. neoformans B-3501A
MIKLTIALGVLAMPQALLDVGAVPGVIIIIAVALLTTWSGLVVGQFKRNHPEVYSMDGVGYVLAGKWGREFFSFIYPLFMVFVCGSGYVTLSIAFNAITNHATCTVVWTVIGMVVTLALASLQTLSKVSVLGWIGFFSIMSAILIITVAVGVEERPEAAPSTGSWDKDIHAFRSDGTFLKGMGAVSTVVFAYCGTPAFFNVIGEMRDPTQFNLALYSAQSICSAVYLTIGIVVYYYCGQYLSNPALGSAGILIKKIAYGVALPGLFVGCILFTHVGAKMVFVRVLRGSDHLTAPSFTHWAVWLGTVGTCVLIAFVLAESIPFFGDFVSLIGATLGTFLCFITEGWMWLHDNWGHRKIDKSLRFKSLVALNVFLIVMGIFIIITGTWASVVSIRDSYKNGMITSPFSCADNSS

SEQ ID NO: 23531 - protein, 278 aa, Glycine max
SSRLLNPRILFASGVVATTDVVEACTGVNIAVMVGGFPRKEGMERKDVMTKNVSIYKSQASALEKHAAANCKVLVVANPANTNALILKEFAPSIPEKNISCLTRLDHNRALGQISERLTVQVSDVKNVIIWGNHSSTQYPDVNHATVATSAGEKPVRELIADDAWLNGEFITTVQQRGAAIIKARKLSSALSAASAACDHIRDWVLGTPQGTWVSMGVYSDGSYNVPAGLIYSFPVTCANGEWAIVQGLSIDEFSRKKLDLTAEELSEEKALAYSCLN

SEQ ID NO: 23532 - protein, 526 aa, Coprinellus congregatus
MFKFAVLSQFVALALAAIGPQADLFIGNANVAPDGFQRSAALAGTDANSMVFPGPVIQAFKGETFNINVRNRLADPSMLRTTSIHWHGFLQAGSAWADGPVGVTQCPIAPNRDFLYTFATARQAGTFWYHSHHRSQYCDGLRGAMVVYDPEDPHRSLYDVDNEDTIITLADWYHPPGPVLETLNVATANSTLINGKGRYPTGPTTPLAVVGVTAGKRYRFRLVSISCSPFFTFSIDGHRMTIIEADGESTQPLVVDSIDIHAGQRYSFVLEANQPVANYWIRSNPNRGNRGFAGGLNTAILRYVGAPDADPVKPSDVDVPVPALPLVETNLHPLENPAAPGPPALGGEGVTAIELQIGLQGREWTVNGATFHEPNEPILLQTLNGKQMNELLPNQGSLFPIPRNSVIELTMPGGGAGSPHPMHLHGHMFSVIRSASNSTPNFVNPVRRDVVSLGSNTADRVTVRFVTDNAGPWIMHCHIDWHLVHGLSVVFVEDIEGISDSQRVAEDHPWRQLCPIYEQEKPDNEP

SEQ ID NO: 23533 - protein, 588 aa, Arabidopsis thaliana
MGTNQTQISDEYVTGNSSGVGGGISDVYGEDSATLDQLVTPWVTSVASGYTLMRDPRYNKGLAFTDKERDAHYITGLLPPVVLSQDVQERKVMHNLRQYTVPLQRYMALMDLQERNERLFYKLLIDNVEELLPVVYTPTVGEACQKYGSIYRRPQGLYISLKEKGKILEVLKNWPQRGIQVIVVTDGERILGLGDLGCQGMGIPVGKLSLYTALGGIRPSACLPITIDVGTNNEKLLNNEFYIGLKQKRANGEEYAEFLQEFMCAVKQNYGEKVLVQFEDFANHHAFELLSKYCSSHLVFNDDIQGTASVVLAGLIAAQKVLGKSLADHTFLFLGAGEAGTGIAELIALKISKETGKPIDETRKKIWLVDSKGLIVSERKESLQHFKQPWAHDHKPVKELLAAVNAIKPTVLIGTSGVGKTFTKEVVEAMATLNEKPLILALSNPTSQAECTAEEAYTWTKGRAIFASGSPFDPVQYDGKKFTPGQANNCYIFPGLGLGLIMSGAIRVRDDMLLAASEALASQVTEENFANGLIYPPFANIRKISANIAASVGAKTYELGLASNLPRPKDLVKMAESCMYSPVYRNFR

SEQ ID NO: 23534 - protein, 456 aa, Pseudomonas fluorescens PfO-1
MTTSRETRDYQAADAAHHIHAFVDQKALNDEGPRVMVRGDRLHLWDNDGRRYLDGMSGLWCTNLGYGRKDLNAAASRQLEQLPYYNMFFHTTHPQVIELSELLFSLLPGHYSHAIYTNSGSEANEVLIRTVRRYWQVLGKPEKKIMIGRWNGYHGSTLAATALGGMKFMHEMGGMIPDIAHIDEPYFFAHEGNLTPAEFGLRAAQQLEAKILELGADKVAGFIAEPFQGAGGMIFPPESYWPEIQRICRQYDVLLCADEVIGGFGRTGEWFAHEYFGFEPDTLSIAKGLTSGYIPMGGLILSKKMADVLVEQGGVFAHGLTYSGHPVAAAVAIANLKALRDEGVVTRVKDDIGPYLQQCLREVFGNHPLVGDIQGTGMVAALQLAEDKATRKRFANENDIAWRCRTIGFEEGVIIRSTLGRMIMAPALIASREEIDELVGKTLKALDRTAQEYGRL

SEQ ID NO: 23535 - protein, 213 aa, Oryza sativa (japonica cultivar-group)
MSLSLGFSAGAGVGADRLAAAPALQAAGALPPRVDVSLSLARAANGQPSSYLPLNENDSLDMVLFDVLREASAVAALSSSSSSSPELGARTTAPVVAGHPAGRKGGGGGGGGRGAAARGGAAGGRHYRGVRRRPWGKYAAEIRDPTRHGARLWLGTFGTAEEAAAAYDRAAFRMRGAKALLNFPPAVAGDGARRGAAAAAKQVGMSDESETKN

SEQ ID NO: 23536 - protein, 318 aa, Arabidopsis thaliana
MAKETVCVTGANGFIGSWIIRTLIEKGYTKIHASIYPGSDRTHLLQLPGSDSKIKIFEADLLDSDAISRAIDGCAGVFHVASPCTLDPPVNPEKELVEPAVKGTINVLEAAKRFNVRRVVITSSISALVPNPNWPEKVPVDESSWSDLDFCKSRQKWYPISKTLAEKAAWEFSNKHGTNIVTIHPSTCLGPLLQPNLNASCAVLLQLLQGSTETQEHHWLGVVHVKDVAKGHVMLFETPEASGRFLCTNGIYQFSEFAALVSKLFPEFAVHKFDKETQPGLASCNDAAKRLIELGLVFTAVEDAVKETVQSLRDKGFL

SEQ ID NO: 23537 - protein, 541 aa, Oenococcus oeni PSU-1
MTDPVSILNDPFINKGTAFTEAEREELGLNGLLPAKVQALQEQVDQTYAQFQSKVSNLEKRLFLMEIFNTNHVLFYKLFSQHVVEFMPIVYDPTIADTIENYSELFVEPQGAAFLDINHPENIQSTLKNAANGRDIKLLVVSDAEGILGIGDWGVQGVDIAVGKLMVYTVAAGIDPSTVLAVVIDAGTNNEKLLKDPMYLGNKFNRVRGDKYYDFIDKFVNHAESLFPNLYLHWEDFGRSNASNILNSYKDKIATFNDDIQGTGIVVLAGVLGALKISGQKLTDQTYMSFGAGTAGMGIVKQLHEEMVEQGLSDEEAKKHFFLVDKQGLLFDDDPDLTPEQKPFAAKRSDFKNANQLTNLQAAVEAVHPTILVGTSTHPNSFTEEIVKDMSGYTERPIIFPISNPTKLAEAKAEDVLKWSNGKALIGTGVPVDDIEYEGNAYQIGQANNALIYPGLGFGAIAAQSKLLTPEMISAAAHSLGGIVDTTKVGAAVLPPVSKLADFSRTVAVAVAKKAVEQGLNRQPIDDVEKAVDDLRWEPKY

SEQ ID NO: 23538 - protein, 268 aa, Escherichia coli CFT073
MERYESLFAQLKERKEGAFVPFVTLGDPGIEQSLKIIDTLIEAGADALELGIPFSDPLADGPTIQNATLRAFAAGVTPAQCFEMLALIRQKHPTIPIGLLMYANLVFNKGIDEFYAECEKVGVDSVLVADVPVEESAPFRQAALRHNVAPIFICPPNADDDLLRQIASYGRGYTYLLSRAGVTGAENRAALPLNHLVAKLKEYNAAPPLQGFGISAPDQVKAAIDAGAAGAISGSAIVKIIEQHINEPEKMLAALKAFVQPMKAATRS

SEQ ID NO: 23539 - protein, 544 aa, Chlamydia muridarum
MVAKNIKYNEEARKKIQKGVKTLAEAVKVTLGPKGRHVVIDKSFGSPQVTKDGVTVAKEVELADKHENMGAQMVKEVASKTADKAGDGTTTATVLAEAIYTEGLRNVTAGANPMDLKRGIDKAVKVVVDQIKKISKPVQHHKEIAQVATISANNDAEIGNLIAEAMEKVGKNGSITVEEAKGFETVLDVVEGMNFNRGYLSSYFATNPETQECVLEDALVLIYDKKISGIKDFLPVLQQVAESGRPLLIIAEDIEGEALATLVVNRIRGGFRVCAVKAPGFGDRRKAMLEDIAILTGGQLISEELGMKLENASLAMLGKAKKVIVSKEDTTIVEGMGEKEALDARCESIKKQIEDSTSDYDKEKLQERLAKLSGGVAVIRVGAATEIEMKEKKDRVDDAQHATIAAVEEGILPGGGTALIRCIPTLEAFLPMLTNEDERIGARIVLKALSAPLKQIAANAGKEGAIIFQQVMSRSANEGYDALRDAYTDMIEAGILDPAKVTRSALESAASVAGLLLTTEALIAEIPEEKPAAAPAMPGAGMDY

SEQ ID NO: 23540 - protein, 137 aa, Brassica napus
  misc_feature (107)..(107): Xaa can be any naturally occurring amino acid
  unsure (1)..(137): unsure at all Xaa locations
LSLTSPTLPLSFYACESVVEMFSSGLRVLVVDDDPTCLTILERMLRACSYEVTKCNRAEMALSLLRKNKHGFDIVISDVHMPDMDGFELLEHIGLEMDLPVIMMSAXDNSKSVVLKAVMYGAVDYLIKPVRIEALQN

SEQ ID NO: 23541 - protein, 522 aa, Oryza sativa
ISTMQFSSVFPLEGKACVSPIRRGGEGSASDRLKIGDSSSIKHDRAVRRMCLGYRGTKNGAQCVLTSDAGPDTLHVRTSFRRNFADPNEVAAVILGGGTGTQLFPLTSTRATPAVPIGGCYRLIDIPMSNCFNSGINKIFIMTQFNSASLNRHIHRTYLGGGINFTDGSVEVLAATQMPGEAAGWFQGTADAVRKFIWVLEDYYKHKAIEHILILSGDQLYRMDYMELVQKHVDDNADITLSCAPVGESRASDYGLVKFDSSGRVIQFSEKPKGTDLEAMKVDTSFLNFAIDDPTKFPYIASMGVYVFKRDVLLNLLKSRYAELHDFGSEILPRALHEHNVQAYVFADYWEDIGTIRSFFDANMALCEQPPKFEFYDPKTPFFTSPRYLPPTKSDKCRIKDAIISHGCLLRECTIGHSIVGVRSRLNSACELKNTMMMGADLYETEDEISRLLSEGKVPIGVGENTKINNCIIDMNARVGRNVVITNSEGVQESDRPEEGYYIRSGIVVILKNATIKDGKVI

SEQ ID NO: 23542 - protein, 324 aa, Synechococcus elongatus PCC 6301
MTAQAPTVICLGEMLWDCLANDRDLPAEQVQSWTPWPGGAPANVATALVKLGVQSGLITCLGSDPEGDRLFQVLQDNGVAIAAVQRHPRLPTRQVQVLRTAQGDRQFGGFGAIACDQFADTELQAEQLPQAWFRLAKVLCLGTIPLAYPSSAIAAQQALTWANQQGMTVLLDVNWRPSFWPDPSLAPDRIRAILPQIQQLKLAREEAEWLFDTVDPATIQARQPQLQAVLITDGDRGCHYWVAGWQGHCPSFPVKAIDTTGAGDAFVAAWLAQNTQMDFQWTSAEQVQTAIRWASAAGALTTLNPGAIAAQPTSDAIQSLLSKT

SEQ ID NO: 23543 - protein, 460 aa, Petunia x hybrida
MDSKQSSELVFTVRRQEPELIAPAKPTPRETKFLSDIDDQEGLRFQIPVINFYRKDSSMGGKDPVEVIKKAIAETLVFYYPFAGRLREGNDRKLMVDCTGEGVMFVEANADVTLEEFGDELQPPFPCLEELLYDVPGSAGVLHCPLLLIQVTRLRCGGFIFALRLNHTMSDAPGLVQFMTAVGEMARGATAPSTLPVWCRELLNARNPPQVTCTHHEYEEVPDTKGTLIPLDDMVHRSFFFGPTEVSALRRFVPPHLHNCSTFEVLTAALWRCRTISIKPDPEEEVRVLCIVNARSRFNPQLPSGYYGNAFAFPVAVTTAEKLCKNPLGYALELVKKTKSDVTEEYMKSVADLMVIKGRPHFTVVRTYLVSDVTRAGFGEVDFGWGKAVYGGPAKGGVGAIPGVASFYIPFRNKKGENGIVVPICLPGFAMEKFVKELDSMLKGDAQLDNKKYAFITPAL

SEQ ID NO: 23544 - protein, 468 aa, Erwinia carotovora subsp. atroseptica SCRI1043
MTLEHQFDYDAIIIGSGPGGEGAAMGLAKHGAKIAVIERHYNVGGGCTHWGTIPSKALRHAVSRIIEFNQNPLYSDNSRIIRSSFSDILRHADSVIGQQTRMRQGFYERNQCELFSGEASFIDAHTIAVHYPDNTHETLTAANIIIATGSRPYHPAEVDFNHPRIYDSDSILQLDHEPQHVIIYGAGVIGCEYASIFRGLSVKVDLINTRDRLLAFLDQEMSDALSYHFWNNGVVIRHNEEFDSIEGLSDGVIVNLKSGKKMKADCLLYANGRTGNTETLGLENIGLSTDSRGQLKVNSMYQTALAHIYAIGDVIGYPSLASAAYDQGRLAAQAIIKGDASAHLIEDIPTGIYTIPEISSVGKTEQELTAMKVPYEVGRAQFKHLARAQIVGMNVGSLKILFHRETKQILGIHCFGERAAEIIHIGQAIMEQKGEGNTIEYFVNTTFNYPTMAEAYRVAALNGLNRLF

SEQ ID NO: 23545 - protein, 268 aa, Escherichia coli O157:H7 EDL933
MERYESLFAQLKERKEGAFVPFVTLGDPGIEQSLKIIDTLIEAGADTLELGIPFSDPLADGPTIQNATLRAFAAGVTPAQCFEMLALIRQKHPTIPIGLLMYANLVFNKGIDEFYAQCEKVGVDSVLVADVPVEESAPFRQAALRHNVAPIFICPPNADDDLLRQIASYGRGYTYLLSRAGVTGAENRAALPLNHLVAKLKEYNAAPPLQGFGISAPDQVKAAIDAGAAGAISGSAIVKIIEQHINEPKKMLAALKAFVQPMKAATRS

SEQ ID NO: 23546 - protein, 408 aa, Thermus thermophilus HB8
MRRVVVTGLGALTPIGVGQEAFHKAQLAGKSGVRPITRFDASALPVRIAAEVDVDPGAYLDRKELRRLDRFVQYALIAAQLALEDAGLKPEDLDPERVGTLVGTGIGGMETWEAQSRVFLERGPNRISPFFIPMMIANMASAHIAMRYGFTGPSSTVVTACATGADALGSALRMIQLGEADLVLAGGTEAAITPMAIGAFAVMRALSTRNEEPEKASRPFTLSRDGFVMGEGAGVLVLEAYEHAKKRGARIYAELVGFGRSADAHHITEPHPEGKGAALAMARALKDAGIAPEQVGYINAHGTSTPVGDRAEVLAIKRVFGDHAKRLMVSSTKSMIGHLLGAAGAVEAIATVQALYHGVIPPTINLEDPDPELDLDFVPEPREAKVDYALSNSFAFGGHNAVLAFKRV

SEQ ID NO: 23547 - protein, 380 aa, Daucus carota
MVKELHTVCVTGASGFIGSWLVLRLLQRGYTVRATVRDPGNPQKVKHLLQLPKAETNLILCRADLNEEGSFDDAVKGCHAVFHMATPMDIESQDPENEVIKPTVQGVLDIITACAKAKTVKKLIYTSSAGTVNVREHQLPVYDESNWSDMDFIYSTKMTAWMYFVSKSLAEKAAWQAAEENNIQFISIIPTLVVGPFISPTFPPSLITALSPLTGNEAHYSIIKQCQYVHLDDLCESQIFLYEHPTAQGRYICSSHDATIHDVVKLIREKWPEYNVPTEFKGIEKDLPVISFSSKKLTDMGFTFKYNLEDMFKGAIETCREKGLLPNSTTLQENDQEKKYLFSATDDHHNGHEKDLFHHSIDKDAIGKEKRGETESLVAA

SEQ ID NO: 23548 - protein, 877 aa, Vibrio parahaemolyticus
MNEKYAALKSNVRMLGHLLGNTIRDAHGEEIFEKVETIRKLSKSAQAGNQADRESLIEEIKHLPDEQLTPVTRAFNQFLNLTNIAEQYHTISRHCEEHICEPDAINSLFSKLVQNDVSKLDTAQAVRDLNIELVLTAHPTEITRRTMINKLVKINECLSKLELSDLSSKERKKTERRLEQLIAQSWHSDVIRQQRPTPLDEAKWGFAVVENSLWEAVPDFLREMNDRLKSYLGEGLPIDARPVHFSSWMGGDRDGNPFVTHSVTREVLLLSRWKAADLYLNDINELISELSMTVSNDQVRELAGEDQHEPYRAILKQLRALLNETKDILDAKIHGQKLAVKAPLQKVEQLWDPLYACYQSLHECGMGVIADGSLLDTLRRVKAFGVHLVRLDIRQESTRHADVLSELTRYLGIGDYEQWSEQDKIAFLTNELASKRPLLPRDWEPSEPVKEVLDTCKIIALQPREAFGAYVISMARTASDVLAVHLLLQEAGCPYRMDVCPLFETLDDLNNAESVIKQLMSIDLYRGFIQNHQMVMIGYSDSAKDAGVMSAGWAQYHAMESLVKVAEDEGVELTLFHGRGGTVGRGGAPAHAALLSQPPKSLKGGLRVTEQGEMIRFKLGLPDVAVNSFNLYASAILEANLLPPPEPKQEWRDLMEVLSEVSCEAYRGVVRGEPDFVPYFRQATPELELGKLPLGSRPAKRNPNGGVESLRAIPWIFSWSQNRLVLPAWLGAGEAIQYSVDKGHQALLEEMCREWPFFSTRLGMLEMVYTKCNMEISRYYDQRLVEPQLQPLGDRLREQLQRDIKSVLNVENNENLMQSDPWGQESIRLRNIYVEPLNMLQAELLYRTRQTEEASANLEEALMVTIAGIAAGMRNTG

SEQ ID NO: 23549 - protein, 332 aa, Daucus carota
ENKTVCVTGASGYIGSWLVKTLLERGYHVRATVRDPGNERKVKNLLELPNASTHLSLWKADLAEESSYDDAVQGCHGVFHVATPMELLYQDEPAENEEIESTTLNGILSIMRSCSKAKTVKRFIYTSTTATILMQRQPPVDEYTEEHWSDLDLCYEIKMYGWMYVVAKTTAERAAWKYAEENGIDMVTVHPSIVLGHFNTPHTSFSTEAATALYTKNEANMALLKKLHGSPAVHLDDVCNAHIYLFEHPLAKGRYICSSHTYNVFEIGHSLSLKYPERNIPTEFEGLDKSQRINPVSSKKLMSLGFEFAHKNKSVGDLCAETIESCREKGLL

SEQ ID NO: 23550 - protein, 231 aa, Arabidopsis thaliana
MAAFPNLNSGSGLKKLDEHLLTRSYITGYQASKDDITVFTALSKPPTSEFVNVSRWFNHIDALLRISGVSAEGSGVIVEGSSPITEEAVATPPAADSKDTAAEEEDDDDVDLFGEETEEEKKAAEERAASVKASTKKKESGKSSVLMDIKPWDDETDMKKLEEAVRSIQMEGLFWGASKLVPVGYGIKKLHIMCTIVDDLVSIDTMIEEQLTVEPINEYVQSCDIVAFNKI

SEQ ID NO: 23551 - protein, 919 aa, Corynebacterium crenatum
MTDFLRDDIRFLGRILGEVIAEQEGQEVYELVEQARLTSFDIAKGNAEMDSLVQVFDGITPAKATPIARAFSHFALLANLAEDLHDEELREQALDAGDTPPDSTLDATWLKLNEGNVGAEAVADVLRNAEVAPVLTAHPTETRRRTVFDAQKWITTHMRERHALQSAEPTARTQSKLDEIEKNIRRRITILWQTALIRVARPRIEDEIEVGLRYYKLSLLEEIPRINRDVAVELRERFGEDVPLKPVVKPGSWIGGDHDGNPYVTAGTVEYSTRRAAETVLKYYARQLHSLEHELSLSDRMNEVTPQLLELADAGHNDVPSRVDEPYRRAVHGVRGRILATTAELIGEDAVEGVWFKVFTPYASPEEFLNDALTIDHSLRESNDVLIADDRLSVLISAIESFGFNLYSLDLRQNSESYEDVLTELFERAQVTANYRELSEEEKLEVLLKELRSPRPLIPHGSDEYSEVTDRELGIFRTASEAVKKFGPRMVPHCIISMASSVTDVLEPMVLLKEFGLIAANGDNPRGTVDVIPLFETIEDLRAGAGILGELWKIDLYRNYLLQRDNVQEVMLGYSDSNKDGGYFSANWALYDAELQLVELCRSAGVKLRLFHGRGGTVGRGGGPSYDAILAQPKGAVQGSVRITEQGEIISAKYGNPETARRNLEALVSATLEASLLDVSELTDHQRAYDIMSEISELSLKKYTSLVHEDQGFIDYFTQSTPLQEIGSLNIGSRPSSRKQTSSVEDLRAIPWVLSWSQSRVMLPGWFGVGTALEQWIGEGEQATQRIAELQTLNESWPFFTSVLDNMAQVMSKAELRLAKLYADLIPDREVAERVYSVIHEEYFLTKKMFCVITGSDDLLDDNPLLARSVQRRYPYLLPLNVIQVEMMRRYRKGDQSEQVSRNIQLTMNGLSTALRNSG

SEQ ID NO: 23552 - protein, 534 aa, Methanosarcina acetivorans C2A
MKYIVVTGGVMSGLGKGITIASIGRNLKNKGYKVTAIKIDPYINIDAGTMSPYQHGEVFVLRDGGEVDLDLGNYERFLDTELTRDHNLTTGKIYQEVIAKERRGDYLGKTVQIIPHITNEIKSRIRKVAARSGADVCLVEIGGTVGDIESMPFLEAVRQMHREEPSENIVFIHVTLVMEDLQGEQKTKPSQHSVKELRALGLSPEVIVTRSKTPLQESAKEKIALFCDVPQELVISAHDAADIYEVPLEIEEQGLTTRLMKHLKLESSVEDNGWREMVSRMKSTTEEVKLAIVGKYTNLEDSYLSILEAVKHGGIDNGCKVEVNMVEAETLEEDPAEIEKLRQFDGILIPGGFGGRGTEGKMLAIKFARENDVPFLGICLGMQLAVIEFARNVVNLENANSTEFDEDTPYPVIDILPEQTGVADMGGTMRLGDYDAILKDGSLATKLYGTNYIVERHRHRYEVNPEFVDRLESFGIVFSGKNKNRMEIAEIPDKRFFFASQFHPEFRSRPGRPSPPFKGLVRAMCKYNKEKEGQ

SEQ ID NO: 23553 - protein, 465 aa, Haemophilus influenzae R2866
MGPSTDRDNNLEKIIAAGANVVRMNFSHGTPDDHIGRAERVRSIAKKLGKTVAILGDLQGPKIRVSTFKDGKIFLNIGDKFILDAELPKGEGTQESVGLDYKTLPQDVVPGDILLLDDGRVQLKVLSIDGAKVFTEVTVGGPLSNNKGINKLGGGLSADALTEKDKADIITAARIGVDFLAVSFPRSSADLNYARELAQQAGLNAKIVAKVERAETVANDEAMDDIILASDVIMVARGDLGVEIGDPELVGVQKKLIRRSRQLNRAVITATQMMESMISNPMPTRAEVMDVANAVLDGTDAVMLSAETAAGQYPSETVAAMASVCLGAEKMPSINVSRHRMDKEFETIEESVAMSAMYAANHMKGVAAIVTLSSTGRTPLLMSRISSGLPIFALSRNQETLNLCALYRGVTPIYHGEESRTEAGAKAALQSLKEKGYLSTGDLVLVTQGGQGATQTNVCRTLIVE

SEQ ID NO: 23554 - protein, 280 aa, Lactococcus lactis subsp. lactis Il1403
MIEQEKYTLNDGHLIPKIGLGTFQIRGYEGVEQILTAIQSGYRLLDTSTNYDSEGAVGEAIRRSGIPRSNFFVTTKLPGKYHHFEDALKMIEESLLRTGLSYFDLYLIHWPLPKRDNYVEAWKALIAAKKRGLVRSIGVSNFEEDHLDKIIQETGVIPAINQNEIHPYWPQEKLLKINKKYGILTEAWSPLGRGSKELEESLIQNIAQKYGKDTGQIILRWQVERGIIPIVKATSPEHQRRNIDIFDFSLSSEEINKITALKQENGRVDNQDPNEYEEFV

SEQ ID NO: 23555 - protein, 306 aa, Glycine max
  misc_feature (262)..(262): Xaa can be any naturally occurring amino acid
  unsure (1)..(306): unsure at all Xaa locations
MQIFVKTLTGKTITLEVESSDTIDNVKAKIQDKEGIPPDQQRLIFAGKQLEDGRTLADYNIQKESTLHLVLRLRGGMQIFVKTLTGKTITLEVESSDTIDNVKAKIQDKEGIPPDQQRLIFAGKQLEDGRTLADYNIQKESTLHLVLRLRGGMQIFVKTLTGKTITLEVESSDTIDNVKAKIQDKEGIPPDQQRLIFAGKQLEDGRTLADYNIQKESTLHLVLRLRGGMQIFVKTLTGKTITLEVESSDTIDNVKAKIQDKXEGIPPDQQRLIFAGKQLEDGRTLADYNIQKESTLHLVLRLRGGF

SEQ ID NO: 23556 - protein, 245 aa, Lactococcus lactis subsp. lactis Il1403
MHSEMVQLLGEFLGTFILILLGNGVVSGVVLNKTKATGAGWVAITLGWGFAVMMGVYISGFMSPAHLNPAVTIAMAMIGSFSWSLVLPYIIAQMLGAMVASIILYLMFYPHYAETKNPADILGTFSTGPAIRQTSSNLISEIVGTAVLTTGILAFGQYAITQTSGVSPLLVGAIITAIGLSLGATTGYSLNPARDLGPRIMHAILPIKGKGDSDWSYAWIPVVGPIIGGSLGALLFNMVIQFASK

SEQ ID NO: 23557 - protein, 696 aa, Schizosaccharomyces pombe
MTEIFGKLHRSSNSENTNQASPSTIQSHSTQPVLSNDHSTKVNDYEGKEGASSNGYDPVFMSDRMKMRYNEITAQLHKEQSLKEDKESGSNSSESNGITPMGTYSEKPKLLQSRTPPSSCYIRHDTVVPKDKNGQHAFGRLYVRLHQGRDLNVKSVNAQPYAVITFEKTQVMVPPPLKDIDGGIPISIPSKNRPLAGSRSGSSSGLHSELMLADVRCPHWDFETVFDVTKMKSQMVVSVYDKYEDDKFLGSVKITPIFLHEYVQEAWYKLEPLDLTKSLEGEIKVETIYEHIEHVRYGPEDFTALRLIGKGTFGQVYLVRKNDTNRIYAMKKISKKLIVRKKEVTHTLGERNILVRTSLDESPFIVGLKFSFQTASDLYLITDYMSGGELFWHLQHEGRFPEQRAKFYIAELVLALEHLHKHDIIYRDLKPENILLDADGHIALCDFGLSKANLSANATTNTFCGTTEYLAPEVLLEDKGYTKQVDFWSLGVLVFEMCCGWSPFYAPDVQQMYRNIAFGKVRFPKGVLSSEGRSFVRGLLNRNPNHRLGAVADTTELKEHPFFADINWDLLSKKKVQPPFKPNVQNDLDVSNFDKEFTNTNVKNINIVSNVDPANASTPLSNTIQDRFRGFTFVNKSIDEQFQNLGLQENEETDNLHACRTTTHSSVNSINSHGNPRTVDANDPVADTVFGETFEA

SEQ ID NO: 23558 - protein, 546 aa, Burkholderia fungorum LB400
MAAKEIIFSDVARSRLVEGVNILANAVKVTLGPKGRNVVLERSFGSPVVTKDGVSVAKEIELSDRVQNIGAQLVKEVASRTSDAAGDGTTTATVLAQAIVREGQKYVAAGLNPLDLKRGIDKAVIAAIEELKKISKPTTTSKEIAQVATISANGEESIGQRIAEAIDRVGKEGVITVEDGKSLDDELDVVEGLQFDRGYLSPYFINDQDKQVAVLDNPFVLLHDRKVSNIRDLLPILEQVAKAGRPLLIIAEDVEGEALATLVVNNIRGILKTVAVKAPGFGDRRKALLEDIAILTGGQVIAEETGLSLEKATLAELGQAKRIEVGKENTTVIDGAGDSKNIEARVKQIRTQIEEATSDYDREKLQERVAKLAGGVAVIKVGGATEIEVKEKKDRVDDALHATRAAVEEGIVPGGGVALIRVKQAISGLKGANADQDAGIKIVLRALEEPLRQIVTNAGEEASVVVAKVAQGTGNFGYNAQTGEYGDLVQSGVLDPTKVTRTALQNASSVAGLLLTTDATVHEAPKDTPAAGQPGGPGAGGPGLDF

SEQ ID NO: 23559 - protein, 368 aa, Magnaporthe grisea 70-15
MVLHNPNNWHWVNKDVAPWAKQWFQDNLTKLEVQDGDVTAKVSKVVSMDGDVDVSQRKGKVITIFDVKLVLEYSGNIADGDEVTGTITIPEVAHDTEENEFVFEIDIYSDSKEKQPVKDAVRSKLVPKLRSEFVKLAPALIAEHGKDIQHAPGSNPSSGFSTPKVHAPSGAAAKATTSTTAQTNSTGSVVNTTTVTDQEEFRTTAAELYQTFTDPQRLAAFTREAPRVFEGAKKGGKFQLFGGNVEGEFLDLQEPTKIVQSWRLRQWPAGHFSKLEIEFDQNDREGVTTMRVNWSGVPIGQEEVTKQNWLEYYVRSIKKTFGLANSVQLRNHSLKPLFSSRWAEGDEGVCAGGGGKAFEGMLQPLTAP

SEQ ID NO: 23560 - protein, 621 aa, Haemophilus somnus 2336
MEQNKQSQLKLLIARGKEQGYLTYAEVNDHLPEDLVDADQIEDVIQMINDMGIQVLESVPDADDLMLNENITDEDAVEEATQVLSSVEAELGRTTDPVRMYMREMGSVELLTREGEIDIAKRIEEGINEVQSAVAAYPKALNYLLEQYTLVEEGGMRLADLITGFVDPNAVVEEEIIEADDILTEDDEEHVESNVDVNDEEEEEDSEDNSNVDSDSDNTIAPEVAREKFEALRIQHQKTLAAIEKYGRSRKQAKDHIQALADIFTQFRLVPKQFDALVNYMRDMMKSVRQHERQIQKLVVDLAKMPKENFQKLFIGNESSEGWLDKLLLARKPWSERLIQHESAVRQSINQLLKIEQETNLTISQIREICDKVAQGELKARRAKKEMVEANLRLVISIAKKYTNRGLQFLDLIQEGNIGLMKAVDKFEYRRGYKFSTYATWWIRQAITRSIADQARTIRIPVHMIETINKLNRISRQMLQKMGREATSEELAERMGMPEDKIRKVLKIAKEPISMETPIGDDDDSHLGDFIEDNTLELPLDSATAQSLRAATHEVLEGLTPREAKVLRMRFGIDMNTDHTLEEVGKQFDVTRERIRQIEAKALRKLRHPSRSETLRSFLDE

SEQ ID NO: 23561 - protein, 113 aa, Streptococcus mitis
TYVFTHDSIAVGEDGPTHEPVEHLAGLRAMPNLNVFRPADARETQAAWYLAVTSEKTPTALVLTRQNLTVEEGTDFDKVAKGAYVVYENASDFDTILIATGSEVNLAVSAAKE

SEQ ID NO: 23562 - protein, 427 aa, Pseudomonas fluorescens PfO-1
MSRSETLFANAQKHIPGGVNSPVRAFKSVGGTPLFFKHAEGAYVTDEDDKRYVDYVGSWGPMILGHSHPDVLDAVRNQLQHGLSYGAPTAMETEMADLVCSLVPSLEMVRMVSSGTEATMSAIRLARGFTGRDSIIKFEGCYHGHSDSLLVKAGSGALTQGVPSSAGVPAAFAKHTLTLPFNDIDAVEKMLAEVGQDVACIIVEPVAGNMNCVPPAPGFLEGLRSLCDKHGVVLIFDEVMTGFRVALGGAQAYYGVTPDLTTFGKIIGGGMPVGCFGGKRLIMERIAPLGPVYQAGTLSGNPLAMAAGLTTLRLISRPGFHAELTDYTTRLLDGLQQRADAAGIPFVTTQAGGMFGLYFSGADDIVTFEDVMASDAALFGRFFHLMLEGGVYLAPSAFEAGFTSIAHGEAELKLTLDAAERAFAKLK

SEQ ID NO: 23563 - protein, 124 aa, Brassica napus
MATNEPEHEHRDAEEPGANEDEDTGAQVAPIVRLEEVAVTTGEEDEDAVLDLKSKLYRFDKEANQWKERGAGTVKLLKHKSTGKIRLVMRQSKTLKICANHFVKHGMSVHEHVGNDKSCVWQAR

SEQ ID NO: 23564 - protein, 585 aa, Ustilago maydis 521
MSLSQHIDPEELIEQAADHPILGLLEHPAGKHARAYHSGAHAGRYVTEPIPKYKIPQKGTDAEATYELLSSELSLDGKPTLNLASFVHTWMPKEATKLMSETMMVNLCDQDEYPATMSFHNRAVSMLADLWKAPTEKDENGKRKPAMGVATTGSSEAIMLACLAAKKRWQHRMKAQGKSFKEPGPNMVFGSNAQVAIEKFARYFDVEERLVPVSHESRYCLDINKAIEMVDENTICVVVILGSTYTGHYEDVEGMSKLLDEYESKTGISIPIHVDGASGAMVAPFATPELKWSFEIARVASINTSGHKFGMVYPGLGWVLFRDNEQVPKELIFELHYLGSVEYSFGLNFSRPAHPVIGQLFNFINLGFEGYRRVMQSDLQNARLLSRALENSGLYQVLSEIHKPVSSPSAATGAAALIQQAGSKLTSSTQSHEQLNQHSAEMYRPGLPVVSFRWSEDFRKRNPNLEQRWMQTLLRAKGWIVPNYNLSPDLEHIDILRVVVRENLSETMIEQLVYDIITITQSLEKQANDGGFRHLAELTSSKHDDSTAAKDAEKSTGHHNAAHDKHRGGLPKDSGVQAKGYAKQC

SEQ ID NO: 23565 - protein, 253 aa, Brassica napus
  misc_feature (48)..(48): Xaa can be any naturally occurring amino acid
  unsure (1)..(253): unsure at all Xaa locations
QILIDAVVHAVNEDYGEMANDFTRLGFLAKGTDVSPIVPALEAIWQNXSAGKGLADFNFRSVTGQFNKLVYDFPIRIPERFSLVIRSLLTQEGICFTLKPDFKFLEVAYPYVAKRLLTDPNPALRERLIQVLFKDGNFQWKRLENLISLAKENVGQMSSNPALRVKRVESKLDLTDTIKDGARLFLLDEGIRRKLILALTEDSKLHVEELVDVYKLVEEEVDIPTLAMQVVQDLPNVFRDFVLSWSNSVLSDR

SEQ ID NO: 23566 - protein, 109 aa, Streptococcus mitis
LLYALLRLSGFEDVSMDEIKSFRQWGSKTPGHPEFGHTAGIDATTGPLGQGISTATGFAQAERFLAAKYNREGYNIFDHYTYVICGDGDLMEGVSSEAASYAGLQKLDK

SEQ ID NO: 23567 - protein, 443 aa, Zea mays
MHAWLPLPIIRQRGTMSWRRAAASPGGGGKAAAVRCHPVLAEERKASIRGVVGDLLAMAGGGRRSLISLGVGDASSHACFRRGGEFAAEAVAHAALSGAFDCYAPSFGFPDARRAVAAHLSTGAVHRTHEADVFMTAGGTGAITAIATVLGGAPGANVLLPRPGFAPYEAACEVAGAEPRFYDLLPRRGWEADLAGVRALADAATAALVVINPNNPCGAVYSAHHLRQLAETARELGIPIVADEVYAHMVFGGSRFVPMASLAHIAPVVSIGALSKRFMLPGWRLGWLAFCDPNGALKHVRAATEMLLNVTSGPASIVQAAVPKILSAEHHEFHRNVVHLLESAADALYRRVNQIEALRCYSKPEGSMFMMVEINTSILHGVANDMDFARELIKEECVLVLPGSVIGLKNWVRIFFGAPVSLILEACDRIEMFCRRRTLKQNN

SEQ ID NO: 23568 - protein, 464 aa, Zea mays
MARSGREADPGEEERKLVLGKYELGRLLGQGTFAKVYYARDLSAGAGTGHSCSVAIKVIDKARLRRTEGMVEQLRREISIMRMVRHPNVVGIREVLASRSRVFVVMEYARGGELFAKVARGRLDEDHARRYFQQLVAAVGFCHRRGVAHRDLKPENLLLDEAGRLKVTDFGLAALPEQLRHDGLLHTQCGTPAYVAPEVLRKRGYDGARADLWSCGVVLYVLLCGFLPFQHDNYVKLYQKIFKADYQVPPWVSGDARRLIARLLVVDPAKRASIAEIMCTPWFRKGFVPPVLSPPVTPKKQQLDEGAALFDNDDDDNSNSNHSGATSPRSCNAFQLISSMSSGFDLSGLFESEQKTATVFTARAPAATVVEKLESVARALGFEVTRGKGWKVRMEAKAEGTNGRLAATAEVLEVAVDVTVVEFVHDAGDALDFNKFCAVDVRPGLTEIVWAWQGDSPAAAVGTA

SEQ ID NO: 23569 - protein, 384 aa, Prochlorococcus marinus subsp. pastoris str. CCMP1986
MAIQQKLSLMIPGPTPVPEKVLQALGRHPIGHRSKDFQDLMEITTKNLQWLHQTKNDVLTITGSGTAAMEAGMISTLSKGEKVICGVNGKFGQRWVKVAKEFGLEVIKIEAEWGKPLDPKDFKTILEKDDKKEIKAVILTHSETSTGVINDLKTISSHIRNHKKALSIIDCVTSIGACSVPVDDWELDVVASGSQKGYMIPPGLSFVSMSDKAWQASENSNLPKFYLNLKSYKKSLLSNSNPYTPAVNLVFALDESLKMMKDEGLDKIFKRHERHKLAVSEAAKTLNLKLFADENHLSPAVTAIQIEDIDAEQFRKNIKNKYDILLAGGQDHLKGKIFRVGHLGYINDRDIITVIAAIGNTLVEQNIISTDTAGKALKIASCHL

SEQ ID NO: 23570 - protein, 459 aa, Rhodospirillum rubrum
MADYDYDLLTIGAGSGGVRASRLAGGFGARVAVVEGSRIGGTCVMRGCVPKKLLVYGAQYANDLEDMIGYGWSMGGVAFDWPSLITAKNRELDRLEGVYRTMLRNGNVALLEGRARFLDAHSVDIDGKTVTADKILIAVGGWPQMPVIPGIEHAITSNEALDLMVMPERLTIVGGGFIAVEFASIFNALGVDVSVVIRKDKILRGFDADIRDTLTEELVRRGITIVPGTVINRIDKRPGGGYRLIRTPGEAIDTDLVMYATGRAPNTAGLGLEAAGVKVAASGAVIVDEWNRTTVDTIYAIGDVTDRIALTPVAINEAIAFAHTVFNDTPRVMDYENVASAVFSQPPVGTVGLTEEQARARGPVRIFRTRFRAMKHVLAGRDEKTMMKLVVDARTDRVLGCHMVGADAPEIIQGLAVALKCGATKAQFDATIGIHPTAAEEFVTMRDPVPEPVFAQPAD

SEQ ID NO: 23571 - protein, 178 aa, Ashbya gossypii ATCC 10895
MQSSGRSTAMSSPFFDFVDSINHEVNSINNRLMNAGRSGQRSLRPVSRISNWLLPQDEDLMPPVDMLEREREYEVGISVPGVASHDDIQLEYRRNNNEIIVSGEIPALEEDAVEDGWRVRERAHGRFKRAIGLPEKPGIDAEHIEAQYKDGVLKLKVPKLEDRDQPDEVRRIAIGSKQ

SEQ ID NO: 23572 - protein, 389 aa, Arabidopsis thaliana
MTMMSDLTQDLVEEILSRVPITSLGAVRSTCKGWNALSKERILCIGEPKQQFLGFMMLDYRLCSMRFNLHGILNEDFVSISMYQVETSQVFYCAGLLLCVTREKSSRLIIWNPYLGQTRWINTKTTKTGYNTYALGCDNNKNHKILKVFCDDYQCYYEIYDVKSNSWSAFNVTDPNWHIDYDICALVNGNTYFLTKERILVEDSDEDEDEVETPEILICFDFTAERFGKFLHLPFQFDIDFGDTGGLSCVKEEKLAVLLKRYDQNVIEIWVTTKIEPNVVFWKPFLKVDIETVLGALLDFQLDSFFIDEEKKLAVVFSSNKSKCYKTAYIIGEDRYLKEVDLGECKPLRSPIVCFSSYVPSLVQINQIAVPKRRENKRKRKSKGKGREV

SEQ ID NO: 23573 - protein, 248 aa, Bacillus subtilis subsp. subtilis str. 168
MGKFEGKIALVTGGTSGIGLATAQKFVNEGAYVYITGRRQNELDKAVNQIGKNVTGVQGDISKLEDLDKLYDIIKQEKGKLDILFANAGIGNFLPLGEITEEQVDRTFDINVKGTIFTVQKALSLFPDKVGSIIVTGSTAGSIGNPAFSVYGASKAALRALVRNWILDLKGTEIRVNVVSPGGILTPAYDELFGDALEEVLENSRNTVPAGKVGTPEEVANAVSFLASDESSYLTGVELFVDGGLAQV

SEQ ID NO: 23574 - protein, 153 aa, Glycine max
MSLIPSIFGGRRSNVFDPFSLDVWDPFKDFHFPTSLSAENSASVNTRVDWKETPEAHVFKADIPGLKKEEVKVEIEDDRVLQISGERNLEKEDKNDTWHRLERSSGKFMRRFRLPENAKVEQVKASMENGVLTVTVPKEEVKKPDVKAIEISG

SEQ ID NO: 23575 - protein, 316 aa, Oryza sativa
MDSLGVLLVAPMNAYLEQELDRRCRLFRLWESPADRRDDYLRAHASSIRAVVPYALQGVDAAMIDALPSLEIVSSFSVGIDRVDLDACLRRGVRVTNTPDVLTDDVADLAVGLAIAALRKIPQADRYVRAGKWKSKGDFTLTTRFSGKRVGIIGLGRIGLAVAKRVEAFDCPVNYYQRTKQDHPGYTYYPSVVELAASSDVLVVACPLNEHTRHIVNREVMEALGPRGVLINIGRGPHVDEAAMVAALADGRLGGAGLDVFEDEPNVPEALLGMDNVVLVPHVGSATHETRTAMADLVLGNLEAHVAGKPLLTQVV

SEQ ID NO: 23576 - protein, 350 aa, Rhodospirillum rubrum
MSVSARHAPRRIPATVITGFLGAGKTTLVRHLMEHAGGRRIALIINEFGDVGMDREILAACGVAGCAEDDIVELANGCICCTVADEFLPTMEALLARPQPPEHIIIETSGLALPKPLVRAFDWPDVRARVTVDGVVAVVDARSVHDGRFTEDPAGLAARRAADPALDHDNPLEEVFEDQLLCADMVVLNKVDLLSEAETAALIAELGGRLRPGTRLVPVVEGRVDPAVALGLMAGVEDDLEGRPSHHDTATDHDHDDFHSFVVGLGAVADPAEARQRLGAVIADHDILRIKGFLAVPGKPMRHLIQAVGPRVSGYYDRPWRDDEARESRLVVIGLRGLDEAAIRGALVGL

SEQ ID NO: 23577 - protein, 284 aa, Escherichia coli
AGKPTDKPNLVCGPVQISWHKFARYWDVELREIPMRPGQLFMDPKRMIEACDENTIGVVPNFGVTYTGNYEFPQPLHDALDKFQADTGIDIDMHIDAASGGFLAPFVAPDIVWDFRLPRVKSISASGHKFGLAPLGCGWVIWRDEEAVPQELVFNVDYLGGQIGTFAINFSRPAGQVIAQYYEFLRLGREGYTKVQNASYQVAAYLADEIAKLGPYEFICTGRPDEGIPAVCFKLKDGEDPGYTLYDLSERLRLRGWQVPAFTLGGEATDIVVMRIMCRRGFEM

SEQ ID NO: 23578 - protein, 321 aa, Alkalilimnicola ehrlichei MLHE-1
MGLLVDGVWQEDWYDTERTGGRFERPETRFRDWVTADGRSGFPAEPGRYHLHVSLACPWAHRTLILRHLKGLEDVIDVSVVDPYMGEGGWHFSNYPGASEDRVNGCRYLHQVYLKARPDYTGRVTVPTLWDKVAGTIVNNESAEIVRMLNSAFDAFGRADRDFYPAALREQIDRVNAFVYDRINNGVYKAGFATRQDAYEEAVGALFAALDELEERLSRQPYLAGDRVTEADWRLFTTLVRFDPVYVGHFKCNVRRLVDYPNLWAYTRQLYQVERVAETVNLDHIKRHYFTSHPMINPTRIIPAGPAVDYSIPHDRGPVPL

SEQ ID NO: 23579 - protein, 461 aa, Pirellula sp. 1
MAGLFPAIPGSLPALPVEETWPDCYVFGSLSTHQSPISAAISVIAPNLASKLPDDQRIVITGVGLTSPNGNDWATFRQALLEKRSGVQPYEIRYFGETLAGVCDFDAKKYQSKKDIRRGTRAGSVGVYTAQEAVAHSGLDWENVDKDRVGIYVGVTEHGNVETENEIHVIKGFDYDTSCWSHHHNPRTVANNPAGEIALNMQITGPHYTIGAACAAGNAGIIQGAQMLRLNECDVAIAGGTSESIHTFGIFASFNSQNALATHADPTLASRPFDQKRNGIVVAEGGCLYTLERLSDAKARGAEIHGELVGYAMNTDATDFVLPNPERQAQCVQKALKRAGLEADQIDIVSTHATGTNSGDIQECAALRSVFGKCENVRINNTKSYIGHAMGAAGSLELAGNLMAFRDQVVHPTINVDELDPECDLPGLVLNEPQEKPRVDYILNNSFGMLGINSVVIVGRV

SEQ ID NO: 23580 - protein, 611 aa, Thermoactinomyces vulgaris
MIKLLKPMSLSILLVFILSFSFPFPTAKAAANDNNVEWNGLFHDQGPLFDNAPEPTSTQSVTLKLRTFKGDITSANIKYWDTADNAFHWVPMVWDSNDPTGTFDYWKGTIPASPSIKYYRFQINDGTSTAWYNGNGPSSTEPNADDFYIIPNFKTPDWLKNGVMYQIFPDRFYNGDSSNDVQTGSYTYNGTPTEKKAWGSSVYADPGYDNSLVFFGGDLAGIDQKLGYIKKTLGANILYLNPIFKAPTNHKYDTQDYMAVDPAFGDNSTLQTLINDIHSTANGPKGYLILDGVFNHTGDSHPWFDKYNNFSSQGAYESQSSPWYNYYTFYTWPDSYASFLGFNSLPKLNYGNSGSAVRGVIYNNSNSVAKTYLNPPYSVDGWRLDAAQYVDANGNNGSDVTNHQIWSEFRNAVKGVNSNAAIIGEYWGNANPWTAQGNQWDAATNFDGFTQPVSEWITGKDYQNNSASISTTQFDSWLRGTRANYPTNVQQSMMNFLSNHDITRFATRSGGDLWKTYLALIFQMTYVGTPTIYYGDEYGMQGGADPDNRRSFDWSQATPSNSAVALTQKLITIRNQYPALRTGSFMTLITTTPTKFILMGVLTTSTESPSC

SEQ ID NO: 23581 - protein, 247 aa, Populus alba x Populus tremula var. glandulosa
  misc_feature (130)..(130): Xaa can be any naturally occurring amino acid
  unsure (1)..(247): unsure at all Xaa locations
MATNGEEQQSQAGRHQEVGHKSLLQSDALYQYILETSVYPREPECMKELREVTAKHPWNIMTTSADEGQFLNMLLKLVNAKNTMEIGVYTGYSLLATALAIPEDGEILAMDINRENYELGLPVIEKAGVXNKIEFKEGPALPVLDQMIEDGKYHGSYDFIFVDADKKNYINYHKRLIELVKVGGLIGYDNTLWNGSVVAPPDAPMRKYVRYYRDFVLELNKALAADSRIEICMLPVGDGITLCRRIQ

SEQ ID NO: 23582 - protein, 414 aa, SYNECHOCOCCUS SP. WH 8102
MTAAPLPSTGAVTGLGETLAFFRDPSFSQRRFSELGDVFETKLLAQSIVFIRGERAIGDLLKQEDCLQGWWPDSVRQLLGSKSLANRSGADHKARRRVVGQLFSSAALSRYTPAIEALVNDLANELQQAEGPIPLAARMRRFAFSVIATTVLGLEAENRDALFADFEIWTRALFSIPLALPGTPFARALAARQRLLARLKTVLQTNNNRQQGGLDLLSGGLDEAGLPLDDDDLVEQLLLLLFAGYETTASSLSCLFRALLLNPEVEQWLMQDLNNHERPSRLDATVLEVMRMTPPVGGFFRQNTQSIELADVAIPQGRVIQVVLSSSSTTNQIDLETFRPQRHLDGSFQQTLLPFGGGERVCLGKALAELEIRLMAMGLLQRVQLHLEPDQDLNLQLIPSPTPRDGLLVRATAR

SEQ ID NO: 23583 - protein, 317 aa, Silene latifolia
MKRLGGSDSLGALISMCPASDERSPRSKHMYSGRDYESMYDGMDEDGSIDEGSHIPEKKRRLSVEQVKALEKYFEVENKLEPERKVKLAQELGLQPRQVAVWFQNRRARWKTKQLERDYGVLKSNFDTLKLNYDSLLHDKDSLLNQIKMLKSKLNEKTENKICVKEEAMMCDSENNGKDIESITPQPSLDEVSDDAKLQNTQKRGVTDLKDGPSESDSSAILNEDNNNSPNASNCSSDGGIIQNEQQQLLLMSPRSPSLGFNRFSFTESRSVSDNVYQAQYVKLEEHNFFSEEACNFFSDEAAPTLHWYTPDQWTDV

SEQ ID NO: 23584 - protein, 399 aa, Burkholderia vietnamiensis G4
MSKQLQDAYIVAASRTPIGKAPRGVFKNTRPDELLVHAIKSTIAQVPGFDTKLIEDAIIGCAIPEAEQGLNVARMGALLAGLPQTVGGVTVNRFCASGITALAMAADRIRVGESEALLAGGCESMSMVPMMGNKPSMSPHIFDRSEDFGIAYGMGLTAERVAEQWKVSREDQDAFSVESHRKALAAQQAGEFGDEIAAYTITERFPNLATGEVDVKTREIALDEGPRADTSLEGLAKLRTVFANKGSVTAGNSSQTSDGAGALLVVSEKVLKEFNLTPLARFVSFAVRGVPPQIMGIGPKEAIPAALKAAGLKQDDIDWIELNEAFAAQSLAVIRDLGLDPSKVNPVGGAIALGHPLGATGAIRAATVVHGLRRRNLKYGMVTMCVGTGMGAAGIIERL

SEQ ID NO: 23585 - protein, 340 aa, Haemophilus somnus 2336
MNGYTGCVAVFDSGKQGKTLALRFDIDCVNVTETNDPNHLPNKLKFASLNLGFMHACGHDGHITIGLGIASWLSQNKDKFNGKVKIVFQPAEEGVRGAAAIAASGVIDDADYFASSHISFCANTGTVLANPRNFLSTTKIDIRYKGRPAHAGAAPHLGRNALLAAANAVTQFHSIARHGEGMSRINVGVLKAGEGRNVIPSSAEIQLEVRGENKEINQYMVDQVMQIAKGIAISFDVSYETEIMGEAVDMNNDLELVKLIEEIAIQQPGINESTADYAFNASEDATILGRRVQDHGGKAIYFIVGADRTAGHHEANFDFDENQLLTGVNIYIGLVQRLLG

SEQ ID NO: 23586 - protein, 664 aa, Listeria monocytogenes str. 1/2a F6854
MFDNTDSLAVNTIRTLSMDAIQKANSGHPGLPMGAAPMAYALWSRVLNTNPKNSHWFNRDRFVLSAGHGSMLLYSLLHLSGFKLELEDLKNFRQWESKTPGHPEYRYTDGVDATTGPLGQGIAMAVGMAMAERHLEAKYNKDGFPVVDHYTYALCGDGDLMEGVASEAASYAGHQQLGRLVVLYDSNDISLDGDLDKSFSENVKQRFEAYGWEHLLVKDGNDTAEILAAIEKAKQNTSQPTMIEVKTVIGFGAPNAGTSKVHGAPLGDEGILEAKKAYGWNYEEKFFVPEEVTARFKETIGERGEKAETAWNELFASYKAEYPELAKQLEDSLNNKLPADWDADFPVYDDSKALASRASSGEVINALAGKIPTIFGGSADLAGSNNTTIKTDGEFTKATPAERNIWFGVREFAMGAALNGMALHGGLQVYGGTFFVFSDYVRAAIRLSAIQHLPVTYVMTHDSIAVGEDGPTHEPVEQLASLRAMPGLSVIRPADGNEVVEAWKLAITSTSTPHVLVLTRQGLPTLPNSAKLTAEGVKKGAYVISPAKGEVPEAIILASGSEVNLAIEAQKELQAQGTDVSVVSVPSFDLFEQQSAEYKESVLPNAVRKRVAVEMGASFGWERYVGLDGKVIGIDKFGASAPGETVIKNYGFTVENVVNTVKSL

SEQ ID NO: 23587 - protein, 280 aa, Zea mays
MEFEDRCHKVQEPKFDCLLFDLDDTLYPLSSGIAGHVKKNIEDYMVEKLGIDESKIENLGNLLYKNYGTTMAGLRAIGYSFDYDEYHAFVHGRLPYDNIKPDPVLKHILKNLRIRKLIFTNGDKVHAVRALERLGLEDCFEGIICFETLNPPCPPQGDREPEIFDIAGHFARSGAAAELPKTPVLCKPNVDAMEEALRIANVNPHKAIFFDDSVRNIQAGKQIGLHTVLVGKSQRVKGADHALESIHNVREALPGLWEEAEKAEDVLYAERVAMETSVTA

SEQ ID NO: 23588 - protein, 340 aa, Oenococcus oeni PSU-1
MLDYLIDEVSKAFYLIFTNFILDKKEVDLVNKVIVLGSLNVDTILKIKRFPNPGETLETLDKSSAAGGKGANQAVAAVRSGAQTTMIGQIGHDDLGKFMIDSLQNDHINVSPITVNDTVGTGTATVLLDENGQNCILVYGGANQKISPEDIKKISDNIKNSDFLISQFETPQNATKAAFEIAKENSLTTILNPAPASKIDSSLLTLTDLIVPNETESTVLTGIKITDEKSMIETAKAFSKMGIDNLIITIGDRGVFYSTKEKSELVSAYHVKAVDTTAAGDTFIGALSSQLKKDLSNIKSAISFAQCASSITVQRLGAQPSIPTLNEIRIAEKNYESVKN

SEQ ID NO: 23589 - protein, 240 aa, Glycine max
  misc_feature (106)..(106): Xaa can be any naturally occurring amino acid
  unsure (1)..(240): unsure at all Xaa locations
MKIQCDVCERAPATVICCADEAALCAKCDVEVHAANKLASKHQRLLLQCLSSKLPTCDICQDKPAFIFCVEDRALFCQDCDEPIHSAGSLSANHQRFLATGIRVAXSSNCTKDNEKSHSEPPNRSAQQVSAKIPPQQVPSFTSSWAVDDLLELTGFESPEKKESLQFGELEWLTDVGIFGEQFAQEALAAAEVPQLPETHNSSSVASYKTSKSYMSHKKPRIEVLNDDDDDEYFTVPDLG

SEQ ID NO: 23590 - protein, 113 aa, Streptococcus mitis
TYVFTHDSIAVGEDGPTHEPVEHLAGLRAMPNLNVFRPADARETQAAWYLAVTSEKTPTALVLTRQNLTVEEGTDFDKVAKGAYVVYENAADFDTILIATGSEVNLAVSAAKE

SEQ ID NO: 23591 - protein, 404 aa, Emericella nidulans
MASQVQPGQKPKVQPCRYKTGKTLGAGLYSVVKECVHIDTGQYYAAKVINKRLMVGREHMVRNEIAILKQVSTGHQNILTLVDYFETMNNLYLVTDLALGGELFDRICRKGSYYESDAADLVRAILSAVAYLHDHGIVHRDLKPENLLFRTPEDNADLLIADFGLSRIMDEEQLHVLTTTCGTPGYMAPEIFDKSGHGKPVDIWAIGLITYFMLCGYTPFDRETNLEEVQAIATANFSFTPVEYWRGVSQEARDFIKRCLTVNPKKRMTAHQALQHPWINPPYDTTDDLGSGEDLLPNIKKNFNARRTLHKAIDTVRAINKLRENGGLMMDGIMSVDPKPEHVNGSEVVEDRTTPRERENEDAMEIDSRSNARGQTEQQIREQERKVKETVAGLWSRTAPRSER

SEQ ID NO: 23592 - protein, 765 aa, Arabidopsis thaliana
MASHIVGYPRMGPKRELKFALESFWDGKSSADDLQKVSADLRSDIWKQMSAAGIKYIPSNTFSHYDQVLDTTAMLGAVPSRYGFTSGEIGLDVYFSMARGNASVPAMEMTKWFDTNYHYIVPELGPEVKFSYASHKAVNEYKEAKALGVETVPVLVGPVSYLLLSKLAKGVDKSFDLLSLLPKILPVYKEVIAELKAAGASWIQLDEPLFVMDLEGHKLQAFSGAYAELESTLSGLNVLVETYFADIPAEAYKTLTSLKGVTAFGFDLVRGTKTIDLIKSGFPQGKYLFAGVVDGRNIWANDLAASLITLQSLEGVVGKDKLVVSTSCSLLHTAVDLINETKLDAEIKSWLAFAAQKVVEVDALAKALAGQTNESFFTANADALSSRRSSPRVTNESVQKAAAALKGSDHRRTTEVSARLDAQQKKLNLPILPTTTIGSFPQTVELRRVRREYKAKKISEEDYVKAIKEEIKKVVDIQEDLDIDVLVHGEPERNDMVEYFGEQLSGFAFTANGWVQSYGSRCVKPPVIYGDVSRPKPMTVFWSSTAQSMTKRPMKGMLTGPVTILNWSFVRNDQPRHETCYQIALAIKDEVEDLEKGGIGVIQIDEAALREGLPLRKAEHSFYLDWAVHSFRITNCGVQDSTQIHTHMCYSNFNDIIHSIIDMDADVITIENSRSDEKLLSVFREGVKYGAGIGPGVYDIHSPRIPSTDEIADRINKMLAVLEQNILWVNPDCGLKTRKYTEVKPALKAMVDAAKLIRSQLGNAK

SEQ ID NO: 23593 - protein, 526 aa, Xanthomonas campestris
MSSSCRFRPLSFLLAAALGASAAFAPSVHAADAAPATPRSEGSGVWYEIFVRAWYDTDGDGIGDLNGVTAKLDYLQSLGVSGIWLMPINPSPSYHGYDITDYEGINPQYGTMADFEKLVSEAHKRGIEVILDLVINHTSDQHPWFKAALDPKDAHRSWYTWAGPGTNLKAVSAVGGPAWHANGKQHYLGDFTGAMPDLNYDEPAVRREMIAVGKFWLDKGADGFRLDAARHIYDDLESDNGQPAVIARNAQWWNEFRQGLRQVRPDVYLVGEVSAKQPGELAPYLPALGSVFDFPLAEQLIASAGQEKAGKLPALLTETYAAFRAAAGDDYADAPFLSNHDQERVLSQLGGDLRHMRTAAAMLLTLPGRPYLYYGEEIGMLGRKPDENLREPMRWQRQAGAPGDSRWKPYSVKQGGEVSVQAEQDRPDSLLSFYRTLIHWRVEVPALRDGALRVVDTGAPALVAYERVTADSRALVVHNLSGKPASMKLGADRAKAFAAIRLHSAPGATLTEGRLTVPAYATVVLQ

SEQ ID NO: 23594 - protein, 294 aa, Lycopersicon esculentum
MTYMFKYDSVHEQWKHHELKVKDEKTLLFGEKAVTVFGIRNPEDIPWGEAGADFVVESTGVFTDKDKAAAHLKGGAKKVVISAPSKDAPMFVVGVNENEYKPELDIVSNASCTTNCLAPLAKVINDRFGIVEGLMTTVHAMTATQKTVDGPSMKDWRGGRAASFNIIPSSTGAAKAVGKVLPQLNGKLTGMAFRVPTADVSVVDLTVRLEKEASYEDIKAAIKEESEGKLKGILGYTEDDVVSTDFVGDSRSSIFDAKAGIALSKNFVKVVSWYDNEWGYSSRVIDLVCHMAKA

SEQ ID NO: 23595 - protein, 308 aa, Pseudomonas putida KT2440
MTSKLEQLKQFTTVVADTGDLDAITRLKPVDATTNPSLLLKAAAIPGYADLLKQVKADAKGNVDLACDKFAVAVGSGILKVIPGRISTEVDARLSFDEPALLNKARQLIALYEAAGVAKERVLIKLASTWEGIRAAEQLEKEGIQTNLTLLFSFAQAQACADAGVFLISPFVGRIYDWYKKSTGQEYVGAEDPGVQSVTRIYNYYKANGYNTVVMGASFRNIGQIEQLAGCDRLTISPELLQQLSDDQGELPQVLKPGNAGEAKQHLNESQFRWAMNEDAMGTEKLAEGIRQFARDQEKLEKLIAEKA

SEQ ID NO: 23596 - protein, 638 aa, Streptomyces avermitilis MA-4680
MSTPYPTSSSFDPAAPASVEPEIRRLDGVVREVAVPPLVGQVTHGSLADIPFDNADVAPEDVVLSRKTPDGGWTDVTAAEFAGQVLAVAKGLIAEGLMPGDRLAIMARTTYEWTLLDFAAWAAGLVTVPVYPTSSVFQTRWILQDSGAVALATESAGQAAALGPELSRLPDLRHVWVFDKGHVERLAELGRDVQDQEVAVRRGVLGPDTLATLVYTSGTTGTPKGCALTHGNFFAEIDNAVELLYPIFKSKTKEEASTLLFLPLSHVFGRMVAVACVRARVRLGHAPSLTTEDLLADLASFRPTCLLAIPYMLEKVFNGARATAEKGGRASSFDRAVSVARKYGEAMETRQQGTGSGPSRGLKAGRALYDPLVYRRIRNALGGRVRYVICGGSPLGRPLAAFYAGAGIEIYEGYGLTETTGAATVTPPHKTRLGTVGWPLPGTRVRIAADGEILLSGGQVFRGYWDPHAGGVVPATPDGWFATGDIGRLDDEGHLTITGRKKEILITAGGKNVAPAPLENWLRSHPLISQALVVGDGRPYVTALLTLDPEGITHWRQMNGKHGVPPELLMDDEELFSVLQRAVDEANKLVSRPESIRRFAVLPVDFTEEAGHLTPSMKLRREAIARDFGREIEGMYAQ

SEQ ID NO: 23597 - protein, 502 aa, Mycoplasma capricolum
WIKKYLCKKFDPYLNVDPGTMSPYQHGEVFVTKDGGETDLDLGHYERFIDEELTKLSSTTSGKIYLSVIKGERKGDTSGKTIQVVPHITDAIKNKVYQAAKQSQADVIISEIGGTVGDIESQPFIEAIRQIRLEQGKENVMFVHVVLLLWLAASKEYKTKPIQNSVKAMASLGIQPDVIVCRSDSSSPKDIKEKISLFCNVPITNIIDAIDQDSIYRVPLALAKQNLQDIIIEQLQLKANAIDLTSWKQFNKKIDSSSQEIEISFVGKYIELQDAYLSVLESLKIAGWEFNKKIKIRWIQAETLNESNYNEILKNSQGILVPGGFGKRGIEGMMLASRYARDNDIPYLGICLGMQIATISIARDLLNWTDADSTEFNKNTTHPIFDYIKGIDRDNIGGTLRLGTMVTKLEKDSLVSKLYNSDVALERHRHRYEFNNKYKKDLESVGLRFSGIYEEKNLVEVIEMPSLKFFVASQFHPEFTSRPNKPTPLFKGFIKAIIENNK

SEQ ID NO: 23598 - protein, 352 aa, Vibrio sp. Ex25
MQQMNSIVMLDGRVRLQQVEIPQPAAGQVLVRSLACGICGSDLHITRHADEVFDVFHQLGLMPDEVGEHAQVMLGHEFCAEIVEYGADTQQTLPVSSRVTSVPMLLSQNGAGVGVTPGTYGAYSEYFLLDEALLLPVPDEMPSEAAALTEPLAVGLHAVNRSEIETEDTALVVGCGPIGLAVIAALKQRGVSNILAVDLQEEKLQLASEFGANRLINPTKEDEIAVGAQYAMNSRLVIYECVGKHTLIDDFMRRAPARARIVVSGIHTAPATINYAYATVKELDLRFSYYYQPQEFEQCLQAIAEHKLPWQKMLTAKVGIDGVEDAFRQLMTPNDHIKVVIEPWRRGALEVI

SEQ ID NO: 23599 - protein, 595 aa, Methylococcus capsulatus str. Bath
MSKAYEIIRHTYDAVVVGAGGAALRATLGMAEKGLKTACITKVFPTRSHTVAAQGGISAALGNMGEDDWRWHMYDTVKGSDWLGDQDAIEYMCREAMQAVIELEHYGVPFSRTESGKIYQRPFGGMTTRYGKGVAQRTCAAADHTGHAILQTLYQQSLKHEAEFFIEYFALDLVMDEGECRGVLAWRLDDGTLHLFRAHMTVLATGGYGRTYFSSTSAHTCTGDGNAMVLRAGLPLQDMEFVQFHPTGIYGAGCLITEGVRGEGGYLTNSEGERFMERYAPHAKDLASRDVVSRAMTIEIREGRGLGPEKDHLHLHLEHLDPAVIQERLPGVAETARIFGGIDVTREPIPVLPTVHYNMGGVPTNYRAEVLTLKDGDPETVVPGLMAIGEGACVSVHGANRLGSNSLLDLVVFGRAAALRCAELIRPRQMHKPLPEGACDTTLARFDRLRHASGSRRTADIRLDMQRTMQSHASVFRTGEVLREGVKALKRIMDSFSDVCIRDRSLVWNTDLLETLELENLLQQAMVTVAAALNREESRGSHAREDFPERDDVHWLKHSLIWLDQRHETTIAYRPVHLHTLTSDVEPIPPQKRVY

SEQ ID NO: 23600 - protein, 418 aa, Nostoc punctiforme PCC 73102
MTTDVPKNLSQDPSINPVHDIVDVQTTDCCIVGGGPAGAVLALLLARQGISVMLLEAHKDFDRDFRGDTIHPSVMEIMEELGLSDRLLELPHAKMRQIRFKTPEDTVTLADFSHLKTRYPYITMLPQVKFLEFITQEAQKYPSFHLVMGANVQELIAENGEIQGVRYRGGGGWHEIRAILTVGADGRHSRLRHLGEFESIETSPPMDVLWFRLPRQPEDPEGGMGRFGQGKIIAMLDRGDEWQVAYVIPKGGYQQLRAAGLEELKKSVVEVVPEFQQRIQNLHDWSQIAFLSVESSRVKRWYRPGLLLIGDAAHIMSPVGGVGINYAIQDAVVAANVLSKPLKNRQVQLSDLAKVQRQRELPTRIIQAFQTFIQKRVFAPVLISNRTFVAPGFLRLPILRDLPGRLIALGVFPVHVKT

SEQ ID NO: 23601 - protein, 119 aa, Glycine max
MAKTSFKLQHPLERRQAEASRIREKYPDRIPVIVEKAERSDIPDIDKKKYLVPADLTVGQFVYVVRKRIKLSAEKAIFVFINNTLPPTAALMSAIYEENKDQDGFLYMTYSGENTFGSH

SEQ ID NO: 23602 - protein, 462 aa, Glycine max
MESKPHVLMHRYELGRLLGQGTFGKVYYARSTITNQSVAIKVIDKDKVMKTGQAEQIKREISVMRLARHPNIIQLFEVLANKNKIYFVIECAKGGELFNKVAKGKLKEDVAHKYFKQLINAVDYCHSRGVYHRDIKPENILLDENGNLKVSDFGLSALVDSKRQDGLLHTPCGTPAYVAPEVIKRKGYDGTKADIWSCGIVLFVLLAGYLPFHDPNLIEMYRKISKAELKCPNWFPPEVCELLGMMLNPNPETRIPISTIRENSWFKKGQNIKNKRPVVENNTVSSSSTVLLDQNDCDGLAAEANGESVVPLSINAFDIISRSVGFDLSRFFDESFKKKEARFSSRLPANVIISKLEDIANQLRMKIKKKAAGLLKLESLNEGRKGVLSIDAEIFEVTPCFHMVEVKKSNGDTLEYQKILKEDIRPALQDIVWVWQSDQQLQSQQSEQQQQTDDQQQQQPQS

SEQ ID NO: 23603 - protein, 320 aa, Pseudomonas putida KT2440
MKKRIVLYKRLSDDLMARLQDRVEVTWVDTTQPDALARLRDALPGAHGLLGASLRLDASLLDLAPQLEVVSSVSVGVDNYDIAELSRRGVMLTNTPDVLTETTADTGFALILATARRVVELANWVRDGRWQANLGPAHFGSDVHGKTLGIVGMGRIGEALARRAAAGFGMRVLYHSQRAKPEVEARYAACQCSLDELLQQADFVCLTVPLSASTEGLIGARELALMKPDAILVNISRGRVVDEQALIEALRARRIRGAGLDVFVHEPLPIDSPLLQLDNVVATPHIGSATEETRQAMARCAVDNLLSALAGERPVNLVNG

SEQ ID NO: 23604 - protein, 334 aa, Gloeobacter violaceus PCC 7421
MEEFVMFGTFRSLSACLLLAASVAAYVTAAPTAAYAQTVDTTTSNNALSNGTKVDPLEVDGVYVFGDSLVDTGNVFNANGGVFPPSPPYFSGRFSNGPLWIENVLAPLGINLVPSTTAGGQNFAFGGAPSGFFLEQPIPLGGPPPETPGLLYQLGTFTQPAPQVTPQTLYFISAGSNDLLNDFLANRELDYNVPVQNLTTAVATLYAYGARNIVISNIPDLSRAPLTQVNPGELPTLKDQVKLANKYIKIALQELKQSRPGLNTILLDFYTRFNKFLDAPQDYGLTNTISPCLTAVAVCANPDEYLFWDEVHPTAAVGQELAEFFTGTIFTSSP

SEQ ID NO: 23605 - protein, 316 aa, Pseudomonas putida KT2440
MHEHDVLCFGETMAMFVAEQAGDLAGVGQFGKRIAGADSNVAIGLARLGFKVRWLSRVGDDSLGRFVLDSLRCEGLDCSGVEVDANYPTGFQLKARSEDGSDPAVEYFRRGSAASRLSAAMVSPVWLQARHVHATGIPLALSDSCRALSHALLDGMRAAGRSISFDPNLRPSLWPDQSSMVREINALAAKADWVLPGLEEGRLLTGQHTPADIAAFYLDQGVELVVIKLGDAGAYFRSAKGEGQVAPVPVSRVVDTVGAGDAFAVGVLSALLEGRPVAEAVARGNWCGSRAVQSRGDMEGLPLRHELEAYDLRRSA

SEQ ID NO: 23606 - protein, 230 aa, Gloeobacter violaceus PCC 7421
MLKLYHLPISFNSRRVWIALLEKGLPFESIALQLDGDQWREDFLALNPFHHIPVLVDGGLRVLESLAILDYLEAKYPMPALLPGKPEVLAAVRMVELVTINELVPPFGLLIRRSMGAAVEAAAAEQAKGRIATALGFFEQLLGEQTYFAGEQFTLAEVVAGTVVPRLPGVGVLLDDYPHLQQWGRRLNQRSSFARTEPKAPDLAAFRARMTALNTRTNAPTDPPRDGATR

SEQ ID NO: 23607 - protein, 294 aa, Triticum aestivum
HLLASLCLSSPLPSPPSYSNQTTSSTPPSPPPSSPSPSCYSLVHVLLLPMSPPLELDYIGLSAAAGGRADDDLKGTELRLGLPGCESPDRRPVTATTTLELLPAKGAKRGFSDEVAPPAPASAGGKGKDASGDEKDKKVAAPPQPAAKTQVVGWPPVRSYRKNTMATTTNQLKSSKEDSDTKQGQEFLYVKVSMDGAPYLRKVDLKTYKNYKDMVVGLGKMFIGFRTGKDGASENRKDGEYVMTYEDKDGDWMLVGDVPWEMFTESCRRIRVMKSADVIGLGVTRAGVKSKNKN

SEQ ID NO: 23608 - protein, 597 aa, Candida albicans SC5314
MTTPLSSYSTTVTNHHPTFSFESLNSISSNNSTRNNQSNSVNSLLYFNSSGSSMVSSSSDAAPTSISTTTTSTTSMTDASANADNQQVYTITKEDSINDINQKEQNSFSIQPNQTPTMLPTSSYTLQRPPGLHEYTSSISSISSTSSNSTSTPVSPALINYSPKHSRKPNSLNLNRNMKNLSLNLHDSTNGYTSPLPKSTNSNQSRGNFIMDSPSKKSTPVNRIGNNNGNDYINATLLQTPSITQTPTMPPPLSLAQGPPSSVGSESVYKFPPISNACLNYSAGDSDSEVESMSMKQSAKNTIIPPMAPPFALQSKSSPLSTPPRLHSPLGVDRGLPISMSPIQSSLNQKFNNIALQTPLNSSFSINNDEATNFNNKNNKNNNNNSTATTTITNTILSTPQNVRYNSKKFHPPEELQESTSINAYPNGPKNVLNNLIYLYSDPVQGKIDINKFDLVINVAKECDNMSLQYMNQVPNQREYVYIPWSHNSNISKDLFQITNKIDQFFTNGRKILIHCQCGVSRSACVVVAFYMKKFQLGVNEAYELLKNGDQKYIDACDRICPNMNLIFELMEFGDKLNNNEISTQQLLMNSPPTINL

SEQ ID NO: 23609 - protein, 83 aa, Brassica napus
  misc_feature (46)..(46): Xaa can be any naturally occurring amino acid
  unsure (1)..(83): unsure at all Xaa locations
MSASRLIKCVTVGDGAVGKTCLLISYTSNTFPTDYVPTVFDNFTAXGPVKAPTPHLGACHAAGHHHYNRLRPLSYRGADGFIL

SEQ ID NO: 23610 - protein, 195 aa, Zea mays
MGGLSVIAPPARDTASPQHRRARRAFLVSNYLILGCASGCGFLTLSLRLVPSVDGFLLILLHALTVAAAVAGCAVIAAPDPPRGRCYTAHMSATAVVSILQGAAAVLAFSRTSEFLAGGLRSYVREEDGAVILRMVGGLGVAIFCLEWVALALAFVLRYYAYVDRECGGNPLRRSAKVGGEDGAGTGTWPWPFQV

SEQ ID NO: 23611 - protein, 339 aa, Microscilla sp. PRE1
MKAAFYKEKGKFELGEGKVVVPGPGEVRLDVAYCGVCGTDVHIFHGVMDKRVNPPQTIGHEASAVVAEVGEGVTNVKVGYKVAVRPLRFGEPHPFDKGHAHVGKNLKFIGIDSEGAFQNSWTVPAYTLHQLPDGLSLEHGAFIEPLAVACHDVKIGRVKSGENTLVIGGGPIGTLIAYVLKEKGANVIVSEVNEARLKMLSELGFQTINPLKENLVDRISELTEEKMIDCAFEVSGSAPGVKTMTEVVNVRGRIVMVAIHGGEPKPVDLFKFFWSEIELLGARLYEEDDYEEAIRIAASGNIPFSKLITSKNTLDNIQQIFEEIDQNPAGMKYLIDCQA

SEQ ID NO: 23612 - protein, 486 aa, Microscilla sp. PRE1
MIMSTVKNYKLYIDGEWIDATTGESQEILSPTDETVVGTVQMGVEADAQIALEAAERAQKQWKKVPARKRADLLRTFAAEIKANKNQLAELLVREQGKLLAVAKMEVEVTASFIEYACDGARSIEGDIIPSDNPAEHIMIHKIPRGVVVAITAWNFPLALAGRKLGPALVAGNSVVLKPTQETPIATLELGNIANKVGLPKGLINILTGQGSVLGNALVANPITKMVSMTGSTPAGQQIFRTAAENLIHVQLELGGKAPCIVFDDADLEQAVEGAFHSRFDNCGQVCTSNERLYVHESIYNEFMERFMEKVKGLKLGNPMDAATTIGPKVNAKEVAHMEHLVTKSVEEGATVAIGGKKPQGKAFEKGHWFEPTILTDVKQNMTIVHEESFGPILPVIKFSEFNEVIGYANDCEYGLAAMVFTNDMNKIMRLNDELEFGEIYINRGHGEQHQGFHNGYKLSGTGGEDSKYGFEQYMEKKTFYIKYKA

SEQ ID NO: 23613 - protein, 158 aa, Triticum aestivum
MSLIRRSNVFDPFSLDFFDPFDGFPFGSGSSNSGGSLVPRTSSDTAAFAGARIDWKETPEAHVFKADVPGLKKEEVKVEVEDGNILQISGERNKEQEEKTDTWHRVERSSGKFLRRFRLPENAKAEQVKASMENGVLTVTVPKEEAKKPDVKSIQISG

SEQ ID NO: 23614 - protein, 160 aa, Triticum aestivum
GSAMNVVGSLCVYAAICCKEGATPRWPGSRVAWEGFTDASDADLVAEHEIWAAVDPFTKNEAFNCSNRDVFKWKQLWPMLADHFGLEWAGYEGEDGRFIIADAMARKEAVWAEIVQENELVTTELKEITNWWFVDAVLNFEVEHLDSMNKSKEHGFLGFR

SEQ ID NO: 23615 - protein, 119 aa, Brassica napus
MQPSGLKETQLNNNNNNQKVHPQPMEQQQSINQNPEAMEALISNLFGNISSLKSAYIQLQSAHTPYDPDKIQEADKVVISELKNLSELKHLYRENNPKPVCVSPQDSRLAAEIQEQQSL

SEQ ID NO: 23616 - protein, 359 aa, Phalaenopsis sp. SM9108
MKLFSLILVASFLASVAATAIDIADKDLETEDSLWNLYERWRSHHTVSRDLDEKQKRFNVFKENPRYIHDFNKRKDIPYKLRLNKFADLTNHEFRSTYAGSRINHHRSLRGSRRGGATNSFMYQSLDSRSLPASIDWRQKGAVTAVKDQGQCGSCWAFSTVAAVEGINQIKTKKLLSLSEQELIDCDTDENNGCNGGLMDYAFDFIKKNGGISSEAEYPYAAEDSYCATEKKSHVVSIDGHEDVPANDEDSLLKAVANQPVSIAIEASGYDFQFYSEGVFTGRSGTELDHGVAIVGYGKTQQGTKYWIVRNSWGAEWGEKGYIRISAASDSKRLCGLAMEASYPIKTSPNPSHKSRDEL

SEQ ID NO: 23617 - protein, 341 aa, Chlamydophila abortus S26/3
MPDAFHYNIASKASDEATVKNIIDIYGPPRCVELLKYMLLIREFETRGEEAYLEGLVGGFYHSYSGQEAVATAALANTGLDQWFFSSYRCHALAVLLNIPLRSLAAELLGKETGCALGRGGSMHMCGPNFPGGFGIVGGQIPLAAGAAFAIKYRGEDKISLGFMGDGAVAQGVFHETLNFTALHSLPLMLIIENNGWGMGTALNHAIAKQPIGESQGASYGIRSFTLNGFDLFNCLLGFKEAYEYMQKTRLPVIVECLCSRFRGHSISDPNLYRSKEEMECLIKKDPIVFAKKWLIQLGVMSEESFQALREECKNKVLKAFTEAKSDPEPTIATLEEGVYA

SEQ ID NO: 23618 - protein, 554 aa, Xanthomonas campestris pv. campestris
MTPLIFVTGGVVSSLGKGIAAASLASILEARGLKVTMMKLDPYINVDPGTMSPFQHGEVYVTDDGAETDLDLGHYERYVRTRLSRKNSVTTGRIYENVIRKERRGDYLGATVQVIPHITDEIRRCIDEATAGFDVALIEIGGTVGDIESLPFLEAIRQVRTERGAEKAMFMHLTLVPYIAAAGELKTKPTQHSVKELRSIGIQPDVLLCRSEQAVPDSERRKIALFTNVSERAVISCPDIDVLYGMPLELRRQGLDELVIDQFKLRDKVAAADLSEWEAVVDAVKHPLDEVTIAVVGKYVDHQDAYKSVAEALKHGGLRQRTKVNLTWLEAQDLEGSDMAALQGIDGILVPGGFGDRGFEGKVQTSKYAREHKVPYFGICYGMQAAVVDYARHVADLDAANSTENDRQSPHPVIGLITEWRTATGEVEKRDEKSDLGGTMRLGLQEQRLKPGTLAREVYGKDVVAERHRHRYEFNNRYRTQLEDAGLVICGKSMDDTLVEMVELPRDTHPWFLACQAHPEFLSTPRDGHPLFIGFVRAAREKKAGGKLLKEARA

SEQ ID NO: 23619 - protein, 487 aa, Desulfovibrio desulfuricans G20
MQPLVLFATSEMYPFSKSGGLGDVLGALPLTLHRMGVRTAVVTPFYGRLKTAEYGIHLTMSDIPVGYPWGPITADVYEADFHGMPVYFISRGEYFDRRFYYNDYKGDYFDNCERFVFFCRAAASMCRRLGEAPAVVHAHDWQTALLPALLYHWRRYDSFWEDTRTVMTIHNLAFQGRFSSRLFENCGLPPQAWSMDGVEFYGDFNLLKGGIAYADKVTTVSPSYAREITTPEFGCGLEGILRRRTHALHGILNGADYDIWKPEDDRFLPCTYSPDRLAGKQRCKRALLDELGLDSSLMERPVLGFIGRLRDQKGIDLLIDNIAQLMERQVGVVILGEGSLEYEAQVLHLMEEYKGRLCARVEYTEDLAHRIQAGADIFLMPSRYEPCGLTQIYALRFGTPPVASSLGGLRDTITPWPAPDATGFTFDDVSPAGFLNAIMQAVNLWENDHTAWAGMVRRAMEVSFTWEKAAVQYLDIYQQLGFVPAGE

SEQ ID NO: 23620 - protein, 237 aa, Streptococcus bovis
MWKKVSCLIVLLLAFFGFQQGVDAQSKYHYSQELNYYNGNAMELRNGSNGGMFNCNFVPGNVGFNNGLMSLKIDSDGRGGYTGGEWRSKERFGYGLFQVNMKPIKNPGVVSSFFTYTGPSDGTKWDEIDIEFLGKDTTKVQFNYYTSGQGNHEYLYNLGFDASQGFHTYGFDWQADHITWYVDGRAVYTAYNNIPSTPGKIMMNAWPGTHEVDSWLGAYNGRTPLYAYYDWISYDQF

SEQ ID NO: 23621 - protein, 222 aa, Glycine max
MAAILARKSLLALRARQLAVSGQGLHSSQNYGLRLSAHSYSTKREDEEREQLAKEISKDWSSVFERSINTLFLTEMVRGLMLTLKYFFETKVTINYPFEKGPLSPRFRGEHALRRYPTGEERCIACKLCEAICPAQAITIEAEEREDGSRRTTRYDIDMTKCIYCGFCQEACPVDAIVEGPNFEFATETHEELLYDKEKLLENGDRWETEIAENLRSESLYR

SEQ ID NO: 23622 - protein, 506 aa, Vibrio sp. Ex25
MTALHISHAEELKASHDMMAIMKDVRLVRGLAYVNGKWVSGDQFHPVDNPADGTVIGYITKLSQQQLYQAIDEADQAFRQWRKMQAEERAEILMRWHDLILESKQDLARLMVMEQGKTLGDALGEIDYGASFVRWFAEEARRSYGETIPSHIPNAQLSTVREPIGVAALITPWNFPNAMVTRKAAAALAIGCPVLIKPASETPFSALALAELADRAGFPPGVFNVITGDAVMVSQTLCHSDKVKALSFTGSTRVGKLLLRDAAQTVKKCSMELGGNAPFIVLPDMDVEQAAKAAVDAKFQTAGQDCLAANRIFVPDDKYEAFLEAFAKEMNHIVLGNGLDEKTTMGPLINRAAVDKAHDLVRDALDKGARLVAGYHQPVPGENFFAPTLLADVTPDMAVYREENFCPVAGVLPYQDLDTVIEMSNDTEYGLAAYVYGHDIHQIWRCMRGLEFGMVSVNSVKMTGHPIPFGGVKQSGLGREGSRHGFEEYSEIKYCCLGALPTVSGS

SEQ ID NO: 23623 - protein, 1419 aa, Arabidopsis thaliana
MIRLSKRSVSTLLRSGNQSFRIAAAASTSRSSPSATDVKRSDTESRWYSSLTNGQSKNSGSFAQLNMKTNWFMGYRNESSAAASDSSSQAPPPAEKFEYQAEVSRLMDLIVNSLYSNKEVFLRELISNASDALDKLRYLSVTNPELSKDAPDLDIRIYADKENGIITLTDSGIGMTRQELVDCLGTIAQSGTAKFMKALKDSKDAGGDNNLIGQFGVGFYSAFLVADRVIVSTKSPKSDKQYVWEGEANSSSFTIQEDTDPQSLIPRGTRITLHLKQEAKNFADPERIQKLVKNYSQFVSFPIYTWQEKGYTKEVEVEDDPTETKKDDQDDQTEKKKKTKKVVERYWDWELTNETQPIWLRNPKEVTTAEYNEFYRKAFNEYLDPLASSHFTTEGEVEFRSILYVPPVSPSGKDDIVNQKTKNIRLYVKRVFISDDFDGELFPRYLSFVKGVVDSHDLPLNVSREILQESRIVRIMKKRLVRKAFDMILGISLSENREDYEKFWDNFGKHLKLGCIEDRENHKRIAPLLRFFSSQSENDMISLDEYVENMKPEQKAIYFIASDSITSAKNAPFLEKMLEKGLEVLYLVEPIDEVAVQRDKNEEKEAAVKKEFGQTCDWIKKRLGDKVASVQISNRLSSSPCVLVSGKFGWSANMERLMKAQSTGDTISLDYMKGRRVFEINPDHSIIKNINAAYNSNPNDEDAMRAIDLMYDAALVSSGFTPDNPAELGGKIYEMMDVALSGKWSSPEVQPQQQQMAHSHDAETFEAEVVEPVEAKKCLIYLSFGFLTESRFLVRPLPSSLRRIQQNVSVLVVEFEAGPENSVTKRVNNSRDRVGCVVLRVDSVYDYVFCTKLMGTSSGSNLPHQMLPPRQQLQTSLSLVSSDPHLSRSNSGIVRESPAESASSQETWPTSKSIMGRKTDSGKTGPDSHDQHVIRHVSIADKVSLRDIARERLDIVAERMHRLPEEYLEELKNGLKAILEGNGAQPIDEFMFLQKFVQTRSDLTSKTLVRAHRVQLEVLVVINTGIQAFLHPNINLSQSSLIEIFVYKRCRNIACQNELPADGCPCEICANRKGFCNLCMCVICNKFDFAVNTCRWIGCDVCSHWTHTDCAIRDGEISMGVSPKSVSGMGEMLFKCRACNHTSELLGWVKDVFQHCAPNWDRESLMKELDFVSRIFRGSEDTRGRKLFWKCEELMEKIKGGLAEATAAKLILMFFQEIELDSPKSLESGEGGGTIAPQDACNRIAEVVKETLRKMEIVGEEKTRMYKKARMGLEECEREVEEKAKQVAELQMERQKKKQQIEEVERIVRLKQAEAEMFQLKANEAKVEAERLERIVKAKKEKTEEEYASNYLKLRLSEAEAEKEYLFEKIKEQESGGNGGEASQAVMYSKIREMLHGYNASSPRVDPRSNQRNPFRSNP

SEQ ID NO: 23624 - protein, 510 aa, Neurospora crassa
MSYSWFGAPTPFNGTTPNGGDSASENLNQWYQSGDQAFILVASCMVLIMIPGIAFLYSGLARRKSALSLIWVCMMSSSVVMFQWYFWGYSLALSSTATNGFIGNLRHFGLMNTLGAPSPGSNLIPELLYAFYQMQFVGVTAALVVGATAERGRVVPAMVFIFIWATLVYCPLCCWAWNVNGWAFKYGVMDYAGGGPVEIGSGVSALAYSWVLGRRNEKMMLNFRPHNISLITIGTVFLWFGWLGFNGGSAFGANLRAAMACWNSCLTAMFAAMTWTLLDYRLAKKWSLVGWCSGTISGLVAATPASGYIPPWASIILGVVTGIVCNFGTKIKFMIGIDDALDIFAEHALGGVVGLIFNGFFAADYIIGLDGVNQEIPGGFLNHNYKQLYIQIAYVCATMGYSFVMSAILAKGVDMIPGLHLRASEEAELLGMDDDQHGEFAYDYVEVRRDYLAWTPAEKEQRQDGDIIVPQHGIEGHQELLSSSRHGPTMSELPHHEEEDPREKRGSTSE

SEQ ID NO: 23625 - protein, 468 aa, Vibrio sp. Ex25
MSNKTQQLLEIDRQRVFHASTHLKQYAAGELSGRIISSGSGIRITDSEGIELIDGFAGLYCVNIGYGRTEMADAIYEQAKELAYYHTYVGHTNEALVTLSDRIIKMAPEGMSKVYYGMSGSDANETQLKLVWYYNNARGLPEKKKIISRDRGYHGSSIASGSMTGLPLFHAHFDLPLERIKHTMAPYYYRREDDSMSELEFSQYCADQLEAMILEEGPETVAAMIAEPVLGTGGIVPPPEGYWQAIRKVLDKYDVLLIADEVVCGFGRLGSDFGSLHYDMKPDLITVAKGLTSAYQPLSGVIVGERVWSVLENGTDQWGAIGHGYTYSGHPMGAAAANCNLDIIEREGLVQNAAEVGAYLQQRMAETFNDHPLVGDTRGVGLLHALEFSSDKLRRAHFDPNLKVGPQIAAACLEQGLIARAMPHGDILGFAPPLIANRNDIDTIVDKAHQAVNKVMDNLVTSKQWQPK

SEQ ID NO: 23626 - protein, 513 aa, Saccharomyces cerevisiae
MTAGSAPPVDYTSLKKNFQPFLSRRVENRSLKSFWDASDISDDVIELAGGMPNERFFPIESMDLKISKVPFNDNPKWHNSFTTAHLDLGSPSELPIARSFQYAETKGLPPLLHFVKDFVSRINRPAFSDETESNWDVILSGGSNDSMFKVFETICDESTTVMIEEFTFTPAMSNVEATGAKVIPIKMNLTFDRESQGIDVEYLTQLLDNWSTGPYKDLNKPRVLYTIATGQNPTGMSVPQWKREKIYQLAQRHDFLIVEDDPYGYLYFPSYNPQEPLENPYHSSDLTTERYLNDFLMKSFLTLDTDARVIRLETFSKIFAPGLRLSFIVANKFLLQKILDLADITTRAPSGTSQAIVYSTIKAMAESNLSSSLSMKEAMFEGWIRWIMQIASKYNHRKNLTLKALYETESYQAGQFTVMEPSAGMFIIIKINWGNFDRPDDLPQQMDILDKFLLKNGVKLVLGYKMAVCPNYSKQNSDFLRLTIAYARDDDQLIEASKRIGSGIKEFFDNYKS

SEQ ID NO: 23627 - protein, 386 aa, Avena sativa
AVLMDLEPGTMDSVRTGPYGQIFRPDNFVFGQSGAGNNWAKGHYTEGAELIDSVLDVVRKEAENCDCLQGFQVCHSLGGGTGSGMGTLLISKIREEYPDRMMLTFSVFPSPKVSDTVVEPYNATLSVHMLVENASRCMVLDNRALIDSCFRTLKLTTNSFGDLNHLISATMEWVTCCLRFPGQLNSDLRKLAVNLIPFPRLHFFMVGFAPLTIRGIQQYRALTVPELTQQMWDSKNMMCAADPRHGRYLTASAMFRGKMSTKEVDEQMINVQNKNSSYFVEWIPNNVKSRVCDIPPTGLSMASTFIGNSTSIQEMFRRVSEQFTAMFRRKAFLHWYTGEGMDEMEFTEAESNMNDLVSEYQQYQDATADEEGEYEDEEEDLQAEDM

SEQ ID NO: 23628 - protein, 233 aa, Lotus corniculatus var. japonicus
EFGTRLDRVKNITGLVEWYGKNARLRELVNLVVVAGDRRKESKDLEEIAEMKKMYGLIETYKLNGQFRWISSQMDRIRNGELYRVICDTKGAFVQPAIYEAFGLTVVEAMTCGLPTFATCNGGPAEIIVHGKSGYHIDPYHGDRAAETLVEFFEKSKADPSYWDKISQGGLQRIHEKYTWKIYSDRLLTLTGVYGFWKHVTNLDRRENKRYLEMFYALKYSKLAESVPLAVEE

SEQ ID NO: 23629 - protein, 472 aa, Burkholderia fungorum LB400
MSTAYQPRASAAARLERLPFSGYHRTIFIIIAIAFFFDSVDLGTMTFVLGSIRTEFGLSSATAGLVASASFFGMVIGAAIAGLLADRFGRRPVFQWSMVLWGLASYLCSTAQSVEALIFYRVLLGFGMGMEFPIAQTLLSEFVPAASRGRLIALMDGFWPLGFIAAGVVSYFVLPTFGWRTEFALLAIPAVFVLIVRRMVPESPRWLEHRGRFGEADKILAEVEVKVMKAAGLSQLRPPAMLAEPPAAQGTGAFREIWSIAYRRRTIMVWTLWFFALLGFYGLTSWLGALMQQAGFAVTKSVLYTVLISLGGIPGFICAAWLVERWGRKPTCIASLAGSAVMAYVYGQTALHAQTPTLLICAGLAMQFFLFAMWAVLYTYTPELYGTGARATGSGFASAIGRVGSLIGPYVVGVVLPVFGQGGVFSLGAMCFVIAAAAVWILGIETRGLALETLVSEAVETDARGVLSPMRD

SEQ ID NO: 23630 - protein, 415 aa, Fusobacterium nucleatum subsp. vincentii ATCC 49256
MLAKRYTGKKLVDNIFATSKKAKQAIKEFGKENVINATIGSLYNEDEKLAVYDVVESVYRNLPPEDLYAYATNVIGEDDYLEEVIKVVFYDDYKEALKGLHIASIATTGGTGAISNTVKNYMDTGDKVLLPNWMWGTYKNIVIENGGKIETYQLFDKNGDFNFEDFKNKVLELAKFQKNVVLIINEPSHNPTGFRMTFEEWVNLMDFFKSIRDTNLIVIRDVAYFEYDDRGEEETKKIRKLLVGLPKNVLFMYAFSLSKSLSIYGMRIGAQIAVSSDEGVIQEFEDAIPFSCRTTWSNIPKGGMRLFATIMKNPELKANFLNEKQGYMNLLNERANIFLTEAKEENLEILPYRSGFFVTVPVGETVDKVIEDLESKNIFVIKFDTGIRIGLCSVPKKKIKGLAKKIKESISKFKK

SEQ ID NO: 23631 - protein, 404 aa, Streptomyces antibioticus
MTTSVVVTGLGVAAPNGLGTADYWAATREGRSGIGRVTRFDPSQYPSRLAGEVPGFVAEDHLPSRLLPQTDHMTRLALVSADWALQDAGIRPEELPEYAAGVVTASSAGGFEFGQNELRALWSKGSQYVSAYQSFAWFYAVNTGQISIRHGLRGPSGVVVSDQAGGLDALAQARRQIRRGSQVIVSGGIDASICSWGWGAQLTSGRMSTDDDPATAYRPFDGAAAGHVPGEGGALLVLEEAGAAAARGARVYGRIAGYGTTFDPKPGSGREPGLRRAIELALTDAGLAPADIDVVFADAAAVPDLDRIEARALVEVFGPRGLPVTAPKSMTGRLNSGAGSLDVATALLAIRDGVIPPTINVTAQDDYELDLVTAQARSARLRSALVVARGHGGFNSALVVQDAA

SEQ ID NO: 23632 - protein, 580 aa, Candida albicans SC5314
MKIFRLFSLLIVQFIINTTVAVSPVSAVLPKSSFSPFDSPEFCSQIITPTCNTTFTYIDELNKDIRPYLSELVKTSYFRYFKVNLDKQCRFWNAQHFCASENCAVEILEDFNWSQVTNESLKPSGLGKISLPDKSSIDNSIETEEVQTCEDLDYSEIDDDHHCVYVNLVNNPERFTGYGGNQSFDVWKAIYSENCFPNTNPMSMTNDADNGGEQCIEKNLFYRVVSGMHASIAVHLSREYLNSETGEFYPNLKVFMERVGMHNDRLSNIYFNYALVSQAIVKLSEILPLREFIQSGYDDITPAQKQHLLANNDVESVEVYDRLLLDDIIPSLEANVVFNTSNLFDNSNLRDEFRSRFRNISAIMDCVGCDRCRMWGKIQTIGYGTALKILFEDDNYDNHNLKFRRIEIVALINTFDRLSKSIESINMFKEMYLQHLKDVAEGLTQPGVYDKIQNNKPGNGFAFPFVSPLPQKKPDQTNTPKNQQQKQPQETDKKRLTLEEIAHTKPEDRTFIEDFRLSFDEVWQALRFVLTSYQRFPAVLSRFTLVQLNEWWNKLLGKPTVYEYESAIDVDAQQYSQVIG

SEQ ID NO: 23633 - protein, 198 aa, Aspergillus fumigatus
MASGPATQSLKCVVTGDGAVGKTCLLISYTTNAFPGEYIPTVFDNYTASVMVDGRPISLGLWDTAGQEDYDRLRPLSYPQTDVFLICFSIVSPPSFDNVKAKWYPEIEHHAPNVPIILVGTKLDLRDDPATAESLRQKKMDLSRTRHWPSPKEIRAHKYLECSALRQRNFKSVFDEAIRAVLNPGPAAKPKSKKCTIL

SEQ ID NO: 23634 - protein, 109 aa, Bryopsis maxima
SVNLSILKFLAFEQTFKNSLTGLPMGGGKGGSDFNPKGKSENEVMRFCQSFMTELSRHVGPNTDVPAGDIGVGAREVGFLFGQYKRLMNRFEGVLTGKALEFGGSEIRN

SEQ ID NO: 23635 - protein, 238 aa, Nostoc punctiforme PCC 73102
MSSNLATKLRVGTKKAHTMAENVGFVKCFLKGVVEKNSYRKLVANFYFVYSAMEEEMEKHRQHPILSKINFPQLNRKYTLEQDLSYYFGANWKEQIKLSSAGEAYVKRIREISATEPELLIAHSYTRYLGDLSGGQILKNIAVTAMNLSDGQGTAFYEFPEIPDEKGFKAKYRQILDELPLDDAATDRIVEEANAAFGTNMKMFQELEGNLIKAIGVMVFNSLTRRRTRGSTELVTAE

SEQ ID NO: 23636 - protein, 72 aa, Aspergillus fumigatus
MVVATIKCVVVGDGAVGKTCLLISYTTNKFHSEYVPTVFDNYAVTVMIGDEPYTLGLFDTAGQEDYDRLRPL

SEQ ID NO: 23637 - protein, 249 aa, Escherichia coli
AVTKLVLVRHGESQWNKENRFTGWYDVDLSEKGVSEAKAAGKLLKEEGYSFDFAYTSVLKRAIHTLWNVLDELDQAWLPVEKSWKLNERHYGALQGLNKAETAEKYGDEQVKQWRRGFAVTPPELTKDDERYPGHDPRYAKLSEKELPLTESLALTIDRVIPYWNETILPRMKSGERVIIAAHGNSLRALVKYLDNMSEEEILELNIPTGVPLVYEFDENFKPLKRYYLGNADEIAAKAAAVANQGKAK

SEQ ID NO: 23638 - protein, 423 aa, Pseudomonas fluorescens PfO-1
MTESVLDYMTRLGRAAREASRVIGRASTAQKNRALLAAANALDAARAELAAANEQDLATGRANGLEPALLERLELTPARIDGMIVGLRQVAALPDPVGAIRDMSFRPSGIQVGKMRVPLGVIGIIYESRPNVTIDAASLCLKSGNATILRGGSEAIHSNRAIAACIQRGLAAAELPAAVVQVVETTDRAAVGALITMPEYVDVIVPRGGRGLIERISRDARVPVIKHLDGICHVYVSEHADLPKAQRIAFNAKTYRYGICGAMETLLVDQRVAKDFLPSMAKQFREKGVELRGCERTRAIIEAVAATEEDWSTEYLAPILSIRVVDGLDQAIEHINHFGSHHTDSIVSENLADTRQFVAQVDSASVMINTPTCFADGFEYGLGAEIGISTDKLHARGPVGLEGLTCEKYIVVGDGQLRGQATV

SEQ ID NO: 23639 - protein, 610 aa, Glycine max
  misc_feature (136)..(136): Xaa can be any naturally occurring amino acid
  misc_feature (183)..(183): Xaa can be any naturally occurring amino acid
  misc_feature (200)..(200): Xaa can be any naturally occurring amino acid
  unsure (1)..(610): unsure at all Xaa locations
MKYVLVTGGVVSGLGKGVTASSIGLILKACGLRVTSIKIDPYLNTDAGTMSPFEHGEVFVLDDGGEVDLDLGNYERFLDIKLTRDNNITTGKIYQSVIEKERRGDYLGKTVQVVPHITDAIQEWIERVAKIPVDGXSGNADALLMSDIGLDMRLILTLRSPLENACLSFSAKNENGSLVHVRXVPILHVVGEPKTKPTQXVRQLRGLGLTPNLLACRSSKELDDNVKAKLGQFCHVPLSNILTLHDVPNIWHIPLLLKDQKAHEAILKALNLLGVAAEPNLKEWTSRTKVYDRCHEIVRIAMVGKYTGLSDAYLSVLKALLHASVARNRKLIVDWVPAGDLEDATYNEDPEAYKAAWSLLKGANGVLVPGGFGDRGVQGKILAAKYAREHNVPFLGICLGMQIAVIEFARSVLGLHDATSTEFNPETKTPCVIFMPEGSKTHMGGTMRLGSRRTYFEVADCKSAKLYGNVSFVDERHRHRYEVNPDMISPLENAGLSFVGKDETGRRMEIVELPSHPFFIGVQFHPEFKSRPGKPSPLFSGLIAAASESRRTIMVPSSNGHAKLTNGNGMYNGHSPKLKAHQKGNGFKASNGSLNGIYTNGNGVYVDGSC

SEQ ID NO: 23640 - protein, 94 aa, Orientia tsutsugamushi
MKYQPLYDRVLVEPIQNDEAHGKILIPDTAKEKPTEGIVVMVGGGYRNDKGDITPLKVKKGDTIVYTKWAGTEIKLESKDYVVIKESDILLVKS

SEQ ID NO: 23641 - protein, 103 aa, Synechococcus elongatus PCC 7942
MAAVSLSVSTVTPLGDRVFVKVAEAEEKTAGGIILPDNAKEKPQVGEIVAVGPGKSNDDGSRQAPEVKIGDKVLYSKYAGTDIKLGNDDYVLLSEKDILAVVA

SEQ ID NO: 23642 - protein, 678 aa, Candida glabrata CBS138
MAGNPHIENIANTNQLTIRLKPTNEELNAALNNCATDHKGLIVPQERIEPYESLNETKRAEYLSLKNINNEQNKLVASGNADTEEIESYERVIQFQFKHMPNLKNCLKKVKAILKEEFEKGALAYWSISLNTHALTHPGNLFIGGIPKNMSLNTLMETFDKFGTISSLKILFDNKNVGIGFLSFMLGSEAAECIRCMNGTKIRSDNGDEGTLFINYHIERKERERLFLSHESSDSSASSLSVRNMRVNTHHRGKHNSPELNSWSTNNSSDDLTINNCVFIGNLPTDIQNEGEFIDDLTEAFPSVTVISYYFPYDHSLNQYKGYGFIKLQNNDQARRIIHEISTDCFEFCGNHIIANKASNKDNKTTSHFTLYTKTTETNPKTRNNYLEQTSPYAGGINTFPPSMNNYTFGYDLYPPIKRGSHNLPYIYGLPVPLEGQQESNIYVKHVPLDWSDKDLFNFYRPFGNIISCKIITVGGSSREEKSTNSSDEDLPFGISRGYGFVYFANPLDAAYAILSTDGYYLEGAIQKLSVSYAQKKKKDGQSLLDESLSNESSDQIDNSEKTNEKEKRNHSSAKFGQQQYNKKFMNALMSNFYHRNYVGKPSYNLVPSQAMGSPGMSSGMISSSRGNMGLMTPQLIPAAPIDMYSTNSQPRILPNANWFAYPIYPQCPVPLPMDNLV

SEQ ID NO: 23643 - protein, 482 aa, Salmonella enterica subsp. enterica serovar Typhi Ty2
MQLNDSTLFRQQAFIDGDWRDARGGDVIPVSNPANGKPLGNVPKMGAEETRDAINAANRALPAWRALTAKERANILRRWFNLMMEHQDDLARLMTLEQGKPLAEAKGEISYAASFIEWFAEEGKRIYGDTIPGHQTDKRLLVIKQPIGVTAAITPWNFPSAMITRKAGPALAAGCTMVLKPASQTPFSALALAELAQRAGILAGVFNVVTGSAGDIGGELTSNPLVRKLSFTGSTEIGRQLMEQCAKDIKKVSLELGGNAPFIVFDDADLDKAVEGALASKFRNAGQTCVCANRLYVQDGVYDRFAEKLNQAVNKLAVGDGLQADVAIGPLIDEKAVAKVQEHIADALEKGARVITGGEAHKLGGNFFQPTILADVPDNAKVAKEETFGPLAPLFRFSDEADVIRQANDTEFGLAAYFYARDLSRVFRVGEALEYGIVGINTGIISNEVAPFGGIKASGLGREGSKYGIEDYLEIKYMCIGL

SEQ ID NO: 23644 - protein, 302 aa, Solanum demissum
MCIMDQQQQEMSSQTLESMLVCTKPDQDQKKPRPAEQQPQKCPRCDSANTKFCYYNNYSLTQPRYFCKSCRRYWTKGGTLRNVPVGGGCRKNKKLSSTTSAKRSSQDNISPNISNPIPSYDSSTDLSLAFARLQKQTNAHLEIDQEHDNNNMSMMYNTGNNCTSTTFLDALRGGFLENAPNHPGLFHHNMYNYANMGQLVENGEMGMSYDQDQMSIGTSTTMMTTIVKQEMCNMARSTEGHDLNNSNNNNKVLCGFPWQQMNGDHHVNNMNTNDFEYSTNKQSWNGFGGSSNWHGLINSPLM

SEQ ID NO: 23645 - protein, 655 aa, Ustilago maydis 521
MTPKRKGADARTSRMHDEDDKVLDPKLAEHADEDECETSKPRLAKRQKRSTHSLRSAVVAGGAKVDKQYGSSAYAKSGQGWHRSDFNPNARGRTDSKTPLNQLEEALNAHAPNKANDANDGKNVVYWMRMHDLRIHDNRALAHASSLAAARRKNGKGGHLIALFVITPADYSAHDRGARRIDFVLRTLASLKSQFDKLDIPFVVYTYSGEDRAQVGEKVFSLCEQCDASQLTANIEYEVDELWRDLAMLEAKDKKGVSFSLLHDCYVVPPGRIKTNDGRPYSVFSPWNRRWTESISKDMSLIEASEDPEANPKSIRSHPKLGALFELSKLGTGYGIPEELSGFECKDREYMAKLWPATDQAAHQVLDNFIKGKGGETALDRAANEPSTAEVGANAKDSRLARYAEGRNLLSENGTSRISPYLAAGVVSARECLRRTKQLTKGKLHVGRDSGVAMWNTEISFRDFYAHVLAAWPKVCMGHAFITKYEDVVWETDSSTLDAWKQGRTGYPIVDAAQRQCIQQGYIHNRGRMISAMFLTKHLLHDWRHGERHFSLNFIDQDFASNNGGWQWSASTGTDPQPYFRIFNPLSQSEKCDPHGDYIRHFVPELKNVKGNAIHDPFHRLSKAEFEKLGYPKPIVEHAQARQRALKRYKNPGDQ

SEQ ID NO: 23646 - protein, 52 aa, Salmonella enterica subsp. enterica serovar Typhi Ty2
MGFWRIVFTIILPPLGVLLGKGFGWAFILNILLTLLGYIPGLIHAFWVQMRH

SEQ ID NO: 23647 - protein, 324 aa, Solanum demissum
MANGEGEVVCVTGGSGFIGSWLVSSLLERGYTVHATVKDLNDEKETKHLLALDGAESRLRLYQIDLLDYDSIVSAITGAVGVFHLASPCIVDEVKDPENDLLSPAIKGTSNVLTASKELGVKRVVVTSSVSSITPNPNWPADRIMNEDCWTDIEYCKQNGVWYPLSKTLAEKDAWKFAKEKDLDIVVVNPGTVMGPIIPPSLNASMQMILRLLQGCTDTYQDFFMGLVHVKDVALAHILVYENKSAKGRHMCVEAITHYGDFAAKVAELYPEYNVPRLPKDTQPGLLRAKDGAKKLMDLGLEFIEMEQIIRDAVESLKIKGYIS

SEQ ID NO: 23648 - protein, 546 aa, Candida glabrata CBS138
MVTRRRLHHPEVEQVSKRQKVDKAESKNKKHADVAAERGEQSTEDHEDESQDKKDKKVVGDNRDEDEEVSPNGQEAAEDNDDRKDKDAKEKDTETNDEGTEKSHTDVNDDDDDVDESKEEDAAAAVDITKEKKDEQESDNKTEEKKVQENEEEEEEDENKNDEDVEELGSTEPVDDEKKGLVKFEFDGVEYKFKERASVIEENEGKIEFRVVSNDNTRENMMVLTGLKNIFQKQLPKMPKEYIARLVYDRSHLSMAVIRKPLTVVGGITYKPFNKRQFAEIVFCAISSTEQVRGYGAHLMNHLKDYVRNTSDIRYFLTYADNYAIGYFKKQGFTKDITLDKKVWMGYIKDYEGGTLMQCSMLPRIRYLDAAKILLLQEAALRRKIRTISKSHVVHPGLECFNDIENIKPIDPMSIPGLKEAGWTPEMDELAQRPKRGPHYAAIQNILVELQNHAAAWPFLRPVNKEEVPDYYEFIKEPMDLSTMELKLENNKYEKMEEFIYDARLVCNNCRLYNGENTSYYKYANRLEKFFNNKVKEIPEYSHLID

SEQ ID NO: 23649 - protein, 588 aa, Zea mays
  misc_feature (173)..(173): Xaa can be any naturally occurring amino acid
  misc_feature (299)..(299): Xaa can be any naturally occurring amino acid
  misc_feature (559)..(559): Xaa can be any naturally occurring amino acid
  misc_feature (572)..(572): Xaa can be any naturally occurring amino acid
  unsure (1)..(588): unsure at all Xaa locations
MCGILAVLGCSDWSQAKRARILACSRRLKHRGPDWSGLYQHEGNFLAQQRLAVVSPLSGDQPLFNEDRTVVVVANGEIYNHKNVRKQFTGTHNFSTGSDCEVIMPLYEKYGENFVDMLDGVFAFVLYDTRDRTYVAARDAIGVNPLYIGWGSDGSVWIASEMKALNEDCVRFXSSPPGHLYSSAGGGFRRWYTPHWFQEQVPRTPYQPLVLREAFEKAVIKRLMTDVPFGVLLSGGLDSSLVASVTKRHLVETEAAEKFGTELHSFVVGLEGSPDLKAAREVADYLGTIHHEFHFTVQXGIDAIEEVIYHDETYDVTTIRASTPMFLMARKIKSLGVKMVLSGEGSDELLGGYLYFHFAPNKEEFHRETCRKVKALHQYDCLRANKATSAWGLEVRVPFLDKEFINVAMGMDPEWKMYDKNLGRIEKWVMRKAFDDDEHPYLPKHILYRQKEQFSDGVGYNWIDGLKSFTEQQVTDEMMNNAAQMFPYNTPVNKEAYYYRMIFERLFPQDSARETVPWGPSIACSTPAAIEWVEQWKASNDPSGRFISSHDSAATDHTXAVSRRWPTAAATXANGTVNGKDVAVAIAV

SEQ ID NO: 23650 - protein, 368 aa, Ashbya gossypii ATCC 10895
MEPAHIQIQISELFEVKLTDYGGRACFARQSQQRGDTVLKLTQALGSSIAYEYRKEVCHFCFAYDAGAVMKTKIGHAEARFQPSITGASSFGGGGLRFCSEICKNAYMQMESAEELVEAFETLLQAFQRSNKRRNTDLQDDDCGNAVITEAIIEERWRYVENEWTPKLSAMKPSKRHLMIPAIDEEVYSCARFVTECLFRLKHLPNESTMYQAFDQLQSNELQKITEFPVLLEFQLKVYKFLKVVLPIGLRDLLSSALFRKILGSEYGNSFGIWEQNEGNYSRDYLGYWVLPEASYFNHSCAPNLAKKRVGREMYFVLTSDVAAGEQLCIDYKGILDLPVVERRNILHSNWFFDCACERCALELQSIH

SEQ ID NO: 23651 - protein, 537 aa, Pyrococcus furiosus
MTKYIFVTGGVVSGLGKGITSASIGLLMKARGYKTTNIKIDPYINYDAGTMNPYQHGEVFVLDDGGEVDLDLGNYERFLDTELTFDHNITTGKVYSTVIEKERRGEYLGATVQVIPHITDEIKRRIREIAKDYEVVVVEIGGTVGDIESMPFLEAARQMQLEEGRDNVAFVHVTYVPKLKVVGEQKTKPTQHSVKELRSLGIQPDAIVARSEDPLEEAARKKISLFTNVPEEAVISAYDVEDTYEVPLLLEREGLGKYLTKRLKLEDREPDLKDWEKMVAKYKALTETVEIAIVGKYVKLQDSYLSIKEALKHASVSNEVKVKIRWIEAEDVETHGTKLLEGVDGIIIPGGFGARGAEGKIQAIRYARENDIPFLGICFGFQLTVVEFARNVLGMKGAHSTEIDPQTPYPVVDLMPEQRNLDRLGGTMRLGAYPVKIKKGTLAYSLYNKELVYERHRHRWEVNPNYIEALEKAGLVFSGVAGDDERRMEILELPDKRYFIATQFHPEFKSRPMRPAPVFHGLVRAAKEYKQEKNVTH

SEQ ID NO: 23652 - protein, 542 aa, Agrobacterium tumefaciens str. C58
MARYVFITGGVVSSLGKGIAAAALGALLQSRGYRVRLRKLDPYLNVDPGTMSPTQHGEVFVTDDGAETDLDLGHYERFTGRSATKTDNITTGRIYKNIIDKERRGDYLGATVQVIPHVTNEIKDFVTEGNDDYDFVICEIGGTVGDIEAMPFMEAIRQLGNDLPRGTAIYVHLTLMPYIPAAGELKTKPTQHSVKELQALGIHPDILLVRADREIPEAERRKLSLFCNVRPSAVIQALDVANIYDVPIAYHNEGLDSEVLAAFGIEPAPKPRLEQWEEVCNRIRTPEGEVTIAIVGKYTGLKDAYKSLIEALHHGGFANRVKVKLEWIESEVFEKEDPTPYLEKVNGILVPGGFGERGSEGKIMAAQFARERNVPYFGICFGMQMAVVEAARHLAGIENASSTEFGPTAEPVVGLMTEWVKGNELEKRSTKGDLGGTMRLGAYKAALKKDTKIAEIYGTTDISERHRHRYEVNVDYKDRLEECGLVFSGMSPDGVLPETVEYPDHPWFIGVQYHPELKSRPLDPHPLFASFVEAAVEQSRLV

SEQ ID NO: 23653 - protein, 200 aa, Streptomyces avermitilis MA-4680
MAEEPKETGPGFQNPVAGFGVTFKAMFKKRLTEQYPEQQKTTAPRFHGRHQLNRHPDGLEKCVGCELCAWACPADAIYVEGADNTDEERYSPGERYGRVYQINYARCILCGLCIEACPTRALTMTNEFELADSSRANLIYTKEQLLAGLDDNMVDSPHAIYPGMDEQDYYRGLVTEAAPGTERQVAVSKGEKPQDEGVEA

SEQ ID NO: 23654 - protein, 507 aa, Solenostemon scutellarioides
MTSLLAHPLLPPPRRRPLPPLLPPPVSHPAGPRPGRWWRNLYDVKPVRFRCFAEWAQLFGPTFSVWFGSTLNVIVSSSELAKEVLKEKDGQLADPPRSRSAVKLSRDGKDLIWADYGPHYVKVRKVCTVVLFSPKRLELLRPIREDEITVMVESIYQDSAASGKSVVIKKYLASMAFHNITRLVFGKRFVNSEGEVDKQGQEFKAIAINGLKLGASLAVSEHIPWLRWMFPLDEDAFTQHGVRMERLTREIMQEHTLARQKTGGAKQHFFDALLTLKDEYDLSEDTIIALLWDMIAAGMDTPAISVEWAMAELVRNPRVQEKVQEELDRVIGHERIMTELDIPNLPYLQCVVKESLRLHPPTPVMLPHRSNADVKIGGYDIPKGSNVHVNVWAIARDPKSWKVPLEFRPERFLEEDVDIKGHDFRLLRFGAGRRVCPGAQLGIDLATSMIGHLLHHFRWTPPTGVRAEDIDMGENPGTVTYMRTPVEAVPTPRLPANLYKRVAVVDI

SEQ ID NO: 23655 - protein, 152 aa, Triticum aestivum
LAWSRPRSLLKAQPQFLNDWKAKLWSRFFCLSVYITMYLNDCQRSAFYEGIGLNTKEFDMHVIYETNRTTARIFPAVPDVENPEFKRKLDRMVDINLKIISIGESNDMPLVKNLKRVPLIAQLVSEIIAAYLMPPIESGSVDFAEFEPKLVY

SEQ ID NO: 23656 - protein, 329 aa, Arabidopsis thaliana
MAQLPPKIPTMTTPNWPDFSSQKLPSIAATAAAAATAGPQQQNPSWMDEFLDFSATRRGTHRRSISDSIAFLEPPSSGVGNHHFDRFDDEQFMSMFNDDVHNNNHNHHHHHSINGNVGPTRSSSNTSTPSDHNSLSDDDNNKEAPPSDHDHHMDNNVANQNNAAGNNYNESDEVQSQCKTEPQDGPSANQNSGGSSGNRIHDPKRVKRILANRQSAQRSRVRKLQYISELERSVTSLQTEVSVLSPRVAFLDHQRLLLNVDNSAIKQRIAALAQDKIFKDAHQEALKREIERLRQVYHQQSLKKMENNVSDQSPADIKPSVEKEQLLNV

SEQ ID NO: 23657 - protein, 331 aa, Oryza sativa
MKVKAIRVHKIGGPEVLTWEEVEIGEPSEGEIRIKNKAIGVNYVDIYYRTGLHQEPLPFVPGKEAVGVVSAVGPGVTGIEVGDVVGYADTPMGTYTEEQIIPATLAIPIPPSVDHITAASVLLKGMTTYVLVKQAFKIQAGHTVLVHAAAGGVGSLLCQWANALGATVIGTVSTQEKAIQAAEDGCHHVIIYTEEDFVAQVAEITSRKGVHVVYDAVGKDTFKGSMECLMPRGCMISYGQCSGRPDPVPVSDLASKSLILGRPGMRHYTATRDELLHAAGEVFAGVAAGVLRVRVNHVYPLHEAARAHADLEARRTSGSVVLLPAMPAADS

SEQ ID NO: 23658 - protein, 624 aa, Arabidopsis thaliana
MDDMNLIQQAQRHQLVVSNLGEEIDLEIGPGEDDAAFANNSLIGGPPREPSTGEHDETKHMVLVSDLPSEDQDISKGTPAKRKKKVVKRWREEWADTYKWAYVDMKDGTARIFCSICREYGRKHRRNPYGNEGSRNMQMSALEEHNNSLLHKEALRLQTASKDKIVVDKPIYVKTVMSKSAGSIVEGALKRDPNEIEFVQSVQESVHALERVIAKNSHYVNIMERLLEPERMIVFRVPWIDDRGETHVNRGFRVQFNQALGPCRGGIRFHPSMNLSIAKFLGFQQTLKNALSPYKLGGASGGSDFDPKGKSDNEIMRFCQSFMNEMYRYMGPDKDLPSEEVGVGTREMGYLFGQYRRLAGQFQGSFTGPRIYWAASSLRTEASGYGVVYFARLILADMNKEIKGLRCVVSGCGKIAMHVVEKLIACGAHPVTVSDSKGYLVDDDGFDYMKLAFLRDIKSQQRSLRDYSKTYARAKYFDELKPWNERCDVAFPCASQNEVDQADAINLVNAGCRLLVEGSNMPCTAEAVDVFRKANVLIAPAIAAGAGGVAAGEIEVLRESNSMQWSAEDFESRLQEALKQTYEKALKAANDFGYQKESPEALLHGATIAAFLNIAQAMTDQGCV

SEQ ID NO: 23659 - protein, 109 aa, Streptococcus pneumoniae
LLYALLHLSGFEDVSMDEIKSFRQWGSKTPGHPEFGHTAGIDATTGPLGQGISTATGFAQAERFLAAKYNREGYNIFDHYTYVICGDGDLMEGVSSEAASYAGLQKLDK

SEQ ID NO: 23660 - protein, 158 aa, SYNECHOCOCCUS SP. WH 8102
MRRLFAALLSALLVFGFAPVAKADVAGLTPCSESARFQQRAAAATTPQAKARFEMYSQASCGDDGLPHLIVDGRWSHAGDFVYPGIMFLYVAGCIGWAGREYLKATRGKNAAMNEIQIDLGIAFKSLLAAATWPLAAFGEFTSGKLLEDDNKVTVSPR

SEQ ID NO: 23661 - protein, 481 aa, Methylobacillus flagellatus KT
MTKSLVWFRRDLRDYDHAALYHALKDSEQVVCAFVFDTDILDGLPRDDRRVEFIWESVRELKLALQERGGDLLVRHGKATEEIPALASVLGVECVYCNRDYEPAAVKRDDTVSQQLGTQGIAFKSFKDQVIFERDEIMTKSGTPFSVFTPYKNACLRKLDDFHLKAYPVDRYIHHLAQSAPQPMPSLESLAFARSNLKQLRLPTGMSGGMALFEDFSERMPRYRDARDFPALKGPSYLSVHLRFGTVSIRHLARTAWQQGGAGAETWLNELLWRDFYFQVLYHHPQVAEGHSFKPEFEHIPFPNGESLFKAWCEGRTGYPLVDAAMRQINQTGYMHNRLRMVAAGFLVKDLLIDWRWGERYFAEKLIDFDLAANNGGWQWAASTGCDAQPWFRIFNPVTQSEKFDPEGKFIRKYVPELQPCDDKEIHAPWLIPPLRQQALGLVIGKDYPAPVVDHAMRREQVLSLYRQASSRKKWPASSVL

SEQ ID NO: 23662 - protein, 3980 aa, Bacillus subtilis
MYTSQFQTLVDVIRERSNISDRGIRFIESDKNETVVSYRQLFAEAQGYLGYLQHLGIKPKQEIVFQIQENKSFVVAFWACILGGMIPVPVSIGEDDDHKLKVWRIWNILNHPFLIASEKVLDKIKKYAAEHDLQDFHHQLNEKSDIIQDQTYDYPASFYKPDADELAFIQFSSGSTGDPKGVMLTHHNLIHNTCAIGNALAVHSKDSFLSWMPLTHDMGLIACHLVPFITGINQNLMPTELFIRRPILWMKKAHEHKASILSSPNFGYNYFLKFLKNEPDWDLSHIKVIANGAEPILPELCDEFLKRCAPFNLKRSAILNVYGLAEASVGAAFSKLGEEFVPVYLHRDHLNLGERAVKVSKEDQNCASFVEVGQPIDYCQLRISDETNERVEDGIIGHIHIKGDNVTQGYYNNPESTEKALTSDGWVKTGDLGFISESGNLVVTGREKDIIFVNGKNIYPHDIERVAIEMEEVDLGRVAACGVYDQKTQSGEIVLFVVYKKSPEKFAPLVKEIKKHLYKRGGWSIKEVLPIRKLPKTTSGKVKRYELARQYEAGNFSTESAAINECLESSPETSGQTPIHEIETELLSIFSEVLDGKKVHLADSYFDMGANSLQLSQIAERIEQKFGRELAVSDLFTYPSITDLAAYLSESRAEIKQDAAAKPSHVTPKDIAIIGMSLNVPGASTKSDFWNLLEKGEHSIREYPESRLKDAADYLKSIQSEFNESQFVKGGYLDEIDRFDYSFFGLAPKAAQFMDPNQRLFLQSAWHAIEDAGYAGGSMNGSRVGVYAGYSKVGYDYERLLSANYPEELHQYIVGNLPSVLASRIAYFLNLKGPAVTVDTACSSSLAAVHMACKSLMSGDCEMALAGGIRTSLLPICIGLDMESSDGYTKTFSKDSDGTGTGEGAAAVLLKPLQDAVRDGDHIYGVIKGSALNQDGTTAGITAPNPAAQTEVIETAWKDAGIAPETLSFIEAHGTGTKLGDPVEFNGLCKAFEKYTAKKQFCAIGSVKSNIGHLFEAAGIVGLIKSVLMLNHKKNPPLAHFNEPNPLIHFHSSPFYVNQEVSEFTSGDEPLRGGVSSFGFSGTNAHVVLEEYISQSEYAPEDEHEPHLFVLSAHTEKSLYELAQQYRQYVSDDSQASLKSICYTASTGRAHLDHGIAMIVSGKQELSDKLTRLIQGDRNLPGVYIGYKNMKEMLPAHKEELNQQAAALIKQRLRTQDERITWLNRAAELFVQGAVIDWRALYSGETVQKTPLPLYPFERSRCWAEADQLRLNEGEKRGEAALNINQSKAHIESFLKTVISNASGIRGEELDLNAHFIGLGMDSIMLSQVKKAIADEFGVDIPMDRFFDTLTNLQSVIDYLADTVPSSFASAPPQENVPAQEKQVISEAQLESDRRDGHQEHTLEKIIASQNQLIQDALQAQLNSFNLLRNSGHHSDEKEYAKAQEKSIPSVKQGPPTVNAEQKAAQEAKPYVPFQPQNLNDQGHYTARQKQYLEDFIKKYAGKTKGSKQYTDNTRFAHANNRNLSSFRSYWKEIVYPIIAERSDGSKMWDIDGNEYIDITMGFGVNLFGHHPSFITQVIDDSTRSSLPPLGPMSDVAGEVADRIRTCTGVERVAFYNSGTEAVMVALRLARAATGRKKVVAFSGSYHGTFDGVLGVAGTKGGAASANPLAPGILQSFMDDLIILHYNNPDSLDVIRSLGDELAAVLVEPVQSRRPDLQPQAFLKELRAITQQSGTALIMDEIITGFRIGLGGAQEWFGIQADLVTYGKIIGGGQPLGVVAGKAEFMNAIDGGTWQYGDDSYPQDEAKRTFVAGTFNTHPLTMRMSLAVLRHLQTEGEHLYEQLNQKTAYLVDELNHCFEQAQVPIRMVRFGSLFRFVSSLDNDLFFYHLNYKGVYVWEGRNCFLSVAHTADDIENIIQAVKDTVEDLRRGGFIPEGPDSPDGGGRKKSGTRELSPEQKQLVMASHYGNEASAALNQSIMLKVKGELQYTSLKQAVRHIVDRHEALRTVIHPDDEVQQVQERMNIEIPVIDFTGLPHEHREPEIQKWLTEDAKRPFHFHEQKPLFRIHVLTSAHNEHLIVLTFHHIIADGWSIAVFVQELESNYAAIVQGKSISPKEADVSFRQYLDWQQAQIDSGQYEEGVRYWRRHFSEPIQQPILPSADSVRYPNGYEGDRCTVRLGRPLSEALRSLSIQMKNSVFVTMLGAFHLFLHRLTKQSGLVIGIPAAGQSHMKQHDLIGNCVNMIPVKNTSSSESTLSGYLGSMKESVNLAMRHQAVPMTLVARELPHDQVPDMRIIFNLDRPFRKLHFGKAEAEPVAYPVKCTLYDLFLNITDAHQEYVLDFDFNTNVISPEIMKKWGAGFTKLLQKMVEGDSIPLDAMMMFSDEEQQDLQALYGEHQKRVSSIASNTANFTEAYEAPVNETERQLARIWEELFGLERVGRSDRFLALGGNSLQATLMLSKVQKTFHQKVSIGQFFNHQTVKELARFIQNETKVVHLPMKTAEKKAYYPTSPAQQRVYFLHQLEPDQLAQNMFGHISITGKYDEQALISSLQQVMQRHEAFRTYFDIIDGDIVQKLENEVDFNVHVRTMSRDEFDAYSDRFVKPFRLDQAPLVRAELIKIENEQAELLMHHIISDGYSVNILTNELLALYHQKPLPDIEFEYKDFAEWQNQRLNDDAMKRQATYWLEQFQDEIPILDLPTDGSKAAERSSEGQRVTCSLQPDVIRSLQDLAQKAETTLYTVLLAAYNVLLHKYTGQEDIVVGTPASGRNHPDIERIIGIFIQTIGIRTKPHANRTFTDYLEEVKRQTLDAFENQDYPFDRLVEKLNVQRETTGKSLFNTMFVFQNIEFHEIRHNECTFKVKERNPGVSLYDLMLTIEDAGQQIEMHFDYKPGRFTKDTIEQITRHYTAILNSLAEQPEMTLSSVPMLSETERHQLLTECNGTKTPYPHKETVYRWFEMQAEQSPDHEAVIFGNERYTYRQLNERANRLARTLRTKGVQADQFIAIISPHRIELIVGILAVLKAGGAYVPIDPEYPEDRIQYMLRDSRAEVVLTQRSLLDQLPYDGDIVLLDEENSYHEDHSNLESDSDAHDLAYMIYTSGSTGNPKGVLIEHQGLANYIWWAKEVYVRGEKTNFPLYSSISFDLTVTSIFTPLVTGNTIIVFDGEDKSAVLSEIMRDSRIDMIKLTPAHLHVIKEMNIAGGTAIRKMIVGGENLSTRLAKSVSEQFKGRLDIFNEYGPTEAVVGCMIYHFDAERDKREFVPIGTPAANTDIYVADASRNLVPFGVIGEIYISGPGVARGYWNRPDLTAEKFVENPYVPGAKMYKSGDLAKRLKDGNLLYIGRVDEQVKIRGHRIELGEIEAAMHNAEAVQKAAVTVKEEEDGLKQLCAYYVSDKPIAAAQLREQLSSGLPDYMVPTYFVHLEHMPLTSNGKINRKALPAPEASLQQTAEYVPPGNETESKLTDLWKEVLGISHAGIKHNFFDLGGNSIRAAALAARIHKELDVNLSLKDIFKFPTIEQLADKALHMDKNRYVPIPAAKEMPYYPVSSAQRRMYLLSHTEGGELTYNMTGAMNVEGTIDPERLNAAFRKLIARHEALRTSFDLYEGEPAQRIHQNVDFTIERIQASEEEAEDRVLDFIKAFDLAKPPLMRAGLIEIEPARHVLVVDMHHIISDGVSVNILMKDLSRIYEGNEPDPLSIQYKDFAVWQQSDIQKRIIKSQEAYWLDQFHGDIPVLDMPADYERPAIRDYEGESFEFLIPEHLKQRLSQMEEDTGATLYMILLAAYTILLSKYSGQEDIIVGTPSAGRTHLDVEPVVGMFVNTLVIRNHPAGRKTFDAYLNEVKENMLNAYKNQDYPLEELIQHLHLPKDSSRNPLFDTMFVLQNPDHAELTFDSLQIKPYPFHHPVAKFDLTLSIQADRDNYHGLFEYTKKLFKKSRIEILSNDYLHILSAILEQPSILIEHIGLSGSNEEEENALDSIQLNF

SEQ ID NO: 23663 - protein, 567 aa, Bacillus licheniformis ATCC 14580
MNNMRRTKEGHLETSLRGKDVLSIPTLNKGVAFSLEERKNLGLEGLLPPTVLSLDQQAERAYEQFSRQPDRLRQNVYLNDLQNRNEVLFYKLLQNHLREMLPVVYTPTVGEAIQEYSHEYRRPHGVYLSIDDMDGIETAFKNLQASADDIDLIVATDSESILGIGDWGVGGINIAIGKLAVYTAAAGIDPSRVIPVVLDVGTNNEKLLNDPLYIGNRHPRVEGERYEQFIDAYVETALKLFPNALLHWEDFGNKNARNIMSKYNHKIATFNDDIQGTGAITLAAILAAVKKTGTSLKDHRVVIFGPGSAGIGIADQIRDTMVLEGLSEEEANRAFWTVDYRGLLTTGMDQIMDFQEPYLRDTEEVKDWKRNEKGEISFEEVIRQVKPTILIGTSGVAGAFSEEIIKEMAAHTERPVILPMSNPTHLAEAVPEDLFKWTDGKALVATGSPFEAVEYNGVKHEIGQSNNAFVFPGLGLGTIVAKAKVITNGMFAASANAVANMVDHEKPGAGLLPKIDDLQDVSVQVAIDVVKAAIKDGVAQVQPEDVEKAVREAMWRPEYKTIVAKQD

SEQ ID NO: 23664 - protein, 660 aa, Haloarcula marismortui ATCC 43049
MTGGNHADWRQAEEEYTDEVIGDDTLGEMFAASAARNADTTAQLYKGGVYDRSLTDDVIPAAPDGDYAALSYERMHQLVKYLAAGFRDLGVGSDARVGILSNTRMEWALSDFAILSAGGVVTTVYTDSSSKQVQYLLSDPEASAVVVENAAMLDRVLAIEDDLSLSFIVVMDDTDVDREDVHTLKTVYRRGEETFSETAYQSWLDERDPDDLASLIYTSGTTGQPKGVRLTHRNFRANVNQTRKRIGPRPDKPSDLPTITADTRSIAFLPLAHVFERLAGHFFMYASGAAVSYAESPDTLADDLQTVKPMTGLSVPRVYERIFDNMRTQASESPLKKRIFDWSMDVAREYARTENPGPILTAKHSLADRLVYSTVKERLGGNIEFMVSGGGSLSKTLCETFLGMGLTILEGYGLTETSPVLSVNPPEDIRPGTLGAPLPAVDVHIDTGVVDASEFDGVTGDVGELLVDGPNVTQGYWNAPDATARAFTEIDGTQWFRTGDIVERTDDDFLIYHDRLKELLVLSTGKNVAPQPIEDQFATNDRVDQVMVVGDDQKFVGAIIVPNFEELHRWADSEGIDLPDDPEALVDDERVHAWVQTAVDAVNEELERVERIKSFALVSREWTAENDLLTPSMKKKRRNIRSAYREKLAEIYGEQQVEAA

SEQ ID NO: 23665 - protein, 258 aa, Arabidopsis thaliana
MFLQVHEIAFLFGLLGNIVSFGVFLSPVPTFYGIYKKKSSKGFQSIPYICALASATLLLYYGIMKTHAYLIISINTFGCFIEISYLFLYILYAPREAKISTLKLIVICNIGGLGLLILLVNLLVPKQHRVSTVGWVCAAYSLAVFASPLSVMRKVIKTKSVEYMPFLLSLSLTLNAVMWFFYGLLIKDKFIAMPNILGFLFGVAQMILYMMYQGSTKTDLPTENQLANKTDVNEVPIVAVELPDVGSDNVEGSVRPMK

SEQ ID NO: 23666 - protein, 378 aa, Nostoc punctiforme PCC 73102
MMVCEYKPGLEGIPAAQSSISYVDGQKGILEYRGIRIEELAEKSTFLETAYLLIWGELPSKEELEGFEHEVRYHRRIKYRIRDMMKCFPESGHPMDALQASAAALGLFYSLRDLHNPAYIRDSVVRLIATIPTMVAAFQLMRKGNDPVRPRDDLDYSSNFLYMLDEKEPDPLMARIFDICLILQVEHTMNASTFSARVTASTLTDPYAVVASAVGTLGGPLHGGANEEVIQMLEKIGSVENVRPYIEHCLETKSKIMGFGHRVYKVKDPRAIILQGLAEKLFEKFGYDKFYDIAQEMERVVGEKLGSKGIYPNIDFYSGLVYRKMGIPTDLFTPIFAIARVAGWLAHWKEQLAENRIFRPTQVYNGLHEVTYTPIDQR

SEQ ID NO: 23667 - protein, 389 aa, Pseudomonas aeruginosa PAO1
MPKALRFLGWPVLVGVLLALLIIQHNPELVGLPRQEVHVEQAPLLSRLQEGPVSYANAVSRAAPAVANLYTTKMVSKPSHPLFDDPMFRRFFGDNLPQQKRMESSLGSAVIMSAEGYLLTNNHVTAGADQIIVALRDGRETIAQLVGSDPETDLAVLKIDLKNLPAMTLGRSDGIRTGDVCLAIGNPFGVGQTVTMGIISATGRNQLGLNTYEDFIQTDAAINPGNSGGALVDAAGNLIGINTAIFSKSGGSQGIGFAIPTKLALEVMQSIIEHGQVIRGWLGVEVKALTPELAESLGLGETAGIVVAGVYRDGPAARGGLLPGDVILTIDKQEASDGRRSMNQVARTRPGQKISIVVLRNGQKVNLTAEVGLRPPPAPAPQQKQDGGE

SEQ ID NO: 23668 - protein, 684 aa, Ustilago maydis 521
MSKHVRVLYWFRTDLRLHDSPALQAALDLKPAALFPVWCWDPNYVYKHRVGVNRFRFLLESMIALSKNITSTQSNSQLLVVRGEPTELLPELWKRWSITHLVFEKDPSAYGRRRDQLILEAAEKSNVKVVAVQGHHLYDPEQVVNKNKGKPTMSMSTLQKIVADMGDVPKPIDAPEDLPLPTLKDSKSKSLQDTLPELARSLEGLPYYTGKGREGPESIDLNSTELGGQRDKKVSCYDTVQGEASELFSAPTLASLGMDASKVKDTIKGGEPIALEKLANICKDAKYVATFAKPKTSPGQSAEDPSTTLLSPYLKFGCLSVRKLWWDAEEAKNRYKGGSKTGPPENLNGQLLFRDMYACAEYAIGDAFGRVRGNEVCRYMDWYLPTHYDENGEVVLPRPAGDAVSEARLSAYKLGQTGFPWIDALMRQLRLEGWMHHLGRHSVAAFLTRGQCWISWERGAEIFDEYLIDWDPCSNPGNWMWLSCSAFFTQYFRLYGLATFPAKYDKTGALVRKYCPELAKFPDKYIYEPFNAPKEVQQKAGCIIGKDYPLPMLDEKEAKAENMARMKICYQANLYGTSKEVLEGKADEMLRKKHGFKDAPKEFDWNNRPGAKIPKWARAPHGEEHTTKGAPGHEDGPPLTKEEGESGDDSDDVVYKQEDEQKEERTSKKRKAAAKVEGTSKKKE

SEQ ID NO: 23669 - protein, 211 aa, Bacillus licheniformis ATCC 14580
MLFFIDTANLDEIKEAHALGVLAGVTTNPSLVAKENISFHDRLREITEVVSGSVSAEVISLKAEEMIEEGKELAKIAPNITVKIPMTPDGLKAVKALTDLGIKTNVTLIFSANQALLAARAGATYVSPFLGRLDDIGHNGLDLISEIKQIFDVHGLDTQIIAASIRHAQHVTEAALRGAHIGTMPLKVIHQLTKHPLTDKGIEQFLADWNK

SEQ ID NO: 23670 - protein, 475 aa, Zea mays
MDMALASKASPPPWNATAAEQPIPKRDKAAANDSTYLNPQAHDSVLGIILGGGAGTRLYPLTKKRAKPAVPLGANYRLIDIPVSNCLNSNISKIYVLTQFNSASLNRHLSRAYGSNIGGYKNEGFVEVLAAQQSPDNPNWFQGTADAVRQYLWLFEEHNVMEFLILAGDHLYRMDYEKFIQAHRETNADITVAALPMDEKRATAFGLMKIDEEGRIIEFAEKPKGEQLKAMMVDTTILGLDDVRAKEMPYIASMGIYVFSKDVMLQLLREQFPEANDFGSEVIPGATSIGKRVQAYLYDGYWEDIGTIAAFYNANLGITKKPMPDFSFYDRFAPIYTQPRHLPPSKVLDADVTDSVIGEGCVIKNCKINHSVVGLRSCISEGAIIEDSLLMGADYYETEADKKLLAEKGGIPIGIGKNSCIRRAIIDKNARIGDNVKILNADNVQEAARETDGYFIKGGIVTVIKDALLPSGTVI

SEQ ID NO: 23671 - protein, 615 aa, Saccharomyces cerevisiae
MSSSVVGASSNKKSGIRQSCEIIERERHSNDDTYSMTSTFFKLKENEIMSAQFDSLKYKILLISTAFVCGFGISLDYTLRSTYTGYATNSYSEHSLLSTVQVINAVVSVGSQVVYSRLSDHFGRLRLFLVATIFYIMGTIIQSQATRLTMYAAGSVFYNCGYVGTNLLLTLILSDFSSLKWRMFYQYASYWPYIIIPWISGNIITAANPQKNWSWNIAMWAFIYPLSALPIIFLILYMKYKSSKTAEWRSLKEQARKERTGGLFENLVFLFWKLDIVGILLITVSLGCILVPLTLANETSQKWHNSKIIATLVSGGCLFFIFLYWEAKFAKSPLLPFKLLSDRGIWAPLGVTFFNFFTFFISCDYLYPVLLVSMKESSTSAARIVNLPDFVAATASPFYSLLVAKTRKLKLSVIGGCAAWMVCMGLFYKYRGGSGSHEGVIAASVIMGLSGLLCSNSVIVILQAMTTHSRMAVITGIQYTFSKLGAAIGASVSGAIWTQTMPNQLYKNLGNDTLAEIAYASPYTFISDYPWGSPERDAVVESYRYVQRIIMTVGLACTVPFFAFTMFMRDPELIDKATHEEFTEDGLVVLPDEENIFSQIKALFRHNRSNKKLGC

SEQ ID NO: 23672 - protein, 328 aa, Magnetospirillum magnetotacticum MS-1
MPNKKPVVVVSRKLPDVIETRMMELFDTRLNVDDHPMSKMELIEAVKIADVLVPTVTDRIDAGVLSQAGPNLKLIANFGTGVDHIDLATARSRGIIVTNTPGVLTEDTADMAMALIMSVPRRIAEGERLIRSGDWKGWSPTFMLGHRIWGKRLGIIGMGRIGQAVARRAKAFGMSIHYHNRKRVHPDIETELEATYWESLDQMLARMDVITVHCPHTPATFHLLSARRLELLPKHAYVVNTARGEIVDENALTRMLIRGDLAGAGLDVFEHEPAVNPKLLALDNVVLLPHLGSATIEGRVDMGEKVLVNIKTFADGHQPPDRVLASMF

SEQ ID NO: 23673 - protein, 327 aa, Arabidopsis thaliana
METDSMECVSSTGNEIHQNGNGHQSYQFSSTKTHGGAAAAAVVTNIVGPTATAPATSVYELLECPVCTYSMYPPIHQCHNGHTLCSTCKVRVHNRCPTCRQELGDIRCLALEKVAESLELPCKFYNLGCPEIFPYYSKLKHESLCNFRPYSCPYAGSECGIVGDIPFLVAHLRDDHKVDMHAGSTFNHRYVKSNPREVENATWMLTVFHCFGQYFCLHFEAFQLGMGPVYMAFLRFMGDEEDARSYSYSLEVGGSGRKLTWEGTPRSIRDSHRKVRDSNDGLIIQRNMALFFSGGDRKELKLRVTGKIWKEQHSPDSGLSIPNLSSS

SEQ ID NO: 23674 - protein, 1690 aa, Candida albicans
MSFLRRDKSKANFRDGSATGLEEPVSPTTHFSPNAPPPLDGNHGDHYHDPDSPRSSVVSLPQLIHNSATHHLKENYRGFHANKRPKGIANVPPLAQPIKPRFKKKSNSLLNKLIYSTKKEDDETATSGKESRSSSIISDEKRKSASSASSGSSRQKFRFSSFDSNLSTSSSSPPKDKKASVSDTVSDSSTVTASMSNMPTISIDLNLDEMHDIIKSPETPTPTTGLPTQKAEKKASPTAIKNWQAPESWDVKAPIKKEEPHAPKIEEVAENDVAIDNVLEKKRLPVLYGTHQVPHVTNSKDIKSSHIIRVFKEDNTFTTILCPLETTTSELLAIVQKKFFLESTTNFQLSVCIGNCVKVLEDFEKPLKIQMGLLLLSGYTEEDKLRMLGREDLSFVCKFVVENIFLRSLTHDEEVLLSRNYVDVNISSLNLKNVPIIFHQHTYEIEKLNVANNPSIYLPLDFIQGCTSLAYVDFSHNGCSKFPNNLLEAPQLTHLNLEMNFLDEIPQRISCLSNLTNLKLSSNQLYSLPHSFSTLTNLKQLDLSSNYFDSYPEAVNKLTNLVELNFSYNDLSIIPESIANLINLQKLNLCTNKLSGTLPGYLSQLKALKRLDIRYNYISNVDVLGIIPNLEVAYASKNAISTFSDQMKCLRLLHFDRNPITELKFNTQMQMLSVLDLSRAKITAFPAEFVEKVPNIEKLVLDKNHLVSLPNELCQLSKLVSLSVHANNLQSLPANIGDLRFLKYLDLHSNNLKSLPDQIWDLCHLTSLNVASNNLTSFPKAPYSVVKRLSSSLVDVHLESSQTLSLADSLLILILSDNRLSDDCFDEISFLIALKSLNVSYNDLIEIPQGTLSRLTRLNELYLSGNELTTLPADDLEVLKSLKLLYMNNNKLVSLPAELSRIANLQHLDVSSNQLKYNISNWPYDWSWHWNKNLKYLNFSGNKRFEIKQSHIKNPETGEDFDSLLVLKQLRVLGLIDVTLTTTNVPEQAVDLRLRTTASEFDNFGYGVSDSLGMRDHVSARDLFVQKFRGKENEMLLCAFDGKHGATNQGHRISLVAKNMFVRNFTKELDEIKNDDEIENALRKAFLNFNKEINGILTAKKNKSFTPVPNMSKEALELNLVDDGNAGCTVSVIYIKDKKLYSANIGDIEALLCRNNGDQFLLTEKHDPTNREEFERIRASGGYVSGGGELDGQLSVSRGVGFFNFLPHTHCGPTIRRFKITNDDDMIILGSKQLWDFISYESAVDIIRKDKNDPMVAAQKLRDFAICYGATDKICVIVLTFGNRQKQAANMYSNYGVDRRRRDKQQVVGGDSNLRKLEQEIEPPIGPLALVFTDIKNSTLLWDSYPAPMRSAIKIHNTIMRRQLRITGGYEVKTEGDAFMVAFPSPTAALLWCFQVQQNLVTADWPSEILETDQCCVVSDSENNTIFRGLSVRMGIHWGSPVCEPDVITGRMDYFGPMVNRASRISAIADGGQIAVSSDFLDVLNSLTVKHNNIKNNVESLIDAYQGNENAGMTIERELNALEDLGCNYFKIGERKLKGLETPQPITLVFTNRLKLRYDIFQKRLDANHSTRVAGTLPVEIIYGLRTVSLRLENLCSSINNGGNYCSEGFESSSGVISQKMNSSFKDSDLISLLNHVTTRIESCTTTLFLRQQLSQIKGNGGLIETNNSPSLDVIMDEVADIMKTVNELK

SEQ ID NO: 23675 - protein, 221 aa, Hemerocallis hybrid cultivar
MGRGKIEIKKIENSTNRQVTYSKRRSGIMKKAKELTVLCDADVSIIMFSSTGKFSEYCSPGTDTKTVFERYQQATQTNLWSTQYEKMQNTLNHLKEINHNLRKEIRQRIGEELDGMDFKELRGLEQNLDEALKSVRARKYHVITTQTDTYKKKVKNSQEAHKTLLHELDDAVYGYADEDPGNYDSSLALAHGGSNMYAYRVQPSQPNLHGMSYGPHDLRLA

SEQ ID NO: 23676 - protein, 466 aa, Lactococcus lactis subsp. lactis Il1403
MLYGKENRDEAEFLEPIFGSESEQVDLPKYKLAQQSIEPRVAYQLVQDEMLDEGNARLNLATFCQTYMEPEAVKLMSQTLEKNAIDKSEYPRTTEIENRCVNMIADLWNASEKEKFMGTSTIGSSEACMLGGMAMKFSWRKRAEKLGLDINAKKPNLVISSGYQVCWEKFCIYWDIEMREVPMDKEHMSINLDKVMDYVDEYTIGVVGIMGITYTGRYDDIKALDNLIEEYNKQTDYKVYIHVDAASGGLYAPFVEPELEWDFRLKNVISINTSGHKYGLVYPGVGWVLWRDKKYLPEELIFKVSYLGGELPTMAINFSHSASQLIGQYYNFVRYGFDGYKAIHERTHKVAMFLAKEIEKTGMFEIMNDGSQLPIVCYKLKEDSNRGWNLYDLADRLLMKGWQVPAYPLPKNLENEIIQRLVIRADFGMNMAFNYVQDMQEAIEALNKAHILYHEEPENKTYGFTH

SEQ ID NO: 23677 - protein, 374 aa, Bacillus subtilis subsp. subtilis str. 168
MKIEELIAIRRDLHRIPELGFQEFKTQQYLLNVLEQYPQDRIEIEKWRTGLFVKVNGTAPEKMLAYRADIDALSIEEQTGLPFASEHHGNMHACGHDLHMTIALGIIDHFVHHPVKHDLLFLFQPAEEGPGGAEPMLESDVLKKWQPDFITALHIAPELPVGTIATKSGLLFANTSELVIDLEGKGGHAAYPHLAEDMVVAASTLVTQLQTIISRNTDPLDSAVITVGTITGGSAQNIIAETAHLEGTIRTLSEESMKQVKERIEDVVKGIEIGFRCKGKVTYPSVYHQVYNTSGLTEEFMSFVAEHQLATVIEAKEAMTGEDFGYMLKKYPGFMFWLGADSEHGLHHAKLNPDENAIETAVHVMTGYFSVYAN

SEQ ID NO: 23678 - protein, 74 aa, Arabidopsis thaliana
MPSNCEILCEIIIAILLPPLGVCFRKGCCTVEFLICLVLTILGYVPGIIYAIYVIVFQHREEYFDEYRRPIYSA

SEQ ID NO: 23679 - protein, 291 aa, Blumeria graminis
MPTDGIPPMLGQSSPLKLRKYEGRLSDDNFRNHVIAAIGEFLGTTLFLFYGFLAAQIINSKPDNLSDAPSLLQLIFVASAFGVSGAVNVWLFYRVSGGHLNPAITIGLTLIGAVPVTRALLLVSVQLLGGILAASLVLAVTPGSLNVQTALGNATSVKQGFFLEMILTATLVLTVFMLAVEKHRTTPLAPLGIGLILFLDVLLAAQFSGGSLNPARSFGPAVVELNFATYHWIYWFGPIAGAVLAAAIFKVLKFLAYETAVAGQDHDGLDVYRLIDDAGGHEVDREIQLEV

SEQ ID NO: 23680 - protein, 484 aa, Rubrobacter xylanophilus DSM 9941
MAHSGGVVIVSNRAPVTFSRSGSGERTHSRGAGGLVTALNAVSRRAEGAVWIASAASDEDVRVARESEGPCEVDDLRLVLVEHDAGAYDLMYNRLANPLLWFVQHGLYDLPYAPELGEETLRAWEEGYLPVNRSFARAAAEAISGAEEPVVLLHDYHLYMVPELLREEVGEGPLISFFVHIPWPEPDLWRVLPSYIREGALRSLLRSDIVAFHTRRYARNFMAAASEILGAEADPARGTLRRGGREVWVRSYPISIDPAEFEEVAESPEVRREEEYVRNLPGALLVRVDRTDLSKNIVRGFRAYGRMLELHPEMRGRVTFFAQLQPSRGDIPEYAAYAEAIRRSAEEVNEAHGTPSWRPVELSMQDNFPRSVAAYKNYDALLVNAVRDGMNLVAKEAAVVNRRDGALILSENAGAHEELGEHALTVNPFDLDDQAAAIHRALTMPPEERARRARALRETVLSNTIEDWAAAQMRDIAARRAASS

SEQ ID NO: 23681 - protein, 261 aa, Rubrobacter xylanophilus DSM 9941
MGKAPAELLRGLREDPGASAILTDIDGTLAPIAPTPDAARVPEEVRELLERLSRRYLLVAGISGRKTEEARKLIGLGGVVYFGNHGFEKLEGDRVEIIPEALPYLERVRELERRAREELGPLGAFVEEKGITASVHYRNVPGEVGERCVELVRREGERLGLRVTVGRGVVEARPPVRADKGTAVRALVEEYRPRRALFMGDDTTDLDAFRELERLRGEGLLEEALRVGVASEEGPREIVAEADLVVEGVEGVAEVLRELAR

SEQ ID NO: 23682 - protein, 346 aa, Gloeobacter violaceus PCC 7421
MVRTLIDIRSLTIDPNCWYAVAQSAELKTEPRSITLWGEAIALFRGADGVAHAVEDRCPHRQVKLSHGRVVEGSLECAYHGWRFDGDGRCTHVPYREGSLPGCRLRTYPVREHDGFVWLFAGDPGRAHAVEPLRLPEWDHLNYIASVAPIACAAHYSYLIENLMDMHHGHLHERFQAWGAAHLEKLEEHPGRIDALYEAQSYYRIDRIWSVAQLFVPALRRAHPEALAVSYVYPHWRARLGEDFRLYCLLCPEGERSTRAYLVHFTSLEAFPDLHKLPVPFRRFVKDRCFGSAQGMLAGLIRQDVQMIEEEQRAYDRDPQRRNWEVNRSIAAVQRLWRQQKKADVS

SEQ ID NO: 23683 - protein, 472 aa, Arabidopsis thaliana
MAATLTGSGIALGFSSSAKFSKRASSSSNRRCIKMSVSVEEKTKKFTLQKSEEAFNAAKNLMPGGVNSPVRAFKSVGGQPVVMDSAKGSRIRDIDGNEYIDYVGSWGPAIIGHADDEVLAALAETMKKGTSFGAPCLLENVLAEMVISAVPSIEMVRFVNSGTEACMGVLRLARAFTGKQKFIKFEGCYHGHAKSFLVKAGSGVATLGLPDSPGVPKAATSDTLTAPYNDIAAVEKLFEANKGEIAAIILEPVVGNSGFITPKPEFIEGIRRITKDNGALLILDEVMTGFRLAYGGAQEYFGITPDLTTLGKIIGGGLPVGAYGGRRDIMEMVAPAGPMYQAGTLSGNPLAMTAGIHTLKRLSQPGTYEYLDKITKELTNGILEAGKKTGHAMCGGYISGMFGFFFTEGPVYDFSDAKKSDTEKFGKFFRGMLEEGVYLAPSQFEAGFTSLAHTSEDIQFTIAAAEKVLSRL

SEQ ID NO: 23684 - protein, 504 aa, Bifidobacterium adolescentis
  misc_feature (356)..(356): Xaa can be any naturally occurring amino acid
  unsure (1)..(504): unsure at all Xaa locations
MKNKVQLITYADRLGDGTIKSMTDILRTRFDGVYDGVHILPFFTPFDGADAGFDPIDHTKVDERLGSWDDVAELSKTHNIMVDAIVNHMSWESKQFQDVLAKGEESEYYPMFLTMSSVFPNGATEEDLAGIYRPRPGLPFTHYKFAGKTRLVWVSFTPQQVDIDTDSDKGWEYLMSIFDQMAASHVSYIRLDAVGYGAKEAGTSCFMTPKTFKLISRLREEGVKRGLEILIEVHSYYKKQVEIASKVDRVYDFALPPLLLHALSTGHVEPVAHWTDIRPNNAVTVLDTHDGIGVIDIGSDQLDRSLKGLVPDEDVDNLVNTIHANTHGESQAATGAAASNLDLYQVNSTYYSALGXNDQHYIAARAVQFFLPGVPQVYYVGALAGKNDMELLRKTNNGRDINRHYYSTAEIDENLKRPVVKALNALAKFRNELDAFDGTFSYTTDDDTSISFTWRGETSQATLTFEPKRGLGVDNTTPVAMLEWEDSAGDHRSDDLIANPPVVA

SEQ ID NO: 23685 - protein, 393 aa, Haloarcula marismortui ATCC 43049
MQAVVLAAGQGTRMRPLTDHTPKPMLPVADRPLVAHTADTAIQAGADELIFVVGYGAEAVRSYFGDEYGGVPVSFAVQEEQLGTADAVAAAKEHLEGPFAVLNGDNLYDAESLSGLFDAAPSVAAYRVDDPTSYGVLSTEGDTITGIVEKPDDPPTDLANAGAYVFPAEARDWLDVPLSDRGEREITDVLAKVIEESTVTAVAVDRWLDVGRPWELLEANEWKLGQLDRRLDGEVRGDADLRGEVVVEAGAVIEPGVVIEGPALVRSGAHVGPNAYIRGATLLGEDTHVGHGVELKNTVLMADSNVPHVSYVGDSVIGRDVNFGAGTQVANLRHDGDPVRMTVKGDRVSTGRRKFGVVAGDGAKTAINTSLNAGVVLSSGATTTPGESVTRDR

SEQ ID NO: 23686 - protein, 220 aa, Methanosarcina barkeri str. fusaro
MLKALIFDMDGVLVDSMPFHAVAWKKAFFDMGMEIQDQDIYSIEGSNPKNGLPLLIRKARKEPEAYDFETITSIYRKEFKRVFKLKAFDGMRECLEVLKTRFLLSVVSGSDHLIVHEIVDQLFPGIFDIVVTGDDVKNSKPYPDPFLKAVKLLNVQREECIVIENAILGVEAAKKAKIYCIGIPTYLKPSQLDRADLVVGDHEQLMQHLLSLEPSHGFKV

SEQ ID NO: 23687 - protein, 601 aa, Desulfitobacterium hafniense DCB-2
MNFDLRPRSISMKLWAAITALILAVLGGLGVTITLLFGDFYFQQTLDTLGKEVEEISHYLGEQPNWSQRLFAIDEIRLSSDTQMVVIDRYSEIIAIKGGNVAASFGTNDRIGWGDVSGEMSWLIRSLYPSDFLSRTDIAEVLAGKVITIKAIPRNKTGQAMLIAAAPLGNPSEAIVVLGTSPAPVQDSINAFRRMTLYVSLAAVVLATLVSLVFARQVTRPLALMQKGASQMANGDFQPITGVRSRDELGELADVLNSMGESLKNHMTWLSEERNLLLGIVEGISDGVIMLDGEGEILYTNEPAKALWQGSGSEEESSERKETLMAFLRESMEGVEIDKKIHFNLDTQVLQVAMATTQFEDGKQGYVAVLRDITASLRAEKERRDFMASVTHELRTPLHLIQGYLEAIQDGVIAKEEQTEHIDLVLEEAKRLAKLVMELQELDRFESWKNFEKKEIDLAGFIQELGYRFQGRADELGIHLQMDNGKGVIHANRDRLLQVFINLIENAFRHTPEGKSVYIRIIDSEEHIQFNVEDQGEGIPPQALPHIFDRFYRVDKSRSRKEGGMGLGLSIVMLIVEAHNGEIKVESEVGKGTTFKVILPK

SEQ ID NO: 23688 - protein, 503 aa, Bacillus licheniformis ATCC 14580
MNVTIQKFDPYINVDPGTMSPYQHGEVFVTDDGAETDLDLGHYERFIDINLNKYSNVTTGKIYSTVLKKERRGDYLGGTVQVIPHITNEIKDRVFRAGKETHADVVITEIGGTVGDIESLPFLEAIRQIKSDVGRDNVMYIHCTLVPYLKAAGEMKTKPTQHSVKELRSLGIQPNVIVVRTEMPISQDMKDKIALFCDIDPKAVIEAGDADTLYSIPLDLQKQGLDSLVCSHLKLDCREADMEEWKELVKKVKNLSKTVTIALVGKYVELPDAYISVVESLRHAGYAFDADIQVKWINAEEVTEDNVADLVQNADGILVPGGFGDRGVEGKITTVKYAREQKIPFFGICLGMQVASIEYARNVLGLEGAHSAEIDPSTPYPIIDLLPEQKDIEDLGGTLRLGLYPCKLQEGSKAYQAYENEVVYERHRHRYEFNNEFRQQMEEAGFVFSGTSPDGRLVEIIELKDHPWFVASQFHPEFTSRPTRPQALFRDFVHASLKTSEKL

SEQ ID NO: 23689 - protein, 1206 aa, Magnaporthe grisea 70-15
MQCSACIPTTHCSGANLRGITSITGMLPLRFICQSYGFRSIERHSTVACNAVPVPSHQQETGSENLLAWITLEPQGSAYPWDQNQGSEGVASCSSALRRRQSVAQKLEQREQKFLRTVEAVNGRSPPQPHLAQGRANRIPAILTSSPLRELLLLLPSLERWEVLSIKQLLFNPHWCCQPVLDSLPTMSQDAASAPSDLGAQTQQPHQAGNGGTNSSHGTDNIAKRALKLGTSTSLSPELPPTGLQEEVPVTPGITTAAYHDFEFDNGESGGGPGYFSRRGQNMMTTPVGKGVEDDGLGPSASSSAPDPEVLKRINQFRLGGRKESLTNIRAMNPDLSLSGNIISATFNIPYSLEYRKGADWVLNPRRGQSALFDSLSHLSSDNTPWNHTVVAWTGEIEPPSDLPSPPATPPATTTNLPALNSLSKPIPVNGEAPAPAPSHAEGLWIPREDQLRLESQLSHNAKIKTSAVWLSDSNEATEEGITLKDQARWRRFAEHELYNLFHYKQHEPNDGRKERVQWADYYRMNQKFANKIIENYKPGDIVIIHDFYLMLLPSMLRQRAPHIYIAFFLHSPFPSSEFFRCLPRRKEVLEGVLGSNMIGFQSYSYSRHFSSCCTRILGYKSDARGVNVYGSRVEVGVFPIGIDAKKVEQLAWSDSVNKLVQQLQTQTTQGRKLIVGRDRLDSVHGVAQKLKAFERFLENYPEWRDKVVLIQVTSPTSIEEEKDESKVSTLVNELVLKINGMYGGLGFEPVRHFSQYIGQDEYFALLRGADIGLITSVRDGMNTTSMEYVVCQRDSHGPLILSEFSGTAGSLTDAIHINPWDFSAVADEINRALTMPPHKRQEMQTKLYEHVTTKTVHEWIGGVVAKLIQVLGSGQNPVKTPLLDRSALLRSYRAAGKRLFMFDYDGTLTPIVREPSAAVPTERLLQTIKALAADDRNAVWVISGRDQDFLSAHLGHIQNLGFSAEHGSFMKKPGSDEWENLADKFDMGWQEEVIAVFQKFTDKVEGPFIERKRCAVTWHYRPVVDQDLAQRLARECHKELEATVARKWEVEVMPGKMNLEVRPTFINKGAIAKRLVLDYNAELVAAGKNKLEFVLCMGDDFTDEDMFRSLNTLSVTADGATEPELKTEHVFSTTVGPSTKVTIARWHLLEPEDVVECVALLASGVSTELLANQGEGVAETVKPLRVSENNLAAISEVEGRVPDIE

SEQ ID NO: 23690 - protein, 489 aa, Bacillus cereus ATCC 10987
MPQDRKAEVQKHAYERKEIMPDNSQSLPRHMQKELPHEFSVNPLFAREGESVVPRFHISDEGMLPETAYQIVHDEITLDGNARLNLATFVSTWMEPAAEQLYAKSFDKNMIDKDEYPQTAEIEERCVRILANLWHSPSPLTTMGVSTTGSSEACMLGGLALKRRWQNARKSEGKPLDRPNIVFSSAVQVVWEKFANYWEVEPRYVKVSPEHPQLDPQGVLAAVDENTIGVVPILGETYTGLYEPVAEIAKALDDLQARTGLDIPMHVDAASGGFIAPFLQPDLVWDFQLPRVKSINVSGHKYGLVYPGLGWIIWREAEDLPEDLIFRVSYLGGNMPTFALNFSRPGAQVLLQYYNYLRLGKSGYYDIQRASQKVALFLSKAIQKMEPFELLSDGSDIPVFAWRLKEGYTSNWNLYDLSRQLRVFGWQVPAYPLPPDMESVTIMRVVVRNGFSMDLAHLFLRNLKQTVAFLDSLDGPMPHDTKCNNGFHH

SEQ ID NO: 23691 - protein, 503 aa, Ralstonia eutropha JMP134
MGQRVPAHVRHGLYTQVMSMFSLKDPGLLRQQAYVDGQWRAAESGKTLDVINPANNEPLGTIPACDAADTRAAIEAANRALPAWSALTTHQRAAVLRKWRELMVAHADDLALIMTLEQGKPLAEARGEILYGASFVEWFAEEGIRAYGETIPATHASRRIIARKVPVGVCAAITPWNFPNAMITRKLAPALAAGCAVVVKPSELTPYSALALAELGERAGIPAGVLNIVTGMPQGIGGELTANPIVRKLTFTGSTQVGKLLLRQCADTVKRVSMELGGNAPVIVFDDADLEQAVAGVMASKFRNSGQTCVCANRIYVQAGIYDRFSARLSEEVRKLKVGAGTEDGVSIGPLINDAALRKVVRHVEDAVAHGAKVIVGGASLSRGQQYFEPTVVTGATDGMLIASEETFGPVAALFPFESETEIIRRANDTPYGLAAYLFSTDVNRVFRVSEALEYGMVGANTGVISSAVAPFGGVKESGLGREGSHHGIDEFLEVQTLHLEIV

SEQ ID NO: 23692 - protein, 202 aa, Ustilago maydis 521
MWRRRWSVTELVLFTLLLISTIYHLHSRTLRSHPSPPLNSTCPSSTALFKMATEQTYIMIKPDGVQRGIVGEIIKRFENRGYKIAALKMVHASEEHLEKHYKDLKGKKFFPGLIKYMASGPVVCIVFEGKDAVKTGRVLLGATNPLDSAPGTIRGDFAIDVGRNVCHGSDSVESAKAEIALWFGEQNPTIQYTRAVDSWIYE

SEQ ID NO: 23693 - protein, 155 aa, Triticum aestivum
  misc_feature (2)..(4): Xaa can be any naturally occurring amino acid
  misc_feature (72)..(72): Xaa can be any naturally occurring amino acid
  misc_feature (123)..(123): Xaa can be any naturally occurring amino acid
  unsure (1)..(155): unsure at all Xaa locations
VXXXVPYDPLALRKAFEKAVVKRLMTDVPFGVLLSGGLDSSLVAAVTVRHLAGTKAAKRWGTKLHSFCVGLXGMELGTMHHEFTFTVQDGIDAIEDVIYHTETYDVTTIRASTPMFLMSRTTXQVISGEGSDEIFGGYLYFHKAPNKEELHREPR

SEQ ID NO: 23694 - protein, 364 aa, Kalanchoe blossfeldiana
SDSGKDAGRLSAAWQLYKAQEDLVKVAKEFGVKLTMFHGRGGTVGRGGGPTHLAILSQPPDTIHGSLRVTVQGEVIEQSFGEEHLCFRTLQRYTAATLEHSMCPPASPEPEWRELLDEMAVAATEEYRTIVFHEPRFVEYSASATPELEYGRMNIGSRPSKRKPSGGIESLRAIPWIFAWTQTRFHLPVWLGFGAAFKHVIDKDIKNLLMLQEMYNRWPFFRVTIDLVEMVFAKGDPGIAALYDKLLVSEDLWPFGEQLRNNYNETKNLLLQVAGHKDLLEGNPYLRQRLRLRDSYITTLNACQAYTLKRIREPNYHVTVRPRLSKEIMESNKAASELVKLNPTSEYAPGLEDTLILTMKGIAA

SEQ ID NO: 23695 - protein, 365 aa, Kalanchoe blossfeldiana
SDSGKDAGRLSAAWHLYKAEEELIEVAKQHGVKLTMFHGRGGTVGRGGGPTHLAILSQPADTIQGSLRVTIQGEVIERSFGEAQLCFKTLQRYTAATLEHGMIPPSSPKQECRACLMDEMAVVTTERYRSIVFREPRFVEYFRLATPELEYGRMNIGSRPSKRKPSGGIESLRAIPWIFAWTQTRFHLPVWLGFGEAFRHVIDKDNKNLLMLQQMYNEWPFFRVTIDLVEMVFAKGDPGIAALYDKLLSEELWPLGEQLRTAYNDTKSYLLKITGHNEILEGDPFLKQRLKVRTAYITTLNVCQAYTLKRIRDPSYQVPVRPPIAKEIMEGSVSSANQLVKLNPTSEYAPGLEDTLILTMKGIAA

SEQ ID NO: 23696 - protein, 450 aa, Zea mays
MREIISIHIGQAGIQVGNACWELYCLEHGIEPDGTMPSDTSVGVAHDAFNTFFSETGSGKHVPRAIFVDLEPTVIDEVRTGSYRQLFHPEQLISGKEDAANNFARGHYTVGKEIVDLCLDRVRKLADNCTGLQGFLVFNAVGGGTGSGLGSLLLERLSVDYGKKSKLGFTIYPSPQVSTAVVEPYNSVLSTHSLLEHTDVAVLLDNEAIYDICRRSLDIERPTYTNLNRLISQIISSLTTSLRFDGAINVDVTEFQTNLVPYPRIHFMLSSYAPVISAEKAYHEQLSVPEITNAVFEPSSMMAKCDPRHGKYMACCLMYRGDVVPKDVNAAVATIKTKRTVQFVDWCPTGFKCGINYQPPSVVPGGDLAKVQRAVCMISNNTAVAEVFSRIDHKFDLMYAKRAFVHWYVGEGMEEGEFSEAREDLAALEKDYEEVGAEGADDEGDEGDDY

SEQ ID NO: 23697 - protein, 503 aa, Photorhabdus luminescens subsp. laumondii TTO1
MALYAGIDCGTQSTKVIIVDSQKTPILGEGSSPHPIISDSNGRREQQVHWWTEALESAFSQAIEQAGISGTEIAALAVSGQQHGFVPLDAEGHVLAPVKLWCDTETAAENQEIIDALGGTQATLAQLGLMPQTGYTASKILWFKKYRPELWEKLNAVLLPHDYLNYWLTGRLVAEYGDASGTGLLNIRKREWDNQIAQFIDPDGRLWNALPELVSAETCIGTVRPEIARRLGLSPTTKVASGGGDNMMAAIGTGNIIPGITTMSLGTSGTLFTYSDKPIVADSEMIAGFCSSNNGWLPLICTMNVTSATTTIQKLFNMDIQTFNDTLNQSKPGANGLMMLPFFNGERVPPLPHAKASLHNLNTSNMNQQNFILAAVESATYGLRFGIELFRKQGIEINEIRLTGGGARSKKWRQIVADVMNTPVICVTNQEAAALGAAIQAMWCDSLTEEKDKQMQLAHFCQHFVHLDEETRTIPTPETAALYDVFYQDYLSLLTTEYPEVKI

SEQ ID NO: 23698 - protein, 365 aa, Kalanchoe blossfeldiana
SDSGKDAGRLSAAWQLYKAQEELIEVAKQHGVKLTMFHGRGGTVGRGGGPTHLAILSQPADTIQGSLRVTIQGEVIERSFGEAQLCFKTLQRYTAATLEHGMIPPSSPKQEWRACLMDEMAVVTTERYRSIVFREPRFVEYFRLATPELEYGRMNIGSRPSKRKPSGGIESLRAIPWIFAWTQTRFHLPVWLGFGEAFRHVIDKDNKNLLMLQQMYNEWPFFRATIDLVEMVFAKGDPGIAALYDKLLSEELWPLGEQLRTAYNDTKSYLLKITGHNEILEGDPFLKQRLKVRTAYITTLNVCQAYTLKRIRDPSYQVPVRPPIAKEIMEGSVSSANQLVKLNPTSEYAPGLEDTLILTMKGIAA

SEQ ID NO: 23699 - protein, 342 aa, Photorhabdus luminescens subsp. laumondii TTO1
MKALVLEKAGQISIQDWETPEILGENDVEIKIHSVGICGSDVHYYQYGRIGPFIVEKPMILGHEASGVITAVGKNVTHLKIGDRVCMEPGIPNLQSPQSRAGIYNLDPEVRFWATPPIDGCLRERVIHPAAFTFKLPDNVSFAEGAMVEPLAIGMQAATKAEIKPGDIALVIGAGTIGIVTALAALAGGCSDVIICDVFDEKLEIAKQYPGLHPVNSKVLTEKVNALTEGNGVNILFECSGAKPVIATISEHIAPGGIAVLVGMPIDPAPFDVVSAQAKEITFKTIFRYANMYPRTIRLLSSGKLKVTPLLSATYKFKDSVQAYERAAEGRPTDIKIMLEME

SEQ ID NO: 23700 - protein, 133 aa, Fibrobacter succinogenes
GICLGMQMLAIEFARNVLGLKVANSTEFDENTTPRFIRDLEEQKDGHDKGGTMRLGLYPCKLAKDSNAANVYKREKITERHRHRYEFNYNSEFRKELEKAGLKIAGTSPDGKLVEMVELKNHPYFEACQFHPE

SEQ ID NO: 23701 - protein, 364 aa, Kalanchoe blossfeldiana
SDSGKDAGRLSAAWQLYKAQEDLVKVAKEFGVKLTMFHGRGGTVGRGGGPTHLAILSQPPDTIHGSLRVTVQGEVIEQSFGEEHLCFRTLQRYTAATLEHSMCPPASPEPEWRELLDEMAVAATEEYRTIVFHEPRFVEYSASATPELEYGRMNVGSRPSKRKPSGGIESLRAIPWIFAWTQTRFHLPVWLGFGAAFKHVIDKDIKNLLMLQEMYNRWPFFRVTIDLVEMVLAKGDPGIAALYDKLLVSEDLWPFGEQLRNNYNETKNLLLQVAGHKDLLEGNPYLRQRLRLRDSYITTLNGCQAYTLKRIRDPNYHVTVRPRLSKEIMESNKAAAELVKLNPTSEYAPGLEDTLILTMKGIAA

SEQ ID NO: 23702 - protein, 468 aa, Photorhabdus luminescens subsp. laumondii TTO1
MAENIHTSLSTKTGETQLQRNLSNRHIQLIAIGGAIGTGLFMGSGKTISLAGPSIIFVYMIIGFMLFFVMRAMGELLLSNLNYKSFSDFSADLLGPWAGFFVGWTYWFCWVITGIADVVAITSYISYWQPDFPQWITSLLCVSLLLSLNLATVKLFGEMEFWFAMIKIVAIIALIATGAVLIGMHFQSPAGHTASLANIWNDGGFFPKGLSGFFAGFQIAIFAFVGIELVGTAAAETKDPMKSLPRAINAIPIRIITFYVLALIIIMSVTPWRSIIADKSPFVELFVLIGLPAAASIVNFVVLTSAASSANSGVFSTSRMLFGLAKEGDAPQQFSRLSRRSVPASGLIFTCLCLSCGVVLIYLIPDVMHVFTLVTTVSAILFMFIWSMILCSYLVYRKRRPALHKASTYKMPLGIIMSWVCLTFFAFVLILLTLRDDTRQALIITPVWFLILIIGFQIVKKRRTRLYS

SEQ ID NO: 23703 - protein, 531 aa, Sulfolobus tokodaii
MTKYIIITGGVLSSVGKGTVAASIGLLLKNRGYKITMVKVDPYLNVDAGTMNPYMHGEVFVTDDGAETDLDLGHYERFVGINMYSYNNITAGKVYFEVIKNERQGKYLGQTVQIIPHVTDQIKSMIRYASNMANADITIVEIGGTVGDIEGLPFLEAVRQLKLEEEEGNVVFVHVALVEFLKVTEEIKTKPLQHSVQELRRIGIQPDIIVARSVVPLDEETKKKIALFTNVKPEYIFSNYDVNMTYEVPLILEKQGLASKILSKLNLPDNQPNLSEWIRFIDNLKTADKEVKIALVGKYTKLKDSYISIKEAIYHAAAKLHIKPVLVWIESTDIENSKEAIDKLKSVDGIIVLPGFGSRGVEGKILAIKYARENNVPFLGICYGMQLAVVEFARNVLGLEKAHTTEVDPNTPHPVITLLDEQKKVVQIGGTMRLGSQKVIVKEGTLAYRIYGNIEVYERHRHRYEVNPEYVDLLQKGGLVISGVSENGLVEMIELKNHKFFLGLQGHPEYKSRPLAPSPVFIGFLRAAAGV

SEQ ID NO: 23704 - protein, 394 aa, GIBBERELLA ZEAE PH-1
MSAHRPNAFNSLRMGEVIREKVQDGITGETRDLQYTQCKIVGNGSFGVVFQTKLSPSGEDAAIKRVLQDKRFKNRELQIMRIVRHPNIVQLKAFYYSNGERKDEVYLNLVQEFVPETVYRASRFFNKMKTTMPILEVKLYIYQLFRALAYIHSQGICHRDIKPQNLLLDPNSGILKLCDFGSAKILVPNEPNVSYICSRYYRAPELIFGATNYTTKIDVWSTGCVMAELMLGQPLFPGESGIDQLVEIIKVLGTPTREQIRTMNPNYMEHKFPQIKPHPFNKVFRKADANAIDLIARLLEYTPTERQSAIDAMVHPFFDELRDPNTKLPDSRHGTGQLRDLPALFDFTRHELSIAPSLNPKLVPAHIRPVLASQGLDIDHFTPLTEQEMMAKLD

SEQ ID NO: 23705 - protein, 1037 aa, Saccharomyces cerevisiae
MTVANTETHSAAKPSSTIGPWKLGETLGFGSTGKVQLAQHERTGHRTAVKVISKSIFNNNGNHSNDDSVLPYNIEREIVIMKLLSHPNVLSLYDVWETNNNLYLILEYAEKGELFNLLVDHGPLPEREAINCFRQIIIGISYCHALGIVHRDLKPENLLLDSFYNIKIADFGMAALQTDADLLETSCGSPHYAAPEIVSGLPYEGFASDVWSCGVILFALLTGRLPFDEENGNVRDLLLKVQKGQFEMPNDTEISRDAQDLIGKILVVDPRQRIKIRDILSHPLLKKYQTIKDSKSIKDLPRENTYLYPLADSNNHTSASIDDSILQNLVVLWHGRHADDIVSKLKENGTNKEKILYALLYRFKLDSVRGSNKKNRNKIKKTKKNKRSSTLSSSSSLLLNNRSIQSTPRRRTSKRHSREFSSSRKRSSFLLSSNPTDSSPIPLRSSKRITHINVASANTQATPSGVPNPHKRNSKKRSSKRLSYMPNTKRSSLTSKSLSNFTNLIDDDDWEYIEKDAKRTSSNFATLIDEIFEPEKFELAKREKAELQRKVQEAKRQSVNAQKINEDEFGSEVSDGMKELKKINDKVSSPLINYEFSQQELLQDIDTLLTNRYQLSSYTRPISRLDPGLTPVTETLPNNLKEKTALLQDTEKKIIETIRRSKFLGSLLNVRGGLSPGKSELAPIEESPIVSTTPLIYNDRMEPRRISDVEVPHFTRKSKHFTTANNRRSVLSLYAKDSIKDLNEFLIKEDPDLPPQGSTDNESRSEDPEIAESITDSRNIQYDEDDSKDGDNVNNDNILSDFPQGVGISQEYDMKDKNPNQSPISKSAEPTLVVKLPSLSSFQGKNASGLGLYQREPSKVTLPSLTSNNSSVGENIEDGAEKGTESEKIAASLSDDDLKEDNDKKDNDTVNAPTTVKKPPNSVLLKKFSKGKILELEIHAKIPEKRLYEGLHKLLEGWKQYGLKNLVFNITNMIITGKLVNDSILFLRSTLFEIMVLPNGDGRSLIKFNKKTGSTKTLTKLATEIQIILQKEGVLDK

SEQ ID NO: 23706 - protein, 204 aa, Pichia pastoris
MASRGTSRQQYDLTMKLLLVGDSGVGKSCLLLRFVDDSFNPSFITTIGIDFKIRTVEINGKKVKLQIWDTAGQERFRTITTAYYRGAMGIILVYDVTDERSFNSVHNWYQTLNQHANEDAQLFLVGNKCDDEESRQVTKEQGEQLASELGVPFLEASAKSNKNVDAIFLELAKRFEEKMRNTQQGPGSAGIDVNSSNDTKSSCC

SEQ ID NO: 23707 - protein, 217 aa, Oryza sativa
  misc_feature (109)..(109): Xaa can be any naturally occurring amino acid
  misc_feature (117)..(117): Xaa can be any naturally occurring amino acid
  unsure (1)..(217): unsure at all Xaa locations
AACHDAQRGRRAAEPNLVVSLGEMLIDFVPDVAGVSLAESGGFLKAPGGAPANVACAISKLGGSSAFVGKFGDDEFGHMLVDILKKNGVNAEGCLYYEHARTVLAFVTXLKASVERXFMFYRNPIAIVLVTVAFLNLFLLSLPSVPFFFFFICIHGPGLFFLFLCARVVYYFLGSFFPGTSSCCPFLFLFFCLCIVVFIILFPFFFLLLVRGGSFVC

SEQ ID NO: 23708 - protein, 396 aa, Escherichia coli
MFENITAAPADPILGLADLFRADERPGKINLGIGVYKDETGKTPVLTSVKKAEQYLLENETTKNYLGIDGIPEFGRCTQELLFGKGSALINDKRARTAQTPGGTGALRVAADFLAKNTSVKRVWVSNPSWPNHKSVFNSAGLEVREYAYYDAENHTLDFDALINSLNEAQAGDVVLFHGCCHAPTGIDPTLEQWQTLAQLSVEKGWLPLFDFAYQGFARGLEEDAEGLRAFAAMHKELIVASSYSKNFGLYNERVGACTLVAADSETVDRAFSQMKAAIRANYSNPPAHGASVVATILSNDALRAIWEQELTDMRQRIQRMRQLFVNTLQEKGANRDFSFIIKQNGMFSFSGLTKEQVLRLREEFGVYAVASGLVNVAGMTPDNMAPLCEAIVAVL

SEQ ID NO: 23709 - protein, 588 aa, Geobacillus stearothermophilus [sequence omitted]

SEQ ID NO: 23710 - protein, 585 aa, Bacillus subtilis subsp. subtilis str. 168
METFKRLKMYYWPYRKVFMWSLLAMLLMTAITVVYPIILQITIDEIVLGRQYQLAAWVSLGFIAVMVLKGMATFFHQYLGDMFGIKSVYRLRNGLYEKLQRLSFSYYDNAKTGDLMSRLTADVEGLRFFLSYGLAELIRFGLLVAISLSVMFYYSVPLTLVTIAVLPFLAVAVYRFDKRVHPAFRGIRKSFAKLNTKVQENISGINTVKSLSREDFQISTFNKANAEYRAQYLQTSSIWSAYFPLMEFIGNTCIVALLSYGGYLVMQNQLNPGELVAFFSLVNYMMWPIMNLGFVINMFSQAKASGERLLDILEKEEDITDHPHALHKQKLTGDVHFKNVSLAYGKEQTNALCNVSFEANSGKVIGLLGPTGSGKSSVTQLLTRFYSPVGGMITIDHKPITDYSLKTLRSNIGVVLQESFLFSSTIRSNISYGRPDASMEDVIEAAKRAQAHNFIMELPDGYDTMLGERGMGLSGGQKQRIAIARAICLNPSILILDDATSAVDMQTEHSIQLALKEVMKNRTTFIVAHRISSLKHADEILVFNKGRIRERGTHHELLEKGGYYKKIYDLQYRDVKMINEPHEVG

SEQ ID NO: 23711 - protein, 472 aa, Klebsiella oxytoca
MTTLSHDSTTMPRTQRDTRRMNQFVSIAAAVAGLLFGLDIGVIAGALPFITDHFVLSSRLQEWVVSSMMLGAAIGALFNGWLSFRLGRKYSLMVGAVLFVAGSVGSAFATSVEMLLVARIVLGVAVGIASYTAPLYLSEMASENVRGKMISMYQLMVTLGIVMAFLSDTAFSYSGNWRAMLGVLALPAVVLIILVIFLPNSPRWLAEKGRHVEAEEVLRMLRDTSEKARDELNEIRESLKLKQGGWALFKVNRNVRRAVFLGMLLQAMQQFTGMNIIMYYAPRIFKMAGFTTTEQQMVATLVVGLTFMFATFIAVFTVDKAGRKPALKIGFSVMAIGTLVLGYCLMQFDNGTASSGLSWLSVGMTMMCIAGYAMSAAPVVWILCSEIQPLKCRDFGITCSTTTNWVSNMIIGATFLTLLDAIGAAGTFWLYTALNVAFIGVTFWLIPETKNVTLEHIERRLMSGEKLRNIGN

SEQ ID NO: 23712 - protein, 166 aa, Vanilla planifolia
GNPCNTNALICLKNAPNIPAKNFHALTRLDENRAKCQLALKAGVFYDKVSNVTIWGNHSTTQVPDFLNAKINGIPVKEVITDRKWLEQEFTERVQKRGGVLIQKWGRSSAASTAVSIVDAIRSLVTPTANDDWFSSGVYTNGNPYGIAEDIVFSMPCRSKGDGDYE

SEQ ID NO: 23713 - protein, 457 aa, Lactococcus lactis subsp. lactis Il1403
MYTVGDYLLDRLHELGIEEIFGVPGDYNLQFLDQIISRKDMKWVGNANELNASYMADGYARTKKAAAFLTTFGVGELSAVNGLAGSYAENLPVVEIVGSPTSKVQNEGKFVHHTLADGDFKHFMKMHEPVTAARTLLTAENATVEIDRVLSALLKERKPVYINLPVDVAAAKAEKPSLPLKKENPTSNTSDQEILNKIQESLKNAKKPIVITGHEIISFGLEKTVTQFISKTKLPITTLNFGKSSVDETLPSFLGIYNGKLSEPNLKEFVESADFILMLGVKLTDSSTGAFTHHLNENKMISLNINEGKIFNERIQNFDFESLISSLLDLSGIEYKGKYIDKKQEDFVPSNALLSQDRLWQAVENLTQSNETIVAEQGTSFFGASSIFLKPKSHFIGQPLWGSIGYTFPAALGSQIADKESRHLLFIGDGSLQLTVQERKLQVQVSQPSSSHMNSYS

SEQ ID NO: 23714 - protein, 396 aa, Escherichia coli
MFENITAAPADPILGLADLFRADERPGKINLGIGVYKDETGKTPVLTSVKKAEQYLLENETTKNYLGIDGIPEFGRCTQELLFGKGSALINDKRARTAQTPGGTGALRVAADFLAKNTSVKRVWVSNPSWPNHKSVFNSAGLEVREYAYYDAENHTLDFDALINSLNEAQAGDVVLFHGCCHAPTGIDPTLEQWQTLAQLSVEKGWLPLFDFAYQGFARGLEEDAEGLRAFAAMHKELIVASSYSKNFGLYNERVGACTLVAADSETVDRAFSQMKAAILANYSNPPAHGASVVATILSNDALRAIWEQELTDMRQRIQRMRQLFVNTLQEKGANRDFSFIIKQNGMFSFSGLTKEQVLRLREEFGVYAVASGLVNVAGMTPDNMAPLCEAIVAVL

SEQ ID NO: 23715 - protein, 305 aa, Pichia pastoris
SFIDRLKHPKLDIEQEKQYRRMVRKGLTAERGVHEPRSLNDVEIWKLFKDITNGVQQLHSSHILHRDLKPSNCLLKYRYEKEVTQLDEYNDIPKVMVSDFGEGTFDNIERSSSGYTGTLEFTAPEVFGSNYSRASDVYSLGLILYFLCFGDLPYKTQDIKREIQQYAKGESDLFTEIDVIRNDISKDWVKLILECCSLDADKRPSASEILANLNTIYLQLEAKQQNKEHPEPEAYGIHPPDSFNYPKFLAVIVNVLLLKVQQNTFKMVTCFIIGLSFHVTTKNMIMLSVLNALFSVLSIVYLNSN

SEQ ID NO: 23716 - protein, 430 aa, Mangifera indica
MEKAINRQQVLLQHLRPSNSSSHNYESALAASVCAAGDSAAYHRASVYGDDVVIVAAHRTALCKSKRGGFKDTYPDDLLAPVLKALIEKTNLDPSEVGDIVVGTVLAAGSQRASECRMAAFYAGFPDTVPLRTVNRQCSSGLQAVADVAAAIKAGFYDIGIGAGLESMTANPMAWEGSVNPKVKEFEQARNCLLPMGITSENVAHRFGVTRQEQDQAAVESHRKAAAATAAGKFKDEIIPVATKIVDPKTGDEKPVTITVDDGIRPNASLSDLAKLKPVFKKDGSTTAGNSSQVSDGAGAVLLMKRSVAMRKGLPILGVFRTFAAVGVDPAIMGVGPAVAIPAAVKAAGLELDDIDLFEINEAFASQFVYCRNKLGLDPEKINVNGGAMAIGHPLGATGARCVATLLHEMKRRGRDCRFGVISMCIAPRA

SEQ ID NO: 23717 - protein, 562 aa, SYNECHOCOCCUS SP. WH 8102
MAKLLSFSDESRSALERGVDALADAVRVTIGPRGRNVVLEKKFGAPDIVNDGDTIAREIELDDPFENLGAKLIQQVASRTKDKAGDGTTTATVLAQAMVREGLRNTAAGASPVELRRGMEKAVAQVVDGLQQRSQPVAGDAIRQVATVSSGGDDEVGRMIAEAMDRVSADGVITVEESKSLATELEVTEGMAFDRGYSSPYFVTDADRQICEFENPLILLTDRKISAIADLVPVLEAVQKSGSPLLVLAEEVDGEALATLVVNRNRGVLQVAAVRAPSFGERRKAALADIAILTGGTLISEDRALTLDKVQLSDLGKARRVTISKENTTIVATDDHRAAVADRVAAIKRELDATDSDYDREKLNERIAKLAGGVAVIKVGAPTETELKNRKLRIEDALNATRAAIEEGIVPGGGTTLLQLADGLNGLVEQLEGDQRTGVEILQRALVAPVHHIATNAGHNGDVVIEAMRNSGQGFNALTGTYEDLMAAGIVDAAKVVRLAVQDAVSIASLLITTEVVIADKPEPEAPPVDGGGDPMGGMGGMGGMGMPGMGGMGGMGMPGMM

SEQ ID NO: 23718 - protein, 155 aa, Brassica napus
MATPQIYRKTLLPVLLLLAAAALYPAAADGDEVLALTESTFEKEVGQDRGALVEFYAPWCGHCKKLAPEYEKLAASFKKAKSVLIAKVDCDEHKSVCSKYGVSGYPTIQWFPKGSLEPKKYEGQRTAEALTEYVNSEAATNVKIAAVPSSVVVLT

SEQ ID NO: 23719 - protein, 143 aa, Desulfitobacterium hafniense DCB-2
MALIPNDPFRMFNHYWDEMERNYLRGRGKEELSQFLYRVDVEETADQVFVTAEIPGLEKREDLHIEVDEKLLTISGEIKRAASTSERSSHHTERYYGKFSRTLTLPAVVKADGSHASYKNGILELSFLKDRHPAARTIEVDFH

SEQ ID NO: 23720 - protein, 608 aa, Haloarcula marismortui ATCC 43049
MYEHDVIVVGAGGAGLRAAIAANEEGADVALVTKLHPVRSHTGAAEGGINAALQEGDSWDLHAYDTMKGSDYLGDAPAIDTFAKDAPEEVIQLEHWGMPFSREDDGRVSQRPFGGLSYPRTTYAGAETGHHLLHTMYEQAVKRGIEVYDEWYVTQLAVTDHDDPEDRVCHGCVAYDIKSGEVQGFRANNGVILATGGLGQAFDHTTNAVANTGDGCAMAYRAGVPMEDMEMIQFHPTTLPSTGVLISEGVRGEGGILYNDNEERFMFEHGYANNEGELASRDVVARAELTEVNEGRGVEDEYVDLDMRHLGEERILDRLENILHLAEDFEGVDGLDEPMPVKPGQHYAMGGVETDENGETCIDGLYAAGETACVSLHGANRLGGNALPELLVFGARAGHHAAGKDMKTAEIQTGPSAKSEPGDVEPPVDPGAIDASSGDVAADGAAIEPKAVLESTVEQERQRIEDLIESDGINHAEVRADVQETMTDNVNVFRTEEGLEKALRDLRSARKEYENVAVEDPSRTYNTDLIHTIETRNILDVAEAITLGALAREEFRGAHWRAEHQERKDEEWIKHTMLAWNEGQPELYYKPVILEGDEETYEPKVRSY

SEQ ID NO: 23721 - protein, 339 aa, Salmonella typhimurium LT2
  misc_feature (168)..(168): Xaa can be any naturally occurring amino acid
  misc_feature (185)..(185): Xaa can be any naturally occurring amino acid
  misc_feature (306)..(306): Xaa can be any naturally occurring amino acid
  misc_feature (314)..(314): Xaa can be any naturally occurring amino acid
  unsure (1)..(339): unsure at all Xaa locations
MGSSHHHHHHSSGLVPRGSHMKAMNKVWVIGDASVDLVPEKQNSYLKCPGGASANVGVCVARLGGECGFIGCLGDDDAGRFLRQVFQDNGVDVTFLRLDADLTSAVLIVNLTADGERSFTYLVHPGADTYVSPQDLPPFRQYEWFYFSSIGLTDRPAREACLEGARRXREAGGYVLFDVNLRSKXWGNTDEIPELIARSAALASICKVSADELCQLSGASHWQDARYYLRDLGCDTTIISLGADGALLITAEGEFHFPAPRVDVVDTTGAGDAFVGGLLFTLSRANCWDHALLAEAISNANACGAXAVTAKGAXTALPFPDQLNTFLSSHSLAQAMTVK

SEQ ID NO: 23722 - protein, 585 aa, Thermoactinomyces vulgaris
MLLEAIFHEAKGSYAYPISETQLRVRLRAKKGDVVRCEVLYADRYASPEEELAHALAGKAGSDERFDYFEALLECSTKRVKYVFLLTGPQGEAVYFGETGFSAERSKAGVFQYAYIHRSEVFTTPEWAKEAVIYQIFPERFANGDPSNDPPGTEQWAKDARPRHDSFYGGDKGLVIDRLPYLEELGVTALYFTPIFASPSHHKYDTADYLAIDPQFGDLPTFRRLVDEAHRRGIKIILDAVFNHAGDQFFAFRDVLQKGEQSRYKDWFFIEDFPVSKTSRTNYETFAVQVPAMPKLRTENPEVKEYLFDVARFWMEQGIDGWRLDVANEVDHAFWREFRRLVKSLNPDALIVGEIWHDASGWLMGDQFDSVMNYLFRESVIRFFATGEIHAERFDAELTRARMLYPEQAAQGLWNLLDSHDTERFLTSCGGNEAKFRLAVLFQMTYLGTPLIYYGDEIGMAGATDPDCRRPMIWEEKEQNRGLFEFYKELIRLRHRLASLTRGNVRSWHADKQANLYAFVRTVQDQHVGVVLNNRGEKQTVLLQVPESGCKTWLDCLTGEEVHGKQGQLKLTLRPYQGMILWNGR

SEQ ID NO: 23723 - protein, 339 aa, Salmonella typhimurium LT2
MGSSHHHHHHSSGLVPRGSHMKAMNKVWVIGDASVDLVPEKQNSYLKCPGGASANVGVCVARLGGECGFIGCLGDDDAGRFLRQVFQDNGVDVTFLRLDADLTSAVLIVNLTADGERSFTYLVHPGADTYVSPQDLPPFRQYEWFYFSSIGLTDRPAREACLEGARRMREAGGYVLFDVNLRSKMWGNTDEIPELIARSAALASICKVSADELCQLSGASHWQDARYYLRDLGCDTTIISLGADGALLITAEGEFHFPAPRVDVVDTTGAGDAFVGGLLFTLSRANCWDHALLAEAISNANACGAMAVTAKGAMTALPFPDQLNTFLSSHSLAQAMTVK

SEQ ID NO: 23724 - protein, 507 aa, Zea mays
MTRPLSKATKIAGPFDSLTSLHLLTEEAVCLPPTPASLLQVISFHLCRSPVATGRAILVLPLPPWPPPPLPPPPPPPPPPPPRFLLPLLLLCSHLSLASAEEAASAAADLLSEARAPGFAAWLRGVRRRIHQRPELAFQEFRTSELVRAELDAIGVPYRWPVAQTGVVATIAGAAAGPVVALRADMDALPVQELVDWEHKSQESGKMHACGHDVHTTMLLGAARILQDRKSDLMGTVKLVFQPAEEGQGGAYYVLQEGVLDDASAIFGLHVDPALPVGVVSSRPGPFAATSGRFLATVTGKGGHAAMPHESIDPVVAAATTVVSLQKIISREIDPLQGAVVSVTFLKGGEAYNVIPENVAFGGTMRSMTNEGLSYLKKRIKEIVEGQAAVHHCSASVDFMEDTMKPYPAVVNDEGMYAHAKEVAEGLLGEKNVRVGPQVMGAEDFGFYAQRMAGAFFTIGVGNASTMATIHSTHSPHFVVDEDVLPVGAAFHAAVAIEYVRKNRAST

SEQ ID NO: 23725 - protein, 588 aa, Staphylococcus aureus subsp. aureus MRSA252
MRLNLMMSRLNSVVIKLWLTIILIVTTVLILLSIALITFMQYYFTQETENAIREDARRISSLVEQSHNKEEAIKYSQTLIENPGGLMIINNKHRQSTASLSNIKKQMLNEVVNNDHFDDVFDKGKSVTRNVTIKEKGSSQTYILLGYPTKAQKNSHSKYSGVFIYKDLKSIEDTNNAITIITIITAVIFLTITTVFAFFLSSRITKPLRRLRDQATRVSEGDYSYKPSVTTKDEIGQLSQAFNQMSTEIEEHVDALSTSKNIRDSLINSMVEGVLGINESRQIILSNKMANDIMDNIDEDAKAFLLRQIEDTFKSKQTEMRDLEMNTRFFVVTTSYIDKIEQGGKSGVVVTVRDMTNEHNLDQMKKDFIANVSHELRTPISLLQGYTESIVDGIVTEPDEIKESLAIVLDESKRLNRLVNELLNVARMDAEGLSVNKEVQPIAALLDKMKIKYRQQADDLGLNMTFNYCKKRVWTYDMDRMDQVLTNLIDNASRYTKPGDEIAITCDENESEDILYIKDTGTGIAPEHLQQVFDRFYKVDAARTRGKQGTGLGLFICKMIIEEHGGSIDVKSELGKGTTFIIKLPKPE

SEQ ID NO: 23726 - protein, 305 aa, Arabidopsis thaliana
MSSLTVRRVSREDIQLVQNLIERCLQLYMNQKEVVDTLLEQAKIEPGFTELVWQKLEEENREFFKAYYLRLMVKHQIMEYNELLEQQINHMRQMHPTAGASVRNRNGSHVPPMNQQQLLYERKEPDQSSPNLSSPYLNGGSAINTNIPSYVDFSSHSRRVDPSPNSLSLQATNMPLMQGMIKSETAYQNCAPYMYGGEAQSTVGDVTIASFSNDSSNQSLNDPLVDPDAPTFGSLGQIPQNFSLSDLTADFSQSSDILESYEGSPFLLADAENFLDSSERVEHQGDHERLRTISSGFSYENFRSN

SEQ ID NO: 23727 - protein, 109 aa, Streptococcus oralis
LLYALLHLSGFEDVSMDEIKSFRQWGSKTPGHPEFGHTAGVDATTGPLGQGISTATGFAQAERFLAAKYNREGFNIFDHYTYVICGDGDLMEGVSSEAASYAGLQKLDK

SEQ ID NO: 23728 - protein, 1309 aa, Arabidopsis thaliana
MEVEGEVREKEARVKGRQPETEVLHGLPQEQSIFNNMQHNHQPDSDRRRLSLENLPGLYNMSCTQLLALANATVATGSSIGASSSSLSSQHPTDSWINSWKMDSNPWTLSKMQKQQYDVSTPQKFLCDLNLTPEELVSTSTQRTEPESPQITLKTPGKSLSETDHEPHDRIKKSVLGTGSPAAVKKRKIARNDEKSQLETPTLKRKKIRPKVVREGKTKKASSKAGIKKSSIAATATKTSEESNYVRPKRLTRRSIRFDFDLQEEDEEFCGIDFTSAGHVEGSSGEENLTDTTLGMFGHVPKGRRGQRRSNGFKKTDNDCLSSMLSLVNTGPGSFMESEEDRPSDSQISLGRQRSIMATRPRNFRSLKKLLQRIIPSKRDRKGCKLPRGLPKLTVASKLQLKVFRKKRSQRNRVASQFNARILDLQWRRQNPTGTSLADIWERSLTIDAITKLFEELDINKEGLCLPHNRETALILYKKSYEEQKAIVKYSKKQKPKVQLDPETSRVWKLLMSSIDCDGVDGSDEEKRKWWEEERNMFHGRANSFIARMRVVQGNRTFSPWKGSVVDSVVGVFLTQNVADHSSSSAYMDLAAEFPVEWNFNKGSCHEEWGSSVTQETILNLDPRTGVSTPRIRNPTRVIIEEIDDDENDIDAVCSQESSKTSDSSITSADQSKTMLLDPFNTVLMNEQVDSQMVKGKGHIPYTDDLNDLSQGISMVSSASTHCELNLNEVPPEVELCSHQQDPESTIQTQDQQESTRTEDVKKNRKKPTTSKPKKKSKESAKSTQKKSVDWDSLRKEAESGGRKRERTERTMDTVDWDALRCTDVHKIANIIIKRGMNNMLAERIKAFLNRLVKKHGSIDLEWLRDVPPDKAKEYLLSINGLGLKSVECVRLLSLHQIAFPVDTNVGRIAVRLGWVPLQPLPDELQMHLLELYELHYHMITFGKVFCTKVKPNCNACPMKAECRHYSSARASARLALPEPEESDRTSVMIHERRSKRKPVVVNFRPSLFLYQEKEQEAQRSQNCEPIIEEPASPEPEYIEHDIEDYPRDKNNVGTSEDPWENKDVIPTIILNKEAGTSHDLVVNKEAGTSHDLVVLSTYAAAIPRRKLKIKEKLRTEHHVFELPDHHSILEGFERREAEDIVPYLLAIWTPGETVNSIQPPKQRCALFESNNTLCNENKCFQCNKTREEESQTVRGTILIPCRTAMRGGFPLNGTYFQTNEVFADHDSSINPIDVPTELIWDLKRRVAYLGSSVSSICKGLSVEAIKYNFQEGYVCVRGFDRENRKPKSLVKRLHCSHVAIRTKEKTEE

SEQ ID NO: 23729 - protein, 477 aa, Bacillus cereus ATCC 10987
MTNSKKLPKYRQIVDYMKEKIENGEWPIGSKIPSQRQLAKSFQVNRSTVITALDELMADGLIQGKIGAGTIVTNNTWSLLATNPPPDWSEYVKAGIHKPSKLMVREINEAEANNKLIHLSKGELAPHLFPLETMQSIMKKVSEELDYFGYEEQKGFYPLRKAISKYVKSFGIHTSPSSILIVSGALQALQLISIGLLHRESTVLLEQPSYLYSLHVFQSANINLSGIAMDHHGVLPNELLKRIKYSKKKNILYSIPSFQNPTGILMSKERRKEIIKICEKEQLPIIEDDIYRELWIDEPPPVPLKSIDKHGHVLYVGSLSKTLSPGLRIGWIIGPEPVIDRLSDIKMQTDYGSSSLSQRVAAEWINKGFYEEHVANVRIQLKERRQIMIRALNKYCADVATWDIPSGGFFIWLKVVPSIPMKKLFSEALSKGVLLNPGRIYEEESDQYIRLSYGYASPEQITNGIKLLSELIRKLMA

SEQ ID NO: 23730 - protein, 794 aa, Streptomyces coelicolor
MAELPTSHLAAAVLTDGNRALVAVIAVVALAALVLAGVLVRQVLAAGEGTDSMKKIAAAVQEGANAYLARQLRTLGVFAVVVFFLLMLLPADDWNQRAGRSIFFLIGAAFSAATGYIGMWLAVRSNVRVAAAAREATPAPGEPEKDLALVSHKATKIAFRTGGVVGMFTVGLGLLGACCVVLVYAADAPKVLEGFGLGAALIAMFMRVGGGIFTKAADVGADLVGKVEQGIPEDDPRNAATIADNVGDNVGDCAGMAADLFESYAVTLVAALILGKVAFGDSGLAFPLLVPAIGVLTAMIGIFAVAPRRSDRSGMSAINRGFFISAVISLVLVAVAVFVYLPGKYADLDGVTDAAIAGKSGDPRILALVAVAIGIVLAALIQQLTGYFTETTRRPVKDIGKSSLTGPATVVLAGISLGLESAVYTALLIGLGVYGAFLLGGTSIMLALFAVALAGTGLLTTVGVIVAMDTFGPVSDNAQGIAEMSGDVEGAGAQVLTDLDAVGNTTKAITKGIAIATAVLAAAALFGSYRDAITTGAADVGEKLSGEGAPMTLMMDISQPNNLVGLIAGAAVVFLFSGLAINAVSRSAGAVVYEVRRQFRERPGIMDYSEKPEYGKVVDICTRDALRELATPGLLAVMAPIFIGFTLGVGALGAFLAGAIGAGTLMAVFLANSGGSWDNAKKLVEDGHHGGKGSEAHAATVIGDTVGDPFKDTAGPAINPLLKVMNLVALLIAPAVIKFSYGADKSVVVRVLIAVVAFAVIAAAVYVSKRRGIAMGDEDDADPEPKSADPAVVS

SEQ ID NO: 23731 - protein, 441 aa, Chlamydia muridarum Nigg
MTGKRTKEEQINRQRSHFYRDNVGVIVLCGGEGKRLSPLTCWRCKPTVSFGGRYKLIDVPISHAIASGFSKIFVIGQYLTYTLQQHLFKTYFYHGVMQDQIHLLVPERRDGSQVWYQGTADAIRQNLLYLSDSPVEYFLILSGDQLYNMDFRSIVDYAIDVQADMVIAAQPVSDKDVSRFGVLRVDDEWKLVDFYEKPQSEEILKHFRLSNAAMKKFGLDPQQGNFLGSMGIYLFRKECLFQLLLDETGDDFGKELIHRQMHRGKTVAYLYNGYWTDIGTIASYYEANMALTQRPSQNVRGFNCYDDGGMIYSKNNHLPGAIISDSKISSSLLCEGAMIESGQVSNSVIGVRGVIGQGSIFDHSIMMGSDSYVSGSVPFGVGKNCEIHKTIIDENCCIGNGVRLQNLQGHKDYDSPDGKLVVRDGIIIVPKGTKIPDNYVF

SEQ ID NO: 23732 - protein, 352 aa, Geobacter metallireducens GS-15
MPESILATFTVKRLEIIAPDGTADEDLVPGLSGDELRRIYYLLLLTRAYDGRALALQREGRLGTYPSVLGQEAAQVGSAFAIHERDWVFPSFREMGVHLTLGYPAHQLFQYWGGDERGMRTPDGMNIFPISVSVGTHIPHAAGAALAAKLRGDPIAVIAYFGDGGTSKGDFHEGFNLAGVMGLPTVFICQNNQWAISVPLSAQTASRSLAQKALAYGFDGIQVDGNDVLAVYRATREALEKARSGGGPTFIECLTYRMSDHTTSDDASRYRSPEEMEQWRERDPILRYERFLAKRGLWNEDYAAEMKGKAGGEIDEAVRRYESVPPPAPGEMFNFVSGELSARLRRQRETST

SEQ ID NO: 23733 - protein, 213 aa, GIBBERELLA ZEAE PH-1
MADPRLNELLKWSIEQSEATKNDPDAPPAKTQLTPELMAALMGGPSDADLMKASMEIITSDNAEEVSLDDKLVAFDNFEQLIENLDNANNIANLSLWTPLLDQLKHEEREMRKMAAWCVGTAVQNNEKTQERLLAVGGVPMLVDLATKEDEPVDVRRKAVYALSSAVRNYQPAMDLFADELTKKGHKTDKVDATSMEAVDEVVNGLREKIGKA

SEQ ID NO: 23734 - protein, 301 aa, Oryza sativa
MASVTYIDDSGSEVIDPPKTEVLDVTELAGDPVPHSPKPNVVVSSSVRELLECPVCLSAMYPPIHQCSNGHTLCSGCKPRVHNRCPTCRHELGNIRCLALEKVAASLELPCKYQNFGCVGIYPYYCKLKHESQCQYRPYSCPYAGSECTVAGDIPYLVNHLKDDHKVDMHNGCTFNHRYVKSNPHEVENATWMLTVFSCFGQYFCLHFEAFQLGMAPVYIAFLRFMGDDLEAKNYSSSLEVGGTGRKMIWQGVPRSIRDSHRKVRDSYDGLIIQRNMALFFSGGERKELKLRVTGRIWKEQ

SEQ ID NO: 23735 - protein, 604 aa, Frankia sp. CcI3
MTGGSGKSGGSGPTPVLATPARGAELTAASVAWPSLTLRPTQLAELELLLLGAFGSEPGYPEDPEINGVPVPTLVVGAAEAEALTPSSTAALRDTEGVMIAALHLRTTIPLPDQPGGPDGPRVRLVGTVEGIRLPHHPDHPGLRLTPAQVRAELLARGWISLEAGSGACWAVWADGLLHTADVGRIRALTRQGKRCVVLAPVGGADPADAEHHLRVRCLLAALKAVDAPLRAAEATLSSEALAADAISPPGVAGRRSEPPPDPYRRPKAGEAGTPEHRSLLVLVPVIPSEALATPREPGMSATVLKTSAKPSDAAAGVPGPATAVTPAPPAPTDLADIAWAAAGAAWTGVETAASSADELAKLAAQRAHLASFYGLTGSLIGPAIGAPGRMELASLLDAGNPIPAELTPPTVAAELSRAIPPRSKRGLTVFLTGLSGSGKSTLAGLLVCRLLEYGGRRLTLLDGDVVRTHLSQGLGFSRADRDINVRRIGFVAAQVAGAGGTAVCAPIAPYADVRAQVRGMVRAAGGGFVLVHVSTPLEVCEARDRKGLYAKARAGVLPAFTGVSDPYETPTDADVTVNTAELSAEDAVDRIIDHLRHAGWLTS

SEQ ID NO: 23736 - protein, 306 aa, Escherichia coli
MSTRVWVLGDAVVDLLPESQGRLLQCPGGAPANVAVGIARLGGKSAFIGKVGDDPFGRFMYQTLSKENVDTRYMSLDPQHRTSIVAVGLDEQGERNFTFMVRPSADLFLQPDDLPAFGPGEWLHLCSIALSAEPSRSTAFLAMEKIRQAGGNISFDPNIRSDLWQSEALLRKYLDRALSLANIAKLSEEELLFISGESQVQQGAYSLVQRYSLTLLLITQGKNGVLVYFQGQFIHYPAKPVSVVDTTGAGDAFVAGLLAGLADSGIPTNTRQLERIIAQAQICGALATTAKGAMTALPRQHDLPSQ

SEQ ID NO: 23737 - protein, 405 aa, Candida albicans SC5314
MTSMEPADTSIRSLNDINLQELANKQHQRNIYAQGSPTLEDSITSNGNDINNPNNNINKTNNNSNSSLSLTKKTSRHINKDTTTKGKYTLNDFQILRTLGTGSFGRVHLTRSIHNGRFYAMKVLKKQRVVQMKQIEHTNDERRMLKLAQHPFIIRMWGTFQDCHNLFMIMDYIEGGELFSLLRKSQRFPTPVAKFYAAEVFLAIEYLHSLDIIYRDLKPENILLDKNGHIKLTDFGFAKEVQDVTYTLCGTPDYIAPEVVATKPYNKSVDWWSFGILIFEMLTGYTPFYDPTPMKTYENILNGSITYPDYLPPDILDLLQKLIVKDLTQRLGNLQGGSDDVKNHPWFKEVIWERLLSRDIETPYEPPITSGVGDTSQFDRYPEDKDLDYGISGVEDPYRDQFQDF

SEQ ID NO: 23738 - protein, 553 aa, Arabidopsis thaliana
MAPIDVGDFVPDGSISFFDDDDQLQTVSVHSLAAGKKVILFGVPGAFPPTCSMNHVNGFIEKAEELKSNGVDEIICLSGDDPFMITACSENKHVKFVEDGSGEYIQLLGLELEVKDKGLGVRSRGFALLLDNLKVIVVNVGSGGDCSLFQLMKMTTTTMSNLPTDLLEEIISRVPRKYMRAVRLTCKRWNGMFKSQSFTKMHIGKEEAATRELRQTRMIVMMDYNVYLMGIAVNEIPSIETLGKLTCLDDSEQVKISQVFCCEGLLLCILKDDDTKIVVWNPYLGQTRWIQTRLICCVSGWKKYALGYGNNSENRSCRSPKILRVTDNFNIFSENIPLQYEIYDFDSDVWTTLDVSPHWFIMSERGLSLKGNTYWGAKERHAYGSIDHIICFDFTRERFGPLLPLPFSAWGAQFASLSSVREDKITALFQNCRAYKLELWITTKIDVNNATWSKFFTMDTPYLHEILSLKTFFIDEENKIVVVSNKERDTKGDLTHDSIDIINGEARCLWKLGLGKPADKNCWPLVCPYVPSVVQIKQHKGGKTKEQSDYKRH

SEQ ID NO: 23739 - protein, 502 aa, Oryza sativa (japonica cultivar-group); identical to SEQ ID NO: 789

SEQ ID NO: 23740 - protein, 135 aa, Brassica napus
DLLMKAGVVTESMTVPQNVVNVASNGQWAQYPQQQHQGFMPYPVSDMQEMVPPTALMMGGLSETQQVHGRKRVASSEGEFVERIVERKQKRMIKNRESASRSRARKQAYTQELEIKVSSLEEENQKLRRLMEVEK

SEQ ID NO: 23741 - protein, 546 aa, Tatlockia micdadei
MAKELRFGDDARQQMLAGVNALADAVKATMGPSGRNVVLERSFGAPTVTKDGVSVAKEIEFENRFKNMGAQMVKEVAAKTSDTAGDGTTTATVLARAIVVEGHKAVAAGMNPMDLKRGIDKAVAAVTKKLQEMSKPCKDGKAIAQVGTISANSDQAIGSIIAEAMEKVGKEGVITVEDGNSLENELAVVEGMQFDRGYISPYFINNQQNMSAELEHPFILLVDKKISTIRDMLSVLEAVAKSGPSLLIIAEDVEGEALATLVVNNMRGIVKVCAVKAPGFGDRRKAMLQDIAILTAGEVISEEVGTSLESATLDSLGTAKRVVVTKENTTIIDGEGKAADINARITQIRAQMEETTSDYDREKLQERVAKLAGGVAVIKLVLLPNRMKRKARVEDALHATRAAVEEGIVAGGGVALIRAQKALDGLKGENADQDMGINILRRAIESPLRQIVANAGYEPSVIVNKVAESKDNFGFNAATGEYGDMVEMGILDPTKVTRTALQNAASVASLMLTTECMVADLPKKEEPMGAGEMGGMGGMGGMGGMM

SEQ ID NO: 23742 - protein, 113 aa, Streptococcus pneumoniae
TYVFTHDSIAVGEDGPTHEPVEHLAGLRAMPNLNVFRPADARETQAAWYLAVTSEKTPTALVLTRQNLTVEDGTDFDKVAKGAYVVYENAADFDTILIATGSEVNLAISAAKE

SEQ ID NO: 23743 - protein, 477 aa, Methanosarcina barkeri str. fusaro
MQIPDHKTKIVCTIGPASSSEEVIRKLVLAGMNVARINFSHGSFESHSEVIQRVRKVAEELDRTVAILADLPGPKIRIGKLEKEPIMLHKGNSVTLTVAETTGNETRIPVSYKQLPESVVPGSLIYLSDGFIQLRCLEVSGKDVLCEVLIGGQLYSHKGLNLPGAKILVDSVTGKDLEILGFALSKGIDTFSISFIESAEDIRNVRNFAAARGKSVYIVSKIERRQAVENIQDILKETDALMIARGDLGVEIPIQEVPSVQKELIHSAKLLGIPVITATQMLASMTDNIRPTRAEATDVANAILDGTDAVMLSEETAVGNYPVEAVEMMAKIAKTTEDWRSGTKWGLDAIIKGITARDMSVDEVITLQVHEALQKLPVAAVLTPTRSGATPRRISRFKPDTWILAFSRVPRTCGFLSLSYGVYPITVNENIESWEKETTEKAKDLGFVKSGEIVIFTQGPSSGSPGGTNMLKILTLK

SEQ ID NO: 23744 - protein, 540 aa, Candida albicans
MSLKLPQAPNSGLFKQGYSSFSNADGAIIRNVEAVREIASILLTSMGPSGRNKIIVNKLGKKFITNDAATMLNELEIVHPVVKILIQASKQQEFEMGDNTNLVIILAGEFLNVAEKLLTLGLNVSEIIQGFNLANKFVMKTLDELVVEKVESFETDLLKAVKPVIAAKQYGVEDTIAKLVVDAVALVMKNGSFNVDNIRVVKVMGASLSQSQVVKGMVFPREPEGTVKNADQIQSCRVYQPHRYFHHRNQRYSCSSTMPRKCLISPRAKNNSWTSCARKSTIQGLRWLLPGSSVGELALHYLNKYGILVLRVPSKFDLRRICQVCGATPLPRLGAPTPDEMGEIDIIETKEIGGDRVTIFRQDESSSRTATIVVRGATQNNLDDIERAIDDGVNSIKGLIKDNRLLPGAGAVEIELMKRITAYQSTPGLLQLAIKSFAKAFEVIPRVLAETSGHDSSEILSKLHAAHAEDTGLRAGIDIDSGEVADTAVLDILATKKSAIDLAVDATNTILSIDQIIMAKRAGGPVMPQQPRPGNWDQDD

SEQ ID NO: 23745 - protein, 113 aa, Streptococcus oralis
TYVFTHDSIAVGEDGPTHEPVEHLAGLRAMPNLNVFRPADARETQAAWYLAVTSEKTPTALVLTRQNLTVEEGTDFDKVAKGAYVVYETAADFDTILIATGSEVNLAVVAAKE

SEQ ID NO: 23746 - protein, 555 aa, Orientia tsutsugamushi
MSKQIVHGDQCRKKIIEGINVVANAVGITLGPKGRCVAIEQSYGPPKITKDGVSVAKAIQLKDKSLNVGAQFVISVASKTADVAGDGTTTATVIADAAVRELNKAEVAGIDIQEVRKGAEKAVEAVIADVRKNSSPVKNEEEIAQVATVSSNGDREIGEKIANAMKQVGQEGVITVEDSKNFNFEVEVVKGMRFDRGYISQYFATNREKMITEFENPYILLLDQKVSTVQPLVPVLEAVAHTGKPLVLIADDVDGEALTALILNNLKGSIKVVAVKAPGFGDRKKEMLEDIAILTNGEVITEQLGIKLEKVNDTSKLGTANRVIVTKDHTTIVHDKNNSDIEKKVNSRCEQIREAIKDTTSDYEKEKLQERLAKLRNGVAVLKVGGATEVEQKERKDRVEDALHATRAAVEEGIVPGGGVALFYASRVLDSLKFDNEDQRVGINIIKKVLEAPVRQIVKNAGGKEDVVVNELSKSTDKNRGFDARTMQYVDMIKAGIVDPTKVVRTALQDAFSVASLVIATSAMITDHEEDNNTGNRSGGGVGGGHHGGMGGMDF

SEQ ID NO: 23747 - protein, 581 aa, Oryza sativa
  misc_feature (324)..(324): Xaa can be any naturally occurring amino acid
  misc_feature (330)..(330): Xaa can be any naturally occurring amino acid
  misc_feature (342)..(342): Xaa can be any naturally occurring amino acid
  misc_feature (344)..(344): Xaa can be any naturally occurring amino acid
  misc_feature (350)..(350): Xaa can be any naturally occurring amino acid
  misc_feature (370)..(370): Xaa can be any naturally occurring amino acid
  misc_feature (396)..(396): Xaa can be any naturally occurring amino acid
  unsure (1)..(581): unsure at all Xaa locations
MAAATSTSSTALAHPKTLNPASKSAAAGSVSFPAAQPPCPLAASAGGRRRRGAVAAKVSSPQVIGATMPSLDFETSVFKKEKVSLAGHDEYIVRGGRNLFPLLPEAFKGIKQIGVIGWGSQGPAQAQNLRDSLAEAKSDIVVKIGLRKGSKSFEEARAAGFTEESGTLGDIWETISSSDLLLLLISDAAQADNYEEIFSHMKPNSILGLSHGFLLGHLQSVGLDFPKNISVVAVCPKGMGPSVRRLYVQGKEVNGAGINSSFAVHQDVDGRATDVALGWSVALGSPFTFATTLEQEYRSDIFGERGILLGAVHGIVEALFRRYXEHGLDXDSAYKNTVECIXGXISKTIXKKGMLEVYNSLTEEGKKQFXEAYSAAYYPCMDILYECYEDVSSGSXIRSVVLAGRRFYEKEGLPAFPMGNIDQTRMWKVGERVRSTRPAGDLGPLHPFTAGVYVALMMAQIEVLRKKGHSYSEIINESLIESVDSLNPFMHARGVAFMVDNCSTTARLGSRKWAPRFDYILTQQAFVTVDKNAPVNQDLISNFFSDPVHSAIEVCAQLRPTVDISVPADADFVRPELRQSS

SEQ ID NO: 23748 - protein, 266 aa, Oryza sativa (japonica cultivar-group)
MAMGSSDGDVLYARCLVTLYLLSPLNVFALWFMSAPYGKLSRPGWGPTVPAALAWCLMESPTLWLPPLVLSATTTSLSTPTLRVTILPAALYMLHYVHRTLVHPLRLLRLRRAPAPMPILIIMFGFSFNLLNAYIQARSWALDAVPPATATPLTVARCLVGLALFVWGMWTNIAADRELLRLKEAGKGYQIPKDGLFDLVACPNYFGETVEWLGYALVAWTPAAWAFFLYTCVNLGPRARDQRLWYISKFGDKYPASRKAFIPYIY

SEQ ID NO: 23749 - protein, 420 aa, Glycine max
  misc_feature (91)..(91): Xaa can be any naturally occurring amino acid
  unsure (1)..(420): unsure at all Xaa locations
NSDGTCQGVIALNMEDGTLQLFQASSTILATGGYGRAYFSATSAHTCTGDGNAMVARAGIPLEDLEFVQFHPTGIYGAGSLITEGSRGEAXIFRNSEGERFMERYAPTAKDLASRDVVSRSMTMEIREGRGVGPLKDHIYLHLNHLPPDVLKERLPGISETAAIFAGVDVTKEPIPVLPTVHYNMGGIPTNHHGEVITIKGDDPDAVVPGLMAAGETACASVHGANRLGANSLLDIVVFGRACANRVSEIQRPGEKQKPLEKDAGMKTIAWLDKLRNSNGSLPTSKIRLNMQRIMQNNAAVFRTQETLEEGCQLIDKAWESFHDVKLKDRSLIWNSDLIETIELENLLINACITMHSAEARKESRGAHAREDFTKRDDEKWMKHTLGYWDNEKVRLDYRPVHMNTLDDEVESFPPKARVY

SEQ ID NO: 23750 - protein, 335 aa, Vibrio cholerae
MSVSNTVTKVEEFDFEDEALEVLETDAELTSDEELVAVEGASEDVREEFDASAKSLDATQMYLSEIGFSPLLTAEEEVLYARRALRGDEAARKRMIESNLRLVVKISRRYSNRGLALLDLIEEGNLGLIRAVEKFDPERGFRFSTYTTWWIRQTIERALMNQTRTIRLPIHVVKELNIYLRTARELSQRLDHEPTPEEIALELDRPVDDVTKMLRLNERISSVDTPIGGDGDKALLDILPDSHNADPEFSTQDDDIRESLLNWLDELNPKQKEVLARRFGLLGYEPSTLEEVGREINLTRERVRQIQVEGLRRLREILVKQGLNMEALFNVEYDN

SEQ ID NO: 23751 - protein, 113 aa, Streptococcus oralis
TYVFTHDSIAVGEDGPTHEPVEHLAGLRAMPNLNVFRPADARETQAAWYLAVTSEKTPTALVLTRQNLTVEEGTDFDKVAKGAYVVYENAADFDTILIATGSEVNLVVAAAKE

SEQ ID NO: 23752 - protein, 758 aa, Desulfovibrio desulfuricans G20
MIIHNLGFPRIGASRELKFALESYWAERTGEDALQSVAAGLRQRNLQWQQKLDYVPVGDFSLYDQVLDMSFTLGNVPERVKNLPGGDTEAYFRVARGRASAGDTHTVHAGEMTKWFDTNYHYIVPEFTAQSRFRLDADRLTGQLKEAARSGVQAKPVIIGPVTYLWLGKSKDGSDRLALLEKLLPVYRELLETLAQNGAGWVQVDEPVLVTELEKPWLDALADAYRYLAGTPVSILLATYFGTLQGNLETLAALPVAGVHVDAVRGRDEVERLVAALPGETVVSLGVIDGRNVWKTDLAALLDWLEPVAGQLKDRLWLAPSCSLLHVPVDLAAEDAMDSEVRSWLAFALQKLEELHTLGTALRSGRNAVAEELARNARSIASRRGSERVRNEAVRARVASLSGQAGDRSQPYEQRSLVQRRMLQLPLFPTTTIGSFPQTAEIRAVRQQYRKGELSLQEYEEAMRANIRHVVARQEELGLDVLVHGEAERNDMVEYFGEQLSGYVFSRSGWVQSYGSRCVKPPILYGDIERPAPMTVKWITYAASLTGKPVKGMLTGPVTMLNWSFVRDDQPREDTCRQLAAAIRDEVLDLEKAGVGIIQIDEAALREGMPLRRPEWAEYLRWAVESFRLAANGVEARTQVHTHMCYSQFNDIIESIAAMDADVITIETSRSDMGLLDVFEHFSYPNEIGPGVYDIHSPNVPDVESMVELLCKAARRIPPQRLWVNPDCGLKTRTWPETVAALENMVEAARRLRTMFAA

SEQ ID NO: 23753 - protein, 549 aa, Staphylococcus aureus subsp. aureus MRSA252
MNKQWWKEAVAYQVYPRSFNDSNHDGIGDLPGMIDKLDYLKDLGIDVIWLSPMFKSPNDDNGYDISDYQEIMDEFGTMEDFDRLLKGVHDRGMKLILDLVVNHTSDEHPWFIESKSSKDNPKRDWYIWQDPKPDGSEPNNWESIFNGSTWEYDANTEQYYFHLFSKKQPDLNWGNPEVRDAVFEMMNWWFDKGIDGFRVDAITHIKKTFEAGDLPVPEGKTYAPAFDVDMNQPGIQTWLQEMKDRSLSKYDIMTVGEANGVSPDDADDWVGEENGKFNMIFQFEHLGLWNSGDSHFDVNSYKSVLNRWQKQLENKGWNALFIENHDQPRRVSTWGDDDKYWYESATSHAAVYFLQQGTPFIYQGQEIGMTNYPFESIETFNDVAVKNDYQIVKAQGGDVDALLAKYKDENRDNSRTPMQWDDTLNGGFTNGEPWFPVNPNYKTINVAQQLEDEDSVLQFYKDLIQLRKSNDVYVYGQFDLVDAENSQVFAYTRTLNEKQVLIVGNLTNHEAELTVPFDISHGEVKLFNYDAKVNLKQLLPYEACVIELN

SEQ ID NO: 23754 - protein, 399 aa, Zea mays
MGRTPCCEKVGLKRGRWTAEEDQLLANYIAEHGEGSWRSLPKNAGLLRCGKSCRLRWINYLRADVKRGNISKEEEDIIIKLHATLGNRWSLIASHLPGRTDNEIKNYWNSHLSRQIHTYRRKYTAGPDDTAIAIDMSKLQSADRRRGGRTPGRPPKASASRTKQADADQPGGEAKGPAAAASSPRHSDVVNPGPNQPNSSSGSTGTAEEEGPSSEDASGPWVLEPIELGDLVWGEADSEMDALMPIGPGGTTRLPSKGLARSAARPRWTTCSTWTGMASRPICGAGRSRTSTARSCGRPPSRWKLLLLLLLRRRPAPRTIASWRRSRLGSCPTRSDGSGHRTDQTDQIIGSRVLARSLPSRGSWFRWPNNWEKNSTARAVKPPPCAPDVDACRVELLRI

SEQ ID NO: 23755 - protein, 555 aa, Desulfovibrio desulfuricans G20
MNLTEALLHALKERGAKEVYGIPGDFALPYFKIIESTGILPLVTLSHEPAVGFAADASARFRGGLGVAAVTYGAGALNMVNAIAQAYAEKSPVVVISGAPGTHEGGHGLLLHHQAKHLDSQYRMYKEVTCDQAVLDDPATAPETIARVLQSCIEHSRPVYLEIPRDLPAAPCAPVPAFAASGTDADAVDACARDVLQRVQSAALPMMMVGVEVRRYGIEDKVALLAERLGVPVVTSFMGRGLLASASCLEGTYLGMAGDETLSEAVESSDGLLLLGVIMSDTNFGVSGSQLDRRRVMHAEDRQVRVGYHVYHDIPLGALVDRLLALLDDGQEADMALSGCGGSSDDRALQGAGLAVNPRGFMADAADITPTDIAALLNDFFASHGAMPVASDIGDCLFTMLSVDAIPMVAPGYYASMGFGVPAGMGLQITTKERSLILVGDGAFQMTGMELGNCTRLGIDPIVLVFNNSSWEMLHVFQPETAYSNLGEWDFAAVADGLGGRGHRAATRAELARALTQAHAERGRFQLIDARLAPHSLSPTLARFVEGVRRFSSGQ

SEQ ID NO: 23756 - protein, 141 aa, Chlamydia muridarum Nigg
MEQTLSIIKPDSVGKAHIGEIVSIFEKAGLRIAAMKMVHLSVKEAEGFYAVHKERPFFQELVDFMISGPVVVMVLQGENAVARNRELMGATNPKEAAEGSIRALFGESIGVNAVHGSDSLENAAIEVSYFFAKTEIVNALA

SEQ ID NO: 23757 - protein, 288 aa, Oryza sativa (japonica cultivar-group)
MVEDPSTDETISWNDSGTAFVVWRPAEFARDLLPKHFKHSNFSSFVRQLNTYGFKKVVADRWEFANDCFRRGEKHLLGGIQRRKGSGTGGAGAAPAGGIPTAIPISSPPTSSGGEPAVSSSPPRGAAGIAAGVSGAVAELEEENARLRRENARLARELARARRVCDGVRRLVSRYDHDHGGGEEEAGEGDVKPMLFGVAIGGKRSREENGEDEEEEEEEGADEDGEDDEVEEDDEERERHAARRVPVREGKVRRTTELSDLDVLALSVRAAAAARPGGASRDRKSSVS

SEQ ID NO: 23758 - protein, 616 aa, Oryza sativa (japonica cultivar-group)
MKGSRLAVKESCLPMTMPMPETFAQYSNPLRSTRAYGQLCRVPGRRRHACVDGWGQDRARTRGDDGQRRYAQCRGGWGDIWRWGGYITCGSPRETGMVNGAPSPPPPSPMVMSFGPLDSPWVKQPDTTVYPGQICAAAGGGGGMADQTAAAVVVGGGAAATMGEPSPPPPAPAAEAAGVGVGQQQRTVPTPFLTKTYQLVDDPAVDDVISWNDDGSTFVVWRPAEFARDLLPKYFKHNNFSSFVRQLNTYGFRKIVPDRWEFANDCFRRGERRLLCEIHRRKVTPPAPAATTAAVAAAIPMALPVTTTRDGSPVLSGEEQVISSSSSPEPPLVLPQAPSGSGSGGVASGDVGDENERLRRENAQLARELSQMRKLCNNILLLMSKYASTQQLDAANASSAAGNNNNNNCSGESAEAATPLPLPAVLDLMPSCPGAASAAAPVSDNEEGMMSAKLFGVSIGRKRMRHDGGGDDDHAATVKAEPMDGRPHGKDEQSAETQAWPIYRPRPVYQPIRACNGYEYDRAGSDQDECGAKPSNQDKKDLLRRWVVLISESLQLHGRQVVGAVQEWRRDRRGHRRPPAGHVQLRTCVNNLLVTGAGTLDAGREYETNSLPRPRR

SEQ ID NO: 23759 - protein, 479 aa, Schizosaccharomyces pombe
MSDAHDTIKSLTGDASNSRRLIVVSNRLPITIKRKDNGTYDFSMSSGGLVSALSGLKKLMTFQWLGWCGQEIPEDEKPMIIQRLQDECSAIPVFLDDETADRHYNGFSNSILWPLFHYHPGEINFDEENWEAYRAANYAFAEAIVKNLQDGDLIWVQDYHLMVLPQMLRELIGDKFKDIKIGFFLHTPFPSSEIYRVLPVRNEILEGVLNCDLVGFHTYDYARHFLSACSRILNLSTLPNGVEYNGQMVSVGTFPIGIDPEKFSDALKSDVVKDRIRSIERRLQGVKVIVGVDRLDYIKGVPQKFHAFEVFLEQYPEWVGKVVLVQVAVPSRQDVEEYQNLRAVVNELVGRINGRFGTVEYTPIHFLHKSVRFEELVALYNVSDVCLITSTRDGMNLVSYEYICTQQERHGALILSEFAGAAQSLNGSIVINPWNTEELANSIHDALTMPEKQREANENKLFRYVNKYTSQFWGPKLCR

SEQ ID NO: 23760 - protein, 214 aa, Methylococcus capsulatus str. Bath
MEAFERMLLENKAWAKDQLLKDPGYFERLSADQKPAVLWIGCSDSRVPAEIIVHAQPGEIFVHRNIANQLIMTDFNGLSVLQYAVDVLKVRDVIVCGHYNCGGIKAALQKQSAKLLIVNKWLKHVKDVYRLHAGEIEALGSEEERVGRLVELNVIEQVYNLAHTSIIQQSWKQNRCPTLHGWVYGLQDGLLKQLVTLPPGSEVSPVYQYVDFSE

SEQ ID NO: 23761 - protein, 450 aa, Oryza sativa
MSVSGGRTRVGRYELGRTLGEGTFAKVKFARNADSGENVAIKILDKDKVLKHKMIAQIKREISTMKLIRHPNVIRMHEVMASKTKIYIVMELVTGGELFDKIASRGRLKEDDARKYFQQLINAVDYCHSRGVYHRDLKPENLLLDASGTLKVSDFGLSALSQQVREDGLLHTTCGTPNYVAPEVINNKGYDGAKADLWSCGVILFVLMAGYLPFEDSNLMSLYKKIFKADFSCPSWFSTSAKKLIKKILDPNPSTRITIAELINNEWFKKGYQPPRFETADVNLDDINSIFNESGDQTQLVVERREERPSVMNAFELISTSQGLNLGTLFEKQSQGSVKRETRFASRLPANEILSKIEAAAGPMGFNVQKRNYKLKLQGENPGRKGQLAIATEVFEVTPSLYMVELRKSNGDTLEFHKFYHNISNGLKDVMWKPESSIIAGDEIQHRRSP

SEQ ID NO: 23762 - protein, 328 aa, Escherichia coli
MDKKQVTDLRSELLDSRFGAKSISTIAESKRFPLHEMRDDVAFQIINDELYLDGNARQNLATFCQTWDDENVHKLMDLSINKNWIDKEEYPQSAAIDLRCVNMVADLWHAPAPKNGQAVGTNTIGSSEACMLGGMAMKWRWRKRMEAAGKPTDKPNLVCGPVQICWHKFARYWDVELREIPMRPGQLFMDPKRMIEACDENTIGVVPTFGVTYTGNYEFPQPLHDALDKFQADTGIDIDMHIDAASGGFLAPFVAPDIVWDFRLPRVKSISASGHKFGLAPLGCGWVIWRDEEALPQELVFNVDYLGGQIGTFAINFSAGGSGNCTVL

SEQ ID NO: 23763 - protein, 615 aa, Xanthomonas campestris pv. campestris str. ATCC 33913
MAVIEIKVPDIGDYSDVPVIEVLVAVGDSVVKDQGLVTLESDKATLEVPSSAAGVVKELKVKIGDNLSEGAVVLLLETEGEAAAAPAAPKAETKAETKAAAPAAAPAAAAPGSKPPVTPSHRAPAEPAASKPALASGKAADIECKMVVLGAGPGGYTAAFRAADLGLDTVLIERYASLGGVCLNVGCIPSKALLHAAAVIDEVAHAGDFGVDFGQPKITLDKLREYKEKVVGKLTGGLASMAKQRKVRTVTGVASFVSPNELEIVGDDGKTQLLRFEHCIIAAGSQAVKLPNFPWDDKRVMDSTDALELHDIPKTLLVVGGGIIGLEMATVYSALGSKVTVVEFMDQLMPGADKDLVKPLADRLKKQGVEVHLKTKATDVSADAKGITVSFEAATEGEKPGLQATAFDRVLVAVGRSPNGKKIGADKAGVTVTERGFIPVDRQMRTNVPHIFAIGDIVGNPMLAHKATHEGKLAAEVAAGEKKEWVARVIPSVAYTNPEIAWVGVTETEAKAKGLKVGVAKFPWAASGRAIGIGRTEGFTKLIFDEETHRIIGGAIVGVHAGDLLAEIGLAIEMGAEAEDIGHTIHAHPTLSESVGMAAEVYDGTITDLYIPKKK

SEQ ID NO: 23764 - protein, 373 aa, Arabidopsis thaliana
MGYLFEETLSSNPKTPIVVDDDNELGLMAVRLANAAAFPMVLKASLELGVFDTLYAEASRTDSFLSPSEIASKLPTTPRNPGAPVLLDRMLRLLASYSMVKCEKVSVGKEQRVYRAEPICRFFLKNNIQDIGSLASQVIVNFDSVFLNTWAQLKDVVLEGGDAFGRAHGGMKLFDYMGTDERFSKLFNQTGFTIAVVKKALEVYQGFKGVNVLVDVGGGVGNTLGVVTSKYPNIKGINFDLTCALAQAPTYPGVEHVAGDMFVDVPTGNAMILKRILHDWTDEDCVKILKNCWKSLPQNGKVVVIELVTPDEAENGDINANIAFDMDMLMFTQCSGGKERSRAEFEALAAASGFSHCQFVCQAYHCWIIEFCK

SEQ ID NO: 23765 - protein, 147 aa, Sesbania rostrata
GFTDKQEALVNASYEAFKKNLPGHSVLFYSFILEKEPAAKGLFSFLKDSDGVPQNNPSLQAHAEKVFGLVHDAAAQLRATGVVVLADASLGSVHVQKGVTDPHFVVVKEALLKTLKEAAGATWSDEVSIAWEVAYDGLAAAIKKAMS

SEQ ID NO: 23766 - protein, 438 aa, Corynebacterium efficiens YS-314 [sequence omitted]

SEQ ID NO: 23767 - protein, 206 aa, Escherichia coli O157:H7
MAIPAFGLGTFRLKDDVVISSVKTALELGYRAIDTAQIYDNEAAVGLAIAESGVPRHELYITTKIWIENLSKDKLIPSLKESLQKLRTDYVDLTLIHWPSPNDEVSVEEFMQALLEAKKEGLTREIGISNFTIPLMEKAIAAVGAENIATNQIELSPYLQNRKVVAWAKQHGIHITSYMTLAYGKALKDEVIARIAAKHNATPAQV

SEQ ID NO: 23768 - protein, 750 aa, Nostoc punctiforme PCC 73102
MPDFSIINLAPIGVGFSIIALWIIYYFLNLEVTRRQRAEAILRQQTERERLVNQIAQHIRESLELDEVLTTTVAEVREFLQADRVLIYRLWEDGTGSAITETVLPEYTKILGETFPEEVFPREYHQAYSLGKTRAIANVEQADVESCLADFVKQFGVKAKLVVPILQENREADKQRDSKTPASPPYLWGLLIAHQCDRTRVWESWEIELMKQLATQVAIAIQQSELYKQLQTLNAELEHRVQQRTQELAKANVSLRAEIAERQRTQAALQALITASPRAIFTLDLEGNVKIWNPAAERMFGWTEAEVIDHPNPIFLDDQLEEYNTLQESILQGTTYTRVELRRFKKDGTAIDIVFSAAPLHDSDDSINGMVAVIADITHQKQQEEQVRLLQSVVVNTNDAVVITEAQPIGEPGPNIIYVNEAFTRITGYSLEEVLGKTPRILQGAKTSRAELDKVWTALSCWETVTVQVINYRKDGSEFWNEFSIVPVADQTGWYTHWISVQRDITGRKRLDEIRMALERERELSVLKTRFFSMASHEFRTPLSTALVAAQLLENCQDEWDNSSKRLRNLQRIQLSVKNMVQILDDILTINRAETGKLEFNPKLLDLEEFCSDFVEEMRLSTDERHTLSFVCQGKAVPASVDERLLRSILSNLLLNAIKYSPEGGNVHLSLEFKSDTVILQVKDRGIGIPLADQKQLFEPFHRGKNVKSIPGTGLGLVVVKKCVDLHQGHINITSEIGIGTTCAIALPLL

SEQ ID NO: 23769 - protein, 479 aa, Nostoc punctiforme PCC 73102
MRILFVAAEAAPIAKVGGMGDVVGALPKFLREMGHDVRIFLPYYGFLPDKMEIPKEPIWRGSAMFQEFAVYESVLPGTDVPLYLFGHPVFLPRRIYSGDDEDWRFTFFSNGAAEFAWNYWKPDIIHCHDWHTGMIPVWMHQDPDITTVFTIHNLAYQGPWRWYLEKITWCPWYMQGHNTMAAAVQFANKVNTVSPTYAEQIKTPAYGETLEGLLSFISGKLSGIINGIDTEVYNPEDDKYIAQTFTTETLDKRKANKIALQEEVGLEVNSKAFLIGIVTRLVEQKGIDLILQILDRFLSYTDAQFVLLGTGDRYYETQMWQLASRFPGRMATYLLYNDALSRRIYAGTDAFLMPSRFEPCGISQMMSLRYGSVPIVRRTGGLVDTVSHHDPENAAGTGYCFDRYEPLDLFTCMIRAWEGFRFKPQWQELQKRGMSEDFSWYKSAKEYVKLYRSIYGLPEEEETPKPELVLNEAVTNSKS

SEQ ID NO: 23770 - protein, 212 aa, Triticum aestivum
MEDERSTQSYQGGEAAEQVEVTDRGLLGNLLGKKKAEEDKEKQEELVTGMEKVSVEEPEVKKEEHEDGEKKETLFSKLHRSSSSSSSSSDEEEEEVIDDNGEVIKRKKKKGLKEKLKEKLPGHKDTEGEHVTGLPAPAAPASVQTHHDTDVVVEKIDGDVKTEAAPAVPEEEKKGFLEKIKENLPGRPLEITSAAACRSTIWESSQRVGCIA

SEQ ID NO: 23771 - protein, 441 aa, Corynebacterium efficiens YS-314
MNHVTSAQPESEPPTDEPDAVTLRDELPTPHPVSPVTGLPVTPYKQEDSIGASFPAPSPGTEDSAAFGHESNMRERIATAKRVVVKIGSSSLTSDEGGHTVDPNRINTIVNALQARMEAGSDVIVVSSGSVAAGMAPLGLTTRPTDLSMKQAAAAVGQVHLMHQWGRSFARYGRPVGQVLLTAGDAGQRDRARNAQRTIDRLRMLGVIPIVNENDTVATTGVNFGDNDRLAAIVSHLVSADALVLLSDVDGLFDKNPADPTARFISEVRDGNDLKGVLAGDGGKVGTGGMASKVSAARLASRSGVPVLLTSAANIGPALEHAQVGTVFHPKENRLSAWKFWALYAADTAGKIRLDQGATEAVTSGGKSLLAVGITEVIGDFRAGEIVEILGPNGEIIGRGEVNYDSETLMPMLGMKTQELPDDMQRPVVHADYLSNYASRA

SEQ ID NO: 23772 - protein, 644 aa, Corynebacterium efficiens YS-314
MTTQTPIRTVHPVDQVPPAPKLAALGLQHVLAFYAGAVIVPLLIAQSLNLDAATTIHLINADLLTCGIATLIQSVGIGRHIGVRLPIVQGVTTTAVAPIIAIGLGVTDGEGGVASLPAIYGAVIVAGLFTFFAAPVFTRFLRFFPPVVTGTVLLVMGTSLLSVSANDFVNYADGVPAARDLAYGFGTLLIIILAQRFLRGFLGTLAVLLGLVVGTVTALLLGDANLDEVSNADAFGITTPFYFGLPEFNLVAIFSMIIVMIITMVETTGDVFATGEIVRKRTRRYDITRALRADGLSTFIGGIMNSFPYTCFAQNVGLVRITGVKSRWVAASAAVFMIILGVLPKAGAIVASIPSPVLGGASLALFANVAWVGLQTIAKSDLRDSRNAVIVTSALGLAMLVTFRPDIAQAFPEWARIFVSSGMSVGAITAIILNLLFFHVGRQTGANVAVSGSGEKLTLDQINAMDREQFVDTLSPLFNSRTWPLEIAWESRPFANVTALREAIQISVLTAPLEAREDLIHDYPDMAQLLLADQDEAAEISRDRGSIGLEELDDVDRDKLLTVTSNYRDRFGMPYVAYYDTTDTVDDVVAEGLRRLDNSDEQEHRQALSEIIEIANDRFDIVLEDANPARTAFDRKFTDTDFMS

SEQ ID NO: 23773 - protein, 478 aa, Brassica napus
MALEYDLLNENVKKCQYAVRGELYLRASELQKEGKKIIFTNVGNPHALGQKPLTFPRQVVALCQAPFLLDDPNVGMLFPADAIARAKHYLSLTSGGLGAYSDSRGLPGVRKEVAEFIQRRDGYPSDPELIFLTDGASKGVMQILNCVIRGEGDGILVPVPQYPLYSATISLLGGSLVPYYLDESENWGLDVNNLRQSVAQARSQGISVRAMVIINPGNPTGQCLSEANLKEILKFCYNEKLGLLGDEVYQQNIYQDERPFISSKKVLMDMGSPFSKGVQLVSFHTVSKGYWGECGQRGGYFEMTNFPPRVVERVRKVASIALSPNVSAQIFMGLMVSPPKPGDISYDQFARESKGILESLRRRAKIMTDGFNSCKNVVCNFTEGAMYSFPQIRLPPGALQAAKQAGKVPDVFYCLKLLEATGISTVPGSGFGQKEGVFHLRTTILPAEEEMPEIMDSFKKFNDEFMAQYENGFGYSRM

SEQ ID NO: 23774 - protein, 335 aa, Geobacillus kaustophilus HTA426
MSFLPFDQQKPLDFIAVGRLCIDLNANEIHRPMEETMTFTKYVGGSPANIAIGMARLGMKTGFIGRVADDQMGRFIVRYLKNNGIDTSHVITDKSGSVTGLAFTEIKSPTDCSILMYRDNVADLKLEPNDIDEDYIRRAKCLLISGTALAKSPSREAVFLALDYARRHGTVVVFDLDYRPYTWQSKEETAIYYNLAAEKCDVIIGTREEFDMMERFDGQRRDDEQTARKWFDYNAKIVVIKHGKDGSIAYTKTGETFVGTIFPANIVKTFGAGDSYAAGFIYGLMNDWPIPKAMEYGAAAASIVISSHSCSDAMPTLAQIEQFIEQHRNGSAARK

SEQ ID NO: 23775 - protein, 538 aa, Bacillus sp. PS3
MAKQIKFSEEARRAMLRGVDKLADAVKVTLGPKGRNVVLEKKFGSPLITNDGVTIAKEIELEDPFENMGAKLVAEVASKTNDIAGDGTTTATVLAQAMIREGLKNVAAGANPMGIRRGIEKAVAVAVEELKAISKPIKGKESIAQVAAISAADEEVGQLIAEAMERVGNDGVITLEESKGFTTELDVVEGMQFDRGYVSPNMITDTEKMEAVLENPYILITDKKVSSIQELLPALEQVVQQGRPLLIIAEDVEGEALATLVVNKLRGTFNAVRVKAPGFGDRRKAMLEDIAILTGGEVISEELGRELKSTTIASLGRASKVVVTKETTTIVEGAGDSKRIKAAINQIRAQLKETTSEFDREKLQERLAKLAGGVAVIKVGAATETELKERKLRIEDALNSTRAAVEEGIGAGGGTALMNIHNKVAAIEAEGDEATGVKIVLRAIEEPVRQIAQNAGLEGSIIVERLKNEKPGIGFNAATGEWVDMIEAGIVDPTKVTRSALQNAASVAAMVLTTEACVADKPEENKGNNNMPDMGGMM

SEQ ID NO: 23776 - protein, 167 aa, Citrus sinensis
MASQSKTSVHDFSVKDAKGQDVDLSIYKGKLLLIVNVASQCGLTNSNYTELSQLYDKYKNQGLEILAFPCNQFGAQEPGDNEQIQEFACTRFKAEFPIFDKVDVNGDNAAPLYKHLKSSKGGLFGDSIKWNFSKFLVDKEGNVVERYAPTTSPLSIEKDIKKLLETA

SEQ ID NO: 23777 - protein, 109 aa, Streptococcus oralis
LLYALLHLSGFEDVSMDEVKNFRQWGSKTPGHPEFGHTAGVDATTGPLGQGISTATGFAQAERFLAAKYNREGYNIFDHYTYVICGDGDLMEGVSSEAASYAGLQKLDK

SEQ ID NO: 23778 - protein, 439 aa, Desulfovibrio desulfuricans G20
MLEAANKLGIIFFPAYDWAISPTHPEREERLLYTQDQLREEGLFDIPGITEYKPLVAGREDVERVHFCIPDIERVCTKSHLVSAGGAIQAARLVMEGKEDKAFALVRPPGHHAMKVVHGNRGFCNVNIEALMIEHIREHFGPLRVAVIDTDCHHGDGTQDIYWNDPDTLFISLHQDGRTIFPGTGFPAELGGVNALGRTLNIPLPPRTSDRGFLHVIDHLVLPVLEHFKPDIVINSAGQDNHFSDPITDMRFSAQGYAALNSRLNPDIAVLEGGYAIQGALPYVNLGIALAMAGLDYSSVREPDFDPAAIEQSPRITEYVERLCEEMLKVYFNPPSQPRQGEKSGDWWVRTKDIFYDTDGINESQVESVRICPDCAGVMKIETWSTANPLSLGVQVPQNACEKCRGIGIRTVEEAHVKGNYRYIQLINRKDKQYVQYGF

SEQ ID NO: 23779 - protein, 335 aa, Chlamydia muridarum Nigg
MRIVINGFGRIGRLVLRQILKRNAPIEVVAINDLVSGDLLTYLFKYDSTHGSFASQATFSDGCLVVGERKIRFLAEKDVQKLPWKDLDVDVVVESTGLFVNKDDAAKHLDSGAKRVLITAPAKGDVPTFVMGVNHQKFDPANDVIISNASCTTNCLAPLAKVLLDNFGIEEGLMTTVHAATATQSVVDGPSRKDWRGGRGAFQNIIPASTGAAKAVGLCLPELKGKLTGMAFRVPVADVSVVDLTVKLSSATTYEAVCEAVKHAASTSMRNIMHYTEEAVVSSDFIGCEYSSVFDAQAGVALNDRFFKLIAWYDNEIGYATRIVDLLEYIQGNSK

SEQ ID NO: 23780 - protein, 148 aa, Marsilea quadrifolia
PAKTNEVTEGQENLPKAAAAVGGSKLMEMDKSRAVLQNFDCNLEDKRPVAAELQFERARKRAEIEDIESVVRIKQAEAKMFQIRADEARKEAGGLQRIIVAKREKIEEDFTCKYKKLRLSEAEERRQKRLEELQALENAQNDFHKKKK

SEQ ID NO: 23781 - protein, 330 aa, Staphylococcus aureus subsp. aureus MRSA252
MIDYKSLGLSEEDLKVIYKWMDLGRKIDERLWLLNRAGKIPFVVSGQGQEATQIGMAYALEEGDITAPYYRDLAFVTYMGISAYDTFLSAFGKKDDVNSGGKQMPSHFSSRAKNILSQSSPVATQIPHAVGAALALKMDGKKKIATATVGEGSSNQGDFHEGLNFAGVHKLPFVCVIINNKYAISVPDSLQYAAEKLSDRALGYGLHGEQVDGNDPLAMYKAMKEARDRAISGQGSTLIEAVTSRMTAHSSDDDDQYRTKEEREALKKADCNEKFKKELLSAGIIDDAWLAEIEAEHKDIINKATKAAEDAPYPSVEEAYAFVYEEGSLN

SEQ ID NO: 23782 - protein, 473 aa, Staphylococcus aureus subsp. aureus MRSA252
MSEKQYDLVVLGGGTAGYVAAIRASQLGKKVAIVERQLLGGTCLHKGCIPTKSLLKSAEVFQTVKQAAMFGVDVKDANVNFENMLARKEDIINQMYQGVKHLMQHNHIDIYNGTGRILGTSIFSPQSGTISVEYEDGESDLLPNQFVLIATGSSPAELPFLSFDHDKILSSDDILSLKTLPSSVGIIGGGVIGMEFASLMIDLGVDVTVIEAGERILPTKSKQASQLLKKSLSARGVKFYEGIKLSENDINVNEDGVTFEISSDIIKVDKVLLSIGRKPNTSDIGLNNTKIKLSTSGHILTNEFQQTEDKHIYAAGDCIGKLQLAHVGSKEGVVAVDHMFEGNPIPVNYNMMPKCIYSQPEIASIGLNIEQAKAEGMKVKSFKVPFKAIGKAVIDSHDANEGYSEMVIDQSTEEIVGINMIGPHVTELINEASLLQFMNGSALELGLTTHAHPSISEVLMELGLKAESRAIHV

SEQ ID NO: 23783 - protein, 213 aa, Methanococcus vannielii
MDSAQIQKAVKEARTLAKPRNFTQSVDLIVNLKELDLTRHENRLKEQIVLPSGKGKDTKIAVIAKGDLAAQAAEMGLTVIRQEELEELGKNKKAAKRIANEHGFFIAQADMMPLVGKSLGPVLGPRGKMPTPLPGNANLAPLVARFKKTVAINTRDKSLFQVYIGTEAMSDEEIAANAEAILNVVAKKYEKGLYHVKSAFTKLTMGAAAPISK

SEQ ID NO: 23784 - protein, 137 aa, Saccharomyces cerevisiae
MSNVVQARDNSQVFGVARIYASFNDTFVHVTDLSGKETIARVTGGMKVKADRDESSPYAAMLAAQDVAAKCKEVGITAVHVKIRATGGTRTKTPGPGGQAALRALARSGLRIGRIEDVTPVPSDSTRKKGGRRGRRL

SEQ ID NO: 23785 - protein, 180 aa, Ralstonia metallidurans CH34
MDHGLEIATLGGGCFWCLEAVYQQVAGVRAVESGYTGGHVSQPTYHEVCAGDTGHAEVVRVTFDPSAINYREILEIFFSIHDPTQLNRQGNDVGTQYRSSIFTHSEAQRAVAEYVIGKLAAEHVYDAPIVTQVEPEQPYWPAEASHQNYYQEHPAQGYCAFVISPKLTKFRRDFSHRMRR

SEQ ID NO: 23786 - protein, 588 aa, Candida albicans
MQRVLELLLLSSTALAVIGDGFIALPVHKLQAGEGSAHFPNRLPIFDVVNGVAKSVEDDVNQIIQPIFGNGIFSGGSIQGTHSGNGHSVKYEVSLPSSSAQKGSNGPSSTDNKDTDPSKTGFSLDDLMNSISTDFWNLIGLNKPPTSSDNGSKDADFTPSAVSQVEQPTSKSVESTAPGSASSASSSSSLEAASSSQPSEDSQPSSSANKKTGAFFLSLDNTQTLYTATLKVGSPAQEVQVMIDTGSSDLWFISSGNSQCKVNGGSIDCDKYGVFDKLKSSSWHDNKTDYSISYYDGDKASGTMGQDNITFADGFLIENANFAVIDNTTSSIGVFGVGYPELEAVKSKYTNLPFAMKEQNLIAKVAYSLYLDSRDAVQGYILFGGIDHAFYTGDLKAFDIVQCNDKYVYSQIPLTSVASSLNNYTNAYGLPAGSNHPKVGAVIYNGTDSFNGGVDLKDTLTLLDTGTTYSYLSKDQVESIVGLYGNVTYNDAGKAYEVPCWVGNPGNYLEFNFKNEQYIKVPTSEFVISVGTYASGAELCVFGILPGTHSILGDNFMRSVYAVFDLEDHVISIAQAAYNDNHAVVPIE

SEQ ID NO: 23787 - protein, 209 aa, Candida glabrata
MSVDEVTKKFEETVSVDGPKTVLSDAKDFEVKHPLNTKWTLWYTKPAVDKSESWSDLLRPVTSFQSVEEFWAIVQNIPEPHELPLKSDYHVFRNDIRPEWEDEANAKGGKWSFQVRGRGAEIDELWLRTLLAVIGETIDEEDSQINGVVLNVRKGGNRFALWTKSCDKEPLSNIGARFKQVLKLADEDTLEFFPHSTANDRHSQPTITL

SEQ ID NO: 23788 - protein, 218 aa, Zea mays
APRGEKTGWVMHEFRLEGRLPQPLPRSAKDEWAVCKVFNKELQAARSEPLLAAAGAAELERVGSLGFLNELLDSAELPALVGADVDEVIDFKGPAPASVPDASYLPVKMEEHALLQMQQCQYQPPPPMFYPSQYFSLPAMNSGHLPPAIRRYCKAEQQVVSAQTASVISPSRETGLSTDPNAAGGYAEISSAATPSSSHQFLPELDDPALNLADLWKY

SEQ ID NO: 23789 - protein, 333 aa, Saccharomyces cerevisiae
MGITVIGSLNYDLDTFTDRLPNAGETFRANHFETHAGGKGLNQAAAIGKLKNPSSRYSVRMIGNVGNDTFGKQLKDTLSDCGVDITHVGTYEGINTGTATILIEEKAGGQNRILIVEGANSKTIYDPKQLCEIFPEGKEEEEYVVFQHEIPDPLSIIKWIHANRPNFQIVYNPSPFKAMPKKDWELVDLLVVNEIEGLQIVESVFDNELVEEIREKIKDDFLGEYRKICELLYEKLMNRKKRGIVVMTLGSRGVLFCSHESPEVQFLPAIQNVSVVDTTGAGDTFLGGLVTQLYQGETLSTAIKFSTLASSLTIQRKGAAESMPLYKDVQKDA

SEQ ID NO: 23790 - protein, 279 aa, Oryza sativa
PRVRPRVRIFKTTTGTPFLFPTTGTGAWESALTNTLSPGDKIVSFLIGQFSLLWIDQQQRLNFNVDVVESDWGYGADLAALDYKLRQDPSHSIKALEASKTAKSVRVFFDWKDYLKFYKMGTYWPYTPSIQLLYGLRTALDLIFEEEGLENVIKRHNRLGTATRLAVEAWGLKNCTQKEEWFSDTVTAVVVPPYIDSAEIVKHAWKRYNLSLGLGLNKVAGKVFRIGHLGHLNELQLMGALSGVEMVLKDIGYPVKLGSGVAAAAAYLSNSTPLIPSRI

SEQ ID NO: 23791 - protein, 305 aa, Corynebacterium efficiens YS-314
MSIVGTGNFFGSPEEERDRLVQALQGGKRQTTKPAEIPTVRLNDGNKIPQLGFGVFKVDPAETERVVSEALEAGYRHIDTAAFYNNEEGVGRAIAASGIPREELFVTTKLWPTRFDDAEAGFNESLEKLGMEYVDLFLLHWPAPRNNNFVQAWKVLEQLGERARSIGVCNFLPEHLRQLIDETTIVPAVNQFELHPALQQRDIQEASKAAGIAIESWGPLGQGKYDLSKEAPIAAAARSHGKTLAQVVIRWHLQHGFIVFPKTVNPERMRENLDVLDFELTAEEMVAIDNLERGARGGSHPNDIN

SEQ ID NO: 23792 - protein, 231 aa, Glycine max
  misc_feature (206)..(206): Xaa can be any naturally occurring amino acid
  unsure (1)..(231): unsure at all Xaa locations
MVSLKLQKRLAASVLKCGRGKVWLDPNEVNEISMANSRQNIRKLVKDGFIIRKPTKIHSRSRARRMKEAKRKGRHSGYGKRKGTREARLPTKILWMRRMRVLRRLLRKYREAKKIDKHMYHDMYMKVKGNVFKNKRVLMESIHKSKAEKAREKTLSDQFEAKRAKNKASRERKIARREERLAQGPGEKPSAAPSAPSATASQPAQXIKEIKEVTFLEIGRKGIEYSMWLTS

SEQ ID NO: 23793 - protein, 932 aa, Streptococcus pyogenes M49 591
MIEETSKEGDGHLPLKKLESSNNQAIIAEEVALLKEMLGNITRRMIGDDAFTVIESIMVLSEKQDYIELEKVIANISNQEMEVISRYFSILPLLINISEDVDLAYEINHQNNTDTDYLGKLALTIKDLAGKDNGKDILEQVNVVPVLTAHPTQVQRKTILELTTHIHKLLRKYRDAKAGVINLEKWRQELYRYIEMIMQTDIIREKKLQVKNEIKNVMQYYDGSLIQAVTKLTTEYKNLAQKHGLELDNPKPITMGMWIGGDRDGNPFVTAETLCLSATVQSEVILNYYIDKLAALYRTFSLSSTLVQPNSEVERLASLSQDQSIYRGNEPYRRAFHYIQSRLKQTQIQLTNQPAARMSSSVGLNTSAWPSPASLENPILAYDSPVDFKADLKAIEQSLLDNGNSALIEGDLREVMQAVDIFGFFLASIDMRQDSSVQEACVAELLKGANIVDDYSSLSETEKCDVLVQQLMEEPRTLSSAAVAKSDLLEKELAIYTTARELKDKLGEEVIKQHIISHTESVSDMFELAIMLKEVGLVDQQRARVQIVPLFETIEDLDNARDIMAAYISHDIVRSWIATNRDYQEIMLGYSDSNKDGGYLASGWTLYKAQNELTAIGEEHGVKITFFHGRGGTVGRGGGPSYDAITSQPFGSIKDRIRLTEQGEIIENKYGNKDVAYYHLEMLISASINRMVTQMITDPNEIDSFREIMDSIVADSNTIYRKLVFDNPHFYDYFFEASPIKEVSSLNIGSRPAARKTITEITGLRAIPWVFSWSQNRIMFPGWYGVGSAFKRYIDRAQGNLERLQHMYQTWPFFHSLLSNVDMVLSKSNMNIAFQYAQLAESQDVRDVFYEILDEWQLTKNVILAIQDHDDLLEDNPSLKHSLKSRLPYFNVLNYIQIELIKRWRNNQLDENDEKLIHTTINGIATGLRNSG

SEQ ID NO: 23794 - protein, 600 aa, Silicibacter sp. TM1040
MARGAVQNTASNEERETSRRIGVLKALWPFMRPYRGLIFAALAALTLTAGVSLSLPLAVRRVVDNFRITDAALLNQYFTAAMIMAALLALGTGIRYALVTKLGERVVADIRKAVFDRIIGMSPAFFERIMTGEVLSRITTDTTLIQSVLGSSASIALRNLLIFLGGLVLMLLTSAKLTAMVLLIVPAVIVPILFLGRRLRVISRENQDWIAASSGNAGESLGAVQTVQAFTHEDLSRAHFSEMTETSYEVSKRRIQTRALLTVIVIFLVFSGVVGVLWIGANDVRFGSMSEGALVQFVIYAVMVAGSVAALSEIWSELQRAAGATERLVELLQAEDSVRDPEVAQVLPEPVRGELTFDTVSFTYPSRPDVSALDQVSLTIAPGETVAFVGPSGAGKTTIIQMIQRFYDPQSGEVRLDGVPLQALARDDFRRHIALVPQDPVIFAATARDNIRFGRPDASDAEVEAAAKAAAAHDFIMKLPEGYDAYVGERGVMLSGGQKQRIAIARAILRDAPVLLLDEATSALDAESERLVQAAFEDLSRDRTTIVVAHRLATVKKADRIVVMDQGRIVAVGTHESLVAEGGLYARLARLQFTDGQAQG

SEQ ID NO: 23795 - protein, 586 aa, Triticum aestivum
MDSTDRFDNSPLLDGGGSSQENSTEYTGDGSVCTSGHPASRKHTGNWKASSLTIVCSFCCYLAYSSIGKNLVSYLTKVLHETNLDAARHVATWQGTSYLAPLVGAFVADSYLGKYRTALIACTIFIMGMMMLLLSAALPLISAGPHAWTLWAHPVSSRYTIFLVGLYMVGLGYGAQRPCVTSFGADQFDDTDEVEKTRKSSFFNWHYFAINAGSLIAGTVIVWVQEHEGWLWGFTISTLFVTLGVCVFFLGSIVYRFQKPGGSPLARLCQVVVAASRNFDKVLPCDSSALYEFSGQGSAIEGSRKSEHTTGLGFFDKAAILTLPDCESPGQLNKWKICTVTQVEELKILIRMFPIWSAMVLFAAVQEQMFSTFVEQGMTMEKHVGSFEIPSASFQSIDTLTVIMLVPIYERVLVPVIRKFTGKANGISSPQRIGIGLCFSMLSMVLAALVESNRLQIAQSEGLVHSKAAVPMSILWQGPQYFLLGVAEVFSNIGLTEFFYDESPDAMRSLGMAFSLLNISAGNYLSSFILSLVPVFTARGGSPGWIPDNLNEGHLDRFYLMMAGLSLLNIFVFVFYARRYKCKKAS

SEQ ID NO: 23796 - protein, 152 aa, Corynebacterium efficiens YS-314
MTSLRQDRGRSVDSASMTERTLILIKPDGVTNGHVGEIIARIERKGLKLAALDLRVADRETAEKHYEEHADKPFFGELVEFITSAPLIAGIVEGERAIDAWRQLAGGTDPVSKATPGTIRGDFALTVGENVVHGSDSPESAEREISIWFPNL

SEQ ID NO: 23797 - protein, 334 aa, Geobacillus kaustophilus HTA426
MTRVKVGILGAGGIAKVHTSILKKDERVQIIGVADIVEERAASLAKEAGEAKAVKSLEELFDLGVDAVYVTTPNTMHVEPVLKCLENNVHVFSEKPMATSLEGAEQIRQAAERSKAIYNLGMNRRYASVYKRVKELVDSGEVTPYLAHVKMNRGELLNPPWTANPKVTGGFLYETPFHLMDLCRYLFGEVQTVYCEAKQNISTEELDTFAIMMTFVSGTIVNFVTYAHAGWSFPFESLEVYGKYSTVATQELEKVMYAPGLQQAAHIHDFYQLSIEEKWGYKEEDRLFIDAIIHGTKPPVTAEDGFRSIQLLEAIYESAKTGKIIDFRQTAPSK

SEQ ID NO: 23798 - protein, 346 aa, Bdellovibrio bacteriovorus HD100
MYSGFLKNVWYVGIPSAELAVNKATARKILGEPIVFYRDSKGKVSAMRDICPHRGIPLSYGRVVNDQIECPYHGWKFDGTGMCTEIPSLCPDQELNPNKIKVRSYPVHEAQGLIWVFVGDKDYDVSKAPAIPVMKAFPADVKPNLTYVVNFPCHVDHAVIGLMDPAHGPYVHKSWFWRSEKTMLEKKKKFAPVNYGFQMVRHQPSKNSKAYKILGGTPTTEITFTLPCVRVEHIEVGPRNFYSYTALTPVDENNTRVTQLAYWDIPWLTLLKPAIHQFSKKFLGQDMDAVTKQQDGLRYDPSLMLIKDADTQAKWYYALKTEYHDHLEGKREFNHPVKETELRWRS

SEQ ID NO: 23799 - protein, 319 aa, Glycyrrhiza echinata
MAAAAAAAIEIPTKVLPNSTCELRVPVIGMGSAPDFTCKKDTKEAIIEAIKQGYRHFDTAAAYGSETALGEALKEARDLGLVTREELFVTSKLWVTENHPHLVIPALRKSLETLQLEYLDLYLIHWPLSSQPGKFSFPIQVEDLLPFDVKGVWESMEECLKLGLTKAIGVSNFSVKKLQNLLSVATIRPAVNQVEMNLAWQQKKLREFCTANGIVLTAFSPLRKGASRGPNEVMENDMLKGIAEAHGKSIAQVSLRWLYEQGVTFVAKSYDKERMNQNLQIFDWELTTEDHQKIDQIKQNRLIPGPTKPQLNDLWDDEL

SEQ ID NO: 23800 - protein, 113 aa, Streptococcus oralis
TYVFTHDSIAVGEDGPTHEPVEHPAGLRAMPNLNVFRPADARETQAAWYLAVTSEKTPTALVLTRQNLTVEEGTDFEKVAKGAYVVYENAADFDTILIATGSEVNLAVAAAKE

SEQ ID NO: 23801 - protein, 1044 aa, Geobacillus kaustophilus HTA426
MFLTEEKLEARINELSEHRYREAILIPKFRFLVDEKGEVGARSPETKEWKEIRLGDYWSGRDVYAWLQADIDIPEQWKGKEIVGLFDFGKTGEGNNSGFESLLYLNGSPYQGVDSNHMEVFFPKGSAGAKISLTFRLWSGLEGGGIPKSQEHKIKRAEVAWLDEVTDDLFFTGKAILGTVKVLGQHSPERQLLLSLLDRAFRQIDWSKPKSDSFYNSVAIALEMLKDELKRMEKKHPVTIRCIGHTHIDVAWLWRLKHTREKAARSFSTVLRLMEKYPEYIFLQTQPQLYEYIKSDYPEIFEQIRKRVAEGRWEAGGAMWLEADCNIPSGESLVRQILMGTRFLRKEFGVECKYLWLPDVFGYNWALPQILKKSGIHAFMTTKISWNQYNRMPHDTFIWRGIDGSEILTHFITTPEPNKNWWFYTYNGVITPETVQGIWEAYRDKAINQELLLSYGYGDGGGGVNREMLEMRRRLNDIPGLPNVETGRADEFFERLNEKIRNTDQYVHVWDGELYLEYHRGTYTSQAYNKRMNRKMELLYRETEWMGIVSATLNSDWSRYPFERLNEGWKIILRNQFHDIIPGSSIREVYEDSREEYEKAEKYALSAWKNLSESIIVEKKGDTVIVFNSSPWVRTDLVRIPATTKTKKGIWKDVSGRELKAERVGDNWVILVEDVPPLGFSTIRFYDVEADNTLVQTNMFHVGSSEVISPYYKIKWNDKGQIISIYDLQAKREVLDDGKCGNVLQVFEDKPLRFDAWDIDIFYQEKKREVEDLQHVSIKEITSLYAVIHFEWKYMDSIIKQDMILYTHSRRIDFKTEVDWKEQNQLLKVAFPVKIRSTLATYDIQFGNVKRPTHWNTSWDYAKFETVAHQWADLSETGYGVSLLNDCKYGYDIKDNVIRLSLIKSATYPDYQQDQGYHIFTYSLLPHQGDWVEGNTVKEAWYLNNPLTYAVGEPIRKKYSLFGTNTDNIMVDVVKRAEDSNRIVLRLHEFTGRRNKVYITSDLPIFAWQECDLMEREVGEGTISEKLEFDINPYEIKTFLIDLK

SEQ ID NO: 23802 - protein, 593 aa, Pinus sylvestris
MCGILAVFGCLDASQAKRVRVLELSRRLRHRGPDWSGLYQSGHSFLAHQRLAIVDPASGDQPLYNEDRQIVVTVNGEIYNHEKLREQLKSHKFRTGSDCEIVAHLYEDYGEEFVNMLDGMFSFVLLDTRDQSFIAARDAFGITPLYIGWGFDGSVWFASEMKALHDDCESFESFPPGHIYSSKQGGLRRWYNPPWYSENVIPSSPYDPLVLRRAFEKAVIKRLMTDVPFGVLLSGGLDSSLVAAVASRYLAATKAGKQWGDKLHSFCVGLKGSPDLKAAKEVAEYLGTVHHEFHFTVQDGIDAIEDVIYHVETYDVTTIRASTPMFLMSRKIKSLGVKMVLSGEGSDEIFGGYLYFHKAPNKEEFHQETCRKIKALHMYDCLRANKSTSAWGVEARVPFLDKEFVNVAMDIDPERKMVKPDIGRIEKWVLRRAFDDEQNPYLPKHILYRQKGQFSDGVGYSWIDGLKSHAAEHVTDTMLRNAKYIFPHNTPTTKEAYYYRMIFERFYPQNAARLTVPGGPSVACSTAKAVEWDAAWAHNLDPSGRAALGVHASAYQECNAGANDGTGNGNVNTFSKMPGREASVDAREVLIKG

SEQ ID NO: 23803 - protein, 396 aa, Thermoplasma volcanium GSS1
MDHAAFEKEIDEFNERMIEIRRDLHEHPELSYKEVRTAKLVADTLRSFGIEVRENVGGTGVVGLLRGKKGNVTIGLRADMDALPVQEQTGLPFASKNSGVMHACGHDSHVAMLIGAAYVLSKHGDELDGNVKFLFQPAEEDGGRGGALPMIEDGALENPHVDHVFGLHVLGDFPAGYFAIRGGPIMAAPDSFKIEVHGRGGHGSAPWDTVDPIFVSSQIIQALYGMRSRNVDQRDPLVISVCSVHSGTKDNIIPDNALLEGTLRTLDEDVRADMKKKISNTAEAVAGAFGAKADVSFIENAYPVTYNDPAITEEVKSILSSIKGMKTMETKPLLGGEDVSRFLQRAPGTYYFLGTRNEKKGIIYPNHSSKFTVDEDYLKYGALSHVLVAMHFAGKK

SEQ ID NO: 23804 - protein, 377 aa, Triticum aestivum
MDHRLVAPLLVLLGLLLSPAPAAAAAGDEEPLIRQVVGAADPLDNDLELDSQFLGFVQRFGKTYRDAEEHAHRLSVFKANLRRARRHQMLDPSAEHGVTKFSDLTPAEFRRTFLGLKTTRRSFLREMAGSAHDAPVLPTDGLPEDFDWRDHGAVGPVKNQGSCGSCWSFSASGALEGANYLATGKMEVLSEQQLVDCDHECDPAEPDSCDAGCNGGLMTSAFSYLLKSGGLEREKDYPYTGKDGTCKFEKSKVAASVQNFSVVAVDEEQIAANLVKYGPLAIGINAAYMQTYIGGVSCPYICGRHLDHGVLLVGYGASGFAPSRFKEKPYWIIKNSWGENWGDKGYYKICRGSNVRNKCGVDSMVSTVSAMHASKEE

SEQ ID NO: 23805 - protein, 518 aa, Zea mays
  misc_feature (86)..(86): Xaa can be any naturally occurring amino acid
  misc_feature (453)..(453): Xaa can be any naturally occurring amino acid
  unsure (1)..(518): unsure at all Xaa locations
MQFALALDTNSGPHQIRSCEGDGIDRLEKLSIGGRKQEKALRNRCFGGRVAATTQCILTSDACPETLHSQTQSSRKNYADANRVSXIILGGGTGSQLFPLTSTRATPAVPVGGCYRLIDIPMSNCFNSGINKIFVMSQFNSTSLNRHIHRTYLEGGINFADGSVQVLAATQMPEEPAGWFQGTADSIRKFIWVLEDYYSHKSIDNIVILSGDQLYRMNYMELVQKHVEDDADITISCAPVDESRASKNGLVKIDHTGRVLQFFEKPKGADLNSMRVETNFLSYAIDDAQKYPYLASMGIYVFKKDALLDLLKSKYTQLHDFGSEILPRAVLDHSVQACIFTGYWEDVGTIKSFFDANLALTEQPSKFDFYDPKTPFFTAPRCLPPTQLDKCKMKYAFISDGCLLRECNIEHSVIGVCSRVSSGCELKDSVMMGADIYETEEEASKLLLAGKVXVGIGRNTKIRNCIIDMNARIGKNVVITNSKGIQEADHPEEGYSYYIRSGIVVILKNATINDGSVI

SEQ ID NO: 23806 - protein, 260 aa, Brassica napus
  misc_feature (178)..(178): Xaa can be any naturally occurring amino acid
  misc_feature (230)..(230): Xaa can be any naturally occurring amino acid
  unsure (1)..(260): unsure at all Xaa locations
MEACLRCSRGGSNLIEALRPIRKFSGSLRSSSSSISFSTEDKPVKRAYDGLLLDAGGTLLQLSEPVHETYASLGLKYGLKTTPAEIKQGFKRAFASPWPEKLRYQGDGRPFWKLVVSEATGCSDNDYFEEVYQYYANGEAWHLPDGAYETMSLLKNAGVKMAVVSNFDTRLRKLLKDXNVIDMFDAVIVSSEVGYEKPDGRIFKCALEQISVDANRAVHVGDDEGADKGXANAVGIDCWLWGKDVQTFSDIQDRILVSEH

SEQ ID NO: 23807 - protein, 1110 aa, Desulfovibrio desulfuricans G20
MSIMIEPAGLDPQWYRDAIIYELHIKSFHDSDGDGMGDMAGLIEKLDYLQDLGVTALWLLPFYPSPLRDDGYDIADYMSINPDYGSMADFRKLLREAHSRGLRVITELVLNHTSDQHAWFRRARRAPAGSEERDFYVWSDTSDRYKDARIIFKDFEPSNWSWDPVARAYYWHRFYHHQPDLNYENPAVHKAMFRVIDFWLDMGVDGVRLDAVPYLYEEEGTNCENLPRTHDFLKALRSHIDSRFQGRMLLAEANQWPEDAARYFGDGDSCHMAFHFPLMPRMFMAIEMEDRHPVIDIMEQTPELPDGCQWAIFLRNHDELTLEMVTDEERDYMYRMYARDPRARINLGIRRRLAPLLGNDRRRVELLNVLLFTMPGTPVLYYGDEIGMGDNYYLGDRDGVRTPMQWSADRNAGFSRSNPQRLFLPVVIDPEYHYEAVNVETQQSNKSSLLWWMKRIIAMRRRYTAFSRGGISFLRPENSRVLAYMRSSGEEHVLVVTNLSRHAQAASLDLSGWEGYRPVEVFSNTRFPAVRQPAYTITLNPYGYYIFHMRREEAAEALTGLFSPPMLMPVSGARFLDVEVREALQRRVLPGYLTRRGLLGTSAVQLREAVILEAVPVGGKGAPSWLLIVEARYQERQPEWFGMLVSLLAGEPARQTVREAPVHLMCTFGEDAPEAVLVESFDASCRCGALLQLVSRTQTVKGRHGELAVAPAGGTRGRVRAACAEDAPALWKPHIHATSVVCGESVLFKVYRRMDEGVNPDVELLRFLTEEAGYPHVPAYMGVVEYRRSRTSSMAVAMLHEYVQAQGDAQEMCRDMVRRFFDRVLAARGEMDIRPRLYARSPVEAAGRPLPQEYRELMGDMDFAGMQLLGRRVGELHRALAFSSEDSAFAPEPFSTLYQRSVYQGMQSRVKQVLTRLERSLALLPESARDDAARVLELREEALRRMRGFLTRKLDCLKIRVHGNLHLGNVLRSGREYVIVNFEGRPDKSLSERRLKRSPLRDVADLVRSVHYTVLTVLMHESVLRPEDRAFLEPWADLWRIEASGAFMTTYLEAVGGSRLVPENEQGVQVLLEAFLLEKAFMELDAELKAPSGMVGLPLAAIITLLGAEG

SEQ ID NO: 23808 - protein, 567 aa, Thermoplasma volcanium GSS1
MEKIKEDVIVLGGGMAGLRAAVAAAEYNKNISVGVVSKLYPLRSHSVSAEGGTSAVLNPKDSFDLHAYDTIKGSDYLADQDAVEEFVRLVPEQIYTTDHWGCPWSRNPDGTISQRDFGALSFPRATFAADKTGFHVMQTLFSRALRYENIHFYNEYFATSMFLDNGRMNSLTTINLRTGDFVVFQSKAFIFAAGGAGRLYQFSTYAHSVSGDGDAIAYRAGIPLKDMEFIQFHPTGLVPSGILITEGARADGGYLLNGENKRFMQAYAPNKLEKASRDVVSRAIMWEIEAGRGVKGEYGDMEYVWLDLRHMADVLDERLPMITEIAKKFNGIDAHTELIPVHPATHYTMGGIDSNVRTTTDYSGIFAAGENACVSIHGANRLGSNSTNECLALGNVAGVSAAKYAMEHDIPDLVVSNVENEEKRIWDDLLKRNGGENVAKIREDLRINMDKNVGIFRDENGLNTSLKNIKQLKERYNNISIQDKSSTFNMELEWALEVGFMLDIAEVITTGALLRKESRGAHYRKDYPNRDDENYLKHTIATYTKDGPRITYKPVVITKWQPTVRTY

SEQ ID NO: 23809 - protein, 264 aa, Capsicum annuum
MCGGAILADIIPRRDRRLSSTDLWSICSDDFWPNSSFSKPFSTQNVSPAKPKRTQPSAGNEQIQKAKKRQRKNLYRGIRQRPWGKWAAEIRDPRKGVRVWLGTFNTAEEAARAYDKEARKIRGEKAKVNFPNEDDHYSYPEPPPLAAYNNTTFYNNCYAFENNEPVIEYAIANNNDQNGLIKEVENMNGRVVEEEEKTEIQVQKLSEELMAYESLMKFYEIPYVDGQSVAAMANPAAEAVLGGGLMELWSFDDVSRQQPSYNVV

SEQ ID NO: 23810 - protein, 449 aa, Enterococcus faecalis V583
MKTYDYIVIGGGSGGIASANRAGMHGANVLLIEGNEIGGTCVNVGCVPKKVMWQASSMMEMMERDTAGYGFDVEIKNFSFKQLVENREKYIDFLHGAYNRGLDSNNIERIHGYATFTGEQTIEVNGTEYTAPHILIATGGRPKKLGIPGEEYALDSNGFFALEEMPKRVVFVGAGYIAAELAGTLHGLGAETHWAFRHERPLRSFDDMLSEKVVERYQEMGMQIHPNATPAKIEKTAQNEYVITFENGESITTDAVIFGTGRQPNTDQLGLENTKVALDEKGYVKVDKFQNTTQNGIYAVGDVIGKIDLTPVAIAAGRRLSERLFNGQTDLYLDYNLVPTVVFTHPPVATIGLTEKAALEEYGEDQVKIYRSSFTPMYFALGEYRQKCDMKLICVGKEEKIVGLHGIGIGVDEMLQGFAVAIKMGATKADFDNTVAIHPTGSEEFVTMR

SEQ ID NO: 23811 - protein, 180 aa, Arabidopsis thaliana
METDSIDSVIDDDEIHQKHQFSSTKSQGGATVVISPATSVYELLECPVCTNSMYPPIHQVFQCFGQYFCLHFEAFQLGMAPVYMAFLRFMGDEDDARNYTYSLEVGGSGRKQTWEGTPRSVRDSHRKVRDSHDGLIIQRNMALFFSGGDKKELKLRVTGRIWKEQQNPDSGVCITSMCSS

SEQ ID NO: 23812 - protein, 251 aa, Oryza sativa
SPGCRWNRSSQGHNVVLMSNHQTEADPASVALLLERSNPWISENIVYVAGDRVVTDPLCKPFSMGRNLICVYSKKHMNDFPELVDMKRRANTRSLKEMALLLRGGSQIIWIAPSGGRDRPDPLTGEWHPAPFDASAVDNMRRLLEHSGVPGHIYPLSLLCYEVMPPPQKVEKEIGEQRVISFHGVGLSVTEEIKYSDITVHTQNVDECREKFSESLYNSVVDQYNALKSAIFRGRGADSSDSAISLSQPWR

SEQ ID NO: 23813 - protein, 369 aa, Avena sativa
MDGAPVAEFRPTMTHGGRFLLYNIFGNQFEITSKYQPPIMPIGRGAYGIVCSVMNFETREMVAIKKIANAFDNNMDAKRTLREIKLLRHLDHENIVGLRDVIPPSIPQSFNDVYIATELMDTDLHHIIRSNQELSEEHCQYFLYQLLRGLKYIHSANVIHRDLKPSNLLLNANCDLKICDFGLARPSSESDMMTEYVVTRWYRAPELLLNSTDYSAAIDVWSVGCIFMELINRAPLFPGRDHMHQMRLITEVIGTPTDDDLGFIRNEDARRYMRHLPQFPRRPFPGQFPKVQPAALDLIERMLTFNPLQRITVEEALEHPYLERLHDVADEPICTDPFSFDFEQHPLTEDQMKQLIFNEALELNPNFRY

SEQ ID NO: 23814 - protein, 362 aa, Oryza sativa (japonica cultivar-group)
MDRAALTVGPGMDMPIMHDGDRYELVRDIGSGNFGVARLMRSRADGQLVAVKYIERGDKIDENVQREIINHRSLRHPNIIRFKEVILTPTHLAIVMEYASGGELFERICNAGRFSEDEARFFFQQLISGVSYCHSMQVCHRDLKLENTLLDGSTAPRLKICDFGYSKSSVLHSQPKSTVGTPAYIAPEVLLKKEYDGKIADVWSCGVTLYVMLVGAYPFEDPDEPKNFRKTIQRILGVQYSIPDYVHISPECRDLIARIFVANPATRISIPEIRNHPWFLKNLPADLMDDSKMSSQYEEPEQPMQSMDEIMQILAEATIPAAGSGGINQFLNDGLDLDDDMEDLDSDPDLDVESSGEIVYAM

SEQ ID NO: 23815 - protein, 480 aa, Avena sativa
MVSSEIPSVTTTHTHGPKLFRGMILLPKGPPDVILPENVEFDFNDVFGPVAVHTPTEASIVTPDSPAPLAESGEEVYNDPVVITKRSHSLVGPTLLVSQSLPLSKLTLHESESSSDLLECLSKEKQSNQEALSDEELSNTKENEAVGLDNFEVLKLVGQGAFGKVYQVRMKGTSEIYAMKVMRKDKILEKNHAEYMKAERDILTKVDHPFVVQLRYSFQTKYRLYLVLDFVNGGHLFFQLYQQGLFREELARIYTAEIVSAVAHLHANGIMHRDLKPENILLDARGHAMLTDFGLAKEFDENTRSNSMCGTVEYMAPEIVQGRGHDKAADWWSVGILLFEMLTGKPPFFGGNRDKIQQKIVREKMKLPSYLSSEVHSLLKGLLHKEAGKRLGSGLGGSDEIKNHKWFKAVNWKRLEARQIQPSFCPNVAGQTCIANFDECWTSMPVLDSPVASPVAADSNFVGFSYVRPAPFFQKPSPLG

SEQ ID NO: 23816 - protein, 685 aa, Leptospira interrogans serovar Copenhageni str. Fiocruz L1-130
MKMYKNLADMLIQSTEKYGDRPVFWSKGEDKEFHPTSYNQLYDMGIALAEALIQLGLKAREHVGVLADNRLEWILTDYAVQFSGAANVPRGTDVTESELEYILNHSEAKIVFIENDKMLEKYNKVKSKVPKVETIIIMDKSSSAKGKNIHKIYDLVEEGRSLRAKGSKKAEKRIEEIKPEDLFTLIYTSGTTGMPKGVMLMHSNMIHQMVYVVPMLLTEIKPTDSMLSILPIWHIFERINEYGAISSGIQTYYTKVADLRNDLAKAKPSFMAFAPRVWENVYANIYNKVNDPKQTPPIRRVLFKLAYFFSKHYNASRRFLNGLEVDYENRNIMKSLVIGIRSLIVLLLTGPFTLSAISILAYLTLPVYGIHLPNWLFFSLVGLGLVFNAKTLDTIVLSKIRAATGGRLKASLSGGGALQSHVDNFFNDIGMLVLEGYGMTETSPVISVRPFVKPIIGSVGFLVPKSELIIKDENGNVLTHINDQYEVLAGKLGQKGIVFVKGPQVMKGYYKNPEVTKKTIVDGWMNTGDIGFINFKKTLTLTGRAKDTVVLLGGENVEPVPIENKMDESPFIKQSMVIGQDQKVLGAIIVPDMEHLGVWCKENGIDSSKIDEIIKNPKVIDFYKKEVRSYNSTKTGFKSFEQVQHVILAKKPFEVGDELTNLLKMKRHVITEKYSKEIKKIYEKD

SEQ ID NO: 23817 - protein, 220 aa, Oryza sativa; identical to SEQ ID NO: 921

SEQ ID NO: 23818 - protein, 166 aa, Magnetococcus sp. MC-1
MQMGNAMKQLMASLALRELWQGMAVTLRYMFRPNITIQYPEERTPYSPRFRGIHVLRRYEGGEERCVACKLCEAICPAQAIYIEIDTESRADKRLTKVYDIDLFKCIYCGLCEEACPVEAIVMGPYLDMAYEDRNARFYKKDQLLANGESWRAEIDARLNADAKYR

SEQ ID NO: 23819 - protein, 483 aa, Bacillus subtilis
MSSNKLTTSWGAPVGDNQNSMTAGSRGPTLIQDVHLLEKLAHFNRERVPERVVHAKGAGAHGYFEVTNDVTKYTKAAFLSEVGKRTPLFIRFSTVAGELGSADTVRDPRGFAVKFYTEEGNYDIVGNNTPVFFIRDAIKFPDFIHTQKRDPKTHLKNPTAVWDFWSLSPESLHQVTILMSDRGIPATLRHMHGFGSHTFKWTNAEGEGVWIKYHFKTEQGVKNLDVNTAAKIAGENPDYHTEDLFNAIENGDYPAWKLYVQIMPLEDAKTYRFDPFDVTKVWSQKDYPLIEVGRMVLDRNPENYFAEVEQATFSPGTLVPGIDVSPDKMLQGRLFAYHDAHRYRVGANHQALPINRARNKVNNYQRDGQMRFDDNGGGSVYYEPNSFGGPKESPEDKQAAYPVQGIADSVSYDHNDHYTQAGDLYRLMSEDERTRLVENIVNAMKPVEKEEIKLRQIEHFYKADPEYGKRVAEGLGLPIKKDS

SEQ ID NO: 23820 - protein, 63 aa, Arabidopsis thaliana
KHYRGVRQRPWGKFAAEIRDPAKNGARVWLGTFETAEDAALAYDRAAFRMRGSRALLNFPLRV

SEQ ID NO: 23821 - protein, 470 aa, Brassica napus
MERGIARLAVLSAHLEVSDQVILPAIEPWCTSGASELHGSLKGSLTIVDERTGKKYQVPVAEDGTVKSIDLKKITMGKDDKGVKLYDPGYLNTAPVRSSISYIDGDEGILRYRGYPIEELAESSTFLEVAYLLIYGNLPSKSQLADWELAISQHSAVPQGLLDMIQSMPQDAYPTGAFVSAMSALSLFHPDANPAHMGQDVYKSAQVRDKQIFRILGQASTIAAAAFLRTAGKPHVLPLSNLSYTENLLYMLNSMGNRFYKPNPRLARVMDTIFILHCEHEMNCSTAAARHLSSSGVDVYTAIGGATGAINGPLHGGAVEAVPKMLSEIGSVENIPEFIECVKNKKRKLYGFGHRIYRNYDPRAKFLKKLADEVFSIVGKDPLVEVAVALEKTALSNEYFVRRKLYPNVDFYSGLVYRAMGVPSHFTRVSRLAGYLSHWRESLDDPDTKIMRPQQAYNGVWLRHYEPVRE

SEQ ID NO: 23822 - protein, 473 aa, Arabidopsis thaliana
MEACLRCSRGSYLIEAMRPLSSSLRPSSSVSFSTGKPIKRAYDGLLLDAGGTLLQLSKPVHETYASLGQKYGLKTTPAEIKEGFKRVFSAPWPEKLRYQGDGRPFWKLVVSEATGCSDNDYFEDVYQYYANGEAWHLPEGAYETMSLLKDAGVKMAVVSNFDTRLRKLLKDLNVIDMFDAVIVSAEVGYEKPDERIFKSALGIGILHSKLNAEQISVDVNRAVHVGDDEGADKGGANAIGIACCRAFWPRKDKERRHGKKCYRQIKGKPYPKSRYCRGVPDPKIRIYDVGMKRKGVDEFPFCVHLVSWEKENVSSEALEAARIACNKYMVKSAGKDAFHLRIRVHPFHVLRINKMLSCAGADRLQTGMRGAFGKALGTCARVAIGQVLLSVRCKDAHGHHAQEALRRAKFKFPGRQKIIVSRKWGFTKFNRADFTKLRQEKRVVPDGVNAKFLSCHGPLANRQPGSAFLPAHY

SEQ ID NO: 23823 - protein, 433 aa, Zymomonas mobilis
MTNKISSSDNLSNAVSATDDNASRTPNLTRRALVGGGVGLAAAGALASGLQAATLPAGASQVPTTPAGRPMPYAIRPMPEDRRFGYAIVGLGKYALNQILPGFAGCQHSRIEALVSGNAEKAKIVAAEYGVDPRKIYDYSNFDKIAKDPKIDAVYIILPNSLHAEFAIRAFKAGKHVMCEKPMATSVADCQRMIDAAKAANKKLMIGYRCHYDPMNRAAVKLIRENQLGKLGMVTTDNSDVMDQNDPAQQWRLRRELAGGGSLMDIGIYGLNGTRYLLGEEPIEVRAYTYSDPNDERFVEVEDRIIWQMRFRSGALSHGASSYSTTTTSRFSVQGDKAVLLMDPATGYYQNLISVQTPGHANQSMMPQFIMPANNQFSAQLDHLAEAVINNKPVRSPGEEGMQDVRLIQAIYEAARTGRPVNTDWGYVRQGGY

SEQ ID NO: 23824 - protein, 395 aa, Chlamydophila pneumoniae AR39
MSFFNHIPTFSPDAILGLQNVFFADKRPEKVNLVIGVYEHPQKRYGGLSCIRKAQTVILEEEQNKSYLPISGLQIFLDEMRELVFGAVDPSAIVGFQSLGGTGALHLGARLLSVAKGSGKVYVPEQTWSNHIRIFSQEGLEVIRYPYYSKEQKQLLFEPLIAFLKEVEKNSVILLHGCCHNPTGVDFTEDMWKELAILMKERELIPFFDTAYQGFAHGIELDRKPIEIFISEGNTVLVAASSSKNFALYGERVGYFAVHSTFTDELVKIHSFLEEKIRGEYSSPQRWGVEIVSTILSNPYLKEEWQSELNFIRESLGKMRTRFVQALRKVAGHTFDFLLSQHGFFAYPGFSDKQVLFLREQHAVYTTAGGRMNLNGITEKNIDHVVQSFIQAYEL

SEQ ID NO: 23825 - protein, 323 aa, Corynebacterium efficiens YS-314
MNSPKKITVTGAAGQIAYSLLWRIANGEVYGADTPVELNLLEIPDALGGAEGVAMELSDSAFPLLHNINITADLNEAFDGANAAFLVGAKPRGKGEERAALLSNNGKIFGPQGKAINDHAAQDIRVLVVGNPANTNALIAMSNAPDVPQSRFNAMMRLDHNRAISQLATKTGRLSSEFQDVVVWGNHSAAQFPDITYATVGGEKVSDLVDHDWYVNEFIPRVAKRGAEIIEVRGKSSAASAASSAVDHMRDWIQGTETWASAAIPSTGAYGIPEGIILGLPTVSRNGEWEVVEGLEINDFQRARIDANVEELQGEREAVKDLL

SEQ ID NO: 23826 - protein, 806 aa, Pisum sativum
MATDRLTRVHSLRERLDETLTANRNEILALLSRIEAKGKGILQHHQVIAEFEEIPEENRQKLTDGAFGEVLRSTQEAIVLPPWVALAVRPRPGVWEYLRVNVHALVVENLQPAEFLKFKEELVDGSANGNFVLELDFEPFTASFPRPTLNKSIGNGVQFLNRHLSAKLFHDKESLHPLLEFLRLHSYKGKTLMLNDRIQNPDSLQHVLRKAEEYLGTVAPDTPYSEFEHRFQEIGLERGWGDTAERVLESIQLLLDLLEAPDPCTLETFLDRIPMVFNVVILSPHGYFAQDDVLGYPDTGGQVVYILDQVRALESEMLNRIKKQGLDIVPRILIITRLLPDAVGTTCGQRLEKVYGTEHCHILRVPFRDQKGIVRKWISRFEVWPYLETYTEDVAHELAKELQGKPDLIVGNYSDGNIVASLLAHKLGVTQCTIAHALEKTKYPESDIYWKKFEEKYHFSCQFTADLFAMNHTDFIITSTFQEIAGSKDTVGQYESHTAFTLPGLYRVVHGIDVFDPKFNIVSPGADQTIYFPYTETSRRLTSFYPEIEELLYSTVENEEHICVLKDRSKPIIFTMARLDRVKNITGLVEWYGKNAKLRELVNLVVVAGDRRKESKDLEEKAEMKKMYEHIETYKLNGQFRWISSQMNRVRNGELYRVICDTKGAFVQPAVYEAFGLTVVEAMATGLPTFATLNGGPAEIIVHGKSGFHIDPYHGDRAADLLVEFFEKVKTDPSHWDKISQGGLQRIEEKYTWQIYSQRLLTLTGVYGFWKHVSNLDRLESRRYLEMFYALKYRKLAESVPLAVEE

SEQ ID NO: 23827 - protein, 580 aa, Desulfitobacterium hafniense DCB-2
MNILKRFISYYKPYRLLFYTDMLCAIIVSAIDLSFPMILSYLINRVFIQGREAILNTIMVVGIALLAMYIIKYFCQYFIVSYGHIMGAKMETDMRRDLFTHLQKLSFSYYDKRNTGELMSRLVADLFDISELAHHGPENLFISILKIVGSFVILMTLNVQMTLALSIVTLVIIVFSLYKNKVMQPIFSDNRVKIAKVNSSVQDSLAGIRVVQSFANEGIEKKKFAHSNEAFLESKTGAYKVMGGFHAWNSFFEGLLYIVVVVTGGIHIANGTLRPSDLAVYILYINIFINPIDVLINFTEQFQKGYAGFKRFVEVLETHPDIKDEPGAKPLTQIKGDIEYQSVSFGYDEEESHVLDQVSLKIKAGETIALVGPSGGGKTTLCSLLPRFYEVTSGTITIDGQDIRKVTLASLRNAIGVVQQDVYLFDGSIKQNIAYGKAGATDEEIIEAAKKANIHEFISSLEEGYDTYVGERGVRLSGGQKQRLSIARVFLKNPPILILDEATSALDNESERYIQKSLEELAQNRTTIVIAHRLSTIRNADEIIVITDEGIKERGNHQELLEIEGIYAHYYRMQFEGLEG

SEQ ID NO: 23828 - protein, 240 aa, Rhodopseudomonas palustris CGA009
MNTNKYLAEMIGTFWLTFAGCGSAVIAAGFPQVGIGLVGVSLAFGLSVVTMAYAIGHISGCHLNPAVTLGLAAGGRFPVKQIAPYIIAQVLGAIAAAALLYLIASGAAGFDLAKGFASNGYGAHSPGQYNLVACFVMEVVMTMMFLFVIMGSTHGKAPAGFAPLAIGLALVMIHLVSIPVTNTSVNPARSTGPALFVGGWAIGQLWLFWVAPLLGGVLGGVIYRVLSPEPTGVVEGVKAR

SEQ ID NO: 23829 - protein, 449 aa, Burkholderia vietnamiensis G4
MEIRKINVYDIIDSRRIGRRQYFIVAFCALLMLFDGFDTQVISFIVPVLAKEWQLPKAVFGAIFSAVFFGLLIGNFGIPFATRRFGTKKIAFVATAAFGLFTVLTVFATSVPQLIALRFLTGIGLGAATPCAVGLVSEFSPKRTRATFVILVYMGYALGFIFAGICSSALIPRFGWEGPLWLGGLAALGLTVLLVPLLPESVAYLSANAQPGELLRATKRLFPDFTLQADSELVTHEEKPADASVLGLFSAQFRVGTFLLWAVFAINLAAFYFLQSWLPTVLASISFPPALVVWATITVIIGGMVASLLMGPIMDRTSPYRILSAVYVGGAVSMYAISIAIGSSHLALLTTIFFCGFCISGGQTCAIALCTLFYSPELRAPGVAWAYGFGRLGAAGGTYLAGVLYANNWSVDAMFRVAAAPILIAAACVALMGACYGLTKNGLKKSFSA

SEQ ID NO: 23830 - protein, 325 aa, Pseudomonas fluorescens Pf-5
MSTPLTTDQLLHAYRVMRTIRAFEERLHVEFATGEIPGFVHLYAGEEASAAGVMAHLRDDDCIASNHRGHGHCIAKGVDVYGMMAEIYGKKTGVCQGKGGSMHIADFEKGMLGANGIVGAGAPLVVGAALAARLQGTDGVSVVFFGDGGSNEGAVFEAMNMASVWNLPCLFIAENNGYAEATASNWSVACDHIADRAAGFGMPGVTVDGFDFFAVHEAAGAAVERARAGEGPSLIEVKLTRYYGHFEGDAQTYRAPDEVKHYREHNDCLMQFRERTTRSGLVQASQLDQIDADVEALIEDAVRKAKSDPKPSPADLLSDVYVAYP

SEQ ID NO: 23831 - protein, 658 aa, Schizosaccharomyces pombe
MERGTLQPRKKAPNGYGITPIVAHKTGEPVRYEVEDDLRKLKPSRTAPKPPAINTNLAEDTFSGFPLSQSRTTVSRVSLGSRQHSSSSIRKLQTNVSDVRSYDERNQKKSAFENFVSSMSSFLTGGGSSPTSSYGSGSASPRKSTVISSPFDPKHVTHVGFNYDTGEFTGMPTEWQALLKVSGITKSEQVQHPQAVLDAMAFYSQSKKYLEEGAKPPFPRESTEKPLLSVSALSSSSHLQPTSATSSSSRLYPSRPAPTPPASSSSSPLLSSQTVKTTTSNASRQPSPLVSSKSTDNIIRSHSPVLLTPQTLSTSETKHIRPNNSTPYQRRAETSTKPKAVATPQKVEAPSAPRLQKRAPRQQSNDSAVLAKLQSICNPKNPTLLYRNFVKIGQGASGDVYSARQVGTNLSVAIKKMNINQQPKKEFIVNEILVMKSHHHKNIVNFIDTFFYKSELWMVMEYMRGGSLTEVVTNNTLSEGQIAAICKETLEGLQHLHENGIVHRDIKSDNILLSLQGDIKLTDFGFCAQIDSNMTKRTTMVGTPYWMAPEVVTRKEYGFKVDVWSLGIMAIEMVEGEPPYLNENPLRALYLIATIGTPKISRPELLSSVFHDFLSKSLTVNPKQRPSSGELLRHPFLKQAVPVSSLIPLIKSIHHSGK

SEQ ID NO: 23832 - protein, 458 aa, Streptomyces cattleya
MAGFLLRCRPEGAVPQHLGAGTGLATEVTRDGADVLVVHGDPLTPGGQAPIHAPLDELIAWTVRAYSRFCAVLVRDDRAVLWSDNGATCPLHYARGADDTLLVATSAGALLPLLGTAPVLGEGDRAVLPGGRFAGVTAVPAGTAVTLAVAGFDTEPLLTRRYHRLPARPTETDPERAVTAVRDALTHAVGRLATGLTEAGVMLSGGVDSSSVAALAAREVTSLSTYTVGTPFGDEFAQAAWFAERLGSKHHELVFEPEQLTALLPEMIRSLETWDLLTLQIAAPACFLLGHIATGARQVMLSGYGADLIFAGLGGTGTETRIERSVAAQTAATAVSNEFNPAYADARDVVVRYPYWTREVMSTALGIRGRLKVRPDTAKWVLRSAVTGILPDEVAWRPKRGIHEGTAMSRMFAAALGSDDRHTQARRLYEMATEVFRDTAAGTDELEGSDEGLAGVAS

SEQ ID NO: 23833 - protein, 270 aa, Triticum aestivum
ISLEKRLKTTDENVTGSTSGNPGKNDETIKEGGEKIIGDNSSASHEQLVKEDDEKMSTDHAAQDEMMKEGEEKIDADQSAAACDEPKADEKMEEEDPEYEEDPDEVEYEGDEDMDDATAEEPAEAQNEDNSNERETKPEEVTAEDDGKRTTENLKLEKAEEDKQSVAEKGDLKEVEEKSVGKEGKISGSQKGDSAKHDVVDKDLLQAFRYFDQNRVGYIKVDDLRCILHNLGKFLSNRDVKDMVQIALAESNSARDGRIIYTKLVKKADL

SEQ ID NO: 23834 - protein, 139 aa, Glycine max
KTEKSKSSSMPPPTPLSSASAALRRRLQQSLRTRGGAESGPSRWTSPGHEERPKGYLFNRTPPPPGQARKWEDWELPCYVTSFLTIVILGVGLNAKPDLTIETWAHEKALERLKIENSLAAAATTNNNNDESSSSDESD

SEQ ID NO: 23835 - protein, 194 aa, Triticum aestivum
  misc_feature (127)..(127): Xaa can be any naturally occurring amino acid
  misc_feature (160)..(160): Xaa can be any naturally occurring amino acid
  misc_feature (168)..(168): Xaa can be any naturally occurring amino acid
  misc_feature (174)..(175): Xaa can be any naturally occurring amino acid
  misc_feature (178)..(178): Xaa can be any naturally occurring amino acid
  misc_feature (185)..(185): Xaa can be any naturally occurring amino acid
  unsure (1)..(194): unsure at all Xaa locations
RGAMRISALSEAGVIYVMTHDSIGLGEDGPTHQPIEHLVSFRAMPNILMLRPADGNETAGAYKVAVVNRKRPSILALSRQKLPHLPGTSIEGVEKGGYTISDNSTGNKPDLIVMGTGSELEIAAKGXPNELRKEGKTVRVVSFVSWELFDEQSDEYKESXLPAAVTAXISIEAXXTLXGWQKYVXGAQGKGICI

SEQ ID NO: 23836 - protein, 159 aa, Rickettsia prowazekii str. Madrid E
MINYLKSFFLYEIIRGMTLTLKYFFKPKVTINYPYEKSPVSPRFKGEHALRRYENGEERCIACKLCEAICPAQAIVIESDERDDGSRRTTRYDIDMTKCIYCGLCQEACPVDAIVEGPNFEFASLTHTALIYDKERLLNNGDKWEQALANKLHKDYQYR

SEQ ID NO: 23837 - protein, 169 aa, Leifsonia xyli subsp. xyli str. CTCB07
MTERAILAGGCFWGMQDLIRKRPGVLRTRVGYTGGDVPNATYRNHGSHAEAIEIEFDPSRIGYRDLLEFFFQIHDPSTANRQGNDVGASYRSAIFYEDEEQRRVAEETIAEVDASGLWSGKVVTEVSPAGPFWEAGPEHQDYLERIPWGYTCHFPRPGWTLPKREAAGD

SEQ ID NO: 23838 - protein, 346 aa, Nicotiana tabacum
MSKQGAFDLASGVGGKINKEEVLSAVDKYEKYHGYYGGEEEERKNNYTDMVNKYYDLCTSFYEYGWGESFHFAPRWKGESLQESIKRHEHFLALQLGLKPGQKVLDVGCGIGGPLREIARFSSTSVTGLNNNEYQISRGQVLNRKVGLDQTCNFVKGDFMKMPFPDNSFDAVYAIEATCHAPDPLGCYKEIYRVLKPGQCFAVYEWCMTDSYNPNNEEHNRIKAEIELGNGLPEVRLTTQCLEAAKQAGFEVVWDKDLADDSPVPWYLPLDTSHFSLSSFRLTAVGRLFTRNLVSALEYVGLAPKGSQRVQAFLEKAAEGLVGGAKKGIFTPMYFFVVRKPISDSQ

SEQ ID NO: 23839 - protein, 233 aa, Glycine max
TAPPQPHTTTTLFRYRECLKNHAASMGGHVTDGCGEFMPNGEEGTPESLKCAACECHRNFHRKEPHQGVLVESQLQHVLLNKNNRNINTIIHSPDSHHHLQFPTPHSHLHGGPPVVQPVMLGFGGSGPAESSSEDLNMFQTNDHGGGGNNLLLSSVQQQPPLLSSSSSKKRFRTKFTQQQKDRMMEFAEKLGWKIQKQDEQELHQFCSQVGVRRQVFKVWMHNSKQALKKKQM

SEQ ID NO: 23840 - protein, 304 aa, Ralstonia eutropha JMP134
MGEPGPGEVRVRHVAVGLNFADTYFRSGMYQVPLPNGIGNEAAGLIEAVGPGVTHLSVGDRVTYTGFTNTLGAYSTERLIAAAPLIKLPPEISCEVAAAMTMRGLSASYLMRRIWPFKAGDTILLHAAAGGAGLIISQWAKLLGLNVIGTVSTDAKAEVARAHGCDHTINYSHEDVAKRVRELTDGVGVSVVFDSVGKDTFMASLDSLKRRGLLVCVGFASGPVTGFDPAILARKGSAYLTRPGLADYIADPAEKAELVNELFGHVAAGRIRIEINQRYALEDAVQAHRDLEARKTTGSSIFVI

SEQ ID NO: 23841 - protein, 590 aa, Burkholderia vietnamiensis G4
MSLIEVKVPDIGDFSGVDVIEVNIKPGDVIEKEQTLLTLESDKASMEVPSDIAGTVKEIKVKAGDKVSQGTVIALVEASTGAAAPAPAKAPDAPKPAAAAPAPAAAAPAPAPQAGSYGGSADIECDMLVLGAGPGGYSAAFRAADLGMKTVLVERYSTLGGVCLNVGCIPSKALLHTALVVEEAAALASHGITFGKPQVDLDKLRDFKGGVVKKLTTGLAGMAKARKVEVVTGIGAFLDPFHMEVQGDNGKKVVKFKQAIIAAGSQAVKLPFMPEDPRVVDSTGALELRQLPKRMLVIGGGIIGLEMATVYSTLGAEIDVVEMMDGLMMGADRDLVKVWEKFNAKRFGNVMLKTKTVGAQAKEDGIYVKFEGEKAPAEAQRYDLVLVAVGRSPNGKKIGADKAGVAVTERGFIDVDKQMRTNVPHIFAIGDIVGQPMLAHKAVHEGHVAAEAAHGEKAYFDALQIPSVAYTDPEVAWAGKTEDQCKAEGIKYGKAVFPWAASGRAIANGRDEGFTKLIFDEATHRVIGGGIVGLNAGDLISEVCLAVEMGADAEDIGKTIHPHPTLGESVGMAAELYEGVCTDLPPPRRA

SEQ ID NO: 23842 - protein, 229 aa, Zea mays
MDSEHWISRLAAAKRFYAAQLGHSDRAGMDELEMDEEVRPEFPCPYCYEDHDVGSLCAHLEEEHPFEPQAAACPVCSEMVTKDMVNHITTQHGYLFKNRRRLRRFIIPGSQALSLLSRDLREAHLQVLLGGGGQRSSDNSSSSSATNISADPLLSSFGLGFPTSDAEQASKSTVSIPDDATTVKEAPAQARKLSIDSSLTSEERELKRKQARVRATFVQDLLLSTLFGD

SEQ ID NO: 23843 - protein, 504 aa, ASPERGILLUS NIDULANS FGSC A4
MPGVEKSSQNESRLLLVSNRLPITIKRSEDGKYDFSMSSGGLVSGLSGLSKTTTFQWYGWPGLEVPEEEIPTLKNRLKEEYNAIPVFIDDELADRHYNGFSNSILWPLFHYHPGEITFDESAWEAYKEANRLFAQAVASQVQDGDLIWVHDYHLMLLPEMLREEIGNTKKNIKIGFFLHTPFPSSEIYRILPVRNELLLGLLHCDLIGFHTYDYTRHFLSACSRLLGLPTTPNGIEFQGKIIACGAFPIGIDPEKFKEGLKKEKVQKRIATLEQKFQGVKLMVGVDRLDYIKGVPQKLHALEVFLSDHPEWVGKVVLVQVAVPSRQDVEEYQNLRAVVNELVGRINGKFGTVEFMPIHFLHKSVNFDELIALYAVSDACVVSSTRDGMNLVSYEYIATQEKRHGSLVLSEFAGAAQSLNGSIIVNPWNTEELAAAYHEAVTMSDEQRALNFSKLDKYVNKYTSAFWGQSFVTELTRISEQAAGKLPTKETPVNGETSKLETSSQ

SEQ ID NO: 23844 - protein, 367 aa, Pseudomonas fluorescens Pf-5
MSVSLKPVSSMRAAVWHGRHDIRVEDVPLPDAPPAGWVQIRVDWCGICGSDLHEYVAGPVFIPVDAPHPLTGIKGQCILGHEFCGEIVALGEGVQGFSVGQPVAADACQHCGTCYYCTHGLYNICENLAFTGLMNNGAFAELVNVPANLLYALPANFPAEAGALIEPLAVGMHAVKKAGSLLGQNVVVVGAGTIGLCTIMCAKAAGAAQVIALEMSGARKAKALEVGATHVLDPKECDALAEVKRLTGGLGADVSFECIGNKHTAKLAIDLIRKAGKCVLVGIFEEPSEFNFFELVATEKTVLGALAYNGEFADVIAFIADGRLDISPLVTGRIQLEEIVGQGFEELVNNKEHNVKIIVSPGQLRRS

SEQ ID NO: 23845 - protein, 395 aa, Corynebacterium efficiens YS-314
MRTPVGRYGGVFTGVPVQELATAVVNAIVDKTGLTGDDVDDLILGQGSPNGSAPALGRVVALDSKLGQNVPGLQLDRRCGSGLQAIVTAGAHISAGAADLIIAGGAESMSRTEYTVSGDIRWGVKGGDMQLRDRLSEARETAGGRNHPIPGGMIETAENLRREYNIPRETQDQMAAASQQRAGAAQENGLFADEIVPITIPQRKGDPIVIDQDEHPRPDTTVEKLAKLRPVMGRQDEDATVTAGNASGQNDGAAAVVVTTRAKAEELGLTPMIRLAGWALAAVPPETMGIGPVPATRKVLDRLGLTLDDIGSIELNEAFAAQALAVLDEWGITWEDERLNPLGSGISLGHPVGATGARMVVTLAHRMQREDTRYGLCTMCIGGGQGLAAVFEKEN

SEQ ID NO: 23846 - protein, 302 aa, Emericella nidulans
MTRTHPSSFQQLEKLGEGTYATVYKGRNCQTGEMVALKEIHLDSEEGTPSTAIREISLMKELHHDNILSLYDVVHTENKLMLVFEYMDQDLKKYMDTHGNHGQLEPAIVKSFAFQLLRGIAFCHDNRILHRDLKPQNLLINSKGQLKLADFGLARAFGIPVNTFSNEVVTLWYRAPDVLLGSRTYNTTIDIWSIGCIIAEMFTGRALFPGTTNEDQLQKIFRVMGTPSERTWPGVSQFPEYKSDFPVYPPQDLRQVVPRIDPYGLDLLRCMLRLQPDLRISAVDALRHPWFNDVPGAQPVPV

SEQ ID NO: 23847 - protein, 240 aa, Brassica napus
  misc_feature (114)..(114): Xaa can be any naturally occurring amino acid
  misc_feature (131)..(131): Xaa can be any naturally occurring amino acid
  misc_feature (146)..(146): Xaa can be any naturally occurring amino acid
  unsure (1)..(240): unsure at all Xaa locations
FFSIRRTCPPPKKTTEKEEDENRDPGAVRRGGDGLVKREGKAKVWLDPHESQDNPMPDYREDIRKLVQDGFIIRKPTKIQSRSMARRLKIANMKGRHSGYGRRKGTLEARLPTXVLWMRMMRVLRRLLKKXRVEKDRQTHMYLNMXMRLKGNVFRNKRVLMESIHKSKAEKAREKTLSDQFEAKRAKNKASRERKHARREERLAKGPGGDVAPATAPPAAAAATTTTRQNAEVPKKKSKK

SEQ ID NO: 23848 - protein, 435 aa, Thermoplasma volcanium GSS1
MSGKADPLEIAKEQVAPVKEEIEEDPFEIALKQLNKAAKVLNLDEQALEILSSPQKILQVSIPVKMDDGKVRVFTGFRVRHNIARGPAKGGIRYHPQETLSTVKALSMWMTWKCAIADIPYGGAKGGIICDPSTLSQGELERLSRGYIRAIADFIGPEVDVPAPDVNTNPQIMAWMMDEYENIVRHSAANVITGKPLEVGGSLGRFDSTGKGGMFVLREGAKKIGLDLSKARVAVQGFGNVGQFAVKFVQEMFGAKVVAVSDIKGGIYSENGFKFDDLLAWSKKIGSVVGFPGSKPITNEELLESDVDVLIPAAIEEQITEKNADKIKAKIILELANGPTTPEADEILYKKGKLVLPDVLSNSGGVIVSYFEWVQNNYGEYWTTEEVYDKLDQKITKAARQVLDTMDKYHVDPRTAAYVIAVKKVADAMKVRGWY

SEQ ID NO: 23849 - protein, 371 aa, Selenomonas ruminantium
MMIKDSTPKADGFYMPAEFSPHAGTFLIWPVRPGSWTNAGADVQPVFVELIREISAVEELYLLVDEAHRPQAENMLKDLPQQHIHYLAIPTDDAWARDMGPTYVIDGQGRRRGINWRFNAWGGDFDGLYPDYGQDDAAAEKMCAALGDELYDAGDFVLEGGSIHVDGEGTVVVTEACLLSQGRNPDLSKEQIEAMLLKYLGAEKVIWLPRGIHNDETNEHVDNVFAFVRPGEVLLAWTDDKDDPQYELSQADLEVLESATDARGRKFVIHKLPIPQEPVCITAEEADSFTFEEGEDRREPGERLAASYVNFYLCNGKVILPQFGDEMDIEAQRILGKCFPERKVVPLPAKAVIVGGGNFHCLTQQIPAIER

SEQ ID NO: 23850 - protein, 416 aa, Thermoplasma volcanium GSS1
MPESIDPFEMALQQLDKAARVLNLDEQALEILRQPEKILQVSIPVRMDNGKIKVFTGFRVRYNTARGPGKGGIRYHPDETLSTVKALASWMTWKCAIADIPYGGAKGGIICDPKSMSQGELERLSRGYIRAIADFIGPEVDVPAPDVYTNPQIMAWMMDEYENIVRHSAPNVITGKPLEIGGSEGRGDATAKGGMYVLREGAKRVGLDLSKATVAVQGFGNAGQFAVKFVQEMFGAKVVAVSDTKGGIFKSDGINYEALLDHKRKTGSVVGFPGSKPITNEELLESDVDVLIPAAIEEQITEKNADKIKAKIILELANGPTTPEADEILYKKGRLDLPDFLSNSGGVTVSYFEWVQNNYGEYWTAEEVYEKLDKKMTKAAHEVFDAMDKYKINPRTAAYVISVKKVADAMKARGMY

SEQ ID NO: 23851 - protein, 516 aa, Corynebacterium glutamicum ATCC 13032
MSEKSAADQIVDRGMRPKLSGNTTRHNGAPVPSENISATAGPQGPNVLNDIHLIEKLAHFNRENVPERIPHAKGHGAFGELHITEDVSEYTKADLFQPGKVTPLAVRFSTVAGEQGSPDTWRDVHGFALRFYTEEGNYDIVGNNTPTFFLRDGMKFPDFIHSQKRLNKNGLRDADMQWDFWTRAPESAHQVTYLMGDRGTPKTSRHQDGFGSHTFQWINAEGKPVWVKYHFKTRQGWDCFTDAEAAKVAGENADYQREDLYNAIENGDFPIWDVKVQIMPFEDAENYRWNPFDLTKTWSQKDYPLIPVGYFILNRNPRNFFAQIEQLALDPGNIVPGVGLSPDRMLQARIFAYADQQRYRIGANYRDLPVNRPINEVNTYSREGSMQYIFDAEGEPSYSPNRYDKGAGYLDNGTDSSSNHTSYGQADDIYVNPDPHGTDLVRAAYVKHQDDDDFIQPGILYREVLDEGEKERLADNISNAMQGISEATEPRVYDYWNNVDENLGARVKELYLQKKA

SEQ ID NO: 23852 - protein, 369 aa, Glycine max
MGGLASNLPLIVMVGLQIHYAALAIFTRAALLDGLSTTVFVVYRQGIATLALAPMFFSPKRRQSVKDSLGFRSFFLMFVTALVGVTANQNAYFKGLFYASSTAATAMSNLIPALTFVIAAIAGFEKVDISLRSTAKILGTVCCVAGALTMALVKGQKLLHTEFLPSIHLTGSEGDDWLLGCLLLLASSVFWSCWMILQVPIASCCPDHLSSTFWMCLFSTIQAALFALLSESDLQAWILQSPLQISCSLYAGIGIAVSFFIQSWCISERGPLYCAMFNPLATVITALISATFLQEEVYVGSLVGAVGVIAGLYIVLWGKAKEFAEIKPEAAPQSSNLQDDHDISSRIDLEQPLLSEKLSEHVTEADSKV

SEQ ID NO: 23853 - protein, 165 aa, Zea mays
  misc_feature (13)..(13): Xaa can be any naturally occurring amino acid
  unsure (1)..(165): unsure at all Xaa locations
LCSKLQEQPEGYXILRNQISSIPIGTWSQHTGRASTRQLRTSGLSAPLITCLDFLLEDRISSIPIVDDNGSLLDVYSLSDIMALAKNDVYACIELEQLTVENALELQYQVNGRRQCHTCLSTSTLLEVLDQLSVPGVRRLVVIEPMTRFVQGIISLRDAITFLLG

SEQ ID NO: 23854 - protein, 447 aa, Lycopersicon esculentum
MGSNYHFKNFGNEPPGEGGSGGGGKQPGNFGLPRQPSIYSLTFDEFLSSTGGSGKDFGSMNMDELLKNIWNAEENQTIGGPGINGQEVGVPGGHLQRQGSLTLPRTLSHKTVDEVWRDMSKEHGGGKDGNSVGVPPNIPQTQRQQNLGEITLEEFLVRAGVVREDAQFAAKSNNAGGIFGDLSYAGNNTGLAFGYHQANSRNTGLMAGSIPNKNGETVIQSANLPLNVNGVRSTQQQLRPQQLQQNQQSQPQQQPIFPKQPALPYGAPMAIPNSGQLGSPGMRAGMVGIPDPALNSNFIQGASLMGGGMNMVGLGASGVTVATASPGVSSSDGLGKSNGDTPSVSPVPYVFNGGLRGRKYSTVEKVVERRQRRMIKNRESAARSRARKQAYTMELEAEVAKLKEENDELQKKQEEMLEMQKNQVIEMMNLQKGAKRRCLRRTQTGPW

SEQ ID NO: 23855 - protein, 602 aa, Xanthomonas campestris pv. campestris str. ATCC 33913
MSFDPLSNGGLARRRFVHGLALGGVAAATGLWRSEARATPAYATPAVLRGGAAALQIGRMPVNLTGRARSAITVNQSLPAPTLRWREGDTVSVRVRNALADQFTSVHWHGLLLPANMDGVPGMSFDGIAPGQEYLYRFALRQSGTYWYHSHSMFQEQAGLYGAIVIDPLAPPPYRFDREHVVLLSDWTDLDPAALFRRLKQMPSHDNYAQRTVGDFVRDAREDGLRATLADRGMWGRMRMTPTDLSDVNANTYTYLLNGVAPAGNWTGLFKPGEKVLLRFINGSSMTYFDLRIPGLRMTVVAADGQYVHPVSVDELRIAAAETFDVLVEPIGQDAFTLFAQDMGRTGFACGTLAVRHGLQAPIPAQDPRAILTMQDMGHGDGMAHGAMHDMPAQHGASPADTHAGHTVQHDPSAHALQQHGHASASSRAPHHPASEDHNPLIDMRSNASAPRLDDPGVGLRNNGRRVLCYGDLHSLFDDPDGRAPGREIELHLTGHMEKFAWSFDGIAFASAEPLRLQYGERLRIVLVNDTMMQHPIHLHGMWSDLEDADGNFQVRKHTIDMPPGTRRSYRVRADALGRWAYHCHLLYHMEAGMMREVRVEA

SEQ ID NO: 23856 - protein, 930 aa, Yersinia pestis CO92
MTKYSLRARMMILILAPTLLLGLLLSTSFMVNRYNELQNQIVSAGTNIIEPLAVASEYGMSFRNRDTVRQLINLLHRRHSNIVRSISVFDVDNKLFVTSNYNYNSSQLRLPPGEPVPDSLMLSYRGDSLILRMPIVSESNLSSEQASGQGESDQILGYIAIDLDLQSVRLKQYKEIFISTLLLLFCMCVAILFAYRLMRDVTGPIRNMVNTVDRIRRGQLDSRVEGHMLGELDILKNGINSMAMSLAAYHEEMQQNIDQATSDLRETLEQMEIQNVELGLAKKRAQEASRIKSEFLANMSHELRTPLNGVIGFTRQTLKTSLTPTQTDYLQTIQRSANNLLCIINDVLDFSKLEADKLILEHIPFSLRETLDEVIILLAHTAHEKGLELTLHINNDVPDQVLGDAMRLQQIVTNLLGNAIKFTEEGNIDILVVVKAIASQQVTLMVEIHDTGIGISESQQAQLFQAFRQADASTSRRHGGTGLGLVITERLVKEMGGNISFQSQMSCGSIFRFHLTLELNESIPYRQPDMAHLEGKQLAYIERNSTAARATINILNTTPLQVTHRQSLAQLPEQHYDFLLVGVPIPFRNNMAIHQDKLLTALKIADHVILALPSQSQVEAEQLKQIGAKDCLLKPISSIRLIPLLLAEDTHSKVPSEEQPRKQPKLPFRVMAVDDNPANLKLIGTLLEEQIEETVLCDSGAMAITYAREHTLDIILMDIQMPEIDGIRASEIIHQIPHHQETPIIAVTAHAVKGQQEQLLRLGMADYLAKPIDEARLLQVLSRYQSDNPPLSTASTASTASTASTAESLPLPVPKGAGVIDWAQAVRQAANKEDLARDLLTMLLEFMPQITARVQAILAGADDGDILNLVHKFHGSCACSGVPRLRQLCMTIELQLRQQVNLQDLEPEWLELLDEIENVSEAAKTYLRTE

SEQ ID NO: 23857 - protein, 459 aa, Rickettsia prowazekii str. Madrid E
MEKYDVAVIGGGPGGYVAAIRAAQLKKKVVLIEKAHLGGVCLNWGCIPTKSLLKSAEVFEYIKHAQDYGIDVGIAEINIKKIVERSRKIANTLACGVQLLLKKNKVTIIDGVASFGENKVINVNDKPTVKAENIIIATGTRPKILQGFEPDIKQIWTSKEAMIPQHVPKSMIIIGSGAIGIEFASFYNSIGVDVTVIEAKNRILPSEDTEIAGIAHKNFEQKGIKIITNAKLIKQTKSQNEIEVELELEGKTQKLQATILLMAVGISANIENLGLEKTKVEVENGYILTNGLMQTAESGIYAIGDVAGVPCLAHKASHEGIIAAESIAGLNPNGINKHNIPYCIYSSPQIASVGLTEEIAKDLGYEIKIGRFPFSANGKALVSGNSDGLIKTIFDVKTGELLGAHMVGLEVTELIQGYVVSKNLEGTELDLINTIFPHPTLSEMMHESVLAAYDMAIHI

SEQ ID NO: 23858 - protein, 937 aa, Rubrobacter xylanophilus DSM 9941
MSTAREIAERSEAGREPLNIVVIPHSHWDREWYATFEEFRFYLVRFMDELLEVLEKDEAFRSFLLDGQVSLLEDYLQVRPEKLDELRRLVQEGRLDIGPWYVQPDEFLVSGEALVRNLLIGDRIGRQFGPVMKQGYVPDTFGHVSQLPQILRGFGIGTFYFMRGLAESVDELRSEFWWEAPDGSRVLAHFLSETYSNAAVLGPDPEKISFRHDRLAEPSSYFVSYDSLYELRDRLAARAADRTILFMNGSDHVTVQPDFSRYVFALNQAMEDRLFNGRLADFERLVLEENPPLKTYRGELRWARYQPILKGVYSSRMYLKQENERTQQLLEGLAERAAAVVYALGGPDYSPFLRYAWKELLKNHAHDSIGGCSADAVHRQMLGRYDTVRRVGQKVVDEALDYIASRVAPEPDAGSIPIVVFNPSPWERGGTVQVEVSLNLDAPLKRRIFDWIGQKEFDVERAALLDPDGREVPFSIRGRRLHIEDALYRRKAVRRATVEFLAEKIPPLGYKVYRLVETPEREPTSEEREVPWEVALENERLKVTVEGDMTLTILDKTTGERYAGLNLFVDEADAGDEYTFCPPREQRRVLSSEEDWRVEDTGDPHTLLLRGSMLLPKGLAPGRSARSLQTVRCPLNVRLRLLPGARRLEISTEFFNRAKDHRLRVVFPAGFPARESVAETAFGTVRRPTRPTDSAGWREKDTATYAQRRFVCVEDPETGRGLAVLNKGLPEYEVTPEGEVCLTLLRGVGWLSRNDLSTRTGHAGPGLATPEAQCSGRHVFEYAVVPYTGGHREAGIFREAEEYWLPLEAWDVHRGERPREGSPAGAPGSFLRVHGKDAVLSTLKKAADRDGLVLRLFNASEEESRAVLNFGIPIAAAYRTNLNEEILEELAPKGHRLRVNLRPCGIETVLVKLHRPERWAERIRRTAPERTRGRRTG

SEQ ID NO: 23859 - protein, 370 aa, Schizosaccharomyces pombe
MGQTLSEPVLDKHSSSGGDRWLHFGVSHMQGWRISMEDAHCALLNFTDSNSSNPPTSFFGVFDGHGGDRVAKYCRQHLPDIIKSQPSFWKGNYDEALKSGFLAADNALMQDRDMQEDPSGCTATTALIVDHQVIYCANAGDSRTVLGRKGTAEPLSFDHKPNNDVEKARITAAGGFIDFGRVNGSLALSRAIGDFEYKKDSSLPPEKQIVTAFPDVVIHNIDPDDEFLILACDGIWDCKSSQQVVEFVRRGIVARQSLEVICENLMDRCIASNSESCGIGCDNMTICIVAFLHGRGLEDWYNWITQRVNSGEGPCAPPSYAELRGPNTIADARNLQLEYDHIASHEYGSGDTYDSDSDDETIAYDRYYLH

SEQ ID NO: 23860 - protein, 215 aa, Arabidopsis thaliana
MASSASKFIKCVTVGDGAVGKTCMLICYTSNKFPTDYIPTVFDNFSANVVVEGTTVNLGLWDTAGQEDYNRLRPLSYRGADVFVLSFSLVSRVSYENVFKKWIPELQHFAPGVPLVLVGTKLDLREDKHYLADHPGLSPVTTAQGEELRKLIGATYYIECSSKTQQNVKAVFDSAIKEVIKPLVKQKEKTKKKKKQKSNHGCLSNVLCGRIVTRH

SEQ ID NO: 23861 - protein, 402 aa, Xanthomonas campestris pv. campestris str. ATCC 33913
MRRVVVTGMGINSCLGNDLDTVSSALRESRSGITALPDHAEAGLRSQVGGAVDIDLDGLIDRKLKRFMGDASAYAYLAMRDAIADAGLSPEQVSDLRTGVIAGSGGGSSQWQVETADLLRARGVRKVGPYMVPRTMCSAVSASLATAFKIRGLSYSLSAACATSAHCIGAAADLIRHGEQDVMFAGGGEELHWTMSVMFDAMGALSTGFNDRPAVASRPYDAQRDGFVIGSGGGMLVLEDYDHAIARGARIHAELLGYGVSSDGADMVAPSGEGAVRCMHMAMQGLDRPIDYLNTHGTSTPLGDATELGAVREVFGDNVPPLSSTKALSGHSLGAASVHEAIYSMLMLRDGFMAGSAHIDELDPRAEGFPILRATREATLNTVMSNSFGFGGTNGVLVFGRV

SEQ ID NO: 23862 - protein, 1065 aa, Bacillus cereus E33L
MDKKVSAIPQPKTYGPLGNLPLIDKDKPTLSFIKIAEEYGPIFRMQTLSDAIIVVSGHELVAEVCDETRFDKSIEGALAKVRAFAGDGLFTSETDEPNWKKAHNILMPTFSQRAMKDYHAMMVDIAVQLVQKWARLNPNENVDVPGDMTRLTLDTIGLCGFNYRFNSFYRETPHPFITSMTRALDEAMHQLQRLDIEDKLMWRTKRQFQHDIQSMFSLVDNIIAERKSSGNQEENDLLSRMLNVQDPETGEKLDDENIRFQIITFLIAGHETTSGLLSFTIYFLLKNPDKLKKAYEEVDRVLTDPTPTYQQVMKLKYIRMILNESLRLWPTAPAFSLYAKEDTVIGGKYPIKKGEDRISVLIPQLHRDKDAWGDNVEEFQPERFEELDKVPHHAYKPFGNGQRACIGMQFALHEATLVMGMLLQHFEFIDYEDYQLGVKQTLTLKPGDFKIRIVPRNQTISHNTVLAPTEEKLKNHEIKQKVQKIPSIIGADNLSLLVLYGSDTGVAEGIARELADTASLEGVQTEVAALNDRIGSLPKEGAVLIVTSSYNGKPPSNAGQFVQWLEELKGDELKGVQYAVFGCGDHNWASTYQRIPRYIDEQMAQKGATRFSTRGEADASGDFEEQLEQWKESMWSDAMKAFGLELNKNIEKERSTLSLQFVSRLGGSPLARTYEAVYASILENRELQSSSSERSTRHIEISLPEGATYKEGDHLGVLPINSEKNVNRILKRFGLNGKDQVILSASGRSVNHIPLDSPVRLYDLLSYSVEVQEAATRAQIREMVTFTACPPHKKELESLLEDGVYHEQILKKRISMLDLLEKYEACEIRFERFLELLPALKPRYYSISSSPLVAQNRLSITVGVVNAPAWSGEGTYEGVASNYLAQLHNKDEIICFIRTPQSNFQLPENPETPIIMVGPGTGIAPFRGFLQARRVQKQKGMKVGEAHLYFGCRHPEKDYLYRTELENDERDGLISLHTAFSRLEGHPKTYVQHVIKQDRIHLISLLDNGAHFYICGDGSKMAPDVEDTLCQAYQEIHEVSEQEARNWLDRLQEEGRYGKDVWAGI

SEQ ID NO: 23863 - protein, 133 aa, Chlamydomonas reinhardtii
LKRVYYDFADMLRTNPSGNVPYTPCLSLLYGLRESIKMWKEEGGMEAVAARHHRLAEGVRQAVDGWGLKLLCKNPRWRSDSLTVVEVPEGVDSNKIVKNAYAKYDLSLGIGLASINGKVFRIGHLGNMNELML

SEQ ID NO: 23864 - protein, 332 aa, Bacillus anthracis str. 'Ames Ancestor'
MNPLIFKENRPFDLIAVGRLCVDLNANETQRPMEETRTFTKYVGGSPANIAIGAARLGLQTGFIGKVSDDQMGRFITGYLKDNKINTDQIPIDCTGAVTGLAFTEIKSPEDCSILMYRDNVADLNLDPTEVSEDYIKQSKALLISGTALAKSPSREAVFLALEYARKHDVVVFFDVDYRPYTWQSEAETAVYYNLAAEKSDVIIGTREEFDMMEKLLNYEKSNDQVTAERWFSHHAKIVVIKHGGDGSIAYTRDGQSHRGGIFKTKVLKTFGAGDSYASAFIYGLMQGLEIPQAMRLGGASASIVISKHSCSDAMPTRAEISAFMETAEELV

SEQ ID NO: 23865 - protein, 115 aa, Zea mays
MRAMSSAVNGMLRARLRGAARVRGGGGEGAGRWTTPGHEERPKGYLFNRPPPPPGESRKWEDWELPCYVTSFLTVVILGVGLNAKPDLTIETWAHQKALERLQQQELAAADTQAE

SEQ ID NO: 23866 - protein, 542 aa, Oceanobacillus iheyensis HTE831
MKNVLRDLKSEKDFKFKKRSIAALLTVGIILPSAVAVADQQEHPDAETYKPSPVPDRVLLGWEGDTATTQSVSWRTDESVTSPVAEIAVAEEGPNFTSNTSTIEAETSEEIEANLGYTSQYHTVNFEGLEPDTQYLYRVGDGANWSEWYEFTTASEEDEPFSFIYMGDAQNDIKEHWSRVMRSAYSDLSEASFIVHAGDMINHGDADEQWGEWYESAGWINGMIPSIATAGNHEYYRITNGPNTLSEYFGPQFAYPGNGPEGLEEQVGYWDYQDMRIISLDSNTGHVDIDQQAEWLDEVLENNPNKWTVITFHHPIFSSGEGRDNVALREAVLPVIEKHNVDLIFQGHDHTYARGHLSNEEDGEKEYSTGTMFVNSVSGPKMYNRSEVVWEENNAYVRSGAEDTQMYQHIYVDGDELKYESYNALGEIYDEFTMTKQSDGQKIITETEGSEEPVESTIEEVKTQVDELLAAGDISSEETARHLKTHLNSVAHYQENQSVDKAINHMNSFIELLQVIKEEQLITENAFNVLKASAEELIEQWR

SEQ ID NO: 23867 - protein, 655 aa, Zea mays
IGYPTRPPRATTQVSDPSPPSDSPLPPSHDHEYRRPRPFPRLLLLLLSPPPSPSVRLAGGARGRSKSTAMAAVKVDKATNELLLGPDWTLNIDICDAVNSDHGQGKEVIKALKKRIQHKNANVQFLALTLLETLIKNCGDHVHYQVVERNILEEMMKIVKKKADMQVRDKILMLLDSWQDAFGGPGGKHPHYYWAYAELKRSGVEFPKRSPDAASMFISPVTQPESLPTYLQAGYGMPVDSSSRLDEAMSSNGAPLSISDLERMLGAVELLNEMLRAVNPNEKDAANDEIITELVTQCRSYQKKIMSSVSLVRDEELLGQALDLNDRLQILLEKHDSIASCSPSSADVIDVVCEVPSGTAPNQGTNFPPQAALRTAIVPTNVLDDEDEENEDDEFSMLARRNSRFQPTNTQSTSSPTVHDETASSTASVPYTASPSVANNALPPHDPPAPPVRVSPEEQVMSDLLALTVSSNPSPSSYTPVTPEPGRLNQSSAPTGELPRAYHGDQGHVSAPYVAPWAQPQSQTAGSQQPTRTQAQVSYSSFAYPPPPWASQDSTESNPFVAAASSSQQYQSTSRTPTMPPNLRPLLQQSHSFGVPLPTASLDSPINGNLKQPLSAGARRPSYVSSNKFFDDLFERNSDGSLKVGSTRHSDVYGK

SEQ ID NO: 23868 - protein, 260 aa, Debaryomyces hansenii CBS767
MLSLFSLEGQVALITGGTNGIGLGMAKGLADANIDQIILTYRSEKPLENTIKVLQEVNPKVKISSIEADFGTGNEDDLVAKIATEAFKKSVSGKIDILINNAGINNRFPFDEFPQDKFDEVLRVNLNIPVKLTKAIGCKMLETKTKGKIVFTASLCSFQGGVDSTAYAITKGGIKQFTAALSNDWSLKGIRVNSIAPGYISTNLTEQIDPKRRETLISRIPIGRWGNMDDFQGPAVFLCSEASRYVTGETLVVDGGWLGY

SEQ ID NO: 23869 - protein, 588 aa, ASPERGILLUS NIDULANS FGSC A4
MDAQNGVYGQGYFMPNNYPAQAAYAQPHYGQPNLQSPQPAYQSRMGYNVSPNDGTNGLIQQFSNQDLNSNRTGFFNRSASPAQRPRTAGNTAPGQQQQPGHLAPPVPRSPRLPPENEELQRYPERFSENVHKRGKAAKELVNVFFHENIERARDRNMRSAELDKMMRDPNISQDAKVKEAEMVGKKESTFLRFLRTPETPANFQTIKIIGKGAFGEVKLVQRKSDNKIYALKSLIKSEMFKKDQLAHVRAERDILADSKDNPWLVKLHASFQDPAYLYLLMEFLPGGDLMTMLIKYEIFSEDITRFYMAEIVMAIEAVHKLGFLHRDIKPDNILLDRGGHVKLTDFGLSTGGKKTHDNSYYQNLLKNSTSKDKNRNSGYFNDAINLTVSNRGQINTWRKSRRAMAYSTVGTPDYIAPEIFNGQGYTYLCDWWSVGAIMFECLVGWPPFCAEDTTDTYRKIVNWRECLYFPEELTLSRESEGLIRSFLCDAEHRIGNEGGQYGGATQIKNHPFFRGVVWDQLRKIRAPFEPRLTSNIDVSYFPIDEIPQEDTSAIHRAQARAMPDEQNAEMSLPFIGYTYKAFNAFQAS

SEQ ID NO: 23870 - protein, 309 aa, Arabidopsis thaliana
MDMRSHEMIERRREDNGNNNGGVVISNIISTNIDDNCNGNNNNTRVSCNSQTLDHHQSKSPSSFSISAAAKPTVRYRECLKNHAASVGGSVHDGCGEFMPSGEEGTIEALRCAACDCHRNFHRKEMDGVGSSDLISHHRHHHYHHNQYGGGGGRRPPPPNMMLNPLMLPPPPNYQPIHHHKYGMSPPGGGGMVTPMSVAYGGGGGGAESSSEDLNLYGQSSGEGAGAAAGQMAFSMSSSKKRFRTKFTTDQKERMMDFAEKLGWRMNKQDEEELKRFCGEIGVKRQVFKVWMHNNKNNAKKPPTPTTTL

SEQ ID NO: 23871 - protein, 144 aa, Brassica napus
MATEKSKILVIGGTGYIGKFIVTESAKSGHQTFALVRETTLSDPVKSKTVQNFKDLGVTILQGDVNDHESLVKAIKQVDVVISSIGSMQILDQTKIISAIKEAGNVKRFLPSEFGTDVDRTSAVEPAKSAFAVKIQIRRGIEAE

SEQ ID NO: 23872 - protein, 474 aa, Shigella flexneri 2a str. 301
MQHKLLINGERVSGEGEKQPVYNPATGDVLLEIAEVSAEQVDAAVRAADAAFAEWGQTTPKARAECLLKLADVIEENGQVFAELESRNCGKPLHSAFNDEIPAIVDVFRFFAGAARCLNGLAAGEYLEGHTSMIRRDPLGVVASIAPWNYPLMMAAWKLAPALAAGNCVVLKPSEITPLTALKLAELAKDIFPAGVINILFGRGKTVGDPLTGHPKVRMVSLTGSIATGEHIISHTASSIKRTHMELGGKAPVIVFDDADIEAVVEGVRTFGYYNAGQDCTAACRIYAQKGIYDTLVEKLGAAVATLKSGAPDDESTELGPLSSLAHLERVSKAVEEAKATGHIKVITGGEKRKGNGYYYAPTLLAGALQDDAIVQKEVFGPVVSVTPFDNEEQVVNWANDSQYGLASSVWTKDVGRAHRVSARLQYGCTWVNTHFMLVSEMPHGGQKLSGYGKDMSLYGLEDYTVVRHVMVKH

SEQ ID NO: 23873 - protein, 118 aa, Glycine max
  misc_feature (84)..(84): Xaa can be any naturally occurring amino acid
  unsure (1)..(118): unsure at all Xaa locations
EPGLRPLCVFPSLSLKIKCFGNQIPLTFGILCFSMAGAGESLRKFLAAKHAEVEAQGNALRALKGGKGGKPEIYAAKEALNPLXLEKSSIEHSLLGGFDSREGFRESVVNTLERRLFY

SEQ ID NO: 23874 - protein, 473 aa, Methylococcus capsulatus str. Bath
MAEPKTIHADVLVLGGGPGGYTAAFRAADLGRQVVLVERYPTLGGVCLNVGCIPSKALLHVAQIIHEAREAGEFGLRFGAPEIDLDQIRGFKDKVVKTLTGGLETLARQRKVTVVQGTGRFTGEHGMQVETTDGPVTVGFDHAIIAAGSRAVKIPDFPHDDPRLMDSTDALALQEVPKRLLIVGGGIIGLEMATVYHALGAGITVVELMDQLIPGCDADLVRPLHQHIKKQYENIYLKTRVSRIEPEAAGLKVFFEGEGAPESDLFDRVLVAVGRAPNGALIGAENAGVHVDAKGFIPVDEHQRTNVPHIYAIGDIVGNPMLAHKATHEAKVAAEVIAGKPSAFQALTIPSVAYTDPEVAWMGVTEAQAKAQGIEYEKAVFPWAASGRALGIGRKEGATKLLCDKTTKRVIGAGIVGPHAGELIAEAVLAMEMGADAEDIGLTVHAHPTLSETFAFAAEMIEGTITDLYIRKR

SEQ ID NO: 23875 - protein, 456 aa, Magnetospirillum magnetotacticum MS-1
GPLPGVNWDVCRVDGHDPETIATAIAAAQKSGQPSLIACKTTIGYGAPTKAGSEKTHGAPLGAEEIAGARAKLNWPHAPFEIPADVLSAWRAAGSKGSEARATWEKRFAAYGNKAEFESTNAGILPAVWKQAVSDFKKKVSAEQPKWATRKASQEVLEALTPVIPAMIGGSADLTHSNLTITKATKPVTPRDFSGRYIHYGVREHGMAAIMNGLSLHGGFIPYGGTFLIFANYLWPALRMSAMMDQRVLYVLTHDSIGLGEDGPTHQPIETLSALRATPNVLVFRPADPVETMEAYEAALDNATGPSVFALSRQNLPTLRTTHTDENLTAKGAYVLAEAEGKKRQVTLIATGSEVSLAMEARKLLADKGIAACVVSMPCWELFERQPKEYRSKVLGEGTVRVAVEALGTFGWERWVGENGAVIGMNGFGASAPAEKLYEHFGITAEKVAEAAMVRL

SEQ ID NO: 23876 - protein, 279 aa, Vibrio cholerae
KEAGLDFVTAGDFAWYDHVLTTTLLLGHVPKRHSHGFPDLDTLFRVGRGQSQNACGCGTGSAASDMTKWFNTNYHYIVPEFSSNDTFNVSWPQLFEEVNEALQAGHDVKPVLLGPISYLYLGKEVEEGFDRLTLLPRLLTAYQAILSKLAKQGVQWVQIDEPILALELKPRWQEAFKLAYQVIRGDVKLLLTTYFDSVLDTLDKIVELPVDGLHVDISAAPAQLETIVNRLPSDWVLSAGVINGRNVWRADLSAILARLQPVKTLLGERLWVASSCSLL

SEQ ID NO: 23877 - protein, 1362 aa, Schizosaccharomyces pombe
MSLHSKKSTSTVKDNEHSLDLSIKSIPSNEKNFSTEKSENEASESHVVDVVKDPFEQYTPEEQEILYKQINDTPAKLSGYPRILSYADKWDIMLQLAGTITGIGAGLGMPLMSLVSGQLAQAFTDLASGKGASSFQHTVDHFCLYFIYIAIGVFGCSYIYTVTFIIAGERIARRIRQDYLHAILSQNIGYFDRLGAGEITTRITTDTNFIQDGLGEKVGLVFFAIATFVSGFVIAFIRHWKFTLILSSMFPAICGGIGLGVPFITKNTKGQIAVVAESSTFVEEVFSNIRNAFAFGTQDILAKLYNKYLITAQRFGINKAIAMGLMVGWMFFVAYGVYGLAFWEGGRLLHAGDLDVSKLIGCFFAVLIASYSLANISPKMQSFVSCASAAKKIFDTIDRVSPINAFTPTGDVVKDIKGEIELKNIRFVYPTRPEVLVLDNFSLVCPSGKITALVGASGSGKSTIIGLVERFYDPIGGQVFLDGKDLRTLNVASLRNQISLVQQEPVLFATTVFENITYGLPDTIKGTLSKEELERRVYDAAKLANAYDFIMTLPEQFSTNVGQRGFLMSGGQKQRIAIARAVISDPKILLLDEATSALDSKSEVLVQKALDNASRSRTTIVIAHRLSTIRNADNIVVVNAGKIVEQGSHNELLDLNGAYARLVEAQKLSGGEKDQEMVEEELEDAPREIPITSFGDDDEDNDMASLEAPMMSHNTDTDTLNNKLNEKDNVVFEDKTLQHVASEIVPNLPPADVGELNEEPKKSKKSKKNNHEINSLTALWFIHSFVRTMIEIICLLIGILASMICGAAYPVQAAVFARFLNIFTDLSSTDFLHKVNVFAVYWLILAIVQFFAYAISNFAMTYAMEAVLQRIRYHLFRTLLRQDVEFFDRSENTVGAITTSLSTKIQSLEGLSGPTLGTFFQILTNIISVTILSLATGWKLGLVTLSTSPVIITAGYYRVRALDQVQEKLSAAYKESAAFACESTSAIRTVASLNREENVFAEYCDSLIKPGRESAIASLKSGLFFSAAQGVTFLINALTFWYGSTLMRKGEYNIVQFYTCFIAIVFGIQQAGQFFGYSADVTKAKAAAGEIKYLSESKPKIDTWSTEGKKVESLQSAAIEFRQVEFSYPTRRHIKVLRGLNLTVKPGQFVAFVGSSGCGKSTTIGLIERFYDCDNGAVLVDGVNVRDYNINDYRKQIALVSQEPTLYQGTVRENIVLGASKDVSEEEMIEACKKANIHEFILGLPNGYNTLCGQKGSSLSGGQKQRIAIARALIRNPKILLLDEATSALDSHSEKVVQEALNAASQGRTTVAIAHRLSSIQDADCIFVFDGGVTCEAGTHAELVKQRGRYYELVVEQGLNKA

SEQ ID NO: 23878 - protein, 318 aa, Rubrobacter xylanophilus DSM 9941
MEASGALEVVTLGEALIVMDPVERGPLRHVPGFRKRVGGAELNVAVALARLGHRAGWAGSVGDDEFGREVLGFLRAEGVDVSGAVLDPGAPTGLYFKEWRAGGLRAHYYRAGSAASRMAPGRLDEGFLLSGRVLHLTGITPALSGGCEELVRRLAGEAGRRGVLLSFDANIRWRLFGERDPRKAIEPLLPLADLLFLSDEEAELLLGGSDPRSVERARGRLGAGVVVVHSASGSFAAGGEGVVRREGYRVEAVDTVGAGDAFVGGFLAGFLRGWETGACLELANACGACAVAVPGDAASMPAEEEALALLRGRRERER

SEQ ID NO: 23879 - protein, 279 aa, Vibrio cholerae
KEAGLDFVTAGDFAWYDHVLTTTLLLGHVPKRHSHGFPDLDTLFHVGRGQSQNACGCGTGSAASDMTKWFNTNYHYIVPEFSSHDTFNVSWPQLFEEVNEALQAGHDVKPVLLGPISYLYLGKEVEEGFDRLTLLPRLLTAYQAILSKLAKQGVQWVQIDEPILALELEPRWQEAFKLAYQVIRGDVKLLLTTYFDSVLDTLDKIVELPVDGLHVDISAAPAQLETIVNRLPSDWVLSAGVINGRNVWRADLSAILARLQPVKTLLGERLWVASSCSLL

SEQ ID NO: 23880 - protein, 279 aa, Vibrio cholerae
KEAGLDFVTAGDFAWYDHVLTTTLLLGHVPKRHSHGFPDLDTLFRVGRGQSQNACGCGTGSAASDMTKWFNTNYHYIVPEFSSHDTFNVSWPQLFEEVNEALQAGHDVKPVLLGPVSYLYLGKEVEEGFDRLTLLPRLLTAYQAILSKLAKQGVQWVQIDEPILALELEPRWQEAFKLAYQVIRGDVKLLLTTYFDSVLDTLDKIVELPVDGLHVDISAAPAQLETIVNRLPSDWVLSAGVINGRNVWRADLSAILARLQPVKTLLGERLWVASSCSLL

SEQ ID NO: 23881 - protein, 311 aa, Glycine max
MQVPLIDRINDLQVGLNSLQNPSFPSQITTSLAYNFCKWGAVILALVATFGSIINRVTIFIIHFRAKAPSLPSLNLNDDDFYTSSDDEDDFQNDEDDDLTYSSSEPEDEPSASSSFIRLEDYFRIRGTDNLDDEFQTQNGTHKRCRSIGDIFSLSELANSKSVVKLWDSIGFGLGLDFDDYDGYEVSSAKPLQAPTSSTASPAVVVSAGEGAYGNLALEIWDTRLRRRKPTVVAEWGPTVGKTLHVESGGVQKVYVRDDGRYSVTVGDMRKVSTPLGNVTESDADTWWDADAIVVSDESFGEQQSMLQQPT

SEQ ID NO: 23882 - protein, 263 aa, Nocardia farcinica IFM 10152
MDWYTGNTGYDTVLTIGFAFAAFVIVGGLFAQSPYGRFAPASLGFNLSPKLGWWLMELPATVVFAVFFLTGPDRFEPVPLVLAGIWLLHYANRGWFFPLAIRQVPDKRSTFNVSVLAAGMFVTTLHGYLNGAFFSHDYKHQYGTEWLTDPRFLIGLAGYLCGFALLVRSESIVRNLRDKRDPGAAEYRIPYGGGFRFVSSPAYLGELIAWAGFALLTWSLAGVVIFLITAGNLVPRAFATHRWYREKFADYPRNRKALIPFVI

SEQ ID NO: 23883 - protein, 63 aa, Erysimum cheiri
WMPELRRFAPNVPIVLVGTKLDLRDDKGYLADHTNVITSNQGEELRKQIGAAAYIECSSKTQQ

SEQ ID NO: 23884 - protein, 533 aa, Schizosaccharomyces pombe
MKASFFVFAISALQALQASVASAYSEVPGKRSVVLNLQHSQYDHVARKLERTKVLNKRDSSGYPVLDLEYTDAGGYFANLTLGSNERVYSLTLDTGSPYIWVTAKNITALSASEIWSDTDGVDAGRSTSDIRTNACTNYTCFDYSSTTARRTNSSTIGFLASYGDNTTVLGYNMVDNAYFAGLTLPGFEFGLATREYDSSQISVTPGIIGLSVAMTITGISSDDKVVAFTPPTIVDQLVSANVIDTPAFGIYLNEDVGELIFGGYDKAKINGSVHWVNISSSDDSTFYSVNLESITVTNSTSSNNVQSSKRSSKDIEVNTTVTLDTGTVYIYLPEDTVESIADQYQGIVSEYGYVVIYCDSFSDSDYISFNFGSDADFHVSVNDLVIYRQESTSGDICYLALFEGDTSSYLLGQYFLQYVYSIYDWDAQKIGLAALNSNATSTANHQILNINSALRSVTSGQSVSATPTVSMSIAATSFGSSLVLTASASPSSTSVDGSSSSDSSEASGAASVGVSISAIVLCASTLISLLFA

SEQ ID NO: 23885 - protein, 107 aa, Erysimum cheiri
LGLWDTAGQEDYSRLRPLSYRGADIFVLAFSLISKASYENVLKKWMPELRRFAPNVPIVLVGTKLDLRDDKGYLADHTNVITSNQGEELRKQIGAAAYIECSSKTQQ

SEQ ID NO: 23886 - protein, 431 aa, Exiguobacterium sp. 255-15
MKLEEMLVSVDTFYVLFATLLVFTMQIGFLLLETGMLRAKNAGHVAVKQLISFSVAALAFWAIGFGLTFGDGPGLIGTEGFFLHGGFSSLDWSNVTIDVKFLFQLSFVAVSLAIAWGGFAERAKLSVYLLFGTFFVAVIYPIIARSVWAGGFLGSLGMQDFAGSTVVHLQGGIAALVAALILKKRIGAEKTPLLGHNVIYSVVGAFILWLCWFGFNAGSTLTIADGFFSYVALTTLLATAAGALGALAISFWHRRVADIPSIINGVLAALVAITAACAFVEPWGAVVIGFLAGVITYATSILLARRVDDPLCAFSVHGVAGIWGTLATGFFASPRLVEITGIGQAGLFYGGGFTQLGVQALGVVFAVVVVSVLSYVFLKLLDVTIGLRITREDELRGLDVAEHGQASYDLPAPVSKESHPTYEEESTEKVN

SEQ ID NO: 23887 - protein, 378 aa, Arabidopsis thaliana
MANHLQVPLTKPDRVKEEQEVEEEARLLARRLANAAASPMVLKAALELGVIDTITTVGGGDLWLSPSEIALRLPTKPCNLEAPALLDRMLRFLVSHSVLKCRTVIEENGQTGKVERVYAAEPVCKYLLNKSDDVSGSFASLFMLDLSDVFIKTWTHLEDVILEGRDAFSSAHGMKLFEYIQADERFGKVFNRAMLESSTMVTEKVLKFYEGFKDVKTLVDVGGGLGNTLGLITSKYPHLIGINFDLAPVLANAHSYPGVNHVAGDMFIKIPKGDAIFMKWILHDWTDEQCVAILKNCWKSLEENGKLIIVEMVTPVEAKSGDICSNIVFGMDMTMLTQCSGGKERDLYEFENLAYASGFSRCAIVCAVYPFSVIEIYK

SEQ ID NO: 23888 - protein, 339 aa, ASPERGILLUS NIDULANS FGSC A4
MDTPTRPSISPGPATNPLSAHSTWNSLSSLADLVTPKATNRADFIAECKSGALDGVVVAYRTFDSVSITGLFDEELVNALPSSLVYLAHCGAGYDQISTQACTARNPPLRVSNVPTAVDDATADVNMFLIIGALRNFNAGMHALRQGHWRGLTPPRLGHDPENKVLGILGMGGIGRNLKRKAESFGMKVIYHNRRELSAELAGGAKYVSFEELLKQSDVISLNLPLNKNTRHIISTEQFNQMKDGVVIVNTARGAVMDEDALVKALDNGKVYSAGLDVFEDEPKIHPGLVENPNVLLVPHMGTWTVETQTAMEEWAIENVRMALETGKLKTPVPEQADL

SEQ ID NO: 23889 - protein, 213 aa, Oryza sativa
MGLLATCVVLLATVFLEGFRVMLPLRSRDARGRQLALPIKLLYTSTMPVVLHSAAVSSLYTVSQLLHYSRFAGSLLGTWKKTGYAAIPVPVGGVAYYVTPPAGLSHAAAYAASLLASCTLFSGAWVEVSRSSAQDVARQLSVQRLALHGARERDAALRSHLSRYISTAAALGGLCVGALTILADMTGAIGSGTGILLAATVVYNLIDAFQKEE

SEQ ID NO: 23890 - protein, 580 aa, Zea mays
MGEVEDMYTQDGTVDMKGNPAVKKGTGNWRACPYILANECCERLAYYGMSTNLVNYMKTRLGQVNSVASNNVTNWQGTCYITPLIGAFFADAYMGRFWTIAIFMIIYIFGLALLTMASSVKGLVPTSCGDKDVCHPTDAQAAVVFVALYLIALGTGGIKPCVSSFGADQFDENDEREKKSKSSFFNWFYFSINIGALVASTVLVYVQTHVGWGWGFGIPAVVMAIAVGSFFVGTPLYRHQKPGGSPLTRIAQVLVACARKWNVAVPADKSRLHETVDGESGIEGSRKLEHSEQLACLDRAAVVTAEDGAEASPWRLCSVTQVEELKSVIRLLPIWASGIVFAAVYSQMSTMFVLQGNTLDQSMGPRFKIPSATLSMVDTISVIVWVPVYDRAIVPLVRSYTGRPRGFTQLQRMGIGLVVSIFSMVAAGVLDIVRLRAIARHGLYGEDDIVPISIFWQIPQYFIIGCAEVFTFVGQLEFFYDQAPDAMRSMCSALSLTTVALGNYLSTVLVTIVTHITTRHGRIGWIPENLNRGHLDYFFWLLAVLSLLNFLAYLVIASWYKYKKTADDYPGAKGEHGTEH

SEQ ID NO: 23891 - protein, 303 aa, Escherichia coli
MTRTNLITGFLGSGKTTSILHLLAHKDPNEKWAVLVNEFGEVGIDGALLADSGALLKEIPGGCMCCVNGLPMQVGLNTLLRQGKPDRLLIEPTGLGHPKQILDLLTAPVYEPWIDLRATLCILDPRLLLDEKSASNENFRDQLAAADIIVANKSDRTTPESEQALQRWWQQNGGDRQLIHSEHGKVDGHLLDLPRRNLAELPASAAHSHQHVVKKGLAALSLPEHQRWRRSLNSGQGYQACGWIFDADTVFDTIGILEWARLAPVERVKGVLRIPEGLVRINRQAMTCTLKRKTLRHRTAVLS

SEQ ID NO: 23892 - protein, 411 aa, Brassica napus
MNALAATNRNFRHASRILGLDSKIEKSLMIPFREIKVECTIPKDDGTLVSYVGFRVQHDNARGPMKGGIRYHPEVDPDEVNALAQLMTWKTAVADIPYGGAKGGIGCNPRDLSLSELERLTHVFTQKIHDLIGIHTDVPAPDMGTNAQTMAWILDEYSKFHGHSPAVVTGKPIDLGGSLGREAATGRGVVYATEALLAEYGKSIKGLTFVVQGFGNVGTWAAKLIHEKGGKVVAVSDITGAVRNPEGLDIDALLSHKEATGSLVDFSGGDAMDSNELLIHECDVLIPCALGGVLNKENAGDVKAKFIIEAANHPTDPDADEILSKKGVIILPDIYANAGGVTVSYFEWVQNIQGFMWEEEKVNLELQKYMTRAFHNIKSMCHTHSCNLRMGAFTLGVNRVARATQLRGWEA

SEQ ID NO: 23893 - protein, 452 aa, Pseudomonas syringae pv. tomato str. DC3000
MAFDFDLFVIGAGSGGVRAARFAAGFGARVAVAESRYLGGTCVNVGCVPKKLLVYGAHFSEDFDHAKGFGWSLGEASFDWSTLIANKDREINRLNDIYRKLLVDSGVTLLEGHAKIVGPQQVEINGQTHSAERILIATGGWPQVPDVPGREHAITSNEAFYLKALPKRVVVVGGGYIAVEFASIFNGLGADTTLVYRGELFLRGFDGSVRSHLHEELLKRHMTIRFNSDIERIDKQSDGSLLLSMKGGGTLETDCVFYATGRRPMLDNLGLDSVDVKLDEHGYIKVDEHYQTSEPSILALGDVIGGVQLTPVALAEGMAVARRLFKPEQYRPVDYNHIPTAVFSLPNIGTVGLTEEDAIKAGHDVQVFESRFRSMKLTLTDDQERTLMKLVVDAKTDRVLGCHMVGPDAGEIVQSLAIAIKAGATKQVFDDTIGVHPTAAEEFVTMRTPAKR

SEQ ID NO: 23894 - protein, 514 aa, Oryza sativa
MAMAAAMGVASPYHAAHAAASTSCDSLRLLVAEGRPRRPRGVASSSSSSSSAGRRRRPLVFSPRAVSDSKSSQTCLDPDASTSVLGIILGGGAGTRLYPLTKKRAKPAVPLGANYRLIDIPVSNCLNSNISKIYVLTQFNSASLNRHLSRAYGNNIGGYKNEGFVEVLAAQQSPDNPNWFQGTADAVRQYLWLFEEHNVMEFLILAGDHLYRMDYEKFIQAHRETDSDITVAALPMDEKRATAFGLMKIDEEGRIVEFAEKPKGEQLKAMMVDTTILGLDDVRAKEMPYIASMGIYVISKNVMLQLLREQFPGANDFGSEVIPGATNIGMRVQAYLYDGYWEDIGTIEAFYNANLGITKKPVPDFSFYDRSAPIYTQPRHLPPSKVLDADVTDSVIGEGCVIKNCKIHHSVVGLRSCISEGAIIEDSLLMGADYYETEADKKLLGEKGGIPIGIGKNCHIRRAIIDKNARIGDNVKIINVDNVQEAARETDGYFIKSGIVTVIKDALLPSGTVI

SEQ ID NO: 23895 - protein, 510 aa, Bordetella bronchiseptica RB50
MTTIRTLVVAAEAFPLAKTGGLGDAVAGMVQALGHRPGGVDVQCELLMPAYRGTLDRLYRPRTVARLGGLPGGPASLVRGHCPGSGLSVLLLRNDALYDRPGIYVDDSGQGYPDNARRYAALAHAAARLAQGLPGLRPPHVVHAHDWHAALAPLLIHAAGLHYVKTLLTIHNLAFQGTFPAELASALGIPLACRHDDGALSDDRVNFLKAGIRYATRVTTVSRAYAREILTPAFGCGLHGLLRARGADLSPVPNGIDTALWNPAADPHLGGLRFDALDMRNKACCKAALQAELGLQLRADATVLAMGSRLTGQKMADVAIAALPALLEAHEHLQFALIGRGEPDLEAALRALAARYPGRCAVHIGYDEPLAHRLHAGADLLLHGSRFEPFGLTPLYAMRYGTLPVASRVGGMVDTIRDPGPAIEESCAGQGTGFLFDGSEPADMRQAVTRALRALAKPAVRDAMRRNAMQADFSWRTSAQAYAGLYANLASGPQRGRVPAPTLPLLANAA

SEQ ID NO: 23896 - protein, 305 aa, GIBBERELLA ZEAE PH-1
MAIAAIGQICSTKSIKGNLEQCVKLVASAARGQAKVLFLPEAADYIASNGKESLELAEPQSTSSFVSGLREAAREHRVAVHVGIHHRDETDIGQEQSKRILNRTIYINADGQIDDTATYDKLHAFDFGKMKESDTVQPGKTLTAPFDTPIGRIGSLICFDLRFPEAPLALAQPGPHSAWKNRPAQVLTYPSAFTCQTGPVHWETLLKARAIETQSYVIASGQVGKHNEKRSSWGQSIIIDPWGKVVLKLKGVKEEGGKYEGTPEEGAVGDIGFVDIDLEYLEKIRNDSPLQRRTDVYPELVCSKA

SEQ ID NO: 23897 - protein, 1113 aa, Bordetella bronchiseptica RB50
MPATHPAPDPLWYKDAVIYQLHVKSFFDANDDGVGDFAGLLAKLDYIVELGVNTIWLLPFYPSPRRDDGYDIADYRGVHPDYGSLADARRLVRAAHARGLRVITELVINHTSDQHPWFQRARAARPGSAHRAYYVWSDDDKAYAGTRIIFCDTEKSNWTWDPVAGAYFWHRFYSHQPDLNYDNPQVLREVLGAMRYWLDMGVDGLRLDAVPYLVEREGTNNENLPETHAILRRIRRVIDSEYPGRMLLAEANQWPEDAQEYFGAGDECHMAFHFPLMPRMYMAIAQEDRLPVTDIIRQTPSIAPQCQWAIFLRNHDELTLEMVTSRERDYLWNVYAAEPRARINLGIRRRLAPLLERDRRRIELMNSLLLSMPGTPVLYYGDELGMGDNIHLGDRDGVRTPMQWSPDRNGGFSRADPERLPLPLLMGPLYGYEAVNVEAQQRDPHSLLNWTRRMLAKRRQSHVFGRGELSFLYPGNRKILAYLRTWEDTVVLCVANLSQAAQPVELHLSEYAGRVPVEMLGGTAFPQIGELPYLLTLPPFGFYWLDLSAGAAPPAWHSELPPQMPESITLVSRGAGAALRLTEASRRQLEADVLPAYLQRQRWYAARRKPGVMRLAYSVPLNDDVESYYEAEIEVSDDGPPRRFHTPVALAWQDDTAAQYPLARVRRGAQLGTLTDASLQPGYARVLLAALTAGRDIQAGGEPAVRLRFLPEPGLADLALRDDSEVRALSADQSNSSLLVGERVVFKLLRELHAGPHPEAEMTRYLTQAGYAHTPALLGEVVRVQGDQAPHTLALAHAYVVNEGDAWNWTVAYLKRTVDAAMLTGASADDYQQELAGYEVLAGTIGQRLAQMHSVLARAGELPGFAPRPASERDAALAGEHAVAQLDRALQALRACESGLAPASHACAQWLFEHRDRLAAHIMTLAQAETGALRIRVHGDFHLGQILVAQTDAYLIDFEGEPARPMAERRQLSSPFKDVAGILRSFDYAVAELSRDDPLGGAPRDFNTGVAEPADPASAPRETREALLARFRQRAGAALLASYGNAIDPVLALPPERAQALTCLYLLEKAAYEICYESAYRPERLPVPIHGLAETARAALLAAAVDHDEGPAP

SEQ ID NO: 23898 - protein, 599 aa, Methylococcus capsulatus str. Bath
MTPEQQQHQLKELIAKGKMQGYLTFSEVNDHLPSDIVDPEQMEDIICMINDMGIEVHEDVPDNEDLIQDTAVVAESDEDEAAEVAAALASSVDTELGRTTDPVRMYMREMGTVELLTREGELSIAKRIEEGLNIAANELVRFPAAMEHFLKAFETVDNGELRLSDLISDFFDPAAADTVATEDDAEAEIIDEGDTGPDPELVKEKLAAFRKLHKAAVTAHHKYGYGHEKTQKSFDALATAFMEFKKTPQFFKELTDTLRDTVAKIREQERALTDICVTKGKMPKAEFIESFSGSETDEGWLDRVCDPAKPYAAAIKAHAEEIRRIQAKLAQIEKENRLDIALIKDIHRRVSAGENQARLAKREMIEANLRLVISIAKKYTNRGLQFLDLIQEGNIGLMKAVDKFEYRRGYKFSTYATWWIRQAITRSIADQARTIRIPVHMIETINKLNRISRQMLQEMGREPTPDELAARMDMPEDKVRKVMKIAKEPISMETPIGDDDDSHLGDFIEDSRVLSPVEHATVASLRETTQQVLAGLTAREAKVLRMRFGIDMNTDHTLEEVGKQFDVTRERIRQIEAKALRKLRHPSRSEQLRSFLDIE

SEQ ID NO: 23899 - protein, 339 aa, Caulobacter crescentus CB15
MRVYYDRDADLARILDRKIAIVGYGSQGHAHALNLRDSGIKNVAVALRAGSPTAKKAEGEGLKVMTVAEAAAWADLIMILAPDEHQAAIYKNEIALNIRDGAALLFAHGLNVHFGLIEPKDTIDVLMVAPKGPGHTVRGEYQKGGGVPCLIAVHHNATGNALDLGLAYASAIGGGRSGIIETNFREECETDLFGEQAVLCGGTVELVRAGFETLVEAGYAPEMAYFECLHELKLIVDLMYEGGIANMNYSISNTAEYGEYVTGPRIITPETKAEMKRVLEDIQSGKFVRDFMLENAVGQPSFKATRRRSAEHQIEEVGARLRGMMPWIAKNKLVDQAKN

SEQ ID NO: 23900 - protein, 505 aa, Helicobacter pylori J99
MVNKDVKQTTAFGAPVWDDNNVITAGPRGPVLLQSTWFLEKLAAFDRERIPERVVHAKGSGAYGTFTVTKDITKYTKAKIFSKVGKKTECFFRFSTVAGEKGSADAVRDPRGFAMKYYTEEGNWDLVGNNTPVFFIRDAIKFPDFIHTQKRDPQTNLPNPDMVWDFWSNVPESLYQVTWVMSDRGIPKSFRHMDGFGSHTFSLINAKGERFWVKFHFETMQGVKHLTNEEAAEVRKYDPDSNQRDLFDAIAGGDFPKWKMSIQVMPEEDAKKYRFHPFDVTKIWYLQDYPLMEVGIVELNKNPENYFAEVEQAAFTPANVVPGIGYSPDRMLQGRLFSYGDTHRYRLGVNYPQIPVNRPRCPFHSSSRDGYMQNGYYGSLQNYTPSSLPGYKEDKSARDPKFNLAHIEKEFEVWNWDYRAEDSDYYTQPGDYYRSLPADEKERLYDTIGGSLAHVTHKEIVDKQLEHFKKADPKYAEGVKKALEKHQKMMKDMHAKDMHHMKKKK

SEQ ID NO: 23901 - protein, 387 aa, Ceriporiopsis subvermispora
MAFTSLLALVALAAITRAAPTTICPDGTRVSNHVCCDFIPLAQALQSTLYMGDCGEDAHETIRLTFHDAIAISQSQGPSAGGGADGSMLIFPTVEPFFHANAGIDDSVNNLIPFLDKFPTITAGDLIQFAGTVALSNCPGAPQLEFLAGRPNATAPAVDGLIPEPQDNVTHILERFADAGGFTPFEVVSLLASHTVARADKVDLTIDAAPFDSTPFTFDTQIFLEVLLKGVGFPGTDNNTGEVESPLPLGNNKQGGNETGEMRLQSDFALARDDRTACFWQGFVNEQEYMMSSFKAAMSKLAILGHNRNDLIDCSEVVPTPKPPVGKPASFPATTGPQDLQLTCKSERFPSLTIDHGAQETLIPHCSNGGQDCPTVQFTGPAGEDDS

SEQ ID NO: 23902 - protein, 178 aa, Arabidopsis thaliana
MKRERSDFEESLKNIDIAKCLMILAQTSMVKQIGLNQHTESHTSNQFECKTCNKRFSSFQALGGHRASHKKPKLTVEQKDVKHLSNDYKGNHFHKCSICSQSFGTGQALGGHMRRHRSSMTVEPSFISPMIPSMPVLKRCGSSKRILSLDLNLTPLENDLEYIFGKTFVPKIDMKFVL

SEQ ID NO: 23903 - protein, 283 aa, Glycine max
MTAPPSKYTHHSKLLIPSEEDPPKHPYPRLVRITVTDTEATDSSSDEEQHTSTRHRHRKFVNEISIESSCASENDGAASRKRIRRRSTATPKGRASDTRLVSNGKKFRGVRQRPWGKWAAEIRDPARRVRLWLGTYDTAEEAALVYDNAAIRLRGPHALTNFITPPSGEETHCNSKNIFSPTSVLHCCSLSEEAESVTAKDDDYSSVSENKVKAESAFPPEIDFEFRACSTVPESLLFCDDDWSSEFLNSYEDFGFKSWHTDRNRDFFQDIDDLFVSDPLLAL

SEQ ID NO: 23904 - protein, 182 aa, Burkholderia fungorum LB400
MNQTGEVATLGGGCFWCLEAVYLGVEGVNAVESGYAGGEARHPTYEDVCDGETGHAEVVKVDFDPAKISYREILDIFFAIHDPTQLNRQGNDVGTQYRSVIFTHSDAQREIALQAIREIGEQQIYDGQIVTQVLPLNDNYWPAEDYHQNYFAHHPNQGYCSFVVAPKVAKFRQKFAHRIKAS

SEQ ID NO: 23905 - protein, 346 aa, Hydrogenophilus thermoluteolus
MRHTKIVATLGPASSDPATLERLLLAGVDVVRLNFSHGTADEHRARASLVRALAQQTQRPVGILGDLQGPKIRIGRFTTNAVTLSKGQRFRLDCDLAPGDATRVGLDYPELIDDVEVGDILLLDDGKIRLQIVEKCADALITQVLVGGTLSNHKGINKLGGGLSAPALTAKDRAVPISRSLPKSASITVAVSFVKHAEEMHEARHLARAAGSRARLIAKIERVEAIANLDAILEASDGVMVARGDLAVEVGDAAVPALQKRILRRAREMNRLSITATQMMESMVHSPVPTRAEVSDVANAVLDGTDAVMLSAETAAGQYPVEAVEAMARVCAEATRRTTPTSTRSS

SEQ ID NO: 23906 - protein, 337 aa, Phanerochaete chrysosporium
MPVKAGINGFGRIGRIVLRNALLHGDIDVVAVNDPFIDLEYMVYMFKYDSVHGRFKGSVEAKDGKLYVEGKPIHVFAEKDPANIPWGSVGAEYIVESTGVFTTTEKASAHLKGVCKKVIISAPSADAPMFVCGVNLDAYDSKYKVISNASCTTNCLAPLAKVIHDKFGIVQGLMTSVHATTATQKTVDGPSNKDWLGGRSVGNNIIPSSTGAAKAVGKVIPSLNGKLNGLAFRVPTVDVSVVDLVVRLEKPASYDEIKQAIKEASETTHKGILGYTEEKVVSTDFTGNDNSSIFDRDAGIALNKTFVKLISWYDNEWGYSRRCCDLLGYAAKVDGAL

SEQ ID NO: 23907 - protein, 180 aa, Lycopersicon esculentum
MASSVISSAAVATRSNVTQASMVAPFTGLKSSATFPVTKKQNLDITSIASNGGRVSCMQVWPPINMKKYETLSYLPDLSDEQLLSEIEYLLKNGWVPCLEFETEHGFVYRENNKSPGYYDGRYWTMWKLPMFGCTDATQVLAEVQEAKKAYPQAWVRIIGFDNVRQVQCISFIAYKPEGY

SEQ ID NO: 23908 - protein, 245 aa, Brassica napus
  misc_feature (178)..(178): Xaa can be any naturally occurring amino acid
  misc_feature (211)..(211): Xaa can be any naturally occurring amino acid
  unsure (1)..(245): unsure at all Xaa locations
MEISIASATLSIAVPRVPWWAWRTLNWVWFKPKMLESYLRRQGLSGSPYTPLVGDLKRNFSLLKEARSKPIKLTDDITPRVVPYPLKMLKTHGRTYFTWLGPIPTITIMDPEQIKEVFNKVYDFQKTHTFPLARLIGTGLASYDCDKWAKHRRIINPAFHLEKIKNMVPAFHQSCSEXVGEWDKLVSEKGLSCEVDVWPGLVSMTADVISXVLLFGSSYKERQRIFELQAELAQLIIQAFRKHII

SEQ ID NO: 23909 - protein, 910 aa, Arabidopsis thaliana
  misc_feature (602)..(602): Xaa can be any naturally occurring amino acid
  unsure (1)..(910): unsure at all Xaa locations
MEDDGGSDGGEGNGGFSPNSSFGAFADTAMDLDFMDELLFDGCWLETTDSKSLKQTEQSPSASTAMNDNSPFLCFGENPSQDNFSNEETERMFPQAEKFLLEEAEVGKSWWIAPSASEGPSSSVKERLLQAISGLNEAVQDKDFLVQIWVPIQQEGKSFLTTWAQPHLFNQEYSSLAEYRHVSETYNFPADEGMKDFVGLPGRVFLQKFPEWTPDVRFFRRDEYPRIKEAQKCDVRGSLALPVFERGSGTCLGVVEIVTTTQKMNYRQELEKMCKALEAVDLRSSSNLNTPSSEFLQVYSDFYCAALPEIKDFLATICRSYDFPLALSWAPCARQGKVGSRHSDENFSECVSTIDSACSVPDEQSKSFWEACSEHHLLQGEGIVGKAFEATKLFFVPEVATFSKTNYPLAHHAKISGLHAALAVPLKSKSGLVEFVLEFFFPKACLDTEAQQEMLKSLCVTLQQDFRSSNLFIKDLELEVVLPVRETMLFSENLLCGAETVESLTEIQMQESSWIAHMIKANEKGKDVSLSWEYQKEDPKELSSGRENSQLDPVPNNVPLEAEQLQQASTPGLRVDIGPSTESASTGGGNMLSSRRPGEKKXRAKTEKTIGLEVLRQYFAGSLKDAAKSIGVCPTTLKRICRQHGIMRWPSRKIKKVGHSLKKLQLVMDSVQGAQGSIQLDSFYTSFPELNSPNMSSNGPSLKSNEQPSHLNAQTDNGIMAEENPRSPSSSCSKSSGSSNNNENTGNILVAEDADAVLKRAHSEAQLHNVNQEETKCLARTQSHKTFKEPLVLDNSSPLTGSSNTSLRARGAIKVKATFGEARIRFTLLPSWGFAELKQEIARRFNIDDISWFDLKYLDDDKEWVLLTCEADLVECIDIYRLTQTHTIKISLNEASQVKLSGSFGNTGLS

SEQ ID NO: 23910 - protein, 137 aa, Brassica napus
GRVGDPDAGSNQGSGIAGAVFNLTTSIIGAGIMALPATMKVLGLALGLLLIVLIAVLSEISVELLVRFSSLYKSRSYGEVVQFALGKPARVLSEVCIVVNNGGFLVVYLIIMGDVMSGSLHHVGGLDQWLGNGFWDH

SEQ ID NO: 23911 - protein, 479 aa, Shigella flexneri 2a str. 301
MSVPVQHPMYIDGQFVTWRGDAWIDVVNPATEAVISRIPDGQAEDARKAIDAAERAQPEWEALPAIERASWLCKISAGIRERASEISALIVEEGGKIQQLAEVEVAFTADYIDYMAEWARRYEGEIIQSDRPGENILLFKRALGVTTGILPWNFPFFLIARKMAPALLTGNTIVIKPSEFTPNNAIAFAKIVDEIGLPRGVFNLVLGRGETVGQELAGNPKVAMVSMTGSVSAGEKIMATAAKNITKVCLELGGKAPAIVMDDADLELAVKAIVDSRVINSGQVCNCAERVYVQKGIYDQFVNLLGEALQAVQFGNPAERNDIAMGPLINAAALERVEQKVARAVEEGARVALGGKAVEGKGYYYPPTLLLDVRQEMSIMHEETFGPVLPVVAFDTLEDAISMANDSDYGLTSSIYTQNLNVAMKAIKGLKFGETYINRENFEAMQGFHAGWRKSGIGGADGKHGLHEYLQTQVVYLQS

SEQ ID NO: 23912 - protein, 484 aa, Pseudomonas syringae pv. tomato str. DC3000
MSQVNRRKVLFVTSELADLVKTGGLGDVSAALPRAMRHLHDVRVLIPGYPQVINSGNPIHIISQLGGHAALPPCKVGRMDMKDGLVIYVLICPELYEREGTPYADTNGRDWSDNHIRFARLGLAAAEFAAGEVKSQWCPELVHAHDWPAGLAPAYMRWRGQSTPSIFTVHNLAYQGTVSTASSRELGIPDEAITPEGMEFYGKLSFIKAGMAFANHITTVSATYAREITTPEFGCGLEGFLQSKADKGQLSGIPNGIDESWDAATDEHLICHFAPNEWTRKEINADYVRELFELDASSGPLYAVVSRLVYQKGLDLTIGVAEHIVNNGGQIAIIGRGEPEEEDAMRELAARFPGRIGVRIGFNETDARRMFAGSDFLLMPSRYEPCGLSQMYAQRFGSLPVARNTGGLADTIEDGVTGFLFNESTVESYTEALNRTFQVFAHPELLNAMRCRAMAAPFNWHQAVEPYAELYRDLLKKNVSMTSN

SEQ ID NO: 23913 - protein, 812 aa, Pyrus pyrifolia
MENRRKFTRALSLRERVEDTLSDHRNELVALLSRYLDQGKRILQPHDLIDQLDIVIGDDEAKQQLKNGPFSEVLKSAQEAIVLPPYVALAVRPRPGVWDYVRVNVYELSVEELTVSEYLHFKEELVDGESSDKYVLELDFEPFNAAFPRPTRSSSIGNGVQFLNRHLSSIMFRNRESLDPLLDFLRAHKYKGHPLMLNDRIQSVSKLQSALAKAEDHLSKLQPETPYSEFEYLFQGMGFERGWGDTAVHVLEMMHLLLDILQAPDPSILETFLGRIPMVFNVVILSPHGYFGQANVLGLPDTGGQIVYILDQVRALEKEMLERIRKQGLDFTPRILIVTRLIPEAKGTTCNQRLERISGTEHTHILRVPFRSEKGILRKWISRFDLWPYLETFAEDAAGEIVAELQGYPDFIIGNYSDGNLVASLLAYKMGVTQCTIAHALEKTKYPNSDIYWKKFEEEYHFSTQFTADLIAMNNADFIITSTYQEIAGTKDPVGQYESHSSYTLPGQYRVVHGINVFDPKFNIVSPGADMTIYFPYSEKQKRLTSLHGSLEELLYNPDQNDVHIGTLSDRSKPIIFSMARLDQVKNMTGLVECYAKCSKLRDLANLVIVAGYIDAKKSRDREEIAEIEKMHNLMIEYKLDGQFRWISSQTNRVSNGELYRYIADTRGAFAQPAFYEAFGLTVVEAMSCGLPTFATIHGGPAEIIEHGVSGFHIDPYHPEKAAALMADFFQRCKEDPSYWNTISDAGLQRIYEKYTWKIYSERLMTLAGVYGFWKYVSKLERRETRRYLEMFYILKFRDLAKSVPEAIDDAH

SEQ ID NO: 23914 - protein, 266 aa, Anabaena variabilis ATCC 29413
MTAISDRFETLKQNQECALIPFITAGDPDLETTAAALKILDSNGADIIELGIPYSDPLADGPVIQAAATRALQNGTKLESVLEMLKVTTPSLQAPIVLFTYYNSILHRGIDNFLEQVAAAGVAGLVVPDLPLEEAAGLLKPATERGIDLILLIAPTSSSERIEAIARSSQGFIYLVSVTGVTGMRSQVEGRVLDLLQKVRQVTDKPLGVGFGISQPAQATQVRDWGADAAIVGSAFVQRLATGTPAEGLSAIAEFCQSLKAAIKTS

SEQ ID NO: 23915 - protein, 200 aa, Triticum aestivum
  misc_feature (180)..(180): Xaa can be any naturally occurring amino acid
  unsure (1)..(200): unsure at all Xaa locations
HASEEHRSKSSQKSIDHPSASNTSQIVDSFHQHLESPPIRPTISLIRRSNVFDPFSLDFFDPFDGFPFGSGSNSSGSLVPRTSSDTAAFAGARIDWKETPEAHVFKADVPGLKKEEVKVEVEDGNILQISGERNKEQEEKTDTWHRVERSSGKFLRRFRLPENAKAEQVKASMENGVLTXVTVPKEEAKKPEVKSIQISG

SEQ ID NO: 23916 - protein, 401 aa, Cucumis melo
MDYVYAPGKNHLFVPGPVNIPEPVLRAMNRNNEDYRSPAVPALTKTLLEDVKKIFKSTTGTTFLIPTTGTGAWESALTNTLSPGDRIVSFLIGQFSLLWIDQQQRLNFNVDVVESDWGQGANLDVLESKLATDGGHTIKAICIVHNETATGVTNDLSKVRFLLDKYKHPALLLVDGVSSICALDFRMDEWGVDVALTGSQKALSLPTGLGIICASPKALEASKTSKSVKVFFDWKDYLKFYNLGTYWPYTPSIQLLYGLRAALDLLFEEGLDNVIARHSRLGKATRLAVEAWGLKNCTQKEEWFSDTVTAVLVPSYIDSAEIVRRAWKRYNLSLGLGLNKVAGKVFRIGHLGNLNELQLLGCLAGVEMVLKDVGYPVKLGSGVAAASAYLQNNIPLIPSRI

SEQ ID NO: 23917 - protein, 647 aa, Kluyveromyces lactis NRRL Y-1140
MSRKRTPQDFSFKERLGHGSYSTVYKAVDRSTGQLFAIKVCSKKHIISENKVKYVTIEKNTLNLLAHGNHPGIIKLYYTFHDSENLYFVLDFAPGGELLQLLQTQGRFNEAWTKHFMCQLIDALEYIHGCKVVHRDLKPENLLLSSEGKLMITDFGVASNLAATDNLSSTSSFVGTAEYVSPELLLQNKSNFCSDIWAVGCMLYQFTQGTPPFRGENELAAFEKIVNLDYHWIYMVSQHITDLVSKILVLDPDSRYTLPQIKNHAWFQGIDWTNKELIWKGIWQLFGNRNHNNFNGPSMMNKQLHVIDTTIKNIPIQPRKRKPMKVTQTTSSIVEWRKTLGLSPVSGSVGPNGLPKQMKSHVPSRSTPNSPSRALTGKGYTKAMPNTAPPLETCKTPMMPVSPLYITTPGASASFSPKKFNNASDSNRLLTPPASPKALKQGWVKILEIPYVSSSKKTFSSTEYSFIDDRLITRFITEQKSQIINSSMLSLLTLEPNGQFSYTPKGDSTRQMISIVDQNLSIYDLEFNETKNSGYLIFEKFKSKVWLIALPKSAPSDFVINSRQKWVDSLFKTKAALESEKLTKKVDNLSLKPPETCSTSSKPRKSPQDNMFVSSSRAEVLYTLNKQKRSNTDAANGARAAFKNMNK

SEQ ID NO: 23918 - protein, 916 aa, GIBBERELLA ZEAE PH-1
MISLVRKAIKAKQDREKTQLPSTSMEMQQTQHDVNKEQPQCRHMEAYESPNVKCASCASEKKAARVYRWKIIIGLMAPFALQSLDSTIIASALPWIAGDFGEISQLNWIVSAFNLTSAAFIPFWSQMADVFGRNASLNAAIILMLIGSALCTGAPTTAFPVLLLGRGFQGLAAAGLNVIVRTVLADKVSLQENAKNWAIFSLVGGISYGLGPVIGGYLTRADWRWCFGINLPIAVLALIVAFFVLHKELLGPQPIPELNETAETGRRTKFIARLKTVDFGGQLLFILGFGLVILAMTWGGATYPWSSPAVIVPLVLGIIFAGVFCYWEYLLAPGNMVAEKMPWQRAMIPWELISNRDIGLLCYCECATGVGMYAVLYFCNIYFIAVRGYDSDEAGVQLLYFVPGLGAWAIWADRLSVIYGMMALVGCGSGMRFMASPLHGIGLFRHLRASVIGLMAVAIPFGGTVGLTIMSAVFNNTSGLGSSAGEFSHVKSKGAEANEQAKMGVVWAFVAVTPIVALAFPLSWCIGNVKLGQGPSGEDGPTDIIVKGSYLLKLLRGQEHLRVEKNGYRLNSSHSGAWSESAASDENTNASRRLQVPSLPPQCLPYPYLNKTAEMEEKQTVMFTTVSQFQGLMGVMNSCIDESRTTYVFGVISWGSSIDHHVCSQPAITMSDIEVEDEQSPNPRFWLEFRTFDDGLSSRSKSPSTLTAFPQFAELPPELRLRIWSFLIQPRIVVVCCIQRDERLDQRCYELNQRSRGRSVPVLLHINRESRYLALDHYELAFGWRISKLLSDTPVSAPPRVWFNFNLDCVYLAGELEAYDIYGFNSAMVYFLRREDTHRVKHLACVLSELGYAEQESDQVFGCLWHVVDGFPAAKKVLLTVGEGDEEALKGNLEWVSGWVCYGDEFEDGGQVNGDD

SEQ ID NO: 23919 - protein, 175 aa, Leptospira interrogans serovar Copenhageni str. Fiocruz L1-130
MGTVNVVRVASRHKLSWYEKFYFYSIGKGLWITLKHFIKAAILRKAVTIEFPEKKRKYSTRFRGMHTMKRDEQGRERCTSCFCCMWICPADAIYIEAAEVTPEIQHLHPEDKYAKKFEIDLLRCIFCGMCEEACPKGAIYLDGPGEMATDNREDLILTKERMMQLVGGPIIGERQ

SEQ ID NO: 23920 - protein, 173 aa, Triticum aestivum
  misc_feature (79)..(79): Xaa can be any naturally occurring amino acid
  unsure (1)..(173): unsure at all Xaa locations
MAPTVMASSATSVVPFQGLKSTAGLPVSRRSNGASLGSVRNGGRIRCMQVWPIEGIKRWETLSYLPPIRTEALLRQVDXLIRSKWVPCLEFSKVGFIFREHNASPGYYDGRYWTMWKLPMCGCTDPTQVINEVEEVKKEYPDAYVRIIGFDKLRQVQSVSFIAFKPPGCKESG

SEQ ID NO: 23921 - protein, 544 aa, Bacillus subtilis
MAKEIKFSEEARRANLRGVDALADAVKVTLGPKGRNVVLEKKFGSPLITNDGVTIAKEIELEDAFENMGAKLVAEVASKTNDVAGDGTTTATVLAQAMIREGLKNVTAGANPVGVRKGMEQAVALAIENLKEISKPIEGKESIAQVAAISAADEEVGSLIAEAMERVGNDGVITIEESKGFTTELEVVEGMQFDRGYASPYLVTDSDKMEAVLDNPYILITDKKITNIQEILPVLEQVVQQGKPLLLIAEDVEGEALATLVVNKLRGTFNAVAVKAPGFGDRRKAMLEDIAVLTGGEVITEDLGLDLKSTQIAQLGRASKVVVTKENTTIVEGAGETDKISARVTQIRAQVEETTSEFDREKLQERLAKLAGGVRVIKVGAATETELKERKLRIEDALNSTRAAVEEGIVSGGGTALVNVYNKVAAVEAEGDAQTGINIVLRALEEPIRQIAHNAGLEGSVIVERLKNEEIGVGFNAATGEWVNMIEKGIVDPTKVTRSALQNAASVAAMFLTTEAVVADKPEENGGGAGMPDMGGMGGMGGMM

SEQ ID NO: 23922 - protein, 493 aa, Burkholderia fungorum LB400
MYLGIDLGTSEVKVLLLASNGRVIGTAGSPFTVSRQHQRWAEQNPEDWWAGTRAALAALRARYPDEFAQIRGIGLSGQMHGAVLLDAQDRVLRPAILWNDMRSDKECAELTERAPELHSVAGNLAMPGFTAPKLLWVARHEPDIFARTACVLLPKDYLRLQLTGGKVSDPSDAAGTLWLDVAKRDWSDSLLAACNMSRAQMPSLAEGSEPSGTLLPAVAREFGLSDGVIVAAGGGDNATSAIGIGATQPGDGFVSLGTSGVLCVVGDSFRPNPASAVHAFCHAIPDRWHQMSVVLSAASCLRWVCKLTSTDEPTLLAEIEALPADALNTAPLFLPYLSGERTPHNDPYAQGVFFGMNHATDRALLGYAVLEGVTLALTDGLDALRAAGTEAKALSLLGGGARSDYWAQLLADSLDTATRKHGGGETGAALGAARLGWLAAGGDPATVLTKPPIEKEFTPNPRRHAELRARLEAYRALYRHVRPLFDPARKPLA

SEQ ID NO: 23923 - protein, 462 aa, Mannheimia succiniciproducens MBEL55E
MQTLTILLIRGKLMSSTVSSLEDFLSLVAQRDGNQPEFLQAVREVFTSIWPFLEANPQYRSQALLERLVEPERAFQFRVAWTDDKGQVQVNRAFRVQFSSAIGPYKGGMRFHPSVNLSILKFLGFEQIFKNALTTLPMGGGKGGSDFDPKGKSDAEVMRFCQALVAELYRHIGPDTDVPAGDIGVGGREVGYLAGYMKKLSNQAACVFTGRGLSFGGSLIRPEATGYGLVYFAQAMLAEKGDSFQGKTVSVSGSGNVAQYAIEKALQLGAKVVTCSDSAGYVYDEAGFTTEKLAALLDIKNVKRGRVKDYAEQFGLQYFPGERPWGVKVDIALPCATQNELELTDAQKLIANGVQLVAEGANMPTTIEATEALQAAGVLFAPGKAANAGGVATSGLEMAQSSQRLFWSAEEVDQKLHNIMLDIHANCKKYGTDANGNINYVAGANIAGFVKVADAMLAQGVY

SEQ ID NO: 23924 - protein, 287 aa, Mannheimia succiniciproducens MBEL55E
MPNKVVVVGSLHYDIVVESTHRPVKGETVIGKRWYPKFGGKGGNQAVAAAKAGCRVFMVSAVGPDNFAPFLLEHLNKSGVNTDFVQKISGVGSGMSVAIMDSEGDYGAVVVSGSNLEIDINRLDNETLWDNAKMLILQNEVSDSINFEAAKRASRRHIPVCLNAAPAKKLSAEFTKLIDILIVNAVEAEAMCGLSVNSLDSALQAALKLSQDFSRVIVTAGGDGVAYADKESNGKIASIKVKLISTLGAGDCFVGHLCTALSENNTLRDAVAYANQKAAEHVSTVQE

SEQ ID NO: 23925 - protein, 371 aa, Oryza sativa
MAAAGAGAGAPDRAALTVGPGMDMPIMHDSDRYELVRDIGSGNFGVARLMRDRRTMELVAVKYIERGEKIDDNVQREIINHRSLKHPNIIRFKEVILTPTHLAIVMEYASGGELFERICKNVRFSEDEARYFFQQLISGVSYCHSMQVCHRDLKLENTLLDGSPAPRLKICDFGYSKSSVLHSQPKSTVGTPAYIAPEVLLKKEYDGKTADVWSCGVTLYVMVVGAYPFEDPEEPKNFRKTIQRILNVQYSIPENVDISPECRHLISRIFVGDPSLRITIPEIRSHGWFLKNLPADLMDDDSMSSQYEEPDQPMQTMDQIMQILTEATIPPACSRINHILTDGLDLDDDMDDLDSDSDIDVDSSGEIVYAM

SEQ ID NO: 23926 - protein, 333 aa, Craterostigma plantagineum
MNQQQVKVSKNNKQVNNCEDDDDSSDLRRGPWTVDEDFTLINYIAHHGEGRWNSLARFAGLKRTGKSCRLRWLNYLRPDVRRGNITLEEQLLILELHSRWGNRWSKIAQHLPGRTDNEIKNYWRTRVQKHAKQLKCDVNSKQFKDTMRYLWMPRLVERIQASATTDDGAPPAVVSSPSSAMNTACYTTAMAAGDHRRQFMLMPQYYATTTTTHNNSMIAQENSSTVASSESFGSLSSELTAEANYANYHRVINGADHQQIDSSTTSYGWQNCAVGNNGNSDQLGMGFADDRRSNEQWMMMTDDVVDNGGSSDQDNNLWNVDDVWFLQQFSSCF

SEQ ID NO: 23927 - protein, 319 aa, Geobacillus kaustophilus HTA426
MKTLDVVTFGETMVLFTSEAMTPLEYSSHFSKQIGGAESNVAIGLQRLGHSVGWFSKLGNDPFGRYIHKFVRGEGVDTSRCIYTDEAPTGIFFKEKRSPSNIKVYYYRRNSAASLLSPDDLDEEYIANAKFLHITGITPALSTSCRETVFKAIEIAKRHRVKIVFDPNIRLKLWTIEKARQVLMEIAAEADIILPGLDEGELLSGRNTPEDIARFFGEEKLVIIKLGERGAYYQFGSEEGYVKGFAVPQIVDPVGAGDGFAAGVISGLLQNVPISEAVRRGNAVGAIVVGTNGDVEGLPTREELDEFLQGAAYQRDVKR

SEQ ID NO: 23928 - protein, 629 aa, Corynebacterium glutamicum ATCC 13032
MPPAPKLAALGLQHVLAFYAGAVIVPLLIAQSLNLDTATTIHLINADLLTCGIATLIQSVGIGRHIGVRLPIVQGVTTTAVAPIIAIGLGVTDGQGGVASLPAIYGAVIVSGIFTFFAAPVFARFLKFFPPVVTGTVLLVMGASLLSVSANDFVNYADGVPAARDLAYGFGTLAVIILAQRFFRGFMGTLAVLIGLVGGTAVALILGDANLDEVGNAEAFDITTPFYFGVPEFNAVAIFSMIIVMIITMVETTGDVFATGEIVGKRTRRSDVTRALRADGLSTLMGGVMNSFPYTCFAQNVGLVRITGVKSRWVAAAAAGFMIILGVLPKAGAIVASIPSPVLGGASLALFANVAWVGIQTIAKSDLADSRNSVIVTSALGLAMLVSFRPDVAQAFPEWARIFVSSGMSVGAITAILLNLLFFHVGRQSGGQVATSKSGERINLDAVNKMDRTDFVETFAPLFNSKTWPLETAWESQPFANVTELREAIQVAVLTAPLSDREELIHDYPDMAQLILATEEEAATISQDRGSIGLDDLDDVDQEKLITVTEQYRERFNMPYVAYFDTMDSVDTVVAAGLRRLDNSDEQEHRQALSEIIEIANDRFDILLADANPARSAFDRKFTETDFLG

SEQ ID NO: 23929 - protein, 443 aa, Arabidopsis thaliana
MGSGRDRDDPLSFTSNPSTASSPVTVSDYLDNFLGEPTSRSGSFQSESLLGGGGGESINDADFGFARPDFRSEQLAGTVQFYERHVFLCYKKPSVWPARIEAAEFDRLPRLLSAAVSARKGSMKKETRLTICEGHDGTETSNGDVLIFPDMIRYRRLTHFDVETFVEEVLVKDGEWLPGNPELLKGSYVFVCSHGSRDRRCGVCGPSLVSRFREELEFHGLQGKVSISPCSHIGGHKYAGNVIIYRSNINREVTGHWYGYVTPEDVPILLEQHINKGEIVDRLWRGEMGLSEEDQKKTQEGRFQLNGTVHSVKINGKVSQESSVHNADVSCCQSRAAEPNGCCQQNGNSSSCCQDDTTLMLSLGTSEDNQLESENNTEKLTPGRKIAEKTFFRINSDKGSSTRKVCGIPTWLESWEREDTYAALAVVCAAASVAVAYTCYKQL

SEQ ID NO: 23930 - protein, 450 aa, Xanthomonas oryzae pv. oryzae KACC10331
MPDHLPRDAADALQAPAQLDAFWMPFTANRQFKARPRLLASAQGMYYRDVDGRQILDGTAGLWCCNAGHSRERIVAAIREQAGTLDFAPTFQMGSPLPFVLAQRLAAIAPPGLCHVFFTNSGSEAVDSAMKIVLAYHRLRGDGQRTRFIGREKAYHGVGFGGMSIGGLPNNRKWFGPLLAGTDHLRHTLDIERNAYTRGLPAHGAELADDLERLITLHDASTIAAVFVEPVSGSAGVILPPEGYLQRLRAICNRHGIVLVFDEVITGFGRVGDTFAAQRFSVTPDIITAAKGLTSGTVPMGAVLVADAIHDAFMHGPQSVIELFHGYTYSGHPLACAAAIATLDTYAEEDLFTRAITRGAQWEDAVHSLRGLPHVIDIRNIGLIGAIELAPRDGAPGARGYEIFERCFHEGGLLVRVTGDVIALSPPLIVTPEQIGQMVETLGNILRSTA

SEQ ID NO: 23931 - protein, 414 aa, Rickettsia prowazekii str. Madrid E
MSYYDTIFNKHIDKIKSEGRYREFKSLKRQADNFPFAEYEDKQIVMWCINDYLGMSKHVKVMQASIDALLKYGVGSGGTRNIGGNNISILELEKELADLHSKETALVFTSGFVANDTTLASLAKIIPDIVFFSDELNHASIIAGIKSSRAEKYVYRHLDVQHLEKLLQSVDINKPKIIVFESAYSMDGFFSPIKDIINLAKKYNALTFIDEVHTVGLYGKQGGGISELLDCSNQIDIIQGTLAKAYGTIGGYITSNYNLIDAIRLTAPGFIFTTSLPPVISTAATHSIRHLKESNEERIKHQEVVTKLKNSFEHFNIPYLKNESHIIPIIIGDPIKATKVSNMLLNEYGIYVQHINFPTVPRGTERLRIIPTPAHTDKMINDLSTALVHIFDELDIELSSAKELNKEVRLHLIA

SEQ ID NO: 23932 - protein, 661 aa, Silicibacter sp. TM1040
MSQTAAQTSSGAGQLMSVPALLERNATVHANRPAYREKEFGIWQSWTWKETAEEIEALALGLMNLGVAEGDFIAIIGRNRPSLYWSMVAAQSVGAVPVPVYQDSSAEEMAYVLDHCGAAYVIAGDQEQVDKVLEVQDTLTNLKHMIYVDPKGLRKYDHHQLHQYSHVQEQGRAARDELSSDLAARKAKLTYDSTCVMLYTSGTTGRPKGVVLSNRNVIESAKNASTFDKLTENEDILSYLPMAWVGDFIFSLGQSYWCGFCVNCPESEDTMMTDLREIGPTYFFAPPRVFEGQLTNVMIRMEDAGKLKQKMFHHFLAHAKKVGGLILDGKPVGMMDRLKYRLGDLLVYGPLKDTLGYGRIRVGYTAGEAIGPEIFDFYRSLGINLKQLYGQTEATVFITVQPDGEVRADTVGVPAPDVEIKIDDKGEIHYRSPGTFVEYYKNAESTASTKDAEGWVATGDAGFIEESSGHLRIIDRAKDVGKMASGAMFAPKYVENKLKFYPDILEAVLFGNGRDRCVAFINIDLTAVGNWAERNNIAYASYQELAGHPRVLETIRNHVEAVNVSVAQDEMLSGCQVHRFVVLHKELDADDGEMTRTRKVRRRIVEEKFADIIAALYDGSEQISTRTEVTYEDGRKGAISATLTCVDAKVQSPMAQQVAAE

SEQ ID NO: 23933 - protein, 436 aa, Rickettsia prowazekii str. Madrid E
MTNGNNNNLEFAELKIRGKLFKLPILKASIGKDVIDISRVSAEADYFTYDPGFMSTASCQSTITYIDGDKGILWYRGYDIKDLAEKSDFLEVAYLMIYGELPSSDQYCNFTKKVAHHSLVNERLHYLFQTFCSSSHPMAIMLAAVGSLSAFYPDLLNFNETDYELTAIRMIAKIPTIAAMSYKYSIGQPFIYPDNSLDFTENFLHMMFATPCTKYKVNPIIKNALNKIFILHADHEQNASTSTVRIAGSSGANPFACISTGIASLWGPAHGGANEAVINMLKEIGSSENIPKYVAKAKDKNDPFRLMGFGHRVYKSYDPRAAVLKETCKEVLNELGQLDNNPLLQIAIELEALALKDEYFIERKLYPNVDFYSGIIYKAMGIPSQMFTVLFAIARTVGWMAQWKEMHEDPEQKISRPRQLYTGYVHREYKCIVERK

SEQ ID NO: 23934 - protein, 518 aa, Desulfotalea psychrophila LSv54
MAGKDIKYGVKARESVLIGVNTLANAVKVTLGPKGRNVLIEKSFGAPTITKDGVSVAKEIELKDKFENMGAQMVKEVASKTSDVAGDGTTTATVLAQAIYTEGVKLVAAGGNPMEIKRGIDKGVEAVIAELRNIATPTKEQKEIAQVGTISANSDETIGNIIAEAMDKVGKEGVITVEEAKSMETTLDVVEGMQFDRGYLSPYFVTDPERMEVIMDDPYILLVEKKVSNMKDLLPVLEQVAKMGKGLFILAEDVDGEALATLVVNKLRGTINVAAVKAPGFGDRRKAMLEDIAILTGGQVISEDLGIKLENVTLNDLGTCKRIVTDKDATTIVDGAGDAAQLSSRVKQIHAQIADTTSDYDREKLQERLAKLIGGVAVINVGAATEIEMKEKKGRVEDALNATRAAVEEGVVPGGGVAYMRWLDALEALHLEGEQELGKKILSVPLKSLFVRLPIMLAVKVLLLLMQLRSLKDQTVSTQLPKFTKTLSLQVLSILPRLPVQPCKTQLLYPVCFSPPSV

SEQ ID NO: 23935 - protein, 257 aa, Zea mays
MASPSVFAGIAQGPEDPILGVTVAYNKDPSPVKVNLGVGAYRTEEGKPMVLNVVRRAEQMLIQNESRVKEYLPITGLADFNKLSAKLIFGADSPAIQENRVATVQCLSGTGSLRVGGEFLARHYHERTIYIPQPTWGNHPKVFTLAGLTARSYRYYDPATCGLDFQGLLEDLSSAPSGAIVLLHACAHNPTGVDPTLEQWEQIRQLMRSKALLPFFDSAYQGFASGSLDKDAQSVRMFVADGGELLMAQSYARTWDV

SEQ ID NO: 23936 - protein, 483 aa, Exiguobacterium sp. 255-15
MKVWFAATEATPFIKTGGLADVVGSLPLALAEEGAEVSVILPNYGQIKEQYKLEMEFLFDFIVPVGWRQQFGAVLRLKQDGVTFYFIDNEYYFKRDGVIYGHYDDAERFAYFSRAVLEMIQRVDAEEVPDVIHCHDWQTGVLPAFLRIHYQHLNRYQEIKTVFTIHNLQYQGVFPEEVLGDLLGLSHEHFTAEGIAHNGLVNYMKAGLVHANQITTVSPSYRDEIMDPYYGETLEPVLQHRAVDVRGILNGIDYRQFSPETDEHLVENYDVKTVEEGKAANKAALQQELGLPVNPDVPLFGFVSRLVDQKGIDLLAHILPDLFELDAQFIILGSGEAEYEGLFQHASTIRPDKVASYIGFDVGLAQRIYAGSDAFLMPSRFEPCGLSQLISMKYGSLPIVRETGGLRDTVQPFNQFTLEGNGFSFSNYNAQEFLDAIKRTIETYHDKPVFKHLIETAMQEDFSWIRSADEYLALYRLIAPSAD

SEQ ID NO: 23937 - protein, 568 aa, Arabidopsis thaliana
MEAKIVKVSDSSYKDGLGKKRKHPGNYTPYDSGRSYAKLQWVLSPNSSTQKLEKRRNLDGENKVIVSENHVEKSLVRYFSYYKKTGVPKRVMFHENGEWIDLPDHILCDIRNDLEAKRATIEFNWCGRHFLLDFLHMYRLDLETGVKTQLAWIDIAGKCFFPETFDTLERDGCHHIRGEDPEQHDQREIKLHIEIDVNSGELPRLNLNVVTDESGDNMDDFQAVQRSSNGPNDEASEDSCSRELDDAVEKWDKTETDRFSGVKPAEEELDKDAVKQMFALGAATLGHVESLDVYQFSSEIAKARLSLFQKQADITKKHRGDANIRYAWVPAKKEVLSAVMMHGLGVGGAFIKKSMYGVGVHAANCPYFSARYCDIDDNGVRHMVLCRVIMGNMEPLRGDNTQYFTGGEEYDNGVDDVESPKHYLIWNMNMNTHIYPEFVVSFKLSIPNAEGNILPTTQSRHESSGLTLEGPKGSPSNEPGRVSNGGSGSEKNSSSSRRPRSPIMPFPLLFKAISSKIARKDMDLIIAGYQELREKKVSRKEFYKTLSMIVGDDDLLISTITGLQRSLG

SEQ ID NO: 23938 - protein, 366 aa, Exiguobacterium sp. 255-15
MKADLLGVINLSGEEGFFKELTEHRNLAAVPFAGRYRLIDFTLTNMVQNEIANIGVFTLEKYRAMMDHLGSGKEWDLDRSNGGLYIFPPALSQDAHEFRGDLSNFHLHRDFFLRSKENYVVISGSNILSAVDYRDVLREHKASNADITVVYTKRDLPCNYCRPIRFSDQNRVTAIGSRGYEPSDETFYMETVVLSKNLFVRLVDEAIGRGEYDLLQSIIRSQLNRLHVHGYEYTGTSQVIHSLRSYYRESMLLLEQWGAINDFQHVYTKIKHEPPTRYLPGSTIKNSLVANGCKLEGTATDSILFRGVKVGKHARIKNSIIMQKSVIEEGAVVEYAILDKEVTVKRGQVIRGTAEEPIVIKKQTIV

SEQ ID NO: 23939 - protein, 386 aa, Exiguobacterium sp. 255-15
MAKKNVVAMLLAGGEGKRLGALTKHTAKPAVAFGGKYRIIDFPLSNCTNSGIDTVGVLTQYEPLELNRYLGIGSAWDLDRRNGGLTILPPYQAQNGKNWYEGTANAIYRNMSYINQYDPDYVLVLSGDHIYKMDYEKMIEEHRQGGADVTISVREVPWEEAPRFGILNTDEDLRINEFEEKPENPKSNLASMGIYVFNWDVLKRHLIQDAGDAESSFDFGKNIIPNMLYENLNIRAYKFKGYWKDVGTIQSLWEANMDLLEADPEFDLYEPSWKVHSVNPNQQPQYIGNNASIETSIINEGCHIEGEINHSVLFYGVDVAEGSLVKDSVIFPNVKIGKDVTIHRAILADGVVVEDGATIGTPNGEVFVIEANSVIPKNEVVKEAIQ

SEQ ID NO: 23940 - protein, 405 aa, Polaromonas sp. JS666
MAINTPLTNSWLDEFPARIAELDRAHLRRRRRVVVPEDGAHLQVDGQRMLAFCSNDYLGLAGHPALVQAACDGARAFGVGAAASPLVSGHSAANEALEAALARFVGQPRALYFYAGYATNIGIVPALVGKGDAIFSDALNHACLIDGARLSSAQIHRYPHADLAALEQELISSPARRKLIISDAVFSMDGDVADVPALLALCERHDALLLLDDAHGFGVLGPQGRGCLAHFGLSGENASPRVLYMATLGKAAGVAGAFVAGSEALVEWLLQKTRSYIFATAAPALLATALQTSLQLIEQDEWRREHLQRLIARLRSGLAQGLQGSSWRLGESPTAIQPVVIGPNDAALAVMEGLRTRGLWVPAIRPPTVAEGTARLRIALSAAHTEADIDRLVQALTELAKPGSL

SEQ ID NO: 23941 - protein, 444 aa, Arabidopsis thaliana
MVRRQEEEKKAEKGMRLGKYELGRTLGEGNFGKVKFAKDTVSGHSFAVKIIDKSRIADLNFSLQIKREIRTLKMLKHPHIVRLHEVLASKTKINMVMELVTGGELFDRIVSNGKLTETDGRKMFQQLIDGISYCHSKGVFHRDLKLENVLLDAKGHIKITDFGLSALPQHFRDDGLLHNTCGSPNYVAPEVLANRGYDGAASDIWSCGVILYVILTGCLPFDDRNLAVLYQKICKGDPPIPRWLSPGARTMIKRMLDPNPVTRITVVGIKASEWFKLEYIPSIPDDDDEEEVDTDDDAFSIQELGSEEGKGSDSPTIINAFQLIGMSSFLDLSGFFEQENVSERRIRFTSNSSAKDLLEKIETAVTEMGFSVQKKHAKLRVNQEERTQKGQVGLSVTAEVFEIKPSLNVVELRKSYGDSCLYRQLYERLLKDVGTSSPEQEIVT

SEQ ID NO: 23942 - protein, 543 aa, Streptococcus pyogenes M49 591
MAKDIKFSADARAAMVRGVDMLADTVKVTLGPKGRNVVLEKAFGSPLITNDGVTIAKEIELEDHFENMGAKLVSEVASKTNDIAGDGTTTATVLTQAIVHEGLKNVTAGANPIGIRRGIETATATAVEALKAIAQPVSGKEAIAQVAAVSSRSEKVGEYISEAMERVGNDGVITIEESRGMETELEVVEGMQFDRGYLSQYMVTDNEKMVADLENPFILITDKKVSNIQDILPLLEEVLKTNRPLLIIADDVDGEALPTLVLNKIRGTFSVVAVKAPGFGDRRKAMLEDIAILTGGTVITEDLGLELKDATMTALGQAAKITVDKDSTVIVEGSGSSEAIANRIALIKSQLETTTSDFDREKLQERLAKLAGGVAVIKVGAPTETALKEMKLRIEDALNATRAAVEEGIVAGGGTALITVIEKVAALELEGDDATGRNIVLRALEEPVRQIALNAGYEGSVVIDKLKNSPAGTGFNAATGEWVDMIKTGIIDPVKVTRSALQNAASVASLILTTEAVVANKPEPAAPAPAMPAGMDPGMMGGF

SEQ ID NO: 23943 - protein, 256 aa, Burkholderia fungorum LB400
MQDKVAILTGAASGIGEAVARRYLDEGAKCVLVDVKPADSFGDALRAAYGDRVLTVSADVTRRDDIERIVASTLERFGQIDILFNNAALFDMRPILDESWDVFDRLFAVNVKGMFFLMQAVARKMVEQGRGGKIINMSSQAGRRGEALVSHYCATKAAVLSYTQSAALALAPHKINVNGIAPGVVDTPMWNEVDALFARYENRPLGEKKRLVGEAVPLGRMGVPDDLTGAALFLASADADYITAQTLNVDGGNWMS

SEQ ID NO: 23944 - protein, 690 aa, Marchantia polymorpha
MKFRGRDAMTNFRPVQVTDPEAVFLLEQSKRQASMRVTSPQTPAGMVPNPPNESDDPPSLPPKPTMQREHLFEKAVTPSDVGKLNRLVIPKQHAERCFPLDLALNVPCQTLSFEDVSGKHWRFRYSYWNSSQSYVFTKSWSCFLKGKKLEAGDTVSFERGPNQELYIDFRRRLNNQVAQMLPGPSTSASDFARNREHLFEKAVTPSDVGKLNRLVIPKQHAERCFPLDLALNAPCQTLSFEDVSGKHWRFRYSYWNSSQSYVFTKGWSCFLKGKKLEAGDTVSFERGPNQELYIDFRRRLNNQVAQMLPGPSTSASDFARNRPWVPRLPNPAGGLNPAVWHQLSLQNPQSSLESREQLQMLYVRQAFPQRQQQQHMESGVSLPHQTRTGDDFFSLLTHGRVAAMDRTVVGASTTVVKQQQLLAEGPVSTPSAAPAGASGGTRLFGVDLENTSSSSAQGSTEREYAVVSGLNDWKSQTYAQQLQSLSRASYHQGESSFQQQQQQQHLPTARILPSFQGSLHGQSPAPVLMAASAKQQQQQQEQSPFMGLSIVRGRAGEQSLGTRLAASHSDLQLASSTNMNSGSAARAAGAGAELQEAGARTVVALGLAGPQQFAGDSRKRKVGILECLKNSGTADSYARVGAPDTSLSLAQHSESTTQVSFTTESSHFSSSTQPSGSSSTAEDRELKSPK

SEQ ID NO: 23945 - protein, 508 aa, Escherichia coli
ILNAILLNVLAGAALFTLARMYERRIFIPAESDALRLEEHEQFNRKIVASAPVGICILRTADGVNILSNELAHTYLNMLTHEDRQRLTQIICGQQVNFVDVLTSNNTNLQISFVHSRYRNENVAICVLVDVSSRVKMEESLQEMAQAAEQASQSKSMFLATVSHELRTPLYGIIGNLDLLQTKELPKGVDRLVTAMNNSSSLLLKIISDILDFSKIESEQLKIEPREFSPREVMNHITANYLPLVVRKQLGLYCFIEPDVPVALNGDPMRLQQVISNLLSNAIKFTDTGCIVLHVRADGDYLSIRVRDTGVGIPAKEVVRLFDPFFQVGTGVQRNFQGTGLGLAICEKLISMMDGDISVDSEPGMGSQFTVRIPLYGAQYPQKKGVEGLSGKRCWLAVRNASLCQFLETSLQRSGIVVTTYEGQEPTPEDVLITDEVVSKKWQGRAVVTFCRRHIGIPLEKAPGEWVHSVAAPHELPALLARIYLIEMESDDLDWPPESPDNQYHLNK

SEQ ID NO: 23946 - protein, 631 aa, ASPERGILLUS NIDULANS FGSC A4
MKGFRQRVHEQLSRAKDNKSSKKKESASQASQQNSANLGIHHGQQSASPNQVTPTSSTTSVNDIRGKAPEDASQAGGFPPATPTKQGQPMAPSVVISPSGPHAPPPGAAETMPGDLAPPRKSHVFDRLQTTPKDMSEGIRTPKRQHSSRFDISDQRQRELEKLPGFHEVPPNRRQELFMQKIDQCNIIFDFNDPTADMKSKEIKRLALHELLDYIANNRSVITEPMYPRVVEMFAKNLFRPIPPPITPQGEAFDPEEDEPVLEVAWPHIQVVYEFFLRFIESQDFNTNIAKAYIDHHFVLQLLELFDSEDPRERDFLKTTLHRIYGKFLNLRSYIRRSINNVFFQFSYETERFNGIAELLEILGSIINGFALPLKEEHKLFLTRVLLPLHKVKSLSMYHPQLAYCIVQFLEKDSTLTEDVVLGLLRYWPKTNSTKEVMFLNEVEDIFEVMDPAEFAKVQEPLFQQLAKSVASPHFQVAERALYFWNNEYFCNLVSDNVEVILPIMFPPLFENSKGHWNRTIHSMVYNAMKMFMEINPQLFDECSHEYNERQNSAEMREKARQNRWEKVAERAMQRQNGVNLPRNSTTAEIPLQLDDVDALTQESQRRLQSLKLDEAGSKDRRPREGSITSP

SEQ ID NO: 23947 - protein, 766 aa, Oryza sativa
MASHIVGYPRMGPKRELKFALESFWDGKSSAEDLEKVATDLRASIWKQMADAGIKYIPSNTFSYYDQVLDTAAMLGAVPERYSWTGGEIGFSTYFSMARGNATVPAMEMTKWFDTNYHFIVPELGPNTKFSYSSHKAVNEYKEAKALGVDTVPVLVGPVSYLLLSKPAKGVEKSFALLSLLSSILPVYKEVIAELKAAGATWIQFDEPTLVLDLDSHQLAAFSAAYTELESALSGLNVLIETYFADIPAESYKTLTSLNSVTAYGFDLIRGAKTLDLIKSAGFPSGKYLFAGVVDGRNIWADDLAASLTTLESLEAIVGKDKLVVSTSCSLMHTAVDLVNETKLDSEIKSWLAFAAQKVVEVNALAKALAGQKDEAYFAANAAAQASRRSSPRVTNEEVQKAAAALKGSDHRRATNVSARLDAQQKKLNLPVLPTTTIGSFPQTVELRRVRREYKAKKISEEEYISAIKEEISKVVKIQEELDIDVLVHGEPERNDMVEYFGEQLSGFAFTANGWVQSYGSRCVKPPIIYGDVSRPNPMTVFWSKLAQSMTSRPMKGMLTGPVTILNWSFVRNDQPRFETCYQIALAIKKEVEDLEAGGIQVIQIDEAALREGLPLRKAEHAFYLDWAVHSFRITNCGVQDTTQIHTHMCYSNFNDIIHSIINMDADVITIENSRSDEKLLSVFREGVKYGAGIGPGVYDIHSPRIPSTEEIADRVNKMLAVLDTNILWVNPDCGLKTRKYNEVKPALTNMVSAAKLIRTQLASAK

SEQ ID NO: 23948 - protein, 70 aa, Arabidopsis thaliana
AKGKHYRGVRQRPWGKFAAEIRDPAKNGARVWLGTFETAEDAALAYDRAAFRMRGSRALLNFPLRVNSGE

SEQ ID NO: 23949 - protein, 570 aa, Salmonella enterica subsp. enterica serovar Paratyphi A str.
MIPPEIRRSVLLQKAIKLALAGTLLTFASFSATAADPSSDTETPQPPDILLGPLFNDVQNAKLFPDQKTFADAIPNSDPLMILADYRMQRNQSGFDLRHFVDVNFTLPKAGEKYVPPAGQSLREHIDGLWPVLTRSTKNVEKWDSLLPLPESYVVPGGRFREIYYWDSYFTMLGLAESGHWDKVADMVANFGYEIDAWGHIPNGNRTYYLSRSQPPFFAFMVELLAQHEGDDALKEYLPQLQKEYAYWMEGVETLQPGQQNQRVVKLEDGSVLNRYWDDRDTPRPESWVEDIATAKSNPNRPATEIYRDLRSAAASGWDFSSRWMDNPQQLSTIRTTTIVPVDLNALLYQLEKTLARASAAAGDRAKASQYDALANARQKAIEMHLWNNKEGWYADYDLQNNKIRDQLTAAALFPLYVNAAAKDRAVKVAAAAQAHLLQPGGLATTSVKSGQQWDAPNGWAPLQWVAAEGLQNYGQDDVAMEVTWRFLTNVQHTYDREKKLVEKYDVSSTGTGGGGGEYPLQDGFGWTNGVTLKMLDLICPQEKPCDSVPSTRPASLSATPTKTPSAATQ

SEQ ID NO: 23950 - protein, 441 aa, Salmonella enterica subsp. enterica serovar Paratyphi A str.
MYHGQLKNILLLSLRFIMDKLSYASDSSTSAWNTYLQQIERVAPYLGELSPWVDTLRHPKRALIVDIPVQMDDGTIRHFEGYRVQHNLSRGPGKGSVRYHPDVDLNEVMALSAWMTIKCAALNLPYGGAKGGIRVDPFSLSEGELEHLTRRYTSEIGIIIGPQKDIPAPDVGTNGKVMAWMMDTYSMNHGTTITGVVTGKPIHLGGSLGREKATGRGVFVSGLEAARRANIAVEGARVAVQGFGNVGSEAARLFAGAGARVVAIQDHTATLFNATGIDMKALTAWQTEHKQIAGFPGAETIASDAFWRLEMDILIPAALEGQITRQRAEALTCKLVLEGANGPTYPDADDVLASRGILVVPDVVCNAGGVTVSYFEWVQDMASFFWSEEEINARMDKIMTDAIVHVWEKAAEKSCSLRTAAYIVACERILLARKDRGIYPG

SEQ ID NO: 23951 - protein, 188 aa, Triticum aestivum
  misc_feature (87)..(87): Xaa can be any naturally occurring amino acid
  misc_feature (93)..(93): Xaa can be any naturally occurring amino acid
  misc_feature (114)..(114): Xaa can be any naturally occurring amino acid
  misc_feature (131)..(132): Xaa can be any naturally occurring amino acid
  misc_feature (137)..(137): Xaa can be any naturally occurring amino acid
  misc_feature (139)..(139): Xaa can be any naturally occurring amino acid
  misc_feature (147)..(147): Xaa can be any naturally occurring amino acid
  misc_feature (153)..(153): Xaa can be any naturally occurring amino acid
  misc_feature (155)..(156): Xaa can be any naturally occurring amino acid
  misc_feature (159)..(159): Xaa can be any naturally occurring amino acid
  misc_feature (162)..(163): Xaa can be any naturally occurring amino acid
  misc_feature (167)..(167): Xaa can be any naturally occurring amino acid
  unsure (1)..(188): unsure at all Xaa locations
MAPTVMASSATSVAPFQGLKSTAGLPVSRRSNGASLGSVSNGGRIRCMQVWPIEGIKKFETLSYLPPLSTEALLKQVDYLIRSKWVXCLEFSXVGFIFREHNASPGYYDGRYWXTCGKLPMFGWNDATKVXXRRWRXAXKELPDAYXRIIGFXNXXKCXWVXXIASXQPGWKESGKGKLNHQRAKKCH

SEQ ID NO: 23952 - protein, 329 aa, Shigella flexneri 2a str. 301
MKLAVYSTKQYDKKYLQQVNESFGFELEFFDFLLTEKTAKTANGCEAVCIFVNDDGSHPVLEELKKHGVKYIALRCAGFNNVDLDAAKELGLKVVRVPAYDPEAVAEHAIGMMMTLNRRIHRAYQRTRDANFSLEGLTGFTMYGKTAGVIGTGKIGVAMLRILKGFGMRLLAFDPYPSAAALELGVEYVDLPTLFSESDVISLHCPLTPENYHLLNEAAFDQMKNGVMIVNTSRGALIDSQAAIEALKNQKIGSLGMDVYENERDLFFEDKSNDVIQDDVFRRLSACHNVLFTGHQAFLTAEALTSISQTTLQNLSNLEKGETCPNELV

SEQ ID NO: 23953 - protein, 166 aa, Bordetella bronchiseptica RB50
MNTMYDFSAPTITGAERALADFRGQVALVVNVASRCGFTPQYSGLEELYRSYRNEGFVVLGFPCNQFGRQEPDDEAAIAQFCETQYAISFPLFAKIDVNGAHAHPLYRWLKARKPGLLGTRAIKWNFTKFLVGRDGLPLRRYAPAHTPESLRHDIARACAAPGPTP

SEQ ID NO: 23954 - protein, 378 aa, Phanerochaete chrysosporium
MAFKSLIAFVALAAAVRAAPTAVCPDGTRVSHAACCAFIPLAQDLQETIFQNECGEDAHEVIRLTFHDAIAISRLQGPKAGGGADGSMLLFPTVEPNFSANNGIDDSVNNLIPFMQKHNTISAADLVQFAGAVALSNCPGAPRLEFLAGRPNKTIAAVDGLIPEPQDSVTKILQRFEDAGGFTPFEVVSLLASHSVARADKVDQTIDAAPFDSTPFTFDTQVFLEVLLKGVGFPGSANNTGEVASPLPLGSGSDTGEMRLQSDFALAHDPRTACIWQGFVNEQAFMAASFRAAMSKLAVLGHNRNSLIDCSDVVPVPKPATGQPAMFPASTGPQDLELSCPSERFPTLTTQPGASQSLIAHCPDGSMSCPGVQFNGPA

SEQ ID NO: 23955 - protein, 95 aa, Desulfotalea psychrophila LSv54
MKIRPLNDRLLVKRLAEEEKTAGGIIIPDSAKEKPAEGQVVAVGPGKVSDSGERVALQVKEGDLVLFSKYGGTDVKLDGEDFLIMREDDILGIME

SEQ ID NO: 23956 - protein, 468 aa, Burkholderia pseudomallei K96243
MQKGHSETDLHRGLGQRQMRLIALGAAIGVGLFLGSANAIKMAGPGIILSYIIGGAVIFVIMRALGEMAVHEPVAGSFSRYARNYLGPLAGYLTGWNYWFLWLVTCIAEITAVGIYMGIWFPDVPRWIWALAALATMGSVNLLTVKAYGEFEFWFALIKVVTIVVMIAVGIAMIAFGIGNHGVPMGISNLWAHGGFFPNGAQGVLMSMQMVMFAYLGVEMIGLTAGEAANPQKTIPGAINSVFWRILLFYGGALFVILSIYPWNEIGTQGSPFVMTFERLGIKTAAGIINFVVLTAALSSCNGGIFSTGRMLYNLAQQGHAPRTFGETTASGVPRRAIVVSMAALLVGVLLNYLVPEKVFVWVTSISTFGAIWTWGVILVTQMKFRASLAPAEERALRFRMPFWPYASWVALAFLVLVIGLMAYFPDTRIALYVGPAWLVLLVVLYFVLKLEPEGGKAAGLERRYGRG

SEQ ID NO: 23957 - protein, 455 aa, Anabaena variabilis ATCC 29413
MKLPDSPKIPRFMQLVQWIYQPLQLMEASAKAHGDCFTLWLTNKRPIVFLSNPQAIQELFTTPLEQLDARGTAQVLQPLLGENSLLLLSGETHQRQRKLLTPPFHGDRMRAYGDIITNITQEVISKWQLGEPFSVRDSMQEITLRVILQAVFGLREGERYTQLQKRLCDILDLSGSALRSTLSFLPALQIDLGSWSPWGHFLRQRAAIDQLLYAEIQDRRDHPDPSRTDILSLMMAARDENGEAMTDIELRDELMTLLVAGHETTASALTWALYWIHKLPQVREKLLAELDNFGDNGDVNEITRLPYLTAVCQETLRIYPIAMVTIPRIVKTTLEIGGHQFAPGTMLVGCIYLMHRRPDLYPQPQEFKPERFLEKQYSLYEYLPFGGSNRRCVGMAFALYEMKLVLATVLANMDLALVDNYPVKPTRRGVTLAPSGGKWLIATGQHQKVKSPVEV

SEQ ID NO: 23958 - protein, 287 aa, Silicibacter sp. TM1040
MRIPVTIISGYLGAGKTTLINSLLGEDHGLRLSVLINDFGSINIDEALISNKTVDSVALTNGCVCCSLGDDLALSVNDLVSRAEPPDHILIETSGVAEPVAIANALLNDSRLSYAGIVTVVDGSNFSTLMDDPLLKPQVTQQICAADLVLVSKLEHESDDGVIAALGALGARTPTLTSDIELSRLLFDITPLPRSKSTVSHPGYVSWHHRSTEVIDRRALGDKLAERPEGLYRMKGFVLTSGGAYQLHIVGRHVEARRCDANETLLVALGPEQRISHDQIEAWWTGS

SEQ ID NO: 23959 - protein, 324 aa, Bradyrhizobium japonicum USDA 110
MTKAVRVHKVGGPEALVYESVEVPAPGPGEVRIRQHAVGLNFIDVYYRTGLYKAPELPFIAGNEASGEVIAVGPGVTNFHPGDRVAYYHNLGAYTGERNIPWEKLVKLPDHITHEQGAVLMLKGLTVWYLLHKTFKVEPHHRVLIHAAAGGIGLLACQWARALGAHVIGTVGSREKAELAEANGCDHVILYNEEDFVARVKQISRNEGCDVVYDGVGKATFPGSLSCLKPRGMFVSFGNASGPVPPFSIAELNNHGSLFATRPKLNDYVGTRKELLEGADTLFSAVINGKLHVPINHAYALKDAAKAHIDLESRKTTGASILKP

SEQ ID NO: 23960 - protein, 566 aa, Corynebacterium diphtheriae NCTC 13129
MDTRDPHAWWRDAAIYQIYPKSFASSGGPMGTLRGITSRLDYVRDLGVDAIWLSPFYTSPQRDGGYDVADYFSVDPLFGSNADAEELISEAHDRGLRVIFDLVPNHTSDQHVWFREALQAGPGSPKRNHYWFREGKGPQGCEPPNDWLSIFGGSAWTQVCARDDAPDSPWEHDTSWYLHLFDSSQPDLNWSNKDVVEFFDSILRFWLDRGVDGFRVDVAHGLAKDPELPDWQFHWTMVDGGHDSPEDVPPPPMWNREEVHQIYRHWRTVLDEYPGNRALVAEAWVDATTDIAHYVQPDEMNQAFNFDFLICPWRSEDLGRVIHTSLEALAPTGSPATWVMSNHDVVRASSRLGLSTPGARPNGIRATDEQPDADLGARRARAAHMLMYSLPGSVYIYQGEELNLPEHTTLDDALRQDPTYFRTEHREAGRDGCRIPLPWTSQRPGLGFSPTGQTWLPQPEGWENRAVSHQESDPHSDLMLFRRMLQVRKSLNFGRGRLSPVWLKQDCLAYINSDDGRCDVMLIVAFDQDVAVPEGWHIALSTEECHDVVAANSAAWLLREGDSWHV

SEQ ID NO: 23961 - protein, 596 aa, Corynebacterium diphtheriae NCTC 13129
MHPNCNDIAQPHPLLPMDINRALARNEPICRYFYPHTTTPTTPLVITSYLTTKNTSRELSTIESMTSKSLPTRTTLSSGTFYQIYPPSFADSNKDGIGDFRGIISRLDYLSDLGITGIWLNACFDSPFKDGGYDVRDYTKVASRYGTHEDLVELFHQAHARGIAIILDLVPGHTSEQHPWFQQSAASKYTDFDDRYIWTSHAFEGGAGLAFIGGEHPRNGAYIINFFKSQPALNYGFAELTQPWHQPVDAPGPRANQDAMVEIMKYWLSQGADGFRVDMADSLVKNDGTSKRATIGIWQSMLSQVRAEFPNAIFVSEWGTPTQAFEAGFDADFYLDWRGNGYNLLARNTDTPLERRDDASFFNSDSATGAQEFLDMYLPQWERTHEAGLFSFISGNHDCPRLAPRLNEQERALFFLFQLTMPGLPFIYYGDEIGLPYAEIPTKEGGYARTGSRTPMCWDSQLPNGGFSLGDAPLYLPMTDTSQNVAQQRERADSLFHHVQKLIQLRSQLPALDGFADLEFDLSLLKKHPKVMVYRRTHHHGDSVLIALNAGNKPIRVELQQPQAHELFRCGDVTYPDLSDHSVVELGPTSGVILSV

SEQ ID NO: 23962 - protein, 79 aa, Citrus unshiu
MSGCGGNCGCGSSCKCGGGCGGSAMYPDLRSFESTTVATETLVLGVAPVKMHSEGSEMGFGAEGGCKCGPNCKCNPCNC

SEQ ID NO: 23963 - protein, 239 aa, Oryza sativa (japonica cultivar-group)
MKAIGSGGEWWWNLPSLRRKPDRRRRGRRNTDPRGRRRGPPPEPLSSSSSESIGQSRGWPIDFPFTQAVTAASLTLTGDTIAQVRQRIVDRRLRGPEPDSKGLVPDLLMSHDWLRALRMASYGFLLYGPGSHAWYQFLDQCMPKPTFANLSTKVILNQIALGPCVIGVIFAWNNLWIGKLSELPSKYRNDALPTLLFGFRFWIPVSIINFWMVPLSARVAFMSSCAIFWNFYLSTTMSK

SEQ ID NO: 23964 - protein, 368 aa, Triticum aestivum
QDEYKPLASKLQVDPAEQQRAMAMAVAASTMEVDQDLPGFRFHPTEEELLGFYLSRVALGKKLHFDIIGTLNIYRHDPWDLPGMAKIGEREWYFFVPRDRKAGSGGRPNRTTERGFWKATGSDRAIRSSGDPKRVFGLKKTLVFYQGRAPRGTKTDWVMNEYRLPDTGAPPPQEDTVLCKVYRKATPLKELEQRAFAMEEMKQRYGSNGGYGYGGAARACPVPAASDFYLSSSDDVQDNFLIPSTSSSSVALSGNTSSHDAPSEAKKEADVATVTLASTSSLPEAGNAPFVLQLPAANPPCGLQLPPANHGMSNMSSLQLPAASHGELQLPAATNHGVFDWLQDPFLTQLRSPWQDQHCMSPYAHLLY

SEQ ID NO: 23965 - protein, 635 aa, Rickettsia prowazekii str. Madrid E
MSNSNIDNDPAKIDSLLKKAKSKKIPVTYDDINKALPLNKNPSIRQLEEAILKFSDAGVDILESNEDDEIKLDIGMDEEFKLSTNVDNESEDEVEEENIGSTDDPVRLYLKDMGGVDLLTRENEVEIAKRIEEGRKTMTASLCRSPIAMRCFIVWYEDLVNEKMLLRDLIDLEANMLHDEVHENDEEHNSETEVEEHEDNHLSMSRVETQILHNIIDRMKKISFICEELLIEAKKCYEESFEPKVLQNSKKYNNNLELLINEVSEIHFNSKRTEEILGKMYGINRDLINKETAFLKLAEKYGVTRQNFLDEYIGSVINAAWKEKMLKNKKVAWKELITKESDYIDQMINELSVIESNTGLLVNDFKKLVNTIQKSERQTLQAKKDMIEANLRLVISIAKKYANRGLQFLDLIQEGNIGLMKAVDKFEYRRGYKFSTYATWWIRQAITRAIADQARTIRIPVHMIETINKILRTSRQMLNELGYEPTATEIANRLSMPLDKVRKVMKIAKEPISLENPVGDDSDGGQLGDFIEDKNAVAPIDAAIQSNLREVTTRVLATLTPREERVLRMRFGIGMNTDHTLEEVGQQFKVTRERIRQIESKALRKLQHPIRSKKLNSFRNGGKRGDGNPSDLLEA

SEQ ID NO: 23966 - protein, 108 aa, Coccidioides posadasii
MAPKTHISNAENLKKYMELDQRGKIMAEYIWIDAYGGVRSKTKTVNKVVKSADELPEWNFDGSSTGQAPGDNSDVYLRPVAIFPDPFRRGENILVLCETWDSDGSPNK

SEQ ID NO: 23967 - protein, 173 aa, Arabidopsis thaliana
  misc_feature (23)..(23): Xaa can be any naturally occurring amino acid
  unsure (1)..(173): unsure at all Xaa locations
MNNKTEMGSSTSGNCSSVSTTGXANSGSESDLRQRDLIDERKRKRKQSNRESARRSRMRKQKHLDDLTAQVTHLRKENAQIVAGIAVTTQHYVTIEAENDILRAQVLELNHRLQSLNEIVDFVESSSSGFGMETGQGLFDGGLFDGVMNPMNLGFYNQPIMASASTAGDVFNC

SEQ ID NO: 23968 - protein, 447 aa, Elaeis guineensis
MGKEKVHINIVVIGHVDSGKSTTTGHLIYKLGGIDKRVIERFEKEAAEMNKRSFKYAWVLDKLKAERERGITIDIALWKFETTKYYCTVIDAPGHRDFIKNMITGTSQADCAVLIIDSTTGGFEAGISKDGQTREHALLAFTLGVKQMICCCNKMDATTPKYSKARYDEIVKEVSSYLKKVGYNPEKIPFVPISGFEGDNMIERSTNLDWYKGPTLLEALDMIQEPKRPSDKPLRLPLQDVYKIGGIGTVPVGRVETGILKPGMVVTFGPSGLTTEVKSVEMHHEALQEALPGDNVGFNVKNVAVKDLKRGFVASNSKDDPAKEAASFTSQVIIMNHPGQIGNGYAPVLDCHTSHIAVKFAEILTKIDRRSGKELEKEPKFLKNGDAGFVKMIPTKPMVVETFSQYPPLGRFAVRDMRQTVAVGVIKSVEKKDPSGAKVTKSAAKKK

SEQ ID NO: 23969 - protein, 293 aa, Polaromonas sp. JS666
MFFTKPVILEWRPEIAYRLPLLPLPAAPFLTPVFTSSLSFPPDCHTMYKLVLIRHGESTWNLENRFTGWTDVDLTETGIQQAKDAGKLLKAEGYDFDLAYTSVLKRATRTLWHVLDEMDRTWLPVVNSWRLNERHYGALQGLNKAETAKKYGEDQVLIWRRSYDTPPPPLAANDERCERGDPRYAKLPPEQVPLTECLKDTVARVLPFWNESMAPAIKAGKRVVVAAHGNSIRALVKYLDNISDSDIVGLNIPNGIPLVYELDAQLRPLRHYYLGDSEAAARAVAAVSAQGKA

SEQ ID NO: 23970 - protein, 129 aa, Zea mays
  misc_feature (41)..(41): Xaa can be any naturally occurring amino acid
  unsure (1)..(129): unsure at all Xaa locations
VILDVEHAAFSPSHMVPGIDVSNDRMLQGRLFSYPDTHRHXRLGANYLQLPINQPYRARVAHHQRDGPSTFSQNFNGSPNYEPQSVDPSGPVQQLQDVTAKYSPVSLNGTTGRYPHRRSEDDFVQPGNL

SEQ ID NO: 23971 - protein, 253 aa, Brassica napus
  misc_feature (195)..(195): Xaa can be any naturally occurring amino acid
  misc_feature (198)..(198): Xaa can be any naturally occurring amino acid
  misc_feature (211)..(211): Xaa can be any naturally occurring amino acid
  misc_feature (219)..(219): Xaa can be any naturally occurring amino acid
  misc_feature (229)..(229): Xaa can be any naturally occurring amino acid
  unsure (1)..(253): unsure at all Xaa locations
VDPRVRFFFTGNYTSNGVLLVSCNGGLNQMRSAICDMVTVARLLNLTLVVPELDKTSFWADPSGFEDIFDVRHFIDSLRDEVRIFRRLPKRYSSKYGYKMFEMPPVSWSDENYYLKQVLPLFSKHKVVHFNRTDTRLANNGLSLPLQWLRCRVNFQGLKFTPQLEALGSKLVRILQQRGPFVALHLRYEMDMLAXSGXTHGCSEEEAEELXKMRYTYPXWWREKEINSXERRAQGLCPLTPERVHLVLKALGI

SEQ ID NO: 23972 - protein, 253 aa, Candida albicans
MSLPASFDLTPEDAKLLLAANVHLGAKNVQVHNKPYVYKTRPDGMNIINIGKTWEKIVLAARIIAAVPNASDVAVCSSRTFGQRAVLKFAAHTGATAIAGRFTPGNFTNYITRSFKEPRLVVVTDPRTDAQAIKESSYVNIPVIALTDMQSPSEYVDVAIPCNNKGKHCIGLIWWLLAREVLRLRGIIPDRTTEWSVMPDLYFYRDPEEIEQNAVEEAKTEGVEGAPVAEAETEWTGETEDVDWADSGATPSC

SEQ ID NO: 23973 - protein, 765 aa, Triticum aestivum
MASHIVGYPRMGPKRELKFALESFWDGKSSAEDLEKVATDLRASIWKQMADAGIKYIPSNTFSYYDQVLDTTAMLGAVPDRYSWTGGEINLSTYFSIARGNATVPAMEMTKWFDTNYHFIVPELAPSTKFSYSSHKAINEYKEAKALGVDTVPVLVGPVSYLLLSKAAKGVEKSFSPLSLLSSILPVYKEVIAELKAAGASWIQFDEPTLVKDLESHQLSAFSAAYAELESALSGLNVLVETYFADVPADSYKTLTSLSSVTAYGFDLERGTKTLELVKSGFPAGKYLFAGVVDGRNIWADDLAASLATLQSLEAVVGKDKLVVSTSCSLMHTAVDLVNETKLDDEIKSWLAFAAQKVVEVNALAKALAGQKDEAYFAANAAALASRRSSPRVTNEEVQKAATALKGSDHRRATTVSARLDAQQKKLNLPVLPTTTIGSFPQTVELRRVRREYKAKKISEEEYTNAIKEEISKVVKIQEELDIDVLVHGEPERNDMVEYFGEQLSGFTFTANGWVQSYGSRCVKPPIIYGDVSRPNPMTVFWSKMAQSMTARPMKGMLTGPVTILNWSFVRNDQPRFETCYQIALAIKKEVEDLEAGGIQVIQIDEAALREGLPLRKSEHAFYLDWAVHSFRITNCGVQDTTQIHTHMCYSNFNDIIQSIINMDADGITIENSRSDEKLLSVFREGVVYGAGIGPGVYDLHSPRIPSKEEIADRVNKVFAVLDTNILWVNPDCGLKTRKYAEVKPALTNMAEAAKQTRAELAKRQ

SEQ ID NO: 23974 - protein, 807 aa, Escherichia coli
MFRALALVLWLLIAFSSVFYIVNALHQRESEIRQEFNLSSDQAQRFIQRTSDVMKELKYIAENRLSAENGVLSPRGRETQADVPAFEPLFADSDCSAMSNTWRGSLESLAWFMRYWRDNFSAAYDLNRVFLIGSDNLCMANFGLRDMPVERDTALKALHERINKYRNAPQDDSGSNLYWISEGPRPGVGYFYALTPVYLANRLQALLGVEQTIRMENFFLPGTLPMGVTILDENGHTLISLTGPESKIKGDPRWMQERSWFGYTEGFRELVLKKNLPPSSLSIVYSVPVDKVLERIRMLILNAILLNVLAGAALFTLARMYERRIFIPAESDALRLEEHEQFNRKIVASAPVGICILRTADGVNILSNELAHTYLNMLTHEDRQRLTQIICGQQVNFVDVLTSNNTNLQISFVHSRYRNENVAICVLVDVSSRVKMEESLQEMAQAAEQASQSKSMFLATVSHELRTPLYGIIGNLDLLQTKELPKGVDRLVTAMNNSSSLLLKIISDILDFSKIESEQLKIEPREFSPREVMNHITANYLPLVVRKQLGLYCFIEPDVPVALNGDPMRLQQVISNLLSNAIKFTDTGCIVLHVRADGDYLSIRVRDTGVGIPAKEVVRLFDPFFQVGTGVQRNFQGTGLGLAICEKLISMMDGDISVDSEPGMGSQFTVRIPLYGAQYPQKKGVEGLSGKRCWLAVRNASLCQFLETSLQRSGIVVTTYEGQEPTPEDVLITDEVVSKKWQGRAVVTFCRRHIGIPLEKAPGEWVHSVAAPHELPALLARIYLIEMESDDLDWPPESPDNQYHLNK

SEQ ID NO: 23975 - protein, 572 aa, Kluyveromyces marxianus
  misc_feature (63)..(63): Xaa can be any naturally occurring amino acid
  unsure (1)..(572): unsure at all Xaa locations
MSENTQYDNTRDSGGQSPVNNNNAWQESGFAHTRPRRYTTRSSVSERQSGLSGLEEEDSDIDXSDNVPVTAYVQQYLDEGSYFPVQEVVPNTSLNMNMYRRKRGNTVTSNVIASRPMEANYTGSVSSPDPALQNQNNEGGVPANDPNDPNNVNNAITMMVKPKTLYQNPQTPTVLPSTYYPINKWSSFKYQHMKEFFGEFLGTMIMMMFGTAVVCQSKLSEQDKINQFNQILAMNHKSNDDISMLQYIATPNVAGNFVSIAFGWAGAVVMGYFAAGGSAISGAHLNPAITVSNFIYRGFPFRKLGFYFMGQYVGSYLGSLLMIWYYHKVIAHVYPNWPQEESVVAMFSVVPLDYLSTPRQIIAEFVIGAMLQCGIFSLTDPYTCLSTDLFPVMLFILIFSLNASGAYQTGAVLNPARDMGPRLALWTIGMDKDVILIPIITSFGSQWLFHSLAVSAGGLVYDFCIYQGHESPLNLPLSAYTDWFRRQWDTIKLKTSSGLKGTDLETIDSGHTLSHIESHRSQLSENKQVHFKSVLRNSKLRNPSTGVPTIFESEETTYSRPNFEQKTSNGSI

SEQ ID NO: 23976 - protein, 365 aa, Populus tremuloides
MGSTGETQMTPTQVSDEEAHLFAMQLASASVLPMILKTAIELDLLEIMAKAGPGAFLSTSEIASHLPTKNPDAPVMLDRILRLLASYSILTCSLKDLPDGKVERLYGLAPVCKFLTKNEDGVSVSPLCLMNQDKVLMESWYYLKDAILDGGIPFNKAYGMTAFEYHGTDPRFNKVFNKGMSDHSTITMKKILETYKGFEGLTSLVDVGGGTGAVVNTIVSKYPSIKGINFDLPHVIEDAPSYPGVEHVGGDMFVSVPKADAVFMKWICHDWSDAHCLKFLKNCYDALPENGKVILVECILPVAPDTSLATKGVVHVDVIMLAHNPGGKERTEKEFEGLAKGAGFQGFEVMCCAFNTHVIEFRKKA

SEQ ID NO: 23977 - protein, 567 aa, Burkholderia vietnamiensis G4
MTSRRAESIASHPGLHPSTPAPRPRWAAVLAIAYLAVAGCAAQADNANHAASQPAMQTAAAPASAASGALLPPPSQLYGDLFVAVQTAQLYPDQKTFVDATPNTDPATIVQLYQQQKSQPGFSLKAFVDQYFTAPPQGGVTPPANLTLRQHIDWLWPQLTRTTTSVPPYSSLVPMPKPYVVPGGRFREGYYWDTYFTMLGLQVSGREDLVDDMLDNFAYLIDTVGHIPNGNRTYYASRSQPPFFAYMVTLAARAEGDTVYQKYLPALRKEYAYWMQGESAAPRGEAVRHVVAMPDGAVLNRYWDASDTPRDESYLEDVTTAKAVPSRPANDVYRDLRAGAESGWDYSSRWFGDGRTLATIRTTSIVPVDLNSLMFHLETTIVKGCTVARDVGCVVDFSARAARRAAAINRYLWNRRGYYGDYDWQLRKPRDGVTAAALYPLFAGVAWPERAKATAREVRKTLLQPGGLATTTQNTGQQWDAPNGWAPLQWIAIEGLRRYGEPALAKDIGTRFLADVKHVYATEGKLVEKYVVEGAGEGGGGGGEYPLQDGFGWTNGVTLKLLGLYGE

SEQ ID NO: 23978 - protein, 382 aa, Phanerochaete chrysosporium
MAFGSLLAFVALAAITRAAPTAESAVCPDGTRVTNAACCAFIPLAQDLQETLFQGDCGEDAHEVIRLTFHDAIAISQSLGPQAGGGADGSMLHFPTIEPNFSANSGIDDSVNNLLPFMQKHDTISAADLVQFAGAVALSNCPGAPRLEFMAGRPNTTIPAVEGLIPEPQDSVTKILQRFEDAGNFSPFEVVSLLASHTVARADKVDETIDAAPFDSTPFTFDTQVFLEVLLKGTGFPGSNNNTGEVMSPLPLGSGSDTGEMRLQSDFALARDERTACFWQSFVNEQEFMAASFKAAMAKLAILGHSRSSLIDCSDVVPVPKPAVNKPATFPATKGPKDLDTLTCKALKFPTLTSDPGATETLIPHCSNGGMSCPGVQFDGPA

SEQ ID NO: 23979 - protein, 673 aa, Zea mays
MAGSMVDRATSDMLISPDWAKNMEICDICNRDPGQSKDVVKALKKRIGHKNPKVQLLALTLLETVIKNCGDILHMHVAERDILHDMVKIVKKKSDPRVKEKVLVLIDTWQEVFGGSHARYPQYYAAYHELVRAGAEFPKRPEKPAPLFNGQSQAARNMRSPDQQDAAESSAANDFPALSMSEIHNARGIMDVLAEMLNALDPGNREGLRQEVIVELVDQCRTYKQRVVQLVNSTTDEELMSQGLTLNDDLQRVLAKHDAIAAGIAVRVEKKSKSLQALVETEDSTNQDSKKEQGLIDIEDPTSQDAAKDPNQSTSDQSPFEQLALPAPPVSNGAATTKSDLGIDLLSWDDTPATAQNPLALVPVTDPLADSTSSNQNALAIVDTFSQNSTVNSNTQAADPFGLNPSSAIPGSQAYNTPTQQPFQSQQATLYPNGGAGTSYDQASQFNNVNSGWNDQAANLPAEQALNYDDQSGNLPPPPWEAQPAASNEMPNGELGGVQPLPGTAGQFGGMQQALQPQVNHMGVPQRQPMYSNQSGIGVAPTQMQAGLGNQQLGSTSMMGMPPQMYGGGSQAAMMYPQQMPVAPQQPMYGGGGRLAGYMQHPAVAAAHYYSNLGTAGMYGYPGANGLSQSMYGLSVQDNSSYQTKTAPPSAATKPEDKLFGDLLSIAKTKKAS

SEQ ID NO: 23980 - protein, 145 aa, Psophocarpus tetragonolobus
MGGFTEKQEALVNSSYEAFKANVPQYSVVFYTSILEKAPAAKDLFPFLANGVDPTNPKLIGHAEKLFGLVHDSAAQLRAKGAVVADAALGSLHAQKGVTDPQFVVVKEALLKTVKEAVGDKWSDELSNAWEVAYNELAAALKKAF

SEQ ID NO: 23981 - protein, 643 aa, Shewanella oneidensis MR-1
MCGFAGFFNTSNLTDHARILECMGLELFNRGPDSFGIWFNSDDRIGLVHRRLAIVDLSAAGHQPMTSDSGRYIISYNGEIYNHQELRDELESIRQYNWRGHSDTETLLAAIEQWGLKITLQKATGMFGIALWDTLNKELYLARDRFGEKPVYYGLHKDAFIFASQLNAFRAYPDFKPEINRDSITLLLRHNYIPAPYSIYSDIHKLLPATILKLDSNNNISLETYWSAKDIMSNASSTETDLPVGKQVEALENTLKKAVALQMSADVPLGAFLSGGVDSSLIVSLMQAQSNKPVKTFSIGFDDPRFNEAVFAKEVAKHLGTEHTELYLTAEDALEVIPKLAEIYDEPFSDSSQIPTFLVSKIARQYVTVSLSGDAGDELFCGYNRYLMTSKVWKRLSVLPVFLRSFLANVFTFVPVNVWNLFGKLLPSRLQLSNLGDKLHKAAAVLACRDVEQLYLGLVSHWQNPEQVVLGSKEPLTVLTDPKRKANFSDPILQMMAQDTLSYLTDDILVKVDRAAMAVSLETRVPFLDHSVLEHAWRLSLDLKLRDGKTKWCLREILYKYVPKDLIERPKMGFAVPLDAWLRGPLKVWADNLLAAERLRQEGFFDAELIDRMWQEHKSGKRNWQYQLWDILMFQSWYEKYHK

SEQ ID NO: 23982 - protein, 683 aa, Thermoanaerobacterium thermosulfurigenes
ASDTAVSNVVNYSTDVIYQIVTDRFVDGNTSNNPTGDLYDPTHTSLKKYFGGDWQGIINKINDGYLTGMGVTAIWISQPVENIYAVLPDSTFGGSTSYHGYWARDFKRTNPYFGSFTDFQNLINTAHAHNIKVIIDFAPNHTSPASETDPTYAENGRLYDNGTLLGGYTNDTNGYFHHYGGTDFSSYEDGIYRNLFDLADLNQQNSTIDSYLKSAIKVWLDMGIDGIRLDAVKHMPFGWQKNFMDSILSYRPVFTFGEWFLGTNEIDVNNTYFANESGMSLLDFRFSQKVRQVFRDNTDTMYGLDSMIQSTASDYNFINDMVTFIDNHDMDRFYNGGSTRPVEQALAFTLTSRGVPAIYYGTEQYMTGNGDPYNRAMMTSFNTSTTAYNVIKKLAPLRKSNPAIAYGTTQQRWINNDVYIYERKFGNNVALVAINRNLSTSYNITGLYTALPAGTYTDVLGGLLNGNSISVASDGSVTPFTLSAGEVAVWQYVSSSNSPLIGHVGPTMTKAGQTITIDGRGFGTTSGQVLFGSTAGTIVSWDDTEVKVKVPSVTPGKYNISLKTSSGATSNTYNNINILTGNQICVRFVVNNASTVYGENVYLTGNVAELGNWDTSKAIGPMFNQVVYQYPTWYYDVSVPAGTTIQFKFIKKNGNTITWEGGSNHTYTVPSSSTGTVIVNWQQ

SEQ ID NO: 23983 - protein, 269 aa, Zea mays
MRKRERENPCGICGHYHKYEEGEVCGVCGHRWKPSDGEGAPSRHESAFPTEVLKDFLFLGSYDNASRSEVLRTLSISHILNTVPDCHNLYKNSFTYHSLQRDRPLDFDEANQYLEKCERDKSRVLVHCMTGKNRSAAIVAAFLMKSRGWRLAQSFQWVKDRRPQVQLTDASQKELLEYELKLFGPSTQTLVPTESFASLGFGYTKPAGDMQTPVFNQTTMPSIFERFNPNDRPANFTFGVERKAEANPQDNNSDGRVNPTSTENLMDSS

SEQ ID NO: 23984 - protein, 287 aa, Salmonella enterica subsp. enterica serovar Typhi Ty2
MKSIVIEKPNTLTIETRALLQPASGEVRIKVKLAGICGSDSHIYRGHNPFAKYPRVIGHEFFGVIDAVGDNVNRDRIGERVSVDPVISCGHCYPCSVGKPNVCTSLVVLGVHRDGGFSEYAVAPARNAHRIPDNIADHHAVMVEPFTIAANVTGQVNPTEQDVALIYGAGPMGLTTVQALKGVYQVKTVIVVDRIEESPAARIVLMGFSSDPCEIVQQGITGKELAIYSSRLNANKFPVVIDWLNKGLIDPDKLITHTFDYQHVTDAIELFEKDQRQCCKVLLTFAK

SEQ ID NO: 23985 - protein, 171 aa, Pinus thunbergii
MATGAGAGAATVVSAFTGLKSTAQFPSSFKMSNAAAEWEQKTTSNGGRVRCMQVWPPFGNPKFETLSYLPTLTEEQLVKEVEYLLRNKWVPCLEFDLEGSISRKYNRSPGYYDGRYWVMWKLPMFGCTEASQVINEVRECAKAYPKAFIRVIGFDNVRQVQCISFIVHKPE

SEQ ID NO: 23986 - protein, 253 aa, Triticum aestivum
  misc_feature (188)..(188): Xaa can be any naturally occurring amino acid
  misc_feature (209)..(209): Xaa can be any naturally occurring amino acid
  unsure (1)..(253): unsure at all Xaa locations
NRLVAARLQFDIMGVETVLVARTDAVAATLIQTNIDARDHQFILGATNPRLKNRSLTAMLSDAMSAGKNGRELQAIEDEWTATAQLKTFSECVKDAIARLNSTDLDKQRKLQEWSKATSYDKCVSHEQARDIAASLGVGSVFWDWDLPRTREGFYRFQGSVASAVVRGRAFAPHADVLWMETSSPNIXECTAFAEGVRAAFPEAVLDPXLSPSFNWDASGMTDADMAGFIPHVAKLGVSLEFINGPGFEPAWS

SEQ ID NO: 23987 - protein, 434 aa, Salinibacter ruber DSM 13855
MPFNFDVYERSAYREPAPIDHDSPFQSMMERFDVAAEILELSPGFYEYLCRPARMHVTSIPVEMDSGRVKIFEGYRVIHNNVLGPSKGGIRFAPDVTLNEVKALAGWMTWKCSLVDLPFGGAKGGVACNPEEMSPGELERLTRRYTADLFDVFGPDKDIPAPDMNTNEQIMAWVLDTYSMHARQTENAVVTGKPVGLGGSKGRRQATGRGVMTVTLAAMEQIGLAPGDCTVAVQGFGNVGATAADLLGEQGCTVVAVSDITGGYYNENGLDLKAMKAYTQQNGGTLAGYEEAQHITNEELLTLDVDVLVPAAKEDQINREIAEDLRARIVAEGANGPTHPAADEVLAEKEVLVIPDILANAGGVTASYFEWVQNRQGFFWTEEEVNRRLDRMMGEAFDKVYTAADKYDVSLRIAAYVVGIRRVAEALRMRGIYA

SEQ ID NO: 23988 - protein, 216 aa, Zea mays
MSKLQSEVLKDAISQIVGDAKEKNRKFTETVELQIGLKNYDPQKDKRFSGSVKLPHIPRPKMKVCMLGDAQHVEEAEKMGLDYMDVESLKKMNKNKKLVKKLAKKYHAFLASEAIIKQIPRLLGPGLNKAGKFPTLVTHQESLESKVNETKATVKFQLKKVLCMGVAVGNLSMEEKQIQQNIQMSVNFLVSLLKKNWQNVRCLYVKSTMGKPYRVF

SEQ ID NO: 23989 - protein, 549 aa, Legionella pneumophila subsp. pneumophila str. Philadelphia 1
MKSIKQLIRLIHINYILAKNGLDNVVVSIKLFAPLRFIVYLNPWNWLRKEKLTRGEALRKSLEELGPIFIKFGQALSTRPDILPEDIAKELSKLQDKVPPFPSHIAMNIIEQAYKQSAYDVFAQFDPIALASASMAQVHAATLKTGENVVVKILRPNMRRLIEQDLSIMYTIAALADRYWPEGKRFKPKEIVKEFEHTLLDELDLMREAANAAQLRRNFNQSPMLYIPEIYWDYCHHNILVIERIHGIPVTDIASLRDHGIDIKKLAERGVEIFFTQVFRDCFFHADMHPGNIFVSYQNPKDPQYICVDFGIIGTLTDNDKRYLAENLVAFFNRDYKRVAELHVESGWVSRDTPVAEFESSIRTVCEPIFEKPLKDISFGQVVFRLFQVARRFHMEVQPQLILLQKTLLAIEGLGRQLYPELDLWATAKPFLEKWVREQMGPKAFIKRLKQNLPFFTEQLPHMPKLIFDILEMKKDQLLTVHELTRLQSENNNQTIQWKSMGLGVFFSFLSLGVISYFDLLDYNHLTTITIAGSVLAGIFVLINRKIRN

SEQ ID NO: 23990 - protein, 618 aa, Candida albicans SC5314
MSEQAQTQVSADQQQHQHNHHHHHHHHHHNENQSQQQVPIDPAANPANRIGRYQILKTLGEGSFGKVKLAQHLGTGQKVALKIINRKTLAKSDMQGRVEREISYLRLLRHPHIIKLYDVIKSKDEIIMVIEFAGKELFDYIVQRGKMPEDEARRFFQQIIAAVEYCHRHKIVHRDLKPENLLLDDQLNVKIADFGLSNIMTDGNFLKTSCGSPNYAAPEVISGKLYAGPEVDVWSAGVILYVMLCGRLPFDDEFIPALFKKISNGVYTLPNYLSAGAKHLLTRMLVVNPLNRITIHEIMEDEWFKQDMPDYLLPPDLSKNKNSKIDVDEDVIRALSVTMGYDRDEIVNVIEKANKQVAAGNSSSQQSKSSNEILDAYLLMKENHALVKDLKKSKSENIESFLSQSPPPSPFPNAGSTSSAPGVQQSLTYQTLATVPDLSTLPNSTIAILPTSLPSIHRAYMAETKQNGDPSQQHAPPPTKKSKTRWHFGIRSRSYPLDVMGEIYRALKNLGAEWAKPTEEELWTIRVRWKYDTSAQFECGSAPNLMKMQIQLFQLEPNNYLVDFKFDGWESAHGNAGTDSPQSHRQQDLDEVGSFSAYPFLHLATRLIMELAVNSQSG

SEQ ID NO: 23991 - protein, 233 aa, Oryza sativa
MVRGRTELKRIENPTSRQVTFSKRRNGLLKKAFELSVLCDAEVALIVFSPRGRLYEFASAPSLQKTIDRYKAYTKDHVNNKTIQQDIQQVKDDTLGLAKKLEALDESRRKILGENLEGCSIEELRGLEMKLEKSLHNIRLKKTELLERQIAKLKEKERTLLKDNENLRGKHRNLEAAALVANHMTTTTAPAAWPRDVPMTSSTAGAADAMDVETDLYIGLPGTERSSNRSETG

SEQ ID NO: 23992 - protein, 259 aa, uncultured archaeon GZfos27E6
MKAKAFEMIDIANRTEKPRDIGLTMVLDKGLGYRAAQDLMESASEYIDIIKLGWGTHRLCSEEVVKRKIQLYTDNSILVSNGGTLFEIAYLQRKTDDFFEYAHRIGLSSVEISDGSIRISREERSEIIRKCKNMGFEVFTEVGKKDPLEDARLTIDYRIKEAKRDLDAGATKVIMEARESGKGIGVYDKEGKIKEDMVKKLTEGIRLRNIMFEAPEKSQQVYLILNLGPEVNLGNIKPEDVIPLETLRRGLRGDTLGKL

SEQ ID NO: 23993 - protein, 328 aa, Listeria innocua Clip11262
MMSIVVLGGAGYIGSHAVDELINRGYEVVVVDNLRTGHKESIHKKAKFYEGDIRDKAFLSTVFEKESIDSVIHFAASSLVGESMEVPLEYLNNNVYGTQVLLEVMEQFGVKHIVFSSSAATYGEPERVPITEDMPTSPESTYGETKLIMEKMMKWCDKAYGMKFVALRYFNVAGAKADGSIGEDHKPETHLVPIILQVALGQREKLAIYGDDYNTPDGTCIRDYVQVEDLIDAHIRALEYLKKGGESNIFNLGSSNGFSVKEMLEAARIVTGKEIPAEVVPRRAGDPGTLVASSDKAREILGWQPTYTDVKDIIATAWNWHVSHPNGY

SEQ ID NO: 23994 - protein, 332 aa, Arabidopsis thaliana
  misc_feature (19)..(19): Xaa can be any naturally occurring amino acid
  misc_feature (137)..(137): Xaa can be any naturally occurring amino acid
  misc_feature (191)..(191): Xaa can be any naturally occurring amino acid
  unsure (1)..(332): unsure at all Xaa locations
DGRTLADYNIQKESTLHLXLRLRGGMQIFVKTLTGKTITLEVESSDTIDNVKAKIQDKEGIPPDQQRLIFAGKQLEDGRTLADYNIQKESTLHLVLRLRGGMQIFVKTLTGKTITLEVESSDTIDNVKAKIQDKEGXIPPDQQRLIFAGKQLEDGRTLADYNIQKESTLHLVLRLRGGMQIFVKTLTGKTXITLEVESSDTIDNVKAKIQDKEGIPPDQQRLIFAGKQLEDGRTLADYNIQKESTLHLVLRLRGGMQIFVKTLTGKTITLEVESSDTIDNVKAKIQDKEGIPPDQQRLIFAGKQLEDGRTLADYNIQKESTLHLVLRLRGGF

SEQ ID NO: 23995 - protein, 706 aa, Candida glabrata CBS138
MSEHNNENLNLHEGLNLDDDDLENMLKNPNLFTTSPGIDVESIPSATNQNSVNGQDDKSGIKSQNSDTNEVIEDIVNPSIDPYVSTPHNDEMASPEDDIDSINNKDSNKLMTSLVRQNYGPHLGRDNADINSSNFRSHYQNLFDDNYLKTDMGSPVNKNKRKREDDDDDQLYSSQILRGPLSPGGNAHKVDNRLMSYGSNNLNSRQQTPGMENTPSVLNRRFQNKTRPAFVNKVWSMINDPVNSHLIQWSEDGLSLIVVNREKFVHEILPKYFKHSNFASFVRQLNMYGWHKVQDVKSGSIQSSSDDRWQFENEFFVRGREDLLNRIVRQKGTSANATPGTQSNMKYGNGNQIRGLPNVNGQTLRLMNEANMGNTMDITAVLGELEQIKFNQMAISKDLMRINKDNELLWKENMIARERHRTQQQALEKIFRFLRNVVPHADQKLLMDVAEPVSSRIEEAQDISDAPSVSSKSFDFDDGKEDRSRYIPLQDEDGKRPLYLLKNRTMSENSNKSSGGRLASTHNDSSGRISEIPFEEDDLSPPRHEVTDVGHISGQKNVAIDKLKADLHEQEARIKYLEDMVENKTLDSHLNDSMTMPMMPSPSTMLMHDMVEPSTIALGKEATDTSEGKHHGHDQQGQVQGQDQVQGQDQMHSQDQQNDMSAIGGLSELSPGLSPGLSSGLSPGFDIGDYLNSSQNHMTPMYEDKK

SEQ ID NO: 23996 - protein, 409 aa, Vibrio fischeri ES114
MMNVITQRLNHYQHRQPREGLIMKNVVIVDCIRTPMGRSKNGVFRHTRAEDLSAHLMKGLLKRNPSVDPNDIEDIYWGCVQQTLEQGFNIARNSALLAGLPQSIAATTVNRLCGSSMQALHDASRAIMVGDAEICIIGGVEHMGHVPMNHGVDFHSGLSKSVAKASGMMGLTAEMLGKMHGISREQQDAFALASHQKAHKATIEGYFDSEILPMEGHDENGALTLVTHDEVIRPETTLEGLAALRPAFDPANGTVTAGSSSALSDGASAMLVMSEEKANELGLPIRAKVRSMAVSGCDPSIMGYGPVPATKKALKRAGLSLDDIELFELNEAFAAQSLPCIKDLGLLDVMDEKVNLNGGAIALGHPLGCSGSRIATTLINNMERTGAKLGVATMCIGLGQGIATVFERP

SEQ ID NO: 23997 - protein, 246 aa, Clostridium acetobutylicum ATCC 824
MLRKKIKTIIYSSLLLGAFVSATVLPVNTFAASTTGFFDNLKSFNTNIWAKSDGWTNGNPFNCTWRASNVNFNNGMELSITKDAKGGAIPYAGGEYRSNNRYGYGLYRVSMKPAKHIGVDSSFFSYTGPSDNNPWDEIDIEFLGKDTTEVQFNYYTNGVGKHEYLYKLGFDASKGFHTYGYIWEQNYIAWLVDGKEVYRATSNIPTHPGKVMMNLWPGIGVDSWLGAYDGVTPVKAYYNWAMYNPQ

SEQ ID NO: 23998 - protein, 432 aa, Exiguobacterium sp. 255-15
MSTHTKRPTSESLYEVAQKCIVGGVNSPSRSYKAVGGGAPVYMERGEGAYFYDVDGNRYIDYLAAYGPIITGHGHPHITEAITNASRNGLLYGTPHRLEIDFAHKLQQAIPSLEKVRFTNSGTEAVMTTIRVARAYTGRELVVKFSGCYHGHSDLMLIAAGSGPATLGSPDSAGVTKATAKEVITTPFNDIESYRQIMAEWGDQVACVLVEPIVGNFGIVEPQPGFLEAINEITHEHGALVIYDEVITAFRFTYGSAQELLNIRPDMTALGKIIGGGLPIGAYGGRQDIMEHVAPLGPAYQAGTMAGNPASMAAGIACLELLEQPGVYEEFDRLGAKLEQGILEAADTHGVTITINRLKGALTVYFTDETVVDYLGAERADSEMFGRFFKLMLEQGVNLAPSKYEAWFLTTAHTETDIDETIAAVNRAFAQL

SEQ ID NO: 23999 - protein, 595 aa, Exiguobacterium sp. 255-15
MGKAKQKQLKKKGSIRRYMEFVKPYKKQILLTVFVGIIKFSIPLGLPLLYKYIIDNLLDNQTVPLAERSKELAYLIGAGFFVFLVIKPPLEYIRQYLAQWSASKILFDVRNRLFDHVQKLSLRFYSNTKTGEVISRIINDVEQTKDFVVTGLMNLWLDMITILIAIAIMWTIDPKLTLVAIIPLPFYALAVKFFYGRLRSLTRDRSAALAELQGHLTERVNGMAVIRSFALEPHENQAFKKQNDGFLTAALRQTNWNARTYVVVSTITDFAPILIFGAAAFLVLNGQESLGTMVAFIAYIDRLYAPLGRLVNSSTTLTQSIASMDRMFEFLDEPYDITEKANARNPVHVKGNVQFENISFSYEEGGERAIDRLTLDVQAGERIAFVGMSGGGKSTLVSLIPRFYDVSSGRITLDGVDIRDLKLRGLRDQIGMVMQESILFSESVEMNIKMGNPEATDEEVIAAAKAANAHEFIERLPDGYKTPVGERGVKLSGGQKQRLAIARVFLKNPPILILDEATSALDLESESMIQDSLARLAKGRTTFTVAHRLSTITDADKIVVIENGQITEMGRHEELMRKRGAYFELYAIQNLELVE

SEQ ID NO: 24000 - protein, 507 aa, Oryza sativa
MGKAAAVGTAVVVAAAVGVAVVLARRRRRRDLELVEGAAAERKRKVAAVIEDVEHALSTPTALLRGISDAMVTEMERGLRGDSHAMVKMLITYVDNLPTGNEQGLFYALDLGGTNFRVLRVQLGGKEKRVVQQQYEEVSIPPHLMVGTSMELFDFIASALSKFVDTEGDDFHLPEGRQRELGFTFSFPVSQTSISSGTLIKWTKGFSINDAVGEDVVSELGKAMERQGLDMKIAALVNDTVGTLAGGRYADNSVVAAIILGTGTNAAYVENANAIPKWTGLLPRSGNMVINTEWGSFKSDKLPLSEFDKAMDFESLNPGEQIYEKLISGMYLGEIVRRILLKLAHDAALFGDVVPSKLEQPFVLRTPDMSAMHHDSSHDLKTVGAKLKDIVGVPDTSLEVRYITSHICDIVAERAARLAAAGIYGVLKKLGRDKMPKDGSKMPRTVIALDGGLYEHYKKFSSCLESTLTDLLGDDVSSSVVTKLANDGSGIGAALLAASHSQYAEID

SEQ ID NO: 24001 - protein, 457 aa, Tuber borchii
MSNLAPEPEFQQAYNELVHSLRDQNSSRLPQILRLLCLSSPPERVIQFRVTWEDDKGNFQVNRGYRVQFNSALGPYKGGLRFHPTVNLSILKFLGFEQTFKNALTGLNMGGGKGGSDFDPKGKSDNEIRRFCYSFMRELSKHIGQFTDVPAGDIGVGGREIGYLFGAYESYKNQFEGVLTGKGITWGGSLIRPEATGYGLVYYVAHMISYASGGKETFAGKRVAISGSGNVAQYAALKVLELGGKVITLSDSKGALIATGEEGFNETDIELIAKLKLDRGYLTQLHAAEDSFKSRFKYLPGERPWCHVDKVDVALPSATQNEVSEQEAKELIASGCKFLAEGSNMGSTQEAINVYEEDRKSRKADGLWYGPAKAANCGGVAVSGLEMAQNSQRLTWTSEQVDKELAGIMERCFWNCLNPAKEYFDIAEGELPSLVAGANIAGYVKVVNAMKAQGDWW

SEQ ID NO: 24002 - protein, 497 aa, Tuber borchii
MYLNASRKPPSRKGSMHDVPNDLMKHIHDLEKMFTIDTTKLHEVVSVFQEELVKGLSVTGGTIPMNPTWVIGYPTGDETGTYLALDMGGTNLRVCEVELPEEQGQYDIYQSKYRLPEEIKSGTGEQLFDYIAECVKQFLIANHEGQDIKDLKELHLGFTFSYPCEQNAIDHGILQRWTKGFDIEGVEGHDVVPMFEEALERKGVPIKITALVNDTTGTLIASAYTDNTTRIGCIFGTGCNAAYMETIGCIPKLAHMNLDPSLEIAINCEWGAFDNEHRVLPRTVYDKHIDENSPRPGQQTFEKMVAGLYLGEIFRLVLVDLYSNPDVSIFEKQDISTLQAEYSLDASFLAEIESDPWENLMETHALFEKKLKIVTTEPERKLIRRLAELIGTRAARLGACGVAAICKMKNIESCHVGADGSVFNKYPNFQERGAKALREIFGWGRTIRKDPIQIVPSEDGSGVGAALIAALTMKRIRKGIHAGVNVKRKNSLIPPVP

SEQ ID NO: 24003 - protein, 337 aa, Debaryomyces hansenii CBS767
MTSVFVSGATGYIAQHIVKTLLEKNYKVVGSVRSTEKGEKLKKLLQSANFNYEVVNDIQKEGSFNDALKHHPEVTVFLHTASPFHFKAKDVEKELLIPAVNGTKNALKAIKDYAPQVKRVVVTSSIAAIKVEAKENDSTFVTTEETWNPISWEEALTNPVLGYRGSKTFAEKAAWEFVEMEKPLFILSTVNPVIVFGPQAFDSEVKETLNTSAEIINNLLKLKPDDPVPPLNNAFIDVRDVAKAHVVAFENEYAANQRLLLSESRYSSQLVLDLIHKNFPEFKSRIPLGTPGVYPDTSKLSKTDNSKTKAIVGFPFIPLEKSVVDTVLQIVAAEKHQ

SEQ ID NO: 24004 - protein, 786 aa, Zea mays
NIHVQTSTAKPHQTPRHRVPRHTAAGPTIGSPTPAPRHLRPPPPHTSRPLRPPRDRARSPATLRRYRPPPQQRTTRAPTAPHPPHRSSRPPPPCSAEHPAGRPPTSNAPAANAHSPRPGARGRPRRRSRSGSTAPPPHLTQEKGKKKASSFDEALLAKGVRGKQHHAPAAAAAAPGEGMGLPLPLPRPASLPTPTPSPSASASASASASASASSGGDSSLGSSTSDDQLDLGVYRLSETSSTLLGRTVAIESRKQSQVPAEGTIFTNNQAVEHTRLSETSVSPRKEFRPQNLDLANDRTTYCRGRRSTEIVFSTQVPTSPPSSRGHHYQNSPVPSRTFGQCPASPTSWQHDSRSSSSPQPLPLPPGSPCLPSSSLQWKKGKLLGSGTFGQVYMGFNSEGGQMCAIKEVKVISDDSNSKESLRQLNQEIVLLSQLSHPNIVQYYGSDLCNETLSVYLEYVSGGSIHKLLQEYGPFGEAVLRNYTAQILSGLAYLHGRNTVHRDIKGANILVDPNGDIKLADFGMAKHISAYTSIKSFKGSPYWMAPEVIMNSNGYSLSVDIWSLGCTILEMATAKPPWSQYEGVAAIFKIGNSKDIPDIPNNLSSEAKGFLKLCLQRDPAARPTAAQLMDHPFVKDQATVRSSRSSITRDMFPNSTDGKNSRVKIETSSYRSLSPLRDPDILGRNLPGPTSPIPSTSSRRIAALNTSNVRMNMSLPVSPCSSPLRQYRQSNRSCLRSPPHPAYSAGAANYNPINNALYPTRPSSGLTDPWLEISQVKTQTFDSPRRL

SEQ ID NO: 24005 - protein, 1003 aa, Burkholderia sp. 383
MPAKLKRLLAHAAAVGRKPFDPGRVRRQQQMLLYGGGSAVTAFIVVCAALVIRLDVQDSLGQARATFLQRGAELHANLQTADRALSAFGIRTEQLWDQGVQPPQDAVQSFSADHGRLLVRAAGGWEPFLAIAEVTPDRPAESYARYLGATLAQIDRSSHYPPSPASADLIGGYLIGLDGAFLGIVGSGNVARARSLPPDIDVPALIARLRPTGETKQKSDMLGGTFTLDRRYDPILGRTIVRFARRLDDAAGHPFAWLIFNGTSDLDDIMMPRSDDEDVAVVDARGRIVFGRQRDPAMIERAMNGTRASSGGHVVVRRVGTRFVISDRLPESGLTLITTFSWRSVASATAVGVSVTLAAALFAISMLWIAIVTFDLRALRPANRRAIRLIESEAFNRTLIRTAPAGLLLLSAADGETMVRNDAVLAYDDGVSGLPLGKRIWQACRERQRAGADERRFVMQQELAVERAGHDTTYLAAHVVRTKFRGVDVLLCTLTDVTARKLTEDKLREARVAADDANKAKSTFLATMSHEIRTPLNAIIGNLELMGRAELPPTEQRRLKTIVSSSDALLNIINDVLDLSKAESNQMALEHIPFDLRRVLQDVASIFRPLADAKGLSLECHVAAELADGYVGDPTRLRQLVSNLVGNAIKFTEHGGITIDARLARGDARAGCVEIAVRDTGVGIPGEALPTLFDVYMQADASIYRRFGGTGLGLPLCRRIARLMDGELTVESRLGEGSTFVATLPLTDAPAGCLDAASEPDAASVASTSPRRDDVPPLRVLVAEDHPASRALLRDQLDALGHDATIVENGMEAMRAYFAHPFDIVLTDLSMPQLDGFALANFLREQGANVPVIAMTAHATDEDRGRCRQVGVAEVVLKPLSIDSLDAALRRHGSRDGAVAGAVDSGVREVAPVMTGEMRRTLREATLRSLAAIEAALSGDDGEVLRVELHSMRGGFALAGDRAARDACAQMEAAVNTGGAAAFELHWAAFRQEMEHALERIDR

SEQ ID NO: 24006 - protein, 330 aa, Triticum aestivum
  misc_feature (182)..(182): Xaa can be any naturally occurring amino acid
  misc_feature (193)..(193): Xaa can be any naturally occurring amino acid
  misc_feature (235)..(235): Xaa can be any naturally occurring amino acid
  unsure (1)..(330): unsure at all Xaa locations
NKFVQKSRLVPVRNSRDIVDPRVRKSKVLVVGGTGYIGRRIVRASLAHGHRTFILMRPEIGLDIDKLQLLLSFKAHGALLVEASMEDHRSLVAAVKQVDVVVSAISGRHFLLQLKLVEAIKEAGNIKRFLPSEFGIDPARMGHALEPGRITFDEKMEIRRAIEEANIPHTYVSANCFAAFFXPNLSQMRTLLXPPKKKVHVYGDGNVKVIFMDEDDVATYTIKSIDDPRALNKTXYLRPPENILSQTELIAKWEKLSGEVLERIPIPSDEFLASMEGMDITNQMAVGHFPPIFYEGCSTNFDIGEDGEEASLLYPEVRCPSMEDYMKRYL

SEQ ID NO: 24007 - protein, 466 aa, Kineococcus radiotolerans SRS30216
MRASTRANSSDRVSPRGPQSRPSRAAEGWESPRSSLTTEPRDTPEACASAAVVRPRAWRAARSTCASRAVKAVSSLVTMSTVVTFVVTVVLMPDPSPFLPDRAPTPLRTPPPGAHALVVGATGITGSALAEQLVASGWRTSGLSRRPPAVEGVEHVRADLLSRESLEENLAGLAPTHVFVTAWSRRDSEAENVRVNGGLVRDLLAVLGPQGSLRHAALVTGLKHYLGPFEAYGKGDLPDTPFLEDAERLPVENFYYAQEDELFAAAARHGFTWSVHRAHTVTGYAVGNAMNLVPTLGAYAAVVAATGRPFTFPGSQAQWNGVVDLTDAGQLADHQLWAATTPAAADTAFNVVNGDVVRWRRLWPRLAAHLGVEPAGPGAEPLTLEAQMAGAEAVWARLVEEHHLVEPDLSRVASWWHSDSDLGRPLEVVADMTRSRLAGFGGYVSTERALLALVDRYRAARVLPPA

SEQ ID NO: 24008 - protein, 589 aa, Oryza sativa (japonica cultivar-group)
MEQYEVLEQIGKGAFGSALLVRHKVEKKKYVLKKIRLARQTDRTRRSAHQEMQLIATVRNPFIVEYKDSWVEKGCYVCIIIGYCEGGDMAEAIKRATGDHFSEEKLCKWLVQLLMALDYLHANHILHRDVKCSNIFLTRDQSIRLGDFGLAKILTSDDLASSVVGTPSYMCPELLADIPYGTKSDIWSLGCCIYEMTALRPAFKAFDMQALISKITKSIVSPLPTRYSGAFRGLIKSMLRKSPEHRPSAAELLKHPHLQPYVLQVHLKSSPARNIIPSHQSPIDKVKKMTFPTESMCRSKGRRNSLGNERIVTFSKPSPERKFTSSIQSIKDYSTTRSVKDLSIDVSLVEEVSSKTTFTTRTSSIVKTPKRTPSKTITTPQLEPPKLLSRTPVNRSARVIRRASLPLPLPSSETPKRGVSSISILEQLESPDVSVNSPRIDRIAEFPLASSEDPPFLKLHGRRSPTPTPQHCVIDQSITKDKCMVEAFHIIDVDDDDGRSDSSSGRNNAAAAASSRAGSSESTRQRRFDTSSYQQRAEALEGLLEFSAQLLQQERYDELGVLLKPFGPEKVSPRETAIWLTKSFKETGL

SEQ ID NO: 24009 - protein, 509 aa, Yersinia pestis KIM
MMSGKHSAETHHAAKKRWLDSHDTGYHKSMGLRHIQMIAIGGSIGTGLFLGTGARLQMAGPALALVYLVCGIFSFFILRALGELVLHRPTSGSFVSYAREFLGEKASYVAGWMYFLNWAMTGIVDITAVALYMHYWGTFSDVPQWLFALGALSIVATMNMIGVRWFAEMEFWFALIKVAAIALFLIVGVIFLGTGQSVAGHTTGIHLITDNGGFFPHGLLPALIMVQGVIFAFAGIELIGTAAGECKDPEKMLPKAINSVIWRIGLFYVGSVVLLVCLLPWHAYQAGQSPFVTFFSNLGVPYIGTIMNIVVLSAALSSLNSGLYSTGRILRSLSMGGSAPKFMSKMSPQSVPYAGILVTVGIYVLGVLLNYLVPSQVFEIVLNIASLGIISSWAFIIICQMKLRQAIKRGMAKPVSFKMPGAPVTSWLTLIFLAGVLVMMAFDYPNGTWTIASIPVLTLLLIAGWFSLRKRANEVAAAPIDVWSQEILFEEPDAQNVSPKELYEQKSVG

SEQ ID NO: 24010 - protein, 418 aa, Candida albicans SC5314
MFLKNILSVLAFALLIDAAPVKRSPGFVTLDFNVKRSLVDPDDPTVEAKRSPLFLEFTPSEFPVDETGRDGDVDKRGPVAVTLHNEAITYTADITVGSDNQKLNVIVDTGSSDLWIPDSNVICIPKWRGDKGDFCKSAGSYSPASSRTSQNLNTRFDIKYGDGSYAKGKLYKDTVGIGGVSVRDQLFANVWSTSARKGILGIGFQSGEATEFDYDNLPISLRNQGIIGKAAYSLYLNSAEASTGQIIFGGIDKAKYSGSLVDLPITSEKKLTVGLRSVNVRGRNVDANTNVLLDSGTTISYFTRSIVRNILYAIGAQMKFDSAGNKVYVADCKTSGTIDFQFGNNLKISVPVSEFLFQTYYTSGKPFPKCEVRIRESEDNILGDNFLRSAYVVYNLDDKKISMAPVKYTSESDIVAIN

SEQ ID NO: 24011 - protein, 507 aa, Cryptococcus neoformans var. grubii
MLPGPVIEANTGDTVIVHVNNYLHEGQGIHWHGLRQNGTALMDGVPGITQCSIPPGGSFTYQFTVSHQSGTFWWHSHYSNSMADGIWGPLIVHSPNEPLQRGRDYDEDRIVAVTDWMHDESETIVEALISSEGYRGRPFPPQGDAILINGRGQTNCTATGSPSCTYPPPPEIHVPVNCRVRLRFISAASHPMYRISIDNHSMEIVETDGTAVYGPTIHEISISSGERYSVIINTTEGKEGDAFWLRTSVALDCMAQGVTQVGLAVVRYTGNGSITTAEPRTEAWTDLARPDTPCVGLDEMYHLSPRELVNASQTALESRVLDSKLGKFVDVYGNSFEGYGFNNVTYQNQINDPLLYVVQRGGTCNSSLIANATFADIGPVNIIINNLDSHIGHPYHMHGTEFQLMGRGTGALTLDDLPNTNLTLDNPTRKDTIWMQGGSWALLRIISDNPGVWALHCHIGWHLAKGKMAVVVVQPEAIKKIQWPESWMDLCANTDPNAFGPARRSVS

SEQ ID NO: 24012 - protein, 594 aa, Cryptococcus neoformans var. grubii
MGGIIKLSFLFCSLISLVNSENTGKLPTAISDHSVPKATATTDPSVFVLSNDFEITDVPTTREYTFNLTEALASPDGYERLVYAVNNMLPGPVIEANTGDTVIVHVNNYLHEGQGIHWHGLRQNGTALMDGVPGITQCSIPPGGSFTYQFTVSHQSGTFWWHSHYSNSMADGIWGPLIVHSPNEPLQRGRDYDEDRIVAVTDWMHDESETIVEALISSEGYRGRPFPPQGDAILINGRGQTNCTATGSPSCTYPPPPEIHVPVNCRVRLRFISAASHPMYRISIDNHSMEIVETDGTAVYGPTIHEISISSGERYSVIINTTEGKEGDAFWLRTSVALDCMAQGVTQVGLAVVRYTGNGSITTAEPRTEAWTDLARPDTPCVGLDEMYHLSPRELVNASQTALESRVLDSKLGKFVDVYGNSFEGYGFNNVTYQNQINDPLLYVVQRGGTCNSSLIANATFADIGPVNIIINNLDSHIGHPYHMHGTEFQLMGRGTGALTLDDLPNTNLTLDNPTRKDTIWMQGGSWALLRIISDNPGVWALHCHIGWHLAKGKMAVVVVQPEAIKKIQWPESWMDLCANTDPNAFGPARRSVS

SEQ ID NO: 24013 - protein, 364 aa, Candida albicans SC5314
MFNTTDSSRNYLVIENPSANYISDKEEERYSNDNDIVHNSSNYYIPSLDDISSISTSASSHGTTFFSNNQSNSNRYGTPRSLSKLRSIESEIDNLPLVFKTNIWSNDYSVTHNKTANMFANFTLETGNVACSLNTANCDKSQLQYNDASYAVTTPQVSPIGNNPIAAAGNSSCTFESTTPGINANAAVSGSAYSPPPSCLTFRTYTGAIFTVPKTSKFFVIKSYNILDVNASFIHNIWTSTELGNRRLDKAYTELSKTNNPDVDGKIFLFFSVNSSGKFCGIAEMKSAIDFTTASNIWCEQTRWKGIFPVEWLLIKDVPNKFFQHLKIPANDYKLVTNSRDTQEIPFDIGISMLKIVSSFKSND

SEQ ID NO: 24014 - protein, 341 aa, Bacillus clausii KSM-K16
MAKVYYNGDVNEQVLEGKTVAIVGYGSQGHAHAQNLRESGVDVIIGLRPGKSWDKATEDGFSVYSVREASAKADIIMILSPDEHQPAIYKESIEPELTAGKALVFAHGFNIHFNQIVPPEHVDVFLAAPKGPGHLVRRTYTEGAGVPALIAVYQDATGQAKDIALAYAKQIGAARAGVLETTFKEETETDLFGEQAVLCGGTSALVKAGFETLVEAGYQPEIAYFECLHELKLIVDLMYEGGLEYMRYSISDTAQWGDFQAGPRIVTDETKAAMKEILSDIQKGKFAKGWILENKLNRPEYNAINEAEKNHPLEVVGRELREMMPFVKASKSKGVVANAKN

SEQ ID NO: 24015 - protein, 278 aa, Triticum aestivum
  misc_feature (129)..(129): Xaa can be any naturally occurring amino acid
  misc_feature (221)..(221): Xaa can be any naturally occurring amino acid
  misc_feature (235)..(235): Xaa can be any naturally occurring amino acid
  unsure (1)..(278): unsure at all Xaa locations
AYLGDTTRTSLYKKAGWYRSGIPGISSTHASALCARCDVDIHAANKLASKHQRRGLDALGAKLPRCDICQEKAAFIFCVEDRALFCRDCDEPIHVPGTLSGNHQRYLATGIRVGLGPVSACAAGDHGAXHDADHPAPPKLACEPQPPAQPAASAQQVPSPPQFLPQDWGVNELLQFSDYESSDKLHKDSALGFKELEWFTADMELFHNHAPKGGRATMEVXPEFFPSQAGNDAAXYYRPSKSPRPRPGWRPKQRRARVQRSPEQRRTSLLPGPGILGL

SEQ ID NO: 24016 - protein, 589 aa, Kluyveromyces lactis NRRL Y-1140
MKLSDVCLGALLASLGSAGYITKRDVSQVGEANKKHVFMSFDKLRGNDASEASLSKRRVGHLKKRADGYVDVEIDNQNTFYSVDLEIGTPAQKVGVLIDTGSSDLWVPGSGNPFCSASRSSSKKKRQDYTALLSSLLSVFGTDVATDYTYTGIASATGSAGTQTVPTALTSGTVAATSIRSVPSSLATLDCSEFGTFDTSKSSSWQSNDTRFYISYADGTFADGDWGVDEIHLDDVNVTGLSFAVSNYTDSQFGVLGIGLTGSESTYSGQLSTYNRYQYDNFPIVLQRNGVIEKNAYSVFLNDLDADSGSILFGAVDHSKYTGTLYTVPMVNALRSIGYTEQIRLSITLQGIGVTSSYGNETVTQTKYPALLDTGATFCYFPSSLAAAIASSVSATYSSSSGYYFVDCDSGSDYDLVFDFGGFHIISPLSDYIVTTSSSSQCVLGILPQSDNEITLGDAFLTSAYVVYDLEELEISLAQASYTSGDEKIEVIRDSVPSAVAAPGYSSTWSTAASLSTGGNIFTVTNNANGTVSTGTGSSGSGSSTSGNSGSTSTGSSSKKEGAASSLPVPHLAALICLLLSAVSIPSLF

SEQ ID NO: 24017 - protein, 252 aa, Oryza sativa (japonica cultivar-group)
MTTGNGDAPVIKNAHSDIDSTNKTLLKSDALYKYVLDTTVLPREPECMRDLRLITDKHQWGFMQSSADEAQLLGMLLKMAGAKRTIEVGVFTGYSLLATALALPEDGKVVAIDPDRESYEIGRPFLEKAGVAHKVDFREGKGLEKLDELLAEEAAAGREAAFDFAFVDADKPNYVKYHEQLLQLVRVGGHIVYDNTLWAGTVALPPDTPLSDLDRRFSVAIRDLNSRLAADPRIDVCQLAIADGITICRRLV

SEQ ID NO: 24018 - protein, 312 aa, Glycine max
MGKSKVLVVGGTGYIGRRIVRASLALGHETYVVQRPELSLQIEKLQRLLSFKKQGAHLIEASFNDHKSLVDAVKQVDVVISAISGVHIGSHSITLQLKLVEAIKEAGNVKRFLPSEFGPDPARMGHALEPGRVTFEDKMAVRKAIEEANIPFTYISANLFAGYFAGSLSQMGSFVPPRGKVHLFGDGTLKAIFLDEDDVATYTIKAIDDPRTLNKTLYLRPPENIISQAELIGIWEKLIGKELEKTYIPPEGFLTTLKGLDYKLQVGIGHFYHIFYEGCLANFEIGEEGEEASKLYPEVNYTRMDEYLKIYV

SEQ ID NO: 24019 - protein, 287 aa, Glycine max
  misc_feature (113)..(113): Xaa can be any naturally occurring amino acid
  misc_feature (211)..(211): Xaa can be any naturally occurring amino acid
  misc_feature (242)..(242): Xaa can be any naturally occurring amino acid
  misc_feature (249)..(249): Xaa can be any naturally occurring amino acid
  misc_feature (251)..(253): Xaa can be any naturally occurring amino acid
  misc_feature (258)..(258): Xaa can be any naturally occurring amino acid
  misc_feature (260)..(260): Xaa can be any naturally occurring amino acid
  misc_feature (263)..(263): Xaa can be any naturally occurring amino acid
  misc_feature (266)..(266): Xaa can be any naturally occurring amino acid
  misc_feature (274)..(274): Xaa can be any naturally occurring amino acid
  misc_feature (279)..(286): Xaa can be any naturally occurring amino acid
  unsure (1)..(287): unsure at all Xaa locations
KWFQGTADAVRQFIWVFEDAKNKNVEHILILSGDHLYRMDYMNFVQRHVDTNADITVSCVPMDDSRASDYGLMKIDKTGRIIQFAEKPKGSDLKAMRVDTTLLGLSPQEAEKXPYIASMGVYVFRTETLLQLLRWKGSSCNDFGSEIIPSAVNEHNVQAYLFNDYWEDIGTIKSFFDANLALTEQPPKFEFYDPKTPFFTSPRFLPPTKVXKCKIGDAIISHGCFLRECRVQHSIGGVRSRXESGVELXDXXXMGADXYXSEXDIXSLVASVGXIGSGXXXXXXXXI

SEQ ID NO: 24020 - protein, 540 aa, Cryphonectria parasitica
MADPFAPRSMKRKNVKGLALTPAAPKPPPTAENANFSHSRNNQSEDTSAQLEIGIEFNLDLRPEDLEIIKDLGSGNGGTVSKVKRIPTNTTMARKVIHVEAKREMRKRIVRELQIMHNCHCEHIVTFYGAFLNDNNDVIMCMEYMDVGSLDRVSRVFGPVRVDVLGKIAEATLGGLTYLYYKHHIMHRDIKPSNILVNSRGHIKLCDFGVSGELINSVADTFVGTSTYMAPERIQGEKYTVKSDVWSFGLSIMELAIGKFPFAASEQLSDAEAAPAGILDLLQQIVHEPAPKLPKSDAFPQILEDMIQKCLLKTPDDRPTPQELYDRDPFVQAAKRTPVDLREWAVSLMERDNRKSHLAPQLSPGTQELLRSNNSPDGAAEDRALATPTSGEIPIVGALLQSPRDQYNSASNRSPTRSDRGPGSSSAGRPGGPPVHPGLGSRVSTTNSIPKMAPPPPPRPGRHSPNLSAGSGSGRQATFALPVRPAPAGPLPNPPMRKQTPDETTSGRGPMRRQATWGASSGSMGAQGMGGYPANQVRRE

SEQ ID NO: 24021 - protein, 499 aa, Propionibacterium acnes KPA171202
MSHMDSATQATTPTEGPTEEPQLQRGLKNRHLQLIAIGGAIGTGLFLGSGKTISLAGPSILLVYLIIGAVLFFVMRAMGELLLSNLAYKSFADFATDLVGPGAGFYMGWTYWMCWVVIGNADTIAMCGYLAAWFPHLDKWIPATCIVLLLTCLNMVAVKLFGEMEFWFAMIKIVTIIALILVGGYLAITGFQPPRSGVPAASFSHLWDRGGFFPTGFMGFIAGFQIAIFSFQGIEMAGTAAAETADPEHNLPKAINSIPARVLIFYVLALGVIMAVQPWDLINPQASPFVEMFSFIGILIAFHIVNFVVLTSAASSANSGVFSTSRILYGLAREKDAPPVFAKLSSRHIPRNALILTAMCIAPAIVLVTLEDSVMDAFSLVAGVSSVLYLSVWGLILVCYLKYLGKHPQRHAESAFKMPAGRVMSWVGILFFITILIMLGFSADSRQALIAAPVWVIFMMVLYRLLASTRADHTRIDFDAERIRALEELHRTQEDEHQA

SEQ ID NO: 24022 - protein, 150 aa, Brassica napus
  misc_feature (6)..(6): Xaa can be any naturally occurring amino acid
  misc_feature (9)..(9): Xaa can be any naturally occurring amino acid
  unsure (1)..(150): unsure at all Xaa locations
CNKYMXKSXGKDAFHLRIRVHPFHVLRINKMLSCAGADRLQTGMRGAFGKALGTCARVAIGQVLLSVRCKDNHGAHAQEALRRAKFKFPGRQKIIVSRKWGFTKFNRADYTRLRQSKRVVPDGVNAKFLSNHGPLANRQPGSAFISATSD

SEQ ID NO: 24023 - protein, 1137 aa, Ustilago maydis 521
MSFSSEKGSSRRGSISLASKRRGSGTEKLETHHELRSFNCTSIGLAISTCSLETPTIWSLSSPTLLSSFFFSPIVTMSYLLQASLSLCVERAALTLNSLVKSSLTKQIASWHTSSHKHEENPHAHEEQLKQTYERFEKLFTITPQRLRMITDRFVGVLEEGLQKDGQTVPMLPAYVFGWPTGDEVGSYLALDLGGTNLRVCHVVLKGAGKFEITQSKFRLTEEQKQTEGQELFDFCADCLATFIKDHFGDQNGDVILEEELALGFTFSYPMEQDKIDHGKLVRWTKGFGNPNTEGRDCAAMFRKSLDKFNLPVKMVSIINDTTGTLIASNYVNRETRIACIFGTGCNAAYMEHMKDIPKIKHLGLPEEEDMAINCEYGAFDSFQHEHMAEIRTKYDEHIDLHSNKPHEQSYEKMIAGLYLGEIFRLCICDLIDEGTLFLGQNTYKLEKTNAFDTAFLSLIESDPTDELLTVTGLFTHFFGIDTTIEERQFFRKLAKLIGTRSARLSSCGIAALVTKMGYLDKGCGVGADGSLYSKYPGFADRLHQALEDIFGEKGRNIRTYQAEDGSGVGSAIIAAMTKARKEEGKTLELTSLSDGYAQDRAEMREVARSLVLPFLLGWVWCIGLRDATFTIRDYDINTLQRKEKKRNSRDCRLRVAGNVCIAEKSPVSSCSCQLPHSRAIRTKANLGMCCEFWWSFMIELVGRFLVLMRQRMSVHCDRPNLRNIAVVEGGNRALHRRLEDVMKSCIAAQKSTVLSGTFSGTLTRNIRRGQFVPTARAPALAVGLYKLASSSHHPIIPATILSSRSITSFATMPATHFKLNSGASIPSVGLGTWQSPKGEVRDAVCHALKSGYRHIDCAWGYQNEDEVGEGIKLSGVPREEIWITSKLFEFHHNHVRQAVQDTLDKLDVKYLDLYLMHWNIAFVPEDVPAGQLPRDSKKDPATGKHLLDLETTENFVKVWAELEKLVDEGIVKNIGISNFSIRRTKELLKSCRIKPVVNQVELSFTFPQPELVGWLKKQDILPQAYSPLGSTGASQASLSVVDEIAKKHGVQGANVLISWQVARGCNPLPKSVTPARIENNIKLIDLSAEELDQLEKGALAQTPKKVCDQSDLVVPSYDIFEANNPTNNDKVQAAQD

SEQ ID NO: 24024 - protein, 363 aa, Triticum aestivum
MFVFCLCTRCRICRVSSFPVLLLFMFIHLSYFFLVLLLILGQFFFTRYEKYHGYYGGKEESRKSNYTDMVNKFPPSATSFYEYGWGESFHFAHRWNGESLRESIKRHEHFLALQLELKPGMKVLDVGCGIGGPLREIARFSSTSVTGLNNNDYQITRGKALNRSVGLGATCDFVKADFMKMPFSDNTFDAVYAIEATCHAPDPVGCYKEIYRVLKPGQCFAVYEWCITDHYDPNNATHKRIKDEIELGNGLPDIRSTRQCLQAVKDAGFEVIWDKDLAEDSPLPWYLPLDPSRFSLSSFRLTTVGRIITRNMVKVLEYVGLAPEGSQRVSSFLEKAAEGLVEGGKKEIFTPMYFFVVRKPLSE

SEQ ID NO: 24025 - protein, 298 aa, Arabidopsis thaliana
MNRGIEVMSPATYLETSNWLFQENRGTKWTAEENKKFENALAFYDKDTPDRWSRVAAMLPGKTVGDVIKQYRELEEDVSDIEAGLIPIPGYASDSFTLDWGGYDGASGNNGFNMNGYYFSAAGGKRGSAARTAEHERKKGVPWTEEEHRQFLMGLKKYGKGDWRNIARNFVTTRTPTQVASHAQKYFIRQVNGGKDKRRSSIHDITTVNIPDSPDAAAADNATANAPCSPPSVGGNQRETSEWEGQTLYDETAAAFYNQNAFSETLLGMSSTPYMAKLQEQSFLNASQFESYNAYLQM

SEQ ID NO: 24026 - protein, 136 aa, Hamamelis japonica
YIDVKYDATTVMDAKPLLKEALQAZVGLPVDRNIPLIGFIGRLEEQKGSDILVAAIQKFMGENVQIVILGTGKKAMEKQIEQLEITYPDKARGVAKFNVPLAHMIIAGADYMLIPSRFEPCGLIQLHAMRYGTVPI

SEQ ID NO: 24027 - protein, 428 aa, Propionibacterium acnes KPA171202
MGSSARFVDEDTHLDFSKVVATDGQVGYDVAGLLNKTGNVMIDPGFVNTASCESQITYIDGEQGVLRYRGYPIEQLAEQSTFLETAYLVLYGELPSKAQLDGFEERIRRTTLIDERMRDLFRCFPRRSHPMPVLAAGIMALSTFSQKSSGTDPDQIEAATTRLIAKVPTLAAFGYKNSMGQPTLYPDNSLSYVQNFIRMSFGFPTEPYEFNDEITRALETLLILHVDHEQNCSTSTVRMVASSGANMYAAVAAGVNALSGPKHGGANQAVLEMLQFIRDSGMTTKEFVRKVKDKESDIKLMGFGHRIYKNYDPRAAIIKKHADRIMELHTGREDLLEIAKELEETALNDDYFKERKLYPNVDFYTGLIYEAMGFPMNMFTVLFALGRLPGWIAQYREQVASGGNKIWRPRQIFTGSDKRDYVPLNKRA

SEQ ID NO: 24028 - protein, 373 aa, Rickettsia sp.
RVSAEADCFTYDPGFMSTASCQSTITYIDGDQGILRHRGYDIKDLAEKSDFLDVAYLLIYGELPSGEQYNNFTKQVAHHSLVNERLHYLFQTFCSSSHPMAIMLAAVGSLSAFYPDLLNFKEADYELTAIRMIAKIPTIAAMSYKYSIGQPFIYPDNSLDFTENFLHMMFATPCTKYKVNPIIKNALNKIFILHADHEQNASTSTVRIAGSSGANPFACISTGIASLWGPAHGGANEAVINMLKEIGSSEYIPKYIAKAKDKNDPFRLMGFGHRVYKNYDPRAAVLKETCKEVLKELGQLDNNPLLQIAIELEAIALKDEYFIERKLYPNVDFYSGIIYKAMGIPSQMFTVLFAIARTVGWMAQWKEMYEDPE

SEQ ID NO: 24029 - protein, 353 aa, Debaryomyces hansenii CBS767
MSSENKNLKLAIVGTGIFATDQHLPTIDKLPNLTPAACYNRTKAKAETFASKANIDPSQVYESLEDIIKTDSVDFVDALLPVQYNLDAVKLAVKYNKPICLEKPIAANMAQAKEIVHLANGTDVPISILENWSYLKAIEILNKDVLPKIGDIVSFTYKSTGAWNDNNKYLATSWRQNPEHIGGFLSDGGVHQLALLTEVLGEVESVSGLTKQIREESGADDILFSTMKTKAGAIGTFTYGSSFGATDKSTSFTIYGTNGSAVYDFSPNLSKPTITYQTGPSSQKASKKTVIEVDENDTFVEEFKNFAEAVTKNDKSIVHVTAAKAYHHLAIVAAALDSSAKNGDSVKVEQPQV

SEQ ID NO: 24030 - protein, 204 aa, Triticum aestivum
  misc_feature (194)..(194): Xaa can be any naturally occurring amino acid
  unsure (1)..(204): unsure at all Xaa locations
MAVNNTKLAAVADAENPAVMCGDVDDSVSQSSIDFAGRANWLRAAVLGANDGLVSTASLMLGVSAVKPEARAMVVSGFAGLLAGACSMAIGEYVSVCSQRDMEIAELDQAGKRGGDEEKALPSPAQAAAASALAFSVGALLPLLAAGFIVGYNLRVAVVVVVATLALAAFGCVGAVLGRAPVARSCARVVVGGXWLPWPSPLGS

SEQ ID NO: 24031 - protein, 231 aa, Magnetospirillum magnetotacticum MS-1
  misc_feature (184)..(184): Xaa can be any naturally occurring amino acid
  misc_feature (194)..(194): Xaa can be any naturally occurring amino acid
  unsure (1)..(231): unsure at all Xaa locations
MPVLDRIADLTAEITAWRHDLHAHPELQYDVHRTAGIVAEKLRAFGCDEVATGIGRTGVVGVIRGRSHGSNRAIGLRADMDALPIQEVRDLPYRSSVPGKMHACGHDGHTAMLLGAAKYLAETRNFDGSAVLIFQPAEEGGGGGEAMVQDGMMERFGVEAVYGLHNIPNQPLGTFAIRPVRSWXRPIASRSRSXAGKARGPSKPPSNRAGASQWYRPEPWWPAATAIEGTR

SEQ ID NO: 24032 - protein, 287 aa, Triticum aestivum
MLAKAVPRPCSGAGRHGAPAARLWSVGVAGGPRRGGAGGRRTRADAGERMAGSEAVPVVAVAAGKQPVNGSAMAGIDKLVTSTVGKSTNVLWHDCPIGQFERQELLNQKGCVVWITGLSGSGKSTLACALSRELHSRGHLTYILDGDNLRHGLNRDLCFEAKDRAENIRRVGEVAKLFADAGLICIASLISPYRSERSACRKLLHNSTFIEVFLNVPLEVCEARDPKGLYKLARAGKIKGFTGIDDPYEAPSDCEIVIQCKAGDCATPKSMADQVVSYLEANEFLQE

SEQ ID NO: 24033 - protein, 419 aa, Pyrococcus furiosus
VEADPYEIVIKQLERAAQYMEISEEALEFLKRPQRIVEVTIPVEMDDGSVKVFTGFRVQHNWARGPTKGGIRWHPEETLSTVKALAAWMTWKTAVMDLPYGGGKGGIIVDPKKLSDREKERLARGYIRAIYDVISPYEDIPAPDVYTNPQIMAWMMDEYETISRRKTPAFGIITGKPLSIGGSLGRIEATARGASYTIREAAKVLGWDTLKGKTIAIQGYGNAGYYLAKIMSEDFGMKVVAVSDSKGGIYNPDGLNADEVLKWKNEHGSVKDFPGATNITNEELLELEVDVLAPAAIEEVITKKNADNIKAKIVAEVANGPVTPEADEILFEKGILQIPDFLCNAGGVTVSYFEWVQNITGYYWTIEEVRERLDKKMTKAFYDVYNIAKEKNIHMRDAAYVVAVQRVYQAMLDRGWVKH

SEQ ID NO: 24034 - protein, 368 aa, Schizosaccharomyces pombe
MPPIKTAVLGTGVSAFVFHFPFLEALPSKFEIYACLERRATVTQSKARSAYPNILVYTNLDELLADVNIELVVVSLPPNVHSEIVKKALNAGKHVVCEKPFTPTYEEAKELYELAESKSLLLAIYQNRRWDGDFLTAKKIIESGRLGQVVEFESHFDRYRLGRKSGSWKDEPRPGNGMVYGIGSHLIDQAVSLFGTPYSVTAKLEAQRQIPPLEVEDYFRIILHYPAKGNKLPINVILSSTNVSCGCEMRFCIKGTRGSFMKFGFDPQESQLHSGMKPNDHGFGTDRFELYGNLWTVPLDADVKALPEPTKITVPTVQGNYRDFYDAVFEEILKKANEFPIKSDQVLAVEKIMEAAYKSSESSSSIQL

SEQ ID NO: 24035 - protein, 1023 aa, Anabaena variabilis ATCC 29413
MGSVLYSLSESANLYPASELFLRHRLQIVEELWESVLRQECGQNMVDLLRQLRDLCSPEGQATKDQAVSAVKLIEQLNINEAIRAARAFALYFQLINIIEQEYEQRQQLTRYSDLEAETAPLNGSENITSSSNHNEDDVIFNRGLGTDFLGKNWTNRGQGKQKGTFAALFPLLSKLNVPPQQIQRLISQLDVRLVFTAHPTEIVRHTIRDKQRQVVDLLQQLDEVENRAKEGGGYPWEAGEIREKLLEEIRLWWRTDELHQFKPTVLDEVDYALHYFQEVLFDGIPQLYKRFKYALNQTFSWLEPPSKDFCSFGSWVGSDRDGNPSVTPEITWQTACYQRKMVLERYIKSVKQLIELLSISMHWSDVLPDLLESLELDQSQLSEVYDALALRYRQEPYRLKLAYVLKRLENTRDRNLALYKGETPTNEDSPMYRSGAEFLAELRLIQHNLTETGLSCRELDNLICQVEIFDFNLTKLDIRQESTRHSDALNEILDYLQLLPQPYNDLSEEQRVAWLTTELQTRRPLISSELPFSDKTNDVIKTFRVVRSLQQEFGINICQTYIISMCRQVSDVLEVLLLAKEARLFDPAIAVGTIQVVPLFETVEDLQRSRSVMRQLFELPLYRALLAGGYKSTEVKVPSPESTPLPTPHSVLTPDLQEVMLGYSDSNKDSGFLSSNWEIHKAQKSLQKIAEEYGVNLRIFHGRGGSVGRGGGPAHEAILAQPGHSINGRIKITEQGEVLASKYSLLDLALYNLETITTAVIQASLLRTGFDDIEPWNEIMEELAARSRQHYRGLIYEQPDFIDFFHQVTPIEEISQLQISSRPARRPSGKKDLSSLRAIPWVFSWTQTRFLLPSWYGVGTALQEFFNEEPEEHLKLMRYFYVKWPFFKMVISKVEMTLAKVDMQMAGHYVQELSDPEDKSRFEKVFEQIANEYYLTRDLVLKITDHSRLLDGDPVLQRSVQLRNGTIVPLGFIQVSLLKRLRQSKNNNATSGVIHSRYSKGELLRGALLTINGIAAGMRNTG

SEQ ID NO: 24036 - protein, 627 aa, Candida albicans SC5314
MGQRMPSPPSSHITNPWKTPEQTASSSHGHDEVISPETNTYSPDFSNYTRNSSSYRHVDKKSASPPTTTFDNQTFQESNHDDTNNQQYVEADAGDGTKAHEQYLTGFPLFLTISSCIISLFLVALDQTIVSTILTTVGNKFNAFEKIGWLTSGFMLPMACLVPSYGNISIAFGRKWTLVAGIIIFEIGSLISAISNSMSLLIGGRVIQGIGGGSIQAIVMVILTEVVPMNRRSLVFASISVVYSTSSVLGPIIGGALEKITWRWCFYINLPLGGAALVILMLGFHPPKPQGNVREKLSKIDFIGFVLLTSGLVLVLLALTFGGVNYPWNSGSIIALFTVGGGMLLLFVIWNFKYSANPIILTELIVDWRVLSACLSGMFNFAFFISNLTYLAVYFQVIFNASSLQSGIDLLPMVISVTLASLANSFFIDFTKNVKITMLVSGVLSPLGCGLFLLLDEDSSIGIRIGLLIISGVSIGLQFQSSLLSAQLAVSKDIPGATILVTVFSDFVKNFASTISVTLAQLLYQTTGQKYITDMMGNLPEDSQDYKDLNKYTAAKFISNPEIVQDLPDSAKSLVLSQLMKALKNVFYLGLGLAILCFITSLFTTNKKIPKNVEIKKNDDEESNKNE

SEQ ID NO: 24037 - protein, 225 aa, Zea mays
MGRSPCCEKAHTNKGAWTKEEDQRLVAYIKAHGEGCWRSLPKAAGLLRCGKSCRLRWINYLRPDLKRGNFTQEEDDVIIKLHQVLGNKWSLIAAQLPGRTDNEIKNYWNTHIKRKLIARGIDPRTHQSASAAAVAPAAAAAAQSSYRHHGDDEAVARRSCSRDSGCIAAHSSDDDDSTSGSVPHQHAVGGIDLNLSLSPPTTSQPSSPAAAKGVVASGYGQGSES

SEQ ID NO: 24038 - protein, 391 aa, Halobacterium sp. NRC-1
MREDFLLLNPGPVPVAREVREAMSAPMVSHRSAAFEAVYERAQEHVEYVFEGSTPSGDTTSAGGTALLLNGTATMGMEAAVGNLVGDGGEVVAVVNGKFGRRFARVAERYADVTRVTADWGAPVDLDAVADAVTTETDVVTMVHNETSTGLLNPVDAVGDIAADADARYVVDGVTSIGGDEFRIDDWGVDIAVTDAQKALAAPPGLSAVYVTDDVVPALDGEAAPFYEDIEWHLRKAESNQTPFTSAVPLFRGLAAAAARIREEGMADRIARHRRQAAAFRDGFHEMGLASFPELNDAAAYSNTLTAIRLPAGARGADAAAFMDAVTARGVSISGGQGHLGGEIFRVSNMGQLTAQQVVRGVRTVGDALDEVGVDVAVHDGVAAARATLEQ

SEQ ID NO: 24039 - protein, 553 aa, Oryza sativa
MEEGRRGDREGKSAAGWTALSTTKTTLEEKRRLQANGSVGGDAGTSGFRRIVRLFFACMVAGGIQYGWALQLSLLSPYSQTLGISHSYVSLTWICGPIAGFVVQPIVGYYSDRCTMKMGRRRPFILVGCLIICISVMIIGFSADIGRHLGDTKEHCSTYTGPRWSAAMVYIVGFWFLDFANNTVQGPARAMMADLSAGHHGPNVGQSIFSLWMAIGSVLGYLSGANGKWHDICAVLANYGVRSIAPFVRWFPWLKTAACCDACANLKGAFFTAVLLIVVSMTVTMYLADEMPLDKQDVDTSGGGGCAVFVDLFKSLRNLPPAMFKVLAVTAVTWLSWFPFIQYNTDWMGREIYHGEPQGTAAKADVYDAGVREGAMGLLFCSVALGVTSFVIPKLCRRLTSKVVWSISNFLVFALMAVMVAVGMVSMRGYRPSLAAGLTGPDPTLKAVALVVFALIGIPQAVLFSVPWAVASEVTAEEGGGQGLAIGVLNIAIVVPQLVIALTAGPIDGAFNKGNTPAFGIGGAFAFICGVLALIWLPKTRGVSNAAVVAGGH

SEQ ID NO: 24040 - protein, 393 aa, Campylobacter jejuni RM1221
MDYKEQSHIVPTYKRFDIVLEKGQGVYLFDDKAKKYLDFSSGIGVCALGYNHAKFNAKIKAQVDKLLHTSNLYYNENIAAAAKNLAKASALERVFFTNSGTESIEGAMKTARKYAFNKGIKGGQFIAFKHSFHGRTLGALSLTANEKYQKPFKPLISGVKFAKYNDILSVEKLVNEKTCAIILESVQGEGGINPANKDFYKALRKLCDEKDILLIADEIQCGMGRSGKFFAYEHAQILPDIMTSAKALGCGLSVGAFVINQKVASNSLEAGDHGSTYGGNPLVCAGVNAVFEIFKEEKILENVNKLTPYLEQSLDELINEFDFCKKRKGLGFMQGLSLDKNVKVAKVIQKCQENALLLISCGENDLRFLPPLILQKEHIDEMSEKLRKALKSF

SEQ ID NO: 24041 - protein, 387 aa, Oryza sativa
MSSFAHHHHGSLVEKDGRMSALRSSLRPYEAAEEMAAAAAAGGPAAAWGAVERGAGMMGDGFSVEDLLDLEELCEVDRDGGEQGEAAAAAATAVEKERSSDSHGSSVVSYEPMPLLPPVMDLPAHDVEELEWVSRIMDDSLAELPLPQLPAAAAALAACGKPQHRRPHEGAASALLDPMRTPTICALSTEALVPVKSRRSKRSRASVWSLSGAPLSDSTSSSSTATTSSCSSSASFSPFLQYVDFPALVASDLLDEQPRSKKSKHGKNGKQKPKKRGRKPKHQQPPHLAAAAGGGAALPATGDRRCSHCGVQKTPQWRAGPEGAKTLCNACGVRYKSGRLLPEYRPACSPTFVSSLHSNSHRKVLEMRRKKETPVIVAAAAPAVASF

SEQ ID NO: 24042 - protein, 449 aa, Arabidopsis thaliana
MEKMEEKKRIVLVPVPAQRHVTPMMQLGTALNMKGFSITVVEGQFNKVSSSQNFPGFQFVTIPDTESLPESVLERLGPVEFLFEINKTSEASFKDCIRQSLLQQGNDIACIIYDEYMYFCGAAAKEFNLPSVIFSTQSATNQVSRCVLRKLSAEKFLVDMEDPEVQETLVENLHPLRYKDLPTSGVGPLDRLFELCREIVNKRTASAVIINTVRCLESSSLKRLQHELGIPVYALGPLHITVSAASSLLEEDRSCVEWLNKQKPRSVVYISLGSVVQMETKEVLEMARGLFNSNQPFLWVIRPGSIAGSEWIESLPEEVIKMVSERGYIVKWAPQIEVLGHPAVGGFWSHCGWNSTLESIVEGVPMICRPFHGEQKLNALCLESIWRIGFQVQGKVERGGVERAVKRLIVDEEGADMRERALVLKENLKASVRNGGSSYNALEEIVNLM

SEQ ID NO: 24043 - protein, 387 aa, Thunbergia alata
MALVFKSIGAHKTPPCTLNLASPALYHTRVTMASTITHPPPLKDRKISSTRRVRTYPLAPEKAEIFNSMHGWVEDTILPFLKPVEESWQPTDFLPDSTSDGFHEQVEELRKRTADLPDDYLVALVGAMVTEEALPTYQTMLNTTDVIYDESGASPVPWAVWTRAWTAEENRHGDIVNKYLYLSGRVDMKQIEKTIQYLIGSGMDPGADNNPYLAYIYTSYQERATAISHGSLGRLARQKGEMKLAQICGTISADEKRHEAAYSKIVEKLFELDPEGTMLALAYMMKMKIVMPARLMHDGKDPDMFQHFSAVSQRLGIYTAKEYTDILEHMIARWGVDKLTGLSGEGRRAQDYVCGLPMRFRKVEERAQAWAENISHVPFSWIFGRRV

SEQ ID NO: 24044 - protein, 136 aa, Hamamelis mollis
YIDVKYDATTVMDAKPLLKEALQAEVGLPVDRNIPLIGFIGRLEEQKGSDILVAAIQKFMGENVQIVILGTGKKAMEKQIEQLEITYPDKARGVAKFNVPLAHMIIAGADYMLIPSRFEPCGLIQLHAMRYGTVPV

SEQ ID NO: 24045 - protein, 136 aa, Hamamelis vernalis
YIDVKYDATTVMDAKPLLKEALQAEVGLPVDRNIPLIGFIGRLEEQKGSDILVAAIQKFMGENVQIVILGTGKKAMEKQIEQLEITYPDKARGVAKFNVPLAHMIIAGADYMLIPSRFEPCGLIQLHAMRYGTVPI

SEQ ID NO: 24046 - protein, 594 aa, Xanthomonas campestris pv. vesicatoria str. 85-10
MSFDPPFSHGSTASGLSRRRFVQGLALGGVAAASGLWRYDARAAAQATTPVLRGSSQSLQIGRLPVNFTGHTRSAITVNQSLPAPTLRWREGDTVGVRVRNALADQATSVHWHGLLLPANMDGVPGMSFDGIAPGQEYHYRFTLRQSGTYWYHSHSMFQEQSGLYGAIVIDPLTPPPYRHDREHVVLLSDWTDLDPAALFRRLKQMPSHDNYAQRTVVDFLRDARDDGLRATLADRGMWGRMRMIPTDLSDVNANTYTYLLNGVAPAGNWTGLFKPGEKVLLRFINGSSMTYFDIRIPGLRMTVVAADGQYVHPVSVDELRIAAAETFDVIVEPLGQDAFTLFAQDMGRTGFACGTLAVQHGLQAPIPALDRRAILTMQDMGHGDGMHHALPAMHGAPGMLAAHGTHTMHSHDDAQAHDKAPHHPASETGNPLIDMRSNATAPRLDDPGVGLRDNGRRVLCYADLHSVFEDPDGREPGRDIELHLTGHMEKFAWSFDGIAFASAQPLRLQYGERLRIVLVNDTMMQHPIHLHGMWSDLEDAHGNFQVRKHTIDMPPGTRRTYRVRADALGRWAYHCHLLYHMEAGMMREVRVEA

SEQ ID NO: 24047 - protein, 136 aa, Hamamelis virginiana
YIDVKYDATTVMDAKPLFKEALQAEVGLPVDRNIPLIGFIGRLEEQKGSDILVAAIQKFMGENVQIVILGTGKKAMEKQIEQLEITYPDKARGVAKFNVPLAHMIIAGADYMLIPSRFEPCGLIQLHAMRYGTVPI

SEQ ID NO: 24048 - protein, 781 aa, Kineococcus radiotolerans SRS30216
MPPTVPELSSSAQGIALAVAVTALLSLVAAWVFRRQVLQAGEGTARMQEIAGAVQNGAAAYLRRQFRTLAWFAVAVLLLLLALPADGWDLRIARSAAFVLGAVFSAAIGYLGMSLAVRANVRVAAAAREGAGGRERGMRIAFRTGGVVGMTTVGLGLLGASVAVLAFGADAPTVLEGFGFGAALLAMFMRVGGGIFTKAADVGADLVGKIEQGIPEDDPRNPATIADNVGDNVGDCAGMAADLFESYAVTIVAAVILGSAAVGETGLVLPLLVPAIGAITAALGVVLVRARPGTSGLTSIQNGFYLSAAVALAGTAIACFAYLPATFAEFSGADESVAGLNGDPRVIAFAAVLLGILLAVLILAITGHYTGTEAKPTRDVADASTTGAATVVLSGIGLGLESAVYTTLVIAGAVFLAFLLAGGVLALAMFLVALAGCGLLTTVGVIVAMDTFGPVSDNAQGIAEMSGDVDAEGAAVLTELDAVGNTTKAVTKGIAIATAVLAATALFGSYQEAVVNRINEVAVAIETPSQYLQRTIGDFSVSTPTTLVGVLLGAAAVFLFAGLAINAVGRSAAAVVLEVRRQFADHPGIMDGTEQPDHGRVVDLCTRDALRELATPGLLAAFAPIAVGFGLGVAPLAGFLGGAIAAGVLMAVFLSNSGGAWDNAKKLVEDGLHGGKGSAAHEATVIGDTVGDPFKDTAGPSINPLIKVMNLVALLIAPAVVTLSIGAEANAAARYGIAAAATVVIVVAVVVSKVRRVDMAAPTGPATGVDLRSGDSAERLP

SEQ ID NO: 24049 - protein, 851 aa, Arabidopsis thaliana
MISRSYTNLLDLASGNFPVMGRERRRLPRVMTVPGNVSEFDEDQAYSVSSDNPSSVSSDRMIIVANRLPLKAEKRNGSWSFSWDQDSLYLQLKDGLPEDMEILYVGSLSVDVDSNEQDDVAQILLDKFKCVPTFFPPDLQSKFYDGFCKRQIWPLFHYMLPFSADHGGRFDRSLWEAYVATNKLFFQKVIEVINPDDDFVWIHDYHLMVLPTFLRRRFNRIRMGFFLHSPFPSSEIYRSLPVREEILKALLNSDLIGFHTFDYARHFLTCCSRMLGLEYQSKRGYIGLEYYGRTVGIKIMPVGINMGRIQSVMRYSEEEGKVMELRNRFEGKTVLLGIDDMDIFKGINLKLLAMEQMLRQHPNWRGRAVLVQIVNPARGKGIDVEEIRGEIEESCRRINGEFGKPGYQPIIYIDTPVSINEINAYYHIAECVVVTAVRDGMNLTPYEYIVCRQGLLGSESDFSGPKKSMLVASEFIGCSPSLSGAIRVNPWNVEATGEALNEALSMSDAEKQLRHEKHFRYVSTHDVAYWSRSFLQDLERICVDHFKKRCWGMGISFGFRVVALDPNFRKLSIPCIVSDYKRAKSRAILLDYDGTLMPQNSINKAPSQEVLNFLDALCEDKKNSIFIVSGRGRESLSKWFTPCKKIGIAAEHGYFLKWSGSEEWETCGQSSDFGWMQIVEPVMKQYTESTDGSSIEIKESALVWQYRDADPGFGSLQAKEMLEHLESVLANEPVAVKSGHYIVEVKPQGVSKGSVSEKIFSSMAGKGKPVDFVLCIGDDRSDEDMFEAIGNAMSKRLLCDNALVFACTVGQKPSKAKYYLDDTTEVTCMLESLAEASEASNFSMRELDEAL

SEQ ID NO: 24050 - protein, 544 aa, Vibrio fischeri ES114
MTPSELKRLYHITKVQLEYGLDELLPEHALTQLPKRLRKGLFWIKNKYPEKTLGERLRLALQELGPVWIKFGQMMSTRRDLFPPHLADQLALLQDQVAPFDGQLAKDQMEMELGGPLDNWFTDFDIKPLASASIAQVHTAKLKDSGREIVLKVIRPDIRPVIESDIRLMYRMARLVEQHIPEARRLKPVKVIEEYEKTLLDELDLRREASNAMQLRRNFEGSEELYVPEVILDLSSEHLMVSERIYGIQVSDIEQLERNGTNMKLLAERGVSVFFTQVFRDSFFHADMHPGNVFVNPDNPENPQWIGLDCGIVGTLNKEDKRYLAENLLGFFNSDYHKVAQLHVDSGWVPADTNVEEFEFAIRMVCEPIFAKPLGEISFGHVLLNLFNTARRFNMEVQPQLVLLQKTLLYVEGLGRQLYPQLDLWATAKPFLETWMAKQVGPAAFVTALSEKAPFWAEKLPELPDLVYDSLRQGKVLNQRMDKLYAGYRQSKRQQAKGQFLFNVGATLLICSAVLLTSNITVLASISAATGAAFWLFSWRAYRR

SEQ ID NO: 24051 - protein, 135 aa, Fothergilla major
IIDVKLMPNVMDAKPLLKEVLQAEVGLPVDRNIPLIGFIGRLEEQKGSDILVAAIQKFMGENVQIVILGTGKKTMEKQIEQLEITYPDKARGVAKFNVPLAHMIIAGADYMLIPSRFEPCGLIQLHAMRYGTVPI

SEQ ID NO: 24052 - protein, 460 aa, Malus x domestica
GQDSSYFLGWQEYEKNPYHEVHNTNGIIQMGLAENQLCFDLLESWLAKNPEAAAFKKNGESIFAELALFQDYHGLPAFKKAMVDFMAEIRGNKVTFDPNHLVLTAGATSANETFIFCLADPGEAVLIPTPYYPGFDRDLKWRTGVEIVPIHCTSSNGFQITETALEEAYQEAEKRNLRVKGVLVTNPSNPLGTTMTRNELYLLLSFVEDKGIHLISDEIYSGTAFSSPSFISVMEVLKDRNCDENSEVWQRVHVVYSLSKDLGLPGFRVGAIYSNDDMVVAAATKMSSFGLVSSQTQHLLSAMLSDKKLTKNYIAENHKRLKQRQKKLVSGLQKSGISCLNGNAGLFCWVDMRHLLRSNTFEAEMELWKKIVYEVHLNISPGSSCHCTEPGWFRVCFANLPERTLDLAMQRLKAFVGEYYNVPEVNGGSQSSHLSHSRRQSLTKWVSRLSFDDRGPIPGR

SEQ ID NO: 24053 - protein, 917 aa, Pseudomonas sp. PCL1171
MLRKMGIKGRVLLLTLLPTSLMALLLGGYFTWMQLSELQTQLLQRGEMIAEQLAPLVAPPLSSKNTDLLERIATQSLEQPDVRTVSFLAPDRSSLAHAGPTMLNQPPIGNSSHLLQRTGNDATRYLLPVFGRHRNLAGELIPDESDRLLGWVEVELSHNGMLLRGYRSLFASLLLIAIGLICTAALALRISRTINSPISQIKLAVAQLKDGNLETRLPPLGSQELDQLASGINRMAETLQNAQEELQHSIDQATEDVRQNLETIEIQNIELDLARKEALEASRIKSEFLANMSHEIRTPLNGILGFTHLLQKSEMSPRQLDYLGTIEKSADNLLGIINEILDFSKIEAGKLVLDSVPFNLRDLLQDTLTILAPAAHAKQLELVSLVYRDTPLALVGDPLRLKQILTNLVSNAIKFTREGTIVARAMIEDEQEDSVQLRISVQDTGIGLSNQDVRALFQAFSQADNSLSRQPGGTGLGLVISKRLIEQMGGEIGVDSTPGEGSEFWISLNLPKTRDDVEDLPAAPLLGRRVAVLENHELARQALQHQLEDCGLEVTPFNSLENLTNGITSAHQTEQAIDLAVLGVTANDIPPERLNQHLWDLEHLSCKVLVLCPTTEQMLFNQSVPNPNSQLQAKPACTRKLRRALADLISPRPSRSEPGEPLSSRAPRVLCVDDNPANLLLVQTLLEDMGAKVLAVESGYAAIDAVKQETFDLVLMDVQMPGMDGRQSTEAIRQWESERHGTPLPVVALTAHAMANEKRALLQSGMDDYLTKPISERQLAQVVLKWTGLALRNQGPERAPDGLAPGVRLQVLDHEEGLRLAANKADLAADMLAMLLASLEADRQAITAAREANDNNALIERVHRLHGATRYCGVPQLRAACQRAETLLKQDDAKAMTALDELDMAIARLASEARVSA

SEQ ID NO: 24054 - protein, 113 aa, Drosera tokaiensis
MPGQWEFQVGPSVGISAGNELWVARYILERITEIAGVVLSLDPKPIEGDWNGAGAHTNNSTKSMREEGGYEVIKKAIEKLGLRHKEHIAAYGEGNERRLTGHHETANINTFLW

SEQ ID NO: 24055 - protein, 424 aa, Triticum aestivum
  misc_feature (193)..(193): Xaa can be any naturally occurring amino acid
  misc_feature (207)..(207): Xaa can be any naturally occurring amino acid
  misc_feature (247)..(247): Xaa can be any naturally occurring amino acid
  misc_feature (301)..(301): Xaa can be any naturally occurring amino acid
  misc_feature (313)..(313): Xaa can be any naturally occurring amino acid
  misc_feature (325)..(325): Xaa can be any naturally occurring amino acid
  misc_feature (356)..(356): Xaa can be any naturally occurring amino acid
  misc_feature (361)..(361): Xaa can be any naturally occurring amino acid
  misc_feature (365)..(365): Xaa can be any naturally occurring amino acid
  misc_feature (375)..(376): Xaa can be any naturally occurring amino acid
  misc_feature (389)..(389): Xaa can be any naturally occurring amino acid
  misc_feature (419)..(419): Xaa can be any naturally occurring amino acid
  unsure (1)..(424): unsure at all Xaa locations
MQIFVKTLTGKTITLEVESSDTIDNVKAKIQDKEGIPPDQQRLIFAGKQLEDGRTLADYNIQKESTLHLVLRLRGGMQIFVKTLTGKTITLEVESSDTIDNVKAKIQDKEGIPPDQQRLIFAGKQLEDGRTLADYNIQKESTLHLVLRLRGGMQIFVKTLTGKTITLEVESSDTIDNVKAKIQDKEGIPPDQXQRLIFAGKQLEDGXRTLADYNIQKESTLHLVLRLRGGMQIFVKTLTGKTITLEXVESSDTIDNVKAKIQDKEGIPPDQQRLIFAGKQLEDGRTLADYNIQKESTLHLXVLRLRGGMQIFXVRPSLGKTITLXGLILRTPLDNVKAKIQGQGGIPPGQQRLIFXAGKHXEDGXTLADYNTKKXXTFTWVLKSRGGMXILWKTSRQDITLRSNLGHIDNVKVSQDKEXSSDNR

SEQ ID NO: 24056 - protein, 531 aa, Shewanella sp. MR-4
MSADQQTVTPLENFSPKVAQRAVHRVQPELNFWQIFNMCFGFLGIQFGFALQNANVSRIFQTLGASIDDIPILWIAAPLTGLLVQPIIGYLSDNTWGRLGRRRPYFLIGAICTTLAIFVMPHSPTLWIAAGMLWIMDASINIAMEPFRAFVGDNLPPKQRTQGYAMQSFFIGIGAVVASALPYILSNFFAVANTAPAGEIADSVRYAFYFGGAVLFLSVAWTVVSTKEYSPDELAAFHGNADAGIDEQQNRTRTHKNYQSAAIVWMAVGALLTLAVWTQDLDKQLYILTLGIFAFGPLQLYCALRLGKSSPSQRAQLGIVFNVVDDLFHMPKAMHQLAIVQFFSWFALFAMWIYTTSAVTSYHFGSSDVLSKAYNDGADWVGVLFASYNGFSAIAALFIPLLAKRIGIKLTHTFNMFCGGFGLISFYFIKDPSLLWLPMIGVGIAWASILSVPYAMLSGALPPKKMGVYMGIFNFFIVIPQLLAASVLGLILNGLFDGQPIYALITGGVLMLCAGIAVLFVEQPNTQHTQA

SEQ ID NO: 24057 - protein, 148 aa, Agaricus bisporus
ADQLSEEQISEFKEAFSLFDKDGDGTITTKELGTVMRSLGQNPSQAELEDMINEVDADGNGTIDFPEFLTMMARKMRDTDSEEEIKEAFKVFDKDGNGYISAAELRHVMTNLGEKLTDSEVDEMIREADVDGDGQINYEEFVKMMLSK

SEQ ID NO: 24058 - protein, 429 aa, Staphylococcus aureus subsp. aureus Mu50
MNFSESERLQQLSNEYILGGVNSPSRSYKAVGGGAPVVMKEGHGAYLYDVDGNKFIDYLQAYGPIIAGHAHPHITKAIQEQAAKGVLFGTPTELEIEFSKKLRDAIPSLEKIRFVNSGTEAVMTTIRVARAYTKRNKIIKFAGSYHGHSDLVLVAAGSGPSQLGSPDSAGVPESVAREVITVPFNDINAYKEAIEFWGDEIAAVLVEPIVGNFGMVMPQPGFLEEVNEISHNNGTLVIYDEVITAFRFHYGAAQDLLGVIPDLTAFGKIVGGGLPIGGYGGRQDIMEQVAPLGPAYQAGTMAGNPLSMKAGIALLEVLEQDGVYEKLDSLGQQLEEGLLKLIEKHNITATINRIYGSLTLYFTDEKVTHYDQVEHSDGEAFGKFFKLMLNQGINLAPSKFEAWFLTTEHTEEDIQQTLKAADYAFSQMK

SEQ ID NO: 24059 - protein, 250 aa, Yersinia pseudotuberculosis IP 32953
MAVTKLVLVRHGESQWNNENRFTGWYDVDLSEKGRSEAKAAGKLLKDEGFTFDFAYTSVLKRAIHTLWNILDELDQAWLPTEKTWKLNERHYGALQGLNKSETAEKYGDEQVKQWRRGFAITPPALEKSDERFPGHDPRYAKLTDAELPTTESLALTIERVIPYWNDVIKPRIASGERVIIAAHGNSLRALVKYLDDLGEDEILELNIPTGVPLVYEFDENFKPIKHYYLGNADEIAAKAAAVANQGKAK

SEQ ID NO: 24060 - protein, 186 aa, Brassica napus
MRSKDKISYFYDGDVGSVYFGPNHPMKPHRLCMTHHLILAYGLHSKMEVYRPHKAYPIEMAQFHSPDYVEFLQRINPENKDLFPNEMARYNLGEDCPVFEDMFEFCQIYAGATIDAARRLNNKLCDIAINWAGGLHHAKKCDASGFCYINDLGLGFLGLGKHHAGGLDSGVGGGVGGAGGTGLLLC

SEQ ID NO: 24061 - protein, 491 aa, Debaryomyces hansenii CBS767
MSKPEAKDLSHLLSEEAKSRKNSPLKAAFKYYKQPGMTFLGGGLPLSDCFPFNKVTADIPSVPFSEGISAPLSDENKTVVEVYKRAEMNKTEDKQIELARSLQYGHTEGQAEIIDFLKEHTEKIHNVPYKDWDLIASVGNTQSWDATLRSFVTRGDSILVEEYSFSSALETAHAQGVNTIPVPMDAKGILPEALEKQLDQWVGPKPKLLYTICTGQNPTGSCLSAERRRAIYKLACKHDFIIIEDEPYYFLQMEDYTTDEKSRASNKVDSHDEFVKALVPSYISMDVEGRVIRLDSFSKVLAPGLRFGWIVGQAKLLERYVRIHEVSIQCPSGFTQSICNSLLQKWGQKGYLDWLMGLRADYTHKRDVAIDAVNKYFPKEVVSFIPPVAGMFFTTTIDASKHPKFKSEFNEDPLQVENAVYEQALKQGCLMIPGSWFKADGKSNPPQPELPENPASKNTFFFRGTYAAVPLDQLVIGLEKFGKAIKVEYGL

SEQ ID NO: 24062 - protein, 328 aa, Zea mays
MDQAAEESCVPPGFRFHPTEEELVGYYLARKVASQRIDLDIIQEVDLYRIEPWDLQERCKPQHAGGGHDEQTQEWYFFSYKDRKYPSGTRTNRATAAGFWKATGRDKPVLSSSTRTTRCSRVIGMRKTLVFYKGRAPNGRKSDWIMHEYRLQSNEHAPAQASSFILPCEEGWVVCRAFQKPIPNQRPFFPTSYAGYYDHNLSTTARLHVDGDRHFLAGSSAAAAALLQQPPGLAGSSFPQLYSDDDLESKKQLLSIPPLESPTAMACCSDAGGYAQRSSYDEHEMMMMMIQQGGGGGEQAAAAIDWNFLDSLLSATSQLHGPSGSLLQ

SEQ ID NO: 24063 - protein, 338 aa, Yersinia pseudotuberculosis IP 32953
MYVLVTGGSGYIGSHTCVQLIEAGYKPVILDNLCNSKSSVLARIHSLTGYTPELYTGDIRDRTLLDSIFAAHPIHAVIHFAGLKAVGESVNRPLEYYNNNVFGTLVLLEAMRAAQVKNLIFSSSATVYGDQPQIPYVESFPTGSPSSPYGRSKLMVEQILQDVQLADPQWNMTILRYFNPVGAHPSGLMGEDPQGIPNNLMPFIAQVAVGRRESLAIFGNDYPTPDGTGVRDYIHVVDLADGHVAAMKTLHGKPGVHIFNLGAGVGHSVLQVVAAFSKACGKPLAYHFAPRREGDLPAYWADATKAAEQLGWRVSRSLDEMAADTWHWQSKNPQGYPD

SEQ ID NO: 24064 - protein, 548 aa, Escherichia coli
MAAKDVKFGNDARVKMLRGVNVLADAVKVTLGPKGRNVVLDKSFGAPTITKDGVSVAREIELEDKFENMGAQMVKEVASKANDAAGDGTTTATVLAQAIITEGLKAVAAGMNPMDLKRGIDKAVTVAVEELKALSVPCSDSKAIAQVGTISANSDETVGKLIAEAMDKVGKEGVITVEDGTGLQDELDVVEGMQFDRGYLSPYFINKPETGAVELESPFILLADKKISNIREMLPVLEAVAKAGKPLLIIAEDVEGEALATLVVNTMRGIVKVAAVKAPGFGDRRKAMLQDIATLTGGTVISEEIGMELEKATLEDLGQAKRVVINKDTTTIIDGVGEEAAIQGRVAQIRQQIEEATSDYDREKLQERVAKLAGGVAVIKVGAATEVEMKEKKARVEDALHATRAAVEEGVVAGGGVALIRVASKLADLRGQNEDQNVGIKVALRAMEAPLRQIVLNCGEEPSVVANTVKGGDGNYGYNAATEEYGNMIDMGILDPTKVTRSALQYAASVAGLMITTECMVTDLPKNDAADLGAAGGMGGMGGMGGMM

SEQ ID NO: 24065 - protein, 539 aa, Bacillus sp. MS
MAKEIKFSEEARRAMLRGVDKLADAVKVTLGPKGRNVVLEKKFGSPLITNDGVTIAKEIELEDPFENMGAKLVAEVASKTNDVAGDGTTTATVLAQAMIREGLKNVTAGANPMGIRKGIEKAVAVAVEELKAISKPIKGKESIAQVAAISAADEEVGQLIAEAMERVGNDGVITLEESKGFTTELDVVEGMQFDRGYVSPYMITDTEKMEAVLENPYILITDKKISNIQDILPILEQVVQQGKPLLIIAEDIEGEALATLVVNKLRGTFTAVAVKAPGFGDRRKAMLEDIAILTGGEVISEELGRELKSATIASLGRASKVVVTKENTTIVDGAGDSERIKARINQIRAQLEETTSEFDREKLQERLAKLAGGVRVIKVGAATETELKERKLRIEDALNSTRAAVEEGIVAGGGTALMNVYNKVAAIEAEGDEATGVKIVLRAIEEPVRQIAQNAGLEGSVIVERLKTEKPGIGFNAATGEWVDMIEAGIVDPTKVTRSALQNAASVAAMFLTTEAVVADKPEENKGGNAGMPDMGGMM

SEQ ID NO: 24066 - protein, 275 aa, uncultured bacterium
  misc_feature (32)..(32): Xaa can be any naturally occurring amino acid
  misc_feature (197)..(197): Xaa can be any naturally occurring amino acid
  misc_feature (237)..(237): Xaa can be any naturally occurring amino acid
  misc_feature (241)..(241): Xaa can be any naturally occurring amino acid
  unsure (1)..(275): unsure at all Xaa locations
MSAEQPRLILNSGQSMPQLGLGAYKVNQDIAXQLVQHALEIGYRRIDTAALYDNEAEVGAAVRKSGLAREEVFVTSKIWNDRHGYHEAKEAIQESIDRLNIDYVDMMLIHWPCPKQDKFVETWHAFEEVLETGLVKGIGVSNFNQPHLEKLLQHSNITPAINQVELHPQLAQNGLREFNERHGIRTEAWAPLGRARXMQHPLLVEIABSLGKSVAQVIIRWHLQIGNLVIPKSSNPXRLAXNFDVFDFELSHHNMSIIATLNTETRIATNPDDMN

SEQ ID NO: 24067 - protein, 273 aa, uncultured bacterium
MASPLVTLNDGRLMPQLGLGVYKVNQDIAVQLVQTAIEIGYRRVDTAALYDNEAEVGAAIRKSGLDREEIFVTSKIWNDRHGYHEAKDAIQESVDRLNIGYVDMMLIHWPCPKQDKFVETWHAFEEVLETGLVKSIGVSNFHQHHLEKLLAAANVVPAINQVELHPQLAQNSLRHFNKQHNIKTEAWAPLGRAKFLENPLLVEIAESLGKSVAQVIIRWHLQLQNLVIPKSSNPDRLAENFDVFDFELSQHQMGIIATLNTETRIATNPDDMN

SEQ ID NO: 24068 - protein, 98 aa, Corynebacterium diphtheriae NCTC 13129
MANVNIKPLEDRVLVQISEAETTTASGLVIPDSAKEKPQEGVVVAAGPGRFDGDDRVPMDIKEGDTVVFSKYGGTELKYNGEEYLLLNARDVLAIIEK

SEQ ID NO: 24069 - protein, 161 aa, Shewanella sp. ANA-3
MTSTIYSHSANDIQGNPTALAQYQGKVILIVNTASECGFTPQYKGLEALYQKYKSQGLVVLGFPCNQFGAQEKADEKGIQSFCELNFGVSFPLFSKIEVNGEHTHPLYQYLKKAAPGVLGTERIKWNFTKFLINRQGEVVARFAPTTKPEAISDKIEALLK

SEQ ID NO: 24070 - protein, 407 aa, Anabaena variabilis ATCC 29413
MSSPINNSVLIVDDIPTNIKVLFDILNQAGFRVSVAKNGLSALAKVQETLPNLILLDVMMPGMDGFETCRHLKANPKTKDIPVIFMTALSDTVNKVKGLQIGAVDYITKPIEYEEVLARINVHLELRRTQLKLAQEEKMSSLGQLVAGIAHEINNPVNFIYGNLTHAQNYVGDLLNLLKLYENHTVNPSPEIQAFSKSIELEFIKQDLPHLLSSMQMGTERVEKIVRSLRLFSRLEDPEFQLFNLHEGIDSTLIILSHRLKILPTDSTIHIIKEYGDIPLVECYSGKLNQVFMNLLANAIDALEESVVNRETTDTLTIWIRTTVVDDQKSVLIEITDNGVGIPLEVQQRIFEQFFTTKPLGKGTGLGLAIAHEIIVEKHGGTLQVQSTPGKGTQFLITIPIQQVIRY

SEQ ID NO: 24071 - protein, 211 aa, Campylobacter jejuni RM1221
MENLISGAIKFMQEDFKEHEELFESLKNKQNPHTLFIGCSDSRVIPNLITNTGPGELFVIRNIANIVPPYRIGEDYLATTSAIEYALNSLHIKNIVVCGHSNCGGCNALYYSDEELNKIPNVKKWLTMLDPIKKDVMIFARDDLAMRSWLTEKLNLVNSLQNILTYPGVQEALDEGKIEVHAWYYIIETGEIYEYDFKAKIFTLIQDRKVQ

SEQ ID NO: 24072 - protein, 539 aa, Corynebacterium diphtheriae NCTC 13129
MAKLIAFNQEAREGILKGVDALANAVKVTLGPRGRNVVLQKAFGSPTVTNDGVTIAREIDLSDPFENLGAQLVKSVAVKTNDIAGDGTTTATLLAQAVVTEGLRNVAAGANPIELNRGIAAGSEFVVGKLRERATDVSSAADIANVATVSSRDPEVGDMVAAAMEKVGKDGVVTVEESQSIESYLDVTEGVSFDKGFLSPYFITDTDTQHAVLEQPAILLVRNKISSLPDFLPVLEKALEASKPILIIAEDVEGEPLQTLVVNSIRKTLRAVAVKAPYFGERRKAFMDDLAVVTGATVIDPEVGVNLNEAGAEVFGTARRVTVTKDETIIVDGAGTAEAVENRRAQIRREIENTDSAWDREKAEERLAKLSGGVAVIKVGAATETEVSERKLRVEDAINAARAAAQEGVIAGGGSALVQISKELREFAQEFEGDAKIGVIALANALAKPTYWIADNAGLDGAVVVSKVSELPNGEGFNAATLEYGNLIEQGIIDPVKVTHSAVVNATSVARMVLTTEASVVEKPAAPAPEAGHHHHHHH

SEQ ID NO: 24073 - protein, 275 aa, uncultured bacterium
MSAEQPRLILNSGQSMPQLGLGAYKVNQDITVQLVQHALEIGYRRIDTAAIYDNEAEVGAAVRKSGLAREEVFVTSKIWNDRHGYHEAKEAIQESIDRLNIDYVDMMLIHWPCPKQDKFVETWHAFEEVLETGLVKGIGVSNFNQPHLEKLLQHSNITPAINQVELHPQLAQNGLRELNERHGIRTEAWAPLGRARFMQHPLLIEIAESLGKSVAQVIIRWHLQIGNLVIPKSSNPDRLAENFDVFDFELSHHNMSIIATLNTETRIATNPDDMN

SEQ ID NO: 24074 - protein, 465 aa, Silicibacter sp. TM1040
MASYDVIVIGAGPGGYVSAIRCAQLGLKTAIVEGRETLGGTCLNVGCIPSKALLHATHMLHEAEHNFGAMGLKGKSPSVDWNQMKSYKDEVIGQNTGGVEFLMKKNKIDWIKGWASIPEAGKVKVGDDTHEAKNIIIASGSVPSALPGVEVDNDKGLVVDSTGALELPKVPKKMVVIGAGVIGLELGSVYARLGAEVTVVEYMDAVCPGMDKDVQRGFKRILEKQGLSFIMGAAVKGVETTKSKAKVSYEPKKGGDAEVIEADVVLVATGRKPYAEGLGLDALGVKMTERGQIATDAQWATNVKGIYAIGDVIEGPMLAHKAEDEGMAVAEVIAGKHGHVNYGVIPGVVYTTPEVATVGATEDALKAEGRKIKVGKFMFMGNARAKAVHQAEGGFVKLIADKETDRILGAAIIGPGAGDLIHEICVAMEFGASAEDLALTCHAHPTYSEAVREAALACGDGAIHS

SEQ ID NO: 24075 - protein, 491 aa, Propionibacterium acnes KPA171202
MSARETQSVDTPRRSALARPVKKPPATLDLESPTEERELQRGLTNRHLQLIALGGAIGTGMFMGSSSTIHLAGPSSALVYALIGFFLYFMMRALGEMLLSNLNYKSFRDIAEDLLGPAGGFIAGWTYWFSWIVAAMGDMAAITAYFQYWWPNIPKWLPATALAAVLLALNIIAVQFFGEAEFWFALIKLIAVGALVIVAIALLASRFVSPDGDPATIANLWNDGGFFPNGLMGFLGGFQIAFFAFVGIELVGTAAAETKDPCTTLPKAINAIPVRLALFYVFALLAITAVIPWRKVVPGVSPFVSLFGLAGFGAAASVMNFVLLTAAASSDNSGLYSTSRMMYGLALDGQAPSRFRKLSSNNVPRNALVASCLLLLSGITFLYTSDSIMQAFALVTTVAALLFLFTWSLIVVCYIVYRRKRPQLHEESIYKMPGGVPMCWVVLAFFTISLVILTLDPTTRIAVLITPIWFAFIGSMYFVHHRHEQRKEALR

SEQ ID NO: 24076 - protein, 323 aa, Campylobacter jejuni RM1221
MGKNSLIGGSIWDEYSQKVQDRMNNPQHMGEFSEEDAKARNAKLIVADFGAESCGDAVRLFWLVDEKTDKIIDAKFKSFGCGTAIASSDTMVDLCIGKTVDEAVKITNLDVEFAMRDNPETPAVPPQKMHCSVMAYDVIKQAAAHYKGISPEDFEDQIIVCECARVSLGTIKEVIKLNDLHSVEEITQYTKAGAFCKSCIKPGGHEKRDYYLVDILAETRAEIDREKLKNTMKSDVAFDEMTVVGQLKAVESVLDAEIRPMLHNDGGDLEVIDIQKAEGAAIDVYIRYLGACSGCSSGSGATLYAIETILQEELSPNIRVMPV

SEQ ID NO: 24077 - protein, 504 aa, Propionibacterium acnes KPA171202
MTGFNQIPDRERYPHALASNEHRGLTAQEPESSPSSPHPEAHLHRNLNNRHIQLIAIGGAIGTGLFLGSGKAIRAAGPSIIVSYLIIGTMLYFVVRAMGELLMYNLDYKSFQDFAADLIGPWAGFFLGWTYWLCWIVTGMAELIGITTYWDFWVKNRGTAALLAAATLFLLLCLNLLTVRMFGELEFWFALIKIIAIISLIVLAIVLAVMKFQFPSGSMASVANLWNRGGFMPNGWSGFFAGFQMAAFAFVGIELIGTTAAETRDPEKTLPRAISAVPARILIFYVGALLAIMTAVPWDEVRADSSPFVQVLGLVGFAGAASVMNFVVLTSAASSSNSGIYSISRMLFGLAHKRMAPKVFGGLSKNGVPRWGLVITVLVLSTALLLAASESFVEAFTLVTTISSVLFIFVWSMIVISYMKYRRVAPAAHAASKYPMPGGRGMCWAVLVFFVFVLVLLAQEADTARALALTPIWFVILGVGWFFDRHHATHDDVGTDEAHPKGDS

SEQ ID NO: 24078 - protein, 211 aa, Arabidopsis thaliana
  misc_feature (168)..(168): Xaa can be any naturally occurring amino acid
  unsure (1)..(211): unsure at all Xaa locations
MSDLAKDAWRKYLIQLQAHPLRTKAITAGVLAGCSDAIAQKISGVKRIQFRRLLLLMLYGFAYGGPFGHFFHKLMDTIFKGKKGNSTVAKKVLLEQLTSSPWNNFLFMSYYGLVVEGRPWKLVKHKLGKDYPTIQLTAWKFWPIVGWVNYQYVPLQFRVLSSSFVASXWSIFLGPWKRRSPGDQKRVENSIWRKQEWISFVFLEMYKSFKN

SEQ ID NO: 24079 - protein, 565 aa, Schizosaccharomyces pombe
MPAGTKEQIECPLKGVTLLNSPRYNKDTAFTPEERQKFEISSRLPPIVETLQQQVDRCYDQYKAIGDEPLQKNLYLSQLSVTNQTLFYALISQHLIEMIPIIYTPTEGDAIKQFSDIYRYPEGCYLDIDHNDLSYIKQQLSEFGKSDSVEYIIITDSEGILGIGDQGVGGVLISVAKGHLMTLCAGLDPNRFLPIVLDVGTNNETHRKNHQYMGLRKDRVRGEQYDSFLDNVIKAIREVFPEAFIHFEDFGLANAKRILDHYRPDIACFNDDIQGTGAVALAAIIGALHVTKSPLTEQRIMIFGAGTAGVGIANQIVAGMVTDGLSLDKARGNLFMIDRCGLLLERHAKIATDGQKPFLKKDSDFKEVPSGDINLESAIALVKPTILLGCSGQPGKFTEKAIREMSKHVERPIIFPISNPTTLMEAKPDQIDKWSDGKALIATGSPLPPLNRNGKKYVISQCNNALLYPALGVACVLSRCKLLSDGMLKAASDALATVPRSLFAADEALLPDLNNAREISRHIVFAVLKQAVSEGMSTVDLPKDDAKLKEWIIEREWNPEYKPFV

SEQ ID NO: 24080 - protein, 335 aa, Zea mays
MADASSRTDTSTVLDMDDKNQRLENGQSGAMALASNSSDRSDRSDKPMDQKVLRRLAQNREAARKSRLRKKAYVQQLESSKLKLASLEQELQKARQQGIFISSSGDQTHAMSGNGAMTFDLEYSRWQEEENKQINELRTAVNAHASESDLRLIVDGIMAHYDEIFRLKGIAAKADVFHILSGMWKTPAERCFLWLGGFRSSELLKLLVNQLEPLTEQQLMGLSNLQQSSQQAEDALSQGMEALQQSLAETLAGSLGPSGSSGNVANYMGQMAMAMGKLGTLENFLRQADNLRQQTLHQMQRILTIRQAARALLAIHDYFSRLRALSSLWLARPRE

SEQ ID NO: 24081 - protein, 560 aa, Mannheimia succiniciproducens MBEL55E
MIGYNHFISLLIPTLGFTMATNYIFVTGGVVSSLGKGIAAASLAAILEARGLNVTMMKLDPYINVDPGTMSPTQHGEVFVTQDGAETDLDLGHYERFIRTKMTKRNNFTTGKIYSEVLRKERRGDYLGATVQVIPHITNEIKARVIEGAAGHDVAIVEVGGTVGDIESLPFLEALRQLAVQVGREKTIFMHLTLVPYIPTAGEVKTKPTQHSVKELLSIGIQPDVLICRSDRMVPPNERAKIALFCNVPEKAVISLKDVDSIYRIPALLQSQGLDDLICQRFRLACKEADLSEWEQVLYRQANPTGDVTIGMVGKYVELPDAYKSVNEALKHAGLTNRLNVHIKYIDSQDVETKGIDVLKGVDGILVPGGFGYRGVEGKILTAQYARENNIPYLGICLGMQVAFIEYARHVAGLTQANSSEFDKNCPQPVVGLITEWQDADGSVEQRSENSDLGGTMRLGAQQCHLIEGSKARELYGKETIEERHRHRYEVNNTLLPQIEAAGLKVTGLSADKKLVEIIEVPNHPWFVACQFHPEFTSTPRDGHPLFAGFVKAAKENQKK

SEQ ID NO: 24082 - protein, 323 aa, Enterococcus faecium
MQEKIDITVFGCERDEAAVFRKLSSEYGVTVSLIEDVVSEHNAKLADGCQCVSVSHKAELSEQLLLALKHAGVKYISTRSIGFNHIDIQAAGQLGMAVGTVAYSPGSVADYTVMLMLMLLRGTKSVLRGTQKQNYCLNDCRGKELQDLTVGVLGTGRIGQAVMERLEGIGCKVLAYDRTHKAGANYVSFCELLKSSDIVTLHVPLAEDTRHMIGREQLEMMKREALLINTARGALVDTAALVAALKEQKIGGAALDVLEGEEGIFYHECTQKTIGHPYLSVLQKMPNVIVTPHTAYHTDRVLVDTVSNTIRNCLNFERSLGNV

SEQ ID NO: 24083 - protein, 159 aa, Zea mays
  misc_feature (110)..(110): Xaa can be any naturally occurring amino acid
  misc_feature (137)..(137): Xaa can be any naturally occurring amino acid
  unsure (1)..(159): unsure at all Xaa locations
MEKIGGISSGGTGSSGEAEVRKGPWTMEEDLILINYIANHGDGVWNSLAKSAGLKRTGKSCRLRWLNYLRPDVRRGNITPEEQLTIMELHAKWGNRWSKIAKHLPGRTDXEIKNFWRTRIQKYIKQTDVTATTTGAXGSHHSSGINDQVASTSNHNVFC

SEQ ID NO: 24084 - protein, 571 aa, Porphyridium purpureum
MVQIYNGGAGFERALSRGKSKDGKPKATAAATAAPAASSSAAPARAAPARAAPAAAAPVSKPTAEKPAVAQDATLVKLAAGMGVMSDLEKKFIELEAKLVAQPAGQAMPGKSNIFANNEAWRQEMLKQDPEFFNRLANGQSPEYLWIGCADSRVPANQLLDLPAGEVFVHRNIANQCIHSDISFLSVLQYAVQYLKVKHILVCGHYGCGGAKAALGDSRLGLIDNWLRHIRDVRRMNAKYLDKCKDGDEELNRLIELNVLEQVHNVCATSIVQDAWDAGQELTVQGVVYGVGDGKLRDLGVVVNSSDDISKFYRTKSDSGALKAGNPNAPLVQVTKGGESELDSTMEKLTAELVQQTPGKLKEGANRVFVNNENWRQKMLKQDPQFFSNLAHTQTPEILWIGCADSRVPANQIINLPAGEVFVHRNIANQCIHSDMSFLSVLQYAVQYLKVKRVVVCGHYACGGCAAALGDSRLGLIDNWLRHIRDVRRHNQAELSRITDPKDSLNRLIEINVLEQMHNVCATSIVQDAWDAGQELEVQGVVYGVGDGKLRDMGVVAKANDDIGQIFRTKQ

SEQ ID NO: 24085 - protein, 571 aa, Porphyridium purpureum
MVQIYNGGAGFERALSRGKSKDGKPKATATATAAPAASSSAAPARAAPAKAAPAAAAPVSKPTAEKPAVAQDATLVKLAAGMGVMSDLEKKFIELEAKLVAQPAGQAVPGKSNIFANNEAWRQEMLKQDPEFFNRLANGQSPEYLWIGCADSRVPANQLLDLPAGEVFVHRNIANQCIHSDISFLSVLQYAVQYLKVKHILVCGHYGCGGAKAALGDSRLGLIDNWLRHIRDVRRMNAKYLDKCKDGDEELNRLIELNVLEQVHNVCATSIVQDAWDAGQELTVQGVVYGVGDGKLRDLGVVVNSSDDISKFYRTKSDSGALKAGNPNAPLVQVTKGGESELDSTMEKLTAELVQQTPGKLKEGANRVFVNNENWRQKMLKQDPQFFSKLAHTQTPEILWIGCADSRVPANQIINLPAGEVFVHRNIANQCIHSDMSFLSVLQYAVQYLKVKRVVVCGHYACGGCAAALGDSRLGLIDNWLRHIRDVRRHNQAELSRITDPKDSLNRLIEINVLEQMHNVCATSIVQDAWDAGQELEVQGVVYGVGDGKLRDMGVVAKANDDIGQIFRTKQ

SEQ ID NO: 24086 - protein, 474 aa, Emericella nidulans
MASTLRLSTSALRSSTLAGKPVVQSVAFNGLRCYSTGKTKSLKETFADKLPGELEKVKKLRKEHGNKVIGELTLDQAYGGARGVKCLVWEGSVLDSEEGIRFRGLTIPECQKLLPKAPGGEEPLPEGLFWLLLTGEVPSEQQVRDLSAEWAARSDLPKFIEELIDRVPSTLHPMAQFSLAVTALEHESAFAKATAKGINKKEYWHYTFEDSMDLIAKLPTIAAKIYRNVFKDGKVAPIQKDKDYSYNLANQLGFADNKDFVELMRLYLTIHSDHEGGNVSAHTTHLVGSALSSPMLSLAAGLNGLAGPLHGLANQEVLNWLTEMKKVVGNDLSDQSIKDYLWSTLNAGRVVPGYGHAVLRKTDPRYTSQREFALRKLPDDPMFKLVSQVYKIAPGVLTEHGKTKNPYPNVDAHSGVLLQYYGLTEANYYTVLFGVSRALGVLPQLIIDRAFGAPIERPKSFSTEAYAKLVGAKL

SEQ ID NO: 24087 - protein, 353 aa, Candida albicans SC5314
MTVKSKFTHLTKEEPDPIIKTLTQYHQDQSPNKLDVSIGVYKSPDGLLYTFPSIIEAKEIYHNEKNYGHNYTTMSGIKEFINGSQQLLFGKDVITSDGEKKIASIQTIAGTGAIHMGLLFFMEAGYKNFYLGLPSWSNYIPMIETVGGKVNTYEYYNTANGEINFDTVKKTLIEAPKNSVFIFQTCCHNPTGADFNNDQWIEVVKLIKQYDHLVLMDTAYLGFSSGDLIKDSWILRYMYEEAEIEFVVAQSFSKNMGLYGERLGAVHVIVQDENYVDHAQSTLVANFRHECSFAPSFGARLAQIIFENDKLYQQWTKEVNQVTQRLQNLRQLVYQTLIKLETPGNWKTVINKK

SEQ ID NO: 24088 - protein, 170 aa, Triticum aestivum
  misc_feature (45)..(45): Xaa can be any naturally occurring amino acid
  misc_feature (47)..(47): Xaa can be any naturally occurring amino acid
  misc_feature (55)..(55): Xaa can be any naturally occurring amino acid
  misc_feature (83)..(83): Xaa can be any naturally occurring amino acid
  misc_feature (86)..(86): Xaa can be any naturally occurring amino acid
  misc_feature (89)..(89): Xaa can be any naturally occurring amino acid
  unsure (1)..(170): unsure at all Xaa locations
KAGWGSKLGKDRSKLGARYRGTHVDERVEIQSGHQKQISSLSKSXIXSHFLTGSXDKSAKLWDARTLTLIKTYVTERPVNAVXISXTLXHVVFGGGQDAMNVTMTDRRAGKFEATFFHKILEEEIGGVKGHFGPINALAFNPDGRSFSSGGEDGYVRPRHFDPEYFNIKM

SEQ ID NO: 24089 - protein, 245 aa, uncultured gamma proteobacterium
MVYWQGESVMSMSKKLGAEFIGTFWLVLGGCGSAVLAAAFPEVGIGLLGVSLAFGLTVLTMAFAIGHISGCHLNPAVSVGLMLGGRFSSTELLPYVTAQVLGGIAGAAVLYVIATGQPGFEITEGFEKAIFASNGYGAHSPGGYSLTAALVTEVVMTFMFLIIILGATDKRAPAGLAPIAIGLGLTLIHLISIPVTNTSVNPARSTGVALFEGGWAISQLWLFWVAPIVGAALAGLVYNWLGSED

SEQ ID NO: 24090 - protein, 403 aa, Glycine max
EKGRESIYKTEVREASNCPRVRKRKEDRVSNLPDEVLHRILSTLDAKSAVQTCVLSKRWRHVWTSLPVLNFLDSSFDDFLHFQCFVDHFLSRRDASSNISVLNFACTDHELDDGHTHIVDSIIDHVTLTPPITIQGLYIVAECIVGKLPQLSICQSLTTLKLAHISTETTTFDFLSLTHLHLFDCRFECGLEELLDPFRDCLNLKHLYLHRCQYYGGFQRFKIFAPKLTLLSIALMRVDEMFDSDCTIQLFTPKLQSFTYCDFDLYDFSIEGDLPFIEEVDIDMGCLAKDTYSLLQLIELFQVMGNAQFVSLSPDIIDVLATFPDLLDGRSSPFTRVRTFVLNMDTPSSSFVIPPNVMAYLFSGSRGLDFLISMNGKVWKKVYKTSFQNEKCNTITIFLPKFL

SEQ ID NO: 24091 - protein, 426 aa, Yersinia pseudotuberculosis IP 32953
MTPSDLVFDQQHIWHPYTSMTEPLPCYPVVGAEGVELQLADGRRLIDGMSSWWAAIHGYNHPVLNFAAHQQLDKMSHVMFGGITHPPAVKLCRQLVAMTPPPLECVFLADSGSVSVEVALKMALQYWQAKGEQRQRILTLRHGYHGDTFGAMSVCDPQNSMHSLYQGYLAENLFANAPQCGFDDPWDPQDIANFVALITQHANEIAAVILEPVVQGAGGMRIYHPSYLREVRALCDKHQILLIADEIATGFGRTGKLFACEHAQIVPDILCLGKALTGGYLTLSATLTTRAVAETISKGDAGCFMHGPTFMANPLACAVASANLSLLAENSWQQQVSKIEDQLKRELLPLAQEDTVADVRVLGAIGVVEMKKPVNVARLQRSFVEQGVWIRPFGKLIYLMPPYIISQHALTRLTAAVAAAVVDRGS

SEQ ID NO: 24092 - protein, 636 aa, Aspergillus oryzae
MESLLQQSRAMCPFLKRTSPSSLRTLATATRPSTSSGGGTMSNLQVIARRCPVMSKALAVQSARMAGTKRFTSCAAGITGLGNKHCRAPTGKRTLHSTSGNGANVSAEIYKNTQRDPAGFSKIKTPANATAAAATSGPRPEAPVAKPFNYNSFYNTELEKKHKDKSYRYFNNINRLAQEFPRAHTTSAEERVTVWCSNDYLGMGRNPEVLATMHKTLDTYGAGAGGTRNISGHNQHAVSLENTLAKLHGKEAALVFSSCFVANDATLATLGSKLPDCVILSDSLNHASMIQGIRHSGAKKMVFKHNDLVDLEAKLAALPLHVPKIIAFESVYSMCGSIAPIEKICDLADKYGAITFLDEVHAVGMYGPHGAGVAEHLDYDIYASQDTVNPRSTKGTVMDRIDIITGTLGKAYGCVGGYIAGSAAMVDTIRSLAPGFIFTTSLPPATMAGADTAIQYQARHQGDRVLQQLHTRAVKAAFKELDIPVIPNPSHIIPLLVGDAEVAKKASDKLLEEHGIYVQAINYPTVPRGEERLRITPTPGHIKEHRDHLVQAVQTVWNELGIKRTSDWEAQGGFVGVGVDGAEAENQPIWNDVQLGLKENEAIEAAVEREFAEAPMRTATRPAAAAASSIPVGVAA

SEQ ID NO: 24093 - protein, 383 aa, Yersinia pseudotuberculosis IP 32953
MSWQDKIAQGLQRRRDAAAYRTRQVNEGANGRWLQSGERQYLNFSSNDYLGLSQNDEVIAAWQQGARRYGVGSGGSGHVTGYSQPHARLEQQLADWLGYPRALLFISGYAANQAVLTALTDADDRILADKLSHASLLEAAAHSPAQLRRFQHNQPEALQNLLIKPCQGQTLVVTEGVFSMDGDSAPLAALQQQTSAAGGWLLVDDAHGIGVHGEEGRGSCWLQGVQPELLVVTFGKAFGLSGAAVLCQEPVAEYLLQYARHLIYSTAMPPAQACALQAALRQVQQGDALRQQLQQRIRQFRTAAAHLPLQLGASKTAIQPLLVGDNQQSLIWAEQLRAAGLWVTAIRPPTVPPGSARLRITLSAAHQPEDIDRLLEVLYGLCH

SEQ ID NO: 24094 - protein, 323 aa, uncultured gamma proteobacterium
MVQAVRISRTGGPEVMALEEVQLEPPGPGMVTVANRAIGLNYIDTYHRSGLYPLPLPTGIGLEGAGEIQAVGEGVTLREGDRVAYCSAGFGAYAQALNLPAARLVKIPEDISFEQAAAVLLKGQTTEYLLQRTYPLQPGETCLFHAAAGGVGLLFGQWAKSIGANVIGTVGSDEKARLALAHGFAHVINYRTEDVVQRVLEITGGEKVPVVYDGVGRDTFDISLDCLRPRGLMVSFGNASGAPDPLNLQILANKGSLFLTRPTMLTYTATEEELQQSSRDVFSRVLSGDVKIEINQRYPLADVQQAHRDLESRKTSGSTVLLP

SEQ ID NO: 24095 - protein, 273 aa, uncultured bacterium
MASPLVTLNDGRLMPQLGLGVYKVNQDIAVQLVQTAIEIGYRRVDTAALYDNEAEVGAAIRKSGLEREEIFVTSKIWNDRHGYHEAKEAIQESVDRLNIGYVDMMLIHWPCPKQDKFVETWHAFEEVLETGLVKSIGVSNFHQHHLEKLLAAATVVPAINQVELHPQLAQNSLRHFNKQHNIKTEAWAPLGRAKFLENPLLVEIAESLGKSVAQVIIRWHLQLQNLVIPKSSNPDRLAENFDVFDFELSQHQMGIIATLNTETRIATNPDDMN

SEQ ID NO: 24096 - protein, 443 aa, Glycine max
IGYRAPPRVSYVGPPPDSLLLFPLLCSRHFASTTAQNPSTLNALQDHYQAIDFPGGAVQFIPEMRFISESPKERIPCYRVLDDNGQPILGHNFVQVSKEVAVKMYTDMVTLRSMDTIFYEAQRQGRISFYVTAIGEEAINVASAAALAMDDVVFPQYREAGVLLWRGFTLQEFANQLFSNIYDYGKGRQMPAHYGSKKHNYFTVASTIATQISHAVGAAYSLKMDKKDACAVTYFGDGGSSEGDFHAALNFAAVLEAPVIFICRNNGWAISTPISDQFRSDGVVVKGQAYGVRSIRVDGNDALAIYSAIQAARQMAITEERPILIEALTYRVGHHTTSDDSTKYRPANEIEWWRVARDPVVRFRKWIEKHGWWNDMAESELINNLRQQLLHTIQEAEGVEKPPLADSFSDVYDVAPSNLREQEQWLKEIVRKQPQEYPTNISV

SEQ ID NO: 24097 - protein, 308 aa, Triticum aestivum
  misc_feature (131)..(131): Xaa can be any naturally occurring amino acid
  misc_feature (161)..(161): Xaa can be any naturally occurring amino acid
  misc_feature (175)..(175): Xaa can be any naturally occurring amino acid
  unsure (1)..(308): unsure at all Xaa locations
MQIFVKTLTGKTITLEVESSDTIDNVKAKIQDKEGIPPDQQRLIFAGKQLEDGRTLADYNIQKESTLHLVLRLRGGMQIFVKTLTGKTITLEVESSDTIDNVKAKIQDKEGIPPDQQRLIFAGKQLEDGRXTLADYNIQKESTLHLVLRLRGGMQIFVKTXLTGKTITLEVESSXDTIDNVKAKIQDKEGIPPDQQRLIFAGKQLEDGRTLADYNIQKESTLHLVLRLRGGMQIFVKTLTGKTITLEVESSDTIDNVKAKIQDKEGIPPDQQRLIFAGKQLEDGRTLADYNIQKESTLHLVLRLRGGQ

SEQ ID NO: 24098 - protein, 308 aa, Thermosynechococcus elongatus BP-1
MLILDTLERGHRDLVESVLKTELIVGDIGDRPLLDWLFQTYPVTAVMHFAAYIEVGESIHSPDRFYQNNVHGALTLLQAMVAAKIPYFIFSSTAAVYGVPPEIPISETCPCAPINPYGRSKWMVEQMVADMGTAYGLKSVIFRYFNAAGADPHSRLGEDHRPETHLIPLVLQAAMGRRPHIAIYGTDYPTPDGTCIRDYIHVVDLAQAHVRGLKYLLSGGNSQIFNLGNAQGFSVRQIIETAQRVTGCSIPVIEGDRRAGDPAILVANSDRARCLLGWQPQYPDIEQIIHHAWQWHQRRHRGNHIIMS

SEQ ID NO: 24099 - protein, 159 aa, Caulobacter crescentus CB15
MTDAATLSTAGFDLTPPTEAERERLEANLTAEEARVLLHHGTEAPFCGGLLGEKSPGVYGCRLCGLPLFKHETKFESGTGWPSFYAPFAEDHVVGVRDTSYGMVRIETRCARCDSHQGHVFPDGPAPTRLRYCINSVSLQFVKAGAPLPDPLHRGDKIT

SEQ ID NO: 24100 - protein, 1064 aa, Shewanella sp. ANA-3
MEAITMFKASEVLAGRYDSANLDELFKAVTDNYIVDEEQYLSELIKLVPSSDEAIERVTRRAHELVNKVRQFDKKGLMVGIDAFLQQYSLETQEGIILMCLAEALLRIPDAATADALIEDKLSGAKWDEHLSKSDSVLVNASTWGLMLTGKIVKLDKKIDGTPSNLLSRLVNRLGEPVIRQAMMAAMKIMGKQFVLGRTMKEALKNSEDKRKLGYTHSYDMLGEAALTRKDAEKYFNDYANAITELGAQSYNENESPRPTISIKLSALHPRYEVANEDRVLTELYDTVIRLIKLARGLNIGISIDAEEVDRLELSLKLFQKLFNADATKGWGLLGIVVQAYSKRALPVLVWLTRLAKEQGDEIPVRLVKGAYWDSELKWAQQAGEAAYPLYTRKAGTDVSYLACARYLLSDATRGAIYPQFASHNAQTVAAISDMAGDRNHEFQRLHGMGQELYDTILSEAGAKAVRIYAPIGAHKDLLPYLVRRLLENGANTSFVHKLVDPKTPIESLVVHPLKTLTGYKTLANNKIVLPTDIFGSDRKNSKGLNMNIISEAEPFFAALDKFKSTQWQAGPLVNGQTLTGEHKTVVSPFDTTQTVGQVAFADKAAIEQAVASADAAFATWTRTPVEVRASALQKLADLLEENREELIALCTREAGKSIQDGIDEVREAVDFCRYYAVQAKKLMSKPELLPGPTGELNELFLQGRGVFVCISPWNFPLAIFLGQVSAALAAGNTVVAKPAEQTSIIGYRAVQLAHQAGIPTDVLQYLPGTGATVGNALTADERIGGVCFTGSTGTAKLINRTLANREGAIIPLIAETGGQNAMVVDSTSQPEQVVNDVVSSSFTSAGQRCSALRVLFLQEDIADRVIDVLQGAMDELVIGNPSSVKTDVGPVIDATAKANLDAHIDHIKQVGKLIKQMSLPAGTENGHFVSPTAVEIDSIKVLEKEHFGPILHVIRYKASELAHVIDEINSTGFGLTLGIHSRNEGHALEVADKVNVGNVYINRNQIGAVVGVQPFGGQGLSGTGPKAGGPHYLTRFVTEKTRTNNITAIGGNATLLSLGDSDA

SEQ ID NO: 24101 - protein, 591 aa, Schizosaccharomyces pombe
MKRSSSVSVEDEKSARRKLDVVPKLHFVGCSHLTDYHLMEKLGEGTFGEVYKSQRRKDGKVYALKRILMHTEKEGFPITAIREIKILKSIKHENIIPLSDMTVVRADKKHRRRGSIYMVTPYMDHDLSGLLENPSVKFTEPQIKCYMKQLFAGTKYLHDQLILHRDLKAANLLIDNHGILKIADFGLARVITEESYANKNPGLPPPNRREYTGCVVTRWYRSPELLLGERRYTTAIDMWSVGCIMAEMYKGRPILQGSSDLDQLDKIFRLCGSPTQATMPNWEKLPGCEGVRSFPSHPRTLETAFFTFGKEMTSLCGAILTLNPDERLSASMALEHEYFTTPPYPANPSELQSYSASHEYDKRRKREQRDANSHAFEQTANGKRQFRFMTRGPSDPWYGIRRPNYNSQPQYQRGSYNREGGNMDRSRNVNYQPKRQQNFKPLTSDLPQKNSEFSETNAMNQTSNHSHADGQRYYRPEQDRSQRLRNPSDYGRQGRQSSQSQQPAWNVSSRYQNNSKVQTTSRASENADTNKTQHNIKYIDSYVPEYSIARQSANQKTNEQHPSSTSLHQQSTSDLKSPSFHENSNVDDTPK

SEQ ID NO: 24102 - protein, 409 aa, Frankia sp. EAN1pec
MPRNLGRSREGSDEIPPMSPTVLPREAQVDEVKDLITRGKEIGFLTTEDVTVAIQAAELPPEQAETVLQVLNDEGIEVLEAGGENADEADLLARRRREEEELALKAPTSDPVRMYLKEIGKVPLLTAEEEVDLAKRIEAGLFASEKLAVATKKTSPQMRRDLEAIERDGQIAKRKLVEANLRLVVSIAKRYVGRGMLFLDLIQEGNLGLIRAVEKFDYTKGYKFSTYATWWIRQAITRAIADQARTIRIPVHMVETINKLIRIQRQLLQDLGREPSPEEIAKEMDLTPDKVREILKVSQEPVSLETPIGEEEDSHLGDFIEDCDAVVPVDAASFILLQEQLDSVLHTLSDREKKVIQLRFGLTDGHPRTLEEVGREFGVTRERIRQIESKTLSKLRHPSRSQKLRDYLE

SEQ ID NO: 24103 - protein, 574 aa, Schizosaccharomyces pombe
MLSKFYEDIDSKLENAMLSQIESSTITCDGKSLNTLPTPKQEDVEFGVPLQPEDTQDLQRKLKPRHMQMIAIGGCVGTGLFVGSGNALADGGPASILIAFAVIGTYVLFTTSALAELSAIYPVSGSFYTYFSKFIDPAWGFAVGIQYWLSFAVTVPLELTVAPLIINFWNASGPVSIWISVFYVIIIAINIWGTEGYGEVEFFLSIMKVISVIGFVILSIIIAAGGVPTDDRGVIGVSYWKQPLVFNNGFKGLCAVSVIAIFSLSGTELVGLAASEAKNPQKTVPAAVKQIFWRIFLFYIVALFMLTLVVPSDLPGLRTSDNSNVLISPFVIAIQLANIRALPSIMNVVILLSTLSVGNSASYAASRALFALAKNGYAPKIFNKTNKRGHPIYAIAVTLLFGSIAYFTEAGVGGALFGWLLSICGLSTTFIWGSICLAHIQFRRAWKIQNRKLEDLPYRSIFGVYGSIYGVAMTILALIAQFYVAVFPIGKKPNPVDFFQAYMAAPILIISFVAWKFFRRTSFVRIEKIDLSEGAHGEQKQNLEPVINIPVEEIDFPMKVATKESMKNVEKNAL

SEQ ID NO: 24104 - protein, 347 aa, uncultured gamma proteobacterium eBACHOT4E07
MNIFYDDDANIEIIQKLKVSIVGYGSQGHAHANNLSDSGVDVTVALREGSSSWEKADEAGLKVMPVDEATKDADLVMILAPDEFQKGIYEKSIKPNLKNDAILGFAHGFNIHFKKIIPDETNSVIMIAPKGPGHTVRSTYLKGGGVPSLIAIYQDSTNTSDFSAKEVALSYAKANGGTRAGVLETTFKEETETDLFGEQAVLCGGMTALIKAGYETLVEAGYSPEMAYFECLHETKLITDLIQEGGIANMHYSISNTAEYGDYLSGPKIITEKTKEAMKEVLDNIQSGNFADEFLDDCRQSNDGSGGPFMKSKRESTKNHPIEKVGKELRSKMKFLNSEKLVDKEKN

SEQ ID NO: 24105 - protein, 378 aa, Polaromonas sp. JS666
MQEKTGSPVLRNARRIVVKVGSSLVTNEGRGLDADAIGLWCEQLAALVKDGREVIMVSSGAIAEGMKRLGWTARPKAIHELQAAAAVGQMGLAQVYESKLRENGIGSAQVLLTHADLADRERYLNARSTLLALLQLGVVPVINENDTVVNDEIKFGDNDTLGALVANLVEADALVILTDQKGLYTADPRKDPAARFVHEAKAGDAALEAMAGGAGSSIGKGGMITKILAAKRAAGSGASTVIAWGREPQALIRLTQGEAIGTLLVAQTQKIQARKQWMADHLQMRGSVAVDAGAVSKVRDEGKSLLPIGMTRVDGDFSRGDVIAIRDAEGAEIARGLANYSSSEARLICRKASSEFERLLGYTGEPEMVHRTNLVLTR

SEQ ID NO: 24106 - protein, 183 aa, Populus trichocarpa
ADEGQFLNMLLKLVNAKNTMEIGVYTGYSLLATALAIPEDGKILAMDINRENYELGLPVIQKAGVAHKIDFKEGPALPVLDQMIEDGKCHGSFDFIFVDADKDNYINYHKRLIELVKVGGLIGYDNTLWNGSVVAPPDAPMRKYVRYYRDFVLELNKALAADPRIEICMLPVGDGITLCRRIQ

SEQ ID NO: 24107 - protein, 542 aa, Mycobacterium tuberculosis H37Rv
MAGLLRVHGEWSRSVDTRVDTDNAMPARFSAQIQNEDEVTSDQGNNGGPNGGGRLAPRPVFRPPVDPASRQAFGRPSGVQGSFVAERVRPQKYQDQSDFTPNDQLADPVLQEAFGRPFAGAESLQRHPIDAGALAAEKDGAGPDEPDDPWRDPAAAAALGTPALAAPAPHGALAGSGKLGVRDVLFGGKVSYLALGILVAIALVIGGIGGVIGRKTAEVVDAFTTSKVTLSTTGNAQEPAGRFTKVAAAVADSVVTIESVSDQEGMQGSGVIVDGRGYIVTNNHVISEAANNPSQFKTTVVFNDGKEVPANLVGRDPKTDLAVLKVDNVDNLTVARLGDSSKVRVGDEVLAVGAPLGLRSTVTQGIVSALHRPVPLSGEGSDTDTVIDAIQTDASINHGNSGGPLIDMDAQVIGINTAGKSLSDSASGLGFAIPVNEMKLVANSLIKDGKIVHPTLGISTRSVSNAIASGAQVANVKAGSPAQKGGILENDVIVKVGNRAVADSDEFVVAVRQLAIGQDAPIEVVREGRHVTLTVKPDPDST

SEQ ID NO: 24108 - protein, 354 aa, Triticum aestivum
VTSRTSLYKKAGWYRSGIPGISSTHASVGRPNKKKFIARSKAYHGSTLISASLTGLPALHQKFDLPAPFVLHTDCPHYWRFHLPGETEQEFATRLAKNLEDLILKEGPETIAAFIAEPVMGAGGVIPPPKTYFDKVQAVVKKYGILFIVDEVITAFGRLGTMFGSDMYNIKPDLVTLAKALSSAYVPIGATLVSPEIAAVVDSQSNKLGSFAHGFTYSGHPVACAVAIEALKIYRERNIPDHVKQIAPRFQEGTKAFAGSPIVGEIRGVGLILGTEFANNKSRDDPFPAEWGVGAIFGQECQKRGMLVRVAGDSIMMSPPLTMTPGEVDELVSIYGEAMKATEERVAELKSKKN

SEQ ID NO: 24109 - protein, 333 aa, Pichia pastoris
MAITVGINGFGRIGRLVLRVALSRADIKVVAINDPFIAPEYAAYMFKYDSTHKAYKGEVSASGNKINIDGKEITVFQERDPVNIPWGKAGVDYVIESTGVFTTLEGAQKHIDAGAKKVVITAPSKDAPMFVVGVNEEKYTSDLNIVSNASCTTNCLAPLAKVVNDTFGIDSGLMTTVHSMTATQKTVDGPSHKDWRGGRTASGNIIPSSTGAAKAVGKVIPELNGKLTGLAFRVPTVDVSVVDLTVNLKKETTYEEIKSVIKAASEGKLKGVLGYTEDAVVSSDFLGDERSSIFDASAGIQLTPSFVKLISWYDNEYGYSTRVVDLLQHVAKA

SEQ ID NO: 24110 - protein, 2340 aa, uncultured bacterium
MKWGFFMHLIRKKHPIFKVIVSLIILCFSFSTVMPAGLSYAQIAPVLNLPVPGAMVNPSIAFVPPLLKGMTIYPDEPLRFDFIIDSGNSKFDEEEVKTESEKLVKYFLAALTVPKNDLWVNLSPQEKDRIIPDYLGKTTLGRDMLAQDYLLKQLSASLIHPETELGAKFWDRIKELTFIRYGTTDLPMNTFNKVWVLPEKANVYEYNNTVYITHSRLKVMTDSDYLATKEDTRHKTQDTSIEQRATSHEQQNLESEILREIIIPEIEREVNEGKNFAPLRQMYHSLILAKWYKETIKDSLLSQIYVDQNKTAGVEVDDVTIKEQIYEQYIEAYQKGVFNYIREDYDRLAQDIIPRKYFSGGVVGDVEIDRDTALFSDRSVGQRFMVQMEASPQRSSIDGAMMTKEDARVRLREFLPPATDIPQESVEYTRIYNGDLQKALEALETKLANLSVDDFSDSAFRDGGFIEASVYYEGAQDELREAISVLRMALDSERRAKEAQAMEAALKEGEADTMIKERLDPKHHHLIGRRHKLKAIDLKGKFIVVYHEEAVTGEFSGELIVEGERIEIVSIEEFKNSFFEKVGDGYAAFALIKPDALRLGMAEEIISALEERGFMVIRGETIRFNEEQAREHYVVHKGKPFFEDLVAYMASSESIPLFLLTQEVGAVEKLRSALPEIREEFGAGPTENRIHASDSVRNTLVEAALAFKISDQAMAGLSMSEMAWVAAVDPKLAEPGALDRLFRDEERLEGLRKDLRELPPADKGSRDRAKVDLAIVKAQLETVRVKIRAFSDGAMLGDFTNLVVLDAAPRATAAEFTAPKRLEEIDEAMLGGPETLEDARAVLDGFSFNYENNKKAERIIIEEGDKSDIDRLLKMLRLSDEDIVQEIEDKLVSLGATKEQIVDAFIFRLDYQNHSTSTERNNKTIEKLVELGHARAIHILVRLLGTSSHEEASAALERLGATEKQLVDELVEYSRLSPGSSLEILEMIEGDYALAFKKVANKLRASIPKGKHYDADFKFMGHLNDVWELYKKGYDFDVRYVPEHDPVWITDLKQTGNIMRHGARITLSNGEVYEHPDVFWSDFQINPKNQIESIPNWLWEQIRFDMNVGQCVKGSFDSIEIIHGEPLEKSDGAILSGLVVFDPDPRATAAEFTAPERLEEIDEAMLGGTFKTARALALAAGLCIGAGCSDSSTGPPVDVTAPEISERITSSITENSFTLGVTTNEESTVVVEYGEDTSYGNRVEGNVLSVTHTISISGLKSGTTYHYRIIVKDASNNERASIDYTITTIDITAPEISEMAIRDITGNSFILEITTNEESTVVVEYGEEASYGNRVEGNVLGTSHTISISGLEPITTYHYRITVIDKSGNERSSADRRVTTAADLTSWSIEELIQGLDSELWNIRKAAAQELFKRDHVEGIALAQEKLVWPLFSPWNLIPGKTGILIELGRISIDPIKQFIFDSGTSNILVIGPLMDVLRNLYTFDEYFEFLVHLHQTMGQHRVTNYLLGEKLTALMSSGSTPMEKLVEIGSTHSIDRFRVAAISAIGRRGDVSYIDFLVGLANDQSNTTNVRNSAWGAANAIFLREDISDLAPDSVILMLYSGNFDVQKKATQELFQRGHQAGMAKARELVIVPRIDQLPSATARDQLIAIGEIVIELVRQNIFNSTTAPESISASIEVLEAFYTFDETIDLFVSLYQSIGNHSFTEEMIVDEAGKLINMQAAPLTSAVDLTSHKSDIIRVAAVTYLGDQGDPSHIDLLVGIENNDSSAKVRIAAQEAFYKIMVKEDPSSLSSDALITLLDIGMFDVQVEAAKELFNRGHTEGIDLAREKLVWPRILSLRSSTGPGGTLFIQIEQLGLITVEPLIDNLLNNPRGANTDSRKWSARLLGRIGLFDDVVDVLTYVIDHEYNLYSWWHVTEAKRGLSDLMSRQTLDRLIEVLDYDNGRHYEVRLRSAIELGKRGGLPAVNALIKALKDPHSSVRIHTIRALKAIGDPSAIPALEYVRDNDPDEQVRAEAAAAINAILNSSSSTSQSPDAAMVGEENFVVLDANPAATAAEFTAPERLEAIDEAILGAGEIVLIAAGATAITVGITLWKSWYAANIIAEAKRKTVEAAKGRPFYYLVTKLVLREGYSKTDVGGVYADPFTGLMGGAPQYEYRDRFGHRVSPEEALVSVKEIVTWGTENRSNDEYEKAIFEIVELLLRSEIGFGYYDYNSFIAKAQKALEEMIGTNSELQFRVGKECLKSLWKPIQEWAQEMIDRSGHDSAMITTPGGIDMNEIDVDRTGEGVQIRFDQESLQPLLNMPIDGFAPVIINIIPLQSILPLLGLEPTKEPDLVARLD

SEQ ID NO: 24111 - protein, 195 aa, Arabidopsis thaliana
MASRFIKCVTVGDGAVGKTCMLISYTSNTFPTDYVPTVFDNFSANVVVDGNTVNLGLWDTAGQEDYNRLRPLSYRGADVFILAFSLISKASYENIAKKWIPELRHYAPGVPIILVGTKLDLRDDKQFFIDHPGAVPITTNQGEELKKLIGSAVYIECSSKTQQNVKAVFDAAIKVVLQPPKQKKKKKNKNRCAFL

SEQ ID NO: 24112 - protein, 466 aa, Triticum aestivum
IARRHSPAGSVRGSGSGPAGRRRGAAMEDAAEGKTNVLQGRYELGRVLGHGNFGRVHAARDLRTGRGVAVKVVAKDKVERAGMVEQIKREIAVMKMVSHPNIVELHEVLATRTKIYLALELVRGGELFARISRAGRLREDVARRYFRQLISAVDFCHGRGVYHRDLKPENLLLDEAGNLKVADFGLSALAGHARPDGLLHTACGTPAYVAPEVLGGNGYDGAKADIWSCGVILYVLLVGALPFQDENLMSMYRKMQRGGFLCPSWVSKDARKLIGRLLDPNPSSRITIASLVESPWFKKTSPIPSPLLEPVPPAAARGNGEDKDEPPEALNAFHLISLSAGFDLSPLFDQEPATGRGTRGGVMRFATREPASGVISRLEGLATGGAMRVTKSGARGGRLEGAERGRKGRLGVAAEFFSVAPSVLVVDVKKDGGDTMEYRSFCSDELRPALKDIVWAAAAAAAAFPR

SEQ ID NO: 24113 - protein, 99 aa, Mycobacterium leprae
AKVKIKPLEDKILVQAGEAETMTPSGLVIPENAKEKPQEGTVVAVGPGRWDEDGAKRIPVDVSEGDIVIYSKYGGTEIKYNGEEYLILSARDVLAVVSK

SEQ ID NO: 24114 - protein, 343 aa, Candida albicans SC5314
MSTPITVIVSGATGFIAQHVVKQLLAKNYQVIGTVRSTAKGDHLLKLFNNPQNLSYEIVEDVGTKGAFDKVLQKHGEAKVFLHLASPFHFNVTDVEKELLLPAVDGTKNVLQAIYNFGNNIEKVVITSSYAAISTASKEADKNAIITEKDWNEISWQDALLNPVNGYRGSKKFAEKAAWDFIKSNDNVKFSLSTINPSFVFGPQSFGSEIKQSLNTSSEIINSILKLKPNDSIPASKGGWVDVRDVAKAHIIAFENEDAKNQRILLNSGRFTSQSLVDIINDKFPDLKGKIPVDEPGSDKSVIAESLATIDDTKSRELLGFEYYNLEQSVYDTVEQIVNAHKL

SEQ ID NO: 24115 - protein, 224 aa, Anabaena variabilis ATCC 29413
MPIKRIIAGLNEFHDNYFVAHRELFEHLSHGQNPELLFITCSDSRIDPFLITQSQPGDLFVIRNVGNIIPPYSRLNGGEAAGIEYAVEALGIKDIVICGHSHCGAMKGLLQIGNLAQQMPSVYEWLRCHAEATRRLVMDNYQGYSHEKLLKIAIEQNVLTQIENLETYPVIRSKLHSGQLTLHAWIYEIETGEVFAYDAENSQFKVIENRLFPVPNPLTNLHSA

SEQ ID NO: 24116 - protein, 325 aa, Vigna radiata
MSTAAGKLVCVTGASGYIASWLVKFLLERGYTVKATVRDTNDPKKVDHLLSLDGAKERLHLVKANLLEEGSFDSAVEGVHAVFHTASPFFNDAKDPQTELLDPAVKGTLNVLKSCVNSPTLKRVVLTSSIAAVAFSDRPKNPDVVVDETWYSDPEYCKRTGLWYNLSKTLAEDAAWKFAKENNIDLVTMNPALVVGPLLQPVLNTSAAIVLGLVNGAKTFKNASLGWVDVKDVALAHILAYENASANGRYLLVERVAHFGDAAKILRDLYPTLQIPDKCEDDKPLEPIFQVSKEKAKSLGIDYIPLEVSLKDTVESLKEKKFLKV

SEQ ID NO: 24117 - protein, 172 aa, Oryza sativa
GSPGLQAMSWNPEQTAGVKPEEGEDEAKSAVPLMPWATHVLQWAGQRVAISKPGKLEGKSTKQCSTHLHQLHICLPSSRKETRLLYRMSLDFAPWIKHVPFMHILWSHFAEKVLNEDLRLVLGQQERMINGANVWNWPVSYDKLGIRYRLWRDALERGLDRLPFSNPSESGS

SEQ ID NO: 24118 - protein, 506 aa, Ustilago maydis 521
MLGINVKSKPAKAAALLLLAGAPLVASQSITTAVTVNGTPTTTVISPSPTGRGYCEFFIDHWDCDPTRSEAASGPSGASASAPSIQPSPVGQSCTLHGDHYHCDGPTTATAAAAAAQASPTGQGECVFHINHWDCEGGDHSDHDHSGHDHSGHSHAGHSHAGHSHGPSELYGCGLAPLEDYNLPLHIGTVFILLVSSAIGAFLPILVYTAGGATSQNKRGRWADEVFFICRHFGTGVLISTAFVHLLSHAMMYYSNECIGELKYEATAPAIAMGAVWLVFIVDFFLLRALRKKSSQQMLQAHESHHDVHGVTKRESSSTLDRTHSPATEEDAATGMYGGLTYAQAKVAEWDVFAVEAGIIFHSILIGVTLGVATGSGFVALLIAILFHQLFEGLALGSRLSLLRWKSTAYKMLMASAFVLTTPIGVAIGIGVRKSFNGNSSGTLITLGTFHALSAGILLYTALVELLSGDFIHNRQMQKSSLIRAIAAVAALTVGIMAMSVLALWA

SEQ ID NO: 24119 - protein, 627 aa, Frankia sp. EAN1pec
MATPVSEVVGVADLETVRELAQQLRVDSVRSSTSAGSGHPTSSMSAADVMAVLLTRHLRYDWDTPDDPANDHLIFSKGHASPLIYSMFKAVGVVTDDELMTGYRRFGHRLQGHPTPVLPWVDVATGSLGQGLPDAVGVALAGKFLDKVPYRVWVVCGDSEMAEGSMWEALDKAAFYGLSNLIAIVDVNRLGQRGPTEFGWDMDAYARRVEAFGARAVVIDGHDLGAIDAALADAEDATRPTVILARTRKGEGFSEVADAEGWHGKPLPEDMATRAIIELGGERNLRVRGPVPPADMARPAPAQKPAIKLPTYELGAKVATRRAYGQALAAVGAHTDVVALDAEVSNSTYAEDFAKAHPDRFFEIFIAEQQLVAAAVGLSVRGYVPFASTFAAFFSRAYDFIRMAAISQVDIRLAGSHAGVEIGADGPSQMALEDLAMMRAVGGSTVLYPSDATSAAKLIEAMVGISGVSYMRTTRGAYPVLYGPDETFAPGGSKVLRSSDADTVTLIGAGVTLHHCLAAADVLAAEGVSARVIDLYSVKPVDTATLAEAARATGGRLVVAEDHYAEGGLGGAVLEGLAGVLRDGSVSLRLAHLAVGELPGSGTPDELLDFAGISTPHIVEAARGLLR

SEQ ID NO: 24120 - protein, 602 aa, Silicibacter sp. TM1040
MTAAYEYETHEYDVVVVGAGGAGLRATLGMAEQGLRTACVTKVFPTRSHTVAAQGGIAASLGNMGPDSWQWHMYDTVKGSDWLGDTDAMEYLAREAPKAVYELEHYGVPFSRTEEGKIYQRPFGGHTTEFGEGPPVQRTCAAADRTGHAILHTLYGQSLKNNAEFYIEYFAIDLIMSEDGQCQGVVCWKLDDGTMHVFNAKMVVLATGGYGRAYFSATSAHTCTGDGGGMVARAGLPLQDMEFVQFHPTGIYGSGCLITEGARGEGGYLTNSEGERFMERYAPNYKDLAPRDYVSRSMTMEIREGRGVGEHGDHIHLNLSHLPAEALAERLPGISESAKIFAGVDVTKEPIPVLPTVHYNMGGIPTNYWGEVLNPTEDNPTGVVPGLMAVGEAGCASVHGANRLGSNSLIDLVVFGRASAIRAGKVVDPEAPNPVLNQASIDKAFDRFDGLRNAKGGTPTAELRLEMQRTMQADAAVFRTDKTLKEGVEKMEVIAAKLDDLHVTDTSLVWNSDLMETLELTNLMPNALATIVGAEARKESRGAHAHEDYAERDDENWRVHTVARVEGNKTSLSYRPVIVDPLTNEDAGGISLKKIAPKARTF

SEQ ID NO: 24121 - protein, 478 aa, Bordetella parapertussis 12822
MSTTNAASTEQPLKFAGYRKRDMPAHDAELTSTMPGTPMGEYMRQYWQPVCLSEELRDVPKAIRILGENLVAFRDKSGNIGVMHRHCAHRGASLEFGVIQQHGIRCCYHGWHYGVDGTLLEAPCEHDDTRLRQTVCQGAYPAFERDGLVFAYMGPPENQPPFPEYDTYTLPKGTKLVPFSNVYPCNWLQVHENIMDHMHTAVLHNHMVVEGVDAEVSAGVTLEGFGDMPVMQWHPTRSGNGIVFVAGRRLPQDRVWVRITEMNLPNYLQIGSLVPTAARERHSTSGCTRWHVPVDDTNMIIFGWRHFNAEVDPDGMGCEADCGVDKIDFLVGQTGNRSYDEAQRAPGDWEALTSQRPIAVHALENPGASDVGVYMFRKLLRDALHGKTKPDPAYAQLLASGQSLPLYAQDSVLYAKQREDTAEDRKLINELGRKVLDIMRAADGLAAAERDAFVRAELDRIDDGVGKQIVAQALAMEA

SEQ ID NO: 24122 - protein, 294 aa, Arabidopsis thaliana
  misc_feature (78)..(78): Xaa can be any naturally occurring amino acid
  unsure (1)..(294): unsure at all Xaa locations
METDSIDSVIDDDEIHQKHQFSSTKSQGGATVVISPATSVYELLECPVCTNSMYPPIHQCHNGHTLCSTCKSRVHNRXEKVAESLELPCKYYNLGCLGIFPYYSKLKHESQCNFRPYSCPYAGSECAAVGDITFLVAHLRDDHKVDMHTGCTFNHRYVKSNPREVENATWMLTVFQCFGQYFCLHFEAFQLGMAPVYMAFLRFMGDEDDARNYTYSLEVGGSGRKQTWEGTPRSVRDSHRKVRDSHDGLIIQRNMALFFSGGDKKELKLRVTGRIWKEQQNPDSGVCITSMCSS

SEQ ID NO: 24123 - protein, 472 aa, Candida glabrata CBS138
MSLSSAARATPALRAQAYKALTSTRAFSATSISSEKTLKDTFADIFPKQAEEIKQFKKEHGKTVIDQLLLEQAYGGMRGIKGIVWEGSVLDPEEGIRFRGRTIPEIKKELPTIGGSSEPVPEALFWLLLTGEVPTESQVKAFSADLASRSEVPEHVLKLLDSLPKDLHPMAQLSIAVNALETESKFAKAYARGVNKKEYWSYTFEDSLDLLGKLPVIASKIYRNIFKDGKICQVDPNADYGKNLAHLLGYTNKDFVDLMRLYLTIHSDHEGGNVSAHTTHLVGSALSSPYLSFAAGMNGLAGPLHGRANQEVLEWLFTFREEVKGDYSKETVEKYLWDTLNGGRVIPGYGHAVLRKTDPRYTAQREFALKHFPDYELFKLVSTIYDVAPKVLTKHGKTKNPWPNVDSHSGVLLQYYGLTEASFYTVLFGVSRAFGVLPQLIIDRAVGAPIERPKSFSTEKFKELVKSIESKK

SEQ ID NO: 24124 - protein, 274 aa, Klebsiella pneumoniae
MWNYSEKVKDHFFNPRNARVVDNANAVGDVGSLSCGDALRLMLRVDPQSEIIEEAGFQTFGCGSAIASSSALTELIIGHTLAEAGQITNQQIADYLDGLPPEKMHCSVMGQEALRAAIANFRGESLEEEHDEGKLICKCFGVDEGHIRRAVQNNGLTTLAEVINYTKAGGGCTSCHEKIELALAEILAQQPQTTPAVASGKDPHWQSVVDTIAELRPHIQADGGDMALLSVTNHQVTVSLSGSCSGCMMTDMTLAWLQQKLMERTGCYMEVVAA

SEQ ID NO: 24125 - protein, 250 aa, Propionibacterium acnes KPA171202
MLLETAVPGATIFGSEFLGTLILILLGCGVVANNLLPKSKGHANAPGSLQINWGWGFGVMFGVYAAYKTGGHLNPAVTVGLAIAGKDLAPGIPATAGNITIYILAQFAGAFVGAVLCWLAYKQHYDEDCDPALKLGTFATGPEVRNPLWNTITEAIGTWVLVLWVILSGFTQGVKIGPLAVGLLIVSIGASLGGPTGYAINPARDLSPRIAHAVLPIKGKGDSDWGYAWVPVVGPMIGAVLAALTYSIFW

SEQ ID NO: 24126 - protein, 479 aa, Propionibacterium acnes KPA171202
MGSWTLEVMSESTNGPQEPREPNSFPRASAEGGYSSHSEDARQGWAQESYWSHSDDTRSSSGDSPTTQRQPWESSEQPTAIDPNLGNKNAGSPQPSSRSGRKGFRGGTIVLAALLAAAVGGVSGGLVDRSLTKNDTPAVATKSAAPNTVTKVVQGSSSAPDWTATASAISNSVVSITVTTGNGGGEGSGVVVDSNGDIVTNNHVVSDAASGGQLTVSMGNKTYDAKVVGSDPSTDLAVIRVTNPPESMKPMRFANSSKLTVGAPVMAVGNPLGLSGSVTTGIISALNRPVTTMSRDDSDDVLGSYDSSSGVVVTNAIQTSAAINPGNSGGALVNANGELVGINSSIASLPSADRSQSGNIGIGFAIPSNLAKSVADQIIRTGKVTHAFLGISVRDAAAVKAGVKVRGAGIATVIPSSAAGKAGLRRGDVITRIDDTDIASGESLVGLIRSFKAGQKAKISYIRGSQEGTVDVTMGTAKA

SEQ ID NO: 24127 - protein, 607 aa, Xanthomonas campestris pv. vesicatoria str. 85-10
MAVIEIKVPDIGDYSDVPVIEVLVAVGDSVAKDQGLVTLESDKATLEVPSSAAGVVKELKVKVGDTLSEGALVLLLETEGEAAAPAKAEPKAAPAAAAPAAAPGSKPPVTPSHRAPAEPAAPKPALASGKPADIECKMVVLGAGPGGYTAAFRAADLGLETVLIERYASLGGVCLNVGCIPSKALLHAAAVIDEVAHAGDFGVDFGQPKIALDKLREYKEKVVGKLTGGLASMAKQRKVRTVTGVASFVSPNELEIVGDDGKTQLLRFEHCIIAAGSQAVKLPNFPWDDKRVMDSTDALELHDIPKTLLVVGGGIIGLEMATVYSALGSKVTVVEFMDQLMPGADKDLVKPLADRLKKQGVEVHLKTKATDVKADKAGITVSFEAAVEGEKPGLQATTYDRVLVAVGRSPNGKKIGAEKAGVTVTERGFIPVDRQMRTNVPHIFAIGDIVGNPMLAHKATHEGKLAAEVAAGEKKEWVARVIPSVAYTNPEIAWVGVTETEAKAKGLKVGVAKFPWAASGRAIGIGRTEGFTKLIFDEQTHRVIGGAIVGVHAGDLLAEIGLAIEMGAEAEDIGHTIHAHPTLSESVGMAAEVYDGTITDLYIPKKK

SEQ ID NO: 24128 - protein, 180 aa, Escherichia coli O157:H7 EDL933
MFTFIKKVIKTGTATSSYPLEPIAVDKNFRGKPEQNPQQCIGCAACVNACPSNALTVETDLATGELAWEFNLGRCIFCGRCEEVCPTAAIKLSQEYELAVWKKEDFLQQSRFALCNCRVCNRPFAVQKEIDYAIALLKHNGDSRAENHRESFETCPECKRQKCLVPSDRIELTRHMKEAI

SEQ ID NO: 24129 - protein, 144 aa, Dechloromonas aromatica RCB
MPVRPGNLKETIMPKIEKTDAEWRAQLDENEYRVTRQKGTERAFTGKYWDTHDDGTYRCICCGAPLFRSETKFDSGCGWPSFHTPNDEKLIDEHVDQSFGMIRTEVTCHDCGAHLGHVFDDGPAPTGLRYCINSASLKLEKDGK

SEQ ID NO: 24130 - protein, 684 aa, Zea mays
MQNVVEVEPGRPAADGRPSVGPTYRSAFARDGFPPPVPGMDSCYDIFRLGSFDTYLRCAFTWDRREILFNFNLKFFRMAVEKYPNNRMLGHREIVDGKAGAYTWKTYKEVFDIANKIGNSIRSCGLAKGSRCGIYGANCPEWIITMEACNAHGIYCVPLYDTLGAGAVEFILCHAEVEIAFAEEKKIDLLVKTLPKSNEFLKTIVSFGKVTQEQKGEVQKYGLSIYSWDEFLSLAADQEFDLPVKEKADICTIMYTSGTTGDPKGVLISNASIICLIAGVDRLLNYVNEELAESDVYMSYLPLAHIFDRVVEELFIFHGASIGFWQGDVKLLVEDIGVLKPTIMCAVPRVLDRIFSGLQAKISSGGFLKSTMFNLAYKFKQFRMMRGAKHNEAASICDKVVFSKVKEGLGGNVRVILSGAAPLATHVEEYLRVVTCAHVVQGYGLTETCAGSFVSLPNQMSMIGTVGPPVPNIDVRLESVPEMDYDALASKPRGEICIRGETLFSGYYKREDLTKEVLIDGWFHTGDIGEWQPDGSMKIIDRKKNIFKLSQGEYVAVENLENVYGLVSAIDSIWIYGNSFESFLVAVVNPNKEVLESWAAANGISGDFESLCNNPRTKEYILGELSRIGKEKRLKGFEFVKDVHLEPVPFDMDRDLITPTYKKKRPQLLKYYQGVIDNMYKSAK

SEQ ID NO: 24131 - protein, 775 aa, Legionella pneumophila subsp. pneumophila str. Philadelphia 1
MEFSMKENVSHLPRELSRMVFWSLTCLKKAIAEVYGKETYERIEQIRLSMQDTIGSESFSLGKALHSLQIELSKLEKKQLYQIAHGFSLMMELINTCENAYRIFRINQRKEQVYSDMPQGIHYVLTAHPTEARTNEFLKLFKEIRDYLIEVLKSPYLMNESHLDQMLKISLQINISYHEKPSVEDEAQYIYQYALHPLNIKLYHSFLAKGVPIQLRTWVGGDKDGHSGVNEKIMLKSLELSRSFFIAYIQECLEEVLEIIKLSTALGKNKSLADQINQLVKKAYGLKKIQSKDHEKISAFKNELTATQINALKFLNFEPEQFSIISSIFHLYPALVMPIELREDSAVVKESLTSIKKTTITKMLEQVHSITHGTDPKNYIRGFILSMVESAEDIKNGINLVKKVFKSYALPVVPLFENQLALTNADTILNNSITEDIRQKHLKQWEGNYEVMLGYSDSSKENGVLPSRLMIAKSLKNIQSTLENKNLRPIFFHGSGGSIERGGGDIKEQTASWSKEMMSNYKVTVQGEMVARLFGSSSILKSQIDKFLDIYSQKGKSNNNDYPEELSLFSTRVSQKYKTLIQSDWFWQIVEQASPYHFLKELKIGSRPTKRKSGPDQRKLRAIPWILCWTQTRLLFPTWWGIGSTWSELNGIEKNRLKALYKENALFAAFVKQLGVTLSKVYLPVWEQYLLQLTGSIEYLRPFQSELESTIQFFYQITDEKDFCFHQPWLGESIQLRSTLIHPLNLIQIEAMKRKDLPLLRKTVTGISCGMLTTG

SEQ ID NO: 24132 - protein, 722 aa, Oryza sativa
MAGPTSRRLLLLVARRAGHLCRHHHHHHHRDGLVLARSLQAAAAAAASSPPPLPASPPARSFSSAFSSVHGERPSSEYAKIRKESLESQFGRILGSSSRTLFADRGFGPFLAMYRAAIISFHVMKLTIWHLLLSDVHKRAEKFQETLIRLGPFYIKFGQALSTRPDILPNAYCQELSKLQDQIPPFPTRIAIRTIESQLGSRISDLFADISPEPVAAASLGQVYKAHLHSGELVAVKVQRPGMTPLLTLDALLFHMIGGQLKRFAKARKDLLVAVNEIVRHMFDEIDYVLAGCRNSARGRLYSHDLGGNSSGDGTSIKVPKVYWNFTRKSILTLEWIDGIKLTDAERIGKANLNRKRMIDEGLYCSLRQLLEEGFFHADPHPGNLVATEGGSLAYFDFGMMGDIPRHYRVGLIQMLVHYVNRDSLGLANDFHSLGFVPEGTDLHGVADALRVSFGDGRRQSNDFQGVMSHLYDVMYEFNFSLPPDYALVIRALGSLEGTAKALDPDFKVIESAYPFVIGRLLEDPSPDMRKILRQLLICDDGSIRWNRLERLIAAISEQSESSNKSEDRSGENAANKPGWRSFDMHSVVAATEDLFHFILSRKGWRVRVFLVQDIVKASDAFLQEATFPGIFDEEGTTGELHPERSKMIRRVVHGVQSFRQAISLAPDAWTAMLFRTLLKPESQKFILDVFLALAMHSCYKIPETSWICMSRFLNYLDRQGR

SEQ ID NO: 24133 - protein, 417 aa, Legionella pneumophila subsp. pneumophila str. Philadelphia 1
MNTNIANQLRAAKKATTDLNLIQSDTRTIILKTLAANLEKHIENIIQENQKDLSLMLEQDPRYDRLLLNKERILSLVNDVRKVANLPNPLGVNLFEKSMPNGLSIKKITVPLGVIAVIYESRPNVTIDIFSLCFKSGNVCILKGGKEAHFTNSYLLLLIKNTLKNFNINTDIVCLLPPERALMTQLLNATGLVDLCIPRGSQNLINFVRDNAKIPVIETGAGIVHTYFDKSGDLGKGKKIINNAKTRRVSVCNALDTLIIHADRLKDLPELVETLSQKNVIIYADQDAYHVLDKNYPEQLLIKAKPQDFGHEFLDYKLAIKTVPNIKAAIDHIQQFSSHHSEAVIAEDESAIDKFLTEVDAAAVYANASTAFTDGGEFGLGAEIGISTQKVHARGPMGLEALTSYKWVIRGTGQIRD

SEQ ID NO: 24134 - protein, 356 aa, Legionella pneumophila subsp. pneumophila str. Philadelphia 1
MKIIIKVGTQSILSVDGSPIYSVLNNLVNQIIYLKNLGHQVILVSSGAVGSGRKIAKNSLGKTYGDTVGEKQLLASIGQPELMNLYSSLFKNENILVSQLLLTKQDFHTRQHYLNIARLLTELLKHQNIIPIVNENDSVAIEELMFTDNDELAGLIAAQINADYLILLTNVDGVFTSHPNDPESKLINTIDPNSGWPNVSAVKSKLGRGGMVSKLDTARKMAGLGINTVIANVNVESIVPKILNREAVGTIILASKRKSSIKRWIAFSHRTSLPSIVINDNLITLLRNGNRVMSILPIGIEDFRGECKKGDLIDILNSNNEKIGVGIARYDFLRLKDYLRLQNKPAFIHYDQLHIL

SEQ ID NO: 24135 - protein, 484 aa, Synechococcus elongatus PCC 6301
MAAPILFWHRRDLRLSDNIGLAAARAQSAQLIGLFCLDPQILQSADMAPARVAYLQGCLQELQQRYQQAGSRLLLLQGDPQHLIPQLAQQLQAEAVYWNQDIEPYGRDRDGQVAAALKTAGIRAVQLWDQLLHSPDQILSGSGNPYSVYGPFWKNWQAQPKPTPVATPTELVDLSPEQLTAIAPLLLSELPTLKQLGFDWDGGFPVEPGETAAIARLQEFCDRAIADYDPQRNFPAEAGTSGLSPALKFGAIGIRQAWRAASAAHALSRSDEARNSIRVWQQELAWREFYQHALYHFPSLADGPYRSLWQQFPWENREALFTAWTQAQTGYPIVDAAMRQLTETGWMHNRCWMIVASFLTKDLIIDWRRGEQFFMQHLVDGDLAANNGGWQWSASSGMDPKPLRIFNPASQAKKFDATATYIKRWLPELRHVHPKDLISGEITPIGRRGYPAPIVNHNLRQKQFKALYNQLKAAIAEPEAEPDS

SEQ ID NO: 24136 - protein, 207 aa, Cicer arietinum
MKSILPLCCFLFLLVLNTKPLQGAEPEPIVDKQGNPLQPNEGYYVWPLWSDYGGITLGQTRNRTCPLDVIRNPDAIGSPVFFSASGLDYIPTLTDLTIDIPILGSPCKESKVWKLSKVGSGFWFVSTGGLAGDLVTKFKIERLEGDHAYEIYSFKFCPSVTGVLCAPVGTFEDADGTKVMAVGDGIEPYYVRFQKVSSYKNKDLSSI

SEQ ID NO: 24137 - protein, 221 aa, Nicotiana benthamiana
VILYALLCGTLPFDDENIPNLFKKIKGGIYTLPSHLSAGARDLIPRMLIVDPMKRMTIPEIRLHPWFQAHLPRYLAVPPPDTMQQAKKIDEEILQEVVKMGFDRSNLIESLRDRVQNEGTVAYYLLLDNRHRVSTGYLGAEFQESVEHGYKRNNSNEAVTSPVGQRFPGIMDYQQAGARQFPIERKWALGLQSRAHPREIMTEVLKALQELNVCWKKIGQY

SEQ ID NO: 24138 - protein, 484 aa, Bordetella parapertussis 12822
MENLGYPARLELYVAGQWRGVEGRRTQVVVNPSTQQPLGELPLASAEDIDDALAAADQAFGDWARTTAWERADILQRAAALIEARRDRLAVVLTLENGKPLADSHGELDRVVETILWCAEEGKRTYGRVLPARAQRLSQSSLKRPVGPVAAFVPWNFPAALAARKLAAAMAAGCTVVLKPAEETPAICIELVRAFVDAGTPAGVVNLLYGVPAQVSERLIASPIIRKVSFTGSVAVGRLLASMAAGHLKPATMELGGHAPVVVFDDVDADRVAKMCVGFKYRNAGQVCLSPSRFYVHERIADRFAESFVRHAGLLRVGDGMEEGVQMGPLNNVLRLQAAERLVEQAVGAGASLALGGRRIGQRGYFYPPTVLEGVPDAADILAEEPFCPVAPIMRFGSMDEVIGRANHPSLGLAAYAFTNRMATSAEFAERIEAGWIGINNFVPALADAPIGGMKDSGLGYEGGPEGLDAYLHARFVSQLNVEV

SEQ ID NO: 24139 - protein, 477 aa, Prosthecochloris aestuarii DSM 271
MKRKTVICWFRQDLRLEDNPALFVAAEEGYVLPVYILDDSSPGTWQMGSATRCWLHHSLVSLNRSFDGKLGIFRGEPLEILKTLARQHKAEKIVWNRCYEPWRMKRDQGIKATLQAEGIEVSSFNGSLLWEPHEVLKQNNTPYRVFTPFFRRGCLNALPPRTPLPAPQRMLMADTIDNSISVQDLNLLPSIPWDSQLISHWSVGENSARQSLLRFLDQGLNGYKEGRDFPGQNHVSRLSPALHFGELSPNTVWYEAKRCGSGQDLDHFLSELGWREFAYTLLYHNHDMPEKNLQSAFDAFPWVHNDETLIRWQQGMTGYPLVDAGMRELWQTGYMHNRVRMITGSFLVKNLLLHWHYGQQWFHDCLLDADLANNSAGWQWIAGCGVDAAPYFRVFNPVRQGEKFDPDGTYTLRFVPELAKLPKKYLFNPWEAPKNILQEAGITLGKTYPEPIVDLAISRNRALSAYASIRKKKIQEK

SEQ ID NO: 24140 - protein, 471 aa, Oryza sativa (japonica cultivar-group)
MELEDAYGGSYQQSWQQNAPPPPPEHVVKMHPSPPPAYANRPPQPPSTPPAAMINSSGGSGSYSGGEILPPPSPGAALGFSKSTFTYEELLRATDGFSDANLLGQGGFGYVHRGVLPTGKEIAVKQLKVGSGQGEREFQAEVEIISRVHHKHLVSLVGYCISGGKRLLVYEFVPNNTLEFHLHGKGRPTMEWPTRLKIALGAAKGLAYLHEDCHPKIIHRDIKASNILLDFKFESKVADFGLAKFTSDNNTHVSTRVMGTFGYLAPEYASSGKLTEKSDVFSYGVMLLELITGRRPVDTSQTYMDDSLVDWARPLLMQALENGNYEELVDPRLGKDFNPNEMARMIACAAACVRHSARRRPRMSQVVRALEGDVSLEDLNEGVRPGHSRYFGSYSSSDYDSGQYNEDMKKFRKMAFTNNNDTSSQYSAPTSEYGQIPSASSSEGQQTQEVESRTTKRGGYSGYSSGYSGAS

SEQ ID NO: 24141 - protein, 465 aa, Candida albicans SC5314
MFPNSPDAFHQVRMMQSSIKASNFKLQSMEFRCHSNNVCEYQMEMLHHLLSVEAKTLPNLSLIEQQPEIKLGMRPLLLDFLMEVITILSLSRSTFPLTVNLIDRYCSTRIVKKQHYQLLGLTSLWISCKNLDSKFKVPTLNDLRKICVDSYYKELFVEMEKHILKSLEWVVNAPTFDAFIDLYSNLLISNSSNFEVANIIKKSSHKIKLFSNYIGELFQFYPNIYYDYTSSQIALIAILITVLTLKIPVDLISLLNFYNGLVKTEMFKSNVEQGAEDQFEEILSVDSFKSLFNKSFFKNLIKIIDNPPSSLKIKYFAENGKYSVLMKQLVTTASNTLKCILDPVPTTPKANSFVKHQQQQHHYHPRPPMSINTSMIPLTPVSNSTSPNRFSPDQIFSENESTPGIAFGTMTPDSQSTSPGEKRSYECIDELEIGTSTIAGYTLKNHDTLKRSKSANYGTLFYLQQ

SEQ ID NO: 24142 - protein, 145 aa, Brassica napus
  misc_feature (114)..(115): Xaa can be any naturally occurring amino acid
  misc_feature (130)..(130): Xaa can be any naturally occurring amino acid
  unsure (1)..(145): unsure at all Xaa locations
MANPPTLPISDHSGGSPSQQPASTPAFRTFLSRLSASIRQSLSQRRPWLELVDRSAISRPDSLADAYSRIRRNIPYFKVNYVTIVSLVLALSLLSHPLSLLVLLCLFGAWIFLXXLFRQSDQPLVVLGRXFSDRETLAVLVILTI

SEQ ID NO: 24143 - protein, 472 aa, Triticum aestivum
MAGAAAAAAAVASGISVRPVAAPKISRAPRSRSVVRAAVSIGEKAYTVQKSEEIFNAAKELMPGGVNSPVRAFKSVGGQPIVFDSVKGSHMWDVDGNEYIDYVGSWGPAIIGHADDKVNAALIETLKKGTSFGAPCALENVLAQMVISAVPSIEMVRFVNSGTEACMGALRLVRAFTGREKILKFEGCYHGHADSFLVKAGSGVATLGLPDSPGVPKGATVGTLTAPYNDAEAVKKLFEDNKGEIAAVFLEPVVGNAGFIPPQPAFLNALREVTKQDGALLVFDEVMTGFRLAYGGAQEYFGITPDVTTLGKIIGGGLPVGAYGGRKDIMEMVAPAGPMYQAGTLSGNPLAMTAGIHTLKRLMEPGTYEYLDKVTGELVQGILDAGAKTGHEMCGGHIRGMFGFFFAGGPVHNFDDAKKSDTAKFGRFHRGMLEEGVYLAPSQFEAGFTSLAHTTLDIEKTVEAAEKVLRRI

SEQ ID NO: 24144 - protein, 1079 aa, Yarrowia lipolytica CLIB122
MYSHFNNEPVAKRVNNLFTDRLRQFTSDGEYRSLNLPAFYERERLDGKNHVAIETYAVSDLRRPLFKDALKEADGHWKPAKKGSEYGPSWATHWFKIQVCVPPEWKKNYYKKGDLVVFNWNLNCEGLVFSESGEALIGLSGEERREWPIPDNWFDGKCHTFYIEASCNGMFGNATGSSIQPPSDNRYFRLDSADLVVINSEARHLFVDFWIIGDAAREFPGDSWQRGKALDVANKIMDAFDPENPDESIAEGRKLAKEYLGDTTKAYKQQLPFADGLVYALGNCHIDTAWLWPFAETRRKAGRSWASQLELIDKYPEYVFVASQAQQFKWLKEDYPDLFAKIQKQAKKGRFLPVGGAWTECDTNLPSGESLLRQFLLGQRFFLEHFGSLSDTFWLPDTFGYSAQVPQLCRLAGMDRFLTQKLSWNNINSFPNSTFNWVALDGSQVLCHMPPNNTYTSMANFGDVSRTQKQNKNLDTTRNSLMLYGHGDGGGGPTAEMLEKLRRCRGVSNTVGELPPVIQGQSVTDFYNELLDQTNNGKDLVTWVGELYFEFHRGTYTSQAQTKKGNRVSENLLHDVELLATLASIRDSSYKYPFAQLESLWEDVCLCQFHDVLPGSCIEMVYKDVKKIHGRVIDTASHLIDKAASALGLSGHPSKDSFDCTPVALNTMPWSRTEVVAVPQPHWDATVELAEGVEIQEDSGNALVMMSESGPVVTTQSVDLFKSEDAYILENSQVKVTICKDDGTLTSIYDKENDRRVLSGTGNRLVLFDDQPLSWQAWDTEVFSLGKKQYIGAENVTRHSIVSSGPLRSTVAFTYEFNKSVVTTEISLDANSPLVTFNTRADWHETCKFLKVEFPVDVHSESASYESQFGVVKRPTHYNTSWDVAKFEVCCHKFADLSELDYGVSILNDCKYGFATHGNLMRLSLLRAPKAPDAHADMGHHEFKYGVLAHKGPLGATTVRAAYNFNNPLRVKYVGLSEVSTKQAFSLKGPANLVLSQVKRAEVDRSKKSTNVILRVYEALGGRTRGKLVIDLPNVVSVTKTCALEYSKEKQVVAKSEGVTSVDISLRAFEVATYKVELA

SEQ ID NO: 24145 - protein, 297 aa, Schizosaccharomyces pombe
MENYQKVEKIGEGTYGVVYKARHKLSGRIVAMKKIRLEDESEGVPSTAIREISLLKEVNDENNRSNCVRLLDILHAESKLYLVFEFLDMDLKKYMDRISETGATSLDPRLVQKFTYQLVNGVNFCHSRRIIHRDLKPQNLLIDKEGNLKLADFGLARSFGVPLRNYTHEIVTLWYRAPEVLLGSRHYSTGVDIWSVGCIFAEMIRRSPLFPGDSEIDEIFKIFQVLGTPNEEVWPGVTLLQDYKSTFPRWKRMDLHKVVPNGEEDAIELLSAMLVYDPAHRISAKRALQQNYLRDFH

SEQ ID NO: 24146 - protein, 619 aa, Ustilago maydis 521
MADEKRTSIEEPGTPMSYSTAASPELLSSSNNASALPAYPSSQTKQDKESLSHDQAVRVEPESSTPLTDSVEDNESGAKVKKDLHFWIIFSALMLIAFVAALDMTMISTALPAITANLPPSTIAANWITSAFLLPMVASQPIFGGLSCSIGRKWSINSALVIFLVGSVVCATAKTFLVLVIGRGIQGLGGGGIHSMCEIIMSDLTTLRERGLFFGVIALVFAVAGFAAPVLGGVFSEHSWPWIFWINLPIGAISLVLLIIFLNIRVPLLTGKEKWQKLDLVGNAVLFGSVTAILIAVTEGGIKYRWSAWQIWVPLVVGLLGIMLFLVIEWVPNRIAPKPVFPLDLFRNRTASVAYVQTFVHGVIFYGVIYMVPIYFQAIKDRTPLQSAIWSFPLSAPSFPFAMGAGVLISITGKYKLLIFCGWMLMAAGIGWMTHWHVGTSKFEWAFSQVILGAGLGIMFPITLPPIQAALPASRLESATAAYAFTRTFGAVWGITAATTIFSTQAAKNLRPYYDQLNPLGLSDFTVVAFSEQLRNLPQPIQGVVKGVYADAISDSYWLFVPLAIIGFFTTFGMKELPLPDFIKSEAKLEQKQDVTPALKSSAAHAVVNVKTEVPSTLP

SEQ ID NO: 24147 - protein, 142 aa, Halobacterium sp. NRC-1
MSMGSDMYRQQILDHYRNPRNQGELPEPSFTHEGYNPSCGDELEFDVALDDDGETIAHVAFRGDGCAISQASASMLSEELPGMTLAEVDALDRDDILDMLGVEVTPMRIKCAVLSEKVVQDGAEIYTGDGDEADRTTTEDDA

SEQ ID NO: 24148 - protein, 687 aa, Propionibacterium acnes KPA171202
MATELTWTDTDRLAVDTARVLAADAVEKTGNGHPGTAISLAPLGYLLYHKVMSIDPSDPNWLGRDRFIMSAGHSSLTQYTQLYLAGLGLELSDLESLRTWGSLTPGHPEYGLTKFVETTTGPLGAGVANAVGMAMAARRERGLLDPDAAPGTSLFDHYIYAIAGDGCMQEGIASEASSLAGTQELGNLIMFYDDNRITIEGDTAIAFSENVEARYEAYGWHVQHVDFTNGGTTYEENVEALMEAIDNAKTVTDKPSFIRLTTVIGWPIPKLAGLAQVHGAKIGAEGVSALKEKLGFEDKPFAIDLEMVQQVRAAFAERGKGLREVWDEKFAAWHDANPDGAALLERMLAHKLPDDLDIPTFEPGKMSTRKASGAVLSALGPQLPELWGGSADLAGSNNTTMKGADSFLPEDRCSEKDPGGPYGRTIHFGVREHAMGGILNGITLAGLTRCYGGTFFVFSDYMRPSVRLAALMKIPSIFVWTHDSIGVGEDGPTHQPVEHLASYRAIPGLDIVRPADANETAVAWRTIVEHTDRPAGLVLSRQDLPTIDRSKYASAEGVARGAYVVCEASAEPKVILIGTGSELSVALEAREKLEADGIATRVVSMPCQEWFDEQDEEYRESVLPSSVTARVSVEAGIAMGWAKYVGCKGASVSLEHFGASASGALLFEKFGFTADHVAEVAHTVFME

SEQ ID NO: 24149 - protein, 310 aa, Mannheimia succiniciproducens MBEL55E
MDKIMKKLTVLGSINADHVISVPHFVKPGETLTGSNYHIAYGGKGANQAVAAARLGADVDFIACIGDDDIGKAMKAAFERDGIHTHTISTIPHQTTGIAMIQVAESGENSIVISAGANAHLTEELLAQHQESIAHADCLLMQLETPISAVEKAAVFAKRNGTKVVLNPAPAQPLSDHLLAHIDMITPNETEAEILTGVQVTDEQSAAEAAQVFHHKGIETVLITLGSKGVFFSSRGVQRIIPGFRVKAVDTTAAGDTFNGALITALLEDKSMEEAIRFAHGAAAISVTRKGAQPSIPSREETLAFLNEQH

SEQ ID NO: 24150 - protein, 699 aa, ASPERGILLUS NIDULANS FGSC A4
MAIALAEADKYEVLEKIGCGSFGIIRKVKRKSDGFILCRKEINYIKMSTKEREQLTAEFNILSSLRHPNIVAYYHREHLKASQDLYLYMEYCGGGDLSMVIKNLKRTNKYAEEDFVWRILSQLVTALYRCHYGTDPAEVGSNLLGPAPKPSGLKGKQAQMTILHRDLKPENIFLGSDNTVKLGDFGLSKLMHSHDFASTYVGTPFYMSPEICAAEKYTLRSDIWAVGCIMYELCQREPPFNARTHIQLVQKIREGKFAPLPDFYSSELKNVIASCLRVNPDHRPDTATLINTPVIRLMRREVELNNLSRAARKREEATMQKAKDVEQAFAKLEKEKQQIRSELENSIRREWEVKARLEIDRQVQNELDKLRKRFECEVQDRVAQEVEKQRRNANYREDASLRSSGHSSQMSSSNSEDSDFPSSTDISQLSLESPTNKAAKLPKKESRTPFTRSKTVVDSPMDIQMAEPSPISIASLSLSPRRTSATYSGKNIFAEGERKRPKFEPTLAYSDDEDDTPELPSPTRPKVKPDPFKAPSRPLLRQNTTALMQKLSTQPPIFPANPSRLPQMSAPDVRESKSRSPHRRLSKIPSSANLAADAGSPTRKNGVKSSPSKMNGGDEMFKAVMQRNMGGRTLVELAQARAGGRPIDEVKRCASDSRSGCSVPMKSADRDPPAVWDPERDEMPSPFLARGRKVIRNLR

SEQ ID NO: 24151 - protein, 519 aa, Oryza sativa (japonica cultivar-group)
MQFSSVFPLEGKACVSPIRRGGEGSASDRLKIGDSSSIKHDRAVRRMCLGYRGTKNGAQCVLTSDAGPDTLHVRTSFRRNFADPNEVAAVILGGGTGTQLFPLTSTRATPAVPIGGCYRLIDIPMSNCFNSGINKIFIMTQFNSASLNRHIHRTYLGGGINFTDGSVEVLAATQMPGEAAGWFQGTADAVRKFIWVLEDYYKHKAIEHILILSGDQLYRMDYMELVQKHVDDNADITLSCAPVGESRASDYGLVKFDSSGRVIQFSEKPKGTDLEAMKVDTSFLNFAIDDPTKFPYIASMGVYVFKRDVLLNLLKSRYAELHDFGSEILPRALHEHNVQAYVFADYWEDIGTIRSFFDANMALCEQPPKFEFYDPKTPFFTSPRYLPPTKSDKCRIKDAIISHGCLLRECTIGHSIVGVRSRLNSACELKNTMMMGADLYETEDEISRLLSEGKVPIGVGENTKINNCIIDMNARVGRNVVITNSEGVQESDRPEEGYYIRSGIVVILKNATIKDGKVI

SEQ ID NO: 24152 - protein, 500 aa, Dechloromonas aromatica RCB
MFNKPTRQEVNMKLKPLKMTVAAIAVAAALGGAYSLGQYAPFASANATTQPAASSVAPAAAPVSTPNGLPDMRSIVANNAQAVVNISVTGTRKTGANLPGMPQLDPDDPLYQFFRRFGGQMPQDNEPTHGLGSGFIVTPDGTVLTNAHVVDGAEEVTVKLNDKREFKAKVLGLDKASDVAVLRIDAKNLPTVKIGSSTQTAVGEWVLAIGSPFGFESSASAGIVSAKSRNLPDGSYVPFIQTDVAVNPGNSGGPLFNMNGEVIGINSQIYSRSGGYQGLSFAIPIEVAMNVEKQIVTHGKVQRGKLGVTIQEVNQSLADSFGLPKPAGALVAAVEKGSPAAKAGLEPGDVILGIDGKTVETPGELPAAIATKLPGESARLQIWRKGGTQNIDVKVGSFGDEKVAANDTQPATKGRLGVAVRPLTPEERRQAEIKGGVLVEQADGAAGRAGIRPGDIIVSVNGQPIGDVEQLRSLIAKSGKKAAILIERGDSRLFVPVDLG

SEQ ID NO: 24153 - protein, 306 aa, Triticum aestivum
  misc_feature (35)..(35): Xaa can be any naturally occurring amino acid
  misc_feature (38)..(38): Xaa can be any naturally occurring amino acid
  misc_feature (103)..(103): Xaa can be any naturally occurring amino acid
  misc_feature (110)..(110): Xaa can be any naturally occurring amino acid
  misc_feature (120)..(120): Xaa can be any naturally occurring amino acid
  misc_feature (128)..(128): Xaa can be any naturally occurring amino acid
  misc_feature (224)..(224): Xaa can be any naturally occurring amino acid
  unsure (1)..(306): unsure at all Xaa locations
RGRVGRQSVAEARSKGITVRAMGITPPGTPTWSNXKVXQNLKGPFGPSANTGNLGSGFADEGYATGMFTQVGRPFYKSQERLCLTMGPPSKAGRFRRFSFHTXPKGYWGXECGQPGGYFXELTNIPPXKTVDQIYKVASIALSPNVPGQIFMGLMVNPPKPGDISYLKYSAESKSILESLRRRAQIMTDGFNSCRNVVCNFTEGAMYSFPQIRLPQRAMDVAKXAGKAPDVYYCLKLLEATGISTVPGSGFGQKEGVFHLRTTILPAEEDMPAIMSSFKKFGDSFMEQYPPPPEAVKREEDNRIYI

SEQ ID NO: 24154 - protein, 326 aa, Arabidopsis thaliana; identical to SEQ ID NO: 1138

SEQ ID NO: 24155 - protein, 327 aa, Arabidopsis thaliana
MTIGKSPILLHHHVIFLLLLVLQVSGQHQPRTTAPPYIAQRPNQVPAVIIAMLMFTLLFSMLACCVCYKYTNTSPHGTSSDTEEGGHGEVAFTRRTSRGLGKDVINSFPSFLYSQVKGLKIGKGGVECAICLNEFEDEETLRLMPPCSHAFHASCIDVWLSSRSTCPVCRASLPPKPGSDQNSLYPFIRPHDNQDMDLENVTARRSVLESPDVRLLDRLSWSNNTGANTPPRSRSTGLSNWRITELLFPRSHSTGHSLVPRVENLDRFTLQLPEEVRRQLSHMKTLPQARSSREGYRSGSVGSERRGKGKEKEFGEGSFDRLKAEMV

SEQ ID NO: 24156 - protein, 387 aa, Arabidopsis thaliana
MNSILSSVLPAPEDPVLSVYSKGFSSISLISFLDDPSPVKLNLSAGTYRTEEGKPLVLDVVRRAEQQLANDLSRDKEYLPLNGLPEFNKLSTKLILGDDSPALKENRVVTTQCLSGTGSLRVGAEFLATHNKESVIFVPNPTWGNHPRIFTLAGLSVQYFRYYDPKSRGLDFKGMLEDLGAAPPGAIVVLQACAHNPTGVDPTFEQWEKIRRLVRSKSLLPFFDSAYQGFASGSLDADAQAVRMFVADGGECLIAQSYAKNMGLYGERIGSLTIVCTSEDVAKKVENQVLLVVRPMYLTPPIHGASIVATILKNSDMYNDWTIELKGMADRIISMRQQLYAALEARGTPGDWSHIIKHIGMFTFTGLSEEQVRLMAKEYHIYMTYDG

SEQ ID NO: 24157 - protein, 594 aa, Synechococcus elongatus PCC 6301
MQPNDFQRRTKIVATIGPATSKPEVLRALIEAGASTLRLNFSHGTHDDHQRSIRLIRQISFELNRPVGILQDLQGPKIRLGRFADGPITVQKGDSFILTSRSVPGSQTISSVTYEPLADEVPEGATILLDDGRVEMTVVKVDRQTRELHCEVVVGGILSNNKGVNFPGVYLSVKALTDKDREDLIFGLDQGVDWVALSFVRNPQDVLEIKELISRAGKSVPVIAKIEKHEAIEQMEAVLSLCDGVMVARGDLGVELPAEEVPILQKRLIRTANRLGIPVITATQMLDSMVSNPRPTRAEISDVANAILDGTDAVMLSNETAVGKFPIEAVSTMATIAHRIEAEQQYITLNPTPTSSIPNAISQAVGHIAEQLDAAAIMTLTQSGATARNVSKFRPTTPILAVTPNIDVARQLQLVWGVQPLLVVDLPSTSQTFRAALNVAQERTLLKEGDLVVMTAGTLPGVSGSTDLVKVEIVTAVIARGIGVGQGSVSGKARVIHNAAEAATLAQGEILIATQTSADYIEAIRKASGIVTEEEGLTSHAAVIGLRLGIPVIVGVKNATSVVRDGSILTLDVKRGLLYSGAVGAVAAEQPISV

SEQ ID NO: 24158 - protein, 509 aa, Taxus cuspidata
MDVFYPLKSTVAKFNECFPAILFIVLSAVAGIVLPLLLFLRSKRRSSVGLPPGKLGYPFIGESLLFLKALRSNTVEQFLDERVKNFGNVFKTSLIGHPTVVLCGPAGNRLILANEEKLVQMSWPKSSMKLMGEKSITAKRGEGHMIIRSALQGFFSPGALQKYIGQMSKTIENHINEKWKGNDQVSVVALVGDLVFDISACLFFNINEKHERERLFELLEIIAVGVLAVPVDLPGFAYHRALQARSKLNAILSGLIEKRKMDLSSGLATSNQDLLSVFLTFKDDRGNPCSDEEILDNFSGLLHGSYDTTVSAMACVFKLLSSNPECYEKVVQEQLGILSNKLEGDEITWKDVKSMKYTWQVVQETLRLYPSIFGSFRQAITDIHYNGYIIPKGWKLLWTPYTTHPKEMYFSEPEKFLPSRFDQEGKLVAPYTFLPFGGGQRSCPGWEFSKMEILLSVHHFVKTFSTFTPVDPAEIIARDSLCPLPSNGFSVKLFPRSYSLHTGNQVKKI

SEQ ID NO: 24159 - protein, 189 aa, Pseudomonas syringae pv. phaseolicola 1448A
MACAARRCRLTSVLTFRSSHRLVLRPLLMSENLLSIPVTTIKGEQKTLADYAGKAVLVVNTASKCGFTPQYKGLEKLWLDYKDKGLVVLGFPCNQFGKQEPGDEGAISGFCELNYGVSFPLFKKIDVNGAQAHPLFVQLKQQAPGLLGTERIKWNFTKFLIGRNGALVKRFAPLTKPEELTGEIEALLR

SEQ ID NO: 24160 - protein, 332 aa, Bacillus clausii KSM-K16
MHTEALKWGILGTASIAKRAIIPGIAASASGEVVAIASRSLEKAQAFAAEHDIKTAYGSYEELLADEEIEAVYIPLPNHLHKEWVIKAAEAGKHVLCEKPIALHAEEAEEMKGACEQHRVVLAEAFMYRYQARYKDILAHIDNGDIGEIRGIRAVFTFNNASAFDNFRMKRAYGGGGLYDVGVYPLSLARLVFGEEPEAVTVHSFMPDSHDQVDMVAAGLVEFSNGRYLTFDCGMWAAFRDEAEIIGTKGRITIPTAFTNEANGYDLYTNDGHTHFCGNAVDHYALQADAFAATVRNEKPLPFSAEDAVLNMKVLDACLKSQLERKRIEVER

SEQ ID NO: 24161 - protein, 416 aa, Ehrlichia canis
MVKEAVLELDGQKVKLPVLCDTNGNKVIDITSLYKGTGILTYDPGFMSTAACESKITFIDGNKGILCYRGYNIADLVNNNKSFIEIVYLLFYGSFPSVDNLKDFMLQISQEYMPPEMVCDVIKSFSQDSHPMTILMACFSALASYYHDQAVDKDGLKHPKLAVAKVASIIAMIYRYTTNQDFIEPNHGLSYSENFIHMMFDISSYKFTQVVAKALDVIFTLHADHEQNASTATVRLAGSSGADLFACLVAGIATLWGPAHGGANEAVINMLMAIEKPSNVKQFIQKVKDGNKSTRLMGFGHRVYKNYDPRAKIICEICKEVLNDLGVNDPLLEIALELENIALQDSYFIERSLYPNVDFYSGIILKAIGIPVRMFTTLFALARTSGWSAQWYEMVADKNYKICRPRQLYTGHIAKI

SEQ ID NO: 24162 - protein, 648 aa, Prochlorococcus marinus subsp. pastoris str. CCMP1986
MTDFDTKKLNKKWTIEDSISTYGIDKWGEKYFSINSEGNISISPDNKSQKKIDLFKLVKEFKSREINTPLIIRFNDILKDRIAELNNAFSQAIETYDYKNIYKGVFPIKCNQQRNVLEKIIEYGDRWNFGLEVGSKSELLIGLSILENQKSLLICNGYKDKKYIETAILARKLGKHPIIVIEQRDEVKRIIEAVKDLKATPILGIRSKLSSKSSGRWSKSVGDNSKFGLSIPEIMLTIKELKEANLINEMMLLHFHVGSQISDISVIKDALQEASQIFVELSKLGAPMKYIDVGGGLGIDFDGTKMSSNTSTNYSLQNYANDVIATVKDSCEVNNIQHPIIISESGRAIISHCSVLIFNILGTSHVSSQVKVSDQKKQSLIITNLIETLNQIKNLRDKKEDLSEIIELWNDAKKFKEDCLVAFRLGFICLEERAYAEELTWACAKEIANQLENNEIIHPDLSEITDTLASTYYANLSVFKSIPDTWAINQVFPIIPIHRHLEEPFCKGHFADLTCDSDGKLNNFIDNGKIKSLLNLHPPEKNNDYLIGIFMAGAYQEALGNFHNLFGNTNVIHIDINEDNSYKIKNIIKENSKSEILELLDYSSDNLVESIRVNTESAINNKTLTIQEARKLIDQIETSLRKSSYLSE

SEQ ID NO: 24163 - protein, 197 aa, Bacillus cereus G9241
MDTNITWHTASVSKDERRVKNGHHSFVIWFTGLSASGKSTVANAVARKLFEKNIGNYVLDGDNIRHGLNKDLGFSESDRMENIRRIGEVAKLFVDQGTVVLTAFISPFRVDRKQVRDLLAADEFIEVFVKCPIEECEKRDPKGLYKKARKGDIKDFTGIDSPYEEPEKAELIVQTHKYSIEECAEQIVKYLQERSFI

SEQ ID NO: 24164 - protein, 306 aa, Thermus thermophilus HB8
MRFFVLGDVSVDLLFFLERIPEPGEEVPSRRALMKPGGAGGTLAAQLASLGHRVFLAGRVGKDPFAELALSRVREVGVDLRHLQEDPEHTTSSVLILVVPGGERAMVSAEGASRYLDPALFKPRFLDQVDAVVLSAYALVGGPSRSYAAEVLEAARRRELPVFADLGAGAVRAAGKELLKHLRGVGWLLMNEGELKTLTGASSISQGVARLRQEGFQHLAVKVGAMGSIVVTPEGEELIEPFPVEDIVDSTGAGDAYTAAFAHAILEGLSPVEAGRLANLAGALAATAIGAQGRLVTLEDLKVAAG

SEQ ID NO: 24165 - protein, 340 aa, Yarrowia lipolytica CLIB122
MLKLFRRNSKDEAKGHPMLANNNGLPVTDSPLSSFAVGVTEDKNSRCRRTMEDYHVAAHNICGTPDSGLFAVFDGHAGKQAAEYCATAVVSEVESLIMESEGFKSEDSATEDPEVVQEEGLEHQDNDKSSKTVPELLNLAFMAIDRSIEQKNLNSGCTAAVALLRWEDSRGKPVTVSSDHSPKDYTPVFPRAPLSECKRKLYTANVGDTRLILCRAGKALRLSYDHKGTDLHESKRVTNNGGMMISNRVNGMLAVTRALGDTYLKQFIIGNPYTTETEIIADDEFLIVACDGLWDVCDDQKACDLVSGLEDPVEGSRILVEFALENFSTDNLTVMVVKLR

SEQ ID NO: 24166 - protein, 527 aa, Bradyrhizobium sp. BTAi1
MTDRPTDLSSLPSYRQPWRGLFSARKFALMASVVAGLGVAAYGLSPQGAPLDLFSTSAHAQVANEVSKVARPVGFADIVERVKPSVISVKVNIAEKVAKNDSDDDTPFQPGSPMERFFRRFGGENGIPGMPGRGGRGGGRAVTGQGSGFFISADGYAVTNNHVVDGADKVEVTTDDGKTYSAKVIGTDQRTDLALIKVEGGSNFPFAKLADGKPRIGDWVLAVGNPFGLGGTVTAGIVSAVGRDIGNGPYDDFIQIDAPVNKGNSGGPAFDVDGNVVGVNTAIYSPSGGSVGIAFSIPASTVKSVIAQLKDNGSVSRGWIGVQIQPVTQDIADSLGMKKAEGALVAEPQADGPAAKAGIRSGDVITSVNGEPVKDARELARTIGGLAPGASVKLNVLQKGQEKTISLTLGKLPNTIEAKADTGGDNSSPTRGADVPKLGMTVAPASSVAGAGKEGVVVTEVDPKSAAADRGFKEGDVILEVAGKSVTSAGDVREAINAARNDNKNSVLMRVKSGGQSRFVAVPLAKG

SEQ ID NO: 24167 - protein, 385 aa, Zea mays
MSALVDALCAPPSDTALVYDTFNAANFLFDAAAFCDGAGIVAAPASAHQAPVEAQAATTSAAPTTTARARKRRRRPRSCKSREETETQRMTHIAVERNRRRQMNEYLAALRSIMPEAYVQRGDQASIVGGAIEFVKELEQQVQCLEAQKRKLLVHQRVAAAKPADATPMRASSSGARACCADSAAAAATTSNCSSGLTTEDAAADHALPPPPFAQFFTYPQYVWCHSAARDPAEEEDGRRSGVADVEVTLVETHASVRVMTARRPGQLLSLVTGLQALRLAVLHLSVVTALDALVLYTTSVKQPSGLRPWPMGHRACAPFTRLVRAAAACRRFNHGVLAVAVLLQVEEGCGLATADDIAAAVHHVLCIIDAEATEQQLLAAAGPQ

SEQ ID NO: 24168 - protein, 625 aa, Xanthomonas axonopodis pv. citri str. 306
MANERPAQQSDIKLLISKGLEQGYLTYAEVNDHLPDDLVDPEQIEDIISMINGMGIDVHEVAPDAETLLLNDGNTGNREVDDTAAEEAAAALTALDTEGGRTTDPVRMYMREMGTVELLTREGEIAIAKRIEEGLSQVQAALGVFPLSTEMLLADYEAHKEGKKRLAEIVVGFNDLIEEADAAAAALAAAGPVAVSDDEAVDEDDDEDGDDEAAEEEAGPTGPDPVEVATRMENLANEYAKFKKVYAKNGAEHKLVVKAREDMAAIFTTLKLPLPLTDALVTQLRGVVNGIKDHERKVLHLATTVARMPRKDFIRSWEGNQTNLEWVEDALKRKQKWSSALRDVKDQIISEQQGSIEMEKANYLTLGEIKEISRAMAYGEAKARKAKKEMVEANLRLVISIAKKYTNRGLQFLDLIQEGNIGLMKAVDKFEYRRGYKFSTYATWWIRQAITRSIADQARTIRIPVHMIETINKLNRISRQMLQQFGREATPEELAKEMDMPEDKIRKVMKIAKEPISMETPIGDDEDSHLGDFIEDTNVESPIDNTTNINLSETVRDVLAGLTPREAKVLRMRFGIDMNTDHTLEEVGKQFDVTRERIRQIEAKALRKLRHPSRSEQLRSFLDID

SEQ ID NO: 24169 - protein, 128 aa, Photorhabdus luminescens subsp. laumondii TTO1
MAYSEKVIDHYENPRNVGSFDSEDPMVGSGMVGAPACGDVMKLQIKVNNEGIIEDARFKTYGCGSAIASSSLVTEWMKGKSLEQAEAIKNTEIADELELPPVKIHCSILAEDAIKAAIADYKSKRQGR

SEQ ID NO: 24170 - protein, 226 aa, Xanthomonas campestris pv. vesicatoria str. 85-10
MTHSAALPFRPQAVIFDMDGLMLDSERAITACLAQAADDQGLQIEPAFWLRMVGTGDAACRRLLGERIGEAAADTMLAHAQRLYAAAVERGIPHRPGIVALLDYLAAQRMPRAVATSTQRPLALRKLEAADLLWRFDAVCTASDVVHPKPAPDIYLLAARTLAVDPAHCLVLEDSPTGVRAALAAGMTPIQIPDLLEPDATVRALGHRILPSLSDAQRLLEARLSG

SEQ ID NO: 24171 - protein, 330 aa, Escherichia coli O157:H7 EDL933
MSQNTLKVHDLNEDAEFDDNRVEVFDEKALVEEEPSDNDLAEEELLSQGATQRVLDATQLYLGEIGYSPLLTAEEEVYFARRALRGDVASRRRMIESNLRLVVKIARRYGNRGLALLDLIEEGNLGLIRAVEKFDPERGFRFSTYATWWIRQTIERAIMNQTRTIRLPIHIVKELNVYLRTARELSHKLDHEPSAEEIAEQLDKPVDDVSRMLRLNERITSVDTPLGGDSEKALLDILADEKENGPEDTTQDDDMKQSIVKWLFELNAKQREVLARRFGLLGYEAATLEDVGREIGLTRERVRQIQVEGLRRLREILQTQGLNIEALFRE

SEQ ID NO: 24172 - protein, 309 aa, Oryza sativa
  misc_feature (40)..(40): Xaa can be any naturally occurring amino acid
  misc_feature (78)..(78): Xaa can be any naturally occurring amino acid
  misc_feature (90)..(90): Xaa can be any naturally occurring amino acid
  unsure (1)..(309): unsure at all Xaa locations
ARFAATTSARSARVGALLLSAVRILVVSGLSCHVAAGAAXGVAGSAGAAARAPPPLMPPDAVMRELPPPVPYVFTPQXPVAPLHIPTEFXPVFNNSWINESDESTNNHPQEKGIPTLISWSQGGNEVFVEGSWDNWTSRRVLEKSGKDHTILLVLPSGVYHYRIIVDGEPKYVPELPHVADEGGQVANLLDVHDYIPESLGSVAGFDSPPSPEHSYDLQLPGDEEFPKEPPILPPQLVMSVLGDTDNSEEQTLKPKHVVLNPLYIEKGWGSQSLLALGVTPRFQSKYVSFVLYKPLRRSSTAKRPKNGG

SEQ ID NO: 24173 - protein, 283 aa, Schizosaccharomyces pombe
MADDTAYILSEYLQTLDNVPNETKHIFDEISVKEVAVHDIWKRIQAADSQIQSYIKSHGSLTPHPKEDALYSTIREEYQKAINIQNEKVQLADRARLGLTRHIKRLDDRLAKAGHGFTAAELLNAPDYYASSPYGGYSPSGASSARQTPAPSRSGASTAGRRRTSATTRGAIQNGVYHSPYTASLADSGSTRGQKVSNATATTQLETKADSTTPNEMVSEEDMEEDNEKYCFCQQGSYGQMVACDNANCEREWFHMECVGLKAPPEGTWYCEACRDQKLVDAK

SEQ ID NO: 24174 - protein, 553 aa, Photorhabdus luminescens subsp. laumondii TTO1
MDKIIPWWLQGVIYQIYPKSFQDTTGSGTGDLNGITYRLDYLKKLGVDAIWVTPFYLSPQVDNGYDVADYYAIDPAYGSMDDFKRLVDEAHQRDIRIIVDIVFNHTSTQHPWFKQAQDIDSPYRQYYIWRDGVPGTPPNNWLSKFGGNAWAWHEASQQYYLHLFAVEQADLNWEHEPVRAELKKICEFWAGLGVDGFRLDVINLVSKQQDFPESTQGDGRQFYTDGPRIHEFLQEMNREVFQPAGVMTVGEMSSTSLEHCHRYSSLDGEELSMVFAFHHLKVDYPNGEKWVAAPPDFIELKKIFAKWQQGMYERAWNALFWCNHDQPRIVSRFGGEGVWRVPSAKMLAMVLHGMQGTPYIYQGEELGMTNPHFSHIEEYRDIESLNIYQEKIEQGNDKQQILSVLAKKSRDNGRTPMQWDTTANAGFTQGEPWIALNSDYQDVNAENAMQDDDSVFHCYARLIKLRKEYPVLTYGSYEDLLPSHPSLWCYVRRWENQTLLVIANLSVEVQKWSLDASLSDCSWVKLMGNYPENHVPAKDMQLQPYEAVYWLAE

SEQ ID NO: 24175 - protein, 525 aa, Burkholderia vietnamiensis G4
MRILRFIKIVYTVIRFGLDEVMLSRIDDRRVKLLLRITTIGRRYSSPPAVRLRHALESLGPIFVKFGQVLSTRRDLLSVDFANELAKLQDQVPPFDSAVAIAIIEKSLGAPVDELFDEFEREPVASASIAQVHFAKLKQGVHAGKAVAIKVLRPNMLPVIDSDLALMRDIATWAERMWADGRRLKPREVVAEFDKYLHDELDLMREAANGSQLRRNFAGLDLLLVPEMFWDFSTSQVLVMERMTGVPISQVETLRSAGVDIKKLAREGVEIFFTQVFRDGFFHADMHPGNIQVSLDPNTFGRYVALDFGIVGALSDFDKNYLAQNFLAFFKRDYHRVATLHLESGWVPPETRVEELESAIRAVCEPYFDRALKDISLGQVLMRLFSTSRRFNVEIQPQLVLLQKTMLNVEGLGRSLDPELDLWKTAKPYLERWMTEQIGLRGWYERFKVEAPQWSKTLPQLPRLIHHALAERQDGTRAASDDLMRQILLEQKRTNRLLQALLIFGLAVGVGALVARVLLALTYGA

SEQ ID NO: 24176 - protein, 149 aa, Triticum aestivum
  misc_feature (6)..(6): Xaa can be any naturally occurring amino acid
  unsure (1)..(149): unsure at all Xaa locations
IGQGEXVDHLWRGQMGLSEEEQRKALESKHVTNGVTEDGAHESPEETTNGSACNPVAAGGCCQGNGGFTCCQSDLPKEDKSITAEQNQKSSEKGADKECAAGSKKRHMKMCSMPTWFETWETADTYAALGIVAAAASVFVAFRIYKNLN

SEQ ID NO: 24177 - protein, 418 aa, Arabidopsis thaliana
MNSFSQVPPGFRFHPTDEELVDYYLRKKVASKRIEIDIIKDVDLYKIEPCDLQGLAGKSYHLSLVVISLFWYKLRLTILCKIGNEEQSEWYFFSHKDKKYPTGTRTNRATKAGFWKATGRDKAIYIRHSLIGMRKTLVFYKGRAPNGQKSDWIMHEYRLETSENGTPQEEGWVVCRVFKKKLAATVRKMGDYHSSPSQHWYDDQLSFMASEIISSSPRQFLPNHHYNRHHHQQTLPCGLNAFNNNNPNLQCKQELELHYNQMVQHQQQNHHLRESMFLQLPQLESPTSNCNSDNNNNTRNISNLQKSSNISHEEQLQQGNQSFSSLYYDQGVEQMTTDWRVLDKFVASQLSNDEEAAAVVSSSSHQNNVKIDTRNTGYHVIDEGINLPENDSERVVEMGEEYSNAHAASTSSSCQIDL

SEQ ID NO: 24178 - protein, 76 aa, Brassica napus
MNLSMRLISAVLLFMIFVATGMGPVTVEARTCESKSHRFKGTCVSSTNCGNVCHNEGFGGGKCRGFRRRCYCTRHC

SEQ ID NO: 24179 - protein, 504 aa, Physcomitrella patens
MSDPYGRRLLVDDFHVGPVLGTGGFSVVRAGVRKQDNLQVAIKTLKKFGYGRGDHGRPGAQMSQAEALVKNEIMVMMRIVDEVSPHPNVIHLIDVYEDDGAVHLVLELCRGGELFDRIVQHERYSERDAAKVVRQIASGLAALHQAQIVHRDLKPENCLYVNPLAEAPLKIMDFGLSYIHHNTNSIVGIFGSIDYMAPEQLSLSGIMPANDMWSLGVILYILLCGYPPFRARSSRDKQMQILTGSYSMEEESWRGISHEAKQLIRRLLSVDPFARPTARELLSHPWVSGDIANRDLLHKDVFMRLQHFNARRKFRATAYASIVRTKFLLRTRYLKELLGDRVLTDSELEALRVNFMRISSNGQTATLKEFEEVLRSINLHCFVPLAPRIFELFDYNHDGGIDLREVVCGFSLLRTSHLDDALQMCFKIYDRDDSGYISKGELARVLGALPEDYLPADISQVQMDDIFEHVDTDSDGRISYQEFRRALSLQDAVMNHFRMEGQVQ

SEQ ID NO: 24180 - protein, 621 aa, Triticum aestivum
  misc_feature (161)..(161): Xaa can be any naturally occurring amino acid
  misc_feature (209)..(209): Xaa can be any naturally occurring amino acid
  unsure (1)..(621): unsure at all Xaa locations
MWRGCVSRGLSKAKASASRLFSTTSSSYTVVDHSYDAVVVGAGGAGLRAAIGLSEHGFNTACITKLFPTRSHTVAAQGGINAALGNMSEDDWRWHMYDTVKGSDWLGDQDSIQYMCREAPKAVIELENYGLPFSRTEDGKIYQRAFGGQSLDFGKGGQAYXRCACAADRTGHAMLHTLYGQAMKHNTQFFVEYFALDLLMDNEGNCQGXVIALNMEDGTLHRFRATNTILATGGYGRAYFSATSAHTCTGDGNAMVARAGLPLQDLEFVQFHPTGIYGAGCLITEGSRGEGGILRNSEGERFMERYAPTAKDLASRDVVSRSMTMEIREGRGVGPLKDHIYLHLNHLPPEVLKERLPGISETAAIFAGVDVTKEPIPVLPTVHYNMGGIPTNYHGEVVDIKGDNPDAVIPGLMAAGEAACASVHGANRLGANSLLDIVVFGRACANRVAEISKPGDKQKPLEKGAGEKTIAWLDKLRNANGSLPTSKIRLNTQRIMQNNAAVFRTQETLEEGCQLISKAWESYHDVKISDQSLIWNSDLIETIELENLLINACITMYSAEARKESRGAHAREDFTTRDDERWMKHSLGYWENEKVRLAYRRVHMNTLDDEIESFPPKARVY

SEQ ID NO: 24181 - protein, 118 aa, Brassica napus
  misc_feature (109)..(109): Xaa can be any naturally occurring amino acid
  unsure (1)..(118): unsure at all Xaa locations
MAETPVAVEAPTPVLGEPMDLMTALQLVMKKSGAHDGLVKGLREAAKAIEKHAAQLCVLAEDCDQPDYVKLVKALCSEHNVHLVTVPSAKTLGEWSGLCKIDSEGKARXVVGCSCVVV

SEQ ID NO: 24182 - protein, 279 aa, Erwinia carotovora subsp. atroseptica SCRI1043
MSQAERSTLRGQCIAEFLGTGLLIFFGVGCVAALKLAGASFGQWEISIIWGLGVAMAIYLTAAISGAHLNPAVTIALWLFACFDGRKVLPYIVAQIAGAFCAAALVYGLYYNLFVDFEQTNNMVRGSTESLSLASIFSTYPNPHISVMQALLVETVITAILMCLILALTDDGNGIPRGPLAPLLIGILIAVIGASMGPLTGFALNPARDFGPKLFAFLAGWGNVAFTGAREIPYFLIPIFGPIIGACLGAFGYRALIGRNLPCDVCEPEAEATTRRESR

SEQ ID NO: 24183 - protein, 754 aa, Campylobacter jejuni subsp. jejuni NCTC 11168
MKNSIISYPRIGANRELKFAIEKYFKNQSSKEELLKSAKDLRIRHWQEIQKAGIDFIPSNDFSLYDNVLDAAVLFNIVHTKYKNLNLDALDEYFAQSRGYQGENGDVTALAMKKWFNTNYHYLVPECDNADIIALTGDKIFKEYLEAKELGIESKPVLIGIFTLFKLIAFKDEKTQKLAKEKLLNAYIELFDKLNELKVTWLELDEPYLVYDLSKEDIALFEEFYQELLNHKKDLKILLQSYFGDLRDIYPKLLESKFDALGLDFIEGKQSLALVQQYGFAKDKILFGGLINGKNIYANDYAKSLKLIKELQKYTQNIILNTSCSLLHVPYSTEFESKLDSSYLKLFAFAKEKLQELKDLKEILNSSEENPLFRANQELFKNIPERLDEKVKARLKALKKEDFTRTPSFKERALIQKEFLKLPLLPTTTIGSFPQSADVRSNRLAFKQEKISAQNYTEFNQQKIKECIQIQEEIGLDVLVHGEFERNDMVEYFGENLKGFLFTQNGWVQSYGTRCVKPPVIWGDVSRTKPITLAWSKFAQSLSQKIVKGMLTGPVTILNWSFPREDISLKESTEQIALAIRDEVLDLENAGIKIIQIDEAALREKLPLRKSDWHSEYLDWAIPAFNLVHSGVKAKTQIHTHMCYSEFSDILKEIDAMDADVISFEASRSNLSLLDTLKAIRFKTEVGPGVYDIHSPRVPSVEELSLTIEKILNKLPKEQIWINPDCGLKTRAYEEVITSLKNLVTATQKIREQL

SEQ ID NO: 24184 - protein, 602 aa, Arabidopsis thaliana
MAASSSSAASFFGVRQDDQSHLLPPNSSAAAPPPPPPHHQAPLPPLEAPPQKKKRNQPRTPNSDAEVIALSPKTLMATNRFICEVCNKGFQREQNLQLHRRGHNLPWKLKQKSTKEVKRKVYLCPEPSCVHHDPSRALGDLTGIKKHYYRKHGEKKWKCDKCSKRYAVQSDWKAHSKTCGTKEYRCDCGTLFSRRDSFITHRAFCDALAQESARHPTSLTSLPSHHFPYGQNTNNSNNNASSMILGLSHMGAPQNLDHQPGDVLRLGSGGGGGGAASRSSSDLIAANASGYFMQEQNPSFHDQQDHHHHHQQGFLAGNNNIKQSPMSFQQNLMQFSHDNHNSAPSNVFNLSFLSGNNGVTSATSNPNAAAAAAVSSGNLMISNHYDGENAVGGGGEGSTGLFPNNLMSSADRISSGSVPSLFSSSMQSPNSAPHMSATALLQKAAQMGSTSSNNNNGSNTNNNNNASSILRSFGSGIYGENESNLQDLMNSFSNPGATGNVNGVDSPFGSYGGVNKGLSADKQSMTRDFLGVGQIVKSMSGSGGFQQQQQQQQQQQQQQQHGNSRERVGSSSDSADRSSMNVNTGGGPASTSPPYGIHHASF

SEQ ID NO: 24185 - protein, 451 aa, Chlamydomonas reinhardtii
MREVISIHIGQAGIQVGNACWELYCLEHGIQPDGQMPSDKTIGGGDDAFNTFFSETGAGKHVPRCIFLDLEPTVVDEVRTGTYRQLFHPEQLISGKEDAANNFARGHYTIGKEIVDLALDRIRKLADNCTGLQGFLVFNAVGGGTGSGLGSLLLERLSVDYGKKSKLGFTVYPSPQVSTAVVEPYNSVLSTHSLLEHTDVAVMLDNEAIYDICRRSLDIERPTYTNLNRLIAQVISSLTASLRFDGALNVDITEFQTNLVPYPRIHFMLSSYAPIISAEKAYHEQLSVAEITNAAFEPASMMVKCDPRHGKYMACCLMYRGDVVPKDVNASVATIKTKRTIQFVDWCPTGFKCGINYQPPTVVPGGDLAKVQRAVCMISNSTAIGEIFSRLDHKFDLMYAKRAFVHWYVGEGMEEGEFSEAREDLAALEKDFEEVGAESAEGAGEGEGEEY

SEQ ID NO: 24186 - protein, 388 aa, Glycine max
MQKRREESDKIPVKRDSASSLPQPQSLVLFTSPFSPFPFLLPLSFAKWVIISFSHNTIFFTFSFFFASLRWGFKFHHRNRMFSRLIHPHEGQEDMQGGSNHAHLGDPCLVLTSDPKPRLRWTADLHERFVDAVTQLGGASKATPKAIMRTMNVKGLTLYHLKSHLQKYRLGKQSGKDSDEGLKDGMSASYLQESPGTDNSSPKLPASDANEGHEVKEALRAQMEVQSKLHLLVENYEKHLQIRQDAERRYMGMLERACKMLADQFIGDVIIDRDGQKFQGLENKTSRSPLVDHGGFFPAACTEVGGMHVSEVPPILQPQGAECSSESCLKSLESLGGLTLEGSPGGSKKRMLNLDSMVAPLIWSEANTRTQGIHLAQVNPPGMTRYGM

SEQ ID NO: 24187 - protein, 305 aa, Zea mays
  misc_feature (43)..(43): Xaa can be any naturally occurring amino acid
  unsure (1)..(305): unsure at all Xaa locations
MEDERNTQQHQGGEAQQDAADQVDVKDRGLLDSLLGRKKHDDXEKKNQQEEEELATGMEKVTVSEPEKHGHKEEEHEVVGEKKEGLLAKLHRTSSSSSSSSDDEEEEVIDENGEIVKRKKKGLKEKLKEKLAAHKAHDEGDHHQPGVPAPAPAPPVAVDTHAHHQEEAHRPHVVPTPAPPPPPHVETHHPVVVHKIEDDDTKTQTPPQAPEEEKKGLLDKIKEKLPGGHNKKPEAAAAAAPAPPVHAPPPPAPHAEVDVSSPDGKEKKGLLGKIMDKIAGYHKSSGEEADHKADAAGEHRTSSSN

SEQ ID NO: 24188 - protein, 368 aa, Erwinia carotovora subsp. atroseptica SCRI1043
MMSQLAAPHVTTPHQDGFAMPAEWAPHDAVWMIWPYRTDNWREQGVPAQKTFARVAEAIAQNTPVIMGVPARYMADAQKVMPVNVTLVEMESDDAWMRDTGPTIVLNQAGERRGIDWQFNAWGGELGGLYEDWRQDEKVAAQVLDYHQAAGYAAPLILEGGSIHVDGEGTLLTTAECLLNPNRNPHLSKAEIEQLMRDYLSISTIIWLEEGVYNDETDGHIDNMCCFVRPGEVALHWTDDENDPQYARSVAAYEVLSAARDAQGRELKIWKLPAPGPLHATKEEAQGVDSGDAVERLAGSRLAGSYVNFLISNQQIIFPLLDEKTDDVARDLLQQMFPDYLISGVPAREILLGGGNIHCITQQIPTAK

SEQ ID NO: 24189 - protein, 189 aa, Triticum aestivum
FIIANLAAFQFQACNATAPPAALRATTAPACSCCRRSYDPRATHGQYDLASLSDMVAPYTDYNGGNPAVGWAPPEVDSVDDDGRAARRGNGDERKTRRLASNRESARRSRVRKQRRLDELSSRAARLRAANQRLLVELNRVLAEHGRVARESARLREEASELRGKLDGMGVDEAADVAPQSTKGTGNTA

SEQ ID NO: 24190 - protein, 590 aa, Bacillus clausii KSM-K16
MNKLRNRFIFSIMLVITLVLLVLGLTLGSWSNERYVDFVSERVKNEAALAVWAVMRDGYPNSTQAQQIAEEIGTEIEARLTIIDAEGNVIGDSWADPKEMENHLDRPEIQRARLDDELELRFSETIGEELLYYALPLEEGREMFGYVRVGVSVEPLNHMNRTVWTVIGVSFLGAFIFILFLITRITKQIIHPIDQATKAAIRLAEGDYQTRTYEDHHKELGLLGRSINALAYNLEQLSRRHQAQQDRMAALIDHMGSALLFMNVRGDVVLLNQTTEQVFEVDSSDWLSKPYYHVFPSQPLIQFVQLVYMTEKKQRSLIEWTKHFSTRVYDVYGAPVMADSGRLRGVTLVMHDITEQKKLEQVRKDFVANVSHELKTPVTSIKGFAETLLDGAIDDPVLSKQFTEIIWKESDRLQMLIVDLLELSKIENAQFKLDLEDMSLKDITEDVFELVRGKAEEKGMHLHIQEQGSSVIEGDWQRLKQVVLNLVSNAISYTPSGGHVTVALKEQKDAVVLKVQDTGIGIDPKETLRIFERFYRVDRARSRNSGGTGLGLAIVKHLAEAHHAKIEVQSEEGKGTEFSLTFPKKQPSTL

SEQ ID NO: 24191 - protein, 303 aa, Cicer arietinum
GVALAGLLGTVRSQGRPLSDFVNQKIVVAGAGSAGLGVLKMAINAVAKISGCSETAAKSQFFLIDKNGLVTTERNNLDPAAAPFAQNPRDIDGLTEGASIVEVVKKVKPHVLLGLSGVGGIFNEEVLKAMRESVSTKPAIFAMSNPTMNAECTAIDAFNHAGEHIVFASGSPFENVDFGNGNVGHVNQANNMYLFPGIGLGTLLSGAHLITDGMLQAAAECLASYMSEEDILKGILYPSVDSIRDVTAEVGAAVLRAAVEEDLAEGQGDVGPRELAHMSKEETVEYVRRNMWFPVYSPLVHEK

SEQ ID NO: 24192 - protein, 452 aa, Pseudomonas putida KT2440
MSEQNSQTLAWQTMSRDHHLAPFSDVRQLAEKGPRIITSAKGVYLWDSEGNKILDGMAGLWCVAVGYGREELAEVASQQMKQLPYYNLFFQTAHPPALELAKAIAEVAPQGMNHVFFTGSGSEGNDTVLRMVRHYWALKGQKNKKVIIGRINGYHGSTVAGAALGGMSGMHQQGGVIPDVVHIPQPYWFGEGGDMTEADFGVWAAEQLEKKILEVGVDNVAAFIAEPIQGAGGVIIPPQTYWPKIKEILARYDILFVADEVICGFGRTGEWFGTDYYDLKPDLMTIAKGLTSGYIPMGGVIVRDEVAKVISEGGDFNHGFTYSGHPVAAAVGLENLRILRDEQIIQQVHDKTAPYLQQRLRELADHPLVGEVRGLGMLGAIELVKDKATRARHEGKGVGMICRQHCFDNGLIMRAVGDTMIIAPPLVISIEEIDELVEKARKCLDLTYEAVR

SEQ ID NO: 24193 - protein, 557 aa, Xanthomonas oryzae pv. oryzae KACC10331
MSSAAPPSCTSLLGLSLSMFVAPCTLTAAPLDTPVVNAPAPTPPTPDQAYPELFQAVQSGELFDDQKHFVDFLPLRDPALINADYLAQHDHPGFDLRKFVDANFEESPPVQTDAIRQDTALREHIDLLWPKLVRSQNHVPPYSSLLSLPHPYVVPGGRFREVYYWDSYFTMLGLVKSGQTTLSRQMLDNFAYLIDTYGHIPNGNRSYYLSRSQPPFFSYMVELQAGVEGQAVYQRYLPQLQKEYAYWMQGSDDVQPGQAARHVVRLADGSVLNRYWDERDTPRPEAWLHDTRTAAEVKDRPAAEVYRDLRAGAESGWDYTSRWLADGQNLRTIRTTAIIPIDLNSLLYHLERTLAQACAQPGAACSRDYAALAQQRKQAIDAHLWNKAGYYADYDWQTRTLSDQITAAALYPLFAGLASDDHAKRTASTVRRTLVRPGGLATTAVKTGQQWDEPNGWAPLQWVAVDGLRRYGEQALARTIGERFLAQVQALFAREHKLVEKYGLETNAAGGGGGEYALQDGFGWTNGVTLMLLNLYPGKGAKAAPAKRVRKTEAAAR

SEQ ID NO: 24194 - protein, 463 aa, Thermosynechococcus elongatus BP-1
MDVLLRRLDVEGWRSHSGVGRLLGLLQGWQEKSWLGRWLPSLAVLLVGLVLVLAPLMPSGMIGMLLAAGSGFWLLWTLAGEREGRWSGVHLLVLLYWGIALLATVLSPVPRAAMVGLGKLTLYLLFFALAERVMRNERWRSRLLTVYLLTALMVSVEGVRQWIFGAEPLATWTDPESALANVTRVYSFLGNPNLLAGYLLPSVPLSAAAIAVWQGWLPKLLAVVMLGMNAASLILTFSRGGWLGLVAATIAGVVLLGIWFWPRLPLQWRRWGVPTMGGLAIALCMGTIVSVPPLRERAASIFVARGDSSNNFRINVWMAVQQMIWARPWLGIGPGNVAFNQIYPLYQVNVRFTALGAYSIFLEILVEVGFIGFGVFLWLLAVLGDRARRCFEELRATGSPQGFWLMGTIAAMIGMLTHGLVDTIWFRPEVATLWWLMVAIVASFTPFQSKTANGTFSNRDPEP

SEQ ID NO: 24195 - protein, 458 aa, Xanthomonas oryzae pv. oryzae KACC10331
MSDPSAPDHLQRSLSNRHLQLIAIGGAIGTGLFMGSGKTISLAGPSILFVYLIIGAMLFFVMRAMGELLLSNLEYKSFIDFSTDLLGPWAGFFCGWTYWFCWIITAIADVIAIAAYAQFWFPGLAPWIPAVLCVLLLLSLNLVKVKLFGEMEFWFALIKIIAIAALIMTGAGLVVWGFRSPSGNVASLSNLWNDGGMFPMGIGGFFAGFQIAVFAFVGIELVGTTAAETADPRRNLPKAINSIPVRILIFYVLALIAIMAVTPWRQVVADKSPFVELFVLAGVPAAASLINFVVLTSATSSANSGIFSTSRMLYGLAEEQHAPNGFAKLSRASVPARGLLFSCLCLLLGAMLVYLIPNLVTAFTLVTTLSAVLFMFVWSLILCAYIAYRRKCPEQHAVSAFKMPGGVLMCYVCLSFFAFVIVLLMLQDDTRQALLASPVWFLLLAIGYAVKRRQNRQR

SEQ ID NO: 24196 - protein, 1239 aa, Rhodospirillum rubrum
MFGMSDLASLRLSLRREPLRDEAAVVADRLAALPLDADRRQAVSEAGRALVERMRASGEVTMMDNMLAEYGLSTDEGVALMCLAEAYLRVPDAPTLDALIKDKIGGRDWAEHAGESGSMLVNASTWGLMFTGRLYGESWAEDTLLGSVRKMVRRVGEPVVRTAVAQCMKIMGAQFVLGRTIDEAWRNGGPLIEKGYTYSFDMLGEAARTAADATHYFKAYANAIAAVGARATQADVHANSGISVKLSALHPRYEEVNRARVMAELVPRLSALAEMAAAVNVGMTVDAEEADRLDLSLSVMEAVLRNPNLAGWGGFGIVVQAYLKSTLPTIDWIIALARDLDRQLAVRLVKGAYWDAEIKTAQSLALPAYPVFTRKASTDVSYMASAARLLGAQDHIYPMFAGHNAHTASAVLEMAGPDAVFEFQRLHGMGETLHELLRRDHGHRCRIYAPVGVHKDLLAYLVRRLLENGANSSFVNQALDKDVPAAELTRDPATVVAQASSVAHAGIPLPPALFGAERANSKGWNLNNPLMAAELDERLTPFRAARWSAAPMIGATPPRSGGEAVTNPADRDETVGFVVSATANDVTVALETTTRAFPNWRDRAPAERAALLDRIAALYEEHAPELIALLSREAGKTRWDGILEVREAVDFCRYYAARSRADLAGSGRKGRGVFVCISPWNFPLAIFTGQIAAALVSGNTVIAKPAEQTPLIAARAVALMREAGVPPEVLALLPGEGASVGAALTASPLVAGVCFTGSTETAIAIDRAQASAGTGGAPLIAETGGLNAMIVDSTALPEHAVRDIVAGAFQSAGQRCSALRALFVQEDIADHLLTMLAGAVQELVVGNPWEAVTDVGPVIDAEAKAVITRHCEALTAAGRRLFVHDKAKAAKGGGFVAPVAFSLDRFEDLKSEIFGPVLHVIRFRNTEIDAVVDSINAAGYGLTLGIHSRVDAQVERICSRARVGNIYVNRNQIGAVVGVQPFGGEGLSGTGPKAGGPGYLERFTIAAPVALPEVALPASHGEDAAAENALDAARWAASVQPAWDGRSDRLAILEAALRALPEAARPTASAVLDLAKPLVAPPLDLVGVTGESNRLALHGRGVVLCLGGGERPATALLAQALLGLAAGNAVLLAGDPGAGVIAALRKALAEAGLSAGLVQSIVASDLPGLLREMPRLALVAHEGGVGGEGLRVALAARSGARVPLVALVDGVGRYVSERVVSIDTTASGGNASLLMLDEG

SEQ ID NO: 24197 - protein, 263 aa, Candida albicans SC5314
MGLKCTNYFENSKYESPNIQIITCKGCSSHLCLSDLILSDNFNGASGPAYLVEDLINIEFNLQSEETPMKTGVYKINKVKCHQCKNQLGWYYKKSYSFAETYKEGKFVIERKFINFTDNLTTTQLLTERALQNKFKRRYSNNSTNSSTSNTSNSSTISNNSISDLEIDESGSPQHESFLTKEKFKLLNRRRSSGTNGNINATLLNHLRIPYHSIRNEGRNGAEEEEDDDDDDEDHHEHVNIVSGTTTTSRPSNIDDDDIFVDA

SEQ ID NO: 24198 - protein, 585 aa, Glycine max
MADEPLYPIAVLIDELKNDDIQLRLNSIRRLSTIARALGEERTRRELIPFLSENNDDDDEVLLAMAEELGVFIPYVGGVEHASVLLPPLETLCTVEETCVRDKAVESLCRIGSQMRESDLVEYYIPLVKRLAAGEWFTARVSACGLFHIAYPSAPETSKTELRSIYSQLCQDDMPMVRRSAASNLGKFAATVEYAHLKADVMSIFDDLTQDDQDSVRLLAVEGCAALGKLLEPQDCVAHILPVIVNFSQDKSWRVRYMVANQLYELCEAVGPEPTRTELVPAYVRLLRDNEAEVRIAAAGKVTKFCRILNPDLAIQHILPCVKELSSDSSQHVRSALASVIMGMAPVLGKEATIEQLLPIFLSLLKDEFPDVRLNIISKLDQVNQVIGIDLLSQSLLPAIVELAEDRHWRVRLAIIEYIPLLASQLGVRFFDDKLGALCMQWLQDKVHSIREAAANNLKRLAEEFGPEWAMQHIIPQVLEMNNNPHYLYRMTILRAISLLAPVMGPEITCSNLLPVVLAASKDRVPNIKFNVAKVLESIFPIVDQSVVEKTIRPCLVELSEDPDVDVRFFSNQALQAIDHVMMSC

SEQ ID NO: 24199 - protein, 570 aa, Schizosaccharomyces pombe
MSSEKVLVGEYLFTRLLQLGIKSILGVPGDFNLALLDLIEKVGDETFRWVGNENELNGAYAADAYARVKGISAIVTTFGVGELSALNGFAGAYSERIPVVHIVGVPNTKAQATRPLLHHTLGNGDFKVFQRMSSELSADVAFLDSGDSAGRLIDNLLETCVRTSRPVYLAVPSDAGYFYTDASPLKTPLVFPVPENNKEIEHEVVSEILELIEKSKNPSILVDACVSRFHIQQETQDFIDATHFPTYVTPMGKTAINESSPYFDGVYIGSLTEPSIKERAESTDLLLIIGGLRSDFNSGTFTYATPASQTIEFHSDYTKIRSGVYEGISMKHLLPKLTAAIDKKSVQAKARPVHFEPPKAVAAEGYAEGTITHKWFWPTFASFLRESDVVTTETGTSNFGILDCIFPKGCQNLSQVLWGSIGWSVGAMFGATLGIKDSDAPHRRSILIVGDGSLHLTVQEISATIRNGLTPIIFVINNKGYTIERLIHGLHAVYNDINTEWDYQNLLKGYGAKNSRSYNIHSEKELLDLFKDEEFGKADVIQLVEVHMPVLDAPRVLIEQAKLTASLNKQ

SEQ ID NO: 24200 - protein, 465 aa, Propionibacterium acnes KPA171202
MSSTNHITRQPVPPTDSVRVKAAVAAHEAADAATDRRVDTTFDKFHDRYSTRSLGLKTSPVRALFAVANRPEVVSLAGGMPNIADLPLDVVSESLKELVDTRGTVVMQYGSGQGEPEMRKHICEVMAVEGLVADPDDVTVTCGSQQGLDLVTRIFCNPSDVIMAESPAYVGALNTFASYQTEVIHVDMDDSGLVPESLREKVTAARQDGKSVKFLYTVPNYSNPSGISQSTERRREILAVADELDLLVVEDNPYGLLNLDGDPLPTLKSMDPDNVVYLGSFSKTFAPGFRIGWVLSPSFVRDKLVLAQESATLCPPVFSQFAVSSYLAHWDWRAQVDSFINMYRIRRDTMLASLAETMPEGTTWSHPSGGFFVWLTMPGAIDSAAMLPRAVTKFVAYTPGTAFYADGRGQRNIRLSFCYPTPERIKVGVERLAGVMREELEIAETFGLADERRHSRDLGPGPNLA

SEQ ID NO: 24201 - protein, 148 aa, Glycine max
  misc_feature (13)..(13): Xaa can be any naturally occurring amino acid
  misc_feature (25)..(25): Xaa can be any naturally occurring amino acid
  misc_feature (63)..(63): Xaa can be any naturally occurring amino acid
  misc_feature (70)..(70): Xaa can be any naturally occurring amino acid
  misc_feature (85)..(85): Xaa can be any naturally occurring amino acid
  unsure (1)..(148): unsure at all Xaa locations
LSRAYASNMGGYXNEGLAEVLAAQXSPKNSNGFHGTAYAERQTLRLSEEYNVIYFSILAGDHXIEMDYQXIIPAHTETDAAITVXALPMYETPAIAFGMMKIDKDGRILELADKPTGQQSKAMKAYTTILVLDDDRTKQSPYIGMMGV

SEQ ID NO: 24202 - protein, 644 aa, Thermus thermophilus HB8
MKALRPSYEMKRYTLPQLLRLRAEHEGDRVALREKDYGIWNEITYAQYYENVLLFAHGLLSLGFGPGERLAVIADNIPEWLYAELGAQAVRGISVGVYQSSLPPEIAYMLQYTGASVVLAEDQEQVDKLYEIRSEIPHVRYVIYEDEKGMRGYKDPWLLSFAEVLERGREHRRKHPDAVERLLLEASPEEVCHLSSTSGTTGRPKAAMLRHRNLIHMGVALQEVDPLLPTDDYLSFLPLAWIGEQMMSVAMALTGGFAVNFPEEVETALQDLKEIGPHVMFSPPRVWEGIQSQVWVRISESPWFNRFVYERLLKVGYRAAEYRMRGRPMPLGLRLAYWFADQVLFKPLRDQLGFLRLRRAYTGGAALGPDVFRFFHAIGVNLKQVYGQTEIIGIAFVHRDGDVRHDTVGLPIPGTEVRISEAGEILLRSDAVCAGYWERPEATQETFGDGWLHTGDAGYLTEDGHLVVIDRLSDVMRTEKGTVFSPQFLENKLKFSPYIKEAVVFGDRKPYLAAFINIDPQTVGKWAEDRGLAYTTYLDLSLKPEVAELIRKEVEKVNKELPEELRIQRFVLLYKLLDADDEELTRTGKVRRGHIAKKYAPLVEALYSGAKEVEVEAEYRYQDGTLQRLRARVPVLGFAEEVPA

SEQ ID NO: 24203 - protein, 469 aa, Parachlamydia sp. UWE25
MMEIKKFDVAVLGGGPGGYPAAIRAAQRGKSVALIEAKELGGTCLNRGCIPSKALIAGAEVVDRIHEAKEFGIHVGEVNIDYAQLAFHKDRVIERMRKGLEGLMATNKITVFKGFGQFISPREIKIKGQDNTSITADQIIIATGSEPRNISAFPFDYERIHDSTSLLAMKTLPEKLIIVGGGVIGCEFASLYATLGVHVTILELLPRLISSEAIEVSQALTKAFIKRGIQVETGVKVQKIEQVEMGIQVQVEEGKHYVADCCLVAVGRSLNTKNIGLDKAGILVQENGMIAVNDKMQTNVDGIYAVGDIASKWWLAHVASHQGLIAADQICGKSSRMYYHAIPSVIFTHPEIATVGLSLEEATKRGYKAKLASFPFQALGKSQAALQAEGFAQIVVEEKSGQILGAQVVGYEASVMIAEMTLAIANELTVECVAETIHAHPTLPEAWLESALLGEGLPLHLPPKTQKKG

SEQ ID NO: 24204 - protein, 154 aa, Xanthomonas campestris pv. vesicatoria str. 85-10
MSQFDLTPPSPAQRDALIAGLSDEEQRVLLHHGTEAPFCGVFLDNKLDGVYTCRLCGLPLFRSSAKFESGTGWPSFFAPYDPAHVREIRDTSYGMIRTEIVCARCDSHLGHVFPDGPPPTGERHCLNSVSLGFTENGQALPNPLQRQGAEAQPA

SEQ ID NO: 24205 - protein, 387 aa, Debaryomyces hansenii
MVSDGEFTRTQIFGTVFEITNRYTDLNPVGMGAFGLVCSAIDKLTGQNVAVKKIMKPFLTSVLAKRTYRELKLLKHLRHENLITLDDIFLSPLEDIYFVTELQGTDLHRLLTSRPLEKQFIQYFTYQILRGLKYVHSAGVIHRDLKPSNILINENCDLKICDFGLARIQDPQMTGYVSTRYYRAPEIMLTWQKYDTEVDLWSVGCILSEMIEGKPLFPGKDHVHQFSIITELLGSPPPDVIETICSENTLRFVQSLPHRDPIPFSERFAQCTHVEPEAIDLLAKMLIFDPKKRISALDALSHPYMEPYHDPTDEPVCEVKFDWSFNDADLPVDTWRVMMYSEILDFHQIIGAGANGTTQEQMAQIQQEGIQAPSSQYQQTNQEQKVE

SEQ ID NO: 24206 - protein, 425 aa, Shewanella sp. MR-4
MSQTNQAQYLQQLGSQAKQASYALANLSAAQKADLLEAIAEALTQNTQAILAANAKDVAAAKAEGLNDAMIDRLLLNESRLAGIIGDIGDVVRLADPVGEEFGSRVLDNGLRLTRRRVPLGVIGVIYEARPNVTVDIAVLALKTGNAVILRGGKETLESNKLISEVIRGAIASQGLPVDAVQLIDSPDRALVTGLLKLDQYVDMIVPRGGQALQRLCAEQATIPVILGGIGICHLYVDKHADLERALEVIANAKVQRPTVCNALDTLLVDNAVAERFVPQIAEYLHRLGVRFSVCEQSYALLDGLGFDISPATEQSFATEWLSLALGIKVVNDIDTAIAHIRTYSSGHSEAILTDDIHTATHFMNEVNSAAVYVNASTRFTDGGQFGLGAEVAVSTQKLHARGPMGLEALTTYKWLAWGDYTSRA

SEQ ID NO: 24207 - protein, 523 aa, Magnaporthe grisea 70-15
MADPFAPRTMKRRNVKGLALTPAAPKPPPTAENAPIHRDSDQHAQLEIGIEFNLDLRPEDLEVIKDLGSGNGGTVSKVRHIPTNTVMARKVIHVEAKREMRKRIVRELQIMHSCNSEYIVTFYGAFLNENNDVIMCMEYADVGSLDRVSRVFGPIRVDVLGKIAEATLGGLTYLYAKHHIMHRDIKPSNILVNSRGSIKLCDFGVSGELINSIADTFVGTSTYMAPERIQGEKYTVKSDVWSFGLSIMELAIGKFPFAASEQLSDAESAPAGILDLLQQIVHEPAPKLPKSDAFPQILEDMIQKCLYKNPDDRPTPEELFERDPFVQAAKRTPVDLREWAFGLMERDNRKSHLAPQLSPATADLLRSSDSPTATYHGDDRPLETPTSGEIPILGAIVSPRDQYGSISSRSPTRAGGGIGGLGRPGGSALHPGLGPRMATTSSVPMSSGASYHGVSSSSADYASAIPAQPSSASKATFSLPMRPAPAGTIPPPPPRKETPDESKKESRRQALFGPPSSTGSYGF

SEQ ID NO: 24208 - protein, 593 aa, Synechococcus elongatus PCC 6301
MPRSDRLRRDPVFSSTSLQKHASYNLLWPYLRPQTKTIVQALLCTLVFTAFWPILAFLAGQMVNLLVQGKVWELARLAAITIVGFLIHKAAQYGQDSLMAKAALQIAYNLRVNTYRHIQSLSLSYFEKAKTGDLTYRMTEDIDRVGEVVNKVFHDATPSILQLIVVLSYMIYLNWTLTLAILVIAPIMGFLVGWFGQQMLVFPRRSQSRISNLSSLLTEVFSGIRLVRAFAAEPYEIERFSREAERNREARYRTAWLRAIQYPVIGFLQAASILFIVVLGSWQISTGQLNGPNLGSYVAAIAMLIDPIVHLIDNFNEFKQGQASLDRIDELLSIEPAVQEDPQSRMLPPITGKVEFRQVSFSYRSDSAPVLRQLNLTVEPGEAVALVGASGAGKSTLVNLIPRFYDPQDGEILVDGIPIRSVTLGSLRRQIGIVPQETILFSGTIAQNIAFGQRQFDRAAVEEAARIANAHQFISQMPDGYDTWVGERGVNLSGGQRQRLAIARAVLLDPRILILDEATSALDSESETLVQEALERVMQGRTVFIIAHRLATVRNASRILVMERGQIVEAGNHDALLAEAGRYARYYAQQFRA

SEQ ID NO: 24209 - protein, 396 aa, Bacillus cereus ATCC 14579
MIQTKDIIELTDTYGANNYHPLPIVISKAEGVWVEDPEGNRYMDLLSAYSAVNQGHRHPKIINALIDQANRVTLTSRAFHSDQLGPWYEKVAKLTNKEMVLPMNTGAEAVETAIKTVRRWAYDVKKVEANRAEIIVCEDNFHGRTMGSVSMSSNEEYKRGFGPMLPGIVVIPYGDLEALKAAITPNTAAFILEPIQGEAGINIPPAGYLKEAFEVCKKENVLFVADEIQTGLSRTGKVFACDWDNVTPDMYILGKALGGGVFPISCVAANRDILGVFEPGSHGSTFGGNPLACAVSIAALEVLEEEKLTERSLQLGEKLVGQLKEIDNPMITEVRGKGLFIGIELNEPARPYCEQLKAAGLLCKETHENVIRIAPPLVISEEDLEWAFQKIKAVLS

SEQ ID NO: 24210 - protein, 198 aa, Oryza sativa
  misc_feature (113)..(113): Xaa can be any naturally occurring amino acid
  misc_feature (128)..(128): Xaa can be any naturally occurring amino acid
  misc_feature (153)..(153): Xaa can be any naturally occurring amino acid
  misc_feature (167)..(167): Xaa can be any naturally occurring amino acid
  misc_feature (171)..(171): Xaa can be any naturally occurring amino acid
  misc_feature (175)..(175): Xaa can be any naturally occurring amino acid
  misc_feature (179)..(179): Xaa can be any naturally occurring amino acid
  unsure (1)..(198): unsure at all Xaa locations
MSSLRVQKRLASSILDCGNKKIWLDPNEANEIANANTRQSVRKLIKDGLIIKKPVAVHSRYRTRKNIEARRKGRHMGHGKRKGTANARMPTKILWIRRMRVLRRLLKKYRAAXKIDRHLYHELYLKCXGNVFKNKRVLMEFIHKKKAEVQRTXMLSDQAVARRERTXEKRXRREXRILXKRSELLGKQEDDDNVAVQQ

SEQ ID NO: 24211 - protein, 335 aa, Bacillus cereus ATCC 14579
MCGITGWVDYKRSLEGERDVVTKMAETLAKRGPDDNKVWIKGNVAFGHKRLIVVDPEGGKQPMTCLKDETNYAICYNGELYNTEDIRKELLRRGYRFKGHSDTEVLLASYIEWKEECVDHLNGIYAFAVWDEQKEQVFIARDRLGVKPLFYKYDSGRLLFGSELKAILSHPDVKAEVTLEGLSEIFGLGPSRTPGHGIYAGIKELRPGHAMTFSKNGLCIWRYWNVESKKHEDSFEETVEKTRFLLQDAITRQLVSDVPLCTFLSGGVDSSAITAIAAKEYERSGKGQLHTYSIDYEDNDKYFKANAFQPNSDAPFINLMTETFQTNPSSLRHFE

SEQ ID NO: 24212 - protein, 265 aa, Bacillus cereus ATCC 14579
MPGMADIDSSLLWFCREIKQDFVVGLSGECADEIFGGYPWFYREDDLQSSAFPWMRSTEAREQLLKKEWRNKLNLQQYVQRRYEESIQEVPILEGESPLEAKRRQLFYLNMIWFMTTLLDRKDRMSMGASLEVRVPFADHRLVEYAWNIPWEMKMYKNREKGLLRKALEGILPHDILYRKKSPYPKTHNPHYTKAVTVWLQNLLTDKGSILHELFDKEQLSGLIQSGGSAFQTPWFGQLMTGPQLLAHLAQIHVWFKEYGVNIKE

SEQ ID NO: 24213 - protein, 371 aa, Bacillus clausii KSM-K16
MTTTRGLEGIVATQSSVSSIIDDELTYHGYGIDDLAENASFEEVVYLLWNGELPTKEELESFSRALAEQAGVPDEIFEQMKAYPIDSVHPMAALRTSVSMLGLFDDEAESVEEEKNYRKAIKLQAKIPTIVAGFERIRSGKEPIAPNKELSFAANFLYMLTGENPDAISVKAFNKALVLHADHELNASTFTARVCVATLSDMYSGITAAIGALKGPLHGGANEGVMKMLLEIEEFERVEPYIQKALDNKEKIMGFGHRVYKNGDPRAKHLREMSKQLTDVIKESKWYDMSLRIEELVTTQKGLLPNVDFYSATVYHSLGIKHDLFTPIFAISRTSGWIAHILEQYANNRLIRPRAEYVGPNKRSYKPVESR

SEQ ID NO: 24214 - protein, 584 aa, Bacillus clausii KSM-K16
MRKTKIVCTIGPASESLEKLTALIEAGMNVARLNFSHGDFEEHGARIKNIREAAKRTGKTVAILLDTKGPEIRTQTVEGGAIELEKGQELILSMNEVQGTKEKISITYPGLCEDVEVGSTILLDDGLIGLEVKEIRDTELVTIVRNSGVLKNKKGVNVPNVSVNLPGMTEKDAADIVFGIEQKVDFIAASFVRRASDVLEIRELLEKHGAADTAIIPKIENQEGVDNIDEILEVSDGLMVARGDLGVEIPAEEVPLVQKQLIKKCNELAKPVITATQMLDSMQRNPRPTRAEASDVANAIFDGTDAIMLSGETAAGDYPVESVQTMHNIAERTEQALNYENMLRRKSKEVKTSITSAIGQSVAYTASNLNAAAILTATESGYTARMTSRFRPKSPILAVTSNERAYRRMALVWGVTPILGKQANTTDEMLDRTVEAAVATGVVKQGDLVIITAGVPVGESGTTNLMKVHMLGEVAAKGQGIGRRSASGKVVVARDAKEAIAKVTEGSVLVTKSTDKDMIEAFEKAAAVVTVEGGLTSHAAVVGLNLSTPVIVGVANALERFQDGDEVTVDCISGNIYSGQARVL

SEQ ID NO: 24215 - protein, 231 aa, Arabidopsis thaliana
MEEEQVRAIKIIVFGVISWGVAFILTRRIFSSYSFSFSNRLLSTAHATIAVTLATLSVQDLSCPVCPLASKPSHKQMDVMAFSLSYMIYDLICCHFDQVFSIDNAVHHFVSILGFIAGLAYQKSGSEIVATLWVAEISSPFFHLREILKEIGYKDTKLNLAADVCFATIFTLARIVCGPFLVYVSLSADNPIFIKAMGSGLQLVSIFWFYKIFGMMRYKLFKKPKSNKKST

SEQ ID NO: 24216 - protein, 340 aa, Thermosynechococcus elongatus BP-1
MQLERNIIPMARMYYDADAQLELLKDKTIAIIGYGSQGHAHALNLRDSGLNVVVGLYAGSRSAERARAEGLAVHPVAEAAKMADWIMILLPDEVQRVVYEQEIAPHLQPGNVLSFAHGFNIHFGQIVPPAHVDVVMVAPKGPGHLVRRTYAQGEGVPCLFAVYQDASGQARDLAMAYAKGIGGTRAGILETTFREETETDLFGEQVVLCGGLSALIKAGFETLVQAGYQPELAYFECLHEVKLIVDLIVEGGLAKMRDSISNTAEYGDLTRGPRIITEETRAEMRKILHEIQTGQFAREFVLENMAGKPGFTAMRRREAEHPIEQVGQELRSMFSWLKRA

SEQ ID NO: 24217 - protein, 348 aa, Prosthecochloris aestuarii DSM 271
MTTSRYSMPAEWAAHDATWLSWPHKEASWPGKFEPVPDVFAAMAAALCRYEAVHINVLDDEMERSICRLLDVREIASEERARISFHRIPTNDAWCRDHGPNFVFRDVGTKREKVIVNWEFNAWGGKYEPYDDDNSVPEKVAALRGCDLVLPGMVLEGGAIDVNGSGLLLTTEACLLNPNRNPSLTRQQIEQNLKTYLGIEQVLWLKDGIAGDDTDGHVDDMARFVNENTVVIAVEENPDDENYAPLQENYRLLQDFTCSDGSRLDVLTLPMPDPVYYENERLPASYANFYIANRQVLVPIYRCSNDRVALDILQGCFPDREIVGIDCTDLIWGLGAIHCVTHEEPSLL

SEQ ID NO: 24218 - protein, 557 aa, Cryptococcus neoformans var. neoformans JEC21
MALSQHVDADKLIEECKDHPIKRHLSHKAALYDIPYTSRYEVEDEVPRYRLPSKGVNGRATYQLLHDELMLDGNPNMNLASFVHTWVPDECNRLVQENINKNLVDQDEYPAAQQIHERCISMLSHLWHAPKEATAMGTATTGSSEAIMLGGLALKRRWQEKMKAAGKDIHNPGPNIVMGAEAQVALEKFARYFEVEARLVPIKPESSYVMDPKDVLKYVDENTIGVFVILGSTYTGAFESVKDVAQELDKYEAETGISVPIHVDAASGGFVAPFAYPHYQWDFQIPRVHSINASGHKYGMSTVGVGWIIWRSMEYLPKELIFELHYLGATDYSFNLNFSRPAHPILAQMFTFLNLGFEGYKRIMDKNLTVARLISRALEHSGYFICLSKIHHPKALTESSSSAEQSNILPAVADAANTVLHGKKTTVDDAEYYCEGLPVVSFMFTDEIKKKYPGVKQAWIQMQLRSIGWIVPNYPLAPDCEKTEILRVVVRESLSGDLARKLIHDILQVTEDLLNDAGPSYSMSTATRRHENLDHGKLDNIDAVHIKQHTSTYSKPC

SEQ ID NO: 24219 - protein, 395 aa, Zea mays
MASSTGSLEHGGFTFTPPPFITSFTELLSGAGDMLGASADQERSSPRGLFHRGARGVPKFKSAQPPSLPISPPPMSPSSYFAIPPGLSPAELLDSPVLLHSSSNILASPTTGAIPAQRFDWKKAADLIASQSQQDGDSRAAAGGFDDFSFHTATSNAVHARTTTTSFPSFEEEQQQQVEKAAVPSSNRASGGGNGNTKLEDGYNWRKYGQKNMKGSENPRSYYKCSFPGCPTKKKVERSPDGQVTEIVYKGAHNHPKPQSTRRSASSAPAPASHVLQSVGDAVPEHSFGALSGTPVATPENSSGSFGGDDEINGVSSRLAGNFAGADDLDDDEPDSKRWRKDGGDGDGGVSLSGNNRTVREPRVVVQTMSDIDVLDDGYRWRKYGQKVVKGNPNP

SEQ ID NO: 24220 - protein, 498 aa, Cryptococcus neoformans var. neoformans JEC21
MTEKTPTYTLSEGCPIADATTAQRLGSCPVKGLMLMQDTQLIETLAHFSRERIPERTVHASAVGAWGEFEVTHDNSDITSAAFLNGIGKKSKVLMRISTVGPEAGTAETVRDVRGWSMKIFTEEGNQDFVFNSIPVFFIRDPIKFPSVNRSHKRHPAKHTADSSMFWDFHNNNPEGTHAIMMYFSNRGLPYSLRQINSYSGHTYKLTKSDGSFVYVKLHFKSNQGVKGMTQAEGVRTAGEAPDFHTTDMWDAIERGDYPTWTLYAQVMKPEEAENYRWNIFDMTKVWPHKDFPLRPLGKLTLNRNPENYFSDIEQAAFSPSTMVPGVAPSGDPMLQARMFAYPDAARYRLGVNYQQLPCNRPVSEVYAPYQRDGAMRYMTNYGGDPNYVRSSLKEVNFKGQLGAKGHSTGGNEKHNEWVGRVAAYTSEVTDEDYVQARMFWEVLGKAGDQEDLITNVSCHLSKAIPSVQKGAVEIFAKVNVDLAKSIEDRLAELNKGK

SEQ ID NO: 24221 - protein, 266 aa, Oryza sativa (japonica cultivar-group)
MGLPEQPSGSSGPKAELPVAKEPEASPTGGAAADHADENNESGGGEPREGAVVAAPNRRPRGRPPGSKNKPKPPIFVTRDSPNALRSHVMEVAGGADVADAIAQFSRRRQRGVCVLSGAGTVANVALRQPSAPGAVVALHGRFEILSLTGTFLPGPAPPGSTGLTVYLAGGQGQVVGGSVVGSLIAAGPVMVIASTFANATYERLPLEEEEEGSGPPMPGGAEPLMAGGHGIADPSALPMFNLPPSNGLGGGGDGFPWAAHPRPPY

SEQ ID NO: 24222 - protein, 484 aa, Oryza sativa (indica cultivar-group)
MFGGGGGGRKPLDYEELNENVKKVQYAVRGELYLRASELQKEGKKIIFTNVGNPHALGQKPLTFPRQVVALCQAPFLLDDPNVGLIFPADAIARAKHYLAMAPGGLGAYSDSRGIPGIRKEVAEFIERRDGYPSDPELIYLTDGASKGVMQMLNTIIRNERDGILVPVPQYPLYSAAISPFGGSLVPYYLEEEANWGLDFVNLRQTVASARSKGITVRAMVIINPGNPTGQCLSEGNIKELLKFCFHENLVLLADEVYQQNIYQDERPFISARKVLFDMGPPMSREVQLVSFHTVSKGYWGECGQRGGYFEMTNLPPKTVDEIYKVASIALSPNVPGQIFMGLMVNPPKPGDISYLKFSAESKSILESLRRRARLMTDGFNSCRNVVCNFTEGAMYSFPQIRLPPKAIDAAKRAGKAADVFYCLKLLEATGISTVPGSGFGQKEGVFHLRTTILPAEEDMPAIMTSFKKFNDTFMDQYDGYSRM

SEQ ID NO: 24223 - protein, 412 aa, Cryptococcus neoformans var. neoformans JEC21
MGVLRLAVCISGVYAAFLLWAIAQERLSKPFPSVHPHPHQQPHSPSDPPPGDKFPSPLFLNFAQALASSLSALCYLSFKAWRDGWKGRGLGQLLGLKEVFGKSQTALNGDAKANKKESELNEKTKEVVEKAPKPPKKSLLALLVQVSVFQTIASPIGFLALRHISYPTMVLGKSCKLIPVLLLNVLLYRRKFSPHKYIVVALVTVGISMFMLFAETSKKKKGGSDSMWGLVLLLVNLLIDGLTNSTQDQIFSSYPSYTGQQMMFTMALTTQIILLPLLVLPLPTNPISLLAHLPPPFGSSVPTSTLSFSPPAALESISFLLSHPSALAPLFAYALLGGLGQLFIFETIQHFGSLTLVMVTVTRKLFTMLLSVVVFEHRLTKGQWLGVGVVFAGIGVEAGMKRKDVMKKAKKD

SEQ ID NO: 24224 - protein, 258 aa, Xanthomonas axonopodis pv. citri str. 306
MTTHRWRLDGQTALITGASAGIGLAIARELLGFGADLLMVARDADALAQARDELADEFPERELHGLAADVSDDEERRAILDWVEDHADGLHLLINNAGGNITRAAIDYTEDQWRGIFETNVFSAFELSRYAHPLLTQHAASAIVNVGSVSGITHVRSGAPYGMTKAALQQMTRNLAVEWAEDGIRVNAVAPWYIRTRRTSGPLSDPDYYEQVIERTPMRRIGEPEEVAAAVGFLCLPAASYITGECIAVDGGFLRYGF

SEQ ID NO: 24225 - protein, 437 aa, Haemophilus influenzae R2866
MEILMKSGDLNKYDLVKNTLVLVLAGGRGSRLHELTDKRAKPALYFGGNRRIIDFALSNCINSDLNRIGVVTQYAAHSLLRHLQTGWSFLPQERGEFIDMLPARQQIDDSTWYRGTADAVYQNMAIIKNHYRPKYILILAGDHIYKQDYSVMLMDHVNSGAKCTVGCIEVPRSEAHEFGVMAVNENLKVKAFVEKPKDPPAMVGKPDVSLASMGIYVFDADYLYKMLEREVNTPQTSHDFGKDVLPKCLAEETLYAHPFSRSCMGRNTEGEIYWRDVGTLDSFWQSNIDLVSENPQLDIYDQSWPIRGNPIQAYPSKFFYKHSNVHPVDNSLIGGGCVITDASISNSVLFDHIKIDAFSKVDHCVVLPQVKIGKNCVLKNCIIDRECEIPDGMQIGVNMEEDKKRFRISSTGKVILVTSKMLKILEGHEIGEEGHLD

SEQ ID NO: 24226 - protein, 458 aa, Xanthomonas axonopodis pv. citri str. 306
MSVSSAPPSATPGFASEVRTTGLLALPLVLGHVSTGLIGFVDNVIAGHHGTATLAAVTIGTSLLWLPMLVPIGTLISLTASVSQLLGAGREREIGPLFRQALWLSLGLSALMFVFLSVVPPLLPTFGIAPDIVPGATAFLHAVRWGVPALTFYFCMRYLSEGMHWTLPTMLLGFGGLLVLAPVGYALTYGKFGFAEHGAEGLGMASAITMWVQASVFALYLWRARRFAHLQLFAHLEGPRWRAIGELLRTGLPIGITVLMEGGLFIVTALLIGRLGSTEAAAHQIAINVAQLCFMIPMGVAEATTVRVGHAVGRGDPQAMRRAAWAGYAIVLGTQALSASALLLGHDAIVGVYTDDVAVAALASVLLLFAATFQFPDGIQVLSAGALRGLKDTRVPMFLAMFSYWGVGMPIGAGLGLGLGWGPKGMWVGLILGLTVASILMGLRFRQTSRRLTATVTP

SEQ ID NO: 24227 - protein, 622 aa, Saccharomyces cerevisiae
MSFSTINSNVNKTTGDSNNNTTENSSTADLLGMDLLQSGPRLMNTMQPNNSSDMLHINNKTNNVQQPAGNTNISSANAGAKAPANEFVRKLFRILENNEYPDIVTWTENGKSFVVLDTGKFTTHILPNHFKHSNFASFVRQLNKYDFHKVKRSPEERQRCKYGEQSWEFQHPEFRVHYGKGLDNIKRKIPAQRKVLLDESQKALLHFNSEGTNPNNPSGSLLNESTTELLLSNTVSKDAFGNLRRRVDKLQKELDMSKMESYATKVELQKLNSKYNTVIESLITFKTINENLLNNFNTLCSTLANNGIEVPIFGDNGNRNPTGNTNPATTTAIQSNNNTNNASPATSTVSLQLPNLPDQNSLTPNAQNNTVTLRKGFHVLLVEDDAVSIQLCSKFLRKYGCTVQVVSDGLSAISTLEKYRYDLVLMDIVMPNLDGATATSIVRSFDNETPIIAMTGNIMNQDLITYLQHGMNDILAKPFTRDDLHSILIRYLKDRIPLCEQQLPPRNSSPQTHSNTNTANSNPNTINEQSLAMLPQDNPSTTTPVTPGASISSAQHVQQGQQEQQHQIFHAQQQQQHHNAIANARSDVAIPNLEHEINTVPHSSMGSTPQLPQSTLQENQLS

SEQ ID NO: 24228 - protein, 508 aa, Bifidobacterium longum
MKNKVQLITYADRLGDGTLSSMADILRTRFDGVYDGVHILPFFTPFDGADAGFDPIDHTKVDERLGSWDDVAELSKTHNIMVDAIVNHMSWESKQFQDVLEKGEESEYYPMFLTMSSVFPNGATEEDLAGIYRPRPGLPFTHYKFAGKTRLVWVSFTPQQVDIDTDSDKGWEYLMSIFDQMAASHVSYIRLDAVGYGAKEAGTSCFMTPKTFKLISRLREEGVKRGLEILIEVHSYYKKQVEIASKVDRVYDFALPPLLLHSLFTGHVEPVAHWTEIRPNNAVTVLDTHDGIGVIDIGSDQLDRSLKGLVPDEDVDNLVNTIHANTHGESQAATGAAASNLDLYQVNSTYYSALGCNDQHYLAARAVQFFLPGVPQVYYVGALAGRNDMELLRRTNNGRDINRHYYSTAEIDENLERPVVKALNALAKFRNELPAFDGEFSYEVDGDTSITFRWTAADGTSTAALTFEPGRGLGTDNATPVASLAWSDAAGDHETRDLLANPPIADID

SEQ ID NO: 24229 - protein, 226 aa, Parachlamydia sp. UWE25
MVKLILMRHGQSQWNLANLFTGWVDIPLSFKGIEEAIEAGKQIKNYPIDLIFTSSLIRAQMTAMLAMSVHTSGKVPVILHTGEGRLEEWASIYSSESQSQTIPVIRAWELNERMYGELQGINKEEMAKKYGAEQVHIWRRSFDVPPPNGESLQMTAARTIPYFENTIVPHLKEKKNIFIAAHGNSLRSIIMKLDGLTTDQVVKLELATGVPVIYDFNHDEYIKQQK

SEQ ID NO: 24230 - protein, 443 aa, Arabidopsis thaliana
MNRHRLLSAATDECNKKLGQACSSSLSPVHNFLNVQPEHRKTPFIRSQSPDSPGQLWPKNSSQSTFSRSSTFCTNLYLSSSSTSETQKHLGNSLPFLPDPSSYTHSASGVESARSPSIFTEDLGNQCDGGNSGSLLKDFLNLSGDACSDGDFHDFGCSNDSYCLSDQMELQFLSDELELAITDRAETPRLDEIYETPLASNPVTRLSPSQSCVPGAMSVDVVSSHPSPGSAANQKSRMRWTPELHESFVKAVIKLEGPEKATPKAVKKLMNVEGLTIYHVKSHLQKYRLAKYMPEKKEEKRTDNSEEKKLALSKSEADEKKKGAIQLTEALRMQMEVQKQLHEQQEVQRVLQLRIEEHAKYLEKMLEEQRKTGRWISSSSQTVLSPSDDSIPDSQNMSKTKASSPQPPLPAENKASETEDDKCESPQKRRRLENIAESEDPKR

SEQ ID NO: 24231 - protein, 509 aa, Nicotiana tabacum
MEGTNLTTYAAVFLGTLFLLLLSKFLRQRKLNLPPGPKPWPIIGNLNLIGNLPHRSIHELSLKYGPIMQLQFGTFPVVVGSSVEMAKVFLKSMDINFVGRPKTAAGKYTTYNYSDITWSPYGPYWRQARRMCLMELFSTKRLDSYEYIRAEELHSLLHNLNKISGKPIVLKDYLTTLSLNVISRMVLGKRYLDESENSIVTPEEFKKMLDELFLLNGVLNIGDSIPWIDFMDLQGYVKRMKFVSKKFDKFLEHVIDEHNVRRNGVENYIAKDMVDVLLQLADDPTLEVKLERHGVKAFTQDMLAGGTESSAVTVEWAISELLKKPEIFKKATEELDRVIGQNRWVQEKDIPNLPYIEAIVKETMRLHPVAPMLVPRECREDCKVAGYDVKKGTRVLVSVWTIGRDPTLWDEPEAFKPERFHEKSIDVKGHDFELLPFGAGRRMCPGYNLGLKVIQASLANLIHGFNWSLPDNMTPEDLDMDEIFGLSTPKKFPLATVIEPRLSPKLYSV

SEQ ID NO: 24232 - protein, 666 aa, Bacillus anthracis str. 'Ames Ancestor'
MSHSIEQLSINTIRTLSIDAIEKANSGHPGMPMGAAPMAYTLWTQFMKHNPNNPTWFNRDRFVLSAGHGSMLLYSLLHLSGYDVTMDDLKNFRQWGSKTPGHPEYGHTAGVDATTGPLGQGIATAVGMAMAERHLAAKYNRDAYNIVDHYTYAICGDGDLMEGVSAEASSLAAHLQLGRLVVLYDSNDISLDGDLNRSFSESVEDRYKAYGWQVIRVEDGNDIEAIAKAIEEAKADEKRPTLIEVRTTIGFGSPNKSGKSASHGSPLGVEETKLTKEAYAWTAEQDFHVAEEVYENFRKTVQDVGETAQAEWNTMLGEYAQAYPELANELQAAMNGLLPEGWEQNLPTYELGSKAATRNSSGAVINAIAESVPSFFGGSADLAGSNKTYMNNEKDFTRDDYSGKNIWYGVREFAMGAAMNGIALHGGLKTYGGTFFVFSDYLRPAIRLAALMQLPVTYVFTHDSIAVGEDGPTHEPIEQLAALRAMPNVSVIRPADGNESVAAWRLALESTNKPTALVLTRQDLPTLEGAKDDTYEKVAKGAYVVSASKKETADVILLATGSEVSLAVEAQKALAVDGVDASVVSMPSMDRFEAQTAEYKESVLPKAVTKRFAIEMGATFGWHRYVGLEGDVLGIDTFGASAPGEKIMEEYGFTVENVVRKVKEML

SEQ ID NO: 24233 - protein, 519 aa, Nicotiana tabacum
MYHLLSPIEAIVGLVTFAFLLYLLWTKKQSKILNPLPPKIPGGWPVIGHLFYFNNNGDDDRHFSQKLGDLADKYGPVFTFRLGFRRFLAVSSYEAMKECFSTNDIHFADRPALLYGEYLCYNNAMLAVAKYGPYWKKNRKLVNQELLSVSRLEKFKHVRFSIVQKNIKQLYNCDSPMVKINLSDWIDKLTFDIILKMVVGKTYNNGHGEILKAAFQKFMVQAMEIELYDVFHIPFFKWLDLTGNIKAMKQTFKDIDNIIQGWLDEHIKKRETKDVGGENEQDFIDVLLSKRSNEHLGDGYSHDTTIKATVFTLVLDATDTLALHIKWVMALMINNKNVMKKAQEEMDTIVGRDRWVEENDIKNLVYLQAIVKEVLRLHPPAPLSVQHLSVKDCVVNGYHIPKGTALLTNIMKLQRDPQIWVDPDTFDPERFLTTNAAIDYRGQHYELIPFGSGRRACPAMNYSLQVEHLSIAHLIQGFNFATTTNEPLDMKQGVGLTLPKKTDVEVLITPRLPPTLYQY

SEQ ID NO: 24234 - protein, 424 aa, Zea mays
MDVDCVSLPDAPAGDVDGGAARPWPKAVTNGGVHELLECPVCTNSMFPPIHQCPNGHTLCSTCKARVHNRCPTCRQELGDIRCLALEKVAESLELPCRYYSLGCPEIMPYYSKIKHEAQCGLRPYNCPYAGSECGAAGDIPSLVSHLRDDHKVDMHSGCTFNHRYVKSNPREVENATWMLTVFHCFGHYFCLHFEAFQLGMAPVYMAFLRFMGDENEAKNYSYSLEVGANGRKMVWEGTPRSVRDSHRKVRDSHDGLIIQRNMALFFSGGDRKELKLRITGRIWKEQQTPDGASYRKRVALAPGRGNRLLCTASGASSSSSVVVTKEQEEGSPEPEIFSYKDDPNFRGCKGCGRDELQRGCNGQGRIQGGIAAVPGFGWWPIKAYRPCPGFVASGGRYRRQGQSMDDVASGRGKKKPSPAKKQA

SEQ ID NO: 24235 - protein, 488 aa, Bacillus cereus ATCC 14579
MNPNNRLTTNQGAPVGDNQNSRTAGRRGPVLLEDYHLVEKLAHFDRERIPERVVHARGAGAHGVFVTKNSMKQYTKAAFLQNEGTETPVFVRFSTVIHGQGSPETARDPRGFAVKFYTEEGNYDIVGNHLPVFFIRDAIKFPDMVHSLKPAPDTNIQTPDRYWDFMTLSPESTHMMTWVFSDYGTPASYREMEGFGVHSFKWINEEGKIVYIKYHWKPQQGVRNLNAKEVQEVQGKDFNHATRDLFDAIEKGNHPKWDLHVQVMQLDEMDSLDFDPLDPTKVWPEDRFPLIEVGTMTLNRNPKNFFAEVEQVAFSPSATVNGIEPSEDKLLQGRLFSYPDTQRYRLGANYLQIPVNCPYAAVHNQQRDGAMQVNQNPSTINYEPSRHAENPVEDPAYRDSTMKVEGYVSREKIEKPNDFKQAGERYRSFSKEEQDNLIANLTNDLKDVNERTKLLAVCNFFRADQEYGMRLAQALNVDITQYVGNAPK

SEQ ID NO: 24236 - protein, 628 aa, Legionella pneumophila subsp. pneumophila str. Philadelphia 1
MKQFPGFYFDKNRAIDLICMGRVAVDLYAEQIGLDLKDVASFKKYLGGCAGNIAVGAARLGLKSQMFSCVGSDELGKFLKEELEREGVNIELLLETDNHLTGLVLLGIKPPSNFPLLFYRNDCADMQIKSDQISFTDLKNAKSLLITGTGLSTESMKNTTLEVVHLARKAETTIVFDLDYRPVLWRLTVIGNGESRYCQNEYVTQVYQQILPLCDLIVGTEEEICIAGGSNDIEVSLINIRQRTDAPIVVKLGEKGARVHFGADKGLLQAKSFPVEVLNVLGAGDGFMSGLLAGLLQGKSWEQAVTYANACGALVVTRHGCAPAIPYKEELNYFIQEYDHEPEIWNSSQLTQLHEKLSKNRKTQLLIKNPCGFADGLNSIVTMQDSPTAMSFSSLKLNKGQSHQFNSSYEFAALLMTGKVVFQYGCYSQEVERTDYFSQSPYVLHCSKNEVSSVIALTDCEILLMETENENLFSPILFDASNMLELDNRGEGVLENTSYRLVRTVFDKRNRPESNLVVGEIITFQGRWSSYPSHYHQQPEIYHYRFSEPQGYAFGENGKEVMRIEHYDTYQIANNQEHAHCTAPGYALYTLWFIRHLNNNAYTLPTFTKDHEWTRTSRANLRTWQHKQ

SEQ ID NO: 24237 - protein, 404 aa, Streptococcus pyogenes MGAS8232
MKIIEKSSKLEHVAYDIRGPVLDEANRMIASGEKILRLNTGNPAAFGFEAPDEVIRDLIVNARLSEGYSDSKGIFSARKAIMQYCQLKGFPDVDIEDIYLGNGVSELISMSLQALLDNGDEVLVPMPDYPLWTACVSLGGGKAVHYLCDEEAGWYPDIADIKSKITSRTKAIVVINPNNPTGALYLKEILEDIVALAREHQLIIFADEIYDRLVMDGKEHIAIASLAPDVFCVSMNGLSKSHRIAGFRVGWMVLSGPKDHVKGYIEGLNMLANMRLCSNVLAQQVVQTSLGGHQSVDALLLPGGRIFEQRNFIYEAINAIPGLSAVKPEAGLYLFPKIDRQMYRIDDDEEFVLQLLKQEKVMLVHGRGFNWKDPDHFRIVYLPSVEELEDVQEKITRVLYQYRR

SEQ ID NO: 24238 - protein, 413 aa, Ralstonia solanacearum
MKTIQKSAKLNNVCYDIRGPVLEKAKQMEEEGHQIIKLNIGNLAPFGFDAPEEIQQDMIRNLPNSAGYSDSKGIFAARKAVMHYTQQQGIKNVTLDDIYLGNGASELIALATNALLDAGDELLLPAPDYPLWTAMTSLSGGTPVHYLCDESNGWMPDLDDIRAKITPNTKGIVVINPNNPTGALYSDALLHDIIAIAREHGLVIFADEVYDKVLFDDNRHTAMASLSEDVLTVTFNSLSKSYRSCGYRAGWMVVSGDKRPAKDYIEGLNMLSSMRLCANVPGQWAIQTALGGYQSINDLVAPGGRMRRQRDLAYELITAIPGVSCVKPKAALYMFPRLDPSVYPIDDDQTFIRQLLEEERVLLVQGTGFNWHSPDHFRIVFLPHEDDLREAIGRIARFLERYRQRHGTGIRAA

SEQ ID NO: 24239 - protein, 389 aa, Oryza sativa (japonica cultivar-group)
MAQLPPKIPVAAPGHHQHWASAGGAGDAAWADEFAEFAASRRGAHRRSLSDSVAFVEVAPAGCGAGGEFDRLDDDQLMSMFPDEGGSSAPGSDNGGSDSDGGGDKHAAAQSDDGQHAAGEPTQEQAAATSPTELIRDPKRVKRILANRQSAQRSRVRKLQYISELERSVTTLQLGNRTPYLNSTNSRQINRSWLCNLHSVRCSKRPVDEFHGQKWRQFETDRWTQPHWLAGNSTQCGEEMSESVSPHPRAYARLRMSYFTSPPVRHQPAHVDVVAMACHAMIQTHMVLLLHGWIGQWAVNEVSVLSPRVAFLDQQRTILTVGNSHLKQRIAALAQDKIFKDETTGGEKPAQHIVIVEHRYCSSFKDKSHSVQYNICIIQNLQYMDLDQR

SEQ ID NO: 24240 - protein, 335 aa, Bacillus cereus E33L
MKTYYEKDANVDLLQGKTVAVVGYGSQGHAQAQNLRDSGVEVVVGVRPGKSYEVAKADGFEVMSVSEAVRTAQVVQMLLPDEQQAHVYKAEIEENLREGQMLLFSHGFNIHFGQINPPSYVDVAMVAPKSPGHLVRRVFQEGNGVPALVAVHQDATGTALHVALAYAKGVGCTRAGVIETTFQEETETDLFGEQAVLCGGVTALVKAGFETLTEGGYRPEIAYFECLHELKLIVDLMYEGGLTNMRHSISDTAEFGDYVTGSRIVTDGTKKEMKRVLTEIQQGEFAKKWILENQAGRPTHNAMKKAEQNHGLEKVGAELREMMSWIHAPKELVKK

SEQ ID NO: 24241 - protein, 313 aa, Triticum aestivum
MSSEGGGTAITGKKRNRAQIQTLVREGSLYNLTLSEVESHRAAPLLSMNLDDFVRSVLPDEKNLPLPKGAGNSGSQSTSAFGLERQGSSITVPLPLSKKTVDEIWRDIQQEEESSDDEKRSSGCDAQMSFGEITLEEFLQRAGIVTGQYQKDAEELIDLVGTGESAHLMTRVQDFPQGTSAIDAYIVRQSIAQPLSVAIPSTMDSIYPDRQMSISSSLELSDLQSPSRKRMSSQDVVYKVADRRQKRMIKNRESAARSRARKQAYTNELECKLSCLEEENKRLKREKELDMLLKSAPPPEPKRHLRRTRSTSF

SEQ ID NO: 24242 - protein, 368 aa, Enterococcus faecalis
MEKETSKKYEAAVGTFIKENKPKGTVVYDDLANQLATPYTLDAEAMEKLIQKVEDAGISVVDENGDPSEHSLKKDEKEAEKAQAEDLSAPTGVKINDPVRMYLKEIGRVQLLTAAEEVELALKIEEGDQEAKQRLAEANLRLVVSIAKRYVGRGMQFLDLIQEGNMGLMKAVEKFDYRKGFKFSTYATWWIRQAITRAIADQARTIRIPVHMVETINKLIRMQRNLLQDLGREPTPEEIGAEMDLPTEKVREILKIAQEPVSLETPIGEEDDSHLGDFIEDQDATSPAEHAAYELLKEQLEDVLDTLTDREENVLRLRFGLDDGRTRTLEEVGKVFGVTRERIRQIEAKALRKLRHPSRSKQLKDFLE

SEQ ID NO: 24243 - protein, 355 aa, Cochliobolus heterostrophus
MAEFVRAQIFGTTFEITSRYTDLQPVGMGAFGLVCSAKDQLTNQAVAVKKIMKPFSTPVLSKRTYRELKLLKHLRHENIISLSDIFISPLEDIYFVTELLGTDLHRLLTSRPLEKQFIQYFLYQILRGLKYVHSAGVVHRDLKPSNILVNENCDLKICDFGLARIQDPQMTGYVSTRYYRAPEIMLTWQKYDVEVDIWSAGCIFAEMLEGKPLFPGKDHVNQFSIITELLGTPPDDVIQTICSENTLRFVQSLPKRERQPLANKFKNAEPDAVDLLENMLVFDPRKRVRAEQALAHPYLAPYHDPTDEPVADEKFDWSFNDADLPVDTWKIMMYSEILDYHNVDAAVPEQENNGS

SEQ ID NO: 24244 - protein, 1131 aa, Cryptococcus neoformans var. neoformans JEC21
MSTSETQIPALPSSGGRPSHPSSSSSAASISNTSIPSVVEQQNGIPIPPTNIPEEAVSGTVTASTSDTPQASRNSQVPTEENTKSIDLQEPTVPEKNASVEEPSGVESSEVGGEDQEIKEGPKFIQPDHFSPLTNNPNGSRPARGIPNIGDGWLSPEDDPHALRGIPVFKPSMEEFLDFEGYARKTTAWGQYSGIVKVIPPAEWIESVPPITKSSLASVRVTDPIQQNLIGSSGLFRIANVVRNKRRPLTVEEWFKKCKDKKFSGPGPKDVGSTTNRDSKEAEERRQRVRDDMRKEKEKRREKRLAAEANRARKATGIEDIKEEEEVNGQAPSVLDRKDEASTEFVNNPQECQPASLEPDSRTKGIMVEKSINSWYESFDPKEDWLPENTRREDYSLEACVALERRFWKNMGLGEPSWYGADMEGSLFMDEKTPWNVAHLPNLLNRWDLRHLPGVNAPYLYFGMWGASFAWHVEDMDLFSINYIHFGAPKFWYAIPQQQAERFERILQGYFPEDARNCDQFLRHKSFAVSPYRLASDGMRVNMLVHNQGEFVITYPRGYHAGFNMGFNCAESVNFALDSWVELGRRAKACNCVNHSVRIDVDEMLAKDAVRFQGEEELLSAIAEERNKKRQHRRPSAGDNHTPRKRAKPDSQTPSGGLVSSHTPIVIEATDQSKPVKVPGKRTPKAVIDISSNQQRAKANSIKDPNSFPCLFCPGFARDDLLPVFDPSDSVKARWKPRHGEVMAHHSCALAIPGVGIEDREVPGGLGTFVVGVENVESARWKLKCLLCKDKKLQKTGAKIQCTKGKCPRAFHVSCARESDVANLKIWEVETPMLPREGEPPLPEGAEVPTMIDIKVELLCPQHNPEVKEKLEQRKAETFRDKVMSIPSGSKIKIKVRTGASLEYTLVEARETTQQVYVHDAQGQFPTPIPPLQVSHRMSYDLGLHRQTHQSVPQQVFYPQPPSQEHQPLHSIPHPPISRRPHHPIPPSDTSQRVANHQAPHDSYYPRPASVPMLHRYHHQPLQPSYPSRYQTPPQTHYPSHPYPRHEPHIQPPAPSAHPMNNQATDASHFHGQMYEPYRRHSAPHPVYPTHFMSSVNSVTAEQTRVWDRKASAPNGAVHPSIPDGYRQGYY

SEQ ID NO: 24245 - protein, 545 aa, Campylobacter jejuni subsp. jejuni NCTC 11168
MAKEIIFSDEARNKLYEGVKKLNDAVKVTMGPRGRNVLIQKSFGAPSITKDGVSVAKEVELKDSLENMGASLVREVASKTADQAGDGTTTATVLAHAIFKEGLRNITAGANPIEVKRGMDKACEAIVAELKKLSREVKDKKEIAQVATISANSDEKIGNLIADAMEKVGKDGVITVEEAKSINDELNVVEGMQFDRGYLSPYFITNAEKMTVELSSPYILLFDKKITNLKDLLPVLEQIQKTGKPLLIIAEDIEGEALATLVVNKLRGVLNISAVKAPGFGDRRKAMLEDIAILTGGEVISEELGRTLESATIQDLGQASSVIIDKDNTTIVNGAGEKANIDARVNQIKAQIAETTSDYDREKLQERLAKLSGGVAVIKVGAATETEMKEKKDRVDDALSATKAAVEEGIVIGGGAALIKAKAKIKLDLQGDEAIGAAIVERALRAPLRQIAENAGFDAGVVVNSVENAKDENTGFDAAKGEYVNMLESGIIDPVKVERVALLNAVSVASMLLTTEATISEIKEDKPTMPDMSGMGGMGGMGGMM

SEQ ID NO: 24246 - protein, 288 aa, Oryza sativa
DAWATAAGGEVEVEQLPGFRFHPTEEELLEFYLKQVVQGKKLKFDIIPTVHLYRHDPRELPGLARIGEREWYFFVPRDRKQATGGGCFIRPSRTTERGFWKATGSNRAIRCAADPKRLIGLKKTLVYYEGRAPRGTKTDWVMNEYRLPDAAAIPDTMQLQMQHDDMVLCKVYRKAVSLKELEQRVAMEELARSTTSSGTHNTGSPLQQDSSSISISSSSDAMKKEVVGVDEASAAAHELVRPATLSLPQLEVARPQSGLEWMQEPFLTQLRSPWMETWSPYYASVLNF

SEQ ID NO: 24247 - protein, 181 aa, Arabidopsis thaliana
  misc_feature (162)..(162): Xaa can be any naturally occurring amino acid
  misc_feature (171)..(171): Xaa can be any naturally occurring amino acid
  unsure (1)..(181): unsure at all Xaa locations
MSKLQSEAVREAITTITGKSEAKKRNFVETIELQIGLKNYDPQKDKRFSGSVKLPHIPRPKMKICMLGDAQHVEEAEKMGLENMDVESLKKLNKNKKLVKKLAKKYHAFLASESVIKQIPRLLGPGLNKAGKFPTLVSHQESLESKVNETKATVKFQLRRSXHGSCSGNLXMEEKQIFGLL

SEQ ID NO: 24248 - protein, 568 aa, Escherichia coli CFT073
MGPLPRKGNMKQKITDYLDEIYGGTFTATHLQKLVTRLESAKRLITQRRKKHWDESDVVLITYADQFHSNDLKPLPTFNQFYPQWLQRIFSHVHLLPFYPWSSDDGFSVIDYHQVASEAGEWQDIQQLGECSHLMFDFVCNHMSAKSEWFKNYLQQQPGFEDFFIAIDPKTDLSAVTRPRALPLLTPFQMRDHSMRHLWTTFSDDQIDLNYRSPEVLLAMVDVLLCYLEKGAEYVRLDAVGFMWKEPGTSCIHLEKTHLIIKLLRSIIDNVAPGTVIITETNVPHKDNIAYFGEGDDEAHMVYQFSMPPLVLHAVQKQNVEALCAWAQNLTLPSSNTTWFNFLASHDGIGLNPLRGLLPENEILALVEVLQQEGALVNWKNNPDGTRSPYEMNVTYMDALSRRECSDEERCARFILAHAILLSFPGVPAIYIQSILGSRNDYAGVEKLGYNRAINRKKYSSKEITTELNNKATLRYSIYYKLSHLITLRRSHKEFHPDNNFTIDAINSFVMRIQRSNADGDCLTGLFNVSENIQHINITDLHGRDLISEVDILGNEITLHPWQVMWIK

SEQ ID NO: 24249 - protein, 569 aa, Glycine max
MEALKTLFLAIFVVLASALYSANAKIQEHEFVIQATPVKRLCNTHSTITVNGQFPGPTLEVNNGDTLVVKVTNKARYNVTIHWHGIRQMRTGWADGPEFVTQCPIRPGESYTYRFTIQGQEGTLWWHAHSSWLRATVYGALIIHPREGEAYPFTKPKRETPILLGEWWDANPIDVVRQASQTGAAPNISDAYTINGQPGDLYKCSSQGTTIVPIDSGETNLLRVINAALNQPLFFTVANHKLTVVGADASYLKPFTTNVIMLGPGQTTDVLIQGDQPPTRYYMAARAYQSAQNAPFDNTTTTAILEYKSAPCPAKGSSIKPVMPSLPAYNDTNTVTAFSKSFRSPRKVEVPAEIDDNLFFTIGLGLNNCPKNFNANQCQGPNGTRFTASMNNVSFVLPNNVSILQAHHLGVQGVFTTDFPTQPPVKFDYTGNVSRSLWQPVQGTKVTKLKFGSRVQIVLQDTSIVTPENHPIHLHGYDFYIVAEGFGNFDPNKDTSKFNLVDPPMRNTVAVPVNGWAVIRFVADNPGAWIMHCHLDVHIGWGLAAVLLVDNGVGLLQSIEPPPEDLPLC

SEQ ID NO: 24250 - protein, 126 aa, Xanthomonas oryzae pv. oryzae KACC10331
MRAGLNRTDQSLNTPHAAPATIVFDGVCLLCNGWVKFLLRHDRRARYRFAAMQGQAGRALLQQHGLDPDDPLSFLLVNHSGAWSDSDALVRVLAGLGGLWRFAAVCGGVVHDSAWLTRYRVSPHRA

SEQ ID NO: 24251 - protein, 455 aa, Xanthomonas oryzae pv. oryzae KACC10331
MSRLVVVSNRVAVPGENRAGGLAVGLLAALKERGGMWFGWSGKTVRGDSGGMHEQTEGDITFVTMDLNKRDIDSYYNGFANRTLWPLLHFRLDLVDYDRATREGYMRVNRLFAEKLAPLLKDSDTLWIHDYHMIPLCAMLRELGVGCKMGFFLHVPMPSADLVQAMPDHARLFNTFYAYDLVGFQTQRDAERFKAYVRLFGGGRILQGDLVEGPGGRRFTASSFPIGINTDLIANQAKASVGKQAVRDLRESLRGRQLAIGVDRLDYSKGLPERFQGFERYLERYPDQSGSLTYLQIAPVSRGDVTEYRQLRSQLEQIAGHINGGHAEPDWTPLRYVNQNFSHATLTGFYRAASVCLVTPLRDGMNLVAKEFVAAQDPENPGVLVLSLFAGAADEMKEALLVNPHDLDGVADAIATAASMPLVSRIERWHAMMDHLRKNNINHWRQRYLEALSEV

SEQ ID NO: 24252 - protein, 369 aa, Cryptococcus neoformans var. neoformans JEC21
MLPTTLFFLLTLALLGGCLAESLYNVLGVRKDASDADIKKAYRKLSKKYHPDINPDEAAHEKFIQVSKAYEVLSNSETRTIYDRHGEQGLKQHEAQKSGGSQDPFARFFGGGAAQEQKGPGLITNVEVSLADLYTGRTLEFQIPRRVICPHCHGSGAESEKDIHSCNKCGGQGVVVQRHQVFPGMFTNVQMTCPHCNGKGKQITRSCHVCHSEKTVQTQHTLALHIPAGAPEGFEEVFHGEADEQIDMEAGDVVVRVRSKLNEGEGAWRRKENGILGRVTLSVAEALLGFERRLTHLDGRTITLSRTGTTQPGEVEVIEGEGMPSYMDIPPGDMFIEYSVVFPTAVSSETRQKLSDILKYAPPVHHDEL

SEQ ID NO: 24253 - protein, 626 aa, Cryptococcus neoformans var. neoformans JEC21
MTSPLFLGLDASTQSLKASLLSVNLDVVAECAIHFDSDLPQFGTKGGVHFGSDGQVHSPVMMLVGAMDLLFDKIKIAGWKVDDIRGVAAAGQQHASVYWSKTSPKILASLNSSLPLSSQLVEAFSRPIIPNWQDSSTTAECQALDAAVGGPAALAQLTGSRAYERFTGAQIMRFKRVDPVAYDQTDRIGLVSNSVTTLLCLDGEVKGIDESDACGMNLWTMNRKQRGWNQELLKAIAGDDGAAELSRKLGTVETDGGRVVGRIGKWFVDRYGFSSECCVFPGTGDNPATFLSLTLRESEGLVSLGTSDVVLISTSAYHPDPDYHAFFHPAQIAPPSEQDDQNRQGAEPLRYFNMIVYKNGSLTRQHVRDLYFDGSWDKFNAAIEELRPKSVIDLPSRTAFWWLLPDIVPHGAHGIYKYITEPTAGTLFEVPAAKKVDQFPDIRQEALALLESQLFNYRSRASVILDDSSTPYDPSSPNVDAFLPRLTKVYATGGASANRTILSLMADVLSTKVCKNVEYLDGKWKDADWNACSVGVAYKARWGWERVIAADGDERKWVGFDTVIRECREARKKIRGDEGRGLELEEEGIRIVASPGPGSRAYERRIEWWRELERKALAEQRAEKTA

SEQ ID NO: 24254 - protein, 589 aa, Rubrivivax gelatinosus PM1
MWIEEGVTLGHRRLSILDLSENGKQPMSFGEGRYWITFNGEIYNFIEIRSELQALGHVFRTESDTEVILAAYQQWGEACMLRFNGMWSFAIWDRVEKSLFLSRDRFGKKPLFFAELPNGDFAFASEMKALLPLLPTVEPDDALIKGMTLRSSFAYEATERCLIKGVKRLLAGHCGKVVRGRVQSRRWWNTLDHIPTIPSSYGEQVEMMRELFLDACRIRMRSDVTIGTALSGGLDSSSVLSALAHINRTRGGESRLSADWQHAFVASFPGTPLDEANYAQRVAEHAGIKAEILPIDPTRHIDQLQNMLYLYEDMTVTSPIPFMSLYGRIKQGGVTVTLDGHAADELFGGYSNDWAYALLDAGTDRQQINEVLDLYEHNVPDNSTQFRKPSSRLASYAKHMGSAMAKHALGMHTNLGREYTDHPRWKELDHLSRALFWQTHSFVLPSILRSYDRYGMAASIEIRMPFLDWRIATFAFALPWTSKIRGGYSKAIIRDAIAPFMPHEIAYRRNKIGFNSPIVDWMRGPLRGFFLDTVNSTAFKQCGLVDAERATKLVHRVMHDPKATFKSGEQAWWSVLPFLWSNAMISRPA

SEQ ID NO: 24255 - protein, 574 aa, Pseudomonas putida KT2440
MLRNPSRRTFVKGLGAASTLAGLGLWRPLVQAAEGRDLAGQHFELFIGQTPVNITGRPRTALTVNNSLPGPLLRWREGDTVTLRVRNRLAQDTSIHWHGIILPANMDGVPGLSFAGIEPGGDYLYQFTLRQSGTYWYHSHSGLQEQAGVYGAIVIEPREPETHRYQRDHVLLFSDWSDQAPEHLMATLKTQSDAYNFHKRTVGDFIDDVAENGWSATVAERTAWARMRMSPTDLADISAATYTYLLNGQPPQGNFTCLFQPGETVRLRLINASAMTYFDFRIPGLKLTVIAADGLPVTPVSVDELRIAVAETYDVLVTVGDQPAYTLFAQSMDRTGFARGTLARAAGLQAPVPAPDPRPVLSMEDMGHGGMDAMAGMDHRNPQGMNHGSMAGMDHAAMSAMQQHPISETDNPLVDMQTMAPRPNLADPGIGLRDNGRRVLTYADLRSPYPDPDGRPPSRDIELHLTGHMERFAWSFDGIKFSDAEPLRLTYGERVRITLVNDTMMTHPIHLHGMWSDLEDEHGQFLVRKHTVDIPPGSRRTYRVTADALGRWAYHCHLLYHMETGMLREVRVDE

SEQ ID NO: 24256 - protein, 207 aa, Xanthomonas axonopodis pv. citri str. 306
MPAITIWGRRNSSNVRKALWCAEEAGVAYTSIEVGGAFGGNDTPAYRALNPNGVVPTLQDGALVLWESNAIVRYLAAQYAPALYPQAPAERALGDRWMDWTTSTFAGVFRDLFWGVVRTPEAERDHARIAAALTQSGELLARADAALAQQPYLSGGRFAMGDIPLGSFIYAWFEMPIERPELPHLQAWYARLRVRPAYQRGVMTALT

SEQ ID NO: 24257 - protein, 443 aa, Arabidopsis thaliana
MGSGRDRDDPLSFTSNPCTASSPVTVSDYLDNFLGEPTSRSGSFQSESLLGGGGGESINDADFGFARPDFRSEQLAGTVQFYERHVFLCYKKPSVWPARIEAAEFDRLPRLLSAAVSARKGSMKKETRLTICEGHDGTETSNGDVLIFPDMIRYRRLTHFDVETFVEEVLVKDGEWLPGNPELLKGSYVFVCSHGSRDRRCGVCGPSLVSRFREELEFHGLQGKVSISPCSHIGGHKYAGNVIIYRSNINREVTGHWYGYVTPEDVPILLEQHINKGEIVDRLWRGEMGLSEEDQKKTQEGRFQLNGTVHSVKINGKVSQESSVHNADVSCCQSRAAEPNGCCQQNGNSSSCCQDDTTLMLSLGTSEDNQLESENNTEKLTPGRKIAEKTFFRINSDKGSSTRKVCGIPTWLESWEREDTYAALAVVCAAASVAVAYTCYKQL

SEQ ID NO: 24258 - protein, 480 aa, Arabidopsis thaliana
MQISSSSFITKFTNLHMVRSTSDHHQWRHNYNLKQLFIPNLSVSNSQHLPLNQSVAAIVFGGGSDSELYPLTKTRSKGAIPIAANYRLIDAVISNCINSGITKIYAITQFNSTSLNSHLSKAYSGFGLGKDRFVEVIAAYQSLEDQGWFQGTADAIRRCLWVFEEFPVTEFLVLPGHHLYKMDYKMLIEDHRRSRADITIVGLSSVTDHDFGFGFMEVDSTNAVTRFTIKGQQDLISVANRTATRSDGTSSCSVPSAGIYVIGREQMVKLLRECLIKSKDLASEIIPGAISEGMKVKAHMFDGYWEDVRSIGAYYRANMESIKRCRLDLKFYDRQCPLYTMPRCLPPSSMSVAVITNSIIGDGCILDKCVIRGSVVGMRTRIADEVIVEDSIIVGSDIYEMEEDVRRKGKEKKIEIRIGIGEKSRIRRAIVDKNARIGKNVMIINRDNVEEGNREAQGYVIREGIIIILRNAVIPNDSIL

SEQ ID NO: 24259 - protein, 525 aa, Oryza sativa (japonica cultivar-group)
MDTSTLLIALTLVLLLLLLTARRRRSGRLRLRLPPEPPGLPLVGHLHLFRKPLHRTLARLAARHGAVFRLRLGSRRVAVVVSSAPAAEECLGAHDVAFAGRPRLPSAGILSYGWSTMGTAAYGPYWRHVRRVAVAEILSAHRVRQFAGAHAREARATARRLCRAASRQRHGAGAAAGRVRVELKSRLFELLMNTMMAMICDKTYYGADDDGEVSEEARWFREMVEETMALSGASTVWDFLPAALRWVDVGGVGRRLWRLRESRTRFLQGLIDDQRKEMEHDGDGRELPAAAARPRSMIGVLLSVQRQDPEECPDQLISSLCISSLEAGTGTSTDTIEWAMSLLLNNPDVMRKARDEIDAFIGQPVRLLEADDLPKLQYLRCIIMETLRLYPPAPLLVPHESSSDCTVAGFHIPRGTMLLVNTFDIHRDPHIWDEPTSFIPERFEDGRSEGKMAIPFGMGRRKCPAENLGMQMVGLGLGTMIQCFEWERVGEELVDMTEGSGLTMPKKVPLEAFYQPRASVMHLLS

SEQ ID NO: 24260 - protein, 316 aa, Shigella flexneri 2a str. 2457T
MNELDGIKQFTTVVADSCDIESIRHYHPQDATTNPSLLLKAAGLSQYEHLIDDAIAWGKKNGKTQEQQVVAACDKLAVNFGAEILKIVPGCVSTEVDARLSFDKEKSIEKARHLVDLYQQQGVEKSRILIKLASTWEGIRAAEELEKEGINCNLTLLFSFTQARACAEAGVFLISPFVGRIYDWYQARKPMDPYVVEEDPGVKSVRNIYDYYKQHHYETIVMGASFRRTEQILALTGCDRLTIAPNLLKELQEKVSPVVRKLIPPSQTFPRPAPMSEAEFRWEHNQDAMAVEKLSEGIRLFAVDQRKLEDLLAAKL

SEQ ID NO: 24261 - protein, 496 aa, Physaria fendleri
MTSLNIKLLYHYILTNLFNLCLFPLTAFLAGKASHLTKSDLLMFLSHLQDNLITVIVLFTFTIFCLVLYIVTKPKQIYLVDYSCYLPPDHLKVSISSVMDIFYELRKVDPLCEVGCDDSSLEFMRKVLERSGLGDETYVPLGLHQVPPQKTFAAIKDETEQVIKGALENLFENTKVNPREIGILVINSSMFNPTPSLSAMVINTFKLRSNIKSFNLGGMGCSAGVIAIDLAKDLLHVHKNTYALVISTENITITAYAGENRSMNVSNCLFRIGGAAILLSNKPRDKRRSKYKLAHTVRTHTGADDMSYRCVQQEEDEMGKVGVRLSKDITTVAGTAVKKNISTLGPLILPLSEKLLYFVSFIAKKLLKEKIKNYYVPDLKLAINHFCIHAGGRGVLDVLEKNLRLSPIDVEASRSTLHRFGNTSSSSIWYELAYIEAKGRMKKGDKAWQIALGSGFKCNSAVWVALRNVKASANSPWEHCIDRYPVPDTCVENGKS

SEQ ID NO: 24262 - protein, 471 aa, Legionella pneumophila subsp. pneumophila str. Philadelphia 1
MNKGMNAFVFLIAVIAGFGGFLFGFDSSVIADVKDQVISQLALTDWQWAQVVSSSLLGCILGIPISGLVADKLSRRSLLKVVALGFILGSSLCALAPGFVSILLGRFIIGICIGIASYIAPLFIAEIAPPHQRGTLVLINGLTITFGQAIAYLIGYFLHDYSLMSWRYLFWIGSLPALVLFSGMYFVPHSPRWIMIKYGADATLKTLKQIRPVGYNIQQELTEISNNLVNPAPAYIQMFKKPIVFVLLLGVGLGLFQQFSGINALMYYGPVVFESFGFSPVKNAILATFFLGLVNFIFTVVTLFYVDKLGRRFLLISGTLIASISLYFVSLLSCHSLFVNKFWILGGLSFYVMGYCISLGSLFWVLISEIYPLSVRGLAMSIATMFQWGANFVVSLLFLPIYQFSGQTVTFAMFATFCLLACWFIYYFVPETTSVSLEKLEENLSSGKKVRDIGQPVSKNIKIAKFNLIMD

SEQ ID NO: 24263 - protein, 233 aa, Vigna unguiculata
MQSIPLQKQVDYYSQVHETLRQQIEASSLEKHLSKSIFIVVIGGNDVFGYFDSKDLQNKNTPQQYADSMASTLKLQLQRLYNNGAKKFEIAGVGPIGCCPAYRLKNKTECASAANDLSAKYNEALQYMLKEWKLEKKDINYSYFDTYAALQDLIHNPTSYGFVNVKGACCGLGELNAQIPCLPVSSICSNRQDHVFWDAFHPTEAASRIFVDEIFKGPSKFISPINMEQLLAI

SEQ ID NO: 24264 - protein, 563 aa, Oryza sativa (japonica cultivar-group)
MNSAAAAAACASAPAWVVGGGAGGGARSARGPCGIRVCGLGGEAVALRSLRISQGAAVRRAAVAARAAAENGVAGSGGFDYDLVIIGAGVGGHGAALHAVEEGLKTAIIEGDVVGGTCVNRGCVPSKALLAVSGRMRELHDEHHMKSLGLQVSSPGYDRQAVADHANNLASKIRSNLTNSMKALGVDILSGFGAIVGKQKVRYGKVGFPDKEITARNIIIATGSVPFVPKGIEVDGKTVFTSDHALKLESVPDWIAIVGSGYIGLEFSDVYTALGSEVTFVEALDQLMPGFDPEIAKLAQRVLINPRNIDYHTGVFASKITPAKDGKPVQIELIDAKTKEHKETLEVDAALIATGRAPFTKGLGLENINVVTQRGFIPVDERMRVMDADGNVVPNLYCIGDANGKLMLAHAASAQGISVVEQISGRDHILNHLSIPAACFTHPEISMVGLTEPQAREKADKEGFEISVVKTSFKANTKALAENEGDGLAKLIYRPDTGEILGVHILGLHAADLIHEASNAIALGTRLQDIKFAVHAHPTLSEVLDELFKAAKVHFSAPFFSCV

SEQ ID NO: 24265 - protein, 178 aa, Bacillus cereus E33L
MSEKTYELATFAGGCFWCMVKPFDELPGIHKVLSGYAGGHVENPTYEQVKAGTSGHLEVVQITFDPSIFPYEKLLNLYWPQIDPTDDGGQFFDRGPSYRTAIFYHNEMQKELAEKSKQTLAESGMFKEPIVTEIRPAAPFYEAEEYHQHFYKKNPEKYATEQKESGRADFIKENWQKK

SEQ ID NO: 24266 - protein, 472 aa, Campylobacter jejuni subsp. jejuni NCTC 11168
MKKIFLSLSLASALFAASINFNESTATANRVNPAAGNAVLSYHDSIKDAKKSVVNISTSKTITRANRPSPLDDFFNDPYFKQFFDFDFSQRKGKNDKEVVSSLGSGVIISKDGYIVTNNHVVDDADTITVNLPGSDIEYKAKLIGKDPKTDLAVIKIEANNLSAITFTNSDDLMEGDVVFALGNPFGVGFSVTSGIISALNKDNIGLNQYENFIQTDASINPGNSGGALVDSRGYLVGINSAILSRGGGNNGIGFAIPSNMVKDIAKKLIEKGKIDRGFLGVTILALQGDTKKAYKNQEGALITDVQKGSSADEAGLKRGDLVTKVNDKVIKSPIDLKNYIGTLEIGQKISLSYERDGENKQASFILKGEKENPKGVQSDLIDGLSLRNLDPRLKDRLQIPKDVNGVLVDSVKEKSKGKNSGFQEGDIIIGVGQSEIKNLKDLEQALKQVNKKEFTKVWVYRNGFATLLVLK

SEQ ID NO: 24267 - protein, 174 aa, Oryza sativa
MAYQSFGAVDLAASFFFSSSSSSPQPGLVGVHGDRFLGGGGGDGGDGGSSYDGGGDGGAASGKGTRRDERKERRLASNRESARRSRVRRRRQLDELSSHVAELRAANHRLAVELNRAAARHAQMARENARLAEEARALRERLPLRGGGGGGGDGEAEEEAGGGCGAEAILAPMD

SEQ ID NO: 24268 - protein, 346 aa, Crocosphaera watsonii WH 8501
MRPGIKVPAKETILTPRFYTTDFDAVAKMDISVNEEELKAILEEFRTDYNRHHFVRRGEFAQTWEHIDGDTRRLFVEFLERSCTAEFSGFLLYKELGRRLKNKSPILAECFTLMSRDEARHAGFLNKALSDFNLSLDLSFLTKSRSYTFFQPKFIFYATYLSEKIGYWRYITIFRHLEKHPEDKIYPIFNFFENWCQDENRHGDFFDAIMKATPNILNNWKARLWCRFFLLSVFATMYLNDIQRSDFYAAIGLDAREYDKYVIEKTNETAGKVFPVVLDVENPEFYGRLETCVKNNEKLREIDASNSPAPVKFLRKLPAFVSNGVQFIKLYFVKPIRVDHLEGTVR

SEQ ID NO: 24269 - protein, 221 aa, Saccharomyces cerevisiae
MSATESSSIFTLSHNSNLQDILAANAKWASQMNNIQPTWFPDHNAKGQSPHTLFIGCSDSRYNENCLGVLPGEVFTWKNVANICHSEDLTLKATLEFAIICLKVNKVIICGHTDCGGIKTCLTNQREALPKVNCSHLYKYLDDIDTMYHEESQNLIHLKTQREKSHYLSHCNVKRQFNRIIENPTVQTAVQNGELQVYGLLYNVEDGLLQTVSTYTKVTPK

SEQ ID NO: 24270 - protein, 499 aa, Arabidopsis thaliana
MARKMLVDGEIDKVAADEANATHYDFDLFVIGAGSGGVRAARFSANHGAKVGICELPFHPISSEEIGGVGGTCVIRGCVPKKILVYGATYGGELEDAKNYGWEINEKVDFTWKKLLQKKTDEILRLNNIYKRLLANAAVKLYEGEGRVVGPNEVEVRQIDGAKISYTAKHILIATGSRAQKPNIPGHELAITSDEALSLEEFPKRAIVLGGGYIAVEFASIWRGMGATVDLFFRKELPLRGFDDEMRALVARNLEGRGVNLHPQTSLTQLTKTDQGIKVISSHGEEFVADVVLFATGRSPNTKRLNLEAVGVELDQAGAVKVDEYSRTNIPSIWAVGDATNRINLTPVALMEATCFANTAFGGKPTKAEYSNVACAVFCIPPLAVVGLSEEEAVEQATGDILVFTSGFNPMKNTISGRQEKTLMKLIVDEKSDKVIGASMCGPDAAEIMQGIAIALKCGATKAQFDSTVGIHPSSAEEFVTMRSVTRRIAHKPKPKTNL

SEQ ID NO: 24271 - protein, 407 aa, Streptomyces coelicolor A3(2)
MTDPSLAVTGLGLVTAAGMGVDATWEGVLRGRSAGARDERLAGLPVDIACAVPGLQPARHVDRRSVLIHDRFVQLAIVAAREAVADAGLDPLTWDGARVGVVVGCGLGGVTTWETQHRRLLERGPEAVSALLVPMLVPNMAAGHLAMDLRALGPNLVTATACASGGTALGTAARLLRDGTCDIVVAGGTEAGVSPLMVTGFAQMGALSRRVDDPAAASRPFDADRDGFVIGEGSGMLVLERAADAEARGATVRARLLGHGASADAHHVTAPDPEGAGALRAMEAALAQAGVTGRDIDHVNAHGTSTPLNDAVEAAVLGRLLGDRATVTSAKGVLGHTLGAAGAIEAALTVLSIERSTVPPTANLRRRDPAVDLDVVADAPREQKVELAMSNSFGFGGQNAVLVFASP

SEQ ID NO: 24272 - protein, 435 aa, Mycobacterium avium subsp. paratuberculosis K-10
MGLQAPFRSGGGTSRPQGRAAPRAVDLRREVHDAARRARVASRVLALLPAVAKDQALRSAADAIAGHAELILSANAEDLETARAAGTPSAMLDRLALDTKRVEGIAAGLRQVAGLPDPVGEVLRGYTLPNGLQLRQQRVPLGVVGMIYEGRPNVTVDAFGLALKSGNAVLLRGSSSATRSNQALVQVLRASLVSEDLPADAVQLLSADDRATVTHLIQARGLVDVVIPRGGANLINAVVRDAQVPTIETGVGNCHVYVHEGADLEVAERVLLNSKTRRPSVCNAAETLLVDAAIAEEALPRLVTALQDAGVTVHGGFARDATEDDLRREYLSMDIAVAVVDGVDAAIAHINEYGTGHTEAIVTTNMAAAQRFTDGVDAAAVMVNASTAFTDGEQFGFGAEIGISTQKLHARGPMGLPELTSTKWIAWGDGQTRPA

SEQ ID NO: 24273 - protein, 412 aa, Bacillus cereus ATCC 14579
MEKKRVVITGLGAVTPVGTDVETAWENIKKGVSGIGRLTRIDPELFPAKVAAEINDFEVEKYIDKKEARRMDRFTQYAVAAAKMAVADAKLEITEENGPRIGVWIGSGIGGMETYEEQFKIFTEKGPRRVSPFFVPMMIPDMAAGQVSIATGAKGINTCSVTACASGANSIGDAFKAIQRGDADAMITGGAEAPLTSMAFAGFSSAKALTFNEDPATACRPFDKNRSGFVMGEGSGILILEELEHALARGAHIYAEIAGYGATGDAFHITMPAPGGEGGVRAMRQALADAGLQPEDIDYINAHGTSTDANEKYETMAIKETFGEHAYKVAISSTKSMTGHLLGAAGAVEAIFSIKSITDGVIPPTINYETPDPECDLDYVPNQARHQEVNAVLSNSLGFGGHNAVLVFKSYK

SEQ ID NO: 24274 - protein, 419 aa, Lotus corniculatus
GQCGNQIGSKFWEVVCDEHGLDPTGRYVGNSDLQLERVNVYYNEASCGRFVPRAVLMDLEPGTMDSVRTGPYGQIFRPDNFVFGQSGAGNNWAKGHYTEGAELIDSVLDVVRKEAENCDCLQGFQVCHSLGGGTGSGMGTLLISKIREEYPDRMMLTFSVFPSPKVSDTVVEPYNATLSVHQLVENADECMVLDNEALYDICFRTLKLTTPSFGDLNHLISATMSGVTCCLRFPGQLNSDLRKLAVNLIPFPRLHFFMVGFAPLTSRGSQQYRALTVPELTQQMWDSKNMMCAADPRHGAYLTASAMFRGKMSTKEVDEQMINVQNKNSSYFVEWIPNNVKSSVCDIAPKGLSMASTFIGNSTSIQEMFRRVSEQFTAMFRRKAFLHWYTGEGMDEMEFTEAESNMNDLVSEYQQYQDA

SEQ ID NO: 24275 - protein, 509 aa, Oryza sativa (japonica cultivar-group)
MDALLIALFLLLLIALMETARVRRSGTQRRAGNVPPPPPEPAGLPLVGHLHLFRKPLHRTLARLAARHGGAVFGLRLGSRRVAVVSSAPAAEECLGAHDVAFADRPRLPSGRILSYDWSTMGTASYGPYWRHVRRVAVTEILSARRVQHFADVHVREARAMARHLHRAAVRHGVGGAARVRVELKSRLFELLMNTMMAMICDKTYYGDDDDGKVSKEARWFREMVEETMALSGASTVWDFLPAALRWVDVGGVGRRLWRLRESRTRFLQGLINDERKEMEQEQGGDRAQPAARRRTMIGVLLSVQRQDPDACPDQLIRSLCISSLEAGTDTSADTIEWAMSLLLNNPNVMRKARDEIDAFIGQPCIIMETLRLYPPAPLLVPHEASTDCSIAGFHITRGTMLLVNTFAIHRDPQVWNEPTSFIPERFENGRSEGKMAIPFGMGRCKCPAENLGMQMVGLALGTMIQCFEWERVGEELVDMTEGSGLTMPKEVPLQAFYQPRASLMHLLY

SEQ ID NO: 24276 - protein, 604 aa, Frankia sp. EAN1pec
MREYTSPARVTVADDMTLSDAVFANASRTPEKVIVRHKSGGQFVDVTAQEFRDLVVRTAAGLAARGVHPGDRVAIMSRTRYEWTVVDYAVWVAGAVTVPIYETSSASQLEWILSDSEAVLTVVESEANAALVATVRDQVPTLREVLALDGGALDTLAEAGAAAGTGEEELAAARAGVTAASIATIIYTSGTTGRPKGCELAHRSLLFNAMSSAATMPDLFTEDASTLMILPLAHVLARTMQCTIINSARCIAYAPDTSTLLADLAQVRPSFLLAVPRVYEKVHAGARAKAHADGKGRIFDAAEATAIAYSEALDHGGPGFLLRARHALFDRLVYSKLRAAMGGRIDHAISGGAPLGPRLCHFYRGIGVPIFEGYGLTESTAAATVNRPDSLKIGTVGLPLPGVTIRIADDGEILIRGDLVLSGYRNDETAAKEALDADGFLRSGDLGSLDETGHLRITGRKKELLVTAGGKNIAPAPLEHRIQENPLISQAMLIGDQRPFIAALITLDPDAFASWRDTHGHPSTVTPADLATDPELLAEVQKAVDAANATVSHAESIKKFVILPNDFTVAGGELTPSLKVKRNLILERHAAVVESIYAGARTAS

SEQ ID NO: 24277 - protein, 468 aa, Brassica napus
MNVMRRLKSIASGRTSISSDPGVDSSLKRPKLDQDNDNLSSRGDDPMQVDQSTDMVVVSQDTVAGTSNVPPPPDQLPEVMNDMRLREDEPHANRGEEDKDMEPPIVNGCGTETGQVITTTVGGRDGKPKQTISYMAQRVVGTGSFGVVFQAKCLETGEQVAIKKVLQDKRYKNRELQIMRLQDHPNVVRLRHSFFSTTDKDELYLNLVLEFVPETVYRALKHYTKMNQHMPIILVQLYTYQICRALNYLHRVVGVCHRDIKPQNLLVNTHTHQLKICDFGSAKMLVPGEPNISYICSRYYRAPELIFGATEYTNAIDMWSGGCVMAELLLGQPLFPGESGIDQLVEIIKILGTPTREEIRCMNPNYTEFKFPQIKAHPWHKIFHKRMPPEAVDLVSRLLQYSPNLRCTALEACAHPFFDDLRAPNVSLPNGRALPPLFNFTAQELAGASTELRQRLIPAHCQGTGNSS

SEQ ID NO: 24278 - protein, 519 aa, Botryotinia fuckeliana
MTTLLLSSSLLSSAGANTVQMSIAKNHANEAEQLQRRQQHLQRRGMGEAMRVEERADTVTANLGNAVTSGLYYANVTVGTPAQALSLQIDTGSSDVWVPSSSASICEDTRDGGCPGGSFDFSASKTFLDVDQDAFNISYVDGTGSTGDYFQDTFSIGGATVKGFTMGLATDTSIPIGIMGIGYNSSEANIQTGNGTTYPNLPNVMVSSGLIKTNAYSLWLDDLQSSTGSILFGGIDTEKYIGDLVTVDVYPSSREGSVTSFTVAWTSLSVQSSSGTDQLTPTDFARPAILDSGTTITLLPDDVAALVFEELGATVSQQIGAVVVPCALAKKNGTINYGFGGVGGPTIKVDVSQLVLPLTTTDGRTPTYNNGDPACQLGIQAAGSNPTLFGDTFLRSAYAVYDLDNNRIGLAQTNFDATGSNIVPFASAGAAIPSASSAPNEEAVTQTASGVPRVGVTPTATGTGQATYNPTATGFNAEEGFTSTASATSSSKKSAGSGGPAPFEWARVFVGGFATTMVA

SEQ ID NO: 24279 - protein, 194 aa, Magnetospirillum magnetotacticum MS-1
  misc_feature (2)..(2): Xaa can be any naturally occurring amino acid
  unsure (1)..(194): unsure at all Xaa locations
MXRGAGRRFRFASSLPALLAAGEVDTSIDKAALHHYMSWHAGVPAPLTILAGVRKLHPATTVTFEPDGSRKEETYWSLVVGPRAEDRFMTEGDWRAAVLDSLATAVARRQIADVPTGVLLSGGLDSSVIVALLAQNGQAGLKTFSVGFDAVNGVEGDEFKYSDIIAERFATDHTKLVVDGSRTLDALPGAIHAM

SEQ ID NO: 24280 - protein, 485 aa, Yarrowia lipolytica CLIB122
TILLYFCDQLGSRQSDCLAKLLNCYPALGFYILTQLPFYDKIAYTVGIAITFFIMAGIPLYGAHASTSDPYSFTRAISASSHGTLMELGVGPMVTSGIIFQILGGFQALNVNFDIRADRELFQSGQKIFALLLTFFHAIFLVFFAQTYGTISTDSAVSELSLGAAVLIVAQLTAAGLVLILLGEIVDKGYSFGSGSGLFTALSVSQNFMWQNLALLKVHQEFVGSIPALLMGLWKNGLFNFGGSYRYVIENSFFRQNLPNLLQLYMSVAVFMLTIYLNTFRVDIPIKSSRVRSLATAFPVKLLYTGSMCLFLLSAFSQNVLIYSQSLYVQFPDNLMVQVLGSWGADGSPVGGIAYYISPNNFGYDVIKMVLYSVYTIVGCTLFSKYWAEISGSAPKDVAKQFQAQSIVIVGQRAQSAPRELAKVIPVAAAVGGAVVGAIVAFCDIFGGLGASAAPMIVAVTSMNNYFEILAQEGDIAQMGKAFGM

SEQ ID NO: 24281 - protein, 374 aa, Thermus thermophilus HB8
MVIYREEYRLYNFGPDHPFSPVRLEMLTSLLQALGVWRAPLSPPEASREEVLSVHSERLVKRVEAASRGELYPDLEHYLGTGDTPVFPGMDRAARILVGGTLEGARRIMAGEKRVLQLGGGLHHAQYDRASGFCVYNDLSVAIRHMTQVGLRVAYVDIDVHHGDGVQWIHYEEGEVLTLSLHESGRYLFPGTGHVYEIGRGAGLGKKLNLPLEPFTEDESYLEVFEALVPWALKAFRPDVLVVQAGADAHYLDPLADLLLTARAYERLFRLLLEYAEAYAGGRVLFTLGGGYSLDGTVRVWALLYHLFHGLPLPERLPEGWLRTWEARLGRPLTPTLHDPEGAYPEIPRREEIAKRNRLTLQRLTELVAPHLLH

SEQ ID NO: 24282 - protein, 475 aa, Oryza sativa (japonica cultivar-group)
MSGGVLVALMVLLLVAAPALLSRLERRRRPPPGPVALPVVGHLHLLRRPLHRTLARLAARHGAAAVMGLRFGSRRVAVVSSAPAAEECLGPHDLAFADKPRLPSGEILSYEWSTMGTASYGPYWRHIRRITVTELLSAHRVQHFAGVNARELKSRLFELFMNIMMAMICDRTFYGDGDDEVSEEARWFRSVVKETMELSGASTAWDFLPAAARWLFARRLTRRMRELSDSRTRFYQRLITDHRTKEKTDDDNAAAGDHSPAPRRRTMIGVLLSLQSKDPDACPDQLIRALCIGSLQAGTETSAAVVEWAMSLLLNNPGAMARARGEIDACVGQPAARLLEAADLPKLHYLRCVVMETLRLYPPVPLLAHESSADCDVAGFHVRKGTMLLVNTFAIHRDPQMVIPFGMGRRGCPGENLAMQMVGLTLGTLIQCFDWERVGEELEDMGESSGITMPKKLPLEAFYQPRACMVHLLSS

SEQ ID NO: 24283 - protein, 481 aa, Botryotinia fuckeliana
MRTTTFITAAVGLLSTCTDAIQLQKRTDGPARVVGLDVVRKSVENPLARDKLRKLRRRSKTVTATLDNEETLYFANGTLGTPAQSLRLHIDTGSSDLWVNTASSTLCSRKTNPCQTAGTYTANSSSTYAYVASDFNISYVDGSGASGDYVTDTFTIGSATLDKLQFGIGYTSSSPEGILGIGYEINEVQVGRAGKKAYNNLPAQMVADGLINSNAFSLWLNDLDASTGSILFGGVDTAQFHGQLETLPIEKESGYYAEFLITLTEVMLGDTVIAQDQALAVLLDSGSSLTYLPDAMAEAIYEQVEAQYDASEGAAYVPCSLATNTSALNFTFTSPTIQVTMNELVIPVTSTTGQQLQFTDGTAACLFGIAPAGDSTSVLGDTFIRSAYIVYDLDNNEISLAQTNFNATSTSVVEITTGTTAVPSATLVANPVTASSGSSGSEMSGSVTLSSGSKSKNAGAMQTPPPLAYGMAVLGAGLYYA

SEQ ID NO: 24284 - protein, 965 aa, Thermus thermophilus HB8
MDPLWYKDAVIYQLHVRSFFDANNDGYGDFEGLRRKLPYLEELGVNTLWLMPFFQSPLRDDGYDISDYYQILPVHGTLEDFKRFLDEAHGRGMKVIIELVLNHTSIDHPWFQEARKPNSPMRDWYVWSDTPEKYKGVRVIFKDFETSNWTFDPVAKAYYWHRFYWHQPDLNWDNPEVEKAIHQVMFFWADLGVDGFRLDAIPYLYEREGTSCENLPETIEAVKRLRKALEERYGPGKILLAEANMWPEETLPYFGDGDGVHMAYNFPLMPRIFMALRREDRGPIETMLKETEGIPETAQWALFLRNHDELTLEKVTEEEREFMYEAYAPDPKFRINLGIRRRLMPLLGGDRRRYELLTALLLTLKGTPIVYYGDEIGMGDNPFLGDRNGVRTPMQWSQDRNAGFSRAPYHALFLPPVSEGPYSYHFVNVEAQRENPHSLLSFNRRFLALRNQHAKIFGRGSLTLLPVENRRVLAYLREHEGERVLVVANLSRYTQAFDLPLEAYQGLVPVELFSQQPFPPVEGRYRLTLGPHGFALFALKPVEAVLHLPSPDWAEEPAPEEADLPRVHMPGGPEVLLVDTLVHERGREELLNALAQTLKEKSWLALKPQKVALLDALRFQKDPPLYLTLLQLENHRTLQVFLPLLWSPQRREGPGLFARTHGQPGHFYELSLDPGFYRLLLARLKEGFEGRSLRAYYRGRHPGPVPEAVDLLRPGLAAGEGVWVQLGLVQDGGLDRTERVLPRLDLPWVLRPEGGLFWERGASRRVLALTGSLPPGRPQDLFAALEVRLLESLPRLRGHAPGTPGLLPGALHETEALVRLLGVRLALLHRALGEVEGVEGGHPLLGRGLGAFLELEGEVYLVALGAEKRGTVEEDLARLAYDVERAVHLALEALEAELWAFAEEVADYLHAAFLQAYRSALPEEALEEAGWTRHMAEVAAEHLHREERPARKRIHERWQAKAGKA

SEQ ID NO: 24285 - protein, 286 aa, ASPERGILLUS NIDULANS FGSC A4
MRLSLSRLSPRDLKPYAAEFLGTGLIIVIGDGVVAQALLSDYQYGTWLSINLAWAAAVCLSGYLATPSPACNPAISIIMALIRPQPDQWKKIPGKLLAQFLGGFVGALLVYINYRSAILAWDPEYTIPGGSILSPRGHHSAGIFCTYPAAFFSSNWEAAFNEVLGAAVLMFGVLSVSDPANAHRFQSPQLSMFLLLVAIGAALGWQTGYAINPARDFGPRLFSAFLYGQEVFTAANYYFVVPLFAPFIGCFVGASVYDSFLYEGSGSRIADALDKAADRNGELRLD

SEQ ID NO: 24286 - protein, 479 aa, Oryza sativa
MTGFGLLVQTISSGASGHIDEGAADEEEARWSSWRRKELRGGAVVAHGTGWCACGTTSTPIWRSRSGNTTPAPLVRNELERLGLTTRMDTDIGIIIDFGFSLLPFITLLIDMESWTLSLPPPFPPRSSASSLTSACQRREEIELSCKRHVNAMQGRAQRVVQGRDIVRRGGQRKSRFLFSFPGLLAPAAAASGGRVGELADLGTKNPLLYLDFPQGRMKLLGTHVYPKNKYLTLQMSRSTKGVVCEDVFESLIVFSEAWWIGTKEENPQELKLDFPKEFQNDGAVADSDFKGGAGASCDEAVTINKPPKETTTGSLSPKIESDIDSSEDSDLKDEDNTQSTSQAPSVRQSARTAGKALKYTEISSGDDSSDNDDEIDVPEDMDEKVKSPAVKNESQSEDIKPADSSAQPISAKKEPLVQATLSSMFKKAEEKKRCTRSPKGSPATKGPAAKKQRASPEEKHPTGKKSGKCSSKSVVRSV

SEQ ID NO: 24287 - protein, 234 aa, Thermus thermophilus HB8
MRAENPVFFLDYDGTLAPIAQRPEEAFPHPEAPRVLRALMERHPVYVVTGRRVRDLEPLLPLPGLPVVGGHGLEEGVLFGEVRPLFPVDLGPLRARLPSCPGVRVEDKGFALALHYRGAEDEEKARACLEAWLKAVEGLLEALGLEALPGKKVLELKPKGVDKGQAVLRLLGRHPDHTPVYIGDDTTDEAAFLALRGRGLTFKVGEGPTAAQGRLKDVEEVLAYLQTYLRPTSL

SEQ ID NO: 24288 - protein, 554 aa, Parachlamydia sp. UWE25
MNKTNFKNHFSQQHQQKIDELVAISKDQGFITYEEINEILPMSFDSADQIDQILIFLSGMDIQVLNQSEVDRQKERKKEAKELESMPKRSEGSPDDPVRMYLKEMGSVPLLSREEEVEISKRIEKAQVQIERIILRFRYATSEAIAIANYLLTGKERFDKSITEKEVVNKQEFMNLLPRICQLLKEEDLILERLLEQINDPNIKKNDRLKLIEDIEKCRIRMQAYLRRLHLRHNIIDDFVEVILRAYDRFLFLEKEIQELTPRAERNKFAGAKLAAAQRKLNKRELAAGRSLDDFKKDVKMLQRWMDKSQEAKREMVESNLRLVISIAKKYTNRGLSFLDLIQEGNMGLMKAVEKFEYRRGYKFSTYATWWIRQAVTRAIADQARTIRIPVHMIETINKVLRGAKKLMMETGREPSPEELAKELGITAERVREIYKIAQHPISLQAEVGDGGESQFGDFLEDTGADSPAEATGYSILKDKMGEVLSTLSDRERKVLIQRFGLLDGKPKTLEEVGVEFNVTRERIRQIEAKALRKMRHPIRSKQLKAFLDLLEAE

SEQ ID NO: 24289 - protein, 492 aa, Zantedeschia aethiopica
MDPCKYRPSSSYDASFTTTNAGGPVWNDDVALTVGSRGPILLEDYHLIEKVAHFARERIPERVVHARGASAKGFFECTHDVTHLTFADFLRAPGVQTPVIVRFSTVIHERGSPETIRDPRGFAVKFYTREGNWDLLGNNFPVFFIRDGIKFPDVIHAFKPNPKSNVQEYWRVLDFLSHLPESLHTFCFLYDDVGVPLNYRHMEGFGVNTYTFINKAGKTNYVKFHWKPTCGVKCMLEDEAVVVGGKNHSHATQDLYDSIAAGNYPEWKLFVQVMDPDEEDKYDFDPLDDTKTWPEDLLPLQPVGRLVLNRNIDNFFNENEQLAFSPGIIVPGIYYSDDKMLQCRTFAYGDTQRYRLGPNYLMLPVNAPKCAHKNSHYDGLMNFMHRDEEVNYYPSRHDRLRNAERFPINNRPIIGKREKCTIEKQNDFKQPGERYRSWAPDRQERFVRRWVEALAHPKVTFEIRTIWVSYLSKCDASLGQKVANRLNMKPSM

SEQ ID NO: 24290 - protein, 373 aa, Oryza sativa (japonica cultivar-group)
MARGKNHPDGEEEEAPAAAGEEEAPVEMDEEGEMEEEEEEEQGEGEGEERDEGEEEEEWEDAEEVEGGEESEQAAAEEEDSPLVVVEAEAAAPVVDGSPPKLAEGYYEIEDIRRRRLRKGKLQYLVKWRGWPESANTWEPLENLSACSDIIDAFEMRLQSPRPGRKRKRKITTTPVAGSNPSHGLDASGSVVRNQLAQNIVQEGSSSVISRTPCQELPLSIRLTDQQNEHHLVNGSSNSENLVKVPPSQGGQVTGAKKRKSGNVRRFEQNKPTQGQGECGALVVAEDVGSTEGETGDKKKTEGCPNRVHITKIIKPVRFAAAVNNDVQQVSITFKALRSDGQEVMVDDKELKANNPLLLISYYEQCLRYNPTS

SEQ ID NO: 24291 - protein, 102 aa, Glycine max
AFAVSGHKYGLVYAGIGWVIWRSKEDLPEELIFHINYLGADQPTFTLNFSKGSSQVIAQYYQLIRLGYEGYKMVMENCYDNMAVLKERLEKIRKVEIIFQDI

SEQ ID NO: 24292 - protein, 113 aa, Zea mays
MQSLTVAAAKTLRNRIFSRSGSTSAGPSRWATPGHEERPKGYFMNRTPPPPGQSRKWEDWELPCYITSFLTIVILGVGLNAKPDLSIETWAHQKALERLQMERLASSAGDSSD

SEQ ID NO: 24293 - protein, 502 aa, Oryza sativa
MRKAAALASAAMAAAAVAVVSTVLHQRQRRAAKRSERAEAVLLRDLQERCAAPVELLRQVADAMAAEMRAGLAAEGGSDLQMLVTYVDSLPSGGEKGMFYALDLGGTNFRVLRVQLGGKERRIIKQDSEGISIPQHLMSSSSHELFDFVAVALAKFVASEGEDCHLPEGTQRELGFTFSFPVKQKSLASGTLIKWTKSFAIDEMVGKDVVAELNMAIRSQGLDMKVTALVNDTVGTLAAGRYVNHDTIAAVILGTGSNAAYIDHADAIPKWHGSLPKSGNMVINMEWGNFKSSHLPLTEFDQELDAESLNPGKQVYEKSISGMYMGELVRRILLKMAQETRIFGDNIPPKLERPYILRTLDMLIMHHDTSSDLRTVANKLKEVLGIEYTSFTTRKLVLDVCEAIATRGARLAAAGIYGIIQKLGQHSDSPSTRRSVIAVDGGVYKYYTFFSQCMESTLSDMLGQELAPSVMIKHVNDGSGVGAALLAASYSQYHQAESADSS

SEQ ID NO: 24294 - protein, 47 aa, Vigna unguiculata
RVCESQSHGFKGACTGDHNCALVCRNEGFSGGNCRGFRRRCFCTLKC

SEQ ID NO: 24295 - protein, 549 aa, Shewanella sp. MR-4
MTLASIRRGYHVIKTLLQYGLDDVLPPKMTPWYFKLARNSLFWIRNKHKGKSGGERLKLAMQELGPVYIKLGQMLSTRRDLLSDEWANELAMLQDKVPPFDGALARQAIETELKAPIESFFDDFNETPLASASISQVHTATLKSNGKAVVLKVLRPNVEAKIQADLLLMSQTAKIIDYLLGEGNRLRPSEVIEDYRVTILGELNLKLEALNAIKLRNNFLDSDALYIPYVYEEFCYPRLMVMERIYGIPVSDIAALKAQGTNFKLLAERGVELFFTQVFRDNFFHADMHPGNIFISRDHPENPYYIGLDCGIMGTLSEVDKRYLAENFLAFFNRDYHRIAQLYIESGWVSEKTDLQAFEQAIKVVCEPMFNKPLDEISFGHVLLELFRTARHFDIVVQPQLVLLEKTLLYIEGLGRQLYPQLDLWQTAKPFLEQWMAEQVGPKAMFKKVSTKLPYWSDKLPEFPELIYDNLKLGRKLLSSQQQMLDKYLKYQQQAHKSNYLLITSAILLICGTLLFNQDATLWSPYVCLISGAALWIIGWRSRPKNRKF

SEQ ID NO: 24296 - protein, 328 aa, Triticum aestivum
MADHLQVQQQHQHQLELPSGFRFHPTDEEIITSYLVPKVLNPTFTAIAIAEVDLNKNDPYELPKKAKMGEKEWYFYCQKDRKYPTGIQTNRATKAGYWKATGKDKEIFHPLPTLIGMKKTLVFYKGRAPRGEKTNWVMHEYRLEISKQPAYGPSTAIAKAAAINASSKKERVVCKIFHKNIGVKKVVTPSYAMHMPMFIGGEQQQGSLNSCTFPPPMDYGASLSLAPPLFLSEDSSYQLHAARVGLAMTGSLVLPMVNNPHHEMMGGNPMVSYQQQQMMQMQMQMGADQCFMVGVEPGSESSSMVSREGVDRLGNNVQGNGATTTIDS

SEQ ID NO: 24297 - protein, 207 aa, Candida glabrata CBS138
MAFTDFSKIDTVKELNTVLGEKSYVEGTSATQADVEAYKAFRTAYPNFSRWFNHIAAKADEFDSFPAASGASAAAEEEDDDDVDLFGSDDEVDEEAEKLKAQRLEEYNKRKAAKGPKPAAKSIVTLDVKPWDDETDLEEMLANTKAVQMDGLNWGAHQFIPIGFGIKKLQINCVVEDAKVSLDDLQQAIEDDEDHVQSTDIAAMQKL

SEQ ID NO: 24298 - protein, 389 aa, Glycine max
  misc_feature (229)..(229): Xaa can be any naturally occurring amino acid
  unsure (1)..(389): unsure at all Xaa locations
MASRVSIGNLTSSAPYINSPHFRSQLKLSSNSSLHKPLMRDKTVLVTGGAGYIGTHTVLQLLLGGCRTVVVDNLDNSSEVSIHRVRELAGEFGNNLSFHKVDLRDRDALEQIFVSTQFDAVIHFAGLKAVGESVQKPLLYYNNNLTGTITLLEVMAAHGCKKLVFSSSATVYGWPKEVPCTEEFPLSAMNPYGRTKLIIEEICRDVHRAEPDWKIILLRYFNPVGAHPXSGCIGEDPRGIPNNLMPFVQQVAVGRRPALTVFGNDYNTTDGTGVRDYIHVVDLADGHIAALLKLDDPNIGCEVYNLGTGKGTSVLEMVRAFEMASGKKIPLVMAGRRPGDAEIVYASTKKAERELKWKAKYGIDEMCRDQWNWASKNPYGYGDQEDSTV

SEQ ID NO: 24299 - protein, 310 aa, Oryza sativa (japonica cultivar-group)
MKVMRKDKILEKNHAEYMKAERDILTKVDHPFVVQLRYSFQTKYRLYLVLDFINGGHLFFQLYKQGLFREELARIYTAEIVSAVAHLHDNGIMHRDLKPENILLDADGHAMLTDFGLAKEFNENTRSNSMCGTVEYMAPEIILGRGHDKAADWWSVGILLFEMLTGKPPFVGNRDKVQQKIVKEKLKLPSFLSSEAHSLLKGLLHKEGGKRLGSGPGGSDEIKRHKWLKPINWRKLEARQIQPSFRPNVSGLTCIANFDECWTSMPVLDSPVATPVAGGAGHSSFAGFTYVRPAPFLQDVKPPSSSRLKD

SEQ ID NO: 24300 - protein, 202 aa, Saccharomyces bayanus
MATNITWHPNLTYDERKELRKQDGCTVWLTGLSASGKSTIACALEQLLLQKNLSAYRLDGDNIRFGLNKDLGFSEQDRNENIRRISEVSKLFADSCAVSITSFISPYRVDRDRARDLHKEAGLKFIEIFVDVPLEVAEQRDPKGLYKKAREGVIKEFTGISAPYEAPKAPELHLRTDQKTVEECAAIIYEYLVNEKIIRKHL

SEQ ID NO: 24301 - protein, 397 aa, Trifolium pratense
MASASASLFKSSLVLDKSEWVKGQTLRQPMSVVRCSPAAPSSLTIRAGAYTDELVKTAKTIASPGRGILAMDESNATCGKRLASIGLENTEVNRQAWRTLLVTVPSLGEYISGAILFEETLYQSTVDGRKIVDVLVEQNIVPGIKVDKGLVPLAGSNDESWCQGLDGLASRSAAYYQQGARFAKWRTVVSIPNGPSALAVKEAAWGLARYAAISQDNGLVPIVEPEILLDGEHNIDRTFEVAQKVWAEVFYYLAENNVQFEGILLKPSMVTPGAESKDRASPATVADYTLKLLQRRIPPAVPGIMFLSGGQSEVEATLNLNEMNKSPNPWHVSFSYARALQNTALKTWGGRIENVKAAQEALLHRAKSNSLAQLGKYAGDGESEEAKKELFVKGYVY

SEQ ID NO: 24302 - protein, 529 aa, Thermus thermophilus HB8
MSWWQRAVIYQVYPRSFQDTNGDGVGDLEGIRRRLPYLKSLGVDALWLSPFYKSPMKDFGYDVADYCDVDPVFGTLQDFDRLLEEAHALGLKVLVDLVPNHTSSEHPWFLESRASRNSPKRDWYIWKDPAPDGGPPNNWQSFFGGPAWTLDEATGQYYLHLFLPEQPDLNWRNPEVREAIKEVMRFWLRRGVDGFRVDVLWLLGKDPLFRDEPGSPLWRPGLPDRARHEHLYTEDQPETYAYVREMRQVLDEFSEPGRERVMVGEIYLPLPRLVRYYAAGCHLPFNFSLVTEGLSDWRPENLARIVETYEGLLSRWDWPNWVLGNHDQPRLASRLGEPQARVAAMLLFTLRGTPTWYYGDELALPNGLIPPEKVQDPAALRQRDREPTAYHTLGRDPERTPMPWDASPYGGFSTVEPWLPLNPDYRTRNVAAQEKDPRSMLHLVKRLIALRKDPDLLYGAYRTYRAREGVYAYLRGEGWLVALNLTEKEKALELPRGGRVVLSTHLDREERVGERLFLRPDEGVAVRLD

SEQ ID NO: 24303 - protein, 349 aa, Streptococcus pyogenes M1 GAS
MKAATYLSTGNLQLIDKPKPVIIKPTDAIVQLVKTTICGTDLHILGGDVPACKEGTILGHEGIGIVKEVGDAVTNFKIGDKVIISCVTSCHTCYYCKRGLSSHCQDGGWILGHLINGTQAEYVHIPHADGSLYHAPDTIDDEALVMLSDILPTSYEIGVLPSHVKPGDNVCIVGAGPVGLAALLTVQFFSPANIIMVDLSQNRLEAAKTFGATHTICSGSSEEVKAIIDDITNGRGVDISMECVGYPATFDICQKIISVGGHIANVGVHGKPVDFNLDELWIKNITLNTGLVNANTTEMLLNVLKTGKIDATRLITHHFKLSEVEKAYETFKHAGANNALKVIIDNDIS

SEQ ID NO: 24304 - protein, 535 aa, Ashbya gossypii ATCC 10895
MQTEEEALTASLAAFDKKLGTYRSINAGNYADDAVSGSYSVVVNSRYAMLCGSDFEEPLDGAQTLRAECISILRSSLPISMAFLMEFSMTICSLFIIGHLCTAMELASASLAVMTYNITGLSLVEGLATALDTVCPQAYGSQRYSKVGLYFLRGSAMIMVGMSLTAIIWFFSASWLQLLIPEADLIPKIQLYLRIMILGIPALVLFSTGKRYLQAQAVYEASTYVLAIVFPLTIVFVLGFTRHFGFVGAPIGIVTSQWLMVIILFVFARSIRPDTLRCWYPFMQSSHHFKRVFTHWRPLWDLAFPGLVMLEAEFLSIEALTLISTYFGVNAIASQTVIANLSSLIYQIPFAIGCVISNRVAHYVGSGLIKNAQMTIKASYCLASIVGVSMCLFVAFLNKPLARLFTNNEEVVELAHSVSYILAVNQIYDAFNTFGAAILRGQGRQRLGGIWNMIAYYIVSLPLGWWLAFGPLKLKLAGLWYGCGIGILILALAFSWYIYNSDWQLIIQECNKRENTEVENDMLHSDSVDASFSSQ

SEQ ID NO: 24305 - protein, 404 aa, Zea mays
  misc_feature (267)..(267): Xaa can be any naturally occurring amino acid
  misc_feature (274)..(274): Xaa can be any naturally occurring amino acid
  unsure (1)..(404): unsure at all Xaa locations
MATALGGGPNPTADALEGDPPRASADEKHVATIIAGGSDAVTGHIISTTIGGKNGEPKRTISYMAERVVGTGSFGVVFQAKCIETGETVAIKKVLQDKRYKNRELQIMRSIDHCNVISLKHCFFSTTSRDELFLNLVMEFVPESLYRVLKHYKDMKQRMPLIYVKLYMYQIFRGLAYIHTVPGICHRDIKPQNILVDPLSHQVKVCDFGSAKILIKGEANISYICSRYYRAPELIFGATEYTTSIDIWSAGCVLAELLLSQPLFPGXESAVDQXLKIIKVLGTPTREPYSCMNPNYTEFKFPQIKACPWHKIFHKRMPPEAIDLVSRLLQYSPNLRCSALEACAHSFFDELRESHARLPNGRPFPPLFNFKQELANAPPELVSRLLPEHARRHSGFGSLFGSGP

SEQ ID NO: 24306 - protein, 420 aa, Ashbya gossypii ATCC 10895
MDGTDRKFTIVLKLGSSSLVDESTLEPKLSIMSHIVETVVKLRRMGHKVVIVSSGCIAVGLKTVGTDRRPKKLSQLQAIAAVGQGRLIARWDSLFRPFNEKIAQILLTRNDIVDWSQYKNAQNTFHELLAMGVTPIVNENDTLSISGVKFGDNDTLSAITAGLIGADYLFLMTDVDCLYTDNPRTNPDAKPILVVPDLSQGLPGVNTSSGSGSGVGTGGMATKILAADLATNAGVHTIIMKSERPVDMVRIVEFMEWREQCTAVSADAETLQTDELNLLQEHGVPLHTRFIANVWQPSLNKREFWILHGLVSCGTVIIDKGAYKALTRKNKAGLLPAGVIAVEGSFHELEAVDLKIGVRKADGSLDESEPLQTVGRARCNYSSVEVDKIKGLQSGQIETVLGYIDSEYIAHRENLAFPPR

SEQ ID NO: 24307 - protein, 170 aa, Magnetospirillum magnetotacticum MS-1
MEERRKLGLFCNVRESAVIEALDVDTIYAVPLSYREAGLDREILAHFGMEPEGEPKLDRWHRILDRLRNPEGEVTIAIVGKYTGLKDAYKSLTEALAHGGIANNVRVNLEWIEAEVFEREDPAPFLEGLHGILVPGGFGQRGAEGKIRAARYARERNIPYFGICFGMQMA

SEQ ID NO: 24308 - protein, 91 aa, Bacillus anthracis str. A2012
MVLDRNPVDYHSEIEQAAFGTGVLVDGMDFSDDKMLQGRTFSYSDTQRYRVGANYLQLPVNAPKAPVRTNQHRGQMDMRNPKESGEIRILL

SEQ ID NO: 24309 - protein, 100 aa, Thermus thermophilus
AAEVKTVIKPLGDRVVVKRIEEEPKTKGGIVLPDTAKEKPQKGKVIAVGTGRVLENGQRVPLEVKEGDIVVFAKYGGTEIEIDGEEYVILSERDLLAVLQ

SEQ ID NO: 24310 - protein, 154 aa, Staphylococcus epidermidis ATCC 12228
MNFNNLDQLYRSVIMDHYKNPRNKGVLDNGSMTVDMNNPTCGDRIRLTFDIEDGIINDAKFEGEGCSISMSSASMMTEAVKGHSLGEAMQMSQEFTKMMLGEDYEITEEMGDIEALQGVSQFPARIKCATLAWKALEKGTVEKEGKSEGTTEED

SEQ ID NO: 24311 - protein, 401 aa, Dechloromonas aromatica RCB
MGLISPVGNSVEEGWQNIIAGRSGIAPVTRFDTSTFPVQFAGEVKNFDITQYISAKDARRMDRFIHYGLAAGIQAVRDAGLDKEGAADPERVGVAIGSGIGGLPLIEETKDEYIAGGVRKVSPFFVPGSIINMISGNLSIEYGFKGPNLAIVTACTTGTHSIGEAARIIEYGDADVMVAGGAESTVSPLGMGGFSAARALSTRNDDPTTASRPWDKDRDGFVLGEGAGVLVLEEYEHAKARGAKIYAEVAGYGRSADAYHITAPNMDGPRRSMVNALKNAGIAPSDVQYVNAHGTSTPLGDKNESDAIKAAFGDAAYKIVVNSTKSMTGHLLGGAGGVESLFTVLAIHHQISPPTINIFNQDPECDLDYCANKARPMKIDIALKNNFGFGGTNGSLVFKRV

SEQ ID NO: 24312 - protein, 220 aa, Cyanophora paradoxa
SVLSTHSLLEHTDVAVMLDNEAVYDICRRSLDIERPTYTNLNRLVAQVISSLTASLRFDGALNVDVTEFQTNLVPYPRIHFMLSSYAPVISAEKAYHEQLSVAEITNSAFEPASMMAKCDPRHGKYMACCLMYRGDVVPKDVNAAVATIKTKRTIQFVDWCPTGFKCGINYQPPTVVPGGDLAKVQRAVCMISNSTAIAEVFSRIDHKFDLMYAKRAFVH

SEQ ID NO: 24313 - protein, 1300 aa, ASPERGILLUS NIDULANS FGSC A4
MACADETLTAAAAIIQNLVREAPSSGSPSFEFNFSPQSTNGVDSLPKLPGEPSLAKVRFENELEALVRRIHRMEVQSQQNHTQHAEHTQHLHKRRKSSKDTEPEILDESDGAASDEDEEEGATTLVREEDISYLRNYVQKQAEEISFQKNIITQVREELQLQEVQTRRALTKVENEDVVLLERELRKHQQANEAFQKALREIGGIITQVANGDLSMKVQIHPLEMDPEIATFKRTINTMMDQLQVFGSEVSRVAREVGTEGILGGQAQITGVHGIWKELTENVNIMAKNLTDQVREIAVVTTAVAHGDLSQKIESRAQGEILELQQTINTMVDQLRTFATEVTRVARDVGTEGVLGGQAQIEGVQGMWNELTVNVNAMANNLTTQVRDIATVTKAVAKGDLTQKVQANCKGEIAELKNIINSMVDQLRQFAQEVTKIAKEVGTDGVLGGQATVNDVEGTWKDLTENVNRMANNLTTQVREIADVTTAVAKGDLSKKVTANVQGEILDLKSTINGMVDRLNTFAFEVSKVAREVGTDGTLGGQAKVDNVEGKWKDLTDNVNTMAQNLTSQVRSISDVTQAIAKGDLSKKIEVHAQGEILTLKVTINHMVDRLAKFATELKKVARDVGVDGKMGGQANVEGIAGTWKEITEDVNTMAENLTSQVRAFGEITDAATDGDFTKLITVNASGEMDELKRKINKMVSNLRDSIQRNTAAREAAELANRTKSEFLANMSHEIRTPMNGIIGMTQLTLDTDDLKPYTREMLNVVHNLANSLLTIIDDILDISKIEANRMVIESIPFTVRGTVFNALKTLAVKANEKFLSLTYQVDNTVPDYVIGDPFRLRQIILNLVGNAIKFTEHGEVKLTICKSDREQCAANEYAFEFSVSDTGIGIEEDKLDLIFDTFQQADGSTTRRFGGTGLGLSISKRLVNLMGGDVWVTSEYGHGSTFHFTCVVKLADQSLNVIASQILPYKNHRVLFIDKGENGPEAENVLKMLKKLDLEPLVVRNEDHVPPPEIQDPSGKESGHAYDVIIVDSVNTARMLRTYDDFKYVPIVLVCPLVCVSLKSALDLGISSYMTTPCEPIDLGNGMLPALEGRSTPITTDHSRSFDILLAEDNDVNQKLAVKILEKHNHNVSVVGNGLEAVEAVKQRRYDVILMDVQMPVMGGFEATGKIREYERDSGLSRTPIIALTAHAMLGDREKCIQAQMDEYLSKPLKQNQMMQTILKCATLGGSLLEKSKESRISSSGEMHHVHTGPDGKSQRPGMEGRSITSSSATSRTLASTSAERTEQLSIDRSIVSTS

SEQ ID NO: 24314 - protein, 367 aa, Mycobacterium avium subsp. paratuberculosis K-10
MTAHRDAIRTARSMVVKVGTNALTTPAGVFDAGRLAGLADAIEARMKAGTDVVIVSSGAIAAGIEPLGLSRRPRDLATKQAAASVGQVALVNSWSAAFARYGRTVGQVLLSAHDISMRAQHTNAQRTLDRLRALHAVAIVNENDTVATNEIRFGDNDRLSALVAHLVGAEALVLLSDIDGLYDSDPRKTKGAKFIPEVTGAEDLAGVVAGPGSDLGTGGMTSKMSSALLAADAGVPVLLAAAADAASALTDASVGTVFAARPVRMSARRFWVRYAAEAAGALTLDEGAVRAVVHQRRSLLPAGITAVSGRFYAGDVVELRGPDAVPVARGVVAYDTTELATMMGRSTSELPGELRRPAVHADDLVAV

SEQ ID NO: 24315 - protein, 438 aa, Solanum tuberosum
MASICKLSNPCFNSTSYGSRSSSTPKFVVHLRTSTFNHRLSAGSKLSLVINPSIRASLCVKCSQADGNGSSVKRTTLHHLYETQGQSPWYDNLCLPVTDLIPLIDSGVRGVTSNPAIFQKAISTSNAYNDQFRELVQAGKDIDSVYWELVVKDIQDACKLFETIYDKTDGGDGYVSVEVSPRLADDTEGTVEAAKWLHKKVERSNVYIKIPATAPCIPSIKEVISLGISVNVTLIFSLSRYEAVIDAYLDGLEASGLSDLSRVTSVASFFVSRVDTLVDKLLEKIGTPEALDLRGKAANAQAALAYDLYQKKFSGPRWEALVKKGAKKQRLLWASTSVKNPAYPDTLYVDPLIGPDTVSTMPDQALQAFIDHGSVARTIDANLSEAEGIYSALEKLGIDWVFVGSQLELEGVDSFKKSFDSLLDSLQEKANTLKLVNL

SEQ ID NO: 24316 - protein, 700 aa, Ustilago maydis 521
MYASSVRRSANFTLANGAQIPKLGFGTWKMSKEQATPAVAHAIKTGYRHIDCAWAYRNEDAVAAGIKKAGVPRSQLWLTSKLWNSFHHPEHVEKALDASLKDLGTDYLDLYLMHWPVAFLNSKGSMVPSIRSTGGHPVESEDLSRDFMATYRVMEEMVKKGKVRNIGVSNFNIRRTSEVVDEASIKPVVNQVEVNLGVHNEELRNYAHAHGVTLQAYSPFGSNQNVAKSLEDPVVVDVAQRNNITPAQVLLAWTLGRDIIPISKSVTPERIEENFRVLDIQLAEEEIKHLTNEALSRPIERTVDPTEGWGVADEIFEDGVDQTREMELKGGSYVPPPAHESPAEHRLEPRNDPETPARMLHTAAHPLASSSRSTLVSRRRTAVQAKSSSSFFRGFATTSRVAAVAEVAPPSASEAPAVSESALLRTTSKSALATPGLKFLDGEQRIERETKKMNMYTVRRMSTSTTTQASVRASARVTATSSAVKPTTRKYPAKKSFLYEKYLRLLSDSQMVLVLQHNNLSVAELAQVRSDIAAINLAEGQTSKASLTVVRAGLIKAVTRQLSEKNAAMKSLQPALSGPIALLTCEHLTPAYLSALLNVVDRALGHVPPRAPAVGAKFPETAVANPRLVPLAAVLEGKRLLHVPQTRDVGRIGGLDQLRSQIVGLLSAPAQQLAHVLTHASGQQLAMTLEARKRDLEAKQ

SEQ ID NO: 24317 - protein, 384 aa, Shigella flexneri 2a str. 301
MSWQEKINAALDARRAADALRRRYPVAQGAGRWLVADDRQYLNFSSNDYLGLSHHPQIIRAWKQGAEQFGIGSGGSGHVSGYSVVHQALEEELAEWLGYSRALLFISGFAANQAVIAAMMAKEDRIVADRLSHASLLEAASLSPSQLRRFTHNDVAHLARLLASPCPGQQLVVTEGVFSMDGDSAPLAEIQQVTQQHNGWLMVDDAHGTGVIGEQGRGSCWLQKVKPELLVVTFGKGFGVSGAAVLCSSTVADYLLQFARHLIYSTSMPPAQAQALRASLAVIRRDEGDARREKLVSLIARFRAGVQDLPFTLADSCSAIQPLIVGDNSRALQLAEKLRQQGCWVTAIRPPTVPAGTARLRLTLTAAHEMQDIDRLLEVLHGNG

SEQ ID NO: 24318 - protein, 424 aa, Synechococcus elongatus PCC 6301
MPSHPHLWFPFTSVKDAPDPLKVVSGKGARLTLADGRELIDCISSWWVNLHGHAHLRIVEAIAQQAATLEHVIFAGFSHEPAERLAMELCKILPEKLTRVFFSDNGSTAVEVALKMALQYWHNLDQPRSRILAFDGAYHGDTFGAMSVGERSLFNAPFEKLLFSVEFLPYPETWWGDETVEAKEAAAIAAVEQALAAGDVAAVIIEPLVQGAGGMRMARPQFLQQLAARVQAAGSLLIADEVMTGFGRTGAWFACQRAGIQPDLICLSKGLTGGFLPLSITVATEVIYDTFCSGNPDHTFYHGHSYTANPLGCAAAIASLELLLDSEAIVQGLEDAHLPGLELLAQHPKVTRPRLTGGIAACDLVSDRGGYLDPIGLRVRQAAIARGLLLRPLGNVLYLLPPYCLTPTELQDIYAAIADLLDEI

SEQ ID NO: 24319 - protein, 282 aa, Pseudomonas aeruginosa PAO1
MSIAVIQMVSQDDVTANLAAARRLLEQAAEGGARLAVLPENFAAMGRRDLAELGRAEARGNGPILPWLNSAARDLRLWIVAGTLPLPPDGQPEAKANACSLLIDEHGERVARYDKLHLFDVDVADARGRYRESDDYAFGQKIVVADTPVGRLGLTVCYDLRFPELYTALREAGAELITAPSAFTAVTGAAHWQVLVRARAIETQCYLLAAGQGGVHPRGRETFGHSAIVDPWGRVLAERPQGEAVLLAVRDAAEQADIRRRMPVVAHRRFFPPAEPRPARTE

SEQ ID NO: 24320 - protein, 136 aa, Mycobacterium avium subsp. paratuberculosis K-10
MTERTLVLIKPDGVQRQLVGEIIGRIERKGLTLVALELRHVSQDLAAQHYAEHEGKPFFASLLEFITSGPVVAAIVEGPRAIAAFRQLAGGTDPVEKAIPGTIRGDFGLETQFNLVHGSDSVESAKREIGLWFPDA

SEQ ID NO: 24321 - protein, 161 aa, Escherichia coli
MKNKSGNSYYREAVDIHSSLELSFILHKYHLRVDEKKSRNVFSAIRDELILDGDSRQNLATFCQTWIDDEIRELLNLSIDRNMIYKDEYPQMAEPEGRCVRMLSDSWSFPDSRHTLGCSTIGSSEAAMLGRLALKWQWCKKREVQGKSTEPDLRSCANMLA

SEQ ID NO: 24322 - protein, 309 aa, Photobacterium profundum SS9
MTPITRVAIIGECMVELKKNDGSIEQSFGGDTLNTAVYLSRLTQQHGISTSYVTGLGRDPFSKEMLAAWREEGINTDMVYLSDDKLPGMYAIETTEDGERSFYYWRNDSAAKYWLRERAILTLAKELCQHQMVYLSGISLAILSEDCRQSLINLLALCCKDGLKIAFDNNYRPTLWESAEQAQTFYKQILAITDIAFLTFDDEQMLYGDDNEQQTIERTQALGVQEIVIKRGGDDCYVVTPGSLECVAPHPVGNIIDTTAAGDSFSAGYLAKRITGGTPHASALAGHLLAGNVIQHRGAIISRDDMPNI

SEQ ID NO: 24323 - protein, 262 aa, Oryza sativa
  misc_feature (35)..(35): Xaa can be any naturally occurring amino acid
  unsure (1)..(262): unsure at all Xaa locations
WGLAFPNSPVSEDPNLVNRIVAYLKELQFPICLEXDADTVFDGLIEEDQMVILQGEDELGDVVVAECETNGANPETITMETDEFYSLCEELDLDLGSYQLVPTSARETVAAAAAAANDVDGVAYSHASCFVSWKRANPAEKVVAVPMTAGIESQKLLKKAVGGGTAWMSNIDDRGSVAITTTPGSNIKSHVMSERRRREKLNEMFLILKSLLPSVRKVDKASILAETITYLKVLEKRVKELESSSREPSRWRPTEIGQGKAP

SEQ ID NO: 24324 - protein, 388 aa, Synechococcus elongatus PCC 6301
MVSDRGVAKWAFVEEAFQKRGPSNRRSLREFSPEAGPYLRQGDRPLLDFSSNDYLGLAQDPRLIAAATAAMRRYGTGAMASRLVCGSFPLHQQLEEALAAFSQREAALLFSSGYQANATLLPTLFDRQSLVLVDRLAHNSLLFGVQASKAQWRRYRHNDFDHLEQLLQQAPAGVRLGIVSETVFSMDGDRTDVDRLADLADRYGAILYLDDAHALGVLGTEGSGLALRHPRVDVAVGTFGKACGSAGAFVVASRSLCDYWINTCPGLIYTTAIAPPVVAAALAAVQLLPELEPERQHLQAIAAELRQSCRDRGWDCGPSETQIVPLLVGESEQALALAQRLEAAGILAIAIRPPTVPEGTARLRLVLRSDHQPQHLHQLVTVLSEGWV

SEQ ID NO: 24325 - protein, 249 aa, Arabidopsis thaliana
MKKIELGHHSEAAKPDCIKALIVEFITTFLFVFAGVGSAMATDSLVGNTLVGLFAVAVAHAFVVAVMISAGHISGGHLNPAVTLGLLLGGHISVFRAFLYWIDQLLASSAACFLLSYLTGGMGTPVHTLASGVSYTQGIIWEIILTFSLLFTVYATIVDPKKGSLDGFGPLLTGFVVGANILAGGAFSGASMNPARSFGPALVSGNWTDHWVYWVGPLIGGGLAGFIYENVLIDRPHVPVADDEQPLLN

SEQ ID NO: 24326 - protein, 354 aa, Agaricus bisporus
MANTYHNDLLAPYLSLDQGDKIQAEYVWIDGDGGLRCKTTTVSKKVTDIGQLRIWDFDGSSTNQAPGHDSDVYLRPAAIFKDPFRGGDNILVLAETYNNDGTPNRTNHRHHAKKVFDEAKEHEPWFGLEQEYTLFDADDQPYGWPKGGFPGPQGPYYCGAGTGKVFARDLIEAHYRACLYAGINISGINAEVMPSQWEFQVGPCEGISMGDHLWMARYLLVRIAEQWGVKVSFHPKPLKGEWNGAGCHTNFSTKAMREAGGMKFIEDAIEKLAKRHDEHIAVYGEDNDLRLTGRHETGHISNFSSGVANRGASIRVPRHVASQGYGYLEDRRPASNIDPYRVTSIIAETTILDK

SEQ ID NO: 24327 - protein, 241 aa, Arabidopsis thaliana
MGEELSVGFRFYPTEVELLTYYLRIQLGGGNATIHSLIPILDVFSVEPTQLPNLAGERCRGDAEQWIFFVPRQEREARGGRPSRTTGSGYWKATGSPGPVFSPDNRVIGVKKTMVFYTGKAPTGRKTKWKMNEYKAVETASVSTIPKLRPEFSICRIYIKSGSSRAFDRRPTEAYAIERNLPSNGVETSSRATISTSPETSHSGGNQVDLPVNATTITQSISDMVDELSQPFWEWEQMNWS

SEQ ID NO: 24328 - protein, 310 aa, Bacillus anthracis str. A2012
MAENQDKNSLEEQDVKRETLTTRQGHPVKDNQNIRTIGNRGPATLENYHFIEKISHFDREEVPERVVHARGAGAFGYFETYGKVGDEPAEKYTRAKVFSGAGKKTPLMVRFSTVAGAKDSPETARDPRGFAVKMYTEDGNWDLVGNNLKIFFIRDAMKFPDMIHAFKVDPVSNVSNPQRMFDFVSRTPEATHMITFLFSPWGIPATYRHMQGSGVNTYKWVNEKGEAVLVKYHWEPKQGIRNLTQEDANSIQAMNVSHATQDLYEAIERKDYPEWELFVQIMEDGYHPELDFDPLMIRSFGQRSSSHGYQ

SEQ ID NO: 24329 - protein, 699 aa, Magnaporthe grisea 70-15
MVEGFEIDHGTKLNGLMPAYQQHVLVCTGKDDWPSKIEDEDGGENLAADLRGYFGRGGSLSDLVPSVERGSSSEQLEALAKGYLLPEKLHKAHDAMSTEHQEKFLRKPELQRLVRGVRGFDEILVLICGHGGRDQRCGIYGPLLRTEFEKTLPRLGVDVLTGPVDSVSESGGNKKPSSRIGLISHIGGHKFAGNVIIYIPPSLQTDDGLPHPLAGHGIWYGRVEPKNVEGIIHETIRKGNVIEEHFRGGITPSQRETQRNNDAGATATNQPAGVVKAIADPTAKSPPPPPPPEVEPISWLQIALATLGVGGTLTGFYYWAKQQCGPLSLPQYLFTGRELNTTTFVPFTVVSKEPLTDNSFIITLRPRRRHIRTVASPWRGPTLAWLSSLSPWRGGGEGRLFDLQLREHSNFDVYDRAWRHGLWAVEVKQPQLQIVREYTPLPPYWADTEDQREAERAAGEIRLYVRNVGEVSNYLARKRPGSIVELRGPYLGLDVAERLGDPADKQVTFLAGGTGIAPAMQVAHRLLDGDRYADKDKPLAKPEVQITWANRVRADTAQSSSIMRQLAGMRQRHGKKLGLECVVDEEKKFIDECIVAKAISARKPGPPQDGEACPYHSSLLLQHTTTDSPAGEGPGCRCEGSSRGRNLLFVSGPDGFINHLAGEKLWRDGMLLQGPIGGLLGKIRNKYPDQFKDWLVLKL

SEQ ID NO: 24330 - protein, 420 aa, Pyrococcus furiosus DSM 3638
MVEQDPYEIVIKQLERAAQYMEISEEALEFLKRPQRIVEVTIPVEMDDGSVKVFTGFRVQHNWARGPTKGGIRWHPEETLSTVKALAAWMTWKTAVMDLPYGGGKGGIIVDPKKLSDREKERLARGYIRAIYDVISPYEDIPAPDVYTNPQIMAWMMDEYETISRRKTPAFGIITGKPLSIGGSLGRIEATARGASYTIREAAKVLGWDTLKGKTIAIQGYGNAGYYLAKIMSEDFGMKVVAVSDSKGGIYNPDGLNADEVLKWKNEHGSVKDFPGATNITNEELLELEVDVLAPAAIEEVITKKNADNIKAKIVAEVANGPVTPEADEILFEKGILQIPDFLCNAGGVTVSYFEWVQNITGYYWTIEEVRERLDKKMTKAFYDVYNIAKEKNIHMRDAAYVVAVQRVYQAMLDRGWVKH

SEQ ID NO: 24331 - protein, 330 aa, Glycine max
MANEIPHDEVVCVTGANGFIGSWLVRTLLEKENPRYTIHATIFPGSDASHLFNLHPSAASRLTLFPADLLDAAALSRAITACSGVFHVASPCTLEDPTDPQRDLLEPAVQGTLNVLTAARRVGVRRVVLTSSISAMVPNPGWPAGRAADEASWTDVEYCKGRGKWYPVAKTEAERAAWAFDGVEVVAVLPATCLGPLLQPDLNASSAVLRELMMGSRETQEYHWLGAVHVKDVAKAHVLLYETPTAAGRYLCTNGIYQFSSFAAMVSELYPEFPIHRFPEETQPGLTACKDAAKRLIDLGLVLTPIQDAVREAVESLIAKGFLQCTPSQS

SEQ ID NO: 24332 - protein, 419 aa, Xanthomonas axonopodis pv. citri str. 306
MLATAQTAQRPDVQAAAAPLQAKVVQWRRDFHQHPELSNREERTAATVAAQLRKLGLKPRTGIAHHGVVAIIKGAKPGPKIALRADMDALPVTEQTGLPFASKATAEYRGEQVGVMHACGHDAHTAILLGVAEALVGMREQLPGEVMLIFQPSEEGAPGNEEGGASLMLKEGLFADFTPQAVFGLHVFSSVQAGKIAVRSGPLMAASDRFAIKMIGRQTHGSAPWNGIDPIVASADMIGAAQTVISRRANLSKQPAVLSFGAIKGGIRYNIIPDDVEMVGTIRTFDEGMRQQIFADLKNVAEHTAAAHGAKVQAQVPDQPGNPATVNDPALTARMLPSLQAVVGADNVYEPPLQMGAEDFSFYAQQVPSMFFFVGSTAKGIDPATAPSNHSPQFLLDESSLDVGLRALLQVSLDYLQQG

SEQ ID NO: 24333 - protein, 258 aa, Chlamydophila abortus S26/3
MATLVNFNDTNKLLLTKKTELFIDLASKDWIASANKSIKQRGAFYVALSGGRTPLEIFKSIVINKEKISHPSKIFLFWGDERNVPYTSPESNYGQAMSILQDLHIPEEQVFRMETENAEGARKYQDIIERTVPEISFDMIMLGLGQDGHTLSLFPNTEALKEKERLVVSQRIPQLDTERMTFTLPLTYKAKHSVVYVQGENKKDIVRSIFFPSDNRREAYPIELIGQEKTPLFWILAPDTYDPKDFDSISSFHKLDII

SEQ ID NO: 24334 - protein, 443 aa, Dechloromonas aromatica RCB
MAEKQGPAVVNISTTQIVRGQAQMMPFPFDENDPAFEFFKRFIPRNPGGAVPRDFENKSLGSGFIISGDGYILTNAHVVDGADEVAVRLTDKREFKAKIIGADKRTDVALIKIEATGLPAAKLGDPGQIKVGEWVVAIGSPFGFDNSVTAGIVSAKGRSLPQENYVPFIQTDVAINPGNSGGPLFNMRGEVVGINSQIYSRSGGYMGVSFAIPIDVAMDIQNQLRASGKVSRGRLGVVIQEVNKELADSLGLTKPIGAVVNSVEKGGPAERAGIEAGDVILKFDGKTINNSADLPRMVGATRPGGRSVVQVWRKGATRDIGVTIGEVPDEKQANTKVPRGKLSEQTANRLGLVVSELTPDQKRELKMNSGLLIEDVRGQGARTDLRAGDIVIAVIAKGATTEVKTVDQFNKLLAQFEKGSNVTLLVRRGEMQTFITVKGLNGG

SEQ ID NO: 24335 - protein, 429 aa, Shigella flexneri 2a str. 2457T
MTRRAIGVSERPPLLQTIPLSLQHLFAMFGATVLVPVLFHINPATVLLFNGIGTLLYLFICKGKIPAYLGSSFAFISPVLLLLPLGYEVALGGFIMCGVLFCLVSFIVKKAGTGWLDVLFPPAAMGAIVAVIGLELAGVAAGMAGLLPAEGQTPNSKTIIISITTLAVTVLGSVLFRGFLAIIPILIGVLVGYALSFAMGIVDTTPIINAHWFALPTLYTPRFEWFAILTILPAALVVIAEHVGHLVVTANIVKKDLLRDPGLHRSMFANGLSTVISGFFGSTPNTTYGENIGVMAITRVYSTWVIGGAAIFAILLSCVGKLAAAIQMIPLPVMGGVSLLLYGVIGASGIRVLIESKVDYNKAQNLILTSVILIIGVSGAKVNIGAAELKGMALATIVGIGLSLIFKLISVLRPEEVVLDAEDADITDK

SEQ ID NO: 24336 - protein, 216 aa, Streptomyces avermitilis MA-4680
MAPIPGSGLAKGLAVTLRTMTKKTVTAQYPDAQPELPPRSRGVIGLFEENCTVCMLCARECPDWCIYIDSHKETVPPAAPGGRERSRNVLDRFAIDFSLCMYCGICIEVCPFDALFWSPEFEYAETDIHELTHERDKLREWMWTVPAPPALDPAAEEPKEIAAARKTAEKLAAAQAAAAQTDAAQAEAAQAEAAAEAGSAAEGAPDAAPKPQEGEA

SEQ ID NO: 24337 - protein, 538 aa, Oryza sativa (japonica cultivar-group)
MAAALLLVMAALAGVAAGGDIVHQDDEAPKIPGCSNDFVLVKVQTWVNNREDGEFVGVGARFGPTIESKEKHANRTGLLLADPIDCCDPPTQKVAGDVLLVQRGNCKFTKKAKNAEAAGASAIIIINHVHELYKMVCDRNETDLDINIPAVLLPKDAGNDLQKLLTRGKVSVQLYSPDRPLVDTAEVFLWLMAVGTILCASYWSAWSAREAVIEQEKLLKDGHESSLNLEAGGSSGMVDINMTSAILFVVIASCFLIMLYKLMSHWFVELLVVIFCIGGVEGLQTCLVALLSRWFKPAAESFVKVPFFGAVSYLTIAVCPFCIVFAVIWAVYRRMTYAWIGQDILGIALIVTVIQIVRIPNLKVGSVLLSCSFLYDIFWVFISKMWFHESVMIVVARGDKTDEDGVPMLLKIPRMFDPWGGFSIIGFGDILLPGLLIAFALRYDWAAKKTLQSGYFLWSMVAYGSGLMITYVALNLMDGHGQPALLYIVPFTLGTFIALGRKRGELRNLWTRGQPERVCTHMHMQPSPKDTNCDAVSS

SEQ ID NO: 24338 - protein, 91 aa, Hordeum vulgare subsp. vulgare
DGRPVVLDCVREAECRIAGNLNMEYLPMGGSIHMIEESLKLAYGEDSEFIKDKRIAAVQALSGTGACRLFADFQKRFLPDSQIYIPTPTWS

SEQ ID NO: 24339 - protein, 99 aa, Glycine max
MEVAVELENDLFFADLSKQISLLIMDEDEDPLATCPPDSLQALIRQSKGTGVFIPQSTQPRRKHRKGRSSSNAKYRKQSQDTRTVSQVPITSSFKPKNG

SEQ ID NO: 24340 - protein, 1302 aa, Aureobasidium pullulans
MSSADGRRTVSSDYGHPRPSMANVEADHNFETTTLNSAQPRSWHTEFVFVSRKLIQQILGKNPFKSSYLDLFKLVNDAKSKAVLWAGILLAIAAGCPLPIIGYIFGQIITSFPPPEDVLRDRLYQLVGVACGYFIVTTGYAIAWGLTGEKISRRFRETLVERLLGLEQAYFDIKDPDITNLLTEKIEAIQIGTSEKVGIFIQSISYFVAAFIVGFILNAKLTGILFAAVIPLMALIVTVGSSRIAKYTKAATEYTEAAGRIAESAIHAVKVVQAFGMAENLSKEHYRLLKLSARYAIRKSVSAAFMLGLVYFTAYSANALAFWEGSRLAAESGSNNAGTVYAVVFLIIDASFVVGQFGPFLGSFATAAAAGESVYEILNHPQSEINVYSEAGQEATESDMKADLVFRNVTFVYPARTSARALEEMSLILKAGQMNAIVGTSGCGKSTLVSLLLRLYDISSGQLTIGSHDIKDFNVRSLRKYTALVDQDSVLFSGSVLENISYGLGEHSLSDDVVLERCTEAAKAANLDFVDFLPQGIHTRIGNGGYTSLSGGQNQRICLARALVKKPALLLLDEPTAALDANSEGLIMDAVKSVAATGTTVVMVAHRLSTVSDSPNIVLMGAGKVIEQGNHDELMQLEGAYFNLIQAQQLNDADESSAEVSAATTSQVTPQKASKSEDSAASSDTETVPPQAKKEDKPAKKAGFWKLLLRCLRLAKSDSPIIALGLAASIVSGGIILGEAIVFGNLISVLNDLESPDFRSRADLFSLLFFILALIALFSYAGNGCCFGIVSSHFVAKIQHISLASILRQDMQWFSGQSVPSLMSSLSSDAGQLACLSGVAIGTIFTVCVSITGGIILAHVVAWKIAVVLLAAVPVMITAGYVRLRVLALAESRHRSAYNDAASIAAEACRGIRTIASLGRERGVSRASNAAVKEPYDKGIRFTLITNTLLALSFSITYFVYALAYWWGAKQVRNGTYSQLDFFIVLPALLFSAQSAGQIFSLSPEMSRAGVAARNVFGLHDQKPTIVDVDAKQSGALPSSTLSIPTLEDKASPSSGGWIEFKNVSLCYPSKPQHPALQNVNISIRPGEFIALVGPSGAGKSTILSLLQRFYDPTAGSVQLDGQDIREVAVPQHRGRLGLVPQEPDLFPGSISYNIGLGAAPGQLVTRDDIEKICAKCGIHEFIMSLPEGYSTECGTNGSKLSGGQKQRIAVARALIRSPEVLLLDEYTSALDAHSEQQIKEAVDGASVDRTTIVVAHRLSTVQNADRIFVFDDGRVVEVGSHAELVAQGGLYAGMVLAQTLT

SEQ ID NO: 24341 - protein, 678 aa, Glycine max
  misc_feature (125)..(125): Xaa can be any naturally occurring amino acid
  misc_feature (226)..(226): Xaa can be any naturally occurring amino acid
  unsure (1)..(678): unsure at all Xaa locations
MNLSNGKGSMSTLTASVVMKSGDAVSDQFPAGLRVLVVDDDPTCLMILEKMLRTCLYEVTKCNRAETALSLLRENKNGFDIVISDVHMPDMDGFKLLEHIGLEMDLPVIMMSADDGKSVVMKGRXLHGACDYLIKPVRIEALKNIWQHVVRKRKNEWKDAEQSGSAEEGDRHPKASDEADYSSSANEGSWRNSKKRRDEEEEAEDRDDTSTLKKPRVVWSVELHQXVVAAVDQLGIDKAVPKKILELMNVPGLTRENVASHLQKYRLYLRRLSGVSQHQNNLNNSFLGPQEATFGTISSINGIDLQTLAVAGQLPAQSLATLQAAGLGRSTAKAGVPIPLMDQRNLFSFENPRLRFGEGQPQHLSTSKPMNLLHGIPTNMEPKQLANLHQSTQSIGGLNMRVNASATQGNPILMQMAQSQPRGQMLSENTGPRVPRLPSSLGQPTVSNGISNGLLGRNGIAGNNRGPAYNPVPPSSSLLSFPMNQTSEMSVNNSFPIGTTPGISSITTKGSFQEEVTSGIKGSSGFPSYDIFNELHHQKSHDLEITNPGLTYNASHHVNPLQGNIDVAPSVLVHQGFSSTQQTGQSRDGALIGKAMFSMGEGLEQNNLQNANFNPLLVDNSIRIKAERIPDASSQTNLFPEHYGQEDLMTALLKQQEGMGPAENEFEFDGYSLDNIPV

SEQ ID NO: 24342 - protein, 448 aa, Oenococcus oeni PSU-1
MSTANTTFLILSSVLVLFMTPGLAFFYGGLGSKKNVVNTMMSVFVMCGLAVVLWVICGYSLSFVGDFGGVFGSLSALLLHGVKLTALTSTKIPTSLYLIFQMMFAVITPALFVGAVVGRIRFKFLLLFTVFWSIFIYYPLVHMVWANGFLAKMGVIDFAGGTVVHIDAGVTALVLAYFLGPRIGYRKGKQEGHYSLPWALLGTTILWIGWYGFNAGSALAANQIAVQAVLTTTVATACSMITWMLIEMSLKGKATLAGICNGTLCGLVGITPATGYVTVAGSFWIGILAAVASYFFVNFLKARIGIDDALDAFGCHGVCGIVGSILTGLFASRAVNSSISINGLFYGGGFKLFAVQLFATLFSVIFTALICFLIIKFLKLFMKMRVDVKEEQKGLDFGEHGENVDYVISLTLEAYQFEDQKKEFFQDEPNNLKEVSKNSKDTLNSTIS

SEQ ID NO: 24343 - protein, 168 aa, Prochlorococcus marinus str. MIT 9313
MPITALLLSRRSLLIATIAGAFGVYRRPAAAFAATRAEDLDWSLSNEQWAKCLSPEAYRVLREEGTERPFTSSLNKEKRVGIYHCAGCDLPLFSSAAKFDSGTGWPSFWEPLAGAIQTKVDFKLIIPRSEYHCRRCGGHQGHVFNDGPRPTGKRYCNNGVALTFRPAR

SEQ ID NO: 24344 - protein, 458 aa, Oenococcus oeni PSU-1
MKAHHLNIFFIFVFGALGGLLFGFDTGIISGASSLIESDFSLNIEQTGFITSSVLIGSSIGALSVGSLSDKFGRKKLLILASVLFLIGSGLSMSAVGFVSMVIARIILGFAVGSASALTPAYLAELADAPHRGSLGSMFQLMITLGILLAYVSNLGFLGHNLLGLRDWRWMLGSALIPALILFIGSIVLPESPRYLVEKGRIDEARSVLHYLREKTNEDPDKELADIKKVSNQPKGGFKELFTFARPAVIVAIGLMLLQQLVGINSVIYFLPQVFIKGFGFQAGNAIWISVGIGVVNFLCTVLAYNIMDKFNRRTILLFGSIVMSVSIGILSVLNFTLSIKQAAIPTMILIAIYIFGFAVSWGPICWLMIGEIFPLNIRGVGTSIGSAANWIANFIVSQFFLVLLATFHYNVGGPFAIFTFFAILSIFFVIYLVPETRGKSLEQIEMDMRRKPLPKKN

SEQ ID NO: 24345 - protein, 475 aa, Triticum aestivum
  misc_feature (194)..(194): Xaa can be any naturally occurring amino acid
  misc_feature (206)..(206): Xaa can be any naturally occurring amino acid
  unsure (1)..(475): unsure at all Xaa locations
MDVPLASKTFPSPSPSKREQCNIDGHKSSSKHADLNPHVDDSVLGIILGGGAGTRLYPLTKKRAKPAVPLGANYRLIDIPVSNCLNSNISKIYVLTQFNSASLNRHLSRAYGSNIGGYKNEGFVEVLAAQQSPDNPDWFQGTADAVRQYLWLFEEHNVMEYLILAGDHLYRMDYEKFIQAHRETDADITVAALXPMDEERATAFGXLMKIDEEGRIIEFAEKPKGEQLKAMMVDTTILGLDDARAKEMPYIASMGIYVISKHVMLQLLREQFPGANDFGSEVIPGATSTGMRVQAYLYDGYWEDIGTIEAFYNANLGITKKPIPDFSFYDRSAPIYTQPRHLPPSKVLDADVTDSVIGEGCVIKNCKIHHSVVGLRSCISEGAIIEDTLLMGADYYETEADKKLLAEKGGIPIGIGKNSHIKRAIIDKNARIGDNVMIINVDNVQEAARETDGYFIKSGIVTVIKDALLPSGTVI

SEQ ID NO: 24346 - protein, 286 aa, Triticum aestivum
  misc_feature (162)..(162): Xaa can be any naturally occurring amino acid
  misc_feature (219)..(219): Xaa can be any naturally occurring amino acid
  misc_feature (236)..(236): Xaa can be any naturally occurring amino acid
  misc_feature (254)..(254): Xaa can be any naturally occurring amino acid
  misc_feature (259)..(259): Xaa can be any naturally occurring amino acid
  unsure (1)..(286): unsure at all Xaa locations
MRGDTRAAAEMSVADVAAAADKGKEKVEEPVPAARAAGGGNGRFMAYPARMAEHKSVVADAALFRAELEKLHAHMGTKLKVPIIGGKDLDLHQLFKEVTSRGGIDKVKAENRWREVTASFIFPATATNASFMLKKYYMSLLYHFEQLYFFGGQGWYQQESDXRSLPCIEVRAETQNIDKRKGPTNASSDPALASDNVDVDVIIDGKFEHGYIVTVITGXKSTKAVLYNYSEEPALXTLAPTMHVKHTASKGGRXRRARXKKASTTDPRHPKPNRAAIILFQDQHRS

SEQ ID NO: 24347 - protein, 354 aa, Synechococcus elongatus PCC 6301
MSIKSLISFGLLVFVPISIAAEWLHWGEGAIFVTSALAIVPLAIWLSTATEEIAVVVGPSIGALLNAVFGNATELIIAVVALRAGLVDIVKASITGTIISNLLLAMGLSMLVGGIGRQEQTFKPVVARVNGSAMTLAVLAILLPTLAIATGGETPPSELGFSQFVAWILLAVYGLTLLFSLKTHRSLYDVGVTEHEHSGDRPNLLLWVGVLAAATLAVAYESEIFVGVVESVTEKVGLSPLFTGVILLPLLGGAAEYVTAVSVARKDNMDLSVSVALGSTLLVALFVAPLLVLIGPLFGHPLDLSFNLFELVAVVVAVAVSNLISIDGRSDWLEGCLLLAAYLILGAAFYFQSA

SEQ ID NO: 24348 - protein, 273 aa, Citrullus lanatus
MTLNRSPTPLRRLDGKVAIITGGASGIGTSAVRIFHENGAKVIIADIQDEIGQKIADELGDDVSYIHCDVSKEDDVSNLVDAAVHRHGKLDIMYSNAGVLDRSFSGILDVTKSDLDKVLGVNVMGAFWGAKHAARVMIPEKNGCILFTSSATTNIAGLSSHPYAASKCAVLGLVRNLAAELGQHGIRVNCVAPFVVATGIAGSRDPMQAEALETMVTTWANLKGRVLKADDIAKAALYLASDDANYVSGLNLVVDGGYSVVNPTMLKTLKLMD

SEQ ID NO: 24349 - protein, 581 aa, Cryptococcus neoformans var. neoformans JEC21
MANAPHGGVLKDLLVRDAALHDSLLQEARSLNDIFLTERQLCDLELILNGGFSPLEGFMNERDYTSVVETLRLAPYNGQKHGDVFPIPITLDVSQEDINTLGLKQGGRVALRDPRDDAALAILTVSDIYRPNKAIEAEKVMGADDIAHPSVAYLRNNVKEFYVGGKVQAIQAPTHFDYVPLRFTPAELRAHFHKLAWRKVVAFQTRNPMHRAHRELTVRAARQRRANVLIHPVVGLTKPGDVDHYTRVRAYQALMPSYPEGMAHLALLPLAMRMAGPREAVWHAVIRKNFGATHFIVGRDHAGPGKNSQGQDFYGPYDAQELVTQFKDELQIEMVPFQAMTYLPGSDEYQPVDEVPKGTPTADISGTELRKRLRTGASIPDWFSYTGVVKVLRESYPPRPQQGFTILLTGLHNSGKDTIARALQVTLQQQGSRSVSLLLGEELRSDLDPQIGRAITPEQKHINLERIGFVAGELTKAGAAVIAAPTAPYERSRQAFKKQVVGSGGGNYFLVHVATPLEWCEKVDRRGLYKAARAGEIKNLTGVDDVYEAPEDADLVCDLRNDTVPEIVHSIIMILESQNLV

SEQ ID NO: 24350 - protein, 277 aa, Rhodobacter sphaeroides
MATETHILNPRFYTTDFDELDRVDVTPVRKDWDALIAEMKADPNKAHFKKTEAWDRIDWDGMDPALRVEFIDFLVSSCTAEFSGCVLYKEMKRRGSNPDIRELFNYMARDEARHAGFINDALREAGVAVNLGFLTKAKKYTYFRPKFIYYATYLSEKIGYARYITIYRHLEANPEHRFHPIFKWFKEWCNDEFRHGEAFALLMKTDPKLTDTTVNRLWIRFFLTAVYSTMWVRDHARPEFHKALGVDIDWYDQEVYRKTSEIARQIFPVELDIDHPR

SEQ ID NO: 24351 - protein, 644 aa, Yarrowia lipolytica CLIB122
MQESQEYLDLDPGSEKIGDTPSPDIARDLEEQAEKAAESAVDGQRADSLHRHNSYPIPPLAGLTLQRTLTHRSRVSRLSHHSEEQSGDQSGNAMNSETPALPGHVTQDHLSQTRRYLICFMLCVCTLLVAIDETIITTALPEIVAALKSSSGYTWIGTSYLLACASSMPAYGALADIFGRKPIILLSIALFLIGSAIAGAATDMGMMISGRVIQGIGGGGISNLVNVIVADIIDLKYRGTFMGAIGATWAVGGCMGPLLGGAFASGGQWRWCFFLNLPIAGVCFIFMAWLANIKSPPTTLRDGLKRIDFLGIILITCATVCLFLALDWGGVHFAWNSAPVIVCLVLSGVLYIAFVLCEKYIPNEPVMPPRLFTNFSRTGALLCTFFHSTTFMAVSYFTPFMYQSVYNKSPIGAAVYLLPQAIVMGLASAISGYIITKTGKYKIIMIVGFSLAAIFNGMIVTLNPDSNTAKQIMWVTVWGIGIGPNFESTLIALHTHIKSQDIATATSTWGFLRTIGFSIGIAIGGVVFQNKMQTENEELGHLLPADLRELLTGADAAASTTLIKNYSEPVQKVAKLMYSRSFKDMFWTCLGLCLGYLFVFLIKERPLEMKDAKGETTETEDEVDQIVDVIVDDFEGNQKHRDGA

SEQ ID NO: 24352 - protein, 163 aa, Rhodobacter capsulatus
MAFDYVRAAKYFVLWDFIKGFALGMKYFVAPKPTLNYPHEKGPLSPRFRGEHALRRYPSGEERCIACKLCEAICPAQAITIDAEPRDDGSRRTTRYDIDMTKCIYCGYCQEACPVDAIVEGPNFEYATETREELFYTKEKLLENGARWEAEIARNIEMDAPYR

SEQ ID NO: 24353 - protein, 408 aa, Oryza sativa
MAFAGDARIVVVAVAAFVLVGVAVEGKGEGGGGGGVGVCFERIFSFGDSLTDTGNFLLSVPEDFPDPARSLPYGQTFFGRPSGRYSDGRNLLDFFAEAFGLPFVPPYLAGGDFRQGANFAVGGATALNGSFFRDRGVEPTWTPHSLDEQMQWFKKLLTTVSSSESELNDIMTKSLFLVGEVGGNDYNHLIVRGKSLDELHELVPKVVGTITSAITELINLGAKKLVVPGNFPIGCVPLYLSIFPSQKEDYYDEKTGCIKWLNEFTEYHNRLLQEELEKLRNLYPDVSIIYADYYGAALNIFLAPLQFGFTVPLNSCCGSDAPYNCSPSILCGHPGSVVCSDPSKYTSWDGLHFTEATYKIIIQGVLGSYANPPLSETCRGGAYKVSQLHQCTDNPTNTVTYDSMSSFI

SEQ ID NO: 24354 - protein, 660 aa, Rhodospirillum rubrum
MSAVPHADLANAIRFLSADAVQKAKSGHPGMPMGMADVATVLFTRFLTFDPAAPRWPDRDRFVLSAGHGSMLLYSLLYLTGYADIDLDQIKSFRQLGARTAGHPEYGHVAGAETTTGPLGQGLANAVGMALAERMTAARFGEAVVNHRTYVIAGDGCLMEGISQEAISLAGHMKLERLIVLWDDNRICIDGDVGLASSDDVPARFQASGWRTLACDGHDPQDITRALTEAQTSDRPTLIACRTIIGKGAPTLQGTAKTHGSPLGDAEIAGARAALGWPHAPFEVPEPILSAWRTAGARGGVARVAWEDRLASLPGDERATLIRALAGDLPAGWEDAVLAAKRALIETRPKVASRKASQMALEVLVPQIPELVGGSADLTGSNLTQVKGQADILPGSYGGHYIHYGVREHGMGSLMNGLALHGGVIPYGGTFLVFADYMRPAIRMAALMGLRAIYVLTHDSIGLGEDGPTHQPVEHLASLRAIPNLWTFRPADAVETLECWALAVGRSDGPSLLALSRQDLPTLREAYGEENLSAKGAYVVAGEGPRDVTLIATGSEVTIAMAARELLAADGLAAAVVSMPSWELFEAQSAEYREAVLGPRARRVAVEAASAFGWERWVEDKTAVVGMPGFGASGPIGDLYEHFGITAEAVARVAKARAEG

SEQ ID NO: 24355 - protein, 476 aa, Bacillus anthracis str. A2012
MQNKIIVMFQKDFRLYDNPALFEAAQSGEVVPVYVHDETFSMGSASKWWLHHAIIDVKKQLEALGSTLIIRKGSTQEEILSLVEQLGITAVYWNICYDPDRLQSNQKMKMMLEHKGMICKEFNSHLLLEPWVIKKKDNTEYKVFTPFYNAFQKQVIHKPISKVQSIKGGNSLPVSLSVSELHLLPTIPWTSHMESIWEPTEEGAYKTWKEFFSSKLASYSEGRDFPNQNAHSMLAPYLSFGQISVKLIYHYLINKSTESQCSLFEKQVNSFIRQLIWREFSYYLLYHYPFTAYKPLNKSFEHFPWNNEEELLRVWQKGDTGYPFIDAGMRELWQTGFMHNRTRMAVASFLVKHLLIPWQEGAKWFMDTLLDADIANNTMGWQWVAGSGADASPYFRIFNPITQGEKFDKNGEYIRKWVPELKDMPNKYIHKPWEAPEHILQKANIQLGHTYPLPVVDHKAARERALCAYKSMKEFV

SEQ ID NO: 24356 - protein, 323 aa, Staphylococcus epidermidis ATCC 12228
MNKILVTRQIPQHYVEQLKKIGQVVMWEHDLTPMSRESFLANVEDATACVITLSEHIDEEVFLRAQQLKVIANMAVGFDNIDISLAKKHGVVVTNTPHVLTETTAELGFTLMLTVARRIIEATSYIQEGKWKSWGPYLLSGKDVYGATVGIFGMGDIGKAFARRLQGFDARIIYHNRKRDLNAERDLNATYVTFKSLLEQSDFIICTAPLTKETENQFDARAFNKMKNDAVFINIGRGAIVDEEALLEALKNHEIQACGLDVMRQEPIQPNHPILKLPNAVVLPHIGSASQVTRNRMVQLCIDNIKAVLNNDAPITPVTSLHF

SEQ ID NO: 24357 - protein, 427 aa, Streptococcus pyogenes M1 GAS
MTHSTKQEHSHSQSAVLGLQHVLSMYAGSILVPIMIAGALGYSARELTYLISTDIFMCGVATFLQLKLTKHTGVGLPVVLGCAFQSVAPLSIIGAQQGSGAMFGALIASGIYVILVAGIFSKIARFFPPIVTGSVITVIGLSLVGVAMGNMGDNVKEPTAQSMMLSLLTIVIILLVQKFTKGFVKSISILIGLVAGTLVSAMMGLVDTTPVVEASWIHVPTPFYFGMPTFEITSIVMMCIIATVSMVESTGVYLALSDLTNDQLDEKRLRNGYRSEGIAVFLGGLFNTFPYTGFSQNVGLVQISGIKTRRPIYYAAGILVVIGLLPKFRAMAQMIPSPVLGGAMLVLFGMVALQGMQMLNRVDFQKNEYNFIIAAVSISAGLGFNGTNLFASLPETAQMFLTNGIVIATLTSVVLNLVLNGKDKQDE

SEQ ID NO: 24358 - protein, 371 aa, Bacillus subtilis subsp. subtilis str. 168
MAAKTKKAIVDSKKQFDAIKKQFETFQILNEKGEVVNEAAMPDLTDDQLKELMRRMVFTRVLDQRSISLNRQGRLGFYAPTAGQEASQIATHFALEKEDFVLPGYRDVPQLIWHGLPLYQAFLFSRGHFRGNQMPDDVNALSPQIIIGAQYIQTAGVALGLKKRGKKAVAITYTGDGGASQGDFYEGINFAGAYKAPAIFVVQNNRYAISTPVEKQSAAETIAQKAVAAGIVGVQVDGMDPLAVYAATAEARERAINGEGPTLIETLTFRYGPHTMAGDDPTKYRTKEIENEWEQKDPLVRFRAFLENKGLWSEEEEAKVIEDAKEEIKQAIKKADAEPKQKVTDLMKIMYEKMPHNLEEQFEIYTQKESK

SEQ ID NO: 24359 - protein, 157 aa, Triticum aestivum
  misc_feature (85)..(85): Xaa can be any naturally occurring amino acid
  misc_feature (119)..(119): Xaa can be any naturally occurring amino acid
  misc_feature (124)..(124): Xaa can be any naturally occurring amino acid
  misc_feature (127)..(127): Xaa can be any naturally occurring amino acid
  misc_feature (132)..(133): Xaa can be any naturally occurring amino acid
  misc_feature (151)..(153): Xaa can be any naturally occurring amino acid
  misc_feature (155)..(155): Xaa can be any naturally occurring amino acid
  unsure (1)..(157): unsure at all Xaa locations
HIETYDVTTIRASTPMFLMSRKIKSLGVKMVLSGEGSDEIFGGYLYFHKAPNKKEFHEETCRKIKALHLYDCLRANKATSAWGLXEARVPFLRQKLHQMYNGPGFRNPKMIRRDLGRIXKWVCXKAXDDDEXXYLPKHIFTGKKTFNHGVXXXWXDG

SEQ ID NO: 24360 - protein, 537 aa, Rickettsia rickettsii
MVHFIFVTGGVVSSLGKGLTAASLAMLLQAKGFRVSVRKLDPYLNIDPGTMNPHEHGEVYVTDDGAETDLDLGHYERFTGVSACKFDSITTGAIYSKLLKDERLGNYAGVTVQVIPHVTNIIKDFILSNTKGVDFIICEIGGTVGDIEGLPFFEAIRQIGNQLKSENCLFIHLTLLPYVKTARELKIKPTQHSVKALRAIGISPNILVCRAERHISKGAIDKISLLCNIKSEYVVPAIDQKNIYLVPIAYHNSGLDNKVLKFFNINIMPSKLDKWYDIINRLKDSNSKVRIAIIAKYHKLKDAYKSVIEALNHAGIYYKYKIDLVWTNAENLTEESINKKLLDIDGILVPGGFGERATKGKIIAIKYARTNNIPFFGICFGMQLATIEIAQNLIGIKDAVTEEFKVDGTKIIEKINKNCEDSKITIENVKKTMRLGSYPCSLVANTIAANAYKSLEINERHRHRYKFNNEFQNIFEKHGIVFSGFSKDEEIVEIIELPLLRWFVGVQFHPEFKSKPFEAHPLFIQFIKAAIEYNKCN

SEQ ID NO: 24361 - protein, 502 aa, Lactococcus lactis subsp. lactis Il1403
MNKRVKIVSTLGPAVEIRGGKKFGESGYWGESLDVEASAKNIAALIEEGANVFRFNFSHGDHPEQGARMATVHRAEEIAGHKVGFLLDTKGPEMRTELFADGADAISVVTGDKFRVATKQGLKSTPELIALNVAGGLDIFDDVEIGQTILIDDGKLGLSLTGKDAATREFEVEAQNDGVIGKQKGVNIPNTKIPFPALAERDDADIRFGLSQPGGINFIAISFVRTANDVKEVRRICEETGNPHVQLLAKIENQQGIENLDEIIEAADGIMIARGDMGIEVPFEMVPVYQKLIISKVNKAGKIVVTATNMLESMTYNPRATRSEISDVFNAVIDGTDATMLSGESANGKYPRESVRTMATVNKNAQTMLKEYGRLHPERYDKSTVTEVVAASVKNAAEAMDIKLIVALTESGNTARLISKHRPNADILAITFDEKVERGLMINWGVIPTMTEKPSSTDDMFEVAEKVALASGLVESGDNIIIVAGVPVGTGRTNTMRIRTVK

SEQ ID NO: 24362 - protein, 475 aa, Magnetococcus sp. MC-1
MCRSVRLGCSVSRGCRAFLATALVRKLVATLGHYGLSIHFHAVCSCLEHGTAIEAAERVLFVNHRVVITGVGLVTPLGVGNDVTWSRLIAGESGIGLLTSFDTEEYSCKIGGEIKDFNPEQWIEKKEVKKMDRFIHYGLAASQLAWEDSGLEAPDEEASYRYGAIVGSGIGGLIAIQNQAIALKEKGPRRISPFFIPMSLINLVSGQLAIKYGLRGPNHAVVTACATGTHAIGDAYRIVQRGEADVMVAGGAEAAICELGIGGFAAARALSTRNDDPTRASRPWDKGRDGFVQSDGAGVVVVESMEHAKARGARIYAEVVGYGMSGDAYHITAPHPSGDGAARCMAAALKDAQMDPSGIGYINAHGTSTPQGDVIETKAVKKIFGESGAKKVMVSSTKSMTGHLLGAAGGIEAIFTAKALHEGVIPPTINLDDPDPECDLDFVPHTARQEQVEAALSNSFGFGGTNATLVLKRVR

SEQ ID NO: 24363 - protein, 470 aa, Bacillus subtilis subsp. subtilis str. 168
MVVGDFPIETDTLVIGAGPGGYVAAIRAAQLGQKVTVVEKATLGGVCLNVGCIPSKALINAGHRYENAKHSDDMGITAENVTVDFTKVQEWKASVVNKLTGGVAGLLKGNKVDVVKGEAYFVDSNSVRVMDENSAQTYTFKNAIIATGSRPIELPNFKYSERVLNSTGALALKEIPKKLVVIGGGYIGTELGTAYANFGTELVILEGGDEILPGFEKQMSSLVTRRLKKKGNVEIHTNAMAKGVEERPDGVTVTFEVKGEEKTVDADYVLITVGRRPNTDELGLEQVGIEMTDRGIVKTDKQCRTNVPNIYAIGDIIEGPPLAHKASYEGKIAAEAIAGEPAEIDYLGIPAVVFSEPELASVGYTEAQAKEEGLDIVAAKFPFAANGRALSLNETDGFMKLITRKEDGLVIGAQIAGASASDMISELSLAIEGGMTAEDIAMTIHAHPTLGEITMEAAEVAIGSPIHIVK

SEQ ID NO: 24364 - protein, 334 aa, Cryptococcus neoformans var. neoformans B-3501A
MASVKEGDYQALKEEIKKIMKQPGYDDGSAGPVLVRLAWHASGNFSLVEHNGGSNGAGMRFPPESVDPANAGLHYAISFLLPLQSANSWISHADLWTLAGVTAIEAMGGPQIPWEPGRLDYESEQAAVEHRGDVSNRLPDGALGAAHIRDVFGRMGFSDQEIVALSGAHNLGRCHADRSGFDGPWVVNPTRFSNQYFKLLLRPIWKPRQWDGPFQYEAIVAGTRLMMLPTDMALIEDPSFRPWVEKYAADQNLFFKDFANAFGKLIELGVDRDDTGFARLAKKAAEEGKPLDKTAPPAGDETCPVSGAVGGGVQRAAGGGGCPFMAMQNREAKL

SEQ ID NO: 24365 - protein, 415 aa, Zea mays
MEHASCDDVHEHAISVSHGETASTSTNHQDMYSDSDEPHQEDRPSTSTQTPSSESSPSTSPTAYSSRNLSFPRRDSIYGHGRNPWNSGLWISFEIVMYIAQVVAAIVILLFSRHEQPHAPLFAWIIGYTVGCIASLPLIYWRYVHRNRHLDQEPQQPPTTYPTLTPSQSSEGRNHRTSGIVLCLGCVTISCPRLSVLAYHFKTAVDCFFAVWFVVGNVWIFDGRSISSDAQAAPNMYRLCLAFLALSCVGYAIPFIMCAAICCCFPCLISILRLQEDLGQNRGATQELIDALPTCKFKPKRNKNWGIDHASSSEHLDEGGILGLGTKKERVVSAEDAVCCICLTKYGDDDELRELPCTHFFHVQCVDKWLKINAVCPLCKQEIGGVVRSFFGLPFGRRRVDRMAGRGVASSRFSV

SEQ ID NO: 24366 - protein, 806 aa, Citrullus lanatus
MAERVLNRVHSLRERLDETLIAQRNEILGLLSKIEAKGKGILQHHQLIAEFEAIPEENRKKLADGDFGEVLRATQESIVLPPWVALAVRPRPGVWEYIKVNVHALVVEELQVAEYLHLKEELVDGSSNGNFVLELDFEPFNASFPRPTLSKSIGNGVEFLNRHLLAKLFHGKESMQPLLDFLRVHCYKGKTMMLNDRIQTLNAFQHVLRKAEEYLATLAPETPYSEFANKFEEIGLERGWGNTAERVLEMIQLLLDLLEAPDPCTFEKFLGRIPMVFNVVILSPHGYFAQDNVLGYPDTGGQVVYILDQVRALEHEMLQRIKQQGLDITPRILIITRLLPDAVGTTCTQRLEKVFGTEHSHILRVPFRNEKGIVRKWISRFEVWPYLETYTEDVAQELTKELQGKPDLIIGNYSDGNIVASLLAHKLGVTQCTIAHALEKTKYPDSDIYWKRFDDKYHFSSQFTADLIAMNHTDFIITSTFQEIAGSKDTVGQYESHTAFTLPGLYRVVHGIDVFDPKFNIVSPGADMSIYFPYTETEKRLTSFHPEIEELLYSEVENEEHLCVLKDRSKPIIFTMARLDRVKNITGLVEWYGKNKRLRELVNLVVVAGDRRKESKDNEEKAEMEKMYILIKTYNLNGQFRWISAQMNRVRNGEVYRCIADTKGAFVQPAVYEAFGLTVVEAMTCGLPTFATCNGGPAEIIIDGKSGFHIDPYRGDRAAEILVDFFEKSKEDPSHWDKISQAGLQRIYEKYTWQIYSERLLTLTGVYGFWKHVSNLDRLESRRYLEMFYALKYRKLADSVPQAVDE

SEQ ID NO: 24367 - protein, 247 aa, Triticum aestivum
HYRTSLYKKAGWYRSGIPGISSTHASAQAEIRSAAAAATATATMFSGTQQKCKVCTKTVYPMDQLSTDGAVFHRACFKCHHCKSTLSFSSYSSFEGVPYCKPHFAQLFKETGSYNKSFQSQSPAKSATEKLTPELTRSPSKAAGMFSGTQDKCATCGKTAYPLEKVTVEEKSYHKSCFKCSHGGCALSPSNYAALEGILYCKHHFSQLFKEKGSYNHLIKCASVKRAAEAQTAQAAAQTAPAAAESS

SEQ ID NO: 24368 - protein, 966 aa, Oryza sativa (japonica cultivar-group); identical to SEQ ID NO: 1007

SEQ ID NO: 24369 - protein, 284 aa, Streptococcus agalactiae 2603V/R
MTDTMILNDNHKIPTLGLGTWMIDNDRVAQVVKDAIELGYRHIDTAQAYNNEKGVGVGIKESGITRESLFVTTKIAAEHKDYESATKSIDQSLEALGLDYIDLMIIHSPQPWKEWRETDKHFDQGNLEAWRALEDAQKSGKMKSIGVSNFLEKDLENILKNGHVKPAVNQILAHIGNTPFDLIDYCQSKGIQVEAYSPIAHGQALKSDGIQKMAEKYGVSVAQLCIQYLLQLNLIVLPKASSKEHLQSNLDFDFVISDEDMSILKSLMFDDYGEFSNFPVFSGK

SEQ ID NO: 24370 - protein, 147 aa, Brassica napus
MGGKGWFLLKLLMFQGLFTSPPQDPGFDFFYFVLQWPGAYCDTKRACCYPTSGKPAADFGIHGLWPNYKDGSYPSNCDPDNEFDPSEISDLVSTLQTKWPTLSCPSNEGFKFWEHEWEKHGTCSESVMDQHKYFENTLALRDRVNLL

SEQ ID NO: 24371 - protein, 396 aa, Erwinia carotovora subsp. atroseptica SCRI1043
MAIEGLLAHRIAQLKSSAIRELLKHSKMENIISLAGGIPSDALFDFEGLNQATQLAITEQPKTAFQYGLTEGSSVLRDGIAELCAVRGVKTRGDDIVVTAGSQQALDLIMRAMIDPGDVFVVERPTYLAALQTLELAQANVMSVSSDANGMVVDELEELLKKQRIKGVYIVPNFGNPSGVTLSYERRLQLVQLAERYGFIIIEDDPYGELRFTDERNPTLFQLAQDKLGSTEYVLYTSTFSKVLAPGLRLGWAILPDWLLHKVAIIKQAADLHASALSQTVAECYLGLGRLDTQIEKIRHAYKHKGELLAQLVEKELGDVITFNQPKGGMFLWAKFRQDDFNTTEWLKKTLEQGVVFVPGEFFFPDNIDYSTLRLSFATATDEQMHEAVARLRRAL

SEQ ID NO: 24372 - protein, 577 aa, Bacillus cereus E33L
MNRGRDVMSKFTVASNGSLETTLRGVEILSTPFLNKGVAFTQEEREELGLKGLLPPAVLTLEEQARRAYEQFCSQPDDLLKNVYLTALHDRNEVLFYRILTDHLREMLPIVYTPTVGVAIQRYSHEYRKPRGVYLSINDLSGIEEAFANIGATAENIDLVVVTDGEGILGIGDWGVGGINIAIGKLAVYTAAVGIDPSRVLPVILDVGTNREELLDNPFYIGNRHPRITGEAYDEFIDTFVQAVNKQFPKALLHWEDFSSRNARKILDKYRHDICTFNDDIQGTGAVSLAAVLSAVKASGVPLSEHRVVVFGAGTAGIGIADQVRDAMVRVGVSEEESYKRFWCIDRNGLVTDNMEDLLDFQMPYARKEAEVSEWKENGVIGLAEVVKQVKPTILIGTSTVAGAFKEEIIKEMASHVERPIILPMSNPTPLAEAKPADLIEWTEGRALVATGSPFEPVTYNGVTYVIGQSNNALIFPGLGLGTIVVRASVMTDGMFAAAAEAVASMVDTSQPGAPILPEVEELRNISEMVAIEVAKVAVAEGVARENLSDNDIKIAVKEAIWEPEYRQIKAVEKVTI

SEQ ID NO: 24373 - protein, 433 aa, Bacillus licheniformis ATCC 14580
MKLLFGALQWTAFIIASAIVVPIAIGQSFGLNQGETAGLVQSTFFVLGTTAFIQCLLGHRLPINESPAGLWWGVYTIYAGLTGTVFATHIETLQGLQGAMLLSAVFFFIFSLFKVIDKLAVMFTPVVTGIYLLLLVIQLSDPIVKGVMGIGYRKNEVDIPVFLLAVVIMLATFLMSRSNVPILKQYSILIALFGGWILFAVFGVAKAPERANQLFHLPDIFPFGMPMFDSGLVVTSLFITVLLIVNMLASIRVVEGAVKQFEKLEERKRARPAGFIASVSHLLSGLLGAVGTVPISGAAGFIQTTRMSSKKPFLLGSLIVIVISFFPLVMNTFASLPSPVGFAVNFVVFSTMVGLAFAEFDSYEKDEAGRIRFVTGIALLAGVGVMFVPESALEGMHPVFVSILSNGLVLGTIVAIAAEQIQLRKKKYDNIVS

SEQ ID NO: 24374 - protein, 445 aa, Ajellomyces capsulatus
MREIVHLQTGQCGNQIGAAFWQTISGEHGLDGAGYYNGSLDIQLERMNVYFNEAAEKKYVPRAVLVDLEPGTMDSVRAGPFGQLFRPDNFVFVQSGAGNTWAKGHYTEGSELVDQVIDVVRREAERCDCLQGFQIIHSLGGGTGAGMGTLLISKIREEFPDRMMATFSSVVPSPKVSDTVVEPYNATLSNHQLVENSDETFCIDNEALYDICMRTLKLSEPSYGDLNHLVSAVMSGVTTCLRFPGQLNSDLRKLAVNMVPFPRLHFFMVGFAPLTSRGAYSFRVVTVPELTQKMYDPKNMMCLLDFRNGRYLTASAIFRGKVSMKEVEDQMRNVQNKNHTYFVEWIPNNVQTALCSIPPRGLKMSSTFVENSTAIQELFKRVGDQFTAMFRRKAFLHWYTGEGMDEMEFTEAESNMNDLVSEYQQYQDASISEGEDEYFDYAWAM

SEQ ID NO: 24375 - protein, 526 aa, Aspergillus niger
MAASSSLDHLSNRMKLEWHSKLNTEMVPSKNFRRTSIIGTIGPKTNSVEKINSLRTAGLNVVRMNFSHGSYEYHQSVIDNAREAAKTQVGRPLAIALDTKGPEIRTGNTPDDKDIPIKQGHELNITTDEQYATASDDKNMYLDYKNITKVISPGKLIYVDDGILSFEVLEVVDDKTIRVRCLNNGNISSRKGVNLPGTDVDLPALSEKDIADLKFGVRNKVDMVFASFIRRGSDIRHIREVLGEEGKEIQIIAKIENQQGVNNFDEILEETDGVMVARGDLGIEIPAPKVFIAQKMMIAKCNIKGKPVICATQMLESMTYNPRPTRAEVSDVANAVLDGADCVMLSGETAKGNYPNEAVKMMSETCLLAEVAIPHFNVFDELRNLAPRPTDTVESIAMAAVSASLELNAGAIVVLTTSGKTARYLSKYRPVCPIVMVTRNPAASRYSHLYRGVWPFLFPEKKPDFNVKVWQEDVDRRLKWGINHALKLGIINKGDNIVCVQGWRGGMGHTNTVRVVPAEENLGLAE

SEQ ID NO: 24376 - protein, 461 aa, Oryza sativa
MVNGEAEAECTRASLLGRYEIGRTLGEGNFGKVKYARHLATGAHFAIKILDRNKILSLRFDDQIRREIGTLKLLKHPNVVRLHEVAASKTKIYMVLEYVNGGELFDKIAVKGKLSEHEGRRLFQQLIDAVSYCHDKGVYHRDLKPENVLVDRRGKYQISDFGLSALPSHLGNDGMLHTTCGSPNYIAPEVLQNRGYDGSLSDIWSCGVILYVMLVGYLPFDDRNLVVLYQKIFKGDTQIPKWLSPSARDLLRRILEPNPMKRINIAGIKEHEWFQKDYTPVVPYDDDDDNYLDSVLPIKEQIDEAKQEKPTHINAFQLIGMASALDLSGFFEEEDASQRKIRFTSTHSPKDLFDKIENVVTEMGFQVQRGNSKLKVMKNGRGSKNLRNPSSFLVCTEVVELGPSLYVVELKKSHGDPILYRQLCERLSDELGVCKTEQIQRTESLEDDLESFDSGSSLPGF

SEQ ID NO: 24377 - protein, 349 aa, Arabidopsis thaliana
  misc_feature (9)..(9): Xaa can be any naturally occurring amino acid
  misc_feature (19)..(19): Xaa can be any naturally occurring amino acid
  misc_feature (26)..(26): Xaa can be any naturally occurring amino acid
  misc_feature (35)..(35): Xaa can be any naturally occurring amino acid
  misc_feature (72)..(72): Xaa can be any naturally occurring amino acid
  unsure (1)..(349): unsure at all Xaa locations
GSFGNPGRXLLQVAVLVNXIGVLIVXMIIIGDVLXGKTEDGIHHFGVLEGWFGHHWWNGRAAILLITTLGVXAPLACFKRIDSLKFTSALSVALAVVFLIITAGISIMKLISGGVAMPRLLPDVTDLTSFWNLFTVVPVLVTAFICHYNVHSIQNELEDSSQIRPVVRSALMLCSSVYIMTSIFGFLLFGDDTLDDVLANFDTDLGIPFGSILNDAVRVSYALHLMLVFPIVFYPLRINIDGLLFPSARSLSTSNVRFGCLTAGLISVIFLGANFIPSIWDAFQFTGATAAVCLGFIFPASIILKDRHDKATNRDTTLAIFMIVLAVLSNAIAIYSDAYALFKKNAPRE

SEQ ID NO: 24378 - protein, 463 aa, Glycine max
MASSVLSAASHSVSPSCSLSTTHKGKPMIRDNTLGFHRGPNSFSSSRSRGRISMAVAVNVSRFEGIPMAPPDPILGVSEAFKVDNSDVKLNLGVGAYRTEELQPYVLNVVKKAENLMLERGDNKEYLPIEGSAAFNKATAELLLGADNPAIKQQRVATVQGLSGTGSLRLGAALIERYFPGAKVLISAPTWGNHKNIFNDASVPWSEYRYYDPKTVGLDFEGMIEDIKSAPEGSFILLHGCAHNPTGIDPTPEQWEKIADVIQEKNHIPFFDVAYQGFASGSLDEDAASVRLFVARGMEVLVAQSYSKNLGLYAERIGAINVVSSSPESAARVKSQLKRIARPMYSNPPVHGARIVADVVGNPVLFNEWKAEMEMMAGRIKNVRQQLYDSITSKDKSGKDWSFILKQIGMFSFTGLNTNQSDNMTNKWHVYMTKDGRISLAGLSLAKCEYLADAIIDSYHNVS

SEQ ID NO: 24379 - protein, 241 aa, Thermus aquaticus
TSDPVRQYLHEIGQVPLLTLEEEIDLARKVEEGMEAIKKLSEATGLDQELIREVVRAKILGTARIQKIPGLKEKPDPKTVEEVDGKLKSLPKELKRYLHIAREGEAARQHLIEANLRLVVSIAKKYTGRGLSFLDLIQEGNQGLIRAVEKFEYKRRFKFSTYATWWIRQAINRAIADQARTIRIPVHMVETINKLSRTARQLQQELGREPSYEEIAEAMGPGWDAKRVEETLKIAQEPVSL

SEQ ID NO: 24380 - protein, 583 aa, Schizosaccharomyces pombe
MSSPDRSIDIDLEKYPSTATKSVYGQSKDDKNVFDIHPTESEVIPGEVEYADTPSHQNFLQKFFSDFKPVKADREDGVALKRHLKGRHMQMIAIGGAIGTGLFVGSGSSLADGGPASVIIDYTLIGIMMFFTVYALGELAVSYPVAGGFYNYAVRFIDPAWGFAVGWNYFMNYFVTFPLELTTCAITFRYWTDINSCAWITIFLVFVICINLFGVRGYGEVEFILSTLKVVATTGFIILAIIINCGGVPTDPRGYIGGKIIKNKPFRHSFKGFCSVFTTAGFSFSGTEVVGLAAAEAEDPQKSLPRATKQVFWRIAIFYVVSLILIGLLVSPDDPRLMGNSSDGSTSPFVLAIKEANIRGLPSVFNAVIIISTVSVANSCTFTASRTLHAMAAKGDAPRFFAYTDRLGRPLLAMAVCLLFGFFAYINAAGDVSDTVFDWLLAISGISNFFSWGSINLCHIVFRLAMKKQGRSLDQLGFVSPMGIWGSAIGLAFNILCLMAEFYVSLFPIGSKPNANDFFQGYLAAPIVIAFFIGYKIYDRSHIPSLSKLDLDTGLRTYPPKDKESEKIRDAKGFFKWIWQSLC

SEQ ID NO: 24381 - protein, 393 aa, Streptomyces avermitilis MA-4680
MSATAPPLAALSAELSLLRPRMEEVSRAIHARPELKFAEFHAVEVLTGWLAEAGFAVRAGAGGLDTAFVAAHEGSEPGPYVAVLAEYDALPGVGHGCGHNLIAAGGAAAAITAVRALPHHPGTIAVIGTPGEEMGGGGKVRLADAGVFAGVDAAVMFHPGDRSLTTQHGLAAAHLRVGFTGVSAHAARSPWEGRSALAAAQLFLNAIDAMRQFVPPTARLHGIVSDGGQAPNVIPAHAAVDLYVRDRTAASAEALVERVRRAAEGAALATETTAEVHETGPLYGERRDNTVLAERFGDTVRALGLDITAAGPDSPAGSSDIGNLSQLLPVIHPYIQIAEFGTPSHSDAMREAAATPLAHDRAEVAAAGLARVVTDLVLDPGVLEAARAEFVGR

SEQ ID NO: 24382 - protein, 158 aa, Vibrio sp. Ex25
MMEEIYFAGGCLWGVQEFMRHLPGVIGTEAGRANGTTDNTQSEYDGYAECVKTQFDPEQVSVETLMGYLFEIIDPHSVNKQGEDVGAKYRTGVYSQNEQHLTIAKAFIAARPDADKIAVEVLPLTNYVPSDDEHQDRLTRFPNDYCHIPLDLLHKYKN

SEQ ID NO: 24383 - protein, 548 aa, Rhodospirillum rubrum
MAAKDVKFSTDARDRLLRGVDILANAVKVTLGPKGRNVVLDKSYGAPRITKDGVSVAKEIELKDKFENMGAQMVKEVASKSADVAGDGTTTATVLAQAIVREGVKSVAAGMNPMDLKRGIDLAVLAVVEDVKKRSKKIKTSAEVAQVGTISANGDEEVGKIIATAMEKVGNEGVITVEEAKGLDTELDVVEGMQFDRGYLSPYFVTNAEKMVADLENPYILLHEKKLSGLQALLPVLEAVVQSSRPLLIIAEDVEGEALATLVVNKLRGGLKVAAVKAPGFGDRRKAMLEDIAILTGGQVISEDLGIKLENVTIDMLGTAKKVTITKEETTLVDGAGDKKDIEARCSQIRANIEDTSSDYDREKLQERLAKLAGGVAVIKVGGATETEVKEKKDRVDDAMHATRAAVEEGVVAGGGVALLHAIRSLDSVKGANPDQNVGIEIVRRALQAPVRQIAENAGVDGAVVAGKLLENSDTDFGYNAQTGIYENLVTAGVIDPTKVVRAALQGAASIAGLLITTEAMVAEIPEKKDAMPSPDMGGMGGMGGMGF

SEQ ID NO: 24384 - protein, 1097 aa, Cryptococcus neoformans var. neoformans JEC21
MNFQTPPGVQGNSLGPHRSLSSLENGQPGRVSGHSMATPSVEPSSCPGDQYQSFAQGIALSQASSSAINFQAPQPRIVRPSQFSTSQQYAIDSSPRQSQAYTSPNFQFHPYASQQYSHHPSPQISSPHTPADQLFKGKSPASSSSHSHSNLTPGSSVQPSHPEPLRRTSGDMRPSDDGDSGLSLDLSKFPRDVRFQVPSFPTNRAPGAPPAGSQAWTEYSNTSVQSSDASQTAPGGLFARAACVGGPAWTMAPDQGRPFGSNENAGWNRWDQAQMKQNGLSMGVGVGMAMAQMGTVYVNPNLNPAVYGQGIQSFPSNGYYGGQYNLQQGQHMQQENESGGGEVGSRDIAMNSPHQYAAISGPIYGPGPPSSNHFSSPGNPHLQPHTSPSSHRAPSPRPSHDQTHAPNMMSTSAILPQRPSYDQNISDHRLPHQIDFSSAASVSNPNPHRREMNFTLSSTTSYVHSADGRALLQHPLLSPAQQALQDGPGLYSTTGFDMLGILGRVAARKNPSMVIGPVDLSCSFVVVDIRRYDSPIVYASPNFTRLTGYELPQLLGRNCRFLQSPDGEVTKGSKREYTDNEAVYLLKRSLEAGKECQTSLINYRRNGEPFINLVTVVPIPWDGPDIVYHVGFQIDLVEQPNKILRNMQDGNYSVDYTYSIPPEKPLQLDGKGAAIAGLSTAVLDIMGSRTKALAAGTEEGARMEWFKMILDNTDDFIHALSLKGFFQYASSSIRRSLGYEPEDLLNKNISEFAHPSDIVPVIRALKDSTQTIGEEQQPKPVHFTFRIRTKNFGYVWVESMGRLVVEAGKGRKAVILSGRVRNMPTLSWGKVAEHGGLAKTEFWAKISFQGLLLNLTFGVDKVLGYQAEEILGRNLFSLLPGGQNTPPSGEHLINNYASAPDIAPVAKAIYQTIHDSTHRGALSIRQKMVHRSGQPVDVILVFYAPGQAKDKQSPISYSNNDESASVNFIGTPNGASTYPVKITDIFVQVKLLSSSPSHQRSVQPPSIASLTQARPLVHLPNDNIFEELETGRDSSWQYELHQMKMTNRRLRDSIAALKEKKAGKAKKRKYNIVDESPENQSEIIDTSLSSQIGGIGF

SEQ ID NO: 24385 - protein, 95 aa, Rhodospirillum rubrum
MKFRPLHDRVLVKRLEGEEKTAGGIIIPDTAKEKPMEGEVVAVGSGARGDDGKVVALDVKAGDRILFGKWSGTEVKIDGTDFLIMKESDIMGIVA

SEQ ID NO: 24386 - protein, 491 aa, Methylococcus capsulatus str. Bath
MSHELRLDQPGLLRTRCLIDGQWVDADHSKTFSVTDPATGRALADVPAMGAAETMRAIAAAEHAWTGWRGKTAKERAAVLRRWYELILSHTEDLARILTAEQGKPLTEARNEIGYAAGFVEWFAEEAGRAYGETIPSPVPDKRLLVIRQPIGVCAAITPWNFPAAMITRKIAPALAAGCTVVVKPAEQTPLTALALADLAVQAGFPPGVINVVTGDPEAIGGELTSNPLIRKLSFTGSTEVGRLLMAQCAATVKKISLELGGNAPFIVFEDADLDAAVEGALLSKYRNTGQTCVCTNRFLIQDSIYDAFAERLAAKVRRLEVGNGLDEGVVQGPLIDEQALAKVERHIADALDRGARVLAGGGRHPLGGRFFQPTVLVDVTPEMLCTREETFGPVAPLLRFGSEEEALAIANATEYGLAAYFYTRDLARAFRVGEALEYGMVGINTGMLSYDVAPFGGVKQSGIGREGSHHGMDEYLELKYLCLGGMAPSA

SEQ ID NO: 24387 - protein, 363 aa, Solanum melongena
MDRLFLLSLLAFALFSSAIAFSDDDPLIRQVVSETDDNHMLNAEHHFSLFKSKYGKIYASQEEHDHRLKVFKANLRRARRHQLLDPTAEHGITQFSDLTPSEFRRTYLGLHKPRPKLNAQKAPILPTSDLPEDFDWREKGAVTGVKNQGSCGSCWSFSTTGAVEGAHFLATGELVSLSEQQLVDCDHECDAEEKSECDAGCNGGLMTTAFEYTLKAGGLQREKDYPYTGRDGKCHFDKSKIAASVANFSVIGLDEDQIAANLVKHGPLAVGINAAWMQTYMRGVSCPLICFKRQDHGVLLVGYGSAGFAPIRLKEKPYWIIKNSWGENWGEHGYYKICRGHNICGVDAMVSTVTATHTTNPNL

SEQ ID NO: 24388 - protein, 1197 aa, Gloeobacter violaceus PCC 7421
MKTPKRKRQRGVLLTPQGYSRLQEARRRLEFRGNFGNRYTLDAMSERTGLAPRTLSKVMSRKEGVDRQTLEQCFHTFGLQLNEEDYLSLQIGRGRRRQPHAKPHMELEGAPNFAQFYGREQELATLKQWIVQERSRLVAVLGMGGIGKTCLCAELLQQIHLEFEYVLWRSVRNGPLPKELLADLVRFFSHPQELELPASFEGQVYSLLAHLRKHRCLVVLDNIETFMSSGSLAGRYRPGFEEYGFLFGAVGSTAHNSCLVLTSCEQPQGVNFVEGKRLPVRLYRLGGLGYHEGRQILLEKGLAAPEGDPHWKELIRCYAGNPLALKIVASTIRELFDGQAANFLQQGSVAFGGIYDLLEQHYHRLSDIEIECLYWLAVNREPVLLSQLQEDVLLPVSRSRLLEAMESLRARSLIECGGTRFTLLPVVLEYTTDKLLEAIYRELVDGKSVLFRRFAILKAQSPEHVKDAQIRFLLKPLVDQLLAVFGSRLALEHYTHRLLGELRRSELQQLGYAVGNLLNILCHCGIELGGYDFSTLTVRQADLRGARLCNANFQQTNFSQSIFTEALSTVSSVAFSPDGQLLATSEINGTIRLWQAADAQQLAYCRGHTSWVWSIAFSPDGRVLASGSADRTVRLWDYRTGQCLKVFQGHEGWVRSVAFHPGGGILASGSEDAAVRLWEVDSGRCLLTLRGHSGWIHAVRFSPNGQWLASSSQDGKIQLWHPESGEPLQAMQGHTGWVRSIAFAPDGQTLISGSDDQTLRLWDVQRGLLLKCLQGHTGWVRSVDFSADGRTLASGSDDQTVRLWDADSGLCFRVMHGHSNWISSVVFSPDGRLLTSGSVDHSVRIWEISSGHCLRVLQGHGSGIWSVAFRGDGKTLASGSIDHSVRLWDFSTRQPMRSLQAHTSWVRTVAFSPDGTLLASSGQDRTIKLWDPDSGRCLKTLRGHTGWVNSLAFSPNGALLASSSVDHSLRIWNVETGQCLGMLQGHTSWVRSVAFHPDGRVLASASQDKTARLWDIETGRCLWTLQGHTSWVRSVAFHPDGHTLASGSDDGTVKLWDVQTGRLADSLSGHGSGVWSVVFAADGKRLASGGDDKTVRLWDTTSMQCTHVLNRHASGVLCVAIEADSRILASSSADETITLWDLQGGNYLGTMRIEGPYTGMNITGATGLSEAQLATLKALGAVERDAAAPATPSGLDR

SEQ ID NO: 24389 - protein, 1331 aa, Saccharomyces cerevisiae
MMMDILNTQQQKAAEGGRVLAPHTISSKLVKRLSSHSSHKLSRSDLKALGGSETISDGPSQLTFKDRYVFNESLYLKKLKKTALDDYYTRGIKLTNRYEEDDGDDEIIRLSNGDRIDEDLHSGVKFFSTTPYCRKMRSDSDELAWNEIATERFKWQSMLARVLKGDIVKGEKTRIANQVKKPGLNKELSDEIWLELKAWLNGRTMQEMEQSLTYLRDSSDSVFEEIMKFQIPQGKILSLDALEAILQDLMNRYHSVVSYWPNLKKMYKDKPITNTAEFTARIDVMNSWLNFKTNLTLRRQELDDWINRFSPISSSDNCQEDFDGVPQWNCKMKILAEQLMKEKNIESIFQKKIFYPLSPWMFKLKLHFIVYRETLTKMNIKYPYERLRSLLAFPVYLIKEVILTRLSYARKLKNPTMMMIDQMIDDFNAFIRLSVQLKYTLTKYCSNLPFDVDFDPTFENTVIEAIRYLFFLLNLKLIDSSKQNFKAPDLLLKYWDHLKNTGHYINGAETVIPNEFLKLTLRLVHKLQFYLLKQQNFPPTFANASEAEKWLSSIFENLGAMKRKLNRFSNILVKAFQNSAVYQINHNAQLVKKLKDAHYFLVYSGNTFESSGVYMFAAPELLGCDNDTILRILRNKSIGCDLVPKLDIGNNLNVYDITTKETDLNILVSKGEDSKGIPYYRVVANSSSDLDRHAHQSKKKNFSTDPFDQHLDEKNNEVFELEVALSSLGALVVLYPGEPVVWDGPVYKLPGNNLFASNEMDLGKIGNPNTLILLNQGSNYALTYQIDKFNQTVGDSVSFIEKRCSLNSIESSLQKINKAYYKLTYTVLNNYKGILGSFMKQCPGNELLNSIFMFGRDFGRSFLKYNAFSSKRKYVIIFLMVKLGMNWLKFLVEECDPTDQRTFRWCVLAMDFAMQMTSGYNILALNVKQFQELKERVSVCMSLLISHFDVMGARATEAENGMQQARLNIDTEENIDEEATLEINSRLRLEAIKTLEKTMKRNPRQMGKVLDATDQGNKYLLSLASSLSNVSMRWQKRSFIGGGTFGQVYSAINLENGEILAVKEIKIHDTTTMKKIFPLIKEEMTVLEMLNHPNIVQYYGVEVHRDKVNIFMEYCEGGSLASLLDHGRIEDEMVTQVYTFELLEGLAYLHQSGVVHRDIKPENILLDFNGIIKYVDFGTARTVVGSRTRTVRNAAVQDFGVETKSLNEMMGTPMYMAPETISGSAVKGKLGADDVWALGCVVLEMATGRRPWSNLDNEWAIMYHVAAGRIPQLPNRDEMTAAGRAFLERCLVQDPTMRATAVELLIDPWMIQIREIAFGNSEKDQVPILSS

SEQ ID NO: 24390 - protein, 568 aa, Pyrococcus furiosus DSM 3638
MKFDKYEYLQDLMRRRGFAWGSFEIYGGARGFYDYGPLGATIKRKIEKKIREAFIREGFFEIETPDITPEQVFIASGHVEKFVDPLVECKKCGARFRADHLIEETLGIDVEGKSAEEMTKIIREHNIRCPECGGELSDVWYFNLMFETYIGPYKDKKAYLRPETAQGIFVNFKRLNAFARNKLPFGVFQIGKAYRNEISPRQGMIRLREFTQAEVEIFFNPNETEHPHFDEVKDEVLRLYPIEHQLKDLGMIELTAEEAVKKGYVMNTFFAYYMVMIKRILLDIGIPEDKIRFRQQLPEERAHYSADTWDAEIYSERFGWVECVGLAYRTDYDLSRHMKMSGADLTVMIHYDKPKIVKKLNVTLNMKKVGPKLKEKVKEINEKLKSMSQEELRKLVEELNANGKVIIEGHELEKEDLIIKEVEEKIQGEKIVPHVLEPSFGIDRPFYLLLENSLTVDEDGRVYLKIKKDMAPIEVAVLPLVAKEPLTTIAYEIYRNLQKEGFIVVYDEKDSIGKRYMRYDEIGTPYCVTVDNQTPEDGTVTIRDRDTREQIRVKIEEVPRKLKELIFG

SEQ ID NO: 24391 - protein, 353 aa, Haemophilus influenzae R2866
MKLSKTFLFITALCCAAPTLAIQNSTSSSGEQKMAMENTQNIREIYLAGGCFWGMEAYMERIHGVKDAISGYANGNTEKTSYQMIGLTDHAETVKVTYDANQISLDKLLKYYFKVIDPTSVNKQGNDRGRQYRTGIYYQDGADKAVIEQALAQLQTKYKKPVQVEVQPLKNYIVAEEYHQDYLKKNPNGYCHIDITKADEPVIDEKDYPKPSDAELKAKLTPLQYSVTQNKHTERSFSNEYWDNFQPGIYVDVTTGEPVFSSNDKFESGCGWPSFTKPIIKDVVHYETDNSFNMQRTEVLSRAGNAHLGHVFDDGPKDKGGLRYCINSASIKFIPLAEMEKAGYGYLIQSIKK

SEQ ID NO: 24392 - protein, 405 aa, ASPERGILLUS NIDULANS FGSC A4
MTVINEEGHETGRYLAIDMGGTNLRICDVTLTEEKGAYTIEQDKYRLPIHLRKGKGVELWEFIAAKLEDFLAKHKLAREDGEKLPLAFTFSYPVTQDHIRHGVLQRWTKGFDISGVEGEDVVAHLEEVFEKRNVPVRLVALVNDTVGTLIASAYKNPAIKIGSIFATGCNAAYMEKVSRIPKIADHGSEFESDALVSINCEYGAFDNAHKVLPMTRFDEEIDQTSARPGQQAYEKMVAGMYMGELLRLLLLHLHESSGFFTDAEIDRLRGYGTMDSASLSRMEAGGSEAERMSDAKCILKDLYGIEATDEEARVCCLLGEIVCTRAARLYACGIAALCRKQGISECAVGVDGSTFEKYSQFRERAVDALGEILDWPEGQQLVKLVTAEDGSGVGSALIGAITLNQ

SEQ ID NO: 24393 - protein, 366 aa, Zea mays
MLSSASSAGAAMGMGGGYQHQPLPLPQRGAAAAVFTAAQWAELEQQALIYKYLMAGVPVPPDLLRPAPHAAAFSFASPAASPFYHHHHHHPSLSYYAYYGKKLDPEPWRCRRTDGKKWRCSKEAHPDSKYCERHMHRGRNRSRKPVESKTASSPPQLSTVVTTTTTREAAAATPLESLAGAGGKAHGLSLGGGAGSSHLSVDASNAHFRYGSKYPLGAKSDAGELSFFSGAPGNSRGFTIDSPADNSWHSLPSNVPPFTLSKGRDSGLLPGAYSYSHIEPPQVLGQVTIASLSQDQERHQSSFSSGGAGAGGLLGSVKQENQPLRPFFDEWPGTRDSWSEMDDARSSRTSFSTTQLSISIPMPRCN

SEQ ID NO: 24394 - protein, 139 aa, Arabidopsis thaliana
FPTNRIQFLLRRLIESQWLRVSFKISNPLEARMSESSRIREKYPDRIPVIVEKAGQSDVPDIDKKKYLVPADLTVGQFVYVVRKRIKLGAEKAIFVFVKNTLPPTAALMSAIYEEHKDEDGFLYMTYSGENTFGSLTVA

SEQ ID NO: 24395 - protein, 224 aa, Novosphingobium aromaticivorans DSM 12444
MGPLARPMTQDASPELDRLIAGYRRFREQGWTPKLERWRELRDGQEPQVMIIACSDSRVDPAQIFDVDPGEIFVVRNVAAMVPPFETNPGHHGVSAALEFAVQVLKVKEVVVMGHGMCGGCKAALTQDLKGTEPGEGGFIADWIALLDGVRDEVVDKHGTTGRPAERAMEEAGVRASLANLRTFPCIRRKEATGELKLRGTFFAISDGVLHVLDETTGDFSPVN

SEQ ID NO: 24396 - protein, 276 aa, Glycine max
MSGLYNQISSPSTARANSPNINMRSNFEVESQYLTELLAEHQKLGPFMQVLPLCTRLLNQEILRVSGKNGLMQNQGLSDYDRVQFGSPKPNLMPSLDIQPNFTGWNSLSHEGLAGVQGLNVDWQTSPGVPSSHIVKRTLRLDIANDSYPNFNLVGRLLGPRGNSLKRVEATTGCRVFIRGKGSIKELDKEELLRGRPGYEHLNEPLHVLIEAELPVNVVDIRLRQAQEIIEELLKPMDESQDLHKRQQLRELAMLNSNFREDSPQLSGSPSTFNSN

SEQ ID NO: 24397 - protein, 289 aa, Haemophilus somnus 2336
MMRPLKSLTNVNAQFQRGMAACQTLFALLDLETEKDTGKHVVDTVKGEVRFENVTFSYSGKEHPALNNISFTIPQGKTVALVGRSGSGKSTIANLVTRFYDVEQGKITLDGVNIQDYTLANLREHCAVVSQQVHLFNDTIANNIAYAVTEKCTREQIIEAAEAAYAMEFIEKLENGLDTVIGENGASLSGGQRQRLAIARALLRDSPVLILDEATSALDTESERAIQAALETLQKDRTVLVIAHRLSTIEKADEILVIEQGEIKERGSHQELLALNGAYKQLHSTQFNH

SEQ ID NO: 24398 - protein, 773 aa, Mycobacterium avium subsp. paratuberculosis K-10
MMSAHEVMSAHETERGAMQSKPWWSSAVFYQVYPRSFADSDGDGVGDIDGVTAHLDHLEQLGVDAIWLNPVTVSPMADHGYDVADPRDIDPLFGGMAAIERLIAAAHRRGIKITMDVVPNHTSSAHPWFQAALAAGPGSDARQRYFFRDGRGADGELPPNNWTSVFGGSAWTRVLEPDGNPGQWYLHLFDTEQPDLNWEHPDVFDDFEKTLRFWLERGVDGFRIDVAHGMAKPAGLPDSPDLESKVLHHSDDDPRFNHPSVHDIHRDIRKVVNDYPGAVTVGEVWVTDNARWAEYLRPDELHLGFNFRLTKIDFDAVQIHDAIQNSLAATALQEATPTWTLSNHDVGREVTRYGGGEVGLRRARAMAMVMLALPGAVFIYNGEELGLPDVELPDEVLQDPTWERSGHTERGRDKCRVPMPWSGQAPPFGFSSRTDTWLPMPKEWAALTVQKQRDDPDSTLSFFRRALELRRRRVEFDGDGVELAGGDRRCGDVPASRRAGVRPQQRRAARAAAAGRTGAGERAAAGREAAPGRGGLAGLAARPGRAFRRPLLYMLTHGLLRVDSDRRRPGGHRGGGPAARSRGGQHRLDRPRLRRRRHRPEVAIGVQQHARRAVSRIFQRLQVISVLRGTAHAAAGNRRRRNLRAGAGGRTPAVGHRAAARAGRHRHHHRHRAVPVGPAVADRDRAARDLLPERDPGRRGGAQKALPPRPGGDSGGSRAGSRKARAPIAFRGDGGRVRFIALVDDRAAQPAAPAGRKGDQLLPEPAEIRCLLR

SEQ ID NO: 24399 - protein, 300 aa, Cryptococcus neoformans var. neoformans JEC21
MIPRRFPALPQKVYRPFESFDHYIPLFSRIHSSTGRQFQRASAQQTDETPTSWPANKQKLDMPSDSKKGEINPGPSAGDVDKYLNSKILSPSFGGDPIFKRISARAQQAGLPNIAVSAQQGQLLTILALSIRAERILEVGTLAGYSTACLVKALPNHGQIDTLEVKPEHAKVAQENFIDADLYPFPKIHVGPAIETLKRMETPDEGPYDLVFIDADKSTTLEYFLESMRLLRKGGLIIVDNAVRSGRIASPEEDSNPDVAGMRKLYDWVHGDDGRSVLMNVTQTVGDKFWDGFAIAIKLN

SEQ ID NO: 24400 - protein, 382 aa, Prochlorococcus marinus str. MIT 9313
MQDKLTLMIPGPTPVPETVLKAMGRHPIGHRSGEFQAVVRHTTEQLRWLHQTKADVLVITGSGTAAMEAGIINTLSYGDKVLCGDNGKFGQRWVKLAKAYGLDVQVIKADWGQPLDPEAFKKALEADNGKTIKAVILTHSETSTGVINDLETISKYVRTHGKALAIADCVTSLGACNVPMDSWGLDVVASGSQKGYMMPPGLSFVAMSERAWQAHQQSDLPKFYLDLGPYRKTAAQDSNPFTPAVNLYFALESALGMMQSEGLEAIFERHARHRAAAQAGMKAICLPLYAAEGHGSPAITAVAPEGIDAEQLRKTVKEKFDILLAGGQDHLKGKVFRIGHLGFVCDRDILTAIAAIESTLQSLGLHKGNMGDGLAAAAAILR

SEQ ID NO: 24401 - protein, 124 aa, Brassica napus
DMAAHPACDFGGGKAEKLALAKYRQMIWQGRVLNSQFTDEELRSQGRCPLTPEEMGLLLAALGFDNNTRLYLASHKVYGGEARISALRPSLPRMEDKRSLASSEERASIKGKAFLLAALDYYVS

SEQ ID NO: 24402 - protein, 746 aa, Candida glabrata CBS138
MNFFGSKSHHPSSQGSSNSNSSSNGNKHALGSAGNGFFPSFTSQTATPTTAVSSSSYAMGTTGVASEDVISRMKAMNEPAKTSTQGNNVNQKIVIGVNDKPAIITTGPEEQSTRDEQKHGSEPQFRTDTHLTPSPVQLEQSSSSRTDSSSSGENDIPRGKLEVTIIEARGLSTISENSLPYVVCTFESSEFISDGPESVENNGSYVNNHGGLSSIREQLRKRPLYTHRSSSQLNKLTSRQNNFDSEVVSSGLNPIWHHKATFDVLGSHSELDISVYDSNHEDMFLGQVRLRPNIHTTSNMSHEQWYPLQSRVMDEKITGEILVKWHYTLTKKRHYGPQDFEVLRLLGKGTFGQVYQVKKKDTKRIYAMKVLSKKVIVKKNEIAHTIGERNILVTTSSKASPFIVGLKFSFQTPTDLYLVTDYMSGGELFWHLQREGRFTEDRAKFYIAELVLALEHLHDNDIVYRDLKPENILLDANGNIALCDFGLSKADLKDRTNTFCGTTEYLAPELLLDESGYTKMVDFWSLGVLIFEMCCGWSPFYAEDNQKMYQKIAFGKVKFPRDILSPEGRSFVKGLLNRNPKHRLGAIDDGRELRAHPFFADIDWELLKQKKIPPPFKPHLVSETDTSNFDPEFTQTSTSYMNKHHQMAATPLSPGMQAKFAGFTFVDESAIDERFNANNSNRRFLQSSSFMEPGSFIPGNPNLPPDEDVIEDQDDDDFENVKNPRDLDFDGDQHMDDEFVSGRFEI

SEQ ID NO: 24403 - protein, 340 aa, Selaginella lepidophylla
MGSEAKIKIGINGFGRIGRLVARVVLERDDVELVAVNDPFISTEYMAYMFKYDSVHGKWKKADVEVKDHETLIFGGKPVGCFACKDPSEIPWGKFGAEFVVESTGVFTDRDKASAHLKAGAKKVVISAPSSNAPMFVMGVNENDYKPDIDIVSNASCTTNCLAPLSKVINDRFAIIEGLMTTVHSLTATQKTVDGPSSKDWRGGRGAGFNIIPSSTGAAKAVGKVLPALNGKLTGMAFRVPTADVSVVDLTVRLEKPASYEEIKKAVKEESEGKLKGIMGYTEDAVVSSDFIGDSRSSIFDAAAGIALNDSFVKLVSWYDNEWGYSNRVVDLIVHMAKTK

SEQ ID NO: 24404 - protein, 248 aa, Prochlorococcus marinus subsp. pastoris str. CCMP1986
MAVSSQTKETILVADDEASIRRILETRLSMIGYKVVTACDGKEALKLFKDYDPDLVVLDVMMPKLDGYGVCQELRKDSDVPIVMLTALGDVADRITGLELGADDYVVKPFSPKELEARIRCVLRRIDKEQLPGMPNSGLILVTDIKIDTNRRQVFKSDERIRLTGMEFSLLELLVSRSGEPFSRGEILKEVWGYTPERHVDTRVVDVHISRLRSKLEADPANPELILTARGTGYLFQRIVDISPFDGK

SEQ ID NO: 24405 - protein, 630 aa, Candida glabrata CBS138
MDYEVNANQIPVLGIEQGLIPDNLDGSVKADTATSTAMNMNDKSEISNDGSHSIHTSNPNNNGENGKNGGKPASNDFVRKLFNILESNQYSNIVRWSNTGDSFVVLDTGKFTTQILPNHFKHSNFASFVRQLNKYDFHKIKRTNEERQKSIYGEQSWEFENPNFKINDEKSLDLIKRKTPAQRKVMLEDASAPSQKTPELLSVQSENKLKSALLSNTVKKDIFNNLRKRVDKMQKDMDTVMMDNYNLKSDYQKLATKYNTLLDSLITFRTVNENLINNFNALCNVLSSKGVELPSSVYENMNINIPVPSGQSPVNISPSPSLGIPIKNSTMSPSLPSMKSLQNTPSLTGKLSTNQRLDLPPNSQGILSDTNVGQTESPEIQMPISSNSSSTTKEVDQNIVLRKGFHVLLVEDDSVSIQLCSKFLRKYGCTVQVVTDGLSAISNLEKFRYDLVLMDIVMPNLDGATATSIVRSFDNQTPIIAMTGNIEDQDLITYLQHGMNDILAKPFTRNDLHSILIRHLKDRIPLCDQNRGSGITSESPNLPPTQHIISSQQNNEQNSSLPQSLPPIHPPNHQSPLFNNRASNITPLAPLNSAMSPQSPSHLERPLTNRSPLGMTPLNDGQPAFKKQHT

SEQ ID NO: 24406 - protein, 230 aa, Bacillus cereus ATCC 10987
MGYKAMLFDLDDTLLNRDKAVDALFLFVLEKCYEDVSGTVKNNMLQKFKEYDKREYGMSDKTIVLESLFDEFPPKYRLPRNYIEDFWNEKFPKCFSIDQNTIHFLNHIKKYFKVGIITNGSSQRQRAKIINTNLNNYFDTIIISEEVGFSKPDKRIFELALNKLNVQPEDVLFVGDDLEKDIAGPQNVNIKGIWFNPHRITNKTEIKPYSEIDTFDSLLSYITPQFFYNK

SEQ ID NO: 24407 - protein, 143 aa, Glycine max
  misc_feature (129)..(129): Xaa can be any naturally occurring amino acid
  unsure (1)..(143): unsure at all Xaa locations
DDATNFWDYASQNPESVHQFMVLFGDRGIPDGYRKMHGYIGHTHKLLNKNGDWVYMQLHFKSKQGTGFITQEDSFNYGPDYSTKDLYQAIDKGDFPGWDVCVQTMTAKEAEELWEKQKINVFDLTHVWXQGQFPLRKVGEFFL

SEQ ID NO: 24408 - protein, 391 aa, Bacillus licheniformis ATCC 14580
MKSVIEELDALFPEMIELRRHFHQYPELSHREVNTPLTIANYLESLGIGVRTNVGGQGVVGHIKGGRPGKTVALRADFDALPLQDQKNVPYRSTVPGVMHACGHDAHTSALLTAAKALAKHRKDLKGNVVLIHQFGEEVTPGGAKPMIEAGCLEGVDAIFGTHIWAPMPVGQVGVKSGPMMAAADKFKVTISGRGGHGGAPHLTTDALITGASVVNHLQQIVSRRIDPTEAAVLSIGTFHSGQAFNVIAEEAVIEGTVRTFSKHVQETIIAEIERVIKGVCDSNGASFSLDYEKGYPPVVNHENETDIVRQCAKHVVGPEAVIELEPNMIGEDFSYYLEHVPGSFFFTGAGNPQTGAVYPHHHPMFDIDEKGMLNAAKILVSAALAFLNQD

SEQ ID NO: 24409 - protein, 838 aa, Oryza sativa (japonica cultivar-group)
MDPEKRGYRLQEFVAHDAEVRSLSIGKKSSRVFITGGSDRKVNLWAIGKQTPLLSLSGHTGSVEAVEFDTAEVLVLAGSSNGSIKLWDLEEAKVVRSLTGHRSSCTSVEFHPFGEFFASGSSDTDLKIWDIKKKGCIHTYKGHRGAIRTIRFTPDGRWVVTGGEDNIVKVWDLTAGKLLHDFKFHSGQIRCIDFHPQEFLLATGSADRTVKFWDLETFELIGSAGPEATGVRSTVFHPDGKTLFCGLDQSLKVFSWEPVRCHDVVDMGWSNLADLSIYEGKLLGCSYHECRVGVWVADISLIGPYALGVLPKANFFAELVHSLDDNPSKTIDTTAKSIPALATTHPKNLYKVKETGTAESGIRGSNLTPASMDKTKRDKSGATPRRPDSSFKSSIQSSTPMRRMKAADSPYTNRKTVERNFAQRDASLASRTGTANNSSTVKKGHLAESVSVKDIYTTPQTVSVPVVMPRDILEDKTAGSISGGIRGRAAVADDFHAPVHSRKLSVNSFVGDSVNSTKSMLTDPDVCSEGFSGLKFSFGLTPYYKKEEYDNVDKVDSMDKGDNTQMTEKLDRTVSLEHQLQSNDTSEPPCSTTETTKVKYVRGVAVPLGKTKSLVERWEKREATNVECSPPTGSCGDRAVRSDGPSSFSAEPSQAYEKDLSTIDEAMIPINLMQNHDEFINAVKSRLTKLEMMRHVFDQNGIKGAIAAVAKLPDNAVLADVVSTLKGKLDLFNLDIFLSFLPVLAGLLTSKAERHAIVSLELLLDLIKIFGPVIRSTLSAHSAVGVDIQAEQRLQRCSRCFNHLQKIQQVLHPLIMRGGQSAQLAQELNLSLQDLVVI

SEQ ID NO: 24410 - protein, 720 aa, Saccharomyces cerevisiae
MTQQEYRSPSQRLSKGRSMSLPKIFARNLRSLQNNAPPGKNINVNCLNVNSCSLSASPSSQINMACNGNKQDLPIPFPLHVECNDSWSSSKLNKFKSMFNHNRSKSSGTTDASTSEKGTHKREPRSTIHTELLQSSIIGEPNVHSTTSSTLIPNEAICSTPNEISGSSSPDAELFTFDMPTDPSSFHTPSSPSYIAKDSRNLSNGSLNDINENEELQNFHRKISENGSASPLANLSLSNSPIDSPRKNSETRKDQIPMNITPRLRRAASEPFNTAKDGLMREDYIALKQPPSLGDIVEPRRSRRLRTKSFGNKFQDITVEPQSFEKIRLLGQGDVGKVYLMRERDTNQIFALKVLNKHEMIKRKKIKRVLTEQEILATSDHPFIVTLYHSFQTKDYLYLCMEYCMGGEFFRALQTRKSKCIAEEDAKFYASEVVAALEYLHLLGFIYRDLKPENILLHQSGHVMLSDFDLSIQATGSKKPTMKDSTYLDTKICSDGFRTNSFVGTEEYLAPEVIRGNGHTAAVDWWTLGILIYEMLFGCTPFKGDNSNETFSNILTKDVKFPHDKEVSKNCKDLIKKLLNKNEAKRLGSKSGAADIKRHPFFKKVQWSFLRNQDPPLIPALNDNGCELPFILSCNKHPKRNSVSEQETKMFCEKVANDDEIDEADPFHDFNSMSLTKKDHNILTYSENYTYGKILYKATCTRPRHNSSHRSFFKDIIPEL

SEQ ID NO: 24411 - protein, 285 aa, Cryptococcus neoformans var. neoformans JEC21
MPQQEQLPSKDYGIREIWADNLESEFAALRQAVERYPYISMDTEFPGIVARPIGNFKTGSDYHFQTMRCNVDMLKIIQLGITLCDENGDSPEVSTWQFNFAFSLGEDMFAPDSIDLLKSSGIDFKRNEEEGIDVEYFGELLITSGLVLFDNIKWVSFHSGYDFGYLLKILTCEPLPADETDFFRLLFIWFPCIYDIKHIVRSIKTLRGGLQEIAESLGVKRIGPQHQAGSDSLLTAAVFFRIQTIYFDGHLNDDYYKNYLYGFSSGRLGKASPAAAGENLVDKPY

SEQ ID NO: 24412 - protein, 335 aa, Glycine max
MENSTQESHLRSENSVSYESPYPIYGMSFSPSHPHRLALGSFIEEYTNRVDILSFHPDTLSLTPNPSLSFDHPYPPTKLMFHPRKPPSSSSDLLATSGDYLRLWEVRDNSVEAVSLFNNSKTSEFCAPLTSFDWNDIDPNRIATSSIDTTCTIWDIERTLVETQLIAHDKEVYDIAWGEARVFASVSADGSVRIFDLRDKEHSTIIYESPHPDTPLLRLAWNKQDLRYMATILMDSNKVVILDIRSPTTPVAELERHRGSVNAIAWAPHSSTHICSAGDDTQALIWDLPTLASPTGIDPVCMYSAGCEINQLQWSAVQPEWIAIAFANKMQLLKV

SEQ ID NO: 24413 - protein, 489 aa, Citrus unshiu
MWGRQREASMMYKRTSSRDRSSTFDVEETTALVQNGTEVENTNPSWKLSFPHVLVATLSSFLFGYHLGVVNEPLESISLDLGFNGNTLAEGLVVSMCLGGAFIGSTLSGWIADGVGRRRAFQLCALPMIIGASISATTRNLIGMLLGRFVVGTGMGLGPTVAALYVTEVSPPFVRGTYGAFIQIATCLGLMGSLLIGIPVKEIAGWWRICFWVSIVPAAILCLAMVFCAESPHWLYKKGRTAEAEAEFEKLLGGSHVKSSLAELSKLDRGDDGDIVKFEELLYGRHFRVVFIGSTLFALQQLSGINAIFYFSSSVFKSAGLSSGLANVFVGIANLLGSVVAMVLMDKLGRKALLQWSFFSMAVSMAIQVAASSSYIPGSASLYLSVGGMLMFVLTFALGAGPVPSLLLPEIFPSRIRAKAMAVCMSVHWVINFFVGLLFLRLLEQLGPQLLYSIFGTFCLMAVAFVKRNVVETKGKSLQEIEIALLPQE

SEQ ID NO: 24414 - protein, 118 aa, Fusarium proliferatum
DKDGDGQITTKELGTVMRSLGQNPSESELQDMINEVDADNNGTIDFPEFLTMMARKMKDTDSEEEIREAFKVFDRDNNGFISAAELRHVMTSIGEKLTDDEVDEMIREADQDGDGRID

SEQ ID NO: 24415 - protein, 525 aa, Oryza sativa
MDAVAGAGQLVGLAAATLLTAAFLVAVKMGWRRRRRQREVAPEGGCRVVGGDGGDRTDIVIVGAGVAGSALAYTLGKDGRRVHVIERDMTEPDRIVGELLQPGGYLKLMELGLEDCVEEIDAQRVLGYALLKDGRNTKLSYPLEKFHSDVAGRSFHNGRFIQKMRQKAASLPNVHLEQGTVTSLLEEGGTVKGVQYKTKSGEELKAYAPLTIVCDGCFSNLRRVLCSPKVDVPSCFVGLVLENCQLPHPNHGHVILANPSPILCYPISSTEIRCLVDIPGQKVPSMATGEMAKYLKTVVAPQIPPELHDSFIAAIDKGSIRTMPNRSMPAAPLPTPGALLMGDAFNMRHPLTGGGMTVAFSDIVVLRNLLKPLGNLHDAPSLCKYLESFYTLRKPVASTINTLAGALYKVFCASTDQAKNEMREACFDYLSLGGVFSNGPIALLSGLNPRPLSLVAHFFAVAIYGVGRLMLPVPSPKRMWIGARLVSGACGIIFPIIKAEGVRQMFFPATVPAYYRAPPPMDRSG

SEQ ID NO: 24416 - protein, 358 aa, Neurospora crassa
MAASRTATRTLRALRTSTRPALTAAPRAAFRQGGRRLYSSEPAKSGGSNIWAWAIGAGALGAGGLWYLNQDGASATPKVFAPKFDDYQAVYNEIASRLEEKDDYDDGSYGPVLVRLAWHASGTYDKETGTGGSNGATMRFAPESDHGANAGLKAARDFLEPVKAKFPWITYSDLWILGGVCAIQEMLGPQIPYRPGRQDRDAAGCTPDGRLPDASQAQDHLRNIFYRMGFNDQEIVALSGAHALGRCHADRSGFDGPWTFSPTVLTNDYYKLLLDEKWQWKKWNGPKQYEDKKTKSLMMLPADMALIQDKKFKQWVEKYAADNELFFKDFSNVIVKLFELGVPFAENSERWVFKTVNA

SEQ ID NO: 24417 - protein, 131 aa, Arabidopsis thaliana
  misc_feature (76)..(76): Xaa can be any naturally occurring amino acid
  unsure (1)..(131): unsure at all Xaa locations
SSLSLFCDVAFSKSLVFVLLAALLFSSAVARSPAPAPSNVGGRRVSPAPSPGWVAAPAPAPGVSPSPSPAAALTPXSSASPPSPPLADSPTADAPALSPSAFSGSPAGAPGPARGGAVTNKYASFGTVAVM

SEQ ID NO: 24418 - protein, 637 aa, Cryptococcus neoformans var. neoformans JEC21
MLALSRTRALARPLRNNFARNYVVASQTARATEAPNFGQKKGYPIIDHEFDAVVVGAGGAGLRAAFGLAEGGLKTACITKLFPTRSHTVAAQGGVNAALGNMTEDDWRWHMYDTVKGSDWLGDQDAIHYMCREAPHTVIELEHYGVPFSRTKEGKIYQRAFGGQSLKYGKGGQAYRCAAAADRTGHAILHTLYGQSLRHNTNFFIEYFALDLLMQDGECVGVLAINMEDGTLHRFRSHKTVLATGGYGRAYFSCTSAHTCSGDGNAMAVRAGLPLQDLEFVQFHPTGIYGAGCLITEGSRGEGGYLVNSEGERFMERYAPTAKDLASRDVVSRSMTLEIREGRGVGPEKDHIFLQLSHLPAEVLHERLPGISETAAIFAGVDVTKEPIPVLPTVHYNMGGIPTKYTGEVLTIDEQGNDKVVPGLYAAGEAACVSVHGANRLGANSLLDIVVFGRACANHIKETLAPNTPHKPMNPELGKESIEDLDKIRNASGPLPTSQIRLNMQKTMQTDAAVFRTQQSLDEGVAKMREVYKSYDQVGIKDRSMIWNSDLIETLELRNIMQNAMQTVVSAAARKESRGAHAREDYPERNDEEWMKHTLSFQHDPNSPDVELKYRGVIANTLDEAECKPVPPFKRTY

SEQ ID NO: 24419 - protein, 246 aa, Brassica napus
MIRGMEIRHLLLVVAVLLSSVLHGEGGITSSYVRSEWPAVDIPLDHKVFKVPKGYNAPQQVHITQGDYDGKAVIISWVTPDEPGSSTVHYGPVQGEYDFVAKGTYSNYTFYKYKSGYTHHCLVSGLEYNTKYYYKIESGESSREFWFVTPPHVHPDASYKFGIIGDLGQTFNSLFTLEHYMRSGAQAVLFLGDLSYADRYQYNDVGVRWDTWGRFVEPSTAYQPWLWSASNHEVDYMPYMGEVTTF

SEQ ID NO: 24420 - protein, 484 aa, Pseudomonas fluorescens PfO-1
MSQNKTLTTASGAPVADNQNSRSSGPRGPLLLDDFHLIEKLAHFNRENIPERRVHAKGSGAYGTFTVTRDITQYTSAKLFSAVGKQTPTFLRFSTVGGERGSADTERDPRGFALKFYTEEGNWDIVGNNTPVFFIRDPLKFPDFIHTQKRLPQSNLKSAQMMWDFWSHSPEALHQVTILFSDRGIPDGYRHMHGFGSHTYSLISAQGERHWVKWHYKTKQGIKNLAPADAARLAGTDPDYAQRDLFEAIERGDFPKWSVCIQIMTEAQAAAHYENPFDVTKTWSQKEFPLIEVGELELNRNPLNYFAEVEQAAFGPSNMVPGVGLSPDRMLQGRVFAYADAHRYRVGTNHQQLPVNAPRSPVNTYQRDGSMAFGSNGGAAPNYEPNSYVESPKQAPHYAEPALALSGAADRYDHREDSDYYSHAGALFRLMSDEQKALLVSNIAGAMGGVSSDVIDRQLQHFYKADPAYGEAIAKLLNVQLNEV

SEQ ID NO: 24421 - protein, 387 aa, Ustilago maydis 521
MPGKVAPNNSLATEPAERNVSFVLQEIEKVSFEERPIVAPKPGQVQVNIRQTGLCASDCHYLHHGRIGDFVVRKPMVLGHESSGIVTAVGEGVTTHKVGDRVALEPGVPCRSCQVCLNGMYNQCAHLEFAATPPYDGTLCTYYNIQSSFAHHVPDHMSLEEASLMEPLSVAVYSAGMRGQVKAMENVLVFGAGPIGLLNAAVCKAYSAKRVVVVDVVESKLEFAKEWCATSTFKPSLPQEGETKAETAARNAQHLISSLGDDVAAREGFDLVLECTGAEPCINMGIQALRPQGRFVQVGMGRSEVEFPITRVCVKEINVTGSFRYGAGTYKTSINLVSTGAIDVTKMVTHRFLFKDAVKAFETTTKGVGEDGKTAIKVQISQGEGKQ

SEQ ID NO: 24422 - protein, 282 aa, Solanum demissum
MVGKISSDLPPGFRFHPTDEELIMYYLRYQATSRPCPVSIIPEIDVYKFDPWELPEKAEFGENEWYFFTPRDRKYPNGVRPNRAAVSGYWKATGTDKAIYSANKYVGIKKALVFYKGKPPKGVKTDWIMHEYRLSDSKSQTYSKQSGSMRLDDWVLCRIYKKKNLGKTIEMMKVEEEELEAQNVSINNAIEVGGGPQTMKLPRICSLSHLLELDYYGSIPQLLSDNLLYDDQSYTMNYVSNTSNVDQVSSQQQNTNNITSNNCNIFFNYQQPLFVNPTFQSQ

SEQ ID NO: 24423 - protein, 117 aa, Brassica napus
MSYNNNGNVVPAADPLPGKKTKLQSSRSWVSIVATGESETLDVDKYAIMHRVQIHARDLRILDPNLSYPSTILGRERAVVLNLEHIKAIITADEVLLRDPSDENVIPVLKELERRLP

SEQ ID NO: 24424 - protein, 221 aa, Bacillus cereus ATCC 10987
MKNYHILVVEDDQEIQELIKQFLMTQQYTVVVASDGLEGMTQFNKQSFDLVLLDVMMPNLNGFEVAKMIRSQSNIPIIMLTALEEEEDQMKGFDLGIDDYITKPFSFHVLIRRVEAVLRRSYDNNVNNHLIFKEVRIDVDAYRVYVDDVEIFLTTKEFEILQLLFQNERKVLTRENIVEKVWGYDYFGETRIIDTHIKNLRKKLAIPYIKTIKGIGYKVDE

SEQ ID NO: 24425 - protein, 295 aa, Cryptococcus neoformans var. neoformans JEC21
MADQAASLEPFLILARSTKGAAAAKIILDVTAAPGVYVFSELLEMPNIQEVSDASFGGHFQLLQLFAYGTLQDYEENKAIFPLLKEAHINKLRQLTLISLASQHRSLRYQDITQTLQLKTLRQVEDIVIDTIYAGLLNGKLHHDKKVFHIDWVAGRDVREEDLAVIQKSLENWCQTAQTLLGALDTEITHLRQEAVNEASKLARYRLHRDEVYETVANELRNDKAEKSAKRGTEPGAEFDAQQWSAHGRGYEEQVGSATGAGATFGGKAGQNILQTLAHVGSLGGAFSGRKWVRL

SEQ ID NO: 24426 - protein, 494 aa, Cryptococcus neoformans var. neoformans JEC21
MLEDEDIAKTGLIYWSANGTTFTCPNPTEFSKVVLPRYFKHNNWQSFVRQLNMYSYVNDIYSTSTDPQAWEFRHSLFRRGEAHLLPSIKRKSSRPSAPDGSNTVTSPTDELPPSTSNPIKPVAGWMRDAVPVPYRMPSPPHIHGQPQRSATYPYSDGFATRKDDGRSPTRGMAWDPLPAVQRMPPPPDNQIPIRYHPDPNRPVLTTQRFYHPGYPESPLYGPAHSPSAETLLNQMSVLEDKVQKLTDVLNNDRIEHVRNNLDFTSYLLQMIGWAAGDQHTLSRQNADMRHKYEAFMASDALAIMASGGGRERSDSRDSTRERNARLGFEIPPFPGHPHPSITDLRLPQTAQSSSSAILSQRAAPRTSPRNSTSSDLLLTRPSTSESIREREIYPTYFPPQTSHGIGPASSIPSRGPETITPSLYGGGPSVPPPLYRPAPIVEKHREIEKGEEHKDMNGPSTVELGREERDNEDSRMTMAGEEAESKTGLRNLLN

SEQ ID NO: 24427 - protein, 196 aa, Gossypium hirsutum
MSTARFIKCVTVGDGAVGKTCMLISYTSNTFPTDYVPTVFDNFSANVVVDGSTVNLGLWDTAGQEDYNRLRPLSYRGADVFLLAFSLISKASYENIYKKWIPELRHYAHNVPVVLVGTKLDLRDDKQFLIDHPGATPISTSQGEELKKMIGAVTYIECSSKTQQNVKAVFDAAIKVALRPPKPKRKPCKRRTCAFL

SEQ ID NO: 24428 - protein, 350 aa, Cicer arietinum
ETHVLLFLSLFLTCGSYAQDSTLLVPAIITFGDSAVDVGNNDYLPTLFKANYPPYGRDFVNKQPTGRFCNGKLATDITAETLGFTSFAPAYLSPQASGKNLLIGANFASAASGYDEKAAILNHALPLSQQLEYYKEYQSKLAKVAGSKKAASIIKDALYLLMLAAVTLYKIIMSILGINKVLTVDQYSSYLLDSFSSFVKDLYGLGARKIGVTSLPPLGCLPAARTLFGFNENGCVSRINTDAQGFNKKVNSAASNLQKQLPGLKIVIFDIYKPLYDLVQNPSNSGFAEAGRGCCGTGTVETTSLLCNPKSIGTCSNATQYVFWDSVHPSQAANQVLADSLLLQGIALIA

SEQ ID NO: 24429 - protein, 196 aa, Gossypium hirsutum
MNTSRFIKCVTVGDGAVGKTCMLISYTSNTFPTDYVPTVFDNFSANVVVDGSTVNLGLWDTAGQEDYNRLRPLSYRGADVFLLAFSLISRASYENVHKKWIPELRHYAPNVPIVLVGTKLDLRDDKQFLSDNPGAISITTSQGEELKKMIGAVTYIECSSKTQQNVKAVFDVAIKIALRPPKPKRKPIKRRSCAFL

SEQ ID NO: 24430 - protein, 252 aa, Zea mays
MGRRACCAKEGVKRGAWTSKEDDALAAYVKAHGEGKWREVPQKAGLRRCGKSCRLRWLNYLRPNIRRGNISYDEEDLIIRLHRLLGNRWSLIAGRLPGRTENEIKNYWNSTLGRRAGAGAGGSRVVVAPDTGSHATPAATSGSSETGQKGAAPRADPDSAGTTTTSAAAVWAPKAVRCTSGLFFFHRDTTPAHAGETATPMAGGGGVGGGGGEAGSSDDCSSAASVSPRVGSHDEPCFSGDGDGDWMDSWTT

SEQ ID NO: 24431 - protein, 529 aa, Oryza sativa
MLPMLPPPALRAPSAWEQATTSSSIGRSAMEESCSSNWPATPCAAATTAAADKSNCTVGSTNNSPSEQVGHGDSLIYSLPYLPEDIWRHIHSLMPMSAAARAACLSHSFLNSWRFHPNLSLNFKTLCPRTSRGNFKCKIDSILRNHLGTAKILKLNVADEDSTYPYIDRWLEVAVTPGIEELTLTLHKKYIFACSLLSDGVRDSIRCLQLTFCAFHPMAELGPLRSLTKLHLCGVHITGDELESLLLNSLVLEQLRLNVCNKISFLKIPCVLQHLSCLSVMACRRMQVIVCEAPNLSSISLSGGIKFSLGETLTMKVLSMIRPNVVCYARAQLPSIMPNLESMVLSSDSEAVNIPMLPTKFLCLKHLTIQIARGTFSPSYDYFFLVSFLHASPSLETLYLDVFQEDMRHESIVEDSSAHLRQLPELSHECLKSVEIIGFNSAKSLVELTCCIVKAAASLERLVLDTLRGGDRCSGESNGKICWPVSNAVLKESARAAIAVRRYIEDKVAPTTTLTLVGTCTRCHSLAFG

SEQ ID NO: 24432 - protein, 118 aa, Fusarium oxysporum
TRMAMVTTKELGTVMRSLGQNPSESELQDMINEVDADNNGTIDFPGAFTMMARKMKDTDSEEEIREAFKVFDRDNNGFISAAELRHVMTSIGEKLTDDEVDEMIREADQDGDGRIDCE

SEQ ID NO: 24433 - protein, 532 aa, Vibrio sp. Ex25
MAAKDVLFANDARQKMLKGVNLLADAVKVTLGPKGRNVVLDKSYGAPTITKDGVSVAKEIELKDKFENMGAQMVKQVASKANDEAGDGTTTATVLAQSFINEGLKAVASGMNPMDLKRGIDKATEAAVEKLREMSKPCSDKESITQVGSISANSDRAIGEIIAEAMEKVGRNGVITVEEGQGLDNELSVVEGMQFDRGYLSPYFITNQENGSVELDNPYILLVDKKVSSIRELLPVLEEVAKSSRSLLIIAEDIEGEALATLVVNNMRGIVRATAVKAPGFGDNRKAMMEDIAVLTAGTVISEEIGLELEKATLEQLGSAKKVTITKDTTTIVGGAAEASAIADRVASIEKQIETTTSQYDKDKLQQRVAKLSGGVAVIKIGAATEVEMKEKKDRVDDALHATRAAVEEGIVAGGGVALTKIAKELADLKGDNDDQNVGIRVALRAMEEPLRQIATNAGDEASVVANAVKAGDADYGYNAATGEYGSMIEMGILDPAKVTRSALQFAASVAGLMITTEAMITNHVEDKELDI

SEQ ID NO: 24434 - protein, 279 aa, Triticum aestivum
MEREMAASYEPKLNSEIRIFESSDEIVTDLAEYISQVSEISVKERGYFAIALSGGPLVSFLSKLCEAPYIKTLDWSKWYIFWSDERAVAKNHADSNYKLTKEGFLSKVPIMSGHVYSINDSATVEDAATDYEFVIRQLVKIRTIGVSESTDCPKFDLILLSMGSDGHVASLFPNHQALELKDDWVTYITDSPQPPPERITFTLPVINSASNIAILAMGVDKANAVHSAVSDSSDGLDAPAPLPARMVQPTDGKLVWFLDKAAASSLEALSDDAYQQQHL

SEQ ID NO: 24435 - protein, 96 aa, Vibrio sp. Ex25
MKIRPLNDKLIVERQEVENKSEGGIVLTSQSVKKSNRGKVIAVGLGKRLENGERAAMEVKVGDQIIFNDGYGVKTEKIDGAEYLILSESDVLAIVE

SEQ ID NO: 24436 - protein, 537 aa, Chlamydophila abortus S26/3
MSFKCIFLTGGVVSSLGKGLTAASLALLLERQGLKVAMLKLDPYLNVDPGTMNPYEHGEVYVTNDGIETDLDLGHYHRFSSVNLSRYSTATSGQIYARVIKKERDGLYLGSTVQVIPHITNEIIEVILECARENHPDVLIVEIGGTVGDIESLPFLEAIRQFRYEHAEDCFSIHMTYVPYLQAAGEVKTKPTQHSVQSLRSIGIIPDAILCRSEAPLSSEVKKKISLFCNVPSTAVFNVVDVEHSIYEMPLMLSQEKISTFITEKLGLFTKKEDLSDWEMLVERLRHPLPNKIRLGLVGKYVQHKDAYKSVFESITHAALSLNCSVELFPLDSDDPHFLETLELCDGCLVPGGFGSRGWEGKIIAAKLCRERGIPYFGICLGMQVLVVEYARHVLHLEHANSTEMDKDTPDPVICMLDWQASLIATGGTMRLGAYPCALSPGSKVYAMYGQPEIMERHRHRYEVNFNYIQQLKDHGLDIVGTCPEQGLCEIVEIKDHPWMIGVQFHPEFLSKLIKPHPLFVGFIEAALLHSRNKTYV

SEQ ID NO: 24437 - protein, 401 aa, Bacillus anthracis str. A2012
  misc_feature (375)..(375): Xaa can be any naturally occurring amino acid
  unsure (1)..(401): unsure at all Xaa locations
MGATGVASQRKTIEESIERNKEKYIETSHDIHANPEIGNQEFYASRTLSLLLGSAGFQLQHNIAGHETGFIARKSSGKQGPAIAFLAEYDALPGLGHACGHNLIGTISVAAAIALSETLEEIGGEVVVFGTPAEEGGPNGSAKSSYVKAGLFKNIDAALMIHPSGKTATTSPSLAVDPLDFHFYGKTAHAAASPEEGINALDAVIQLYNSINALRQQLPSDVKIHGVITEGGKAPNIIPDYAAARFFIRAATRKRCAEVTEKVKNIAQGAALATDTKVKIHQFQNEIDELLVTKTYNDVVAEELELLGEDVNRKERFGIGSTDAGNVSQVVPTIHPYIKIGPDDLIAHTNEFREAARSELGDKALITSAKALANXAYRLITEEGLLEKVKEEFREAQRNQG

SEQ ID NO: 24438 - protein, 238 aa, Methylococcus capsulatus str. Bath
MQESDSKGKDECEVEGICCDLERFISGVKGFKERFYRRYPEHMQQLVERGQRPVALMIACSDSRVDPALLMNVAPGDLFVVRNVANLVPPYHGSSAPDGVGAALEYAVRHLHVPHVIVLGHAQCGGIKALLDMATGAEFESDFIGEWVSMAMEACWQYVPDASGEGLRRVSLERLKDYSYLVERAAIQGSLGNLLTYPWVREAVEKERLFLQGWWFDLESGDLWVTSGDNSQFLPVTD

SEQ ID NO: 24439 - protein, 409 aa, Frankia sp. CcI3
MPRNLGRSREGSDEIPPMSPTVLPREAQVDEVKDLITRGKEIGFLTTEDVTVAIQAAELPPEQAETVLQVLNDEGIEVLEAGGESPDEADLLARRRREEEELALKAPTSDPVRMYLKEIGKVPLLTAEEEVDLAKRIEAGLFASEKLAVATKKTSPQMRRDLEAIERDGQIAKRKLVEANLRLVVSIAKRYVGRGMLFLDLIQEGNLGLIRAVEKFDYTKGYKFSTYATWWIRQAITRAIADQARTIRIPVHMVETINKLIRIQRQLLQDLGREPSPEEIAKEMDLTPDKVREILKVSQEPVSLETPIGEEEDSHLGDFIEDCDAVVPVDAASFILLQEQLDSVLHTLSDREKKVIQLRFGLTDGHPRTLEEVGREFGVTRERIRQIESKTLSKLRHPSRSQKLRDYLE

SEQ ID NO: 24440 - protein, 242 aa, Castanea mollissima
MVYPNQSMSLSPQRKIGRGKMEMKRIENTTNRQVTFCKRRNGLLKKAYELSVLCDAEVALIVFSTRGRLYEYANNSVKSTIERYKKACADSSNTGSVAEANTQFYQQESAKLRAQIGNLQNSKQANDGESLSNLTVKELKSLEIKLERGISRIRSKKNELLFAEIEYMQKREVELHNNNQLLRAKIAENERNQQNLNVMPAGGGSYELMQTQQYDSRNFFQVNALQPNHQYPREDQMSLQLV

SEQ ID NO: 24441 - protein, 396 aa, Staphylococcus epidermidis ATCC 12228
MTQSEKIINLTNHYGAHNYVPLPIVISEAEGVWVKDPEGNTYMDMLSAYSAVNQGHRHPRIIQALKDQADKVTLVSRAFHSDNLGQWHEKICKLAGKDKALPMNTGAEAVETALKAARRWAYDVKGIEPNKAEIIAFNGNFHGRTMAPVSLSSEAEYQRGYGPLLEGFRKVEFGDVNQLKAAINKNTAAILVEPIQGEAGINVPPEGYLKTIRELCDEHQILFIADEIQAGLGRSGKLFATDWDHVKPDVYILGKALGGGVFPISVVLADNEVLDVFTPGSHGSTFGGNPLASAVSIAAIDVIIDEDLPGRSLELGEYFKSELKKIEHPSIKEVRGRGLFIGIELHESARPYCEALKEQGLLCKETHDTVIRFAPPLVITKEELDMALEKIKSVFA

SEQ ID NO: 24442 - protein, 441 aa, Lactococcus lactis subsp. lactis
MNLMNKEEKMIKNSQIPSEFYKKYNVKKGLRDINGKGVLAGLTNISAIHSFDKEGNQIPGVLEYRAYNIKDIVSDLRSKNRFGFEEMTYLLLFGELPSAKELQEFQILLASKRTLPEFFVRETILTNPSSDVMNSMSRCLLALASYDKKASDISIENVLEQSLALIADFPLLAIYSYQAYIHYFKKESLYIHFPDPELTTAENILRMLRPDCHYSDMEAKVLDIALILHMEHGGGNNSTFTTHVVTSSGTDTYATIAAALSSLKGPKHGGANIKAAKMLENIKENISDYNNDEEIKKYLHQILNKEVFDKQGLIYGIGHAIYSVSDPRFEVFKSYVESLAKEKGLEEEFKLYEKVAFLAPKVISENRKIYKTICPNVDFYSGFVYKILEIPQELFTPLFAIARIVGWLAHRMEELINMNKIIRPAYESILESKAYTRLEER

SEQ ID NO: 24443 - protein, 414 aa, Staphylococcus epidermidis ATCC 12228
MTENNNLVTSTQGIIKEALHKLGFDDGMYDLIKEPIRFLQVRIPVRMDDGTVKTFTGYRAQHNDAVGPTKGGVRFHPEVDEEEVKALSMWMTLKCGIVNLPYGGGKGGIVCDPRQMSIHEVERLSRGYVRAISQFVGPNKDIPAPDVFTNSQIMAWMMDEYSALDKFNSPGFITGKPIVLGGSQGRDRSTALGVVIAIEQAAKRRGMDIKDAKIVIQGFGNAGSFLAKFLYDLGAKVVGISDAYGALHDPNGLDIDYLLDRRDSFGTVTNLFEDTISNKELFELDCDILVPAAISNQITEDNAHDIKASIVVEAANGPTTPEATRILTERDILLVPDVLASAGGVTVSYFEWVQNNQGYYWTEEEVNDKLREKLVTAFDTIYELSQNRKIDMRLAAYIVGIKRTAEAARYRGWA

SEQ ID NO: 24444 - protein, 242 aa, Castanea mollissima
MGRGRVQLKRIENKYRQVTYSKRRSGLLKKAHEISVLCDAEVALIVFSTKGKLFEYSSDSSMETILERYERYSFAERQLVATDSESQGGWCMEFPKLTARVEVLQRNIRNFMGEDLDPLSFRELQNLEQQIDAGLKRIRTRKNQLMHESVMELQKKEKSLQEQNSVLAKKLKENEKNIPEQAHQEQPSLGLLSLPQQPMPSTLSLPSLTIGGAFQERAVDEDAGVQTRPTLMPPWMLRHVNG

SEQ ID NO: 24445 - protein, 624 aa, Frankia sp. CcI3
MATPVSESTVGTADLETVRELAQQLRVDSVRSSTSAGSGHPTSSMSAADVLAVLVARHLRYDWDNPADPANDHLIFSKGHASPLIYSIFKAVGVVGDDELINGYRRFGERLQGHPTPVLPWVDVATGSLGQGLPDGVGVALAGKYLDKVPYRVWVICGDSEMAEGSVWEALDKASYYNLSNLIAIVDVNRLGQRGPTELGWDLDTYARRVESFGARAVVVDGHDIAAIDAVLADAEDVTRPTVILARTRKGEGFSETADVEGWHGKPFPADMADRAIAELGGLRDLRVRGPVPPADLPRPAPVERPVITLPTYDLGAKVATRRAYGQALAALGARTDVVALDAEVSNSTYSEDFAKIYPDRFFEIFIAEQQLVAAAVGLSVRGYVPFASTFAAFFSRAYDFIRMAAISQADIRLSGSHAGVEIGADGPSQMALEDIAMMRAVGGSTVLYPSDATSAAKLVEAMADLPGVSYLRTTRGAYPVLYGPDEPFAPGGSKVLRRSNADTVTLIGAGVTLHESLAAADTLVAEGIAARVIDLYSVKPVDAATLADAAQATGGRIVVTEDHYPEGGLASAVLEALSDGGVPLSVRHLAVRSLPGSGTSQELLDAAGISARHIVEAARDLLR

SEQ ID NO: 24446 - protein, 260 aa, Triticum aestivum
PEQRLMVETVLKSSNLLATLINDVLDLSKLEDRSLELEIRAFNLHAVFKEVMGFIRPIAAIKRLSMSVMLTPDLPLCAIGDEKRLMQTILNISGNAVKFTKEGHITLLASVLKPDSLREFRTPDFHPAASDDHFYLKVQLKDTGCGISPQDLPHVFTKFAQTQPGGNQGYSGSGLGLAICRRFVTLMGGHIWLDSEGAGRGCTATFIIRLGVSDNTDAYQQQLAPLAWPGSANVESAGPKALHEETWPPSSLKPRYQRSV

SEQ ID NO: 24447 - protein, 233 aa, Crocosphaera watsonii WH 8501
MKQPKVIFLDAVGTLFGVKGSVGEVYRYLAAEVGVECDASLLEKVFYQQFKKAPPLAFQGVDIMMVPDLEYQWWYRVAYDTYTEANVIDQFSDFDGFFRQLYDYFATPHPWFLYTDVFPALQHWQKQGITLGIISNFDSRIYEVLDIFGLTNFFQTITISSTTGKAKPDSHIFIKALEKHNCKPEETWHIGDSRKEDYDGAKSVGINPFLLERNEEVSRSDYTIIDSMERLTL

SEQ ID NO: 24448 - protein, 444 aa, Arabidopsis thaliana
MVRRQEEEKKAEKGMRLGKYELGRTLGEGNFGKVKFAKDTVSGHSFAVKIIDKSRIADLNFSLQIKREIRTLKMLKHPHIVRLHEVLASKTKINMVMELVTGGELFDRIVSNGKLTETDGRKMFQQLIDGISYCHSKGVFHRDLKLENVLLDAKGHIKITDFGLSALPQHFRDDGLLHTTCGSPNYVAPEVLANRGYDGAASDIWSCGVILYVILTGCLPFDDRNLAVLYQKICKGNPPIPRWLSPGARTMIKRMLDPNPVTRITVVGIKASEWFKLEYIPSIPDDDDEEEVDTDDDAFSIQELGSEEGKGSDSPTIINAFQLIGMSSFLDLSGFFEQENVSERRIRFTSNSSAKDLLEKIETAVTEMGFSVQKKHAKLRVKQEERNQKGQVGLSVTAEVFEIKPSLNVVELRKSYGDSCLYRQLYERLLKDVGTSSPEQEIVT

SEQ ID NO: 24449 - protein, 360 aa, Festuca arundinacea
MGSTAADMAASADEDACMFALQLASSSVLPMTLKNAIELGLLEILVAAGGKSLTPTEVAAKLPSAANPEAPDMVDRILRLLASYNVVTCLVEEGKDGRLSRSYGAAPVCKFLTPNEDGVSMAALALMNQDKVLMESWYYLKDAVLDGGIPFNKAYGMSAFEYHGTDPRFNRVFNEGMKNHSIIITKKLLELYHGFEGLGSLVDVGGGVGATVAAIAAHYPTIKGVNFDLPHVISEAPQFPGVTHVGGDMFKEVPSGDAILMKWILHDWSDQHCATLLKNCYDALPAHGKVVLVECILPVNPEANPSSQGVFHVDMIMLAHNPGGRERYEREFQALARGAGFTGVKSTYIYANAWAIEFTK

SEQ ID NO: 24450 - protein, 360 aa, Festuca arundinacea
MGSTAADMAASADEEACMFALQLASSSILPMTLKNAIELGLLEILVAAGGKSLTPTEVAAKLPSAANPEAPDMVDRMLRLLASYNVVTCLVEEGKDGRLSRSYGAAPVCKFLTPNEDGVSMAALALMNQDKVLMESWYYLKDAVLDGGIPFNKAYGMSAFEYHGTDPRFNRVFNEGMKNHSIIITKKLLELYHGFQGLGTLVDVGGGVGATVAAIAAHYPAIKGVNFDLPHVISEAPQFPGVTHVGGDMFKEVPSGDAILMKWILHDWSDQHCATLLKNCYDALPAHGKVVLVECILPVNPEAKPSSQGVFHVDMIMLAHNPGGRERYEREFEALARGAGFTGVKSTYIYANAWAIEFTK

SEQ ID NO: 24451 - protein, 258 aa, Bacillus cereus ATCC 14579
MGVEKIKAAFENGKKAFIPYVMGGDGGLEKLKERIRFLDEAGASIVEIGIPFSDPVADGPTIQRAGKRALDSGVTLKGIFQALAEVRKEVQMPFVLMTYLNPVLAFGKERFIENCIEAGVDGIIVPDLPYEEQNIIAPLLREVNIALIPLVTVTSPIERIEKITSESEGFVYAVTVAGVTGVRQNFKEEIHSYLEKVKSHVNLPVVAGFGISTKEHVEEMVTICDGVVVGSKVIELLENEKREEICELIYATKQKEEA

SEQ ID NO: 24452 - protein, 360 aa, Festuca arundinacea
MGSTAADMAASADEEACMFALQLASSSILPMTLKNAIELGLLEILVAAGGKSLTPTEVAAKLPSAANPEAPDMVDRMLRLLASYNVVSCLVEEGKDGRLSRSYGAAPVCKFLTPNEDGVSMAALALMNQDKVLMESWYYLKDAVLDGGIPFNKAYGMSAFEYHGTDPRFNRVFNEGMKNHSIIITKKLLELYHGFQGLGTLVDVGGGVGATVAAITAHYPAIKGVNFDLPHVISEAPPFPGVTHVGGDMFKEVPSGDAILMKWILHDWSDQHCATLLKNCYDALPAHGKVVLVECILPVNPEAKPSSQGVFHVDMIMLAHNPGGRERYEREFEALARGAGFTGVKSTYIYANAWAIEFTK

SEQ ID NO: 24453 - protein, 360 aa, Festuca arundinacea
MGSSAADVAASADEEACMYALQLGSSSILPMTLKNTIELGLLETLMAAGGKSLTPTEVAAKLPCAANPEAPDMVDRMLRLLASYNVVSCLVEEGTDGRLSRRYGAAPVCKFLTPNEDGVSMAALALMNQDKVLMESWYYLKDAVLDGGIPFNKAYGMSAFEYHGTDPRFNRVFNEAMKNNSIIITKKLLELYDGFQGIGTLVDVGGSVGATVAAITAHYPAIEGINFDLPHVISEAPPFPGVTHVGGDMFKKVPSGDAILMKWILHDWSDQHCATLLKNCYDALPAHGKVVLVECILPVHPEAKPSSQGVFHVDMIMLAHNPGGRERYEREFEALAKGAGFAGFKSTYIYANAWAIEFTK

SEQ ID NO: 24454 - protein, 544 aa, Haemophilus somnus 2336
MKFNDIKRLYKIVRVFLSYGIDEILPHNKYTRSIRCWRMLFFWLKNKHNNKAFGLRLRLALQELGPVWIKLGQMLSTRRDLFPAEIADELALLQDNVEAFSGKIARQQIEQALGSSLENWFTDFDENALASASIAQVHTAKLKLGEEQEKEVVIKVLRPNIQPQIEADLSWMYKLAGLLPKLFREGYRLRAVEVIQEYEKTLRDELDLRVEMANAIKLRENFLDSPMLYIPKMYEAFCHKNVIVMERIYGIPVSDVETLQRNGTDMKLLAERGVQVFFTQVFRDSFFHADMHPGNIFVNPLRPENPQYIGIDCGIVGKLNESDKRYLAESFVAFFNRDYRRVAQMHVDAGWTPQDTNIDDFEQAFREVCEPIFAKPLSEISFAQVLLNLFNVAREFNMQVQPQLVLLQKTLLYIEGLGRQLYPQLDLWDTAKPFLQNWLNEQIGMKATFKKLKAKLPYLQEHLPDFPETLMDALKQQKFISQQLVEINKKLAKQQRWQKKMFVLIVGIVIFSVTLWQFAALPLAISAGLFLVGFLVWLIGFLLP

SEQ ID NO: 24455 - protein, 247 aa, Capsicum annuum
MGRGRVQLRRIENKINRQVTFSKRRSGLLKKAHEISVLCDAEVGLIVFSSKGKLFEYSTDSCMERILERYERYSYAERQLNATDVETPGSWTLEHAKLKARLEVLQRNQRHYAGEDLDSLSMKELQNLEQQLDSALKHIRSRKNQLMHESISELQKKDKALQEQNNNLSKQMKEREKQLAQQHTPWEQQNHDHLNSSSFGLPHPFNNNHLGEVYPTAGDNGEVEGSSRQQQQNAAVMPPWMLRHLNG

SEQ ID NO: 24456 - protein, 109 aa, Streptococcus oralis
LLYALLHLSGFEDVSMEEVKNFRQWGSKTPGHPEFGHTAGIDATTGPLGQGISTATGFAQAERFLAAKYNREGFNIFDHYTYVICGDGDLMEGVSSEAASYAGLQKLDK

SEQ ID NO: 24457 - protein, 619 aa, Oryza sativa (japonica cultivar-group)
MGTSSGANFHQQQPPPPTSSAAAAAGAAAVAQGMLPPRRPTGLQTSLSLASSEQVGSPEMQEPGSNSDQGHDSATESASSRETWPAEPNHGSAAAVVAASTAASGGGGVVGGIGVGVRIVDKEKEVGNGIPKLQVIRGSSRLDRMSLREVARERVDLVAEKMKVMPEEHLEDMKNELRSILEGTGGSHHIEEFLYLQKFVQSRGDLTQTMLSMAHHVQLEILVAIKTGIQAFLHPSVTIPQNRLVEVFLYKRCRNIACQSALPAEECRCNVCSNRNGFCNLCMCVICNKFDFEVNTCRWIGCDFCSHWTHTDCAIRDGQIGMGQSIKSGTGHAEMLFRCQACQKTSELLGWVKDVFQQCAPGWDRDALLRELEFVCKIFRLSEDSKGRKLFRKCADLIERLRNSPADAINPRMILQVLQELELDSPKSTENEEIGRLITPQEACNRIAEVVHEAVKKMELVAEEKMRLYKKARIAVEACDRELDEKARELQELKAERLRKKQQVDELESIVRLKQAEAEMFQLKANEARQEADRLQSIALAKSERAEQDYASLYLKRRLEEAEAEKQFLFEKIKYQETQRPMQASGSGAGDSSQTPMLSKIHDLLKNVRSIPPKTEGHQ

SEQ ID NO: 24458 - protein, 231 aa, Photorhabdus luminescens subsp. laumondii TTO1
MLRKLAAELLGTFVLVFGGCGSVVFAAAFPELGIGFVGVSLAFGLTVLTMIYAVGHISGGHFNPAVTIGLWAGGRFRAVEVIPYIISQVIGGILAAAVLYVIASGQVGFDATTSGFASNGFGEHSPGGFSLQSAIVAEIVLTAIFLIVIIGATDRRAPPGFAPLAIGLALVLINLISIPITNTSVNPARSTAVAIFQNTWALEQLWFFWVMPIIGGIVGGGIYRLLFAEKQ

SEQ ID NO: 24459 - protein, 349 aa, Neurospora crassa
MTTSTSTPRITVLGSLNIDLVAYVSHHPLPGETMTANSVAVSPGGKGANQAVACAKLSRSHTSSSSSSSSFAEETAHITMLGTVGADSYGSLLKENLAKHGVDVSGVRVLDSPPGAKTGMAMIVVDEPTGQNRIILSPEANHFLQPEHVSEVAHLSSSSVGGAAQEKPDLLIMQLEIPVPTVLQALRTAKQNGVQVLLNPAPAVPLPDEAFDGLAHLVVNETEAAILSGLEESVLDTEEGLEKVGKVFLEKGVKTVIVTLGGRGVFFMTGGGEGGSKKGLIKAEKAKVVDTTAAGDTFVGMYALEVVIAAKKGEQFDIEGAVRKANKAAAKTVERPGAQDSIPWRDELL

SEQ ID NO: 24460 - protein, 510 aa, Thermoplasma volcanium GSS1
MPSATLKREIHILLKLYPVFRRYLKDRKRAKENDEWDYEIQRNGELAVKAFMDLGPTFIKLGQVLSARPDLMPKEYLAAFRKLQDQVDPDPFPLVKQIIERNLGKIDQVFDEFDENAISGASLGQVYRATYKGRLVVVKVNRFNIEDRLKSDLIAIRRLLKHAKGRIENFLYLSIENVIMDFNKRIFDEIDYRKEVSNMNLIRSNLHEDDRVIIPQVIEGLSSKEVLVMEYISGTKIDNVQILKEKNIDTKELALRVDTVFMRMLLKDTIFHADPHPGNISVADDGSIILYDFGMVGFINDDLRFKLLLLYDGLLNKDSDEIIDALLSLGALSPAANRGIVKRGIDMAIANFYGRTPEDLEIRELLDVANDVIFQFPFRLPRALVLYMRMSSLLEGVCQQLDPDFKFIRVLQKLLYDEGLIQTLYKKRLTNFLDDTLISLEKAVQLVPLLKRKLEYEEEPIKRKDYKIPASIFLGFLLLSFFQMEKIHPITSSILIAIDAILFIYIIIKK

SEQ ID NO: 24461 - protein, 562 aa, Oryza sativa
MVGRSSLPEGSLFLGFDSSTQSLKATVLNNELIIVASDIVNFDSDLPHYKTEGGVYRDPADDGHIFSPTIMWVEAFELLLEKLKPKINFSKVVAISGSGQQHGSVYWKKGSHAVLSSLDPTKSLLSQLKDAFSTMDSPIWMDSSTTKQCREIESVVGGALELSKLTGSRAYERFTGPQIRKIYRTVPQVYDDTERISLVSSFMASILVGNYASIDETDGAGMNLMDINQRTWSKTVLEATAPGLEEKLGKLAPAYAVAGRIAPYFVERLQFDKNCLVIQWSGDNPNSLAGLTLNTPGDLAISLGTSDTVFGITAEAKPSLEGHVFPNPVEPDGYMVMLCYKNGSLTREDVRNSCAEKSWDVFNSYLEKTPPLNGGKLGFYYKDHEILPPLPVGFHRYIVENLNDVTSNNLVEREVEEFDPPSEVRAIIEGQLLSMRGHAERFGMPNPPKRIIATGGASSNERILHSIAQIFGCPVFTVQRPDSASLGAALRAAHGWLCNEEGSFVPISCMYQGNLEKTSLGAKLAVSTGEGVEDKELLEKYTVLMRKRMEIERRLVEKIGRA

SEQ ID NO: 24462 - protein, 483 aa, Saccharomyces cerevisiae
MLSATKQTFRSLQIRTMSTNTKHYDYLVIGGGSGGVASARRAASYGAKTLLVEAKALGGTCVNVGCVPKKVMWYASDLATRVSHANEYGLYQNLPLDKEHLTFNWPEFKQKRDAYVHRLNGIYQKNLEKEKVDVVFGWARFNKDGNVEVQKRDNTTEVYSANHILVATGGKAIFPENIPGFELGTDSDGFFRLEEQPKKVVVVGAGYIGIELAGVFHGLGSETHLVIRGETVLRKFDECIQNTITDHYVKEGINVHKLSKIVKVEKNVETDKLKIHMNDSKSIDDVDELIWTIGRKSHLGMGSENVGIKLNSHDQIIADEYQNTNVPNIYSLGDVVGKVELTPVAIAAGRKLSNRLFGPEKFRNDKLDYENVPSVIFSHPEAGSIGISEKEAIEKYGKENIKVYNSKFTAMYYAMLSEKSPTRYKIVCAGPNEKVVGLHIVGDSSAEILQGFGVAIKMGATKADFDNCVAIHPTSAEELVTMR

SEQ ID NO: 24463 - protein, 465 aa, Chlamydomonas reinhardtii
MGSCLAKPAESAEQKKASSVPSPPPAPAPQPVQQAAAPAPKDSGDVKPGQQATPVPPPSPPPQPKPAPPAQPAPAPAAKVVEAIPAVADEKSPQGKQPRRSQEHDNGVKAEEIELVKQKSTEPQPSASATAAVATPKAIEPAMEPKVAAPSAPAAAPAPAQAPAAAPTPARPGSKLRTDVKLRDLYKLGKTLGTGGFSVVKLATDRGTGVEYACKIMALPPVGQEVGENENTREDIFKEIDLLCGMNHENVIFLKEYFEEGNKVYLITELLTGGELLEAVLKRGSYTEAEARLCFVQVLRGIEYLHSKNVVHRDLKLENLLLAKQDDISLVKIADFGLAKHAVNGMQTICGTPQYVAPEVIVGAKGHVYGPGVDMWSAGVVLYILLGGYPPFWSDSEPQLFDMIRKGKYSFGDPVWNKVSEGAKDLIRKLLVVDPTKRLSATEALQHQFILEGNFNPPSTPKGPR

SEQ ID NO: 24464 - protein, 226 aa, Rickettsia rickettsii
MHTYKAHILIVDDDSRILALLKQFLNKNAFLVSTASSVIEAKNLLKTSNYDLIILDVMLPEITGLDFATTIRDAGNNIPIVMLTALSEADDRVKGLEAGASDYITKPFEPRELLLRINNLINNYNNFKKETNIIKFGNNFYNSDTKEFTKNNQIVSLSSTEQKLLEILIKNSGKSTSRFELSKIMGGLSMRSIDVQITRIRSKIEDNPKEPKYLKTVRNEGYALYI

SEQ ID NO: 24465 - protein, 175 aa, Crocus sativus
MGKSSPTVSAEYLKAVEKCKRKLRGFIAEKNCAPLMLRIAWHSAGTFDCKSKTGGPFGTMRHKAELAHGANNGLDIAVRLLEPIKEQFPIISYADFYQLAGVVAVEITGGPDVPFHPGREDKPEPPVEGRLPDATKGCDHLRTVFGEQMGLSDKDIVALSGGHTLGRCHKDRSGF

SEQ ID NO: 24466 - protein, 798 aa, Arabidopsis thaliana
MVDHHHHHHHQHRPNRLSVPQPTIGRTYPSFPYTPTPTPSKTRLSSSSSYRSIHGSKSSLSFLFLILFSLRSLYSLLPFLRSSPSFSLFPFSFLVSLLSFLFSLSFTIISSFSPSKKDPFLLRLQNRSFSSISSLSSSQIKLLLAKSFLLAFVFLLRFQALRYCGAAAMILAELSGTVSARVLFSDTGGIGVRSSKVRGFCVLFAGLLLLSISWDRVDCFPFSSSVESWGFWIYPKENCLRIWPLLLPFLSGFLGCYEKVSVNWNEIKQLDQKRVRLLSLFLTTVLLFPLAIWSFFFSGSGDDSVSFGNLGWPLANTVVFGVLLSENYNDDKFSSSKKKDSEREFLVTFLCTIVLELFYFPELSLWGLLLCGLLLYIAVRELESVYSDYQEIGMESPESFSTMFMKPIRHILSEKKSRKIALFLLINTAYMVVEFVAGFMSNSLGLISDACHMLFDCAALAIGLYASYISRLPANHQYNYGRGRFEVLSGYVNAVFLVLVGALIVLESIERILDPQEISTNSLLVVSVGGLLVNIVGLIFFHEEHHHAHGGSGCTHSHSHQSHSHKNEEHHQHSDSHKHEEHHQHSDSHKHEEHHEHDHHHHSHSHKHEECNHNHDHEHQSHSHNHEECNHNHDHHSDHQPEKSEKKEHRHIDHNMEGIFLHVLADTMGSVGVVISTLLIKYKGWLVADPASSIFISILIIASVIPLLRNSAEILLQRVPRAHRQDLKEAMRNILKTKGVCSIQRLHVWSFTNSDVVATLHLLVSADSDKTDTKLQVSRLLEDAGVKDWTLQVESVNS

SEQ ID NO: 24467 - protein, 501 aa, Gloeobacter violaceus PCC 7421
MQSSDPAIRFRAMSAVQPQLEALIDQLDTIRSHAESLKQQFAEHLQHVHPNFADSAHNLIDYLALRQFDLREIQEQLSGLGLSSLGRTEAHTMASLNAVVQVLERLAGSGGEVVSFADDYARGRDLLTAHTEVLLGPRPATRATRIMVTLPSEAEGDYRLLCALIRAGMNCARINCVHDSETVWERMVGNIRRAEREVGRACRILMDLGGPKLRTGPLAEPLTLRKGEGLVLCRDAEEGRSACEDSPARVVCAVSGIYGGVQVGEAVLFDDGKIESVVRGVAQDEIQLEITRADDKGSRLAADKGINFPESRLKLRGLSEQDLEHLDFVARRADIVGMSFANEPEDVFALQAALGERGAGHLGILLKIETRRGFEQLPRLILAAMRSYPAGVMIARGDLAVECGWERTAEVQEEILWLCEAGHMPVVWATQVLEKLAKKGLPSRAEITDAAMSQRAECVMLNKGPHIVEAVHSLADILCRMQEHQHKKTATLRSLKVSNLV

SEQ ID NO: 24468 - protein, 492 aa, Arabidopsis thaliana
MSDLQANKDAAAVDRQSSSSLADLDGPSPLRKMISVASIAAGIQFGWALQLSLLTPYVQLLGVPHKWSSFIWLCGPVSGLLVQPSVGYFSDRCTSRFGRRRPFIATGALLVAVAVVLIGYAADFGHSMGDKIDEPVKMRAVVIFALGFWILDVANNTLQGPCRAFLGDLAAGDAKKTRTANAFFSFFMAVGNVLGYAAGSYTNLYKIFPFTMTKACDIYCANLKSCFFLSITLLLVVTIIALWYVEDKQWSPKADSDNEKTPFFGEIFGAFKVMKRPMWMLLIVTALNWIAWFPFLLYDTDWMGREVYGGDSKGDDKMKKLYNQGIHVGALGLMLNSIVLGVMSLGIEGISRKMGGAKRLWGAVNIILAVCLAMTVLVTKKAEEHRRIAGPMALPTDGIRAGALTLFALLGIPLAITFSIPFALASIISSSSGAGQGLSLGVLNMAIVIPQMIVSFGVGPIDALFGGGNLPGFVVGAIAAAISSVVAFTVLP

SEQ ID NO: 24469 - protein, 917 aa, Pseudomonas fluorescens
MLKKLGIKGRVLLLTLLPTSLMALVLGGYFTWMQQSDLHAQLLQRGEMIAEQLAPLVAPAMSRQDTDLLERIATQSLEQADVRAVTLLAPDRTPLAHAGPTMLNRAPEGNSAQLQQRTGNDATRYLLPVFGKHRNLAGELIPEEADRLLGWVELELSHSGMLLSGYRSMFASLLLIAVCLGLTALLALRMGRTINRPLSQIKHAVAQLKDGHLETRLPPLGSQELDELASGINRMAGTLQNAQEELQHSIDQATEDVRQNLETIEIQNIELDLARKEALEASRIKSEFLANMSHEIRTPLNGILGFTHLLQKSELTPRQLDYLGTIEKSADSLLGIINEILDFSKIEAGKLVLDNIPFNLRDLLQDTLTILAPAAHAKQLELVSLVYRDTPLSLVGDPLRLKQILTNLVSNAIKFTREGTIVARAMLEDEHEDSVQLRISIQDTGIGLSNQDVRALFQAFSQADNSLSRQPGGTGLGLVISKRLVEQMGGEIGVDSTPGEGSEFWISLRLPKTRDDAEDLPGPPLLGRRVAVLENHELARQALQHQLEDCGLQVTPFNTLESLTNGITVAHQTDQAIDLAVLGITSNDMPPERLNQHIWDLEHLGCKVLVLCPTTEQTLYHLSVPNPHSQLQAKPACTRKLRRSLSDLVNPRPTRSEPHEPVASRAPKVLCVDDNPANLLLVQTLLEDMGAKVLAVESGYAAVKAVQKETFDLVLMDVQMPGMDGRQNTEAIRQWESERHCTPLPIVALTAHAMANEKRALLQSGMDDYLTKPISERQLAQVVLKWTGLALRNQSPDRGGDAQGNGSELLVLDHEEGLRLAAGKADLAADMLAMLLASLEADREAIRQASEANDHNALIERVHRLHGATRYCGVPQLRAACQRSETLLKQQDPKAAAALEELERAINRLASEARISA

SEQ ID NO: 24470 - protein, 332 aa, Buchnera aphidicola (Acyrthosiphon pisum)
MTIKVGINGFGRIGRVLFRLAQKRSDIEIIAINDLLAPEYIAYMLKYDSTHGVFKKHITFDKDNIIINGKNIRVTSIKDPEKLMWHDLSIDVVIESTGLFLKREQAYKHILAGSKKVVVTGPSKDDIPMFVRGANFHKYQGESIVSNASCTTNCLAPLSKVIDDNFGIIEGLMTTVHASTATQKIVDGASDKDWRGGRGALQNIIPSSTGAAIAVGKVLPNLNGKLTGMAFRVPVSNVSVVDLTVRYKKSATYSEICQKIQQASQKEMKGIMGYTEDEVVSTDFNGEELTSIFDAKAGLSLNKNFVKLIAWYDNETGYSSKVLDLVSLVSKK

SEQ ID NO: 24471 - protein, 264 aa, Solanum tuberosum
MCGGAIISDYEPAGNFYRKLSARDLWAELDPISDYWSSSSSSSTVENPYSAQSPVTHSVDKPKKSDSGKSNQLKKGNKTVKVEKEKSTGPRQRKNKYRGIRQRPWGKWAAEIRDPQKGVRVWLGTFNTAEDAARAYDEAAKRIRGNKAKLNFPAPSPPAKRQCTSTVAADPPPALLLESSNIISYNNSPLMNFGYDVQSQTPYYPMEMPVASDDYELKEQISNLESFLELEPADSSDQFSGIVDPDPLNVFLMEDFASTQHQFY

SEQ ID NO: 24472 - protein, 401 aa, Bacillus cereus E33L
MGATGVASQRKTIEESIERNKEKYIETSHDIHANPEIGNQEFYASRTLSLLLGSAGFQLQHNIAGHETGFIARKSSGKQGPAIAFLAEYDALPGLGHACGHNLIGTISVAAAIALSETLEEIGGEVVVFGTPAEEGGPNGSAKSSYVKAGLFKNIDAALMIHPSGKTATTSPSLAVDPLDFHFYGKTAHAAASPEEGINALDAVIQLYNSINALRQQLPSDVRIHGVITEGGKAPNIIPDYAAARFFIRAATRQRCAEVTEKVKNIAQGAALATGTKVKIHQFQNEIDELLVTKTYNDVVAEELELLGEDVNRKERFGIGSTDAGNVSQVVPTIHPYIKIGPDDLIAHTNEFREAARSELGDKALITSAKALANTAYRLITEEGLLEKVKEEFREAQRNQG

SEQ ID NO: 24473 - protein, 380 aa, Arabidopsis thaliana
  misc_feature (159)..(159): Xaa can be any naturally occurring amino acid
  misc_feature (242)..(242): Xaa can be any naturally occurring amino acid
  misc_feature (277)..(277): Xaa can be any naturally occurring amino acid
  misc_feature (312)..(312): Xaa can be any naturally occurring amino acid
  misc_feature (343)..(343): Xaa can be any naturally occurring amino acid
  unsure (1)..(380): unsure at all Xaa locations
SRESPAEHGYYMPAEWDSHAQTWIGWPERQDNWRHNALPPQRVFADLAKAISKFEPVTVCSSPAQWENARKQLPEDIRLVHMSMNHSWFRDSGPTFIVRKTPVNLSSLNRNIPPIHSNFNAWGPPNHPSYNHCSHHLLLSPNILPFQQIPTFQHSIILXTTTIHLHSQPTCLLTKECLFNKNPNPHITKQQIQQQLNNYLAVQSFISLPPALYPHQHTNGHIDNMCSFPTPPLLLFSSTNHXTHPQYQKSLKTLSFFSNSIHAPPTNIEVIKVYMGXGVYMSEEEWCGMSEDGEGIGRVGGRRVGGWYFNLXMGNGGIMGGELGDGIGDKEGIGVVWDRFGDXWVVGMENGREMVVGGGNIHCITQQQAAEPTSVAENGY

SEQ ID NO: 24474 - protein, 426 aa, Prunus avium
MAGICCGVVGEAEASTTIEASSRNSRRRRLELLPLKYIADMAVKPSTVENSRKRQKIDLYRSSSSVPHNAVESSSEAKSKSESEGSKLNATVRFGDDDFDAVNTRGDHQESKSVRVDNEAVQVQALQGSPRFGMTSVCGRRRDMEDAVSIHPSFYQNDGPDSNGAHFYGVFDGHGCSHVALKCKDRLHEIVKQELETEGGYIQWKGAMERSFAKMDDEVQEGNLVAQGPNCRCELQTPQCDAVGSTAVVAVVTPEKIIVSNCGDSRAVLCRNGVAVPLSSDHKPDRPDELVRIEAAGGRVIYWDGARVLGVLAMSRAIGDNYLKPYVISEPEVTIMDRSAEDECLILASDGLWDVVSNDTACGVVRMCLRAQKTTSHSESSGRDAAVRSDKACSDASILLTKLALARQSSDNVSVVVVDLRRPGRC

SEQ ID NO: 24475 - protein, 262 aa, Arabidopsis thaliana
MEVREKKDEKMEMTRRKSSALDHHRLPPYTYSQTANKEKPTTKRNGSDPDPDPDLDTNPISISHAPRSYARPQTTSPGKARYRECQKNHAASSGGHVVDGCGEFMSSGEEGTVESLLCAACDCHRSFHRKEIDGLFVVNFNSFGHSQRPLGSRHVSPIMMSFGGGGGCAAESSTEDLNKFHQSFSGYGVDQFHHYQPKKRFRTKFNEEQKEKMMEFAEKIGWRMTKLEDDEVNRFCREIKVKRQVFKVWMHNNKQAAKKKDL

SEQ ID NO: 24476 - protein, 480 aa, Haloarcula marismortui ATCC 43049
MLTGSEMGVVDENAAALGVPRKQLMESSGHAVARAVRTLADPGDQVTIVAGRGNNGGDALVTARFLDEYDLRVLLLGRPDAISTTIARENWDALQHAEYPTEPVKDSSAFDLGSPDIVVDAMLGTGIAGALREPEATAATAMNESDATVLSVDVPSGLDAETGRLAENAVDADHVVTFHDTKPGLPDLDVPVTVADIGIPDTAELFIERGDLTRLERDPASHKGDNGEVLVVGGGPYTGAPALTAQAALRSGADLVRVACPAVVAREIQSYSENLIMRPFDGDHLAPHHVDRLAELAADHDTLIVGPGLGNADATLDAVADLLSGFAGTAVVDADALSVVPDIETDADLVCTPHQGELLGMGGETAEDWRERADLVESFAAEVGQTLLVKGPYDIVSNGERTRVGRTGNPGMTVGGTGDVLAGVTGALASVQDPLDAAAIAAYTVGSVGDRVVDDRGYGLVATDLLDEIPSVLWQRDAEP

SEQ ID NO: 24477 - protein, 323 aa, SYNECHOCOCCUS SP. WH 8102
MAIPPALVIAARQGWQWQWQRLMGGLGPADAEGNYQRPSSDHLSASVPSFVLATLPEQRRPLLILGRSCPWAHRTWLVHQLRRLGSSITPLIARADHRAGRWQLDPPWQGCHTLLELYRRCGAPPSYRATVPVLVDPSGPRILGNESAQLVELFNEWPAPDGAPDLAAAHQRGEIDRWQSLLQPAVNDGVYRCGFARTQGAYDRAETDLFNALQQVEQALQDGRSWLCGDELSLADVRLFPTLIRWEVVYAPLFGCSRRPLWQFPNLWLWRQRLHALPGVDDTCDAKAWRQDYFGALFPLNPGGIIPAGPDLSTLVHAGIPRP

SEQ ID NO: 24478 - protein, 359 aa, Vitis vinifera
MSPPLLGVGEEEGQSNVTILASSASMESVCQISSGLKERNYMGLSECSSVDSSAISTDSDGNKSSLNLKATELRLGLPGFLSPGREPELCLLSSTKLDEKPLFPLHPSKDLTYTSSQKTVVSGNKRGFADAMNGFSEGKFLANSEVNVMLSPRPSPNKENLGSQPAKMKEMASPKIVQERPRATNETPPNHTGTGNNNSSAPATKAQVVGWPPIRSFRKNTLATTSKNTEVDGKAGPGALFVKVSMDGAPYLRKVDLRNYSAYQELSSALEKMFSCFTIGQYGSHGAPGREMLSESKLKDLLHGSEYVLTYEDKDGDWMLVGDVPWQMFIETCKRLRIMKSCDAIGLAPRAVEKCKNRN

SEQ ID NO: 24479 - protein, 396 aa, Methylobacillus flagellatus KT
MRKLWLIFAQTVTISLAALFVAQLFYPQLLPFGDKSGTSIKEAPAYNPINEVSPNHDGSQAPPGSYRRAAQAAIPSVVNIFTSKKTRQSIGNPFLDDPLFRHFFGDQWNEYPSQRENSLGSGVIVNSQGLILTNHHVIDGADEIEVALPDGRTFPARIVGTDPETDLAVLKINVRNLPAITFAQSNNISVGDVVLAIGNPFGVGQTVTQGIISALGRSHLGINTFENFIQTDAPINPGNSGGALIDTEGNLVGINSAIYSRSGGSMGIGFAIPVSLAKQVMEQIIRQGSVIRGWIGIEAQDITPELAESFRLKQARGSLVAGVVRGSPADKAGLRPGDILLEIDGREVTDSSTMLNVISNLKPEKKVLVKIARNQTELVLPIVIGKRPTPQIASGR

SEQ ID NO: 24480 - protein, 97 aa, Glycine max
DDPLFKLVSKLYEVVPPMRIELGKVKNPWPNVDAHSGVVLNHFGLTEAKYFTVLFGVARSIGVGPQLILDRILGLPLERPKSVTMAWLEEYCKNAAK

SEQ ID NO: 24481 - protein, 220 aa, Escherichia coli
MSQNTLKVHDLNEDAEFDENGVEVFDEKALVEEEPSDNDLAEEELLSQGATQRVLDATQLYLGEIGYSPLLTAEEEVYFARRALRGDVASRRRMIESNLRLVVKIARRYGNRGLALLDLIEEGNLGLIRAVEKFDPERGFRFSTYATWWIRQTIERAIMNQTRTIRLPIHIVKELNVYLRTARELSHKLDHEPSAEEIAEQLDKPVDDVSRMLRLNERIT

SEQ ID NO: 24482 - protein, 477 aa, Bacillus cereus ATCC 10987
  misc_feature (14)..(14): Xaa can be any naturally occurring amino acid
  misc_feature (96)..(96): Xaa can be any naturally occurring amino acid
  unsure (1)..(477): unsure at all Xaa locations
MKIVLRKESNIPYXQQIYMQIVERVQSGMLSHGDSLPSLRSMAEDLQISLLTVRKAYKQLEKKEYIRIEQGKGAYIQKHVKQNFKTIPYKWQQTKXINVMRSQYAMNQHRKYYDFSQAILYPRLLPNPFLADEMHKILNKDQMILATYGPVQGDYELRVEIANHLNEHQKLLTDPSQLLITSGAQQGIDLIAQTLIKPGDIVLVESPCYSAALDIFINKGARIIPVSLDNYGIRSDLIDDICQSKNPVLLYTNPTFQNPTGTVMSKERRMELIELAELYEFFIIEDDSFGEIYFEGVTVPPPIKNFDTNGHVIYIKGFSKTLAPGLRIASLIADGPIFEWLYAVKGSMDIGSPLLTQKALLPFLRAERMKNHLEKLRTALQIRRDITIDMLSPLKEMHFEIPNGGFNLWITLPDSIDPFTLLQKVNEVDVSFLPGTACLLNPETNNNHLRISYSMLNEKDMIIGLERLHDIMRKFML

SEQ ID NO: 24483 - protein, 109 aa, Streptococcus oralis
LLYALLHLSGFEDVSMEEVKNFRQWGSKTPGHPEFGHTAGVDATTGPLGQGISTATGFAQAERFLAAKYNREGFNIFDHYTYVICGDGDLMEGVSSEAASYAGLQKLDK

SEQ ID NO: 24484 - protein, 225 aa, Glycine max
MATMEDMNNMSGEITLPGFRFHPTEEELLDFYLKNMVVGKKLRYDVIGFLNIYQHDPWDLPGLAKVGEREWYFFVPRDKKHGSGGRPNRTTEKGFWKATGSDRKIVTLSDPKRIIGLRKTLVFYQGRAPRGCKTDWVMNEYRLPDNCKLPKEIVLCKIYRKATSLKVLEQRAALEEEREMKQMVGSPASPSSTDTMSFSSPQEEQNMPLPLLQHVLKKESETEDM

SEQ ID NO: 24485 - protein, 368 aa, Staphylococcus aureus subsp. aureus MRSA252
MSDNTVKIKKQTIDPTLTLEDVKKQLIEKGKKEGHLSHEEIAEKLQNFDIDSDQMDDFFDQLNDNDISLVNEKDSSDTDEKLNPSDLSAPPGVKINDPVRMYLKEIGRVNLLSAQEEIELAKRIEQGDEVAKSRLAEANLRLVVSIAKRYVGRGMLFLDLIQEGNMGLIKAVEKFDFNKGFKFSTYATWWIRQAITRAIADQARTIRIPVHMVETINKLIRVQRQLLQDLGRDPAPEEIGEEMDLPAEKVREILKIAQEPVSLETPIGEEDDSHLGDFIEDQEAQSPSDHAAYELLKEQLEDVLDTLTDREENVLRLRFGLDDGRTRTLEEVGKVFGVTRERIRQIEAKALRKLRHPSRSKRLKDFMD

SEQ ID NO: 24486 - protein, 499 aa, Arabidopsis thaliana
MATRLLRTNFIRRSYRLPAFSPVGPPTVTASTAVVPEILSFGQQAPEPPLHHPKPTEQSHDGLDLSDQARLFSSIPTSDLLRSTAVLHAAAIGPMVDLGTWVMSSKLMDASVTRGMVLGLVKSTFYDHFCAGEDADAAAERVRSVYEATGLKGMLVYGVEHADDAVSCDDNMQQFIRTIEAAKSLPTSHFSSVVVKITAICPISLLKRVSDLLRWEYKSPNFKLSWKLKSFPVFSESSPLYHTNSEPEPLTAEEERELEAAHGRIQEICRKCQESNVPLLIDAEDTILQPAIDYMAYSSAIMFNADKDRPIVYNTIQAYLRDAGERLHLAVQNAEKENVPMGFKLVRGAYMSSERSLADSLGCKSPVHDTIQDTHSCYNDCMTFLMEKASNGSGFGVVLATHNADSGRLASRKASDLGIDKQNGKIEFAQLYGMSDALSFGLKRAGFNVSKYMPFGPVATAIPYLLRRAYENRGMMATGAHDRQLMRMELKRRLIAGIA

SEQ ID NO: 24487 - protein, 345 aa, Candida albicans SC5314
MGQLLSHPIEEKELDYKSYTNLTYCIGSMQGYRMTMEDAHDVKINEHENLAVFGIFDGHGGKNCSQYLAEHLPKLVFTKLNKIASAVYLKQVKDIDLKDVFDILKNSFFKIDKDLSHHANMVNCGSTATVVTIIANYIVVANTGDSRCIVSRNGHAKPLSFDHKPSNMGERVRIENSNGYILNNRINEVLALSRAFGDFKFKLPYLSSSRNKYIKENQKLLGDKLITLPPELFQVTVEPDIMLYDMQKLDSPEFLVIACDGVWDCFKNGQLVKLIRDKLSLGWRLNKIVEYILNDSLTMANNYTGIGFDNMTLIIVAIHKKEGETMDDWYESMKEKILKEKGITR

SEQ ID NO: 24488 - protein, 492 aa, Zea mays
MDPYKHRPSSGSNSSFWTTNSGAPVWNNNSALTVGQRGPILLEDYHLIEKLAQFDRERIPERVVHARGASAKGFFEVTHDVSHLTCADFLRAPGVQTPVIVRFSTVVHERGSPETLRDPRGFAVKFYTREGNFDLVGNNMPVFFIRDGMKFPDMVHAFKPNPKTNLQENWRIVDFFSHHPESLHMFTFLFDDVGIPLNYRHMEGFGVNTYSLINRDGKPHLVKFHWKPTCGVKCLLDNEAVTVGGTCHSHATKDLYDSIAAGNYPEWKLYIQTIDLDHEDKFDFDPLDVTKTWPEDIIPLQPVGRMVLNKNVDNFFAENEQIAFCPAISVPGIHYSDDKLLQTRIFSYADTQRHRLGPNYLMLPVNAPKCAHHNNHHDGFMNFMHRDEEVNYFPSRFDPARHAEKVPIPPRVLTGCREKCIIQKENNFKQAGERYRSFDPARQDRFIQRWVDALTDPRVTHEHRTIWISYWSQCDAALGQKLPSRLNLKPSM

SEQ ID NO: 24489 - protein, 64 aa, Magnaporthe grisea 70-15
MTKCIYCGFCQESCPVDAIVESPNAEYATETREELLYNKEKLLSNGDKWEPELAATIRADSPYR

SEQ ID NO: 24490 - protein, 463 aa, Staphylococcus aureus subsp. aureus MRSA252
MAKDMDTIVSLAKHRGFVFPGSDIYGGLSNTWDYGPLGVELKNNVKKAWWQKFITQSPFNVGIDAAILMNPKVWEASGHLNNFNDPMIDNKDSKIRYRADKLIEDYMQDVKGDENFIADGLSFEQMKKIIDDEGIVCPVSKTANWTEIRQFNLMFKTFQGVTEDSTNEIFLRPETAQGIFVNYKNVQRSMRKKLPFGIGQIGKSFRNEITPGNFIFRTREFEQMELEFFCKPGEEIEWQNYWKTFASDWLTSLNMSSENMRLRDHDEDELSHYSNATTDIEYKFPFGWGELWGIASRTDFDLRKHAEHSGEDFRYHDPETNEKYIPYCIEPSLGADRVTLAFLCDAYDEEGVEGSKDARTVLHFHPALAPYKAAILPLSKKLSGEAIKIFEQLSSKFSIDFDESQSIGKRYRRQDEIGTPYCVTFDFDSLEDNQVTVRDRDSMEQVRMPISELEAFLTEKTKF

SEQ ID NO: 24491 - protein, 113 aa, Streptococcus oralis
TYVFTHDSIAVGEDGPTHEPVEHLAGLRAMPNLNVFRPADARETQAAWYLAVTSEKTPTALVLTRQNLTVEEGTDFDKVAKGAYVVYENAADFDTILIATGSEVNLAVAAAKE

SEQ ID NO: 24492 - protein, 478 aa, Candida albicans SC5314
MVQGKVLVVSNRIPVTIKRLDNGSYDYSMSSGGLVTALQGLKKTTEFQWYGWPGLEIPEDEQTKVNDELKSKFNCTAIFLSDTIADLHYNGFSNSILWPLFHYHPGEMNFDENAWAAYIEANKKFALEIVKQVNDDDMIWVHDYHLMLLPEMLRQEIGNKKKNIKIGFFLHTPFPSSEIYRILPVRKEILEGVLSCDLIGFHTYDYARHFISSVSRIVPNVSTLPNGIKYQGRSISIGAFPIGIDVDNFIDGLKKDSVVERIKQLKSKFKDVKVIVGVDRLDYIKGVPQKLHAFEVFLNENPEWIGKVVLVQVAVPSRGDVEEYQSLRSTVSELVGRINGEFGTVEFVPIHYLHKSIPFDELISLYNISDVCLVSSTRDGMNLVSYEYIACQQDRKGVLILSEFAGAAQSLNGALIVNPWNTEDLSEAIKESLTLPEEKREFNFKKLFTYISKYTSGFWGESFVKELYKCNPQKSLRD

SEQ ID NO: 24493 - protein, 491 aa, Zea mays
MDPYKHRPSSAFNAPYWTTNSGAPVWNNDSSLTVGARGPILLEDYHCEKLANFDRERIPERVVHARGASAKGFFEVTHDITHLTCADFLRAPGVQTPVIVRFSTVIHERGSPETLRDPRGFAVKFYTREGNWDLVGNNFPVFFIRDGIKFPDMVHALKPNPRTHIQDNWRILDFFSHHPESLHMFSFLFDDVGIPADYRHMDGSGVHTYTLVSRAGTVTYVKFHWRPTCGVRSLMDDEAVRCGANHSHATKDLTDAIAAGNFPEWTLYIQTMDPEMEDRLDDLDPLDVTKTWPEDTFPLQPVGRLVLNRNIDNFFAENEQLAFCPGLIVPGIYYSDDKLLQTRIFSYSDTQRHRLGPNYLLLPANAPKCAHHNNHYDGSMNFMHRHEEVDYFPSRYDAVRNAPRYPIPTAHIAGRREKTVISKENNFKQPGERYRAMDPARQERFITRWVDALSDPRLTHEIRTIWLSNWSQADRSLGQKLASRLSAKPSM

SEQ ID NO: 24494 - protein, 109 aa, Streptococcus oralis
LLYALLHLSGFEDVSMDEVKNFRQWGSKTPGHPEFGHTAGVDATTGPLGQGISTATGFAQAERFLAAKYNREGFNIFDHYTYVICGDGDLMEGVSSEAASYAGLQKLDK

SEQ ID NO: 24495 - protein, 336 aa, Schizosaccharomyces pombe
MSATSINPNNWHWTSKDCRVWSHEYFNKELPKIQASEGPTSARITQVNSCEGDVDVSMRKRKVITIFDLKIQMEFKGETKDGVEATGSITCPELSYDLGYSDYVFDIDIYSASKEKEPIKELVREKIIPQIRQLFSGFSQVLLQTHGDDVYLSTEEHNGNAARGLPVHSSFKQNNSSQTSSNKGTTTVAAGSGSDGSRVSAVVNTADISENYTFDAPANELYATFLDPARVAAWSRAPPQLDVRPQGAFSLFHGNVVGKFLVLEENKKIVQTWRLSSWPTGHYAEITFTFDQADSYTTLRMIMKGVPIGEEEVVQGNIQDYYIRPIKTVFGFGAVL

SEQ ID NO: 24496 - protein, 495 aa, Zea mays
MTMDPTKFRPSSSHDTTVTTTNAGAPVWNDNEALTVGPRGPILLEDYHLIEKVAHFDRERIPERVVHARGASAKGFFESTHDVTSLTCADFLRAPGVRTPVIVRFSQVIPEPGSGRTIRDARGFAVKFYTREGNWDLLGNNFPVFFIRDGIKFPDVIHAFKPNPRSHVQEYWRVFDFLSHLPESLHTFFFLFDDVGVPSDYRHMEGFGVNTYTFVSAAGKAQYVKFHWKPTCGERCILTDEEARVGGRNHSHTQDLYDSIAAEGSFPEWTLYVQVMDPAQEEQYDFDPLDDTKTWPEDLLPLRPVGRLVLDRNVDNFLNENEQLAFGPGLVVPGIYYSDDKMLQCRVFAYADTQRYRLGPNYLMLPVNAPRCGTHNNHYDGAMNLMHRDEEVDYYPSRHARRCGRAAPTPLPPRPVAGRREKATIRKPNDFKQPGERYRSWDADRQDRFVKAIRRLARTPKGQPELRSIWIDLLAKVDASLGMKIATRLNMKANM

SEQ ID NO: 24497 - protein, 337 aa, Zea mays
MGKIKIGINGFGRIGRLVARVALQSEDVELVAVNDPFITTDYMTYMFKYDTVHGHWKHSDITLKDSKTLLFGDKPVTVFGIRNPEEIPWGEAGAEYVVESTGVFTDKDKAAAHLKGGAKKVVISAPSKDAPMFVVGVNEDKYTSDVNIVSNASCTTNCLAPLAKVIHDNFGIVEGLMTTVHAITATQKTVDGPSAKDWRGGRAASFNIIPSSTGAAKAVGKVLPDLNGKLTGMSFRVPTVDVSVVDLTVRIEKGASYEDIKKAIKAASEGPLKGIMGYVEEDLVSTDFLGDSRSSIFDAKAGIALNDHFVKLVSWYDNEWGYSNRVVDLIRHMFKSQ

SEQ ID NO: 24498 - protein, 604 aa, Zea mays
  misc_feature (280)..(280): Xaa can be any naturally occurring amino acid
  unsure (1)..(604): unsure at all Xaa locations
MMFRLRDAAKAKDVVSHYWVKMCSCMASTFGATSTVGLMAAPTGKNVRLQRRVNFRVRAAKELYFNKDGSAIKKLQTGVNKLADLVGVTLGPKGRNVVLESKYGSPKIVNDGVTVAREVELEDPVENIGAKLVRQAAAKTNDLAGDGTTTSVVLAQGLIAEGVKVVAAGANPVQITRGIEKTAKALVEELRKLSKEVEDSELADVAAVSAGNNYEIGNMIAEAMSKVGRKGVVTLEEGRSSENFLYVVEGMQFDRGYISPYFVTDSEKMSAEYENCKLLXVDKKITNARDLINVLEEAIRGGYPILIIAEDIEQEALATLVVNKLRGSLKIAAIKAPGFGERKTQYLDDIAILTGATVIRDEVGLSLDKADKSVLGTAAKVVLTKESTTIVGDGSTQDEVTKRVAQIKNLIEAAEQEYEKEKLNERIAKLAGGVAVIQVGAQTETELKEKKLRVEDALNATKAAVEEGIVVGGGCTLLRLAAKVDAIKDTLENDEQKVGAEIVRRALSYPLKLIAKNAGVNGSVVTEKVLSNDNFKYGYNAATGQYEDLMAAGIIDPTKVVRCCLEHAASVAKTFLTSDVVVVDIKEPESAPLANPMDNSGYGY

SEQ ID NO: 24499 - protein, 340 aa, Pinus taeda
MGRQPCCDKVGLKKGPWTAEEDRKLVNFITLHGHGCWREVPKLAGLLRCGKSCRLRWTNYLRPDLKRGLLSESEEKLIIDLHAAIGNRWSRIAAQLPGRTDNEIKNYWNTRIKKKLRQMGIDPVTHKPLTQMQMQSTPAQTLLLQENDTEQKQQEQHNEPDPDQNQSSNGTVETLVSRAREPHDDIEPLQNFNMEDSNFNMEDSMQLFNVCSPTSGISLSGRTEEVDSDDSDQVSKSFGNGSSTHSQYIGRESSGVKAECGLSGWDQMAGVLGDPLSEWNVDLESWAAGLDATAASASAWIQQLPDCQWNDFQGDFEICSSKSCPETLQRLGPFLDDDEL

SEQ ID NO: 24500 - protein, 505 aa, Citrus x paradisi
MDLLLLEKTLLALFAAVVVAITVSKLRGKRFKLPPGPLPVPVFGNWLQVGDDLNHRNLSDLAKKYGDVLLLRMGQRNLVVVSSPDHAKEVLHTQGVEFGSRTRNVVFDIFTGKGQDMVFTVYGEHWRKMRRIMTVPFFTNKVVQQQRFNWEDEAARVVEDVKKDPEAATNGIVLRRRLQLMMYNNMYRIMFDRRFESQDDPLFNRLKALNGERSRLAQSFEYNYGDFIPILRPFLRGYLKICKEVKERRLQLFKDYFVEERKKLASTKSMSNESLKCAIDHILDAQTKGEINEDNVLYIVENINVAAIETTLWSIEWGIAELVNHPEIQKKLRNELDTVLGPGHQITEPDTHKLPYLQAVIKETLRLRMAIPLLVPHMNLHDAKLGGYDVPAESKILVNAWWLANNPAQWKKPEEFRPERFLEEESKVEANGNDFRYLPFGVGRRSCPGIILALPILGITIGRLVQNFELLPPPGQSKIDTAEKGGQFSLHILKHSTIVAKPRSF

SEQ ID NO: 24501 - protein, 141 aa, Alkalilimnicola ehrlichei MLHE-1
MAVERTLSIIKPDAVAKNIIGEIYNRFEKAGLKIVAARMVHLSREQAEGFYAVHKERPFFNDLVGFMISGPVMVQVLEGENAIVKNREIMGATNPAEAAAGTLRHDYAETIDANAVHGSDAPETAKQEIEFFFKADELCSR

SEQ ID NO: 24502 - protein, 274 aa, Alkalilimnicola ehrlichei MLHE-1
MNRLEKRMSACRKAGRKALIPYITAGDPGPEHTVPLMHALVGAGADVLELGVPFSDPMADGPVIQAACERALAHGTTLRDVFDMVRRFREQDGETPVVLMGYLNPVEYLGPAVFAEEAAAAGVDGVLTVDLPPEEAAPFTQAFAANDLCPIFLVAPTTAGERLEAVCQAARGFVYYVAIKGVTGVAELDVDDIARRVSAVRARTDLPVGVGFGIRDAESAARVGAVADAVIVGSALVNRIAGLTEQPERVPAVLAEALGEMRRALDGLAEEVAS

SEQ ID NO: 24503 - protein, 121 aa, Saccharomyces cerevisiae
AMANIAQRPKRGPHDAAIQNILTELQNHAAAWPFLQPVNKEEVPDYYDFIKEPMDLSTMEIKLESNKYQKMEDFIYDARLVFNNCRMYNGENTSYYKYANRLEKFFNNKVKEIPEYSHLID

SEQ ID NO: 24504 - protein, 448 aa, Nocardia farcinica IFM 10152
MVSEIARRGSSRNAKLAKIPLGIAGRAAVGFGRRLAGGDRTEINAQLNQKAAEQLFTVLGELKGGAMKFGQALSVMEAAVPEEFGEHYRDALTKLQAAAPPMPAATVHRVLDQQLGTQWRQRFRSFDDTPAASASIGQVHKAVWSDGRTVAVKVQYPGADDALRADLKTLSRMTGLISSVIPGADVKPILAEITERTEEELDYRNEAANQRAFAKAYDGHPEIVIPKVVASAPKVIVSEWLDGTPVSAIIKAGQADPAGTRDLRNRVALLMGRFHFSAPEAVGLLHADPHPGNFMMLPDDKLAVIDFGACAPLPNGFPEVLGQMLAMAVEEDYAGLTRLMKENGWVIPGRTVTEQEIADYLRPFSDPIRTDSFHFTRRWMQRVAGKATDFSSAEMKTARALQLPADYVMIFRVLGGSVGILAQLDAEIPFMQLAYTWLPGLREHRSAS

SEQ ID NO: 24505 - protein, 414 aa, Staphylococcus epidermidis ATCC 12228
MNKNNRVVITGIGALSPIGNDAKTTWDNALKGVNGIDKITRIDTDDYNVHLAGELKDFNIEDHIDRKEARRMDRFTQYAVVAAREAVKDAQLNINEKNADRIGVWIGSGIGGMETFEVAHTTLVERGPRRVSPFFVPMLIPDMATGQVSIDLGAKGPNGSTVTACATGTNSIGEAFKIIQRGDADAMVTGGTEAPITHMAIAGFSASRALSTNNDPETACRPFQEGRDGFVMGEGAGIVVLESLDSAKERGAEIYAEVVGYGSSGDAHHITAPAPEGEGGSRAMQAALDDAGIKAQDVQYLNAHGTSTPVGDLYEVQAIKNTFGDAAKSLKVSSTKSMTGHLLGATGGIEAIFSALSIRDSKVAPTIHAITPDEECDLDIVPNVAQDLDITYAMSNSLGFGGHNAVLVFKKFED

SEQ ID NO: 24506 - protein, 299 aa, Paracoccidioides brasiliensis
MLSSGLLPLSSLRLVAFDQFCPEIAMIARCHASRLGLFTGPFDAELLGVLPKSLKFICHNGAGYDNIDIPSFTKKGIEVSSTPRAVNNATADIAVFLMIGALRQAWIPQQAIRALGHDPQGKVLGILGMGGVGMALRAQAFGMRIIYHNRNRINPEQEGMVYVSFDDLLTQSDIISLNCSLTDETRHIIGGPEFTKMKNGVIIVNTARGALIDEKALVGALKSGKVQSVGLDVYEHEPTVEKELLENPRVMLLPHIGTVTYETQRNMEQLVFDNLKSCLKEGKLLTKVPEQRIPNTILL

SEQ ID NO: 24507 - protein, 369 aa, Zea mays
MTLYSSIVDYLECCKPCSLCFCWHQGIIPVAEKSLGTSRPAGRLAVLSVPPCSCPIFFLTPARSITLTASPDHIILLVSPQPSSISLSSTLPSIDPSYCVRMGRGKIEIKRIENTTSRQVTFCKRRNGLLKKAYELSILCDAEIALIVFSTRGRLYEYSSNSVRSTIERYKKASASTSGTAPVTDVNSLQYFQQEAAKLRQQIQTLQNSNRHLMGESTGNMTAKELKGLESRLERGIGRIRSKKHELLLAEIEYMQKRESDLHNENMFLRAKVAEAERALEQEAAEDQTMMVPAAVRGATTELKALPASFDASGYYQYQQHQHVVAAASAASSSQYAEQPQGQQEYHHQTALHLGYHVKIDSAADKGFL

SEQ ID NO: 24508 - protein, 224 aa, Bdellovibrio bacteriovorus HD100
MKGLFVAKKKSSAKKASVKKVVKKTVKKSGVKKSPAKAAKKPAPAKKKAPAKKTAAKAPAKKVAAKKPGVKKAVAKKPVAKKAVKAAKPAAKKTAAKPAKAAAPKIAMPTAHLVRESAPVKKLDLSGFVTPLDDRLMVQVSGAEKMTAGGLYIPDSVADTSGNLQGFVVAVGRGHMNKKGHVRPMDVQVGDKVVFSEYAGSKIKIQNEDLIILREADVMGVVSK

SEQ ID NO: 24509 - protein, 113 aa, Streptococcus oralis
TYVFTHDSIAVGEDGPTHEPVEHLAGLRAMPNLNVFRPADARETQAAWYLAVTSEKTPTALVLTRQNLTVEEGTDFNKVAKGAYVVYENAADFDTILIATGSEVNLAVAAAKE

SEQ ID NO: 24510 - protein, 284 aa, Ricinus communis
AIAQIGWIAGPAVMFLFSLVTYYTSTLLSACYRSGDPVNGKRNYTYMDAVRTNLGGAKVKLCGFVQYLNLFGVAIGYTIASSISMMAIKRSNCFHKSGGKNPCHINANPYMIAFGIAEIIFSQIPDFDQLWWLSILAAVMSFTYSTIGLGLGIAQVVENGKAMGSVTGISIGANVTPTQKIWRSFQALGDIAFAYSYSIILIEIQDTVRSPPSESKTMKKATLISVAVTTLFYMLCGCFGYAAFGDMSPGNLLTGFGFYNPYWLLDIANVAIVVHLVGAYQVFA

SEQ ID NO: 24511 - protein, 119 aa, Magnaporthe grisea 70-15
MPQDMPPVGGYGPVQYKRNLPSRGFRPAQLLFGMGLVMTYGWYKLGKGIREQNELAREKMWARIHLIPALQAEEDRDAVRRHLADQAREKELMGSNFPVYNSDRYVRPTYAVTPTQTKE

SEQ ID NO: 24512 - protein, 293 aa, Oryza sativa (japonica cultivar-group)
MEQYEEEKIGEGTYGVVYKARDKVTNETIALKKIRLEQEDEGVPSTAIREISLLKEMHHRNIVRLHDVIHSEKRIGLVFEYLDLDLKKFMDSCPEFAKNPTLIKSYLYQILRGVAYCHSHRVLHRDLKPQNLLIDRRTNTLKLADFGLARAFGIPVRTFTHEVVTLWYRAPEILLGSRQYSTPVDMWSVGCIFAEMVNQKPLFPGDSEIDELFKIFRVLGTPNEQSWPGVSSLPDYKSAFPKWQAQALATIVPTLDPAGLDLLSKMLRYEPNKRITARQALEHEYFKDLEMER

SEQ ID NO: 24513 - protein, 577 aa, Zea mays
MYRAAASLASKARQAGNSLATRQVGSRLAWSRNYAAKDIKFGVEARALMLRGVEELADAVKVTMGPKGRNVVIEQSFGAPKVTKDGVTVAKSIEFKDRVKNVGASLVNRVANATNDTAGDGTTCDTVLTKAIFTEGCKSVAAGMNAMNLRRGISMAVDAVVTNLKGMARMISTSEEIAQVGTISANGEREIGELIAKAMEKVGKEGVITIADGNTLYNELEVVEGMKLDRGYISPYFITNSKTQKCELEDPLILIHDKKVTNMHAVVKVLEMALKKQKPLLIVAEDVESEALGTLIINKLRAGIKVCAVKAPGFGENRKANLQDLAIFTGGEVITEELGMNLENFEPHMLGTCKKVTVSKDDTVILDGAGDKKSIEERAEQLRSAIENSTSDYDKEKLQERLAKLSGGVAVLKIGGASEAEVGEKKDRVTDALNATKAAVEEGIVPGGGVALLYASKELDKLQTANFDQKIGVQIIQNALKTPVHTIASNAGVEGAVVVGKLLEQENTDLGYDAAKGEYVDMVKTGIIDPLKVIRTALVDAASVSSLMTTTESIIVEIPKEEAPAPAMGGGMGGMDY

SEQ ID NO: 24514 - protein, 289 aa, Magnetospirillum magnetotacticum MS-1
MLMMVAEIMAGTMFNSMALLADGWHMSTHAGALGIAAFAYGFARRHAQNGRFTFGTGKVGVLGGFTSAIILGMVALIMVWESVSRLREVQTIGFDEALWVAVIGLVVNLVSALILGGHGHDHGHHHEHEHGHDHDHHQDHNLRAAYIHVVADAVTSVLAIAALLFGKYLGWWWMDPMMGLVGAAVIAKWSWGLMAETGAMLLDHNGDAELEEEVRAAIEGDADNRLADLHLWRIGTGHWAAIVSLVTDLPRPPDHYKLLLASVHELSHITVEILPCIGGVTEAHTSSMD

SEQ ID NO: 24515 - protein, 577 aa, Zea mays
MYRAAASLASKARQAGNSLAARQVGSRLAWSRNYAAKDIKFGVEARALMLRGVEELADAVKVTMGPKGRNVVIEQSFGAPKVTKDGVTVAKSIEFKDRVKNVGASLVKQVANATNDTAGDGTTCATVLTKAIFTEGCKSVAAGMNAMDLRRGISMAVDAVVTNLKGMARMISTSEEIAQVGTISANGEREIGELIAKAMEKVGKEGVITIADGNTLYNELEVVEGMKLDRGYISPYFITNPKTQKCELEDPLILIHDKKVTNMHAVVKVLEMALKKQKPLLIVAEDVESEALGTLIINKLRAGIKVCAVKAPGFGENRKANLQDLAILTGGEVITEELGMNLENFEPHMLGTCKKVTVSKDDTVILDGAGDKKSIEERAEQIRSAIENSTSDYDKEKLQERLAKLSGGVAVLKIGGASEAEVGEKKDRVTDALNATKAAVEEGIVPGGGVALLYASKELDKLQTANFDQKIGVQIIQNALKTPVHTIASNAGVEGAVVVGKLLEQENTDLGYDAAKGEYVDMVKTGIIDPLKVIRTALVDAASVSSLMTTTESIIVEIPKEEAPAPAMGGGMGGMDY

SEQ ID NO: 24516 - protein, 279 aa, Vibrio cholerae
KEAGLDFVTAGDFAWYDHVLTTTLLLGHVPKRHSHGFPDLDTLFRVGRGQSQNACGCGTGSAASDMTKWFNTNYHYIVPEFSSNDTFNVSWPQLFEEVNEALQAGHDVKPVLLGPISYLYLGKEVEEGFDRLTLLPRLLTAYQAILSKLAKQGVQWVQIDEPILALELEPRWQEAFKLAYQVIRGDVKLLLTTYFDSVLDTLDKIVELPVDGLHVDISAAPAQLETIVNRLPSDWVLSAGVINGRNVWRADLSAILARLQPVKTLLGERLWVASSCSLL

SEQ ID NO: 24517 - protein, 437 aa, Chlamydophila abortus S26/3
MPIIEESTMTYAEACRYFPGGVNSPIRACIPVGILPPIVSSAHRDIFIDSFGKTFIDFCGSWGSLIHGHGHPKILDVICNSASQGTSYGLTSENEISLAATLFSCLEFEDHKVRFVSSGTEATMTAVRLACATTGRSIMIKFLGCYHGHADVLLKGISIDESNIHQVPHIVDTYFSGNPYLPLNLILPYNDIQIFKEVMLQVGERVACVIFEPIAINMGVVLPKPGFIEGVITISRRFAALTIMDEVVTGFRMGIRGVRSIMDVDSDITVYGKILGGGMPVAAFLAHHRIMDHLLPLGQVFQAGTLSGNPIAMAVGKASLELCREVDFYPKLENLAQSFFAPIEEVICHQGFPVSLVRAGSMFSFFFRETPPTNLREVQECDHQMFGVFYRHVFAQGVYLSPAPMEASFLSSVHSKENLAYTQNVLIDSLMKTFGSL

SEQ ID NO: 24518 - protein, 279 aa, Vibrio cholerae
KEAGLDFVTAGDFAWYDHVLTTTLLLGHVPKRHSHGFPDLDTLFRVGRGQSQNACGCGTGSAASDMTKWFNTNYHYIVPEFSSHDTFNVSWPQLFEEVNEALQAGHDVKPVLLGPISYLYLGKEVEEGFDRLTLLPRLLTAYQAILSKLAKQGVQWVQIDEPILALELEPRWQEAFKLAYQVIRGDVKLLLTTYFDSVLDTLDKIVELPVDGLHVDISAAPAQLETIVNRLPSDWVLSAGVINGRNVWRADLSAILARLQPVKTLLGERLWVASSCSLL

SEQ ID NO: 24519 - protein, 323 aa, Methylococcus capsulatus str. Bath
MSKPKVLVTRRWPESCESRLRESFHVVFNADDHPMSRDELKAALRDYDAVLPTVTDAIDADVLSVEPLRCKILGNFGVGFNHIDLDTARQRGIAVTNTPDVLTDCTADIAMLLMLAVARRGGEGEREVRSGRWTGWRPTHMLGTKVTGKILGLVGFGRIARAMAKKAHFGFDMPVIFYDPFPPPQDLIDALGAEQCGTLEEVLERADFVALHCPGSKENRHLINADRLARMKPQSYLVNTARGDVVDNEALIQALRNRRIRGAGLDVYEGEPRLNPGFLELDNVVLFPHLGSATEETRIAMGMRVIDNITAFFEGRPPRDKVT

SEQ ID NO: 24520 - protein, 583 aa, Penicillium marneffei
MYNAHRGMVPAPNNRLTELLEQLRQEFESQSRSTGEFEHQLTGQIQEMEMIRQKVYQLEQAQIKIKAEYENEIRVLRHELESRGVQTVPSHVGGPTHAGPSQAPPALGHGTNNLFGGIMANQGGSGPGLAPPPPQEQQPPQHGLQQPAPAAQQGPPQPPQSSYGGYQPSAGVNGYGPPPPPTASPGPGKGRGRAPPGPATPQQTHQLNYPAPGASPQIPRPTPTGQLVRERPGNTLANWNPDDLPASQKREGPDWYAVFNPEVQRVLDVELVHHLVHDSVVCCVRFSRDGKYVATGCNRSAQIFDVATGQNVATLQDESVDKDGDLYIRSVCFSPDGKYLATGAEDKQIRVWDIATRSIKHVFTGHEQDIYSLDFAGNGRYIASGSGDKTVRLWDVLEGKLVYTLSIEDGVTTVAMSPDGHYVAAGSLDKSVRVWDTTTGYLVERLENPDGHKDSVYSVAFAPNGRDLVSGSLDKTIKMWELTAPRGMLPGTGVKGGKCVRTFEGHKDFVLSVCLTPDGHWVMSGSKDRGVQFWDPNTGSAQMMLQGHKNSVISVAPSPTNNLFATGSGDMRARIWRYVEFPE

SEQ ID NO: 24521 - protein, 483 aa, Oryza sativa
MNVLASKIFPSRSNVVSEQQQSKREKATIDDAKNSSKNKNLDRSVDESVLGIILGGGAGTRLYPLTKKRAKPAVPLGANYRLIDIPVSNCLNSNISKIYVLTQFNSASPNRHLSRAYGNNIGGYKNEGFVEVLAAQQSPDNPNWFQGTADAVRQYLWLFEEHNVMEFLILAGDHLYRMDYEKFIQAHRETDSDITVAALPMDEKRATAFGLMKIDEEGRIVEFAEKPKGEQLKAMMVDTTILGLDDVRAKEMPYIASMGIYVISKNVMLQLLREQFPGANDFGSEVIPGATNIGMRVQAYLYDGYWEDIGTIEAFYNANLGITKKPVPDFSFYDRSAPIYTQPRHLPPSKVLDADVTDSVIGEGCVIKNCKIHHSVVGLRSCISEGAIIEDSLLMGADYYETEADKKLLGEKGGIPIGIGKNCHIRRAIIDKNARIGDNVKIINVDNVQEAARETDGYFIKSGIVTVIKDALLLAEQLYEVAA

SEQ ID NO: 24522 - protein, 446 aa, Oenococcus oeni PSU-1
MKRELSNRHIQLISIGGTIGTGLFLGASRSIAFTGPSIMLVYLAAGIFMFLVTRAMGEMLYMDPDQHTFINFISKYLGKPFGFFSGWTYWLSIIFTGMGELTAVGIYFQFWFPKMPMWIIQLMFLAAIMSINLITVKFFGEAEFWFAMIKISAIVALILTSIFMLATDFKTPIGAVGLTNISKNFQLFPNGFKNFVMAFPMVFFAYQGIEFVGITTSETKNPRAVLPKAINQIIIRILIFYIGSLIAIMLIYPWQSLDPKQSPFVWIFKLLGISWAAGLINFVVLTAASSALNSILYSSGRHLYQLASDSSGKFNKNCAVISKNGVPARTICLSALAVAVSPIINSIPTIKDAFSVIASVSSGAYLLIYILTLFAHRKYTQSKDYLANGFLMPKPKFFGPLTIAFMVFILISMLFQKETCPGVVTALIWLVVFGGYSLAKYKNENS

SEQ ID NO: 24523 - protein, 106 aa, Arabidopsis thaliana
  misc_feature (21)..(21): Xaa can be any naturally occurring amino acid
  misc_feature (39)..(39): Xaa can be any naturally occurring amino acid
  misc_feature (61)..(61): Xaa can be any naturally occurring amino acid
  misc_feature (88)..(88): Xaa can be any naturally occurring amino acid
  misc_feature (91)..(91): Xaa can be any naturally occurring amino acid
  unsure (1)..(106): unsure at all Xaa locations
TRLSDLLRWEYETRNFKVSWXLRSFAVFTESSPLYHTNXEPERLSAEYEKELEAAHGRIQXICKKWQESNVRLLIEAEYTILQRAIDXMAXSSEMMFNSDKDRPNV

SEQ ID NO: 24524 - protein, 137 aa, Brassica napus
  misc_feature (18)..(18): Xaa can be any naturally occurring amino acid
  misc_feature (54)..(55): Xaa can be any naturally occurring amino acid
  unsure (1)..(137): unsure at all Xaa locations
RTTFQLPVNAPKSAHHKXTHHEGFMNVMHRDEEVNYFPSRYDPVRHAEKYPTPXXAVCSGKRERCVIEKPRVRKEPGGRYRSFTPERQERFIRRWIEALSDPRITHEIRSIWISYWSQADKTLGQKLASHLNVRPSI

SEQ ID NO: 24525 - protein, 320 aa, Ralstonia eutropha JMP134
MYETGGPEVLRYEDMDVGEPGPGQVRIRHVAVGLNYADTYFRNGTYPVPLPAGMGVEAAGVVQAIGPGVTNVAVGDRVTYTGFINTLGAYSTERLVPAAPLIRLPETIGFETAAAMTMRGLTSAYLMRRIYNFKAGDTILLHAAAGGVGLIVSQWAKLLGLTVIGTVSSEAKAEVARAHGCDYIINYSHEDVAKRVRELTDGVGVSVVFDSVGKNTFMASLDSLKRRGTLVCVGTASGPIPPFDPVLLAMKGSLFLTRPALADYIGDPAEKAELAGEIFGHVGAGRIKIEINQRYALEDAVQAHRDLESRKTTGSSIFVI

SEQ ID NO: 24526 - protein, 710 aa, Nostoc punctiforme PCC 73102
MKLLIVENDQDTAAALTTSLVAQQFTVDTASDSRSALELAEATEYDLIVLDVMLPDENGIRLCRQLRTQNQQEPILLLTGKVDPADRIAGFEAGADDYITKPYELSELLARIRALLRRGSTVLTKVLCWGQLQLDPNNCEVMCQGKGLHLTPKEYKLLELFLRHPRQIFDRRTLLDRICSIDECPGEEAVTTQIRGLRRKLQMAGLNSDPIETLYGLGYRLKSVPEEREQGSEQGHGDTETRGQGDTGNIFDRLSALPFGVTSRHKSLPSGFGSDAPNVANAALTDSTGKGATPVLGSPQVENAASKTPTSSPQSGSVQGAGSPHLPISASSSSYLLNANRYDAEAEAVAAIQQMWQDSQERLQGQLGKLEEAIAHLSTNTLTLDLRQFAHTVAHRLIGSLGAFGMPQAAELARQIERTLKTPTAAVQSEEAVQLKSLLGQLRQVIQLLPTFATTSPTLVLKSSDRVVLLIDDDTDLIERMQANASNWSIHLETVTDLTLARQRLQYLTPDAIILDLIFPNTTESGLTLLAQLKHQFPTIPVLVLTGLGDLTKRVEVTRLGANAFLQKPATPTEVFQAVSQLLHRIDTINARLLIVDDDPALLSMLEAQLQLWGFQVTTLADSSQFWQYLEATTPDLLLLDVAMPGFSGIELCQVVKSDPRWSRLPVLLLSAHADADTLYRALAAGADDYILKPIVEADLIQRILNFNSW

SEQ ID NO: 24527 - protein, 497 aa, Arabidopsis thaliana
MEISVSSVTFSLAVVVVSWWVWRTLKWVWFTPKMLERSLRRQGLSGTSYTPLIGDFKKMISMFIEATSKPIKPTDDITPRVMPHPLQMLKTHGRTNLTWFGPIPTITIMDPEQIKEVFNKVYDFQKAHTFPLSKILGTGLVSYDGDKWAQHRRIINPAFHLEKIKNMVHVFHESCSELVGEWDKLVSDKGSSCEVDVWPGLTSMTADVISRTAFGSSYREGHRIFELQAELAHYLPTKGNRRMKTAAREIQDILRGIINKRERARESGEAPSEDLLGILLESNLGQTEGNGMSTEDMMEECKLFYLAGQETTSVLLVWTMVLLSQHQDWQARAREEVKQVFGDKQPDTEGLNQLKVMTMILYEVLRLYPPVVQLTRAIHKEMKLGDLTLPGGVQISLPVLLVHRDTELWGNDAGEFKPERFKDGLSKATKNQVSFFPFGWGPRICIGQNFALLEAKMALALILQRFSFELSPSYVHSPYRVFTIHPQCGAHLILHKL

SEQ ID NO: 24528 - protein, 808 aa, Triticum aestivum
MAAKLTRLHSLRERLGATFSSHPNELIALFSRYVHQGKGMLQRHQLLAEFDELFESDKEKYAPFEDILRAAQEAIVLPPWVALAIRPRPGVWDYIRVNVSELAVEELTVSEYLAFKEQLVDEHASSKFVLELDFEPFNASFPRPSMSKSIGNGVQFLNRHLSSKLFQDKESLYPLLNFLKAHNYKGTTMMLNDRIQSLRGLQSALRKAEEYLVSIPEDTPSSEFNHRFQELGLEKGWGDTAKRVHDTIHLLLDLLEAPDPASLEKFLGTIPMMFNVVILSPHGYFAQSNVLGYPDTGGQVVYILDQVRALENEMLLRIKQQGLDITPKILIVTRLLPDAVGTTCGQRLEKVIGTEHTDILRVPFRTENGILRKWISRFDVWPYLETYTEDVANELMREMQTKPDLIIGNYSDGNLVATLLAHKLGVTQCTIAHALEKTKYPNSDIYLDKFDSQYHFSCQFTADLIAMNHTDFIITSTFQEIAGSKDSVGQYESHIAFTLPDLYRVVHGIDVFDPKFNIVSPGADMTVYFPYTETDKRLTAFHSEIEELLYSDVENDEHKFVLKDRNKPIIFSMARLDRVKNMTGLVEMYGKNAHLKDLANLVIVAGDHGKESKDREEQAEFKRMYSLIEEYKLKGHIRWISAQMNRVRNGELYRYICDTKGAFVQPAFYEAFGLTVIEAMTCGLPTIATCHGGPAEIIVNGVSGLHIDPYHSDKAADILVNFFEKCSEDPSYWDKMSEGGLKRIYEKYTWKLYSERLMTLTGVYGFWKYVSNLERRETRRYLEMFYALKYRSLAAAVPLAVDGESSDN

SEQ ID NO: 24529 - protein, 343 aa, Arabidopsis thaliana
MERYEIVKDIGSGNFGVAKLVRDKFSKELFAVKFIERGQKIDEHVQREIMNHRSLIHPNIIRFKEVLLTATHLALVMEYAAGGELFGRICSAGRFSKDEARFFFQQLISGVNYCHSLQICHRDLKLENTLLDGSEAPRVKICDFGYSKSGVLHSQPKTTVGTPAYIAPEVLSTKEYDGKIADVWSCGVTLYVMLVGAYPFEDPSDPKDFRKTIGRILKAQYAIPDYVRVSDECRHLLSRIFVANPEKRITIEEIKNHSWFLKNLPVEMYEGSLMMNGPSTQTVEEIVWIIEEARKPITVATGLAGAGGSGGSSNGAIGSSSMDLDDLDTDFDDIDTADLLSPL

SEQ ID NO: 24530 - protein, 461 aa, Triticum aestivum
MEKALDRQRILLRHLEPAAGASPAASAVSASVCAAGDSAAYHRGPCFADDVVIVAAYRTAICKAKRGSFKDTLPEDLLVPVFKALVDKTKLNPSEVGDIVVGTVLAPGSQRAIECRMAALYAGFPDTVPLKTVNRQCSSGLQAVADVAAAIKAGMYDIGIAAGVESMTVNKVNLVEKANPKVELFAQARDCLLPMGLTSENVAQRFGITRMEQDQAAVESHRKAAAAVAAGKFKEEIVPVHTKIMDPKTGEEKEIVVSADDGIRSNTTLAVLSKLKPAFSKDGTTTAGNASQVSDGAGAVLLMRRDVATQKGLPILGIYRSFAAVGVDPAVMGVGPAVAIPAAVKAAGLQINDIDLFEINEAFASQYVYCSKKLDLDPAKVNVNGGAIALGHPLGATGARCVSTLLNEMKRRGKDCRFGVISMCIGSGMGAAAVFERGDAVDELTNARGGPSLNWLSKDTV

SEQ ID NO: 24531 - protein, 154 aa, Glycine max
MSLIPSIFGGPRSNVFDPFSLDMWDPFKDFHVPTSSVSAENSAFVNTRVDWKETQEAHVLKADIPGLKKEEVKVQIEDDRVLQISGERNVEKEDKNDTWHRVDRSSGKFMRRFRLPENAKVEQVKACMENGVLTVTIPKEEVKKSDVKPIEISG

SEQ ID NO: 24532 - protein, 401 aa, Burkholderia sp. 383
MLRRFWLFFAQAVTVLLALMFIVVTLKPQWLQRQGQLGKQLATPIVALREVAPGIGGAPATTSYAEAAQKAMPAVVNVFSSKDGSLPPDPRAKDPLFRYFFGDRNARKQQDEPAANLGSGVIVSPEGYILTNQHVVDGADQIEVALADGRTATAKVIGSDPETDLAVLKINMTNLPTITLGRSDQSRVGDVVLAIGNPFGVGQTVTMGIISALGRNHLGINTFENFIQTDAPINPGNSGGALVDVNGNLLGINTAIYSRSGGSLGIGFAIPVSTARTVLESIITSGSVTRGWIGVEPQDVTPEIAESFGLSQKSGAIVAGVLQGGPADKAGIKPGDILVSVNGDEITDTTKLLNTVAQIKPGTPTKVHVVRKGKEFDVNVVIGKRPPPPKQALDEQDSDTE

SEQ ID NO: 24533 - protein, 576 aa, Zea mays
MYRAAASLASKARQAGSSSAARQVGSRLAWSRNYAAKDIKFGVEARALMLRGVEELADAVKVTMGPKGRNVVIEQSFGAPKVTKDGVTVAKSIEFKDRVKNVGASLVKQVANATNDNAGDGTTCATVLTKAIFTEGCKSVAAGMNAMDLRRGISMAVDAVVTNLKGMARMISTSEEIAQVGTISANGEREIGELIAKAMEKVGKEGVITIADGNTLYNELEVVEGMKLDRGYISPYFITNSKAQKCEPEDPLILIHDRKVTNMHAVVKVLEMALKKQRPLLIVAEDVESEALGTLIINKLRAGIKVCAVKAPGFGENRKANLQDLAILTGGEVITEELGMNLENVEPHMLGSCKKVTVSKDDTVILDGAGDKKSIEERADQIRSAVENSTSDYDKEKLQERLAKLSGGVAVLKIGGASEAEVGEKKDRVTDALNATKAAVEEGIVPGGGVALLYASKELDKLQTANFDQKIGVQIIQNALKTPVHTIASNAGVEGAVVVGKLLEQGNTDLGYDAAKDEYVDMVKAGIIDPLKVIRTALVDAASVSSLMTTTESIIVEIPKEEAPAPAMGGMGGMDY

SEQ ID NO: 24534 - protein, 176 aa, Arabidopsis thaliana
  misc_feature (76)..(76): Xaa can be any naturally occurring amino acid
  misc_feature (93)..(93): Xaa can be any naturally occurring amino acid
  misc_feature (114)..(114): Xaa can be any naturally occurring amino acid
  misc_feature (145)..(146): Xaa can be any naturally occurring amino acid
  misc_feature (148)..(148): Xaa can be any naturally occurring amino acid
  misc_feature (170)..(170): Xaa can be any naturally occurring amino acid
  unsure (1)..(176): unsure at all Xaa locations
MDPYKYRPSSAYNAPFYTTNGGAPVSNNISSLTIGERGPVLLEDYHLIEKVANFTRERIPERVVHARGISAKGFFXEVTHDISNLTCADFFRXAPGCSKLPVICPFSPPLVHGXCPVPETMRGIRGFCRSKFSTGGGKFFFFWDXXPXFLIRDGVKSRFFPGLNPSPKKXPGSGFG

SEQ ID NO: 24535 - protein, 437 aa, Haemophilus influenzae
TLPSFVSEQNSLAPMLEKVQPAVVTLSVEGKAKVDSRSPFLDDIPEEFKFFFGDRFAEQFGGRGESKRNFRGLGSGVIINASKGYVLTNNHVIDGADKITVQLQDGREFKAKLVGKDEQSDIALVQLEKPSNLTEIKFADSDKLRVGDFTVAIGNPFGLGQTVTSGIVSALGRSTGSDSGTYENYIQTDAAVNRGNSGGALVNLNGELIGINTAIISPSGGNAGIAFAIPSNQASNLVQQILEFCQVRRGLLGIKGGELNADLAKAFNVSAQQGAFVSEVLPKSAAEKAGLKAGDIITAMNGQKISSFAEIRAKIATTGAGKEISLTYLRDGKSHDVKMKLQADDGSQLSSKTELPALDGATLKDYDAKGVKGIEITKIQPNSLAAQRGLKSGDIIIGINRQMIENIRELNKVLKTEPSAVALNILRGNSNFYLLVQ

SEQ ID NO: 24536 - protein, 135 aa, Zea mays
RGAVRVQSELGLVMRPMYSNPPRDGAFIVATMLRVSEIFAEWALEPKAMADRIMNMRRQLFNALKCTGTRGDWNHIIKRIGKFTFPGLNIEQVALQRLEFHINMTSDGRISMAGLSIRIVLHRADAVHDAVSQVK

SEQ ID NO: 24537 - protein, 415 aa, Schizosaccharomyces pombe
MNSIPDSYSLKQGFPEGLGEYVDPSGNPNSQVRIGYGQDSVSRFQQPVPDVDPTAVNHYNASAPIEVASPFDNVTQGLVGSDAQALAEYWQKTIDTLEHDDQAVKTLHLPLARIKKVMKTDDDVKNKMISAEAPFLFAKGSEIFIAELTMRAWLHAKKNQRRTLQRSDIANAVSKSEMYDFLIDIISKDNNNSRASSSQAHMSATQVAAMGGMNGLQPFPTQAGLPNQGFPMPTGSQLPFSNQQSSQPSMQYSSHPSRMQQMQDIDQSMYKQQRLGSEYPQLQMSDNSGNVNQMNMQRPVMVAPYMAEHLYRYPPTHLESGSSAFRLQSSPMGYQMPQFQGNMRPNMQQSQMFDPSAYGMSRRPGSPRQFDQQQRLYSQPNAMMYQTQQGRQGNPMHQQFSQQQNPLSRYSQQPQ

SEQ ID NO: 24538 - protein, 463 aa, Haemophilus influenzae
MKKTRFVLNSIALGLSVLSTSFVAQATLPSFVSEQNSLAPMLEKVQPAVVTLSVEGKAKVDSRSPFLDDIPEEFKFFFGDRFAEQFGGRGESKRNFRGLGSGVIINASKGYVLTNNHVIDEADKITVQLQDGREFKAKLVGKDELSDIALVQLEKPSNLTEIKFADSDKLRVGDFTVAIGNPFGLGQTVTSGIVSALGRSTGSDSGTYENYIQTDAAVNRGNSGGALVNLNGELIGINTAIISPSGGNAGIAFAIPSNQASNLVQQILEFGQVRRGLLGIKGGELNADLAKAFNVSAQQGAFVSEVLPKSAAEKAGLKAGDIITAMNGQKISSFAEIRAKIATTGAGKEISLTYLRDGKSHDVKMKLQADDSSQLSSKTELPALDGATLKDYDAKGVKGIEITKIQPNSLAAQRGLKSGDIIIGINRQMIENIRELNKVLETEPSAVALNILRGDSNFYLLVQ

SEQ ID NO: 24539 - protein, 395 aa, Methylococcus capsulatus str. Bath
MPGRNHLYVPGPTNIPDAVLSAMHVPMEDHRRPDFPALVTPLLENLKKVFRTEAGQCFIFPATGTAGWEIALSNTLSPGDKVLSYRFGQFSHLWIDLARRLGLEVEYEEVPWGQGVPLDRLEARLKADTAHEIKAVLICHNETATGVTNDLPAVRKAIDAAGHPALFYVDGVSSIGSLDFRMDEWGIDIGVAGSQKGFMLPAGLALLGFSQKALKARESAKCKRAFLDINDHILHNAGGFFPYTPSIPLLYGLRKSLELLLEEGLENVYARHARLAEGVRRAVAAWGLQLCAQDPKWYSNTVSAVVVPPEFDARDVIHTAYFRYNLSLGAGLSEVSGKVFRIGHLGDLNELSLASAIVGSEMAMLDVGIPLTPGSGIAAASAHWRETAPVIQPRV

SEQ ID NO: 24540 - protein, 166 aa, Aspergillus oryzae
MSLFRTMPTAGDFSPLFRLLDDYDTHRQSRGQVSSVRSFAPRFDVRETDDAYHFDGELPGISQKDIDIQFSDPQTLVIKGRSEREYHSPEAGETKETEGESKEVVKKENNKPRFWVSERSVGEFHRTFTFPSRVDQENVKASLKNGILSLVVPKAAAYTGKKITIE

SEQ ID NO: 24541 - protein, 716 aa, Claviceps purpurea
MVRTSLAAFSLAVAGLASAQCPFADPGRLAARAQGLDESSRGHLAGFEVDDSEGYLTSDVGGPIEDQNSLKAGDRGPTLLEDFIFRQKITHFDHERVPERAVHARGTGAHGTFTSYGDYSNITAASFLGQKDKKTPVFVRFSTVAGSRGSADTARDVHGFAVRLYTDEGNFDIVGNNVPVFFIQDAIQFPDLIHSVKPRQDNEIPQAATAHDSAWDFFSQQTSTLHTLFWAMAGYGIPRSLRHMDGFGVHTYRLVTDDGTSKLVKWHWKSKQGKASLVWDEAQRAAGKNADYHRQDLFDAIQSGNYPEWELNLQIINEDQALAFGFDVLDPTKIIPEEYAPLMPVGVMRLDANPSNYFAETEQVMFQPGHIVRGVDFTEDPLLQGRIFSYLDTQINRHGGPNFEQLPINRPVVPIHNNNRDGAGQNFIHKNNAPYTPNTLNKGFPKQANQKEGKGFFTAPGRKVSGSLQRRLSNTFLDHWTQPRLFFNSITPIEQQFLINAIRFETSHLSQVVQKNVLAQLNKISHDVAVRVGKALGLDAPPADDKYYHNNQTKGLSIFGEELPTIATLIVGVLASTASKNSLAQAQALKDAFKTREVNVIVVAESLATGVDQTYDAADAVSFDGIVVADGVEALFDNTKKSSLFQPGRPSQIVNDGYNWGKPMGFLGSAKRAVKATSVVEGAGVYMRNSTATLVGDFQKGLAKFKFTDRFPMDTK

SEQ ID NO: 24542 - protein, 404 aa, Frankia sp. CcI3
MTAPVRAAVLQLGCPDEENAADRVRRVLGEIRQTQADLVVLPELWVTGYFHFDRYEAEAEALTGPTVTALREAARERGCHLVAGSIVERSADGRLFNTTVLIGPDGMIRHAYRKVHLFGYGSAEARLLTPGATVGTVPTELGIVGLATCYDLRFPELFRLLAEGGAEIVVVVSAWPLARLDHWRVLTRTRAIENQVYLVACNAAGRQAGREMAGASVVVDPWGEVLAEAGPRPTTVRAELDPSRPAAVRAEFPVLTHRRLGVDHQNRLDPAHLLDLAGRGKAFLDFWRERHLCSLTTVRPDGSPHVVAVGATLDPAAGIARVITSARSRKARLIAAGPAHGTPVGLCQIDGRRWSTLEGLAVLRDDPASVADAEFRYAQRYRAPRANPRRVVVEVRITRVLGSV

SEQ ID NO: 24543 - protein, 576 aa, Schizosaccharomyces pombe
MQPQEVDLMENSTMRNGARVLPPEAISKRHIGPYIIRETLGEGSFGKVKLATHYKTQQKVALKFISRQLLKKSDMHMRVEREISYLKLLRHPHIIKLYDVITTPTDIVMVIEYAGGELFDYIVEKKRMTEDEGRRFFQQIICAIEYCHRHKIVHRDLKPENLLLDDNLNVKIADFGLSNIMTDGNFLKTSCGSPNYAAPEVINGKLYAGPEVDVWSCGIVLYVMLVGRLPFDDEFIPNLFKKVNSCVYVMPDFLSPGAQSLIRRMIVADPMQRITIQEIRRDPWFNVNLPDYLRPMEEVQGSYADSRIVSKLGEAMGFSEDYIVEALRSDENNEVKEAYNLLHENQVIQEKSHLSKSKRVDSFLSVSPPAFSEYTSELQKKSKQELIDPTLEGPRWTVSDPPTYAKQTIDSNICVLVPTAEKNKLEMRTLADAASAVDTSQSTRKKSRRNKWHFGVRCRGDAPEILLAVYRALQRAGAQFTVPKPVNGKYRSDMYTIKSRWEIPHCKREGKNTYAYIELQLYEVMPGCFMLDVKSNGYKDIYSHPERTADHGMDDLKSSSPFSDLCAMLVCKLFSA

SEQ ID NO: 24544 - protein, 143 aa, Arabidopsis thaliana
  misc_feature (111)..(111): Xaa can be any naturally occurring amino acid
  misc_feature (123)..(123): Xaa can be any naturally occurring amino acid
  misc_feature (126)..(127): Xaa can be any naturally occurring amino acid
  misc_feature (130)..(130): Xaa can be any naturally occurring amino acid
  unsure (1)..(143): unsure at all Xaa locations
MMLKQAAKKALGLTSRQSTPWSVGILRTYHENVIDHYDNPRNVGSFDKNDPNVGTGLVGAPACGDVMKLQIKVDEKTGQIVDARFKTFGCGSAIASSSVATEWVKGKAMEXDVLTIKNTGIGXDLXXPPXKTGCWPGVKQGNR

SEQ ID NO: 24545 - protein, 358 aa, Glycine max
NKKRNMEDSILCKHTVHHTVTKKLISPKKSSQTNSTTERRIVRISYTDPDATDSSSDEEGFPFVRQRMKRYVNQIEIETAAAEKVVRKRPAGEACRRPAKLHSGKKFRGVRQRPWGKWAAEIRDPARRVRLWLGTYDTAEEAAMVYDNAAIRLRGPDALTNFVTPPQRDSPSPSPPPAAAETPAEVCEMKVVVTEEASGSGYDSSEDHCHHNLSSPTSVLQFRSNSSEENSESQQKAEQVLRECEGETETSLFEETGEFLALDNMPLPAWDDVFNFETPEYPPLLFQEEENLNLLHQSQMLGETVQFSSEEGFSDESSIMLADSLIDFDRACPSPSSLCQVDDFFQDILFASDPLVLL

SEQ ID NO: 24546 - protein, 196 aa, Glycine max
  misc_feature (105)..(105): Xaa can be any naturally occurring amino acid
  misc_feature (122)..(122): Xaa can be any naturally occurring amino acid
  unsure (1)..(196): unsure at all Xaa locations
RKAKIFHYGSISLITEPCQSAHIAAAKDAGVVLSYDPNLRLPLWPSADSAREGILSIWETADIIKISEDEISFLTKGEDPYDDAVVHKLFHPNLKLLLVTKGAEXGCRYYTKEFCGRVKGIXKVDAVDTTGAGDAFVAGILSQLAVDLSILQKEDELRDSLKFANVCGALTVTERGAIPALPTKEAVLNAMLKPVS

SEQ ID NO: 24547 - protein, 510 aa, Plantago major
MENSNRGVGAKTIITTTPPPEEAAPIRNIFLVAAIAAGVQFGWALQLSLLTPYVQLLGIPHKWASYIWLCGPISGMIVQPVVGYFSDNCTSRFGRRRPFIAAGAGLVGVAVVLIGFAADLGHAGGDSLGDGLKPRAIGVFVFGFWILDVANNMLQGPCRALLADLSGGNTKKMANANSFFSFFMAVGNVLGYAAGSYSRMYKVFPFSKTKACDIYCANLKSCFIISITLLITLTTLALSIVREKRHVAEEQVTAAKKGFKIPVFPELFGALKDLPRPMWVLLLVTALNWIAWFGFLLFDTDWMGREVYGETQQHKAPELAVIYNKGVSAGALGLMLNSIVLGFASLGVQYMARALGGVKRLWGVVNFILAICLCMTIVITKVASHHRPYSNGVLQTPESSVKIGALVVFSALGIPLAITFSVPFALASIYSTTTGSGQGLSLGVLNLAIVIPQMIVSVASGPWDAMFGGGNLPAFVVGAVAAAASGIFAFTMLPSPPAESIKNLSVAGGH

SEQ ID NO: 24548 - protein, 206 aa, Zea mays
MDDPVERLKDGFHKFKTEVYDKKPELFEPLKAGQAPKYVVFACSDSRVCPSVTLGLQPGEAFTVRNIAAMVPAYDKTKYTGIGSAIEYAVCALKVEVLVVIGHSCCGGIRALLSLQDGAPDNFHFVENWVKIGFPAKIKVKKDHASVPFDDQCSILEKEAVNLSLENLKTYPFVKEGLANGTLKLVGGHYNFVSGEFLTWDNKQPS

SEQ ID NO: 24549 - protein, 335 aa, Craterostigma plantagineum
MNQQQVVKVSKNKQINSEDDDDSSDLRRGPWTVDEDFTLINYIAHHGEGRWNSLARFAGLKRTGKSCRLRWLNYLRPDVRRGNITLEEQLLILELHSRWGNRWSKIAQHLPGRTDNEIKNYWRTRVQKHAKQLKCDVNSKQFKDTMRYLWMPRLVERIQRAATTDDGAPPLASSASSPSSAMNTACYSTAMAAGDHRRQFMLMPQYYAMTTHSNLMIAQENSSTVASSESFGSLSSELTEANYANYHQVINGADHQQIDSSTTTSYGWQNDFAINTVGNNGNSDQLGMGSVDDRRSNEQWMMMDDVDNGGSSDKDNNLLWNVDDVWFLQQFSSCF

SEQ ID NO: 24550 - protein, 260 aa, Bacillus subtilis subsp. subtilis str. 168
MSRNKVEICGVDTSKLPVLKNEEMRKLFRQLQDEGDDSAREKLVNGNLRLVLSVIQRFNNRGEYVDDLFQVGCIGLMKSIDNFDLSHNVKFSTYAVPMIIGEIRRYLRDNNPIRVSRSLRDIAYKALQVRERLISETSKEPTAEDIAKVLEVPHEEIVFALDAIQDPVSLFEPIYNDGGDPIYVMDQISDERNTDSQWIEELALKEGMRRLNDREKMILRKRFFQGKTQMEVAEEIGISQAQVSRLEKAAIKQMNKNIHQ

SEQ ID NO: 24551 - protein, 333 aa, Oryza sativa
MAMRRWREDAVALSLRGCGFGDGDDDRPEKPRRYGVTEMRSPFYAFRPAHHALQGHHIGIFSLCDQRSVSVCRSSGPFVDGLKFTGGSHSLMGKELVREITDLAHKHDIYVSTGDWAEHLLRQGPSFFKQYVEECKALGFDTIELNAGSLKLPEEALLRLVRLIKTSGLQAKPLFSVKFDSSDIPPSGDRAFGAYIVPVKQNSERVEDVDLLIRRAERCLEAGADMIMIDADDICQRADSLRADIVAKIVGRLGLEKTMFEASNPNTSEWFVRRYGPRTILQARSLDSFMRHFQVNLFVDHSDVMNLERLRGFNMRGVCNSPLFGIGSPFFLM

SEQ ID NO: 24552 - protein, 553 aa, SYNECHOCOCCUS SP. WH 8102
MSQTMPWWTGTVIYQLIVRSFADGNGDGIGDFKGLASRLPYLRWLGVKTLWLTPTYPSPLRDGGYDITDFKDIHPDLGDLASFHRFLTAAHSQGMRVILDLVLNHTSDLHPWFQRARWAPKGSTERDVYVWSDDPSRYSDAPVLFRHFEASNWEWDPVAEQYYLHRFLSHQPDLNYANPWVQEAMLEVVDFWLERGVDGFRLDAVPFLFEEEGTRCEGLPETHAFLRRLRARVDAMGREVLLLGEAIQPVQEAAPYLAKDELHGAFNFVLTAHLFAAVASGSTRQLGDCLNEAEHAVDGPRWALPLRNHDELWLGDGHLIPDEVIQSIRVGLPQGQGHWLNWGINRRLAPLLNGDPRSNRLLHGLIYSLPGMPCLYYGDELGMGDWPGLRDRDPNRTPMAWTPARNGGFSSAPDPLLVLPPITAPGYDYRVVNVEVQKQLPGSLLNWHRRMLTCRRLLPALAHGSLQLLPCSHPGALVYVRATEAMTVLVAGNVTAAGASFSLDLTAWEGLRTREVMWGCEFPLASREWFVNLSPYGINWWLIGEVDTAVPVS

SEQ ID NO: 24553 - protein, 441 aa, Glycine max
MKLEESVSNSNIIARLLPPEDPNPQNGSISGAVFNITTTMIGAGIMSIPATMKVLGIVPGLVVIVLVALITDVTVEFMLRYTSSGKSSTYAGMMAESFASIGSLAVKICVIISNLGVLIIYFIILGDVLSGNESNGITHLGILQEWFGINWWTSRAFALLIVALFIMLPLVMLRRVDSLKYSSAIAILLAFVFVVICSSMAVSALLSGKTQTLRIVPDFSQATVLDLFTTIPVFVTGFGFHVNVHPIRAELGKVAHMGLAARISLIICVAIYFAIGFFGYLLFGDSIMPDVLVNFDQNSHTSAGRLLNTIVRLSYALHLALVFPIMNYSLRANIDELIFSNKNKPPLASDTPRFVSLTLTLLALTYFVAVAIPNIWFFFQFLGSTTIVCTSFIFPAAIVLRDMHGISKTKDQVMAIVVIVLAVGTSGIAIWTNLNGSGAAQ

SEQ ID NO: 24554 - protein, 317 aa, Bacillus licheniformis ATCC 14580
MDVISIGETMALFTPNEDGPLRYARNYQVRIAGAETNTLIGLSKLGKKAGWITRLGKDEFGAMILSSVRGEGVDVSQVKLDDAAPTGLFFKERKSAAKVNVFYYRTLSAASFLKKCDIDEQYIEKAGLLYITGITPALSESASDAVFYAVELAKKHNKCVVFDPNFRKKLWDGERARQTMFELIKRSDIVLPGLSEGRFLFGTADEKKIAEAIRGLGAETAIIKLGSKGAYYAGGNESGYAEGYQIQAAADPVGAGDGFAAGVLSGLIDQIPLSEAVKRGCAVGAMVAAVNGDIEGLPDRESLFAFMEQSDEEDVSR

SEQ ID NO: 24555 - protein, 384 aa, Salmonella enterica subsp. enterica serovar Typhi Ty2
MSQNTLKVHDLNEDAEFDENGVEAFDEKALSEEEPSDNDLAEEELLSQGATQRVLDATQLYLGEIGYSPLLTAEEEVYFARRALRGDVASRRRMIESNLRLVVKIARRYGNRGLALLDLIEEGNLGLIRAVEKFDPERGFRFSTYATWWIRQTIERAIMNQTRTIRLPIHIVKELNVYLRTARELSHKLDHEPSAEEIAEQLDKPVDDVSRMLRLNERITSVDTPLGGDSEKALLDILADEKENGPEDTTQDDDMKQSIVKWLFELNAKQREVLARRFGLLGYEAATLEDVGREIGLTRERVRQIQVEGLRPSARNSADAGAEYRSAVPRVSTLVKKRPVDRLAFFLPFVFCQQRRDTRHHWRVINIFLRHAKRLWIVFAAGTA

SEQ ID NO: 24556 - protein, 392 aa, Glycine max
MDSGLAISSPKPYSVITTGSYASKASQHTKKTQIKYNLKRVQQLSLGHRYKCIEGGFAYQECNRKYVVQAVPESSFDSEPHTSNPQIILHSVKDFLATLCTLSYPYAMIGLALCALSSSLLAVEKLSDISLSFFVGVLQAAVPQLFFAIYSNALNQVSDLEIDKINKPHLPLASGQLSLKTVVIIAASFLTLSFWLSWIVGSWPLIWNLVLITSIWTAYSVNVPFLRWKKNPILAAMCMVSSWAFVLPITFFLHMQTFVLKRPIVFPRSLILAIVIMNFFFVGMALAKDIPDVEGDKIYGIDTFAIRIGQKQVFWICIFLFEMAFGVSLVAGATSSSLLVKIITGVGNAVLASVLWFQANSIDLSSKTSGGSFYMLIWKLMYASYFLVALIR

SEQ ID NO: 24557 - protein, 329 aa, Oryza sativa (japonica cultivar-group)
MALEAVVFPQGHFGYGCGRDSPAYGMPWCDVLAAAGGGGGFGEFYGVDEWDDQLQVASVDEWEVASKDNSDASTEGKAAAAERAEPVAAGRRKRRRTKVVKNKEEIECQRMTHIAVERNRRRQMNEYLAVLRSLMPASYSQRGDQASIVGGAINYVKELEQLLQSLEVQKSLKNRSGAMDAAGDSPFAGFFSFPQYSTSPRTGCSAAASAGSSGSASSVVMDDTAGSAESGRQSAAIADIEVTMVEGHASLKVLARRRPKQLLKLVVGLQQLRIPPLHLNVTTVDAMVLYSFSLKVEDDSKLGSVEDIATAVHQILGSIQQQEAVLSIS

SEQ ID NO: 24558 - protein, 444 aa, Prochlorococcus marinus str. MIT 9313
MSNLLLFEVAPVTSSPLREFPCSEALLEEALNLIPLASQTFSKSVSQLPRGVSPLFVDRADGARFWDVDGHSFIDLTNGLACVTLGYRHPAVDEAVRSQLQSGVSFSLPHKLELQVAKLIIEMVPCAEMVRFAKNGTDATSGAIRLARHCTKRDRIALCGYHGWQDWSIGTTSRNGGVPKGVSDLSHTFIYNDIDSLKNLLNRYPDEFAAVILEPMNITWPEPGFLETIKSIAHQHGALLIFDETITGFRFSNGGAQELFGVIPDLSTFGKGLANGFPLSALVGRSSFMKEISNIFFSGTFGGETLSLAAANAVLLQLLNNNVTDKLSSIGSQIADGVNHLINHYSLSHVFSLSGHPSWKIWSINDHYDATAWEIRTFLFQELYARGMFTIGSHNISLAHLDFVDEILDTYSQVLSLLSSSLTTKGGVRHSLRCKPIEPLFRVR

SEQ ID NO: 24559 - protein, 459 aa, Bacillus cereus ATCC 10987
MSKLVVIGGGPAGYVAAITAAQSGKEVTLIDEADLGGTCLNVGCMPTKSLLESAEVHDIVRKANHYGVMLNEGSISVDWKQMQARKSQVVTQLVQGIQYLMKKNKIKVIQGKAKFETDHRVRVTHGGKEIVVDGEQFIIAAGSEPTELPFATFDGKWILNSSHAMSLENIPKSLLIVGGGVIGCEFASIYSRLGTKVTIVEMAPQLLPGEDEDIAHILRGKLENDGVEIFTGAALKGLNNYKKQASFEYEGSTQVVNPEFVLVSVGRKPRVQQLDLEKAGIQYSNKGISVNEHMQTNASHIYAAGDVIGGIQLAHVAFHEGTTAALHASGEDVKVNYHAVPRCIYTAPEIASVGLSEKLAREQYGDILIGEFPFSANGKALIIGEQTGKVKVIVEPKYQEIVGISIIGPRATELIGQGTVMIHTEVTADIMRDYIAAHPTLSEAIHEALLQAVGHAVHA

SEQ ID NO: 24560 - protein, 176 aa, Marsilea quadrifolia
FFFLWIKKEAEEDLLCVSVNSTLASRALGRMESGLAIAGFKGLNTAAVGSVSWHSHGATRQAVGSSSWPSRKQGLNVKGTSLDRSWHDASTVSNRRKTRLTINAEMTASASTTPLAPLIPESPSGQFLTELLQSHPHLVPAAAEQQLETLAEAREAASSQEQPTPDGNELVLYKRS

SEQ ID NO: 24561 - protein, 332 aa, Thermus aquaticus
TSDPVRQYLHEIGQVPLLTLEEEIDLARKVEEGMEAIKKLSEATGLDQELIREVVRAKILGTARVEEVDGKLKSLPKELKRYLHIAREGEAARQHLIEANLRLVVSIAKKYTGRGLSFLDLIQEGNQGLIRAVEKFEYKRRFKFSTYATWWIRQAINRAIADQARTIRIPVHMVETINKLSRTARQLQQELGREPSYEEIAEAMGPGWDAKRVEETLKIAQEPVSLETPIGDEKDSFYGDFIPDENLPSPVEAAAQSLLSEELEKALSKLSEREAMVLKLRKGLIDGREHTLEEVGAYFGVTRERIRQIENKALRKLKYHESRTRKLRDFLE

SEQ ID NO: 24562 - protein, 332 aa, Bacillus cereus ATCC 10987
MLKTTESKGNGITKEQARWMYEKMLEIRKFEDKVHELFAQGVLPGFVHLYAGEEAVAVGVCAHLTDRDSITSTHRGHGHCIAKGCDLNGMMAELFGKATGLCKGKGGSMHIADLDKGMLGANGIVGGGFPLACGSALTAKYKGTKDVSVCFFGDGANNEGTFHEGVNLAAIWKLPVIFIAENNGYGEATTFEYASSCDSIADRAKAYNIPGVQVDGKDLLAVYKAAEEAVERARNGGGPTIIECMTYRNYGHFEGEAQTYKTSEEKEEHLNEKDAIVNFRKHLIHEALLTESELVDMEKAVDEAVQKSIEFSENSPYPEDEELLKDVYVSYK

SEQ ID NO: 24563 - protein, 631 aa, Oncidium Gower Ramsey
MEGCDCIEPQWPADELLVKYQYISDFFIALAYFSIPLELIYFVKKSSFFPYRWVLIQFGAFIVLCGATHLINLWTFTMHSRTVAIVMTVAKVSTAGVSCATALMLGHIIPDLVSVKTRELFLRNKAEELDREMGLIRTQEETGRHVRMLTHEIRSTLDRHTILKTTLVELGRTLDLAECALWMPLRTGLHLQLSHTLNNKIPVGSVVSINLPIVNQIFNSSRAGRIPNTCPLARFQPYTGRYVPQEVVAVRVPLLHLSNFQINDWPELSPKSFAVLVLMLPSDSARKWHAYELELVEVVADQVAVALSHAAILEESMRARDLLMDQNVALDLARREAEMAIRARNDFLAVMNHEMRTPMHAIIALSSLLLETELTPEQRLMVETILKSSNLLATLINDVLDLSKLEDGSFELEATIFNLHTVFREAVNLIKPIAAVKKLSLFVSLAPDLPSCAIGDEKRLLQIMLNVVGNAVKFTKEGTIFITVNIAKPDSLRDPDFYPAPTDGHFYLRVQVKDTGCGISPQELPHLFTKFAHTQNGSDKGYSGSGLGLAICKRFVNLMKGHIWLESEGIGKGCTTIFIVKLGMSEDPTLRYQQKLLPPIRAGQAEADPFGLKPAALKDELMPKIRYQRSL

SEQ ID NO: 24564 - protein, 458 aa, Oryza sativa
  misc_feature (18)..(18): Xaa can be any naturally occurring amino acid
  misc_feature (35)..(35): Xaa can be any naturally occurring amino acid
  misc_feature (51)..(51): Xaa can be any naturally occurring amino acid
  misc_feature (68)..(68): Xaa can be any naturally occurring amino acid
  misc_feature (84)..(84): Xaa can be any naturally occurring amino acid
  misc_feature (110)..(110): Xaa can be any naturally occurring amino acid
  misc_feature (127)..(127): Xaa can be any naturally occurring amino acid
  misc_feature (144)..(144): Xaa can be any naturally occurring amino acid
  misc_feature (162)..(162): Xaa can be any naturally occurring amino acid
  misc_feature (177)..(177): Xaa can be any naturally occurring amino acid
  misc_feature (193)..(193): Xaa can be any naturally occurring amino acid
  misc_feature (211)..(211): Xaa can be any naturally occurring amino acid
  misc_feature (227)..(227): Xaa can be any naturally occurring amino acid
  misc_feature (253)..(253): Xaa can be any naturally occurring amino acid
  misc_feature (270)..(270): Xaa can be any naturally occurring amino acid
  misc_feature (287)..(287): Xaa can be any naturally occurring amino acid
  misc_feature (302)..(302): Xaa can be any naturally occurring amino acid
  misc_feature (334)..(334): Xaa can be any naturally occurring amino acid
  misc_feature (351)..(351): Xaa can be any naturally occurring amino acid
  misc_feature (368)..(368): Xaa can be any naturally occurring amino acid
  misc_feature (384)..(384): Xaa can be any naturally occurring amino acid
  misc_feature (401)..(401): Xaa can be any naturally occurring amino acid
  misc_feature (417)..(417): Xaa can be any naturally occurring amino acid
  misc_feature (434)..(434): Xaa can be any naturally occurring amino acid
  misc_feature (451)..(451): Xaa can be any naturally occurring amino acid
  unsure (1)..(458): unsure at all Xaa locations
GEEEEETYTTDDALTRAXFGRFQALVLAYACVGWXAEAMEVMLLSFVGPSXKAEWGVSGAAEGLVSSXVFAGMLIGACLGGLIXDRYGRRYPFIFTAVVTGIFGLLSAFXPNYASLLVLRFVVGLGXGAGHVLSTWFIEFVPAXKRGTWMVVFHCSWTVGTXLEALLAWAVMPVLGXRWLLALSSAPCFILFXFFPVTPESPRYLCSVGRXMDARVILEKIARMNNXSLPPGILTYASTRRIDNSKPGGITAXRESWSYDLIRSTFLLWXVYLANYFAYYGVILLTXELSNGQRRCASVGIXFMQPKDANLYRDVLVTSWQEFPGLVLAALLVXRIGRKVSLGIMLLLSCXFLAPLAVHLGQGSVTTXLFCARTCIMGGFAVLXVYTPEIYPASSRNTGVXITSSFGRIGSIVSPVXTVSLSENCRQKEAVFFXDLMLFLAAVACALIPLXTKGRQIQ

SEQ ID NO: 24565 - protein, 438 aa, Bacillus sp. TB-90
MKKNYGMARIVSLGLQHVLVMYAGAILVPLIVGGALHLSSNELAYLVSIDLLTCGIATLLQSWKNRFFGIGLPVVLGTSFVAVTPIIGIGTQYGMGAIYGSIITAGIFILIFSPFFGKLAKLFPPVVTGSVVTIIGVSLVPAGIKNMAGGEGNPHFGDPENLLLSFGVFIFILLINRFFHGFIRTISVLLGIIAGTIVAAFMGKVDFTNVAQASWFHMPELFYFGAPSFEWGPMITMTLVGIVIIIESTGSFFALSKICEQNMNEQDLVLGYRAEGLSFILGGLFNAFPYSTFAQNVGLVQLTNIKTRNVTIAAASLLVLLGFIPKIAAFTTIIPTPVLGGAMIVMFGMVVSSGIKMLSSVDFGQQSNLLTVACSVALGLGATVVPDLFSKLPQFMRILVGDGIVTGSLTAIILNLFFNLSSKKKPTVSSTLETTIES

SEQ ID NO: 24566 - protein, 273 aa, Zea mays
  misc_feature (266)..(266): Xaa can be any naturally occurring amino acid
  unsure (1)..(273): unsure at all Xaa locations
MNFLESIAVNGHRDRQHGGVMSRQSMVAVEQLIGPASARPAHTCAAQPHAHQLLSARYDHRGACASQVELPDRISPSNASTFCTSMYSSSSSSSAAADSSKSCRRAGALPFLPHPPKREQQQQQQSSSSPSLLVCTDLGNGGQDEAEAEHPAELKDFLNLSGEASWRGGFHGESSGVAFRFGEQVEFQFLSEQLGIAITDHDESPRLDDIYDRPPQTSSCPVLSCSDQEEGLQRAGSPVKAQPSSSRAASCNNKPRLRWTLELHEXFVKAVNK

SEQ ID NO: 24567 - protein, 493 aa, Methanosarcina mazei Go1
MCGIAGMFGTPDSNTKVKKMLAILGHRGPDACGIHTEGKLSIGNTLLKITGDMPQPLTGTGSLVLNGEIYNFRELAAEIGLKTDSDTELLFTLIERKVRKGIKPTNAVFSVLSKVNGDYALAYACGTELVLARDPSGVKPLYYFYEKSMVKPGLAFASEKKALAFTGREVKPFPQGGIMGFSTENGKIAEKFTEKSLKITQPEKRISAEKEAIIYLKAALEKAVELRLTPVSGIAFSGGIDSTFLAALAKRIDPYVSLYAVGLPDSHDIAQAEYAAEAIGMKRNLKTHFLSPEEIEAAVPEVIYATESTDPMKVAIGLPLHIVAKTAREEGKRVLLTGQGADELFGGYSRHEGFFEQGADVLDREIYSDLENISAINLERDDMVAMANSVELRVPFLDKEVIKTGLAISPELKVRKKEGVYIRKYILRKAAEGLLPPKILWKEKKAVQYGTGVQKTLDRLARDSGFSKKQGGHIEKYLSQIASEKGFDFINEM

SEQ ID NO: 24568 - protein, 158 aa, Pisum sativum
MSLIPSFFSGRRSNVFDPFSLDVWDPLKDFPFSNSSPSASFPRENPAFVSTRVDWKETPEAHVFKADLPGLKKEEVKVEVEDDRVLQISGERSVEKEDKNDEWHRVERSSGKFLRRFRLPENAKMDKVKASMENGVLTVTVPKEEIKKAEVKSIEISG

SEQ ID NO: 24569 - protein, 631 aa, Oncidium Gower Ramsey
MEGCDCIEPQWPADELLVKYQYISDFFIALAYFSIPLELIYFVKKSSFFPYRWVLIQFGAFIVLCGATHLINLWTFTMHSRTLAIVMTVAKVSTAVVSCATALMLVHIIPDLLSVKTRELFLRNKAEELDREMGLIRTQEETGRHVRMLTHEIRSTLDRHTILKTTLVELGRTLDLAECALWMPLRTGLHLQLSHTLNNKIPVGSVVSINLPIVNQIFNSSRAGRIPNTCPLARFQPYTGRYVPQEVVAVRVPLLHLSNFQINDWPELSPKSFAVLVLMLPSDSARKWHAYELELVEVVADQVAVALSHAAILEESMRARDLLMDQNVALDLARREAEMAIRARNDFLAVMNHEMRTPMHAIIALSSLLLETELTPEQRLMVETILKSSNLLATLINDVLDLSKLEDGSFELEATIFNLHTVFREAVNLIKPIAAVKKLSLFVSLAPDLPSYAIGDEKRLLQIMLNVVGNAVKFTKEGTVFITVNIAKPDSLRDPDFYPAPTDGHFYLRVQVKDTGCGISPQELPHLFTKFAHTQNGSDKGYSGSGLGLAICKRFVNLMKGHIWLESEGIGKGCTTIFIVKLGMSEDPTLRYQQKLLPPIRAGQAEADPFGLKPAAPKDELMPKIRYQRSL

SEQ ID NO: 24570 - protein, 201 aa, Salmonella enterica subsp. enterica serovar Typhi Ty2
MALHDENVVWHSHPVTVAAREQLHGHRGVVLWFTGLSGSGKSTVAGALEEALHQRGVSTYLLDGDNVRHGLCRDLGFSDADRQENIRRVGEVASLMADAGLIVLTAFISPHRAERQLVKERVGHDRFIEIYVNTPLAICEQRDPKGLYKKARAGELRNFTGIDAIYEAPDSPQVHLNGEQLVTNLVSQLLDLLRRRDIIRS

SEQ ID NO: 24571 - protein, 342 aa, Sporidiobolus salmonicolor
  misc_feature (71)..(71): Xaa can be any naturally occurring amino acid
  misc_feature (191)..(191): Xaa can be any naturally occurring amino acid
  misc_feature (226)..(227): Xaa can be any naturally occurring amino acid
  misc_feature (241)..(241): Xaa can be any naturally occurring amino acid
  unsure (1)..(342): unsure at all Xaa locations
AKIDNAVLPEGSLVLVTGANGFVASHVVEQLLEHGYKVRGTARSASKLANLQKRWDAKYPGRFETAVVEDXLKQGAYDEVIKGAAGVAHIASVVSFSNKYDEVVTPAIGGTLNALRAAAATPSVKRFVLTSSTVSALIPKPNVEGIYLDEKSWNLESIDKAKTLPESDPQKSLWVYAASKTEAELAAWKFXDENKPHFTLNAVLPNYTIGTIFDPETQSGSTSGWXXSLFNGEVSPALALXPPQYYVSAVDIGLLHLGCLVLPQIERRRVYGTAGTFDWNTVLATFRKLYPSKTFPADFPDQGQDLSKFDTAPSLEILKSLGRPGWRSIEESIKDLVGSETA

SEQ ID NO: 24572 - protein, 631 aa, Oncidium Gower Ramsey
MEGCDCIEPQWPADELLVKYQYISDFFIALAYFSIPLELIYFVKKSSFFPYRWVLIQFGAFIVLCGATHLINLWTFTMHSRTLAIVMTVAKVSTAVVSCATALMLVHIIPDLLSVKTRELFLRNKAEELDREMGLIRTQEETGRHVRMLTHEIRSTLDRHTILKTTLVELGRTLDLAECALWMPLRTGLHLQLSHNLNNKIPVGSVVSINLPIVNQIFNSSRAGRIPHTCPLARFQPYTGRYVPLEVVAVRVPLLNLSNFQINDWPELSPKSFAVLVLMLPSDSARKWHAYELELVEVVADQVAVALSHAAILEESMRARDLLMDQNVALDLARREAEMAIRARNDFLAVMNHEMRTPMHAIIALSSLLLETDLTPEQRLMVETVLKSSNLLATLINGVLDLSKLEDGSFELEATIFNIHTVFREAVNLIKPIAAVKKLSLFVSLAPDLPSCAIEDEKRLLQIMLNVVGNAVKFTKEGPIFITANTAKPDSLRDPDFYPAPNDGHFYLRVQVKDTGCGISPQEFPPLFTKFAHTQNGSDKGYSGSGLGPAICKRFINLMKGHIWLESEGTGKGCTTIFIVKLGMSEDPTLRYQQKLLPPIRAGQSEADPFGLKPAAPKGELLPKIRYQRSL

SEQ ID NO: 24573 - protein, 858 aa, GIBBERELLA ZEAE PH-1
MALLQRFVAPSARGALRQSPAITLMITRKASNASPPKLKDPSLFKQDVCYVNGKWVKAKSGKTFKVNDPSTGDLIGTCPEFDSKDAQLAIRAAADAFPSFRNKTGRERSKLLRAWYEQMTANAEDIAKLITWENGKPMADAKGETTYAANFLEWFSEEAPRVYGDTIPSSVPGNRVWTLKEPVGVCGLITPWNFPAAMITRKIGPALAAGCTVVAKAPAETPFTSLALAELAHRAGIPKGVVNVVTSHENTPELGELLTSDPTIRKVSFTGSTNVGKLLMKQSAGTLKKLSMELGGNAPFIVFDDADADAAVAGAITSKFRSSGQTCVCANRIYVQRGIYDEFVSKFTEKVKSFNVGHGFDQGVTHGPLIHDKAIEKVEAHVKDAEKKGGKVTIGGKRLSDLGSNFYAPTVIRDMTPEMDMASQETFGPVAGLFPFETEEEVVKMANNTEVGLAGYFFSRDLERVHRIAEALEVGMVGVNTGLISDAAAPFGGVKESGFGREGSLYGISEYQITKMITYGVYYGEGSNEYNIHTLNHENVVVITFALQIIERAKCRRFEPCHDQRNFDLYLDPRNAQNRFNHNTLFEMAFSLANAPLRTCLRQLVRSKGPAPLRSIAASPRAFSTSHVLLKKRKISAPANSPNTATAKAAAGSMNKAEYDTAKVPAPDPEDPLDFTAVIAAYAPIDAHFKTQLAGMIHGGRFNPTNLGSLPVTIKDEEGADATFPLRELAQVVPRSGRAISLLVNDKEYIKPIMSAVQSSREFNQQPQRSEDNELELLLKVELERKDDVERRVKEAVQQWKDRIRNARSRHEKTLKDWKKNGTVLPDIVKKAEKELQKVQDKKMKEIDQEEAQTIRQL

SEQ ID NO: 24574 - protein, 138 aa, Glycine max
MASLTSDNEQPPTNSNSSSTDHVRKKKSLFASSPSSSRGNAASVPTRDGDSHPRWRSEKQQRIYSAKLIQALRQVRLSSSSSATTSSPTAQKRGKAVREAADRALAVSARGRTLWSRAILANRIKLKFRKQKRPRQTV

SEQ ID NO: 24575 - protein, 574 aa, Oncidium Gower Ramsey
FGAFIVLCGATHLINLWTFTMHSRTLAIVMTVAKVSTAVVSCATALMLVHIIPDLLSVKTRELFLRNKAEELDREMGLIRTQEETGRHVRMLTHEIRSTLDRHTILKTTLVELGRTLDLAECALWMPLRTGLHLQLSHTLNNKIPGGSGGSINLPIVNQIFNSSRAGRIPNTCPLARFQPYTGRYVPQEVVAVRVPLLHLSNFQINDWPELSPKSFAVLVLMLPSDSARKWHAYELELVEVVADQVAVALSHAAILEESMRARDLLMDQNVALDLARREAEMAIRARNDFLAVMNHEMRTPMHAIIALSSLLLETELTPEQRLMVETILKSSNLLATLINDVLDLSKLEDGSFELEATIFNLHTVFREAVNLIKPIAAVKKLSLFVSLAPDLPSCAIGDEKRLLQIMLNVVGNAVKFTKEGTIFITANIAKPDSLRDPDFYPAPTDGHFYLRVQVKDTGCGISPQELPHLFTKFAHTQNGSDKGYSGSGLGLAICKRFVNLMKGHIWLESEGIGKGCTTIFIVKLGMSEDPTPRYQQKLLPPIRAGQAEADPFGLKPAAPKDELMPKIRYQRSL

SEQ ID NO: 24576 - protein, 248 aa, Solanum tuberosum
MENSVPRTVEEVFSDFKSRRAALIKALTTDVEKFYQQCDPEKENLCLYGLPNETWEVNLPVEEVPPELPEPALGINFARDGMQEKDWLSLVAVHSDSWLLSVAFYFGARFGFGKSERKRLFQMINDLPTVFEVVTGAAKQTRDPPHNNSNKSKSSGKPRQPESQLKAVKVSPPKMENDSGEEEEEEEDEQGATLCGACGDNYATDEFWICCDICERWFHGKCVKITPAKAEHIKQYKCPSCSSKRAKV

SEQ ID NO: 24577 - protein, 356 aa, Zea mays
MEDSSQFMQWALSTLQHDELPPATPPAAIAYDDNGCNTFSSVPALGYSAASVNSMVPAEPPAQEGPRATTATNSWSSADTASVTAAQRDAWSPSSQQNSVNCATPRSSGSSQPVSWDFHSASASASAQLIIKEAQVNSATAARAESAAGGMPVPQPQMVQNGSPPTRRASAKMSSASSSAPPCSQDHIVAERKRREKINQRFIELSAVIPCLKKMDKATILSDATRYVKELQEKLKALQQGGSCNARGGTESAPVLVKKPRIAAPGDDDKDRGGAPSPSCAPPGAAATTGNALPEIEARISDGNVVMLRIHCEDGKGVLVRLLAEVEGLRLSITHTNVMPFSACILIINIMAKASC

SEQ ID NO: 24578 - protein, 1175 aa, GIBBERELLA ZEAE PH-1
MASAYNVRITTSQTTPHRTISSLIMTSSLSIEEFLEPLSVDIDKIEQLSQNFLETFEKLASDSENQGGTNLRVGFVQLGNDASSATSDQLNGHVGNGPDEGATTRQVRRLLEKSWPIDEHLKNENPDSLFLWIGQCIAEVVQDGCKTLQLKADQPMPLGVTFSFPMVQHSISQATLMPMGKGFAISSDQDLGGRLTDGYNRAKSPDLPPIRVEAIANDSVSTLVSFIFNFHEASNRRACMGLILGTGCNATIPLKLSQLSPSKRPPSVVARPEERAEDVNIAINTEWSINGTAPPLYDVGLVTRWDRALDQQGELNSFQPLEYLTSGRYLGELGRLMLVDYLTEHLGIAAGTLPKALLQRHNLTTTYLSHFKPLQPSTLMTSLQQEFPESSGSPPFEWTEEIATALYRIAKAIEVRAAGIVAAATLALLTLAGDVPMDGAHALDRDCELGVGYTGGCIVHFQNYLQDCQDFLDELLSKRFGDESPLRVRQELFSRDSLGLLGFQQPLQFNHLQVACADDSSYLRGGYSIVVMSPQKTSPVSDAPTTRPVPVPVRTNSRGSESDQDVVDPTAYEALSRSFTTGAHFLQPESLESAMLRPSSYKASLHLHRGVDEEDQGAVTEGDDESEISTDLDDEGPNEETPLVRHQSRRLSLTGRSTISVDVTPSPFLNNTSPTRFWFIFSQILAAYFISCFDGTIMASSHPVVSSYFNASNSASWFSTAFLLTSSAFQPLLGRLSDALGRKPLFVGAMGIFAASITWSSLAGSIESFILSRAFCGIGAGGVMTLGSIIVSDLVPIENRGAYQSYINMNYGVGSSLGAATGGAIADSLGWRWEFGIQVPPLLICMVVAWIAIPDDLGIQGQRKSVWQALREFDFRGSLLLTTAITSVILGLTLGGNVMPWSHPIVIASLVLFAITFPLFIWVESWVHKPIMPLHLIYKAPRANLVASNAIAALIANSILFNIPLYFQAVLLTTATSSGLRLIIPTIAASATGTFTGFAVTYTGRLKWPVQIGTICTLIGTIGLASLQRDLPSWVYLFILMPSSIGQGFQFPGTFMAILAASDQSEQAVVTSTLMLWRSLGQVLGVASSSLVVQNALFHYLKQFVTGEDRDEIIRHVRESVEEIIKLEPKYREQVILSYEAALRLTFICCIVVALASALIVVPIKLPRLGVRKHK

SEQ ID NO: 24579 - protein, 419 aa, Frankia sp. CcI3
MSTSAEDVRGSAVRAKAAAALLAPRSRAEKDRALLAMADALIARSAEILAANAEDLAAARAAGTAGAMVDRLTLTPARLAGMADGLRQVAALEDPVGEVVRGRVLPNGMELRQIRVPLGVVGIIYEARPNVTVDAAGLCLKSGNAALLRGSASAVRSNTALVAVLRGAAVASGLPADAVQLVPGMDHDAVKHLMRLRGLVDVLIPRGGAGLIRAVVEESTVPVIETGVGNCHVYVDAEADLDQALAITVNAKTQRVSVCNSAETLLVHAGVAGEFLPRVLAALHDAGVTVHGDETVCAVDPRVLPATDDDWAAEYLSLDMAVAVVDSLDDAVAHIRRWGSGHTEAIVTRSLPASRRFITTCDSAAVMVNASTRFTDGERFGMGAEIGISTQKLHARGPMGLPELTSTTWVGVGDGHLVT

SEQ ID NO: 24580 - protein, 145 aa, Magnetococcus sp. MC-1
MSTLMSYDPFHRVRTLQNELNRLFDPGWDDGNSQMAKLSMGVDIREDENQIVIKADLPGMSQEAIQVNVEHNTLTISGERTFGDEVNRDRYHRVERAYGRFSRSFQLPNTTDTANIKASYVNGVLEVALPKREESKPRAIQIEVQ

SEQ ID NO: 24581 - protein, 93 aa, Filobasidiella neoformans
  misc_feature (20)..(20): Xaa can be any naturally occurring amino acid
  unsure (1)..(93): unsure at all Xaa locations
WHGLRQLGTAFMDGVPGITXCPIPPGGSFTYNFTVSHQSGTFWWHSHYSNSMADGIWGPLIVHSANEPLQRGRDYDEDRIVFITDWMHDNSEI

SEQ ID NO: 24582 - protein, 371 aa, Frankia sp. CcI3
MRPFVTDARRVVVKVGSSSLTTAAGGLDVDRLEALVAAVLPRAGQQLVLVSSGAIAAGLAPLGLARRPRDLATQQAAASVGQSSLVHSYAAAFGRAGHQVGQVLLTATDVIRRTHYRNARTALDRLLELDVIPIINENDAVATQEIRVGDNDRLAAIVAHLVSADLLVLLSDVDGLYDANPRLGPATMVREVRSDTDLDGLTARGTGTAGVGVGGMATKIEAARMAASGGVTAIITSAANAAPVLRGEEVGTVFHPTGSRRASRLLWLAHATAPEGRLHLDSGAVAAVVRRRASLLPAGITGVEGDFAAGDPVDLVDPDGRSVARGLVAFDAAELPVMLGRSTADLAMELGPSYEREIVHRDDLVLLLPAR

SEQ ID NO: 24583 - protein, 686 aa, Bacillus circulans
APDTSVSNKQNFSTDVIYQIFTDRFSDGNPANNPTGAAFDGTCTNLRLYCGGDWQGIINKINDGYLTGMGVTAIWISQPVENIYSIINYSGVNNTAYHGYWARDFKKTNPAYGTIADFQNLIAAAHAKNIKVIIDFAPNHTSPASSDQPSFAENGRLYDNGTLLGGYTNDTQNLFHHNGGTDFSTTENGIYKNLYDLADLNHNNSTVDVYLKDAIKMWLDLGIDGIRMAAVKHMPFGWQKSFMAAVNNYKPVFTFGAWFLGVNEVSPENHKFANESGMSLLDFRFAQKVRQVFRDNTDNMYGLKAMLEGSAADYAQVDDQVTFIDNHDMERFHASNANRRKLEQALAFTLTSRGVPAIYYGTEQYMSGGTDPDNRARIPSFSTSTTAYQVIQKLAPLRKSNPAIAYGSTQERWINNDVLIYERKFGSNVAVVAVNRNLNAPASISGLVTSLPQGSYNDVLGGLLNGNTLSVGSGGAASNFTLAAGGTAVWQYTAATATPTIGHVGPMMAKPGVTITIDGRGFGSSKGTVYFGTTAVSGADITSWEDTQIKVKIPAVAGGNYNIKVANAAGTASNVYDNFEVLSGDQVSVRFVVNNATTALGQNVYLTGSVSELGNWDPAKAIGPMYNQVVYQYPNWYYDVSVPAGKTIEFKFLKKQGSTVTWEGGSNHTFTAPSSGTATINVNWQP

SEQ ID NO: 24584 - protein, 437 aa, Escherichia coli
MTHDNIDILVVDDDISHCTILQALLRGWGYNVALANSGRQALEQVREQVFDLVLCDVRMAEMDGIATLKEIKALNPAIPVLIMTAYSSVETAVEALKTGALDYLIKPLDFDNLQATWKKRSHTHSIDAETPAVTASQFGMVGKSPAMQHLLSEIALVAPCEATVLIHGDSARKELVARGLHASSARSEKPLVTLNCAALNESLLESELFGHEKGAFTGADKRREGPFVEADGGTCLDEIGDISPMMQVRLLRAIQEREVQRVGSNQIISVDVRLIAATHRDLAAEVNAGRFRQDLYYRLNVVAIEVPSLRQRREDIPLLAGHFLQRFAERNRRGKRFYAPGLDLLIHYDWPGNIRELENAVERAVVLLTGEYISERELPLGIASTPIPLGQSQDIQPLVEVEKEVILAALEKTGGNKTEAARQLGITRKTLLAKLSR

SEQ ID NO: 24585 - protein, 546 aa, Bacillus cereus E33L
MEENQDMNSLDEQDVKRETLTTRQGHPVKDNQNIRTIGNRGPATLENYHFIEKISHFDREEVPERVVHARGAGAFGYFETYGKVGDEPVEKYTRAKVFSGAGKKTPLMVRFSTVAGAKDSPETARDPRGFAVKMYTEDGNWDLVGNNLKIFFIRDAMKFPDMIHAFKVDPVSNVANPQRMFDFVSRTPEATHMITFLFSPWGIPATYRHMQGSGVNTYKWVNEKGEAVLVKYHWEPKQGIRNLTQEDANSIQAMNVSHATQDLYEAIERKDYPEWELFVQIMEDDYHPELDFDPLDDTKLWPEEQFPWLPVGRMVLDRNPVDYHSDIEQAAFGTGVLVDGMDFSDDKMLQGRTFSYSDTQRYRVGANYLQLPVNAPKAPVRTNQHRGQMDMRNPKESGENPHINYEPSMLGGYKDAKQEKHHPHQPTYNAAAMSAPIDRPNNYGQAGHTYRSFEEWERNELVKNLSEALAVCDKRIQNAMIEHFTQADEDYGRRVKEGIEKKMKEAKTENKLPGREVSKSKYGQGSLAANEATKDAVKKSHESDPY

SEQ ID NO: 24586 - protein, 469 aa, Bacillus cereus E33L
MKSSIDSIQKSKKLKNQEKGERATWKSMSMFLVPLLLSNILQSVGQLFGMVVVGRWLGVNELAAISAFFPLFFLLVSFVIGIGSGSSILIGQAFGARNEDRLKAIVGTTLTFTFIIGVILAIAGNVFALKIMRFMGTPENIIDMSVHYARILFISMPVLFLYFSYTTFIRGTGDSKTPFYFLIVSTVLNIILLPILIFGWLGIPKLGVYGAAYASVISTVVTFIVMLMYLKKKNHPLQLDETVRKYLRMDWNLLKLLLRLGIPASINMILVSLSEIAVIVFVNRFGSDATAAYGVVNQVASYVQMPAVSLGITVSIFAAQSIGGKQFNRLQEVIRAGIIMNYIIGGILIAFIYLFSREILSLFLTNTNTVEIAHSLVMITLWSYLIFGHAQIIGATMRASGTVLWPTIIGVVSIWLVEVPVAYYLSYHTNLGIKGIWIGYPAAYIASLLLQYGYYRISWKKKRISRLVS

SEQ ID NO: 24587 - protein, 332 aa, Schizosaccharomyces pombe
MNSNFSYPALGVDGISSQISPIRDVWSTNLQQEMNLIMSLIERYPVVSMDTEFPGVVARPLGVFKSSDDYHYQTLRANVDSLKIIQIGLALSDEEGNAPVEACTWQFNFTFNLQDDMYAPESIELLTKSGIDFKKHQEVGIEPADFAELLIGSGLVLQEEVTWITFHSGYDFAYLLKAMTQIPLPAEYEEFYKILCIYFPKNYDIKYIMKSVLNNSKGLQDIADDLQIHRIGPQHQAGSDALLTARIFFEIRSRYFDGSIDSRMLNQLYGLGSTGSVLWHNNSSTPQIQFRDLPGAHPSPTPSNAGIPTTLTNTSSAPNFANSTFRFPPRVV

SEQ ID NO: 24588 - protein, 307 aa, Oryza sativa (japonica cultivar-group)
MEQKDEAEMEEVDEEEEEEVDEDMAGGHAAQSPSPSCGLGEKKRRLALEQVRALERSFDTDNKLDPDRKARIARDLGLQPRQVAVWFQNRRARWKTKQLERDFAALRARHDALRADCDALRRDKDALAAEVRAHRCVLPDARESLSLTFNSCSIDQIRELREKLPTKPADTAASVKVEAGNDAAAGAAAATVCKDGSSDDSDSSVVFNDEASPYSGAAFIGFGPSFLVDDASAATVGCSSSLPALESKWHGPYSDDSCKGGVYGFTEEWLAACSGEMAGNDAAGFFSDEHASNLNFGWCASGNEGWE

SEQ ID NO: 24589 - protein, 544 aa, Caulobacter vibrioides
MAAKDVYFSSDARDKMLRGVNILANAVKVTLGPKGRNVVIEKSFAAPRTTKDGVSVAKEIELADKFENLGAQMIREVASKTNDKAGDGTTTATVLAQAIVQEGLKSVAAGMNPMDLKRGIDKAVAIAIEDIKTSSKKVTTNAEIAQVGTISANGDKEVGEIAKAMDKVGNEGVITVEEAKTAETELDVVEGMQFDRGYLSPYFITNADKMEVQLEEPLILLSRKKLSSLQPLPVLEAVVQSGRPLLIIAEDVEGEALATLVVNKLRGGLRVAAVKAPGFGDRRKAMLEDIAILTGAQVVSEDIGIKLENVSLEMLGRAKKVSITKDDTTIVDGVGEKADIEARIAQIKRQIEDTTSDYDKEKLQERLAKLAGGVAVIRVGGSTEVEVKEKKDRVDDALNATRAAADEGIVPGGGTALLKASKASAVVGDNDDQTAGIAIVRRALQAPIRQIAENAGVEGSIVVGKILENDNSAFGFNAQTEQYVDLVVDGVIDPAKVVRTALQNAASVAGLLITTEAAIVVSPQEGRRRPAGGGMPGGMGDMDF

SEQ ID NO: 24590 - protein, 230 aa, Arabidopsis thaliana
MQIFLKTLTGKTKVLEVESSDTIDNVKAKIQDIEGIPPDQHRLIFAGKQLEDGRTLADYNVQEDSTLHLLLRFRGGMQIFVKTLTGKTITLEVESSDTIDNLKAKIQDKEGIPPDQQRLIFAGKQLEDGRTLADYNIQKESTLHLVLRLRGGMQIFVKTLTGKTITLEVESSDTIDNVKAKIQDKEGISPDQQRLIFAGKQHEDGRTLADYNIQKESTLHLVLRLRGGSF

SEQ ID NO: 24591 - protein, 488 aa, Methanosarcina barkeri str. fusaro
MCGIAGAAGTPDTNEEVKRMLAALGHRGPDACGTYQAKGLSIGNTLLKITGDMLQPLVGKGALVLNGEIFNFRELAAEQGIKTNSDTEVLFALIETKIKEGETPTNAIFSVLSRVNGDYALAYVLGNKLVLARDPVGVKPLFYSLEKEGKKPKLAFASEKKAFSSQKDQIKSFPPGRVMAFDIRNGRLEEKSLTIDPPQERISEEHEASSRLKAALEKAVEIRLTKTSGIAFSGGIDSTFLAALAKNIDPSISLYAVGLPDSHDLVQAQRAAEVAGMSDSLKTHTLSPEEIEAAIPNVIYSTESTDPMKIAIGLPLYFVAKTAKEDGKRVLLTGQGADELFGGYNRHKALLEHGPKVLDRAIYTDLKNISTINLERDDMVTMANSVELRVPFLDKEVIKTGLAISPELKVLKRDSLYIRKYILRKAADGLLPSELLWKEKKAIQYGTGVQKVLDRLAREAGFSKREGNHIEKYLKKVAENQGFDFIFR

SEQ ID NO: 24592 - protein, 574 aa, Oncidium Gower Ramsey
FGAFIVLCGATHLINLWTFTMHSRTLAIVMTVAKVSTAVVSCATALMLVHIIPDLLSVKTRELFLRNKAEELDREMGLIRTQEETGRHVRMLTHEIRSTLDRHTILKTTLVELGRTLDLAECALWMPLRTGLHLQLSHTLNNKIPVGSVVSINLPIVNQIFNSSRAGRIPNTCPLARFQPYTGRYVPQEVVAVRVPLLHLSNFQINDWPELSPKSFAVLVLMLPSDSARKWHAYELELVEVVADQVAVALSHAAILEESMRARDLLMDQNVALDLARREAEMAIRARNDFLAVMNHEMRTPMHAIIALSSLLLETELTPEQRLMVETILKSSNLLATLINDVLDLSKLEDGSFELEATIFNLHTVFREAVNLIKPIAAVKKLSLFVSHAPDLPSCAIGDEKRLLQIMLNVVGNAVKFTKEGTIFITANIAKPDSLRDPDFYPAPTDGHFYLRVQVKDTGCGISPQEFPHLFTKYAHTQNGSDKGYSGSGLGLAICKRFVNLMKGHIWLESEGIGKGCTTIFIVKLGMSEDPTPRYQQKLLPPIRAGQAEADPFGLKPAAPKDELMPKIRYQRSL

SEQ ID NO: 24593 - protein, 155 aa, Aspergillus fumigatus
MTICVLGDQHDLDRAKHHGIDAMSADDLKKLNKNKKLIKKLARKYDAFLASDTLIKQIPRLLGPGLSKAGKFPTPVSHSEDMANKVTEIKSTIKFQLKKVLCLGVAVGNVGMTKEELVANVMLAINYLVSLLKKGWQNVGSLVLKATMSPPKRLY

SEQ ID NO: 24594 - protein, 241 aa, Geobacter metallireducens GS-15
MIRVYLDREALSMAAAELFATAAHSAMRDTGRFAVALAGGDTPRRTYEILAHEPFRKRVPWEKTHVFWGDERCVPAADPRNNARMASRALLDHVLVPDGQVHPMVCGRAPQDAAKEYEALLRSWFPGELPRFDLILLGLGENGHTASLFPETPVLDERRRWVADVSPANDGMHRLTLTVPVINQASRVVFLVSGANKAPILREVLEGSPDPHRIPACLIRPAGQLVWLVDRDAARLLRNAT

SEQ ID NO: 24595 - protein, 75 aa, Arabidopsis thaliana
  misc_feature (15)..(15): Xaa can be any naturally occurring amino acid
  unsure (1)..(75): unsure at all Xaa locations
MLDKLIIGVAGGLPXRILGTVDGFAKGVGIWPNNYQNTGGFENNNKTSPGNYGNGNGGAVKASENSGGRRQKDRE

SEQ ID NO: 24596 - protein, 415 aa, Desulfovibrio desulfuricans G20
MTGKRVVVTGLAAITPLGNNVETSWENLIAGKSGIGPITRFDASEYTSRVAGEVKGLDLGEYIPPKQARRMDRFTQYAVACAKQLMKHAEYTVPEETAHRVACLLGVGLGGLETIEQFHTKLVEAGPNRISPFMIPQLISNMAPGQIAMEIGAKGGNVVMTSACASGTHAIGYAFTEVKVGRYDAVVTGGAESTITPMGVSGFTALRALSTASNDAPEKASRPFDANRDGFVIGEGAGLLLVESLESARARGATIYAEIVGFGSSDDAFHMTAPRDDAEGMARAMLMAIEEAGISPADVDCINAHGTSTQLNDKSETLALKKVFGDHASKLRISANKSQTGHLLGAAGGVEGVFSCLTLATGTVPGTANYETPDEDCDLNYMGGGSESYQAQYVLSNSFGFGGTNACMLFKRWEG

SEQ ID NO: 24597 - protein, 254 aa, Bradyrhizobium japonicum USDA 110
MNISFEGQVALVTGAASGLGLATAKAFAESGASVALADWNEDAVRAAAGELVTRGHKAVAIRCDVSNDAQVEAMVAQTVSVFGRLDAAYNNAGVQNVLAETADTTREDYDRVMGINLRGEWSCMKFELQQMRKQGSGAIVNCSSLGGLVGGAERGIYHAAKHGVLGFTKSAALEYAARGVRINAICPGLIWTPMADQMVAAGQGDALRALEKSVPMGRVGRPEEIASAVLWLCSDAASYVTGQSISVDGGFIMR

SEQ ID NO: 24598 - protein, 373 aa, Arabidopsis thaliana
MGYLFEETLSSNPKTPIVVDDDNELGLMAVRLANAAAFPMVLKASLELGVFDTLYAEASRTDSFLSPSEIASKLPTTPRNPGAPVLLDRMLRLLASYSMVKCEKVSVGKGERVYRAEPICRFFLKNNIQDIGSLASQVIVNFDSVFLNTWAQLKDVVLEGGDAFGRAHGGMKLFDYMGTDERFSKLFNQTGFTIAVVKKALEVYQGFKGVNVLVDVGGGVGNTLGVVTSKYPNIKGINFDLTCALAQAPSYPGVEHVAGDMFVDVPTGDAMILKRILHDWTDEDCVKILKNCWKSLPKNGKVVVIELVTPDEAENGDINANIAFDMDMLMFTQCSGGKERSRAEFEALAAASGFTHCKFVCQAYHCWIIEFCK

SEQ ID NO: 24599 - protein, 431 aa, Rubrobacter xylanophilus DSM 9941
MPLLRVPQDGGRGGPPQARRGGAQAARGGRTAEGRRGAAEGPRAGDGEGLGRRPGARPQPTGERLRAPVARSLCYIGVEEEDEREGEVIRMDKGQLESTARALVAPGKGILAADESFGTIGKRFKAVGIESTEDTRRRYRQMLFTTPGIGEFLSGVILFDETIRQKADDGRPLPRVLEDQGVIPGIKVDKSTTALPLSPQEKFTQGLDGLRERLEEYRGMGARFTKWRAVITIGEGIPTERCIGANAHGLALFAAFSQEAGLVPIVEPEVLIDGDHTIERCYEVTEWTLNRTFDYIYEMGVELSGMLLKPNMVISGKDCPEQAGVEEVARMTVECLKRSVPAAVPGIVFLSGGQSDIQATAHLNAMNRLYDDLPWELSFSYARALQGRPMEIWKGDDANVEAAQKAFYHRAKMNSAARSGSYSEEMEKEAA

SEQ ID NO: 24600 - protein, 582 aa, Pyrus communis
MFRALAIGLLVLCFVTLVSGSDHDFGTCNCDEEGFWNLHIGECDKVSDFLIAIAYFSIPIELLYFVSCSNVPFKWVLLQFIAFIVLCGLTHLLNAWTYYGRYTFHEMLSLTIAKFLTALVSCATAITLLTLFPMILKVKVRELFLRQNVMELDQEVGMMKIQKEASWHVRMLTQEIRKSLDKHTILYTTLVELSKTLDLQNCAVWMPNEKRGEMNLTHELKTSSSRQYRRSIPINDPDVLEIRESERVMILRPDSALGSASSGESSESGAVAAIRMPMLRVSNFKGGTPQLVDTHYAILVLVLPVADSGGWSHHELEIVEVVADQVAVALSHAAVLEESQLMREKLAEQNRALQQAKKNAMMASQARHSFQKAMSHGMRRPMHMILGLLSMFQENLSFKQSIIVDTMEKTSYVICTLINDVMEMSAKDNERFPLEMRPFELHSMIKEAACLAKCLCMYKGFSFEIDVQSSLPNQVIGDEKRTFQVLLHMIGYLLSTYNGGGTVIFQAISVSGTDGPDDRLQGMWRIGIPDEYICIKFEFEINEANSYPGGLVASTHDARRQHNNDAIKKGLSFSICKKIVQV

SEQ ID NO: 24601 - protein, 490 aa, Cucumis melo
MVLVSSNDNGNAKKVLSKLAKGNGHGEDSSYFDGWKAYDSDPFHPIINPRGVIQMGLAENQLSFEFVEKWMKNNPQASICSVEGIDEFKDIAIFQDYHGLPEFRNAVANFMGKVRGNRVKFDPDRVVMSGGATGAHETMAFCLADPGEAFLVPVPYYPGFDRDLRWRTGVEIVPVKCESSNNFKLTREALETAYEEAEKSNIRIKGLLITNPSNPLGTVYDRQTLETAVSFINEKNIHLVCDEIYAATVFAEPGFISISEVIDNMNDVECDRNLIHVVYSLSKDMGFPGFRVGIIYSYNDAVVACARKMSSFGLVSSQTQYLIASMLSDDVFVDNFLAGSAEKLAVRHRNFTKGLAQVGIGYLKGSGGLFLWMDLRHLLKEKTLEAEMALWKVIINEVKLNVSPGSSFHCSEPGWFRVCFANMDDSTMDISITRIRNFVLQNKEVTTKVKKQKFCWRQSSLELRLSSRRLEDIMSPHSPLPQSPMLRATT

SEQ ID NO: 24602 - protein, 377 aa, Oryza sativa
MAGDGLPRIAVVGAGIFARTQYIPRLREIAHLVLLKTIWSRTKVSHTQIIHRTPLSCRSLDLTIPLQESAEAAAELARDFAPEIQPRWGDAGLEEIMGDASISAVAVVLAGQVQVDLSLKMLKAGKHVIQATMEAETALSVYNSFPNQFPYKPIWALAENYRFEPAFVESRKLMSDIGDMMNIQVIVEGSMNSSNPYFNSSWRRNFVGGFILDMGVHFIAGLRMMVGSEIATVSSISRHVDKALPPPDNICSLFQLENGCAGVFVFAVNSRTPKILWRVDGTRGTVQIERGIASGKHGYQVLFTNENGQCQTTFYPFCGVNEELKAFVHDIVQANKDGDHKAEPRSSYVEGARDVAVLEAMLESSAKQGTMVQVKKF

SEQ ID NO: 24603 - protein, 472 aa, Silicibacter sp. TM1040
MARIDPTPQMSYGGHIRAVSILGLPLIGGHLAQFAIGLTDTVMLGWYGVNELAAVTLAGSFFFVWFILGAGFAFAVMPMVASATATDDHRRIRRATRMGLWLSIVYGVLSMPLMWYSETILLAAGQEAQVAADAGTYLRIAGWGIFPALLVMVFKSYLAGLERTQVVLWITVLAAVINAIVNYVLIFGHLGLPEMGLQGAALASLATQTVSVVAVVAYALWRLPEHDLLRNLQRPDWEMMREIVRHGLPIGLTTLCEVSLFSASALMMGWLGTVPLAAHGIAVSVAGLTFMAHLGLSNAATIRVGNALGRGDKTHMVRGAIVVTLASLGIAVATAMVFFLAPEPLILLFLDPEDPQKTEILAIGVSLLAMAGLFQLMDGMQAIALGLLRGLLDTGVPMVMAALSYWAVGVPTSYILGFRAEMGGVGVWIGLILGLSTAGVLLLLRFWFHALRRVPTAPTGEMRADEIMADPV

SEQ ID NO: 24604 - protein, 497 aa, Oceanobacillus iheyensis HTE831
MTALTLETDVLKNFIDGKWVDVNNTTAVTNPANGERIVQVPLSDQSHVEEAVQAAIKAQKEWALVPAPQRAEVLYRVGMIMKDKKERLSRLLTMENGKVLEEARGEVQEGIDMAFYMAGEGRRLFGQTTPAELKDKFAMSQRVPVGVVGIITPWNFPIAIATWKSFPAIVAGNAVVWKPATETPIMAYELAKIFEEAGLPSGVINVVFGKGSEVGDSMVQHKDIRVISFTGSNDTGRNIASDCGKQLKKVSLEMGGKNAVIVMDDADLDLAVEGILWSAFGTSGQRCTACSRVIVHHKVKKTLEERLLAAMDHLTIGNGLEDGIKVGPIINEAGLNKIKKYIEVGKQEGATLLAGGTEWETNNPGYYFTPTLFTDAKPDMRIAQEEIFGPVVSLIEVSSFEEAIEVNNQVTFGLSSSIFTKDVNRVFKAQRDLDTGIVYVNAGTTGAEIHLPFGGTKGTGNGHRDSGVQALDVFTEWKAIYVDYSGKLQRAQIDTEE

SEQ ID NO: 24605 - protein, 586 aa, Triticum aestivum
MDSTDRFDKSPLLDGGSSSQENSTEYTGDGSVCTSGHPASRKHTGNWKVSSLTIVCSFCCYLAYSSIGKNLVSYLTKVLDETNLDAARHVATWQGTSYLAPLVGAFVADSYLGKYRTALISCTIFIMGMMMLLLSAALPLISAGPHAWTLWADPISSRYIIFLVGLYMVGLGYGAQCPCVTSFGADQFDDTNEMEKTRKSSFFNWHYFSINAGSLIAGTVIVWVQEHEGWLWGFTISTLFVTLGISVFFLGSIVYRFQKPGGSPLARIWQVVVAASRNFDKVLPCDSSALYEFSGQGSAIEGSRKSEHTSGLEFFDKAAILTLPDCESPGQLNKWKICTVTQVEELKILIRMFPIWSAMVLFAAVQEQMFSTFVEQGMTMEKHVGSFEIPTASFQSIDTLTVIMLVPIYERVLVPVIRKFTGRANGISSPQRIGIGLCFSMLSMVLAALVESNRLQIAQSEGLVHSKVTVPMSILWQGPQYFLLGVAEVFSNIGLTEFFCDESPDAMRSLGMAFSLLNISAGNYLSSFILSLVPVFTARGGSPGWIPDNLNEGHLDRFYLMMAGLSLLNIFVFVFYARRYKCKKAS

SEQ ID NO: 24606 - protein, 289 aa, Legionella pneumophila subsp. pneumophila str. Philadelphia 1
MSDYLDKTASLTPAIKRIVCDKATEYPHTGSYNQVATHGTYLCRRCGLALFRGVSQFSSGCGWPSFDDEIANAVARKPDADGQRTEILCARCDAHLGHVFTGEYMTYKNLRHCVNSASLDFVADNEVLDTEEAILAGGCFWGVEYYLKRTPGVLKVESGYTGGHVSEPSYEQVCSGTSGHYEAVRVVYDAAKTNYHDIVKRFFEIHDPTQTNGQGPDLGHQYLSAVFYFNQEQRQEAELLIQLLKKRGYQVVTQLLQAQPFWPAEDYHQDYYFKHHKIPYCHKSVDRFG

SEQ ID NO: 24607 - protein, 401 aa, Thermus thermophilus
MPEAWIVEAVRTPIGKHGGALASVRPDDLLAHALSVLVDRSGVPKEEVEDVYAGCANQAGEDNRNVARMALLLAGFPVEVAGCTVNRLCGSGLEAVAQAARAIWAGEGKVYIGSGVESMSRAPYAVPKPERGFPTGNLVMYDTTLGWRFVNPKMQALYGTESMGETAENLAEMYGIRREEQDRFALLSHQKAVRAWEEGRFQDEVVPVPVKRGKEEILVEQDEGPRRDTSLEKLAALRPVFREGGTVTAGNSSPLNDGAAAVLLVSDDYAKAHGLRPLARVRAIAVAGVPPRIMGIGPVPATRKALERAGLSFSDLGLIELNEAFAAQALAVLREWSLSMEDQRLNPNGGAIALGHPLGASGARILTTLVHEMRRRKVQFGLATMCIGVGQGIAVVVEGMG

SEQ ID NO: 24608 - protein, 371 aa, Bacillus licheniformis ATCC 14580
MGKQGVFKPGLEGVIAGETNISFLDTEAEQIVIKGYDLIELAEQKTYLDLVYLLLQDKLPDPMELKGIESALKSAYELPGGIYTILKSLPNNTHPMDALRTGISALAGYDPELNDRSQAANRSKALRLIAQVPNITANSYRILHQKNVITPDKQLSFSQNFLYMLTEKEPTPQETAVFDQTLMLYSEHEMPNSTFAARVIASTNTDIYGAFTGAAASLKGHLHGGANEAVMYMLLEGETKSGFCKLIEHKLSRKEKIMGFGHRVYMRKMDPRAALLKKALYSLSHKTGRQDLYEMCDAGEKLMREEKGLYPNLDYYAAPVYYLLGIPIDLYTPIFFAARSVGLSAHVIEQHEDNRLFRPRVHYTGPRHLHP

SEQ ID NO: 24609 - protein, 181 aa, Zea mays
  misc_feature (134)..(134): Xaa can be any naturally occurring amino acid
  misc_feature (164)..(164): Xaa can be any naturally occurring amino acid
  unsure (1)..(181): unsure at all Xaa locations
MRPILMKGHERPLTFLRYNRDGDLLFSCAKDHTPTLWYADNGDRLGTYRGHNGAVWSCDVSRDSARLITGSADQTAKLWEVSTGKELFSFRFDAPARSVEFAIGDALAVVTTDNFMDHVPTVQVKRIAEDINDXTEESALVITGIKGRINRAVWSPLNRTIITXAGEDATIPIWDSEVPHE

SEQ ID NO: 24610 - protein, 271 aa, Methanosarcina mazei Go1
MKTELKAVLKRPKISEKFDELREKKEGALIGYVMAGDPTFEASSEVVKALAKGGADIIELGFPFSDPVADGPTIQVAGQRALAEGMDIERYFAFARALEVDVPLVCMTYYNPVFRYGVEKFVENAAEAGISGLIIPDIPVEEAADLKTGCDAHGLDLIFLVAPTTTEARIRKILQRGSGFIYLVSRLGVTGARDDVAGSTKELLSRVNTDIPKAVGFGISTGEQAAEVRKAGADGVIVGSAFVRIIEEGTDVNERLETLARELKSGMLEAN

SEQ ID NO: 24611 - protein, 237 aa, Zea mays
  misc_feature (171)..(171): Xaa can be any naturally occurring amino acid
  unsure (1)..(237): unsure at all Xaa locations
MMASITSELLFFLPFILLALLALYTTTVAKCHGTHQWRRQKKKRPNLPPGARGWPLVGETFGYLRAHPATSVGRFMERHVARYGKIYRSSLFGERTVVSADAGLNRYILQNEGRLFECSYPRSIGGILGKWSMLVLVGDAHREMRAISLNFLSSVRLRAVLGSPEVERHTXLLVLRSWPPSDGTFSAQHEAKKFTFNLMAKNIMSMDPGEEETERLRLEYITFMKGVVSAPLNFPGR

SEQ ID NO: 24612 - protein, 253 aa, Glycine max
IRPLSSAHVPAPRCFYNPSIFSLLSTPAAATTLVEQASAAPSPTPAMADPAEHREEEEEAAAAGEEEDTGAQIAPIVKLEEVAITTGEEDEDVLLDMKAKLYRFDKDGGQWKERGTGAVKLLKHKETAKVRLVMRQAKTLKICANHLVVATTKMQEHAGSDKSCVWHALDFADCELKEEMFAIRFGSVESCKKFKDLVDDIAEQQGKNEEKESEEVSSAAELVEKLTVTEGKKEEQTEKVETPAVDDKKDAEE

SEQ ID NO: 24613 - protein, 285 aa, Pseudomonas fluorescens
MSYEPATAATVAGLSVSGVKTMRVALYQCPPRPLDVAGNLQRLHQVAMEATDADLLVLPEMFLSGYNIGLEAVGALAEAQDGPSAQRIAAIAQAAGTAILYGYPERSVDGQIYNAVQLIDAQGQRLCNYRKTHLFGDLDHSMFSAGEDDFPLVELDGWKLGFLICYDIEFPENARRLALAGAELILVPTANMIPYDFVADVTIRARAFENQCYVAYANYCGHEEQIRYCGQSSIAAPDGSRIALAGLDEALIIGTLDRQLMGESRALNRYLSDRRPELYDDLSKR

SEQ ID NO: 24614 - protein, 299 aa, Zea mays
MERAVPVRKPHTSTADLLSWSATAPDASASPAASSRPSLKPAAGITPAMFGAPVTEQEAEDLSKSERKFCSGSKLKEMSGSGIFAEKSENGDSEASNPDNKTSLRMYQQTVTGISQISFSADGSVSPKKPSSIPEVAKQRELSGTLEDADAKINKQLSEAKTKELSGSDIFGPPPEIPARPLAARNMELQGNVDFSLPQRSVHTSVKVSNPAGGPSNISFSEEPVVKTAKKIHNQKFQELTGNNIFKEDVPASAEKSLSSAKLKEMSGSDIFADGTPAPREYLGGIRKPPGGESSIALI

SEQ ID NO: 24615 - protein, 572 aa, Saccharomyces cerevisiae
MLRSSVVRSRATLRPLLRRAYSSHKELKFGVEGRASLLKGVETLAEAVAATLGPKGRNVLIEQPFGPPKITKDGVTVAKSIVLKDKFENMGAKLLQEVASKTNEAAGDGTTSATVLGRAIFTESVKNVAAGCNPMDLRRGSQVAVEKVIEFLSANKKEITTSEEIAQVATISANGDSHVGKLLASAMEKVGKEGVITIREGRTLEDELEVTEGMRFDRGFISPYFITDPKSSKVEFEKPLLLLSEKKISSIQDILPALEISNQSRRPLLIIAEDVDGEALAACILNKLRGQVKVCAVKAPGFGDNRKNTIGDIAVLTGGTVFTEELDLKPEQCTIENLGSCDSITVTKEDTVILNGSGPKEAIQERIEQIKGSIDITTTNSYEKEKLQERLAKLSGGVAVIRVGGASEVEVGEKKDRYDDALNATRAAVEEGILPGGGTALVKASRVLDEVVVDNFDQKLGVDIIRKAITRPAKQIIENAGEEGSVIIGKLIDEYGDDFAKGYDASKSEYTDMLATGIIDPFKVVRSGLVDASGVASLLATTEVAIVDAPEPPAAAGAGGMPGGMPGMPGMM

SEQ ID NO: 24616 - protein, 299 aa, Glycine max
  misc_feature (48)..(48): Xaa can be any naturally occurring amino acid
  misc_feature (69)..(69): Xaa can be any naturally occurring amino acid
  misc_feature (71)..(71): Xaa can be any naturally occurring amino acid
  unsure (1)..(299): unsure at all Xaa locations
MAKLIKFFELNTGAKIPSVGLGTWQAEPGVVAKAVTIAIQVGYRHIDXAQAYNNQAEIGSALKKLFDEXVXDHVPEDVPKALDKTLQDLKLDYLDLYLIHWPVRMKSGSVGFKKEYLDQPDIPSTWKAMEALYDSGKARAIGVSNFSSKKLQDLLDIARVPPAVNQVELHPGWQQQKLHAFCESKGIHLTGYSPLGSPGVLKSDILKNPVVIEIAEKLGKTPAQVALRWGLQTGHSVLPKSTNESRIKGNFDVFDWSIPEELLAKFSEIKQDRLIKGTAFVDETCGAFKTIEELWDGEL

SEQ ID NO: 24617 - protein, 615 aa, Pseudomonas fluorescens
MSGKAQQQSRLKELISRGREQGYLTYAEVNDHLPEDISDPEQVEDIIRMINDMGINVFESAPDADALLLAEADTDEAAAEEAAAALAAVETDIGRTTDPVRMYMREMGTVELLTREGEIEIAKRIEEGIREVMGAIAHFPGTVDHILSEYTRVTTEGGRLSDVLSGYIDPDDGITPPAAEVPPPVDTKTAKADDDSEDEEAEATEDEEEAESGPDPVIAAQRFGAVADQMEVTRKALKKHGRENKQAIAEMLALAELFMPIKLVPKQFEGLVERVRSALDRLRQQERAIMQLCVRDARMPRADFLRQFPGNEVDESWTDALAKGKSKYAEAIARLQPDIIRCQQKLTALEVETGLKIAEIKDINRRMSIGEAKARRAKKEMVEANLRLVISIAKKYTNRGLQFLDLIQEGNIGLMKAVDKFEYRRGYKFSTYATWWIRQAITRSIADQARTIRIPVHMIETINKLNRISRQMLQEMGREPTPEELGERMEMPEDKIRKVLKIAKEPISMETPIGDDEDSHLGDFIEDSTMQSPIDVATVESLKEATREVLSGLTAREAKVLRMRFGIDMNTDHTLEEVGKQFDVTRERIRQIEAKALRKLRHPTRSEHLRSFLDE

SEQ ID NO: 24618 - protein, 592 aa, Rubrobacter xylanophilus DSM 9941
MRPEAEELGGIGNLVEALHRNAVGRGGKGALHRKVGGRWEAVSYGELYGMVRDFAAGLAGLGVGRGDRVGLIARNRVEWAVTDFAVQSLGAATVPVYPTLEPEQMAHILADCEARVVVVEDGELLGRVSSARGELPALEHVVVMEGEGATLFEEVLREGRERPLEGWEEGWRSLGREDVATIIYTSGTTGRPKGAVLTHGNILSNLEGIQDALTVYPEDVFLSFLPLSHVFERTCGQFLALGVGASVYYAESVEKVPENLREVRPTVMPSVPRLYEKMHDRVRAMVAGGSPVKRWLFGRAVAAGRRRYEVLDRGGRPGLPLRAALAVYDRLVFRRLREAVGGRVRFFVSGGAKLDTEVGKFFYAAGIKIMEGYGLTETSPVIACNRLEKPRFGTVGLPLSNLEVRISPEGEIQVRGPSVMRGYFRDERSTEEAFTQDGFFRTGDIGSFDEDGYLTVTDRLKSLIVLSTGKNVAPQPIESALVTAPHISQAVVVGEGRKYVSALVVPDYRAVRATLGVGGTDEELAGDGRVQRLIEREVEEATRGFADYERPKKVALLPRELSQEAGELTPTLKVKTRVVQRRYGGYIERLYA

SEQ ID NO: 24619 - protein, 513 aa, Ralstonia metallidurans CH34
MSGSPSPESEADAARLPYRIDRNFTRGLVWLRRDLRTDDNAALHYALKHCRQVWCVFVFDREILAPLLARGLHADRRVEFILRSLEPLRRALEDSGGGLIVLDGTARQAIPRLAAELEVEAVFANHDYEPAANDRDEAVRRTLAADSRVLLTFKDQVIFERDEILTGQGRPFSVFTPYKNAWLRTVRPFDLRPYPIEKHQETLAPVPQRYRGQLPTLADLGFTATNLAGIAMPTGSDGAHALFDEFLSRIGDYGRRRDFPAVRGPSYLSVHLRFGTISIRTLARAAHDTMLRGGAASEGATVWLSELIWRDFYFMILHHHPRVAEGKSFHAEYDGLRWIAPATGDRYFAAWCDARTGYPLIDAAMLQIRQSGYMHNRLRMVTASFLVKDLGVDWRRGEQYFADQLNDFDLAANNGGWQWAASTGCDAQPYFRIFNPVTQSEKFDPQGQFIRRYLPMLAALPDRYIHAPWTAPNEVLRAAGVTLGKDYPRPIVQHDVARKETLERYGVVKSAKA

SEQ ID NO: 24620 - protein, 392 aa, Rubrobacter xylanophilus DSM 9941
MKEAVIVSGARTAVGRAPRGTLRGMHPVDLAAAAIGEAVRRAEGLESEEIEDVILGCAMPEGTQGYNIARLASLRAGLPESVPAQTVNRFCSSGLQTIAIAAERIMVGHATAVLAGGVEHMSSTLEFPTFAPNPALVETNPAVYMGMGFTAEEVARRYKVSREDQDEFALRSHTLAKRAVESGLFDEEIVPLDVEYDYLDEEGNPQRFKTVFRRDEGPRDTSMEALAKLKPAFQQGGTVTAGNASQRSDGAAAVVVMEREEAERRGLEPLARFVGFALGGVPPEIMGIGPAVAIPRALEQAGLRLEDIDLIEFNEAFAAQALAVIREVGLDLERTNVNGGAIALGHPMGATGTKLTVQLIHEMKRRGSRYGMVTMCIGGGMGAAGIFENLQG

SEQ ID NO: 24621 - protein, 324 aa, ASPERGILLUS NIDULANS FGSC A4
MSSSLEQLKATGTVVVCDSGDFATIDKYKPQDATTNPSLILAASKKPEYASLIDAAVEKGKKQGGSVDDQVDATLDYLLVEFGKKILDIIPGKVSTEVDARFSFDTKASVDKALHIIKLYEEAGISKDRILIKIASTWEGIQAAHILQSQHGINCNLTLMFSLVQAIAAAEAGAFLISPFVGRILDWYKAAHKRDFSKEEDPGVKSVQSIFNYYKKFGYKTIVMGASFRNVGEITELAGCDYLTISPGLLEELYNSKDAVPKKLDAASATTLDITKRSYLNDEALFRFDFNEEAMAVEKLREGISKFAADAVTLKDILKQKVQA

SEQ ID NO: 24622 - protein, 355 aa, Canavalia lineata
MSLVSDLINLNLSESTEKIIAEYIWVGGSGMDLRSKARTLPGPVSDPSKLPKWNYDGSSTDQAPGDDSEVILYPQAIFKDPFRRGNNILVICDVYTPAGEPLPTNKRHDAAKIFTHPDVVAEEPWYGIEQEYTLLQKDVNWPLGWPLGGYPGPQGPYYCGVGADKAYGRDIVDAHYKACVYAGINISGINGEVMPGQWEFQVGPSVGISAGDELWAARYILERITEIAGAVVSFDPKPIPGDWNGAGAHTNYSTKSMRDEGGYEVIKKAIEKLGLKHKEHIAAYGKGNRRLTGRHETADINTFSWGVANRGSSIRVGRDTEKEGKGYFEDRRPASNMDPYVVTSMIAETTILWKP

SEQ ID NO: 24623 - protein, 233 aa, Triticum aestivum
MAGADVDVGTELRLGLPGGGAEAAKAGKRGYEDTIDLKLTLPTGGMQEDSAGKPEPAADKAKRPAEAAAADPEKPPAPKAQAVGWPPVRSYRRNAMTVQSVKIKKEEETEKQQPAAAAAAGANGSNFVKVSMDGAPYLRKVDLKMYNTYKDLSIALQKMFSTFTATGNEGKMVEAVNGSDVVTTYEDKDGDWMLVGDVPWEMFVASCKRLRIMKGSEAIGLAPRAKDKYKNKS

SEQ ID NO: 24624 - protein, 137 aa, Frankia sp. CcI3
MSVERTLILVKPDGVSRGLVGEVVGRLERKGLTLVALELRTLERSVAETHYGEHASKPFFGELVDFITSGPLVALVAEGPRAVEASRGLIGATDPVKAAPGSLRGDYALEIGQNLVHGSDSPESAKREIDLFFPGLS

SEQ ID NO: 24625 - protein, 1063 aa, Rubrobacter xylanophilus DSM 9941
MDDRDRQRLERFVRRIGDLRLWRNALESPVERWLFSAGGGGAWEPVSLGDRWPRVETPVLLRAEARVPEDWAGRPVELELWLGGEGFVRLSNGVTGGLNPFHRSFPVAREARGGERVGVEAEVVSKGLFGSRVSEPRLSRAALVVPEEEVRALELDLSVVAEACLALGGHDAAARMLDVLQEAFARLGRRWPTATETVVARHLLGYRDPLGEVARALPGPYAEKVTDLGLGPEPWSLPSPPRPLEPLPEGAREAVREARRAVAEGLAGLRGEHPPAGRVALTGHAHLDLAWLWPLEEARRKARRTFASVLGLMDRYGEFAFNQSSAQMYAWVEEDDPGLFARVRERVREGRWEPVGGSWVEPDCQMPSGESFVRQLLHGQRYFERRFGRRCSVAWLPDSFGFSPGVPQLLRGAGIRGFFTYKLNWNETDRFPHDLFVWEGLDGSRVVAHSFDNPGIDYNGDVVPHDLLGTWRNFRGKRHHPETLFSFGWGDGGGGPSERMLEAYGRLKEFPALPRLRMARVEEFFSALPEEGLPRWVGELYLELHRGTLTTQGEIKRLNRRAEHRLLEAEAFCALAALRRGAPYPAEELGRLWRTLLLNQFHDILPGSSIREVCEEARRQLEGVVSGAAGLRGRALRGISGGGAGSSWAVANAALWPRPLSVVLPGAGCEGVEDLSGEPLPAQRVEEGLLVHDPGRRVPGLGWTGLRPSGRRGGARETVRAEGSGGGAVLENALLSAEIGEGGALLRLYDREAGREVLAGPANRLVAYADRPREWEAWDIDADYAAEGEELPPASVEVAEEGPLRASVRAERRWRGSRVAQTYRLLAGSRRLDIETEIDWHERRMLLRALFPVGVRSHEAAFETMYGAVRRPTHRNTSWDAARFEACAHRFCDLSEPGYGVALLNDGRYGHSAEDNVLGISLVRGPLYPDPLADEGTHRFTYSLFPHPGDWTQAGVVEEAFALNSPLFAAEGAPPEAAGLVEAEGLPLALGALKRAEEGEGLVLRLYEPRGARGRAVLRLDPPPSRVRRTNLLEEPGEEVALEGGRVSLEVQPFEVVSLLLEA

SEQ ID NO: 24626 - protein, 233 aa, Zea mays
MADQFLGFDLSTQQLKGIIVGSDLKLIHEAKVDFDADLSKYGIEKGVLTNPDEGEVFAPVALWLEAIELVLQRLKEQGADFSKIQGISGAGMQHGTVFWNHDAETLLGSLDSGKTLIEQLEGGAKGERKGAFSHPFSPNWQDASTQKQCEAFDKTLGDPRNLALATGSSAHHRFSGPQIFRFREKYPQAYKETARISLVSSFLASIFLGKVAPMDISDVTGANLWDIKKGRWH

SEQ ID NO: 24627 - protein, 500 aa, Glycine max
MGPLLYSSLLVLVLILRFVQRRRVKNLPPCPPSLPLIGNLHYIKSPLHRSLLSLSEKYGPIFSLWFGSRFVVVISSPTLLQECFTKHDIVLANRPRFLTGKYLFYNYSSMGSSPYGDHWRNLRRIITIDVLSTSRLNSFFEIRREETMRVIQKLARETCNGFALVHLRPRLTEMTFNNMMRMISGKRYYGDDIEAADAEEAKQFRDIMTEVMSLLGANNKGDFLPFLRWFDFDGLEKRLKVISTRADSFLQGLLEEHRSGKHKANTMIEHLLTMQESQPHYYSDHIIKGLIQGMLLAGTDTTAVAIEWAVSSLLNHPEILKKAKDEIDNMVGQDRLVDESDIPKLPYLQNIIYETLRLFAPAPLLLPHYSSEECTIGGFTIPRDTIVLINAWAIQRDPEHWSDATCFKPERFEQEGEANKLIPFGLGRRACPGIGLAHRSMGLTLGLLIQCFEWKRPTDEEIDMRENKGLALPKLIPLEAMFKTRPISEKVMQQLAIFGT

SEQ ID NO: 24628 - protein, 495 aa, Pyrus communis
MASSASENRLLLSRIATNEKHGENSPYFDGWKAYDQNPFHLTENPEGVIQMGLAENQLSFDLVEEWIRKNPKASICTAEGIEKFRSVANFQDYHGLPEFRQAIASFMWKARGGRVTFGPHRVVMSGGATGANELVMFCLANRGDAFLIPSPYYPAFYRDLGWRTGVQIVPVDCDSSNNFKITKEALEAAYGKAQNNNINVKGLIITNPSNPLGTTLDKDTLESLVTFINQKNIHLVCDEIYAATVFSSPKFTCITEVIQNMNCNPNLIHIVYSLSKDMGFPGLRVGIVYSYNDDVVNIGRKMSSFGLVSSQTQHMLASMLSDEDFVEKFLTTSAKRLAKRHGVFTDGLEEVGINCLKSNAGLFCWMDLRRLLRDQTFDGEMVLWRVIVNEVKLNVSPGSSFKCVEPGWFRVCFANMDDDTVEVALKRIRAFVGQAKKAQEQAQVKSPKKRWQSNLRLSFSSSSRRFEQEGVSVMSPRMMSPHSPMPHSPLLRATT

SEQ ID NO: 24629 - protein, 147 aa, Glycine max
  misc_feature (58)..(58): Xaa can be any naturally occurring amino acid
  misc_feature (69)..(69): Xaa can be any naturally occurring amino acid
  misc_feature (89)..(89): Xaa can be any naturally occurring amino acid
  misc_feature (107)..(107): Xaa can be any naturally occurring amino acid
  misc_feature (114)..(114): Xaa can be any naturally occurring amino acid
  unsure (1)..(147): unsure at all Xaa locations
MPVPLAPYPTPPAPYTPPANGVQSQLVCSGCRNLLVFPVGATSVCCAVCNAVTAVPPXPGTEMAQLVCXGGCHTLLHDIRGATRGQCSXCTLTILALEQFRGPHVNXGNWRMLXRNQYGARSVKCAVCNFVTSVGATASTTEQKFST

SEQ ID NO: 24630 - protein, 446 aa, Pyrus communis
MAIDIEQRQQPSPRLSKIAVSDTHGEDSPYFAGWKTYDENPYHESSNPSGVIQMGLAENQVSFDLLENHLEENSEASTWGSKGSKGVSGFRENALYQDYHGLLSCRKAMASFMEQIRGGRAKFDPARVVLTAGATRAIELLTFCIADPGDALLVPTPYYPGFDRDLRWRTGVNIVPIHCESSNNFQITPQALEAAYKVTEAKNMRVRGVLFTNPSNPLGATSQRTVLEETLDFVTQKSIHLVSDEIYSGSAFSSSEFISVAEILEDRQYKDAERVHIVYSLSKDLGLPGFRVGTVYSYNDKVVTTARRMSSFTLISSQTQHLLASMLSDKEFTENYIKTNRERLRKRYDMICEGLKKSGIECLKGNAGLFCWMNLMPFLDEPTRESELTLWDSMLHEVKLNISPGSSCHCSEPGWFRVCFANMSEQTLGIALTRIHNFMEKRERAC

SEQ ID NO: 24631 - protein, 133 aa, Brassica napus
  misc_feature (22)..(22): Xaa can be any naturally occurring amino acid
  unsure (1)..(133): unsure at all Xaa locations
RLNMQRIMQNNAAVFRTQETLXEGCQLIDKAWESFEDVQVKDRSLIWNSDLIETIELENLLINASITMHSAEARKESRGAHAREDFTKREDGEWMKHTLGYWEDEKVRLEYRPVHMDTLDDEIDTFPPKARVY

SEQ ID NO: 24632 - protein, 198 aa, Shigella boydii
RRELKARHLTMIAIGGSIGTGLFVASGATISQAGPGGALLSYILIGLMVYFLMTSLGELAAYMPVSGSFATYGQNYVEEGFGFALGWNYWYNWAVTIAVDLVAAQLVMSWWFPDTPGWIWSALFLGIIFLLNYISVRGFGEAEYWFSLIKVATVIIFIVVGVMMIIGIFKGAQPAGWSNWTIGEAPFAGGFAAMIGVA

SEQ ID NO: 24633 - protein, 365 aa, Populus tremula x Populus tremuloides
MSPPLLGVVEEEGQSNVTLLASPASAESACLNGLELKERNYMGLSDCSSVDSSAVSAASDERKASLNLKATELRLGLPGSQSPERNHELSLLSSALLDEKPFFPLHPSNDGHYSTQKNVVSGNKRVFSDAMDEFSESKFLSNSEVNAMLSPRPSPNMGLKPGMLENLGVQQAKVKEIVAPKAGQERPHAANETRPLRNSSANNSSAPAPKAQVVGWPPIKSFRKNSLATTSKNTEEVDGKAGPGALFIKVSMDGAPYLRKVDLRNYSAYQELSSALEKMFSCFTIGQYGSHGAPGREMLSESKLKDLLHGSEYVLTYEDKDGDWMLVGDVPWEMFIETCKRLRIMKSSDAIGLAPRAMEKCKNRN

SEQ ID NO: 24634 - protein, 447 aa, Methylobacillus flagellatus KT
MKYQSAHDFLAVVAQKNPGQPEFLQAVTEVVESLWPFISANPRYAEHGILDRLVEPERAILFRVSWVDDKGEVQVNRGYRIQHNGAIGPYKGGLRFHPSVNLSILKFLAFEQTFKNALTTLPMGGGKGGADFDPKGKSNGEVMRFCQAFISELFRHVGSDTDVPAGDIGVGAREIGFMTGMIKKLTNRADCVLTGKGLSYGGSLIRPEATGYGTVYFAEEMLRHSGRTIAGMRVAVSGSGNVAQYAIEKALALGAKVITASDSSGTVIDEAGFTAEKLQILMQVKNVEYGRIKDYAERVGALYVPGGSPWSVKAEVALPCATQNELTKADAATLIANGVLCVAEGANMPCTAEAMKLFDEHHILYAPGKATNAGGVATSGLEMTQNAMRLSWTREEVDARLFDIMKGIHDACVQYGTREDGSVNYVDGANIAGFVKVAEAMLAQGVV

SEQ ID NO: 24635 - protein, 493 aa, Geobacillus kaustophilus HTA426
MRIKQHYPLFINGQYVESSNGEVFETVNPATEEVIATVAKATKEDVDHAVEAARTAFESGKWPKMTGAKRARLLNQIANLMRERFDDLVYAEVLNSGKTVDAAKGQIMQAIEDFEFYAAAAITLQGDVNQVPNGFFNYTVKEPVGVCGQIIPWNYPLMMAAWKLAPALAAGCTVVLKPASYTPITAYMLAEICQEAGVPDGVVNVIAGSGSEIGPYMTEHPGIDKVAFTGETETGKDIMRRASETLKRVTLELGGKSPNIVFDDCDIEAAVNGSLYGIFYNTGQSCEARSRLFVHENIYDEFMEKLIEKASRIRVGNPFEKGVHMGAVISRSHQQVIDSYVKLAVEEGGEILYGGKIPEGEEFAKGYWYMPTIIGNVRNDMRVAQEEIFGPVVVVMKFHDEEEVIELANDTIFGLGSAVWTKDHGKAHRVAACIRAGIVMINSPISAFPGTPFGGYKQSGFGRELALETLNLYTETKSVVSYIGAKPLNLFGI

SEQ ID NO: 24636 - protein, 429 aa, Zea mays
MRGSVRDMYGSATDDDRISHPQRRRSRAPRPLAASVHHPCTHPNETTQLNVSTQPVSSRHSTGFPPTAAAPPPVTVPRACPRRDHLTTPTYDATSHAPSHTRHRFKTLTPLTHHTRTVSPQRARARRPSNHRENKSQPNSPVSQRSLSLHYSTMSSMELLHAVVPEKQSEEEVAPAATTTSSSATATGGDEGAHVLQGWAKRKRSRRQRSEEENLALCLLMLSRGGHHRVQAPPTPVPSAAPAAAEFRCSVCGKSFSSYQALGGHKTSHRVKLPTPPPPPPAVTVPAAVPVPEAPAPTTVVVPPLPPVEVGREPATSSTAASSDGAASSRVHRCSICHKEFPTGQALGGHKRKHYDGGVGSAAASTDVPAAPAETSAEVGSSAARAFDLNLPAVPEFVFRCGKPGKMWEEDEEVQSPLAFKKPRLLMTA

SEQ ID NO: 24637 - protein, 169 aa, Pseudomonas fluorescens Pf-5
MPCAETFGSEYFLAQGSPVNSTATPPEPLPPFLQPGDRVLLFDGVCKLCNASVRFVIRHDSQRRIKLASVQSPQGQALLAWFGLPTEQFDSVVLIEEGRLSQRSDAFIRLMAQLPAPWRWLRLLRGVPRPLRDWVYDLIARNRYRLFGRLDVCLLPSPDHQGRFLDDPS

SEQ ID NO: 24638 - protein, 267 aa, Arabidopsis thaliana
MSSSTMYRGVNMFSPANTNWIFQEVREATWTAEENKRFEKALAYLDDKDNLESWSKIADLIPGKTVADVIKRYKELEDDVSDIEAGLIPIPGYGGDASSAANSDYFFGLENSSYGYDYVVGGKRSSPAMTDCFRSPMPEKERKKGVPWTEDEHLRFLMGLKKYGKGDWRNIAKSFVTTRTPTQVASHAQKYFLRQLTDGKDKRRSSIHDITTVNIPDADASATATTADVALSPTPANSFDVFLQPNPHYSFASASASSYYNAFPQWS

SEQ ID NO: 24639 - protein, 277 aa, Populus tremula x Populus tremuloides
MATATVLGTERADLNYKATELCLGLPGAVGVKNEVETPNKATGKRGFAETVDLKLNLQAKEGVMDLNENINNIASEDKNHLPSATIKDPAKPPAKAQVVGWPPVRSYRKNVLAQKNASEEGFGAQVEGWPPVRSYRKNVLVQKNASEEGEKASTGGCSAAFVKVCMDGAPYLRKVDLKMYKSYQELSDALAKMFSSLTMGNYGAQGMIDFMNESKLMDLLNSSEYVPSYEDKDGDWMLVGDVPWEMFVDSCKRPRIMKGSEAVGLAPRAMEKCKSRT

SEQ ID NO: 24640 - protein, 952 aa, Sorghum bicolor
MASERHHSIDAQLRALAPGKVSEELIQYDALLVDRFLDILQDLHGPSLREFVQECYEVSADYEGKKDTSKLGELGAKLTGLAPADAILVASSILHMLNLANLAEEVELAHRRGTSKLKHGDEASATTESDIEETLKRLVSLGKTPAEVFEALKNQSVDLVFTAHPTQSARRSLLQKNARIRNCLTQLSAKDVTVEDKKELDEALHREIQAAFRTDDFRRAQPTPQDEMRYGMSYIHETVWNGVPKFFRRVDTALKNIGINERLPYDVPLIKFCSWMGGDRDGNPRVTPEVTRDVCLLSRMMAANLYINQVEDLMFELSMWRCNDELRARAEEVQSTPASKKVTKYYIEFWKQIPPNEPYRVILGAVRDKLYNTRERARHLLAIGFSEISEDAVFTKIEEFLEPLELCYKSLCECGDKAIADGSLLDLLRQVFTFGLSLVKLDIRQESERHTDVIDAITTHLGIGSYRSWPEDKRMEWWCRVKGKRPLLPPDLPMTEEIADVIGAMRVLAELPIESFGPYIISMCTAPSDVLAVELLQREMWHSPAVPVVPLFERLADLQAARPSVEKLFSTDWYINHINGKQQVMVGYSDSGKDAGRLSAAWQLYVAQEEMAKVAKKYGVKVTLFHGRGGTVGRGVGPTHLAIRAQPPDTINGSILVTVQGEVIEFMFGEENLCFQSLQRFTAATLEHAMHPPVSPEWRNMEEMPVVAKEEYVVVVKEPRFVEYFRSATPETEYGKMNIGSRPAKRKPGGGITTLRAIPWIFSWTQTRFHLPVWLGVGAAFKWAIDKDIKNFQVLKEMYNEWPFFRVTLDLLEMVFAKGDPGIAGLYDELLVAEELKPFGKQLRDKYVETQQLLLQIAGHKDILEGDPFLKQGLRLRNPYITTLNVFQAYTLKRIRDPSFKVTPQPPLSKEFADENKPAGLVKLNGERVPPGLEDTLILTMKGIRAGMHNTG

SEQ ID NO: 24641 - protein, 195 aa, Geobacter metallireducens GS-15
MRRHTELRTMSHKDTGESVEPRRTTGSGTSHETKGITKSETEGSSREVSVLSPIREMERWFEESLSRPFFGMHWMPFRQMFSEVGERTELMPAVDMFEEGGHLVVKAELPGITKENLNLRIVDNNLILSGERSSEEKIERGNYLRLERSHGSFSRTLSLPDGLDTEHIKAGFKDGVLEVRIPRTESSTVREITVE

SEQ ID NO: 24642 - protein, 481 aa, Pseudomonas syringae pv. syringae
MSIPRMKSYFSLIAAVLMLGQVATAQAENLPDFTGLVEQASPAVVNISTRQKLPDRAVANQQMPDLEGLPPMLREFLERSMPPGSRPPGSGAGKGDRQREAQSLGSGFIISPDGYVLTNNHVIDGADEILVRLSDRSELKAKLVGTDPRTDVAVLKIEGKDLPTAKLGNSNTLKVGEWVLAIGSPFGFDHSVTKGIVSAKGRSLPNDTYVPFIQTDVAINPGNSGGPLFNMAGEVVGINSQIFTRSGGFMGLSFAIPIDVAMDVANQLKANGKVSRGWLGVVIQEVNKDLAESFGLDKPAGALVAQVLEDGPAAKGGVQVGDVILSANGQPIVMSADLPHLIGNLKDGSKAELEVIRDGKRQKLTVTVGALPDEGQEMGDVGGTGAERSSNRLGVSVIELTAEQKKSLDLKGGVAIKEVTGGPASLIGLQAGDVITHLNNQAITSSKQFTEVAKSLPKDRSVSMRVLRQGRATFITFKLSE

SEQ ID NO: 24643 - protein, 483 aa, Oryza sativa
MNVLASKIFPSRSNVASEQQQSKREKATIDDAKNSSKNKNLDRSVDESVLGIILGGGAGTRLYPLTKKRAKPAVPLGANYRLIDIPVSNCLNSNISKIYVLTQFNSASLNRHLSRAYGNNIGGYKNEGFVEVLVAQQSPDNPNWFQGTADAVRQYLWLFEEHNVMEFLILAGDHLYRMDYEKFIQAHRETDSDITVAALPMDEKRATAFGLMKIDEEGRIVEFAEKPKGEQLKAMMVDTTILGLDDVRAKEMPYIASMGIYVISKNVMLQLLREQFPGANDFGSEVIPGATNIGMRVQAYLYDGYWEDIGTIEAFYNANLGITKKPVPDFSFYDRSAPIYTQPRHLPPSKVLDADVTDSVIGEGCVIKNCKIHHSVVGLRSCISEGAIIEDSLLMGADYYETEADKKLLGEKGGIPIGIGKNCHIRRAIIDKNARIGDNVKIINVDNVQEAARETDGYFIKSGIVTVIKDALLLAEQLYEVAA

SEQ ID NO: 24644 - protein, 522 aa, Malus x domestica
MSIITGSAATGSFSSGNTGGEEVQQQQQELLNHHANFHGSNSLLPTTPNINSNGISTTQVQKQPPPAKKKRNLPGTPDPTAEVIALSPKTLMATNRFVCEICKKGFQRDQNLQLHRRGHNLPWKLKQRTSTEIIKRVYICPESSCVHHDPSRALGDLTGIKKHFFRKHGEKTWKCDKCSKKYAVQSDWKAHLKTCGTREYKCDCGTIFSRRDSFITHRAFCDAIAEENNRNQGVVPMSNNIMGAPNQGQLSNSELIIPASPPMNNKITDNPSSARSDTTTSDQFHHNFDAKNAPLTLEPQQPFPMPTKPVNMLPRTLSNNTSSSTSPSSLLFGLNHGGHDQSLIPNSSGHLSATQLLQKAAQMGATMSGGPNPNPSGTTITSMAPSTYGTATGGYNMNPFMQQRDPNNILQLETSPQFFGANYAQMGMFSGMLFDHAQNNGLLKNMEHENNGTSNKIGFRGASNVGNGDTLTVDFLGLGGSGNNNRPENFHDLQKQQHGQQDQLGFGGIDDHDDHLRMQRFG

SEQ ID NO: 24645 - protein, 563 aa, Arabidopsis thaliana
MRPKKRAGRRVFKETRHPVYRGIRRRNGDKWVCEVREPTHQRRIWLGTYPTADMAARAHDVAVLALRGRSACLNFADSAWRLPVPESNDPDVIRRVAAEAAEMFRPVDLESGITVLPCAGDDVDLGFGSGSGSGSGSEERNSSSYGFGDYEEVSTTMMRLAEGPLMSPPRSYMEDMTPTNVYTEEEIFYVRGIYVSFKIVDVSQALEVSLMLIIRSNSSHTSPDTGRVRYTRFEAKWQQFLICSSGFFFGYLVNGICEEYVYNRLKFSYGWYFTFAQGLVYIALIYMYGFRTKQMVNPWKTYVKLSGVLMGSHGLTKGSLAYLNYPAQIMFKSTKVLPVMVMGAFIPGLRRKYPVHEYISAMLLVIGLILFTLADAHTSPNFSIIGVMMISGALIMDAFLGNLQEAIFTMNPETTQMEMLFCSTVVGLPFLLAPMILTGELFTAWNSCAQHPYVYGVLVFEAMATFIGQVSVLSLIALFGAATTAMITTARKAVTLLLSYLIFTKPLTEQHGTGLLLIFMGIILKMVPDPNPNPKSSGSGQTPGKLERVKFEKEDDEESRPLV

SEQ ID NO: 24646 - protein, 1009 aa, Ralstonia metallidurans CH34
MTQPAARPTGRSRSTGRKSVTPASGQLDPEGASPKTPKATKPRTKAAARPKLAVVAAKGAAPTAAATTIPARRTADKDLPLREDIRFLGRLLGDCVREQEGDAAFDLVETIRQTAVRFRRENDRAAGTELDRLLKRLSRDQTNSVVRAFSYFSHLANIAEDQHHNRRRRVHALAGSPPQPGSLSRALQAIDAAGVTGKQLREFLDDALIMPVLTAHPTEVQRKSILDAEREIARLLAERDLPMTTRERDHNTAQLRARVTTLWQTRMLRNTRLMVVDEIENALSYYRTTFLQGIPRLMAELEEDIAEVFPRRSKTGATPAPLAPFLQMGSWIGGDRDGNPNVTAETLEHAARQQATLLFDWYLDELHALGAELPLSSLMVDASPELLALAEASPDHSEHRADEPYRRALIGMYARLAATSQLLTGHVAQRHPVADVAPYENAEAFAADVQIVVDSLRTHHGEALARGRVDALVRAIAVFGFHLASIDMRQVSDVHEAVIAELFATAGIESDYAALPEARKLELLLAELRQPRLLTLPWHDYSEQTRSELAIFAMARDLRARYGARIARNYIISHTETLSDLIEVMLLQKEAGMLRGTLGSKTDPARMELMVIPLFETIEDLRNAAGIMESLLDLPGFDSVIAHHGVEQEVMLGYSDSNKDGGFLTSNWELYKAELALVKLFEERRVKLRLFHGRGGTVGRGGGPTYQAILSQPPGTVNGQIRLTEQGEIINSKFANAEIGRRNLETVIAATLEASLLPTQNAPKDLATFEGVMQQLSDHAFSAYRDLVYETPGFKDYFFATTPITEIADLNLGSRPASRKLMDKKHRRIEDLRAIPWGFSWGQCRLLLPGWFGFGSAVQALLDAAPDEKSRKATVATLKRMVKSWPFFSTLLSNMDMVLAKTDLAVASRYAGLCEDTALRKAVFSRISAEWHLTSDMLGLITGRQERLADNPLLARSIKNRFAYLDPLNHLQVELLKRYRAGKDGDDVRVRRGIHLTINGVAAGLRNSG

SEQ ID NO: 24647 - protein, 1216 aa, Geobacter metallireducens GS-15
MGWYADLKIRNKLLLGYGTVIAFSSLIGYFGVTGLTEMKSHLDAMHDHLIPGIETAAMIDRHHQQHRRTFLNYLEENRLHRKELELKLHHEAIDIQESLKRYAKLSIYPAERRLLDDVITASKEYMDETARLKSAADSGADYETLTVDNAHLRTLFGDVENRAKLLTQYSLKEGDEHLDQSTAGYFNIRSWLISLLLGAIAIALAMAFFITRSVADPIRVVLDAVRRMEESGTEKARLAEAIAAGDLTQDVAVSERLRIDPETVARDEGGMMLRAVAGMSGIQASLDAAFSRMTDSLRRNRQEEQARDWLKSGANELGAILRGDRRLEEMVEKSLSFLCEYLGAGVGVLYLYNDRTRDLEIAATYALARREDMKKRFALGEGLVGEAAKERRIIRLADVPPGYLPISSAIGEAKPLNIAAVPLLHDNLLVGVVEIGSFREFTARELEFLSRAQEGLSIGINVNRSRKLVDELLEQTQAQTEELRVQQEELQQTNEELEERAQMLEQQREQIRAKNREVEETSRALKLKADELERISTYKSEFLANMSHELRTPLNSLLILSSLLKENREHNLTDKQVEYAATINSSGNDLLTLINDILDLSKIESGRLEFNYEQIPLRALFDQLRTMFSPLAEQKGLDFDAIIEEGVPEEITTDGQRTQQILKNLVSNACKFTREGRVAVRAHLPNSEENPLPAPAIAIQVSDTGIGISPDKHDLVFQAFQQADGTTSRKFGGTGLGLSISRQLARGLHGDVLLESEEGKGSSFTLYLPLDHAAHGEESQTAVPPPAPRLPPVTVPRGKEVSGREADVQLPTPVLADDREKLRPGERSILIIEDDLSFAAILMDMVRDRGFPAMVAGDGESGIALADHYLPSAIVLDVMLPHIDGWGVMKCLKDSLRTRHIPVHFLTCLEDRQKALTMGAIGFVTKPVNSAQLDEVFSTIEHSLAKSVRKLLIVEDDRNEAKSMEALLGVRDVAITVTATGSEAMGLLAVEPFDCIVLDLGLSDMSGFEVLEKIQSLDESRRIPVIIHSGRDLSREDEQRLRNYAESIIIKGAKSPERLLNEVSLFLHLVESGMGPEKKRMIRAALDDEALLEGKKVLIVDDDMRNIFSLSSVLAEKKMIVLEAENGREALERLNGEPGIDVVLMDIMMPEMDGFAATRAIRKDPRFARLPIIALTAKAMKGDRDECLKAGASDYIQKPVDADKLLSLLRVWLYGS

SEQ ID NO: 24648 - protein, 513 aa, Triticum aestivum
  misc_feature (41)..(41): Xaa can be any naturally occurring amino acid
  misc_feature (50)..(50): Xaa can be any naturally occurring amino acid
  unsure (1)..(513): unsure at all Xaa locations
KDQLPGVSYCITSPPPWPEAILLGFQHYLVMLGTTVIIPMXLMTVSNFVXEDKAVVIQTLLFVAGINTLLQSFFGTRLPAVIGGSYTFVLPTISIILAGRYTNEPDPHTKFLKIMRGTQGALIVASALQIIVGFSGLWRNVARYLSPLSAAPLIALVGFGLYELGFPSVAKCVEIGLPELILLVIFAMYLPHTIHMMKSIFDRFAVLFTIPIVWLYAYLLTVGGAYRNVSPKTQFHCRTDRSGLIGGAPWIRVPYPFQWGAPTFDAGEAFAMMAASFVALVESTGSFIAVSRFASATPLPPSVLSRGVGWQGVGILLDGLFGTGNGSSVSIENAGLLALTRVGSRRVVQISAGFMIFFSILGKFGAVFASIPAPIFAALYCVFFAYVGSAGLGFLQFCNLNSFRTKFILGFSVFMGFSVPQYFNEYTSVAGFGPVHTRARWFNDMVNVLFSSKAFVGGIVAYVLDNTLHRHDGAVRKDRGYHWWDKFRSYRTDTRSEEFYSLPFNLNKFFPSV

SEQ ID NO: 24649 - protein, 570 aa, GIBBERELLA ZEAE PH-1
MSNSSLQKPIDVAEYLFKRLYEVGVRSIHGVPGDYNLVALDYLPQCNLRWVGSVNELNAAYAADGYARVTKMAALITTFGVGELSAINGVAGSYSEHIPVVHIVGCPSTISQRDQMLLHHTLGNGDFDVFANMSSQISCNVAKLNKPSEIAEQIDTALRTCWLRSRPVYIMVPTDMVQEKVEGARLDTPIDLSEPKNDPGNEDFVVDEILKAMYAAKRPVILVDSCAIRHRVVEEVHQLVDKLDLPVFVTPMGKGAVNEDHPNYGGVFAGDGSHPPRAQTIVEESDLLLTIGALKSDFNTTGFSYRTSQINSVDFHSTHCKVRYSTYPGVAMRGVLRKIIDKVDPKSMPAPSIPEVRNEVEKNNDDSETITQAWFWPRVGEYLIPNDIVVTETGTANFGIWDTRFPRNVTALSQVLWGSIGWSVGACQGAALAAKDAGKDGRTILFVGDGSFQLTAQELSTMIRHGLKPTIFVICNDGFTIERFIHGMDAVYNDINNWKYKDLVSVFGGEKTCKTFQIKTKNELNELLTNKEFNAAECLQFVELYMPREDAPRALVLTAEASARNNAKKH

SEQ ID NO: 24650 - protein, 308 aa, Glycine max
  misc_feature (61)..(61): Xaa can be any naturally occurring amino acid
  unsure (1)..(308): unsure at all Xaa locations
MLFIVKAKKKKKNKTITLEVESSDTIDNVKAKIQDKEGIPPDQQRLIFAGKQLEDGRTPVXLADYNIQKESTLHLVLRLRGGMQIFVKTLTGKTITLEVESSDTIDNVKAKIQDKEGIPPDQQRLIFAGKQLEDGRTLADYNIQKESTLHLVLRLRGGMQIFVKTLTGKTITLEVESSDTIDNVKAKIQDKEGIPPDQQRLIFAGKQLEDGRTLADYNIQKESTLHLVLRLRGGMQIFVKTLTGKTITLEVESSDTIDNVKAKIQDKEGIPPDQQRLIFAGKQLEDGRTLADYNNQKESTLYLGLASV

SEQ ID NO: 24651 - protein, 345 aa, GIBBERELLA ZEAE PH-1
MTKPTVLQLGDDIKWNHDLHATFKSHFDIKRSHSMPRAEFIQALKNKTFGDFFAIYRPFWNTGGEMGNWDEELISLLPASCKIYASAGAGFDWVDTATLAKRGITYCNAAAACTESVADAAIWLIISVFRQLSWSSIAARSGSSEQFLDAQRNLAPVSRNPSGFSLGIIGFGRIGRRIAEKAYKALDMKILYNDVVQMPKEIEEPIGAVYHKSADTLLAEADCVLVATPFAGEALLNKQGLAKMKKGAKLVNIARGKLINEADLVEALQSGHLSGAGLDVFEHEPVISPELIKMKNVELLSHNAGASLDSHVGFEKLGMENILSFHKTGKAISPVNAHLIKQSKL

SEQ ID NO: 24652 - protein, 741 aa, Pyrus communis
MEACNCIEPQWPADELLMKYQYISDFFIALAYFSIPLELIYFVKKSAVFPYRWVLVQFGAFIVLCGATHLINLWTFSMHSRTVAIVMTMAKVLTAVVSCATALMLVHIIPDLLSVKTRELFLKNKAAELDREMGLIRTQEETGRHVRMLTHEIRSTLDRHTILKTTLVELGGTLALEECALWMPTRTGLELQLSYTLRQQNPVGYTVPIHLPVINQVFSSNRAVKISPNSPVARLRQLAGRHIPGEVVAVRVPLLHLSNFQINDWPELSTKRYALMVLMLPSDSARQWHVHELELVEVVADQVAVALSHAAILEESMRARDLLMEQNIALDLARREAETAIRARNDFLAVMNHEMRTPMHAIIALSSLLQETELTPEQRLMVETILRSSNLLATLVNDVLDLSRLEDGSLQLEIATFNLHSVFREVHNLIKPVASVKKLSVTLNIAADLPMYAIGDEKRLMQTILNVVGNAVKFSKEGSISITAFVAKSESLRDFRAPDFFPVQSDNHFYLRVQVKDSGSGINPQDIPKLFTKFAQTQTLATRNSGGSGLGLAICKRYVNLMEGHIWIESEGLGKGCTATFIVKLGFPERSNESKLPFGPKLQANHVQTNFPGLKVLVMDDNGVSRSVTKGLLAHLGCDVTAVSLIDESLHVISQEHKVVFMDVSMPGIDGYELAVRIHEKFTKRHERPALVALTGSIDKITKENCMRVGVDGVILKPVSVDKMRSVLSEILEHRVLFEAM

SEQ ID NO: 24653 - protein, 591 aa, Listeria innocua Clip11262
MKKLWLKIGLSFFILFFVVMVIVGIFSGELMKSTYLTMKENQLEDDAKILLQTTNIENLNLDEDAGTIQKTLDPLGDEIDARITVIDNDGDVVADTKKDPDNLNNHMNRPEVADILEKGKNVGISIRESDSLGYSMLYVAVPVKHQGKTDGVLRISISLESVDAAVAKLWGNLALIFGIALVIIAAISVFIARKITRPVNEIIEVSTDLANHKYDSRIHGKVSGELQDLSVSVNMLAESLETQMFEIKQNEQRLNAIVQNLVSGVMLINVDKQVIMTNRTMYQILGETEITGKPFYEVIKSFALSQLIDATFETKTMQQKEIILYFPREMILDASVSPILAENGEITGIILLLHDITQIRHLENVRSEFVTNVSHELKTPVTALKGFAETLLDGAMYDEMLLKKFLTIIKEESDRLHRLIMDILALSRIEQNPVAENTEPVDVDEVIEQSSRTIFEMATEKNIQVSVPEKTIPPIIIETDRDKLQQILINLLSNAINYTPVDGKVEVKLINQEAEVIIEVTDNGIGIPAKDIDRVFERFYRVDKARSRHSGGTGLGLSIVKHLVENCGGRIEVESQEEVGSTFRVTLPKKA

SEQ ID NO: 24654 - protein, 219 aa, Pyrus communis
GKLRSNFLGTKFTIFDGQPSHSGARIAKSRSTRLVNLKQETPRVPAGNYPVAQIQYELNMLGSRGPRRMQCTMDSIPSSSIEPGGVAPTQAEFSHNNAELFPSLSFNRSKSNRMESFLSGPLARQKDGVLVLRNKSPRWHEQLQCWCLNFHGRVTVASVRLSVGGFSGNGPPGPEHEKIILQFGKVGKDQFTMDYRYPISAFQAFSICLSSFDTKIACE

SEQ ID NO: 24655 - protein, 204 aa, Shigella boydii
RELKARHLTMIAIGGSIGTGLFVASGATISQAGPGGALLSYILIGLMVYFLMTSLGELAAYMPVSGSFATYGQNYVEEGFGFALGWNYWYNWAVTIAVDLVAAQLVMSWWFPDTPGWIWSALFLGIIFLLNYISVRGFGEAEYWFSLIKVATVIIFIVVGVMMIIGIFKGAQPAGWSNWTIGEAPFAGGFAAMIGVAMIVGFSF

SEQ ID NO: 24656 - protein, 356 aa, Arabidopsis thaliana
MGRAPCCEKVGIKKGRWTAEEDRTLSDYIQSNGEGSWRSLPKNAGLKRCGKSCRLRWINYLRSDIKRGNITPEEEDVIVKLHSTLGTRWSTIASNLPGRTDNEIKNYWNSHLSRKLHGYFRKPTVANTVENAPPPPKRRPGRTSRSAMKPKFILNPKNHKTPNSFKANKSDIVLPTTTIENGEGDKEDALMVLSSSSLSGAEEPGLGPCGYGDDGDCNPSINGDDGALCLNDDIFDSCFLLDDSHAVHVSSCESNNVKNSEPYGGMSVGHKNIETMADDFVDWDFVWREGQTLWDEKEDLDSVLSRLLDGEEMESEIRQRDSNDFGEPLDIDEENKMAAWLFSLKILPPSFSLFPL

SEQ ID NO: 24657 - protein, 200 aa, Shigella boydii
RELKARHLTMIAIGGSIGTGLFVASGATISQAGPGGALLSYILIGLMVYFLMTSLGELAAYMPVSGSFATYGQNYVEEGFGFALGWNYWYNWAVTIAVDLVAAQLVMSWWFPDTPGWIWSALFLGIIFLLNYISVRGFGEAEYWFSLIKVATVIIFIVVGVMMIIGIFKGAQPAGWSNWTIGEAPFAGGFAAMIGVAMIV

SEQ ID NO: 24658 - protein, 487 aa, Pyrus communis
MGFTLSNQQQLLSKMATGDGHGENSPYFDGWKAYDSDPFHPTKNPNGVIQMGLRENEMCFDLIQEWVLNNPEASICTAAGVNEFKDIAIFQDYHGLPEFRNAVTNFMGRVRGNRVTFDADRIVMSGGATGAHETIAFCLADPGDAFLVPVPYYPGFDRDLGWRTGVQLIPVACDSSNNFEVTRAALEAAYEKAQKANIRVKGLLITNPSNPLGTVLDRDTLRSSVTFINEKKIHLVCDEIYAATVFSQPSFISIAEIIEENIGCNRNLIHIVYSLSKDMGFPGFRVGIVYSYNDAVVNCARKMSSFGLVSTQTQHLIASMLSDNEFVERFIAQSAKRLKTRHMRFTMELAQVGTSCLKSNGGLFVWMDLRRLLKEQTFEAEMELWRTIIHEVKLNVSPGSSFHCPEPGWFRVCFANMDDKTMEVALTRIRTFVLQDKEAIVPRKSNRLWKATLGSAFQSRRMDDNMMSPCMMSPHTPIPQSPLVRAT

SEQ ID NO: 24659 - protein, 458 aa, Nocardia farcinica IFM 10152
MEAGRKIARMAVLDEKLHEVYEEILRRNPGEIEFHQAAFEVLESLGPVVAKHPEYTDGAVLRRLCEPERQIIFRVPWVDDQGRVQINRGFRVEFNSALGPYKGGLRFHPSVYLGIVKFLGFEQIFKNSLTGMPIGGGKGGSDFDPKGRSDGEVMRFCQSFMTELYRHIGEYTDVPAGDIGVGGREIGYLFGQYKRITNRYESGVLTGKGLTWGGSQVRPEATGYGTVFFVDEILRSRGDSFEGKKVVVSGSGNVAVFAIEKVEQLGGTVVACSDSGGYVVDDKGIDLDLLKDLKQVRRGRMCDYVEERGGTARYVENQSVWDVPCDIALPCATQNELDGEAAATLIRNGVRIVAEGANMPCTPEAARAFTEAGVTFAPGKAVNAGGVATSALEMQQNASRDSWSFEHTEERLAEIMRGIHDRCLETADEYGSPGSYTAGANIAGFTRVADAMLALGII

SEQ ID NO: 24660 - protein, 283 aa, Oryza sativa (japonica cultivar-group)
MDHLSLVPYEGGSAGGGGGGGKYKECMRNHAAAMGGQAFDGCGEYMPASPDSLKCAACGCHRSFHRRAAAGIGGGPVFFRPPPPPQPHSHHAALQGFLPSSVPAPAPPPQLALPYHAVPAAAWHHAAAAAAGRAGSETPPRMDDFGPGSAGGSGSGGGGIFGRKRFRTKFTPEQKERMREFAEKQGWRINRNDDGALDRFCVEIGVKRHVLKVWMHNHKNQLASSPTSAAAAAAGVMNPGAGIGLGTGLGTGISGDGDGDDDDTDDSPPRAAVSSPSPSPISV

SEQ ID NO: 24661 - protein, 508 aa, Oryza sativa (japonica cultivar-group); identical to SEQ ID NO: 834

SEQ ID NO: 24662 - protein, 229 aa, Populus tremula x Populus tremuloides
MEVEKGTKMRFEETELRLGLPGNGGGGTEGGEFARKRGFSETVDLKLNLSSKEGGIDPNHEKTRREKNLLATDPAKPPAKAQVVGWPPVRSFRKNMLAVQKSSTDQESTNKVPGGNATFVKVSMDGAPYLRKVDLNMYKTYHELSDALGKMFSSFTIGNCGSHGMKDFLNESKLIDLLNGTDYVPSYEDKDGDWMLVGDVPWDMFVESCKRLRIMKGTEATGLGNEYTA

SEQ ID NO: 24663 - protein, 459 aa, Cucumis melo
MASSLVFQVQRSQPQLIPPSDPTPHEFKQLSDIDDQEGLRFQIPVIQFYRHDPRMAGTDPARVIKEAIAKALVFYYPFAGRLREGPGRKLFVECTGEGVMFIEADADVSLEQFGDALQPPFPCLEEPLFDVPNSSGVLDCPLLLIQVTRLKCGGFIFALRLNHTMSDASGLVQFMMAVGEMARGATAPSVRPVWQRALLNARDPPKVTCHHREYDEVVDTKGTIIPLDDMAHRSFFFGPSEISAIRKALPSHLRQCSSFEVLTACLWRFRTISLQPDPEEEVRVLCIVNSRSKFNPPLPTGYYGNAFAFPVALTTAGKLCQNPLGYALELVRKAKADVTEDYMKSVADLMVIKGRPHFTVVRTYLVSDVTRAGFEDVDFGWGKAMYGGPAKGGVGAIPGVASFYIPFKNKKGERGILVPLCLPAPAMERFVKELDALLKAGKTIDGVDNKKPLFIASAL

SEQ ID NO: 24664 - protein, 595 aa, Arabidopsis thaliana
  misc_feature (232)..(232): Xaa can be any naturally occurring amino acid
  misc_feature (238)..(238): Xaa can be any naturally occurring amino acid
  misc_feature (462)..(462): Xaa can be any naturally occurring amino acid
  unsure (1)..(595): unsure at all Xaa locations
MCSIHFTGVIKIFLTAFHQWSADLAFEYRLRTSMSSCLLPQFKCPPDSFSIHFRTSFCAPKHNKGSVFFQPQCAVSTSPALLTSMLDVAKLRLPSFDTDSDSLISDRQWTYTRPDGPSTEAKYLEALASETLLTSDEAVVVAAAAEAVALARAAVKVAKDATLFKNSNNTNLLTSSTADKRSKWDQFTEKERAGILGHLAVSDNGIVSDKITASASNKESIGDLESEKQEEXVELLEXSPFREEDELSARIQDLLKLERLQTELTERSGRQPTFAQWASAAGVDQKSLRQRIHHGTLCKDKMIKSNIRLVISIAKNYQGAGMNLQDLVQEGCRGLVRGAEKFDATKGFKFSTYAHWWIKQAVRKSLSDQSRMIRLPFHMVEATYRVKEARKQLYSETGKYPKNEEIAEATGLSMKRLMAVLLSPKPPRSLDQKIGMNQNLKPSEVIADPKAVTSEDLLIKEXIGQAPGLSIRLLMAVVLAPNPPRSLDWRIGMNQNLKPSEVIADPEAVTSEDILIKEFMRQDLDKVLDSLGTREKQVIRWRFGMEDGRMKTLQEIGEMMGVSRERVRQIESSAFRKLKNKKRNNHLQQYLVAQS

SEQ ID NO: 24665 - protein, 688 aa, Magnaporthe grisea 70-15
MPPAQESDLGSQGGNNNSSDFFCNPTVNAGALTQNSIQNDRFTKEILPQHFKHSNFASFVRQLNKYDFHKVRNTDDNAQYGPNAWEFRHTEFARGQSHNFDIIKRKAPTTRKPAPAEAAFDTNQHVGLMNESLHAVIQQMHELQTANHNLAMANRILTDEVSGHQKSLKLFTQYFHEIMNHLDNQDERRRKTTQANGASGSAQGFTAGGMSLLPGSDDEPAPELRRAREVLESITSNIDASRNSNALERLAQQQHNNVASPPDSTTSSAALLSQQQAFNMTFSGVDIFADQKPMVYPVGQTTGIDPFHADHINNIPYSQPPALGAIDAPAQATPPPAAGVAAAVWETKPCILLVEDDKVCQRIGSKFLTHFGCDVETAMNGFDAVSKFSSNPNRYSLIFMDIIMPEMDGVSATSSIRQRGAVIPIIAMTSNIRQEDITTYFEFGMNDVLAKPFTKEGMVRIVKKHLSHMLKFPAHSHEEDSAFAGEMAGQAPSAVSSAPFTPAGPQMMMPQSVQMPPQMATPPAHGMQQHMAAQQQSHHQIKFEGTSGGAIPATPIKFESTHSPASVGTVGWGSPMMSHSGAAMDGSTGFLGAGNGGGTMNLGTSGTQQRSPAPFNGMMTMPGQAGMQGGAAMAVPGGSHAALGPNSMHRLPEHMAPNNMQMRRMMDHQDDQANKRQRVHAGASTGYH

SEQ ID NO: 24666 - protein, 215 aa, Sesbania rostrata
MKVAKLQFLPLCFLSLLVFNTHPLLAAEPEPVVDKQGEPLQPGVGYYVWPLWADMGGLTLGQTRNKTCPLDVIRDPSFIGSPVTFHVAGSDLGFIPTLTDLTINIPILGSHCKEPKVWRLSKEGSGFWFVSTGGVAGDLISKFKIERLEGEHAYEIYSFKFCPSVPGVLCAPVGTFEDADGTKVMAVGDGIEPYYVRFQKSTSYSQKKGQEFSSV

SEQ ID NO: 24667 - protein, 528 aa, Triticum aestivum
  misc_feature (268)..(268): Xaa can be any naturally occurring amino acid
  misc_feature (382)..(382): Xaa can be any naturally occurring amino acid
  unsure (1)..(528): unsure at all Xaa locations
MAAPPPKQEELQPHAVRDQLPAVSYCLTSPPPWLEAILLGFQHYLVMLGTTVIIPTALVPQMGGGNEEKARVVQTLLFVAGINTLLLSFLGTRLPAVIGGSYTFVAPTISIVLAARYSGVADPHEKFLRTMRGTQGALIVASTLQIIMGFSGLWRIVVRLLSPLSAAPLVALVGFGLYELGFPSVAKCIEIGLPEIILLVALSQYIPHLVPLLGTAFERFAVIMSVAIVWLYAFFLTVSGAYKNAAPKTQFHCRTDRSGLVGGAPWIXPYPFQWGAPTFDAGECFAIMAAAFVALVESTGAFIAVSRYASATPCPPSVMSRGIGWQGVGILLAGLFGTANGCSVSVENAGLLGLTRVGSRRVVQISAGFMLFFSILGKFGAXFASIPGPIIAAIYCLLFAYVGMAGIGFLQFCNLNSFRTKFILGFSLFMGISVPQYFNEYTSVAGFGPVHTHARWFNDMINVVFSSKAFVGGATALLLDSTLHRHDSAARKDRGHHFWDRFRSFKTDPRSEEFYSLPFNLNKFFPSF

SEQ ID NO: 24668 - protein, 281 aa, Escherichia coli
MSQTSTLKGQCIAEFLGTGLLIFFGVGCVAALKVAGASFGQWEISVIFGLGVAMAIYLTAGVSGAHLNPAVTIALWLFACFDKRKVIPFIVSQVAGAFCAAALVYGLYYNLFFDFEQTHHIVRGSVESVDLAGTFSTYPNPHINFVQAFAVEMVITAILMGLILALTDDGNGVPRGPLAPLLIGLLIAVIGASMGPLTGTAMNPARDFGPKVFAWLAGWGNVAFTGGRDIPYFLVPLFGPIVGAIVGAFAYRKLIGRHLPCDICVVEEKETTTPSEQKASL

SEQ ID NO: 24669 - protein, 249 aa, Brucella suis 1330
MNRLQDKVAIITGAGSGFGLGMARRFAAEGARVVLADVNVKRVQDGLADISSNGISIQADVSRKDDMERVARTAFEEFGRIDIMVNNAGFTHRNMPLTDVDEHNFDLIVAVNMKALYYSTQLVVPIMEHQGGGVIINTASATGLHPRKGLTWYCASKGWVVSATKAMALELAERNIRVNCLCPAESDGEGLKMFLAEDTPEARAALKSTIPLGRFSTPKDVAEAALWLASDDASMVTGVALGIDGGYSI

SEQ ID NO: 24670 - protein, 382 aa, ASPERGILLUS NIDULANS FGSC A4
MAPTITALQYYGAKNVRLQQVQPRPCHADEVRIQIAYCGICGSDIHEYLGGPVFSPPPGKKNPYTGAELPVTLGHEISGTIVELGSSVPASDPNLKLGMRVAVNPAMNDRHHGVEKCTACQLGLPNICKRYTSYGFSAAGGGLASEIVVKHYACIPLPDSISLKVGALLEPLAVAWHCIRISGFQRDQTVLILGAGPIGLAILMILRVWGVKTVVISEVAASRKRMARELGADLVLDPTELGSSKDGLDPVVVATQKAMKADGADVTFDCTGLQSTLDTAIAATRPGGTVFNVAIHEKPLMVNLNELTLGERRLTGGICYTDVDFQELIAALEAGKIQAERLITSIVDLDDVIDKALMELIHNKAAHVKILVKPNHVRSVRL

SEQ ID NO: 24671 - protein, 491 aa, GIBBERELLA ZEAE PH-1
MRRLIWRTALHQARSRWIQPNFVAEEKDLVVIGGGVAGYVAAIKAGQEGMKVTCIEKRGSLGGTCLNVGCIPSKSLLNNSHLYHQILHDTKHRGIEVSDVKLNLANFMKAKETSVSGLTKGIEYLFKKNGVEYIKGAGSFVNEHEVKVDLNEGGETSVRGKNILIATGSEATPFPGLEIDEKRVITSTGAIALEKVPETMTVIGGGIIGLEMASVWSRLGSKVTIVEFLGQIGGPGMDSEIAKNTQKILKKQGLEFKLNTKVVSGDKSGDKVKLEVDSAKGGKVESIESDVVLVAIGRRPYTAGLGLENIGLEADDRGRVVIDSEYRTKIPHIRCVGDCTFGPMLAHKAEEEAVAVVEYIKKGYGHVNYGAIPSVMYTHPEVAWVGQSEQDLKSQNIPYRVGSFPFAANSRAKTNIDTEGMVKMLADPETDRILGVHIIGPNAGEMIAEGTLALEYGASSEDIARTCHAHPTLAEAFKEAAMATHAKAIHY

SEQ ID NO: 24672 - protein, 142 aa, Burkholderia pseudomallei K96243
MTEHESGKEQTMDKSMKILVVDDFPTMRRIVRNLLKELGYSNVDEAEDGLAGLARLRGGGYDFVISDWNMPNLDGLAMLKEIRADASLTHLPVLMVTAESKKENIIAAAQAGASGYVVKPFTAATLDEKLNKILEKMAKAGS

SEQ ID NO: 24673 - protein, 524 aa, ASPERGILLUS NIDULANS FGSC A4
MDVEHAANACETADKNQNASSASENRSVYLGDSDLLSGEKLDAVLTAKMALVNDAIDEIGFTPHQWKLFCLNGFGYAVDSLILLLQSIISTQATLEFQPSFDTGLTIAVYVGMLVGALFWGFSADVIGRRFAFNVSLFISAVFTVVAGASPNWIVLGLFTCLSAFGAGGNLVLDTAVFLEYLPSQHSWLVTLMAAWWGVGQLIAGLFAWALMPNYSCADAATCTYDNNQGWRYVWYTSGALVFVLSILRVTVVRLEETPKFLVAEGKDEKVVAVLQRIAAKYQRPCGLTVEQLTGLGETRTRTSPGTRRSLQVISLPELGYHLRGLYATRKMGLSTTLVWFSWLLIGLAYPLFNVFLPKYLESRGAQFGEDSPYITWRNYAITNACGIFGPILAGFMCRLRWCWGRRGTMIIGALVTMVFFFSYTAVRTADQNVAFTCIINFCLNIYYGTLYAYTPEVLPSAHRGTGNGIAIGLNRIMGIVSAVVGREADTSTSVPLYICAALYIVMAIVAGLFPFEPLGRRSS

SEQ ID NO: 24674 - protein, 285 aa, Triticum aestivum
  misc_feature (156)..(156): Xaa can be any naturally occurring amino acid
  unsure (1)..(285): unsure at all Xaa locations
MASSPRRTVVCSVLPLLLLLAGVARAAGNFYQDVDITWGDGRGKILGGGDLLTLSLDRASGSGFQSKNQYLYGRFDMQIKLVPGDSAGTVATFYLSSQGSAHDEIDFEFLGNASGQPYTVHTNVYSQGKGGREQQFRMWFDPTADFHTYSVVWNPXHILFYVDRTVRGEHRNREAATGVAYPRKQAMRVYASVWDAEEWATQGGRVRTDWSRAPFVASYKGFAASGCASQDAAACARSNGAWMYQELDATALDRLQWVQKNYMIYNYCTDTWRFKDGAPPECATK

SEQ ID NO: 24675 - protein, 371 aa, Brassica napus
RPTRPLKLSLSVFALLFLVLSASSDGNEGGDDLVIKQVVDGGAEPNVLSSEDHFSLFKKKFGKVYASSEEHDYRFSVFKTNLRRARRHQKLDPSARHGVTQFSDLTRSEFKKKHLGVRGGFKLPKDANKAPILPTENLPEEFDWRDRGAVTPVKNQGSCGSCWSFSATGALEGANFLATGKLASLSEQQLVDCDHECDPEEAGSCDSGCNGGLMNSAFEYTLKTGGLMREEDYPYTGKDGATCKLDKSKIVASVSNFSVISIDEEQIAANLVKNGPLAVAINAAYMQTYIGGVSCPYICTRRLNHGVLLVGYGSAGYAPARFKEKPYWIIKNSWGETWGEDGFYKICRGRNVCGVDSLVSTVTATVSPAAH

SEQ ID NO: 24676 - protein, 505 aa, Nitrosomonas europaea ATCC 19718
MNTRPIYTTAEIRKIESLVLSVPHSPPLMEKAGLAAAKVAHTRLLTDDKQRILILAGPGNNGGDALVAARHLREWGRQVTLVLTGEAERLPQDARQALEQWQSAGGTVIPELPDGGQWDAAIDGLFGIGLNETRLLAESYRQLIRQINQLNLPVLALDIPSGLLSDSGRVPDVAVKAAITTTFIALKPGLLTHDGCDYCGEIVVCDLELDVAALIPPQNWLLDRAGIVQRLPSPRRANSHKGTYGRLGILGGATGMIGAALLTGRAALKLGAGRVYLGLLAQDDVPVVDPVQPELMLRSPSDFFNPDFLEGLVIGPGFGSEIAACICLERALQTCLPLVLDADALNLIAQHTELSSALQARKAPAILTPHPAEAARLLNTSVTEIQRNRLEAARNLARKFNCAVVLKGAGSICAFPNGHCHFNTSGNPGLSSAGTGDVLSGFLGALLVQGLLPENALLLAVYLHGAAADVLLKQQNGPLGMVASEIIPAARNLLNCWIEEENPGW

SEQ ID NO: 24677 - protein, 282 aa, Lactuca sativa
KEAENCDCLQGFQVCHSLGGGTGSGMGTLLISKIREEYPDRMMMTFSVFPSPKVSDTVVEPYNATLSVHQLVENADECMVLDNEALYDICFRTLKLTTPSFGDLNHLISATMSGVTCCLRFPGQLNSDLRKLAVNLIPFPRLHFFMVGFAPLTSRGSQQYRALTVPELTQQMWDAKNMMCAADPRHGRYLTASAIYRGKMSTKEVDEQMLNVQNKNSSYFVEWIPNNVKSTVCDIPPTGLKMASTFIGNSTSIQEMFRRVSEQFTAMFRRKAFLHWYTGEGM

SEQ ID NO: 24678 - protein, 202 aa, Shigella boydii
RELKARHLTMIAIGGSIGTGLFVASGATISQAGPGGALLSYMLIGLMVYFLMTSLGELAAYMPVSGSFATYGQNYVEEGFGFALGWNYWYNWAVTIAVDLVAAQLVMSWWFPDTPGWIWSALFLGVIFLLNYISVRGFGEAEYWFSLIKVTTVIVFIIVGVLMIIGIFKGAQPAGWSNWTIGEAPFAGGFAAMIGVAMIVGF

SEQ ID NO: 24679 - protein, 282 aa, Lactuca sativa
  misc_feature (107)..(107): Xaa can be any naturally occurring amino acid
  unsure (1)..(282): unsure at all Xaa locations
KEAENCDCLQGFQVCHSLGGGTGSGMGTLLISKIREEYPDRMMMTFSVFPSPKVSDTVVEPYNATLSVHQLVENADECMVLDNEALYDICFRTLKLTTPSFGDLNHXISATMSGVTCCLRFPGQLNSDLRKLAVNLIPFPRLHFFMVGFAPLTSRGSQQYRALTVPELTQQMWDSKNMMCAADPRHGRYLTASAIYRGKMSTKEVDEQMLNVQNKNSSYFVEWIPNNVKSTVCDIPPTGLKMASTFIGNSTSIQEMFRRVSEQFTAMFRRKAFLHWYTGEGM

SEQ ID NO: 24680 - protein, 870 aa, ASPERGILLUS NIDULANS FGSC A4
MSAVAPSAVSAQGHSARQSARQTRTNPSRTSKTLGRSSFAYGHSSMVDSVSSPVPHGFYPALTHFTDAITALPREFRRHNSLLKEVDAKAWALEDNLLQLLKAASESQPTPYPPNPAPIIEGVVREDLLPADSSRPPESSESKNRRALFDRVRHTLSDLMMTADEKNHVISNANDELDRQLMRLDSIFPFIAGEISEEARLGSLTHWAYSNRNAPKTATNERPRREAASNKDLAHALHEAEAASRSEARREAVLARRQRRAHADSDMEEARAVGSRKGQNNKNRAIGGDHGHGQAGTAGSSQTKRRKVERPGTAEAGATMERSASGAGASGRAVSKDAVDATKKRSRAPNANAAARKRNNTGVASADSPVIPASPLIGTAPAANISRSAASPGPASRPQSSRTQQGATQANSRQRPSSSASNRVPSSGKTTDNKAQSKETPSRTELVPVSDLQRDISEAIDPLDSSIMHTQREDIDRKLAESVERIETPAPVSTSAPKGRSSKNSTPVLASAEPVQQRTRPTRSSDPAPKRSHKKIGNNSSIVQPPPVSDPEESLHEGDDEDEEGEPRYCYCNEISFGEMVACDNDACPREWFHLSCVGLTKPPGRNVKCTTFAQPVWSKYTHSLTTRCLLEPVPKPEGPAFVLDPALPLAAALAAAASLSNLLLKPSNRASFLPLLAENTTPSSPTTQPGTLHPELPLPAARGNTSALHATPTIQPIADGRSMYGNCDNESCAAISVSGENLCAAFRGWEDGEIGVGVDVDVDVEIVYRYVEGMEAWYCANKANIVAVGPEAKEGWVTSMRTYSNLPSTPPPLNNPAMINEQRGEQGLRRVCEPGSLPYQAAPELPVGKEMGGDVNGGEMFDVEDGERD

SEQ ID NO: 24681 - protein, 202 aa, Shigella boydii
RELKARHLTMIAIGGSIGTGLFVASGATISQAGPGGALLSYILIGLMVYFLMTSLGELAAYMPVSGSFATYGQNYVEEGFGFALGWNYWYNWAVTIAVDLVAAQLVMSWWFPDTPGWIWSALFLGIIFLLNYISVRGFGEAEYWFSLIKVATVIIFIVVGVMMIIGIFKGAQPAGWSNWTIGEAPFAGGFAAMIGVAMIVGF

SEQ ID NO: 24682 - protein, 201 aa, Shigella boydii
ELKARHLTMIAIGGSIGTGLFVASGATISQAGPGGALLSYMLIGLMVYFLMTSLGELAAYMPVSGSFATYGQNYVEEGFGFALGWNYWYNWAVTIAVDLVAAQLVMSWWFPDTPGWIWSALFLGVIFLLNYISVRGFGEAEYWFSLIKVTTVIVFIIVGVLMIIGIFKGAQPAGWSNWTIGEAPFAGGFAAMIGVAMIVGF

SEQ ID NO: 24683 - protein, 499 aa, Lotus corniculatus var. japonicus
MDIISFLYYSLFYVALFAIIKLFLGSRKFKNLPPGPTSLPIIGNLHHLKRPLHRTFRALSEKYGDVFSLWFGNRLVVVVSSFADVQECFTKNDVVLANRPRFLSGKYIFYNYTTLGSTSYGEHWRNLRRITSLDVLSNHRINSFSPIRRDETTRLIRKLAEDSAKNFSEVELTSRFFDMTFNNIMRMISGKRYYGEDCDMTELQEASEFRDMVTELLQLSGANNKADFMPILRLVDFEGLEKRVKGISSKTDRFLRGLLQEHRDKKQRTANTMIDHLLTLQESQPEYYTDQIIKGLALAMLLAGTDSSAVTLEWSMCNVLNYPEVLEKIKAELDTHVGQDRLVDESDIPKLTYLKNVINETLRLYTPAPLLLPHSASDDCTIGGYKVPRDTIVLINAWALHRDPQLWTEATTFKPERFDKKGELEKLIPFGLGRRACPGELLAIRAISMTLALLIQCFDWKRVSDEEIDMGERDGFVLMKSIPVKAMCKSRPVINNVFK

SEQ ID NO: 24684 - protein, 391 aa, Zea mays
MADQQQPQQQPQEMDVDRTGGLELPPGFRFHPSDFEIINDYLTKKVHDRDYSCIAIADADLNKTEPWDLPKVAKMGEKEWCFFYQKDRKYPTGLRANRATEAGYWKATGKDKEVYNPFAAEGLLLVGMKKTLVFYKGRAPRGDKTNWVMHEYRLEGSGRLPASPASASGSATNIAAAMMKASASACKDEWVVCRVFNKTTGIKKTAAPAYQVAMAGPEMDQNQNNIPAIPIPMPLQLPLPVPMQMQFPILPDFAMDPVAPYYPNPNAGAGMMPPMALAGMGGAGGLQINGALFGNPVPAPLPMNFYHHQMGMGAAAGQVDMGAAAGQMDMGAAGAGAGGFDVAAPESRPSSMVSQKDEQANAAEISSMMSVTGPGSATTTIEMDGIWKYKY

SEQ ID NO: 24685 - protein, 197 aa, Shigella boydii
ELKARHLTMIAIGGSIGTGLFVASGATISQAGPGGALLSYILIGLMVYFLMTSLGELAAYMPVSGSFATYGQNYVEEGFGFALGWNYWYNWAVTIAVDLVAAQLVMSWWFPDTPGWIWSALFLGIIFLLNYISVRGFGEAEYWFSLIKVATVIIFIVVGVMMIIGIFKGAQPAGWSNWTIGEAPFAGGFAAMIGVAM

SEQ ID NO: 24686 - protein, 96 aa, Nitrosomonas europaea ATCC 19718
MNIRPLHDRVIVKRLEEERKTASGIVIPDTAAEKPDQGEIIAVGKGKTGEDGKIRALEVKVGDRVLFGKYAGQAVKIKGEEFLVMREEDIMGVIEG

SEQ ID NO: 24687 - protein, 341 aa, Salmonella enterica subsp. enterica serovar Typhi Ty2
MKVKAVFINKPGEVETRWVDYPHKKENEVLIKVDAAGICGSDIGAFRGTNPLVTYPRIIGHEVTGIVLQEGTGMPDNIKKGDRVIVDPYIYCGHCYPCSVGRTNCCENLNVIGVHIDGAMQEVVTHPAHLIHKIPDNVPSEMAPLAEPLTIALHALHRANVKAGEYVAIIGAGAIGLMAALSARHYKATPILIDIVEERLRYAQKLGVPYVLNAADDQVIDAIKNITHGTMAQVVIEASGANSAIRNTLDLASFAGRISFTGWPKQETSLPTNLITYKELDLRGSRTSAGEFDEALRMLSTLEINPQDVVSKVVNLDEIPDAVKELDRYPERYLKINAVFH

SEQ ID NO: 24688 - protein, 222 aa, Haloarcula marismortui ATCC 43049
MDETPLPEVTEQFARTLAPASDAIIDEMDAKADREGFPTVGPAVGGWLRLVARMVDADRVFEFGSGFGYSAYWMAPAVSDDGQIVLTEIDADELEDAREFLDRGGFADLAAFEHGDAIEIVENYDGPFDVVLIDNEKHRYAEAFEAVQAKVPVGGAVVADNMIEAGPLEFADVRALLAGEDINANETSRGIAAYLKRVGSDPAFETGLLPLGEGVAVSVRVE

SEQ ID NO: 24689 - protein, 547 aa, Nitrosomonas europaea ATCC 19718
MAAKEVRFGDSARQAVISGVNVLADAVKVTLGPKGRNVVLERSYGAPTITKDGVSVAKEIELKDKFENMGAQMVKEVASKTSDTAGDGTTTATVLAQSIVKEGMRYVAAGMNPMDLKRGIEKAVTGAVEELKKLSKPCSTSKEIAQVGSISANSDTEIGRIIAEAMDKVGKEGVITVEDGSGLENELDVVEGMQFDRGYLSPYFVSSADKQIAALESPFVLLHDKKISNIRDLLPVLEQVAKAGKPLLIIAEDVDGEALATLVVNNIRGILKTCAVKAPGFGDRRKAMLEDIAILTGGTVIAEEVGLSLEKTRLEDLGQAKRIEVGKENTTIIDGAGDVKTIEARVAQIRKQIEEASSDYDREKLQERVAKLAGGVALIKVGAATEVEMKEKKARVEDALHATRAAVEEGIVPGGGVALLRTINAVSKIKGDNHDQDSGIKIVLRAMEEPLRQIVTNCGDEASVVVNKVKEGQGTFGYNAATGEYGDLVAMGVLDPTKVTRSALQNAASVAGLILTTDAMVAELPKEDSPGAGAGMGGMGGMGGMDM

SEQ ID NO: 24690 - protein, 417 aa, Oryza sativa (japonica cultivar-group)
METYTTDEALEFMGFGKFQLLVLAYAGMGWVVESMEIMLLSFVGPLVREEWNISAENESLLSSVVFAGMLIGASGWGFVSDKYGRRICLLFSTLFASGMGFLSAFSPNYSCLLALRFLVGIGVGGAHVFTSWFLEFVPAQNRGTWMVIFSCFWTIGTILEASLAWVVISVLSWRWLLALTALPCSLLIPFFGTTPESPRYLCGQNRTSDAMLVLERIAITNQAALPPGVLIYHQEAKVDHSDLTSEKEDLLPVSEKECTFDNAMSFKYGGGIAALLRLLSRKLLRSTLLLWFAFFANSFAYYGLVLLTAQLSDANRSCTSGQTNVVPQKDVNLYKDTFITSLAEVPGLILSAVLVDWFGRKASMWFMLFTCCAFIGPLVLQQNELLTTVLLFGARAVAMGSFTVLCLYAPEVCINLL

SEQ ID NO: 24691 - protein, 700 aa, Oryza sativa (japonica cultivar-group)
MSVSSSSMGGGGGGDAGGRTVVWFRRDLRVEDNPALAAAARAGGEVVPAYVWAPEEDGPYYPGRVSRWWLSQSLKHLDASLRRLGAGKLVTRRSADAVVALLQLVRDTGATRLFFNHLYDPISLVRDHRLKEMMAAEGIIVQSFNADLLYEPWEVVDDEGQSFTMFAPFWNRCLSMPYDPAAPLLPPKRINSGDLSMCPSDDLIFEDDSERGSNALLARAWSPGWQNADKALTAFLNGPLIHYSVNRKKADSASTSLLSPYLHFGELSVRKVFHLVRMKQLVWSNEGNRAAEESCTLFLRSIGLREYSRYLSFNHPCSHEKPLLAHLRFFPWVINECYFKIWRQGRTGYPLVDAGMRELWATGWLHDRIRVVVSSFFVKVLQLPWRWGMKYFWDTLLDADLESDALGWQYISGSLPDGRELDRIDNPQLEGYKFDPHGEYVRRWLPELARLPTEWIHHPWDAPASVLQAAGVELGSNYPLPIVGLDAANARLQEALSEMWQLEAASRAAMDNGMEEGLGDSSEVPPIEFPRELQMEVDREPARVTANVLTTARRREDQMVPTMTSSLNRAETEISADFMNSVDSRAEVPTRVNFEPATEREENFRTTAGNVARTNGIHEHNNFQQPQHRMRNVLAPSVSEASSGWTGREGGVVPVWSPPAASDHSETFASDEADISSRSYLDRHPQSHRLMNWSQLSQSL

SEQ ID NO: 24692 - protein, 335 aa, Chlamydophila pneumoniae AR39
MKVVINGFGRIGRLVLRQILKRNSSVEVLAINDLVPGDALTYLFKFDSTHGRFPEDVRCEADHLIVGKRKIQFLSERNVQNLPWKDLGVDLVIECTGLFTKKEDAEKHIQAGAKRVLISAPGKGDIPTFVMGVNHKTFNPEKDFVISNASCTTNCLAPIAKVLLDNFGITEGLMTTVHAATATQLVVDGPSKKDWRGGRGCLQNIIPASTGAAKAVTLCLPELKGKLTGMAFRVPIEDVSVVDLTVRLDKSTTYDDICKAMKQASETDLKGILDYTDEQVVSSDFIGSEYSSIFDALAGIALNDRFFKLVAWYDNETGYATRIVDLLEYVEKNSK

SEQ ID NO: 24693 - protein, 466 aa, Nostoc punctiforme PCC 73102
MSSTTVRRKSNTFYVILIAGAAALGGFLFGFDTAVINGAVLSLAKAFNTSSWVTGLAVSLALLGSAVGAFFAGQIADRYGRVKAMVVASVLFTISAIGSGMAFTIWDFIFWRVLGGIGIGVASVIAPAYIAECSPTHLRGRLGSLQQLAIVVGIFVALLSDYFIATSAGSADSPFLFGVAAWRWMFWTAVPPAVFYGMVALTIPESPRYLVAKGRESEAVNVLTKILGGDVLPKIEEIRQTVLRERQPKFSDLLSRSGGLLPIVWIGIGLSVLQQFVGINVIFYYSSVLWRAVGFSEKDSLSITVITGAVNIITTLIAIAFVDKFGRKPLLIIGSIGMTLTLGTMAYIFGNAPLDAAGNPSLAGSAGTVALIAANLYVFCFGFSWGPIVWVLLGEMFNNKIRAAALSVAAAIQWVANFLISTTFPPILQYFGLGSAYGLYTIAAATSFFFILFFIKETKGIELEDM

SEQ ID NO: 24694 - protein, 734 aa, Bdellovibrio bacteriovorus HD100
MAFKMNRTLTLLLFSTGVAATLTVFILKFLALKEYRETIALYEKTEALISMIQNVEKSTLDLETGQRGYVLTQNEQFLKPYLDANDAIEKEFELLEKSAPATLKASPEYQSMSALVRQKMEISENVINQVRVGKLSSAIALVKSGQGKGVMDQLREAVNTVITNERARVLALKKESEITAQRNQLWQVLGTAMAFLLIIVAYVMTEFEGRQRRQLEKQLVEARNEALQASHMKSSFLANMSHEIRTPMNGILGMTEVLLDQNPESGIKKKIQIIRESALNLLSLINGILDLSKIESGKLELEESYFEPRKLVQEVINTVEYSAKSKGLDLHASVSEQTPAAFSGDVLRLRQILINLLGNAIKFSSEGTVSLIVNSFRSDQSRTMLQIQVKDQGLGMDEATLKKIFSPFEQADKSTTRKFGGTGLGLSITKQLVELMNGKIEVESKPNEGSIFWVTLPLEAINVMPENQRPRESQSYSSSQAPLKILVAEDNMTNQEVVRVMLNRLGHKFDIVNNGKEALEKTLSGTYDIILMDCHMPVMDGYVAAQKITERFPQWCQGPAVIAVTANAIRGDKEACLAAGMCDYLSKPLTLAELDEKLALWSRHLKYAATQVVDPKAMENLRQISPDMADDLMKQILQAWGKEAPAYVVEMIEAEKRGDLKDLADRAHYLKSSCVNAGLRVMGQLCSDIEKQARAGTKEELRYLLLQLRSEYKMACTHLWRSEMLEVPQQGIST

SEQ ID NO: 24695 - protein, 466 aa, Zymomonas mobilis
MADHFDLIVLGGGPGGYVAAIRAAQLNLKVALVERVHLGGICLNWGCIPTKSLLRSAEVYHEMQNAEAYGLTSFKPDFDLDKIIARSREVAARLASGVKTLLRKNKVEVISGVGQLTGNQQMRVETTEGEEKILEAKDIIIATGARARQLPNVHSDGKHIWTYHHALKPPAMPKKLLVIGSGAIGIEFASLYADFGAEVSIVEHAPQILPMEDAEVSAYVAKAFKKRGIRILTQSALQNLTPDDEGVTAEIAGADGKVTKERFSHAIVAIGVVANVENIGLDKLGIKLDRGFIAVDGFGRTNVDHVWAIGDVAGAPCLAHKASHQGVIAAEDIAGCDHVHPLNTQNIPGCTYARPQVASVGLTEEKARQQGYNVKIGNFPFIANGKAIAQGATDGFVKTVFDADSGALLGAHMVGAEVTEMIHGYTVARTLETTEAEIMETIFPHPTLSEAMHESVLAAYGRALHF

SEQ ID NO: 24696 - protein, 364 aa, Arabidopsis thaliana
  misc_feature (205)..(205): Xaa can be any naturally occurring amino acid
  misc_feature (211)..(211): Xaa can be any naturally occurring amino acid
  misc_feature (259)..(259): Xaa can be any naturally occurring amino acid
  misc_feature (269)..(269): Xaa can be any naturally occurring amino acid
  misc_feature (282)..(282): Xaa can be any naturally occurring amino acid
  unsure (1)..(364): unsure at all Xaa locations
MELLTTVASFFTPTTLFLLLNLMIGTIVVTSRLGSGSRKHYQHHDGFGSGHAPAPLARAPSIIDRVKSINFHLYKFPHPETELFSMTAHHDIIGSDLHVYPDPNPAPLQRAPSLLDRVKSINMSYFKFPHDVTGSDPHSHSHSHLDLHPDPAPAPLQRAPSLLDRVKSINMSYFKFQQYNPEENDYAHHTEPTRFESIPTRMGRXDPIDIXKFRIPEEDQPTGTGVDRQINPNGSTRSRSIPDRDQTLNLSSFYSSDPXLDEEQNPDKXPVKRKKRSLRRNXQKSKSAKSGIEIAGSHAEAPETVESLERRRPDTTRVERSTSFGDGEDGVDAKASDFINKFKQQLKLQRLDSILRYKEMLKAH

SEQ ID NO: 24697 - protein, 340 aa, Taxus baccata
MGSTGKIKIGINGFGRIGRLVARVALQRDDIELVAVNDPFISTESLTSLFKYDSVHGQWKKHEVKVKDEKTLLFGEKHVAVFGCRNPEEIPWGEVGAEYVVESTGVFTDKDKAAAHLKGGAKKVVISAPSKDAPMFVVGVNEHEYKSDLTIVSNASCTTNCLAPLAKVINDRFGIVEGLMTTVHSITATQKTVDGPSNKDWRGGRAAGFNIIPSSTGAAKAVGKVLPVLNGKLTGMCFRVPTQDVSVVDLTVKLEKSATYGEIKAAIKEESEGKLKGILGYTEDDVVSTDFIGDSRSSIFDAKAGIALNDNFVKLVSWYDNEWGYSSRVIDLIVHMDSTA

SEQ ID NO: 24698 - protein, 219 aa, Brucella suis 1330
MPMKNDHSPDQRTLSELFEHNRQWAAEKQEKDPEYFSRLLSSQRPEFLWIGCSDSRVPANVVTGLQPGEVFVHRNVANLVHRADLNLLSVLEFAVGVLEIKHIIVCGHYGCGGVRAAMDGYGHGIIDNWLQPIRDIAQANQAELDTIENTQDRLDRLCELSVSSQVESLSRTPVLQSAWKDGKDIIVHGWMYNLKDGLLRDIGCDCTRNALQFACQPAE

SEQ ID NO: 24699 - protein, 337 aa, Oryza sativa
MGKIKIGINGFGRIGRLVARVALQSEDVELVAVNDPFITTDYMTYMFKYDTVHGQWKHSDIKIKDSKTLLLGEKPVTVFGIRNPDEIPWAEAGAEYVVESTGVFTDKEKASSHLKGGAKKVFISAPSKDAPMFVCGVNEDKYTSDIDIVSNASCTTNCLAPLAKVIHDNFGIIEGLMTTVHAITATQKTVDGPSSKDWRGGRAASFNIIPSSTGAAKAVGKVLPDLNGKLTGMSFRVPTVDVSVVDLTVRIEKAASYDAIKSAIKSASEGKLKGIIGYVEEDLVSTDFVGDSRSSIFDAKAGIALNDNFVKLVAWYDNEWGYSNRVIDLIRHMAKTQ

SEQ ID NO: 24700 - protein, 541 aa, Bradyrhizobium japonicum USDA 110
MAHKQVLFHSAAREKILRGASLLADAVRVTLGPKSKSVLIQKGWGAPIVCNDGVTIAKEFDLKDAEENLGAQVLRQLAEKTGDVVGDGTSTSTILAHAILSDGVRNVVAGASAIDLKRGLDRGTQAAIAALRAMATPVKSRAEKVQVATISAHNDASIGELVADAIEKVGGDGVISVEESKTTETLLDVVEGMKFDRGFLSPYFITDADRMESVLQDPYVLLCDHKIGALRDLVPLLEQVAKSGQPLLIIAEDIEGEALATLIVNQLRGVLKACAVKAPGFGDRRKAMLEDIAILTGAQVISEEIGLNLENATLQQLGRAARVVADKENTTLIGSGGDRTRIDARLGQIRVEIEKTTSDYDREKLEERLAKLSGGVAVIRVGAPTEAEMKAKKEALDDAISSTKAAVAEGIVPGGGLALLRAVAAVAKEEAACEGDERTGVQILRRALEAPARQIAENSAADGGVVVARMLEGEGSIGFDASRKVYVDLVAAGIVDPVKVVRTALENAVSVASVLLLTEATMTEIPEPKRERLPEPDLAVQ

SEQ ID NO: 24701 - protein, 525 aa, Phaseolus vulgaris
MASSSVTLKANAHLANSEKGHLFRQESSFLGERVKVGPNNSAFVTNQLARCSRSQKRVNHGVASAILTSNDAKESLSLQVPSFMRRRVDPKNVVSIILGGGPGKQLFPLTQRAATPAVPVGGCYRLIDIPMSNCINSGINKIFVLTQFNSASLNRHIARTYFGNGINFGDGTVEVLAATQTPGEAGKKWFQGTADAVRQFTWVFEDAKNTHVENVLILAGDHLYRMDYMDLIQSHVDRNADITVSCAAVGNSRASDYGLVKVDDRGRIIQFSEKPKGDDMTAMQADTSLLGLSPPDALKSPYIASMGVYVFKTDVLLNLLKCRHPTSNDFGSEIIPAAVRDHNVQSYFFRDYWEDIGTIKSFYDANLALTEESHEFEFYDPKTPIYTSPGFLPPTKIDKSRIVDAIISHGCFLRECTVQHSIVGERSRLDYGVEIQDTVMMGADYYQTESEIASLLAEGKVPIGIGRNTKIRNCIIDKNAKIGKDVIIKNKDDVQEADRPEDGFYIRSGITIIAEKATIEDGTVI

SEQ ID NO: 24702 - protein, 173 aa, Bradyrhizobium japonicum USDA 110
MATETKLPVTKSPTAPAVAGETWRPFQALRNEIDQIFDDFGNGFWNRPFRSLARLERDFSKSISAPAVDVAESDKAYEITAELPGLDEKNIDIKVANGGLTIKGEKREETEEKNKDYYVSERRYGTFERYFTLPESVNADKIEATFKNGVLKVVLPKTEEAQKPAKTINVKAA

SEQ ID NO: 24703 - protein, 140 aa, Leifsonia xyli subsp. xyli str. CTCB07
MTTAVEETLVLVKPDGVARNLTGEILRRIEAKGYSLVDIRMVQADRVLLAKHYAEHEGKPFYEPLVEFMESGPLVAIRLAGNRVIEGFRSLAGATDPTTALPGTIRGDLARDWGLKVQQNLVHGSDSPTSAARELALWFG

SEQ ID NO: 24704 - protein, 172 aa, Dechloromonas aromatica RCB
MAGGCFWCLEAAFEQLDGVVAVLPGYMGGHDPRPTYEAVCRGDSGHAEVVQIEFDPAIIDFETLLTAFFTIHDPTTLNRQGHDVGTQYRSAIYFHDAGQQSAAEAMIARLNAEGVWASPIVTEVSPASAFFVAEDYHHQYFRRNPYQGYCMAVVAPKAMKLRQVFAERIKAG

SEQ ID NO: 24705 - protein, 515 aa, Phaseolus vulgaris
MASMASIGSLNVPCSSSSSSSNGGRKILPRALSFSASQLYGDKISTDSVSVAPKRVRNPVVVSPKAVSDSQNSQTCLDPDASKSVLGIILGGGAGTRLYPLTKKRAKPAVPLGANYRLIDIPVSNCLNSNVSKIYVLTQFNSASLNRHLSRAYASNMGGYKNEGFVEVLAAQQSPENPNWFQGTADAVRQYLWLFEEHNVLEYLVLAGDHLYRMDYEKFIQVHRESDADITVAALPMDENRATAFGLMKIDEEGRIIEFAEKPKGEQLKAMKVDTTIFGLDDERAKEMPYIASMGIYVVSKNVMLNLLREKFPAANDFGSEVIPGATSIGLRVQAYLYDGYWEDIGTIEAFYNANLGITKKPVPDFSFYGRSSPIYTQPRYLPPSKMLDADVTDSVIGEGCVIKNCKIHHSVVGLRSCISEGAIIEDTLLMGADYYETDADKRFLAAKGSVPIGIGRNSHVKRAIIDKNARIGENVKILNSDNVQEAARETDGYFIKSGIVTVIKDALIPSGTVI

SEQ ID NO: 24706 - protein, 125 aa, Glycine max
  misc_feature (83)..(83): Xaa can be any naturally occurring amino acid
  misc_feature (86)..(86): Xaa can be any naturally occurring amino acid
  misc_feature (100)..(100): Xaa can be any naturally occurring amino acid
  misc_feature (103)..(103): Xaa can be any naturally occurring amino acid
  misc_feature (105)..(108): Xaa can be any naturally occurring amino acid
  misc_feature (110)..(111): Xaa can be any naturally occurring amino acid
  misc_feature (113)..(118): Xaa can be any naturally occurring amino acid
  misc_feature (120)..(120): Xaa can be any naturally occurring amino acid
  unsure (1)..(125): unsure at all Xaa locations
MASHDGISAASSDSVFNHLVRAPEDPILGVTVAYNKDPSPVKLNLGVGAYRTEEGKPLVLNVVRRVEQQLINDVSRNKEYIPXGGXADFNKLSAKLIFGXDRXGXXXXGXXLXXXXXXRXGGGGG

SEQ ID NO: 24707 - protein, 217 aa, Thermococcus kodakarensis KOD1
MGRIKAVLFDIDGTLLTEMPLIQLFLPQVYEKLAKKLETTKEEARNVFLSEIFSRRDTYDWHDWNFFFELFGLNMRYEDLLRRYPHKLHVYPDTIPTLEWLKGSGYPLGVVTSGPEYQRLKLKLTGLEGYFDVIVTREDVKAIKPEPKIFLYALEKLGVEPKEAAFVGDSLSQDVYGAKHVGMLSIWINREGEPGHHLADYEIRTLHELRKILGVVE

SEQ ID NO: 24708 - protein, 260 aa, Rhodococcus rhodochrous
MDLNLKDRTYLVTGGSSGVGLATVAMLLDEGAQVVTCARDVDRLDAALSELPGRDRVLTAACDVRDSEAVARLVEAAQDRFGGLDGLVNNAGSSRMKPRAETTLDDWRDEFDLKFSSVLNTVEAALPALRKSSAPSIVNISAVLARQPETRLVTTSAARAGLLNLSKSLSLELAADGIRVNSVALGLVDTGQWRRRYENSRHAGSFEEWETEIAADRGIALGRFGHADEVAHMIVTLLSPRSSYVTGTSIDVCGGVARYV

SEQ ID NO: 24709 - protein, 234 aa, Burkholderia pseudomallei K96243
MKLPQRLAAEVFGTFWLVLGGCGSAVLAAAFPGLGIGFAGVALAFGLTVLTMAFAIGHVSGCHLNPAVSVGLTVAGRFPARDLVPYVIAQVIGATLGAFVLYLIATGKPGFDVAGSGFATNGYDARSPGHYSLAAAFICEVVLTGFFLFVILGSTDKRAPAGFAPIAIGLCLTLIHLISIPVTNTSVNPARSTGPALFVGSEAIGQLWLFWVAPIIGAAIAGVVYPLVAGRDES

SEQ ID NO: 24710 - protein, 217 aa, Brassica napus
MSMTEEPLYPIAVLIDELKNDDIQLRLNSIRRLSTIARALGEERTRKELIPFLSENNDDDDEVLLAMAEELGVFIPYVGGVEHAHVLLPPLETLSTVEETCVREKAVESLCRVGSQMKETDLVEHFIPLVKRLAAGEWFTARVSACGVFHIAYPSAPDAVKTELRSIYTQLCQDDMPMVRRAAATNLGKFAATIESAHLKTDVMSMFDDLTQDDQDS

SEQ ID NO: 24711 - protein, 491 aa, Escherichia coli
MANYFNTLNLRQQLAQLGKCRFMGRDEFADGASYLQGKKVVIVGCGAQGLNQGLNMRDSGLDISYALRKEAIAEKRASWRKATENGFKVGTYEELIPQADLVINLTPDKQHSDVVRTVQPLMKDGAALGYSHGFNIVEVGEQIRKDITVVMVAPKCPGTEVREEYKRGFGVPTLIAVHPENDPKGEGMAIAKAWAAATGGHRAGVLESSFVAEVKSDLMGEQTILCGMLQAGSLLCFDKLVEEGTDPAYAKKLIQFGWETITEALKQGGITLMMDRLSNPAKLRAYALSEQLKEIMAPLFQKHMDDIISGEFSSGMMADWANDDKKLLTWREETGKTAFETAPQYEGKIGEQEYFDKGVLMIAMVKAGVELAFETMVDSGIIEESAYYESLHELPLIANTIARKRLYEMNVVISDTAEYGNYLFSYACVPLLKPFMAELQPGDLGKAIPEGAVDNGQLRDVNEAIRSHAIEQVGKKLRGYMTDMKRIAVAG

SEQ ID NO: 24712 - protein, 555 aa, Zea mays
VRSAHTRNQISPKSSRRHLRFKMQIFVKTLTGKTITLEVESSDTIDNVKAKIQDKEGIPPDQQRLIFAGKQLEDGRTLADYNIQKESTLHLVLRLRGGMQIFVKTLTGKTITLEVESSDTIDNVKAKIQDKEGIPPDQQRLIFAGKQLEDGRTLADYNIQKESTLHLVLRLRGGMQIFVKTLTGKTITLEVESSDTIDNVKAKIQDKEGIPPDQQRLIFAGKQLEDGRTLADYNIQKESTLHLVLRLRGGMQIFVKTLTGKTITLEVESSDTIDNVKAKIQDKEGIPPDQQRLIFAGKQLEDGRTLADYNIQKESTLHLVLRLRGGMQIFVKTLTGKTITLEVESSDTIDNVKAKIQDKEGIPPDQQRLIFAGKQLEDGRTLADYNIQKESTLHLVLRLRGGMQIFVKTLTGKTITLEVESSDTIDNVKAKIQDKEGIPPDQQRLIFAGKQLEDGRTLADYNIQKESTLHLVLRLRGGMQIFVKTLTGKTITLEVESSDTIDNVKAKIQDKEGIPPDQQRLIFAGKQLEDGRTLADYNIQKESTLHLVLRLRGGQ

SEQ ID NO: 24713 - protein, 225 aa, Nocardia farcinica IFM 10152
MKPKILVVDDDMALAEMLTIVLRGEGFDPHVVGDGTQALAAVREIRPDLVLLDLMLPGMNGIDVCRVLRADSGVPIVMLTAKTDTVDVVLGLESGADDYIVKPFKPKELVARVRARLRRTEEEPAELLSIADIVIDVPAHKVTRGGQQISLTPLEFDLLVALARKPRQVFTREVLLEQVWGYRHAADTRLVNVHVQRLRAKVEKDPENPEIVLTVRGVGYKAGPP

SEQ ID NO: 24714 - protein, 405 aa, Nitrosomonas europaea ATCC 19718
MTTESFRPEKKITTFYPPQRTLMGPGPSDTHPRVLSAMARPTLGHLDPVFTEMMEELKGLLRYVFQTTNLMTFPVSGPGSVGMEMCFVNMIVPGDKVVVCRNGVFGGRMIENVERCGGIPLVVEDKWGDPVDPQKVEDMLKKNPDAKIVAFVHAETSTGVQSDARTIAQIARKHDCLTIMDTVTSLGGTPVYMDAWDIDAIYSGSQKCLSCPPGLSPVSFSERVVDLVRNRTEKVHSWFMDISLLLGYWGASRTYHHTAPTNSLYGLHESLVILYEEGLERSWARHRRNHEALKAGLKTLGIEYVVAEPYRLPQLNSVYVPAGVDEKEVRRRLLDSYNLEIGAGLGDFAGKIWRFGLMGNSSKLENVVFCLDALEHVLIDMGVKVNRGTASSAAHQYYATNPVLA

SEQ ID NO: 24715 - protein, 584 aa, Oceanobacillus iheyensis HTE831
MSSIKQYMEFVKPYKWKIVLTLLIGVMKFGIPLLMPLILKYVIDDIISVEGLSQSEKISQLFWVMGISFVIFLVLRPPIEYIRQYLAQWVGNKILFDIRGKLFDHLQKLSLKFYSQTKTGEIISRVIHDVEQTKNFVITGLMNIWLDLTTILIAIVIMLTMNVQLTLVSIILFPLFGFAVKYFFGRLRKLTRERSQALAEVQGHLHERVQGVPVTRSFALEDYEQEQFDKRNSNFLDKALRHTDWNARTFAVTNTITDLAPLLVIAFAGYQVITGVVTLGTMVAFVGYMERVYSPLRRLINSSTTLVQAIASIDRVFELMNEKYDISDKQDAVDPGRLSGKVEFEHVSFQYDEEELPVLKDVTLQVDKGETIAFVGMSGGGKSTLISLIPRFYDVTNGSVKIDGTDIRDYESRSLRDNIGMVLQDNILFSESIEMNIRMGNPEATDEEVIQAAKAANAHQFIESLPQGYGTMVGERGVKLSGGQKQRIAIARVFLKNPPILIFDEATSALDLESEHLIQETMERLASDRTTFIVAHRLATITHADRIVVVEDGQIIESGSHDQLMKLQGHYYDLYQIQYLEEDN

SEQ ID NO: 24716 - protein, 432 aa, Oceanobacillus iheyensis HTE831
MKFTNSEKLHQEALQHIVGGVNSPSRAYKAVGGGSPVYMERGQGAYFWDVDDNKYIDYLAAYGPIITGHAHPHIAKAIAHAATTGVLYGTPTCLENEFAQMLKEAIPSLEKVRFNNSGTEAVMTTIRVARAYTGRTKIIKFAGCYHGHFDAVLVEAGSGPSTLGTPDSAGVPASTASDVITVPFNDIEAYKAALNKWGDQVAAVLVEPIVGNFGIVEPFKGFLQEVNELTHRAGALVIYDEVITAFRFTYGSAQQIYGVEPDMTAMGKIIGGGLPIGAYGGRKDIMEQVAPLGPAYQAGTMSGNPASMAAGIACLEVLKEEGVYEELDRLGKRLEEGILEQAREHGIHITVNRLCGALTVYFGVDQITNYAEADASDGEAFAKFFQLMLREGINLAPSKYEAWFLTTEHKDSDIENTIDAVGRSFAEMAKTL

SEQ ID NO: 24717 - protein, 144 aa, Chlamydophila pneumoniae AR39
MEQTLSIIKPDSVSKAHIGEILSIFEQSGLRIAAMKMMHLSQTEAEGFYFVHRERPFFQELVDFMVSGPVVVLVLEGANAVSRNRELMGATNPAEAASGTIRAKFGESIGVNAVHGSDTLENAAVEIAYFFSKIEVVNASKPLV

SEQ ID NO: 24718 - protein, 349 aa, Oryza sativa (japonica cultivar-group)
MANLTDLVNLNLSDCSDKIIAEYIWVGGSGIDLRSKARTVKGPITDVSQLPKWNYDGSSTGQAPGEDSEVILYPQAIFKDPFRRGDNILVMCDCYTPQGEPIPTNKRHSAAKIFSHPDVVAEVPWYGIEQEYTLLQKDVNWPLGWPGPYYCAAGAEKAFGRDIVDAHYKACIYAGINISGINGEVMPGQWEFQVGPSVGIAAADQVWVARYILERVTEVAGVVLSLDPKPIPGDWNGAGAHTNFSTKSMREPGGYEVIKKAIDKLALRHKEHIAAYGEGNERRLTGRHETADINTFKWGVANRGASIRVGRDTEKEGKGYFEDRRPASNMDPYVVTGMIAETTLLWKQN

SEQ ID NO: 24719 - protein, 356 aa, Geobacillus kaustophilus HTA426
MELDFPIVQVLNEEGTIVQPEYREQITKELTMTMYRHLIRTRMVDRKCISLQRQGRIGTYVPYEGQEACQVGSALALNDGDWMFPTYRDHGAMMTFGRSLTQTLLYWKGRTEGCVPPEGKKIVPPSVPIATQLPHAAGAACAEKWKGTKNAVIVYFGDGATSEGDFHEGLNFASVFNAPVVFFNQNNQYAISVPITRQMKTKTIAQKALAYDIPGLRIDGNDVFAVYFKTTEALERARNGGGPTLIEAVTWRYGAHTTSDDPSRYRDQEESQKRRETTDPIKRVERLMQREGWWDEKWANQVQEEVNAEIEQAVVEMESYPKANVSDMFDFVFAQPTWTIAEQKEAYLQWKRGMER

SEQ ID NO: 24720 - protein, 164 aa, Silicibacter pomeroyi DSS-3
MTQIDYTRAAKYFLLQDFWVGMKLGLKYFFSPKATINYPHEKGPLSPRFRGEHALRRYPNGEERCIACKLCEAICPAQAITIDAEPREDGSRRTTRYDIDMTKCIYCGFCQEACPVDAIVEGPNFEFATETREELFYDKEKLLSNGDRWEAEIARNLELDAPYR

SEQ ID NO: 24721 - protein, 268 aa, Salmonella enterica subsp. enterica serovar Paratyphi A str.
MERYENLFAQLNDRREGAFVPFVTLGDPGIEQSLKIIDTLIDAGANALELGVPFSDPLADGPTIQNANLRAFAAGVTPAQCFEMLALIREKHPTIPIGLLMYANLVFNNGIDAFYARCEQVGVDSVLVADVPVEESAPFRQAALRHNIAPIFICPPNADDDLLRQVASYGRGYTYLLSRSGVTGAENRGALPLHHLIEKLKEYHAAPALQGFGISSPEQVSAAVRAGAAGAISGSAIVKIIEKNLASPEQMLAELRSFVSAMKAASRA

SEQ ID NO: 24722 - protein, 577 aa, Salmonella enterica subsp. enterica serovar Typhi Ty2
MPGTVIRKRVSNMETTTKKARSLYIPYAGPVLLEFPLLNKGSAFSVEERRNFNLSGLLPEVVESIEEQAERAWLQYQGFKTEIDKHIYLRNIQDTNETLFYRLVQNHLEEMMPVIYTPTVGAACERFSEIYRRARGVFISYPNRHNMDDILQNVPNHNIKVIVVTDGERILGLGDQGIGGMGIPIGKLSLYTACGGISPAYTLPVVLDVGTNNQQLLNDPLYMGWRHPRITDDEYYAFVDEFIQAVKQRWPDILLQFEDFAQKNAMPLLTRYRDEICSFNDDIQGTAAVTVGTLIAASRAAGSQLSEQKIVFLGAGSAGCGIAEQIIAQTQREGLSEDAARQNVFMVDRFGLLTDRMPNLLPFQAKLVQKCDNLQHWDTENDVLSLLDVVRNVKPDILIGVSGQTGLFTEEIIREMHKHCPRPIVMPLSNPTSRVEATPQDIIAWTEGNALVATGSPFSPVIWKDKVYPIAQCNNAYIFPGIGLGVIASGASRITDEMLMSASETLAKHSPLVNNGEGLVLPALKDIQVVSRAIAFAVGKMAQQQGVAVKTSAEALQQAIDDNFWKPEYRDYRRTSI

SEQ ID NO: 24723 - protein, 336 aa, Glycine max
NSPRNLSLSLSFFPFFTFSFILISISISLHQPTPPFPLSFHAIMASSSIKHTHHLNRTKLFMKEETLLKKKHHYPKIIRIRVTDADATDSSSDDDEPSMSSTRRRVKNFVNEITIQGGGGGGGDVNVVSKKRRFKSGAGAPLCRRKTGAKKFRGVRQRPWGKWAAEIRDPSRRVRLWLGTYDTAEEAAIVYDNAAIQLRGADALTNFITPPPENRKTGYCSGEESRNNDDLRSPTSVLGRCSVSEEAVTANDVFGGSSECEYSCVSESVFPIPNEVVFDFESTLDMFDEGINNVVAETSIFLAEDLDLGFTSWHRECDNFQDIGGDLFVWDPLVAL

SEQ ID NO: 24724 - protein, 380 aa, Geobacillus kaustophilus HTA426
MNVMLSPNMSQGLDLFFQMREHEQVVFCLDEATGLRAIIAIHSTALGPALGGCRMHPYATTEEALADALRLSKGMTYKCLAADVDFGGGKAVIIGDPRKDKSPELFRAFGQFVESLGGRFYTGTDMGTTPDDFVHALKETNCIVGVPEAYGGSGDSSVPTAEGVVYGIQATNDVVFGSKHLHGKTYAVQGLGKVGKKVALRLLEEGADLYVCDLNEAAVKEVVAYGKQIGASVKPVNGTDIYRVEADVFIPCAFGGVINDETIAELRVKAVVGSANNQLADKRHARMLKEKGIVYAPDYIVNAGGLIQVADELYGANKERVLAKTKAIYDTLLAIYARAESEGITTIEAADQFCEERLEKRKRRNHFFTHQKRPKWDIRR

SEQ ID NO: 24725 - protein, 463 aa, Burkholderia sp. 383
MSGSNTGLGTGLKQRHVTMMSIAGVIGAGLFVGSGHAIAEAGPASILAYAIAGVLVVLVMRMLGEMAVAHPDSGSFSTYADRAIGHWAGFSIGWLYWWFWVLVIPIEATAAATILNAWFPGVATWAFALGITLVLTVTNLFSVKNYGEFEFWFALIKVVAIVVFLCIGGAAIVGIIPAPAVSGVSNLFVHDGFMPHGAGAVLAAMLTTMFSFLGTEIVTIAAAESDNPQRQIVRATNSVIWRITLFYLGSILVVAAIVPWNDPLLPKHGSYQRAMELIGIPNAKAIIDVIVLVSVASCLNSALYTASRMLFSLSKRKDAPAFLHRTDSTGTPRAAVLASTAFGFVTVIANYLMPEQVFGFLLATSGAIALLVYLVIAISQLRMRKTLESTGADLTLRMWLFPWLTWLVIVFICGTLTVMLVSEDHRMEVGATAVLALIVLLASWLNKRGRDAQASEGRRASAM

SEQ ID NO: 24726 - protein, 359 aa, Aspergillus fumigatus
MSAFDPSNVDLNTASKEDVICFLSLSENEYNGHLGARISSIFVIFITSTVFTLFPVVAQRLPQWRIPHHVYLFGRYFGTGVIVATAFIHLLDPAYQSIGPGTCIGMSGAWGEYSWCAAIVLSSVILVFLLDVGAEVYVEWKYSVPREANATATFITQPACSSPHESSDRLTATEPSSPTGGKDLYPHADELSVASEQAFRQDIAAFLILEFGIIFHSVIIGLNLGVAGDEFATLYPVLVFHQSFEGLGIGARMSALHFGRRRWLPWILCLAYGLTTPVAIAIGLGVRTSYSPGSRTALTVQGVLDALSAGILIYSGLVELLARDFLFDPCRTKRRGQILYMLGCTLLGAGMMALIGKWA

SEQ ID NO: 24727 - protein, 469 aa, Corynebacterium glutamicum ATCC 13032
MTEHYDVVVLGAGPGGYVSAIRAAQLGKKVAVIEKQYWGGVCLNVGCIPSKSLIKNAEVAHTFTHEKKTFGINGEVTFNYEDAHKRSRGVSDKIVGGVHYLMKKNKIIEIHGLGNFKDAKTLEVTDGKDAGKTITFDDCIIATGSVVNTLRGVDFSENVVSFEEQILNPVAPKKMVIVGAGAIGMEFAYVLGNYGVDVTVIEFMDRVLPNEDAEVSKVIAKAYKKMGVKLLPGHATTAVRDNGDFVEVDYQKKGSDKTETLTVDRVMVSVGFRPRVEGFGLENTGVKLTERGAIEIDDYMRTNVDGIYAIGDVTAKLQLAHVAEAQGIVAAETIAGAETQTLGDYMMMPRATFCNPQVSSFGYTEEQAKEKWPDREIKVASFPFSANGKAVGLAETDGFAKIVADAEFGELLGAHLVGANASELINELVLAQNWDLTTEEISRSVHIHPTLSEAVKEAAHGISGHMINF

SEQ ID NO: 24728 - protein, 294 aa, Nicotiana tabacum
MDQYEKVEKIGEGTYGVVYKARDRVTNETIALKKIRLEQEDEGVPSTAIREISLLKEMQHANIVRLQDVVHSEKRLYLVFEYLDLDLKKHMDSSPEFSKDPRLVKMFLYQILRGIAYCHSHRVLHRDLKPQNLLIDRRTNALKLADFGLARAFGIPVRTFTHEVVTLWYRAPEILLGSRHYSTPVDVWSVGCIFAEMVTQRPLFPGDSEIDELFKIFRVMGTPNEDTWPGVTTLPDFKSAFPKWPSKDLATIVPNLDGAGLDLLDKMLRLDPSKRITARNALEHEYFKDIGYVP

SEQ ID NO: 24729 - protein, 353 aa, Aspergillus fumigatus
MQGLHTLLVRDPETGATPSCDTGNEYDGRMGLRISSIFVIMVGSMLGAVFPVFARSFSTSKFLRRAFFVAKYFGSGVIIATAFIHLLGPAEEALTNECLTGPITEYSWVEGIILMTIVVLFFVELMVMRYARFGHGHLDDLGHDDHTHPSLDAPPATVESKSHMPEEDHLGHSREHRDTESGRKASLIEEYSAQLTSVFILEFGIIFHSIFIGLTLAVSGEEFITLYIVLVFHQTFEGLGLGSRLATIPWPNSKRFTPYLLGIAYGLSTPLAIAIGLGVRNSYPPEGYTTLVVNGVFDSISAGILIYTALVELMAHEFMFSPSMRKAPIRTVLAAFGLLCLGALLMALLGKWA

SEQ ID NO: 24730 - protein, 340 aa, Lactococcus lactis
MDELSVKFGIVDDALEDLFKQIQDAGISIVDKDGNPSPLALVTDEIEKEEVSDTAMDEIVTNVRIDDPVRMYLKEIGRYPLISLDEETKLAEAIIAGGEGAEFAKQMLAEANLRLVVSIAKRYSGRGMQFLDLIQEGNMGLMKAVDKFDHTKGFKFSTYATWWIRQAITRAIADQARTIRIPVHMVETINKLIRVQRNLLQELGRDPSPEEIGKELHMAPDKVREVLKIAQEPVSLETPIGEEDDSHLGDFIEDDVIESPVDYTNRILLREQLDEVMDTLTDREENVLRMRFGLDDGRMHTLEDVGKQFKVTRERIRQIEAKAIKKLRHPRRSKPLRDFM

SEQ ID NO: 24731 - protein, 270 aa, Leifsonia xyli subsp. xyli str. CTCB07
MTIDDRGQIRSARRIVVKVGSSSISGENAGQIGPLVDALAEAHGRGSQVVLVSSGAIATGIPYLALTERPKDLATQQAAAAVGQNVLIYRYQDSLDRYGIVAGQVLLTARDVENPTHRSNAKRAMERLLDLRILPIVNENDTVATHEIRFGDNDRLAALVAKLVEADLLVLLSDVDALYTKPPQESGAERIAHVGWNDQLEGVEIGSAGPSGVGTGGALTKVSAARQAAEHGTAVVLTATSLVVDALRGEPVGTWFAPAQETAVESAPAS

SEQ ID NO: 24732 - protein, 143 aa, Helianthus tuberosus
MANNYVEVGPWGGSGGANPWSIIPNDGRITRINVRSGAIVDAIYFGYTEGGISYETAIFGGRNGSLSTIDIADDEEIIEINGKVGTLENLNLVSQLTFVTNKQTYGPYGTNGGTDFSCPIAKGKVVGFFGRYGCLPGRYWCRT

SEQ ID NO: 24733 - protein, 421 aa, Leifsonia xyli subsp. xyli str. CTCB07
MSPTSTATSLTDRFSAAKRASIALAIASNAEKDAALRGIAEGVLAAADSILAANAVDLATGRENGLSTGLLDRLTLTPARLQGLADAVLEIVALTDPVGQTVRGSALPNGVKITQIRVPFGVVGAIYEARPNVTIDIAALALKSGNAAVLRGGSAAIATNGVLVGVIQEALAAAGLPADAVQTIDDFGREGANGLMQARGFVDVLIPRGSAGLIQIVVTQSAVPVIETGAGVVHIVLDESAREDWAVDIVRNAKAQRPSACNAVETVLVLRAAAERLLSPVLGALTEAGVTIHADEIALPHSPGAIAVTAEDYATEHMSLDVSVRVVDDLDAAIEHIRTHSTQHTEAIVTNDLANAERFLNEVDSAVVMVNASTRFTDGGEFGFGAEVGISTQKLHARGPMGLPELTSTKWIVRGAGQVRS

SEQ ID NO: 24734 - protein, 237 aa, ASPERGILLUS NIDULANS FGSC A4
MSTPDITLYTDNTPNGHKIPIILEELGLPYKLEQVSIQTGEQKKEWFLKINPNGQIPALTDGKQRVFDSGAILLYLADKYDAEGKVSYKPGTPEYYEQLSWIFWQIGGLGPQGGAALSFSTFAPVRSDYAIEKFLSGYKNLLGVLEYRLEESPYLAGEKYTIADIASFTWAAQGAAALDIDLAEWPHVKAWTDKIVQRGAVQKGLVTPKPPFDLEQFKVILRGQREALMKKENSDKH

SEQ ID NO: 24735 - protein, 269 aa, Arabidopsis thaliana
MGRSPCCEKEHMNKGAWTKEEDERLVSYIKSHGEGCWRSLPRAAGLLRCGKSCRLRWINYLRPDLKRGNFTHDEDELIIKLHSLLGNKWSLIAARLPGRTDNEIKNYWNTHIKRKLLSKGIDPATHRGINEAKISDLKKTKDQIVKDVSFVTKFEETDKSGDQKQNKYIRNGLVCKEERVVVEEKIGPDLNLELRISPPWQNQREISTCTASRFYMENDMECSSETVKCQTENSSSISYSSIDISSSNVGYDFLGLKTRILDFRSLEMK

SEQ ID NO: 24736 - protein, 384 aa, Thermococcus kodakarensis KOD1
MNFDPVSEAKRIGSLIVSWRRDFHMHPELGYEEERTSRIVEEHLREWGYSIKRVGTGIIADIGEGEKTIALRADMDALPIQEENEVPYKSKVPGKMHACGHDAHTAMLLGAAKIIAEHRDELKGRVRLIFQPAEEGGNGAVKMIEGGALEGVDAIFGFHVWMDLPSGIIGIRDGPFLAGAGIFNGKIIGKGGHGASPHETVDPIPIAAETVLAFQTIVSRNIEPIETGVVSVTSVHGGTAFNVIPEEVEFKGTFRFFKPEVGELIQMRMREILDGITKAHRARYELSIEELTPPTINTKEMADFARKVAEKYGLKYGEVRPTMGAEDFAFYLQKVPGAFLALGIRNEEKGIIYPHHHPKFDVDEDVLYIGTAMEVALAFEFLSE

SEQ ID NO: 24737 - protein, 497 aa, Haemophilus paragallinarum
NVDPGTMSPTQHGEVFVTQDGAETDLDLGHYERFIRTKMTKRNNFTTGKIYSEVLRKERRGDYLGATIQVIPHITNEIKARVIDGAAGHDVAIVEVGGTVGDIESLPFLEALRQLAVDVGRERTIFMHLTLVPYIPTAGEVKTKPTQHSVKELLSIGIQPDVLICRSDRMIPPNERSKIALFCNVPERAVISLKDVNSIYQIPALLKSQGLDEFICQRFRLDCPEADLSEWEQVLYQQANPTGEVTIGMVGKYTELPDAYKSVNEALKHGGLKNRLNVNIKYIDSEDVESKGTEVLAGLDGILVPGGFGYRGVEGKIRTAQYARENNIPYLGICLGMQVALIEYARHKAGLTEANSTEFDKDCKQPVVGLITEWQDAEGKIETRSDKSDLGGTMRLGAQQCHLAEGSLARELYGAETIEERHRHRYEVNNILLPQIEKAGLKVTGLSADKKLVEIIEVPNHPWFVACQFHPEFTSTPRDGHPLFAGFIKAAKDYQQG

SEQ ID NO: 24738 - protein, 446 aa, Shewanella oneidensis MR-1
MSEAKLLLVEDDASLREALLDTLMLAQYDCIDVASGEEAILALKQHQFDLVISDVQMPGIGGLGLLNYLQQHHPKLPVLLMTAYATIGSAVSAIKLGAVDYLAKPFAPEVLLNQVSRYLPLKQNRDQPVVADEKSLSLLSLAQRVAASDASVMILGPSGSGKEVLARYIHQHSSRAEEAFVAINCAAIPENMLEATLFGYEKGAFTGAYQACPGKFEQAQGGTLLLDEISEMDLGLQAKLLRVLQEREVERLGGRKTIKLDVRVLATSNRDLKAVVAAGQFREDLYYRINVFPLTWPALNQRPADILPLARHLLTKHAKALNVVDLPEFDDAACRRLLSHRWPGNVRELDNVVQRALILRAGALITANDIIIDAQDVPLTSDDAEYMSEPEGLGEELKAQEHVIILETLVQCQGSRKLVAEKLGISARTLRYKMARMRDMGIQLPS

SEQ ID NO: 24739 - protein, 146 aa, Phaseolus vulgaris
MGAFTEKQEALVNSSWEAFKGNIPQYSVVFYTSILEKAPAAKNLFSFLANGVDPTNPKLTAHAESLFGLVRDSAAQLRANGAVVADAALGSIHSQKGVNDSQFLVVKEALLKTLKEAVGDKWTDELSTALELAYDELAAAIKKAYA

SEQ ID NO: 24740 - protein, 403 aa, Geobacillus kaustophilus HTA426
MGREVVIVDAVRTPIGRYKGALKEVRPDDLAAVVIRALIERNPNVPVEQIDDVVFGNANQAGEDNRNVARMAALLAGLPIEVAGVTVNRLCGSGLDAVNYAARAILANEADIMIAGGVESMTRAPFVMAKPSSDFPRGNIEMYDTTIGWRFINPKMHEMYGTDSMPQTAENVAKRFGITREAQDEFAYESQMKAKQAIETNRFADELVPVVYHDRKGNRVVVDKDEHPRPDTTLEKLAKLPPLFENGTVTAGNSSGVNDGAAALLVMSAEKAKELGLKPLAVYVTSAVAGVEPAVMGIGPIFATRKALRRAGLSLDDIGLVELNEAFASQALECIRQLELDRAKVNVNGGAIALGHPLGASGARILTTLIYEMRKRGVTYGLATMCIGVGQGIATIVKNADER

SEQ ID NO: 24741 - protein, 767 aa, Debaryomyces hansenii CBS767
MVQSSILGFPRIGGQRELKKVTESYWQGKVGVNDLLSKGKELRSHNWKLQKEAGVDVIPSNDFSYYDQVLDLSLLFNVIPDRYTKFELAPIDVLFAMGRGLQRKATDSTPAVDVTALEMVKWFDSNYHYVRPTFSHSTEFKLNTEAGLKPVDEYLEAKALGIETRPVIVGPISYLYLGKADKDSLDLDPISLLDKILPVYKQLLAKLKEAGAKEVQIDEPILVLDLPKEIQAKYADAYKALAGSDVPEIVLATYFGDVRPNLSAIKGLPVSGFHFDFARVPEQLDEVVAALGDKQTLSVGIVDGRNIWKTDYSKASAFVAKAIEKVGKDRVVVSTSSSLLHTPVDLQNEKKLDATIKDWFSFATQKLDEVVVLAKNASGEDVSKELAANAQSIKSRQESSITTNPKVQERLATVNESLSTRKVPFAERLPSQQTKYNLPLFPTTTIGSFPQTKDIRINRNKYTKGELTAEQYEEFINKEIETVVRFQEEIGLDVLVHGEPERNDMVQYFGEQLEGYAFTTNGWVQSYGSRYVRPPIVVGDVSRPKAMTVKESVYAQSITDKPMKGMLTGPVTCLRWSFPRDDVSQKVQALQLGLALRDEVQDLEKAGITVIQVDEPAIREGLPLRSGKERSDYLNWAAQSFRVATSGVENDTQIHSHFCYSDLDPNHIKALDADVVSIEFSKKDDANYIQEFSNYPNHIGLGLFDIHSPRIPSKEEFISRIEEILKVYPANKFWVNPDCGLKTRGWEETKASLTNMVDAAKHFRGKY

SEQ ID NO: 24742 - protein, 441 aa, Chlamydophila pneumoniae AR39
MIENDFPEASNFESSHFYRDKVGVIILCGGEGKRLSPLTNCRCKPTVSFGGRYKLIDIPISHAISAGFSKIFVIGQYLTYTLQQHLFKTYFYHGVLQDQIHLLAPEARQGDQIWYQGTADAIRKNLLYFEDTEIEYFLILSGDQLYNMDFRSIVDTAIRTHVDMVLVAQPIPEKDAYRMGVLDIDSEGKLIDFYEKPQEKEVLKRFQLSSEDRRIHKLTEDSGDFLGSMGIYLFRRDSLFSLLREEEGNDFGKHLIQAQMKRGQVQTLLYNGYWADIGTIESYYEANIALTQKPHAEKRGLNCYDDNGMIYSKNHHLPGAIITDSMISSSLLCEGCVINTSHVSRSVLGIRSKIGENSVVDQSIIMGNARYGSPSMPSLGIGKDCEIRKAIIDENCCIGNGVKLQNLKGYIKYDSPDKKLFVRDNIIIVPQGTHIPDNYIF

SEQ ID NO: 24743 - protein, 287 aa, Arthrobacter keyseri
MTTETIDTTASETPRLRLLHGHSIPRLGLGTWPMLEDECEAAVRVAVQSGYRLVDTAFQYRNEEAVGRGIRTAGVPRSELFISSKFNKESHSIDGVQRAYDESLRKLGLDHLDMFMCHWPVPALGKYVDAWKGLVKLLEEGRVKAIGVSNFKPSHLKEIIDATGVVPDVNQIQLSPDIARTEPRAVHRLLGTVTEAWSPIGRSSGLRANPIIIEIAQRLNKSPAQILLRWHVQQDIVPIPQASDPLWLTENLSVFDFSLSATEMAAIRQLDKGEGAARDSDLPENGH

SEQ ID NO: 24744 - protein, 1442 aa, Mougeotia scalaris
MDRTIDISDEKWQSRFAAQSSQAAESQYSSDALLNEEYENASIHGSFVSYKELMKSSAEAPKPWEVDQIAYLEKMRRSGLTQRFGTMLVVEPPLRHAQKLHLLAHSENAVDLPGIEPRELEIGGDILPFFTSESGKALFSEAASKGDSVKTAIVTGRDGETKFYAICHRNACGVIIDLEPVVPKGIHTSYEPNLDTSSPPLSMEAALDIVQPAIQRLKAIPAGSVQEICDTVTREVRELLQYDRVIVYKFHPDQHGEVFAESAKEGLDPYVGLHYPSTDLPQAIRVLLLRVGIRMICDATQSMVKIVQPDDVEPVDLSDSTLRAPHGCHAQYMINMGSLSSITFAIVVESDKTVRAGEEPEKERTLWGIIVGHHSIPRFTPYPLRKAVQSLAETFGSLLTREIALAASWHEEKTLNMQKKLCDMLEADIPLGIVIDSPNIQDLVKCDGAALFFSGRFWLLGSTPTERQVADLAEWILKHLSKKGAVCTDSLAEAGYPNADELGSKTCGMVAVKVGKRDFVFWFREHTAKVVRWAGQRQKKEEIDDESKMMPRNSFKAFMEIVRERCLPWEDIELEAINGLRLMLQDALDVSRGADIPVVVGGTTIEGDPFDGAGYHESTSEKPVSAITSEVEAALSAVEACFLITDATQESRPIIYCSHVFSTLTGYSAGELEGGTLEKLEGLETDVAAASKLHLALSGRTQYSGRLLHYKKDGTPFWNLITCGPIKNGQNEVVNFVIVFQELAKYHEISSVPPNLVDGDLSAPEKGFPVSLIRYDGRLKEKSSRIVDEIIRLVKNPATIADSLALLGQMSAMASPAVSQVESVPVVEHRERHSSMHIAKPAATKTSRRRSLVEVLLGKGREIEAPVKEAFDSDVKSDDGKKRRAAKGIDLGTTLERLDYGFLVIDTRLDECPIIFMSDRYILQTQHTREENIGGDILFLDGEESSPAEVDKIRKAVQNNDELSLQLVAYRKNGDKFWALYHLSVAKDKDGNALYIINVVKDLGEAQISDAAFRKEDAEARKEAAEITRALHDLPDTAAYELWTVHSKFVASKPHRAWDSAWTAIKEVREKEGRLCLKHFKPIKPLGNGDSGSVVLVELRGTGHVFAAKIMEKERMIERNKVHRIASEREILNQLDHPFLPSLYASFQTTKHVCFITNFCPGGELYDFLEIQPYHRFEEHVAQFYAAEILTSLEYLHCQGVVYRDLNPENILLAEDGHIVLTDFDLSILSSTFPKLIREANGTSKRKSSRRPSKERAPTFVAEPTMRSNSFVGTEEYISPEIVTGEGHGPSIDWWSFGILIYEMLYGETPFCGSSMNKTFHNILNKEVAFPSPVPVSDMAKDLITSLLIKDSEKRLGSKLGAAEIKVHPFFHGINWPLIRNKKVVPPKVPNKLNSVVGGHEEQDISSNHWRLQDTNNDSNRSFPIMSFDGSIIDATEDRSTW

SEQ ID NO: 24745 - protein, 396 aa, Thlaspi caerulescens
MEPSSHIIEVNGGRSDEERRAVASKVCGEAPCGFSDAKNVSGDTEERNASMRKLCIAVVLCLVFMSVEIVGGIKANSLAIMTDAAHLLSDVAAFAISLFALWAAGWEATPRQTYGFFRIEILGALVSIQLIWLLTGILVYEAISRLLTETSEVNGFLMFAVATFGLLVNIIMAVMLGHDHGHSHGHGHDHENHSHGVTVTTHDHDPTHDHDHDHDHDDGHGPSHGEDNQDEAHGDVTEQLLEKPKQEKEKKKRNINLQGAYLHVLGDSIQSVGVMIGGAAIWYNPKWKIIDLICTLAFSVIVLGTTINMIRNILEVLMESTPREIDATKLEKGLLEMEEVVAVHELHIWAITVGKVLLACHVNVTPQADADMVLHKVVDYIRREYNISHVTIQIER

SEQ ID NO: 24746 - protein, 497 aa, Salmonella enterica subsp. enterica serovar Typhi Ty2
MKTQTTHAAEQHAAKRRWLNAHEEGYHKAMGNRQVQMIAIGGAIGTGLFLGAGARLQMAGPALALVYLICGIFSFFILRALGELVLHRPSSGSFVSYAREFLGEKAAYVAGWMYFINWAMTGIVDITAVALYMHYWGAFGDVPQWVFALGALTIVGTMNMIGVKWFAEMEFWFALIKVLAIVIFLVVGTIFLGTGQPLEGNATGFHLITDNGGFFPHGLLPALVLIQGVVFAFASIELVGTAAGECKDPQTMVPKAINSVIWRIGLFYVGSVVLLVLLLPWNAYQAGQSPFVTFFSKLGVPYIGSIMNIVVLTAALSSLNSGLYCTGRILRSMSMGGSAPKFMAKMSRQHVPYAGILATLVVYVVGVFLNYLVPSRVFEIVLNFASLGIIASWAFIMVCQMRLRQAIKEGKAADVSFKLPGAPFTSWLTLLFLLSVLVLMAFDYPNGTYTIASLPLIAILLVAGWFGVRRRVAEIHRTAPVTADSTESVVLKEEAAT

SEQ ID NO: 24747 - protein, 491 aa, Malus x domestica
MTSILMGYDIGVMSGASIYIEKDLKVTDTQIEIMIGVIEIYSLIGSAMAGKTSDWVGRRYTIVISGAIFFIGAILMGFSTNYTFLMCGRFVAGIGVGYALTIAPVYSAEVSPTSSRGFLTSFPEVFVNIGILLGYLSNYAFSFCPLDLGWRLMLGVGAIPSVGLAVGVLAMPESPRWLVMQGRLGEAKRVLDRTSDSKEESMLRLADIKEAAGIPEECNDDIVQVSGHSHGEGVWKELLVHPTPTVRHILIAAIGFHFFQQASGIDALVLYSPRVFAKAGITSTNQLLLCTVGVGLSKTVFTLVATFFLDRVGRRPLLLTSMAGMVGALVCLGTSLTMVDQHEGVRMTWAVILCLCCVLAYVGFFSSGIGPIAWVYSSEIFPLRLRAQGCGMGVAVNRLMSGILSMTFISLYKAITMGGTFFLYAAIGTVGWIFFFTMLPETQGRTLEDMEVLFGKFHKWRKANKLLEKKKRVAHGDIGTSDPDNRAHLLA

SEQ ID NO: 24748 - protein, 635 aa, Neurospora crassa
MKRFSQRVLSRTKDKDSKSKKNKDAKDGTASPNSQGSREATQSPVLTPSSSTSTLVNDSRNKPLPPNNAAHGDHGNSMLGPQGGNSNPGAADRFSSIGGQQQGANGGSTPVRHGTLPPTVIISPSAPHVPPPGAAETMPHDLAPPKAGQKSLMFDRLHQTPKDVLEGLRTPKRQNSSRFDISAHRELEKLPGFHEVAPNHRQDLFMKKIEQCNVIFDFNDASADMKSKEIKRLALHELLDYVANNRQVITEPMYPRVVEMFAKNLFRPIPPPMNPQGEAFDPEEDEPVLEVAWPHIQVVYEFFLRFIESQDFNTNIAKAYIDHSFVLQLLELFDSEDPRERDFLKTTLHRIYGKFLNLRSFIRRSINNVFFQFTYETERFNGIAELLEILGSIINGFALPLKEEHKLFLTRVVLGLLRYWPKVNSTKEVMFLNEVEDIFEVMDPAEFAKVQEPLFHQLAKSVASPHFQVAERALYFWNNEYFCNLVSDNVEIILPIMFAPLYENSKGHWNRTIHGMVYNAMKLFMEINPQLFDDCSHEYTENQSNAPAREAHRQSKWARLEELAKQRKVESGTSNGTSSIPARTTVHPLPRLEEVDGTEDNQKRLDSLKLQDGDRRERRPGMHERQSSVGSSRSR

SEQ ID NO: 24749 - protein, 713 aa, Saccharomyces cerevisiae
MVTNNGDGEHLGIRRNGNLRHPSNNMKIPRRAQSTVLNSNPFYSRKYSMSTLTPRDICRSVDSRVFVDMSSPNFQTLEDPHRDEIINSVRLNYLNSSKRSSVSHGNEAIPRVNPTKNSSASTIAAANVDSDDDETNLSSAGGDITHDIYKLVKAEDPKRLRRPRSMENVTPKIEHHTKLSSASGLNVPGGFRREFIVNKKRQEHQLNDSASSDFTSHESDSINQSSPSSNQDIDKVPFLTRNFLEFLYVFGHFAGESFEDDFIPDSSNMMIRGEDERSALLSRPDHMKVLPSAKGTTSTKKVFLILLKSFIGTGVLFLPNAFHNGGLFFSVSMLAFFGIYSYWCYYILVQAKSSCGVSSFGDIGLKLYGPWMRIIILFSLVITQVGFSGAYMIFTAKNLQAFLDNVFHVGVLPLSYLMVFQTIIFIPLSFIRNISKLSLPSLLANFFIMAGLVIVIIFTAKRLFFDLMGTPAMGVVYGLNADRWTLFIGTAIFAFEGIGLIIPVQDSMRNPEKFPLVLALVILTATILFISIATLGYLAYGSNVQTVILLNLPQSNIFVNLIQLFYSIAIMLSTPLQLFPAIKIIENKFFPKFTKIYVKHDDLTTRVELRPNSGKLNWKIKWLKNFIRSIIVIIVVSIAYFGSDNLDKFVSVIGSLACIPLVYIYPSMLHLRGNSLPETKGEFWRFKPMLDTILIFFGIASMLYTSYQSIFGV

SEQ ID NO: 24750 - protein, 358 aa, Leifsonia xyli subsp. xyli str. CTCB07
MVTTSHTPSDIKRWRRYLANERAEAAVYRDLAGRREGKEREILLALAEAEGRHEQHWLDLLGDQAGRALRGDIRTRALSVLARRFGSVFVLALAQRAEARSPYATDADATAQMVADEQVHEEVVRALAARGRQRLSGTFRAAVFGANDGLVSNLAFVLGVSASGVATEIVLLTGVSGLLAGALSMGAGEYVSVRSQRELLEASTPNPATRSALPDLDVDANELTLVYRARGMSPEEATAHAHQVLSTLGAHSSPLPGPGVRDEEHEEIGTGWNAALSSFCFFASGALIPILPYLFGLTGTTAVIVASALVGLVLLGTGAIVGLLSGGSPWKGALRQLGIGFGAAAATYFLGLLFGATG

SEQ ID NO: 24751 - protein, 356 aa, GIBBERELLA ZEAE PH-1
MVNTTDNLNRLLGLLTQLQASKVTDWVKPGDTSGEFKRQVSSFRDWISRDANAKYPAEKGRYHLYVSYACPWACRTLIARKLKGLEDFISYSVVHWHLGEGGWRFVSKDESVPGENVVPDPIKGHESFTHLKDVYFESEKNYDGRYTVPVLYDMKTNRIVSNESSEILRMLGTEFDDLLDEEHKAIQLYPENLQKQIEEAHEWQYGGINNGVYKSGFATTSEAYERNVVALFESLDRAEKHLSEQKEGPYWFGNQLTEVDIRLFVTIIRFDPVYVQHFKCNIRDIRSGYPALNRWMRNLYWNHPAFKDTTQFEHIKWHYTRSHTQINPHSITPVGPLPHILPLEEEVAAVAAAQKN

SEQ ID NO: 24752 - protein, 202 aa, Oryza sativa (japonica cultivar-group)
MEVEASYSYGFLPSGRHQPYAPPPPHPAEEGELWEYFPCPFCYIEVEVPFICNHLQEEHCFDTRNAVCPLCADNIGRDMGAHFRVQHSHLLKRRKPSRPSSSWPTPSNNSDPYFEGPPQYMMNNRTYQDPAPDPLLSQFICSMAQTDTNSDNTNTEIAVSAVSHDQRLSQRVTLTDDASKLELKERLQRIEFVKEIIMSTIL

SEQ ID NO: 24753 - protein, 327 aa, Rubrobacter xylanophilus DSM 9941
MPRRVVVTRRIPRAGLEALGDLRASVLGEGPPAREELLSAARGASGILSTVTERIDAEVMDAAGPSLRVVANMAVGYDNVDVAAASARGVVVTNTPGVLDETTADTAFMLLMAAARRLGEAERLVRSGRWEGWGPEQLTGPDVWGKTLGIVGFGRIGRAVARRATGFGMRILYASRSRKEEAERELGARRVSLEELLRESDFVSLHTPLTPETRHLIGERELSLMKPAAVLVNTARGPVVDEAALAAALARRRIFAAGLDVYEREPEVHPALLGLENAVLAPHIGSASIETRARMAALAAENLRAVLSGRRPPSPVNPEVLERLPLD

SEQ ID NO: 24754 - protein, 1229 aa, Nitrosomonas europaea ATCC 19718
MILTSLTQRFAIWFTLVALLPIALVGYGLLHIFEGEIRKSAIQQVSSIADKKVEQIDSYLRERILDATFIQTSDTTRQAIDEFSQIFSQFGVDSETYRALDARHQAHYERYLEGTGYYDLFLISPDGWIVFSVSHESDFATSLLTGPYQDSGLGQVFRQTKETHQSSLSSFEYYPPSHGAIAAFVAVPIMIEGNFHGVLALQIYSEHIFDVLTNNVGLGESGETVVTYMENKHLARVMAPLREDPDAALKRTISLDEPQFSLAIRNSLSGEHGGGVVTDFHGNPVIAAWRYLPRVDWGMVVQIDTEEAFASVMQMRVMGLVVLGLTFLMAILGALLFNRRVVTPLKNLNECAQAINAGNLQHHIPDEGWDEIGQLASAFNMMTERLDISYRHLEARVAERTARLEQLNAELAIKEEETRSVVEHMVDCVVTTDERGVMLSVNPVMEKLFGYTVEEAIGQNVAVLVPKPDRDMHEYYMQRYCHTGYGQQYVGRPQQPGGHHVGLGREVEGVHKDGTLLPVYLAVSEYFVGDKRHFTGIMRDMREHVKIRQDLEQARRDAELANQAKSAFLAAMSHEIRTPMNGVIGMIDVLSQTSLSSYQKEMTDLIRESAFVLLEIIEDILDFSKIEAGRLEIEQRPISLEKVVERACGTLTHMAASKEVELILFVDPALPKNVAGDALRLRQILINLINNAIKFSSGMSRPGCVIVKAVPADRANGDVVTVLFQVIDNGIGMDDATRERLFTPFSQGDTSTTRRFGGTGLGLTICRRLVELMKGDITVESQPGKGSTFKARIPFRMIQEGAVQQDEPDEVDLSGLSCIVMGSEDGLSPQLATYLKYAGAAVERISGLSATLERIGQLPAGEWLLVADASDGEFPVDELRAAFGDRPDASAGDQLRFVIVRRGRRHRGRMEEEGVVTLDGNVLYRRVFLHAVAVAAGRAKLEEDQTAAVEVVSKVVPLSREEALQQGRLILVAEDNEINQKVIHQQLTLLGFAADIVINGREALQSWKNGEYALILTDLHMPEMDGYQLTQSIRSEKTGHYQIPIIALTANALKGEAEKCRALGMDDYLSKPVQLEQLKSVLEKWLPRSKQTEQQEERILPPSAATGKVVVDINVLKSLVGSDQAVINEFLQDFLHDTRKIAEQLHSAITGGQADKAKFAAHKLKSSARSVGALALGEWCAQMEMAAKEGDVEKLVELLPGFEQELAQVESYIKKVLAQPDVEAQKDEI

SEQ ID NO: 24755 - protein, 439 aa, Helicobacter pylori J99
MNFQENLAALDLEYLWHPCSQMQEHQNFPIIPIKKAQGIYLYDFNDNAYMDLISSWWVNLFGHNNAYISQQLKNQIDNLEHVLLASFSHKPIITLSQRLCQLTGMDKCFYADNGSSCIEIALKMSYHAHFLKNQTRRKKLFLSLSNSYHGETLGALSVGDVKLYKDTYTPLLLKNLITPVPKNDSEIENSLNALKRLLDKHGEEICAFIAEPLLQCAGNMHIYSAKYLKQAVLWCKQKNIHIIFDEIATGFGRTGSMFAYEQCGIKPDFLCLSKGISGGYLPLSALLTHNEIYNQFYAPYEENKAFLHSHSYTGNALACACANATLDIFEKENVIEKNKALSEFIFSALQNALKPLIERQVVSDLRHLGMVFAFEVFLQTKERLSLAVFKKALKKGLLLRPLNNTIYLMPPYIITHEEIKKAIAGLVEAIDELKKAENK

SEQ ID NO: 24756 - protein, 231 aa, Hevea brasiliensis
MDVFPQYSDSLPFATHSCSLHYPESSTLSDTCSALRANLSDEEVLLASSYPKKRAGRKKFRETRHPIYRGVRRRNSGKWVCEIREPNKKSRIWLGTFPTEEMAARAHDVAALALRGRSACLNFADSSWRLPVPASREAKDIRKAAAEAAMAFQPEGTEGFSGELKQENKWTTESAPEDVFYMDEEAVFAMPGLLASMAEGMLLPPPQCVAGSGGEDGEMDAADVSLWSFSI

SEQ ID NO: 24757 - protein, 508 aa, Mycoplasma genitalium G37
MIDHLKRTKIIATCGPALTKSLVSLKMLDDNEYAAIKKVAYANIEAIIKSGVSVIRLNFSHGTHEEQQVRIKIVRDVAKAMNIPVSIMLDTNGPEIRIVETKKEGLKITKDSEVIINTMSKMIASDNQFAVSDASGKYNMVNDVNIGQKILVDDGKLTLVVTRVDKQHNQVICVAKNDHTVFTKKRLNLPNAQYSIPFLSEKDLKDIDFGLSQGIDYIAASFVNTVADIKQLRDYLKLKNASGVKIIAKIESNHALNNIDKIIKASDGIMVARGDLGLEIPYYQVPYWQRYMIKACRFFNKRSITATQMLDSLEKNIQPTRAEVTDVYFAVDRGNDATMLSGETASGLYPLNAVAVMQKIDKQSETFFDYQYNVNYYLKNSTANKSRFWHNVVLPLTKKTVPKRKLVNSAFKYDFIVYPTNNINRIYALSNARLAAAVIILTNNKRVYTGHGVDYGIFCYLIDKNPNQLTKAELIELAWKAINHYQAYGDLEKLKQCLAVYNETIINL

SEQ ID NO: 24758 - protein, 329 aa, Magnetococcus sp. MC-1
MTTTPVTVLTGFLGSGKTTLLNHILSHTPHRRVAVIVNELGRIGIDQDLIMQTDEDLFELSNGCLCCSMRGDLLNTLQRLQPRTGQIDHILIETTGLATPGPIAQTFLHEPFLKTHYRLDGFITLCDALHLPQQLQRSRECQTQVAFADLLLINKIDLVADPSAALAALRPFNNHAPYLLVEQAQAPLAKLLDLGGFQPHRQEIHPQQPPSTDTTPLLFHGQPQHGPVRAVALTLEGAIDAPLFIRWITRLLALQGDDLLRMKGILHIHGQATQHIFQGVHHVIEGREGAVWGTQPKISRMVLIGYHLDEAQLRQAFMECRQHDPATTL

SEQ ID NO: 24759 - protein, 384 aa, Polaromonas sp. JS666
MKRTWLLFSQTVTVLVAAYFVVATLQPQWLGTSSIGGVSVIEAPASSVQLGPRPAGTFSSAAKIASAAVVSINTSKAAVNNPHADDPWFKFFFGDQGRSEPQGGLGSGVIISATGYILTNNHVVEGADEIEVILNDTRKAKAQVIGTDPDTDLAILKINLDKLPVIVLGNSDALQIGDPVLAIGNPFGVGQTVTGGIVSALGRNQLGINTFENFIQTDAAINPGNSGGALVDVNGHLMGINTAIYSRSGGSMGIGFAIPVSTAKQVLEGIVKDGQVTRGWIGVEPQELNAELAETFNIKPAALKDGGVIIIGVLQNGPAAQAGIQPGDVITAVNGKSVSNVSQLLTAVAALKPGTPAPLTVWRRDRQTDIAVTPGKRQRPRVQR

SEQ ID NO: 24760 - protein, 438 aa, Corynebacterium glutamicum ATCC 13032
MQAKEEEKRAFDNDRAHVFHSWSAQDKISPKVWAAAEGSTLYDFDGNAFIDMGSQLVSANLGHNNPRLVEAIQRQAARLTNINPAFGNDVRSDVAAKIVSMARGEFSHVFFTNGGADAIEHSIRMARLHTGRNKILSAYRSYHGATGSAMMLTGEHRRLGNPTTDPDIYHFWAPFLHHSSFFATTQEEECERALKHLEDVIAFEGAGMIAAIVLEPVVGSSGIILPPAGYLNGVRELCNKHGILFIADEVMVGFGRTGKLFAYEHAGDDFQPDMITFAKGVNAGYAPLGGIVMTQSIRDTFGSEAYSGGLTYSGHPLAVAPAKAALEIYAEGEIIPRVARLGAELIEPRLRELAEENVAIADVRGIGFFWAVEFNADATAMAAGAAEFKERGVWPMISGNRFHIAPPLTTTDDELVALLDAVEAAAQAVELTFAGALF

SEQ ID NO: 24761 - protein, 717 aa, Triticum aestivum
  misc_feature (235)..(235): Xaa can be any naturally occurring amino acid
  misc_feature (288)..(288): Xaa can be any naturally occurring amino acid
  unsure (1)..(717): unsure at all Xaa locations
MAGADPNRSSMKDVKRIIIKVGTAVITRNDGRLALGRIGALCEQVKDLNAQGYEVIMVTSGAVGVGRQRLRYRKLVNSSFADLQKPQMELDGKACAAVGQSGLMALYDMLFTQLDVSSSQLLVTDSDFDNSNFRERLRETVESLLELRVIPIFNENDAISTRKAPYEDSSGIFWDNDSLAGLLALELKADLLVLLSDVDGLYSGPPSEPSSKLIHTYIKEKHYHEITFGDKSRVXGRGGMTAKVQAAVWAATGGVPVVITSGCASQSLVKVLRGEKIGTLFHKNASLXEPSKDTSVREMAVAARDCPRHLQNLSSEERKKILLDVADALEANEDLIRSENEADLAAAHEAGYESALVSRLTLKPGKIASLAKSVRTLANMEDPINEILKRTEVADGLVLEKTSCPLGVLLIIFESRPDALVQIASLAIRSGNGLLLKGGKEAMRSNAILHKVITNAIPDNVGEKLIGLITTRDEIADLLKHDDVIDLVIPRGSNKLVAQIKSSTKIPVLGHADGVCHVYIDKSADMDMAKRIVMDAKIDYPAACNAMETLLVHKDLMKIPELNDILVALKAAGVNLYCGPVAHKVLGYPKADSLHLEYSSMACTVEIVDDVQSAIDHIHRYGSAHTDCVVTTDDKVAETFLRQVDSAAVLYNASTRFSDGARFGLGAEVGISTGRIHARGPVGVEGLLTTRWLLRGKGQVVNGDKDVEYTHKSLPLQ

SEQ ID NO: 24762 - protein, 515 aa, Debaryomyces hansenii CBS767
MGQILSQPVTEKISEHGIDKHLAYGISCMQGWRVNMEDAHATILNLYDLKNEGKGAVSDKAQDNSSSGKSGTDNDTTEEHTSFFGVYDGHGGEKVAIFTGQHLHEIIKSTKAFQEKDYVNAFKEGFLNCDQAILNDDEMKEDDSGCAAVSVIITPRQVICGNAGDSRSIMSINGFAKALSYDHKPSNEGEKSRICSAGGYVDMGRVNGNLALSRGIGDFEFKKNIDLPPEEQTVTCYPDVIQHNLDFTKDEFVVLACDGIWDCLSSQQCIECVSRGLYERKPLQDICEEIMELCCAPTSDGSGIGCDNMSMSIVALLDESRNESLDQWYDRVIKRIELSQSEDEESQFYGNISGEYNDMYKQMYGEYFEIGQQSQNSNTKSAGNNSSYYSMFGGLPGLRNGPGLNQNEDEEENELSNEPTEEIQEDGTAADLAGNGAISLQKLLASNAITNENGVIYLDTSSAQSLLAHFGMSGEDDEYEGNDVHDKHIEEEEVEEDDDQESKSKIEEEPQDDEE

SEQ ID NO: 24763 - protein, 229 aa, Zea mays
MAVSFANVNAEAGLKKLDEYLLTRSYITGYQASKDDLAVYSSFLADPSSKYINVARWFNHIDALLRLSGVTAEGLGVKVEPSAVPSASILDVADGQAPAADEDDDDDVDLFGEETEEEKKAAEERAAAAKASGKKKESGKSSVLLDVKPWDDETDMAKLEEAVRSVQMEGLLWGASKLVPVGYGIKKLQIMMTIVDDLVSVDTLIEDHLCAEPVSEYVQSCDIVAFNKI

SEQ ID NO: 24764 - protein, 374 aa, Geobacillus kaustophilus HTA426
MKRQRVVVKIGSSSLTDPKGGLCHDKLFDHVEAIAYLKQLGHDVILITSGAVAAGFGPLGYPARPTTIAGKQAAAAVGQSLLMQAYSSAFAQFGFTAAQLLLTRSDFYSRERFRNLFATITTLLENGAVPIINENDSVSIEELTFGDNDMLSALVAGFLHADALILLTDINGLYDANPKTNPQAKKYAFLPEITDEMIEAAGGIGSAVGTGGMRSKLLAARKALSFGVSVFIGTGSGREKLADILAGKGDGTYIGVPFPKQMQMRKQWIAYHAPVAGMITVDSGAEEALLMRGKSLLPAGVTAVSGDFHAMDVVDVVNEKGITIGRGQVYYAAADLKKVKGRPSEEARQYSYLHRPEVIHRDNWVTLRKESVSK

SEQ ID NO: 24765 - protein, 566 aa, Neurospora crassa
MDKETNTPEEVLGSAEKSMNVTSKTSNDDTKAHEFNEQTNYVPKRTIITIFLACAGVDLLALIDQTTLATSLYIIGNALGSTSQVSWIANGYFITSTVGQLLYGRLSDIWSRKVILLTGLAIFFLGSLASSLAQSVLQLTIFRAFTGIGGGGLMTVAQLIVSDVVPLRERGKYQGIIGAVVAIANGIGPVIGGALSSKSEDSWRWIFRINMPLTVLTILAVVFFMPLKKVRGDWKVKLKAVDFIGILVALAGTIVLMLGLTWGGGEYPWDSAHVIATLVTGFVACVAFVLWQWKGPRYPLVPLHIFKSKIVNGACITMAINGWNFVVQVYYIPSFYQLVYEYSATRAGAMLLPVTLVQTASSTLSGLVVHWVGRYRESILFGWVCWAVGLGLMSTLDETTGIGKQIGYSILIGVGVGNTLQPALIAVQAGVVRRDMAVVTSFRNFVRNLGATIGLAVCGTIINNVLAGSLGSLDIDHDASKTLLSNPQMYLRTVSKAEADRIRGVLIPAYRKGFHIIFMTGAALCALAFVIAFFMLPQVELSRPDDEKLREEGRKAYEDKKRQDSA

SEQ ID NO: 24766 - protein, 414 aa, Geobacillus kaustophilus HTA426
MSELLEKAERLKTASQTLAMLSAEEKNEALEQIAQTLDRERAFILQENEKDMAQGREQGLSPALLDRLQLTNERLDQIIDGVRQVASLPDPVGEIIAEWTRPNGLRIQTVRVPLGVIGMVYEARPNVTVDAASLCLKTGNAVLLRGSTSALHSNKALVAVMKEALRTTAIPETAIELLEDTSRETAQRMFRLNNYLDVLIPRGGAGLIRSVVENATVPVLETGVGNCHIFVDESAERQMAIEIVLNAKLQRPSVCNAVETVLIHERWPYAADLLETLHARGVELRGDQRLASAYPFISEATEDDWYTEYLAPILAVKLVADVDEAIGHIRRYGTKHSEAIITENEVNVRRFFQAVDAAVLYHNASTRFTDGEQFGYGAEIGISTQKLHARGPMGLVAITTTKSLVYGTGQIRTV

SEQ ID NO: 24767 - protein, 863 aa, Zea mays
MSFGGMFDGAGSGVFSYDATGGGTGMHNPGRLVPAPPLPKPGGFGATGLSLGLQTNMEGAQLGDLGRMGLIGGGGSGSGGDGDSLGRGREDEIDSRSGSDNVDGASGDEIDPDNSNPRRKKKRYHRHTPQQIQELEAVFKECPHPDEKQRMELSKRLNLESRQVKFWFQNRRTQMKTQIERHENALLRQENDKLRAENMTIREAMRNPICANCGGAAVLGEVSLEEQHLRIENARLKDELDRVCALAGKFLGRPISSGSSMSSSLQGCSGLELGVGSNNGYGPGPLGASALQPLPDLLGAGLPGPVGSAAMRLPMGIGALDVALHGAAADGIDRTVLLELALAAMEELMKVAQMDEPLWLRSPDGSGLEALNLDEYHRAFARVFGPSPAGYVTEATREAGVAITSSVDLVDSLMDAARWSEMFPCIVARASTTDIISSGMGGTRSGSIQLMHAELQVLSPLVPIREVVFLRFCKQHAEGLWAVVDVSVDAILRPDGGHHHAQNGGGAGYMGCRLLPTGCIVQDMNNGYSKVTWVVHAEYDEAVVHQLYRPLLQSGQALGARRWLASLQRQCQYLAILCSNSLPARDHAAITPVGRRSMLKLAQRMTDNFCAGVCASAAQKWRRLDEWRSGEGGDAAGNGGSAAAGEGEEKVRMMARHSVGAPGDPPGVVLSATTSVRLPATSPQRVFDYLRDEQRRGEWDILANGEAMQEMDHIAKGQHHGNAVSLLRPNATSGNQNNMLILQETCTDPSGSLVVYAPVDVQSMHVVMNGGDSAYVSLLPSGFAILPDGHCQSPNTAHQGSPSCGGSSSSSSTGSLVTVAFQILVNNLPTAKLTVESVETVSNLLSCTIQKIKSALQASIVTP

SEQ ID NO: 24768 - protein, 113 aa, Arabidopsis lyrata
STGKRSEREEDTDPQGSRGISDDEDGDNSRKKLRLSKDQSVILEETFKDHSTLNPKQKQALAKQLGLRARQVEVWFQNRRARTKLKQTEVDCEFLRRCCENLTEENRRLQKEV

SEQ ID NO: 24769 - protein, 257 aa, Oryza sativa
  misc_feature (39)..(39): Xaa can be any naturally occurring amino acid
  unsure (1)..(257): unsure at all Xaa locations
WCRRGPQGLTRALSCAQILDRHSLPGLTTVDRVLSKCAXDFRRDEWGVDVALTGSQKALSLPTGLGIVCASPKALEASKTAKSVRLFFDWKDYLKFYKMGTYWPYTPSIQLLYGLRTALDLIFEEGLENVNKRHNRLGTATRLAVEAWGLKNCTQKEEWFSDTVTAVVVPPYIDSAEIVKHAWKRYNLSLGLGLNKVAGKVFRIGHLGHLNELQLMGALSGVEMVLKDIGYPVKLGSGVAAAAAYLSNSTPLIPSRI

SEQ ID NO: 24770 - protein, 556 aa, Legionella pneumophila subsp. pneumophila str. Philadelphia 1
MAIKVTKRGMDILRDPILNKGTAFSLQERDEFALHGLIPTTVETLEQQVVRCLDAYSAKEDPLEKHIYLRALQDRNEVLFYRFIIDNLVHILPIIYTPVVGQACEMFSHIYRQPRGVFLSYPERDKLDSIIQNIASTRSTKVIVVTDGERILGLGDQGAGGLGIPIGKLSLYTSCGGIHPSNTLPIILDVGTNNKERLDDPEYIGWRHARISGKEYDDFVDQFVQSIKRHMPHVLLQFEDFAQQHAYPLLERYKNQLCTFNDDIQGTASVAVAAILAATRVTNTPLKEHRVALLGAGSAGCGISEQLVHAMMNQGLSEEEARSRFYLVDRYGLLHDEMTDLLPFQKGFVRSSTSLQNWKLEKKGEITLTDVINNAQPTILLGVSGQPNQFKEAMIKTMLSYCERPIIFPLSNPTSRAEAIPQDLLNWTAGKALIATGSPFEPVVINGHKIEIAQCNNSYIFPGVGLGVVAGQAKRVTDLMMMAAAVALSELAPAIRTGEGRLLPELNSIREVSQHIARAVILQGIKEGHIEPMNNNKIDDSIKRTMWTPQYEPYVL

SEQ ID NO: 24771 - protein, 854 aa, Methanosarcina mazei Go1
MGIFSLRRWTELENTLVLYREAECDLEEKDRMYRALFEQSSDAVIISDGKKVLDINKKGCEIFGFGQKRPFNVSLMSFIQAEYLPELQQAFKETFRQGSSNFEMRYQKPEGEIVDIKVNLSLIDRKDNIVQLVAQDITVSKNIERSEQENRERLKAILDNTLCGILLIESSSRKIINANPIALKTAGYSDKELIGMTCYRLIDQHGEENCAALSLDQAGDLSESILLTATGKTLPILRSVVPVSIGGTGYFVESFIDLSDRKQAEEELLQAKIAAESANRSMSEFLATMSHELRTPLTAIIGFSELMLGGSTGEFDELNKKFLGNISTSGKHLLSLINSILDLSKIEAGKMELQSDYFSLQDIFSNTKNILSPLALKKNISMDFNVEPGFFVYADRTRFKQIMYNLVSNAVKFTQKGGSVEVLGIVSEKGVRVSVSDTGIGISKDEIKQLFKPFKQIDSTLSRKYEGTGLGLVLSKKFVEMHGGRIWVESEPGKGSTFTFEVPVKTLKSGEIFRAHETAETAHETAETCETNAIEAPVITGKAVESGKPVEPIVLNELTESGAEIPVKMPKMEDISVDFKSCGSDVSAPLVMVVEDDRLSRELLVFTLKEAGYRVVQAATGEEALSLAQKLKPFVITLDLMLPEMNGWDVLENLKKDSVTSGIPVLVLSITEKNDCKMLWGAFDHLVKPVDKSVLLSSLDRLKTNLKKDSPKILIADDQESMLELMSSMIEFEGYVISLAQGGKEAIDKASTEIPDAIILDLNMPDVSGFEVIKALKKNPQTVDIPVIVCTSKDLSMQEMKMLNSSVSFVMQKEDLNKRKLLELIRRLEPENCGIFTSPAYQEVFQSDSFRTEG

SEQ ID NO: 24772 - protein, 224 aa, Elaeis guineensis
MGRRPARCYRQIKNKPYPKSRYCRGVPDPKIRIYDVGMKKKGVDEFPFCVHLVSWEKENVSSEALEAARIACNKYMAKYAGKDAFHLRVRVHPFHVLRINKMLSCAGADRLQTGMRGAFGKPQGTCARVMIGQVLLSVRCKDGNSNHAQEALRRAKFKFPGRQKIIISRKWGFTKFNRTDYLRWKSENRIVPDGVNAKLLGCHGRLSARQPGRAFLPPTIANAS

SEQ ID NO: 24773 - protein, 89 aa, Glycine max
MAHFTSSGKSDDLTKEDCKGQSALVVCFGEILIDFVPTVGGVSLAEAPAFKKAPGGAPANVAVGISRLGGSSAFVGKVGAVCLCRQGWS

SEQ ID NO: 24774 - protein, 590 aa, Triticum aestivum
MCGILAVLGCADWSQAKRARVLSCSRRLKHRGPDWSGLFQCEGNFLAQQRLSVVSPLSGDQPLYNEDRTVVVVANGEIYNHKKIRKQFAAKHTFTTGSDCEVIIPLYEEYGENFVNMLDGVFSFVLYDTRNKTYMAARDAVGVNPLYFGRGSDGSVWIASEMKALHEDCPKFELFPPGNLYSSAAGGFRRWYNPQWFAEHVPATAYQPLVLREAFEKAVIKRLMTDVPFGVLLSGGLDSSLVASVTKRHLIETEAAKKFGTELHSFVVGLEGSPDLKAAREVADYLGTIHHEFHFTVQDGIDAIEEVIYHNETYDVTTIRASTPMFLMARKIKALGVKMVLSGEGSDELLGGYLYFHFAPNKEEFHKETCRKVKALHQYDCLRANKATSAWGLEVRVPFLDKEFIDVAMSMDPEWKLYDANLGRIEKWVLRKAFDDEKEPYLPRHILYRQKEQFSDGVGYNWIDGLKAFTEQQVTDEMMKNAAEEYPYNTPINKEAYYYRMIFERLYPQDSARETVPWGPSIACSTPAAIEWVAQWKASNDPSGRHIASHNDAAPAHAHANWNGAVANGKANGNGTANGNANANGTLVPC

SEQ ID NO: 24775 - protein, 441 aa, Geobacter metallireducens GS-15
MALKETLKQKIEEFRPRTTRLVKEFGKVVIDQVTIDQAIGGARDIRSLVTDISYLDPQEGIRFRGKTIPETFEALPKASGSDYPTVESFWYFLLTGEVPTQAQVDEVVAEWKTRQVVPQYVFDAISALPKESHPMVMLSVGILALQKDSKFAGFYNSGKFNKMTAWEYVYEDASDLVARIPIIAAFIYNLKYRGGKQSAIDPTADCGANFARMIGQCKEYEDVARMYFILHSDHESGNVSAHTTHLVHSALSDPYYAYSAGLNGLAGPLHGLANQEVLDWTIKFQQKYCKDVEPTKELVTKALWDTLNAGQVVPGYGHAVLRKTDPRYMSQREFCLKTPGLKDDPLFKLVAMIFETAPGVLMEHGKAKNPWPNVDAQSGVIQWYYGLREWDFYTVLFGVGRALGCMANITWDRGLGYAIERPKSVTTPMLEKWAEEGGRKF

SEQ ID NO: 24776 - protein, 196 aa, Pleurotus sajor-caju
HWHGFFQSGSTWADGPAFVNQCPIASGNSFLYDFNVPDQAGTFWYHSHLSTQYCDGLRGPFIVYDPSDPHLSLYDVDNADTIITLEDWYHVVAPQNAVLPTADGTLINGKGRFAGGPTSALAVINVESNKRYRFRLISMSCDPNFTFSIDGHSLQVIEADAVNIVPIVVDSIQIFAGQRYSFVLNANQTVDNYWIR

SEQ ID NO: 24777 - protein, 197 aa, Pleurotus sajor-caju
HWHGFFQAGTSWADGPAFVTQCPIAAGNSFLYDFKVPDQAGTFWYHSHLSTQYCDGLRGAFVVYDLFDPHRLRYDIDNADTVITLEDWYHVVAPQNGPIPTPDSTLINGLGRYAGGPTSPLAVVRVLWGLRYRFRLVSLSCDPNWTFSIDGHKLLVIEADAVNVQPVEVDSIQIFAGQRYSFVLKANQQSRNYWIRA

SEQ ID NO: 24778 - protein, 325 aa, Campylobacter jejuni RM1221
MKNFSLWCDFIENSFLDNEFLNLLSHGINGATSNPAIFKNAILNSPIYKDKILKLKEKKTKDIYEELAISDIQKAADKLAPLFYQKNDGFISIEIDPRLHDNTTLSLGEAKRLYSAIGKENIMIKIPATKASYEVMYELMKNGISVNATLIFSLEQSQKCFEALNAGLVEFRKNNIALKEQNTRTPQAVISIFVSRFDRLLNPKAKEQNRIGILNANLAYNNIYSKNEPNIRALFASTGVKGDDLPKDYYIKELLFENSVNTAPLDAIEAFKGKMHFKKPLMNFEIYTELNQIISQSEREKACNDLLSDGLEQFCIAFEDILKAL

SEQ ID NO: 24779 - protein, 478 aa, Thermococcus kodakarensis KOD1
MRLPGQKTKIIATLGPASLNEKTITAMVRAGMSVARINFAHGDLKQHEKSIKLVRKVSERLNRPVAILGDLPGVKIRVGEIEGGSVTLRRWQTVTLTTRDVIGNEAVIPVEFKDFPRLVSKGDVIYLSDGFIALRVEDVRDQDVICKVLVGGTLFSRKGINIPKARLAIEAITEKDLEFLEFSLEHGVDAVGISFVGSAYDVLKARRFVEERNGKLFLIAKIERPDAVRNFDEILRAADGVMVARGDLGVEMPIEKLPILQKKLIQKANCAGKPVITATQMLESMTHEKLPTRAEVTDVANAILDGTDAVMLSEETAVGKYPVETVKMMARIAKTTEAYRDSKWAERTVEWKMSELRGTRPTKGTIKDAITRSIIEALNSIDIKYILTPTRMGQTARLIARFKPKQWVLAFVTDEWVKNTLMFSYGVYPFLVEDTSEEEILRVITGLGLVDEGDTVLLTKGTPIGKTAGTNTIRIFNV

SEQ ID NO: 24780 - protein, 332 aa, Glycine max
ECCFVHQQNQLLDLLAYSLCSFYSKIFRALEHDYIGLAENPSMDGKNSSSLNLKETELRLGLPGCESPERKSGSALCLFGKELQNNNNNVCSLKAGAKRGFSDAIDTSSVTEGSQGASALFSPRGGNVGKPLIGLDTQTNTTIKEVGAVPQSAKPVQENNDQFAATNAHAIAPAAKAQVVGWPPIRSFRKNTMASNLTKNNDEAEGKSGFGCLYVKVSMDGAPYLRKVDLKTYNNYMELSSALEKMFSCFTIGQCNSPGLPGKDGLSESSLRDLLHGSEYVLTYEDKDGDWMLVGDVPWEMFTDSCRRLRIMKGSEAIGLAPRAMEKSRSQN

SEQ ID NO: 24781 - protein, 342 aa, Arabidopsis thaliana
MNSFSHVPPGFRFHPTDEELVDYYLRKKVASKRIEIDFIKDIDLYKIEPWDLQELCKIGHEEQSDWYFFSHKDKKYPTGTRTNRATKAGFWKATGRDKAIYLRHSLIGMRKTLVFYKGRAPNGQKSDWIMHEYRLETDENGTPQEEGWVVCRVFKKRLAAVRRMGDYDSSPSHWYDDQLSFMASELETNGQRRILPNHHQQQQHEHQQHMPYGLNASAYALNNPNLQCKQELELHYNHLQSNIAHEEQLNQGNQNFSSLYMNSGNEQVMDQVTDWRVLDKFVASQLSNEEAATASASIQNNAKDTSNAEYQVDEEKDPKRASDMGEEYTASTSSSCQIDLWK

SEQ ID NO: 24782 - protein, 162 aa, Trema tomentosa
MSSSEVDKVFTEEQEALVVKSWAVMKKNSAELGLKFFLKIFEIAPSAKNLFSYLKDSPIPLEQNPKLKPHAMTVFVMTCESAVQLRKAGKVTVRESNLKRLGAIHFKNGVVNEHFEVTRFALLETIKEAVPEMWSPEMKNAWGEAYDQLVAAIKSEMKPSST

SEQ ID NO: 24783 - protein, 373 aa, Glycine max
KKWRCSRDAVVDQKYCERHMNRGRHRSRKPVEGQSGHALTTTNTPNASSNSTVVPGNHNNNTFAHINVHHPLPPHSSPANTINRMFMSNNKENNNTSERTKDGLALPMLPPTLEPKPKDNNNSFMVHKHQEPYDESSRNKNEFGLVTSDSLLNPSQKRSFDSSSSSQKDDSSESQQQHSLRHFIDDSPKPQSHHNHNHRSSSSIWPELDNMQSDRTQLSISIPISSSDHFMSFATSSPSNEKLTLSPLRLSREFDPIQMGLGVGSASNEANTRQANWIPITWESSMGGPLGEVLNLSNNNNNSNASDQCGKNNNNTSALNLMKDDDDDDGWDNSPPPIGSSPTGVLQKTAFGSLSNSSAGSSPRGAPENNNKE

SEQ ID NO: 24784 - protein, 224 aa, Oceanobacillus iheyensis HTE831
MIKAVLFDLDGTLLNRDESIKGFVNHQYERLKKWVGHIPKDKYITRFLELDKRGYVWKDKVYQQLIQEFDISKMTLEDLLQDYISEFRFNCVPFDNLIQMLEDLKSKNVLLGMITNGYGQFQMDNIKALGIERYFDVILVSEWEGIKKPDPEIFKKALEKLDVPPEQSIFVGDHPKNDVKAAQSIGMKGIWKKDLQWNDVEADFTVNDLMALPLIVKNLTRRVE

SEQ ID NO: 24785 - protein, 442 aa, Arabidopsis thaliana
MDFSGRFFVIFVTFFFLPPLSSAGSYDSGSGLESLARGMLHSAKDPEFFEWMRGIRRKIHENPETGFQEFKTSQLVRDELDSLGVKYKYPVAKTGVVAWIGSCSKPVFGLRADMDALPLQELVEWESKSKVDGKMHACGHDTYVAMLLGAAKLLQTTKHLIKGTVKLVFQPGEEGYAGAYEMLKDEILDDLDGILSVHVFPSIPSGGIGSRPGTVLAGAGLFTVTVHGQGSHAATPHFSKDPVLAASSAVVALQQIVSRELDPLEAGVVTVGYIEGGHAQNVIPQSAKFGGTFRSLSNDGLLFIQRRIKEISEAQASVYRCKAEVNFEEKKPSLHPVMNNDEGLYEHGKKVAEAMIGKNNFHDFPVTMGGEDFSFFTQKTKAAIFVLGIKNETLGAGKPLHSPYFFVDEEALPVGAALHAAMAVSYLDEHGHSHEEEVKSEL

SEQ ID NO: 24786 - protein, 707 aa, Oryza sativa
  misc_feature (136)..(136): Xaa can be any naturally occurring amino acid
  misc_feature (409)..(409): Xaa can be any naturally occurring amino acid
  unsure (1)..(707): unsure at all Xaa locations
MPLGWLRRKWRRRRDKPAGDAAAASTTATSPRDSVDLGGTSAYPSACASPSSTTPTPTRWGAGASAVPPRCPGPQDQHHGLPLPRPVSKSAPMPLASPAAAPTSPSPPACASAAESVSGGSSSDYQADHPNYRYNXPVFPTSGRTVLPDGHNGMVEENRFVSCGILQEHQKFFEVPIANVNEVHHMQIFEPSTSESSYSRGRMLPEDTFAVRPRSHYPGPRGHAYSACCARDFGFTPRSPVKRMDDPRSPSQPLPLPPVPVASSSIPSSSITSSQFQSQWKRGKLLGSGTFGQVYLGFNSENGQFCAIKEVQVFLDDSHSKERLRQLNQEIDMLKQLSHQNIVQYYGSELFSLSFGLPNLNNFEQADEALSIYLEYVSGGSIHKLLREYGPFKEPVIRNYTRQILSGLXYLHGRNTVHRDIKGANILVGPNGEVKLADFGMAKHVTSFAEIRSFRGSPYWMAPEVVMNNKGYNLAVDIWSLGCTIIEMATAKHPWYPYEDVAAIFKIANSKDIPEIPDCFSKEGKDFLSLCLKRDPVQRPSAALLLGHPFVQDHQAVRAPTCNGTQLRNGISSPAGASHRKPNRESSSKRNIAPLHGIAGLSAREFTGFSTAYPFSSQYLQQPNCSESKHVFTGVAMLKPAAAVQAIKLELPPFTNASGALPWIISSSLPKQSLAEPVEAKRRSSRSLAGVEPAETSKPIWLSKEIL

SEQ ID NO: 24787 - protein, 420 aa, Agrobacterium tumefaciens str. C58
MRRVVITGTGMVSPLGCGTEVTWERLLAGQNGARLVTEFEVEDLPAKIACRIPVGDGSNGTFNADDWMEPKEQRKVDPFILYGMAAADMALADANWHPETDDDQIATGVLIGSGIGGLEGIVEAGYTLRDKGPRRISPFFIPGRLINLVSGQVSIRHKLRGPNHSVVTACSTGAHAIGDAARLIALGDAEVMVAGGAESPVCRISLAGFAACKALSTQHNDDPQKASRPYDRDRDGFVMGEGAGIVVLEELEHAKARGAKIYAEVVGYGLSGDAFHITAPSEDGDGAYRCMSMALKRAGLTPDDIDYINAHGTSTMADTIELGAVERLVGESAPKISMSSTKSATGHLLGAAGAIEAIFATLAIRDNIVPPTLNLDNPDVETKIDLVPHKARKRQVNVALSNSFGFGGTNASLVLRRYEA

SEQ ID NO: 24788 - protein, 79 aa, Narcissus pseudonarcissus
MAKDPVRVLVTGAAGQIGYALVPMIARGIMLGPDQPVILHMLDIQFAAESLNGVKMELVDAAFPLLKGVVATTDVVEAC

SEQ ID NO: 24789 - protein, 589 aa, Geobacter metallireducens GS-15
MRFTIQWKLMASYLLLVLFIGGVFFAYLNHTLNQHLTAEIRQNLATEARLTRMIAHRDIGRMKDDAPAVAAAISRETRARVTIILAGGEVVGDSEIAPGQLKELENHLNRPEVQQALKSGSGESIRYSATIKTPMLYVAVPLQTAGGEEGFVRLSLPLTALEKAEGSIRTLLGASLAVSLLVALVLSYILSRVTSRSLRTITALAKQIGKGNFNRRIPVPTRDEVGELARVMNDMAARIEQQLERTSAEKNRLDTILRGMGEGLMVTDANGLITLVNPAFLGLFSLNESVEGRHIIEIARHPVLNDAFKAIVASGDERVEKMTLTMGEEKHVLTHWVPLVDNGELQGVVAVFHDITDLTRLENIRRDFVANVSHELRTPVTVIKGYAEALIDGAMETDPERARKFVGIILSHSERLAALIGDLLTLSQLEAGSMNLEKTTVRPEQVAKRAMELLQPKAARKGITIDCSGLSGAQSVLADPGRLEQVLVNLLDNAIKYTPEGGAISFSAAVKENMVRIGVKDTGVGIPPKDLPRIFERFYRVDTARSRDEGGTGLGLSIVKHIVQLHGGAVGVESEPGKGSEFWFTIKKA

SEQ ID NO: 24790 - protein, 392 aa, ASPERGILLUS NIDULANS FGSC A4
MEDDDAPPDLVDVSQLPKSELQSSSAELPPQQRVPITLVTGYLGAGKTTLLNYILSEKHGKKIAVIMNALKPTGKLKLILAATDIEKPMTVNQDGQEVTEWLEVGNGCICCSVKDSGVMAIESLMERRGTFDYILLETTGLADPGNIAPIFWVDDNLGSSIYLDGIVTLVDAKNILHLLDEPTPEETVAVENSKDGSDHDHDHAHSGPVLSMAHMQISHADVIILNKTDLVTAEELEHVRDRVTAINSAAKIHVTDHSRTPQIEGVVLDLHAYDHLDSLDFSQKGHSHIDPSISTILLTHPPLHHSKIPLVDVWLRSVLWDSTLPLPSGSEAQNPSFDIHRLKGILALSDGSSRIIQAVREVFEIRDEATPTKSSSAAEDSDRRITIMSDVL

SEQ ID NO: 24791 - protein, 161 aa, Pleurotus sajor-caju
  misc_feature (1)..(1): Xaa can be any naturally occurring amino acid
  misc_feature (3)..(8): Xaa can be any naturally occurring amino acid
  misc_feature (10)..(16): Xaa can be any naturally occurring amino acid
  misc_feature (20)..(22): Xaa can be any naturally occurring amino acid
  misc_feature (24)..(27): Xaa can be any naturally occurring amino acid
  unsure (1)..(161): unsure at all Xaa locations
XHXXXXXXPXXXXXXXLYVXXXNXXXXHWHGFFQKGSNWADGPAFVTQCPIVPGDSFLYSFSAPDQAGTFWYHSHLSTQYCDGLRGVFVVYDPEDPHRSLYDIDDEDTVITLADWYHVPAPSAGLVPVSQSTLINGLGLYQDGPESPLAVIHVKRGSRYRR

SEQ ID NO: 24792 - protein, 465 aa, Pleurotus sajor-caju
MFPGARILATLTLALHLLHGTHAAIGPAGNMYIVNEDVSPDSFARSAVVARSVPATDPTPATASIPGVLVQGNKGDNFQLNVVNQLSDTTMLRTTSIHWHGFFQAGSSWADGPAFVTQCPVASGDSFLYNFNVPDQAGTFWYHSHLSTQYCDGLRGPFVVYDPSDPHLSLYDIDNADTVITLEDWYHIVAPQNAAIPTPDSTLINGKGRYAGGPTSPLAIINVESNKRYRFRLVSMSCDPNFTFSIDGHSLLVIEADAVNIVPITVDSIQIFAGQRYSFVLTANQAVDKYWIRANPNLGSTGFVGGINSAILRYAGATEDDPTTTSSTSTPLLETNLVPLENPGAPGPPVPGGADININLAMAFDFTTFELTINGVPFLPPTAPVLLQILSGASTAASLLPSGSIYELEANKVVEISMPALAVGGPHPFHLHGHTFDVIRSAGSTTYNFDTPARRDVVNTGTGAN

SEQ ID NO: 24793 - protein, 547 aa, Escherichia coli
AAKDVKFGNDAGVKMLRGVNVLADAVKVTLGPKGRNVVLDKSFGAPTITKDGVSVAREIELEDKFENMGAQMVKEVASKANDAAGDGTTTATVLAQAIITEGLKAVAAGMNPMDLKRGIDKAVTVAVEELKALSVPCSDSKAIAQVGTISANSDETVGKLIAEAMDKVGKEGVITVEDGTGLQDELDVVEGMQFDRGYLSPYFINKPETGAVELESPFILLADKKISNIREMLPVLEAVAKAGKPLLIIAEDVEGEALATAVVNTIRGIVKVAAVKAPGFGDRRKAMLQDIATLTGGTVISEEIGMELEKATLEDLGQAKRVVINKDTTTIIDGVGEEAAIQGRVAQIRQQIEEATSDYDREKLQERVAKLAGGVAVIKVGAATEVEMKEKKARVEDALHATRAAVEEGVVAGGGVALIRVASKLADLRGQNEDQNVGIKVALRAMEAPLRQIVLNCGEEPSVVANTVKGGDGNYGYNAATEEYGNMIDMGILDPTKVTRSALQYAASVAGLMITTECMVTDLPKNDAADLGAAGGMGGMGGMGGMM

SEQ ID NO: 24794 - protein, 154 aa, Quercus suber
MALSLFGGRRSNVFDPFSLDIWDPFEGFSAVASVPPSARETTAFATARIDWKETPEAHIFKADLPGLKKEEVKVEVEDGNVLQISGERSKEHEEKNDKWHRVERSCGKFMRRFRLPENAKVDQVKANMENGVLTVMVPKEEQKKPAVKAIEISG

SEQ ID NO: 24795 - protein, 353 aa, Oryza sativa (indica cultivar-group)
ESLVRAGELSWEVGMERYEVIKDIGSGNFGVAKLVRDVRTKELFAVKFIERGQKIDENVQREIMNHRSLRHPNIVRFKEVVLTPTHLAIVMEYAAGGELFERICSAGRFSEDEARFFFQQLISGVSYCHSMQICHRDLKLENTLLDGSIAPRLKICDFGYSKSSLLHSQPKSTVGTPAYIAPEVLARKEYDGKVADVWSCGVTLYVMLVGAYPFEDPDEPRNFRKTITRILSVQYMVPDYVRVSMECRHLLSRIFVANPEQRITIPEIKNHPWFLKNLPIEMTDEYQMSVQMNDINTPSQGLEEIMAIIQEARKPGDGSKFSGQIPGLGSMELDDVDTDDIDVEDSGDFVCAL

SEQ ID NO: 24796 - protein, 248 aa, Corynebacterium glutamicum ATCC 13032
MTNGKLILLRHGQSEWNASNQFTGWVDVNLTEQGEAEAKRGGELLVEAGVLPGVVYTSLLRRAIRTANIALNAADRHWIPVIRDWRLNERHYGALQGLDKAATKEKYGDDQFMEWRRSYDTPPPELADDAEYSQANDPRYADLDVVPRTECLKDVVVRFVPYFEEEILPRAKKGETVLIAAHGNSLRALVKHLDGISDADIAELNIPTGIPLVYEIAEDGSVVNPGGTYLDPEAAAAGAAAVANQGNK

SEQ ID NO: 24797 - protein, 386 aa, Corynebacterium glutamicum ATCC 13032
MRRHKSAVTLSENQVTTVGQVLHLAIQGSPTGITVVDRTGDVILSNGRAHELGIVHERSVDGNVWRVAQEAFQDQETHSLDVHPDRNPRRPGSRITAVQAVVKPLTLIDDRFVIIYASDESENVRMESARRDFVANVSHELKTPVGGMALLAEALMESSDDPEQVEYFGSRLHREAHRMADMINELISLSKLQGAERLPDMEPVQADDIISEAIERTQLAADNANIEIIRGDRTGVWVEADRSLLVTALANLISNAINYSPKSVPVSVSQSIRNDVVMIRVTDRGIGIAPEDQGRVFERFFRVDKARSRQTGGTGLGLAIVKHVMANHGGSISLWSRPGTGSTFTLELPVYHPESKEPAGSKQGPSLDSPIRTTASKASGRRKEKS

SEQ ID NO: 24798 - protein, 535 aa, Zea mays
MALAFDEFGRPFIILREQEKKTRLRGLDAQKANIGAGKAVARILRTSLGPKGADKMLQSPDGDVIITNDGATILEQMDVDNQIAKLMVELSRSQDYEIGDGTTGVVVMAGALLEQAEKLLERGIHPIRVAEGYEMASKVAFDHLERISEKFEFSADNIEPLVQTCMTTLSSKIVNRCKRALAEIAVKAVLAVADLERKDVNLDLIKVEGKVGGKLEDTELVYGIIVDKDMSHPQMPKRIEDAKIAILTCPFEPPKPKTKHKVDIDTVEKFQTLREQEQKYFDEMVQKCKDAGATLVICQWGFDDEANHLLMHRNLPAVRWVGGVELELIAIATGGRIVPRFQELSPEKLGKAGLVREKSFGTTKDRMLYIEQCANSRAVTIFIRGGNKMMIEETKRSLHDALCVARNLIRNNSIVYGGGSAEISCSIAVETAADRHPGVEQYAIRSFADALDAVPLALAENSGLSPIDTLTAVKAQQVKESNPHCGIDCNDVGTNDMKEQNVFETLIGKQQQILLATQVVKMILKIDDVISPSEY

SEQ ID NO: 24799 - protein, 400 aa, Xanthomonas oryzae pv. oryzae KACC10331
MTTSFQISRRAQALTSSAIREILKVTERPEVISFAGGLPSPATFPVERMRAASDQVLRDAPQAALQYGPTEGFAPLREWVAARLSRDGASIRPSQVLITTGSQQGLDLLGKLFIDEGSKVLVETPSYLGALQAFSLFQPGFVGMPSDEDGVVVDALDPALLADARFLYCLPNFQNPTGRRLPLARRQALVARAAEAGVPIVEDDPYGELYYSGQPLPSLLSMQPDGVIYMGSFSKVLAPGLRLGYVVAPEAVLGKLIQAKQAADLHTPSFTQRVVYQTLQDDFLDTHIPQIRALYARQCSLMLEALDRHFPAQVQWNRPEGGMFLWVTLPPGLDGTALLARAIARNVAFVPGAPFFATLPQTNTLRLSFVTVPGEKIDAGIQVLGELLREALDALAGQGA

SEQ ID NO: 24800 - protein, 348 aa, Candida albicans SC5314
MNEDPQSEIMERYNESAYLRDDQLPQFDQNNDVIKEEQTHTQDHHHQHPSVSGSHSDELQDQDIHNVIEEHEDHVSTQNIVDEDELLAAQAAAEAAAAAQQQQPGDVFNNVAQGLSGKHRDMMMQYWQETINSIEHDEHDFKNHQLPLARIKKVMKTDEDVRMISAEAPILFAKGCDVFITELTMRAWIHAEENKRRTLQKSDIAAALTKSDMFDFLIDVVPREEEKPKKSNNNSSRSDSYVNNQQSPPIPETEEEVPHMLTQDVKHSHQDVLQQQMLQEQLLQQQLHQEVQQQLQQEVQRQLQEDVPQSDHQQASQREEDITNGAENANGHNDEATYENFNGYQNNY

SEQ ID NO: 24801 - protein, 716 aa, Oryza sativa [sequence omitted]

SEQ ID NO: 24802 - protein, 670 aa, ASPERGILLUS NIDULANS FGSC A4
MVFYLLYKHIKKSRAAKRQSHSIPLRPFDDQHDSNSLTPPNTSALYEKSISHEVEAEKRRRRVYRLKLVCALFMPYFLATIDLTIVATAVPFIASHFNELSELNWIVTAFTLTSTALIPSFGQLSDVFGRHVTLQLATFLMLVGSVLGAAAQTWGMLLLGRALQGVGSAGLMSTVMIILADNVTLEENAKNNSIFSFVSGVAYAVGPVIGGYLTDVSIRLLYTRRCAKYAGKLALLLRNLHSFYVVLRDNLKQGTHFRRGSRLSSFLPALATIDIVGTILFIFGVGLIILGTAWGGSTYPWVSAEVLTPLVVGGICFAMFFVYEYFLENGVFGRIFPAQKPMLPYSMFKKIDTLWLTVLQFAAGAAMYSVFYYVGIYFTVVEAYSASKAGVQLLYYIPGLGGTFNLSKPPLTPISLALTRSYPAGVYLAILLCNTYPAQTFPPLLLGTFAETIGLGVLIYAIRTERSNILNGMMVLAGAGTGIRLMPASLHASGVWPDRIASALSLLRFALPFGGTLGITIMGSVFNNKLAEGVASIQGYGSSNVSAQDLAHGGTSSLSFINSLPADAQAKVRTSGRDAIMWAYIAILPIIGISILTTMFMGNVWIGKRKNRTAAVEQGMSEDETRSGESEVVFVPYLYALAKGINKYKYITRPALESNPTEASGRQETQ

SEQ ID NO: 24803 - protein, 525 aa, Sandersonia aurantiaca
MCGILAVLGCSDDSQAKRVRVLELSRRLKHRGPDWSGLDHHGDCYLAHQRLAIIDPASGDQPLYNEDKTIIVTVNGEIYNHEELRKGLPGHTFRTGSDCEVIAHLYEEHGESFIHMLDGIFSFVLLDSRNNSFVAARDAIGVTPLYIGWGLDGSVWISSEMKGLNDDCEHFKFFPPGHLYSSKEGSFKRWYNPPWFSEVIPSVPFDPLALRKAFEDAVIKRLMTDVPFGVLLSGGLDSSLVASVTARYLEGTKAAELWGTQLHSFCVGLEGSPDLKAAKEVANFLGTIHHEFHFTVQDGIDAIEDVIYHVETYDVTTIRASTPMFLMSRKIKSLGVKMVISGEGSDEIFGGYLYFHKAPNKEELHLETCHKIKALHQYDCLRANKATSAWGLEARVPFLDKEFVNVAMSIDPEWKMIKPDIGRIEKWILRRAFDDEENPYLPKHILYRQKEQFSDGVGYSWIDGLKAHSALHVTDKMMLNAAHIYPHNTPTTKEAYYYRMIFERFFPQIDSPWRSKCGLQHSKSY

SEQ ID NO: 24804 - protein, 532 aa, Listeria innocua Clip11262
MTKYIFVTGGVVSSIGKGITAASLGRLLKNRGLSVTIQKFDPYINVDPGTMSPYQHGEVYVTDDGAETDLDLGHYERFIDINLNKYSNVTTGKVYSEVIKKERRGDYLGGTVQVIPHITNELKDRVFRAARMTNSDIIITEIGGTVGDIESLPFLEAIRQIKSDVGAENVLYIHTTLIPYIKAAGEMKTKPTQHSVKELRSLGIQPNIIVVRTEQPVSQEMKDKIALFCDIKASEVIESRDEETLYNVPLSLQKQKMDDIVLEHLQLEAPQAEMTDWKNLVHRVKNLSKKVRIGLVGKYVSLQDAYLSVAEALRHAGYEHDAEIEIDWIDSEKVTKENVAEIMKDVDGILVPGGFGDRAIEGKIAAIEYARVNKVPYFGICLGMQLATVEFARNVLGLEGAHSAEIEPETKHNIIDLLPEQKNIENMGGTLRLGLYPARIKQGTKAEAAYGTTLVEERHRHRYEFNNEYREQMEEAGMIVSATSPDGRLVEVVELADHPWFVACQYHPEFISRPNRPQSLFKDFVGAALNNK

SEQ ID NO: 24805 - protein, 474 aa, Yersinia pestis KIM
MGKMVDQSKIVAEPLQEPEEHLQRSLSNRHIQLIAIGGAIGTGLFMGSGKTISLAGPSIIFVYMIIGFMLFFVMRAMGELLLSNLNYKSFSDFSADLLGPWAGFFTGWTYWFCWVITGIADVVAITAYAQFWFPDFSQWVASLLVVLLLLSLNLATVKMFGEMEFWFAMIKIVAIVALIFAGLTMVLVSYQSPSGTTASFTHLWSDGGMFPKGISGFFAGFQIAVFAFVGIELVGTTAAETKDPEVVLPRAINSIPIRIIMFYVFSLIMIMSVTPWSSVVADKSPFVELFVLVGLPAAASVINFVVLTSAASSANSGVFSTSRMLFGLAKEGNAPKQFGKLSRRSVPATGLTFSCICLLGGVVLIYLIPNVMTVFTLVTTVSAILFMFVWTIILCSYLVYRKRRPALHKKSIYKMPAGIFMSWVCMAFFAFVLVLLTLESDTRQALIVTPLWFVILTASYIFLKKRRARLYNSK

SEQ ID NO: 24806 - protein, 525 aa, Dendrocalamopsis oldhamii
MEEGRSDLKEASRLERALSAESGGGGGDSGSDSGRKKFMRLLRLFFACMVSGGIQYGWALQLSLLSPYSQTLGISHTYVSLTWICGPISGFVVQPIVGYYSDRCTMRIGRRRPFILAGCLVICISVMLIGFSADIGRRLGDTKEHCSTYTGPRWSAAIVYIAGFWFLDFANNTVQGPARAMMADISAGHHGPSVGQAIFSLWMAIGSILGYLAGANAKWHEWFPSLKTAACCDACANLKGAFFTAVALIVISMTVTMLLADEKPLYKVDVDTSSGGGWSAFGDLFKSFKNLSPAMFKVLAVTAITWLSWFPFFQYNTDWMGREIYHGDPHGKGVKADSYNAGVREGAVGLLLCSISLGVTSFLIPKLCRKLTSKVVWSISNFLVFIIMTVMVVVGMVSMKGYRPSLSATLTGSDPTLKAIALTIFALIGVPQAVLFSVPWVVASEVAAEEGGGQGLTVGVLNIAIVVPQLIIALTAGPIDGAFNKGNTPAFGIGGAFAFICAVLALFLLPKTRGISHAAVVASGH

SEQ ID NO: 24807 - protein, 135 aa, Populus alba x Populus tremula
CNKPILFTMARLDRVKNLTGLVEWYGKNTKLRELANLVVVGGDRRKESKDIEEQAEMKKMYNHIEKYNLNGQFRWISSQMNRVRNGELYRYICDTKGAFVQPALYEAFGLTVVEAMTCGLPTFATCNGGPAEIIV

SEQ ID NO: 24808 - protein, 117 aa, Brassica napus
MHLKAPEHQVAGHIAKDGKPGPLVDDKGRFFKPLQGDSRGEIEVKFYESFSSNTEVPDHIRRYFPVYHGTQAVEGSDGAAMIVLENLLSKYSKPSVMDVKMGSRTWYPETSEEYIQK

SEQ ID NO: 24809 - protein, 174 aa, Triticum aestivum
MAPAVMASSATTVAPFQGLKSTAGLPVSRRSRGSLGSVSNGGRIRCMQVWPIEGIKKFETLSYLPPLSTEALLKQVDYLIRSKWVPCLEFSKVGFVFREHNSSPGYYDGRYWTMWKLPMFGCTDATQVLNEVEEVKKEYPDAYVRVIGFDNLRQVQCVSFIAFRPPGCEESGKA

SEQ ID NO: 24810 - protein, 83 aa, Zea mays
  misc_feature (32)..(32): Xaa can be any naturally occurring amino acid
  unsure (1)..(83): unsure at all Xaa locations
IILFTRILAEKGVVVLPDIYANSGGVVVSYFXEWVQNIQGFMWAEEKVDDELEKDMSSAFQHMKAMCESLVLPKCAVTLELRV

SEQ ID NO: 24811 - protein, 329 aa, Sinorhizobium meliloti
MTKYKLEYIWLDATRPYQTLRGKTQIKEFDAFPTLEQLPLWGFDGSSTLQAEGRTSDCVLKPVTVYPDPVRTNGALVMCEVMMPDAETPHASNTRATVLDDEGAWFGFEQEYFFYKNGRPLGFPEQGYPAPQGPYYTGVGYKNVGDVARQIVEEHLDICLAAGINHEGINAEVAKGQWEFQIFGKGSKKAADEVCVARYLLVRLTEKYGIDVEFHCKPLGDTDWNGSGMHANFSTAYLREVGGQDYFEALMAAFEKNLHDHINVYGPDNHLRLTGKHETAPWDKFSYGVADRGASIRVPHSFVNNAYPGYLEDRRANSQGDPYQMLLSS

SEQ ID NO: 24812 - protein, 449 aa, Zea mays
  misc_feature (158)..(158): Xaa can be any naturally occurring amino acid
  misc_feature (229)..(229): Xaa can be any naturally occurring amino acid
  unsure (1)..(449): unsure at all Xaa locations
AGAAGMATALSSEELMRMEQDCSAHNYHPIPMVFSKGEGSHIVDPEGNKYIDFLSAYSAVNQGHCHPKVLRALIEQAERLTLSSRAFYNDKFPIFAEYLTSMFGYDMMLPMNTGAEGVETAIKLARKWGYEKKHIPKNEALLVSCCGCFHGRTLGVIXMSCDNDATRGFGPLVPGHLKVDFGDIDGLKKIFEELGDRICGFLFEPIQGEAGVVIPPDGYLKGARDLCSXHNVLMIADEIPTGIARTGKMLACDWENIRPDMVILGKALGAGVFPVSAVLADKGVMLCIRPGEHGSTFGGNPLASAVAVASLKVVRDEGLVERAAKLGQEFRDQLQKVQQKFPQILREVRGRGLLNAVDLNNDALSPASAYDICIKLKERGILAKPTHDTIIRLAPPLTISPEELAEASKALSDVLEHDLPQLQLQKQIKKPESEAEKPVCDRCGRDLYG

SEQ ID NO: 24813 - protein, 122 aa, Brassica napus
MSLIPSFFGGRRTNVFDPFLLDLYDPFEGFLTPSGMTNAPSKDVAAFTNAKVDWRETPEAHVFKADLPGLKKEEVKVEVEDGHILQISGERSSENEEKSDKWHRVERSSGKFMRGVKLPENA

SEQ ID NO: 24814 - protein, 287 aa, Arabidopsis thaliana
MAMQERCESLCSDELISSSDAFYLKTRKPYTITKQREKWTEAEHEKFVEALKLYGRAWRRIEEHVGTKTAVQIRSHAQKFFTKVARDFGVSSESIEIPPPRPKRKPMHPYPRKLVIPDAKEMVYAELTGSKLIQDEDNRSPTSVLSAHGSDGLGSIGSNSPNSSSAELSSHTEESLSLEAETKQSLKLFGKTFVVGDYNSSMSCDDSEDGKKKLYSETQSLQCSSSTSENAETEVVVSEFKRSERSAFSQLKSSVTEMNNMRGFMPYKKRVKVEENIDNVKLSYPLW

SEQ ID NO: 24815 - protein, 276 aa, Triticum aestivum
MLQFRMGCIILSFLEKLHKHFVTKKNRRKRTREDDLMKEGTKSSEKRSKTTDDAHIESTPNNISAPKNDKIMEDDKKKMSIDQIPLPATRDEPEAAEKREDEDPDYEEDPEEVEIYEDDEDMDGDTAEQQDGNLNSREVKLEEVTKEDKVNQKAGKEIELENVACTDEKPGFEEGQPTIAEKGGLVEVGDKAAVSPKGDSAKHEVVDKDLLQAFRYFDKSRVGYIKAEDLRCIVHNLGKFLSNRDVEDLVEAALAESNSARDNRVIYTKLVKIVDL

SEQ ID NO: 24816 - protein, 547 aa, Pseudomonas syringae pv. phaseolicola 1448A
MAAKEVKFGDSGRKKMLAGVNVLADAVKATLGPKGRNVIIEKSFGAPLITKDGVSVAKEIELKDRFENMGAQLVKDVASRANDDAGDGTTTATVLAQAIVNEGLKAVAAGMNPMDLKRGIDKATIAIVAELKKLSKPCTDTKAIAQVGTISANSDHSIGDIIAEAMEKVTKDGVITVEEGSGLENELSVVEGMQFDRGYLSPYFINKPDTMVAELDSPLLLLVDKKISNIREMLPVLEAVAKAGRPLLIVAEDVEGEALATLVVNNMRGIVKVAAVKAPGFGDRRKAMLQDIAVLTGGTVISEEVGLSLETTTLEHLGNAKRVILNKENTTIIDGAGVKTDIDSRISQIRQQIGDTSSDYDKEKLQERLAKLSGGVAVIKVGAGSEVEMKEKKARVEDALHATRAAVEEGVVPGGGVALVRSLQAIEGLKGDNADQDVGIALLRRAVEAPLRQIVANSGDEPSVVVDKVKQGSGNFGYNAASGEYGDMIEMGILDPAKVTRSALQAASSIASLMITTEAMIADVPEDKPAGGGMPDMGGMGGMGGMM

SEQ ID NO: 24817 - protein, 353 aa, Pseudomonas syringae pv. phaseolicola 1448A
MTQTALVVGASGIVGSAITQLLLENDWQVAALSRSPSARPGVIPVAADLQNPKSVSAALADLKPTHVFITTWSRQATEAENIRVNAAMVRNVLDAVRPAGSVKHVALVTGLKHYLGPFEAYGKGTLPQTPFRETQARLDIENFYYAQEDEVFAAAEKDGFTWSVHRPHTVTGVAVGNAMNMATTLAVYASICKATGRPFVFPGSRVQWDSLTDMTDARQLAHQQLWAATTPAAANQAFNITNGDVFRWSWMWGQIAEYFDLQPADFPSEPAPLETQMADDQAAWTDIVREHQLKEGDINRLISPWHTDADLGRPIEVVTDMSKSRKLGFTAFQASDDAFFEVFEKLRRDRLIP

SEQ ID NO: 24818 - protein, 367 aa, Burkholderia pseudomallei K96243
MRRPSRSAPFRKQTGSFMSSTLKIGLMGFGFAGATFHAPVITHSGRTRLAAIATGQPERAAAAYPEAAVVPDLDALAARDDVECVVIATPNDTHVDLAKRALEAGKHVVVDKPVALSAADALGLARLAAARGRVFAPFHNRRWDGDFLTVRHLVESGELGRIVCFESHFDRFRPHVRTRWREEAARGGGLLFDLGPHLIDQALALFGPPETVSATVKTRRDGGDAPDFVHLQLGYPDKDVVLHASALAAIEPARFTVLGTQGGYQKHGLDTQEDQLKAGLTPDDVEFGGGNPPGVLRGLDGELEVERPVPTLDGQYAEFYRALAASIHDGAPFPVAPQDAVDVMTIIETAMRSEREGRRLPFVREAV

SEQ ID NO: 24819 - protein, 575 aa, uncultured archaeon GZfos27G5
MPIRKIGVISRTYRHINRYREVIAILVKYGFGEVLAKLELQKHLDFGKGKSFVLGKTAAEIAAVSHWARVRMALEELGPTFVKFGQIMSTRPDMLPQELIIELEKLQDRVPPFSTEDAKRIIEDELGSSVGRIFKDFTDSPVASASIAQVHKAVLPGGEEVAIKVQRPGIDRIIEVDLEIMLHLATLIEKHFKEELGILDPVGIVDEFARVIRKEQDFRIEAANIERFATNFQADMTIHVPHVYREYSSDKVLTMEFIGGLKISEITKAKAKAKVQAQNYGIDPKVVAARGANLVLKQIFEHGFFHADPHPGNIKVLKDNVICFLDYGMMGSLSARHREDLADILIAIIDKDETKITRTILKLSRYRQIEDSEKLESDIAELIELYAYRPLKELEIGHLLHRIASVVVEYQLKAPRNFYLLAKALVTIEGVGKELDPEFNAVSHAEPFAEKIIWSRMSPRKLIEDFYLSALETRLLLRDLPSEARDILTRVRQGEIKIKFEHKGLDPMLKTLDQTSNRTVFAIVLASLVIGSALMVLSGVPPKWHEIPIIGIIGFLGAGIMAFWLLFSILRHGKL

SEQ ID NO: 24820 - protein, 148 aa, Oryza sativa
VVLKASGHVDRFTDFMVTDEKTGDCYRADHLLEAAIEAALEDAKNPLSPEARKEAEQLLAGVGELGLEALHEALTKFSVVAPDTKNPISRPFPFNLMFKTSIGPRGDLVGYLRPETAHGICDNFRDLLYFNGRKLPFAAAQIGNAYRN

SEQ ID NO: 24821 - protein, 649 aa, Brassica napus
MSSAPSPGTGSPPSPPSNSTTTTPPPASAPPPTTPSSPPPPSTIPTSPPPSSRSTPSAPPPSPSPPTPSTPGSPPPLPQPSPPAPTTPGSPPAPVTPPTRNPPPSVPGPPSNPSREGGSPRPPSSPSPPSPSSDGLSTGVVVGIAIGGVALLVIVTLICLLCKKKRRRDEEDAYYVPPPPPPGPKAGGPYGGQQQQWRQQNATPPSDHVVTSLPPPPKAPSPPRQPPPPPPPPFMSSSGGSDYSDRPVLPPPSPGLVLGFSKSTFTYEELARATNGFSEANLLGQGGFGYVHKGVLPSGKEVAVKQLKVGSGQGEREFQAEVEIISRVHHRHLVSLVGYCIAGAKRLLVYEFVPNNNLELHLHGEGRPTMEWSTRLKIALGSAKGLSYLHEDCNPKIIHRDIKASNILIDFKFEAKVADFGLAKIASDTNTHVSTRVMGTFGYLAPEYAASGKLTEKSDVFSFGVVLLELITGRRPVDANNVYVDDSLVDWARPLLNRASEQGDFEGLADAKMNNGYDREEMARMVACAAACVRHSARRRPRMSQIVRALEGNVSLSDLNEGMRPGQSNVYSSYGGSTDYDSSQYNEDMKKFRKMALGTQEYNATGEYSNPTSDYGLYPSGSSSEGQTTREMEMGKIKRTGQGYSGPSL

SEQ ID NO: 24822 - protein, 461 aa, Triticum aestivum
NKFVQKSRLVPVRNSRDIVDPHVRIKKARGVLFSEERVCRWFTQLLLALDYLHCNRVLHRDLKCSNILLTKDNNIRLADFGLAKLLMEDLASSVVGTPNYMCPEILADIPYGYKSDIWSLGCCMFEILAHRSAFKATDMATLVNKINRSSISPMPPIYSSSLKQIVKSMLRKNPEHRPTAGELLRHPYFQPYLAESINCSPIYLPVKPKKSNLGDKQSRKPSGGRKRVGKANGSSEALQAAAEQTAETRDSSTNYSDLSTVGTQDPCILQMSVDPEARNKEELTAHVLSPQHVEENLAATTDGQIDETIRLKTIRTRSPVEAAPVNSASQKLNEVPVPNEEMTIGVVQEHRKDVKTESCQGVKQGMGDVDVVTEESSPVSTLKLGNAGSAPAEFDHLNIVQQRADALESLLEICAKLLEQERLDELAGILRPFGEGAVSSRETAIWLTKSLMTPPKFGGSP

SEQ ID NO: 24823 - protein, 359 aa, Oryza sativa
MERYELLKDIGAGNFGVARLMRNKETKELVAMKYIPRGLKIDENVAREIINHRSLRHPNIIRFKEVVVTPTHLAIVMEYAAGGELFDRICNAGRFSEDEARYFFQQLICGVSYCHFMQICHRDLKLENTLLDGSPAPRLKICDFGYSKSSLLHSKPKSTVGTPAYIAPEVLSRREYDGKTADVWSCGVTLYVMLVGAYPFEDPDDPKNFRKTIGRIMSIQYKIPEYVHVSQDCRQLLSRIFVANPAKRITIREIRNHPWFLKNLPRELTEAAQAMYYKKDNSAPTYSVQSVEEIMKIVEEARTPPRSSTPVAGFGWQEEDEQEDNSKKPEEEQEEEEDAEDEYDKQVKQVHASGEFQLS

SEQ ID NO: 24824 - protein, 380 aa, Campylobacter jejuni RM1221
MSLENILEALEKNHNLRKLTSLKHEGNFVFKEGKKLLNLAGNDYLNLSSCKSLKDEFLDNVKEQDLFFSSSSSRSLSGNFTIYEELESFLKSKFKEKEILHFNSGYHLNISCIAALVSIPNTLFLVDKFIHASMIDGLKLGGAKFFRFHHNDMNHLENLIQKHYDHYENIIILSEALFSMDGDFSDFNTLIAFKEKYPKIKLYIDEAHSVGCFDEEGLGLVKALNLEEKVDFIVFTFGKALASMGACMICNNLYKSFFINKARAFIYSTALPPINIAWTKFIFEKMSELKEKREKLQIIGNFFKNQLIEKNHQILGDAYIISLVLGENQKTIELAKKLETNGIFAPAIKEPTVPKNTARIRFSLHAGLSKEDLKKVIELL

SEQ ID NO: 24825 - protein, 409 aa, uncultured archaeon GZfos28B8
MAIRKIGVISRTYRHINRYREIIAILVKYGFGEVLAKLDLQKHLDFGKGFVLGKGAAEIAAASRWERVRMILEELGPTFVKFGQIMSTRPDMIPHELIPELEKLQDRVPPFSTEDAKLIIEEELGSSVGSIFKDFTDSPIAAASIAQVHKAVLPSGEEAAVKVQRPGIDRIIEVDLEIMLHLASLIKKHFKEELDWDPVGIVEEFTRVIRKELDFRIEAAHIERFARNFQADMTIHVPHAYRDFSSRKVLTMEFIGGIKVSEITRAREQEYGIDPKVVAARGADLVLKQIFEHGFFHADPHPGNIKVLKDNVICFLDYGMMGSLSARHREDLADILFGIVNKDESKITKTILKLSEYGQIVDSEKLESDIAELIELYAFGTLKELEIGSLLHRIARVVEEHRLEGPRDF

SEQ ID NO: 24826 - protein, 501 aa, Xanthomonas oryzae pv. oryzae KACC10331
MAGGALRRRPMAATPWTLLCMFPGEPMSSASIDGAPDAGENTRFIILISCVATIGGFLFGFDSGVINGTVDGLKQTFQSTAAETGFEVASMLLGCAIGAFFAGRLADRSGRRAVLIISAALFLLSAIGAGASHSSGFFIFARVMGGFAVGAASVISPAYIAEVASARYRGRLATMQQIAIISGLFCAFLSNYLLANAAGASTEPLWAGQAAWRWMFWMQAVPSLLFLLLLLVIPESPRYLVVKGRREQALVVLKRLYGNAAAQTKLGEISASMSADRHKPKFSDLINQATGKIRPIVWIGIGLAVFQQLVGINVVFYYGAVLWQAVGFSEQDALLINVLSGGLSIGACLVTVMLVDKIGRKPLLWIGSAGMAVSLALVTYAFATASLDLNGKLAMSDAMGMLALVAANVYVVFFNASWGPVMWVMLGEMFPNQIRGSGLAIAGAAQWTSNFAITVSFPILLGSIGLAGAYGIYTVAAFISVFFVLKCVYETKGKELEQMEG

SEQ ID NO: 24827 - protein, 682 aa, Kluyveromyces lactis
MSSVAASQNKINDLLEAIRQEFANVSQEANSYRLQNQKDYDFKINQQLAEMQQVRNTVYELELTHRKMKDAYEEEISRLKLELEQKDRQLASIAHGSTVGNVPGQVPQLSRNSGAQGNANIAPPNIPQPMVSQTVGTGMAPQMAPLNTQHPTQQTKSNAGEQAAANLAPVIQQQQQPQQQLPPQQQQQQQQQQQSNIPVTTAAPVQPAGGNLDQTVPNSISPQQQPTEQQQPASTATTAPATASTAPPTSAPSDQVGQDHYLVPADQRAVHAKPIPPFLLDLDSQLVPSHLKKQNNDYYVLHNPALPTDLDVELHKSLEHSSVVCCVRFSSDGEFLATGCNKTTQVYKVSTGELVARLSDDSASQPQPQPQNQTVTAETSTSNSNGSSAEDGTGNQNSAASTASSDLYIRSVCFSPDGKFLATGAEDKLIRIWDLETKKIVMTLKGHEQDIYSLDYFPSGNKLVSGSGDRTVRIWDLTTGTCSLTLSIEDGVTTVAVSPGEGKFIAAGSLDRTVRVWDSDTGFLVERLDSENELGTGHRDSVYSVVFTRDGKGVVSGSLDRSVKLWNLNGLSGQKSHAECEVTYTGHKDFVLSVATTQNDEYILSGSKDRGVLFWDTKSGNPLLMLQGHRNSVIYVTVANGHPLGPEYGVFATGSGDCKARIWKYSKKNGQQNSTQIKEIKE

SEQ ID NO: 24828 - protein, 355 aa, Craterostigma plantagineum
MEKYELVKDIGSGNFGVARLMRNKETKELVAMKYIERGHKIDENVAREIINHRSLRHPNIIRFKEVVLTPTHLAIVMEYAAGGELFERICNAGRFSEDEARYFFQQLICGVHYCHALQICHRDLKLENTLLDGSPAPRLKSCDFGYSKSSLLHSRPKSTVGTPAYIAPEVLSRREYDGKLADVWSCGVTLYVMLVGAYPFEDQEDPFFFRKTILWIMAVQYKIPDYVRISQSCRHLLSRIFVANPLRRITIKEIKSHLWFLKNLPRELTEVAQAAYFRRDNPTYSLQSEEEIMKIVEEAKVPPQASRSIGGFGWGTEEDEENVEEEEEGESEGEEDEYEKQVKAAHASGEVPPLT

SEQ ID NO: 24829 - protein, 387 aa, Idiomarina loihiensis L2TR
MKDIVIVDCIRTPMGRSKNGVFRHTRAEDLSAALMKGLLERNPEVDPEELEDIYWGCVQQTLEQGFNIARNSALIAGIPHKVAGVTVNRLCGSSMQALHDATRAIMNGDGDIFMAGGVEHMGHVPMTHGIDFHPGMNKSVAKASGSMGMTAELLSRKFGITREQQDEFGARSHRKAHEATVEGRFAKEIYAMNGHNADGELVRVTEDEVIRPETTAEGLSQLRPVFDPANGTVTAGTSSALSDGAAAMLVMSADKAKELGLTPRVKIRSMAVAGCDPSIMGYGPVPATEKALKRAGVSIDDIDVVELNEAFAAQSLPVLKGLKLFDKMEEKVNLNGGAIALGHPLGCSGARISTTLINLMEEKDAKLGLATMCIGLGQGIATVFERV

SEQ ID NO: 24830 - protein, 463 aa, Vibrio fischeri ES114
MTVKNSTTKPSELIYQLDDRPPLPHTLFAAFQHLLAMFVAIITPSLIICQTLGVPAAETNTIISMSLFASGISSFIQIKTFGPIGSGLLSVQGTSFNFLGPIIGAGLALKAGGADVPTMMAAIFGTILVASTAEIFLSRVLEYAQKIITPLVSGIVVTLIGLTLIQVGLVSMGGGYSAMGEGTFGSLDKLALAGTVLLIIVVLNRATNPYLRMASIVIAMTVGTLVAWAMGMLNTEMSHDAALIALPIPMQYGLGFDWSLFIPLVLIFLITALEAIGDITATSEVSGQPVKGPVYMKRIKGGVLADGINSAIAAAFNSFPNSTFSQNNGVILLTGVASRYVGYFIAGMLVLLGLFPGVASMVQIIPEPVLGGATIVMFGTIAAAGVRIISRVELDRRAILIMAMSFSMGLGLAQKPEILQFMPEMIKNIFSSGVTAGGVTAIILNIVLPYAEVKEEAKQDVIA

SEQ ID NO: 24831 - protein, 265 aa, Solibacter usitatus Ellin6076
MEYALSRSARQLLAQLSCERTLYAFDFDGTLSPIVSNPDHAVMSRRTRGLLTCLAAARPCIVVSGRGRADLMQRVSGVGLAQAIGNHGAETSEASRAPRRRIAQWKAALEPALRDLPGVWVEDKDLSLAVHYRQAPKSSDARCRILAAARTLPHARVFGGKRVVNLVLDTAPHKGQALAAERDRLGCDWVLYVGDDKTDEDAFALCGNIVPVRIGVSQRSHARYYLRTQREIDRLLAVLVRKTKAVENALVGHTVSPADQPQGQL

SEQ ID NO: 24832 - protein, 255 aa, Daucus carota subsp. sativus
MSFVDDQSGDLSLHERKSGRGKIEIKRIENTTNRQVTFCKRRNGLLKKAYELSVLCDAEVALIVFSNRGRLYEYANNSVRGTIERYKKANSDTPNTATVSEANTQYYQKEAARLRQQISNLQNSNRHLMGEALGAVPAKELKGLETKLQNGLSRVRSKKNELLFAEIEFMRKREIDLHNNNQYLRAKISENERAQQQMSLMPGASGSSEQYRDVGQPHESFDARNYLQVNGLQPNNANYSSHQDHQTQHVPLQLV

SEQ ID NO: 24833 - protein, 127 aa, Vitis vinifera
VAGDMFTSVPKGDAIFMKNILHSWSDEHCVKLLRNCYHALPDNGKVIVVDAVIPDAPEPSAQVKSTYQLDLFMMNLNPDGKERTEKEFAELAKEAGFFSTKVAGCAYSFSLVEFHNKMQHDLIMIVI

SEQ ID NO: 24834 - protein, 535 aa, Clostridium acetobutylicum ATCC 824
MKTKYIFVTGGVVSSLGKGITAASLGRLLKNRGLKVSIQKFDPYINVDPGTMSPYQHGEVFVTDDGAETDLDLGHYERFIDENLSKNSNVTTGKVYWSVINKERRGDYLGGTVQVIPHITNELKERVYRVAKEKDVDVVITEIGGTVGDIESLPFLEAIRQIKYEVGFGNSCFIHVTLLPYLRKAGEIKTKPTQHSVKELRGIGIQPDIIVCRTEKEISKDVRSKIGLFCNIDGDSVISNLDAENLYEVPLMLHDQGLDSLVCKKLELECQEVDNSEWESMVKNIKSLSGEVTIGLVGKYVELHDAYISVVESLNHGGFANNVSVNVKWINSEEVTKDNVDSVLSDVDGILVPGGFGDRGIEGKIEAIRWARENKIPFFGICLGMQCAVIEYARNVLGLEGAHSSEIDPQTKYPVIDLMPDQKDIDDKGGTMRLGLYACKLSKDTNAYDAYEEEVIYERHRHRYEFNNEFRKRLTEEGLILAGTSPDDRLVEIVEIKDHPWFVGVQFHPEFKSRPNRPHALFRDFIKVACTVKEK

SEQ ID NO: 24835 - protein, 749 aa, Solibacter usitatus Ellin6076
MRRMVPFTLALLAGLALLAWAASGVVQTTARRWFERDIGARANLVLVSSEKSLANNWNGEPGELQKQLAALTRDERVMGAAACDPDLKTRAATVGFPEDFGCWAVGTRVRSIDSNGVAHFRPWSTVSDLPTGRVHVSVMPLANPAGQELGFAILLHDLSFIDRREAQARTFLFATFGILAFIALLLPVWVARLARYDWSRELSSLLRGGGKQQQSREFQPILSDVRELVSRMAYDRDDAPGQWNAERLKHSLNSNLHGERVVILSNREPYIHEFTPHGGIEVQHPASGLVTALEPVMRACSGVWVAHGSGSADRETVDRKDHVRVPPGEESYHIRRVWLTEEEQQGYYYGFSNEGLWPLCHVAYARPIFRAEDWRQYRAVNQKFADAVLSEVDSSDPIILVQDYHFALVPAMIRKRLPAATVIMFWHIPWPNAENVGICPWRNQLLEGLLGSSILGFHTQLHCNNFLDSVDRYLETRIDRENNAVVMQGHRTLIRPYPISLEWPVHWAVEAPSPEDCRAQVWRDLGLKRDALLGVGIDRLDYTKGIEERLLAVEQLLERYPEYRGRFSFAQLAAPSRTKIERYRQLSEDVERLAERINQRFGKPDYRPVILLRSHHEPPEVFRYFRASDLCYVSSLHDGMNLVAKEYVAARTDLKGVLVLSEFTGAARELSEALIVNPYDLEASSDALAAALAMPLEEQRDRMASMRSLLVQFNVYRWAGRMLVDAARLRNQERVAGRLAERTGVGSSA

SEQ ID NO: 24836 - protein, 341 aa, Glycine max
  misc_feature (236)..(236): Xaa can be any naturally occurring amino acid
  misc_feature (249)..(249): Xaa can be any naturally occurring amino acid
  unsure (1)..(341): unsure at all Xaa locations
QDTPHSPSRFVLQQLFTSIPTASTTELDAVSAFSEIVPDTVVFDDFEKFPPTAATVSSSLLLGICGLPDTIFRNAVEMALADSECYGLENPNARLSCFVNKAFANIGSDMAKLVPGRVSTEVDARLAYDTHAIIRKVHDLLKLYNDSNVPPKRLLFKIPSTWQGIEAARLLESEGIQTHLTFVYSFAQAAAAAQAGASVIQIFVGRIRDWARNHSGDTEIESAQLRGEDPGLALKXDIHFSDPSLSQQXVTKAYNYIHKYGHKSKLMAAAVRNKQDLFSLLGVDYIIAPLKVLQSLKESIASPDEKYSFVRRLSAQSAAKYTFSDEEVWFQSLMSFAFPLY

SEQ ID NO: 24837 - protein, 308 aa, Agrobacterium tumefaciens str. C58
MSATKLAIVGVGKIVRDQHLPAIAGNPDFELICTASRHGTVDGVSSYGTIEAMLEAEPAINAVSLCMPPQYRYEAAYAALNAGKHVFLEKPPGATLSEVQDLARLADSKGLSLFASWHSRYAPAVEAAKAFLASTTIDSVHVIWKEDVRHWHPNQAWIWQAGGLGVFDPGINALSIITHILPRALFLTKATLEFPENRDAPIAADLHFSDVEKTPVHAEFDWRQTGKQSWDIVAETAAGRMVLSEGGAKLSINGEEKLSQPEREYPALYERFAEIIKAGRSDVDLAPLTHVADAFLLGRHKFVDSFYD

SEQ ID NO: 24838 - protein, 250 aa, Brassica napus
  misc_feature (233)..(233): Xaa can be any naturally occurring amino acid
  unsure (1)..(250): unsure at all Xaa locations
MGSETAQKSYPPLHFVLFPFMAQGHMIPMVDIARLLAQRGVTITIVTTPYNAGRFKNVLSRAIESGLPIKVVHVKFPSQEAGMPEGKENIDMLDSMELMIPFFKAVNMLEEPVQKLMEEMSPPPSCLISDMCLFYTSKLAKTFNIPKILFHGMCCFCLLCMHVLRENLEILESLESDKEYFTVPYFPDKVEFTRPQVPVETYVPGEWKEFLDEIKEADKTSYGVVVNTFQELXPAYVKRLQEARSGKAWS

SEQ ID NO: 24839 - protein, 359 aa, ASPERGILLUS NIDULANS FGSC A4
MVLHNPNNWHWVNKDVSAWAKTYLKEKLRAVSAEEDGVTAKVSDVLTMDGDVDVSQRKGKVITLFDVKLQLEYEGKTKDEEAVSGTITIPEVAHDTEEDEYVFDIDIYSDSPSKQPVKDLVRSKIVPQIRKELVQLAPALVAEHGKDIQHAPGENPSKGFTPAVSYPQTKKQEAPASKPATTTTTNKVSVNTTTVTASDEFRTTAEELFKTFTEPERLAAFTRGQPRQWDGAKVGGKYSIFDGNVTGEFVKLESPTLLVQKWRLAQWPEGHFSTLEINFDQNDVDGVTQMRVSWAGVPVGQEDVTKQNWELYYVRSIKQTFGSRSFVFTWRQLLITILTLFLGHMINLTIFSYSCHDNV

SEQ ID NO: 24840 - protein, 106 aa, Narcissus pseudonarcissus
MKGGKSKADTSKKADARLSVKRKAAEKPAKKPVVKKSKAEKDPNKPKRPPSAFFVFMEEFRKQFKEKNPNNKQVSVVGKAAGDKWKSMSATEKAPYEAKAAKRKAE

SEQ ID NO: 24841 - protein, 140 aa, Agrobacterium tumefaciens str. C58
MAIERTFSMIKPDATKRNLTGAITKVFEDNGLRIVASKRVWMSKREAEGFYAVHKERPFFGELVEGMTSGPTIVQVLEGENAILKNREIMGATNPAQAAEGTIRKSFALSIGENSVHGSDAPETAAQEIAYWFAETEIVG

SEQ ID NO: 24842 - protein, 1238 aa, Bordetella bronchiseptica RB50
MPAPHRLYPRSLICLAQALLAWALLAWAPAQASQELTLVGKAAVPDVEIALDGDDWRWLARKRVLTLGVYAPDIPPFDVTYDERYEGLTADYMAIIAHNLGVQAKVLRYPTREQAVGALESGQIDLIGTVNGIEGRLQSLRLSVPYAADHPVLVMPIGARRAPPADLAGQRLAVDANYLPRETLQQAYPQATLHYFPSSEQALAAVAYGQADVFIGDALTTSHLVSQSYFNDVRVVAPAQIVTGGESFGVRADNTRLLRVVNAVLEAIPASERRSLIYRWGLGSSISLDFARPAYSAREQQWMANHPVVKVAVLNLFAPFTLFRTDEQFGGISAAVLQLLQLRTGLDFQIIGVDTVEELIAKLRSGEADMAGALFVNAARESVLSFSRPYVRNGMVIVTRQDPAAPADADHLDGRTIAMVRNSAAIPLLQQRYPQAKVVTADNPTEAMLLVADGQADAVVQTQISASYYVNRYFAGKLRIASALDLPPAEIALATARGQTELISILNKALYSISNDELASIVSRWRGSDGDPRTWYAYRNEIYLLIGLGLLSALLFLSWIVYLRRQIRQRKRAERALNDQLEFMRVLIDGTPNPIYVRDKEGRMLLCNDAYLDTFGVTADAVLGKTIPEANVVGDPALAREMHEFLLTRMSAEREPRFEDRDVTLHGRTRHVYQWTVPYGDSLGELKGIIGGWIDITERAELLRELHDAKESADAANRAKTTFLATMSHEIRTPMNAIIGMLELALLRPADQEPDRQSIQVAYDSARSLLELIGDILDIAKIEAGKFDLAPVRTALRALPEGAIRVFDGLARQKGIELVLKTDIVGVDDVLIDPLRMKQVLSNLVGNAIKFTTEGQVVLTVTARPDGEAAHVQFSVSDTGCGISEADQRQLFKPFSQVGGSAEAGPAPGTGLGLSISRRLVELMGGTLVMRSAPGVGTTVSVDLRLTMVEKSAQATPPAAAAQATPSKPQVSLRVLVVDDHKPNLMLLRQQLDYLGQRVVAADSGEAALALWHEHAFDVVITDCNMPGINGYELARRIRAAEAAPGYGRTRCILFGFTASAQMDEAQRCRAAGMDDCLFKPIGVDALRQRLNEAAARAALPTPPSPQAAAPATHDATPAAFSAESILALTQNDEALIRQLLEELIRTNRADVDQLQKLHQQADWPKVSDMAHRLAGGARVVDAKAMIDTALALEKKAQGQAGPSPEIDGMVRTLAAQSAALETQLRAWLEQRPHQGQP

SEQ ID NO: 24843 - protein, 413 aa, Arabidopsis thaliana
MKMALLLNSTITVAMKQNPLVAVSFPRTTCLGSSFSPPRLLRVSCVATNPSKTSEETDKKKFRPIKEVPNQVTHTITQEKLEIFKSMENWAQENLLSYLKPVEASWQPQDFLPETNDEDRFYEQVKELRDRTKEIPDDYFVVLVGDMITEEALPTYQTTLNTLDGVKDETGGSLTPWAVWVRAWTAEENRHGDLLNKYLYLSGRVDMRHVEKTIQYLIGSGMDSKFENNPYNGFIYTSFQERATFISHGNTAKLATTYGDTTLAKICGTIAADEKRHETAYTRIVEKLFEIDPDGTVQALASMMRKRITMPAHLMHDGRDDDLFDHYAAVAQRIGVYTATDYAGILEFLLRRWEVEKLGMGLSGEGRRAQDYLCTLPQRIRRLEERANDRVKLASKSKPSVSFSWIYGREVEL

SEQ ID NO: 24844 - protein, 1142 aa, Neurospora crassa
MNDEDKVHDISKKIEREKALINAAQAMRQQTNNEQVRSKLDTQMREGRRNLEFFEEKLRELQMRRLGHGVDNMSLGASPMSGSHRQSVDDFEGYGAPSPPPKEDVRGHSSHQSQGSGPLMPASAPYPGGPPDSNVPRARPNYTRLDLIKFDTPHLGPRIQLMLSQIQFKLNVEEQYLKGIEKMVQLYQMEGDKKSKLDAAAKRVESKQKIVLLKQALKRYEELHIDIDVDGPDDDSINLPALRKPLSGTLSIRILAVKDVDHAPLGRFARSPETFIAVKAEDIVVARTKPSRNDKWEAEFHTFPVDKTNEIEFTVYDKPAEHPVPIAMLWVRISDIVEELRRKKIEAEMTSAGWVSADRVGSRAPPPQFPMGAQSPQFAAPPTSPGSQEQNTMIPPQAPPPSQVVSQPVDGWFNLEPYGQIHLSFNFIKGARPQGMDRLGRKGAVRQRKEEVHEMYGHKFVQKQFYNIMRCALCGDFLKYSAGMQCEDCKYTCHTKCYTSVVTKCISKSNAETDPDEEKINHRIPHRFIPFSNLTANWCCHCGYMLPIGSKKNSRKCSECALTAHAQCVHLVPDFCGMSMAVANQILEGMRTQKKTHKDKASSMSERTLRPGSKTSISSGSIAQASTYSGSTAYTSIASPEATEAAKLMYSQTTPRPGGPDRTSTSSTTASAAAAAAMAPKHSSQPSQAGSIPDFGGSPGYGRPDSRDDEYSAQQQQGYGSPQQRKYNPADYANIDAYSSPQARPQQQQQQQQQTPQQVSPMYQQNPQTPISKPQPVAPSYDNQVVPSASGVPVPTKKPLPSATDPGTGMRIGLDHFNFLAVLGKGNFGKVMLAETKKSRKLYAIKVLKKEFIIENDEVESIRSEKRVFLIANRERHPFLTNLHACFQTETRVYFVMEYISGGDLMLHIQRGMLGTKRAQFYAAEVCLALKYFHENGVIYRDLKLDNILLTLDGHIKIADYGLCKEDMWYGSTTSTFCGTPEFMAPEILLDKKYGRAVDWWAFGVLIYQMLLQQSPFRGEDEDEIYDAILADEPLYPIHMPRDSVSILQKLLTRDADQRLGSGPTDAQEIMSQPFFRNINWDDIYHKRVQPPFLPQIKSATDTSNFDSEFTSVTPVLTPVQSVLSQAMQEEFRGFSYTADFE

SEQ ID NO: 24845 - protein, 479 aa, Desulfotalea psychrophila LSv54
MGTTEMKVKIVVLGAGPGGYVAAIRAAQLGGDVTVIEKENVGGTCLNWGCIPSKIYKQSADTLNSIKDSASFCIDGISEGKLNLERLQERTKGIIASQSKGIHGLLAKNSISYIGGEAKMSGSHSLSVTRKDGETEEVQFDKLIIATGSTPMALPFLPFDGDRILSSDHIFSLKEIPESITIIGGGVIGCEFACILQSFGVEVTLVEGLERLLPLPSVEEECSKLLLREMKKKKIKVELKTTLASASQKNGMVQLNLVSQGKNGTEKAKQIESEKVLVCIGRRASSASLDLDQAGVETTKRGWISTGANLQTTVPHIYAIGDVLGPERIMLAHTASTEAEIAAENCFGGAEEMNWQVMPSAIFTMPEIGCVGLSEAQAAELYGKENIRAESSLFRTLGKAQVIGELAGVTKIVCAKEDGKILGIHIAGAHATDLLGEATLAVSNGITAKQLTKTIHAHPTLAEILLETAFKIEDMPLHG

SEQ ID NO: 24846 - protein, 300 aa, Pseudomonas syringae pv. phaseolicola 1448A
MPVSGCRDKNKNEVSMTIALKQPTLTGQCVAEFLGTALMIFFGTGCVAALKVAGATFGLWEICIIWGMAVSMGIYLSAGISGAHLNPAVSIALSLFAGFEKRKLPFYISAQIAGAFCGAGLVYLLYISLFFDFEHAHHIIRGSEQSLELASVFSTYPNPAISVGQAFLVEVVITTILMGVIMALGDDSNGLPRGPLAPLLIGLLVAVIGSSMGPLTGFAMNPARDFGPKLMTFFAGWGEIAFTGGRDIPYVLVPIFAPILGACLGAAGYRALIARHLPSADPVENEKNAPAVRGKVQASY

SEQ ID NO: 24847 - protein, 405 aa, Anabaena variabilis ATCC 29413
MVSTFPNSASVDLSRVRLAIRSLQPQLVEWRRRLHQKPELAFQEKITAAFVSSKLQAWGIEHQTSIAQTGIVATIKGEKPSTQVLAIRADMDALPIQELNEVPYCSQHNGVMHACGHDGHTAIALGTAYYLQQHRQNFAGTVKIIFQPAEEGPGGAKPMIEAGVLKNPDVDAIIGLHLWNNLPLGTVGVRSGPLMAAVELFDCTIFGKGGHGAIPHQTVDSVVVAAQIVTALQTIVARNVNPIDSAVVTVGALHGGTTHNVIADTATMKGTVRYFNPAFQGFFPQRIEQVIAGICQSHGAKYDFKYTELYPPVINDQAIAQLVRSVAAEVIETPIGIVPECQTMGGEDMSFFLQEVSGCYFFLGSANPDKDLAYPHHHPRFDFDETALAMGVEIFVRCVEKFFNE

SEQ ID NO: 24848 - protein, 396 aa, Corynebacterium diphtheriae NCTC 13129
MAQSVAEHVTQWAEQHRDEVIEWRRHFHRHPELSHMEFATTDFIEATLRRYGLNPQRFPNTGLMVDIGPDTPQKIAFRGDIDALPITENDDHDVISENYGVMHACGHDVHITVALATACALASADLTIGVRVIFQPAEEVMEGGAPEVIEFGALKGVSNIFAIHAEPKLAVGKVGVRAGAITSASDVIEIKVFGSGGHTSRPHLTADVVYALSKLVVDLPGLLSRRVDPRTGTVLVFGMINAGYAPNAITEEGSVKGTIRTADIGVWRMMEGLLAELVPQVLAPTGCTYELIHHKGVPPVLNDDVATAVIADAARTINPSTVVEAPQSSGGEDFSWYLEHVPGSMARLGCWNGEGTPGDLHQADMYADERCLEVGVRLFGAVADRYNSHNAMFIED

SEQ ID NO: 24849 - protein, 153 aa, Triticum aestivum
  misc_feature (78)..(78): Xaa can be any naturally occurring amino acid
  misc_feature (88)..(88): Xaa can be any naturally occurring amino acid
  misc_feature (93)..(93): Xaa can be any naturally occurring amino acid
  misc_feature (105)..(105): Xaa can be any naturally occurring amino acid
  misc_feature (111)..(111): Xaa can be any naturally occurring amino acid
  unsure (1)..(153): unsure at all Xaa locations
GSCYRADHLLKDFCKEKLENDNTLSPQKEEELNHILAVLDDLSAEQLGAKIKEYGIAAPDTKNPLSDPYPFNLMFQDXPLGPSGLSAXYMKPXETAQGIFGNFKXLYYYNXNNYLRCNPNRQLSATIPSSFNPDLLGGTFWPKIQFSSDIRSP

SEQ ID NO: 24850 - protein, 445 aa, Candida glabrata CBS138
MSTARSGVVTLLHTACGAGILAIPYAFRPFGLVPAIFMLLFCGLCSMMGLLLQSRIAKYGPLKNVSFFSLAQVVNPASSILFDAAIAIKCFGVGVSYMIVVGDLMPKIWSRVSSSGLLLSRNVNITLVMLFIVGPLCFMRRLNSLRYASMIAIGSVAYLCILVIVHFAHQTTELRELKGEVSVGLPHGEPTPLTTLPIFVFAYTCHHNMFSVINEQKNTGFTYVRYIAIVSILVAFVLYVVIGSTGYLTFGDNITGNIIALYPDTLSTTIGRIAIVLLVMLAFPLQCHPARESINNMIKYVQDRYSPQTSYELTAVDADNLEINNDVTSINSRANDKEEECMDTKRFMIITACILFCSYLLAISVTSLARVLAIVGATGSTTISFILPGYFGWSLIGTEYTSNGNQLPLRKSTVIFKYIGLVMTIWGIIIMITSLIASLFFGASH

SEQ ID NO: 24851 - protein, 206 aa, Shewanella sp. ANA-3
MNKIVITATQMMESMISSPMPTRAEVMDVANAVLDGTDAVMLSAETAAGDFPEETVKAMANVCIGAESHPSVKVSKHRLDARFTSVEETIALSTMYAANHLEGVKAIIALTESGATPKLMSRISSSLPILGLSRHETTLAKMALYRGVLPIYFDSTIYPADELAQKALESLTAAGYLQSGDLVLMTKGDAMETIGGTNTCKVLIVA

SEQ ID NO: 24852 - protein, 340 aa, Leptospira interrogans serovar Copenhageni str. Fiocruz L1-130
MQRTIALVQKKGSLENISLETEALPEPNENEVQIEVHSIGLNFADLFAIQGLYSATPQGAFIPGLEYSGVVISTGKKVKNVKKKDKIMGVTRFGGYSSHLNIDSRYVFKLPSKWNFDQGAGFLVQGLTAYYALAALGDLKKGQTVLIHSAAGGVGILANRIAKKLGAFTIGTVGTSSKIDLLKKEGYDKQIVRSSRFKNDLQESLSGTDLNLVLECIGGKIFQESYEVMAPMGRMIVYGAAEMMGEGSSVNWARIAYKYFSRPKLDPMKMVSDNKAVMGFNLIWLYEKVEILTKHLNALVKLNISPPLIGKTFEFDNLNEALKYFQSGTSMGKVVLKVKS

SEQ ID NO: 24853 - protein, 1168 aa, Arabidopsis thaliana
MSTTEPSPENDRDPQPTTISTPTSTNAKLLKKIPAIPFRHSDKEGEDEQAKTDEVTTELAGEGPMSHDSPEILAPSSLGLNHIRTKSSPAPSPLRFSSATPLISPGQDDKDVAKEKPRVGVVDARADARARWPIPPHQPDQGKKVQWSQSKSQRVPANSNPGVESTHVGLAKETQSPRFQAILRVTSGRKKKAHDIKSFSHELNSKGVRPFPVWRSRAVGHMEEIMAAIRTKFDKQKEDVDADLGVFAGYLVTTLESTPESNKELRVGLEDLLVEARQCATMPASEFWLKCEGIVQKLDDKRQELPMGGLKQAHNRLLFILTRCNRLVQFRKESGYVEEHILGMHQLSDLGVYPEQMVEISRQQDLLREKEIQKINEKQNLAGKQDDQNSNSGADGVEVNTARSTDSTSSNFRMSSWKKLPSAAEKNRSLNNTPKAKGESKIQPKVYGDENAENLHSPSGQPASADRSALWGFWADHQCVTYDNSMICRICEVEIPVVHVEEHSRICTIADRCDLKGINVNLRLERVAESLEKILESWTPKSSVTPRAVADSARLSNSSRQEDLDEISQRCSDDMLDCVPRSQNTFSLDELNILNEMSMTNGTKDSSAGSLTPPSPATPRNSQVDLLLSGRKTISELENYQQINKLLDIARSVANVNVCGYSSLDFMIEQLDELKYVIQDRKADALVVETFGRRIEKLLQEKYIELCGLIDDEKVDSSNAMPDEESSADEDTVRSLRASPLNPRAKDRTSIEDFEIIKPISRGAFGRVFLAKKRATGDLFAIKVLKKADMIRKNAVESILAERNILISVRNPFVVRFFYSFTCRENLYLVMEYLNGGDLFSLLRNLGCLDEDMARIYIAEVVLALEYLHSVNIIHRDLKPDNLLINQDGHIKLTDFGLSKVGLINSTDDLSGESSLGNSGFFAEDGSKAQHSQGKDSRKKHAVVGTPDYLAPEILLGMGHGKTADWWSVGVILFEVLVGIPPFNAETPQQIFENIINRDIPWPNVPEEISYEAHDLINKLLTENPVQRLGATGAGEVKQHHFFKDINWDTLARQKAMFVPSAEPQDTSYFMSRYIWNPEDENVHGGSDFDDLTDTCSSSSFNTQEEDGDECGSLAEFGNGPNLAVKYSFSNFSFKNLSQLASINYDLVLKNAKESVEASNQSAPRPET

SEQ ID NO: 24854 - protein, 413 aa, Solibacter usitatus Ellin6076
MSRRVVVTGVGLLTPLGIGTQTTWDALLASKSGIAGITQFDATAFSCRIAGEVKGFDPSNYIEKKEIKKMGRFIQFAIAAADFALKDSGLVVTPEIAEEVGVYIGSGIGGFEVIEREHQTLLEHGPRRISPFFIPATIINLASGYVSIKSGAKGPNSATATACTTSAHSIGDSFRMIQRGDAVAMICGGTEAAVTPMGIGGFAAMRALSTRNDDPERASRPWDKDRDGFVVGEGAGIIVLEALEHATARGAKILAEIVGYGMSADAFHVTAPPDDGDGAFRVMRNAIKDAGLSPEQIDYINAHGTSTDVGDKAETMAIKRAFGEHAYKVAVSSTKSMTGHLLGGAGGLEAGITVMAIHDQVAPPTINHECPDPACDLDYVPNHARKMPIEYALSNSFGFGGTNGCLIFKRYSE

SEQ ID NO: 24855 - protein, 352 aa, Debaryomyces hansenii CBS767
MSKTEFDTKSPVLVTGATGYVAGWIVKKLLEAGVTVHAAVRDPSNHDKLNHLEELKNSTNGDLKFFAADLLKEGSYAEGMAGCKVVFHTASPFTSKITDPQKDLVDPAKLGTRNVLETANKTESVSRVVLTSSCAAIYGDNKDLVSLPNGTLDESVWNNSSSLSHNAYSYSKTVAEKEAWSICENQSKWDLVVLNPSLVFGPGLNSNATSESFSIMKSFGNGLMNRGTPDIGIGIIDVRDLADAHLRAAFIKNAHGRYIISAHNTSFLEIGKLLSPEYDSYPIPKSAAPKFLIWLVGPFVDKNLTRRYIRDNVNYKWKADNSKSIKELEIRYRPLKDTVSDFFQLIIDAKQI

SEQ ID NO: 24856 - protein, 610 aa, Ralstonia eutropha JMP134
MISASGRYVIVFNGEIYNHPEIRAELESAGAAPRWRGHSDTETLLAGIDAWGADATVRRTIGMFAFAVWDRQTHSLTLARDRLGEKPLYYGWQGSGQARAFLFGSELKALRPHPAFDGSIDRNALTLYMRYNNVGGGHSIYQGIAKLPPAHLLTVSMLAREPVLRAYWSGSAAALQGKQDPFTGGPQEAVDSLDALLRDAVARQMMADVPLGAFLSGGIDSSTVVALMQSQSTQPIRTFSIGFHDAGYNEAAHAKAVARHLGTSHTELYVSPEHAMAVIPRLPEIYDEPFSDSSQIPTLLVSGLARQHVTVSLSGDAGDELFGGYNRYQITAELWGRLARIPGPVRAAAAWGLTRLSPHQINRVAALLPMASRWSHVGEKVHKGAGVMAAHTVDELYRGMVSQWQCPDAIVMGGAEPATLPEPVARALAMLGDVERMMAADLLTYLPDDILTKVDRAAMARSLETRIPFLDHRVVEFAWRLPLAYKIRQEDAGHTTKWVLRRVLDRYVPRELIERPKMGFGVPIDAWLRGPLRDWADDLLSEERLRREGFLNPQPIRQRWTEHLSGRRNWQHPLWCVLMFQAWLGHETTERTAPPLTDIPTSDRRLACAF

SEQ ID NO: 24857 - protein, 669 aa, Burkholderia mallei ATCC 23344
MVQKTTHPGGRAFTDVLAFTFRHWRAQPVRIAGIAALALATALGDVLTPLFAGRLVDALSHGVAAADKAAAWSRALHAFGVLIGIGLACTLLRQAVFRNIIVLTLKMMSEIAANAFHRVQRFSTDWHANSFAGSTVRKITRGMWAIDLLNDTLLVALLPSIVMLTGATLLLGLHWPVMGAVVGGGSVVFIAVTVAMSLRYVAPAARLGNLWDTRMGGALADAVSCNPVVKAFGAETREETRLDGVVSKWRARTRRAWRRGTLNGGVQGAMLAAMQAAILGAALWLWAHDRASIGDITFALTTFLVLQGYLRDIGMHIRNLQRSVNDMEELVSLERQPLGIDDKPGAKPISIARGEIRFEHVTFGYSGAHAKPLYENFSIRIAPGERVGLVGHSGSGKTSFIKLIQRLYDVDGGHITIDGQDIAEVTQASLRSQIAIVQQEPLLFHRTLAENIAYARPGATRDEIERAARLASAHAFIDALPQGYDTLVGERGIKLPGGERQRVAIARAFLADAPVLILDEATSSLDSESEVLIQQAMERLMVGRTTLVVAHRLSTVRALDRLIVLDKGRVIEEGSHDALIRLEGGVYRRLFERQALELAKGLIEQTGGTVADWLRDEQDEHGGRDERNERGERDKPGALDGHDARRTHGVLDESRDGGQADNSAMAMEK

SEQ ID NO: 24858 - protein, 616 aa, Brassica napus
  misc_feature (250)..(250): Xaa can be any naturally occurring amino acid
  unsure (1)..(616): unsure at all Xaa locations
MASVTASHFVSLVNNNHGGASGSEANANLSQINFKCQSTTHCGLRSFNMVDRLQRRCQAKAVSAKSSKGLQQNAPKAKRVGKIVCEKGMSMIFIGAEVGPWSKTGGLGDVLGGLPPALAARGHRVMTVCPRYDQYKDAWDTCVVVQIKVGDKVEDVRFFHCYKRGVDRVFVDHPLFLAKVVGKTGSKIYGPITGVDYTDNQLRFSLLCQAALEAPRVLNLNSSKYFSGPYGEDVVFVANDWHTALLPCYXLKSMYQSRGIYMNAKVVFCIHNIAYQGRFAFDDFSLLNLPDSFKSSFDFMDGYEKPLKGRKINWMKAAILEAWRVLTVSPYYAQELISGIDRGVELHSYLRMKTVSGIINGMDVQEWNPATDKYIDIKYDITTVTEAKPLIKEALQAAVGLPVDRDVPVIGFIGRLEEQKGSDILVEAISKFMGLNVQMVILGPGKKKKEAQILELEEKFPGKAVGVAKFNVPLAHMITAGADFIIVPSRFEPCGLIQLHAMRYGTVPIVASTGGLVDTVKDGFTGFHIGRFNVKCEVVDPDDVIATAKAVARAVAVYGTPAMKEMVKNCMDQDFSWKGPARLWEKVLLSLDVAGSEAGVEGEEIAPLAKENVATP

SEQ ID NO: 24859 - protein, 467 aa, Streptomyces coelicolor A3(2)
MPLDAAPVDPASRGPVSAFEPPSSHGADDDDDHRTNASKELFGLKRRVVITGVGVRAPGGNGTRQFWELLTSGRTATRRISFFDPSPYRSQVAAEADFDPVAEGFGPRELDRMDRASQFAVACAREAFAASGLDPDTLDPARVGVSLGSAVAAATSLEREYLLLSDSGRDWEVDAAWLSRHMFDYLVPSVMPAEVAWAVGAEGPVTMVSTGCTSGLDSVGNAVRAIEEGSADVMFAGAADTPITPIVVACFDAIRATTARNDDPEHASRPFDGTRDGFVLAEGAAMFVLEDYDSALARGARIHAEISGYATRCNAYHMTGLKADGREMAETIRVALDESRTDATDIDYINAHGSGTRQNDRHETAAYKRALGEHARRTPVSSIKSMVGHSLGAIGSLEIAACVLALEHGVVPPTANLRTSDPECDLDYVPLEARERKLRSVLTVGSGFGGFQSAMVLRDAETAGAAA

SEQ ID NO: 24860 - protein, 456 aa, Xanthomonas campestris pv. campestris str. 8004
MSARYDYDVVVLGGGSGGLAAAFRAAKHGARVAIMEPGELGGTCVNLGCVPKKAMWLAADLASKIELAGALGFDVVRPTLTWQELVTHRQGYIGNIHASYRRRLDDDGVVLIPQRGVLQDRHTLMGADGVPVTAEHIVIATGAHPLRPHVEGAEHGHVSDDFFNLCHAPDHVAIVGGGYIAVEIAGLLQALGSRVHLFVQGERLLERFDAELTLQLADNLRHLGVRLHFGFRTTGVQRDDTGKLRMRGHSAHPGELGNDVFDQVFFAIGRLANTAGLGLEALGVELGKKGEIVVDDGQTTNVPNIHAVGDVDGKVGLTPVAIAAGRKLMDRLFGGQPDARMDYDNVPSVVFSHPPLGAVGLTEEQARERYDGAVRVYRSNFRPMLHALADAPQRSVFKLVCVGEEERVVGVHLLGESADEMLQGFAVAVKMGATKRDFDETVAIHPTSSEEIVLMH

SEQ ID NO: 24861 - protein, 667 aa, Bacillus methanolicus
MLQQKIDIDQLSIQTIRTLSIDAIEKVGSGHPGMPMGAAPMAYTLWTKFMNYNPSNPNWFNRDRFVLSAGHGSMLLYSLLHLTGYDLSLEDLKNFRQWGSKTPGHPEFGHTPGVDATTGPLGQGIAMAVGMAMAERHLASKYNRYKFNIIDHYTYSICGDGDLMEGVSAEAASLAGHLKLGRLIVLYDSNDISLDGDLHMSFSESVQDRFKAYGWQVLRVEDGNDIDSIAKAIAEAKNNEDQPTLIEVKTIIGYGSPNKGGKSDAHGSPLGKEEIKLVKEHYNWKYDEDFYIPEEVKEYFRELKEAAEKKEQAWNELFAQYKEAYPALAKELEQAINGELPEGWDADVPVYRVGEDKLATRSSSGAVLNALAKNVPQLLGGSADLASSNKTLLKGEANFSATDYSGRNIWFGVREFGMGAAVNGMALHGGVKVFGATFFVFSDYLRPAIRLSALMKLPVIYVFTHDSVAVGEDGPTHEPIEQLASLRAMPGISTIRPADGNETAAAWKLALESKDEPTALILSRQDLPTLVDSEKAYEGVKKGAYVISEAKGEVAGLLLASGSEVALAVEAQAALEKEGIYVSVVSMPSWDRFEKQSDAYKESVLPKNVKARLGIEMGASLGWSKYVGDNGNVLAIDQFGSSAPGDKIIEEYGFTVENVVSHFKKLL

SEQ ID NO: 24862 - protein, 307 aa, Klebsiella pneumoniae
MNGKIWVLGDAVVDLLPDGEGRLLQCPGGAPANVAVGVARLGGDSGFIGRVGDDPFGRFMRHTLAQEQVDVNYMRLDAAQRTSTVVVDLDSHGERTFTFMVRPSADLFLQPEDLPPFAAGQWLHVCSIALSAEPSRSTTFAALEAIKRAGGYVSFDPNIRSDLWQDPQDLRDCLDRALALADAIKLSEEELAFISGSDDIVSGIARLNARFQPTLLLVTQGKAGVQAALRGQVSHFPARPVVAVDTTGAGDAFVAGLLAGLAAHGIPDNLAALAPDLALAQTCGALATTAKGAMTALPYKDDLQRSL

SEQ ID NO: 24863 - protein, 477 aa, Mesorhizobium loti MAFF303099
MSRQAQAPTIVLFRRDLRMGDNAALAAAAERGVPVVALYILDETTKGLRAMGAASRWWLHHSLAALGDLLRKAGANLFLAHGRTEDAVAKAIDASGANCVFWNRRYDPSEVAVDARLKAALREKGLTALSFDGALLHEPSLLKTGSGGFYKVFTPFWKAMADKVDVRDPIDTPGQIDGWRGELGGLRLDELDLLPSKPDWAYGLRETWTPGEKGAQARLGQFIEHGLANYERQRDYPGQPSTSRLSPHLTFGEITPFQIFAALRRSKSSGTSKFRAEIGWREFSYHLLFHNPDLSGRNFRPEFDAMSWRDDIRALRTWQRGLTGYPIVDAGMRELWRTGWMHNRVRMIVASFLIKDLMIDWRHGEKWFWDTLVDADAANNPASWQWVAGSGADPAPYFRIFNPVLQGEKFDPHGDYVRQHVPEISALPDRYIHRPWEAPAAVLKDKGIVLGKTYPNPIVDHGAARERALIVYQSLKD

SEQ ID NO: 24864 - protein, 458 aa, Triticum aestivum
  misc_feature (14)..(14): Xaa can be any naturally occurring amino acid
  misc_feature (25)..(25): Xaa can be any naturally occurring amino acid
  misc_feature (265)..(265): Xaa can be any naturally occurring amino acid
  misc_feature (283)..(283): Xaa can be any naturally occurring amino acid
  misc_feature (337)..(337): Xaa can be any naturally occurring amino acid
  unsure (1)..(458): unsure at all Xaa locations
QSNGTGEWFTGRNXSRGQLVIRPPXATDPLKTELRTIYGQLCQDDMPMVRRAAASNLGKFAATVEQSHLKTEIMSIFDDLTQDDQDSVRLLAVEGCAALGKLLEPQDCVAHILPVIVNFSQDKSWRVRYMVANQLYELCEAVGPEPTRADLVPAYVRLLRDNEAEVRIAAAGKVTKFCRILSPQLAIQHILPCVKELSSDSSQHVRSALASVIMGNGPVLGKDATIEQLLPIFLSLLKDEFPDVRLNIISKLDQVNQVIGIDLLXQSLLPAIVELAEDRHWRXVRLAIIEYIPLLASQLGVGFFDDKLGALCMQWLEDKVSSIREAAANNLKRLAEXFGPEWAMQHIIPQVLEKINNPHYLYRMTILQAISLLAPVMGAEITCQKLLPVVINSSKDRVPNIKFNVAKVLQSLVPILDQSVAEKTVKPCLVELSEDPGADVRYYANQALQACDQIMMSS

SEQ ID NO: 24865 - protein, 301 aa, Corynebacterium diphtheriae NCTC 13129
MSSSMTVVGSINADVSIQVARHPSPGETVLGHDSTISPGGKGANQAVAAALQGASVSFVGAVGNDTYADHALKILRSSGVNLDAVETIDDNTGVAYIQVSDDGENSIIVIPGANAHVTADYVEHHRKPIEDADIVLLQGEIPADGFSAAVQAARGTVVVNLAPVIDVDRDCLLRADPLMANEHEAALILEQLGVPVTSEDPRVLIEALRSQGFASVVLTLGGHGALVADASGVTPIATPYVTAVDTTGAGDAFAGAFVARRLQGDSLIDAATFAARVGAFSVQGRGAQTSYPSESDTLPAV

SEQ ID NO: 24866 - protein, 344 aa, Triticum aestivum
  misc_feature (128)..(128): Xaa can be any naturally occurring amino acid
  misc_feature (167)..(167): Xaa can be any naturally occurring amino acid
  misc_feature (177)..(177): Xaa can be any naturally occurring amino acid
  misc_feature (194)..(194): Xaa can be any naturally occurring amino acid
  misc_feature (327)..(327): Xaa can be any naturally occurring amino acid
  unsure (1)..(344): unsure at all Xaa locations
MASGVAATGAAASAWWATQGLLPLFAPHMAFPFVPVPTACFATADVQRATENFPVDNAPKDCQVAQEQGQPEAMIVVASSVSDESGKGEVSPHTELNISPADKADTTPPTGAETSDAFRLWSKKAHDXFLPALPRVVPSNTARVIVSDAGSKVPWYGSVEKLASYWXTRVRGQVQYXDVGPENLAPISNLHDMXSSHSKTVGYKRLSESNPISCRIILYKSRSKGRKYQRSTRSDGHHPSPNIYSASAKEPWILATNLPVEIRTPKQLVNIYSKRMQIEETFRDLKSPAYGIGLRHSRTSSSERFDIMLLIALMLQLTCRLAGVHVXRYNGWDKHFSGLHRHKL

SEQ ID NO: 24867 - protein, 1297 aa, Emericella nidulans
MACADETLTAAAAIIQNLVREAPSSGSPSFEFNFSPQSTNGVDSLPKLPGEPSLAKVRFENELEALVRRIHRMEVQSQQNHAQHAEHTQHLHKRRKSSKDTEPEILDESDGAASDEDEEEGATTLVREEDISYLRNYVQKQAEEISFQKNIITQVREELQLQEVQTRRALTKVENEDVVLLERELRKHQQANEAFQKALREIGGIITQVANGDLSMKVQIHPLEMDPEIATFKRTINTMMDQLQVFGSEVSRVAREVGTEGILGGQAQITGVHGIWKELTENVNIMAKNLTDQVREIAVVTTAVAHGDLSQKIESRAQGEILELQQTINTMVDQLRTFATEVTRVTRDVGTEGVLGGQAQIEGVQGMWNELTVNVNAMANNLTTQVRDIATVTKAVAKGDLTQKVQANCKGEIAELKNIINSMVDQLRQFAQEVTKIAKEVGTDGVLGGQATVNDVEGTWKDLTENVNRMANNLTTQVREIADVTTAVAKGDLSKKVTANVQGEILDLKSTINGMVDRLNTFAFEVSKVAREVGTDGTLGGQAKVDNVEGKWKDLTDNVNTMAQNLTSQVRSISDVTQAIAKGDLSKKIEVHAQGEILTLKVTINHMVDRLAKFATELKKVARDVGVDGKMGGQANVEGIAGTWKEITEDVNTMAENLTSQVRAFGEITDAATDGDFTKLITVNASGEMDELKRKINKMVSNLRDSIQRNTAAREAAELANRTKSEFLANMSHEIRTPMNGIIGMTQLTLDTDDLKPYTREMLNVVHNLANSLLTIIDDILDISKIEANRMVIESIPFTVRGTVFNALKTLAVKANEKFLSLTYQVDNTVPDYVIGDPFRLRQIILNLVGNAIKFTEHGEVKLTICKSDREQCAANEYAFEFSVSDTGIGIEEDKLDLIFDTFQQADGSTTRRFGGTGLGLSISKRLVNLMGGDVWVTSEYGHGSTFHFTCVVKLADQSLNVIASQILPYKNHRVLFIDKGENGPEAENVLKMLKKLDLEPLVVRNEDHVPPPEIQDPSGKESGHAYDVIIVDSVNTARMLRTYDDFKYVPIVLVCPLVCVSLKSALDLGISSYMTTPCEPIDLGNGMLPALEGRSTPITTDHSRSFDILLAEDNDVNQKLAVKILEKHNHNVSVVGNGLEAVEAVKQRRYDVILMDVQMPVMGGFEATGKIREYERDSGLSRTPIIALTAHAMLGDREKCIQAQMDEYLSKPLKQNQMMQTILKCARLGGSLLEKSKESRISSSGEMHHVHTGPDGKSQRPGMEGRSITSSSATSRTLASTSAERTEQLSIDRVRP

SEQ ID NO: 24868 - protein, 540 aa, Bradyrhizobium sp. BTAi1
MAAKDVKFSTDARDRMLRGVDILANAVKVTLGPKGRNVVIEKSFGAPRITKDGVTVAKEIELEDKFENMGAQMVREVASKTADLAGDGTTTATVLAQAIVKEGAKSVAAGMNPMDLKRGIDLAVDAIVADLKAHAKKITSNDEIAQVGTISANGDNEIGRFLAEAMQKVGNEGVITVEEAKSLDTELEVVEGMQFDRGYVSPYFVTNSEKMRVELEDPYILIHEKKLSGLQTMLPLLEAVVQSGKPLLIVAEDVEGEALATLVVNKLRGGLKIAAVKAPGFGDRRKAMLEDIAILTGGTTISEDLGIKLENVTLSMLGRAKKVVIDKENTTIVDGAGAKKDIEARTQQIKLQIEETTSDYDREKLQERLAKLAGGVAVIRVGGATEVEVKERKDRVDDALHATRAAVEEGILPGGGVALLRATKVLDGVKTANADQKAGVDIIRRAIQVPVRQIVQNAGEDGSLVVGKLLEKDTYSWGFNAATGEYQDLVQAGVIDPAKVVRTALQDAASVASLLITTEALVADKPKKAEATQAAPAMDF

SEQ ID NO: 24869 - protein, 372 aa, Candida glabrata CBS138
MSESELRQRQAEFTKELHGEGAESRTGLTALLSKNRNAQREAVSKYLRHWDGKTDKEAEDRRLEDYNEATHSYYNVVTDFYEYGWGSSFHFSRFYKGENFQAAMARHEQYLAYMAGIKKGDLVLDVGCGVGGPARTIARFTGCNIIGLNNNDYQIQKAKYYAKKYNLQDHMDFVKGDFMNMEFEPNSFDKVYAIEATCHAPKLEGVYGEIYKVLKPGGTFAVYEWVMTENYDENNEEHRKIAYEIELGDGIPKMFTVDVAKQALKNVGFEVEVSKDLADEDDEIPWYYPLTGEWKYVQSLSDIATFFRTSYFGRKFTNCMVSIMEKVGVAPQGSVEVTAALENAAVGLVEGGRKKLFTPMFLFVAKKPEDAK

SEQ ID NO: 24870 - protein, 106 aa, Bradyrhizobium sp. BTAi1
MCMHFRPLHDRVLVRRIDAEEKTKGGIIIPDTAKEKPQEGEIVAAGPGARNEQGQLVPLDVKPGDRVLFGKWSGTEVKIDGKDLLIMKESDLLGIIDAPVAAKKAA

SEQ ID NO: 24871 - protein, 365 aa, Bradyrhizobium sp. BTAi1
MQILRCVRPLVLLPAIVLSLLAAPALAQIPDLKLGRVPTLAPLVKEVTPAVVNISVEGKVRQDNPLYQDPLFREFFDVPKQVEKQISATGSGVIVDAQRGYVMTANHVVEHVSTAQIRTKDGRKFSARLVGRDPATDIAVLQIKDPTELKAIALGDSDALEVGDFVIAVGNPFGLGQTVTSGLVSALGRTGLGKQGYEDFIQTDAAINPGNSGGALINLRGELVGINTAIISPGGGNVGIGFAVPINMARRVMEQLVANGRVDRGRIGVTLLDLDSPADGRVQGARVADVTVGSPAERAGLRKGDIIVKANDMPVRSATQVRNLIGLTPVGQRVRLVFERDRALGNATVEVAPVTEERARARSSG

SEQ ID NO: 24872 - protein, 450 aa, Hordeum vulgare subsp. vulgare
MAMPPAEKVIVVDANPSKNGHGDEIDDLPVADATSHQIGVDPWYQVAFVLTTGVNSAYVLGYSGSLMVPLGWVGGTVGLLLAAAVSMYANALLGRLHLLGGKRHIRYRDLAGHIYGPKMYRLTWAMQYVNLFMINTGFIIIAGQALKALYLLISNDGAMKLPYCIAVSGFVCALFAFGIPYLSALRIWLGFSTVFSLTYIVAACTLSLKDGMRSPPRDYSIQGDPSSRVFTTIGAAASLVFAYNTGMLPEIQATVRAPVVKNMEKALWFQFTAGCVPLYAIIVIGYWAYGNQTTTYLLNNVHGPVWIKAVANLSAFLQTVIALHIFASPMYEYLDTRFGSKVGGPFAMHNVIFRVGVRGGYLAVNTLMAAMLPFLGDFMSLTGALSTFPLTFVLANHMYLVSNRQRLSSLQKSWHWLNIVFFTILSITAAIAALRLIARDSKEYHIFADV

SEQ ID NO: 24873 - protein, 751 aa, Vigna unguiculata
MELLQNGTKAKPSEIPLVNGTALTHLNSLFQTQFSGNIDPSRAFVSKVKRLIVKVGTAVVTRSDGRLALGRIGALCEQLKELSSQGFEVILVTSGAVGLGRQRLRYRKLANSSFSDLQKPQGELDGKACAAVGQSSLMALYDTMFSQLDVTSSQLLVNDGFFRDAGFRKQLSDTVNALLDLRVIPIFNENDAVSTRKAPYEDSSGIFWDNDSLAGLLALELKADLLVLLSDVEGLYSGPPSDPNSKLIHTYVKEKHQGEITFGDKSRLGRGGMTAKVNAAVCAAHAGIPVIITSGYATNNIIRVLQGERIGTVFHKDAHLWSNIKEESAREMAVSARESSRRLQILKSEERSKILLAIADALEKNASAISLENEADVADAVLAGYENSLISRLTLKHEKISKLAKSVRMLAAMEEPIGQILKRTEIADKLILEKISCPLGVLLVIFESRPDALVQIAALAIRSGNGLLLKGGKEAQRSNAILHKVITSVIPNTVGDKLIGLVNSRDEIPYLLKLDDVIDLVVPRGSNKLVSQIKESTKIPVLGHADGICHVYVDKSAKIDMAKQIIRDAKTDYPAACNAMETLLVHKDLSNNGGLNELVVELQREGVKLYGGPRASGILNIVETSAFHHEYSSLACTVEIVEDVFDAINHIHEHGSAHTECIVTEDREVAETFLSQVDSAAVFHNASTRFCDGARFGLGAEVGISTSRIHARGPVGVEGLLTNRWILRGSGHVVNGDQGINYTYKELPLEA

SEQ ID NO: 24874 - protein, 212 aa, ASPERGILLUS NIDULANS FGSC A4
MTTQDPFTAALSQNKAWAAKVAREQPDLFRKLSTGQHPEILWIGCSDSRCPETTLLGLKPGDVFVHRNIANILQPSDLSSTAVIEFAVRHLGVKHVVVCGHTKCGGISAVMANKKLGILDSWLSPLRKLRDDNSDCLKSLPTDEALLKLVELNVLAGVKTVKQKSVVVEAMQKGLKVHGLVYDVGSGVLQELDTSASDKTVKKRLTLFKKDF

SEQ ID NO: 24875 - protein, 337 aa, Polaromonas sp. JS666
MSHLPVPPPPSGPVPWDKAFALAVLAGMLRIRRMEEKCAQLYGEQKIRGFLHLYIGEEAVAVGALRALQPQDNVVATYREHGHALLRGLAMNGIMAEMYGKREGCSRGRGGSMHLFDRATRFYGGNAIVGGGLPLAAGLALADKMAGRQALTACFFGEGAIAEGAFHEAANLAALWQLPVLFCCENNLYAMGTALARSEAQTDLCMKAASYGMATVQADGMDVVAVFDAVQRSAQQVRSQGRPVFVELKTYRFRAHSMFDPELYRDKAEVQAWKTRGPIHTFTARLKAQGSLTEDEFLVLDAAAQAEVDAAAAFAEAGTWEPVEDLLRDVHTREGAA

SEQ ID NO: 24876 - protein, 928 aa, Arabidopsis thaliana
MIKTKKVILSCWLQLKTCWFWQKLCEGIVQDLDDRRQELPPGVLKQLHTRMLFILTRCTRLLQFHKESWGQEEDAVQLRQSGVLHSADKRDPTGEVRDGKGSSTANALKVPSTKKAYSQEQRGLNWIEGFFVRPAPLSSPYNETSKDSESPANIDKMSSWKRLPSPASKGVQEAAVSKEQNDRKVEPPQVVKKLVAISDDMAVAKLPEVSSAKASQEHMSKNRHNISWGYWGHQSCISEESSIICRICEEEIPTTHVEDHSRICALADKYDQKGVGVDERLMAVAVTLEKITDNVIQKDSLAAVESPEGMKISNASLTEELDVLSPKLSDWSRRGSEDMLDCFPETDNSVFMDDMGCLPSMSCRTRFGPKSDQGMATSSAGSMTPRSPIPTPRPDPIELLLEGKGTFHDQDDFPQMSELADIARCAANAIPVDDQSIQLLLSCLEDLRVVIDRRKFDALIVETFGTRIEKLIQEKYLQLCELMDDEKGTIIDEDAPLEDDVVRSLRTSPVHLRDRISIDDFEVMKSISRGAFGHVILARKNTTGDLFAIKVLRKADMIRKNAVESILAERDILINARNPFVVRFFYSFTCSENLYLVMEYLNGGDFYSMLRKIGCLDEANARVYIAEVVLALEYLHSEGVVHRDLKPDNLLIAHDGHVKLTDFGLSKVGLINNTDDLSGPVSSATSLLVEEKPKLPTLDHKRSAVGTPDYLAPEILLGTGHGATADWWSVGIILYEFLVGIPPFNADHPQQIFDNILNRNIQWPPVPEDMSHEARDLIDRLLTEDPHQRLGARGAAEVKQHSFFKDIDWNTLAQQKAAFVPDSENAFDTSYFQSRYSWNYSGERCFPTNENEDSSEGDSLCGSSGRLSNHHDEGVDIPCGPAEFETSVSENYPFDNFSFKNLSQLAYINYNLMSKGHKDETQPSLQRR

SEQ ID NO: 24877 - protein, 329 aa, Salmonella enterica subsp. enterica serovar Typhi Ty2
MKLAVYSTKQYDKKYLQQVNEAFGFELEFFDFLLTEKTAKTANGCEAVCIFVNDDGSRPVLEELKKHGVKYIALRCAGFNNVDLDAAKELGLQVVRVPAYSPEAVAEHAIGMMMTLNRRIHRAYQRTRDANFSLEGLTGFTMHGKTAGVIGTGKIGVAALRILKGFGMRLLAFDPYPSTAALDLGVEYVDLQTLFAESDVISLHCPLTPENYHLLNHAAFDQMKNGVMIINTSRGALIDSQAAIEALKNQKIGSLGMDVYENERDLFFEDKSNDVIQDDVFRRLSACHNVLFTGHQAFLTAEALISISETTLQNLSQLEKGEACPNALF

SEQ ID NO: 24878 - protein, 510 aa, Oryza sativa
IPPRLTAARPSRMAVGGDDDMERDFAARLRLAPSPASPTTAAGGGGGGIAFRAPQEQFTVGDFELGKIYGVGSYSKVVRAKKKDTGNVYALKIMDKKFITKENKISYVKMERIVLDQLDHPGVIRLFFTFQDTYSLYMALESCEGGELFDQIVRKGRLSEDEARFYAAEIVDILEYLHSLGLIHRDVKPENLLLTSDGHIKIADFGSVKPTKDTPIKVLPNSTNERACTFVGTAAYVPPEVLNSAPPTFGNDLWALGCTLYQLLSGSSPFKDASEWLIFQRIIARDLKIPEYFSDDARDLIDKLLDVDPSKRPGAGPDGYVSLKKHPFFRGIDWKNIRSTRAPKLAMEANANEDEDSQDSSWLSHMGSAPVNQHVSPVGNDGASSSSEVRSHISRLASIDSFDSRWQDFLEPGESVVLISKLKKINKLTNKKVQLILTDKPQLICVDPGKMVTKGNIMWSDDPSELNVQVSNSSHFRICTPKKVSSFEDAKQRAWQWKKAIEDLQRCQKN

SEQ ID NO: 24879 - protein, 162 aa, Parasponia andersonii
MSSSEVNKVFTEEQEALVVKAWAVMKKNSAELGLQFFLKIFEIAPSAKNLFSYLKDSPVPLEQNPKLKPHATTVFVMTCESAVQLRKAGKATVKESDLKRIGAIHFKTGVVNEHFEVTRFALLETIKEAVPEMWSPEMKNAWGVAYDQLVAAIKFEMKPSST

SEQ ID NO: 24880 - protein, 329 aa, Matthiola incana
RSEAAVTYDSPYPLYAMAFSSSRAGQRIAVGSFLEDYNNRIDILSFDSDSMTVKPLPNLSFEHPYPPTKLLFSPPSLRRPSGGDLLASSGDFLRLWEVSEDSSTVEPVSVLNNSKTSEFCAPLTSFDWNDVEPKRLGTCSIDTTCTIWDIEKSVVETQLIAHDKEVHDIAWGEARVFASVSADGSVRIFDLRDKEHSTIIYESPQPDTPLLRLAWNKQDLRYMATILMDSNKVVILDIRSPTMPVAELERHQASVNAIAWAPQSCKHICSAGDDTQALIWELPTVAGPNGIDPMSVYSAGSEINQLQWSSSQPDWIGIAFANKMQLLRV

SEQ ID NO: 24881 - protein, 550 aa, Polaromonas sp. JS666
MAAKDVIFGGEARARMVEGVNILANAVKVTLGPKGRNVVLERSFGAPTVTKDGVSVAKEIELKDKLQNMGAQMVKEVASKTSDIAGDGTTTATVLAQAIVREGMKYVAAGMNPMDLKRGIDKAVTALVEELKKASKATTTSKEIAQVGSISANSDEAIGKIIADAMDKVGKEGVITVEDGKSLESELDVVEGMQFDRGYLSPYFINNPEKQSAILDNPFVLLYDKKISNIRDLLPTLEQVAKAGRPLLIIAEEVEGEALATLVVNTLRGILKVVAVKAPGFGDRRKAMLEDIACLTGGKVIAEEVGMSLEKVTLADLGTAKRIEVGKENTIIIDGAGEAKDIEARVKQVRVQIEEATSDYDREKLQERVAKLAGGVAVIKVGAATEVEMKEKKARVEDALHATRAAVEEGIVAGGGVALLRAKQAAGAIKGDNADQEAGIKLVLRAIEAPLREIVYNAGGEASVVVNAVLAGKGNYGFNAANDTYGDMIEMGILDPTKVTRTALQNAASVASLMLTTEAMVAEAPKDESGAGGGMPGGMGGMGGMGDMGM

SEQ ID NO: 24882 - protein, 122 aa, Triticum aestivum
  misc_feature (56)..(57): Xaa can be any naturally occurring amino acid
  misc_feature (59)..(59): Xaa can be any naturally occurring amino acid
  misc_feature (72)..(72): Xaa can be any naturally occurring amino acid
  misc_feature (80)..(80): Xaa can be any naturally occurring amino acid
  misc_feature (85)..(86): Xaa can be any naturally occurring amino acid
  unsure (1)..(122): unsure at all Xaa locations
LVPNRHELHGASIVATILRDSEMFNEWTLELKAMADRIINMRQQLFNALKSRGTPXXDXSHIIKQIGDVYFXTGLNSEQXAFMRXXYHIYMTSDGRIQHGGFSIKTVPHLADAIHAALLQLK

SEQ ID NO: 24883 - protein, 151 aa, Brassica napus
MAMMATAIRNSASRGTMMSRQISGLRSMSSWWKNVEPAPKDPILGVTEAFLADPSPDKVNVGVGAYRDDNGKPVVLECVREAERRIAGTSFMEYLPMGGSVKMVDETLKLAYGDNSEFIKDKRIAAVQSLSGTGACRLFADFQKRFSSRFA

SEQ ID NO: 24884 - protein, 218 aa, Aspergillus niger
MSSTSPSKEPEVEPEVQSGEDQEQMDKEQQDTQAQGQGEFEVKEQDRWLPIANVARIMKLALPENAKIAKEAKECMQECVSEFISFITSEASEKCQQEKRKTVNGEDILFAMTSLGFENYAEALKIYLSKYRETQSARGEHQNRPTSSGYGAGAPVGAPGPAGPGGRPMAPGAGFPDTADSANNIMNQSLDPSEQDTSTYGYPPMVGQPHNGTAGESY

SEQ ID NO: 24885 - protein, 136 aa, Narcissus pseudonarcissus
LGMDGAVCKLDKSKIAASVSNFSVVSIDEEQIAANLVQHGPLAIGINAAFMQTYIGGVSCPYICGKHLDHGVLLVGYGSSGWAPIRFKEKPYWIIKNSWGENWGEKGYYKICKGRNVCGVDSMVSTVTAIHTTPKD

SEQ ID NO: 24886 - protein, 397 aa, Arabidopsis thaliana
  misc_feature (108)..(108): Xaa can be any naturally occurring amino acid
  misc_feature (347)..(347): Xaa can be any naturally occurring amino acid
  unsure (1)..(397): unsure at all Xaa locations
MNSFSHVPPGFRFHPTDEELVDYYLRKKVASKRIEIDFIKDIDLYKIEPWDLQELCKIGHEEQSDWYFFSHKDKKYPTGTRTNRATKAGFWKATGRDKAIYLRHSLIXGMRKTLVFYKGRAPNGQKSDWFMHEYRVETDENGTPQEEGWVVCRVFKKRLAAVRRMGDYDSSPSHWYDDQLSFMASELETNGQRRILPNHHQQQQHEHQQHMPYGLNASAYALNNPNLQCKQELELHYNHLVQRNHLLDQSHLSFLQLPQLERPKIQHHHRNCNSLPYGTRNIDNHSRHNAHLPQSNIAHAEQLNQGNQNFSSLYMNRGNAHLMDQLTHWRVLDKFVASQLRNADAAXTASASIQNNAKDTRNAEYQVDEEKDPKRASDMGEEYTASTSSSCQIDLWK

SEQ ID NO: 24887 - protein, 434 aa, Corynebacterium glutamicum ATCC 13032
MTSSNTARSAEWFEKAQKLTPGGVNSPVRAFGSVGGQARFIEKAHGSTLIDVDGNEYVDLVCSWGPMLMGHAHPAVVEAVQKAVVDGLSFGAPTIGEVELAQDIVKRTSVEEVRLVNSGTEATMSAVRLARGYTQRSKILKFEGCYHGHVDALLASAGSGVATFALPDSPGITGAQTSDTIVVPYNDIEAVRNAFAEYPGEIACIIAEAAGGNMGTVAPKDNFNDKLLAIAHADGALLILDEVMTGFRTSYRGWFGVDKVAADLVTFGKVVSGGLPAAAFGGKAEIMNMLAPQGPVYQAGTLSGNPVAVAAGRASLKLADESLYTTINANADRLHGLISDALTHEGVAHHIQRASNMLSIRFAEGEGHNFSDMKAADIFRFAPFFHTLLDNGVYAPPSVFETWFVSSALTDDDFSKIEQALKPAARAAAEAKAS

SEQ ID NO: 24888 - protein, 666 aa, Anabaena variabilis ATCC 29413
MTVKTLPPNSRPIEGELQLKDTQALVVRSSGTVSPERPQVLVTNNLEPETIVYDPVAVAEHYRHRPLQVLRRIFAVLGPTFSFVFGLWWDTKRGVVVKNDRRRAIQLKELLTQLGPAYIKIGQALSTRPDLVPPIYLEELTRLQDQLPAFPNEIAYQFIQEELGQSPEEVYAELSAQPIAAASLGQVYKGKLKTGEEVAVKVQRPDLRERITIDLYILRGLAAWVQKKVKRVRSDLVGILDELGDRIFEEMDYIHEGENAERFFQLYGHIQDIYVPRIYWEYTNRRVLTMEWINGTKLTQTAEISAQGIDARYLIEVGVQCSLRQLLEHGFFHADPHPGNLLATPDGKLAYLDFGMMSEIKPPQRYGLIEAIVHVVNRDFEGLAKDYVKLDFLSPETDLTPIIPAFGKVFANAQGASVAEFNIKSITDELSELMYEYPFRVPPYYALIIRSLVTLEGIAIYIDPNFKVLSEAYPYVAKRLLTDPAPELRISLRDLLFKDGRFRWNRLENLLRNARKNQDYDLNLVVNQGVDFLSSERGSFIRDKLVDEFLNGINALSKNVLHNFTYLLRERVGITAINETPAATVEQQQTLEHIKNILNILRETRGFDPSQLAPQVAQLAFNPGVQRLGQQVANQLVQKATVRLIRELLTAEEVKSSEIEYPGRRL

SEQ ID NO: 24889 - protein, 546 aa, Rhizobium leguminosarum bv. viciae
MASKEIKFGRTGREKMLRGVDILADAVKVTLGPKGRNVIIDKSFGAPRITKDGVSVAKEIELEDKFENMGAQMVREVASKTNDIAGDGTTTATVLAQAIVREGNKAVAAGMNPMDLKRGIDLAVADVVKDLQAKAKKISTSEEVAQVGTISANGDKQVGLDIAEAMQKVGNEGVITVEEAKTAETELEVVEGMQFDRGYLSPYFVTNPEKMIADLEDVFILLHEKKLSNLQSMLPVLEAVVQTGKPLLIVAEDVEGEALATLVVNKLRGGLKIAAVKAPGFGDRRKRMLEDIAILTGGTVISEDLGIKLESVTLDMLGRAKKVSISKENTTIVDGSGAKTDIEGRVAQIKAQIEETTSDYDREKLQERLAKLAGGVAVIRVGGSTEVEVKEKKDRIDDALNATRAAVQEGIVPGGGIALARSSTKITVKGANDDQEAGINIVRRALQSLVRQIAENAGDEASIVVGKVLDKNEDNFGYNAQTSEYGDMIAMGIVDPLKVVRTALQNAASVASLLITTEAMIAELPKKDAPAGMPGGMGGMGGMDMM

SEQ ID NO: 24890 - protein, 203 aa, Shewanella sp. ANA-3
MISILVSDVIENNEFANLGAPNEKDIMMKLPLVIFASLLSTSAFAATCPSYLDVEVRKLHSDEKINLCELTQGKPVLLVNTASNCGYTPQFKALEALHKEYKDKGLVVIGFPSDDFFQEENDEKDTAKVCYINYGVTFTMLATSPVRGSDANSVFKYLGDKADSPKWNFYKYVVSGDGNTVQQFNSKVKPDSAELKQAIESVL

SEQ ID NO: 24891 - protein, 376 aa, Bacillus cereus ATCC 10987
MVVSKFVQIRRDLHKIPEIGFKEWKTQQYILDYIGTLSNEHVEVKVWRTGVIVKVKGRNPEKVIGYRADIDGLPITEETGYEFASVHEGMMHACGHDLHTTIGLGLLTAAVTERIDDDLVFLFQPAEEGPGGALPMLESEELKEWKPNIILGLHIAPEYPVGTIATKEGLLFANTSELYVDLKGKGGHAAYPHTANDMIVAASHLVTQLQSVISRNVNPLDSAVITIGKITGGTVQNIIAEKSRLEGTIRTLSVESMSRVKSRIEAIVAGIEASFQCEAVIDYGAMYHQVYNHEALTREFMQFVSEQTDMKVITCTEAMTGEDFGYMLQEIPGFMFWLGVNSEYGLHHAKLKPDEEAIEKAIVFLDQYVKWKGTRK

SEQ ID NO: 24892 - protein, 500 aa, Pseudomonas anguilliseptica
MVYHRLPYEEFRGADGKLQRRRPTSPNGIIPTLLSFFGDGRAGSWVAWAEHDENSGETFDSHTTVDAERYPKLTAARVALSKEEVDIFYERFSKEAFWPTLHTFWERAQFREDDWQVFLKVNRAFAERTALEAAEGATVWLHDYNLWMVPGYLRELRPDLRIAFFHHTYFPSADVFNVLPWRRQIIGSLLQCDYIGFHIPRQVENFVDAARGVMPLQTVSRQNCAPRFITYGCAVGLERMTTAVDTGNRVVKLGAHPVGLDIERVRSALAAPKIREMMERLRSELAGVKLILSVERLDYTKGILEKLNAYERLLEENPELLGKVTLVTVCVPAAKEMTIYDELQGQIEQAVGRINGRFARIGWTPLQFFFRSLPFEEVSAWYAMADVMWITPLRDGLNLVAKEFVAAQGLLDGRGVLVLSEFAGAAAELKGALLTNPHDPVDMTQTCYVALNMPKAEAQARLRELFDIVNYNDIRRWGDEFLAAVSDPQEQLDRALGLVG

SEQ ID NO: 24893 - protein, 228 aa, Arabidopsis thaliana
MNALAATNRNFRHASRILGLDSKIERSLMIPFREIKVECTIPKDDGTLVSYIGFRVQHDNARGPMKGGIRYHPEVDPDEVNALAQLMTWKTAVADIPYGGAKGGIGCSPRDLSLSELERLTRVFTQKIHDLIGIHTDVPAPDMGTNAQTMAWILDEYSKFHGHSPAVVTGKPIDLGGSLGREAATGRGVVFATEALLAEYGKSIQGLTFVIQVKPLSANLRSQALLCI

SEQ ID NO: 24894 - protein, 352 aa, Vibrio fischeri ES114
MSYSWKKILIKPESTVVDALRVIDNEALRIALVVNDEQQLLGVVTDGDIRRGLLNNLPLETPVVDIMSRSPITASVNTAKEQLVKLMESKSILAVPLMEENKVVGLETLHHLFEEKTYHNPVFIMAGGFGTRLRPLTDTCPKPMLKIGNKPILETVIRSFIKAGFVNFYISTHYMPEQIQNHFGDGSELGVKISYVHEDSPLGTGGALGLLPDDLPQDLPLIMMNGDVLTKVDFERLLDFHTENQADATMCVREYDYQIPYGVINGKGNKITSMVEKPIQRFFVNAGIYVVSPSVIQSVPKNHHIDMPTLLEQHMNERDNILMFPIHEYWLDIGRMDDFNRAQADIHTLGLD

SEQ ID NO: 24895 - protein, 621 aa, Podospora anserina
MMKSFFSAAALLLGLVAPSAVLAAPSLPGVPREVTRDLLRPVEERQSSCHTAANRACWAPGFDINTDYEVSTPNTGVTRTYTLTLTEVDNWLGPDGVVKQKVMLVNGDIFGPTITANWGDWIQVNVINNLRTNGTSIHWHGLHQKGTNMHDGANGVTECPIPPKGGSRIYRFRAQQYGTSWYHSHFSAQYGNGVVGTIVVNGPASVPYDIDLGVFPITDYYHKPADVLVEETMNGGPPPSDTVLFKGHGKNPQTGAGKFANVTLTPGKRHRLRIINTSTHDHFQLKLQNHTMTIIAADMVPVQAQTVDSLFLAVGQRYDVTIDANKSVGNYWFNATFGGGLACGASLNPHPAAVFRYQGAPNTLPTNIGTPAADANCMDLNNLTPVVSRSVPTSGFTPRPNNTLPVSLTLGGTPLFVWKVNGSSINVDWDKPIVDYVIAQNTSYPPQANVITVNSVNQWTYWLIENDPTGPFSIPHPMHLHGHDFLVVGRSPDQPAGVPQTRYRFNPATDMALLKSSNPVRRDVAMLPANGWLLIAFKSDNPGAWLFHCHIAWHVSGGLSVQYLERPNDLRNGFSQADKNQHNNNCNAWRAYWPTNPFPKIDSGLKVKKWVGEHPDWYIKN

SEQ ID NO: 24896 - protein, 918 aa, Escherichia coli O157:H7 EDL933
  misc_feature (639)..(639): Xaa can be any naturally occurring amino acid
  unsure (1)..(918): unsure at all Xaa locations
MTNYSLRARMMILILAPTVLIGLLLSIFFVVHRYNDLQRQLEDAGASIIEPLAVSTEYGMSLQNRESIGQLISVLHRRHSDIVRAISVYDENNRLFVTSNFHLDPSSMQLGSNVPFPRQLTVTRDGDIMILRTPIISESYSPDESPSSDAKNSQNMLGYIALELDLKSVRLQQYKEIFISSVMMLFCIGIALIFGWRLMRDVTGPIRNMVNTVDRIRRGQLDSRVEGFMLGELDMLKNGINSMAMSLAAYHEEMQHNIDQATSDLRETLEQMEIQNVELDLAKKRAQEAARIKSEFLANMSHELRTPLNGVIGFTRLTLKTELTPTQRDHLNTIERSANNLLAIINDVLDFSKLEAGKLILESIPFPLRSTLDEVVTLLAHSSHDKGLELTLNIKSDVPDNVIGDPLRLQQIITNLVGNAIKFTENGNIDILVEKRALSNTKVQIEVQIRDTGIGIPERDQSRLFQAFRQADASISRRHGGTGLGLVITQKLVNEMGGDISFHSQPNRGSTFWFHINLDLNPNIIIEGPSTQCLAGKRLAYVEPNSAAAQCTLDILSETPLEVVYSPTFSALPPAHYDMMLLGIAVTFREPLTMQHERLAKAVSMTDFLMLALPCHAQVNAEKLKQDGIGACLLKPLTXTRLLPALTEFCHHKQNTLLPVTDESKLAMTVMAVDDNPANLKLIGALLEDMVQHVELCDSGHQAVERAKQMPFDLILMDIQMPDMDGIRACELIHQLPHQQQTPVIAVTAHAMAGQKEKLLGAGMSDYLAKPIEEERLHNLLLRYKPGSGISSRVVTPEVNEIVVNPNATLDWQLALRQAAGKTDLARDMLQMLLDFLPEVRNKVEEQLVGENPEGLVDLIHKLHGSCGYSGVPRMKNLCQLIEQQLRSGTKEEDLEPELLELLDEMDNVAREASKILG

SEQ ID NO: 24897 - protein, 271 aa, Matthiola incana
LSFEHPYPPTKLLFSPPSLRRPSGGDLLASSGDFLRLWEVSEDSSTVEPVSVLNNSKTSEFCAPLTSFDWNDVEPKRLGTCSIDTTCTIRDIEKSVVETQLIAHDKEVHDIAWGEARVFASVSADGSVRIFDLRDKEHSTIIYESPQPDTPLLRLAWNKQDLRYMATILMDSNKVVILDIRSPTMPVAELERHQASVNAIAWAPQSCKHICSAGDDTQALIWELPTVAGPNGIDPMSVYSAGSEINQLQWSSSQPDWIGIAFANKMQLLRV

SEQ ID NO: 24898 - protein, 442 aa, Oryza sativa
MQAHAHTLGLRISPPPPAPPRRETDPRKRVVITGMGLVSVFGNEVDAFYERLLAGESGVGAIDRFDAGGFPTRFAGQIRGFSSEGYIDGKNDRRLDDCLRYCIVSGKKALENAGLGKGSDGHTKLDKVRAGVLVGTGMGGLTVFSDGVQNLIEKGYKKISPFFIPYAITNMGSALLAMDAGFMGPNYSISTACATSNYCFYAAANHIRRGEADVIVAGGTEAAIIPIGLGGFVACRALSQRNDDPETASRPWDKERDGFVMGEGAGVLVMESLEHAMKRDAPIIAEYLGGAVNCDAYHMTDPRSDGLGVSSCITQSLEDAGVAPEEVNYINAHATSTLAGDLAEVRAIKQVFKNPSDIKINSTKSMIGHCLGAAGGLEAIAVVKAITTGWVHPTINQFNPEPEVDFDTVANEKQQHEVNVAISNSFGFGGHNSVVVFAPFKP

SEQ ID NO: 24899 - protein, 703 aa, Debaryomyces hansenii CBS767
MSGTSTPRKRTLGDLNDGEVPNFEDPLDVVNAVISTLQTPVEKTNVAMTYANDKNLATEVQAYAKIAGQDWTYYVKSLSIPIGRNTDNPGGSSQPLVDIDLGPAKVVSRQHAMITYNLDLRYWELKVLGRNGARVDGQKVPFGENHSTPLHSGAILDIGGTQMMFILPDSPPNILQKMLSTCLAKYNANLNKSKRKSISDFPQQHTIPINPSNQIKSFQMFDKAQLTQSPSSASATSLQNNLDQDLSKEEAKDIKPPYSYATMITQAILSNDDGVMSLSEIYNWIASHYAYYKYSKTGWQNSIRHNLSLNKAFEKVPRRPNEPGKGMKWQISESYKEDFLTKIQSGSLLKARRGSSVSRQLQLHLATHQNLPESQKYYAKDDPSRSNSFDQRFNHERNSSLPKLGQPMQYQQAPSNPMQHNPLSYISNQQPQNGSFGVPPPRSYGYQHPPPPQLMYGSHMMHQNQNDSPSIQQVPGNKNELSSPIRQLSDINTTTPKLPKVSGNHLFNLPPPPPSTHSMGTSAPQAHHSRLNSYNHQHQLTENNSNSYNTSGNNQTSESNTTNTNAQNVSSGPTTNTSDLALGFTSPKKIAPLEAFTPERGSKSSSNKLGVANGVNTNQSSPAFWNFVQFSTPNAQTPLKGNDQNNQLSPTLNRRVFGSNGYAKEKSEKGDLSPLKSRNSHDDNSKADNADELNTQKNEEINA

SEQ ID NO: 24900 - protein, 319 aa, Yersinia pestis KIM
MSKIVSLGIHVLDVLGRHVNRFPPGGELDIINEIRLTVAGTAAGMSVDLAKLGGDVYAMGAVGLDESGNFIIDTLRRYGGNTDHIVRKSEVQTSCSMLPIRPNGERPVLHVLGANATYRLEDIHWDVIASADILHFGGTYLLPGLDGPPTATILKFAKEHGVTTTLDLLVNAQPDLLAKLEPALPYIDYFMPGLDEARAICGLEKRADVIAFFLNRGVGHTVFKMGAEGSSIASLEMAEILIPAYKAQVVDSTGCGDSYCAAFIMGLTKGWDLATSGRFASAAASLVVSGLGSDAGIIDFEHTLKVMNTAETLPIAQET

SEQ ID NO: 24901 - protein, 653 aa, Triticum aestivum
  misc_feature (153)..(153): Xaa can be any naturally occurring amino acid
  misc_feature (158)..(158): Xaa can be any naturally occurring amino acid
  misc_feature (162)..(163): Xaa can be any naturally occurring amino acid
  misc_feature (171)..(171): Xaa can be any naturally occurring amino acid
  misc_feature (176)..(176): Xaa can be any naturally occurring amino acid
  misc_feature (199)..(199): Xaa can be any naturally occurring amino acid
  misc_feature (206)..(206): Xaa can be any naturally occurring amino acid
  misc_feature (215)..(216): Xaa can be any naturally occurring amino acid
  misc_feature (224)..(224): Xaa can be any naturally occurring amino acid
  misc_feature (227)..(227): Xaa can be any naturally occurring amino acid
  misc_feature (229)..(229): Xaa can be any naturally occurring amino acid
  misc_feature (234)..(234): Xaa can be any naturally occurring amino acid
  misc_feature (239)..(239): Xaa can be any naturally occurring amino acid
  misc_feature (250)..(250): Xaa can be any naturally occurring amino acid
  misc_feature (535)..(535): Xaa can be any naturally occurring amino acid
  misc_feature (550)..(550): Xaa can be any naturally occurring amino acid
  misc_feature (585)..(585): Xaa can be any naturally occurring amino acid
  unsure (1)..(653): unsure at all Xaa locations
MLLRLLSSASRAIAAKPHPLQTLAAAAAGATSTTRKLAAMAGNREAFRVAVGNTLERRLFYVPSFKIYGGVAGLYDYGPPGCAVKANVLAFWRQHFVLEEGMLEVDCPCVTPEVVLKASGHVEKFTDLMVKDEKTGSCYRADHLLKDFCKEKXENDNXAPEXXEELNHILXLDDLXAEQLGAKIRSMGIVALTKELLQXYPLIHVXLHWPQVECXXLGQNRQVXLDXKXVYTWXNTFVXAKWQVSEEISXRLLRVREFTLAEIEHFGDPEDKSHPKFGDVSDLEFLMFPREDQLTGRSATRLRLGEAVSEGTVNNETLGFFIGRVYLFLTQLGIDKDRLRFRQHLPNEMAHYAADCWDAEIECSYGWIECVGIADRSAYDLRAHSDKSGVPLEAHEKFAEPREVEKLVITPSKKELGLAFKGDQKMVLEALEAMGETEALGMKAALESKGDVEFKVCTLGKDVTIKRNMVSINMEKKKEHQRKFTPSVIEPSFGIGRIIYCLFEHCFYQRTGKTDDEQLNVFRFPPPVAPIKCTXVFPLVKVEKFDVVAXKKISKALTTARISHIIDITGTSIGKRYARTDEIGXVPLAITVDSTTSVTVRDRDSKDQIRVEVDEVALVVKEVTDGQSTWADIMWRYPAHTALATDEEEASET

SEQ ID NO: 24902 - protein, 345 aa, Cryptococcus neoformans var. neoformans B-3501A
MPKILVTRNLGEHAMTILRQSGYDLIVNPDDAPPSREWVLNHLADPQVYAACIMHSQPSDKVDKELIATANDNLRCISTFSVGYDHIDVKAANARGIKIGHTPGVLSDAVADIAVILVLSTLRRIGEGINLVKSGNWKQQPWAPFVNCGLSIGHPSLTIGFLGFGRISQATVQRLLAFTNKEQPPRILYTSSYRRDNQDEIDAGFSKTFGVEVRREERETLASQADILIVLCDLNPSTKDLVNKNFLQKMKKSAILVNVARGPIVNSEDLHEALVSGQIFGAGLDVLTGEPDIPADHPLLTLDNCLVLPHLGSADYDTRNAMAERCVRNAIAAANGEPLVAEVKV

SEQ ID NO: 24903 - protein, 348 aa, Candida albicans SC5314
MSQPINLAIVGTGIFATDNHLPTIQKIPGLKPYAAYNRTKSKAETFAQKANIASDKVYDSLEEIFEDKDVEFVDALLPVQFNVDAVKLAVKNNKPICFEKPIAANLDQAKEIVKLSESTDLPILVLENWAYLKAIDILKNEILPKIGDVVAFTYNATGPFNDANKYLATGWRLKPEHIGGFLSDGGVHQLALLTEVLGDVESVSGLTQQLKEQSGTDDVLFSTLKTAKGAIGTFTYGSAFGATDKSTFFKIFGTNGSATYDWSPSLPKPQITYATGATSGQASSKTTIEIDEVNTIEEEFKNFKDAVANKDKKLVKVPPRKAFHHLAIVAAALESSKNNGSNVKVETP

SEQ ID NO: 24904 - protein, 448 aa, Acinetobacter baumannii
MSNVTSFRSELKQLFHLMLPILITQFAQAGFGLIDTIMAGHLSAADLAAIAVGVGLWIPVMLLFSGIMIATTPLVAEAKGARNTEQIPVIVRQSLWVAVILGVLAMLILQLMPFFLHVFGVPESLQPKASLFLHAIGLGMPAVTMYAALRGYSEALGHPRPVTVISLLALVVLIPLNMIFMYGLGPIPALGSAGCGFATSILQWLMLITLAGYIYKASAYRNTSIFSRFDKISLTWVKRILQLGLPIGLAVFFEVSIFSTGALVLSPLGEVFIAAHQVAISVTSVLFMIPLSLAIALTIRVGTYYGEKNWASMYQVQKIGLSTAVFFALLTMSFIALGREQIVSVYTQDINVVPVAMYLLWFAMAYQLMDALQVSAAGCLRGMQDTQAPMWITLMAYWVIAFPIGLYLARYTDWGVAGVWLGLIIGLSIACVLLLSRLYLNTKRLSQT

SEQ ID NO: 24905 - protein, 143 aa, Narcissus pseudonarcissus
ASLAWAVMPTLGWRWLLALSALPPFLLLLFYGLAPESPRYLSMKGRTDDAVRVLERMASINRKPLPHGQLVSRCKSDLAEKLNPSETAHLILTQNRSTDDEDAVSQVGCIFVVRRILSPALIKATLLLWIDFFGNAFAYYGVV

SEQ ID NO: 24906 - protein, 197 aa, Zea mays
MSASRFIKCVTVGDGAVGKTCMLISYTSNTFPTDYVPTVFDNFSANVVVDGNTVNLGLWDTAGQEDYNRLRPLSYRGADVFLLAFSLISKASYENVSKKWIPELKHYAPGVPIILVGTKLDLRDDKQFFVDHPGAVPITTAQGEELRKQIGAPYYIECSSKTQLNVKGVFDAAIKVVLQPPKAKKKKKVQRGACSIL

SEQ ID NO: 24907 - protein, 617 aa, Candida albicans SC5314
MSEQAQTQVSADQQQHQHNHHHHHHHHHNENQSQQQVPIDPAANPANRIGRYQILKTLGEGSFGKVKLAQHLGTGQKVALKIINRKTLAKSDMQGRVEREISYLRLLRHPHIIKLYDVIKSKDEIIMVIEFAGKELFDYIVQRGKMPEDEARRFFQQIIAAVEYCHRHKIVHRDLKPENLLLDDQLNVKIADFGLSNIMTDGNFLKTSCGSPNYAAPEVISGKLYAGPEVDVWSAGVILYVMLCGRLPFDDEFIPALFKKISNGVYTLPNYLSAGAKHLLTRMLVVNPLNRITIHEIMEDEWFKQDMPDYLLPPDLSKNKNSKIDVDEDVIRALSVTMGYDRDEIVNVIEKANKQVAAGNSSSQQSKSSNEILDAYLLMKENHALVKDLKKSKSENIESFLSQSPPPSPFPNAGSTSSAPGVQQSLTYQTLATVPDLSTLPNSTIAILPTSLPSIHRAYMAETKQNGDPSQQHAPPPTKKSKTRWHFGIRSRSYPLDVMGEIYRALKNLGAEWAKPTEEELWTIRVRWKYDTSAQFECGSAPNLMKMQIQLFQLEPNNYLVDFKFDGWESAHGNAGTDSPQSHRQQDLDEVGSFSAYPFLHLATRLIMELAVNSQSG

SEQ ID NO: 24908 - protein, 676 aa, Prosthecochloris aestuarii DSM 271
MDPSQREENSLPLLRYDMLEFRPEWQFDDPDSGAYYHSGVVVNKLFFTSLGGDIQYEVAEKALAFVRKLFSDGVLRDCEYIRIADYSGVSKATINSRILYANTLNKLTEEYNCRPSVTYICGASVLLKTMLRIFSHIVSQRFFFVDSVDEAFRRINAHEMSGCVVSSESLVVTRKEIDEFAALCGHLLFEDTNVKSFSRDYISEDHPLNELYKIIGVLHNDLGELKQKEKDQKKRLEEALFEARSLNQKLIDEKRNVEENERVQQELIDTLKKARVEAESANKAKSEFLANISHEIRTPLHAVIGMTELLLESSLAKDQQYYADTISSSAHLLLLLINDLLDFSRIEAGYIDQEKEDFDMRRLIGDIMSLMKDSASRKRLLLDSRVDERLSFCLTGYPGYLRQVLMNLIQNAVKFTYKGMVSLHVTLLSETPEHVSLEFSVKDTGVGIAEEQLKVIFHRFTQIDASSTRKEGGTGLGLAIVKQLVTFMGGEVSVDSRQGEGSDFRFSLTFDKAGEAKADQSSADLSCRQKDGFRSSRSVDDIIRPHRILLVEDNVINQKVAQAMIEKIGYEIDIAVNGEEAVEALQQKQYGLVLMDLQMPVMDGFEATRRIRKFGGLASNARVPVVAMTANATREDRELCLRAGMDDYLSKPVERQVLLDMLQRWLPFKDEPGVET

SEQ ID NO: 24909 - protein, 458 aa, Anabaena variabilis ATCC 29413
MTFDYDLFVIGAGSGGLAASKRAASYGAKVAIAENDLVGGTCVIRGCVPKKLMVYGSHFPALFEDAAGYGWQVGKAELNWEHFITSIDKEVRRLSQLHISFLEKAGVELISGRATLVDTHTVEVGDRKYTADKILIAVGGRPLKPELPGMEYGITSNEIFHLKTQPKHIAIIGSGYIGTEFAGIMRGLGSEVTQITRGDKILKGFDEDIRTEIQDGMTNHGIRIIPNTVVTAVEQVPDGLKINLSGDQEPIIADVFLVATGRVPNVDGLGLENAGVDVVASSVEGPGYSTMNAIAVNEYSQTSQPNIYAVGDVTDRLNLTPVAIGEGRAFADSEFGNNRREFSHETVPTAVFSNPQASTVGLTETQAREKLGDEGVTIYRTRFRPMYHSFTGKQERIMMKLVVDTNTDKVLGAHMVGENAAEIIQGVAIAVKMGATKKDFDATVGIHPSAAEEFVTMR

SEQ ID NO: 24910 - protein, 355 aa, uncultured candidate division OP8 bacterium
MAILRANWGASGLEAFVCFLRRWIMDARFDVVGIGNAIVDVLAHADDAFLTRHAMTKGSMALIDAAAADALYAAMEPGIECSGGSAANTIACLASLGGRGAFIGKVRDDELGKVFHHDIEALGVHFPTTPASAGASTARCLINVTPDAQRTMSTFLGACVELGPNDVDEDVIRASKVTYLEGYLWDREEAKAAFVKAAELAHAAGREVSLSLSDAFCVDRHRTSFIELVEGHVDVLFANEDEIKSLYQVDTFDAALQHVRGHCKVAALTRSAKGAVVVAGEEIHIVDAEAGVKVVDTTGAGDAFAAGFLHGYTSGGHNDLAQCARIGAMAAAEVIGHFGARPETPLNELVAKKLG

SEQ ID NO: 24911 - protein, 575 aa, Xanthomonas oryzae pv. oryzae KACC10331
MQCRAASESGMLAGGALMWEALGTVRDLGRLQEIASVLIRYGFGDVVRRIGMGDVLERAGRLLHWNNAEGRLRMSAALRVRRALEALGPTFVKLGQVLATRVDLLPSEWIEELSELQNAVPALPFEQIRPQLVAALGMEPESVFARLDEQPLAAASLAQTHRAWLVDGTPVVLKIRRPDIGDTIDADLRLLARLAEIVETRAPDLKRYRPAEVVQQFTVSLRRELDFAAEGRNAERIAANFAHDPQVVVPAVYWEWTCESLNVQEFIDGIPGRNLLTVDAAGLDRKALARAGAGIVLKMVLQDGCFHADPHPGNIFYLRDGRIAVIDFGMVGRVSEQRRFQVAQLLHGMVSYDAEAVIDVLLEWAGTSLEIDEPRLQQDIGAFVDEYRGVPLKELRIGAMLGDVTSILRDHGLTLPSDLALMIKAFLTLEGMGRQLDPDFDMATEARPYLERLVLQRYAPRAIVRRGRRTVTGAIDLIGDLPRDLKRLLQAARRGKLQLQIETRALREFGEQVDRAANRLTMGIVTAALVIGSSIVMNSVGGSASRWLLALGVGGFIGAALCGIWILFSIWRSRR

SEQ ID NO: 24912 - protein, 408 aa, Arabidopsis thaliana
MSQAPNPEEEDDTIEIREVWNHNLEQEMALIEQSIDDFPYVAMDTEFPGIVCKTVTANPNPNPYSIHYEYNYDTLKANVNMLKLIQLGLTLSDEKGNLPTCGTNKQCIWQFNFREFNVISDMFALDSIELLRKSAIDLEKNNECGVDAKRFAELLMGSGVVLNDKIHWVTFHCGYDFGYLLKLLSGKELPEEISDFFDQMEKFFPVVYDIKYLMGFCTNLYGGLEKIAELLGVKRVGISHQAGSDSLLTLRTFIKMKEFFFTGSLLNDEAAPVVVPPPVAEPAAIPEDMDLMTALELTLRKARAYGGVVRGLHECAKLIEKRVAQLVVLAEDCNQPDYVKLVKALCADHEVRLLTVPSAKTLGEWAGLCKIDSEGNARKVVGCSCLVVKDFGEETTALSIVNKHIASQ

SEQ ID NO: 24913 - protein, 454 aa, Acinetobacter sp. ADP1
MSSQEPWFAKFKPYQGDLEHHPVQIDEYLPAGKSIVLGLQHAFAMFGATVLAPLLMGFDPNLTIFITGFGTILFFLITGGRLPSYLGSSFAFIAAVAAATGYNGVGTNPNLALALGGTVVCGVIYAAIGLIVMRTGTAWIEKLMPPIVTGAIVMIIGLNLAPVTIKGVSGNGFDTWMAVLTILCISAVAVFTRGMLRRLLLLVGLCAAYFAYFILANVFGLGKAIDFSPIAQAAWLGIPNFHTPVFQANAILLIAPVALILVAENLGHFKAVSAMTGRNLSPYMGRGFFADGVCTTLSASVGGTGMTTYAENIGVMAVTKVYSTTVFVVAGVFAILLGLSPKFGAVIHTIPVALLGGASIVVFGLITVAGAKIWIDHKVDFTQNSTLIIAAVSLIMGAGNFSLHIGAFDLGGIGTATLAAIVLNLLLNRDSGKRSQLEPNAQPEKIIQPVSPQS

SEQ ID NO: 24914 - protein, 396 aa, Bacillus clausii KSM-K16
MNNKEAVLVYGPSQYPYKFNETHPFHPLRLELTYSLLEELGAVQNQPLIQPSAATKTELELIHDPRFIEAVIAGGEGRLPDSAAEAYGLKTEDTPLFPHMHEAAAHLVGGTLRACDAVLADGYLHAFHLGGGLHHGFRGRASGFCIYNDSSIAIEYMRRKYGVRILYVDTDAHHGDGVQWAFYDDPDVCTLSLHETGRYLFPGTGHVTEKGSGKGYGFSINVPLDAFTEDESFLDVYQSAFTEVADFFKPDIIVTQNGADAHYLDPLSHLHVSMNVYREIPRLAHQLAHTYCGGKWVAVGGGGYDKWRVVPRAWALIWLEMSGQTAFANDHVPQAWIDKWKDKAEETLPTTWTDATIPEIPRRKEITAKNNLTLEKALYHIRTEKQAAQKQGEKHE

SEQ ID NO: 24915 - protein, 362 aa, Corynebacterium diphtheriae NCTC 13129
MTETTLRSDTDAVILVGGKGTRLRPLTVSTPKPMLPTAGVPFLSHLLARIKAAGITHVVLGTSFKAEVFEDYFGDGADLGLEIEYVVEDKPLGTGGGIRNVYDKLRANTVMVFNGDVLGGTDLGGILDAHHAKNADLTMHLVRVPDPRAFGCVPTDAEGRVSAFLEKTEDPPTDQINAGCYVFRRELIGEIPADRVVSVERETFPRLLEEGRRVFGYVDNAYWRDMGTPSDFVRGSSDLVRGIAPSPLLEGKTGECLVDESAGVSDGALLLGGTVIGRGTEIGAGCRLDDTVVFDGVTIEPGAVIEDSIIGHGARIGANARITGCVIGEGAEIGARCELRDGMRVWPGVVIPTAGIRFSSDA

SEQ ID NO: 24916 - protein, 462 aa, Arabidopsis thaliana
MSEEQPHANLAVPAFKTEKDPVTQTQNGQSSVWRFGGSDKAAKASTVTLRGVIYMLFDNCGKDVNKTILPLGHGDPSVYPCFRTCIEAEDAVVDVLRSGKGNSYGPGAGILPARRAVADYMNRDLPHKLTPEDIFLTAGCNQGIEIVFESLARPNANILLPRPGFPHYDARAAYSGLEVRKFDLLPEKEWEIDLEGIEAIADEKTVAMVVINPNNPCGNVYSHDHLKKVAETARKLGIMVISDEVYDRTIFGDNPFVPMGKFASIVPVLTLAGISKGWVVPGWKIGWIALNDPEGVFETTKVLQSIKQNLDVTPDPATIIQAALPAILEKADKNFFAKKNKILKHNVDLVCDRLKDIPCVVCPKKPESCTYLLTKLELSLMDNIKDDIDFCVKLAREENLVFLPGYALGLKNWMRITIGVEAHMLEDALERLKGFCTRHAKKTETETESLQALKLSDNNLEM

SEQ ID NO: 24917 - protein, 321 aa, Exiguobacterium sp. 255-15
MRALRFRTFGDSSVLHYEEYPTPEIKSNEVLIEMKAIGLNFADIYRRKGNYHLEGTPPYLLGYEGSGIITQIGAAVTDLQVGQRVAFADVPNANAEFVAAPVDKVIPLPDFVSYETAASVLLQGLTAHYLTRDSYTIRPKDLVLVHAAAGGVGQLLTQIVRLHGAIPIGLTSSMEKADIAKQAGAEHVFLYSDNWVEQILTLTDQRGVDVVYESVGSTLMNSFEVTKIHGTVVFYGMAGGDPVSVDPRFLMDTSKTLTGGDLWNVLTTREERIRRAGELFSWLESGQLQIASPTTFSLSDGQRAHDYLESRQSTGKILLLP

SEQ ID NO: 24918 - protein, 320 aa, Citrus x paradisi
MEGENTKPKILIFGGTGYFGKYMVKASVSSGHKTFVYARPVTQNSRPSKLEIHKEFQGIGVTIIEGELDEHEKIVSILKEVDVVISTVTYPQCLDQLKIVHAIKVAGNIKRFLPSDFECEEDRVRPLPPFEACLEKKRIVRRAIEAAQIPYTFVSANLCGAYFVNVLLRPSESHDDVVVYGSGEAKAVFNYEEDIAKCTIKVINDPRTCNRIVIYRPQASIISQLELISLWEQKTGWSFKRVHVSEEELVKLSETLPPPEDIPISIIHSALAKGDLMNFELGEDDIEASMLYPDFKFTTIDQLLDIFLIDPPKPARTAFE

SEQ ID NO: 24919 - protein, 125 aa, Brassica napus
MANQGAKKRKDENARHMAKLRRIIIACNVVYVIVRMVVFYSSFTWRHWIGLVVTSLGYAVPYKFLDGMAKPSVSDDGELIDGGFDMSRGGICGYLHDVLYITCFVQLASIISGKFWYAYLVIPAF

SEQ ID NO: 24920 - protein, 462 aa, Arabidopsis thaliana
MSEEQPHANLAVPAFKTEKDPITQTRNGQSSVWRFGGSDKAAKASTVTLRGVIYMLFDNCGKDVNKTILPLGHGDPSVYPCFRTCIEAEDAVVDVLRSGKGNSYGPGAGILPARRAVADYMNRDLPHKLTPEDIFLTAGCNQGIEIVFESLARPNANILLPRPGFPHYDARAAYSGLEVRKFDLLPEKEWEIDLEGIEAIADEKTVAMVVINPNNPCGNVYSHDHLKKVAETARKLGIMVISDEVYDRTIFGDNPFVPMGKFASIVPVLTLAGISKGWVVPGWKIGWIALNDPEGVFETTKVLQSIKQNLDVTPDPATIIQAALPAILEKADKNFFAKKNKILKHNVDLVCDRLKDIPCVVCPKKPESCTYLLTKLELSLMDNIKDDIDFCVKLAREENLVFLPGDALGLKNWMRITIGVEAHMLEDALERLKGFCTRHAKKTETETESLQALKLSDNNLEM

SEQ ID NO: 24921 - protein, 414 aa, Mycobacterium leprae
MPSTANGGFPSVVVTAVTATTSISPDIESTWKGLLAGESGIHVLEDEYITKWDLPVKIGGHLKEPVDSHMSRLDLRRMSYVQRMSKLLSGRLWESTGSPEVDPDRFTVVVGTGLGGAERIVESYDLMNAGGPRKVSPLAVQMIMPNGAAATVGLQLGACAGVMTPVSACSSGSEAIAHAWRQIIMGDADVAVCGGVEGPIEALPIAAFSMMRAMSTRNDDPEGASRPFDKNRDGFVFGEAGALMLIETEEHAKARGAKPLARLLGAGITSDAFHMVAPAADGVRAGRAMTRSLELAGLSAKDVDHVNAHGTATPIGDSAEANAIRVAGCEQAAVYAPKSALGHSIGAVGALESVLTVLALRDGVIPPTLNYQTPDPEIDLDIVAGEPRYGDYRYAINNSFGFGGHNVALAFGRY

SEQ ID NO: 24922 - protein, 282 aa, Leccinum talamancae
  misc_feature (145)..(166): Xaa can be any naturally occurring amino acid
  unsure (1)..(282): unsure at all Xaa locations
LENQEINIVAVNDPFIDLAYMVYMFKYDSVHGRFKGDVRAEDGKLVINGKSITVYAERDPANIKWGAVGADYIVESTGVFTTTEKAAAHLKGGAKKVIISAPSADAPMFVCGVNLDKYDSKYTVISNASCTTNCLAPLAKVINDXXXXXXXXXXXXXXXXXXXXXXDGPSAKDWRGGRAVNGNIIPSSTGAAKAVGKVIPALNGKLTGLAFRVPTNDVSVVDLVVRLEKSATYDEIKAAVRAASASPDLKGIIDYTDEAVVSTDFTGNPASSIFDASGGIML

SEQ ID NO: 24923 - protein, 445 aa, Xanthomonas campestris pv. vesicatoria str. 85-10
MMHHTSPNSAARHACVAQARTHCWRNDIAPMHRRMRRDASAPLAGQRSSAPIRQTTMRILVTGGTGYIGSHTCVELARRGHDVCIVDNLSNSSERVLDHLQHLMGFRPEFHRMDVRAPELADLLISERIDAVLHFAALKAVGESVREPLLYFNNNVTGTLALLRAMRTAKVCNLVFSSSATVYGDANRSPIDESAPLKAINPYGRTKLMMEEMIGDLSAAWPDFNAALLRYFNPVGAHPSGYLGEDPRGVPNNLMPYIAQVAVGRRAALQVFGDDYPTDDGTGVRDYLHVMDLARAHVDAIDYLQRERKGLVVNLGTGRGYSVREVAAAFARASGRRIPLSIGPRRGGDVAVYFASTALANRLLGWTAEYDLDRMCRDTWRWQSMHPDGYAGSRLPRPRSAAAVPERDSARELPTSPRRRPPGPDTRRRSEPVRTLAVADGFSGA

SEQ ID NO: 24924 - protein, 245 aa, Leccinum crocipodium
NIVAVNDPFIDLAYMVYMFKFDSVHGRFKGDVHAKDGKLYINGKAITVYAERDPANIKWGDVGADYIVESTGVFTTTEKAAAHLKGGAKKVIISAPSADAPMFVCGVNLDKYDPKYTVISNASCTTNCLAPLAKVINDKFGIVEGLMSTIHATTATQKTVDGPSSKDWRGGRAVNGNIIPSSTGAAKAVGKVIPSLNGKLTGLAFRVPTNDVSVVDLVVRLEKSASYDDIKAAVKAASESPELKG

SEQ ID NO: 24925 - protein, 287 aa, Arabidopsis thaliana
MAKDVEAVPGEGFQTRDYQDPPPAPFIDGAELKKWSFYRAVIAEFVATLLFLYITVLTVIGYKIQSDTDAGGVDCGGVGILGIAWAFGGMIFILVYCTAGISGGHINPAVTFGLFLARKVSLPRALLYIIAQCLGAICGVGFVKAFQSSYYTRYGGGANSLADGYSTGTGLAAEIIGTFVLVYTVFSATDPKRSARDSHVPVLAPLPIGFAVFMVHLATIPITGTGINPARSFGAAVIYNKSKPWDDHWIFWVGPFIGAAIAAFYHQFVLRASGSKSLGSFRSAANV

SEQ ID NO: 24926 - protein, 245 aa, Picea glauca
MAEQAPEHQDRGMFGLFGKKKEEEGRQDDQISQTPATHTHNEAQTEAASYYPTSPHEVKHGPGHGHEGQLTPEEAEQQKHKGLVGKLHRTHSSSSSSSSDEEEEGGKKKEVGRKKKGAKDKTKEKLPSGGHHSSDHCGGEEKKKAGMVDKIKEKLPGHQEKLPAGGEHSSDQCGTKEEKKTGLLDKIKDKLPGHQEKLPGGGQHSSDQYGGKQEKKMGLLDKIKEKLPGHENKNDGEEEEKKHPH

SEQ ID NO: 24927 - protein, 256 aa, Staphylococcus aureus subsp. aureus COL
MAKESKSANEISPEQINQWIKEHQENKNTDAQDKLVKHYQKLIESLAYKYSKGQSHHEDLVQVGMVGLIGAINRFDMSFERKFEAFLVPTVIGEIKRYLRDKTWSVHVPRRIKEIGPRIKKVSDELTAELERSPSISEIADRLEVSEEEVLEAMEMGQSYNALSVDHSIEADKDGSTVTLLDIMGQQDDHYDLTEKRMILEKILPILSDREREIIQCTFIEGLSQKETGERIGLSQMHVSRLQRTAIKKLQEAAHQ

SEQ ID NO: 24928 - protein, 669 aa, Arabidopsis thaliana
MYMIESKGGAIACMLLALLFLGTWPAIMTLTERRGRLPQHTYLDYTLTNLLAAVIIALTLGEIGPSRPNFFTQLSQDNWQSVMFAMAGGIVLSLGNLATQYAWAYVGLSVTEVITASITVVIGTTLNYFLDDRINRAEVLFPGVACFLIAVCFGSAVHKSNAADNKTKLQNFKSLETTSSFEMETISASNGLTKGKAKEGTAAFLIELEKQRAIKVFGKSTIIGLVITFFAGICFSLFSPAFNLATNDQWHTLKHGVPKLNVYTAFFYFSISAFVVALILNIRFLYWPILGLPRSSFKAYLNDWNGRGWSFLAGFLCGFGNGLQFMGGQAAGYAAADAVQALPLVSTFWGILLFGEYRRSSRKTYTLLIKSKGGTITCMLLALLFLGTWPAIMTLTERRGRLPQHTYLDYTLTNLLAAVIIAFTLGEISPSRPNFTTQLSQDNWPSVMFAMAGGIFLSLGTLATQYAWAFVGLSVTEVITASIAVVIGTTLNYFLDDRINRAEVLFPGVACFLIAVCFGSAVHKSNAADNKSKLQGFKSLETTSSFQMETSSIKEGKAKVGTADFLIEVEKQRAIKVFGKSTIIGLAITFFAAFFYFSISSFGVGLILNIIFLYWPILGLPRSSFKAYLNDWNGRGWSFLAGFLCGFGNGLQFMGGQAAGYAAAGAVQV

SEQ ID NO: 24929 - protein, 447 aa, Bacteroides thetaiotaomicron VPI-5482
MKYQVIIIGGGPAGYTAAEAAGKAGLSVLLIEKNNLGGVCLNEGCIPTKTLLYSAKTYDSARHSSKYAVNVSEVSFDLPKIIARKSKVVRKLVLGVKAKLTSNNVAMVTGEAQIIDKNTVRCGEETYNAENLILCTGSETFIPPITGVETVNYWTHRDALDSKELPASLAIVGGGVIGMEFASFFNSLGVQVTVIEMMDEILGGMDKELSALLRAEYAKRGIKFLLSTKVVALSQTEEGAVVSYENAEGKGSVIAEKLLMSVGRRPVTKGFGLENLNLDKTGRGAIKVNEKMQTSLSGVYVCGDLTGFSLLAHTAVREAEVAVHSILGKEDAMSYRAIPGVVYTNPEIAGVGETEESASAKGITYKVVKLPMAYSGRFVAENEGVNGVCKVLLDEQERIIGAHVLGNPASEIITLAGTAIELGLTAAAWKKVVFPHPTVGEIFREAL

SEQ ID NO: 24930 - protein, 95 aa, Brassica napus
  misc_feature (64)..(64): Xaa can be any naturally occurring amino acid
  unsure (1)..(95): unsure at all Xaa locations
GQGPHLSALQSRAISYGTNKDDEEAEQLAKEISKDWSTVFERTMNTLFLTEMVRGLSLTLKYSXDPKVTSIILKGSLSLASCEHALEYHWRRACC

SEQ ID NO: 24931 - protein, 386 aa, Pseudomonas syringae pv. phaseolicola 1448A
MFKALRFFGWPLLAGVLIAMLIIQRYPQWVGLPSLDVNLQQAPQTTNVMQGPSSYADAVIAAAPAVVNLYTTKMVNKGNNPLFEDPQFRRFFGDNTPKQKRMESSLGSGVMMSPEGYILTNNHVTTGADQIVVALKDGRETIARVIGNDPETDLAVLKIDLKNLPAITIARSDGIRIGDVALAIGNPFGVGQTVTMGIISATGRNQLGLNTYEDFIQTDAAINPGNSGGALVDASGNLIGINTAIFSKSGGSQGIGFAIPTKLAMDVMKSIIEHGQVIRGWLGIEVQPLTQELAESFGLKDRPGIVVAGIFRDGPAQKAGLQLGDVILSINGEPAGDGRRSMNQVARTKPKDKIAIDVMRNGKEMRLSAEVGLRPPPAPTPAAAPE

SEQ ID NO: 24932 - protein, 169 aa, Triticum aestivum
MAPTVMASSATAVAPFQGLKSTATLPVARRSTTSFAKVSNGGRIRCMQVWPAYGNKKFETLSYLPPLTEEQLLKQVDYLLRNNWVPCLEFSKEGFVYRENSTSPCYYDGRYWTMWKLPMFGCTDASQVYKELQEAIASYPDAYVRILGFDNIKQTQCVSFIAYKPAGSE

SEQ ID NO: 24933 - protein, 521 aa, Fragaria x ananassa
MASSSMAANGVPTLRLSTSNIATNQTQKTNRGLSFSGSHLSGTKIPTPATCLRTCSPSPSTRRAPLVVSPKAVSDSKNSETCLDPDASRSVLGIILGGDGRTRLYPLTKKRAKPAVPLGANYRLIDIPVSNCLNSNVSKIYVLTQFNSASLNRHLSRAYASNMGGYKNEGFVEVLAAQQSPENPNWFQGTADAVRQCLWLFEEHNVLEFLVLAGDHLYRMDYEKFIQAHRETDADITVAALPMDEKRATAFGLMKIDDEGRIIEFAEKPKGEQLKAMKVDTTILGLDDERAKEMPYIASMGIYVVSKNVMLDLLREKFPGANDFGSEVIPGATSIGLRVQAYLYDGYWEDIGTIEAFYNANLGITKKPIPDFSFYDSSSPIYTQPRYLPPSKMLDADITDSVIGEGCVIKNCKIHHSVIGLRSCISEGAVIEDTLLMGADYYETDVDRRLMAKKGSVPIGIGKNSHIKRAIIDKNARIGDNVKIIKSDNVQETARETDGYFIKSGIVTVIKDAWIPSGTVI

SEQ ID NO: 24934 - protein, 427 aa, Bordetella parapertussis 12822
MSTNAELFDRACRSIPGGVNSPVRAFRSVGGTPRFIQRAQGPYVWDAEGKQYIDYVGSWGPAILGHAHPEVVRAVQEAAVHGLSFGAPTEAEVELAEMLIARLPSLEQVRLVSSGTEATMTAIRLARGATGRHKIIKFEGCYHGHSDSLLVKAGSGLLTFGNPSSAGVPPEFVAHTLPLEFNNLAAVDAAFSQHGAEIACVIVEPVAGNMNLIKPAEGFLAGLRELCTRHGAVLIFDEVMTGFRVGPQGVQGLTGVRPDLTTLAKVIGGGMPVGAFGGRADLMAHITPLGGVYQAGTLSGNPVAVAAGLATMRLIGEPGFYERLSAQTARLAQGLQERARAAGVPFSADAIGGMFGLYFGDRVPASFAEVSACDTEAFKRFFHAMLERGIHFAPSAFEAGFVSATHDDAVIDATLEAAEQVFATLRA

SEQ ID NO: 24935 - protein, 507 aa, Fragaria x ananassa
MDSWCVTLKPNTHLRQPTQAGLCCGANGFLGQRIRESFGNRGWVHGSEKTRPGVVSSVVTTKDFETTLKVPTYHRPRVDPKNVASIILGGGAFTQLFPLTRRAATPAVPVGGCYRLIDIPMSNCINSNINKIFVLTQFNSTSLNRHLARTYFGNGINFGDGFVEVLAATQTSGEAGMDWFQGTADAVRQFVWVFEDAKNRNVENILILSGDHLYRMDYMDFVQSHVDSNADITLSCAVVGDSRASDYGLVKIDSRGKIIQFAEKPRGAGLKAMQSDTTLLGFSPQDALKSPYVASMGVYVFKTDILLELLKKSYPNSNDFGSEIIPAAVEERNVQAYIFIDYWEDIGTIQSFYDANLALTEEFPKFQFYDPKTPFFTSPRFLPPTKIDNSRVVDAIISHGCFLQECFVQSSIVGERSRLDYGVELKDSIMMGADSYQTESEIAALLARGKVPIGIGRNTKIRLCIVDLNAKIGKDVIIMNKDGIQEADRPEEGFYIREESLSLWRRE

SEQ ID NO: 24936 - protein, 353 aa, Fragaria x ananassa
VEVLAATQTPGESGKKWFQGTADAVRQFHWLFEDARSKDIEDVLILSGDHLYRMDYMDYIQNHRQSGADITISCLPMDDSRASDFGLMKIDKKGKVLSFSEKPKGNDLKAMAVDTTVLGLSVEEALKKPYIASMGVYVFKKEILLNLLRWRFPTANDFGSEIIPASANEFFMKAYLFNDYWEDIGTIRSFFEANLALTEHPNKFSFYDAAKPMYTSRRNLPPSKIDGSKIVDSIISHGSFLTDCLIEHSVVGIRSRINTNVHLKDTVMLGADYYETDSEVLSLLAEGRVPVGIGENTKIKDCIIDKNARIGNNVVIANTEGVQEADRSSEGFYIRSGVTVILKNSTIEDGLSI

SEQ ID NO: 24937 - protein, 479 aa, Candida glabrata CBS138
MSDRILSLFKPFEAFLPEVISPERKVPYNQKLIWTGVSLLIFLVLGQIPLYGIVSAETSDPLYWLRAMLASNRGTLMELGVSPIITSSMIFQFLQGTQLLQVSLDSKEDRELYQIAQKVCAIILTFGQALVVVMTGNYGSPSDLGIAISLLLIFQLMFASFIVLLLDELLTKGYGLGSGISLFTATNIAENIFWKAFAPTTVNSGRGKEFEGAVIAFFHLLAVRKDKKRALVEAFYRENLPNMFQVIATVFVFLFVLYLQGFRYELPVKSTKVRGQMAIYPIKLFYTSNTPIMLQSALSSNIFLISQILFQKYPSNPVIRLFGVWGIRPGTNGPQVPLSGISYYLQPIGSLKMALLDPIKTVIYTAFVLGTCALFSKTWIEISGTSAKDVAKQFKEQGMVINGKRETSVYKELKKIIPTAAAFGGATIGALSVGSDLLGALGSGASILLATTTIYGYYEVAAKEGGFTKNLVNGFSEMM

SEQ ID NO: 24938 - protein, 615 aa, Streptomyces coelicolor A3(2)
MNTGELVDLGQQLRVDSVRAAAAAGSGHPTSSMSAADLMAVLLANHLRYDFERPAHPGNDRFVLSKGHASPLLYSAFKAAGAIDDEELLTFRKQGSRLEGHPTPQRLPWVETATGSLGQGLPVGVGIALSGKRLDHTDYRVWVLCGDSELAEGSIWEAAEHAGHEHLDNLTVIVDVNRLGQRGPTRHGHDLDAYARRFRAFEWHTIEVDGHDVDAVDRAYGEALSTKGQPTAIIARTLKGKGVRAVEDREGQHGKPLPEAEEAVAELGGPRDIRVRVHAPEDARSLRSTGTGQTELPRYGLGDEVATRNAFGEALAAVGTARGDVVALDGEVGDSTRAEFFAKEHPERYFECYIAEQQMVAAAVGMAARGWVPFATTFAAFLTRAYDFVRMASISGAGINLVGSHAGVAIGQDGPSQMGLEDLAMMRAIHGSTVLYPCDANQAARLVAEMAGLEGIRYLRTSRGESKVIYGPDEEFPVGGSKVLRSSDADRLTVVAAGVTLHEALAAADALGADGIPVRVIDLYSVKPVDRATLRAAAEETGCLVTVEDHRREGGIGDAVLDAFSDGRPVPRLVRLAVTTMPGSATPAEELHAAGIDAESIEAAARMLVEQAIVP

SEQ ID NO: 24939 - protein, 128 aa, Oryza sativa
  misc_feature (10)..(10): Xaa can be any naturally occurring amino acid
  misc_feature (28)..(28): Xaa can be any naturally occurring amino acid
  misc_feature (35)..(35): Xaa can be any naturally occurring amino acid
  misc_feature (37)..(37): Xaa can be any naturally occurring amino acid
  misc_feature (49)..(49): Xaa can be any naturally occurring amino acid
  misc_feature (51)..(51): Xaa can be any naturally occurring amino acid
  misc_feature (53)..(54): Xaa can be any naturally occurring amino acid
  misc_feature (56)..(56): Xaa can be any naturally occurring amino acid
  misc_feature (60)..(60): Xaa can be any naturally occurring amino acid
  misc_feature (73)..(73): Xaa can be any naturally occurring amino acid
  misc_feature (79)..(79): Xaa can be any naturally occurring amino acid
  misc_feature (87)..(87): Xaa can be any naturally occurring amino acid
  unsure (1)..(128): unsure at all Xaa locations
MMMMSCCGGXCGCGCGCPCGGGCGGCPXFPVVEAXAXAKTGVLAAPSPXAXSXXLXLAVXSGVIGGCGCFACXCGSRCXGCSCCSCXFSRRRRPAGFLVWLLLLSALLGALFCLPFCPACLVGLAFCS

SEQ ID NO: 24940 - protein, 193 aa, Caulobacter crescentus CB15
MGFSGVLNDVSRSDDEMEGRKSGKRRQVAALPWRGEGDALRILLVSSRETRRWVIPKGWPMKGRTDPQAAAQEAYEEAGLKGAIAPRPFGEYPYLKRLKNGQARMVKVDVYPLEVKETLSAWPEQGQRTLEWMTPVEAALAVQEPELRDLIARFAGVDLASDHDMPAKAPTPVRVAFQRLRRRVTALWGRYRR

SEQ ID NO: 24941 - protein, 249 aa, Leccinum carpini
  misc_feature (245)..(245): Xaa can be any naturally occurring amino acid
  unsure (1)..(249): unsure at all Xaa locations
IVAVNDPFIDLAYMVYMFKFDSVHGRFKGDVHAKDGKLYINGKAITVYAERDPANIKWGDVGAEYIVESTGVFTTTEKAAAHLKGGAKKVIISAPSADAPMFVCGVNLDKYDPKYTVISNASCTTNCLAPLAKVINDKFGIVEGLMSTIHATTATQKTVDGPSSKDWRGGRAVNGNIIPSSTGAAKAVGKVIPALNGKLTGLAFRVPTNDVSVVDLVVRLEKSASYDDIKAAVKAASESPDLKGXVAYT

SEQ ID NO: 24942 - protein, 251 aa, Leccinum uliginosum
  misc_feature (143)..(144): Xaa can be any naturally occurring amino acid
  unsure (1)..(251): unsure at all Xaa locations
INIVAVNDPFINLDYMVYMFKYDSVHGRFKGDVHAKDGKLYINGKAITVYAERDPANIKWGAVGAEYIVESTGVFTTIEKAAAHLKGGAKKVIISAPSADAPMFVCGVNLDKYDPKYTVISNASCTTNCLAPLAKVINDKFGXXEGLMSTIHATTATQKTVDGPSAKDWRGGRAVNGNIIPSSTGAAKAVGKVIPTLNGKLTGLAFRVPTNDVSVVDLVVRLEKSASYDDIKAAVKAASESPELKGIVAYT

SEQ ID NO: 24943 - protein, 762 aa, Bacillus cereus ATCC 10987
MAIQTSNLGYPRIGLQREWKKTLEAFWSNKIDEEQFLTTMKEIRLQHVKAQQEKGIELIPIGDFTYYDHVLDTAYMLGFIPSRFSEFTSYLDVYFAMARGSKDHVASEMTKWFNTNYHYIVPEYEEGLQISLKDNRPLRLYEEAKQELGIDGKPVILGPYTFLKLAKGYTQEQFATILKQLVAPYVQLLSELHAAGAQIIQVDEPIFASLTKEEVQQAKEIYEAIRKEVPNANLLLQTYFDSVEENYEEIITFPVSSIGLDFVHGKEGNLHAISKYGFPADKTLAVGCIDGRNIWRADLDEVLTLFTTLQKQVQTKDFIVQPSCSLLHTPIDKTEETHLSTELFDALAFANQKLEELVLIHSALTQGTESIHNELETYRNVHHTIRSSAARNREDVKAARTALKEEDFSRPLPFEKRYELQQVALKLPLLPTTTIGSFPQTTEVRQTRKEWRNGVISNEQYEQFIEKETEKWIRYQEEIGLDVLVHGEFERTDMVEYFGERLAGFSFTKNGWVQSYGSRCVKPPVIYGDVAFINGMTIKETVYAQSLTEKVVKGMLTGPVTILNWSFVRNDIPRKEVSYQIALALRHEIELLESSGIRVIQVDEPALREGMPLKEKDWDAYITWAVQSFLLATSSVANETQIHTHMCYSNFEDIVDAIRALDADVISIETSRSHGEFIDTLKHTTYEKGIGLGVYDIHSPRVPSKDEMYKIVEQSLKVCDPKYFWINPDCGLKTRRTEEVIPALEHMVQAAKDARSLLKTNA

SEQ ID NO: 24944 - protein, 276 aa, Leccinum duriusculum
  misc_feature (143)..(152): Xaa can be any naturally occurring amino acid
  misc_feature (177)..(177): Xaa can be any naturally occurring amino acid
  unsure (1)..(276): unsure at all Xaa locations
INIVAVNDPFINLDYMVYMFKYDSVHGRFKGDVHAKDGKLYINGKAITVYAERDPANIKWGAVGAEYIVESTGVFTTIEKAAAHLKGGAKKVIISAPSADAPMFVCGVNLDKYDPKYTVISNASCTTNCLAPLAKVINDKFGXXXXXXXXXXATTATQKTVDGPSAKDWRGGRAVNXNIIPSSTGAAKAVGKVIPTLNGKLTGLAFRVPTNDVSVVDLVVRLEKSASYDDIKAAVKAASESPELKGIIDYTDEAVVSTDFTGNPASSIFDASGGSM

SEQ ID NO: 24945 - protein, 387 aa, Xanthomonas campestris pv. vesicatoria str. 85-10
MLALNYHGSRDVRVETVPDPLLVERDDLILRVTATAICGSDLHLYRGKIPDLRPGDILGHEFMGIVEEVGPDVTAVKPGDRVVIPFVVACGRCFHCVLQEFSACETTNTGKGAALNHKDMRPPAALFGFSHLYGGLSGGQAEYVRVPKANVGPLVVPDALHDEQVLFLSDILPTGYQAVVDAGVKQGSTVAIFGAGPVGLMAAACCRMLGAERIFMVDRHAYRLDFASRAYGVIPINFDEVDDPADVIVSQTDGRGVDASIEAVGFEAEGSAIETALTNLKLEGSSGVAIRQCIAATRRCGVVSVPGVYAGFIHAFMFGDAFDKGLTFKMGQTHVQKHMPHLLECIGNGQLKPSSIISHRMPLADAARGYELFDKKQDDCRKVVLTP

SEQ ID NO: 24946 - protein, 238 aa, Leccinum monticola
INVVAVNDPFIDLDYMVYMFKYDSVHGRFKGDVHAKEGKLYINGNAITVYAERDPANIKWGAVGADYVVESTGVFTTIEKAAAHLKGGAKKVIISAPSADAPMFVCGVNLDKYDPKYTVISNASCTTNCLAPLAKVINDKFGISEGLMSTIHATTATQKTVDGPSAKDWRGGRAVNGNIIPSSTGAAKAVGKVIPALNGKLTGLAFRVPTNNVSVVDLVVRLEKSASYDEIKLAVKEA

SEQ ID NO: 24947 - protein, 578 aa, Kluyveromyces lactis NRRL Y-1140
MKYVVVSGGVISGIGKGVLASSTGMLLKTLGLKVTSIKIDPYMNLDAGTMSPLEHGECFVLNDGGETDLDLGNYERYLNVTLTKDHNITTGKIYSHVIAKERKGDYLGKTVQVVPHLTNAIQDWIERVSKIPVDNTGLEPDVCIIELGGTVGDIESAPFVEALRQFQFRVGRENFALIHVSLVPVIHGEQKTKPTQAAIKDLRSLGLTPDMIACRCTEKLDQPTIDKIAMFCHVGPEQVVNVHDVNSTYHVPLLLLEQKMIHYLAERLSISKIELSIEDTQRGDDLLQRWKNLTSNIDESLETVKIALVGKYTNLKDSYLSTIKALEHSSMRCKRKLEIIWVEASDLEPETNENVENKAKFHHAWNCISIADGILVPGGFGSRGTEGMVLAAKWARENNIPYLGVCLGLQIATIEFVRNVLGNKNGTSAEFFPESNEEDHVVVYMPEIDKENMGGTMRLGLRPTIFEHDTEWSKIRKLYGGGSQVEERHRHRYEINPKLIESLENHGLKFVGRDETGQRCEILELENHPYFVATQYHPEYMSKVLDPSTPFLGLVAAASDMLNEVIEARTSETGKADF

SEQ ID NO: 24948 - protein, 446 aa, Oryza sativa (japonica cultivar-group)
MVGGGALRRVGKYEVGRTIGEGTFAKVKFAQNTESGESVAMKVVDRSSILKHKMADQIKREISIMKLVRHPNVVRLHEVLASRKKIFIILEFITGGELFDKIIRHGRLNEADARRYFQQLIDGVDFCHSKGVYHRDLKPENLLLDSQGNLKISDFGLSAWPAQGGALLRTTCGTPNYVAPEVLSHKGYDGALADTWSCGVILYVLLAGYLPFDEVDLTTLYGKIESAEYSFPAWFPNGAKSLIHRILDPNPDKRIRIEEIRNDEWFKKNYEPTREIESEEVNLDDVNAAFDDPEEDADHTLDDEAGPLTLNAFDLIILSQGLNLAALFDRRQDYDKLQNRFLSRKPAKVIMSSMEVVAQSMGYKTHIRNYKMRVEGLNANKTSHLAVMLEIFEVAPSIFMIELQRAAGDTSDYNKFINNYCSKLDDIIWNFPIEKSKSRISRLSKR

SEQ ID NO: 24949 - protein, 273 aa, Leccinum manzanitae
  misc_feature (132)..(158): Xaa can be any naturally occurring amino acid
  unsure (1)..(273): unsure at all Xaa locations
VNDPFIDLDYMVYMFKYDSVHGRFKGDVHAKDGKLYINGKAITVYAERDPANIKWGAVSAEYVVESTGVFTTIEKAAAHLKGGAKKVIISAPSADAPMFVCGVNLDKYDPKYTVISNASCTTNCLAPLAKVXXXXXXXXXXXXXXXXXXXXXXXXXXXPSAKDWRGGRAVNGNIIPSSTGAAKAVGKVIPALNGKLTGLAFRVPTNNVSVVDLVVRLEKSASYDEIKLAVKEASESSGLKGIIDYTDESVVSTDFIGNPASSIFDASGGIMLN

SEQ ID NO: 24950 - protein, 568 aa, Brassica juncea
MASTPKLTTTISSSPSLQILCRKLPIAINHLPSSSTSRSLPKTLSYLSSLHRLRVPSVSNHRYYSSSSSRRCFSVRAVQNADNGADSDRHYDFDLFTIGAGSGGVRASRFSTSFGASAAVCELPFSTISSDTTGGVGGTCVLRGCVPKKLLVYASKFTHEFEDSRGFGWKYDTEPSHDWSTLIANKNAELQRLTGIYKNILNNANVKLIEGRGKVIDPHTIDVDGKIYTSRNILIAVGGRPFIPDIPGREYAIDSDAALDLPSKPKKIAIVGGGYIALEFAGIFNGLNSEVHVFIRQKKVLRGFDEDVRDFVGEQMSLRGIEFHIEESPEAIIKAGDGSFSLKTSKGTVDGFSHVMFATGRKPNTKNLGLENVGVKLAKNGAIEVDEYSRTSVPSIWAVGDVTDRINLTPVALMEGMALAKTLFQNDPTKPDHSAVPCAVFSQPPIGTVGLTEEQAIEQYGDIDVFTSNFKPLKATLSGLPDRVFMKLIVCANTNKVLGVHMCGEDSPEIIQGFGVAVKAGLTKADFDATVGVHPTAAEEFVTMRTPTRKIRKESSEGKASLEAKTAV

SEQ ID NO: 24951 - protein, 159 aa, Triticum aestivum
LNKFVQKSRLVPVRNSRDIVDPRVRAFSLFDKDGDGCITTKELGTVMRSLGQNPTEAELQDMINEVDADGNGTIDFPEFLNLMARKMKDTDSEEELKEAFRVFDKDQNGFISAAELRHVMTNLGEKLTDEEVDEMVREADVDGDGQINYDEFVKVMMAK

SEQ ID NO: 24952 - protein, 503 aa, Micrococcus luteus
  misc_feature (53)..(53): Xaa can be any naturally occurring amino acid
  misc_feature (144)..(144): Xaa can be any naturally occurring amino acid
  misc_feature (166)..(166): Xaa can be any naturally occurring amino acid
  misc_feature (185)..(185): Xaa can be any naturally occurring amino acid
  misc_feature (376)..(376): Xaa can be any naturally occurring amino acid
  unsure (1)..(503): unsure at all Xaa locations
MEHQKTTPHATGSTRQNGAPAVSDRQSLTVGSEGPIVLHDTHLLETHQHFNRXNIPERRPHAKGSGAFGEFEVTEDVSKYTKALVFQPGTKTETLLRFSTVAGELGSPDTWRDVRGFALRFYTEEGNYDLVGNNTPIFFLRDPXKFTHFIRSQKRLPDSGLRDATXQWDFWTNNPESAHQVTYLXGPRGLPRTWREMNGYGSHTYLWVNAQGEKHWVKYHFISQQGVHNLSNDEATKIAGENADFHRQDLFESIAKGDHPKWDLYIQAIPYEEGKTYRFNPFDLTKTISQKDYPRIKVGTLTLNRNPENHFAQIESAAFSPSNTVPGIGLSPDRMLLGRAFAYHDAQLYRVGAHVNQLPVNRPKNAVHNYAFEGQXWYDHTGDRSTYVPNSNGDSWSDETGPVDDGWEADGTLTREAQALRADDDDFGQAGTLVREVFSDQERDDFVETVAGALKGVRQDVQARAFEYWKNVDATIGQRIEDEVKRHEGDGIPGVEAGGEARI

SEQ ID NO: 24953 - protein, 143 aa, Polaromonas sp. JS666
MTTHLRVFEPGISDTFESALRRFFSPVPLDINPQAIQMRLDVSEKKDAYVVKADLPGVKKEDINVRIDGNIVQIDAEVKQEKETRGSDDKVLRSERYYGSVSRTFSLSQDVDDAKAVAKYADGVLTLELPKKTTAASKKLTVQ

SEQ ID NO: 24954 - protein, 332 aa, Anabaena variabilis
MTKNLLEQLREMTVVVADTGDIQAIEKFTPRDATTNPSLITAAAKMPEYQEIVDQTLLQAKKDAGAGASKGQIVSLAFDRLAVSFGLKILQIIPGRVSTEVDARLSYDTEATITKARELIAQYKAAGIGPERVLIKIASTWEGIKAAEILEKEGIHCNLTLLFGLHQAIACAEAGITLISPFVGRILDWYKKETGRDSYPSAEYPGVISVTTIYNYYKKFGYTTEVMGASFRNIGEITELAGSDLLTISPGLLGELQATIGELPRKLDPAKAATLDIEKISIDKATFDKMHAADRMAYDKLDEGIKGFSKALEELETLLAERLARLEVVASH

SEQ ID NO: 24955 - protein, 303 aa, Zea mays
IPHTPVSAHSLLLQFRQLIIIINRTQSSRFHSRMLLNPASEASVLDTIRQHLLEEPADESFGSLVADQWSGSLPFRTDDADDMVVFGALQDAFAYGWLPDGSFVHVKPEPVRSPDSSSYPCSYDGSPCFGLLDPEPPLTPGTTTPSSRGQEEAAAAMARGKHYRGVRQRPWGKFAAEIRDPARNGARVWLGTYDTAEDAALAYDRAAYRMRGSRALLNFPLRIGSGDKRPSPAPPEPATSSDSSSSSASGSHKRRKRGEAAAANMAMALVPPPSQLNRPAQPWFPAAPVEQAAMAPRVEQIVV

SEQ ID NO: 24956 - protein, 406 aa, Burkholderia sp. 383
MLQLDFHPSGRHFLQIPGPSPVPDRILRAMSYPTIDHRGPEFGALGLKVLAGIKKIFKTTQPVVIYPASGTGAWEAALTNTLSAGDTVLMFETGHFATLWKKMAEALGLKPEFLGLPGIEGWRRGVQPDMIEARLRADTAHDIKAVCVVHNETSTGVTSDIAAVRRAIDAAGHPALLMVDTISGLASADYRHDEWGVDVTVSGSQKGLMLPPGISFNAVSPKALAASEHATLPRAFWGWHEIIEANRNGYWPYTPNTNLLYGLAEALDMILGEGLDNVFARHQRLAEATRRAVRAWGLEIQCADPAVYSPVLTGVMMPDGVDADAVRKLIYERFDMSLGQALGKMRGKMFRIGHLGDCNDLTLMATLAGCEMGLKLAGVPVAASGVVAAMDYLATNTHTPALRAAA

SEQ ID NO: 24957 - protein, 447 aa, Elaeis oleifera
MGKEKVHINIVVIGHVDSGKSTTTGHLIYKLGGIDKRVIERFEKEAAEMNKRSFKYAWVLDKLKAERERGITIDIALWKFETTKYYCTVIDAPGHRDFIKNMITGTSQADCAVLIIDSTTGGFEAGIFKDGQTREHALLAFTLGVKQMICCCNKMDATTSKYSKARYDEIVKEVSSYLKKVGYNPDKIPFVPISGFEGDNMIERSTNLDWYKGQTLLEALDLIQEPKRPSDKPLRLSLQDGYKIGGIGTVQVGRVETGVIKPGMVVTFGPTGLTTEVKSVEMHHEALQEALPGDNVGFNVKNVAVKDLKRGYVASNSKDDPAKEAANFIAQVIIMNHPGQIGNGYAPVLDCHTSHIAVKFAELVTKIDRRSGKELEKEPKFLKNGDAGFVKMLPTKPMVVETFSEYPPLGRFAVRDMRQTVAVGVIKSVEKKDPTGAKITKAAAKKK

SEQ ID NO: 24958 - protein, 157 aa, Brassica napus
MFDMGPPISSELQVVSFHTVSKGYWGECGQRGGYFEMTNLPPKTVDEIYKVASIALSPNVPGQIFMGVMVNPPKPGDISYLKFAAESKSIHESLRRRARMMTDGFNSCRNVVCNFTEGAMYSFPQIRLPPRAIEAARRAGQSADVFYCLKLLEATGI

SEQ ID NO: 24959 - protein, 404 aa, Prosthecochloris aestuarii DSM 271
MPYTHSPVFTPAQRVQNYNYAIRNIVTHARKLEAQGKKITYLNIGDPVLYGFQPPEELIEANVLALRHGHNGYSPSSGRKEAVEAIAEDACRRGISTSPDNVIITFGASEAADLVCTSMLNPGDEVLCPSPGYPLYNAIIAKLNAREVRYSLDPANDWLPDPEQVEKSITPRTKILVVINPNNPTGELYSRETLDMFVDIARRHKLLIITDEVYHKLVYEGEHIPLASLASDDVAVITIDSLSKNYMAPGWRTGWLMITNSALIPDVRQAFIKLADARLCAPMAPQYTIKAAMTMGPEYNETILSRLRAQRELTIDRLNAIEGFSCNKPSGAFYVMGKLDLDATPFKTDEEFVLKLLQEKQVLFVHGSGFGTDPASGYARIVYLPDVTILEKVYADVADFINSL

SEQ ID NO: 24960 - protein, 452 aa, Arabidopsis thaliana
  misc_feature (9)..(9): Xaa can be any naturally occurring amino acid
  misc_feature (47)..(47): Xaa can be any naturally occurring amino acid
  misc_feature (68)..(68): Xaa can be any naturally occurring amino acid
  misc_feature (72)..(72): Xaa can be any naturally occurring amino acid
  unsure (1)..(452): unsure at all Xaa locations
MDEKPAGIXVMLVTVTAQRHIYQVIFLAKTLHLKGFSEKIARRRFIXFSSSADFTVFPMVTIPESLQXSDFXNLVPKNILHKLNKECEVSFEDCLGKMLLHQGNEIACDVYDEFMYFAEAAAKEFKLPNVIFSTTSATAFVCRSAFDKLYANSILTPLKEPKGQQNELVPEFHPLRCKDFPVSHWASLESMMELYRNTVDKRTASSVIINTASCLESSSLSRLQQQLQIPVYPIGPLHLVASASTSLLEENKSCIEWLNKQKKNSVIFVSLGSLALMEINEVIETALGLDSSKQQFLWVIRPGSVRGSEWIENLPKEFSKIISGRGYIVKWAPQKEEVLSHPAVGGFWSHCGWNSTLESIGQGVPMICRPFSGDQKVNARYLECVWKIGIQVEGELDRGVVERAVKRLMVDEEGEEMRKRAFSLKEQLRASVKSGGSSHNSLEEFVHFIRTL

SEQ ID NO: 24961 - protein, 545 aa, Anabaena variabilis ATCC 29413
MTKFIFVTGGVVSSIGKGIVAASLGRLLKSRDYSVSILKLDPYINIDPGTMSPFQHGEVFVTQDGAETDLDLGHYERFTDTSMSRLNSVTTGSIYQAVIMRERRGDYNGGTVQVIPHITNEIKERILSVAKETNPSVVITEIGGTVGDIESLPFLEAIRQLRKQVGRQNVLYMHVTLMPYIASAGEMKTKPTQHSVKELRSIGIQPDILVCRSDRPIPRGLKQKLSEFCDVPVECVITSQDARSIYEVPLILEGEGLAEQTLKLLQMEQRQPNLEKWQAMVQGLYSPKHTVEIAIVGKYVSLGDAYLSVVEALRHAAIATQGDLQLRWINSEDLETQAPETYLAGVDGIVVPGGFGTRGVDGKIAAIKYARDRQIPFLGLCLGMQCSVIEWARNVGGLAGANSAEFDSTTKYPVINLLPEQQDVVDLGGTMRLGVYPCHILPNTLASKLYQAEIIQERHRHRYEFNNDYRQLLLDSGYVISGTSPDGRLVEIVEYPQHPFFISCQFHPEFQSRPNTPHPLFTGFVQAAIAQSHPTANFQTPVKVS

SEQ ID NO: 24962 - protein, 373 aa, Zea mays
  misc_feature (239)..(239): Xaa can be any naturally occurring amino acid
  misc_feature (241)..(241): Xaa can be any naturally occurring amino acid
  unsure (1)..(373): unsure at all Xaa locations
MEDSSLFLQWAMSTLRHEQQPAAAVNDDCSSEATFPSLQALREASHAAEMVQELIGEAPANSWSSGDTTDGSIGGNSNSVPGPAAAAMEHDVWPAASSKTSPARRALSRSSSDTNPPVSWNFSAAASAQLAGSADGMLPEFAPKSALPPDQAYGSPRARRAGLKSLAGSMSSAAYAQDHIIAERKRREKINQRFIELSTVIPGLKKMDKATILSDATKYVKELHGKLKDLEAGGSNRRXAXETVVLVKRPCPHAAPAPDDDALPLSASSGTPAETKTQLPEIEARFAENSVMVRIHCEDGKGVAVKVLAEVEELHLSIIHANVLPFVEGTLIITITAKGEEGFTVSAGEIVGRLNSALLHNNEHNRCCNIADE

SEQ ID NO: 24963 - protein, 563 aa, Xanthomonas oryzae pv. oryzae KACC10331
MAFREASSPMTPLIFVTGGVVSSLGKGIAAASLASILEARGLKVTMMKLDPYINVDPGTMSPFQHGEVYVTDDGAETDLDLGHYERYVRTRLSRKNSVTTGRIYENVIRKERRGDYLGATVQVIPHITDEIRRCIDEATAGFDVALIEIGGTVGDIESLPFLEAIRQVRTERGAEKAMFMHLTLVPYIAAAGELKTKPTQHSVKELRSIGIQPDVLLCRSEQAVPDSERRKIALFTNVSERAVISCPDIDVLYGMPLELLRQGLDELVIVQFKLRDKVAAADLSEWAAVVDAVKHPLDEVTIAVVGKYVDHQDAYKSVAEALRHGGLRQRTKVNLKWLEAQDLERSDMAALQDIDGILVPGGFGDRGFEGKVQTSKFAREHKVPYFGICYGMQAAVVDYARHVADLDAANSTENDRQSPHPVIGLITEWRTATGEVEKRDEKSDLGGTMRLGLQEQRLKPGTLARELYGKDVVAERHRHRYEFNNRYRTQLEDAGLVISGKSMDDTLVEVVELPRDTHPWFLACQAHPEFLSTPRDGHPLFIGFVRAAREKKAGGKLLKEARA

SEQ ID NO: 24964 - protein, 339 aa, Lactobacillus plantarum WCFS1
MNKSLVLVTGGNGFLASHIIKQLLTAGYPVRATLRSLDKAAGVKQTLAGTPNLDRLTFVALDLTQDQGWAEAMRDVTYVMSVAAPVFVNQGQASDEVTSAAKVGTIRVLKAATAAGVKRVVMTANLGAVGFSRLDHDHPVTEVDWTREDQPGLSLYEKSKLVAEEAGWAYCKAHADSPEFTTVNAGAMLGPSLNGHVTGSYNLVSRILTGQMMPNLKVNVIDVRDVADLEVRAMTAPAAANQRFLAVAATPISMRDLKTLIQEQRPQLAAGLTKHLIPDWFVRGLAPFSGQLRESSLMIRINHEVSTQKAQQLLGWQARSADTAVLAAVDTLVKNGLNK

SEQ ID NO: 24965 - protein, 681 aa, Ustilago maydis 521
MSNVAPGVTPDAPAPSAVSNRPDVKRDTHPFSRSQLEVLMTKRFFYIQSFEIYGGVGGLYDYGPTGAALQANIINQWRNHFIIEEEMLELDTTIMTLSDVLKTSGHVDKFADWMCKDTKTGEIFRADHLVEGVLEARLEGDKQARAIEAGQTAAVPAEAASGDSKKSNKKKVKSSAVKLDDALVDEYTSTLAQIDNFNGEQLGELVRKYDIRSPESGNEVSEPVEFNLMFESYIGPTGQIKGYLRPETAQGHFVNFQRLLEFNNGRVPFASAQIGKSFRNEISPRAGLLRVREFTMAEIEHFVDPEDKNHDRFDEVKHINVPLLAKDVQESGKTDITIKTIGEAVSAGIIDNQTLGYFIGRIYLFLVKIGIDATRLRFRQHMSNEMAHYASDCWDAEIHTSYGWIECVGCADRSAYDLTVHSKRTKKDLVVQKAHKEPKVYDALVPTIVKKNLGPKFKKDAKFVEEAILEMNQQQLAKLQRKLKNGSARLSICTGETYVLTTDVVTVEMKTIRETVREFTPNVIEPSFGIGRIFYSLLEHSFWTRAEDQDRGVLSLPPLVAPIKASIVPISSNEKLSPLVKQVSRKLRSAGVASRVDDSNASIGRRYARNDELGTPFACTLDFASLSKGTMTLRERDTTAQRIGPIDQVIDVIRQLCDGSLDWEGACKILPEYSGQQDVEG

SEQ ID NO: 24966 - protein, 3729 aa, Streptomyces fradiae
MSTENSTNVPASEDKLRAYLRRAMADLHESRERLRATEARAQEPIAVVGMGCRFPGGVGSPEALWRLVVEGVDAVSPFPGDRGWDVEGLYDPEPGVAGKSYVREGGFLHDAAEFDAEFFGISPREAVAMDPQQRLLLETSWEAIERAGIDPHSLHGSRTGVYAGVMYHDYGTGQTSATDTSGYSGTGTSGSVVSGRVAYTLGLEGPAVTVDTACSSSLVALHLAVQALRGGECDMALAGGVTVMAGPGMFVEFSRQRGLAADGRCKAFADGADGTAWAEGAGVVLVERLSDARRLGHPVLAVVCGSAVNQDGASNGLTAPSGPSQERVIRQALANARLTVADVDVVEAHGTGTRLGDPIEAQALLGTYGRDRDGGRPVWLGSLKSNIGHAQAAAGVAGVIKMVLAMRYGWLPRTLHVDEPSRHVDWSAGGVWLLTEAREWPGVDRPRRAAVSAFGVSGTNAHLILEAPDTAEAESATTPVRSEVSESAAVFDARSGVVPVVVSGRSRVVVREAAGRLAEVVEAGGVGLADVAVTMAGRSRFGYRAVVLARGEAELAGRLRALAGGDPDAGVVTGAVVDPETGSGGGGVVLVFPGQGTQWVGMGAGLLGSSEVFAASMRECARALSVHVGWDLLEVVSGGAGLERVDVVQPVTWAVMVSLARYWQAMGVDVAAVVGHSQGEIAAATVAGALSLEDAAAVVALRAGLIGRYLAGRGAMAAVPLPAGEVEAGLAKWPGVEVAAVNGPASTVVSGDRRAVAGYVAVCQAEGVQARLIPVDYASHSRHVEDLKGELERVLSGIRPRSPRVPVCSTVAGEQPGEPVFDAGYWFRNLRNRVEFSAVVGGLLEEGHRRFIEVSAHPVLVHAIEQTAEAADRSVHATGTLRRQDDSPHRLLTSTAEAWAHGATLTWDPALPPGHLTTLPTYPFNHHHYWLDTTPTTPATTTQSPTDAQNPADALPYKVSWKRLRDQDSLTARLDGRWLLVVPEASADPSVAEGVARELTARGATVESLTVEPGADRSRLRGLLVDATERDEAGPLRGIVSLLALAGDHAGADGARPVVPAGLAASLALIQAAGDAGTEAGLWAVTRGAVAAVPGDVPAPSQALLWGFGRVAGIELPHCWGGLLDLPTGPGDSGFRQLAATLAGRPAEDQVALRASGAYGRRLVRASAAGGADGWRPRGTVLVVGDTAEVAGPLVRWLLGNGARRVTLSGLSGPLPEELADVAARVTVAPCDPADRPALRTLLAEQAPTAVLVAPPAVPPTPLAEMTAEALAIALSAKTGLVDRLDSLLDEPDPLLEDGELDAFVVFSSVAGVWGGAGQGGYAAGTAYLDALAECRRAGGLPVTSVAWTPWLGTPAADSLGEQMSRAGITPLDPAASLDALARAVGRRAGCVTVADIDWERFASAYTATRPTPMFDEVPEVRRIQAAWAEAEADAARSGAGGDSQLLRSLRGRPEEAQLAELLRLVRTHAAAVLGLGSPGAVEARRSFKDLGFNSVTAVELRNRLKEATGLRLEVSLVFDHPDPASLARHLLDLALGQEPEETPRAFALEPAPNGEPIAIVSMACRMPGGVSTPEELWRLLRDGKDAIGPFPANRGWDLENLYDPDPDADGRTYVREGGFLHEAPDFDPSFFGISPREALAMDPQQRLLLETSWEALERAGIDPARLRGSRTGVFVGTNGQHYMPLLQNGGDSFDGYLGTGNSASVMSGRLSYVFGLEGPAVTVDTACSASLVALHLAVQAMRRGECDMALVGGATVMSTPEMLVEFSRQRVISANGRSRAFAAGADGVALGEGVGVLLVERLSDAERNGHPVLAVVRGSAVNQDGASNGLTAPNGPSQQRVIRQALADAGLRPEDIDAVEAHGTGTELGDPIEAEALLATYGRTRTADRPLWLGSLKSNIGHTQAAAGVAGVIKMVLALGNETLPRTLHVDEPTPRVDWSSGAVSLLTEPVDWPAGPSAPRRAAVSSFGISGTNAHTILEQAPVPAESRPGTEPADGTGAWENVTVPLLLSGHTEAALREQSTRLLNDLLEHPDEHPADVGYTLITGRAHFGHRAAVIGESREELLDALKALAEGREHHTVVRGDGTAHPDRRVVFVFPGQGSQWPSMARDLLDRAPAFRETAKACDAALSVHLDWSVLDVLQEKPDAPPLSRVDVVQPVLFTMMLSLAACWRDLGVHPAAVVGHSQGEIAAACVAGALSLEDAARIVALRSRAWLTLAGKGGMAAVSLPEARLRERIERFGQRLSVAAVNSPGTAAVAGDVDALRELLAELTAEGIRAKPIPGVDTAGHSAQVDGLKEHLFEVLAPVSPRSSDIPFYSTVTGAPLDTERLDAGYWYRNMREPVEFEKAVRALIADGYDLFLECNPHPMLAMSLDETLTDSGGHGTVMHTLRRQKGSAKDFGMALCLAYVNGLEIDGEALFGPDSRRVNPPTYPFQRERYWYHPTSGRRGDITAAGVAEAEHPLLGAGVELPETGGTVYTARFGPDSRPWLADHALLGTVLLPGTAILDLVLWAGERSGCGRVGELALQAPLVLPDSGDVELRLLVGGPDEEKRRTVTVHARPAAAGAEAPWTRHAEAVVLPATGEEPTPAPRPVPEPAGTTDPAAFYAEFAERGYDYGPAFQGFTAGARHGEDVVAEVALPSGLVADARHHRLHPALLDAALQAMILGTFFADDGRARMPFAVRGVRLHTAGADRLRVLISPAGDETVRLLCTDLATGAPVLEIDELVVRPVSGEQLAAGAPGRNGGELYRVDWTVLPEPAEVPAPRWALLGEDHAGLADVLGGTGGGCERYDTLTGLLEATTRSAGGILPDIVALSLPTAPEPGPQAVREVLSQALDAAQAWLAAGAETASARLVFVTGGAVATTADETVRDIAAAAVWGLVRSAQSEEPDRMVLLDLDGERPTARTLAAALASGEPQLAVRGSTVAAPRLAPAGPGPEDLVPPAGTTAWRLTPGGGTLEELSLAPAPDAEEPLAPGQVRIAVRAAGVNFRDALIALGMYPGKGTMGAEGAGVVVETAPDVTGLSAGDRVLGMWNGGFGPLVVADHRMVAPIPHGWSYAEAASVPAVLLTSYYALTRLARARTGQTVLVHAAAGGVGMATLQLARHLGLEVYATASTGKWDALQKHGIPDDRIADSRTLDFAERFLSRTGGRGVDIVLNSLAGEFVDASLRLLPRGGHFLELGKADVRDPRRIAAAHPGTDYRAFDLVQAGPDTVGEMLGELLELFAAGALRPLPLTAYGIRDARTALRTLSQARHTGKLVLTVPAGFDTHRTVLLTGGTGTLGQTLARHLVNRHGVRHLLLAGRTGAAAEGVAELIGELGELGAEVRVAACDAADRQRLTELLAGIPVEHPLGAVVHAAGTLDDGTIPSLTGENIDNVLRPKADAVLNLHELTRDADLSAFVLYSSSSALLGSPGQGAYAAANAFLDGFARYRKGLGLPALSLAWGLWGSNSRMAGHLDQSGMQRRLNRSGIMALTDAEGLALFDAAQDGGDALLVPMRLNRTALRASGRITPFLSGLAGGGPAAGERRPEVAAVSGTLAERLTGLTAQEGHALVLAEIRAHAAAVLGHGSDDSIPEDRAFKDLGFDSLTAVEMRNRLSAATGLRLPATLVFDHPTPGELAGHLSAELSADDAPGSASPLTELDRFEALFTALAPGTTKDTPGGAGALMIDEAERQEIAGRLAALAGLWNRLHGTTTAPEDGDTVADALEAADDHEIFAFLDERF

SEQ ID NO: 24967 - protein, 541 aa, Caulobacter crescentus CB15
MHFTLRVASARAQMPPAKRDEKFCEPAGSTGGRSGGGSMARQRLSFLQIWNMCFGFFGIQIGFGLQNANTSRIFQSLGVDVNHLAILWIAAPATGLLVQPIIGHFSDKTWGRFGRRRPYFFWGAILTTLALLVMPNSPTLWVAAAALWIMDASINITMEPFRAFVGDNLPDEQRATGYAMQSFFIGLGAVFASALPWMLTNWFDVANTAPAGQVPDSVRIAFYTGGAGLLLAVLWTVFTTREYSPEQLTAFEKAEREIAGLGLHEEPEPSVNAYIALGVGGVLLGAALALIVWGAGLEKELYVLAGLLFAFGLAGVAGARFKRIGRTDNGFSEVLADVFRMPKTMRQLAVVQFFSWFGLFAMWIYTTPAVATVHFGAVDASSKAYNEGADWVGVLFAVYNGVAALAALVIPLMVKVTSRRVSHAVCLGLGALGLLSFLVIRDPGLLWIGMVGVGFAWSSILSTPYSILAGALPARKMGVYMGIFNVFIVVPQLLAATLLGLMLKTFFGNQSIFALVLGALSFALAAAATFLVRDRVAGAPA

SEQ ID NO: 24968 - protein, 287 aa, Leccinum vulpinum
  misc_feature (145)..(155): Xaa can be any naturally occurring amino acid
  unsure (1)..(287): unsure at all Xaa locations
EINVVAVNDPFIDLDYMVYMFKYDSVHGRFKGDVHAKEGKLYINGKAITVYAERDPANIKWGAVGADYVVESTGVFTTIEKAAAHLKGGAKKVIISAPSADAPMFVCGVNLDKYDPKYTVISNASCTTNCLAPLAKVINDKFGIXXXXXXXXXXXTATQKTVDGPSAKDWRGGRAVNGNIIPSSTGAAKAVGKVIPALNGKLTGLAFRVPTNNVSVVDLVVRLEKSASYDEIKLAVKEASESSGLKGIIDYTDESVVSTDFIGNPASSIFDASGGIMLNPNFVKLIA

SEQ ID NO: 24969 - protein, 372 aa, Dechloromonas aromatica RCB
MAGSEVMNKSKSTNPLLAIKALGQHLWLDNLSRTLLREGGLQRLINEDGIDGVTSNPAIFEKAIAGSPYYREDLERLRGAGLDAEACYESLVIADIRAACAMLLPAFRASRGESGYVSLEVSPALANDTAGTVAAAHRLFDTVGRDNLLIKVPGTPAGIDAFEALSAAGLSVNVTLIFSLAQYEAVAQAYLRGALRWVESGGKARHLRSVASIFLSRVDTVVDKRLDLLGTAHAERLSGRAGVALAKCCHGRYRDIFHGPDFALLRLAGLRPQTPLWASTGSKNLAYSDVLYVEPLIGAESINTLPDPTLAAFRQHGQVANRLQEGLEEAQAHIQALLDLGIDLNAVGESLQSDGVKLFAEAYQKILLGLQA

SEQ ID NO: 24970 - protein, 282 aa, Leccinum vulpinum
  misc_feature (127)..(149): Xaa can be any naturally occurring amino acid
  unsure (1)..(282): unsure at all Xaa locations
AVNDPFIDLDYMVYMFKYDSVHGRFKGDVHAKEGKLYINGKAITVYAERDPANIKWGAVGADYVVESTGVFTTIEKAAAHLKGGAKKVIISAPSADAPMFVCGVNLDKYDPKYTVISNASCTTNCLXXXXXXXXXXXXXXXXXXXXXXXTTATQKTVDGPSAKDWRGGRAVNGNIIPSSTGAAKAVGKVIPALNGKLTGLAFRVPTNNVSVVDLVVRLEKSASYDEIKLAVKEASESSGLKGIIDYTDESVVSTDFIGNPASSIFDASGGIMLNPNFVKLIA

SEQ ID NO: 24971 - protein, 411 aa, Solenostemon scutellarioides
MELQNSAQEMEAPTTITIKGILGLLMANTDAKENGKRVISLGIGDPTAYSCFHASNAAQEGVVECLRSAKFNGYAPTAGLPQTRQAIAEYLSRDLPYKLPAESVYVTAGCTQAIEIALSVLARPGANILLPRPCFPIYGLCASFRNIEVRYFDLHPEKGWEVDLQAVEDLADHNTVAMVIINPGNPCGNVYSYQHLKKVAETAKRLGIVVIADEVYGHLAFGANPFVPMGNFGSIAPVVTLGSLSKRWLVPGWRLGWLVINDPDGTLMSPKFVERIKKYCDICGGPATFIQAAVPEIVEQTQEVFFRKTINILRQTSDICCQKIEEIDGITCPTKPKGAMAFMVKLNISRMKDISDDIDFCFKLAKEESVIILPGIAVGLNNWLRITFAVEPSALEEAMERLKSFCIRHSY

SEQ ID NO: 24972 - protein, 281 aa, Leccinum piceinum
  misc_feature (68)..(68): Xaa can be any naturally occurring amino acid
  misc_feature (132)..(148): Xaa can be any naturally occurring amino acid
  unsure (1)..(281): unsure at all Xaa locations
VNDPFIDLDYMVYMFKYDSVHGRFKGDVHAKEGKLYINGKAITVYAERDPANIKWGAVGADYVVESTXVFTTIEKAAAHLKGGAKKVIISAPSADAPMFVCGVNLDKYDPKYTVISNASCTTNCLAPLAKVXXXXXXXXXXXXXXXXXTTATQKTVDGPSAKDWRGGRAVNGNIIPSSTGAAKAVGKVIPALNGKLTGLAFRVPTNNVSVVDLVVRLEKSASYDEIKLAVKEASESSGLKGIIDYTDESVVSTDFIGNPASSIFDASGGIMLNPNFVKLIA

SEQ ID NO: 24973 - protein, 484 aa, Zea mays
MITETGYQTQLFLLDFAHMTFIDTRQGFQRPIAWIDENEKCYFPESFIQDQKLFMKKDFGNGNHEYISEERNGTRETNHQFGASESSAESSNFESSIGDVSSPKRARAEKNFIVKKYCDMGEAIGENESCTLLPTACNLLPHQANLGEVSRAQRTIEAVEKLLLQGMGSVIESKDIIGIYRTPLLDDHGQVRYHIHQKQVQVTGCHRGNANVRYAWLPCSKSTVHVMMLNGVLQVDKPPNKCAAYGEGTLLTPANRSDACVKYSDVDENGIVRMMLCRVIMGNVEIVHPGSKQRRPSNKSFDSGVDDLKNPRHYVVWDMNLNSHIYSEFVVTVKLPSKTKDSFVSQENCQNSSDLSLVLNSSSPDCISQEMNLEAPPALGGGCAAPMLGDSMEKAPSSPWMPFSMLFAAISTKVSPENMDVIIGCYEEFKSKKISRGELVKKLRHVVGDRVLISTIMRLQDKQLPPVDKREEPDTSASKVVAEP

SEQ ID NO: 24974 - protein, 404 aa, Sinorhizobium meliloti
MDFESFFKNELDGLHQEGRYRVFADLARHRGSFPKATRYTADGAQEVTVWCSNDYLGMGQCPIVTEAMKNAIDECGAGAGGTRNISGTNHYHVLLERELADLHGKESALLFTSGYVSNWAALGTLCSKIPGVIVFSDAGNHASMIEGIRHSKCERVIFKHNSVADLEAKLAAADPRAPKIIAFESVYSMDGDIAPIREFCDLADKYGAMTYLDEVHAVGMYGPRGGGIAEREGLMHRLTVIEGTLGKAFGVMGGYITGSAALCDFIRSFASGFIFTTALPPALAAGALASIRHLKESQVERFAHQERVRRLRSLLDQRGIPHMVNPSHIVPVIVGDAAKCKWISDLLLDNFGIYVQPINYPTVPKKTERLRITPTPMHSDADIDHLVSALHSLWSRCALARAVA

SEQ ID NO: 24975 - protein, 397 aa, Arabidopsis thaliana
MALGLSSEESEMSPDGELVPVDSSAVVTAKRKTSQLSRSWISIDATGQKTVLDVDKHVIMHRVQIHARDLRILDPNLFYPSAILGRERAIVLNLEHIKAIITAEEVLIRDSSDENVIPVLEEFQRRLPVGNEAHGVHGDGDLGEEDESPFEFRALEVALEAICSFLAARTTELEKFAYPALDELTLKISSRNLERVRKLKSAMTRLTARVQKVRDELEQLLDDDGDMADLYLTRKLVGASSSVSVSDEPIWYPTSPTIGSMISRASRVSLVTVRGDDETDVEELEMLLEAYFMQIDSTLNKLTELREYIDDTEDYINIQLDNHRNQLIQLELMLSAGTVCVSVYSMIAGIFGMNIPNTWNHDHGYIFKWVVSLTGTFCIVLFVIILSYARFRGLIGS

SEQ ID NO: 24976 - protein, 541 aa, Oenococcus oeni
MTDQVSILNDPFINKGTAFTEAEREELGLNGLLPAKVQALQEQVDQTYAQFQSKVSNLEKRLFLMEIFNTSHVLFYKLFSQHVVEFMPIVYDPTIADTIENYSELFVEPQGAAFLDINHPENIQSTLKNAANGRVIKLLVVSDAEGILGIGDWGVQGVDIAVGKLMVYTVAAGIDPSTVLAVVIDAGTNNEKLLKDPMYLGNKFNRVRGDKYYDFIDKFVNHAESLFPNLYLHWEDFGRSNASNILNSYEDKIATFNDDIQGTGIVVLAGVLGALKISGQKLTDQTYMSFGAGTAGMGIVKQLHEEMVEQGLSDEEAKKHFFLVDKQGLLFDDDPDLTPEQKPFAAKRSDFKNANQLTNLQAAVEAVHPTILVGTSTHPNSFTEEIVKDMSGYTERPIIFPISNPTKLAKAKAEDVLKWSNGKALIGTGVPVDDIEYEGNAYQIGQANNALIYPGLGFGAIAAQSKLLTPEMISAAAHSLGGIVDTTKVGAAVLPPVSKLADFSRTVAVAVAKKAVEQGLNRQPIDDVEKAVDDLKWEPKY

SEQ ID NO: 24977 - protein, 541 aa, Oenococcus oeni
MTDPVSILNDPFINKGTAFTEGEREELGLNGLLPAKVQALQEQVDQTYAQFQSKVSNLEKRLFLMEIFNTNHVLFYKLFSQHVVEFMPIVYDPTIADTIENYSELFVEPQGAAFLDINHPENIQSTLKNAANGRDIKLLVVSDAEGILGIGDWGVQGVDIAVGKLMVYTVAAGIDPSTVLAVVIDAGTNNEKLLKDPMYLGNKFNRVRGDKYYDFIDKFVNHAESLFPDLYLHWDDFGRSNASNILNSYKDKIATFNDDIQGTGIVVLAGVLGALKISGQKLTDQTYMSFGAGTAGMGIVKQLHEEMVEQGLSDEEAKKHFFLVDKQGLLFDDDPDLTPEQKPFAAKRSDFKNANQLTNLQAAVEAVHPTILVGTSTHPNSFTEEIVKDMSGYTERPIIFPISNPTKLAEAKAEDVLKWSNGKALIGTGVPVDDIEYEGNAYQIGQANNALIYPGLGFGAIAAQSELLTPEMISAAAHSLGGIVDTTKVGAAVLPPVSKLADFSRTVAVAVAKKAVEQGLNRQPIDDVEKAVDDLKWDPKY

SEQ ID NO: 24978 - protein, 418 aa, Candida albicans SC5314
MLLKNILSVLAFALLIDAAPVKRSPGFVTLDFNVKRSLVDPDDPTVESKRSPLFLDLDPTKIPVDDTGRNDGVDKRGPVAVKLDNEIITYSADITVGSNNQKLSVIVDTGSSDLWIPDSKAICIPKWRGDRGDFCKNNGSYSPAASSTSKNLNTRFEIKYADGSYAKGNLYQDTVGIGGASVKNQLFANVWSTSAHKGILGIGFQANEATRTPYDNLPISLKKQGIIAKNAYSLFLNSPEASSGQIIFGGIDKAKYSGSLVELPITSDRTLSVGLRSVNVMGRNVNVNAGVLLDSGTTISYFTPSIARSIIYALGGQVHFDSAGNKAYVADCKTSGTVDFQFDKNLKISVPASEFLYQLYYTNGKPYPKCEIRVRESEDNILGDNFMRSAYIVYDLDDKKISMAQVKYTSESNIVAIN

SEQ ID NO: 24979 - protein, 371 aa, Cryptococcus neoformans var. neoformans B-3501A
MPDLVVTTQELRPSSPVYGHARTIIKNNFVAMAGEYVGTTLFMLCCLGGTHVALLPEKSVTGDLSQPLNTSSLFYISLSIGLSLTVNVWIFFRVSGGLFNPAVSLGMVLAGCLPPMKGALLTVAQVLGGITGAAIINVLLPGELNAGTTLGGGASIAQGLFIEAILTALLMLTVFFTAAEKNEATFLSPLAIGMALFIAEMVGVPYSGGALNPVRSLGPAVVTHNFPGYHWIYWVGPALGSVLATCFYSLLKYLEYESVPGPGEAPHVPPFWRLPARGYLSTLSHPFAKRASTGTYSHEDDPEKGLRSGKDSQANTDNPTRVNRPGSGDAEIQSPVEDTTMANARLDRIEMLLTQLMQVRTSEGTQKSPAV

SEQ ID NO: 24980 - protein, 479 aa, Escherichia coli CFT073
MSVPVQHPMYIDGQFVTWRGDAWIDVVNPATEAVISRIPDGQAEDARKAIDAAERAQPEWEALPAIERASWLRKISAGIRERATEISALIVEEGGKIQQLAEVEVAFTADYIDYMAEWARRYEGEIIQSDRPGENILLFKRALGVTTGILPWNFPFFLIARKMAPALLTGNTIVIKPSEFTPNNAIAFAKIVDEIGLPRGVFNLVLGRGETVGQELAGNPKVAMVSMTGSVSAGEKIMATAAKNITKVCLELGGKAPAIVMDDADLELAVKAIVDSRVINSGQVCNCAERVYVQKSIYDQFVNRLGEAMQAVQFGNPAERNDIAMGPLINAAALERVEQKVARAVEEGARVALGGKAVEGKGYYYPPTLLLDVRQEMSIMHEETFGPVLPVVAFDTLEEAISMANDSDYGLTSSIYTQNLNVAMKAIKGLKFGETYINRENFEAMQGFHAGWRKSGIGGADGKHGLHEYLQTQVVYLQS

SEQ ID NO: 24981 - protein, 541 aa, Oenococcus oeni
MTDPVSILNDPFINKGTAFTEAEREELGLNGLLPAKVQALQEQVDQSYAQFQSKVSNLEKRLFLMEIFNTNHVLFYKLFSQHVVEFMPIVYDPTIADTIENYSELFVEPQGAAFLDINHPENIQSTLKNAANGRDIKLLVVSDGEGILGIGDWGVQGVDIAVGKLMVYTVAAGIDPSTVLAVVIDAGTNNEKLLKDPMYLGNKFNRVRGDKYYDFIDKFVNHAESLFPNLYLHWEDFGRSNASNILNSYKDKIATFNDDIQGTGIVVLAGVLGALKISGQKLTDQTYMSFGAGTAGMGIVKHLHEEMVEQGLSDEEAKKHFFLVDKQGLLFDDDPDLTPEQKPFAAKRSDFNNANQLTNLQAAVEAVHPTILVGTSTHPNSFTEEIVKDMSGYTERPIIFPISNPTKLAEAKAEDVLKWSNGKALIGTGVPVDDIEYEGNAYQIGQANNALIYPGLGFGAIAAQSKLLTPEMISAAAHSLGGIVDTTKVGAAVLPPVSKLADFSRTVAVAVAKKAVEQGLNRQPIDDVEKAVDDLKWEPKY

SEQ ID NO: 24982 - protein, 315 aa, Bacillus clausii KSM-K16
MKKKEALWIYQKMNEIRLFEEEVHRKFGEGIIPGFVHLYAGEEAVATGVSVLLDEEDYITSTHRGHGHAIAKGCDINRMMAEIMGKKDGLGGGKGGSMHVADVEKGMLGANGIVGGGFGLAAGAALTIKTLRQNHVAVCFFGDGASNEGLFHEGLNLASILKLPVIFVCENNQFGEGTPFRYASASETVAERAAAYNMPGVRVDGMKVEDVYSATKEAIRRAKAGEGPTLIECDTYRHYGHFEGDEQKYKSEADQNRDRDPIPEFRKVAVEKGWMTNKQADEIEKEAAETIKKASEFAQKSPLPDVESLYTDIFA

SEQ ID NO: 24983 - protein, 273 aa, Streptomyces coelicolor A3(2)
MPKPHETAVYTHGHHESVLRSHTWRTAENSAAYLLGSLRPHMRILDIGCGPGTITADLAERVPEGHVTGVDRSPEIVERARATAAARGLENTGFAVADVHALDYPDDTFCVVHAHQVLQHVGDPVRALREMRRVARPGGFIAVRDSDYGAMTWYPASSGMDDWLDLYHRVARANGGEPDAGRRLKAWALEAGFTDITATSATWTFTTPEEREWWSGLWADRTLASAYAERATEGGHATPERLRAVSAAWRDWGKHPESWFSVLHGEILCRKEA

SEQ ID NO: 24984 - protein, 586 aa, Bacillus cereus ATCC 10987
MLKDAIYHRPKDNYAYAYDEKTIHIRIRTKRDDVQSTTLIYGDPYEWTDGKWISSSAPMKKTGSTALFDYWSISIEPKFKRLRYGFELKAETETLIYAERGFFSSIPNDDVGNFFCFPFIHANDVFKAPSWIKDTVWYQIFPERFANGDRTLNPENTLPWGSAEPTPTNFFGGDFAGIIQNLDYLVKLGISGIYFTPIFKAHSNHKYDTIDYMEIDPQFGTKETFKELVQACHTHGIKVMLDAVFNHSGYFFDKFQDVLENGEQSAYKEWFHIHEFPIKTEPLPNYDTFAFTPYMPKLNTAHPDVKEYLLEVGRYWVKEFNIDGWRLDVANEVDHNFWREFRREIKALNSEVYILGEIWHDALPWLQGDQFDAVMSYPVTNALLSYFANDSIKANEFMKQIIESLHSYSMNVNEAAFHLLDSHDTPRILTTCNGDKNKLKLLYVFHLSFIGSPCIYYGDEVGMDGGMDPDCRKCMVWDTKEQDHLLFTHVQTLISLRKQYKAFGGHGTFQFIEANDKHNYISYTKTYKDETIFFVLNPTNSDITASLPLHVTGKKIINIYTNEEFSAEASVLQVTLPPYGFSILKW

SEQ ID NO: 24985 - protein, 558 aa, Bacillus cereus ATCC 10987
MEKQWWKESVVYQIYPRSFMDSNGDGIGDLRGIISKLDYLKELGIDVIWLSPVYESPNDDNGYDISDYCKIMNEFGTMEDWDELLHEMHERNMKLMMDLVVNHTSDEHNWFIESRKSKDNKYRDYYIWRPGKEGKEPNNWGAAFSGSAWQYDEMTDEYYLHLFSKKQPDLNWDNEKVRQDVYEMMKFWLEKGIDGFRMDVINFISKEEGLPAVETEEEGYVSGHKHFMNGPNIHKYLHEMNEEVLSHYDIMTVGEMPGVTTEEAKLYTGEERKELQMVFQFEHMDLDSGEGGKWDVKPCSLLTLKENLTKWQKALEHTGWNSLYWNNHDQPRVVSRFGNDGMYRIESAKMLATVLHMMKGTPYIYQGEEIGMTNVRFESIDEYRDIETLNMYKEKVIDRGEDIEKIMESIYIKGRDNARTPMQWDDKDHAGFTTGEPWITVNPNYKEINVKQAIQNKDSIFYYYKKLIELRKNNEIVVYGSYDLILENNPSIFAYVRTYGEEKLLVIANFTAEECVFELPEDITYSEAELFIHNYDVENGPIENIPLRPYEAMVFKLK

SEQ ID NO: 24986 - protein, 384 aa, Triticum aestivum
  misc_feature (74)..(74): Xaa can be any naturally occurring amino acid
  misc_feature (307)..(307): Xaa can be any naturally occurring amino acid
  unsure (1)..(384): unsure at all Xaa locations
MSAFVGKYADELIKTAKYIATPGKGILAADESTGTIGKRLASINVENVESNRQALREMLFTAPGALEYLSGVIXLFEETLYQTAADGTPFVDILKAGNVIPGIKVDKGTVDIAGTNGETTTQGLDSLGARCAKYYEAGARFAKWRAVLKIGPGAEPSELAVKQNAQGLARYALICQENGLVPIVEPEILTDGPHDIKACAAATERVLAAVYKSLNDHKVLLEGTLLKPNMVTPGSDSPKVGAEVIAEYTVAALRRTVPPAVPGVVFLSGGQSEEQATQNRDAMNKLPVLKPWALTSPSGRALQQSTXKKWARKKENLADAQAPFLARCKALRGTSEVRGRATAAGTRRVETAVGQYKHVLRHPDQIREPFLDGGMPDSSLKASY

SEQ ID NO: 24987 - protein, 565 aa, Escherichia coli K12
MKSPAPSRPQKMALIPACIFLCFAALSVQAEETPVTPQPPDILLGPLFNDVQNAKLFPDQKTFADAVPNSDPLMILADYRMQQNQSGFDLRHFVNVNFTLPKEGEKYVPPEGQSLREHIDGLWPVLTRSTENTEKWDSLLPLPEPYVVPGGRFREVYYWDSYFTMLGLAESGHWDKVADMVANFAHEIDTYGHIPNGNRSYYLSRSQPPFFALMVELLAQHEGDAALKQYLPQMQKEYAYWMDGVENLQAGQQEKRVVKLQDGTLLNRYWDDRDTPRPESWVEDIATAKSNPNRPATEIYRDLRSAAASGWDFSSRWMDNPQQLNTLRTTSIVPVDLNSLMFKMEKILARASKAAGDNAMANQYETLANARQKGIEKYLWNDQQGWYADYDLKSHKVRNQLTAAALFPLYVNAAAKDRANKMATATKTHLLQPGGLNTTSVKSGQQWDAPNGWAPLQWVATEGLQNYGQKEVAMDISWHFLTNVQHTYDREKKLVEKYDVSTTGTGGGGGEYPLQDGFGWTNGVTLKMLDLICPKEQPCDNVPATRPTVKSATTQPSTKEAQPTP

SEQ ID NO: 24988 - protein, 241 aa, Oryza sativa
  misc_feature (22)..(22): Xaa can be any naturally occurring amino acid
  unsure (1)..(241): unsure at all Xaa locations
HEGLYDSIAAGNFPEWKLFVQXVDPEEEERFDFDPLDDTKTWPEDEVPLRPVGRLVLNRNVDNFFNENEQLAVGPGLVVPGIYYSDDKMLQCRVFAYADTQRYRLGPNYLMLPVNAPKCAHHNNHYDGAMNFMHRDEEVDYYPSRHAPLRHAPPTPITPRPVVGRRQKATIHKQNDFKQPGERYRSWAPDRQERFIRRFAGELAHPKVSPELRAIWVNYLSQCDESLGVKIANRLNVKPSM

SEQ ID NO: 24989 - protein, 188 aa, Arabidopsis thaliana
  misc_feature (60)..(60): Xaa can be any naturally occurring amino acid
  misc_feature (181)..(181): Xaa can be any naturally occurring amino acid
  misc_feature (183)..(183): Xaa can be any naturally occurring amino acid
  unsure (1)..(188): unsure at all Xaa locations
TAARRRQKDTAARRRQKGDESDKTRELCRREKIEKVPHFSFYKSMEKIHEEEGIEPDQLXGDVLYYGDNHSAVVQLHGRPDVEKLIDENRTGGKLIVLDVGLKHCGPCVKVYPTVLKLSRSMSETVVFARMNGDENDSCMEFLKDMNVIEVPTFLFIRDGEIRGRYVGSGKGELIGEILRXSXVRVTY

SEQ ID NO: 24990 - protein, 281 aa, Leccinum aurantiacum
  misc_feature (132)..(149): Xaa can be any naturally occurring amino acid
  misc_feature (259)..(259): Xaa can be any naturally occurring amino acid
  unsure (1)..(281): unsure at all Xaa locations
VNDPFIDLDYMVYMFKYDSVHGRFKGDVHAKEGKLYINGKAITVYAERDPANIKWGAVGADYVVESTGVFTTIEKAAAHLKGGAKKVIISAPSADAPMFVCGVNLDKYDPKYTVISNASCTTNCLAPLAKVXXXXXXXXXXXXXXXXXXTATQKTVDGPSAKDWRGGRAVNGNIIPSSTGAAKAVGKVIPALNGKLTGLSFRVPTNNVSVVDLVVRLEKSASYDEIKKAVKDASESSGLKGIIDYTDESVVSTDFIGNXDSSIFDASGGIMLNPNFVKLIA

SEQ ID NO: 24991 - protein, 274 aa, Leccinum quercinum
  misc_feature (44)..(44): Xaa can be any naturally occurring amino acid
  misc_feature (134)..(154): Xaa can be any naturally occurring amino acid
  unsure (1)..(274): unsure at all Xaa locations
VAVNDPFIDLDYMVYMFKYDSVHGRFKGDVHAKEGKLYINGKAXTVYAERDPANIKWGAVGADYVVESTGVFTTTEKAAAHLKGGAKKVIISAPSADAPMFVCGVNLDKYDPKYTVISNASCTTNCLAPLAKVXXXXXXXXXXXXXXXXXXXXXQKTVDGPSAKDWRGGRAVNGNIIPSSTGAAKAVGKVIPALNGKLTGLAFRVPTNNVSVVDLVVRLEKSASYDEIKKAVKEASESSGLKGIIDYTDESVVSTDFIGNPASSIFDASGGIML

SEQ ID NO: 24992 - protein, 267 aa, Helianthus annuus
MENSEAIEHEHDFSCIDRSMSFQNEDSGDISPQRRIGKGKIEIKRIENTTNRQVTFCKRRNGLLKKAYELSVLCDAEVALIVFSSRGRLYEYANNSVRGTIDRYKKSCLDPPSTGSVAEANAQFYQQEATKLRQQIANLQNQNRQFYRNIMGESLADMPGKELKNLESKLEKAINRIRAKKNELLFAEIEYMQKRELELHNSNQFLRARISENERAQQQHMSLMPGSSGYNDLGPHQSFDGLNDLQTNELQLNNNYSCQDQTPLQLV

SEQ ID NO: 24993 - protein, 481 aa, Sinapis alba
MATTAVIGLNAGKRLLSSSFYYSDVTEKFLSVNDLCSSQYHTRSGITAKKTSSSSSSNYSPSFPSSSRQTQSAKALKESVASSVQPWLPPGSDQELEEDDIDHSVEALLLLQRSMLEKQWNLSFEKTRKKVPVTCSGISARQRRIGAKKKTNVKAVSEVNFQNNLVKGYVKGVISDHVLSHAEVVRLSKKIKSGLRLDEHKSRLTDRLGCEPSDEQLAMSLKISRAELQAWLMECHLAREKLAMSNVRLVMSIAQRYDNMGAEMSDLVQGGLIGLLRGIEKFDSSKGFRISTYVYWWIRQGVSRALVDNSRTLRLPTHLHERLGLIRNAKLRLQEKGITPSIDRIAESLNMSQKKVRNATEAVSKIFSLDRDAFPSLNGLPGETHHSYIADNRLENNPWHGYDALALKDEVSKLISVTLGEREREIIRLYYGLDKECLTWEDISQRIGLSRERVRQVGLVALEKLKHAARKRKMEAMILKN

SEQ ID NO: 24994 - protein, 247 aa, Helianthus annuus
MSFPNESGEMSPQRKLGRGKIEIKRIENTTNRQVTFCKRRNGLLKKAYELSVLCDAEVALIVFSSRGRLYEYANNSVKGTIDRYKKACLDPPSSGSVAEANAQFYQQEAAKLRQQIANLQNQNRQFYRNIMGESLGNMPAKDLKNLEGKLEKGISRIRSKKNELLFAEIEYMPKRENELHNNNQFLRAKIAENERSQQQHMSLMPGSSDYDLVPPHQPFDGRNYLQVNDLQPNNSYSCQDQTPLQLV

SEQ ID NO: 24995 - protein, 274 aa, Leccinum versipelle
  misc_feature (124)..(136): Xaa can be any naturally occurring amino acid
  unsure (1)..(274): unsure at all Xaa locations
PFIDLDYMVYMFKYDSVHGRFKGDVHAKEGKLYINGKAITVYAERDPANIKWGAVGAEYVVESTGVFTTIEKAAAHLKGGAKKVIISAPSADAPMFVCGVNLDKYDPKYTVISNASCTTNCLAXXXXXXXXXXXXXEGLMSTIHATTATQKTVDGPSAKDWRGGRAVNGNIIPSSTGAAKAVGKVIPALNGKLTGLAFRVPTNNVSVVDLVVRLEKSASYDEIKKAVKEASESSGLKGIIDYTDESVVSTDFIGNPASSIFDASGGIMLNPNFV

SEQ ID NO: 24996 - protein, 392 aa, Oryza sativa (japonica cultivar-group)
MMEPAHAPGRDRLSALPDNVLRRIMSFLNARQSVQTCVLSRRWRHLWRSLPRINADYTEFCFACLDEKKEKVQEARFKKFVSTLLLRRDPVPLLDKFWLRYQVSDGNNNEKASAEAGLWISHALQLQTPVVEVLTFQFPLMLDHAVFTSDYLRKLGLSNAYLRMGFFEQLSRGCPQLEDVFLNDCIILDDEISSTTLKTLNIYASRFSEDYRASISTPSLTSLTLYKPDASVPSLKDMKSLVSASIILDDNTDIHELLMSLSGVRNLDLECPQKMVTIAKNTQWCPEFKDLVNLSLGQFCLGSKLYALTVFLKNSPKLEKLTLDPPEVIIDKLEERSFECEHLKIVEVICSEDDSTLLKLVEDIFVTSGMNSLQINRKSSYKQYYSDDFFQI

SEQ ID NO: 24997 - protein, 95 aa, Pyrus communis
MAAVGAVRDNQGVANSVETESLARYAVDEHNKKENDLLEFVRVLDDKVQVVSGTMHYLKIEATEGGKKKVYEAKVWVKPWENFKQVQEFKPVSDS

SEQ ID NO: 24998 - protein, 262 aa, Leccinum versipelle
  misc_feature (11)..(11): Xaa can be any naturally occurring amino acid
  misc_feature (21)..(21): Xaa can be any naturally occurring amino acid
  misc_feature (28)..(28): Xaa can be any naturally occurring amino acid
  misc_feature (121)..(121): Xaa can be any naturally occurring amino acid
  misc_feature (127)..(141): Xaa can be any naturally occurring amino acid
  unsure (1)..(262): unsure at all Xaa locations
VYMFKYDSVHXRFKGDVHAKXGKLYINXKAITVYAERDPANIKWGAVGAEYVVESTGVFTTIEKAAAHLKGGAKKVIISAPSADAPMFVCGVNLDKYDPKYTVISNASCTTNCLAPLAKVXNDKFGXXXXXXXXXXXXXXXQKTVDGPSAKDWRGGRAVNGNIIPSSTGAAKAVGKVIPALNGKLTGLAFRVPTNNVSVVDLVVRLEKSASYDEIKKAVKEASESSGLKGIIDYTDESVVSTDFIGNPASSIFDASGGIMLN

SEQ ID NO: 24999 - protein, 332 aa, Arabidopsis thaliana
MATSTTMSHQAIGSVVSQRPFKASQFLKEPLNNVPMKFRQKRFKIEATASQISVVDNTFLSPSPSKNKPHESKKKSNEAALILIRHGESLWNEKNLFTGCVDVPLTQKGVGEAIEAGKKISNIPVDLIFTSSLIRAQMTAMLAMTQHRRKKVPIILHNESVKAKTWSHVFSEETRKQSIPVIAAWQLNERMYGELQGLNKKETAERYGTQQVHEWRRSYEIPPPKGESLEMCAERAVAYFEDNIKPELASGNNVMIAAHGNSLRSIIMYLDDLTSQEVTTLDLSTGVPLLYIFKEGKFMKRGSPVGSTEAGVYAYTKRLAQYREKLDAAATI

SEQ ID NO: 25000 - protein, 482 aa, Neisseria meningitidis
GSADAEYDVVVLGGGPGGYSAAFAAADEGLKVAIVERYKTLGGVCLNVGCIPSKALLHNAAVIDEVRHLAANGIKYPEPELDIDMLRAYKDGVVSRLTGGLAGMAKSRKVDVIQGDGQFLDPHHLEVSLTAGDAYEQAAPTGEKKIVAFKNCIIAAGSRVTKLPFIPEDPRIIDSSGALALKEVPGKLLIIGGGIIGLEMGTVYSTLGSRLDVVEMMDGLMQGADRDLVKVWQKQNEYRFDNIMVNTKTVAVEPKEDGVYVTFEGANAPKEPQRYDAVLVAAGRAPNGKLISAEKAGVAVTDRGFIEVDKQMRTNVPHIYAIGDIVGQPMLAHKAVHEGHVAAENCAGHKAYFDARVIPGVAYTSPEVAWVGETELSAKASARKITKANFPWAASGRAIANGCDKPFTKLIFDAETGRIIGGGIVGPNGGDMIGEVYLAIEMGCDAADIGKTIHPHPTLGESIGMAAEVALGTCTDLPPQKK

SEQ ID NO: 25001 - protein, 474 aa, Oryza sativa (japonica cultivar-group)
METTSQDSQVIMGRYKLGRLLGRGTFAKVYKAYKLATGEAVAIKVFDKEAVQRSGTVEQVKREVDVMRRVHHRHVIRLHEVMATRSRIYFVMEYASGGELFTRLSRSPRFPEPVARRYFQQLITAVEFCHSRGVYHRDLKPENLLLDARGDLKVTDFGLSALDGGLRGDGLLHTTCGTPAYVAPEVLLKRGYDGAKADIWSCGVILFVLLAGYLPFNETNLVILYRNITESNYRCPPWFSVEARKLLARLLDPNPKTRITISKIMDRPWFQQATCPLGDMSLVASAPSVLLARKEASQQHDDEEDDGFAREKKKRSNVIMSSPVIDVRPSSMNAFDIISRSRGLDLSKMFDAEERRSEARFSTRETTTAIVSKLEEIAEAGRFSFKLKEKGRVELEGSQDGRKGALAIEAEIFKVAPEVHVVEVRKTGGDSPDFRDFYKQELKPSLGDMVWAWQGGDSPPLVPAAGRRPITKRS

SEQ ID NO: 25002 - protein, 718 aa, Zea mays
RGRGRGPPGMQQVDEHKEEQRQSIHWERFLPVKTLRVLLVENDDSTRQVVSALLRKCCYEVIPAENGLHAWRYLEDLQNNIDLVLTEVFMPCLSGIGLLSKITSHKICKDIPVIMMSTNDSMSMVFKCLSKGAVDFLVKPLRKNELKNLWQHVWRRCHSSSGSESGIQTQKCAKLNTGDEYENGSDSNHDDEENDDGDDDDFSVGLNARDGSDNGSGTQSSWTKRAVEIDSPQPISPDQLVDPPDSTCAQVIHPRSEICSNKWLPTANKRNVKKQKENKDESMGRYLGIGAPRNSSAEYQSSLNDVSVNPIEKGHENHMSKCKSKKETMAEDDCTNMPSATNAETADLISSIARNTEGQQAVQAVDAPDGPSKMANGNDKNHDSHIEVTPHELGLKRSRTNGATAEIHDERNILKRSDQSAFTRYHTSVASNQGGARYGESSSPQDNSSEAMKTDSTCKMKSNSDAAPIKQGSNGSSNNDVGSSTKNVAARPSGDRERVASPLAIKSTQHASAFHTIQNQTSPANLIGEDKADEGISNTVKMSHPTEVPQGCVQHHHHVHYYLHVMTQKQPSTDRGSSDVHCGSSNVFDPPVEGHAANYSVNGGVSVGHNGCNGQNGSSAVPNIARPNIESINGTMSQNIAGGGIVSGSGSGNDMYQNRFLQREAALNKFRLKRKDRNFGKKVRYQSRKRLAEQRPRVRGQFVRQSEQEDQTAQGSER

SEQ ID NO: 25003 - protein, 541 aa, Oenococcus oeni
MTDPVSILNDPFINKGTAFTEAEREELGLNGLLPAKVQALQEQVDQTYAQFQSKVSNLEKRLFLMEIFNTNHVLFYKLFSQHVVEFMPIVYDPTIADTIENYSELFVEPQGAAFLDINHPENIQSTLKNAANGRDIKLLVVSDAEGILGIGDWGVQGVDIAVGKLMVYTVAAGIDPSTVLAVVIDAGTNNEKLLKDPMYLGNKFNRVRGDKYYDFIDKFVNHAESLFPNLYLHWEDFGRSNASNILNSYKDKIATFNDDIQGTGIVVLAGVLGALKISGQKLTDQTYMSFGAGTAGMGIVKQLHEEMVEQGLSDEEAKKHFFLVDNQGLLFDDDPDLTPEQKPFAAKRSDFKNANQLTDLQAAVEAVHPTILVGISTHPNSFTEEIVKDMSGYTERPIIFPISNPTKLAEAKAEDVLKWSNGKALIGTGVPVDDIEYEGNAYQIGQANNALIYPGLGFGAIAAQSKLLTPEMISAAAHSLGGIVDTTKVGAAVLPPVSKLADFSRTVAVAVAKKAVEQGLNRQPIDDVEKAVDDLKWEPKY

SEQ ID NO: 25004 - protein, 327 aa, Yersinia pseudotuberculosis IP 32953
MTKTNLITGFLGCGKTTTIRHLLAQKPEHEKWAVLVNEFGEIGIDGALLADSGAVLKEIPGGCMCCVNGLPMQIGLNMLLQQAKLDRLLIEPTGLGHPKQILSLLTSDIYQPWIDLRATLCLLDARQLSEPRYTENENFRDQLAAADIIVANKQDTYRSADNAVLQQWQQKQPLSRPLYHSEYGKLDVALLDQPHRNKDELPSGTHHHGTSQPKGLAALRLKGAEPWRRALNRGQGYLSCGWVFDANTVFDTVPLLEWVRLNPAERVKGVMRIPEGTLMVNRQGNDLQIDTRQIPPLDSRIELISATDIDWNVLQHDLLKIRLRNGV

SEQ ID NO: 25005 - protein, 449 aa, Glycine max
  misc_feature (54)..(54): Xaa can be any naturally occurring amino acid
  misc_feature (204)..(204): Xaa can be any naturally occurring amino acid
  unsure (1)..(449): unsure at all Xaa locations
MEQKGGVLMQRYELGRLLGQGTFAKVYHARNIITGMSVAIKIIDKDKILKVGMXMRLIRHPHVVELYEVMASKTKIYFVMEHAKGGELFNKVVKGKLKEDDARKYFQQLISAVDYCHSRGVCHRDLKPENLLLDENGNLKVTDFGLSALAESKCQDGLLHTTCGTPAYVAPEVINRKGYDGIKADIWSCGVILYVLLAGHLPFXMTPRGEFKFPNWFAPDVRRLLSKILDPNPKTRISMAKIMESSWFKKGLEKPTITQNEDEELAPLDADGVFGACENGDPIEPAKNSKPCNNLNAFDIISYSSGFDLSGLFEETDRKKEERFTSDKPASIIISKLEEICRRLRLKVKKKDGGLFKLEGSKEGRKGPLGIDAEIFEITPVFHLVELKKSSGDTLEYQKLLKQEVRPALKDIVWNWQGEQPQPLQHGVVQKEEQPSYPGISEVVPQSTA

SEQ ID NO: 25006 - protein, 520 aa, Oryza sativa (japonica cultivar-group); identical to SEQ ID NO: 1300

SEQ ID NO: 25007 - protein, 541 aa, Oenococcus oeni
MTDPVSILNDPFINKGTAFTEAEREELGLNGLLPAKVQALQEQVDQTYAQFQSKVSNLEKRLFLMEIFNTNHVLFYKLFSQHVVEFMPIVYDPTIADTIENYSELFVEPQGAAFLDINHPENIQSTLKNAANGRDIKLLVVSDGEGILGIGDWGVQGVDIAVGKLMVYTVAAGIDPSTVLAVVIDAGTNNEKLLKDPMYLGNKFNRVRGDKYYDFIDKFVNHAESLFPNLYLHWEDFGRSNASNILNSYKDKIATFNDDIQGTGIVVLAGVLGALKISDQKLTDQTYMSFGAGTAGMGIVKQLHEEMVEQGLSDEEAKKHFFLVDKQGLLFDDDPDLTPEQKPFAAKRSDFNNANQLTNLQAAVEAVHPTILVGTSTHPNSFTEEIVKDMSGYTERPIIFPISNPTKLAEAKAEDVLKWSNGKALIGTGVPVDDIEYEGNAYQIGQANNALIYPGLGFGAIAAQSKLLTPEMISAAAHSLGGIVDTTKVGAAVLPPVSKLADFSRTVAVAVAKKAVEQGLNRQPIDDVEKAVDDLKWEPKY

SEQ ID NO: 25008 - protein, 332 aa, Prosthecochloris aestuarii DSM 271
MHKKVLVTGATGFIGSRLVRKLVSGDNEVYALVRKSSSLVSFSGILDRVRLVEGDVTDPDSLKKAFEGMDRIYHSAGYTYMGGDSSRDATLNAINVQGSRNVFDAALEAGVERVVHVSSITAVGFSSNRKPLNESFTWNFDQIQLKYAETKHLAEEEAQKAVARGLDCVIVNPAFVFGAGDVNFNAGRIIKDVYEGKMPVYPLGGVSVVDVEIVVETTIRAMEVGRCGERYIIGGDNISYKQLAGTISSVTGASAFRFPLPFWMASPLLYLMKRLNFRKKVSKLFNLSMFRVASEFLYFDSSKAIRELGMKSEPHEFSIRRAFEWYRKEGLL

SEQ ID NO: 25009 - protein, 310 aa, Erwinia carotovora subsp. atroseptica SCRI1043
MTTTNIAVIGECMIELSQKGTDLNRGFGGDTLNTAVYIARQVNADKLGVHYVTALGTDSFSTEMVAAWQKEGVKTDLIQRLDNKLPGLYFIETDDSGERTFYYWRNDAAARYWLDSPEAEKIGQGLAQFDYLYLSGISLAILNAESRQRLLALLRACRANGGKVIFDNNYRPRLWQSKEETQQSYTDILSCTDIAFLTLDDEDMLWGTKPLEAVLERTHGLGVNEVVIKRGADSCIVSERGQALVDVPAIKLSKEKVVDTTAAGDSFSAGYLAVRLNGGSTQEAAQRGHLTASTVIQYRGAIIPLEAMPA

SEQ ID NO: 25010 - protein, 363 aa, Mycobacterium avium subsp. paratuberculosis K-10
MAQTSQPPMTVDLQPVQLVAADGTPTPEHRYSRELPAETLSWLYEMMVLTRELDGEFVNLKRQGQLALFASCRGQEAAQVGATACLRKTDWLFPQYRELGAFLVRGIPPGNVGAVWRGTWHGGLGFTDKCCAPLSIPIGTQSLHAVGAAMAAQRLGEDSVTIAFLGDGATSVGDVHEALNFAAVFRTPCVFFVQNNQWAISLPVAKQTAAPSLAHKAIGYGMPGIRVDGNDVLACYAVTAEAAARARAGRGPTLIEAITYRLGPHTTSDDPTRYRTQDEVDHWAALDPIPRYRSYLQGQGLWSERLEERVIGRATRMRAELRDAVFDAPDLDVDEVFTAVYAEITPELQAQRRALRTELEKSD

SEQ ID NO: 25011 - protein, 305 aa, Panicum maximum
MAFVMGARIAGFMLLLVLMVEAGVYAGTGSQHVDANEWSMVPGVLGEMIQRGMTSRLEDYKYQPPAHDRSCTLLYEATARCSSTSMLFFNEHDVLEGKTFPMYFPPSVTAKLGFLQRRVVQEIPFTSARLADILALFHIPPGSSEAADVATTLGLCDAAAHGDVVRCVTSPDDMVGRAAAVLGTSNMQVLAPSIPTGGMSLQPYTVRAVKPVDGSDFVGCHPELYPYSVYRCHTSVQTGTYVMEMQSSYGNGGALKLVAVCHRNTTSWDPEHVSFKVLASKPGGLPICHFVPYGHVIFGKRAPDA

SEQ ID NO: 25012 - protein, 462 aa, Ustilago maydis 521
MAPTATASVGAAVASIPTTLKTVAHAVSATASTSASTLSTSEVIHKEAEYGAHNYHPLPVVFDRAQGAHVWDPEGNQYLDFLSAYSAVNQGHCHPAIVGALVAQAQKLTLSSRAFYNSAFAPFAEKVTKTFGYEMVLPMNTGAEAVETALKLARKWGYMKKRIPEGKARLLSVSGNFHGRTLGVISMSTDPESRTGFGPFLDRVGPGVDDMTIRYDNADDLEKVLDKYGHEVAAFLVEPIQGEAGIVVPSDGYLKRVQELCRKHNVLFICDEIQTGLGRTGKMLCHQHDNVRPDIVTLGKALSGGVYPVSAVLADKEVMLCIKPGEHGSTYGGNPLGCAVASAAIDVLVNENLCDRAEQLGARFRAQLRDIQHPLLASVRGRGLLNAIVIDEQKSTKRRSAWQLCLLLKSKGLLAKPTHVNIIRLAPPLVITEADLDRGVEIIKQALDELDSLDSIPGDDQH

SEQ ID NO: 25013 - protein, 423 aa, Thermus thermophilus HB8
MKKSKRKNAQAQEAQETEVLVQEEAEELPEFPEGEPDPDLEDPDLTLEDDLLDLPEEGEGLDLEEEEEDLPIPKISTSDPVRQYLHEIGQVPLLTLEEEVELARKVEEGMEAIKKLSEITGLDPDLIREVVRAKILGSARVRHIPGLKETLDPKTVEEIDQKLKSLPKEHKRYLHIAREGEAARQHLIEANLRLVVSIAKKYTGRGLSFLDLIQEGNQGLIRAVEKFEYKRRFKFSTYATWWIRQAINRAIADQARTIRIPVHMVETINKLSRTARQLQQELGREPTYEEIAEAMGPGWDAKRVEETLKIAQEPVSLETPIGDEKDSFYGDFIPDEHLPSPVDAATQSLLSEELEKALSKLSEREAMVLKLRKGLIDGREHTLEEVGAFFGVTRERIRQIENKALRKLKYHESRTRKLRDFLD

SEQ ID NO: 25014 - protein, 692 aa, Rubrivivax gelatinosus PM1
MNATPDTLALRSQCANAIRALAMDAVQAANSGHPGMPMGMADIAEALWRHHLKHDPADPKWIDRDRFVVSNGHGSMLLYALLHLSGYDLPIDELKRFRQLHSRTPGHPEIDVTPGVETTTGPLGQGISNAVGMALAEKLLADEFNRPGHAVIDHRTYVFLGDGCLMEGISHEACSLAGTWQLNKLIAFYDDNGISIDGDVKGWFSDDTPGRFEAYGWTVLRDVDGHDFAALDRAIAQAQASDKPVLVCCKTRIGQGSPNRAGTAKAHGEALGEAEIALTRQALGWTAAPFDIPEAIEQAWSALEPGARRRRDWNDRFGAYAKAYPELAAELLRRLSATPALDHRTEAALASAIEGAEARHAAVATRKASQDVLQEVGPAMPELLGGSADLTGSNLTDWKGHRPLKGRGTGNHVHYGVREFGMAAIMNGVALHGGYRPFGGTFLTFADYARNAIRMSALMHLPVVYVFTHDSIGLGEDGPTHQPIEHASSLRLIPNVDVWRPADATETAVAWRQSLRRDDGPSCLLLSRQALPHGGDGRERIENIARGAYVLRRPEGERVALLASGSEIGIALQAAALLAADGIPARVVSVPCLDAFDRQDAAYRSAVIPRHLPRLAIEAGSTGLWWKYVGERGDVIGLDRFGESAPAAQLFKLFGLTAEAAAERARQLVRPQGAIAADSEFGTELNAVLSSN

SEQ ID NO: 25015 - protein, 400 aa, Bacillus clausii KSM-K16
MEIGVEAMEGIATKKLETLQAQVIEWRRHLHANPELSFEEVETPAFIVQKLKEIGFTDIREHVGGRGVVAKLHGKKPGPTIAFRADFDALPIHEENDVSYASTKPGVMHACGHDGHTAALLGVAATLFDQVDELRGTIVFLFQHAEEKPPGGAREMIADGCLEGVDAVFGAHVSSQIPLGQINASPGAVMAAVDAFTVHIQGKGGHGAHPHSTIDSIVIGSQLVNDLQTIVSRRINPMDTAVVTVGVFQAGTAFNVIADTARIEGTVRTFQEETRAFIEEEIRAIVSGKEHGGHVTCTIDYLNGYPPLVNAEKETEVIRDLAKGVFGEENVLMLPAALGGEDFAYYLEEKPGCFFHVGGRTEEERTQFPHHHPRFDFDERALFHIGEMFLAIANQYLRSH

SEQ ID NO: 25016 - protein, 399 aa, Lactobacillus plantarum WCFS1
MTLQAQLMQQLTAAEPEMIKIRRHLHAHPEISFHEEQTAAYIKAFYRELGVSTTAYGDGYGFVVDIDSGHPGPQLALRADFDGLAIQEDNHLSFKSQNANVMHACGHDGHTAYLMVLAKTLLGLKNQLRGRVRIIHQPAEEVSPGGAKGMLAAGVLDGIDNVIGLHVMSTMPTGSIAYHLNATQTGRANFTVTFTGKGGHASMPHLSNDAIVAGSYFVTALQTVVSRRIDPFDTGSVTIGSFDGVGSFNAIKAQVTLKGDVRIMDETTRQTIRDQITKIANGVGATFGVQVALDYDDNYPVLMNDATLTQRVITSIQAAQIPEITKIFDCGPQDPSEDFAYFAQAKPSTFIYAGCQTAPGETHPHHSPDFMMNEDCLLIAAKAVGTAALDYLMNASSDH

SEQ ID NO: 25017 - protein, 211 aa, Dechloromonas aromatica RCB
MLGANDGIVSTASLILGVAAAGVDAKAILISGVAGLVAGASSMAAGEYVSVSSQSDTERADLTREKEELATDPAHEHAEMAAIYVKRGLDPALAAVVATQLTAHDALGAHARDELGITDTSTARPLQAALSSALAFSLGAALPLLVVLLAPGHWLALAVAGSALLFLAVLGALSAAVGGAPVLMATLRVTLWGALAMATTAGIGALFGVSA

SEQ ID NO: 25018 - protein, 227 aa, Leccinum variicolor
  misc_feature (18)..(18): Xaa can be any naturally occurring amino acid
  misc_feature (127)..(129): Xaa can be any naturally occurring amino acid
  unsure (1)..(227): unsure at all Xaa locations
PFIDLDYMVYMFKYDSVXGRFKGDVHAKDGKLYINGKAITVYAERNPADIKWGSVGAEYIVESTGVFTTIEKAAAHLKGGAKKVIISAPSADAPMFVCGVNLDKYDSKYTVISNASCTTNCLAPLAXXXNDKFGILEGLMSTIHATTATQKTVDGPSAKDWRGGRAVNGNIIPSSTGAAKAVGKVIPALNGKLTGLSFRVPTNDVSVVDLVVRLEKSASYDDIKAAV

SEQ ID NO: 25019 - protein, 439 aa, Arabidopsis thaliana
MNRPKVQRRVGKYEVGKTLGQGTFAKVRCAVNTETGERVALKILDKEKVLKHKMAEQIRREICTMKLINHPNVVRLYEVLASKTKIYIVLEFGTGGELFDKIVHDGRLKEENARKYFQQLINAVDYCHSRGVYHRDLKPENLLLDAQGNLKVSDFGLSALSRQVRGDGLLHTACGTPNYAAPEVLNDQGYDGATADLWSCGVILFVLLAGYLPFEDSNLMTLYKKIIAGEYHCPPWLSPGAKNLIVRILDPNPMTRITIPEVLGDAWFKKNYKPAVFEEKEEANLDDVDAVFKDSEEHHVTEKKEEQPTSMNAFELISMSRALDLGNLFEEEEGFKRETRFAAKGAANDLVQKIEEASKPLGFDIQKKNYKMRLENVTAGRKGNLRVATEIFQVSPSLHMIEVRKTKGDTLEFHKFYKKLSTSLNDVVWKSGESSGLSK

SEQ ID NO: 25020 - protein, 126 aa, Oryza sativa (japonica cultivar-group)
MAGLSVLLETHKNDHHPNMRPPQIISKATLHSHPETMSSSSPATATTATMSSFLQRCFLCRRELADGKDIYMYRGDRAFCSVDCRCKQIFMDEDAAAAGGNCAAVRAGRRRAAVPREQTGAGGFAY

SEQ ID NO: 25021 - protein, 135 aa, Brassica napus
MLTETHLNVAGAAGTGMNKERLMKMAGAVRTGGKGTMRRKKKAVHKTVTTDDKRLQGTLKRVGVNTIPAIEEVNIFKDDLVIQFLNPKVQASIAANTWVVSGSPQTKKLQDVLPGAEEMLGPVAAARPIRPAEEM

SEQ ID NO: 25022 - protein, 498 aa, Yersinia pseudotuberculosis IP 32953
MSEYHEKNNALFKSITALDGALFINGEFRKGAGGRLPVENPATGKVIGHLAAATPEEIEEAVAAARRAFPAWAAERPKARANALHRLGDLIAADALNMARIMTIEQGKPVNEAQGEILKLAEICHFYGEEATRVQGDVVPNDPPGFQSLVVREPVGVVGAITPWNYPAELVGWKLCASLAAGCTLIIKPAELTPYTALAIAEKCLEAGIPAGVVNVLTGKGEQVGQALVEHPQVDKIAFTGSSAVGLHIQQSCPQVKRLSLELGGNGPMVVAACADVAAAVKGAVRRSFRNCGQVCIAINRIYVHRSCYRAFVSKMGVATNGLRLGNGLDDPAADLGAMASVEPLNKTRAHLEDALAKGARLVAGGKAPEGVEYAKGHFFRPTVLADCTHQMRVMTEETFGPLVGLAPFDDIDEVISRANDTPYGLAAYIYARDLAAIHRLSAALDYGNVAINNVDASMMNAPYGGRKQSGVGYEHGREGLLEYFNFKHIRLYHGIGD

SEQ ID NO: 25023 - protein, 342 aa, Triticum aestivum
  misc_feature (202)..(202): Xaa can be any naturally occurring amino acid
  misc_feature (210)..(210): Xaa can be any naturally occurring amino acid
  unsure (1)..(342): unsure at all Xaa locations
MSVSNIGMMDGAYFVGRNEILAWINTTLQLSLAKVEEAASGAVACQLMDAAHPGAVPMHKVNFDAKNEYDMIQNYKVLQDVFNKLKITKHIEVNKLIKGRPLDNLEFMQWMKRYCDSVNGGFMTSYNASERRESSKGGKDTNRRTSGTSQAPAKSASATHKAQPPPHAAKRANGHASNAPQRCAKPPPAAAPAYDAQMTELXLLVDSAEXERDFYFSKLRDVEILCQSPEVEHLPIVKAIQKILYASEDDPSTVAEAQAEMVAQQNQMQQQPMLSPILEASEAPSITPKDSSEESLRQEAAAAHKRKSISDLEEFEMGSSSRMRLSDVSDVQLCGSPLMSFT

SEQ ID NO: 25024 - protein, 517 aa, Yersinia pseudotuberculosis IP 32953
MQALLGIDIGTSGCKALLIGIDGAVIAADTASYPLSQPQLGWAEQDPELWVEGARRAVAGALAKAPTLELLCVGLSGQMHGLVSLDAGHQVLRPAILWNDQRNSAECEQITEAAGGLKGLLAATNNRMLVGYTGGKIVWMQQHEPDLFARMTTVLNPKDYLRLRLTGEVATEVSDASGTGLFDVRARQWASDLIENVGIDRALLPPVFESQVISGQVSAVGAELFGIPKGTPVAGGGGDAVIQTFGSGVIAPGELQTTIGTAGILAAVLDTPQANPDGRLQVFCHVVADKWHCMGVSLNAGGAMSWFRDTFYVGVNAAVPSFDQFTPSDQITPSFEQIVAEAAASPAGARGLLFLPYLNGERCPHPDPAARGAFIGLTACHHRGDVARAVMEGVVHALVDMHTLMKPLGINGRVVKTSGGGARSPLWRQMQADIFGCDVLTTKGAAEGAAFGAALVAGLAIGVWPDATSATANCRIITRDPPNPATAAVVAEAQRIYRTLYPALRETFAELGDPTFM

SEQ ID NO: 25025 - protein, 260 aa, Arabidopsis thaliana
MAEEYKNTVPEQETPKVATEESSAPEIKERGMFDFLKKKEEVKPQETTTLASEFEHKTQISEPESFVAKHEEEEHKPTLLEQLHQKHEEEEENKPSLLDKLHRSNSSSSSSSDEEGEDGEKKKKEKKKKIVEGDHVKTVEEENQGVMDRIKEKFPLGEKPGGDDVPVVTTMPAPHSVEDHKPEEEEKKGFMDKIKEKLPGHSKKPEDSQVVNTTPLVETATPIADIPEEKKGFMDKIKEKLPGYHAKTTGEEEKKEKVSD

SEQ ID NO: 25026 - protein, 392 aa, Prochlorococcus marinus subsp. pastoris str. CCMP1986
MKAMILAAGKGTRVQPITHIIPKPMIPILQKPVMEFLLELLKEHGFKEIMVNVSHLAEEIENYFRDGQRFGVEIAYSFEGRIEDGEMIGDALGSAGGLKKIQDFQNFFDETFVVLCGDALVDLDLTEAVKNHKKKGAIASLITKKVTREQVSSYGVVVSDENGRIKAFQEKPDVEDALSDSINTGIYLFEPEIFNYIPSGDKFDIGADLFPKLVEMDLPFFALPMDFEWVDIGKVPDYWSAIRNVLLGKVRQVEIPGKEIKPGVFTGLNVAANWDKVNIKGPVYIGGMTRIEDGATIIGPSMIGPSCCICEGATIDNSIIFDYSKIGKGVQLVDKLVFGRYCVGKNGDHFDLKDASLDWLITDSRRLDLTEPSPQQKAMAELLGTDLINIPD

SEQ ID NO: 25027 - protein, 631 aa, Prosthecochloris aestuarii DSM 271
MLSDHAINTIESPNKPLYSKTSSRMGLIYSDFSTLPDLFNKVFTHYKGQPDKFPLARKVNGKYEPISYDSLREDVSDLAAFLKDKGIEPGDRVAILSENRPGWYLADMAILSIGAIDVPLYPSLPPNQIEYILKDSGSKVIIVSNMLQLGKIISVWQDLPELDSIIVMNRLEEPEEGVIELSEAKKRGKKILAETPDFVSYQMIKPDDIATIIYTSGTTGVPKGVMLTHRNICENIKSCSTIIRLDESDRSLSFLPLSHAYERTGGYYLLFACGAAIYLAESIETVSLNIAEAKPTIIFTVPRLFDRIRTNILKQIANESPVKQKIFNWACSTGMQYHKSSEKGKISPTLTLQHKVAEKLVYHKISQKFGGSLRFFVSGGAALPQKVGEFFQGLGITILEGFGLTETSPVTNVNRPENVKFGTVGPVVNNVEISIASDGEILFRGPSIMKGYWNDEAATKEVIYDGWFHTGDIGELDEDGYLRITDRKKHIIVTSGGKNIAPLPIEHLIAESPYVDQVMVVGEKRPFLTALIVPNYNELKNYAEENDISSASGSELLKDKQINKLFENLLRTVSRQLATHEKVRKFLLIPEQFSIENGQLTPTLKLKRRAISSKFEKEINSLYKAMVYNTE

SEQ ID NO: 25028 - protein, 443 aa, Anabaena variabilis ATCC 29413
MQLVQWIYQPLQLMEASAKAHGDCFTLWLTNKRPIVFLSNPQAIQELFTTPLEQLDARGTAQVLQPLLGENSLLLLSGETHQRQRKLLTPPFHGDRMRAYGDIITNITQEVISKWQLGEPFSVRDSMQEITLRVILQAVFGLREGERYTQLQKRLCDILDLSGSALRSTLSFLPALQIDLGSWSPWGHFLRQRAAIDQLLYAEIQDRRDHPDPSRTDILSLMMAARDENGEAMTDIELRDELMTLLVAGHETTASALTWALYWIHKLPQVREKLLAELDNFGDNGDVNEITRLPYLTAVCQETLRIYPIAMVTIPRIVKTTLEIGGHQFAPGTMLVGCIYLMHRRPDLYPQPQEFKPERFLEKQYSLYEYLPFGGSNRRCVGMAFALYEMKLVLATVLANMDLALVDNYPVKPTRRGVTLAPSGGKWLIATGQHQKVKSPVEV

SEQ ID NO: 25029 - protein, 236 aa, Cryptococcus neoformans var. neoformans JEC21
MPFHAEPLKPSEEIDMDLGHSVAAQKFKEIREVLEGNRYWARKVTSEEPEFMAEQVMGQAPNFLWIGCADSRVPEVTIMARKPGDVFVQRNVANQFKPEDDSSQALLNYAIMNVGVTHVMVVGHTGCGGCIAAFDQPIPTVENPGATPLVRYLEPIIRLKHSLPEGSDVNDLIKENVKMAVKNVVNSPEAWEKARKGEFREVFVHGWLYDLSTGNIVDLNVTQGPHPFVDDRVPRT

SEQ ID NO: 25030 - protein, 551 aa, Mesorhizobium loti MAFF303099
MAAKDVKFSRDARERMLRGVNILADAVKVTLGPKGRNVVIDKSFGAPRITKDGVTVAKEIELEDKFENMGAQMVREVASKTNDIAGDGTTTATVLAQSIVQEGHKAVAAGMNPMDLKRGIDLAVSEVVAALGKAAKKIKTSEEVAQVGTISANGDESVGKMIAEAMQKVGNEGVITVEEAKTAETELEVVEGMQFDRGYLSPYFVTNADKMVADLEDAYILLHEKKLSNLQAMLPVLEAVVQTSKPLLIISEDVEGEALATLVVNKLRGGLKIAAVKAPGFGDRRKAMLEDIAILTGGQVISEDLGIKLENVGLNMLGRAKKVSISKENTTIVDGAGKKAEIQGRVAQIKQQIEETTSDYDKEKLQERLAKLAGGVAVIRVGGATEVEVKEKKDRVDDALNATRAAVEEGIVAGGGVALLRASANIKAAGANADQAAGINIVRRALQAPARQIASNAGAEASIVAGKILENKGATFGYNAQTGEYGDMIAMGIVDPVKVVRTALQDAASVAGLLVTTEAMIAEAPKKESAGGGMPGGMGGGGMGGMGGMDF

SEQ ID NO: 25031 - protein, 143 aa, Shewanella sp. ANA-3
MAIERTFSIIKPDAVAKNHIGAIYNRFETAGLKIVAAKMLHLTKEQAEGFYAEHSERGFFGALVAFMTSGPIMVQVLEGENAVLAHREILGATNPAQAAPGTIRADFAESIDENAAHGSDALESAAREIAYFFSAEELCPRTR

SEQ ID NO: 25032 - protein, 98 aa, Mesorhizobium loti MAFF303099
MAKSKFRPLHDRVVVRRVESESKTAGGIIIPDTAKEKPQEGEIIAVGSGARDESGKLVPLDVKAGDRILFGKWSGTEVKLNGEDLLIMKESDIMGIIG

SEQ ID NO: 25033 - protein, 208 aa, Prochlorococcus marinus subsp. pastoris str. CCMP1986
MKDFLQKVNSYIKEAFSAGKYLYDGFTVTFDHLRRRPVTVQYPYEKLIPSERYRGRIHYEFDKCIACEVCVRVCPINLPVVDWVMNKETKKKELRNYSIDFGVCIFCGNCVEYCPTNCLSMTEEYELATFDRHNLNFDNIALGRLPTNVTTDPSVKPLRELAYLPKGVMDPHEVPPSDVRVGKLPEEVYDWMKPKLNDIKNPTVEPNK

SEQ ID NO: 25034 - protein, 506 aa, Thermus thermophilus HB8
MPASSLDELVALCKRRGFIFQSSEIYGGLQGVYDYGPLGVELKNNLKQAWWRRNVYERDDMEGLDASVLTHRLVLHYSGHEATFADPMVDNRITKKRYRLDHLLKEQPEEVLKRLYRAMEVEEENLHALVQAMMQAPERAGGAMTAAGVLDPASGEPGDWTPPRYFNMMFKTYVGPVEDEASLAYLRPETAQGIFVNFKNVLDATSRKLPFGIAQIGKAFRNEITPRNFIFRVREFEQMEIEYFVRPGEDEYWHRYWVEERLKWWQEMGLSRENLVPYQQPPEELAHYAKATVDILYRFPHGLEELEGIANRTDFDLGSHTKDQEALGITARVLRNEHSTQRLAYRDPETGKWFVPYVIEPSAGVDRGVLALLAEAFTREELPNGEERIVLKLKPQLAPIKVAVIPLVKNRPEITEYAKRLKARLLALGLGRVLYEDTGNIGKAYRRHDEVGTPFAVTVDYDTIGQSKDGTTRLKDTVTVRDRDTMEQIRLHVDELEGFLRERLRW

SEQ ID NO: 25035 - protein, 233 aa, Leccinum snellii
  misc_feature (1)..(1): Xaa can be any naturally occurring amino acid
  unsure (1)..(233): unsure at all Xaa locations
XFIDLDYMVYMFKYDSVHGRFKGDVHAKDGKLYINGKAITVYAERNPADIKWGSVGAEYIVESTGVFTTIEKAAAHLKGGAKKVIISAPSADAPMFVCGVNLDKYDSKYTVISNASCTTNCLAPLAKVINDKFGILEGLMSTIHATTATQKTVDGPSAKDWRGGRAVNGNIIPSSTGAAKAVGKVIPALNGKLTGLSFRVPTNDVSVVDLVVRLEKSASYDDIKAAFKEASES

SEQ ID NO: 25036 - protein, 568 aa, Zea mays
MTTSSSGSIEAPANSRPGSFAFASTSTSTSTSFTDMLGGSTDAAGGASRYKAMTPPSLPLSPSSFFSNNPGGLNPADFLDSPALFSSSIFTSPTTNAFASQQFSWLATSGAEQSGKDERRPSSYPDFSFQTAPTTEEAVRTTTTFQPPIPAASLGEEAYRSQQQQPWAYQQQQPGMDAGSSQQAAPYGEPFQAASSDAATMAPHVPASGGYSHQAQQSQRQSSDDGYNWRKYGQKQMKGSENPRSYYKCTFPGCPTKKKVERSLDGQITEIVYRGTHNHAKPQNTRRNSSAAAQLLQSGGGDASEHSFGGMLGTPVATPENSSASFGDEEAGVGSPRAGGNAGGDEFDEDEPDSKRWRKDGDGVGEGISMAANRTVREPRVVVQTMSDIDILDDGYRWRKYGQKVVKGNPNPRSYYKCTTPGCPVRKHVERACHDLRAVITTYEGKHNHDVPAARGSAALYRPAPPPADTAGHYLGGAAGAAQTGMAYQLAGQQYGFGGQLGSFGLSGAPAQSGGGGFAFSSGFDNPMGSYMSQHQQQQRQNDAMHASRAKEEPREDMFFPTSLLYTD

SEQ ID NO: 25037 - protein, 232 aa, Plantago major
MQIFVKTLTGKTITLEVESSDTIDNVKAKIQDKEGIPPDQQRLIFAGKQLEDGRTLADYNIQKESTLHLVLRLRGGMQIFVKTLTGKTITLEVESSDTIDNVKAKIQDKEGIPPDQQRLIFAGKQLEDGRTLADYNIQKESTLHLVLRLRGGMQIFVKTLTGKTITLEVESSDTIDNVKAKIQDKEGIPPDQQRLIFAGKQLEDGRTLADYNIQKESTLHLVLRLRGGLTGF

SEQ ID NO: 25038 - protein, 283 aa, Leccinum brunneogriseolum
  misc_feature (144)..(159): Xaa can be any naturally occurring amino acid
  unsure (1)..(283): unsure at all Xaa locations
INIVAVNDPFIDLEYMVYMFKYDSVHGRFKGDVHAKDGKLYINGKAITVYAERDPANIKWGAVGAEYVVESTGVFTTIEKAGAHLKGGAKKVIISAPSADAPMFVCGVNLDKYDPKYTVISNASCTTNCLAPLAKVINDKFGIXXXXXXXXXXXXXXXXTVDGPSAKDWRGGRAVNGNIIPSSTGAAKAVGKVIPTLNGKLTGLAFRVPTNDVSVVDLVVRLEKSASYDEIKAAVKAASESPDLKGIIEYTDEALVSTDFTGHPASSIFDASGSIMLNPNFVK

SEQ ID NO: 25039 - protein, 439 aa, Rhodospirillum rubrum
MTNPARARTLPAGASLPALALLVLAGLGLGAPAIAQESLASPLPGPLTDPALWPVPLPLLMQGLLVMGLLAGLTLFQSGLVRPGASGAQAIKGICGSALAVLAFFFIGSNVLMVGVNGGFHGTFAFFPLPVEGATPDAMAEWFLRAPFAALPVLIVAGALAERLRLWPFMIFAVVLAAVLGPIAGSWSWGGGWLDRLGFVDIGGATVLHSAAGWAALVGAVLLGARKGKFTSNGAIHALPTNSLALATFGTFAGWIGWFGLTGGAVLLAVPEAGPAILVPTYVNTLLAGAAGLAVALIVSLIVGRNGVMARGLQGALAGLVSISAAPHLPMPLVALAIGAIGGLLVVIAVPLIERLRIDDATGAISVHLICGLWATLVVSVIDPTVPLTTQALGAAAVGGAMVLASFVVWLAIKLTLGLRIAFEDESGAQEHRDLGLDV

SEQ ID NO: 25040 - protein, 412 aa, Shewanella sp. ANA-3
MSKRRVVVTGLGLVTPVGNTVDTTWKALLSGKSGIAPITKFDASEFTTRFSGSVKDFDVEQYLTKKDARKMDLFIQYGMAAGIQAIQDSGLDMSKENPGRVGTAIGAGMGGMWLIEQNHSALLSGGPRKISPFFVPSTIINMIAGHLSIMYGMTGPNFAVTTACTTGVHNIGFAARTIAYGDADVMIAGGAEDVTCPLGVGGFGAAKALSTRNDDPTAASRPWDKDRDGFVIGDGAGVMVMEEYEHAKARGATIYGELVGFGMSGDAFHMTSPPSDGAGAAAAMVNAVNDAKLSFEKIGYINAHGTSTPAGDKAEAAAVKSVFGDHAYNLLVSSTKSMTGHLLGAAGAVEAIFTLLALRDQAVPPTINLDNPDEGCDLDFVAHTARDVKLEYALCNSFGFGGTNGSLLFKKV

SEQ ID NO: 25041 - protein, 272 aa, Leccinum holopus
  misc_feature (131)..(157): Xaa can be any naturally occurring amino acid
  unsure (1)..(272): unsure at all Xaa locations
VNDPFIDLEYMVYMFKYDSVHGRFKGDVHSKDGKLYINGKAITVYAERDPANIKWGAVGAEYVVESTGVFTTIEKAGAHLKGGAKKVIISAPSADAPMFVCGVNLDKYDPKYTVISNASCTTNCLAPLAKXXXXXXXXXXXXXXXXXXXXXXXXXXXGPSAKDWRGGRAVNGNIIPSSTGAAKAVGKVIPSLNGKLTGLAFRVPTNDVSVVDLVVRLEKSASYDEIKAAVKAASESPDLKGIIEYTDEALVSTDFTGHPASSIFDASGSIML

SEQ ID NO: 25042 - protein, 285 aa, Leccinum holopus
  misc_feature (69)..(69): Xaa can be any naturally occurring amino acid
  misc_feature (143)..(156): Xaa can be any naturally occurring amino acid
  misc_feature (263)..(263): Xaa can be any naturally occurring amino acid
  unsure (1)..(285): unsure at all Xaa locations
NIVAVNDPFIDLEYMVYMFKYDSVHGRFKGDVHSKDGKLYINGKAITVYAERDPANIKWGAVGAEYVVXSTGVFTTIEKAGAHLKGGAKKVIISAPSADAPMFVCGVNLDKYDPKYTVISNASCTTNCLAPLAKVINDKFGIXXXXXXXXXXXXXXQKTVDGPSAKDWRGGRAVNGNIIPSSTGAAKAVGKVIPSLNGKLTGLAFRVPTNDVSVVDLVVRLEKSASYDEIKAAVKAASESPDMKGIIEYTDEALVSTDFTGHXDSSIFDASGSIMLNPNFVKLIS

SEQ ID NO: 25043 - protein, 398 aa, Pseudomonas aeruginosa
MSLFSAVEMAPRDPILGLNEAFNADTRPGKINLGVGVYYNEEGRIPLLRAVQAAEKARIEVHAPRGYLPIEGIAAYDQGVRKLLFGNESELLAAGRVVTTQAVGGTGALKLGADFLKRLLPDATVAISDPSWENHRALFEAAGFPVQNYRYYDAASNGVNRAGLLEDLNALPARSIVVLHACCHNPTGVDLELDDWKQVLDVLKAKGHVPFLDIAYQGFGNGIEEDAAAVRLFAQSGLSFFVSSSFSKSFSLYGERVGALSIVTESRDESARVLSQVKRVIRTNYSNPPTHGASVVSSVLNSPELRALWEQELGEMRDRIRDMRLAMVEQLAAHGAKRDFSFVGRQRGMFSYSGLTADQVERLKTEFGIYAVSTGRICVAALNKSNLETITKAIVQVL

SEQ ID NO: 25044 - protein, 578 aa, Novosphingobium aromaticivorans DSM 12444
MSVIGGGAGFGAARSPRIWQRRLSCHPLPGIQRSMKQTETAIADPKMHTETPWWRGAAIYQIYPRSFCDSNGDGIGDLNGIASRLDHVARLGVDAIWISPFFTSPMKDFGYDVADYCDVDPIFGTLADFDALVKRAHELGLKVTIDQVYAHTSDIHPWFAESRQDRTNARADWYVWADPKPDGSPPSNWQSVFGGPAWTWDARRCQYYLHNFLSSQPQVNAHNPEVQEALLGAMKFWLDRGVDGFRLDALNFLMHDPTLRDNPPAPDDGRRKTRPFDFQLKIYNQSHPDILKFIQRVRNLCDDYGAVFTVAEVGGDLAETEMKAFTAGDRHLNSAYGFDFLYADRLTPHFVEKAVAKWPDAPGMGWPSWAFENHDAPRALSRWCAPDQREPFARLKAMLFASLRGNIIVYQGEELGLTQVDIPFEQLQDPEAIANWPLTLSRDGARTPMPWLVQSGEGGFTSGAPWLPLGEENLSRAVDRQEGDPASLLNLTTRLLRLRRETPALRIGSFEVIHADECLLAIRRVLGEQSIAGLFNLSSVPVVWPHGLVREGKEMASVNGATVGQLPPFGALLIEERI

SEQ ID NO: 25045 - protein, 130 aa, Glycine max
MSSQTVVLKVGMSCQGCAGAMNRVLGKMEGVESFDIDLKEQKVTVKGNVEPDEVLQAVSKSGKKTAFWVDEAPQSKNKPLESAPVASENKPSEAATVASAEPENKPSEAAIVDSAEPENKPSDTVVETVA

SEQ ID NO: 25046 - protein, 609 aa, Novosphingobium aromaticivorans DSM 12444
MRRISLISALALVLSLGQPALADVPLAEVRARPAAGEVVYFLLPDRFDNGDRKNDLGGLKGDRLKTGFDPSAKGFYHGGDIKGLLSRLDYLQDMGVTALWVAPVFRNKPVQGAPGQESAGYHGYWVTDFTRIDPHFGSNADFKALVDAAHARGIKVYMDIIANHTADVIHYADGDYSYRNRADWPYSRKGGLSGKAINQGFAGDEDSSAANFAKLTDPGAAYQPLIDPAERNVKVPAWLNDPIYYHNRGNTTFTGEDSRFGDFAGLDDLFTEHPRVRAGMVEIYADWIRRFGIDGYRVDTAKHVDPGFWQVFTPEIRKVAAEAGIPNFAVFAEIANGGSDPGTIARHTRRDGFPQVLDFAFQEAVRDLVGKGKATRVLAETFDGDVLYEGGEAAALAMPTFLGNHDMGRFSTAVRQDRPGISDKELLDRVALAHVMLMTLRGSPVIYYGDEQGFVGDGGDQDAREDMFPSRTASYNDNRLIGTASTTAADNFDEGHPLYRLIRDLAVLRKAHPALARGRQVTRTYSEGPGLFSVSRFDPETGTEYLIAFNTSDKPLRATSVIGASASGLEGLYGQCPLSVAAPGSVLLDLPAFGSVVCRVILSPESSVR

SEQ ID NO: 25047 - protein, 625 aa, Xanthomonas campestris pv. vesicatoria str. 85-10
MANERPAQQSDIKLLISKGLEQGYLTYAEVNDHLPDDLVDPEQIEDIISMINGMGIDVHEVAPDAETLLLNDGNTGNREVDDTAAEEAAAALTALDTEGGRTTDPVRMYMREMGTVELLTREGEIAIAKRIEEGLSQVQAALGVFPLSTEMLLADYEAHKEGKKRLAEIVVGFNDLIEEADAAAAALAAAGPVAVSDDEAVDEDDDEDGDDEAAEEEAGPTGPDPVEVATRMENLANEYAKFKKAYAKNGAEHKLVVKAREDMAAIFTTLKLPLPLTDALVTQLRGVVNGIKDHERKVLHLATTVARMPRKDFIRSWEGNQTNLEWVEDALKRKQKWSSALRDVKDQIISEQQGSIEMEKANYLTLGEIKEISRAMAYGEAKARKAKKEMVEANLRLVISIAKKYTNRGLQFLDLIQEGNIGLMKAVDKFEYRRGYKFSTYATWWIRQAITRSIADQARTIRIPVHMIETINKLNRISRQMLQQFGREATPEELAKEMDMPEDKIRKVMKIAKEPISMETPIGDDEDSHLGDFIEDTNVESPIDNTTNINLSETVRDVLAGLTPREAKVLRMRFGIDMNTDHTLEEVGKQFDVTRERIRQIEAKALRKLRHPSRSEQLRSFLDID

SEQ ID NO: 25048 - protein, 282 aa, Zymomonas mobilis
MMSPISIPSIRLNDGNDLPAVGFGTYKLNGSAGVSDIVSAIKVGYRLLDSAFNYENEGAVGEVFREAGIARDKLRIVSKLPGRHHHFEEAIATVEESLYRAQLDYYDLYLIHWPNPSKDLYVEAWQALIEARKKGLIRSIGVCNFLPEHLERLIKETGVTPVVNQVELHPYFPQEEQRAWDKAHGIVTESWSPLGRASKLLQDDTIKKIADRLGKSIPQVILRWHVQLGAIPIPKASSKERQIENLSLFDFELSPQDVEIIATLARPDGRLADQDPARYEEF

SEQ ID NO: 25049 - protein, 459 aa, Burkholderia vietnamiensis G4
MTQQQRSFDNIVAREQGLRHALTSGQMAMIAIGGAIGTGLFLGSGFAIGLAGPSVLVSYAIGALIALLLMGALAEMTVAHPTAGSFGAYAEHYVGPLAGFLVRYAYWFAVVFAIGTEISAIAVFMKYWFPAVPGWYWVIGFSALLIAVNLASVTLYGSVEYAFSLLKIAAIIVFIVLGAYLVWSAPPASGIGFANYTGHGGFMPKGPWGTWVAVIVAIFSYMSIEAVAIAAGEARDPQHAVTRAFRSTVFRLVLFYLLTLALMLAIVPWTQAGTDESPFVKVMAATHVPYAAGVINFVLLIAALSAMNSQLYVTTRMMFSLSRARLAPAVFGRVGDNGVPRAALWISTSGVAVAAVLVALSPGTAFTVMMAIAMFGALFTWLMIFVTHLRFRARYSGPALAFRMWAHPFGSLLGAALVGAILLTTAFTHEFRMTMVVGVVFVVLLTLAYALHYRHQHAR

SEQ ID NO: 25050 - protein, 918 aa, Salmonella typhimurium LT2
MTNYSLRARMMILILAPTVLIGLLLSIFFVVHRYNDLQRQLEDAGASIIEPLAVSSEYGMNLQNRESIGQLISVLHRRHSDIVRAISVYDDHNRLFVTSNFHLDPSQMQLPAGAPFPRRLSVDRHGDIMILRTPIISESYSPDESAIADAKNTKNMLGYVALELDLKSVRLQQYKEIFISSVMMLFCIGIALIFGWRLMRDVTGPIRNMVNTVDRIRRGQLDSRVEGFMLGELDMLKNGINSMAMSLAAYHEEMQHNIDQATSDLRETLEQMEIQNVELDLAKKRAQEAARIKSEFLANMSHELRTPLNGVIGFTRLTLKTELNPTQRDHLNTIERSANNLLAIINDVLDFSKLEAGKLILESIPFPLRNTLDEVVTLLAHSSHDKGLELTLNIKNDVPDNVIGDPLRLQQVITNLVGNAIKFTESGNIDILVEKRALSNTKVQIEVQIRDTGIGIPERDQSRLFQAFRQADASISRRHGGTGLGLVITQKLVNEMGGDISFHSQPNRGSTFWFHINLDLNPNVIIDGPSTACLAGKRLAYVEPNATAAQCTLDLLSDTPVEVVYSPTFSALPLAHYDIMILSVPVTFREPLTMQHERLAKAASMTDFLLLALPCHAQINAEKLKQGGAAACLLKPLTSTRLLPALTEYCQLNHHPEPLLMDTSKITMTVMAVDDNPANLKLIGALLEDKVQHVELCDSGHQAVDRAKQMQFDLILMDIQMPDMDGIRACELIHQLPHQQQTPVIAVTAHAMAGQKEKLLSAGMNDYLAKPIEEEKLHNLLLRYKPGANVAARLMAPEPAEFIFNPNATLDWQLALRQAAGKPDLARDMLQMLIDFLPEVRNKIEEQLVGENPNGLVDLVHKLHGSCGYSGVPRMKNLCQLIEQQLRSGVHEEELEPEFLELLDEMDNVAREAKKILG

SEQ ID NO: 25051 - protein, 607 aa, Bacillus cereus E33L
MCGITGWVNWNKDLSNEHVILKKMANRIQHRGPDAEGFWFSPRAAFAHRRLIVIDPEGGAQPKTFRAGDYTYALTYNGEIYNFRELREHLQKCGHTFETHSDTEVLLHAYLEWKEDCVQHLNGIFAFALWDDQKQRLFLARDHLGVKPLFYTERNDSIIFGSEIKALLAHPSVPAEIDANGINEIFGLGLFRTPGCGVFKHIEEVRAGHSITFTRDKKVVTKYWNLESKVHTDSIEDTSSHILSILQDTVKRQLIADVPLVCMLSGGLDSSGITALAGKEFAAENKTLHTYSVDFVNSAKDFELTFARTGLDAPWVKRVSEHVGTSHHDIIVNAEELANRLFVPLRAKDLPSAGEMETSLYLLFCEMKKDATVALSGESADEVFGGYPWFHQEELLYVDKFPWLTNWKNTSPLLLHEVSNQCNLENYIDTRFQKAILEVPTLEGESKKSAKQRQMFYLFLTRFLPFLLDRKDRMSMAVGFEVRVPFCDYRLVEYLWNVPFNIKSIDNIEKGILRRALKPALPDDVRNRRKSAYPTSQDPHYLQTIRNLTLDMCSNKNNPIFSLINHSTLLAIANQSNKEINNFEARSAIEYMLQVNEWLKTYHIHIA

SEQ ID NO: 25052 - protein, 381 aa, Prochlorococcus marinus subsp. pastoris str. CCMP1986
MDTHKLILKPGLEGVPVTNSSICDIDGQKGKLLYRGYSIEELAQKSSFLETAFLLIWGELPSATELRDFEQEVQMHRRLSFRVRDMMKCFPATGHPMDALQSSAASLGLFYSRRAIDDPKYIYNAVIRLIAKIPTMIAAFQLIRKGQDPIQPRDDLSYSSNFLYMLTEKEQDPIAAKVFDRCLILHAEHSLNASTFSARVTASTLTDPYAVIASAVGTLAGPLHGGANEDVIAMLEDIKTPEKAASFLEDAIQNKSKIMGFGHREYKVKDPRAIILQKLAEELFVRFGKDEMYEVAKKLELEAIPRLGGKGIFPNVDFYSGLVYRKLGIPRDLFTPIFAISRVAGWLAHWREQLGANRIFRPSQIYTGSAPRDWITLENRK

SEQ ID NO: 25053 - protein, 340 aa, Erwinia carotovora subsp. atroseptica SCRI1043
MSTMNTLICQEPKKLVWKKREIPIPGEGEALIKIKSVGICGTDIHAWGGNQPFFSYPRVLGHEICGEVVDTGKNVDRFKKGQQVTVIPYVACQQCPACKSGRTNCCEKISVIGVHQDGGFSEYLAVPTTNLLLAEGIDPQAAALIEPYAISAHAVRRAKVLQGEQVLVVGAGPIGLGAAAIAKAEGAHVVVADTSAARREHVIAHLGLSVVDPSAEDFEAQLRAEFGGSLAEKVIDATGNQHAMNNTINLIRHGGSIVFVGLFKGDLQFSDPEFHKKETTMMGSRNATPEDFAKVGHLMSEGKLTAEMMLTHRYPFSTLADIYERDVINNRELIKGVITF

SEQ ID NO: 25054 - protein, 516 aa, Escherichia coli CFT073
MFMATYMTFSLKQSGRAMSKHDTDTSDQHAAKRRWLNAHEEGYHKAMGNRQVQMIAIGGAIGTGLFLGAGARLQMAGPALALVYLICGLFSFFILRALGELVLHRPSSGSFVSYAREFLGEKAAYVAGWMYFINWAMTGIVDITAVALYMHYWGAFGGVPQWVFALAALTIVGTMNMIGVKWFAEMEFWFALIKVLAIVTFLVVGTVFLGSGQPLDGNTTGFHLITDNGGFFPHGLLPALVLIQGVVFAFASIEMVGTAAGECKDPQTMVPKAINSVIWRIGLFYVGSVVLLVMLLPWSAYQAGQSPFVTFLSKLGVPYIGSIMNIVVLTAALSSLNSGLYCTGRILRSMAMGGSAPSFMAKMSRQHVPYAGILATLVVYVVGVFLNYLVPSRVFEIVLNFASLGIIASWAFIIVCQMRLRKAIKEGKAADVSFKLPGAPFTSWLTLLFLLSVLVLMAFDYPNGTYTIAALPIIGILLVIGWFGVRKRVAEIHSTAPVVEEDEEKQEIVFKPETSS

SEQ ID NO: 25055 - protein, 341 aa, Zea mays
MVEEGATAAASRSGPAPFLSKTHQMVEERGTDEVISWAEQGRSFVVWKPVELARDLLPLHFKHCNFSSFVRQLNTYVEPTKSRSKFFHIYFYGCICKLLKTAWICIPHFHLRRWRQSMQGFRKVVPDRWEFANENFRRGEQGLLSGIRRRKSTTPQPSKYGGGSVVNTAFPPPLPLPPPASVTTSGGGGAGGAGNERSSSSASSPPRTDDLTSENEQLKKDNRTLSTELAQARRHCEELLGFLSRFLDVRQLDLGLLMQEDVRAGAGDDAAPRRAMVSQLERGGEEGKSVKLFGVLLTDAARKRARCEEAAASERPIKMIRIGEPWIGVPSSGPGRCGGGN

SEQ ID NO: 25056 - protein, 305 aa, Plantago major
MQIFVKTLTGKTITLEVESSDTIDNVKAKIQDKEGIPPDQQRLIFAGKQLEDGRTLADYNIQKESTLHLVLRLRGGMQIFVKTLTGKTITLEVESSDTIDNVKAKIQDKEGIPPDQQRLIFAGKQLEDGRTLADYNIQKESTLHLVLRLRGGMQIFVKTLTGKTITLEVESSDTIDNVKAKIQDKEGIPPDQQRLIFAGKQLEDGRTLADYNIQKESTLHLVLRLRGGMQIFVKTLTGKTITLEVESSDTIDNVKAKIQDKEGIPPDQQRLIFAGKQLEDGRTLADYNIQKESTLHLVLRLRGGC

SEQ ID NO: 25057 - protein, 103 aa, Nostoc punctiforme PCC 73102
MAALSLSVSTVKPLSDRVFVKVNASEEKTAGGLYLPDTAKEKPQVGEVVALGPGKRNEDGSRQELEIKVGDKVLYSKYAGTDIKLGTEEYVLLSEKDILAVVI

SEQ ID NO: 25058 - protein, 208 aa, Prochlorococcus marinus subsp. pastoris str. CCMP1986
MTELNQKNSGKNIKWHNLTIDRNKLEKMRGHKGMVIWFTGLSGSGKSTLANAVNEVLHLDGFSTYVLDGDNIRHGLCKDLGFSDEDREENIRRIGEVANLFMNAGIITITAFVSPFISDRDKVRKIIGSKDFIEVHCAADIEVCESRDTKGLYKKARLGEIKEFTGISSPYEAPVNPEIVVDTGSLGLNDSVEKVINHLREQNLLERS

SEQ ID NO: 25059 - protein, 934 aa, Arabidopsis thaliana
MSKSKSLAFVIAALSYSFFSLFSSPPKSHYHELFISTSFSDNASVALNLHTLTRRPHVAGTVANAEAAEYVRSVFTSSALKSHVVAYQVSLTYPVHRSLVLTPTDSAKPITFLLEQEKLGDNPYANEVMPTFHGYAKSGNVSGPVVYANYGRVEDFVRLKKDMGVNVSGAVVIARYGQIYRGDIVKNAYEAGAVGVVIYTDKRDYGGDEWFPASKWMPPSGVQVGTVYNGLGDPTTPGWASVDGCERLSDEAVELSGDVPLIPSLPVSAADAEVILKTVVGDVSDGDVYPVGPGPGGETVIAKIENVIGVIEGEEEPDRYVILGNHRDAWTFGAVDPNSGTAIAQRLDKLQKRGWKPRRTIILCNWDAEEYGLIGSTEWVEENREMLSSRAVAYLNVDCAVSGPGFHASATPQLDELIKVAAQEVRDPDNATQTIYESWIGSSDSVVIRRLGGGGSDYASFVQHVGVPGVDMSFGRGYPVYHSMYDDFTWMEKFGDPMFQRHVAMASVLGLVALRLADEEIIPFNYTSYALELKKSAEDLENEKLGHNIDVSTLIKSIEDLSTAAKHISLEKEAIKGALKVRELNDRLMMAERALTDRDGLSERPWYKHLIYGPSKYDDYGSKSFPGVDDAIDNAKKLNTKASWENVQHQIWRVSRAIRHASLVLKGNHSSSFGRRTITEGSSSKALSFGYKNVGSLKCGRSNWPGRSGTAFGHLVRVSAVPGGNSGGSGGLGGSGGGGGGSGGGGGDGSDGKGKKWSLLSWYQALLSNSPVLTKAVTAALLNLVGDLICQLTINKTSSLDKKRTLTFTFLGLGLVGPTLHFWYFRGPFTLVTASGLSGAVIRLLLDQFVFAPIFVGVFLSAVVTLEGKPSNVIPKLQQEWTGAMIANWQLWIPFQFLNFRFVPQNYQVLASNVVALAWNVILSFKAHKEVVAK

SEQ ID NO: 25060 - protein, 520 aa, Bordetella parapertussis 12822
MNAMLTFLRLLRILLVSLRYGLDELVLSSLNHPLATCLLRVMRLGTRPRAPRGVRLRMALESLGPIFVKFGQVLSTRRDLIPADIANELALLQDRVPPFPSAQAAASIEAALGAPPAQLFAQFDVDPVASASIAQVHFAVLHDGREVAVKVLRPGMLNVIEKDLALLRVVAGVIERLGADGRRLKPREVVAEFDKYLHDELDLVREASNCSQLRRNFGPESGRGEMLIVPEVVWEYTASTVFTMQRMYGIPVGQVDRLRAAGIDIPTLARSGVEIFFTQVFTDGFFHADMHPGNIYVSDAPQTLGRYIALDFGIVGSLSEFDKNYLAQNFLAFFHRDYRRVAQLHIESGWVPPETREEELEGAVRAVCEPYFDRPLAEISLGQVLLRLFQTSRRFNVEIQPQLVLLQKTLLNVEGLGRQLDPNLDLWKTAKPYLEHWMRQRIGLTGLRQSLAKEAGQWSQMLPSLPRLVHEHFSRPNLTPHLLAEMNRLRRAQEQGNRLTAALTAVLAVAVAVALWALNR

SEQ ID NO: 25061 - protein, 452 aa, Cryptococcus neoformans var. neoformans JEC21
MSPIASTASPIPSSKPTLSSQEVMNLEHEYSAHNYHPLPICFEKGLGAHVWDPEGNEYLDFLSAYSAVNQGHCHPEILNTLVTQASKLTLSSRAFYSSNLGPFAKKITSMFGYDMVLPMNTGAEAVETAIKLARKWGYEKKKIPDGKAKVLSVEGNFHGRTIGIISMSTDPESRTGFGPFLENVGPRWDTGLIRYNHTEDLEKVLEKHGDEVAAFLVEPIQGEAGIFVPDDGYLAKCAEICKKYNVLLICDEIQTGLCRTGKMLCYEWDNIRPDMVILGKALSGGMYPVSCVLADKDIMLCIKPGEHGSTYGGNPLGCAVAMTALDVLVKEDLANRSLKLGEIFRSELAKLNSPFIKLIRGRGLFNGVVIDETASKKGRTAWQLCLLMKSKGLLAKPTHVNIIRFAPPLVISEEDVRKAVKIIGESLEELDTIEKIPGDEGEEHKAAIKLDD

SEQ ID NO: 25062 - protein, 319 aa, Mesorhizobium loti MAFF303099
MQAIPIAHQAAQPVVGPISSLTGYPAAILCWLLSAGVYIAAKWVAPEMPPWGLCFWRLTLACAILLPIVHRHHGAMIGLLRTRAVEVVAVGAIGLTLCQGMIYHGLNDTNATTAGIIMALSPVMTMVLARFVLGEPLGLWKSLGALVALAGMIFIVAHGNLTALLQLEFNAGELWIVGSAFCWGLYTVLLRRAKFGIELLPMVVLLLGAGALVALPFHLWELFNDERSVMNVHSILALAYLAGPGGALMYYLYNKSVETLGASRASMLLYLQTVFVAMLAYLLLGEDLHDYDLIGAAFIVAGIILATVIKPRSAEPRVA

SEQ ID NO: 25063 - protein, 280 aa, Leccinum schistophilum
  misc_feature (128)..(140): Xaa can be any naturally occurring amino acid
  unsure (1)..(280): unsure at all Xaa locations
VNDPFIDLEYMVYMFKYDSVHGRFKGDVHAKDGKLYINGKAITVYAERDPANIKWGGVGAEYVVESTGVFTTIEKAGAHLKGGAKKVIISAPSADAPMFVCGVNLDKYDPKYTVISNASCTTNCLAPXXXXXXXXXXXXXGLMSTIHATSATQKTVDGPSAKDWRGGRAVNGNIIPSSTGAAKAVGKVIPTLNGKLTGLAFRVPTNDVSVVDLVVRLEKSASFDEIKAAVKAASESPDLKGIIEYTDEALVSTDFTGHPASSIFDASGSIMLNPNFVKLI

SEQ ID NO: 25064 - protein, 259 aa, Bacillus cereus ATCC 10987
MKVACIQMDIVFGDVEKNIENAKNKISEAMKERPDVIVLPELWTTGYDLTRLSEIADRDGLETKEKLIEWSKQYGVHIVGGSIAKQTEQGVTNTMYVVTNKGELVHEYSKVHLFQLMDEHKYLIAGNRTGEFKLDDVECAGTICYDIRFPEWMRVHTAKGAKVLFVVAEWPLVRLAHWRLLLQARAVENQCYVVACNRAGKDPNNEFAGHSLIVDPWGEVVVEANEEEAILFGELTFEKIKEVRKGIPVFADRRPELYK

SEQ ID NO: 25065 - protein, 394 aa, Frankia sp. EAN1pec
MTSWTRSSACWSPSGSASWSSPAWSRSAAGRGRSPIAVCAPSSARPDSHPSFTPHFPRGDSPKMVEIYYDDDANLDNLADRKVAVIGFGSQGHAHALNLRDSGVDVRVGLPETSTSRAKAEEQGLRVVTPAEASAEADIIMILTPDTTHRKIYAESIAPHLTPGKALAFGHGFNIRYGLIEPPAGVDVFMVAPKGPGHLVRRVFVEGKGVPVLVAVEADATGKALDIALAYAKGIGGTRAGALRTTFTEETETDLFGEQAVLCGGASALVQAGFETLVEAGYTPEVAYFECLHELKLIVDLMYEGGISQMRYSISDTAEYGDVTRGPRVITPAVKAEMRKILDEIQDGTFAREWVAEDDAGRATFTKLVEEGKQHPIEQVGGKLRPMMSWIAKD

SEQ ID NO: 25066 - protein, 347 aa, Ustilago maydis 521
MAPTATDVRNNEGIANYTKFWQKDSKDDSATDMANRLSEYTSVVNGYYDGATDLYEYGWGQNFHFARYYPGEAFMQAIARHEHYLAHQMGLKPKMRVLDVGCGVGGPAREIARFADVNIVGLNNNEYQIQRARKYTEKAGLSAQVEFVKGDFMKLSEQFGENRFDAFYAIEATCHAPNFEGIYGEILKVLKPGGIFGVYEWCMTDAWDPTNPEHKRIAHGIEVGDGIPEMRSIQNARNALKSVGFQIQHEEDLADRGDKIPWYYPIAGSLSHCQTVWDYFTVARMTKIGRATTQGAVKLLETLRLVPQGTHSVGASLVTAADALVDGGRTKLFTPMMLFVCRKPSSN

SEQ ID NO: 25067 - protein, 677 aa, Lycopersicon esculentum
MVESSVGGVVPAVKGEVMRRMGDKEEGGSVTLRDEEVGTVTEWELDRELLCPICMQIIKDAFLTACGHSFCYMCIVTHLHNKSDCPCCSHYLTTSQLYPNFLLDKLLKKTSARQISKTASPVEQFRHSLEQGSEVSIKELDALLLMLSEKKRKLEQEEAERNMQILLDFLQMLRKQKVDELNEVQHDLQYIKEDLNSVERHRIDLYRARDRYSMKLRMLADDPIGKKPWSSSTDRNFGGLFSTSQNAPGGLPTGNLTFKKVDSKAQISSPGPQRKDTSISELNSQHMSQSGLAVVRKKRVNAQFNDLQECYLQKRRQLANKSRVKEEKDADVVQREGYSEGLADFQSVLSTFTRYSRLRVIAELRHGDLFHSANIVSSIEFDRDDELFATAGVSRRIKVFDFSSVVNEPADAHCPVVEMSTRSKLSCLSWNKYTKNHIASSDYDGIVTVWDVTTRQSVMEYEEHEKRAWSVDFSRTEPSMLVSGSDDCKVKVWCTKQEASVLNIDMKANICCVKYNPGSSVHIAVGSADHHIHYYDLRNTSQPVHIFSGHRKAVSYVKFLSNNELASASTDSTLRLWDVKDNLPVRTLRGHTNEKNFVGLSVNNEFLSCGSETNEVFVYHKAISKPVTWHRFGSPDIDEADEDAGSYFISAVCWKSDSPTMLAANSQGTIKVLVLAA

SEQ ID NO: 25068 - protein, 501 aa, Novosphingobium aromaticivorans DSM 12444
MGASLNAMPRQKPRQDFRGLWNISFGYFGIQLAFALQNANVSRIFQSLGSAVDDLAFLWIAGPVTGLIVQPLIGYYSDRTWGRLGRRRPYFLAGAVLAGLALVGLPNTGLLLLAAAFLWMLDASLNVAMEPFRAFAGDMTPDDQRAQAFAFQTWFIGAGAVVGSLAPALFNWLGIANTAPEGIIPPSVRYSFYLGAAAMVLAVGWTVLRVREYSPDEMAAFEADATAPIAPEHEPLVYPRSGPAWVAVGAVLVAIVAALGLDRQLYVLGTGLAVFGAIQIGVRATAARGALAHIVSDLAQMPAQMKQLALAQFFTWIGFFIVWIYTTPVVTEQAFGATDVSSAAYNEGADWVGVMFAFYNGIAAVSAFLLPVLARRIGNARTHAVGLLCGASGFLGLLLIRDPWWLLLPMVGMGIAWASVLSMPYVILTRVLPARKFGIYIGIFNFFIVIPQLVVATLMGGIMRSFFPGEPRWTMLVAALMMAAAAGAMMLVREHRRDSAA

SEQ ID NO: 25069 - protein, 153 aa, Magnetospirillum magnetotacticum MS-1
MARYLLQRLCEKYEIDIEYHCKPLGDTDWNGSGMHCNFSTTFMRETGGKDYFEAMMAAFERNLEDHMAVYGPDNHMRLTGKHETAPWNKFSYGVADRGASVRVPHSFVNNGYKGYLEDRRPNSMGDPYQIASQVLKTISEVPLPSEAAQKAVA

SEQ ID NO: 25070 - protein, 308 aa, Oryza sativa
MAPGSSIVTDIPESDCVSDGLSEALTGIRLDGDSTCKPWSTSLVTVELSSLTGLNDLLECPVCTNSMRPPILQCPNGHTICSNCKHRVENHCPTCRQELGNIRCLALEKVAESLQLPCKYQSLGCAEIHPYQNKLKHEELCRFRPYSCPYAGSECLIAGDVPMLVSHLINDHKVDLHEGCTFNHRYVKSNPYEVENATWMLTVFKCFGQHFCLHFEAFLLGMAPVYMAFLRFMGEDSEARNFCYSLEVGGNGRKLTWQGIPRSIRDSHKKVRDSFDGLIIHRNMALFFSGGNRQELKLRVTGRIWKEQ

SEQ ID NO: 25071 - protein, 535 aa, Arabidopsis thaliana
  misc_feature (41)..(41): Xaa can be any naturally occurring amino acid
  misc_feature (83)..(83): Xaa can be any naturally occurring amino acid
  unsure (1)..(535): unsure at all Xaa locations
MAGGGAPAPKADEPQPHPPKDQLPNISYCITSPPPWPEAIXLLGFQHYLVMLGTTVLIPTALVPQMGGGYEEKAKVIQTILLXAGHQHLCSKTLFGTRLPAVVGASYTFVPTTISIILSGRFSDTSNPIDRFERIMRATQGALIVASTLQMILGFSGLWRNVVRFLSPISAVPLVGLVGFGLYEFGFPGVAKCIEIGLPELLILVFVSQYLPHVIKSGKNVFDRFAVIFAVVIVWIYAHLLTVGGAYNGAAPTTQTSCRTDRAGIIGAAPWIRVPWPFQWGAPSFDAGEAFAMMMASFVALVESTGAFVAVSRYASATMLPPSILSRGIGWQGVAILISGLFGTGAGSSVSVENAGLLALTRVGSRRVVQIAAGFMIFFSILGKFGAVFASIPAPIIAALYCLFFAYVGAGGLSFLQFCNLNSFRTKFILGFSVFLGLSIPQYFNEYTAIKGYGPVHTGARWFNDMVNVPFSSEPFVAGSVAFFLDNTLHKKDSSIRKDRGKHWWDKFRSFKGDTRSEEFYSLPFQSVNKYFPSV

SEQ ID NO: 25072 - protein, 233 aa, Leccinum scabrum
  misc_feature (132)..(141): Xaa can be any naturally occurring amino acid
  unsure (1)..(233): unsure at all Xaa locations
VNDPFIDLEYMVYMFKYDSVHGRFKGDVHAKDGKLYINGKAITVYAERDPANIKWGGVGAEYVVESTGVFTTVEKAGAHLKGGAKKVIISAPSADAPMFVCGVNLDKYDPKYTVISNASCTTNCLAPLAKVXXXXXXXXXXLMSTIHATTATQKTVDGPSAKDWRGGRAVNGNIIPSSTGAAKAVGKVIPSLNGKLTGLAFRVPTNDVSVVDLVVRLEKSASYDEIKAAIKAA

SEQ ID NO: 25073 - protein, 351 aa, Arabidopsis thaliana
MMIAQELGIYVVESKGGAILCLLLSLLCLGTWPALMALLERRGRLPQHTYLDYSITNFLAAIFIAFVFGGIGESTHEAPSFITQLTQIQDNWPSVLFAMAAVCLGSAVHSSNSADIKAKLGKLSGDCETVTPEECQRLFGVEEEEEEEKEMENVKEGSAAFLIALENKRAIKVLGKSMVVGLGITFFAGLSFSLFSPLFNLATNDQWHTLKQGVPKLIVYTAFFYFSLSCFVIAVALNISFLYKPVLDSPRSSFREYLSDWNGRGWALAAGLLCGFGNGLQFMGGQAAGYAASDAVQALPLVSTFWGIYLFGEYRRSSTRTYALLVGMLVMFTVAVGLLMASAGERETRFT

SEQ ID NO: 25074 - protein, 282 aa, Schizosaccharomyces pombe
MFYSDYLKLLKIFVVGVFPCTLFVNAPHGKLAKQSKLFSKGYISGRVGWVLMELVAPLTFLYAIRNNRHFESTLPSLGDGSNRDYLDSCRKVLAGMFLVHYANRALVSPLLMAPQVSPMHWTVFVSAVLFNFLNGMSIGLYLVQASVQHHPVSIIRRYIGMFLWLMGWLGNMYHDNILYDLRRSSNKKKDPDNLDTVQSENSYYRIPYGGLFQYVSCPNYFCEWIEWFGCYLAAGPSAEPFWWFFLSEILLMLPRALKAHQWYCKKFPKYPANRRAIIPFLM

SEQ ID NO: 25075 - protein, 256 aa, Leccinum scabrum
  misc_feature (55)..(55): Xaa can be any naturally occurring amino acid
  misc_feature (113)..(121): Xaa can be any naturally occurring amino acid
  misc_feature (133)..(133): Xaa can be any naturally occurring amino acid
  unsure (1)..(256): unsure at all Xaa locations
VAVNDPFIDLEYMDGKLYINGKAITVYAERDPANIKWGGVGAEYVVESTGVFTTXEKAGAHLKGGAKKVIISAPSADAPMFVCGVNLDKYDPKYTVISNASCTTNCLAPLAKXXXXXXXXXEGLMSTIHATTXTQKTVDGPSAKDWRGGRAVNGNIIPSSTGAAKAVGKVIPSLNGKLTGLAFRVPTNDVSVVDLVVRLEKSASYDEIKAAIKAASESPDLKGIIEYTDEALVSTDFTGHPASSIFDASGSIMLNP

SEQ ID NO: 25076 - protein, 764 aa, Schizosaccharomyces pombe
MVKSAVLGFPRIGKNRELKKATEAYWSGKTSAEELLATAKQLRLEHWKLQKAQGVDIIPSNDFSLYDQIMDHSFSFNVIPPRYRLSGLSSLDTYFAMGRGMQRAATADKAAVDVPAGEMVKWFDSNYHFLRPEVSEETDFKLSSTKALDEFLEAKEAGIITRPVLVGPVTYLFIAKAAKGSSIKPIELLPKLLPVYVELIKKLTEAGAEYIQIDEPILTLDLPQEILASYKEAYETLGKIGKLILTTYFGSLQSNADVLKGLPIAGVHVDVVRAPENLDRALAVLGENQIISVGVVSGRNIWKTDFQKATAIIEKAISAVGSERVQVASSSSILHIPHSLSGEDQINPEIKRWFAFAVEKCAELAILTKAANDGPASVRAELEANAADCKARAESPITNVEAVRERQSKVTPQMHERKSPFETRYAKQQASLKLPLFPTTTIGSFPQTKEIRVTRNRFAKGLISQEEYDAFIRKEISDVVKFQEEVGLDVLVHGEPERNDMVQYFGERMEGFVFTVNGWVQSYGSRCVRPPIIVGDVYRPAPMTVKESQYAQSITSKPMKGMLTAPITILRWSFPRDDVHDSVQAQQIALGLRDEVLDLEKAGIKVIQCDEPALREGLPLRRAEWDEYLKWAIDAFRLATAAVQDDTQIHSHFCYSDFNDIFDAIQRLDADVVSIENSKSDMKLLNVLSRYTSCIGPGLFDIHSPRVPPVSEFKERIDAIVKHVPKDHLWLNPDCGLKTRGWPETTADLKNMIAAAREAREQYA

SEQ ID NO: 25077 - protein, 148 aa, Bacillus subtilis
MEKTFIMVKPDGVQRQLIGDILSRFERKGLQLAGAKLMRVTEQMAEKHYAEHQGKPFFGELVEFITSGPVFAMVWEGENVIEVTRQLIGKTNPKEALPGTIRGDYGMFVGKNIIHGSDSLESAEREINIFFKNEELVSYQQLMAGWIY

SEQ ID NO: 25078 - protein, 458 aa, Novosphingobium aromaticivorans DSM 12444
MNGINANRPHLPLARILEMNLGFLGLQFSFGLQQGNMGPIYSYLGADESQLPMLQLAGPITGLLVQPIIGAMSDRTASRWGRRTPYFLIGAVLCAFGLFFMPLSSSILMAMSLLWILDAGNNITMEPYRAYVSDRLNPEQRQAGFLSQSAFTGLAQMLAFLTPSLLVGLGMNQDWVDSHGIPYTVRIVFMIGAVLSLSTILWSVLRVPELPLTPQERAHIQAQPKGAWATLREIGEAIADMPVAMRKLGLMSLFQWVGMSGYWTYAVYSISRTVYGTSDVHSSAFHTAVLTNGEVAAFYNAISFVTAFAMVPLVRRLGPGPLHALCLFAGGVGMFLLPNVTDKALLFLPAIGIGLAWGSIMGNPYAILTNSIPPQRTGVYMGIFNMMIVIPMLIFAVVMSRLDLGFVSLGFDAYKQVLGGDPRNMLMFCGASLVLAGFSVLWVREGRAGAMPQSAVPA

SEQ ID NO: 25079 - protein, 221 aa, Streptomyces mycarofaciens
MADQTTLSPALLDYARSVALREDGLLRELHDMTAQLPGGRAMQIMPEEAQFLGLLIRLVGARRVLEIGTFTGYSTLCMARALPAGGRIVTCDISDKWPGIGAPFWQRAGVDGLIDLRIGDAARTLAELRERDGDGAFDLVFVDADKAGYLHYYEQALALVRPGGLVAIDNTLFFGRVADPAADDPDTVAVRTLNDLLRDDERVDIALLTVADGITLARRRE

SEQ ID NO: 25080 - protein, 352 aa, Haemophilus somnus 2336
MSINFVKEGNIMSKYVRSVCLVEPKKVDIKTVLYPKKGECDVLIKVESIGICGSDIGAFRGTNPLVTYPRILGHEIVGTVIEAGVGMPKNINIGDRVILEPYIYCGHCYPCSISRTNCCEALKVLGVHIDGAMQEIVRHPAHMLIKAPDIPIHELALAEPLTISLHAIRRTKVKAGEHVAIIGAGAIGLMAALVAKAYGATPILIDILDKRLDYAKSIGIPNIINPAKENDLEAIKSITNGRMAEVVIEASGANIAVQNTLKYTSFAGRIALTGWPKNETPLPTNLITFKELNIYGARTSKGEFEEALKLLESRKIEPKNIISKVITFDEIPHYIEELSENPDDYLKIIAVF

SEQ ID NO: 25081 - protein, 206 aa, Yersinia pseudotuberculosis IP 32953
MLTVWGRNNSTNVKKVLWCLEELGIPYQRIDIGGQYGKLNDPQYRALNPNGLIPCLQDKDFILWESNTIVRYLAAQYGQNSLYLADHHQRASAEKWMDWATSSVVEPFKAVFIGLVRTPPEQQDKVKIAQGMEKMNTLMSIANDALGEQAYLSGDAFGIGDIPLGCLAYAWFNLPIERPELPHLQRWYQSLTQRIAFQKVIAIGLS

SEQ ID NO: 25082 - protein, 375 aa, Haloarcula marismortui ATCC 43049
MSGFVFNEKPIQIERGDGAYVYDDSGTEYLDMGASYACVPLGHKHPAVHSAVSEQLEKITYVQASYPNAERTALYDLLAKTAPDPIDKTWLCNSGTEANEAALKFARSATGNSKIVATMQGFHGRTMGALATTWKNKYKKPYEPLIGDVEFVPYDDSEALEEAVDEDTAAFIVEPVQGEGGINPTSDGYLEDAREITEDAGAALIFDEVQTGMGRTGALWNSQRAAVAPDMITAAKGLGNGLPIGATLCRDWIAEDYGSHASTFSGGPVISAAAGATVSTIIEDSVPGNAAVIGDYLLTELEAAIGDDVRDIRGEGLMIGVEVGRGANAALKKLALNHQVLALPAGRTVIRLLPPLTIDKDHADAVVDAMAEVVE

SEQ ID NO: 25083 - protein, 339 aa, Acinetobacter sp. ADP1
MAKILVTGGAGYIGSHTCVELLNANHSVVVVDNLSNSSEEALFRVQQLTGKSLDFVQGDIRDSTLLDQVFAQYSIDAVIHFAGLKAVGESQQIPLAYFDNNIAGSISLVKAMERAGVFKLVFSSSATVYDEANTSPLNEDMPTGMPSNNYGYTKLIVEQMLEKLAIADTRWSIALLRYFNPVGAHQSGQIGEDPQGIPNNLMPYVTQVAVGRRQKLSIFGDDYDTIDGTGVRDYIHVVDLANAHLCALNNRLNAVGCRAWNIGTGNGSSVLQVKDTFEQVNGVAIAFEFAPRRLGDVATSFADNQRALDELGWVPRYTLEDMLKDSWNWQKQNPQGYSN

SEQ ID NO: 25084 - protein, 290 aa, Saccharomyces cerevisiae
TLVHVASVEKGRSYEDFQKVYNAIALKLREDDEYDNYIGYGPVLVRLAWHISGTWDKHDNTGGSYGGTYRFKKEFNDPSNAGLQNGFKFLEPIHKEFPWISSGDLFSLGGVTAVQEMQGPKIPWRCGRVDTPEDTTPDNGRLPDADKDAGYVRTFFQRLNMNDREVVALMGAHALGKTHLKNSGYEGGGANNVFTNEFYLNLLNEDWKLEKNDANNEQWDSKSGYMMLPTDYSLIQDPKYLSIVKEYANDQDKFFKDFSKAFEKLLENGITFPKDAPSPFIFKTLEEQGL

SEQ ID NO: 25085 - protein, 289 aa, Saccharomyces cerevisiae
LVHVASVEKGRSYEDFQKVYNAIALKLREDDEYDNYIGYGPVLVRLAWHISGTWDKHDNTGGSYGGTYRFKKEFNDPSNAGLQNGFKFLEPIHKEFPWISSGDLFSLGGVTAVQEMQGPKIPWRCGRVDTPEDTTPDNGRLPDADKDAGYVRTFFQRLNMNDREVVALMGAHALGKTHLKNSGYEGGGANNVFTNEFYLNLLNEDWKLEKNDANNEQWDSKSGYMMLPTDYSLIQDPKYLSIVKEYANDQDKFFKDFSKAFEKLLENGITFPKDAPSPFIFKTLEEQGL

SEQ ID NO: 25086 - protein, 470 aa, Escherichia coli
MKKTKIVCTIGPKTESEEMLAKMLDAGMNVMRLNFSHGDYAEHGQRIQNLRNVMSKTGKTAAILLDTKGPEIRTMKLEGGNDVSLKAGQTFTFTTDKSVIGNSEMVAVTYEGFTTDLSVGNTVLVDDGLIGMEVTAIEGNKVICKVLNNGDLGENKGVNLPGVSIALPALAEKDKQDLIFGCEQGVDFVAASFIRKRSDVIEIREHLKAHGGENIHIISKIENQEGLNNFDEILEASDGIMVARGDLGVEIPVEEVIFAQKMMIEKCIRARKVVITATMMLDSMIKNPRPTRAEAGDVANAILDGTDAVMLSGESAKGKYPLEAVSIMATICERTDRVMNSRLEFNNDNRKLRITEAVCRGAVETAEKLDAPLIVVATQGGKSARAVRKYFPDATILALTTNEKTAHQLVLSKGVVPQLVKEITSTDDFYRLGKELALQSGLAHKGDVVVMVSGALVPSGTTNTASVHVL

SEQ ID NO: 25087 - protein, 243 aa, Pisum sativum
MSFPNESMPDSPQRKIGRGKIEIKRIENTTNRQVTFCKRRNGLLKKAYELSVLCDAEVALIVFSTRGRLYEYANNSVKASIERYKKACSDTSGAKSASETNAQYYQQEAAKLRVQISNLQNHNRQMMGEALSNMNGKELRNLESKLEKGISRIRSKKNEMLFAEIEYMQKREIELHNSNQALRAKISENDQRNNHNVNVLHGGTNFECIQPQQQFDSRSYFQVNELQPNNQYARQDQMSLQFV

SEQ ID NO: 25088 - protein, 181 aa, Solanum tuberosum
MASSIVSSAAVATRSNVAQASMVAPFTGLKSAASFPVTKKNNNVDITSLASNGGRVRCMQVWPPINMKKYETLSYLPDLSDEQLLKEVEYLLKNGWVPCLEFETEHGFVYREHNSSPGYYDGRYWTMWKLPMFGCTDGTQVLAEVQEAKNAYPQAWIRIIGFDNVRQVQCISFIAYKPEGY

SEQ ID NO: 25089 - protein, 269 aa, Oryza sativa (japonica cultivar-group)
MSCHGGGGGGGEGALSRQGSVYSLTLNEVESHLGEPLRSMNLDDLLRTVLPAAAAAAETAGRKTVDEVWRDIQGASTGRHHATPMGEMTLEDFLSRAGVAVDGAASAAGAHWLRGHYPPPPPPTTTTLQYVGGSGAVVDGVYNRVDGHGVAGFLSQVGVAGRKRGGGVDGVVEKTVERRQKRMIKNRESAARSRARKQAYTNELENKISRLEEENQRLREHKAVADFSTFPSCVDFLKAFLTQKLEPVMQIVPQPEPKQQLRRTTSASF

SEQ ID NO: 25090 - protein, 364 aa, Vigna unguiculata
MFLALFFLGTWPALLTMLERRGRLPQHTYLDYSITNFFAALLIAFTFGEIGKGKPDEPNFLAQLAQDNWPSVLFAMGGGVVLSLGNLSSQYAFAFVGLSVTEVITASITVVIGTTLNYFLDDKINKAEILFPGVGCFLIAVFLGFCRFNSSNASDNKAKLSNYTSDYKEVAISSKESDLVKSKDLERGSSSADNVEAGTAVFLLELEERRAIKVFGKSTLIGLALTFSAGLCFSMFSPAFNLATNDQWHTLPNGIPHLTVYTAFFYFSISCFVIAIILNITFLYHPVLNLPKSSLKAYLADSDGRIWALLAGLLCGFGNSLQFMGGQAAGYQQQSLCRHFLCKHFWGVLLFGEYRRSSRKTYIC

SEQ ID NO: 25091 - protein, 185 aa, Chlamydomonas reinhardtii
MAAVIAKSSVSAAVARPARSSVRPMAALKPAVKAAPVAAPAQANQMMVWTPVNNKMFETFSYLPPLTDEQIAAQVDYIVANGWIPCLEFAEADKAYVSNESAIRFGSVSCLYYDNRYWTMWKLPMFGCRDPMQVLREIVACTKAFPDAYVRLVAFDNQKQVQIMGFLVQRPKTARDFQPANKRSV

SEQ ID NO: 25092 - protein, 3816 aa, Streptomyces antibioticus
MTNDEKIVEYLKRATVDLRKARHRIWELEDEPIAITSMACHFPGGIESPEQLWELLSAGGEVLSEFPDDRGWDLDEIYHPDPEHSGTSYVRHGGFLDHATQFDTDFFGISPREALAMDPQQRLLLETSWQLFERAGVDPHTLKGSRTGVFVGAAHMGYADRVDTPPAEAEGYLLTGNASAVVSGRISYTFGLEGPAVTVDTACSSSLVALHLAVQALRRGECSLAVVGGVAVMSDPKVFVEFSRQRGLARDGRSKAFAASADGFGFAEGVSLLLLERLSDARRLGHRVLAVVRGSAVNQDGASNGLAAPNGPSQQRVIRAALADAGLAPADVDVVEAHGTGTRLGDPIEAQALLATYGQGRTSGRPVWLGSVKSNIGHTQAAAGVAGVMKMVLALERGVVPKTLHVDEPSPHVDWSTGAVELLTEERPWEPEAERLRRAGISAFGVSGTNAHVIVEEAPAEPEPEPEPGTRVVAAGDLVVPWVVSGRDAGALRAQAARLAAHVSSTGAGVVDVGWSLVATRSVFEHRAVMVGTDLDSMAGSLAGFAAGGVVPGVVSGVAPAEGRRVVFVFPGQGSQWVGMAAGLLDACPVFAEAVAECAAVLDPLTGWSLVEVLRGGEAVLGRVDVVQPALWAVMVSLARTWRYYGVEPAAVVGHSQGEIAAACVAGGLSLADGARVVVLRSRAIARIAGGGGMVSVSLPAGRVRTMLDTYGGRLSVAAVNGPSSTVVSGDAQALDELLAGCEREGVRARRVPVDYASHSAQMDQLRDELLEALADITPQHSSVPFFSTVTADWLDTTALDAGYWFTNLRETVRFQEAVEGLVAQGMGAFVECSPHPVLVPGIEQTLDTVEADAVALGSLRRDEGGLGRFLTSLAEAFVQGVPVDWSRTFEGASPRTVDLPTYPFQRQRFWLEGSPALSSNGVEGEADVAFWDAVEREDSAVVAEELGIDAKALHMTLPALSSWRRRERQRRKVQRWRYRVEWKRLPNSRAQESLQGGWLLVVPQGRAGDVRVTQSVAEVAAKGGEATVLEVDALHPDRAAYAEALTRWPGVRGVVSFLAWEEQALAEHPVLSAGLAASLALAQALIDVGGSGESAPRLWLVTEAAVVIGAADTGAVIDPVHAQLWGFGRVLALEHPELWGGLIDLPAVAGEPGSITDHAHADLLATVLATMVQAAARGEDQVAVRTTGTYVPRLVRSGGSAHSGARRWQPRDTVLVTGGMGPLTAHIVRWLADNGADQVVLLGGQGADGEAEALRAEFDGHTTKIELADVDTEDSDALRSLLDRTTGEHPLRAVIHAPTVVEFASVAESDLVRFARTISSKIAGVEQLDEVLSGIDTAHDVVFFSSVAGVWGSAGQSAYAAGNAFLDAVAQHRRLRGLPGTSVAWTPWDDDRSLASLGDSYLDRRGLRALSIPGALASLQEVLDQDEVHAVVADVDWERFYAGFSAVRRTSFFDDVHDAHRPALSTAATNDGQARDEDGGTELVRRLRPLTETEQQRELVSLVQSEVAAVLGHSSTDAVQPQRAFREIGFDSLTAVQLRNRLTATTGMRLPTTLVFDYPTTNGLAEYLRSELFGVSGAPADLSVVRNADEEDDPVVIVGMACRFPGGIDTPEAFWKLLEAGGDVISELPANRGWDMERLLNPDPEAKGTSATRYGGFLYDAGEFDAAFFGISPREALAMDPQQRLLLETVWELIESAGVAPDSLHRSRTGTFIGSNGQFYAPLLWNSGGDLEGYQGVGNAGSVMSGRVAYSLGLEGPAVTVDTACSSSLVALHLAVQALRRGECSLAIAGGVTVMSTPDSFVEFSRQQGLSEDGRCKAFASTADGFGLAEGVSALLVERLSDARRLGHRVLAVVRGSAVNQDGASNGLTAPNGPSQQRVIRAALADAGLAPADVDVVEAHGTGTRLGDPIEAQALLATYGQGRAGGRPVVLGSVKSNIGHTQAAAGVAGVMKMVLALERGVVPKTLHVDEPSPHVDWSAGEVELAVEAVPWSRGGRVRRAGVSSFGISGTNAHVIVEEAPAEPEPEPGTRVVAAGDLVVPWVVSGRDAGALREQAARLAAHVSSTGAGVVDVGWSLVATRSVFEHRAVMVGSELDSMAESLAGFAAGGVVPGVVSGVAPAEGRRVVFVFPGQGSQWVGMAAGLLDACPVFAEAVAECAAVLDPVTGWSLVEVLRGGGEAVLGRVDVVQPALWAVMVSLARTWRYYGVEPAAVVGHSQGEIAAACVAGGLSLADGARVVVLRSRAIARIAGGGGMVSVGLSAERVRTMLDTYGGRVSVAAVNGPSSTVVSGDVQALDELLAGCEREGVRARRVPVDYASHSAQMDQLRDELLEALADITPQHSSVPFFSTVTADWLDTTALDAGYWFTNLRETVRFQEAVEGLVAQGMGAFVECSPHPVLVPGIEQTLDALDQNAAVLGSLRRDEGGLDRLLTSLAEAFVQGVPVDWTHAFEGMTPRTVDLPTYPFQRQHYWPKPAPAPGANLGDVASVGLTAAGHPLLGAVVEMPDSDGLVLTGQISLRTHPWLADHEVLGSVLLPGTAFVELAVQAADRAGYDVLDELTLEAPLVLPDRGGIQVRLALGPSEADGRRSLQLHSRPEEAAGFHRWTRHASGFVVPGGTGAARPTEPAGVWPPAGAEPVALASDRYARLVERGYTYGPSFQGLHTAWRHGDDVYAEVALPEGTPADGYALHPALLDAAVQAVGLGSFVEDPGQVYLPFLWSDVTLHATGATSLRVRVSPAGPDTVALALADPAGAPVATVGALRLRTTSAAQLARARGSAEHAMFRVEWVEEGSAADRCRGGAGGTTYEGERAAEAGAAAGTWAVLGPRVPAAVRTMGVDVVTALDTPDHPADPQSLADLAALGDTVPDVVVVTSLLSLASGADSPLGNRPRPTAAEQDTAATVAGVHSALHAALDLVQAWLADERHTASRLVLVTRHAMTVAESDPEPDLLLAPVWGLVRSAQAENPGRFVLADIDGDEASWDALPRAVASAASEVAIRAGAVYVPRLARATDEGLVVADEAAGPWRLDVTEAGTLANLALVPCPDASRPLGPDEVRIAVRAAGVNFRDVLLALGMYPDEGLMGAEAAGVVTEVGGGVTTLAPGDRVMGLVTGGFGPVAVTHHRMLVRMPRGWSFAEAASVPVAFLTAYYALHDLAGLRGGESVLVHSAAGGVGMAAVQLARHWDAEVFGTASKGKWDVLAAQGLDEEHIGSSRTTEFEQRFRATSGGRGIDVVLNALSGDFVDASARLLREGGRFVEMGKTDIRTDLGVVGADGVPDIRYVAFDLAEAGAERIGQMLDEIMALFDAGVLRLPPLRAWPVRRAHEALRFVSQARHVGKVVLTVPAALDAEGTVLITGAGTLGALVARHLVTEHDVRRLLLVSRSGVAPDLAAELGALGAEVTVAACDVANRKALKALLEDIPPEHPVTGIVHTAGVLDDGVVSGLTPERVDTVLKPKVDAALTLESVIGELDLDPALFVIFSSAASMLGGPGQGSYAAANQFLDTLARHRARRGLTSVSLGWGLWHEASGLTGGLADIDRDRMSRAGIAPMPTDEALHLFDRATELGDPVLLPMRLNEAALEDRAADGTLPPLLSGLVRVRHRPSARAGTATAAPATGPEAFARELAAAPDPRRALRDLVRGHVALVLGHSGPEAIDAEQAFRDIGFDSLTAVELRNRLNAETGLRLPGTLVFDYPNPSALADHLLELLAPATQPTAAPLLAELERVEQLLSAAASPGGPASAVDEETRTLIATRLATLASQWTHLPVGSPGNADNRSGPGESGQAQESGATGEHTAAWTSDDDLFAFLDKRLET

SEQ ID NO: 25093 - protein, 306 aa, Glycine max
  misc_feature (232)..(232): Xaa can be any naturally occurring amino acid
  misc_feature (266)..(266): Xaa can be any naturally occurring amino acid
  unsure (1)..(306): unsure at all Xaa locations
MDGYDATVRLGAINLKHGRAADFDSASPDVSVSSPVTRQKAAAAKQFIENHYKNYLQGLQDRKDRRRALQRKVQESQISAEEQEEMMRNLERRETEYMRLQRRKIGMDDFEQLTVIGKGAFGEVRLCRAKGTGEIFAMKKLKKSEMLSRGQVEHVRSERNLLAEVDSRCIVKLHYSFQDSDFLYLIMEYLPGGDIMTLLMREDILSEDVARFYIAESILAIHSIHQHNYVHXLSDFGLCKPLDDKYSSILLENEDLTGQESTSETXAYSGSPWLMPKERLQHWKRNRRALAYSTGGTFEYMAPDVC

SEQ ID NO: 25094 - protein, 343 aa, Thermus thermophilus HB8
MRALAKLAPEEGLTLVDRPVPEPGPGEILVRVEAASICGTDLHIWKWDAWARGRIRPPLVTGHEFSGVVEAVGPGVRRPQVGDHVSLESHIVCHACPACRTGNYHVCLNTQILGVDRDGGFAEYVVVPAENAWVNPKDLPFEVAAILEPFGNAVHTVYAGSGVSGKSVLITGAGPIGLMAAMVVRASGAGPILVSDPNPYRLAFARPYADRLVNPLEEDLLEVVRRVTGSGVEVLLEFSGNEAAIHQGLMALIPGGEARILGIPSDPIRFDLAGELVMRGITAFGIAGRRLWQTWMQGTALVYSGRVDLSPLLTHRLPLSRYREAFGLLASGQAVKVILDPKA

SEQ ID NO: 25095 - protein, 335 aa, Novosphingobium aromaticivorans DSM 12444
MRAAVMQGLHKPLAIDTIPDPTPGEGDVVVKVGRCGICGSDLHMTEDPAYGQGAGSVLGHEFAGEVVALGKGVEGLRTGDLVSVIPLQSCGQCHSCRTGEVQWCERFGLQGGGYAEFALTRPNQCVRLPASASMADGAIVEPLAVALHGLALSRMKIGDKVLVLGAGPIGLAVAFWARRFGAGRVVVQDLAEWQRDRALQMGAHDFVVDAADPVGSAGRALGGKADIVFECVGVPGLIAQAVEQVRNDGTITLLGLCTRPDTFNSFAMLSKQVKLVTSAFFTRQEYEAALDALVRGAVEPRLLVTDTISLDATPDVFESLRKRTHQCKVLINPGE

SEQ ID NO: 25096 - protein, 356 aa, Novosphingobium aromaticivorans DSM 12444
MSGGEPVPKLSAKPAATYLRNTWYVAGWASDLAGEPQQRTFLEEPVALFRDGHGEAKAIGGRCPHRFAPLGHGSVVDGALMCPYHGLRFDGDGRCVHNPHPGGHLPDARQRVYPLVERHALLWIWMGDAAKADPASIPDFSWLSDPRWEAVRGATVAEGHFELYSDNILDLSHANFVHPALVASAFTEGERKFWQDGDNVFAEYVRLNDELSVGISAVMGTEGRPQDFYGMVKWHAPAVLYFDFRAGEPGTPREQCTLLPSLHAFTPETPDTTHYFWATARDYRLGDAEFTAGMRAALEFAFEQEDMPIIRDSHRLMRGEDFWALRPLILGGDGGGVRARRMLQRLIERERQQDAA

SEQ ID NO: 25097 - protein, 555 aa, Arabidopsis thaliana
MLTKPGKKLDSSESTHHTTSSNYPPLDIVHQTPQPRKEMQQKPLFDPKKMDNLIKPEPAGFTNHHRPNPSPKIPSSPGSNMTESQSNLNTKPNNNNSNNNSNMSSRSNSIESTSSNPSKPHTGGDIRWDAVNTLTSKGVQLGISDFRLLKRLGYGDIGSVYLVELRGTITYFAMKVMDKASLASRNKLLRAQTEREILSQLDHPFLPTLYSHFETDKFYCLVMEFCGGGNLYSLRQKQPNKCFTEDAARFFASEVLLALEYLHMLGIVYRDLKPENVLVRDDGHIMLSDFDLSLRCSVSPTLVKSSSVHAAGGGSGSSRPVGLIDEDAAVQGCIQPSTFFPRILQSSKKNRKAKSDFGLFVNGSMPELMAEPTNVKSMSFVGTHEYLAPEIIRGEGHGSAVDWWTFGIFIYELLYGATPFKGQGNRATLHNVIGQALRFPEVPHVSSAARDLIKGLLVKEPQKRIAYKRGATEIKQHPFFEGVNWALIRSATPPHVPEPVDFSCYASKDKESMAAVDGGGKKNNNGAGGGCSTGGGDNKPNGDCNDPDYIDFEYF

SEQ ID NO: 25098 - protein, 920 aa, Magnetococcus sp. MC-1
MYDLENTLMRQALELNGLGTIILDPQQTIVFWNAWMERGSQMFAAHVLGSKLLDVFPELQGSRLDRAVVSALRTGLPTMLSHRLNPTPFPLETASKNEELGQRMSQMVQIKAIRNEAGERYCVILIHDITNTVSREQMLRNQARELHSAKDEAQQANRAKSDFLANMSHEIRTPMNAIIGMSHLALKTDLNAKQRDYVGKIHDSALLLLGIINDILDFSKIEAGKLSMESVAFYLDDVLSNVANLVSMKVEEKGLEISFQVDRGVPLHLVGDPLRLGQILINLVNNAVKFTEQGNIVVAITAELDCESHVVVQFQVRDSGIGMTKQQIDRLFQAFSQADSSTTRRYGGSGLGLSICKRLVGMMDGDIWVESQPGRGSQFTFTAQLVSQRQDRRRFRLPSMHLVGLRVLVVDDNPVVRQILVESLAIFSFCVEALATVEEVIEALGQAIARGEPYGLVVLAGRFGGKGGVALAGEINRCYPQLTLPKMVLVGASERDDVVAMAGAQLVELFVTKPITQTILFEGVLEVLGYVVQAQQHAGGRDRTREKRVLSGCQILLVEDNEINQQVACELLQGEGVTVVVANSGQQAVDRVLSGERFDAVLMDIQMPGMDGYEATQVIRKQPQFSDLPIIAMTANAMAGDRERCLAAGMNDHIGKPIQPKLLFETLGRYVIKGDGVVEAGNKGILLPPIELTPLDGSVTTPLPPPVLPAAVGRAAMISPRAGAVPERLDGVDMEKGLVHVGGNEALYVKILKEIGERYKDVVVEIQGLFAARHFAQAIQLVHTYKGLTGTIGAMALSQSAAQLEEALKAGAYERLPQLLGDFSQLAERLNVALLPMVGVANVQALPSGAEQAGLEEGLLALGALIRDGDAEALDRVKQLRGMAAGQVYQPLMAQLESELDEYEFERAKVTYHHLLAQLK

SEQ ID NO: 25099 - protein, 759 aa, Vitis vinifera
MGVMGDAFTQLLIPVAALVGIGFALLQWLLVSKVKVSADSDLNNGYSDRLIEEEEEGIDHEDVAAKCAEIQNAISVGATSFLFTEYRYLSIFMGVFGAIIFLFLGSVKGFSTKSEPCTYNTGSLCKPALANALFSTIAFLLGAMTSVFSGFLGMKIATYANARTTLEARKGVGKAFIVAFRSGAVMGFLLAASGLLVLYVSIHLFSLYYGDDWEGLYESITGYGLGGSSMALFGRVGGGIYTKAADVGADLVGKVERNIPEDDPRNPAVIADNVGDNVGDIAGMGSDLFGSYAEASCAALFVASISSFGISHDYTAMSFPLIISSVGIVVCLGTTLFATDFVEIKNVSEIEPSLKRQLLISTILMTAGIAVVSFFALPSEFTLFNFGSTKTVKNWHLFFCVSIGLWAGLVIGYITEYYTSNAYSPVQDVADSCRTGAATNVIFGLALGYKSVIIPIFAIAIAIYVSFSMAAMYGIAVAALGMLSTIATGLAIDAYGPISDNAGGIAEMAGMSHKIRQRTDALDAAGNTTAAIGKGFAIGSAALVSLALFGAFVSRAGIETVDVLTPKVFIGLIVGAMLPYWFSAMTMKSVGSAALKMVEEVRRQFNTIPGLMEGRAKPDYATCVKISTDASLREMIPPGALVMLTPLIAGTLFGVETLAGVLAGSLVSGVQVAISASNTGGAWDNAKKYIEAGASEHARSLGPKGSDPHKAAVIGDTIGDPLKDTSGPSLNILIKLMAVESLVFAPFFAAHGGLLFKLL

SEQ ID NO: 25100 - protein, 1027 aa, Chlamydomonas reinhardtii
MGCAQSTPVDQPARQQPQATQQKSVEPAVVKKPVEPARVEPKVEVPSTKPSEVPHVEKAQSINRGQPGDGSGPLQQPSPAMPGAKQGGTKERRAAAGSEAVRDQIRKLAVGGPQAKEEKEKIYEVSDSEDEELEDDPSERTTLSGDWYKPQEVTDAILEALKRNFVFKGIPQNHLVEVVGRMYGISFKSGAVVLQQGALPKQDDCMYYLQQGEAEVVISGGADASKNHGEERKVDGHTVRIPQKPGWLFGDVALLFHSPRTASVVAKTNITVWAMDRRTFLKFVMKHAQGARALRFLRKLPLLKGLSDNDLIRAASRMPQRMYEDGQPLIRIGERGDELFLIRYGKVRVFRPDGNGGRVEVAVLGRGQFVGERAVINDKLRSADCVAQGQVQVVVLKKREFMDLDNPLLAWMLDYDAVSAVIRSLPQFKGLKQEQMENILDRFDAREELMQGDTILNQGDMLEKLYVVKIGEIALFRNDERVEDPNFVHEIAGFSYFGETAITQTGKCPYTIRVASESLHLLSLPKRQVDSFMGRDTGLKNEEAVVAALKKSKFLANMTDPEFKELLKACEQTDYNPGEVIAVANSSVTNKIFLVKSGEVMVVAADLALPDTGEVDVRKLTGSERQRLLAGSIFNDKALNSPETASLEASLVAGTPCGIITFTTSDVERVMGGRAMSRSRNAMPGAAAAVEERKFPRVKFTELEFHRIIGTGQFGLVRVVRNIKTNEVYALKVMHKAPIVESKQIEHVINERKILEEACTHPFCVRLCGAYQDKASLYLLQEWVPGGELFHHLDVEGAFDEPTAMFYAANVLLALEFLHAKGIVYRDLKPENLLLDTQGYIKMADFGFAKYIGGDKTYTICGTPDYQAPEVIMRRGTTKAADYWALGVLIFEMLVGDPPFKSLTGDPWDTFRRTLSGRFYVPNFISDQAADLIFKLLQVNPDKRLGSDKRLGAEEIKRHRWFSRIDWRALEQKKLPSPFRPRVRNPLDTSNFDNFDNVDLEPPPVPADRAEKHSQQWELWDWIDDSK

SEQ ID NO: 25101 - protein, 356 aa, Oryza sativa
MAALTSYEMAASILLCAEDSSSVLGFGGEEEEEEEDVVAGKRARCAGPPPPPCVDVAGVDFAVPSEECVARLVETEADHMPREDYAERLRAGGGDGDLDLRVRMDAIDWIWKVHSYYSFAPLTACLAVNYLDRFLSLYQLPDGKDWMTQLLAVACLSLAAKMEETDVPQSLDLQVGEERYVFEAKTIQRMELLVLSTLKWRMQAVTPFSYVDYFLRELNGGDPPSGRSALLSSELILCIARGTECLGFRPSEIAAAVAAAVVGEEHAAFSHVNKERMSHCQEVIQAMELIHPKPSSPSRVFVSSSIPRSPTGVLDAAGCLSYRSDDSAVASHYAASSWGYEHDSSPVSSKRRKISR

SEQ ID NO: 25102 - protein, 384 aa, Mycobacterium avium subsp. paratuberculosis K-10
MVRTGYGVQVARTVSDSAPDSAEDPSEREFGQAGIALSTYRFPTGWFIVAFGSDLAPGQVKRAHYFGEELVLFRTASGRVHVMDAYCQHLGANLGVGGTVEGENIVCPWHGWQWRGDGSNALIPYSKIGCKNNVRIRTYPSMEWYGFVLAWHERHGRAPYWQPPVLPELETGEYYPLHPHTQMVNRVKVHPQMIIENAADPYHVQYVHKAANPATTASFEVAGYHLHATVNAHFGGGRAQTWLTPNGPVDAKIIYDNYSLGLGVVRFPSELVATVQVTGQTPVDEDYTDYFYTQASVREPGDTGDVPTGRAARFLALQKEVIKQDFFTWENMKYLEKPNLAPEEAHDYAALRRWAHRFYPGPQPAPTDFGYTADGEPDPAAAKA

SEQ ID NO: 25103 - protein, 684 aa, Arabidopsis thaliana
MSQTFAVILLLLIFLTHLVSSLIQDFSFIGFKKASPNLTLNGVAEIAPTGAIRLTTETQRVIGHAFYSLPIRFKPIGVNRALSFSTSFAIAMVPEFVTLGGHGLAFAITPTPDLRGSLPSQYLGLLNSSRVNFSSHFFAVEFDTVRDLEFEDINDNHVGIDINSMESSISTPAGYFLANSTKKELFLDGGRVIQAWIDYDSNKKRLDVKLSPFSEKPKLSLLSYDVDLSSVLGDEMYVGFSASTGLLASSHYILGWNFNMSGEAFSLSLPSLPRIPSSIKKRKKKRQSLILGVSLLCSLLIFAVLVAASLFVVRKVKDEDRVEEWELDFGPHRFSYRELKKATNGFGDKELLGSGGFGKVYKGKLPGSDEFVAVKRISHESRQGVREFMSEVSSIGHLRHRNLVQLLGWCRRRDDLLLVYDFMPNGSLDMYLFDENPEVILTWKQRFKIIKGVASGLLYLHEGWEQTVIHRDIKAANVLLDSEMNGRVGDFGLAKLYEHGSDPGATRVVGTFGYLAPELTKSGKLTTSTDVYAFGAVLLEVACGRRPIETSALPEELVMVDWVWSRWQSGDIRDVVDRRLNGEFDEEEVVMVIKLGLLCSNNSPEVRPTMRQVVMYLEKQFPSPEVVPAPDFLDANDSMCLDERSGSAGEFEDFVDSARFYSGPNETTTSSIFSFSGKTRTDPR

SEQ ID NO: 25104 - protein, 241 aa, Pisum sativum
MELPNEGGEGSSQKKLGRGKIEIKRIENTTNRQVTFCKRRNGLLKKAYELSVLCDAEVALVVFSTRGRLYEYANNSVRATIERYKKACAASTNAESVSEANTQFYQQESSKLRRQIRDIQNLNRHILGEALGSLSLKELKNLEGRLEKGLSRVRSRKHETLFADVEFMQKREIELQNHNNYLRAKIAEHERAQQQQQNLMPETMCESLPSQTYDRNFFPVNLLGSDQQEYSRQDQTALQLV

SEQ ID NO: 25105 - protein, 448 aa, Escherichia coli
  misc_feature (12)..(12): Xaa can be any naturally occurring amino acid
  misc_feature (18)..(18): Xaa can be any naturally occurring amino acid
  misc_feature (23)..(23): Xaa can be any naturally occurring amino acid
  misc_feature (42)..(42): Xaa can be any naturally occurring amino acid
  misc_feature (85)..(85): Xaa can be any naturally occurring amino acid
  misc_feature (127)..(127): Xaa can be any naturally occurring amino acid
  misc_feature (152)..(152): Xaa can be any naturally occurring amino acid
  misc_feature (246)..(246): Xaa can be any naturally occurring amino acid
  misc_feature (254)..(254): Xaa can be any naturally occurring amino acid
  misc_feature (268)..(268): Xaa can be any naturally occurring amino acid
  misc_feature (280)..(280): Xaa can be any naturally occurring amino acid
  misc_feature (331)..(331): Xaa can be any naturally occurring amino acid
  misc_feature (376)..(376): Xaa can be any naturally occurring amino acid
  misc_feature (447)..(447): Xaa can be any naturally occurring amino acid
  unsure (1)..(448): unsure at all Xaa locations
AETSSATTAQQXPSLAPXLEKVXPSVVSINVEGSTTVNTPRXPRNFQQFFGDDSPFCQEGSPFQSSPFCQGGQGGNGGGQQQKFXALGSGVIIDADKGYVVTNNHVVDNATVIKVQLSDGRKFDAKXVGKDPRSDIALIQIQNPKNLTAIKXADSDALRVGDYTVAIGNPFGLGETVTSGIVSALGRSGLNAENYENFIQTDAAINRGNAGGALVNLNGELIGINTAILAPDGGNIGIGFAIPSNXVKNLTSQXVEYGQVKRGELGIXGTELNSELAKAXKVDAQRGAFVSQVLPNSSAAKAGIKAGDVITSLNGKPISSFAALRAQVGTXPVGSKLTLGLLRDGKQVNVNLELQQSSQNQVDSSSIFNGIEGAEXSNKGKDQGVVVNNVKTGTPAAQIGLKKGDVIIGANQQAVKNIAELRKVLDSKPSVLALNIQRGDSTIYLLXQ

SEQ ID NO: 25106 - protein, 231 aa, Vibrio vulnificus CMCP6
MNKYLAELFGTFWLVLGGCGSAVLAAAFPDVGIGLLGVSLAFGLTVLTMAFAIGHISGCHLNPAVTIGLWAGGRFEAKEIVPYILAQVIGGVIAGGVLYTIASGQMGFDATSSGFASNGYGEHSPGGYSLTSALVTEVVMTMMFLLVILGATDQRAPQGFAPIAIGLCLTLIHLISIPVTNTSVNPARSTGVALYVGDWATAQLWLFWVAPILGALLGAVAYKLISGSNKD

SEQ ID NO: 25107 - protein, 364 aa, Bacillus sphaericus
MEIFKYMEKYDYEQLVFCQDEASGLKAVIAIHDTTLGPALGGARMWTYNAEEEAIEDALRLARGMTYKNAAAGLNLGGGKTVIIGDPFADKNEDMFRALGRFIQGLNGRYITAEDVGTTVDDMDLIHQETDYVTGISPAFGSSGNPSPVTAYGVYRGMKAAAKEAFGSDSLEGLAVSVQGLGNVAKALCKKLNTEGAKLVVTDVNKAAVSAAVAEEGADAVAPNAIYGVTCDIFAPCALGAVLNDFTIPQLKAKVIAGSADNQLKDPRHGKYLHELGIVYAPDYVINAGGVINVADELYGYNRTRAMKRVDGIYDSIEKIFAISKRDGVPSYVAADRMAEERIAKVAKARSQFLQDQRNILNGR

SEQ ID NO: 25108 - protein, 235 aa, Zea mays
MERGDCQFTVVPPRQYDEAQFMHQLMVAGDQQDPAGAGRGAAAAGGERKRRFTEEQVRSLETTFHARRAKLEPREKAELARELGLQPRQVAIWFQNKRARWRSKQLEHDYAALRAQFDAMHARVESLRQEKIALAAQVDELRGRLNERQDQSGSCEVNDAEAAADDKRNNSTSSLVQDDGATPPPAAVDASEDSAATGEYYDHVAYEYDGLHDPFVCATPDLWDTWPLLEWNAVA

SEQ ID NO: 25109 - protein, 219 aa, Saccharomyces cerevisiae
MEHLANENSDSDIRYSFLSTLDHLPCELIRSLRLMQTIDLFKNEEDEPGMERACRDLLLVATYINDLVDDQIHFLKQHKKELEIQKSVTKNFNSSLENIKSKLTLEEPGAYKEPKLLLKINLKKAKSRERKESITSPTIGINQGDVTEGNNNQEEVYCFCRNVSYGPMVACDNPACPFEWFHYGCVGLKQAPKGKWYCSKDCKEIANQRSKSKRQKRRK

SEQ ID NO: 25110 - protein, 3734 aa, Streptomyces sp. KCTC 0041BP
MADLHEAREQISRTESARHEPIAIVGMGCRLPGGVSSPEGLWDLVASGVDAVSPFPTDRGWDVAGLFDPEPGVPGRTYVREGGFLHGAGEFDAGFFGISPREALAMDPQQRLLLETSWEALERAGIDPHSLRGSRTGVYAGVMYHDYGSTVAGSAAPDDETAGFLGIGTSGSVASGRISYVLGLEGPAVTVDTACSSSLVALHLAVRALRSGECDLALAGGVTVMAEPGVFVEFSRQRGLAADGRCKAFSDSADGTGWAEGVGVLAVERLSDAVRHGHRVLAVVRGSAVNQDGASNGLTAPNGPSQQRVIRQALADARLGVGDVDVVEAHGTGTRLGDPIEAQALLATYGQRDAGRPLWLGSLKSNVGHTQAAAGVAGVIKMVMAMRDGVLPKTLHVDEPSAEVDWSAGAVSLLTEQEPWPEVGRPRRAAVSSFGLSGTNAHVVLEEAPAPKVGEVGVGVSPAVVPVVVSGRSAGVVRELAGQMGGVAGSGRLVDVGLSSVVSRSVFEHRSVVLAENTTELNTGLDAVAAGVPSSGVVSGVVSGEGGRSVFVFPGQGTQWVGMAVRLWAESGVFAESMARCEAAFEGLVDWRLSQVLDDEAALERVEVLQPASFAVMVSLAALWRSLGVVPDAVVGHSQGEIAAAVVAGGLSLEDGARVVVLRARLIGRELAGHGGMASVALPVGVVEERLARWAGRLGVAAVNGPSATVVAGDTDAVAEFVTTCEAEGVRARRLPVDYASHSAHVETLAAELEEVLADVRPVSGEIPFYSTVEAGLVDTASLDAGYWFGNLRRPVRFQETVEQLLADGFPVFVEASAHPVLTAAVQETAESVGRQVCAVGSLRREEGGLRRFLTSVAEAFVQGVDVTWPALFDESGARLVDLPTYPFQHQRYWLESRPSAAVVPSGTQDGLSYGVTWKSLSLPESVRLDGRWLLVVPEHLDADGTRVAHDVEQALTTHGATVHTLALDPATADFDGRFSRMFEEATDVTGILSLLGLAVGPHPEHGEVPLGVATSLTLTRQALRAGFGVPVWAVTRGAVSVVPGEVPETAGAQLWALGRVAALELPDRWGGLIDLPADTDARSVGLAVRALAAGIAAGEDQLAVRPSGAYGRRLVRATARRGRKDWRPQGTVLLAGDLDAVAEPLVRWLLTDGADHVVLADPALTELPAALADVAQRVTTAAAPDLADRAVLAALVTEYAPAMVVVVPPAVELAPLESTSPADLAAAVAAKSATAAHFDALLDGPHAPELVLISSVAGIWGGVRQGAYAVGAAHLDALAARRRAQGLPTVSVAWTPWAGSVIADGSAAESMRQYGIAPLEPQTALAELNRALGSGTGDAAVADVDWEQFLASFTSVRPTVLFDELPEVRRLRQAEAAAMADQAARIGAPGGTELARSLRDKPRNAQRKALLELVTAHVAAVLGEGAPDAIDQSRAFKDIGFTSMTAMELRNRLKEATGLTLPASLVFDHPHPRALADHLREELLGEDDAERTDSEPNTPSGPPPAGQDEPIAIIGMACRLPGDVGTPDELWELLETGRDAITDLPVNRGWDVAGLYDPDPDAAGRAYVREGGFLHDAGEFDAGFFGISPREALAMDPQQRIILELAWESFERAGLDPAGRRGSRTGVFMGTNGQHYMPLLQNGSESFDGYLGTGNSASVMSGRISYTLGLEGPALTVDTACSSSLVALHLAVRALRSGECDLALAGGATVMSTPEVLVEFSRQRAVAADGRCKAFSASADGFGPAEGAGVLLVERLSDAVRHGRRVLAVVRGSAVNQDGASNGLTAPNGPSQQRVIRQALADARLGVGDVDVVEAHGTGTRLGDPIEAQALLATYGQRDAGRPLWLGSLKSNVGHTQAAAGVAGVIKMVMAMRHGVLPKTLHVDEASPHVDWSAGAVALLTEQEPWPEVGRPRRAAVSSFGLSGTNAHVVLEEAPVPEEGQFVGDAPLAVVPVVVSGRSAGVVRELAGQMGGVAGSGRLVDVGLSSVVSRSVFEHRSLVLAEDSAELNTGLDAVAAGVPSSGVVSGVVSGEGGRSVFVFPGQGTQWVGMAVRLWAESGVFAESMARCEAAFEGLVDWRLADVLGDEAALERVEVLQPASFAVMVSLAELWRSLGVVPDAVVGHSQGEIAAAVVAGGLSLEDGARVVVLRARLIGRELAGHGGMASVALPVAVVEERLARSAGRLGVAVVNGPSATVVAGDTDAVAEFVTVCEAEGVRARRLPVDYASHSAHVETLAAELEEVLAGIRPRAGEIPFYSTVEAAAIDTASLDAGYWFGNLRRPVRFQETVERLLADGFPVFVEASAHPVLTAAVQETAESMGRQVCAVGSLRREEGGLRRFLTSAAEAFVQGVDVTWPALFDDTGARAIDLPTYPFQHQNYWYIDPARRKGDVSSFGMAEAGHPLLDAGTELPEGGEHLYTARLTADSHPWLLEHTLLGTPLLPGAAFVDLVLWAGGELGCELVEELTLTSPLLLSDSAAVQLRLVVGATDAEGRRTITIHSRPDAHPGTTRTPAAPPEAGSEAEVRRDAADWTKHAQATVAPAPAAPASVVGADGNPGLPAAEWSSAATESDTFRAEDFYASFAARGYGYGPLFQGVRSGRQDGSDVYAEVALDQGALPPGERFGLHPALLDAAFQTMRLGSFFPDDGQARVPYTFRGIRLYAPGAERLRVRVSAVGDDAVRVECADEQGRLVCEIDALVVSPVSPAQLRPAGQDATQDMLHRVEWPVLPSPAGRATSTAAFRWIVVGPEDDGLGLAEVLSGTGTGIERHRNLADALTALRTPADTPGSPAAADKTPLIAVPVSPSPTMDAVSVRHAVHQALESVQGWLSADEAAGEGGSGAAGADGRLVLITSGAVSTGDADPLRDPVASAVWGLVRSAQSEQPDRFVLVDLDEGAVDGAALSAAIASGEPQLALREGKVHVPRLASLSARDSRMLLPPAGARAWHLVGARTGTLSDLALVPAQADTVPLAPGQVRIAVRAAGLNFRDTLIALGMYPGEGVMGAEGAGVITEVGPDVAGFAVGDRVLGMWTDGFGPYAVADHRMVAPMPRDWSYAEAASVPAVFLSAYYGLKHLAGLRAGQSVLVHAAAGGVGMAAVQLARYFGAEVFGTAGPAKWDVLRAQGLDDRHIASSRTLDFAARFLDATGGRGVDVVLNSLAGDFVDASLRLLPRGGRFVELGKADVRDAAQVAADRPGTGYRAFELMEAGPELIGRMLTELLELFESGALRLLPVTPYDIRRAPDAFRTLSQAGHVGKLVLTMPPAFDPHGTVLITGGTGNLGGTLARHLVTEHGVRHLLLAGRRGAEAEGAAELVRELNGLGASVTVAACDVADRAALRKLLGSVPPERRLTGVVHAAGVLDDGVVTSLTPDRIDGVLRPKVDAALNLHEAALDPELGLDLSVFVLFSSVAALLGGAGQGSYAAANGFLDGLAQYRRARSLPALSLGWGLAGSGRMTSHLDTQALLRRMARGGVLPLSPAESMTLFDAAQGFDEALQMPVHFHTAALSADGNVPPIFRGLIQGGGARNAAARRRNAGPSASGAPVGGDPADLADRLSGLTEDEQRALLLDTVRTHAALVLGHTGADGIQADRAFKDLGFDSLTAVEMRNRLAAATGLHLAATLVFDHPAPADLAEHLRSRLVPEEPNVPPLLAELDRLEAAFKELTAAGLDSVAPDDIVRDEIAVRLAALGSLWDGLHGSGSGRAQKHGGSIVDDIDSAADDEIFAFLDESFGDS

SEQ ID NO: 25111 - protein, 596 aa, ASPERGILLUS NIDULANS FGSC A4
MKGLQHGLSLLVILCLAHWVSSRAVRFDLRLTWEDRNVAGVVRKVILSNGQFPGPTLRVKQGDEVEFRVRNLMPFSTSVHFHGISQLGTPWSDGTPGLSQEPIEPGHQFIYRWTADEYGSYIYHSHSRGQLIDGLYGAIYVEPRGSVEKPFRLITQDATDLAAMISAESKTEPVMLSDWRFLTSEDIWQVEIASGVESVCSNAILINGKGSAWCLPQQRINDLTSVGQRQLLGNETMTDIGCFPPIDSFFGNYPRDPSILPKGFNSGCIPGYGPEEIVMVDASTRYISRDLISMAGSASLIFSIDEHPMYIYAIDGRYIEPVLVEAVRIVPGSRYSVLIELKQNRTAKDYTIRVAQNGLNQIINGSATMLYTSHRPQQNASIPYITETGDATTPQTVYLNESLIVPFPVQLPAPTVDQTIILNINHYHAAYRWQLGNGSFPMELEEVRPALFNASAIPYPYSVSTLNDTWVDIVFNVSGANQPPHPMHKHSNKYFVIGEGSTPFIWSSVAEAMEEMPENFNLVNPQLRDTYPTPFVPEATGVWLAIRYKVVNPGPFLLHCHLQMHQSGGMTLAILDGIGDWPLVPAEYQLSAAAAL

SEQ ID NO: 25112 - protein, 344 aa, Oryza sativa (japonica cultivar-group)
GLQGSSLPCSGGIHPRILAARLLQQHRAGSSSRSDGRFVRWFPFLMTRACCEACANLKAAFLVAVVFLGLSTAVTMVFAREVALDPVAAAKRNEGEASGLLAVFKGMKNLPVGMPSVLIVTGLTWLSWFPFILFDTDWMGREIYHGRPDGSPAEVTAFQEGVRQGAFGLLLNSIVLGISSFLIEPMCRRLGARAVWVMSSAVVCVAMAAVSVLSAWSLGDFGGSVQDAARAPAEEGGVRASALALFVFLGLPFAVLCSVPFAVTAQLAASRGGGQGLCTGVLNISIVVPQMAIALGAGPWDELFGEGNIPAFAMASVFAAAAAAAGVVLLPKVSVRSVSMAGGH

SEQ ID NO: 25113 - protein, 258 aa, Xanthomonas campestris pv. vesicatoria str. 85-10
MTTHRWRLDGQTALITGASAGIGLAIARELLGFGADLLMVARDADALAQARDELADEFPERELHGLAADVSDDEERRAILDWVEDHADGLHLLINNAGGNVTRAAIDYTEDEWRGIFETNVFSAFELSRYAHPLLTQHAASAIVNVGSVSGITHVRSGAPYGMTKAALQQMTRNLAVEWAEDGIRVNAVAPWYIRTRRTSGPLSDPDYYEQVIERTPMRRIGEPEEVAAAVGFLCLPAASYITGECIAVDGGFLRYGF

SEQ ID NO: 25114 - protein, 643 aa, Cryptococcus neoformans var. neoformans B-3501A
MSAPHHQQGDRVEYDEPNLPRLNQNEFEDSSSEFSEDPKAPVKRGIASASRVLSVITKKDIRIAYLALTVLALGMAFAQYTQTTFTAYATSAFKSHSELAAAAVVSRVFSMIAYLIVPKICDNVGRISPSIIISMVVFTVLSDAMMAGCKNVQTYIGANVFSGLSSTGYTIALQIYYAETTAIRERALWNVAADSFSAIITLYSGSTIGGLILENWGTTSGWRWGYGMWSIINTVLAIPFIAILFSWHRRVRRNPNVPRLPPHTNVIDQLFHEYDLIGSCLLVASVALILVPLTLAKGVASQWTDDNIAMICVGFGLLVLFIVWSIPKKWRPKWFFTPRLPLIPWYTLKNRSLMSMFVINMCDFMSYGVFTTYFQTFMQVAVRTSASKASMIDNTLRIVFQVTALVVGLVMRFWTPACVKLGLGKRLFHTRYPVWIGIPLCALSIGIDINFVQHPRRKSAIASYVIAKAIYGVGRGMFQTSAQITVQASSRRRELAIATGIFYFAASLGGAIGIAVAGAIWLNILPDALANNLPAASANLASTIYGSITVAISYDPNSEIGLAILKSYVHTMKILAIVSTCLQIPMLISMFFIEDLQLTEDEQIILGGKRIGLGKKKQEQIDEREGEEEVKMVEKEKPVVRAD

SEQ ID NO: 25115 - protein, 118 aa, Brassica napus
MADRINTATPLLTDHEGGGNDRGRRSSSWVQKLIDVEESKAQIIYSLPMIFTNLFIYCIPLTSVMFASHLGQLELAGATLANSWATVTGFAFMTGLSGALETLCGQGFGAKSYRMLGI

SEQ ID NO: 25116 - protein, 174 aa, Triticum aestivum
MAPAVMASSATTVAPFQGLKSTAGLPVSRRSRGSLGSVSNGGRIRCMQVWPIEGIKKFETLSYLPPLSTEALSKQVDYLIRSKWVPCLEFSKVGFVFREHNSSPGYYDGRYWTMWKLPMFGCTDATQVLNEVEEVKKEYPDAYVRVIGFDNLRQVQCVSFIAFRPPGCEESGKA

SEQ ID NO: 25117 - protein, 451 aa, Schizosaccharomyces pombe
MSLEENVKEAKNAFNILQTLSVEDRDDALDKIVEELRIKKSEVLAANAEDMKAAKLLAESGKLSSSMVKRLDLSSSDKYDSMVQGVLDVKSLPDPLGRVTYARSLDDGLDLYKVSCPVGLLLVIFEARPEVIINITSLAIKSGNAVVLKGGTESAKSFAALSNVVRSALGKSKVPQAAVQLVQSREEVSQLLKLDEYIDLVIPRGSTNLVRHIKDNTKIPVLGHAAGLCSMYVHEDADMELASKLVLDGKTDYPAACNAIETLLINEAVLSSHLPKIAETLTEAKVTLKCDPASLKVLKDMPKVSALVEPSVDQDYNTEFSDLILAIKTVPSLQSAMQHINTHGSKHTDCIITSSEAAANRFMAGIDASGVYWNASTRFADGFRYGYGTEVGISTNKIHARGPMGLDGLTIYKYQLRGNGQVASSYGVGPGKRAFKHTPINIDNISQVSKK

SEQ ID NO: 25118 - protein, 458 aa, Xanthomonas campestris pv. vesicatoria str. 85-10
MSVSSAPPSATPGFASEVRTTGLLALPLVLGHVSTGLIGFVDNVIAGHHGTATLAAVTIGTSLLWLPMLVPIGTLISLTASVSQLLGAGREREIGPLFRQALWLSLGLSALMFVFLSVVPPLLPTFGIAADIVPGATAFLHAVRWGVPALTFYFCMRYLSEGMHWTLPTMLLGFGGLLVLAPVGYALTYGKFGFAEHGAEGLGIASAITMWVQASVFALYLWRARRFAHLHLFAHLEGPRWRAIGELLRTGLPIGITVLMEGGLFIVTALLIGRLGATEAAAHQIAINVAQLCFMIPMGVAEATTVRVGHAVGRGDPLAMRRAAWAGYAIVLGTQALSASALLLGHDAIVGVYTDDVAVAALASVLLLFAATFQFPDGIQVLSAGALRGLKDTRVPMFLAMFSYWGVGMPIGAGLGLGLGWGPKGMWVGLILGLTVASILMGLRFRQTSRRLTATVTP

SEQ ID NO: 25119 - protein, 469 aa, Schizosaccharomyces pombe; identical to SEQ ID NO: 1219

SEQ ID NO: 25120 - protein, 337 aa, Escherichia coli
MNVLICQQPKELVWKQREIPIPGDNEALIKIKSVGICGTDIHAWGGNQPFFSYPRVLGHEICGEIVGLGKNIADLKNGQQVAVIPYVACQQCPACKSGRTNCCEKISVIGVHQDGGFSEYLSVPVANILPADGIDPQAAALIEPFAISAHAVRRAAIAPGEQVLVVGAGPIGLGAAAIAKADGAQVVVADTSPARREHVATRLELPLLDPSAEDFDAQLRAQFGGSLAQKVIDATGNQHAMNNTVNLIRHGGTVVFVGLFKGELQFSDPEFHKKETTMMGSRNATPEDFAKVGRLMAEGKITADMMLTHRYPFATLAETYERDVINNRELIKGVITF

SEQ ID NO: 25121 - protein, 481 aa, Arabidopsis thaliana
MALKALDYDTLNENVKKCQYAVRGELYLRASELQKEGKKIIFTNVGNPHALGQKPLTFPRQVVALCQAPFLLDDPNVGMLFPADAIARAKHYLSLTSGGLGAYSDSRGLPGVRKEVAEFIQRRDGYPSNPELIFLTDGASKGVMQILNCVIRGNGDGILVPVPQYPLYSATISLLGGTLVPYYLDESENWGLDVANLRQSVAQARSQGITVRAMVIINPGNPTGQCLSEANIREILKFCYNEKLVLLGDEVYQQNIYQDERPFISSKKVLMEMGSPFSKEVQLVSFHTVSKGYWGECGQRGGYFEMTNLPPRVVEEIYKVASIALSPNVSAQIFMGLMVNPPKPGDISYDQFARESKGILESLRRRARLMTDGFNSCKNVVCNFTEGAMYSFPQIRLPTGALQAAKQAGKVPDVFYCLKLLEATGISTVPGSGFGQKEGVFHLRTTILPAEDEMPEIMDSFKKFNDEFMTQYDNNFGYSKM

SEQ ID NO: 25122 - protein, 268 aa, Bouteloua trifida
ASYAAAAMPALDLLSEKSHHGWDGTGAAAVAPTPAPRRLDGKVAIVTGGARGIGEAIVRLFVKHGARVVIADIDDAAGDALAAALGPQVSCVRCDVSVEEDVKRAVEWAVARHGRLDVLCNNAGVLGRQTRAAKSILSFDAGEFDRVLRVNALGTALGMKHAALAMAPRRAGSIVSVASVAGVLGGLGPHAYTASKHAIVGLTKNAACELGAHGIRVNCVSPFGVATPMLINAWRQGHADAVPSDEEVEKMEEVVRGFATLKGPTLRP

SEQ ID NO: 25123 - protein, 126 aa, Zea mays
  misc_feature (58)..(58): Xaa can be any naturally occurring amino acid
  unsure (1)..(126): unsure at all Xaa locations
LFICLVCSQLPLYGIHSGTGADSFYWMRAILTSNRGTVMELGITSIETFGMVTQLIGXSKIIEHDNSGREDRALLNGAQKLIDILITIGEAAAYVLYVMYRRVSQLVTGNAVVIILKLCFAGIIAI

SEQ ID NO: 25124 - protein, 929 aa, Arabidopsis thaliana
MAEPEKKRDQPFSQEKDEEKDLYLVHDEHESPLPLTVTSRVLYMLGDIASGPAYRFTQWLDLVRKRSATYGSSGFPHRLHRIDDMVTSAGERNTDPKSPPSRQSSEISLWERLGKASTVDIDSSCFSWNMLSSLHHTEHSSSTDHSEEDQSKPLEVTVNSGGVVFFALFNSSSSEDASRKEEAAVIKFASSRMATQSERLGYEFSKWLGVQIPQARVIHSCNPEWTLIKEATEKAQAKATSEGDEVGEMTCSELLEALELSRCLLLMSYVHGCPMLESMSSFETEEKAERAAAALGRILVLDLVIRNEDRLPCRQLRWRGNPANLLLTDRIVSSAKHHECSFDEAFDSAIKRYHPKDYRSIQRERRASSVDSRSRLSISDQMLVSQASDFSDITESPRSYDTGLMSPMSDRSVAADFHLVAIDSGVPRRPPAGKRASDQEIYPRLVELLLNSSQYSSNLLHEITEGSLGYPQAEDGEETSNVRSVVTPVVREFRNGFRAGLRDLQEFHIFLVTLHQKLDVLLRAFFSMMDKTMCADFDREDFAVPESPSHTHGHEVNHYPSPSKDRVPSDNSSDHSESDMQKSVPRTPNSENKEDGSSPKSRESWHGRSGKGGESLSSQRLAAKLRDFHKFAKVDAESNKELDQWNETLRNEVMKLCQENGFNTGFFEGSDNNSCTDAYELKVRLEHILERISLISKAANTEKPSMIQENLFIGGGLAARSIYTLQHLGITHVLCLCANEIGQSDTQYPDLFEYQNFSITDDEDSNIESIFQEALDFIKHGEETGGKILVHCFEGRSRSATVVLAYLMLQKKLTLLEAWSKLRKVHRRAQPNDGFARILINLDKKCHGKVSMEWRQRKPTMKVCPVCGKNAGLSSSSLKLHLQKSHRKLSSGSVDSAMNMEIQKALEALKLSTGRGSSASSNSFQSHPG

SEQ ID NO: 25125 - protein, 386 aa, Moorella thermoacetica ATCC 39073
MWRRDGRARISALLVLLIFLAGVAATAGFYHITGATAGPQQAYQNAVSTAQPASASIPAGLGPETIADIVDKTGPAVVRIDTVTETQGSSPFNDPFFRQFFGDQFNTGPQVQRALGSGFIISSDGYILTNQHVVEGARQVKVTIVGFDKPLNAQVIGADSSLDLAVLKVDAGKPLPYLALGDTNKVRVGDWAIAIGNPDGLDHTVTVGVISAKGRPIDVQNRHYENLLQTDAAINPGNSGGPLLNLKGEVIGINTAVNADAQGIGFAIPSSTVQPVLKDLMTKGKISRPWLGVALQQVTPDVADILGLQGQEGAVVVQVVSGSPAAKAGLQKYDVILQVDGQAVKDASDLVNKIQSMKIGQQVQLQVFRRGQTLNISVVLGEKPAQ

SEQ ID NO: 25126 - protein, 281 aa, Oryza sativa
  misc_feature (204)..(204): Xaa can be any naturally occurring amino acid
  misc_feature (231)..(231): Xaa can be any naturally occurring amino acid
  misc_feature (236)..(236): Xaa can be any naturally occurring amino acid
  misc_feature (242)..(242): Xaa can be any naturally occurring amino acid
  misc_feature (264)..(264): Xaa can be any naturally occurring amino acid
  misc_feature (266)..(266): Xaa can be any naturally occurring amino acid
  misc_feature (274)..(274): Xaa can be any naturally occurring amino acid
  unsure (1)..(281): unsure at all Xaa locations
MRALRYHGVKDLRVEHDVPEPECKADQIKVKPAFVGICGTDLHEYSTPTFIPGKENPHPVTGESMPIVIGHEFSGTVLEVGSKVQTDLKAGDKVCVQPTVACFSCGACKDGAINCCDSAGFVGLSGGGGGLSDAVCVGKDFVFKLPDHVDLDVGALVEPLAVAWHAVDAAEIQGGDDAVVLGAGPIGLAVVQCLKAQKANQVIXIEVAAERQKFAKHFGATTVLDPTKVDXVAEVXKLTDGXGANVSLDWAGVPASLKLRVSQXAXKGVLAMVXYGRRTPS

SEQ ID NO: 25127 - protein, 614 aa, Haloarcula marismortui ATCC 43049
MSEGERLTELAKRRGFYFPSSSAYGGAAGFWTYGPQGAALKSNIEDAWRDRYVVKEGHQEISAPDVMPEPVFEASGHLDGFDDMIVECGECGATHRADHLVEDNTDIEEAESLPNEEVMDLIAEHGIECPSCHTSLADQPVDNFNLMFETNIGPGSSSPGYLRPETAQGIFVEFPQLSEYARNQLPFGVAQIGKAYRNEISPRKSLVRVREFTQAELEHFIDPEEDEPPLAEVEDVVLPLYAAAEQQTDDGGQRELTVREAVDEDIVESEWVAYYLGVSKEWYERIGVDMDRFRYRQHLAGERAHYASDCWDAESEVDGDWIEITGFAYRGDYDLSKHAKHSGEDYTVFKQYDEPITVDRATVDPDMSYLGPEFGGSAGAVADALEALAERNPDAFDDDEVTVEVDGKSHTVPVDKTNFSVDEVTENGEHIRPHVVEPSFGVGRIIYTVLAHSYETDEVDGEERTYLDLPPEQAPTTVGVFPLMDKDGMADLATDIADDLRAAGLSVTYDDSGAIGRRYRRQDEVGTPYCVTVDYESLEDDSEAQRASDSASSAEPRSANRSSGQSPREDGDEPRAGTVTVRERDTTEQKRLPIDGLAETLEQLSTGDRTFDDL

SEQ ID NO: 25128 - protein, 579 aa, Glycine max
MCGILAVLGCSDSSQAKRVRVLELSRRLKHRGPDWSGLHQYGDNYLAHQRLAIVDPASGDQPLFNEDKTVVVTVNGEIYNHEELRKQLPNHTFRTGSDCDVIAHLYEEHGENFMDMLDGISSFVLLDTRDNSFIVARDAIGVTSLYIGWGLDGSVWISSELKGLNDDCEHFESFPPGHLYSSKERAFRRWYNPPWLSLAIPSAPYDPLALRHAFEKLWIKRLMTDVPFGVLLSGGLDSSLVAAVTARYLAGTKAAKQWGTKLHSFCVGLEGAPDLKATKEVAEYIGTVHHEFHYTVQDGIDAIEDVIYHIETYDVTTIRASIPMFLMSRKIKSLGVKWVISGEGSDVFFGGYLYFHKAPNKEEFHQETCRTIIVLHRYDCSRANKSTFVWGLEARVPFLDKEFIRVAMNIDPECKMIKKEEGRIEKWALRRAFDDEEHPYLPKHILYRQKEQFSDGVGYGWIDGLKAHAEKHVTDRMMLNAANIFPFNTPTTKEAYHYRMIFERFFPQNSCRLTVPGGTSVACSTAKAVEWDAAWSNNLDPSGRAALGVHASAYGNQVKAVEPEKIIPKMEVSPLGVAI

SEQ ID NO: 25129 - protein, 78 aa, Wolbachia sp.
TEEKQGGIVLPSSAEKKPTKGEVIAIGSGSRNSSGERIALTVKTGDKVFYRQWAGTEVEHDNEKYVVMKESDLLAVIK

SEQ ID NO: 25130 - protein, 271 aa, Lycopersicon esculentum
MSEVVDQAPIAKQWRRVVVKVGTSSIVDAAGEIKYPVINRLAQTLTQLEQTGYEVILVTSGAIGVALKQMHQTKRPTEIPAQQALAAIGQSYLMAIYNQSFAFYQQHVGQVLLTYDVFHNKQMLRHTIDAIAAMLQQRVIPIINENDVIAVDELDHQHSFGDNDRLAAMVTHETNADALIVLSDIDALYTANPHVDPTAQPIPLVTAVTDSLRAGARGSSTLGTGGMATKLVAADYLLQHGRQMVLINGENPATILEVLAGEPVGTLFKGE

SEQ ID NO: 25131 - protein, 528 aa, Glycine max
MAEVAAPKKENPNLLLGRFELGKLLGHGTFAKVHHARNIKTGEGVAIKIINKEKILKGGLVSHIKREISILRRVRHPNIVQLFEVMATKTKIYFVMEFVRGGELFNKVAKGRLKEEVARKYFQQLVSAVEFCHARGVFHRDLKPENLLLDEDGNLKVSDFGLSAVSDQIRHDGLFHTFCGTPAYVAPEVLARKGYDGAKVDIWSCGVVLFVLMAGYLPFHDRNVMAMYKKIYKGEFRCPRWFSSELTRLFSRLLDTNPQTRISIPEIMENRWFKKGFKQIKFYVEDDRVCSFDEKQLQHHDGDDYLATSDSEVEIRRKNSNCNSTSNGNSLPRPASLNAFDIISFSQGFDLSGLFEEKGDEARFVSSAPVSKIISKLEEVAQLVSFTVRKKDCRVSLEGCREGVKGPLTIAAEIFELTPSLVVVEVKKKGGDKAEYEKFCNSELKPALENLGMEDSASSSSSCHQSTHTQSEFQQQHRTFSDSALNRHSDNNECLYDQELGLAEETSIPQLGEPKFEFQQENVPMFTI

SEQ ID NO: 25132 - protein, 574 aa, Escherichia coli CFT073
MDIQKRVSDMEPKTKKQRSLYIPYAGPVLLEFPLLNKGSAFSMEERRNFNLLGLLPEVVETIEEQAERAWIQYQGFKTEIDKHIYLRNIQDTNETLFYRLVNNHLDEMMPVIYTPTVGAACERFSEIYRRSRGVFISYQNRHNMDDILQNVPNHNIKVIVVTDGERILGLGDQGIGGMGIPIGKLSLYTACGGISPAYTLPVVLDVGTNNQQLLNDPLYMGWRNPRITDDEYYEFVDEFIQAVKQRWPDVLLQFEDFAQKNAMPLLNRYRNEICSFNDDIQGTAAVTVGTLIAASRAAGGQLSEKKIVFLGAGSAGCGIAEMIIAQTQREGLSEEAARQKVFMVDRFGLLTDKMPNLLPFQTKLVQKRENLSDWDTDSDVLSLLDVVRNVKPDILIGVSGQTGLFTEEIIREMHKHCPRPIVMPLSNPTSRVEATPQDIIAWTEGNALVATGSPFNPVVWKDKIYPIAQCNNAFIFPGIGLGVIASGASRITDEMLMSASEMLAQYSPLVLNGEGLVLPELKDIQKVSRAIAFAVGKMAQQQGVAVKTSAEALQQAIDDNFWHAEYRDYRRTSI

SEQ ID NO: 25133 - protein, 352 aa, Thermus thermophilus HB8
MDWLLTPGPVRLHPKALEALARPQLHHRTEAAREVFLKARGLLREAFRTEGEVLILTGSGTLAMEALVKNLFAPGERVLVPVYGKFSERFYEIALEAGLVVERLDYPYGDTPRPEDVAKEGYAGLLLVHSETSTGALADLPALARAFKEKNPEGLVGADMVTSLLVGEVALEAMGVDAAASGSQKGLMCPPGLGFVALSPRALERLKPRGYYLDLARELKAQKEGESAWTPAINLVLAVAAVLEEVLPRLEEHLALKAWQNALLYGVGEEGGLRPVPKRFSPAVAAFYLPEGVPYARVKEAFAQRGAVIAGGQGPLKGKVFRLSLMGAYDRYEALGVAGMFREVLEEILPAS

SEQ ID NO: 25134 - protein, 372 aa, Pinus halepensis
IRRTPPTPQDEMRAGMSYFHETIWKGVPKFLRRIDTALKSIGINERMPYNAPLIQFSSWMGGDRDGNPRVTPEVTRDVCLLARMMAANLYYSQIEDLMFELSMWRCSDELRARALQLHSASKKDAKHYIEFWKQIPPNEPFRVILGDVRDKLYNTRERTRQLLSNGISDIPEEVTFTNVDGFLEPLELCYRSLCSTGDQPIADGSLLDFMRQVSTFGLSLVRLDIRRESDRHTDVVDAITKHLGIGSYEEWSEERRQAWLLSELQGKRPLFGPDLPKTDEVRDVLDTFHVISELPADNFGAYIISMATAASDVLVVELLQRECHVKKPLRVVPLFEKLADLEAAPAALARLFSINWYRNRIDGKQEVMIGYS

SEQ ID NO: 25135 - protein, 363 aa, Cryptococcus neoformans var. neoformans JEC21
MASKQHAHILSLARSMIPPLHPKLHKGQAGRIGVLGGSGDYSGAPYFSSMGAMRFGADLAHVICEPSAGAVIKTYSPDLIVHTILDPQKSREDIRSALKGVMSRLHVLIIGPGLGRDDHMQSCAKIAFELAKDMEQMGVVVDADGLWLVQNEPKVVMDWPGVPRIILTPNVMEFKRLCDTMVGARTVLHLSPSTLINYQKINASGPHTSLCPQLATALGNATIIQKGPSDIISNGLKIPSALLSDESEEQNYLEVKVEGGLKRVGGQGDILSGSTGVLLAWGSEWVRGTYEHVGHPPPQDKAIAENIPVLAAYGASTFNRTVSKRGFQKKGRSMVTGDLVDMVGEVYEEVFGKPGEMEGRGKL

SEQ ID NO: 25136 - protein, 617 aa, Thermus thermophilus HB8
MRGTLLEHLVRHAKERPEAPALRVKRLGVWQKTSWRGLLDRVLSLAGGLSALGLKEGEVLAILGHNAPEWVEAELAAQVLGALPMGIYADAMPEEVGYFLEFTGARGIVVSDEEQLDKVYPHLHLVDFVLVWEEAGMSRHFRGKVRRFSQAFGDPKVGEEALRRRRPEETALLAPTSGTTGRSKLAMLSHQNLLAGHEAVGKALGFQRGAWVFSYLPLPWIGEQMLTVVQSLVEGSTVHFPEDPTTLKEDLKEVQPDFFLAPPRLWEEMASFIQSRMADADPVKAFFYRAGMGALLEGANREFRGERVGLWLNLKRALFYPLIARPLRARLGLAACRIAVTGGAPLGPEVFTFFRALGLDIRQVYGQSETAAATTAHATGDAPPETVGPPLPGTEVRISEEGEIQVRGPQVFQGYFKQEKATRESFTEDGFFRTGDAGFFDERGHLVILGRVKEVGALADGTRFAPQFLENRLKYSPYIREAVVLGHGRPFVTALVELDPENVQNWARRRGLPFTTYQSLTERLEVQALIAEEIRMVNQTLPEKLRIRRFALLPKELHPDDEEITRTRKVRRQIVEARYAPVIQALYGEGGRVSLSLPIRYLEGEGRLEATLEVQEV

SEQ ID NO: 25137 - protein, 153 aa, Chlamydomonas reinhardtii
MAPKKDEKPPTQEAGAEAPAKAERKPKAEKAAKKAKKEPSKKAAKEPKGSGEKKDKKKKKSAVETYKLYIYKVLKQVHPDTGISSKAMSIMNSFINDIFEKVATEASKLSRYNKKPTVTSREIQTAVRLVLPGELAKHAVSEGTKAVTKFTSG

SEQ ID NO: 25138 - protein, 788 aa, Gossypium hirsutum
MVFLFSLSPKRCDLFFPLINPENSVLSESCMGVDNRTAFLHSKRMASHGELRLIGENYDPGFIGMMKEDDGYGSSDDFEGALGNDQDTADNGRPPKKKKKFHRHNPHQIHELESFFKECPHPDEKQRRELSRRLALESKQIKFWFQNRRTQMKTQLERHENVFLKQENDKLRAENDLLRQAIASAICNNCGVPAVPDEISYEPSQLMIENSRLKDELNRARALTNKFLGRHLSSSSANPSPSPSQGLNSNVEVVVRRTGFCGLNNGSISLPMGFEFGHGATMPLMNPSFAYEMPYDKSALVDVALAAMDELIKMAQMGNPLWIKGFGDGMETLNLEEYKRTFSSFIGMKPSGFTTEATRETAMVPLRGLALVDTLMDANRWAEMFPCMISRAVTIDVLSSGKGVTRDNALQLMEAEFQVLSPLVPIRQVQFIRFCKQHSDSVWAIVDVSINLSNAANALMFANCRRLPSGCVIQDMDNKYSKVTWVEHSEYDESTVHHLFRPLLSSGFGFGAQRWIATLRRQYSSLAQLMSPDIHGEDINTVGKKSMLKLAQRMAYNFSAGIGASSVNKWDKLNVGNVGEDVRVMTRKNVNDPGEPLGIVLSAATSVWMPITQQTLFGFLRNERMRNQWDILSSGRPMQAMFSVAKGPGQGNCVSILRGAAVNGSDTNMLILRETWSDACGALIVYAPVDASSIRVVMNGGDSSHVALLPSGFAILPGVQTDGPSMQPDIDENTSDGCILTVGFQILVNSVPTAKLTVESVETVNHLLTCTVEKIKAALSVTQLGSVE

SEQ ID NO: 25139 - protein, 572 aa, Zea mays
MASPFSVPSLIMEEEGRFEAEVAEVESWWGTERFRLTKRPYTARDVVLLRGTLRQSYASGEMAKKLWRTLKAHQAGGTASRTFGALDPVQVTMMAKHLDTIYVSGWQCSSTHTSTNEPGPDLADYPYDTVPNKVEHLFFAQIYHDRKQREARMSLPRAERARAPYVDFLKPIIADGDTGFGGATATVKLCKLFVERGAAGVHLEDQSSVTKKCGHMAGKVLVAVSEHVNRLVAARLQFDVMGVETVLVARTDAVAATLIQTNVDARDHQFIVGATNPGLRGQSLAAVLSAGMSAGKSGRELQAIEDEWLAAARLKTFSECVRDAIAGLGVAGQEKQRRLQEWDRATGGYDRCVSNDQARDIAASLGVTSVFWDWDLPRTREGFYRFRGSVAAAVVRGRAFAPHADVLWMETSSPNVAECTAFAEGVKAACPEAMLAYNLSPSFNWDASGMTDAEMAAFIPSVARLGYVWQFITLAGFHADALVTDTFARDFARRGMLAYVERIQREERINGVETLEHQKWSGANFYDRVLKAVQGGISSTAAMGKGVTEEQFKDPRPATGSSGLQVMAKSRI

SEQ ID NO: 25140 - protein, 175 aa, Oryza sativa
MAPTVMASSATSVAPFQGLKSTAGLPVSRRSTNSGFGNVSNGGRIKFMQVWPIEGIKKFETLSYLPPLTVEDLLKQIEYLLRSKWVPCLEFSKVGFVYRENHRSPGYYDGRYWTMWKLPMFGCTDATQVLKELEEAKKAYPDAFIRIIGFDNVRQVQLISFIAYKPPGCEESGGN

SEQ ID NO: 25141 - protein, 156 aa, Chlamydomonas reinhardtii
MAPKKDEKPATRAATQEAGVEATAKAEAKPKAEKAAKKAKKEPAKKAAKEPKGDGEKKDKKKKSAVETYKLYIYKVLKQVHPDTGISSKAMSIMNSFINDIFEKVATEASKLSRYNKKPTVTSREIQTAVRLVLPGELAKHAVSEGTKAVTKFTSG

SEQ ID NO: 25142 - protein, 517 aa, Dechloromonas aromatica RCB
MLPGPAGVYRPMRILRLLKIASVASRFGLDEMVLEHEPSGRLVRIANALQFWRDLSTPRAVRLRLALESLGPIFVKFGQVLSTRRDLMPPDIADELARLQDRVPPFDSALALAEIEKAYGRPASEVFAEFDATPIASASIAQVHFAKLREEDGGHEVAVKILRPNMLSVIEHDLALMDNLAMLLEKLWSDGKRLKPREVVAEFAKYLRDELDLMREAANASQLRRNFTDSQLLIVPEVHWDFCTSTVMVMERMKGTPISQIDKLRADGIDLSKLSAAGVEIFFTQVFRDGFFHADMHPGNIFVAPDGRYIALDFGIVGTLTDSDKNYLAQNFLAFFRRDYKRVAEAHIESGWAPKDTRVDEFEAAIRAVCEPIFDRPLKDISFGKILLRLFQTSRRFNVEIQPQLVMLQKTLLNIEGLGRQLDPELDLWKTAKPFLERWMSEQIGWRGLIKTFKQEAPYLARTIPQLPRLVHQALSNPTKADLQPQLAQLIAAQHQQNRWLAIIALLLALLVGALFA

SEQ ID NO: 25143 - protein, 216 aa, Magnetospirillum magnetotacticum MS-1
MQIMPDGPNDHLSFDPLDDTKRWPEDQFPLLKCGRMVLDRVPDNFFAEVEQSAFGTGVLVDGIDFSDDKMLQGRTLSYSDTQRYRVGANYLQLPINAPQPGVKVYSNQRDGQMTYGVDGTGPNKHINYEPSTLGQGLAEAPKKKEYHQPVSGNLGRYQTSRTEDDYAQAGHRYRTFEDWEREDLIANLVADMKQCPEPIQLRMVWHFWHADEDYGR

SEQ ID NO: 25144 - protein, 153 aa, Chlamydomonas reinhardtii
MAPKKDEKPATAEAGAEAPAKAEAKPKAEKAGKKAKKEPAKKAAKEPKGDGEKKDKKKKKSAVETYKLYIYKVLKQVHPDTGISSKAMSIMNSFINDIFEKVATEASKLSRYNKKPTVTSREIQTAVRLVLPGELAKHAVSEGTKAVTKFTSG

SEQ ID NO: 25145 - protein, 153 aa, Chlamydomonas reinhardtii
MAPKKDEKPATAEAGAEAPAKAEAKPKAEKAAKKAKKEPSKKAAKEPKGDGEKKDKKKKKSAVETYKLYIYKVLKQVHPDTGISSKAMSIMNSFINDIFEKVATEASKLSRYNKKPTVTSREIQTAVRLVLPGELAKHAVSEGTKAVTKFTSG

SEQ ID NO: 25146 - protein, 175 aa, Triticum aestivum
MAPAVMASSATTVAPFQGLKSTAGLPISCRSGSTGLSSVSNGGRIRCMQVWPIEGIKKFETLSYLPPLSTEALLKQVDYLIRSKWVPCLEFSKVGFVFREHNSSPGYYDGRYWTMWKLPMFGCTDATQVLNEVEEVKKEYPDAYVRVIGFDNMRQVQCVSFIAFRPPGCEESGKA

SEQ ID NO: 25147 - protein, 290 aa, Magnetococcus sp. MC-1
MSVTMLVPYKGENQLAGYMQQVDSYPMLSAEEEFELAVRYREQNDLEAAHKLVTSYLRYVASIAKEYQGYYGIKFMDLVQEGSVGLMQAVKRFDPHKGFRLATYAMWWIKASIQEFVLHHWSLVKIGTTAAQRKLFFNLRKSKDTLERLDATQAEEMGQRFGVSGEAVLEMDARLSGPDDSLNRCLVEGGEEIQNMLADSAPNQEMRLLASESERLQQQMIKQALSFLSEREQMIVRARIMCAEPVTLEVLGERLGVSRERIRQLETRALKKLRAFFEADGASLEDLMPA

SEQ ID NO: 25148 - protein, 564 aa, Pichia angusta
MTIESQEPWWKSAVVYQVWPASFKDSNGDGIGDLNGITSELDHIKSLGTDVIWLSPHYASPLDDMGYDISDYNAINPQFGTMEDMDRLLAEIKKRDMRLILDLVINHTSSEHAWFKESRSSRDNPKRDWYIWKDNANNWLSFFSGSAWSYDEKTKQYYLRRFAETQPDLNWENPKTREAIYKSALEFWYEKGVSGFRIDTAGLYSKVQTFEDAPVTFPGEKYQPAGPLINSGPRIHEFHKEMYEKVTSRYDAMTVGEVGHCSKADALKYVSAKEKEMNMMFLFDTVDVGSDKSDRFRYKGFTLTDFKDAIINQSNFIFDDETGELNDAWSTVFIENHDQPRCVTRFGNTSNKLFWSRSAKMLALLQTTLTGTLFVYQGQEIGMTNVSPKWDISEYLDINTINYWNAFNETEHSDEEKAELLKIINLLARDNARTPVQWDSSENGGFGGKPWMRINDNYKDINVASQKEDPDSVLNFYRNAIKTRKHYSETLIFGRFEVQDYDNQEIFYYTKTSNKGQKKMAVVLNFTDREVEYPIPQGKLLLSNIANNITGKLQPYEGRLIEVN

SEQ ID NO: 25149 - protein, 586 aa, Pirellula sp. 1
MHGRNMATVEYEMQQQAIAPRFANSNFTPHNRPRHPFTIKTHSQKSAPSKPAERRWWETGVIYQIYPRSFQDSNADGVGDLAGIKQRLDYLVRLGVDAVWLSPIYPSPMFDFGYDVSDYCGIDPLFGDLTAFDRLLTAMHSRGLKLLMDFVPNHSSDQHPWFVQSRSSRDNPKRDWYIWRDASADGGPPNNWISDFGGSSWQWDATTRQYYLHAFLPQQPDLNWRHPELREAMMNVLRFWLDRGVDGFRMDVLWHIVKDAALRDNPINPDWTSDRTQRDQLIQLHSTDQPEAHSIAAEFRTLADNYGDRVLIGEISLPNDRLARWFGTEERPEVHLPTNFHLIECEWNAPTLRRVIANYEASLPNFGWPNWVLGSHDAPRIAARLGDAQSRVAAMLLLTLRGTPTLYQGDEIGIGEVPIPRDQIRDPQDLRQPELNIGRDRSRTPMPWDDSAFAGFSVNDTWLPLNPDWRQRNVATQEADPQSILNLYRTLLSLRRSHAALSNGDFTLLDSDDDVLAFERRHGDEHLLIALNLSEQTRSLPVPSKAALVTVLCSTVSPRAIDGTLVPNEGLLLQLVDNEDQSGQVS

SEQ ID NO: 25150 - protein, 241 aa, Oenococcus oeni PSU-1
MICYDHIEWFFDSAEARMVKILVVEDDENFNSLVSRYLASNGFEVISCADAQKAYDALYNNLFDLIVTDVMMPGIDGVEFAKTVRQLNENIPILFVTARDDIKTKKAGFRVGIDDYLVKPIDLDELKLRISAVLRRANISQNQKIEIGNLLLKSEEISASINGVPIPLTVREFNILFKMLSFAGRAFSRAELLDDFWDTESNASLRAVDVYITKLREKFKSTNAFEIKTIHGLGYKTVIRS

SEQ ID NO: 25151 - protein, 432 aa, Oryza sativa (japonica cultivar-group)
MAAARRVAGGGGGSLWGPPQPPPSTGGGIPQLPAAAAAPVEGLLDAPFSSSSGGGGGGWPPPPPPLSGTAVLIGYPQGNFETFPQQDLVPLTAQEVHSKCITFGRAENLPFIPLATSALVSQHTGSSSVNVTPLQEILTSPSQISNVNTESIGVLQGLPASSIVLDRPTDDGYNWRKYGQKAVKGGEYPKSYYKCTHLNCLVRKNVEHSADGRIVQIIYRGQHTHERPSKRRFKDCGGISDDLDDFSGTTGTSVRSQPDYDDYCRKPIIPSGTMVAPLVKKIEDGDDQLSGSSDNQDEHDDEVRTSDGASGDASANERNVPAPGQKIIVSTTSEIDLLDDGYRWRKYGQKVVKGNPYPRSYYKCTYLGCDVKKQVERSVEEPNAVITTYEGKHIHDVPAARNKSHVVANASLLQNTKSNTYCTEQSYTTITC

SEQ ID NO: 25152 - protein, 531 aa, Glycine max
MAGGGAPAKADEPQPHPPKDQLPNISYCITSPPPWPEAILLGFQHFLVMLGTTVLIPTALVPQMGGGNNEKARVIETLLFVAGINTLLQTMFGTRLPAVIGGSYTFVPTTISIILAGRFSDEPDPIEKFKRIMRSIQGALIVASTLQIVLGFSGLWRNVARFLSPLSSVPLVSLVGFGLYELGFPGVAKCVEIGLPQLILLVFVSQYVPHVLHSGKHIFDRFAVLFTIVIVWIYAHLLTVGGAYNDAPHKTQISCRTDRAGLIDAAPWIRIPYPFQWGAPSFDAGEAFAMMMASFVSLVESSGAFIAVYRYASATPLPPSILSRGISWQGVGILLSGLFGTVNGSSVSVENAGLLALTRVGSRRVVQISAGFMIFFSILGKFGAVFASIPPPIIAALYCLFFAYVGAGGLSFLQFCNLNSFRTKFILGFSIFIGLSVPQYFNEYTAINGYGPVHTGARWFNDIINVPFQSKPFVAGVVAYFLDNTLFKRAADIRKDRGKHWWDKYKSFKGDTRSEEFYSLPFNLNKYFPSV

SEQ ID NO: 25153 - protein, 471 aa, Moorella thermoacetica ATCC 39073
MNLGELWGNFYMDQVRNKILDSGMRGSSITNQSSQLITRIESVPFSRWHIKPRVIMGSATFFDAFDTLSLSYAMPVLIGLWHLNPGQIGILIGIGYLGQAIGALLFGSIAERFGRVFSAKWATLVMSIMAIACAFAGNYNELVALRFIQGIGVGGEVPVAAAYINEISRASGRGRFFMLYEMVYPIGLMVTAQLGTIIVPSLGWKWMFFIGGGTGIIIVLLMNLLKESPRWLISKGRFEEAERIIEEIEASTDQRIPVNIKGTQEAVKGNWKELFSPFYRGRTIVVWMLWFSTYFVSNGLNNWLPSLYKTVYKLPLQTSLRAASLTNLIQIVAVFACAMLIDKVGRKLWATIAFLVASLLLGILWINGAATAYSVMYLGSLAYGVIGTVTVLLYLYTPEIYPTRMRAVGTAFATTWLRLASAIAPTIVGFILGTRGISKVFALFACVSVIGAFMAIRMVETREKMLEEIAP

SEQ ID NO: 25154 - protein, 78 aa, Wolbachia sp.
TEEKQGGIVLPSSAEKKPTKGEVIAIGGGSRNSSGERIALTVKTGDKVFYRQWAGTEVEHDNEKYVVMKESDLLAVIK

SEQ ID NO: 25155 - protein, 129 aa, Brassica napus
MQDQLVCHGCRNTLLYPRGATNVRCALCNTVNMIPHHPSPHARAGMDMAHIVCGGCRTMLMYTRGGTSVRCSCCQTLNLVPAPTPSNQFAHINCGNCRTTLMYPYGASSVKCAVCQFVTNVNLMGNGRV

SEQ ID NO: 25156 - protein, 110 aa, Schizoparme straminea
GGKAPRKQLASKAARKSAPSTGGVKKPHRYKPGTVALREIRRYQKSTELLIRKLPFQRLVREIAQDFKSDLRFQSSAIGALQESVESYLVSLFEDTNLCAIHAKRVTIQS

SEQ ID NO: 25157 - protein, 100 aa, Burkholderia pseudomallei
MRSIIADSKRLVVKVGSSLVTNDGRGLDHDAIGRWAAQIAALRGAGKEVVLVSSGAIAEGMQRLGWSKRPREIDELQAAAAVGQMGLARVYESRFAEHGI

SEQ ID NO: 25158 - protein, 361 aa, Moorella thermoacetica ATCC 39073
MKEEQQKQMVKELIEKGKSQGSLTYSEIMDALQGIELSPEQIDDIYEQLGHMGIEVVPEAAELEALEKEDSEAGETDLDLSIPENVAIDDPVRMYLKEIGRVPLLTPEEEIELAKRMEAGDEEAKRRLAEANLRLVVSIAKRYVGRGMLFLDLIQEGNLGLIKAVEKFDYRKGYKFSTYATWWIRQAITRAIADQARTIRIPVHMVETINKLIRVQRQLLQELGREPTPEEIAHEMDIPVERVREIQKIAQEPVSLETPIGEEEDSHLGDFIEDEDAQAPAEAASFMLLREQLEEVLNSLTPREKRVLRLRFGLDDGRARTLEEVGQEFGVTRERIRQIEAKALRKLRHPSRSKKLKDYLE

SEQ ID NO: 25159 - protein, 489 aa, Escherichia coli CFT073
MHLLTLSINPTFLMRSNHFKEFKMDKKQVTDLRSELLDSRFGAKSISTIAESKRFPLHEMRDDVAFQIINDELYLDGNARQNLATFCQTWDDDNVHKLMDLSINKNWIDKEEYPQSAAIDLRCVNMVADLWHAPAPKNGQAVGTNTIGSSEACMLGGMAMKWRWRKRMEAAGKPTNKPNLVCGPVQICWHKFARYWDVELREIPMRPGQLFMDPKRMIEACDENTIGVVPTFGVTYTGNYEFPQPLHDALDKFQADTGIDIDMHIDAASGGFLAPFVAPDIVWDFRLPRVKSISASGHKFGLAPLGCGWVIWRDEEALPQELVFNVDYLGGQIGTFAINFSRPAGQVIAQYYEFLRLGREGYTKVQNASYQVAAYLADEIAKLGPYEFICTGRPDEGIPAVCFKLKDGEDPGYTLYDLSERLRLRGWQVPAFTLGGEATDIVVMRIMCRRGFEMDFAELLLEDYKASLKYLSDHPKLQGIAQQNSFKHT

SEQ ID NO: 25160 - protein, 311 aa, Thermus thermophilus HB8
MRVLVTGGAGFIGSHIVEDLLARGLEVAVLDNLATGKRENVPKGVPFFRVDLRDKEGVERAFREFRPTHVSHQAAQASVKVSVEDPVLDFEVNLLGGLNLLEACRQYGVEKLVFASTGGAIYGEVPEGERAEETWPPRPKSPYAASKAAFEHYLSVYGQSYGLKWVSLRYGNVYGPRQDPHGEAGVVAIFAERVLKGLPVTLYARKTPGDEGCVRDYVYVGDVAEAHALALFSLEGIYNVGTGEGHTTREVLMAVAEAAGKAPEVQPAPPRPGDLERSVLSPLKLMAHGWRPKVGFQEGIRLTVDHFRGAV

SEQ ID NO: 25161 - protein, 306 aa, Zea mays
  misc_feature (91)..(91): Xaa can be any naturally occurring amino acid
  unsure (1)..(306): unsure at all Xaa locations
RVRGQRRSARKRDGGQLRSQTRERSREKGRASTPAGGDKRGGERGQRRGGGEEEEDEQLPLPSEKKGGASEGEAAHRYPHLVTPSEPEALXQPPPPPSKASSKSMDPTVERLKSGFQKFKTEVYDKKPELFEPLKSGQSPRYMVFACSDSRVCPSVTPGLQPGEAFTVRNIASMVPPYDKIKYAGTGSAIEYAVCALKVQVIVVIGHSCCGGIRALLSLQDGAPDTFHFVEDWVKIGFIAKMKVKKEHASVPFDDQCSILEKEAVNVSLENLKTYPFVKEGLANGTLKLIGGHYDFVSGEFLTWKK

SEQ ID NO: 25162 - protein, 113 aa, Triticum aestivum
  misc_feature (64)..(64): Xaa can be any naturally occurring amino acid
  unsure (1)..(113): unsure at all Xaa locations
MESDFASASAITHHRHNIDHYVSILAAFIFSACLGPDSRLFDRLLSDDAPLHSAPVLSPPPPSXLARLSPEIPKKIAHFSLAQILPHAVAFSHLPLMLLHKLDEIYDSDKPWS

SEQ ID NO: 25163 - protein, 229 aa, Alkalilimnicola ehrlichei MLHE-1
MGRLEVREFHRVTGRAWDLGTLAHDPAFWRAHVPHAAWRILFRGGTERPFSSPLDERYEDGTYVCAACHLPLFSSDTKFDSRTGWPSFYQPFPGHVGTKQDRLLWMVRTEYHCIRCRGHQGHVFEDGPAPTGRRWCNNGLALRFAPATGHADDEERATALFAGGCFWCVEEAFDGGGQFCDRSTFYPAEEYHQNYYQKNPLRYRFYVTRCGRYARLDQLWGSEARPGKD

SEQ ID NO: 25164 - protein, 134 aa, Magnetococcus sp. MC-1
MSNDTKKTDAQWKEILTPEVYHVCRQKGTERPFSGQYTHNKEPGLYCCACCGQPLFNADAKYDSGSGWPSYFQAISEHAIRAETDLSHGMRRVEVLCSSCDAHLGHLFDDGPQPTGLRYCINSLALQLNPKPTA

SEQ ID NO: 25165 - protein, 229 aa, Novosphingobium aromaticivorans DSM 12444
MPFDPSRVDCWIFDLDNTLYPPSTRLFDQIDQRMGLFIQELLCCDEMEARRVQKLYFHDHGTTLSGLMHYHATDPYEFLGFVHEIDMSPLAAAPRLADRLAALPGRKILFTNGDDAYAARVLAALDLSDSFEAMWDIHAMAYKPKPEPSAYIGMIEALGITPETSVFVEDMARNLAPAKALGMQTVWLDLATDWGDRAKDDAAIDVVTDDIVAWLDHTIAALADMPPLG

SEQ ID NO: 25166 - protein, 481 aa, Haemophilus somnus 2336
MNIQHLLKTQAYINGEFISAKNHRTFPVINPANQQVICEITCCGKEETELAIKSAKQAQVHWKKYTAKERSKILKKWFELIMQHQESLAYLLSLEQGKPLSESRAEIAYGASFVEWFSEEAKRAYGEIIPQVREENRLLVIKQPVGVVAAITPWNFPNAMITRKAAPALAAGCAIIIKPAPETPLSALALAALAEQAGIPKGIFNVLPTVYAEEVGSVLTRSTDVRKLTFTGSTKIGKILMQQCADTVKKISLELGGNAPSLIFNDADLDRTVDSVIASKFRNSGQTCICTNRIYVQSEIYRAFADKLKQKVRSFIVGDFQQEAVNIGPLINESAVRKIERHIEDALSKGAILTLGGQRHSLGGTFFEPTILENVSQDMLVCHEETFSPLAALIPFDTEEQAISMANDSEFGLAAYVYTQDFSRIWRLSEELECGLVGVNEGIISNEVSPFGGVKQSGLGREGSRHGLDEFLEMKYLCMKV

SEQ ID NO: 25167 - protein, 1078 aa, Arabidopsis thaliana
MAIQHTWIQGHKKVLFEGDNRIVLKLVKGETQNFKVHNWIREIKYWRQKFSSVDFVWTRRHNNKAADRLVGSYFVGQYYQVLQQQPDLIHQFYSEPSRAIRIDGDSTETANSLLHIHNMVMSLNFTAIEVKTINSVESWEGGVLVVVSGSVKTKEFSNRRSFVQTFFLAPQEKGYFVLSDVFLFVDEGTVYYHQPSYLSEIKHEAQLNPPTRHPDPQVSDYVLEEEASDYVNAVQIKDDLVDKYSLQEDQHQPQHEDYEDEVAIEETPREEVAVDVVHEHRAAPVEEPVGEKSKMSYASILKVAKEAATVPVAATQPSYNKSSQDINEWDQPMRTPSPQLAAPLAPIQQSNSSTYVSDYGAEAEDGSGFEDFEFKSVYVRNLPSDISASEIEEEFKNFGTIKPDGVFLRTRKDVMGVCYAFVEFEDMTSVENAIKASPIYLGGRQVYIEERRPNPAGVRGARRGGGRGRGGYPTEAPRGRFGGRGSGRGNQDGGDYRPRGNASYESFRETEGMFGCKCLYWNNLKEYPPLKEPETFSLPASLPQWPSGQGFGLGRINLGELEVAEITSFEFVWRYCSRRDNKKSVSFYKPDKLPEDFHCLGHYCQSDSHLLRGFLLVARQVNKSSEPALVQPLDYTLVWSSNDLSEERQSESYGYFWLPQPPQGYKPIGYLVTTSPAKPELDQVRCVRADLTDKCEAHKVIITAISDSLSIPMFIWKTRPSDRGMRGKGVSTGTFFCTTQSPEEDHLSTIACLKNLDSSLHAMPNIEQIHAMIQHYGPRVYFHPNEVYLPSSVSWFFKNGALLCSNSNSSVINNEPIDETGSNLPHGGTNDKRYWIDLPINDQQRREFIKRGDLESSKLYVHVKPAFGGTFTDLAFWIFCPFNGPATLKLGLMDLSLAKTGQHVCDWEHFTVRISNFSGELYSIYFSQHSGGEWIKPENLEFVEGSNKAVVYSSKNGHASFSKSGMYLQGSALLGIGIRNDSAKSDLFVDSSLKYEIVAAEYLRGAVVEPPWLGYMREWGPKIVYNSRSEIEKLNERLPWRLRSWVDAVLRKIPVELSGEEGPTGPKEKNNWFGDERW

SEQ ID NO: 25168 - protein, 489 aa, Oenococcus oeni PSU-1
MPVKNKAMLITYSDSMGKNIKELQYILDKYIGDAIGGVHLLPFFPSTGDRGFAPSDYTRVNPDFGDWEDVEELGKKYYLMFDFMINHISRESIMYQDFKEKKDASSYKDFFIRWEKFWPKGRPTKADIDLIYKRKDKAPIQGITFADGSQEHLWNTFGDEQIDINVKSKVAQEFFKDTLQSMVKHGADLIRLDAFAYAIKKIDTNDFFIEPEIWDLLESVRKILDPLHAEILPEIYEHYTIPAKINEYGYFTYDFVLPLVILYTLYSGNPKQLAKWLKMSPKKQFTTLDTHDGIGVVDARDILTDEEIDYTSSELYKVGANVKRTYSSAAYNNLDIYQINSTYYSALGNDDKAYLLARAIQIFAPGIPQIYYAGLLAGENDLDLLEKTKEGRNINRHYYSEEEVANEVQRPIVACLLKLLAWRNRSAAFDLQGDIQVSATDKNEIKIIRTSTNGQDTAELTANVALKTFTIKENDKIILIEDQTDTKDI

SEQ ID NO: 25169 - protein, 740 aa, Cucumis melo var. cantalupensis
MENCYCIEPQWPADELLMKYQYISDFFIALAYFSIPLELIYFVKKSAVFPYRWVLVQFGAFIVLCGATHLINLWTFTMHSRTVAVVMTTAKVLTAVVSCATALMLVHIIPDLLSVKTRELFLKNKAAELDREMGLIRTQEETGRHVRMLTHEIRSTLDRHTILKTTLVELGRTLALEECALWMPTRTGLELQLSYTLHQQNPVGYTVPINLPVISQVFSSNRALKISPNSPVASLRPRAGRYVAGEVVAVRVPLLHLSNFQINDWPELSTKRYALMVLMLPSDSARQWRVHELELVEVVADQVAVALSHAAILEESMRARDLLMEQNVALDLARREAETAIRARNDFLAVMNHEMRTPMHAIIALSSLLQETELTPEQRLMVETILKSSNLLATLINDVLDLSRLEDGSLQLDIGTFNLHAVFKEVLNLIKPVTLVKKLSLTLHLGPDLPVFAVGDEKRLMQAILNVVGNAVKFSKEGSISISAIVAKSETFREIRVPDFHPVPSDSHFYLRVQVKDTGSGISPQDIPKLFTKFAQTTVGPRNSGGSGLGLAICKRFVNLMEGHIWLESEGLGKGCTATFIVKLGIADQSNESKLPYTSKIHENSIHTSFPGLKVLVMDDNGVSRSVTKGLLVHLGCEVTTAGSIEEFLRVVSQEHKVVFMDICTPGVDGYELAIRIREKFAKCHERPFMVVLTGNSDKVTKESCLRAGMDGLILKPVSIDKMRSVLSELIERRVLFETS

SEQ ID NO: 25170 - protein, 469 aa, Enterococcus faecalis
MAEQTDLLILGGGTGGYVAAIRAAQKGLNVTIVEKYKLGGTCLHKGCIPTKALLRSAEVFDTLKQAASFGIETEAASIDFSKIQQRKEGIIEQLHKGVEGLCKKNKIKILAGEGAILGPSIFSPVSGAVAVTFNDPTREEEIIVPKNVIIATGSSPKTLPNLPLDEEFILSSDGMLELEELPESIAIIGGGVIGVEWASLLNSLGVNVTIIEFLDRLLINESATISKELKKRLEQRGINILLGSKVQEAKVTGQKVQVEVAGQESLTVDKVMVAIGRQPNINKLGLQNTSVKYTDKGIEVNEFYQTTEGHIYAIGDCIDTLQLAHVAMKEGELAVQHLLDETVEPLNYTNVPRGVYTNPEIASVGYTRETLPADKEVVIGTFNFNGNGKSLVYGETDGFIEVIRDKKTDDLLGVSMIGPHVTDLIAEASTAMYLDAAPIEIGEAIHAHPTMTEVLQEAALDTYGLAIHK

SEQ ID NO: 25171 - protein, 363 aa, Burkholderia fungorum LB400
MIPVTILTGFLGSGKTTLLKRILNEKHGMKIAVIENEFGEENIDNEILVQDTGEQIIQMSNGCICCTIRGDLSRVLGDLAAQKQAGTLDFDRVVIETTGLANPGPVAQTFFMDDQIANEFLLDAIITLVDAKHANHQLDEHEVVQRQVGFADRLFITKSDLVDEKHLADLRHRLLHMNPRAAIKVVNFGEADIKEIFDLRGFNLNSKLEIDPDFLVEDEHAHSHAHAHDEHGHTHDDHANCDHDHGHCDHEGHDHGHHHHHAHHDDKIKSFVYRNDRPFDPNKLEDFLGGILQIYGERLLRYKGVLYMKGVDRKVVFQGVHQMMGSDLAAKWQPIEKKTNKMVFIGIELPQDLITDGLDACLV

SEQ ID NO: 25172 - protein, 618 aa, Haemophilus somnus 2336
MKNLKYFAQKYVDWVIRLGRIRFSLLGVCILAVVALLTQIVVSLIFMGTIYWQDVARSIIFGLFSAPFVLYFFTLLVEKLEKSRLDLAKLVDNLRNEVSERILAERKLSVALSEIEKTSQDKTALMTTISHELRTPLNGIIGLSQILLDDKLTEQQRNYLKTINVSAISLTHIFSDIIDLEKIDANRIELHYQPTNLCSFLNDITNFATLMAAQRKLKFELVCDKDLPDWLMLDSARLSQILWNLINNAVKFTPAGKIKLKVSRLTDDTFSFALSDTGVGIAKGELDKIFTMYYQVQETDHKPIGSGIGLAVSKAIAGLMGGDLTVESQLHQGATFTLTLQAKAVEKPAESESNVPNTLTILLVEDIEVNIIVAKSVLEKLGYCVDVAMTGKEAIQKFEQNYYDLVLLDIQLPDMSGFTIAQYLREKYEQGVYDFLPPLIALTANIMQSKTEYQKQGMDDVLRKPLSLEALVNCLSDYFGDELNTKIIKKSSFVEFSALSDVLNMELLVELNDILGKEFIGKNLLLFKQTMPSYVNELLDSYEQYKQDSAVKKDLLSNVHKIKGAAASVGLLRLQQVASLAQDANHENWETHIDEWINTLANDWLVDTAALEDWLNDL

SEQ ID NO: 25173 - protein, 589 aa, Saccharomyces cerevisiae
MTISSAHPETEPKWWKEATFYQIYPASFKDSNDDGWGDMKGIASKLEYIKELGADAIWISPFYDSPQDDMGYDIANYEKVWPTYGTNEDCFALIEKTHKLGMKFITDLVINHCSSEHEWFKESRSSKTNPKRDWFFWRPPKGYDAEGKPIPPNNWKSYFGGSAWTFDEKTQEFYLRLFCSTQPDLNWENEDCRKAIYESAVGYWLDHGVDGFRIDVGSLYSKVVGLPDAPVVDKNSTWQSSDPYTLNGPRIHEFHQEMNQFIRNRVKDGREIMTVGEMQHASDETKRLYTSASRHELSELFNFSHTDVGTSPLFRYNLVPFELKDWKIALAELFRYINGTDCWSTIYLENHDQPRSITRFGDDSPKNRVISGKLLSVLLSALTGTLYVYQGQELGQINFKNWPVEKYEDVEIRNNYNAIKEEHGENSDEMKKFLEAIALISRDHARTPMQWSREEPNAGFSGPSAKPWFYLNDSFREGINVEDEIKDPNSVLNFWKEALKFRKAHKDITVYGYDFEFIDLDNKKLFSFTKKYNNKTLFAALNFSSDATDFKIPNDDSSFKLEFGNYPKKEVDASSRTLKPWEGRIYISE

SEQ ID NO: 25174 - protein, 546 aa, Tetragenococcus halophilus
MAKDIKFSEDARRSMLNGVSKLADTVKVTLGPRGRNVVLEKSYGSPLITNDGVTIAKEIELENRFENMGAQLVSEVASKTNDIAGDGTTTATVLAQSIVSEGLKNVTSGANPLGIRRGIEQATQKAVEELQNISTPVESKEAIVQVGEVSSGSKQVGQYIADAMDKVGNDGVITIEDSQGIDTELDVVEGMQFDRGYLSQYMVTDNEKMEADLDSPYILITDKKISNIQDILPLLEQVVQESKPLLIIADDIDGEALPTLVLNKIRGTFNVVATKAPGFGDRRKAMLEDIAVLTGATVITEDLGLELKDATMDSLGKANKVTVDKDNTTIVEGAGDSTAIEDRVQLIKNQVAETTSDFDREKLQERLAKLAGGVAVIKVGAATETEQKELKLRIEDALNAARAGVEEGMVSGGGTALVNVINKVAELDADDDAITGVNIVLRALEEPVRQISENAGFEGSVIIEKLKSEKLGIGFNAATGQWVNMVDAGIVDPTKVVRSALQNAASISALLLSTEAVIADRPDESGNDAGAGAQGMDPSMMGGGMM

SEQ ID NO: 25175 - protein, 330 aa, Enterococcus faecalis
MKMKTLKKSGLSKEELIQAYRQVLRGRRLDERLWQLTRIGKTSFNISGQGAEVAQVAMAMAFNPQKDYFLPYYRDMTACLVWGMTSKDILMGSFGKEADPSSHGRQMPNHYGSKEHNIVSFSSTVSTQMPLATGVGYAAQLQKADFVALTTTGEGSANQGEVQEAINFAGVKKLPVIFVVENNEYAISVPIEEQYANKRMADRAKAYGFEGVTVDGSDFAEVYLAFKEAVKAARGKKGPKLIELMVSRLTSHSADDDQSVYRSKEEIEEMKKNDAVKLFEKQLLEEGYLTDEDIAKIDEEIRAEINQATDEAEAMPDPVPTSILEEVYAK

SEQ ID NO: 25176 - protein, 647 aa, Arabidopsis thaliana
MASSMASNDFQLPPRFFTVFVSHFSSEFMVIPVSYYDHIPHRFPKTVILRGPGGCSWKVATEIKDDEVLFSQGWPKFVRDNTLNDGDFLTFAYNGAHIFEVSIFRGYDACKEISEVTELEEEEEDSVISLSSEDTDTGAKSEMKNTVPEGRDKGKSKVEVVEDSDDDEEEDSVYSESSEETETDTDSEFKVAKPTIPKSQKKGKKKEQVVESSDDEEDEEEDSDSDYIETFGQLDIEENSISEEDSSYAPDKEDTATASFVKPKVANKVANLKRKEAAKKRKKVDPMIKNPERYLDDPKNIHFETNVKNRLYELLVHAQLVKDYCLRFGDYVNYIDRFGKLSAKTAKWKDQRVCIKRWMRICKRNKLKKEDRILCELLRKGTFVYAIKLHVIRAPTRYQKEQLSPEQELSVIVSALQHVISGENETAPCQGFSSDSTVISAGMPRLDSDTCQVCRIEGCLGCNYFFAPNQRIEKNHQQEEEITSSSNRRRESSPVAKKAEGGGKIRKRKNKKNGYRGVRQRPWGKFAAEIRDPKRATRVWLGTFETAEDAARAYDRAAIGFRGPRAKLNFPFVDYTSSVSSPVAADDIGAKASASASVSATDSVEAEQWNGGGGDCNMEEWMNMMMMMDFGNGDSSDSGNTIADMFQ

SEQ ID NO: 25177 - protein, 197 aa, Triticum aestivum
WTQKRQMYAAAGGPRKEAAAGGGPWVVPTVGFPPPGTMAHAGMAHHPGQPPPFCRPLHVWGHPTGVDAPLPLSPPSMLPVWPRHLAPPPAWAHQPPMDPVYWHQQYNAARKWGPQAVTQCVPPTMPPAPMMQRFAAPPMPGMMPHPMYRPIPLPPSPVPQSNNGAGLQLQFDAHPSKESIDAVIGDVLVSHGLALPW

SEQ ID NO: 25178 - protein, 162 aa, Glycine max
  misc_feature (138)..(139): Xaa can be any naturally occurring amino acid
  misc_feature (142)..(142): Xaa can be any naturally occurring amino acid
  misc_feature (151)..(151): Xaa can be any naturally occurring amino acid
  misc_feature (157)..(157): Xaa can be any naturally occurring amino acid
  unsure (1)..(162): unsure at all Xaa locations
MSAAEGAVVFSEEKEALVLKSWAIMKKDSANLGLRFFLKIFEIAPSARQMFPFLRDSDVPLETNPKLKTHAVSVFVMTCEAAAQLRKAGKITVRETTLKRLGGTHLKYGVADGHFEVTRFALLETIKEALPADMWGPXXRNXWGEAYDQLXAAIKQXMKPFE

SEQ ID NO: 25179 - protein, 317 aa, Moorella thermoacetica ATCC 39073
MAKVITIGEILVEIMTKYTGQEFTAPGELLGPYPSGAPAIFIDQVARMGVEAGIIARVGDDDFGLLNLTRLRDDGVDTSHIYKTKGYTTGTAFVTYYANGERKFIFHFPHAAAGQLGPADVDENYIKTAEYLHVVGCSLTASASLRQAIWKAVKIAKENKVKVSFDPNLRPELLNEQEIKNVYDDILDAADIILAGKSEMIALSGEGDLVKGIARLKKRDGTMLVLKDGARGASLYYGEECYHVPPVKVQEVDPTGAGDCFDGAFIAALACGKGLKEALQIANVAGALSVTRKGPMEGAAFKEDILALYSRHNSSKV

SEQ ID NO: 25180 - protein, 265 aa, Arabidopsis thaliana
MAEEYKNNVKEHETPTVATEESPATTTEVTDRGLFDFLGKKEEEVKPQETTTLESEFDHKAQISEPELAAEHEEVKENKITLLEELQEKTEEDEENKPSVIEKLHRSNSSSSSSSDEEGEEKKEKKKKIVEGEEDKKGLVEKIKEKLPGHHDKTAEDDVPVSTTIPVPVSESVVEHDHPEEEKKGLVEKIKEKLPGHHDEKAEDSPAVTSTPLVVTEHPVEPTTELPVEHPEEKKGILEKIKEKLPGYHAKTTEEEVKKEKESDD

SEQ ID NO: 25181 - protein, 545 aa, Salmonella enterica subsp. enterica serovar Typhi Ty2
MTTNYIFVTGGVVSSLGKGIAAASLAAILEARGLNVTIMKLDPYINVDPGTMSPIQHGEVFVTEDGAETDLDLGHYERFIRTKMSRRNNFTTGRIYSDVLRKERRGDYLGATVQVIPHITNAIKERVLEGGEGHDVVLVEIGGTVGDIESLPFLEAIRQLAVDIGREHALFMHLTLVPYLAAAGEVKTKPTQHSVKELLSIGIQPDILICRSDRAVPANERAKIALFCNVPEKAVISMKDVDSIYKIPGLLKSQGLDDYICKRFSLNCPEANLSEWEQVIYEEANPAGEVTIGMVGKYIELPDAYKSVIEALKHGGLKNRVTVNIKLIDSQDVETRGVEILKDLDAILIPGGFGYRGVEGKIATARYARENNIPYLGICLGMQVALIEFARNVAGMDNANSTEFVPDCKYPVVALITEWRDEDGNVEVRSEKSDLGGTMRLGAQQCQLSDDSLVRQLYGASTIVERHRHRYEVNNMLLKQIEAAGLRVAGRSGDDQLVEIIEVPNHPWFVACQFHPEFTSTPRDGHPLFAGFVKAANEHQKRQAK

SEQ ID NO: 25182 - protein, 382 aa, Cryptococcus neoformans var. neoformans JEC21
MSDFHQAPHKLLVIPGPIEFSDPVLAANATPGTAHTSPAFIPVFGEALSLLRDVLLSAKESGSQPLLIAGSGTLGWDAVAANLIEKGEEAVVLNTGYFSDSFGECLEAYGAKVTHVKAEVGGIPTDDAIISALASKPKLLTITHVDTSTGVLSPADHIASLVKKHSPDTLIALDAVCSVASEEIKFDEWGLDVVLSATQKGLGVPPGLSVVLASKRAVETVEKRKTPIPAYYVSWKKWIPIMQNYESGKPSYFATPPVQLVYALHTSLKSITSAPLADRFKAHKAASAYVKDSLAELGLEFVPKSRDIAANGMTAVRFPKGVKAPDVLPKLAERDIVVAAGLHKAIVSEYFRIGHMGITAVDRQRGDLEKVVKGIKEVLGKA

SEQ ID NO: 25183 - protein, 203 aa, Cucumis sativus
VLTGDSGVGKSNLLSRFSKNEFRFDSRPTIGVEFAYRNIKVADKLVKTQIWDTAGQERFRAITSSYYRGALGALLVYDITRVATFDNIKKWLRELREFGNPEMVIILVGNKCDLHQSREVQEEEARHLAELENLFFMETSAKDNLNVEEAFLEMVRRIHAIASQKTLDLHKKFEKLVAFPNGKEIISIHEVTPTKPNSNCCSL

SEQ ID NO: 25184 - protein, 102 aa, Streptomyces avermitilis MA-4680
MTTASSKVAIKPLEDRIVVQPLDAEQTTASGLVIPDTAKEKPQEGVVLAVGPGRFEDGNRLPLDVTVGDVVLYSKYGGTEVKYNGEEYLVLSARDVLAIVEK

SEQ ID NO: 25185 - protein, 323 aa, Oryza sativa
  misc_feature (14)..(14): Xaa can be any naturally occurring amino acid
  unsure (1)..(323): unsure at all Xaa locations
MGRPPCCDKVGVKXGPWTPEEDLMLVSYIQEHGAGNWRAVPTNTGLMRCSKSCRLRWTNYLRPGIKRGNFSEQEEKLIVHLQALLGNRWAAIASYLPERTDNDIKNYWNTHLKKKLKKMQAAGGGEDSGAASEGGGGRGDGDGGGKSVKAAAPKGQWERRLQTDIHTARQALRDALSLDHPDPSPATAAAAATPAGSSAAYASSADNIARLLQGWMRPGGGGGGNGKGPEASGSTSTTATTQQQPQCSGEGAASASASASQSGAAAAATAQTPECSTETSKMATGGGAGGPAPAFSMLESWLLDDGGMGLMDVVPLGDPSEFF

SEQ ID NO: 25186 - protein, 542 aa, Streptomyces avermitilis MA-4680
MAKILKFDEDARRALERGVNKLADTVKVTIGPKGRNVVIDKKFGAPTITNDGVTIAREVEVEDPYENLGAQLVKEVATKTNDIAGDGTTTATVLAQALVREGLKNVAAGASPALLKKGIDAAVKAVSEELLATARPIDEKSDIAAVAGLSAQDSQVGELIAEAMDKVGKDGVITVEESNTFGLELDFTEGMAFDKGYLSPYFVTDQERMEAVLEDPYILIHQGKISSIQDLLPLLEKVIQANASKPLLIIAEDVEGEALSTLVVNKIRGTFNAVAVKAPGFGDRRKAMLGDIATLTGGQVIAEEVGLKLDQVGLDVLGTARRVTVTKDDTTIVDGGGSSDEVAGRINQIKAEIENTDSDWDREKLQERLAKLAGGVCVIKVGAATEVELKEKKHRLEDAISATRAAVEEGIVSGGGSALVHAVKVLEGNLGKTGDEATGVAVVRRAAVEPLRWIAENAGLEGYVITSKVAELDKGQGFNAATGEYGDLVKSGVIDPVKVTRSALENAASIASLLLTTETLVVEKPAEEEADAGHGHGHGHSH

SEQ ID NO: 25187 - protein, 268 aa, Staphylococcus epidermidis ATCC 12228
MHTLSVIKKNKKVTYGNDKSVTGKVIGKDKWSDLAVVKAKVADENIKPMTMGDSNNIKLAEPILVIGNPLGTDFKGSVSQGIVSGLNRHVPVDIDKNDNYDALMKAFQIDAPVNPGNSGGAVVDRDGRLIGIVSLKIDMHNVEGMAFAIPINDVRKIAKELEHKGKVNYPNTEIKIKNVGDLDDSERNAINLPAKVNHGVLIGEVKENGLGDKAGLKKGDVIVELDGKKIEDNLRYRQVIYSHYDDQKTITAKIYRNGAEKNIKIKLK

SEQ ID NO: 25188 - protein, 1388 aa, Magnaporthe grisea 70-15
MVSRDASIAGEAACETNPLGPLKHSEYENGRSGPDTGSFYSSKTSATEQYQPTPESIFASQHDDQINLSSSMLGFNNGSGDDIPPPRSPLTLSLPLKTVVLANEAMGRLLGFDADGPTAMTVQERLKGRTISQVGIDLLQDGKVARLKWDNFLDLVADNVSLGPTFRPTEGADGSSTPTWASENSDAKQPPRPQTCVDVIISKDDVGKPKATWPHRVSKSNPELYTYAKMLISVWEVDGQMYFTLTFTNTESKVDASARHKKSVAQPSLIEDAKSRSVYATHSSSTGTSSIESPTSSHSSLITPVSLGLSPFPPFGPPNSSTNQNGPSILTKLLTMKDATLDNSQMPILAMWKDGSASFPNKAARAMFRTDQSDASEGDALLRRWDVYDEDFTQALEPQDYPISILLRTETPFTGIRIGMYNPDGQKVVFDVLGEAIKDEQTGEFLAGVIYCRDVSPMKQIINNMKELEDEKFRLICDTMPQLVWTTTPDGRHDFYNDRWYRYTGLTKGDSLGLGWKHPFHPDDMPEAERRWARSLATGQPYDVEYRCRNKDGEWRWMLGRALPLRDPETKEIKKWFGTCTDVHESIQAKVTAERLREQLLTVITHAHVTIFTVDNDRNVTMLEGALRWDATGENYRDLEGDSKWYVGRNMYEVFNTLNSHLEDGERPRFLEPIEAILAGKSTEDIQEHGFDGRWYRTRFIPVSAKLKTAEGFSNNAGSIEGVIGVIFDVTELRAREMDLVEQAKERRQLVANEAAAKEASRLKSQFLANMSHEIRTPITGVIGMSELLLDLELGDEEREYGENIYRSANALLAVINDILDFSKVESGHLDIEEVQFSLSVIVGDVNKMLSFAAERKNLDFQSEIASDIEEDLVVLGDPGRVRQIITNLLTNSIKFTKQGYVRFSVVKERETPDIIEIKFVVEDTGIGIDAQVRSRLFQPFSQGDASTARRFGGTGLGLTISKNLLELMKGRMTLESAEGKGTTATFWIPFNRPPNGSYEGNLVQIDALPDRLQSDISVSCNSLGESEQISTAATKGQADSRASTPSGNKSASSLRRKPSIALGPASPVLADLSMADRAEMHVLLVEDNLIIQQIAIKNIKKLGFKVDAVWNGKEALAYLEGAQDGKNPKPDIILMDVQMPVLDGYRTVHLLRHHFPYKTYVNDVPIVAMTASAIQGDRERCMQAGMDDYLAKPVKSKLLEKMLVRWTKDRRKLPEMTAGLSCSSSECGVSDGSLGTMESPALPPIMSDIADSLLLRRPKQHQQPAVLPVPENINEDNGNGGEMPDSSTPMPIQEGPQSSGFRLLSNESEGAKFQKPLRIMEASERAMHSRDDKLVNAAEDEFSRPSPSYSLEAPLGMGSGFLTEENMGRLGLQEALKQQRSSGPGEG

SEQ ID NO: 25189 - protein, 550 aa, Gloeobacter violaceus PCC 7421
MASSVLTVGEYLIERLYSHGVHHIFGVPGDYVLGFFKQLCDSPIKVINTCDEQGAGFAADAYARVRGLGAVCVTYCVGGLKVANTTAQAYAEKSPVVVISGAPGTNERHKNPLLHHKVREFDTQLKVFEQLTVAATVLDDPQTAFCEIDRVFEAALRYRRPVYIELPRNVARATGSACHLRELPQETSDPATLGEAVKEAVARINASRQPVILAGEELHRFALQPLLAQLIEKTNIPVASTILGKSVFPESHPRYLGVYEGAMGREDVRDYVEASDCLVLLGALMTDMNLGIYTANLDPRRSIYCATEKLTIGYHSYEDVRLQDFAAGLLAGEIERRVDGPTPHPLPLAQFQPVQDRPMTVLRLFQQLNAFLDDETIVVADPGDALFAGADLFIPGKTRFLAPAYYASLGFAVPAALGAQMADARLRPLVLVGDGAFQMSGLELSTIARFGLDPIVVLLNNRGYGTERPMQDGSFNDVLNWNYSRLPELLGTGRGFEVSTEDQLAAALHEARRHRGSFSLIDVHLEPGDLSPALRRMTDSMGQRVRPAAV

SEQ ID NO: 25190 - protein, 197 aa, Bacillus subtilis subsp. subtilis str. 168
MTNRDIVWHEASITKEEYQQKNKHKSSILWLTGLSGSGKSTIANAAARELFEQGYQVIVLDGDNIRHGLNRDLGFSDEDRKENIRRIGEVAKLFVQQGTIVITAFISPFREDRQQVRELVEAGEFNEVYIKCDLDICEQRDPKGLYKKARNGEIPFFTGIDSPYEEPEAPELVLDSGQHDREACKNQLIEFVKQKLS

SEQ ID NO: 25191 - protein, 521 aa, Pleurotus ostreatus
MVLSTKLAALVASLPFVLAATKKLDFHIRNDVVSPDGFERRAITVNGIFPGTPVILQKNDKVQINTINELTDPGMRRSTSIHWHGLFQHKTSGMDGPSFVNQCPIPPNSTFLYDFDTAGQTGNYWYHSHLSTQYCDGLRGSFIVYDPNDPLKHLYDVDDESTIITLADWYHDLAPHAQNQFFQTGSVPIPDTGLINGVGRFKGGPLVPYAVINVEQGKRYRFRLIQISCRPFFTFSIDNHTFDAIEFDGIEHDPTPAQNIDIYAAQRASIIVHANQTIDNYWIRAPLTGGNPAGNPNLDISLIRAILRYKGAPAVEPTTVATTGGHKLNDAEMHPIAQEGPGNLGTGPPDMAITLNIAQPNPPFFDINGISYLSPSVPVLLQMLSGARKPQDFLPSEQVIILPANKLIEVSIPGAGAHPFHLHGHTFDIVRTSNSDVVNLVNPPRRDVLPINGGNTTFRFFSGNSGAWFLHCHIDWHLEAGLAVVFAERPAEVNEGEQAQIVTQDWRTLCPAYDGLAPEFQ

SEQ ID NO: 25192 - protein, 682 aa, Gloeobacter violaceus PCC 7421
MQHPNRLSSLLPSLDQAMETRVKLVTPDTVLSDIVEWMGGQADYRCALPERKDRTLRQSGELQPDCVLVAEGAHLVGIITEGDIVRLTALGKDLAAVRAGEVMLGGVVTLVQDGRQDILGALDLMRRHNVRHLPVLDDGGRVTGLLSAGGIRRTLQPIHLLTLRSVAEVMTTPVVHAPAGSLLVNLARLMAGRRVSCVVIAEPHTDGVHVRPVGLITESDIVQFRYLQFDLTQTRAAAVMSAVASPLKPFESVLVAHQQMLRRRVRRLVVTGERGELVGIVTQTGLLRLLDPLEIFGVIEALQRSVHQLEAEKMELLQGRTLQLERLVEERTAQVQEQARREQLARAAAESARQEAEEANRIKDEFLATLSHELRTPLNPIIGFTQLLRKGQLDEASAARALETIERNARAQSRIIEDMLDLSRIITGKLRLEVRPVALATVVEDALDTVRFAAQSKNIELRARLDPNVVLPFGDSNRLRQVVWNLLSNAIKFTPENGSIEVQLERGRAEAVLTVRDSGVGIAGDFLPHVFERFRQANSTTTRSHGGLGLGLAIVRQLVELHGGTVGVESPGSDQGATFTVRLPLLLGRGARTSATQAPLPPEAMGLQVITVETGCLLDGHTLAETDLRRRYGVVVHALRREGRLIGFPDADTPLREGDQLLVSGGCDQLERLKQRMAESQG

SEQ ID NO: 25193 - protein, 620 aa, Cryptococcus neoformans var. neoformans B-3501A
MRASRFVIPSTQPVRFRRQFRPAWIPSLGTGYDSCCVYFTTTSSSISSDSGSESGPSSGFSSRRFRRRYLYPLAFLPAGFLLVPTLSAETEPFPGAGSSSLQIASTAQLLRTWLVYSLISFPGVVDYSPKILSILINSPLRLPTEWFVRNTFFEQFVPGETVEDCISSLKALRTRGIGAMLNYSAEVDESQLQDDNTYGKEARRQRERKHRLEQVMMALEKSGEYERSLPVEQRGATGFALKVTGIVDPNVLERASYTLLRLRSLAESSSTNAPNTPLFVPYPCTPESLDCQVLARTKDLNFGDPRELFALKDKWDDIGVLETDPGLKEDDLEVLSDLWYNLRKIGEKAKENDVVLIIDAEHTWYQPALDGYTLLLSEVFNKPPKSKSEKWNGPLIYGTYQSYLRRQPTHLMHAIQHAEANGYALGLKLVRGAYHLQERKKWLDEDRLGADPIWPNKPVTDVSYDGSISTILTTLSDQLKSFHPERALSVIFGTHNPESCDIICENLLKNGLAEKGSSGLMRLKKDVRGRVRIAQLYGMKDDLTDRNAARFVNDGQPVAFKYIAYGKLEEVMPFLGRRAFENKSLMSGEQGAAGERKRVTQELWRRYLGRSSSIVPACAA

SEQ ID NO: 25194 - protein, 603 aa, Cryptococcus neoformans var. neoformans B-3501A
MSAIRPIMRPFRMTTPFRQSSSFRQLRITWAPSFGAGSSRCLTIGLSPSSGSGSSFRRRLLYPLAILPVGLLLLPVLSADSEPDAIPVPTSLSTSTTSELLRTWFVYAIISMPGVVDYSPAVLNFFINSSLRGPTEWFVRHTFFGQFVAGETVEGCMPTLKAFRERNVGAMLNYSAEVDESQLTETAPSKEERNRKEREKKFETIITALEAAGEYERSLPVDQRGVTGFALKITGLIDPNILERASYTLLRLRPLAKSNSPTAPNTHLFVPYPGTPETLDRQVVARTPDLKLGDGKELLALKGKWDDMGVLEKDPGLQEGDLEELRQLWYKLQKIGHKAKENDIILYVDAEYTWYQPALDAYTLLLSQEFNRPPTSKEETWTGPLIYGTYQTYLCRQPTHLIHAIQHAEANGYALGVKLVRGAYFEQERKKWSDEGRVGAAPIWPNKSATDVAYNGSISTIMTTLASQLKSPHPELALSVAFGTHNPESCDLVCENLLRNGLAKEVGEAKMLKLREDVRGKVRIAQLLGMKDDLTDRMARKFVNDGKPVALKYMAYGKLSEVMPYLGRRAIENKSLMSGDHGAAAEMRRVAAELKRRFFGGSV

SEQ ID NO: 25195 - protein, 289 aa, Gossypium hirsutum
MGMGLRNGFLLILSCVVTLSLSVLGRPATFLEDFRITWSDSHIRQIDGGRAIQLVLDQNSGCGFASKRQHLFGRVSMKIKLIPGDSAGTVTAFYMNSVTDAVRDELDFEFLGNRTGQPYTVQTNIYAHGKGDREQRVNLWFDPAADFHTYSIMWNHHQIVFYIDEVPIRVYKNNEARNIPYPKLQPMGVYSTLWEADDWATRGGLEKIDWTKAPFLAYYKDFDIEGCPVPGPVNCATNSRNWWEGTAYQALNAMEAKRYSWVRMNHVIYDYCTDKSRYPVTPPECMSII

SEQ ID NO: 25196 - protein, 120 aa, Arabidopsis thaliana
MAISSFKHEHPLEKRQAEAARIREKYPDRIPVIVERAEKSDVPDIDRKKYLVPADLTVGQFVYVVRKRIKLSPEKAIFIFVKNILPPTAAIMSAIYEEHKDEDGFLYMSYSGENTFGIFF

SEQ ID NO: 25197 - protein, 165 aa, Brassica napus
  misc_feature (162)..(162): Xaa can be any naturally occurring amino acid
  unsure (1)..(165): unsure at all Xaa locations
HDVITNTLLHPIRIYLRAQGIIHPVTLASLSGAVFHLPANVFLVSYLRLGLTGVAVASSVTNLFVVAFLICYVRASGLHVPTWTDPTRDCFRGWAPLLRLAGPSCVSVCLEWWWYEIMIVLCGLLVNPRSTVAAMGVLIQTTSFLYVFPSSLSFAVSTRVGXELG

SEQ ID NO: 25198 - protein, 161 aa, Prochlorococcus marinus str. MIT 9313
MSMAINISQIVVRTPEGAEKSLSEYSGTVLLIVNVASRCGFTKQYKGLQALQNTYGPQGLKVLGFPCNDFGAQEPGTLEEIKSFCSTTYGASFELFDKVHAMGKTTEPYTTLNQTEPAGDVAWNFEKFLVGKDGTVLKRFKSGVEPESTELKAAIDQALMA

SEQ ID NO: 25199 - protein, 472 aa, Salmonella typhimurium LT2
MVSINHDSALTPRSLRDTRRMNMFVSVSAAVAGLLFGLDIGVIAGALPFITDHFVLTSRLQEWVVSSMMLGAAIGALFNGWLSFRLGRKYSLMAGAILFVLGSLGSAFASSVEVLIGARVILGVAVGIASYTAPLYLSEMASENVRGKMISMYQLMVTLGIVLAFLSDTAFSYSGNWRAMLGVLALPAVLLIILVVFLPNSPRWLAQKGRHIEAEEVLRMLRDTSEKARDELNEIRESLKLKQGGWALFKANRNVRRAVFLGMLLQAMQQFTGMNIIMYYAPRIFKMAGFTTTEQQMIATLVVGLTFMFATFIAVFTVDKAGRKPALKIGFSVMALGTLVLGYCLMQFDNGTASSGLSWLSVGMTMMCIAGYAMSAAPVVWILCSEIQPLKCRDFGITCSTTTNWVSNMIIGATFLTLLDSIGAAGTFWLYTALNIAFIGITFWLIPETKNVTLEHIERKLMAGEKLRNIGV

SEQ ID NO: 25200 - protein, 335 aa, Prochlorococcus marinus str. MIT 9313
MADSAASKSLVKPAVVPARQLPADVDLVRSYLRDIGRVPLLSHEQEITLGRQVQELMSLEQLESELEGQTGEPASRKELAKAAGLSELQLKKKLQSGRRAKERMVSANLRLVVSVAKKYTKRNMELLDLIQEGTIGLVRGVEKFDPTRGYKFSTYAYWWIRQGITRAIAEKSRTIRLPIHITEMLNKLKKGQRELSQEMGRTPTVSELAEFVELPEEEVKDLMCRARQPMSLEMKVGDGDETELLELLAGEEELPSEKVEVDCMKGDLRTLLEKLPELQGRVLRMRYGIDGGEPMNLTGIGRILDISRDRVRNLERHGLNGLRQLSETVEAYAAC

SEQ ID NO: 25201 - protein, 303 aa, Prochlorococcus marinus str. MIT 9313
MTNAENHIWTWQDWQVAWSRSGTADHANSATLLIHGFGACKEHWRHNQSVLAQISPCYAIDLLGFGSSSQPRARLRGEAPHQGDFCYDFDGWGAQVAAFCREVVQIPVRIVGNSIGGVIALRAAQLLEEACEGVVLINCAQRTLDDKRLDEQPSLMRWTRPWLKSLVQQRWLSNSLFRNAANPMMIKRVLKQAYPSGNNLDRSLVSMLQKPADRPGAAEAFHGFINIFDDYLAPELMADLNMPVDLIWGAADPWEPLQEARRWAALLPCIRSISVVDGAGHCPHDEAPEEVNPLLLSIIQQAA

SEQ ID NO: 25202 - protein, 386 aa, Medicago sativa
MAIHHHHHNHQQLQQHTSSLFDALYCDEEEKWEDDDEGEVVDEGAQSDVTTTNYDILDSTSLLPLLLLEQNLFNEDEELNTLFSKEITQQETYYEDLKNVINFDSLSQPRREAVEWMLKVNAHYGFSALTATLAVNYLDRFLLSFHFQKEKPWMIQLVAVTCISLAAKVEETQVPLLLDLQVQDTKYVFEAKTIQRMELLILSTLKWKMHPVTTHSFLDHIIRRLGLKTNLHWEFLRRCENLLLSVLLDSRFVGCVPSVLATATMLHVIDQIEQSDDNGVDYKNQLLNVLKISKEKVDECYNAILHLTNANNYGHKRKYEEIPGSPSGVIDAVFSSDGSNDSWTVGASSYSTSEPVFKKTKNQGQNMNLSPINRVIVGILATATSP

SEQ ID NO: 25203 - protein, 416 aa, Ralstonia solanacearum
MRLLDDLRAGLDAIDAAHLRRVRRTAYSPTDRSQRIDVPGGEPREILGFCGNDYLGLAAHPALMQAVGEGARRYGFGSGASHLVSGHSVAHARLEARMAALQAPHIPDADALCFCTGYMANMAVVSAMAQAGGIQPAQDCTVFSDALNHASLIDGARLSRAAVKVYPHVDLAALEAQLAACGSRNKLIVTDGVFSMDGDIAPLPELLALAERFDAWLIVDDAHGLGVLGADGVGVLSHFGLRSERLIYIGTFGKAAGGAGACVVAHRMAVDWLVQRARTYIFTTATPPAVACGVEAALDLIAGEEGAARRARLAGHIARWSDHAQRLAARFGWQWMPSPTAIQPLVIGENAPALALAAALEREGIRVAAIRPPTVPAGTARLRITLSAAHTEDDIERLARALEAAGQSQQSAARAA

SEQ ID NO: 25204 - protein, 711 aa, Arabidopsis thaliana
MSLVVGQSLGLTLVGDGLSLRNSKINVGKSKFFSVNRRRLARAALVQARPKEDGAAASPSPSSRPASVVQYRRADLADDLQAEARALGRAIDASIYSPELIARKHGSQPFKALRRSLEILGALGGFALKLGIDQKQGNLEKNMKKRAIELRRIFTRLGPTFVKLGQGLSTRPDLCPPDYLEELAELQDALPTFPDAEAFACIERELDLSLETIFSSVSPEPIAAASLGQVYKAQLRYSGQVVAVKVQRPGIEEAIGLDFYLIRGVGKLINKYVDFITTDVLTLIDEFACRVYQELNYVQEAQNARRFKKLYADKADVLVPDIFWDYTSRKVLTMEWVEGTKLNEQLAIESQGLKVLDLVNTGIQCSLRQLLEYGFFHADPHPGNLLATPDGKLAFLDFGMMSETPEEARFAIIGHVVHLVNRDYEAMARDYYALKFLSPDVDVTPIIPALRDFFDDALNYTVSELNFKTLVDGLGAVFYQYPFNVPPYYALILRSLTVLEGLALYADPNFKVLAASYPYFAKRLLTDPNPYLRDALIELLFKDGKFRWNRLENLLQQGSKDRDFSAKDALQPVLKLLLDPNGEELRLLVIKEAVRVSEAIALGTVVDTYNSLPEFLRSLVFNGNGNGPLTMSTAELQSTLELRDQVSRIWGLLQSSESFDPAILQPILQVLQQPEARRLGGRVAGGVGQRLAARFLQQLLRATTPSSAPSP

SEQ ID NO: 25205 - protein, 345 aa, Glycine max
MGIYLSTPKTEKFSEDGENDCLRYGLSSMQGWRATMEDAHAAYTDLDESTSFFGVYDGHGGKVVAKFCAKFLHQQLFKSETYLTGDIGASLQKAFLRMDEMMRGQRGWRELSILGDKINKFTGMIEGLIWSPRSSDGNCHVDDWAFEEGPHSDFAGPTSGGTACVAVIRNNQLVVANAGDSRCVISRKGQAYNLSRDHKPDLEIEKERILKAGGFIHVGRVNGSLNLARAIGDMEFKQNKFLSAEKQIVTANPDINTVELCDEDEFVVLACDGIWDCMSSQQLVDFVHEQLHSETKLSAVCERVLDRCLAPSTASGEGCDNMTMIVVQFKRPAQSSVPAEESSSN

SEQ ID NO: 25206 - protein, 315 aa, Prochlorococcus marinus subsp. pastoris str. CCMP1986
MQNKYLINFSKKFWFWFWTKLMNGFAPSDLQGNYRRPRGILINKNYEFKVKNENSYLLVGNSCPWCHRTLLIYKLKNLSKKVKVIFLEADINSGQWIFKKKFEECETLHQFYKKAQKHNLFRATLPLLFNFQNDQINILSNESSEIVKFLNSIKVDSSQKTLQIRKCDQDLLEIIHSDINNGVYKCGFARNQISYEKASKNLFEALTIIEKKFDKNVGNWICGEDLTYADIYLFPTIIRWELIYRQLFKCTEKEISDFRNIIKWRLRFFKLTKVSETCFDSEWKKDYYKALFPLNPNQIIPVLPSLKEIMQSLPK

SEQ ID NO: 25207 - protein, 187 aa, Xanthomonas oryzae pv. oryzae KACC10331
MRDLPAGTRPDVVGTSAWRGPGNAPLTVDAGLGIYMQFRSDVGRDDASRAWGYVMSENIAAGGELAGLKVMVIDDSKTIRRTAETLLKREGCEVVTATDGFEALAKIADQQPQIIFVDIMMPRLDGYQTCALIKGNQLFKSTPVIMLSSKDGLFDKARGRIVGSEQYLTKPFTREELLSAIRTYVHA

SEQ ID NO: 25208 - protein, 286 aa, Glycine max
  misc_feature (195)..(195): Xaa can be any naturally occurring amino acid
  unsure (1)..(286): unsure at all Xaa locations
MEGVPHPIPRTVEEVFTDFKGRRAGLIKALTTDVEKFYQQCDPEKENLCLYGFPNETWEVNLPVEEVPPELPEPALGINFARDGMQEKDWLSLVAVHSDSWLLAVAFYFGARFGFGKNERKRLFQMINDLPTIFELVTGSAKQSKDQPAAHNNGSKCKSSGKVVFCFQLLLSLHFYHCPCLESHFGLPVLDASFXQSRQSESQAKGMKMSAPPKEEDESGEEEEEDDEQGATCGACGDNYGTDEFWICCDMCERWFHGKCVKITPAKAEHIKQYKCPSCSNKRVRV

SEQ ID NO: 25209 - protein, 532 aa, Bacillus licheniformis ATCC 14580
MDQHSNEQKSDMETDDTLTNRQGHPITNNQNIRTVGNRGPSTLENYDFLEKISHFDRERVPERVVHARGAGAHGYFEAYGTAGDEPVSKYTRAKLFQEKGKRTPVFVRFSTVTHGISSPETLRDPRGFAVKFYTEDGNWDLVGNNLKIFFIRDAVKFPDLIHAFKPDPVTNLQDGERIFDFISNTPEAMHMITFLFSPWGIPANYRQMQGSGVNTYKWVNQEGEAVLVKYHWEPKQGIKNLTQKEAEEIQAKNFNHATQDLYEAIERGDYPEWELFVQIMSDDEHPELDFDPLDDTKLWPEDQFPWLPVGKMVLNKNPEDYFTEVEQAAFGTGVLVDGLDFSDDKMLQGRTFSYSDTQRYRVGANYLQLPINAPKKRVATNQRGGQMQYKVDLGKNQSPHINYEPSTINGLKEAKQDGKEYTPHVEGNLVRESIDRQNNFKQAGDTYRHFEDWEKDELITNLVNTLAPCDQRIQTKMIDMLKQCDKEYGSRVEEGLKNASSQNTSSREPIGAEGAEDAPRQAEEKGHSQDPY

SEQ ID NO: 25210 - protein, 68 aa, Brassica napus
GRVGFCQSFMNEMYRYMGPDKDLPSEEVGVGTREMGYLFGQYRRLAGQFQGSFTGPRIYWAASSLRTE

SEQ ID NO: 25211 - protein, 530 aa, Arabidopsis thaliana
MRNVIRRVTTMTFTFLLQSPPLPISPSPPQFSLSSSPLSKTQRFITPSQGSRLRTLCTKVIIPNMQDSGSPPLSYLTQREAAEIDETLMGPLGFSIDQLMELAGLSVAASIAEVYKPEEYSRVLAICGPGNNGGDGLVAARHLHHFGYKPFICYPKRTAKPLYTGLVTQLDSLSVPFVSVEDLPDDLSKDFDVIVDAMFGFSFHGAPRPPFDDLIRRLVSLQNYEQTLQKHPVIVSVDIPSGWHVEEGDHEDGGIKPDMLVSLTAPKLCAKRFRGPHHFLGGRFVPPSVAEKYKLELPSYPGTSMCVRIGKPPKVDISAMRVNYVSPELLEEQVETDPTVQFRKWFDEAVAAGLRETNAMALSTANKDKKPSSRMVLLKGFDENGFVWFTNYESKKGSDLSENPSAALLFYWEILNRQVRIEGPVERIPESESENYFHSRPRGSQIGAIVSKQSSVVPGRHVLYDEYEELTKQYSDGSVIPKPKNWGGFRLKPNLFEFWQGQPSRLHDRLQYSLQDVNGNPAWKIHRLAP

SEQ ID NO: 25212 - protein, 217 aa, Cryptococcus neoformans var. neoformans JEC21
MRFLRSVARLYNTNFDRRPVATLVVTNGVLNTIADVLMHNPTPQTPTPAYDPLRTLRFAIFGMGMGPIIGRWMRFLERAIPIPAKATLGRAGKGAGGILTGPAGASAGVGKGSGEGIQLVKRVVADQIIMCADNAGIRAPIGLVLFVGSMGIMEGHSTEEIKEKFQDIYVSAILANWKIWPAIQGINFKLMPIQYRVPFQSTCGIAWTLYLSLLNAK

SEQ ID NO: 25213 - protein, 534 aa, Parachlorella kessleri
MAGGAIVASGGASRSSEYQGGLTAYVLLVALVAACGGMLLGYDNGVTGGVASMEQFERKFFPDVYEKKQQIVETSPYCTYDNPKLQLFVSSLFLAGLISCIFSAWITRNWGRKASMGIGGIFFIAAGGLVNAFAQDIAMLIVGRVLLGFGVGLGSQVVPQYLSEVAPFSHRGMLNIGYQLFVTIGILIAGLVNYGVRNWDNGWRLSLGLAAVPGLILLLGAIVLPESPNFLVEKGRTDQGRRILEKLRGTSHVEAEFADIVAAVEIARPITMRQSWRSLFTRRYMPQLLTSFVIQFFQQFTGINAIIFYVPVLFSSLGSASSAALLNTVVVGAVNVGSTMIAVLLSDKFGRRFLLIEGGITCCLAMLAAGITLGVEFGQYGTEDLPHPVSAGVLAVICIFIAGFAWSWGPMGWLIPSEIFTLETRPAGTAVAVMGNFLFSFVIGQAFVSMLCAMKFGVFLFFAGWLVIMVLCAIFLLPETKGVPIERVQALYARHWFWKKVMGPAAQEIIAEDEKRVAASQAIMKEERISQTMK

SEQ ID NO: 25214 - protein, 327 aa, Chlamydophila abortus S26/3
MSSQFEQLKLLSVLVCDTGDPELVKSSESQDATTNPSLILKVAQEPKYQELLTEAIAWGIRQNGDDVQTLTFVLDKIQVNFGLEILKHIPGRVSLEIDARLSFNTEAMVQRAIFLSELFAASGGDKKRLLVKIPGTWEGIQAVELLEKQGIACNVTLIFNLIQAIAAAKAKATLISPFVGRIYDWWIAAYGDDGYSIDADPGVASVSNIYTYYKKFDITTQIMAASFRSKEQVLALAGCDLLTVSPKLLDELKKDQSPVERKLDPAEAKKLDVQPVELTESIFRFLMNEDAMATEKLAEGIRIFSGDTQILEAAVTEFIKQIAAQDV

SEQ ID NO: 25215 - protein, 168 aa, Zea mays
  misc_feature (113)..(113): Xaa can be any naturally occurring amino acid
  unsure (1)..(168): unsure at all Xaa locations
QYPIFKYFENWCQDENRHGDFFSALLKAQPQFLNDWKAKLWSRFFCLSVYVTMYLNDCQRTAFYEGIGLDTKEFDMHVIIETNRTTARIFPAVLDVENPEFKRKLDRMVEINXKIIAVGESDEIPLVKNLKRIPLVASLVSEIIAAYLMPPIESGSVDFAEFEPRLVY

SEQ ID NO: 25216 - protein, 478 aa, Xanthomonas axonopodis pv. citri str. 306
MRPLPTLLTLSLAAAFGGFAATGINAWLDNRAEATPPSNAAFTLPTAAALPAAVAGQPVPSLAPMLQQAMPAVVSVNTKQVVRVRNPFFNDPILRRLFPQVPQDRINESLGSGVIIDAQKGYVLTNHHVIENADDVQVTLGDGRTVKAEFIGSDADTDIALIRIKADNLTDIKLADSNALRVGDFVVAIGNPFGFTQTVTSGIVSAVGRSGIRGLGYQNFIQTDASINPGNSGGALVNLQGQLVGINTASFNPQGSMAGNIGLGLAIPSNLARNVVEQLVTKGVVVRGTLGLETQNLTQQMLQGLGVDSLRGALVTRVLPGSAAAAAGVQPGDVVVAANDQRVDSAEALHNYEGLQAVGSAVTLDIRRDGKPLKLKATLREQDRAITGDMLDPRLTGATFVDLPESLRQSGITGVMVSEVKRGGRAAANGLVAGDVIVASSVGEFADLASWRANFQRKPQQLVVRILRGNAQYDALMR

SEQ ID NO: 25217 - protein, 571 aa, Aquifex aeolicus VF5
MEIKKYDVVVIGGGGAGLRTAIEVAKDPNISVALVSKVYPTRSHTGAAQGGMNAALGNVIPDDSPEVHAYDTIKGSDFLADQDAVFFMTEKAPEIIYELDRWGVPFSRLPDGRIAQRPFGGASFPRTVFAADKTGHVLLHTLFEQALARDNITFFNEYFLLDLIHDGERVKGVTIYDIRNGEVLFLQAKAVVLATGGFARIYWFRSTNAIGNTGDGQAVALRAGVPLKDMEFIQFHPTGLAKTGILLSEACRGEGGYLLNKEGERFMKRYAPDKMELAPRDIVSRAIETEIREGRGVGEGARAYVYLDLRHLGEEKIKERLPQVRQLAIDFEGVDPAKELVPIRPSAHYCMGGIHVENYKTSETPLKGLYAVGECACVSVHGANRLGGNSLTELVVFGKYCGMAVREFVKETDFAPVSESEPKKSEEFIEELMKREGNESLAQVRAQMGEITWAKMGIFRDEKSLKEAYDELSELLERWNNIPVVDKAKVFNTNLIEVLELRNMLELARVVAYSALHRRESRGGHSREDYPQRDDKNFLKHSLVYYDKNGNLKLEYIPVRITKYKPEERKY

SEQ ID NO: 25218 - protein, 456 aa, Vibrio parahaemolyticus
MHRYKEEASSLIKLATPVLIASVAQTGMGFVDTVMAGGVTQTDMAAVSVASSIWLPSILFGIGLLMALVPVVAQLNGSARREKIPFEIQQGVVLALLISIPIIGVLLQTQFILQLMDVEAVMADKTVGYIHAVIFAVPAFLLFQTLRSFTDGMSLTKPAMVIGFIGLLLNIPLNWIFVYGKFGAPELGGVGCGVATTIVYWVMFALLLAYVMTSSRLKSINVFGEYHKPQWKAQVRLFKLGFPVAAALFFEVTLFAVVALLVSPLGPIIVAAHQVAINFSSLVFMLPMSVGAAVSIRVGHRLGEENVDGARVASRVGIMVGLALATITAIITVLSRELIAELYTNNPEVITLAMQLLLFAAVYQCTDAVQVIAAGALRGYKDMRAIFNRTFIAYWILGLPTGYILGRTDWIVEPMGAQGFWLGFIIGLTAAALMLGVRLRWMHRQEPDVQLNFSLQ

SEQ ID NO: 25219 - protein, 159 aa, Listeria monocytogenes EGD-e
MNVHDFSEKAMNGKEIALSDYKGKVLLIVNTASKCGLTPQLEGLEAMYKKLGGDNFEILGFPCNQFLRQDPGSDEEILEFCQMNYGVTFQMFSKIKVKGKDASPLYKYLTEQTGGKKVEWNFAKFLIDENGEVIERFPSKMKPEDFEDKVEALVAKVNN

SEQ ID NO: 25220 - protein, 601 aa, ASPERGILLUS NIDULANS FGSC A4
MGFLRRRSMMQALLLTIIFSAYAYGANVKTTGQMVSFQVNLTWSDYQPAGIPRKMILANGQFPAPALRLKQGDDVEFLVNNEMPFSTTVHFHGIEQQGTPWSDGVPGLSQRPIPPGESFLYKWRATNYGSYFYHAHSRGQQEDGLYGAIHILADDSIERPFALISEDEQEIQSMRRAESESIPIMLSDVRSLTSAEIWDAEKAMGRDALCANALLVNGKGSVTCLGQQTIDEYTSVAQRGVLGNQSLTDIGCLPPDNLLAQGPWSHNLSAIPPTVFSDCIPSHGLTERFYPDATNRYASFDLVSAALVSTITFSIDEHPMYVYAIDGSYINPIEADGITITNGARYSVLVKLDKPRGDYTIRVVNTGLNQILHGNALMTYHNGIGPIQQHPSTPSIDLVGTPTSNHTLLNESMIIPFAAQDVSRVDVAQTLTLTLERYNASYTWTMGDSSFPLQLEEESPLLFYPQTASKNFTATSKNGTWVDVVFDVANAIQPPHPIHKHSNKFYVLGGGNGKWNYTSVAEAAKHMPESFNFETPQIRDTFATLPAATGPTWLALRYHVVNPGPFLLHCHIQIHQSGGMALALLDGIDEWPEIPEEYQLA

SEQ ID NO: 25221 - protein, 346 aa, Prochlorococcus marinus str. MIT 9313
MTGTNPVHSNEPEVICLGEALVDRLGPLGGDPAVDQPVEDCLGGAPANVACGLARLGSKVAFLGRLGDDAIGARFRELFNTRGVNLAGLQIDQRRPSRIVLVRRDLDGERVFQGFAGDRGDGFADPALSLDELAASWPLLVGKASWLLIGSIPLATPASAQALLWCVEQAQTAGLEIALDVNWRPTFWDPGHSPDSGPDEKALQAIAPLLERASLLKLAREEAVWFFDTDDPAVIARSLPQQPDVVVTDGARPVRWWIGGCVGELAALSPPSVVDTTGAGDAFTAGLLHQFLMDASSQRDLIKAREMVRFAAACGALVCGGAGGIDPQPSQMQVEEFLGSFEGEVN

SEQ ID NO: 25222 - protein, 356 aa, Vitis vinifera
MSLLADLQNINLSDSTEKIIAEYIWIGGSGNDLRSKARTLSGPVTGPAQLPKWNYDGSSTGQAPGEDSEVILYPQAIFKDPFRGGDNILVMCDAYTPGGEPIPTNKRFNAAKIFSHPEVTAEEPWYGIEQEYTLLQKDVNWPLGWPVGGFPGPQGIIYCGIGADKAFGRDIVDSHYKACLYAGINISGINGEVMPGQWEFQVGPAVGISAGDELWVARYILERITEIAGVVVSFDPKPIKGDWNGAGAHTNYSTKSMRNTGGYDVIKKAIEKLGLRHKEHISAYGEGNERRLTGRHETADINTFCWGVANRGASIRVGRDTEKEGKGYFEDRRPASNMDPIVVTSMIAETTILWKP

SEQ ID NO: 25223 - protein, 485 aa, Bacillus licheniformis ATCC 14580
MTTNKNNLTTSWGAPVGDNQNSMTAGSRGPTLIQDVHLLEKLAHFNRERVPERVVHAKGAGAHGYFEVTNDVSKYTKAKFLSEVGKRTPLFVRFSTVAGENGSADSVRDPRGFAVKFYTEEGNYDLVGNNTPVFFIRDAIKFPDFIHTQKRHPVTHLKNPDAVWDFWSLSPESLHQVTILMSDRGIPATYRHMHGFGSHTFKWVNAEGEGVWIKYHFKTEQGIKNLTEEVGTKIAGENPDYHTQDLYEAIEKGDFPAWKLYVQIMPLEDADTYRFDPFDVTKVWSQKDYPLIEVGRMVLNRNPENYFAEVEQATFSPGTLVPGIEPSPDKMLQGRLFAYADAHRYRVGANHNSLPINRPKAEVHNYQRDGQMRFDSNGGGSVYYEPNSFGGPQETPENKTTAYPVSGSADSTAYDHNDHYTQAGDLYRLLSEEERTRLVSNIVGSMKQVTKDEIKLRQIQHFYKADPEYGTRVAEGLGLSVPQEV

SEQ ID NO: 25224 - protein, 469 aa, Yersinia pestis biovar Medievalis str. 91001
MPIWKYHAMSTQSAELDTAPPSPAHPSELIYHLEDRPPLPQTLFAACQHLLAMFVAVITPGLLICQALGLPAEDTQRIISMSLFASGLASLLQIKTWGPVGSGLLSIQGTSFNFVSPLIMGGLALKNGGADIPTMMAALFGTLMVASCTEILLSHVLHLARRIITPLVSGIVVMIIGLSLIQVGLTSIGGGYGAMSDNTFGAPKNLLLAGAVLGVIILLNRQRNPYLRVASLVIAMAVGYLLAWALGMLPESRPVVDTALITIPTPLYYGLSFDWNLLIPLMLIFMVTSLETIGDITATSDVSEQPVRGPLYMKRLKGGVLANGLNSMLSAIFNTFPNSCFGQNNGVIQLTGVASRYVGFVVAIMLIILGLFPAVAGFVQHIPEPVLGGATLVMFGTIAASGVRIVSRETLNRRAIMIMALSLAVGMGVAQQPLILQFAPDWIKTLFSSGIAAGGITAIVLNLLFPQEK

SEQ ID NO: 25225 - protein, 234 aa, Zea mays
SRILRSSLALHGCWRCDARVTLWCWCLFQAQLGPAASAMQGHLRTYMNAGIPKRFKEDEEKEQLAKDLAKDWNAVFERSINTLFLTEMVRGLMLTLKYFFDRNVTINYPFEKGPLSPRFRGEHALRRYESGEERCIACKLCEAICPAQAITIEAEEREDGSRRTTRYDIDMTKCIYCGFCQEACPVDAIVEGPNFEFATETHEELLYDKEKLLENGDRWETEIAENLRSESLYR

SEQ ID NO: 25226 - protein, 112 aa, Vigna radiata
MASKQANREELDQRAKQGETVVPGGTGGKSLEAQEHLAEGRSRGGQTRKQQLGSEGYHEMGTKGGQTRKEQMGTEGYKEMGRKGGLSTMDKSGAERAEEKGIEFDESKFKKN

SEQ ID NO: 25227 - protein, 918 aa, Salmonella enterica subsp. enterica serovar Typhi Ty2
MTNYSLRARMMILILAPTVLIGLLLSIFFVVHRYNDLQRQLEDAGASIIEPLAVSSEYGMNLQNRESIGQLISVLHRRHSDIVRAISVYDDHNRLFVTSNFHLDPSQMQLPAGAPFPRRLSVDRHGDIMILRTPIISESYSPDESAIADAKNTKNMLGYVALELDLKSVRLQQYKEIFISSVMMLFCIGIALIFGWRLMRDVTGPIRNMVNTVDRIRRGQLDSRVEGFMLGELDMLKNGINSMAMSLAAYHEEMQHNIDQATSDLRETLEQMEIQNVELDLAKKRAQEAARIKSEFLANMSHELRTPLNGVIGFTRLTLKTELNPTQRDHLNTIERSANNLLAIINDVLDFSKLEAGKLILESIPFPLRNTLDEVVTLLAHSSHDKGLELTLNIKNDVPENVIGDPLRLQQVITNLVGNAIKFTESGNIDILVEKRALSNTKVQIEVQIRDTGIGIPERDQSRLFQAFRQADASISRRHGGTGLGLVITQKLVNEMGGDISFHSQPNRGSTFWFHINLDLNPNVIIDGPSTACLAGKRLAYIEPNATAAQCTLDLLSDTPVEVIYSPTFSALPLAHYDIMILSVPVTFREPLTMQHERLAKAASMTDFLLLALPCHAQINAEKLKQGGAAACLLKPLTSTRLLPALTEYCQLNHHPEPLLMDTSKITMTVMAVDDNPANLKLIGALLEDKVQHVELCDSGHQAVDRAKQMQFDLILMDIQMPDMDGIRACELIHQLPHQQQTPVIAVTAHAMAGQKEKLLSAGMNDYLAKPIEEEKLHNLLLRYKPGANVAARLMAPEPAEFIFNPNATLDWQLALRQAAGKPDLARDMLQMLIDFLPEVRNKIEEQLVGENPNGLVDLVHKLHGSCGYSGVPRMKNLCQLIEQQLRSGVHEEELEPEFLELLDEMDNVAREAKKILG

SEQ ID NO: 25228 - protein, 243 aa, Geobacillus stearothermophilus
GSHMQGQSPIKDQEMKELIRRSQEGDQEARDEIIEKNMRLVWSVVQRFLNRGYEADDLFQIGCIGLLKSVDKFDLSYDVKFSTYAVPMIIGEIQRFLRDDGTVKVSRSLKEMGNKIRKAKDELSKTRGRAPTVTEIADHLGISPEDVVLAQEAVRLPTSIHETVYENDGDPITLLDQIADADEASWFDKIALKKAIEELDERERLIVYLRYYKDQTQSEVASRLGISQVQMSRLEKKILQHIK

SEQ ID NO: 25229 - protein, 365 aa, Bacillus cereus ATCC 14579
MNENHYLLLTPGPLTTTKSVKEVMLYDWCTWDDEYNTMVQEVRAKLVSLATKEEEKYTTVLMQGSGTFSVEAVIGSVIPANGKLLVCTNGAYGKRIVQMAEMLQIDVVISQTEEWEPTNIVEVEKLLQEDKEITHIAVVHCETTTGIINPIVDVCKLGQQYGKVTIVDAMSSFGGIEIDIADLQIDFLISSANKCIQGVPGFGFVIAKRDELLKCKGQGRSLSLDLYDQWETMEKQNGKWRFTSPTHVVHAFYQALLELEKEGGVRARYNRYYNNQKLLVNRMGEIGFKPLVDKKYQSPIITSFIYPKEGFEFQQLYNELKRYGFVIYPGKISKVDTFRIGNIGDVHEEDINRLVDCIAKGAVIG

SEQ ID NO: 25230 - protein, 267 aa, Nicotiana tabacum
LLPCYLKSMYQSRGIYVNAKVAFCIHNIAYQGRFSFADFSLLNLPDEYKSSFDFIDGYEKPVKGRKINWMKAGILESHRVVTVSPYYAQELISGVDKGVELDNVLRKTCITGIVNGMDIQEWNPATDKYTDVKYDITTVMDAKPLLKEALQAAVGLPVDRKIPLTGFIGRLEEQKGSDILVAAIHKFIGWDVQIIVLGTGKKEFAQEIEQLEVLYPNKAKGAAKFNVPLAHMITAGADFMLVPSRFEPCGLIQLHAMRYGTVPICAS

SEQ ID NO: 25231 - protein, 541 aa, Magnetospirillum magnetotacticum MS-1
MTRFIFITGGVVSSLGKGLASAALGALLQARGFKVRLRKLDPYLNVDPGTMSPYQHGEVYVTDDGAETDLDLGHYERFTGVASRKSDNITTGRIYSNVIAKERRGDYLGATVQVIPHVTDAIKEFVKSDLTDEDFCLCEIGGTVGDIESLPFLEAIRQLGNELGRARTMFVHLTLVPYIPSAGELKTKPTQHSVKELLSVGIQPDMLMCRCDREIPEGDRKKIALFCNVAPAAVIPALDVDSIYQVPVSYHEQGMDAVVCRHFGLDAPMPDLKRWTTIVERIRQPEGEVTIAVVGKYISLLDSYKSLAEALYHGGIANNVRVNLNWIDSQIFEQGDVVQHLEPCDGILVPGGFGERGAFGKVEAVRFARERKVPYFGICFGMQMAVIEAARNLAGYKDASSTEFGPCDNPVVGLMTEWMKGNMLEKRAASGDLGGTMRLGAYECDLKQGSRVREIYGQGRISERHRHRYEVNMGYRADLEKTGLSFSGLSPDGVLPEIVEIPDHPWFVGVQFHPELKSKPFDPHPLFTSFIAAAVRQSRLV

SEQ ID NO: 25232 - protein, 241 aa, Arabidopsis thaliana
MCALVPPLYPNFGWPCGDHSFYETDDVSNTFLDFPLPDLTVTHENVSSENNRTLLDNPVVMKKLNHNASERERRKKINTMFSSLRSCLPPTNQTKLSVSATVSQALKYIPELQEQVKKLMKKKEELSFQISGQRDLVYTDQNSKSEEGVTSYASTVSSTRLSETEVMVQISSLQTEKCSFGNVLSGVEEDGLVLVGASSSRSHGERLFYSMHLQIKNGQVNSEELGDRLLYLYEKCGHSFT

SEQ ID NO: 25233 - protein, 362 aa, Arabidopsis thaliana
MATVTDLPDDLVREIFSRVPLTSLRAVRSTCKKWNAISKYDILGKKAAAKNQFLEFMVTDSRVCSLRLDLQGIRSEEDLIDLSIKQISIPNKVDQVEISQVYHCDGLLLCIAKDNSSVMVWNPYLGQTKLIQPRKKLHRYDKFALGYDNNRNHKILRFLYEGSPRNVIIDVYDFSSDSWRVLDIDIDWHELFSHNSVSLKGNTYFFGRKGPRLPMLFKPPSRRFEYLTLSCVRNEKLAVLYSHLNRFGTIEICISTKIDPSAVSWTTFLRIDMTLINGLPDNFFVHSYATSFFFDEEKKVAVLFGTNRYRGRETCQYYQRACIVGDSGYFKAVNIELVFNSQLQSCQLVSSSYVPSLVQLQD

SEQ ID NO: 25234 - protein, 106 aa, Cyanophora paradoxa
MQLRVERKFETFSYLPPLNDQQIARQLQYALSNGYSPAIEFSFTGKAEDLVWTLWKLPLFGAQSPEEVLSEIQACKQQFPNAYIRVVAFDSIRQVQTLMFLVYKPL

SEQ ID NO: 25235 - protein, 323 aa, Photobacterium profundum SS9
MKRIAIIGECMIELNGAPFGTMQQAYGGDSLNTAVYMARTAGQSVEIDYISALGTDTISNGMISRWQQEGINTDYVLRDKTRQPGLYLIQLDDQGERTFLYWRNQSAARYLVRHPNFAQVELHLQTVDMVYVSGISLAVLPAEDRQQLVTLLGQLSSNGVEIAFDSNYRPALWESADEARKCYKQILSFTNLALVTDDDEETLWGDTSSQATLGRLQSTGVKKAVLKMGPKGCLYTDFTTDKPELIGTTPVETVIDTTSAGDSFNAGFLSGYLTDKTPREAALQGHQLAGTVIQHKGAIIPCYATEAMDFNIHSTASTTTTKL

SEQ ID NO: 25236 - protein, 339 aa, Rhodospirillum rubrum
MRVYYDRDADVNLIKGKKVAVVGYGSQGHAHVLNLRDSGVTEVCVALREGSPSAKKATGQGLVVKTPAEAAAWADVVMILTPDELQGDLYKDHLHANMKQGAALAFAHGLNIHFALIEPRPDLDVFMIAPKGPGHTVRSEYVRGGGVPCLVAVAQDASGNAMEIALSYASAIGGGRSGIIETTFREECETDLFGEQAVLCGGLTELIKNGFETLVEAGYAPEMAYFECLHEVKLIVDLMYEGGMANMRYSISNTAEYGDYVTGPRIVTPETKAEMKRVLDDIQSGRFVRDWMIECKAGQPSFKATRRRNAEHQIEEVGGRLRAMMPWIAANRLVDKDKN

SEQ ID NO: 25237 - protein, 416 aa, Cryptococcus neoformans var. neoformans JEC21
MAENYQKKELLALMNTGGNKVCVDCNAPSPQWASVSYGIFICLECSGVHRGFGVHISFVRSITMDKWSDEQLNKMKTGGNEKFKDFMENYGPEGGYTKGMGMQEKYNSWAAAQYREKLTAECAGQPWSASSPPANFGLPSRPASSQTTRKSRAAGGITGSSLNPSRTNSPSIPQGSDDFYGQKSANEAFFERMGNANATRPDHLPPSQGGKYSGFGSTLEPDVASSHPSYSLSSHAAPTLDEFQRNPLGALTKGWGLFSSAIVSAGREINNAVVQPGLDRAQALAAGENSEEWKRYVNQASAQAKDAGGWLGQRAHEGWEGLNDVAKTKGGVDLNESFGKLGLGKSSIPGSRGYGQVGALDRAEDGLLSPHGAGNDDEEDFFESWGATPTASTTSATTGAKSIADKGKKKDDEKNE

SEQ ID NO: 25238 - protein, 289 aa, Arabidopsis thaliana
MSTIIPSPLAPQPPQQHYVTPPLTVILTVILLVFFFIGFFTLYFCKCFLDTMVQAWRLHHGGDTVSDNPLQQPEAPPVNPGLELRIINSFPTFPYSSVKDLREEKYGLECAICLLEFDGDHVLRLLTTCYHVFHQECIDLWFESHRTCPVCRRDLDPPPPPENTKPTVDEMIIDVIQETSDDEEDDHHRQQTTTQIDTWPSSGQTSSIKKEQNLPEKFSRSHSTGHSIVRNKPEEEDKYTLRLPEHVKIKVTRGHSQTESCVTFAELIRNRGYDHRRFGEVSGQTQSKN

SEQ ID NO: 25239 - protein, 271 aa, Triticum aestivum
  misc_feature (2)..(2): Xaa can be any naturally occurring amino acid
  misc_feature (5)..(5): Xaa can be any naturally occurring amino acid
  misc_feature (26)..(26): Xaa can be any naturally occurring amino acid
  misc_feature (62)..(62): Xaa can be any naturally occurring amino acid
  unsure (1)..(271): unsure at all Xaa locations
AXPYXWLTSTLSLACGSAMMLFSWVXCLVRAPKTDLDFWKALFPVAVAHTIGHVAAHRSNVXRVTVSFTHIIKSAEPAFSVLVSRFILGESFPMPVYLSLLPIIGGCGLAAATELNFNMIGFMGAMISNLAFVFRNIFSKRGMKGKSVSGMNYYACLSIMSLIILAPFAIAMEGPQMWAAGWQKALADVGPNVLWWIGAQSVFYHLYNQVSYMSLDQISPLTFSIGNTMKRISVIVSSIIIFRTPARAAAQSLVRPPAGRPYGRAPNALDA

SEQ ID NO: 25240 - protein, 311 aa, Zea mays
PSVRPASAASKAQSSTPPSSFASRKFPVSRAASGGAKKAELRAPLPTPQKKKVMAQLPPRAPSAAPQDHWPPAAGEFLGFAAARRGAHRRSASDSAAFLEAVPIDDDVVIGGGGGGGDDFDRLDHDQLLSMFSDVDVSVSVSVSGSAGERAQLMDAGGAGADDGVADSSPAAADGVAEPKRVKRILANRQSAQRSRVRKLQYISELERSVTSLQMEVSALSPRVAFLDHHRSLLTVGNSHLKQRIAALAQDKIFKDAHQEALEKEIQRLRQVYQQQQVKVATTGGADIATAASPSMQARQELLACEGAAIR

SEQ ID NO: 25241 - protein, 625 aa, Candida albicans
MRATLTSLLVSITFLVSLVAAETHTWYFKTGWVNANPDGVYERPMIGFNDTWPLPTLRVKKGDRVQLYLINGFDNLNTTLHFHGLFQNGTNQMDGPEMVTQCPIPPGETYLYNFTVDQVGTYWYHSHTAGQYGDGMRGVFVIDDDDFPYDYDEDVVLTVGDHYHKYSSDIIPSFLSRFNPTGAEPIPQNFLFNETRNLTWKVEPGKTYLVRIVNVGGFVSQYLWMEDHEFTVVEVDGIYVEKNTTDMLYITTAQRYSVLINTKNSTDKNYAFMQRVDTDMLDVIPSDLQLNGTNYIVYNEDASLPEAYDVDSLDNYLDDFYLKPLSKEKLLDDADYTITVDVQMDNLGNGVNYAFFNNITYTTPKVPTLLTVLSAGDAATNELVYGTNTNSFVLQGGDVVDIVLNNLDTGKHPFHLHGHAFQLIERHKEIPEGEDPVTYNATDHADWPEYPMVRDTVYVRPQSYIVMRFKADNPGVWFFHCHIEWHLEQGLAFQLIEDPQGIQKNEKITDNHKQICEKVGVPWEGNAAANSKDYLNLVGENVQVKRLPTGFTAKGIVALVFSCISAFLGLAAISYYDMNDIENMEKRVARDLDVYFDDDDDEEEEEEQSITEQAATGSSSSPSNK

SEQ ID NO: 25242 - protein, 581 aa, Schizosaccharomyces pombe
MSHSDYNFDIEQNAFEKEAPKVSIERKGDVVEEEVIATGEVENYAEPKSRNFLQRFFDDFKPALTTRGDGVALKRKLTSRHMQMISVGGAIGSGLYVGSGSAFADGGPASVIINYILIGIMMIFVIYALGELAIAYPVAGSFNTYATRFIDPAWGFAVSWNYFLNYFVTCPLELTTCAITFKFWTEINSAAWISIFLAVVIVINLFGVRAYGEVEFILSTIKVIATVGFIILAIIINCGGVPTDHRGYIGGSIIKQKPFRHGFKGFCSVFTTAAFSFSGTEIIGLAAAEVGNPRKSVPSAVKQVFWRIAIFYVVSLILIGLLVSPDDPRLMGNGDVSVSPFVLAIQEANIKGLPSVFNAVIIISVVSVTNSTTYTAARTLQGMATLKQAPKFFSYTDRVGRPLIAMVVVLLFGFFAYINEADKNGSDISDTVFDWLLAISGLSSFFTWGSICLSHIMFRLAFKKQGHSLKELGFVSPMGIWGSVIGLGFNILCLMAEFYVSLFLIGGSPNANDFFQGYLAACIALAFFIGYKIYDRSHIPSLDKLDIDTGLKTYDNQDEEKEEYSSKGPLNILKKAWNAVC

SEQ ID NO: 25243 - protein, 407 aa, Thermotoga maritima
MAKKEKVTMNEEQQVLQEQHQEQTQEQTQEQKETLPPQIERRIKKLISLGKKKGYITYEDIDKAFPPDFEGFDTNLIERIHEELEKHGINIVENEPEEEEISASSDEQELEELLEKESPEIHDSSNVRDSIKMYLKEIGKIPLLTPAQERELARRAQMGDKKAKEKLITSNLRLVVSIAKRYMGRGLSFQDLIQEGNIGLLKAVEKFDWRKGYKFSTYATWWIRQAITRAIADQARTIRIPVHMVETINKLNRLRREYYQKHGEEPSIEELAKMMGKPPEKIKEILEAAKETISLESPIGEDEDSSIEDFVADDSIASPKKEAMRMLMREELEKVLKTLSPREAMVLRMRYGLLDGKPKTLEEVGQYFNVTRERIRQIEVKALRKLRHPSRSKYLKSLLSLMDENEG

SEQ ID NO: 25244 - protein, 615 aa, Pseudomonas fluorescens PfO-1
MSGKAQQQSRIIELIKLGREQKYLTYAEVNDHLPEDISDPEQVEDIIRMINDMGIPVHESAPDADALMLADADTDEAAAEEAAAALAAVETDIGRTTDPVRMYMREMGTVELLTREGEIEIAKRIEEGIREVMSAIAHFPGTVDHILSEYTRVTTEGGRLSDVLSGYIDPDDGITPPAAEVPPPIDAKAAKADDDSEDDDAEASDDEEEAESGPDPVIAAQRFGAVADQMEITRKALKKHGRHNKAAIAELLALAELFMPIKLVPKQFEALVERVRSALDRLRQQERAIMQLCVRDARMPRADFLRQFPGNEVDESWSDALAKGKSKYAEAIARVQPDIIRCQQKLTALETETGLTIAEIKDINRRMSIGEAKARRAKKEMVEANLRLVISIAKKYTNRGLQFLDLIQEGNIGLMKAVDKFEYRRGYKFSTYATWWIRQAITRSIADQARTIRIPVHMIETINKLNRISRQMLQEMGREPTPEELGERMEMPEDKIRKVLKIAKEPISMETPIGDDEDSHLGDFIEDSTMQSPIDVATVESLKEATREVLSGLTAREAKVLRMRFGIDMNTDHTLEEVGKQFDVTRERIRQIEAKALRKLRHPTRSEHLRSFLDE

SEQ ID NO: 25245 - protein, 309 aa, Burkholderia vietnamiensis G4
MKDHAEFPRIAVVGSLNVDLVTHAPRLPVPGETLLGTAFRTVSGGKGANQAVAAARLGASVAMIGCVGNDAFGARLHDALAAERIDLTHVHRIDGAATGVATIAVDASGANSIVVVPGANARLDAATIDAARDAIAGAALMVCQLEVPMETVVRAIDRARACGTPVLLNPAPARPLSDALLARLEYLVVNETEAESLTGITVGDDASAVRAADALHAKGAGNVLVTLGARGVCWRGSAGNGRHPALAVTAVDTTAAGDTFVGGFAAARAGGASMDDAIAFGQRAAAISVTRHGAQTSIPTREEVQHTTA

SEQ ID NO: 25246 - protein, 113 aa, Streptococcus pneumoniae
TYVFTHDSIAVGEDGPTHEPVEHLAGLRAMPNLNVFRPADARETQAAWYLAVTSDKTPTALVLTRQNLTVEEGTDFDKVAKGAYVVYENAADFDTILIATGSEVNLAVSAAKE

SEQ ID NO: 25247 - protein, 464 aa, Haemophilus somnus 2336
MKLTRFQQYHTEAKKLIAIATPILLAQVAQNSMGLVDTIMAGRVSAADMAAVAVGASIWLPLVLFGHGLLLALPPTISYLNGSGQRDHIAHQIRQGLWIVFISCIPLGLLIYNSDFVIQYMKMEEKLANITIGYLRAMLWGLPGYLLLINFRCLNDGIAKTKPAMVITFFGLLCNIPLNYIFIYGKLGIPAFGAVGCGIATAIVNWIMCLMMIVYSKHARNQRDLKVFEHLFEKPDTKTLAKLFRLGLPIAVSLCCEVALFALTSLLLSPLGTQVVASHQIALNTSSFAFMLPMSLGMATTILVGQRLGEGKIDNAKQISFSALTVGLSIAFLTASIIFFFRYEIAAIFVNDKEVIAISSSLLMLVALYQFSDTAQVVSSGALRGYKDTQAILYITLFCYWGMGMPLGFSLSRTDWIIPSIGAAGFWVSFVVSLTIAAILLLWRMYKIQQQPAPILLAKLDKLK

SEQ ID NO: 25248 - protein, 334 aa, Pseudomonas aeruginosa PAO1
MSEVANDNHAPIPVTVLTGFLGAGKTTLLKYLLQAEHGMKIAVIENEYSETPIDGQLLGVEPVQVMTLSNGCVCCSINTDLEKALFLLLERRDNGEIDFDRLVIECTGLADPAPVAQTFFADEELCQRYVLDGIITLVDAANAERHLQETIAQAQVGFADRILVSKTDLVDAATFEALGQRLQRINRRALVHVVEHGRIDLAHLLDVRGFNLNADLGPGIGLRPLRAVAAKDSRDRIGTLVLRSDTPLDLERLSEFMDDLLQWHGNSLLRYKGVLNIADEPRRLVFQGVLRLYGFDWDSEWRDDEARESVIVFIGDNLPEDSIREGFERIVEGR

SEQ ID NO: 25249 - protein, 214 aa, Zea mays
MAPMKLYGAVMSWNLTRCATALEEAGSDYEIVPINFATAEHKSPEHLVRNPFGQVPALQDGDLYLFESRAICKYAARKNKPELLREGNLEEAAMVDVWIEVEANQYTAALNPILFQVLISPMLGGTTDQKVVDENLEKLKKVLEVYEARLTKCKYLAGDFLSLADLNHVSVTLCLFATPYASVLDAYPHVKAWWSGLMERPSVQKVAALMKPSA

SEQ ID NO: 25250 - protein, 273 aa, Cryptococcus neoformans var. neoformans JEC21
MRHLTLIRPALQPIVPRTFARTLITTPPRLLATPSNDTGPQHVTPGPPKSPNPLDTATQSAISAQKYPDYSTGPSAIDKASQILFLTEIVRGMWVVLEQFFRPPYTIMYPFEKGPLSARFRGEHALRRYPNGEERCIACKLCEAICPAQAITIESEAREDGSRRTTRYDIDMTKCIYCGFCQEACPVDAIVETQNQEFSTETREELLYNKEKLLLNGDRAEAEIAANLQSEHGLEDSMWEWDVHAQYHGYKMYHNYALQLSCSQRGVISRRMR

SEQ ID NO: 25251 - protein, 450 aa, Acinetobacter sp. M-1
MTKHYDYIAIGGGSGGIASVNRAAMYGKKCALIEKSEIGGTCVNVGCVPKKVMWYAAHVAESIQKYGPDYGFNTKVEVFDWQVLIKNRQAYIDRIHQSYQNSLSKNNVDLIQGAAYFIDQHTIEVNGERFTADHILIATGTQPSLPKIDGVEYGIDSNGFFELSALPKTTAVIGSGYIAVELAGVLNALGSQVGLFIRKDLPVRRFDSFLSETLVEVMQTDGITVHTQAVPLKVTKNADGSVVLHLENGERHTVDCLIWATGREPNTASLNLEKTNVQLDERGYIQVDKFQNTSQQGIYAVGDIIGKMELTPVAVAAGRRLSERLFNHKSDEHLDYDNIPTVVFSHPPIGTVGITEQEAIEKYGQKEVKVYNSSFTAMYSAITQHRQPTKMKLVCVGENEKIVGIHGIGFGMDEILQGFAVALKMGATKKDFDNTVAIHPTSAEEFVTMR

SEQ ID NO: 25252 - protein, 548 aa, Desulfovibrio desulfuricans G20
MASKEIVFDTKARERLARGVDKLANAVKVTLGPKGRNVVIEKSFGAPVITKDGVSVAKEIELEDKFENMGAQMVKEVASKTSDIAGDGTTTATILAQAIYKEGVKLVAAGRNPMAIKRGVDKAVEALVKELGNLAKPTRDQKEIAQVGTISANSDTTIGNIIAEAMSKVGKEGVITVEEAKGLETTLEVVEGMQFDRGYLSPYFVTDPEKMVCEMDEPLILINEKKISSMKDMLPVLEQVAKMNRPLVIIAEDVDGEALATLVVNKLRGTLQVVAVKAPGFGERRKAMLEDIATLTGGRVISEEMGIKLENATVADLGNAKRIVVDKENTTIVDGAGESEAIKARVKMIRAQIEETSSDYDREKLQERLAKIVGGVAVINVGAATETEMKEKKDRVEDALNATRAAVEEGIVPGGGTALVRCCKVLDDVKPADDDEAAGVTIIRRAIEEPLRQIAANAGFEGSIICEKVKEGKDAFGFNAATGEFEDLIAAGVIDPKKVSRIALQNAASVASLLLTTECAIAEKPKEDAPAAPAMGGMGGMGGMGGMY

SEQ ID NO: 25253 - protein, 132 aa, Arabidopsis thaliana
TIGYGSPNKANSYSVHGAALGEKEVEATRNNLGWPYEPFHVPEDVKSHWSRHTPEGAALEADWNAKFAAYEKKYPEEAAELKSIISGELPVGWEKALPTYTPDSAGDATRNLSQQCLNALAKAVPGFLGGVL

SEQ ID NO: 25254 - protein, 395 aa, Neurospora crassa
MTFEEPSKYDALPTYRAVDQHGQVVDPSFKPDLSDKEVIKLYHDMLTVSIMDLIMFDAQRQGRLSFYMVSAGEEAVCVGSASALSPEDVVFCQYREQGVFKQRGFQLSDFMNQLFANHKDSGKGRNMPVHYGSKELNIHTISSPLATQLPQAAGAAYALKIQRMQNPTVPPRVVAAYFGEGAASEGDFHAALNIAATRGCPAVFICRNNGYAISTPTLEQYRGDGIASRGLGYGIETIRVDGNDFWAVREVTKRARELALQDGGKPVLIEAMTYRVSHHSTSDDSFAYRAKVEVEDWKRRDNPIGRLRKWMEAKGIWDENMEREARDSIRRDILKAFSQAEKEKKPAIRTMFEDVYEEMTPEIKAQMKELKEHLEQYPEEYDLGDFEGGKDSLAR

SEQ ID NO: 25255 - protein, 95 aa, Desulfovibrio desulfuricans G20
MNLKPLNDRVLVKRLESEEKTAGGLYIPDTAKEKPSRGEVIAVGPGKTADDGKVIAMTVKTGDVVLFNKYAGTEVKLDGVDHLVMREDDILAIIQ

SEQ ID NO: 25256 - protein, 328 aa, Brassica napus
MQKSSMSTEREVVCVTGASGCIGSWLVHLLLLRGYSVHATVKNLQDEKETKHLEALEGAATRLHLFEMDLLKYDTVSAAVNGCSGVFHLASPCIVDEVQDPQKQLLDPAVKGTLNVLTAAKEAGVKRVVVTSSISAITPSPNWPADKIKNEDCWADEDFCKQNGLWYPLSKTLAEKAAWEFAEEKGLDVVVVNPGTVMGPVIPPSINASMLMLQRLLEGCTETYENFFMGSVHFKDVALAHILVYENPSAKGRHLCVEAISHYGDFVAKVAELYPNYSVPKLPRETQPGLLRAKNAAKKLMELGLEFSSMEVIIKDGVESLKSKGFIS

SEQ ID NO: 25257 - protein, 332 aa, Gonyaulax polyedra
MAGPQLDDFTLVKVLGKGSYGKVMLVRGAQDNRLYAMKMLRKENVIKRNQVEHTKTERSVLETVSHPFIVTLHYAFQTPKKLYMVMEYCPGGELFFHLSRAGRFSEGRTRFYVAETSSAVAYLHQLNVIYRDLKPENLLIDGEGHAKITDFGLRKEGIQDNHSAMTMCGTPEYLAPEILDKKGHGKAVDWYSVGALTYEMLTGLPPFYTKDLQKLFDRIRRGELTYPDYVSVLAKEFLRALLQRNPDARLAGGVPGGDEVKGHEFFGGLDWVALEKRAIPPPFKPTFGGQKEDDVVKYFEKDFVGQPVVNSEVGEGGRDLGHLEASTLTGKR

SEQ ID NO: 25258 - protein, 459 aa, Rickettsia rickettsii
MQEFDLVVIGSGPAGYTGSIRAAQLGMKVACIEKSDTLGGTCLNIGCIPSKALLNSSEKYEAALKHFENIGITADVKLDLQKMLANKDKVVLDLTKGIESLFAKNKVTRIKGEAKISSSNIVEVNKEQIKAKNILITTGSSVIEIPNIKIDEEFIVSSTGALKLSKVPENLIVVGGGYIGLELGSVWRRLGAKVTVIEYAPSIVPMLDKEIATQFMKLQQKQGIEFKLNTKVLSAEVKSGKVNLTIEEDDKSSVVTSDVVLMAVGRKAYTQNLGLESVGIITDKQGSIEINDQFQTAVSNIYAVGDVVKGAMLAHKAEEEAVAAVEIMAGQAGHVNYNLIPSVIYTYPEVASVGETEEQLKEKGINYKVGKFPFLANSRARAIGSTEGMVKILADSKTDRVLGAHIIGADAGTLIAALTAYMEFGAASEDIARTCHAHPTLSEAIKEAALSVDKRTINI

SEQ ID NO: 25259 - protein, 183 aa, Acetabularia peniculus
MATTMLNRSVIVNKEVAKTPNFPRATKNNKGFASNAAVQKCRDMMVWQPFNNKMFETFSYLPPLTDEQISKQVDYILANSWTPCLEFAASDQAYAGNENCIRMGPVSSTYQDNRYWTMWKLPMFGCTDGSQVLSEIQACTKAFPDAYIRLVCFDANRQVQISGFLVHRPPSATDYRLPADRQV

SEQ ID NO: 25260 - protein, 490 aa, Zea mays
MVLSKAVSESDMSVHSTFASRYVRSSLPRYRMPENSIPKEAAYQIINDELMLDGNPRLNLASFVTTWMEPECDKLIMAAINKNYVDMDEYPVTTELQNRCVNMIAHLFNAPLGESETAVGVGTVGSSEAIMLAGLAFKRRWQNKRRAEGKPFDKPNIVTGANVQVCWEKFARYFEVELREVKLRDGYYVMDPEKAVEMVDENTICVAAILGSTLNGEFEDVKLLNDLLQAKNRETRWETPIHVDAASGGFIAPFLYPDLEWDFRLPLVKSINVSGHKYGLVYAGIGWCIWRSKEDLPEELIFHINYLGADQPTFTLNFSKGSSQVIAQYYQLIRHGFEGYRNIMENCHENAMVLKEGLEKTGRFDIVSKDEGVPLVAFSLKDRSRHDEFEISDMLRRFGWIVPAYTMPPDAQHVTVLRVVIREEFSRTLAERLVLDIEKVMYQLDALPSRLPPPPPAAPLLRKKTELETQRSVTEAWKKFVLAKKTNGVC

SEQ ID NO: 25261 - protein, 182 aa, Acetabularia peniculus
MAATMMNKTVVLSKGCTKPSAVPKVSINRKGFLNTAMNKKREMMVWQPFNNKMFETFSYLPPLTDEQISKQVDYILANSWTPCLEFAASDQAYAGNENCIRMGPVASTYQDNRYWTMWKLPMFGCTDGSQVLSEIQACTKAFPDAYIRLVCFDANRQVQISGFLVHRPPSATDYRLPADRQV

SEQ ID NO: 25262 - protein, 199 aa, Shigella boydii
ELKARHLTMIAIGGSIGTGLFVASGATISQAGPGGALLSYILIGLMVYFLMTSLGELAAYMPVSGSFATYGQNYVEEGFGFALGWNYWYNWAVTIAVDLVAAQLVMSWWFPDTPGWIWSALFLGIIFLLNYISVRGFGEAEYWFSLIKVATVIIFIVVGVMMIIGIFKGAQPAGWSNWTIGEAPFAGGFAAMIGVAMIV

SEQ ID NO: 25263 - protein, 184 aa, Acetabularia peniculus
MAAAMMNKTIVVSKDGCARSSSIPKVATNKMGFASAVAMKKSREMMVWQPFNNKMFETFSYLPPLTDEQISKQVDYILANSWTPCLEFAASDQAYAGNENCIRMGPVASTYQDNRYWTMWKLPMFGCTDGSQVLSEIQACTKAFPDAYIRLVCFDANRQVQISGFLVHRPPTATDYRLPADRQV

SEQ ID NO: 25264 - protein, 253 aa, Lactococcus lactis subsp. lactis Il1403
MKTLQMTLSNKKNNFIPYIMAGDHEKGLEGLKETIQLLEQAGSSAIEIGVPFSDPVADGPVIEQAGLRALARNVSLSSILETLKTIDTKVPLVIMTYFNPVYQFGIEKFVAALEKTPVKGLIIPDLPKEHEDYIKPFINDKDICLVPLVSLTTPLSRQKELVADAEGFIYAVAINGVTGKENAYSNQLDQHLKALSSLTDVPVLTGFGISTLSDVDRFNKVSSGVIVGSKIVRDLHEGKENEVIKFIENAINF

SEQ ID NO: 25265 - protein, 357 aa, Brassica napus
  misc_feature (57)..(57): Xaa can be any naturally occurring amino acid
  misc_feature (97)..(97): Xaa can be any naturally occurring amino acid
  misc_feature (161)..(161): Xaa can be any naturally occurring amino acid
  misc_feature (199)..(199): Xaa can be any naturally occurring amino acid
  misc_feature (271)..(271): Xaa can be any naturally occurring amino acid
  misc_feature (333)..(333): Xaa can be any naturally occurring amino acid
  unsure (1)..(357): unsure at all Xaa locations
GRPTLRLSVESESWVKAISGNLKKLTIDTGRSETLVVCFGEMLIDFVPTVGGVSLAXAPAFKKAPGGAPANVAVGVSRLGGSSAFVGKVGDDEFGKXLAEILKLNNVDNSGMRFDHKARTALAFVTLRADGEREFLFFRHPSADMLLTESELDKNLIQKPXIFHYGSISLIKEPCRSTHLAAMKIAKAAGSLLSYDPNXLRLPLWPSEEAARKEIMSIWELADVIKISEDEIPFLTGGDDPYSDELVLQKLFHPNLKLLVVSEGPNGCRYXTKEFKGRVGGVKVKAVDTTGAGDAFVSGLLHSLASDLTLLTDEKKLREALLFANACGAITVXTERGAIPAMPPMDAVQELLKSSGS

SEQ ID NO: 25266 - protein, 201 aa, Escherichia albertii
LKARHLTMIAIGGSIGTGLFVASGATISQAGPGGALLSYILIGLMVYFLMTSLGELAAYMPVSGSFATYGQNYVEEGFGFALGWNYWYNWAVTIAVDLVAAQLVMSWWFPDTPGWIWSALFLGIIFLLNYISVRGFGEAEYWFSLIKVATVIIFIVVGVMMIIGIFKGAQPAGWSNWTIGEAPFAGGFAAMIGVAMIVGFS

SEQ ID NO: 25267 - protein, 267 aa, Clostridium sordellii
MNKLENKVALVTSATRGIGLASAIKLAQNGAIVYMGVRRLEATQEICDKYKEEGLILKPVFFDAYNIDIYKEMIDTIIKNEGKIDILVNNFGTGRPEKDLDLVNGDEDTFFELFNYNVGSVYRLSKLIIPHMIENKGGSIVNISSVGGSIPDISRIGYGVSKSGVNNITKQIAIQYAKYGIRCNAVLPGLIATDAAMNSMPDEFRKSFLSHVPLNRIGNPEDIANSVLFFVPSEDSSYITGSILEVSGGYNLGTPQYAEFVGSKVVE

SEQ ID NO: 25268 - protein, 373 aa, Aquifex aeolicus VF5
MRWIEEELKRIKEANLYRERILLEGVKDFCSNDYLGLRKHPEVVEESIRVLKEAGLGSGASQLVSGYTKHHRELEEKLAEFKGTESCVLFGSGFLANVGTIPALVEEGDLVLSDELNHASIIDGVRLSKAQKRVFKHKDYEELEEFLKKNRKKFRRVLIITDTVFSMDGDVADLKRLTQICEEYDCMLYIDEAHTTGTIGKGGLDYFGIEHKEYIIVMGTLSKALGSYGAFVCGTKLLIDYLVNKARSLIFSTSLPPSVCAGAKKAIEIIEENPKLIEFLRKKEKEILEILEQFSLDYKYYSTPIIPIMVYDEKETVRIKEELLKEGVFIQAIRYPTVPKGKARLRLTASLNYTRKDLEFLKNALEKVLKGRA

SEQ ID NO: 25269 - protein, 258 aa, Burkholderia fungorum LB400
MNTNASPPDNPLSHLFDNNEAWVARKLSEDPEYFSRLAHQQTPEYLWIGCSDSRVPANQIIGLPPGEVFVHRNIANVVVHTDLNCLSVIQFAVDLLKVKHIMVVGHYGCSGVGAALHGRRVGLADNWLHHVQDVRTKHAALIEEWPIGEARHRRLVELNAIEQVMNVCRTTIVNDAWARGQELTVHGWAYGVHDGKVRNLGMTIREPGALDATYQKCVAAVSAGGAHNADNDVVAADAAQLGDVPAIVEGVIKELKHE

SEQ ID NO: 25270 - protein, 202 aa, Escherichia albertii
LKARHLTMIAIGGSIGTGLFVASGATISQAGPGGALLSYILIGLMVYFLMTSLGELAAYMPVSGSFATYGQNYVEEGFGFALGWNYWYNWAVTIAVDLVAAQLVMSWWFPDTPGWIWSALFLGIIFLLNYISVRGFGEAEYWFSLIKVATVIIFIVVGVMMIIGIFKGAQPAGWSNWTIGEAPFAGGFAAMIGVAMIVGFSF

SEQ ID NO: 25271 - protein, 451 aa, Caulobacter crescentus CB15
MADDARDPERDRLTGRLSRFAKVGAGLSGAAVSYGANRVFGGDEADARNAKALKAALGGLKGPLMKAAQMFATVPDLLPPEFAKELAELQTNAPAMGWPFVRRRMAAELGADWQARFTSFEPEAAAAASLGQVHRAVAHDGRALAVKLQYPDMQSAVESDLGQLRALIALIKRMDGALDPSEAIVEIGDRLREELDYGREAKLMAVYANFFADRADIRTPEPVPELSTGRLLSMTWLDGQGLLTFKSAPQAVRDRIAALLFEAWWSPMTHLGIIHGDPHLGNYTFAGEGAAHLNLLDFGCIRIFPPKFVAGVVRLYRALANDDRSEQVEAYRSWGFQGLSDPLVDALNVWARFIYGPLLDDRERTVADDVPPGEYGRREAFKVRQALKAVGGVTIPREFVFMDRAAIGLGAAFLHLGARHNWRRMFEASLEGFSEEAVAERQAKALSFVGL

SEQ ID NO: 25272 - protein, 591 aa, Crocosphaera watsonii WH 8501
MTSSSISRRTKIVATIGPATQNKEILRQLILAGATTLRLNFSHNDHDYHQNSIRLIRQTAFELNQPVAILQDLQGPKIRLGQFANGPITVQPGDVFILTSREVECNQTISYVSYEHLADEVPEKARILMDDGKVEMLVEKVDKENKDLHCRVVVGGVLSDRKGVNFPGVYLSVKALTEKDKRDLMFGLDQGVDWVALSFVRNPQDILEIKGLIASAGKNVPVIAKIEKHEAIEDMEEILSLCNGVMVARGDLGVELPPEDVPILQKRLISTANRLGIPVITATQMLDSMASNPRPTRAEVSDVANAILDGTDAVMLSNETAVGKYPVEAVATMATIAERIEREPTIPKVLSEKKQSVTNSISSAVSHIAQELNAAAIMSLTKTGSTARNVSKFRPQIPIVAVTPHVDVARQLQLVWGVKPLLVLDLASPNQTFQSAVNVAQENNWLKDGDLVVMTAGTLQGVAGSTDLIKVEMVKAVLGKGVGIGQGAASGRARIAHNARELGNFEPGDILVVPGTNAEFVEMMRKASGIITEEASLTSHAAVIGLRLGVPVIIDFKEATANIREGAIITVDAEKGQVYSGLVTSNNNGNK

SEQ ID NO: 25273 - protein, 199 aa, Shigella boydii
ARHLTMIAIGGSIGTGLFVASGATISQAGPGGALLSYMLIGLMVYFLMTSLGELAAYMPVSGSFATYGQNYVEEGFGFALGWNYWYNWAVTIAVDLVAAQLVMSWWFPDTPGWIWSALFLGVIFLLNYISVRGFGEAEYWFSLIKVTTVIVFIIVGVLMIIGIFKGAQPAGWSNWTIGEAPFAGGFAAMIGVAMIVGFS

SEQ ID NO: 25274 - protein, 125 aa, Brassica napus
GPRTRPEARKKLVRAQTEREILQSLDHPFLPTLYSHFETENHSCLVMEFCPGGDLHSLRQKQPGKYFPEHAARFYVAEVLLAMEYLHMLGIIYRDLKPENVLVREDGHIMLSNFDLSLRSSISPN

SEQ ID NO: 25275 - protein, 52 aa, Pseudomonas fluorescens PfO-1
MDFIRIIIAILLPPLGVFLQVGFGGAFWLNILLTLCGYIPGIVHAVYIIAKR

SEQ ID NO: 25276 - protein, 398 aa, Prochlorococcus marinus str. MIT 9313
MTLLFHWSERLDQALPELIELRRHLHAHPELSGEEHQTAVLVAGQLRGDGWRVSEGVGRTGVLAELGPTGGPCVGLRVDMDALPVEERTGLVYASRRDGVMHACGHDLHTCIGLGVARVLAKEESLPIGVRLLFQPAEELCEGARWMRMDGATDGLEALFGVHVCPELPTGSIGVRSGCLTAAAGELDIEVIGEGGHGARPHQAMDAIWLAARVVCGLQEAISRRLDALNPVVVSFGKIEGGQAFNVIADRVRLLGTVRCLDGAVFDKLPAWIEQIVQAICGSFGAEAIVRYRSITPPVYNDPELTDLLESCAITQIGKERVLRLEQPSLGAEDFAELLQNVRGTMFRLGVSGPNGCAPLHNGQFCLEESSLGVGIRVLTATLLAWMDERARLALERT

SEQ ID NO: 25277 - protein, 310 aa, Ralstonia solanacearum
INGFGRIGRMVFRAAVANFKDIEVVAINDLLEPDYLVYMLKYDSVHGRFDGEVAVDGNTLIVNGKKIRLTAVKDPAELKWGEVGADVVVESTGIFLTKEGAQKHIDAGAKKVIMSAPSKDDTPMFVYGVNHGTYKGEAIISNASCTTNCLAPVAKVLNDKWGIKRGLMTTVHAATATQKTVDGPSNKDWRGGRGILENIIPSSTGAAKAVGVVIPELNKKLTGMSFRVPTSDVSVVDLTVELEKAATYDEICAEMKAQSEGALKGVLGYTEDKVVATDFRGDARTSIFDAEAGIALDGTFIKVVSWYDNE

SEQ ID NO: 25278 - protein, 757 aa, Haemophilus somnus 2336
MTTFHVLGFPRVGAKRELKFAQERYWRKELAEQDLLDLAKALREKNWKHQADANADFMAVGDFTFYDHILDLQVATGAIPARFGFDSKNLTLDQYFQLARGNKDQFAIEMTKWFDTNYHYLVPEFHKDTQFKANPTHYVNQIREAKVAGHQVKPVIVGPLTFLWLGKEKGESFNRFELLAQLVPVYVEILNALVAEGTEWIQIDEPALAVDLPKEWVNAYKDVYATLSEKVNAKLLLATYFGSVTEHATLLKELPVDGLHLDLVRAPEQLVAFEDYNKVLSAGVIDGRNIWRANLNTVLDVLEPLKEKLGERLWIAPSCSLLHTPFDLNVETQLQENNPALYSWLAFTLQKVQELSVLKTALEKGRNAVNVELDASQVAADARANSKEIHRPEVAERLANLPKNADQRKSPFGERIKLQNAWLNLPLLPTTSIGSFPQTTEIRRARAAFKKGDLSLEEYENSMKKEIELVVREQEKLDLDVLVHGEPERNDMVEYFGELLDGFAFTKFGWVQSYGSRCVKPPVIYGDVVRPEPMTVRWSKYAQSLTKKVMKGMLTGPVTILQWSFVRNDIPRSTVCKQIGVALSDEVLDLEKAGIKVIQIDEPAIREGLPLKRADWDTYLQWAGEAFRLSSMGVADDTQIHTHMCYSEFNDILPAIAALDADVITIETSRSDMELLTAFGDFKYPNDIGPGVYDIHSPRVPTAEEIEHLLRKALNVVPKERLWVNPDCGLKTRGWSETIAQLEVMMSVTKKLRAELA

SEQ ID NO: 25279 - protein, 616 aa, Arabidopsis thaliana
MFRRKSRSISPRRHRSRSVTPKRRSPTPKRYKRQKSRSSTPSPAKRSPAATLESAKNRNGEKLKREEEERKRRQREAELKLIEEETVKRVEEAIRKKVEESLQSEKIKMEILTLLEEGRKRLNEEVAAQLEEEKEASLIEAKEKEEREQQEKEERERIAEENLKRVEEAQRKEAMERQRKEEERYRELEELQRQKEEAMRRKKAEEEEERLKQMKLLGKNKSRPKLSFALSSKMTTMSDLDEIMVAEILCRTPMTCLKTVRSVCKKWNALSKKWFFFGKAKQFLGFMMMDSRVCSLRFDLRKDLVVEPPSIKQVSILDQIEVSKIFHSDGLLLCIIKNDTTRLLVWNPYLEQTRWIQPRHNFHILDCYAIGHDKNRKHKILRFVDDFLPVENVVFGYEIYDFSLDSWRVLDCFQRGVSLRGNTYFFAKERYIFEGKGPEEIDITETEDFLLCFDFTAERFGPRLPLPFHSYYAETVTLSCVKEDQLSVLCQRQPSEPSEILEIWVSTNIQPNAVSWSIFLKVDMRPLTGFQFNDMAGSFFIDQENKVAVVFDLDPSQICRYQTAYIIGQEYGGYFNSVNIGEVPNLWIPGSVGYADTTSCIPPVCSSYVPSLVQIG

SEQ ID NO: 25280 - protein, 125 aa, Triticum aestivum
  misc_feature (14)..(14): Xaa can be any naturally occurring amino acid
  misc_feature (16)..(16): Xaa can be any naturally occurring amino acid
  misc_feature (21)..(21): Xaa can be any naturally occurring amino acid
  misc_feature (24)..(24): Xaa can be any naturally occurring amino acid
  misc_feature (27)..(29): Xaa can be any naturally occurring amino acid
  misc_feature (33)..(35): Xaa can be any naturally occurring amino acid
  misc_feature (37)..(37): Xaa can be any naturally occurring amino acid
  misc_feature (45)..(45): Xaa can be any naturally occurring amino acid
  misc_feature (48)..(48): Xaa can be any naturally occurring amino acid
  misc_feature (61)..(61): Xaa can be any naturally occurring amino acid
  misc_feature (71)..(71): Xaa can be any naturally occurring amino acid
  misc_feature (73)..(73): Xaa can be any naturally occurring amino acid
  misc_feature (76)..(78): Xaa can be any naturally occurring amino acid
  misc_feature (80)..(81): Xaa can be any naturally occurring amino acid
  misc_feature (84)..(84): Xaa can be any naturally occurring amino acid
  misc_feature (89)..(89): Xaa can be any naturally occurring amino acid
  misc_feature (97)..(97): Xaa can be any naturally occurring amino acid
  misc_feature (99)..(99): Xaa can be any naturally occurring amino acid
  misc_feature (101)..(101): Xaa can be any naturally occurring amino acid
  misc_feature (107)..(107): Xaa can be any naturally occurring amino acid
  misc_feature (113)..(113): Xaa can be any naturally occurring amino acid
  unsure (1)..(125): unsure at all Xaa locations
MSWWWAGAVGAVKXRXDERAXAAXPTXXXVALXXXSXGIVGTSLXDIXPRDDTPGGPWKVXAVFRQRADGXGXPRXXXPXXTHXQLDLXDPAAVRDXLXPXTDVTHXFYAAWXSHETRGPPGSTP

SEQ ID NO: 25281 - protein, 631 aa, Bacillus megaterium
MKKYRVNVQGMTCSGCEQHVAVALENMGAKEIEVDFRRGEAVFELPDDVEVEVAKNAIADANYHPGEAEEFQSEQKTNLLKKYRLNVEGMTCTGCEEHVAVALENAGAKGIEVNFRRGEAVFELPDDVDIDIAKIAITDAKYQPGEAEEIEVQSDKRTDVSLNDEGNYDYDYIIIGSGGAAFSSAIEAVALNAKVAMIERGTVGGTCVNVGCVPSKTLLRAGEINHLAKNNPFVGLHTSASNVDLAPLIKQKNDLVTEMRNEKYVNLIDDYGFELIKGEAKFVNENTVEVNGNQITAKRFLIATGASSTAPNIPGLDEVDYLTSTSLLELKKVPNRLTVIGSGYIGMELGQLFHNLGSEVTLIQRSERLLKEYDPEISEAITKALTEQGINLVTGATYERVEQDGDIKKVHIEINGKKRIIEAEQLLIATGRKPNTESLNLHAADVEVGSRGEIIIDDYLKTTNSRIYAAGDVTLGPQFVYVAAYEGRLVARNAIGGLNQKVNLEVVPGVTFTSPSIATVGLTEQQAKEKGYEVKTSVLPLDAVPRALVNRETTGVFKLVADAKTLKVLGAHIVTENAGDVIYAATLAVKFGLTVEDLRGTMAPYLTMAEGLKLAALTFDKDVSKLSCCAG

SEQ ID NO: 25282 - protein, 663 aa, Candida glabrata CBS138
MTVEDVKQARQAVEFSREKLESVLRGRFFYAPAFDLYGGVSGLYDYGPPGCSFQANVVDQWRKHFILEEDMLEVDCTMLTPYEVLKTSGHVDKFSDWMCRDLKTGEIFRADHLVEEVLEARLKGDQEARGLVKDANAEAEEDADKKKRKKKVKQIKAVKLEDDVVKEYQHILAQIDGYSGPELGEMMKKYNIGNPVTGEPLEPPMAFNLMFETAIGPSGQLKGYLRPETAQGQFLNFNKLLEFNNGKTPFASASIGKSFRNEISPRAGLLRVREFLMAEIEHFVDPLDKSHPKFHEVKDIKLSFLPRNIQQSGSTEPLVTTIGEAVASKMVDNETLGYFIARIYLFLIKIGVDDTKLRFRQHMANEMAHYAADCWDAELKTSFGWIECVGCADRSAYDLTVHANKTKEKLVVRQKLETPVEVTKYEIDLTKKLFGPKFRKDAPKVEAYLTELSQEELEKKAEELKTNGKIVFTVKGIEGEIELDDKFVVIEKRTKVEHVREFVPNVIEPSFGIGRIIYSIFEHSFWSRPEDTARAVLSFPPLVAPTKVLLVPLSNHKDLAPVTAQVSKILRKEQIAFRVDDSGVSIGKRYARNDELGTPFGITIDFDSVKDGSVTLRERDSTKQVRGSVEAVIKAVREITYNGASWEEGTKDLAPFVSQSDAE

SEQ ID NO: 25283 - protein, 109 aa, Streptococcus pneumoniae
LLYALLHLSGFEDVSMNEIKSFRQWGSKTPGHPEFGHTAGIDATTGPLGQGISTATGFAQAERFLAAKYNREGYNIFDHYTYVICGDGDLMEGVSSEAASYAGLQKLDK

SEQ ID NO: 25284 - protein, 143 aa, Cichorium intybus
MAREKIKIRKIDNITARQVTFSKRRRGLLKKAEELAVLCDADVALVIFSATGKLFEYASSSMQELLGKYKLHSTNNVNKVDEPSLDLQLVESQESRMSQEVLEKDRELSQLRGEDLQGLTLEELQRLESLLEGRLNRVAPDKG

SEQ ID NO: 25285 - protein, 485 aa, Magnetospirillum magnetotacticum MS-1
MTDLDASLLKTHAYIDGHWAEADDGRRFDVLDPATGHLLASVPDMGGAETRRAIEAAEMAWGPWRRRTAKERAAILMAWFEQIIAHKDALARLLSAEQGKPLPEAQGEIVYGAAFIQWFAEEGKRAYGDLIPTTASDRRLLVMKQPIGVVAAVTPWNFPMAMITRKCAPALAAGCPVVVKPAEDTPLSALVLAELAERAGLPRGVFNIVTTRQPGAVGGEMTANPLVRKLSFTGSTRVGKMLMAQCAETVKKVSLELGGNAPFIVFDDCDLDAAVAGALASKYRNSGQTCICTNRFLVQAGVYEEFGRKLAEKAAAMVVGHALKGPVQQGPLINAAAVAKVASHVADAVSKGARVLTGGRPHELGGGFWQPTVLADVTAQMLCFQEETFGPVAPLVRFETEEEAVELANASQFGLAGYFYSRDLARVFRVAEAMECGMVGVNESLISNEVAPFGGIKESGLGREGSKYGLDDFMETKYVCIGGLS

SEQ ID NO: 25286 - protein, 770 aa, Oryza sativa
MALIGTVAAEVLIPLAAVIGILFAVLQWYMVSRVAVPPHDGVGGAGKVERESDGGDGDGDGVDDEEDGVDYRGVEARCAEIQHAISVGATSFLMTEYKYLGAFMAAFAAVIFVSLGSVGRFSTSTEPCPYDAARRCRPALANAAFTAAAFLLGATTSVVSGYLGMRVATFANARTALEARRGIGRAFAVAFRSGAAMGFLLASSALLVLFAAVNAFGLYYGDDWGGLYEAITGYGLGGSSMALFGRVGGGIYTKAADVGADLVGKVERNIPEDDPRNPAVIADNVGDNVGDIAGMGSDLFGSYAESSCAALFVASISSFGADHDFAAMMYPLLVSAAGIVACAATTLVATDAGELGAADEVAPALKRQILISTVLMTAAVAAVTFLSLPRSFTLFDFGERKLVKNWHLFICVSAGLWAGLVIGYVTEYFTSNAYGPVQTVAQSCRTGAATNVIFGLAVGYKSVIVPIFAIAGAIYASFRLAAMYGIALAALGMLSTIATGLTIDAYGPISDNAGGIAEMAGMPRRVRERTDALDAAGNTTAAIGKGFAIGSAALVSLALFGAYVSRAGIRTVNVVSPRVFVGLLAGAMLPYWFSAMTMRSVGSAALRMVEEVRRQFDEIPGLAEGLAAPDYATCVRISTDASLREMVAPGALVMASPLVAGTLFGVEALAGLLAGALVSGVQVAISASNSGGAWDNAKKYIEAGATEEARSLGPKGSEAHKAAVIGDTIGDPLKDTSGPSLNILVKLMAVEALVFAPFFAAHGGIVFNHL

SEQ ID NO: 25287 - protein, 213 aa, Desulfovibrio desulfuricans G20
MLRHFPGIILAAALIIIPLTTLYATAKLPPGKLPDSPPEGLAYATFAGGCFWCMEPPFDRTPGVLETISGYTGGHTEHPSYEQVSAGGTGHYEALRVVFDPRQVSYDTLLTIFWSNIDPYDASGQFCDRGDQYRSAVFWHDDGQKEAALRSVAHGLQDGSLDKAPATEILPAQDFWQAEDYHQDYYRKNPVRYKFYRFSCGRDQRLEELHDKR

SEQ ID NO: 25288 - protein, 182 aa, Acetabularia mediterranea
MASIMMNKSVVLSKECAKPLATPKVTLNKRGFATTIATKNREMMVWQPFNNKMFETFSFLPPLTDEQISKQVDYILTNSWTPCLEFAASDQAYAGNENCIRMGPVASTYQDNRYWTMWKLPMFGCTDGSQVLSEIQACTKAFPDAYIRLVCFDANRQVQISGFLVHRPPSATDYRLPADRQV

SEQ ID NO: 25289 - protein, 173 aa, Acetabularia mediterranea
VVLSKECAKPLATPKVTLNKRGFATTIATKNREMMVWQPFNNKMFETFSFLPPLTDEQISKQVDYILTNSWTPCLEFAASDQAYAGNENCIRMGPVASTYQDNRYWTMWKLPMFGCTDGSQVLSEIQACTKAFPDAYIRLVCFDANRQVQISGFLVHRPPSATDYRLPADRQV

SEQ ID NO: 25290 - protein, 384 aa, Nicotiana tabacum
MCVQESEEVSEEMENLDISKSDENIKIGSLQVEDELGNTQKENCEKNTSSSFSVIRNSFPMESISEDTTIADRKQILSNKFLPTLRSGEWSDIGGRLDMEDTHICIADLAKNFGQSILGEEEAVSFYGVFDGHGGKGAALFVRDFLPRIIVEDADFPLKLEKVVSKSFLETDAAFAKSCSADSDLSSGTTALTAMIFGRSLLVANAGDCRAVLSRGGLAIEMSKDHRPCCVSERTRVESLGGFVDDGYLNGQLGVTRALGDWHIKGLKEVEKGGPLSAEPELKLLTLTKEDEFLIIGSDGIWDVFRSQNAVDFARRRLQEHNNAKLCCKEVVDEAKKRGAIDNLTVVMVCFHSEPPPTIVFQRSRIRKCISAEGLQNLRSLLDG

SEQ ID NO: 25291 - protein, 182 aa, Acetabularia mediterranea
MASIMMNKSVVLSKECAKPLASPKVTLNKRGFATTIATKNRGMMVWQPFNNKMFETFSFLPPLTDEQISKQVDYILINSWTPCLEFAASDQAYAGNENCIRMGPVASTYQDNRYWTMWKLPMFGCTDASQVLSEIQACTKAFPDAYIRLVCFDANRQVQISGFLVHRPPSATDYKLPADRQV

SEQ ID NO: 25292 - protein, 182 aa, Acetabularia mediterranea
MSAAMMNKSVVLSKQCTKPAATPKVVTSKRSFASTVANKNREMMVWQPFNNKMFETFSFLPPLTDEQISKQVDYILANSWTPCLEFAASDQAYAGNENCIRMGPVASTYQDNRYWTMWKLPMFGCTDGSQVLSEIQACTNAFPDAYIRLVCFDANRQVQISGFLVHRPPSATDYRLPADRQV

SEQ ID NO: 25293 - protein, 406 aa, Oryza sativa
PQQPPTPLNFLIRRRRQDVRRRRRRREEAAGLRGAEREREEGAVRGAGGAVPARLRAPELIYLTDGASKGVMQMLNTIIRNERDGILVPVPQYPLYSAAISLFGGSLVPYYLEEEANWGLDFVNLRQTVASARSKGITVRAMVIINPGNPTGQCLSEGNIKELLKFCFHENLVLLADEVYQQNIYQDERPFISARKVLFDMGPPMSREVQLVSFHTVSKGYWGECGQRGGYFEMTNLPPKTVDEIYKVASIALSPNVPGQIFMGLMVNPPKPGDISYLKFSAESKSILESLRRRARLMTDGFNSCRNVVCNFTEGAMYSFPQIRLPPKAIDAAKRAGKAADVFYCLKLLEATGISTVPGSGFGQKEGVFHLRTTILPAEEDMPAIMTSFKKFNDTFMDQYDGYSRM

SEQ ID NO: 25294 - protein, 382 aa, Chlamydophila abortus S26/3
MPICDLLEQRLEKQKQKKIHRTLKTVSASIDFTSNDYLGFAKSLELKQRFSHAWDCMHSLGSTGSRLLTGQSLLINRVEHDIADYHHMESALVFNSGYMANLGLISALVSKEDRVIYDIYIHASIHDGIRLAQAQGIPFRHNDMQHLEKRLSQPHGGQTFVCVESVYSLHGSVSPLKTICALCKKYSAHLLVDEAHALGVFGNIGEGFVTSLGLQNDVSATVYTFGKALGIHGAAVAGKALLKDYLINFSRPFIYTTALPPHAFALIQLAYQYNEKAHVLRENLQQLISYFRAKAQDMGLPMFKDNSKTPIQSLCIPGSTQVREAAKTLQDFGFDVRPIVSPTVKQKEELLRICLHSFNTQSEITEFLNKLYAVQKGLCILS

SEQ ID NO: 25295 - protein, 183 aa, Acetabularia mediterranea
MAAAMMNKSVLLNKQCGKPAAVPKVVMSKGGFARTSAVNKNRDMMVWQPFNNKMFETFSFLPPLTDEQISKQVDYILANSWTPCLEFAASDQAYAGNENCIRMGPVASTYQDNRYWTMWKLPMFGCTDGSQVLSEIQACTNAFPDAYIRLVCFDANRQVQISGFLVHRPPSATDYRLPADRQV

SEQ ID NO: 25296 - protein, 135 aa, Zea mays
GRGKHRIVSLVAALLILLALAVSSTRNAQEDSMADNTGTLAGGIKDVPGNENDLHLQELARFAVDEHNKKANALLGFEKLVKAKTQVVAGTMYYLTIEVKDGEVKKLYEAKVWEKPWENFKELQEFKPVEEGASA

SEQ ID NO: 25297 - protein, 400 aa, Gloeobacter violaceus PCC 7421
MKTFKSAEVLIIALLAATGGAAGSYFAVSRVSAPAAPSTPAAAPRPANAPANSEAPLPPLPTSLGSDELDNIAVYERVSPAVVNITTTVLRYDYFSRAVPEQGSGSGSILDAQGRILTNYHVVRSPKSRLEVTLANGKRYRARLVGADPSNDLAVIQLEDPPPNLTTITLGESSNLQVGRKVLAIGNPFGLERTLTTGVISALERDLASERAGRTLRNLIQTDAAINPGNSGGPLLDSQGRLIGVNTAIFSTSGSSAGIGFAVPVDTVRQVLPELISRGTVRRASLGVQVLPLSPMVVETLKLSVKEGALVAAVVPGGAAARAGLRAGRLETIDGNLQLPVGADVIVAIDRVAIKDAQDLINQIQKHKPGDKVTLTIVRNNAEVQVPVTLGELREQLEEQ

SEQ ID NO: 25298 - protein, 779 aa, Frankia sp. CcI3
MSSIQALQAEGSGIDLSGRALGLVAGVAIVAALALLVAGYLVREVLAASPGTPRMVEVGRAVQEGAAAYLRRQFTTLAGFVVVIPFVLLLLPAENTGAKIGRSIFFVVGAIFSALVGFVGMSLATRANTRTAAAAMTRGERAAVRIAFRTGGVVGMFTVGLGLLGAAAVVLVFRDTAPQVLEGFGFGAALLAMFMRVGGGIFTKAADVGADLVGKVEQGIPEDDPRNAATIADNVGDNVGDCAGMAADLFESYAVTLVAALILGVEAFGERGLVFPLLIPAVGVVTAVIGIFAVSPRAGDRTGMSAINRGFFISAVVSAIGVVAVSLLYLPTSFADFPGMQGSTQSGNPRVIAIGAVLIGIVLAAAIQLLTGYFTETGRRPVRDIAKASLTGPATNILAGIGVGLESAVYSSLLIGAAIFGAYLLGSGSVTIALFAVALAGTGLLTTVGVIVSMDTFGPVSDNAQGIAEMSGDMDEAGAAILTSLDAVGNTTKAITKGIAIATAVLAASALFGSFTDTVTTALRDAGALPEAGRGIVGGLNIAYPDALVGLTIGASVVFLFSGLAINAVGRAAGRVVLEVRNQFRSRPGIMTGDEKPDYSAVVDICTRDSLRELITPGTLAVLAPIAVGFGLGYPPLGAFLGGAIAGGVLMAVFLANSGGAWDNAKKMVEDGHHGGKGSEVHAATVIGDTVGDPFKDTAGPSINPLLKVMNLVSLLIAPTVVKYSVGADENTGLRIGVALAALAAIAAVIIISRRRSSMINDVPDMTQPTPAPSEKINA

SEQ ID NO: 25299 - protein, 198 aa, Escherichia albertii
ARHLTMIAIGGSIGTGLFVASGATISQAGPGGALLSYILIGLMVYFLMTSLGELAAYMPVSGSFATYGQNYVEEGFGFALGWNYWYNWAVTIAVDLVAAQLVMSWWFPDTPGWIWSALFLGIIFLLNYISVRGFGEAEYWFSLIKVATVIIFIVVGVMMIIGIFKGAQPAGWSNWTIGEAPFAGGFAAMIGVAMIVGF

SEQ ID NO: 25300 - protein, 199 aa, Escherichia albertii
ARHLTMIAIGGSIGTGLFVASGATISQAGPGGALLSYILIGLMVYFLMTSLGELAAYMPVSGSFATYGQNYVEEGFGFALGWNYWYNWAVTIAVDLVAAQLVMSWWFPDTPGWIWSALFLGIIFLLNYISVRGFGEAEYWFSLIKVATVIIFIVVGVMMIIGIFKGAQPAGWSNWTIGEAPFAGGFAAMIGVAMIVGFS

SEQ ID NO: 25301 - protein, 90 aa, Kluyveromyces lactis
PAFVNKLWSMVNDKSNEKFIHWSTSGESIVVPNRERFVQEVLKKYFKHSNFASFVRQLNMYGWHKVQDVKSGSMLSNNDSRWEFENERHA

SEQ ID NO: 25302 - protein, 245 aa, Mesembryanthemum crystallinum
MAAPKVDADYLKHIEGARKELRTIISTKQCAPLMLRLSFHDAGTYDAKTKKGGPNGTVRFELNNPANNGIKTAVDLVEQVKVKHPKVTYADLYQLAGVVAVEVTGGPVINFVPGRPDVQQVDSGSLPLPSGDANHLREVFHRMGLSDRDIVVLSGAHTLGRANRDRSGVDGPFTKNPLKFDNSYYVELLKGDTPELVKFNTDKVLLQDPTFRKYVQLYAKDEKAFLTHYAESHKKMSELGKPKHM

SEQ ID NO: 25303 - protein, 371 aa, Listeria monocytogenes EGD-e
MLNEFIAIRRELHQIPETGYKELKTQAYLLDYISKLPSGHLEVKKWRTGILVLVKGTNPEKTIGYRTDIDALPITEETELPFASKHPGNMHACGHDLHMSIALGVLTHFASKPAKDNLLFVFQPAEEGPGGAKPIMESTEFAEWRPDSIYGLHIAPEYKVGEIAIKPGLLFANTSELFISFKGKGGHAAYPHLANDMVVAASAFVGQMQTIISRNIDPMDSAVITIGRIHGGEIQNVIAETAYLDGTIRTLSPETMEIVWTRLKQLAKGWEEAYQCEVEFHPGSDYYQVDNDPVETEEFIHFLEEQYPESYVPARSAMTGEDFGYFLSEIKGFMFWLGVDSEYSLHHAKLNPKEEAIPFAIDVLIHFLESK

SEQ ID NO: 25304 - protein, 197 aa, Shigella boydii
HLTMIAIGGSIGTGLFVASGATISQAGPGGALLSYMLIGLMVYFLMTSLGELAAYMPVSGSFATYGQNYVEEGFGFALGWNYWYNWAVTIAVDLVAAQLVMSWWFPDTPGWIWSALFLGVIFLLNYISVRGFGEAEYWFSLIKVTTVIVFIIVGVLMIIGIFKGAQPAGWSNWTIGEAPFAGGFAAMIGVAMIVGFS

SEQ ID NO: 25305 - protein, 229 aa, Lactococcus lactis subsp. lactis Il1403
MKEKNNLIQRNNIVRASIMGANDGIISIAGIVIGVSGATSHIGTILLAGFAGTLAGTVSMAMGEYVSVSSQRDAQEKIIQEQKVALATNYQNEFDFVYQKYRADGISNELAHKATDEMMKKDALATTVRERHGFTIGQELSAKGAAIASMLSFPTGALLPMLAISLIPKSWSALATFISVLIALGFTGYAAAYLNGADKKHATFRNIIAGILTMLVTYVVGLLFKQGGL

SEQ ID NO: 25306 - protein, 90 aa, Kluyveromyces lactis
PAFVNKLWSMVNDKSNEKFIHWSTSGESIVVPNRERFVQEVLAKYFKHSNFASFVRQLNMYGWHKVQDVKSGSMLSNNDSRWEFENERHA

SEQ ID NO: 25307 - protein, 144 aa, Zea mays
MAIELDDDVFFADISKQISLLIMDEDEQLNPVSLSTSSALAFQGMFRGSYQTATYMYHKEPSKGTGVFIPKSSQSRRRPHHPKQGRFSSFNAKQQHSLHQNKQQYQDNSRYTHTTHNNKSSMITSNVHASIARRSYRDAASIYT

SEQ ID NO: 25308 - protein, 503 aa, Micrococcus luteus
MEHQKTTPHATGSTRQNGAPAVSDRQSLTVGSEGPIVLHDTHLLETHQHFNRMNIPERRPHAKGSGAFGEFEVTEDVSKYTKALVFQPGTKTETLLRFSTVAGELGSPDTWRDVRGFALRFYTEEGNYDLVGNNTPIFFLRDPMKFTHFIRSQKRLPDSGLRDATMQWDFWTNNPESAHQVTYLMGPRGLPRTWREMNGYGSHTYLWVNAQGEKHWVKYHFISQQGVHNLSNDEATKIAGENADFHRQDLFESIAKGDHPKWDLYIQAIPYEEGKTYRFNPFDLTKTISQKDYPRIKVGTLTLNRNPENHFAQIESAAFSPSNTVPGIGLSPDRMLLGRAFAYHDAQLYRVGAHVNQLPVNRPKNAVHNYAFEGQMWYDHTGDRSTYVPNSNGDSWSDETGPVDDGWEADGTLTREAQALRADDDDFGQAGTLVREVFSDQERDDFVETVAGALKGVRQDVQARAFEYWKNVDATIGQRIEDEVKRHEGDGIPGVEAGGEARI

SEQ ID NO: 25309 - protein, 362 aa, Pinus caribaea var. hondurensis
SDSGKDAGRLSAAWALYKAQEDLIKVAFEFGVKLTMFHGRGGTVGRGGGPTHLAILSQPPDTIHGSFRVTVQGEVIEQSFGEEHLCFRTLQRFTAATLEHGMRPPIAPKPEWRALMDEMAVVATKEYRSIVFQNPRFVEYFRSATPELEYGRMNIGSRPSKRKPSGGIESLRAIPWIFAWTQTRFHLPVWLGFGGAFKHVMEKDIRNLHTLQQMYNEWPFFWGTIDLIEMVFAKGDPGIAALYDKLLVSDDLWAIGGQLRANYVETKDLLLQVAGHKDLLEGDPYLKQRLRLRDSYITTLNVCQAYTLKRIRDPNYHVNLRPHLSKESSTKPAAELVKLNPTSEYAPGLEDTLILTMKGIAA

SEQ ID NO: 25310 - protein, 254 aa, Mesembryanthemum crystallinum
MACGPVVDQRYLKDLEGARRDLASIIQRKNAAPVLLRLAFHDAANYNVTNNTGGVNGSVRLRQELSQPPNKGIEDGVKFCEEVKKKHPRVTYADIIQLAGVLAVELSGGPCIDFVPGRMDTNVADKLNIPNPRGGADHLRRTFYQMGLSDKDIVVLSGAHTLGRARKENSGFNGPFTRNTLKFDNSYFVELMRGETPGLVKFPTDKALVQDPVFRPLVELYARHEGAFFRDYAESHKKLSELGFTPSLHVWRWM

SEQ ID NO: 25311 - protein, 465 aa, ASPERGILLUS NIDULANS FGSC A4
MLVTLTVLFLGLVGILASFLTYLFTPPQFFPKGLPTIPFYYTLIPLLNQTLKRAPTDQVTLYHRYLSTPLRTHGAVKLFFGGRWNILITKPSYIAEVLKNEDLYAKSGNQKKIPHSVLAQYTGDNIISSHGENWKLYSSIFKPGLQRDYDPSGIWRNASLLVQMISQDIKRKSPVDINPLMQRYALANLSEVLLGTTFDTLQKPAASLHAFQLLIKPKIFDPIFLNFPVLDYLPLQTREEARKLVTRFTDELIETVRKGHTTCDHEKEHTRNLGCRLLYACESGLFTEMQLRHNMISAFLAGHENPQLLLVSSLFLLAEHPEMQESLRAEISALNDLEPAYNALSALPLLTSTIYEVLRLYPPISQLINRRTTAPTLLGGEIPIPAGTYVGYNAYATNRDIGFWGPDANEFKPSRWGNTMEEINALFRRANAKGAFISFHGGRRTCLGQRFALLEGRVTLAKLLM

SEQ ID NO: 25312 - protein, 475 aa, Zymomonas mobilis
MTEGLFPRGRKVRVVSTLGPASSTAEQIRDRFLAGADVFRINMSHGTHDEKKVIVDNIRALEKEFNRPTTILFDLQGPKLRVGDFKEGKVQLKEGQTFTFDQDPTLGDETRVNLPHPEIFKALDKGHRLLLDDGKIVVRCVESSPTKIVTRVEVPGPLSDHKGFNVPDVVIPLAALTPKDRKDLDFALKEKADWVALSFVQRVEDVIEAKELIKGRAPLLVKLEKPAAIENLESILAATDAVMVARGDLGVECLPESVPPTQKRIVERSRQLGKPVVVATAMLESMIKAPAPTRAEVSDVANAIYEGADGIMLSAESAAGDWPHEAVNMMHRIASYVENAPGYIERVRFTPTPAEPTTVDALAENASKTAETVGAKAIIVFTETGKTAQRVSRARPVAPILSLTPDAEVARRLGLVWGAQPVQVSTVKTLDEAKKLAAETAKKYGFAKAGDKLVVVAGEPFGKAGTTNIVDVIEA

SEQ ID NO: 25313 - protein, 194 aa, Shigella boydii
MIAIGGSIGTGLFVASGATISQAGPGGALLSYMLIGLMVYFLMTSLGELAAYMPVSGSFATYGQNYVEEGFGFALGWNYWYNWAVTIAVDLVAAQLVMSWWFPDTPGWIWSALFLGVIFLLNYISVRGFGEAEYWFSLIKVTTVIVFIIVGVLMIIGIFKGAQPAGWSNWTIGEAPFAGGFAAMIGVAMIVGFS

SEQ ID NO: 25314 - protein, 396 aa, Haemophilus somnus 2336
MFENINAAPADPILGLGEAFKSEMRANKINLGIGVYKDANGNTPIMKAVKEAENRLFELETTKNYLTIDGIAEFNSYTKELLFGTNSKIIKQGRAKTVQSLGGTGALRIAAEFIKRQTTSQNVWISSPTWPNHNAIFNAVGMTIREYRYYDAEKKALDWDNLIADLSNASEGDVVLLHGCCHNPTGIDPTPEQWKILAEMSEKNGWLPLFDFAYQGLANGLEEDAIGLRTFAENHKELLVASSYSKNFGLYNERVGAFTLVAETEEISAIALTQVKSIIRTLYSNPASHGATAVSIILGDDLLRQQWESELTEMRNRIKRMRYQFVELLKEYGAKQDFSFIIEQNGMFSFSGLNAEQVDRLKEEFAIYAVRSGRINLAGVTEDNIRYLCESIVKVL

SEQ ID NO: 25315 - protein, 362 aa, Pinus caribaea var. hondurensis
SDSGKDAGRLSAAWALYKAQEDLVKVAFQFGVKLTMFHGRGGTVGRGGGPTHLAILSQPPDTIHGSFRVTIQGEVIEQSFGEEHLCFRTLQRFTAATLEHGMRPPIAPKPEWRALMDEIAVVATKEYRSIVFQNPRFVEYFRSATPELEYGRMNIGSRPSKRKPSGGIESLRAIPWIFAWTQTRFHLPVWLGFGGAFKHVMEKDPRNLHTLQQMYNEWPFFWGTIDLIEMVFAKGDPGIAALYDKLLVSDDLWAIGGQLRANYVETKDLLLQVAGHSDLLEGNPYLKQRLKLRDSYITTLNVCQAYTLKRIRDPHVHVNLRPHLSKESSTKPAAELVKLNPTSEYAPGLEDTLILTMKGIAA

SEQ ID NO: 25316 - protein, 413 aa, Yersinia pestis biovar Medievalis str. 91001
MQLPILEITEMSLPCNKHPFYQQLEQQLDTTRTEGLYKNERVITSAQQANIAVADGSRVINFCANNYLGLANHPKLIAAAKAGMDSHGFGMASVRFICGTQDIHKELEHKLASFLGMEDAILYSSCFDANGGLFETLLGPEDAIISDALNHASIIDGVRLCKAKRYRYANNDMTELEAQLKQAKAEGARHIMIATDGVFSMDGVIANLKRVCDLADEYQALVMVDDSHAVGVIGANGRGTHEYCEVMDRVDIITGTLGKALGGASGGYTAGRKELVEWLRQRSRPYLFSNSLAPAIVAASIEVLSLLEEGGALRDRIWANARLFREKMSAAGFTLAGADHAIIPVMLGEAKLAQDFANALLKEGIYVTGFFFPVVPKGQARIRTQMSAGHTTEQVERAIEAFVRIGKQLNVIA

SEQ ID NO: 25317 - protein, 311 aa, Exiguobacterium sp. 255-15
MKIYSLGEALIDLIPLDADNVTFQKNPGGAPANVAVGLARLGADSYFLGSVGDDSMGHFLKDTLHHYGVKTDHLVFDPEHKTGLVLVTNAADGERSFEFINSYRADMSFHEKDIPDSLAEADLLHIGSISLISGDAVEATRRAIEVAKSNNVPISYDPNLRESLWSDLDAARSTIRSVLPDAQIVKLAEEELTFLTGQTNLDEGAAELLAEYPIRLLAVTRGAEGSLLYTDRSMAEIQAISVDAIDTTGAGDAFMSGLLHQCAIRSFSFDWDETELQDIGRFAAISGGLAASVKGAMAALPTLDEVSRRLT

SEQ ID NO: 25318 - protein, 269 aa, Haemophilus somnus 2336
MGYFEQKFLQLQKQKQGAFVPFVTLCDPNFDRSFEIICTLVDNGADALELGFPFSDPLLDGSVIQAANHRALNAGCSTKESFQLIAKVRSKYPDIPISLLLCANLIYAQTLDGFYQRCAEVGVDAVLVADIPLLASEPYIQSAQKYDIQPVFICPPNADETTLKAVAEKSKGYIYLVSRAGVTSAENQQSAKNLANLIKGLKKYGSAPILQGFGIAQPQQVKDVLKSGVAGAISGSAIVQIIEQNLTDREKCLSELAEFVQKMKQATLL

SEQ ID NO: 25319 - protein, 364 aa, Zamia dressleri
SDSGKDAGRLSAAWQLYKAQEELIKVAKQFGVKLTMFHGRGGTVGRGGGPTHLAILSQPPDTIHGSLRVTVQGEVIEQSFGEEHLCFRTLQRFTAATLEHGMHPPVSPKQEWRELMDEMAVVATKEYRSIVFQNKRFVEYFRLATPETEYGRMNIGSRPSKRKPSGGIESLRAIPWIFAWTQTRFHLPVWLGFGAAFRHVLEKDIRNLHMLQQMYNEWPVFRVTIDLVEMVFAEGDPGIAALYDKLLVSEDLWLLGSQLRSNFAETKDLLLKVAGHRDLLEGDPYLKQRLRLRDSYITTLNVCQAYTLKRIRDPNFHCNLRPHLSKETMSSSKPAADLVKLNPTSEYAPGLEDTLILTMKGIAA

SEQ ID NO: 25320 - protein, 426 aa, Bdellovibrio bacteriovorus HD100
MHKVTSEELFQRALKVAPGGVHSPVRSFKGLDRAPVFFKKAEGAYLTSVEDKKYIDFCQSFGPLILGHLDAEVKEEVHRMVDTAWTFGATEIYSLELAEWITSTLPFMEKLRFVSSGTEAVMSALRVARAATGRTKILKFEGCYHGHVDNLLVKAGSGLAGTAASSSAGIPAEVAAHTVVAPLDDEAKLAEVFAAQGKDIAAVIIEPLPANYGLLVQRPEFLKKVAELCEKNGSLLIFDEVISGFRVGLGGMVEKTGIRPDLVTYGKIIGGGFPVGCYGGKAELMNMVAPSGDVYQAGTLSANPIGMRAGLTTLKKMQRVDGWNVLEQRTKKFTDAIKAGFVKKGVNLEISQVASLFWIHGPTASPIRSIDHIPANQGGNFKNLFLKALDKGVYLAPNAYEVGFVSLAHSDELLEQAAQIIVDAAE

SEQ ID NO: 25321 - protein, 237 aa, Taxus sp. HHG-2001
SDSGKDAGRLSAAWQLYKAQEDLIKVAKQFGVKLTMFHGRGGTVGRGGGPTHLAILSQPPDTIHGSLRVTVQGEVIEQSFGEEHLCFRTLQRFTAATLEHGMHPPDSPKPEWRALLDEMAVVATEEYRSVVFKEPRFVEYFRLATPELEYGRMNIGSRPSKRKPSGGIESLRAIPWIFAWTQTRFHLPVWLGFGAAFKHIIKKDIRNLHMLQEMYNAWPFFRVTIDLVEMVFAKGDP

SEQ ID NO: 25322 - protein, 272 aa, Burkholderia vietnamiensis G4
MSNRIQQTFAALAEQGRKGLIPFITAGDPDPAKTVEFMHALAAGGADVIELGVPFSDPMADGPVIQRSSERALARGVTLKTVLADVKRFRETDQKTPVVLMGYANPIERMGVDAFATEAHAAGVDGVLVVDYPPEEAGVFAEKMRAAQIDPIFLLAPTSTDERIADVGKIASGYVYYVSLKGVTGAGNLDVSSIAGKIPAIKSRVPVPVGVGFGIRDAETARAVAEVSDAVVIGSRLVQLLESAAPEGAAAALKSFIAELRAALDGAGKTAR

SEQ ID NO: 25323 - protein, 392 aa, Pseudomonas fluorescens PfO-1
MSFDLAARLAARRADNLYRQRPLLESPQGPQVVVDGQPLLAFCNNDYLGLANHPQVIEAWRAGASKWGVGGGASHLVIGHSGPHHELEEALADLTGRPRALLFTTGYMANLGAVTALVGQGDTVLEDRLNHASLLDAGLLSGARFNRYLHNDADSLAKRLEKATGNTLVVTDGVFSMDGDLADLPALARETKAKGAWLMVDDAHGFGPLGANGGGIVEHFGLSQEDVPVLVGTLGKAFGTAGAFVAGSEELIESLIQFARPYIYTTSQPPALACATLKSLELLRSEHWRREHLQTLIRQFRHGAEQIGLELMDSFTPIQPILIGDAGRAVRLSQMLRERGLMVTAIRPPTVPAGSARLRVTLTAAHSEAQVQLLLEGLADCFAQLKSEPSHA

SEQ ID NO: 25324 - protein, 485 aa, Ralstonia eutropha JMP134
MAAILILGPAVAEVGHAQAAASNYNLPDFTDLVEKASPAVVNIRTTERIRSRGGSGGDDDEMAEFFRRFFGVPMPGAPTPGAPNAPRRGQPPQGEEQSRGVGSGFIISQDGYVMTNAHVVADAETIYVTLPDKREFKAKLIGSDKRTDVALIKIEATGLPKLVLGDSDKVRAGEWVLAIGSPFGLDNSVTAGIVSAKGRDTGDYLPFIQTDVAVNPGNSGGPLINLRGEVIGINSQIYSRSGGYMGISFAIPIDEAMRVTEQLKTSGRVTRGRIAVAIGDVTKEVADSLGLGRARGALVGSVEPGGPAEKAGIEPGDIILKFNGREIEKASDLPRMVGDTKPGTRVPIQLWRKGATRDVSITVTELEPEARAKARNAPSSKDDASAQAPKPNALGLIVNDIPDARLKELKVRSGVEVEVADGPAMRAGIRPGDIILRLGDTDVTGARQFNDLVKGLDKSRIAAVFVRRGDATQVLTLRPGATAAR

SEQ ID NO: 25325 - protein, 324 aa, Nostoc punctiforme PCC 73102
MQRQIITTAFLLVSLIFPIKVLAKDYDNIYVFGDSLSDIGNVFNATNGIIPPSPTYYDGHFSNGPNWVDYLASDLGLTSNLKNNFAFGGATTGIENIGLATLPGLQQQINNFVAAETADPNALYIIWAGTNDYLSYFFDGEPNPSNTVANLSTALTSLVADGAKDIMVVNLPDLGKSPFANFTSERSNLFSTFSSEHNSSLNTELKTLSQQLSPDINIIELNVNSLFDRIVAAPEEFDFTNVTNSCISKDLSVVPIDVPTQQVFCNPEEFLFWDEVHPTTTAHKLIGELAFSALQPVPEASAGLGILAYSILGAVSLLKRKITN

SEQ ID NO: 25326 - protein, 113 aa, Streptococcus pneumoniae
TYVFTHDSIAVGEDGPTHEPVEHLAGLRAMPNLNVFRPADARETQAAWYLAVTSEKTPTALVLTRQNLIVEDGTDFDKVAKGAYVVYENAADFDTILIATGSEVNLAVSAAKE

SEQ ID NO: 25327 - protein, 428 aa, Staphylococcus aureus subsp. aureus MRSA252
MRYTKSEEAMKVAETLMPGGVNSPVRAFKSVDTPAIFMDHGKGSKIYDIDGNEYIDYVLSWGPLILGHRDPQVISHLHEAIDKGTSFGASTLLENKLAQLVIDRVPSIEKVRMVSSGTEATLDTLRLARGYTGRNKIVKFEGCYHGHSDSLLIKAGSGVATLGLPDSPGVPEGIAKNTITVPYNDLDALKIAFEKFGDDIAGVIVEPVAGNMGVVPPIEGFLQGLRDITTEYGALLIFDEVMTGFRVGYHCAQGHFGVTPDLTCLGKVIGGGLPVGAFGGKKEIMDHIAPLGNIYQAGTLSGNPLAMTSGYETLSQLTPETYEYFNMLGDILEDGLKRVFAKHNVPITVNRAGSMIGYFLNEGPVTNFEQANKSDLKLFAEMYREMAKEGVFLPPSQFEGTFLSTAHTKEDIEKTIQAFDTALSRIVK

SEQ ID NO: 25328 - protein, 392 aa, Zea mays
MALRLHDVALCLSPPLAARRRSGGSFVAVASMTSAAVSTRVENKKPFAPPREVHVQVTHSMPSHKIEIFKSLDDWARDNILTHLKPVEKCWQPQDFLPDPASEGFHDEVKELRERAKEIPDDYFVCLVGDMITEEALPTYQTMLNTLDGVRDETGASPTAWAVWTRAWTAEENRHGDLLNKYMYLTGRVDMRQIEKTIQYLIGSGMDPRTENNPYLGFIYTSFQERATFISHGNTARHAKDFGDLKLAQICGIIASDEKRHETAYTKIVEKLFEIDPDGTVVALADMMRKKISMPAHLMFDGQDDKLFEHFSMVAQRLGVYTARDYADILEFLVDRWKVVNLTGLSGEGNKAQDYLCTLASRIRRLEERAQSRAKKAGTLPFSWVYGRDVQL

SEQ ID NO: 25329 - protein, 190 aa, Cichorium intybus
  misc_feature (161)..(161): Xaa can be any naturally occurring amino acid
  unsure (1)..(190): unsure at all Xaa locations
ARGFLKDVKRIVIKVGTAVVTREDGRLALGRLGALCEQIQILNSQGFEVILVSSGAVGAGRQRLRYRKLVHSSFADLQKPQVELDGKACAAVGQNGLMALYDTLFSQLDVTSAQLLVTDNDFRSPEFRKQLTETVDSLLSYKVIPVFNENDAVSTRRAPYXDSSGIFWDNDSLAALLALELKADLLVLLN

SEQ ID NO: 25330 - protein, 546 aa, Bacillus cereus
MKKYRVDVQGMTCTGCEEHVAVALENMGATGIEVDFRRGEAVFELPNALGVETAKKAISDAKYQPGKAEEVQSQEMVQLGNEGDYDYIIIGSGGAAFSSAIEAVKYGAKVAMIERGTIGGTCVNIGCVPSKTLLRAGEINHLAKNNPFVGLHTSAGEVDLAPLIKQKNELVTELRNSKYVDLIDDYGFELIEGEAKFVDEKTVEVNGAPISAKRFLIATGASPAKPNIPGLNEVDYLTSTSLLELKKVPKRLVVIGSGYIGMELGQLFHNLGSEVTLIQRSERLLKEYDPEISESVEKSLVEQGINLVKGATYERIEQNGDIKKVHVEVNGKKRIIEADQLLVATGRTPNTATLNLRAAGVEIGSRGEIIIDDYSRTTNTRIYAAGDVTLGPQFVYVAAYQGGVAAPNAIGGLNKKLNLEVVPGVTFTAPAIATVGLTEQQAKENGYEVKTSVLPLDAVPRALVNRETTGVFKLVADSKTMKVLGAHVVAENAGDVIYAATLAVKFGLTVDDIRETLAPYLTMAEGLKLAALTFDKDISKLSCCAG

SEQ ID NO: 25331 - protein, 392 aa, Zea mays
MALRLHDVALCLSPPLAARRRSGGSFVAVASMTSAAVSTRVENKKPFAPPREVHVQVTHSMPSHKIEIFKSLDDWARDNILTHLKPVEKCWQPQDFLPDPASEGFHDEVKELRERAKEIPDDYFVCLVGDMITEEALPTYQTMLNTLDGVRDETGASPTAWAVWTRAWTAEENRHGDLLNKYMYLTGRVDMRQIEKTIQYLIGSGMDPRTENNPYLGFIYTSFQERATFISHGNTARHAKDFGDLKLAQICGIIASDEKRHETAYTKIVEKLFEIDPDGTVVALADMMRKKISMPAHLMFDGQDDKLFEHFSMVAQRLGVYTARDYADILEFLVDRWKVANLTGLSGEGNKAQDYLCTLASRIRRLEERAQSRAKKAGTLPFSWVYGRDVQL

SEQ ID NO: 25332 - protein, 182 aa, Cichorium intybus
  misc_feature (169)..(169): Xaa can be any naturally occurring amino acid
  unsure (1)..(182): unsure at all Xaa locations
MDPYKQRPSSAYNSPFWTTNAGLPVYNNTASLTVGNRGPILLEDYHLIEKLANFTRERIPERIVHARGASAKGFFEVTHDITHLTCADFLRAPGVQTPTIVRFSTVIHERGSPETIRDPRGFATKFYTREGNFDIVGNNFPVFFTRDAMAFPDVIHAFKPNPKSHIQEXWRILDFLSHHPES

SEQ ID NO: 25333 - protein, 113 aa, Streptococcus pneumoniae
TYVFTHDSIAVGEDGPTHEPVEHLAGLRAMPNLNVFRPADARETQAAWYLAVTSEKTPTALVLTRQNLTVEDGTDFDKVAKGAYVVYENAADFDTILIATGSEVNLAVAAAKE

SEQ ID NO: 25334 - protein, 699 aa, Catharanthus roseus
MTDYRLQPKMNLWGTTTNTAASPIITSDDNSSMMEAFMTSSDPISLWPPSMSVNHHHPPTPTSSAVTTAVDSAKSMPAQPAFFNQENLQQRLQTLIDGARESWTYAIFWQSSVVEFAGPSVLGWGDGYYKGEEDKGKRKNSSSASSFAEQEHRKKVLRELNSLIAGPQGTADDAVDEEVTDTEWFFLISMTQSFVSGSGLPGQALYNSNPVWVTGAGRLAVSHCDRARQAQSFGLQTLVCIPSANGVVELGSTELIFQSSDLMNKVRILFNFNNIDLGSSSGPWPENDPSSLWLTDPSPSGVGVKEGVNTNNNTSVQGNSIPSGNKQQLVFGNNDNHPTTSTLTDHPGAGAVNSYNNSSQNAQQPQGSFFTRELNFSEYGFERSSVKNGNCKPESGEILNFGGESVTKKNSVSGNGNLFSVQSQFGAGEENKNKKRPSPVSRGSNDEGMLSFTSGVVLPSTGVVKSSGGGGGGDSDHSDLEASVVKEAESSRVVDPEKRPRKRGRKPANGREEPLNHVEAERQRREKLNQRFYALRAVVPNVSKMDKASLLGDAISYINELKAKLQTTETDKDELKNQLDSLKKELASKESRLLSSPDQDLKSSNKQSVGNLDMDIDVKIIGREAMIRVQSSKNNHPAARVMGALKDLDLELLHASVSVVNDLMIQQNTVRMGSRFYTQEQLRIALTSRIAGNSMRLLV

SEQ ID NO: 25335 - protein, 418 aa, Moorella thermoacetica ATCC 39073
MNVALEVQTKGQRAREAARILAGLGTSKKNEALLAMARALEEEQEAILAANARDMVAGKEKGLSRALLDRLLLNEKRIRDMAAGLRELAALPDPVGEVTSMWTRPNGLQIGRVRVPLGVIGIIYEARPNVTVDAAGLCLKTGNAVILRGGSEAFYSNQALTRVISRAATAAGAPEGAIQLIETTDREAVNLLLRANDYLDVLIPRGGAGLIRTVVENATVPVIETGVGNCHVYVDAEADLDMAQRIVINAKTQRPGVCNAMETLLVHEKVADSFLPSLAAALKEKGVTIRGCERTRAIIPWAEVATETDWATEYLDLILAIRVVDSLESALEHIHRYGTKHSEAIVTTNYQTAREFLARVDAAAVYVNASTRFTDGYEFGFGAEIGISTQKLHARGPMGPEQLTTFKYIIFGSGQIRQ

SEQ ID NO: 25336 - protein, 190 aa, Triticum aestivum
GIAVNCMNSLRGVVPGGARRRGAFAASLRRLEPRVVTVVEEEADLVATDPDASDEGGDTEAAFLKVFGEGLRFFSAYMDSLEESFPKTSNERLALERGAGRAIVDLVSCPASESMERRETAAAWARRLRSAGFSPVPFSEDVADDVRSLLRRYREGWSMREAGTDDSAAGAGVFLAWKEQPLVWASAWRP

SEQ ID NO: 25337 - protein, 319 aa, Triticum aestivum
  misc_feature (244)..(244): Xaa can be any naturally occurring amino acid
  misc_feature (261)..(261): Xaa can be any naturally occurring amino acid
  unsure (1)..(319): unsure at all Xaa locations
MVKAIRVHELGGPEALRWEEVEVGEPGDGEIRIRNTAIGVNFIDVYFRKGVYPAPLPFTPGMEAVGVVTAVGPGLTGRKVGDVVAYAGKPMGSYAEEQIIPADVAVPVPPSVNHKTAAAIMLKGMTVHMLVRRIFKVETGHTVLVHAAAGGVGSLLCQWANALGATVIGTVSNEEKASHAHFDGCHHVIIYTKEDVATRVKEITGGKGVNVVYDSVGKDTYKASLGRAWRPRGSWVSFGQSSGXSPTRSPWATWAAKSLFXLTRPSVMHYTGTPRKSCFKAGGQGFWANGAQGGWFNTPGESNTYPGGPEGGPGAPRRN

SEQ ID NO: 25338 - protein, 252 aa, Brassica napus
  misc_feature (175)..(175): Xaa can be any naturally occurring amino acid
  misc_feature (196)..(196): Xaa can be any naturally occurring amino acid
  misc_feature (199)..(199): Xaa can be any naturally occurring amino acid
  misc_feature (225)..(225): Xaa can be any naturally occurring amino acid
  misc_feature (231)..(231): Xaa can be any naturally occurring amino acid
  unsure (1)..(252): unsure at all Xaa locations
MNIIALSKRLYSPPFSGYRSLHGGINDALSKTVFSGPIMGRSVHHLRKAGSFVVPRVLFVSRNLSTNVSSSKQPAFLRWYLKKVESHPFITKSVTTSLIYMAADLTSQMITMKPSGSYDLIRTARMASFGLIFLGPSQHLWFSYLSRILPKRDVLTTVKKIMMGQALFGPFSNTXFYSYNAALQGENFEEILARLXRDXLPTLKNGLLYWPVCDFVTFKYVPVHXQPLMNXSCAYIWTIYLTYMANQTKADS

SEQ ID NO: 25339 - protein, 219 aa, Candida glabrata CBS138
MTKDTIFTLTGKCALDNILDANRQWAQAMHRSQPQLFPTNGQGQDPHTLFIGCSDSRYNEDCLGVLPGEIFTLKTVANICHTDDHSLLATLEFAILNLKVNRIILCGHTDCGGIKTCLLGRESIKESCPHLYEHLDDIEDLVESHESELNQLDNICSKSKLMSHRNVERQLQRLLQIPVVQDALRNSNQDHEFNIFGLVYNVDSGLVDVVREVYGNQQK

SEQ ID NO: 25340 - protein, 444 aa, Triticum aestivum
MREILHIQGGQCGNQIGAKFWEVICDEHGIDGTGRYAGDSDLQLERINVYYNEASGGRFVPRAVLMDLEPGTMDSVRSGPFGQIFRPDNFVFGQSGAGNNWAKGHYTEGAELIDSVLDVVRKEAENCDCLQGFQVCHSLGGGTGSGMGTLLISKIREEYPDRMMLTFSVFPSPKVSDTVVEPYNATLSVHQLVENADECMVLDNEALYDICFRTLKLATPSFGDLNHLISATMSGVTCCLRFPGQLNSDLRKLAVNLIPFPRLHFFMVGFAPLTSRGSQMYRALTVPELTQQMWDAKNMMCAADPRHGRYLTASACFRGKMSTKEVDEQMLNVQNKNSSYFVEWIPNNVKSSVCDMPPRGLKMAGTFVGNSTSIQEMFRRVSEQFTAMFRRKAFLHWYTGEGMDEMEFTEAESNMNDLVAEYQQYQDATAEEEYDEEEEEERDA

SEQ ID NO: 25341 - protein, 415 aa, Vibrio harveyi
MSKRRVVVTGMGMLSPVGNTVESSWKALLEGQSGIVNIEHFDATNFSTRFAGLVKDFDCTEYMSKKDARKMDLFIQYGIAAGIQALDDSGLEITEENAARVGVAIGSGIGGLDLIEAGHSALVEKGPRKVSPFFVPSTIVNMVAGNLSIMRGLRGPNIAISTACTTGLHNIGHAARMIAYGDAEAMVAGGAEKASTPLGMAGFGAAKALSTRNDEPQKASRPWDKGRDGFVLGDGAGVMVLEEYEHAKARGAKIYAELVGFGMSGDAYHMTSPSEDGSGGALAMEAAMRDANITGTQVGYVNAHGTSTPAGDVAEIKGVKRALGEEGSKQVLVSSTKSMTGHLLGAAGSVEAIITVLSLVDQIVPPTINLDDPEEGLDIDLVPHTARKVDMEYAICNSFGFGGTNGSLVFKKIAE

SEQ ID NO: 25342 - protein, 360 aa, Streptomyces avermitilis MA-4680
MTEAILLVGGRGTRLRPLTVHTPKPMVPAAGVPFLTHQLARARAAGVDHIVLATSYLAEVFEPYFGDGSALGLHLEYVTEEEPLGTGGAIRNVASRLHSGPDEPVLIFNGDILTGLDIRALVHTHETTAADVSLHLTKVTDPRAYGLVPTDETGRVTAFLEKPQTPEEIVTDQINAGAYVFRRSVIDTIPAGRPVSVERETFPGLLSAGAHLQGMVDSTYWLDLGTPAAFVRGSADLVLGRAPSPAVPGRCGDRLVLPTASVASDAKLTGGTVVGEGAFVGEGARIFGSTLLSGAVVEPGAVITDSLLGARSRVGERSILTGAVIGDGAVIGADNELRDGVRVWCDARIPAGAVRFSSDQ

SEQ ID NO: 25343 - protein, 303 aa, Glycine max
  misc_feature (228)..(228): Xaa can be any naturally occurring amino acid
  unsure (1)..(303): unsure at all Xaa locations
QDESSGSKDKSDQKTLRRLAQNREAARKSRLRKKAYVQQLESSRLKLTQLEQELQRSRQQGIFISSTGDQAQSMSGNGAMAFDVEYARWLEEHNRQTNELRAAINSHAGDIELRTIVDNFMTQFDDIFRLKGIAAKADVFHILSGMWKTPAERCFMWIGGFRSSELLPREKFLLSIQLEPLAEQQLMGIYNLQQSSQQTEDALSQGMDALQQSLSETLANGSPSSSGXSGNVANYMGQMAMAMGKLGTLEGFLHQADNLRQQTLQQMLRILTTRQSARALLAISDYFSRLRALSSLWLARPRE

SEQ ID NO: 25344 - protein, 330 aa, Ceratopteris richardii
MSTITVPNPVPDTNEDCIALHRAFEGIGCDKEALLNVICHRDQQQRQRIRHSYNIKYEEDLLKKLKSELHGNLEKGAVLWMCNPAERDATILHEALGGLIKDYRALTEVLYLRTSAELLDIRRAYSSSFDRSLEEEIATKIGGSEQKLLLGLLREERIEDDEIDTLEVEADTEDLLSALSNTEEINISVIVRVLTTRSSSHLKDILDRFMKVYGYNFEQILENKTRGAFRVSVTVVMCCAKDSINYYAKTLYESLKGICTDASTLIRIIVTCAETNMKDIKASFSRNYEKQLHDMISSDTMRHFQTFLMLLVGVSHHENILQHLPSLSPC

SEQ ID NO: 25345 - protein, 334 aa, Ceratopteris richardii
MSTITVPNPVPDTNEDCITLHKALEDFGCDKEALLNVICHRDQQQRQRIRHSYNRKYEEDILKTLKSKLHAKLEKGAVLWMCDPAERDATILHEALRCMSKDYSALTEVLYLRTSAELLDIRRAYSSRFGRSLEEELATKIDGSEKKLLLGLLREARSEDDEIDTLQVEADTKDLLSAISNTKEVNKSVIIRVFTTRSSSHLRDVLDSFKTVHGYSFGKILKSKTHGGFRVSVRVVMHCAKNLINYYAKTLYESMKGMGTDDSTLTRIIVTCAELNMKDIKAHFSRKYQRPLHEMISLDTMGHFQTFLMLLVGVSRHEIHNGSFVKRLSSWSAS

SEQ ID NO: 25346 - protein, 504 aa, Methylococcus capsulatus str. Bath
MFIQRQTPLIREEETAMPKNVMLSALIAASILAAMGAGYVRYGGYTLVPKSDLMQPPPQTPQLPEAAARATPSLPDFAAIVRRNGPAVVNISVTGTSRVNLPEMPQFDPNDPFGEFFRRFQPQIPRGEDAPAHGLGSGFIIRPNGLILTNAHVVNGAQEVTVKLNDRREFKARIIGIDKPTDVALLKIEADGLPVVPLGDPARSGPGDWVVAIGSPFGFENSVTAGIISAKSRSLPEETYVPFIQTDVAVNPGNSGGPLFNLSGEVIGINSQIYSRTGGYQGLSFAIPIDVALKVEKQLLADGKVSRGRLGVGIQELNQSLAESFGLDRPTGALVDSVPNDGPAAKAGIKPGDVILSLNGQPIENSGQLPPLVADIKPGSEAKVGIWRNGKREEITVQVGEMPDTQQAAATGNGLAKGRLGLAVRPLSPEEQRAADVDGGVLVEASAGPAERAGIRPGDVILALNGHAVANPGELRELADRADKHVALLVQRGGTRIFVPLDLG

SEQ ID NO: 25347 - protein, 272 aa, Lactococcus lactis subsp. cremoris
MKLNNQIEIPELGLGVFQIPNEETAEVVKNGIINGYRLIDTAKIYENEEGTGQGIKEGLASTGLTREDLFVTSKLWGDNHSYKETIQSFEESLKKLDLDYLDLYLIHWPGTNYAYKEAWKAMEDLYKAGKVKAIGVSNFQKHHLEELLSYAEINPVLNQIELHPKLSQKELREFLKLHDIKVQAWSPLMQGQLLDNEMLKKIADKHGKSVAQIILRWDIQQEILVNVKSIKSERMIANRQIFDFALDQEDMEALNSLNEALRVGPNPDTFNF

SEQ ID NO: 25348 - protein, 407 aa, Gloeobacter violaceus PCC 7421
MAKLSTYLYRTVCPGAEQVCCGEHKFVSPDDSPVHALCSRLDRRSACASLGFSYPVAGERRMAGILRLVSDSAFAGESVPLSQAGSPEDGELLDAYSNAVTRAAETVSRSVVNIDVHKSTRGRRGNQQTQGNGSGFLFTPDGYILTNSHVVHGAGEVGVTLQDGRRMAATPVGDDPDSDLAVIRIDGANLYPVKLGDSQKVRVGQLAIAIGSPYGFQYTVTAGVVSALGRSLRSGSGRLIDNIVQTDAALNPGNSGGPLVNSRGEVIGVNSAVILPAQGICFAIAVNTAKFVAGQLINGGRVRRSFIGVGGQTVPLPRFVMRFHNLAAETGVLVVSVEADSPASQAGLREGDVIVELAGQAVSDIDALHRALSDKQVGVRSSLTVLRRNDKLSLEIVPAESPQRSGR

SEQ ID NO: 25349 - protein, 191 aa, Shigella boydii
KARHLTMIAIGGSIGTGLFVASGATISQAGPGGALLSYILIGLMVYFLMTSLGELAAYMPVSGSFATYGQNYVEEGFGFALGWNYWYNWAVTIAVDLVAAQLVMSWWFPDTPGWIWSALFLGIIFLLNYISVRGFGEAEYWFSLIKVATVIIFIVVGVMMIIGIFKGAQPAGWSNWTIGEAPFAGGFAAMI

SEQ ID NO: 25350 - protein, 496 aa, Crocosphaera watsonii WH 8501
MVSTRTKKDVPIWQPLKVIARSFSPYWIACIPLAAIITIVWNKAVVAESVELITAEGNSEAIAQLQGTLNAIWVLIAAILVIFMNAGFGMLETGFCRQKNAVNILSKNLIVFALATLAYWAIGYSLMFGGPENPFIGFGGWFLSGEPATYGLDPFPAGLPISVAFLFQAAFAGTAATIVSGAVAERIKFTDFIIFSLLLVGISYPITGHWVWTGNGWLGSIGFSDFAGSTVVHSVGGWAALMGAAILGPRMGKYVEGRPQAIPGHNMSIATLGCLILWIGWFGFNPGSQLAADEAVPYIAVTTNLAAAAGGVAATFVAWFKDGKPDLSMIINGILAGLVGITAGCDGVSYFGAVIIGAVAGVIVVYSVSMIDSLLKIDDPVGAVSVHLVNGIWGTLAVGLFNTESGLFYGGGFAQLGSQIVGIVAIGAFTAIFSGIVWTVLKSTMGIRVSPEEELEGLDVGEHGMEAYAGFLKETDTFSGSGSSTADEDVTTGAGI

SEQ ID NO: 25351 - protein, 508 aa, Bifidobacterium animalis subsp. lactis
MPKSKHTTVGRVPQDPGRYSLVAKETTSTEKAAKKKASESAHDEAAVEEKGKTTRRRASSKASSAKKGSAGKTTKRATARKKKDAAESESTPARKTRAASKTGAKKAISKSEEIDDEDMIGEDVIDEEDLDLDEDLDADENDDDLEDEESEDEPEPEEDDDEEPQAPKEPKEKGAFVVSDNDEDDEALLANPGVNPKRRVVTTGATADPVKDYLKQIGRVSLLNAEQEVDLSERIEAGLYAQHLLDTEGDTMEFRRKRELKWAAADGKKAKDHLLEANLRLVVSLAKRYTGRGMLFLDLIQEGNLGLIRAVEKFDWKKGFKFSTYATWWIRQAITRAMADQARTIRVPVHMVEVINKLSRVQRQMLQDLGREPTPDELARELDMPVEKVQEVQKYGREPISLHTPLGEDGDSEFGDLIEDTDAIAPSEAVAFSLLQEQFRQVLETLSPREAGVIKMRYGLEDGQPKTLDDIGRVYGVTRERIRQIESKTMSKLRHPSRSQTLRDFLDQ

SEQ ID NO: 25352 - protein, 806 aa, Pisum sativum
MATDRLTRVHSLRERLDETLTANRNEILALLSRIEAKGKGILQHHQVIAEFEEIPEENRQKLTDGAFGEVLRSTQEAIVLPPWVALAVRPRPGVWEYLRVNVHALVVENLQPAEFLKFKEELVDGSANGNFVLELDFEPFTASFPRPTLNKSIGNGVQFLNRHLSAKLFHDKESLHPLLEFLRLHSYKGKTLMLNDRIQNPDSLQHVLRKAEEYLGTVAPDTPYSEFEHRFQEIGLERGWGDTAERVLESIQLLLDLLEAPDPCTLETFLDRIPMVFNVVILSPHGYFAQDDVLGYPDTGGQVVYILDQVRALESEMLNRIKKQGLDIVPRILIITRLLPDAVGTTCGQRLEKVYGTEHCHILRVPFRDQKGIVRKWISRFEVWPYLETYTEDVAHELAKELQGKPDLIVGNYSDGNIVASLLAHKLGVTQCTIAHALEKTKYPESDIYWKKFEEKYHFSCQFTADLFAMNHTDFIITSTFQEIAGSKDTVGQYESHTAFTLPGLYRVVHGIDVFDPKFNIVSPGADQTIYFPYTETSRRLTSFYPEIEKLLYSTGGNEEHICVLKDRNKPIIFTMARLDRVKNITGLVEWYGKNAKLRELVNLVVVAGDRRKESKDLEEKAEMKKMYEHIETYKLNGQFRWISSQMNRVRNGELYRVICDTKGAFVQPAVYEAFGLTVVEAMATGLPTFATLNGGPAEIIVHGKSGFHIDPYHGDRAADLLVEFFEKVKTDPSHWDKISQGGLQRIEEKYTWQIYSQRLLTLTGVYGFWKHVSNLDRLESRRYLEMFYALKYRKLAESVPLAVEE

SEQ ID NO: 25353 - protein, 364 aa, Vanilla planifolia
SDSGKDAGRLSAAWQVYKTQEELVQVAKQFGVKLTMFHGRGGTVGRGGGPTHLAILSQPPDTINGSLRVTVQGEVIEQCFGEERLCFRTLQRYTAATLEHGMNPPISPKPEWRSLLDEMAVIATNEYRSIVFQEPRFVEYFRLATPELEYGRMNIGSRPSKRKPSGGIESLRAIPWIFAWTQTRFHLPVWLGFGAAFKHVIAKDNKNLHTLREMYNGWPFFRVTIDLIEMVFAKGNPGIASLYDKLLVSSELLPFGVQLRENYEETKRLLLQVAGHKDLLEGDPYLKQRLRLRDPYITTLNVCQAYTLKRIRDPGYHVTERPHLAKETTESIKSAAELVKLNPTSEYGPGLEDTLILTMKGIAA

SEQ ID NO: 25354 - protein, 359 aa, Nocardia farcinica IFM 10152
MAGQQGTDAVILVGGQGTRLRPLTLSAPKPMLPTAGLPFLTHLLARIAEAGITHVVLGTAFKAEVFEEHFGDGSDLGLEIEYVTESEPLGTGGGIRNVLPKLRHDTVMVFNGDVLGGTDLGAVLDTHHSTGADVTLHLVRVSDPRAFGCVPTDEEGRVTAFLEKTQDPPTDQINAGCYVFRREYIEKIPAGRPVSVEREVFPALLAEGARVQGHVDTSYWRDMGTPEDFVRGSADLVRGIAPSPALPGQRGESLVHPGAGVAPGALLIGGTVVGRGAEIGAGARLDGAVIFDGACVEAGATVERSIIGFGARIGPRALVRDAVIGDGANVGARCELLRGARIWPGVEIPDGGIRFSTDV

SEQ ID NO: 25355 - protein, 204 aa, Arabidopsis thaliana
MNILNRLGLGSSGQTNMDPSPIAQGNDDDTPAPGNQFAQFGAGCFWGVELAFQRVPGVTQTEAGYTQGTVDNPSYGDVCSGTTGHSEVVRVQYDLNDCTYESLLDLFWSRHDPTTLNRQVNDVGTHYRSGIYFYTPEQEKLARESLERHQHQQQMERKIMTEILPAKKFYRAEEHHQQYLSKGGRFGQGQSTAKGCNDPIRCYG

SEQ ID NO: 25356 - protein, 989 aa, Nostoc punctiforme PCC 73102
MVLQVQTSSYEAKTQEIAKQLLAATQENRSFFSSLRDQMRWDDKLLAWAMSNPGLRVQLFRFIDTLPALHSKSEIASHLQEYLGDESVELPAALKGMLNFANPDSMPGQVAATTVGTAVETLAHKYISGENIKQVIKTVERLRKEKMAFTIDLLGEAVITEAEAQSYLERYLELMQQLVEASKNWAAIPAIDEADGEPIPKVQVSVKLTAFYSQFDPLDAKGSEERVSDRIRILLRRAKELGAAVHFDMEQYAYKDITLSILKKLLLEEEFRQRTDIGMTIQAYLRDSEQDAKNVISWLKERGYPLTIRLVKGAYWDQETIKASQKHWKQPVYNDKAATDANFETITQLLLENHQYVYSAIGSHNVRSHSRAIAIAESLNVPRRRFELQVLYGMGDKVAKALVDRGYRVRVYCPYGELLPGMAYLIRRLLENTANSSFLRQNLENRPIEELLAPPIVKEGKSLTPNSHFLGAADTDYAVEEIRTKAAQAFQSVRQQLGKTYLPLINGEYVNTPEFVDSLNPSNFSEVVGKVGLISVEQAEQAMQAAKAAFPGWRKTPAKQRADILRKAGDLMELRRAELSAWIVLEVGKPVKEADGEVSEAIDFCRYYADEIERLDKGVNYDLAGETNRYIYHPRGIVVVISPWNFPLAIACGMTVAALVSGNCTLLKPAETSSVIAAKLTEILIDAGFPKGVFQYVPGKGSQVGAYLVNHPDTHVIAFTGSQEVGCRIYAEAAILKPGQKHMKRVIAEMGGKNAIIVDESADLDQAVVGVVQSAFGYSGQKCSAASRVIVLEPIYEAFVQRLVEATKSLNIGEAELPSTQVGPVIDANARDRIQKYIEIGRQSAEVALELPAPKQGYFIGPVIFSEVSPNAVISQEEIFGPVLAVIRVKDFQEALAVANGTNYALTGGLYSRTPSHIQQAQTEFEVGNLYINRNITGAIVGRQPFGGFKLSGVGSKAGGPDYLLQFLEPRAVTENIQRQGFAPIEGAD

SEQ ID NO: 25357 - protein, 364 aa, Vanilla planifolia
SDSGKDAGRLSAAWQLYKAQEDLIKVAKKYGVKLTMFHGRGGTVGRGGGPTHLAILSQPPDTIHGSLRVTVQGEVIEQSFGEEHLCFRTLQRFTAATLEHGMHPPISPKPEWRTLLDEMAVVATNEYRSIVFQEPRLVEYFRLATPELEYGRMNIGSRPSQQKPSGGIESLRAIPWIFAWTQTRFHLPVWLGFGTAFKHVVQKDIKNLRILQEMYNEWPFFRVTIDLVEMVFAKGNPGIASLYDKLLVSEDLWSFAERLRANYQETKDLLLQVAGHKDLLEGDPYLKQRLRLRDSYITTLNVCQAYTLKRIRDPNFHVKVRPHISKEISDASKPAAELVKLNPTSEYAPGLEDTLILTMKGIAA

SEQ ID NO: 25358 - protein, 397 aa, Ralstonia eutropha JMP134
MSPVGNTVAEGWANLVAGKSGIATVTKFDHSALSVHFAGEVKGFNAEDYIPAKEARNMDTFIHYGIAAGAQALKDSGYEVTDANAERIGVLVGSGIGGLPMIEDTHATLTERGPRRISPFFVPGSIINMISGHLSIMHGLKGPNLAAVTACTTGLHSIGLAARLIQAGDADAMLAGGAESTVSPLGIGGFAAARALSTRNDDPAAASRPWDKDRDGFVLGEGAGVMMLEEYESAKARGARIYAELVGFGMSGDAFHMTAPNMDGPRRCMVNALRDAGINADEVQYLNAHGTSTPLGDKNETDAIKAAFGDHAYKMVVNSTKSMTGHLLGGAGGLESVFTVLALHNQVSPPTINIDNQDPECDLDYVANTAREMKIDVAVKNNFGFGGTNGTLVFRRA

SEQ ID NO: 25359 - protein, 364 aa, Vanilla planifolia
SDSGKDAGRLSAAWQLYKAQEDLIKVAKKYGVKLTMFHGRGGTVGRGGGPTHLAILSQPPDTIHGSLRVTVQGEVIEQSFGEEHLCFRTLQRFTAATLEHGMHPPISPKPEWRTLLDEMAVVATNEYRSIVFQEPRFVEYFRLATPELEYGRMNIGSRPSKRKPSGGIESLRAIPWIFAWTQTRFHLPVWLGFGTAFKHVVQKDIKNLRILQEMYNEWPFFRVTIDLVEMVFAKGNPGIASLYDKLLVSEDLWSFAERLRANYQETKDLLLQVAGHKDLLEGDPYLKQRLRLRDSYITTLNVCQAYTLKRIRDPNFHVKVRPHISKEISDASKPAAELVKLNPTSEYAPGLEDTLILTMKGIAA

SEQ ID NO: 25360 - protein, 363 aa, Tillandsia usneoides
SDSGKDAGRLSAAWQLYKAQEELVKVAKKYGVKLTMFHGRGGTVGRGGGPTHLAILSQPPETINGSFRVTVQGEVIEQSFGEERLCFRTLQRFTAATLEHGMLPPISPKPEWRAILDEIAVVATEEYRSVVFKEPRFVEYFRLATPELEYGRMNIGSRPSKRKPSGGIESLRAIPWIFAWTQTRFHLPVWLGFGAAFKHILQKDIRNLQVLKEMYNEWPFFRVTLDLLEMVFAKGDPGIAALYDKLLVSDELKSFGEQLRANYEETEQLLLQVAGHKDLLEGDPYLKQRLRLRESYITTLSVCQAYTLKRIRDPNFQVHMRAPLSKEILDSNKPAELVKLNPSSEYAPGLEDTLILTMKGIAA

SEQ ID NO: 25361 - protein, 378 aa, Moorella thermoacetica ATCC 39073
MTERECRLALSQARRLVIKVGTSTLTHKTGKLNLGRMERLVRELVDQVNAGRQVVLVTSGAVGAGMGRLGLKEKPRTLPEKQAAAAVGQGLLMHMYEKFFSDYGLLVAQVLLTRADLADRSRYLNSRHTLAALLRLGVVPIVNENDTVAVEEIRVGDNDTLSALVAGLVDADILFLLTDTGGLFTANPVTSDDAVLLPCVTEITPEIEALAGGAGSTWSTGGMATKIQAARLATSFGIPVVIASGLQAGQIEAVLKGEEIGTIFLPREHRAHTRKRWLAYAPAVQGQIQVDAGAARAICKNGKSLLPGGVIAVDGDFDQGAIVSIVDPAGKEIARGMANYPAAAISRIKGRKTGEIGEILGYKDYDEIVHRDNLIVLG

SEQ ID NO: 25362 - protein, 307 aa, Magnetospirillum magnetotacticum MS-1
TLEDPPNWMTRVATLGGKGWKNFVERGGRQVADLREQILTLASETGLQIGEYRKIVAMVQKGEREARQAKKEMIEANLRLVISIAKKYTNRGLQFLDLIQEGNIGLMKAVDKFEYRRGYKFSTYATWWIRQAITRSIADQARTIRIPVHMIETINKIVRTSRQMLHEIGREPTPEELAEKLAMPLEKVRKVLKIAKEPISLETPIGDEEDSHLGDFIEDKNVVLPIDAAIQSNLRETTTRVLASLTPREERVLRMRFGIGMNTDHTLEEVGQQFSVTRERIRQIEAKALRKLKHPSRSRKLRSFLDN

SEQ ID NO: 25363 - protein, 1101 aa, Magnaporthe grisea 70-15
MNNNYYGTQLTAEQLQRQQLANQQHQRQQRQQRHHQQQQQQQQQQQHRQQQHQQHQQRQQYQNAGQVGGGSSMGQDDPMSAITDSPMLDGDSLDDIIRENTHELQRRRSITHPYSPQALESDGRRLSMLEFGNNNDAFNYHFGNMNSLQDNPMGNGFNAMGNSAMGNMGLSNTATGQYDHQGNTNMGMMGMSDSNDFSTLSPEMLGNMVAFSSLNMNPVTTSPTSMGPMFSSGQLGDQYMTNTISMDNMGTDRFGMNMLPDPLSATNDTRRMMSTQDDDSEMLNSGQNFNSNTGQAPDGAHMQAAMNMQGPAPPIPIKNTQQVPAGPHGGPDVSPARDATALSTPPSNIGPSTTPSGGVSKPKSIYSKTGFDMVRALYMVATRKNPQINLGAVDMSCAFVVSDINLPDCPIIYVSSNFQNLTGYSEHEIIGKNCRFLQAPDGQVEAGVKREFVADDAVFSLKKAIAERKEIQQSLINYRKGGKPFLNLLTMIPIPWEEQELRYYIGFQIDVVECPDAIAQQEFGGQMQINYRHMEMGQYIWTGPPLGTDATLAPEQDSSQTLSADDVSGLLRQAKPQGLASDWHRQSWDKMLLENSDDVVHVLSLKGTFLYLSPSCKKVLGYDAAELVGPNTQGTGLMSICHPSDLIPVMRELKDATPTNPIVNTVYRISRKKTGYTWFESHGTLCVEPGKGRKFIILVGRKRPVYHLSKKDVEANGGIGDSELWTKLSVSGMFLFVSSHVRSLLDLQPQDLVGTSIQDLMRKESRAEFGRTIEKARKGKIVTCKHEVQNRRGQVLQASTTLYPGDTPVGQRPTFILAQTKLVKASSRSSASAASGKKSQQNAVSSESSMAEGNVPPTDRSVSTDALSSAVSKDRTSASSSKGPESTTTISDQAPTGLPLNYPKPDDNIFVELGPTRCTSWQYELRQMEKDNRLLAEELGQLLSNKKKRKRRRSAGLVRDCANCHTRSTPEWRRGPSGQRDLCNSCGLRWAKQVGRVSPRTSSRGGGTKDDSNSRKSNSPSHQSPLQREFSSDGNAANNSPSSNQAVVASASDAADAGSSAGVTPTIGVSQGSMPPQSQPLLEGGSGYRGGGMEMTSICEE

SEQ ID NO: 25364 - protein, 142 aa, Zea mays
KEQFSDGVGYSWIDGLKDHASQHVSDSMMMNAGFVYPENTPTTKEGYYYRMIFEKFFPKPAARSTVPGGPSVACSTAKAVEWDASWSKNLDPSGRAALGVRDAAYEDTAGETPASADPVSDKGLRPAIGESLGTPVASATAV

SEQ ID NO: 25365 - protein, 226 aa, Zea mays
MGAARDSTAAGQKRGTGTRCELCGGAAAVHCAADSAFLCLRCDAKVHGANFLASRHVRRRLVPRRAADPEASSAASSGSSCVSTADSAESAATAPAPCPSRTAGRRAPARARRPRAEAVLEGWAKRMGFAAGPARRRAAAAAAALRALGRGVAAARVPLRVGMAGALWSEVAAGCRGNGGEEASLLQRLEAAAHVPARLVLTAASWMARRPDARQEDHEEGWAECS

SEQ ID NO: 25366 - protein, 497 aa, Staphylococcus aureus subsp. aureus MRSA252
MSKVQNESNNVVKRGLKDRHISMIAIGGCIGTGLFVTSGGAIHDAGALGALIGYAIIGIMVFFLMTSLGEMATYLPVSGSFSTYATRFVDPSLGFALGWNYWFNWVVTVAADITIAAQVIQYWTPLQGIPAWAWSALFLVIIFSLNSLSVRVYGESEYWLALIKVVTVIVFIAIGLLTIVGIMGGHVVGFEIFNKGEGPILGGNLGGSLLSILGVFLIAGFSFQGTELIGITAGESENPERAVPKAIKQVFWRILLFYILAIFVIGMLIPYDSSALMGGGNDVATSPFTLVFKNAGFAFAASFMNAVILTSVLSAGNSGMYASTRMLYSMSKDKLAFETFGKTNKNGVPYMSLLVTAIIVVIIFVVQSVTEGAYQYIVAASGLTGFIAWVGIAVSHYRFRRAFDKQNYDKSKLKYTAKWFPFGPIFAAILCIVVIIGQDVDFIKTGDFNFSRFLITYMGIPVFLAFFIYHKLRYKTKKIPLEQVDLRQDVSMDEIKG

SEQ ID NO: 25367 - protein, 268 aa, Brassica napus
  misc_feature (124)..(124): Xaa can be any naturally occurring amino acid
  unsure (1)..(268): unsure at all Xaa locations
MALEAMNSPTTMSSFTVRKDRIGATDDLMNDAVFLEPWLKRKRSKRQRSPSPSSSPPRSHAKSQSQDPSEEEYLALCLLMLAKDQPRTRFQPSLPPPPQARTKLSYNCSVCGKAFLSYQALGVXEASHRIKPPTAGDSTAPSIAGEKHPTSTTIAPSGKIHECSICHKVFPTGQALGGPKPCHYEGNLGGGGGGSKSVSPSGSVSSTVSEGRNTRVIIDLNLPALPELSLHPDSVVDEKILSPLTGKKPLLLAGPAQVIKKKDLSLRI

SEQ ID NO: 25368 - protein, 167 aa, Oryza sativa
  misc_feature (7)..(7): Xaa can be any naturally occurring amino acid
  misc_feature (25)..(25): Xaa can be any naturally occurring amino acid
  unsure (1)..(167): unsure at all Xaa locations
AQGGCQXAMNRSVAYRPYSDMIWMXSKLPDYAQSKEFADGVHAVWPEQKLAYNLSPSFNWKAAMPREEQETYIQRLAQLGYCWQFITLAGLHQTALMADTFSKAYSKQGMRAYGEIIQEPEAENKVDVLTHQKWSGANYVDNLLKMVSGGVSSTAAMGKGVTEDQFK

SEQ ID NO: 25369 - protein, 455 aa, Ustilago maydis 521
MSNLPSEPEFEQARNELATTLAPFLEQYPEYNKAFEIVQIPERIIQFRVVWEDDNHVSQVNRGYRVQFNSALGPYKGGLRLHETVNLSVLKFLGFEQIFKNALTGLNIGGGKGGSDFNPKGKSDGEVRRFCKAFATELQRHIGPNTDVPAGDIGFSTREAGFVFGTYKQLRNEWTGVITGKALDWGGSNIRPEATGYGLIYYVEHMINHVEQGTNGFNGKKVVISGSGNVAQYAALKVLELGGTVLSLSDSKGSLIAKDTKGFTAEMISKIAEIKYNRGELESFGTASGALEWHAGARPWKLFSSYDVALPCATQNELNADEAKFSLSAGCRYVAEGSNMGLDQAAIDVYEQSRITDPSKACWYGPGKAANSGGVAVSGLEMAQNSARLTWSPEEVDQKLKDIMKNAYENCFKTGQAFPAKNDKVADKLPSLVGGANIAGFKKVADAMKQHGDWF

SEQ ID NO: 25370 - protein, 78 aa, Zea mays
MGGFSPKLFGVLLLLVCYPGTQGGPVTMVSARKCESQSFRFKGPCLRDANCANVCLTEGFPGGVCKGLRPPCFCPRDC

SEQ ID NO: 25371 - protein, 330 aa, Chlamydophila abortus S26/3
MVMKLTRTVSVAVTGGTGQIAYSFLFALAHGDVFGSDCGIDLRIYDLPGLERVLSGVRMELDDGAYPLLQSLRVTTSLEDAFDGIDAAFLIGAAPRGPGMERSDLLKRNGEIFSLQGSVLNTSAKRDAKIFVVGNPVNTNCWIAMSQAPRLNRRNFHSMLRLDQNRMHTMLAHRAEVPLDEVSHVVIWGNHSAKQVPDFTQALISGKPAVEVIGDRDWLENIMLPSIQNRGSAVIEARGKSSAASAARALAEAARSIFLPKDGEWFSTGVCSDYNPYGIPEDLIFGFPCRMLPSGDYEIVPGLLWDTFIKNKIQISLDEISQEKANVSLL

SEQ ID NO: 25372 - protein, 453 aa, Bordetella bronchiseptica RB50
MEKKIVLVKPYSAYERDKTPAENADLTRVEKGSPMGEYLRRFWQPVALSEELGELPTAVRMFGEDLVLFRARNGKPGLLEKHCSHRGTSLEFGICEENGLRCCYHGWLFGVDGQILETPGDPPDSQLRFNVCHGAYPLHEYRGIIFGYFGPPADKPEFPVYDTYDIPGDRLVPYCITYPCNWLQVHENVMDPAHAVFLHTRISFTQFAEAWGELPEMDFVPTPTGMIYVTSRRWEDKVWVRSNDIVLPNLAQVGHIWEDGLTPKEFARVAITRWTTPIDDHTCRIIGWRHMHPDADPRGLADESLCGVETVDFFGQNGERPYADRQRMPGDYDAQISQRPIAVHAMENLTRCDRGVAMLRQLLRRESRKIANGEAPAISPLRANGATPTYAHDTVVSIPPADTDDAACVREIGKAITAIVVKGDHHEQADRPEQVRERIRAYAAEQASTATSE

SEQ ID NO: 25373 - protein, 1168 aa, Neurospora crassa
MSTAFQTTPNQSISVSATTSPSNRQYSSFHPGPTTREGPGSGYYANQHNAGQSSPHTSSQPHSRRPSAYDQPTGLEPHMSARTAFAQSIPAPVTSIASDQPPSSSDRRRNNMPTAVPPRTSSRHDPNTSSRRAQQAADRAAASRQSNTNGTMDPAVVDEAAARSRRQHQMTQDAHQRTTSSRGNPTPTSLPVRSQPNATSSRQQSSREASEILNNILIQQPEIDIERERERLAQAQAQAHAQAQAQAQAQAQAQAQQASNYNHHHRQETASQAMAAPGGDHGEESRRGHRSRHDHSKREKHTKFGEYILGNTIGEGEFGKVKLGWKQEGGVQVAIKLIKKDTVGNNPSRMAKIMREVAILKQLTHPNIVRLHKMEESDRHYGIVLEYASGGELFDYILNHRYLKDNAARRLFAQLVSGVGYLHKKGIVHRDLKLENLLLDRNRNIIITDFGFANTFDPNQELSEEEELNLSDREFVKRMGLDKVNDAGWRKGDLMQTSCGSPCYAAPELVVSDSLYTGRKVDVWSCGVILYAMLAGYLPFDDDPANPEGDNINLLYKYIVNTPLTFPEYVTPHARDLLRRILVPNPRKRADLFEVARHSWLSEYSHVVEFITSSTTTPSEIQNTTVPAEDEGESPHLARSASVREAPKKSTASPAIGGLVSKQGTVDPEAEAAYAKQQRDNKRRTVQVEYVAPNTTTQRGDIAGQQQPSSNANRNRNESQAPVESSDSRPTTSAKDKQLSQGPSAPKDAYNNKPPVSSRRPPSSQRNGGNAPTTGNAVAPPRPSRDGRPTADNQYLSGAAGAPTQRPTTGGSMQSGRPSYAQPAPPEVADANVHGRIQQPSKGSGSSHFGVPTTTPAEQQPSESADYGRPSISTGSRFDKVREDGVVKGHKRSSTMGEIGGKLFGRSGSLFGGRKSKRQQELQQAGEKTKRYPPVSMNNSMPGGENGSRPSLDSKRSRRSFSMGMGKKSSGGSITGSNGSQEKSNKRFSFIPPSLSRAFGYNKEDEPPALDSQQDLPIQEPSSVDQFLGREQNVSATTVDGMYTQLQDSQQGSPAVNTQYQYGRPSASQGFMPGTMPNAGSDPSVNSMPQAPGSTPQLQTMTQQDGLYDARKGNSRANRGVLQKNKRFVDYEGDGFARPHDHSGSSGPARKVMDFFRRRGKARGGENN

SEQ ID NO: 25374 - protein, 413 aa, Glycine max
MGSVAAEELNLDLRSSFVPKTITDFLRHLSANNNHPATLRDFLSRLEDELRKIHAFKRELPLSMLLLNDAISVLKVESQKCCRVARDSPPVLEEFIPLKKELGDQSEEEEENDDDKDDNECRDKRNWMSSVQLWNNNTTTTTTNNNNNASDRKQLLHKLQTKKSEEGQSVAEDPFQTCSNRNGGRRAFMPFSRYSSSSSSVPVTTVGLGAASKEEKEESVRNRLSLLTPSVKEGCGSRGSRSSSNRAVSSSSPPTVQPGLRATSLQQTARKQRRCWSPELHRRFVNALQKLGGSQAATPKQIRELMQVDGLTNDEVKSHLQKYRLHTRRVPAASSNQPVVVLGGLWMSQDQYNDSSKVSSSGSGSPQSPLHLAAGSRGGTSPTEGDSIEDDEDARSESYSWKSHMNKPGKVDV

SEQ ID NO: 25375 - protein, 351 aa, Triticum aestivum
ALTLDELQYSVCEAGRNFGSMNMDEFMSNIWNAEEFQAATGGGLVGMEVAPVVGAGAGGGGADAGGSNLARQESFSLPPPLCRKTVEEVWAEINREPRQVHAQPQGARASQQPPVQPPVAANDRQGTLGEMTLEQFLVKAGVVRGSGAGGQAPVPVGMVHAQMNPVQQGQQPGPMMYPMAPANGMFQVMGDGMGFVPNGYAGMAVVPPPPPPQGGMGIVSPGSSDGRSAMTQADMMNCMGDGAMMENGGARKRGAPEDQSCERSIERRHRRMIKNRESAARSRARKQAYTVELEAELNHLKEENARLKAEEKTILLTKKQMLVEKMIEQSKENVNVKKGGTLSRRCGSCIW

SEQ ID NO: 25376 - protein, 581 aa, GIBBERELLA ZEAE PH-1
MTVPTSPAQAQGGSEKQIQSEDHIINDFPIKDKEDDSDEGSEIKQDGVRRVEAITKVWTLSIMWAVFIFLYLVNFVDTLLQAVHSSLVPYITSSFNQHGLLAITSVFGSIIAGVSKLAIAKIIDIRGRNEGFLLMILIIIVGMIMKACCQNVETYAAGHTFYWVGHVGLSYIIDVVLSDMTTLRNRMIMFGLYMSPRLASTFGGPTIADLFYKHSTYRWAFGSFCIILVFFSIPVSAIFMYHEIKAKKLGYLPEKSQRSAWESIKHYFVEFDVVGMVLTIAGFSLILTPLNIATRAPNGWKTDYIIAMLVVGIVCLVGFAAWEKWYAKVPYVPFKFLKDRTILGACLLSAFLNMSIFAWDTYYNSYLQVVHGLSIATAGYTLNAFSVTSTILAPFIGLFLRWYGRYYWPAVFGIPWCVLGTALLIHFRQPGNDIGYLVMCQVFHGVCGGIWAMCGPLAIMTQVTHQEIAVVLALYSMFGSIGQAIGFGISGALWTNDLPREMYNALPQDAKNQTAALYGDMKLQMADPIGTPIRDAVIYAYGVVQREMVIAGCAFLPLICVCVLVWRNKPIDKQQTKGNVF

SEQ ID NO: 25377 - protein, 270 aa, Saccharomyces cerevisiae
EFAEIVFCAISSTEQVRGYGAHLMNHLKDYVRNTSNIKYFLTYADNYAIGYFKKQGFTKEITLDKSIWMGYIKDYEGGTLMQCSMLPRIRYLDAGKILLLQEAALRRKIRTISKSHIVRPGLEQFKDLNNIKPIDPMTIPGLKEAGWTPEMDALAQRPKRGPHDAAIQNILTELQNHAAAWPFLQPVNKEEVPDYYDFIKEPMDLSTMEIKLESNKYQKMEDFIYDARLVFNNCRMYNGENTSYYKYANRLEKFFNNKVKEIPEYSHLID

SEQ ID NO: 25378 - protein, 391 aa, Triticum aestivum
MASEMSKDVKFSEEEVTSHPRVLEGEEQAVAPARQSSIFALTLDELQYSVCEAGRNFGSMNMDEFMSNIWNADEFQAATGGGLVGMEVAPVVGAGGGGGGLDAGGSNLARQESFSLPPPLCRKTVDEVWAEINREPRPVHAQPQAARPSQQPPVQPSVPANDRQGTLGELTLEQFLVKAGVVRGSGAGGQAPVPVGMVHGQMNPAQQGQQPGPMMYPIAPANGMFPAMGDGMGFIPNGYAGMVVVPPPPPPQGGVVGIVSPGSSDGRSAMTQADMMNCMGEGAMMENGGTRKRGAPEDQSCERSIERRHRRMIKNRESAARSRARKQAYTVELEAELNHLKEENARLKAEEKTILLTKKQMLVEKMIEQSKENVNAKKGAPLSRHCGSCIW

SEQ ID NO: 25379 - protein, 515 aa, Lactococcus lactis subsp. lactis Il1403
MNNWWKKAVIYQIYPRSFKDSNDDGIGDINGIIEKLTYLEKLGVDGIWLSPIYQSPMVDNGYDISDYYKIDPLFGTMADFEALIEKAKQLNIRVIMDLVVNHTSDQHLWFKESKKSKNNPRRDFYIWRDQPIGEFKNWTYDSSTQQYYFHLFSPQQPDLNWENEEVRKEIHKMMNFWLAKGISGFRLDVIDLIGKKPEQEITVNGPKLHDYLKEMNLATFGKKDYLTVGEAWSSSPELAKLYSGPNRHELSMVFGFWHLLTSAGNGDKWKKLPLNVPKLKEAMTAWQKLTPNEAWNSLFLGNHDLPRIVSFWGDEGTYREKSAKAFAILFHLMRGTSFIYQGEELGMTNFPFENLSAINDVESHEYFTDRKKEGQSEEEIIKVLREMSRDNARTPMQWTSDEKAGFTKGKAWLSINPNTKIINADQAVSDSNSVFYTYQKLIKLRHQENWLIEGDFELLESADEIFAYLRKTTTRTFLVVANLSNSSQRFESSFVKKNEIISNDSFPDLLTDIEI

SEQ ID NO: 25380 - protein, 274 aa, Listeria monocytogenes EGD-e
MSELKLKSFEIRKDVLKMIYDAKTGHTGSDLSCADILVALCYGVLNVNPENPEALDRDRYVQSKGHAVEVLWAVLADKGFFAKEELADFSAFGSRIIGHPNNKVAGIEMNTGSLGHGLSVSVGMALAAKMDGKSYHTYTLMGDGELAEGSVWEGAMAAANYKLDNLTAIIDRNSLQISGRTEDVMSVEPLADKWRAFGWDVIEADGNNPDKLQAIFKTVNETGKPRLIIAKTIKGYGVKMAENVAKWHHYVPSSEEYEIAMKDLEERMEACRHE

SEQ ID NO: 25381 - protein, 363 aa, Tillandsia usneoides
SDSGKDAGRLSAAWQLYKAQEELVKVAKKYGVKLTMFHGRGGTVGRGGGPTHLAILSQPPETINGSFRVTVQGEVIEQSFGEERLCFRTLQRFTAATLEHGMLPPISPKPEWRAILDEIAVVATEEYRSVVFKEPRFVEYFRLATPELEYGRMNIGSRPSKRKPSGGIESLRAIPWIFAWTQTRFHLPVWLGFGAAFKHILQKDIRNLQVLKEMYNEWPFFRVTLDLLEMVFAKGDPGIAALYDKLLVSDELKSFGEQLRANYEETEQLLLQVAGHKDLLEGDPYLKQRLRLRESYITTLSVCQAYTLKRIRDPNIQVHMRAPLSKEILDSNKPAELVKLNPTSEYAPGLEDTLILTMKGIAA

SEQ ID NO: 25382 - protein, 360 aa, Oryza sativa
MGNDEAVVTQKMGKAPSPPKDHPALSPYLDWSNMQAYYGPGILPPTFFSPGIAAGHTPPPFILGPQPLVPSAFGKPYAAIYPPGGAFSHPFMPLMVSPLSMEPAKSVNSKDSCSNKKMKEIDGATVSTGSGNSEKTSGDCSLEGSSDGNNQKASGTPKKRSIDDRPKSGVETGGALTPNDRPSEQAALPNLCIPVTAIKPDVSTASDFRVIATPVTEVPTKDDKESKRERRKQSNRESARRSRLRKQAETEELARKVELLTAENTSLRREISRLTESSKKLRLENSALMEKLTETGPDEAQEVPPVKTKAQQARGVENFLSMIDKTGTPRSSGHMDHAIATPKLRQLLGSGLATDAVAAR

SEQ ID NO: 25383 - protein, 318 aa, Escherichia coli
MNPIAVTLLTGFLGAGKTTLLRHILNEQHGYKIAVIENEFGEVSVDDQLIGDRATQIKTLTNGCICCSRSNELEDALLDLLDNLDKGNIQFDRLVIECTGMADPGPIIQTFFSHEVLCQRYLLDGVIALVDAVHADEQMNQFTIAQSQVGYADRILLTKTDVAGEAEKLHERLARINARAPVYTVTHGDIDLGLLFNTNGFMLEENVVSTKPRFHFIADKQNDISSIVVELDYPVDISEVSRVMENLLLESADKLLRYKGMLWIDGEPNRLLFQGVQRLYSADWDRPWGDEKPHSTMVFIGIQLPEEEIRAAFAGLRK

SEQ ID NO: 25384 - protein, 363 aa, Tillandsia usneoides
SDSGKDAGRLSAAWQLYKAQEELVKVAKKYGVKLTMFHGRGGTVGRGGGPTHLAILSQPPETINGSFRVTVQGEVIEQSFGEERLCFRTLQRFTAATLEHGMLPPISPKPEWRAILDEIAVVATEEYRSVVFKEPRFVEYFRLATPELEYGRMNIGSRPSKRKPSGGIESLRAIPWIFAWTQTRFHLPVWLGFGAAFKHILQKDIRNLQVLKEMYNEWPFFRVTLDLLEMVFAKGDPRIAALYDKLLVSDELKSFGEQLRANYEETEQLLLQVAGHKDLLEGDPYLKQRLRLRESYITTLSVCQAYTLKRIRDPNFQVHMRAPLSKEILDSNKPAELVKLNPTSEYAPGLEDTLILTMKGIAA

SEQ ID NO: 25385 - protein, 129 aa, Methanosarcina barkeri str. fusaro
MDYSLKVMDHFSNPRNMGSIENSDGVGEVGNAKCGDIMKIYLKVEDNRIADVKFQTFGCGAAIASSSMATEMIKGKTLEEAWKLSNKAVAEALDGLPPIKMHCSMLAEEAIHEAINDYLKKKGLEPWTE

SEQ ID NO: 25386 - protein, 460 aa, Vibrio fischeri ES114
MHRYQKEIVRLIKLSTPVLIASVAQTGMGFVDTVMAGGVSATDMAAVAIAASVWLPSVLFGVGLLMALVPVVAQLNGSGKSKKVPFEIHQGVYLALLTSIPIMLVLYNAGFIIAAMDVEPELYEKTQGYLHAVLWAAPAFLLFQTLRSFCEGLSLTTPAMIIGFIGLAANVPLNWMFVYGELGAPALGGVGCGVATAIVYWLMFLTMTLYTFIAPKLRRVNLYENWNKPQRKEIYRLFKLGLPVALSIFFEVTLFAAVALLVSPLGSTVVAAHQVAINFSSLIFMIPMSIAVAVSIRVGHKLGEKDLDGAKVASYCGLAFGLLMACCTAILTLIFREQIAYLYSDNQEVITLAVSLMLLAAIYQCTDAVQVVAAGALRGYKDMNAIFKCTFVSYWIVGLPSGYVLGMTDWIREPMGVYGFWFGFIGGLTTSAILLTCRLLWLQRNPTRIDMEVDELQIMH

SEQ ID NO: 25387 - protein, 101 aa, Oryza sativa
  misc_feature (10)..(10): Xaa can be any naturally occurring amino acid
  misc_feature (22)..(22): Xaa can be any naturally occurring amino acid
  unsure (1)..(101): unsure at all Xaa locations
MTCCGGTCGXRSGCQCSGSCGXCKMSPDVEATATTKTLALSAPSNKASSGGMDMAAQSGENGRCGCNTCKCATSCSGLARCSCNQNLSSSSPGCMRIYRMD

SEQ ID NO: 25388 - protein, 357 aa, Solenangis aphylla
SDSGKDAGRLSAAWQLYKTHEDLVKGAKEYGAKLTMFHGRGGTVGRGGGPTHLAILSQPPDTILGSLRVTVQGEVIEQSFGEEQLCFKTLQRFTAATLEHGMQVPITPKPEWRALMDEMAIIATNEYRSIVFKEPRFVEYFRLATPELEYGRMNIGSRPSKRKPSGGIESLRAIPWIFAWTQTRFHLPVWLGFGAAFKHVIQKDPKNLQMLREMHNEWPFFRVTIDLLEMVFTRGNPGIAALYDKLLVSPELLPFGEQLIANYEETQNLLLQVAGHKVLLESDPYLKQRLRLRYPYITTLNVFQAYTLKRMRDPSYAEPHLSNAHKPADELVKLNPISEYGPGLEDTLILTMKGIAA

SEQ ID NO: 25389 - protein, 265 aa, Zea mays
MLAIFQKQVAHAPQELNSPRAGASPSKPRNPDEILRDFHAAHPAAAFSASFGGGAALACVGPSSSATATATGTYQRMFCGLDHIYCVFLGRLDNLSGLIRQYGLCGRSTNEAMLVIEAYRTLRDRGPYPADQVVKDLAGAFAFVVFDSRSGAVFAALGAADAGGAPVPLYWGVAADGSAVISDDRDLVKRGCGKSYAPFPAGCMFHSDGGLKSFEHPMNRLKAMPRVDSEGAMCGATFKVDTFTKINSMPRVGSAANWAAWDEAI

SEQ ID NO: 25390 - protein, 235 aa, Solenangis aphylla
MCSRTPLCEYSRLATLELEYGRMNIASRPSKRNPRGGIESLRAIPWIFAWTQTRFHLPVWLGFGAAFKHVIDKDIKNLLMLQEMYTRWPFFRVTIDLVEMVFAKGDPGIAALYDKLLVSEDLWPFGEQLRNNYNETKNLLLQVAGHKALLEGNPYLRQRLRLRDSYITTLNACQAYTLKRIRDPSYQVPVRPPIAKEIMEGSVSSANQLVKLNPTSEYAPGLEDTLILTMKGIAA

SEQ ID NO: 25391 - protein, 1010 aa, SYNECHOCOCCUS SP. WH 8102
MIMRSPETSGASMPQSTAHVPDGEQPRASGGSPGAGRLLQHRLELVEDLWQTVLRSECPPEQSERLLRLKQLSDPVALEGRDGESSSEAIVELIRSMDLSEAIAAARAFSLYFQLINILEQRIEEDSYLDSLRPSRSQDDETAAPFDPFAPPLASQTDPATFGEVFERLRRMNVPPAQVETLLRELDIRLVFTAHPTEIVRHTVRHKQRKVASLLQRLQSEPALPRYDEEELRRQLEEEIRLWWRTDELHQFKPTVLDEVDSTLHYFQQVLFEAMPQLRRRLVSSLSRHYPDVQFPQASFCTFGSWVGSDRDGNPSVTPEITWRTACYQRQLMLELYIGSVQSLRNQLSISMQWSQVAPPLLESLEMDRLRFPEIYERRAARYRLEPYRLKLSYILERLELTLQRNHQMSEAGWQSPPEPAATAPTDGIPGHEALHYTAIDQFRSDLELIRNSLVSTELSCEQLDTLLNQVHIFGFSLASLDIRQESTRHSDAIDELTTHLQLPKAYGAMEESERVAWLLEELQTRRPLIPAAVEWSEATAQTFAVFQMLHRLQQEFGQRICHSYVISMSHTASDLLEVMLLAKEIGLVDPQAGKASLLVVPLFETVEDLQRAPAVMDGLFQTPIYRNLLPSVGVQRQPLQELMLGYSDSNKDSGFLSSNWEIHQAQIALQTLASSHGVALRLFHGRGGSVSRGGGPAYQAILAQPSGTLQGRIKITEQGEVLASKYGLPELALYNLETVTTAVVQNSLVTNQLDATPSWNQLMSRVAKRSREHYRALVHDNPDLVAFFQQVTPIEEISKLQISSRPARRKTGARDLSSLRAIPWVFGWTQSRFLLPSWFGVGTALAEEVNDDPEQLDLLRRLHQRWPFFRMLISKVEMTLSKVDLDLAHHYMSSLGNPEQRDAFEGIFKVIADEYGRTLKLVLEITGQSRLLGADQNLQLSVDLRNRTIVPLGFLQVALLRRLRDQNRQPPMSESPGTPEDRRTYSRSELLRGALLTLNGIAAGMRNTG

SEQ ID NO: 25392 - protein, 529 aa, Zea mays
MAAPAPKQEELQPHAVRDQLPSVSYCLTSPPPWPEAVLLGFQHYLVMLGTTVIIPTALVPQMGGGNEEKARVVQTLMFVAGINTLIQSFLGTRLPAVMGGSYTFVAPTISIILAGRYSGIADPHEKFVRIMRGTQGALIVASTLQIIIGFSGLWRIVVRLLSPLSAAPLVALVGFGLYELGFPSVAKCVEIGLPQILLLVALSQYVPHLVPLLSTAFERFAVIMSVVLIWLYAFFLTVGGAYKNAAPKTQFHCRTDRSGLVGGAPWISVPYPFQWGAPTFDAGEAFAMMAASFVALVESTGAFIAVSRYASATPCPPSVMSRGIGWQGVGILLGGLFGTANGTTVSVENAGLLALTRVGSRRVVQISAGFMIFFSILGKFGAVFASIPGPVIAAVYCLLFAYVGMAGVGFLQFCNLNSFRTKFILGFSLFMGLSVPQYFNEYTSVAGFGPVHTRARWFNDMINVVFSSKALVGGAVAYFLDNTLHRRDGVARKDRGHHFWDRFRSFKTDPRSEEFYSLPFNLNKFFPSF

SEQ ID NO: 25393 - protein, 131 aa, Glycine max
MADQLTDEQIAEFKEAFSLFDKDGDGCITTKELGTVMRSLGQNPTEAELQDMINEVDADGNGTIDFPEFLNLMARKMKDTDSEEELKEAFRVFDKDQNGFISAAELRHVMTNLGEKLTDEEVDEMIREADV

SEQ ID NO: 25394 - protein, 483 aa, Prochlorococcus marinus str. MIT 9313
MQWGMQQIDGLTNTPRWVAQAVVYQIFPDRFRCSGRVLAHQHLALRCWGSDPSEQGFQGGDLYGVIEALDHLQALGISCLYLTPVFSSAANHRYHAYDYLQVDPLLGGNAALEALIEAVHRRGMRIILDGVFNHCGRGFWAFHHLLENGEASPYRDWFEVRQWPLHPYPRRGQDCGYSCWWNDPALPKFNHAHAPVREYLIAVARYWLEQGIDGWRLDVADEVPAEFWLEFRHMVKAVNPDAWILAEIWGDARPWLQGQHFDGVMNYRMGWSSLCWVAGKRLRRRYRNPAYPLDPLSGEAFVELLATTLGWYRPEVNRSQLNLLDSHDVPRALHTLQGDLAALKLALLLLFLQPGAPCIYYGTEAGLQGGPEPGCREGFPWHTPWPADLRDFIQSLSDLRQRCPALSDGGLQWQPIGADALHAWLMQPEPGTTQKETPIQVWVNRSRRSWLRMKGSSTDPLWLEGALECNGRGLGPQSAVLFH

SEQ ID NO: 25395 - protein, 677 aa, Bdellovibrio bacteriovorus HD100
MTEPIQIKTKLAGNPSQEPQFKSFVKSKDGRQIPVADPNATRALVSLMDMNAVLGGAASHYGGPAALAELMSALHGHVFDVAARENKQWYDLFHIVNDAGHCENGLYALKANYKMAGLTLDSLKKFRSIESGLTGHGEVHCFPEGVFISNGPLGSAFPQTQGVAMGEAISGKNRVTVTTISDGACMEGEAKEAFAAIPGLAKTGKMGPYVLIISDNNTKLSGRIDAESFSMTPTFNSLKDLGWNVINLAEGNDLQKCYDTIVSAIEQAKANPIAPVIIHAKTVKGIGTKKTAESATGGHGFPLKSPSELPAFLGEILGGAALPDVFNTWIAELNKWEADIKASGVKDSGEKIQVGISSAMVRARKAGFPVLSVTSDLPGSTGVAGFRKEFPQDSFDVGIAESNMVSTAAGLSKLGYIPVVDTFAQFGVTKGALPLTMGALSEAPVIAVFSHTGFQDAADGASHQALSYVAMVSSIPHVDVYSLSCSEEADALMYTVIENFAKARKEGKVPNSAVFFLGRENFPKTYVAGTSYDLRKAQVLADTTAGKTKSVAIATTGSLVPQALQAAKDLESKGVGAVVVNCACVNHVDIATFKTVLEKTQGHLITVEDHQLLGGFGQILTHALMNADVTFKVKSLGVHGEFGQSAYTAADLYRKHKVDASAIVETTGTFFQKSGAW

SEQ ID NO: 25396 - protein, 539 aa, Moorella thermoacetica ATCC 39073
MAAKQLAFDVEARRALEKGVSTVAQAVKVTLGPKGRNVVLERKFGSPVITKDGVTVAKEIELKDPYENMGAQLCREVASKTNDVAGDGTTTATVLAQAIMLEGLKNVAAGANPIFVKKGIDRAVETVVDEIKKISIPVESKESIAHVASIAANEREIGELIADAMEKVGKDGVITVEESKGTATTVEVVEGMEFDRGYVSPYFVTNTEAMEAEFEEPYILIHEKKISAINDLLPLLEKVVRTGKPLVIIAEDIEGEALATLVVNKLRGTLNCAAVKAPGFGDRRKAMMEDIAILTGGTFLSEDLGVKLENVDLNMLGRAKKVKIAKEKTTIVEGYGKKEAVDGRIAQIKKQIEETDSDYDREKLQERLAKLAGGVAVIRVGAATETELKEKKHRVEDALAATRAAVEEGIVPGGGATLVHAIPAVEKIQAEGDEAVGVRIVRRALEEPLRQIAANAGLEGSVIVERVRSEQPGIGFDAVKEEYVDMIKAGIVDPAKVTRSALQNAASIASMLLTTEAIIAEIPKEEKAPAMPPGGGMDY

SEQ ID NO: 25397 - protein, 171 aa, Pisum sativum
SFLSSRGKLYEFSSSCMQDTIERYRRNTRSAQPLQRSDEQNMQNLKQETASLMKKIELLEASKRKLMGVGLGSCSLEVLQQIEQQLEKCVSTVRARKYQVYKYQIEQLKEKEKVLLAENSRLSKQPQPQLLQLPPPPPPNDHPRENQPYAESSSPSSDVVTELFIGLHRSS

SEQ ID NO: 25398 - protein, 92 aa, Oryza sativa
MAGTANCIDILIAIILPPLGVFLKFGCGHEFWICLLLTFLGYIPGIIYAIYAITKDGLQTASSIFSIAVCLLEFGNDICIQNSVLSAPILVI

SEQ ID NO: 25399 - protein, 554 aa, Staphylococcus aureus subsp. aureus MRSA252
MMKFHHRLMLLISSILIISFVTLGIIIHASITYVLSEKHEQALATDARSYIYLVQDNEIDKVKEIVKQQNIDLLITKNDKKVFSSGKLKPTKTIDNYSQKKDVFIFNKKVNGYHVWIKGYNNDITEMHWTLWKYLILTCLVVLICLYFASRSFKRTLIRPIQEVTYATQLLANGYYHIRVPESNVVETKALFVSTNDLARRLQKLNNEQKIQSNRLKTTIENIPSAILMIDRNGKIVVANKAYYEQFNISHNIEQVGYHGYVNTEIEQLILESFKVEKPIYEQLEVAINQVHAKYFDISCVPILTRSQKSLQGILVVMHDITNLKQLENLRREFVANVSHELKTPITSIKGFAETLIDGAKNDAESLDMFLNIILKESNRIESLVTDLLDLSHIEQHTELDTDYMNLSDLTRRIIDNMMTQANQKNISIHTEIEKDVIVKAQESKIAQVITNLLTNAINYSYEDGDINVRVYRDDFRVIFEVQDFGIGIKLEDQQRIFERFYRVDKARSRDSGGTGLGLSITKHIVEAHQGNIEVNSQVGKGSTFKVILKDYKE

SEQ ID NO: 25400 - protein, 196 aa, Pisum sativum
VEVNGLMKKAFELSILCDAEVALIVFSPRGRLYEFASSSIQETIERYRSHSRINNTQTTCESAENTQHLKEEAENMMKRIDLLETSKRKLLGEGLGTCSIEELQKIEQQLERSITKIRAKKTQVFREQIGHLKEKEKTLIAENVMLSEKYDKYSSQQAKKDDRKNIAEGEAFAASSDVETELFIGLPETRTRISPA

SEQ ID NO: 25401 - protein, 139 aa, Pisum sativum
DSWKEVSEEGRLAFRALFSREVLPQSFSPPPDLINKDHQMGNMKDNEEKAHHKDHLDSKKCSSSCDRLLQNLPFVQNNSEDEGLLTLGLGQGKLKTRRTGFKPYKRCLVEAKETRIGTACNQVEETGPKRIRLEGGSST

SEQ ID NO: 25402 - protein, 373 aa, Staphylococcus aureus subsp. aureus MRSA252
MAELQRGLEGVIAAETKISSIIESQLTYAGYDIDDLAENAQFEEVIFLLWNYRLPNEEELAHLKGKLNQYMTLNPRVYTHFEEYVTDHVHPMTALRTSLSYIAHFDPDAENESDENRYERAMRIQAKVASLVTAFARVRQDKEPIKPNPDLSYAANFLYMLRGELPTDIEVEAFNKALILHADHELNASAFTARCAVSSLSDMYSGIVAAVGSLKGPLHGGANEQVMTMLSEIGSIENVDAYLDEKFANKDKVMGFGHRVYKDGDPRAKYLREMSRQITKDAGREELFEMSVKMEKRMAEEKGLIPNVDFYSASVYHCMEIPHDLFTPIFAVSRSAGWIAHILEQYKDNRIMRPRAKYIGETNRKYIPLEERK

SEQ ID NO: 25403 - protein, 453 aa, Staphylococcus aureus subsp. aureus MRSA252
MAEKLQRELSNRHIQLIAIGGAIGTGLFLGAGQTIALTGPSILLTYIIIGFMLFMFMRGLGEIIIQNTEFKSFADVTNTYIGPFAGFVTGWTYWFCWIITGMAEVTAVAKYVSFWFPEIPNWISALFCVLLLMSFNLLSARLFGELEFWFSIIKIATIIGLIVVGFVMILFAYKTQFGHASFTNLYEHGVFPKGASGFFMSFQMALFSFVGIEMIGVTAGETKDPVKTIPKAINSVPIRILIFYVGALAVIMSIIPWQQVDPDNSPFVKLFALIGIPFAAGLINFVVLTAAASSCNSGIFSNSRMLFGLSSQQQAPPNFSKTNKYGVPHVAIFASSALLLVAALLNYIFPDATKVFTYVTTISTVLFLVVWGLIIIAYINYSRKTPDLHKKATYKLFGGKYMGYLIFVFFIFVFGLLFINVETRRAIYFIPIWFILLGFMYLRYKRIAAKSNN

SEQ ID NO: 25404 - protein, 68 aa, Pisum sativum
  misc_feature (5)..(6): Xaa can be any naturally occurring amino acid
  unsure (1)..(68): unsure at all Xaa locations
FTKQXXRWTDEEHKKFLEALKLYGRAWRKIEEHVGTKTAVQIRSHAQKFFSKINRDTNGNDTTLVESI

SEQ ID NO: 25405 - protein, 585 aa, Staphylococcus aureus subsp. aureus MRSA252
MRKTKIVCTIGPASESEEMIEKLINAGMNVARLNFSHGSHEEHKGRIDTIRKVAKRLDKIVAILLDTKGPEIRTHNMKDGIIELERGNEVIVSMNEVEGTPEKFSVTYENLINDVQVGSYILLDDGLIELQVKDIDHAKKEVKCDILNSGELKNKKGVNLPGVRVSLPGITEKDAEDIRFGIKENVDFIAASFVRRPSDVLEIREILEEQKANISVFPKIENQEGIDNIEEILEVSDGLMVARGDMGVEIPPEKVPMVQKDLIRQCNKLGKPVITATQMLDSMQRNPRATRAEASDVANAIYDGTDAVMLSGETAAGLYPEEAVKTMRNIAVSAEAAQDYKKLLSDRTKLVETSLVNAIGISVAHTALNLNVKAIVAATESGSTARTISKYRPHSDIIAVTPSEETARQCSIVWGVQPVVKKGRKSTDALLNNAVATAVETGRVTNGDLIIITAGVPTGETGTTNMMKIHLVGDEIANGQGIGRGSVVGTTLVAETVKDLEGKDLSDKVIVTNSIDETFVPYVEKALGLITEENGITSPSAIVGLEKGIPTVVGVEKAVKNISNNVLVTIDAAQGKIFEGYANVL

SEQ ID NO: 25406 - protein, 222 aa, Oryza sativa (japonica cultivar-group)
MKVYGWVVSPWMARVLVALEEAGAEYEVVPMSRSGGDHRRPEHLARNPFGEIPVLEDGDLTLYQSRAIARYIFRKYKPEFLGLGEGGSLEESAMVDVWLDVEAHQHEAAVRPILWHCIINKFEGRDRDQGVVDESVRKLEKVLGVYEARLSGSRYLAGDRISLADLSHFSNMRYFMATEYAGVVDAYPHVKAWWEALLARPTVQKVMAGMPPDFGFGSGNIP

SEQ ID NO: 25407 - protein, 204 aa, Citrus unshiu
KLGDDEFGHMLVNILKQNNVKTEGVCFDNHARTALAFVTLKKNGEREFMFYRNPSADMLLKDSELNMGLIKQAKIFHYGSISLISEPCRSAHMAALKAAKDAGVLLSYDPNVRLPLWPSQDAARDGIKSIWNHADLIKVSDDEVNFLTKGGDAEKDDVVMSLWHDNLKLLLVTYGAKGCGYFTKKFKGRVPGFSVKTVDTTGAG

SEQ ID NO: 25408 - protein, 479 aa, GIBBERELLA ZEAE PH-1
MSSLATKQQSLKIFEKLKTKPANKICFDCGQKNPTWTSVPFGIYLCLDCSSNHRNLGVHISFVRSTNLDQWQWDQLRVMKVGGNESATKFFQQNGGTAALNSKDPKTKYQSNAATKYKDELKRRAARDAQDYPTEVIITDAIDDGSATPAGEPDDDFFSSWDKPAIKRPTPPVSRTGTPPVVGRTPSPFLNSGNGKDIARTASPLSRTSTGENKPASRITTSAALRKTPASTGPRKANVLGAKKTTKLGAKKVTADIIDFDEAERKAKEEADRIAKLGYDPDAEEDPATKNSGSAAAIISPTPVAPSRGSASSHTRQKSDAEVERLGMGMNRLGFGQVGGPKAAASSAPKRNAGGFGSVGPVRAQDVDDSERYAREKFGTQKGISSDEFFGKGAFDPSQQSEAKTRLQGFEGATAISSNAYFGRPEDEPEEEYGDLESAAKDFVRKFGITAGDDLENLTQMAGEVSTRLQGAIRSYLGN

SEQ ID NO: 25409 - protein, 52 aa, Rubrobacter xylanophilus DSM 9941
MDLLRIIVAILLPPLGVFLQVGFGKHFWINILLTILGYIPGIVHAVWVIAKY

SEQ ID NO: 25410 - protein, 433 aa, Lactococcus lactis subsp. lactis Il1403
MRKLSPTFIYFFGALGGLLFGYDTGVISGALLFIEKESWQVSSWAWMEGWITAAVLMGAVIGAVVIGPMSDRFGRKRLLLLSAVIFFVGALGSGLSNSAELLIISRVILGMAVGSASALVPTYLSELSPAKIRGGVSTMFQLMIMTGILLAYISNYALKGVSGNWHWMLGLATVPAALLFIGGLFLPESPRFLVRHDNEAGAREILGMINDDPNSIEAEISDIQLMAKEEKQGGLQELFGQMSRPVLIMAIGLAIFQQVMGCNTVLYFAPSIFVAVGFGASAALLAHIGIGIFNVIVTYIAMRVMDKVNRRWMLNFGAWGMGISLVLMSVGMILAENAHIGFGKYLAVIALTVYIAFFSATWGPVMWVMIGESFPLKIRGLGNSFGAAVNWAANWVVSLTFLPLLSFFGTGKIFLIYAACCFLSIWFTSKKSY

SEQ ID NO: 25411 - protein, 417 aa, Halobacterium salinarum
MPEANPFESLQEQLDDAGEFLDVNADVLERLKHPERVLETTLSVEMDDGTIETFKAFRSQFNGDRGPYKGGIRYHPGVTRDEVKALSGWMVYKTAVADIPYGGGKGGIILDPEEYSDSELERITRAFATELRPFIGEDKDVPAPDVNTGQREMNWIKDTYETLEDTTAPGVITGKALENGGSEGRVNATGRSTMFAAREVFDYLDRDLSDATVAVQGYGNAGSVAAKLIADQGADVVAVSDSSGAVHNPDGLDTRAVKAFKTETGSVSGYEGATEELSNEALLTMDVDLLVPAALENAIDEDLAHDVDADVVVEAANGPLTPDADDVLTERGVTVVPDILANAGGVTVSYFEWVQNRQRFQWTEDRVNEELEAIITDAFDAMTDAHEDAGTPNLRTAAYVVAVQRVVDAYEGSGSWP

SEQ ID NO: 25412 - protein, 232 aa, Solenangis aphylla
SDSGKDAGRLSAAWQLYKAQEDLVKVAKEFGVKLTMFHGRGGTVGRGGGPTHLAILSQPPDTIHGSLRVTVQGEVIEQSFGEEHLCFRTLQRYTAATLEHSMCPPASPEPEWRELLDEMAVAATKEYRSIVFHEPRFVEYFRLATPELEYGRMNIGSRPSKRKPSGGIESLRAIPWIFAWTQTRFILPVWLGFGAAFKHVIDKDIKNLLMLQEMYTRRPFFRVTIDLVEMVF

SEQ ID NO: 25413 - protein, 654 aa, Oryza sativa
  misc_feature (86)..(86): Xaa can be any naturally occurring amino acid
  unsure (1)..(654): unsure at all Xaa locations
MFSWSRKQSSSSGRRGADASSMDSSSRGGGGEGSGSGSRGRSSRLERRNAVKHIDYEAAGAGAGAGASSEPACASWSSSMSADRSXLGLRPSSSLDLAVGGGGTDIRISGSVEGEVDELCRSLGLSGPEEFAIPVAAWEARKERSNSDLLPRSSFVSSPPVDDPSPMARTISAPEVIQCDLPPSFPASIPEESLNSSSNSTATDSAEEPTAAALGQESPKAAPAVAAVAPLAGLPLLSPKRGGGEVGIRGARPPVLSPPQPLMALAPPPMRRSIVAKDMSGVSAWDIVNSFAPSEEKSEVRTDDERVDASHMSDTEEEEFADEGVAGVDGELKELRIGETFEGFTGTSSLSTTNDDDASSTTTEAMFIISPNGKFKRKIKSWMRGALLGSGSFGMVYEGISDEGAFFAVKEVSLLDQGSNAQQSILALEQEIALLSQFEHENIVQYYGTDKEESKLYIFIELVTQGSLSSLYQKYKLRDSQVSAYTRQILNGLVYLHERNVVHRDIKCANILVHANGSVKLADFGLAKEMSKINMLRSCKGSVYWMAPEVVNPKKTYGPQADIWSLGCTVLEMLTRNIPYPNVEWTNAFFMIGKGERPQIPSYLSKDAQDFISQCVQVDPEQRPSASQLMSHPFVNRPLRASFESASPPAISSY

SEQ ID NO: 25414 - protein, 240 aa, Solenangis aphylla
RKSGRCAANKPFQEILHPCFTDLMYVWMNIGSRPSHRKHSGGIESLRAITWIFAWTQTRFHLTVWLGCGAAFKHVIDKECRKPFTCIQHMYNQWPFLRVTIDLVEMVFAKGDPGIAALYDKLLVPQELSPFGEQLRLNYEGTNELLVQIAGHKDLLEGDPYLKQRLRLRHAYITTLNVCQACPLKKTRDPASHVTVRPHLSKEYIESSKPAAELVKLNPTREYAAGLEDTLILTMKGIAA

SEQ ID NO: 25415 - protein, 368 aa, Glycine max
SMYQSRGIYTNARVVFCIHNIAYQGRFAFADFSLLNLPDQFKSSFDFIDGHVKPVVGRKINWLKAGLIESWFVITVSPNYAKELVSGPDKGVELDNIIRKIDDDGRLVGIVNGMDVQEWNPTTDKYIAVKYDVSTVLEAKALLKEALQAEVGLPVDRNIPLIGFIGRLEEQKGSDILAEAIPQFIKQNVQLVALGTGKKQMEKQLEELEISYPDKARGVAKFNVPLAHMIIAGADFILVPSRFEPCGLIQLQAMRYGSVPIVASTGGLVDTVKEGFTGFQMGAFNVECDAVDPADVDAISKTVKRALAVYGTPAFTEIIKNCMAQDLSWKGPAKEWEEVLLSLGVPGSEPGSDGEEIAPQAKENVATP

SEQ ID NO: 25416 - protein, 357 aa, Pyrrosia longifolia
SDSGKDAGRLSAAWQVFKTQEDCVKVANQFGVKLTLFHGRGGSVGRGGGPTHLAILSQPPDTIHGSLRVTVQGEVIEQCFGEEHLCLRTLQRFTAATLEHGMQPPRAPKPEWRALTDEITPIATDEYRGVVFKEPRFVKYFRAVTPELEYGRMNIGSRPSKRKPSGGIESLRAIPWIFAWTQTRFHLPVWLGIGSALQHALNKDKRNLPLLQEMYNEWPFFRATIDLIEMVFAKGDPRIAALYDKYLVSGDLQQFGDELRKKYGDTRDLLLLVAGHSELLQGNPTLKQRLKLREPYLTVLNVQQVYTLRKMRDAGYIPKSPTSQSKPASELVSLNTTSEYAPGLEDTLILTMKGIAA

SEQ ID NO: 25417 - protein, 79 aa, Lycopersicon esculentum
QETIAAYGEGNERRLTGRHETADINTFKWGVANRGASIRVGRDTEKEGKGYFEDRRPASNMDPYVVTSMIAETTILWNP

SEQ ID NO: 25418 - protein, 357 aa, Pyrrosia longifolia
SDSGKDAGRLSAAWQAFKTQEDCVKVANQFGVKLTLFHGRGGSVGRGGFPTHLAILSQPPDTIHGSLRVTVQGEVIEQCFGEEHLCFRTLQRFTAATLEHGMQPPRAPKPEWRALMDEITPIATDEYRGVVFKEPRFVKYFRAVTPELEYGRMNIGSRPSKRKPSGGIESLRAIPRIFAWTQTRFHLPVWLGIGSALQHALNKDKRNLQLLQEMYNEWPFFRATIDLIEMVFAKGDPRIAALYDKYLVSGDLQQFGDELRKKYGDTRDLLLLVAGHSELLRGNPTLKQRLKLREPYLTVLNVQQVYTLRKIKDAGYIPKSPTSQSKPASELVSLNTTSEYAPGLEDTLILTMKGIAA

SEQ ID NO: 25419 - protein, 671 aa, Desulfitobacterium hafniense DCB-2
MDFASTPIWAVLAGLVGLAFAFYFASSVLKESPGNARMQEISLAIQEGAMAFLNRQYKTLIPFVIIIFLILTFLKGWQTAVSFLVGALLSAVAGYVGMGITTRANARTTEAARTSLNKALGVSFRAGAVMGLSVNGLGLIGVAALFLWFQDAETINSFAFGASAIALFARVGGGIYTKAADVGADLVGKVEAGIPEDDPRNPAVIADNVGDNVGDTAGMGADLFESYAATTIAAMLIGAVAFKSLGGGVSGLMLPLMIGIAGILSSIIASFFVRTGENANPQTALNKGLWGTNLLTAIASYAIVQLMITEPVHVSESLTLTANNIFIAIVCGLVVNILIGLLTEYYTSNQKAPAQAIAKASETGAATNIIQGLATGMKSTALPVVVICVATYVSFAAAGIFGIAMAAMAMLSTAGMVVAIDSFGPVADNAGGIAEMADLDPSVRKTTDKLDSVGNTTAAVAKGFAIGSAALTALALFNAYSELAHLDRIDILVPTTIIGLFIGAALPFLFSAFAMEAVGKAAFEMIGEVRRQFREIPGLMEGKAKPDYRACVDISTKAAIRQMIVPGLLAIGSPILVGFLLGKDALGGMLAGGTVSGLLMAIFMANAGGAWDNAKKYVEAGNLGGKGTPTHAAAVIGDTVGDPFKDTAGPSLNALIKVMGTISLIIAPLLI

SEQ ID NO: 25420 - protein, 100 aa, Medicago sativa
EQLAREVEYLIRKGWIPCLEFELEKGFVYRENHRSPGYYDGRYWTMWRLPLFGATDSSQVLKELADCKAEYPDSFIRIIGFDNVRQVQCISFIAHTPKNY

SEQ ID NO: 25421 - protein, 357 aa, Pyrrosia longifolia
SDSGKDAGRLSAAWQVFKTQEDCVKVANQFGVKLTLFHGRGGSVGRGGGPTHLAILSQPPDTIHGSLRVTVQGEVIEQCFGEEHLCFRTLQRFTAATLEHGMPPPRAPKPEWRALMDEITPIATDEYRGVVSKEPRFVKYFRAVTPELEYGRMNIGSRPSKRKPSGGIESLRAIPWIFAWTQTRFHLPVWLGIGSALQHALNKDKRNLQLLQEMYNEWPFFRATIDLIEMVFAKGDPRIAALYDKYLVSGDLQQFGDELRKKYGDTRDLLLLVAGHSELLQGNPTLKQRLKLREPYLTVLNVQQVYTLRKMRDAGYIPKSPTSQSKPASELVSLNTTSEYAPGLEDTLILTMKGIAA

SEQ ID NO: 25422 - protein, 122 aa, Brassica napus
MSGLYNNNSSYFSSPARAASPQIRSTPPEIDSSQYLTELLAEHQKLTPFTQVLPICSRLLNQEMFRVSGMMSSNQGFGDFDRLRHRSPSPMASSNLIPNVSNAGLGGGWNGLPQERLSGAFF

SEQ ID NO: 25423 - protein, 293 aa, Gossypium hirsutum
MDVYKRGFISETSRSEEEMELRKGPWTEEEDSMLRAYVNIHGEGRWNAVARLSGLRRTGKSCRLRWLNYMRPEIKRGNISLEEQLLILELHSRWGNRWSKIAQHLPGRTDNEIKNYWRTRVQKQAKQLNCDVNSKQFKDAMRYVWIPRLVERIRASSESPSSQPSTTTNTTYNDRISNISSSQMSYANASGSVQVDPSLLPELSGTSSDSLDTQVSSVSDLTDCYNPQSLSNYLHKGLGLEKEGAATWGRDEEFQATEEHSNGWLVGGGESSMDTVWNEENVWFLQQQLHDGI

SEQ ID NO: 25424 - protein, 293 aa, Gossypium hirsutum
MDVYKRGFISETSRNEEEMELRKGPWTEEEDSMLKAHVNIHGEGRWNAVARLSGLRRTGKSCRLRWLNYMRPEIKRGNISLEEQLLILELHSRWGNRWSKIAQHLPGRTDNEIKNYWRTRVQKQAKQLNCDVNSKQFKDAMRYVWIPRLVERIRASSESPSSQPSTTTKTTYNDCISNISSSQMSYANASGSVQVDPSLLPELSGTSSDSLDTQVSSVSDLTDCYNPQSLSNYLHKGLGLEKEGAATWGRDEEFQATEEHGNGLLVGGGESSMDTVWNEENVWFLQQQLRDGI

SEQ ID NO: 25425 - protein, 300 aa, Desulfovibrio desulfuricans G20
MRRPLGVGLGEVLWDMLPDGPQLGGAPANFAYHFNALGGQGMIVSRVGDDDAGRRACRLLAEQGLDVSRISVDPLHPTGRVDVLLSAQGTASYVFPDDVAWDFLPAARAEDTLAGGAACICFGTLCQRTPAGRAAVRSFLQAAHAAVLRVFDCNLRQNFYSPEVVQDSLQLADVFKLNEEELDVLAPALGVADVLRDAAARRAALHALVTRFGLQAAALTRGAQGSVLMTGESCHEHAGEMVEVADTVGAGDAFTAALALGWLCGLPPEQIHARAASVAAYVCGAHGAMPPMPAALRLLP

SEQ ID NO: 25426 - protein, 141 aa, Brassica napus
TRWSIQDSISSPMIMDAFLGNLQEAIFTMNPETTQMEMLFCSTVVGLPFLFVPMVLTGELFRAWTACSQHPYVYGVLVFEAMATFIGQVSVLSLIALFGAATTALITTARKGVTLLLSYLIFTKPLTEQHGSGLLLIAMGI

SEQ ID NO: 25427 - protein, 501 aa, Lactococcus lactis subsp. lactis Il1403
MTYVLGIDLGTSSLKGILMDEVGNLITTKSAEYQIDTPKQGYSEQRPEYWIVALESVLTGLSVEISDFGQQLAGISFSGQMHSLVVLDDNNKPVYPAILWNDVRTSKQCQEITDRLGQRLLEITKNIALEGFTLPKILWLQENEPEVWSRVKKIMLPKDYLSLWLTGNIYTEFSDAAGTLLLDIEKKQWSEEITDAFNIDRRILPELIESTDRTGFVKAEIAERYKLTNEVKVFAGGADNAAAALGVGLINEEVGLISMGTSGVVSAYEPKIADYKGKLHFFNHTVPGACYSMGVTLAAGNSLNWYKETFGKGLSFNELLSEVYTVSPGSEGLLFTPYIVGERTPHFDSKIRGSFIGISAHHEQKHFSRAVLEGITFSLRDSKDIMEKTKNKKFKRLISVGGGAQNPDIMQMQADIFNSEMIRLTVEQGPGLGACMIAAFGCGLFDSLEAVTKAFVHYKEASFIPNPKNVARYEQIYQIWKQVYKNTSEISHQLVEFNDEG

SEQ ID NO: 25428 - protein, 481 aa, Streptococcus mutans
MPITNKTMLITYADSLGKNLKELNENIENYFGDAVGGVHLLPFFPSTGDRGFAPIDYHEVDSAFGDWDDVKRLGEKYYLMFDFMINHISRQSKYYKDYQEKHEASAYKDLFLNWDKFWPKNRPTQEDVDLIYKRKDRAPKQEIQFADGSVEHLWNTFGEEQIDLDVTKEVTMDFIRSTIENLAANGCDLIRLDAFAYAVKKLDTNDFFVEPEIWTLLDKVRNIAAVSGAEILPEIHEHYTIQFKIADHDYYVYDFALPMVTLYSLYSGKVDRLAKWLKMSPMKQFTTLDTHDGIGVVDVKDILTDEEITYTSNELYKVGANVNRKYSTAEYNNLDIYQINSTYYSALGDDDQKYFLARLIQAFAPGIPQVYYVGFLAGKNDLELLESTKEGRNINRHYYSSEEIAKEVKRPVVKALLNLFTYRNQSAAFDLDGRIEVETPNEATIVIERQNKDGSHIATAEINLQDMTYRVTENDQTISFE

SEQ ID NO: 25429 - protein, 536 aa, Streptococcus mutans
MQKHWWHKATVYQIYPKSFMDTNGDGIGDLKGITSKLDYLQKLGVMAIWLSPVYDSPMDDNGYDIANYEAIADIFGNMADMDNLLTQAKMRDIKIIMDLVVNHTSDEHTWFIEAREHPDSSERDYYIWCDQPNDLESIFGGSAWQYDDKSDQYYLHFFSKKQPDLNWENANLRQKIYDMMNFWIDKGIGGFRMDVIDMIGKIPAQHIVSNGPKLHAYLKEMNAASFGQHDLLTVGETWGATPEIAKQYSNPVNHELSMIFQFEHIGLQHKPEAPKWDYVKELNVPALKTIFNKWQTELELGQGWNSLFWNNHDLPRVLSIWGNTGKYREKSAKALAILLHLMRGTPYIYQGEEIGMTNYPFKDLNELDDIESLNYAKEAFTNGKSMETIMDSIRMIGRDNARTPMQWDASQNAGFSTADKTWLPVNPNYKDINVQAALKNSNSIFYTYQQLIQLRKENDWLVDADFELLPTADKVFAYLRKVREERYLIVVNVSDQEEVLEIDVDKQETLISNTNESAALANHKLQPWDAFCIKIN

SEQ ID NO: 25430 - protein, 725 aa, Mycobacterium tuberculosis CDC1551
MRHCKRRDSRTRVRTDHLADSRTEFVTTLEEISALTRPRHPDDWTEIDSAAVDTIRVLAADAVQKVGNGHPGTAMSLAPLAYTLFQRTMRHDPSDTHWLGRDRFVLSAGHSSLTLYIQLYLGGFGLELSDIESLRTWGSKTPGHPEFRHTPGVEITTGPLGQGLASAVGMAMASRYERGLFDPDAEPGASPFDHYIYVIASDGDIEEGVTSEASSLAAVQQLGNLIVFYDRNQISIEDDTNIALCEDTAARYRAYGWHVQEVEGGENVVGIEEAIANAQAVTDRPSFIALRTVIGYPAPNLMDTGKAHGAALGDDEVAAVKKIVGFDPDKTFQVREDVLTHTRGLVARGKQAHERWQLEFDAWARREPERKALLDRLLAQKLPDGWDADLPHWEPGSKALATRAASGAVLSALGPKLPELWGGSADLAGSNNTTIKGADSFGPPSISTKEYTAHWYGRTLHFGVREHAMGAILSGIVLHGPTRAYGGTFLQFSDYMRPAVRLAALMDIDTIYVWTHDSIGLGEDGPTHQPIEHLSALRAIPRLSVVRPADANETAYAWRTILARRNGSGPVGLILTRQGVPVLDGTDAEGVARGGYVLSDAGGLQPGEEPDVILIATGSEVQLAVAAQTLLADNDILARVVSMPCLEWFEAQPYEYRDAVLPPTVSARVAVEAGVAQCWHQLVGDTGEIVSIEHYGESADHKTLFREYGFTAEAVAAAAERALDN

SEQ ID NO: 25431 - protein, 124 aa, Brassica napus
MAKFGEGDKRWIVEDRPDGTNVHNWHWAETNCLEWSRSFFTNQFSNAVILSGEGNLFIKIKKLEKLEGEAYVNVRKGKIIPGYELSVSLSWEGEAKDSEGKTISKAEGAVDMPYISDENADEDR

SEQ ID NO: 25432 - protein, 371 aa, Listeria monocytogenes EGD-e
MASKTKKAIIDVKKQFEAVHKQFELVQILNEKGEIVNPDLMPDLTDDQLVELMTRMVWTRVLDQRSISLNRQGRLGFYAPTAGQEASQLASHYALEKHDYILPGYRDVPQLIWHGLPLTKAFLFSRGHFVGNQFPEDLNVLSPQIIIGAQIVQAAGVALGLKKRKKDAVVITYTGDGGSSQGDFYEGMNFAGAYHAPAIFVVQNNKFAISTPREKQSAAETLAQKAVAAGIPGVQVDGMDPLAVYAVTKFARERAVAGEGPTLIETMTYRYGPHTLSGDDPTRYRTKELDGEWELKDPIVRFRTFLEGKGLWNEEKENAVIDQAKEEIKVAIKEADATPKQTVTDLLKNMYETPTAPIKEQLAIYEAKESK

SEQ ID NO: 25433 - protein, 497 aa, Mycoplasma genitalium G37
MSTDKKTLGEKPNSTKPELSEELIAELKKQRILEKNRPYKKMIYVDNKVQRKHRHENIAFLKTLHENKESDVPKKRRGRKPKHAPLKEKNNLKLFDILEGSLKSHIENDDTNTVINLLTEAWEKKSKKKQKNITLSNKEIISVLAKFELPEDEIIYVLDELRDKGIQLQHDVEEHIHEFRANQDLSIIDEDIEELTSKNISNRDKVDDNVRFFLGSLDFSKMLDFESEQRIAKVLNSTDEESRKYAINQLVTSNLRLVVSIAKKHLERGLDFNDLIQEGNLGLLKAISKFNWSLGNKFSTYATWWIKQAITRAIADQARTVRIPVHMVETINRLAKAERALYQELGREPTDEELAEKMGGQAEGFNVKKIAEIKRLSLDPVSLDKTVGHDEESQFGDFVKDTDAQTPDEFTESRSNSEKIDELLNNNLSEQEELIVRMRIGMPPYNEPKTLDEVGQKILIPREKIRQIENKAIRKLRHAVRNNPISMSFLRINEKKD

SEQ ID NO: 25434 - protein, 446 aa, Mycoplasma genitalium G37
MAKVYNQEVYVQFLKQHGFVFQSSEIYNGLNNSWDFGPLGAVLKQQIKQALYNFFIKNKADVLLVETPIILSELVWKASGHLANFVDTLVDCKSCKYRFRVDQINAEIKAKKDWNSFKVNCPNCHNQNWSEVRDFNLLFQTEIGVVNNDKRLVFLRPETAQGSFINFKNILQAKKRNLPFAIAQFGKSFRNEITPGNFLFRTREFEQFEIEWFCKPDDANSLFEKQLIMVEQFLQTVLKINPELLKKHEYDQSELAHYAKKTTDFLFNFPHGLKELWGLANRGDFDLKQHQEFSKKSMSFFDSELNQHFLPFIIEPAVGIERLFYALIVSSYRREIINEEEREVLSLPFDLCPEQIIVLPLVNKLKKEAFSVFETLAKTRWRVCFETTGSIGKRYRKADAIGIKYAVTFDFESLEDNAVTIRDRDTLVQQRIAIKELPQWFMKNGQ

SEQ ID NO: 25435 - protein, 467 aa, Listeria monocytogenes EGD-e
MVVGDFPEERDTIVIGAGPGGYVAAIRAAQLGQKVTIIEKEYYGGVCLNVGCIPSKALITIGHRFKEAGHSDNMGITADNVNLDFTKAQEWKGGVVNKLTSGVKGLLKKNKVEMLEGEAFFVDDHSLRVIHPDSAQTYTFNNVIIATGSRPIEIPGFKYGKRVLSSTGALALTEVPKKLVVIGGGYIGTELGGAFANLGTELTILEGGPEILPTYEKDMVSLVKRNLKSKNVEMVTKALAKSAEETENGVKVTYEANGETKTIEADYVLVTVGRRPNTDEIGLEQAGVKVTERGLVEVDKQGRSNVSNIFAIGDIVPGVPLAHKASYEAKIAAEAIAGEKSENDYTALPAVVFSDPELATVGLTEKEAKEKGFDVKAAKFPFGGNGRALSLDAPEGFVRLVTRKEDGLVIGAQVAGMNASDIISEIGLAIESGITAEDIALTIHAHPSLGELTMEAAELALGRPIHM

SEQ ID NO: 25436 - protein, 407 aa, Streptomyces coelicolor A3(2)
MTAPVRTARGSEELIRAEEPVLAHNYHPLPVVVARAEGAWVEDVEGRRYLDMLAGYSALNFGHRHPALVEAAHRQLDRLTLTSRAFHNDRLAGFAERLAALTGTDMVLPMNTGAEAVESGIKVARKWAYDVKGVPADRATIVVAADNFHGRTTTIVSFSTDETARSGFGPFTPGFRIVPYNDLAALEAAVDETTAAVLIEPIQGEAGVLIPDDGYLAGVRELTRRKGCLFVADEIQSGLGRTGHTLAVEHESVVPDVVLLGKALGGGIVPVSAVVGRRDVLGVLHPGEHGSTFGGNPLAAAVGTAVVELLETGAFQRRAAELGAVLREGLAALVGRGVVGFRARGLWAGVDVDPALGSGREISERLMREGILVKDTHGSTIRLAPPLTVTAEELTGALGTLEKVLTS

SEQ ID NO: 25437 - protein, 164 aa, Nocardia farcinica IFM 10152
MAEMSIRDIPLRTLSGADTTLAELVGDKAVLLVNVASKCGLTPQYSGLVELHRSYGERGFSVVGVPCNQFMGQEPGTAEEIEQFCSTTYGVDFPLLEKTEVNGENRHPLYAELTQVADAEGTAGDIQWNFEKFLIDRDGKVAGRFRPRTEPQDPALVAALEGVL

SEQ ID NO: 25438 - protein, 475 aa, Oceanobacillus iheyensis HTE831
MSKKDILDWISTNEGVFTDIAKNIWENPQLAYDEDYASQLQIDTLKNEDFRIQPNIGGVPTAFVAEYGSEAPIIGVLGEFDALPGLSQTVSPTKEEIVADGPGHGCGHHLLGTAGVEAVIALKDYMKKEGIKGTIRYYGCPAEEVLSGKTYMAREGVFDDLDCCLTWHPGTSNFTVNQSMQAMVSVEFVFTGITAHAAAAPHAGRSALDAVELMNVGTNYMREHVLDGSRIHYVITNGGLAPNVVPDQAKVWYYLRAATKEQVNDMLRRVKKIADGAVLMTETEVESNILAFAYETLPNETLNDVMYENMMQSEISFTKEEETFATHLLESIDSEIVEMSKKQLRDQVDDLLPTHITNNKQLLGSSVGGSTDVGDVSWITPTGMVMTTCAPVGVQAHTWQATSAYGSSIGYKGMHLAAKTMALTLYDLFSNEELVVQAKEEFKQSTIDKPYKAGIPDDVKPPVKRKVDPVLASMK

SEQ ID NO: 25439 - protein, 335 aa, Mycobacterium tuberculosis CDC1551
MPGHDSHMHAIEVTETGGPGVLRHVDQPQPQPGHGELLIKAEAIGVNFIDTYFRSGQYPRELPFVIGSEVCGTVEAVGPGVTAADTAISVGDRVVSASANGAYAEFCTAPASLTAKVPDDVTSEVAASALLKGLTAHYLLKSVYPVKRGDTVLVHAGAGGVGLILTQWATHLGVRVITTVSTAEKAKLSKDAGADVVLDYPEDAWQFAGRVRELTGGTGVQAVYDGVGATTFDASLASLAVRGTLALFGAASGPVPPVDPQRLNAAGSVYLTRPSLFHFTRTGEEFSWRAAELFDAIGSEAITVAVGGRYPLADALRAHQDLEARKTVGSVVLLP

SEQ ID NO: 25440 - protein, 576 aa, Desulfitobacterium hafniense DCB-2
MPIIIRFFKDKRFRVIITMFLRFVFQLWWLSKKRRFYGEEAYQKQLKAVYQKQARIFAEIAMGMGGLLIKLGQFFSSRVDILPEEYTRELALLQDAVKPVPTADIIRRIEAEYGRPLGEIYLNFSPEPIASASLGQVHTAEIKGHDQVAVKILRPGIEEIISSDFDALRFVVTFAKRYPRIRAAVDLEQIYAEFTETTLDELDYLKEGRHADQFRENFAGEPGIAVPKVYWEYTTRRVLTMEYITGYKINDFAALDKAELDRVKLADTLITAYVQQFLSDAFFHADPHPGNLLVKEDGTLVFLDFGMVGRIDEGMREELISFVMALFKKDTEQMVEVFANLGFLRPHAEKGTLAKGLKLILANIFAEKDLKKVNSEEFLWELREFMYSQPFQIPARTLFLGKALLSIIGICGGLNPRLDLIKTLRPYAEELLAGKEQADGAQGFAQKFILDQAKKTFTDVVGLPERINHLITGLEGGSIRLHPARSFEQNLLQSQREQGNRIVQAIVSSGFLIAGTILLEGPYLKIGIGLIAFSALSFLSLLKSNAGRARSERRGRGNRAMRNASATGFKKPRFHP

SEQ ID NO: 25441 - protein, 200 aa, Arabidopsis thaliana
MVSLKLQKRLASSVLKCGKRKVWLDPNEGSDISMANSRQNIRKLVKDGFIIRKPTKIHSRSRARQLNIAKRKGRHSGYGKRKGTREARLPTKVLWMRRMRVLRRLLKKYRETKKIDRHMYHDMYMKVKGNVFKNKRVLMESIHKSKAEKAREKTLSDQFEAKRAKNKASRERKHARREERLAKGPGGDIPAAAPPAQTAE

SEQ ID NO: 25442 - protein, 194 aa, Medicago sativa
MASASASLFKSSIVLDKSEWVKGQTLRQSSVSSVRCNPTAPSSLTIRAGSYADELVKTAKTIASPGRGILAMDESNATCGKRLASIGLENTEVNRQAWRTLLVTVPSLGEYISGAILFEETLYQSTTDGRKIVDVLIEQNIVPGIKVWTRVWCPLLVPMDESWCPGLDGLASRSAAYYQQGARFAKWRTVVSIP

SEQ ID NO: 25443 - protein, 128 aa, Triticum aestivum
  misc_feature (96)..(96): Xaa can be any naturally occurring amino acid
  unsure (1)..(128): unsure at all Xaa locations
VEGKALKMSSTVPKSSNIFWHDCPVGKTDRQKLLKQKGCVVWITGLSGSGKSTLACTLGRELHTRGKLAYVLDGDNLRHGLNKDLGFNAEDRAENXRRVGEVAKLFSDAGLVCIASLISPYRRDRESC

SEQ ID NO: 25444 - protein, 577 aa, Saccharomyces cerevisiae
MKYVVVSGGVISGIGKGVLASSTGMLLKTLGLKVTSIKIDPYMNIDAGTMSPLEHGECFVLDDGGETDLDLGNYERYLGITLSRDHNITTGKIYSQLISRERRGDYLGKTVQIVPHLTNAIQDWIQRVSKIPVDDTGLEPDVCIIELGGTVGDIESAPFVEALRQFQFEVGRENFALIHVSLVPVIHGEQKTKPTQAAIKDLRLLGLIPDMIACRCSEELNRSTIDKIAMFCHVGPEQVVNVHDVNSTYHVPLLLLKQHMIDYLHSRLKLGEVPLTLEDKERGSQLLTNWENMTKNLDDSDDVVKIALVGKYTNLKDSYLSVTKSLEHASMKCRRQLEILWVEASNLEPETQEVDKNKFHDSWNKLSSADGILVPGGFGTRGIEGMILAAKWARESGVPFLGVCLGLQVAAIEFARNVIGRPNSSSTEFLDETLLAPEDPSSHIHAEIDKEHMGGTMRLGLRPTIFQPNSEWSNIRKLYGEVNEVHERHRHRYEINPKIVNDMESRGFIFVGKDETGQRCEIFELKGHPYYVGTQYHPEYTSKVLEPSRPFWGLVAQLRHTCEVIKDINLSEGNENE

SEQ ID NO: 25445 - protein, 334 aa, Oryza sativa
MEERYEALKELGAGNFGVARLVRDKRSKELVAVKYIERGKKIDENVQREIINHRSLRHPNIIRFKEVCLTPTHLAIVMEYAAGGELFEQICTAGRFSEDDARYFFQQLISGVSYCHSLEICHRDLKLENTLLDGSPTPRVKICDFGYSKSALLHSKPKSTVGTPAYIAPEVLSRKEYDGKVADVWSCGVTLYVMLVGSYPFEDPGDPRNFRKTISRILGVQYSIPDYVRVSSDCRRLLSQIFVADPSKRITIPEIKKHTWFLKNLPKEISEREKADYKDTDAAPPTQAVEEIMRIIQEGKVPGDMAAADPALLAELAELKSDDEEEAADEYDTY

SEQ ID NO: 25446 - protein, 486 aa, Bacillus licheniformis ATCC 14580
MSDRAIPRSYRMMEGFGVHTFRFVNEEGKAHFVKFHWKPVLGVHSLVWDEAQTIAGKDPDYHRRDLWEAIERGDEVEYELGVQMIDEEDEFKFDFDILDPTKLWPEEIVPVKIIGKMTLNRNQDNVFAETEQAAFHPGHVVPGIDFTNDPLLQGRLFSYTDTQLIRLGGPNFHEIPINRPVCPFHNNQYDGYHRMTINKGPVAYHKNSLQNNDPAPASEEEGGYVHYEEKVEGKKIRQRSESFNDHYSQAKLFWNSMSPVEKEHIISAFRFEVGKVKSKDVRRQVVHMFNRVDGELAKQIAAGVGVEPPEKDEGSNVTFKSPALSQENTVKLPQTRTVAILAEQGFDDEDLSRVLKEFKKAGIIPDIVSSALGVIEGAGGTEIEVGNTLQTVDSVLYDAVYIPGGQESIERLKLHKAASDFVNEAFGHYKAVGAAGEGVDLLLSAAGAHAASQPGIITSRGDKNKDDFGKKLVEAISGHRHWDRQV

SEQ ID NO: 25447 - protein, 494 aa, Arabidopsis thaliana
MVLATNSDSDEHLHSTFASRYVRAVVPRFKMPDHCMPKDAAYQVINDELMLDGNPRLNLASFVTTWMEPECDKLIMDSVNKNYVDMDEYPVTTELQNRCVNMIANFFHAPVGEDEAAIGCGTVGSSEAIMLAGLAFKRKWQHRRKAQGLPIDKPNIVTGANVQVCWEKFARYFEVELKEVKLSEDYYVMDPAKAVEMVDENTICVAAILGSTLTGEFEDVKQLNDLLAEKNAETGWETPIHVDAASGGFIAPFLYPDLEWDFRLPWVKSINVSGHKYGLVYAGVGWVVWRTKDDLPEELVFHINYLGADQPTFTLNFSKGSSQIIAQYYQFIRLGFEGYKNIMENCMDNARRLREGIEMTGKFNIVSKDIGVPLVAFSLKDSSKHTVFEIAESLRKFGWIIPAYTMPADAQHIAVLRVVIREDFSRGLADRLITHIIQVLKEIEGLPSRIAHLAAAAAVSGDDEEVKVKTAKMSLEDITKYWKRLVEHKRNIVC

SEQ ID NO: 25448 - protein, 205 aa, Bacillus licheniformis ATCC 14580
MNNNDGRRKVNGHSKDQQLEQYRSDNRGKKMTTNQGLRVSEDEHSLKAGVRGPTLMEDFHFREKMTHFDHERIPERVVHARGFGAHGYFQVYEPMTEYTKAKFLQDPSVKTPVFVRFSTVAGSRGSGDTVRDVRGFATKFYTEEGNYDLVGNNIPVFFIQDAIKFPDLVHAFKPEPNNEMPQASTAHDTFWDFVANNEETAHMIM

SEQ ID NO: 25449 - protein, 484 aa, Bordetella bronchiseptica RB50
MENLGYPARLELYVAGQWRGVEGRRTQVVVNPSTQQPLGELPLASVEDIDDALAAADQAFGDWARTTAWERADILQRAAALIEARRDRLAVVLTLENGKPLADSHGELDRVVETILWCAEEGKRTYGRVLPARAQRLSQSSLKRPVGPVAAFVPWNFPAVLAARKLAAAMAAGCTVVLKPAEETPAICIELVRAFVDAGTPAGVVNLLYGVPAQVSERLIASPIIRKVSFTGSVAVGRLLASMAAGHLKPATMELGGHAPVVVFDDVDADRVAKMCVGFKYRNAGQVCLSPSRFYVHERIADRFAESFVRHAGLLRVGDGMEEGVQMGPLNNVRRLQAAERLVEQAVGAGASLALGGRRIGQRGYFYPPTVLEGVPDAADILAEEPFCPVAPIMRFGSMDEVIGRANHPSLGLAAYAFTNRMATSAEFAERIEAGWIGINNFVPALADAPIGGMKDSGLGYEGGPEGLDAYLHARFVSQLNVEV

SEQ ID NO: 25450 - protein, 676 aa, Hordeum vulgare subsp. vulgare
MFPLGARQPPPSAMDNHQQQQPPRGEHAAQPRCWEEFLHRKTIRVLLVETDDSTRQVVAALLRHCMYQVIPVENGHQAWAYLQDMQSNIDLVLTEVFMHGGLSGIDLLGRIMNHEVCKDIPVIMMSSHDSMGTVLSCLSNGAADFLAKPIRKNELKNLWAHVWRRSHSSSGSGSGSAIQTQKCTKSKSGDDSNNNSNDRNDDASMGLNARDGSDNGSGTQAQSSWTKRAVEIDSPQDMSPDQSADPPEGTCAHVNHPKSEICSNRWLPGTNNKKCQKPKETTNGDGFKGKELEIGAPGNLNTDDQSSPKESSVKPTDGRCEYLPQNNSSDTVMENLEEPIVRAADLIGSMAKNMDAQQAAARAIDAPNCSLQAPEGKDTDGENAMPYLELSLKRSRSTGEGAGPIQEEQRNVVRRSDLSAFTRYNMCAVSNQGGAGFVGSCSPNGDSSEAAKTVAAQMKQGSNGSSNNNDMGSTTKSVVTKPCGNNKVSPINGNTHTSAFHRVQPWTPATAAGKDKADEVSKKNVAAAAAAAKEMGCEAQSKHPCAAADDVNGGSAGGTAQSSVVNPSGPVEGHAANYGSNSFSNNNTNNGSTAATTAAAATVHAETGGGVDKRSNMMNMKRERRVAAVNKFREKRKERNFGKKVRYQSRKRLAEQRPRVRGQFVRQPPAPAAVER

SEQ ID NO: 25451 - protein, 325 aa, Xanthomonas campestris pv. campestris str. ATCC 33913
MSETTMTAIAIRNGKGDADALHAVEQARPQPAPGQVLIRVHAAGINRPDLLQRGGHYPPPPGAPETLGLEVAGEVVVAAGRWKVGDRVCALLGGGGYAQYAAVDARHVLPVPEGMTLVQAAALPETIFTAYANLFEHGRLAAGEWLLLHGATSGIGVTAIQLAKAAGAHVLATARSAGKAAQARELGADVAIDSTTESFVAAAKAHAGVDVALDMVGASVFADTLEALNPGGRIVYIASQAGATLEVPIPLLMRKQAIITGSTLRPRNADEKARLAAEVERVVWPWIAQGKVRVLIDQCFPLAEAAAAHRYLEQGSHLGKVVLEM

SEQ ID NO: 25452 - protein, 183 aa, Rubrobacter xylanophilus DSM 9941
MPQLGQGILKGMGITLKHLFEKKITRQYPEYKREMPERTRGMLTVDMDRCISCLQCMRVCPDHCITIVQDRRDADGSGKPRPYSMGFMIDDSRCMYCALCVEVCPVNCIYHTEEFEIQAYNRLDLARQFGEQAVDPTVDPKPAVKIPFSTAGRKPPIKEKKKPTGKKAPATAGRHIFGKNPDG

SEQ ID NO: 25453 - protein, 600 aa, Glycine max
  misc_feature (307)..(307): Xaa can be any naturally occurring amino acid
  misc_feature (322)..(322): Xaa can be any naturally occurring amino acid
  misc_feature (438)..(438): Xaa can be any naturally occurring amino acid
  unsure (1)..(600): unsure at all Xaa locations
MDLGVVGLEGVVGSESGCVFGSSLASDPETKHKWYGSGVLKQERSAIASEDDEWGTYKVAKIDHDMSSAPKAMIFQQRNNSLLRSNNATLFSDGHHQSQMLSFSSPKSETLLVDKASSNATLPFSYHQLSSYTRNTGYSSGSISMHGALAGVRGPFTPSQWMELEHQALIYKYITSNVPVPTHLIPIRKALDSLGFCNFSTGLLRPNALGWGGFHLGFSNNTDPEPGRCRRTDGKKWRCSRDAVVDQKYCERHMNRGRHRSRKPVEGQSGHALTTTTSNTPNASSNSTVVPGNTTTTPLHTTMCTTXLPPHSSPANTINRMXYEYNKENNSTSERMKDGPALPMLPPTLELKPKDNNNSFMVHKHQDPYDESSRNNNEFGLVTSDSLLNPSQKRSFDSSSSSQKDDSSESQQQHSLRHFIDDSPKPQSHHNHHRSSSXWPELDNMQSDRTQLSISIPISSSDHFMSFTTSSPSNEKLTLSPLRLSRALDPIQMGLGVGSGASNEANPRQANWIPITWESSMGGPLGEVLNLSNNSNASDQCGKNNTSALNLMKDDDDDGWDNSPPLGSSPTGVLQKTAFGSLSNSSAGSSPRGAPENNKE

SEQ ID NO: 25454 - protein, 396 aa, Sesamum indicum
MALKLNAINFQSPKCPSFALPPVASVRSPKFFVASTLRSGSKEVETVKRPFNPPREVHVQVTHSMPPQKIEIFKALEDWADNNILVHLKPVEKCWQPQDFLPDPSSDGFDDQVKELRERAKEIPDDYFVVLVGDMITEEALPTYQTMLNTLDGVRDETGASPTSWAIWTRAWTAEENRHGDLLNKYLYLSGRVDMRPNGKTFRYLIGSGMDPRTENSPYLGFIYTSFQERATFISHGNTARLAREHGDLKLAQICGTIAADEKRHETAYTKIVEKLFEIDPNDTVLAFADMMRKKISMPAHLMYDGRDDNLFDHFSSVAQRLGVYTAKDYADILEHLVARWKVANLTGLSADGQKAQDYVCGLPPRIRRLEERAQGRAKQAPKIPFSWVHDREVQL

SEQ ID NO: 25455 - protein, 258 aa, Daucus carota
MASDDSVPQHSVEKTTEYESSDRGLFDFMKKEEKDETKVIATEFEEKVQVSEPEPKYEDCKVVEEEEEKAAKPSLLEKLHRSGSSSSSSSSDEEVEEGGEKKKKKEKKGLKEKIEEKIHHKEEDTSVPVEVVTEPEKKKGFMEKIKEKLPGGGKKVEEETVAPPPPPAAAPVDCAVEGDPAKKGILEKIKEKIPGYHPKTSTEEEKKDNDCASAKLIIRCLDRMFDYYYYASFSCGVGLILCFDPLLWGPLISFGTSG

SEQ ID NO: 25456 - protein, 289 aa, Salmonella enterica subsp. enterica serovar Paratyphi A str.
MEYSILSNNLKMPMVGFGVFKVTDKEECQQSVLSAIRSGYRLIDTAAVYGNEDAVGDAVREAIATGLCTREELFITSKLWVQDMANYDLAKAGIEASLKKSGLDYFDLYLLHQAMGDYFSAWRALEDAYKAGKLKAIGVSNFYAHVLANFCETVRITPMVNQVELHPYFAQPAALETMKHYNVQPEAWAPLGGGRHKPYENVMLQRIADAHQKTIAQVVLRWNVQRGVTVIPKSTRQERIEENFAIWDFSLTDNEMAQINALDLGYVGEAVKHFNPEFVRGCLGVKIHD

SEQ ID NO: 25457 - protein, 533 aa, Triticum aestivum
  misc_feature (327)..(327): Xaa can be any naturally occurring amino acid
  unsure (1)..(533): unsure at all Xaa locations
MAAAADVGQLAGAAAATLLAAVLFAAALGRQRQRRRRGAPVEGIPAPDDGCAVADGAGSAAVDGPTDVIIVGAGVAGSALAYTLGKDGRRVHVIERDLTEPDRIVGELLQPGGYLKLMELGLQDCVDEIDAQRVLGYALFKDGKNTKLSYPLEKFHSDVAGRSFHNGRFIQRMREKAASLPNVQLEQGTVTSLLEENGTVKGVQYKIKSGEELKAYAPLTIVCDGCFSNLRRALCSPKVEVPSCFVGLVLENCELPHTNHGHVILANPSPILFYPISSTEVRCLVDVPGQKVPSIASGEMANYLKTVVAPQIPPQIYDSFIAAIDKXGSIRTMPNRSMPAAPHPTPGALLMGDAFNMRHPLTGGGMTVALSDIVVLRNLLKPLRNLHDASALCKYLESFYTLRKPVASTINTLAGALYKVFSSSPDKARDEMRQACFDYLSLGGVCSNGPIALLSGLNPRPLSLVAHFFAVAIFGVGRLMLPLPSPKRMWTGARLISGACGIIFPIIKAEGVRQMFFPATVPAYYRAPPEAEF

SEQ ID NO: 25458 - protein, 324 aa, Pseudomonas fluorescens Pf-5
MISAIRFNQFGAPEVLKLEPVNEQLPGPGEVWIEQEAIGVNFLDVTQRKGVTPVALPSVLGLEGAGRVVIIGEGVSNVQVGDRVAYATGPIGSYASARLYPAERLVKIPETLSFDDAAAVMFKGITAQYLLKTTYPVTHGKTVLIYGVAGGLGEIMVPWAKHLGATVIGVVSKQASVEKALTSGCDEVLVFDANNLASEVSRITQGRKVDVVYDPIGRASFEASLDSLRPRGLMVSFGASSGAPSAVELSTLNAKGSLFLTRPSLAAHTASAAEYQERAQDVLAAIESGIIKPRIWASYALKDASLAHTALESGQSSGAIILKP

SEQ ID NO: 25459 - protein, 305 aa, Vibrio fischeri ES114
MNKLVVLGSVNADHVLQVASFPRPGETLHGHSYSVIPGGKGANQAVAAARLGADIAFIASVGDDSFGHQMIEAFQFDGINTEAVMIEENTPTGIAMIQVAATGENSICISAEANARLTADRIAPHHGLIEAADTLLMQLETPIETIEKAAQIAKAAGTKVVLNPAPAHQLSDDLLQLVDIITPNETEAELLTGIQVTDMASAQQAADALHAKGIETVMITLGSKGVWISQNGSGRQVEGFKVQATDTTGAGDTFNGAFLTGLQSGRKLDDAIKFAHAAAAISVTRMGAQTSIPSITEVERFLLEH

SEQ ID NO: 25460 - protein, 286 aa, Brassica napus
  misc_feature (149)..(149): Xaa can be any naturally occurring amino acid
  misc_feature (176)..(176): Xaa can be any naturally occurring amino acid
  misc_feature (200)..(200): Xaa can be any naturally occurring amino acid
  unsure (1)..(286): unsure at all Xaa locations
MAHSYFLPLFLYLIVISSVSANFQRDVEITWGDGRGQITNNGELLTLSLDKSSGSGFQSKNEYLFGKIDMQMKLVPGNSAGTVTTLYLKSPGTTWDEIDFEFLGNLSGDPYTLHTNVYTQGKGDKEQQFKLWFDPTADFHTYTILLEPXQRIIFTVDGTPIREFKNMESVGTLFPXKNQPMRMYSSLWNADDWATRGGFXVKPDWSKAPFTASYRGFNQEACVWSNGKSSCPNGSGQGTTGSWLSQELDSTAQERMRWVQKNYMIYNYCTDTKRFPQGLPKECFAA

SEQ ID NO: 25461 - protein, 75 aa, Pneumocystis carinii
GQNPTEAELQDMVNEVDADGNGTIDFPEFLAMMARKMKDVDSEEEIREAFKVFDKDGNGIISAAELRHVMTNLGE

SEQ ID NO: 25462 - protein, 339 aa, Trametes versicolor
HWHGFFQKGTNWADGAAFVNQYPIARGNSFLYEFTARDQAGTFWYHSHLSTQYCDGLRGPMVVYDPSDPHADLYDVDDETTIITLSDWYHTATSLGAAFPTGSDSTLINGLGRFASGDSTDLAVITVEQGKRYRMRLLSLSCDPNYVFSIDGHNMTIIEADAVNHEPLTVDSIQIYAGQRYSFVLTADQDIDNYFIRALPSAGTTSFDGGINSAILRYSGASEVDPTTTETTSVLPLDEANLVPLDSPAAPGDPNIGGVDYALNLDFNFDGTNFFINDVSFVTPTVPVLLQILSGTISAADLLPSGSLFALPSNSTIEISFPITATNAPGAPHPFHLHG

SEQ ID NO: 25463 - protein, 346 aa, Zea mays
MAFAPKTSSSSSLSSALQAAQSPPLLLRRMSSTATPRRRYDAAVVVTTTTTARAAAAAVTVPAAPPQAGRRRRCHQSKRRHPQRRSRPVSDTMAALMAKGKTAFIPYITAGDPDLATTAEALRLLDGCGADVIELGVPCSDPYIDGPIIQASVARALASGTTMDAVLEMLREVTPELSCPVVLLSYYKPIMSRSLAEMKEAGVHGLIVPDLPYVAAHSLWSEAKNNNLELVLLTTPAIPEDRMKEITKASEGFVYLVSVNGVTGPRANVNPRVESLIQEVKKVTNKPVAVGFGISKPEHVKQIAQWGADGVIIGSAMVRQLGEAASPKQGLRRLEEYARGMKNALP

SEQ ID NO: 25464 - protein, 372 aa, Burkholderia sp. 383
MRSIIADSKRLVVKVGSSLVTNDGKGLDHAAIGRWAAQIAALRAQGKEVVLVSSGAIAEGMQRLGWSKRPREIDELQAAAAVGQMGLAQVYESRFTEHDIRTAQILLTHADLADRERYLNARSTMLTLLRLGVVPIINENDTVVTDEIKFGDNDTLGALVANLIEGDALIILTDQSGLFTADPRKDPNATLVAEANAGAPELEAMAGGAGSSLGRGGMLTKILAAKRAAHSGANTVIASGRETDVLVRLAAGEAIGTQLIARTARMAARKQWMADHLQVRGHVVIDAGAVEKLTAGGKSLLPIGVIDVQGAFARGEVIACVGPDGREVARGLTNYSSAETKLIHRKPSGEIESVLGYMLEPELIHRDNLVLV

SEQ ID NO: 25465 - protein, 372 aa, Sinapis alba
MGSSHEEGKSTTQSDKPAQVQAPPPPPPPIQEQSNVHVYHHDWAAMQAYYGTRVAIPPQYYNSNGHAAPPPPYIWGSPSPMMAPYGTPYPPFCPPGGIYAHPGVQMGTQPQGPTSQATPVVTTPLNLEAPANSAGNTDQGFMKKLKEFDGLAMSISNNKAGSAEHSSEPRNSQSSENNDDSSNGSDGNTTGGEQSRKKRSREGSPTNDGKPSSQIVPLLRDENEKQAVTMGTPVMPTAMDFPQPCHGAPREVWNEKEVKREKRKQSNRESARRSRLRKQAETEELSVKVDALVAENMTLRSKLGQLNDESEKLRLENEALLAQLKATQTQATGKTENLISGVDKNNSVSGSSKNVEQQLLNVSLRTDSVAAS

SEQ ID NO: 25466 - protein, 675 aa, Oryza sativa (japonica cultivar-group)
MELCTSSVSGSVQWSRISAFDCRTRSHGYASSSSWVCQRRRKTSFYVMNAASTGALPPTKKLIPRTNVRNISGDKPSSALEQLDIERGVCIPFRKYTPEMVRNRVLGSRGSVLSLASRGVEIIWKLGLYWSALMYDFLVGRDEEIVPFRARQLRNLLCDLGPSFIKAGQVLANRPDIIREDYMNELCILQDDVPPFPNQVAFSIIEEELGQPLERLFSRISSRTIAAASLGQVYRATLRETGEDVAIKVQRPGIEPIIYRDLFLFRTLASFLNGISLQKLGCNAELIVDEFGEKLLEELDYTLEATNIEDFLENFKDDPTVKIPQVYKQYSGSRVLVMEWIDGIRCTDPQAIKEAGIDVEGFLTVGVSAALRQLLEFGLFHGDPHPGNIFAMRDGRIAYVDFGNVAVLSQQNKQILIDAVVHAVNEDYAEMANDFTRLGFLASGTDVSPIVPALEAIWQNSAGKGLADFNFRSVTGKFNQLVYNYPIRIPERFSLVIRSLLTQEGICFTLQPDFKFLEVAYPYVAKRLLTDPNPALRERLIQVLFKDGLFQWKRLENLIVLAKENVSKMSSNPALKKNSSQIERNRQMEKKLDLTDTIKDGARLFLIDAGIRRQLIMAFTEDSKLHVEELVDVYRLVEDQIDIPSVALEVIQDLPSVARDFMLSWSDSILSDRQY

SEQ ID NO: 25467 - protein, 386 aa, Staphylococcus aureus subsp. aureus MRSA252
MYYHQPLLLTPGPTPVPDAIMREIQAPMVGHRSKDFEDIAQQAFQGLKPIFGSQNDVLILTSSGTSVLEASMLNIVNPEDHFVVIVSGAFGNRFKQIAQTYYKNVHIYDVTWGEAVDVKDFINYLSTLNVEVKAVFSQYCETSTTVLHPIHELGNAINQFNSNIYFVVDGVSCIGAVDVDINKDKIDVLVSGSQKAIMLPPGLAFVAYSHRAKERFKEVTTPKFYLDLNKYISSQADNSTPFTPNVSLFRGVNAYVETVKAEGFNHVIARHYAIRNALRSALKALDLTLLVNDKDASPTVTAFKPNTNDEVKIIKDELKNRFKITIAGGQGHLKGQILRIGHMGKISPFDILSVVSALEIILTEHRKVNYIGKGISKYMEVIHEAI

SEQ ID NO: 25468 - protein, 194 aa, Desulfotalea psychrophila LSv54
MKLTAFLLLILSLSSASQVMAKSTVLAGGCFWCMESDFEKLDGVSGVVSGFSGGILKNPTYNGRHTGHVEAVQISYDPQKISYRELLEHYWFNIDPFDDKGQFCDKGPSYLAAIFVASKEERHIAEESKRAIEKRFPNRRVITPILKATTFYPIKGHESYHQDYYKKSAIRYKLYRWNCGRDRRLQEIWGDRQD

SEQ ID NO: 25469 - protein, 424 aa, Staphylococcus aureus subsp. aureus MRSA252
MSDFNHTDHSTTNHSQTPRYRRPKFPWFKTVIVALIAGIIGALLVLGIGKVLNSTILNKDGSTVQTTNNKGGNQLDGQSKKFGTVHEMIKSVSPTIVGVINMQKASSVDDLLKGKSSKPSEAGVGSGVIYQINNNSAYIVTNNHVIDGANEIRVQLHNKKQVKAKLVGKDAVTDIAVLKIENTKGIKAIQFANSSKVQTGDSVFAMGNPLGLQFANSVTSGIISASERTIDAETTGGNTKVSVLQTDAAINPGNSGGALVDINGNLVGINSMKIAATQVEGIGFAIPSNEVKVTIEQLVKHGKIDRPSIGIGLINLKDIPEEEREQLHTDSEDGIYVAKADSDIDLKKGDIITEIDGKKIKDDVDLRSYLYENKKPGESVTVTVIRDGKTKEVKVKLKQQKEQPKRQSRSERQSPGQGDRDFFR

SEQ ID NO: 25470 - protein, 380 aa, Arabidopsis thaliana
MADDKEMPAAVVDGHDQVTGHIISTTIGGKNGEPKQTISYMAERVVGTGSFGIVFQAKCLETGETVAIKKVLQDRRYKNRELQLMRVMDHPNVVCLKHCFFSTTEKDELFLNLVMEYVPETLYRVLKHYSSANQRMPLVYVKLYSYQIFRGLAYIHSCPGVCHRDLKPQNLLVDPLTHQVKICDFGSAKQLVKGEPNISYICSRFYRAPELIFGATEYTTSIDIWSAGCVLAELLLGQPLFPGENAVDQLVEIIKVLGTPTREEIRCMNPNYTDFKFPQIKAHPWHKIFHKRMPPEAVDLASRLLQYSPSLRCTALEACAHPFFDELREPNARLPNGRPLPPLFNFKQEVAGSSPELVNKLIPDHIKRQLGLSFLNQSGT

SEQ ID NO: 25471 - protein, 891 aa, Schizosaccharomyces pombe
MGRQFICSIYLPYTINFHLDELEGNHESHPAITHQEKVTQTHRDSVKIDDILTRLSISKSESGQATPVLTPQLEGMNDYFSLGPSKRTGGSMTPGLGAMSPIPGSGRSSPLYTQPRSRATSPSRVRQADRFAAPGIGAGALPIRRKRRDSLAKSVALFESARWSVERGVVGNSGLFHAVDAAVRDHGLQNPLWVGLLGMPTESLSEKTKNAISGALLVKHQSLVVYTSDSNFEGHYNHYCRKILWPSLHYQHNEIFSFFHEESNWDDYVAVNRAFADALIKNYKTGDTIWVNDYHLLLVPNMVRERIPSAIIGLFIHVSFPSSEVFRCFARRKELLQGMLGSNLIGFQTEEYKRHFLQSCSRVLYAESTFDRILLDDRYIDVYAHPIGADPVLVDKWLENPETLEVKEVLEKRYANLNIFVGCDKMDPIRGIREKLLAFEQFLYDNPEYQKNTILIQTSTFTEEQKEYGVAISDIVTRINSAFGDFSLDHLPVTILSSDLSYPQYLALLSVADAFIVTSLREGMSLTCHEFILTQRQKKSPLIVSEFIGCASMFSNGAFIVNPWSTLELSLSMKKALTLSTNERNQRYSNCLDVVLTHSASNWVTGFETKLKKSWTSQQKRDFSRLPRFTLNFIGNRYDHAKKRLLILNFDGNAVTWEGRHEFVDFHYGYMVSILSKLIADDRNIVYIASCLEEDELESLFMHVPGVGLIAENGCYVLPHYAENVHQSWIRLYKKQQMDWREPLHDIIQYYSERTPGSSLIDHGFAMEFNYVKAENRENGLRSAGELASSINETQHGCRAVPLDGRVLCEPTTISKATAANYIMTHLIKNPEELDLILVAGNNRTDESVFAWANKSKVSSFTVSMGVGNTEAKAYTDGIPSFFNVLNSLCA

SEQ ID NO: 25472 - protein, 414 aa, GIBBERELLA ZEAE PH-1
MVSTTNFPAEVVPQAPEDPLFGLAREYKADDSPNKIDLGIGAYRDENAKPWVLPVVKKADEILRNDPELNHEYAPIAGIASFTSKAAELVFGPDSSAIQDKRSTTLQTISGTGAVHLGALFLAKFYKGNQTVYLSNPTWANHHQIFKNVGMSIDTYPYFHKETKGLDFEGFKKTLQSAPEGSVFVLHACAHNPTGVDPTQDQWTEIASIMKEKNHFPFFDTAYQGFASGDLVKDAWAIRYFVDQGFELVVAQSFAKNFGLYGERAGCFHAVTSPAPEASNTITRIGSQLAILQRSEISNPPLYGARIVSTVLNDRDLFAEWEENLRTMSGRIISMRDVLRAKLEELETPGTWNHITDQIGMFSFTGLSEKQVLQLREEFHVYMTKNGRISMAGLNENNVEYFAKAVDKVVRDAA

SEQ ID NO: 25473 - protein, 597 aa, GIBBERELLA ZEAE PH-1
MAALDQHRGYVQDHYQEVKQERSPEYVDENNAAGYQIVREPLWNKGLAFTPEQRANKNLTGLIPHTIESFDTQCARAMKMIQTRQTPIDKYLYLSTLKDQNTDLFYRLLIDNVRELMPLVYTPTIGDVCLQYSSIYTRPEALYISIKQRKSIRAMLRNWPCQDPEICVVTDGSRILGLGDLGINGVGISIGKLALYTGAAGIHPSKTLPIVLDCGTNNEENLQDPFYLGLRQKRPSYPEQQAFMDEFMEATREVFPNMVVQFEDFDSEKAFGYLDRYRDQYRCFNDDIQGTGAVVLGGYIGAVEQSNVPIEEQRLVFMGAGSAGVGVAKQLVEYYTRRGLSEAAAREKFWLVDTKGLVTKDRGDRLAEHKKYFARTDNNGQQFRTLEEVIEYVKPSALVGLTATFGVFTEPVVRALKSSVQEGGLERRPILFPLSNPLTKAECTFEQAIEWTEGTVLFASGSPFNPVKAKFGDETHHTVYHPNQGNNVYIFPGLGLGAILAKASRVTDEMVYTSAAALAGSLNADEVHKGLIYPRIERVRDASVIVAREVMKAARRGGVSELPESQWAEWEEWGDVALTSFIKQHIYNPLCFADAKL

SEQ ID NO: 25474 - protein, 904 aa, Xanthomonas campestris pv. campestris str. ATCC 33913
MNEYRSSLVFATPDVPLRDDVRRLGALVGDLLAEQVSADFLEEIERIRTTAIARRESDTPPAGLLSLLEGREPRAAEALVRAFSTYFQVVNIAERVHRIRRRRDYQRSGTDTPQPEGLHDALRRLKAQGVTLDELSEWLPRIDVEPVFTAHPTEAVRRALLEKEQLMVASLVDNLDGMRTPNERATDAARFRMALTASWQTADSSPVRPTVEDEREHVGFYLTQVLYRVIPVMYETLEHAIEETYGSTLALPRLLRFGTWVGGDMDGNPNVDAHTIAGTLDAQRRAVLDRYLNELWQLASLLSQSTTLVAVSPALSAQLERYQALLPDAAARSRPRHGDMPYRLLNDLMRARLQATLDDADGAYAAPAELEHDLQLILDSLEVNKGLHAGWFAVRRLLWRVRSFGFHLARLDVRQESSVHARAVADALGQADWDSQDATHRAGLLGPYASGEQALPQVDDEGNARLDAVFAALADARTRHGADALGSYIISMAHNRADVLTVLALARRGGLVDDAGAVPLDIVPLFETVDDLRGGTGTVQDLLADPVYRQHLRARGDTQMVMLGYSDSGKDGGIAASRWGLQRAQVELLEAAAELGVRLTFFHGRGGSIVRGGGKTTRALDAAPRGSVDGRLRVTEQGEVIHRKYGIRALALRSLEQMTGAVLLSSLRPRAPEPREDAWRPVMDLVAERSTVAYRGFVGAPDFMQYFRLATPIDVIERMTLGSRPSRRLGQDAALSNLRAIPWVFAWSQARAVIPGWYGVGSGLQAAVEAGHEDSLREMAQDWPFFRTFLDDIAMVLSKGDLNIAELFSRLAGPLHARFFPRIRDELALTKHWVKTLLGQRSLLQHDPRLALSIRLRNPYIDPISVLQVDLLQRWRATDGEDEELLRALVACVNGVAQGVQNTG

SEQ ID NO: 25475 - protein, 396 aa, Escherichia coli
MFENITAAPADPILGLADLFRADERPGKINLGIGVYKDETGKTPVLTSVKKAEQYLLENETTKNYLGIDGIPEFGRCTQELLFGKGSALINDKRARTAQTPGGTGALRVAADFLAKNTSVKRVWVSNPSWPNHKSVFNSAGLEVREYAYYDAENHTLDFDALINSLNEAQAGDVVLFHGCCHAPTGIDPTLEQWQTLAQLSVEKGWLPLFDFAFQGFARGLEEDAEGLRAFAAMHKELIVASSYSKNFGLYNERVGACTLVAADSETVDRAFSQMKAAIRANYSNPPAHGASVVATILSNDALRAIWEQELTDMRQRIQRMRQLFVNTLQEKGANRDFSFIIKQNGMFSFSGLTKEQVLRLREEFGVYAVASGRVNVAGMTPDNMAPLCEAIVAVL

SEQ ID NO: 25476 - protein, 458 aa, Bacillus cereus E33L
MGENHDKQRQSLLGKDFNEIGERNEQAILHSQTVGSRGPVLEQDSVLHEALQEFIHEKILERPVHVKGFGAFGYFQTIYPMSEHTKLSFLQHSNEKVPVMVRFSLAVSTKGTPDTARNVRGFSTKFYTKEGIFDLLCNHIPVFSVRDPMRFPETIQALSPSPKNNLLDPNRFWSFVARAPESIHFVVRLYSDNGTAKSLRRIPGHSVNTYVWRNAEGNRKYVKYHWYPFEGVQFITSEEANKLAAENPDYSGKDLYDAIANGKPVEYGLYVQLMDPKDETHLSYDPLDDTKIWDEKAYPLIPVGKMVLNKNPENYMEQVEKVAFSPSNLLDGAELSDDKMLQGRANIYSDSQRRRIGPEFRKLAINQQQDWTPANQITSGDGRYVEGKLERTSIPKQDDFTQAGEFYAKLKLIEKEHLAENLASDLKVISDDIRKVVLGYFHKVSADLVKRIETEIEK

SEQ ID NO: 25477 - protein, 396 aa, Escherichia coli
MFENITAAPADPILGLADLFRADERPGKINLGIGVYKDETGKTPVLTSVKKAEQYLLENETTKNYLGIDGIPEFGRCTQELLFGKGSALINDKRARTAQTPGGTGALRVAADFLAKNTSVKRVWVSNPSWPNHKSVFNSAGLEVREYAYYDAENHTLDFDALINSLNEAQAGDVVLFHGCCHAPTGIDPTLEQWQTLAQLSVEKGWLPLFDFAYQGFARGLEEDAEGLRAFAAMHKELIVASSYSKNFGLYNERVGACTLVAADSETVDRAFSQMKAAILANYSNPPAHGASVVATILSNDALRAIWEQELTDMRQRIQRMRQLFVNTLQEKGANRDFSFIIKQNGMFSFSGLTKEQVLRLREEFGVYAVASGRVNVAGMTPDNMAPLCEAIVAVL

SEQ ID NO: 25478 - protein, 284 aa, Nocardia farcinica IFM 10152
MQLEHGAQKRDRREPAVEIAVVQFTPGVEPAANLATLREHVEEAARHGARVVIAPEYAMYAVRKLDERVVAVAQPLDGPFATGLADLARNAGVYLVAGMVETGQPGEERIRNTLVVTGPAGERIAIYRKVHLYDAFGHRESDVIEAGPIIEPALFTVDGVTIGLQTCFDLRFPEGFRRIAAAGAHVLAVPAQWIPGPAKVDQWTTLLRARAIENTVYVAAADQAAPLGSGASMIVDPAGAVLAELGDAPGVLTATVDLEHLAAVRTRNPSLALRRFAVTARAAE

SEQ ID NO: 25479 - protein, 837 aa, Oryza sativa
MAAAAARLLERATRTAASCSSALLRSPLDSFSGRFPSFRSPLLRPAPAPSTVFPRGLSDTAFDAQALDTRVPATVITGFLGSGKTTLLNHILTSQHGKRIAVIENEFGEVDIDSSLVASHSSVAEDIVMVNNGCLCCTVRGDLVKMLLKLVKQKGDKFDHIVIETTGLAKPGPVIETFCSDELVSRYVKLDGVVTMVDCKHAMKHLNEVKARWVVNEAVEQVAYADRIILNKTDLVDNAELEVLINKIKLINGMAQMRKTKFGDVDMDFVLGIGGYDLDRIESEVQLHERKETGHCHAGEEHGHQHHHGHVHDSAVSSVSIVSEGVLDLDEVNDWLERLVEEKGEDLYRLKGVISVNESTGRFVFQGVHSISSEKSSRYVAPRQPLQEAGSRPYMPSLSTASRNPSAKCYGDRFIPDRSAMDMDMAHYLLTEPRKDKENAAASPAKEAYRKLLAEKILNNRTRILSFRNKPPEPESILTELRADAASIQAKPAKQRRYIPQSAERTLDAPELVDDYYLNLLDWGSSNVLSIALGNSVYLWDATNSSTSELVTVDEDNGPVTSVSWAPDGRHIAVGLNSSDVQLWDTSSNRLLRTMRGVHDSRVGSLAWNNNILTTGGMDGKIVNNDVRIRNHVVQTYQGHQQEVCGLKWSGSGQQLASGGNDNLLHIWDVSMASSMPSAGRTQWLHRLEDHLAAVKALAWCPFQSNLLASGGGGSDRCIKFWNTHTGACLNSIDTGSQVCSLVWNKNERELLSSHGFAQNQLTLWKYPSMVKMAELTGHTSRVLFTAQSPDGLTVASAAADETLRFWNVFGAPEAPKTATKGSHTGMFNNSNHIHIR

SEQ ID NO: 25480 - protein, 582 aa, Glycine max
MCGILAVLGCSDDSRAKRVRVLELSRRLKHRGPDWSGLHQHGDCFLAHQRLAIVDPASGDQPLFNEDKSVIVTVNGEIYNHEELRKQLPNHKFRTGCDCDVIAHLYEEHGEDFVDMLDGIFSFVLLDTRDNSFIVARDAIGVTSLYIGWGLDGSVWISSEMKGLNDDCEHFECFPPGHLYSSKERGFRRWYNPPWFSEATPSTPYDPLVLRHTFEQAVIKRLMTDVPFGVLLSGGLDSSLVASVTSRYLANTKAAEQWGSKLHSFCVGLEGSPDLKAAKEVADYLGTVHHEFTFTVQDGIDAIEDVIYHVETYDVTTIRASTPMFLMSRKIKSLGVKWVISGEGSDEIFGGYLYFHKAPNKEEFHRETCRKIKALHQYDCLRANKSTFAWGLEARVPFLDKAFINTAMSIDPESKMIKRDEGRIEKWILRRAFDDEEHPYLPKHILYRQKEQFSDGVGYSWIDGLKAHAAKHVTDKMMLNAGNIYPHNTPTTKEAYYYRMIFERFFPQNSARLTVPGGASVACSTAKAVEWDAAWSNNLDPSGRAALGVHISAYENQNNNKGVEIEKIIPMDAAPLGVAIQG

SEQ ID NO: 25481 - protein, 457 aa, Mycoplasma genitalium G37
MDYDLIILGAGPAGYIAAEYAGKHKLKTLVIEKQYFGGVCLNVGCIPTKTLLKRAKIIDYLVHAKDYGITINGQAKLDWKQLLKQKQEVVDKLVAGVKTIIKGAKVESIEGEATVIDKNKVQVNNTTYTTNNIIVATGSRPRYLTLPGFEKAQQAGFIIDSTQALALEGVPKKFVVVGGGVIGVEFAFLFASLGSEVTIIQGVDRILEVCDSDVSELISKTLKNKGVQIITNAHVVRAENNQLFYTVNGVEQSVIGDKILVSIGRIANTECLDQLDLKRDHNNKIVLNEKLQTSTTNIYLIGDVNTQMMLAHYAYQQGRYAVDQILNQNQVKPAEKNKCPACIYTNPEVAFVGYSEMELQKEKIDYVKSSLPFIYSGKAIADHETNGFVKMMFNPKTGAILGGCIIASTASDIIAELALVMENNLTVFDIANSISPHPTMNEMVTDVCKKAIFDYFS

SEQ ID NO: 25482 - protein, 324 aa, Rhodopseudomonas palustris CGA009
MAKAVRVHQVGGPEVLVYEDVELPPPGEGEVRIRQHAVGLNFIDVYFRTGLYKAPSLPFVAGNEGAGEVVSVGPHVTNFHPGDRVAYYANLGGYATERNIEAAKLVKLPDHITYEQGAVLMLKGLTVWYLLHKTFKVEPGHRVLIHAAAGGIGLLACQWARALGAHVIGTVGSKAKADLALANGCDHVILYNEEDWVARVKQISRNELCDVVYDGVGKATFPGSLKCIKPRGLFVSFGNASGPVPPFPLTELNNHGSLFATRPKLNDYIGTRKELIEGADTLFSAVIEGKLHVPINHAYALKDAAKAHIDLEGRVTTGASILKP

SEQ ID NO: 25483 - protein, 363 aa, Schizosaccharomyces pombe
MSKKPVLNLDTSNGFSEEYISHPERNDNQGIVEITDLVFSSESKLTQRKESRDSKTFVPSFLEELDDDHLHELVTNGGILYMNSLGEGVSGSVRKCRIRGTQMIFAMKTVLAAPNTALQKQLLRELKINRSCTSPYIVKYYGACYNNAECQLNIAMEYCGAGSLDAIYKRVRSQGGRTGERPLGKIAFGVLSGLSYLHDRKIIHRDIKPSNILLTSKGQVKLCDFGVSGELVNSLAGTFTGTSYYMAPERISGGSYTISSDIWSLGLTLMEVALNRFPFPPEGSPPPMPIELLSYIINMPPPLLPQEPGIKWSKSFQHFLCVCLDKDKTRRPGPQKMLTHPWVKAFERIHVDMEEFLRQVWSD

SEQ ID NO: 25484 - protein, 784 aa, Oryza sativa
MEAAAAAASAAPHLLHCGGFGRLPGLAASLPGRRRRRPSRRVLAVATEPKPSASAPAPRSRSRPRTPNDISSTRFGEVSKEIQRVRKQMEEDEQLATLMRGLRGQNLRDSQFADDNVRLRLVEVSSMNNNEALPLVYSPEIISAYWGKRPRAVATRIVQLLSVAGGFISHLISDLINNKLKENEVARAIELREIVTSLGPAYIKLGQALSIRPDILSPAAMTELQKLCDKVPSFSDDLAMTLLEEELGQPWHEIYSELSPSPIAAASLGQVYKGRLKETGELVAVKVQRPFVLETVTIDLFIIRNLGLVLRRFPQVSIDVVGLVDEWAARFFEELDYVNEGENGNRFAEMMKKDLPQVVVPKTYQKYTSRKVLTTQWIDGEKLSQSTEDDVGSLVSVGVICYLKQLLDTGFFHADPHPGNMIRTPDGKLAILDFGLVTKLTDDQKYGMIEAIAHLIHRDYDAIVKDFVKLGFIPEGVNLDPILPVLAKVFDQALEGGGAKNINFQELAADLAQITFDYPFRIPPYFALIIRAIGVLEGIALVGDPEFAIVDEAYPYIAQRLLTDESPRLRSALRYTIYGKTGVFDAERFIDVMQAFENFIRAAKSGGGENLKGSMAELAEIGTLPSTSLVPAFPMAISQPEQPVKARAALSFLLSERGDFFREFILDEIVKAIDAVSREQLIQIAASFGLGNATPVFSMVPVRARALLPTITEEDRVILNNVEKVVKFLTAGNNPTTIDGDVNVVYLVQELLPVLPSISSKILPEVMSRLSSRVFARLIREAFL

SEQ ID NO: 25485 - protein, 436 aa, Acetobacter aceti
MSASQKEGKLSTATISVDGKSAEMPVLSGTLGPDVIDIRKLPAQLGVFTFDPGYGETAACNSKITFIDGDKGVLLHRGYPIAQLDENASYEEVIYLLLNGELPNKVQYDTFTNTLTNHTLLHEQIRNFFNGFRRDAHPMAILCGTVGALSAFYPDANDIAIPANRDLAAMRLIAKIPTIAAWAYKYTQGEAFIYPRNDLNYAENFLSMMFARMSEPYKVNPVLARAMNRILILHADHEQNASTSTVRLAGSTGANPFACIAAGIAALWGPAHGGANEAVLKMLARIGKKENIPAFIAQVKDKNSGVKLMGFGHRVYKNFDPRAKIMQQTCHEVLTELGIKDDPLLDLAVELEKIALSDDYFVQRKLYPNVDFYSGIILKAMGIPTSMFTVLFAVARTTGWVSQWKEMIEEPGQRISRPRQLYIGAPQRDYVPLAKR

SEQ ID NO: 25486 - protein, 424 aa, Acinetobacter calcoaceticus subsp. anitratus
MSEATGKKAVLHLDGKEIELPIYSGTLGPDVIDVKDVLASGHFTFDPGFMATASCESKITFIDGDKGILLHRGYPIDQLATQADYLETCYLLLNGELPTAEQKVEFDAKVRAHTMVHDQVSRFFNGFRRDAHPMAIMVGVVGALSAFYHNNLDIEDINHREITAIRLIAKIPTLAAWSYKYTVGQPFIYPRNDLNYAENFLHMMFATPADRDYKVNPVLARAMDRIFTLHADHEQNASTSTVRLAGSTGANPYACISAGISALWGPAHGGANEAVLKMLDEIGSVENVAEFMEKVKRKEVKLMGFGHRVYKNFDPRAKVMKQTCDEVLEALGINDPQLALAMELERIALNDPYFVERKLYPNVDFYSGIILKAIGIPTEMFTVIFALARTVGWISHWLEMHSGPYKIGRPRQLYTGEVQRDIKR

SEQ ID NO: 25487 - protein, 373 aa, Bacillus coagulans
MVNTNQFIPGLEGVIASETKISFLDTVNSEIVIKGYDLLALSKTKGYLDIVHLLLEGTIPNEAEKQHLEETLKQEYDVPDEIIQVLSLLPKTAHPMDALRTGVSVLASFDTELLNREHSTNLKRAYQLLGKIPNIVANSYHILHSEEPVQPLQDLSYSANFLYMITGKKPTELEEKIFDRSLVLYSEHELPNSTFTARVIASTLSDLYGALTGAVASLKGHLHGGANEAVMEMLQDAQTVEGFKHLLHDKLSKKEKIMGFGHRVYMKKMDPRAAMMKEALKELSAVNGDDLLLQMCEAGEQIMREEKGLFPNLDYYAAPVYWKLGIPIPLYTPIFFSSRTVGLCAHVMEQHENNRIFRPRVLYTGARNLRVED

SEQ ID NO: 25488 - protein, 94 aa, Enterococcus faecalis
MLKPLGDRVVIRVAKEEEKTVGGIVLASVAKEKPQTGEVIAVGEGRVLENGTKVPMEVKIGDTVMFEKYSGTEVKYEGVEYLIVSAKDIIATVE

SEQ ID NO: 25489 - protein, 96 aa, Zea mays
  misc_feature (70)..(70): Xaa can be any naturally occurring amino acid
  misc_feature (94)..(94): Xaa can be any naturally occurring amino acid
  unsure (1)..(96): unsure at all Xaa locations
DALRRALEAVKAAVDAQAEVGRALKAGGGASKADVDSADEALKALKVEAGAAARRLKQAVGAVAVGAARXEMRQAVVNTLERKLIYIPSLKIYXGV

SEQ ID NO: 25490 - protein, 524 aa, Enterococcus faecalis
MAKEIKFAEDARAAMLRGVDVLADTVKVTLGPKGRNVVLEKSFGSPLITNDGVTIAKEIELEDHFENMGAKLVSEVASKTNDIAGDGTTTATVLTQAIVREGLKNVTAGANPLGIRRGIELATKTAVEELHNISSVVDSKEAIAQVAAVSSGSEKVGQLIADAMEKVGNDGVITIEESKGIETELDVVEGMQFDRGYLSQYMVTDNDKMEAVLENPYILITDKKISNIQDILPLLEQILQQSRPLLIIADDVDGEALPTLVLNKIRGTFNVVAVKAPGFGDRRKAMLEDIAILTGGTVITDDLGLELKDTTIENLGNASKVVVDKDNTTIVEGAGSKEAIDARVHLIKNQIGETTSDFDREKLQERLAKLAGGVAVVKVGAATETELKELKLRIEDALNATRAAVEEGMVSGGGTALVNVIGKVAALEAEGDVATGIKIVVRALEEPIRQIAENAGYEGSVIVDKLKNVDLGIGFNAANGEWVNMVEAGIVDPTKVTRSALQNAASVSALLLTTEAVVADKPEP

SEQ ID NO: 25491 - protein, 312 aa, Burkholderia sp. 383
MATLICGSIAYDSIMTFEGRFREHILPDQVHLINLSFLVPTMRREFGGCAGNIAYALHLLGGDARIMGTVGALDAQSYLDRLDQLGLRRDHVRVLPDTYTAQAMITTDLDNNQITAFHPGAMMQSHLNHAGDAPGIKLAIVGPDGFDGMVQHVEELAKAGVPFVFDPGQGLPLFDGATLRRSIELATYVAVNDYEAKLVSDKTGWSEDEIASRVDALVITRGEHGATIRHKQGTELIPVVPAERISDPTGCGDAFRGGLLYGIEHGLDWATTGRLASLMGSIKIAHQGPQTYVLTRAEIDARFETAFGYSLK

SEQ ID NO: 25492 - protein, 425 aa, Leifsonia xyli subsp. xyli str. CTCB07
MALPWKLHGDGRAVDAHEIVLPGERLTWPRTIGLGAQHVVAMFGATFLVPLLTGFPPSTTLLFSGVGTILFLLITRNKLPSYLGSSFAFIVPIVAATKGHGMPSALFGIVATGVLLALVGLIVVATGTKWIDALMPPVVAGAIVALIGFNLAPAAKNNFVQAPVTALVTLTAVILCTVLFRGMLGRLSIFLGVAVGYVFAIIVGEVNFGKVASAQWIGLPQFALPANPFAETAATWGVLPAFLPVVLVLIAENVGHIRGVAQLTDPSVNRLTGRALMADGIATTVAGLFGGSGTTTYGENIGVMAATRVYSTAAYWVAGIVAVLLGLSPKVGAVINTIPAGVLGGVTTALYGLIGIIGVKICLDNKVDFSRPVNQFTAATALIIGIGDFTLNLGQLTFNGIALGALAAIVVYHVMNAIARVRETA

SEQ ID NO: 25493 - protein, 94 aa, Enterococcus mundtii
MLKPLGDRVIIEVAQEEEKTVGGIVLASSAKEKPQTGTVVAVGEGRLLENGEKVPAAIKVGDQVMFEKYAGTEVKFEGTEYLIVSGKDIMAIVE

SEQ ID NO: 25494 - protein, 610 aa, Zea mays
METLLAGNPANGVAKPTCNGVGALPVANSHAIIATPAAAAATLAPAGATLGRHLARRLVQIGASDVFAVPGDFNLTLLDYLIAEPGLTLVGCCNELNAGYAADGYARSRGVGACAVTFTVGGLSVLNAIAGAYSENLPVVCIVGGPNSNDYGTNRILHHTIGLPDFSQELRCFQTITCYQAIINNLDDAHEQIDTAIATALRESKPVYISVSCNLAGLSHPTFSRDPVPMFISPRLSNKANLEYAVEAAADFLNKAVKPVMVGGPKIRVAKAREAFAAVADASGYPFAVMPAAKGLVPEHHPRFIGTYWGAVSTTFCAEIVESADAYLFAGPIFNDYSSVGYSLLLKREKAVIVQPDRMVVGDGPAFGCILMPEFLRALAKRLRRNTTAYDNYRRIFVPDREPPNGKPNEPLRVNVLFKHIKGMLSGDSAVVAETGDSWFNCQKLRLPEGCGYEFQMQYGSIGWSVGATLGYAQAAKDKRVIACIGDGSFQVTAQDVSTMLRCGQKSIIFLINNGGYTIEVEIHDGPYNVIKNWDYTGLVNAIHNSEGNCWTMKVRTEEQLKEAIATVTGAKKDCLCFIEVIVHKDDTSKELLEWGSRVSAANSRPPNPQ

SEQ ID NO: 25495 - protein, 637 aa, Arabidopsis thaliana
MFGPTGGLGMNPSMDDMNLIQQAQRHQLVVSNLGEEIDLEIGPGEDDAAFANNSLIGGPPREPSTGEHDETKHMVLVSDLPSEDQDISKGTPAKRKKKVVKRWREEWADTYKWAYVDMKDGTARIFCSICREYGRKHRRNPYGNEGSRNMQMSALEEHNNSLLHKEALRLQTASKDKIVVDKPIYVKTVMSKSAGSIVEGALKRDPNEIEFVQSVQESVHALERVIAKNSHYVNIMERLLEPERMIVFRVPWIDDRGETHVNRGFRVQFNQALGPCRGGIRFHPSMNLSIAKFLGFQQTLKNALSPYKLGGASGGSDFDPKGKSDNEIMRFCQSFMNEMYRYMGPDKDLPSEEVGVGTREMGYLFGQYRRLAGQFQGSFTGPRIYWAASSLRTEASGYGVVYFARLILADMNKEIKGLRCVVSGCGKIAMHVVEKLIACGAHPVTVSDSKGYLVDDDGFDYMKLAFLRDIKSQQRSLRDYSKTYARAKYFDELKPWNERCDVAFPCASQNEVDQADAINLVNAGCRLLVEGSNMPCTAEAVDVFRKANVLIAPAIAAGAGGVAAGEIEVLRESNSMQWSAEDFESRLQEALKQTYEKALKAANDFGYQKESPEALLHGATIAAFLNIAQAMTDQGCV

SEQ ID NO: 25496 - protein, 389 aa, Staphylococcus aureus subsp. aureus MRSA252
MQQHLSKTAYVYSDKLLQYRFHDQHPFNQMRLKLTTELLLNANLLSPEQIVQPRIATDDELMLIHKYDYVEAIKHASHGIISEDEAMKYGLNDEENGQFKHMHRHSATIVGGALTLADLIMSGKALNGCHLGGGLHHAQPGRASGFCIYNDIAITAQYLAKEYNQRVLIIDTDAHHGDGTQWSFYADNHVTTYSIHETGKFLFPGSGHYTERGEDIGYGHTVNVPLEPYTEDSSFLECFKLTVEPVVKSFKPDIILSVNGVDIHYRDPLTHLNCTLHSLYEIPYFVKYLADTYTNGKIIMFGGGGYNIWRVVPRAWSHVFLSLIDQPIQSGYLPLEWINKWKHYSSELLPKRWEDRLNDYTYVPRTKEISEKNKKLALHIASWYESTRQ

SEQ ID NO: 25497 - protein, 524 aa, Enterococcus mundtii
MAKELKFAEDARAAMLRGVDKLADTVKVTLGPKGRNVVLEKSYGSPLITNDGVTIAKEIELEDHFENMGAKLVSEVASKTNDIAGDGTTTATVLTQAIVREGLKNVTAGANPLGIRRGIELATKTAVEELHNISTVVDSKEAIAQVAAVSSGSEQVGPLIAYAMEKVRNDGVITIEESKGIETELDVVEGMQFDRGYLSQYMVTDNDKMEAVLENPYLLITDKKISNIQDILPLLEQILQQSRPLLIIADDVDGEALPTLVLNKIRGTFNVVAVKAPGFGDRRKAMLEDIAVLTGGTVITDDLGLELKDATIENLGNASKVVVDKDNTTIVEGSGDKPAIDARVQLIKNQIAETTSDFDREKLQERLAKLAGGVAVVKVGAATETELKELKLRIEDALNATRAAVEEGMVSGGGTALVNVINKVAMIEAEGDVATGIKIVTRALEEPIRQIAENAGYEGSVIVDKLKNVDLGTGFNAATGEWVNMVEAGIVDPTKVTRSALQNAASVSALLLTTEAVVADKPEP

SEQ ID NO: 25498 - protein, 719 aa, Neurospora crassa
MRVNALLPLSGLIGTALAACPFADPSALGRRAEGGEVDARQRLKEVEVDDNGQFMTTDFGGNIEEQFSLKAGGRGSTLLEDFIFRQKLQHFDHERIPERVVHARGAGAHGIFTSYGDWSNITAASFLGAKDKQTPVFVRFSTVAGSRGSADTARDVHGFATRFYTDEGNFDIVGNNIPVFFIQDAIRFPDLIHSVKPSPDNEVPQAATAHDSAWDFFSSQPSALHTLFWAMSGNGIPRSYRHMDGFGIHTFRLVTEDGKSKLVKWHWKTKQGKAALVWEEAQVLAGKNADFHRQDLWDAIESGNAPSWELAVQLIDEDKAQAYGFDLLDPTKFLPEEFAPLQVLGEMTLNRNPMNYFAETEQISFQPGHIVRGVDFTEDPLLQGRLYSYLDTQLNRHRGPNFEQLPINRPVSGVHNNHRDGQGQAWIHKNIHHYSPSYLNKGYPAQANQTVGRGFFTTPGRTASGVLNRELSATFDDHYTQPRLFFNSLTPVEQQFVINAIRFEASHVTNEQVKKNVLEQLNKISNDVAKRVAVALGLEAPQPDPTYYHNNVTRGVSIFNESLPTIATLRVGVLSTTKGGSLDKAKALKEQLEKDGLKVTVIAEYLASGVDQTYSAADATAFDAVVVAEGAERVFSGKGAMSPLFPAGRPSQILTDGYRWGKPVAAVGSAKKALQSIGVEEKEAGVYAGAQDEVIKGVEEGLKVFKFLERFAVDGDDEE

SEQ ID NO: 25499 - protein, 338 aa, Hypocrea lixii
MSIKVGINGFGRIGRILLSNALEKPELSVVAVNDPFIEPTYAAYMLKYDSSHGLFKGDIEVDGQNLVVNGKPIRFYSERDPANIKWSETGAEYIVESTGVFTTIDKAKAHLNGGAKKVIISAPSADAPMFVMGVNHKDYDGTPTVLSNASCTTNGLAPLVKIVNDNFGIVEGLMTTVHSYTATQKTVDGPSGKDWRGGRGAAQNIIPSSTGAAKAVGKVIPAMNGKITGMSFRVPSANVSVIDLTVRLEKAASYEEITSAIKKAADGELKGIMAYTSDEVVSTDMLGNNNSSIFDIKAGISLNPNFVKLVSWYDNEWGYSRRVLDLLEHVAKVDASKK

SEQ ID NO: 25500 - protein, 94 aa, Enterococcus cecorum
MLRPLGNRVIIEVAQEEEKTIGGIVLASAAKEKPQTGTVIAVGSGEVLKDGTKVEVPVKVGETVMFEKYAGSEVKYEGKEYLIVAAKDIMAVVE

SEQ ID NO: 25501 - protein, 443 aa, Desulfotalea psychrophila LSv54
MTRRAGIKFTGIGLAFLSLSVTGQPVHGAEQELTHSVAEIAYGLDTLYLLLSGAMVMWMAAGFSMLECGLVRSKNVVEILTKNITLFAIASIACLLVGYNIMYGDGGSILPSFSFLVGGDHSPADISLGGENHYSRIADFFFQVVFVATAMSVVSGAIAERMKLWAFLLFAVVMCSAIYPVQGYWKWGGGFLDHLGFLDFAGSGVVHLCGASAALAGVLLLGPRLGKYKNGRIKAIPGSNLPLASLGTFILWFGWFGFNGGSQLRISTVSDANAVAMAFANTNMAAAGGLLAALILSRIWFGKADLTMALNGALAGLVAITAEPVTPSLLTATGVGAVAGILVVISIILLDKAHIDDPVGAISVHGVSGIWGLLAVTITNPEASLIAQLIGITTIFSWVFITSIITWFAIKKVMGLRISPEEEHEGVDLCECGLTAYPEFTKD

SEQ ID NO: 25502 - protein, 526 aa, Enterococcus cecorum
MAKEIKFAEDARAAMLRGVDKLADTVKVTLGPKGRNVVLEKSFGSPLITNDGVTIAKEIELEDHFENMGAKLVSEVASKTNDIAGDGTTTATVLTQAIVREGLKNVTAGANPLGIRRGIELATKAAVEELHNISAIVDSKEAIAQVGAVSSGSEQVGNYIADAMEKVGNDGVITIEESKGIETELEVVEGMQFDRGYLSQYMVTDNDKMEAVLENPYILTTDKKISNIQEILPLLEQILQQSKPLLIIADDVDGEALPTLVLNKIRGTFNVVAVKAPGFGDRRKAMLEDIAILTGGTVITEDLGLELKDATLQSLGQASKVVVNKDTTTIVEGAGDSENIAARVQIIKGQIAETTSDFDREKLQERLAKLAGGVAVIKVGAPTETELKEMKLRIEDALNATRAAVEEGMVSGGGTALVNVINKVAEAESKETGDVATGVRIVLRALEEPVRQIAENAGYEGSVIVDRLKKEKLGVGFNAATGEWVNMLEAGIVDPTKVTRSALQNAASVAALLLTTEAVVADKPEP

SEQ ID NO: 25503 - protein, 161 aa, Glycine max; identical to SEQ ID NO: 1132

SEQ ID NO: 25504 - protein, 96 aa, Wolbachia sp.
MSSVNLNVLDDNVLIKPITEEKQGGIVLPSSAEKKPNKGEVIAIGSGSRNSSGERIALTVKTGDKVFYRQWAGTEVEHDNEKYVVMKESDLLAVIK

SEQ ID NO: 25505 - protein, 261 aa, Triticum aestivum
  misc_feature (173)..(173): Xaa can be any naturally occurring amino acid
  misc_feature (199)..(199): Xaa can be any naturally occurring amino acid
  misc_feature (230)..(230): Xaa can be any naturally occurring amino acid
  misc_feature (249)..(249): Xaa can be any naturally occurring amino acid
  unsure (1)..(261): unsure at all Xaa locations
METDSPRSPEAEIGHRVEDLWEVAQPQLSPSEKLNSCFEDIPVAAFPRNHPSQVIEIPSDASLSDTVETLSKNKILSAPIRNVDAPEDATWIDKYIGIVEFAGIAMWLLHQSDASGNGTAGSAVGSPVANLASRLGSFTFRRTSSGRVETTTDSESDEAASVGGSFFETLTSXPEFYKNTKVGDISGTSRWAPFLALQXTSDTFLNYAASFQSKYRMKSLPVGDMGGTRXEISLHIFVLPLCKWWDIWXTTWEESGGIGTP

SEQ ID NO: 25506 - protein, 608 aa, Rubrobacter xylanophilus DSM 9941
MSSARKLLARKSAARLPWPSRPEGLRPRVGIRIWLTALFVLVTALAAVTAYELVRPILQDTLNRASEASFRQVGEQFEAQLARNDGQVSVDQVKSFAASRGLQWGVVRAEDGTKLEGELGGNLDDWSARAVQRAVAEQRPQQAIERVAEGNPREGQLRATYASPIRIEGESGYAIVFVKFFTQSDIENVQAALAKIDRVAMIAAALALMVAGAVGYFVATLISRRISRLGLAAERLAAGNFDERIRSRVEDEVGSLGETFNSMAASLKSAFEQVEQEKERGQAILDGMTDAVVGVDRELNPVFLNPRARELLESAPPEFHNRLQEVLAKTRYSGPITEPEAEAGERIIEIRAAPLEDGALAILRDVTEERQIQRAKAEFIANASHELKTPISALSGYLEMLEDEQDEEVRAEFLREMRTQTERLQNLARTLLDLSRLDANAVIFRLEEVDLEDLLHELRRDFSYTGRPLRIHAEEGVPPVETDPTQLHRTLAILVDNAIKYSPEGTPVDLTLRREDGGVVIDVRDRGCGISEAEIPHIFERFYRAQGSSRADGTGLGLALANEIVGHLGGEIRVQSEPGAGSTFSVVLPLKKSEGAAGGRTRRQARVS

SEQ ID NO: 25507 - protein, 586 aa, Frankia sp. CcI3
MAGVAPRLLRPSQSRPRSRAGRSRAGTRSFSHTSLGRTARSATGNRIWENVSHRVTTLPAGASGEIGSGCRRRHEHRHNFIAPRTIRTAGSANGRAPLVTGSPDVALGVHLTFGSDPATSMVVSWLTRTAVPRPQVRFGPAAGGSTGSVTALTRSYTDALTNEVVFAHHAHLSGLLPAADYRYDVGHDGRWGLAHGSFRTAPRHRAAFSFTCFGDQGTDEPHDPYGSAASRHVITGVERLAPLFNLANGDLSYANQRTDPVRAWFDWFAMISASARFRPWMPCNGNHETERGNGALGLAAYQTYFALPQHDEEAYLAGLWYAFTVGGVRFVMLSAADVCYQDSGRVYLHGYSAGRQTSWLRQTLKQARADPGIDWIVVGMHHAAVSTAVEHNGADLGIREEWLPLFDTYEVDLVLCGHEHHYERTHPLRGVVPDSATRTPRPVPGATTPARKTADGAGAAAGDGAGDLLDTSAGTVHLLVGTGGSSSPSAHALFDPPACWVIVGVHEQDPGRWHRQSVRAREDAPWLAFRAPEHPYAFAAFEVDPGEPGGSTSIRVTVYDSSAPTPVPFDRFTLVRPRADAAVPTT

SEQ ID NO: 25508 - protein, 214 aa, Pseudomonas aeruginosa
MIEHPGFVLWFTGLSGAGKTTIAVALENQLRARGIRIERLDGDTVRQSLTKDLGFSKEDRDKNIERVTFVAKLLSRNNVAVLSSFISPYAATRDHVRGETTNFIEVFVDAPLETCIERDVKGMYKKAIAGEIPNFTGISDPYEAPANPDIHVKTHEQTLEESVQTIIRRSSHGWNRTNTFPLKSRPNPPHRHKSKSSRAGEPFISPVFVLSIIA

SEQ ID NO: 25509 - protein, 358 aa, Mycoplasma genitalium G37
MAILIKNKVPTTLYQVYDNEGKLIDPNHKITLTDEQLKHAYYLMNLSRMMDKKMLVWQRAGKMLNFAPNLGEEALQVGMGLGLNENDWVCPTFRSGALMLYRGVKPEQLLLYWNGNEKGSQIDAKYKTLPINITIGAQYSHAAGLGYMLHYKKQPNVAVTMIGDGGTAEGEFYEAMNIASIHKWNTVFCINNNQFAISTRTKLESAVSDLSVKAIACGIPRVRVDGNDLIASYEAMQDAANYARGGNGPVLIEFFSYRQGPHTTSDDPSIYRTKQEEEEGMKSDPVKRLRNFLFDRSILNQAQEEEMFSKIEQEIQAAYEKMVLDTPVSVDEVFDYNYQELTPELVEQKQIAKKYFKD

SEQ ID NO: 25510 - protein, 365 aa, Nocardia farcinica IFM 10152
MSEAETRSSSATPVSSEAPGSSEAQGSPGTQNGSYVEPGEFKRDTNYITTRITADGRDGYPVEPGRYRLVAARACPWANRTLIVRRLLGLEDVLSLGLCGPTHDKYSWTFDLDPGGVDPVLGIPRLRDAYLARFPDYPRGITVPAVVDVPTGQVVTNDYAQITLDFSTEWTAYHRPGAPDLYPERLRAEIDEVADVIFRDVNNGVYRCGFAGAQDAYERAYDRLFARLDWLSERLTDQRYLVGDTITEADVRLFTTLVRFDPVYHGHFKCNRQKLSEMPVLWAYARDLFQTPGFGDTIDFDQIKTHYYVVHADINPTRVVPKGPDLSGWLTPHGREALGGRPFGDGTPPPPPKPDERVPALLAPA

SEQ ID NO: 25511 - protein, 184 aa, Zea mays
MAYGKRSRQKAEEMVWLPDGADVARFLLLFSGHQHYHGDGMAASAPERVFECKTCNRQFPSFQALGGHRASHKKPRLSDGVDAAAAEPPKTKPKVHGCSICGLEFAIGQALGGHMRRHRAADQTDGGSLGTGLTPKYDSGKTAASPAELVLDLNAVPELEEEQDHAKLELSIEFPVAVVDFHAR

SEQ ID NO: 25512 - protein, 405 aa, Triticum aestivum
MHPTRWELSHMVDLQAAALVISVVAAQSHKASCPSAARVLLRRNARSRSPHFPNPTQPYTSRRRRQQRQRQRRAAVSGKMRPILMKGHERPLTFLKYNRDGDLLFSCAKDHTPTVWYADNGDRLGTYRGHNGAVWSCDVSRHSTRLITGSADQTAKLWDVKTGKELFTFRFDAPARSVDLAIGDHLAVITTDSFMGNMPTAQVKRIAEDLQDQTEESALVISGITGRINRAVWGPGNRTIITAGEDATIRIWDSETGKLLKESDKEVGHQKAISSLSKSLDWSHFLTGSLDKSAKLWDARTLTLIKTYVTERPVNAVDISPTLDHVVIGGGQDAMNVTMTDRRAGKFEAKFFHKILEEEIGGVKGHFGPINALAFNPDGRSFSSGGEDGYVRLHHFDPEYFNIKM

SEQ ID NO: 25513 - protein, 260 aa, Caulobacter crescentus CB15
MAYAPFNLSGKVALVTGGNRGIGLGMAKAMAQAGADIVIWGSNPERNLAAEQTLTALGVRVKAQTVDVSDEAQVREGMEEAVAAMGRVDSVFANAGIGYGSPSFVDMSTEVYRKVLAVNLDGVFFTLREACRHMVERAKAGDPGGSLVGVASLAAIEGAARNEAYAATKGAVISMIKSVAVEHARYGVRANAILPGWIATDMTAGAQGNAAFAEKVIPRVPARRWGEPEDFGGMAVYLASDASSYHSGTTLVIDGGYSIF

SEQ ID NO: 25514 - protein, 589 aa, Nostoc punctiforme PCC 73102
MQLRDSLRRTKIVATIGPATSSPEMLKAIIEAGATTLRLNFSHGTHADHQRSIRLIRQTAFELNQPVAILQDLQGPKIRLGKFDNGSIVLAKGDRFTLTNRPVVGTQEISCVTYDYLAEEVPVGAKILLDDGRVEMVVEEINRDKGDLHCRITVPGKLSNNKGVNFPGVYLSIKAMTDKDREDLMFGLDQGVDWVALSFVRNPQDMIEIKELISSTGKQVPVVAKIEKHEAIEQMEAVLALCDGVMVARGDLGVELPAEDVPVLQKRLIATANRLGIPIITATQMLDSMVSNPRPTRAEVSDVANAILDGTDAVMLSNETAVGSFPVEAVATMARIAERMEQEEAQHLNLRSVRDSRRSIPNAISQAVGQIAEQLGAAAIMTLTQTGATARNVSKFRPNTPILAVTPHVNVARQLQMVWGVKPLLVLGLPSTGQTFQAAINVAQELKLLSEGDLVVMTAGTLQGISGSTDLIKVEVVTAVLGHGIGLGQGLVSGRARVANTGMDVSNFNPGDILVAPRTSADFVEAIRKSAGIITEEESLTSHAAVIGLRLGVPVIVGVKQATQVIRDGAIITLDLQRGLIYSGAVRTP

SEQ ID NO: 25515 - protein, 250 aa, Solanum tuberosum
MVRIAFGSIGDSLSVGSLKAYLAEFIATLLFVFAGVGSAIAYNKLTSDAALDPAGLVAIAVAHAFALFVGVSMAANISGGHLNPAVTLGLAVGGNITTLTGLFYWVAQLLGSTVACLLLKYVTNGLAVPTHGVAAGMNGAEGVVMEIVITFALVYTVYATAADPKKGSLGTIAPIAIGFIVGANILAAGPFSGGSMNPARSFGPAVVAGDFSQNWIYWVGPLIGGGLAGFIYGDVFIGSHTPLPTSEDYA

SEQ ID NO: 25516 - protein, 364 aa, Haloarcula marismortui ATCC 43049
MQGADADTVADALASDDALPGAGGFAGELDGTLVRDVLGRYPLFVERAVSDEARLDPGQWSHDPTALADPRSFPAGHIRNESGTQQRWSLPSLDPFGDRETAIETVGETVETSIDAVDTDSLAIAFSGGVDSALLAARLDAPLYVAGFPDSHDIEAARSAAELLGTEVRVVELTHDAIERAVPEIARATARTNAMDVQIALPLYLVAERVAGDGFDRLALGQGADELFGGYAKVAKAPEDPRVEADTVRGAQREVIASLPDQLERDVLALRAAGVEPVTPLLHDRVIGAALRLDGDLLVDGETRKVALRAAARESLPDEIADRDKKAAQYGSLAARELDRLARQAGYKRRMDDHVTQYVESLVE

SEQ ID NO: 25517 - protein, 162 aa, Corynebacterium efficiens YS-314
MEAMTSIHDIPVTLTDGTETTMADWAGHLVMVVNVASRCGLTPQYEGLQRLFEDYQDRGFFVIGVPCNQFMGQEPGTDAEICTFAQEKYDVTFPLLAKTDVNGENEHPLYTELKRFGEGGDIEWNFEKFLINADGETIARFGPRMDPEDDEVTSVIEDNLPV

SEQ ID NO: 25518 - protein, 200 aa, Zea mays
  misc_feature (39)..(39): Xaa can be any naturally occurring amino acid
  misc_feature (190)..(190): Xaa can be any naturally occurring amino acid
  unsure (1)..(200): unsure at all Xaa locations
RYVTVQTISGTGALRIGASFLQRFFKFSQDVFLPKPSWXNHTPIFRDAGMQLHGYRYYDPKTCGFDFTGAIEDISKMPQQSVLLLHACAHNPTGVDPRPEQWKEIATVVKKNNLFAFFDMAYQGFASGDGNKDAWAVRHFIEQGINVCLCQSYAKNMGLYGERVGAFTVVCKDADEAKRVESQLKILIRXMYSNPPINGA

SEQ ID NO: 25519 - protein, 592 aa, Zea mays
MGLCHGKPTQIPEAEAEEDPHVASGAGDSGDGATSPSAAAPTAKPGTPKQPKFPFYLPSPLPPSSYKGSPANSSVSSTPARGGFKRPFPPPSPAKHIRALLARRHGSVKPNEASIPEGGEPELGLDKSFGFSKHFFAKYDLGEEIGRGHFGYTCSAKAKKGEHKGQDVAVKVIPKAKMTTAIAIEDVRREVRILSSLTGHSNLVQFYDAFEDEDNVYIVMELCKGGELLDRILARGGKYSEEDAKVVMVQILGVVSFCHLQGVVHRDLKPENFLFSSKDENSPLKVIDFGLSDFVKPDERLNDIVGSAYYVAPEVLHRSYGTEADMWSIGVIAYILLCGSRPFWARTESGIFRAVLKAEPSFDEAPWPTLTAEAKDFVKRLLNKDYRKRMTAAQALSHPWIRNSQQVKVPLDMIIYKLMRAYISSSSLRKSALRALAKTLTTNQLFYVREQFELLGPNKNGYISLQNLKSALAKNSTDAMKDSRVVDFVNTVCTLQYRKLDFEEFAASAISVYQMEALETWEQHARRAYELFDKEGNRPIVIEELASELGLGPSVPLHVVLQDWVRHADGKLSFLGFIKLLHGVSSRSIPKA

SEQ ID NO: 25520 - protein, 698 aa, Oryza sativa
MNPYFVGLLVPIAVSLLLRKRRMVGKMRALPVDVGGEPGYAIRNYRFKQPVETHWEGVTTLAELFEQSCKDYVNMPLLGTRKLISREQESSLDGRSFEKLHLGEYDWKCYAEVFKSVCNFASGLIRLGHQKTDRVAIFAETRAEWQIALQACFRQNITVVTIYASLGEEALCHSLNETEVTTVVCGQKELKKMIDISGQLDTVKRVIYINEEGISAEVSLAQKSTSWIIEPFEDVGRLGDTAPVDANMPLPSDVAVIMYTSGSTGLPKGVMMTHRNVLATLSAVMTIVPEIGKKDVYLAYLPLAHILELAAEALIAAVGASIGYGSPLTLTDTSNKIKKGTLGDASALKPTLMTAVPAILDRVRDGVRKKVDTKGGVAKQLFDVAYNRRLAAVNGSWLGAWGLEKLLWDMLVFKKVRAVLGGKIRFVLSGGAPLSGDTQRFINICLGVPIGQGYGLTETCAGGTFSEYDDPSVGRVGAPLPCSYIKLIDWSEGGYLTSDSPMPRGEIVIGGPNVTKGYFKNEAKTNEVYKDDEKGMRWFYSGDIGRFHPDGCLEIIDRKKDIVKLQHGEYVSLGKVEAALIVSPYVENIMIHADPFHSYCVALVVAAHNELENWASQQGVTYTDFVDLCQKPEAVKEVLGSLSKAAKQARLEKFEIPAKIKLISEPWTPESGLVTAALKLKREVLRKTYEDDLAKLYA

SEQ ID NO: 25521 - protein, 390 aa, Exiguobacterium sp. 255-15
MGFEHLRTELEEMKQAGTFRELVALESAQHNRVTVDGKELIQLSSNNYLGLAAHPRLAKRAADAALEFGAGTGSVRTIAGTLEMHQAFERELATFKHTEAALVFQSGFATNLGVLSALLGPEDVVISDALNHASIIDGIRLTKAKRRIYNHVDLADLEAALQETQDARTRLVVTDGVFSMDGNIAPLPEIVELAEKYDALVMVDDAHASGVLGKSGRGTVNHFGLDGRVALQVGTLSKAIGVLGGYVACEQHVKDYLIHKGRPFLFSTSHPPAVVEANREALRVMEEETELFDRLWENTEFFKHGLRELGFNIGTSTTPITPVIVGDEALCHQLSDRLRQHGVFAQGIAFPTVAKGKARVRTIVTAEHTREDLEQALEAFKQVGQELELI

SEQ ID NO: 25522 - protein, 363 aa, Exiguobacterium sp. 255-15
MMTKLVTAVEDTTKVKTMRALVKEERGFGAVLKEVAVPSPKRGEVLIRVEATSICGTDVHIYEWDAWAASRVNPPYVFGHEFSGEVVELGEGTKRLKLGDRVSAETHIVCHQCKQCLRGQYHICKNTKIIGVDTQGCFAEYVVMPEENLWVNPEDMPAAIASIQEPMGNAVHTVLASDVSAKTVAIVGCGPIGLMAVSVAKAAGAAEVIAIDVNPYRLELAKTMGADVVIDSRHEDVLERVRMMTDGDGIDVVCEMSGHPVAIRQAFEMVTAGGDVNILSLPVKPVEIDLTNHVVFKGVRVQGITGRKMYETWSQVSAFLSSGKVDVKPLITHTLPLERFEEGFELMRQGKCGKVVLQPRGTN

SEQ ID NO: 25523 - protein, 384 aa, Geobacillus kaustophilus HTA426
MKPINVGIIGTGFSASSHIEALRRLPFVNIVAIASSSQEKAEEAARRFGIPKAYGDYRALVDDPDVEAVHNCTRNVLHFPINKAVLEAGKHLLSEKPLAMDSEQSAELKRLAEQSESLSAVCFNYRHYPLVVEAKERLAREAKRVHFVYGGYVQDWLLYDTDYNWRLDPAQNGPSRAIADIGSHWCDTVQYVLGKKIVEVFADLRTVHPVRYKPKQEGSTFTSGRAQDAEPVEIDTEDGGSVLVHFDDGTHGAFTISQVSAGRKNRLYFEIAADEMTLAWDQEHPNRLWVGRRSGPNEEIVRDPVLLSPQAAAYAHYPGGHEEGWPDGLKNLFRDFYGAIIRKQRGEALGELPFATIADGHHTMRIVDAILESHRTKQWVRVAE

SEQ ID NO: 25524 - protein, 94 aa, Vagococcus fluvialis
MLKPLGDRVIIEVQEEVEQTAGSFLLTSASKEKSQTGSIIAVGEGRFLPNGERISLEVEVGQTVMFEKYAGQEVKYDGKDYLIVHEKDIIAIVQ

SEQ ID NO: 25525 - protein, 524 aa, Vagococcus fluvialis
MTKDIKFSEDARSSMMRGVDTLADIVKVTLGPKGRNVVLDKSFGSPLITNDGVTIAKEVELEDRFENMGAQLVAEVASKTNDIAGDGTTTATVLTQAIVREGLKNVTAGANPIGIRRGIELATKKAVEELHALSKQVDSKEAIAQVAAVSSGSDTIGELISEAMDKVGNDGVITIEESKGIETELDVVEGMQFDRGYLSQYMVTDNDKMEAVLDNPYLLITDKKISNIQDILPLLEQILQQSRPLLIIADDVDGEALPTLGLNKIRGTFHVVAVKALAFGDRRKAMLEDIAILTGGTVLTDDLGLELKDAPFETLGMAFKVVENKDIPRIVKGSGEKRTIERLVPLIKNPIGEPTSDFDREKLQERLVKLAGEVAVVKVEAATETELKELKLRIEDALNATRAAVEEGIVPGGGTAFVNVLPKFAEIDATGDEATGVKIVLRALEEPVRQIAENAGLEGSVIVDKLKQAQPGVGYNAKTDEWVNMIDAGIVDPTKVTRSALQNAASVSALLLTTEGVIADKPSN

SEQ ID NO: 25526 - protein, 230 aa, uncultured bacterium
MRHFERHRTAHIGWLRAAVLGANDGLISTASLVVGVAASGTGRPAVLIAAVAGLVAGAMSMAAGEYVSVSSQADTESADLARERHELATTPDAEKDELVGIYIDRGLTPALARQVADQLMERDALGAHSRDELGLSPATSARPIQAALASAAAFAVGATLPVAVAAIAPTAWLTRLVTASALVLLTVLGAVAARVGGAAIGRGAVRVAFWGALAMAVSAGVGRLFGTQFP

SEQ ID NO: 25527 - protein, 552 aa, Wolbachia sp.
MANIVVSGEQLQEAFREVAAMVDSTVGATAGPRGNTVGISKPYGGPEVTKDGYKVMKGIKPEKPLHSAIVSTIAQSASQCNDKVGDGTTTCSILTSNMIMEASKSIAAGNDRICIKNGIQKAKDVILKEITSMSRTISLEKMDEVAQVAIISANGDKDIGNSIADAVKKVGKEGVITVEESKGSKELEVELTTGMQFDRGYLSPYFVTNNEKMSVELDDPYLLITEKKLNIIQPLLPILEAIFKSGKPLFIIAEDVEGEALSTLVINKLRGLKVAAVKAPGFGDRRKEMLEDIAALTGAKYVIKDELGIKMEDLTLEDLGTAKNVKITKDNTTIVSEDSDCDKQNRVNARINQIKSQIETSTSDYDKEKLRERLAKLSGGVAVLKVGGATEVEVKERRDRVEDALHATRAAIEEGIVPGGGVALLYAASALDKLKASSDEEQIGINIVKKVLSAPIKRLVKNAGLESAVIIDYLIKQNDKELIYNVEAMNYANASTAGVIDPAKVVRIAFETAVSVASALITTESMIVDLPNKEENASSPMGAGAMGGMGGF

SEQ ID NO: 25528 - protein, 492 aa, Oryza sativa (japonica cultivar-group)
MDPYKHRPSSGSNSTFWTTNSGAPVWNNNSALTVGERGPILLEDYHLIEKLAQFDRERIPERVVHARGASAKGFFEVTHDISHLTCADFLRAPGVQTPVIVRFSTVVHERGSPETLREPRGFAVKFYTREGNFDLVGNNMPVFFIRDGMKFPDMVHAFKPSPKTNMQENWRIVDFFSHHPESLHMFSFLFDDVGIPLNHRHMEGFGVNTYTLINKDGKPHLVKFHWKPTCGVKCLLDDEAVTVGGTCHSHATKDLTDSIAAGNYPEWKLYIQTIDPDHEDRFDFDPLDVTKTWPEDIIPLQPVGRMVLNKNIDNFFAENEQLAFCPAIIVPGIHYSDDKLLQTRIFSYADTQRHRLGPNYLMLPVNAPKCAYHNNHHDGSMNFMHRDEEVNYFPSRFDAARHAEKVPIPPRVLTGCREKCVIDKENNFQQAGERYRSFDPARQDRFLQRWVDALSDPRITHELRGIWISYWSQCDASLGQKLASRLNLKPNM

SEQ ID NO: 25529 - protein, 356 aa, Oryza sativa
MGVLCFGASNILLCAEDSSSVLGLGGFGGGGGEVAAELGCGGGGGFDFFGFGGGAVFPIDSDEFVALLVEKEMDHQPQRGYLEKLELGGLECSWRKDAIDWICKVHSYYNFGPLSLYLAVNYLDRFLSSFNLPHDESWMQQLLSVSCLSLATKMEETVVPLPMDLQVFDAEYVFEARHIKRMELIVMKTLKWRLQAVTPFSFIGYFLDKFNEGKPPSYTLASWCSDLTVGTLKDSRFLSFRPSEIAAAVVLAVLAENQFLVFNSALGESEIPVNKEMVMRCYELMVEKALVKKIRNSNASSSVPHSPITVLDAACFSFRSDDTTLGSSQSNSNNKDYNSQDSAPASKRRRLNTTPI

SEQ ID NO: 25530 - protein, 77 aa, Wolbachia sp.
EEKQGGIVLPSSAEKKPTKGEVIAIGEGSRNSSGERVTLTVKAGDKVFYRQWAGTEIEHNDEKLIVMKESDILAVIK

SEQ ID NO: 25531 - protein, 722 aa, ASPERGILLUS NIDULANS FGSC A4
MRALGLVGLVGVANAVCPYMTGELGRRDTNPDATEATEEFLSEYYLDDTDSYLTTDVGGPIEDQQSLKAGARGSTLLEDFIFRQKIQRFDHERVPERAVHARGAGAHGVFTSYGDFSNITAASFLSAEGKETPVFVRFSTVAGSRGSSDLARDVHGFATRFYTDEGNFDIVGNNIPVFFIQDAIQFPDLIHAVKPKGDREIPQAATAHDAAWDFFSQQPSTLHTLLWAMAGHGIPRSFRHVDGFGVHTFRLVTEDGSTKLVKFHWKTLQGLASMVWEEAQQISGKNPDYMRQDLFESIEAGRYPEWELNVQIMDEEDQLRFGFDLFDPTKIVPEEYVPLTPLGKMTLNRNPRNYFAETEQVMFQPGHVVRGVDFTEDPLLQQGRLFSYLDTQLNRNGGPNFEQLPINQPRVAIHNNNRDGAGQMFIPLNPDAYSPNTLKGSTLKQANQTAGRGFFTAPDRTANGNLVRAKSSTFDDAWSQPRLFWNSLLPAEKQFVVNAIRFENANVKSDVVKNNVIVQLNRISNDLATRVAKAIGVDAPEPDNTYYHDNTTSNIGAFGHRLQSLAGLKIAVLASVDAEESFSAATALKAELSNDNLDVIVVAERFSNGVNQTYSASDAIQFDAVVVAPGAEKLFGAKSAANSSSTLYPAGRPLEILVDAFRFGKPVAALGSGSTAFDNAGINTAVEGVYVADAVDESFANNLEEGLTVFKFLDRFALDSDE

SEQ ID NO: 25532 - protein, 412 aa, Glycine max
MNALAATNRNFQRAARILGLDSKLEKSLLIPFREVKVECTIPKDDGTLVSYVGFRIQHDNARGPMKGGIRYHPEVDPDEVNALAQLMTWKTAVADIPYGGAKGGIGCNPRDLSISELERLTRVFTQKIHDLIGIQKDVPAPDMGTNAQTMAWILDEYSKFHGHSPAVVTGKPIDLGGSLGREAATGLGVVFATEALFAEYGKSISDHTFVIQGFGNVGTWAAKSIFERGGKVIAVSDISGAIKNLNGIDILALLKHKDGNGGVLKDFPGAEAMDPDELLVHECDVLVPCALGGVLNKENAADVKAKFIIEAANHPTDPDADGILSKKGVIILPDIYANAGGVTVSYFEWVQNIQGFMWDEEKVNRELKKYMTKAFQDIKAMCKIHNCDLRMGAFTLGVNRVARATLLRGWEA

SEQ ID NO: 25533 - protein, 82 aa, Wolbachia sp.
IKPISEEKQGGIVLPSSAEKKPTKGEVIAIGEGSRNSSGERVTLTVKAGDKVFYRQWAGTEIEHNDEKLIVMKESDILAVIK

SEQ ID NO: 25534 - protein, 381 aa, Coptis japonica
MCTSLSELKCPVFSTKRKLLLEFALRTSVDMAAQEGVNYLSGLGLSRLICLPMALRAAIELNVFEIISQAGPDAQLSPSDIVAKIPTKNPSAAISLDRILRMLGASSILSVSTTKSGRVYGLNEESRCLVASEDKVSVVPMLLFTSDKAVVESFYNIKDVVLEEGVIPFDRTHGMDFFQYAGKEERVNKSFNQAMGAGSTIAFDEVFKVYKGFDNLKELVDVGGGIGTSLSNIVAKHPHIRGINFELPHVIGDAPDYPGVEHVPGDMFEGVPNAQNILLKWVLHDWDDDRSIKILKNCWKALPENGTVIVIEFVLPQVLGNNAESFNALTPDLLMMALNPGGKERTTIEFDGLAKAAGFAETKFFPISQGLHVMEFHKINC

SEQ ID NO: 25535 - protein, 362 aa, Sorghum bicolor
MGSTAEDVAAVADEEACMYAMQLASSSILPMTLKNALELGLLEVLQKDAGKALAAEEVVARLPVAPTNPAAADMVDRMLRLLASYDVVRCQMEDKDGKYERRYSAAPVGKWLTPNEDGVSMAALALMNQDKVLMESWYYLKDAVLDGGIPFNKAYGMTAFEYHGTDPRFNRVFNEGMKNHSVIITKKLLEFYTGFDESVSTLVDVGGGIGATLHAITSHHSHIRGINFDLPHVISEAPPFPGVQHVGGDMFKSVPAGDAILMKWILHDWSDAHCATLLKNCYDALPEKGGKVIVVECVLPVTTDAVPKAQGVFHVDMIMLAHNPGGRERYEREFRDLAKAAGFSGFKATYIYANAWAIEFIK

SEQ ID NO: 25536 - protein, 292 aa, Triticum aestivum
PGPPSSYVGPPLPKSANSKDKSSNKKLKEIDGSAVSTGSGNSKKTSSSGDYSGEGSSDVNDLKVSGTPRKRSLDGGFDAEATAAARNKDVVASSPIIRNGAILSNQCFPAPVIKPSVTNVANSRAIGTPVSPLPGVMGPIHTGISTELSSKDEREVKREKRKQSNRESARRSRLRKQAETEELATQVESLTAENTSLKSEIGKLTKSSEKLRIENSALVMKLKGTAAPTSAEMPLDKSAVAAPSSSPRVVENFLSMIDDTSKSGVKNHMEHSEPKLRQLLGSSATTDVVAAN

SEQ ID NO: 25537 - protein, 544 aa, Chlamydia trachomatis D/UW-3/CX
MVAKNIKYNEEARKKIQKGVKTLAEAVKVTLGPKGRHVVIDKSFGSPQVTKDGVTVAKEVELADKHENMGAQMVKEVASKTADKAGDGTTTATVLAEAIYTEGLRNVTAGANPMDLKRGIDKAVKVVVDQIRKISKPVQHHKEIAQVATISANNDAEIGNLIAEAMEKVGKNGSITVEEAKGFETVLDIVEGMNFNRGYLSSYFATNPETQECVLEDALVLIYDKKISGIKDFLPVLQQVAESGRPLLIIAEDIEGEALATLVVNRIRGGFRVCAVKAPGFGDRRKAMLEDIAILTGGQLISEELGMKLENANLAMLGKAKKVIVSKEDTTIVEGMGEKEALEARCESIKKQIEDSSSDYDKEKLQERLAKLSGGVAVIRVGAATEIEMKEKKDRVDDAQHATIAAVEEGILPGGGTALIRCIPTLEAFLPMLTNEDEQIGARIVLKALSAPLKQIAANAGKEGAIIFQQVMSRSANEGYDALRDAYTDMLEAGILDPAKVTRSALESAASVAGLLLTTEALIAEIPEEKPAAAPAMPGAGMDY

SEQ ID NO: 25538 - protein, 530 aa, Frankia sp. CcI3
MPRGAGLTGRGCRLRDERARPAVRVRTKPAPRRAAAPGGGSTGPRARSRPYPQVPGGRWRALRAPDGRHLPSPIVCAISSHHRGAQRSAPWPADRAARSAAKGGSKRAAEVPVILGSGSAWDTACVQLANAARHLGLDDGMHDLLRTPRRAITVSVPLQRDDGQLTVLTGYRVQHNLARGPGKGGIRFHPTTDLDEVKALAMWMTWKCALMGIPYGGAKGGIAVEPAMLSLPERERLTRRYAAELVPLIGPEKDIPAPDVGTDEQTMAWIMDTYSAHTGYTTTGVVTGKPLSIGGSAGRAGATSLGVQLSVFAALRETGRDPHAMTIAVQGFGKVGALAAQYLHDAGCTVVAVSDVKGGIYNPQGLNPAALIRHLAGGAETVVGYPGTDTITNDELLELDVDVLVPAALEGVITVENVDRVRAPIIVEGANGPVTAEADQVLDDRGVLVVPDILANGGGVAVSYFEWVQDIQAYFWSEDEVSDRLRALMDRAYREVSLLATTQKISMRNAAHVIGVGRVADAHRTRGLYP

SEQ ID NO: 25539 - protein, 475 aa, Ralstonia metallidurans CH34
MYQDLALYIDGEFIKGGDRREQDVINPATQELLGKLPHATTADLDRALSAAQRAFETWKKTSPLERSQILRRVAELTRTRAKEIGRDITLDQGKPLAEAVGEVMICAEHAEWHAEECRRIYGRVIPPRNPAVRQIVVREPIGVCAAFTPWNFPFNQAIRKIVAALGAGCTLILKGPEDSPSAVVALARLFHDAGLPPGVLNIVWGVPSEVSTYLIESPIVRKISFTGSVPVGKQLAAMAGAHMKRVTMELGGHSPVLVFGDADIEPAAEMLARFKLRNAGQVCVSPTRFYVQEKAYDKFLARFTEVIGSIKVGNGLDDGTQMGPLAHERRIASMEQFLDDASHRGGKIVAGGSRIGDKGFFFAPTVVTDLPDDAKLMVDEPFGPVAPVTRFKDAEEVLRRANSLPFGLASYVFTNSLKTANLVSNGLEAGMVNINHFGMALAETPFGGIKDSGIGSEGGQETFDGYLVTKFITQV

SEQ ID NO: 25540 - protein, 262 aa, Glycine max
  misc_feature (154)..(154): Xaa can be any naturally occurring amino acid
  unsure (1)..(262): unsure at all Xaa locations
MSSSEAKKSRGRQRIEIKKMSNEANLQVTFSKRRSGLFKKASELSTLCGASVALVVFSPGKKVFSFGHPSVDGVIERYLTQGPPPLMDVQRMAEVLELNAQLTHINDQLEAERKRAQELSGKERETEAHLWWARPVEGMISIDNLYKLKKAFEXLKQQVAGLADRALLQYSVANGNPGHQFFPGASSSTIPNVVLQPQPLPVPPQMFPPTPNMMMLPPPPMFQNYMLPDGSMMNPHGFNDMGMGGFGGPGPSGSGAGAGGFF

SEQ ID NO: 25541 - protein, 579 aa, Frankia sp. CcI3
MRHLSPIREPPPPKNTILMDRRTGLSGWPTLRSVRRMPGAEEDTLPRLWPTGTARVLVASNRGPVAFAVGDDGRLRIRRGAGGLVSGLSRVAADNGDGPMAWVCAALSDADRRAARSAPAGRLDLAGHDTDGTAVRMLDVDQVVFDRAYNAVANRTLWFIHHLLYAPASQPVFGPAFRRDWQAYETYNEMFAQALAHEAAPGASVLIQDYHLTLVAARLRALRADLRIAHFSHTPWAPPEYFRILPDDVSEQILRGMLGADRLGFLTDAWADAFQECCRDLLGLRIDRRAVTIGTAGSGRGAGSGRGAGSGRGAGSGREAGSGREAGSGREAGSGREAGRHRTVRIGVHPLGVSADELLGRAAATDVAARAAELVDLAGGRRLIVRVDRTELSKNIVRGLDAYRELLRTRPEWRGKVMHLVCAYPSRHDLPEYREYTAAVQRLAAEIEDEFATDTWLPLRLEITDDYPRSIAALSLAEVLVVNPIRDGMNLVAKEGPIVSTRDAVLVLSREAGACAEMGTAALVVNPFDIQATARALHAALTMPAPERRRRAEELAAVAGRLPPQRWFADQLHALAADR

SEQ ID NO: 25542 - protein, 378 aa, Arabidopsis thaliana
MANHLQVPLTKPDRVKEEQEVEEEARLLARRLANAAALPMVLKAALELGVIDTITTVGGGDLWLSPSEIALRLPTKPCNLEAPVLLDRMLRFLVSHSVLKCRTVIEENGQTGKVERVYAAEPVCKYLLNKSDDVSGSFASLFMLDLSDVFIKTWTHLKDVILAGRDAFSSAHGMKLFEYIQADERFGKVFNRAMLESSTMVTEKVLKFYEGFKDVKTLVDVGGGLGNTLGLITSKYPHLIGINFDLAPVLANAHSYPGVNHVAGDMFIKIPKGDAIFMKWILHDWTDEQCVAILKNCWKSLEENGKLIIVEMVTPVEAKSGDICSNIVFGMDMTMLTQCSGGKERSLYEFENLAYASGFSRCAIVCAVYPFSVIEIYK

SEQ ID NO: 25543 - protein, 449 aa, Schizosaccharomyces pombe
MREIISIHVGQAGTQIGNACWELYCLEHGIQPNGYMNPETASQNSDGGFSTFFSETGQGKYVPRSIYVDLEPNVIDQVRTGPYRDLFHPEQLITGKEDASNNYARGHYTVGKELVDEVTDKIRRIADNCSGLQGFLVFHSFGGGTGSGFGALLLERLAMEYTKKSKLQFSVYPAPQVSTSVVEPYNSVLTTHATLDLADCTFMVDNESCYDICRRNLDIERPSYENLNRLIAQVVSSITASLRFEGSLNVDLAEFQTNLVPYPRIHFPLVTYAPIVSAAKAFHESNSVQEITNQCFEPYNQMVKCDPRAGRYMATCLLYRGDVIPRDVQAAVTTIKAKRTIQFVDWCPTGFKIGICDRPPQHIEGSEIAKVDRAVCMLSNTTSIAEAWSRLDHKFDLMYSKRAFVHWYVGEGMEEGEFSEAREDLAALERDYEEVGQDSMEVDYMEEEY

SEQ ID NO: 25544 - protein, 597 aa, Nocardia farcinica IFM 10152
MREFEVPASYTIPDDANNSDNVFRHAEQSPNAVLFNVPNGSGGWKDVTASQFAKTVTGVAKGLIAAGIELGDRVAIMAPTRYEWQVLDFAVWAAGGCTVAIYDSSSAEQAKWILQDSATKLLVVDSDKHRAVIDEIETGALPDLAEIVQIDKGAVDDLIERGKDLDDQVVHERRKQVGASSPATLIYTSGTTGRPKGVMLSHANLWAESTADRIALGKYVTEGKKTLMFLPLAHVFARAVALAAFDAKVIVAHTSDWTTLVDQFGAFKPHFILSVPRVFEKVFNGAKQKAHDGGKGKIFDAAAATAIEYSEALDNGGPGLVLKLKHALFDKLVYSKLKTALGGQCEAAVSGGGPLGARLGHFFRGVGVTIYEGYGLTETTAAFSVNTPEHIRVGSVGRPIEGHAAKIAEDGELLLRGPVVFNGYWGNEAATEEAFADGWFKTGDLGAIDADGFITITGRKKEIIVTAGGKNVSPALLEDSLRAHPLISQVMVVGDGQPFIGALITLDPEALPGWKERHGLAADTAIETVVEHPELVAEIDAAVAETNKKVSHAEQIKKHRILTVDWTQEGGELTPKMSLKRAVVMKQYAAEVEKIYA

SEQ ID NO: 25545 - protein, 838 aa, Bdellovibrio bacteriovorus HD100
MGSASFLKNLLTRFGVEFGLMGLIGLGFLTFQRPELLKLSQYSERPSNEMTEVLRTTEQILVRAEAAQDRFLVSRQPTDLQSYNSEITALNGQLARMSQLVRNKPREHAMAVKLGHLIRAHIETANTQVMTPQRRPAQTEESLDKTRYQIRHQLIEMQAASAPAIKFKPTKEGQNFLLGLCAAIVLIIASRVLQRKEQHETRKAVEALQGKSILLDTILNSMSEALIVVDQNGWFTHYNAAAQRIIGSKIKEISTDSSVEQLGFFNQAEGRPFTRKELPLYRALSGDRVDDLEIFVQNSEHPEGIYISLSSRPLNDIDGGISGALIVFKDISRRKMVEQEWIRAREAALEASQKKSDFLAAMSHEIRTPMNGVIGMTTLLADTHLNPEQTDYVGNIKRSAESLLMLINDLLDHSKIEAGKIRLDPQPLDLQFLVEDVLEMFKPTVAEKNIGLECRFDGKNLWHYRADAGRLRQILVNLMGNAVKFTEKGFVRLEVSSRGDKDGKTALLFEVKDTGQGLQEHEKRSLFQKYFQAKAGMKFGGTGLGLSICKQLVDLMGGDIGVESVPGVGSNFWFMVNLEECAGEVQPQSSEVRFARIFSGHVLVAEDQIVNQRVAESYLTKLGLKVEIAGNGQIALEKARSKSYDLIFMDCQMPVLNGYEATKQLRLLENTLGRKTPVVALTAEGTSGERKSCYEAGMDDFLTKPLELHKLIETLHRWLKPSEKNLDLKALESLKDLVSHDRSLTEVLIEDLEQSGPVLLHEIREGIESRNLEKVSESAHALKSSAATLGAKQVSELCQKLEDLQDFTEAEFLLKQTERKFFESLSELKTYSSRVRAA

SEQ ID NO: 25546 - protein, 548 aa, Marchantia polymorpha
MGNCVGGHSDRKNALNPNEPAATNVQRGTGAPQGSHGGSGAAGVSAQASHPAPLGGISAKQKPTLTGNVLGRPLEDVRSIYTLGRELGRGQFGVTHLCTHKVTGELLACKSIAKRKLTNKDDVEDVRREVQIMHHLEGQKNIVELKGAYEDKHNVHLVMELCAGGELFDRIIQRGHYSERAAAALCRTIVQVVQTCHSLGVMHRDLKPENFLLANKKEDAPLKATDFGLSVFFKPGEVFTDIVGSAYYVAPEVLRRNYGPEADVWSAGVILYILLCGVPPFWAETEQGIFDAVMHGHIDFTSDPWPSISQKAKDLVKRMLKQNPKERLTAHEVLSHPWISVDGEAPDKPLDNAVLSRLKQFTAMNKLKKLALKVIAESLSEEEIMGLKEMFKSMDTDNSGTITFEELKDGLQKQGSNLAESEVRQLMAAADVDGDGTIDYLEFITATMHLNKIDKEDHLYAAFQHFDGDNSGFITMEELEQALIKHGMGDPDTLKEIIREVDTDHDGRINYDEFVAMMRKGTPGHQEGHRRSISNMAPVGAPRQHHHK

SEQ ID NO: 25547 - protein, 240 aa, Corynebacterium efficiens YS-314
MLNHMENQTDGQVKVLVVDDEPNIVELLTVSLKFQGFNVMTASDGNEGLKIAREFRPDAYILDVMMPGMDGFELLTKLRAEGLDGPVLYLTAKDAVENRIHGLTIGADDYVTKPFSLEEVITRLRVILRRGGSVESESNDATLTYADLTLNDETHEVTKAGELVDLSPTEFNLLRYLMLNAEVVLSKAKILDNVWHYDFGGDGNVVESYISYLRRKVDTHEPQLIQTVRGVGYVLRTPRT

SEQ ID NO: 25548 - protein, 548 aa, Marchantia polymorpha
MGNCVGGHSDRKNALNPNEPAATNVQRGTGAPQGSHGGSGAAGVSAQASHPAPLGGISAKQKPTLTGNVLGRPLEDVRSIYTLGRELGRGQFGVTHLCTHKVTGELLACKSIAKRKLTNKDDVEDVRREVQIMHHLEGQKNIVELKGAYEDKHNVHLVMELCAGGELFDRIIQRGHYSERAAAALCRTIVQVVQTCHSLGVMHRDLKPENFLLANKKEDAPLKATDFGLSVFFKPGEVFTDIVGSAYYVAPEVLRRNYGPEADVWSAGVILYILLCGVPPFWAETEQGIFDAVMHGHIDFTSDPWPSISQKAKDLVKRMLKQNPKERLTAHEVLSHPWISVDGEAPDKPLDNAVLSRLKQFTAMNKLKKLALKVIAESLSEEEIMGLKEMFKSMDTDNSGTITFEELKDGLQKQGSNLAESEVRQLMAAADVDGNGTIDYLEFITATMHLNKIEKEDHLYAAFQHFDEDSSGFITMEELEQALIKHGMGDPDTLKEIIREVDTDHDGRINYDEFVAMMRKGTPGHQEGHRRSISNMAPVGAPRQHHHK

SEQ ID NO: 25549 - protein, 443 aa, Polytomella agilis
MREIVHIQGGQCGNQIGAKFWEVVSDEHGIDPTGTAIGDSDLQLERINVYFNEATGSRYVPRAILMDLEPGTMDSVRSGPYGQIFRPDNFVFGQTGAGNNWAKGHYTEGAELIDSVLDVVRKEAESCDCLQGFQVCHSLGGGTGSGMGTLLISKIREEYPDRMMLTFSVVPSPKVSDTVVEPYNATLSVHQLVENADECMVLDNEALYDICFRTLKLTTPTFGDLNHLISAVMSGITCCLRFPGQLNADLRKLAVNLIPFPRLHFFMVGFTPLTSRGSQQYRALTVPELTQQMWDAKNMMCAADPRHGRYLTASALFRGRMSTKEVDEQMLNVQNKNSSYFVEWIPNNVKSSVCDIPPKGLKMSATFIGNSTAIQEMFKRVSEQFTAMFRRKAFLHWYTGEGMDEMEFTEAESNMNDLVSEYQQYQDASAEEEGEFGEEEEEN

SEQ ID NO: 25550 - protein, 149 aa, Malus x domestica
MADQLTDDQISEFKEAFSLFDKDGDGCITTKELGTVMRSLGQNPTEAELQDMINEVDADGNGTIDFPEPLNLMARKMKDTDSEEELKEAFRVFDKDQNGFISAAELRHVMTNLGEKLTDEEVDEMIREADVDGDGQINYEEFVKVMMAK

SEQ ID NO: 25551 - protein, 351 aa, Silicibacter pomeroyi DSS-3
MSTLEKLPVTVITGFLGAGKTTLIRHLMQNPQGKRLAVVVNEFGDVGVDGEILKSCAIPECPAENIMELANGCICCTVADDFIPTIEALMALEPRPDHILIETSGLALPKPLLKAFDWPDIRSKITVDGVIALADAEAVAAGRFAPNVAAVDAQRLADDSIDHETPLSEVFEDQISCADIILLTKPDLAGPEGVARAREVIAAEAPRPLPVVEVAEGAVDVRVILGLGAAAEDDMDARPSHHDGHDDHEHDDFESIVVELPEQSDPAELVARIERLANELNILRVKGYAAVAGKPMRLLVQAVGARVRHQYDRPWQPGEERRSRMVVIAEHHDIDPAAINAILTGVSEPAE

SEQ ID NO: 25552 - protein, 1280 aa, Magnaporthe grisea 70-15
MPPRGGRVSKGPSLPLNLLREIGADGASSKGRGRSNRSGGRAFDRRPNRGGDRPKGSSHASHRAVEVTKKPNLKRSKRGHETDSEDSEDGSSEEQDDSGLEDEDDYDDDDEDVSDVEESTDEKSLPKAVRDKIAEDDKEIAELERRLGIKGRKGLPKSFKEDGLGDLLEGIDDAIGVESNEKKKRKAEADEWLAQKRQKANQTTRQVERDDDDEGSDSEDDDIDEDDFDMGDESSQDGGSDGEFEGFESDPETASAPKPQRENPYVAPTSGVTVTKYIPPSMRAKTGSDDELMLRIRRQTQGLVNRLTDANLISILGEIEKLYREYPRQHVTSTLVDLLLIQVCDPSSLPDTLLILTAGFATAAYKVIGMDFGAYLVQTTAEKFKEHYAKTVGRTQEQQEVTKETSNIITFLAQMYNFQMIGCNLVFDHIRFLLGELSELNAELLLRIIRMAGKPLRQDDPMALKDIVALIRPAMAKFGENNVSVRTKFMIETINDLKNNKMKAGATASAINTEHTTRMKKLLGTLSSRKLKATEPLRMGLKDIEEADKKGKWWLVGSSWAGKDKTDKKKTSDKPEADDVSDVNDLEIYDDDDLDVDLEALARRLMLNTDIRRSIFFAVMSALDFEDAYRNLLKLRLNKERQREVSHVLLQCCGSEEQYNPYYALVARKISGDDRRTKWNFQDTLWKFFRRLGESLFDEEADEVDDEDDKATELRRIVNIGKFYGNLISEGVLNLDVLRCLNFVYLKPKTKMLVEVILVTALLDFPCKNRAGADEVIRKMFTLPGKPEFARSLKYFMEKVMPRTDFLILLLLPEQKDLVIIGGGVAGYVAAIKAGQQGMKVTCIEKRGTLGGTCLNVGCIPSKSLLNNSHLYHQILHDTKNRGIEVGDVKLNLQQLMKAKDTSVGGLTKGVEFLLKKNGVEYLKGTGSFVNEHEIKIALNDGGETSRTAKNILIATGSEATPFPGLEIDEKRVVTSTGALALEKVPETMTVIGGGIIGLEMASVWSRLGAKVTVVEYLGQIGGPGMDTEIAKSAQKILKKQGIEFKLNTKVNGGDTTGDKIKLDIDAAKGGKAESIESDVVLVAIGRRPYTGGLGLENVGLETDDRGRVVIDSEYRTSHPHIRCVGDVTFGPMLAHKAEEEAVAVVEYMSKGYGHVNYAAIPSVMYTHPEVAWVGQSEQDLQKAGIQYRVGTFPFSANSRAKTNLDTEGMVKMLADPETDRILGVHIIGPNAGEMIAEGTLALEYGASSEDIARTCHAHPTLAEAFKEAAMATHAKAIHF

SEQ ID NO: 25553 - protein, 81 aa, Oryza longistaminata
YVKFHWKPTCGVSCLMDDEATLVGGKNHSHATQDLYDSIAAGNFPEWKLFVQVIDPEEEERFDFDPLDDTKTWPEEEVPLR

SEQ ID NO: 25554 - protein, 559 aa, GIBBERELLA ZEAE PH-1
MLSAVRTARLRSLIKHSRTIHSSSKHLSSTEAAPAARPAHYDTSQKLSAIDAVKERRLKAGKLVAGVAAASDSDMFKGPTTGLPKSKRWDNHLSHESKVREPCTLKQAARHMKKPGLISLGGGLPSSEVFPFAELGFKVPVAPKFSEKDTEESGQTVTIGKYDVRDRGGTYDLSIACNYGQATGSPQMMRYLTEHTEIVYKPPYADWKVCQTIGSTGALEEALRMFCDKDRGDSVLTEDFSFSTALETVGPLGIKAFGVSIDEQGLIPEAMDELLSNWDAKERGSRKPHLLYTVPSGQNPTGATQGTERRKAIYAVAQKHDIYIIEDEPYYFLQMQPYTGRNQPDVPPPKTVDEFVSSLIPSLLSIDVDGRVMRMDSFSKVLVPGSRLGWITASEQIVERYIRHAEVASQGPSGFSQVILYKLLDETWGHEGYLRWLMNLRLEYTKKRDALLAACEDHLPSDLASWTPPVAGMFMWINIDYTKHPDAGKRSIVDIEEEIFNLCIENGVLIARGSWFLTEKDKAPPGLFFRATYASATPENMNKAIERFGKAVRDSFGRK

SEQ ID NO: 25555 - protein, 325 aa, Geobacter metallireducens GS-15
MESKLRALLPDAELIRMYEQMVLSREFEESCAEQYTKGHITGFLHLYSGQEAVAVGATAGLHRDDYILSAYREHAQAIVRGAEPRRVMAELFGKRTGICKGKGGSMHLFDPNLSFMGGYAIVGGQFPIAVGLAFAAKFRKEGRIVACFFGDGAANQGTFHESLNWARLWELPVLFICENNSYGIGTSVERASALPDIHRRTCGYDIPSERVHGMDVIAVYEAVKWAAEWVREQNRPFLIEAITYRFRGHSMSDPGKYRSLAEVELWKSRDPIPAFANRLVEEEIATEAQLEGIKQQALVTVADAVKFAEDSPWPEDSEVWEDVYA

SEQ ID NO: 25556 - protein, 102 aa, Chlamydia trachomatis D/UW-3/CX
MSDQATTLKIKPLGDRILVKREEEASTARGGIILPDTAKKKQDRAEVLALGTGKKDDKGQQLPFEVQVGNIVLIDKYSGQELTVEGEEYVIVQMSEVIAVLQ

SEQ ID NO: 25557 - protein, 90 aa, Oryza longistaminata
DAKARYVKFHWKPTCGVSCLMDDEATLVGGKNHSHATQDLYDSIAAGNFPEWKLFVQVIDPEEEERFDFDPLDDTKTWPEEEVPLRPVGR

SEQ ID NO: 25558 - protein, 82 aa, Wolbachia sp.
IKPISEEKQGGIVLPSSAEKKPTKGEVIAIGEGSRNSSGERVTLTVKAGDKVFYRQWAGTEIEHNNEKLIVMKESDILAVIK

SEQ ID NO: 25559 - protein, 89 aa, Oryza longistaminata
DAKARYVKFHWKPTCGVSCLMDDEATLVGGKNHSHATQDLYDSIAAGNFPEWKLFVQVIDPEEEERFDFDPLDDTKTWPEEEVPLRPVG

SEQ ID NO: 25560 - protein, 249 aa, Campylobacter jejuni RM1221
MVDFRKFYKENANVAYTVLGYPNLQTSEAFLQRLDQSPIDILELGVAYSDPIADGEIIADAAKIALDQGVDIHSVFELLARIKTKKALVFMVYYNLIFSYGLEKFVKKAKSLGICALIVPELSFEESDDLIKECERYNIALITLVSVTTPKERVKKLVKHAKGFIYLLASIGITGTKSVEEAILQDKVKEIRSFTNLPIFVGFGIQNNQDVKRMRKVADGVIVGTSIVKCFKQGNLDIIMKDIEEIFKK

SEQ ID NO: 25561 - protein, 473 aa, GIBBERELLA ZEAE PH-1
MPTVRATRTRNENDENSGTTRLTRAQAAALKVDELSMPAKAALQTKKSTANGTAAANTRKRAALGDVSNVGKADGVAGKKAKGLVSKAAQPTGIEKKTARPTRPALASQTANSKPAQSGSGTINNKRKVLTDTKPKAPVKKTEPTSKEPELTEENERSETPEEAEVEKPEVSVEKPEVQDAPFKYPPGVNNLDEEDLEDPLMVAEYANEIFEYLRDLECKSIPNPQYMSHQDDLEWKTRGILVDWLIEVHTRFHLLPETLFLAINVIDRFLSEKVVQLDRFQLVGITAMFIASKYEEVLSPHVENFKRIADDGFSEAEILSAERFVLSTLNYDLSYPNPMNFLRRVSKADNYDIQSRTIGKYLMEISLLDHRFMAYRPSHVAAGAMYLARLMLDRGEWDATLSYYAGYTEDEVEPVVHLMVDYLARPVVHEAFDKKYAAKKFLRASLLARQWAKKNAVLFGITDIELGLDQIS

SEQ ID NO: 25562 - protein, 614 aa, Ralstonia metallidurans CH34
MRRDRLSGILLPNLPRRRFVQGLAAGGVMAGLSALGGTAWAQSSGLPESASSGTAPVLTGTEFDLVIAESVVNFTGTPRVATTINGMLPGPTLRWRQGDTVTIRVTNRLHEHTSIHWHGIILPFQMDGVPGISFAGIAPGETFTYQFKVEQTGSYWYHSHSGFQEMTGVYGGIVIDPATGVDGVRADRDYTILLSDWTDEDPMRVLSKLKVQSDYYNYIKPTVFDFFRDVSNDGVKSAFEKRKMWNEMRMNPTDLADLSGATLTYLTNGVTPAGNWTGLFKPGEKVRLRFINGSGNTFYDVRIPGLKLKVIQVDGQNLEPVSVDEFRFGPGETYDVLVEPRDDAYTIFSQSMDRTGYARGTLAVRAGLNAQVPAVDKPEWLTMSDMMGGMGGMGGMDHSKMDMGGMNQGSMAGMNHGAMTMDHSQHAMGGMAMDASLKVPSTKARHAKTEYGANTDMRVDMARTNLDDPGIGLRNNGRRVLTLADQHTIGGPLDKRGPAREVELHLTGNMERYSWSIDGVEYGKSTPVRFKYGERLRVILHNDTMMTHPMHLHGMWSELESPDGSFQARRHTIPVQPAPGFSFLVTADALGRWAWHCHLMLHMDAGMFREVLVA

SEQ ID NO: 25563 - protein, 340 aa, Bradyrhizobium japonicum USDA 110
MRSMTVLVTGGAGYIGSHTVLALAEAGEDVVVIDDLSTGFSAYLPEGVPLFIGDAGDENLLEGVIAQHNIESIIHFAGSVVVPDSMRDPLGYYRNNFMTARNLLNVAVKRGIGRFIFSSTAAVYGDPDQVPVPEHAPTRPLSPYGSSKLMTEIMLHDVAAAYGMQYVTLRYFNVAGADPQARIGLATVGATHLLKIAVEAATGQRAKIDVFGTDYPTPDGSCIRDFIHVTDLSQAHRSALAYLRNGGASTTLNCGYGRGYSVLETIDAVRRVSGRSFAVQYAPRRPGDIMTMVADTSRIRGLLDWKPQYDDLETIAAHALAWEDKLYRERHGELRHAVSA

SEQ ID NO: 25564 - protein, 656 aa, Streptococcus pneumoniae
MSNLSVNAIRFLGIDAINKANSGHPGVVMGAAPMAYSSLQNNFISIQLNQTGLTATALFFQQVMVQCSFMLFFTFLVLKMSAWMRLRVSVNGVKNTRSPRICHTAGIDATTGPLGKDFNCYWFCPSRRFLAAKYNREGYNIFDHYTYVICGDGDLMEGVSSEAASYAGLQNLISWLFFMIQMISTWMVRQRIPLQKVFVTVTMLRLHTALVENGTDLEAIHAAIETAKASGKPSLIEVKTVIGYGSPNKQGTNAVHGAPLGADETASTRQALGWDYEPFEIPEQVYADFKEHVADRGASAYQAWTKLVADYKEAHPELAAEVEAIIDGRDPVEVTPADFPALENGFSQATRNSSQDALNVVAAKLPTFLGGSADLAHSNMTYIKTDGLQDDANRLNRNIQFGVREFAMGTILNGMALHGGLRVYGGTFFVFSDYVKAAVRLSALQGLPVTYVFTHDSIAVGEDGPTHEPVEHLAGLRAMPNLNVFRPSRCAWNEAAWYLAVTSEKTPTALVLTRQNLTVEDGTDFDKVAKGAYVVYEMQRPTLIPSLIATGSEVNLAVSAAKELASQGEKSRVVSMPSTDVFDKQDAAYKEEILPNAVRRRVAVEMGASQNWYKYVGLDGAVLGIDTFGASAPAPKVLAEYGFTVENLVKIVRNLK

SEQ ID NO: 25565 - protein, 474 aa, Bacillus cereus E33L
MAQVNNTNNELKRTMKSRHLFMIALGGVIGTGLFNGSGFIISQAGPGGSVLAFMAGGLLMYFVMLCLGELAVAMPVSGSFQEYATKFINPATGFTIGWLYWLSWANTTGLEFTTAGITMQRWFPDIPVWVWCLIFGVTIFTINALSARSYAETEFWFSSIKVSAIIAFIILGGAAMFGLIDLKGDEPAPLFSNFVNHGGLFPNGLAAILLTMVTVNYSFQGTELVGIAAGESEDPAKTLPRSIRNIIWRTMFFFVLAIFVLVALIPWEEAGLTKSPFVAVFDNIGIPYAADIMNFVILTAVLSVANSGLYAATRMLWSLSKNEMAPAFLKKLSSRGIPLNALIMTIAISAFSLLTSVVAAETVYLWLISISGVITIIVWMSICVSQFFFRKHYVADGGKLEDLKFKTPLYPLVPMLGFGLYGIILISLIFIPEQRLGIYCTVPFIIFCYTYYHFKVKKRISTNTSSENKISETI

SEQ ID NO: 25566 - protein, 1136 aa, Tuber borchii
MADKLLQDVYRKIEREKVLINGARAMRQSTDNAAVQQKLDNQIRESQRNLSYLEGRYGELQNMVITSGVGDMHVNDGGGYGGGYQNPQMLPPNKPFAQGSGGSAQPKTRPNYSKLDLIKYDTPHLGPRIQLMLSQLEFKLSVEKQYKEGIEKMIKLYQMEGDRKSRQDAESKHTDIGQKIQLLKQALKRYEDLHVDMDFGDEDSINSPNIRRPLTGRLAIRVLAVKDVDHATTSRFARGPETFVIIKVEDVARVRTKFTRNDKWLDEAHDIDVDKANEIEMTVYDKPGDNHMPIGLLWIRISDIAEELRRKKIEQEISSSGWVSADKMANSGAGRPGEGAYNYSQGFGGPAAAGGGNTGMYVNNSGQAQAQGGSAGIDAWFALEPVGQIHLNLNFVKYNRNKRPLDLGLGRKGAVRARKEEVHEMYGHKFVQQQFYNIMRCALCSDFLKYSAGMQCSDCKYTCHKKCYPKVVTKCISKSNAETDPEEEKLNHRIPHRFEPMTNMGANWCCHCGYMLPVGKKNARKCTECGLTCHSQCAHLVPDFCGMSMEVANQILGEIKKTKKRGPSMTDRNLRTNVPPVPSSPLSGRPTSDPYVSALDPRNSVQGEPAQLSQRTHSYTPSSPTAVNAANVAYGTASSPARPQQPAPYSPEQRPNRVPEPTAVAAAAHAGQRPPSTVQSQTGYPPRQSADFYQGAPTSPTQPNHPTELPSSPSPYQQGQGYDNPYQQHHAPTPQQPPAAPPKASPAPSGYGQPQATQYDQRQSYGQPPPAPAKVAPPAHTPAAEKQPPPPPVLEPQHVVSRPTKIGLDHFNFLAVLGKGNFGKVMLAETKASKKLYAIKVLKKEFIIENDEVESTRSEKRVFLIANKERHPFLLNLHACFQTETRVYFVMEYISGGDLMLHIQRGPFGSRRAQFYAAEVCLALKYFHENGVIYRDLKLDNILLTLDGHIKIADYGLCKEEMWYGSTTSTFCGTPEFMAPEILMDKRYGRAVDWWAFGVLIYQMLLQQSPFRGEDEDEIYDAILADEALYPIHMPRDSVSILQKLLTKEPELRLGSGPTDAQEIMSHPFFANINWEDIYHKRIPPPFKPSIQSATDTSNFDQEFTSVTPVLTPVQSVLTQAMQEEFRGFSYVQDFS

SEQ ID NO: 25567 - protein, 555 aa, Debaryomyces hansenii CBS767
MSVSKNIYELTAMANTMKKIAWDSVSVVERDATRVYEYSFLNKQLKKCSGSSMWSDAMATAEAARHGIRMGGAVNQRRMYSTNSFSHPSLTPEQNMPNETQRKEIIGVKKPEEFQMSLSEVPSTRLARIFHYGSLAAGMGLGAATQGIKHYASGNKTSISMKSLILSPQNIERMAKKFSKMRGAALKIGQMMSFQDLSILPAEIQQILLRVQNSAHYMPPGQLERVMVNDLGNNWRERLFTSFEDVPVAAASIGQVHNAVTEDLTPVVVKVQYPGVVDSIDSDLNNLLTLLTASAILPAGLFLDKTIANARVELKWECDYIREAQNLIRFRDMIKDDPVFEVPRVFHNLCGEHVLTMERMRGLEITKGNWDQNTRDWIATNIMRLCLLEIKHFKFMQTDPNWANFLYNESTGKIELLDFGAAREFGDEFIENYILILKAAIKKDRDQIAHYSKKLGYLTGLESPAMTEAHVDSILVLGEAFSPVDNKGKPFNFKDQTITDRVRGNVGIMLSERLTPPPEETYSLHRKLSGVFLLCARLGATVPCEDLFKEIIGHD

SEQ ID NO: 25568 - protein, 250 aa, Medicago truncatula
MPIRNIAVGTPQEATHPDTLKAGLAEFISTFIFVFAGSGSGIAYNKLTNDGAATPAGLISASIAHAFALFVAVSVGANISGGHVNPAVTFGAFVGGNITLLRGIVYIIAQLLGSIVASALLVFVTASSVPAFGLSEGVGVGPALVLEIVMTFGLVYTVYATAVDPKKGNIGIIAPIAIGFIVGANILVGGAFTGASMNPAVSFGPAVVSWSWSNHWVYWAGPLIGGGIAGLVYEVLFINSTHEQLPTTDY

SEQ ID NO: 25569 - protein, 294 aa, Petroselinum crispum
MDQYEKVEKIGEGTYGVVYKARDRVTNETIALKKIRLEQEDEGVPSTAIREISLLKEMQHGNIVRLQDVVHSEKRLYLVFEYLDLDLKKHMDSCPEFAKDPRLIKMFLYQILRGIAYCHSHRVLHRDLKPQNLLIDRRTNALKLADFGLARAFGIPVRTFTHEVVTLWYRAPEILLGSRHYSTPVDVWSVGCIFAEMVNQRPLFPGDSEIDELFKIFRITGTPNEDTWPGVTSLPDFKSAFPKWPSKELETVVPNLDSAGLNLLKKMLCLDPSRRITARIALEHEYFKDIGIVP

SEQ ID NO: 25570 - protein, 112 aa, Brassica napus
  misc_feature (23)..(23): Xaa can be any naturally occurring amino acid
  misc_feature (42)..(42): Xaa can be any naturally occurring amino acid
  unsure (1)..(112): unsure at all Xaa locations
EQARSPNSRDTQEVKLEQGLKIXKIFKEQPSKTCILDDFSFXEVRQKTILEKKAKQQQTQKHVSEKKTTTDEKKDSATADSANKESPPATSDVKADENGSVAKPVSVVANGC

SEQ ID NO: 25571 - protein, 386 aa, Bacillus cereus E33L
MNKSVMYKKTLILDLGDIKVKKQRIVVKIGSSSLADSHEGISKEQLSDHVAALARLKEEGHEVLLITSGAVAAGFSALGYPSRPVTIKGKQAAAAVGQSLLMQAYTEEFRKYGIVTAQLLLTRSDFSRKEQYSNAYATLGELLNRSALPIINENDSISLEELTFGDNDMLSALVSGLVSADMLMIFTDVNGLYDKNPQKNEDAKKYYFLPEVTEEIASLAGDAGSKLGTGGMKSKVDAAKTALSLGVSVFIGTGRGQEKFVDVLKGKGDGTYVGNAPQKEMKMNKQWIALHSVVSGQIEIDAGAATAIIQHGKSLLPAGVTNVSGFFQVGEVVEVMTQQGRVIGKGQCTYSAEELRDVKGMQSQHIQARGERHSYEVIHRDHWVSL

SEQ ID NO: 25572 - protein, 443 aa, Petroselinum crispum
MASIPVVQQNRVEAAGGGAVKQKNMAAVEGRNRRALGDIGNLVTGHGIEGKQQQIPQVSRPVTRGFCAQLLANAQAGVVENNKKQRAIVGDGVVAVRQKKVSVKPKPEDIIVISPDTEEADRVNKHLNRKKATEGSLKKKGQTFTSTLTARSKAAAFGLTRKPKEQIVDIDAADANNELAAVEYVEDMYKFYKLAEHESRVFDYIDFQPEINQKMRAILVDWLIEVHNKFELMPETLYLAINILDRYLSTESVARKELQLVGISSMLTASKYEEIWPPEVNDLTKISDNAYTNQQVLIMEKKILGQLEWNLTVPTPYVFLVRFIKASIPNEPAVENMACFLTELGMMNYATVTYCPSMVAASAVYGARCTLDKAPFWNETLKSHTGFSEEQLMECGRTLVRFHSCATENKLRVIYRKYSLDERGCVAMLPPAKALLTVAKPQT

SEQ ID NO: 25573 - protein, 272 aa, Nostoc punctiforme PCC 73102
MTAISDCFETLGHNHECALIPFITAGDPDLETTAKALQVLDQSGADIIELGIPYSDPLADGPVIQAAATRALQRGTKLEHVLEMLQGITPKLRSPIVLFTYYNPILHRGIDKFLQEIAAAGVAGLVVPDLPLEEAAGLLEPAKEMGIDVILLVAPTSDAKRIEAIAHSSQGFIYLVSVTGVTGVRSQLESRVSDLLKQIRGVTEKPIGVGFGISDAAQARQVKEWGADAAIVGSAVVKRLAEGTPEQGLSAIAQLCQSLKAAIKTSTNTPLD

SEQ ID NO: 25574 - protein, 399 aa, Vibrio fischeri ES114
MMTMFEKIAAAPADPILGLTDEFKNDPRAEKINLGVGIYKNEAGQTPVLTTVKKAEAVLLDTEKTKSYLTIQGTAEYGLAVQKLLFGADAQVITEKRAQTAQAPGGTGALRVAGEFIKRQLGDVKIWISNPTWANHIGVFTAAGIETAQYTYYNAETKSKDFAAMLTDLQQAEAGDVVLLHGCCHNPTGIDPTADEWEELAKLCANKGLLPLFDFAYQGFAKGVEEDAAGLRTFAQYCPELLVASSFSKNFGLYNERVGAFTLVAKDATVAADAFSQVKAIIRSIYSNPPAHGAAVVTHILNDDALRAEWEQEVAEMRDRIQEMRTLFVTTLKEQGVDADFSFIERQNGMFSFSGLSKEQVNRLKDEFAIYIVGSGRISVAGMTKDNMLPLCKGIAAVL

SEQ ID NO: 25575 - protein, 477 aa, Geobacter metallireducens GS-15
MSEELYDLIVIGAGPGGYVAAIRAAQLGMSVAVVEKRSALGGVCLNEGCIPSKALLDSSELFALARDRFAGHGIAIDPPRLDLARMMARKDDVVKKLTDGVAFLFKKNKIARVQGTARLTGERDGAHGVDVEGGDQGPGTGDREKQTLRGKRVLLATGSEAAVIPFMPFDGELVVSAREALSFDRVPEHLLVVGAGYVGLELGSVWRRLGSQVTVVEMLPKMLPNTDGQVADTLMGSLKKQGIVFRMETKVTGFAKRDGKAAVTVEAGGATEEIVCDRVLVAAGRRPLTAGLGLEELGVRLEAGRIAVDDNYQTSLRGIYAIGDLIHGPMLAHKAMAEGEVFAERLTGQASVVDYAYIPGIVYTWPEAAGVGRTEEELKTEGVEYRVGKFPFMANGRAKCMDETEGFVKILATPDTGRVLGIHVIGPRASDVIAEAVTVMTYGGSAADIAMTFHAHPTLAEAMKEAALDVEKRAIHA

SEQ ID NO: 25576 - protein, 89 aa, Oryza longistaminata
DAKARYVKFHWKPTCGVSCLMDDEATLVGGKNHSHATQDLYDSIAAGNFPEWKLFVQVIDPEEEERFDFDPLDDTKTWPEDEVPLRPVG

SEQ ID NO: 25577 - protein, 454 aa, Bacillus thuringiensis serovar konkukian str. 97-27
MNTKKFAKVNEQIPGPKAASLLERRQNIVPKGVSNGIPTFVQSANGALVTDVDGNQYIDFAGAIGTINVGHCHPAVKEALHKQVDQYIHTGFNVMMYEPYIELAEKLAALAPGSFDKQVLFLNSGAEAVENAVKIARKYTKRPGIIAFSKGFHGRTLMTMTMTSKVKPYKFGFGPFAPEVYKAPFPYEYRRPEGLTEEQYDDFMIEEFKNFFISEVAPEMIAAVVMEPVQGEGGFIVPSKKFVQEVRNICSEHGILFVADEIQTGFSRTGKYFAIDHYDVVPDLITVSKSLGAGVPISGVIGRKEIMNESAPGELGGTYAGSPLGCAAALAVLDVIEKENLNDRAIELGKVVMNRFEEMKNKYNCIGDVRGLGAMCAFELVQDRKTKTPDKTLTANLCTEANKRGLLLLSAGTYGNVIRVLMPLVITDEQLEEGLTIIEESLQICYEKANTAHV

SEQ ID NO: 25578 - protein, 339 aa, Zea mays
MERYEVIKDIGSGNFGVAKLVRDVRTKELFAVKFIERGMKIDENVQREIMNHRSLRHPNIVKFKEVVLTPTHLAIVMEYAAGGELFERICNAGRFSEDEARFFFQQLISGVSYCHSMQICHRDLKLENTLLDDSIAPRLKICDFGYSKSSVLHSQPKSTVGTPAYIAPEVLARKEYDGKVADVWSCGVTLYVMLVGAYPFEDPDEPKNFRKTLTRIISVQYAVPDFVRVSMECRHLLSRIFVAKPEQRITIPEIKNHPWFLKNLPIEMTDEYQMNLQLVDMNVPSQSLEEIMSIILEARKPGDGLKHAGQLPGLGSMELDDIDVDDIDVEDSGDFVCAL

SEQ ID NO: 25579 - protein, 453 aa, Corynebacterium glutamicum ATCC 13032
MSNRHLQLIAIGGAIGTGLFMGSGKTISVAGPSVILVYAIIGFMLFFVMRAMGELLLANLNYKSLRDAVSDILGPGAGFVTGWTYWFCWIATGMADIVAITGYTQYWWPEIPLWLPGVLTIALLFALNLAAVRLFGEMEFWFAIIKIVAIVSLIVVGLFMVVTAFESPNGTTAQFNNLIEHGGFFPNGITGFLAGFQIAIFAFVGIELAGTAAAETENPTKTLPRAINSIPIRIVVFYVLALAVIMMVTPWDQVRADNSPFVQMFALAGIPAAAGIINFVVITSAASSANSGIFSTSRMLYGLSLEGAAPKRWSRLSKNLVPARGLTFSVICLIPAVGLLYAGGTVIEAFTLITTVSSVLFMVVWSYILVAYIVYRRNSPELHKKSIFKMPGGVVMAVVVLVFFAAMLVVLSLEPDTRAALIATPVWFIILGIGWLSIGGAKGAKHRSQITSH

SEQ ID NO: 25580 - protein, 82 aa, Enterococcus faecium
VAKEEEKTVAGIVLASAAKEKPQTGTVVAVGEGRLLENGEKVPAAVKAGDQVMFEKYAGTEVKYEGKEYLIVAGKDIMAIVE

SEQ ID NO: 25581 - protein, 473 aa, Corynebacterium glutamicum
MPTKYDLAIIGSGGGAFAAAIRASTLGKSVVMIERGTLGGTCVNTGCVPSKALIAAAGARHVAVDAATRFPGIATTADPVDMPALIAGKQALVESLRGEKYADVADSYGWQVLRGDASFVGTPDAPVLDVAGADRSVETIEAHHYLVATGSRPWAPPIDGLEETGYLTSTTAMELTEVPESLLVLGGGYVALEQAQLFARLGSQVTLLVRSRLASKEEPEVSKALQEVFADEGIRVVSRAVPTRVSRGTGGEAVVTAAVSGGSQEFRADQVLVALGRRPVTDGLNLDAVGVKTGDSGEVVVSDRLQSSNPRIWAAGDVTGHPEFVYVAAHHGTLVAENAFADADRSVDYARLPRVTFTGPAIGAVGMTEKDVLAAGIRCDCRVLPLHHVPRALVNRDTRGFIKIVVNAETNEILGLTAVAKDAGELAAAGVHVLGRTVAEVADAWAPYLTMAEGIRIAAKAFTTDPSLLSCCA

SEQ ID NO: 25582 - protein, 534 aa, Glycine max
MGNCCATPSTDETANKKGKKGKKENPFAIDYGFNATAANGSKLTVLKSPTGREIEARYELGRELGRGEFGITYLCTDKGTGEELACKSISKKKLRTAIDIEDVRREVEIMRHLPQHANIVTLKDTYEDDNAVHLVMELCEGGELFDRIVARGHYTERAAAAVTKTIVEVVQMCHKQGVMHRDLKPENFLFANKKETAALKAIDFGLSVFFKPGEKFNEIVGSPYYMAPEVLKRNYGPEVDIWSAGVILYILLCGVPPFWAETEQGVAQAIIRSVVDFKRDPWPKVSDNAKDLVKKMLDPDPKRRLTAQDVLDHPWLQNAKKAPNVSLGETVRARLKQFSVMNKLKKRALRVIAEHLTVEEAAGLKEGFQLMDTNNRGKINIDELRVGLHKLGHQVPESDVQALMEAGDVDGDGHLDYGEFVAISVHLRKMGNDEHLRKAFQFFDQNKSEYIEIEELRSALSDDLDTNSEEVISAIMHDVDTDKDGRISYDEFATMMKAGTDWRKASRQYSRERFASLSLTLMRDGSLHLNNEKQ

SEQ ID NO: 25583 - protein, 412 aa, Geobacter metallireducens GS-15
MYVTGNLAGNTIAMVLAGGKGERLAPLTLRRPKPGVAFGGKYKIIDFVLSNMFNSGIKKVYILTQYRAYSLMKHIRESWGKWAGLGEFFVAISPETSSESEEWFKGTADAINHYLRFIESSDADYVAIFGGDHIYRMDVSQMIGYHRRNRADITIAALEVPVEEARRFGVFCVDDDNRVTAFEEKPANPVTIPGRETCFASMGNYIFSTRRLIEVLQEGKKLHADLDFGKHVIPMMLAKKDRVFAYNFNDNLIPGMKPEERGYWKDVGTIDSYYEANMELIHVSPQLNLYNYKWPILTNQGNYPPAKTVFDEDGRRGMNIDSYVCAGCITSGSVVRRSIVGPLTKVNSYSLVEDSILFENVNVGRNVKIRRAIIDKNITIPDGTTIGYDHGEDRRRGYTVTESGIVVVSPAE

SEQ ID NO: 25584 - protein, 91 aa, Oryza longistaminata
RDAKARYVKFHWKPTCGVSCLMDDEATLVGGKNHSHATQDLYDSIAAGNFPEWKLFVQVIDPEEEERFDFDPLDDTKTWPEEEVPLRPVGR

SEQ ID NO: 25585 - protein, 337 aa, Triticum aestivum
  misc_feature (222)..(222): Xaa can be any naturally occurring amino acid
  misc_feature (244)..(244): Xaa can be any naturally occurring amino acid
  misc_feature (277)..(277): Xaa can be any naturally occurring amino acid
  misc_feature (295)..(295): Xaa can be any naturally occurring amino acid
  misc_feature (308)..(308): Xaa can be any naturally occurring amino acid
  misc_feature (321)..(321): Xaa can be any naturally occurring amino acid
  unsure (1)..(337): unsure at all Xaa locations
MAKFGEGDARWIVQERADGANVHNWHWAERDCLDWSRALLSKLLAGLPVLSGEGGLTLRTTTLDKLDGEAYVNIRKGKVIPGYELSLTLAWEADATTESGVVKVTGTAEVPYLADENADEDPELRITVRGDDGPLARRAKDAFIAHGKPLVITKIRDYVAAMANGGPAKDEIDSKKISTKAAPAAGGAAVAPAPSVKVTAAPVQAPAAKEKKANGKDKEGFXTIEMTEKFNCRSKDIYEILMDXHRWKGFTQSNARISKGGGGQFSLFDGAITGVNXELQEGKLIVQKWRFGSWXDGVHLQSGWWLVXPESGVTPKSSTTXDVPEEDQYGTHPWGRP

SEQ ID NO: 25586 - protein, 152 aa, Glycine max
  misc_feature (12)..(12): Xaa can be any naturally occurring amino acid
  unsure (1)..(152): unsure at all Xaa locations
SIYNVVSRCHVXCLQNNQPYLSMVLISELVESKCILLPQCYAEKQALGEVNAELLDTQVNPAVWEISGHMVLKRRKDYDEASEGNAWRLLAEVSLSQERFQEVNDLVFEAIGCGELEDVNVQSVKKEVDAVSTSEHPTVVVVAGSQECVVLQ

SEQ ID NO: 25587 - protein, 90 aa, Oryza longistaminata
RDAKARYVKFHWKPTCGVSCLMDDEATLVGGKNHSHATQDLYDSIAAGNFPEWKLFVQVIDPEEEERFDFDPLDDTKTWPEEEVPLRPVG

SEQ ID NO: 25588 - protein, 371 aa, Glycine max
GFMIRNSRAGNLSSYGNLVGDSFGKFGKALVQICVIINNIGMLIIYMIIIGDVISGTSSSSEFHHSGVLEGWFGVHWWTGRTFVLLFTTFAVFAPLSCFKRIDSLRYTSALSFGLAVAFLVIAVGISIFKISIGGIGMPRLFPIITDVASVFELFTVTPVVVTAYLCHFNVHSIDNELEDSSQINGIVRTSLALCASVYLLTSFFGFLLFGEGTLDDVLANFDIDLGIPFGSVLNDAVRFSYAAHLVLVFPVVFYAVRINLDGLIFPSSRPLVLDNFRFASITMVLIVASFLGANFIPSIWDIFQFTGATAAACLSFIFPSAITLRDRYNIATKKDKILSVFMIVLAVLANVVAVYSDAFALIKNSITKRE

SEQ ID NO: 25589 - protein, 427 aa, GIBBERELLA ZEAE PH-1
MRRVVVTGLGAITPLGVGVKRTWTRLLSGECGIVSVADLEPQTRWKELTSTVSGLVPSGDGEGQWRASDWLSANEQRRMSKFTQYAIAASDMALKDAGWEPKSEEQLEATGVCLGSGIGNLDEIYDTSLVHHKDGYKKVSPLFVPKILINMAAGHIAMKYGFQGPNHAATTACTTGAHSIGDASRFISMGDADIMVAGGSESCIHPLTFAGFGRARSLSTAYNNNPTASCRPFDADRNGFVVSEGAAVLILEELEHAKARGARIYAEIKGYGCSGDAHHMTAPREDGRGAFLAMKKALKNAGVKPSQVDYINAHATATNVGDVAETSAIRRLMLGEEGHEKESDITVSSTKGAVGHLLGAAGAIEALFSVLAIHQRVVPATLNLQKPDVGAAFNFVPNAAQERNVGVAVSNSFGFGGTNSSLVFSKY

SEQ ID NO: 25590 - protein, 376 aa, uncultured archaeon GZfos28G7
MAGVRDISKAKRIVIKVGTSNLTDTSYRLDPRKVEKLAKEIIELKNEGKEVIVVTSGAIGAGIGKLDLKQRPRDIKVLQATAAVGQNILMSTYDRYFAKYEQTIAQLLLTHDNFFNRQRYLNLRNTLITLLKSGVIPIINENDTVAVDEIKLGDNDNLSALVASSLGADLLIILTDIDGLYTYDPKRSEKAEFISVVEDITPEIERIASGRGKTGVGGMKTKVQAAEVTMKAGIPMVIANGGEENILRRVIAGEPVGTLFMPKKKRMNDKEHWILFSASPKGKIKVDEGAKTALVEGGGSLLPSGITDVEDEFIRGDPVSIIDVQSVEFARGITNYSSAEIKKIKGVQSKEIEQILGRKGYGYGEVVVYRGNLVLL

SEQ ID NO: 25591 - protein, 364 aa, Glycine max
MGKGGMSIDEHGEGKEENMAAWLVGMNTLKIQPFKLPTLGPHDVRVRMKAVGICGSDVHYLKTLRCAHFIVKEPMVIGHECAGIIEEVGSQVKSLVPGDRVAIEPGISCWHCNHCKHGRYNLCDDMKFFATPPVHGSLANQIVHPADLCFKLPDNVSLEEGAMCEPLSVGVHACRRANIGPETNVLIMGAGPIGLVTMLAARAFGAPKTVIVDVDDHRLSVAKSLGADDIIKVSTNIKDVAEEVVQIQKVMGAGIDVTFDCAGFDKTMSTALSATQPGGKVCLVGMGHSEMTVPLTPAAAREVDVVGVFRYMNTWPLCLEFLRSGKIDVKPLITHRFGFSQKEVEEAFETSARGGNAIKVMFNL

SEQ ID NO: 25592 - protein, 910 aa, Desulfotalea psychrophila LSv54
MSLRNFFLALFFAVLFFFSSAIAFAGWQEAPVVLILNSYHQGFGWGDAEVEAEIDVLRENFPEMSLYIEHMDQKRFPGEEGERHTLQQLEFKFAKFSPDIIIANDNIAFAFALRLRDLLWSDIPIVFSGYNGDDRLLDSLGSGVTGVFEEIDAVGTINMALKLQPGIKHVFVVVEDTITGRAVLTNVQPKLRQFGDRLRFEYLAEKGLPEILARLRLASDESIVLLLPYATSQPGTHMDARSLADLIIETSPVPVYTPYDFHLGLGALGGYVLEGKEQGQLAAELAVKILTTGNIPAPVKEELHFSPVFDNEVLNRFSIEVSELPPGSEVINQLSLGFYEQNTTFINLIALIAILLVSLLLTLLINIHLQRNAERKFVEIFDATSEAVLVCDIDTLQVLEFNRSSELLLGAEEQLVKLTDLRWNFCGEEPYDDQAFQQLIERTVRDGSLTVDWQMKRYSGEKFWAGMTLNYMQIKDVDCLLVVIRDVEQRHQLAGELEAYKFHLEELVDQKTADLQRFQQDLITAKDEAERANQAKSTFVANMSHEIRTPLNGVLGLAQLLEKTSLSVDQRSYVRRILDSGQQLLTTVNDILDFAKMEAGRLEIEESGFSLHALLQPVIDSVFVEEESSPKFCLDVAPGIPENLIGDRFRIGQVLINLLGNALKFTKEGHVSLHVVSMGLGEKGVILKFSIIDTGVGIALDVQKQLFVPFTQADSSVTRNYGGTGLGLTICKKLVVAMGGDIGLESSPGAGSTFWFTLDLGVGQEGDAQNTEAVQVNSVDRKSLLEGLKILLVDDNEINLYMMEAILLAAGAEVTLAENGQECLERLEESSYDLILMDVQMPVLDGYETTRRIRKDEKYRALPIIAITANALSDDIEKCFEAGMNDHVAKPFKIEELDASIAKCLLASRS

SEQ ID NO: 25593 - protein, 351 aa, Glycine max
  misc_feature (252)..(252): Xaa can be any naturally occurring amino acid
  misc_feature (302)..(302): Xaa can be any naturally occurring amino acid
  unsure (1)..(351): unsure at all Xaa locations
MVSNFYFLLLLRFLCWLYCIRIVILLMLQLMLWQHCLTFFSFKISKKLCLFMCFSLLQDATIEQLLPIFLSLLKDEFPDVRLNIISKLDQVNQVIGINLLSQSLLPAIVELAEDRHWRVRLAIIEYIPLLASQLGVGFFYDKLGALCMQWLQDKVHSIREAAANNLKRLAEEFGPEWAMQHIIPQVLEMNNNPHYLYRMTILRAISLLAPVMGPEITCSNLLPVVVAASKDRYFVLPFESRVHAIISIQFLXVPNCCHLLPFRVPNIKFNVAKVLESIFPIVDQSVSIILMFPSSVHLSLSXTLTVNIIVIQVVEKTIRPCLVELSEDPDVDVRFFSNQALQAIDHVMMSS

SEQ ID NO: 25594 - protein, 291 aa, Triticum aestivum
  misc_feature (80)..(81): Xaa can be any naturally occurring amino acid
  misc_feature (171)..(171): Xaa can be any naturally occurring amino acid
  unsure (1)..(291): unsure at all Xaa locations
MYRILKLCIQRVRSSTLCSTVQAAALVISSGGPGSGINAEPREVEKLVITPSKKELGLAFKGDQKMVLEALEAMGETEAXXMKAGFESKGDVDFKACALGKDVTIKRNMVSINMEKKKEHQRKFTPSVIDPSLGIGRIIYCLFEKWFYQRTGKTDDEQLNVFRFPPLVAPXIKCTVFPLVKAEKFDVVAKKISKALTTAGISHIIDITGTSIGKRYARTDEIGVPLAITVDSTTSVTVRDRDSKDQIRVEVDEVALVVKEVTDGQSTWADIMWRYPAHTALATDEEEASET

SEQ ID NO: 25595 - protein, 486 aa, Arabidopsis thaliana; identical to SEQ ID NO: 1446

SEQ ID NO: 25596 - protein, 141 aa, Nitrosomonas europaea ATCC 19718
MAVERTLSIIKPDAVAKNVIGQIYARFEAAGLKVVAARMAHLSRVEAENFYAIHRERPFFKDLVEFMISGPVMIQVLEGENAIARNRELMGATDPRKAEKGTIRADFAESIDANAVHGSDAPETAVVEIACFFPSLEIHSR

SEQ ID NO: 25597 - protein, 249 aa, Vitis vinifera
MPKIAFGRFDDSFSLASFKAYLAEFHPTILFVFAGVGSVMAYNKLTSDAALDPAGLVAVAVAHGFALFVAVAISANISGGHVNPAVTFGLVVGGQITILTGILYWIAQLVGSILACFLLKLVTGGLTTPVHSLGAGVGVIDAIVFEIVITFALVYTVYATAVDPKKGSLGIIAPIAIGLVVGANILAAGPFSGGSMNPARSFGPAVVSGDFKDNWIYWVGPLIGGGMGGSVYAIMYMGSDHQPLASSEF

SEQ ID NO: 25598 - protein, 249 aa, Fragaria x ananassa
MAYENKPNTDLDADAQRRLGRGKIEIKRIENTTNRQVTFCKRRNGLLKKAYELSVLCDAEVALIVFSNRGRLYEYSNNSSVRETIERYKKACADTSTNGSASEATTQYYQQEAAKLHNQINALQNINRGYMAEGLSNKNIKELKGMERKLERAITRIRSKKNELLFAEIEYMQKRELDLHNNNQLLRAKIAENERQQQSIIAITGGHGSYEIVQPTQPFHEARNYFQVNALQPNIHQYSCHDQVSLQLV

SEQ ID NO: 25599 - protein, 219 aa, Zea mays
MGRVGLGVAAGCAAATCAIAAALVARRASARARWRRAVALLREFEDGCATPPPRLRQVVDAMVVEMHAGLASDGGSKLKMLLTFVDALPAGNEEGTYYSIDLGGTNFRVLRVEVGAGSVVTRRKVELPIPEELTKGTIEELFNFVAMTLKEFVETEDGNDEQRALGFTFSFPVRQTSVSSGSLIRWNKGFLIEDAVGKDVAQCLNEALARNGLNVRVTA

SEQ ID NO: 25600 - protein, 400 aa, Exiguobacterium sp. 255-15
MNQTEKIITQTEKFGAHNYHPLPIVISEAEGVFVKDPEGREYMDMLSAYSAVNQGHRHPKIIEALKRQADKITLTSRAFHNDQLGFFYEKVAQLTGKDMVLPMNTGAEAVETAVKAARRWAYEVKQIPGDAEIIVCEGNFHGRTMTAVSMSTEAEYQRGFGPLLPGIKTIPYGDLEALKGAITENTAAFIVEPIQGEAGILIPYEGFLKDAQDVCKEQNVLLVSDEIQSGLGRSGKWFASDWDNVTPDMYILGKALGGGVFPISCVAANHDILSVFNPGSHGSTFGGNPLACAVSVASLEVLEEEKLPERSLELGTYFMNRLKEIDNPMIKEVRGRGLFIGVELTEAARPYCEALKEKGLLCKETHETVIRFAPPLVITKEELDWAFERIEQVLGVSVAQ

SEQ ID NO: 25601 - protein, 302 aa, Xanthomonas campestris pv. campestris str. ATCC 33913
MLVFTHPACLGHDAGPEHPESPARLTAVVEALRDAFTDLDWREAPLAKLGDLCRVHEREQVDAVLETNFQGYHQLDVDTLMSPGSRAAALRAAGAGIAAVDAVMQDGAGTAFCAVRPPGHHATGQVSMGFCLFNNIAVAAAHARDRHGLERITVVDFDVHHGNGTQAIFERDPTVQYLSTHQSGLYPHSGSVHERGIGNIHNLLLPPGSDGLRFRNVWEDEMLPLIDAFRPQLVLISAGFDAHLRDPLADLMLDADDFAWLTGALRALATRHARGRVVSMLEGGYDLQALRESSVAHVGALR

SEQ ID NO: 25602 - protein, 360 aa, Lolium perenne
MGSTAADMAASADEDACMFALQLASSSVLPMTLKNAIELGLLEILVAAGGKSLTPTEVAAKLPSAANPEAPDMVDRILRLLASYNVVTCLVEEGKDGRLSRSYGAAPVCKFLTPNEDGVSMAALALMNQDKVLMESWYYLKDAVLDGGIPFNKAYGMSAFEYHGTDPRFNRVFNEGMKNHSIIITKKLLELYHGFEGLGTLVDVGGGVGATVAAIAAHYPTIKGVNFDLPHVISEAPQFPGVTHVGGDMFKEVPSGDTILMKWILHDWSDQHCATLLKNCYDALPAHGKVVLVQCILPVNPEANPSSQGVFHVDMIMLAHNPGGRERYEREFQALARGAGFTGVKSTYIYANAWAIEFTK

SEQ ID NO: 25603 - protein, 482 aa, Corynebacterium efficiens YS-314
MEELNSFVVVANRLPVDMTAHPDGTYSITPSPGGLVTGLSPVLEQHRGCWVGWPGTVDVAPDPFRTDTGILLHPVRLTASDFEGFYEGFSNATLWPLFHDLIVPPVYDVDWWHDFREVNLKFAEAVNQVAAENATVWVQDYQLLLVPGILRQMRPDLCIGFFLHIPFPNPELFRQLPWREEIVRGMLGADLIGFHLPQNADNFLSLTRQVAGTAGSHTGQPDELEVEGEAAIREVKAHVITADGRKVGVGAFPISIDTGAVEQASQSSVEALRADLGSPEIVFLGVDRLDYTKGILQRLLAFEELLESGGLDPATTVFLQVATPSRERIEHYRVSRSQVEEAVGRINGRFGRMGHPVVHYLHRSLPKDDLQILYTAADVMLVTPFKDGMNLVAKEYVAAHRSGTGALILSEFAGAADELTEAYLCNPFDLESIKRQMLAAVHDLRHNPDYAAERMRANSEQVLSHDVNVWASSFLTCLEDFK

SEQ ID NO: 25604 - protein, 351 aa, Lolium perenne
MADEEACMFALQLANSAVLPMAIRTSIELGLLETLVGAGGKLLTPEEAVKKLPSKAKHPDAASMIDRMLRVLASYKVVTCEVEEGKDGSLSRRYGATPVCRWLAPNEDGASMAPFALLTQDRVFMEAWCHMKDAILEGGSAFHRAFGTSWFEYAGQDARFNRLFNEAMEHHSVILTKKLLELYKGFDGIGTLVDVAGGVGAVIHAITSKYPSIKGINFDLPHVIADAPPYPGVEHVSGDMFKKMPSGDAILMKWILNCFSDDECATLLKNCYDALPAHAKVINVECILPVNPDATNGAQALIAVDLSLLVYSPGGKERYHRDLEKLAKGAGFTSVTATYIFADFWAMEYTK

SEQ ID NO: 25605 - protein, 361 aa, Lolium perenne
MGSTAAEIAASADEEACLYALQLGSSSILPMTLKNTIELGLLETLMAAGGKSLTPTEVAAKLPCAAKNPEAPDMVDRMLRLLASYNVVSCLVEEGTDGRLSRRYGAAPVCKFLTPNEDGVSMAALALMNQDKVLMESWYYLKDAVLDGGIPFNKAYGMSAFEYHGTDPRFNRVFNEAMKNNSIIITKKLLQLYDGFQGLGTLVDVGGGVGATVAAITAHYPTIKGINFDLPHVISEAPPFPGVTHVGGDMFKKVPLGDAILMKWILHDWSDQHCGTLLKNCYDALPMHGKVVLVECILPVNPEAKPSSQGVFHVDMIMLAHNPGGRERYEREYEALARGAGFAGFKSTYIYANAWAIEFTK

SEQ ID NO: 25606 - protein, 538 aa, ASPERGILLUS NIDULANS FGSC A4
MSYIEEEDQRYWDEVAAVKNWWKDSRWRYTKRPFTAEQIVAKRGNLKIEYPSNVQAKKLWGILERNFKNKEASFTYGCLDPTMVTQMAKYLDTVYVSGWQSSSTASSTDEPSPDLADYPMNTVPNKVNHLWMAQLFHDRKQREERMTTPKDQRHKVANVDYLRPIIADADTGHGGLTAVMKLTKLFVERGAAGIHIEDQAPGTKKCGHMAGKVLVPISEHINRLVAIRAQADIMGTDLLAIARTDSEAATLITSTIDHRDHPFIIGSTNPDIQPLNDLMVMAEQAGKNGAELQAIEDEWLAKAGLKLFNDAVVDAINNSPLPNKKAAIEKYLTQSKGKSNLEARAIAKEIAGTDIYFDWEAPRTREGYYRYQGGTQCAINRAVAYAPFADLIWMESKLPDYKQAKEFADGVHAVWPEQKLAYNLSPSFNWKKAMPRDEQETYIKRLGALGYAWQFITLAGLHTTALISDTFAKAYAKQGMRAYGELVQEPEMANGVDVVTHQKWSGANYVDNMLKMITGGVSSTAAMGKGVTEDQFKS

SEQ ID NO: 25607 - protein, 623 aa, Pichia stipitis
  misc_feature (537)..(537): Xaa can be any naturally occurring amino acid
  unsure (1)..(623): unsure at all Xaa locations
MTTTPFDAPDKLFLGFDLSTQQLKIIVTDENLAALKTYNVEFDSINSSVQKGVIAINDEISKGAIISPVYMWLDALDHVFEDMKKDGFPFNKVVGISGSCQQHGSVYWSRTAEKVLSELDAESSLSSQMRSAFTFKHAPNWQDHSTGKELEEFERVIGADALADISGSRAHYRFTGLQIRKLSTRFKPEKYNRTARISLVSSFVASVLLGRITSIEEADACGMNLYDIEKREFNEELLAIAAGVHPELDGVEQDGEIYRAGINELKRKLGPVKPITYESEGDIASYFVTRYGFNPDCKIYSFTGDNLATIISLPLAPNDALISLGTSTTVLIITKNYAPSSQYHLFKHPTMPDHYMGMICYCNGSLAREKVRDEVNEKFNVEDKKSWDKFNEILDKSTDFNNKLGIYFPLGEIVPNAAAQIKRSVLNSKNEIVDVELGDKNWQPEDDVSSIVESQTLSCRLRTGPMLSKSGDSSASSSASPQPEGDGTDLHKVYQDLVKKFGDLFTDGKKQTFESLTARPNRCYYVGGASNNGSIIXKMGSILAPVNGNYKVDIPNACALGGAYKASWSYECEAKKEWIGYDQYINRLFEVSDEMNLFEVKDKWLEYANGVGMLAKMESELKH

SEQ ID NO: 25608 - protein, 723 aa, ASPERGILLUS NIDULANS FGSC A4
MEHIKNTFEKVKREKRAALVAYITAGYPTIEESVDILLGLENGGADIIELGVPFTDPIADGPTIQKANTKALANGVTVSTVLEMVRSARNRGLKAPIMLMGYYNPMLSYGEERMLRDCKEVGVNGFIMVDLPPEEAVRFRDLCTSTGLSYVPLIAPATSESRMKLLCKIADSFIYVVSRMGVTGATGTLSSNIPELLARVHKWSGNVPTALGFGVSTREHFLSVQEISEGVVIGSQIITVLGEAPAGQAAQKAEEYLSSVTGRKLERDTSGALTREVNVLEPVLKIETPPMSQPTDVITEKDTPSGPGLGDQLEALNGGGSSSATPARFGEFGGQYVPESLMDCLAELERGFDSALKDPSFWEEYRSYYPYMGRPSSLHLATRLTEHVGGANIWLKREDLNHTGSHKINNALGQILLARRLGKTRIIAETGAGQHGVATATVCAKFGMKCVVYMGAEDVRRQALNVFRMKLLGASVVAVDAGSRTLRDAVNEALRAWVVDLDTTHYIIGSAIGPHPFPTIVRTFQSVIGEETKQQLQEQIGKLPDAVVACVGGGSNAVGSFYPFSKDTSVKLLGVEAGGDGIDTNRHSATLSGGSKGVLHGVRTYILQDEHGQVSETHSISAGLDYPGVGPELSNWKDSDRAHFIAATDAQALSGFRTMAQTEGIIPALESSHAIWGAIELAKTMGKGKDIVLTVSGRGDKDVESVAESLPKLGPQIGWDLRF

SEQ ID NO: 25609 - protein, 82 aa, Enterococcus faecium
VAKEEEKTVGGIVLASAAKEKPQTGTVVAVGEGRLLENGEKVPAAVKAGDQVMFEKYAGTEVKYEGKEYLIVAGKDIMAIVE

SEQ ID NO: 25610 - protein, 325 aa, Glycine max
  misc_feature (120)..(120): Xaa can be any naturally occurring amino acid
  unsure (1)..(325): unsure at all Xaa locations
MSSGAGKVVCVTGASGYIASWIVKFLLNRGYTVKATVRDTSDPKKINHLVGLDGAKERLHLYKANLLEEGSFNSVVQGCHAVFHTASPFYHNVKDPQAELLDPALKGTLNVLKSCVNLPXLERVVLTSSVAAVAYNGKPRTPDVVVDETWFSDPGFCRESQMWYTLSKTLAEDAAWKFVKENNIDMVTINPAMVIGPLLQPVLNTSAASILNVINGAQTFPNASFGWVNVKDVANAHILAYENASANGRYCLVERVAHYSEIVKILRDLYPTLLLPEKCADDNPYVPIYQVSKEKAKSLGIEYTPLEVSLKETVDSLKEKKFTNF

SEQ ID NO: 25611 - protein, 453 aa, Corynebacterium glutamicum ATCC 13032
MSLTFPVINPSDGSTITELENHDSTQWMSALSDAVAAGPSWAAKTPRERSVVLTAIFEALTERAQELAEIIHLEAGKSVAEALGEVAYGAEYFRWFAEEAVRLPGRYGQSPSGIGHIAVTRAPVGPVLAITPWNFPIAMATRKIAPALAAGCPVLVKPASETPLTMVKVGEIIASVFDTFNIPQGLVSIITTTRDAELSAELMADPRLAKVTFTGSTNVGRILVRQSADRLLRTSMELGGNAAFVIDEAADLDEAVSGAIAAKLRNAGQVCIAANRFLVHESRAAEFTSKLATAMQNTPIGPVISARQRDRIAALVDEAITDGARLIIGGEVPDGSGFFYPATILADVPAQSRIVHEEIFGPVATIATFTDLAEGVAQANSTEFGLAAYGFSNNVKATQYMAEHLEAGMVGINRGAISDPAAPFGGIGQSGFGREGGTEGIEEYLSVRYLALP

SEQ ID NO: 25612 - protein, 94 aa, Enterococcus flavescens
VLRPLGDRVIIEVAKEEEKTVGGIVLASAAKEKPQTGTVIAVGEGRTLENGEKAPVAVNVGEQVMFEKYAGTEVKYEGTEYLIVAAKDIIAVVE

SEQ ID NO: 25613 - protein, 524 aa, Enterococcus flavescens
MAKEIKFAEDARAAMLRGVDKLADTVKVTLGPKGRNVVLEKSYGSPLITNDGVTIAKEIELEDHFENMGAKLVSEVASKTNDIAGDGTTTATLLTQAIVREGLKNVTAGANPLGIRRGIEMATKVAVEELHNISSIVDSKEAIAQVCAVSSGSEKVGQYIADAMEKVGNDGVITIEESKGIETELDVVEGMQFDRGYLSQYMVTDNDKMEAALENPYILITDKKISNIQDILPLLEQILQQSKPLLIIADDVDGEALPTLVLNKIRGTFNVVAVKAPGFGDRRKAMLEDIAILTGGTVITEDLGLELKDATIDNLGQASKVVVDKDNTTIVEGAGEKEAIDARVQLIKNQIADTTSDFDREKLQERLAKLAGGVAVIKVGAPTETELKELKLRIEDALNATRAAVEEGMVSGGGTALVNVINKVAEIETDGDAATGVKIVLRALEEPVRQIAENAGYEGSVIIDKLKNADLGVGFNAATGEWVNMLEAGIVDPTKVTRSALQNAASVAALLLTTEAVVADKPEP

SEQ ID NO: 25614 - protein, 690 aa, Burkholderia sp. 383
MPPCPRFLDSFSGLDMTTSSPASTTLMANAIRALAMDAVQQANSGHPGMPMGMAEIGVALWSRHLKHNPTNPHWADRDRFVLSNGHGSMLLYSLLHLTGYDLPMEELKNFRQLHSKTPGHPEYGITPGVETTTGPLGQGLANAVGMALGEALMADEFNRDGAKIVDHHTYVFLGDGCLMEGISHEACSLAGTLKLNKLIALYDDNGISIDGDVVNWFHDDTPKRFEAYGWNVIPHVNGHDVDAVDAAIAKAKLSDKPTLICCKTVIGQGAATKAGGHDVHGAALGAEEIAKTREALGWTWAPFVIPQEVYAAWDAKEAGKRAETEWDATFAAYRAKFPAEAAEFERRMANQLPADWAEKAAAIIAGANERGETVATRKASQQAIEGLAAALPELLGGSADLTGSNLTNWKASKAVRANPEGPGVQLGNHINYGVREFGMSAAINGLALHGGHKPFGGTFLTFSDYSRNALRVAALMKVPSIFVFTHDSIGLGEDGPTHQSIEHVSSLRLIPNHDVWRPADTVETAVAWTHAIAADRPSSLIFSRQNLAFNPRTDAQIANIEKGGYVLKDWDEEIVARKIILIATGSEVELAMKAIEPLAQQGIAARVVSMPSTNVFDRQDAEYRERVLPHGVRRVAIEAGVTAFWHKYVGLEGGVVGIDTFGESAPAGVLFKYFGFTVEHVVETAKAVLA

SEQ ID NO: 25615 - protein, 521 aa, Pleurotus sapidus
MVLSTKLAALVASLPFVLAATKKLDFHIRNDVVSPDGFERRAITVNGIFPGTPVILQKNDKVQINTINELTDPGMRRSTSIHWHGLFQHKTSGMDGPSFVNQCPIPPNSTFLYDFDTAGQTGNYWYHSHLSTQYCDGLRGTFIVYDPNDPLKHLYDVDDESTIITLADWYHDLAPHAQNQFFQTGSVPIPDTGLINGVGRFKGGPLVPYAVINVEQGKRYRFRLIQISCRPFFTFSIDNHTFDAIEFDGIEHDPTPAQNIDIYAAQRASIIVNANQTIDNYWIRAPLTGGNPTGNPNLDVSLIRAILRYKGAPAVEPTTVATTDGHKLNDADMHPIAQEGPGNLGTGPPDMAITLNIAQPNPPFFDINGISYLSPSVPVLLQMLSGARKPQDFLPSEQVIILPANKLIEVSIPGAGAHPFHLHGHTFDIVRTSNSDVVNLVNPPRRDVLPINGGNTTFRFFSGNSGAWFLHCHIDWHLEAGLAVVFAERPAEVNDGEQAQIVTQDWRTLCPAYDGLAPEFQ

SEQ ID NO: 25616 - protein, 401 aa, Brassica napus
MALKLNPLASQPYKLPSSARPPISTLRSPKFLCLASSSSPALSSSTKEVESLKKPFTPPKEVHVQVLHSMPPQKIEIFKSMEDWAEQNLLTHLKDVEKSWQPQDFLPDPASDGFEDQVKELRERARELPDDYFVVLVGDMITEEALPTYQTMLNTLDGVRDETGASPTSWAVWTRAWTAEENRHGDLLNKYLYLSGRVDMRQIEKTIQYLIGSGMDPRTENNPYLGFIYTSFQERATFVSHGNTARQAKEHGDLKLAQICGTIAADEKRHETAYTKIVEKLLEIDPDGTVVAFADMMRKKISMPAHLMYDGRDDKLFDNFSSVAQRLGVYTAKDYADILEFLVGRWKIESLSGLSGEGNKAQEYLCGLTPRIRRLDERAQARAKKGPKIPFSWIHDREVQL

SEQ ID NO: 25617 - protein, 469 aa, Corynebacterium glutamicum
MTEHYDVVVLGAGPGGYVSAIRAAQLGKKVAVIEKQYWGGICLNVGCIPSKSLIKNAEVAHTFTHEKKTFGINGEVTFNYEDAHKRSRGVSDKIVGGVHYLMKKNKITEIHGLGNFKDAKTIEVTDGKDAGKTVTFDDCIIATGSVVNTLRGVEFSKNVVSFEEQILDPVAPKKMVIVGAGAIGMEFAYVLGNYGVDVTVIEFMDRVLPNEDAEVSKVIAKAYKKMGVKLLPGHATTAVRDNGDSVEVDYQKKGSDKTETLTVDRVMVSVGFRPRVEGFGLENTGVKLTERGAIDIDDYMRTNVPGIYAIGDVTAKLQLAHVAEAQGIVAAETIAGAETQALGDYMMMPRATFCNPQVASFGYTEEQAKQKWPDREIKVASFPFSANGKAVGLAETDGFAKIVADAEFGELLGGHLVGANASELINELVLAQNWDLTTEEISRSVHIHPTLSEAVKEAAHGISGHMINF

SEQ ID NO: 25618 - protein, 526 aa, Caulobacter crescentus CB15
MNAEWWRGAVIYQVYPRSFADSNGDGVGDLPGITAHLDHIASLGVEGVWLSPFFTSPMKDFGYDVSNYCDVDPIFGTLADFDALIARAHALGLKIIIDLVFSHTSDEHPWFVESRQDRSNAKADWFVWADAKPDGSPPSNWQSVFGGPAWTWDARRGQYYMHNFLSSQPQLNLHNPAVQEALLAVTQFWIDKGVDGFRFDAINFSMHDPALTDNPPLPPGGKRTRPFDFQDKIHNQSHADIPKFLSRLRALTDAAGGRFSVAEVGGDHAEREMKLFTAGEDRLNSAYGFLYLYADKLIGEMIPQGAAMWPGEAGEGWPSWTFSNHDAPRAVSRWAEGRDRKAFAELCLLLLMGLRGNVFVYQGEELGLPQAHVPFERLQDPEAIANWPQTLGRDGARTPMPWVSGALNAGFSGVEPWLPVDPEHLPLAVDAQEADPASTLNVARRLIGLRRAYPALRTGAITFIDTNSPLLIFQRGEGADAVLLAFNLGFETVTWSLPDGWTLIDGVNLGGEGQMPVCAGLIARRG

SEQ ID NO: 25619 - protein, 321 aa, Candida sp. GCY 2005
MTTSSTIKLNSGYEMPIVGFGCWKVTNETAADQIYNAIKIGYRLFDGAQDYGNEKEVGEGINRAIKDGLVKREELLITSKLWNNFHDPKNVELALDKTLSDLNLGYLDLFLIHFPIAFKFVPIEEKYPPGFYCGDGNNFHYENVPLLDTWKALEKLVQKGKIRSIGISNFTGALIYDLIRGATIKPSVLQIEHHPYLQQPKLIEYVQKQNIAITAYSSFGPQSFLELESKRALDTPTLFEHKTIKSIAEKHGKTPAQVLLRWATQRNIAVIPKSNNPARLAQNLSVVDFDLSKEDIQEISALDIGVRFNDPWDWDNIPIFV

SEQ ID NO: 25620 - protein, 580 aa, Caulobacter crescentus CB15
MTTAAAAAPDPYLQRKPQDEVIYFVLPDRFENGDATNDHGGPALGALADGFDPARAGFYHGGDLKGVTRRLDYIQGLGATAVWLAPIFVNRAVQGPPGQESAAHHGYWITDFTDVDPHLGTKADFKALVDAAHARGMKVYMDIVLNHTADVIQYKECPDNRCAYRGVSDYPYVRRGGVDGAPINDGFDGKDFSKLKRPDWAYTPYVPPGQERAKTPAWLNDPIYYHNRGDSTFAGESSLLGDFATLDGVFTEHPRVVEGFIEVYGRWIDDFGIDGYRIDTARHVNPEFWQAFVPAMLARAKAKGIENFHIFGEVFDADVATLARHVKVDKLPTVLDFAFQAAVTDVALGRAGPDRLASVFAGDVVYEGGEATARQLPTFLGNHDMGRIGHFVLKAHPKIGDDALLARITLANAIMLTARGVPTIYYGDEQGFTGDGDYADSREDMFPSQVASYNDNRLVGSSAKGPRTAFQTDSVLYRRIAALAKLRGMTPALREGRQVTRIAEGKPGLLAFSRLMAGTEVLAVFNTSDKPIKARVPVEMGSAAWKSLHGACISSAVAPGSYAVELAPFDYMICVSEGRS

SEQ ID NO: 25621 - protein, 466 aa, Leifsonia xyli subsp. xyli str. CTCB07
MRKTNADDRPAVVWFRDDLRLADNPALHAAAESGRPVICLYVWDEDSPGLRSPGEAARWWLHHSLTSLEESIGRAGSALAIRTGPAERVLAEVLAEVDAGAVFWNRRYGEGERRVDERVKSAARDTGLVANSFGANLLFEPWTVRTGSGTAFSVYTPFWRACLARPEPRRPLPALRRLRPGPSLPSLELDELKLLPVHPDWADGLRETWKPGERAAHRELSAFLGEGLARYRAERDVPGIAATSRLSPRLRWGELSPFQVWHATAAARDRSTAEGAATFLSELGWREFAYHTYFERPALATVNIHREYDSFPWPRLHPSALRAWQQGRTGVPLVDAGMRELWRTGVMHNRVRMVAASFLTKNLLIDWRRGEQWFWDTLVDADPASNPFNWQWVAGSGADTAPYFRVFNPEVQREKFDPHGDYVRRWVPEWDTADYPEPLVDLAETRRAALAAWETVKAARGTAERS

SEQ ID NO: 25622 - protein, 518 aa, Pycnoporus cinnabarinus
MSRFQSLFFFVLVSLTAVANAAIGPVADLTLTNAQVSPDGFAREAVVVNGITPAPLITGNKGDRFQLNVIDQLTNHTMLKTSSIHWHGFFQQGTNWADGPAFVNQCPIASGHSFLYDFQVPDQAGTFWYHSHLSTQYCDGLRGPFVVYDPNDPHASLYDIDNDDTVITLADWYHVAAKLGPRFPFGSDSTLINGLGRTTGIAPSDLAVIKVTQGKRYRFRLVSLSCDPNHTFSIDNHTMTIIEADSINTQPLEVDSIQIFAAQRYSFVLDASQPVDNYWIRANPAFGNTGFAGGINSAILRYDGAPEIEPTSVQTTPTKPLNEVDLHPLSPMPVPGSPEPGGVDKPLNLVFNFNGTNFFINDHTFVPPSVPVLLQILSGAQAAQDLVPEGSVFVLPSNSSIEISFPATANAPGFPHPFHLHGHAFAVVRSAGSSVYNYDNPIFRDVVSTGQPGDNVTIRFETNNPGPWFLHCHIDFHLDAGFAVVMAEDTPDTKAANPVPQAWSDLCPIYDALDPSDL

SEQ ID NO: 25623 - protein, 748 aa, ASPERGILLUS NIDULANS FGSC A4
MDDSALPSNTSNGINGRTAHRRSSSGGDPFQHPDIYYGNPESVERIKNRRRAFSSSLKSFNRQDFHEMLGDRNTRRGSMDPTSGNPRKFLIDVDATLHSLLEREDSDRNMQITIEDVGPKVRTAASHGYNRFDVRGTYMLSNLLQELTIAKDYGRKQIVLDEERLSENPVSRLSRLIKNSFWNSLTRRIDGRNIEVAGRDPKDWTDDPRPRIYVPPGAPEQLEYYRRIAEEKPELRLDVQELAAEITPEYVRDLNEKPGLLALAMEEKYDEKTGKTDFAGVPFVVPGGRFNELYGWDSYMESLGLLASNRVDLAKAMVINFCFCIKHYGKILNANRSYYLTRSQPPFLTDMALRVYDRIQNEPGAMDFLRHAILAAIKEYYSVWMAEPRLDPVSGLSRYRSPGIGVPPETEASHFLHLLTPYAEKHGMEFKEFVQAYNYGKVKEPELDEYFMHDRAVRESGHDTSYRLERVCGNLATVDLNSLLYKYEVDIARVIRVYFKDKLEIPVEFRTPATKDIQSESSSVWDRRARRRKMRMDTYLWDEEKGMYFDYDTVKQERTNYESATTLWAMWAGLVTPRQASAMITKALPRFEEFGGIVSGTEESRGAVGLNRPTRQWDYPYGWAPQQMLAWTGFARYGYQEEAERLAYKWLYMITKAFVDFNGVVVEKYDVTRPIDPHRVDAEYGNQGVDFKGAPREGFGWVNASYVYGLEMLNAHQRRALGAVTPWETYSKAVSAQGSDTVLENRSE

SEQ ID NO: 25624 - protein, 443 aa, Pseudomonas putida
MRTLDVHPIIDNARFTPFHWMVMAWCGLLLIFDGYDLFIYGVVLPVIMKEWGLTPLQAGALGSYALFGMMFGALAFGSLADRIGRKKGIAICFALFSVATILNGFASSPSEFGIYRFIAGLGCGGLMPNAVALMNEYAPKRLRSTLVAIMFSGYSLGGMLSAGVGIFMLPRFGWESMFFAAAVPLLLLPVILYYLPESIGFLVRKGRTEEARALLKRLDPQCDVQADDVLQAADRKAGGGASVLELFRNGLAIRTLALWLAFFCCLLMVYALSSWLPKLMANAGYSLGSSLSFLLALNFGGMAGAILGGWLGDRYNLVKVKVAFFIAAALSISLLGVNSPMPVLYLLIFIAGATTIGTQILLYAGAAQMYGLSVRSTGLGWASGIGRNGAIVGPLLGGALMGINLPLQLNFIAFAIPGAIAALAMAVHLASGRRQARAIAAQA

SEQ ID NO: 25625 - protein, 762 aa, Pseudomonas fluorescens Pf-5
MALAHSLGFPRIGRDRELKKAQEAFWKGELDEAGLRAVGRDLRKTHWELQKNAGIDLLPVGDFAWYDQVLTHSLMFGVIPRRFRPQHGPATLQTLFGMARGVSDGCCGGAHAQEMTKWFDTNYHYLVPEFGADQQFQLGWEQLFEEVEEARALGHAVKPVLIGPLTYLWLGKAKGAEFDKLELLDRLLPLYGQIFQRLAAQGVEWVQIDEPILVLDLPQDWKNAFERAYNQIQREPLKKLLATYFGGLEENLGLAANLPVDGLHIDLVRAPEQYPTILDRLPAYKVLSLGLVNGRNVWRCDLEKALATLQHAHERLGERLWVAPSCSLLHSPVDLDREDQLDAELKSWLAFAVQKCQEVAVLAQAVNQPQARAVLKALEQSRAVQASRAASPRIHKPAVQARVAAITTKDSQRRSAFTQRIAKQRAGLDLPLFPTTTIGSFPQTASIRLARQSFKQGKLSVAEYTEAMHSEIRHAVLVQERLGLDVLVHGEAERNDMVEYFAEQLDGYVFTRFGWVQSYGSRCVKPALIFGDLSRPNAMTVEWIRYAQGLTDKVMKGMLTGPVTMLMWSFPREDVSREVQARQLALAIRDEVLDLEAAGIRIVQIDEAAFREGLPLRRAQWQHYLDWATEVFRLCASGVRDETQIHTHMCYSEFNDVIESIAAMDADVITIETSRSDMELLDAFKAFAYPNEIGPGVYDIHSPRVPDASEMANLLRKAAQRIPAERLWVNPDCGLKTRGWPETEAALVHMVTAARQLRKELA

SEQ ID NO: 25626 - protein, 466 aa, Ricinus communis
MPPQAGSKWYDDDGKLKRTGTVWTASAHIITAVIGSGVLSLAWAVAQLGWVAGPAVMFLFSLVTYYTSTLLSACYRTGDPVNGKRNYTYMDAVRSNLGGAKFKICGYVQYVNLIGVAIGYTIASSISMMAVKRSNCFHKSEAKNPCHMKCQSLHDCILEVVESSSSQIPDFDQTMGGLSIVAAIMSFTYSTIGLGLGIAEVTKNGKAMGSMTGISIGTVTETQKIWRSFQALGDIAFAYSYSLILIEIQDTIRSPPAESKTMRKATLISVSVTTLFYMLCGCFGYAAFGDMSPGNLLTGFGFYNPYWLLDIANVAIVVHLVGAYQVYCQPLFAFVEKAAVQRFPDSEFILKDIKIPIPGCKPYNLNLFRMVWRTVFVIFTTVISMLLPFFNDIVGLLGALGFWPLTVYFPVEMYIAQKKIPKWSTRWLCLQILSAACLIITIAAAAGSIAGVIVDLKTVKPFQTTY

SEQ ID NO: 25627 - protein, 147 aa, Geobacillus kaustophilus HTA426
MALIPYDPFRHLESIRRDMNRFFASDFPSLFTHMDEQHWMPRIDMHETANEYVVSCDLPGLERKEDVHIDVQNNMLTISGTIQRHHDVREEQMHRRERFFGRFQRSITLPADAATENIRATYKNGVLDIHIPKTTTGTKKRVDIEFH

SEQ ID NO: 25628 - protein, 438 aa, Debaryomyces hansenii CBS767
MVSSAINLMKTIIGAGLLSMPYTYSTDGSIIGTVIILLAALTSGYGLFLQGYVSKYAPLGHATFFNICSITYPSLSVVFDIAIAVQCFGCAISYLVLIGDLMPTIITSISFVSDEHYRTFWILVSTVICVPLSFMKNLSSLQYTSILGLVAIFYMALLVITHFLIDDIPDSSKGEIKLFPPNILGMFSTFSIAVFAFTGHQNMFSIINEAKDKSLKSITELINIAIIVSSVLFIVVGLAGYSTFGDKVNGNVILLYPNSWTTTLGRLCIVFMVVFSFPLMLHPARISVNNIYHTVYSKIMEKEDHGDTDDETTALLDDASQEIHESGSVLEDLSMKTTIVPFSRNVFLAITTILLITGYTFAITIKSFAFVLAIIGATGSTAISFILPGLFGYKLIGSEVDYPSKTDLLLKSCSLALVIWGFGVMFLCLYTTLFMDSY

SEQ ID NO: 25629 - protein, 396 aa, Arabidopsis thaliana
FPRVSLDSHVLMKLVSLFLSTLFVTIISSESQCRNFESIISFGDSIADTGNLLGLSDHNNLPMSAFPPYGETFFHHPTGRFSDGRLIIDFIAEFLGLPYVPPYFGSTNGNFEKGVNFAVASATALESSFLEERGYHCPHNISLGVQLNIFKESLPNLCGLPSDCRDMIGNGLILMGEIGANDYNFPFFQLRPLDEVKELVPLVINTISSAITELIGMGGRTFLVPGGFPLGCSVAFLTLHQTSNMEEYDPLTGCLKWLNKFGEYHSERLQEELNRLRKLNPHVNIIYADYYNASLRLGREPSKYGFINRHLSACCGVGGPYNFNLSRSCGSVGVEACSDPSKYVAWDGLHMTEAAHKSMADGLVKGPYAIPPFDWSCLSSMIKKKEVVGNTIFFDE

SEQ ID NO: 25630 - protein, 339 aa, Francisella tularensis subsp. novicida
MNKKILVTGGVGYIGSHTVVELLDRDYQVVVVDNLSNSKLSVIDRVKKITNKDFDFYQLDLLDKAKLTKVFQEHDIYAVIHFAGFKAVGESVEKPLEYYHNNIQGTLNLLELMQEYKVYKFVFSSSATVYGMNNKPPFTEDMPLSTTNPYGATKLMLEDILRDLQNANNNFNITCLRYFNPVGAHSSGMIGEDPQGIPNNLMPYVAQVGAGKLAKLSIFGGDYETIDGTGVRDYIHVVDLAIGHILALEKLSQDKPSWRAYNLGSGNGYSVLEIVKAYQKALGKEIPYQIVARRAGDIAASFADVAKAKRELGFETQKTIDDICQDMLKWQKYAKENNI

SEQ ID NO: 25631 - protein, 328 aa, Geobacillus kaustophilus HTA426
MILVCGGAGYIGSHAVYRLLEKGERVVVVDNLQTGHREAVHPDAVFCQGDIRDRDFLREVFRQHDIEAVIHFAANSLVGESMEEPLKYYDNNVYGTQVLLEVMREFGVKQIVFSSTAAVYGEPKQIPIVETDPTEPTNAYGETKLAMEKMMKWADRAYGIRSISLRYFNVAGAYGTTIGEDHNPETHLIPLILKVPLGQREEIYIFGDDYDTPDGTCIRDYIHVLDLVDAHWLALEKLRSGADSDVYNLGNGNGFSVKEVIEAARQVTGHPIPARVVARRPGDPARLVASSEKAKRELGWEPKYPSITDIVASAWEWHQARPNGYRGV

SEQ ID NO: 25632 - protein, 335 aa, Desulfitobacterium hafniense DCB-2
MTLLANTQTDESNSPVVQVAKDVGPAVVGVSNYQNVSNTYRYGFGLGSRNNTQSSELVEAGTGSGFIIDAQNGYIVTNYHVIENAQKITVSLSDGRNLEAKLIGSDSRTDLAVLQISDTSNLTEVKLGDSSKIEVGEFVVAIGNPGGNKFARSVTAGVISATNRTLQMSGESTLYNMLQTDAAINPGNSGGPLVNYSGEIIGINSAKYAESGFEGMGFAIPITEATSIITQLIENGAAKHPALLVSVSDQYLLYAKEQNLPLGAYIYEVNPEGPAGKAGIQEGDVITHVNDVKVENSTELIGEIYKHNVGDKVTLTFIRDGQTKAVQVTLGEITT

SEQ ID NO: 25633 - protein, 806 aa, Anabaena variabilis ATCC 29413
MSELMQAILDSEEKNDLRAFISELRLQDKNYLLRNDILNVYSEYCSKCQKSETSYKFSNLGKLIYYTQEIIQEDSNFCFIIRPNIAAQEVYRLTADLDVEPMTVQELLDLRDRLVNKFHPHEGDLLELDFGPFYDYTPTIRDPKNIGKGVQYLNRYLSSKLFQDSQQWLESLFNFLRLHNYNGIQLLINYQIQSQQQLSQQVKKALNFVSDRPHDEPYEQFRLQLQAMGFEPGWGNTASRVRDTLNILDELIDSPDPLTLEAFISRIPMIFRIVLVSAHGWFGQEGVLGRPDTGGQVVYVLDQAKNLEKQLQEDAILAGLEVLNVQPKVIILTRLIPNSDGTLCNQRLEKVHGTENAWILRVPLREFNPKMTQNWISRFEFWPYLETFAIDSERELLAEFHGRPDLIVGNYTDGNLVAFLLARRMKVTQCNIAHALEKSKYLFSNLYWQDLEEKYHFSLQFTADLIAMNAANFVISSTYQEIVGTSDSVGQYESYKCFTMPELYHVVNGIELFSPKFNVVPPGVNENSYFPYTHTQDRIESDRDRLEEMLFTLEDSSQIFGKLDDPNKRPIFSMARLDRIKNLTGLAECFGKSKELQEHCNLILVAGKLRIEESEDNEERDEIVKLYRIIDEYNLHGKIRWLGVRLSKNDSGEIYRVICDRQGIFVQPALFEAFGLTILESMISGLPTFATQFGGPLEIIQDQINGFYINPTHLEETATKILDFVTKCEHNPNYWKIISEKAIDRVYSTYTWKIHTTKLLTLARIYGFWNFASKEKREDLLRYLESLFYLIYKPRAQQLLEQHKYR

SEQ ID NO: 25634 - protein, 576 aa, Geobacter metallireducens GS-15
MMTKSGMACRSCFLVLLIALLTFSNLAIPTAGAEARVVTVGVYENSPKIFTDDSGKPSGIFIDIIEHIAKTEGWNLHYVHGTWVEGLDRLAKGEIDLMPDVAYTAERENLYSFHRIPVLTGWSQVYARKGSGIQSILNLNGKRVAALEQTIQFETFRRLASSFGLKITLIPVPDYKTEFDMLANGKIDAAVTNRFYGLRHARESGLEDTPIMFDPAPFFFAAPRDASRHLLDAIDRHLAELKKDPRSAYYASLNRWTSEDVQFKLPVWLQVSGLILGVVVIMTVTGFILWNRTLRRTVKLRTAQLEQELAERKMAEEELRKYRENLEDLVRERTAELAVAKERAEAADQLKSAFLATMSHELRTPLNSIIGFTGILLQGLGGPINDEQAKQLTMVRHSANHLLSLISDVLDISKIEAGQLKISPEPFQLRESVQKVTQSVAGLVDKKGLRLILEIADDVGSIVSDQRRVEQVLLNLLSNAVKFTEQGTISVRCSRESEWYVTSVADSGIGIKEEDLERLFKPFHQVDTGLSRKYEGTGLGLSICKRLVELMGGSITVESRQGEGSTFCFLLPANGG

SEQ ID NO: 25635 - protein, 775 aa, Bradyrhizobium japonicum USDA 110
MGWRVETSQQAEPRDGLVGAFLYWLGGFEIEDGLTADLSERELGRIRAKQIDAVTRLIPVTMAVTMLNVAIVLILFWGRGWNDFLAIWGLTLAATASLAVRSWRRSYRNPPQEASPRAARHMLRQAFFLAAIWGTLPLALFSHIEPTSQLILACLMVGMMSGGAFTLSTFPRAGLVYLATMTVGCAGALLLCGAGPYLVTAGFLLLFAFFMARNIVSQGNLFLGNLKAQLELERQTEIISLLLKDFQENASDWLWQTDAEGHLVDVPERFADVAQLPLPLLKGSHFADVLDMLCPEDKSAAYNIVGLMEHAEPLHEMNLKVVAGGEARLWSFTAKPAYDRDGQFLGYRGFGRDVTERWRAEKAEAESRAKSDFLAVMSHEIRTPMNGVLGLASMLLETRLDPEQREAVATIRESGDNLQRILNDILDLSKLEAGRFAFEAIDFAPHALVETVATVVRASAKSKGLTVKVELDPNLPPTLRGDVARIRQVLLNLASNAVKFTDEGEVTISATCQTRRDLLATVEWTVKDSGIGIAPEKLGLLFSDFAQADASISRRFGGTGLGLAISRRIIEQMGGTIGVTSTPGEGSTFRFTLVLPWSQAPASDQAAGRDEADELKAHIAELDRPLKVLVAEDDAVNRLVVSKMLGAFDVELRVVTDGVEAVAAASEGDYDVVLMDVRMPDMDGLAATRAIRAQGGRFEALPIIALTANAFPEDVKICREAGMSDFLAKPLRKPALVAALLRALNHVASDDAPLQPELMPVEVEWTEEERQITGA

SEQ ID NO: 25636 - protein, 577 aa, ASPERGILLUS NIDULANS FGSC A4
MLALQRSRSSSTEATPLLGDSPSPRIEHNVSTEDPEAAQDGVKQAEAITMVWSKKSLVAAYILMFLLYFVNAFQSSITSNLSAFVTSGFESHSLIPVIYIVSSVMSSATYMPLAKILNVWDRSIGFLIMVAFATLGLVLSATCTDIMTYSISQVFYTIGFAGMIFSIDVITADTSSLRDRGLAYAFTSSPYIITAFAGSAASERFYAYNWRWAYGSFAIILPIVALPMFGILQYNRYKAKQKGLLPKKEHHDRTIAQSIVFYAIELDLLGVFLLATGLVLFLLPFTIAGSTVDEWKSSYIITMLITGIGCLVTFILTERFVAPVPFLPWELLASRTVLGACLLGTSYQIAFYCWNEYYTSYLQVVYGTSISTAGYISSIFNVISGIWLLAVGFLIKKTSRFRWLLFWAVPLYMLGVTLMIYFRKPGWSVGYLILCQVLIAFGGSTMISCQQVAVSAASDHNNIASALAFLGVFGSMGGAVGSSISGAIWTNTLPGALKRLLPESAKADWRVIYESLEIQLSYPVGSPVRLAIASAYAETQTKMLIAGTGIMALSLIWMFLIKDIRLSKDAQSKGVVL

SEQ ID NO: 25637 - protein, 660 aa, Zea mays
MVEMAVVELRTLPLGFRFHPTDEELVTHYLKGKITGRINSESEVIPEIDVCKCEPWDLPDKSLIRSDDPEWFFFAPKDRKYPNGSRSNRATEAGYWKATGKDRIIKSKGDKRKQHTIGMKKTLVFHRGRAPKGERTGWIMHEYRTTEPEFESGEQGGYVLYRLFRKQEEKTERSSPEEVDRSGYSPTPSRSSPDNLEANEEANTPLNKESPESALHESPIELPKSVETNGGSMTRWLADRNGNLMANAPDVSHIPFHGHAADVAKVDPSVGASGHLVNPHNGNDDYNKFVSDFTPILPLENPFFTDIQQGAFGFDGIMNPLDPLDAFLNQTLVDPDEHSSTTSKVQYDSDIPTEFENHWNMKVEPQDDQCWWANIGFEPDEPNPLLPCDTTDQDILSVDSGADSFNELFNSMEETGITVRPQQLDSTVQPNHVFASQGNATRRLRLQVECREIITKDESEDEVSCVLTPDCLNDSVEESTAEKDVASDGDEAESTGIVIRSHHPAPRSSSERSFTQQGTAMQRLRLQSGLNKGQRPSTDDSSSCIIDEPGSQHKAEKAEIEEDASTNLTGSADDLPGNIHDDEQKNIPEYGAEMTSPEAKSVLRLRKTSEESNKDVKQESCLEPHVRAPMQKGGFQSYIIWLVLPVALLLLLCVGTYGWV

SEQ ID NO: 25638 - protein, 458 aa, Methanopyrus kandleri AV19
MADDWLERLRPILERLPEVKVPDRHVPFNEKLFKYTGIPLILYFILCEIPLYGLSPQAVDYFANLRAVLAGNFGSILTLGIGPIVTASILLQLLVGGDLIKLDLTNPEDRRLFQGLQKLLAIVLCFFEGVMMVFSGAAPPAEPSILLEILLILQLALGGILVIFLDEVVSKWGIGSGVGLFIVAGVSSQIIIGAFNPLPSPQQPGRPAGAVWAFLYSAMQGTPDWTLLAPVIGAIITFLIVLYVEGMRVEIPIAFAGIRGARGRFPVRLLYTSNIPVILASALFMNVRLWALAFQRMGVPILGKLDPRGQPISGLVYYLSPPNSIVKTLSDPLQALGYMMAMVIASVFFAVLWVELTGMGPREIARHLHRAGLHIPGFRRDIRVLEKRLQKYIYPVTVMGGAFVGFLAAGADLMGALGGGTGVLLTVSILYNMYEEIKQERLMEAHPVVRKFLEKTLR

SEQ ID NO: 25639 - protein, 404 aa, Rickettsia sp. California 2
KIRGKIFRLPILKASIGEDVIDISRVSSEADCFTYDPGFMSTASCQSTITYIDGDKGILRHRGYDIKDLAEKSDFLEVAYLLIYGELPSIEQYNNFTKQVAHHSLVNERLHYLFQTFCSSSHPMAIMLAAVGSLSAFYPDLLNFKEADYELTAIRMIAKIPTIAAMSYKYSIGQPFIYPDNSLDFTENFLHMMFATPCTKYKVNPIIKNALNKIFILHADHEQNASTSTVRIAGSSGANPFACVSTGIASLWGPAHGGANEAVINMLKEIGSSENIPKYIAKAKDKNDPFRLMGFGHRVYKNYDPRAAVLKETCKEVLKELGQLENNPLLQIAIELEAIALKDEYFIERKLYPNVDFYSGIIYKAMGIPSQMFTVLFAIARTVGWMAQWKEMHEDPEQKISRPR

SEQ ID NO: 25640 - protein, 381 aa, Prochlorococcus marinus subsp. pastoris str. CCMP1986
MNRVKIPKNRLRKLKTFTLGQKPYELQGVNPKKVKNNFIDLCSNDYFGLSRDNDVIKASYEISLSEGLGSGSSRFITGSRPIHKLLETQLAEWLNQEKVLLFPSGFQANIAAVQGLANRNSIVIADKFIHNSLLVGVKAAGSKLVRFEHNDLKDLENKILKFNSSQKSILIIVESLYSMEGSIAPLKEIAGICKKYNVELLVDEAHAIGILGTEGKGLSFDLSDEITMLTGTFGKSFGSGGAFIACNSKIGEHLIQTSGAFRYTTALSPALSAGALKSLQKIKANHEWGINLLISSKKWKKEILRNLSYPVKGESQILSIIVGQEEKAILLQKHLEKNGFLAIAIRPPTVPVNESRIRLTIRRDLNLDILDNFISVLKTFK

SEQ ID NO: 25641 - protein, 405 aa, Glycine max
  misc_feature (182)..(182): Xaa can be any naturally occurring amino acid
  unsure (1)..(405): unsure at all Xaa locations
MYMLESKGGAIACMFLSLFFLGTWPALLTMLERRGRLPQHTYLDYSITNFLAALLIAFTLGGIGKGTHDQPNFLVQLAQDNWPSVLFAMGGGLFLSLGNLSCQYAFAFVGLSVTEVITASITVVIGTTLNYFLDDKINKAEILFPGVGCFLIAVFLGSAVHSSNAADNKAKLNNFTGDYKNXTPSLKDGDIVKSKDLEGGSSSADNVEAGTAVFLMELEEKRAIKVFGKSTLIGLFLTFFAGLCFSMFSPAFNIATNDQWNTLRKGVPHLTVYTAFFYFSVSCFVIAMILNITFLYHPVLNLPKSSFKAYLADSDGRVWAMLAGLLCGFGNGLQFMGGQAAGYAAADAVQALPLVSTFWGVVLFGEYRKSSRRTYILLGSMLFMFIVAVAVLMASSGQRTSTAKE

SEQ ID NO: 25642 - protein, 450 aa, Oryza sativa (japonica cultivar-group)
MAQWDALVDAALARLASRNLLRATRPIALAPPPAPPETFAGPGPWDRAAVEIQLDRATLHQWLAEGGEATGQEEEVDEKLILFSGNDYMGLSSHPAIRKAAVKAAQEYGMGPRGSALICGYTTYHKLVEESLAELKKKEDCLLCPTGFSANMAVMTALGSVSSILSVGRKPAEGERIAVFSDALNHASIIDGIRLVERQQEVVAFVYKHCDMHHLDFLLSSCSIEKKVVVTDSLFSMDGDFAPLPELVKLRRKYGFLLVIDDAHGTLVCGENGGGAPELFGCENDIDISVGTLSKAAGCQGGFIVCSNRWKRLIQSRGRSFIFSTALPVPVVASVYAALHVSKKERWRRSVIWRHVQYFASLTKLDLTSPIISIVVGSEEAALRAGRHMLRSGFHVTPIRPPTVPQNSCRLRITLSASHSLDDIKRLVDALSPWLPDKHDEQTYVMASKL

SEQ ID NO: 25643 - protein, 433 aa, Prochlorococcus marinus subsp. pastoris str. CCMP1986
MKSPVLKNPNQDWHPNIWPPFTQIINSKPQLEVTHGKNALIYTKNPKQELIDGISSWWVTLHGHSNDYIADAIYHQAKTLEQVIFADFLHPQAQILSERLSGLTKLERLFFSDNGSTAVEVALKIAYQSWQNQGETRNQIIAFDGAYHGDTFGAMALGERNIFNENFDNLMFPVKRAPWPSTWINDEEVERKENNAIQILTKLLKKPTVAVILEPLVQGAGGMNMVRPEFIRRVSEVVKNNNSLLIADEVLTGFGRCGSLFAFQKANIIPDLISISKGLTGGFLPMGITLAKETIFQSFISDSPKKTFWHGHSFTANPLGCAAANASLDLLEKDPIKYLSFEEKHLSHLKKIKKLPFVKNIRVTGTIAAFDIEIGKNEGYLNNVGKRIKALSIKKGLFIRPLGNVIYLLPPLCITDRQLEKSYRIIFEILSDL

SEQ ID NO: 25644 - protein, 114 aa, Glycine max
  misc_feature (85)..(85): Xaa can be any naturally occurring amino acid
  unsure (1)..(114): unsure at all Xaa locations
PNLISPEHNPTPTWPFNRRVASLVANTIKLHRCAVGAGSGLGARMETAPAVKAPVLLHIHTKVVKNEKTNLDGHDEYIQKGSMDXSHVLPDAFKGIKQIGEIEWRSHGPGQGQN

SEQ ID NO: 25645 - protein, 124 aa, Kluyveromyces lactis NRRL Y-1140
MGISCCVYIEKPSGEDICLKHKHDRFVIYGCRNCRTHLSSSTQLMSKDYRGKTGDAYLMNEVLNVYEGEKQTRYMITGKYIVCDIYCSTCGALVGWKYLKSEKSNQQYKEGKYILELLPITQCR

SEQ ID NO: 25646 - protein, 643 aa, Bradyrhizobium japonicum USDA 110
MMDYAGRVAQADTYPKMLRLNAREHGHEIALREKDLGLWRVFTWNDYQTRVRDFALGLVELGLGHNDVIGIIGDNRPDWVAAEIATHAIGGLSLGLYRDVLDEEASYLLNYGEAQLVFAEDEEQVDKLLTLADRVPRLKHIIYSDPRGMRKYDDPRLLSAEKFAELGRARAAREPGLYDKLVDATKGEDVAILCTTSGTTSHPKLAMLAAGRVLGHCATYLAFDPKGPDDEYVSVLPLPWIMEQVYVLGKGLLCRMKINFVEEPDTMMNDLREIAPTFVLFAPRVWESIAADVRAKVMDATPFKQRLFDIGMKSGLAALADGKRSGFADAILFRALRDRLGFTRLRSAATGGAALGPDTFKFFQAMGVPLRTLYGQTELLGAYTLHPEGKVDPDTTGVPMADSVEIRIDNADVHGVGEIVVRHPNMFLGYYKNPEASVADVKDGWMLSGDAGYFNANRQLVVIDRIKDLAETSRGERFSPQFIENKLKFSPYIAEAVVLGAGRDALAAMICIRYSIISKWAEKNRLSFTTYSDLASRPEVYTLLQKEVETVNATLPPAQRISRFLLLYKELDADDGELTRTRKVRRSVINEKYAGIIDAIYRGDADIPVDAVIRFQDGTTQRVRTTLRVVDLGRPGQLAEAAE

SEQ ID NO: 25647 - protein, 449 aa, Pneumocystis carinii
MREVISIHVGQAGTQIGNACWELYCLEHGIEPDGRLSPEKTTKPLDDGFSTFFSETGSGKYVPRSIYVDLEPNVIDQVRTGTYRHLFHPEQLITGKEDAANNYARGHYTVGKELIDHVLDRIRRVADNCTGLQGFLVFHSFGGGTGSGFGALLLERLSVDYGKKSKLEFSVYPAPQVSTSVVEPYNSILTTHTTLEHSDCSFMVDNEAIYDICRRNLDIERPGYENLNRLIAQVVSSITASLRFDGSLNVDLNEFQTNLVPYPRIHFPLVTYAPLISAAKAHHEANSVAEITNACFEPNNQMVKCDPRNGKYMATCLLYRGDIVTKDVNCAVSSIRTKRTIQFVDWCPTGFKLGVCYQPPQYVPNGDLAKVNRAVCMLSNTTSIAEAWSRLDHKFDLMYSKRAFVHWYVGEGMEEGEFSEAREDLAALEKDYEEVGQDSIEGEIMEEEY

SEQ ID NO: 25648 - protein, 216 aa, Streptococcus pyogenes MGAS315
MIKGIIFDMDGVLFDTEPFYLRRREDFFKTKGIPIDHLNSKDFIGGNLQELWKELLGKNRDDAIVKAITTDYDAYKQAHKPPYQKLLITEVNSCLEQLKKQGIKLAVASNSKRQDVLLALETTQIKDYFEIILAREDVSRGKPYPDIYNKAVQKLGLQKKQLLVVEDSQKGIAAAKAANLTVFAITDYRYGIDQSQADHKIDHLGQLCVKIGCFGS

SEQ ID NO: 25649 - protein, 177 aa, Shewanella oneidensis MR-1
MMKFPLFILTSLMSTSVFAATCPSYLDVEVRKLHSEQSVNLCELTQGKPVLLINTASNCGYTSQFKALEALHKEYKDKGLVVIGFPSDDFFQEENDEKDTAKVCYINYGVTFTMLATSPVRGSDVNSVFKYLGDKAGAPKWNFYKYVVSGDGNTVMQFNSKVKPDSTELKQAIESVL

SEQ ID NO: 25650 - protein, 335 aa, Vibrio fischeri ES114
MNILVTGGMGYIGSHTCVQMIEAGLTPIILDNRYNSKEVVLDRIEALVGVKPKFYQGDIRDPKILETIFAENQIDSVIHFAGLKAVGESVEKPIMYYDNNVSGTLVLVEAMRKAGVNSIVFSSSATVYGDPASTPIREDFPTSATNPYGRSKLMVEECLTDIQKAHPEMSVTLLRYFNPVGSHKSGTMGEDPQGIPNNLMPFISQVAVGRREFLSVFGNDYPTVDGTGVRDYIHVVDLADGHLAALKYKGQEAGLHIYNLGTGNGNSVLQMVTAFEKASGAKVPYKIVDRRPGDIAECWADPAKAREELKWEAKLSLDDMTADTWRWQSNNPEGY

SEQ ID NO: 25651 - protein, 462 aa, Cryptococcus neoformans var. neoformans B-3501A
MHPQNSSTPSTNSPSTFSLPKSSISRKKPPGLDISKSILRPTRTAPVLPANGSSPSNFVSEADRLRDDIANLQLSSRSTGSNHSPEALDSPRAFQSDSSVASGLAKKEKSRDGKERGDKEKRKKKHKDKDGEDLVKDEDLEILHDLGAGNGGTVTKVWNKKRKCVMARKLILVDAKPSIRKQILRELQIMNDCDSPYIVGYYGCFPVDVHVGIVMEFMDAGSLDYIYRHHGAIDIDIVGKVAQAVLEGLIYLYDKHRIIHRDIKPSNVLANTRGEIKICDFGVSGELINSIANTFVGTSTYMSPERIQGAPYTIKSDIWSLGISLIELAVGRFPFSDSPDSEELSPSVSDFDPDPTLPRSVRRPKIESNSRHNGVSQSGGPHAMSILDLLQHIVNEPAPRLASRRRRFPQEAVAFVEGCLIKDPDQRRSPKELLSSSWITSLKTTKEDLQTWARSMVGPREE

SEQ ID NO: 25652 - protein, 317 aa, Mycobacterium tuberculosis CDC1551
MGSAGVPAADAGGRDAASEQIARWTQTCTVVLVCGHGPAKWAFRSWCTSRSCDTLPVALRYRLQSNPLVGKLTTKYFLPLGTRQVGDHVVFFNFGYEEDPPMALPLSESDEPNRYCIQLYHQTASQVDLTGKEVLEVSCGAGGGASYIARNLGPASYTGLDLNPASIDLCRAKHRLPGLQFVQGDAQNLPFPDESFDAVVNVEASHQYPDFRGFLAEVARVLRPGGHFLYTDSRRNPVVAEWEAALADAPLRTISQRDIGAQAKRGLDANTARSQEAIGRRAPVLLAGLTRCAVRVLDWDLRRGGGFSYRIYLFAKD

SEQ ID NO: 25653 - protein, 95 aa, Brassica napus
  misc_feature (9)..(9): Xaa can be any naturally occurring amino acid
  unsure (1)..(95): unsure at all Xaa locations
QDGLQGMTXALVTGGARGIWFAIVEELAAFGAKVHVCDISETLLNQSLNEWQKKGFQVSGSVCDVSSRPERETLMQTVSSLFGGKLNVLVNKCRG

SEQ ID NO: 25654 - protein, 448 aa, Oryza sativa
MGGGVTERLPEGSSEPLLPTKREGGGGGGEFAGAVFNLSTTIVGAGIMALPATMKVLGLAPGLVAILLAALLTDASIELLVRSSRAAGAPSYGAVMGDAFGWWGRRLLQVCVVVNNIGVMIVYMIIIGDVLSGTSSGGEHHYGVLEGWFGPQWWNGRFFVLLVTTLVVFTPLACLKRVDSLSYTSAISVALAVVFVIITAGIAIVKLIKGQIPMPKLFPDVPDLASIWELFTAVPVLVTAYVCHYNVHPIHNELKDPSQIKPIVHTSLVLCSTVYITTSFFGYLLFGESTLSDVLANFDSNLGIPYSQMLNDAVRVSYAVHLMLVFPMIFHALRLNLDGLLFSSSSPLSSDNRRFSVMTAVLLLVIFLSANFIPSIWDAFQFTGATAAVCIAFIFPAAITLRDPHSIAKKWDKILSIFMIVLAIVSNVVAVYSDAYSMFHRKSSPSIA

SEQ ID NO: 25655 - protein, 149 aa, Methanopyrus kandleri AV19
MNLRPQRRMAAEILKCGVHRIWIDPERLEEVARAQTREDIRRLIKEGAIRKKPIKGQSRVRARKRHEQRKKGRQRGPGRRKGAKGARMPKKRAWIQRIRPIRRKLRELRDSGKIDRSTYRKLYMMAKGGYFRDTSHLLAYIEENDLWKK

SEQ ID NO: 25656 - protein, 474 aa, Desulfotalea psychrophila LSv54
MLRCYPRTEKEKRMPLHNKRKNNIMDDIYASSDLSIVLPKYKMPQKELDPRHAYQMVHDELMLDGNARQNLATFCQTWDDPEVHRLMDECIDKNMIDKDEYPQTAEIESRCVHILADLWNAPDSANSLGCSTTGSSEAAMLGGLALKKRWSEKRKAAGKGTDRPNIVCGPVQICWHKFARYWDVELREVPLEDQLYMTAEEAVKRCDENTIGVIPTLGVTFTCVYEPVEEICRALDQLQKETGLDIPVHVDGASGGFLAPFVDPDLKWDFRLKRVKSINASGHKFGLAPLGVGWVLWRDKEELPEDLIFWVNYLGGNMPTFALNFSRPGGQIIAQYYNFLRLGHEGYRKIHQACYKTAQYLSSEVKKLGPFEIIYDGRGGIPAMSFSLQEGVAPGFNLFDLSDRIRSRGWQIAAYSMPANREDLVVMRILVRHGFSRDLADLLLKDLQHCLEYFKKNPVIHQSSEEFSGSFKHS

SEQ ID NO: 25657 - protein, 207 aa, GIBBERELLA ZEAE PH-1
MATNITWHPSLSRKEREETRGQRGLTIWLTGLSASGKSTVATALEQHLLHLGVAAYRLDGDNVRFGLNKDLGFSEVDRNENIRRISEVAKLFADSSTIAITSFISPYRADRQVARQLHEQATQGGDAPIPFVEVYVDVPLEVAEQRDPKGLYKKARAGEIKDFTGISAPYEEPEKAEITIKTHENSVEECVAQIVEWLNEKGYLNKK

SEQ ID NO: 25658 - protein, 466 aa, Caulobacter crescentus CB15
MADYDFDLFVIGAGSGGVRAARLAALSGAKVAVAEEYRVGGTCVVRGCVPKKFMVYASEVTSQLKTAKGYGWTIEDARFDWKTFLHEKDVEIARLSGIYVTNLQKAGAHLLHGRAQIVDAHTVEVLPKDGSDDAGTYTARKILVATGGRPVRPVFPGAELGITSDEAFHLPTLPKSVLVVGGGYIAVEFAGIYAGLGVQTTLLYRGANILRGFDDDVRMHLADELEKRGIKVVLGCSHKSIEKLDDGRLLSTLSNDLTFETEAVMFATGREPYVQGLGLEKAGVKLNDKGAIAVDKYSKTNVDSIWAVGDVTDRINLTPVAIREGAAFAQTEFYGNPTTFDHDLVASAVFSQPPVGAVGMSEAEARQAFGKVDIYRSIFRPMKVTFYGGQERCLIKLVVKQDDERILGVHVVGPDSPEIIQMAAIAVKMGVTKPQWDSTCAVHPTLAEELVTMREKYVPAEVGGAG

SEQ ID NO: 25659 - protein, 480 aa, Campylobacter jejuni RM1221
MLKKTKIVATVGPASEKEEILRQMIINGVNVFRLNFSHGTHEYHKKNLDTIRRVAKELHTRIGILQDISGPKIRTGELKEPFELKKGDRLDFYRETILGEKIAQNHYKISINQKSILDMLKIDEYIYLYDGSIRAKVENIDDQKIETIIENDGFLNSNKGINFPNTKINIDVITQKDKNDLLWGIKNEVDFLAISFVQNAHDIDEVREILAQNNAKISIFAKIEKFDAVENIDEIIKSSDGIMVARGDLGIEVPYYKVPNIQKEIIQKANNASKPVITATQMLFSLAKSKTATRAEISDVANAVLDGTDAVMLSEESAVGTDPANAVDIMCQTIIETEKRYPYNKFNDFNDLDNTDKIMRSSAHLATDLNADAIFSLTSSGKSAIKIARYRPNIEIIAVGHSEKTLNSLSIVWGVNPAILVNKSNELTELLKDSVRSSVEKGFMDEDKCYLLTAGFPTGVEGTSNLIRILNKEQITYYLQ

SEQ ID NO: 25660 - protein, 291 aa, Boletus edulis
LENPEINITAVNDPFIDLDYMVYMFKYDSVHGRFEGEVSTKDGKLVINGKAITVFAERDPANIPWGTVGAQYVVESTGVFTTIEKASAHLKGGAKKVIISAPSSDAPMFVCGVNLDAYDPKHTVISNASCTTNCLAPLAKVVNDKFGIVEGLMTTVHATTATQKTVDGPSPKDWRGGRAVNNNIIPSSTGAAKAVGKVIPVLNGKLTGLAFRVPTLDVSVVDLVVRLAKPTSYEEIKTAFKEASESSELKGIVAYTEDAVVSTDFLGHHASSIFDATGGIMLNDSFVKLIA

SEQ ID NO: 25661 - protein, 442 aa, Brucella suis 1330
MLTKTNAPSLDNFWMPFTANRQFKAAPRLLASASGMYYTDVDGNQVLDGTAGLWCCNAGHGRKRITEAVERQISTMDFAPIFQMGHNVAFDFAEKLAAIAPGGAEAKLDRVFFTNSGSESVDTALKIAIAYQRAIGQGTRTMVLGREKGYHGVGFGGISVGGLVNNRRVFPQIPADHLRHTLDIEKNAFSKGLPANGIELANDLERLVQLHGAEKIAAVIVEPMSGSAGVILPPKGYLERIRATADKYGILLIFDEVITGFGRLGTPFAVDYFGVVPDLVTTAKGLTNGAIPMGAVFAARKVYDGLMTGPENAIELFHGYTYSGHPVASAAGLATLEIYAEEGLLTRGAGLADYWQEALHSLKGAPNVIDIRNLGLVGAVELASRKDAPGARAYDIFVECFKKGLLIRVTGDVIALSPPLIIEKEQIDTIISVLGDAIKRAA

SEQ ID NO: 25662 - protein, 209 aa, Coffea arabica
DQYEKVEKIGEGTYGVVYKARDRLTNEMIALKKIRLEQEDEGVPSTAIREISLLKEMQHNNIVRLQDVVHSEKRIYLVFEYLDLDLKKHMDSCPELAKDPCLIKTFLYQILHGIAYCHSHRVLHRDLKPQNLLIDRRTNALKLADFGLARAFGIPVRTFTHEVVTLWYRAPEILLGSRHYSTPVDIWSVGCIFAEMVNQRPLFPVDSEI

SEQ ID NO: 25663 - protein, 473 aa, Bradyrhizobium japonicum USDA 110
MADTSFDIIIIGSGPGGYVTAIRAAQLGFKVAIVEKSYLGGICLNWGCIPTKALLRSAEIYHYMQHAKDYGLSAEKVSFDPKAVVQRSRGVSKRLNDGVGFLMKKNKVTVIWGAASIDAPGKVTVKKSDVEAPKGALGEGTYQAKHIIVATGARPRVLPGLEPDKKLIWTYFEAMVPERMPKSLLVVGSGAIGIEFASFFHTMGSDVTVVEVLPQILPVEDAEIAGLARKRFEKQGIKILSSTKVTKLEKKADSVVATIDDGKGKPVTTEFERVISAVGVVGNIESLGLEKLGVKTDRGCIVIDGYGKTNVPGIYAIGDVAGPPMLAHKAEHEGVICVEAIKGLHPHPMDKNLIPGCTYCQPQVASVGLTEAKAKENGREIRVGRFPFVGNGKAIALGEDQGLVKVIFDKKTGQLLGAHMVGAEVTELIQGYVVAMNLETTEEELMHTVFPHPTLSEMMKEAVLDAYGRVLNI

SEQ ID NO: 25664 - protein, 459 aa, Ralstonia metallidurans CH34
MSHAPHSATSTLDVQSLIDSQRFSAYQWLILVLCFLIVAVDGFDTAAMGYVAPALVQDWGIEKSSLGPVMSAALFGLAFGAIFAGPMADRVGRKKVLVLSVFFFGACSLATAFAPTIRWLTVLRFLTGLGLGAAMPNAVTLMSEYAPARRRAVLVNTMFCGFPLGSAAGGFFAAAIIPQFGWHSVLVFGGVVPLVLAVVLVTTLPESVRYMVVRQYPADQIRQVLARVTGARVDGAGVFTISEAAPASSSAIGTVLAPRYRLGSTMLWLTYFMGLVIFYLLTSWMPTLMKDAGFSLQRASFLTALFPLGGGIGTIAAGWFMDRFNPNKVIAMTYALTGVLIYAVGQVASGDQVVLGVLIFLAGTAMNGAQSSMPSLAAAFYPTQGRATGVAWMLGIGRFGGITGALLGAELLRLHLGFDVIFTLLAIPAFAATAALVAKHVGARGAAPVDTGGAMVSGH

SEQ ID NO: 25665 - protein, 532 aa, Solanum tuberosum
MGVCLSKSKPAESKSDGHYRSGGSDGGGVGGKGHNHGTHQAQIQYTKSPGPETQLPLRPQASPKPVFKQETILGKAFEDVKAHYTLGKELGRGQYGVTFLCTEIATGHQYACKSISKKKLVTKSDKADMRREIQIMQHLSGQPNIVEFKGAYEDKNSVCLVMELCAGGELFDRIIAKGHYTERAAASMCRAIVNVVHVCHFMGVMHRDLKPENFLLSDKSENAALKATDFGLSVFIEEGKVYKDIVGSAYYVAPEVLRKSYGKEIDVWSAGVMLYILLSGVPPFWAETERGIFDAILKEDIDFESQPWPSITSSAKDLVRKMLNKDPKQRISAAQVLEHPWLKVGGVASDKPLDNAVLSRMKQFRAMNKLKRLALKVIAENLSADEIQGLKSMFHNIDTDNSGTITYEELKSGLARLGSKLTEAEVKQLMEAADVDGNGSIDYIEFITATMHKHRLERDENLYKAFQYFDKDGSGFITRDELETSMEEHGIGDPASIREIIAEVDADNDGRINYEEFCTMMRSGAKQPGKLF

SEQ ID NO: 25666 - protein, 667 aa, Brassica napus
MTQQLEKFIFQVEEGREGSDGRPSVGPVYRSVFAKDGFPEPIEGMDSCWDVFRMSVEKYPNNPMLGRREIVDGKPGKYVWQTYQEVYDIVIKLGNSLRSCGVEEQAKCGIYGANSPEWIISMEACNAHGLYCVPLYDTLGAGAVEFIITHSEVSIVFVEEKKISELFKTCPKATEYMKTVVSFGGVTREQKEAAETFGLVIYAWDEFLKLGEGKQFDLPIKKKSDICTIMYTSGTTGDPKGVMISNESIVTLIAGVIRLLKSANEALTVKDVYLSYLPLAHIFDRVIEECFIQHGAAIGFWRGDVKLLIEDLGELKPTIFCAVPRVLDRVYSGLQQKLAAGGFFKKFMFDSAFSFKYGHMKKGQSHVEASPLCDKLVFSKVKQGLGGNVRIILSGAAPLASHVESFLRVVACCHVLQGYGLTESCAGTFVSLPDRLDMLGTVGPPVPNVDIRLESVPEMEYDALASTPRGEICIRGKTLFSGYYKREDLSKEVLIDGWLHTGDVGEWQPNGSMKIIDRKKNIFKLSQGEYVAVENLENIYGEVQAVDSVWVYGNSFESFLIAVANPNQHILEKWAAENGVSGDYNALCQNAKAKEFILGELVKMGKEKKMKGFEIIKAVHLDPVPFDMERDLLTPTYKKKRPQLLKHYQCVIDEMYKTTNESLASRK

SEQ ID NO: 25667 - protein, 121 aa, Oryza sativa
  misc_feature (64)..(64): Xaa can be any naturally occurring amino acid
  unsure (1)..(121): unsure at all Xaa locations
TLFIFLVCCQIPIYGVQSAKSSDPPYWMRAILASNQGTTMELAISPTVTPGLIMQSIARSRIIXGDYNAKERRALFSGAQKLIGLPITTCEAITYSCSVMLGDLGSIGAANAVMIIDQVFC

SEQ ID NO: 25668 - protein, 225 aa, Arabidopsis thaliana
  misc_feature (136)..(136): Xaa can be any naturally occurring amino acid
  unsure (1)..(225): unsure at all Xaa locations
AIKIIEFGFISCCVAFILTRRIFASYSFSSSKLLLFTVHASIAVILATLSVLVLSCPVCPLTSKSSRKQMDVIAFSSTYMIYNLICCLFVQVLIIDNTIHHFVSVLAFIDVLAYQKSGSVIVATLWVAEISSPFFXHLREILKEIGYKDTKLNLAADVCFATIFTLARIVCGPFLVYVSLSADNPIFIKAMGSGLQLVSIFWFYKIFGMMRYKLFKKPKSNKKST

SEQ ID NO: 25669 - protein, 231 aa, Leptospira interrogans serovar Copenhageni str. Fiocruz L1-130
MSRKNISLTESLEEYIFRNSVREPDSFLKLRKETGTLAQANMQISPEEGQFLNILTKISGAKRIIEIGTFTGYSSLCFASALPEDGKILCCDVSEEWTNVARKYWKENGLENKIFLKLGSALETLQVLIDSKSAPTWASDFAFGPSSIDLFFLDADKENYQNYYPLILKLLKPGGLLIADNVLWGGSVADLSHQEPSTVGIRKFNELVYNDSLVDVSLVPIADGVSLVRKR

SEQ ID NO: 25670 - protein, 418 aa, Ajellomyces capsulatus
MREVVSLNVGQAGGQIANSCWELYCLEHGIQPDGYLTEERKAADPDQGFNTFFSETGQGKYVPRTIYCDLEPNVVDEVRTGPYRALFHPEQMITGKEDASNNYARGHYTVGKEMIDQCLDKVRRVADNCSGLQGFLVFHSFGGGQGSGFGALLMERLSVDYGKKTKLEFCVYPAPQNATSVVEPYNSILTTHTTLEHSDVQFMVDNEAIYDICRRNLGIERPSYENSNRLMAQGQSPITAIMLLFDCALNVDLNEFQTNLVPYPRIHFPLASYSPVVSAGKASHESNSVMEVTIVCFEPNNQMVKCDPRNGKYMATCLLYRGDVVPKDVHAVAATLKTKRTVQFVDLQPTGFKIGICYQPPTMVPNGDLAKVNRACMLSNTTAISEAWTALSHKFDLIYSKRAFVHWYVGEGMEEGEF

SEQ ID NO: 25671 - protein, 96 aa, Vibrio fischeri ES114
MNIRPLHDRVIVERQEVESKSAGGIVLTGSAAEKSTRGTVLAVGKGRILENGTVQPLDVKVGDSVIFAEGYGTKSEKIDGKEVLIMSENDIMAIVE

SEQ ID NO: 25672 - protein, 394 aa, Schizosaccharomyces pombe
NFPAQDRHERAPLLGSEYDHSMARQLSLLNVVGMTKSVLMSSYFNLMLVFVPIGLIAGWFEWNAKSVFILNMLAIIPLASLLSFATEQLSIISGPTLGALLNASFGNAIELIVGVLALKRGELRIVQSSLLGSILSNLLLVFGMCLVTTGIRREITTFNITVAQTMIAMLALSTATILIPATFHYSLPDNANSENALLHVSRGTAVIVLIVYVLLLVFQLKTHKHVCHDPSEVEEETEPRILGLRSSIAMLAIVTVFVSLCADYLVGSIDQLVEEVNISKTFVGLVILPVVGNAAEHVTAIVVSYRGQMDLALGVAIGSSIQIALFLAPFLVIVGWIISQPLTLYFESLETVILFVSVFLVNYLIQDGATHWLEGVQLLALYAIVVLAFFYYPQ

SEQ ID NO: 25673 - protein, 548 aa, Vibrio fischeri ES114
MAAKDVKFGNDARIKMLEGVNVLADAVKVTLGPKGRNVVLDKSFGAPTITKDGVSVAREIELEDKFQNMGAQMVKEVASQANDAAGDGTTTATVLAQAIITEGLKAVAAGMNPMDLKRGIDKAVVAAVEELKALSVPCADTKAIAQVGTISANSDSTVGNLIAEAMDKVGRDGVITVEEGQALQDELDVVEGMQFDRGYLSPYFVNNQEAGSVDLESPFILLVDKKVSNIRELLPTLEAVAKASRPLLIIAEDVEGEALATLVVNNMRGIVKVAAVKAPGFGDRRKAMLQDIAVLTAGSVISEEIGLELEKVVLEDLGQAKRVTITKETTTIIDGSGEETIIQGRVSQIRQQIEDATSDYDKEKLQERVAKLAGGVAVIKVGAATEVEMKEKKDRVEDALHATRAAVEEGVVAGGGVALIRVASKVAGLVGDNEEQNVGIRVALRAMEAPIRQITKNAGEEDSVVANNVKAGEGSYGYNAATGEYGDMIEMGILDPTKVTRSALQFAASVAGLMITTEAMVTDKPQDSGSAMPDMGGMGGMGGMGGMM

SEQ ID NO: 25674 - protein, 391 aa, Exiguobacterium sp. 255-15
MKQTVEEMVEQLFPVMVERRRYLHRHPELSFHEVDTPQFIADRLTELGIEIRTGVGGRGVVGTIRGGKPGKTVALRADFDALPIQDEKTVDYRSTVPGVMHACGHDGHTATLLAVAEILVRQKEQLAGNVVLIHQHAEEVVPGGARDMVADGCLDGVDVIFGTHLWSTTKLGTIGYRIGPVMAAADKFELTLFGRGGHGAKPHETIDAVVLGATVVKELQSIVSRRLDPLQQAVLTIGTLHAGNTFNVIADSAELTGTIRTFDPEVAEQIVHEMERTIKGVCDAAGATYSFTYERGYPAVVNHPQETNLLRTVASDIMGADHVFEIAPTMGGEDFAYYLQQVPGTFFFTGAGDETFYPHHHPKFDFEEQAMQHAARILIEVTLRYLEESSN

SEQ ID NO: 25675 - protein, 442 aa, Oryza sativa (japonica cultivar-group)
MQAHAHTLGLRISPPPPAPPRRRTDPRKRVVITGMGLVSVFGNEVDAFYERLLAGESGVGAIDRFDAGGFPTRFAGQIRGFSSEGYIDGKNDRRLDDCLRYCIVSGKKALENAGLGKGSDGHTKLDKVRAGVLVGTGMGGLTVFSDGVQNLIEKGYKKISPFFIPYAITNMGSALLAMDAGFMGPNYSISTACATSNYCFYAAANHIRRGEADVIVAGGTEAAIIPIGLGGFVACRALSQRNDDPETASRPWDKERDGFVMGEGAGVLVMESLEHAMKRDAPIIAEYLGGAVNCDAYHMTDPRSDGLGVSSCITQSLEDAGVAPEEVNYINAHATSTLAGDLAEVRAIKQVFKNPSDIKINSTKSMIGHCLGAAGGLEAIAVVKAITTGWVHPTINQFNPEPEVDFDTVANEKQQHEVNVAISNSFGFGGHNSVVVFAPFKP

SEQ ID NO: 25676 - protein, 592 aa, Aspergillus fumigatus
MAVGFLLLTAFVVNILTTSAATLHYDWNITWVTANPDGQFERPVIGINGQWPPPVLSFTRGDRIIAKVHNALGNETTSVHWHGFFQNGTNHMDGPPSVTQCDIAPGSTFVYNFTVEQSGTYWYHSHTKGQYPDGLRQALVVTDPKNPYIGQYDEERVISLSDWYHDQMPTLLKSFISISNPTGAEPVPKAALMNDTQNLTVAVEPGKTYLFHLVNVGAFASQYFWIEDHTMKIVEVDGVWTHASEANMIYIASAQRYSVLVTMKNETSQNYAMVGSMDTDLFDTLPESLNYNVTGWLMYNDQADKPTPALVSAFEPYDDFNLVPVDGMALHKEADYTVTLDVTMDNLGDGANYAFFNGITYVMPKVPTLYSVLTTGSAATDPAVYGYNTHPIVLKRGDIVDIVLNNDDAGKHPFHLHGHTFQVIARSEENAGHYDPSNHTTFPSIPMRRDTVIVRPQGNFVLRFQADNPGVWLFHCHIEWHMDSGLAATFIEAPLDLQKTLKIPEDHYQVCEASGTLTAGNAAGNTKDLFDLTGQNVSPAPLPAGFTAKGIVALVFSCVAAILGLLSIAWYGMAPITAPRAGSTPSNDSDEN

SEQ ID NO: 25677 - protein, 339 aa, Francisella tularensis subsp. holarctica
MNKKILVTGGVGYIGSHTVVELLDRDYQVVVVDNLSNSKVSVIDRVKKITNKDFDFYQLDLLGKAKLTKVFQEHDIYAVIHFAGFKAVGESVEKPLEYYHNNIQGTLNLLELMQEYKVYNFVFSSSATVYGMNNKPPFTEDMPLSTTNPYGATKLMLEDILRDLQNANNNFNITCLRYFNPVGAHSSGMIGEDPQGIPNNLMPYVAQVGAGKLAKLSIFGGDYETIDGTGVRDYIHVVDLAIGHILALEKLSQDKPSWRAYNLGSGNGYSVLEIVKAYQKALGKEIPYQIVARRTGDIAASFADVAKAKRELGFETQKTIDDICDDMLKWQKYAKENNI

SEQ ID NO: 25678 - protein, 359 aa, Hordeum vulgare subsp. vulgare
MIEGAGSIVDAHTVEVTQPDGSKQRHTTKHILIATGSRATLVNIPGKELAITSDEALSLEELPKRAVILGGGYIAVEFASIWKGLGAQVDLFYRKELPLRGFDDEMRTVVASNLEGRGIRLHPGTNLTELSKTADGIKVVTDKGDEFIADVVLFATGRAPNSNRLNLEAVGVEVDQIGAIKVDEYSRTSVPNIWAVGDVTNRINLTPVALMEATCFAKTVFGGQTVKPDYKDVPCAVFCIPPLSVVGLSEQEALAEAKNDLLVYTSSFNPMKNSISKRQEKSIMKLVVDAETDKVLGAAMCGPDAAEIMQGIAVALKAGATKATFDSTVGIHPSAAEEFVTMRTLTRRVSPASKPKTNL

SEQ ID NO: 25679 - protein, 963 aa, Arabidopsis thaliana
MAARNLEKMASIDAQLRLLAPGKVSEDDKLIEYDALLLDRFLDILQDLHGEDVREFVQECYEVAADYDGNRNTEKLEELGNMLTSLDPGDSIVVTKSFSNMLSLANLAEEVQIAYRRRIKKLKKGDFADEASATTESDIEETLKRLLQLNKTPEEVFDALKNQTVDLVLTAHPTQSVRRSLLQKFGRIRDCLTQLYAKDITPDDKQELDEALQREIQAAFRTDEIRRTPPTPQDEMRAGMSYFHETIWKGVPKFLRRVDTALKNIGINERVPYNAPLIQFSSWMGGDRDGNPRVTPEVTRDVCLLARMMAANLYFSQIEDLMFEMSMWRCNEELRVRAERQRCAKRDAKHYIEFWKQIPANEPYRAILGDVRDKLYNTRERARQLLSSGVSDVPEDAVFTSVDQFLEPLELCYRSLCDCGDRPIADGSLLDFLRQVSTFGLALVKLDIRQESERHSDVLDAITTHLGIGSYKEWSEDKRQEWLLSELSGKRPLFGPDLPKTEEVADVLDTFKVISELPSDSFGAYIISMATAPSDVLAVELLQRECGITDPLRVVPLFEKLADLESAPAAVARLFSIEWYRNRINGKQEVMIGYSDSGKDAGRLSAAWQLYKTQEELVKVAKEYGVKLTMFHGRGGTVGRGGGPTHLAILSQPPDTIHGQLRVTVQGEVIEQSFGEEHLCFRTLQRFTAATLEHGMHPPVSPKPEWRVLMDEMAIIATEEYRSVVFKEPRFVEYFRLATPELEYGRMNIGSRPSKRKPSGGIESLRAIPWIFAWTQTRFHLPVWLGFGGAFKRVIQKDSKNLNMLKEMYNQWPFFRVTIDLVEMVFAKGDPGIAALYDRLLVSEELQPFGEQLRVNYQETRRLLLQVAGHKDILEGDPYLRQRLQLRDPYITTLNVCQAYTLKQIRDPSFHVKVRPHLSKDYMESSPAAELVKLNPKSEYAPGLEDTVILTMKGIAAGMQNTG

SEQ ID NO: 25680 - protein, 254 aa, Hordeum vulgare subsp. vulgare
MRTVVASNLEGRGIRLHPGTNLTELSKTADGIKVVTDKGDEFIADVVLFATGRAPNSNRLNLEAVGVEVDQIGAIKVDEYSRTSVPNIWAVGDVTNRINLTPVALMEATCFAKTVFGGQTVKPDYKDVPCAVFCIPPLSVVGLSEQEALAEAKNDLLVYTSSFNPMKNSISKRQEKSIMKLVVDAETDKVLGAAMCGPDAAEIMQGIAVALKAGATKATFDSTVGIHPSAAEEFVTMRTLTRRVSPASKPKTNL

SEQ ID NO: 25681 - protein, 215 aa, Oryza sativa
  misc_feature (38)..(38): Xaa can be any naturally occurring amino acid
  misc_feature (60)..(60): Xaa can be any naturally occurring amino acid
  misc_feature (122)..(122): Xaa can be any naturally occurring amino acid
  misc_feature (191)..(191): Xaa can be any naturally occurring amino acid
  unsure (1)..(215): unsure at all Xaa locations
PRVREESDAVVIGGGPGGDVAAIKAAQLGLKTTCLEKXRGTLGGTCLNVGCIRSKALLHXSTDMYHEAKAGLAHHGVKFSSPERDWPAMMSQKDTAHAGLTKGIEGRFKKNKDEFSKGFGKXVSHSQVAVDLLDGGTTTVNGKNIIIATGSDVRSLPVVTTDDKKIASSTGALALSEIPKKIGAIGAGYMXVRDGVLYWNKLGSEVTVVEHAADI

SEQ ID NO: 25682 - protein, 784 aa, Arabidopsis thaliana
MGNCCSDVASGAGATAGVGGSGSSAALGATNDALDYYLKSKGFNGLFSQIELSFSASNLRDRDVLSKSDPMVVVYQKEKDATLSEVFRSEVVLNSLAPKWIKKFIVAYHFETVQTLVFRVYDVDTKFQNSREEMLKLDEQQFLGEATCALSEAQPHHGKLIIHAEESLASKISTEIVFRCSNLESKDLFSKSDPFLVVSKIVEHGTPIPVSKTEVRKNDLNPIWKPVFLSVQQVGSKDSPVIIECSDFNSNGKHSLIGKVQKSLSDLEKLHLAGQGINFSLPTGAGQNKSQLFVDKFTETVHHTFLEYLASGFELNFMVAIDFTASNGNPRLPDSLHYIDPSGRLNAYQRAIMDVGEVLQFYDSDKRFPAWGFGARPIDAPVSHCFNLNGSSSYSEVDGIQGIMTSYTSALFNVSLAGPTLFGPVINAAAMIASASLAQGSRKYYVLLIITDGVITDLQETKDALVSASDLPLSILIVGVGGADFKEMEILDADKGERLESSSGRLASRDIVQFVALRDVQYGEISVVQALLAELPSQFLTPFGGDESEEREEDENLFPVFSARSQHDMRVMVSALTQVIGNQQSKSHDNISSIDDNYPSVYNPQDPNQQVAPTHQDQGDLRRRHYRGVRQRPWGKWAAEIRDPKKAARVWLGTFETAESAALAYDEAALKFKGSKAKLNFPERVQLGSNSTYYSSNQIPQMEPQSIPNYNQYYHDASSGDMLSFNLGGGYGSGTGYSMSHDNSTTTAATTSSSSGGSSRQQEEQDYARFWRFGDSSSSPHSGY

SEQ ID NO: 25683 - protein, 916 aa, Azoarcus sp. EbN1
MTEDKDAPLREDIRLLGRVLGDTVRDQHGEAAFALIERIRQTSVRFRRDDDNAARLELEGILDALSREQTIEVVRAFSYFSHLSNIAEDQHHIRRSRAHLIAGSAPREGSVAHALVRALASGLPPARLAAFFDTALISPVLTAHPTEVQRKSILNCETDIAHLLDARDRMTLTPEERQESDEALRRTVLTLWQTRMLRPAKLSVVDEVANGLSYFDATFLRELPHLYANLEDQLVSRDPALAGLELPAFLQVGSWIGGDRDGNPFVTADVLERTLAMQAGAVLGFYLDELHALGARLSLALGLVTASDALLALAARSPDHSPHRNDEPYRRAISGIYARLAATHHALLGTEPPRHPVAVAEPYAAVAELADDLDVIHRSLVANGSAALARGQLRRLRRAVRVFGFHLAPIDLRQNSEVHERVVAELLATARTGTDYATLDEAARVELLIEELATPRPLASPHVRYSDETEGELAIFRTARAAHRRYGGPAIPNCIISKTDDVSDLLELALLLKEAGLLRPHERALDVNIVPLFETIEDLANAPSVMDRLFALPGYMNLLAASRDRTHEVMLGYSDSNKDGGFLTSGWALYKAEIGLIEVFARHGIRLRLFHGRGGSVGRGGGPSYEAILAQPGGAVQGQIRLTEQGEVIAAKYGNPEVGRRNLEVIVAATLEASLLADRAPAPRVEFLDTMQALSDVAFAAYRGLVYDTEGFERYFWESTVISEIAELNIGSRPASRKKGTRIEDLRAIPWVFSWSQCRLMLPGWFGFGSAVKTWLAAHADDGIARLQAMHREWSFFAALLSNMDMVLAKTDLAIASRYAGLVKDVNLRDAIFERIRNEWHDTVDALLAITGQRELLDGNPLLKRSIRNRFPYLDPLNHVQVELLRRHRETHDDARIRLGIHISINGIAAGLRNSG

SEQ ID NO: 25684 - protein, 290 aa, Lactarius deterrimus
LLDPRVKVLAVSDPFIDLQYMVYMFKYDSVHGRFKGTVEIKDGKLVIDGHPITVFQERDPANIQWGSVGADYVVESSGVFTTVDKASAHLKGGAKKVIISAPSADAPMFVVGVNLDAYDSKYTVISNASCTTNCLAPLAKVINDKFGIVEGLMSTIHATTATQKTVDGPSNKDWRGGRAVNGNIIPSSTGAAKAVGKVIPALNGKLTGLAFRVPTNDVSVVDLVVRLEKEATYDEIKLAVKEAADGPLKGIIEYTDDLVVSTDFIGSTASSIFDAGAGIQLNKNFAKLIS

SEQ ID NO: 25685 - protein, 428 aa, Desulfotalea psychrophila LSv54
MSEKATLTVGGASYELDVTSGTEDERCIDIQSLRAKSGYITMDPGFGSTGACFSDITYVDGERGILRYRGYPIEQIAERASFVETCSLIIYGELPDAETLNRFRRALAEHAPLHTSLYHYFSGFPESSPPMAILSAMLNLVSCFHPGVLEVHSEGHGFDRTAALLLSKVRTIAAWSYRMSVGKPFNQPNPHLTYCANFLHMMFSEPFQEYIPSPAVERALALFLILHADHEQNCSTSTVRTVASSRANLFSSVASGVCALWGPLHGGANAAVIEMLEEIMASGRKIDYYINRAKDKSNDYKLMGFGHRVYKNFDPRASILKKRVYEVLAELHKSDPLLDIALELEEKTLKDEYFISRKLYPNVDFYSGILLRAIGIPPEMYTVMFAIGRMPGWIANWRELHDQNLRITRPRQVYTGRQERSFVPLEER

SEQ ID NO: 25686 - protein, 482 aa, Escherichia coli CFT073
MKLNDSNLFRQQALINGEWLDANNGEVIDVTNPANGDKLGSVPKMGADETRAAIDAANRALPVWRALTAKERANILRNWFNLMMEHQDDLARLMTLEQGKPLAEAKGEISYAASFIEWFAEEGKRIYGDTIPGHQADKRLIVIKQPIGVTAAITPWNFPAAMITRKAGPALAAGCTMVLKPASQTPFSALALAELAIRAGVPAGVFNVVTGSAGAVGNELTSNPLVRKLSFTGSTEIGRQLMEQCAKDIKKVSLELGGNAPFIVFDDADLDKAVEGALASKFRNAGQTCVCANRLYVQNGVYDRFAEKLQQAVSKLHIGNGLEKGVTIGPLIDEKAVAKVEEHIADALEKGARVVCGGKAHERGGNFFQPTILVDVPANAKVSKEETFGPLAPLFRFKDEADVIAQANDTEFGLAAYFYARDLSRVFRVGEALEYGIIGINTGIISNEVAPFGGIKASGLGREGSKYGIEDYLEIKYMCIGL

SEQ ID NO: 25687 - protein, 900 aa, Neisseria gonorrhoeae FA 1090
MQLHILNNPKDAALAADAEFLKQSLFNLLHEEASPLVVETVKLLSTSDDSAALIEKVLPQLDERQTYDLTLACGLFAQILNIAEDVHHERRRQIHEDAGHNAAEGSLTETVRRLKAGKADGKSVQRQLDNTSVTAVLTAHPTEVQRQTVLNFNRRIRALLPQRERCTNADALARLRREIDTVLLGLWQTSETRRHKLSVNDEINNGVSIFPMSFFEALPKLYRKMEHDFQTAYPDVRVPNILKIGGWIGGDRDGNPFVSGETLRFAFRRHADAVFRFYRSELDKLYRELPLSIRRVKVNDDVMALAALSPDEEIARTEEPYRRAIAYIMARAMGKARSLGLGMGCKFGFLEPYASAQKFLDDLKKLQRSLIDNGSRLLAEGRLADLIRSVSVFGFHMMPLDLRQHAGKHADVVAELFQHAGLEDYNSLNEEQKQAALLRELGHQRPLYSPFITYSDHTRRELAIFNEARKIKDEFGEDAVTQSIISNCEQPGDLLALALLLKESGLLAVENGKPHSRINIVPLFETIEALENACPVMETMFRLDWYDALLESRGNIQEIMLGYSDSNKDGGYVTSSWCLHQAELGLVELFKKYDVRMRLFHGRGGSVGRGGGPSYQAILAQPAGSVAGQIRITEQGEVITAKYADPGNAQRNLETLVAATLEASILPDKKDPDAKLMQALSDVSFKYYRELITHPDFIDYFLQTSPIQEIATLNLGSRPASRKTLARIQDLRAIPWVFSWMQNRLMLPAWYGFGSAVETLCEGSPETLAALRGHAQNNPFFQAMLSNMEQVMAKTDITLAENYAGLSESPEKAKVIFGMIKEEYRRSRKALLDLLQTEELLRDNRSLARSLALRIPYLNALNGLQVAMLKRLRKEPDNPHALLMVHLTINGVAQGLRNTG

SEQ ID NO: 25688 - protein, 231 aa, Zea mays
MAGPGDKVDYVFKVVLIGDSAVGKSQILARFARNEFSLDSKATIGVEFQTRTLVIDHRSVKAQIWDTAGQERPLWWEAYHAGLNLRYRAVTSAYYRGALGALLVYDITRRQSFDHIPRWLDELRAHADKNIVIMLVGNKSDLEEQRAVSTEDAKEFAEKENLFFLETSALQATNVESAFQTVLTEIFKIHSKKNMVSEPKSNGAAQAMPGTKVLVPGPAQEIPKSKCCSSM

SEQ ID NO: 25689 - protein, 487 aa, Escherichia coli CFT073
MTRRGKCRGALPSDTLSRGFRMGQSSQPHELGGGLKSRHVTMLSIAGVIGASLFVGSSVAIAEAGPAVLLAYLFAGLLVVMIMRMLAEMAVATPDTGSFSTYADKAIGRWAGYTIGWLYWWFWVLVIPLEANIAAMILHSWVPGIPIWLFSLVITLALTGSNLLSVKNYGEFEFWLALCKVIAILAFIFLGAVAISGFYPYADVSGISRLWDSGGFMPNGFGAVLSAMLITMFSFMGAEIVTIAAAESDTPEKHIVRATNSVIWRISIFYLCSIFVVVALIPWNMPGLKAVGSYRSVLELLNIPHAKLIMDCVILLSVTSCLNSALYTASRMLYSLSRRGDAPAVMGKINRSKTPYVAVLLSTGAAFLTVVVNYYAPAKVFKFLIDSSGAIALLVYLVIAVSQLRIRKILRAEGSEIRLRMWLYPWLTWLVIGFITFVLVVMLFRPAQQLEVISTGLLAIGIICTVPIMARWKKLIMWQKTPIHNTR

SEQ ID NO: 25690 - protein, 671 aa, Listeria innocua Clip11262
MKKTLDRQAVDTIRSLSIDMIEKANSGHPGMPMGAAPMAYMLFAKHLVFNPANPEWFNRDRFVLSAGHGSALLYSMLHLFGYDVKMEDLKQFRQLDSLTPGHPEFGWTAGVDATSGPLGQGIGMAAGMALAESHLAAEYNQPNYPIVDHYTYAICGDGDLMEGVASETASLAGHLGLGKLIVLYDSNDICLDGDLSATFSENAADRFRAYGWQVLRVEDGNNLAAIQEKIVQAKLETSKPTLIEVKTVIGYGAPTKAGSSASHGAPLGEKEANGAKEHYEWAEEPFTVPAEVRDYLRNYKARGEKLEGAWNTMLANYKKEFPELARQLDRVLAGEVAADWNANLPTFEAGTNIATRSASGKMINAIAAELPELFGGSADLGCSNKTFIDASPAYSIQDPAGKNIWFGVREFAMGAMLNGMALHSGLRVFGSTFFVFSDYVRPAMRMAALMQLPVTYVFTHDSIAVGEDGPTHEPIEQLASLRAMPGLTVIRPADAKETRAAWEIAATNTHGPIALVLSRQDLPVLENAQEEVDAGVDKGAYIVAPANSSKPDAIIIATGSEVSLAIEAKAELAKKDIDVSVVSLSSWERFEKTTDAYKESILPKEVTARFAIEAGATFGWKEFIGSEGDMLGINHFGASAPAKDLFNAYGFTPENVADRVEAVIAKAGVRV

SEQ ID NO: 25691 - protein, 175 aa, Triticum aestivum
MVPTVMSSSDTSVALFQGLKSTAGLPVSRRSNGASLGSVRNGGRIRCMQVWPIEGIKKFDTLSYLPPLSTEALLKQVDYLIRSKWVPCLEFSKVGFIFREHNASPGYYDGRYWTMWKLPMFGCTDATQVINEVEEVKKEYPDAYVRIIGFDNMRQVQCVSFIAFKPPGCEESGKA

SEQ ID NO: 25692 - protein, 265 aa, Oryza sativa
MPRRDALAFNGGVNAARAPAPRERATRARTSASPQRASGRRAAAPFRFNERRDGDGAGRGDVSGARWRRAPAAQAGELDTAASAANPSPRAAAPIYKAHSLLHPSLFSRVSGGGELSKRKTREPKEENVTLGPTVREGEYVFGVAHIFASFNDTFIHVTDLSGRETLVRITGGMKVKADRDESSPYAAMLASQDVAQRCKELGITALHIKLRATGGNKTKTPGPGAQSALRALARSGMKIGRIEDVTPVPTDSTRRKGGRRGRRL

SEQ ID NO: 25693 - protein, 343 aa, Listeria innocua Clip11262
MKAVVKTNPGYDQMELRDVEEPQVYGDKVKIKVAFTGICGSDIHTFKGEYKNPTTPVTLGHEFSGVVVEVGPDVTSIKVGDRVTSETTFETCGECIYCKERDYNLCSNRRGIGTQANGSFAEFVLSREESCHVLDERISLEAAALTEPLACCVHSALEKTTICPDDTVLVFGPGPIGLLLAQVVKAQGATVIMAGITKDSDRLRLAKELGMDRIVDTLKEDLAEVVLGMTDGYGAERVFDCSGAVPAVNQGLPLTKKKGDFIQVGLFAEKKNAIDEESIIQREIAYIGSRSQKPSSWILALDLLANGKINTDKMITKVYGLDDWREAFEAVMAGNEIKVLVKS

SEQ ID NO: 25694 - protein, 350 aa, Listeria innocua Clip11262
MRAAVLYENNVIKAEQIDEATCGKDQVRVEVKAVGICGSDIHKMQTRWKYPLPAVMGHEFAGVVTEIGSEVTNVAIGDRVAGIPLEPCMECNYCKAGDFALCDNYRMVGSHFHGGFAENVVMKADNVISIGDLDFEEGAMIEPLAVSMHGVLGIEPRLGDTVIVFGIGTIGILVVQCLLLAGVKDIIAVDISDKKLADAREFGCKYTINPKNEDLKERVFAYTNGLGADIALECAGSKITQEQCLLVTKKKGKVGYLGIAYADVLLHEEAFENIFRRELTLKGFWNSYSAPFPGEEWRTSIEFVKQGRIKLKPLISHRYKLEETKEAFDMILSREHDYNKVMILPQKGDD

SEQ ID NO: 25695 - protein, 164 aa, Arabidopsis thaliana
  misc_feature (118)..(118): Xaa can be any naturally occurring amino acid
  unsure (1)..(164): unsure at all Xaa locations
MVARSEEVEIVEDTAAKCLMLLSRVGEGGGGGEKRVFRCKTCLKEFSSFQALGGHRASHNKLINSSDPSLLGSLSNKKTKTATSHPCPICGVEFPMGQALGGHMRRHRSEKASPGTLXTRSFLPETTTVTTLKKSSSGKRVACLDLDSMESLVNWKLELGRTIS

SEQ ID NO: 25696 - protein, 212 aa, Arabidopsis thaliana
MVSALSRVIENPTDPPVKQELDKSDQHQPDQDQPRRRHYRGVRQRPWGKWAAEIRDPKKAARVWLGTFETAEEAALAYDRAALKFKGTKAKLNFPERVQGPTTTTTISHAPRGVSESMNSPPPRPGPPSTTTTSWPMTYNQDILQYAQLLTSNNEVDLSYYTSTLFSQPFSTPSSSSSSSQQTQQQQLQQQQQQREEEEKNYGYNYYNYPRE

SEQ ID NO: 25697 - protein, 289 aa, Arabidopsis thaliana
MSLFNTENTWAFVFGLLGNLISFAVFLSPVPTFYRIWKKKTTEGFQSIPYVVALFSATLWLYYATQKKDVFLLVTINAFGCFIETIYISMFLAYAPKPARMLTVKMLLLMNFGGFCAILLLCQFLVKGATRAKIIGGICVGFSVCVFAAPLSIIRTVIKTRSVEYMPFSLSLTLTISAVIWLLYGLALKDIYVAFPNVLGFALGALQMILYVVYKYCKTSPHLGEKEVEAAKLPEVSLDMLKLGTVSSPEPISVVRQANKCTCGNDRRAEIEDGQTPKHGKQSSSAAAT

SEQ ID NO: 25698 - protein, 366 aa, Zea mays
MAGPAPDRAALTVGPGMDMPIMHDSDRYELVRDIGSGNFGVARLMRDRRTTELVAVKYIERGEKIDENVQREIINHRSLKHPNIIRFKEVILTPTHLAIVMEYASGGELFERICKNVRFSEDEARYFFQQLISGVSYCHSMQVCHRDLKLENTLLDGSDAPRLKICDFGYSKSSVLHSQPKSTVGTPAYIAPEVLLKKEYDGKIADVWSCGVTLYVMAVGAYPFEDPEEPKNFRKTIQRILNVQYAIPDYVNISPECRHLISRIFVGDPAMRITITEIRNHSWFLKNLPADLMDDDSMSNQYEEPDQPMQTMDQIMQILTEATIPPACSRSINVLADGLDMDDDMDDLDSDSDLDVDSSGEIVYAM

SEQ ID NO: 25699 - protein, 479 aa, Agrobacterium tumefaciens str. C58
MSLKTAPVIVWFRKDLRLSDNLALLAAVEHGGPVIPVYIREKSAGPLGGAQEWWLHHSLAALSSSLEKAGGRLVLASGDAERILRDLISETGADTVVWNRRYDPTGMATDKALKQKLRDDGLTVRSFSGQLLHEPSRLQTKSGGPYRVYTPFWRALEGSDEPHAPADPPKSLTAPKVWPKSEKLSNWKLLPTKPDWAKDFSDIWTPGETGALDKLDDFIDGALKGYEEGRDFPAKPATSLLSPHLAAGEISPAAVWHATKGLSRHIASNDISRFRKEIVWREFCYHLLFHFPELGEKNWNDSFDAFSWRDDEKSFKAWTRGMTGYPIVDAGMRQLWQHGTMHNRVRMIVASFLIKHLLIDWRKGEKWFRDTLVDADPASNAANWQWVAGSGADASPFFRIFNPILQGEKFDGDGDYVRRFVPELEKLERKYIHKPFEAPKDALKKAGVELGKTYPLPIVDHGKARERALAAYAAVKKTT

SEQ ID NO: 25700 - protein, 488 aa, Burkholderia sp. 383
MTFLGIDLGTSEVKVLLTDSRSVPLATGSAALSISRPHPHWSEQSPQAWWHAMLDAIAAVRAAHPAGFAALRGIALSGQMHGATLIDRADQVLRPAILWNDTRAGTECVELEALVPESRAITGNMAMPGFTAPKLLWLAKYEPAVFRAVHKVLLPKDYLIWRLSGEFVSEMSDASGTLWLDCARRDWSDRMLAATELSRAQMPRLVEGNAPAAQLRDTLRREWGIAGPVTIAGGAGDNAASAIGMGVTGAGSGFLSLGTSGVLFAGNDRFAPNPDAAVHAFCHCVEGRWHQMSVILSAAASLDWLARAHGTTAGELAARAERAEPARAPLFLPYLGGERTPHNDTHARGVFFGLSNEHAADDLAYAVMEGVAFAMAGGYDALRAAGTTLDAVSFIGGGSKSAFWARLCANATGLEMQRHADGAVGAALGAARLARLAATDDTLGEVCVAPPVTEMVAPDAATVDLLAGRLARYRRLYRALREEFAAAD

SEQ ID NO: 25701 - protein, 328 aa, Campylobacter jejuni
MKILISGGAGYIGSHTLRQFLKTDHEICVLDNLSKGSKIAIEDLQKIRAFKFFEQDLSDFQGVKALFEREKFDAIVHFAASIEVFESMQNPLKYYINNTVNTTNLIETCMQTGVNKFIFSSTAATYGEPQTPVVSETSPLAPINPYGRSKLMSEEVLRDASMANPEFKHCILRYFNVAGACMDYTLGQRYPKATLLIKVAAECAAGKRDKLFIFGDDYDTKDGTCIRDFIHVDDISSAHLAALDYLQENESNVFNVGYGHGFSVKEVIEAMKKVSGVDFKVELAPRRAGDPSVLISDASKIRNLTSWQPKYDDLELICKSAFDWEKQC

SEQ ID NO: 25702 - protein, 503 aa, Yersinia pestis KIM
MFVPQPSNKPLSLMLAGLSVKKTAADSFMKCVVYSHQCVISATEGRMEQQLQNSSLKRGLKNRHIQLIALGGAIGTGLFLGIAQTINMAGPSVILGYAIGGFIAFLIMRQLGEMVVEEPVAGSFSHFAYKYWGDFAGFLSGWNYWAMFILVGMAELTAVGIYIQYWWPEIPTWVSAAVFFIIINAINLVNVRLYGETEFWFAIIKVAAIIGMIVFGAYLLASGSGGPAASVTNLWAQGGFMPHGFRGLIMAMAVIMFSFGGLEMVGITAAEAEDPRNSIPKATNQVVYRILIFYIGSLTVLLSLFPWNNVVEGGSPFVMIFDALDSPWVATALNVVVLTAALSVYNSGVYCNSRMLFGLASQGNAPKLLTKLNKRGVPIRSIALSALATSAGVVINYIMPGKAFELLMALVVSTLVINWVMICLAHLKFRKAKVKEGVVPRFKALWYPYGNYLCLVFLALILVIMYLTEGIRISVLMMPVWIALLWCGFVLTRRKCPKTVTSL

SEQ ID NO: 25703 - protein, 261 aa, Staphylococcus aureus subsp. aureus Mu50
MKVQIYQLPIIFGDSSKNETQITQWFEKNMNAEVDVVVLPEMWNNGYDLEHLNEKADNNLGQSFSFIKHLAEKYKVDIVAGSVSNIRNYQIFNTAFSVNKSGQLINEYDKVHLVPMLREHEFLTAGENVAEPFQLSDGTYVTQLICYDLRFPELLRYPARSGAKIAFYVAQWPMSRLQHWHSLLKARAIENNMFVIGTNSTGFDGNTEYAGHSIVINPNGDLVGELNESADILTVDLNLNEVEQQRENIPVFKSIKLDLYK

SEQ ID NO: 25704 - protein, 356 aa, Cryptococcus neoformans var. neoformans B-3501A
MTRFHTDEYIELLESVLPENADALTGNRSRGLTGSDCPAVEGIFEFSSISAGGSIGAAEKLNEGIADIAINWAGGLHHAKKTEASGFCYVNDIVLGILELLRVNSRVLYIDIDVHHGDGVEEAFYSTDRVMTCSFHLFGNFFPGTGTLKDVGLGKGKGYAVNVPLREGITDEGFHSIFKPASLVIAEIMEHYRPCVVVLQGGADSMSGDKLGRLNLSDKGHAECAKFLRTFSVPLMLLGGGGYTTKNVARAWTRETAIACGQELSEDLPSNQYMEYYGPRYKLQVLPSNVEDFNTPEYLEDLKRQISNHLKNLPFAPSAQMRQITGSNVSQAVGLSNEWETDDPEDQIDQRLKIRI

SEQ ID NO: 25705 - protein, 876 aa, Photobacterium profundum
MNEKYSALRSNVSMLGHMLGNTIKDAHGEPLFDKVETIRKLSKSARAGNDSDRAKLIDELQNLPDDQLLPVARAFSQFLNLTNIAEQYHTISRHCEEQICSPDSIDSLFGKLNANSISQLDSIQAVRDLNIELVLTAHPTEIARRTMIHKLVQINKCLSNLELSELSHSERQRVEQRLEQLIAQAWHSDVIRKQRPTPLDEAKWGFAVVENSLWHAVPEFLRQFDEKLMRHLGEKLPLDASPVKFTSWMGGDRDGNPFVTSEVTREVMLLSRWKAADLFLGDIQELVSELSMVKCNDQVRELAGEEHEPYRAILKDLRTKLTNTRDVLAAKINKQDAPNLATIDDVDQLWTPLHACYQSLRECGMGIIADGLLLDVLRRIKCFGIHLVRLDIRQESTRHSDVISELTRYLGLGDYEQWNEQDKVAFLVRELASKRPLLPLAWQPSAEVQEVLDTCKAVAEQSREALGAYVISMARTASDVLAVHLLLKEAGCPFRLDVCPLFETLDDLNNGASVIKELMSIDWYRGFIQNHQMVMIGYSDSAKDAGVMAAGWAQYRAMEELVEVCEDASVELTLFHGRGGSIGRGGAPAHAALLSQPPRSLKGGLRVTEQGEMIRFKLGLPDVAVNSLSLYASATLEANLLPPPAPKKEWCDLMDVLSEVSCESYRNVVRGSEEFVPYFRAATPELELGKLPLGSRPAKRNPNGGVESLRAIPWIFAWSQNRLLLPAWLGAGEAIQYSIDKGHAQLLEDMCREWPFFSTRLGMLEMVYTKTNVGIAEYYDQRLTDKSLWPLGQKLRDQLQQDIKAVLNVENNAHLMEQNPWGAEAIRLRNIYVEPLNMLQAELLYRTRQQDEPSPILEEALMVSIAGIATGMRNTG

SEQ ID NO: 25706 - protein, 159 aa, ASPERGILLUS NIDULANS FGSC A4
MVDQVRSMESRVGRKNQRYGSKGERLVAGVVPLSKDKSLVMMIQSAGRGGWVLPKGGWETDEASAQQAACREAWEEAGVICTVLRDLGTISDMRPSTMLTSNSPRASYQFFEVTVDREEDRWPEMHKRRRQWVTYTQAAAALASRPELLEALNRSSMKR

SEQ ID NO: 25707 - protein, 212 aa, Pseudomonas syringae pv. phaseolicola 1448A
MNELQDLIDNNARWADAIKQEDPEFFAKLARQQTPEFLWIGCSDARVPANEIVGMLPGDLFVHRNVANVVLHTDLNCLSVIQYAVDVLKVKHILVTGHYGCGGVRASMQDRQFGLIDGWLRTIRDLYYENREVLAKLPTEEERVDRLCELNVIQQVANVGHTSIVQNAWHRGQSLSVHGCIYGIKDGRWKSLDVTISGFEQLPPQYRLRPQD

SEQ ID NO: 25708 - protein, 269 aa, Corynebacterium glutamicum ATCC 13032
MTLSLPPIGFGTVHLDGAPGVEAIATAIDAGYRLIDTAYNYENEGTVGKAVRESGVPREELIVTSKLPGRFHARDLGRVRIEESLYRLNLDYIDLLLIHWPNPSKDLYVEAWETLIEVRDAGLVKHIGVSNFLPNHIDRLRRETGELPAVNQIELHPYFPQVEQVDFHDELGIITEAWSPLSNGRGLVEEPLLKEIGERYGVGSGEIALAWHHARGIVPIPRSTNPARQRSNLEAVKISLIDEDVQAITALARKNGRIKDQDPAVYEEF

SEQ ID NO: 25709 - protein, 341 aa, Zea mays
  misc_feature (103)..(103): Xaa can be any naturally occurring amino acid
  unsure (1)..(341): unsure at all Xaa locations
MALRNGGGGGGACPAAVVLVAAAVAALLGAGVAAATKFDDVVQPSWANDHVVYDGDLLKLRLDSSSGGGFVSRTKFLYGKASADLKLVPGDSAGVVTAFYVTXRLSGDKHNEFDFEFLGNVTGEPYLVQTNLFIDGVGNREQRIDLWFDPTADFHTYAVLWNPSQVVFMVDDTPIRVYENATLHQGHGHGHGHHRHGGAAAEANGTNTTTTTLAAAPAPFPGPQPMAVYSSIWNADDWATQGGRVKTDWSHAPFEATFREVRVDGCAWAANATDGDAAEARRCSESSWGKEGRYWWKEKEMSELSVHQSHQLVWARAHHLVYDYCVDTDRFPVQPPECAGR

SEQ ID NO: 25710 - protein, 920 aa, Streptococcus pyogenes serotype M6
MPLKKLESSNNQAIIAEEVALLKEMLENITRRMIGDDAFTVIESIMVLSEKQDYIELEKVVANISNQEMEVISRYFSILPLLINISEDVDLAYEINYQNNTDTDYLGKLALTIKDLAGKDNGKDILEQVNVVPVLTAHPTQVQRKTILELTTHIHKLLRKYRDAKAGVISLEKWRQELYRYIEMIMQTDIIREKKLQVKNEIKNVMQYYDGSLIQAVTKLTTEYKNLAQKHGLELDNPKPITMGMWIGGDRDGNPFVTAETLCLSATVQSEVILNYYIDKLAALYRTFSLSSTLVQPNSEVERLASLSQDQSIYRGNEPYRRAFHYIQSRLKQTQIQLTNQPAARMSSSVGLSTSAWSSPASLENPILAYDSPVDFKADLKAIEQSLLDNGNSALIEGDLREVMQAVDIFGFFLASIDMRQDSSVQEACVAELLKGANIVDDYSSLSETEKCDVLVQQLMEEPRTLSSAAVAKSDLLEKELAIYTTARELKDKLGEEVIKQHIISHTESVSDMFELAIMLKEVGLVDQQRARVQIVPLFETIEDLDNARDIMAAYLSHDIVKSWIATNRNYQEIMLGYSDSNKDGGYLASGWTLYKAQNELTAIGEEHGVKITFFHGRGGTVGRGGGPSYDAITSQPFGSIKDRIRLTEQGEIIENKYGNKDVAYYHLEMLISASINRMVTQMITDPNEIDSFREIMDSIVADSNIIYRKLVFDNPHFYDYFFEASPIKEVSSLNIGSRPAARKTITEITGLRAIPWVFSWSQNRIMFPGWYGVGSAFKRYIDRAQGNLERLQHMYQTWPFFHSLLSNVDMVLSKSNMNIAFQYAQLAESQDVRDVFYEILDEWQLTKNVILAIQDHDDLLEDNPSLKHSLKSRLPYFNVLNYIQIELIKRWRNNQLDENDEKLIHTTINGIATGLRNSG

SEQ ID NO: 25711 - protein, 436 aa, Bordetella parapertussis 12822
MIWLRTLFMIAFWAVMALLAQWLIGNPAGWLLFGAAMAAMLLWRSWRLHLVSRWAHDPESAPPAAVGPWDDILAPLYRYTRARARELAETRETMQSMLAAAQALPDGVVTLNEDFQIDWANRMARRHLGLRLPADRGHNLLNLLRAPEFVAYAHRGHWPEPILVRLSLNGQERVMMIHLAGYASNQRLLISRDVTQIERLETTRRDFVANVSHELRTPLTVLAGFLETLRELPAEALPAEQRDQYMAMMHEQARRMQAIVEDLLTLSTLESSPEADPLAVDVGALLRTARQQVEALSNGRHVFEWQIEEGLDVLGSGTELASALSNLLTNAVRYTPDGGRITVRWRRGADGEALYSVQDTGIGIPARHLPRLTERFYRVDRGRSRAAGGTGLGLAITKHIAMRHDADLLIDSEPGKGSTFTLRFPAERVTGEDPDR

SEQ ID NO: 25712 - protein, 253 aa, Chlamydia trachomatis D/UW-3/CX
MSKLTQVFKQTKLCIGYLTAGDGGTSYTIEAAKALIQGGVDILELGFPFSDPVADNPEIQVSHDRALAENLTSETLLEIVEGIRAFNQEVPLILYSYYNPLLQRDLDYLRRLKDAGINGVCVIDLPAPLSHGEKSPFFEDLLAVGLDPILLISAGTTPERMSLIQEYARGFLYYIPCQATRDSEVGIKEEFRKVREHFDLPIVDRRDICDKKEAAHVLNYSDGFIVKTAFVHQTTMDSSVETLTALAQTVIPG

SEQ ID NO: 25713 - protein, 431 aa, Methanopyrus kandleri AV19
MAAESIAKAVHDVLATWGAQGPGAIFFLVWAAVLVVGMQLGFMFLEAGQVRTKNVVSVLMKNLLDLSLGGIVFIFFGFALAFPDYAQSIGKWIATMFTANPWSADPMKAADPYNLAYCFFQFAFCATAATIVSGAVAERINFKACLVMTVLITGLLYPIFVLWTWGGGWMGGDTGLFAKVFGQPYHDFAGSTVVHAIGGFLAMAAAYLLGPRIGRFKNGKPVPIPGHNIPQAFLGALFLAITWYGFNVGSSAVLYDPTNESWISSLVATLAMCGGAAAAAFTTRFDPLWAANGLIAGLVAICAGCDIMSPFGALLTGIVAGLIIKPAFRLLEKLEIDDVVAACPVHGFAGVWGAIAAGIFGAEALGGAGGVSLAAQIVGALVCIAWALGSGFATFYVIDKVIGLRATEEEEKGLDETEFGVSAYPYMETRD

SEQ ID NO: 25714 - protein, 663 aa, Campylobacter jejuni RM1221
MNIQYSDALVIGGGLAGLRAAIEVAKSGQSVTLLSICPVKRSHSAAVQGGMQASLANGAKGEGDNEDLHFADTVKGSDWGCDQEVARMFAQTAPKAVRELAAWGVPWTRVTKGPRTVVINAQKTVIEEKEEAHGLINARDFGGTKKWRTCYIADATGHCMLYGVANEAIKHQVKIIDRMEAVRIIHDGKKCLGVIARDLTNGQLIAYIARGTMIATGGYGRIYKQTTNAVICEGTGAAIALETGLCRLSNMEAVQFHPTPIVPSGILLTEGCRGDGGILRDVDGYRFMPDYEPEKKELASRDVVSRRMMEHIRKGKGVKSPYGDHLWLDISILGRAHVEKNLRDVQDICKTFNGIDPADEGPKGWAPVLPMQHYSMGGIRTKPTGESQWLNGLFACGEAACWDMHGFNRLGGNSCAETVVAGMIVGDYFADYCKNNGEVIDTNVVKDFLTKEYQYLKSLVDKEGKYNVFEIKNRMKEIMWDKVAIFRTGEGLKEAVDELEKLYKDSQDVKVHCKELDCANPELEEAYRVPRMLKIALCVAYGALLRTESRGAHYREDYPKRDDLNWMKRTNTFWVEGETLPRIEYEELDIMKMEIPPAFRGYGAKGNIIENPLSEKRQAEVDAIREKMEAEGKGRYEIQNALMPYELQAKYKAPNQRIGVDYE

SEQ ID NO: 25715 - protein, 476 aa, Candida glabrata CBS138
MIVKRLFRTMAPVAKHFDYLVIGGGSGGVASSRRAASYGAKTLLIEGKALGGTCVNVGCVPKKVMWYASDLATRLTHAHEYGLAQNVPLSKESITFNWPEFKKKRDAYIHRLNGIYENNLKKEGVEVVFGWAKFNKDGNVEVTKHDNTTEVYSADRILVATGGKPVYPEKVPGFELGTDSDGFFRLEEQPKKVVVVGAGYIGIELAGVFHGLGSDSHLVIRGKTVLRKFDEIIQNTVTDYYVEEGINVHKETNVDKVEKDEKTGKLSVHLTNGQVLEDVDELIWTMGRRSLLGIGLENVGVKLNDKEQIITDEYQNTNVPNIYSLGDVSGRVELTPVAIAAGRKLSNRLFGPEQYRNDKLDYTNVPSVVFSHPEAGSIGLTEDEAIKQYGKDNIKVYTSKFTAMYYAMLEHKSPTRYKIICEGPNEKVVGLHIVGDSSAEILQGFGVAIKMGATKADFDNCVAIHPTSAEELVTMR

SEQ ID NO: 25716 - protein, 373 aa, Burkholderia cepacia
MDDVQFQLQQADAREQPSGAYDATTRVAASWYVAMRSDDLKDKPLELTLFGRPCVAWRGAMGRAVVMDRHCSHLGANLADGQVKDGCIQCPFHHWRYDEQGQCVHIPGHSEAVHRLEPVPRGARQPTLVTTERYGYVWVWYGSPQPLHPLPDIAAADVDNGDFMHLHFAFETTTAVLRIVENFYDAQHAHPVHALPISAFELKLCDDWRPWPEVEPLARAGAWFGAGIDFTVNRYFGPLGMLSRALGLSMSQMNLHFDGYPGGCVMTVALDGDAKYKLLQCVTPVSDGRNVMHMLISIRKAGGPVRRAIDYVLFGLQTRQAAGYDVKIWNGMKPDGGGAYSKYDKLVLKYRAFYRGWVDRVASSERQGVSRRS

SEQ ID NO: 25717 - protein, 456 aa, Xanthomonas campestris pv. phaseoli
MSARYDYDVVILGGGSGGLAAGFRAARHGARVAIMEPSELGGTCVNLGCVPKKAMWLAADLAGKIELASALGFDLPRPTLAWQELVTHRQGYIANIHASYRRRLNEDGVVLIPQRGVLQDRHTVMGSDGVPVTAEHIVIATGAHPLRPDVQGAEHGEVSDDFFNLCHAPEQVAIIGGGYIAVEIAGLLQALGSRVHLFVQGERLLERFDAELTLQLADNLRHLGVRLHFGFTTTALERDLHGALRVHGHSVHPREQGNDVFDKVFFAVGRRANTAGLGLDTVGVALGDKGEVVVDDGQTTNVPNIHAIGDVGGKVGLTPVAIAAGRKLMDRLFGHQPDARMDYENVPSVVFSHPPLGHVGLTEEQARARYNGAVRVYRSNFRPMLHALADAPQRSLFKLVCVGEEERVVGVHLLGESADEMLQGFAVAVKMGATKRDFEETVAIHPTSSEEIVLMH

SEQ ID NO: 25718 - protein, 928 aa, Bradyrhizobium sp. BTAi1
MSPQTMPSEDIRPSRAADAQAMEEDARLRDDIRLLGRILGDTVRDQEGADVFDLVERIRQTSVRFHRDEDRQARRELEQILDGMTIAETVRIVRAFSYFSHLANIAEDQNNIRRMRARSDANGGAGMLAATLAHAKSAGFEAADLRKFFSTALVSPVLTAHPTEVRRKSTMDREMEVAMLLDRRERMQLTPDEREANDEALRRAVLTLWQTNLLRRTKLTVLDEVTNGLSFYDYTFLREVPRLLCTLEDRLNDGAEVAGDLASFLRMGSWIGGDRDGNPFVTAEVMRGTLKLQSSLALHYYLEELHLLGGELSIAAHLADVSEELRALAERSPDTSPHRSGEPYRLAVSGIYARLAATAKKLGIQISRLPVGVGAPYDSVKQFQDDLDVLHRSLIANNAEVIARGRLRLLRRAVDCFGFHLARLDIRQNSTVHERTVAELIDTAMPGMSYMALSEDARVGLLVSELRNTRPLVSQFVKYSDETVGELELFRAAAEAHATFGADVISQCIISMCKGMSDMLEVALLLKEVGLIDPSGRCAVNIVPLFETIEDLQASSGIMDRMLALHDYRRLVDSRGAVQEVMLGYSDSNKDGGFVTSGWELYKAEIGLVEIFERHGIRLRLFHGRGGSVGRGGGPSYDAIIAQPGGAVNGQIRITEQGEIISSKYSNAEVGRNNLEILAAATLEASLLHPRQPAPKREYLTAMDRLSELAFKAYRGLVYETDGFVDYFWASTVINEIATLNIGSRPASRKKTRAIEDLRAIPWVFSWAQCRLMLPGWYGFGSAVETWIAENPEQGMPFLRELYQEWPFFRMLLSNMDMVLAKSSIAIASRYAELVPDEALREKIFGRIRREWHLAIETLLDIMGQERLLQGNPLLERSVRNRFPYLDPLNHVQVELLKEHRAQNPDEQVLRGIQLTINGISAGLRNTG

SEQ ID NO: 25719 - protein, 247 aa, Polaromonas sp. JS666
MAAGLRGKPAGRPRQPCQPCFTTIGSMIKKYRTGLMWFRRDLRTEDNAALYHALKSCHRVFCLFIFDRGILDDLPRADRRVEFIRESLVDLNGQLQALARQGGCAAGTALLVRHARPSEAMGALAAGLCIDAVFTNHDDEPQALARDAAVQAMLDGQGVAFHSFKDHVIFERHEVLTLAGKPYTVFTPYKNAWLKKVDGFYLKPYPVAQYAAALAPLPAGELSAVPPLEALGFEKTNLSALKIPTGS

SEQ ID NO: 25720 - protein, 335 aa, Idiomarina loihiensis L2TR
MKKQILVTGGCGFIGSHTVVELILSGYQVIVIDDLSNSNASVIDKIQCITGERPEFHQVDICNRDALTKLFKQYAFDAVMHFAALKNPQESYHLKEKYFLTNVEGTRRLLAVMEDCSVNHLIFSSSAVVYGNPSCVPVAESAPAGATTNPYGENKYRSECDLAEFCEKNLAFSAISLRYFNPAGAHPSGVIGEQPIKPAANLIPAIGNVITRKVDSVQVYGGDYSTCDGTAIRDYIHVCDVAKGHVAALEAGFARTGHHIFNLGTGKGESVLGVIHAFEQASGQIIPVNFSERRQGDVASCYAQADKALQELNWRAEHDLQTIARDYCHWLSLSN

SEQ ID NO: 25721 - protein, 412 aa, Glycine max
  misc_feature (178)..(178): Xaa can be any naturally occurring amino acid
  unsure (1)..(412): unsure at all Xaa locations
MSSKERPTLGGTRIKTRKRNIAAPLDPAAFSDAVVQIYLDNAGDLELIAKSIESSDLNFSRYGDTFFEVAFTGGRTQPGTTKPDEGDRHPYSIIECEPKREVILPSVIYIQKILRRRPFLIKNLENVMRKFLQSLELFEENERKKLAIFTALAFSQKLSGLPPETVFQPLLKDNLVAXKGLVLSFMTDFFKEYLIDNSLDDLISILKRGKVEEDLLDIFPPTKRSIEAFSEHFTKEGLVALVEYNEKKIFEVKLKEMKSSLTAQITEEADTSEVIETVKLRVRDAKLPEIEVVRILWDVLMDAVQWSGKNQQQNANAALRQVKTWAELLNTFCTSGKLELELMYKVQMQCYEDAKLMKLFPEIIRSLYDQDVLAEDTILHWFRKGTNSKGRQTFVKALEPFVNWLEEAEEEE

SEQ ID NO: 25722 - protein, 189 aa, Polaromonas sp. JS666
MLQRVRSSPNMTPLRGKAARWPPPASRPGVMAARAILSSMRPWRKSTRRGYMHNRLRMVTASFLVKDLGIDWRWGERYFAEKLNDFDLSANNGGWQWAASTGCDAQPYFRIFNPVSQSEKFDAEGKFIRKYLPPLEKLPASCLHSPWLAKPVELSAAGVSLGQNYPMPIVQHDEARALTLQRYAVVKKS

SEQ ID NO: 25723 - protein, 448 aa, Corynebacterium glutamicum ATCC 13032
MSQRVIFSGMNLTRNDRLDRLPVTSKHKKILGGSGIGWALDAMDVGLISFVMAALATHWGLSPTETSLLGSIGFVGMAIGASLGGLLADKLGRRQVFALSLLVYGVATGASALSVSLAMLMALRFVVGLGLGAELPVASTLISEFSPRKVRGRMVVILEAFWALGWIMAAIVGTFVVAGSDNGWRWALALGCVPAIYAVYVRLGLPESVRFLEKKGRHDEAEAIVVSFEEAAAAEGKAADATTAVVHDNAAEGSVSIWSAALRKRTVALWIVWFCINLSYYGAFIWIPSLLVADGFTLVKSFQFTLIITLAQLPGYAVAAWLIEKWGRRSTLATFLVGSAISAALYGLANVEWQILVAGCLLSFFNLGAWGALYAIGPELYPTNVRGTGTGAAAGFGRIASIIAPLIVPPVIAFGGPIALFALFATAFAIAAIAAFTLPEQKGKSLAD

SEQ ID NO: 25724 - protein, 132 aa, Polaromonas sp. JS666
MSIPNSGLKVLVIDDSNTIRRSAEIFLKQGGHEVLLAEDGFDALSKVNDYEPDLIFCDILMPRLDGYQTCAIIKRNAKFSGVPIVMLSSKDGVFDKARGRMVGSQDYLTKPFTKDQLLQTVQELGSAKQGVV

SEQ ID NO: 25725 - protein, 318 aa, Glycine max
MDKENTNGPLHFDLNTGAKIPSVGLGTWKAPPGVVGDAVIAAVKAGYRHIDCARIYDNEKEVGEALKTLFSTGVVQRSEMFITSKLWISDCAPEDVSKALTRTLEDLKLDYIDLYLMHWPFRTKPGSRGWDPEIMAPLCLPETWNAMEGLFASGQARAIGVSNFSTKKLQDLLGYAKIPPAVNQVECHPVWQQPALHNLCKSTGVHLTAYCPLGSPGSWVKGEILKEPLLIEIAEKLHKSPAQVALRWGLQSGHSVLPKSVNESRIKENLSLFDWCLPPELFSKLSQIHQQRLLRNESAVHETCSPYKSLEELWDGEI

SEQ ID NO: 25726 - protein, 319 aa, Staphylococcus aureus subsp. aureus Mu50
MRRLFSIGEALIDFIPNVTNANLKDVQTFTKQIGGAPCNVSCTVQKLGQQAYMITQLGNDAFGDSIIETISSIGVDVSKVYRTNEANTALAFVSLTEAGERDFSFYRKPSADMLFEPSFVNDIDVNENDVVHFCSVDLVDSPMRDAHYQLITKTLNANGTVVFDPNVRLPLWDNAEDLRQTIHTFLPLAHIVKVSDEELEFITGIHDENEAIQSLFTGNVTVVIYTKGADGAAVYLKNGINHYHSGYKVKPVDTTGAGDAFIGAVISRILATDVLNLTQLFENEGEEILAFSNRVAAIVTTKYGAINSLPTLQEVEQAF

SEQ ID NO: 25727 - protein, 442 aa, Polaromonas sp. JS666
MEPQNIKPHTPELSRNTALFERAKKLIPGGVNSPVRAFKAVGGTPRFVQRAQGAYFWDADDQRYIDYIGSWGPMILGHGHPAVLASVQKALLDGFSYGAPTEREVELAEELVRLVPSLEMVRLVSSGTEAAMSAIRLARGATGRSKIIKFEGCYHGHADALLVKAGSGLATFGNPTSAGVPPEVVQHTLVLEYNHLAQLEEAFALHGSAIACLMIEPIAGNMNFVRASIPFMQRCRELCTQYGALLVFDEVMTGFRVALGGAQSVYAKSIPGFKPDMTVLGKVIGGGMPLAAFGGTRAVMEQLAPLGPVYQAGTLSGNPVATACGLATLREIQKPGFYEALGERTRGLVAGLTQAANKAGVPFCGDSEGGMFGFFLLGQLPQNYATVMTTDGPAFNRFFHAMLASGVYYAPALYEAGFVSSAHSAADIEATVDAAAKFFAGA

SEQ ID NO: 25728 - protein, 572 aa, Yersinia pestis KIM
MLRRFFSYYAPYKGLFFLDFGCAILAGLLELSFPMAVKLFIDKLLPNQDWVMIVWAAAGLLLIYLLNTVLMAIVNYWGHALGVGIETDMRRQAFNHLQKLSFSYYDNIKTGHIITHVTKDLEEVGEVAHHGPEDLFIAVMTFIGAFILMATVHLPLAMVTIIIVPFMTYLVTRYGSKMTDTWRKLFGQVGNFNTRIEESIGGIRVVKAFANEPHEEKLFAKDNENYRTTKLRAYRIMTTSMTMSYLSTRLVQLIVMVVGTWYVIHDQLSYGGFVGFLLLVEVFFRPVEKITSVLESYPKGIAGFKRFTQLIDTLPDIVDQPNARPVGHLRGDISYQHVCFGYSSQAPIFTDLNLQIHAGETVAFVGPSGAGKTTLCSLLPRFYELNAGAITIDGIDIREMTQQSLRNNIGIVQQDVFLFGGSIRENIAYGKLNASDDEIMVAAQRARLDELISSLPEGLDTLVGERGVKLSGGQKQRLSIARIFLKNPPILILDEATSALDTATEQAIQLALTELSQGRTTLVIAHRLATIQNADRIIVVDKGGIIEQGDHHELLARQGAYAILHHAQFSAA

SEQ ID NO: 25729 - protein, 409 aa, Arabidopsis thaliana
MAAEMALVKPISKFSSPKLSNPSKFLSGRRFSTVIRMSASSSPPPPTTATSKSKKGTKKEIQESLLTPRFYTTDFEEMEQLFNTEINKNLNEAEFEALLQEFKTDYNQTHFVRNKEFKEAADKLQGPLRQIFVEFLERSCTAEFSGFLLYKELGRRLKKTNPVVAEIFSLMSRDEARHAGFLNKGLSDFNLALDLGFLTKARKYTFFKPKFIFYATYLSEKIGYWRYITIYRHLKENPEFQCYPIFKYFENWCQDENRHGDFFSALMKAQPQFLNDWQAKLWSRFFCLSVYVTMYLNDWQRTNFYEGIGLNTKEFDMHVIIETNRTTARIFPAVLDVENPEFKRKLDRMVVSYEKLLAIGETDDASFIKTLKRIPLVTSLASEILAAYLMPPVESGSVDFAEFEPNLVY

SEQ ID NO: 25730 - protein, 416 aa, Staphylococcus aureus subsp. aureus Mu50
MNLNDTIFMFLCTLLVWLMTPGLSLFYGGLVQSKNALNTVMQSMAAIVLVTFVWITVGFTISFGNGNLWFGNWEYTFLNHVGFATQEDISPHIPFALFMLFQMMFCTIAISILSGSIAEKMKFIPYLLFVVIWTALVYSPVAHWVWGGGWINKLGVLDFAGGTVVHITSGVSGLVLAIMIGKGNKHSESTPHNLIITLIGGIFVWIGWYGFNVGSAFTFDNIAMLAFTNTVISASAGAIGWLILEYIFKKTTSLLGLLLGALAGLVVITPAAGYVTYLSATIMALIGGICCYIVINYIKVKLKYHDALDAFGIHGVGGIIGAVLTAVFQSKKANPDIENGFIYTGDIHIILVQILCVTAVVIFSIVMTFIIAKVIKLITPLSVTEQETNIGLDKIVHGEHAYFEGELNRFNKHIRY

SEQ ID NO: 25731 - protein, 363 aa, Debaryomyces hansenii CBS767
MSNSPAPDMRDVSMVDVSNTSDSITNDQKPQDVENEPPARRKSTMILTEENEAQADMDQGVKAKNNDNDQMHIDQTGVGEAQNAPAAPQETMPDPNVTLPIDIRWTQGGEKVYITGSFTGWRKMIGLAKQPDNSFLITLGLPIGTHRFRFVIDNELRFSDFLPTATDQMGNFVNYVEVTPEHVNSHLEKEQQKQLEEEELQQKQQAGRKSSVSSTRGRSDSMWGLTNDDDDMGNGYSRYHDGDSADSGNNSQAFISDIPPIFTDPKVMEQYYIAIDKQAKNQNGQQQAWLHPPQLPPHLENVILNNFNSMDRDNNSGALPIPNHVVLNHLATTSIKHNTLAVASIVRYKRKYVTQVLYAPLQQ

SEQ ID NO: 25732 - protein, 512 aa, Shewanella oneidensis MR-1
MSVNQNRSGKHALMWFRQDLRLTDNQAFTAACDWVRQHHAAKLKAIYIATPSQWHQHDIAPIQLDFIQRHVNLLAQGLVSLGVEFELIQLDSFRDIPAFLTSYCEEHSIGRVFAGQEPEINEQKRDQACVEAGIPLSLSDEHCLLPPGTVLNLSGDMYRVFTPFSRKWREVAAKQAILPLGVPAPLGSILSEPKPLFFKNIGSTYLAASKDIASSKKGFNQTAPNPLISSEQWAAGEGQAKRLLNQFIQQKVQDYKQDRDFPAIDGTSVISPYLAIGVLSPRQCVAALLQRFPEVIVDDTSPGRTWLNELIWREFYRHLLVAFPDLSKGNNFNRQADHVLWRNNQSEFLAWCEGKTGYPIVDAAMRQLNQTGWMHNRLRMVVASFLTKHLLIDWRWGERYFRQHLIDGDLAANNGGWQWSAGCGCDAQPYFRIFNPMSQSEKFDPDGRFIRKYLPELASWGVTRLHQPNQQKMPSLFEAPLFASQADYPNAIVEHNAARARALTVLGVLKKA

SEQ ID NO: 25733 - protein, 291 aa, Zea mays
MEDERNTQQHQGGEAQQDAADQVDVKDRGLLDSLLGRKKHDDDQEKKKQTDELATGMEKVTVSEPEKHGHKEEEHEVVGEKKEGLLAKLHRTSSSSSSSSDEEEEAIDENGEIIKRKKKKMGLKEKLKEKLPGHKDGHHTAAPSPAPAPVETHAHHQEEAHRPHVVPTPAPPPPPHVHQHDHGVVVQDDVKTGTPPHAPEEEKKGLLDKIKEKLPGGHNKKPEAAAAAAPAPPVHAPAPAPQAENVSSPDGKEKKGGLLGKIMDKIPGYHKSSAEEADHKADAAGEHRTSS

SEQ ID NO: 25734 - protein, 477 aa, Oryza sativa (japonica cultivar-group)
MNTNYSSLPLTSIELQSNQRTSEVANGVGYNGHAKISKQDSFLVDGENDDLPLIGDGPAGPPEGSGVPAAVFNLATSIIGAGIMALPATMKVLGVAVGLVSILVMGILSEVTIELLVRFAVYCRALSYGEVVHKALGRPASIVAQMCVIINNAGVLIVYLIIIGDVMSGSLKHIGVMDQLIGHGEWDNRRLLILVVLVIFLSPLCALEKIDSLSLSSAASVALAVVFVVVSCIIALVKVVEGKISMPRMGPDFSSRAAMLDLLVVIPIMTNAYICHFNVQPIYNELKEKTPHNMYKIGRITTVLCVVVYALTAVSGYLLFGEDTESDVLTNFDKDLGIRFSSILNFIVRIGYVIHLVLVFPVVHFSLRQTVDSLIFGELAPHSRKKMLTLTVVLLALIYLGSTMIPNIWVAFKFTGATTGLALGFIFPALIALRLDKEGKSLGKGERLLSIVMLGLAMVVSIIGVIGNVYSLRSKSA

SEQ ID NO: 25735 - protein, 446 aa, Striga hermonthica
MGRMMMIEQEGRGQSVSLSRIAVSDTHGEDSPYFAGWKAYDEDPYDESLNPFGVIQMGLAENQVSFDLVEQYLEKHSDATNIGANSGFRENALFQDYHGLLSFRQAMASFMERIRGGRANFDPERIVITAGATAASELLTFILADPGDAVPVPTPYYPGFDRDLRWRTGVNIIPVHCHSANNFAITPEALDSALKHARASNTNVRALLITNPSNPLGATLSRATLDLALDFVSRHDLHLVSDEIYSGSAFSPDEFVSVSQVLESRGYKDAERVHVVYSLSKDLGLPGFRVGTIYSYNDRVVQTARRMSSFTLISSQTQKLLASMLSDKEFTEKYVRINRERLRGRYEATVEGLKRAGIRCLGGNAGLFCWMDLSGELREGSREDELELWGKLLREVKVNVSPGSSCHCSEAGWFRVCFANMSERTLEVALGRIQAFMERRRRRIAN

SEQ ID NO: 25736 - protein, 424 aa, Striga hermonthica
LSTDMIEEWIDKNPKASITTREGVHAFRNIALYQDYHGLPEFRNGVAKFMSKARGGRVSFDPDRIVMGGGATGASELLMFCLADSGDGFLVPSPYYPGFDRDLRWRTGVQLLPVMCQSSNNFKITKEALEEAFDQAQKANIKVKGLMIANPSNPLGTTLDRPTLKSLVTFINERQIHLVCDEIYAATAFRAPEFISISEVIEEVECNRDLIHIVYSLSKDMGLPGFRVGIMYSYNDVVVDRGRKMSSFGLVSSQTQHLLATMLSDEEFTDKFMLENTRRLANRHEMFTKGLEEVGITCLESNAGLFCWMDLRHLLKEPTFEGEMGLWRVIITEVKLNVSPGMPFHCHEPGWFRVCFANMDDETLKVALTRIRVFVAKGSEVDAKVKKPWQMNLRLSFSSRIYDETMASSPRVMSPHSPLVRAWT

SEQ ID NO: 25737 - protein, 404 aa, Acinetobacter sp. ADP1
MFQHIPPYAGDPILSLMEQFNADSREAKVNLSIGLYYNEDSIVPQLDSVIEAQKRIEPRQNKVKPYLPMEGFKPYRDAIQTLLFGHNSPAVKAGRAVTIQTLGGSGALKVGADFLKNYFPDSEVWVSQPTWDNHIAIFNGAGFKTHFYPYFDAETRGLDFEGMLATLKQLPKHSIVLLHPCCHNPTGVDLVPAQWDQVIDVLKAGHLIPFLDIAYQGFGDGMEQDAYAIRALDQSGLNFIVSNSFSKIFSLYGERVGGLTFVCDDAEAAQCTFGQLKATVRRIYSSPPTTGAWLVDQVLNDAELSQQWQNEVKEMRERILKMRIILRDELTKALPDRDFNYLVDQKGMFSYTGLTADQVDTLREDYAIYLVRSGRICVAGLNMNNVYIVAKAMAEVLATEVTPA

SEQ ID NO: 25738 - protein, 475 aa, Anabaena variabilis ATCC 29413
MNLVWQRFTLSSLPVKQFLATSYLHRFLVGQLSSWRQTSFLLQWGDIIAAALLSLIYVLAPFVSSTLVGVLLIACVGFWLLLTLSDEPSSSNNFLVTPIHLLVLLYWGIAAVATALSPVKKAALTDLLTLTLYLLLFALCARVLRSPRLRSWIITLYLSASLVVSIYGMRQWRFGAPPLATWVDPESTLSKTTRVYSYLGNPNLLAGYLVPAVIFSLMAVFVWQGWARKSLAVTMLCVNTACLIFTYSRGGWIGLLVAVLVATALLVYWWSVQMPPFWRTWSLPILLGGLIGVLLIAVLFVEPVRFRVLSIFADRQDSSNNFRRNVWDAVFEMIRDRPIIGIGPGHNSFNKIYPLYQRPRYSALSAYSIFLEVAVEMGFVGLACFFWLIIVTINTAFVQLRRLRQSANVQGFWLMGALATLLGMLAHGTVDTIWFRPEVNTLWWLMVALIASYWTPLAANQSQELNLFNEEPASN

SEQ ID NO: 25739 - protein, 401 aa, Corynebacterium glutamicum
MSDRTAYLVSGKRTPVGRYGGALSSVRPDDLAALTITAVIEESGIDPSVVDEVILGNANGAGEENRNVARLAWLLAGYPDTVPGITVNRLCASGMSAIALATAMVESGQADVVVAGGVESMSRAPWVQEKPRSAFAKPGEIFDTSIGWRFVNPIFQEQEKTTFSMPETAEEVARVKGVSREEADVFAATSQARALAAISAGHFDSEIVPVEITDRKGNVTVVSQDEGPREGTTTQVLAKLRPVVRGGEVVTAGNSSSLNDGASAIIVASAEAVEKYGLTARAKVVGASNAGLAPEIMGMGPVPATKKLLKRTGWSVEDLDAVELNEAFATQSLACMRELELDPEKVNAWGGAIALGHPLGSSGSRITITLLNRLEKEGGSKGIATMCIGVGQGSAIAIERV

SEQ ID NO: 25740 - protein, 459 aa, Acinetobacter sp. ADP1
MQRKLSNRHLQLIAIGGAIGTGLFMGSGKTISLAGPSILYIYMIIGVMFFFLMRAMGELLLANLQYKSFVDMAHDLIGPGAGYYLGWTYWLGWVLVGIADLAAIINYLNFWLPDGTVFTPMGQALISAGCVLLVLGLNLLTVRLFGEIEFWFALIKILAIVGLIGVGGYMVFSHFQAPAGTVAAISNVWSEGGMFPKGVTGFLAGFQIAVFAFVGVELVGTTAAETRDPQKNLPKAINAIPVRIILFYVLALFVVMSVTPWNHISADKSPFVELFLHAGIPTSAIIMNLVVLSSVMSSMNSGVFSTSRMLFGLSRDGQAPQAFAHLSRRAVPANGLLFSCFFIMAGAALQYFVPNTMEAFTLASSLCVILFISVWGMIMVCYLRYRKLRPELHAQSTFKMPGGIWMSYIVLAFLMFTLVILALEPDTLKALYISPLWLILLALTYQFMYKPRLKRLMHN

SEQ ID NO: 25741 - protein, 485 aa, Lycopersicon esculentum
MGFEIAKTNSILSKLATNEEHGENSPYFDGWKAYDSDPFHPLKNPNGVIQMGLAENQLCLDLIEDWIKRNPKGSICSEGIKSFKAIANFQDYHGLPEFRKAIAKFMEKTRGGRVRFDPERVVMAGGATGANETIIFCLADPGDAFLVPSPYYPAFNRDLRWRTGVQLIPIHCESSNNFKITSKAVKEAYENAQKSNIKVKGLILTNPSNPLGTTLDKDTLKSVLSFTNQHNIHLVCDEIYAATVFDTPQFVSIAEILDEQEMTYCNKDLVHIVYSLSKDMGLPGFRVGIIYSFNDDVVNCARKMSSFGLVSTQTQYFLAAMLSDEKFVDNFLRESAMRLGKRHKHFTNGLEVVGIKCLKNNAGLFCWMDLRPLLRESTFDSEMSLWRVIINDVKLNVSPGSSFECQEPGWFRVCFANMDDGTVDIALARIRRFVGVEKSGDKSSSMEQKQQWKKNNLRLSFSKRMYDESVLSPLSSPIPPSPLVR

SEQ ID NO: 25742 - protein, 379 aa, Myxococcus fulvus
MSGNIHQEPERIRQASGVNDLTTQTAASWYVAMRSDALRGKPVAIKLFGQPLVAWRDGGGRPVVMERYCSHLGASLAKGKVVEGCIQCPFHNWRYDSTGACSHVPGHSTEVPRLEPIPPTARQSVYPVMERYGFVWVWYGTKAPLFPLPEMPEAESSESHQSLRFAYETTTSVLRIIENFYDAQHAAPVHQLPISAFELKLFDESSPPPGQEALARDGAWFGAGIDFHVDRYFGPLGVISRTLGLSMSRMQLHFDGYPGGCIMTVSLDGDVKYRLLQCVTPVDKEETVMHMLLAIKKGDGVVRSAANFILYGLQTWAAAGYDVAIWNSMKADGGGAFSKYDQLILKYRAFYRRWVNKVALENSGREKDSRADPRKGAHG

SEQ ID NO: 25743 - protein, 633 aa, Lactobacillus plantarum WCFS1
MCGLVGCLTDRRKVDNAAYDQVVREMTKMIVHRGPDDEGYFADDNITMGFRRLSIIDLAGGHQPLSYDNERYWLTFNGEIYNYVELREQLIQEGYTFKTDSDSEVILGMYAKYQAKLTTYLRGMFAFVIWDKQEKTLFAARDQFGIKPFYYAIAGDDFYYASESKAIYKILKDKHFDQEALQDYLTFQYVPETETLTKEIKMLAPGCSLTKQLGHAPQIKRYYHWEFHPVVRSEQDYATRLKETLIDSVKIHMRSDVPVGTFLSGGIDSSIVVAIAKQFNPNLKTISVGFERPGYSELDVAQETAAKLNVDNVQMTITPEAFMAAFPHFVWSMDDPLADPAAVPQYFLTKEAVKHVKVCLTGEGADELFGGYTIYHEPESLKAFRYTKPINGALQRIAAMMPAGMRGRSLLMRGTTPLEKRYVGNAFIFNETEKQQFMKHYNRDHSFQQTTRVFYDEAKHYDLISKMQFIDMHTWLNGDLLHNADRTALAHSLELRTPFVDREVFNLAAEIPANLRISHGTTKYILRKAVEDIVPAHVLYRKKLGFPVPIRLWLKDEMYDWAKNIIVTSQTDQYFDKTYFLKLLDDHRAGIRDNSRQLWTVLTFMMWHKLYVEADMLMDSVTANHLAEQVEIG

SEQ ID NO: 25744 - protein, 311 aa, Prochlorococcus marinus subsp. pastoris str. CCMP1986
MSIFLISSLVIFLTLLFSSLILWRINTRKYISSRTVATAYDSWTQDKLLERLWGEHIHLGFYPLNKNIDFREAKVQFVHELVSWSGLDKLPRGSRILDVGCGIGGSSRILANYYGFNVTGITISPAQVKRAKELTPYECKCNFKVMDALDLKFEEGIFDGVWSVEAGAHMNNKTKFADQMLRTLRPGGYLALADWNSRDLQKQPPSMIEKIILKQLLEQWVHPKFISINEFSSILINNKNSSGQVISSNWNSFTNPSWFDSIFEGMRRPNSILSLGPGAIIKSIREIPTILLMDWAFKKGLMEFGVYKCRG

SEQ ID NO: 25745 - protein, 122 aa, Brassica napus
GRVGAELRSMKAKDYLRARPKSRFARFCRIKFLQLIHPKMEEALFGYLHLRNQVSAGEFPETSLCSGFLEMAKRVWLLHCLAFSFEREAEIFRVPKGCRFSEVYMRSVAEEALEEAEPRVAF

SEQ ID NO: 25746 - protein, 308 aa, Brassica rapa subsp. chinensis
MDCSSSLDISLNLNTNAFDRSFPAKLPKEEEVKVSTSAGVERKWLVKDKSASELREELNRVYSENKKIKEMLETVCEKYYALHHHLEKLQSRKSPGIDHIEQPTKKRKQDPEDFLGFPNGKTENSSSNQDHHHQQYEQKNQLLSCKRPVTDSFNKVKVSTVYFPADFSDTSLTVKDGYQWRKYGQKVTRDNPSARAYFRCSFAPSCPVKKKVQRSAEDSSILVATYEGTHNHLGPNASEGDATSQGGSSTVTLDMVHVGQRLDLEKNERGTMQEVLVQQMASSLTNDSNFTAALAAAITGRLMEQSRT

SEQ ID NO: 25747 - protein, 446 aa, Brassica napus
  misc_feature (232)..(232): Xaa can be any naturally occurring amino acid
  unsure (1)..(446): unsure at all Xaa locations
MREILHIQGGQCGNQIGAKFWEVICDEHGIDHTGQYVGDSPLQLERIDVYFNEASGGKYVPRAVLMDLEPGTMDSLRSGPYGQIFRPDNFVFGQSGAGNNWAKGHYTEGAELIDSVLDVVRKEAENSDCLQGFQVCHSLGGGTGSGMGTLLISKIREEYPDRMMMTFSVFPSPKVSDTVVEPYNATLSVHQLVENADECMVLDNEALYDICFRTLKLSNPSFGDLNHLISAXMSGVTCCLRFPGQLNSDLRKLAVNLIPFPRLHFFMVGFAPLTSRGSQQYRALTVPELTQQMWDAKNMMCAADPRHGRYLTASAVFRGKMSTKEVDEQMMNVQNKNSSYFVEWIPNNVKSSVCDIAPKGLKMASTFIGNSTSIQEMFRRVSEQFTAMFRRKAFLHWYTGEGMDEMEFTEAESNMNDLVAEYQQYQDATAGEEEYEEDEEEYEEEA

SEQ ID NO: 25748 - protein, 457 aa, Leifsonia xyli subsp. xyli str. CTCB07
MSEQNFDIVVLGGGSGGYAAALRAVELGFTVGMIEKDKVGGTCLHRGCVPTKALLHAAEVADYSRESGKYGIVTQMQGVDINGVTEYRQGIVTKKYKGLQGLVKARGITVIEGEGRLVSPTTVQVGEDTIVGKNIILATGSFSRSLPGLEIGGRVITSEQALELDFVPQKVAVLGGGVIGVEFASVWKSFGADVTVIEALPHLVPNEDESISKSLERAFRRRGIDYRLGVRFAGVSQHENGVVVSLEDGSTVEEELLLVAVGRGPLTQGLGFEEAGITLDRGFVITDERLRTSVPGVYAVGDIVPGLQLAHRGFQQGIFVAEEIAGLNPVVIPDVNIPKVTYCDPEVASIGLTEIKAVEQYGADRVTSYDYSLAGNAKSEIIGTNGSVKVVRVNDGPVVGVHMIGARVGELIGEAQLAVNWEAYPEDIAPLIHAHPTQNESLGEAFLYLSGKPLHTL

SEQ ID NO: 25749 - protein, 329 aa, Thermococcus kodakarensis KOD1
MRKIRLGIVGCGIAAKTLHIPALKELSDIFEVAAVTSRTKEHAVECAELVGGAEVFESYEELLRSGEVDAVDLALPVELNLPFIKKAVENGVHVICEKPISTDVKTGKEIVKIANGSDVVVYIAENFRHVPAFWKAKELIDAGKIGEPVFTSWHVWVGMDEGNPYVHTGWRKSPKHVGGFLSDGGVHHVAAMRLIFGDVAWISAAVRDLSPLLGGLDFMSSLLEFESGVVGTYTAGYSIKGKDRFEIVGTDGRMLVEWDRILLNGEEIGVNPENSYKLEFEDFYRVVMGERENVLGSPLEALKDLAVIEAAVKSNGHRIDLKSLLDWSG

SEQ ID NO: 25750 - protein, 519 aa, Lycopersicon esculentum
QGELFLKTRAEELDKEMGLIIRQEETGRHVRMLTHEIRSTLDRHTTLKTTLVELGRTLDLAECALWMPCQGGLTLQLSHNLNNLIPLGSTVPINLPIINEIFSSPEAIQIPHTNPLARMRNTVGRYIPPEVVAVRVPLLHLSNFTNDWAELSTRSYAVMVLVLPMNGLRKWREHELELVQVVADQVAVALSHAAILEDSMRAHDQLMEQNIALDVARQEAEMAIRARNDFLAVMNHEMRTPMHAVIALCSLLLETDLTPEQRVMIETILKSSNLLATLINDVLDLSRLEDGILELENGTFNLHGILREAVNLIKPIASLKKLSITLALALDLPILAVGDAKRLIQTLLNVAGNAVKFTKEGHISIEASVAKPEYARDCHPPEMFPMPSDGQFYLRVQVRDTGCGISPQDIPLVFTKFAESRPTSNRSTGGEGLGLAICRRFIQLMKGNIWIESEGPGKGTTVTFVVKLGICHHPNALPLLPMPPRGRLNKGSDDLFRYRQFRGDDGGMSVNAQRYQRSL

SEQ ID NO: 25751 - protein, 370 aa, Burkholderia pyrrocinia
MNDVQLDQARTEEHPPGVYDATTRLAASWYVAMRSDDLKDKPTELMLFGRPCVAWRGATGRAVVMDRHCSHLGANLADGRVEDGCIQCPFHHWRYDEQGQCVHIPGHSSAVSRLEPVPRGARQPTLVTAERYGYVWVWYGSPQPLHPLPEIAAADVDNGDFMHLHFAFETTTAVLRIVENFYDAQHANPVHALPISAFELKLFDDWRQWPEVESLARAGAWFGAGIDFTVDRYFGPLGMLSRALGLSMSQMNLHFDGYPGGCVMTVALDGDFKYKLLQCVTPVSDGKNVMHMLISIKKVGGALRRATDYVLFGLQTRQAAGYDVKIWNGMKPDGGGAYSKYDKLVLKYRAFYRDWVDRVAEATARPRRRE

SEQ ID NO: 25752 - protein, 372 aa, Kluyveromyces lactis NRRL Y-1140
MAATSDIVEKTHILQKYLELDQRGAIIAEYVWIDSEGGLRSKGRTLNKKVTSVDSLPEWNFDGSSTGQAPGHDSDIYLKPVAFYPDPFRRGDNIVVLAECWNNDGTPNKFNHRHEAAKLFEAHKDAEMWFGLEQEYTLFDQYDQVYGWPKGGFPAPQGPYYCGVGAGKVFARDVIEAHYRACLYAGVNISGINAEVMPSQWEFQVGPCEGIAMADQLWIARYFLHRVAEEFGVKVSLHPKPLKGDWNGAGCHTNVSTKLMRAPGGMKYIEDAIEKLSKRHNEHIKLYGADNEQRLTGRHETASMSTFSSGVANRGASIRIPRSVNKEGYGYFEDRRPASNIDPYLVTGIMCETVCGAIENANMTKEYERESL

SEQ ID NO: 25753 - protein, 479 aa, Exiguobacterium sp. 255-15
MNGKFLINGQWLDQGRERTDVKNPATGEVVGSVPNGTKSDVNDAVEAAHNAFPDWSKRTVYERAALLEKLYAKMLEKKDELARLMTLEMGKPLAESEGEVEYAANFVKWFAEEGKRAYGRIIPSHDATKRLHVIKQPVGVVAAITPWNFPAAMITRKLAPALVAGCTFVLKPPTATPLTALRLLELCQEVGIPDGVVNAVTGSGKDLGESLATHPHVAKITFTGSTEVGRTLMAQGAETIKAMSLELGGHAPILVFDDCDLDLAVRETIKSKFRNGGQTCVCGNRIYVSDSIYDEFVEKLGQETAKLKTGNGLDQETKIGPMINKAGYDKVKKHVDDATSAGARIVTGGSGQTDDDNDVYYYEATVLADVTPQMLIMNEETFGPVAPVQRVSSDEEAVHYANQTPFGLASYVFTNNYARAFKAIEHLDYGIVGWNDGVPSAAQAPFGGMKQSGVGREGGSEGLEAYLETKYVSIGGLDQ

SEQ ID NO: 25754 - protein, 566 aa, Exiguobacterium sp. 255-15
MTQMIPRPETAQKTLTRAWWKEAVAYQIYPRSFYDANNDGIGDIPGIIAKLDYLKDLGVDVLWICPMFKSPNDDNGYDISDYEDIMDEFGTMADFDLLMEEAHKRDIKVLLDLVVNHTSDEHPWFLESRSSKDNDKRDWYIWKDAVNGGEPNNWESIFGGSAWEYDEKTEQYFLHVFSRRQPDLNWRNKDMRQAVYTMINWWLDKGVDGFRIDAISHINKDQSYADLPNPLGMPHVPSFEMHMNVEGIHEYLEELKNETFSKYDIMTVGEANGVTPEEADLWVGEENGKMNMVFQFEHMDLWRADAEKGVDVVKLKQVLTKWQKGLEETGWNALYLENHDKVRSVSLWGDEGQYWKQSAKSLAMMYFFMQGTPFIYQGQEIGMTNVQFPDISDYDDVATKNMYNMQLASGKTHEEIMEVIWNSSRDNSRTPMQWTNEQNGGFSEQSPWFGVNPNFADINVAAQQADEDSILNFYKRMIQIRKMEETLIYGEYDLILPEDTKVYGYTRTLGNEQFLIVTNLKDEVAEVDTDIILHSDNIMLANYETTYHEGTELTLQPFEARLYRVR

SEQ ID NO: 25755 - protein, 427 aa, Oryza sativa
MQAPPLASSPSPAWTAILPAPARLCCSRRGALRLEAKAAWRPAARGPRVPAKGAVLASEVVGPSPLLDARNEQELILHIRKEVEKGKLPADVAANLEELYYNYKDAVMQSRDPNAHDIVLSNMVALFDCVLLDVENPFTFPPYHKAVREPFDYYMFGQNYIRPLVDYRNSYVGNISIFQDMEQKLQQGHNVVLMSNHQTEADPAIIALLLERSNPWISENIVYVAGDRVVTDPLCKPFSMGRNLICVYSKKHMNDFPELVDMKRRANTRSLKEMALLLRGGSQIIWIAPSGGRDRPDPLTGEWHPAPFDASAVDNMRRLLEHSGVPGHIYPLSLLCYEVMPPPQKVEKEIGEQRVISFHGVGLSVTEEIKYSDITVHTQNVDECREKFSESLYNSVVDQYNALKSAIFRGRGADSSDSAISLSQPWR

SEQ ID NO: 25756 - protein, 1349 aa, Solibacter usitatus Ellin6076
MFDTVQRLSPRQETGILVACLAVAAGVVQLRAEDRFAWRSWGVREGLTETYSFALSVTPGQGAFIRHGAVPSMSVFDGIGVTRLPDPRGGGQPDWPSTRRVYPAPSGTPAGTPWTSTPKALLQYKEGKWRVRYTAPAGQQLMAAVPAGRRVLVLLDDSLREFDPESGTWRELRSVRNSRVGPFRGMCSGGVGEWYITAEQGLARLRLERDGGAFEWTEINSRASGLRSFNYPIAGSGEVFAQATSARDPRRVIVRWSGGELEVVYAAQSDNLRGWRAGDGSLWILEGGDLFFLLNGHRYPVERTGVLSGNIFDVYSEAGNAFWVATSEGITRHTPSLWQAPAGLAGFDLPVHSIAEDRQGRIWMSATEYLLEQVGDGWKFHKLPFGFRTHTVQTESLAPLPDGRVLVKVVRADRSDAVLALDPVSGRFSELAQPEGRRITLLERRPAGGVWAGSEVDGKPGFRLEFYDGRDFRKVLELGSEWHGANLRCVLERDGEIWLGGSAGGGLYRGGRFSEPLQAANGYPGTAVFVLGLTPGGELVAGGRDQIFKFDDRSWTVVRQDLDRIRQFSHTRDGALWVASASGVHRYKDGSWITHQAEEGLPSVIAYTVFEDSRGRLWAGTTRGVAMYHPEADPDPPRTTLDPGANLTEASLSGEARITFGGIDKWSLTPADRLLFSYRLDGGPWSPFEDVDLATYHGLRAGTHHFDVRSMDRNGNIDRAGQSFAFAVPWPWFRQLGFLALLSVGSCAIIVLACVAAIQYRRRGSLILELNRAKEQAEAASRHKTEFLANMSHEIRTPMNGVIGMTGLLLDTELTTEQRDYAGTVRRSGESLLTLINDILDFSKVEAGKLAIEASAFDLRSTIEEVDEMLAPKIENRKLDLVLQYPVGAPRHFVGDAGRIRQVVTNLVGNAIKFTGEGSIVIEVVCESQDEARAVMRVAIHDTGPGIPSEKIGSLFEKFSQLDGSTTRKYGGTGLGLAISKQLVSLMGGSMAVSSRLGEGSTFSFTLPLPLDANSPVEPLTAAGLRGLRALIVDDNEINRRVLHEQIIGWGMRNGSFAAGEEALVALRAAHAAGDPYHFAILDYRMPGMDGVEVARAIKADDELRETVVVLLTSVGQWSEARQKESGIVDASLVKPVRQSQLLNILSSCWVRTNSITAAPAVRPEPPVNEMRAALALRFGGVPVRVLVAEDNVVNQKVSARMLDKLGIRADVAADGREAVALFGLVPYDLIFMDCQMPEMDGYAATREIRRREGPGRRVPIAAMTAEVLGGCRELCLAAGMDDHIPKPVKMEVLFETLRRWIPARNCPEPGDSAMLTSGCAASRDGGNVSPDRPAGAAPLVRAGPPAAP

SEQ ID NO: 25757 - protein, 111 aa, Brassica napus
MSSGTVRRVSRQDIQLVQNLIERCLQLYMNQKEVVETLLEQAKIEPGFTELVWQKLEEENREFFNAYYLRLMVKHQIMEFNKLLEQQVRHMQQMHPSALTSVQNTNGSHIQ

SEQ ID NO: 25758 - protein, 499 aa, Arabidopsis thaliana
MARKMLVDGEIDKVAADEANATHYDFDLFVIGAGSGGVRAARFSANHGAKVGICELPFHPISSEEIGGVGGTCVIRGCVPKKILVYGATYGGELEDAKNYGWEINEKVDFTWKKLLQKKTDEILRLNNIYKRLLANAAVKLYEGEGRVVGPNEVEVRQIDGTKISYTAKHILIATGSRAQKPNIPGHELAITSDEALSLEEFPKRAIVLGGGYIAVEFASIWRGMGATVDLFFRKELPLRGFDDEMRALVARNLEGRGVNLHPQTSLTQLTKTDQGIKVISSHGEEFVADVVLFATGRSPNTKRLNLEAVGVELDQAGAVKVDEYSRTNIPSIWAVGDATNRINLTPVALMEATCFANTAFGGKPTKAEYSNVACAVFCIPPLAVVGLSEEEAVEQATGDILVFTSGFNPMKNTISGRQEKTLMKLIVDEKSDKVIGASMCGPDAAEIMQGIAIALKCGATKAQFDSTVGIHPSSAEEFVTMRSVTRRIAHKPKPKTNL

SEQ ID NO: 25759 - protein, 144 aa, Zea mays
MAEQQQPQEMDVDRTGGLELPPGFRFHPSDFEIVSHYLTNKVHDRDYSCIAIADADLNKTEPWDLPKVAKMGEKEWYFFYQKDRKYPTGLRANRATEAGYWKATGKDKEVYNPFAAEGLLLVGMKKTLVFYKGRAPRGDKTNWV

SEQ ID NO: 25760 - protein, 516 aa, Coprinopsis cinerea
MQLLAFVLAALPLARAAIGPVGNLVIANANVSPDGFVRSAVLAGATGTSLEHPGPVIVGQKGDTFHINVIDDLTDPTMLRTTSIHWHGFLQEGTAWADGPAGVTQCPIAPGHSFLYKFQAKNQAGTFWYHSHHMSQYCDGLRGVMVVYDPLDPHRHLYDVDNENTIITLADWYHDPAPSAGLVPTPWSTLINGKGRYPGGPVVPLAVIHVSRGKRYRFRLVSLSCDPNYVFSIDGHTMTVIEVDGVNHEPLVVDHIQIFAGQRYSFVLNANRPVNNYWVRANPNLGSVGFGGGINSAILRYVGAPAVDPTTSQLPFSNPLLETNLHPLVNPAAPGGPSPGDVDVAINLDILFDVSILKFTVNGATFDEPPVPVLLQILSGAHTASSLLPSGSVYTLPPNKVIELTIPGGGIGAPHPIHLHGHTFKVVRSAGSSTYNFVNPVERDVVNVGQAGDNVTIRFVTDNAGPWILHCHIDWHLVLGLSVVFAEDVPTIDSSVQPPAWHDLCPIYDALPPGTR

SEQ ID NO: 25761 - protein, 77 aa, Zea mays
  misc_feature (26)..(26): Xaa can be any naturally occurring amino acid
  unsure (1)..(77): unsure at all Xaa locations
ILAEKGVVVLPDIYANSGGVVVSYFXEWVQNIQGFMWAEEKVDDELEKDMSSAFQHMKAMCKSLVLPKCAVTLELRV

SEQ ID NO: 25762 - protein, 376 aa, Zea mays
MSRAQLVRAYVFHGVGVGAWQIDISDRKKGDEPNPSIAVIKSGTAPLHPHTLGLGLALAPHSSSSNNNLHCRNPPRGETGGGKRTIQKQPGLLATASVARPLAMGRSPCCEKAHTNKGAWTKEEDERLVAHIRAHGEGCWRSLPKAAGLLRCGKSCRLRWINYLRPDLKRGNFTEEEDELIVKLHSVLGNKWSLIAGRLPGRTDNEIKNYWNTHIRRKLLSRGIDPVTHRPVTEHHASNITISFETEVAAAARDDKKGAVFRLEEEEERNKATMVVGRDRQSQSQSHSHPAGEWGQGKRPLKCPDLNLDLCISPPCQEEEEMEEAAMRVRPAVKREAGLCFGCSLGLPRTADCKCSSSSFLGLRTAMLDFRSLEMK

SEQ ID NO: 25763 - protein, 496 aa, Chlamydia trachomatis
MFYSLIPVSRFMIARTKIICTIGPATNTPEMLEKLLDAGMNVARLNFSHGTHESHGRTIAILKELREKRQVPLAIMLDTKGPEIRLGQVESPIKVQPGDRLTLVSKEILGSKESALLFIQVVYSPYVRERAPVLIDDGYIQAVVVNAQEHMVEIEFQNSGEIKSNKSLSIKDIDVALPFMTEKDIADLKFGVEQELDLIAASFVRCNEDIDSMRKVLESFGRPNMPIIAKIENHLGVQNFQEIARAADGIMIARGDLGIELSIVEVPGLQKFMARASRETGRFCITATQMLESMIRNPLPTRAEVSDVANAIYDGTSAVMLSGETASGAHPVHAVKTMRSIIQETEKTFDYHAFFQLNDKNSALKVSPYLEANWVFWIQIAEKASAKAIIVYTQTGGSPMFLSKYRPYLPIIAVTPNRNVYYRLAVEWGVYPMLTLESNRTVWRHQACVYGVEKGILSNYDKILVFSRGAGMQDTNNLTLTTVHDALSPSLDEIVP

SEQ ID NO: 25764 - protein, 315 aa, Arabidopsis thaliana
MDVTDDEEIHQDRHSYASVSKHHHTNNNTTNVNAAASGLLPTTTSVHELLECPVCTNSMYPPIHQCHNGHTLCSTCKARVHNRCPTCRQELGDIRCLALEKVAESLELPCKHMSLGCPEIFPYYSKLKHETVCNFRPYSCPYAGSECSVTGDIPFLVAHLRDDHKVDMHSGCTFNHRYVKSNPREVENATWMLTVFHCFGQYFCLHFEAFQLGMAPVYMAFLRFMGDETEARNYNYSLEVGGYGRKLIWEGTPRSVRDSHRKVRDSHDGLIIQRNMALFFSGGDRKELKLRVTGRIWKEQQQSGEGGGACIPNLS

SEQ ID NO: 25765 - protein, 605 aa, Dianthus caryophyllus
MDTKIGSLDTCPPQNSDICCPNKTTTTATHLHAPPTTHAPPESTLGRHLARRLVQIGVNDVFSVPGDFNLTLLDHLLAEPGLNLVGCCNELNAGYAADGYARSRGVGACVVTFTVGGLSVLNAIAGAYSENLPVICIVGGPNSNDYGTNRVLHHTIGLPDFSQEMRCFQTVTCYQAVVNNLEDAHEQIDTAISTALKESKPVYISVSCNLPAIPHPTFSREPVPFSLSPRMSNKMGLEAAVEAAAEFLNKAVKPVMVAGPKLRVAKACNAFVELVDASGYATAVMPSAKGLVPEHHSHFIGTYWGAVSTAFCAEIVESADAYIFAGPIFNDYSSVGYSLLLKKEKAILVQPDRVVIGNGPAFGCVLMKDFLTELAKKIKKNTTAFENYTRIFVPEGQPLKCEPKEPLRVNVLFQHIQKMLSSDTAVIAETGDSWFNCQKLKLPKGCGYEFQMQYGSIGWSVGATLGYAQAVPEKRVLAFIGDGSFQVTAQDVSTMLRCGQKTIIFLINNGGYTIEVEIHDGPYNVIKNWNYTALIDAIHNGEGKCWTAKVFCEEELVNAIKTATGPKADCLCFIEVIVHKDDTSKELLEWGSRVSAANSRPPNPQ

SEQ ID NO: 25766 - protein, 408 aa, Pseudomonas syringae pv. phaseolicola 1448A
MKHLIGGISSGGRALPEIDGQAFNVARSNGPWLWDSKGVRYVDTAMGFGATMLGHAQMEVMAAASAAMLNGPMPSFAHADEEAAAAALATFTGDLSQVIFLNTGSEAVHLACRTARVATGRQRIVKFAAGYDGWYDSVAFGNAGQASALMSGTTRPERDGMLLLRYNDFEDAEQLFRDYSDIAALVVEPVLANAGCIEPAPGYLKHLSDLAHRNGALVILDEVLMGLRLCPGLTGTLLGAEPDLATVGKAIGSGIPVAALVGKPEYMRLFEQGKIVRAGTYSGAPPACAAVLATLKQLATANYAALLTRGDQLRAQLVAAFASKGMAVSSTGYGSVFTLWPSATPPRTYADAAHVADSEWTLALHKALRRERVMSMPFAFGRTYLTFAHQEKALQAVLEGYKAAIASL

SEQ ID NO: 25767 - protein, 336 aa, Arabidopsis thaliana
MDLASNLGGKIDKSDVLTAVEKYEQYHVFHGGNEEERKANYTDMVNKYYDLATSFYEYGWGESFHFAQRWKGESLRESIKRHEHFLALQLGIQPGQKVLDVGCGIGGPLREIARFSNSAVTGLNNNEYQITRGKELNRLAGVDKTCNFVKADFMKMPFPENNFDAVYAIEATCHAPDAYGCYKEIYRVLKPGQCFAAYEWCMTDAFDPDNAEHQKIKGEIEIGDGLPDIRLTTKCLEALKQAGFEVIWEKDLAKDSPVPWYLPLDKNHFSLSSFRLTAVGRFITKNMVKILEYIRLAPQGSQRVSNFLEQAAEGLVDGGRREIFTPMYFFLARKPE

SEQ ID NO: 25768 - protein, 415 aa, Malus x domestica
MIQETRRLADEYEISEILGRGGFSVVRKGISRKSSSSSDKTDVAIKTLKRPFAPSNPPPLPPHARRNDQNSFAAAAFQTRKQVSISNVLLTNEILVMRKIVENVSPHPNVIDLYDVYEDENGVHLVLELCSGGELFDRIVKQERYSEVGAAAVVRQIAQGLAALHRSNIVHRDLKPENCLFLDNTVDSPLKIMDFGLSSVEEFTDPVVGLFGSIDYVSPEALSQGQVTSKSDMWALGVILYILLSGYPPFIAQSNRQKQQMIMAGEFSFYEKTWKGFLCQPKQLISSLLKVDPDKRPSAQELLDHPWVVGLSAREDQMDAEIVSRLQSFNARRKLRAAAIASVWTSSIFLRTKKLKSLLGSYDLKPDEIKNLSSHFKKICVKGDNATLSEFRLSCKRLIQLRLVSMSLRAEPARL

SEQ ID NO: 25769 - protein, 345 aa, Lactobacillus plantarum WCFS1
MQKQLVVVTGGSGFIAIHIIRQLLQQGYAVRTTVRSLAKAPVIKEMLTNGGITDLSALEIVVADLAHDEHWSEAMAGATYAIDVASPTPKLNFKNKAEMIRPAVDGVRRVLTASRDAGVKRVVLTSAYGAIFAGHKNRTTPYTEADWSDLNWKAIHPYQESKTRAELAAWDFINHEGRGLELTTVNPVAVMGPVLSAKYSHSNIQIQQFLEGQVKAVPNVDSGYVDVRDVASLHLLAMTAPQANGERFLATTGETLSMLDVANVLRQAFPAFASQLPTKTIPNAAVKLAAKARPELRMVASLVGTYAETSNHKAQTLLDWHPRPAAESIIATAQSMIDLGIVTKP

SEQ ID NO: 25770 - protein, 397 aa, Idiomarina loihiensis L2TR
MKITLSEPGAICALGHNCESLWQAALAGDQAGLKPAAFNTNDGTSLFAGSVADNKLPDIGSLPAAMRTRNNQLVAAALQQIEEPLLALIDRLGSDRVAVVLGTSTSGIASGESALAYDESEGGLPDTFYYAMQEMLAPAECIAALTGITGPVYSISTACSSSARVFMSARSLLRLGVVDAVVVGGVDSLCRLTLNGFKALESTSEGRCNPFSANRDGITIGEAAGLFIATREEDNLQPSEVTLTGACATSDAHHMSAPHPQGRGALAAIQGALTDAGITAQQLGYINLHGTATPLNDLMEAYAVNALGAGNVPASSTKALTGHTLGAAGAIEAVFCWLALAKQDGLPKHAWDGVKDSDLADIHLYQGGSLQYPIEHCLSNSFAFGGNNVSLVFSRGK

SEQ ID NO: 25771 - protein, 347 aa, Exiguobacterium sp. 255-15
MKAVQVNGYGGVEQLEVVERPVPTPRAGEVLVEVKACGINNTEIWMREGAYGTDDKSGWKPEGVQFPRVPGSDISGRIIEVGSGVDPSRVGQDVVLFPFTSSGADGTEHISEDMSFIGSEYDGGYAEYVVWPATLCYDMPLDDYVKSAVFSVSGLTAWHMNEQLQLQPGQTVLVTGASGGVGSLNVQIASRVFGATVIAVVGDMKIEQELKRLGAKYVVSYRSDQLTEDILAVNSGPVDAVLDVVGDALFKTALVVLKNGGKFCISGSAGGQQTNLDFRMLYLKHLTFYGSVLGTRDEFGRMLEAIADGKLEPVIDRTFPLEEAAAAQSYFKETGKLGKIVLILKAD

SEQ ID NO: 25772 - protein, 412 aa, Idiomarina loihiensis L2TR
MKRVVVTGMGCLTAFGDNWQSFRSQLESGKNAVVSMPEWERFDGLNTRLAAPIRPAFKKPSHYSRKAVRSMSTVSLMATRATELALTDAGLLEHPCISDGSCGVAYGSSTGDTEQMKIFGNMLESGDMTGLNATTYIKSMGHTTAVNLGVFYNVKGRVHTTSSACTSASQGLGYAYEAIRYGHQKVMIAGGAEALCPSEAVVFDTLFATSTRNDEPQLTPRPFDKNRDGLVIGEGAGTFILEELDHALERGAHIYAELVGFGTNSDGAHVTQPTADTMAIAMKLALQQAQLEPEQVGYVNAHGTATDRGDVAESLATASVFKRSVPISSLKSYLGHTLGGCGTIEAWASINMMRESWFAPTLNLTDIDPECGDLDYITEQARELDTDYVMTNNFAFGGINTSLIFKRWNNSN

SEQ ID NO: 25773 - protein, 401 aa, Glycine max
MAGICCGVVGEGDTPAPLEPTTRPSRRRSLDILPLKYIADMAVPPSDGSRKRPKLDLRDRDNVVQNCDESTGHKVVKKEAKVEIHDNISETKNVTVADASEVEDSPKFGVTSVCGRRRDMEDSVSVRPSFTQGFHYFGVFDGHGCSHVATMCKERLHEIVNEEIDSARENLEWKLTMENGFARMDDEVNRRSQSNQTFTCRCELQTPHCDAVGSTAVVAIVTPDKLVVSNCGDSRAVLCRKGVAIPLSSDHKPDRPDELLRVQSKGGRVIYWDGPRVLGVLAMSRAIGDNYLKPYVISEPEVTVTERTEEDECLILASDGLWDVVSNETACGVVRMCLKAQKPPSPPGSPGSDVAADGSDRACSDASILLTKLALARHSSDNVSVVVVDLRRDQRQSSNSN

SEQ ID NO: 25774 - protein, 199 aa, Guillardia theta
MIYNENDIKKLLICNVHIGLSACTQLMKVYVWKKRSDGIYIINILKTIQKIELAARAIISIEHPKHIIAVSSNNIHQTAIIKFSQFIQCNCIVDKWIPGKLTNKTSKLFEEPRLLIISDPLLDKQALLEASYVNIPVISVCNTDSFLSYIDIAIPGNNKDRYSFALIIWLLTKKILIFKGELTKNCEWNVSVESFIEKF

SEQ ID NO: 25775 - protein, 133 aa, Zea mays
MAAGRELVVSFGEMLIDFVPTVAGVSLAEAPAFLKAPGGAPANVAIAVSRLGGGAAFVGKLGDDEFGRMLAAILRDNGVDDGGVVFDSGARTALAFVTLRADGEREFMFYRNPSADMLLTADELNVELIKRVS

SEQ ID NO: 25776 - protein, 394 aa, Burkholderia sp. 383
MKEAVIVSTARTPIGRAYRGAFNATKSPSLMGHAIRHAVARAGVEPGRIEDVIVGTVLAAGTAGSNIARNALFAAGLPHTVAAQSIDRQCASGLMAIATGAKQIVVDGMDVVVAGGQENISAIQDRYYDWVYAEKDAEVLRHAPHAYMPMLETAECVSTRYGITREQQDAYALASQKRTAAAQRDGLFDDEIVPITVSTRVTDKQTGAIDVREITLSKDEGNRPDTTLPGLQSLKPVLAGGAVTAGNASQLSDGASACVLMDARSAERAGLAPLGIYRGMAVAGTAPEEMGIGPVYAIPKLLKQHGLTIDDIGLWELNEAFACQVLYCRDRLGIDPARYNVNGGAIAIGHPYGMTGSRLVGHALLEGRRRRVKHVVVAMCVGGGMGAAALFEVG

SEQ ID NO: 25777 - protein, 807 aa, Arabidopsis thaliana
  misc_feature (47)..(47): Xaa can be any naturally occurring amino acid
  misc_feature (274)..(274): Xaa can be any naturally occurring amino acid
  misc_feature (321)..(321): Xaa can be any naturally occurring amino acid
  misc_feature (366)..(366): Xaa can be any naturally occurring amino acid
  misc_feature (455)..(455): Xaa can be any naturally occurring amino acid
  misc_feature (507)..(507): Xaa can be any naturally occurring amino acid
  misc_feature (544)..(544): Xaa can be any naturally occurring amino acid
  misc_feature (562)..(562): Xaa can be any naturally occurring amino acid
  misc_feature (573)..(573): Xaa can be any naturally occurring amino acid
  misc_feature (607)..(607): Xaa can be any naturally occurring amino acid
  misc_feature (741)..(741): Xaa can be any naturally occurring amino acid
  misc_feature (757)..(757): Xaa can be any naturally occurring amino acid
  misc_feature (768)..(768): Xaa can be any naturally occurring amino acid
  unsure (1)..(807): unsure at all Xaa locations
MNFGSLFDNTPGGGSTGARLLSGLSYGNHTAATNVLPGGAMAQAAAXAASLFSPPLTKSVYASSGLSLALEQPERGTNRGEASMRNNNNVGGGGDTFDGSMNRRSREEEHESRSGSDNVEGISGEDQDAADKPPRKKRYHRHTPQQIQELESMFKECPHPDEKQRLELSKRLCLETRQVKFWFQNRRTQMKTQLERHENALLRQENDKLRAENMSIREAMRNPICTNCGGPAMLGDVYLEEHNLRIENARLKDEIDSVCNITGKFFGHHYNNNXNSSLEIVVGKKKKGGNLDLNNDLGGGGGCLPPQKKKSTVINGIDKKXVLLELDLTDMDELVKIDKSEEPLWVKRLEGERDEINKDEYMRKFXSNKQTGLDNEDYRKYGMVIINRLDIVENLMDSNRWKEMLPCNVERAKTTDVISGGMDGKINGELKMMNEELKVLYQLVQVRNVNFLRFXKKKEEGVWAVVDVSPHPVRPNSGGAPVIRRLPSGCVVQDVSNGYSKVNQLFXPQSVTYQIHQLYRPLLRSGLGFGSQRWLATLQRQCEXLAILISSSVTSHGNTSIXTPGGRKSILKXAQRIPFNFCSGFSAPSAHIWGKLTVGIFAPSVRXMPLKSVREPRRSLRGIVLSAATSIWLPAAPQRLYDFLRNARMRCEWDILSNGSPMQKMAHITKGKDQGIYSLRSNAMNANKNSMLILQETCIDASGALVVYAPEEIPAMHVVMNDVDSSYKAHLPSGFAVIPDXGGIDNSGSGNGDQRPXVGGGSLKTVAXQILVNNLPTAKLTVESVETVNNLISCTVQKIRAALQCES

SEQ ID NO: 25778 - protein, 341 aa, Chlamydia trachomatis
MTTWDLAMRIVINGFGRIGRLVLRQILKRNSPIEVVAINDLVAGDLLTYLFKYDSTHGSFAPQATFSDGCLVMGERKIRFLAEKDVQKLPWKDLDVDVVVESTGLFVNRDDAAKHLDSGAKRVLITAPAKGDVPTFVMGVNHQQFDPADVIISNASCTTNCLAPLAKVLLDNFGIEEGLMTTVHAATATQSVVDGPSRKDWRGGRGAFQNIIPASTGAAKAVGLCLPELKGKLTGMAFRVPVADVSVVDLTVKLSSATTYEAICEAVKHAANTSMKNIMYYTEEAVVSSDFIGCEYSSIFDAQAGVALNDRFFKLVAWYDNEIGYATRIVDLLEYVQENSK

SEQ ID NO: 25779 - protein, 391 aa, Malus x domestica
PFTSHASALLETVRRLATALPNTLFSFFSTSKSNSSLFSNNSINNMPRNIKVYDVADGVPEGYVFVGKPQEDIELFMNAAPENIRRSLDASVADIGKQISCLITDAFLWFGVHLADELGAPWVTFWISGLKSLSVHVHTDLIRDTIGTQGITGRENDLIVDKNVNIQGLSNVRIKDLAEGVIFGNLDSVISGMLLQMGRLLPRATAVFMNGFEELELPVPNDLKSKVNKLLNVGPSNVASPLPPLPPSDACLSWLDKQEAPSSVVYISFGTVASPAEKEQMAIAEALEATGAPFLWSIKDSCKTPLLNEFLTKTLSKLNGMVVPWAPQPHVLAHDSVGAFVSHCGWNSIMETIAGGVPMICRPYFADQRLNARMVEEVFEIGVTVEDGVFT

SEQ ID NO: 25780 - protein, 441 aa, Acinetobacter sp. ADP1
MSTVKNGTLEQDKLNWFKYLLFGIQHVLVMIAVPITSVFLVAKALSLSDQLTVNLMSATFLVCGLGTLLQSIGVYKFGSRLPFVMIPGGAPIVMFLGIAQEKDLATASGAVILTSLFYFIILPVFKRFLRFFPNIVIGTLLILVSINLIKIYGGLVIGKPDTADFASTLNIGLAFATIAASLFFARVLKGTLSQLSILLGLIFGTILSAFLGQMHFETITQPTIFSLPTIMPFGVPKFDLVATIPLLIFSLISMVEATGQTIAISDLVGKKETAFERVPPTIRGDALISLLGGWLGTSMIITSGENIGIVRATQVRSRYVTIIAGIILLIISVFTPLAHLANAIPVAVVSGTAIIVFSIIGTIGIDILRRVDLHEKGNMYVLAGALTMGLLPILVNGVYTNFPHALQPILNNGLAMGALTAILLNIVFSTHSQADAHQESK

SEQ ID NO: 25781 - protein, 293 aa, Brucella melitensis
MSYDVVVIGTGPGGYVAAIKAAQLGLKVAVVEKRKTFGGTCLNIGCIPSKALLHASEVFAEAGHSFDTLGVEVTPKLNLTKMLAHKDTTVKANVSGVEFLFKKNKITPYIGTGKIVGKGKVSVTSEDGKVEEIEAKNIIIATGSDVAGIPGVKVDIDEKVIVSSTGALSFDKVPGSLIVVGGGVIGLELGSVWARLGAKVTVVEYLDKVLGPMDGEVSKQFQRLLEKQGIAFKLGAKVTGVEKVGKGAKITFEPVKGGDAETLEADAVLIATGRRPYTDGLGLQEAGVAVDER

SEQ ID NO: 25782 - protein, 341 aa, Anabaena variabilis ATCC 29413
MLAALLYGQEDLRLEQLADPSPEVGEVVIKVGAATTCGTDLKVWRRGGHAKMLKLPTLFGHEAAGEIVAVGAGVTGWQIGDRVVANNSAPCMKCFFCQRQEYSLCPNLTWNNGTFAEYLKIPAPIVQHNLLQIPDELPLPLAAMTEPLACVLHGVARSQIKPQDKVVVLGDGAIGLMFVATLADNVEVLLWGGNDQRLEIGQKLGAAKTFNYHQNPDIPGTVKDLTQGWGADVVIEATGVPKVWETALACARPGAIVNLFGGCPRDTTITVNTEQMHYSELTLKGVFHNTPEYVRAALALIASRKIPFELLISEQRPLKDLEQVFDDMKARKVIKVAMVSS

SEQ ID NO: 25783 - protein, 576 aa, Campylobacter jejuni RM1221
MDKDINLPSCDVLVIGSGGAGLRAAAAVRKENPKLSVVVATKMMPSRNATCMAEGGINGVTDFSNGDSYKLHAYDTIKGGAYLVDQDAALKFCELAGKAIFNMDFIGTLFSRNEQGGVAQRLMGGASKKRCNYSADKTGHILMHSCLDDAISSGVKFLMDHELLDIGVVDGKCEGVVLRDIQSGGIYPVLCKALVIATGGYTRIFYNRTSTPFIATGDGVAAALRAGLGFEDPEMIQFHPTGVANGGTLITEAARGEGGYLLNNRGERFMKNYHEKMELAPRDVVARAIETEIREGRGYGEGLGAYVLCDVRHLGKEKILKDLPKIRHTAMLFENIDLVDTPVPIRPTAHYSMGGIEVAKFEDMSTKIAGIYVGGEASCISIHGANRLGGNSLADAVVTGHLAGIGATNYAKDASFGKGAKTHELAQKWQVRFKEITNNGGNGQEMYELREELGSQNWDNMGIFRTQEKLDLLAKKLEDIQARYEKIRIPNPNEVMNTAFTDYVELGNLILLSRCACLAARNRLESRGAHTREDYPKRDDKNFLKHSIVNLENDELKLSYKDVVVTEFSLDGRRVQ

SEQ ID NO: 25784 - protein, 316 aa, Escherichia coli
TDKLTSLRQYTTVVADTGDIAAMKLYQPQDATTAPSLILNAAQIPEYRKLIDDAVAWAKQQSNDRAQQIVDATDKLAVNIGLEILKLVPGRISTEVDARLSYDTEASIAKAKRLIKLYNDAGISNDRILIKLASTWQGIRAAEQLEKEGINCNLTLLFSFAQARACAEAGVFLISPFVGRILDWYKANTDKKEYAPAEDPGVVSVSEIYQYYKEHGYETVVMGASFRNIGEILELAGCDRLTIAPALLKELAESEGAIERKLSYTGEVKARPARITESEFLWQHNQDPMAVDKLAEGIRKFAIDQEKLEKMIGDLL

SEQ ID NO: 25785 - protein, 316 aa, Escherichia coli
TDKLTSLRQYTTVVADTGDIAAMKLYQPQDATTNPSLILNAAQIPEYRKLIDDAVAWAKQQSNDRAQQIVDATDKLAVNIGLEILKLVPGRISTAVDARLSYDTEASIAKAKRLIKLYNDAGISNDRILIKLASTWQGIRAAEQLEKEGINCNLTLLFSFAQARACAEAGVFLISPFVGRILDWYKANTDKKEYAPAEDPGVVSVSEIYQYYKEHGYETVVMGASFRNIGEILELAGCDRLTIAPALLKELAESEGAIERKLSYTGEVKARPARITESEFLWQHNQDPMAVDKLAEGIRKFAIDQEKLEKMIGDLL

SEQ ID NO: 25786 - protein, 435 aa, Corynebacterium diphtheriae NCTC 13129
MKGMLVATENKDKAVLHYPGGEYEMDIIHATEGNDGVVLDKLLSQTGMVTFDPGYVSTGSTESKITYIDGDNGILRHRGYDIADLAENATFNEVSYLLIKGHLPTVDELHKFNNEIRHHTLLDEDFKSQFNIFPRDAHPMSVLASSVNILSTYYQDQLNPLDEEQLDKATVRLLAKVPMLAAYAYRASKGAPYMYPDNSLNARENFLRMMFGYPTEPYEVDPVVAKALDKLLILHADHEQNCSTSTVRMIGSAQANMFVAVAGGINALSGPLHGGANQAVLEMLEEIKANGGDATDFMNRVKNKEKGVRLMGFGHRVYKNYDPRAAIVKETAHEILEHLGGDELLDLAMKLEEIALSDDYFVSRKLYPNVDFYTGLIYRAMGFPTDFFTVLFAIGRLPGWIAQYREQLATTTKINRPRQIYTGETLRKVTPREQR

SEQ ID NO: 25787 - protein, 316 aa, Escherichia coli
TDKLTSLRQYTTVVAATGDIAAMKLYQPQDATTNPSLILNAAQIPEYRKLIDDAVAWAKQQSNDRAQQIVDATDKLAVNIGLEILKLVPGRISTEVDARLSYDTEASIAKAKRLIKLYNDAGISNDRILIKLASTWQGIRAAEQLEKEGINCNLTLLFSFAQARACAEAGVFLISPFVGRILDWYKANTDKKEYAPAEDPGVVSVSEIYQYYKEHGYETVVMGASFRNIGEILELAGCDRLTIAPALLKELAESEGAIERKLSYTGEVKARPARITESEFLWQHNQDPMAVDKLAEGIRKFAIDQEKLEKMIGDLL

SEQ ID NO: 25788 - protein, 452 aa, Silicibacter sp. TM1040
MTLRPPKPPVRPDRVSLWRYLKLFRADILSAQPQRLYRAWMAEFRTPFFRSFLVNQPALLDVILKERPDDFPKSNRVGEGLRPLLGNSVFLTNGETWKRQRRIIDPAFEGGRLKESFPAMRAAAEAGVARLRPHADGSELEIEAEASHIAADVIFRTLFSIPIEHEVAAEVFSRFRAYQQAQPILNLAAFVPVPRWMPRFYPKGTRQNARHIRRLIADLTKARMAEIAAGTAPDDLATKIMTTLDPETGKGFGAEEMVDQVAIFFLAGHETSASALGWALYLLALYPEWQEKLAAEVAEHGAEEFADLSKLRLTRDVFRETLRLYPPVPMMVREAVQTERFRDREVLRGSQMVLSPWHLHRHERLWERPDEFDPGRWQSENGKACARNAYMPFSAGSRVCTGAGFAMVEGVLILAQILRHYRITPVEGRSPEPVAHLTVRSRTGIWLRFSHR

SEQ ID NO: 25789 - protein, 1161 aa, Kluyveromyces lactis NRRL Y-1140
MDEDRKHTAFPVEQDIYKKIERERNIILGSNQLKKKTDNVMVIQKCNTNIREAQQNIEYLEQILAKLRVSQQPDNTPTSQNASNHPGFGQLSTISPDEFRYSRLDLVKYDCPSLSQRIQYMLQQLEFKLQVEKQYQEANDKLTKLYQIDGDQRSSSAAQGGSVESKHRIQLLTKSLKKYQAINVDIDPFNDHTEEATQPKFRRKQLSGTLTIGVTAIRDVDHIQSPLFSRKPETFITIKVDDVVKAKTKPSRNDRWHEDFNIVIDKGNEVEVTIYDKVNDRIVPVAVMWLLLADIAEEIRKKKVGQQQKQGKSHAEWMQASRLPPSQPANNTAVITKDLPQLPDAGIPTEDREANDTHTQSLTTNTWFILEPAGQILLTLGFNKSNTTQRKTFMGGLHRHGAIVNRKEDIFEQHGHHFVQKSFYNVMCCAYCGEFLRYSGYQCQDCKFLCHKKCYAHVVTKCIAKTSTDSDPDETKLNHRIPHRFEPVSNRGTKWCCHCGYILPWGRKNVRKCTECGVMCHAQCAHLVPDFCGMSMEMANKVLLTIQDTKRTQQQRGFSGIKVNNKPKPISKGFDGLNNRFETSFDHDDMHTSVIKPTTPSEARKDLVTDRLNNFITQHDSHYDSFTSNVETSSPDHGNYQHSLDPGLSPDSMKKIQFDAAHISNLPQAHAQEHFAQEYEGNYENKHPNKQDSGYVQDYGYEEELDDSEQSHYELRERLRKEEEERWYNEQNMLQQEQQQQTYSTGDVELATKKGDYDIIEETADVTDDQYSPPAQYEDLEYSLSTTETPELHAADIANITGKSSPSSPQKSYTSSTKHKKKSSKRRKVSLDDFILLKVLGKGNFGKVLLARSKNTSNLCAIKVLKKDNIIKNHDIESARAEKKVFLLATETKHPFLTNLYCSFQTENRIYFAMEFIGGGDLMWHVQNRRLSVRRAKFYAAEVLLSLKYFHDNGVIYRDLKLENILLTPEGHIKIADYGLCKDNMWYGNKTSTFCGTPEFMAPEILKGQAYTKAVDWWTFGVLLYQMLLCQSPFSGEDEDEVFNAILTDEPLYPIDMAGDIVQIFQGLLTKDPEKRLGAGPKDALEIMAEPFFSNINFDDILNLRVEPPFVPEIKAADDTSYFEKEFTSAPPTLTPLPSVLSSVLQEEFRGFSFMPEDLQL

SEQ ID NO: 25790 - protein, 404 aa, Campylobacter jejuni RM1221
MKRVVVTGIGMINALGLDKESSFKAICNGESGVNKITLFDATDFPVQIAAEVKNFDPLEVVDGKEVKKIDRFIQLGIKAAREAMQDAGFSEELDKEEFGIVSASGIGGLPNIEKNSIICSERGPRKISPFFIPSALVNMLGGLISIEHGLKGPNISCVTACAAGTHAIGEAYKSIALGNAKKMLVIGAEAAICPVGIGGFASMKALSTRNEDPEHASRPFDKERDGFVMGEGAGALVFEEYEEAKKRGATIYAELIGFGESADAHHITSPTLDGPLRAMKKALNMAGNPKVDYINAHGTSTPVNDKNETAAIKELFGNNIPLISSTKGQTGHCLGAAGAIEAVVSVMALRDGVVPPTINQLVKDDECDLDYIPNISRKVDLKVVMSNSFGFGGTNGCVVFKKVD

SEQ ID NO: 25791 - protein, 316 aa, Escherichia coli
TDKLTSLRQYTTVVADTGDIAAMKLYQPQDATTNPSLILNAAQIPEYRKLIDDAVAWAKQQSNDRAQQIVDATDKLAVNIGLEILKLVPGRISTEVDARLSYDTEASIAKAKRLIKLYNDAGISNDRILIKLASTWQGIRAAEQLEKEGINCNLALLFSFAQARACAEAGVFLISPFVGRILDWYKANTDKKEYAPAEDPGVVSVSEIYQYYKEHGYETVVMGASFRNIGEILELAGCDRLTIAPALLKELAESEGAIERKLSYTGEVKARPARITESEFLWQHNQDPMAVDKLAEGIRKFAIDQEKLEKMIGDLL

SEQ ID NO: 25792 - protein, 290 aa, Corynebacterium diphtheriae NCTC 13129
MVTMKQHENIIPTITLNDGTEMPAIGFGTYKLREQDAYRAVRSAIEVGYRHIDTASLYKNEEEVGRAVADAITAGEVARDELFITTKVWNDMHGDQLTQRSFQESLHRLGLDYIDCCMVHWPWPQKGLYVESFAALAKIQGLGQLQSVAVANFYPEVLREIVAETGIAPVLNQVELHPGFSQAEQRAVDRELGVVTEAWSPLGRGDSLNAEAITLIAQCYEKTPAQVTLRWIHQLGCSVVPKSANPQRQRENLDIFDFELNTEDMNSITSLDEQGGRLFVDPHDFPGEVE

SEQ ID NO: 25793 - protein, 282 aa, Oryza sativa
MHPSGGALSVPPGFRFHPTDEELLYYYLRKKVAYEAIDLDVIREIDLNKLEPWDLKDRCRIGTGPQNEWYFFSHKDKKYPTGTRTNRATTAGFWKATGRDKAIFLANACRIGMRKTLVFYVGRAPHGKKTDWIMHEYRLDQDNVDVQEDGWVVCRVFMKKSYQRGLNPADMAAVDDDDLLHHHHHPFPPAQLHGGAADHKHDGAGGHHHHHLMQPHHHYDDFPSFDPSMQLPQLMSADQPPPPPPSLLPGLAGGGGGTASSLQRLPLQYLGCEAADLLRFSK

SEQ ID NO: 25794 - protein, 471 aa, Frankia sp. EAN1pec
MPRRAKIVCTLGPATNSPEMVRALVDAGMDIARLNFSHGTHEQHAAAYALVREAAAAAGRSVGILADLQGPKIRLGRFADGGVTLLPGQHFTVTIRDVLGDQEQVGTTYPGLTRDVAAGDTILVDDGRLNLRIDGVEDTDVRTTVVIGGKVSDNKGMNIPSAALTVPALSEKDADDLRFALELGVDMIALSFVRSAEDYAAVRSIMDEVGIRVPVLAKIEKPQAVDELDGIIEAFDGLMIARGDLGVELPLEDVPLVQKRAVSQARERAKPVIVATQVLESMVSAPRPTRAEASDCANAVLDGADAIMLSAETSVGSYPVESAATMARIIETAEADLGRIPPLRTPPRTLGGAIAQAAVSVGEAVGARYLVAHTLSGDTARRLIRYRSSVPVIAFTPIPSVRSQMALLWGVETVLVPFAESTDEMVRQVDTALQQVGHCRPGELVVVVAGTPPGVAGMTNAMRVHRIGEAV

SEQ ID NO: 25795 - protein, 448 aa, Kineococcus radiotolerans SRS30216
MTAPTPAPTTSSAPTSAALFERAAAVIPGGVNSPVRAFRAVGGTPRFTASARGPYLTDADGREYVDLLCSWGPMILGHAHPDVLAAVTAAAQDGFSYGTPTEREVLLAEEIVARVEPVEQLRMVSSGTEATMSAIRLARGFTGRPVIVKFAGHYHGHVDALLASAGSGLATFALPDTPGVTGTAAGDTIVIPYNDPEALAEVFRLHGDRIACVITEAAAGNMGVVAPQPGFTAELRRVTREHGALLVSDEVMTGFRVSAAGWYGHEGLGLEHAPDLLTFGKVMGGGFPAAAFGGRADVMAHLAPAGPVYQAGTLSGNPIATAAGLATLRACTPEVYAAVETAATAVREAASAALSAAGVPHLVNTAGSMFSVFFTGLDAVTDYEQARQQDLGAFRAFFHSMLDQGVHLPPSAFEAWFLSASHDEAAIGRVVEALPAAARAAAEGSGSL

SEQ ID NO: 25796 - protein, 432 aa, Oryza sativa
MTGAVSKLAAPRPAAAAPLPPASVRSAFLASAPSPRRFSVSIAAGRARSPIIAMASAKEGNGAPTKRTTLHDLYDLQGQSPWYDNLCRPVTDLLPLIGSGVRGVTSNPSIFQKAISTSNAYDDQFKQLILAGKDAESAYWELVIKDIQDACKLFEPIYDQTDGADGYVSVEVSPRLANDTQGTVEAAKWLHKVVDRPNVYIKIPATAECVPSIKEVIANGISVNVTLIFSIARYEAVIDAYIDGLEASGLSDLSRVTSVASFFVSRVDTLIDKMLEKIGTPEALALRGKAAVAQAKLANQLYQKKFSGPRWEALVKKGAKKQRLLWASTSVKNPAYPDTLYVDPLIGPDTVSTMPDQALLAFIDHGTVSRTIDANVSDAEGVYSALEKLGIDWDEVGKQLELEGVDSFKKAFDSLLGSLEEKGNSLKKTVSL

SEQ ID NO: 25797 - protein, 140 aa, Brassica napus
DAWAELDLDLIKKAKIFHYGSISLITEPCKSAHIAAAKAAKEAGVILSYDPNLRLPLWPSADNARDEILSVWDTADIIKISEEEIEFLTKGEDPYDDSVVRKLFHPKLKLLLVTESPEGCRYYTKDFSGRVHGLKVEVVD

SEQ ID NO: 25798 - protein, 255 aa, Solibacter usitatus Ellin6076
MRPLLKRARKRLLQMHFESHVGHIGGNLSALDAMMVLYHQVLRDDDVFILSKGHAAGALYVTLWTAGKLTEDDLRTFHGEGTLLSAHPAPGWSRDIPFATGSLGHGLPDAAGIALGHRFRGRSGRVFCLTSDAEWQEGSNWEALIFARHHQLQNLIIVIDENRLQGFGTTRGVASMDPIGEKLSGFGLNTTHADGHDVEALRCAFSEAAGEGPRIVILKTTKGHGVSFMENRMEWHYLPIDADQYRMALAEVDAE

SEQ ID NO: 25799 - protein, 261 aa, Guillardia theta
MNVKYINVWKYNVKDIFKEINNLCKDTCLISLDTEFPGIVLKIKSFKYSSENASYHMLRKNVNILKTIQIGLTFDKNCNFKFSTTFQFNFVYDFENNCFAQDSIDLLSKSKLLFETNNKIGINLDLFKEFLTSSSLLCNKKLKWITFHSGYDFGYLINLITNKELPLSKKDFIEHLNFYFPCFFDLKHLGYFSSNFYGSLDKIAEKFNINRIGKSHQAGSDSLITLNIYKIISNDIKPREYFRKFKCVLYNSPSVVHNYYL

SEQ ID NO: 25800 - protein, 547 aa, Mannheimia succiniciproducens MBEL55E
MAAKDVKFGNDARVKMLAGVNVLADAVKVTLGPKGRNVVLDKSFGAPTITKDGVSVAREIELEDKFENMGAQMVKEVASKANDAAGDGTTTATVLAQAIVNEGLKAVAAGMNPMDLKRGIDKAVAAVVTELKALSKPCETSKEIEQVGTISANSDSIVGQLIAQAMEKVGKEGVITVEDGTGLEDELDVVEGMQFDRGYLSPYFINKPETATVELDSPFILLVDKKISNIRELLPVLEAVAKAGKPLLIIAEDVEGEALATLVVNTMRGIVKVAAVKAPGFGDRRKAMLQDIAILTAGTVISEEIGMELEKATLEDLGQAKRVVINKDNTTIIDGIGDEAQIKGRVAQIRQQIEESTSDYDKEKLQERVAKLAGGVAVIKVGAATEVEMKEKKDRVEDALHATRAAVEEGIVAGGGVALIRAASKAAASLQGDNEEQNVGIKLALRAMESPLRQIVANAGEEASVVASAVKNGEGNFGYNAGTEQYGDMIAMGILDPTKVTRSALQFAASIAGLMITTEAMVTELPKDDKLDAAAAMGGMGGMGGMM

SEQ ID NO: 25801 - protein, 300 aa, Polaromonas sp. JS666
MSAVICGSLAFDTIMTFEGRFSEQILPDQLHILNVSFLVPALRREFGGCAGNIAYSLRQLGGVPLPMATVGSDGADYVARMNTLGISTEFVRQVGDTYTAQAMIMTDRDNNQITAFHPGAMMQAHISRIDARSDIKLGIISPDGRDAMLQHAEQFKAAGIPFVFDPGQGLPMFDGKELAHFVELATWVAVNDYEARMLSDRTGLSCAEMSRRVQGLVVTLGAEGCEIWIDGEKTLVPSVKAETVVDPTGCGDAFRGALLYGLEQGWSLARCAALGNRVGAHKIATRGGQNYTLTAAQTGG

SEQ ID NO: 25802 - protein, 209 aa, Zea mays
APMKLYGAVMSWNLTRCATALEEAGSDYEIVPINFATAEHKSPEHLVRNPFGQVPALQDGDLYLFESRAICKYAARKNKPELLREGNLEEAAMVDVWIEVEANQYTAALNPILFQVLISPMLGGTTDQKVVDENLEKLKKVLEVYEARLTKCKYLAGDFLSLADLNHVSVTLCLFATPYASVLDAYPHVKAWWSGLMERPSVQKVAALM

SEQ ID NO: 25803 - protein, 162 aa, Yersinia pestis KIM
MTVIKYSDYNFRTSLNALRRYVVSAPLPYIKPGERVIIYDGVCALCTGWVNFLIRHDRRHTVRLSAVQSKKGHALLEWAGLPTDKINTLVLIENQQVYLRSEAIFRVIANLPWPWRILGVLRIFPRPLRDRCYDGIALNRYRLFGRYDAVRKLKADHERRFL

SEQ ID NO: 25804 - protein, 163 aa, Zea mays
SNGHDYFFLTPSRSSACGAHQTRPSGGGPRSVRAYAKGDEEGDKQSLFGSITEALDFSQVRSEKDAELLYEARESTRGGGRMTREQYGALRRKIGGTYQDFFKSYVEVDGQYVEEGWVDKTCKICKKDTRGEPRQVDKLGRYAHVACLDNPKPANFFAKIFAR

SEQ ID NO: 25805 - protein, 641 aa, Candida albicans SC5314
MLTSLRNQVKSSAVTKRLLSSSSVRSQVIGSNVKGQDFNAAKYMSQKYHVVDHEYDCVVVGAGGAGLRAAFGLVSEGFKTACVSKLFPTRSHTVAAQGGINAALGNMHADDWHWHFYDTVKGSDWLGDQDAIHYMTKEAPASIYELEHYGVPFSRNDEGRIYQRAFGGQSKEFGKGGQAYRTCAVADRTGHALLHSLYGQSLRHDCHFFIEFFAMDLMMKDGACIGIIAYNEEDGTLHRFFANRTIMATGGYGRAYFSCTSAHTCTGDGYAMVSRAGLPLEDLEFVQFHPSGIYGSGCLITEGARGEGGFLVNSEGERFMERYAPSAKDLASRDVVSRAITMEINEGRGVGPEKDHMYLQLSHIPAPVLKERLPGISETAHIFAGVDVTKEPIPILPTVHYNMGGIPTNWKGEVLKKSADGNDEVVPGLLACGEAACASVHGANRLGANSLLDLVVFGRAVAHTIRDNLQPGTPIPDHAKDIGYESIANLDKLRNANGSKPTADIRLEMQKTMQKGCAVFRTQETLDQCVEHIGEVDKSFEDVKTTDRSMIWNSDLVETLELQNLLTCATQTAASAAARTESRGAHSRDDFPDRDDVNWRKHTLSYQETVGGPVRLDYRDVVKTTLDENDCKPVPPAKRVY

SEQ ID NO: 25806 - protein, 481 aa, Capsicum annuum
MDSITIDTINPKVLKCEYAVRGEIVTIAQKLQQDLKDNPGSHPFDEILYCNIGNPQSLAQQPITFFREVLALCDHPSILDKSETQGLFSADAIERAFQILDQIPGRATGAYSHSQGIKGLRDTIASGIEARDGFPADPNDLFLTDGASPAVHMMMQLLIRSQNDGILCPIPQYPLYSASIALHGGTLVPYYLDEQTGWGLEISELEHQLNTAKSNGIDVRALVVINPGNPTGQVLGEANQREIVEFCKKEGLVLLADEVYQENVYVPDKKFHSFKKITRSMGYGEKDISLVSFQSVSKGFYGECGKRGGYMEITGFSPEVREQIYKLASVNLCSNISGQILASLVMSPPKVGDESYESFSAEKEAVLSSLARRAQALQDALNSLEGVTCNRAEGAMYLFPRINLPDKAIKAAEVAKTAPDAFYAKLLLNATGIVVVPGSGFRQVPGTWHFRCTILPQEEKIPAIVSRLTEFHKKFMDEFCG

SEQ ID NO: 25807 - protein, 592 aa, Arabidopsis thaliana
MKNSEKRGRKHKRQDASSAENAGGEVKEASANEASLPQSPEPVSASEANPSPSRRSRGRGKKRRLNNESEAGNQRTSSPERSRSRLHHSDTKNGDCSNGMIVSTTTESIPAAPSWETVVKVVPSMDAVVKVFCVHTEPNFSLPWQRKRQYSSGSSGFIIGGRRVLTNAHSVEHHTQVKLKKRGSDTKYLATVLAIGTECDIALLTVTDDEFWEGVSPVEFGDLPALQDAVTVVGYPIGGDTISVTSGVVSRMEILSYVHGSTELLGLQIDAAINSGNSGGPAFNDKGKCVGIAFQSLKHEDAENIGYVIPTPVIVHFIQDYEKHDKYTGFPVLGIEWQKMENPDLRKSMGMESHQKGVRIRRIEPTAPESQVLKPSDIILSFDGVNIANDGTVPFRHGERIGFSYLISQKYTGDSALVKVLRNKEILEFNIKLAIHKRLIPAHISGKPPSYFIVAGFVFTTVSVPYLRSEYGKEYEFDAPVKLLEKHLHAMAQSVDEQLVVVSQVLVSDINIGYEEIVNTQVVAFNGKPVKNLKGLAGMVENCEDEYMKFNLDYDQIVVLDTKTAKEATLDILTTHCIPSAMSDDLKTEERN

SEQ ID NO: 25808 - protein, 919 aa, Streptomyces lividans
MPATRRTARVRRVAAVTVTALAAALLPPLAARADTPPAPPSDAKLAKTAARHDLTREQFYFSCRTLRQRGRRERPRRLTGTRLTTGYDPTDKGFYQGGDLKGLTEKLDYIKGLGTTSIWMAPIFKNQPVQGTGKDASAGYHGYWITDFTQVDPHFGTNKDLKNLISKAHAKGMKVFFDVITNHTADVVDYEEKSYDYLSKGAFPYLTKDGQPFDDADYADGERRFPRVDSGSFPRTPTVPTAKKNLKVPSWLNDPAMYHNRGDSTWAGESATYGDFNGLDDLWTERPEVVGGMEKIYQRWVEDFAIDGFRIDTVKHVDMEFWTQWATALDAYAAKKGRDDFFMFGEVYSADTSVTAPYVTQGRLDSTLDFPFQDAARAYASQGGSARKLAAVFGDDYKYTTDKANAYEQVTFLGNHDMGRIGTFLKQDAPEAGDAELLKKDRLANELMFLSRGNPVIYYGDEQGFTGAGGDKDARQPMFASRTADYLDDDQLGTDRTHAEAAYDTSAPLYRQISALAELRKANPALADGVQTERYAADGAGIYAFSRTDAKTGTEYVVAFNNAGTEKSAAFATGSAGMTFRGLYGTDATVKSGADSKVTVTVPARSAVVLKAAGRLAAPAAEPTISLHAPDPGATGTVELSADVAGGQLNRVVFAAQTGDGKWRTLGTADHAPYKVTHTVDADTPAGTALRYKAVVVDSAGRTASGRLHHRHPARRGGAHRRLPGPRGRPLQARRRELRRLGPVRLGRPRRREAHHLARHPPLHRPGRLRAFAYVKLKPGASTVGFLVIDKDGNKDVAADRTIDVTETGEVWIEQGEEQLVTERPEYPAQDTTKAVLHYKRADGNYDGWGLHVWGDAANPTDWAKPLQPVRTDPYGAVFEVPLTDGASSLSYMVHKGDEKDLPTDQAWTSRPTATRCGC

SEQ ID NO: 25809 - protein, 316 aa, Escherichia coli
TDKLTSLRQYTTVVADTGDIAAMKLYQPQDATTNPSLILNAAQIPEYRKLIDDAVAWAKQQSNDRAQQIVDATDKLAVNIGLEILKLVPGRISTEVDARLSYDTEASIAKAKRLIKLYNDAGISNDRILIKLASTWQGIRAAEQLEKEGINCNLTLLFSFAQARACAEAGVFLIAPFVGRILDWYKANTDKKEYAPAEDPGVVSVSEIYQYYKEHGYETVVMGASFRNIGEILELAGCDRLTIAPALLKELAESEGAIERKLSYTGEVKARPARITESEFLWQHNQDPMAVDKLAEGIRKFAIDQEKLEKMIGDLL

SEQ ID NO: 25810 - protein, 235 aa, Agapanthus praecox
MGRGKIEIKRIENTTNRQVTFCKRRNGLLKKAYELSVLCDAEVALIVFSTRGRLYEYSNNSIKSTIERYKKACADSSNSTAVVEVNTQQYYQQEAAKLRHQIQSLQNSNRHLMGDSLSSLSIKELKQLENRLERGITRIRSKKHELLFAEIEYMQKREAELQNDNMYLRAKITDNERAHQVSVVQSGTEYDTLPTFDSRNYYTHVTMLEAAPHFSHHQDHTALHLGYETKADPTE

SEQ ID NO: 25811 - protein, 557 aa, Arabidopsis thaliana
MKYVVVSGGVVSGLGKGVTASSIGLILKSCGFRVTAIKIDPYLNIDAGTMSPIEHGEVYVLDDGGEVDLDLGNYERFMDIKLTSENNITTGKVYKHVLEKERRGDYLGKTVQVVPHITDAIQKWIERAARIPVDGQSGPADVCVIELGGTIGDIESMPFIEALGQFSYRVGTDNFCLIHVSLVPVLNVVGEQKTKPTQHSVRDLRGLGLSPNILACRSTKPLEDNVKAKLSQFCHVPMENVVTLYDCPNIWHIPLLLKVSNFLIHHSFKVSEPALEEWSLMAKMTDKLHVPVRIAVVGKYTELLDSYLSIHKALLHASVARRKKLIIDWISASDLEQGAKKENPDAYKAAWKLLKGADGVLVPGGFGSRGVEGKMLAAKYARENRIPYLGICLGMQLAVIEYARTILGLADANSTELDPNTKNPCVIFMPEGSKTHMGGTMRLGSRRTYFHSKDSKSARLYGNKSFVDERHRHRYEVNPAMVPRFESSGLTFTGKDETGQRMEIIELPNHPFYVGAQFHPEYKSRPGKPSPLFLGEEKHKNNAKALGFFLRVSTYLN

SEQ ID NO: 25812 - protein, 220 aa, Escherichia coli
  misc_feature (1)..(1): Xaa can be any naturally occurring amino acid
  misc_feature (17)..(17): Xaa can be any naturally occurring amino acid
  misc_feature (137)..(137): Xaa can be any naturally occurring amino acid
  misc_feature (152)..(152): Xaa can be any naturally occurring amino acid
  misc_feature (164)..(164): Xaa can be any naturally occurring amino acid
  unsure (1)..(220): unsure at all Xaa locations
XKDIDTLISNNALWSKXLVEEDPGFFEKLAQAQKPRFLWIGCSDSRVPAERLTGLEPGELFVHRNVANLVIHTDLNCLSVVQYAVDVLEVEHIIICGHYGCGGVQAAVENPELGLINNWLLHIRDIWFKHSSLLGEXPQERRLDTLCELNVXEQVYNLGHSTIXQSAWKRGQKVTIHGWAYGIHDGLLRDLDVTATNRETLEQRYRHGISNLKLKHANHK

SEQ ID NO: 25813 - protein, 199 aa, Ustilago maydis 521
MSTFTRLIAATSSTFPRQCLTGGVLFATGDTIAQQLVEKRGSRHDLARTFRLSLYGGCVFSPLASIWFGRVLERVRFSSKAANIATKVALDQAIASPAFVALFFGATTIMEGGSPDQAKNKIIHNWWPTLKTAWGLWIPVQTLNMALVPPSQRLLFVNVVSIFWNTFLSIKSAAASDHAVKPNLNDAVELVETKLDKLH

SEQ ID NO: 25814 - protein, 203 aa, Volvox carteri
MNPEYDYLFKLLLIGDSGVGKSCLLLRFADDTYTESYISTIGVDFKIRTVELDGKVIKLQIWDTAGQERFRTITSSYYRGAHGIIVVYDVTDQESFNNVKQWLAEIDRYASENVNKLLVGNKSDLTGKKVVDYQAAKAFADEIGIPFLETSAKNATNVEQAFMTMAAEIKNRMASQPVPPKPGGPVVRPTEGKPINNKSSSCC

SEQ ID NO: 25815 - protein, 505 aa, Escherichia coli O157:H7 EDL933
  misc_feature (324)..(324): Xaa can be any naturally occurring amino acid
  unsure (1)..(505): unsure at all Xaa locations
MCLDSFINVNGCFLLWRAKGETLMSAIDSQLPSSSGQDRPTDEVDRILSPGKLIILGLQHVLVMYAGAVAVPLMIGDRLGLSKEAIAMLISSDLFCCGIVTLLQCIGIGRFMGIRLPVIMSVTFAAVTPMIAIGMNPDIGLLGIFGATIAAGFITTLLAQLIGRLMPLFPPLVTGVVITSIGLSIIQVGIDWAAGGKGNPQYGNPVYLGISFAVLIFILLITRYAKGFMSNVAVLLGIVFGFLLSWMMNEVNLSGLHDASWFAIVTPMSFGMPIFDPVSILTMTAVLIIVFIESMGMFLALGEIVGRKLSSHDIIRGLRVDGVXTMIGGTFNSFPHTSFSQNVGLVSVTRVHSRWVCISSGIILILFGMVPKMAVLVASIPQFVLGGAGLVMFGMVLATGIRILSRCNYTTNRYNLYIVAISLGVGMTPTLSHDFFSKLPAVLQPLLHSGIMLATLSAVVLNVFFNGYQHHADLVKESVSDKDLKVRTVRMWLLMRKLKKNEHGE

SEQ ID NO: 25816 - protein, 435 aa, Xanthomonas campestris pv. vesicatoria str. 85-10
MRPSRLLTSALLLALPTLATAQTAQRPEVQAAAAPLQAKVVQWRRDFHQHPELSNREERTAAAVAAQLRKLGLKPRTGIAHHGVVAIIKGGRPGPKIALRADMDALPVKEQTGLPFASRATAEYRGEQVGVMHACGHDAHTAILLGVAEALVGMREQLPGEVMLIFQPSEEGAPGNEEGGASLMLKEGLFADFKPQAVFGLHVFSSVQAGKIAVRSGPLMAASDRFAIKMIGRQTHGSAPWNGIDPIVASADMIGAAQTVISRRANLSKQPAVLSFGAIKGGIRYNIIPDDVEMVGTIRTFDEGMRQQIFADLKNVAEHTAAAHGAKVQAQVPDQPGNPATVNDPALTAKMLPSLQAVVGADNVYEPPLQMGAEDFSFYAQQVPSMFFFVGSTAKGIDPATAPSNHSPQFLLDESSLDVGLRALLQVSLDYLQQG

SEQ ID NO: 25817 - protein, 474 aa, Silicibacter sp. TM1040
MADTRPVIWWIRRDLRLRDNPALRAAQEAGGPIIPLYIHDAQEEALGAAPKFRLGLGLERFAKTLEEKGSRLIVRRGDALEVLREVIAESGAGHVIWSRLYDPAATKRDAKIKEALKASDIKAKSTGGRLLFEPWTVDTKDGGMYRVYTPFWKAVRTRDVAELTAAPSRLAAPESWPSGEALADLGMDAAMRRGGAIVAQHCRVGEDAALAQLDDFLTERVSNYKAHRDFPARAATSELSENLAWGEISPHRMWHLGAQAMQDGQPGAEHFLKEVVWREFAYHLMHRSPRILTRNWREEWDGFPWQDDPGDALQRWQQGQTGYDFVDAAMRELYVTGKMHNRARMIVASFLTKHLMIHWKYGLQWFEDCLVDWDPASNAMGWQWVAGSGPDAAPFFRIFNPDGQLEKFDPKGDYARRWLPEGQANPPETAMAYFEAIPRRWSLHPDQSRVSPIIGLKEGRERALSAYKESRNQS

SEQ ID NO: 25818 - protein, 140 aa, Zea mays
MAEQEAPVAVEAPTPVLGEPMDLMTALQLVMKKSSAHDGLVKGLREAAKAIEKHAAQLCVLAEDCDQPDYVKLVKALCAEHNVHLVTVPAAKTLGEWAGLCKIDSEGKARKVVGCSCVVVKDYGEESEGLNIVQEYVKSH

SEQ ID NO: 25819 - protein, 591 aa, Zea mays
  misc_feature (479)..(479): Xaa can be any naturally occurring amino acid
  unsure (1)..(591): unsure at all Xaa locations
MTSPSSSSSWLLLLLSCLALALLAADAEVHHHEFVVQETPVKRLCKTHNVITVNGQYPGPTLEVREGDTLVINVVNRAQYNVTIHWHGIRQMRTGWADGPEFVTQCPIRPGGSYKYRFTIEGQEGTLWWHAHSSWLRATVYGALIIRPRENKTYPFAKPSREVPVILGEWWDANPIDVIREAQRTGGAPNVSDAFTINGQPGDLYKCSQKEHTIHSMLLSSSAPPPHRHAETTAIPVKPGETALLRFINAALNHELFVTIAQHRMTVVATDASYTKPFTTSVLMVAPGQTTDVLVTMDQAPARYYVAARAYVSGQNVAFDNTTTTAVVEYDCGCASDFGPKIQPAFPSLPAFNDTAAAAAFAAGIKSPGRVRVHESVDEHLFFTVGLGLFNCEPGQLCAGPNNSTRFTASMNNVSFVFPRTDSLLHAHYFKTPGVFTTDFPAHPPVQFDYTAQNVSQALWQPVPATKLYPLRFGSVVQXVLQDTSIVTPENHPIHIHGYDFFILAEGFGNFDPEKDVDKFNYVVPPQRNTVAVPVNGWAVIQFVADNPGVWLMHCHLDVHITWGLAMAFLVEDGYGELQSLEPPPVDLPMC

SEQ ID NO: 25820 - protein, 124 aa, Dechloromonas aromatica RCB
MVIDDSNTIRRSAEIFLVQAGCQVVLAEDGFDALAKIADHQPSVIFCDIMMPRLDGYQTCSLIKKNPRFKATPVIMLSSKDGLFDRARGRMVGSDQYLTKPFTKDSLLQTVAAFALPVETESNS

SEQ ID NO: 25821 - protein, 260 aa, Antirrhinum hispanicum
MATVQKSQHSHFFLLVGCIVHLSNFCSTTTAQFDYFKLVLQWPNSYCSLKTTHCPRTRLPSQFTIHGLWPDNKSWPLSNCRDTSADVLKITDKGLIQDLAVHWPDLTRRQRKVPGQKFWVTQWKKHGACALPMYSFNDYFVKALELKKRNNVLDMLSRKSLTPGDQRVDVSDVNGAITKVTGGIAILKCPEGYLTEVIICFDPSGFPVIDCPGPFPCKDDPLEFPSSVKKKVPRSVSIGGSTLGLEKGASFSLTNTNTGY

SEQ ID NO: 25822 - protein, 935 aa, Shewanella sp. MR-4
MNPVNNMTKYSLRSWVLVLALAPTILVGILLGSYFTINRFYELEDTLIEQGSNIIEPLAIASEVGLVGNDREATKRLLAAAQLNKSTLVKSIAIFDIQNQLFVTSHYHKDFEIMRYKEALSNLHKTEIEHVGDSLILRTPIFATAPPAPGATINFDIQTDNGELLGYISVIINKERALLEQHRAAVAAFIIVLIGVQLNLLFTFRLVKNVTQPITEMVRVVAKIREGKLDARLEGNLIGELDLLKRGINAMAGSLSEYHDEMQQNIDQATSDLRETLEQIEIQNVELDLAKKRALEASRIKSEFLANMSHELRTPLNGVIGFARQLVKTPLHSSQVDYINTIERSATNLLAIINDILDFSKLEAGKMVLEKMPFGLRETLGETITLISGSAQAKGLELVVDIAPNVPDNVNGDAMRVCQIINNLVGNAIKFTDSGSVLVKLELQNQTDEQVVLRCDVIDTGIGIDDSQQDFLFQAFGQADSSISRRFGGTGLGLVITKRLVNQMGGQIGFTSAVDKGSNFWFTLPLGLGQFQIGDSLPLEKLKDKTVLFYEPRVLTHSVISRQLKQWDTKVTHHQHIPSLLTTLSTTEHQFDYVLLSCHGFSNPNQLVSTLNQAKTKTDCLIVLFDCQEQEVLSQFIRPNADVVLSLPVSEHQLARNMLYPPMEYDISPPASITVPAARQSLTVLAVDDNFANLKLIDTLLSELVTTVIAVNSGEEAVKQAKGRTFDLIFMDIQMPGTDGISATKQIRQGSMNRNTPIIAVTAHAIAEERELILGCGMDGYLPKPIDEAALKAEINRWITRPKFTHFDLHTLNWDLCLTQANHKSDLALDMLRMLLDSLPQTVLAIETALGQDDQDTMLTTIHKLHGASCYCGVPTTQRLCQEIESALKRDARVEDLEPEILELLDELTKVESAAKQVLSQLSAEITDDQKNGLL

SEQ ID NO: 25823 - protein, 342 aa, Candida albicans
QAVPVTLHNEQVTYAADITVGSNNQKLNVIVDTGSSDLWVPDVNVDCQVTYSDQTADFCKQKGTYDPSGSSASQDLNTPFKIGYGDGSSSQGTLYKDTVGFGGVSIKNQVLADVDSTSIDQGILGVGYKTNEAGGSYDNVPVTLKKQGVIAKNAYSLYLNSPDAATGQIIFGGVDNAKYSGSLIALPVTSDRELRISLGSVEVSGKTINTDNVDVLLDSGTTITYLQQDLADQIIKAFNGKLTQDSNGNSFYEVDCNLSGDVVFNFSKNAKISVPASEFAASLQGDDGQPYDKCQLLFDVNDANILGDNFLRSAYIVYDLDDNEISLAQVKYTSASSISALT

SEQ ID NO: 25824 - protein, 335 aa, Cryptococcus neoformans var. neoformans B-3501A
MSKPQVLIAANPKTGIVWSKEEQSSKLGAVAEVLELASASRSEFFQDLAPNGKYANIVAIYRHNDSVSAIGLFDEELINKLPASVKYICHNGAGYDQIDVAACTARGIQVSHTPQAVDDATATVGAFLAISAMRQFWRAEVNVRSGKWKAGLSPARDPEGKTLGIIGMGGIGSALARRLLAFDMKVIYYNRRPIQPPPNFPCTYVSSIEELLKQADVVSLNLPLNEKTKGSFGRQEFGLMKDGSVLINTARGAVIDEEAFIEALESGKLYSAGIDVYPDEPNVNPKLLAMDNITLLPHMGTETRDSQKKMEILVLDNMISALAGKGLLNQVPEQK

SEQ ID NO: 25825 - protein, 326 aa, uncultured epsilon proteobacterium
MYIEDLKFSLWADFIERDYLDNEFKDLINKGIINGATSNPSIFKNAILNSPAYKTQLAELSSLTPKEKYEAVAIYDITKAADILKPLYDAGNDGYVSIEVDPYLCDDALSTIAEGKRLFETINRKNVMIKVPATRAGYEAMRELTACGIPVNATLIFKKEQAIECAKAFEAGVARNGAKVDTVISIFVSRVDRALDAKLNENGIETALSGIYNSADIYAAIEDMKVEGCRTLFASTGVKDDSLPAYYYVSKLLAYNSVNTAPIDTIKAFHENGTKDEALPIPAQIIKNHFLKISDIGIDFDKILDTQIADGLEAFKDAFKDILEAL

SEQ ID NO: 25826 - protein, 243 aa, Agapanthus praecox
MGRGRVELKRIENKINRQVTFSKRRNGLLKKAYELSVLCDAEVALIVFSSRGKLYEFGSAGTSKTLERYQRCCYTSQDATIADREKQNWYQEVARLKAKFESLQSAQRHLLGEDLGPLSVKELQQLERQLEASLSQARQRKTQIMFDQMEELRKKEHHLGEINKQLKTKLEAEGENLRAIQGSWESDATNVGGGNVFSMHPSHSSAMECEPTLQIGYHQLVQPEGSLPRNSGGENNFMLGWVL

SEQ ID NO: 25827 - protein, 163 aa, Agrobacterium tumefaciens str. C58
MASLSQAVNSLFLKEFVGAIFLTMRHFFKQKATINYPFEKGPVSPRFRGEHALRRYPNGEERCIACKLCEAICPAQAITIEAGPRRNDGTRRTVRYDIDMVKCIYCGFCQEACPVDAIVEGPNFEFATETREELYFDKQRLLDNGDRWEREIARNLALDAPYR

SEQ ID NO: 25828 - protein, 407 aa, Arabidopsis thaliana
MALKFNPLVASQPYKFPSSTRPPTSSFRSPKFLCLASSSPALSSGPKEVESLKKPFTPPREVHVQVLHSMPPQKIEIFKSMENWAEENLLIHLKDVEKSWQPQDFLPDPASDGFEDQVRELRERARDLPDDYFVVLVGDMITEEALPTYQTMLNTLDGVRDETGASPTSWAIWTRAWTAEENAHGDLLNKYLYLSGRVDMRQIEKTIQYLIGSGMDPRTENNPYLGFIYTSFQERATFISHGNTARQAKEHGDIKLAQICGTIAADEKRHETAYTKIVEKLFEIDPDGTVMAFADMMRKKISMPAHLMYDGANDNLFDNFSSVAQRLGVYTAKDYADILEFLVGRWKIQDLTGLSGEGNKAQDYLCGLAPRIKRLDERAQARAKLKGQRQKPILPVPHFICLLLKLV

SEQ ID NO: 25829 - protein, 403 aa, Triticum aestivum
  misc_feature (373)..(373): Xaa can be any naturally occurring amino acid
  unsure (1)..(403): unsure at all Xaa locations
VTLQNKFVQKSRLPPVRNSRDIVDPRVREDVKSHWSRHIPQGAALEADWDAKFAQYEQKYPEDAATLKSIITGELPAGWADALPQYTTESPADATRNLSQQCLNALAKVVPGLIGGSADLASSNMTLLKMFGDFQKDTPEERNVRFGVREHGMGAICNGIALHTPGLIPYCATFFVFTDYMRGAMRISALSEAGVIYVMTHDSIGLGEDGPTHQPIEHLVSFRAMPNMLMFRPADGKETAGAYKVAVLNRKRPSILALSRQKLPHLPGTSIEGVAKGGYTISDNSTDNKPDFIIMSTGSEVEIAVKAAEELTKEGKTVRVVSFVCWELFDEQSDEYKESVLPEAVTARISIEAGSTLGWQKYVGSKGKTIGIXDKFGASAPAPKIYKEYGITAESVIAAAKSL

SEQ ID NO: 25830 - protein, 217 aa, Brassica napus
  misc_feature (201)..(201): Xaa can be any naturally occurring amino acid
  unsure (1)..(217): unsure at all Xaa locations
MSKLQSEALREAITTIKGKSEDKKRNFVETVELQIGLKNYDPQKDKRFSGSVKLPHIPRPKMKVCMLGDAQHVEEAEKMGLDSMDVEALKKLNKNKKLVKKLAKKYHAFLASESVIKQIPRLLGPGLNKAGKFPTLVSHQESLEGKVNETKATVKFQLKKVLCMGVAVGNLSMEEKQLFQNVQMSINFLVSLLKKNWQNVXRCLYLKSTMGPPQRIF

SEQ ID NO: 25831 - protein, 281 aa, Brassica napus
  misc_feature (96)..(96): Xaa can be any naturally occurring amino acid
  unsure (1)..(281): unsure at all Xaa locations
MEFENRYGIATTQNFNCVLLDLDDTLYPLSTGIARECGQNIKDYMVKELGIPKDKIVELSNLLYKNYGTTMAGLRAIGYDFDYDEYHSFVHGRLPXYDNIKPDPVLRSLLLSLPLRKVIFTNADRVHAVKALKRLGLEDCFEGIICFETLNPTHTNAASGDTEIFDIVGHFDRSEPVSLLPKTPIVCKPSEAAIEKALEIANIDPNRTLFFEDSVRNVQAGKRVGLDTVLVGASNKVKGADYVLENIHNMKEAIPELWKSDRKSVDVGYSGKVAVETPVTA

SEQ ID NO: 25832 - protein, 409 aa, Medicago truncatula
MAIPKLVPGFRFSPTGVELIKYFLKRKVMGKKVLNDVIAELDIYKYAPWDLPDLSYLQNGDLEWYFFCPIEKKYGNGSRMNRATEIGFWKATGKDRAVQQNNQTVGMIKTLIFHTGKAPRGDRTDWVMHEYRLEDKDLADKGIVQDSYVICKVFQKEGPGPRNGAQYGRPFNEEDWSDDEVGTPFAEPAALAPTLPVTSNSFVLNDQNLHAIGYNGSISMPCQSGLVPSPDPANSCQTGLPPSPDPANSSQIGLTPSPDPVNSCQTGFMSSPDPSNSCQTGYMPYPDSANECQIGFMSPDPANSHQTGLVLSPPDPVNSHLTGLVPSPDPVDNSYLENQAVNTDNILSMLDMFNDNDILPEENIAEGALSTDFFEVWETWIAWDLLARMLTLAHTVWLLRVMTTWISWS

SEQ ID NO: 25833 - protein, 155 aa, Brassica napus
  misc_feature (139)..(139): Xaa can be any naturally occurring amino acid
  unsure (1)..(155): unsure at all Xaa locations
IVKNPVKKELGLAFKGTQKNVVESLEAMNEKEAMEMKATLESKGEVEFYVCTLGKNVSIKKNMVSISKEKKKEHQRVFTPSVIEPSFGIGRIIYCLYEHCFSTRPSKAGDEQLNVFRFPPLVAPIKCTVFPLVQNQQFXEEATKVISKELTSVGI

SEQ ID NO: 25834 - protein, 255 aa, Yarrowia lipolytica CLIB122
MAATTDNVTEAVANLNIKEEAPVASEPAEVTETVEEEVTPAEPFSTVFDSKTEFATVHKLTTPWTLWYIKPPSPAVAWHDLIKEVVSFDTVEGFWAVYNNIPKLVELPIRSDYAFFRKGIRPEWECDSNKAGGKWFYQFKPKSANEFDEIWLHTVLSVIGESLETDEEIAKHEGKYNNVDGSASNVNGIFVNIRKAGVRFNVWTKTSEVTDELRQMGVKIKQVLRLPEKEEVQFQSHEESASKNVKSQGKTRLAV

SEQ ID NO: 25835 - protein, 136 aa, Brassica napus
  misc_feature (113)..(113): Xaa can be any naturally occurring amino acid
  misc_feature (132)..(132): Xaa can be any naturally occurring amino acid
  unsure (1)..(136): unsure at all Xaa locations
MVSLKLQKRLAASVLKCGKGKVWLDPNEVSEISMANSRQNIRKLVKDGFIIRKPQKVHARSRARRAHEAKQKGRHSGYGKRRGTREARLPTKILWMRRMRVLRRLLRKYREAXVKGNMFKNKRVLMESIHKXKAEK

SEQ ID NO: 25836 - protein, 311 aa, Glycine max
MTQLPPKIPNMSPSWPDFSSHHQKMQLPPLKSGSNNNYQHNQNPSWVDEFLDFSSARRGAHRRSVSDSITYLDSPMKCGENNNNNENEFDKFDDEQFMSMFTDEVVLSGVPLLPPTILSSSNPSSPSDQNFFNDEKEKKEEHHHHQLKNEADEVESQCKQEIMQLPNDTNTCSSNERITDPKRVKRILANRQSAQRSRVRKLQYISELERSVTSLQAEVSVLSPRVAFLDHQRLLLNVDNSALKQRIAALAQDKIFKDAHQEALKREIERLRQVYHQQSLKKMENAAGSPLPSPKPICDAQTEKEATLLNA

SEQ ID NO: 25837 - protein, 483 aa, Triticum aestivum
  misc_feature (117)..(117): Xaa can be any naturally occurring amino acid
  misc_feature (349)..(349): Xaa can be any naturally occurring amino acid
  misc_feature (402)..(402): Xaa can be any naturally occurring amino acid
  misc_feature (419)..(419): Xaa can be any naturally occurring amino acid
  misc_feature (425)..(425): Xaa can be any naturally occurring amino acid
  unsure (1)..(483): unsure at all Xaa locations
MASPFGATSTVGLMAAPTGLVSDKKPFSLSSISLADRPRHVRLQRKCNFRVKAAKELYFNKDGSATKKLQVGVNKLADLVGVTLGTKGKECCFGRASTGPPKIVNDGVTVAREVELXEDPVENIGAKLVRQAAAKTNDLAGDGTTTSVVLAQGLIAEGVKVIAAGANPVQITRGIEKTAKALVLELKKMSKEVEDSELADVAAVSAGNNYEIGNMIAEAMSKVGRKGVVTLEEGRSSENNLYVVEGMQFERGYISPYFVTDSEKMTTEYENCKLLLVDKKITNARDLINVLEEAIRGQYPILIIAEDIEQEALATLVVNKLRGSLKICAIKAPGFGERKTQYLDDIAIXSPEGTVIRDEVGLTLDKADNTVLGTAAKVVLTKESTTIVGDGSTQEEVTKRVXQIKNLIEAADQDYEKEXLNERIXKLAGGVAVIQVGAQTKTELKEKKLRVEGSLNPNQGAVEGGIFCCWRCTPLRLAARVMP

SEQ ID NO: 25838 - protein, 606 aa, Candida glabrata CBS138
MAQADQDLYPLALLMDDLKNDDISNRVEATKKIDQIAIALGPDRTRNELIPFLTEVAEDDEDEVFTVLAEKLGSFVPYVGGAEHASTILPVLDILAGAEETIVREKAVDSLNIVAEQMPDDELFKYFVPLLQRLASETWFSSKVSACGLFKSVFLRVKDVQSRVDLWNLFMTLVNDETPMVRRAVGKNLPILIDLLTENPEFCTDKDLEFISTTFQTVINDQQDSVKFLAVDCLISIVKFFNKKGYDTHSRDLLNSALSLAGDEAWRVRYVVADKFGELTEGFSSNPSYIEELLDPFLKLCEDSEGDVRKAIAKQVSYFSKFVNDSHVVLNKIVPVLQNLSMDENEDVRASLASGISDIVLLLPKEQVIEYVFPIFLNMLRDEIPDVRLNIIGKLKVVNEVIGIDMLTDSLLPAISELAKDSSWHVRLAIIEYIPILAEQLGVDFFNSQLSDLCLSWLWDAVYSIREAAIKNLQKLTNIFGSEWCNNEVVPRLLNLDSHMLENFIYRITLLQTFKALVSVLSPEFVANQILPHVMELANDQVPNIRFNVANTYPIIVEVLSKGGDQYKLLVTDTIYPSLKDLCEDPDFDVRYFANKSMKKCKEIIS

SEQ ID NO: 25839 - protein, 663 aa, Lactobacillus plantarum WCFS1
MSFDEMDTKAVNAIRALSIDMIEHAESGHPGMPLDAAPMAYVTYKKHLRIDPKHPNWPNRDRFVLSAGHSSSMLYAMLYLAGYGITVDDLKNFRRLDSLTPGHPELITPGVDAATGPLGQGLGMAVGMAMASKHLGTKYNVDDIKILNSRVYVIASDGDLMEGISHESASLAGHLKLNNLIVMYDSNDVTLDAQASKTLGDDAGERFKAYGWNYLRVEDGNNLDEIDNALKLAEAEQERPTIIEVKTVLGYGSPHAGENTVHGNPLTAGECRQTMHDLGWDYEPFEVPDEVHQRYAEILQEGQQRYVSWQNELHKLKKVNEELAQNFEVNFSNQAATGDISLQYNAGDTEAVRMTVHKLIQKSAHTPLNFWGGSADLSSSNKTYFENDDGFEPGQYQNKNVFYGVREFAQAAAVNGITLFGGSRTFGSTFFVFSDYMKNAIRMAALQRIPAIFAFSHDSIALGQDGPTHQPVEQLDGLRAMPGLTVFRPADAIETQSVWDYALNKNHGPVVIAMSRQALPVLEGSLKYAKECVKRGGYIVSPSGVSNSDGIIIATGSEVSISIEAQTKLKRQNINVEVVSMPSTELFLQQPKSYRDKVLDPTVRNRMSVEMGSTQSWYRFTGLDGVNIGLDHFGASGPVDEIIQRFGFSSENIAQTYLQHFRG

SEQ ID NO: 25840 - protein, 328 aa, Rubrivivax gelatinosus PM1
MAGKNPFPLSKEALLNCYRSMRTIRDFEERLHVDFGRGDIPGFVHLYAGEEAGGVGIMSHLGDGDRIASTHRGHGHCIAKGVDVVAMMKEIYGKKGGCGNGKGGSMHIADLSKGMMGANGILGAGAPLICGAALAAKFRKKNEVGICFVGDGASNQGTFLESLNLAAVWTLPVIFVVENNGYAESTSRDYGTAVDSYVDRASGFGMPGITVDGTDFFAVYEAAGEVIKRAREGGGPSLLEVKMVRFYGHFEGDAQTYRAPGELDDIRTNQDCLLKFKAHVTKAGVISAAELEAIDKEVAALIEDAVKQAKAAPLPTAADLLTDVYVSY

SEQ ID NO: 25841 - protein, 311 aa, Vibrio fischeri ES114
MKVAVIGAAGGIGQALALLLKNRLPAGSDLALYDIAPVTPGVAADLSHIPTPVSIKGYCGEDPTPALEGADVVLISAGVARKPGMDRSDLFNINAGIVKSLTEKIAVTCPKACIGIITNPVNTTVAIAAEVLKKAGVYDKNKLFGVTTLDVIRSETFVAELKDKDPGEIRVPVIGGHSGVTILPLLSQVQGVEFTAEEVAALTPRIQNAGTEVVEAKAGGGSATLSMGQAACRFGLSLVKALSGEEGVVECAYVEGNGEHARFFAQPILLGKNGVEEIQSYGELSAFEQEALESMLDTLRGDIKIGEEFVQ

SEQ ID NO: 25842 - protein, 728 aa, Idiomarina loihiensis L2TR
MRCDIEGWQQDFIERLAQEDLPAPQSQHSNLNDSDLFALFHSQVLSRFIDIESRRLQRQGKSFYTIGSAGHEGNAAVAAALRVTDPAFLHYRSGAFFLQRAKQLEGSNSLYDLMLSFCASSEDPISGGRHKVLGSLALNIPPQTSTIASHLPKAMGTAYAIGLSKRLKQAGQWPDDAIVLCNFGDASANHSTAVGALNATGWSAYQGMPMPILYVCEDNGIGISTSTPRGWTAHQLQNYPAIRYYYADGANVSETYAVARQAAEYIRRTRKPAILHLKTQRFFGHAGADAEVAYRSNESIEQSFETDVLLQSAAQVIERELCTGIQLSEKAQCWLQRIRRVGTEASARPRLECAESVMASIVPKTLADDTQPLTSTQQQAVFAFDKRNFKKPQPLGKMINWALHEILARYQNTVVFGEDVGKKGGVYHVTHHLFDHFGANRVVNTLLDEQSILGLAMGMAQQGFLPIPEIQFLAYVHNAEDQIRGEAATLPFFSNGQYHNGMVIRIAGLAYQKGFGGHFHNDNSFAVFRDIPGVIVMCPSNGHDAVLMMRQAVQLAHCQKRLVIFLEPIALYMTRDLLAEGDKGWLHEFPSATAPLPALGEPSRYGEGDELVIITYGNGYYLSRQACSELALEKRIRILDLRYLVPLDIEKIVAAVGSAKHILVVDECRNRGSLSEELVTALYEHRRDWQRVDRITAKDSFIPLGSAAYKVLPGKEDIIHYLQEHLGQ

SEQ ID NO: 25843 - protein, 475 aa, Fusobacterium nucleatum subsp. nucleatum ATCC 25586
MRSLKKTKIVCTIGPVTESVETLKELLNRGMNVMRLNFSHGDYEEHGMRMKNFRQAMSETGIRGGILLDTKGPEIRTMTLKDGKDVSIKAGQKFTFTTDQSVVGDNERVAVTYENFAKDLKVGNMVLVDDGLLELDVVEIKGNEVICIARNNGDLGQKKGINLPNVSVNLPALSEKDIEDLKFGCQNNVDFVAASFIRKADDVRQVRKVLRENDGERIQIISKIESQEGLDNFDEILAESDGIMVARGDLGVEIPVEEVPCAQKMMIRKCNRVGKTVITATQMLDSMIKNPRPTRAEANDVANAILDGTDAVMLSGETAKGKYPLAAVEVMNKIAKKVDATIPPFYIEGVINKNDITSAVAEGSADISERLNAKLIVVGTESGRAARDMRRYFPRAHILAITNNEKTANQLVLSRGIISYVDASPKTLEEFFVVAESVAKKLNLVKNNDIIIATCGESVFIQGTTNSIKVIQVKA

SEQ ID NO: 25844 - protein, 308 aa, Bacteroides thetaiotaomicron VPI-5482
MRKVIGIGETILDIIFRGNQPSAAVPGGSVFNGIVSLGRMGIKVGFISETGNDRVGNIILQFMRENNIPTDHVNVFPDGKSPVSLAFLNEQSDAEYIFYKDYPKQRLDVLYPKLEEDDIVMVGSYYALNPVLREKILELLDQAREKKAIIYYDPNFRSSHKNEAMKLAPTIIENLEYADIVRGSLEDFFYMYGLQDVDKIYKDKIKFYCPRFICTAGGDKVSLRTNLVSKEYPIEPLEAVSTIGAGDNFNAGLIYGLLKYDVRYRDLNNLNEEVWDKVVQCGKDFAAEVCRSFSNSVSVEFAGQYASK

SEQ ID NO: 25845 - protein, 678 aa, Chlamydophila caviae GPIC
MVAIQHELRSSIKEVLKLVWTLRFAENKMLLLSRQSDSGGTFQLSCAGHELAGVIAGKSLIPGKDWSFPYYRDQGFPIGLGCDLSEILASFLARLTPNHSSGRMMPYHYSHKKLRICCQSSVVGTQFLQAAGRAWATKHAKSNEVVYVSGGDGSTSQGEFHEMLNYVALHKLPLVTVVQNNSWAISVPFKDQCSADLARLGESYRGLSVYEVDGGDYFGLVDVFSKAVDQARHASVPALILINVMRLEPHSNSDNHEKYRSRDDLDYCMNNDPLIRLERQMVEECGISPAEILEIKAEAEAEVARACELAEGVPFPSKGSTSHDVFSPHTISLIDYEGSLEAQRLRDTQPKVMRDAITEALVEEMNRDSGVVVFGEDVAGDKGGVFGVTRNLTDKFGVERCFNTPLAEATIIGTAIGMAMDGIHKPVAEIQFADYIWPGINQLFSEASSIYYRSAGEWEVPLVIRAPCGGYIQGGPYHSQSIEAFLAHCPGIKVAYPSNAADAKALLKAAIRDPNPVVFLEHKALYQRRIFSACPVFSSDYVLPFGKAAITHPGSDLTIVSWGMSLVMSMDVAKELAALDISVEVIDLRTIVPCDFSTVLESVKKTGKLLIAHEASEFCGFGSELAATVAEQAYSYLDAPIRRVAGLHAPVPYSKILENEVLPQKEKILQAAKSLAEF

SEQ ID NO: 25846 - protein, 217 aa, Synechococcus elongatus PCC 6301
MALPQVIFFDAVGTLFGVKGSVGLAYRQLALEFGVDANARRLNDAFYAAFQEAPPLAFPEAPPEQVPALEYQWWQAIARRTFERSGDLVQFSDQSFADFFDNLYRHFQGPEPWFVYDDVWPLLDYWRDRGVALGIISNFDSRIYPVLDSLGLTNYFSSITISPEVGAAKPDRLIFAMALAQQQCQPHEAWHIGDSFREDVRGSQAAGLQPIWLKREA

SEQ ID NO: 25847 - protein, 566 aa, Acinetobacter sp. ADP1
MTAETNTNKHPLYIPYAGYTLLELPLLNKGSAFTQEERSHFNLHGLIPHVIETIEEQSQRSYQQYGAFNDDINKHIYLRNIQDTNETLFYRLINDHLEEMMPIIYTPTVGEACQRFSDIYRRHRGIFISYPDREHIDDILQNVSKRNVKVIVITDGERILGLGDQGIGGMGIPIGKLSLYTACGGISPAYTLPITIDVGTNNQQLLNDPIYMGWRQPRISGDEYYEFIDQVLTGIRRRWPHALIQFEDFAQKNAMPLLTKYRDKFCCFNDDIQGTAAVSVGSLIAASRAAGKQLKDQTITFLGAGSAGCGIAEQIVAQMVAEGLTDAQARARVYMVDRFGLITENQPNLLDFQRKLAQKAEVVSDWGNVEEVISLLDVVKNAKPTVLIGVSGQPGLFTEEVIRTLAENCERPIVMPLSNPTSRVEALPSDVIQWTNGRALIATGSPFAPVNYQGKLYNISQCNNSYIFPGIGLGVIASGAKRVTDNMLMASSNALADCSPLLQNPNADLLPAIADIQDVSKRIAFKVAKAAIEDGVALNMSDEVLLQNIEKEFWKPKYRGYKRVPF

SEQ ID NO: 25848 - protein, 474 aa, Campylobacter jejuni subsp. jejuni NCTC 11168
MKKLTNDFGNIIADNQNSLSAGAKGPLLMQDYLLLEKLAHQNRERIPERTVHAKGSGAYGEIKITADLSAYTKAKIFQKGEVTPLFLRFSTVAGEAGAADAERDVRGFAIKFYTKEGNWDLVGNNTPTFFIRDAYKFPDFIHTQKRDPRTHLRSNNAAWDFWSLCPESLHQVTILMSDRGIPASYRHMHGFGSHTYSFINDKNERFWVKFHFKTQQGIKNLTNQEAAELIAKDRESHQRDLYNAIENKDFPKWKVQVQILAEKDIEKLGFNPFDLTKIWPHSFVPLMDIGEMILNKNPQNYFNEVEQAAFSPSNIVPGIGFSPDKMLQARIFSYPDAQRYRIGTNYHLLPVNRAKSEVNTYNVAGAMNFDSYKNDAAYYEPNSYDNSPKEDKSYLEPDLVLEGVAQRYAPLDNDFYTQPRALFNLMNDDQKTQLFHNIAASMEGVDEKIITRALKHFEKISPDYAKGIKKALEK

SEQ ID NO: 25849 - protein, 96 aa, Ginkgo biloba
LDMPGLKSNDIKVQVENENVLNITGERRRDEKADADAKYIRMERRVGKFMRQFTLPSDANLEGISATCYDGVLTVTVPKIPPPEPKKPKTIEVIAS

SEQ ID NO: 25850 - protein, 395 aa, Mesorhizobium loti MAFF303099
MTAAFLSHIDSELAGLKSAGLYKSERVISSMQSAQIEVGGEKVLNFCANNYLGLADNADLRKAASQALDRYGYGMASVRFICGTQEEHKELEATISSFLGLEDTILYGSCFDANGGLFETLLGEEDAIISDALNHASIIDGVRLSKAKRFRYANNDMADLEARLKEARDCRFRLIATDGVFSMDGIIANLKGVCDLADKYDAMVMVDDSHAVGFVGRQGRGSAEHCGVEGRVDIVTGTLGKALGGASGGYTSGKRQVVDWLRQRSRPYLFSNTLMPAIAGASIKVFELIRNGDALRERLYANAARFRSEMGKLGFTLAGADHPIIPVMLGEATLAQEMAARMLKRGIYVIGFSFPVVPKGQARIRTQMSAAHTSADIDRAVEAFGAVGRELGVIA

SEQ ID NO: 25851 - protein, 344 aa, Mesorhizobium loti MAFF303099
MSNMMKALVKAKAEPGIWMEEVPVPEIGPNDVLIKIRKTAICGTDVHIYNWDQWAQKTVPVPMVTGHEFVGTVADFGAAVTEYKVGQRVSGEGHIVCGHCRNCRAGRGHLCRNTLGVGVNRPGAFGEYLAIPQHNVVPIPDDVPDEIAAIFDPLGNAVHTALSFDLVGEDVLVTGAGPIGIMGALVAQCVGARKVVITDINPVRLALAKKLGVQHVVDASKEKLRDVMPVLGMTEGFDVGLEMSGAAPAFRDMIDTMNNGGKIAILGIAPTGFEIDWNKVIFKMLHLKGIYGREMFETWYKMIALVQGPLDVSGLITHRIGIDDFQEGFDAMRSGSSGKVVMDW

SEQ ID NO: 25852 - protein, 341 aa, Arabidopsis thaliana
MSTVGNSTNIFWQESPIGKTERQKLLNQKGCVVWITGLSGSRKSTLACSLSRELNNRGKLSYILDGDNLRHGLNKDLGFKAEDRVENIRRVVDESLIPKKLTNTNANPLKRCLICSDSLHGEVAKLFADAGLICIASLISPYRKDRDACREMIQNSSFIEASYSKPGFTVCNPHSVFMNMSLQLCEARDPKGLYKLARAGKIKGFTGIDDPYESPLNCEIELKEKEGECPSPVAMAEEVISYLEDKDPEFCNINKEQNKTRSRGNFETRMVLNSRLVETTVNLSADLWQYVACNPEILPRATVIHFIFCIPLLQLRRLASSLGSYLCFDSGAGVDHRTHSD

SEQ ID NO: 25853 - protein, 318 aa, Ralstonia eutropha JMP134
MNQLEQLKQFTTVVADTGDFQLMKQYTPQDATTNPSLILKAVQKPEYRGLLEQAVRDYHNEGGVDAVMDGVLIAFGCEILAIVPGRVSTEVDARLSFDTEATVEKARHLIRLYEQRGVARERVLIKIASTWEGIRAAEILQREGIRCNMTLLFSLVQAVACAEAGAQLISPFVGRILDWYKKQAGDQWDAAANAGDNDPGVRSVRQIYDYYKKFGYNTEVMGASFRSTAQIVALAGSDLLTISPDLLEQLARTEGTVERKLSVDLAQAGNIARIPADEPAFRWQLNEDAMATEKLAEGIRLFAADAIKLEKLVAEIAG

SEQ ID NO: 25854 - protein, 451 aa, Magnaporthe grisea 70-15
MGQTLSEPVVEKASARGEDDRFLYGVSAMQGWRISMEDAHTTVLDLLANDAEAAKQHKGKLAFFGVFDGHGGDKVALFSGDNIHKIVQNQDTFKSGNYEQALKDGFLATDRAILNDPKYEDEVSGCTACVGLLTDDKIYIANAGDSRSVLGVKGRAKPLSFDHKPQNEGEKARITAAGGFVDFGRVNGNLALSRAIGDFEFKKSAELAPEQQIVTAYPDVVVHDMGDDDEFLVIACDGIWDCQSSQAVVEFVRRGIAAKQALEKICENMMDNCLASNSETGGVGCDNMTMIIIGFLRGRTKEEWYEEIARRVANGDGPCAPPEYAEFRGPGVHHNFDDSDSGYDVDMDQSKGKTFGIGGYKGRVIFLGDGTEVLTDADDNAMFESEKQDLDSQVAKTGSSEDDGTTEDQTNKKEGTTDGKADKGTKDASEEAEAKAENIDAAVKKDEDIKV

SEQ ID NO: 25855 - protein, 245 aa, Xanthomonas axonopodis pv. citri str. 306
MSFHIRAITLDLDDTLWPFAPIGARIDQVLYDWMREHSPLTAERFPVEAMRELRERSFVDNPHLHHDLSALRRLTLEMALRESGGDLALLEPAYEVFYAARNQVECYPDALDALARIAAHVPVAALSNGNADLQRIGLMHHFAFQLGSREHGSAKPDPSIFLAACARLEVPPAQVLHVGDHVRMDVLGALDAGLRACWINREGAVWSHPTQQPDLQFDSMTGLADWLDAQQPHPGPMNAGITLPA

SEQ ID NO: 25856 - protein, 630 aa, Glycine max
MWRCIARGLRGPASTRSTSNHSLGSHFYRFFSSGANSSYTVVDHTYDAVVVGAGGAGLRAAIGLSEHGFNTACITKLFPTRSHTVAAQGGINAALGNMTEDDWRWHMYDTVKGSDWLGDQDAIQYMCREAPKAVIELENYGLPFSRTEDGKIYQRAFGGQSLNYGKGGQAYRCACAADRTGHALLHTLYGQAMRHNTQFFVEYFALDLLINSDGTCQGVIALNMEDGTLHRFQAASTILATGGYGRAYFSATSAHTCTGDGNAMVARAGIPLEDLEFVQFHPTGIYGAGCLITEGSRGEGGILRNSEGERFMERYAPTAKDLASRDVVSRAMTMEIREGRGVGPLKDHIYLHLNHLPPDVLKERLPGISETAAIFAGVDVTKEPIPVLPTVHYNMGGIPTNHYGEVVTIKGDNPDAVVSGLMAAGETACASVHGANRLGANSLLDIVVFGRACANRVAEIRRPGEKQKPLEKDAGQRTIAWLDKLRNSNGSLPTSQIRLNMQRVMQNNAAVFRTQETLEEGCQLIDKTWESFHDVQVKDRSLIWNSDLIETIELENLLINACITMYSAEARKESRGAHAREDFKVRDDGNWMKHTVGFWENEKVRLDYRPVHLNVLDDEVESFPPKARVY

SEQ ID NO: 25857 - protein, 189 aa, Cucumis sativus
MASSILSSAAVASVNSASPAQASMVAPFTGLKSSAGFPITRKNNVDITTLASNAGKVQCMKVWPPLGLRKFETLSYLPDMSNEQLSKECDYLLRNGWVPCVEFDIGSGFVYRENHRSPGFYDGRYWTMWKLPMFGCTDSSQVIQEIEEAKKEYPDAFIRVIGFDNVRQVQCISFIAYKPQVLLFLSSIC

SEQ ID NO: 25858 - protein, 555 aa, Oryza sativa (indica cultivar-group)
MTTSSSGSVETSANSRPGTFSFASASFTDLLGGNAGAGGGGVSRYKAMTPPSLPLSPPPVSPSSFFNSPIGMNQADFLGSPVLLTSSIFPSPTTGAFASQHFDWRPEVAAAQSADQGGKDEQRNSYSDFSFQTAPASEEAARTTTFQPPVPPALLGDEAYRSQQQQQPWGYQQQPAGMDAGANAASFGAAPFQATSSEMAPQVQGGGGYSQPQSQRRSSDDGYNWRKYGQKQVKGSENPRSYYKCTFPNCPTKKKVERSLDGQITEIVYKGTHNHAKPQNTRRNSGSSAAQVLQSGGDMSEHSFGGMSGTAATPENSSASFGDDEIGVGSPRAGNGGGDEFDDDEPDSKRWRKDGDGEGISMAGNRTVREPRVVVQTMSDIDILDDGYRWRKYGQKVVKGNPNPRSYYKCTTAGCPVRKHVERASHDLRAVITTYEGKHNHDVPAARGSAALYRPAPPAAAATSSHPYLPNQPPPMSYQPTGPQPYALRPDGFGGQGPFGGVVGGSSFGGLSGFDDARGSYMSQHQQQQRQNDAMHASRAKEEPGDDMFFQNSLY

SEQ ID NO: 25859 - protein, 453 aa, Novosphingobium aromaticivorans DSM 12444
MAEQEFDYDLFVIGAGSGGVRASRIAASHGARVAVAEEYRVGGTCVIRGCVPKKLLVYGSHFAEELQDAANYGWTVEKMSFDWPTLRDAVLKDVDRLNTAYTSTLENNKVERFLERATVTGPNTVRLGGSGREISARYILVATGAWPVMPDFPGNEHCITSNEVFHLENLPKRVVISGAGYIAMEFAGIFNALGCHVTVVNRSETILRGYDESLRDRLLQITMARGIEYKFNCPFEKVEKQADGSLQVFLAGQPDPLAADIVLVATGRLPKTDGLGLETAGIELGAQGEIPVDDHGRTACDSIYAVGDVTNRVQLTPIAIREGHAFADRVFGGKDTSVSYDCIPSAVFSQPPLAGVGLTESQARQAFGGNIKVYSSDFRPMKNIFGHRPERGLYKMIVEATSERVLGIHMIGPEAPEILQAAAIAVKAGLTKADFDATVALHPSMAEELVLMR

SEQ ID NO: 25860 - protein, 407 aa, Pseudomonas putida
  misc_feature (80)..(80): Xaa can be any naturally occurring amino acid
  misc_feature (83)..(83): Xaa can be any naturally occurring amino acid
  misc_feature (93)..(93): Xaa can be any naturally occurring amino acid
  misc_feature (102)..(102): Xaa can be any naturally occurring amino acid
  misc_feature (106)..(106): Xaa can be any naturally occurring amino acid
  misc_feature (127)..(127): Xaa can be any naturally occurring amino acid
  misc_feature (139)..(139): Xaa can be any naturally occurring amino acid
  misc_feature (148)..(148): Xaa can be any naturally occurring amino acid
  misc_feature (168)..(168): Xaa can be any naturally occurring amino acid
  misc_feature (195)..(195): Xaa can be any naturally occurring amino acid
  misc_feature (388)..(388): Xaa can be any naturally occurring amino acid
  misc_feature (396)..(396): Xaa can be any naturally occurring amino acid
  unsure (1)..(407): unsure at all Xaa locations
NEYAPLRLHVPEPTGRPGCQTDFSYLRLNDAGQARKPPVDVDAADTADLSYSLVRVLDEQGDAQGPWAEDIDPQILRQGXRAXLKTRIFDSRXVVAQRQKKXSFYXQSLGEEAIGSGQALALNRTDXCFPTYRQQSILXARDVSLVEXICQLLSNERDPLKGRQLPIXYSVREAGFFTISGNLATQFVQAVGWAXASAIKGDTKIASAWIGDGATAESDFHTALTFAHVYRAPVILNVVNNQWAISTFQAIAGGESTTFAGRGVGCGIASLRVDGNDFVAVYAASRWAAERARRGLGPSLIEWVTYRAGPHSTSDDPSKYRPADDWSHFPLGDPIARLKQHLIKIGHWSEEEHQATTAEFEAAVIAAQKEAEQYGTLANGHIPSAASXFEDVYKEXPDHLRRQRQEL

SEQ ID NO: 25861 - protein, 236 aa, Lotus corniculatus var. japonicus
MLCTRILFFSRTIRFAAPLSSSSLHSFVFSNSPITLSRSYHSSLLTTTSFPIKSLVSTSTTPFSFTLRPDHTMAAPTSVYDFTVKDARGNDVNLGDYKGKVLLIVNVASQCGLTNSNYTELSQLYEKYKSKGLEILGFPCNQFGAQEPGDNEQIQEFVCTRFKAEFPVFDKVDVNGDSAAPLYKYLKSSKGGLFGDKIKWNFSKFLVDKEGNVVERYAPTTSPLSIEKDLVKLLGA

SEQ ID NO: 25862 - protein, 479 aa, Sphingomonas sp. tfd44
MTYPDTRLFIGGRWQDAADGRSLAVQNPATGLEIGRVAHCGRADLDRALDAAQRGFEIWRDLTPAERSKIMRRAAGLMRERADEIARLLTQEQGKPLHEAKIEAMAAGDIIEWFAEEGFRLYGRLVPHRTDIAIRQMVIKDAVGPVAAFTPWNFPINQVVRKISAALAAGCSMIVKAPEETPASPAELIRAFQDAGLPDGVLNLVFGDPAEISNYLISSPIIRKITFTGSTPVGKLLASLAGKHMKRVSMELGGHAPAIVCEDADIGLAVKSLSASKFRNAGQVCIAPTRFLVHSSIKHAFADALAAAARDLRVGDGFADGTQIGPLANSRRLAAMAEFQQDAIEKGATLLTGGNRVGDVGNFWAPTVLSDVPLEARLFNDEPFGPVAGIRSFDRLEEAILEANRLSFGLAGYAFTKSLATADILARRVEVGMLWVNSPATPTAELPFGGIKDSGYGTEGGPEALDNYINPRAVVVANV

SEQ ID NO: 25863 - protein, 350 aa, Xylella fastidiosa Temecula1
MVNVSITTDYSRMLFMRNTKSTLKIAIIGYGSQGRAHALNLRDSGFDIIVGLRPGGATEAKAQADGFTVQSPDQAAKHADLVAVLTPDMVQKKLYEEVLAPNIKQGACLLFAHGLNVHYSLITPRSDLDVVLVAPKGPGALVRREYEIGRGVPCIYAVHQDLSSHAEQLALTYAGGLGGARANIIKTTFKEETETDLFGEQAVLCGGVSSLVQAGFETLVEAGYQPEIAYYEVLHELKLIVDLFYEGGITRMLEFVSETAQYGDYVSGPRVIDRSTKERMKAVLKDIQDGTFTKHWIAEYQAGLPNYKKYKQADLEHPIEKVGKQLRAKMVWLNSEKTNDTTHPMSSKVV

SEQ ID NO: 25864 - protein, 425 aa, Sphingomonas sp. tfd44
MLSHADNMKMCQTGRGTPMGEALRRFWIPVLLSEQLSEPDGPPRRLEIMGETFAAFRNTDGVVGILDEQCCHRGASLVLGRVEGCGIRCLFHGWKFAVDGTIMETPNVLDPRFKEKFRAKSYPVREEGGMIWMYMGPAELEPPFPHWPYFDVPAENRLAVAFVVDECNFVQLGEALVDSSHLTILHKDIFARDSDTVVAVAVKNAGAVAAPKIEVQETDFGLYYAATRAVPTEDGGTVDEVRLATFVAPFHYHNANGNFLGIIVPMTDTRTLHYFVWWDEEKQLGLEPTRSAILRDGNLTEELLIQMGTHPDTWFLPDKPNRMNNYRQYREAMKNGAWTGIPPLVPEDVVILSSSGAIRDRSKEILAPADIGVARLYRVFLRLADAIANGEEPSALYSNPMTIAGTHFLVPEARLGRILFQSMSR

SEQ ID NO: 25865 - protein, 315 aa, Escherichia coli
MRKFIRGSEMDIAVIGSNMVDLITYTNQMPKEGETLEAPAFKIGCGGKGANQAVAAAKLNSKVLMLTKVGDDIFADNTIRNLESWGINTTYVEKVPCTSSGVAPIFVNANSSNSILIIKGANKFLSPEDIDRAAEDLKKCKLIVLQLEVQLETVYHAIEFGKKNGIEVLLNPAPALRELDMSYACKCDFFIPNETELEILTGMSVDTYDHIRLAARSLVDKGLNNIIVTMSEKGALWMTRDQEVHVPAFKVNAVDTSGAGDAFIGCFSHYYVQSGDVEAALKKAALFAAFSVTGKGTQSSYPSIEQFNEFLTLNE

SEQ ID NO: 25866 - protein, 218 aa, Synechococcus elongatus PCC 6301
MGQQVFVTAAIADYLQAMTPPEPAVLQMWRQQTATHAAAKLGITPTQSQFLALLVQIGGYQRVLELGTGLGYSALAMAIALPPTGSILTLDRDRQTTDLARQYWESLGFGDRIQLLQGEIRPALQQLQQQGDRFDFIWIDADKRATADYFQTARSLLTPKGLIAVDNVLWSGRVADPEDGDRRTQALRNFNAAIAADPNLQVSLLPLGDGITLIRTCD

SEQ ID NO: 25867 - protein, 187 aa, Brassica napus
MSGSLSCSAADLAVLLGPNATAAADYICGQLSTVNNKFTDVAFAVDNTYLLFSAYLVFSMQLGFAMLCAGSVRAKNTMNIMLTNVLDAAAGGLFYYLFGYAFAFGSPSNGFIGKHNFGLKDFPSASADYSNFLYQWAFAIAAAGITSGSIAERTQFVAYLIYSSFLTGFVYPVVSHWFWSVDGWASP

SEQ ID NO: 25868 - protein, 842 aa, Nostoc punctiforme PCC 73102
MRAVLMAGGSGTRLRPLTCDLPKPMVPILNRPIAEHIINLLKRHQITEVIATLHYLPDVLRDYFQDGSDFGVQMTYAVEEDQPLGTAGCVKNIAELLDETFLVISGDSITDFDLTAAIAFHKQNKSKATLILTRVPNPIEFGVVITDEERRIRRFLEKPSSSEIFSDTVNTGTYILEPEVLEYLPANIECDFSKDLFPLLLAKDEPMYGYIAQGYWCDVGHLDAYREAQYDALDRKVNLDFAYKEVSHELWVGQNTYIDHTAVIETPAVIGDNCRIGARVQIEAGTVIGDNVTIGADANLKRPIVWNGAFIGDEAHLSACVISRGARVDRRAHVLEAAVVGSLSTVGEEAQISPGVRVWPSKKIESGAVLNINLIWGNTAQRNLFGQRGVQGLANIDITPEFAVKLGSAYGSTLKPGSKVTVSRDQRNVSRMVTRSLIAGLMSVGIDIQNLDATAIPIARTVIPTMSVAGGIHVRVHPDRPDYILIEFMDAKGINISKALEKKIEGAYFKEDMRRALIHEIGDVSYPSQVMDRYCTAFEKLLHVHTLRNSRAKVVIDYVYAVSGAVLPQMLDKFGADAVVLNASVNKSAMSITDREGLLTQLGHVVEALKANFGVQVSANGEQLILVDESGYPIRGETLTALMVDMILTANPRGTVVVPVHASSAIEQVARRHDGRVIRTKANPTALMEACQKNPNVVLGGSGETGFIFPQLHPGFDSMFCIAKIIEMLTIQERSLAAARSELPRVIHKTYTVRCPWTAKGALMRYLVETHPAQNLELIDGVKICQPYDDSWLLVLPDASEPLVHLYANSNDREWVDETVRNYRTRVQSFVERQQEYQPAEM

SEQ ID NO: 25869 - protein, 276 aa, Ralstonia solanacearum
MTDTQPAVTLGDGARMPQLGLGLWRTPAGETAGLVRTAIEAGYRLVDTAAAYGNERGVGEGVRAAGAEPAVFVTTKLWNEDQGYDRTLRAFDESLRCLGLPAIDLYLIHWPAPSRGRYVESWRALIRLRDEGRARSIGVSNFGAEHLARIIDETGEAPAVNQIELHPWFQQRALRAFHARHGVRTESWSPLGQGGLLHDLTVREIAARHGKTPAQVVIRWHLDNGLIVIPKSAHPDRIRENIAVFDFCLTPADQAAIAGLDRADGRIGPDPVAAGF

SEQ ID NO: 25870 - protein, 406 aa, Mycobacterium avium subsp. paratuberculosis K-10
MSAVREAVICEPVRTPIGRYGGMFKALTAVDLGVAALGGLLQRTGLPPEAVQDVILGHCYPSSEAPAIGRVVALDSGLPVTVPGMQVDRRCGSGLQAVIQACLQVRNGDHDLVIAGGCESMSNVAFYSTDMRWGGARSGVRVHDGLARGRTTAGGRRYPVPGGMLETAENLRRQYGISRQEQDELAVRSHQRAVAAQKDGILAQEIIAVAVPTRHGDELIDTDEHPRADTSVESLSKLKPVLLDQDPEATVTAGNASGQNDVASMCVVTTPEKADEHGLRPLVRLVSWAVAGVAPHIMGIGPVPATEVALAKAGLSLSDIDLIELNEAFAAQALAVMREWKFGAADHDRTNVHGSGISLGHPVGATGGRMLATLARELTRRQARYGLETMCIGGGQGLAAAFERVA

SEQ ID NO: 25871 - protein, 321 aa, Malus x domestica
ILPFKLPAIGPNDVRIRIKAVGICGSDVHYLKTMKCADFEVKEPMVIGHECAGIVDKVGSEVKHLVPGDRVAVEPGISCARCQQCKGGRYNLCPDMKFFATPPVHGSLANQIVHPADLCFKLPKNVSLEEGAMCEPLSIGVHACRRANVGPETTVLITGAGPIGLVSVLAARAFGAPRIVIVDMDDKRLAMAKSLGADETVKVSTKMEDLDDEVAEIKKAMESEVDVTFDCVGFNKTMSTGLNATRPGGKVCLVGMGHGMMTVPLTPAAAREVDVVGVFRYKNTWPLCLEFLRSGKIDVKPLITHRFGFTEKEVEEASLEF

SEQ ID NO: 25872 - protein, 165 aa, Zea mays
MAASSTATSVHDFIVKDASGKDVDLSTYEGKVLLIVNVASQCGLTNSNYTELAQLYEKYKDQGFEILAFPCNQFGGQEPGTNEEIVQFACTRFKAEYPIFDKVDVNGSNAAPIYKFLKSSKGGLFGDSIKWNFSKFLVDKEGRVVDRYASILPGSPCHQISPRMN

SEQ ID NO: 25873 - protein, 151 aa, Synechococcus elongatus PCC 6301
MSVERTFIAIKPDGVQRGLVGTIIGRFEQKGFKLVGLKQLKPSRELAEQHYAVHRERPFFNGLVEFITSGPIVAIVLEGEGVVAAARKLIGATNPLTAEPGTIRGDFGVNIGRNIIHGSDAIETAQQEIALWFSPAELSDWTPTIQPWLYE

SEQ ID NO: 25874 - protein, 583 aa, Vibrio vulnificus CMCP6
MSINTDESTWRTFKRLWTFIRLYKSGLAVAVVALIINAVSDTYMVSLLKPLLDEGFGSAESDFLRTLPLLVFGLMFIRGISSFVSTYCLSWVSGNVVMQVRRMVFNHYMQMPVSYFDKEKSGSLLSRITYDSEQVSAATSQALVSIVREGTSIIGLLVLMFYNSWQLSLVLILVAPVVAWAIGFVSKRFRKISKNMQTTMGIVTSSAEQMLKGHKVVLSYGGQEVEKSRFDVVSNQMRQQSMKLITAQAAANPIIQMIASIAIVVVLYLASVDTIKDQLTPGTFTVVFSAMFGLMRPLKALTNVTSQFQRGMAAAQTLFALVDLEPEKNTGTYSVERAKGEVNVKDISFTYEGAEKPALSHVSFDIPRGKTVALVGRSGSGKSTIANLFTRFYDVDSGEIQLDGVDVRDYELKNLRTQFALVSQNVHLFNDTIANNIAYAAGDKYSREDIERAAELAHAMEFISKMENGLDTMVGENGASLSGGQRQRVAIARALLRDAPVLILDEATSALDTESERAIQSALDELQKNKTVLVIAHRLSTIEKADQILVIDDGSVVERGSHSELIEKDGAYAQLHRIQFGEG

SEQ ID NO: 25875 - protein, 230 aa, Lactobacillus plantarum WCFS1
MAKLVLIRHGQSEWNLSNQFTGWVDVDLSEKGVEEAKAAGQKVKEAGLEFDYAFTSVLTRAIKTLHYVLEESDQLWIPETKTWRLNERHYGALQGLNKKETAEKYGDDQVHIWRRSYDVLPPLLSADDEGSAVNDRRYADLDPNIVPGGENLKVTLERVMPFWEDQIAPKLLDGKNVIIAAHGNSLRALSKYIEQISDDDIMDLEMATGEPVVYDFDEKLKVLGKEKLGK

SEQ ID NO: 25876 - protein, 138 aa, Glycine max
MMASSTVLFTLVAALFVTSVVAQSPASSPALSPKRTPVLATPQKSPSPAISPSAVSPSSSPPAPTVNAPSPSPTSVDSPPSPPLSPSDSPAGVPSVTPSAISSPPSEAPAPSQNGAALNRFTVAGSAAVVVFAAALLM

SEQ ID NO: 25877 - protein, 1273 aa, Euglena gracilis
MPFDRQPLLSGEKGMPATSLWLVGGAVIAAVCVIVNTSYNGTQLSVTARPIQAAVSQVSMARFAESGVSRGSGNRVSQAVPLMAASVGAESESRRWVASAILFPLSGLFAAVALKMAMMKPKVAAVLPFTSEKDMKVWNPVNNKKFETFSYLPPLSDAQIAKQVDMIIAKGLSPCLEFAAPENSFIANDNTVRFSGTAAGYYDNRYWTMWKLPMFGCTDASQVLREISECRRAYPQCYVRLAAFDSVKQVQVISFVVQRPSGSSSSSWGMAAMTGEKDMKVWNPVNNKKFETFSYLPPLSDAQIAKQVDMIIAKGLSPCLEFAAPENSFIANDNTVRFSGTAAGYYDNRYWTMWKLPMFGCTDASQVLREISECRRAYPQCYVRLAAFDSVKQVQVISFVVQRPSGSSSSWGMAAMTGEKDMKVWNPVNNKKFETFSYLPPLSDAQIAKQVDMIIAKGLSPCLEFAAPENSFIANDNTVRFSGTAAGYYDNHYWTMWKLPMFGCTDASQVLREISECRRAYPQCYVRLAAFDSVKQVQVISFVVQRPSGSSSSSWGMAAMTGEKDMKVWNPVNNKKFETFSYLPPLSDAQIAKQVDMIIAKGLSPCLEFAAPENSFIANDNTVRFSGTAAGYYDNRYWTMWKLPMFGCTDASQVLREISECRRAYPQCYVRLAAFDSVKQVQVISFVVQRPSGSSSSWGMAAMTGEKDMKVWNPVNNKKFETFSYLPPLSDAQIAKQVDMIIAKGLSPCLEFAAPENSFIANDNTVRFSGTAAGYYDNRYWTMWKLPMFGCTDASQVLREISECRRAYPQCYVRLAAFDSVKQVQVISFVVQRPSGSSSSSSWGMAAMTGEKEMKVWNPVNNKKFETFSYLPPLSDAQIAKQVDMIIAKGLSPCLEFAAPENSFIANDNTVRFSGTAAGYYDNRYWTMWKLPMFGCTDASQVLREISECRRAYPQCYVRLAFDSVKQVQVISFVVQRPSGSSSSSWGMAAMTGEKDMKVWNPVNNKKFETFSYLPPLSDAQIAKQVDMIIAKGLSPCLEFAAPENSFIANDNTVRFSGTAAGYYDNRYWTMWKLPMFGCTDASQVLREISECRRAYPQCYVRLAAFDSVKQVQVISFVVQRPSGSSSSSWGMAAMTGEKEMKVWNPVNNKKFETFSYLPPLSDAQIAKQVDMIIAKGLSPCLEFAAPENSFIANDNTVRFSGTAAGYYDNRYWTMWKLPMFGCTDASQVLREISECRRAYPQCYVRLAAFDSVKQVQVISFVVQRPSSGGRSW

SEQ ID NO: 25878 - protein, 756 aa, Haemophilus influenzae R2866
MTTSHILGFPRVGAKRELKFAQERYWRKELAEQDLLDLAKALREKNWKHQAAANADFVAVGDFTFYDHILDLQVATGAIPARFGFDSQNLTLDQYFQLARGNKDQFAIEMTKWFDTNYHYLVPEFQKSTAFKANPAHYVNQIREAKALGLNFKPVIVGPLTFLWLGKEKGEAFNRFDLLNQLVPVYVEILNALVAEGAEWIQIDEPALALDLPAEWVEAYKSVYTELSKVNAKLLLATYFGSVAEHAELLKALPVAGLHLDLVRAPEQLAAFEDYSKVLSAGVIEGRNIWRANLNKVLDVLEPLKAKLGERLWIAPSCSLLHTPFDLEVEVQLKEKNTALYSWLSFTLQKVEELNVLKQALNNGRASVQAALDASQVAADARATSKEIHRPEVAERLANLPKGADQRKSPFAERIVKQNAWLNLPLLPTTNIGSFPQTTEIRHARASFKKGELSLADYEAAMKKEIEYVVRRQEELDLDVLVHGEAERNDMVEYFGELLDGFAFTKFGWVQSYGSRCVKPPVIYGDVIRPEPMTVRWSQYAQSLTNRVMKGMLTGPVTILQWSFVRNDIPRSTVCKQIGVALSDEVLDLEAAGIKVIQIDEPAIREGLPLKRADWDAYLQWAGEAFRLSSMGVQDDTQIHTHMCYSEFNDILPAIAALDADVITIETSRSDMELLTAFADFKYPNDIGPGVYDIHSPRVPTATEVEHLLRKALNVIPKERLWVNPDCGLKTRGWTETIDQLKVMVDVTKKLRAELA

SEQ ID NO: 25879 - protein, 387 aa, Enterobacter cloacae
MEKVVIVDAIRTPMGRSKGGAFRNVRAEDLSAHLMRSLLARNPALDPAALDDIYWGCLHQTLEQGFNLARNASLLAEIPHSVPAVTVNRLCGSSMQALHDAARMIMTGDAQACLVGGVEHMGHVPMSHGVHFHPGMSRNVAKAAGMMGLTAEMLSRLHGISREMQDAFAARSHARAWAATQSGAFKNEIIPTGGHDADGVLKQFSYDEVIRPETTVEALSTLRPAFDPVTGTVTAGTSSALSDGAAAMLVMSESRARELGLTPRARVRSMAVVGCDPSIMGYGPVPASKLALKKAGLTASDIDLFEMNEAFAAQILPCIKDLGLMGQIDEKINLNGGAIALGHPLGCSGARISTTLINLMEGKDAQFGLATMCIGLGQGIATVFERV

SEQ ID NO: 25880 - protein, 357 aa, Sinorhizobium meliloti
MSVKTVAIIGCGIGRSHIVEGYQPHPDKFRVQALCDLNEERLNEVGDEFGIEQRTRSFNELLDDDSIDIIDICTPPGIHLEQVLAALAAGKHVICEKPLTGSLEGVDAIMEAEKEARGVLMPIFQYRYGDGIEKAKRIIEAGIAGKPYVGSVETFWLRTPEYYSVPWRGKWATELGGVLVTHALHLHDMMLHLFGPVARVFGRVATRVNDIEVEDCASASLLMKNGAFVSLSCTLGSQEQISRLRLHFENVTFESSHEPYAPGKDPWKIIAANDEVQARIDEVTGDWRPVSPRFTTQMAHFHDFLSGRGPLPVTTQDARRALELVTAIYQSADTGREIELPLGPDSPKYADWRANTR

SEQ ID NO: 25881 - protein, 487 aa, Oryza sativa (indica cultivar-group)
MASSTGGLDHGFTFTPPPFITSFTELLSGGGGDLLGAGGEERSPRGFSRGGARVGGGVPKFKSAQPPSLPLSPPPVSPSSYFAIPPGLSPTELLDSPVLLSSSHILASPTTGAIPAQRYDWKASADLIASQQDDSRGDFSFHTNSDAMAAQPASFPSFKEQEQQVVESSKNGGAGASSNKSGGGGNNKLEDGYNWRKYGQKQVKGSENPRSYYKCTYNGCSMKKKVERSLADGRITQIVYKGAHNHPKPLSTRRNASSCATAAACADDLAAPGAGADQYSAATPENSSVTFGDDEADNASHRSEGDEPEAKRWKEDADNEGSSGGMGGGAGGKPVREPRLVVQTLSDIDILDDGFRWRKYGQKVVKGNPNPRSYYKCTTVGCPVRKHVERASHDTRAVITTYEGKHNHDVPVGRGGGGGRAPAPAPPTSGAIRPSAVAAAQQGPYTLEMLPNPAGLYGGYGAGAGGAAFPRTKDERRDDLFVESLLC

SEQ ID NO: 25882 - protein, 143 aa, Cucumis melo
PDQQRLIFAGKQLEDGRTLADYNIQKESTLHLVLRLRGGMQIFVKTLTGKTITLEVESSDTIDNVKAKIQDKEGIPPDQQRLIFAGKQLEDGRTLADYNIQKESTLHLVLRLRGGMQIFVKTLTGKTITLEVESSDTIDNVKA

SEQ ID NO: 25883 - protein, 260 aa, Arabidopsis thaliana
MCTLTPMFPSKQQEWYSASTMEYPWLQSQVHSFSPTLHFPSFLHPLDDSKSHNINLHHMSLSHSNNTNSNNNNYQEEDRGAVVLEKKLNHNASERDRRRKLNALYSSLRALLPLSDQKRKLSIPMTVARVVKYIPEQKQELQRLSRRKEELLKRISRKTHQEQLRNKAMMDSIDSSSSQRIAANWLTDTEIAVQIATSKWTSVSDMLLRLEENGLNVISVSSSVSSTARIFYTLHLQMRGDCKVRLEELINGMLLGLRQS

SEQ ID NO: 25884 - protein, 172 aa, Cucumis melo
MDTKIGSLDTCKPQNNVVCCPSNGSVCTIQNSVVPSTVVNSSDATLGRHLARRLVQIGVTDVFTVPGDFNLTLLDHLIAEPALNNIGCCNELNAGYAADGYARSRGVGACVVTFTVGGLSVLNAIAGAYSENLPLICIVGGPNSTIMELTESFIYNGLPDLSQNSKVLKRYL

SEQ ID NO: 25885 - protein, 406 aa, Novosphingobium aromaticivorans DSM 12444
MNYDQVFDSAIERLHSEGRYRVFIDILRNKGAYPNARCFAGHNGPKPITVWCSNDYLAMGQHPKVIAAMEEALHNVGAGSGGTRNIGGNTHYHIELEHELADLHGKDGALLFTSGYVSNDATLSTLAKILPGCVIFSDELNHASMIAGIRNSGAEKRVFRHNDVEHLEQLLAETDPALPKLIAFESVYSMDGDIAPIHAICDLAEKYNALTYIDEVHAVGMYGPRGGGITDRDEAAHRIDIIEGTLGKAFGVMGGYIAADTRIIDVIRSYAPGFIFTTSLSPVLVAGVLASVRHLKASSAERDGQQAAAAYLKKAFADAGLPVMPSTTHIVPLMVGDPVKAKKISDILLAEYGVYVQPINFPTVPRGTERLRFTPGPSHTEAMMDELTGALVEIWQRMEMELQKAA

SEQ ID NO: 25886 - protein, 163 aa, Chlamydomonas reinhardtii
MLASLLPSAASALSAPAVGALPLLAQQLGRRLYHKNVVEHYERPRNVGSFDKSDPDVGTGLVGAPACGDVMKLQIKVDEQGNIVDARFKTFGCGSAIASSSVATEWVKGKSLDEVLKIKNSDIAKHLSLPPVKLHCSMLAEDAIKAAVKDIQAKRTKTATAAA

SEQ ID NO: 25887 - protein, 326 aa, Arabidopsis thaliana
MANSGEGKVVCVTGASGYIASWLVKFLLSRGYTVKASVRDPSDPKKTQHLVSLEGAKERLHLFKADLLEQGSFDSAIDGCHGVFHTASPFFNDAKDPQAELIDPAVKGTLNVLNSCAKASSVKRVVVTSSMAAVGYNGKPRTPDVTVDETWFSDPELCEASKMWYVLSKTLAEDAAWKLAKEKGLDIVTINPAMVIGPLLQPTLNTSAAAILNLINGAKTFPNLSFGWVNVKDVANAHIQAFEVPSANGRYCLVERVVHHSEIVNILRELYPNLPLPERCVDENPYVPTYQVSKDKTRSLGIDYIPLKVSIKETVESLKEKGFAQF

SEQ ID NO: 25888 - protein, 373 aa, Burkholderia sp. 383
MRALQWHGPRDVRLVEIDTPRVGPGDVRIAVAYCGICGSDLHEYADGPHAIPVDTPHPLSRRTAPLTLGHEFCGTVVEVGEGVTALRAGDRVAVEPEYRCSQCAYCRSGSYNLCVSMGFAGLMGDGGMADFAVVPAYMLHRLPDGVSLEQAAVMEPAAVALHALRRGELRLGETCAVFGLGPIGLLLIMLAKLQGATTIVAVDVSPERLAAATRFGATHTFDARALGASALQDAIRAATGGLGVDASFEAAGLQTTFESAMHALRKGGRIVMVGLMPHAGFDAFRAVNDELTFTASVGYRHAYEDLLRIVASGALDLTSIVTRTVSLEDAVADGFDALLADRAQIKILVSPAQRPPRRAHTIGSIEHESSVGV

SEQ ID NO: 25889 - protein, 512 aa, Glomerella cingulata
MKRKNVKGLALTPAAPKPPPTAETSRHGYDPRDKDGGEQSAQLEIGIEYKLDLRPEDLEILKELGSGNGGTVSKVKHVLTGTVMARKVIHVEAKKEMRKRIVRELQIMHGCSSEYIVNFYGAFLNPHNDVIMCMEYMDVGSLDRVSKVFGPVRVDVLGKIAVATLGGLTYLYSKHHIMHRDIKPSNILVNSRGSIKLCDFGVSGELINSVADTFVGTSTYMAPERIQGEKYTVKSDVWSFGLSIMELAIGKFPFNASEQLSDGECAPAAFGSVTADCTEPGPKLPKSDAFPSILEDMIQKCLFKNPDERPTPQELFDRDPFVQAAKRTPVDLREWAVGLMERDNRKSHLAPQLSPATRDLLNSSDSPTYQGGSTNDRSLDTPTSGEIPIAGAGIISPREPATHSNRSPTRNGINAISSRQQAAGHPGMGQRIVTTNSIPKVGEYPNSAGPVSANAASFSLPVRPAPGGPLPPAPPRKGTPDETRRENRRQATFGMPPAPRSYASDVYNGTSN

SEQ ID NO: 25890 - protein, 240 aa, Burkholderia sp. 383
MSRQWAFEGQSVVVTGGTSGIGARTAMRFAQAGASVVALGLDAAGPHAPVHAGIRCVELDVTDSDALTRTIAALPRLDVLVNGVGISRHADEYRMDQFELVLNVNLTSVMRASDAARPALSAHGGSIVNVASMYTYFGSKDRPAYSASKGGIAQLTRSLAQAWADRGIRVNAVAPGWIDTPLSSGLKADMQASRRILERTPLGRWGTADEVADVILFLCSPGASFVTGAVVPVDGGYSTV

SEQ ID NO: 25891 - protein, 704 aa, Bacillus ohbensis
MKNLTVLLKTIPLALLLFILLSLPTAAQADVTNKVNYTRDVIYQIVTDRFSDGDPSNNPTGAIYSQDCSDLHKYCGGDWQGIIDKINDGYLTDLGITAIWISQPVENVYALHPSGYTSYHGYWARDYKRTNPFYGDFSDFDRLMDTAHSNGIKVIMDFTPNHSSPALETDPSYAENGAVYNDGVLIGNYSNDPNNLFHHNGGTDFSSYEDSIYRNLYDLADYDLNNTVMDQYLKESIKLWLDKGIDGIRVDAVKHMSEGWQTSLMSDIYAHEPVFTFGEWFLGSGEVDPQNHHFANESGMSLLDFQFGQTIRDVLMDGSSNWYDFNEMIASTEEDYDEVIDQVTFIDNHDMSRFSFEQSSNRHTDIALAVLLTSRGVPTIYYGTEQYLTGGNDPENRKPMSDFDRTTNSYQIISTLASLRQNNPALGYGNTSERWINSDVYIYERSFGDSVVLTAVNSGDTSYTINNLNTSLPQGQYTDELQQLLDGNEITVNSNGAVDSFQLSANGVSVWQITEEHASPLIGHVGPMMGKHGNTVTITGEGFGDNEGSVLFDSDFSDVLSWSDTKIEVSVPDVTAGHYDISVVNAGDSQSPTYDKFEVLTGDQVSIRFAVNNATTSLGTNLYMVGNVNELGNWDPDQAIGPMFNQVMYQYPTWYYDISVPAEENLEYKFIKKDSSGNVVWESGNNHTYTTPATGTDTVLVDWQ

SEQ ID NO: 25892 - protein, 387 aa, Rickettsia sp. Rf31
SNNNDSEFAELKIRGKIFKLPILKASIGEDVIDISRVSSEADCFTYDPGFMSTASCQSTITYINGDKGILRHRGYDIKDLAEKSDFLEVAYLLIYGELPSIEQYNNFTKQVAHHSLVNERLHYLFQTFCSSSHPMAIMLAAVGSLSAFYPDLLNFKEADYELTAIRMIAKIPTIAAMSYKYSIGQPFIYPDNSLDFTENFLHMMFATPCTKYKVNPIIKNALNKIFILHADHEQNASTSTVRIAGSSGANPFACVSTGIASLWGPAHGGANEAVINMLKEIGSSKNIPKYIAKAKDKNDPFRLMGFGHRVYKNYDPRAVVLKETCKEVLKELGQLENNPLLQIAIELEAIALKDEYFIERKLYPNVDFYSGVIYKAMGIPSQMFTVL

SEQ ID NO: 25893 - protein, 389 aa, Rickettsia sp. RF2125
TNGNNNDSEFAELKIRGKIFKLPILKASIGEDVIDISRVSSEADCFTYDPGFMSTASCQSTITYIDGDKGILRHRGYDIKDLAEKSDFLEVAYLLIYGELPSIEQYNNFTKQVAHHSLVNERLHYLFQTFCSSSHPMAIMLAAVGSLSAFYPDLLNFKEADYELTAIRMIAKIPTIAAMSYKYSIGQPFIYPDNSLDFTENFLHMMFATPCTKYKVNPIIKNALNKIFILHADHEQNASTSTVRIAGSSGANPFACVSTGIASLWGPAHGGANEAVINMLKEIGSSENIPKYIAKAKDKNDPFRLMGFGHRVYKNYDPRAAVLKETCKEVLKELGQLENNPLLQIAIELEAIALKDEYFIERKLYPNVDFYSGIIYKAMGIPSQMFTVL

SEQ ID NO: 25894 - protein, 432 aa, Phaseolus vulgaris
FVRKTNKNRDMPLDSDVFRVPPGYNAPQQVHITQGDLVGRAMIISWVTMDEPGSSAVRYWSEKNGRKRIAKGKMSTYRFFNYSSGFIHHTTIRKLKYNTKYYYEVGLRNTTRRFSFITPPQTGLDVPYTFGLIGDLGQSFDSNTTLSHYELSPKKGQTVLFVGDLSYADRYPNHDNVRWDTWGRFTERSVAYQPWIWTAGNHEIEFAPEINETEPFKPFSYRYHVPYEASQSTSPFWYSIKRASAHIIVLSSYSAYGRGTPQYTWLKKELRKVKRSETPWLIVLMHSPLYNSYNHHFMEGEAMRTKFEAWFVKYKVDVVFAGHVHAYERSERVSNIAYKITDGLCTPVKDQSAPVYITIGDAGNYGVIDSNMIQPQPEYSAFREASFGHGMFDIKNRTHAHFSWNRNQDGVAVEADSVWFFNRHWYPVDDST

SEQ ID NO: 25895 - protein, 347 aa, Escherichia coli CFT073
MELVRSKVMKSILIEKPNQLSIIEREIPTPSAGEVRVKVKLAGICGSDSHIYRGHNPFAKYPRVIGHEFFGVIDAVGEGVESARVGERVAVDPVVSCGHCYPCSIGKPNVCTTLAVLGVHADGGFSEYAVVPAKNAWKIPEAVADQYAVMIEPFTIAANVTGHGQPTENDTVLVYGAGPIGLTIVQVLKGVYNVKNVIVADRIDERLEKAKESGADWAINNSQTPLGESFAEKGIKPTLIIDAACHPSILKEAVTLASPAARIVLMGFSSEPSEVIQQGITGKELSIFSSRLNANKFPVVIDWLSKGLIKPEKLITHTFDFQHVADAISLFELDQKHCCKVLLTFSE

SEQ ID NO: 25896 - protein, 181 aa, Acinetobacter sp. ADP1
MSQSIYHIPVQTISGQDTSLDTYRGKVLLIVNVASKCGLTPQYEGLEKLYQDKQQQGLEILGFPANNFLEQEPGSNDEIQQFCSLTYDVHFPLFGKISVAGEDKHPLYQTLIEAQPERIGEGPWWKDLVDYGLTPNPKPEVLWNFEKFLINKNGEVVARFAPDITADDPRLVDAINAELAK

SEQ ID NO: 25897 - protein, 462 aa, Bacillus cereus ATCC 10987
MTFSKSTTDKPSYTYEELSEKNKAYVWHPFTQMKDYLEEDPVIIERGEGRKLYDVNGNEYWDGVSSIWLNVHGHQVPELDEAIREQLNKISHSTMLGLANVPSILLAEKIIEVVPEGLKKVFYSDSGSSAVEIAIKMAFQYWQHKGKPKKQRFVTLKEAYHGDTIGAVSVGAIDLFHQVYSSLLFEAIKMPYPYTYRSPYGNNKEEIVKKHLEEMEELLKDKHEEIAAIIVEPLMQGAGGMITMPKGYLKGLRNLCTKYNVLFITDEVATGFGRTGKMFACEHENVTPDILTAGKGLTGGYLPVAITVTTDEIYNAFLGGYEEQKTFFHGHSYTGNPLGCAVAIANLELYEKTNLIEEVARKTEYVATQLEDLFAYKHVGDIRQCGLMVGIELVKNKETKEAFEWTERVGVQVCKRSRELGMILRPLGNTIVFMPPLASTIDEIDDMLRILYKAISDVTEGE

SEQ ID NO: 25898 - protein, 512 aa, Zea mays
MMIARRLLRSNNAPAQASSLLKHVTGTASLQGYADSLLGATVRHFGSAPSAQPEENGFKGHGMLAPFTAGWQSNDLHPLIIERSEGSYVYDINGNKYLDSLAGLWCTALGGSEPRLVKAATEQLNKLPFYHSFWNRTTKPSLDLAQEILSMFTAREMGKVFFTNSGSEANDSQVKLVWYYNNALGRPNKKKFIARSKAYHGSTLISASLTGLPALPQKFDLPAPFVLHTDCPHYWRYHLPGETDDEFATRLATNLENLILKEGPETIAAFIAEPVMGAGGVIPPPKTYFDKVQAVVKKYDILFIADEVITAFGRLGTMFGCDYYNIKPDLVSLAKALSNAYVPIGATLVSPEISEVIHSQSNKLGSFAHGFTYSGHPVACAVAIEALKLYRERDIPGHVKQIAPKFQDGIRALADSPIIGEIRGLGMIMGTEFTNNKSPTDLFPAEWGVGAIFGEECQKRGMLVRVAGDAIMMSPTLIMTPGEVDELVSIYGEALRATEERVSDLKMKSEKN

SEQ ID NO: 25899 - protein, 177 aa, Silene latifolia subsp. alba
MASLMSNAAVVTASTAAQANMVAPFSGLKSTSAFPVSRKSNVDITSLATNGGRVNCMQVWPPRNLKKFETLSYLPTLSEESLLKEINYLLIKGWVPCLEFEVGPAHVYRENNKSPGYYDGRYWTMWKLPMFGCTDASQVAAEVVECKNAYPDAHVRIIGFDNKRQVQCISFIAYKPE

SEQ ID NO: 25900 - protein, 320 aa, Magnaporthe grisea 70-15
MENYQKLEKIGEGTYGVVYKARDLLNGGRIVAMKKIRLEAEDEGVPSTAIREISLLKEMRDPNIVRLFNIVHTDGTKLYLVFEFLDLDLKKYMEALPVADGGRGKALPEGTGPQLSRLGLGDTMIKKFMSQLCDGVRYCHSHRILHRDLKPQNLLIDREGNLKLADFGLARAFGVPLRTYTHEVVTLWYRAPEILIGGRQYSTGVDMWSVGCIFAEMCTRKPLFPGDSEIDEIFKIFRLLGTPTEETWPSVTDEHIYPDFKPSFPKWQRDPNMKLCPGLNDAGLDLLEMMLVYDPAGRISAKQACNHPYFEDNTPAPPRR

SEQ ID NO: 25901 - protein, 82 aa, Triticum aestivum
MALSRRSAASALLLLVLLVATEMGTTTTKLAEARDCLSQSHNFKGACLSSSNCAGVCHTESFPGGECHTQHFERKCFCKRVC

SEQ ID NO: 25902 - protein, 398 aa, Pseudomonas putida KT2440
MFKHVDAYAGDPILSLMETFKADPRADKVNLSIGLYYDEAGVVPQLAAVDAVEKRIAGQDHEASLYLPMEGLASYRQAIQALLFGADHPAVTGGRVATVQTVGGSGALKVGADFLKRYFPQSEVWVSNPTWDNHRAIFEGAGFKVHTYPYFDQATRGVDFDGMLATLQSLPANSVVLLHPCCHNPTGADLQQHQWQQVVEVVKARQLIPFLDIAYQGFAEGLVEDAYAIREMARAGVPCLVSNSFSKIFSLYGERVGGLSVVCDDEATAQSVLGQLKATVRRNYSSPPNFGAQLVAGVLSDAGLNAQWAEEVEVMRKRILDMRQALVDALAVLLPGQDFQFFLRQRGMFSYTGFSVEQVRRLRDEFGVYLIDSGRVCMSGLRPANLQRVAEAFAAVQK

SEQ ID NO: 25903 - protein, 146 aa, Brassica napus
MAAEGGGVRALSQREQDIQMMLAADVHLGTKNCDFQMERYVYKRRTDGIYIINLGKTWEKLQMAARVIVAIENPQDIIVQSARPYGQRAVLKFAQYTGANAIAGRHTPGTFTNQMQTSFSEPRLLILTDPRTDHQPIKESALGNIP

SEQ ID NO: 25904 - protein, 547 aa, Escherichia coli
AAKDVKFGNDAGVKMLRGVNVLADAVKVTLGPKGRNVVLDKSFGAPTITKDGVSVAREIELEDKFENMGAQMVKEVASKANDAAGDGTTTATVLAQAIITEGLKAVAAGMNPMDLKRGIDKAVTVAVEELKALSVPCSDSKAIAQVGTISANSDETVGKLIAEAMDKVGKEGVITVEDGTGLQDELDVVEGMQFDRGYLSPYFINKPETGAVELESPFILLADKKISNIREMLPVLEAVAKAGKPLLIIAEDVEGEALATLVVNTMRGIVKVAAVKAPGFGDRRKAMLQDIATLTGGTVISEEIGMELEKATLEDLGQAKRVVINKDTTTIIDGVGEEAAIQGRVAQIRQQIEEATSDYDREKLQERVAKLAGGVAVIKVGAATEVEMKEKKARVEDALHATRAAVEEGVVAGGGVALIRVASKLADLRGQNEDQNVGIKVALRAMEAPLRQIVLNCGEEPSVVANTVKGGDGNYGYNAATEEYGNMIDMGILDPTKVTRSALQYAASVAGLMITTECMVTDLPKNDAADLGAAGGMGGMGGMGGMM

SEQ ID NO: 25905 - protein, 160 aa, Zea mays
  misc_feature (11)..(11): Xaa can be any naturally occurring amino acid
  misc_feature (27)..(27): Xaa can be any naturally occurring amino acid
  misc_feature (42)..(42): Xaa can be any naturally occurring amino acid
  misc_feature (64)..(64): Xaa can be any naturally occurring amino acid
  misc_feature (87)..(87): Xaa can be any naturally occurring amino acid
  misc_feature (103)..(103): Xaa can be any naturally occurring amino acid
  misc_feature (112)..(112): Xaa can be any naturally occurring amino acid
  misc_feature (117)..(117): Xaa can be any naturally occurring amino acid
  unsure (1)..(160): unsure at all Xaa locations
LAESQCDPTKXRACRSHDTTVTTTNAXGAPVGNDNEVLTCGXPRGPMLLEDYHLSEKVAHFSFXRMLERVVHAPGASAKGFLQCTHXDMTSVTCADFLRAPDXTTPVIVRFXVSDPXRTSQETMRDPRGMAAKPYTRDDNWDLVGTNLRDLFIRYGMKFR

SEQ ID NO: 25906 - protein, 449 aa, Cryptococcus neoformans var. neoformans B-3501A
MPKSSLAALPTDVQSHVNQAIDSLRDLVPPDPSFVSEDIQDTIFKTVDELNDDMRKLSLAIHDNPELGFKEFQARKNLVTALKKLGFDISNPSDLETAFVATYTRGSGGRTFGFNAEFDALPDIGHACGHNLIAVIAVVGAAALKAAMEASDMSGTVKVIGSPAEEDGGGKILLLKQGIYDDLDACGMAHPFGGMGGAAGSCPIGGPATLSRSGLEIEFHGRGAHAGSAPWMGINALDAAVQGYTAVSMLRQQLEPTMRVHGIILGSEKWVTNIIPSYSKVSFGTRALDTKLCIDLREKVIACFKSAAESTGCSCKIKAPDDAVYAETRNNEKLAHSYQIFMDRAFGDKIELEGVTTASTDFGNVCYKLPGFHPMFDIPSEEGSSNHTPGFAEAARTPEAHSRAMKVAKGLAVIGAKFMIDDNFAKETREAYEKLQEEVRNSGGQSKTE

SEQ ID NO: 25907 - protein, 449 aa, Bacillus cereus E33L
MKTKQTDEILAKDEQYVWHGMRPFSPNSTMVGAKAEGCWVEDIQGKRYLDGMSGLWCVNSGYGRKELAEAAYKQLQTLSYFPMSQSHEPAIKLAEKLNEWLGGEYVIFFSNSGSEANETAFKIARQYYAQKGEPHRYKFMSRYRGYHGNTMATMAATGQAQRRYQYEPFASGFLHVTPPDCYRMPGIERENIYDVECVKEVDRVMTWELSETIAAFIMEPIITGGGILMPPQDYMKAVHETCQKHGALLISDEVICGFGRTGKAFGFMNYDVKPDIITMAKGITSAYLPLSATAVKKEIYEAFKGKGEYEFFRHINTFGGNPAACALALKNLEIMENENLIERSAQMGSLLLEQLKEEIGEHPLVGDIRGKGLLVGIELVNDKETKEPIDNDKIASVVNACKEKGLIIGRNGMTTAGYNNVLTLAPPLVISSEEIAFVIGTLKTAMERI

SEQ ID NO: 25908 - protein, 709 aa, Magnaporthe grisea 70-15
MSLIPYHSSEDREIVLRHDNALVVRDRTSRRLEIRRITECPTCHQSLHPVSSGDRPFDVPPGNNHHDPYFVSPNYFRLLQAGHDIEPQSDQDDHHAHRHDRPPSSPVKRLVHRVPHVEPDTEDGAEFVSSTSSVKEGARIRRNAFSPNYFRDFFVEERELGRGGKGVVLLVRHQLDGVQLGNYACKRVPVGDDHAWLEKVLIEVELLANLTHPNLVAYKHVWLEEVTLNRFGPQVACAFILQQYCNGGDLHQYVVGQKPKETTKEQLKAQMRRRSKGQTERPQGLTSHRRLHFDEIYSIFKDITSGLVYLHESNYIHRDLKPSNCLLHRQGKQMTCLISDFGEVQQEQALRNSTGSTGTISWCAPEVLVKDRQGRYGNFTTKSDVFSMGMILYFLCFGRLPYQNANMVQEELEDVEMLRAEIKEWKGYQYERRERPDLPDKVYLLLKKLLSVLPEERPSAAEVLRIISNESNLDAVPRGARGSTPNMMPTGRVRNLDSPMPPSTPVNEPVNRFARPRSSSSVDDRESVSAMGDVNDSPQPTTRNSIEKINIPTTPRMRPTLAAAHSDHEISHESPSHSQADNDYQANTPTTMPLLMPPATTKMEQARHRIVVVRHQMARFLMYNGDTVAFIFRLGLFLVKVATLTRPCWPYVISSEVGAPLVAMAGMDLGIPTTASSVGMGSRYRPGRPVPISGASRWRWDWRRYGDLA

SEQ ID NO: 25909 - protein, 203 aa, Shewanella sp. MR-4
MISILVSDVIENNELANLGAPNEKDIMMKLPLVIFASLLSTSAFAATCPSYLGVEVRKLHSDEKINLCELTQGKPVLLVNTASNCGYTPQFKALEALHKEYKDKGLVVIGFPSDDFFQEENDEKDTAKVCYINYGVTFTMLATSPVRGSDANSVFKYLGDKAGSPKWNFYKYVVSGDGNTVQQFNSKVKPDSAELKQAIESVL

SEQ ID NO: 25910 - protein, 144 aa, Lycopersicon esculentum
MASTQQPASSGSDGQRYATNDERKRKRMESNRESARRSRKRKQQHLEELMSQLTQLQNQSTIWREKIESVGRNFHTLDAENNVLRAQMAELTERLDSLNSLTRFWADANGLAVDIPEIPDTLLEPWQLPCPIQPITASADMFQF

SEQ ID NO: 25911 - protein, 494 aa, Triticum aestivum
  misc_feature (129)..(129): Xaa can be any naturally occurring amino acid
  misc_feature (138)..(138): Xaa can be any naturally occurring amino acid
  unsure (1)..(494): unsure at all Xaa locations
MDPYKHRPTSGANAGYWTTNSGAPVWNNNNALTVGQRGPILLEDYHLIEKLAQFDRERIPERVVHARGASAKGFFEVTHDVSQLTCADFLLAPGVQTPVIVRFSTVVHERGSPETLRDPRGFAVKFYTXREGNFDLVXGNNMPVFFIRDGMKFPDMVHAFKPSPKTNMQENWRIVDFFSHHPESLHMFTFLFDDVGIPLNYRHMDGFGVNTYTLISRDGKAHLVKFHWKPTCGVKCLLDDEAVTVGGTCHTHATKDLTDAIAAGNYPEWKLFIQTIDADHEDKFDFDPLDVTKTWPEDIIPLQPVGRMVLNKNIDNFFAENEQLAFCPAVTVPGIHYSDDKLLQTRIFSYADTQRHRLGPNYLMLPVNSPKCAHHNNHHDGLMNFMHRDEEVNYFPSRFDPTRHAEQYPIPPRVLSGCREKCIIKKENNFKQAGERYRSFDPARQDRFLQRWVDALTDARVTHEIQGIWVSYWSQCDASLGQKLASRLKMKPNM

SEQ ID NO: 25912 - protein, 170 aa, Campylobacter jejuni subsp. jejuni NCTC 11168
MKNNPYIIWLTGLAGSGKTTIGQALYEKLKLKYKNLIYLDGDELREILGHYAYDRQGRIDMALKRAKFAKFLNDQGMMVIVTTISMFNEIYDYNRKQLKNYYEIYIECDMHELIQRDQKGLYTKALNKEIDNVVGVDIEFDKPEADLVINNSCRNNLEEKVELIIKKLAL

SEQ ID NO: 25913 - protein, 396 aa, Yersinia pseudotuberculosis IP 32953
MFEKITAAPADPILGLTDIFRADDRAHKINLGIGVYKDETGKTPVLTSVKKAEQYLLENEATKNYLGIDGLPVFASCTQELLFGANSAIIADKRARTAQTPGGTGGLRIAADFIAHQTSAKRVWVSNPSWPNHKNVFEAAGLEVVEYAYYDAANHALDFDGLLNSLSEAQAGDVVLFHGCCHNPTGIDPTETQWSQLAELSVAKGWLPLFDFAYQGFANGLEEDAQGLRIFAATHQELIVCSSYSKNFGLYNERVGACTLVAADSNVADTAFSQVKAVIRANYSNPPAHGASVVATILSNAALRAIWEQELTDMRQRIQRMRQLFVNTLQEKGAQQDFSFIINQNGMFSFSGLTKEQVLRLRDEFAVYAVNSGRVNVAGMTPDNMAPLCEAIVAVL

SEQ ID NO: 25914 - protein, 130 aa, Zea mays
  misc_feature (118)..(118): Xaa can be any naturally occurring amino acid
  unsure (1)..(130): unsure at all Xaa locations
VTPPPSLADFLANPFPPLFYGVFKLSPRAFFSKTWIEILGSSPKDFFYPLKEPQMVFPAPFYLNFPKELSRYFPPSAPFGGLSIGPFPLLAVFMGAIVSRTGIFLPLPIIFQFFEPFXKERAPDLGFFGF

SEQ ID NO: 25915 - protein, 486 aa, Prochlorococcus marinus subsp. pastoris str. CCMP1986
MTTALQTPQRRSRSKLQDASLVNGPMLLLRSIRGFSSNRSMLWLATVPLALFGLGIFNLSAHAADLPELNAAFLANNLWLLIATILVIFMNAGFAMVEAGMCRSKNAVNILAKNLFVFALAVTSYWFIGYSLMYGGSVADGWLYFGGLFFDPTVTADMVTDAGLVPTVDFLFQSAFAGTAATIVSGLVAERVKFGEFVVFAIVLTAFIYPIAGSWKWNGGWLDSLGFVDFAGSSIVHSVGAWAGLVGAMLLGPRIGKYSDGKPQAMPGHNMAIATLGALILWIGWYGFNPGSQLAMDQWVPYVAVTTTLAAAAGAIGATIVSTLTSGKPDLTMIINGILAGLVSITAGCGDMTLAGAWFAGLVGGIIVVFSVAALDAAEIDDPVGAFSVHGVCGVWGTLVIGLWGTAVQGDGAGMGLFNGGGINLLLVQALGAAAYAIWTLVTCWIAWSIIGGLFGGIRVSEEEETQGLDISEHGMESYPDFASAK

SEQ ID NO: 25916 - protein, 911 aa, Streptomyces coelicolor A3(2)
MSSADDQTTTTTSSELRADIRRLGDLLGETLVRQEGPELLELVEKVRRLTREDGEAAAELLRGTELETAAKLVRAFSTYFHLANVTEQVHRGRELGAKRAAEGGLLARTADRLKDADPEHLRETVRNLNVRPVFTAHPTEAARRSVLNKLRRIAALLDTPVNESDRRRLDTRLAENIDLVWQTDELRVVRPEPADEARNAIYYLDELHLGAVGDVLEDLTAELERAGVKLPDDTRPLTFGTWIGGDRDGNPNVTPQVTWDVLILQHEHGINDALEMIDELRGFLSNSIRYAGATEELLASLQADLERLPEISPRYKRLNAEEPYRLKATCIRQKLENTKQRLAKGTPHEDGRDYLGTAQLIDDLRIVQTSLREHRGGLFADGRLARTIRTLAAFGLQLATMDVREHADAHHHALGQLFDRLGEESWRYADMPREYRTKLLAKELRSRRPLAPSPAPVDAPGEKTLGVFQTVRRALEVFGPEVIESYIISMCQGADDVFAAAVLAREAGLIDLHAGWAKIGIVPLLETTDELKAADTILEDLLADPSYRRLVALRGDVQEVMLGYSDSSKFGGITTSQWEIHRAQRRLRDVAHRYGVRLRLFHGRGGTVGRGGGPTHDAILAQPWGTLEGEIKVTEQGEVISDKYLIPALARENLELTVAATLQASALHTAPRQSDEALARWDAAMDVVSDAAHTAYRHLVEDPDLPTYFLASTPVDQLADLHLGSRPSRRPGSGVSLDGLRAIPWVFGWTQSRQIVPGWYGVGSGLKALREAGLDTVLDEMHQQWHFFRNFISNVEMTLAKTDLRIAQHYVDTLVPDELKHVFDTIKAEHELTVAEVLRVTGESELLDADPVLKQTFTIRDAYLDPISYLQVALLGRQREAAAANEDPDPLLARALLLTVNGVAAGLRNTG

SEQ ID NO: 25917 - protein, 327 aa, Saccharum spontaneum
MGLSTAYSPAGSGLVPAPLGAGAGAARRRSAQVRRPRLATVRCSVDAAKQVQDGVATAVAAEAPASRKECFGVFCNIYDLKAEDKTKSWKKLVNIAVSGAAGMISNHLLFKLASGEVFGQDQPIALKLLGSERSFQALEGVAMELEDSLYPLLREVSIGIDPYEVFQDVDWALLIGAKPRGPGMERAALLDINGQIFADQGKALNAVASRNVKVLVVGNPCNTNALICLKNAPNIPAKNFHALTRLDENRAKCQLALKAGVFYDKVSNVTIWGNHSTTQVPDFLNAKIDGRPVKEVIQDTKWLEEEFTMTVQKRGGALIQKWGRSSA

SEQ ID NO: 25918 - protein, 358 aa, Cryptococcus neoformans var. neoformans JEC21
MPINVALLGGGIFAVDAHLPALAKSGTLASLEAVWSRSESSSTKAAEAWKSLTGQEVTKYSETGCDNLDKLLSREDIEAVIIALPILSQPDIIVRALKARKHVLSEKPVSQDVTSATKMLKDYQENYQAQGLVWRVAENWEVEPAHIFAAQALKAGHIGNLNTFSISSVLFVDNEDNKYFETEWRKRPQHQGGYLLDAGVHNAGVLRTVLPSPITHLSAHTALNNEHLPPYDWLSVITRSEPNNIHGQILIDYGARGREPMWELRLTGSDGEIYSEDINDDGVDSIKVQVRSGKFGRTNREIKIFPKTGVYEEQRRFFEAIAGKPDEYGSVQGALNDVALIQAALTSNGNEVALNILK

SEQ ID NO: 25919 - protein, 90 aa, Saccharomyces cerevisiae
PAAKSIVTLDVKPWDDETNLEEMVANVKAIEMEGLTWGAHQFIPIGFGIKKLQINCVVEDDKVSLDDLQQSIEEDEDHVQSTDIAAMQKL

SEQ ID NO: 25920 - protein, 217 aa, Arabidopsis thaliana
MDQQGQSSAMNYGSNPYQTNAMTTTPTGSDHPAYHQIHQQQQQQLTQQLQSFWETQFKEIEKTTDFKNHSLPLARIKKIMKADEDVRMISAEAPVVFARACEMFILELTLRSWNHTEENKRRTLQKNDIAAAVTRTDIFDFLVDIVPREDLRDEVLGGVGAEAATAAGYPYGYLPPGTAPIGNPGMVMGNPGAYPPNPYMGQPMWQQPGPEQQDPDN

SEQ ID NO: 25921 - protein, 701 aa, Cryptococcus neoformans var. neoformans JEC21
MSARNLASGTPYRKNLSPANSSHFDAPSVSSTSDSVKSAYSVGYTPVPTADRSYSGLLHGTLSKVFRKGGQEIIVSEEPVSFSSSKEDSESTRFNGCPYMNGSIPQTPTPKSTSKSASVAVPVPLPPPSAARLKVQKQNDSIPRENGNALADDVGKLTVRSYEKDRDLKSQEVIYTTSNGVPVPHPYAVQRAGVNGPLLLQDFHLIDLLSHFDRERIPERVVHAKGSGAHGTWECTDGLEDLCLANMFQKGTTCPLTIRFSTVGGESGSPDLARDPRGFAVKFRTAEGNWDFVANNTPVFFLRDPAKFPHFIHTQKRDPATHLSGGDDSTMFWDYLSQNPESIHQVMILMSDRGIPAGWRHMHGYYGHTLKIVNDNGDWVYAQFHLISDQGNKFFTSEEASTKSPDWGQKDLYEAIGRGEYPSWTMKVQVMTQEQAEEAWEKKRINVFDLTHVWPHGDYPLRTIGKITLNENPSNYFAEVEQATFNPAHMIPGVEPSADPVLQARLFSYPDAHRHRVGANYQQLPVNQSATPYATGNFQRDGAMAFYNQGGRPAYLSSIEPIKFREKRVNLNKVHGQFIGEAVSFLSEIRPEDFNAPRALWQKVFSDESKERFIQTVAGHMSTCKRKEIIARQIAIFRQVSPDLGARLEKATNVRGYGSIEGMSFNGTHNGFGVKRGANGLRQDADVVFNNGAPQKTQRAR

SEQ ID NO: 25922 - protein, 323 aa, Oryza sativa; identical to SEQ ID NO: 1135

SEQ ID NO: 25923 - protein, 663 aa, Escherichia coli O157:H7 EDL933
  misc_feature (612)..(612): Xaa can be any naturally occurring amino acid
  unsure (1)..(663): unsure at all Xaa locations
MSSRKELANAIRALSMDAVQKAKSGHPGAPMGMADIAEVLWRDFLKHNPQNPSWADRDRFVLSNGHGSMLIYSLLHLTGYDLPMEELKNFRQLHSKTPGHPEVGYTAGVETTTGPLGQGIANAVGMAIAEKTLAAQFNRPGHDIVDHYTYAFMGDGCMMEGISHEVCSLAGTLKLGKLIAFYDDNGISIDGHVEGWFTDDTAMRFEAYGWHVIRDIDGHDAASIKRAVEEARAVTDKPSLLMCKTIIGFGSPNKAGTHDSHGAPLGDAEIALTREQLGWKYAPFEIPSEIYAQWDAKEAGQAKESAWNEKFAAYAKAYPQEAAEFTRRMKGEMPSDFDAKAKEFIAKLQANPAKIASRKASQNAIEAFGPLLPEFLGGSADLAPSNLTLWSGSKAINEDAAGNYIHYGVREFGMTAIANGISLHGGFLPYTSTFLMFVEYARNAVRMAALMKQRQVMVYTHDSIGLGEDGPTHQPVEQVASLRVTPNMSTWRPCDQVESAVAWKYGVERQDGPTALILSRQNLAQQERTEEQLANIARGGYVLKDCAGQPELIFIATGSEVELAVAAYEKLTAEGVKARVVSMPSTDAFDKQDAAYRESVLPKAVTARVAVXAGIADYWYKYVGLNGAIIGMTTFGESAPAELLFEEFGFTVDNVVAKAKELL

SEQ ID NO: 25924 - protein, 201 aa, Arabidopsis thaliana
MASSASKFIKCVTVGDGAVGKTCMLICYTSNKFPTDYIPTVFDNFSVNVVVEGITVNLGLWDTAGQEDYNRLRPLSYRGADVFVLAFSLISRASYENVFKKWIPELQHFAPGVPIVLVGTKMDLREDRHYLSDHPGLSPVTTSQGEELRKHIGATYYIECSSKTQQNVKAVFDAAIKVVIKPAVKQKEKKKKQKPRSGCLS

SEQ ID NO: 25925 - protein, 612 aa, Glycine max
MAQKRFIIEVEKAKEASEGRPSRGPVYRSLFAKDGFPAPIQGLNSCWDVFRLSVEKYPSNPMLGRREIVDGKPGKYKWLTYKEVYDQVMKVGNSIRSCGYGEGVKCGIYGANSAEWIMSMQACNAHGLYCVPLYDTLGAGAIEFIICHAEVSIAFAEEKKIPELLKTFPNATKYLKTIVSFGKVTPEQKQEVENSGLEIYSWDEFLQVGQNQSFDLPIKKRSDICTIMYTSGTTGDPKGVLISNESIITLLAGVKRLLESVNEQLTEKDVYISYLPLAHIFDRVIEETFIWHGASIGFWRGDVKLLIEDVGELKPTIFCAVPRVLDRVYSGLTQKISSGGFLKKTLFNFAYSYKLNNMKKGLRHGEASPLLDKIVFDKVKQGLGGRVRLILSGAAPLSAHVEGYLRVVTCAHVLQGYGLTETCAGTFVSLPNEIEMLGTVGPPVPNVDVCLESVPEMGYDALASTPRGEICVKGKTLFAGYYKREDLTKEVLIDEWFHTGDIGEWQPNGSMKIIDRKKNIFKLSQGEYVAVENLENIYGQVSSIESIWVYGNSFEAFLVAVVNPSKQALEHWAQENGISMDFNSLCEDARAKSYIIEELSKIAKEKKVFFFT

SEQ ID NO: 25926 - protein, 658 aa, Escherichia coli O157:H7 EDL933
MSDDMSMGLPSSAGEHGVLRSMQEVAMSSQEASKMLRTYNIAWWGNNYYDVNELGHISVCPDPDVPEARVDLAQLVKTREAQGQRLPALFCFPQILQHRLRSINAAFKRARESYGYNGDYFLVYPIKVNQHRRVIESLIHSGEPLGLEAGSKAELMAVLAHAGMTRSVIVCNGYKDREYIRLALIGEKMGHKVYLVIEKMSEIAIVLDEAERLNVVPRLGVRARLASQGSGKWQSSGGEKSKFGLAATQVLQLVETLREAGRLDSLQLLHFHLGSQMANIRDIATGVRESARFYVELHKLGVNIQCFDVGGGLGVDYEGTRSQSDCSVNYGLNEYANNIIWAIGDACEENGLPHPTVITESGRAVTAHHTVLVSNIIGVERNEYTVPTAPAEDAPRALQSMWETWQEMHEPGTRRSLREWLHDSQMDLHDIHIGYSSGTFSLQERAWAEQLYLSMCHEVQKQLDPQNRAHRPIIDELQERMADKMYVNFSLFQSMPDAWGIDQLFPVLPLEGLDQVPERRAVLLDITCDSDGAIDHYIDGDGIATTMPMPEYDPENPPMLGFFMVGAYQEILGNMHNLFGDTEAVDVFVFPDGSVEVELSDEGDTVADMLQYVQLDPKTLLTQFRDQVKKTDLDAELQQQFLEEFEAGLYGYTYLEDE

SEQ ID NO: 25927 - protein, 383 aa, Rhodococcus rhodochrous
MSSNPELKYTGKVKVATVQAEPVILDADATIDKAIGFIEEAAKNGAEFLAFPEVWIPGYPYWAWIGDVKWAVSDFIPKYHENSLTLGDDRMRRLQLAARQNNIALVMGYSEKDGASRYLSQVFIDQNGDIVANRRKLKPTHVERTIYGEGNGTDFLTHDFGFGRVGGLNCWEHFQPLSKYMMYSLNEQIHVASWPAMFALTPDVHQLSVEANDTVTRSYAIEGQTFVLASTHVIGKATQDLFAGDDDAKRALLPLGQGWARIYGPDGKSLAEPLPEDAEGLLYAELDLEQIILAKAAADPAGHYSRPDVLSLKIDTRNHTPVQYITADGRTSLNSNSRVENYRLHQLADIEKYENAEAATLPLDAPAPAPAPEQKSGRAKAEA

SEQ ID NO: 25928 - protein, 480 aa, Arabidopsis thaliana
MEQEDFYFPDTDLDLSFTSTTTDRTFASSSARTSLTLSFNDRLSTSSAVTTSSTSSSSVNHRRHDPHWSAIKSAKLLSSDGNIHLRHLKLIRHLGTGNLGRVFLCNLRDSSARFALKVIDRNCLTTEKKLSQVETEAEILSLLDHPFLPTLYARIDESHYTCLLIDYAPNGDLHSLLRKQPGNRLPIQPVRFFAAEVLVALEYLHAMGIVYRDLKPENVLLREDGHVMLSDFDLCFKSDVVPTFKSRRYRRSSSSPSLRRRRSGCFSVAAEKKYEREEIVSEFAAEPVTAFSRSCVGTHEYLAPELVSGNGHGSGVDWWAFGIFLYELLYGTTPFKGESKEQTLRNIVSTTKTASFHMDGDLDEARDLIEKLLVKDPRKRLGCARGAQDIKRHPFFDGIKWPLIRHYKPPEEVRGLVIKKSTRPHASHVIAVSPRRRKSFLWRALSYLLRGKSSSGGSKNQSNSNYYHYVGKSYASRKRV

SEQ ID NO: 25929 - protein, 366 aa, Rhodococcus rhodochrous
MVEYTNTFKVAAVQAQPVWFDAAKTVDKTVSIIAEAARNGCELVAFPEVFIPGYPYHIWVDSPLAGMAKFAVRYHENSLTMDSPHVQRLLDAARDHNIAVVVGISERDGGSLYMTQLVIDADGQLVARRRKLKPTHVERSVYGEGNGSDISVYDMPFARLGALNCWEHFQTLTKYAMYSMHEQVHVASWPGMSLYQPEVPAFGVDAQLTATRMYALEGQTFVVCTTQVVTPEAHEFFCDNDEQRKLIGRGGGFARIIGPDGRDLATPLAEDEEGILYADIDLSAITLAKQAADPVGHYSRPDVLSLNFNQRHTTPVNTAISTIHATHTLVPQSGALDGVRELNGADEQRALPSTHSDETDRATASI

SEQ ID NO: 25930 - protein, 535 aa, Cryptococcus neoformans var. neoformans B-3501A
MPDPAPFWLCHECGAQMRPVTVDGTPHCASCNGEFIEILDPEVNPDPDYELPPPPPTRPGQQTPSRFDPHFLSNFPPPPQSEGSSSPARQRDTNNTGNFLSSLFSMLGTGSRQGSEETPRRPPPSFHGEPSASQRNGQSQNTDRPGMRTYAFNFGNARGSVTIGSFGSNLGRQGYRMNNDPTSPSGNLFNDPDPFRADPFDARFRPPGDGNRDINGDMPLPLGANEALQLIAALLDGNPPPNMGNLGDFATSDADFMRILQETFMEAAGPQGPVPANETVIEGLPRFTFDSGSLAKSQFRDCPVCKDDFEIGNEVMLIPCGHIYHPDCLVPWLRQNGTCPVCRFSLVSEDEQPNNQRTTNVGTEHTRNAEEERPATPTIPAAVSNFFRNLFGGSESQPPTPRAAAGGGHGSNASQDPHSSVNVVSESTISADASSRHSPTIHGATRREQVQQCDEVASEGSSNDSLVRVYPEHSSGETHGDDATNGEAGRIAEQEQQVASRDRLADRVNRDFNERWQRLRREREEDDTVYHPDLD

SEQ ID NO: 25931 - protein, 356 aa, Alcaligenes faecalis
MQTRKIVRAAAVQAASPNYDLATGVDKTIELARQARDEGCDLIVFGETWLPGYPFHVWLGAPAWSLKYSARYYANSLSLDSAEFQRIAQAARTLGIFIALGYSERSGGSLYLGQCLIDDKGQMLWSRRKLKPTHVERTVFGEGYARDLIVSDTELGRVGALCCWEHLSPLSKYALYSQHEAIHIAAWPSFSLYSEQAHALSAKVNMAASQIYSVEGQCFTIAASSVVTQETLDMLEVGEHNASLLKVGGGSSMIFAPDGRTLAPYLPHDAEGLIIADLNMEEIAFAKAINDPVGHYSKPEATRLVLDLGHREPMTRVHSKSVIQEEAPEPHVQSTAAPVAVSQTQDSDTLLVQEPS

SEQ ID NO: 25932 - protein, 135 aa, Zea mays
MKHPRDAGAMPLSLALSLGAGVAPGHGSSKRPRRAAGGGDGELVCKTCSRAFVSFQALGGHRTSHLRAGRHGLALGMPAPAPAKEAPPPATTHLCHVCGLGFQMGQALGGHMRRHREEAAATTAQAPPVLLQLFV

SEQ ID NO: 25933 - protein, 175 aa, Arabidopsis thaliana
MKRDRSDYEESMKHIDIVESLMMLSRSFVVKQIDVKQSTGSKTNHNNHFECKTCNRKFDSFQALGGHRASHKKPKLIVDQEQVKHRNKENDMHKCTICDQMFGTGQALGGHMRKHRTSMITEQSIVPSVVYSRPVFNRCSSSKEILDLNLTPLENDLVLIFGKNLVPQIDLKFVN

SEQ ID NO: 25934 - protein, 453 aa, Photorhabdus luminescens subsp. laumondii TTO1
MAKFSNWRELKQLLFFSFPIIVSQIARTAMSFVDIVMSGHYATADLAAVTLGSSIWFPIFVLGYGTIIMLAADVAKQKAQHDDEGIKDSLKNYLFLAVILSIPIIILLMLVSWLLSFIGIDEHILEITQGYVIALACGVPSVMIFNVFRSFLQGLEDTKIAMYLSAGALLLNIPLNYILIYGKLGLPEMGGIGAGITTAIINNLIAVCLIIYFLLKKEYRRYRPDFSLPKYNSLIRTFYIGMPSGLALFVEMVFLDVIAITAAPLGAQVIAAHNIMLNITSIIYTITGGIAAAVTVRVGSYIGKRDKISLTGTIKISIALILSISAVIGVLIYYFAGSFISLYTNDNGVIIIALNIIFLLCLFQFFDSCQAALSGILRGFHDTRSVFYAPLFGYWLVGLPLGFILALTDWVTERMGIIGFWYGLVLGLFVNAILLFIILKVRQRGMISRLISY

SEQ ID NO: 25935 - protein, 507 aa, Datisca glomerata
MASMVSFCFLLLFLAFFASSFNEIYAEESESKEFVLTLDKSNFFDTVSKHNFIVVEFYAPWCGHCKKLAPEYEKAASILSSHDPPVILAKVDANEEANKELASEFEVRGFPTIKILRNGGKIVQEYKGPRDADGIVDYLKKQSGPPSAEIKSIEDATNLVSEKKIVVVGIFPKFSGEEFENFSALAEKLRSDYEFGHTLDAKLLPRGESSVSGPVVRLFKPFDELFVDFQDFDVNALEKLVEESSVPTVTIFDKDPSNHPFVVKFFNNANAKAMLFLNFTSEVVESFRSIYREVAEKNKGEGISFLIGDTESSQGAFQYFGLRDDQVPLIVIQNNDGTKYLKPNLEPDHIASWVKEYKDCKLSPYRKSEPIPEHNNEPVKVVVADSLDEIVFKSGKNVLLEFYAPWCGHCKQLAPILDEVAVSFENDPDVLIAKLDATANDYPTNTFDVKGYPTLYFKSASGELLQYDGGRTKEDFIEFIEKNREKSSKKESIVKDDQTDSETKAEL

SEQ ID NO: 25936 - protein, 324 aa, Pseudomonas putida KT2440
MATRIILNSTGAADVMQLEHVAAQSPGPGQVWLEQTAMGVNPLDVLQRKGGAALALPSGLGLEGAGRVSAIGDGVHNVQVGDRVAYAMGPVGAYASGRLFPAERLVPLPPQLEDEAAAAVLFKGITAQYLLKTTYAVGPGTQVLLYGAAGALGQLMVPWARHLGATVIGVVSRLQSVERARAAGCQHVLVFDAKTLASQVRELTQGQGVAVVYDCVGKVSLEASLGSLRVRGLLVSFGGTSGAPPAIEVATLNANGSLYLTRPSLAAHTRTVEEYQQRAADVLAAVAEGIVQPRVWRCFPLAEAAKAHECLEQGRSEGALVLTA

SEQ ID NO: 25937 - protein, 358 aa, Arabidopsis thaliana
MSLTKSSESVFTEEEEEDSFSGRYTLWIKEALEELPHNFTITDPFISGHPIVFASLGFLKMTGYSREEVIGRNGKVFQGPKTNRRSIMEIREAIREERSVQVSLLNYRKSGSPFWMLFHMCPVFGKDDGKVTNFVAVQVPISGREHHRKKLRNVGDLSSDTSPTFGSCRREVCFGNFVCQDRALPVECDDDEQGLEDWEQCEASESEKLKATEAINNVLSILVHYSELSGRLVCGKRYCLRGVDCLSSSLVISLGRIKQSFVLTNPCLPDMPIIYASDAFLTLTGYKRQEVLGQNCRFLSGVDTDSSVLYEMKECILKGQSCTVQILNYRKDKSSFWNLLHISPVRNASGKHILWVFK

SEQ ID NO: 25938 - protein, 94 aa, Saccharomyces kluyveri
MTVISSHPETDPKWWKEATIYQIYPASFKDSDDDGWGDLPGITSKLGYLKKVGIDAIWICPFYDSPQEDMGYDIANYEKVWPRYGTNEDCFHLI

SEQ ID NO: 25939 - protein, 500 aa, Arabidopsis thaliana
MVLSKTASKSDDSIHSTFASRYVRNSISRFEIPKNSIPKEAAYQIINDELKFDGNPRLNLASFVTTWMEPECDKLMMESINKNNVEMDQYPVTTDLQNRCVNMIARLFNAPLGDGEAAIGVGTVGSSEAVMLAGLAFKRQWQNKRKALGLPYDRPNIVTGANIQVCLEKFARYFEVELKEVKLREGYYVMDPDKAVEMVDENTICVVAILGSTLTGEFEDVKLLNDLLVEKNKKTGWDTPIHVDAASGGFIAPFLYPDLEWDFRLPLVKSINVSGHKYGLVYAGIGWVVWRTKTDLPDELIFHINYLGADQPTFTLNFSKGSSQVIAQYYQLIRLGFEGYRNVMDNCRENMMVLRQGLEKTGRFNIVSKENGVPLVAFSLKDSSRHNEFEVAEMLRRFGWIVPAYTMPADAQHVTVLRVVIREDFSRTLAERLVADFEKVLHELDTLPARVHAKMASGKVNGVKKTPEETQREVTAYWKKFVDTKTDKNGVPLVASITNQ

SEQ ID NO: 25940 - protein, 651 aa, Burkholderia vietnamiensis G4
MSPLNFPTDRPIDLACLGRVAVDLYAQQYGSRLEDARSFQMYLGGSSGNVAFGVARLGLKTAMISRVGDEQMGRFVRETLEREGCDTSQLQTDPERLTALVLLGLKDRDTFPLLFVRENCADMAVRADEIDEGFIARCRALAITGTHLSTPATREASLTALGYARRHGVVRILDIDYRPVLWGLTARGAGENRYVPDAQVTRQLQQVLGEFDLLVGTEEEFLIAGGAPGDLIASLEAVRRASGAVLVVKRGALGCCVIDGDVPARIDDAPTFHGERVEVLNVLGAGDAFLSGLLSGLLRGRDWAEATRIANACGAIVVSRHACSAAMPTPAELAHWFGGSRNPQVDADRTLAHLHRVTVPRRDWDDLCVMAFDHRSQFYELAVQAGADEARIKTLKRLLVRAAEQVERERHIEGHVGVLIDGGAYGRDALAAATGRGWWVGRPVELPGSRPLCFDDTRSVGSTLTHWPTEQVVKCLVHYHPDDDVDLRVAQEQRVLELWEATRASGNELLLEIIPPRAVTPPGTEDDAVLRTVARFYNLGVMPEWWKLAPMSADGWARLESLVAERDRYCRGAVILGLNQPLQYLVDSFRSATNPIVKGFMVGRSLWVDASLAWLAGRIDDRALIDEVAANFAQLVDAWLGRRDPARAAAA

SEQ ID NO: 25941 - protein, 321 aa, Streptomyces coelicolor A3(2)
MSGKYLVTGGAGYVGSVVAQHLVEAGHEVVVLDNLSTGFREGVPAGASFVEGDIRDAAKWLDGSFDGVLHFAAFSQVGESVVKPEKYWDNNVGGTMALLEAMRGAGVRRLVFSSTAATYGEPEQVPIVESAPTRPTNPYGASKLAVDHMITGEAAAHGLGAVSLRYFNVAGAYGEYGERHDPESHLIPLVLQVAQGRREAISVYGDDYPTPDGTCVRDYIHVADLAEAHLLAVAAAAPGEHLICNLGNGNGFSVREVVETVRRVTGHPIPEIMAPRRGGDPAVLVASAGTAREKLGWNPSRADLAGIVSDAWEFAQRRAGQ

SEQ ID NO: 25942 - protein, 120 aa, Brassica napus
VDPRVRAAYTIKTVDDPRTLNKIIYINPPKNTLSMNEMVSLWETKIGKSLEKTHIPEEQVLKLIQESPVPINVLLAINHSVFVKGDQTNFTIEPSFGLEASELYPDVKYTSIEEYLSHFA

SEQ ID NO: 25943 - protein, 460 aa, Treponema denticola ATCC 35405
MTVNSKPVVNLKSVFSDKSFLKNLFIIAVPIILQNFISSFVNILDTIMIGRLGTIELAAVGLGNQLFFLLNLILYGIGSGGMVFTAQFWGKKDFNGLQKTFALSLMVAVFFSAIFTLACTIFPKEILSLYSKDAAVIEKGVDYLGISAFCFLPFAVNFIFMITLRSIEKVRVAVGATLVSLFVNLILNAVLIFGLLGFPALGVKGAAIATVASRAAELIILFSVTKKKKYPILGKLKNHFDFDFKFIRQYFAIVMPVLINESLWSLGITFHHKIFAGIGTFAYAAYNITNTVSMLTWVIFIGFGNGVSVLIGKKIGERNYDEAKTYAAKVSIFVPFVAVFVGAMLIPISYLTPIFFNVETVVLQTVMKLFIILACCYPLKAFNMCMLVGIIRAGGDTRFGIICDTAVMWCVSIPLAYSLSVYTSIPAWGIYICLFSEEPFKALLGLWRIKSGKWLRSVTD

SEQ ID NO: 25944 - protein, 338 aa, Oryza sativa
TSGGARIFFSAPRKERNPTQARQKRRRRRRRGAMERAVPVRKPHTSTADLLTWSATGPDAAAAAASPVASSRPSLKPAGGITPAMFGAPVSEKEAEDLSKSERKFCSGSKLKEMTGSGIFAENSENDDSEASNPANKTSVRMYQQTVTGISQISFSADGSVSPKKPSSLPEVAKQRELSGTLETDAEAKMNKQHSEAKSKELSGSDIFGPPPEIPARPLAARNMELQGNLDFALPQPRSVHTSVKVSNPAGGPSNITFSEEPVVKTSKKIHNQKFQELTGNNIFKEDATPASAEKSLSSAKLKEMSGSDIFADGAAAPRDYLGGVRKPPGGESSIALI

SEQ ID NO: 25945 - protein, 349 aa, Triticum aestivum
MGSNDPSTPSKASKPPEQEQPPATTSGTTAPVYPEWPGFQGYPAMPPHGFFPPPVAAGQAHPYMWGPQHMVPPYGTPPPPYMMYPPGTVYAHPTAPGVHPFHYPMQTNGNLEPAGAQGAAPGAAETNGKNEPGKTSGPSANGVTSNSESGSDSESEGSDANSQNDSHSKENDVNENGSAQNGVSHSSSHGTFNKPMPLVPVQSGAVIGVAGPATNLNIGMDYWGATGSSPVPAMRGKVPSGSARGEQWDERELKKQKRKLSNRESARRSRLRKQAECEELGQRAEALKSENSSLRIELDRIKKEYEELLSKNTSLKAKLGESGGGGGSDAVPDMNERGDTNGGSHQKEP

SEQ ID NO: 25946 - protein, 665 aa, Arabidopsis thaliana
MSLAADNVLLVEEGRPATAEHPSAGPVYRCKYAKDGLLDLPTDIDSPWQFFSEAVKKYPNEQMLGQRVTTDSKVGPYTWITYKEAHDAAIRIGSAIRSRGVDPGHCCGIYGANCPEWIIAMEACMSQGITYVPLYDSLGVNAVEFIINHAEVSLVFVQEKTVSSILSCQKGCSSNLKTIVSFGEVSSTQKEEAKNQCVSLFSWNEFSLMGNLDEANLPRKRKTDICTIMYTSGTTGEPKGVILNNAAISVQVLSIDKMLEVTDRSCDTSDVFFSYLPLAHCYDQVMEIYFLSRGSSVGYWRGDIRYLMDDVQALKPTVFCGVPRVYDKLYAGIMQKISASGLIRKKLFDFAYNYKLGNMRKGFSQEEASPRLDRLMFDKIKEALGGRAHMLLSGAAPLPRHVEEFLRIIPASNLSQGYGLTESCGGSFTTLAGVFSMVGTVGVPMPTVEARLVSVPEMGYDAFSADVPRGEICLRGNSMFSGYHKRQDLTDQVLIDGWFHTGDIGEWQEDGSMKIIDRKKNIFKLSQGEYVAVENLENTYSRCPLIAQIWVYGNSFESFLVGVVVPDRKAIEDWAKLNYQSPNDFESLCQNLKAQKYFLDELNSTAKQYQLKGFEMLKAIHLEPNPFDIERDLITPTFKLKRPQLLQHYKGIVDQLYSEAKRSMA

SEQ ID NO: 25947 - protein, 236 aa, Streptomyces coelicolor A3(2)
MTTSDRDLLDWSPEAVVFDCDGTLMDSERHWQEARSRAFREHGLQPPPGFAEQALGLHYEDCGRLMAQAVHKPDLAEDLTAALLDHFLALVTGEPVTMPGAVRLVRLLSGRLPLAVASNCPRVVVEGSLERAGLLAHFQCLVVPDTGDCVRPKPYPDVYAVAARLCGVPPHRAMAVEDSLAGVEAARRASLRVLGVGPRPQGDGATRADAWLPSLDAPELLAWAHALGSPRGPRQL

SEQ ID NO: 25948 - protein, 285 aa, Zea mays
MGRGRIEIKRIENNTSRQVTFCKRRNGLLKKAYELSVLCDAEVALVVFSSRGRLYEYANNSVKATIERYKKAHAVGSSSGPPLLEHNAQQFYQQESVKLRNQIQMLQNTNRHLVGDSVGNLSLKELKQLESRLEKGISKIRARKSELLAAQINYMGKRETELQNDHMNLRTKIDEGEQQLQQVTVAQSVAAAAATDVELNPFLEMDTKCFFPGGPFATLDMKCFFPGSLQMLEAQQRQMLATELNLGYQLAPPDTDVANNNPQQFYPWINEKANCDRWKLAVASR

SEQ ID NO: 25949 - protein, 469 aa, Cryptococcus neoformans var. neoformans JEC21
MSPIALNQRTGVSTTHLKSSVAPTPISTAATSTYQLHHTVPNPVATKGDGMHFTLTTGETVLDAAAGGAAVSCLGNGNSEVIETMYEQAKKMAYTYHQSLDAEGSEKLAKWLCDRSEGALVAGAFLNSGSEAIEAAIKMARQYWVEAGKPERKYIIARFPSYHGNTLGALAIGNAPGRRDIYKPLISMNAFHHVTSPVYKRYAQPGETEEAYSARLADELEAKILELGPENVIGFFAEPVVGSALGVMPPPKGYFPAMDKVIKKYGTLFIMDEVMSGSGRVGQLFAHQAVGEGVKPDIVAIAKGLGGGYVSISGVFVGQRVADRVREGGQWKNSHTYQNHPINCAVAAKVMEIVERENLLQNVRERGEQILEELKEAAKGVPTIIDVRGKGLFIGVEFDGPSSLKPRFASRVKDQAFKNGLIVMGISGTIDGVEGETTIICPAYTVTKKQISEIVRLLVKSIKEVVEEL

SEQ ID NO: 25950 - protein, 553 aa, Lycopersicon esculentum
MGGCFSKKYTQQDANGHRAGRRVNQAYQKPPQPQPERPYQPQPQQERPYQPPPQPAYQPPPQPKPQPQPHPVPVTVQSGQPQDQMQGPHMNNILGKPFEEIRKLYTLGKELGRGQFGVTYYCTENSTGNPYACKSILKRKLVSKNDREDMKREIQIMQHLSGQPNIVEFKGAYEDRQSVHLVMELCAGGELFDRIIARGYYSEKDAAEIIRQIVNVVNICHFMGVMHRDLKPENFLLTSKDENAMLKATDFGLSVFIEEGKVYRDIVGSAYYVAPEVLRRSYGKEADVWSAGVILYILLSGVPPFWAETEKGIFNTILKGEIDFQSDPWPSISNSAKDLIRKMLTQEPRKRITSAQVLEHPWLRLGEASDKPIDSAVLSRMKQFRAMNKLKKLALKVIAENLSEEEIKGLKAMFHNIDTDNSGTITYEELKSGLARLGSKLTETEVKQLMEAADVDGNGSIDYIEFITATMHRHRLERDEHLFKAFQHFDKDHSGFITRDELENAMKEYGMGDEATIKEIIAEVDTDNDGRINYEEFCAMMRSGTTQPQQKLF

SEQ ID NO: 25951 - protein, 355 aa, Ralstonia eutropha JMP134
MESNKQARAEARLNSGLRNYWYPVAASWAVTHAPIGITRLSQNIVLWRDNAGQVHALEDRCPHRGARLSMGWNLGDRVACWYHGVEVGGDGQVKSVPAVDSCPLEGRTCVRSYPVQEQAGAIFLWFGDQAPQEGEGSPDALRLPEELVSEEHSHFLCVAHWDCNYRYAIDNVMDPMHGAYLHAVSHSMACGEKSATMQIRETDHGLIFEKVGQRGVNFDWVEFGETGTLWLRLAIPYRDKVGPGGPFGIVGMATPVDEDHCMVFFWRTRHVQGWQRDAWRFLYRNRLEQLHWDVLEQDRVVLESMAPQARDHEMLYQHDAGITRVRRLLKRRAEQEIADEPVAMLKAAGGVANHA

SEQ ID NO: 25952 - protein, 546 aa, Bacillus thuringiensis serovar konkukian str. 97-27
MEENQDMNSLDEQDVKRETLTTRQGHPVKDNQNIRTIGNRGPATLENYHFIEKISHFDREEVPERVVHARGAGAFGYFETYGKVGDEPVEKYTRAKVFSGAGKKTPLMVRFSTVAGAKDSPETARDPRGFAVKMYTEDGNWDLVGNNLKIFFIRDAMKFPDMIHAFKVDPVSNVANPERMFDFVSRTPEATHMITFLFSPWGIPATYRHMQGSGVNTYKWVNEKSEAVLVKYHWEPKQGIRNLTQEDANSIQAMNVSHATQDLYEAIQRKDYPEWELFVQIMEDGYHPELDFDPLDDTKLWPEEQFPWLPVGRMVLDRNPVDYHSEIEQAAFGTGVLVDGMDFSDDKMLQGRTFSYSDTQRYRVGANYLQLPVNAPKAPVRTNQHRGQMDMRNPKESGENPHINYEPSMLGGYKDAKQEKHHPHQPTYNAAAMSAPIDRPNNYGQAGHTYRSFEEWERNELVKNLSEALAVCDKRIQNAMIEHFTQADEDYGRRVKEGIEKKMKEAKTENKLPGREVSKSKYGQGSLAANEATKDAVKKSHESDPY

SEQ ID NO: 25953 - protein, 191 aa, Cryptococcus neoformans var. neoformans B-3501A
MSEHTNLKSLAPLGNQPEPSANSAGVGPSKPFTEAQVEEFREQDRWLPIANVARIMKSSLPTSAKVSKEAKECVQECVSEFISFITSEAAEKCLNEKRKTLNGEDILTSMRALGFDNYEGVLRVYLAKYRDSHHSIPKRNAQHEDDDEEVQDGRKKRGRGRQPAGGTISTNGHAEGTKSKRKRSDDGKGVR

SEQ ID NO: 25954 - protein, 242 aa, Parachlamydia sp. UWE25
MGIQMNIYRLITLFIFTFALPGLSAEATNPQYTLAEDNQHKNQDDEDDEDWYDDDEDDDNQYQAHSPTPKEESQINTPKTSQVYPKITETTHPTLTQQKPTFASEQTLSIIKPDAVQNNYIGEIISRFEQAGLKIAAIKMTTLTKDQASKFYAIHKDRPFYNDLVNFMSSGPVVVMVLEGNQAIAKNRELMGATDPKKAEKGTLRADFAESMSRNAVHGSDSSETAEEEVLFFFKPDEITHR

SEQ ID NO: 25955 - protein, 453 aa, Arabidopsis thaliana
MTSCIIMHNMIIEDERDIDAPIEERVEVPIEEVEMTVLWLEMPLEEILSRLPLKSTRAVRSTCKKWDSLFKNRSFISKAAAAREGESQMVVLMDHNLHLVSFFFGSDTSVEIKGKRICLNDDSDSEQVKISQVFHCEGLLLCILKDDNFSLVVWNPYWGQTRWIKPRCSFEIPQGCDMYRYAIGYDNKRRNHKILRFIDYEFHYPRDNVVLWYEIYDFESDLWTTLDVTTPHWLINCGNRGVTLKGNTYWCAKKRNSDLFLNADHIICFDFTSERFGPLLLLPFSDLDGVVTLACVREEKLAALVCHEDVVEVWITIKIEANEVLWSKFLTVNVDLGDEIPSSLTYGSFFIDEEKKVAMIFDKTLDRGDTVHIMGEAGYGGQVDLGEPVNKRRCPLVCSYVPSLVQIKKPAGFQRKQQSKLEKRQYVRNISKLRALKTQSSWTLSMSLECHQQ

SEQ ID NO: 25956 - protein, 599 aa, Haemophilus influenzae R2866
MNLDLHFVHRIQQQAKTRANMTALRYKEHGLWRDISWKNFQEQLNQLSRALLTHNIDVQDKIAIFAHNMERWTIADIATLQIRAITVPIYATNTAQQAEFILNHADVKILFVGDQEQYDQALEIAHHCPKLQKIVAMKSTIQLQQDPLSCTWESFIKTGSNAQQDELTQRLNQKQLSDLFTIIYTSGTTGEPKGVMLDYANLAHQLETHDLSLNVTDQDISLSFLPFSHIFERAWAAYILHRGAILCYLEDTNQVRSALTEIRPTLMCAVPRFYEKIYAAVLDKVQKAPKLRQIMFHWAISVGQKHFDLRANNKAIPFLLKKQFALADKLVLSKLRQLLGGRIKMMPCGGAKLEPAIGLFFHAIGINIKLGYGMTETTATVSCWHDFQFNPNSIGTLMPKAEVKIGENNEILVRGGMVMKGYYKKPEETAQAFTEDGFLKTGDAGEFDEQGNLFITDRIKELMKTSNGKYIAPQYIESKIGKDKFIEQIAIIADAKKYVSALIVPCFDSLEEYAKQLNIKYHDRLELLKNSDILKMFELRINAVQKELAHFEQVKKFTLLSQAFSIKLGEITPTLKLRRKVILERYRKQIEAMYHSQEA

SEQ ID NO: 25957 - protein, 143 aa, Parachlamydia sp. UWE25
MTLERTLSIIKPDAVGNNHIGEIIARFEKAGLRIVAAKMKQLDRKDAEGFYAVHKGRPFFEDLVGFMTTGPVMIMVLEGENAINKNREIMGATDPKKAAPGTIRADFAQTIDENAVHGSDAAETAKTEIEYFFKSQDVCARKR

SEQ ID NO: 25958 - protein, 392 aa, Xanthomonas axonopodis pv. citri str. 306
MHGNHSPETLRDPHGFATKFYTSEGNWDLVGNNFPTFFIRDAIKFPDMVHAFKPDPRTNLDDDSRRFDFFSHVPEATRTLTLLYSNEGTPAGYRFMDGNGVHAYKLVNAQGEVHYVKFHWKTLQGIKNLDPKQVAAVQAKDYSHLTNDLVGAIKKGDYPKWDLYVQVLKPEDLAKFDFDPLDATKIWPDVPEQKVGQMVLNKNVDNFFQETEQVALAPANLVPGIEPSEDRLLQGRIFSYADTQLYRIGANGLSLPVNRPRVAVNNGNQDGQGNIGQTTSGVNYEPSRLEPRPQDTAARYSELPLSGTTQQAKITREQNFKQAGELYRSYSKKDRADLVQSFGESLAATDTESKHLMLSFLYKADPEYGTGVTRVAKGDLARVKQLASSLQD

SEQ ID NO: 25959 - protein, 498 aa, Oryza sativa
  misc_feature (196)..(196): Xaa can be any naturally occurring amino acid
  unsure (1)..(498): unsure at all Xaa locations
LPSPTTLFLSPIPLSSRRAGNVPPPPPEPAGLPLVGHLHLFRKPLHRTLARLAARHGGAVFGLRLGSRRVAVVSSAPAAEECLGAHDVAFADRPRLPSGRILSYDWSTMGTASYGPYWRHVRRVAVTEILSARRVQHFADVHVREARAMARHLHRAAVRHGVGGAARVRVELKSRLFELLMNTMMAMICDKTYYGXSDDDGKVSKEARWFREMVEETMALSGASTVWDFLPAALRWVDVGGVGRRLWRLRESRTRFLQGLINDERKEMEQEQGGDRAQPAARRRTMIGVLLSVQRQDPDACPDQLIRSLCISSLEAGTDTSADTIEWAMSLLLNNPNVMRKARDEIDAFIGQPCIIMETLRLYPPAPLLVPHEASTDCSIAGFHITRGTMLLVNTFAIHRDPQVWNEPTSFIPERFENGRSEGKMAIPFGMGRCKCPAENLGMQMVGLALGTMIQCFEWERVGEELVDMTEGSGLTMPKEVPLQAFYQPRASLMHLLY

SEQ ID NO: 25960 - protein, 381 aa, Streptococcus pyogenes
TFNNLYPHSPSKINSGKATTSNMVFNNTTNTTKAVKAVQNAVVSVINYQDNPSSSLSNPYTKLFGEGRSKENKDAELSIFSEGSGVIYRKDGNSAYVVTNNHVIDGAKRIEILMADGSKVVGELVGADTYSDLAVVKISSDKIKTVAEFADSTKLNVGEVAIAIGSPLGTQYANSVTQGIVSSLSRTVTLKNENGETVSTNAIQTDAAINPGNSGGPLINIEGQVIGINSSKISSTPTGSNGNSGAVEGIGFAIPSTDVIKIIKQLETNGEVIRPALGISMVNLNDLSTNALSQINIPTSVTGGIVVAEVKEGMPASGKLAQYDVITEIDGKTVNSISDLQSSLYGHDINDTIKVTFYRGTTKKKADIKLTKTTQDLTKTQ

SEQ ID NO: 25961 - protein, 172 aa, Xanthomonas axonopodis pv. citri str. 306
MRPGHLMVLALLAPTLIAPPVFAQSVLTRDNGAKVGDNQNSQTAGATGPTLLQDVQLIQKLQRFDRERIPERVVHARGTGVKGEFTATADLSNLTKAKVFSAGEKTPFFVGGAWQPLAGDAARSAWLRHQVLHQRRQLGSGRQQLPHVLHSRCDQVPRHGACVQAGSAHQSG

SEQ ID NO: 25962 - protein, 162 aa, Novosphingobium aromaticivorans DSM 12444
MSGPRTIADFKARKPNGEEIDLAEKKGKVLLVVNTASKCGFTPQYDGLEALWRQYGERGFEVLAFPCNQFGKQEPGTADEIESFCKVNFGLSFPLMAKIEVNGDNADPLYDWLKSEAPGVLGTKSIKWNFTKFLIDREGRVVRRYAPTDKPESIAGDIERLL

SEQ ID NO: 25963 - protein, 165 aa, Crocosphaera watsonii WH 8501
MFFIQSPIATLGCLILWFGWFGFNAGSTLELNSPAVAHILVNTLVAGATGGIIGTLSAWFMFDNKPSLTFIINGILAGCVSITASCAYVHLLSAVFIGMVGGWFVVWATDFIDRFGIDDPVGAIPVHLFCGFWGTLAVGFFSAGPGVVDWVISEKAFPIGGNRLD

SEQ ID NO: 25964 - protein, 356 aa, Frankia sp. CcI3
MSSLFSAVCDHEQVLLCSDRPSGLHAIIAIYSTALGPSLGGTRFHPYADEEVALADALALSRAMAYKAACAGLDLGGGKAVIIGDPAVAKSEPLLRAFGRHVASLGGRYITACDVGTYVADMDVIARETRWVTGRSPAHGGSGDSGVLTAYGVFEGMRAAARHRWGTPSLAGRRVAVSGVGKVGRRLVGHLLDSGASVVAGDVDPVALARLRVEFPAAETVPDPDDLLDLDIDVYAPCALGGALSAETVRRLRAGVVCGGANNQLAQPEVGRQLADAGVLYAPDFVVNAGGLIQVADEIEGYSPERARARAAQIFDTTSEVFRLAEAEEVTPTEAAERLAERRMTDVGRLRGILLP

SEQ ID NO: 25965 - protein, 370 aa, Staphylococcus epidermidis ATCC 12228
MAPKLQAQFDAVKVLNETQSKFEMVQILDEDGNVVNEDLVPDLTDEQLVELMERMVWTRILDQRSISLNRQGRLGFYAPTAGQEASQLASQYALESEDFILPGYRDVPQIIWHGLPLTDAFLFSRGHFKGNQFPEGVNALSPQIIIGAQYIQTAGVAFGLKKRGKNAVAITYTGDGGSSQGDFYEGINFASAYKAPAIFVIQNNNYAISTPRSKQTAAETLAQKAISVGIPGIQVDGMDALAVYQATLEARERAVAGEGPTVIETLTYRYGPHTMAGDDPTRYRTSDEDAEWEKKDPLVRFRKYLEAKGLWNEDKENEVVERAKSEIKAAIKEADNTEKQTVTSLMDIMYEEMPQNLAEQYEIYKEKESK

SEQ ID NO: 25966 - protein, 256 aa, Silene latifolia
MGRGRVELKRIENKINRQVTFAKRRNGLLKKAYELSVLCDAEVALIIFSNRGKLYEFCSGPSSMLKTLERYQKCSYGAVEVNKPSKELESSYKEYLKLKARYESLQRAHRNLLGEDLGPLNVKELDQLERQLESSLKQIRCIKTQSMLDQLTDLQSKEHALMEANKSLKAELERIMVKDNQVRQSWEGHHEHQNVHYEHQHAHSQHQHAHSQGLFQPIDCNPNLHLGYNAETSDHQLTAGTSHAQVPGFLPGWMQM

SEQ ID NO: 25967 - protein, 291 aa, Saccharomyces cerevisiae
LVHVASVEKGRSYEDFQKVYNAIALKLREDDEYDNYIGYGPVLVRLAWHISGTWDKHDNTGGSYGGTYRFKKEFNDPSNAGLQNGFKFLEPIHKEFPWISSGDLFSLGGVTAVQEMQGPKIPWRCGRVDTPEDTTPDNGRLPDADKDAGYVRTFFQRLNMNDREVVALMGAHALGKTHLKNSGYEGPGGAANNVFTNEFYLNLLNEDWKLEKNDANNEQWDSKSGYMMLPTDYSLIQDPKYLSIVKEYANDQDKFFKDFSKAFEKLLEDGITFPKDAPSPFIFKTLEEQGL

SEQ ID NO: 25968 - protein, 244 aa, Silene latifolia
MGRGRVELKRIENKINRQVTFAKRRNGLLKKAYELSVLCDAEVALIIFSNRGKLYEFCSSPSMLKTLERYQKSNYGPPDNTAVSSREALEISSHQEYIRLKARYEALQRTHRNLMGEDLGPLSSKELESLERQLDMSLKHIRSTRTQYMLDQLADLQRKEHVLNEANITLKQRLIEADQVSSAQCYGHELDYGRQNPQAQADHVFFHPLECEPTLQIGYQPEQMNVTAAGPSINNFMTGWLPQN

SEQ ID NO: 25969 - protein, 443 aa, Ralstonia solanacearum
MNIIWTRFVVAVALMGLVTLGLYFFVGHAVAFAAFSAMLLTMLLYYVYQLQRLWRVLESPAYGEIPSALGLWGEVYYRLHRLMKGWRTQVLQVEQQHSRFIQAIQASPNGVLMLDGEDQIEWCNAVAEEHFGLSAKRDLRQRITHLIRRPEFVRYLARGEFEEPLTMRDMGPHKQSIVSAQVLPYGEDRKLLVSQDITKLENTEAMRRDFVANVSHELKTPLTVLSGFLETVRDLPLSEDDKRRYLDMMHVQATRMQHLVEDLLALATLEGNSEPPSITPVPMQRVMLQLQHDAEALSAGRHAISMTCDASVSVCGAELELLSAFSNLVSNAIRYTPEGGRISLDWSAREGHAVFSVTDTGIGIAPEHIPRLTERFYRVDRSRSRDTGGTGLGLAIVKHVLSRHGADLQVVSERGKGSTFRASFPPERTVVRGTGDSGAERAA

SEQ ID NO: 25970 - protein, 663 aa, Salmonella typhimurium LT2
MSSRKELANAIRALSMDAVQKAKSGHPGAPMGMADIAEVLWRDFLNHNPTNPSWADRDRFVLSNGHGSMLIYSLLHLTGYDLPMSELQNFRQLHSKTPGHPEVGYTAGVETTTGPLGQGIANAVGMAIAEKTLAAQFNRPGHDIVDHFTYVFMGDGCMMEGISHEVCSLAGTLKLGKLIAFYDDNGISIDGHVEGWFTDDTAKRFEAYGWHVIRGIDGHDADAIKRATEEARAVTDKPSLLMCKTIIGFGSPNKQGTHDSHGAPLGDAEIALTREQLGWKYAPFEIPSEIYAQWDAKEAGQAKESAWNEKFAAYEKAFPQEAAEFTRRMKGDMPADFDAKANEFIAKLQANPSKIASRKASQNTIEAFGPLLPEFLGGSADLAPSNLTLWSGSKAINEDAAGNYIHYGVREFGMTAIANGIALHGGFLPYTSTFLMFVEYARNAVRMAALMKQRQVMVYTHDSIGLGEDGPTHQPVEQVASLRVTPNMSTWRPCDQVESAVAWKYGVERQDGPTALILSRQNLAQQERTEEQLANIARGGYVLKDCAGQPQIIFIATGSEVELAVAAYEKLTAEGVKARVVSMPSTDAFDKQDAAYRESVLPKAVSARVAIEAGIADYWFKYVGLNGAIVGMTTFGESAPAELLFEEFGFTVDNVIAKAKALL

SEQ ID NO: 25971 - protein, 477 aa, Synechococcus elongatus PCC 6301
MNQKLSRYPKSSWAYVVIACPIAIALIFSSPVKAKLPLGDRLTWGNAVTETSPAYRQALNQAKTFRMPAEFEPITSIWMAYPTYENQAGYPSQTVQKAMVKAIAPTVKIDFLLNEPEEKVIINGWLKTAGIPASQVRYHLVPHEDLWIRDMGPIFAVNADQTQVVDFGFNAWSYLAATDPAAMTDEQVDRKVAGDLDLPILRSSLISEGGNREFNGKGTLMLTEAVELQRNPGLTKEKIETELKRVFNLKKVIWLQEGVIDDELSYRGKLPDGSLTVLATGGHIDEYARFVDSNTILLAEVTAEERASDPLAAINYQRLEENLKILQAATDQDGKPFRIVRIPAAKPIYVNMTKEDAVFQALQELTFEDGTVIQDDDQIKTILAASYLNFVIANDVVIVPRYWQPDRNLEYQQKDQAALAAFQSVFPNKKIVAINPENINAGGGGMHCIVQQQAVVDAVARSLSTGAGDRSKSRSNL

SEQ ID NO: 25972 - protein, 420 aa, Bacteroides thetaiotaomicron VPI-5482
MELKRVVVTGLGAITPVGNDVPEFWENLVNGVSGAGPITHFDASQFKTQFACEVKNFDVTKYIDRKEARKMDLYTQYAVAVAKEAVSDSGLDVEKEDLNRIGVIFGAGIGGIHTFEEEVGNYYTHQEIGPKFNPFFIPKMISDIAAGQISIMYGFHGPNYATCSACATSTNAIADAFNLIRLGKANVIVSGGSEAAIFPAGVGGFNAMHALSTRNDEPSKASRPFSASRDGFIMGEGGGCLILEELEHAKARGAKIYAEVAGVGMSADAHHLTASHPEGLGAKLVMLNALEDAEMDPKEVDYINVHGTSTPVGDISEAKAIKEVFGDHAYELNISSTKSMTGHLLGAAGAVESIASILAIKNGIVPPTINHEEGDNDENIDYDLNFTFNKAQKREVNVALSNTFGFGGHNACVIFKKYAE

SEQ ID NO: 25973 - protein, 389 aa, Bacillus cereus ATCC 14579
MNRVWKNLISEENIVKWRRHFHKYPELSFHEKETSQFIYDTLCSFSSFEVTRPTKYSVLAIKRGVKQGKVIAIRADIDALPIQEETSKSYTSVNKGMMHACGHDAHAAILLSTAEVLSNIKEDFAGEIRLFFQHAEEVYPGGGQEMVEAGVMDGVDYVIGLHVMSGLESGKIGIAYGPMMAAPDVFTVEIQGKGGHAARPEETIDPIAIGAQIITNLQHIVSRNTNAFMQRVVSVTQFHGGTADNIIPSTATLMGTVRSFNQALRVEAEGKIEKIVKGITEAHGGSYTYTYRYGYDPVINDEYITKIVEESALHLFGNERVVKLEPSMGGEDFSAYLRKAPGCFIKLGTGNENIYTCYPHHHPKFDVDESALICGVEIFLETTIRLLKL

SEQ ID NO: 25974 - protein, 324 aa, Pseudomonas aeruginosa UCBPP-PA14
MGQLIDGRWHDQWYDTQKDGRFQRENAQRRHWLGEPAFPAEGGRYHLYVSLACPWAHRTLIVRKLKGLESLVDVSVVSWLMRENGWTFDPAHGSTGDRLDGLAFLHQRYTRDDPHYSGRVTVPLLWDKQAQKIVNNESADIVRIFNSAFDAIGANALDFYPEPLREEIDRLNGRIYPAVNNGVYRAGFATRQDAYEEAFVQLFEELDYLEGLLGERRYLAGEYLTEADIRLFTTLVRFDAVYHGHFKCNLRRIEDYPNLSGWLRELYQRPGIGETVDFEHIKGHYYASHRTINPTGIVPLGPRLDLARAPGRERLPGKGIWGEG

SEQ ID NO: 25975 - protein, 478 aa, Prochlorococcus marinus subsp. pastoris str. CCMP1986
MNKPRILFWHRKDLRIFDNQALIKAFSLSDAITSTYIFDKNYSHDFNASSRAWFLGNSLQELGNNWKKMGSRLVLEEGDPVLIIPQLAKKIDAKFVFWNRSIEPYEINRDLEIKNNLKEQNIQVIETWDHLLIEPLKIFSGNNNPYSVYGPFYKNLKSKINLLGSFEQDKVVFQFKDIDNKFKENKAINSSDSVLEKFIKNIKFPGSNICPCRPGENAAQTLLENFINEKKIYSYNSARDFPSHNGTSFLSASLRFGTISIRKVWNATLNLNSDFANQENYLSIETWQKELVWREFYQHCLFHFPELEKGPYRKKWDHFPWQNNNELFQHWSNGETGVPIVDAAMRQLNSTGWMHNRCRMIVASFLVKDLICSWQMGEKKFMETLVDGDLAANNGGWQWSASSGMDPKPLRIFNPYTQAKKFDPICEYIKYWIPELSRVSNSELLNGEISNLEKNNYSSPIVNHNIQQRLFKSLYAEI

SEQ ID NO: 25976 - protein, 460 aa, Cryptococcus neoformans var. neoformans JEC21
MADSIASASNSGAESIAIAARRAFEASQLVNPSERDVALKAIRETLQASKDEIIAANKKDMEAAEALAATGKLSSSLVSRLDLGRPGKFEAMLQGITDVAALPAPTGIVTFAKEIGPELELHRVTCPVGVLLVIFEARPEVVVNIAALAIKSGNAAILKGGKESINTATLLSSLISQALAKTSIPPAFVQSVSTRSEISSLLAQDKYIDLVMPRGGNELVRSIQNNTRIPVMGHADGICAVYLDESAVQEKAVRIAVESKIDYMAACNAAETLLIHSSLLTTVWPAVASALMSNSVCLRCDAATLSALRDANIPKTSEFVTASSPADYSTEFLGPTIAVKAVESVQEAIQHINSHSSHHTDSIVTEDEASMSAWCRGLDSANCFVNASTRFADGTRYGLGTEVGISTGKTHARGPVGLDGLIIYKYMMRSRKQDGSVIADHEKGGKGYTHKDLVKGEPPF

SEQ ID NO: 25977 - protein, 330 aa, Rubrivivax gelatinosus PM1
MDKVLVARAAFPDIVDRLRAHFEVEDNPSDTVLDKAQLIARLQGKAGAFTTGSERIDAEVLAACPQLRAVCNMAVGYNNIDVAACTARGVIVTNTPDVLTETTADFGFALMMAAARRIAESEHYLRRGEWTKWHYDQLVGSDVHGATLGILGMGRIGQAIARRGALGFGMPVIYHNRSRLAPEIESALNARYVDKATLLRESDHLVLVLPYSAASHHAIGAVELTHMKPTATLTNIARGGVVDDAALAEALKARRIAAAGLDVFEGEPKLNPALLELPNVVLTPHIASASVATRRAMASLAVDNLIAALGCGPQAGRPPTPVNPEVLAPR

SEQ ID NO: 25978 - protein, 204 aa, Dunnia sinensis
MARGNASVPAMEMTKWFDTNYHFIVPELGPDVKFTYASHKAVNEYKEAKALGVDTVPVLVGPFTFLSLSKPAKGVEKTFPKLSLLDKILPVYKEVIADLKAAGASAIQFDEPVLVMDLESHQLEAFANAYSELESSLAGLHVIIETYFADVPQEAYKTLTSLNAVSGFGFDLVRGAKTLDLIKGGFPAGKFPYAGVVDGRNIWA

SEQ ID NO: 25979 - protein, 551 aa, Streptococcus agalactiae 2603V/R
MTKKIFRTTLSASLGIVLVTILMIMGFLYNYFNHIQREQLRTQTALASQGISFEGKDYFENLKTSNVRITWVDNKGQVLYDTQSDAKHMKNHANRQEIKEAIKSGYGESTRWSATLTEKSIYAAQRLNNGTIVRLSVAQQTIFYLLLGMISPLAIIILLAIILSVLIARYIAKKVSEPLNNIDLDHPLSNDSYEEITPLLRRLDSHQAKIQHQKLLLQKRQKEFDTIISKIKEGMILLDDQARIVSINAEALKLFQINDDWHGRFMMEVSRDLTLKDLIDQGLKGKKKEANIGIENNHYRVLVRPTTDNNRVTGLVVLLFDVTDQLQMEQLQREFTANVSHELKTPLHVISGYSELLANQMVPNEEVPQFAAKIHKESERLVKLVEDIINLSHLDEQEKLPQETVNLYDLTQKVLEGLQAKADKKHIQINFNGEEAILRGNPVLLNSLVYNLCDNAITYNHEKGQVNVTLKNSPDTITLEVSDTGLGIAEKDKKRIFERFYRVDKSRSKIVGGTGLGLSIVKSALDFHNGSIKVDSHLGQGTTMTVLLHKQ

SEQ ID NO: 25980 - protein, 204 aa, Dunnia sinensis
MARGNASAPAMEMTKWFDTNYHFIVPELGPDVKFTYASHKAVNEYKEAKALGVDTVPVLVGPFTFLSLSKPAKGVEKTFPKLSLLDKILPVYKEVIADLKAAGASAIQFDEPVLVMDLESHQLEAFANAYSELESSLAGLHVIIETYFADVPQEAYKTLTSLNAVSGFGFDLVRGAKTLDLIKGGFPAGKFLYAGVVDGRNIWA

SEQ ID NO: 25981 - protein, 377 aa, Rhodospirillum rubrum
MPARVAGQIPTAADGPHGFDPDTVVSSKDRRRMDDFIVYGLAAAKEAVEDSGWMPEDEESRERTGVMIGSGIGGLTSIAETALILKEHGPRKVSPFFIPSALINLVSGHVSIRYGFKGPNHAVVTACSTGAHAIGDASRLIIHGDADVMVAGGAESAVCRIGIAGFAAARALSTHYNDTPEEASRPYDKGRDGFVMGEGAGIVVLEEYEHAKARGAHIYAEILGYGMSGDAYHITAPAEDGNGGFRAMRAALANAKLTVEDIDYVNAHGTSTPLGDEIELGAVKRLFGDHAYKLTMSSTKSAIGHLLGAAGSVEAIYSILAIRDQVAPPTLNLHDPSDACDIDLAPLVAKERPIRKALSNSFGFGGTNASLIFGGAP

SEQ ID NO: 25982 - protein, 377 aa, Lolium perenne
MKSNSSSTIYEEAVGQEGSWSRLCDGCCMVPSVVYCHADSAYLCASCDVRIHSANRVASRHERVCLSEAHEHAPALLQCRTDAVASCAAYEAQAHYANLLAGMHQCVPVVSHPATAIPTASLLAEAAVTTTILSCKEEEASWLLLSKNSANHNCSGDNRSSSTYFGEVDEYFDLVGYNSYYDSRMNNNRAQYVMQEQQHLQPMQKEYAEKEGSECVVPSQFATASKPQQSGYALVGAEQAASMTAGVSVYTDSVNNSISFSSMEGGIVPDNTVVDLPYSIIPTPAGASSLHSGPPLQMPLHFSSMDREAKVLRYKEKKKTRTFEKTTRYATRKAYAEARPRIKGRFAKISEAEMEVDQMFSAAALSDSSYSTVPWFQ

SEQ ID NO: 25983 - protein, 302 aa, Frankia sp. EAN1pec
MTTTLPAAGRLTTDEPAARRYAATVAVHRELPPAKLAPALAEIARGVRRDIVTTIGQAGMGHLGGDLSVTDILVAAYWRALTVDPFAPDAADRDRFVLSKGHCAVALYSVLASCGFFPRSALETFGGPLSPLNGHPNRVKVPGVETNTGPLGHGLPVAVGCALGARLRGIANRTIVVLGDGEIQEGSNWEAAMTAAHHRLATLVAVVDRNRLQQGARTEETKALEPLDAKWAAFGWEVRRIDGHDHQALVEALAPSSTGRPVAVLADTVKGKGVSFVEDRVEWHHKVPSAEQLRAALEELSG

SEQ ID NO: 25984 - protein, 349 aa, GIBBERELLA ZEAE PH-1
MASEPRQYHPLTCHGHSRPVPHIAFSAIEKDTDKDKNDVYYMISACKDGNPMLRNGITGDWIGTLIGHKGAVWQARLSPDAHHAATASADFTAKIWDTYTGELLHTLQHDHIVRAIAYPPDNSDLIATGGMEKKLRIFDLSELPVAGSPTTINASTGFEIGEGVHTGSIKFICWTQDPNIVVTASDKTIRWLDLPSRSCIRHEVLDGDIKSCEMVSLAPQYASPSDIGGGKPVLAVAAGKTAYFWGGVQAMDELKRISLTYTIASVSLDLKGRKLVVGEEPGTWAKVIRYDDGTEVDTHKGHHGPIWSIAFSPDGKLYATGSEDGTIKLWKNCEGYYGLWRGGAEKAAE

SEQ ID NO: 25985 - protein, 291 aa, Saccharomyces cerevisiae
LVHVASVEKGRSYEDFQKVYNAIALKLREDDEYDNAIGYGPVLVRLAWHISGTWDKHDNTGGSYGGTYRFKKEFNDPSNAGLQNGFKFLEPIHKEFPWISSGDLFSLGGVTAVQEMQGPKIPWRCGRVDTPEDTTPDNGRLPDADKDAGYVRTFFQRLNMNDREVVALMGAHALGKTHLKNSGYEGPWGAANNVFTNEFYLNLLNEDWKLEKNDANNEQWDSKSGYMMLPTDYSLIQDPKYLSIVKEYANDQDKFFKDFSKAFEKLLEDGITFPKDAPSPFIFKTLEEQGL

SEQ ID NO: 25986 - protein, 433 aa, Thermus thermophilus HB8
MDALARLERLPLGRPHYRLLLLLGFGWALDAMDVGLISFTLPALSRDFGLDPVGAGLLGSVGLLGMLFGALLGGRLADRFGRKAVVGYSLFLAGLGSLLTALAPSLSWVFLFRFLTGLGLGAELPVAASLMGEFSPKAHRGRMVVLLEAFWAVGWLLAALVGYLLVPSLGWRAAFLAGALPALYAAYLRLSLPESPRWLVARGRAAEAEALVASWERAFPGPLPEPRPEPAPRPLPYGALFRPPLLRRTLFLALAWFALNAGYYGAFIWLPSLLVAQGYTLVRSLEYVLLITLAQVPGYLVAAFLVERWGRRPVLVGFLGLSALFAWLLSRAASPGEVLLFGALLAFFNLGAWGAIYAYTPELFPTALRGSGAGFVAAVGRVGGILAPYATGALLPLWGPGGVLALHGGLLLLAGVFAFAVGVETRGKPLEEA

SEQ ID NO: 25987 - protein, 220 aa, Brassica juncea
LADVKLDCSYQLLVTNLWGLYRMRIGDIVKVTGFHNKAPKFRVIGRENTLLSIDTDRTTEEYLLKAVNRARLVLESSDLRLVAFTSCADIPSSPGHYVIYWEVKTKEEDMKELDEKTFLECCSVMEDTLDEEYMYCRANEFIGPLEIRVVNDGTFDSLMNLSISKGASITQYEYWRQMWLLDSSVLSEHLMCLSHDIWSKKRGRNVCVLSVLSCFLLTIF

SEQ ID NO: 25988 - protein, 468 aa, Staphylococcus epidermidis ATCC 12228
MVVGDFPIETDTIVIGAGPGGYVAAIRAAQLGQKVTIVEKGNLGGVCLNVGCIPSKALLHASHRFVEAQNSENLGVIAESVSLNYQKVQEFKTSVVNKLTGGVEGLLKGNKVEIVRGEAYFVDNNSLRVMDEKSAQTYNFKHAIIATGSRPIEIPNFEFGKRVIDSTGALNLQEVPNKLVVVGGGYIGSELGTAFANFGSEVTILEGAKDILGGFEKQMTQPVKKGMKEKGIEIVTEAMAKSAEETENGVKVTYEAKGEEQTIEADYVLVTVGRRPNTDELGLEELGLKFADRGLLEVDKQSRTSIENIFAIGDIVPGLPLAHKASYEGKVAAEAIDGQAAEVDYIGMPAVCFTEPELAQVGYTEAQAKEEGLSIKASKFPYAANGRALSLDDTNGFVKLITLKEDDTLIGAQVVGTGASDIISELGLAIESGMNAEDIALTVHAHPTLGEMTMEAAEKAIGYPIHTM

SEQ ID NO: 25989 - protein, 291 aa, Saccharomyces cerevisiae
LVHVASVEKGRSYEDFQKVYNAIALKLREDDEYDNYIGYGPVLVRLAWHISGTWDKHDNTGGSYGGTYRFKKEFNDPSNAGLQNGFKFLEPIHKEFPWISSGDLFSLGGVTAVQEMQGPKIPWRCGRVDTPEDTTPDNGRLPDADKDAGYVRTFFQRLNMNDREVVALMGAHALGKTHLKNSGYEGPQGAANNVFTNEFYLNLLNEDWKLEKNDANNEQWDSKSGYMMLPTDYSLIQDPKYLSIVKEYANDQDKFFKDFSKAFEKLLEDGITFPKDAPSPFIFKTLEEQGL

SEQ ID NO: 25990 - protein, 645 aa, Xanthomonas campestris pv. vesicatoria str. 85-10
MPGVTLHALFYSSRDSEMSDWSLDQARKTYSIPHWADGYFDVNAAGHVVVTPTADGPAVSLPEVVDAARAAGAKLPLLVRFPDILGQRLGKLQAAFAQAQSEWDYAGGYTAVYPIKVNQHRGVAGTLAGHHGEGFGLEAGSKPELMAVLALSRPGGLIVCNGYKDREYIRLALIGRKLGLQTFIVIEKPSELTLVLEEARALDVKPGLGVRMRLASLGAGKWQNSGGDKAKFGLSPRQVLDLWKTLRDTEYADSLNLLHFHMGSQISNVRDIANGMREATRYFVELSRLGAKISHVDVGGGLGIDYEGTRSRSYCSINYGLHSYASNIVQPLASACEEHGLAPPRIVTECGRAMTAHHAVLIANVSEVEQAPEGRVPVAHDDEPAAIRHLREIHDELDVRPAVELFQEAQHFHAEGLSAYALGQIDLPQRARIDDLFYAIAHGVRARLSFDEKSHRPVLDELNERLVDKYFVNFSVFESIPDVWAIDQVFPIVPIERLNEAPQRRGIIADMTCDSDGMVKTYVENESLDSSLPLHGLNAGESYRIGFFLVGAYQEILGDIHNLFGDTDAVEVVVNRDGYRIAQQRRGDTTDVMLDYVGYQLDTLRATYAERIAAANLSPERAQELGAALEAGLTGYTYLSDEPLS

SEQ ID NO: 25991 - protein, 291 aa, Saccharomyces cerevisiae
LVHVASVEKGRSYEDFQKVYNAIALKLREDDEYDNYIGYGPVLVRLAWHISGTWDKHDNTGGSYGGTYRFKKEFNDPSNAGLQNGFKFLEPIHKEFPWISSGDLFSLGGVTAVQEMQGPKIPWRCGRVDTPEDTTPDNGRLPDADKDAGYVRTFFQRLNMNDREVVALMGAHALGKTHLKNSGYEGPWGAANNVFTNEFYLNLLNEDWKLEKNDANNEQWDSKSGYMMLPTDYSLIQDPKYLSIVKEYANDQDKFFKDFSKAFEKLLEDGITFPKDAPSPFIFKTLEEQGL

SEQ ID NO: 25992 - protein, 454 aa, Novosphingobium aromaticivorans DSM 12444
MSDPVIVWFRRDLRLADQAALLAAAAEGPVIPVYILDDDTPRHCRMGGASRWWLHHSLAELDASLRKLGSRLILRRGKCHEELAAVRREAGARVVHALQHYEPWWRNAEKAVAKTIRLVLHEGNYLAPAGSVRTGMGRPYKIYTPFWHALLERMPPAPPLPAPERLEAPAVWPTSDALDDWKLLPTAPDWAGGFRETWTPGENGAEERLQDFADRVARYGETRNLPSIEGTSRLSPHLHFGEISPATIWHRVVNAGGSVDVFLGELGWRDYAQNVIVQFPDYGSRNAREAYDRLEWRDDPEALRAWQQGRTGYPIVDAGMRELWHTGWMHNRVRMIAASFLVKHLLIDWREGERWFWDTLVDADYASNAVNWQWTAGTGVDSNMFVRIMAPLTQSPKFDAAGYIRQWVPELAHLSDRDIHDPAVPPRGYPAKIVSHSEARARALAAHDRMKQPA

SEQ ID NO: 25993 - protein, 291 aa, Saccharomyces cerevisiae
LVHVASVEKGRSYEDFQKVYNAIALKLREDDEYDNYIGYGPVLVRLAWHISGTWDKHDNTGGSYGGTYRFKKEFNDPSNAGLQNGFKFLEPIHKEFPWISSGDLFSLGGVTAVQEMQGPKIPWRCGRVDTPEDTTPDNGRLPDADKDAGYVRTFFQRLNMNDREVVALMGAHALGKTHLKNSGYEGPYGAANNVFTNEFYLNLLNEDWKLEKNDANNEQWDSKSGYMMLPTDYSLIQDPKYLSIVKEYANDQDKFFKDFSKAFEKLLEDGITFPKDAPSPFIFKTLEEQGL

SEQ ID NO: 25994 - protein, 601 aa, Sinorhizobium meliloti
MNAKDRNKRAVDSETITGILKRVIAENGRDHIRGYAFAIACLVVVAATTGFTAWIMEAVVNEAFANRRADIVLLICGAIFAAFVLRGLATYGQAVALSKIGNNIVARYQRRLYAHLMALSVGYFHEHRSAQLAAKVSQNVSGIRDVLNMTVTSIARDLLTLIGLVVVMFSKDWLLSLIVFFVAPPLLLGLRYISRRLRLATREAVEVNSRVLGAMQETIQGITIVKAFTMENELRRKVESIIDRAENRANRIARLSERTAPMTETFAGLAISSVLAYAAFRTIYHNVPPGAFFAFVTALLMAYDPARRLARLQVSMERAAVNARMIYEILDTVPHQRDRPDATELRLGEATVELRDVRFAYGTGEEILKGVSFRAEGGKTTALVGPSGAGKSTIISLIPRFYDPLSGEILIDGQNIAGVTKQSLRAGLAYVSQQPYLFEGSIRDNIRYGRPDATDAEIEEAARLAYAHDFILAQPQGYDTPVGEHGVTLSGGQRQRLSIARALVRNAPVLLLDEATSALDTESEAAVQKALEEAMSGRTVIVIAHRLSTVVNADKIVVMKEGIVVEEGSHEELARRPDGLYARLHNLQGSGADTVAEAQIL

SEQ ID NO: 25995 - protein, 459 aa, Arabidopsis thaliana
MAATRQLRTLQSQPENKVCVDCAQKNPQWASVSYGIFMCLECSGKHRGLGVHISFVRSVTMDSWSAIQIKKMEAGGNERLNKFFAQYGIAKETDIISKYNSNAASVYRDRIQALAEGRPWNDPPVVKEANKKPPLAQGGYGNNNNNNNGGWDSWDNDDSYKSDMRRNQSANDFRASGNREGAHVKSKSSEDIYTRSQLEASAAGKESFFARRMAENESKPEGLPPSQGGKYVGFGSSSAPPPRNNQQDDVFSVVSQGFGRLSLVAASAAQSAASVVQTGTKEFTSKVKEGGYDHKVSETVNVVANKTTEIGHRTWGIMKGVMAMATQKVEEFTKEGSTSWNQQSENEGNGYYQNFGNGNKAANSSVGGGRPQSSSTSGHYNNSQNSNSWDSWGENENKKTEAVAPKGSSASNDDDGWTGWDDHDAKDDGFDGHYQSAGDKKSAGHNGKSDTAWTGGGFL

SEQ ID NO: 25996 - protein, 338 aa, Salmonella typhimurium LT2
MKTLICNNPGNIEYIERDIPHLKDDEVLLKIKAVGICGTDIHAFAGRQPFFAYPRVLGHEICGVAEMLGKSCSTAKVGQRYSVIPCIPCGACAACREGKTNCCENVSLYGVHQDGGFSEYLAVREQNLVELSDNLTDSAGALVECFAISAHAVRRADVKPQQNIVVVGAGPIGLAAAAIAKAKGARVAVADIDAERRRLVAEKVGVATLDPSSDDYIDALKACFSGELAGTVLDATGNKSSMSRAVDLIRHGGKIVFIGLYIGELVIDDPTFHKKETTLLSSRNATREDFECVIELMAQGAISETMMKNQEFDFYTFGNQYQKNVVENKKLVKGVIKF

SEQ ID NO: 25997 - protein, 455 aa, Frankia sp. CcI3
MSEQVSTLTVTDNRTGKTYEIPVTDGAVRASAFRSIKTSDDDFGLMTYDPAFTNTASCRSAITYIDGDAGILRYRGYPIQELAEKSSFLEVAYLLLAGELPSAEELSTWEDEITHHTLVHESIKKFIDGFHHDAHPMGMLVSTVGALSTFYPDAKTIDDPGLRRLQIVRLIAKITTLAAFSYRHSVGFPYVYPDNDLSYAGNFLNMMWKATELKYEPDPNLEHALDVLFILHADHEQNCSANAMRAVGSSQADPFSAAAAAISALYGPLHGGANEQVLRMLSEIGSVENIPAFIAQVKDGKKKLMGFGHRVYKNYDPRARVIRQVADEVFKVTGTNPFLDLAMELERIALEDEYFVARKLYPNVDFYTGIIYQAMGFPVEMFPVLFAIGRMPGWLAQWEEGLLDPEQKIARPRQLYIGYDQRSYVPIDDRSGVGDSGIDPIAAQAAQAAPERPLR

SEQ ID NO: 25998 - protein, 196 aa, Crocosphaera watsonii WH 8501
MFSMLKQVSDYAKGTIEAAKYIGQGLSVTFDHMRRRPVTVQYPYEKLIPSERFRGRIHYEFDKCIACEVCVRVCPINLPVVDWEFNKASKKKELKHYSIDFGVCIFCGNCVEYCPTNCLSMTEEYELATYDRHELNYDNVALGRLPYKVTQDPMVTPLRELNYLPKGVLDPHDLPPGSQRPGKRPEEIIEEANSSS

SEQ ID NO: 25999 - protein, 573 aa, Penicillium chrysogenum
MANAPHGGVLKDLLARDAPRQAELAAEAESLPAVTLTERQLCDLELIMNGGFSPLEGFMNQADYDRVCEDNRLADGNVFSMPITLDASQEVIDEKKLQAGSRITLRDFRDDRNLAILTIDDIYRPDKTKEAKLVFGGDPEHPAIVYLNNTVKEFYIGGKIEAVNKLNHYDYVALRYTPAELRVHFDKLGWSRVVAFQTRNPMHRAHRELTVRAARSRQANVLIHPVVGLTKPGDIDHFTRVRAYQALLPRYPNGMAVLGLLGLAMRMGGPREAIWHAIIRKNHGATHFIVGRDHAGPGSNSKGEDFYGPYDAQHAVEKYKDELGIEVVEFQMVTYLPDTDEYRPVDQVPAGVKTLNISGTELRRRLRSGAHIPEWFSYPEVVKILRESNPPRATQGFTIFLTGYMNSGKDAIARALQVTLNQQGGRSVSLLLGDTVRHELSSELGFTREDRHTNIQRIAFVATELTRAGAAVIAAPIAPYEESRKFARDAVSQAGSFFLVHVATPLEHCEQSDKRGIYAAARRGEIKGFTGVDDPYETPEKADLVVDFSKQSVRSIVHEIILVLESQGFLERQ

SEQ ID NO: 26000 - protein, 493 aa, Shewanella sp. MR-4
MSDNQPQAAKHTLMWFRQDLRLTDNQALTAACDWVRQVPGAKLRAIYIATPSQWLSHDMAPIQIDFIQRHVNLLAQGLASLGIEFELIQLDSFKEVPAFLASYCEKLGVERVFAGREPEINEQKRDQACLDVGIPLVLSDEHCLLPPGTVLNLSGDMYKVFTPFSRKWREVAAKRAILPLAVPAPLGPMLPEPKPISFKERFPFTSKLTSSEQWAAGEGQAKRILTAFIQQKAQDYKQDRDFPALEGTSVISPYLALGVLSPRQCIAALLGRFPEVIVDDTSPGRTWLNELIWREFYRHLLVAFPDLSKGHNFNRQADHVQWRNNQAEFLAWCEGKTGYPIVDAAMRQLNQTGWMHNRLRMVVASFLTKHLLIDWRWGERYFRQHLIDGDLAANNGGWQWSAGCGCDAQPYFRIFNPISQSEKFDPDGSFIRKYLPELASWGIKRLHQPNMQKTPSLFEVPTLESDSAYPYAIVEHNAARARALAVLGVLKKA

SEQ ID NO: 26001 - protein, 452 aa, Bacillus cereus ATCC 14579
MKETTSFSQKLKQFVLLFFPIFVTQMSLFAMSFFDTTMSGHASPTDLSGVAIGTSIWIPVSTGLTGILMATTPIVAQLVGSKKKEDVPHVVIQAVYLAICASFVVILIGFFVVSPILNGMRLEEPVERIAAQFLSIIAIGIIPLFTYTVLRGFIDALGKTRTTMIITLLSLPINVILNYLLIFGNFGFPKLGGVGAAIASTATYWCILIITVIIIQTKEPFASFNIFKQLYRPSLSSWIAFLKLGVPIGFAIFFETSIFAAVTLMMSNFSTTTIAAHQAAMNFASLLYMTPLSLAMAMTIAVGFEVGAKRYDNAKQYGLIGIGLALAFALLYSILLYFFDDQIASIYTTDAKVHHLAKEFLIFAILFQISDAIATPVQGALRGYKDVNVALIMTLIAYWIIGLPLGYILATYTEWAAKGYWIGLIIGLAFGAAFLLIRLFQVQRKYTTQNSR

SEQ ID NO: 26002 - protein, 1229 aa, Neurospora crassa
MPNGSRISKNQPRSLTDEHALGMNTSRPTTSPAAAVVNRSSDPDPVPDPAARHKPNPDRPGASDGPSKSGKPRGRSIEPPSSSPQPAPRHRHPSRHRSPDRSGRSSRLPHRSRGSPRSRRDRSREPRGRDGHFPPDRRHRSPVLPRGRGDAAHERGQNVDHGKHHSQLPPHPARASQRGSSRTPGSSKRRRSRTPSPGGPDSKKSRRGRSPRRGEKDDVNSLQLPRDCRRSPVDRRPSRSPSHHERRRSRDRKRSGRSRSPDRSRRRKSRSPDRGVFDRASGRVRRRSPSPRHRGRSDRPDRPERRHQSKSRSRTPPHRENRHPASDAGSRRRPSPDPDSREPYDHPQGSPRDRRRSKSSKKGKVRDDQKFDPASGVNSIEVNMAARNGYRGGYGAPMPPGYTETHDGRNYSHSSGHATPNSSFHGSPPAQSPYGAGRGWNNPQFSPQSQYGYPHGNYGPPTGPQAHYHSNQGHSPPYPPTGPAAQYPTGPFRGGHRAASGGFRGGSFGVARGGHRGGSKNAQWSPNAHNARGQYITPTTTITTATDNNPAHAQNNAAPSKYADSGQNTQEGTREDVNSSSRPDKDLQGDDTNSSGKEKEEQMQPPTRPAAASQSQPSNKFSFSMKNATKPVVAAPRPEISLKFNAVVPPREPSQKQPPKAPAAAPPTAPSAHRSNRDRHDLPKNVPTEPASARARHNDRRGPDPHRPVDSHRPVDSHRPVDSHRPAEQQKPRTRIVKKIVKKLKEKPALPPDLAKSKSVYHRKPGNESVIGSGTYGKVFKALNVYTKKQVALKRIRMEGERDGFPVTAVREIKLLRSLSHRNIVKLMEVMVEMNECFMVFEYLSHDLTGLINHPNYTLDPAQKKHLALQLFEGLDYLHTRGVLHRDIKAANILVSNEGVLKLADFGLARFYAKHHQLDYTNRVITIWYRSPELLLGETQYGPAVDIWSAACVMMEIFTKRAIFPGDGSEINQLDKIHSVLGTPTRNDWPNIIEMPWFELLRPTQRRANVFAEKYKELVTPAAFELLLWMFKYDPDKRPSAAQVLAHPYFTTEEPAPRQAVELKDIDGEWHEFESKALRKENERKEREARRAVKDGAPAAAAAPSGGGGSSSTREKDRDPRKRPAESREPPPSERDSKRPHLDSHAANKPSTILSSSAPPPPQQQQREPERSSVPTRPREQHQQEQQQEQQQCRPSASSSSHLPPAQAQARARAPTNAPSGPAASQSHN

SEQ ID NO: 26003 - protein, 156 aa, Schizosaccharomyces pombe 972h-
MPPIKTAVLGTGVSAFVFHFPFLEALPSKFEIYACLERRATVTQSKARSAYPNILVYTNLDELLADVNIELVVVSLPPNVHSEIVKKALNAGKHVVCEKPFTPTYEEAKELYELAESKSLLLAIYQNRRWDGDFLTAKKIIESGRLGQVVEFESHF

SEQ ID NO: 26004 - protein, 377 aa, Haloarcula marismortui ATCC 43049
MPTPVIVDAVRTPQGKEDGALAGVRSEDLSVPLINQLLASTGVEAEDVDDLLWGCAQQRGEQGNNMARVIALLSDLGESVPASTINRWCASSAEALMRAADAIAAGQRDVLIAGGVESMSRVQMDENTHNVHPRLAEQYNIGELQMGMTAEKVASEMEVARQEQDEYALRSHQRAADATESGRFDDEIVPIETEDGQLDADGGIRPDTTLEKLSQLPTVFKSDGTVTPGNASQVSDGAAGLMVTSREFAEDRGLDVLAEIGSHEVAGVDPTVMGIGPVPAVRKLTERTDRETDDYDLVELNEAFASQCLYCQRELGFDDDIYNVNGGAIAIGHPLGASGARLPVTLVHEMNRRDAELGLATECVGFGQGAAIEFRLP

SEQ ID NO: 26005 - protein, 692 aa, Cryptococcus neoformans var. neoformans JEC21
MSQMLNQAANMVTGDAKYRQMAEYTIDQDDKTPYTTYFGVKVSDTDNSLRAGARGPTLLEDFHNREKIQHFDHERIPERVVHARGAGAFGEFKLHTPLTGITTAKVLTDTSKVVPAYVRFSTVAGSRGSADTVRDVRGFATRLYTDEGNWDIVGNNIPVFFINAQTAHDNAWDFMSLHKPALHMQQWITSDRAIPRSYRMMQGFGVHTFRLINEEGKSTFVKYHWIPHLGTHSLVWDEALKIAGQDPDFHRRDLWDAIEAGTYAKWDLGVQLIKEEDEHKFDFDLLDATKLIPDELVPVQKIGTLTLNRNPVDYFSEVEQVAFCTQHIVPGMDFTDDPLLAGRNFSYPDTQVSRLGINWKHIPVNRPVCPFMTTMREGQMSMFSKNNRTPYHPNRNENLPLTSPKEGGFKSYPAKVSGIKERVQAPKFNDHSSQATLFWNSMSDVEKKHIIDAYKFELSHCTDNLVIQNVINCINEIDHGLATAVHSGFPHLSLPEAKPNHGKRTEYLSQITGKNQIFTAAGRKIGIFLVPGYVYSQVAPLLAAFKAAGCMVKFVGPTLGPVEASDGQSFTTEFTFEGCRSTYFDALIFAGGPDNAFLSKLKVGRLIHAAREAYMHLKAVGAVGNATQWLVDTCLPGEFSPKVKTESSVVQENGVVFAPINPTLHSAQFAKQFLDGVANHRVWDREVSHIAA

SEQ ID NO: 26006 - protein, 405 aa, Vibrio vulnificus CMCP6
MAGVLGMILAGGEGSRLRPLTESRSKPAVPFGGSYRLIDFALNNFVNADLMRIYVLTQFKSQSLFHHMKKGWNINGITDRFIDPIPAQMRTGKRWYEGTADAIYQNLRFMELSEPEQVCIFGSDHIYKMDIKQMLSFHKEKLAALTVSALRMPLAEASQFGVIEVDAEGRMVGFEEKPSAPKSIPGDPDFALVSMGNYIFEADVLFAELIEDADNENSSHDFGKDIIPKMFPRGDVFVYDFSQNRISGEKAEVYWRDVGTIDAYWQAHMDLLKTDAPFSLYNRKWPLHTYQPPLPPATFTDSDNGRVQIIDSLVCNGSYVRGSRIEKSVLGFRSNIASACDISESILLGDVKVGEGCVLRRVIVDKDVDIAPGTQIGVNLQEDKKIFHVSDDGIVVIPKGARVGY

SEQ ID NO: 26007 - protein, 270 aa, Triticum aestivum
  misc_feature (11)..(11): Xaa can be any naturally occurring amino acid
  misc_feature (200)..(200): Xaa can be any naturally occurring amino acid
  unsure (1)..(270): unsure at all Xaa locations
ALLAMDVGFMXGPNYSISTACATSNYCFYAAANHIRRGEADIIVAGGTEAAIIPIGLGGFVACRALSQRNDDPITASRPWDKERDGFVMGEGAGVLVMESLEHAMKRDAPIIAEYLGGAVNCDAYHMTDPRSDGLGVSSCITMSLRDAGVAPEEVNYINAHATSTLAGDLAEVRAIKQVFKNPSEIKINSTKSMIGHCLXAAGGLEAIATIKSITTGWVHRRGRGFNPEPEVDFDTVANEKKQHEVNVAISNSFGFGGHNSVVVFAPFKP

SEQ ID NO: 26008 - protein, 480 aa, Vibrio vulnificus CMCP6
MSILFVASEVEGLIKSGGLADVAKALPEALVNLQHDARIAIPAYTAIPDVCDDEVILDTHLETWPHTHYQVKKRFLGDNPVYLIACGHYFDRPSMYAENNQAYTDNGERFAFFSAACLDMLPKIGFQPDIVHANDWHTGLVPFLLKHRYGQDPFFAQTKSILSIHNAVFKGVFHYDEMQCLPEFHCRNVPDAAVSSTHMTMLKAGVMNADKINAVSPTYAEELKTELGSHGMAWEFQQRAGDLVGILNGCDYSAWHPDTDSYLPINYKATKQSMVRGKNGCKRALQEQVGLPIKDVAMFGMVCRLTHQKGVHYLLPVLTEFLKLDVQLVLVGTGDPLLAAQLRDVAAQFGEKFVFVEAYNNQLAHLVEAASDFFLMPSEFEPCGLNQIYSMAYGSLPIVRGVGGLKDSVCDYDVNPETATGFVFYEPTAQALLITMQRALLLYAQNLTELRRVQLYAMERDFCWNKAAEQYVELYRSALK

SEQ ID NO: 26009 - protein, 204 aa, Dunnia sinensis
MARGNASVPAMEMTKWFDTNYHFIVPELGPDVKFTYASHKAVNEYKEAKALGVDTVPVLVGPFTFLSLSKPAKGVEKTFPKLSLLDKIPPVYKEVIADLKAAGASAIQFDEPVLVMDLESHQLEAFANAYSELESSLAGLHVINETYFADVPQEAYKTLTSLNAVSGFGFDLVRGAKTLDLIKGGFPAGKFLYAGVVDGRNIWA

SEQ ID NO: 26010 - protein, 714 aa, Cryptococcus neoformans var. neoformans JEC21
MAQMLNQAVTAVTGDAKYRQMAENTIEQTSKTPLTTYFGVKVPETDVALRAGARGPTLLEDFHNREKIQHFDHERIPERVVHARGSAAHGEFKLHTPLTGITTAKVLTDTSKVVPAYVRFSTVVGSRGSADTVRDVRGFATRFYTDEGNWDLVGNNIPVFFIQDAIKFPDVIHALKPEPHNEMPQAQTAHDNAWDFISLHQQATHMQQWVTSDRAIPRSYRMMQGFGVHTFRLINEEGKSTFVKYHWIPHLGIHSLVWDEALKIAGQDPDFHRRDLWDAIEAKAYPKWELGVQLIKEEDEHKFDFDILDSTKIIPEELVPVQKIGTLTLTRNPVDFFAEVEQVAFCTQHIVPGMDFTDDPLLAGRNFSYADTQISRLGTNWHDLPINRPICPVMTNFRDGQMSMFSKTNRTPYHPNRHDSLPLTSSNNGGFQSYREKISGVKERLNGPKFQEFYSQATLFWNSMSETEREHIIAAYNFELSHCAEDIVIQNVINSLNEIDHGLATSVHATFPHLTLPEAKPTHNKKSEYLSQINGKHQVFTASGRRIGIYLVPGYTYSQVVPLLAAFEADGCMVKFIGPTLGPIKASNGQSFTAEFTFEGCRTTFFDAIVFVGGPDDSFIAKLKIGRLIHAAREAYMHLKPIGVLGNATQWMVNTCLPGDFSEKTKTESSVVVENGVVFAPGDPTLHSIKFAKQFLEGVAHHRVWDRQVAHIAA

SEQ ID NO: 26011 - protein, 204 aa, Dunnia sinensis
MARGNASVPAMEMTKWFDTNYHFIVPELGPDVKFTYASHKAVNEYKEAKALGVDTVPVLVGPFTFLSLSKPAKGVEKTFPKLSLLDKIPPVYKEVIADLKAAGASAIQFDEPVLVMDLESHQLEAFANAYSELESSLAGLHVIIETYFADVPQEAYKTLTSLNAVSGFGFDLVRGAKTLDLIKGGFPAGKFLYAGVVDGRNIWA

SEQ ID NO: 26012 - protein, 338 aa, Neurospora crassa
MSSSPTFKDKDEDLEAQVPLNPQPSNPTVRTEQEVSGTTKLLYLAVYFLCNISLTIYNKLILGKFSYPWLLTALHAGSASIGCYILLLQGRFTLTKLSLQQNIVLFLFSILFTVNIATSNVSLAMVSIPFHQIMRSTCPFFAVLIYRFRYGRSYPRDTYLSLIPLILGVGLATYGDYYFTAAGFLLTFLGVILAVVKTVATNRIMTGALALSPLETLLRMSPLACAQALVCAIASGELAGFKEQNPEGPSGALILTLAGNGLLAFCLNYSSFSTNKVAGAVTMTVCGNIKQCLTILLGIVLFGVKVGFLNGLGMVIALAGAAWYSVVELRSKTQKGGR

SEQ ID NO: 26013 - protein, 383 aa, Yarrowia lipolytica CLIB122
MSSISNRIEQISSSKPGAKDYINYLHSLSAAADLISYAKAIIQIPDGAIVARPVLAEFVSYTKGLADAREEVLIATLDVLKEKTIIFEEQEFLAREALAEVYEQKNEFTKAARVLQGMRLDSGQQHITDDQKVAVYVRIVRMLLEDEDDAGAETYLNKCALLIHKCNDPAQKVHFKLSQARIFDTRRKFLDATRKYYEMSLEEAVDADDRLQCLLAASKTAILSPAGPLRQRVLTALYKDERSVQLPTFKVLEQLYENRILDQEDVKQFAEMLEPHQLALMGDGVTVLHRAVLEHNLLAISRVFSCISFPRVAALLGMELTQAEDTIANMIIQGRLSGRIDQVSGFVYFDSEKSNLNVRQKALVRLDEVAERIAATSRDVRIY

SEQ ID NO: 26014 - protein, 492 aa, Neurospora crassa
MALGDTVLLTGATGHLGWAILRFLLGEGYHVRCAVRKAEDEHTIRARPAVRRLNPGSRLSFIVVPDITTPGAFVAAAEDAAYIIHTASPLPSKSAHWITTDDARETFIKPAAAGTLNILDAAEQSGTVRRVVFTSSIAAIVPISQMEGKEQRTRPVLPEDRIPVDQGPYQSEFAAYAASKCRALQVAEEYMKNERPPFDAVYIHPGFVLGANTAATTEKQAMRGTNSMLAALLLGHSQGVYAGLSVHVEDVARVHVKALSPKILGDQSFILGEQVRWTDAIDIAEEEFPELFASRLLTTSGYYQTVSIPIDISLTTDTFGTGFISFTDQVKSVVEHWAKVRQPRGVPFSSTATGPQTESLGWESGKIARVKSPMVYRPSPSGGHEPSIPDVHLSLPNGIAGLEEHDYGAAVLPPATEEETWESIIQRHMIPSEAFSSSGESGGSNWSTASNHTEGITSGSSGDEEGPTNSDDSDAGDDSRVQKRNSLPSIRP

SEQ ID NO: 26015 - protein, 204 aa, Dunnia sinensis
MARGNASVPAMEMTKWFDTNYHFIVPELGPDVKFTYASHKAVNEYKEAKALGVDTVPVLVGPFTFLSLSKHAKGVEKTFPKLSLLDKILPVYKEVIADLKAAGASAIQFDEPVLVMDLESHQLEAFANAYSELESSLAGLHVIIETYFADVPQEAYKTLTSLNAVSGFGFDLVRGAKTLDLIKGGFPAGKFLYAGVVDGRNIWA

SEQ ID NO: 26016 - protein, 287 aa, Nicotiana attenuata
EDSAVADGGGGGGGGDEVSGRRSSNIQSANIGEDHARSTRVASADLMVNSPPQSPHRSTSPLLFGPQVPVVPLQAGDGHPATDQMWGDESQDASDHSPESGIPILITWSYGGNNVAVQGSWDNWRSRKILQRSGKDHTILLVLPMGIYHYKFVVDGEVRYIPDLPCVADETGVVFNLLDVNDNVPENLESVAEFEAPPSPDSSYGQGLLGDEDFAKDPVAVPPQLHLTVLGSENSEETPSSPKPQHVVLNHLFIEKGWASQSVVALGLTHRFQSKYVTVVLYKPLKR

SEQ ID NO: 26017 - protein, 294 aa, Yarrowia lipolytica CLIB122
MNTSSQFQQLEKLGEGTYATVYKGRNRTTGQLVALKEINLDSEEGTPSTAIREISLMKELKHENIVTLYDVIHTENKLNLVFEYMDKDLKKFMDTNGNKGALETKQVKWFMYQLLRGILFCHDNRVLHRDLKPQNLLINAKGQLKLADFGLARAFGIPVNTFSNEVVTLWYRAPDVLLGSRTYSTSIDIWSAGCIMAEMFTGRPLFPGSSNDDQLQHIFKLMGTPNESTWPNISSLPNYRSNFQVYAPQDLRVIIPQIDNVALDLLLSLLQLKPENRITARQSLEHPWFAEYHQ

SEQ ID NO: 26018 - protein, 476 aa, Bacillus thuringiensis serovar konkukian str. 97-27
MQNKIIVMFQKDFRLYDNPALFEAAQSGEVVPVYVHDETFSMGSASKWWLHHAIIDVKKQLEALGSTLIIRKGSTQEEILSLVEQLGITAVYWNICYDPDRLQFNQKMKMMLEHKGMICKEFNSHLLLEPWVIKKKDNTEYKVFTPFYNAFQKQVIHKPISKVQSIKGGNSLPVSLSVSELHLLPTIPWTSHMESIWEPTEEGAYKTWKEFFSSKLASYSEGRDFPNQNAHSMLAPYLSFGQISVKLIYHYLINKSTESQCSLFEKQVNSFIRQLIWREFSYYLLYHYPFTAYKPLNKSFEHFPWNNEEELLRVWQKGDTGYPFIDAGMRELWQTGFMHNRTRMAVASFLVKHLLIPWQEGAKWFMDTLLDADIANNTMGWQWVAGSGADASPYFRIFNPITQGEKFDKNGEYIREWVPELKDMPNKYIHKPWEAPEHILQKANIQLGHTYPLPVVDHKAARERALCAYKSMKEFV

SEQ ID NO: 26019 - protein, 197 aa, Hordeum vulgare subsp. vulgare
MSASRFIKCVTVGDGAVGKTCMLISYTSNTFPTDYVPTVFDNFSANVVVDGNTVNLGLWDTAGQEDYNRLRPLSYRGADVFLLAFSLISKASYENVSKKWIPELKHYAPGVPIILVGTKLDLRDDKQFFVDHPGAVPITTAQGEELKKLIGAPYYIECSSKTQLNVKGVFDAAIKVVLQPPKAKKKKKAQRGACSIL

SEQ ID NO: 26020 - protein, 384 aa, Thermus thermophilus HB8
MGEPVILEAVRTPIGKRNGALRAYRPDALYAKVLDALLERTGIDPGLIGDVVTGCVTQVGEQGANVGRLGVLLSRLPKEVPAVSLNRMCGSSQQAVHFAAQAIAAGDVDFAIAGGVESMTRVPMFADIGGGFHTLNPELGKRYELVHQGESAERIAERYGFCREELDEWGYLSHKRAARATEEGRFSAQILPLEGLDAEGRPFLLTRDEGVRPDVDYEKMLALKPVFREDGVVTAGNSSQISDGAAALLLGDREKALALGLRPRARFLARVVVAGDPTLQLLEVIPAAKKALERAGLSLRDVDVIEVNEAFASVVLAFLRELGADPEKVNPNGGAIAHGHPLGATGAVLMTKLLYELERTGSEFGLQVMCIGHGQATATVIQRL

SEQ ID NO: 26021 - protein, 256 aa, Saussurea medusa
MVRAPCFDKHGIKRGAWSQEEDNKLRAHIQRSGHSNWRQLPKLAGLSRCGKSCRLRWVNYLRPTIKHGNFTKDEKDVVVALHNKLGNKWSAIAARLPGRSDNEIKNYWHTHLKNRAQTDQTVLQTKQDGNAETSKGKGTPKAGCVVRKPNVKSQQEVEILLAVLSSASSSSFSSSTTSDQNESSPPSLSVSDANVTPQCSEEAARSLCIDQFLVEEDSIMLSSDKMYSPLGSVDYFISQDNVMDDVLLWPNLDFYY

SEQ ID NO: 26022 - protein, 361 aa, Glycine max
MTGCCFPVTFHRSGSRRVSFRLVRSSSSGSSKHRGRESHKGPLVVCFGEMMINLVPTVARVSLADATAYKKFPSGATANVAVGICRLGGSAAFIGKVGNDEFGHLLSDILKQNGVDNSGLLFDDHARTALGFYALKSNGEPEFMFYRNPSSDVLLRPDEIDMDLIKKATIFHYGSVSLIKEPCRSAHLAAMNAAKVSGCFLSYAPNLALPLWPSKEAARQGIMSVWNYADIIKVSVDEIRLLTEGDDPYDDTVIMKKLHHYNLKLLIVTEGARGCRYYTKDFKGWVAGFEVEAIDTTGAADSFVGGLLSIVAAHNHIYKDEKRLREALDFANACAAFTVTGRGAIPSLPTKDAVLRIMFSY

SEQ ID NO: 26023 - protein, 430 aa, Zea mays
MTGTVSKLAAPRPAAPPLRPASLRAAAIAFAPSPRRVRVSVAGRARIPSVIAMASAKEGNGAPTKKTSLHDLYELQGLSPWYDNLCRPVTDLLPLIASGVRGVTSNPAIFQKAISSSSAYDDQFKQLISGGKDAESAYWELVIKDIQDACSLFEPIYDETDGADGYVSVEVSPRLANDTQGTVEAAKWLHKVVNRPNVYIKIPATAECVPSIREVIAFKISVNVTLIFSILRYEAVIDAYLDGLEASGLSDLSRVTSVASFFVSRVDTLIDKMLEKIGTPEALALRGKAAVAQAKLANRLYQKKFYVPRWEALAKKGAKKQRLLWASTGVKNPAYPDTLYIDSLIGPDTVNTMPDQALHAFIDHGTVSRTVDANVSEAEGVYSPLEKLGIDWGEVGKQLELEGVDSFKKSFDSLLVSLQEKGNTLKTATV

SEQ ID NO: 26024 - protein, 472 aa, ASPERGILLUS NIDULANS FGSC A4
MPPVETKQYDYIVLGGGSGGSGSGRRAAGWYGAKTLIVESGRAGGTCVNVGCVPKKMTWNFASITESIEAGRHYGYDLPHNIDVNYTHFKKLRDSTIERLNGVYEKNWGNEGIDLVHGRARFVEKKTIEVTNQDGSRTRYTAPHILIATGGRPSLPDIKGSEHGISSDGFFEIEELPPKLAVVGAGYIAVELAGVMGTVGVDTHMFIRGETFLRKFDPMIQKTMTERYEAVGIHVHKKHPGIKEVQLLRDGKGKDKLLKLIMNDGSEMEVNELLWAIGRVPEVEDLHLEIPGVELNKSGHVVVDEYQNTNVEGIYAIGDVTGQAELTPVAIAAGRQLGNRLFGGPQFKNAKLSYDNIPTVVFSHPEVGTVGLTEPQARERFGDENVKVYHTRFPAMFYSVFPPEEKAKNPTEFKMVVAGPEEKVVGLHLLGLGVGEMTQGFGVAVKMGATKKDFDSCVAIHPTSAEELVTLR

SEQ ID NO: 26025 - protein, 574 aa, Magnaporthe grisea 70-15
MLVRYDAVLLFLLLSVSSAAGIRSNRTYLLHFQISPRAIVSDACASYSTLERLNSNLKPAIDDVTRSTDFFSHYRLNLFNKKCPFWNDEGGMCGNIACAVETLDNEEDIPEVWRASELGKLEGPLVEHPNKKAQREQPEKPLRGKLGEDVGESCVVEYDDECDERDYCVPEDESASAKGDYVSLLRNPERFTGYAGAGAAQVWDAIYRENCFSRSSFPNAPKPPPSALGGGLSSNSKNPAAMDFRSVLEAAGRQQVLQERRAEEPNTPFVAKTGLESEDECLEKRVFYRVISGMHASISTHLCWDFLNQTTGQWQPNLACYENRLHRFPERISNLYFNYALVTRAIAKLGPHLSGYTFCTGDRDQDAATRSKVLAVTQGAASVPQTLDESLMFKNGEGPSLKEDFRNRFRNVSRLMDCVGCDKCRLWGKLQTAGYGTALKVLFEFDNVKNGGEIPLVLKRTELVALFNTYARLSSSLTALGKFRQMIEEREGSKSVQDREQKPDESESASAQSIPDRARKPHRVMDDGDNETEEDIPRYKEPENLSEEFYQELDKVYRVFRYVIKQWLSFPTTM

SEQ ID NO: 26026 - protein, 604 aa, Novosphingobium aromaticivorans DSM 12444
MTSTQPAYKIIDHTYDTVVVGAGGSGLRATMGSAQAGLRTACITKVFPTRSHTVAAQGGIAASLGNNSPDHWTWHMYDTVKGSDWLGDQDAIEYMVREAPAAVYELEHAGVPFSRNPEGTIYQRPFGGHMQNMGEGPPVQRTCAAADRTGHAMLHALYQQSLKYDADFFIEYFAIDLIMENGECRGVIALCMDDGSIHRFRSHAVVLATGGYGRSYFTATSAHTCTGDGGGMVLRAGLPLQDMEFVQFHPTGIYGAGVLITEGARGEGGYLTNSEGERFMERYAPSAKDLASRDVVSRSMAMEIREGRGVGPHKDHIYLHLDHIDQKVLAERLPGITESGKIFAGVDLTRQPLPVVPTVHYNMGGIPTNYHGEVVTIGADGNPETIVPGLFAVGEAACVSVHGANRLGSNSLIDLVVFGRATGLRLKELIKPGTAHNSLPKDSADLALTRLDHFRHAKGGSPTAEVRIEMQRTMSAHAAVFRTDELMAEGKVKLADTYKRMEDIHVSDRSLIWNSDLVETLELDNLISQATVTMHSAHNRKESRGAHAHEDFPDRNDAEWMKHTATWFNGWGGKGGEVRIDYRPVHEYTLTDDVEYIKPKKRVY

SEQ ID NO: 26027 - protein, 404 aa, ASPERGILLUS NIDULANS FGSC A4
MYLRYAAALASVLPLAVAQTFTDCNPLEETCDPDPGLNSKTFSSDFTQGESALDGWVKASGDVTFGPDGAEFTVAKKGDAPTIDTDFYFFFGKAEVVMKAAPGVGIVSSIVIESDVLDEVDWEVLGGDTTQVQTNYFGKGDTSSYDRGTFEAVATPQEIFHTYTVTWSPDAISWIIDGNTVRTLNYADAKGGSRFPQTPARLRLGIWAGGDPDNAPGTIEWAGGQTDYSAGPFTMYIKSVHIENTYPGSEYTYSDNSGDWQSIKVDDSTPPQETTKTSSTTTSTAEPTSSTSSDSETTTTTTSATDSETETETSTPTSSSETTSSSSESEPASPTATETGSGSGSGSSSESDSASSTPSDSGSATPTSNETSEDPEFTGAASSLTRSAGGLFTVLGMMAAMLQL

SEQ ID NO: 26028 - protein, 378 aa, Pirellula sp. 1
MPSRSHPRESHLSIRNPRSELMSESLQSLIDSGTKLYLDSVEPSEIDQNLKWGAVGATSNPAIISGIVKAGGFDDRIDALLSEGHDDEAIAWALTDELVSDAEKKFASIHESTGGNAGWVSFELDPILEDPDQNLSASDIASRYIELGKQWNAGHTNRMIKVPATEAGLLALEELAAAGITLNVTLMFTADQYHAAREAIWKGAQRAAESGVRSLDQFKSVYSIFISRIDVYTQKELPNLSADAQGQVGILNAKRIWKENQEFWADKNLKLEQELIFASTGTKSKDDPPWKYVAALAGSDIQTNPPATNEAVDASGKKFTSEVADMPSQAVQDEIDAALDIKAMHKFLMDEGVDKFVKPQRELLAIISAKREELTKQA

SEQ ID NO: 26029 - protein, 330 aa, Sinorhizobium meliloti
MAKYDVLTIGNAIVDIIARCDDSFLEENGIIKGAMNLINADRAELLYSRMGPAVEASGGSAGNTAAGVASLGGRAAYFGKVADDQLGEIFTHDIRAQGVHFQTKPLDGHPPTARSMIFVTEDGERSMNTYLGACVELGPEDVEDDVVAQSKVTYFEGYLWDPPRAKDAIREAARIAHAHGRETAMTLSDSFCVHRYRSEFLELMRSGTVDIVFANRQEALALYETEDFDRALELLARDCKLAAVTLSEEGSVVVRGAERVRVGASVLEQVVDTTGAGDLYAAGFLFGYTSGRSLEECSKLGNLAAGIVIGQIGPRPLVSLATAARQAALV

SEQ ID NO: 26030 - protein, 627 aa, Arabidopsis thaliana
MKSYKLNNPNLLISTHTHNKLFLSSSPFNLLFSFPSFIYLKQQRSLFFFFFFFLCFSFTTSMLDSDTDTDSGPVVATTKLVTFLQRVQHTALRSYPKKQTPDPKSYIDLSLKRPYSLSTIESAFDDLTSESHDQPVPVETLEKFVKEYFDGAGEDLLHHEPVDFVSDPSGFLSNVENEEVREWAREVHGLWRNLSCRVSDSVRESADRHTLLPLPEPVIIPGSRFREVYYWDSYWVIKGLMTSQMFTTAKGLVTNLMSLVETYGYALNGARAYYTNRSQPPLLSSMVYEIYNVTKDEELVRKAIPLLLKEYEFWNSGKHKVVIRDANGYDHVLSRYYAMWNKPRPESSVFDEESASGFSTMLEKQRFHRDIATAAESGCDFSTRWMRDPPNFTTMATTSVVPVDLNVFLLKMELDIAFMMKVSGDQNGSDRFVKASKAREKAFQTVFWNEKAGQWLDYWLSSSGEESETWKAENQNTNVFASNFAPIWINSINSDDENLVKKVVTALKNSGLIAPAGILTSLANSGQQWDSPNGWAPQQEMIVTGLGRSSVKEAKEMAEDIARRWIKSNYLVYKKSGTIHEKLKVTELGEYGGGGEYMPQTGFGWSNGVILAFLEEYGWPSHLSIEA

SEQ ID NO: 26031 - protein, 254 aa, Fusobacterium nucleatum subsp. nucleatum ATCC 25586
MIYFLYKRRFYMSNMSLYIGEFVGTTLLLLLGNGVNMTCSLKHSYGKGGGWIVTTFGWGFAVMIPAYVTGWVSGAHMNPALTIALAVTGKFSWDLVFGYIIAQMLGGIFGATLAYLTYKAQMDAEPEPAVKLGVFSTGPSIDAPIWNIVTEIIGTALLLIGVLAIGYGEVGIQPGNGAFFVGLLIVIIGMATGGATGYAINPARDLGPRIAHAILPIKGKGDSNWKYSWIPVVGPIIGGILGAVIFDAFLSAVL

SEQ ID NO: 26032 - protein, 188 aa, Arabidopsis thaliana
MRKRERENPCSICGHYHKYEEGEVCGVCGHCMPVSSDTVAPQQVHVSAFPSEILPEFLYLGSYDNASRSELLKTQGISRVLNTVPMCQNLYRNSFTYHGLDNEKVLQFDDAIKFLDQCEKDKARVLVHCMSGKSRSPAVVVAYLMKRKGWRLAESHQWVKQRRPSTDISPGNFTNNCRSLSRGYSDLR

SEQ ID NO: 26033 - protein, 272 aa, Glycine max
MAEAGSSINRGARWSLNGTTALVTGGTRGIGHAIVSDLAAFGAAVHTCSRTQTELNKCLQEWQSLGFQVTGSVCDVSSPSQREKLIEEVTSILNGKLNIYVNNVGTNFRKPTIEYTAEEYSQLMTVNLDSSFHLCQLAYPLLKASENGSIVFISSIAGVVSLGTGSVYAACKAATNQLTKYLACEWAKDNIRSNCVVPATTNTPLVEHLLRNKKYVEEMLSRTPLGRIAEPEEVSALVAYLCLPAASYITGQVVLVDGGLSVNGFQTSMRIT

SEQ ID NO: 26034 - protein, 359 aa, Escherichia coli CFT073
MSNSHHTSMRGNDMSDNIRVGLIGYGYASKTFHAPLIAGTPGLELAVISSSDETKVKADWPTVTVVSEPKHLFNDPNIDLIVIPTPNDTHFPLAKAALEAGKHVVVDKPFTVTLSQARELDALAKSLGRVLSVFHNRRWDSDFLTLKGLLAEGVLGEIAYVESHFDRFRPQVRDRWREQGGPGSGIWYDLAPHLLDQAITLFGLPVSMTVDLAQLRPGAQSTDYFHAILSYPQRRVILHGTMLAAAESARYIVHGSRGSYVKYGLDPQEERLKNGERLPQEDWGYDMRDGVLTRVEGEERVEETLLTVPGNYPAYYAAIRDALNGDGENPVPASQAIQVMELIELGIESAKHRATLCLA

SEQ ID NO: 26035 - protein, 338 aa, Bacillus cereus ATCC 14579
MKMAKVYYEKDVTVNVLKEKKVAIIGYGSQGHAHAQNLRDNGFDVVVGLRKGKSWDKANEDGFSVYTVAEAAEKADVVMILLPDELQPEVYEAEIAPNLQAGNSLVFAHGFNVHFDQVKPPANVDVFLVAPKGPGHLVRRTFAEGGAVPALFAVYQDATGVATEKALSYADGIGATRAGVLETTFKEETETDLFGEQAVLCGGVTALVKAGFETLVDAGYQPELAYFECLHELKLIVDLMYEGGLENMRYSVSDTAQWGDFVSGPRVVTEDTKKAMGAVLAEIQDGTFARGWIAEHKAGRPNFHATNEKENKHEIEVVGRKLREMMPFVQPRVKVGVK

SEQ ID NO: 26036 - protein, 198 aa, Synechococcus elongatus PCC 6301
MKRLLVLGLLIASFWFPNTAAWAATAEAIFAGGCFWCVEADFDKVTGVTETISGYSGGTVKKPTYKQVSAGKTGHYESVKIIYDPDQVSYDQLVSYFLQHIDPLDGGGQFCDRGDQYRSAIFVTPEQQPIAEAAIAAAAQELGQPIQTKIQPAKEFWEAENYHQNYYQKQALLYKYYRARCGRDAQIAKVWGEYEQQS

SEQ ID NO: 26037 - protein, 284 aa, Oryza sativa
MAGGDNNSQTTNGGSGHEQRAMEEGRKQEEFAADGQGCGLAFSVPFIQKIIAEIFGTYFLIFAGCGAVTINQSKNGQITFPGVAIVWGLAVMVMVYAVGHISGAHFNPAVTLAFATCRRFPWRQVPAYAAAQMLGATLAAGTLRLMFGGRHEHFPGTLPAGSDVQSLVLEFIITFYLMFVISGVATDNRAIGELAGLAVGATILLNVLIAGPISGASMNPARSLGPAMIGGEYRSIWVYIVGPVAGAVAGAWAYNIIRFTNKPLREITKSGSFLKSMNRMNSST

SEQ ID NO: 26038 - protein, 213 aa, Bacillus cereus G9241
MEDAVNEYLLSFIDPKDKLILEMEDYAKENHVPIMDRLGMEFMLQFLRLIGPKSILELGTAIGYSSIRMMQAIPNSRIVTVERNRERYEKALEYIERSPVKERISVIYGDALETGEQVEEHGTFDVIFIDAAKGQYRRFFDLYEPLLNPGGVIISDNVMYHGLVTTKEKIENRRTRGLIRRIKTYNEWLMNHEGYDTTIFPIGDGVAVSKKRG

SEQ ID NO: 26039 - protein, 481 aa, Pseudomonas aeruginosa PAO1
MNGLPMNLIWFRCDLRTTDNSALLAAADGRPCLALYLLSPAQWREHDDAPCKVDFWLRNLGELQRQLAALNIPLLVRDCGHWRQAPEVIGRLCRELGVGAVHVNQEYGVNEERRDQAVGQRLREQGVAFHSHLDQLFFAPGSVLTRTGGYFQVFSQFRKVCHERLYQALPGVRPRPQPQPPHALASDPLPDAVPAFPRPADSLRRLWPAGEEVAQERLRDFADQHLADYHERRDFPALPGTSQLSPYLAAGVLSPRQCLDAALVANRGEFSGGQQGAATWINELLWREFYKHILVGYPRVSRHRPFREETEALRWRQAPAELEAWQQGRTGIPIIDAAMRQLLATGWMHNRLRMVVAMFLSKNLLIDWREGERWFMRHLIDGDLAANNGGWQWSASTGTDAVPYFRLFNPLSQSERFDPRGEFIRHWLPELAGLERKAIHDPSSLGLFAGVDYPRPMVDLKASRERALAAFRNLPPRDGRA

SEQ ID NO: 26040 - protein, 408 aa, Malus x domestica
ALGEDSPYFAGWKAYDENPYHESSNPSGVIQMGLAENQVSFDLLEKHLEENSEASNWGSKGTKGVSGFRENALFQDYHGLLSFRKAMANFMEQIRGGRAKFDPVRVVLTAGATAANELLTFIIADPGDALLVPTPYYPGFDRDLRGRTGVNIVPIHCESSNNFQITPQALEAAYKEAEAKNMRVRGVLITNPSNPLGATIQRAVLEEILDFVTQKNIHLVSDEIYSGSAFSSSEFISVAEILEDRQYKDAERVHIVYSLSKDLGLPGFRVGTVYSYNDKVVTTARRMSSFTLISSQTQHLLASMLSDKEFTGNYIKTNRERLRTRYDMIVQGLKKSGIECLKGNAGLFCWMNLSPFLDEPTRECELTLWDSMLHEVKLNISPGSSCHCSEPGWFRVCFANMSEQTLEG

SEQ ID NO: 26041 - protein, 149 aa, Arabidopsis thaliana
MADQLTDDQISEFKEAFSLFDKDGDGCITTKELGTVMRSLGQNPTEAELQDMINEVDADGNGTIDFPEFLNLMARKMKDTDSEEELKEAFRVFDKDQNGFISAAELRHVMTNLGEKLTDEEVDEMIREADVDGDGQINYEEFVKVMMAK

SEQ ID NO: 26042 - protein, 390 aa, Treponema denticola ATCC 35405
MDILKKVKEIEKDIISWRRHLHQNPEVGFELPNTIDFVCKKLDEFGIKYDRNAAKSAVIGYIHGAEKGDVIALRADMDALPVCEATGLDFASKNSFMHACGHDAHTSILLGAAKVLNDLKGSFKGTVKLIFQPAEELGTGSVDICEKGILDDVKEIIGLHVGCISDEAKPGEFLFSKGSMMACMDKFSIKVKGVGAHGAYPSLSVDPVVIGSHIVVAIQEILGREVHPTEPAVITVGQFHSGSAFNIIPPEAYLEGTVRAVTNETRELIAKRIEEVASNIAKAFRGSIEYQFFRQPPPLINDAKVTDKAMGAAKELFPNDVKLMQRPVMGGEDFAWYLEKVPGSFIFLSTPSPIEGKVWPHHNPKFALDESQFYKGTALFVAYVMQELGK

SEQ ID NO: 26043 - protein, 331 aa, Yarrowia lipolytica CLIB122
MTQKVLFLDEIHDATKDYAALAQKCDIQHVGTTSREQFLKECKEGKYDGFVAIYRTFTTLGKVGRFDKELCDALPASIKAVCHYGAGYDQVDVAPFTERGIQVSNVQGAADAATALTNVYLMLGCLRNFGHAAISLRQGNWIGDVPLGHDPDGKVLGIMGMGGIGRQVRDYVKPFGFEKIIYYNRSRLSPELEGGCHYVTLDELYAQADVISVNVPLNAATRHMINSESISKMKDGVIIVNTARGPVIDEQALVDGLNSGKISSAGLDVYEHEPKINPGLLKNPQALLLPHFGTFTIETHRKMEEAVLNNIETFLKTGKVATIVPEQNGKF

SEQ ID NO: 26044 - protein, 301 aa, Spinacia oleracea
  misc_feature (109)..(109): Xaa can be any naturally occurring amino acid
  unsure (1)..(301): unsure at all Xaa locations
DYNQTHFVRNKEFKEAADKLQGPLRQIFVEFLERSCTAEFSGFLLYKELGKRLKKTNPVVAEIFSLMSRDEARHAGFLNKGLSDFNLALDLGFLTKARKYTFFKPKFIXYATYLSEKIGYWRYITIYRHLKQNPEFQCYPIFKYFENWCQDENRHGDFFSALMKAQPQFLNDWQAKLWSRFFCLSVYVTMYLNDCQRTDFYEGIGLNTKEFDMHVIIETNRTTARIFPAVLDVENPEFKRKLDRMVVIYEKLMAVGKTDDPSFVKNLKKVPLIAGLVSEILAAYLMPPAESGSVDFAEFEP

SEQ ID NO: 26045 - protein, 285 aa, Yarrowia lipolytica CLIB122
MPKLSQDDILPLPSDVGALANRINKATRGSHSKINNLINLKIVFALRDARIYRQGIQAFYHVFKTYEEVWQEEMQRTDESGEYTRIAKILQQTWNPAITRTGPLTTDLLFYYGSEEKFRDPVMPEQRAFVEHIREVCHAQPHLLLAYGHVMYLALFAGGRILRSNVARAVGLFPKVPGQSQEEVAAKGTNLFRFEVDDEEALRLEYKRNYELATRNDLTEEEKQDIIAESLDIFKRNTDCVSEISAKNTKALAGKFGYKAAQASYKVVLVMLALFVFYSVYSRLF

SEQ ID NO: 26046 - protein, 333 aa, Salix babylonica
TDFEEMEQLFNTEINKNPNEEEFIALLQEFKTDYNQTHFVRNKEFKEAADRLQGPLRQIFVEFLERSCTAEFSGFLLYKELGRRPKKTNPVVAEIFSLMSRDEARHAGFLNKGLSDFNLALDLGFLTKARKYTFFKPKFIFYATYLSEKIGYWRYITIYRHLKQNPEFQCYPIFKYFENWCQDENRHGDFFSALMKAQPQFLNDWQAKLWSRFFCLSVYVTMYLNDCQRTDFYEGIGLNTKEFDMHVIIETNRTTARIFPAVLDVENPEFKRKLDRMVVIYEKLMAVGKTDDPSFVKNLKKVPLIAGLVSEILAAYLMPPVESGSVDFAEFEP

SEQ ID NO: 26047 - protein, 506 aa, Streptomyces coelicolor A3(2)
MTDTPPATTTDSGAPAESDEHSLTAGPAGPVLLQDAYLIEQMAQFNRERIPERQPHAKGSGAFGHFEVTHDVSAYTKAAVFQPGTRTDLVARFSTVAGERGSPDTWRDPRGFAVKFYTSQGNYDMVGNNTPVFFVKDPMKFQHFIRSQKRRADSNLRDHDMQWDFWTLSPESAHQVTWLMGDRGIPRTWRHMNGYTSHTYMWINASGERFWVKYHFKTDQGIEYFTQHEADQMAAADTDYHMRDLFEHIRDGDFPSWTLHVQVMPYEEAAGYRFNPFDLTKVWPHGDYPLIPVGRMTLERNPTDNHAEIEQAAFQPNNLVPGIGPSPDRMLLARLFSYADAHRYRIGANYQQLPVNAPVVDVRTYSKDGAMAYRKTTDPVYAPNSKGGPAADTEHFGTPPSWETDGSITRTAYVSHAEDDDWGQPGTLVREVMDDAARDRLVDNVVDHLLNEVTEPVLQRAFAYWSNIDRTIGDRIAKGVRAKAGEKDFKAAEQRNPARQAMQDKA

SEQ ID NO: 26048 - protein, 179 aa, Triticum aestivum
IEIKRIENTTNRQVTFCKRRNGLLKKAYELSVLCDAEVALIVFSGRGRLYEYSNNSVKATIERYKKATSDTSSAGTVAEINAQHYQQESAKLKQQITTLQNSNRTLIGDTMATMSHRDLKQLEGRLDKGLGKIRARKNELLCAEIEYMQRREMELQNNNFFLREKVAETERGQQQTLNI

SEQ ID NO: 26049 - protein, 333 aa, Rosa davurica
TDFEEMEQLFNTEINKNLNEEEFIALLQEFKTDYNQTHFVRNKEFKEAADKLQGPLRQIFVEFLERSCTAEFSGFLLYKELGRRLKKTNPVVAEIFSLMSRDEARHAGFLNKGLSDFNLALDLGFLTKARKYTFFKPKFIFYATYLSEKIGYWRYITIYRHLKQNPEFQCYPIFKYFENWCQDENRHGDFFSALMKAQPQFLNDWQAKLWSRFFCLSVYVTMYLNDCQRTDFYEGIGLNTKEFDMHVIIETNRTTARIFPAVLDVENPEFKRKLDRMVVIYEKLMAVGKTDDPSFVKNLKKVPLIAGLVSEILAAYLMPPVESGSVDFAEFEP

SEQ ID NO: 26050 - protein, 312 aa, Zea mays
  misc_feature (157)..(157): Xaa can be any naturally occurring amino acid
  unsure (1)..(312): unsure at all Xaa locations
MAASAGTVYEADAEAVVRRITPALDRARHKGQAGKIAVIGGCREYTGAPYFAAISALKVGADLSHVFCTKDAATVIKSYSPELIVHPILEESYSVRVDERASVSSKILTEVAKWMERFDCIVVGPGLGRDPFLLECVSNIMRHARQANIPTVVDGEXPLAILTPNVYEYKRLVQKVLNCDVDEESASEQLIALCQKIGDVTIMQKGKADVISDGKTVTQVSTFGSPRRCGGQGDILSGSVAVFASWARHFVLTNEEPTEKRVNPMTLGCIAASLLLRKAASHAFEKNKRSTVTSDIIEFLGKSLEDICPAEH

SEQ ID NO: 26051 - protein, 709 aa, Glycine max
MAGLIDLNNATEDDEMPSSGSSSTVCLELWHACAGPLISLPKKGSVVVYFPQGHLEQHLHDFPLPASANIPSHVFCRVLDVKLHAEEGSDEVHCQVVLVPETEQVHQKLREGEFDADGEEEDAEAVMKSTTPHMFCKTLTASDTSTHGGFSVPRRAAEDCFPPLDYSQQRPSQELVAKDLHGQEWRFRHIYRGQPRRHLLTTGWSAFVNKKKLVSGDAVLFLRGEDGELRLGIRRAAQLKSGSTFSALSGQQLSPTSLMDVVNALSARCAFSIHYNPRISTSEFIIPIHRFLKSLDYSYSAGMRFRMRFETEDAAERRFTGLIVGIADVDPVRWPGSKWRCLMVRWDDLEVTRHNRVSPWEIEPSGSASTANNLMSAGLKRTKIGLPSAKLEFPVSNVIGTSDFGESLRFQKVLQGQEMLGVNPTYDSINAQSHQVSDLRRCYPVSNYPRIAATGNNIGIPQVSSNVSSNGIGFSESFRFQKVLQGQEIFPSQPYGRALSVDEACGNSRCGLFDGYQVMRSRNGWCSDMSNNSSNLHPPVPSGQVSSPSSVLMFQQAVNLVSNSDYNNKISQVMGGKFHQRVSYASDVKGGKFVSTPYEPLLCGLAKEGTNSFGLSNFHNQLDSSRSHDSISVLRANQELVPSCKSSCRVFGFSLTEVAPIANKEAADSSSVACSGPSFTRHVDDDFHPGHSLRSKAVASYCTKGVLQY

SEQ ID NO: 26052 - protein, 345 aa, Lactococcus lactis subsp. lactis Il1403
MTNTNKKTILVTGGSGYIAMFIMIALLKKGYRVRATLRTMSRQEEVKKMMAQGGISDFTDLDFVQTDLTKEEGWSQAMTGVDSVIHVSSPTPLQRPDADDLMVKMAVDGVKFVMKAAKEAGVERVVLTSASGAVLAGHKDHPEIFTERDWTNLDAPINAYQRSKTMAEMEFWKLAEAYGIEGASVLPTAVMGPILGNDFSHSSAAIKNMFEGKMPRLLNLAFDYVDVRDVADLHLLALEKKEAIGQRFIATSGQNITYKKQAEFLKKEFGTKAKKVSTQVIPDFLVKILARFDKSLAMPATFLGQNTACSNEKSVKLLGWKPRSGEAAIIQTAQTMLDLGVIKVD

SEQ ID NO: 26053 - protein, 579 aa, Frankia sp. CcI3
MTPRLPFSSSAEAAPGGGGREGSGAGHDSPSPWAPPIGSAAGTPAGQAHPAGPASSEPDLPAGPPSRPPGSPYSQPPALGPSSGQHPQYPNPHPPHGDPRPYPDSPYPAGPSQASQQQAAFSAGSPPPAAPPGGPWGPPSGPPPSGPAAPRALNGAAGPAGPPAGPPTGGHSWGPPWSSPSGAGSPPAQDLYGNGTTMAASPPWRRRRLVAAGLAIALVSAGVGGGVGALVADNNGGQTIVTSAGLHNTVDSSGGTSPAAANTVSAAAQKILPSVVTISEESSSESGTGSGTIIRSDGHILTNNHVVSGAANGGSLTVTLQDGRTFDAQVVGTDPSSDLAMIKINATGLTAATFGNSDTLNIGELVVAVGSPLGLNGTVTSGIVSAVHRPVRTGDSTVRDQQNTVLDAIQTDASINPGNSGGPLVNSRGEIIGVNSAIATVGGGSPFGGGQQSGNIGVGFAIPGNYAESVATQLISTGSARHPYLGVSASTAEENTRSTASSGNGAQIRSMVPGGPAERAGLRTGDVITKVGNRAVNDVDSLIAAVRSHAIGDEVEVTYTRDGQSGTVKARLAQQPPAS

SEQ ID NO: 26054 - protein, 331 aa, Synechococcus elongatus
MARMYYDADAQLELLKDKTIAIIGYGSQGHAHALNLRDSGLNVVVGLYAGSRSAERARAEGLAVHPVAEAAKMADWIMILLPDEVQRVVYEQEIAPHLQPGNVLSFAHGFNIHFGQIVPPAHVDVVMVAPKGPGHLVRRTYAQGEGVPCLFAVYQDASGQARDLAMAYAKGIGGTRAGILETTFREETETDLFGEQVVLCGGLSALIKAGFETLVQAGYQPELAYFECLHEVKLIVDLIVEGGLAKMRDSISNTAEYGDLTRGPRIITEETRAEMRKILHEIQTGQFAREFVLENMAGKPGFTAMRRREAEHPIEQVGQELRSMFSWLKRA

SEQ ID NO: 26055 - protein, 326 aa, Streptomyces avermitilis MA-4680
MTWLITGGAGYIGAHVVRAMREAGDRAMVYDDLSTGIAERVPDGVPLVVGSTLDGGLLRRTLAEHAVTGVVHLAAKKQVGESVELPLHYYRENVEGLRVLLEAVTDASVPSFVFSSSAAVYGMPDVDLVREETPCVPMSPYGETKLAGEWLVRATGRATGLSTASLRYFNVAGAATPELADAGVFNLVPMVFEKLTEGAAPRIFGDDYPTPDGTCVRDYIHVVDLAEAHVAAARALEASPGAGLTLNIGRGEGVSVREMVDRINALTGYDTPPTVVARRPGDPARVVASADRIAVELGWKAKYDVQDMITSAWEGWVRLHPGATRG

SEQ ID NO: 26056 - protein, 275 aa, Agrobacterium tumefaciens str. C58
MDKRFADLRAENRPALITYFMGGDPDFQTSLGIMKALPEAGADVIELGMPFSDPMADGPAIQLAGQRALKGGQTLKTTLDLAREFRKQDNATPIVMMGYYNPIYIYGVEKFLDDAIASGIDGLIVVDLPPEMDDELCIPALARGINFIRLATPTTDGKRLPAVLKNTSGFVYYVSMNGITGSALPDPSLISGAVGRIKAHTELPVCVGFGVKTADHAKAIGAVADGVVVGSAIVNQIAGSLTKDGQATADTVPAVTTLVKGLSTGVRASRLAAAE

SEQ ID NO: 26057 - protein, 328 aa, Glycine max
MAKDPVRVLVTGAAGQIGYALVPMIARGVMLGPDQPVILHMLDIPPAAESLNGVKMELVDAAFPLLKGVVATTDVVEACTGVNIAVMVGGFPRKEGMERKDVMTKNVSIYKSQASALEKHAAANCKVLVVANPANTNALILKEFAPSIPEKNISCLTRLDHNRALGQISERLNIQVSDVKNVIIWGNHSSTQYPDVNHATVGEKPVRELIADDAWLNGEFITTVQQRGAAIIKARKLSSALSAASAACDHIRDWVLGTPQGTWVSMGVYSDGSYNVPAGLIYSFPVTCANGEWTIVQGLPIDEFSRKKLDLTAEELSEEKALAYSCLN

SEQ ID NO: 26058 - protein, 340 aa, Xanthomonas axonopodis pv. citri str. 306
MSITHAAPHCTQSHTFASANPLAERSTRKAVILTVLMMMVEIVGGWTLNSMALLADGWHMSSHALALGLALFAYRFARQHAGDVRFTFGTWKVEVLGGYTSAILLLGVAGLMAFQSVERLFTPKPIQYQEATFIAVIGLLVNLICAWWLRDSHGHGHAHGHHHGHTHDSHGHGHGHGHGHGHGHGHGHHHDTHSDLNLRAAYLHVVADAATSVLAIVALVAGMHWGVTWLDPLMGIVGAVLVTVWAWGLLRSTGSVLLDAEMDAPVVAEVKQVIAALGHAIDIDDLHVWRVGSERYACVVSLVTAADIDADLVREALQIHEELVHVTVELQRPPALPAAA

SEQ ID NO: 26059 - protein, 831 aa, Aquifex aeolicus VF5
MKGVILAGGFGTRIQPLTNSIPKPMLPVANRPIMEHVVHRLKEAGIEEIVVLLYYQAEVIKNYFKDGSDFGVKITYVQPEADYGTAGAVKQAQNYLNETFIIVSGDVITDFNLSELIAFHKSKSSKFTLALYSVENPLQFGVVITNKEGKVLKFLEKPGWGEVFSDTVNTGIYVVEPEILNYIPEDKPFDFAMDLFPKLMKSGIDLWALKMRGYWRDIGNIDSYRDVHKDIFAGLVKIRIPGRIITTKEARIYVEEGTEIPENVSLKGTVILGKNVKVGEGSELKNCVIGNNTVIGRNVKLFDSVLWWNVSIDEESEIRNGVICNDVKIGKRVKAKEGVVIAEDCEVEDEVLFLKDVVVWPEKVIEKGSVVTKNIVCESKWEKGIFKGNKVIGRINVELTPDNATKLGMALGSVLPPKSTVILARDYHRASRTIKRSFLGGILSTGINVIDLHLSPLPVMRFTLTEDKKAVCGVYFSISQEFPGSVEICVFDENGLPIDTNFQKKIERVFFREAYRFETFTDLGLIKEKPYFSENYVTKLLSSIDGDSIKLSSNKVVYDALHSPISPFISEVLGKLEIENVILNALYDERKLSRISTYASSSEGNVSKVLKALSYDVGFVMEPSATKLKLVDDRGRTISGDRLLLVVLMLLDKSAEKQLRVYLPVWAPEVLDAILNNVIVERGKFTNLRKSFIEDFYMLADTDGSFTFTEFSYSPDALYASLKIMEMLTKLKVKVSEIYDSLPEYYFLHEVVSCSSEKKGTVLRKISEMAEGKEASFIEGVKIYEDYGNWVLVLPDSYKDLIHVYVQSTERERAEELIKNYMEIVRGICKK

SEQ ID NO: 26060 - protein, 469 aa, Frankia sp. CcI3
MPRSGTALGDRTGISRSGRTSTQPSSSESLPRGELAGTPPTGRKSAGQPTYPGQMEFTQSDKLADVCYDVRGPVLDEATRLEAAGSRILKLNIGNPAPFGFSAPPEVLEAVVANLADAQGYSDSKGLLAAREAVVRYHLRKGVTGIDPGGVYLGNGVSELIMMSLQALLNNGDEVLLPAPDYPLWTAVVSLCGGRPVHYLCDESAGWAPDLDDIAAKVTPRTRAIVVINPNNPTGAVYDRQVLENIVEVARRHHLMLLSDEIYDRILYEDAEHIATAALAPDLVCMTFNGLSKSYRLAGFRAGWMVMSGPRGHASSYIEGVNILANMRLCANAPGQFATVAALTEDGGAGDLVLPGGRLREQRDTVVKLLNDIPGVSCVPPRGALYAFPRLDPAVYPIRDDERFVLDLLLAEKILLVQGSGFNWPHPDHVRIVTLPAVDDLTDAIGRIDRFLASYKRPSQQQCPSQRRN

SEQ ID NO: 26061 - protein, 493 aa, Oryza sativa
  misc_feature (405)..(405): Xaa can be any naturally occurring amino acid
  unsure (1)..(493): unsure at all Xaa locations
MDPCKFRPSSSFDTKTTTTNAGAPVWNDNEALTVGPRGPILLEDYHLIEKVAHFARERIPERVVHARGASAKGFFECTHDVTDITCADFLRSPGAQTPVIVRFSTVIHERGSPETIRDPRGFAVKFYTREGNWDLLGNNFPVFFIRDGIKFPDVIHAFKPNPRSHVQEYWRVFDFLSHQPESLHTFFFLFDDVGIPTDYRHMDGFGVNTYTFVTRDAKARYVKFHWKPTCGVSCLMDDEATLVGGKNHSHATQDLYDSIAAGNFPEWKLFVQVIDPEEEERFDFDTLDDTKTWPEDEVPLRPVGRLVLNRNVDNFFNENEQLAFGPGLVVPGIYYSDDKMLQCRVFAYADTQRYRLGPNYLMLPVNAPKCAHHNNHYDGAMNFMHRDEEVDYYPSRHAPLRHAPXPTPITPRPVVGRRQKATIHKQNDFKQPGERYRSWAPDRQERFIRRFAGELAHPKVSPELRAIWVNYLSQCDESLGVKIANRLNVKPSM

SEQ ID NO: 26062 - protein, 494 aa, Burkholderia fungorum LB400
MSLLMAGSLLAGGIGAALADDASAPAAASAPDATASAPAPDASAAPAAAAASAPAADASAAPAASAAAAPAASDAAPAAPTAPFSVDSSKINSGDTAWMLTSTALVLFMTIPGLALFYGGMVRKKNVLAILMQSFAITCVVTIVWIVIGYSLAFTPGSSFIGGFSRVFMAGMSYIKGDKATTLTVSHLAPTIPETVYCVYQMTFAIITPALITGAFADRMKFSAMLVFMTLWSIIVYSPIAHMVWEPTGWLASAGILDFAGGTVVHINAGIAALVCALVLGKRIGYGKEAMAPHNLTLTLIGGAMLWVGWFGFNAGSAVAADGRAGFAMFATQVATAAAALAWMFAEWAAKGKPSVLGIVSGAVAGLVAITPASGFVGTLGSLVIGIVAGVVCFWSATWLKHKLGYDDSLDAFGVHCIGGIVGALLTGVFAVKDIGGADGSVILQAKGVLTTLIYSGVVSYILLKIIDMVMGIRVTEEQEREGLDVSLHGEHVE

SEQ ID NO: 26063 - protein, 664 aa, Prochlorococcus marinus str. MIT 9313
MSDEVAAGRRLKDHNHEGSLAKAVWRPSPHEEDGLAHQGHVAQMGRVDQIWLWLAQKHGQILAVDAPHATHPERFRYGELAEQIALAAAAFSHLGIGAGDVVAFFAENSPRWLIADQGLMRTGAANAVRGATAPLEELRYILADSRAVALVVQNAELWHKLALTDEQRRPLRLVLQLEGEPADGVMGWQELLAAGAGQPAPDPLKDRDSGSAATVTATILYTSGTTGQPKGVPLSHANLLHQMRCLACVAFPSPGAPVLSVLPIWHAYERSAEYYFFSCACTQSYTTIKQLKRDLPRVRPIVMATVPRLWEAIQAGFDEAVKGMPTGRQRLLRMALANSGSQRKAWRRSRNLLLEPLPLTTRTLALLEATLRWPLHGLAGALLWPKVLNQLCGGRLRFPINGGGAIAPHVDAFFEAVGLELLVGYGLTETSPVVSCRRPWRNIRGSSGPPLPETEFRIVDPESGVDLMFRQRGRVLVRGPQVMAGYLRKPEATAKVLDGQGWFDTGDLGMLLPDGSLVLTGRAKDTIVLSSGENIEPGPLEAALVASPLLEQVMLVGQDERQLAALVVPREEEMLAWAEDQGLLMQTGLSGSPGDEALRRLLRGELNRLLAQRSGSRADERLAGVALVEAFTIENGLLTQTLKQRRDRITLRDGALIAALYGRS

SEQ ID NO: 26064 - protein, 837 aa, Frankia sp. CcI3
MSRRRRPRMVLAVGHGAGHEHESDDDGDATGDGRAPASAPNTPNTPNTPADCTPLHPRLPLRDDRATTSHSQTGRVPTVPMIPNSTAVVRPRSECRQHRCQFAPLPTRQPTAVEVKHLHGHLIGPGVEMLLDPPEQDVRVPPGDDRVDQAVRARAGEIVVVEPEAPQVRRVVRQPKIGPGVPAGELTGLFRIGVQDERLLGDEQLAGPKDVPGGSGVLGWHEIGVGAVGPVPGEAEHLRTERGEHPWRDTGRWHGPVLLDRHPVHLVEVRRHLGEWARVGGAPDVHQLGVGHPEPEQEPVRVRLGEGQLTGGHGERVTGEDLRDPGRDRHPGGGRERQSGGDQHLAPLDLTGPQRRITEIVEFRDRLPDDRGRGEVELATPDPHLADLTPGRRAAHVLRTRHRATVPSRNDGHSSRRDRRIRLPLSVQGLSLASVTELMQLLTPTGHRITTASTTTAAGPDAPGPDPSRARAGGVDAAGADPPRTAVDLAAQIADLTDDDLYGLYRDMVFIRRFDEEATSLQRQGELGLWASLRGQEAAQVGSGRALRPGDMVFPSYREHGVAWCRGVRPREILAIYRGTTLGGWDPGTHGCALYSIVVGSQALHATGYAMGIARDGTNDAAIAYFGDGASSEGDVSEAFGWASVFAAPLVFFCQNNQWAISAPARRQSRIEIVHRAAGFGFPGVRVDGNDVLACLAVTRWALATARAGRGPVLVEAVTYRMNPHTTADDPSRYRPKGELDMWRRRDPLDRMRAYLTARGLLTEESLRQLAIEADSFAHELRAQCVALPDPIPASLFDHVQVAENELVTAQRSALAAMFDVEGPGVEDEMGVPEGNR

SEQ ID NO: 26065 - protein, 59 aa, Zea mays
NAGFQVSKYLPYGPVEHIIPYLIRRAEENRGLLSASAFDRQMLRKELVRRFKNAVMGRE

SEQ ID NO: 26066 - protein, 337 aa, Rhodopseudomonas palustris CGA009
MTVLVTGGAGYIGSHTVLALVEAGESVVVIDNLSTGFSQFVPEGVPLFIGDAGDENLVDGVIASHRVDAIIHFAGSVIVSASMRDPLGYYRNNTSTSRSLLSAATRRGVKNFIFSSTAAVYGNPDRIPVGEDAPTRPLSPYGRSKLMTEIMLHDAAEAYGVNYVALRYFNVAGADPLGRVGLATEGATHLIKIAVEAATGQRSRIDVYGTDYPTTDGSCIRDFIHVTDLAEAHGAALGYLRAGGGPVTLNCGYGHGYSVFETIDAVKRVAGRNFAVAAASRRPGDIMTMIADTSRIRRTLDWIPRYDDLDTIAAHALGWEEKLLRQRQAVELQAIPA

SEQ ID NO: 26067 - protein, 600 aa, Rhodopseudomonas palustris CGA009
MTEAPRKITDDPYGAWHLIRRLVMEQASAYWRRYALAFGLMAIAAAATSGSAFLLGKVINQAYVDRDLQGIMFWSVVTLVVFSLKGAATYGQSVILTQIKNAILANNQRRMFHKLMSESIGFFSQRHSSEFLARLTAGANSVTEVLNLLINAIGRDLLSLIGLVIVMVVQDPFMALFGLLVAPPAAFVVRKLVKRVKGLALTQFTGNAQILETMQESLQGIRTVKAFSLEKTMSDRIDANIAAVQANADKMAKVSNRSSPLMETLGGFAVAASLMYGGYRVVATGATPGEFFSFLTAFLLAYEPAKRLARLNIELNSGLVGARMLLEIIDSPPSEPDDSHKPALQLTEARVEFDHVSFAYRPDEPVLNAMSFVAEPGKMTALVGPSGGGKSTVLALLLRLYEVQSGEIRIDGQSTSTVSRESLRRQTAYVGQDVYLFRDTVRANIAFGKLGATEDEIVAAAKAACAHDFIMGFPLGYDTPVGEHGAQLSGGQRQRIAVARALLRDAPIVLLDEATAALDSESEKLVQEAIDRLARGRTTIVIAHRLHTIMHADSILVVEAGEIVEQGRHDDLLRRSGRYASFFRLQQRHATPLAPADATA

SEQ ID NO: 26068 - protein, 521 aa, Solanum tuberosum
MAASIGALKSSPSSNNCINERRNDSTRAVSSRNLSFSSSHLTGDKLMPISSLRSQGVRFNVRRSSLIVSPKAVSDSQNSQTCLDPDASRSVLGIILGGGAGTRLYPLTKKRAKPAVPLGANYRLIDIPVSNCLNSNISKIYVLTQFNSASLNRHLSRAYASNMGGYKNEGLVEVLAAQQSPENPDWFQGTADAVRQYLWLFEEHTVLEYLILAGDHLYRMDYEKFIQAHRETDADITVAALPMDEKRATAFGLMKIDEEGRIIEFAEKPQGEQLQAMKVDTTILGLDDKRAKEMPLVASMGIYVISKDVMLNLLRDKFPGANDFGSEVIPGATSLGMRVQAYLYDGYWEDIGTIEAFYNANLGITKKPVPDFSFYDRSAPIYTQPRYLPPSKMLDADVTDSVIGEGCVIKNCKIHHSVVGLRSCISEGAIIEDSLLMGADYYETDADRKLLAAKGSVPIGIGKNCHIKRAIIDKNARIGDNVEIINKDNVQEAARETDGYFIKSGIVTVIKDALIPSGIII

SEQ ID NO: 26069 - protein, 118 aa, Brassica napus
KKPVDPRVRFICIKEAGVEGGVVSNFDTRLRPLLRALRCEDWFDAVAVSAEVEAEKPNPTIFLKACELLGVNPEDAVHVGDDRRNDLWGARDAGCDAWLWGSEVTSFKQVAQRIGVKV

SEQ ID NO: 26070 - protein, 528 aa, Triticum aestivum
MATEGLRTLLADAARSPWGVAGAAAAVALLWFAAWVLEWAWWTPRRLGRALRAQGITGTRYRLFTGDIPENARCNAEARSRPMPRGDHDIAPRVLPMFSNAIKEHGKVSFTWFGPTPRVMVPDPELVREILSNKFGHFGKQRSTRIGRLLANGLANHEGEKWAKHRRILNPAFHHEKIKRMLPVFSACCEEMITRWENSMSADGSCEIDFCPEFQNLTGDVISRTAFGSNFQEGMKIFQLQGELGERLIQAFQTLFIPGYWFFPTKNNRRMRAIDREIRMILRGIIGKKERAIKNGEASSDDLLGLLLESNMQQSNGKANLGLSIEDIIQECKLFYFAGMETTSVLLTWTLIVLSMHPEWQEQAREEVLHHFGRTTPDFENLGRLKIVTMIFYEVLRLYPPITFLTRRTYKAMELGGIKYPAGVNLMLPILFIHHDPDIWGKDASEFNPQRFADGISNAAKHPAAFFPFGGGPRICIGQNFALLEAKMALSIILQRFSFELSPSYIHAPYTVITLQPQHGAQIRLKKI

SEQ ID NO: 26071 - protein, 308 aa, Brassica napus
DYNQTHFVRNKEFKEAADKLQGPLRQIFVEFLERSCTAEFSGFLLYKELGRRLKKTNPVVAEIFSLMSRDEARHAGFLNKGLSDFNLALDLGFLTKARKYTFFKPKFIFYATYLSEKIGYWRYITIYRHLKQNPEFQCYPIFKYFENWCQDENRHGDFFSALMKAQPQFLNDWQAKLWSRFFCLSVYVTMYLNDCQRTDFYEGIGLNTKEFDMHVIIETNRTTARIFPAVLDVENPEFKRKLDRMVVINEKLMAVGQTDDPSFVKNLKRIPLIAGLVSEILAAYLMPPVESGSTDFEEMEPHFAEFEP

SEQ ID NO: 26072 - protein, 1147 aa, Cryptococcus neoformans var. neoformans JEC21
MGSHNPITSPKLDYPQRTTEAKYKHLGSIRGRLDQFVGGHYASYNLSSLLYAHRLDDSQHVKLEVWSAPGLTKPTFEEAKRQTFKSTKKGESFGPSWTNHWFKVTLHIPKEWSDYEKVQFEFDCSGEAMIFTTDGDPIHGLTGGFGDDRRVEFIIPQSARNAGVAHYYIEASCNGMFGINNMEPPDPNRYYQLNSADLVVPNEEAWKLMWDFNAIHQVYNTLPGDSALAKKAQWVANEIMNVFETGSLESVARGREVAQIVLGKDWEKNIQEESENAGMEKGVLWGIGHCHIDTAWLWPFHVTQQKSARSWSTQCDLIDRYPEHRFSATQAQQFKWVEQLYPLLFARIKEKVSEGNFQPLGATWVEMDTNLPSGEALIRQFLYGQRYYESRFGFRSDTFVLPDTFGYSSQLPQISRQAGAKNFFTQKLSWNSINKFPHSTFNWVGLDGSQVLTHMTPVDNYNSQCNIDDIRRGVTGHKNLDVTSEALLLFGNGDGGGGPTPPMLEKLRRARAIGQHPDAGGQLPLVKMGGSFSEFFDSVRKETENGIRLPYWRGELYFELHRGTYTTHASIKKGNRKSEILMRQAEYAATIASLVDTDYEYPKERFDVAWEDLLLCQFHDVLPGSGIAMIYEDAEKKYAALHSSITSILNEANSILFKQSTPLVPSSPTEVQGQVFAINTIPNYSRREIVEVHLGKGATSLRQVSAQVTDDGKKGWLLMSTEDDGGMVALPKGVYASPRVAIVLEKDDVAVMSNDNISLQIKGGRITSVYDKALERELVAPGQTGGLVIMEDHPNFWDAWDVDEFHLEKQKHLKFGPLRVKENGPLRGIISTTCRVGKSLIQIDIIMDAIAASVKPGARSIIRFDTVVDWKEKHQFLKFELPLDIYSDFATYDTQFGTVARPTHRNTSWDAAKFEVCAHKFADLSEYGYGVAILNDCKYGYATQGNVMRLSLLRAPTQPDADCDIGTHSFSFAIYPHSGTFIESDVAQVAYAFNSPLSVCCAPKNFLTNVSPLARSSPFTLEGADNVMLETIKRGEDDQLSGDKTKTIILRVYEHLGGHAKVKLNVRHLAVVKAELVNILEDHLETLRLYPLDDKEKALSDLGNEENPHSGDNVYVQLNLRGYEVQTVRLTVKGKKSKAESEGWIKL

SEQ ID NO: 26073 - protein, 373 aa, Cryptococcus neoformans var. neoformans JEC21
MTQLKRVLVTGGLGYIGSHVVVSLLLTGKYQPIVIDNCHNSYPEALNRCAEIARDELGADAPQPILHDLDLRDAPAIEQVFEQYAADGGIWAVIHLAALKAVGESADFPLSYYRVNVAGSISLFETMAKYSCNNLVFSSSATVYGTPATIPIPETSPLIPESCYGRTKAMVEEIIHDLTKVGAEEGKPSLRAVSVRYFNPAGAHPSGKLGEEPRGKPGNLLPLLAQMAVGREKSQLKVFGTDFPTPDGTCVRDYLHIMDLAHGHVLALDALTVPSSQHNIFSEIDPKDGYFRAFNLGRGQGMSVLNMIEAMRKATGFDYQYEIVGRRKGDVPDLTADPSLARKELGFVAKEDLESMCRDLWNFQTRHPNGYSS

SEQ ID NO: 26074 - protein, 726 aa, Zea mays
  misc_feature (493)..(493): Xaa can be any naturally occurring amino acid
  unsure (1)..(726): unsure at all Xaa locations
MFSRSYTNLIDLANGNLSALDYGGGGDEGGGRPPRARPPQRTMTTPGTLVELDEEEAGSATSDVQSSHANNRLIIVANTLPVRGERRPDGRGWKFSWDEDSLLFHLRDGLPEDMEVLYVGSLRADVPAAEQDDVAQALLERFRCVPAFLPKDLSDRFYHGFCKQTLWPLFHYMLPFSLDHGGRFDRSHWEAYVLANKLFSQRVIEVLNPEDDYVWIHDYHLLAFPSFLRRRFNRLRIGFFLHSPFPSSELYRSLPVCDEILKSLLNCDLIGFHTFDYARHFLSCCSRMLGLEYQSKRGYIGLDYYGRTVGIKIMHVGVNMVHLHSLLQQPDLERLVTELRNKFNHKTVLLGMDDMDIFKGIDLKIRAYEHMLKSHPKWQGRAVLVQIVNPKGGGGKDLEGLQTEIEDNCKRINEQFGRSGYSPVVLVKRTLSSVERMAYYTIAECVVVTAVRDGMNLTPYEYIVCRQGITSLEGSTDDKPRGKSMLVLSEFIXCSPSLSGAIRINPWNIESTAEAMNESIALSDTEKQLRHEKHYRYICSHDVAYWSKSYIQDFERSCRDHFRRKCWGIGLGFGFRVVALDRNFKKLTVDSIVADYKKSKSRIILLDYDGTLVPQTTIDKTPSETVVNMMNTLCSDKNNVVFIVSGRARDSLEKWFYPCPKLGIAAEHGYFMRWTREEQWQIQHHISDFRWMYMVEPIMKLYTEATDGSYIETKESALVWHHQDAG

SEQ ID NO: 26075 - protein, 297 aa, Yarrowia lipolytica CLIB122
MNYPSVSEQKHRVFIIYSAYLRVQFRESARLAVSVRNKNYNLVRADLHNILPQKNTTVFKDGTLAPLLIRLAWHSCATYDKYTRTGGSNGATMRYHLEASDEGNVGLEVARLSLEPIKRKHPWITYADLWILAGVVSIEACKGPSIKWRDGRVDYEDDLLVPPNGRLPLGGGDASHVRTIFSRMGFNDQETVALIGAHSLGRLHHHRSGFDGPWTSNPAKCDNEFYKLLLGNVWTLVDSPTGRKQYVNSTGQVMMPSDMSLIEDANFRFWVDQYAVSEELWRDHFALAFEKLTELGR

SEQ ID NO: 26076 - protein, 301 aa, Trifolium repens
DYNQTHFVRNKEFKEAADKLDGPLRQIFVEFLERSCTAEFSGFLLYKELGRRLKKTNPVVAEIFSLMSRDEARHAGFLNKGLSDFNLALDLGFLTKARKYTFFKPKFIFYATYLSEKIGYWRYITIYRHLKANPEYQCYPIFKYFENWCQDENRHGDFFSALMKAQPQFLNDWKAKLWSRFFCLSVYVTMYLNDWQRTDFYEGIGLNTKEFDMHVIIETNRTTARIFPAVLDVENPEFKRKLDRMVEINQKILAIGESDDNSVVKNLKGIPLVAALVSELLAAYLMPPIESGSVDFAEFEP

SEQ ID NO: 26077 - protein, 347 aa, Arabidopsis thaliana
  misc_feature (295)..(295): Xaa can be any naturally occurring amino acid
  unsure (1)..(347): unsure at all Xaa locations
MGNCCGTAGSLAQNDNKPKKGRKKQNPFSIDYGLHHGGGDGGGRPLKLIVLNDPTGREIESKYTLGRELGRGEFGVTYLCTDKETDDVFACKSILKKKLRTAVDIEDVRREVEIMRHMPEHPNVVTLKETYEDEHAVHLVMELCEGGELFDRIVARGHYTERAAAAVTKTIMEVVQVCHKHGVMHRDLKPENFLFGNKKETAPLKAIDFGLSVFFKPGERFNEIVGSPYYMAPEVLKRNYGPEVDIWSAGVILYILLCGVPPFWAETEQGVAQAIIRSVLDFRRDPWPKVSENAXDLIRKMLDPDQKRRLTAQQVLDHPWLQNAKTAPNVSLGETVRARLEQFTVMN

SEQ ID NO: 26078 - protein, 449 aa, Lactobacillus salivarius subsp. salivarius
MDKFKNIIIGFGKAGKTLAKYLAQHDETVLLIERSKQMYGGTCINVGCLPSKNLILNGQRGLDFTTAVNKRGEMTRQLRDKNYHMVADEPLATVWNGSARFIDNYVLAVVMSDGTTKKVRGERIFINTGAVPNWPSIPGLEFGQRIFTSKEAMELKKQPKRLAIIGGGYIGLEFAGMFNSFGTHVTIFDQHTRLLEREDPDIATEVVTDLTDAGIEIKPETQLTQVKDNGEKVTLYYQQGDQTNTAEFDAVLVAVGRRPNISSLGLENTDIALTNRGAIQVDDHLRTTVQNIWALGDVNGGPMFTYVSLDDFRIIIDQLFGKGNRSTADRSVIPTASFLNPPLANVGLNERQAKSAGYNFQTFKLSVKAIPKARVLEDQRGLYKVIIDQNTHCILGATLYAAEAHETINLIALAIKAKLPYEKLRDMIYTHPTMSEALNDLFKTLVVKN

SEQ ID NO: 26079 - protein, 183 aa, Capsicum chinense
EKNITCLTRLDHNRALGQVSERLSVQVSDVKNVIIWGNHSSTQYPDVNHATVTTPTGEKPVRELVADDAWLNGEFITTVQQRGAAIIKARKLSSALSAASSACDHIRDWVLGTPEGTFVSMGVYSDGSYNVPAGLIYSFPVTCKNGEWSIVQGLPIDEFSRKKLDLTAEELSEEKALAYSCLT

SEQ ID NO: 26080 - protein, 488 aa, Chlamydophila abortus S26/3
MTKKPIHVLLATAMFLSISTLSPLGFAAVKKDSRIAEVPQEVLLKEISGGFSKVAEQATPGVVYIESFPKCNRPVHPAPGRRGPYDNPFDYFNDEFFNRFFGLPTQKERPMSKEAVRGTGFIVSPDGYVVTNNHVVEDAGKIHVTLHDGQKYPAKVIGLDPKTDLAVIKINAEKLPHLTFGNSDNLKVGDWAIAIGNPFGLQATVTVGVISAKGRNQLHIADFEDFIQTDAAINPGNSGGPLLNIDGKVIGVNTAIVSGSGGYIGIGFAIPSLMAKKIIDQLISDGQVIRGFLGVTLQPIDAELAACYKLDKVYGALITDVVKGSPADKAGLKQEDVIIAYNGREVESLSAFRNAISLMNPNTRVLLKVVREGQVVEIPVIVSQAPQDDGVSALNRVGIRVQNLNSETAKKLGMTPDSKGVLIVSVEAGSVASSSGIAPGQLILAVNRQKVSSVEELNTVLKDGNNESILLMVSQGEIIRFVVLKPED

SEQ ID NO: 26081 - protein, 197 aa, Glycine max
MDYYFGNLNPNPYYHHSAVVNMASPSSEFMLSDYLVLEDALVVDHHQESWSQSTETESSEKATSSDASHGFGDATSTNTNMHIKCQNSGIKGKNAEVSQRITFRTRSQLEVMDDGYKWRKYGKKTVKSSPNPRNYYKCSGEGCDVKKRVERDRDDSNYVLTTYDGVHNHQTPSTAYYSQMPLLHSNHDWALHPSANS

SEQ ID NO: 26082 - protein, 106 aa, Gloeobacter violaceus PCC 7421
MQTLPKKKFYETMSYLPPLTDAEIAKQIQYMLDKGYIPCVEFNETSEPTMVYWTMWKLPLFSVRSPQEVLSEVNACRSSYPGCFIRVIGFDNIRQCQTMSFIVYKP

SEQ ID NO: 26083 - protein, 587 aa, Haemophilus influenzae R2866
MQEQKLQENDFSTLQTFKRLWPMIKPFKAGLIVSGVALVFNALADSGLIYLLKPLLDDGFGKANHSFLKMMAFVVVGMIILRGITNFISNYCLAWVSGKVVMTMRRRLFKHLMFMPVSFFDQNSTGRLLSRITYDSQMIASSSSGSLITIVREGAYIISLFAVMFYTSWELTIVLFIIGPIIAVLIRLVSKIFRRLSKNLQDSMGELTSATEQMLKGHKVVLSFGGQHVEEVHFNHVSNDMRRKSMKMVTANSISDPVVQVIASLALATVLYLATTPLIAEDNLSAGSFTVVFSSMLAMMRPLKSLTAVNAQFQSGMAACQTLFAILDLEPEKDDGAYKAEPAKGELEFKNVSFAYQGKEELALNNISFSVPAGKTVALVGRSGSGKSTIANLVTRFYDIEQGEILLDGVNIQDYRLSNLRENCAVVSQQVHLFNDTIANNIAYAAQDKYSREEIIAAAKAAYALEFIEKLPQGFDTVIGENGASLSGGQRQRLAIARALLRNSPVLILDEATSALDTESERAIQSALEELKKDRTVVVIAHRLSTIENADEILVIDHGEIRERGNHKTLLEQNGAYKQLHSMQFTG

SEQ ID NO: 26084 - protein, 149 aa, Brassica napus
MNTWFASVDLTKASLSTQIPMATVKKTVRVAAAQMTSVNDLMANFNTCSRLVQEAASSGAKLICFPENFSYMGEKSGDSVKIAESLDGPVMQRYCSLARDTNMWLSLGGFQERFDDTHLYNTHVVIDDTGMIQSTYQKMHLFDVDVPGG

SEQ ID NO: 26085 - protein, 465 aa, Aquifex aeolicus VF5
MEFDLIIVGAGSGGYEAGLYAFRRGMKVAFVELSPETVGGNCLNRGCIPSKYMRHGAYLLDKFQKMEQYGIISKGYDIEYKKLKEGRDNVVVTIRENFKKFAQQLRIPIYYGKGVLKDPNTVFVEGPEETLKAKYILVATGSSPTSVGNLVPDGKYVIDTDQIWEIDYVPKKVLIVGGGAVGVEFAYIFRKYGSEVVLVEIKDRLLPTPDIPEDSGRYLARKLRELGVDIRTRTSVESWEKTQNGVKAKLTDGSEVVADFILLGVGRKPNTKGIGLEELGIEMDERGFVKTNEYAQTNIPNIYACGDITSPLMLAHKSMYEGKIAVSHILGERDWKKNERIIPKIIYSALEVASVGLTEEQAEDEDIEVRVGVASFVSNPKAMDDGENEGFVRIVADDETGEILGCHIVGPHAGELIHQVVHMIKDGKTVEFASKTMYSHPSLSENIGIASSEVYYGPISWVKRR

SEQ ID NO: 26086 - protein, 248 aa, Burkholderia fungorum LB400
MYKLVLIRHGESTWNKENRFTGWVDVDLTEQGNNEAQQAGVLLKDSGYTFDIAYTSVLKRAIRTLWHVQDKMDLMYLPVVHSWRLNERHYGALSGLNKAETAARFGDEQVLVWRRSYDTPPPALEPTDERAPYNDPRYAKVPREQLPLTECLKDTVARVLPLWNESIAPAIKSGRQVLIAAHGNSIRALVKYLDDISDNDIVGLNIPNGVPLVYELDENLRPIKHYYLGDQEAIAKAQAAVARQGKAG

SEQ ID NO: 26087 - protein, 500 aa, Arabidopsis thaliana
MLYFILLPLLFLVISYKFLYSKTQRFNLPPGPPSRPFVGHLHLMKPPIHRLLQRYSNQYGPIFSLRFGSRRVVVITSPSLAQESFTGQNDIVLSSRPLQLTAKYVAYNHTTVGTAPYGDHWRNLRRICSQEILSSHRLINFQHIRKDEILRMLTRLSRYTQTSNESNDFTHIELEPLLSDLTFNNIVRMVTGKRYYGDDVNNKEEAELFKKLVYDIAMYSGANHSADYLPILKLFGNKFEKEVKAIGKSMDDILQRLLDECRRDKEGNTMVNHLISLQQQQPEYYTDVIIKGLMMSMMLAGTETSAVTLEWAMANLLRNPEVLEKARSEIDEKIGKDRLIDESDIAVLPYLQNVVSETFRLFPVAPFLIPRSPTDDMKIGGYDVPRDTIVMVNAWAIHRDPEIWEEPEKFNPDRYNDGCGSDYYVYKLMPFGNGRRTCPGAGLGQRIVTLALGSLIQCFEWENVKGEEMDMSESTGLGMRKMDPLRAMCRPRPIMSKLLL

SEQ ID NO: 26088 - protein, 469 aa, Arabidopsis thaliana
MEESNRSSTVLFDKYNIGRLLGTGNFAKVYHGTEISTGDDVAIKVIKKDHVFKRRGMMEQIEREIAVMRLLRHPNVVELREVMATKKKIFFVMEYVNGGELFEMIDRDGKLPEDLARKYFQQLISAVDFCHSRGVFHRDIKPENLLLDGEGDLKVTDFGLSALMMPEGLGGRRGSSDDLLHTRCGTPAYVAPEVLRNKGYDGAMADIWSCGIVLYALLAGFLPFIDENVMTLYTKIFKAECEFPPWFSLESKELLSRLLVPDPEQRISMSEIKMIPWFRKNFTPSVAFSIDETIPSPPEPPTKKKKKDLNEKEDDGASPRSFNAFQFITSMSSGFDLSNLFEIKRKPKRMFTSKFPAKSVKERLETAAREMDMRVKHVKDCKMKLQRRTEGRKGRLSVTAEVFEVAPEVSVVEFCKTSGDTLEYYLFCEDDVRPALKDIVWSWQGDDDEDDVTTNDNVDTNDNKINNVS

SEQ ID NO: 26089 - protein, 365 aa, Mangifera indica
QMGLAENQLCFDLIEDWIRKNPYASICTAEGVDEFKEIANFQDYHGLPEFRKAVAKFMGKVRGGRVTFDPDRIVMGGGVTGANEQIIFCLADPGDAFLVPSPYYPAFDRDLGWRTGGEIVPVPCDSSTNFQITRDALEEAYEKAREANINIKGLIITNPSNPLGITLDRDTLKSLVSFIDEKNIHFVCDEIYAATLFCPPKFVSVAEVIQEMDCNLDLIHIVYSLSKDMGLPGFRVGIVYSYNDAVVSCIRKMSSFGLVSSQTQYLLASMLSDDEFVEKFLAESSKRLAKRYHIFTKRLEKVGINCLKGNAGLFFWMDLRHLLQQETVDAEMKLWGTILNDVKLNVSPGSSFHCQEPGWFRVCFA

SEQ ID NO: 26090 - protein, 442 aa, Taxus cuspidata
MEDAGWKNLNVKSSDPVMVKPAIPLPKTVLHLSVVDGLPVVRGNIFNSLIVYNASDKISADPAKVIREALCKVLVYYFPLAGRLRFNENGELEVDCNGEGAAFVEAMVDCNLSVLGDLDDLNPSYEDLLYALPLNTDIVNLYPLVVQVTRFACGGFVVGGSFHHSICDGPKALVNFCKALPDGRGKDKLSCEPIWNRELLKPEDPIHLQFYHLYSLCPSGPPIEKWVHASLVINPATIKCLKQSIMEECNEVCSSFEIMTALAWKARTKAFQIPQTQNVKLLFAVDMRKVFNPPFPKGYYGNAIGFACAMDNAHDLINGSLLHAVNIIRKAKAYLFEQCSKSSVAVNPSALDVNAGQESVVALTDWRRLGFNEVDFGWGDAVNVCPIQRMTNGLVMPNYFLFLRPSEDMPDGVKILMCMDSSMVKSFKFEVEDIINKYVTTV

SEQ ID NO: 26091 - protein, 508 aa, Arabidopsis thaliana
MEIVIASLALVVVLWCIWRILEWVWLKPKMLESYLRRQGLVGTRYTPLVGDVRRSFSMLKEARSKPMKPTDDLISLVMPYSFHMLNTYGKTFFTWSGPIPAITIMNPQLIKEVYNKFYDFEKTHTFPLTSLLTDGLANADGDKWVKHRKIINPAFHFEKIKNMVPTFYKSCIEVMCEWEKLVSDKGSSCELDVWPWIVNMTGDVISRTAFGSSYKEGQRIFILQAELAHLIILALGKNYIPAYRHFPTKNNRRMKTIVKEIQVILRGIISHREKARDAGEAPSDDLLGILLKSNSEQSKGNGLNMEEIMEECKLFYFAGQETTSVLLAWTMVLLSQHQDWQARAREEVMQVFGHNKPDLQGINQLKVMTMIIYEVLRLYPPVIQMNRATHKEIKLGDMTLPGGIQVHMPVLLIHRDTKLWGDDAAEFKPERFKDGIAKATKNQVCFLPFGWGPRICIGQNFALLEAKMALALILQRFSFELSPSYVHSPYRVFTIHPQCGAHLILHKL

SEQ ID NO: 26092 - protein, 442 aa, Taxus cuspidata
MEHAVWKDLNVKSFDPVMVKPSIPLPKTVLHLSTVDNLPVLRGNLFNSLIVYKASDKISADPVKVIREALSKVLVYYFPFAGRLRYKENGDLEVDCNGEGAAFVEAMVDCNLSVLGDLDDLNPSYEDLLFALPQNTDIVDLHLLVVQVTRFACGGFVVGVSFHHSICDGRGAGQFLQSLAEIARGEDKLSCEPIWNRELLKPEDPIHLQFYHLYSLPPSGPTFEEWVHASLVINPATIKHMKQSIMEECNEVCSSFEIVAALTWRARTKALQIPQTQNVKLLFAVDMKKSFNPPFPKGYYGNAIGFACAMDNAHDLINGSLLHAVNIIRKAKAYLFEQCSKSSVAVNPSALDANTGQESVVALTDWRRLGFNEVDFGWGDAVNVCPVQRMTNGLVMPNYFLFLRPSEDMPDGIKILMCMASSMVKSFKFEVEDMINKYVPAV

SEQ ID NO: 26093 - protein, 514 aa, Arabidopsis thaliana
MEISVACVTVSVVVVVVSWWVWRTLQWVWFKPKMLESYLRRQGLAGTPYTPLIGDLKRNVNMLTEATSKPIKLTEDITPRVLPHPFQMLKTHGRTFFTWLGPKPTITIMDPELIKEVFNKVYDYPKAQTFLLGRLIATGIINYDGDKWAKHRRIINPAFHIEKIKNMVPAFHQSCSDVVGEWSKLVSDKGSSSCEVDVWPWLVSMTGDVISRTAFGSSYKEGQRIFELQAELVHLILQAFWKVYIPGYRYLPTKSNRRMKAAAREIQVILKGIVNKRLRAREAGKAAPNDDLLGILLESNLGQAKGNGMSTEDVMEECKLFYFAGQETTSVLLVWAMVLLSHHQDWQARAREEVKQVFGDKEPDTECLSQLKVMTMILYEVLRLYPPVTHLTRAIDKEMKLGDLTLPAGVHISLPIMLVQRDPMLWGTDAAEFKPERFKDGLSKATKSQVSFFPFAWGPRICIGQNFAMLEAKMAMALILQTFTFELSPSYVHAPQTVVTIHPQFGAHLILRKL

SEQ ID NO: 26094 - protein, 616 aa, Mycobacterium avium subsp. paratuberculosis K-10
MAAPTTLLRLATAGSVDDGKSTLIGRLLYDSKAVMEDQWAAVEQTSKDRGHDYTDLALVTDGLRAEREQGITIDVAYRYFATPKRKFIIADTPGHIQYTRNMVTGASTAQLVIVLVDARHGLLEQSRRHAFLASLLGIQHIVLAVNKMDLIGWDREKFESIRDEFHAFAARLDVHDVATIPISALHGDNVVTKSDQTPWYEGPALLSHLEEVYIAGDRNLVDVRFPVQYVIRPHTHEHQDHRSYAGTVASGVMRPGDEVVVLPVGKRTRITAIEGPNGPVQEAFPPMAVSLTLADEIDISRGDLIARTHNQPRIAQDFDATLCWMADNTTLEPGRDYVIKHTTRTTHARVTGLDYRLDVNTLHRDKTATALKLNELGRISLRTQVPLLLDEYTRNPSTGSFILIDPHTNGTVAAGMVLRDASAQAASPNTVRHKSSAIAAARPRGKTVWFTGLSGSGKSSVAMLVEQKLLEKGAQAYVLDGDNLRHGLNADLGFSMADRAENLRRLAHVAALLADCGNVVLVPAISPLAEQRELARKVHADAGFDFIEVFCDTPIEECEKRDPKGLYAKARAGEITQFTGIDSPYQPPANPDLRLIPDGTVEEQAQRVIDLLESRG

SEQ ID NO: 26095 - protein, 270 aa, Moorella thermoacetica ATCC 39073
MRLSEMNLPRFPLLSEAETDELLRRAKAGDKEARERLINCNLKLVFNLVQRFEKRNYELEDLFQIGTIGLIKAIDKFDLSYKVRFSTYAVPMILGEIRRFLRDDSAVKVSRSLKETAFKVNRTREELAKKFGREPAIGEIAEALDLSREEIIAALEAVQMPSSIHDTVYQDDGDPIYVLDQLASEDGEEPEWLDKIALKEVLRQLPEKHRRVLVLRFFQDKTQAEVAARMGLSQVQISRIERQALQRIRELLQAEGSWDGDSVPLPGCRE

SEQ ID NO: 26096 - protein, 245 aa, Zea mays
NGAQKLLGILIAIGEAVAYVLSGMYGSVSQLGTGNAILIILQLFFAGIIVICLDELLQKGYGLGSGISLFIATNICENIIWKAFSPTTINSGRGAEFEGAVIALFHLLITRTDKVRALREAFYRQNLPNVTNLLATVLVFLIVIYFQGFRVVLPLLYRKYSGNFLVNLLGMWKESEYSGHSVPVGGLAYYVTAPSSLADVLANPFHALFYVVFMLSACALFSKTWIEVSGSSAKDVAKQLKRKVL

SEQ ID NO: 26097 - protein, 475 aa, Neurospora crassa
MSYPGYPPASPYGHHAEPPPQGGGYYQQPPPQQHHQQPPYGGPPPHAHYNTYQQPQQGYGQPPPGPPPGQYGAPPPQPYGAPAHSPPPGTYGAAPPPSPSYYPLGPPPAGYGAPPPHGYGQPPGPPPQQSYGAVPPTPTAYTPQPYAVQYPPTPPSPGYGPAMNIPWNPDPDADRLRKAMKGWGTDEKELIRVLADKDPFQINMLRDAFQRRHRRDLIADIKSETSSWFEEGLVMLARGPLLNDVHMLFNAMDGAGTNEDILNDILLRRSNADLKAIKAEFSRVCHRPLEEMVRGELSMKTERHFMIVLGATRAEDSAPVVKADIDRDVDDLYNATEGKIGTDEMRVCSILSLRNDNQIRAISYEYRQKYARDLDTVIQKEFSGHMKDALLIQLRHGTDKYMLQARLLEDAMAGMGTKDRLLTSRLVRAHWDRNNMRNVRNAYEQRYKKKLAKRVQGETSGDYQRLLMAICGEPI

SEQ ID NO: 26098 - protein, 185 aa, Brassica napus
MSCTATDLAVLLGPNATAAADYICGQLGTVNSKFTDVAFAVDNTYLLFSAYLVFSMQLGFAMLCAGSVRAKTTMNIMLTMTNVLDAAAGGLFYYLFGYAFAFGSPSNGFIGKHNFGLKDFPSASADYSNFLYQWAFAIAAAGITSGSIAERTQFVAYLIYSSFLTGFVYPVVSHWFWSVDGWASP

SEQ ID NO: 26099 - protein, 175 aa, Capsicum chinense
MEGESTLVMVAVSESTINGYPHASISSKGAFEWTLNKIVRSNTSGFKLLFLHVQVPDEDGFEDMDSIFASPEDFKGMKNRDKIRGLHLLECFVNRCHEIGVPCEAWTKKGDPKEIICHEVKRVQPDLLVVGCRGLGPFQRVFVGTVSEFCVKHAECPVVTIKRSAAETPQDPIDD

SEQ ID NO: 26100 - protein, 309 aa, Rhodospirillum rubrum
MGLLIDGQWHDHWYDTAASGGRFERQPSAFRDKVGDRGFPAEAGRYRLYVSYACPWAHRTLIARALKGLEDALPVTVVEPLMLENGWELAEGADPLEGARFLHQLYTRAKADYSGRVSVPVLWDSQTATIVNNESAEILRMIDSAFGALASGPSLYPEDKREEIDAINAWVYDAINNGVYKAGFATTQAAYEEAVTALFAALARVEAILSERRFLVGDQPTEADWRLFTTLIRFDCVYVGHFKCALRRISDSPVLFAYLRDLYQVPGIAQTVRFDHIKTHYYASHRTINPTGIVPLGPDIDFTAPHGRG

SEQ ID NO: 26101 - protein, 547 aa, Rickettsia rickettsii
MATKLIKHGSKAREQMLEGIDILADAVKVTLGPKGRNVLIEQSFGSPKITKDGVTVAKSIELKDKIRNAGAQLLKSAATKAAEVAGDGTTTATVLARALAREGNKLVAAGYNPMDLKRGMDLAVNAVVEEIKKSSKKINSQEEIAQVGTISSNGDKEIGEKIAKAMEEVGKEGVITVEEAKNFSFDVEVVKGMMFDRGYLSPYFVTNSEKMVAELENPFILLFEKKLSNLQPMLPILEAVVQSQRPLLIIAEDVEGEALATLVVNRLRGGLKVAAVKAPGFGDRRKAMMEDIAILTKGELITEDLGMKLENVSIKSLGTAKRVTISKENTVIVDGNGDKKNIEDRVLQIKSQIAETTSDYDKEKLQERLAKLSGGVAVLKVGGATEVEVKERKDRVEDALAATRAAVEEGVVAGGGVTLLHASQPLTKLKVENKDQQAGIEIVIEALKDPLKQIVENAGENGGVVVGKLLEHKDKNYGFNAQDMQYVDMIKAGIIDPAKVVRTALQDAASVASLIITTETLIVDEPSDKAEPMPMRGGMGGMGGMDF

SEQ ID NO: 26102 - protein, 588 aa, Staphylococcus epidermidis ATCC 12228
MAEKKIIVVGGGLAGLMSTIKAAEQGAHVDLFSIVPVKRSHSVCAQGGINGAVNTKGEGDSPWIHFDDTVYGGDFLANQPPVKAMADAAPKIIHLLDRMGVMFNRTKEGLLDFRRFGGTLHHRTAFAGATTGQQLLYALDEQVRSFEVDGLVTKYEGWEFLGIVKDEEDAARGIVAQNMTTSEIQSFGSDAVIMATGGPGIIFGKTTNSMINTGSAASIVYQQGAIYANGEFIQIHPTAIPGDDKLRLMSESARGEGGRIWTYKDGKPWYFLEEKYPDYGNLVPRDIATREIFDVCINQKLGINGENMVYLDLSHKDPHELDVKLGGIIEIYEKFTGDDPRKVPMKIFPAVHYSMGGLYVDYDQMTNIKGLFAAGECDFSQHGGNRLGANSLLSAIYGGTVAGPNAIKYVENVEKSYTDLDDSIFEARVKEEKERFDHLLNMRGTENAYKLHRELGEIMTANVTVVRENEKLLETDKKIQELMKRYEDIDMEDTQTWSNQAVFFTRQLWNMLVLARVITIGAYNRNESRGAHYKPEFPERNDEEWLKTTMARYKGRSEKPEFTYEPVDVSLIPPRKRDYTSKSKGGNK

SEQ ID NO: 26103 - protein, 215 aa, Rhizobium leguminosarum bv. trifolii
AAIFFAGTPILESAMVYPLAICGACILTSIAGTFFVKLGTNNSIMGALYKGLIATGVFSVAGLAVATYATVGWGTIGTVAGMEITGTNLFFCGLVGLVVTALIVVITEYYTGTNKRPVNSIAQASVTGHGTNVIQGLAVSLESTALPAIVIVGGIIGTYQLGGLFGTGIAVTAMLGLAGMIVALDAFGPVTDNAGGIAEMAGLDPDVRKRPTRWM

SEQ ID NO: 26104 - protein, 455 aa, Oenococcus oeni PSU-1
MVSELEEITMKNQQYDYDVLYIGSGHGTFDGAIPLAAKGFKVGIVEYDLVGGTCPNRGCNAKITLDAPVALQRQFENLNGVIEGEAKINWSANLTHKQEVIGKLPDMIAGLAKSVHIDILSGHGVLDDPHTVLVDGTPKTAEKIVIATGLRPHRLDISGSELAHDSSDFMNLSAMPKRLTVIGSGYIAMEFATMANAAGSEVTVITHGNRALRKFNQDFVEKIIDDLQKRGVKFVRNTEVTSFEKTGTALTVNAEDNFQLETDWILDATGRIPNVEKIGLDKLGVEYNKNGVVVNDHLQTNVPNIYASGDVIDKIQPKLTPTAVFESTYLMHQFAGDSSSAIDYPAIPSVVFTSPRIAQVGVTPEEAKKNPDKYTIETHHTPDDWYRQVDKEQLGDNALIFDKEHHLVGASEFSDKADDAINTLLPAIEFKLGPEQLGRLIYLFPSISSSAAGQL

SEQ ID NO: 26105 - protein, 169 aa, Rhizobium leguminosarum bv. trifolii
GSAGLGALVLFAAYANDLSYFAANGDTYPYFKDIGEISFSLANPYVVAGLLFGGLIPYLFGGIAMTAVGKAASAIVEEVRRQFREKPGIMAGTEKPDYGRAVDLLTKAAIREMVIPSLLPVLAPLVVYFGVLLISGSKAFAFAALGAYLLAVIMNRVLVAICMTLVGSS

SEQ ID NO: 26106 - protein, 263 aa, Ralstonia eutropha JMP134
MRTLIEITLTDKDGGTHLHMRHSGFPDAATRDSHDNGWQSVFNNLSDYLDAEGSAGTLTVYGDARSTYVRTVRLALEEKGVRYTLKPVPPHSDELLSHNPFGRIPAFSDGPIDFYETRAILSYINEVFGGPNLIPQTGPTARARCEQWISLINCHAYDAMVRRYVLHYVFPKGKDGQPDRAVIDAALPDIEKQLDVLEQAYGGRDFLVGNALSMADLFFAPIVEYLGRFPESAAMLETRPNIRHAHAIMRARPSYAATQPELG

SEQ ID NO: 26107 - protein, 197 aa, Bacillus cereus ATCC 14579
MDTNITWHTASVSKDERRVKNGHHSFVIWFTGLSASGKSTVANAVARKLFEKNIGNYVLDGDNIRHGLNKDLGFSESDRMENIRRIGEVAKLFVDQGAVVLTAFISPFRVVRKQVRDLLAADEFIEIFVKCPIEECEKRDPKGLYKKARKGDIKDFTGIDSPYEEPEQAELIVETHKYSIEECAEQIVKYLQERSFI

SEQ ID NO: 26108 - protein, 207 aa, Agrobacterium tumefaciens
AAIFFAGTPILESAMVYPLAICGACILTSIAGTFFVKLGTNNSIMGALYKGLIATGVFSVAGLAVATYATVGWGTIGTVAGMEITGTNLFFCGLVGLVVTALIVVITEYYTGTNKRPVNSIAQASVTGHGTNVIQGLTVSLESTALPAIVIVGGIIGTYQLAGLFGTGIAVTAMLGLAGMIVALDAFGPVTDNAGGIAEMAGVDRDV

SEQ ID NO: 26109 - protein, 199 aa, Saccharomyces cerevisiae
MAKYIVAALQIGSCPGSTKDTLKKILSYEKEIKESGAKLVVIPEATLGGYPKGSNFGVYLGYRLQEGREEYAKYLAEAIEIGNGEKYPEISQLCALSKATDASLCVGCIERDGTTLYCTMVYIDPKDGYVGKHRKLMPTAGERLIWGQGDGSTLPVVDTAAGKIGGAICWENIMPLLRYAMYKKGVEIWCAPTVDARPI

SEQ ID NO: 26110 - protein, 221 aa, Agrobacterium tumefaciens
AGLGALVLFAAYANDLSYFAANGDTYPYFKDIGEISFSLANPYVVAGLLFGGLIPYLFGGIAMTAVGKAASAIVEEVRRQFREKPGIMAGTEKPDYGRAVDLLTKAAIREMVIPSLLPVLAPLVVYFGVLLISGSKASAFAALGASLLGVIINGLFVAISMTSGGGAWDNAKKSFEDGFIDKDGVRHVKGSEAHKASVTGDTVGDPYKDTAGPAVNPGHQD

SEQ ID NO: 26111 - protein, 396 aa, Ustilago maydis 521
MSQAATTPVYIPADQLHNDVRDKDGNSASSHHFQRAHRKNGELELGVTEVLQGRTDVPSAQVAQSAGLSNWSGRVRLEQSMPKLVPALIAEFMGTMFYCLAGEMATAGVLVTTYAGSPQGNLTMIGFAYAFGITFAIIVCATTSGGQFHPAFTIAQVVFKGFPIKLAPLYICAQVVGAMVASLIVVGSWHDELMKITHLLKATGKTATIFTAEGPAGAIALFPTPGRSMGSIFVNEFFANILVGMIVWANLDAANPFTGPQAAPYTIGLGFAVVVWCFSSSNVVANSARDIGARLVCSMFWGSECFPSRYSALAALTNIPATLLGVGLYTFFLSDTRRPPATVALNHLHEEHVRSIERAETLHAEILDEKIAQTLSRGGDATALQKQRTNLGVKNF

SEQ ID NO: 26112 - protein, 353 aa, Neurospora crassa
MRGILQAARTASISRAPKYNLLVCFDAFETLYAPKEPVHKTYGQFARDNGLHHASDDVVAVYLHDRITTAAKEYPNYGKHVKGMDPEAWWMKNIFVDVEPSLSNAAHKKQLDDLGHKLFQHFSTRDAYKTAPNMPKLLQSLKHHRSNGKLDSPSIDHVVLGVISNSDDRVGGILSSLGLDVSPLRFQRESKQDTHFESARPVDGKSYDIDFTVMSYDVEESKPHKVMWQAGEMLARRAVTHELGRFDESVPWLKLYVGDDIKKDVASAWGCGWNAVLLKEFITEHPPDERLESLEELLTMPVTQLLTGQPRMFTVNKLETLVEWIVKRGLEVPAGSTGADSSEERFKLVEEIE

SEQ ID NO: 26113 - protein, 487 aa, Cryptococcus neoformans var. neoformans JEC21
MNQPSTLAQAHPDHPTLAELVADRPDPATATPLGHDIASPQHTTTPTSMSDADSSPASPEAPRRPGGLSEGPNARSKSVTVASGEDTFGALNCHPGPGSAAISNSNLPADSFRVGVSEDRNRRCRRTMEDAHSFVYDFAGVKGQGYFAVFDGHAGKHAAEWCGQNFHEYLLDGLLIEPDTPVPDLMNKTFHLVDKRLSHLAHAAGTSSGCTAVTAFLRVEEMDDNDSFRKGFTNPGLQPRGLWEGKGEDELESQTSLQPSSRRSSMGGGTGGQMGGASAPGVNGRTGSLARRLSSKKIRDFVKGLTGGMEKNFDEAITEDEGVISAADGTRVEAIEPKSEKGVRRVLYTANVGDARAVLCRGGKAVRLTYDHKGSDAQEAKRITDAGGFVMNNRVNGVLAVTRSLGDASMKEFVVGAPYTTETTLDEQDEFLIVACDGLWDVCSDQEAVEIVHLVTDPQEASKRLLDHAMSNFSTDNLSVMVVRFNH

SEQ ID NO: 26114 - protein, 457 aa, Magnaporthe grisea 70-15
MSAKATRGSTSSSTPQNSSSSSQSQSQSTAVSRIRNIANHMMASPSTIFTADVVPQAPEDPLFGLMAAYRADESPDKVDLGIGAYRDDNAKPWVLPVVKKADEIIRNDPSANHEYLPITGLASFTSKAGELMLGADTPAKGRVTSVQTISGTGALHLGALFLQKFYRKVYSNSVVHLSNPTWANHNQIFSNVQVPTTTYPYFDKGTKGLDFEGMKATLNNAAEHSIILLHACAHNPTGVDPTQGQWREIAEIMKAKKHFPFFDCAYQGFASGDLDRDAWAVRYFVEQGFELVIAQSFAKNFGLYGERAGCFHYVSAPAAEAAETTKRVASQLAILQRSEISNPPIYGARVASIVLNDPALMSEWRENLRTMSGRIITMRNELRAKLEALGTPGTWNHITDQIGMFSFTGLTEAQVLKIRSDYHVYMTKNGRISMAGLNSRNIDYFAKAVDKVVRETQ

SEQ ID NO: 26115 - protein, 366 aa, Cryptococcus neoformans var. neoformans JEC21
MTVEIPSSNRKARIGVMGVGRMGKRHARNIAEFAPRAELVAVSDPYPEALEWAKANLPSTVKTYSSSEELINDPDVEGILIATETAFHAEYAIKVIEAGKHALIEKPISVDIELTKPVVAAAKKRPDLKVMVAFSRRFDASYQEAAKRIEDGQLGSAYLIKSCTNDLYDPTGYFLNYAKKSGGIFMDCGIHDIDIGRYLLNVGNTDGLKNPAKQVSKVFATGLNTVYPELAEMEDCDNALGIIEFENGSKLNIHLSRTSILGHDVVCEVFGTKGKFVINAVPNISRVEIRDEHGVRTESHPSYYERFFEAFKTEVQTFSSCILDDTPVPTPPHDALEAAQIATALTHSFRTGNPVYFDDNGEPILK

SEQ ID NO: 26116 - protein, 666 aa, Burkholderia mallei ATCC 23344
MTSPTLSFAQNRPLDVICVGRVAVDLYAQQIGARLEDASSFAKYLGGSSGNIAFGCARLGLKSAMLSRVGHDHMGRFVRETLAREGCDTSRLRTDTERLTALVLLGLKDRDTFPLIFHRENCADMALDEDDFDEAFIASSKALLITGTHFSTEQVMRASRRALDYARRNQVRTVLDIDYRPVLWGLTGKADGETRFIANEGVTAHLQRILPLFDVVIGTEEEFRIAGGKDALLDALAMVRAVTSAALVVKRGPLGCSIVDGDVPATLDALPVIRGVEVDVMNVLGAGDAFASGFLSQWLRGRPFADAARAANACGALVVSRHGCSPAMPTPAELAYFLAEAKRDPARMRRPDLDATLARLHRVTPARTPRDEVLGFAFDHRNQFFELARQTGASVARIDALKRLFVEAVAQTEAQLGLAGRIGVLIDDRYGQDALNDATGRGWWVGRPVELPGSLPLEFDHGRSIGTTLASWPLEHVAKCLVQYHPDEAAEPRIEQETQLRALYDAVQASGHELLLEVIPPRRADLPQAADTVYRALKRLYNLGIHPEWWKLAPLDAAQWQAIDALIAERDPYCRGVVLLGLSAGVDELVGGFGAAAASATCRGFTVGRTIFHEPSRAWLAGEIDDAELIARVRRTFETLIGAWRAARTDARARGRHAGAAPRVAA

SEQ ID NO: 26117 - protein, 970 aa, Zea mays
MASTKAPGPGEKHHSIDAQLRQLVPGKVSEDDKLIEYDALLVDRFLNILQDLHGPSLREFVQECYEVSADYEGKGDTTKLGELGAKLTGLAPADAILVASSILHMLNLANLAEEVQIAHRRRNSKLKKGGFADEGSATTESDIEETLKRLVSEVGKSPEEVFEALKNQTVDLVFTAHPTQSARRSLLQKNARIRNCLTQLNAKDITDDDKQELDEALQREIQAAFRTDEIRRAQPTPQDEMRYGMSYIHETVWKGVPKFLRRVDTALKNIGINERLPYNVSLIRFSSWMGGDRDGNPRVTPEVTRDVCLLARMMAANLYIDQIEELMFELSMWRCNDELRVRAEELHSSSGSKVTKYYIEFWKQIPPNEPYRVILGHVRDKLYNTRERARHLLASGVSEISAESSFTSIEEFLEPLELCYKSLCDCGDKAIADGSLLDLLRQVFTFGLSLVKLDIRQESERHTDVIDAITTHLGIGSYREWPEDKRQEWLLSELRGKRPLLPPDLPQTDEIADVIGAFHVLAELPPDSFGPYIISMATAPSDVLAVELLQRECGVRQPLPVVPLFERLADLQSAPASVERLFSVDWYMDRIKGKQQVMVGYSDSGKDAGRLSAAWQLYRAQEEMAQVAKRYGVKLTLFHGRGGTVGRGGGPTHLAILSQPPDTINGSIRVTVQGEVIEFCFGEEHLCFQTLQRFTAATLEHGMHPPVSPKPEWRKLMDEMAVVATEEYRSVVVKEARFVEYFRSATPETEYGRMNIGSRPAKRRPGGGITTLRAIPWIFSWTQTRFHLPVWLGVGAAFKFAIDKDVRNFQVLKEMYNEWPFFRVTLDLLEMVFAKGDPGIAGLYDELLVAEELKPFGKQLRDKYVETQQLLLQIAGHKDILEGDPFLKQGLVLRNPYITTLNVFQAYTLKRIRDPNFKVTPQPPLSKEFADENKPAGLVKLNPASEYPPGLEDTLILTMKGIAAGMQNTG

SEQ ID NO: 26118 - protein, 611 aa, Magnaporthe grisea 70-15
MSQFNHFKIKRAANALSRKGSDSSFNPFAHIQWRKERSQTFPVDVERGEGAGGGRARRDDGEDDIDHSPIVHVSTAPVSGRGQNERATDQESIGAAPTATNSEKQSQEPVDASRDDNKTLTGLSPESAENGLRQRRPEPKLDTTVDGLAPSSSGAETGSDADNGKQKKSSRFIKHVEPKEPFTIANQLQRTFLSSWINILLFAAPAGIALHFTSVSPIVIFVVNFIAIIPLASMLGFATEEIALRTGETLGGLINATFGNAVELIVAIIALMEGEVVIVQTSLIGSILSNLLLVLGMCFFFGGLRRREQFFNETVAQTAASLLALAVAGVIVPTVFDRASNTPDHDVALLSRGTAIILLFVYAGYLFFQLHTHQEVFGEESQKVPAKPFRNHSPNPARNGIAAGLAGPGRGLIAQSISPSGEEGREKLSQMLKEPGRVAAAAEEEDDSEEPQLHFFVALALLAGCTVVIAFCAEFLVDSIDYVTSQGGISKEFLGLILLPIVGNAAEHATAVTVAIKDKMDLAIGVAIGSSMQVALFLIPLLVVIGWGKNMDAMGLSFDIFQVAVMFVAVLLVNYLISDGKSHWLEGMLLMCLYAIIAVCSWWYPTPQPTT

SEQ ID NO: 26119 - protein, 358 aa, Oryza sativa (japonica cultivar-group); identical to SEQ ID NO: 1222

SEQ ID NO: 26120 - protein, 175 aa, Magnetospirillum magnetotacticum MS-1
MMVDGRRTRIRSFPIGIDVAGFKEAADKAGSNKVVRETMAGLRTRKLLIGVDRLDYSKGVPERMEAVDRFFASNPDQRGNVVYIQITPKSRSEVPEYEQLAREVNEKVGDINGMLGEPAWTPIQYVTKAYPRPVLAGLYRAARVGLVTPMRDGMNLVAKEYVVAQSEEDPGVLVL

SEQ ID NO: 26121 - protein, 181 aa, Zea mays
  misc_feature (98)..(98): Xaa can be any naturally occurring amino acid
  unsure (1)..(181): unsure at all Xaa locations
QRPSGRYAAEIRDPAKKSRVWLGTYDTAEDAARAYDAAAREYRGAKAKTNFPYPSCVPLSAAGCRSSNSSTVESFSSDAQAPMQAMPLPPSLELDLFXVRFPFGSIPVTHPYYFFGQAAAAAAEAGCRVLKLAPAVTVAQSDSDCSSVVDLSPSPPAAVSARKPAAFDLDLNCSPPTEAEA

SEQ ID NO: 26122 - protein, 165 aa, Magnetospirillum magnetotacticum MS-1
MTRYVFITGGVVSSLGKGLASAALAALLQARGYRVRLRKLDPYLNVDPGTMSPTQHGEVFVTDDGAETDLDLGHYERFTGLPASRADNVTTGRIYLDIITKERRGDYLGATIQVIPHVTNAIKAFVLDGNEDYDFVLVEIGGTVGDIEGLPFFEAIRQIGQERPR

SEQ ID NO: 26123 - protein, 217 aa, Metarhizium anisopliae
SAPSADAPMYVMGVNEKTYDGKADVISNASCTTNCLAPLAKVIHDKFTIVEGLMTTVHSYTATQKTVDGPSGKDWRGGRGAAQNIIPSSTGAAKAVGKVIPDLNGKLTGMSMRVPTANVSVVDLTARIEKGASYDEIKEAIKEAANGPLKGILAYTEDDVVSSDMNGNTNSSIFDAKAGISLNKNFVKLVSWYDNEWGYSRRVLDLLAYIAKVDAGK

SEQ ID NO: 26124 - protein, 183 aa, Lactococcus lactis subsp. lactis Il1403
MSTERAIFAGGCFWCMVEPFEERPGILAVTSGYTGGHIEYPTYDQVLSKASGHTEAVEILFDNELISYDELLDIYWSLIDPTDADGQIYDRGANYRPVIFVESEEQRIAAQKSKIALEKSGIWDKPIVVPIEEAKTFWPAEEYHQQYYKKDPKRYQAMHKARERYLALQRFKGKFKFLRKNTR

SEQ ID NO: 26125 - protein, 274 aa, Pseudomonas putida KT2440
MQRLSTRTGLDLPAIGLGTWPMTGSECTQAVRQALDVGYRHIDTATAYENEAAVGQALRDSDVPREQIHLTTKVWWDRLEPKAMRQSLEDSLRALGTEQVDLFHIHWPGTDWDLARSIDTLVALRDEGKARHIGVANFPLGLLRQVVETLGAPLSAIQVEYHVLLSQQPLLDFARGHDLLLTAYTPLARGQAAAQPVIQAIARKHGVLPSQVALKWLLDQDGVAAIPKASSRENQLANLAALTVPLDDEDRTAIAGLPKDQRVVSPPFAPDWNS

SEQ ID NO: 26126 - protein, 557 aa, Nostoc punctiforme PCC 73102
MANLTDFKLFAPRNKGAALIGSFSDWKEIPMSKSEDGYFRTKIKLEDGVYQYKFRIQTKSPNFAPDEWIDVIDPKATEVNETEKYGIVRIQDGQRIVDSYFWQHDEMPLPDNRELVIYEMHVADFTGDEVDSNERGKYLGIIAKLDYLCELGINAIELMPVNEYPGDYSWGYKVRHFFATESSYGSTEDLKRLIDECHGRGIRVFMDGIYNHTDEECPLILIDRNYWYYEHKHYPEDPANYWGPEFNYDFYDKNLNIQPAWEYIGDVVRFWIQEYHIDGIRFDAVRQLANFEFLNWLTKQAKNHAAPKQFYNIAEHIPDTNTVVKPDGPLDACWHESFRYFLVPYICGKSFELEQLKQILDPKQQGYAIATNVINYLATHDRERLLRELGNCGIFDAAAFERAKLAAVLLMTAMGIPMLWMAEEFGEYQQKSEDVTKPQKITWSLLLDDQNYDLFEYYQKLITLRQQTPALQSDNIKFFYENADDKVLAYSRWDEQNSHVVVVVNFSDRSLNQYKISDFPTTEDWRDWVGNREVKSGEDGLVTDLPSYTAKIFVLQT

SEQ ID NO: 26127 - protein, 314 aa, Capsicum annuum
MASLTVPAHVPSAAEDCEQLRSAFKGWGTNEKLIISILAHRTAAQRKLIRQTYAETFGEDLLKELDRELTHDFEKLVLVWTLDPSERDAHLAKEATKRWTKSNFVLVELACTRSPKELVLAREAYHARYKKSLEEDVAYHTTGDHRKLLVPLVSSYRYGGEEVDLRLAKAESKILHEKISDKAYSDDEVIRILATRSKAQLNATLNHYKDEHGEDILKQLEDGDEFVALLRATIKGLVYPEHYFVEVLRDAINRRGTEEDHLTRVIATRAEVDLKIIADEYQKRDSIPLGRAIAKDTRGDYESMLLALLGQEED

SEQ ID NO: 26128 - protein, 188 aa, Tradescantia reflexa
MGRGKIEIKRIENSTNRQVTFSKRRNGIIKKAREISVLCESAVSVVIFSSSGKLFEYCSPNITLPKILEKYQTDSGHKLWDEKHERLSAEIDLIKKENDNMQIELRHLKGEDINSLQPKDLIPIEDALQNGYIKVREKQMEIWRQHKKNEKELEDEHKELTYLLHQQHLAMTGKFGDLELGYHQMRGK

SEQ ID NO: 26129 - protein, 535 aa, Ricinus communis
MSVTCSKENRHAFFSSSTPGTTSSHSRTRRRPKYNSISTPASQSFFNSLSSSGSSFQQLMSSCLAFEPCSHYYSSNGLFPNTPLLPKRHPRLHHRLPRSGEAMAVAVQPEKEVATNKKPLMKQRRVVVTGMGVVSPLGHDIDVYYNNLLDGSSGISQIDSFDCAQFPTRIAGEIKSFSTDGWVAPKLSKRMDKFMLYMLTAGKKALADGGITEDMMDELDKARCGVLIGSAMGGMKVFNDAIEALRISYRKMNPFCVPFATTNMGSAMLAMDLGWMGPNYSISTACATSNFCILNAANHIIRGEADIMLCGGSDAAIIPIGLGGFVACRALSQRNDDPTKASRPWDMNRDGFVMGEGAGVLLLEELEHAKKRGANIYAEFLGGSFTCDAYHMTEPRPDGVGVILCIEKALARSGVSKEEVNYINAHATSTPAGDLKEYEALMRCFSQNPDLRVNSTKSMIGHLLGAAGAVEAIATIQAIRTGWVHPNINLENPEEGVDTKVLVGPKKERLDIKVALSNSFGFGGHNSSIIFAPYK

SEQ ID NO: 26130 - protein, 557 aa, Lactobacillus gasseri
MKMNDWKKKAIVYEAYVQSFNDSDGDGIGDLPGLIEKLDYIKNLGANVIWLTPIFKSPLVDNGYDIADYEAINPIYGSMNDFKKLLQQAHERDLKIVMDLVVNHTSDQHKWFKESKKNRNNKYSDYYIWRDPKEDGSAPTNLGSAFGGSAWTYVPERNQYYLHLFAKQQPDLNWDNPQVRNDIYQMMKFWLDMGVDGFRMDSISFISKPSKFEDAPLEDNKEYGAYYYGSANGPHIHEYLREMNQKVLSKYDVISIGETPHTTAREARLFVEPDRHELDMVFQFEHMHVDYGEFGRYSDVTFKMSDLRNSMTSWQNDLSWNSNYLGNHDQPRIVSRFGNDSKYRKESAKMLAMVSLLQKGTPFIFQGEEIGMTNLHIKNIDELKDLEAHNIYSFLKSKGISDKDALKMVNRKTRDNARTPMQWNKEQNAGFSSGNPWIEVNPNYLEINVKKDLQDSNSIYRFYQKLLKLRNNNQVLLDGNYDLITPEDSAIFAYTRSSDKDKVAVICSFVPYKVKYELPEDFVNKNKVILSNYDDREDMASNTIYLRPYEGVVIKRE

SEQ ID NO: 26131 - protein, 469 aa, Ricinus communis
MQALQSPSLRPSPLTPLHKNTHNAAKRPTKKVSFITASSTNNNTTISAPKREKDPRKRVVITGTGLVSVFGNDVDTYYDKLLAGESGIGLIDRFDASKFPTRFGGQIRGFNSQGYIDGKNDRRLDDCLRYCIVAGKKALEHADLGGDKLSKIDKERAGVLVGTGMGGLTVFSDGVQALIEKGHRKITPFFIPYAITNMGSALLAIELGLMGPNYSISTACATSNYCFYAAANHIRRGEAELMIAGGTEAAIIPIGLGGFVACRALSQRNDDPQTASRPWDKDRDGFVMGEGAGVLVMESLEHAMKRGAPIIAEYLGGAVNCDAYHMTDPRADGLGVSSCIERSLEDAGVSPEEVNYINAHATSTLAGDLAEINAIKKVFKNTSDIKINATKSMIGHCLGAAGGLEAIACVKAITTGWLHPTINQFNPEPSVEFDTVANKKQQHEVNVAISNSFGFGGHNSVVAFSAFKP

SEQ ID NO: 26132 - protein, 341 aa, Shewanella oneidensis MR-1
MKALSKLKAEKGIWLVDAPKPEMGHNDLLIKIKKTAICGTDMHIYNWDEWSQKTIPVPMVVGHEYVGEVVDIGQEVRGFNIGDRVSGEGHITCGHCRNCRAGRTHLCRNTSGVGVNREGSFAEYLVIPAFNAFKIPDDISDDLASIFDPFGNAVHTALSFDLVGEDVLITGAGPIGIMAAAVCRHVGARHVVITDVNEYRLELARKMGATRAVNVAQENLKDVMKELGMTEGFDVGLEMSGVPSAFRAMLDTMNHGGKIAMLGIPGGEMAIDWSKVIFKGLVIKGIYGREMFETWYKMASLIQSGLDISPIITHHYKIDDFQKGFDAMGSGQSGKVILSWD

SEQ ID NO: 26133 - protein, 397 aa, Shewanella oneidensis MR-1
MASTSFYAQINQQLADVKAEGLYKSERIIASPQQTAIQVNHQEVVNFCANNYLGLANHPELIKAAQQGLDSHGFGMASVRFICGTQDIHKQLEASLSEFLGMEDTILYSSCFDANAGLFETLLDAEDAIISDALNHASIIDGVRLCKAKRFRYANNDMADLETQLIAAKAAGARNILIATDGVFSMDGVIANLQGVCDLADKYGALVMVDDSHAVGFVGQNGRGSHEHCGVMGRVDIITGTLGKALGGASGGFTSGKKEVIDWLRQRSRPYLFSNSLAPSIVTASIHVLEMLKSGQALRESVWENSRYFREKMSAAGFTLGGADHAIIPVMIGDAKLASDFANRLLAEHIYVIGFSFPVVPKGQARIRTQMSAAHTREQLDKAIEAFTRIAKEMAII

SEQ ID NO: 26134 - protein, 324 aa, Oryza sativa (japonica cultivar-group)
MDRHEEEAGESPCVPPGFRFHPTEEELVGYYLARKVASQKIDLDIIQELDLYRIEPWDLQERCKYGGHGGDEQTEWYFFSYKDRKYPSGTRTNRATAAGFWKATGRDKPVLSSPSTRVIGMRKTLVFYKGRAPNGRKTDWIIHEYRLQSNEHAPTQEEGWVVCRAFQKPMPNQQQHRLSYGCIPGSYGAGAYAAVPDNYSLLLHHDNPSFAGRPLMSAAASALFANNNNNSVVDHSNILSSESKLHFSDMMPPLESPTIVDGEGYVSQASSCVDVDQQAGIVDWNLLTSLLPPPAHQLFHHLPSASSSKNSNNISSSGFIDDRD

SEQ ID NO: 26135 - protein, 417 aa, Arabidopsis thaliana
  misc_feature (39)..(39): Xaa can be any naturally occurring amino acid
  misc_feature (51)..(51): Xaa can be any naturally occurring amino acid
  misc_feature (68)..(68): Xaa can be any naturally occurring amino acid
  misc_feature (90)..(90): Xaa can be any naturally occurring amino acid
  misc_feature (106)..(106): Xaa can be any naturally occurring amino acid
  misc_feature (129)..(129): Xaa can be any naturally occurring amino acid
  misc_feature (175)..(175): Xaa can be any naturally occurring amino acid
  misc_feature (292)..(292): Xaa can be any naturally occurring amino acid
  misc_feature (302)..(302): Xaa can be any naturally occurring amino acid
  unsure (1)..(417): unsure at all Xaa locations
MSEEKVVRCDHGVVGPTKGARFRPRIISLTPKPFGPVGXNHMIHHPIHMTXKKISKSGVRFFRIGINXEREFALYVSSITNELKIRVAIXRKNKPHRTPGALQDFXDKFCGKIKEEKLSHVFLHNWEVXCPSFALLGVLDAHRRYGGMVTILVIKVSAGPFRQFDSLIGDSKTKXELIHNTEKSQTFVRELVDCGVYVSTLVIFNANEEVYRQIRDTSSHYQSATRSVPADFVKLDQDILSPLTGKKQLYTYENKDFWEQIKTPGKSLKCSALYLSQFRETSPHIFYQGETXDRNPNINVDXVYIRPSVKLHPTAKIGPNVSISANVRVGPGVRLISCIILDDVEIKENAVVINSIIGWKSSIGRWSRVQASGDYNDRLGITILGEAVTVEDEVAVIGSIVLQNKTLNVSVQDDIIL

SEQ ID NO: 26136 - protein, 333 aa, Cryptococcus neoformans var. neoformans JEC21
MQYLRLSLPPFAHNNLAFSPFYDHHLALASGSNFGLVGNGRVHVVKMDQQVAGGLGLVRSWDTADCVYDVAWSEIHENQIAAACGNGAIKLFDLALEGLPIQAWQEHTAEVTSIEWNNIEKELFVTGSWDQSVKIWNPNRQSSILTIPAHAGQIYSSTWSPHSPTIIATCASDGFIRIWDTRILPSPIQEIFPPSAAPNPMSSRSAGEILSCDWNKYTPQLLAFSSQDGGVSTVDLRHVPRNAEKMAVRLVGKHGLPARKVKWDPHNGTRLLSAGYDMTCRVWQTDLPPAAPLRELFSHQNHTEFVMAADWALFDPGLIASAGWDGDLHMYRI

SEQ ID NO: 26137 - protein, 333 aa, Chlamydophila abortus S26/3
MVMHFSTYLLEAFGNQSLPESLYQKFQIYHQNYIDAATRKCSLEKAEELCLQWLKIVIEDLKEPFVFPPYHKKIRSPVDLFDFGKQFFSVLVDDEQSKIHNLHHLDHIQEFIECKDNVILLANHQTECDPQLMYYALGKTHPELLENMIFVAGDRVTSDPLARPFSMGCDLLCIYSKRHINNPPEQKEEKLHHNQKSMKTLKTLLHEGGKFIYVAPAGGRDRKTKDNLLYPAEFQPESIEMFRLLTKASGRPSHFYPFALKTYDILPPPPTVEDTIGEYRAIFFAPIRFSFGEEILLDQLCSEDELSQSDKHSQRALRSKKAFSILTQLYEEL

SEQ ID NO: 26138 - protein, 475 aa, Ralstonia eutropha JMP134
MYQDLALYIDGEFIKGGDRKEQDVLNPATQEVLGKLPHASRADLDRALAAAQRAFESWKKTSPLERSKILRRVGELARERAKDIGRNITLDQGKPLAEAVGEVLVCAEHADWHAEECRRIYGRVIPPRQPNVRQIVVREPIGVCAAFTPWNFPFNQAIRKIVSAVGAGCTLILKGPEDSPSAVVALAQLFHDAGLPPGVLNIVWGVPSEVSTYLIESPIVRKISFTGSVPVGKQLAALAGAHMKRVTMELGGHSPVLVFDDADIEPAAEMLARFKLRNAGQVCVSPTRFYVQEKAYDKFLARFTEVIGSIKVGNGLEDGTQMGPLAHERRVFSMEQFLDDANQRGGKVVAGGSRIGDKGYFFAPTVVTDLPDDAKLMVDEPFGPVAPVTRFKDTAEVLRRANSLPFGLASYVFTNSLKTATEVSNGLEAGMVNINHFGMALAETPFGGIKDSGIGSEGGQETFDGYLVTKFITQV

SEQ ID NO: 26139 - protein, 540 aa, Frankia sp. CcI3
MPKIIAFDEEARRGLERGMNQLADAVKVTLGPKGRNVVLEKKWGVPTITNDGVSIAKEIELEDPYEKIGAELVKEVAKKTNDVAGDGTTTATILAQALVREGLRNVAAGANPLGLKKGIEVAVERVSEELSKQAKEVETKEQIASTASISAGDSAIGGLIAEALDKVGKEGVVTVEESNTFGLELELTEGMRFDKGYISPYFVTDADRQEAVLDDPYILIVNSKISAVKDLLPLLEKVMQTGKPLAIIAEDVEGEALATLVVNKIRGTFKSAAVKAPGFGDRRKAILGDIAILTGGQVISEDVGLKLESTSLDLLGRARKIVVTKDETTVVEGAGDPDQIAGRVSQIRNEIEKSDSDYDREKLQERLAKLAGGVAVIKVGAATEVELKEKKHRIEDAVSNAKAAVEEGIVAGGGVALLQASITAFEKLDLSGDEATGANIVRLALEAPIKQIAFNSGLEGGVVVEKVRNLPTGHGLNAATGEYVDLIGTGIIDPAKVTRSALQNAASIAGLFLTTEAVIADKPEKNPAPAVPGGGGDMDF

SEQ ID NO: 26140 - protein, 222 aa, Bacillus anthracis str. A2012
MKFFIDTANLEDIKKAYKLGVLAGVTTNPSLVAKEGIKFEDRIAEICQAVPKVESVSAEVTPDAVTAEEMIAQAEELIKINGGDEKVTIKLPMTLAGLEACRYLTEKGVKTNVTLIFTVNQALLAARAGATYVSPFLGRLDDISEDGVLLVAKIAELFDVHQLDTQIIAASVRHPDHVTRVAMAGAHIATIPYKVIEQLAMHPLTDQGIEKFAADWAKAPKL

SEQ ID NO: 26141 - protein, 400 aa, Lycopersicon esculentum
RILGLGDLGCQGMGIPVGKLALYTALGGVRPSACLPITIDVGTNNEKLLNDEFYIGLRQRRATGQEYYDFLHEFMSAVKQNYGEKILVQFEDFANHNAFELLAKYRNSHLVFNDDIQGTASVVLAGLIASLKLLGGALCDHTFLFLGAGERGTGIAELIALEISNKTNIPVEETRKKIWLVDSKGLIVSGRKETLQAFKKPWAHEHEPVNNLLDAVKAVKPTVLIGTSGTGRTFTKEVVEAMACMNKRPLIMALSNPTSQAECTAEEAYSWSEGRAVFASGSPFPSFEYDGKLNIPGQANNCYIFPGFGFGLVMSGTIRVDDDMLLAASEALAAQVTEEHYAKGMIYPPFADIRKISAHIAASVARKAYELGVATSLPRPADLVKYAESCMYTPNYRSYR

SEQ ID NO: 26142 - protein, 674 aa, Bacillus anthracis str. A2012
MTQNINQLAVNTIRTLSIDAINAANSGHPGLPMGAAPMAYALWANHLNHNPNHPKWFNRDRFVLSAGHGSSLLYSLLHLAGYDVSIDDLKNFRKLNSKTPGHPEFGHTSGVEATTGPLGQGIANAVGMAMAEAHLAAKFNKDGHSIIDHNTYALVGDGDLMEGVAYEAMSMEGVAYEAMSMAGHMKLGKLIVLYDSNEISLDGELNIAFSEDMQKRVESAHWQYVRVEDGNDVDAITKAIQLAKDNTDQPTLIEIRTVIGYGSPKVAGTNKAHGNPLGLEEATATKQVYGWHYEEDFFVPEEVTAHFNELKQKGIEKERGWNEQFNLYRESNPALADELEKAIIGEVLIEAKDILSFDSEKTISTRVASGEAINHYVKSIPSIFGGSADLSHSTMTDIKGEAVYAVESYAGRNIYFGVREHAMGAAANGLALHGGVKPFVSTFFVFNDYLRPSIRLAALQKLPVTYVFTHDSIAVGEDGPTHEPIEHLAALRAIPGLTVIRPSDANETASAWAYALQQTEGPVVLVLSRQNLPVFHETKANIENLSKGAYVLTQTNENPDVILIATGSEVSLAASAKAKLEEDNVSVRIVAMPSWELFDRQSKEYKESVLPSSVTKRVSLEMGVSLGWERYVGQEGNILSIETFGASGTGAEVMNLFGFTTENVVQITKNVLNS

SEQ ID NO: 26143 - protein, 337 aa, Corynebacterium efficiens
MAIELFYDADADLSIIQGRKVAIIGYGSQGHAHAQNLRDSGVEVVIGLREGSKSAEKAKEAGFEVKTTAEAAAWANLIMILAPDTSQASIFTNDVEPNLNEGDALFFGHGLNIHFDLIKPADNIIVGMVAPKGPGHLVRRQFVDGKGVPCLIAIDQDPTGDAQALALSYASAIGGGRAGIIPTTFEAETVTDLFGEQAVLCGGTEELVKTGFEVLTEAGYEPEMAYFEVLHELKLIVDLMFEGGITNMNYSVSDTAEFGGYLSGPRVINADTKERMKDILTDIQDGTFTKRLIANVENGNTELEGLRAKYAEHPIEETGAKLRDLMSWVKNPLTETA

SEQ ID NO: 26144 - protein, 188 aa, Tradescantia reflexa
MGRGKIEIKRIENSTNRQVTFSKRRNGIIKKAREISVLCESSVAIVIFSSSGKMSEYCSPNTTLPKILEKYQNDSGHKIWEEKHERLSAEIDLIKKENDNMQIELRHLNGEDLNSLQPKDLIPIEDALQNGHVKVREKQMEIWRHHKKNEKELEDEHKELTYLLHHQHLAMTGKFGGLELGYHQARGK

SEQ ID NO: 26145 - protein, 133 aa, GIBBERELLA ZEAE PH-1
MVNPPKQGQPSYELYKKEYDGIFTGLQERATALHKAFSQMEGVECAEPQGSMYLFPTINLPAKAAEAAKAEGRSADEFYCMRLLEATGICVVPGSGFGQKENTLHFRTTFLAPGTEWVGRIVKFHNEFLDKYR

SEQ ID NO: 26146 - protein, 225 aa, Tradescantia reflexa
MGRGKIEIKKIENPTNRQVTYSKRRAGIMKKARELTVLCDAQVSIIMFSSTKKFSEYCSPGTNTKQIFDRYQQACQVDLWSSQYERMQNQLKSLKEVNNGLRREIRQRMGEDLDNMDIDELRGLEQNLHDSVKAVRERKYHVLQTQTETYKKKVKHSSEAYNNLVRALQMREDDPVYGYVDDEASHFEGALALANGGTHMYALRLQPNQPNLHAMEYAPHDLRLA

SEQ ID NO: 26147 - protein, 490 aa, Zea mays
MLQSSTLSTPLHHQPTSAALRRSTDLPRAPMATAAVLAATLVLFLRAAAATAATAAAEADRIGRLPGQPPVNFSMYSGYVTVDAAAGRALFYWFIEAAGVPAESAPLVLWLNGGPGCSSVGYGASEELGAFRINADGRTLYLNPYPWNKVANMLFLDSPAGVGYSYSNSTSDLYTAGDNKTAHDSYNFLVNWLERFPQYKHRDFYITGESYAGHYVPQLSQLEQQSIEKPILNFKGFMVGNAVIDDYHDFIGTFEYLWTHGLISDETYEKLRLACQFDVSEHASKECNKVFDIAEAEEGNIDAYSIYTPTCKKTSLHKRRLIRGRTPWLPRGYDPCTEKYSTKYYNLPEVQRALHANVTGIPYPWVTCSDPVYDFWKDSPRSMLPIYRELIAAGIRIWVFSGDADSVVPLTATRYSIDALFLPTITNWYPWYDEEEVGGWCQVYEGLTLVTVRGAGHEVPLHRPRQGLKLFEHFLRGEPMPRPVDSVQSF

SEQ ID NO: 26148 - protein, 547 aa, Campylobacter rectus
MAKEIFFSDEARNRLYEGVRKLNDAVKVTMGPRGRNVLVQKSFGAPAITKDGVSVAKEIELKDALENMGAGLVKEVASKTNDEAGDGTTTATVLAHSIFKEGLRNITAGANPVEVKRGMDKQAAAIIAELKNLSRKVTDKKEIAQVATISANSDSAIGGLIADAMEKVGKDGVITVEEAKSIQDELNVVEGMQFDRGYLSPYFITNAEKMQVELQSPYILLFDKKITNLKDLLPVLEQIQKTGKPLLIIAEDIEGEALATLVVNKLRGVLNISAVKAPGFGDRRKAMLEDIAILTGGEVVSEELGRTLESATLSDLGQASSVIIDKDNTTIVNGAGEKSAIDARIIQIKAQIAETTSDYDKEKLQERLAKLSGGVAVIKVGAATETEMKEKKDRVDDALSATKAAVEEGIVIGGGAAFIKAGAKVDLNLSGDEAIGADIVRRALTAPLRQIAENAGFDAGVVANSVSVSKDDNYGFNAATGEYVDMFKAGIIDPVKVERIALQNAVSVASLLLTTEATISELKEDKPMPAMPDMSGMGGMGGMGGMM

SEQ ID NO: 26149 - protein, 210 aa, Commelina communis
MGRGKIEIKRIENSTNRQVTFSKRRNGIIKKAREISVLCEAAVSVVIFSSSGKMFDYCSPNTTLPKILEKYQTDSGQKIWDENHERLSAEIDLIKKENDNMQIELRHLKGEDLNSLQPKDLIPIEDALQNGYAKVREKQMEVWRHHKKNEKRLEDENKELGYLLHQQHLAMTGKFGDLELGYHQKEREMAPHMGMPFRVQPTKPNLQLNK

SEQ ID NO: 26150 - protein, 156 aa, Gossypium barbadense
LKAEMMKNTIKECEQPAIEGEEKYCATSLESMIDYSISKLGKVDQAVSTEVEKQTPMQKYTIAAGVQKMTDDKAVVCHKQNYAYAVFYCHKSETTRAYMVPLEGADGTKAKAVAVCHTDTSAWNPKHLAFQVLKAEPGTVPVCHFLPRDHIVWVPK

SEQ ID NO: 26151 - protein, 107 aa, Aster tripolium
GGHVNPAVTFGLAVGGNITILTGLFYWIAQLLGSVVACFLLQFVTGGLAVPTHGVADGMNGLQGVVMEIIITFALVYTVYATAADPKKGSLGTIAPIAIGFIVGANI

SEQ ID NO: 26152 - protein, 470 aa, Exiguobacterium sp. 255-15
MVVGEFAQETDLLVIGAGPGGYVAAIRGAQLGLKVTIVERENVGGVCLNVGCIPSKALITAGHNFQHAKGSDSMGITSENVAVDFSKVQSWKQSVVNKLTGGVGGLLKGNNVETVVGEAYFQSEDTVRIINEDSSTPYKFKKCIIATGSTPIELPAFKWSKRVLSSTGALNLPELPKKLIVIGGGYIGMELGTAYANFDTEVVILEGTKDILSGFEPAMTQVVKKKLKQKGNITIHNEALAQSVEETEEGVKVTFEVKGETQTVEADYVLVTVGRRPNTSDLGLEMAEVKVSERGLVEIDDQCRTSNENIYAIGDIVPGPPLAHKASFEAKIAAEAAAGHPAYLDYSAIPAVVFTDPELATVGYTEAQAKEEGLDYIASKFPYAANGRALALNEPDGFLKMITRKADGLLIGAQIAGTGASDMIAEMGLAIESGMTAEDIALTIHAHPSLGEIAMETAEVAIGSPIHIMK

SEQ ID NO: 26153 - protein, 360 aa, Exiguobacterium sp. 255-15
MNLNMFKNVEENFETFRILDEKGEVVNKDAMPDLSDEELTELMRRLVYTRIWDQRAISLNRQGRLGFYAPVAGQEASMIGSQFALDKDDWILPGYRDIPQMVFHGFPLYKAFLFSRGHITGGKIPEGVNVLMPQIIIGAQIVQAAGVALGLKKSGKEQVAITYTGDGGSSQGDFYEGMNFAGAFKAPAIFVVQNNRFAISTPVEKQSMAKTIAQKAVAAGINGIQVDGMDVLAVYAATKQARVEALNGVPTLIETLTYRYGPHTLAGDDPTRYRTKDMDDEYQAQDPLVRFRAFMETKGLWNEDKENEVIEQAKADVKEALAQADKEPKQKVTDFINVMAEKLPQNLQEQLDEYTAKESK

SEQ ID NO: 26154 - protein, 648 aa, Flaveria trinervia
MISLNSSFLERSSVTGGSRTQSQSLRLSARRPVVTSMLNSNSLPERNVSVSVDSAVRDVNAPVAVEVDRSVGEKPFAAVGGGVEDMYGEDTATEDHYITPWSVSVASGYSLLRDPHHNKGLAFTEKERDAHFLRGLLPPVVVNHDLQVKKMMHNIRQYQVPLQRYQAMMDLQQRNERLFYKLLIENVEELLPIVYTPTVGEACQKYGSIFENSQGLFISLKDKGRILEILKNWPHKKIQVIVVTDGERILGLGDLGCQGMGIPVGKLALYTALGGVRPSACLPITIDVGTNNEKLLNDDEFYIGLKQKRAAGQEYAELMNEFMSAVKQNYGENLLIQFEDFANHNAFDLLEKYRTTHLVFNDDIQGTASVVLGGLISALKLVGGSLADQKFLFLGAGEAGTGTAELIALEISKQTNIPLEESRKKVWLVDSKGLIVRSRLDSLQHFKKPWAHDHEPVNEFLDAIKTIRPTVLIGSSGTGQTFTKEVVETMSSLNEKPIILALSNPTSQSECTAEQAYTWSEGRAIFASGSPFKPVEYNGKLYVSGQANNAYIFPGFGLGLIISGAIRVHDDMLLAASEAPAEQVTQEHFDKGLIFPPFTSIRKISAHIAAKVAAKAYELGLASRLPQPENLVAYAESCMYSPKYRIYR

SEQ ID NO: 26155 - protein, 161 aa, Lotus corniculatus var. japonicus
MSTLGSTCFTEEQEALVVKSWSVMKKNSAELGLKLFLKIFEIAPSAQKLFSFLRDSKVPLEENPKLKPHAMSVFVMTCESAAQLRKAGKVTVRESTLKKLGATHYKYGVVNEHFEVTKFALLDTIKEAVPEMWSPEMKNAWTQAYDQLVGAIKSEMKPSSS

SEQ ID NO: 26156 - protein, 161 aa, Lotus corniculatus var. japonicus
MAENTTTIAFTEEQEALVVKSWNAMKKDSAELSFKFFSKILEIAPPAKQLFSFLRDSEVPLDQNPKLKPHAMSVFLMTCESAAQLRKEGKVTVRESNLKKLGATHFKKGVIPEHFEVTKQALLDTIKEAVPELWSLELKDAWAIAHDQLASAIIAEMKPES

SEQ ID NO: 26157 - protein, 372 aa, Ustilago maydis 521
MSTSTTTSQGPKVLLTGVSGFVGSHVLDQLLKSSRSYHVTCVIRSKAKTEPWLSRQFAAGFQQNRIDVIEVSDLLASGCLDSAVEAKDYIVHVASPYVLSAKNNKRDIIDPAIKMTQNVLDAALKAENKAKAAGEKPKLKRIVVTSSFAAILNPLKGIEQRDYTYTDKDWQPIQYAFMGMFYSPLAYLISKTLAEKSVWNFLEQHKPSFDAATVNPPNIYGPIIHEVKSEDAINTSSAEPWKLYKAGGPNGDGKVPAEALWSFCDVRDVAKVHVAALDNPKAHNTRYLACGGSISWQEVADEIHSNPEYPQELKDHIPRGTPGQRHRPSPLAKLDTSRAEKDLGIEFLDWKESVIKGSLYSFIEIEKSWGHQ

SEQ ID NO: 26158 - protein, 681 aa, Pseudomonas fluorescens PfO-1
MPSFFRFNLFTPRRSAMPSRRERANAIRALSMDAVQKANSGHPGAPMGMADIAEVLWRDYLKHNPSNPLFADRDRFVLSNGHGSMLIYSLLHLTGYDLSIDDLKQFRQLHSRTPGHPEFGYTPGVETTTGPLGQGLANAVGFALAEKVLGAQFNRPGHNIVDHHTYVFLGDGCMMEGISHEVASLAGTLGLGKLIAFYDDNGISIDGEVEGWFTDDTPKRFESYNWQVIRNVDGHDPEEIKTAIETARKSPLPTLICCKTTIGFGSPNKQGKEDCHGAPLGDAEIALTRQALNWNHGPFEIPADIYAEWDAKEKGRAAEAEWDQRFAAYSAAFPTEANELIRRLSGELPADFSEKADAYIAEVAAKGETIASRKASQNALNAFGPLLPEVLGGSADLAGSNLTLWKGCKGVSAEDASGNYMYYGVREFGMTAIMNGVALHGGLVPYGATFLMFMEYARNAVRMSALMKQRVIHVYTHDSIGLGEDGPTHQPIEQLTSLRSTPNLDTWRPADAVESAVAWKNALERKDGPSALIFSRQNLQHQTRDAGQIADIRRGGYVLKDCAGEPELILIATGSEVGLAVQAYDKLTEQGRKVRVVSMPCTSAFDAQDASYKQSVLPLQVGARIAIEAAHADFWFKYVGLEGRVIGMTTYGESAPASALFEEFGFTLENILGQAEELLED

SEQ ID NO: 26159 - protein, 165 aa, Nicotiana plumbaginifolia
MNVEKLRKMAGSVRTGGKGTMRRKKKAVHKTTTTDDKRLQSTLKRIGVNAIPAIEEVNIFKEDVVIQFINPKVQASIAANTWVVSGSPQTKKLQGYSSSNYSPVGPDNLESLREASRAVPESRAPSANGAPEGAPALQEDDDDEVPELVAGQTFEAGRSEERHTS

SEQ ID NO: 26160 - protein, 357 aa, Burkholderia vietnamiensis G4
MDGAALYEALAAAEPDPLRRDVFMQLAEAEHEHAEIWRAKLQHRGVDVATTRPTFKTRALRMLIRSFGPRFVLPALAASEFADRDKYARQTDAGALSADESTHAAVVAAVARSNPSGGVKGSDIARAESWHRGASGNDLRAAVLGANDGLVSNFCLIMGIAGAGASNKTILLTGLAGLIAGASSMALGEWLSVTNAYELAQTQIARENEELQRTPKAELRELALIYQAKGLDRDDARRVAEEMMRNRDKALDTLTREELGLDPEELGGNPWRAAGTSFGLFALGAIFPAVPFFWARGVVGIGISVSLSVLCLAVIGVVTSLFNGRSSWFSVTRQIVIGCVAAGFTYGVGALLGVSMS

SEQ ID NO: 26161 - protein, 113 aa, Streptococcus pneumoniae
TYVFTHDSIAVGEDGPTHEPVEHLAGLRAMPNLNVFRPADARETQAAWYLAVTSEKTPTALVLTRQNLTVEDGTDFDKVAKGAYVVYENAADFDTILIATGSEVNLAVSAAKE

SEQ ID NO: 26162 - protein, 230 aa, Nicotiana tabacum
MAAILARKSLSALRSRQLVLAGQAWQQGANTSNGTLLGTRTFATNDSFSTDKDDEEREQLAKELSKDWNSVFEQQINTLFLTEMVRGLMLTLKYFFEKKVTINYPFEKGPLSPRFRGEQPLRRYPTGEERCIACKLCEAICPAQAITIEAEAREDGSRRTTRYDIDMTKCIYCGFCQEACPVDAIVEGPNFEFATETHEELLYDKEKLLENGDRWETEIAENLRSESLYR

SEQ ID NO: 26163 - protein, 663 aa, Salmonella enterica subsp. enterica serovar Typhi Ty2
MSSRKELANAIRALSMDAVQKAKSGHPGAPMGMADIAEVLWRDFLNHNPTNPSWADRDRFVLSNGHGSMLIYSLLHLTGYDLPMSELQNFRQLHSKTPGHPEVGYTAGVETTTGPLGQGIANAVGMAIAEKTLAAQFNRPGHDIVDHFTYVFMGDGCMMEGISHEVCSLAGTLKLGKLIAFYDDNGISIDGHVEGWFTDDTAKRFEAYGWHVIRGIDGHDADAIKRATEEARAVTDKPSLLMCKTIIGFGSPNKQGTHDSHGAPLGDAEIALTREQLGWKYAPFEIPSEIYAQWDAKEAGQAKESAWNEKFAAYEKAFPQEAAEFTRRMKGDMPADFNAKANEFIAKLQANPSKIASRKASQNAIEAFGPLLPEFLGGSADLAPSNLTLWSGSKAINEDAAGNYIHYGVREFGMTAIANGIALHGGFLPYTSTFLMFVEYARNAVRMAALMKQRQVMVYTHDSIGLGEDGPTHQPVEQVASLRVTPNMSTWRPCDQVESAVAWKYGVERQDGPTALILSRQNLAQQERTEEQLANIARGGYVLKDCAGQPQIIFIATGSEVELAVAAYEKLTAEGVKARVVSMPSTDAFDKQDAAYRESVLPKAVSARVAIEAGIADYWFKYVGLNGAIVGMTTFGESAPAELLFEEFGFTVDNVIAKAKALL

SEQ ID NO: 26164 - protein, 393 aa, Magnetospirillum magnetotacticum MS-1
MSNLPVQSFQPPLRILMGPGPSDVHPRVLAAQARPTIGHLDPAFVGMMDELKGLLQAAFRTANEMTFAVSGPGSAGMEACFVNLIEPGDTVVVCVNGVFGGRMKENVERCGARAVVVEDAWGTPVDAGKVEEALAANPGAKALAFVHAETSTGVESDAAILCALAHAHGALTIVDAVTSLGGIPVLVDQWGADAVYSGSQKCLSAPPGLSPVTFSPRAVEALKARKTKVQSWFLDLTLLTAYWGGGAKRTYHHTAPVNALYGLHESLVMLHEEGLDAAWARHRAMHEALRAGLEAMGLGLLVAEKSRLPQLNAVTVPDGVDEATVRAQLLARFGLEIGAGLGALAGKVWRIGLMGQSATPKHVITCLTALEGVLGDKVKAGAGPAAASRLLFG

SEQ ID NO: 26165 - protein, 224 aa, Oryza sativa (japonica cultivar-group)
MGRRPARCYRQIKNKPYPKSRYCRGVPDPKIRIYDVGMKKKGVDEFPYCVHLVSWEKENVSSEALEAARIACNKYMTKNAGKDAFHLRVRVHPFHVLRINKMLSCAGADRLQTGMRGAFGKPQGTCARVDIGQVLLSVRCKESNAKHAEEALRRAKFKFPGRQKIIHSRKWGFTKFTREEYVKLKAEGRIMSDGVNAQLLGSHGRLAKRAPGKAFLAETIQASA

SEQ ID NO: 26166 - protein, 658 aa, Salmonella enterica subsp. enterica serovar Typhi Ty2
MSDDMSMGSPSSAGEQGVLRSMQEVAMSSQEASKMLRTYNIAWWGNNYYDVNELGHISVCPDPDVPEARVDLAKLVKAREAQGQRLPALFCFPQILQHRLRSINAAFKRARESYGYNGDYFLVYPIKVNQHRRVIESLIHSGEPLGLEAGSKAELMAVLAHAGMTRSVIVCNGYKDREYIRLALIGEKMGHKVYLVIEKMSEIAIVLEEAERLNVVPRLGVRARLASQGSGKWQSSGGEKSKFGLAATQVLQLVETLRDAGRLDSLQLLHFHLGSQMANIRDIATGVRESARFYVELHKLGVNIQCFDVGGGLGVDYEGTRSQSDCSVNYGLNEYANNIIWAIGDACEEHGLPHPTVITESGRAVTAHHTVLVSNIIGVERNEYTDPTAPAEDAPRALQNLWETWQEMHKPGTRRSLREWLHDSQMDLHDIHIGYSSGAFSLQERAWAEQLYLSMCHEVQKQLDPQNRAHRPIIDELQERMADKMYVNFSLFQSMPDAWGIDQLFPVLPLEGLDQVPERRAVLLDITCDSDGAIDHYIDGDGIATTMPMPEYDPENPPMLGFFMVGAYQEILGNMHNLFGDTEAVDVFVFPDGSVEVELSDEGDTVADMLQYVQLDPKTLLTHFRDQVKQTDLDDALQQQFLEEFEAGLYGYTYLEDE

SEQ ID NO: 26167 - protein, 386 aa, Arabidopsis thaliana
MRWWWAGAIGAAKKKLDEDEPSQSFESVALIIGVTAIVGNSLAEILPLSDTPGGPWKVYGVARRPRPTWNADHPIDYIQCDVSDAEDTRSKLSPLTDVTHVFYVTWTNRESESENCEANGSMLRNVLQAIIPYAPNLRHVCLQTGTKHYLGPFTNVDGPRHDPPFTEDMPRLQIQNFYYTQEDILFEEIKKTETVTWSIHRPNMIFGFSPYSLMNIVGTLCVYATINMKGSPLLFPGSKKAWEGFMTASDADLIAEQQIWAAVDPYAKNEAILTDTMLISSSGRSSDRKILAEQFGIEEYGGRIWGLVEMMKGKERVWEEMVKENQLQEKKLEEVGVWWFADVILGVEGMIDSMNKRKEYGFLGFRNSNNSFISWIDKYKAFKIVP

SEQ ID NO: 26168 - protein, 407 aa, Aethionema grandiflorum
YQGVYPVKGNQDRFVVEDIVKFGSPFRFGLEAGSKPEILLAMSCLCKGNPDAFLVCNGFKDAEYISLALLGRKLALNTVIVLEQEEELDLVIDLSQKMNVRPVIGLRAKLRTKHSGHFGSTSGEKGKFGLTTTQIVRVVRKLRQAGMLDCLQLLHFHIGSQIPSTALLSDGVAEAAQLYCELVRLGAHMKVIDIGGGLGIDYDGSKSGESDLSVAYTLEEYADAVVASVRFVCDRKSVKHPVICSESGRAIVSHHSVLIFEAVSAAKPMAHHANPEDIQFLLEGNEEARADYEDLYAAVMRGDHESCLLYVDQLKQRCVEGFKEGVLSIEQLASVDGLCEWVLKAIGASDPVRTYHVNLSVFTSIPDFWGIEQLFPIVPIHKLDQRPGVRGILSDLTCDSDGKINKF

SEQ ID NO: 26169 - protein, 107 aa, Aster tripolium
GGHVNPAVTFGAFVGGHISFFKSILYWIAQCLGSVVACLLLKFATGGLETSAFALSSGVGEWNAVVFEIVMTFGLVYTVYATAIDPKKGDLGIIAPIAIGFIVGANI

SEQ ID NO: 26170 - protein, 607 aa, Gloeobacter violaceus PCC 7421
MMVKFLPKLNLRRFETPRLLFRGVDRRPLYLGIGSMFLSSLFDGLTIALLIPFLKLVLGEIDTFTLPDLGWTASLNQWLQAQGKDTTVGLCTIVLVCSLCLKAYFFFTAKEQTTGYEEAATHALRRRLFTNYLYAPTRFYDTTKLGTITNNLQMEVVYVGNTLGYASVCMISVLTLLAYIATLLVVSWKLTLVIVVLISVIAYAMSLYLRSLRKYGDRVIELGRVLSVRILETLSGIRVVKAFGTEKFEQERFSAFSNEYRTARMELRAKQHVVEPLTELATLGSGMLILAGAYVFLIQQGLLNTAELMLFMLVLIRSVPVTRRINNARGYILENLSAFAKVAEGLRLAEQFPPATGHLPFEGLARAIRFRQVGFSYNGRSEVLRDFDLEVPQGQTVALVGSSGAGKSTVASLLPRFYEVTSGSIEIDGLDIRELDPISLRHHIGIVSQDTYIFNATVFENIAYGLPEATPEQVREAALLANAHEFIQHLPEGYQTFVGDRGVQLSGGQRQRLSIARTLLRNPEILILDEATSALDSQSEALVQEAIERLRFNRTVIVIAHRLSTVRNADKIVVMEKGRIVEAGEHAQLLAQRGAYWSFHNLQTVAR

SEQ ID NO: 26171 - protein, 392 aa, Bacillus subtilis subsp. subtilis str. 168
MTKEFEFLKAELNSMKENHTWQDIKQLESMQGPSVTVNHQKVIQLSSNNYLGFTSHPRLINAAQEAVQQYGAGTGSVRTIAGTFTMHQELEKKLAAFKKTEAALVFQSGFTTNQGVLSSILSKEDIVISDELNHASIIDGIRLTKADKKVYQHVNMSDLERVLRKSMNYRMRLIVTDGVFSMDGNIAPLPDIVELAEKYDAFVMVDDAHASGVLGENGRGTVNHFGLDGRVHIQVGTLSKAIGVLGGYAAGSKVLIDYLRHKGRPFLFSTSHPPAVTAACMEAIDVLLEEPEHMERLWENTAYFKAMLVKMGLTLTKSETPILPILIGDEGVAKQFSDQLLSRGVFAQSIVFPTVAKGKARIRTIITAEHTKDELDQALDVIEKTAKELQLL

SEQ ID NO: 26172 - protein, 406 aa, Theobroma cacao
YQGVYPVKSNQDRFVVEDIVKFGSSFRFGLEAGSKPELLLAMSCLCKGNPEALLVCNGFKDAEYISLALLARKLALKHVIVLEQEEEVDMVIDISQKLSVRPVIGVRAKLRTKHSGHFGSTSGEKGKFGLTTTQVLRVVKKLQDSGMLDCLQLLHFHIGSQIPSTALLSDGVGEAAQIYSELVRLGARMKVVDFGGGLGIDYNGSKSGDSDLSVPYGLQEYAHVVNAIRFVCDRKSVKHPVICSESGRAIVSHHSILIFEAICLTAPATHNEPINIPFIMEGLSEDACADYWNLRDTAMRTGDGAFWFYADQWKQRCVEQFKEGTLGIEQLASVDGLCEWVLKAIGASDPVHTYNINLSVFTSIPDLWGIDQLFPIVPIHKLDQRPGARGILSDLTCDSDGKINKF

SEQ ID NO: 26173 - protein, 107 aa, Aster tripolium
GGHVNPAVTFGLAIGGNITILTGLFYWIAQLLGAVVASFLLGFVTGGLAVPTHGVADGMNAIQGVVFEIIITFALVYNVYANAADPKKGSFGTIAPVAIGFIVGANI

SEQ ID NO: 26174 - protein, 152 aa, Methanosarcina acetivorans C2A
MKFPIKRPSRDVCNWDPFDEIRGMQEYMEQMMRTFPALESRYAGGTFAPLTDVAEEDNKVIVTTDLPGINRENIELSLKDNFLVISASKGKEEENEKEGYLRKERSFMRYYREIPLPKGVTEEGATAQLKNGVLTVTMPKTEALTEKRIPIE

SEQ ID NO: 26175 - protein, 323 aa, Gloeobacter violaceus PCC 7421
MKAFILAAGKGTRLRPLTNLVPKPLVPVLNRPVMGRMLDLCREHGFCEAMANLHYQGEKIERAFGSGYEYGVDLAYSHETQLLGTAGGVRRQAAYLQGGTFVVTSADVVTDLDFSELLAFHRTRGALATIATTVVSDPSRFGVLVCDPDGRVRSFQEKPAPGTARSNLVNMGIYMLEPEIFDFIPAAEEFDFGSQLFPMLVAKGAPIYALETKAYWSDIGTLSQYLHTHWDLLSQPGLQSRIGRHTVIEPGARISPTALVGDHCYIHSTAIIEGNSCIGDGTILNHGARVLDSVVWSAAAFRLSVADTVVRSVRADDCCIAIS

SEQ ID NO: 26176 - protein, 334 aa, Agrobacterium tumefaciens str. C58
MTHKKRPTVYITRKLPDVVETRMRELFDAELNIDDSPRSEEELVAAMQRVDVLVPTVTDRITAAMIEKAGPQLKLIASFSNGIDHVDVDAAARKGITVTNTPNVLTEDSADITMALVLAVPRRMIEGTRVLANGADEWLGWSPTWMLGRRISGKRIGIVGMGRIGTAVARRAKAFGLSIHYHNRKRVNPATEAELEATYWDSLDQMLARVDIVSVNCPSTPATYHLISARRLALMQPTSYIVNTARGDIIDEAAMIQCLREGKIAGAGLDVYENEPQVNPKLIKLAKEGKVVLLPHMGSATIEGRIEMGDKVIINIRTLFDGHRPPNRVLPGRN

SEQ ID NO: 26177 - protein, 107 aa, Aster tripolium
GGHVNPAVTFGLAVGGQITIITGVFYWIAQLLGSVAASFLLSFVTGGLAVPIHGCADGVGAIQGMVMEIIITFALVYTVYGTACDPKKGDVGTIAPIAIGFIVGANI

SEQ ID NO: 26178 - protein, 676 aa, Hordeum vulgare subsp. vulgare
MFPLGARQPPPSAMDNQQQQQPPRGEHAAQPRCWEEFLHRKTIRVLLVETDDSTRQVVAALLRHCMYQVIPVENGHQAWAYLQDMQSNIDLVLTEVFMHGGLSGIDLLGRIMNHEVCKDIPVIMMSSHDSMGTVLSCLSNGAADFLAKPIRKNELKNLWAHVWRRSHSSSGSGSGSAIQTQKCTKSKSGDDSNNNSNDRNDDASMGLNARDGSDNGSGTQAQSSWTKRAVEIDSPQDMSPDQSADPPEGTCAHVNHPKSEICSNRWLPGTNNKKCQKPKETTNGDGFKGKELEIGAPGNLNTDDQSSPNESSVKPTDGRCEYLPQNNSSDTVMENLEEPIVRAADLIGSMAKNMDAQQAAARAIDAPNCSLQASEGKDTDGENAMPYLELSLKRSRSTGEGAGPIQEEQRNVVRRSDLSAFTRYNMCAVSNQGGAGFVGSCSPNGDSSEAAKTVAAQMKQGSNGSSNNNDMGSTTKSVVTKPCGNNKVSPINGNTHTSAFHRVQPWTPATAAGKDKADEVSKKNVAAAAAAAKEMGCEAQSKHPCAAADDVNGGSAGGTAQSSVVNPSGPVEGHTANYGSNSFSNNNTNNGSTAATTAAAAAVHAETGGGVDKRSNMMNMKRERRVAAVNKFREKRKERNFGKKVRYQSRKRLAEQRPRVRWQFVRQPPAPATVER

SEQ ID NO: 26179 - protein, 826 aa, ASPERGILLUS NIDULANS FGSC A4
MSFSVQGKTAIVTGAGSGINLSFAKQLLENGCNVLIADLALRPEAQSLVDQYTAKIPRAVFQRTDVREWKQLEQMFEVAEKEFGEVDIVCPGAGIYEPHWSNFWRPPGTAVSRDPPDGDRYALIDINLTHPIRTSQLAISHFLRSGTDSTRRKAIVHISSIAGQNPFLAAPIYVATKHAINGFVRSLAKLDERCGIRVTAVAPGIIKTPLWTDHPEKLKIVDDTKDAWVTPDEVATVMLALVQQDQANEVIGDSLEQGREGGISYQRRHDLGGVEDGKTSPLLLDRFRGSSSSRLFQSFKGLSRSPSNSASRLSPFSPKMMDVETAVGAVPSDGYRSNSIRARRGVRGKQNPGSHGQASWISCVINLVNTIVGAGVLAMPLAISHMGIVLGISVILWSGVTAGFGLYLQSRCAQYLDKGSASFFALSQITYPNAAVIFDAAIAIKCFGVGVSYLIIIGDLMPGVVQGFVGEAAYDFLVDRHFWVTAFMLIIIPLSYLRRLDSLKYTSIAALVSMAYLVILVVYHFIIGDTKEGRGPIRVIRWAGAVPTLSSFPVIVFAFTCHQNMFSILNEISNNSHFRTTAVVLASIGSSATTYILVAITGYLSFGNSVGGNIVGMYPPGVWATIGRAAIVILVMFSYPLQCHPCRASVDAVLHWRPKRFTRSRSEGSPHRHPLLPAGPRGSRTPEPMSDLRFSVITTSILILSYIVAMSVSSLEAVLAYVGSTGSTSISFILPGMFYYKISAPDSAAHQRLMKEDDEAEDGYISGASEEDGIQSRSLTESGILRRHTRNWRRALLRKLSLGLAIYGVIVMITCLVTNSVFLASH

SEQ ID NO: 26180 - protein, 408 aa, Carica papaya
YQGVYPVKSNQDRFVVEDIVKFGSSFRFGLEAGSKPELLLAMSCLCKGSPDAFLVCNGFKDAEYISLALFARKLALNTVIVLEQEEEIDLVIDLSQKLSVKPVIGVRAKLRTKHSGHFGSTSGEKGKFGLTTTQILRVVGKLKQAGMLDCLQLLHFHIGSQIPSTALLSDGVGEAAQIYCELTRLGARMQVVDIGGGLGIDYDGSKSGESDLSVAYSLEEYAAAVVRTVAFVCDRKSVKHPVICSESGRAIVSHHSVLIFEAMSVTGPARRNEYPTDLQFFFDGFKDDARAAYLNLAIADARGDYDTCWFYADQLKERCVEDFKEGTLCIEQLAAVDGLCDFVSKVIGASEPVRTYHVNLSIFTSIPDFWSIGQIFPIVPIHRLDERPEVRGTLSDLTCDSDGKIDKF

SEQ ID NO: 26181 - protein, 330 aa, Agrobacterium tumefaciens str. C58
MTKFDVLTVGNAIVDIISRCDDRFLNDNAITKGAMNLIDAERAELLYSLMGPALEASGGSAGNTAAGVANFGGKAAYFGKVAEDQLGEIFQHDIRAQGVYFETKPEGTFPPTARSMIFVTEDGERSMNTYLGACVDLGPEDVEDDVVAKTKVTYFEGYLWDPPRAKDAIRECARIAHENGREVSMTLSDSFCVGRYRDEFLDLMRSGTVDIVFANKQEALSLYETEDFELALTKIAADCKIAAVTMSEEGAVILRGTERVKVEAYPVHDVVDTTGAGDLFAAGFLFGYTQDRSLEDCGKLGCLAAAAVIQQVGPRPMSPLKALGEKHGLI

SEQ ID NO: 26182 - protein, 107 aa, Aster tripolium
GGHVNPAVTFGLAVGGQITILTGIIYVVAQLAGSIVACYLLSFVTGGLAVPIHGVADGVGAIQGVVMEIIITFALVYTVYATACDPKKGALGTIAPIAIGFIVGANI

SEQ ID NO: 26183 - protein, 103 aa, Synechocystis sp. PCC 6803
MAAISINVSTVKPLGDRVFVKVSPAEEKTAGGILLPDNAKEKPQIGEVVQVGPGKRNDDGTYSPVEVKVGDKVLYSKYAGTDIKLGGDDYVLLTEKDILASVA

SEQ ID NO: 26184 - protein, 541 aa, Synechocystis sp. PCC 6803
MAKSIIYNDEARRALERGMDILAEAVAVTLGPKGRNVVLEKKFGSPQIINDGITIAKEIELEDHVENTGVSLIRQAASKTNDVAGDGTTTDTVLAHAIVKEGLRNVAAGANPISLKRGIDKATDFLVARIKEHAQPVGDSKAIAQVGAISAGNDEEVGQMIANAMDKVGQEGVISLEEGKSMTTELEITEGMRFDKGYISPYFVTDAERMEAVLEDPRILITDKKINLVQDLVPILEQVARQGKPLLIIAEDIEKEALATLVVNRLRGVLNVAAVKAPGFGDRRKQMLEDIATLTGGQVISEDAGLKLESATVDSLGSARRINITKDNTTIVAEGNEAAVKSRCEQIRRQIEETDSSYDKEKLQERLAKLAGGVAVIKVGAATETEMKDRKLRLEDAINATKAAVEEGIVPGGGTTLAHLAPQLEDWATGNLKDEELTGALIVARALPAPLKRIAENAGQNGAVISERVKEKEFNVGYNAASLEYVDMLAAGIVDPAKVTRSALQNAASIAGMVLTTECIVVDKPEKEKAPAGAPGGDFDY

SEQ ID NO: 26185 - protein, 107 aa, Aster tripolium
GGHVNPAVTFGAFVGGNITLLRGIVYIIAQLLGSTVACLLLKFVTNDMAVGVFSLSAGVGVTNALVFEIVMTFGLVYTVYATAIDPKKGSLGTIAPIAIGFIVGANI

SEQ ID NO: 26186 - protein, 370 aa, Exiguobacterium sp. 255-15
MEYAIEMRRELHKIPEPGFKEFKTQAFILDQIRSYPEDRVSYDTFETGVFVRVKGLTGNRTIGYRADIDGLPIEEATGLPFCSEHPGFMHACGHDVHASIALGLLRRIVELPVMDDVVFLFQPAEEGPGGAEPMIKSPLFEKYRPSEMYGLHVAPEYPVGTIASRPGVLFASAREVHITIYGQSGHAAFPHLTIDTVVAQAALIMQLQTIVSRSINPMNCSVITIGKVDAGIRENVIAGRALLDGTMRALNGTDMEKLEQRVRDIIRGIEASFGVKIDLQFGNRYYEVVNDQRVVDKFSSFVKMNANYIECDAAMTGEDFGFMLKEIPGMMFWLGVNNATSGLHQPTLNPDEEAIPFVINLLDHYFREYV

SEQ ID NO: 26187 - protein, 227 aa, Zea mays
  misc_feature (178)..(178): Xaa can be any naturally occurring amino acid
  misc_feature (213)..(213): Xaa can be any naturally occurring amino acid
  unsure (1)..(227): unsure at all Xaa locations
MAEQQQPQEMDVDRTGGLELPPGFRFHPSDFEIVSHYLKNKVHDRDYSCIAIADADLNKTEPWDLPKVAKMGEKEWYFFYQKDRKYPTGLRANRATEAGYWKAAGKDKEVYDPLAAEGLLLVGMKKTLVFYKGRAPRGDKTNWVMHEYRLEGSGRLPASPASASGSATNIAAAMMKAXSASACKDEWVVCRVFNKTTGIKKTAAPAYQVAMAXGAEMEQNQNNIPAI

SEQ ID NO: 26188 - protein, 274 aa, Zymomonas mobilis subsp. pomaceae
MSRIANTFAKTKKENRAALIAFLTAGDPSIEATPALLDSLVENGVDIIELGMPFSDPMADGPAIQKANLRALAAKTGYNDIFRIATEFRKRHPETPLILMGYANPMTFKGSDSFAASAKDAGVDGIICVDIPPEEDATLGVAVREKGMDMIRLATPTSDEARLKIILDGASGFLYYVSVAGVTGLQQATEASIDAALDRIKSVTDLPVAVGFGIRSPEQAAAIAKKADAVVVGSAFVSCIEKAVTNRQDPNAALEKLAKELSTAISDARKEAAL

SEQ ID NO: 26189 - protein, 325 aa, Bacillus licheniformis ATCC 14580
MKYTFNEEKEFDIVAIGRACIDLNAVEYNRPMEQTMTFSKYVGGSPANIAIGSSKLGLKTGFIGKIPDDQHGRFIETYMRNTGVDTSQMAVDKDGHKAGLAFTEILSPEECSILMYRDDVADLYLAPSEVNEDYIAKSKMLLVSGTALAKSPSREAVLKAVQLAKKHQVKVVFELDYRPYTWTSAEETAVYYTLVAEQSDIVIGTRDEFDVMENKSGGSNEESVQHLFAHSADLVVIKHGVEGSYAYSKSGDVFRAKAYKTKVLKTFGAGDSYASAFLYGLVSGKDIETALKYGSASASIVVSKHSSSEAMPTVAEIEELIAAQS

SEQ ID NO: 26190 - protein, 372 aa, Candida glabrata
MSESELRQRQAEFTKELHGEGAESRTGLTALLSKNRNAQREAVSKYLRHWDGKTDKEAEDRRLEDYNEATHSYYNVVTDFYEYGWGSSFHFSRFYKGENFQAAMARHEQYLAYMAGIKKGDLVLDVGCGVGGPARTIARFTGCNIIGLNNNDYQIQKAKYYAKKYNLQDHMDFVKGDFMNMEFEPNSFDKVYAIEATFHAPKLEGVYGEIYKVLKPGGTFAVYEWVMTENYDENNEEHRKIAYEIELGDGIPKMFTVDVAKQALKNVGFEVEVSKDLADEDDEIPWYYPLTGEWKYVQSLSDIATFFRTSYFGRKFTNCMVSIMEKVGVAPQGSVEVTAALENAAVGLVEGGRKKLFTPMFLFVAKKPEDAK

SEQ ID NO: 26191 - protein, 513 aa, Arabidopsis thaliana
MFETEHHTLLPLLLLPSLLSLLLFLILLKRRNRKTRFNLPPGKSGWPFLGETIGYLKPYTATTLGDFMQQHVSKYGKIYRSNLFGEPTIVSADAGLNRFILQNEGRLFECSYPRSIGGILGKWSMLVLVGDMHRDMRSISLNFLSHARLRTILLKDVERHTLFVLDSWQQNSIFSAQDEAKKFTFNLMAKHIMSMDPGEEETEQLKKEYVTFMKGVVSAPLNLPGTAYHKALQSRATILKFIERKMEERKLDIKEEDQEEEEVKTEDEAEMSKSDHVRKQRTDDDLLGWVLKHSNLSTEQILDLILSLLFAGHETSSVAIALAIFFLQACPKAVEELREEHLEIARAKKELGESELNWDDYKKMDFTQCVINETLRLGNVVRFLHRKALKDVRYKGYDIPSGWKVLPVISAVHLDNSRYDQPNLFNPWRWQQQNNGASSSGSGSFSTWGNNYMPFGGGPRLCAGSELAKLEMAVFIHHLVLKFNWELAEDDQPFAFPFVDFPNGLPIRVSRIL

SEQ ID NO: 26192 - protein, 445 aa, Neurospora crassa
MSLTNASPADAARAAKSASHVLATLSAEARNDALTAIHAGLTAARDEILAANARDLELARQAAADGKLSASLVSRLDLGKTGKWEDMLKGIWDVRDLEDPVGRVTLRTKLDDGLELERVTCPIGVLLIIFEARPEVIANIAALAVKSGNAAILKGGKESTESFVAISTAISNALSQTQVPNDAIQLVTTRESIPQLLALDRDIDLVIPRGSNELVRYIKENTKIPVLGHADGLCSIYLAASADAKLAADVVVDAKTSYPAACNSVETLLVQESALTTVFPAVASALAAKGVELRCDAASKAALSPEITTNIKDATAKDYDTEFLSLTLAVKTVPDLSAAIAHINTHGSHHTEAILTADQAEAERFMSAVDASGAYWNASTRFADGMRYGFGTEVGISTNKIHSRGPVGLEGLMIYKYKIRGQGHVSAVYGEGEGKKRFKHERLAI

SEQ ID NO: 26193 - protein, 196 aa, Oryza sativa
  misc_feature (159)..(159): Xaa can be any naturally occurring amino acid
  misc_feature (187)..(187): Xaa can be any naturally occurring amino acid
  misc_feature (192)..(192): Xaa can be any naturally occurring amino acid
  unsure (1)..(196): unsure at all Xaa locations
MSSLRFLDLVKPFVPFLPEVQQPETKIPFNQKLMWTALTLLIFLVMSQMPLYGIVSSDNSDPLYWLRMVIASNRGTLMELGITPIISSGMVFQLLAGTHMIDVNLDLKSDRELYQTAQKLLAFILSAGTATVYVFSGLYGPPSDLGAGIVFLLILQLVXAGMIVILLDELLQKGYGLGSGISLFIAXNICEXIMWK

SEQ ID NO: 26194 - protein, 473 aa, Ustilago maydis 521
MPAVPSVSRQQAVEAIRDQFTLDKPLLESLVARFQELYNYGLANHGAEMQMIPSFVTGVPTGSEKGTYLALDLGGTNLRVCEVALDGKGTFAIKQEKYKVSDQLKQGPVRDLFDYMATSVDNFLTDFGTSSTEDVLHLGFTFSFPVEQTAIDSGHLIHWTKGFNCPDAPGKDVVQLLQEALDRKHIKVKCSALVNDTVGALLAHAYASNGALISAIFGTGTNGAYLEHISKIKKLKTAHGSVSHMVINTEWGGFDDDRKALPVTIYDNQVDRESIRPRNHIFEKMISGMYLGEVARCVLLHLVDQLVLFQGFSSKLFNTQYAFDTAYMSAIEADTQDAASPTSATRKVLVQTMQIKDEYVSAEDVETVRTICNIVGTRAARLSAVAIAATMVQTGNVQGTGLNDDGVKVGMDGSVIEYYPYFEERMRGALRELIGEQGEKRVKIGLAKDGSGVGAALGALQAAKQAASGHRVE

SEQ ID NO: 26195 - protein, 279 aa, Bacillus anthracis str. A2012
MKNLQSTTKLHNGVEMPWFGLGVFKVEEGPELVEAIKSAIKTGYRSIDTAAIYGNEAAVGEGIRAGIEATGISREELFITSKVWNADQGYKETIAAYEESLKKLQLDYLDLYLVHWPVEGKYKDTWRALETLYKEKRVRAIGVSNFQIHHLQDVIQDAEIKPMINQVEYHPRLTQKELQAFCKEQGIQMEAWSPLMQGQLLDNETLQAIAEKHGKTTAQVILRWDLQNGVITIPKSTKEHRIIANADVFNFELTKEDMEKIDALNENHRVGPDPDNFDF

SEQ ID NO: 26196 - protein, 478 aa, Rickettsia rickettsii
MISNFFNLIRIFRIISKKQILIDSRSPKYCRFIGYILALFFAPVSLIKKSREDYGKRLIDCLSDLGPIYIKFGQTLSTRADLVGAEIAGYLRLLQDKLPPFDGGVARRLITSLRGDMYVDEAISASKQKIATQSMTVSHDALPFLHLDDTPIAAASISQVHKAQLITGEYVAVKILRPGIHKKYNRDIKLLYFLAKIISKFSKAKRLKPIKVVDKFHETMKFELDLRLEAAAASELTDNMRNDINVIIPKIYWDLTSENILTTEWLDGTSIYDTLLLKEMGLEPSKISQDFAVMFFNQAYRDGFFHADLHAGNILVNKQGKIILLDFGIMGRLKEKDRLAVAESLFGFLRRDYKLVAKVHLRAGYIPSNTDLALFAQSCRAVTEPIVGTPIKNISIGKLLAHLFKITEDFGMEVQPELLLLQKTLIMVEGIGRQLDGNVNMWQLAEPWIKKWAVKNLSPEAKLLRLVKHDLDSLEDII

SEQ ID NO: 26197 - protein, 495 aa, Burkholderia mallei ATCC 23344
MTTRILARGAVAVAVAAALSAGYVAGTRRAEPQIITPAVAALMPAEAAAKTGIPDFSGLVETYGPAVVNISAKHVVQRAAQRRAAPQLPIDPDDPFYQFFRHFYGQIPGMGGGRQPQPDDQPSTSLGSGFIISADGYILTNAHVIDGANVVTVKLTDKREYKAKVVGADKQSDVAVLKIDASGLPIVKIGDPAQSKVGQWVVAIGSPYGFDNTVTSGIISAKSRALPDENYTPFIQTDVPVNPGNSGGPLFNLNGEVIGINSMIYSQTGGFQGLSFAIPINEAMKVKDELVKTGHVSRGRLGVAVQGLNQTLASSFGLQKPDGALVSSVDPKGPAAKAGLQPGDVILAVDGVPVQDSSTLPAQIAGMKPGTKADLQIWRDKSRKTVSVTLASLADDQAKAGADEPVEQGRLGVAVRPLSPRERNGSSLTHGLVVQQSAGPAASAGIQPGDVILAVNGRPVTSAEQLRDAVKRAGNSLALLIQRDDAQIFVPVDLG

SEQ ID NO: 26198 - protein, 408 aa, Polanisia dodecandra
YQGVYPVKGNQDRFVVEDIVKFGSSFRFGLEAGSKPEILLAMSCLCKGNPEAFLVCNGFKDAEYISLALLGRKLALNTVIVLEQEEELDLVIDLSQKMNVRPVIGIRAKLRTKHSGHFGSTSGEKGKFGLNTIQIVRVVRKLCQVGMLDCLQLLHFHIGSQIPSTALLSDGVAEAAQLYCELVRLGAQMRVIDVGGGLGIDYDGSKSGESDLSVAYSLEEYAAAVVAAVQFVCERKSVKHPVICSESGRAIVSHHSVLIFEAVSATGPARHAVTPTDLQLMIEGYSEEARADYQNLYAAVMRGEYESCLLYVDQLKQRCVEGFKEGFLSIEQLAAGDGFCELVLKVIGASDPVRTYHVNLSVFTSIPDFWGIGQLFPIVPIHRLDQRPGVRGILSDLTCDSDGKIEKF

SEQ ID NO: 26199 - protein, 169 aa, Thermoplasma acidophilum
MYSRITGPAYTRKEFMGGVPYPKITTFVQGNQKKDFPIEMRLVAEEPCQIRHTALEAARVSVNRRMTEAAGLDYFYLKVVPYPHHVLREHKMATGAGADRISSGMRAAFGRPVGTAARVYPDDVIMIARTDEAHAKELKTALRKAAIKLPTPCKVVITKGKEIAGSLGI

SEQ ID NO: 26200 - protein, 493 aa, Methylococcus capsulatus str. Bath
MKILFVSSEVFPLMKTGGLADVSGSLPAALSALGHDVRILMPAYPEAISAAETPNALSLRQAGSQLTLLSTRLPGTTVPLWLLDAPASFGRFGNPYLAPNGAPWPDNAERFALLARVAVDLTQDRLGLGWKPDVVHCNDWQTGLIPPLLSDEPNRPAVVFTVHNLAYQGLFPYETFQRLALPPRLWKMEALEFYGQLSFIKGGLVFADRINTVSPSYAEEIQTPEFGCGLDGLLRSRKSCLSGILNGIDDVAWNPATDPYLPAPYGPDTLERKKVNRTVLRQRYGLPDDPEVAVLGMVGRMVEQKGVDLLIDILDDLLQLPVQLVVLGSGDKEFERCFERAAAARPERIAVTIGYDEPLAHLIEAGADIFLMPSRFEPCGLNQLYSQRYGTVPIVRKVGGLADTVEDATPERLAAGQASGIVFEPAKPAFLLEAVYRALALYREPEVWRAVCKCGMAKDFSWRKSASRYVGLYREALAGMNAGCSIADPRCAA

SEQ ID NO: 26201 - protein, 541 aa, Triticum aestivum
MSAKASERTYRCSDDSQMAYYNNSVPLAENGRFYMMQNHLDVHYTSSGDGSQKISSNPQVFEAQYCTLESSSANGVYPTQSSTSSHSISPISGSPLSQNDSHSYHTYDSPPTASCVTEIPDFQSKLKELENAILGPELDIASDSPESLLQANHPLKQDNWRQLLGINTGDLKQVIIACGKAVAANDMYATELLISELGQLVSVSGDPMQRLGAYMLEGLVARLSFSGSKLYKSLKCKEPTSSELMSYMHLLCEICPFYKFGYMSANGAIAEAIKGENFVHIIDFQIAQGSQWITIIQALAARPGGPPFLRITGIDDSNSAYARGGGLDMVGTRLHSISASCGLPFEFNAVHAASHEVYIQHLDTRPGEAIVVNFAYQLHHTPDESVSVENHRDRIIRMIKSLSPRVVTLVEQESNTNTSAFLPRYLETLDYYTAMFESIDVALPRDDKRRISTEQHCVARDIVNLIACEGAERVERHEVFGKWKARFAMAGFRPYPLSSVVNNTIKTLLDSYHSCYRLEERDGVLYLGWKGRVLVVSSAWC

SEQ ID NO: 26202 - protein, 404 aa, Nocardia farcinica IFM 10152
MRSQPHVLGIVLAGGEGKRLFPLTADRAKPAVPFGGAYRLIDFVLSNLVNAGYLRLCVLTQYKSHSLDRHISQTWRLSGFAGEYITPVPAQQRLGPRWYTGSADAIMQSLNLIYDEDPDYIVVFGADHVYRMDPEQMVSHHIDSGAGVTVAGIRVPRSEASAFGCIDSDESGRITQFLEKPAHPPGTPDDPNMTFASMGNYVFTTKVLVDSIRADAENSDSDHDMGGDIIPALVEAGEAGVYDFADNQVPGATDRDHGYWRDVGTIDAFYDAHMDLVSVHPVFNLYNKHWPIRGAAENLPPAKFAQGGLAQECIVGSGSILSAATVRNSVLSSNVVVDDGATVEGSVLMPGVRIGRGAVVRRAILDKNVVVGEGEIIGVDLDRDRERFAVSNGGVVTVGKGVWV

SEQ ID NO: 26203 - protein, 424 aa, Methylococcus capsulatus str. Bath
MPESMHASSRFVSRLTRQTLALILAGGRGSRLQKLTEWRAKPAVPFGGKFRIIDFPLSNCVNSGIRQVGVLTQYKADSLIRHIQQGWGFLRGELGEFIDIMPAQQRLQESWYAGTADAVYQNLDIIRQRDPEFIMILAGDHVYKMDYGLMLAYHVERKADLTIGCMEVPLADAKAFGVMQMDGEQRIRKFVEKPSDPPPMPNRPDHAAASMGIYIFNTAFLFEQLIKDADTPGSNHDFGMDIIPQVIQKYRVFAYRFRNAQSGVQAYWRDVGTVDSYWAANMELIGVDPELNLYDQEWPIWTYQAQTPPAKFVFDDDDRRGMAVDSMVSGGCIISGAEVRHSLLFSNVRVNSFSRVLDSVILPDVNIGRHCRISRAVIDKGCNIPPNTVIGENLEDDRKRFYVSPEGIVLVTPDCLGQRLHFHR

SEQ ID NO: 26204 - protein, 407 aa, Boechera drummondii
YQGVYPVKGNQDRFVVEDIVKFGSSFRFGLEAGSKPEILLAMSCLCKGSPDAFLVCNGFKDAEYISLALLGRKLALNTVIVLEQEEELDLVIELSQKMNVRPVIGLRAKLRTKHSGHFGSTSGEKGKFGLTTTQIVRVVRKLSQSGMLDCLQLLHFHIGSQIPSTSLLSDGVAEAAQLYCELVRLGAHMKVIDIGGGLGIDYDGSKSGESDLSVAYSLEEYAEAVVASVRFVCDRRSVKHPVICSESGRAIVSHHSVLIFEAVSADKPMVHQATPDDIQFLLEGDEEARANYEDLYAAVMRGDHESCLLYVDQLKQRCVEGFKEGVLSIEQLASVDGLCEWVLKAIGASDPVHTYNINLSVFTSIPDLWGIDQLFPIVPIHKLDQRPGTRGILSDLTCDSDGKINKF

SEQ ID NO: 26205 - protein, 435 aa, Staphylococcus epidermidis ATCC 12228
MENEQMFERTVQPVLDVKDKPKPAQWAFLSLQHLFAMFGSTVLVPFLTHLPISAALLASGIGTLLYILITKAKIPAYLGSSFAFITPIITGLSTHSLGDMLVALFMSGLMYVIIGIFIKLSGTHWLMHLLPPVVVGPVIMVIGLSLAPTAVNMAMFENSAEMKGYNLSYLIVALITLAVTIIVQGFFKGFLSLIPVLIGIIVGYIVSIFMGIVKFAPIAQAKWIDFPHIYLPFKDYTPSFHLGLILVMIPVVFVTVSEHIGHQMVINKIVGRNFFENPGLDKSIIGDGVSTMFASMIGGPPSTTYGENIGVLAITKIYSIYVIGGAAVIAIILAFIGKFTALISSIPTPVMGGVSILLFGIIAASGLRMLVESQVDFASNRNLVIASVVLVVGIGNLLINLKGIGINLQIEGMALSALSGIILNLILPKDKNQIN

SEQ ID NO: 26206 - protein, 416 aa, Bacillus subtilis subsp. subtilis str. 168
MTKCNLPEVVVTGVGVTASIGQGKEDFASSLLSGRHAFDVMKRSGRQKDSRFIGAEIASLSYPDRLSKKMLRKASFSSRAALVTLTEAWEEAELDDADSSRIGLVVGGSNFQQRENFEVYERYQDRSGFISPAYGLSFMDSDLCGICTDQFGITGLAYTVGGASASGQQLAVIHAIQQVLSGEVDTCIALGALMDLSYMECEALRALGAMGTDKYADEPENACRPFDQNRDGFIYGESCGALVIERKETALRRGLKPYAALSGWSIKLDGNRNPDPSLEGEIHVIQKALERARLLPEDIDYINPHGTGSFIGDEIELKALRACRLSHAYINATKSITGHGLSAAGIVEIISVLLQMKKSALHPSRNLDHPIDDSFHWVNEKSISYRIKNALSLSMGFGGMNTAVCIQNIEKCGGES

SEQ ID NO: 26207 - protein, 548 aa, Triticum aestivum
  misc_feature (477)..(477): Xaa can be any naturally occurring amino acid
  unsure (1)..(548): unsure at all Xaa locations
MACLAPHFKWAPSSFSTTHAYRHPSSSSSSSNSGRCSGRRPFRVQCAVTSAVAAVVDADHAAGGPLHLVYSSPDSAPVLQRNFESTLASETVLNKEAVVTAAAAEAVALARAAAEAAQEVVHMVQKSSSQPVFRKKGEVENYLAKEILRTEMLSSRANEYSDGEPYGIPSDEAELDDDTQDADNIAVKSARQSERRARRTRATMKAATIVRSSPKLAASSKKKRSKGPSTMNPLGSLWKMTGRKLLTAKEEVELSNGIQDLLKLEAIQGELAEYNGGQPTFPQWAAAAGTDENTLRKRLDHGIHCKNRMVTSNVRLVISIAREFEGPGLELYDLIQEGMQGLIRGAEKFDASKGFRFSTYSHWWIKQAMRKSVSEQTQIFRLPTTAHMVEASYRVKECTKRLRRKLKRRPSNEEIAVDTGMPVKRVEAAVNLPKYSVSLDSKIGSTDMTYQEVTADPSAETAEEMLNRMSMKKDVHXALDTLSPRERQVVKLRFGIDDGRIRTLQEIGNIMGVSRERIRQIESGAFRKLRGKKKVKCLMDYLVPVGNW

SEQ ID NO: 26208 - protein, 407 aa, Barbarea vulgaris
YQGVYPVKGNQDRFVVEDIVRFGSPFRFGLEAGSKPEILLAMSCLCKGSPDAFLVCNGFKDAEYISLALLGRKLALNTVIVLEQEEELDLVIDLSQKMNVRPVIGLRAKLRTKHSGHFGSTSGEKGKFGLTTTQIVRVVSKLSQSGMLDRLQLLHFHIGSQIPSTSLLSDGVAEAAQLYCELVRLGAHMKVIDIGGGLGIDYDGSKSGESDLSVAYSLEEYAEAVVASVRFVCDRRSVKHPVICSESGRAIVSHHSVLIFEAVSADKPMVHQATPDDIQFLLEGNEEARANYEDLYAAVMRGDHESCLLYVDQLKQRCVEGFKEGVLSIEQLASVDGLCEWVLKAIGASDPVHTYNINLSVFTSIPDLWGIEQLFPIVPIHKLDQRPGARGILSDLTCDSDGKINKF

SEQ ID NO: 26209 - protein, 771 aa, Oryza sativa
MAAILPDLATQVLVPAAAVVGIAFAVVQWVLVSKVKMTAERRGGEGSPGAAAGKDGGAASEYLIEEEEGLNEHNVVEKCSEIQHAISEGATSFLFTEYKYVGLFMGIFAVLIFLFLGSVEGFSTKSQPCHYSKDRMCKPALANAIFSTVAFVLGAVTSLVSGFLGMKIATYANARTTLEARKGVGKAFITAFRSGAVMGFLLAASGLVVLYIAINLFGIYYGDDWEGLFEAITGYGLGGSSMALFGRVGGGIYTKAADVGADLVGKVERNIPEDDPRNPAVIADNVGDNVGDIAGMGSDLFGSYAESSCAALVVASISSFGINHEFTPMLYPLLISSVGIIACLITTLFATDFFEIKAVDEIEPALKKQLIISTVVMTVGIVLVSWLGLPYSFTIFNFGAQKTVYNWQLFLCVAVGLWAGLIIGFVTEYYTSNAYSPVQDVADSCRTGAATNVIFGLALGYKSVIIPIFAIAFSIFLSFSLAAMYGVAVAALGMLSTIATGLAIDAYGPISDNAGGIAEMAGMSHRIRERTDALDAAGNTTAAIGKGFAIGSAALVSLALFGAFVSRAAISTVDVLTPKVFIGLIVGAMLPYWFSAMTMKSVGSAALKMVEEVRRQFNSIPGLMEGTTKPDYATCVKISTDASIKEMIPPGALVMLSPLIVGIFFGVETLSGLLAGALVSGVQIAISASNTGGAWDNAKKYIEAGASEHARTLGPKGSDCHKAAVIGDTIGDPLKDTSGPSLNILIKLMAVESLVFAPFFATHGGILFKWF

SEQ ID NO: 26210 - protein, 519 aa, Nocardia farcinica IFM 10152
MTTESQHNGPVSDTRTAAGDTSDSAADRGNLRPPDAPVLGPRPVYRPHVDSHTAHAFRRPAGQRGSFAERPPAPQTGDQAGDRLTQNRPPDAVLAEAFGRPEGSDELLQRDPDAADAAPAPPAPADPWRDPNSGARLGAPAVATPQPEPLPASRKLTAREVLFGARVAPKALALLAAVALAIGVVGGLVGRLTAETSTNLTSRKVTLEQTESTDQPHGQIAQVANAVLPSVVSIRTTVGENGSTGSGVVIDGAGYIVTNNHVISMAAQDKSGRASIQVTFSDGSRVPANIVGRDPKTDLAVLKVDVKNLTVARLGRSDDVQVGDDVLAIGSPLGLSKTVTSGIVSALHRPVKLSGEGSDTNAVIDAVQTDASINPGNSGGALVDMDGQVIGINSAIRSETGGSVGLGFAIPVDTMTEVAQSLIRDGVMHHPMIGLSARTKTVANEVMSGAAVADVAPGGPADKAGIVEGDVIVKVGDREVTGPEELTVAVQAREIGETVTVTLIRDGRQVDVPVTLESD

SEQ ID NO: 26211 - protein, 337 aa, Zea mays
MTIPGGVQWILPVPAVLFIRRPGAPFGNAMHERFRVLELPSPASGEQAAAFLAAAAAEPDPPRAAVVMGGGAVRADAAFLDAVPSVRCLVSTAAGVDHIDLAECARRGVAVANSGTIYSADVADHAVGMLIDVLRRVSAAGRFVRRGLWPLQEGEYPLGSKLGGKRVGIIGLGNIGSLVAKRLEAFGCVICYNSRRRMDSVSYRYFSNVQRLASESDVLVVACALNKETRHIVNEDVLEALGKDGVVINIGRGASIDEAALVSALKEGRIAGAGLEVFENEPKVPPELMSMDSVVLTPHSAVFTTESRADLCQHLICNLEAFFAGKPLITPVLRLTE

SEQ ID NO: 26212 - protein, 460 aa, Zea mays
  misc_feature (307)..(307): Xaa can be any naturally occurring amino acid
  unsure (1)..(460): unsure at all Xaa locations
MVNGERRADAECTRASLLGRYEIGRTLGEGNFGKVKYARHIASGGHFAIKILDRSKILSLRIDDQIRREIGTLKLLKHPNVVRLHEVAASKTKIYMVLEFVNGGELFDKIAIKGKLSEHEGRRLFQQLIDGVSYCHDRGVYHRDLKPENVLVDRKGTIKISDFGLSALPQHLGSDGLLHTTCGSPNYIAPEVLQNRGYDGSLSDLWSCGVILYVMLVGCLPFDDRNLVVLYQKIFKGDCQIPKWLSPAAQDLLKRILQPNPMKRINVAGIREHEWFKKDYVPAVPHDDDEDVLPSPAPSIKPIDEPXQEKCSPINAFQLIGMASSLDLSGFFEEEDAAQRKIRFTSTHPPKDLFDKIESVVMEMGFKVHRGAGKLKVLRNSKCSRNPSSLLVCTEVFELGPSLYVVELRKSHGDSTLYRQLCERLSDELGACKTDQIARTESSSDDLSSVDGEAFPLSGF

SEQ ID NO: 26213 - protein, 246 aa, Bradyrhizobium sp. BTAi1
MNGNSNKLVAEAIGTFWLTFGGCGSAVIAAGVPDVGIGMLGVALAFGLTVVTMAYAIGHISGCHLNPAVTVGLACGGRFPTGLILPYVIAQVIGAVVGAAVLYAIASGAPDFSLAGGFAANGYAEHSPGKYGLGACLLSEFVLTMMFLFVIMGATHGKAPVGFAPLAIGLALTLIHLISIHVTNTSVNPARSTGPALFVGGWALAQLWLFWVAPLLGGAAGGFIYRWLSREPAAEVTGQTVIPKRA

SEQ ID NO: 26214 - protein, 269 aa, Burkholderia sp. 383
MGRRLDWHEETRMTNALERFRLDGRRALITGSGRGIGLTLARGLAEAGAAIVINDRNEEKAATLVRHLREEGFTADYAVFDVAEHAQVRAAIDDFEARVGAIDILVNNAGIQRRAPLDAFEPDDWHALMRVNLDGVFNVAQAVARHMIARGRGKIINICSVQSELARPTIAPYAATKGAVRMLTKGMCADWARHGIQANGLAPGYFETELNRALVDDAAFSDWLCKRTPAGRWGRVDELCGAAIFLASAASDFVNGQTLFVDGGLTSAV

SEQ ID NO: 26215 - protein, 497 aa, Zea mays
MFSHGADSAHDAGTVGVSSGVGATVPARFVWPYGGKRVFVSGSFTRWSEHLPMSPVEGCPTVFQAICSLSPGIHEYKFYVDGEWRHDERQPTISGEFGIVNTLYLTREFNQINALSSPSTPGSRMNMDVDNENFQRTVTLSDGTVSEGTLRVSEAAIQISRCRVSEYLNLHTCYDLLPDSGKVIALDINLPVKQSFHILHEQGIPVAPLWDSFRGQFVGLLSPLDFILILRELETHGSNLTEDQLETHTISAWKEAKRQTCGRNDGQWRAHQHLVHATPYESLRDIAVKLLQNDISTVPVIYSSSSDGSFPQLLHLASLSGILKCICRYFKNSTGNLPILNQPVCSIPLGSWVPKIGDLNSRPLAMLRPNASLSSALNMLVQAGVSSIPIVDENDSLLDTYSRSDITALAKDKVYTHVRLDEMTIHQALQLGQDANTPFGFFNGQRCQMCLRSDPLLKVMERLANPGVRRVFIVEAGSKRVEGIISLSDIFKFLLSL

SEQ ID NO: 26216 - protein, 642 aa, Nostoc punctiforme PCC 73102
MVKTPPSQFSPDQYKVDSAQEKVNAIIETPPSETEIDLEFLYTRDIEFRQETIYFLVVDRFYDGDPDNSEGENSELYDPNRQEWGKYWGGDLQGVIDKLDYLKNMGVTALWLTPLFEQVEELFISNAAMHGYWTKDFKRINPRYIADGENPSLNATQEEKNTTFDRLVTELHKRNMKLVLDIVCNHSSPDTSGSKGELYDDGVKIADFNDDVNHWYHHYGEVQNWEDDWQVQNCELAGLATFNENNTEYRQYIKSAIKQWLDRGVDALRVDTVKHMPIWFWQEFTGEMTNHKPDVFIFGEWIYSNPSDDRSVEFANHSGMTLLDFGLCVAIRAALGQGSEMGFQTIQYIFDQDYRYSGATELVTFIDNHDMCRFQSLNPDPAMLKVAIALIMTSRGIPCIYYGTEQYLHNDTDGGNDPYNRPMMENWDTDSEVYRCIRLLSGLRRLNPAVSMGSHWQKYLTADIYCYVRRYRDSLCFVALNRGGEVILPEVETELPDGEHTCVVTRNKYEVKDGKIYNLVLEERGVLVFSHVGERIKAQTIVRVQLNGVDTQPGEIIVVTGDCPELGNWDISKAYPLEYINSNTWSAEIPFDESTGKLIAYKYAMWREGRSPLRENLVNRRWVIAKEGTVKWRDTWASGRES

SEQ ID NO: 26217 - protein, 317 aa, Burkholderia sp. 383
MAHESTQRPDLLMTGPYQPWDDAWLAGYNVHRLWEATDRAAFLAEHGAGVRAIATRGDLGANAELIAALPKLEIISCYGVGTDAIDLAAARERGIRVTNTPDVLTGDVADLGVGLALAMMRHIGAGDAYVRSGAWSDGDMPLVTRLYGKRVGVVGFGRIGTTIARRLSGFDVELGYFDVAPRTDSPHRFFGDLAELASWCDLLIVTLAGGPTTRHLVDAAVLDALGPQGYLVNVSRGTTVDEPALLDALERNAIAGAALDVFWNEPRIDPRFLALQNVLLQPHHASGTIETRQAMGWLVRDNLAAHFAGAPLVTPVV

SEQ ID NO: 26218 - protein, 308 aa, Medicago sativa
SHVPSPSEDSEQLRGAFQGWGTNEGLIISILAHRNAAQRKSIRETYTQTHGEDLLKDLDKELSSDFEKAVLLWTLDPAERDAFLANQATKMLTSNNSIIVEIASTRSPLELLKAKQAYQVRFKKSLEEDVAYHTSGDIRKLLVPLVGIHRYEGDEVNMTLAKSEAKLLHEKIADKAYNHDDLIRIVTTRSKAQLNATLNHYNNEFGNVIDKDLETDSDDEYLKLLRAAIKGLTYPEKYFEELLRLAINKMGTDENALTRVVTTRAEVDLQRIAEEYQRRNSVPLDRAIDKDTSGDYQKILLALMGHDE

SEQ ID NO: 26219 - protein, 506 aa, Oryza sativa (indica cultivar-group)
MAVDMELDGGGDGKGKAPPQISLSGLFLACMVAGGVQYGWALQLSLLTPYIQTLGIPHALTSVMWLCGPIAGLIVQPCVGLYSDKCTSSLGRRRPFILTGCIIICISVIVIGFSSDIGYALGDATEDCKVYRGPRYHAAAAFILGFWLLDFSNNTVQGPARALMADLSGRHGPSAANAIFCSWMALGNILGYSSGSTNDWHKWFPFLMTRACCEACANLKAAFLVAVVFLGLSTAVTMVFAREVALDPVAAAKRNEGEASGPLAVFKGMKNLPVGMPSVLIVTGLTWLSWFPFILFDTDWMGREIYHGRPDGSPAEVTAFQEGVRQGAFGLLLNSIVLGISSFLIEPMCRRLGARAVWVMSSAVVCVAMAAVSVLSAWSLGDFGGSVQDAARAPAEEGGVRASALALFVFLGLPFAVLCSVPFAVTAQLTASRGGGQGLCTGVLNISIVVPQMAIALGAGPWDELFGEGNIPAFAMASVFAAAAAAAGVVLLPKVSVRSVSMAGGH

SEQ ID NO: 26220 - protein, 461 aa, Zea mays
  misc_feature (46)..(46): Xaa can be any naturally occurring amino acid
  misc_feature (63)..(63): Xaa can be any naturally occurring amino acid
  unsure (1)..(461): unsure at all Xaa locations
MPTRNHNAAAAAAPQHHHYNRGGAPALGKSKGRAPARADPMNRRAXPLGDIGNLVSVRPAEGXSLSCRSRSIAPITRSFGAQLVKNVQANAAIKNAAILPARHAPRQERKAPAKQPPPEDVIVLSSDSEQSRTQLESSASSVRSRKKVINTLSSVLSARSKAACGITDKRRQVVVIEDIDKLDVNNELAVVEYIEDIYTFYKIAQHDRRPCDYIDTQVEINPKMRAILADWIIEVHHKFALMPETLYLTMYIIDQYLSLQPVLRRELQLVGVSAMLIACKIEEIWAPEVNDFILISDSAYSREQILSMEKGILNNLEWNLTVPTVYMFLVRFLKAATLGNIVEKEMENMVFFFAELALMQYGLVTRLPSLVAASVVYAARLTLKRAPLWTDTLKHHTGFRESEAELIECTRCWSAHTRRPHADSKLRAVYKKYSSEQFRTRARVRPPAAAVEINETKITCC

SEQ ID NO: 26221 - protein, 123 aa, Prorocentrum minimum
TITTKELGTVMRSLGQNPTEAELQDMINEVDADGNGTIDFPEFLSLMARKMKDTDTEEELIEAFKVFDRDGNGFISAAELRHVMTNLGEKLTDEEVDEMIREADVDGDGQINYEEFVKMMMAK

SEQ ID NO: 26222 - protein, 448 aa, Gracilaria gracilis
MGNVTRKAAVQNGKSKAATLVDEAIQTNPVVIFSKTYCPYCQSAKSNIRSALKKIANAPKPEIFELDRMGSLGYQIQNYLAQVTGRHTVPNVFIGGSSVGGGDDIAAYARRGVLVQMLTQAPQRLVHQFPERFEPEKKPDTAAEAVERAIKDNAVMVFSKSYCPFCTSAKDLLQERIAAVEGLNPINVFELDEMGTDGAAMQQYLFQKTGQRTVPNIFIAGKHVGGSDDVHGLDARNELIPMLTSAAASVSSPAATEVLSAEEEQTETDTALPADVVSEEKPKTETKEIVFGAGCFWGVELAFQRVAGVLKTEVGYSNGKMSRVTYDAICTGATGSAEVVRVWYDPSVLFLKQLLEVWESRHDPTSLNKQGNDQGTQYRSAIYYSDEEQAEEVRRWISEASTRHTKEIVTEVAAIKNYCAAEEYHQRYLEKKGQSAEKGSSASIRCYG

SEQ ID NO: 26223 - protein, 451 aa, Shewanella oneidensis MR-1
MAQHFDYICLGAGSGGIASANRAAMRGAKVLLIEAKHVGGTCVNVGCVPKKVMWYGAHIAEAMNLYAKDYGFDVSVNKFDWNTLVNSREAYIGRIHEAYGRGFTNNKVTLLNGYGRFVNGNTIEVNGEHYTADHILIATGGAPTIPNIPGAEYGIDSDGFFALREQPKRVAVVGAGYIAVEVAGVLHALGSETHLFVRKHAPLRNFDPMLIDALVDAMKTEGPTLHTNSVPQSVVKNADDSLTLNLENGESVTVDCLIWAIGRSPATGNIGLENTEVQLDSKGYVITDAQQNTTHKGIYCVGDIMAGGVELTPVAVKAGRLLSERLFNAMSDAKMDYSQIPTVVFSHPPIGTMGLTEPEARAQYGDGNVKVYTSSFTSMYTAVTSHRQACKMKLVCAGKEDKVVGIHGIGFGMDEILQGFGVAMKMGATKADFDAVVAIHPTGAEEFVTMR

SEQ ID NO: 26224 - protein, 352 aa, Solanum tuberosum
MDRGPGPCMDMPIMHDSDRYDFVRDIGSGNFGVARLMTDKQTKELVAVKYIERGDKIDENVQREIINHRSLRHPNIIRFKEVILTPTHLAIVMEYASGGELFERISNAGRFNEDEARFFFQQLISGVSYCHSMQVCHRDLKLENTLLDGSPAPRLKICDFGYSKSALLHSQPKSTVGTPAYIAPEVLLRKEYDGKIADVWSCGVTLYVMLMCAYPFEDPDEPKDFRKTINRILSVQYSVPENIQISEECRHLISRIFVGDPAQRITMPEIRNHVWFLKNLPADLIDDKMISDQFEEPEQPMQSIDTIMQIISEATVPPIGLYNLEMMDDDMDDLDSEPDLDIDSSGEIIYAM

SEQ ID NO: 26225 - protein, 440 aa, Methanococcus voltae
MRNNIVNKGTEELSYEIRGIVAVAERAQKLGKKIIWENIGDPIAKGEQMPEWIKEIVSESTLENKTYGYCPTQGLLETREFLADLNNSKNGAQITSDDMIFFNGLGDAITNIYGLMRKECRVIGPTPAYSTHSSAEGLYSNSSPVMYSLDKDNLWYPDLDDLENKVKYNPSVSGILLINPGNPTGAVYSKKVLSDIVDIANEYDVFILCDEIYQNLVYNGKKHVSLSEVIDDVCGISMKGISKDLPWPGSRCGWTEFYNKDKDPVFKKYVENIGKFKMIEVCSTTLPQTIIPKVMGDKRFEKSLGERKKYYEKASNYAYKTINKVEGVSVNLTNGAFYGALTFDDGVLNDKQHLKMDNELDTYINGVLDQCGQHSLVEKDKRFVYQLLGASGICMVPLTSFCSKHEGLRFTLLEKDENLMKWTFKTLSEKIDEYLNSSAN

SEQ ID NO: 26226 - protein, 400 aa, Chlamydia trachomatis
MSLFEQLPSFSPDSILGLAQAFQEDPREDKINLLLGTYEREKKRYGGFSSVRKAQSVFFDDEKDKNYLPIKGSSTFLEEMAALCFGEVDANRWVGVQAIGGTGALHLGASVYANASLAGKVYIPSQTWGNHSRIFSHQGLALEYYPYYDQETKELDLQGLKAVLRSAPETSLVLLHCCCHNPTGKDIPLSEWPEIITIIKERDLIPFFDMAYLGFASGIEEDRRPVQLCIEAGVTTFVAGSASKNFSLYGSRVGFFGAIHQDKQDLNRILSFLEEQIRGEYSSPAREGVAIVTSILSNPYLRQEWELELNGIRQSLEEIRSSFVIAMRNVAGHSFDFIASQKGFFGYPGFSKEQVLFLREELGIYTTAGGRFNLNGITDKNINRVTHGFAQAYEYPRSVS

SEQ ID NO: 26227 - protein, 478 aa, Bacillus thuringiensis serovar konkukian str. 97-27
MRKTMSQVNNTNNELKRTMKSRHLFMIALGGVIGTGLFNGSGFIISQAGPGGSVLAFMAGGLLMYFVMLCLGELAVAMPVSGSFQEYATKFINPATGFTIGWLYWLSWANTTGLEFTTAGITMQRWFPDIPVWVWCLIFGVTIFTINALSARSYAETEFWFSSIKVSAIIAFIILGGAAMFGLIDLKGDEPAPLLSNFVNHGGLFPNGLAAILLTMVTVNYSFQGTELVGIAAGESEDPAKTLPRSIRNIIWRTMFFFVLAIFVLVALIPWEEAGLTKSPFVAVFDNIGIPYAADIMNFVILTAVLSVANSGLYAATRMLWSLSKNEMAPAFLKKLSSRGIPLNALILTISISAFSLLTSVVAAETVYLWLISISGVITIIVWMSICVSQFFFRKHYVADGGRLEDLKFKTPLYPLVPILGFGLYGIILVSLIFIPDQRLGIYCTVPFIIFCYTYYHFKVKKRISTNTSSENKISETI

SEQ ID NO: 26228 - protein, 368 aa, Chlamydophila abortus S26/3
MSECPIDFVTNDFLGFSRSTVLVNEVERRYRVYCEQFPHAQLGACGSRAIVGPSQTLQKLETKIAQFHQAEAAFVVHSGYMANLGFCYHISKDTDMVFWDASVHISVVQSLKMISGKHQSFPHNDLTALESLLMSHRAVSSGRIFIFVCSVYSFLGTLAPLEELLPLSRKYHAHLIVDEAHAMGIFGEEGRGFCHTWGYENFYAVLVTYSKAMGAMGAAILSSSEVKTELLLNSPPLRYTTALAPHALIAISAAYDHLLVAGELARKQVFALQAYFQQYFGLSSQGCGQPVFLQDLHRDLLVSLLNEANLRVSWVNFTDKPFIRVNFHAFNHQDEVDLLIAVLHSYLEKCGCRIDVNHEFDFGRQFCR

SEQ ID NO: 26229 - protein, 473 aa, Methylococcus capsulatus str. Bath
MFDRYRFVGAICAALVLAVSPPARAQLPDFTQLVEQNNAAVVNISTTQKVAANEQQMPEGLEIPEGTPFDDFFRHYFGEGGGSDGQPSEAKSLGSGFIMSADGYIITNHHVVKGADEIVVRLQDRRELVAKIVGSDKRSDVALLKIEASQLPTVKLGSSEKLKVGEWVLAIGSPFGFDHSATAGIVSAKGRSLPSDNYVPFIQTDVAINPGNSGGPLFNLNGEVVGVNSQIYSRTGGFMGLSFAIPIEVAMQVVDQLKASGRVSRGWLGVQIQDVTRELAESFDMKKPQGALVSKVLSKSPAEAAGVQIGDIVLEFNGQAVDTSAALPPMVGMTKVGEVAKIKLLRNGAIKELSIKIGALPDEEEPAMGTAEPDAVPLKRMGASVADLTPELREQFEVPRGGVLVYGVNPGPAYEAGLRRGDVILRIQDKEINGVKQLVELEKTLPAGKSLAVLVQRRDGSIFLAMKLKDEKQ

SEQ ID NO: 26230 - protein, 349 aa, Chlamydophila abortus S26/3
MKYPLVFKDLHIEDYERVIEVTCEDIQLHALIAIHQTLVGPALGGVRAFSYDSFDAALTDVLRLSKGMTYKAVLSGTGTGGGKSVIILPQGMTRPTEDILRAFGQAVDSLSGQYIAAEDMGVSVNDINIIHQETPWVCGIESVSGDPSIYTAHGVFLCIKETAEQLWGSSSLTGRKIGIQGLGAVGRKLLHSLFFAGAELYVSDANPSILDEVTKFYGVTVVPIHAFPTLECDIFVPCAFGGVINRSNVYNLRCRAVVGAANNQLEHPSLGAVLHAQGILYAPDYLANAGGLLNVALAVGKTYCPKTVLQKVNQLPLILKEIYQKSEDTDQDTVILSDSIVEEKLTAYI

SEQ ID NO: 26231 - protein, 424 aa, Aquifex aeolicus VF5
MKNEKLYREALQVMPGGVNSPVRAFKAVGGKPIFLVKGRGPRVWDAEGNEYIDFLASWGAIILGHAPKKVVKAVQEEAEKGLSFGLTNPHEVTLAKLVVEMVPSVEKVRFVNSGTEATMSAVRLARGVTGRKYIVKFEGCYHGHYDSLLVSAGSGVATFGIPGTPGIPEEIAKLTIVLPYNDVQALEEAFKEYGSEIAGVIVEPIAGNMGVVPPKKEFLIRLRELTKEYGSLLMFDEVITGFRLSKGGAQELFGIEPDITCLGKILGGGLPVGAYGGRREIMERVAPEGEVYQAGTLAGNPLAMVSGSETLKDLRDKEPYKELEEKMEKLARGVKDILTEKGIQHTINKVGSMMTVFFTDKKVVDFQTAKTSDTELFAKFFRALLNKGVLIPPSQFEAWFLTTAHEEEVIDEALERIRDAVKEL

SEQ ID NO: 26232 - protein, 690 aa, Cryptococcus neoformans var. grubii
MRKAMANDGQGTTESTEAAMENSQTNLSHTSRTTGPKGTLRVKVISARGLAVSHSPGAEPQPYVVIQFEQNEYVSRPPHPVTSASSVPFTTSTPQPIGTPNNLTRSSSGLGVGAISRAFADAVGRGKKKEDGSGTMTPKAEEPAGGSWLGKPGPGDPVWKEEVSFDVTSSKPTLHLSVYDRNRDGEGFLGMLDIKPVLQDGYVLDNWYKLDTRGDETVTGEVWIQMTYTIIRKRISLKPSDFEFLKLIGRGTFGRVFQVRKKDTRRIYAMKVLSKKEIVAKKEVAHTIGERKILQCSLECPFLVGLKFSFQTDTELYFVTDYKCGGELFWHLQKEGRFQRRSGGLQKEGRFSEDRARFYIAELVLALEHLHKYNIVYRDLKPENILLDATGHVALCDFGLSKPDLTDDKLTNTFCGTTEYLAPEVLLDEKGYGKHVDFWSLGVLLFEMCCGWSPFYAEQTQEMYRLICYGKIRFPKNVIGDDGKQFVKGLLNRNPQNRLGSHRGAVELKEHPFFKNIDWDLLYKKQITPPFKPIVDSDESVANFDPEFTNSSLLDAGIVPWEEVNANVDPGTASQPGKHSYLGPGAGISGSVPGGGGVAINKAQRPGLPGANGSPLTSSVQENFRGFTYTGESLMPQSMLADQSMDSDSDNENAVDDDEDDDEDEEEYEEDDDEENGIGSSRRECDVDMD

SEQ ID NO: 26233 - protein, 333 aa, Listonella anguillarum
MSISNAVTKVEEFEDQEIMDSIEVDEELTTTKSQSDDDVQIEDAKEGFDASTKSLDATQMYLSEIGFSPLLTAQEEVLYARRSLRGDEAARKRMIESNLRLVVKISRRYGNRGLALLDLIEEGNLGLIRAVEKFDPERGFRFSTYATWWIRQTIERALMNQTRTIRLPIHVVKELNIYLRTARELSQKLDHEPTAEEIAFQLDKPVEDVSKMLRLNERISSVDTPIGGDGDKALLDIIPDTNNSDPEISTQDDDIRESLLNWLDELNPKQKEVLARRFGLLGYEPSTLEEVGREINLTRERVRQIQVEGLRRLREILVKQGLNMEALFNVEYD

SEQ ID NO: 26234 - protein, 403 aa, Brassica oleracea
YQGVYPVKGNQDRFVVEDIVRFGSQFRFGLEAGSKPEILLAMSCLCKGNPDAFLVCNGFKDAEYIFLALLGRKLALNTVIVLEQEEELDLVIDLSQKMNVRPVIGLRAKLRTKHSGHFGSTSGEKGKFGLTTTQIVRVMRKLSQSGMLDCLQLLHFHIGSQIPSTSLLSDGVAEAAQLYCELVRLGAHMKVIDIGGGLGIDYDGSKSGESDLSVAYTLEEYAEAVVASVRFVCDRRSVKHPVICSESGRAIVSHHSVLIFEAVSAVKPMAHQANPDDIQFLLEGNEEYEDLYAAVMRGDHESCLLYVDQLKQRCVEGFKDGVLSIEQLASVDGLCEWVLKAIGASDPVHTYNINLSVFTSIPDLWGIEQLFPIVPIHKLDQRPGTRGILSDLTCDSDGKISKF

SEQ ID NO: 26235 - protein, 413 aa, Lactococcus lactis subsp. lactis Il1403
MDTGSIAFILICAALVFLMTPALAFFYGGLGRRKNVLNTMMMSLAPMALASILWIIIGFSFSFSGSNSWIGDFHHLFMNGVDMAKNSLFPANHIPDGLFSGFQMMFSIITVALITGSVVGRMRFTPILIFMTAWLILVYYPLAHMVWGGGFLAQIHAIDFAGGDVVHISSGVTGLGLALVLGKRRDYERLDYRPHNIPFVVLGAGLLWFGWFGFNAGSALAANGVAINAFMTTNTAAAAAMFSWMIVEKILIGKPSIVGACSGAVVGLVAITPGAGFVSLWSSLIIGLLVSPLSYFMISVVKKKLGYDDALDAFGCHGIGGMFGGIMTGIFATPALAPEKGYAGLIYGSGKLLLANVSAVVFTVIFTALVSWIIIKVIALFMPIRVSDRAEAIGLDDSEHEETAYPTFLGLDS

SEQ ID NO: 26236 - protein, 676 aa, Hordeum vulgare subsp. spontaneum
MFPLGARQPPPSAMDNHQQQQPPRGEHAAQPRCWEEFLHRKTIRVLLVETDDSTRQVVAALLRHCMYQVIPVENGHQAWAYLQDMQSNIDLVLTEVFMHGGLSGIDLLGRIMNHEVCKDIPVIMMSSHDSMGTVLSCLSNGAADFLAKPIRKNELKNLWAHVWRRSHSSSGSGSGSAIQTQKCTKSKSGDDSNNNSNDRNDDASMGLNARDGSDNGSGTQAQSSWTKRAVEIDSPQDMSPDQSADPPEGTCAHVNHPKSEICSNRWLPGTNNKKCQKPKETTNGDGFKGKELEIGAPGNLNTDDQSSPKESSVKPTDGRCEYLPHNNSSDTVMENLEEPIVRAADLIGSMAKNMDAQQAAARAIDAPNCSLQAPEGKDTDGENAMPYLELSLKRSRSTGEGAGPIQEEQRNVVRRSDLSAFTRYNMCAVSNQGGAGFVGSCSPNGDSSEAAKTVAAQMKQGSNGSSNNNDMGSTTKSVVTKPCGNNKVSPINGNTHTSAFHRVQPWTPATAAGKDKADEVSKKNVAAAAAAAKEMGCEAQSKHPCAAADDVNGGSAGGTAQSSVVNPSGPVEGHAANYGSNSFSNNNTNNGSTAATTAAAATVHAETGGGVDKRSNMMNMKRERRVAAVNKFREKRKERNFGKKVRYQSRKRLAEQRPRVRGQFVRQPPAPAAVER

SEQ ID NO: 26237 - protein, 115 aa, Oryza sativa
  misc_feature (33)..(33): Xaa can be any naturally occurring amino acid
  misc_feature (90)..(90): Xaa can be any naturally occurring amino acid
  unsure (1)..(115): unsure at all Xaa locations
MGRLFVMHLEGKVYSCKHCHTHLGLSSDIISKXNVTSGVKEDRMMITGMHPVSDIFCVGCGSIVGWKYEAAHEKSQRYKEGKFILERYKXVSGPDGSHYFVTHDAHVGGSDVDDV

SEQ ID NO: 26238 - protein, 887 aa, Alkalilimnicola ehrlichei MLHE-1
MTAATVPELLSARPPDGVAAVAITRDGAEECSRGELLERAGRLAAGLVSAGLDKGDRIALVAHNSVDWVAAALGVMQAGGVVVPLDTQMPLKEFHFVLRDAQPRWVFTTGALVDRVIGAEVDPEPTLYRLDGDERAPEHWRSLWADEPIVPDVAPEDLATMFYTSGTTGAPKGVPLTHKNLASNVSSLVQENVAGSDDRVLVPLPFHHVYPFTVGILVPLRLGAPLILPFSLVGPQIVRALQLGQPTIMLGVPRLYDAVWTALEDRVAGRGAVAEKLFHGMLALSMQARKRWGLRLGRRLFRSLHQRLAPSLRMVVSGGAALDPTLTEKLRALGWEVATGYGLSETAPILTYNPPERLRVESAGMALPGVELAIDPPGEIGEVLARGDNVFHGYWRRPDKTREVLQEDGWFRTGDLGELDGDGYLYLQGRRSAMIVLPGGENIDPERVEGVLSQAEGVREVGVLESGGRLVGVAVPEPALLRAHQGEALRERLISAVQAAGRALPSHHRPGRLQVAVDPLPRTRLGKLRRHELQHLYDRLAEQGGVSAAKAEPIPRESMAPEDQQLLTDPSAEATWEYLVEKYPDFRLTPDTSLSLDLGLDSLAWVNLSLTLRDRVGVEFDDDAIGRIETVRDLLREAAGAGQSEGTAEGAGDLVAELRRPESNVPEDLQRWLEPRSALSAVSARLLWALASLFTRVWVRVEVRGRLPDDGPVLIAPRHLSVLDPVVLSHAVGLRRMLHLRWAGWTGLLFQGPVSRWFSRAAGVLPVDPASAPRRSLALAAMTLQRQDSLVWFPEGARSPDGRLQPFQPGVGLLLRAWPVPVVPVWVEGTRELMPKGRRLPRFGRATVVVGEPISAERLKALGDDEHAIARLIHDEVAALEPGSPRS

SEQ ID NO: 26239 - protein, 407 aa, Capsella bursa-pastoris
YQGVYPVKGNQDRFVVEDIVKFGSSFRFGLEAGSKPEILLAMSCLCKGNPDAFLVCNGFKDAEYISLALLGRKLALNTVIVLEQEEELDLVIELSQKMNVRPVIGLRAKLRTKHSGHFGSTSGEKGKFGLTTTQIVRVVRKLSQSGMLDRLQLLHFHIGSQIPSTSLLSDGVAEAAQLYCELVRLGAHMKVIDIGGGLGIDYDGSKSGESDLSVAYSLEEYAEAVVASVRFVCDRSSVKHPVICSESGRAIVSHHSVLIFEAVSADKPMVHQATPDDIQFLLEGDEEARANYEDLYAAVMRGDHESCLLYVDQLKQRCVEGFKEGVLSIEQLASVDGLCEWVLKAIGASDPVHTYNINLSVFTSIPDLWGIDQLFPIVPIHKLDQRPGTRAILSDLTCDSDGKINKF

SEQ ID NO: 26240 - protein, 155 aa, Petunia x hybrida
TLINRAGKATYVKFHWKPTCGVKSLLEEEAARVGGENHSHATQDLYDSIAAGNYPEWKLFIQTMDPAHEDSFDFDPLDVTKTWPEDILPLQPVGRLVLNKNIDNFFNENEQLAFCPSIVVPGVYYSDDKMLQTRIFSYSDTQRYRLGPNYLQLPA

SEQ ID NO: 26241 - protein, 851 aa, Arabidopsis thaliana
MIWSLGERNTDPKSPPSRQSSEISLWERLGKASTVDIDSSCFSWNMLSSLHHTEHSSSTDHSEEDQSKPLEVTVNSGGVVFFALFNSSSSEDASRKEEAAVIKFASSRMATQSERLGYEFSKWLGVQIPQARVIHSCNPEWTLIKEATEKAQAKATSEGDEVGEMTCSELLEALELSRCLLLMSYVHGCPMLESMSSFETEEKAERAAAALGRILVLDLVIRNEDRLPCRQLRWRGNPANLLLTDRIVSSAKHHECSFDEAFDSAIKRYHPKDYRSIQRERRASSVDSRSRLSISDQMLVSQASDFSDITESPRSYDTGLMSPMSDRSVAADFHLVAIDSGVPRRPPAGKRASDQEIYPRLVELLLNSSQYSSNLLHEITEGSLGYPQAEDGEETSNVRSVVTPVVREFRNGFRAGLRDLQEFHIFLVTLHQKLDVLLRAFFSMMDKTMCADFDREDFAVPESPSHTHGHEVNHYPSPSKDRVPSDNSSDHSESDMQKSVPRTPNSENKEDGSSPKSRESWHGRSGKGGESLSSQRLAAKLRDFHKFAKVDAESNKELDQWNETLRNEVMKLCQENGFNTGFFEGSDNNSCTDAYELKVRLEHILERISLISKAANTEKPSMIQENLFIGGGLAARSIYTLQHLGITHVLCLCANEIGQSDTQYPDLFEYQNFSCLPFDQITDDEDSNIESIFQEALDFIKHGEETGGKILVHCFEGRSRSATVVLAYLMLQKKLTLLEAWSKLRKVHRRAQPNDGFARILINLDKKCHGKVSMEWRQRKPTMKVCPVCGKNAGLSSSSLKLHLQKSHRKLSSGSVDSAMNMEIQKALEALKLSTGRGSSASSNSFQSHPG

SEQ ID NO: 26242 - protein, 52 aa, Glycine max
MGSFLEILCAVLIPPVGVFLRFGCGLEFWLSLLLTFFGFIPGMVYAIWVLTK

SEQ ID NO: 26243 - protein, 263 aa, Oryza sativa (japonica cultivar-group)
MPPLLASTSSTSPLLLASRLRGGGGCGCGGAPLLHRTRRGFLAPSTTTTQTTRTSFAAMSWLGKLGLGGLGGSPRASAASAALAQGPDEDRPAAGNEFAQFGAGCFWGVELAFQRVPGVTRTEVGYSQGNLHDPTYEDVCTGATYHNEVVRVHYDVSACKFDDLLDVFWARHDPTTPNRQGNDVGTQYRSGIYYYTPEQEKAARESLEKQQKLLNRTIVTEILPAKRFYRAEEYHQQYLAKGGRFGFRQSAEKGCNDPIRCYG

SEQ ID NO: 26244 - protein, 512 aa, Oryza sativa
MGMLNLMRLMSVKRRRRQVQVPHDGLIALRAKRKCSPCQQDGDSQGAADIEIPDLPEDIWRLIHSLMPMRAAARAACVSRSFLSSWRCHPNLNFSSEAFGLNRNACGKEELAGLFYSKVDHILKRHSGIGVKKLTIKVYSDYSGKGSSYLNNWLQIGVKPGIEELIISLTQFQAKYNFPCSLLSNGSGDSIQYLHLSNCSFHPTVTLGGLRSLTRLYLCCVRITENELSCFLSHSLALEQLEIRYCDRIVCLKVPCLLQRLISLKVFGCDNLKLIENEAPNVSIFAFQGDKTQLKLGETLQMKSLCMVRSGYVYHARAELPSIMPNLESLAMKSFKETAFAPKLCSKFLCLRHLSIALIGYFPAYDYLSLASYIHAAPSLETFYLTVMQRYVQNVSIFAHPADLRSIREEQHHSLKSVRVTSFISVKSLVELTCHILESTTSLECLTLDASQTGFRCDTPGSKIGKCPPLDRDIIMEGHRGVLAIRRYIQPRVPSTVKLNVLEPCSCHCTEL

SEQ ID NO: 26245 - protein, 37 aa, Cynodon dactylon
CRMLLMYQYGARSVKCAVCNFVTSVGASPGSEQKPST

SEQ ID NO: 26246 - protein, 104 aa, Festuca arundinacea
KADLLDYDAIRRAVDGCHGVFHTASPVTDDPERMVEPAVRGTQYVIDAAAEAGTVRRMVFTSSIGAVTMDPNRGLEVVVDESCWSDLDFCKKTRNWYCYGKAVA

SEQ ID NO: 26247 - protein, 253 aa, Streptomyces coelicolor A3(2)
MADAPYKLILLRHGESEWNEKNLFTGWVDVNLTPKGEKEATRGGELLKDAGLLPDVVHTSVQKRAIRTAQLALEAADRHWIPVHRHWRLNERHYGALQGKDKAQTLAEFGEEQFMLWRRSYDTPPPALDRDAEYSQFSDPRYAMLPPELRPQTECLKDVVGRMLPYWFDAIVPDLLTGRTVLVAAHGNSLRALVKHLDGISDADIAGLNIPTGIPLSYELNAEFKPLNPGGTYLDPDAAAAAIEAVKNQGKKK

SEQ ID NO: 26248 - protein, 109 aa, Streptococcus sp.
LLYALLHLSGFEDVSMEEIKSFRQWGSKTPGHPEYGHTAGIDATTGPLGQGISTATGFAQAERFLAAKYNREGYNIFDHYTYVICGDGDLMEGVSSEAASYAGLQKLDK

SEQ ID NO: 26249 - protein, 410 aa, Oryza sativa
  misc_feature (140)..(140): Xaa can be any naturally occurring amino acid
  unsure (1)..(410): unsure at all Xaa locations
MASGDGGDDAGVKRVADRYLKREVLGEGTYGVVFKAVDTKTGNTVAIKKIRLGKYKEGVNFTALREIKLLKELKDSNIIELIDAFPYKGNLHLVFEFMETDLEAVIRDRNIVLSPADTKSYIQMMSKGLAFCHKKWVLHXLKLADFGLARIFGSPERNFTHQVFARWYRAPELLFGTKQYGSAVDIWAAGCIFAELLLRRPFLQGSSDIDQLGKIFAAFGTPKSSQWPDMVYLPDYVEYQFVSAPPLRSLFPMASDDALDLLSRMFTYDPKARITAQQALEHRYFLSVPAPTKPSQLPRPPPKGDSGNNKIPDLNLQDGPVVLSPPRKLRRVTAHEGMEVHMHRADRTEEHPSGARHMDDMSSQSSRIPMSVDVGAIFGTRPAPRPTLNSADKSRLKRKLDMDPEFGYTE

SEQ ID NO: 26250 - protein, 332 aa, Pseudomonas syringae pv. tomato str. DC3000
MGLLVDGRWQDQWYESSKDGAFQRENAQRRNWVTRDGQAGPSGEGGFAAEAGRYHLYVSLACPWAHRTLILRKLKGLEKLIDVSVVSWLMLENGWTFDQQKGSSGDALDDFQFFHQRYTADDPRYTGRVTVPVLWDKQQQRIVSNESAEIIRMFNAAFDELTGNTLDFYPSALQSSIDELNEQIYPKVNNGVYRAGFATSQGAYEEAFDDVFAELDVLENLLGEKRYLTGKHLTEADIRLFTTIVRFDAVYYSHFKCNLRRIADYPNLSNWLRELYQWPGIAETVDFEHIKGHYYASHRTINPTGIIPKGPALDLQAGHDRERLSGEGAWSK

SEQ ID NO: 26251 - protein, 435 aa, Burkholderia sp. 383
MPPSAARFSSHTMDIDQYMTDLGRRARHASRAMARASTAAKNAALDAVARAIERDAQVLKDANARDVARAREKGLDAAFVDRLTLSDKALNTMVEGLRQVASLADPIGEISNLKYRPSGIQVGQMRVPLGVIGIIYESRPNVTIDAAALCLKSGNATILRGGSEALESNTALAKLIGEGLEAAGLPQDAVQVVATADRAAVGKLITMTEYVDVIVPRGGKSLIERLINEARVPMIKHLDGICHVYVDDRADLAKALTVCDNAKTHRYGTCNTMETLLVSSGVAAKLLPPLGKLYRDKQVELRVDAAARTVLADAGVGPLVDATEEDWHTEYLAPVLAIKVVDGLDAAIEHINHYGSHHTDAIVTEDHDRAMRFLREVDSASVMVNASTRFADGFEFGLGAEIGISNDKLHARGPVGLEGLTSLKYVVLGHGEGRQ

SEQ ID NO: 26252 - protein, 437 aa, Moorella thermoacetica ATCC 39073
MYKAKRRLGLVFFPAFDWAISPTHPEREERLLYTQDQVFEEGILDIEGIREYRPRLASTGDVERVHICVPDVQSRTTESHLIAAGGAIVAAEAVLKGEVDKAFAIIRPPGHHSFRIVHGARGFCNINMEAIMLEYIRRHYGPKRIAIVDTDCHHGDGSQDIYWHDKDTLYISLHQDGRTLFPGTGFLNEFGGPNAFGYTLNLPLPPDTGEEGFLYALEHFILPVLAEFKPDLVINSAGQDNHYTDPITNMRFSAQGYARLNDRLQPDIAVLEGGYSIEGALPYVNAGIILALAGLDYSRVREPDYTPEKVAQSPRVSEYIARLCDESYQAWQQRDTLREEYIRGKKEISRRRRIFYDTEGLMETQQETTRVCHDCGGVTWIDSRTDQGRHILAIFIPRDACPRCQEEGHALFESSQTIDYPDGVFLQDRLEDKLFKK

SEQ ID NO: 26253 - protein, 416 aa, Chlamydophila abortus S26/3
MSKKRVVVTGLGVVSCLGNEIDTFYDNLLAGVSGVRTITSFPCEDYATRFAGWIPEFNPEPYLDKKQARRVDCFITYAVVAAKKAIAMSRWDKDNLPADPLRCGVIIGSGMGGLQTLDDGMERLILGNKKLSPFFIPYIITNMAPALIAMDFGLMGPNYSISTACATSNYCIDAAYQHLVSGRADIIVCGGTEAAVNRVGLAGFIANRALSERNDAPQEASRPWDRDRDGFVIGEGAGILVLETLENALKRGAPIYAEILGAYTTCDAFHITAPRDDGEGITSCILGALESSGIPKERVNYINAHGTSTPLGDISEVLALKKAFGSHVKKLRMNSTKSLIGHCLGAAGGVEAVATIQAIQTGKLHPTINLENPITEIDDFDVVANKAQDWDIDVAMSNSFGFGGHNSTILFSRYIP

SEQ ID NO: 26254 - protein, 1862 aa, Cryptococcus neoformans var. grubii
MLPSSQQTTAAGPPATPDQLTLRHRHPSSKRRKSRNLDDPSKSKPSPSESARRGKPTFLSSMHFSQALPQSIPSMASDEPRPELQRGQRRSKIEALTKIDRAGTPIQLAAGPAATSFVPHTIQQSTPPASAPHYLRNPLHRPKVVNPPFSIDSVRTKAPRHPHPRTEPRLFGLEDCPTFYPTPKEFTDPMAYIESIAQQGKKYGMCKIVPPEGWNMPFRLETEIFRFKTRLQRLNQLEAASRAKLNFLEQLSMYHMQQGNPKIHIPLIDRQPLDLWKLRREVNRSGGNFELDRTKGWSKITEVLGHKPSWTPHIRAAYMNIVLPFDNWAVTAKSASVSPLAHFNSGSNSSPSKAPPAFITDNLSATPIKQDYGVSRMGTTSHRPTLRVRLNDMHFAPSFDNGRSPSKCASVKGGGALADAIEIKQPVSLPTAPSVAADTPTMLRINVPGFSDREGSDSELSDEDSPSSLPSIRKAPFEPEYQKGEVCEICKGEYDADKILLCDGCDRGFHIYCLDPPLASVPNNEWYCTSCLLSQGEDFGFEEGDEHSVASFQARDAAFSCAWWNRHMLHNSPGASVNGAQLADNGDNERVRPRQFGKVTVSEDDVEREFWRLTESPLDTVDVEYGADIHSTSHGSAGPTPETHPLDPYSKDPWNLNNMPILPDSLLRYIKSDISGMTVPWIYIGMMFSAFCWHNEDHYTYSINYMYWGETKTWYGVPGSDAEKFEAAIKSEAPDLFEQQPGLLFQLITMMNPGRLSDAGVKVVACDQRPNEFVITFPKAYHCGFNHGINMNEAVNFALPDWLPDGKDSVRRYREHNKAPVFSHNELLITITLFSESIRTALWLKDAIIEMVEEESARRDALRAKYPKLVEDVIEEDCPEEQYQCAICKGFCYLAQLTCSCTSLVSCLSHADQLCTCGKPRKVLRMRYSEAQLEDIRDVVIQRAALPEQWRIRFLSLMESPRPQLKSMRTLVSEGERIAHPIPEFETLKRFVDVASSLMEQIGTITARKNTGRRKKKSKGDVNHNGKRAGVERDDDENDGIDRSPGLLTDLLKQADRLAFDAPELTQLRQLMLTVEGFRTEASSLLSTPEDQLDLQKCKNTLILGQSFGLDFPELSPLEQLIQRQEWFRQLEEEVDDVNMEYGDVVTLLQESLNCQIPQDHVMVKELRLREGKGRHWIDLVEKLLSSPQIAVDDISTLIEARQHVPVSIDILRKLENLRKSAISWQTSARSVFATNGSSVAASRLCKNVAAASEPLSNVVIPEIRQLQAELEHHALWREEASKVLGVPVARLASTIGYIRGEFENSLAPDDDACNDQRICFCRSLSVDNIVVCKICQHSYHPRCVDLSPRRIPQEFKCAVCQRLPNDDGPSLDVFIGLISPQRWNFLINPPEFEQAQYIASAAIRYAPQVFRLADPVSLSHPCRDLELLRHTIRKIYTLPLVFDTRNSQTNERCVFVNWLFRRMQDAIRVERKEASLLAVSAQSKMDRRHSVALAVGEFGSTNDENGTSSGRAKPRRRARIILAESHPHEFHCLCGLPSAGKSATTEVECPKCGQGYHEVCVKVTEELARKSIWRCPCCTVRDGRHYRKGVEVRVQLSSHRGTDQFLDYRTIINDFAKQLVIVRKPTSTSAITLECIDFVPAHIPDDVKTMGEGADSLNWTKKRKSTEVYGDFRNEQGTNSPVTHVLNAMAAKGSMGPPSTTPNKISTHAISSGTCGSLAAMGVRSGIETKSSAVPRTIYTSAAESNADTSCSVLTPTIQNRSSSGMRSNVDPASYFSSTPFAIGVSTTSVVRQNGGTSMATICGEERETAVLGKSVHDDSIDSHRDSEGDSYSDMRESIAVEEAVPFGHYVVDEDVIIENY

SEQ ID NO: 26255 - protein, 1182 aa, Cryptococcus neoformans var. grubii
MFVTRPPSSSVDHRGSLLDGHTNHTNTPGSSRDDVPSSDSTSTAFHKFKNSSRFSPHYLNIPPGLAFKSYLEKWGPEQVIGFLAIHGCEHHSGIFIKNSIDGKLLLDLDMGILTSLGITKVGERIRLMAGIKCLRQRVAHEAEKHNIPSAHLCNGSLEMDRVKVIIHPKLSASLYVHRHGPFDSGPITARRCPLTPSSSADPEGDPSPMQRSQEVMKHSFITRSSRRQVIPPLPPGQIHNHGIDNSPMPSLRHIPLRSGVSYSDIDVKGMPPLVTQSTNSVFNHTFAVTGSHDTTSCLGGHLRRPDYFRSTNDTFQTCTKRGDNTISELPQRNQESSPSMWKQSGVICEDKAMRNGSLFAPTSHKPFAISITGDNVMEYPHNLPIKNGLPLRSFQSPDKSADDDRLNINPSAPSLDDLRRQLVKFVNAEDGTTRTVNVMKTTSGVEVLERALRKFGKTGTGRALLLDDESHNGGKHEGPLCIDGWGVFAENLQGEEMGPMSEEDLLDICASLRNGAAMQRDALILRQTSKSQKRKDMRFYLGSMPVLPTPVNLPISFSSSHSGQFEQNSALQYTAQHQPLRSKNRSRASMMSIMSGLGVSHPDIKQPTHDSLQSPASVTMPSSKKKSMYNFFGHRPPSELISSHLTDYFPSAKKRDVAKARGSMLRLNIAHSAERNPRSVENLGMIEADDVPFSSTEQSLTEQRDHYFDSSTCQPADTSSPGHVDHNITDPAGNSEGNYRLPYDQKVLPTPITQELHSANSVNPILRTYPPNLPSTYLSARLTDLHRDSFLSQLQPLQHSSSLSSAQPFSSHRRTVDEITAEMQHRQTSLSCDRPTSTIDSDISGPPCNSEISLDHTSEASGISESSSEYCDDHSSVSSEDSEDNSAAHTRAFTTKRNIKWIKGALIGAGSFGSVFLGMDAQSGLLMAVKQVELPRGIAKMEARRRDMLSALEREIELLKDLQHDNIVQYLDSSMDANHLNIFLEYVPGGSVAALLNNYGAFEEALAGNFVRQILTGLNYLHERDIVHRDIKGANILVDNKGGIKISDFGISKKVENSLLNGLHPNRPSLQGSVFWMAPEVVKQTSYTSKADIWSVGCLVVEMLTGTHPWARLTQMQAIFQIGSMGQPEIPSDISVHAADFLSRAFALDYRMRPSAASLLKHAFMVHDGNGGNDEPIQNTYA

SEQ ID NO: 26256 - protein, 654 aa, Burkholderia mallei ATCC 23344
MLIATEPCKWTHVYPVLWGSHVLVALLSYGWAHRDLKRLQAALRASRGSLATASHELRAPVNGMLALVELVRQGLLAPEQQRLLGLVQDSGQSLARVLNDILDHASIEAGQFAIEKTRVDVRELVDSVSAMLAVHAHRKGLRLRLHVDANVPAAVLTDGNRLRQILVNLIGNGIKYTERGSVSVRVRAADDVDGMVELVATIVDTGIGIAADELRRLFTPFARATRGARRMESGTGLGLAIARKLARLLGGDVTLTSDEGRGTTATARIRCAVAARGYANDALAGRVVSIDVGDAALAATLAAYARAAGVRVAARGAPDVEAVLCDDARVDASRTQLGWVGVTDAPALAGWTDSGTHVRLSSNPLGWRAFIDGLRAALDARDARDAACAHTAARAEPGAYRVLVVDDQEMNRIVLRYQLDALGHHARLCASGDEALRALGTAAYDVVLTDCRMPGMDGIALTAAIRAHPDARVRATPIVGVTALVSDAEHARCVDAGMTLCIGKPTTLDALERALVEAIEPVPALRFDPSRIDAARLFAGFGASSAPGAARDAILRACGRALERDRDTLTRHLRDGLSERELRAWCHTARGTYSLFGQAHVDALLDEFHHLLTAGDARAIRGATRDILAMVNHLLRCVAHSAQSRDRGDPKGGR

SEQ ID NO: 26257 - protein, 746 aa, Candida albicans SC5314
MSVIAGHHVPRSNDQRQYDTPSVPINIAPDSEGHIHEMSRLKDYEVIEKLGQGTFGVVQKAKSKKDGSLVAIKQLINHSAKEGFPITAMREITILKQLNHKNILTIQDMIFEEPKMSNRTDIITMRGSFYTVTPYMSSDLVGLLENPKIKLELGQIKCIMQQLLKGIQYVHNQKFLHRDIKAANILIGQDGVLKIADFGLARIYHGNVPRLGMGPGGGEKAYTGLVVTRWYRPPEILLGERKYTTAVDLWGIGCVFAELFTGKPILVGKSDSHQAQIVFELVGSPLTWTDAAKLPNKNEYSCGLACKRSLEAKFASIMPTEAIDLLSGLLTLDPFKRLNALDALNHKFFSTDPLPLLPTQMPKFEESHEIDKERFKKLKDKEQAVSELKPPTEIRYDNHSESRYNADHSTFGGGGVGGKETSFSSGKSDYIDHYEPRARRDHYEPRIRNDNKDSNDVRGEFESATRQEQRRRDIQNRLDAGGMDTYIPKTTTAKLREHSGTESLSKKYDNYQPINVSRGSKSPSPSKLSSISQSKADLISKPSAPKVASRESSLERKQVSNGIRTTTDVEPPRARARRPTDMFGRPLTSNSTQAQPTRNKSVERPKDLEKPTNGVTEDRNKKPVLEEKKEVVKPNLAIPKIKKSSSLVSLSSRSSTTPVISNPSKVTKRAASSVTPPVLPKKPKISKTSSESEVSDLEEDSDFTGENATVFERFMALEQLQKSPVYKRIINEKMRFEKLSGGHKSM

SEQ ID NO: 26258 - protein, 143 aa, Arabidopsis thaliana
MTEAMIRKKPGMASVKDMPLLQDGPPPGGFAPVRYARRISNTGPSAMAIFLTVSGAFAWGMYQVGQGNKIRRALKEEKYAARRAILPILQAEEDERFVSEWKKYLEYEADVMKDVPGWKVGENVYNSGRWMPPATGELRPDVW

SEQ ID NO: 26259 - protein, 166 aa, Brassica napus
  misc_feature (160)..(160): Xaa can be any naturally occurring amino acid
  unsure (1)..(166): unsure at all Xaa locations
MSSILSNVLPAPEDPVLSVIFACRDDPCPVKLNLSVGAYQTEEGKPLVLEVVRKAEQQLANDLYCDKGYLPIDGLADFNKLSAKLILGDDSHAVEENRVVTIQCLSGTGSLRVGAEFLAKHHQQRVIFVPNPTWGNHPFIFTLAGLSVESVPYHRPLPRXNSSFNF

SEQ ID NO: 26260 - protein, 407 aa, Arabidopsis arenosa
YQGVYPVKGNQDRFVVEDIVKFGSSFRFGLEAGSKPEILLAMSCLCKGSPDAFLVCNGFKDAEYISLALLGRKLALNTVIVLEQEEELDLVIELSQKMNVRPVIGLRAKLRTKHSGHFGSTSGEKGKFGLTTTQIVRVVRKLSQSGMLDCLQLLHFHIGSQIPSTSLLSDGVAEAAQLYCELVRLGAHMKVIDIGGGLGIDYDGSKSGESDLSVAYSLEEYAEAVVASVRFVCDRSSVKHPVICSESGRAIVSHHSVLIFEAVSADKPMVHQATPDDIQFLLEGNEEARANYEDLYAAVMRGDHESCLLYVDQLKQRCVEGFKEGVLSIEQLASVDGLCEWVLKAIGASDPVHTYNINLSVFTSIPDLWGIDQLFPIVPIHKLDQRPGARGILSDLTCDSDGKINKF

SEQ ID NO: 26261 - protein, 554 aa, Candida albicans SC5314
MGSSTNNTQSKATPSVLENEVNSSKSSVVSSTSSAKGLLRETTNHGTMETSSVQISESESRPSKMVLVLTLASSISGFMFGYDTGYISSALVQIGTDLSNKILTSGEKEFITSATSLGALLGAVVGGVLANLIGRRRVLLGSNIIFVVGTIIQLAARTVWTMIAGRFVLGWGVGIASLIAPLMISELAPAKYRGRLIVTNVIFITGGQLIAYFINWGLTRVSHGWRVSVGLCMVPPVLQFVLFWFLPDTPRFYVMNGNFEKARQVLRKVHVDPSDEFVNATIDEMIASDSTVPGNGPLQKAWKSIKIIHTTPGNFRALILACGLQGIQQFTGFNSLMYFSATIFETIGFHNATAVSIIIAATNFVFTGIAICIIDKVGRRRILLVGMPCMCISLIVCAVAFHYLNVDFSTGTVVSRGINGWGIVVIIGMILYVASYAIGIGNAAWVGVEMFSDVNVRSIGAMYAACTNWAGSLVIATTFLTMLENITPTGTFSFFAGLCFIAFFFVYFLLPDTAGLELEETTDFLSNGFNVKQAAQLSKERKKHSKFAKSKPTV

SEQ ID NO: 26262 - protein, 248 aa, Zea mays
MVARGQGGDRAEEEAAARWESEKEAEIDYVFKVVVVGDAAVGKTQLLARFARDEFALDSKPTIGVEFQTRTLTLHRKRVKTQIWDTAGQERYRAVTSAYYRGALGAMVVYDVTRRATFEHVARWVEELRAHADGSTVVALIGNKADMPAARREVPADEAARLAEDQGLFFSEASALTGDNVERAFLTLLEEVFAAVSRRALELDEARRMRGDQGDGGGEVLSLKGTAVDVGSIMETSAMKRSSQCACS

SEQ ID NO: 26263 - protein, 543 aa, Saccharomyces cerevisiae
MGLYVSSENELQEKLKSFRSAKITESRNKLIRYLRIFWFGFNDNIVEPVCTILRFLEISAIFLPLLLLYPISWFGHKLKITDTNITETRGSLIWCQLLRKALELAGPSFIKLGQWAGSRTDIFSHALCHELGKLHSNVTAHSLSFTLEKLSQALKVDKIEDAFDEFNRTPIGVGSIAQVYVGELSQKYIDKYDNIQIGKDGNRWCAIKILHPNVRSQIRRDLKIMKFCADAINWIPTMEWLSLPSEVDQFSILMNIQLDLRIEALNLERFNENFKNSIQVKFPKPFLPLSNRDVMFEEHVYGLSMEKFLSTKKQINDVELCKKVSDPFVDAFLQMLILDDFVHADLHPGNVIIRFVKTNKYGTNIISSELESYRITHDLRKKIEEDQDQDFVGKLKSVLTNYTPQICFIDTGIITELNEKNRINFIALFNALARFDGYRAGELMIERSRTPETAIDKEVFAFKVEKLVDKVKQRTFTLGTVSIGDLLDQMLSMVRSHHVRMESDFVSVVVAILLLEGIGRQLDPNLDLFERFVFYAWINGFKE

SEQ ID NO: 26264 - protein, 487 aa, Chlamydomonas reinhardtii
MPLAELWRLTKLVPLACTVLLLSVRALAVDSGGLNDSADNSSRSLLQESGQASGTSQPYTYSSSDFVLLNGFLIFFMQIGFVSAESGQGRAKNVRNILLKNSVNIMLCAICWWAVGYAFAYGNSGGGFIGTSRFFSDGESFGSKPWFFTWTFCLSCVTIASGCLAERTHLFVYPVYTAVVSIAVHPVIAHWVWAPDSWLNSMTGSPCRFLDFAGGAVVHTVGGLTGLIGAMLCGPRLGRFEDGVGKDIPGHDVSSVSLGSLMLWFGWYGFNCGSTYIYMAQGGSEASAAVSRVALNMTLCASVAGMTSLVVSSIQTGTFDLAVCCNGLMAGLSASTSNVGFLTPWAACITGALAGLLYVGISRLLVRMGVDDPLDSSAIHCGSGILGVLVSGFLARPSYVMQMVGCNCGGVVYATNGGMQLGMQLLGLSCSMVWTAMWALLTFGILKKLQLLRVDQQTELAGIDNMEHGGPAYPEFLQRVQSTRPGY

SEQ ID NO: 26265 - protein, 234 aa, Nitrosomonas europaea ATCC 19718
MNEIQEPIRLVLLRHGQSIWNQDRHFTGWGDIVLSPQGEQEALRAGHLLKQAGFTFDACFCSELQRASDTLAIVQSVMGLNHLSTYRTWRLNERHYGALEGMRPWAAIRKFGIWSTMKSQIRFDAAPPLLMPDDPRAPVNQPRYAAVDRTQLPLAESMQQTLERVRPLWQETILPEIRQGKRLLIVSHQNLLKTLVMQLEGLTGAQIMRLSITTGHPLCYELDHSLVPVKRYYL

SEQ ID NO: 26266 - protein, 632 aa, Physcomitrella patens
MESVCLRPQALSDSSQLASSRYLSLDTFFSQVYSPTSIHSRKVPCFRRLRSGVPASSFRHGRHLYPIVATAISSDSSQGNELKKTSRRRVKGRARVALVEAVEPDVSAEGLLQDSLSARLEHAYRIPSLEILKSDLEARFDSVSKEEELESDDGSIADGSVEEQSTPEADSVRKSVRNGRSKVGVNTDSNVEGGVKSSSVKSPKAVKKRSSRRQNVEGNRILKITKNSVTRQPRKVAVRTPSHLTETGHQVAEDQQVAADRGGKRRLSLRSRIAMKQNKLEASVVEKPGPTVDSWNMDPEDQLLWSQEAEELINKYTTSMDLAAPLWDKLDRGLLTAVEENRLAVFMKPMKKLEKLQKVLMKQLGRDPTDEEWAAAAGVDLLIMRRRLALGRAARTKLIQRNLRLVLSQAYKYHKDSMSLSIQDLCQEGVIGLMQAVDKFDPGKGYRFSTYGIYWIRNSILRAQTKSGHMLRSPHNVSTHRVNIQRAKVELFSELGRQPTNDEIRKHLGITADRFRDILRTNMRTSSLHEHDRITGREKVENLVSEEDALDTLAGGTSMVQYGLDDVLDSLRPKENLVLRQRFGLDGKGQRSLSEVGLILNLSREMVRRYELRGILKLQHPTRVEYLRNYLN

SEQ ID NO: 26267 - protein, 407 aa, Stanleya pinnata
YQGVYPVKGNQDRFVVEDIVRFGSPFRFGLEAGSKPEILLAMSCLCKGNPDAFLVCNGFKDAEYISLALLGRKLALNTVIVLEQEEELDLVIDLSQKMNVRPVIGLRAKLRTKHSGHFGSTSGEKGKFGLTTTQIVRVMRKLSQSGMLDCLQLLHFHIGSQIPSTSLLSDGVAEAAQLYCELVRLGAHMKVIDIGGGLGIDYDGSKSGESDLSVAYTLEEYAEAVVASVRFVCDRRSVKHPVICSESGRAIVSHHSVLIFEAVSAVKPMAHQANPDDIQFLLEGNEEARANYEDLYAAVMRGDHESCLLYVDQLKQRCVEGFKDGVLSIEQLASVDGLCEWVLKAIGASDPVHTYNINLSVFTSIPDLWGIEQLFPIVPIHKLDQRPGTRGILSDLTCDSDGKIDKF

SEQ ID NO: 26268 - protein, 430 aa, Lactococcus lactis subsp. lactis Il1403
MHDNDIILKVDEKPAASQWFGLSFQHLFAMFGSTVLVPILVGINPAIALLSSGLGTLAHMSVTKFKVPAYMGSSFAYIGAMTLLMKNGGMPAIAQGAMTGGLVYLIVALIVKFAGKGWIDKVLPPIVVGPIVMVIGLSLAPTAINDAMYTDVANLKGYSLAYIIIALITVLSIVIYSIYGKGFLSVVPILLGIITGYVAAMIIGKITGMNIVSFTGISHAKWLTIPPMEIPFANYKWAFYPSAILTMAPIAFVTMTEHFGHIMVLNSLTKKDYFKEPGLEKTLTGDGLAQIIAGFIGAPPVTSYGENIGVMAITKIHSIYVIAGAAVLAIVVSFIGKITALLQSIPAPVIGGASIALFGVIAASGLKILVENKVNFDIKRNLLISSVVLVIGIGGMIINITQNLQISSVAIATILGIVLNLVLPKDPSEI

SEQ ID NO: 26269 - protein, 451 aa, Pseudomonas aeruginosa
MSFDFDLFVIGAGSGGVRAARFAAGFGARVAVAESRYLGGTCVNVGCVPKKLLVYGAHFSEDFEQARAYGWSAGEAQFDWATLIGNKNREIQRLNGIYRNLLVNSGVTLLEGHARLLDAHSVEVDGQRFSAKHILVATGGWPQVPDIPGKEHAITSNEAFFLERLPRRVLVVGGGYIAVEFASIFNGLGAETTLLYRRDLFLRGFDRSVREHLRDELGKKGLDLQFNSDIARIDKQADGSLAATLKDGRVLEADCVFYATGRRPMLDDLGLENTAVKLTDKGFIAVDEHYQTSEPSILALGDVIGRVQLTPVALAEGMAVARRLFKPEEYRPVDYKLIPTAVFSLPNIGTVGLTEEEALSAGHKVKIFESRFRPMKLTLTDDQEKTLMKLVVDAHDDRVLGCHMVGAEAGEILQGIAVAMKAGATKQAFDETIGIHPTAAEEFVTLRTPTR

SEQ ID NO: 26270 - protein, 502 aa, uncultured archaeon GZfos23H7
MEKVKSEKKRETPIGRRQLAAVLVFALVVILALIPGVMAGDPTGAKTLEDDPGAPVDYVWVLICGFLVMFMQPGFAMLEAGVSRAKNTTNVLMKNLVDYSVGSLAFFAVGFALMMGTSAYLLVGTDGFFLAGEAYDVGTSLTWFFMLVFCATAATIVSGAIAERPKFSVYVIYSVVICAFIYPIYGHWLWGGGWLSSADFMTSLGGGYGALDFAGSGVVHAVGGYIALAGCLLLGPRIGRYTKEGKPIPIPGHSITFAVLGAFILWFGWFGFNPGSTLSAHELRISVIAVNTNLCAAAAAMTAMFITWKKFGKADVVMTVNGAVAGLVAITAACAWVAPWASVVIGIVAGFVVCYGYWFLERRGVDDVVGAIPVHGLNGTWGLLALGLFADGTYGNYATEAPFITGLLYGNAGFFGCQLISVVVNFAWAFGTGFLLFYILKHTLGIRVSPEEELAGLDISEHGVVTYPDFVYSEPARPTRLIRMSEAVIERENEPKTEEGEG

SEQ ID NO: 26271 - protein, 211 aa, Amborella trichopoda
MGRGKIEIKRIENSANRQVTYSKRKSGILKKAKEISVLCDAKVSLVIFSSAGKMSEFCSPSIELKNMLEEYQRTSGKKLWDSRHEYLSTEVDRMKKDNEQMRIELRHLMGEDLNSLTPHELNRIEDSLQMGLSSVRAKQMEHIRTRTEMLKNNERILEDQNKQLKYIMHQIEGGDEAERRYQNQQNGRDYPQQALTAFRVQPIQPNLQQNK

SEQ ID NO: 26272 - protein, 472 aa, Escherichia coli O157:H7
MTTHLVWFRQDLRLHDNLALAAACRNSSARLLALYIATPRQWAAHNMSPRQAELINAQLNGLQIALAEKGIPLLFREVDDFAASVEIVKQVCAENSVTHLFYNYQYEVNERARDVQVERTLRNVVCEGFDDSVILPPGAVMTGNHEMYKVFTPFKNAWLKRLREGMPECVAAPKVRSSGSIKPAPSITLNYPRQSFDTAHFPVEEKAAIAQLRQFCQNGAGEYEQQRDFPAVEGTSRLSASLATGGLSPRQCLHRLLAEQPQALDGGAGSVWLNELIWREFYRHLMTYYPSLCKHCPFIAWTDRVQWQSNPAHLQAWQEGKTGYPIVDAAMRQLNSTGWMHNRLRMITASFLVKDLLIDWREGERYFMSQLIDGDLAANNGGWQWAASTGTDAAPYFRIFNPTTQGEKFDREGEFIRQWLPELRNVPGKSVHEPWKWAEKAGVKLDYPQPIVEHKEARVQTLAAYEAARKGK

SEQ ID NO: 26273 - protein, 506 aa, Oryza sativa
  misc_feature (297)..(297): Xaa can be any naturally occurring amino acid
  unsure (1)..(506): unsure at all Xaa locations
MQRRRERRRLCSRDRSDWDDRWSIKQTTGTDGPPRQQPAAGEAAWQFGSGRGLVAGKWRKPTCKTQGGVRPSVEAADESPRPPFGLAPSHSHNLRGREAAITASKPAMEGAEAEERRLAASLTARYSDWVVEALDELPGSFILTDPAMPGHPIVYASRGLASLTGYPPREVLGRNARLFQGADTDRAAVAGVREAVRGQRPHQVSILNYRRDGEAHWVLLHLAPVFHASDGRVLHFLAVQVPIAPPASRRRTPPCRAARPFVVFAACREEARVEEECPCASHAGEVFVDVDKRACCXGQDAEEPRVASEHEKEKALSTANSIFSALNRYSKLTGLVVCGKRCDSVGIPALSSSLNLSLGRIKQSFVLTDPHLPDMPIIYASDAFLSLTGYSREEILGCNCRFLNGPGTSVEVLEQINQHICSEQACTVHLLNYRKGGSSFRDLLHISPIRNASGKVAFHVWVHLDEGAKYDFNGLTPEVWQLGAVGAVRVAVRSLSASGSLLRPSQ

SEQ ID NO: 26274 - protein, 315 aa, Bradyrhizobium sp. BTAi1
MILSCGDALIDFVPARLADGRDGLRPVVGGSCLNVPVGLARLGAPAGFVGGISTDLFGSMIAAHAQASGVDLSHATRSADQTTLAFVRHVGGEAQYAFYDAETAARKWTYRHGSIPFTSIDAIHVGSTTLIHDLGAAETRALIAATQGGVTISFDPNCRPNLVQDKAAYRVQMDGFAASADLIKMSDVDFDYLHGHDDYAARAEALLARGAKLVVVTRGPKGALGWHAGAGAAEVAAPAVEVVDTIGAGDSFQAGLLFALHRLGRLGKAALAELTATELRKVLAFAAACAAVTCTREGADPPRWADMTATWNDLG

SEQ ID NO: 26275 - protein, 413 aa, Caulobacter crescentus CB15 [sequence omitted]

SEQ ID NO: 26276 - protein, 541 aa, uncultured archaeon GZfos23H7
MVKYGFGEVLAKLELQKHLDFGKGFILGKHAAEIADVSHWARVRMALEELGPTFVKFGQMMSTRPDMIPHELITELEKLQEEVPPFSTEDAKRIIAEELNSSVDRIFMDFSGSSIAAASIAQVHKAVLPGGEEVAVKIQRPDIDKIIEVDLEIMLHLATLAEKYLKEAEAVDIVKLVEEFARVIRKELNFRIEAAYIERFANNFQDDTTIHVPQVYREFSSSKVLTMEFIGGYKVTDITKTEVREHGIDPKVVASRGLDLILKQIFEHGFFHADPHPGNIRVLDGNVICFLDYGMMGKLSARHREDLADIFIGIISRDEHKITKTILKLTGRSHVRDVEELESDIAELIEVYAYGSLKELEIGGVITHMGDVIIEHHLEGPRDFYLLAKALVTIEGVGRELDPEFNAAKHAEPFAEKLILSRMSPRKLIEDFYLAALETRLLLRDLPSEARDILARVRQGEIKIKFEHKGLEPMLKTLDQITNRTVFAIVLASLVIGSALMVLSGVPPKWHEIPIIGIIGFLGAGVMAFWLLFSILRHGKM

SEQ ID NO: 26277 - protein, 421 aa, Bradyrhizobium sp. BTAi1
MAPAARTEPLSRHALAFVLAGGRGSRLLELTDRRAKPAVYFGGKSRIIDFALSNAVNSGIRRIAVATQYKAHSLIRHLQMGWNFFRPERNESFDILPASQRVSETMWYVGTADAVYQNIDILETYNTKYIVVLAGDHIYKMDYELMLQQHVDQRADVTVGCLEMPREESSGFGVMHINEDDTIRDFIEKPADPPPMPGKPDKSLASMGIYVFDAKFLFEELKRDAGDPNSNHDFGRDIIPYIVKNGRAVAHQFSRSCVRAGHDQTSYWRDVGTVDAYWAANLDLTDVVPELDLYDRSWPLWTYSEITPPAKFVHDTDGRRGEATCSLVSGGCIVSGAQVQRSLLFTGSHLHSYAKVHNAVLLPYVNVARHARLTNVVVDRGVQIPEGLVVGEDPEFDAKRFRTTENGVTLITQPMIDGLNS

SEQ ID NO: 26278 - protein, 440 aa, Silicibacter sp. TM1040
MKKLTVTLAATALATLPGLAFAQEAAAETPDINPYIFTTLLFLIGGFLVFWMAAGFAMLEAGLVRSKNVTMQLTKNVALFSIAAIMYWLVGFNLMYPGDGWIIPGVMGPLFATTSLEPVGLGADAAALDYASVGSDFFFQLMFCATTASIVSGTLAERIKLWPFLIFVAILTGVIYPIEASWVWGEGFLDGLGFSDFAGSTLVHAAGGFAALAGALILGPRIGKYKDGRTIPMPGSNLALATLGTFILWLGWFGFNGGSQLAMGTVGDVTDVSRIFANTNMAAAAGAVTALILTQLLFKKPDLTMILNGALAGLVSITAGPLDPTLFGALLIGAVGGVIVVFTVPMLDKMKIDDVVGAIPVHLLAGLWGTFAVPFYTEGTSFITQIVGFATIGIFTFVVSGVVWMILKATMGIRVSEEDEINGLDMAELGMEAYPEFKGS

SEQ ID NO: 26279 - protein, 488 aa, Bradyrhizobium sp. BTAi1
MTPLRILSVASEVYPIVKTGGLADVVGALPWALMAEDVEVRTLIPGYPAVMLALEQVSEISSLPNFFGGNARLLGGSHGALDLFVLDAPHLYDRPGNPYLGPEGKDWPDNAFRFAALARAASYIGLGAVPAFVPDIVHGHDWQAGLVPAYLLYSHRPHPGTVMTVHNLAFQGRFPRHFLPPLGLPPESFSIYGLEYYGDISFLKAGLQFADKITTVSPTYAREIQSDEQGMGLGGLLRQRASDLVGILNGIDTAVWDPGSDPAIASHFGIERLEARAPNKAALQTRMGLQVSPETFLLGVVSRLTSQKGLDLLLSCLPTLVGSGIQLALLGDGEAELRDAFHAAAQRYPGQIGVVIGYDEGLAHLIQAGCDALVVPSRFEPCGLTQLCALRYGALPIVTAVGGLADTVIDETEAGVAATGFKCASVTAEALDQTLRRAAAAFYAARSNASNWTRMQLNAMLTDVSWRHRAGRYAELYRQIVAQRRPAG

SEQ ID NO: 26280 - protein, 345 aa, Bradyrhizobium sp. BTAi1
MKALVYHGPGQKSVDERPKPTILEPGDAVVKILKTTICGTDLHILKGDVPTCTPGRILGHEGVGVVEAVGSAVRAFKPGDHVIISCISACGTCDYCRRGMYSHCRHGGWILGNKIDGTQAEYVRTPHADTSLYHVPPGTEEEALVMLSDILPTGFECGVLNGKVEPGSTVAIVGAGPIGLAALLTAQFYSPAEIIMIDLDDNRLEVAARFGATSTINNADGKAVEKVMALTHGRGVDTAIEAVGVPATFVTCEDIIAPGGTIANVGVHGVKADLHLEKLWDRNIAITTRLVDTVTTPMLLKTVQSKKLEPKLLITHRFRLDQILDAYETFGAAARTHALKVLIEA

SEQ ID NO: 26281 - protein, 526 aa, Oryza sativa (japonica cultivar-group)
MVTLLIETTQGVGRYGGIKVYAVLGDDGADYAKNNAWEALFHVDDPGPRVPIAKGKFLDVNQALEVVRFDIQYCDWRARQDLLTIMVLHNKVVEVLNPLAREFKSIGTLRKELAELQEELAKAHNQVHLSETRVSSALDKLAQMETLVNDRLLQDGGSSASTAECTSLAPSTSSASRVVNKKPPRRSLNVSGPVQPYNPSLKNFWYPVAFSSDLKDDTMVPIDCFEEQWVIFRGKDGRPGCVMNTCAHRACPLHLGSVNEGRIQCPYHGWEYSTDGKCEKMPSTKMLNVRIRSLPCFEQEGMVWIWPGNDPPKSTIPSLLPPSGFTIHAEIVMELPVEHGLLLDNLLDLAHAPFTHTSTFAKGWSVPSLVKFLTPSSGLQGYWDPYPIDMEFRPPCMVLSTIGISKPGKLEGKSTKQCSTHLHQLHICLPSSRNKTRLLYRMSLDFAPWIKHVPFMHILWSHFAEKVLNEDLRLVLGQQERMINGANVWNWPVSYDKLGIRYRLWRDAIERGVDRLPFSNQSESGS

SEQ ID NO: 26282 - protein, 527 aa, Oryza sativa (japonica cultivar-group)
MTTVASLSLLPHLLIKPSFRCCSRKGVGRYGGIKVYAVLGDDGADYAKNNAWEALFHVDDPGPRVPIAKGKFLDVNQALEVVRFDIQYCDWRARQDLLTIMVLHNKVVEVLNPLAREFKSIGTLRKELAELQEELAKAHNQVHLSETRVSSALDKLAQMETLVNDRLLQDGGSSASTAECTSLAPSTSSASRVVNKKPPRRSLNVSGPVQPYNPSLKNFWYPVAFSSDLKDDTMVPIDCFEEQWVIFRGKDGRPGCVMNTCAHRACPLHLGSVNEGRIQCPYHGWEYSTDGKCEKMPSTKMLNVRIRSLPCFEQEGMVWIWPGNDPPKSTIPSLLPPSGFTIHAEIVMELPVEHGLLLDNLLDLAHAPFTHTSTFAKGWSVPSLVKFLTPSSGLQGYWDPYPIDMEFRPPCMVLSTIGISKPGKLEGKSTKQCSTHLHQLHICLPSSRNKTRLLYRMSLDFAPWIKHVPFMHILWSHFAEKVSPKNSEQLHTKLLSISCHYSLHLTIVCGYLCFAYCPLYNIYNNLV

SEQ ID NO: 26283 - protein, 102 aa, Oryza sativa
MSSDGGPVLGGVEPVGNENDLHLVDLARFAVSEHNKKANSLLEFEKLVSVKQQVVAGTLYYFTIEVKEGDAKKLYEAKVWEKPWMDFKELQEFKPVDASANA

SEQ ID NO: 26284 - protein, 225 aa, Oryza sativa
MAMRRWREDAVALSLRGCGFGDGDDDRPEKPRRYGVTEMRSPFYAFRPAHHALQEILDSLGPFVDGLKFTGGSHSLMGKELVREITDLAHKHDIYVSTGDWAEHLLRQGPSFFKQYVEECKALGFDTIELNAGSLKLPEEALLRLVRLIKTSGLQAKPLFSVKFDSSDIPPSGDRAFGAYIVPVKQNSERVEDVDLLIRRAERCLEAGADMIMIDADDICQRADS

SEQ ID NO: 26285 - protein, 473 aa, Bacillus thuringiensis serovar konkukian str. 97-27
MMDQNKGLKRELKSRHIFMIALGGVIGTGLFLGSGYTIHEAGPGGAIVAYLVGGFVMYLTMLCLGELAVAMPDAGSYQTYATKHISPAAGYVVGWMSWLNWSATIGIELIAVSILMKRWFPDVPSWIWCVVFAVLLFAINALSSRSFAEVEFWFASIKVITIIAFIILGGAAMFGFLDMKGNEPAPMFSSFIDYGGLFPNGLSAILITMIAVNFSFQGTELVGIAAGESENPEKTIPKAINNTVWRILVFFVLSIFILAGLFPWQQAGVIESPFVVVFDKIGIPYAADIINFVIITAVLSVANSGLYATSRMLWSMSNQGMISPIFGKLSKNGVPIYALIVSTIVGCLSLLSGIYAEDTVYLWLLSIAGFGAILVWASIALSNLLARRSYIKQGGDVKDLKFKTPLYPFVPLLALVLNVTVIVGMAFIPEQRMALYCGIPFMIVCLLFYRATRNKAHKVEHIEKTNTTEVESL

SEQ ID NO: 26286 - protein, 449 aa, Streptococcus agalactiae 2603V/R
MNNSAANIRSFELALLFLLVFVAVYFVYLAVRDFKMSKNIRLLNWKVRDLIAGNYSDSILIQGDADLVELGESLNDLSDVFRMAHDNLEQEKNRLASILTYMTDGVLATDRSGKIVMINETAQQQFNLAYDEALSMNIVDMLGSGSPYSFQDLVSKTPEVVLNRRDENGEFVTLRIRFALNRRESGFISGLVAVSHDATEQEKEERERRLFVSNVSHELRTPLTSVKSYLEALDEGALNEEVAPSFIKVSLDETNRMMRMISDLLSLSRIDNEVTHLDVEMTNFTAFMTSILNRFDQIRNQKTVTGKVYEIVRDYPLKSIWVEIDTDKMTQVIDNILNNAVKYSPDGGKITVNLRTTKTQMILSISDQGLGIPKKDLPLIFDRFYRVDKARSRKQGGTGLGLSIAKEIVKQHKGFIWAKSEYGKGSTFTIVLPYDKDAVTYEEWEDVED

SEQ ID NO: 26287 - protein, 77 aa, Arabidopsis thaliana
MKLSVRFISAALLLFMVFIATGMGPVTVEARTCESKSHRFKGPCVSTHNCANVCHNEGFGGGKCRGFRRRCYCTRHC

SEQ ID NO: 26288 - protein, 208 aa, Bdellovibrio bacteriovorus HD100
MIKIYGSPMSSAGRCYWMLEELGLPYEQMPMNMREKQHKSPDYLKINPNGKIPAIIDGEYILWESMAITNYLAKKHNSPLAPQNLEEEGHIMQWSFWALVDLQTPAVNWLIQALFVPDEFKNPKVIEDAKKVLPNYLNTLEAGLKGKTYLVGNRFTVADLNVASVVGLLYALKFDMSPYPEINKWMGLCTSRPAAQKLDKMRATAQAH

SEQ ID NO: 26289 - protein, 300 aa, Anabaena azollae
MWDYTDKVLELFYDPKNQGVIEDNGEPGVKVATGEVGSIACGDALRLHIKVEVESDKIVDSRFQTFGCTSAIASSSALTEMIKGLTLDEALKVSNKDIADYLGGLPEAKMHCSVMGQEALEAAIYNYRGIPLATHDDEDEGALVCTCFGVSENKVRRIVIENDLTSAEQVTNYIKAGGGCGSCLAKIDDIIKDVKENKAATNLNNKGGSKPTNIPNSGQKRPLTNVQKIALIQKVLDEEVRPVLIADGGDVELYDVDGDIVKVVLQGACGSCSSSTATLKIAIESRLRDRINPSLVVEAV

SEQ ID NO: 26290 - protein, 333 aa, Bacillus licheniformis ATCC 14580
MSVLVLGGAGYIGSHAVYQLIDRGENVVVVDNLETGQRQAVHPDAIFYEGDVRDRDFLRTVFEKERIEEVIHFAASSLVGESMKDPLKYYDNNVSGTQVLLQAMLEHDVKKIVFSSTAAVYGEPESLPITEDMPTMPTSTYGETKLIMEKLMKRTEEAHGISFVSLRYFNVAGARETGEIGEDHRPETHLVPLILQTALGQRPHITIFGDDYDTPDGTCIRDYVHVEDLIDAHLSALDYLRKGGKSDIFNLGSSEGFSVKEMIDAARKATGKDITAEIGKRRAGDPSILIAGSHKAKQVLGWRPSRTSVAKIIEDAWKWHSSHPNGYRKEVST

SEQ ID NO: 26291 - protein, 333 aa, Saccharomyces cerevisiae
MSEPSEKKQKVATSSLDQLKKAGTHVVADSGDFEAISKYEPQDSTTNPSLILAASKLEKYARFIDAAVEYGRKHGKTDHEKIENAMDKILVEFGTQILKVVPGRVSTEVDARLSFDKKATVKKALHIIKLYKDAGVPKERVLIKIASTWEGIQAARELEVKHGIHCNMTLLFSFTQAVACAEANVTLISPFVGRIMDFYKALSGKDYTAETDPGVLSVKKIYSYYKRHGYATEVMAASFRNLDELKALAGIDNMTLPLNLLEQLYESTDPIENKLNSESAKEEGVEKVSFINDEPHFRYVLNEDQMATEKLSDGIRKFSADIEALYKLVEEKM

SEQ ID NO: 26292 - protein, 511 aa, Cryptococcus neoformans var. grubii
MFARQPLSRNLLRPLSRPSSSFSRASTIPKLAFLQSARGFASASEPYDVVIIGGGPGGYVAAIKAAQLGFKTACIEKRGALGGTCLNVGCIPSKAMLNNSHIFHQTQHDLKNRGIDVSGIQLNLPKMLAAKEASVKALTGGIETYLFKKNGIDYIKGEASFETANKVNVKLLEGGETQVEAKNIIIATGSEVTPFPGLEIDEERIVSSTGALELKEVPKKMVVIGGGVIGLELGSVWSRLGAEVTVVEYLGAIGAGMDSEVGKQFQKILTKQGFKFKLNTKVVSGHREGDIVKLKVDSAKGGKEETIEADVVLVAIGRRPVTTGLNLEAIGVETDKRGRIIIDDEFNTSAKGVKCIGDVTFGPMLAHKAEEEGIAAIEILKSGHGHVNYDAIPSVVYTHPEVAWVGKNEEELKAAGVQYKIGKFPFAANSRAKTNQDSEGFVKFVVEKETDQVLGCHIIGPAAGELIASAVLAMEYKASAEDIARTCHAHPTLSEAFKEAALSSYDKPINF

SEQ ID NO: 26293 - protein, 169 aa, Zea mays
MAPTVMMASSATAVAPFQGLKSTASLPVARRSSRSLGNVSNGGRIRCMQVWPAYGNKKFETLSYLPPLSTDDLLKQVDYLRNGWIPCLEFSKVGFVYRENSTSPCYYDGRYWTMWKLPMFGCNDATQVYKELQEAIKSYPDAFHRVIGFDNIKQTQCVSFIAYKPPGSD

SEQ ID NO: 26294 - protein, 457 aa, GIBBERELLA ZEAE PH-1
METPEVLQDALQLGALATQNATVSRTLYSHAQATSTKRQKLYDASEDPIMKRRFRNEYADVETLPPSITAKLPTKQPGKKTKAGALVRPAMKLLEGAPGSGKASASAARNEGTPQNMSLTTRGTQNTMQQKPEWHAPWKLMRVISGHLGWVRSLAVEPGNKWFASGAGDRTIKIWDLASGSLKLTLTGHISTVRGLAVSPRHPYLFSCGEDKMVKCWDLETNKVIRHYHGHLSGVYTLALHPTLDVLVTGGRDGVARVWDMRTRSNIHVLSGHTQTVSDLVCQEADPQVITGSLDSTVRLWDLAAGKTMGVLTHHKKGVRALATHPSEFTFASGSTGSVKQWKCPEGAFMQNFEGHNSIINTMSVNEQNVFFTGGDNGSMSFWDWKTGHRFQSLDTTAQPGSLDAEAGIMSSTFDRSGLRLICGEADKTIKVWKQDETATEESHPLEWKPTLARRKF

SEQ ID NO: 26295 - protein, 427 aa, Bordetella bronchiseptica RB50
MSTNAELFDRACRSIPGGVNSPVRAFRSVGGTPRFIQRAQGPYVWDAEGKQYIDYVGSWGPAILGHAHPEVVRAVQEAAVHGLSFGAPTEAEVELAEMLIARLPSLEQVRLVSSGTEATMTAIRLARGATGRHKIIKFEGCYHGHSDSLLVKAGSGLLTFGNPSSAGVPPEFVAHTLTLEFNNLAAVDAAFSQHGAEIACVIVEPVAGNMNLIKPAEGFLAGLRELCTRHGAVLIFDEVMTGFRVGPQGVQGLTGVRPDLTTLAKVIGGGMPVGAFGGRADLMAHIAPLGGVYQAGTLSGNPVAVAAGLATMRLIGEPGFYERLSAQTARLAQGLQERARAAGVPFSADAIGGMFGLYFGDRVPASFAEVSACDTEAFKRFFHAMLERGIHFAPSAFEAGFVSATHDDAVIDATLEAAEQVFATLRA

SEQ ID NO: 26296 - protein, 139 aa, Brassica napus
  misc_feature (115)..(115): Xaa can be any naturally occurring amino acid
  misc_feature (121)..(121): Xaa can be any naturally occurring amino acid
  misc_feature (127)..(127): Xaa can be any naturally occurring amino acid
  unsure (1)..(139): unsure at all Xaa locations
WWIVVVALLAHTASAAVREYHWEVEYKFGFPDCKEGMVMAVNGQFPGPTIHALAGDTIVVHLTNKLATEGLVIHWHGIRQLGSPWADGAAGVTQCAISPGETFTYKIHWLIQPGXTHFYHXGHYGIXRSAGLYGSLIID

SEQ ID NO: 26297 - protein, 3971 aa, Bacillus subtilis
MYTSQFQTLVDVIRNRSNISDRGIRFIESDKIETFVSYRQLFDEAQGFLGYLQHIGIQPKQEIVFQIQENKSFVVAFWACLLGGMIPVPVSIGEDNDHKLKVWRIWNILNNPFLLASETVLDKMKKFAADHDLQDFHHQLIEKSDIIQDRIYDHPASQYEPEADELAFIQFSSGSTGDPKGVMLTHHNLIHNTCAIRNALAIDLKDTLLSWMPLTHDMGLIACHLVPALAGINQNLMPTELFIRRPILWMKKAHEHKASILSSPNFGYNYFLKFLKDNKSYDWDLSHIRVIANGAEPILPELCDEFLTRCAAFNMKRSAILNVYGLAEASVGATFSNIGERFVPVYLHRDHLNLGERAVEVSKEDQNCASFVEVGKPIDYCQIRICNEANEGLEDGFIGHIQIKGENVTQGYYNNPESTNRALTPDGWVKTGDLGFIRKGNLVVTGREKDIIFVNGKNVYPHDIERVAIELEDIDLGRVAACGVYDQETRSREIVLFAVYKKSADRFAPLVKDIKKHLYQRGGWSIKEILPIRKLPKTTSGKVKRYELAEQYESGKFALESTKIKEFLEGHSTEPVQTPIHEIETALLSIFSEVMDGKKIHLNDHYFDMGATSLQLSQIAERIEQKFGCELTVADLFTYPSIADLAAFLVENHSEIKQTDTAKPSRSSSKDIAIIGMSLNVPGASNKSDFWHLLENGEHGIREYPAPRVKDAIDYLRSIKSERNEKQFVRGGYLDEIDRFDYSFFGLAPKTAKFMDPNQRLFLQSAWHAIEDAGYAGDTISGSQLGVYVGYSKVGYDYERLLSANYPEELHHYIVGNLPSVLASRIAYFLNLKGPAVTVDTACSSSLVAVHMACKALLTGDCEMALAGGIRTSLLPMRIGLDMESSDGLTKTFSKDSDGTGSGEGVAAVLLKPLQAAIRDGDHIYGVIKGSAINQDGTTVGITAPSPAAQTEVIEMAWKDAGIAPETLSFIEAHGTGTKLGDPVEFNGLCKAFEKVTEKKQFCAIGSVKANIGHLFEAAGIVGLIKSALMLNHKKIPPLAHFNKPNPLIPFHSSPFYVNQEVMDFTPEDRPLRGGISSFGFSGTNAHVVLEEYTPESEYAPEDGNDPHLFVLSAHTEASLYELTHQYRQYISDDSQSSLRSICYTASTGRAHLDYCLAMIVSSNQELIDKLTSLIQGERNLPQVHFGYKNIKEMQPAEKDNLSKQISDLMQHRPCTKDERITWLNRIAELYVQRAVIDWRAVYSNEVVQKTPLPLYPFERNRCWVEAVYESAKERKEKGEVALDINHTKTHIESFLKTVISNASGIRADEIDSNAHFIGFGLDSIMLTQVKKAIADEFNVDIPMERFFDTMNNIESVVDYLAENVPSAASTPPQESVTAQEELVISGAQPELEHQEHMLDKIIASQNQLIQQTLQAQLDSFNLLRNNSHFVSKESEISQDKTSLSPKSVTAKKNSAQEAKPYIPFQRQTLNEQVNYTPQQRQYLESFIEKYVDKTKGSKQYTDETRFAHANNRNLSSFRSYWKEMVYPIIAERSDGSRMWDIDGNEYIDITMGFGVNLFGHHPSFITQTVVDSTHSALPPLGPMSNVAGEVADRIRACTGVERVAFYNSGTEAVMVALRLARAATGRTKVVVFAGSYHGTFDGVLGVANTKGGAEPANPLAPGIPQSFMNDLIILHYNHPDSLDVIRNLGNELAAVLVEPVQSRRPDLQPESFLKELRAITQQSGTALIMDEIITGFRIGLGGAQEWFDIQADLVTYGKIIGGGQPLGIVAGKAEFMNTIDGGTWQYGDDSYPTDEAKRTFVAGTFNTHPLTMRMSLAVLRYLQAEGETLYERLNQKTTYLVDQLNSYFEQSQVPIRMVQFGSLFRFVSSVDNDLFFYHLNYKGVYVWEGRNCFLSTAHTSDDIAYIIQAVQETVKDLRRGGFIPEGPDSPNDGGHKEPETYELSPEQKQLAVVSQYGNDASAALNQSIMLKVKGAVQHTLLKQAVRNIVKRHDALRTVIHVDDEVQQVQARINVEIPIIDFTGYPNEQRESEVQKWLTEDAKRPFHFHEQKPLFRVHVLTSKQDEHLIVLTFHHIIADGWSIAVFVQELESTYAAIVQGSPLPSHEVVSFRQYLDWQQAQIENGHYEEGIRYWRQYLSEPIPQAILTSMSSSRYPHGYEGDRYTVTLDRPLSKAIKSLSIRMKNSVFATILGAFHLFLQQLTKQAGLVIGIPTAGQLHMKQPMLVGNCVNMVPVKNTASSESTLADYLGHMKENMDQVMRHQDVPMTLVASQLPHDQMPDMRIIFNLDRPFRKLHFGQMEAELIAYPIKCISYDLFLNVTEFDQEYVLDFDFNTSVISSEIMNKWGTGFVNLLKKMVEGDSASLDSLKMFSKEDQHDLLELYADHQLRISSTLDHKGVRAVYEEPENETELQIAQIWAELLGLEKVGRSDHFLSLGGNSLKATLMLSKIQQTFNQKVSIGQFFSHQTVKELANFIRGEKNVKYPPMKPVEQKAFYRTSPAQQRVYFLHQMEPNQVSQNMFGQISIIGKYDEKALIASLQQVMQRHEAFRTSFHIIDGEIVQQIAGELDFNVRVHSMDREEFEAYADGYVKPFRLEQAPLVRAELIKVDNEQAELLIDMHHIISDGYSMSILTNELFALYHGNPLPEIPFEYKDFAEWQNQLLIGEVMEQQEEYWLEQFKQEVPILQLPADGSRAMEWSSEGQRVTCSLQSSLIRSLQEMAQQKGTTLYMVLLAAYNVLLHKYTGQEDIVVGTPVSGRNQPNIESMIGIFIQTMGIRTKPQANKRFTDYLDEVKRQTLDAFENQDYPFDWLVEKVNVQRETTGKSLFNTMFVYQNIEFQEIHQDGCTFRVKERNPGVSLYDLMLTIEDAEKQLDIHFDFNPNQFEQETIEQIIRHYTSLLDSLVKEPEKSLSSVPMLSDIERHQLLMGCNDTETPFPHNDTVCQWFETQAEQRPDDEAVIFGNERCTYGQLNERVNQLARTLRTKGVQADQFVAIICPHRIELIVGILAVLKAGGAYVPIDPEYPEDRIQYMLKDSEAKIVLAQLDLHKHLTFDADVVLLDEESSYHEDRSNLEPTCGANDLAYMIYTSGSTGNPKGVLIEHRGLANYIEWAKEVYVNDEKTNFPLYSSISFDLTVTSIFTPLVTGNTIIVFDGEDKSAVLSTIMQDPRIDIIKLTPAHLHVLKEMKIADGTTIRKMIVGGENLSTRLAQSVSEQFKGQLDIFNEYGPTEAVVGCMIYRYDTKRDRREFVPIGSPAANTSIYVLDASMNLVPVGVPGEMYIGGAGVARGYWNRPDLTAEKFVHNPFAPGTIMYKTGDLAKRLRDGNLIYLGRIDEQVKIRGHRIELGEVEAAMHKVEAVQKAVVLAREEEDGLQQLCAYYVSNKPITIAEIREQLSLELPDYMVPSHYIQLEQLPLTSNGKINRKALPAPEVSLEQIAEYVPPGNEVESKLAVLWQEMLGIHRVGIKHNFFDLGGNSIRATALAARIHKELDVNLSVKDIFKFPTIEQLANMALRMEKIRYVSIPSAQKISYYPVSSAQKRMYLLSHTEGGELTYNMTGAMSVEGAIDLERLTAAFQKLIERHEVLRTSFELYEGEPAQRIHPSIEFTIEQIQAREEEVEDHVLDFIKSFDLAKPPLMRVGLIELTPEKHVLLVDMHHIISDGVSMNILMKDLNQFYKGIEPDPLPIQYKDYAVWQQTEAQRQNIKKQEAYWLNRFHDEIPVLDMPTDYERPAIRDYEGESFEFLIPIELKQRLSQMEEATGTTLYMILMAAYTILLSKYSGQEDIVVGTPVSGRSHMDVESVVGMFVNTLVIRNHPAGRKIFEDYLNEVKENMLNAYQNQDYPLEELIQHVHLLKDSSRNPLFDTMFVLQNLDQVELNLDSLRFTPYKLHHTVAKFDLTLSIQTDQDKHHGLFEYSKKLFKKSRIEALSKDYLHILSVISQQPSIQIEHIELSGSTAEDDNLIHSIELNF

SEQ ID NO: 26298 - protein, 216 aa, Xanthomonas campestris pv. campestris str. ATCC 33913
MLGIGAFKQRMPRSGEALPGRTQALPLHNTHLINGHPLRGEFTGLAQVQFGLGCFWGAERKFWNVPGVYTTAVGYAGGKTPNATYSEVCSGQTGHTEAVLVVYDAQAVSFEQLLRTFWESHDPTQGMQQGNDVGTQYRSAIYCSTQAQYDAAIASRDAYQQQLTAAGYGDITTEILYPAPTFYYAEDDHQQYLAKHPNGYCGLGGTGVSCPIGLDA

SEQ ID NO: 26299 - protein, 341 aa, Rubrobacter xylanophilus DSM 9941
MKAFVKTGSRPGEAGVAELPAPRPGPGEVLLRVAACGVCGSDVHAFRSDPGFEWISTPVTLGHEFAGTVEALGPGVERVAPGDRVVAVAIQGCGRCELCLAGLTQLCPDRVAVGLSRDGGMAEYAVMPEGHLVSVPEGLDLTLAALCEPLSVAVRAVDARAGIAPEGKVVVSGPGPIGILCAMVARLRGADVLLTGIGQDAEVRLPAAERAGIRAANLSEASLEEHLRDAFGRPPDVWIESSGSVRALESALESVRAGGTVVVVGIYAERLNLFPTDAVRRELSLLFSYSCNLADYRTALELLASGDLDLGPLISTHRLEEAPDALEAVAAGRTVKAVLVP

SEQ ID NO: 26300 - protein, 407 aa, Thlaspi arvense
YQGVYPVKGNQDRFVVEDIVKFGSPFRFGLEAGSKPEILLAMSCLCKGNPDAFLVCNGFKDAEYISLALLGRKLALNTVIVLEQEEELDLVIDLSQKMNVRPVIGLRAKLRTKHSGHFGSTSGEKGKFGLTTTQIVRVMRKLSQSGMLDCLQLLHFHIGSQIPSTSLLSDGVAEAAQLYCELVRLGAHMKVIDIGGGLGIDYDGSKSGESDLSVAYTLEEYAEAVVASVRFVCDRRSVKHPVICSESGRAIVSHHSVLIFEAVSAVKPMAHHANPDDIQFLLEGNEEARANYEDLYAAVMRGDHESCLLYVDQLKQRCVEGFKDGVLSIEQLASVDGLCEWVLKAIGASDPVHTYNINLSVFTSIPDLWGIEQLFPIVPIHKLDQRPGARGILSDLTCDSDGKIDKF

SEQ ID NO: 26301 - protein, 406 aa, Frankia sp. CcI3
MTEAVVVAATRSPIGRAFKGSLRGMRADDLAAIIVRAALDQVPALNPADIDDLILGCGLPGGEQGHNISRVVAVSLGFDTVPGTTVSRYCASSLQALRMAAHAVRAGEGDAFIAAGVEVVSGFVRGNSDSLPDTQNPRYCEAQARTAARAQAGSAPWTNPRAAGELPDVYIAMGQTAENVAQLAGVSRLEQDEYACRSQNLTERAVADGFFKREIIPVPLPDGGVIDSDDSPRPGTTMRALAALRPVFRPDGTVTAGNACPLNDGAAAVIVMSDTRARELGITPLARIVSTGVSALSPEIMGLAPVEASRRALARAGMTIDDVDLVELNEAFAAQVIPTYRALGLDVAKLNVHGGAIALGHPFGMTGARLLTTLLNGLRTTDTTIGLETMCVGGGQGMALVVERLS

SEQ ID NO: 26302 - protein, 322 aa, Xanthomonas campestris pv. campestris str. ATCC 33913
MTASPSKLAQLRDLSVVVADTGDYDAIKRLKPVDCTTNPTLVKKALDLPVYADLIERELAWGRAHGGEDRNSTINEVADRLTVGVGTMLSELVPGRVSTEVDADLAHDTQATIAKARKFIAMYAERGVSKDKILIKIAATWEGIEAARQLQQEGIDCNLTLIFNRSQALACAEAGVFLISPFVGRILDFFVAKGQTPASIDEDPGVVFVRGVYDEFKRRGSSTVVMGASFRSTAQIEALAGCDRLTISPDLLEKLDADHGDLPRKLSPLNADNAAITPINSDSFATDLAADDMATEKLASGIDTFAKDLEALRKTIADKLAG

SEQ ID NO: 26303 - protein, 413 aa, Lactococcus lactis subsp. lactis Il1403 [sequence omitted]

SEQ ID NO: 26304 - protein, 270 aa, Lactococcus lactis subsp. lactis Il1403
MIMTRKNILSVKRIVVKIGTSSLILPNGKINLSNIDELAFVLSDLNNKGYEVILVTSGAIGVGLNVLGIDKRPKGIADQQALASIGQVELMSLYTQMFRRYSQKVSQLLLTRDVTDFPTSRENAENALNALLGLGIIPIINENDAIAVDEMDHQTKFGDNDKLGAIVSKLVNADLLIMLSDIDGLFDKNPSIYDDAKIFNEIHEITDELRQMAGGAGSRFGTGGMTSKLAAAQILFENGQEMVLTNGERIREIKEIIEGREIGTYFHQKS

SEQ ID NO: 26305 - protein, 503 aa, Spinacia oleracea
VESNSNSLSAFAQSTFLSTLGSPAEVKFDTALTAKLLIENEEAVIAAAAAEAVALARAAAKLAKDAALMAFNSQPTKPVSKLEGQSLHFSGAQLLENEQVGSMRNFEGSENSLREGDTVSEPADMEPTIEELQLLEVELDESITVRSTRQGERKARRARAAEKVASNVVSVKVGSNSRKKRTSVQEVDYSDPLRYLRGATNSSRLLTSSEETELSAGIQDLLKLEKLHDELKVRFGKSPSFVQWAAAAGIDQRTLRRRLNHGTFCKDKMIKSNVRLVISIAKNYQGSGMNLQDLVQEGCRGLVRGAEKFDASKGFKFSTYAHWWIKQAVRKSLSDQSRTIRLPFHMVEATYRVKEARKQLLSENGKQPNNEEVAEATGLSMKRLTAVLMTPKAPRSLDQKIGFNMNLKPSEVIADPEAETAEDLLTKQFMRQDLEKVLDTLSSREKQVIRWRFGLEDGRMKTLQEIGELMGVSRERIRQIESSAFRKLQNKKKTINLQQYMFL

SEQ ID NO: 26306 - protein, 407 aa, Thellungiella salsuginea
YQGVYPVKGNQDRFVVEDIVKFGSPFRFGLEAGSKPEILLAMSCLCKGNPDAFLVCNGFKDAEYISLALLGRKLALNTVIVLEQEEELDLVIDLSQKMNVRPVIGLRAKLRTKHSGHFGSTSGEKGKFGLTTTQIVRVMRKLSQSGMLDCLQLLHFHIGSQIPSTSLLSDGVAEAAQLYCELVRLGAHMKVIDIGGGLGIDYDGSKSGESDLSVAYTLEEYAEAVVASVRFVCDRRSVKHPVICSESGRAIVSHHSVLIFEAVSAVKPMAHHANPDDIQFLLEGNEEARANYEDLYAAVMRGDHESCLLYVDQLKQRCVEGFKDGVLSIEQLASVDGLCEWVLKAIGASDPVHTYNINLSVFTSIPDLWGIEQLFPIVPIHKLDQRPGARGILSDLTCDSDGKINKF

SEQ ID NO: 26307 - protein, 262 aa, Triticum aestivum
  misc_feature (2)..(2): Xaa can be any naturally occurring amino acid
  misc_feature (12)..(12): Xaa can be any naturally occurring amino acid
  misc_feature (14)..(15): Xaa can be any naturally occurring amino acid
  misc_feature (34)..(34): Xaa can be any naturally occurring amino acid
  unsure (1)..(262): unsure at all Xaa locations
IXVGKQVKDARXVXXSNIQKESPLPLVFRLRGGXQILVKTLTGKTITLEVESSDTIDNVKVKIQDKEGIPPDQQRFIFAGKQLENARTLADYNIQKESTLHLVLRLRGGMQIFVKTLTGKTITLEVESSDTIDNVKAKIQDKEGIPPDQQRLIFAGKQLEDGRTLADYNIQKESTLHLVLRLRGGMQIFVKTLTGKTITLEVESSDTIDNVKAKIQDKEGIPPDQQRLIFAGKQLEDGRTLADYNIQKESTLHLVLRLRGGQ

SEQ ID NO: 26308 - protein, 394 aa, Silicibacter sp. TM1040
MFENLKPQPADKILALMQMYREDPRDQKVDLGVGVYKNAEGVTPVMRAVKAAEQRIIDEQTTKAYTGLAGDPAYADAMIDLILGTSVERSKIAAVATPGGTGAVRQAFELIKMANPEARVFVSDPTWPNHVSILKYVGIETVVYRYFDTETRAVNFDGMIEDLKGAKTGDVVLLHGCCHNPTGANLNISQWQAVVELLNERGLIPMIDIAYQGFGDGLEEDAAGVRLVASSVPECLIAASCSKNFGIYRERTGLLMAISQKGDEAGLNQKTLAYLNRQNYSFPPDHGARVVTTILNDPELRADWQKELEETRLGMLALRQQLADELQRLSGSDRFGFIAEHRGMFSLLGTTPELVEKMRVDAGIYMVGDSRLNIAGLNAQTVPILAKAIIDAGV

SEQ ID NO: 26309 - protein, 407 aa, Nasturtium officinale
YQGVYPVKGNQDRFVVEDIVRFGSPFRFGLEAGSKPEILLAMSCLCKGSPDAFLVCNGFKDAEYISLALLGRKLALNTVIVLEQEEELDLVIDLSQKMNVRPVIGLRAKLRTKHSGHFGSTSGEKGKFGLTTTQIVRVVSKLSQSGMLDCLQLLHFHIGSQIPSTSLLSDGVAEAAQLYCELVRLGAHMKVIDIGGGLGIDYDGSKSGESDLSVAYSLEEYAEAVVASVRFVCDRRSVKHPVICSESGRAIVSHHSVLIFEAVSADKPMVHQATPDDIQFLLEGNEEARANYEDLYAAVMRGDHESCLLYVDQLKQRCVEGFKEGVLSIEQLASVDGLCEWVLKAIGASDPVHTYNINLSVFTSIPDLWGIEQLFPIVPIHKLDQRPGARGILSDLTCDSDGKINKF

SEQ ID NO: 26310 - protein, 288 aa, Oryza sativa (japonica cultivar-group)
MSAFAPSLPLHVAAAATAVASQGRRGRIKTTSTCWRRRAAVPVNMAAATSSALSKLAPLEAILFDIDGTLCDSDPIHFCAFRELLQQVGFNNGVPISEEFYSANISGGHNDDLARALFPDLDHDKAMKFMDDKEALYRRLAPEQLVAVEGLHDLCRWIKDHKLKRAAVTNAPRSNAELMLSLLGLTEFFPVLVIGSECDRAKPFPDPYLKALELIGASPDHTFIFEDSASGIRAGVAANVPVVGLTTRNPEKVLQDAGASLLIKDFQDPKLLSILEEIEPTVAAVEQV

SEQ ID NO: 26311 - protein, 372 aa, Oceanobacillus iheyensis HTE831
MNKKRVVIKIGSSSLTNEKGEIDHKKLGDHVNALAMLHQHNFEVILVSSGAVAAGFRNLGYSSRPVTLKGKQASAAIGQGLLIHTYMDKFMEYNIRSAQLLLTRSDFSVQKRYKNATSTMLELLERGVIPIINENDTVAVDELTFGDNDMLSALVSGSIHAAQLIILTDIDGIYDKHPGKYASAMRYDTIDLITNDMIQETDVSGSKLGTGGMKSKLMAAKVAASLGVPVFIGKGVGVSKLLEIVNGHGQGTYVRSFRNKQIPIRKQWISLHSTLEGKVFIDDGATQALMHNGGSLLSAGVINTQGDFEDGDVVEVYNRRNLLGRGQVSCSSEELNAANTLKKAKQMTQIPAIEVIHRDSWVMVDQIKEEFQ

SEQ ID NO: 26312 - protein, 415 aa, Oceanobacillus iheyensis HTE831 [sequence omitted]

SEQ ID NO: 26313 - protein, 98 aa, Cynodon dactylon
RKKAKKSVETYKIYIFKVLKQVHPDIGISSKAMSIMNSFINDIFEKLAQEAARLARYNKKPTITSREIQTSVRLVLPGELAKHAVSEGTKAVTKFTSN

SEQ ID NO: 26314 - protein, 396 aa, Exiguobacterium sp. 255-15
MKEAVIVAGARTPVGKAKKGSFKSMRSDELAGIVIKETLKRANYTGAIDDVILGCALPEAEQGMNIARYASVLGGLSHEVPAITINRYCSSGLQSIADASMKIMTGQATAVIAGGLESMSQVPMPGHVVRPNPSIVETEPEYYMSMGHTAEQVASTYQVSREDQDAFALKSHQKAAAAIASGKFADEIVPVTVTEQFVNDELKIEEKTWVVEHDEGVRADSSPEGLAKLRPAFRLGGSVTAGNSSQTSDGAAAVLIMEREEAERQGLPILGKFKSFAVGGVRPEVMGIGPVVAIPKALELAGITLEEVGLIELNEAFASQSLGVIRELGLNEDIVNVNGGAIALGHPLGCTGTKLTLTLLHEMKRRNVQYGVVSMCIGGGMGAAGVFELVEGGTGQ

SEQ ID NO: 26315 - protein, 428 aa, Burkholderia sp. 383
MSSQLQSIPSYLHADDLGPWGNYLQQVDRVAPYLGSLSRWLETLKRPKRILIVDCPIELDNGTVAHFEGYRVQHNVSRGPGKGGVRYHQDVTLSEVMALSAWMSVKNAAVNVPYGGAKGGIRVDPRKLSRGELERVTRRYTSEIGIIIGPNTDIPAPDVNTNEQVMAWMMDTYSMNQGQTSTGVVTGKPIALGGSLGRKEATGRGVFVVGSEAAKKKGLEIEGARIAVQGFGNVGGIAAKLFQEAGAKVIAVQDHTGTIYQPAGLDSNKLLDHVARTGGVAGFEGAEPMPNDEFWTVETDILIPAALENQITEKNAGKIRTKIIVEGANGPTTTAADDILTANGVLVIPDVIANAGGVTVSYFEWVQDFSSFFWTEDEINHRLERVMREAFSGVWAVAEEHKVSVRTAAFIVACKRILMAREMRGLYP

SEQ ID NO: 26316 - protein, 233 aa, Solanum tuberosum
MKIQCDVCEKAQATVICCADEAALCAKCDIEVHAANKLASKHQRLHLQCLSNKLPPCDICQDKAAFIFCVEDRALFCKDCDEAIHSASSLAKNHQRFLATGIRVALSSSCNKEAVKNQLEPQPPQQNSQQVGLKMPPQQLSGITSPSWPVDDLLGFPDYESSDKKDLLELGEFEWLGGIDLFGEQTAAEVPELSVPQSSNTNIYRTTKYQMPYKKPRIEIPDDDEYFTVPDLG

SEQ ID NO: 26317 - protein, 395 aa, Physcomitrella patens
MGALEILDYNNTLGKRDRDYEVKEAACMGIQNARQLLQSLTQVRSPVVDEECDVMAGAAISKFQKVVSLLSRTGHARFRRRTRNAAVAGYAGVFLESSNFFRENSQETSRDRIVSSGHASPSQFTPTSSSKPPQSPELQAIKYKVFPQSSRSADATPASSDPASGVHHPKPLQILHSSMMQQSIPEHILRPVASAAYRPTALPPNPFNKQEVGSKEGVSGHSPDSSLSSGPPQSTTTASFPTMSVQDARITSLQNMKTAEQPSALPPRPQPPTPKKKCSGQSDENGATCAILGRCHCSKRRKLRLKRTITVRAISSKLADIPSDEYSWRKYGQKPIKGSPHPRGYYKCSSIRGCPARKHVERSMEDSSMLIVTYEGDHNHPQSSSANGGLTVQSQ

SEQ ID NO: 26318 - protein, 612 aa, Zea mays
MAVSASRVQQAEELLQRPAERQLMRSQLAAAARSINWSYALFWSISDTQPGVLTWTDGFYNGEVKTRKISNSVELTSDQLVMQRSDQLRELYEALLSGEGDRRAAPARPAGSLSPEDLGDTEWYYVVSMTYAFRPGQGLPGRSFASDEHVWLCNAHLAGSKAFPRALLAKSASIQSILCIPVMGGVLELGTTDTVPEAPDLVSRATAAFWEPQCPTYSEEPSSSPSGRANETGEAAADDGTFAFEELDHNNGMDIEAMTAAGGHGQEEELRLREAEALSDDASLEHITKEIEEFYSLCDEMDLQALPLPLEDGWTVDASNFEVPCSSPQPAPPPVDRATANVAADASRAPVYGSRATSFMAWTRSSQQSSCSDDAAPAVVPAIEEPQRLLKKVVAGGGAWESCGGATGAAQEMSATKNHVMSERKRREKLNEMFLVLKSLLPSIHRVNKASILAETIAYLKELQRRVQELESSREPASRPSETTTRLITRPSRGNNESVRKEVCAGSKRKSPELGRDDVERPPVLTMDAGSSNVTVTVSDKDVLLEVQCRWEELLMTRVFDAIKSLHLDVLSVQASAPDGFMGLKIRAQFAGSGAVVPWMISEALRKAIGKR

SEQ ID NO: 26319 - protein, 541 aa, Thermoplasma volcanium GSS1
MKTKIVATVGPASEDPSILKQMVKNGLSLIRINSAHAEISYVAKIVKEMRDINPDVGVMVDLKGPELRTGTFPGGSLRISKGNKYTIGKEITLNNEKAIGNIQTGDKVLMSDGEVEFTVDSTSPIVLIAENDGVLRDRSRVNVPGRYVEIGSITERDKSFVIEGIKQGVDFFALSFVQNAENVNSLRDFIIENGGNQYIIAKIETKSGLDNIESIVQASDGIMVARGDLGVELPLKEVVMAQKKIIKISHEDGDFTIVATQVLESMVNNAFPTRAEISDITNAIIDNADALMLSEESAIGKYPALAVQTLRDVSDYVENLVDFQSSYTFKGNKIAYSVAKAAKVLSDDINSNGIVALTHTGSTVKMISSLRPKALVYAGTVDDSLSRKLNIYFGVVPLHLKRDSESLSFADLTEYILKSAFFKSGDKIVVTSGDPYFTFGGTNDVRVMAIGEFLGRGYPQGKDAFGTATYGKNGNILISNSKDVPDGNFDAYIFTADVKPSEVKKINGKTAVFKTRLARTINEGERIYIDGNTGIILKYEK

SEQ ID NO: 26320 - protein, 493 aa, Thermoplasma volcanium GSS1
MDGKLYIDGQWVDSSNGDTLTKYNPVTGEVIGKFAAASRDDVDRAFDAAEDAFQKWMDLGSVERSKIIYKAKELIEENRKELENIIIQENGKPVKEAAEEVDGVLDQMQYYAEWARKLNGEVVEGTTNHRKIFQYKVPYGTVVALTPWNFPAGMVARKLAPALLTGNTVILKPSSDTPGSAEWIVKKFIQAGVPKGALNYITGRGSVIGDYIVEHKKVALITMTGSTSTGQRIMQKASANMAKLMLELGGKAPFMVWKDADINNALKTLLWAKYWNAGQSCIAAERLYVHEDIYDTFINKFVELSKKIVVGDPSRADMGPLINTTALKGTEEVVEEAKESGARILYGGSKPDLSGPYKNGYFFLPTIIDNVDQKSKIFQEEIFAPVIGARKVSDVEEMYSLANDSKYGLASYLFTKDPNLIFEAAERIRFGELYINMPGPEASQGYHTGFRLTGQAGEGSRYGILEYLKIKNIYVDYSGKPLQINTVRDDLFQ

SEQ ID NO: 26321 - protein, 205 aa, Colocasia esculenta
MALMGGIVDVEGAQNSAEVEELARFAVDEHNKKENALLQFSRLVKAKQQVVSGIMHHLTVEVIEGGKKKVYEAKVWVQAWLNSKKLHEFSPIGDSSSVTPADLGVKRDAHEAEWLEIPTHDPVVQDAANHAVKSIQQRSNTLFPYELLEILHAKAKVLEDLAKIHLLLKLKRGSREEKFKVEVHKNIEGTFHLNQMEQDHSDSGN

SEQ ID NO: 26322 - protein, 508 aa, Pseudomonas fluorescens Pf-5
MQRPNPNRLRHPDLQPQRAAPATLHCQNSTTIKSRGFVMTPDTLGAPARPVLQRTLHNRHIQLMAMGGAIGTGLFMGSGKIIAMSGTSIILIYMIIGLFVYLVMRAMGELLLSNLQFKSFADFAGAYLGPRAAFFLGWSYWLSWSVAVVGDAVVVGGFFQYWFPGVPAWMPAVSMMLTLFALNVLTVRLFGEVEFWFAIIKIIAVVTLIGVSLVLIASSFVSPSGVTASLGHLLDRQAAFPHGLLGFFAGFQMAIFSFAGTELIGTAAAETRDPHSTLPKAINAIPLRIILFYVLALACIIAVTSWQQVSPNKSPFVELFLIAGFPAAAGIVNFVVLTSAASSANSGVFSASRMLFGLADQGNAPRLFKRLSGQSVPVISLSFTTLLMLLGVLLLYVVPEVMTAFTLVSTVSAILVIFTWSTILASYIAYRKKHPQLHARSHYKMPGGVPMAWFALAFLLFVLCLLALRPDTRLALCVMPAWFVWLGIAYRLTAGRKGRVHGRAVYPR

SEQ ID NO: 26323 - protein, 426 aa, Triticum aestivum
MAMSRAAAAVGRRRCGPRLPAARSMASWFGHVEPAAKDPILGVTEAFLADPSPDKVNVGVGAYRDDDGKPVVLECVREAERRIAGSTNMEYLPMGGSVKMIEESLKLAYGEDSEFIKDKRIAAVQALSGTGACRLFADFQKRFLPDSQIYIPTPTWSNHHNIWRDAQVPQRTFAYYHPESRGLDFAGLMDDIKNAPEGSFFLLHACAHNPTGVDPSEEQWREISQQFKVKNHFPFFDMAYQGFASGDPERDAKAIRIFLEDGHQIGCAQSYAKNMGLYGQRAGCLSILCDDEIQAVDVKSQLQQIARPMYSNPPLHGALIVSTILGDPALKSLWLKEVKGMADRIIGMRKALKESLEKLGSPLSWEHITNQIGMFCYSGMTPEQVDRLTNEFHIYMTRNGRISMAGVTTGNVAYLANAIHEVTKPI

SEQ ID NO: 26324 - protein, 159 aa, Zea mays
MASSSGSGSSGFLSAALDAAATAGTEEELRALMAQRRAKRMLSNRESARRSRMRKQRHLDELTAQAAHLRRENAHVATALGLTAQGLLAVDADNAVLRTQAAELAARLGSLNDILACMNTTNAAAASSDPYLAFDGAATALDDLLKSCPDSMMFEYQLC

SEQ ID NO: 26325 - protein, 1976 aa, GIBBERELLA ZEAE PH-1
MSRIDKLSISGVRSFSPSVREAIQFNTPLTLIVGYNGSGKTTIIECLKYATTGELPPNSKGGAFIHDPKLCGEKEVLAQVKLQFRSINDRQHVATRSVQLTVKKTTRSQKTLDSSLVVVNNGERTTTSTRQAQMDEMIPERLGVSPAILDAVIFCHQDESLWPLSEPAALKKRFDEIFEAMKYTKAIDNLKVLRKKQVEQLGKLQNDEAHNKVNKDRGDRAEKRMKALQAEIEGSRETCESISAEMEETQEKIKTTRETANSHLAIVQNLDTKREQLEYREEAVKELKSTIDELHDDDGKLESDLAHYEDRMQHLQDDADQNKAQYNELQKELGQSRKELSTKLSEQGKHQSDKDKYERQLKIQKEMIQESAQSYGFSGFDGDLSESQVKSFNDRLQKLLAEKKRELERLQKENSSELDQATGVITELEGRKAARIQDRVSAKQRMSAIEKRTAVLQNESSQIDVDEGAKAVLDGQMQDLDSRFKTAQKTYENADWDRQLSDENDKLHSLESENDRLGRELVECTRLASERAQLDYRRKELNDRKRKLDTLTSTWKPKLDKVLGSDWEPQTLESKFQALVRGQNKVVAEAQKRRDQTRQKQQKVDFRLRTTKESRDKKAKEAAACQQQVVNALLTVRDNAIVDDYKEEVEAAESQVEELRNDLSLFDALVDYYTKCKRLLDTKRKCLLCDRHFDESQAAGMERLSKRIDKHLDPKGKVDTEKDLKEMVSSLEKLRSVRGSYDTYERLTAELPSLREECKTAEAEFDALERQVEEQASIVSTEEEKQKDLEDMSKTVANITQTIRDIAESETQVDRIMSQQMSGGATRSPDEIHELQASLSDQMRTLKNRISKLTTDRQRTKDQLNSLELEKSELRNKISRAAGQLDKKQDLQNQIQALKEEVSHQRDVIQRADDELETIEPSITEARSARDEVLRRGRAKEQVIVDARDNVANSVNEMKMMDADIQGYIDRGGPSNLASNQRAIATLEKTIASTEKEVTDLTVRTNKLKQDIDNGDRKKKNIKDNLNYRKNLRTIDVIRQEIAELEERNADEDYERLQAEARMQENHYNRLLAERGSVMGTMKTKDEELGRLLQEWEMDYKDAKKKYRESHIRVETTKAAIEDLAQCSSAVDKAVMQFHSMKMAEINRIAGELWQSTYQGTDIDTILIRSDNESNTGKRNYNYRLCMVKQDTEMDMRGRCSAGQKVLASIIIRLALAESFGVNCGLIALDEPTTNLDRDNIKSLAESLHMIIKARQAQSNFQLIVITHDEDFLRHMRCSDFCDSFFRVRRDERQNSVISREILVFSKVDPLVLVSIQKVQSLFGTRRPPNKDRYCYYVYDFQLGFQIAKGREKGISPFLHQWPTRLTTCTATMAVSAPTPEHRTSSDSTLDVERDGINAGSNNPTAAAEATQDGAATAPAGSSPLPGAPGAEDPEAGRTRSENILIISALCLALFLAALDTTIITTAVPTIANEFNSSQGYVWIGSAYLLGNASFVPTWGKISDIFGRKPVLLAAAVIFWIGSLLCAVSNSMGMLIAARAIQGIGGGGLIVLPNIAISDLFSIRNRGMYFGILGMVWALASAVGPILGGVFTSQVTWRWCFYINLPISAVAFVILVFFLKLHNPRTPMKEGLMALDWPGSILIIGGTVMWLLGLEFGGVSFPWNSATTICLLVFGILVIGLFLLYEWKVAKFPVLPLRLFSTRNSIASYGVGFTHAFVFMSGSYWLPLYYQGVLGASSLLSGVYLLPYVLSLSFISAGVGIYIKKTGQYKLAIVMGFFVTVIGFGLFIDLEPRANWVKIIIFQIVAGIGIGPNFQAPLIAIQTNVEPRDIGSATSCFSFIRQLGTSISVVVGGVIFNNEMEKQYPKLEEELGPSLASRLSGANAAGSVELVGSLTGEDGRVAKTAFWHSLRTMYIVYTCFAGLSLVISLMIKQVNLSKEHKEHKTGLKSLKRRDDENNEANEGEGVIPGNEKTADN

SEQ ID NO: 26326 - protein, 664 aa, Desulfovibrio desulfuricans G20
MASRKDLANAIRALSMDAVEKAKSGHPGAPMGMADMAEVLWNDFMKHNPANPGWADRDRFVLSNGHGSMLIYSLLHLSGYDLSIDDIRNFRQLHSKTPGHPEYGVTPGVETTTGPLGQGIATAVGMAMAERMLAEAFNRDGFTVVDHHTYVFLGDGCMMEGLSHEACSLAGTLGLGKLVALYDDNGISIDGRIDSWFGDDTPARFRAYGWHVVAGVDGHDAEAVRKAIEEARAETGRPSLICCKTKIGMGAPNMADSSKVHGAPLGADEIAATRANIGWNHPPFEIPADVYAGWDARPRGAAAQQVWDDMFAAYAAAHPALAAEFTRRMAGDLPEGWKELCEKALAQIVAAAENLATRKACNKSLEAIGPALPEMVGGSADLTGSVGTKWSGSRLLDSANWGGNYISYGVREFAMGAIMNGLTLHGGFLPYAGTFLIFSDYAKNAFRLSALMGIRTVWVLTHDSIGVGEDGPTHQPVEQLAGLRLIPGAHVWRPCDTVETQVAWQSAVEYKNGPTALSFTRQGVPFMQRDDAAVRNIARGGYVLRDCEGTPEVILIATGSEVGVAAGACDRLTAEGRRVRLVSMPCSNIFDRQDAAYRESVLPAAVEARVAVEAAASDFWWKYVGLKGRVVGMTTFGESAPGKVLFEHFGFTADNVAAVAKEVL

SEQ ID NO: 26327 - protein, 78 aa, Glycine max
MSCCGGNCGCGTACKCGNGCGGCNMYPEAEAAGATLLVSATATHKASSGGMEMAAENGGCGCTQCKCGTSCGCSCCSC

SEQ ID NO: 26328 - protein, 616 aa, Zea mays
MALSASRVQQAEELLQRPAERQLMRSQLAAAARSINWSYALFWSISDTQPGVLTWTDGFYNGEVKTRKISNSVELTSDQLVMQRSDQLRELYEALLSGEGDRRAAPARPAGSLSPEDLGDTEWYYVVSMTYAFRPGQGLPGRSFASDEHVWLCNAHLAGSKAFPRALLAKSASIQSILCIPVMGGVLELGTTDTVPEAPDLVSRATAAFWEPQCPTYSEEPSSSPSGRANETGEAAADDGTFAFEELDHNNGMDDIEAMTAAGGHGQEEELRLREAEALSDDASLEHITKEIEEFYSLCDEMDLQALPLPLEDGWTVDASNFEVPCSSPQPAPPPVDRATANVAADASRAPVYGSRATSFMAWTRSSQQSSCSDDAAPAAVVPAIEEPQRLLKKVVAGGGAWESCGGATGAAQEMSGTGTKKHVMSERKRREKLNEMFLVLKSLLPSIHRVNKASILAETIAYLKELQRRVQELESSREPASRPSETTTRLITRPSRGNNESVRKEVCAGSKRKSPELGRDDVERPPVLTMDAGTSNVTVTVSDKDVLLEVQCRWEELLMTRVFDAIKSLHLDVLSVQASAPDGFMGLKIRAQFAGSGAVVPWMISEALRKAIGKR

SEQ ID NO: 26329 - protein, 405 aa, Boechera drummondii
YQGVYPVKCNQDRFIIEDIVEFGSSFRFGLEAGSKPEILLAMSCLCKGNPEAFLVCNGFKDSEYISLALFGRKLELNTVIVLEQEEELDLVIDLSQKMNVRPVIGLRAKLRTKHSGHFGSTSGEKGKFGLTTIQILRVVRKLRQVGMLDCLQLLHFHIGSQIPSTALLSDGVAEAAQLYCELVRLGAHMKVIDIGGGLGIDYDGSKSGESDLSVAYSLEEYAAAVVASVRFVCDQKSVKHPVICSESGRAIVSHHSVLIFEAVSAGQQHDTPTDVQFMLEGYSEEVRGDYENLYGAAMRGDRESCLLYVDQLKQRCVEGFKEGSLSIEQLAGVDGLCESVIKAIGASDPVLTYHVNLSVFTSIPDFWGIDQLFPIVPIHKLDQRPVARGILSDLTCDSDGKMDKF

SEQ ID NO: 26330 - protein, 216 aa, Chlamydomonas reinhardtii
MSHKPDDDYDYLFKVVLIGDSGVGKSNLLSRFTRNEFSLESKSTIGVEFATRSIQVDGKTIKAQIWDTAGQERYRAITSAYYRGAVGALLVYDITKSVTFENVERWLKELRDHADSNIVIMLVGNKSDLKHLRDVQTEVAQAFCEREGLSFIETSALESTNVEKAFQQILTEIYHIVSKKVLDSEDNRPKIGEGRDVIVIDNAHDDGGKKKGGCCS

SEQ ID NO: 26331 - protein, 182 aa, Trichoderma atroviride
  misc_feature (56)..(56): Xaa can be any naturally occurring amino acid
  unsure (1)..(182): unsure at all Xaa locations
QRQAEGKPTDKPNIIMSSAVQVCWEKAARYFEVEEKYVYCTPDRYTIDPQQAVDLXDENTIGIAAILGTTYTGHYEDVKGINDLLEEKGLDVSIHVDAASGGFVAPFVLPDLEWDFRLPRVVSINASGHKYGLVYPGVGWVVWRSHEYLPQDLIFNINYLGAEQSSFTLNFSKGASQVIGQY

SEQ ID NO: 26332 - protein, 456 aa, Coriandrum sativum
MQSLLQSSFTPTFRLPKPCHHIPRPPRKLSVFATSASPKREKDPKKRVVVTGLGVVSVFGNDVDTYYDKLLAGESGVDFIDRFDASEFPTRFAAQIRAFSSEGYIDSKNDRRLDNCLRYNIVAGKKALENAGLGEDMRSKIDKERAGVLVGSGMGGITAFCDGVENLITKGYKKISPFFIPYTITNMGSALLAIDLGFMGPNYSIVAACATSNYAFYAAANHIRSGEADLMLAGGAEAAIVPVGLGGFTSCRAMSQRNDNPKAASRPWDKDRDGLVMGEGAGVLVMESLVHAMKRGAPIIAEYLGGAVTCDAHHMTDPRPDGGGVSMCIQSGLQEAGVVSPEEVNYINAHATSTLAGDLKEVTAIKQVLGQIKANATKSMNAHCLGAASGLEAVATVKAIATGWLHPTINQVNLEPEVDFDTVANKKQQHEVNVGISNSFGFGGHNSVVVFSAFNP

SEQ ID NO: 26333 - protein, 73 aa, Triticum aestivum
SSSGWNTGRPASQGIKVLENEGLRLISSSTSAFQNRTFYSLHLQRTQRTMSKECPAFCEELENALTQNVKGYV

SEQ ID NO: 26334 - protein, 280 aa, Edwardsiella ictaluri
MRNANVALLQLCSGENSRANLAQIEQQLKQLNGNIRLALTPENALLFSDAAGYRQHAEREGDGPLQAAVCSLARRYGVWLLVGSMPLYSREDVGGITSSSLLFDDGGTLRARYDKLHMFDVEVRDAHGRYRESDVYRHGEMVTVVDTPVGRLGMTICYDLRFPGLFQALRAQGAEIISVPAAFTRVTGEAHWEVLLRARAIENQCYILASAQVGSHGDTRRTWGHSMAVDGWGRVLQQNTDAVRPIKINVNTNSLSVLRDQMPLAQHNRFQPELIHLHQG

SEQ ID NO: 26335 - protein, 405 aa, Barbarea vulgaris
YQGVYPVKCNQDRFIIEDIVEFGSKFRFGLEAGSKPEILLAMSCLCKGNPEAFLVCNGFKDSEYISLALLGKKLELNTVIVLEQEEELDLVIDLSQKMNVRPVIGLRAKLRTKHSGHFGSTSGEKGKFGLTTIQILRVVRKLRQVGMLDCLQLLHFHIGSQIPSTALLSDGVAEAAQLYCELVRLGANMKVIDIGGGLGIDYDGSKSGESDLSVAYTLEEYAAAVVASVRFVCDQKSVKHPVICSESGRAIVSHHSVLIFEAVSAGQQHETPSDVQFMLEGYSEEVRADYENLYGAAMRGDRESCLLYVDQLKQRCVEGFKEGSLSIEQLAGVDGLCESVIKAIGASDPVLTYNINLSVFTSIPDFWGIDQLFPIVPIHKLDQRPVARGILSDLTCDSDGKIDKF

SEQ ID NO: 26336 - protein, 401 aa, Brassica nigra
YQGVYPVKCNQDRFIIEDIVRFGSSFRFGLEAGSKPEILLAMSCFCKGNPEAFLVCNGFKDSEYVSFALLGRKLELNTVIVLEQEEELDLVIDLSPKMNVRPVIGLRAKLRTKHSGHFGSTSGEKGKFGLTTIQILRVVRNLRQLGMLDCLQLLHFHIGSQIPSTALLSDGVAEAAQLYSELVRLGAHMKVIDIGGGLGIDYDGSKSGESDLSVAYTLEEYAEAVVASVRFVCDQKSVKHPVICSESGRAIVSHHSVLIFEAVSAVKQHANPDDIQFLLEGEEAEYEDLYGAVMRGDRESCFLYVDQLKQRCVEGFKDGSLSIEQLVSVDGLCESVLKAIGASDPVQTYNINLSVFTSIPDFWGIDHLFPIVPIHKQDQRPGARGILSDFTCDSDGKIDKF

SEQ ID NO: 26337 - protein, 1382 aa, Musa acuminata
MDVPESDCGFVNESELLFHCNQCDRELVRKIAQLLLPGLATACVDNTTGLFKSAASVAVVTRKEMVDYLKQRSQMYVTEAVGQGDDIVNMVEEFSDEPTEIISGFVDDFASSKRNLFSRVSGWLSSESREDKIDDFVQEMETNVFWSIDRREAIAEILIRNVDLKRAFHCSKKFDSAQQLAEHETQCSFRILGCTNEGCKAKFSAIHAEKHDSECPFKVIPCEQKCSERIVRHDMDRHCITICPMKLVNCPFYQVGCHSAFPLCNLEKHCSECLRSHLLYVLQVLHKQEASVEELRRRVQLLEKSHTLSELSEALDVRSLTLVIKEQEAKMKKLERDLKLFVSVAPSFAAAFPVDYDKSSERKVPDGIRSKDLLFSWRNGLRAELGFWRRFGSVALREMRLQRFGTSMDMGPGTDGFATADCGWSGSPIPCDPFALSELVNFDDYIESCSPATIVDQIFTMSFSIVQQTPGVWASPAQDIIAGDTSVAAGTYYSCGEKMASQKANLLLELPSHRPGMDIASRKIGCFDFDDISNEGNSTVPRPFGGVSLPDRMLRALSLLKESSCGGAILAQVWMPIRQGNHYVLSTSEQPFLCDQNLAGYREVSRHFTFSTKDAPGLFLELPGRVFISGRPEWTSNVIYYNRFEYLRVDYAVIHDVRGSLAVPIFDPDGCSCHAVLELVTTIEKPNFDTEMESVSKALQAVNLRSIKAQAHQQSFTKSQISIFSEIHDVSRVICHAHMLPLAITWIPIWCDDGAIYEAKFEKDDIGVMKPTSRRTILCIQKLACYVNDRQMKDFLHACAEHHLEKGQGVAGKALRSNYPFFSPDVRVYDIREYPLAHHARRFDLRAAVAFRLKSTYTGNDDYIVEFFLPINCRGSEEQQLLLSYLSSTMRRIHGSLRTVVDAEIGGSEIMRVGNHNEASLGSSSTAFSMKSSQLMDGNSETTAEMHFGVQNMESNEQSAGAHHEQLKSISMKHTEKKRSTAEKNISFSVLQHYFSGSLKDAANSIGDHFFEHVITVAVCPTTLKRACRQYGILRWPSRKIKKVNRSLQKIQKVIRSVQGVDGALKYDPSTRCLVASVSPPENPPLISSEPKGQDLMPASSSHHSETNHSIGKVEQDYFFHGRNLRGTMLKCETNKLGIPSNDCHRDFTSDGALLPYANMQGALSWPSYSKDASDSSYNSKEAVCQGSKDGLSFMTNECQIMSRNFSFVALHQMAMEVECNDGIIEHSHPSSGMTDSSNGRALNHPSFEKSKALISQIGPLITVKATYNGDTIRFKFLLSMGSHHLFEEIERRFKLLAGTFQLEHMDNDEEWVLLVNDSDLQECINVPNNIGSKTVKLQVRDVPCYIILVVGNQHRNLILRDAAVNPSDCGQVFVGCYVIVV

SEQ ID NO: 26338 - protein, 434 aa, Oceanobacillus iheyensis HTE831
MKIAALGFQHVLAMYAGAILVPLIVGEALGLTVEQLTYLVAIDIFMCGIATLFQVMNNRFFGIGLPVVLGCTFTAVAPMIAIGGQYGITAIYGAIIVSGIFVVLISGFFGKLVRFFPPVVTGSVVTIIGITLIPVAINNLGGGQGASDFGSLANISLGFGTLLFIILMYRFTTGFLRSISILIGLAIGTIIASFMGRVDFTAVADASYFHMIQPFYFGTPTFEWPAIITMILVAMVSLVESTGVYFALGDITDKKLKEKDLTKGYRAEGLAILLGGIFNALQYTAFSQNVGLIQMTGVKKLRVIVVAGIMLIALGLIPKIAALTTIIPTAVLGGAMVAMFGMVIAQGIKMLSAVISDSHENSMIIACSVGMGLGVTVVPELFAQIPNSLQILTSNGIVAGSVTAIVLNILFHMLPQRSKKQQTTDSRELAEDIV

SEQ ID NO: 26339 - protein, 547 aa, Corynebacterium efficiens YS-314
MAKIIAFDEEARRGLEKGLNTLADAVKVTLGPKGRNVVLEKAWGAPTITNDGVTIAREIELEDPYEKIGAELVKEVAKKTDDVAGDGTTTATVLAQALVKEGLRNVAAGSNPMGIKRGIEQAVATVTEKLLESAKEVETEEQIAATAGISAADPAIGAQIAKAMYAVGGGKLNKDSVITVEESNTFGVELEVTEGMRFDKGYISGYFATDMERLEAVLEDPYILLVSGKISNIKDLLPLLEKVMQSGKPLLIIAEDVEGEALSTLVVNKIRGTFKSVAVKAPGFGDRRKAQLQDIAILTGGQVISEEVGLSLETADLPLLGQARKVVVTKDDTTIVDGAGSEEQIEGRVNQIRAEIENSDSDYDREKLNERLAKLAGGVAVLKVGAATEVELKERKHRIEDAVRNAKAAVEEGIVAGGGVALIQAAHVLDNDLDLTGDEATGVRIVRDALTAPLKQIAANAGLEPGVVADKVSRLPEGEGLNAATGEYVDLMAAGINDPVKVTRSALQNAASIAALFLTTEAVVADKPQPAGAAMPGADEMGGMGGF

SEQ ID NO: 26340 - protein, 513 aa, Zea mays
MGGWERDNVLLASFICLCCLRKKRRRAPPPPQHYGYPPPPPPYKEDPYGGTYQSWQQNAPPAPPPEHVVKMHPSPPPAYANRPPQPPAPPPPAMLNSSGGSGSNYSGGEILPPPSPGAVLGFSKSTFTYEELLRATDGFSDANLLGQGGFGYVHRGLLPNGKEIAVKQLKLGSGQGEREFQAEVEIISRVHHKHLVSLVGYCISGGKRLLVYEFVPNNTLEFHLHAKGRPTMEWPARLKISLGAAKGLAYLHEDCHPKIIHRDIKASNILLDFQFEAKVADFGLAKFTTDNNTHVSTRVMGTFGYLAPEYASSGKLTEKSDVFSFGVMLLELITGRRPVDTTQTYMDDSLVDWARPLLMRALEDGEYDSLVDPRLGKDFNPNEMARMIACAAACVRHSARRRPRMSQVVRALEGNVSLEDLNEGVRPGHSRFFGSYSSSDYDSGQYNEDMKKFKKMAFNNNYTSSQYSAPTSEYGQIPSASSSEGHQTQEMESGAMKKGGYSGGYSSGYSGAS

SEQ ID NO: 26341 - protein, 581 aa, Haloarcula marismortui ATCC 43049
MSKTVSERAKSVFLSRRAGPAAAGPTSKEYVSGVAVPWVASMTDATPPDDRQNPTTPEEPETAGFVEYGIDDKPPRKQAILLGVQHYLTMIGASVAIPLGLAGAMGMFEAAPDQVGRLIGTFFVVSGIATLAQTTLGNRYPIVQGGTFSMLAPGLAIIGVLAQQGADWQTMLVELQGAVIVAGIVEVVIGYSGLMGKLKRYVGPIVIAPVIALIGLALFNVPQIANPNFGSPGTGQNWWLLGLTMLSIIACSQYLDRRHRAFKLFPVLLGILFAWTVAALLSVTGVFAAGSVSYVSLGSVTSAPLVQPIYPFQWGLPQFTPGFIVGMFAGMLASVVESFGDYHSVARIAGRGAPNSSRINDGIGMEGVGNVFAGIMGTGNGCTSYTENVGAIAITGVASRYVVQIGAAVMILVGYFGPAGQLFATIPSPIIGGLYIVMFGQIAAVGLSQLKYVDLDANRNVFIVGFALFAGLAVPEYMSQVGQGMDVGGATALQQGLAAVPVLGSVLGTDVVATTLFVMGGTGMVVGGIVAFVLDNTVPGTREERGLAAWAALTEDDSEYVSALDRIRGRGGDRPSAVSDD

SEQ ID NO: 26342 - protein, 336 aa, Brassica napus
  misc_feature (183)..(183): Xaa can be any naturally occurring amino acid
  unsure (1)..(336): unsure at all Xaa locations
STHASADGDDAVIRQVVDGAAEPNVLTSEDHFSLFKRKFGKVYASGEEHDYRFSVFKANLRRARRHQKMDPSARHGVTQFSDLTRSEFREKHLGVRGGFKLPKDANKAPILPTENLPEDFDWRDHGAVTPVKNQGSCGSCWSFSATGALEGANFLATGKLVSLSEQQLVDCDHECDPEEAGSXPDSVPNSRVRPTRPYPYTGKDGPVCKLDKSKIVASVSNFSVISIHEELIAATLVKNGPLAVAINAAYMQTYIGGVSCPYICTRRLNHGVLLVGYGSAGYAPARFKEKPYWIIKNSWGEPWGENGFYKICKGRNICGVDSLVSTVTAAVSTPAH

SEQ ID NO: 26343 - protein, 167 aa, Helianthus annuus
MATQSKKTLYDFTVKDAKGNDVDLSVYKGKVVLIVNVASKCGLTNNSYDELNQIYLKYKEKGFEILAFPCNQFGQQEPGTNEEIVDFVCTKFKSEFPIFDKIDVNGENAAPVYEFLKTGFYGILGGDIQWNFSKFLVDKNGQPVDCYYPTTSPLTVERDIQKLLGLL

SEQ ID NO: 26344 - protein, 374 aa, SYNECHOCOCCUS SP. WH 8102
MTSVTSIPPAKTMSAFASLLLGGAVLGAVTVQGWLPLASRAQSISAPSGLSRQSFVAAAVERSGPAVVTLETARTVTSSGMTGLPKGLLMDPLFRHFFGVPGASAPRSRVQRGQGSGVIFDAEGLLLTNAHVVEGADTLQVELTDGRSVEAKVIGKDSLTDLAVVRLEGKGPWPIAALGDSDRLKVGDWAIAVGNPYGLENTVTMGIISNLNRNVAQLGISGKRLDLIQTDAAINPGNSGGPLLNAEGEVIGINTLVRSGPGAGLGFAIPINRARSIAQQLVNKGRASHPVIGVGLAAGPLGPVIRSVQPGAPAAGAGLKPGDVITAINGVATASPTQVVATVERNGVGRQLTLSIKRGETTLTVSLTPMDLAA

SEQ ID NO: 26345 - protein, 372 aa, Haemophilus paragallinarum
NVDPGTMSPTQHGEVFVTQDGAETDLDLGHYERFIRTKMTKRNNFTTGKIYSEVLRKERRGDYLGATIQVIPHITNEIKARVIDGAAGHDVAIVEVGGTVGDIESLPFLEALRQLAVDVGRERTIFMHLTLVPYIPTAGEVKTKPTQHSVKELLSIGIQPDVLICRSDRMIPPNERSKIALFCNVPERAVISLKDVNSIYQIPALLKSQGLDEFICQRFRLDCPEADLSEWEQVLYQQANPTGEVTIGMVGKYTELPDAYKSVNEALKHGGLKNRLNVNIKYIDSEDVESKGTEVLAGLDGILVPGGFGYRGVEGKIRTAQYARENNIPYLGICLGMQVALIEYARHKAGLTEANSTEFDKDCKQPVVGLIT

SEQ ID NO: 26346 - protein, 94 aa, Desulfitobacterium hafniense DCB-2
MNIKPLGDRVVIKALPMEEKTKSGIIMPDTAKEKPQEGEVVAVGPGKMEKGERIVLDVKVGDRVIYSKYAGTEVKYDGQEYLILKETDILAVIG

SEQ ID NO: 26347 - protein, 249 aa, Cucumis sativus
PGKCYPVVSEEYQKAIEKAKRKLRGFIAEKNCAPLMLRLAWHSAGTFCKDSKTGGPFGTMRFKSELAHGANNGLDIAVRLLEPIKEQFPILSYADFYQLAGVVAVEVTGGPDVPFHPGREDKPEPPPEGRLPDATKGSDHLRDVFYTMGLSDQDIVALSGGHTLGRAHKERSGFEGPWTTNPLIFDKSYFTELLTGEKEGLLQLASDKALLSDPVFRPLVEKYAADEDAFFADYAEAHQKLSELGFADA

SEQ ID NO: 26348 - protein, 544 aa, Desulfitobacterium hafniense DCB-2
MAKQIVFNEEARRALERGVNALAESVRVTLGPKGRNVVLDKKFGAPLITNDGVTIAREIELEDPFENMGAQLVKEVATKTNDVAGDGTTTATVLAQAIIREGLKNVAAGANPMGIKRGIEKAVESVVEDIKTNAKPIESKESIAQVASISAGDDNIGVLISDAMEKVGKDGVITVEEAKGMTTELKVVEGMQFDRGYLSAYMITDTDKMEAILNDPYILITDKKIGAIADILPVLEKVVQAGRQLLIIAEDIEGEALATLILNKLRGTFTCVAVKAPGFGDRRKAMLEDIAILTGGTVITEDLGLKLENTTIDMLGRARQIRVTKEETTIVEGSGSQDDIKSRVEAIKKQIDETTSDFDREKLQERLAKLAGGVAVIQVGAATEVEMKEKKLRIEDALAATRAAVEEGIVAGGGCALVDAAKALDSLKLTGDEKTGVAIVCRALEEPLRQIANNAGFEGSIVVEKVRNGGRGVGFNALTEAYEDMIAAGIVDPAKVTRTALQNAASIAAMLLTTECLVSDIPSKDNGAAAMAGMGGMGGMGGMM

SEQ ID NO: 26349 - protein, 529 aa, Bdellovibrio bacteriovorus HD100
MTHSVYEALLNSNAVIEFDNQGYILWANPNFLNLMEYELDEIEGRHHSIFLPEFHQHELEYQEMWNQLAEGHAQAGEFKRLTKKNREVWIQGSYTPVRNLQGEISKIVKMAVDITEKKSLADNLEKKNKELLGAATKAKAATDAKTVFLANMSHEIRTPLNSIIGITDTLAETPLDNQQASFVEILQRANHQLMTIINDILDLSKVEAGEMELRPLPFNLQRLLDELEAVLGFRAKEKGLKLSLAIDPDVEEYFVGDADRLRQVLMNLLNNSLKFTNNGEISLQVSVNRTVHKGNLLFCVTDTGIGISKQKFKDIFQPFTQADTTTTRKYGGTGLGLSITKNIVQMMNGHIWFESQPGQGTSFFFTISVPSTTERKTTMHNPWQGRYQLTDVNHNISSSRRRILVVDDVEDNRHLFGIYLQKTAHAVSYASGGLEAVEMVAKEHYDIIFMDVQMPGMDGYEATRRIRDMEIQMNRTPAKIFACTANAFQEDVRKSLSAGCDLHLSKPVRKDTMLKAISSCFNDAQEAIY

SEQ ID NO: 26350 - protein, 967 aa, Lupinus albus
MANRNLEKMASIDAQLRQLAPAKVSEDDKLVEYDALLLDRFLDILQDLHGEDMKETVQEIYELSAEYEGKHDPKKLEELGNLITSLDAGDSIVFAKAFSHMLNLANLAEEVQIAHRRRNKLKKGDFADENNATTESDIEETFKRLVRELKKSPQEVFDALKNQTVDLVLTAHPTQSIRRSLLQKHGRIRNNLTELYAKDITPDDKQELDEALQREIQAAFRTDEIRRTPPTPQDEMRAGMSYFHETIWKGVPQFLRRVDTALKNIGINERVPYNAPLIQFSSWMGGDRDGNPRVTPEVTRDVCLLARMMAANLYYSMIDDLMFELSMWRCNDELRVRADEISRSSKKDAVAKHYIEFWKIIPSSEPYRVILGDVRDRLYRTRERSRYLLAQGYSDIPEEETLTSVEEFLEPLELCYRSLRVCGDRAIADGTLLDFLRQVSTFGLSLVRLDIRQESDRHTDVLDAITQHLGIGSYQEWSEEKRQQWLLSELSGKRPLFGPDLPQTEEIKDVLDTLHVIAELPPDNFGAYIISMATAASDVLAVELLQRECRIKHPLRVVPLFEKLADLESAPAALARLFSIDWYRNRINGKQEVMIGYSDSGKDAGRFSAAWQLYKAQEELIEVAKKFGVKLTMFHGRGGTVGRGGGPTHLAILSQPPETIHGSLRVTVQGEVIEQSFGEQHLCFRTLQRYTAATLEHGMHPPISPKPEWRALMDQMAVIATEEYRSIVFQEPRFVEYFRLATPELEYGRMNIGSRPAKRRPTGGIETLRAIPWIFAWTQTRFHLPVWLGFGAAFRQVITKDVRNLNMLQEMYNQWPFFRVTIDLVEMVFAKGDPGIAALYDRLLVSEDLWSFGEQLRTKFEETKKLLLQVAAHKDLLEGDPYLKQRLRLRDSYITTLNVCQAYTLKRIRDPNYDVKLRPHISKECIEISKAADELITLNPTSEYAPGLEDTLILTVKGIAAGLQNTG

SEQ ID NO: 26351 - protein, 153 aa, Haloarcula marismortui ATCC 43049
MIGILKSMATTMKHALDGETFTVEYPDVAPEVSPRFRGVHKWSQERCIWCRQCENVCPNNTIQIVMDEQRNGEQYNLHIGQCIYCRLCEEVCPTDAILLTQNFEFTADTKDEFAYDKEQLKNVPWYKDIDPLESREPDRGAWIGEGDGEVDYQ

SEQ ID NO: 26352 - protein, 273 aa, Triticum aestivum
  misc_feature (233)..(233): Xaa can be any naturally occurring amino acid
  misc_feature (263)..(265): Xaa can be any naturally occurring amino acid
  unsure (1)..(273): unsure at all Xaa locations
AYSGDTIEQVCTKKQAGTGPEFPGYRRPTRPLNHLPPEVLKERLPGISETAAIFAGVDVTKEPIPVLPTVHYNMGGIPTNYHGQVVDIKGDNPDTIIPGLMAAGEAACASVHGANRLGANSLLDIVVFGRACANRVAEISKPGETQKPLEKDAGEKTIAWLDKLRNANGSLPTSKIRLNMQRIMQNNAAVFRTQETLTEGCELISEAQKSFHDVKLSDRSLIWNSDLIETIEXLENLLYNACITMHSAEARPESRGAHAREDXXXRDDDQWIN

SEQ ID NO: 26353 - protein, 968 aa, Lupinus albus
MANNRNMEKMASIDAQLRQLAPAKVSEDDKLIEYDALLLDRFLDILQDLHGEDLKNTVQDVYELSSEYEGKHDPKKLEEIGNAITSLDAGDSIVVAKSFSHMLNLANLAEEVQISHRRRNKLKKGNFADETNATTESDIEETLKRLVFDLKKSPQEVFDALKNQTVDLVLTAHPTQSIRRSLLQKHARIRNCLSQLYAKDITPDDKQELDESLQREIQAAFRTDEIKRTPPTPQDEMRAGMSYFHETIWKGVPKFLRRIDTALKNIGINERVPHNAPVIQFSSWMGGDRDGNPRVTPEVTRDVCLLARMMASNMYYSQIEDLMFELSMWRCSDELRDRADELHRSSNKDEVAKHYIEFWKKVPPNEPYRVVLGEVRDRLYQTRERSRHLLAHGYSDIPEEATFTNVEEFLEPLEVCYRSLCACGDRSIADGSLLDFLRQVSTFGLSLVRLDIRQESDRHTDVMDAITKHLEIGSYQEWSEEKRQEWLLSELCGKRPLFGPDLPKTEEIRDVLDTFHVLAELPPDNFGAYIISMATAPSDVLAVELLQRECHIKHPLRVVPLFEKLADLEAAPAALARLFSVDWYKNRIDGKQEVMIGYSDSGKDAGRFSAAWQLYKAQEDLIKVAEKFGVKLTMFHGRGGTVGRGGGPTHLAILSQPPGTIHGSLRVTVQGEVIEQSFGEQHLCFRTLQRYTAATLEHGMNPPISPKPEWRALMDQMAVVATEEYRSIVFKEPRFVEYFRLATPELEYGRMNIGSRPAKRRPTGGIETLRAIPWIFAWTQTRFHLPVWLGFGKAFKQVIEKDAGNLLMLQEMYNQWPFFRVTIDLVEMVFAKGDPGIAALNDRLLVSKDLWPFGEQLRKKYEETKNHLLQVAAHKDLLEGDPYLKQRLRLRDSYITTLNVFQAYTLKRIRDPNFNVPPRPHISKDYLEKSKSATELVSLNPTSEYAPGLEDSLILSMKGIAAGMQNTG

SEQ ID NO: 26354 - protein, 610 aa, Pseudomonas chlororaphis
MCGLTGWVDYTRRLEGEDPAIRAMTNTLALRGPDAEGIWKHRHALLGHRRLAVIDLSGGTQPMVYRFADGQEVSLVYTGEVYNHDALRDQLRQAGHVFQTRSDTEVVLHAYLEWGERCCDHLTGMFAFALFDGRDGHLLLVRDRLGIKPLFYARHREGLLFGSETKAILAHPEFTTGLEVTGLVDVLTLSKGTAQTPFRNLMELLPGHFLSWRPNGQMKIQSYWKVRRQEHQHDLQTTVQQTRELVTHALGSQLHADVPVCSLLSGGLDSTTLTAIAQRIVKAKTGGNINSFSVDFTGQAEQFKSDDLRPDQDQPFALLAAEFIGSRHQTVLIDNEELVSYLAREEVFRARELPFTFGDMDTSLNLLFREIRKHSTVAISGEGADEVFGGYGWFRDPKVIASASFPWSSRVKLPAGFINADFNRQCDLAQYQQASYDDALLQVEHLAQDSPHERRMRELCHMHLKRWMVMLLDRKDRLSMCNSLEVRVPFTDHELVEYIYNVPWSIKSKDGEEKWLLKQACADFVPEAVLKRRKSPYPTSADLGYERFLRQSARQLLQDTGNPVFGIVSHAYMAEELRQPEGYFNTQISRHSLETALALDAWLRLHKISL

SEQ ID NO: 26355 - protein, 182 aa, Pseudomonas syringae pv. tomato str. DC3000
MFKYIGDIVKGTGTQLRSMVMVFGHGFRKRDTLQYPEEQVYLPPRYRGRIVLTRDPDGEERCVACNLCAVACPVGCISLQKAETEDGRWYPDFFRINFSRCIFCGLCEEACPTTAIQLTPDFEMADFKRQDLVYEKEDLLISGPGKNPDYNFYRVAGMAIGGKPKGAAQNEAEPINVKSLLP

SEQ ID NO: 26356 - protein, 522 aa, Oryza sativa
MAGGCKAAIGCVDARVPVRASYVSLYKWPESDAEFVRSVAMARRHGGEAAAAAPPPESPAVPHHYYYNGSGSARRGGGEGWYYCSPRVVDSYSCRQIYLRSYTFSKKKETVPERTMACLGRVRDRGAAVFPLFIPHRAGSGGGGGSDAGSVNSASSITRETASTAGDRKRIRRRRSSKGCAVARRLQEASCGAVRALFHRLLACTTSVEVADAGEPTASSPASPPPGRALAKPCARKDGSGGASLPFAPGGWGRRSSASVVPRSAMAGRIWGSGSRRRGMKVAAVDDVERELDLGERQPAAGKEGGGGGRRGGAGVGGGGWWRLWLAGVRVGDCGCRRWRLTAGEEAAGGEAVAAMVTAEAVTVAAATDAPAGDEAATGELWRRPDGYCGGSWRGSAAAVAAVSGSGDCRRWRMRRRGRRGEVGMAAGKDAATGGGGGGGRRHGGLRRLVEGVADGCIWPARQWLEEGRRPAWRREAQPMVAEAGSAREARAAEMEASLAREARPVEGGRIDARRVRWRRPA

SEQ ID NO: 26357 - protein, 234 aa, Solanum tuberosum
  misc_feature (30)..(30): Xaa can be any naturally occurring amino acid
  unsure (1)..(234): unsure at all Xaa locations
MRVIRSTAILILFLLSVFGLSEQGKAGGFXSEEMATLGGVHDSHGSSQNSDEIHSLAKLAVDEHNKKENAMIELARVVKAQEQTVAGKLHHLTLEVMDAGKKKLYEAKVWVKPWLNFKELQEFKHVEDVPTFTSSDLGVKQVEQTSGLKSVPVHDPVVEEAAEHAIKTIQQRSNSLLPYELQEIVHANAEMADDHTKLHLVIKTSRGGKEEKFKVQVQHNNEGAFHLNHMEPDN

SEQ ID NO: 26358 - protein, 492 aa, Capsicum annuum
MDLSKYRPSSAYDSPFLTTNAGGPVYNNVSSLTVGPRGPVLLEDYHLIEKLATFDRERIPERVVHARGASAKGFFEVTHDISHLTCADFLRAPGVQTPVICRFSTVVHTRGSPESIRDILGFAVKFYTREGNFDLVGNNVPVFFNRDTKSFPDTIRALKPNPKSHIQENWRILDFFSFLPESLHTFAFFYDDVCLPTDYRHMEGFGVHAYQLINKAGKAHYVKFHWKPTCGVKSMTEEEAIRVGGTNHSHATKDLYDSIAAGNYPEWKLFIQIMNPEDVDKFDFDPLDVTKTWPEDILPLMPVGRLVLNRNIDNFFAENEQLAFNPGHIVPGVYYSEDKLLQTRIFAYADTQRHRIGPNYMQLPVNAPKCAHHNNHRDGAMNFMHRDEEVDYLPSRFDPCRPAEQYPIPSCVLTGRREKCVIPKENNFKQAGERYRSWAPDRQDRYINKWVESLSDPRVTHEIRSIWISYLSQADKSCGQKVASRLTVKPTM

SEQ ID NO: 26359 - protein, 109 aa, Streptococcus sp.
LLYALLHFSGFEDVSMDEIKSFRQWGSKTPGHPEFGHTAGIDATTGPLGQGISTATGFAQAERFLAAKYNREGYNIFDHYTYVICGDGDLMEGVSSEAASYAGLQKLDK

SEQ ID NO: 26360 - protein, 242 aa, Ceratopteris richardii
  misc_feature (8)..(8): Xaa can be any naturally occurring amino acid
  misc_feature (11)..(11): Xaa can be any naturally occurring amino acid
  misc_feature (19)..(19): Xaa can be any naturally occurring amino acid
  unsure (1)..(242): unsure at all Xaa locations
MLNYSFDXVKXISSSDLIXPAGNYYQHVTFNEQGDLADDDGICYDIINSTGEKKRGLTVDQVKYLEMNFTMDFKLEPERKALIAKELGLRPRQVAIWFQNRRARWKNKQLEQDYETLKSSYEALLQENEDMVKRNKALDEENKLLQAEIARLTGISGNVDVPVDIDAKVASPDLDSDSDLESTVKGEKQQNLKSEIGIPAKLDAQSEILESLTLSCLKSQEAIVAFVEQPIGANDSVVACAL

SEQ ID NO: 26361 - protein, 248 aa, Solanum tuberosum
MLAVFEQSIGKPPSELSTQKKEAKTEEEIAESFKSWKPDSTFYHLSNGNFMAFSHENENPLHPRSIVVMDDIFCIFSGGLDNTFDLRKHYGLSRQATEAMIMVEAYKVLRDRAPYPPDQVIKELEGKFAFILFDSKASTLFLARDRDGSVPLHWGIATDGSLVCSDDSEFIQASCGKLYTPFPPGCIFISDTGLISFDHPMHKVKGIAREDDEGNVNAVIFQVDLYTKLHSIPRRGSAANWAGATTVE

SEQ ID NO: 26362 - protein, 256 aa, Ceratopteris richardii
MPFIPATMKHHAALDSTDIKGKSKNSCKDLKSRALKRSRQDVVVDSDTEEKRRGLTMEQINILEMKFKEDVELEPERKTLIAKQLGLRPRQVAIWFQNRRARWKNKQVECKYELLKAQYDAVVKEKESITMEHESILEGNRRLHSESIEKANTLGGAISPALPSCNIMSPTDSADCQSEIIMSVDVIEGAISCCHPIQEPSSRMAADVVVETEYSFYSSLDNSFSQFPMLVRQLIANGHCLQDAYDIYLGCEYFYG

SEQ ID NO: 26363 - protein, 137 aa, Brassica napus
  misc_feature (135)..(135): Xaa can be any naturally occurring amino acid
  unsure (1)..(137): unsure at all Xaa locations
MGVYLSTPKTDKLSADGENSRVRFGLSSMQGWRTTMEDAHAALPDLDECTSFFGVYDGHGGKAVSKFCAMHLHKQVLINDANSSGDLPTSLHKAFLRMDEMMKGQRGWRELTELGDKGNKISGMIDDIIWPPKGXDS

SEQ ID NO: 26364 - protein, 539 aa, Chlamydia trachomatis D/UW-3/CX
MSFKSIFLTGGVVSSLGKGLTAASLALLLERQDLKVAMLKLDPYLNVDPGTMNPYEHGEVYVTDDGVETDLDLGHYHRFSSVQLSKYSTATSGQIYTKVLTKERNGEFLGSTVQVIPHVTNEIINVIQSCADHHKPDILIVEIGGTIGDIESLPFLEAVRQFRCEHPQDCLSIHMTYVPYLRAAKEIKTKPTQHSVQNLRSIGISPDVILCRSEAPLSTEVKRKISLFCNVPEHAVFNAIDLERSIYEMPLLLAKENISDFLLNKLGFSPKPLDLSDWQDLVEALCDKERQHVRIGLVGKYLEHKDAYKSVFESLFHASVPANCSLELVPIAPESEDLLEQLSQCDGCLIPGGFGTRSWEGKISAARYCRERNIPCFGICLGMQALVVEYARNVLDKPLANSMEINPETPDPVVCMMEGQDSVVKGGTMRLGAYPCRIAPGSLASAAYKTDLVQERHRHRYEVNPSYIERLEEHGLKIAGVCPLGELCEIVEIPNHRWMLGVQFHPEFLSKLAKPHPLFIEFIRAAKAYSLEKANHEHR

SEQ ID NO: 26365 - protein, 543 aa, Bradyrhizobium japonicum USDA 110
MARYIFITGGVVSSLGKGLASAALGALLQARGYKVRLRKLDPYLNLDPGTMSPYQHGEVFVTDDGAETDLDLGHYERFTGRPATKADNITTGRIYQDIITKERRGDYLGATIQVVPHVTNAIKEFVLDGNDDYDFVLVEIGGTVGDIEGLPFFEAIRQLKNDLPRDHAVYIHLTLLPYIPSAGELKTKPTQHSVKELRSIGIQPDILLCRTDREIPKEERRKLGLFCNVRESAVIEARDVDNIYAVPEAYHNAGLDDEVLAAFGIASRIPPELRSWQQINERVRNPEGNVTIAIVGKYTGMKDAYKSLIEALSHGGIANKVKVNLDWIESEIFEKEDPAPFLEHVNGILVPGGFGQRGAEGKIRAAQFARERDVPYFGICFGMQMAVIEAARNLVGIEDANSTEFGPTKEPLVGLMTEWLRGNELEKRSQAGDLGGTMRLGAYPAALNRGSRVSQVYGGATEISERHRHRYEVNTAYKDRLEQHGLKFSGLSPDGVLPEIVEYEDHPWFIGVQFHPELKSRPFEPHPLFASFIQAAMVQSRLV

SEQ ID NO: 26366 - protein, 192 aa, Ceratopteris richardii
MAWSVSVGSTSIPQDEDETKQSVITSGISKTKGHNQGHRKHPSKDVTKDIGDGDELMCGVEKKRRLTAEQVNFLETSFSMDLKLEPERKAHLAKQLGIQPRQVAIWFQNRRARWKNQQIEQDYESLKASYEAVVEEKERLLKEHDLALEANKRLQAEIARLTRSLQSYDRNGMSEPKGGTAEQWQIRGNVNQ

SEQ ID NO: 26367 - protein, 357 aa, Brassica napus
  misc_feature (160)..(160): Xaa can be any naturally occurring amino acid
  unsure (1)..(357): unsure at all Xaa locations
MLATHPSLFLSLFSVRENGDFQLHQQHLSIAIAVVSWWAWRTLNWVWFKPKMLESYLRRQGLSGSPYTPLVGDFKRNFSLLKEARTKPIKLTDDITPRLVPYPLKMLKTHGRTYFTWLGPIPTITIMDPELIKEVFNKIYEFQKPHTFPLFRLIGTGWSXIGWKHRRIINPAFHLEKIKNMVPAFHQSCSEVVGKWDKLVSDKGSSCEVDVWLGLVSMTADVISRTAFGSSYKEGQRIFELQAELALLLTQAFRRIFIPGYRYYPTKGNRRMKAAAREVQDILRGIVNKRLRARESGEAPSEDLLGTLLESNLGQTKGTGMSIADVIEECKLFYFAGQETTSVLLVWTMVMLSQHQD

SEQ ID NO: 26368 - protein, 477 aa, Oryza sativa (japonica cultivar-group)
MARTAEEKSRARGTALWRLLRPLAVLGPRMQRRREAAVPFRGQVRNTAAASLLLLLSLSHVPLYAGAGDADPDPLFWARPLLAAPRGTVMELGVAPVVTSWVVVRLLAALLFDSDSSTTVASCELLARCLAYVTNASRLVIGIAAALGMCGSGGAGNAALVVLQLFAGGVVVVLADLLHETGYGVEGVSAASLLIATNACERAVSHLFSPVKLRLAGAGPEFEGPVFAVTHRVAAAPPSWRHKAGALLFTLLRLDLPNLSNYMTTCVMFVLAVRLDETHLRRLYRSRPRRGTDEFVPIKLLYTSAMPIMLHASALHLHSSGGGGGGFVVNLLGRWKDAGGGAAYPVGGLVYYVTPPSKLLVDPGLIHELLIHSVFVVASCTLLSMAWAEASRSSAREFRTRVIGTGYFVWDETSRRIDRVIAAAAAVGGFAVGGLAVYAGAVGAIGEAGPELLFAVLVIKNLAETFYAKSKLTTTYS

SEQ ID NO: 26369 - protein, 526 aa, Schizosaccharomyces pombe
MARETEFNDKSPSSTDDGMSQSHFSDKLKNLFHFRRNRAATVSTSVRNDQRDNDSDDSTFDINVNQLNELDLNDSSDQLDSRPSLRRVSSAPDSHKGVEAPPPRPLINMSNIRKAQVKILKNPGNYIFGRTEYGKRTYSGNSTKISRVEVTPHSFEKIRLLGQGDVGKVYLVRQKSNHRLFAMKILNKREMIKRHKVNRVLAEQEILTKSKHPFIVTLYHSFQSRDYLYLCMEYCAGGEFFRALHSLPKHILPEKDACFYAAEVTAALEYLHLMGFIYRDLKPENILLHQSGHIMLSDFDLSKPISIVTHPTVVLPKHSTFSQEKPALDTNSYFSNFRTNSFVGTEEYIAPEVIRSCGHTVAVDWWTLGIFIYEILYGTTPFKGKNRHATFSNILYSDVSFPEYHGAPNVSSTCKSLIRRLLVKDESKRCGSVAGASDIKQHPFFRHIQWALLRSMKPPIIPKIEDGMEAVEPSDNDNEEEDFLNSQYLISANLPAVDMHSSTPVNEQSNPFDSFSSVTLHHAGDE

SEQ ID NO: 26370 - protein, 136 aa, Brassica napus
DKDRRMSLNLNLSMYSIAKPLSQFLDEVSRIKDNHSKLSEIDVYVGKLEEERKKIDVFKRELPLCMLLLNEAIERLKEEASSVMMASNGKLDVGQGSKLENDNKKNWMSSAQLWISNSNSTNKEEDRCVTQTPFQT

SEQ ID NO: 26371 - protein, 357 aa, Trichoderma atroviride
MAEFVRAQIFGTTFEITSRYSDLQPVGMGAFGLVCSARDQLTNQNVAVKKLMKPFSTPVLAKRTYRELKLFKHLRHENVISLSDIFISPLEDIYFVTELLGTDLHRLLTSRPLEKQFIQYFLYQIMRGLKYVHSAGVVHRDLKPSNILVNENCDLKICDFGLARIQDPQMTAYVSTRYYRAPEIMLTWQKYDVEVDIWSAGCIFAEMLEGKPLFPGKDHVNQFSIITELLGTPPDDVINTIASENTLRFVKSLPKRERQPLRNKFKNADDSAIDLLERMLVFDPKKRITATEALAHDYLAPYHDPTDEPVAEEKFDWSFNDADLPVDTWKIMMYSEILDYHNVEGVPQMEDQQFPPQ

SEQ ID NO: 26372 - protein, 532 aa, Schizosaccharomyces pombe
NKLLFNRFASSQSKDSNISEMNSKDSNTVPVYTTNTGCPIFNPMAAARVGKGGPVLLQDSHLIDVFQHFDRERIPERVVHAKGSGAFGEFECTDDITKYTKHTMFSKVGKKTPMVARFSTVGGERGTPDTARDPRGFALKFYTDEGIFDMVGNNTPVFFLRDPAKFPLFIHTQKRNPQNDMKDATMFWDYLSQNAESIHQVMILFSDLGGTPYSYRFMDGFSSHTYKFVNDKGEFYYCKWHFITNQGTKGLTNEEAAALDGSNPDHARQDLFEAIERGDYPSWTLYVQVMTPQEAEKYRYNIFDLTKVWPHKDVPMQRVGRFTLNQNPTNFFADIEQAGFSPSHMVPGIEVSADPVLQVRTFSYPDTHRHRLGANFEQIPVNSPKCPVFNYSRDGPMNVNGNQGNWPNYPSSIRPLAKVQYEPDEGHEKWVGQVTYHMDEITDVDFEQPRAFWQNVLGKKPGQQDNFVKNVAGHLSGAISPVRERQYGVFTRVDSELGRRIREATEAEVKKMEEKAPKPINKGEPHMFQGSS

SEQ ID NO: 26373 - protein, 401 aa, Brassica oleracea
YQGVYPVKCNQDRFIIEDIVRFGSSFRFGLEAGSKPEILLAMSCFCKGNPEAFLVCNGFKDSEYVSFALLGRKLELNTVIVLEQEEELDLVIDLSPKMNVRPVIGLRAKLRTKHSGHFGSTSGEKGKFGLTTIQILRVVRNLRQLGMLDCLQLLHFHIGSQIPSTALLSDGVAEAAQLYCELVRLGAHMKVIDIGGGLGIDYDGSKSGESDLSVAYTLEEYAEAVVASVRFVCDQKSVKHPVICSESGRAIVSHHSVLIFEAVSAVKQHANPDDIQFLLEGEEAEYEDLYGAVMRGDRESCFLYVDQLKQRCVEGFKDGSLSIEQLVSVDGLCESVLKAIGASDPVQTYNINLSVFTSIPDFWGIDHLFPIVPIHKQDQRPGARGILSDFTCDSDGKIDKF

SEQ ID NO: 26374 - protein, 803 aa, Zea mays
MSFGSLFDGGSGGGGGGGGMQFPFTTGFSSSPALSLGLDNAGGGMVGRMLPVGGAPADGGMARDAADAENDSRSGSDHLDAMSAGAGAEDEDDAEPGNPRKRKKRYHRHTPQQIQELEALFKECPHPDEKQRDELSKRLGLDPRQVKFWFQNRRTQMKTQLERHENALLKQENDKLRAENMAIREAMRSPMCGSCGSPAMLGEVSLEEQHLCIENARLKDELNRVYALATKFLGKPMPVLSGPMLQPNLSLPMPSSSLELAVGGLRGLGSIPSLDEFAGGVSSPLGTVITPARATGSAPPPMVGVDRSMLLELAISAMDELVKLAQVDEPLWLPSLSGSPDKKLLNFEEYAHSFSPSVGAVKPVGYVSEASRESGLVIIDNSLALVETLMDVRRWSDMFSCMIAKATVLEEVTSGIAGSRNGALLLMKAELQVLSPLVPIREVTFLRFCKQLAEGAWAVVDVSIDGLVRDHNSGTASNAGNIRCRRLPSGCVMQDTPNGYCKVTWVEYTEYDEASVHQLYRPLIRSGLAFGARRWLAMLQRQCECLAILMSPDTVSANDSSVITQEGKRSMLKLARRMTENFCAGVSASSAREWSKLDGAAGSIGEDVRVMARKSVDEPGEPPGVVLSAPTSVWVPVAPEKLFNFLRDEQLRAEWDILSNGGPMQEMANIAKGQEHGNSVSLLRASAMSANQSSMLILQETCTDASGSMVVYAPVDIPAMQLVMNGGDSTYVALLPSGFAILPDGPSSVGAEHKTGGSLLTVAFQILVNSQPTAKLTVESVETVNNLIFCTIKKIKTALQCDA

SEQ ID NO: 26375 - protein, 71 aa, Glycine max
GTLCVMQLAFSDAVYLVDAIEGGEELSIACKLALESNYITKVIHDCKRDSEVSDLFDCLLPCLPCSLFCIC

SEQ ID NO: 26376 - protein, 405 aa, Capsella bursa-pastoris
YQGVYPVKCNQDRFIIEDIVEFGSSFRFGLEAGSKPEILLAMSCLCKGNPDAFLVCNGFKDSEYISLALFGRKLELNTVIVLEQEEELDLVIDLSQKMNVRPVIGLRAKLRTKHSGHFGSTSGEKGKFGLTTIQILRVVRKLRQVGMLDCLQLLHFHIGSQIPSTALLSDGVAEAAQLYCELVRLGAHMKVIDIGGGLGIDYDGSKSGESDLSVAYSLEEYAAAVVASVRFVCDQKSVKHPVICSESGRAIVSHHSVLIFEAVSAGQQHETPTDVQFMLEGYSEEVRGDYENLYGAAMRGDRESCLLYVDQLKQRCVEGFKEGSLGIEQLAGVDGLCESVIKAIGASDPVLTYHVNLSVFTSIPDFWGIDQLFPIVPIHKLDQRPVARGILSDLTCDSDGKIDKF

SEQ ID NO: 26377 - protein, 244 aa, Triticum aestivum
MDSMESCVPPGFRFHPTDEELVGYYLRKKVASQKIDLDVIRDIDLYRIEPWDLTEHCGIGYEEQNEWYFFSFKDRKYPTGTRTNRATMAGFWKATGRDKAVHERSRLIGMRKTLVFYKGRAPNGQKTDWIMHEYRLETDENAPPQEEGWVVCRAFKKRTAYPNRGMMERWGSNYSYNEVNAMSGAPFPDPNMASTYAAAAQMGRGASFKEEAEQLDGAAALLRYTSSHLVELPQLESPVAPLPR

SEQ ID NO: 26378 - protein, 405 aa, Arabidopsis arenosa
YQGVYPVKCNQDRFIIEDIVEFGSSFRFGLEAGSKPEILLAMSCLCKGNPEAFLVCNGFKDSEYISLALFGRKLELNTVIVLEQEEELDLVIDLSQKMNVRPVIGLRAKLRTKHSGHFGSTSGEKGKFGLTTIQILRVVRKLSQVGMLDCLQLLHFHIGSQIPSTALLSDGVAEAAQLYCELVRLGAHMKVIDIGGGLGIDYDGSKSGESDLSVAYSLEEYAAAVVASVRFVCDQKSVKHPVICSESGRAIVSHHSVLIFEAVSAGQQHETPTDHQFMLEGYSEEVRGDYENLYGAAMRGDRESCLLYVDQLKQRCVEGFKEGSLSIEQLAGVDGLCEWVIKAIGASDPVLTYHVNLSVFTSIPDFWGIDQLFPIVPIHKLDQRPVARGILSDLTCDSDGKIDKF

SEQ ID NO: 26379 - protein, 499 aa, Oryza sativa (japonica cultivar-group)
MAAMNEKVLDKCGRNISSLKRKRDNPAARCADAGNTSKLHKHPADNSVVRFYVDEGHKAKIKCHFKMQIIQSYQNFMTSALPKRILLRQGGEWKDFPKQIVKLAHSDFRTKKTITEGEHQTHLFLLDFVHMTFIDSKTGLQRPIAWIDENGKQYFPEFFIEDKTLYRKKELGNGNNVYIIVEPNGTQEMNDHFGTSESSAESSNFESSTDDVSSPKRAKAERSVAGNKTGGVKETIGENEPHALLPIPCRSLPQDKLGDHSRVQLAISAVQKLLLQGLGTVLGSKDIVGIYRTPAVDNHKEFRYNLFKKQAEHTKCKRGNANVRYAWLACSKDAVDEMMLNGVMHFEKTVKCPDYGIGTILAPANCSNTCVNYSDVDENGIVHMMLCRVVMGNVEIVHHGSKQHRPSNEYFDSGVDDIKNPQHYIVWDMNVNSHIYSEFVVTIKLPSRVKDSPATEEDCHNLSEVSSLILSSGSPDSVSQKPPNMISFLLTMLSILGWV

SEQ ID NO: 26380 - protein, 345 aa, Mycobacterium tuberculosis
MGTQSPALSLNPMTVQADREVAMADAPTRATTSRVDSDLDAQSPAADLVRVYLNGIGKTALLNPAGEVELAKRIEAGLYAEHLLETRKRLGENRKRDLAAVVRDGEAARRHLLEANLRLVVSLAKRYTGRGMPLLDLIQEGNLGLIRAMEKFDYTKGFKFSTYATWWIRQAITRGMADQSRTIRLPVHLVEQVNKLARIKREMHQHLGREATDEELAAESGIPIDKINDLLEHSRDPVSLDMPVGSEEEAPLGDFIEDAEAMSAENAVIAELLHTDIRSVLATLDEREHQVIRLRFGLDDGQPRTLDQIGKLFGLSRERVRQIERDVMSKLRHGERADRLRSYAS

SEQ ID NO: 26381 - protein, 512 aa, Oryza sativa (japonica cultivar-group)
MAAMNEKVLDKCGRNISSLKRKRDNPAARCADAGNTSKLHKHPADNSVVRFYVDEGHKAKIKCHFKMQIIQSYQNFMTSALPKRILLRQGGEWKDFPKQIVKLAHSDFRTKKTITEGEHQTHLFLLDFVHMTFIDSKTGLQRPIAWIDENGKQYFPEFFIEDKTLYRKKELGNGNNVYIIVEPNGTQEMNDHFGTSESSAESSNFESSTDDVSSPKRAKAERSVAGNKTGGVKETIGENEPHALLPIPCRSLPQDKLGDHSRVQLAISAVQKLLLQGLGTVLGSKDIVGIYRTPAVDNHKEFRYNLFKKQAEHTKCKRGNANVRYAWLACSKDAVDEMMLNGVMHFEKTVKCPDYGIGTILAPANCSNTCVNYSDVDENGIVHMMLCRVVMGNVEIVHHGSKQHRPSNEYFDSGVDDIKNPQHYIVWDMNVNSHIYSEFVVTIKLPSRVKDSPATEEDCHNLSEVSSLILSSGSPDSVSQQQHAVIQTVTESTIDLCLLLRLDFKLTVVFYL

SEQ ID NO: 26382 - protein, 542 aa, Oryza sativa (japonica cultivar-group)
MAAMNEKVLDKCGRNISSLKRKRDNPAARCADAGNTSKLHKHPADNSVVRFYVDEGHKAKIKCHFKMQIIQSYQNFMTSALPKRILLRQGGEWKDFPKQIVKLAHSDFRTKKTITEGEHQTHLFLLDFVHMTFIDSKTGLQRPIAWIDENGKQYFPEFFIEDKTLYRKKELGNGNNVYIIVEPNGTQEMNDHFGTSESSAESSNFESSTDDVSSPKRAKAERSVAGNKTGGVKETIGENEPHALLPIPCRSLPQDKLGDHSRVQLAISAVQKLLLQGLGTVLGSKDIVGIYRTPAVDNHKEFRYNLFKKQAEHTKCKRGNANVRYAWLACSKDAVDEMMLNGVMHFEKTVKCPDYGIGTILAPANCSNTCVNYSDVDENGIVHMMLCRVVMGNVEIVHHGSKQHRPSNEYFDSGVDDIKNPQHYIVWDMNVNSHIYSEFVVTIKLPSRVKDSPATEEDCHNLSEVSSLILSSGSPDSVSQVRRYLSMGLDNIAIVSQLLFSYRQVPLLEQQQHAVIQTVTESTIDLCLLLRLDFKLTVVFYL

SEQ ID NO: 26383 - protein, 497 aa, Oryza sativa (japonica cultivar-group)
MAAMNEKVLDKCGRNISSLKRKRDNPAARCADAGNTSKLHKHPADNSVVRFYVDEGHKAKIKCHFKMQIIQSYQNFMTSALPKRILLRQGGEWKDFPKQIVKLAHSDFRTKKTITEGEHQTHLFLLDFVHMTFIDSKTGLQRPIAWIDENGKQYFPEFFIEDKTLYRKKELGNGNNVYIIVEPNGTQEMNDHFGTSESSAESSNFESSTDDVSSPKRAKAERSVAGNKTGGVKETIGENEPHALLPIPCRSLPQDKLGDHSRVQLAISAVQKLLLQGLGTVLGSKDIVGIYRTPAVDNHKEFRYNLFKKQAEHTKCKRGNANVRYAWLACSKDAVDEMMLNGVMHFEKTVKCPDYGIGTILAPANCSNTCVNYSDVDENGIVHMMLCRVVMGNVEIVHHGSKQHRPSNEYFDSGVDDIKNPQHYIVWDMNVNSHIYSEFVVTIKLPSRVKDSPATEEDCHNLSEVSSLILSSGSPDSVSQTSSTVGAAAACSNSDSD

SEQ ID NO: 26384 - protein, 968 aa, Lupinus albus
MASNRNMEKMASIDAQLRQLAPAKVSEDDKLIEYDALLLDRFLDILQDLHGEDLKDTVQEVYELSSQYEGKHDPKKLEEIGNVITSLDAGDSIVVAKSFSHMLNLANLAEEVQISHRRRNKLKKGNFADETNATTESDIEETLKRLVFDLKKSPHEVFDALKSQTVDLVLTAHPTQSIRRSLLQKHARIRDCLSHLYAKDITPDDKKELDEALQREIQAAFRTDEIKRTPPTPQDEMRAGMSYFHETIWKGVPKFLRRVDTALKNIGINECIPHNAPVIQFSSWMGGDRDGNPRVTPEVTRDVCLLARMMAANMYYSQIEDLMFELSMWRCSDELRNRADELHRSSNKDEVAKHYIEFWKKVPANEPYRVVLGEVRDRLYQTRERSRHLLAHGYSDIPEEATFTNVEEFLEPLEVCYRSLCACGDRPIADGSLLDFLRQISTFGLSLVRLDIRQESDRHTDVMDAITKHLEIGSYLEWSEEKRQEWLLSELSGKRPLFGPDLPKTEEIRDVLDTFHVLAELPPDNFGAYIISMATAPSDVLAVELLQRECHIKHPLRVVPLFEKLADLEVAPAALARLFSIDWYINRIDGKQEVMIGYSDSGKDAGRFSAAWQLYKAQEELIKVAKKFGVKLTMFHGRGGTVGRGGGPTHLAILSQPPDTIHGSLRVTVQGEVIEQSFGEQHLCFRTLQRYTAATLEHGMNPPISPKPEWRALMDQMAVISTEEYRSIVFKEPRFVEYFRLATPELEYGRMNIGSRPAKRRPTGGIETLRAIPWIFAWTQTRFHLPVWLGFGAAFKQVIEKDVRNLHMLQEMYNQWPFFRVTIDLVEMVFAKGDPGIAALNDRLLVSKDLWPFGEQLRKKYEETKNLLLKVAAHKDLLEGDPYLKQRLRLRHSYITTLNVFQAYTLKRIRDPNFNVRPRHHISKESLEKSTSATELVSLNPTSEYAPGLEDSLILTMKGIAAGMQNTG

SEQ ID NO: 26385 - protein, 562 aa, Vibrio fischeri ES114
MNNNKRPLYIPYAGPALLSTPLLNKGSAFSTTERKYFNLEGLLPEAIESIEEQTGRAYKQYQNFENDMDKHIYLRNIQDTNETLFYRLVQNHISEMMPIIYTPTVGAACENFSNIYRRGRGLFISYENKNRIDDLLNNAANQNVKVIVVTDGERILGLGDQGIGGMGIPIGKLALYTACGGISPAHTLPIVLDVGTNNPQRLADPMYMGWRHPRVTGDEYADFVEDFIQAVQRRWPEALVQFEDFAQKNAMPLLERYKNRICCFNDDIQGTAAVTVGSLLAACKAAGSSLSEQRVTFLGAGSAGCGIAEAIIAQMVSEGISDAQARSQVYMVDRWGLLQEGMPNLLDFQQRLVQKAENTKDWVSEEPNFSLVDVMRNAKPTVLIGVSGAPGLFSKEVIQEMHKHCERPIVFPLSNPTSRVEATPNDIIRWTDGQALVATGSPFDPVAHNGQTYPIAQCNNSFIFPGIGLGVLAIKATRVTDEMLMESSRALAECSPLAIHGTGALLPPLEEIHSVSKRIAFAVAKKAIEQGHALEITDEALQQKIESYFWKPVYRRYKRTAF

SEQ ID NO: 26386 - protein, 268 aa, Geobacillus kaustophilus HTA426
MPLSVNPPLFIPFIVAGDPAPDVTIDLALALEEAGADILELGVPYSDPLADGPTIQRAAARALDGGMTLPKAIQLIGEMRKKGVNIPIILFTYYNPVLQLGEESFFALARENGADGVLIPDLPFEESGPLRELGERFGLPLISLVAPTSKQRIERIASAAQGFLYCVSSLGVTGVRETLPETLGDFLREVKRHSRVPVAVGFGISAPEQVAMLKEVCDGVVVGSALVQKVEQLAPRLQTPDEREAAVAEFAAYARSLAAPLREAYSSR

SEQ ID NO: 26387 - protein, 223 aa, Glycine max
  misc_feature (158)..(158): Xaa can be any naturally occurring amino acid
  misc_feature (184)..(184): Xaa can be any naturally occurring amino acid
  unsure (1)..(223): unsure at all Xaa locations
MASNREREEALTFTIPSSSSHSSPITVSDQLDSYLADPRSASGSFQNDGLLSAGEAAAAADPDFGFSRPDFRQSPLAGTVEFYQRHVFLCYKNPRVWPPRIEAAEFDRLPRLLHAAVVARKSHMKKETRLTICEGHDGTETSNGDVLIFPDMVRYRFXWNCRRLTHFDVETFVEEVLVKDGEWXPGTPEALRGSYVFVCSHGSRDRRCGVCGPVLVSRFREEV

SEQ ID NO: 26388 - protein, 281 aa, Brassica rapa
MLMMVCVVSCGEAAPGAKFEELYRSSWAMDHCVNDGEVTKLKLDNSSGAGFESRSKYLFGKVSIQIKLVEGDSAGTVTAFYMSSEGSNHNEFDFEFLGNTTGEPYIVQTNVYVNGVGNREQRLNLWFDPTTEFHTYSILWSKRSVVFIVDETPIRVHKNLEDKGIPFAKDQAMGVYSSIWNADDWATQGGLVKTDWSHAPFIASYKDFKIDACEVPTASDLSKCSGEEQRFWWDEPTVSELSLHQNHQLIWVRANHMIYDYCFDAARFPVTPLECQHHRHL

SEQ ID NO: 26389 - protein, 274 aa, Ceratopteris richardii
MAWSPVKEEHLPQLVSTESTIEKTLKAKDPCKRPKRRAKKRTGKGSTIDDSIDKRRGLTVEQINFLEMSFKEDNKLEPERKACIAKQLGVRPRQVAIWFQNRRVRWKNKQVEQDYETLKARYQDVVKEKDSIMMQYESTMEGNRKLQAEVARLTNLLQSTEGISAHTDMDQVLSNCNSENLNCISENISPAKSADYPSEIIVSGDPTEGDISRFIFQEPISSMPYDLLPDGDYFILSPENSTGSFPSLVQQLVSNGHCVEDAYNIYLGYEYLCC

SEQ ID NO: 26390 - protein, 297 aa, Brassica napus
  misc_feature (138)..(138): Xaa can be any naturally occurring amino acid
  misc_feature (173)..(173): Xaa can be any naturally occurring amino acid
  unsure (1)..(297): unsure at all Xaa locations
MGNVNARDEANSVHNNNNASPLEDNDGEIHSRHHHQPLSSDTAPPPPPELMGQSPPQSTRPTHNLLSYRLLRYRDFIFSDQLKSTSQTLRASRPLPTNRLSPHQCIPHLEDMPLLRPDEIHIRKPSWVLLAPSKSASXEKGIPTMITWCHGGKEISVEGSWDNWKSRTRLQDXGEDYAAMNTFNLLDLQDYVPEDIQSISGFEPPQSPEASYSSLLLGAEDYSKEPPLVPPHLQMTLLNLPPANPDVPSPLPRPQHVVLNHLYMHKGKSGPSVVALGSTNRFLAKYVTVVLYKSLQR

SEQ ID NO: 26391 - protein, 109 aa, Streptococcus sp.
LLYALLHLSGFEDVSMDEIKSFRQWGSKTPGHPEFGHTAGIDATTGPLGQGISTATGFVQAERFLAAKYNREGYNIFDHYTYVICGDGDLMEGVSSEAASYAGLQKLDK

SEQ ID NO: 26392 - protein, 227 aa, Ceratopteris richardii
RRSPPKEELDDDDLGDELSNPTEKNRRLTAEQVNFLEMSFNIDLKLEPERKALLAKKLGIRPRQVAIWFQNRRARWKNKQIEQDYESLKTKYEAVIKEREVILLQHEAAMQENKRLQAEVRRLMDLVEATGVGACDVTGVSEGKSELMSPSKSTGRSRVTCKTRVKCHSIAVSASGADVPMPRFELDYGFCRSNDMGVDLHECPTFSLWRIFLGLICPCLFVKFASK

SEQ ID NO: 26393 - protein, 146 aa, Glycine max
MADQLTDDQIAEFKEAFSLFDKDGDGCITTKELGTVMRSLGQNPTEAELQDMINEVDADGNGTIDFPEFLNLMARKMKDTDSEEELKEAFRVFDKDQNGFISAAELRHVMTNLGEKLTDEEVDEMVREADVDGDGQINYDEFVKVM

SEQ ID NO: 26394 - protein, 175 aa, GIBBERELLA ZEAE PH-1
MSSFIRWYNSRLAARPLLTQSVTTAFLFATGDVTAQQLVEKRGAQKHDLVRTGRMALYGGFVFGPVATTWFAFLARRVNVRNNKKAEVLARVACDQLGFAPVMIGVFLSSMATMEGKSVKERIDKTWWPALKANWMVWPAVQVINFSLIPLQYRLFFANIIAIGWNSYLSWVNSQ

SEQ ID NO: 26395 - protein, 440 aa, Leifsonia xyli subsp. xyli str. CTCB07
MKGVHMATRAATKPEGDVAEEAAASTATKPAAKKTAKKAAAKPKGRAEHENAIDEDAAVDIDEDEPTDTETDDAVEGDEAEEVDAAAEEAHDDAPSAAAGEAAAVKAAADAPLPTDAIVLRAVDEDDDIPVYSTTITGATADPVKDYLKQIGKVPLLNAAEEVELAMRIEAGLFAEDRLANTPNMPRELERELRWVARDGQRAKSHLLGANLRLVVSLAKRYTGRGMQFLDLIQEGNLGLIRAVEKFDYTKGFKFSTYATWWIRQAITRAMADQARTIRIPVHMVEVINKLARVQRQMLQDLGREPTPEELSKELDMTPEKVVEVQKYGREPISLHTPLGEDGDSEFGDLIEDIEAVVPADAVGFTMLQKQLESLLDSLSEREAGVIRMRFGLGDGMPKTLDQIGDTFGVTRERIRQIESKTMAKLRHPSRSQSLRDYLE

SEQ ID NO: 26396 - protein, 552 aa, Magnetospirillum magnetotacticum MS-1
MAAKEVKFSTDARTRMLRGVDILADAVKVTLGPKGRNVVIEKSFGAPRITKDGVTVAKEIELADKFENMGAQMVREVASKTADLAGDGTTTATVLAQAIVREGVKAVAAGLNPMDLKRGVDLAVAAVVADVKSRSRKVATNAEIAQVGTISANGEKEIGDMIAKAMEKVGNEGVITVEEAKGLDTELDVVEGMQFDRGYTSPYFVTNAEKMTVELDNPYILLHEKKLSGLQPLLPVLEQVVQSGRPLVIIAEDIEGEALATLVVNKLRGGLKVAAVKAPGFGDRRKAMLEDIAILTGGQVISEDLGIKLESVNLEMLGTSKRITITKEDTTIVDGSGDKSAIDARCKQIRAQVEETTSDYDREKLQERLAKLAGGVAVIKVGGASEIEVKERKDRVDDALHATRAAVEEGIVPGGGVALLHAVKALEGLKSGNADQEVGISIVRRALQAPVRQIAENAGHDGAVVAGKIGESKDLAFGFDAQTGVYTDMIKAGIIDPTKVVRTALQDAASVAGLLITTEAMIAERPKKDAGGMPGGDMGGMGGMGGMGGMDF

SEQ ID NO: 26397 - protein, 194 aa, Ceratopteris richardii
NQGHRKHPSKDVTKDIGDGDELMCGVEKKRRLTAEQVNFLETSFSMDLKLEPERKAHLAKQLGIQPRQVAIWFQNRRARWKNQQIEQDYESLKASYEAVVEEKERLLKEHDLALEANKRLQAEVCFKHAMSLLWSGYEESHVNIYSMTDSITNAYFHCLTRRHSSLILLHFSSQHTLIGFGGICDAWSPTFRYI

SEQ ID NO: 26398 - protein, 95 aa, Magnetospirillum magnetotacticum MS-1
MKFRPLHDRVLVKRLDAEEKTAGGIIIPDTAKEKPMQGEVVAVGSGTRGDDGKLVALDVKAGDRVLFGKWSGTEVKIDGVDLLIMKESDILGILA

SEQ ID NO: 26399 - protein, 268 aa, Triticum aestivum
MEDERSTQSYQGGEAAEQVEVTDRGLLGNLLGKKKAEEDKEKKEEELVTGMEKVSVEEPEVKKEEHVDGEKKETLFSKLHRSSSSSSSSSDEEEEEVIDDNGEVIKRKKKKGLKEKLQEKLPGHKDTEGEHVTALPAPAAPASVQTHHDTDVVVEKIDGDVKTEATPAVPEEEKKGFLEKIKEKLPGGHKKPEDAAAVPVTHAAPAPVTHAAPAPVHAPAPAAEEVSSPDAKEKKGLLGKIMDKLPGYHKTGEEDKAAAATGEHKPSA

SEQ ID NO: 26400 - protein, 214 aa, Desulfotalea psychrophila LSv54
MKFFIDTANLDEIREGVELGLVDGVTTNPSLIARENLPFEELIAEICKIVDGPVSAEVISLDAPGMVAEAKKLASIDEKVVIKVPMTAEGLKAVRQLSAAGIKTNVTLIFSANQALLAAKAGASYVSPFVGRLDDIGVNSADLISDILTIFDNYGYASEVIVASVRGPQHVLDSALLGADIATIPLKTIKQLTKHPLTDKGMEQFLADWEKRTQ

SEQ ID NO: 26401 - protein, 459 aa, Desulfovibrio desulfuricans G20
MNALQPDTERLRALDTAHVWHPFTQMATWHEDAPLIIEKARGNWLVDTDGNRYLDGVSSLWTNVHGHRHPHIDAAIRAQLDNVAHSTLLGLSSRPAIELAAMLARVAPQGLNRVFYSDSGSTAVEVALKIAYQYQKQRGPAGEGRSKFLCLRGAYHGDTVGAVSLGGIDLFHAVYGGLLFKTVRAEAPYCYRCPFGRQKESCRHECFTHLEETATRHAPELAAMVIEPLVQGAAGQITHPDGYLAHARALCDRLGILLIADEVAVGFGKTGTMFACEQEKVTPDLLCLAKGISGGYLPLAATMVTDAVYEAFLGDHAQCRTFFHGHTYTGNALACAAGIASLQLFRTEGTLERLQHIITIYDALLRQLETLPHVGDIRRRGIMTGIELVEDRATRRPYPFALRTAHKVVLAARRRGVIIRPLGDVLVLMPPLSITAQECGLLVEATAEAIQEVTGGPRV

SEQ ID NO: 26402 - protein, 222 aa, Ralstonia metallidurans CH34
MRARHLPSRRTIASKDVPTMKLYVHPLSGHAHRAQLLLSLLGQPAELIEVDLMTGAHKSPEFLKLNPFGQIPVLVDGETVVPDSNAILVYLSKKLGRTDWLPEAPATAAAVQRWLSVAAGDIAFGPARARIATLFNAPYDLDDAVARAHVVLKRMDDALADRPWIAADHPTIADVALYSYTARAPEGFVDLRDYGKVRQWLARVEALPGFVPIVKSPVGLEA

SEQ ID NO: 26403 - protein, 218 aa, Thermus thermophilus
MEGFFARVKARAEALFREAPFYPWAEAIGHSALEALWARYSTPGLEALAAWAGPFRERVFREALEEAGGPPERARELAEAFFRERRRYPLYPEAEAFLAEARRRGLALALLTNGVPDLQREKLVGAGLAHHFSLVLISGEVGIGKPDPRLFRMALCAFGVAPEEAAMVGDNPQKDVRGARLAGVRAVWVDRGLRPEDPEASPDLRVGDLREVFLAEAL

SEQ ID NO: 26404 - protein, 1126 aa, Candida albicans SC5314
MVLNDFDLKTEALNERTTLHTSQNASSKNGSNKESVLAKYEETNQNDEIEGFENLNDLSFSKYSKFSKASIIVGSDPKSRTTTLDSPFAKKLKEDLNVEFTSDNTKPYYPTVYPIYEFDNNDENSDSPFLDYQNEKGNIPQKLSGQKLRKQQQQQQQQSEAEENFKQSNQYARLQSTPKHQRTSSVKVSLTPAQKFEKRTSTRSHNALDNFELTTLVGNGAFASVYRAVNLKTNQVIAIKQIRIEKDQDVGVLMGEIDLLKILKHRNIVKYHGFVKTATSLNVLLEYCEGGSLRQLYKKLKKGLPEYQIINYVRQILEGLNYLHEQGVVHRDVKAANVLLTDKGDVKLADFGVATKVTSQHLTVVGTPNWMAPETVLGGEGICTASDIWSLGATIIELFTTNPPYHDLNAMATLHAIGTDEHPPLPKNMSTLAKDFLLECFQKQANLRISAKLLLKHKWLNQTATAKTSMATLLRQPSRELRSIKIYSESNDENWDEDFEEIKVSKFQNSTSSIIELKPDNTEKQFKLTEYSKKDLLTLFADNKEDTSNNFEFETIGPNKLAVVAESMDESDPFLNIDIENFDTNELEVQSKMEYLVVRLSRKLEQVHLGYEDAVPALVKVTGRMLHLVKKYPVSHDTLIRDHGVLSLLELLESFQDIPSQQQLWYHCLSILNHVFESDLGTLENFCFLGGIPTVAHFRSATYEVQVRLQVAKFIGILNLSEKALSMFVSCGGLRLVSKFVEEDFDTTPTFPLIAIESIHNILAKDLSRSKSDLCRILSKHGVIFWLVVLLNRLVKYDQKPSIKNVSKEQVEITIERIIDIIKYFSQSETKVRISIGSIDLFKLIFKLFDNLKLSHQLTLLKFVKSMSCISEVLKNLYHAEILEFLVKLLKSYIPSKGNYKEIINVLAPILYNSLALNHRRESEFVNLGGLPYLKTLSIINLPFRQFILPIICEFVHCDASVVNELKKNDIVKIYYNLLLDPYWQSNALDSLHCWYKLEPSYIDLNSPMAVDCLVGGFLLPKVSNLESTLEIYFKLLTNNLPLTRDMSNMNVINSILIKLSLHDKKNPVIQLSYLKVLKCLINYLVDSKSSLPFAKPVVNTLQSLKSRQSSLLIEEVTTELLSVLK

SEQ ID NO: 26405 - protein, 612 aa, Bradyrhizobium japonicum USDA 110
MCGIAGIVNLRGSAVEPDDISRLTGLIAHRGPFGQGTWFSADRSLAFGHRRLAIIDPGEGGYQPMRSADGRHVIVFNGEIYNFLELRRELEAQGVVFRSQSDTEVILAAWQAWREDMLPRFNGMWALAIFDTATGELFLARDRFGIKPLLYAVSPERFIFASEQRALVRSGLIDASVDVEVARRLLLDAFGIEGSERTLFRQVRRLQGGHCMWLRQGKVSVRRWWRTVDHLPPVPGTEAEQVARFRELFQDAVALRMRSDVPIGTCLSGGFDSSAVICTMAAHEKAGMGPRDSTAWRHAFVATFPGALNDERPMAEEAAAWAEVAPTFLEIGQADALIDLDQILDDLDDVYIALPSAIWLIYRQLRRQDVTVSLDGHGADELMGGYLQQGQALAFRIRNAAEDFASRSALARRSVDVLRMLALKRRGVYFLRGGLRDLPASLPLVAEDDVLPREWGGLNRRLYRMFHSTVLPTILRNFDRLSMAHGVEVRMPFMDWRLVTYTMALPESSKSSEGYTKAVARRAMANLMPESIRTARRKVGFNSPMPEWLNGPLAGWTADLLDRKVPAFAELVDEAALRTTVSRLTASKSWDWEAVGRIWPYLNMKWMLARYA

SEQ ID NO: 26406 - protein, 395 aa, Caulobacter crescentus CB15
MREAVIVSYARTGLAKSVRGGFNNTHGAAMAGHAIQHAVSRAGLEGAEVEDVVLGCGGPEGATGMNVARNAAMWAGLPVTTSGQTINRFCSSGLQAIATAANYVRNDGANVAIGGGVESISLVNAGGHMNRFHITEEKLMQTHPALWMAMIDTADIVAKRYNVSREYQDEYALRSQQRIAAAQAAGLFKDEIVPMATKMKVVNKETKEESFVDYVVDKDECNRADTTLEGLASLKPVMGEGKFITAGNASQLSDGAAAVVVMEAKEAEKRGLTPLGAFRGFAVAGCEPDEMGIGPVFAVPRLLERHGLKVDDIDIWELNEAFASQCLYSRDRLGIDPEKYNVNGGSIAIGHPFGMTGARCAGHLLLEGKRRKAKLGVVTMCIGGGMGAAGLFEIF

SEQ ID NO: 26407 - protein, 280 aa, Listeria innocua Clip11262
MTLSFSDTYRLNNGIEMPRHGFGVYKLTDEQRMRTALETAVDVGYRLFDTASFYHNEKELGDFFASSGLKRDEFFVTTKMWNTEQGYDETLRAFEKSQKKLQLDQVDLYLVHWPKQDTFFETWRAVEKLYDEGLVRAIGVSNFEAHHLDRLRTSANVLPVVDQLETHPHFPNQLLHRYLEELHIVHQAWSPLGRGGVLQEQILIDLAKKHGKSPAQIVLRWHLQNNISIIPKSETPSRIRENADIYDFELTEADMRQVERLNNGERVSHAPDVMYVRSEI

SEQ ID NO: 26408 - protein, 296 aa, Euglena gracilis
RSYMEKYAKDEVAYFRDFATAYQRLAELGVPELPVPWDEIRADVAALVAEKGCAPILIRLAWHDAGTYDQQSNTGGPRAVMRFPGGEAEHGSNNGLDIARGLLQPIVDKYSWVSTADLWAFASVVATEVSGGPKIPFRPGRRDAVTAKEAVERGRLPDATQTTNHLRDVFYRMGMTDEEIVALSGAHTMGRCHAERSGFEGPWTDNPLVFDNSYFKLLLERKWTAVTNSVGNLQFQDETGTLMMLTSDLALLMDPSFRKHVERFAADQDAFFRVYAGAYQKLTEGGCPFSKGAVPL

SEQ ID NO: 26409 - protein, 239 aa, Elaeis oleifera
NFCILNAANHIIRGEADVMLCGGSDAAIIPIGLGGFVACRALSQRNSDPTKASRPWDIDRDGFVMGEGAGVLLLEELEHAKQRGANIYAEFLGGSFTCDAYHMTEPHPEGAGIALCIENALAQAGVAKEDVNYVNAHATSTPAGDLKEYQALIRCFGQNPELRVNSTKSMIGHLLGASGAVEAVAAIQAIRTGWVHPNVNLENPMKKGVDINVLVGSRKERLDVKVALSNSFGLVVITH

SEQ ID NO: 26410 - protein, 219 aa, Brassica napus
  misc_feature (172)..(172): Xaa can be any naturally occurring amino acid
  misc_feature (200)..(200): Xaa can be any naturally occurring amino acid
  misc_feature (208)..(208): Xaa can be any naturally occurring amino acid
  unsure (1)..(219): unsure at all Xaa locations
VDPRVRADLENAPASVARLFSIEWYRNRINGKQEVMIGYSDSGKDAGRLSAAWQLYKTQEELVKVAKEYGVKLTMFHGRGGTVGRGGGPTHLAILSQPPDTIHGQLRVTVQGEVIEQSFGEEHLCFRTLQRFTAATLEHGMNPPVSPKPEWRVLMDEMAVIATEEYRSVVFXEPRFVEYFRLATPELEYGKMNIGSRPSXRKPSGSIXSLRAIPWIFAW

SEQ ID NO: 26411 - protein, 362 aa, Arabidopsis thaliana
  misc_feature (149)..(149): Xaa can be any naturally occurring amino acid
  misc_feature (174)..(174): Xaa can be any naturally occurring amino acid
  misc_feature (223)..(223): Xaa can be any naturally occurring amino acid
  unsure (1)..(362): unsure at all Xaa locations
MEISKYKAVLALVMLQFTSAGVALFTKAAFMEGLNPTVFVVYRQAIATLFICPISFISAWRKENKPSLGVRGFWWVALTAVIGVTVNQNAYFKGIDLSSSSMACAMTNLIPAVTFIISIIVGFESIKRRSMKSVAKVIGTGVCVGGAMXAMTFLRGPKLLNALLNQDNTAWLLXGCFFLLISTFAWSLWLILQVPIASHCPDHLYTSACTCFIATIASFLVAXLALGNTHLPPWKLDSFLKLSCCIYSGFQLAISFFLQAWIVSQKGPVFSALFNPLSAVIVTFFGALYLKEQTYLGSLLGALAIILGLYIVLWGKSEDYQEESTDLKLENEHNTSSQSDIVSIMIGDKAFRSSELLEPLLM

SEQ ID NO: 26412 - protein, 163 aa, Bdellovibrio bacteriovorus HD100
MRLITPYWPTRRMTSNIFDEMDRMFENFATVPAAESQERLFKTACEVTESDDHYLLSVDLPGFKKENINIEMNGNLLTISGERKRDEKVIGTFSRSFTVPDTVDGAKIEAHHEDGVLSIYLPKAPLAKAQRIEIQTHKGGFFDRLLAAKNTAIEGNKSESSSH

SEQ ID NO: 26413 - protein, 231 aa, Rhodopseudomonas palustris CGA009
MHPLHRENHLINRIGWLRAAVLGANDGIISTASLVVGVAAAATSSEEVLLAGVAGLVAGAMSMAAGEYVSVSSQSDTEQADLARERKELADAPDSELDELTKIYVDRGLEPALARQVAEQLSAKDVFAAHARDELGLSAHVVARPVQAALTSALTFSVGAALPIGIVLLAPTGSTSMVVSGGSLICLAILGAVSAHIGGAGLLKPTLRVTFWGALAMAASAAIGALVGHTI

SEQ ID NO: 26414 - protein, 489 aa, Desulfitobacterium hafniense DCB-2
MNTIHTPKTKRVLTYNREYFYVTSVTLIGTEDGKLKQRRLGGKLNMTYVQEVLEQAVKRNPGEAEFHQALREVLESLEPVLEKRPDLKEAGILERIVEPERQILFRVPWVDDQGKVQVNRGFRVEYNSAIGPYKGGLRFHPSVYLGIIKFLGFEQIFKNSLTGLPIGGGKGGSDFDPKGKSEGEIMRFCQSFITELYRYLGADTDVPAGDIGVGGREVGYMFGQYKRITNRYEGVLTGKGLTFGGSLGRTEATGYGLVYFMEEALKAVGKSFSGATVVVSGSGNVAIYATQKATQLGGTVVAMSDSNGYIYDKDGINLDTVRQLKEVERKRLKDYVSIHPTAEYYEGCAGIWTIPCAIALPCATQNELDGEAAEVLVKNGCYAVGEGANMPSTPEAVDVFLQHKIIYGPGKAANAGGVAVSALEMSQNSMRYSWTFEEVDAKLKNIMVNIYHNASKAAQEFGFEGNLVAGANIAGFLKVAEAMKAQGTV

SEQ ID NO: 26415 - protein, 167 aa, Saccharomyces cerevisiae
MQEFYSFSPIDENGNPFPFNSLRNKVVLIVNVASHCAFTPQYKELEYLYEKYKSHGLVIVAFPCGQFGNQEFEKDKEINKFCQDKYGVTFPILHKIRCNGQKQDPVYKFLKNSVSGKSGIKMIKWNFEKFVVDRNGKVVKRFSCMTRPLELCPIIEELLNQPPEEQI

SEQ ID NO: 26416 - protein, 149 aa, Geobacillus kaustophilus HTA426
MAERTFIMVKPDGVQRNLIGEIVARFEKKGFQLVGAKLMQVSRELAEQHYAEHKERPFFGELVDFITSGPVFAMVWEGENVIAAARQMMGKTNPQEAAPGTIRGDFGLTVGKNVIHGSDSPQSAKREISLFFKEEELVSYSKQINAWLY

SEQ ID NO: 26417 - protein, 428 aa, Pseudomonas aeruginosa
MADKKAQLIIEGSAPVELPVLSGTMGPDVVDVRGLTATGHFTFDPGFMSTASCESKITYIDGDKGVLLHRGYPIEQLAEKSDYLETCYLLLNGELPTAAQKEQFVGTIKNHTMVHEQLKTFFNGFRRDAHPMAVMCGVIGALSAFYHDSLDITNPKHREVSAHRLIAKMPTIAAMVYKYSKGEPMMYPRNDLNYAENFLHMMFNTPCETKPISPVLAKAMDRIFILHADHEQNASTSTVRLAGSSGANPFACIASGIAALWGPAHGGANEAVLRMLDEIGDVSNIDKFVEKAKDKNDPFKLMGFGHRVYKNFDPRAKVMKQTCDEVLQELGINDPQLELAMKLEEIARHDPYFVERNLYPNVDFYSGIILKAIGIPTSMFTVIFALARTVGWISHWQEMLSGPYKIGRPRQLYTGHTQRDFTALKDRG

SEQ ID NO: 26418 - protein, 352 aa, Rhodopseudomonas palustris CGA009
MVAMSSFANKSEHQKVAEAEIESFRNELGPFVVAAETTRMAMLFADAERSNCPIIFANDSLLSLTGYDRDEVLGRSLAFMLVHDADRETLAQLAGKFGGTSDKGVEFLCRRKDDSEFWAAVFISPVRDEAGTVIQYFASFVDLTKHKEDEARSKMLIDELNHRVKNVLATVQAIVWQALRTSSDPKTIQQAIESRLVALSRSHDLLTRENWESAGLHDIIANALEPFERADGLSGRIFIAGDNVRFPPKAALALGIVFNELATNAVKYGALSTDNGALHIDWKTVSSPEGQRVLLQWREAGGPVVAAPSRRGFGSRVIDRVLAHELAGEVRMDFLADGLICSCSLLVPKDAG

SEQ ID NO: 26419 - protein, 262 aa, Nostoc punctiforme PCC 73102
MSDAYGGLSLRWTLRGKKALITGATKGIGLAVANEFLSLGAEVIIVARNSQDVDQQLIIWRELGLPAYGITADVATAEGRQAIFEQVGKTWDKLDILVNNVGTNISKKVLDYTAAEYQFIIQTNQISIFEMCRLFYPLLQNRENSSIVNISSVAGLVSNRTGAPYGMTKAAINQLTRSLSVEWACDQIRVNTVAPWAIRTPLTESVLDNQDFLKLVLSQTPMGRVGQPEEVAGLVAFLCMPAASFITGQCITVDGGFLAFGF

SEQ ID NO: 26420 - protein, 270 aa, Methanothermobacter thermautotrophicus str. Delta H
MSGAKSMSYAEMFRRADGCAFVPFVVAGDPDMETSLEIIRTLVDAGADALEVGFPFSDPIADGTSVQGADLRALRAGMTTEKCFQLIERVREFTSIPIGLLVYYNLIYRMGVDEFYRRAAEAGVTGILAADLPPEEASDALRAAEKYDIDQIFIVAPTTGSERLKRISEVSSGFHYLVSVMGVTGARSRVEDATIELIKRVKAEGSLPVMVGFGVSRPEHVRMLRDAGADGVIVGSAIIDVISGNLGDRELMLQRIHEMAGTLKAAGGSG

SEQ ID NO: 26421 - protein, 307 aa, Burkholderia sp. 383
MSMSVIAALQIGASPAGTRATLDTILGYETAIRDSGASLVVLPEAVLGGYPKGEIFGTRLGYRLPEGRDAYARYAAQAIDVPGPETDELAALSQRTGASLVVGVIERGGSTLYCTALFFDPRDGLVAKHRKLMPTGTERLIWGQGDGSTLPVVDTAAGRAGAAICWENHMPLLRCAMYAKGVQIWCAPTVDERDVWQSSMRHIAHEGRCFVVSACQVQPSPRALGIDVPGWDPERPLIRGGSVIVGPLGDLLTEPLIGEAGLVTARIDTDELVRARYDFDVVGHYARPDVFSLHVDERAKRTVVFGE

SEQ ID NO: 26422 - protein, 1370 aa, GIBBERELLA ZEAE PH-1
MSPPAQPRDSSQTRAIRLAGAVHDASFPLNRSEPHHNHIQAPVPTAFNHAQPRAAFDLVNDVKSQDATPRPFTGGRFLRDFGDASRSPTQSPFRLSMPSMSPGQLAFSAMQYLPVPTMVLNNLKTVVLANEAMGRMLGIITEDSEDDDSLPTIENLRGQTLSQVGVDILQDGQPVWATWEAFLDSQVEEMGVRTAAKDSRRPSQSGDDATPTTSTMPVPDRRPSPASRKPQDSVVEVVITRKGVKKPRLDNLFNPKETDCQIYAKMIITIWELEDHQIFFTLTFTSTESPPSTLHNNKRAVARPSILEAAERKSITHSNPPSVASSRDSNSPSFHSPGIVTMSSSPFPPMGPPSAATHSSTPSLLQKMLLMKDALLNNTQMPILAMWKDGSVTFPNTAARKLFEKDAPLDTSLNGFELMQYWHIYSEDFSERLGTEEIPICKLLKTEMPFTGFRVGMYDENRSRRVYDVLGEAIRDDSTGEFLAGVVTGRDVTVMTEEITQIKERDEERFKLICDTMPQLVWTATPDGLVDFWNTRFYSYTGLAPEDSLGKSWVNAFHPDDLPEAEKRWKHSLETGDSYVTEYRCQSKEGEWRWYLGRAMPQRNKETGKVEKWFGTCTDVHESIQTKMAMKRTRQQLLSVIAHSHVTIFTVDPNRRVTMLEGALIWNNTHEESHDGTRWFIGEDMYTVFNRLTAQLADGERPEFLEPIELLLDGKATEDLKEHGIDDRWYRTRFLTMLGKRAQEGDPRHNTYVEGVIGVIMDVTELKIREKALEKQSKEKRKAMANEAAAKEANRLKSQFLANMSHEIRTPITGVLGMAELLMGMELDQEQQEYVENIQSSATSLLTVINDILDFSKVESGRLDIEEVQFSLSHIVKEVGRMLQFAVERKNLDFQSDVGDGIENDLVVIGDPGRVRQILTNLLTNSIKFTNQGYVRFSVVAEKETSETIEVKFSVEDSGIGIQDDVRKKLFQPFSQGDASTARRFGGTGLGLTICKNLLDLMHGRITLESKVGVGTRATFWVPFNKPNGPAEAGLANAGAIPDRLQSELSLSCNSSEYDQIIGTPPVSEGMQGNTSGPRRARFGITSTSSPDQELLPSERAKIHVLVVEDNPINQKIATKTIGRLGFQVTAAWNGKEALEYLAGVQKGVNQKPDIILMDVQMPIIDGYKCTHLLRHHMPYKPLVQDVPIVAMTASAIQGDREKCTKAGMDDYLAKPVRGVILEKMLLRWCHARRRVPTAPDPSASDCSEMSEHCDNADIPNVGIDDDDDDDTPRGLDDFNGSPITPRPLTTNGYQNEQSPFDSTELSLQVRRQEGETEWSNKLQETKLIDAAGGPSSYRRNSYHELQTGDSLTEENVNKLRSENQATTRR

SEQ ID NO: 26423 - protein, 137 aa, Oryza sativa
MELHRGGGRSRTSGSPGLQEFGTRPDFIVMSTGSELEIVAKAADELRKEGKTVRVVSFVCWELFDEQSAEYKESVLPEAVTARVSLEAGSTLGWQKYVGSKGKAIGIDKFGASAPAGKIYQEYGITAENVIATAKSL

SEQ ID NO: 26424 - protein, 751 aa, Nitrosomonas europaea ATCC 19718
MAKAKVSGSAKKNIVTSTEVTETKSGKSRVETPDNGVKVTGKNAKNTFSAETEVVSVKKEATSASRKKSVKAAKSDDDSVLVGQNKNTLLPAEKSEDLGAVDEVSEKTRVSKRNKSTLSEKQITDLSESAVSVSSDNDIELRRMRLKKLIMQGKERGYLTYSEINDHLPDDMLDADQIESIISMINDMGISVHDEAPDAEALLMSDAATAVTDEDVVEEAEAALSSVDSEFGRTTDPVRMYMREMGSVELLTRESEIEIAKRIEDGLRHMIQAISACPTIIENILELAADVENGRLRADELVDGFLDDDTDEIMGKEMSEESLDQDFDSEDGEDEQVAAASADMLKMKAEVLERFAVIRQTYDGMKKIINKKDGRQDKKYKQLQEKISTELMAMRFSAKMVEKLCDTQRDIVNDIRNCERKIAELCVTRAGMPRNYFIKAFPGNETDIDWISSEVESGQPYSQSLEHFRPAVMEQQQKMLELQKQAGIPIKELKEINRRMTTGEAKARRAKREMTEANLRLVISIAKKYTNRGLQFLDLIQEGNIGLMKAVDKFEYRRGYKFSTYATWWIRQAITRSIADQARTIRIPVHMIETINKMNRISRQILQETGQEPEPAVLAEKMEMPEEKIRKILKISKEPISMETPIGDDEDSHLGDFIEDASTMEPADAAVYAGLRTVTKDVLDSLTPREAKVLRMRFGIEMNTDHTLEEVGRQFDVTRERIRQIEAKALRKLRHPARSDRLRSFLDSGNS

SEQ ID NO: 26425 - protein, 917 aa, Pseudomonas chlororaphis
MLKKLGIKGRVLLLTLLPTSLMALVLGGYFTWMQQSDLQTQLLQRGEMIAEQLAPLVAPALAHQNTALLERIATQSLEQQDVRAVTFLAPDRTPLAHAGPSMLNQAPTGNGSQMLQRTGSDATRYLLPVFGRHRNLAGDLIPDESDRLLGWVELELSHNSMLLRGYRSLFASLMLITAGLICTGLLALRMGRTINNPLSQIKQAVTQLKDGNLETRLPLLGSQELDELASGINRMAGTLQNAQEELQHSIDQATEDVRQNLETIEIQNIELDLARKEALEASRIKSEFLANMSHEIRTPLNGILGFTHLLQKSELTPRQLDYLGTIEKSADSLLGIINEILDFSKIEAGKLVLDSIPFNLRDLLQDTLTILAPAAHAKQLELVSLVYRDTPLSLVGDPLRLKQILTNLVSNAIKFTREGTIVARAMLEEEHEDSVQLRISIQDTGIGLSNQDVRALFQAFSQADNSLSRQPGGTGLGLVISKRLIEQMGGEIGVDSTPGEGSEFWISLRLPKTRDDAEDLPAPPLLGRRVAVLENHELARQALQHQLEDCGLEVTPFNTLEALTNGVTGVHQTEQAIDLAVLGITTNDMPPERLNQHIWDLEHLGCKVLVLCPTTEQTLFHLSVPNPHSQLQAKPACTRKLRRALADLVNPKAVRSEPSEPIASRPPRVLCVDDNPANLLLVQTLLEDMGAKVLAVDSGYAAVKAVQNESFDLVMMDVQMPGMDGRQSTEAIRQWESERNCTPLPVIALTAHAMANEKRALLQSGMDDYLTKPISERQLAQVVLKWTGLALRNQGPERTGEPSGNGLELQVLDHDEGLRLAAGKADLAADMLAMLLASLEADREAIRAARAANDHNALIERVHRLHGATRYCGVPQLRAACQRSETLLKQEDIKAFAALDELERAINRLATEARINA

SEQ ID NO: 26426 - protein, 1352 aa, Oryza sativa
MGCVSSKQFHGEEQRGGEGKPRRRPSPNSLRRLVSYNSSKRHEHFEEEDEEGVVVSATSSSAGHRVGNDVSTARLIRKPPAPVVEAVAVPVAALPDEAASVAVSVVDVERPVAAPANWRRAPNGAAEQEPRSGGTRSEAKPRITDVVPNGVQGGHAAAGWPRWLTEVAAEAVRGWQPRKAESFEKLDKIGQGTYSSVYKARDLESGKIVALKKVRFANMDPESVRFMAREIHILRRLDHPNVIKLEGLVTSRMSSSLYLVFEYMEHDLAGLAATPGIKFTEPQVKCYMQQLLSGLEHCHNRGVLHRDIKGANLLIDNNGVLKIADFGLATFFNPNQKQHLTSRVVTLWYRPPELLLGATNYGAAVDLWSAGCILAELLSGKPIMPGRTEVEQLHKIFKLCGSPSEDFWANLKLSRATIFKPQHPYRRCVSDVYKDFPPPALALLDCLLAVEPQNRGTAASALGSEFFTTKPYACDPSSLPKYPPSKEYDAKLRDEEARRQRAAAVKGHESEAGRRKQLPAPNGNNELQQRRVQLNPKSSSNKFIPKEDAVTGFPIDPPGRAGDNVYPQRAPLMHAGRSSSTLGRSSGTDQNAQRFYTSQIAAAEMSTATGGQRGNATKLSSNLGESARRQYLREHRSSSRYSQLAAAEPSDRPEWTHQFQERPSSSHRKDDGAANKEPTVVNGAKKSRIHYSGPLMPPGVNMEEILREHERQIQQAVRRARLDMGKGKNHVERDQSESLLYTTQNGRPKDGESTSVKKGTLSPHGSRESPPPSPPHPASSLSAILYSCTARRARRPGELAHARAATLGLAAHPSVLPRLASFYLALADLPAARAAVEQAAGKARAFPWNLLIWGYAGRGLWEDVILSYEKMVGWGVAADRFTYPSVLRACGELREVTIGRNIEQRIRRCRYGLDMYVWNALVGMYAKCGELEDARRVFDGMAVRDVVSWNTMVSAYASTGKSNKAFELLQQVPGANVVTWNAVAAGNLKAGNYDEVIRLVSQVRGYHGTGVDSVTIVIGLKACGRTGYLSVGRELHGVAVRLCFDSLECVVNSLITMYSRCGMMSSACLLFRACSVRSITTWNSLLAGFAFMEQIEEASLIFREMIGFGVCPNGVTVLTMLSLGARVGHLCHGRELHCYILKHELDSSKLMENSLVDMYSKCRQMVVAQRVFELMQFRDKHAYTSLVLGYGLQREGHVSLKLFDEMIVNSIEPDHVTFVAVLSACSHSGLVTQGQLLFAKMVSIFGIAPRVEHFSCMVDLYCREGLLKMAEVIIDKMPFQPTAAMLATLIEACRIHGNTEIGDRAAKKLLAMRTNNPGHYRLIANMYIAAKCWPELAKVRSLMSSPGAKYDS

SEQ ID NO: 26427 - protein, 339 aa, Salmonella enterica subsp. enterica serovar Paratyphi A str.
MKSIVIEKPNTLTIETRALPQPAPGEVRIKVKLAGICGSDSHIYRGHNPFAKYPRVIGHEFFGVIDAVGDNVNRDRIGERVSVDPVISCGHCYPCSVGKPNVCTSLVVLGVHRDGGFSEYAVAPARNAHRIPDNIADHHAVMVEPFTIAANVTGQVNPTEQDVALIYGAGPMGLTTVQALKGVYQVKTVIVVDRIEERLAMAKQSGADWSLNNGQHSLAEFLQQKALKPTLIVDAACHPAILQEAITLASPAARIVLMGFSSDPCEIVQQGITGKELAIYSSRLNVNKFPVVIDWLNKGLIDPDKLITHTFDYQHVIDAIELFEKDQRQCCKVLLTFAK

SEQ ID NO: 26428 - protein, 669 aa, Saccharomyces cerevisiae
MLRTRLSVSVAARSQLTRSLTASRTAPLRRWPIQQSRLYSSNTRSHKATTTRENTFQKPYSDEEVTKTPVGSRARKIFEAPHPHATRLTVEGAIECPLESFQLLNSPLFNKGSAFTQEEREAFNLEALLPPQVNTLDEQLERSYKQLCYLKTPLAKNDFMTSLRVQNKVLYFALIRRHIKELVPIIYTPTEGDAIAAYSHRFRKPEGVFLDITEPDSIECRLATYGGDKDVDYIVVSDSEGILGIGDQGIGGVRIAISKLALMTLCGGIHPGRVLPVCLDVGTNNKKLARDELYMGNKFSRIRGKQYDDFLEKFIKAVKKVYPSAVLHFEDFGVKNARRLLEKYRYELPSFNDDIQGTGAVVMASLIAALKHTNRDLKDTRVLIYGAGSAGLGIADQIVNHMVTHGVDKEEARKKIFLMDRRGLILQSYEANSTPAQHVYAKSDAEWAGINTRSLHDVVENVKPTCLVGCSTQAGAFTQDVVEEMHKHNPRPIIFPLSNPTRLHEAVPADLMKWTNNNALVATGSPFPPVDGYRISENNNCYSFPGIGLGAVLSRATTITDKMISAAVDQLAELSPLREGDSRPGLLPGLDTITNTSARLATAVILQALEEGTARIEQEQVPGGAPGETVKVPRDFDECLQWVKAQMWEPVYRPMIKVQHDPSVHTNQL

SEQ ID NO: 26429 - protein, 394 aa, Corynebacterium efficiens YS-314
MNALLHNLDETRADREELYKWFHRNPELSSAEFNTIERIRTELKNMDIDKLIDVTATGAVAIIENGDGPVVALRGDIDALPVTEQTGLDYASEAHGVMHACGHDFHITTLLSAVDVFASNRDKWSGTLVAVFQPAEETASGARAMVEADIASVIPKPDVYLGQHVMASQAGVISMPETAVMSTMESIRVRVFGTGTHGSMPHLGVDPIVLAAHIITRLQTVVAREISPFDFGVVTVGAINAGTKANIIPESAEILVNTRAMSVEIQEKIRTAIERIVRSECEAAGCPAEPTFEYYDRAPLTFNDADARSVVAEAFNQAFGEEYQVTPPSTASEDFSVIPDALGVPYVFWFVGGYEDPENAPGNHSPFFAPVIQPTLDRSLEAFITAASAWLVRS

SEQ ID NO: 26430 - protein, 399 aa, Arabidopsis thaliana
MSLTKSSESVFTEEEEEDSFSGRYTLWIKEALEELPHNFTITDPFISGHPIVFASLGFLKMTGYSREEVIGRNGKVFQGPKTNRRSIMEIREAIREERSVQVSLLNYRKSGSPFWMLFHMCPVFGKDDGKVTNFVAVQVPISGREHHRKKLRNVGDLSSDTSPTFGSCRREVCFGNFVCQDRALPVECDDDEQGLEDWEQCEASESEKLKATEAINNVLSILVHYSELSGRLVCGKRYCLRGVDCLSSSLVISLGRIKQSFVLTNPCLPDMPIIYASDAFLTLTGYKRQEVLGQNCRFLSGVDTDSSVLYEMKECILKGQSCTVQILNYSNRKDKSSFWNLLHISPVRNASGKTAYFVGVQVEASCRNTEIKELRPETRQLSVVGAVRVAVRSSLMVTC

SEQ ID NO: 26431 - protein, 281 aa, Methanocaldococcus jannaschii
MIMKLAEKFEELKNKGEKAFVAFYVGGDPNLEISEKALEVICKHADIVEIGIPFSDPVADGITIQKADVRALNSGMNPLKAFELAKKLNEKAPNVPKVFLTYYNIIFKMGEEEFVKKCKEAGVSGIIVPDLPIEEADSLYNYCKKYGVDLIFLVAPTTPDERLKKILEKCSGFVYVVSVTGITGAREKVAEETKELIKRVKKFSKIPACVGFGISKREHVEEITEIADGAIVGSAIVKIVEKHLDENGQIKDEEKFLKELEEFVKNLKEGTKKKAKVAIKN

SEQ ID NO: 26432 - protein, 441 aa, Glycine max
MLAVSPLRSTRDEGQGEMMESFSIGTDDFADLSEGNLLESINFDDLFMGINDDEDVLPDLEMDPEMLAEFSLSTEESDMASSSVSVENNNKSADNNNNNDGNNIVTTEKQDEVIVIAANSSSDSGSSRGEEIVSKSDESVVMNPSRKESEKGRKSSNHAARNNNPQGKRKVKVDWTPELHRRFVQAVEQLGVDKAVPSRILEIMGIDCLTRHNIASHLQKYRSHRKHLLAREAEAARWSQRKQLLAAAGVGRGGGSKREVNPWLTPTMGFPPMTSMHHFRPLHVWGHQTMDQSFMHMWPKHPPYLPSPPVWPPQTAPSPPAPDPLYWHQHQRAPNAPTRGTPCFPQPLTTTRFGSQTVPGIPPRHAMYQILDPGIGIPASQTPPRPLVDFHPSKESIDAAISDVLSKPWLPLPLGLKAPALDGVMGELQRQGIPKIPPSCA

SEQ ID NO: 26433 - protein, 372 aa, Streptococcus mutans
MAETNGLKDMIACDTRISAIKDNKLSYAGYDIADLMDNKTRFEEVIYLLWNLHLPTAIELKQFEEKLRKNYAISDAIEQCILIQSRQHLHPMSVLRSTVSLLGVYNLKAEERSVEATYDQSIQLMAKIPTIIATFARLRQGLSPIAPRKDLGFAANFLYMLNGRLPSELEILAMNRALVLHAEHELNASTFAARVCASTLSDIYSCVTTAIGTLKGPLHGGANERVFDMLREIREYGDVDSYLQEKLNSKEKIMGFGHRVYQTQDPREKYLREMARELTKGTEHDIWYQLSKKVEMCMKQKKNLIPNVDFYSATVYHVLGIDSSIFTLIFAMSRVSGWIAHIQEQQKNNKLIRPRSHYTGMRKLRYIPIERR

SEQ ID NO: 26434 - protein, 198 aa, Brassica rapa
MSASRFIKCVTVGNGAVGKTCLLISYTSNTFPTDYVPTVFDNLSANVIVDGNTINLGLWDTAGQEDYNRLRPLSYRGADVFLLAFSLVSKASYENVSKKWVPELRHYAPGVPIILVGTKLDLRDDKQFFVEHPGAVPISTAQGEELKKLIGAPAYIECSAKTQQNVKAVFDAAIKVVLQPPKNKKRKKRKSQKGCSIL

SEQ ID NO: 26435 - protein, 391 aa, Bacillus thuringiensis serovar konkukian str. 97-27
MDVAKELVLSKDQLVEWRRHFHKYPELSFQEEKTSQFVFDILRKIPCLEVSRPTKYSVMARLIGKQSGKTIAVRADMDALPIHEENEFDFISAYPGVMHACGHDGHIAILLGVVHKLVEAREKIKGEVRFLFQHAEENFPGGAEEMVAADVMEGVDYIVGAHLWASLEVGKVGVIYGPAMAAPDVFKITIEGKGGHAGIPHETVDSIAIGTQVVSQLQQIVSRLTNPLDSLVVSVTQFHAGTTHNVIPEQAEIEGTVRSLRHELREETEKRIEQIVKHVTEAYGAKYTFSYEYGYRPVVNDYEVTEIIEKTALQLYGRERVTRLQPTMAGEDFSAFLQKAPGTFFFIGAGNKEKGIIYPHHHPRFTIDENALPIGVEVFVSSIMNFISKGE

SEQ ID NO: 26436 - protein, 164 aa, Dunaliella salina
MPPKGAEGSAVAPADQLTEDQIAEFKEAFALFDKDGDGTITTKELGTVMRSLDQNPTEAELQDTINEVDADGNGTIDFPEFLMLMARKMKETDQEEELREAFKVFDRDGNGFISAAELRHVMTNLGEKLSEQEVEEMIREADVDNDGQVNYDEFVNMMLAKPLV

SEQ ID NO: 26437 - protein, 422 aa, Chlamydia trachomatis D/UW-3/CX
MSHLFSKACQYFPGGVNSPVRACRAVNITPPIVARASKEVFVDSLDKTFIDFCGSWGSLIHGHSHPKICTAIRQGLERGSSYGLTSEQEILFAEEIFSYLGLETNYKIRFMSTGSEATMTAVRLARGITGRPIIIKFLGCYHGHADTFLQEKPFSHTSLETLDLAHPLTLSLPFNDFPLFQTVMNSLGHKVAGVIFEPVCANMGVILPVPGFIEGVIQTCQQTGSFSIMDEVVTGFRVAQGGAAALYHVKPDILVFGKILGGGLPASAVVTPKDIMDHLAPEGKIFQAGTLSGNPLAMIAGKVSVNLCREQGFYTQLATIEQNFLSPIEHMIRTTGIPVTLVRYGSLFSFFFNPNRPNNLADAQLSDIEAFQKFYQSAFSKGVYLSPSPFEASFLSAAHSMESLDYAQTALIESLEQVFSLV

SEQ ID NO: 26438 - protein, 114 aa, Oryza sativa
MVRPPCCDKDGVKKGPWTPEEDLVLVSYVQEHGPGNWRAVPTRTGLMRCSKSCRLRWTNYLRPGIKRGNFTDQEEKLIVHLQALLGNRWAAIASYLPERTDNDIKNYWNTHLKR

SEQ ID NO: 26439 - protein, 492 aa, Glycine max
MDPYKNRPSSAFNSPFWTTNSGAPIWNNNSSLTVGSRGPILLEDYHLVEKLANFDRERIPERVVHARGASAKGFFEVTHDISHLTCADFLRAPGVQTPLIVRFSTVIHERGSPETLRDPRGFAVKFYTREGNFDLVGNNFPVFFVRDGLKFPDMVHALKPNPKSHIQENWRILDFFSHHPESLHMFSFLFDDVGIPQDYRHMDGFGVNTYTLINKAGKALYVKFHWKTTSGEKSLLDDEAIRVGGSNHSHATQDLYDSIAAGNYPEWKLYIQTLDPENEDRLDFDPLDVTKTWPEDVLPLQPVGRMVLNKNIDNFFAENEQLAFCPAIIVPGVYYSDDKLLQTRVFSYADTQRHRLGPNYLQLPANAPKCAHHNNHHDGFMNFMHRDEEVNYFPSRYDPVRHAEKVPVPPRILGGKREKCMIEKENNFKQPGERYRSWPSDRQERFVRRWVDALSDPRVTHEIRSIWISYWSQADRSLGQKIASHLNLKPSI

SEQ ID NO: 26440 - protein, 466 aa, Clostridium histolyticum
MEIYYIEFKLDKPKYVQISQKIKVIIERGIINDGEKLPSIRKLSELLNVNKDTVINAYRKLEEEGYAIQKIGSGTYAKKRDTGSRFKKDYSNTIKNLSYKNQEKYIDLVGEATISSYFPIKNFKTVLNEVLDRDGSKAFIYKEVLGYEGLRKSINNFFWDGKRKSEEILIVSGAQQGIDVISKAIINVRDNIIVEKPTYNGALSVFKWRRANIIEVPIENDGIDLDQFEKILQKNKIKCFYAMSYFQNPTGVSYSMKKKKRILELASIYDFYIIEDDYLSELIYDESITYNSFKSLDINDRVIYIKSFSKIFLPGIRLGYLICPKKFLDSTINCKINTDITTSSLMQRALDLYINRGYWKEHIDMLRNNYKETYNVLTEVLAKELSEEVSFNLPKGGLNLYLKLHNTNSIDFFYKCKEQNIITTPGVFFYKNYKEGLDYVKLGFSNLRTDQILSVTNILKEIFKTK

SEQ ID NO: 26441 - protein, 437 aa, Candida albicans SC5314
MYKTQLIKSSTQARFLAVRQLSSTSQLLKWNDIPLAPPDKILGISEAYNNDSNPQKINLGVGAYRDNSGKPIIFPSVKKAEEILLGKETEKEYTAIVGSKNFQSIVKNFIFNNSNKDANGKQLIDDGRIVTAQTISGTGSLRVIADFLNRFYSNKKILVPKPTWANHVAVFKDAGLEPEFYSYYETSKNDLDYANLKKSLTAAPEGSIVLLHACCHNPTGMDLTSEQWDEVLQIVQDKKFFPLVDMAYQGFASGKPFEDIGLIRKLTKLANENKIPSFALCQSFAKNMGLYGERTGSISIINSSGEASKAVESQLKKLIRPIYSSPPIHGSKIVEVIFDESSGLLPQWLDELDKVVGRLNTVRSKLYEKLDKSNYNWDHLLKQRGMFVYTGLSPEQVIRLRNEYSVYATEDGRFSISGINDNNVDYLANAINEVIKN

SEQ ID NO: 26442 - protein, 382 aa, Daucus carota
MRFTRVYTEVFNMTDHSLLCTETNNLCFDDLEARDDQDPRIDCENVVGNESEALICAVPLQRDEDFVFVFESKVNFCPEVIFSTDRSGELDLCVRKEALDWIYKAHAHYNFGALSVCLAVNYLDRFLSLYELPSGKKWTVQLLAVACLSLAAKMEEVNVPLTVDLQVADPKFVFEAKTIKRMELLVLSTLKWRMQACTPCSFIDYFLRKINNADALPSGSLIDRSIQFILKTMKGIDFLEFRPSEISAAVAICVTREAQTLDINKAMSNIIPVEKDRVFKCIEMIQDLTLVTETSNVASGRTRAQVPQSPVGVLDAACLSYKSDERTVGSCPNSSLHTETSPHTKRRKLIEIMKCGFYSITQFQIFSEWEFWCGCLCKRPPL

SEQ ID NO: 26443 - protein, 232 aa, Gluconobacter oxydans 621H
MSDEHILVVDDDPRLLRLLQRYLSENGYRVSTALDAQTAREVLQRIQPDALVLDVTMPGEDGLSLTNSLRRDGLSLPILLLTARGEPADRIGGLEAGADDYLGKPFEPRELLLRLRAHLRRMVPSLPAVDEVPDVLRLGELEFDVKRGLLSGPQGAVHLTGGESALLGVLTRQPGTVLSREAIARALEMDEIGERAVDVQVTRLRRRIEADPKEPRFLHTVRGKGYVLKPGR

SEQ ID NO: 26444 - protein, 94 aa, Staphylococcus epidermidis
MLKPLGNRVIIEKKEQEQAAKSGIVLTDSAKEKSNEGVIIAVGQGRLLDNGTQVAPQVSEGDTIVFQQYAGTEVKRGAQTYLILNEEDILAIIE

SEQ ID NO: 26445 - protein, 408 aa, Leifsonia xyli subsp. xyli str. CTCB07
MAERSDVVFVDGVRTPFGRAGEKGKYWNTRADDLVVKAMIGLLDRNPNVPGDRVDDVAIAATTQQGDQGLTLGRTAALLSGLPKSVPGFAIDRMCAGAMTSVTTLGSGIAFGAYDLVIAGGVEHMGRHPMGFGADPNPRFLSERMVAEDALNMGMTAERIHDRFPALTKERSDRFAMVSQQKTAAAYAAGKLQPDLIPVAIRSESGWGLATQDEGMRPETTLEGLAALKTPFRPHGRVTAGNASPLTDGATASLLASADAVKELGLTPKMRMVSFAFAGVEPEIMGLGPVPSTEKALRKAGLTIDDIGLFELNEAFAIQVLSFLDHFGIADDDPRVNQWGGSIAIGHPLAASGVRLMIQLAAQFAEHPEVRYGVTAMCVGLGQGGTVIWENPHFTGKTLHDKRAARKA

SEQ ID NO: 26446 - protein, 539 aa, Staphylococcus epidermidis
MAKDLKFSEDARQAMLRGVDKLANAVKVTIGPKGRNVVLDKDYTTPLITNDGVTIAKEIELEDPYENMGAKLVQEVANKTNEIAGDGTTTATVLAQSMIQEGLKNVTSGANPVGLRQGIDKAVQVAIEALHEISQKVENKNEIAQVGAISAADEEIGRYISEAMDKVGNDGVITIEESNGFNTELEVAEGMQFDRGYQSPYMVTDSDKMIAELERPYILVTDKKISSFQDILPLLEQVVQASRPILIVADEVEGDALTNIVLNRMRGTFTAVAVKAPGFGDRRKAMLEDLAILTGAQVITDDLGLELKDASLDMLGTANKVEVTKDHTTVVDGNGDENNIDARVGQIKAQIEETDSECDKEKLQERVAKLAGGVAVIKVGAASDTELKERKLRIEDALNSTRAAVEEGIVAGGGTALVNIYQKVSEIKAEGDVETGVNIVLKALQAPVRQIAENAGLEGSIIVERLKHAEAGVGFNAATNEWVNMLEEGIVDPTKVTRSALQHAASVAAMFLTTEAVVASIPEPENNEQPGMGGMPGMM

SEQ ID NO: 26447 - protein, 212 aa, uncultured archaeon GZfos31B6
MNEQTINAVNTVLDDSPSRKFTESVDLAINLKNLDLSQPRFRVDEEIILPHGLGRPITIAVFARGETALLAKDAGADMIIDPETIEEYGDDKNKARELAESYDFFIAEVAYMPAIGKILGKILGPRGKMPEPLTPDKDIAQIIHKTRSSIKLRSKDRMTFHAPIGQRDMPAEEVAENIEAVIVRLEQVLDKGVQNIKSIYVTTTMGKSARAR

SEQ ID NO: 26448 - protein, 422 aa, Rubrobacter xylanophilus DSM 9941
MPRGTSPHNMLDDPGRVRNASGGLVSSLLRERAMAEAAAERGATEAPVRRLLVVDDDPVSNRLMQRRLERLGYEVFSAADGREALESLPDLRPDVLLLDVSMPGVGGLDVLEHVRESGLDAAVIMMTAYGTEEVAVESLRRGADDYLRKPLQQAEFEAVLERTVERLRLERQNRALRRQLDEKRRQLEAELSRAARVQAELLPVGTPEVPGFELAARCIPAREIGGDFYGWMRPDPQTLALTLGDVMGKGMPAALLMATARAVLRALSRQNPPERAVNLAARALEEDLMRSGSFVTLFHAQLDIPSGSLSYVDAGHGHAFVRRAGGSVEHLLEGGVPVGTIPGHAYREGRLRLEPGDTLVAYSDGLAEARPGSLMAVGEIAGSLSGASGAREMLERLVGLAGAGESLSDDLTVLVLHRAGEG

SEQ ID NO: 26449 - protein, 248 aa, Nocardia farcinica IFM 10152
MGVLDGKVALITGGARGMGAEHARQFVAEGARVVFGDVRDEEGEALAAELGDDAHYVHHDVTSESEWSEVVAATIDRFGKLDILVNNAGINRFAPICEQSLDEFRLILDTNLTSTWLGIRAAAPVMSDGGSIVNMSSVEGYAGAAGLSAYAASKFGIRGLTKVAARELGSRNIRVNSVHPGGIATPMNTEFAPNLDPDKPFVPSLPIARWGRAAEVTHVVVFLASDAASYCTGSEVLVDGGLLAGPGY

SEQ ID NO: 26450 - protein, 333 aa, Thermococcus kodakarensis KOD1
MRPKVFITRAIPENGIEMLKEHFEVEVWPEEREIPREVLLKKVRDVDALVTMLSERIDSEVFDAAPRLRIVANYAVGYDNIDVEEATRRGIYVTNTPDVLTDATADFAWTLLLATARRLIEADHFTRSGEWKRRGIAWHPRWFLGYDVYGKTIGIVGFGRIGQAVARRARGFGMRILYYSRSRKPEAEKELGAEFRSLEDLLRESDFVVLAVPLTKETQYMINEERLRLMKKTAILVNIARGKVVDTKALMKALKEGWIAGAGLDVYEEEPYYNEELFSLKNVVLAPHIGSATYGAREGMAELVARNLIAFKNGEVPPTLVNKEVVKVRKPGF

SEQ ID NO: 26451 - protein, 306 aa, Oryza sativa
MAPSLLRPASPCLNLAPPTADGPGRSRSAVTIGGSRPLSVSLRVGGSSRRDFPCTTMASRDHSGLTRQLLDFQHGTVDEIDGEHDPFMELKARFMDFKHRNCVDNISNYQNLAQQQTPKFMVVACADSRVCPSSVLGFQPGEAFTVRNIANLVPPYQHGASETSAALEFAVNTLEVENVLVVGHSRCGGIQALMSMKSKQDDSQSRSFIRDWVSIAKSARLSTEAAAGNLNFELQCKHCEKESINSSLLNLLTYPWIEKRVNEGTLSLHGGYYNFIDCTFEKWKLVYRQGLEGGSKYAIKNRTTWS

SEQ ID NO: 26452 - protein, 461 aa, Salmonella typhimurium
MAEKKPELQRGLEARHIELIALGGTIGVGLFMGAASTLKWAGPSVLLAYIIAGLFVFFIMRSMGEMLFLEPVTGSFAVYAHRYMSPFFGYLTAWSYWFMWMAVGISEITAIGVYVQFWFPEMAQWIPALIAVGLVALANLAAVRLYGEIEFWFAMIKVTTIIVMIIIGLGVIFFGFGNGGQAIGFGNLTEHGGFFAGGWEGFLTALCIVVASYQGVELIGITAGEAKNPQVTLRSAVGKVLWRILIFYVGAIFVIVTIFPWNEIGSNGSPFVLTFAKIGITAAAGIINFVVLTAALSGCNSGMYSCGRMLYALAKNRQLPAAVAKVSRHGVPVAGVALSILILLVGSCLNYIIPNPQRVFVYVYSASVLPGMVPWFVILISQLRFRRAHKEAIADHPFRSIMFPWANYLTMAFLVCVLIGMYFNEDTRMSLFVGVIFLLAVTLVYKVFGLNRHGTAHKVGE

SEQ ID NO: 26453 - protein, 429 aa, Bradyrhizobium japonicum USDA 110
MGGALRRGDKPVKWCYSAAIKIKARPGRTPMTVHTGRHFLQIPGPTNVPDRVLRAMDMPTLDHRGPEFAELGFGVLAAMQRVFRTKQPVIIFPSSGTGAWEAAMVNVFSPGDKVLMCETGQFAVLWRGIADKFKLDVDFIPSDWRHGADLAEIEQRLAADKQHTIKAVCVVHNETSTGCVTPPLEVRKLLDRVKHPALLMVDTISGLGSMEYEHDAWGIDVSVAGSQKGLMLPPGLGFNAVSEKALAVAKANPGMRSYWDWQEVISFNKLGTFPYTPATNLLYGLREAVKMLEEEGLENVWTRHKRHSAATRAAVKVWGLETQCADPAAHSPALTGVRVPDGHDADAFRKVVLENFDMSLGTGLNKVKGKVFRIGHIGHFNDLMLMGTLAGVEMGLDLAKIPHRSGGVLAAMDVLKGRDVVPMAKAQVA

SEQ ID NO: 26454 - protein, 543 aa, Mycoplasma genitalium G37
MAKELIFGKDARTRLLQGINKIANAVKVTVGPKGQNVILERKFANPLITNDGVTIAKEIELSDPVENIGAKVISVAAVSTNDIAGDGTTTATILAQEMTNRGIEIINKGANPVNIRRGIEDASLLIIKELEKYSKKINTNEEIEQVAAISSGSKEIGKLIAQAMALVGKNGVITTDDAKTINTTLETTEGIEFKGTYASPYMVSDQEKMEVVLEQPKILVSSLKINTIKEILPLLEGSVENGNPLLIVAPDFAEEVVTTLAVNKLRGTINVVAVKCNEYGERQKAALEDLAISSGTLAYNTEINSGFKDVTVDNLGDARKVQIAKGKTTVIGGKGNKDKIKKHVELLNGRLKQTTDKYDSDLIKERIAYLSQGVAVIRVGGATELAQKELKLRIEDALNSTKAAVEEGIIAGGGVGLLNASCVLTNSKLKERYENETSVENIKEILLGFEIVQKSLEAPARQIIQNSGVDPVKILSELKNEKTGVGFDAETKKKVDMIANGIIDPTKVTKTALEKAASVASSLITTNVAVYDVKERKDNSFSE

SEQ ID NO: 26455 - protein, 36 aa, Pteris vittata
NKPYPKSRYCRGVPDPKIRIYDVGMKKKGVDEFPFS

SEQ ID NO: 26456 - protein, 390 aa, Desulfitobacterium hafniense DCB-2
MPNKEMLLIPGPTPVVDEIYEALAQETYSHTDPRLVKRFKNSLDMTKRLFNTDGEVFVVAGSGTLSMEMAIVNTVAPGEKILVISHGYFGDRFIPLAQAHGIQVEVLQSQWGKHVEISAVEEKLAEGGFKAVTVTHADTSTGVMSNLEELVPAVKKYGPLFILDGVCASAAIEENMQKEYGHPDYRIDLVLTGSQKAIGVPPGLAIVAFGPKALKAREAMDKVAAYYMDILRWLPTMQDPGKYYATHPVNMIYAYEKGMELVMAEGLEARYKRHAALGKAVRAGLAQYGMRALAPEEIAAPTLSCILYPEGVNDAEFRSKLAEKGMVIAGSLANLAGKAFRIGHMGNATEEMFIKAMELVGETLNEMGLRADPAKAVETFKNVYHEGLGK

SEQ ID NO: 26457 - protein, 566 aa, Debaryomyces hansenii CBS767
MKVSTLLGPIALAAFAVGENPSIFKIDFNVLRGNSKRDLSFEGERPNFVKRDGSAEMELQNERTFYLANLKVGSNKDEVGVLVDTGSSDLWMMSHDLLCEAPSGSSKRDVIVDSKFPKVKADGGKDKMVDNKNEGHAKHVSKSSEDVVTKSADGNNKAFWDFGGSDSTTMVTVSPEGTGSGGGGSGSSSKSAGGATTNTCTSYGSFKTEGSDTFNRNSSAEAFSISYADGTDANGIWGTDDVRFGDITVKDLSFAIANETSSNVGVLGIGLSGLETTYSNSYGGNYQYENLPLKLKSQGTIEKAAYSVYLGEKDAKAGSILFGAVDSAKYTGDLQTVQIVNTMKSYGYSEAIKLEIIVSGLTFNDSGSEIDLTSSDHTAVLDTGSTYSYFPSSLLKVVGETLNGQYSSSLGAYIVDCVDDDSYYFTIDFSGAKIQVPLSNLVTQYSSNRCFLSILPQTGADYILFGDNVLRSAYLVYDLEDFEISLAQVKYTSDEDISTISSSVPNAKNAPGYSSTAISTSTDETGSITTSNYGSDKKSGASINKLSMIKLYGLIIGMGLLVGVSV

SEQ ID NO: 26458 - protein, 176 aa, Gossypium hirsutum
LFSFILILTHFLLKSSIRIQVLGWICVAISVSVFAAPLNIMARVVRTKSVEFMPFTLSFFLTLSAVMWFAYGLFIKDLCVALPNVLGFILGMLQMLLYAIHRHSEKVNIEEKKLPAEQMKSINVVLTTLGASEVHPVVLDIHTDDTKEEDNKNNEPTGEPDKQTDVKMEDANESPV

SEQ ID NO: 26459 - protein, 434 aa, Bradyrhizobium japonicum USDA 110
MDAKASNKTATLTVGNKNYDLPIHSGSVGPDVIDIGKLYGQSGLFTYDPGFTSTASCQSKITYIDGDAGVLEYRGYPIEQLAENGDFLETCYLLLYGNLPTAAQKKDFDDRVIHHTMVHEQMARFFQGFRRDAHPMAVMVASVGALAAFYHDSTDINDPKQRMIASMRMIAKIPTLAAMAYKYTIGQPFVYPKNSLKFAENFLHMCFAVPCEEYKINPVLADALDKIFILHADHEQNASTSTVRIAGSSGANPFACIAAGIACLWGPAHGGANEAALAMLAEIGSVDKIPEFIAKVKDKNSEVRLMGFGHRVYKNYDPRAKIMQKMCHAVLKETGHGDDPMLKVAMELEKIALSDQYFIDRKLYPNVDFYSGITLKAMGFPVSMFTVLFAVARTVGWISQWSEMIEDPQQKIGRPRQLYTGVTRRDYVAIKDRK

SEQ ID NO: 26460 - protein, 374 aa, Brucella suis 1330
MAEAEATATTEAGRIPVTVLTGYLGSGKTTLLNRILTENHGKRYAVIVNEFGEIGIDNDLIVESDEEIYEMNNGCICCTVRGDLIRVVEGLMRRPGRFDAIVVETTGLADPVPVAQTFFMDDDVRAKTGLDAVVALVDAKHLPLRLKDSREAEDQIAFADVVLINKTDLVTPEELAAVEATVRAINPHAIIHHTERASIPLNRVLDRGAFDLKRVLDNDPHFLDHDDPDHVCGPDCDHDHHHHGHDHHHHDHHDHDHVCGPDCDHDHDHDHASPIHDVTVKSVSLRTGEIDPAKFFPWIQNITQTQGPNILRLKGIIAFKDDPDRYVVQGVHMIIEGDHQRAWKPEEKHESRLVFIGRELDPAALKAGFENCRA

SEQ ID NO: 26461 - protein, 192 aa, Zea mays
MPGRRAIEVRQLLPAGGDAATPRWRMSLLENTFSGFVQGAGAEAVFADGSLFSPFLFGKFFDPADPFPLWEFEPDALLAALRRGNARTAVDWAETDSDYYLTADVPGGSGRRCDVEVSGDAMKVVDISGLWRAPPADGRDWRAGRWWEHGFVRRVELPEDAEWRKVEACFDDSEGSLEIRVPKTADARQATA

SEQ ID NO: 26462 - protein, 666 aa, Xylella fastidiosa Dixon
MTKPTRRQLANAIRFLAADAVQAAHSGHPGMPMGMADIAEVLWNDFLRHNPNNPNWFNRDRFVLSNGHGSMLQYALLHLSGYDLPLDELKRFRQLHSKTAGHPERSETPGIETTTGPLGQGFANAVGFALAEKLLAQRYNRPEHLIVDHRTWVFMGDGCLMEGISHEAAALAGTWNLGKLICFWDDNNISIDGNTAGWFTEDTPARFEAYGWHVIRDIDGHDAEKIATAIQAAVAQENKPSLLCCRTVIGFGSPNKAGKESSHGAPLGAEELEATRKMLDWPYGPFEIPSEIYDGWRANGTGMLRQAEWEQAFDNYARQYPKEAAELTRRSHAELPTDFLSQLDAYIAKVHAAGPCIASRKASQMAIEAFAPLLPELIGGSADLAHSNLTLWKGSQTVVGDAPNANYAYYGVREFGMSAIANGLALHGGFIPFDATFLVFSDYARNAVRMSALIPAHVIHVYTHDSIGLGEDGPTHQPVEHLAALRYIPNNDVWRPCDAVESAVAWKAAITRNNGPSCLVFSRQNLPHQPRHDAQLEQIARGGYILADAASSIPDIILIATGSEVSLAIEAKKTLDAMQLKTRVVSMPSTNVFERQHPTYRESVLPSKVHKRVAIEAGVTGFWWQYVGLHGAVIGLDTFGASAPADVLYKHFNITAEHVVEVAKAL

SEQ ID NO: 26463 - protein, 520 aa, Methanopyrus kandleri AV19
MCGIACAVGDDDIAAMVTAMEHRGPDGRGFASVSDDGVEFSEEPPSEGEVVLGHVRLWVRGEASAVQPIVEEDRAVAVNGEIYNYRRFVEDAPSDSWAVFEVVRSVRDAAAALRVLRGEYAFVAAFRDGTVVAARDPIGVRPLYYCVEAGLAVASERKALWAAGFRDVRRVPPGALLVLRDGRVELRNVVDVPRSRPGRSSWKDLLEVLQRSVRERVEETERVGVVLSGGVDSSTVAKLASEYVDVKCYAAGFEGSDDVEVAERLCDEMGWPFVSVSLEDEFERYVVATVYAVETWNPMKVEVGIPILACAGAMSDDGIRVMLSGQGADELLGGYHRHLRHYGDWDRFSWELWKDVAAIHAVNLERDDKAGMHHSVELRVPYLDLDVVRTGLGIDPRENVSGPEDNLRKRALRRVAAELGLPDFVVERRKRATQYGSLTSKMLDKLVRELGIKRAVAKRLGYRSHKELFLRLVGKYLGFPWEAPSVEEVERECARLGVEPEISEFLEERVLTFDSDLRAG

SEQ ID NO: 26464 - protein, 408 aa, Desulfotalea psychrophila LSv54
MRQKAEAIRDFIIGVRRQIHRYPELGYQEHKTAELIGGMLRDLGIEFRSGLGGTGIVAEFGPGGGARVLLRADMDALPIAEETGLSFSSQIEGCMHACGHDAHVAMVLGAASLLRNESFSGRVRLLFQPAEEGCYDDPDGFSGARRMIGEGVLAGVDAALALHQVPTLTSGTIALNSGAVMAASDIFEIVVRGRAAHAGASPQEGIDAILIASELVLGLQTVVSRQVSPFEVAVLSICTIEGGKAANIIADNVRLTGTIRALNSALQGRVRALVEQRCDALAGLYQTSISFSLLDSIPLTENSEMVVQLARDAVVEILGEEALLEVEPCMGAEDFSFIAGEVPSCLALLGTMPPESGTAPLHSPHMILDEDALPIGAAYLAQTALSLLRPGGLIQADLADDADRGLSG

SEQ ID NO: 26465 - protein, 713 aa, Saccharomyces cerevisiae
MVTNNGDGEHLGIRRNGNLRHPSNNMKIPRRAQSTVLNSNPFYSRKYSMSTLTPRDICRSVDSRVFVDMSSPNFQTLEDPHRDEIINSVRLNYLNSSKRSSVSHGNEAIPRVNPTKNSSASTIAAANVDSDDDETNLSSAGGDITHDIYKLVKAEDPKRLRRPRSMENVTSKIEHHTKLSSASGLNVPGGFRREFIVNKKRQEHQLNDSASSDFTSHESDSINQSSPSSNQDIDKVPFLTRNFLEFLYVFGHFAGESFEDDFIPDSSNMMIRGEDERSALLSRPDHMKVLPSAKGTTSTKKVFLILLKSFIGTGVLFLPNAFHNGGLFFSVSMLAFFGIYSYWCYYILVQAKSSCGVSSFGDIGLKLYGPWMRIIILFSLVITQVGFSGAYMIFTAKNLQAFLDNVFHVGVLPLSYLMVFQTIIFIPLSFIRNISKLSLPSLLANFFIMAGLVIVIIFTTKRLFFDLMGTPAMGVVYGLNADRWTLFIGTAIFAFEGIGLIIPVQDSMRNPEKFPLVLALVILTATILFISIATLGYLAYGSNVQTVILLNLPQSNIFVNLIQLFYSIAIMLSTPLQLFPAIKIIENKFFPKFTKIYVKHDDLTTRVELRPNSGKLNWKIKWLKNFIRSIIVIIVVSIAYFGSDNLDKFVSVIGSLACIPLVYIYPSMLHLRGNSLPETKGEFWRFKPMLDTILIFFGIASMLYTSYQSIFGV

SEQ ID NO: 26466 - protein, 423 aa, Leifsonia xyli subsp. xyli str. CTCB07
MFHTAADYAEAGTVNSLWLLVAAALVLLMTPGVAFFYGGMVRAKSVVSMMMMSVGAMAIVSVLWVVYGYGLAFGTPLIPHVLGAPDWFLGSLMGKDGMTPDLSGLAFAGFQATFAIITVALISGAIADRAKFGAWMVFAAMWVTVVYFPVAFWVFNLSQGWIASVLHVNDFAGGTAVHINAGAAGLALALVLGKRVGFQKGMSKPHNVPLTLLGAALLWFGWFGFNAGSEAAVDGVAALAWINTLAAPAAATIGWLVVEKVKDGKPTSIGAASGAVAGLVAITPACNILTPFWAILLGLVAGAVCAIAVDLKFKLGFDDSLDVVGIHLIGGLIGTLWIGFFGFTHIDGDASKPFSSLLYGGSFVQLGAQAIGAFAVLIYSFVLAFVIGSVIQRTMGFRIKNEDELAGVDTVVHGEEGYSLETV

SEQ ID NO: 26467 - protein, 242 aa, Thermococcus kodakarensis KOD1
MIKAVLFDLDDTLVDTTKLAELARRNAVENMVRHGLPVDFDTAYNELLELINEYGSNFGRHFDYLLRRLDLPQNPKWIAAGVIAYHNTKFAYLRSVKNARRVLLELKREGYKVAVVTDGDPIKQWEKILRLELDEYFDDVFISDYLGVKKPHPKIFLKALRKLDVKPEEAVMVGDRLYSDIYGAKNVGMTTVWFRYGKYRDREMEYVEYADFTIERLEDLLKIIRGLNNEEKARSDTEVHAD

SEQ ID NO: 26468 - protein, 127 aa, Zea mays
  misc_feature (49)..(49): Xaa can be any naturally occurring amino acid
  misc_feature (58)..(58): Xaa can be any naturally occurring amino acid
  misc_feature (70)..(70): Xaa can be any naturally occurring amino acid
  misc_feature (98)..(98): Xaa can be any naturally occurring amino acid
  unsure (1)..(127): unsure at all Xaa locations
TRRRPDQAEGPVRANPTRAEGMHAARLRSSRRVRGGGDDSERWTTPPHXEERPKAYLXNRPPTSWGETRXWFIRERPCYMTYLLTVSILRPDLNAKPXLTNYTSAHEKEMKRLKQQELANDSEGADS

SEQ ID NO: 26469 - protein, 1063 aa, Rubrobacter xylanophilus DSM 9941
MAASVLIGWLRLEGERAGLYDTATGVLIMTAANVIVVSAIMLWGVRALGRLERGRAAAEEGYRSVFENASEGIFRSTPEGRLLAANPAMARMFGYRSPEELVSEVSDLGRQLWESPQERERFVRRVLEEGSVSGFEARMRRRDGSLLWASLNGHRVTGRDGRLVCLEGTILDITWRRRQQEALEESQRQFRDLFERSVDALLVHDGEGNIVDCNAEACRSLGYTRQELLRMNVRDFATNLLRREDRTPGEPTLWERALSGEPGVVAGVHLGEHRRRDGTTFPVEVRVGPVVYGGRRMILAAARDITERKRIEEELREAKEQAEAASRAKSEFVANMSHEIRTPMNGVIGMAELLLDTPLTPEQREYARTIRSSGEALLAILNDILDFSKIEAGRLSLERIPFEIHKEVEEVVSLLAPRAHAKGLELICFIEPGVPPLIKGDPFRLRQVLTNLIGNAIKFTEEGEVVVSVSLSKEEKSAPAGERGGEIELRFEVKDSGIGIQEEQQKHLFEAFSQADASTTRRYGGTGLGLAISRQLVEMMGGEIGLKSSPKEGSTFHFSARFVLPEEEEEKSPKTPPEEGEGGGARRTREEEERGRRESLAGLRVLVVDDNATNRTILCRQLEAWRMEPKSVGGAQEAIRELEASGTFLASSSSGYDLVILDMQMPETDGLELARRIKSRLQEEEEKRGGAFSALRLMLLTSMDPQTKEKIKASGTVEACLQKPVRQSQLYDAIATLFQKKKEEERPLPLPAHQKEEEKEGKERPLILLAEDNPVNQQVAASMLKKLGYRVELAQNGEEALKKLFPPPSSPPSSSGREEGGGSPKKKYAAVLMDIQMPKMDGLEATRRIRSKEEEGVLRLPRTPIIAMSAHAMQEDRERALKAGMDHYISKPVKKEQLKEALERFVAATEGQKERPSPSSSCPPGRKPQQPEKGGEGAALDPDSLKELDELGEGVFEELCQLFLEDAPRKLAGIKEALRLEAKEGGEKATSSSSFAPREEVGRLSHALKGSAASLGAKRLAGLCQRLGEEAGGAGSEEQLLRLVWEMERELERVRGEIAARLS

SEQ ID NO: 26470 - protein, 417 aa, Bradyrhizobium japonicum USDA 110
MQNSRQSRPEPADREVFMHQGRHFLQIPGPSPVPERVLRAMDMPVIDHRSAEFGELGRTVLEGSQKIFQTAGPVVIFPSSGTGAWEAAIVNTLSPGDRVLMVETGHFATLWRQMAGRFGIEVDFVPGDWRRGADPAVIEAKLTEDKARAIKAVMVVHNETSTGATSRIAEIRAAIDRTDHPALLMVDTISSLGSVDYRHDEWKVDVSVSCSQKGFMLPPGLGFNAISEKARVAAKTNKMPRSYFDWEEMLKPNAKGFFPYTPATNLLYGLREAIAMLLEEGLDNVFARHQRLAAATRAAVNHWGLEVLCQEPSEFSPVLTAVLMPPGHDADQFRQIVLENYNMSLGSGLSKVAGKVFRIGHLGECNALTLLGALTGVEMGLSVAGVPHRPGGVDVAMKLLEQRPQGNASPHLKVVGT

SEQ ID NO: 26471 - protein, 180 aa, Escherichia coli CFT073
MFTFIKKVIKTGTATSSYPLEPIAVDKNFRGKPEQNPQQCIGCAACVNACPSNALTVETDLATGELAWQFDLGRCIFCGRCEEVCPTAAIKLSQEYELAVWKKEDFLQQSRFALCNCRVCNRPFAVQKEIDYAIALLKHNGDSRAENHRESFETCPECKRQKCLVPSDRIELTRHMKEAI

SEQ ID NO: 26472 - protein, 540 aa, Rubrobacter xylanophilus DSM 9941
MAHKELKFNTEARQALERGVNKLADAVKVTLGPKGQYVVLDKKFGSPTITNDGVTIAREIELEDIFENQGAQLLKEVATKTNDVAGDGTTTATVLAQIIVREGLKNVAAGANPVILRNGIEKAVEKAVEAIREQAKEISGKDEIARVGAISARSEEVGNVIAEAIDKVGKDGVVNVEEGQTLGIDLEFTEGMQFDKGYLSPYFVTDQDRMEAVLEDPYILIANQKISNVQDLLPLLNQVMQANKPLLIIAEDVEGEALATLIVNKLRGTFQSCAVKAPGFGDRRKRMMEDIAILTGGEVITEELGLKLENTQLSQLGRARKVVVTKDDTTIVDGAGDPEQIKGRINQIKAELETTDSDFDREKLQERLAKLAGGVAVIKVGAATETELKEKKHRVEDALSATRAALEEGIVPGGGVALLKAQKAVGELLDELDGDERTGARIVYRALEEPIRQIAENAGADGSIVVDKVRAQGDSIGFNALTGGYEDLVAAGVIDPAMVTRSALQNAASIAGLLVTTDVVVAEPEEEQPAMPGGGMGGMM

SEQ ID NO: 26473 - protein, 340 aa, Zea mays
MDLKDSERRGAAGPGPLSRQGSIYSLTFDEFQNTLGGTGGGLGKDFGSMNMDELLRSIWTAEESQAMASASEPAAGAAGDGGAALQRQGSLTLPRTLSVKTVDEVWRDFAREGTAGGPEPQPNRQPTLGEMTLEDFLVRAGVVRDNPAAAAAAAAAVPAQPVATRPLQAVNNGASIFFGNFGGANDAGAGAMGFAPVGIGDQAMGNGLMPGVAGMAAGAVTVSPVDMSVAQLDSMGKGNGDLSSPMAPVPYPFEGVIRGRRSGAGVEKVVERRQRRMIKNRESAARSRARKQAYTMELEAEVQKLKEQNEELQKKQVPELVSNPYAQKKRCLRRTLTGPW

SEQ ID NO: 26474 - protein, 500 aa, Arabidopsis thaliana
MEGQTLIFTFLFVSLSLTFIIGRIKRRPNLPPSPSWALPVIGHLRLLKPPLHRVFLSVSESLGDAPIISLRLGNRLVFVVSSHSLAEECFTKNDVVLANRFNSLASKHISYGCTTVVTASYGDHWRNLRRIGAVEIFSAHRLNSFSSIRRDEIHRLIACLSRNSSLEFTKVEMKSMFSNLTFNNIIRMLAGKCYYGDGAEDDPEAKRVRELIAEGMGCFGAGNTADYLPILTWITGSEKRIKKIASRLDEFLQGLVDERREGKEKRQNTMVDHLLCLQETQPEYYTDNIIKGIMLSLILAGTDTSAVTLEWTLSALLNHPQILSKARDEIDNKVGLNRLVEESDLSHLPYLQNIVSESLRLYPASPLLVPHVASEDCKVGGYHMPRGTMLLTNAWAIHRDPKIWDDPTSFKPERFEKEGEAQKLLGFGLGRRACPGSGLAQRLASLTIGSLIQCFEWERIGEEEVDMTEGGGGVIMPKAIPLVAMCKARPVVGKILNESA

SEQ ID NO: 26475 - protein, 326 aa, Shewanella oneidensis MR-1
MSRINSTAAEELVDFSVDTAEFDLDKEDIAADLVQELGLEQQVQDDLQKNLDATQLYLGEIGFSPLLSAEEEVYFSRKALKGCEKSRNRMIESNLRLVVKIARRYNNRGLALLDLIEEGNLGLIRAVEKFDPERGFRFSTYATWWIRQTIERAIMNQTRTIRLPIHVVKELNVYLRTARELAQKLDHEPTAEEIAEKLQVSSVDVSRMLKLNEKITSVDVPLGGDNDKALLDVLADDDNVGPDYKVQDEDISNSVVKWLNELNTKQREVLARRFGLLGYEPSTLEDVGAEIGLTRERVRQIQVEALKRLRDLLGAQGLSVEALFRN

SEQ ID NO: 26476 - protein, 693 aa, Oryza sativa (japonica cultivar-group)
MGGGGGGDAGGRTVVWFRRDLRVEDNPALAAAARAGGEVVPAYVWAPEEDGPYYPGRVSRWWLSQSLKHLDASLRRLGAGKLVTRRSADAVVALLQLVRDTGATRLFFNHLYDPISLVRDHRLKEMMAAEGIIVQSFNADLLYEPWEVVDDEGQSFTMFAPFWNRCLSMPYDPAAPLLPPKRINSGDLSMCPSDDLIFEDDSERGSNALLARAWSPGWQNADKALTAFLNGPLIHYSVNRKKADSASTSLLSPYLHFGELSVRKVFHLVRMKQLVWSNEGNRAAEESCTLFLRSIGLREYSRYLSFNHPCSHEKPLLAHLRFFPWVINECYFKIWRQGRTGYPLVDAGMRELWATGWLHDRIRVVVSSFFVKVLQLPWRWGMKYFWDTLLDADLESDALGWQYISGSLPDGRELDRIDNPQLEGYKFDPHGEYVRRWLPELARLPTEWIHHPWDAPASVLQAAGVELGSNYPLPIVGLDAANARLQEALSEMWQLEAASRAAMDNGMEEGLGDSSEVPPIEFPRELQMEVDREPARVTANVLTTARRREDQMVPTMTSSLNRAETEISADFMNSVDSRAEVPTRVNFEPRTEREENFRTTAGNVARTNGIHEHNNFQQPQHRMRNVLAPSVSEASSGWTGREGGVVPVWSPPAASDHSETFASDEADISSRSYLDRHPQSHRLMNWSQLSQSL

SEQ ID NO: 26477 - protein, 423 aa, Geobacillus kaustophilus HTA426
MAADKHTEEKEQQYDVLASTQIVIHRALEKLGYPEEVYELLKEPIRVLTVRIPVRMDDGSVKIFTGYRAQHNDAVGPTKGGVRFHPDVTEREVKALSIWMSLKCGIVDLPYGGGKGGIVCDPRTMSFRELERLSRGYVRAISQIVGPTKDIPAPDVFTNSQIMAWMMDEYSRIREFDSPGFITGKPLVLGGSHGRETATAKGVTICIREAAKKRGLSLKGARVVVQGFGNAGSYLAKFMHDAGAKVVGISDVYGALYDPNGLDIDYLLERRDSFGTVTKLFKNTISNQELLELDCDILVPAAIENQITAENAPRIKASIVVEAANGPTTLEATEILTQRGILLVPDVLASAGGVTVSYFEWVQNNQGYYWTEEEVEQRLEKVMVKAFNNVYEMAQTRRVDMRLAAYMVGVRKMAEACRFRGWV

SEQ ID NO: 26478 - protein, 338 aa, Silicibacter pomeroyi DSS-3
MAGQASAGEAGFHVPPEEARHDRTFMQWPVNRRVHPDPVFLDMAQQTIADIANAIAEFEPVTLLAAAEDHARARRKLSDKVTLWDIPTEDLWCRDAGPLFARDGRGGLAVSHIQFNGWGRKQVHRRDARVAEQVAQRLGLPLLPAGLRGEAGGVEQDGHGLLMAHESSWVNDNRNPGLSRAEIEARLLRAYGAQRMIWSPGVWGEDITDYHIDSLARFTGPGRVLINLPDDPDMDDPFHLAALDTHDALVAAGLMVEVIPEPHRRRVKSVDFVASYANYYVCNGAVIAAQFGDAETDRIAARALARHYPGREIVTLNVDPLGEMGGGIHCATQQMPAT

SEQ ID NO: 26479 - protein, 480 aa, Neurospora crassa
MPSNTQTEFAPAPERNPDKYGPNANNNQKKCSQLASDFFKDSVKRARERNQRQSEMEQKLGETNDARRRESIWSTAGRKEGQYLRFLRTKDKPENYQTIKIIGKGAFGEVKLVQKKADGKVYAMKSLIKTEMFKKDQLAHVRAERDILAESDSPWVVKLYTTFQDANFLYMLMEFLPGGDLMTMLIKYEIFSEDITRFYIAEIVLAIDAVHKLGFIHRDIKPDNILLDRGGHVKLTDFGLSTGFHKLHDNNYYTQLLQGKSNKPRDNRNSVAIDQINLTVSNRAQINDWRRSRRLMAYSTVGTPDYIAPEIFTGHGYSFDCDWWSLGTIMFECLVGWPPFCAEDSHDTYRKIVNWRHSLYFPDDITLGVDAENLIRSLICNTENRLGRGGAHEIKSHAFFRGVEFDSLRRIRAPFEPRLTSAIDTTYFPTDEIDQTDNATLLKAQQAARGAAAPAQQEESPELSLPFIGYTFKRFDNNFR

SEQ ID NO: 26480 - protein, 455 aa, GIBBERELLA ZEAE PH-1
MSVHPEVPRGIALFHHAIGESWASIPTDLILAELKRRQKDGEKPECGSRSKGSYDTSAHVFALILILVLSTLACGFPLLSRRTMRGRKQKSIIFYCQHIGTGVLLATAFVHLLPTAFESMTDPCLPDFFSKGYTPLPGLVAMVSAIIVVAIESYLTARGAGHSHSHNHGYFDSDDEHESELPMMDTSGLSDRRTGIRPPDIHLEPMENQGLVAGISPLPGSSPMGQESKKLSDDFNDADSDLDLDMDELDPSGPSNMRSRSGPYASLKAGGADEEPLTPMSPMSPGPQSPEEQQRKMLQCILLEAGILFHSIFIGMAISVATGPAFVVFLVAISFHQTFEGLALGSRIAAIQFPRKSIRPWLMVLAYGTTTPIGQAIGLVVHRMYDPKSAGGLLVVGFMNAVSSGLLLYAGLVQLLAEDFLTEKSYKILKGTKRLRAFLAVCGGALLMAAVGAFA

SEQ ID NO: 26481 - protein, 283 aa, Arabidopsis thaliana
MTSHGEEIEDEQISRIEKGNCKDSQGGMETAICSSPSIVCLTQKLIAEMIGTYFIIFSGCGVVVVNVLYGGTITFPGICVTWGLIVMVMIYSTGHISGAHFNPAVTVTFAVFRRFPWYQVPLYIGAQLTGSLLASLTLRLMFNVTPKAFFGTTPTDSSGQALVAEIIISFLLMFVISGVATDSRATGELAGIAVGMTIILNVFVAGPISGASMNPARSLGPAIVMGRYKGIWVYIVGPFVGIFAGGFVYNFMRFTDKPLRELTKSASFLRSVAQKDNASKSDG

SEQ ID NO: 26482 - protein, 445 aa, Oryza sativa
  misc_feature (6)..(6): Xaa can be any naturally occurring amino acid
  unsure (1)..(445): unsure at all Xaa locations
MAPTTXAAAAASSNGGGESDGSSKEWRLTAPTRGGAMAAAGDKMSIRAVRYKISASVDDRGPRPVLPLAHGDPSVFPEFRTAAEAEDAVADALRSGDFNCYPAGVGLPAARRAVADHLSRDLPYKLSSDDIFLTAGGTQAIEVVISILAQPGTNILLPRPGYPNYEARAAFNNLEVRHFDLIPEKGWEIDLNSLESIADKNTTAIVIINPNNPCGNVYTYEHLSKVAEVARKLGILVITDEVYGNLVFGSSPFVPMGCFGHIVPILTIGSLSKRWIVPGWRLGWVAICDPKKTLQETKIATLITNFLNVSTDPATFIQGALPNILKNTKEEFFKRIIDLLTETSDICYRGIKDIKCITCPHKPEGSMFVMVKLNLYLLEGIHDDVDFCCQLAKEESVILCPGSVLGMKNWVRITFAIDSSSLLDGLERIKSFCQRHKKKNPLNYI

SEQ ID NO: 26483 - protein, 424 aa, Streptomyces aureofaciens
MTRRRVAVTGVGVVAPGGIGAPAFWDLLSNGRTATRGITLFDPSGFRSRIAAEVDFDPSEHGLSEDETARADRYIQFALVAAREAVRPTSGLELDDESAWRPGALLGTALGGTTRLEHDYVDVSRHGDWWDVDHRLSSPFLHRAFTPATLASAVAEQTGARGPVQTVSTGCTSGLDAVGYAVHSIQEGRMDVCIAGASDSPVSPITVACFDAIKATSANNDDPAHASRPLIPDRNGFVLGEGVAVLVLEELEHARARGRDVYCEIGGYATFGNAHHMTGLTTEGLEMARAIETVLAQARIGSGEIDYVNAHGSGTKQNDRHETAAVKRVLGDHAYKTPMTSIKSMVGHSLGAIGAIELAACVLAMTHHVVPPTANYETPDPECDLDYVPRTARSHTLRHVLSVGSGFGGFQSAVVLTSQEGTAA

SEQ ID NO: 26484 - protein, 378 aa, Gluconobacter oxydans 621H
MTAPASAPRLAQARRIVIKIGSALLVDSANASLRLEWLQSVCADIADLRSRGAEVIVVSSGAISLARHRLGLTSRRLRLDEKQAMASVGQIGLAQGWSAALAGHDLVAAQLLLTPDDTENRERHLNARATLQTLLDLGCVPVINENDAIATGEIRFGDNDRLGARVAQMTGADCLVLLSDIDGLYTADPRQDPSARHIPVVEQMTDEIMAMGGEPPPGYSSGGMRTKLLAARIATRAGANMVIAAGQEHHPLRRLQNGGLCTWFMAQTDAGSARKRWIGGSLQPKGTLTIDAGARRALEESASLLPAGVTGLEGSFGRGDLVLIRDADGSIIGRGLIAYDSEESQKLIGHRSGEMEQLLGYRGRDALIHRDDLALDLP

SEQ ID NO: 26485 - protein, 460 aa, Rubrivivax gelatinosus PM1
MTWLFPRLFSCLVALLLGGTVGYVTGAAVRAPILGALLGGALAIGLIAAVDTLRGARLIAWLRGSQDTDAPRDAGFWGEIAYRVERGIRARERSTVQEKARLAQFLDAIEASPNGVLMLDVNGQIDWCNSVAASHFGLDPRRDRLQRITNLVRAPAFVAYLQAGVYREAVVFPSPNGLGTLSVLVRDYGEGMKLVLSQDITERERADAMRRDFVANVSHEIRTPLTVLSGFIETMSTLPLTEVESRRVLVLMSQQAQRMQTLVSDLLTLAQLEGSPRPAADRWIAVSRLLQLVEADARTLSQGRHTLTLAGDDSAQIAGAETELLSALTNLANNAVRYTPEGGRIDISWRRLADGSGEFAVRDTGLGIEREHLPRLTERFYRVDGSRSRDTGGTGLGLSIVKHVAQRHGGELDVQSEPGKGSTFRLVFPAARLRCVAAPTTPQPASDPGVPVGGLTADTR

SEQ ID NO: 26486 - protein, 214 aa, Listeria innocua Clip11262
MRFFIDTANVEEIKKANRMGFIAGVTTNPSLVAKEGRDFNEVIQEITSIVDGPISGEVVSLNAEEMIEEGRVIAKIHPNMVVKIPMTGEGLAAVKVLTEEGIKTNVTLVFSATQALLAARAGATYVSPFLGRLDDIGDDGLVLIRDIAEIFETHGIPTEIISASVRHPIHVIECAKAGADIATVPYKVFEQMLKHPLTDSGIDKFLADWEAAKK

SEQ ID NO: 26487 - protein, 298 aa, Zea mays
ACSIGSWNKTMESEIMASYETKQNCEIRVFESSDEMATDLAEFISQASEISVKERGCFAIALSGGPLVRHMRKLCEAPYNKTLDWSKWYIFWAEERAVAKNHAESNYRLTKEEFLSKVPILNGHVYSINDNATVEEAASDYEFVMRQLVKVRTVGVSESNDCPRFDLVLLNIGPDGHVASLFPNHPALELKGDWVTYITDSPEPPPERITFTLPVINSASSVAIVATGEDRARAVSFSVSACQDQEEEGPADDDAGTTMIPPASMVQPTDGKLVWFLDEAAASSLEASNGACEHQEGY

SEQ ID NO: 26488 - protein, 217 aa, Zea mays
MAGGGDKVDYVFKVVLIGDSAVGKSQILARFARNEFSLDSKATIGVEFQTRTLVIEHKSVKAQIWDTAGQERYRAVTSAYYRGALGALLVYDITKRQSFDHIPRWLEELRGHADKNIVIMLVGNKSDLEDERAVSTEDAKEFAEKENLFFLETSALQATNVENAFQTVLTEIFKIHSKKNMAADPRANGAAPSLAGKKVIVPGPAQEIPKSKCCSSM

SEQ ID NO: 26489 - protein, 896 aa, Pseudomonas viridiflava
MAAVLGGYFTWMQLYELQSQLLQRGEMIAQDLAPLSANALGRKDKILLTRIATQTLEQSDVRAVSFLDTDRSVLAHAGPTMISPSPIGSSTQLLNSSGNDATRYLLPVFGHQRHLTSPIIPAEADTLLGWVELEISHNGTLLRGYRSLFASLLLIFTGLAFTAILAVRMSRTINGPLSQIKQAVSQLKDGNLETRLPPLGSRELDELASGINRMAATLQNAQEELQMSIDQATEDVRQNLETIEIQNIELDLARKEALEASRIKSEFLANMSHEIRTPLNGILGFTHLLQKSELTPRQYDYLGTIEKSADNLLSIINEILDFSKIEAGKLVLDNIPFNLRDLLQDTLTILAPAAHAKQLELVSLVYRDTPLALSGDPLRLRQILTNLVSNAIKFTRQGTIVARAMLEDETEEHAQLRISVQDTGIGLSSQDVRALFQAFSQADNSISRQPGGTGLGLVISKRLIEQMGGEIGVDSTPGEGSEFWISLNLPKAREDREETANQALEGLRAAVLEHHDLARQALEHQLEDCGLQTVVFTNLENLLNGVTAAHETPQAIDLVVLGVTALEISPERLRQHIWDLENLNCKVMVLCPTTEHALFQMSVHDVYTQLQAKPACNRKLQKALSELVAPRAVRTDVALPLSSRAPRVLCVDDNPANLLLVQTLLEDMGAEVVAVDGGYAAVSAVQQEAFDLVLMDVQMPGMDGCQATEAIRAWETERNQTSLPIVALTAHAMANEKRSLLQSGMDDYLTKPISERQLAQVVLKWTGLALRNPIPERQTESSNAHVGPLVLDHEEGLRLAAGKPDLAADMLAMLLASLDADREAIRAARANDDIQGLIERVHRLHGATRYCGVPQLRTACQRAETLLKQNAPHTEDALDDLDKAITRLEAEARVTA

SEQ ID NO: 26490 - protein, 157 aa, Mycoplasma genitalium G37
MKEIYFGGGCFWGIEKYFQLIKGVKKTSVGYLNSRIRNPSYEQVCSGYTNAVEAVKVEYEEKEISLSELIEALFEVIDPTIRNRQGNDIGTQYRTGIYWTDSSDEKIINDKFLKLQKNYSKPIVTENKKVENYYLAEEYHQDYLKKNPNGYCHIKFD

SEQ ID NO: 26491 - protein, 121 aa, Podospora anserina
MRSKFKDEHPFEKRKAEAERIRQKYADRIPVICEKVEKSDIATIDKKKYLVPADLTVGQFVYVIRKRIKLSPEKAIFIFVDEVLPPTAALMSSIYEEHKDEDGFLYITYSGENTFGGFETA

SEQ ID NO: 26492 - protein, 607 aa, Arabidopsis thaliana
MKMIIQIFFIISLISTISFASVQDFCVADPKGPQSPSGYSCKNPDQVTENDFAFTGLGTAGNTSNIIKAAVTPAFAPAYAGINGLGVSLARLDLAGGGVIPLHTHPGASEVLVVIQGTICAGFISSANKVYLKTLNRGDSMVFPQGLLHFQLNSGKGPALAFVAFGSSSPGLQILPFALFANDLPSELVEATTFLSDAEVKKLKEKSKKKPRSLFTSLRTILSFKMQIFVKTLTGKTITLEVESSDTIDNVKAKIQDKEGIPPDQQRLIFAGKQLEDGRTLADYNIQKESTLHLVLRLRGGMQIFVKTLTGKTITLEVESSDTIDNVKAKIQDKEGIPPDQQRLIFAGKQLEDGRTLADYNIQKESTLHLVLRLRGGMQIFVKTLTGKTITLEVESSDTIDNVKAKIQDKEGIPPDQQRLIFAGKQLEDGRTLADYNIQKESTLHLVLRLRGGMQIFVKTLTGKTITLEVESSDTIDNVKAKIQDKEGIPPDQQRLIFAGKQLEDGRTLADYNIQKESTLHLVLRLRGGMQIFVKTLTGKTITLEVESSDTIDNVKAKIQDKEGIPPDQQRLIFAGKQLEDGRTLADYNIQKESTLHLVLRLRGGSF

SEQ ID NO: 26493 - protein, 664 aa, Arabidopsis thaliana
MVNPGHGRGPDSGTAAGGSNSDPFPANLRVLVVDGDPTCLMILERMLMTCLYRVTKCNRAESALSLLRKNKNGFDIVISDVHMPDMDGFKLLEHVGLEMDLPVIMMSADDSKSVVLKGVTHGAVDYLIKPVRIEALKNIWQHVVRKKRNEWNVSEHSGGSIEDTGGDRDRQQQHREDADNNSSSVNEGNGRSSRKRKEEEVDDQGDDKEDSSSLKKPRVVWSVELHQQFVAAVNQLGVDKAVPKKILEMMNVPGLTRENVASHLQKYRIYLRRLGGVSQHQGNMNHSFMTGQDQSFGPLSSLNGFDLQSLAVTGQLPPQSLAQLQAAGLGRPTLAKPGMSVSPLVDQRSIFNFENPKIRFGDGHGQTMNNGNLLHGVPTGSHMRLRPGQNVQSSGMMLPVADQLPRGGPSMLPSLGQQPILSSSVSRRSDLTGALAVRNSIPETNSRVLPTTHSVFNNFPADLPRSSFPLASAPGISVPVSVSYQEEVNSSDAKGGSSAATAGFGNPSYDIFNDFPQRQQHNKNISNKLNDWDLRNMGLVFSSNQDAATATATAAFSTSEAYSSSSTQRKRRETDATVVGEHGQNLQSPSRNLYHLNHVFMDGGSVRVKSERVAETVTCPPANTLFHEQYNQEDLMSAFLKQEGIPSVDNEFEFDGYSIDNIQV

SEQ ID NO: 26494 - protein, 215 aa, Brassica napus
MASISNLANLTPATSANSRSSSSSSVLPRSFLNLRSLNAKLSSSSHLSLRHHQTSRPSLFVRCSASGGNGSAAKRTTLHDLYEKEGQSPWYDNLCRPVTDLLPFIARGVRGVTSNPAIFQKAISTSNAYNDQFRTLVESGKDIESAYWELVVKDIQDACKLFEPIYDQTEAEDGYVSVEVSPRLADDTNGTVEAAKYLHKVVNRRNVYIKIPATA

SEQ ID NO: 26495 - protein, 546 aa, Shewanella oneidensis MR-1
MTTRYIFVTGGVVSSLGKGIAAASLAAILEARGLNVTIMKLDPYINVDPGTMSPTQHGEVFVTEDGAETDLDLGHYERFIRTKMNRRNNFTTGRIYEEVLRKERRGDYLGATIQVIPHITNAIKEKVLAGGEGHDVAIVEIGGTVGDIESLPFLESIRQLGVELGRDRTLFMHLTLVPFLGAAGEVKTKPTQHSVKELRSIGIAPDVLICRGDRAIPANERAKISLFCNVEERAVISLKDVDSIYKIPALLRSQGLDELVVKRFSLTCREADLSEWENVIYQEANPNGEVVIGMVGKYIELPDAYKSVNEALKHAGLKNRVSVTIKYIDSQTVEAKGDEVLQGLDGILVPGGFGERGVEGKILAAKFARENNLPYFGICLGMQVALIEFARNVAGMADAHSTEFNKATPFPVVGLITEWVDEEGNVEQRHEASDLGGTMRLGAQLCHLLEGSKAAQAYKGNSCVERHRHRYEVNNKYKERLEQAGLVFSGLSSDRKLVEMIELKDHPWFVAGQFHPEFTSTPRDGHPLFEGFVAAASAHQKRDLKK

SEQ ID NO: 26496 - protein, 375 aa, Streptococcus suis 89/1591
MAQNKMLAMILAGGRGTRLEGLTKKVAKPAVAFGGKYRIIDFPLSNCANSGIDIVGVLTQYEPVLLNSYVAQSQRWGLDVQGSGVFVLPPSEKIEGFGLYKGTADAITQNIDFIDLHDPEYVLILSGDHIYKMNYDKLLDTHIQKKADATIAVIEVPIKEASRFGIMNTDEDYRIEEFEEKPENPKSNLASMGIYIFTWKTLKKYLQEDDKLDTSSHDFGHDIIPKYLEDGRTLIAHPFRGYWKDVGTVNSLWESNMDLIDHAGDLDLSDRSWRIYSEDKGSPAQVIGATATVKSAYIDKGAVIDGTVEHSVISTDVQVNQNAVVKNSVVLPGAIIGEGVELDYVIVAENIKIADGVKLTGDIDHILLIDKNVTK

SEQ ID NO: 26497 - protein, 296 aa, Corynebacterium efficiens YS-314
MNMPLSQGPPKINDKNGCIEPVNNQRRTPRLWIMRIALIQITSGGDKMANLELVRTTATDAAAQGARLLIYPEATSQAFGTGRLDEQAEDLHTGAFATGVQQLAEDLGVVIVAGMFTPADTVEQDGKTLHRVHNTALVTGNGLHEGYHKINTYDAFGYRESDTVKPGNELHVFDLDGVKVGVAICYDLRFPTQFQELARAGAEIIVVPTSWQDGEGKLEQLQVLTRARALDSTSWILMCDQARPTEKRKGPAGIGHSMVVDPTGVIADSAGYEPETVIADIDLSNLQDIRKSIPVL

SEQ ID NO: 26498 - protein, 371 aa, Streptococcus suis 89/1591
MLRNTLGIVNIEGNNVHFGDVMKHRGVQAFGFLGRYRLIDFALSNMSNSGITEFQVYMPAEMRSTIQHVGTGKHYNINSKRGTLRLLNSATDPNSVYRHDINAFTENIHYIEKSTKDYVLVAPSYFIYSQDFSKVMDDHIATDADITVLYKNVSDAKENFIGCQTLKFGEDRRVVAFEENHGKYKNRPVSLEAYIMKRTTFIDLIKRANKVSSLYWLKDILRDTVDQYKIMGYAHRDYVACINTTASYFNTQIELIDQDTRKLLFKHDWPIHTQTSDSSPCLYGPLAEVKRSLISNGANINGQVENSVIDRDVIIEEGVVIKNSIILNGVTIKSGANIENAIIDKATKIIHPIDIKGSETSPSYLKPHQII

SEQ ID NO: 26499 - protein, 332 aa, Zea mays
MAKEPMRVLVTGAAGQIGYALVPMIARGVMLGADQPVILHMLDIPPAAEALNGVKMELVDAAFPLLKGVVATTDVVEACTGVNVAVMVGGFPRKEGMERKDVMSKNVSIYKSQASALEAHAAPNCKVLVVANPANTNALILKEFAPSIPEKNVTCLTRLDHNRALGQISERLNVQVSDVKNVIIWGNHSSSQYPDVNHATVKTSTGEKPVRELVSDDEWLNGEFITTVQQRGAAIIKARKFSSALSAASSACDHIRDWVLGTPEGTFVSMGVYSDGSYGVPSGLIYSFPVTCSGGEWKIVQGLPIDEFSRKKMDATAQELTEEKTLAYSCLE

SEQ ID NO: 26500 - protein, 332 aa, Pseudomonas fluorescens Pf-5
MNLSQQAAHLAHDHQFLGADHDDNARRTLWVVLLTVVMMAGEIVAGYLTGSMALLADGLHMATHAGALGIAAAAYGFARRNAGNRRFSFGTGKVGDLAGFASAIILGLVALGIAGESLVRLFQPTRVAFGEATLIAVAGLLVNILSAWLLGGGHDHHGHGHSHGHSHGHSHDHEHHEHHEHHEHHEHHQSHRAGGDNNLRSAYVHVLADALTSVLAIAALLAGRYLGWVWLDPAMGIVGALVIARWSYALIKSSAAVLLDASDEQVAGQIRASVEGPGDASIVDLHVWQVGPGARAAIVSVVARASLSAETVRARLAALPGLSHLTLELRSV

SEQ ID NO: 26501 - protein, 366 aa, Triticum aestivum
MPGLVPSSSSAHLLSRSLAAARTLSAAAGYSSSPSPSSSVKMARSALDEVTDTGAFDRTPSTFRSFVSRDASARFPAVAGRYHLYVSYACPWASRCLAYLKLKGLDHAISFSSVKPIFERTRESDDHLGWVFPATADEVPGASPDPFNGAKSVRDLYEIASTNYTGKPTVPVLWDKQLKTVVNNESSEIIRMLNAEFNDIAENPGLDLNPAHLQGSIDEVNGLVYDAINNGVYKCGFAKKQGPYDEAVTRLYEALDKCEEILGKQRYMCGNQLTEADVRLFVTLIRFDEVYAVHFKCNKKLLREYPNLFNYTKDMYQIPGISSTVNMEHIRKHYYGSHPSINPYGIIPQGPNIDYNAPHDRERLFL

SEQ ID NO: 26502 - protein, 300 aa, Arabidopsis thaliana
MLKVPEHQVAGHIASDGKLGPLVDDQGRFFKPLQGDSRGEHEAKFYESFTSNMKVPDHIHRYFPVYHGTQLVEASDGSGKLPHLVLDDVVSGYANPSVMDVKIGSRTWYPDVSEEYFKKCIKKDRQTTTVSLGFRVSGFKIFDHQESSFWRAEKKLVLGYNADGARLALRKFVSSNSPADSNLTPNCAFASEVYGGCNGILAQLLELKDWFETQTLYHFNSCSILMIYENESILMQGGDDAPAPRAQVKLVDFAHVLDGNGVIDHNFLGGLCSFIKFIKDILQSVEKHDETDTSLLENGR

SEQ ID NO: 26503 - protein, 370 aa, Salmonella enterica subsp. enterica serovar Paratyphi A str.
MVRTLLRLVARWCGIAISKTGGSEMNDKIRVGLIGYGYASKTFHAPLIMGTPGLELAAVSSSDETKVKADWPAVSVVSEPRHLFNDPHIDLIVIPTPNDTHFPLAKAALEAGKHVVVDKPFTVTLSQARELDALARSTGRVLSVFHNRRWDSDFLTLKALLADGVLGEVSLFESHFDRFRPQVRDRWREQGGPGSGIWYDLAPHLLDQAIQLFGLPVSMTVDLAQLRPGAQSTDYFHAILSYPQRRVILHGTMLAAAESARYIVHGSRGSYVKYGLDPQEERLKNGERLPQEDWGYDMRDGVLTLVEGETRKEENWLTLPGNYPAYYAAIRDALNGNGENPVPASQAIQIMELIELGMESAKHRATLCLA

SEQ ID NO: 26504 - protein, 445 aa, Triticum aestivum
  misc_feature (246)..(246): Xaa can be any naturally occurring amino acid
  misc_feature (272)..(272): Xaa can be any naturally occurring amino acid
  misc_feature (302)..(302): Xaa can be any naturally occurring amino acid
  misc_feature (397)..(397): Xaa can be any naturally occurring amino acid
  unsure (1)..(445): unsure at all Xaa locations
MLPTMEVPLVGGSSSTEETGCPKESLVVIEVKKQLYLAGPLITGCLLQNVVQMISVMFVGHLGELALSSASIATSFASVTGFSLLSGMASSLDTLCGQAFGARQYHLLGIYKQRAMFVLTLVSVVVAVVWAYTGQILLLFGQDPEIAMGAQSYIRWMIPSLFAYGLLQCHVRFLQTQNIVLPVMASAGVTALSHVLVCWLLVYKLGLGNKGAALANGISYLANVSILAIYIRVSPSCRSTWTDLSXEAFHDILSFMKLAVPSALMVCLEWWXSFELCLLLSPDLPHTKLEKHRWCICARTQXSAAFMPFRLGAAAISTRVSNELGAGRPEAARLATRVIMVLGLATGVSLGLIMLLGRNLWGYAYSNENEVVEYIARMMPLLSVTFIFDDLQCVLSXGLWFGIICGIVVQMLLLLGITMRTNWDKEALKAKNRVFSSSLPLDMTT

SEQ ID NO: 26505 - protein, 57 aa, Zea mays
MKEGTANCIDILIAIILPPLGVFLKFGCKVEFWLCLLLTFLAYLPGIIYAIYVITKD

SEQ ID NO: 26506 - protein, 538 aa, Corynebacterium glutamicum ATCC 13032
MAKLIAFDQDAREGILRGVDALANAVKVTLGPRGRNVVLDKAFGGPLVTNDGVTIARDIDLEDPFENLGAQLVKSVAVKTNDIAGDGTTTATLLAQALIAEGLRNVAAGANPMELNKGISAAAEKTLEELKARATEVSDTKEIANVATVSSRDEVVGEIVAAAMEKVGKDGVVTVEESQSIETALEVTEGISFDKGYLSPYFINDNDTQQAVLDNPAVLLVRNKISSLPDFLPLLEKVVESNRPLLIIAEDVEGEPLQTLVVNSIRKTIKVVAVKSPYFGDRRKAFMDDLAIVTKATVVDPEVGINLNEAGEEVFGTARRITVSKDETIIVDGAGSAEDVEARRGQIRREIANTDSTWDREKAEERLAKLSGGIAVIRVGAATETEVNDRKLRVEDAINAARAAAQEGVIAGGGSALVQIAETLKAYAEEFEGDQKVGVRALATALGKPAYWIASNAGLDGSVVVARTAALPNGEGFNAATLEYGNLINDGVIDPVKVTHSAVVNATSVARMVLTTEASVVEKPAEEAADAHAGHHHH

SEQ ID NO: 26507 - protein, 402 aa, Sinorhizobium sp. BR816
MVRSRIVITGLGGICGMGVNVPSIWEAMRAGRSAIREIMTAPLRQSRIRTGAEIKQLPEVEFDRKRLSTMDRYSLLAVLAAGEALRQSGIVVDKTNTDRIGAVVGTAIFGAETLEENYRGLFISGKSHTNVFAVPRAMPGAPASQVSMVHGVRGPVFGVTSACSSSNHAFISAIDQLRLGRADVMLAGGTDAPLAYGVLKAWELRAVARETCRPFSADRNGLVLGEGAAMAVLETYEHAVARGAPILAELAGTGMSADAFDIVAPTVEGPVAALKACLADAGLLPEDIDYVNAHGTGTRYNDRLETQAIRRVFGNHADILSVSSTKSMHAHCMGASGALELIACVMALREGIIPPTANYREKDPECDLDVTPNTARERKVRAAISNFFFFGGTNAVLAITPA

SEQ ID NO: 26508 - protein, 392 aa, Noccaea fendleri
MESSSPHSEVNGGRSDEERRVVASKVCGEAPCGFSDAKNASGDAQERNASMRKLCIAVVLCLVFMTVEVVGGIKANSLAIMTDAAHLLSDVAAFAISLFSLWAAGWEATPRQTYGFFRIEILGALVSIQLIWLLTGILVYEAIIRLLTETGEVDGFLMFAVATFGLLVNIVMAVMLGHDHGHSHGHGHDHGNHSHDVTVTTHGHDHDHDHDHDDGHGHSHGEDKHDEAHGDVTEQLLEKPKQEKEKKKRNINVQGAYLHVLGDSIQSVGVMIGGAAIWYNPKWKIIDLICTLVFSVIVLGTTINMIRSILEVLMESTPREIDATKLEKGLLEMEEVVAVHELHIWAITVGKVLLACHVNARPEADADMVLNKVVDYIRREYNISHVTIQIER

SEQ ID NO: 26509 - protein, 534 aa, Populus tremula x Populus tremuloides
MESGVRKENNPPSSSFSLQQQPPATNPSPLRKIIVVASIAAGVQFGWALQLPLLTPYVQLLGIPHTWAAFIWLCGPISGMLVQPTVGYYSDRCTSRFGRRRPFIAAGAGFVAISVFLIGYAADIGHLSGDSLTKTAKPRAIAVFVVGFWILDVANNMLQGPCRAFLADLSGKDHKKTRTANAFYSFFMAVGNVLGFASGSYTHLYRIFPFSRTKACDVYCANLKSCFFISIALLLTLTILALSYVREKPWSPEGSSGEGGNEEEKEEEGGEAKESTPAPFFGEIVAALKNLQRPMRILLLVTCLNWIAWFPFLLFDTDWMGREVYGGDSSRNTDQLKMYDRGVRAGALGLLLNSVVLGFTSLGVEVLARGVGGVKRLWGIVNFILAICLAMTILITKVAQSNRRYTTVNGGTHLLPPPSGVKAGALALFAVMGIPQAITYSIPFALASIFSNTSGAGQGLSLGVLNLSIVISQMEVSVAAGSWDALFGGGNLPAFVVRAVAAAASGILAFTMLPSPAPDIPSNKRAATSTLAFI

SEQ ID NO: 26510 - protein, 396 aa, Thlaspi caerulescens
MESSSPHHEVNGGRSDEERRAVASKVCGEAPCGFSDAKNVSGDTKERNASMRKLCIAVVLCLVFMSVEIVGGIKANSLAIMTDAAHLLSDVAAFAISLFALWAAGWEATPRQTYGFFRIEILGALVSIQLIWLLTGILVYEAISRLLTETSEVNGFLMFAVATFGLLVNIIMAVMLGHDHGHSHGHGHDHENHSHGVTVTTHDHDPTHDHDHDHDHDDGHGHSHGEDNQDEAHGDVTEQLLEKPKQEKEKKKRNINLQGAYLHVLGDSIQSVGVMIGGAAIWYNPKWKIIDLICTLAFSVIVLGTTINMIRNILEVLMESTPREIDATKLEKGLLEMEGVVAVHELHIWAITVGKVLLACHVNVTPQADADMVLNKVVDYIRREYNISHVTIQIER

SEQ ID NO: 26511 - protein, 367 aa, Agave americana
MSSVSKIVFIFLSVCLVAVGTLSASSLAARAFFVFGDSLVDNGNNNYLATTARADSPPYGIDYPTHRPTGRFSNGLNIPDIISEHLGAEATLPYLSPDLRGQRLLVGANFASAGIGILNDTGIQFINIIRISRQMQYFEQYQQRVSALIGQAQMRRLVNRALVLITLGGNDFVNNYYLVPFSARSRQFSLPDFVRYVISEYKKILARLYELGARQVLVTGTGPLGCVPSELAQRSRDGNCDPELQRAGDLFNPQLVQILNQLNSQFGSTVFLGANTRRAHMDFISYPQRYGFITSKVACCGQGPYNGIGLCTVASNLCPNRDLYAFWDAFHPTQKANRIIVSQFMTGSNEYMTPMNVTSLLAMNDST

SEQ ID NO: 26512 - protein, 636 aa, Candidatus Carsonella ruddii
MLYNIINNIRLICIKSISKANSGHPGMPLGICDVFTIFFLNFYKINFNNLKSINKDKLIISNGHGIITNYVLLYLYNVYKIKDLINFRRFNSNTPGHPEIGNFIDASTGPLGQGIGIGIGIGLKSKKYKNKFNNFFNIFNNKVWIFCGDGCLMEGVSSESCSFCGCYNINNIILLYDSNNISIDGNVKNYFNENIKLKFISLNWNVIGPINGHCYFSIIKSLLKAKKSYFPTIIIYNTIIGFISPCKSYKENSHGNIFTKFEFLEILKNFTLTYDYVKKMFFDNKKKYLIYYKKKYKKYFFELIRIFNNIIPKINFLKLYFKYYKINLNKSTRFVCSNILKNIYAINETFGGSADLTNSNLTKNNFINSIRYKNFKNRYINYGVREFTMGLINYGLSSDKIGINYCSTFLVFSNYMYSAIRNFCLSKLKNIFIFTHDSILVGEDGPSHQPIEQLHSIRIIPRNYIFRPYNYIELILCWILILKFLNNCSSLILSRQNFKNNFIKIYNIKNIITGTYSCFYKKKIELIIVSNGSDLEICFECYFFLKKYFIIQIISLFCNKLFDKQKKIYKNKILNCKKIIFVESSNDDFWYKYKKYFTYVLNIKKFGYSSNELELKKKTNLNKKFLIKLCLFVIKL

SEQ ID NO: 26513 - protein, 340 aa, Chlamydia trachomatis D/UW-3/CX
MHPLTLNIASEETTEARVFHVIENFGNSFCIDLLKKMLLIREFEIRGEEAYLEGLVGGFYHSYIGQEAVATAAIACTGKDHWFFSSYRCHGVALLLDIPLRQLAAELLGKETGCALGRGGSMHMCGDRLPGGFGIVGGQIPLAAGAAFSMKYQNSSSISMCFIGDGAVAQGVFHETLNFVALHSLPLMLIIENNGWSMGTALHRAIAKQPIAESQAISYGLSSITLNGFDLFNSLIGFREAYHHMQQTGSPIIVEALCSRFRGHSISDPNLYRSKEEMQCLLKRDPILFAKEWLIRANVLSEDDFKDLRQTSKTAVLEAVAQARLDPEPAVATLEEGVYA

SEQ ID NO: 26514 - protein, 372 aa, Pseudomonas aeruginosa UCBPP-PA14
MRDKVTGARRWVVKIGSALLTADGRGLDRNAMAVWVEQMVALHCAGIELVLVSSGAVAAGMSRLGWVSRPSAMHELQAAASVGQMGLVQAWESSFALHGLQTAQVLLTHDDLSDRKRYLNARSTLRTLVELGVVPVINENDTVVTDEIRFGDNDTLAALVANLVEADLLVILTDRDGMFDADPRNNPDAQLIYEARADDPQLDAVAGGSAGALGRGGMQTKLRAARLAARSGGHTVIVGGRIERVLDRLRAGERLGTLLTPDRSRKAARKQWLAGHLQMRGTLVLDDGAVKAVSQDHKSLLPVGVKAVQGSFRRGEMVVCVDQGGREVARGLVNYSALEAQKILGQPTDAIEALLGYVDGPELVHRDNLVLV

SEQ ID NO: 26515 - protein, 327 aa, Caulobacter crescentus CB15
MQTVLVAGGAGYVGSHCCLALAAAGFRPVVYDDLSNGHREHVQWGPLEVGDIRDGARLDAVFAAHAPVAVLHFAARIEVGESVKNPGAFFDNNVGGTITLIEAARRAGVNAMVFSSTCATFGDPVHLPMAEDHPQAPLNPYGRSKLMVEQALADYDRYVGFKSAVMRYFNAAGADPEGRIGEWHEPETHAIPLAIQVALGQRSHFTIFGDDYDTRDGTAVRDYIHVLDLADAHVSALRRLLAGGSSDSYNLGTGTGTTVRELVDGVGRVTGKPLPVQMAPRRAGDAPVLVGDNTRAREHLGWKPSRDLDATLSSAWRWHQAQALVGR

SEQ ID NO: 26516 - protein, 394 aa, Oryza sativa
MTMPYASLSPAVADHRSSPAAANASLLPFCRSTPLSAGGGVVAMGEDAPMTARWPPAAAARLPPFTAAQYEELEQQALIYKYLVAGVPVPPDLVLPIRRGLDSLAARFYNHPALGYGPYFGKKLDPEPGRCRRTDGKKWRCSKEAAPDSKYCERHMHRGRNRSRKPVETQLVAQSQPPSSVVGSAAAPLAAASNGSSFQNHSLYPAIAGSNGGGGGRNMPSSFGSALGSQLHMDNAAPYAAVGGGTGKDLRYTAYGTRSLADEQSQLITEAINTSIENPWRLLPSQNSPFPLSSYSQLGALSDLGQNTPSSLSKVQRQPLSFFGNDYAAVDSVKQENQTLRPFFDEWPKGRDSWSDLADENANLSSFSGTQLSISIPMASSDFSAASSRSTNGD

SEQ ID NO: 26517 - protein, 237 aa, Glycine max; identical to SEQ ID NO: 1163

SEQ ID NO: 26518 - protein, 506 aa, Triticum aestivum
  misc_feature (147)..(147): Xaa can be any naturally occurring amino acid
  unsure (1)..(506): unsure at all Xaa locations
MAAIMASITSELLFFLPFILLALLTFYTSAVAKCHGLHRWSGRTKKRRPNLPPGAVGWPFIGETFGYLRAHPATSMGQFMDQHIARYGKIYRSSLFGDRTVVSADAGLNRYILQNEGRLFECSYPRSIGGILGKWSMLVLVGDPHRXEMRSISLNFLSSVRLRAGLLPEVERQTLLVLRDWLPSSSSAVFSAQHEAKKFTFNLMAKNIMSMDPGEEETERLRLEYITFMKGVVSAPLNFPGTAYWKALKSRATILGVIERKMEERLEKMNKEASSMEEDDLLGWAMKQSNLSKEQILDLLLSLLFAGHETSSMALALAIFFLEGCPKAVEELREEHLEIARRQKLRGECKLSWEDYKEMVFTQCVINETLRLGNVVRFLHRKVIRDVHYNGYDIPSGWKILPVLAAVHLDSSLYEDPSSFNPWRWKGNASGVAQNSNFMPYGGGTRLCAGSELAKLEMAIFLHHLVLNFRWELAEPDQAFVYPFVDFPKGLPIRVHRIAQEEEGEE

SEQ ID NO: 26519 - protein, 456 aa, Kluyveromyces lactis NRRL Y-1140
MSSSVQSGVITLLHTACGAGILAMPYAFKPFGLILGLSMIIFCGLCSSTGLYLQSYVSKYVPPGHASFFTLCRLTRPELSVVFDAAIAVKCFGVGVSYLVVVGDLLPQIMSTFTTHGWLLSRQFHITAVTLIIVTPLCFIKKLDSLRYTSSIAITAVGYLCVLVVFHFAVPNSEIDHLRGHVSIWKPSDVDSSMLSSFPIFVFAYTCHHNMFSIINEQSDKSLDSITKLIRIAITLAMSLYISIGALGYCTFGDHITGNIITLYPNSISSTIGRIAIALLVILAFPLQCHPARASVNHILHYFSKGNTHPPMTTTSAEQNSLLRDSELESSEQLTYECEDELIEENSANQPPVVTLEGPRFIFITSGILLFSYILAMSVTSLANVLSIVGATGSTSISFILPGIFGYKLIASEYAKSVVPPAKERILRIISLLLAIWGFIVMITSLSATIFLHATH

SEQ ID NO: 26520 - protein, 332 aa, Glycine max
MDITPTTTINNNNTTPSATTKSPENETETPTRITTPITPTTTKTSSFSNGVLKRTHHHHHLHHPIPPVVTYKECLKNHAANLGGHALDGCGEFMPSPTATAADPSSIKCAACGCHRNFHRREPEEPPIASTTTHVIEYQPHHRHHPPPPLHAAAVATRSPNSASPPPISSSYYPSAPHMLLALSAGLAAPPESTAAPAAAPTRKRFRTKFSQEQKEKMHKFAEKVGWKIQKRDEDLIHEICNEVGVDRSVLKVWMHNNKNTFAKKDNNNIVTSNDINITTKNNISTDNDANGSDVKVFENPNNDGGEDRAEDPSSNHYDGVNVVGANGSSSS

SEQ ID NO: 26521 - protein, 603 aa, Zea mays; identical to SEQ ID NO: 1155

SEQ ID NO: 26522 - protein, 435 aa, Mannheimia succiniciproducens MBEL55E
MNLREHIDNNPMSAYQWTVVIIAAIMNLLDGFDVLALAFTATAIRGDLGLSGAELGYLFSAGLLGMAAGSLFLAPLADKIGRRPLLLISVTLSALGMLGSAYSASYGALGFWRLITGLGVGGILVGTNVLTSEYSSRKWRSLAISIYASGFGIGAVLGGMFAVVLQEEYSWHAVFLAGFILTAVCLIVLLIWLPESIDFLMTQQPRNAQIRLNKITKKMGLKGQWTLPEKVLASASKLPLTQLFNKNYRKSTALIWIAFFAIMFCYYFVSSWTPALLKEAGMTTEQSVSVGMMVSLGGTCGSLLYGLLASRWKAKQMLVQFTVLSAFSVIIFILSSSILWLAMLFGILVGGFMNGCISGLYTLNPSIYAANIRSTGVGWSIGVGRIGAILAPLAAGVLLDYGWDKQSLYIGVGFVLLIAAIALSLLRIKTTLVKC

SEQ ID NO: 26523 - protein, 613 aa, Nitrosomonas europaea ATCC 19718
MNDPISRRAFLKRSGALGTFAALDWMLPIYARSDSLSVVTPTTQLSGDVINLTIARTPFRIDDHIATATTINGTVPGPLLHLREGQDITLNVTNHLDETSSIHWHGILLPPEMDGVPGISFPGIEPGATFSYRFTIRQYGTYWFHSHSGGQEQAGVYAPMIIDPIEPDPVKYDREYVIMLSDWSFSSVDSMIEKLKKQPGYFNFQKRTLGDFIQDAMRDGWRPALDDYLMWARMRMDPTDLADVTGHAYTYLMNGLTPAANWTGLFHPGERIRLRFIQVGVMTFQDIRIPGLGMTVVQADGQNVQPVEVDEFRIGPAETYDVIVEPKEERAYTIFAETLDRSGFARGTLAPRPGMAAEVPSRRPRSLRTMADMGMQHMSGVDHGNHAPGNATMGEPEEGTQHDTPDRHGEHAKEGIHGRHDRHAQPGFPDSRPVRHGTDDHGSGNQFIPDFTQSRMDEPGIGLGNDGRRVLVYTDLKSLKPYPDQREPERELEIHLTGHMERFIWSFDGEKYSDAKESILFRHGERLRWIFVNDTMMEHTMHLHGTWMYLENGAGAYLPRKHTVLVKPAERVSVAITADAPGPWAFHCHLLLHMETGMFRVVEILDAAPGTES

SEQ ID NO: 26524 - protein, 352 aa, Polaromonas sp. JS666
MSLIPVTILTGFLGSGKTTLLKRVLTEAHGQKIAVIENEFGEENIDNEILVNDTRENIIQMNNGCICCSIREDLRETLQLLAAKKRKGLLDFERVVIETTGLADPGPVAQTFFMDEEIAEQYLLDSILTLVDAKHAQVQLDDRQEARRQVGFADQIFISKSDLVAADEVKALMHRLTHMNPRAPQKTVHFGEVAIADVFDLRGFNLNAKLDIDPDFLTAEEHAAHDHHDHEHGEHCDHPSHAHEGSQGHHHHHDDDVKSFVFRSDKAFSPAKLEDFLGAVVNIYGPRMLRYKGVLNMQGTDRKVIFQGVHQLMGSDLGPAWAEGEKKNSKMVFIGIDLPKDIFVQGLEQCLV

SEQ ID NO: 26525 - protein, 929 aa, Shewanella oneidensis MR-1
MTKYSLRSWVLVLALAPTILVGILLGSYFTINRFYELEDTLIEQGSNIIEPLAIASEVGLVGNDREATKRLLAAAQLNKSTLVKSIAIFDIHNQLFVTSHYHKDFEIMRYKEALTNLQKTEIEHVGDSLILRTPIFATATPTGSEPANVDIQTDNGELLGYISVIINKERALLEQHRAAVAAFIIVLIGVQLNLLFTFRLVKNVTQPITEMVRVVAKIREGKLDARLQGNLIGELDLLKRGINAMAGSLSEYHDEMQQNIDQATSDLRETLEQIEIQNVELDLAKKRALEASRIKSEFLANMSHELRTPLNGVIGFARQLVKTPLHSSQVDYINTIERSATNLLAIINDILDFSKLEAGKMVLESMPFGLRETLGETITLISGSAQAKGLELVVDIAPNVPDNVNGDSMRVCQIINNLVGNAIKFTDSGSVLVKLELQAQTDEQVVLRCDVIDTGIGIDESQQDFLFQAFGQADSSISRRFGGTGLGLVITKRLVNQMGGQIGFTSSVDKGSNFWFTLPLGLGQFQIGDSLPLEKLQNKTVLFYEPRVLTHSVISRQLKQWDTKVTHHQHIPSLQTTLSTTEHQFDYVLLSCHGFNNPNHLVSTLIQAKAKTDCLIVLFDCQEQDMLSQFIRPNADVVLSLPVSEHQLARNMLYPPMEYDLLPPVSIAVPAARQSLTVLAVDDNFANLKLIDTLLNELVTTVIAVNSGEEAVKQAKTRTFDLIFMDIQMPGTDGISATKQIRQGSMNRNTPIIAVTAHAIAEERELILGSGMDGYLPKPIDEAALKAEINRWITRPKFTHFDLHTLNWDLCLTQANHKSGLALDMLRMLLDSLPQTVSAIEAALSQNDQVTMLSTIHKLHGASCYCGVPTTQRLCQEIESALKREARVEDLEPEILELLDELTKVESAAKQVLSQLSAEITDDQKNGLL

SEQ ID NO: 26526 - protein, 269 aa, Debaryomyces hansenii CBS767
MGRENILHYQLEHEHETDLPQGQITPPLEKKQHDMVKNLRQLNPNFPFTLLKDSTKEEFLENNQYYIDSIKHNHSNQVFELNGKGQSPHTLWIGCSDSRAGESCLSTLPGEIFTHRNIGNIVTANDFSSQGVIQFAVDVLKVKKIIVCGHTDCGGIWASMSSKRIGGVLDLWLTPIKQTRAANLALLAEYNNDPKLKARKLAELNVVLSVTALKRHPSASMALKNGDIEVWGMMYDVGTGRLTDLEIPLDEFEDLFHVHDNKEDNDFGH

SEQ ID NO: 26527 - protein, 243 aa, Zea mays
MRVAPATRTAAAAHPPSAFLLLLGCASLAIGGAAMAGHVLGGVKENPAAANSAESDGLGRFAVDEHNRRENALLEFVRVVEAKEQVVAGTLHHLTLEAVEAGRKKLYEAKVWVKPWLDFKELQEFSHKGDATAFTNADLGAKEGGHEPGWREVPVEDPVVKDAAHHAVKSIQERSNSLFPYELLEILRAHAQVVEDFAKFDILMKLKRGSKEEKIKAEVHKSLEGAFVLNQHQPAEHAESSSQ

SEQ ID NO: 26528 - protein, 643 aa, Silicibacter pomeroyi DSS-3
MRHLDLFEGSVRADCLTLMDRAAMKLDLARVAGRIRTQGRISQPMARRPTSPVASEERAGSKKVGVLSALWPFMMPYKALMAGALMALVLTASMSLALPLAVRRVVDNFRIENGDLLDVYFLAALGIAAVLALGTGIRYALVTRLGERVVADIRKAVFDRVIGMSPEFYERIMTGEVLSRITTDTTLIQSVLGSSASIALRNMLLFAGGLVLMLLTSAKLTGLVLLLVPAVLVPILVLGRRLRAISRENQDWIAASSGNASEALSAVQTVQSYTNETASRAAFAEVTETAYDVSRRRIATRAVLTVIVIFLVFSGIVGVLWMGANDVRAGVMTEGTLIQFVIYSVIMAGAVAALSEIWSELQRAAGATERLVELLNAADSVNDPVQPAALALPVQGEIAFDNVTFRYPARPDQVALDGMSLTVRPGETVAFVGPSGAGKTTVIQLIQRFYDPQSGRVLLDGQDLTTLSRADFRRHIALVPQDPVIFAASARENIRFGRPSASDAEVEEAARAAAAHEFIAALPEGYDSFVGERGVMLSGGQKQRIAIARAILRDAPVLLLDEATSALDAESERAVQQAVERLSADRTTLIVAHRLATVKKADRIVVLEAGRIVAQGTHDELVAGGGLYARLARLQFTDGLAAE

SEQ ID NO: 26529 - protein, 408 aa, Zea mays
MSPEACELTLAPRMPASQAGAGAGAEPETKGSVHPQLWYACAGPTCTVPPVGTAVYYFPQGHAEHAGAAADANLHAPPFVPCRVAGVRFMAELDTDEIFVKIRLDPLRSGEPLTDVGEAQVVNDEAGQRQPTRPVISSAKTLTKSDSYSGGSLSVRRTCAETIFPKLDKSIKRPQQLVSARDVHGVEWTFRHVYRGTPERNLLTTGWSDFVNSKKIVIGDSVVFLREEDGTIHIGLRRAERASRRNAYGRQLVRGNASGTGAAADGVLRAEDVVAAAVTLAAAGNPFEVVHYPRATAPAFCVRVATVIEALQVSWCPGLRFKMAFEAKDLSRISWFMGTVAGVGPADPARWPLSPWRFLQVTWDEPELVRNMNRLSPWQVELVATMPNLPHFAAPPTPTPPRKKPRMP

SEQ ID NO: 26530 - protein, 216 aa, Cicer arietinum
RAEFGTSRAKFWYKTDYGMFRFCIADSEHDWREGSEQYKFIEHCLSTVDRKQQPWLIFSAHRPLGYSSNSWYAMEGSFEEPMGRESLQGLWQKYKVDIAFYGHVHNYERVCPIYQNQCVNKEKTHYSGTVNGTIHIVVGGGGSHLSDFTTAPPVWSLYKDRDYGFGKLTAFNHSYLLFEYKKSSDGKVYDSFTISRDYRDVLACVHDGCEKTTLAS

SEQ ID NO: 26531 - protein, 382 aa, Brassica juncea
MESSSPHHEVNAGKAVEESTTSLASLACGEAPCGFSDLNNASGDAQERNASMRKLCIAVVLCLLFMTVEVFGGIKANSLAILTDAAHLLSDVAAFAISLFSLWAAGWEATPRQTYGFFRVEILGALVSIQLIWLLTGILVYEAIIRLLSETSGGMVPYGFLCCFGLLVNIVMAVLLGHDHGHGHGHGHGHDHHSHGVTVTTHHHGHDHGHTHGEDKHHHAHGHGDVTEQLLDKSEKRKRNINVQGAYLHVLGDSIQSVGVMIGGAVIWYKPEWKIVDLICTLVFSVIVLGTTINMIRSILEVLMESTPREIDATKPEKGLLEMDEVVAVHELHIWAITVGKVLLACHVNITPEADADMVLNKVIDYIRREYNISHVTIQIER

SEQ ID NO: 26532 - protein, 494 aa, Corynebacterium diphtheriae NCTC 13129
MTHTTQTLDDRIHELLQRIPTELFIAGQFQPAHNGATLSVTNPSDGSELATVASASEKEARAALDAAEKAQPTWAATPARERSEILRRAYDLVIEHKDDLAMIQSLELGRALPDSEAEVTYAAEFFRWFAEEAVRIRGDYRHNPTGNARIITHQQPVGPCLAITPWNFPLAMGARKLAPALAAGCTMILKPASKTPLTMLYLAQLLAEAGVPHGVVSVLPTANASVVSDLLHDARIRKLTFTGSTAVGQKLAAMAAEHSAAVSLELGGNAPYIVLDDADIDTAAQAVAVAKMRGAGQVCIAANRFLVHSSIAEEFTQRVVNIMRGFTQGPATAPGVDFGALSGDDQVSTVTTLVDDALSRGATKLLGDLPKGLPEHGSYYPATVLVDVPEDADIHCEEIFGPVVVISTFDDDDEAVARANDTKFGLAAYVFGSDLQRVLNVAERVDAGMIAVNKGALSDPAAPFGGVKESGLGREGGFEGIGEFLETKLISLPL

SEQ ID NO: 26533 - protein, 877 aa, Phaeosphaeria nodorum
MSAAIDNEDLEELSISMPHPRRGGPSTTKAVDFTTPPVAPPTVMQASKSRDSKASQRLGQYTIVKTLGEGSFGKVKLATHQVSGQKVALKIINRKRLVTRDMAGRIEREIQYLQLLRHPHIIKLYTVITTPTEIIMVLEYAGGELFDYIVNNGRLQEDKARKFFQQIVCAVEYCHRHKIVHRDLKPENLLLDDQYNVKIADFGLSNIMTDGNFLKTSCGSPNYAAPEVISGKLYAGPEVDVWSCGVILYVLLVGRLPFDDEYIPTLFKKIAAGNYSIPSYLSPGAVSLIKKMLMVNPVHRITIGEIRMDPWFTKDIAPYLEPPVQEFFDSGVDPHKAIDPTAIAPAIPAPVVQKLHDTVVTKLGKTMGYAEHDVQEALARDEPSAIKDAYLIVRENQMMKVNPLMTQESQLAPFLAQSPPTHHESYLGSSIPQILNSSSPPKGIPSQAQDQHERARHGSNASSQLASVRSPVSTVAILPSSLTEYHKAYMKGHPRPPFKPEHDGLPPTPDQTEEQRQISARRLKPNFRALPDTTRNRPEPMTSLPAKKPRPTKWQFGIRSRNQPAEAMLAIFKALKAMGADWEVPKIRKAGGKGGSRSPTGSHASQERSRSRSRSRSRSPGSSVSSHDSGDEKKTGSDSPTHEPLTVRNADSGEQRGRQRKHYNHTNDWGYHIPEDPWVINARFRKDGMFPPGVAHPSSTHSSRVDLANDPSGLRRRSSTNTSTTSLSHHIDSMTITDRPNSISGEDHPEADEAVYIYVSIQLYSIDREFFVVDFKCAGYERLVSNLVREVKAASSSSPQHQHEDGWDDEAGVWRRLDEGEPLPDDLAKELRDGGKGVLRERTEEVGAGRKEGEKVVTSPFPFLDVASTLILQLSGE

SEQ ID NO: 26534 - protein, 989 aa, Prochlorococcus marinus subsp. pastoris str. CCMP1986
MESMKQFKNNNVDLISNNDPLDKNRALIEDLWESVLREECPDDQANRLIQLKELSYSNKVEEYSPKNFKTEIVDIVNSMDLAESISAARAFSLYFQLVNILEQRVEEDRYIQSFTNQNVKKSHDNLDPFAPALARQNAPVTFKELFFRLRRLNVPPGKLEELLQEMDIRLVFTAHPTEIVRHTIRHKQTRVANLLQKIQVEKFLTIEDIKSLKIQLKEEIRLWWRTDELHQFKPSVIDEVDYALHYFQQVLFDAMPQLRGRISSALTENYPDVQMPTESFCTFGSWVGSDRDGNPSVTPEITWRTACYQRQLMLERYIKATSNLRDQLSVSMQWSQVSSSLLESLETDRVKFPEIYEARATRYRSEPYRLKLSYILEKLRLTHERNNLLSEGGWKLSLERESDNKNLELVEKLHYKSVDEFTYDLELIKNSLNSTDLTCEAVNKLLTQVHIFGFSLASLDIRQESTRHSDAIQELTNYLELPKQYDQMSEKDRIQWLNEELNTKRPLIPSEVNWNKSTEETFSVFKMVKRLQEEFGSRICHSYVISMSHSASDLLEVLLLAKEMGLIDQGSQKSTLLVVPLFETVEDLQRAPDVMEQLFQLDFYKSLLPKVGESFKPLQELMLGYSDSNKDSGFLSSNWEIHRAQIALQNLSSRNNILLRLFHGRGGSVGRGGGPAYQAILAQPSGTLKGRIKITEQGEVLASKYSLPELALYNLETVTTAVIQNSLVNNRLDATPEWNDLMTRLAETSRIQYRKLVHENPNLLTFFQEVTPIEEISKLQISSRPARRKKGAKDLSSLRAIPWVFGWTQSRFLLPSWFGVGTALSVELKSDPEQIELLRVLHQRWPFFRMLISKVEMTLSKVDLEVAKYYVDTLGSKENSKSFEEIFDVISKEYNLTKSLVLEITGKNKLLESDRDLRSSVNLRNKTIIPLGFLQVSLLRRLRDQTRQPPISEFIEDRIESKRAYSRSELLRGALLTINGIAAGMRNTG

SEQ ID NO: 26535 - protein, 435 aa, Oryza sativa (japonica cultivar-group)
MQARREVRTKEEQWRGEERVVESPLGSARWSPEAEIGMRVEDIWDSLDQPQLSDRDRLNSCFDAIPVASFPHTFDGAQVVEIPSDATLAEAVDILSRHRIITAPVRNVDAPDDASWIDRYIGVVEFAGIAVWLLHQSEAAAARADDLGADELAAKLGTVALEGAAAARAPDQQQSAEGAVAEAFGALPSSDLFNKTKVKDISGSFRWAPFLALQSSDTFLTMLLLLSKYRMKSLPVVDIGEGTISNVITQAAVVHMLAECAGLHWFEDWGAKSLTELGLPMIRPSRLVKVRHDEPALKAFRLMRKRGVGGIPVVDHAGKPTGSIMIKDVKHLLASSDANRDYRTLTAQEFIANARQSSGEKQMNIVTCKKEESIKEIIFKLDAEKRQRIYVVDEQGNLDGLITLRDIIAKLVYEPPGYFGDFFNGVFPLPQNSRV

SEQ ID NO: 26536 - protein, 353 aa, Caulobacter crescentus CB15
MAKAAPWPLDAWYVACTPDEIADRPLGRRICGKAMVFHRGKDDRPVALEDFCPHRGAPLSLGFVRDGELVCGYHGLTMGCEGRATAMPGQRVAAFPAIRAFPVLERYGFIWVWPGDPAQADPAKLHPLFWADSPDWAYGGGLYHIACDYRLMVDNLMDLTHETYVHATSIGQKEIDEAPVTTRLEGEEVVTSRFMEGIHAPPFWRMALRGAGLPENALVDRWQICRFSLPSHVMIEVGVALAGHGGYHAPADKKVSSVVVDFITPETETSHHYFWGMARSFAVGDAALTDTIREGQGKIFSEDLEMLERQQKNLLAYPDRKLLKLNIDAGGVRSRMAIDKAIAAETALAAQAK

SEQ ID NO: 26537 - protein, 328 aa, Xanthomonas campestris pv. campestris str. ATCC 33913
MKAPVRVAVTGAAGQIGYALLFRIASGEMLGKDQPVILQLLELSNEKAQAALKGVMMELEDCAFPLLAGMVGTDDAEVAFKDIDVALLVGARPRGPGMERKDLLLENAKIFTAQGAALNKVAKRDVKVLVVGNPANTNAYIAMKSAPDLNPKNFTAMLRLDHNRALSQLSLKLGKPVGGIEKLVVWGNHSPTMYPDYRFATSDGASIGDAINDQEWNAGTFIPTVGKRGAAIIEARGLSSAASAANAAIDHVRDWVLGSNGKWVTMGVPSDGSYGIPEGVIFGFPVTTENGQYTLVKDLPIDDFSQKYIDKTLAELEEERSGVSHLLG

SEQ ID NO: 26538 - protein, 296 aa, Rubrivivax gelatinosus PM1
MQEHLPIAAGEGEVGNTLQTYLREIRRAPLFTPDEEFAMATRARAGDFAARQQMIERNLRLVVSIAKSYLSRGLPMTDLIEEGNLGLMHAIGKFEPERGFRFSTYASWWIRQSIERAIMHQARLVRLPVHVVRELNQVLKARRALEGEAAASADGRTVRVDEIAAALGRPVTEVSELLRFAEQPTSLDAPLERQAGNGAETLGDMVADEQATDPLGHTLNHELDVLLEHGLGELSEREREVLAGRYGLHDREPETLEVLAERLGLTRERIRQIQQEALLKLKRRMARNGVNRDSIF

SEQ ID NO: 26539 - protein, 1044 aa, Arabidopsis thaliana
MLTDGSQHTYQNGETKNSKEHERKCDESAHLQDNSQTTHKKKEKKNSKEKHGIKHSESEHLQDDISQRVTGKGRRRNSKGTPKKLRFNRPRILEDGKKPRNPATTRLRTISNKRRKKDIDSEDEVIPELATPTKESFPKRRKNEKIKRSVARTLNFKQEIVLSCLEFDKICGPIFPRGKKRTTTRRRYDFLCFLLPMPVWKKQSRRSKRRKNMVRWARIASSSKLLEETLPLIVSHPTINGQADASLHIDDTLVRHVVSKQTKKSANNVIEHLNRQITYQKDHGLSSLADVPLHIEDTLIKSASSVLSERPIKKTKDIAKLIKDMGRLKINKKVTTMIKADKKLVTAKVNLDPETIKEWDVLMVNDSPSRSYDDKETEAKWKKEREIFQTRIDLFINRMHRLQGNRKFKQWKGSVVDSVVGVFLTQNTTDYLSSNAFMSVAAKFPVDAREGLSYYIEEPQDAKSSECIILSDESISKVEDHENTAKRKNEKTGIIEDEIVDWNNLRRMYTKEGSRPEMHMDSVNWSDVRLSGQNVLETTIKKRGQFRILSERILKFLNDEVNQNGNIDLEWLRNAPSHLVKRYLLEIEGIGLKSAECVRLLGLKHHAFPVDTNVGRIAVRLGLVPLEPLPNGVQMHQLFEYPSMDSIQKYLWPRLCKLPQETLYELHYQMITFGKVFCTKTIPNCNACPMKSECKYFASAYVSSKVLLESPEEKMHEPNTFMNAHSQDVAVDMTSNINLVEECVSSGCSDQAICYKPLVEFPSSPRAEIPESTDIEDVPFMNLYQSYASVPKIDFDLDALKKSVEDALVISGRMSSSDEEISKALVIPTPENACIPIKPPRKMKYYNRLRTEHVVYVLPDNHELLHDFERRKLDDPSPYLLAIWQPGETSSSFVPPKKKCSSDGSKLCKIKNCSYCWTIREQNSNIFRGTILIPCRTAMRGAFPLNGTYFQTNEVFADHETSLNPIVFRRELCKGLEKRALYCGSTVTSIFKLLDTRRIELCFWTGFLCLRAFDRKQRDPKELVRRLHTPPDERGPKFMSDDDI

SEQ ID NO: 26540 - protein, 259 aa, Glycine max
MAGGSYEEAIAALTKLLSEKADLGGVAAAKIKQLTAELDTATANGSTPFNPDERIRTGFAHFKNEKYQKNPELYGELAKGQSPKFMVFACSDSRVCPSHILDFNPGEAFVVRNIANMVPPYDKTKYSGTGAAIEYAVLHLKVENIVVIGHSCCGGIKGLMSIPDDGTTASEFIEHWVQICTPAKSKVKTEANTLEFSEQCTSCEKEAVNVSLGNLLTYRFVRDAVVKKTLALKGAHYNFVKGTFELWDLDLKISNSVSV

SEQ ID NO: 26541 - protein, 204 aa, Viburnum acerifolium
YKHPVNGRKINWMKAGILESDRVFTVSPYYAEELVSGVDKGVELDNFIRKTGITGIVNGMDTQEWNPATDKYVGVKYDITTVMDAKPLLKEALQAEVGLPVDRNIPLIGFIGRLEEQKGSDILAAAIPKFIEQNVQIVVLGTGKKYMEKQLEQLEILYPDKARGVAKFNVTLAHMIIAGADFMMIPSRFEPCGLIQLHAMRYGT

SEQ ID NO: 26542 - protein, 162 aa, Triticum aestivum
CRAIMVARQGPELQRYSASRGGRMVVGSIPYRVRDDNGEVEVLVICSRKKGASAGVLFPKGGWELDESMDEAARREALEEAGVRGETGPSLGRWCYQSRSYEATYEGYMFPLRVTDELERWPEMSGRGRTWVTVQDAMDRCPHLWMREALQRFADRVADAAL

SEQ ID NO: 26543 - protein, 469 aa, Brassica napus
  misc_feature (256)..(256): Xaa can be any naturally occurring amino acid
  unsure (1)..(469): unsure at all Xaa locations
MQALQSSSLRASPPNPLRTPSNRQSHQITNARPTTRRSFISASASVSAPKRETDPKKRVVITGMGLVSVFGNDVDAYYEKLLSGESGISLIDRFDASKFPTRFGGQIRGFSSEGYIDGKNERRLDDCLKYCIVAGKKALESANLGGDKLNTIDKQKAGVLVGTGMGGLTVFSDGVQALVEKGHRRISPFFIPYAITNMGSALLAIDLGLMGPNYSISTACATSNYCFYAAANHIRRGEADMMVAGGTEAAIIPIGXGGFVACRALSQRNDDPQTASRPWDKQRDGFVMGEGAGVLVMESLEHAMKRGAPIVAEYLGGAVNCDAHHMTDPRADGLGVSSCIESCLEDAGVSPEEVNYINAHATSTLAGDLAEINAIKKVFKSTSGIKINATKSMIGHCLGAAGGLEAIATVKAINTGWLHPSINQFNPEPAVDFDTVANEKKQHEVNVAISNSFGFGGHNSVVAFSAFKP

SEQ ID NO: 26544 - protein, 204 aa, Viburnum cinnamomifolium
YNKPVKGRKINWMKAGIIESDRVFTVSPYYAEELVSGVDKGVELDNIIRKTGITGIVNGMDTQEWNPATDKYVDVKYDITTVMDAKPLLKEALQAEVGLPVDRNIPLIGFIGRLEEQKGSDILAAAIPKFIERNVQIVVLGTGKKYMEKQLEELEILYPDKARGVAKFNVALAHMIIAGADFMMLPSRFEPCGLIQLHAMRYGT

SEQ ID NO: 26545 - protein, 204 aa, Viburnum clemensiae
YDKPVKGRKINWMKAGILESDRVFTVSPYYAKELVSGVDKGVELDNFIRKTGITGIVNGMDTQEWNPATDKYVGVKYDISTVMDAKPLLKEALQAEVGLPVDRNIPLIGFIGRLEEQKGSDILAAAIPKFIEQNVQIVVLGTGKKYMEKQLEQLEILYPDKARGVAKFNVALAHMIIAGADFMMIPSRFEPCGLIQLHAMRYGT

SEQ ID NO: 26546 - protein, 188 aa, Guillardia theta
MGRRPWKCYRIVKNKPYPKSRYCRGVPEPKIKLYDLGNKSCDEKSLPLCVHLISDDFQQISSESIESARVACNKYLTTKVGKDLFHLKIRIHPFHVIRINKMLSCAGADRLQSGMRGAFGKPCGLTSRVTKNQVLISVRSKSSKAYEVIESLRRAKFKFPGKQKIIISQKWGFTFISKINYINYINNS

SEQ ID NO: 26547 - protein, 307 aa, Staphylococcus epidermidis ATCC 12228
MNKNKVIVIGSTNVDKFLNVKRFPKPGETLHINQAQKEFGGGKGANQAIAASRLAADTTFISKVGKDGNANFILEDFKKAGIHTQYILTSESEETGQAFITVDEAGQNTILVYGGANMTLSATDVEMSADAFIGADFVVAQLEVPFEAIEQAFKIARKQNITTVLNPAPAIELPKSLLELTDIIIPNETEAELLTGISINNESDMKETATYFLDLGISAVLITLGEQGTYCAYQEQYKMIPACNVKAIDTTAAGDTFIGAFLSELNKDLSNIESAIRLANQASSLTVQRKGAQASIPTRKEVEAEYN

SEQ ID NO: 26548 - protein, 204 aa, Viburnum cordifolium
YDKPVKGRKINWMKAGILESDRVFTVSPYYAEELISGVDKGVELDNIIRKTGITGIVNGMDTQEWNPATDKYVGVKYDITTVMDAKPLLKEALQAEVGLPVDRNIPLIGFIGRLEEQKGSDILADAIPKFIEQNVQIVVLGTGKKYMEKQLEELEILYPDKARGVAKFNVALAHMIIAGADFMMIPSRFEPCGLIQLHAMRYGT

SEQ ID NO: 26549 - protein, 513 aa, Triticum aestivum
HDRTSLYKKAGWYRSGIPGISSTHASAHASGGANSGYWTTNSGAPVWNNNNALTVGQRGPILLEDYHLIEKLAQFDRERIPERVVHARGASAKGFFEVTHDVSQLTCADFLRAPGVQTPVIVRFSTVVHERGSPETLRDPRGFAVKFYTREGNFDLVGNNMPVFFIRDGMKFPDMVHAFKPSPKTNMQENWRIVDFFSHHPESLHMFTFLFDDVGIPLNYRHMDGFGVNTYTLISRDGKAHLVKFHWKPTCGVKCLLDDEAVTVGGTCHTHATKDLTDSIAAGNYPEWKLFIQTIDADHEDKFDFDPLDVTKTWPEDIIPLQPVGRMVLNKNIDNFFAENEQLAFCPAITVPGIHYSDDKLLQTRIFSYADTQRHRLGPNYLMLPVNAPKCAHHNNHHDGLMNFMHRDEEVNYFPSRFDPTRHAEQYPIPPRVLSGCREKCIIEKENNFKQAGERYRSFDPARQDRFLQRWVDALTDARVTHEIQGIWVSYWSQCDTSLGQKLASRLKIKPSM

SEQ ID NO: 26550 - protein, 565 aa, Yersinia pestis KIM
MELEYESKRPLYIPYAGPILLEFPLLNKGSAFTNDERNHFNLHGLLPEAVETIEEQAERAYRQYQDFKNDDDKHIYLRNIQDTNETLFYRLLEAHLSEMMPIIYTPTVGEACEHFSDIYRRARGLFISYPNREHIDDMLQNATKQNVKVIVVTDGERILGLGDQGIGGMGIPIGKLSLYTACGGISPAYTLPVVLDVGTNNPQRLNDPLYMGWRHPRISGDEYYAFVDEFIQAVKRRWPNVLLQFEDFAQKNATPLLNRYRDELCCFNDDIQGTAAVTLGSLIAASHAAGSQLRDQTVTFLGAGSAGCGIAEQIIAQMMSEGLSEIQARARIFMVDRFGLLTDKLPNLLDFQSKLVQKSDDLHHWNLHNDAISLLDVVRNAKPTVLIGVSGQPGLFTEELIREMHSHCARPIVMPLSNPTSRVEARPEDIINWTDGAALVATGSPFPPVSYKEKLYPIAQCNNSYIFPGIGLGVLASGASRVTDGMLMAASRALAESSPLARHGEGALLPNIDDIQAVSKAIAMRVGQAAQLQGVAIVTSEEALSKAIEHNYWQPQYRSYKRTSF

SEQ ID NO: 26551 - protein, 463 aa, Pseudomonas fluorescens Pf-5
MQQTLNTQLLIIGGGPGGYVAAIRAGQLGISTILVEGQSLGGTCLNIGCIPSKALIHVAEQFHQTRHHSQGSALGIEVAAPTLNIGKSVEWKDGIVDRLTTGVAALLKKNKVQVIQGWARVIDGKTVEIEGADTRIQCEHLLLATGSKSVNLPMLPIGGPIISSTEALAPKTLPKRLTVVGGGYIGLELGIAYRKLGVEVSVVEAQERILPAYDGELTQPVLDSVKQLGIKLYLKHSVLGFDAASSSLQVREPNGDTLNLATDQVLVAVGRKPNTQGWNLESLNLDMNGAAIKIDHRCQTSMRNVWAIGDLSGEPMLAHRAMAQGEMVAELIAGKHREFNPAAIPAVCFTDPELVVVGKTPDEARAAGLDCIVSSFPFAANGRAMTLESKNGFVRVVARSDNHLIVGWQAVGVGVSELSTAFGQSLEMGARLEDIGGTIHAHPTLGEAVQEAALRALGHALHL

SEQ ID NO: 26552 - protein, 231 aa, Arabidopsis thaliana
MDQQDHGQSGAMNYGTNPYQTNPMSTTAATVAGGAAQPGQLAFHQIHQQQQQQQLAQQLQAFWENQFKEIEKTTDFKKHSLPLARIKKIMKADEDVRMISAEAPVVFARACEMFILELTLRSWNHTEENKRRTLQKNDIAAAVTRTDIFDFLVDIVPREDLRDEVLGSIPRGTVPEAAAAGYPYGYLPAGTAPIGNPGMVMGNPGGAYPPNPYMGQPMWQQQAPDQPDQEN

SEQ ID NO: 26553 - protein, 248 aa, Arabidopsis thaliana
MYGKRPFGGDESEEREEDENLFPVFSARSQHDMRVMVSALTQVIGNQQSKSHDNISSIDDNYPSVYNPQDPNQQVAPTHQDQGDLRRRHYRGVRQRPWGKWAAEIRDPKKAARVWLGTFETAESAALAYDEAALKFKGSKAKLNFPERVQLGSNSTYYSSNQIPQMEPQSIPNYNQYYHDASSGDMLSFNLGGGYGSGTGYSMSHDNSTTTAATTSSSSGGSSRQQEEQDYARFWRFGDSSSSPHSGY

SEQ ID NO: 26554 - protein, 445 aa, Pseudomonas aeruginosa UCBPP-PA14
MTQSVDAFLERLKRRDPDQPEFHQAVEEVLRSLWPFLEANPHYLEAGIIERIVEPERAILFRVPWVDDQGRVRVNRGYRVQMSSAIGPYKGGLRFHPSVNLGVLKFLAFEQVFKNSLTTLPMGGGKGGSDFDPKGKSDAEVMRFCQSFMSELYRHVGADLDVPAGDIGVGAREIGYLFGQYKRLSNQFTSVLTGKGLSYGGSLIRPEATGFGCVYFAQEMLKDRGRGFDGQRVAISGSGNVAQYAARKVMEMGGKVISLSDSEGTLYAEAGLSDEQWEYLMELKNVRRGRIREMAEQFSLQFLEGRRPWGLACDIALPCATQNELDAEDARRLLANGCVCVAEGANMPSTLEAVDLFLEAGILYAPGKASNAGGVAVSGLEMSQNAMRLRWSEGEVDTKLHGIMQSIHHACLLYGEEQGRVNYVKGANIAGFVKVADAMLAQGVV

SEQ ID NO: 26555 - protein, 388 aa, Glycine max
MALAGSVVELQASSVKKKTAVSRSWILLDHYGKGTVLDADKYAIMRLVQIHARDLRILDPLLSYPSTILGREKVIVLNLEHIKAIITADEVLLRDPTDDDVVPIVEELRRRLPKVSAAEQGQGEEEACAQDGEGGEENEFPFEIRALEVLFEAICSFLDARTRELETSAYPALDELTSKISSRNLDRVRKLKCAMTRLTIRVQKIRDELENLLDDDDDMADLYLSRKLAASSSPTSSSDAPYWLYGSPNTGSKRHKSSRASGTTVQRENDVEELEMLLEAYFMQIDGTLNKLATLREYIDDTEDYINIQLDNHRNQLIQLELFISAGTVCMSLYSLVAAIFGMNIPYTWKAPGHEHVFKWVVIFGGMVCASLFLSIVSYARRKGLVGS

SEQ ID NO: 26556 - protein, 201 aa, Escherichia coli CFT073
MALHDENVVWHSHPVTPQQREQHHGHRGVVLWFTGLSGSGKSTVAGALEEALHKLGVSTYLLDGDNVRHGLCSDLGFSDADRKENIRRVGEVANLMVEAGLVVLTAFISPHRAERQMVRERVGEGRFIEVFVDTPLAICEARDPKGLYKKARAGELRNFTGIDSVYEAPESAEIHLNGEQLVTNLVQQLLDLLRQNDIIRS

SEQ ID NO: 26557 - protein, 238 aa, Lycopersicon esculentum
MADPDTTRTVVGIIGNVISFFLFLSPGPTFVQILKAKSVMEFKPDPYIATVLNCAVWVFYGMPFVHPDSLLVITINGFGLAIELLYVSIFFIYSDWSKRQKIIIALVIEAIFMAILIFVTLTFLHGTKDRSMLIGIVAIVFNIIMYTSPLTVMKKVITTKSVKYMPFYLSLANFANGIVWACYALLKFDPYILIPNGLGSLSGLVQLILFAAFYRTTNWDEDEKEVELSTSKSNKSDV

SEQ ID NO: 26558 - protein, 456 aa, Perilla frutescens
MSLETVAAPPPATTVCVTGASGFIGSWIIMRLLERGYVVRATVRDPGDSKKVKHLIELPGADTNLTLWRADMNIEGSYDEAVQGCECVFHMATPMDFESDDPENEVIKPTVDGMLSIMRSCTKAKTVKKLIFTNSAGTLNVEEHQKPVYNEANWSDLDFIYSKKMTGWMYFVSKILAEKEAMKAAKESNINFISIIPPVVVGPFFMPTFPPSLITALSPITGNEAHYSIIKQGQFVHVDDLCEAHIFLFEHPAAEGRYICSSHDATIYDIAKMIGENWPEYHVPTEFEGIHKDIAVVSFSSKKLVDMGFSFKYTLEDMYRGAIESCREKGMLPFSTQIHTNGENKESLSNSQEKHSQINTNGENKDSILNSQINTNGENKDSILNSHDKHSQIHTNGENKESILNSQEKHSQIRTNGENKESIFNSLEKHDTDNNQEKELLPIPKEAHADRQEMQI

SEQ ID NO: 26559 - protein, 488 aa, Listeria innocua Clip11262
MTERKNLTTNQGTPVGDNQNSMTAGLKGPTLLEDYVLIEKLAHFDRERVPERVVHARGAGAHGKFVTKKSMKKYTIANFLQEEGTETEVFARFSTVIHGQHSPETLRDPRGFSVKFYTEEGNYDFVGNNLPVFFIRDAIKFPDVIHSLKPDPRTNIQDGNRYWDFFSLSPEATTMIMYLFSDEGTPASYREIRGSSVHAFKWINEEGKTVYVKLRWVPKAGIVNLSTEQAAQIQAKEFNHASRDLYEAIENGDYPEWDLYVQVLDPKDLDSFDFNPLDATKDWFEDVFPYEHVGTMTLNRNPDNIFAETESVGFNPGVLVRGMLPSEDRLLQGRLFSYSDTQRHRVGPNYLQLPINSPKAPVANNQRDGYMPFKQQTSSINYEPNSYETEPKENPAFIEQEQEIRGDISGRLIAEKPNNFGHAKEVWDRYSDAERAALVKNIVDDWSGVRDDIKIRNLRNFYQIEPEFANRVADGTGINLEEHVADLK

SEQ ID NO: 26560 - protein, 204 aa, Viburnum cylindricum
YKRPVNGRKINWMKAGILESDRVFTVSPYYAEELVSGVEKGVELDNFIRKTGITGIVNGMDTQEWNPATDKYVGVKYDITTVMDAKPLLKEALQAEVGLPVDRNIPLIGFIGRLEEQKGSDILAAAIPKFIEQNVQIVVLGTGKKYMEKQLEQLEILYPDKARGVAKFNVALAHMIIAGADFMMIPSRFEPCGLIQLHAMRYGT

SEQ ID NO: 26561 - protein, 1233 aa, Neurospora crassa
MDNRTGSRVSVRQPLGDATNRANIAAMQTSSRPKLEANAKSWKNTNRSKSNPPIITDIPLVQHHIVTIPSPVAVPDVPSMSRLRHPSSLQQMNTQASDARRVSQFSNVSSNASITRLQKTHIGPWQLGKTLGKGASARVRLARHRTTHQLVAIKIVAKSTAHVTQATSMANLDRVDYRKPSISTDGVRRMPLAIEREVAILKLIQHPNIIKLHDIWENRQDIYLVTEYVEKGDLFDFINWNGSLNEEEAIFYYRQIMSALEYCHSFNICHRDLKPENILLKADGQIKIADFGMAALHQEPTHHLKTACGSPHYAAPELLKHQPYKGSAVDIWAMGVILFAMLAGRLPFDDSDMDAMLQRARKGYYKMPSELSREAKDLIRKILVVNPLQRITMKQMWKHPLIKKYDYVDDYQQSDGQPQDVLRNADIGPIPEKEVDPQILRQLKAMWHAYSEAQIKEKLGQTKPNDQKVFYWLLYRHRHAQLENYNNDIPISKSDFHHLKPPNWGKRISTCEFTQSSRNGHGRSISKFTVISNVAEVNDSGTVRSYDPYRASQVLRNCASEASHARIIVHRNPSEPGTRSNTSNIAHSYNSYTSFGGSFRRRPRMSSQRTNTTGRLRSSMGSMGSLRSLNGTPRVRANNRSRRGVDFSSIRARDRLQARVRENVRAAPSSAAGSSVVDRRNSCRQQQRQKAAIIHSADNTLKSRDETLIWDEELQQLGYRIAMDCDEAFRSSLVGSETSVAVSGSRENSPFSLSLGASSPSPQPESPTALPLQQQAVNHSWVNRPLPPIPSIEISPVVNQTYGVNVVRPAPLRIERLSLGNCASASQTLVPDRRIVSEPVYTTPANRDPRQLPSINETASEDWTRNASTRWASPDTPSPAENNKALNYLARAENTIRVVNSPTAGPVPMPEPLNVRKVSKATPAASGESNYRKTALSNIPPDFKENCPPGTQQEEQGVGDNTVNAGAPAKKRVPSWFRRSSKDNTSFATTANTAAIHNDSTIISDIHQQLDGLESQSSARPDPYPNKKKAFSLAFWKGSKSENSSPTASTFDISTSKEGGGKKHKSSKSESRVVSGATSQSWGEGEGVGRQIEVQQNWLARLFRVKPATRHLCFSMPRRRARQEVAILLREWRQFGIKDVEVDKERNIIFARVGAQNVHNVKEVSFAIEIMMVIEHGKRNQRTQLSIARFTQEKGAASSFHKVVDAINVEFRNRGLLVTDKRKTQMMIKTLNS

SEQ ID NO: 26562 - protein, 204 aa, Viburnum davidii
YNKPVKGRKINWMKAGIIESDRVFTVSPYYAEELVSGVDKGVELDNIIRKTGITGIVNGMDTQEWNPTTDKYVDVKYDITTVMDAKPLLKEALQAEVGLPVDRNIPLIGFIGRLEEQKGSDILAAAIPKFIEQNVQIVVLGTGKKYMEKQLEQLEILYPDKARGVAKFNVALAHMIIAGADFMMLPSRFEPCGLIQLHAMRYGT

SEQ ID NO: 26563 - protein, 589 aa, Guillardia theta
MCNNNYSKDKMTLLFVNNWSLNKSKSKSTMNLKYKNNKLNTKMMAKKVVFGEESRKALVNGINSVADAVKITLGPKGRNVVLERSFGSPQVINDGVTIARDIELENPLYNTGARLLQEVASKTDLKAGDGTTTSTVLTQSIVNQGIKAVSSGVNPLALKRGIEKTCRFLIEEIKKKSKPCNGIEDIRNIATIASGGNDEIGRIISSAFEKVGQNGSTTVEESQSLQDEVDFTEGMELDRGYISPYFVKDMERQIAEFINPRILVTDKKISSVQELVPILEMIVKHKEPLVIIAEDVTGEALSTLVVNKMRGVLDVCAIKSPGFGERKKAYLEDISVLTGATFIAEEVGLTLDKIKIEQLGKANRVVVAKEACTIISDSTNQESVNKRIELIKKQIANTDSDFDREKGEERIARLGGGIARIKVGAATETELKDKKLRYEDSINSTKAAIEMGILPGGGSTLISLIRLIPSIQEKLEDEEEKLGASILAKAMEAPILQIAKNSGQEGEVVLDKCKKMEFGMGYNAATNSYENLLESGVVDPAKVTCWALENSCSIASMVLTTEALVVEIPEKNKTNSTDNMGDLPGENYM

SEQ ID NO: 26564 - protein, 204 aa, Viburnum dilatatum
YKHPVKGRKINWMKAGILESDRVFTVSPYYAEELVSGVDKGVELDNFIRKTGITGIVNGMDTQEWNPATDKYVGVKYDITTVMDAKPLLKEALQAEVGLPVDRNIPLIGFIGRLEEQKGSDILAAAIPKFIEQNVQIVVLGTGKKYMEKQLEQLEILYPDKARAVAKFNVALAHMIIAGADFMMIPSRFEPCGLIQLHAMRYGT

SEQ ID NO: 26565 - protein, 240 aa, Corynebacterium efficiens YS-314
MTMSAAVAHPLPEPHDSSHHNRMNTLRAGVLGANDGIVSVAALLLGVIATGASDVVIFGAGIASTIAGAVSMALGEYVSVSSQKDTEKVLIEKERRELAEDPKAEHAELAGILQSYGISDETAHRAATEISSTNPLAAHLQLELGIDDSEPTKPMAAAASSAIAFLLGALLPLLSVFIAPEGWTAVVVFVVTLITLALTGALSARLAGTSVPRACARLVIGGALGLALTYGVGALFDITA

SEQ ID NO: 26566 - protein, 394 aa, Staphylococcus aureus subsp. aureus Mu50
MSEKQQILDYIETNKYSYIEISHRIHERPELGNEEIFASRTLIDRLKEHDFEIETEIAGHATGFIATYDSGLDGPAIGFLAEYDALPGLGHACGHNIIGTASVLGAIGLKQVIDQIGGKVVVLGCPAEEGGENGSAKASYVKAGVIDQIDIALMIHPGNETYKTIDTLAVDVLDVKFYGKSAHASENADEALNALDAMISYFNGVAQLRQHIKKDQRVHGVILDGGKAANIIPDYTHARFYTRAMTRKELDILTEKVNQIARGAAIQTGCDYEFGPIQNGVNEFIKTPKLDDLFAKYAEEVGEAVIDDDFGYGSTDTGNVSHVVPTIHPHIKIGSRNLVGHTHRFREAAASVHGDEALIKGAKIMALMGLELITNQDVYQDIIEEHAHLKGNGK

SEQ ID NO: 26567 - protein, 153 aa, Saccharomyces cerevisiae
MSSQTERTFIAVKPDGVQRGLVSQILSRFEKKGYKLVAIKLVKADDKLLEQHYAEHVGKPFFPKMVSFMKSGPILATVWEGKDVVRQGRTILGATNPLGSAPGTIRGDFGIDLGRNVCHGSDSVDSAEREINLWFKKEELVDWESNQAKWIYE

SEQ ID NO: 26568 - protein, 319 aa, Arabidopsis thaliana
MNGEGKVVCVTGASGYIASWIVKLLLLRGYTVRATVRNPMDTKKTKHLLTLEGASERLKLFKSDLLEEGSFDQAIEGCDGVFHTASPVSFTVTDPQTEMIDPAVNGTLNVLRTCAKVSSVKRVIVTSSTAATLSINPNDVVDETVFTDLSVYLAMKAWYGYSKTLAEETAWRFAKENGIDLVVMNPGNVIEPVLQPTLNYSVEVIVDLINGKNPSNSFYYRFMDVRDVSLAHIKAFEVPSASGRYILADPDVTMKDIQKLLHELFPDLCRVDKDNENEVGEMAYKVCVDKLKSLGIEFTPIKESLKDTVVSLKERCLLI

SEQ ID NO: 26569 - protein, 402 aa, Silicibacter pomeroyi DSS-3
MTGNISLAQGRGYLAIPGPSVMPDAVLRAMHRAAPNIYAGELVDMMPGLMADLRRVVRTAHHATIYICNGHGAWEAALSNVIAPGEVVLVPASGRFAHGWAEMAEGLGAECQVIDFGKSAPWDMDRIAEALKADTAHRIKAVLAVHVDTSSSIRNDIAGLRAVLDALGHPALLMADCIASLGCDVFEMDGWGVDVTVTASQKGLMVPPGVGFVFFNERAAAKRASMPRVSRYWDWVPRANPTDFYQYFDGTAPTHHLYGLRTALDMIHAEGIEHVWARHAVLARAIWAACSVWAEGGDLVLNVADPAHRSHAVTALRLDSGKGTALRQWTETNLGLTLGIGLGMAAPGDPAYDKFFRLGHMGHLNGQMVMGLLGGVEAGLRALDVPCGKGALEAAAEVLAAG

SEQ ID NO: 26570 - protein, 482 aa, Corynebacterium glutamicum ATCC 13032
MNANARVFILNSLAMNDPQRSPTLLWFRDDLRLSDNAALKWAADHGPVIGLFIDETINRSIGAAARWWREQSLNALAQDLSFYGVPLLRRTGNPLEILPKIVSEMEVKAVTWNRRYHQPLCEVDATLKKNLRDKGIEVHSHPGFLLTEPWEVSTATGTPYKVFTPFSKAAWEVARVHAYETVKNNVPVPSHLTGPEDVELPILEMEQPFWSTTLVKECAPGEKNASEKLFDFLEHLQDYPQARDSLARSATSKLSAHLRFGEISIHRVWAETAAIDSEGTELFLKELLWRDFAWHRLYALPHMDTQNVRMQFNRFGWSWDPSEKDKLNTPSTPLIPTKADQFHEDLAAWRAGKTGIPLVDAGMRELWATGSMHNRVRMVVASFLTKNLQIHWRHGEEWFWETLVDADPASNAFNWQWAAGSGDDASPYFRIFNPVTQAKKFDPDETYIRRWVPEYGTPSYPDPIVDLKESRQIALDAYSAIK

SEQ ID NO: 26571 - protein, 573 aa, Mycobacterium chelonae
MHDDRRIVEDRIRRFVDKRLNCAIYVDAAPLTLTAWNAPGEPVPFAEAAAQEFTEITPGTPWGPPWSTMWLHVTGTIPERWRGRSEGAPEMRVELGFTGGPGFNAEGLVYRPDGTVVKGIAPRNAFVPIDDPDAPVDFYIEAAANPDIGKHFWSPMPLGDKATSGDEALYRLGGIDLALRDLNLWGLQQDIATLDGLMHTLPEDLPRRHEILRALERMVDTVDPEDLAGTAAAGRAELAEVLARPAYASAHRITAVGHAHIDSAWLWPVRETVRKCARTFSNMVDLMDRHPDFRFACSSAQQYAWIKDKYPTLFARIKEKVAAGQFIPVGGMWVEADTNMPGAEAMARQFVAGKQFFLDEFGIDTPEVWLPDSFGYSAAMPQIVTAAGSEYFLTQKISWNSVNRMPHHTFIWEGIDGTGVFTHFPPVDTYNSDLGGGDLAHAQRNYRDSGAGTMSLVPFGYGDGGGGPTREMLAYATRKRSLEGSPTVALGTPAEFFAAAQAEYANPPRWSGELYLELHRGTYTSQANTKQGNRRSEHLLREAELWAATAAVHAGYEYPYDELEEIWKLVLLQ

SEQ ID NO: 26572 - protein, 585 aa, Bordetella parapertussis 12822
MSRAVSNQRRRFVQGLAGGGVLAGLGLWRQAAWARPGAAQPEVLSGTEFNLEIGRTPANFTGAARMATTVNGSIPAPILRWREGDTVTLRVTNRLDEDTSIHWHGILLPTGMDGVPGLSFPGIRPGETFTYRFQVRQSGTYWYHSHSGFQEQTGLYGAIVIEPRRADPVRAERDHVVLLSDWTDEDPMSVFRKLKVMPDYYNYIQPTVDNLVDDARKQGWASALGERLMWQQMRMNQTDLADVSGATYTYLANGKSPAGNWTGLFKPGERVRLRFINGSAMTYFDVRIPGLKMTVVAADGLPVRPVEVDEFRIAVAETYDVIVEPAEDRAYTIFSQSMDRSGYARATLAPREGMHAEVPALDPVQMLTMMDMGMAHDMPGMDHGAAMDHGAMGGMDHAAMGHGSGEASGGMVEVRHPYPAEHGPANSMLPDIVTTRLDDPGVGLRDNGRKVLTYADLRSMVEPEDNRAPTREIELHLTGNMDRYMWSFNGLKFSQAKPIVLKYGERVRFVLVNDTMMTHPIHLHGLWSDLESPDGNFQVRKHTISLNPAQRISYRVSADARGNWAYHCHLLYHMEAGMFRAVVVE

SEQ ID NO: 26573 - protein, 571 aa, Methanopyrus kandleri AV19
MTEDVYERIMEIARRRGFILPAFRIYGGARGFYDYGPLGALLKRKIEEKWREYYVHKEGFMEIEAPNLLIGEVFEASGHVEHFIDPMTHCSECGEFFRADHLAEEELGVDAEGMSPEELEDLIREHDLRCPECGGELAEVTEFNLMFDTNIGPKEGRTGYLRPETAQAIFIQFKDLYRWARQKLPFGVVQIGRAYRNEISPRQGVIRLREFTQAEAEVFFDPEEKEYPGFERYADEVLKFYPIEEQRKENGEMLEMSVREAVEEGMVSQPIGYFLGLTKRMLNEMGVPNEAIRSRQHLPEERAHYASDCWDVEVKLERFGWVEVVGIADRTDYDLKKHSEHSGEDLRAFRELEEPKIVYRPEPVMKELGPRFKSDAPKIAEALRRITAESEDELKGGLTVEVDGKEVEVPPECYEIVKEKVTGERFYPHVIEPSYGIDRILYCVLEHNFDPEEGVFRFPAWLAPIEVGVFPLLKRSDMVEYARRVARMLREEGFTVEYDDSGSIGRRYARADEIGVPYCVTVDHETLEDDTVTIRDRDTTEQVRVEVDELADVLRGLIDGDLEFEEAGDPV

SEQ ID NO: 26574 - protein, 409 aa, Candida glabrata CBS138
MAERLKNIGSHLLGGSQGPSVKEQHPDDVVIVAANRSAIAKGFKGSFKDVNTDYLLTVFLKEFIDTFPPQLRDNLDLIGEVTCGNVLNPGAGATEHRGAMLAAGLPYTTPFMALNRQCSSGLTAVNDIANKIKAGQIDVGLAAGVESMTQNYASSNPLGRISDELKSDKNARKCLIPMGITNENIAKGFEITREMQDEFAAASYQKASNAVQSGVFKDEILPITLPDGKVVDVDEGPRANVTAKSLGGLKPAFIKETGTTTAGNASQVSDGVAGVLLARRSVANKLKLPILGRYVAFQSVGVPPEIMGVGPAYAIPRVLQDVGITVDDVDVFEINEAFAAQALYCINKLGINLKKVNPRGGAIALGHPLGCTGARQIATILRELEKGQVGVVSMCIGTGMGAAAVFVKE

SEQ ID NO: 26575 - protein, 217 aa, Arabidopsis thaliana
MMANPPTLPISDHSGGGSQSQQPVSTPAFRTFLSRLSSSIRQSLSQRRPWLELVDRSAISRPESLTDAYSRIRRNLPYFKVNYVTIVSLVLALSLLSHPFSLLVLLCLFCAWIFLYLFRPSDQPLVVLGRTFSDRETLGVLVILTIVVVFLTSVGSLLTSALMIGFGIVCLHGAFRVPEDLFLDDQEPANTGLLSFLSGAATSAAVAAASTPASGRV

SEQ ID NO: 26576 - protein, 428 aa, Corynebacterium diphtheriae NCTC 13129
MTNPQNHDDARTSPTADQTAAFDRVENPYGNAHNVQEERLTEQSQPLGAQEPPVPLEPETSKREKRRVSIGTAVAMTLVAAIASGTLTGVYSTNRAGNSGSTTRTQVAESLRQPVSQDHPAPVEGSVEDVAAKVLPSVVSILVATRNGSAEGSGSIISEDGYVMTNNHVVAGAEQGAARISVTLNDGSEHPAELIAGDPNTDVAVIKIKDVSGLPVMKFGDSNNLTVGQQVVAVGSPLGLSATVTSGIVSALNRPVRAGGSETGQSSLIDAVQTDAAINPGNSGGPLVDATGALIGMNSVIASLSAGGKSESGSIGLGFAIPSNFARRVASQLIEKGYATQPMIGIQLISNANAKGAVIADVQPDGPGAHAGLRAGEVITKINDRYVDSADALIAAVRSSDFGQTVKLTVRGENDQNERQVDVTLTGE

SEQ ID NO: 26577 - protein, 236 aa, Prochlorococcus marinus subsp. pastoris str. CCMP1986
MAVALAGQLREGTKKSHTMAENTGFVACFLKGVVEKKSYRKLISDLYFVYEAMEEEIERLVQEEHPVIKHIGFKSLFRKETLENDLKFYFGDNWQKEINISKSAKEYVNRIHLVAKKSPELLVGHHYTRYIGDLSGGQILKKIAKKALNLDGDNGLNFYEFKNIDDEKKFKEEYSKTLNQLPINQNIADQIIDEANQAFTYNMKMFKELEGNLIAVLGKIVFNYLTKKVRKGSTET

SEQ ID NO: 26578 - protein, 710 aa, Pichia angusta
MSMRIPKAASVNDEQHQRIIKYGRALVLDIVEQYGGGHPGSAMGAMAIGIALWKYTLKYAPNDPNYFNRDRFVLSNGHVCLFQYIFQHLYGLKSMTMAQLKSYHSNDFHSLCPGHPEIEHDAVEVTTGPLGQGISNSVGLAIATKNLAATYNKPGFDIITNKVYCMVGDACLQEGPALESISLAGHMGLDNLIVLYDNNQVCCDGSVDIANTEDISAKFKACNWNVIEVENASEDVATIVKALEYAQAEKHRPTLINCRTVIGSGAAFENHCAAHGNALGEDGVRELKIKYGMNPAQKFYIPQDVYDFFKEKPAEGDKLVAEWKSLVAKYVKAYPEEGQEFLARMRGELPKNWKSFLPQQEFTGDAPTRAAARELVRALGQNCKSVIAGCADLSVSVNLQWPGVKYFMDPSLSTQCGLSGDYSGRYIEYGIREHAMCAIANGLAAYNKGTFLPITSTFFMFYLYAAPAIRMAGLQELKAIHIGTHDSINEGENGPTHQPVESPALFRAYANIYYMRPVDSAEVFGLFQKAVELPFSSILSLSRNEVLQYLASRAQRRRNAAGYILEDAENAEVQIIGVGAEMEFADKAAKILGRKFRTRVLSIPCTRLFDEQSIGYRRSVLRKDGRQVPTVVVDGHVAFGWERYATASYCMNTYGKSLPPEVIYEYFGYNPATIAKKVEAYVRACQRDPLLLHDFLDLKEKPNHDKVNKL

SEQ ID NO: 26579 - protein, 301 aa, Prochlorococcus marinus subsp. pastoris str. CCMP1986
MEKPVLISDEVNYAWNFLNYPIHTITVKPKEENPKSCAILLIHGFGASTDHWRFNIPVLSDKYEVHAIDLLGFGKSPKPTDVQYSSHLWKDQVATYVKEVIKKPTFIVGNSLGGYASLAASAELKELSAGVVLLNAAGMFSEEKVSNNSLLQKSLKTFFETFLRGNIFLQRTIFESMRRRVNIKKALNNVYKNQTNVDDYLIDSIRKPSLDPGAFNVFKSVFNPAGVQGEPFDKLFKKLKSPLLLLWGGKDPWMNTGSKRLLYKKYAPENTKEVILDAGHCPHDEVPELVNQHILDWIDSL

SEQ ID NO: 26580 - protein, 110 aa, Brassica napus
MAESIRFIRPINLKPHMMEVCNCIEPQWPADELLMKYQYISDFFIAVAYFSIPLELIYFVKKSAVFPYRWVLVQFGAFIVLCGATHLINLWTFTTHSRTVALVMTTRQVL

SEQ ID NO: 26581 - protein, 204 aa, Vibrio fischeri ES114
MTALSVIKDENVVWHQHTVTKEIRSDLKKQKPAVLWFTGLSGAGKSTIAGALESKLAELGYHTYLLDGDNVRHGLCKDLGFSDHDRQENIRRIGELSKLMADAGLIVLSAFISPHRAERQMVRELLPEGEFLEVFVNTSLDECEKRDPKGLYKKARAGEIKHFTGIDSEYQQPLSPEIDLPAGTQSIEALVEQCLEELKVRSII

SEQ ID NO: 26582 - protein, 366 aa, Exiguobacterium sp. 255-15
MKKRMLTIVSVVALIAIMIGGYFVFQQQQAKSSGSKELTYAKEETAILAGGCFWCMEPPFEELKGVKSVISGYTGGDVKNPTYNQVSAETTGHREAVLITFDPAVISYKQLLDVYWRQIDPTDPNGQFVDQGESYTTAIFYTNAEQKQIAEQSKKNLAESGIFDKKIVTPLIEAGPFYEAEAYHQDYYLKSEKKYKFYRSASERDEFINQYWNDQPKLDVPKYSKLTDDQIKAKLTDIQYKVTQEDGTEPAFDNPYHDLKADGIYVDLISGEPLFSSNDKYDSKTGWPSFSRPLEKGNIIEKSDFALGMKRMEVRSRHGNAHLGHVFNDGPEPTGLRYCMNSAALRFVPKADLEKEGYGQYASEFK

SEQ ID NO: 26583 - protein, 173 aa, Bradyrhizobium sp. BTAi1
MAEPTKLPVNTDKATAPSVQGWRPFESLRREIDRVFEDFHSGIWRTPSLFDQLPSLPRTRSFAVAPAVDVAEHDNAYEVSAELPGLDEKNVEVKVTNGVLSIRGEKQEDKEEKKKDYYVRERSFGSFERSFQIPDGVDTDKIEAVFRQGVLKVTLPKKPEVQKAAKTIDIKAA

SEQ ID NO: 26584 - protein, 264 aa, Arabidopsis thaliana
SEKCVSFLLLLLLQCHNGHTLCSTCKVRVHNRCPTCRQELGDIRCLALEKVAESLELPCKFYNLGCPEIFPYYSKLKHESLCNFRPYSCPYAGSECGIVGDIPFLVAHLRDDHKVDMHAGSTFNHRYVKSNPREVENATWMLTVFHCFGQYFCLHFEAFQLGMGPVYMAFLRFMGDEEDARSYSYSLEVGGSGRKLTWEGTPRSIRDSHRKVRDSNDGLIIQRNMALFFSGGDRKELKLRVTGKIWKEQHSPDSGLSIPNLSSS

SEQ ID NO: 26585 - protein, 385 aa, Triticum aestivum
MSLSMGACPHAWQQHHLHHRGRMWAASPAFRRQLFLLRSLAPTCADGGRASSSSLRPHLMYAAAGPVYEADAEAVVRRITPPLDRARHKGQAGKIAIIGGCREYTGAPYFAAISALKVGADLSHVFCTKDAATVIKSYSPELIVHPILEESYSVRDDERESVSSSILAEVIKWMERFDCIVVGPGLGRDSFLMDCVSNIMRHARQANIPTVVDGDGLFLITNNIGLVEDNSLAILTPNVYEYKRLVQKVLNCEVNEENASEQLTALCQKIGGVTIMRKGKADVISDGKKVTQVSTFGSPRRCGGQGDILSGSVAVFSSWARHFLLSNKQPKETSVNPMVLGCIAGSLLLRKAAALAFEKNKRSTVTTDIIEFLGQSLEDICPAGW

SEQ ID NO: 26586 - protein, 112 aa, Glycine max
  misc_feature (39)..(39): Xaa can be any naturally occurring amino acid
  unsure (1)..(112): unsure at all Xaa locations
MDSFDRKCQNSGIKGKNAEVSQRITFRTRSQLEVMDDGXWRKYGKKTVKSSPNPRNYYKCSGEGCDVKKRVERDRDDSNYVLTTYDGVHNHQTPSTAYYSQMPLLHSNHDWA

SEQ ID NO: 26587 - protein, 335 aa, Mannheimia succiniciproducens MBEL55E
MMRSLVCKEPFHLILEERAKPQPKDEEVQLKVAAIGICGTDIHAYAGNQPFFEYPRVLGHEASGVITELGKNVDKFKVGQRVALIPYVSCGKCGACLSGKTNCCENISVIGVHQDGAFSEYLTAPAKNILPIADSVDFTTAALIEPFAISAHAVRRAQITKGDDVLIVGAGPIGLGAAAIAHADGANVVIADTSEERRKHIQANIPVPTVNPINEKVEDYFNGRLPQIVIDATGNQKAMNNAVNLIRHGGRIVFVGLHKGTIEFSDPDFHKKETTLMGSRNATLEDFEKVQHLMSERKISANMMLTHTFKYDELAEIYEEKITKNQSLIKSVVLY

SEQ ID NO: 26588 - protein, 204 aa, Viburnum ellipticum
YIKPVKGRKINWMKAGILESDGVFTVSPYYAEELISGVEKGVELDNIIRKTGITGIANGMDTQEWNPATDKYVGVKYDITTVMDAKPLLKEALQAEVGLPVDRNIPLLGFIGRLEEQKGSDILAAAIPKFIEQNVQIVVLGTGKKNMEKQLEQLEILYPDKARGVAKFNVALAHMIIAGADFMLIPSRFEPCGLIQLHAMRYGT

SEQ ID NO: 26589 - protein, 447 aa, Arabidopsis thaliana
MEKRVEKRRIVLVPLPLLGHFTPMMQLGQALILKGFSIIVPQGEFNRVNSSQKFPGFQFITIPDSELEANGPVGSLTQLNKIMEASFKDCIRQLLKQQGNDIACIIYDEFMYFCGAVAEELKLPNFIFSTQTATHKVCCNVLSKLNAKKYLIDMEEHDVQNKVVENMHPLRYKDLPTATFGELEPFLELCRDVVNKRTASAVIINTVTCLESSSLTRLQQELQIPVYPLGPLHITDSSTGFTVLQEDRSCVEWLNKQKPRSVIYISLGSMVLMETKEMLEMAWGMLNSNQPFLWVIRPGSVSGSEGIESLPEEVSKMVLEKGYIVKWAPQIEVLGHPSVGGFWSHCGWNSTLESIVEGVPMICRPYQGEQMLNAIYLESVWRIGIQVGGELERGAVERAVKRLIVDKEGASMRERTLVLKEKLKASIRGGGSSCNALDELVKHLKTE

SEQ ID NO: 26590 - protein, 313 aa, Thuja plicata
MDKKSRVLIVGGTGYIGKRIVNASISLGHPTYVLFRPEVVSNIDKVQMLLYFKQLGAKLIEASLDDHQRLVDALKQVDVVISALAGGVLSHHILEQLKLVEAIKEAGNIKRFLPSEFGMDPDIMEHALQPGSITFIDKRKVRRAIEAASIPYTYVSSNMFAGYFAGSLAQLDGHMMPPRDKVLIYGDGNVKGIWVDEDDVGTYTIKSIDDPQTLNKTMYIRPPMNILSQKEVIQIWERLSEQNLDKIYISSQDFLADMKDKSYEEKIVRCHLYQIFFRGDLYNFEIGPNAIEATKLYPEVKYVTMDSYLERYV

SEQ ID NO: 26591 - protein, 312 aa, Thuja plicata
MEESSRVLIVGGTGYIGRRIVKASIALGHPTFILFRKEVVSDVEKVEMLLSFKKNGAKLLEASFDDHESLVDAVKQVDVVISAVAGNHMRHHILQQLKLVEAIKEAGNIKRFVPSEFGMDPGLMEHAMAPGNIVFIDKIKVREAIEAASIPHTYISANIFAGYLVGGLAQLGRVMPPSEKVILYGDGNVKAVWVDEDDVGIYTIKAIDDPHTLNKTMYIRPPLNILSQKEVVEKWEKLSGKSLNKINISVEDFLAGMEGQSYGEQIGISHFYQMFYRGDLYNFEIGPNGVEASQLYPEVKYTTVDSYMERYL

SEQ ID NO: 26592 - protein, 192 aa, Vibrio fischeri ES114
MTTKQPTSPPLHFISQRNLEFIPPNFEQIFFGMGCFWGAERLFWQLEGVYSTAVGYSGGVTSHPTYKEVCTGTTNHTEVVKVIFDPTIISLNTLLHSFWQKHDPTEGMRQGNDIGSQYRSAIYTTSKAQQETAKQTQQQYQAALEKQGIMRIITTEIVPLQTFYFAEEYHQQYLAKNPDGYCGLKGTGVCFI

SEQ ID NO: 26593 - protein, 204 aa, Viburnum furcatum
  misc_feature (72)..(72): Xaa can be any naturally occurring amino acid
  unsure (1)..(204): unsure at all Xaa locations
YNKPVKGRKINWMKAGILESDRVFTVSPYYAEELVSGVDKGVELDNIIRKTGITGIVNGMDTQEWNPATDKXVGVKYDITTVMDAKPLLKEALQAEVGLPVDRNIPLIGFIGRLEEQKGSDILAAAIPKFIEQNVQIVVLGTGKKYMEKQLEQLEILYPDKARGVAKFNVALAHMIIAGADFMMIPSRFEPCGLIQLHAMRYGT

SEQ ID NO: 26594 - protein, 204 aa, Viburnum japonicum
YKHPVKGRKINWMKAGILESDRVFTVSPYYAEELVSGVDKGVELDNFIRKTGITGIVNGMDTQEWNPATDKYVGVKYDITTVMDAKPLLKEALQAEVGLPVDRNIPLIGFIGRLEEQKGSDILAAAIPKFIEQNVQIVVLGTGKKYMEKQLEQLEILYPDKARGVAKFNVALAHMIIAGADFMMIPSRFEPCGLIQLHAMRYGT

SEQ ID NO: 26595 - protein, 307 aa, Triticum aestivum
  misc_feature (102)..(102): Xaa can be any naturally occurring amino acid
  unsure (1)..(307): unsure at all Xaa locations
MSMSFLSMVETELPPGFRFHPRDDELICDYLAPKVTGKVGFSGRRPPMVDVDLNKVEPWDLPVTASVGGKEWYFYSLKDRKYATGQRTNRATVSGYWKATGXKDRVVARRGALVGMRKTLVFYQGRAPKGRKTEWVMHEYRLEGAHEQASKQEDWVLCRVICKKKSGVGATPRPRNLTNIVHGTSTDTSSPPLPPLMDTTLAQLQATMNTSAAAAAAALEQVPCFSSFSNNSASNSSYLPMVTGNSNGMSYLDHGLPDFGSYLDPALNCDKKVLKAVLSQLSSMGGEVVPSMSPQMAAAVSSTWNHF

SEQ ID NO: 26596 - protein, 312 aa, Thuja plicata
MEESSRILVVGGTGYIGRRIVKASIALGHPTFILFRKEVVSDVEKVEMLLSFKKNGAKLLEASFDDHESLVDAVKQVDVVISAVAGNHMRHHILQQLKLVEAIKEAGNIKRFVPSEFGMDPGLMDHAMAPGNIVFIDKIKVREAIEAAAIPHTYISANIFAGYLVGGLAQLGRVMPPSDKVFLYGDGNVKAVWIDEEDVGIYTIKAIDDPRTLNKTVYIRPPLNVLSQKEVVEKWEKLSRKSLDKIYMSVEDFLAGMEGQSYGEKIGISHFYQMFYKGDLYNFEIGPNGVEASQLYPGVKYTTVDSYMERYL

SEQ ID NO: 26597 - protein, 402 aa, Arabidopsis thaliana
MTMMSDLSQDLLEEILSRVPRTSLGAVRSTCKRWNTLFKDRILCKAEETRDQFRFIMKKYKLCSMRFDLNGTLNEDGGTEFVDPSIKELGHFFNQVKISKVFQCDGLLLCVTKEDNIRLVVWNPYLGQIRWIESGNTNYRLFDRYAIGYDNNRKHKILRFLEYYNFNMKHRFLEYEIYDFSSNSWRVLDIAPRWEIESYQRGASLKGNTYFIAKEKIEYEEDGEFPEPADNLLCFDFTTESFGQFLPLPFQHYLYDVGALSSLGDEKLAALFQCGDTDLSEVEIWVTTLTETNTVSWNPFLKVDMEPHYGRSFMFDYYGGSFFIDEEKKLAVVFQFDESGMTRYEDATYIIGENGYVKKVRLGEAPANQGGYCFPSVCFSSYVPSLVQINQIVGFKKEREEE

SEQ ID NO: 26598 - protein, 472 aa, ASPERGILLUS NIDULANS FGSC A4
MPTLGGLLKKRRTRDSQDLSKELQAGSTTTGHTTTSPIAAEDSQSQQHHGHHGGHHFFHHNHHNHQPSNNSANSANSQNSHAAKHHQFDQSSATSNQPSDGQTASMQSPAQQPSSTSAHSNSGHHSNAASIHNIIHPSQQNTPQVSRAERTTKGKYTLDDFAIQRTLGTGSFGRVHLVQSKHNHRYYAIKVLKKAQVVKMKQIEHTNDERRMLNRVRHPFLVTLWGTWQDARNLYMVMDFVEGGELFSLLRKSQRFPNPVAKFYAAEVTLALEYLHSLNIIYRDLKPENLLLDRHGHLKITDFGFAKEVPDITWTLCGTPDYLAPEVVASKGYNKSVDWWSLGILIFEMLCGFTPFWDQGSPVKIYQNILAGRIKFPPYLHPDAVDLLSRLITSDLTKRLGNLHGGPDDIKNHPWFAEVTWDRLLRKEIDAPYVPPIRGGQGDASQYENYQEESEPYGQAGEDPHGHLFPDF

SEQ ID NO: 26599 - protein, 142 aa, Nicotiana tabacum
MKGGKSKAGADSKLGVRKKATETKKAKKAAKDPNKPKRPPSAFFVFMEEFRKTYKEKHPNNKSVAAVGKAGGDAWKKLSEAEKAPYQAKAEKRKAEYQKNMDAYNRKQAGDAEEDESDKSKSEVHDDDDEDDDGSEEEEDDD

SEQ ID NO: 26600 - protein, 188 aa, Arabidopsis thaliana
MTNYGAIPTSSHASPLVDVESLSRAKHRIKAGLATRRAWRVMFDFHSMGLPHGVSDAFTRIKTNLAYFRMNYAIVVLIVIFFSLIWHPTSLIVFTVLVVVWIFLYFLRDEPIKLFRFQIDDRTVLIVLSVLTVVLLLLTNATFNIVGALVTGAVLVLIHAVVRKTEDLFLDEEAATTETSGLTSYPST

SEQ ID NO: 26601 - protein, 334 aa, Pseudomonas aeruginosa UCBPP-PA14
MSEVANDNHAPIPVTVLTGFLGAGKTTLLKYLLQAEHGMKIAVIENEYSETPIDGQLLGVEPVQVMTLSNGCVCCSINTDLEKALFLLLERRDNGEIDFDRLVIECTGLADPAPVAQTFFADEELCQRYVLDGIITLVDAANAERHLQETIAQAQVGFADRILVSKTDLVDAATFEALGQRLQRINRRALVHVVEHGRIDLAHLLDVRGFNLNADLGPGIGLRPLRAVAAKDSSDRIGTLVLRSDTPLDLERLSEFMDDLLQWHGNSLLRYKGVLNIADEPRRLVFQGVLRLYGFDWDSEWRDDEARESVIVFIGDNLPEDSIREGFERIVEGR

SEQ ID NO: 26602 - protein, 324 aa, Zea mays
MAHNPAPSSPLVTSPDAAAPPLPAEFTKLTFRSLYIRRTGPGSREMTVDGRPSDQLGRRFVSDFPIYDGRGSGARLVARLQGVTVQIGSSHQLVSIVFEAERLKGSTLLTNGVITDGSDEWAIYGGTGVFAMATGVIRRRFLAGSNDGNSDELSSIEVFCPAFGSAQQQPNKQDSVSVTRIGVWGGGGGSAQDIPTTEPPQRLHSITVRTGFAVDSIEFTYTDRGGQRRTAGRWGGLGGNLRTIDLGDAEVVREVSGTYGTFEGATTLTSIRILTSSRTWGPWGVEDGTRFCITAPIGSSIVGFYGRSTSRLVAAIGVYLRQQL

SEQ ID NO: 26603 - protein, 224 aa, Arabidopsis thaliana
MAGGGGYGGASGKVDYVFKVVLIGDSAVGKSQLLARFARDEFSMDSKATIGVEFQTRTLSIEQKSIKAQIWDTAGQERYRAVTSAYYRGAVGAMLVYDMTKRETFEHIPRWLEELRAHADKNIVIILIGNKSDLEDQRAVPTEDAKEFAEKEGLFFLETSALNATNVENSFNTLMTQIYNTVNKKNLASEGDSNNPGSLAGKKILIPASGQEIPAKTSTCCTSS

SEQ ID NO: 26604 - protein, 403 aa, Zea mays
MATALGGGPNPTADAMEVDPPRASADEKHVATIIAGGSDAVTGHIISTTIGGKNGEPKRTISYMAERVVGTGSFGVVFQAKCIETGETVAIKKVLQDKRYKNRELQIMRSIDHCNVISLKHCFFSTTSRDELFLNLVMEFVPESLYRVLKHYKDMKQRMPLIYVKLYMYQIFRGLAYIHTVPGICHRDIKPQNILVDPLSHQVKVCDFGSAKILIKGEANISYICSRYYRAPELIFGATEYTTSIDIWSAGCVLAELLLSQPLFPGESAVDQLVEIIKVLGTPTREEIRCMNPNYTEFKFPQIKACPWHKIFHKRMPPEAIDLVSRLLQYSPNLRCSALEACAHSFFDELRESHARLPNGRPFPPLFNFKQELANAPPELVSRLLPEHARRHSGFGSLFGSGP

SEQ ID NO: 26605 - protein, 564 aa, Hanseniaspora uvarum
MSEITLGRYVFERIKQVGVNTIFGLPGDFNLSLLDKIYEVEGLRWAASLNELNAAYAADGYSRIKGLGVIITTFGVGELSALNGIAGAYAEHVGVLHIVGVPSLASQAKQLLLHHTLGNGDFDVFHRMSANISETTAMITDLAAAPAEIDRCIRTAYIAQRPVYLGLPANLVDLNVPAKLLETKIDLALKANDAEAENEVVETILALVADAKNPVILSDACASRHNVKAEVKQLIDATQFPAFVTPLGKGSIDEKHPRFGGVYVGTLSSPEVKQSVESADLILSVGALLSDFNTGSFSYSYQTKNIVEFHSDYIKIKNASFPGVQMKFVLEKLIAKVGAKIANYSPVPVPAGLPKNAPVADSTPLAQEWLWNELGEFLEEGDIVVTETGTSAFGINQTRFPTDAYGISQVLWGSIGYSVGAMVGATFAAEELDKAKRVILFVGDGSLQLTVQEIACLIRWGLKPYIFVLNNNGYTIEKLIHGPTAQYNMIQNWKQLRYLTNFGATDYEAIPVKTVGEWKKLTADPAFKKNSTIRLIEVFLPEMDAPSSLVAQANLTAAINAKQD

SEQ ID NO: 26606 - protein, 249 aa, Pseudomonas syringae pv. phaseolicola 1448A
MLLQGKIAVITGAASERGIGRATAVTFARHGARVVIIDLDESAARDAAAALGEGHLGLAANVADEKQVHEAVSKIIAHYGRIDILVNNAGITQPIKTLDIRPGDYDKVLDVSLRGTLLMSQAVIPTMRAQSSGSIVCMSSVSAQRGGGIFGGPHYSAAKAGVLGLGKAMAREFGPDQVRVNSIAPGLIHTDITGGLMQDERRHAIIDGIPLGRLGAAQDVANAALFLASDLSSYLTGITLDVNGGMLIH

SEQ ID NO: 26607 - protein, 570 aa, Neurospora crassa
MVAQQQGKFTVGDYLAERLAQVGVRHHFVVPGDYNLILLDKLQAHPDLKEVGCANELNCSLAAEGYARANGISACVVTYSVGALSAFNGTGSAYAENLPLVLISGSPNTNDPSQYHILHHTLGHPDYTYQYEMAKKITCCAVAIPRAIDAPRLIDRALRAAILARKPCYIEIPTNLAGATCVRPGPISAITDPITSDKSALEAAAKCAAEYLDGKLKPVILVGPKAGRAGSEKELIEFAEAMGCAVALQPAAKGMFPEDHKQFVGIFWGQVSSDAADAMVHWADAMICVGAVFNDYSTVGWTAVPNIPLMTVDMDHVTFPGAHFSRVRMCEFLSHLATQVTFNDSTMIEYKRLKPDPPHVHTAEREEPLSRKEISRQVQEMLTDKTSLFVDTGDSWFNGIQLKLPPGAKFEIEMQWGHIGWSIPAAFGYALRHPDRHTIVLVGDGSFQVTAQEVSQMVRFKVPITIMLINNRGYTIEVEIHDGSYNKIKNWDYAMLVEAFNSTDGHAKGLLANTAGELADAIKVAESHKEGPTLIECTIDQDDCSKELITWGHYVAAANARPPRNMSVQE

SEQ ID NO: 26608 - protein, 428 aa, Triticum aestivum
  misc_feature (378)..(378): Xaa can be any naturally occurring amino acid
  misc_feature (389)..(389): Xaa can be any naturally occurring amino acid
  unsure (1)..(428): unsure at all Xaa locations
MGEVAAELYTQDGTIDIKGNPALKKDTGNWRACPYILANECCERLAYYGMSTNLVNFMKDRMGMANAAAANNVTNWGGTCYITPLIGAFLADAYLGRFWTIASFMIIYIFGLGLLTMATSVHGLVPACASKGVCDPTPGQSAAVFIALYLIALGTGGIKPCVSSFGADQFDEHDDVERKSKSSFFNWFYFSINIGALVASSVLVYVQTHVGWSWGFGIPAVVMAIAVGSFFVGTPLYRHQRPGGSPLTRIAQVLVAATRKLGVPVDGSALYETADRESGIEGSRKLEHTEQFRFLDKAAVETQADKTATGPSPWRLCTVTQVEELKSVVRLLPIWASGIVFATVYGQMSTMFVLQGNTLDASMGPKFKIPSASLSYRXVDTLSVIGWVXPVYDRILVPGGGSGYGRARGFTSFQAMGIGLFVSSVASS

SEQ ID NO: 26609 - protein, 627 aa, Candida glabrata CBS138
MKLSYLLLAGIVAGEGNSTNNQTNWTTENHFCAMDKDLMISPSCNVTFTELNVINKSIRKNLVSLVRTDFFKYFKIDPDKQCTFWDNNDGLCFSRDCMVDVVTDWDSLPEIWQPEVLGGLDEAQDASGSDEKEWTFLDDLCAESQQQSKPKPLLDVDDNNYCDINDFSGENAVLVDLTKNPERFTGYGGQQSSQIWTSIYGENCSPLGKDLVKSGKASQDEVSMARDVFFRFVSGLHASIGTHLSNDHLNTENGKWEPNLDLFMLRVGNFPDRVTNIYFNYAVIAKSLWKIKPYLSRIEFCNDYDDPVKSKILSIVSKLDSSIFNEDLLFQNDLSSSLKNEFRARFKNVTKIMDCVHCDRCKLWGKVQTTGMATSLKILFDLDEADESSKQKFVDKLTKYELIALFNTFDKLSESVEYINNFEKLYKRREGGDSYTNFFQNNFFKILEKMKKGWSTINDSVSNNKEYNNSAQNSESISDPSEESMTSLVKDAVEEVKNTTKSSLSDNDEFLTAKLSENNENIEENKLEDKLNEQEAFADLKMPIRKKKLTKKKSNGTLDIWINAWHTETHNVMEAIKFILRSYIDLPRNLWRLTIVTVNKLWNNFVGVANYVSEEPGEEIIYDLDFQ

SEQ ID NO: 26610 - protein, 555 aa, Lactobacillus plantarum WCFS1
MQKNWWQKEVFYQIYPASFKDANNDGIGDLRGIIQMLPRLKQLGITTIWLSPIYQSPMVDNGYDISDYQAIDSRFGTMADFDELMEVTKRLGLKVILDLVINHTSDQHVWFQSAIKSPTSPYRDFYIIRRGAHGNPPNNWRSNFGKGSSWTLLPGSQDEYYHHVFSKQQPDLNWENPALRKRIYQMINWWLAKGVAGFRIDAITFIKKDQDFASISPDGVDGLGKVKRKAENRPGIEKFLAELNTATFKPANAVTVGEASGVSYDQLGQFIGKKGYFSMIFDFHYADIDIASGSEWYRRVKWTPTDLRRAIFKSQLAIQNVGWGANFFENHDQPRSIDKYIQTPVYRNEIGAKALALLYFNLRGCPFIYQGQELGVTNARRDSITMFNDLSSHDNYDRAIEEGYSASEALAFVNARSRDNARLPYPWDDSVNQGFNQGAKPWITPKQSHDRVNWQSEQLDSNSVWHFYQSLIKLRQISNLSQDLIVGDFRPITCDCDQVIAYQRGRRVQVYVNLSAKRLLLTLPNGRPRLNNYAHYRLNTLEPYQAILFEVNSNE

SEQ ID NO: 26611 - protein, 421 aa, Ralstonia eutropha JMP134
MDTVMAGRASASDLAAVGLGGSIYITVYISLMGVLQALAPIAGQLYGAGRSDEIGSEVRQAAWLGLALSVPGVLLLAFPEPLLAFAKAPPELVGKASQYLHIGAFGLPAALGFRIYSALNNALSRPVMVTMLQIVGLALKVPLNAWFINGGFGVPAMGGPGCALASTLISWTWCIAGLLILRYSAVYRSLKIFSAWSWPVATQLRALLRLGVPMGLTYLIEITSFTLMSIFITRMGTVMLAGHQIIANLGAVAYMLPLSLAIATSTLVAQSIGARDMAGASRLAWRGICLAAALAMLTGCLLWLLRETVLHAYTKDGAVVAAALPLVLFIAFYQAFDAVQVMTAFILRAYKIALIPTLIYAGSLWGIGIGGGYVLGFGLIDTLPPFTRGASGFWIANSASLAVAGFFLVRYFMRISAAERH

SEQ ID NO: 26612 - protein, 445 aa, Glycine max
MDKAIQRQRVLLDHLQPISSSSNFSSQTHQSTDLSASLCFAKNSSHGQIGGSDDDVVIVAAYRTAICKAKRGGFKDTLPDDLLATVLKAVIEKTNVNPAEVGDIVVGTVLAPGSDRGIECRMAAFYAGFPETVPLRTVNRQCSSGLQAVSDVAAYIKAGFYEIGIGAGLESMTVDRVNRLRNINPKVETFAEARDCLLPMGITSENVAQRYGVTRLEQDQAAVESHQRAAAATAAGKFKEEIIPVSTKFVDPKTGVEKKIVVSVDDGIRPNTNLVDLAKLKPAFQKDGTTTAGNASQISDGAAAVLLMKRRVAVQKGLPILGIFRSFAAVGVDPAVMGVGPAVAIPAAVKSVGLELGNIDLFEINEAFASQYVYCLKKLGLDPRKVNVNGGAIALGHPLGVTGARCVATLLNEMKRRGKDCRYGVISMCIGSGMGAAAVFERGDF

SEQ ID NO: 26613 - protein, 513 aa, Pseudomonas aeruginosa UCBPP-PA14
MNPSLNAFRPGRLLVAASLTASLLSLSVQAATLTRDNGAPVGDNQNSQTAGPNGSVLLQDVQLLQKLQRFDRERIPERVVHARGTGAHGEFVASADISDLSMAKVFRKGEKTPVFVRFSAVVHGNHSPETLRDPRGFATKFYTADGNWDLVGNNFPTFFIRDAIKFPDMVHAFKPDPRSNLDDDSRRFDFFSHVPEATRTLTLLYSNEGTPASYREMDGNSVHAYKLVNARGEVHYVKFHWKSLQGQKNLDPKQVAEVQGRDYSHMTNDLVSAIRKGDFPKWDLYIQVLKPEDLAKFDFDPLDATKIWPGIPERKIGQMVLNRNVDNFFQETEQVAMAPSNLVPGIEPSEDRLLQGRLFAYADTQMYRVGANGLGLPVNRPRSEVNTVNQDGALNAGHSTSGVNYQPSRLDPREEQASARYVRTPLSGTTQQAKIQREQNFKQTGELFRSYGKKDQADLIASLGGALAITDDESKYIMLSYFYKADSDYGTGLAKVAGADLQRVRQLAAKLQD

SEQ ID NO: 26614 - protein, 333 aa, Listeria innocua Clip11262
MTKQIKVGVIGVGQMGQYHAEIYQKLPQVELVAICEFNDERRAEMAEKFQCKAYKDYHELLANTEIEAVIIVLPDNMHRDCVEEAVKHKKHILLEKPLAKELEDGKAMYELTKDYDKVFTVGFLLRFDPRFNMIKQRLDNGELGDIIHLYCRRNSPITGPKRYIGASDLSMHVMIHDIDYINWYMDSEPVKVIAKSRSVLLKEYGMNDVIYAIVTYENGAIACLEACWVLPENSPTIIDDKLELVGTKGVAYVDSCDHGVRFVSEKGVSYPDSRHWYYTNGEVSGDLAEEVMAFINNVANNTKSIITPKEAYDSLRVVDAIERSIAEGKEVSL

SEQ ID NO: 26615 - protein, 261 aa, Leifsonia xyli subsp. xyli str. CTCB07
MSRVADTIARRKGEAAGALIGYLPAGFPDLRTSVDAAVALAENGVDVIELGLPYSDPVMDGAVIQAATQRALANGFRLRDGFAAVREITSRVDAPVLVMTYWNPVMQYGVDRFADDFATAGGAGLITPDLIPDEGADWLAASERTGLDRVFLAAPSSTEARRRQTAANSRGFVYAVSTMGITGVRTDVDAAARTLVGRLREAGALSACVGLGISSAAQVAEVLDYADGAIVGSALVTALAKGGVAAAGRIAAELARGAVRG

SEQ ID NO: 26616 - protein, 128 aa, Brassica napus
  misc_feature (120)..(120): Xaa can be any naturally occurring amino acid
  unsure (1)..(128): unsure at all Xaa locations
DFDKQLRHKKHYHYISTHDVAYWSRSFIQDLERACRDHYSKRCWGVGWGLGFKLIALSPNFRRLSIEQTVSAYRRSSKRAIFLDYDGTLVPEASIVKEPSADVISALKTLCTDPDNTAFXVIGRGKVS

SEQ ID NO: 26617 - protein, 481 aa, Mesorhizobium loti MAFF303099
MALACCGATKRSGAEGRGTMDYDMLVIGSGPSGRRAAVQSAKLGKSVLVVDRGRRLGGVSVHTGTIPSKTLRETVLNLSGWRERGFYGRGYRVKQDISVGDLIERLHKTLDHEVEVLQHQFMRNTVKSARAAVKFLGPNKVSLTSDNGDYSEVGFANALIAVGTRPHRPRDVPFDKTRIFDSDEMLEIDRLPRTLTVIGGGVIGVEYATIFSALDVPVTLVEPRNSILDFVDREIVDDFIHQMRDRGMTIRLGSAVKEIRSKPEAAEVELADGRTIRSEVVLYAAGRTGNVGSLGLDVVGIDADSRGRIKVDPQTFQTNVPNIYAAGDVIGFPSLASTSMEQGRVAACHAFGVTLPPPPETFPYGIYAVPEISTVGQSEEQVRESGAAYEVGVARFRETSRGHIMGVNTGFLKLLFSIETRRLLGAHIVGEGATELIHIGQAVINLGGTVDFFVNNTFNYPTLAEAYKIAGLDAWNRMGRG

SEQ ID NO: 26618 - protein, 283 aa, Solanum tuberosum
FRTLQRFTSATLEHGMYPPFPPKPEWRALLDEISVVATEKYRSIVFKEPRFVEYFRLATPELEYGRMNIGSRPSKRKPSGGIETLRAIPWIFAWTQTRFHLPVWLGFGAAFKYALNKDKKNLNMLQDMHKKWPFFRVTADLIEMVFAKGDPGIAALYDKLLVSEDLWSFGELLRSDYEETKSLLLQVAGHKELLEGDPCLKQRLRLRDSYITTLNVCQAYTLKRIRDPTYNVTLRPHITKEYIESKPAAELVCLNPESEYAPGLEDTLILTMKGIAAGMQNTG

SEQ ID NO: 26619 - protein, 475 aa, Streptomyces coelicolor A3(2)
MSLHQGPRPSRDSDRDRRRLAVNPFHAAANPLGGMTEAPPAHRLPDSPLPPESAYRLVHDELMLDGNARLNLATFVTTWMEPQAGVLMSECRDKNMIDKDEYPRTAELERRCVAMLADLWHAPDPSTAVGCSTTGSSEACMLAGMALKRRWALRNADRYPAKDVRPNLVMGVNVQVCWDKFCNFWEVEARQVPMEGDRFHLDPQAAAELCDENTIGVVGILGSTFDGSYEPVADLCAALDALQERTGLDVPVHVDGASGAMVAPFLDEDLVWDFRLPRVASINTSGHKYGLVYPGVGWALWRDAEALPEELVFRVNYLGGDMPTFALNFSRPGAQVVAQYYNFLRLGREGYRAVQQSARDIAGSLAERVAALGDFRLLTRGDQLPVFAFTTADDVTAYDVFDVSRRLREGGWLVPAYTFPPHREDLSVLRVVCRNGFSADMADLLLADLERLLPELRRQPGPLTRDKGAATGFHH

SEQ ID NO: 26620 - protein, 414 aa, Prochlorococcus marinus subsp. pastoris str. CCMP1986
MPNFHRVVITGIGAVTPIGNNIDEYLLGLQKGSNGVSDITLFNPEQHPCKFAAEVKNLQSENFIEPKESKRWDRFSQFGVIAAKQAFNDSGLEITEDNESRIGVIIGSGVGGLLTMESQAQILSHKGPKRVSPFTVPMMIPNMATGLAAIALGAKGPSSAVSTACAAGSNAIGDSFRLLQLGKADAMICGGAEASITPLGVAGFASAKALSFRNDSPQTASRPFDAERDGFVIGEGSGILVLETFESAKKRGAKIYAEIIGYGSTCDAHHITSPSPGGTGGAEAIKLAIDDSSINLDQVDYINAHGTSTTANDKNETSAIKSIFKDRSYLIPVSSTKSMTGHLLGGSGGIEAVACILSLTHNFVPPTINYVNPDPDCDLDYVPNNARDAQIRVALSNSFGFGGHNVCLAFSKLD

SEQ ID NO: 26621 - protein, 424 aa, Bradyrhizobium sp. BTAi1
MSVRDKFGRPIVVVTGMGIVTSLGAGKAENWSKLVAGESGIRTITRFPIDGLKTTMAGTVDFVPVAPFTSTGLSERLGHMAVEEAIAQSGIGTKGDFPGPLFLAVAPVEIEWPQRLELAHEVGGTQFTYDDLLRVCGGGKFVNYHHRFLFGSVADSLSDTFGTKGSPISLSTACASGATAIQLGVEAIRRGETDVALCAATEGSVNPEGLVRFSLLSALSTQNDPPQAASKPFSKNRDGFVMAEGAGALVLESYDAAVARGAKILGVVAGCGELTDSFHRTRSSPDGKPIIGCIRKALADAGMAPEQIDHINAHGTATPENDKMEYVGVSAVFGDYTSRIPVSSNKSMVGHTISAAGAVEAIFSLLTLEHQRIPPTINFDVPDPAILFDVVGNKARDARVTTVMSNSFGFGGQNASLILTREPA

SEQ ID NO: 26622 - protein, 499 aa, Hordeum vulgare subsp. vulgare
MGEGAWWAVAAVVAALAVVALDAAVRAAHAWYWTASLGAGRRGRLPPGDMGWPLVGGMWAFLRAFKSGRPDSFIDSFARRFGRAGLYRAFMFSSPTIMATTPEACKQVLMDDDAFVTGWPKATVALIGPKSFVNMGYDEHRRLRKLTAAPINGFDALTSYLGFIDDTVVTTLRGWSERGGDGHFEFLTELRRMTFRIIVQIFMGGADERTAAELERTYTELNYGMRAMAIDLPGFAYHKAIRARRRLVAALQRVLDERRARGGKTAAGAAAPVDMMDRLIAVEDEGGRRLQDDEIIDVLVMYLNAGHESSGHITMWATVFLQENPEILAKAKAEQEAIMRSIPPGQKGLTLRDFRKMAYLSQVVDETLRFVNISFVSFRQATRDVFVNGYLIPKGWKVQLWYRSVHMDPQVYPDPKKFDPSRWEGPPPRAGTFLPFGLGTRLCPGNDLAKLEISVFLHHFLLGYKLTRKNPNCRVRYLPHPRPVDNCLAKITRLSSSHG

SEQ ID NO: 26623 - protein, 668 aa, Prochlorococcus marinus subsp. pastoris str. CCMP1986
MVAASVSLESLCVNSIRMLAVDAVNKSNSGHPGLPMGCAPMGYALWHNILNHNPNNPKWFNRDRFVLSAGHGCMLLYSLLHLTGYKSVSIEDIKEFRQWGSKTPGHPETFETEGVEVTAGPLGAGISNAVGLAIAEAHLAAKFNKKDCEIVDHYTYVIMGDGCNQEGIASEACSLAGHLKLGKLIALYDDNQITIDGRTDVSFTEDVLKRYEAYGWHVQHVEDGNHDVKGITKAIESAKSVKDKPSLIKISTIIGYGSPNKSDTAGIHGAAVGEEEASLTREFLNWEYPPFEIPEDVYSQFRQAITKGEESEKKWNLKFQEYQNTYPSEGAEFKRMIQGELPENWDSDLPSYTTDDKGLATRKHSQICLGALGPNLPELIGGSADLTHSNYTDIKGETGSFQAHSPEKRYLHFGVREHAMAAILNGIAYHDSGLIPYGGTFLVFADYMRGSMRLSALSELGVIYVLTHDSIGVGEDGPTHQPVETIPSLRAMPNMLVFRPGDGNETSGAYKLAIKNRKRPSALCLSRQAMPNQENTSIEKVALGGYIVSDCEGTPDVIFIGTGSELNLCIEASKEISKLGKKTRVISMPCVELFEEQDASYKESVLPSSIKKRVVVEAAHSFGWHKYTGLDGICITMDRFGASAPGGKCMTSFGFTVENVVKKTKDIL

SEQ ID NO: 26624 - protein, 386 aa, Prochlorococcus marinus subsp. pastoris str. CCMP1986
MERDKLLKKIDSIKDELINMRRHIHAHPELSGLENQTAILISGYLKNIGGRVTESVGKTGVVADFGPKDKGFIGLRVDMDALPIYENTNLSFSSKIDGIMHACGHDLHTCIGLGVAKIIKDLNLKFGTRIIFQPAEEIASGARWMIDDGVTIGLKQILGVHVFPDLLVGTIGIKEGILTAAAGELKVEILGKSAHGARPHEGVDAIWAASKVISGIQEAITRKLDPLDPVVVTFGKINGGNAYNILSEKVNLTGTIRCTNLKLFRDMGDWLNFNISSIARSCGAEAKVKFREIVPPVNNDYVINKVLRDSSISILGHENVIELQKPSLGAEDFAEFLNEVPGAMFRLGVSGEKGCAPLHSSKFDPDERAISVGVKVITESIVKLNN

SEQ ID NO: 26625 - protein, 204 aa, Viburnum kansuense
YKLPVNGRKINWMKAGILESDRVFTVSPYYAEELVSGVDKGVELDNFIRKTGITGIVNGMDTQEWNPATDKYVGVKYDITTVMDAKPLLKEALQAEVGLPVDRNIPLIGFIGRLEEQKGSDILAAAIPKFIEQNVQIVVLGTGKKYMEKQLEQLEILYPDKARGVAKFNVALAHMIIAGADFMMIPSRFEPCGLIQLHAMRYGT

SEQ ID NO: 26626 - protein, 308 aa, Zea mays
MAAAAGGGAVRALSQKEQDIQMMLAADVHLGTKNCDFQTERYVFKRRSDGIYIINLGKTWDKLQLAARVIVAIENPQDIIVQSARPYGQRAVLKFAQYTGAHAIAGRHTPGTFTNQLQTSFSEPRLLILTDPRTDHQPIKESALGNIPTIAFCDTDSPMRYVDIGIPANNKGRNSIGCLFWLLSRMVLQMRGTILPGHKWEVMVDLFFYRDPEEAKEQEEEAAAAPEFAAITDYQGTDQWGGDQWTSDVAAPPVAPTGADWGAAPAPVPTGEGWDQAGAPVPADGTVPPVVAPTGWDQAAPPTAQGWE

SEQ ID NO: 26627 - protein, 204 aa, Viburnum lantana
YNKPVKGRKINWMKAGILESDRVFTVSPYYAKELVSGVDKGVELDNFIRKTGITGIVNGMDTQEWNPSTDKYVGVKYDITTVMDAKPLLKEALQAEVGLPVDKNIPLIGFIGRLEEQKGSDILAAAIPKFIEQNVQIVVLGTGKKYMEKQLEQLEILYPDKARGVAKFNVALAHMIIAGADFMMIPSRFEPCGLIQLHAMRYGT

SEQ ID NO: 26628 - protein, 370 aa, Vibrio fischeri ES114
MQSFIPPKRTLMGPGPSDISPQVLQALSRPTIGHLDPLFIKMMDEVKELLKYAFQTKNDFTIAVSAPGSAGMETCFVNLVEEGEKVLVCRNGVFGERMRQNVERCGGIPIIIDDKWGEPVSLDKVAQALEENPDISVVAFVHAETSTGVLSDAKAIAQIARQYNCLTIVDAVTSLGGVPLLVDEWQLDAVYSGSQKCLSCTPGLSPVTFSDKAVAKMKSRSSVVQSWFLDQSLVLGYWSGEGKRSYHHTAPVNSLYALHESLLMLKHEGIEQAWQRHADYHQELKQGLEALGIKFIVDEEYRLPQLNAVYIPVGISDTQVREQLLEEYNLEIGAGLGELAGKAWRIGLMGYAAKKENVALCLKALSDVLK

SEQ ID NO: 26629 - protein, 474 aa, Borrelia garinii PBi
MEKKFFSGFILSFLALGIGFFIGMHYLDSNRSNIVFAEEKDNTVQALQDSFREVSKKILSSSVEVHATGVIKQSFPIPFFFFDMPEFDSERKSNWAGSGVIIGRDSQKKSLFYVVTNSHVVDKATELEVVSYDKKKHKAKLIGKDEKKDIALISFESDDATIKVADLGDSDKLEIGDWVMAVGSPFQFSFTVTAGIVSGLQRSANPNLQSRNLFIQTDAAINRGNSGGPLVNIKGEVIGINAWIASNSGGNIGLGFAIPVNNIKSTVDFFLKGKKIESAWLGISFYPLKTRDSEVLKSLGVEGKDVSAAIIASLYPGSPAVKSGLKAGDIIVKVNGVSMSVFQDVTSYISDFYAGEKVNVEILRGNVKKNIEIVLAVRPKDKELSSSKMLPGFIVYPLVEDIKAQLNLRNWIKGVVVDYIDKNLASNIKMKSGDVILSVNSQSVSNLREFYDALKIGKNTYKILRGNDSFKISF

SEQ ID NO: 26630 - protein, 204 aa, Viburnum lantanoides
YNKPVKGRKINWMKAGILESDRVFTVSPYYAEELVSGVDKGVELDNIIRKTGITGIVNGMDTQEWNPATDKYVGVKYDITTVMDAKPLLKEALQAEVGLPVDRNIPLIGFIGRLEEQKGSDILAAAIPKFIEQNVQLVVLGTGKKYMEKQLEQLEILYPDKARGVAKFNVALAHMIIAGADFMMIPSRFEPCGLIQLHAMRYGT

SEQ ID NO: 26631 - protein, 229 aa, Zea mays
MAVSFANLNTEAGLKKLDEYLLTRSYITGYQASKDDLAVYTSFSSAPSSKYINVARWFNHIDALVRLSGITAEGQGVKVESSAVPSAPTPDVAEAQAPAAEEEDDDDVDLFGEETEDEKKAAEERAAAAKASGKKKESGKSSVLLDVKPWDDETDMAKLEEAVRSVKMEGLLWGASKLVPVGYGIKKLQIMMTIVDDLVSVDTLIEDYLCAEPVNEYVQSCDIVAFNKI

SEQ ID NO: 26632 - protein, 364 aa, Glycine max
TSSIIIDFIVPSKQTLQRFVSFHLRRTMSEAPPPPTADASPPPYWCYHCEKRVSVETLANLPDVVRGECKNGFVESMPTPSRSRSPSASSDDPYFGSQFLQVLRLIAQSARDDDASPPPPPSRSPENDFLRIELGGWDNDEENENDDDNGDEEFEEHEEAEDRSGNEDPHGGDDEDLRRRRRELLRLRIRDLATRTRSMRNRILDWAEILMGLEDNSIEFRLQLPESDRYVGNPEDYVDAAEYEALLQTLAESDGGGRRGAPPASKAALEALPTVKIASESEAVACAICKDLLGVGDAAKRLPCGHRYHGDCIVLWLSSRNSCPVCRFELPTDDKEYEEERVVIAASSNSNGASSSGGGGSAIV

SEQ ID NO: 26633 - protein, 204 aa, Viburnum lobophyllum
YKHPVNGRKINWMKAGILESDRVFTVSPYYAEELVSGVDKGVELDNFIRKTGITGIVNGMDTQEWNPATDKYVGVKYDITTVMDAKPLLKEALQAEVGLPVDRNIPLIGFIGRLEEQKGSDILAAAIPKFIEQNVQIVVLGTGKKYMEKQLEQLEILYPDKARGVAKFNVDLAHMIIAGADFMMIPSRFEPCGLIQLHAMRYGT

SEQ ID NO: 26634 - protein, 243 aa, Triticum aestivum
MSAAGDRDLRELAPLEAILFDIDGTLCDSDPFHFLAFRELLQEVGFNNGVPITEEFYSANISGWHNDALAGALFPELEHAKGMEFMDRKEALFRKLAAGELKGLEGLQELCTWIEGRNLKRAAVTNAPRANAELVLSLLGLTSFFPVLVIGSECERAKPSPDPYLKALELIGASPDHTFIFEDSASGIRAGVAAGVAVVGLTTGNPEKVLRDAGASLLIEDFRDPKLMAVLQELDPAPADKQG

SEQ ID NO: 26635 - protein, 439 aa, Acinetobacter sp. ADP1
MDLVSRIENLPIGKFHYTLLWVVGLGWMFDALDTGIIAFIMTTLVKDWALTPAESGWIVSIGFIGMALGAVFSGGLADRFGRKTVFATTLLIYSLATAACAFAPNLTWLLAFRFIVGLGLGGQLPVAVTLVSEYIPAHVRGRFIVLLESFWGLGWLVAALVSYFVIPHFGWHIAFLIGGLPAIYVYVIIKKVPESIPYLINRGRIDEAHELVQQIERHAGVPVIDTIVVKPVAQKQQVSFRQLWSGRFARRSLMLWLVWFGIVFSYYGIFTWLPSLLVKQGYSVVQSFEYVLIMILAQLPGYISAAWLVERLGRKATLAGFIGACAISAYFFGQADTVFNIMVWGCLLSFFNLGAWGVLYTYTPEQYPANIRAFGAGWASAVGRMGGIAAPIVVTHMMVAHDGFHQVFMMFTLVLLAVAAVIVILGEETQGKTLESIGL

SEQ ID NO: 26636 - protein, 628 aa, Xylella fastidiosa Dixon
MTWSQDLAHKTYSIRHWADGYFEVNDAGHMVVMPLGGDGVRISLPEVVDAARAAGAKLPLLLRFPDILRHRLGKLQAAFVQAQSEWEYAGGYTAVYPIKVNQHRGVAGVLASHQGDGFGLEAGSKPELMAVLALSRQGGLIVCNGYKDREYIRLALIGRKLGLKTFIVIEKPSELRMVLEEAKTLGVLPGLGVRVRLASLGAGKWQNSGGDKAKFGLSPRQVLDVWKVLRGTEYADCLNVMHFHMGSQISNVRDIAKGMREATRYFVELSRLGAKITHVDVGGGLGIDYEGTRSRSDCSINYGLQAYASHIVQPLASACEDYDLVPPRIVTECGRAMTAHHAVLIANVTEVEAVPEGRVPGLCDDEPAVVRHMREIYGELDARPAIELFYEAQHFHAEGLAAYTLGQIDLVHRARIDDLFYAISHGVRERLSHEEKSHRPVLDELNERLVDKYFVNFSVFESIPDVWAINQIFPIVPIERLNEAPTRRGVVCDLTCDSDGTVKQYVENESLDSALPLHVLRHGEAYRIGFFLVGAYQEILGDIHNLFGDTDAVEVAVDGRGYRIAQQRCGDTTDVMLDYVGYALDEVRRVYAQRITAAGMSAAESKALSDMLEAGLTGYPYLSDVPLE

SEQ ID NO: 26637 - protein, 150 aa, Glycine max
MSRRKVREPKEENVTLGPAVRDGEHVFGVARIFASFNDTFIHVTDLSGRETLVRITGGMKVKADRDESSPYAAMLAAQDVAARCKELGITALHIKLRATGGNKTKTPGPGAQSALRALARSGMKIGRIEDVTPIPSDSTRRKSGRRGRRL

SEQ ID NO: 26638 - protein, 732 aa, Ustilago maydis 521
MSATSPSRRSSMASPSSRLKRKAAGNAIESSTGVQSAESASTSAFHLDYAPSSAAPSPLKRQITSSASRRNSHQSQALHMSDDFDPDQDAPYDEELDADADADAEYDQDYLDQDAPGEDEQDLLDAMHQNQNQSAAASPKSNTTMTPSRQSARPRRSNAPGVSYYATQPLLTFSDEEHEEEVTPSIRRRARRTQLPSTSDIDADPDDNANDESATVPTRLSSRGTRTNTPSKYKQTCAKPPRQPVHQDDRDKSAEPELSEEAKQLAKAEKESQDLQSRWTEEYFEIVEQLPLEIHRTFALMRELEGQMQSRMGTMIQNMTAYRDVRMHMQKLIDSEFQKQTQIQNTTQDNDTSRKGTKGGSEDEAEHLLGGSQQVSTNDQLPSLQGDASGVRVVTHDKLNETDLLDKDARRELLRSISLAANESVKAAEEKMGLAATAYNWIDRHIRRVDADISKLESSILLGLRTGTEESRGAREALGLPIDGTEAQARERDDEDEDEDAQGAVASGVSAEAESAALTKAAGAANRALAAEKEVTVGGRRSARTTPKMGAQAPRTPSPRGSERGAVQARSRSTSTSGVAVVAVTATRQKTSSPAPSVARTARKRKPKPLSPQKGGRRSIVTTTSTVISPTTQTPRASAIVGPDTSEMPFDPTEPTYCYCDQISFDEMVACDNDDCTIEWFHYACVGLAKQPENEWYCRFCAPPAWKGPGMRVPPNAKHKPPGFRKGIGIKP

SEQ ID NO: 26639 - protein, 453 aa, Aeromonas hydrophila
MRKPLSVLSVLALSVGIAMSAAPVQAALPSLLANNQEMPSLAPVLEQVTPAVVNISVSGKKITRQRLPEQFRFFFGPNMPDEQVSEQPFQALGSGVIIDAKKGYVITNAHVVHEADEIKVNLKDGREYAAKKIGEDKQSDIALLQIKAEDLVQIKFADSDELRVGDYALAIGNPFGLGQTVTSGIVSALGRSGLNIENLENFIQTDAAINSGNSGGALLNLRGELIGINTAILGPNGGNIGIGFAIPSNMVRDLSEQIVKYGEVRRGQLGIIGTELTSEVAKTFGYNKKDGAFVNQVMPDSAAAKAGIKPGDIIVSIDGKAIRSFGELRAKIATMGADKQVALGLIRDGKEQTVKVTLKKADDSEILASALHPALEGAKLSTTSEPVSGVAVSEIDPRSPAAASGLQKGDVIIGVNRLRINSLEELSKALKNKPDVLALNIQRGDSSLYLVIR

SEQ ID NO: 26640 - protein, 434 aa, Cenarchaeum symbiosum
MDLEREYRAKTGGSARIFARSKKYHVGGVSHNIRFYEPYPFVTRSASGKHLVDVDGNKYVDYWMGHWSLILGHAPAPVRSAVEGQLRRGWIHGTVNEQTMNLSEIIRGAVSVAEKTRYVTSGTEAVMYAARLARAHTGRKIIAKADGGWHGYASGLLKSVNWPYDVPESGGLVDEEHSISIPYNDLEGSLDVLGRAGDDLACVIIEPLLGGGGCIPADEDYLRGIQEFVHSRGALLVLDEIVTGFRFRFGCAYAAAGLDPDIVALGKIVGGGFPIGVICGKDEVMEISNTISHAKSDRAYIGGGTFSANPATMTAGAAALGELKKRKGTIYPRINSMGDDARDKLSKIFGNRVSVTGRGSLFMTHFVQDGAGRVSNAADAAACDVELLHRYHLDMITRDGIFFLPGKLGAISAAHSKADLKTMYSASERFAEGL

SEQ ID NO: 26641 - protein, 475 aa, Haloferax volcanii
MVVGDIATGTELLVIGAGPGGYVAAIRAAQNGIDTTLVEKDAYGGTCLNYGCIPSKALITGANLAHEAGNAEEMGIHADPVVDMSQLRDWKSGVVDQLTGGVEKLCKANGVNLVEGTARFKDENAVRIAHGGEGQGSETIEFEHCIIATGSRVIQIPGFDFGDEPVWSSRDALEADTVPERLVVVGGGYIGMELSTTFAKLGADVTVVEMLDDILPGYESDVARVVRKRAEELGIDMHLGEGATGWREEDDGIMVTTETEDGEENEYRADKVLVAVGRSPVTDTMDIENAGLEADDRGFLSVDDRRRTDVEHIYAVGDVVEDTPMLAHVASKEGIVAAEHVAGEPVAFDSQAVPAAVFTDPEIGTVGMTEADAEEAGFTPVVGQMPFRASGRALTTNHADGFVRVVADEESGFVLGAQIVGPEASELIAELAFAIEMGATLEDVASTIHTHPTLAEAVMEAAENALGQAIHTLNR

SEQ ID NO: 26642 - protein, 383 aa, Corynebacterium glutamicum ATCC 13032
MSSATTTDVRKGLYGVIADYTAVSKVMPETNSLTYRGYAVEDLVENCSFEEVFYLLWHGELPTAQQLAEFNERGRSYRSLDAGLISLIHSLPKEAHPMDVMRTAVSYMGTKDSEYFTTDSEHIRKVGHTLLAQLPMVLAMDIRRRKGLDIIAPDSSKSVAENLLSMVFGTGPESPASNPADVRDFEKSLILYAEHSFNASTFTARVITSTKSDVYSAITGAIGALKGPLHGGANEFVMHTMLAIDDPNKAAAWINNALDNKNVVMGFGHRVYKRGDSRVPSMEKSFRELAARHDGEKWVAMYENMRDAMDARTGIKPNLDFPAGPAYHLLGFPVDFFTPLFVIARVAGWTAHIVEQYENNSLIRPLSEYNGEEQREVAPIEKR

SEQ ID NO: 26643 - protein, 1339 aa, Arabidopsis thaliana
MLMKHCFVSHNANDLCFSFSNSKFNLASCPKKPPRLTCVVNVGFQDIAEVIHNKAFDFTGVKVLIAAGTSAVIGQLSKPFTSVVLYGKNLDFRSVFQAGGFPSTHSSSVVAAATAIAFERGFADSIFGLTVVYAGLIMYDAQGVRREVGKHAKVLNKLTANARRSEVMSLKGNESNKALTSEEISEEIAPPLKESIGHTEVEVIAGALFGFLVTLSVYSLMVSFFDRMAHRQLYSYALQPSYAAAASTVSPAPPPPQQPLPPKTGLSSLYGSSADHYFPDTTYRFLARDGSEALSNYSGTLASSSSMYHHLPNTTASHLAYPQLLQHQEVAWPPGVEVPGAASAVEPLPPGVKRTSEALYYPTLLGAHNTIGQTEAWYTTDYFTKRPKLESTSHLPIYPQRAGEKDCTHYMQTRTCKFGESCRFDHPIWVPEGGIPDWKEAPVVPNEEYPERPGEPDCPYYIKTQRCKYGSKCKFNHPREEAAVSVETQDSLPERPSEPMCTFYMKTGKCKFGLSCKFHHPKDIQLPSSSQDIGSSVGLTSEPDATNNPHVTFTPALYHNSKGLPVRSLFQGEVDCPFYLKTGSCKYGATCRYNHPERTAFIPQAAGVNYSLVSSNTANLNLGLVTPATSFYQTLTQPTYYMKTGECKFGERCKFHHPADRLSAMTKQAPQQPNVKLSLAGYPRREGALNCPYYMKTGTCKYGATCKFDHPPPGEEEEAETKTIMKYVLVTGGVVSGLGKGVTASSIGLLLQACGLRVTSIKIDPYLNTDAGTMSPFEHGEVFVLDDGGEVDLDLGNYERFLDSTLTRDNNITTGKIYQSVIDKERKGDYLGRTVQVVPHVTDAIQEWIERVANVPVDGKEGPPDVCVIELGGTIGDIESMPFIEALGQFSYKVGPGNFCLVHVSLVPVLSVVGEQKTKPTQHSVRGLRSLGLTPNILACRSTKALEENVKTKLSQFCHVPEGQISHQKTPVRVNISVCFPMVSQEVNIVTLYDVPNIWHVPLLLRDQKAHEAILRELNLSNAIKPDLTEWTARTKIYDTLQDPVRIAMVGKYTGLTDSYLSVLKALLHASVACHKKLVIEWVAASDLEEITAQETPDVHKAAWDLLKGADGILVPGGFGDRGVQGKILATKYARENQVPFLGICLGMQLAVVEFARSILGFHDANSTEFEPETSSPCIIFMPEGSTTHMGGTMRLGSRKTYFQVADCKSAKLYGNAKFVDERHRHRYEVNPDMISEIEKAGLSFVGKDETGRRMEIVELPSHPYFVGAQFHPEFKSRPGKPSALFLGLIAAASGCLESVLQTGGKVNIVSKNGVANGSAMGKVHQNGNVYSNGNGLHH

SEQ ID NO: 26644 - protein, 1286 aa, Ustilago maydis 521
MIAITGTSGSSHSQRSPNSTSLAAPLSSSALDHRGSLTPGVYSEEPPNFKASAAATNPATMTATNAVSRSSSSDHLSQHNNVDYFKGAAPSPSAPTADAPSTLTQPPGHSNHSQLQQDSQKAEERIITASLSTSSAPSASDKVSQSASPDAAQQLLSSSGNQLAASPSSLAPQNRISMRPDGIGGMGLGTAATGDLGAQAEFETLDDMRKVVKDLEDDFNAKHPEIPLSGRIIHVSHYIPFEIRPLAEVDFERQREERLAATASVAAMAAAARARKAAKLAAEAEKREIEAQRELQRQAGGMQDFSSRKNSFRISSRRSSFATGFGMTGLEGQDFEARLRENQDRARRRAGRRAWMMTEVVDDTSECSEEDRFTPVGSRRGSTWSAASRGSFSSFNQEPWRQWGSLSDANSPFVDSPPTAPPQPQWVLTARRGHTALNSGIRSLCSTHRQTFIGWPGDIRYATQARDDHRSDPSETTDAEKREIEGVLASLDQASAWVSQEAPVAGAPVDPESNQPSIGKVPVPVMNGAEPIGSGDPSTRANGSAKDKAAANAATTSHNIRSVTAKNEGDSEHGIKYVPVWLDYNVAHGHYEGYCKATLWPLFHYLLWQDVNSERRAWEEYSWDAYYAANEAFAKRVAQEYKPGDLVWIHDYHLLLVPLMLRKLVPDAVIGLFVHAPFPSSEVFRCLPKRKEILEGMLGADLACFQAFSYSRHFLSSCIRVCGYEASSNAVESASGHVTNITYNPIGIDSVKIAKDSSSEGVLPKIEAIREMYKGKKILVGRDKLDVVRGVVQKLQAFYKFLAEYPEWRNKVVLIQVTAPALNDSPKLERQVSELVSHINGEFGSLSFTPVHHYHQIIDRDEYFALLSVADLALITSVRDGMNTTSMEYIICQNRFNKSPLILSEFTGTAGRMRSAIQVNPWNIFGVAKAIDYALRLTDEEKRARHDQLYHQVVMHTSHTWAAGLVKQLLTRLHNEHSAHLTPPLDRKEMVEKYRNAKKRLLLLDYDGTLTPIVKQPEMALPSQRLLTALDVLSQDEKNIFYIISGRDGGFLGKHLGHFRGIGFSAEHGGFVKEPGQDEYRNLTEDLDMTWMKDIRSVFEYYTERTAGSFIEQKKSAITWHYRGADPDFGSFQAKECQAHLENLSSQNKLAIEVLVGKKNLEVRPLAINKGEIVKRILYDHPDAEFVFCAGDDKTDEDMFRTLFNLAPSTPEMEAASDHDRFEAPSDLGGQVARDQALIISPPTPLKPNTPVGSPKKLNLTRSGIYTTMIGPNNRKTLAEWHSNRR

SEQ ID NO: 26645 - protein, 376 aa, uncultured archaeon GZfos32E4
MAGVRDISKAKRIVIKVGTSNLTDTSYRLDPRKVEKLAKEIIELKNEGKEVIVVTSGAIGAGIGKLDLKQRPRDIKVLQATAAVGQNILMSTYDRYFAKYEQTIAQLLLTHDNFFNRQRYLNLRNTLITLLKSGVIPIINENDTVAVDEIKLGDNDNLSALVASSLGADLLIILTDIDGLYTYDPKRSEKAEFISVVEDITPEIERIASGRGKTGVGGMKTKVQAAEVTMKAGIPMIIANGGEENILSRVIAGEPVGTLFMPKKKRMNDKEHWILFSASPKGKIKVDEGAKTALVEGGGSLLPSGITDVEDEFMRGDPVSIVDARSVEFARGITNYSSAEIKKIKGVQSKEIEQILGRKDYGYGEVVVYRGNLVLL

SEQ ID NO: 26646 - protein, 289 aa, Brassica napus
  misc_feature (268)..(268): Xaa can be any naturally occurring amino acid
  unsure (1)..(289): unsure at all Xaa locations
MSTDLTEEESLSGKDYQDPPRVKIFEARELGKWSFYRAVIAEFIATLLFLYVTVLTVIGFKSQTDLQTGGGACASVGLLGISWAFGGMIFILVYCTAGISGGHINPAVTFGLFLASKVSLVRAISYIVAQCLGATCGVGLVKVFQKTYYNRYGGGANVLADGYNVGVGVGAEIIGTFVLVYTVFSATDPKRNARDSHIPVLAPLPIGFSVFMVHLATIPITGTGINPARSFGAAVIYNNQKAWDDQWIFWVGPFVGAAIAALYHQFVXLRAGAMKAYGSVRSQLHELHA

SEQ ID NO: 26647 - protein, 365 aa, Kluyveromyces lactis NRRL Y-1140
MSMQRLDEYVAHDVISNKSNVKREMLVKEYKRIGQGAFGTVVQAYLTPDNQKWLGPFAIKKVPAQTEYKSRELEILRIADHPNVVKLEYFYTHISPTDHKLYQHLAMECLPEMLQNEILRYKKNNLELPLKHVKLYAYQIARGMLYLHALGICHRDIKPSNVLVDPQTGILKICDFGSAKKLESNQPSISYICSRYYRAPELIVGCTQYTTKIDIWGLGCVLGEMLLGKAVFQGHQPLLQLHEITKLLGPPDKRFIFFSNPSYNGPLFSKPLFEGAPKARFEKYFGYAGPDGVDLLMSVLVYEPERRASPRRILAHPFFDDLRNERYFFPSGSSQPKHLPPLYDFSDFELQVIGDLFPKIQPKQD

SEQ ID NO: 26648 - protein, 333 aa, Bacillus cereus ATCC 10987
MAEVKEKRHEELGLSDEQVLEMFRTMLLARKIDERMWLLNRAGKIPFVISCQGQEAAQVGAAFALDREKDYALPYYRDMGVVLAFGMTAKELMLSGFAKAGDPNSGGRQMPGHFGQKKNRIVTGSSPVTTQVPHAVGIALAGKMEKKDLVTFVTFGEGSSNQGDFHEGANFAGVHKLPVIFMCENNKYAISIPVEKQLACKNVSDRAIGYGMPGYTVDGNDPLAVYKAVKEAADRGRRGEGPTLIETVSYRLTAHSSDDDDRVYRDKEEVEEAKKNDSIITFAAYLKEVGVLTEESEKQMLDEIMHIVNEATEYAENAPYAAPEDALKHVYAE

SEQ ID NO: 26649 - protein, 473 aa, Bacillus cereus ATCC 10987
MAKEYDLVIVGGGTGGYVAAIRASQLGLKTALVEKENLGGTCLHKGCIPSKALLRSAEVYATAKKSEEFGVIASNVELNFAKVQERKEKIVTQLHKGVQHLMKQGKIDVFEGIGRILGPSIFSPMPGTISVELASGEENEMLIPKNVLIATGSRPNSLPGLELDGEYVMSSDHALKMETLPSSIIIVGGGVIGIEWASMLADFGVEVTVLEYAKTILPLEDQDVSKEMQRLFKKKGIKVVTGAKVLPETLVKDNGVTIQAEHNGENKEFKAEKMLVSVGRQANTQNIGLENTDIVVEKGYIQTNEFYQTKESHIYAIGDVIGGLQLAHVASHEGIAAVEHIAGKEVTPIDYSMVSKCVYSSPEVASVGLTEQEAKEKGYKLKVGKFSFRAIGKALVYGESDGFVKLVVDEETNDILGVHMIGPHVTDMISEAGLARVLDATPWEVAHTIHPHPSLSEAIGEAALAVDGKALHA

SEQ ID NO: 26650 - protein, 729 aa, Bradyrhizobium sp. BTAi1
MLRVLSKSMPLFGRLDRAVDALVRLIGHFGSAVIGLSAIALVWVGIVYTITEERARTEQSALKNGANLARAFEEQIIRSIRAADQTLLYVRDSYAKDPQNFDMSLWARNSQFLSDFSFQVVVIGKDGIMLSSNIDPKMRGLDLHDREHFRVHADGTADFLFISKPIFGRVSNKWSIQLTRRIILQDGSFGGVVVVSLDPEYLSSFYNSVDIGKNGNVTLVGTDGIVRARASAGPSAVGSSLAGSPIMANIEQKTSGSYITKSQIDGISRIYSFRRVKDQPLVVVVGQATDEVFSAIRVDRGLMVGTLLTVIIGIITILIARYQAGLAASRDAAEAGTRARSEFLAMMSHEIRTPMNGVIGLADLLLSADLAPEQRKIATTLRESADYLLQLLNDVLDFSKLDADRLEIEHIEFDLHRSVTATAELLVSRAKEKGLQLTTSIAPDVPNYVVGDPARLRQVLFNLVGNALKFTEAGSVNIDVRAENLAGPNLTLVFSVADTGVGIPAEAVGRLFRQFSQVDNSISRRFGGTGLGLAICKRLVTCMGGDIKVQSKIGEGSTFTFSIEVQPQPQPDVEQLSVPEAPIVPVGESVSEERPANFEPLKVLVAEDNLTNQFVIKKLLDKLGHGYDIVDNGTQAIAAVQKHAYDLVLMDMMMPEMDGLTATRMIRSLPPPARDIYIIALTANATSQDHLACTDAGMNDFVTKPVTRDRLNAALLRATAAKHKERLVA

SEQ ID NO: 26651 - protein, 332 aa, Exiguobacterium sp. 255-15
MAVLVVGGAGYIGSHAVYQLVDAGQDVVVIDHLKSGHREAVHPKARFYEGDIRDRAFLDTVFEKETIDQVVHFAAFSLVGESMEHPLAYFDNNVYGTQVLLEAMMAHDVKQIVFSSTAATYGEQEQMPILETATTNPTNAYGETKLMMEKMMRWCETAYGLNYVALRYFNVAGARATGEIGEDHTPETHLVPLVLEVANGQRPVISIYGDDYATEDSTCIRDYIHVEDLIDAHLLALEYLKQGNTSDVFNLGSSRGFSVREIIEAARRVTGHAIPEQVVARRAGDPSTLIAGSDKAKKVLGWTPRRTEIDTIIQDAWRWHEQRPQGYKTPVR

SEQ ID NO: 26652 - protein, 312 aa, Mannheimia succiniciproducens MBEL55E
MKNLTLIGECMIELNGEPFGVMRQTYGGDTLNTATYAARVASPEKLNVGYVSALGTDKLSQGMIERWQADGINTDLVLRDEKRSAGLYLIQLDKQGERTFLYWRNQSAARYLLQHPDYNRVLSALKNTDMIYLSGISLAILPENDRTLLIEQLGELKKSGLEIAFDSNFRPALWDSREQAQNCYKALLPLVDVALVTFDDEAMLWADNDEQATITRLSSFNIPKIIVKQGRLGATVCEKGKQTFVPTIPVEHVVDTTSAGDSFNAGFLVGYLQGKPLNECCKQGNQLAGIVIQHQGAIIEKSATEHLRNAFA

SEQ ID NO: 26653 - protein, 186 aa, Brassica napus
  misc_feature (42)..(42): Xaa can be any naturally occurring amino acid
  unsure (1)..(186): unsure at all Xaa locations
LDPRVRTGAKLSRSEHSMGASSEPKSIYDFTVKDAKGNDVDXSTYKGKVLLIVNVASQCGLTSTHASELAQLYQKYKDHGFEILAFPCNQFGNQEPGSNEEIVQFACTRFKAEYPIFDKVDVNGDSAAPIYKFLKSSKGGLFGDGIKWNFAKFLVDKDGNVVDRYAPTTSPLSIEKDLKKLLGVTA

SEQ ID NO: 26654 - protein, 824 aa, Solibacter usitatus Ellin6076
MFSTPDTLCVERCAANARIRSVLRVLMLVLSLVALGAPLMAQETGGGEANLKLPRLDSVTFLGGISGSSLLMGGLVVSALGLIFGLYIFTRLRAMPVHDSMREVSELIYETCKTYLATQGKFLCILEALIAVIIVFYFGFLLGFEFYKVLIILAFSVVGISGSFMVAAFGMRVNTFANSRTSFAALRGKPFPCYAIPLQAGMSIGMLLVSVELLIMLCILLFVPGDLAGSCFIGFAIGESLGAAALRVAGGIFTKIADIGSDLMKIVFKIKEDDARNPGVIADCTGDNAGDSVGPSADGFETYGVTGVALITFILLAVASPTVQVQLLVWIFTMRIMMVISSGVGYFINDAIAKAKYLNADKFDFEAPLTTLVWLTSILSIVLTYVLSNMMIPDLAGDTTLWWKLATIISCGTLAGALIPEFVKVFTSTNSRHVREIVTSSREGGASLNILSGFVAGNFSAYWLGMAMLALMSIGFFVSTMFPVTLMLAPAVFAFGLVAFGFLGMGPVTIAVDSYGPVTDNAQSVYELSTIETIPNIEALIQKQYGFKPEFEKAKENLEENDGAGNTFKATSKPVLIGTAVVGATTMIFSTIVALTHGLKDNMDKLSMMHAPFLLGLIAGGAVIYWFTGASAQAVTTGAYQAVEFIKKNIKLETTEKASVADSKKVVEICTKYAQKGMFNIFLVVFFSTLAFAFLEPFFFIGYLVSIALFGLFQAIFMANAGGAWDNAKKVVETELRAKGTPLHDACVVGDTVGDPFKDTSSVALNPIIKFTTLFGLLAVQLAVSVSAKQGNTLTTILSAVFFLASTYFVYRSFYGMRIETTKE

SEQ ID NO: 26655 - protein, 466 aa, Exiguobacterium sp. 255-15
MVVGELTQERDLVILGGGPAGYTAAIRASQLGRTVTLIEQAQIGGLCLNKGCIPSKVVAHAAEVKLQTKHMTALGFSFHPTHDFSQLVEYRERTIRQLRTGVEALCQANAIEVVHGTASFLADDRIGVELGHQFDTYRFNDVVIATGSHSIKQDAPSVLNAEQLYQLTELPERLVIIGQDYIAIEAAMSFQALGTSVTLIADAFDFDPSLDKELRRLFKKQKIQLVTGTVTAIEAQEDVTVTVVKQGQETTWSAPFLFHSLPRVPHTLELGLERIGVTLAEDGTIPVDPFGQTNRPHIYAIGDVTPGPAIATRAIHEAKRTAEHLSGQSADTTVPYYPTIIRSLPPIVSIGLTEQTATDAGHSFRTAQFALNANGATTIEGGSGFIKVISDATTSLILGIHMIGEGAIELAGVFAQTLELHAKEEDVRFPVMPHPSRNEAFTEAIEALLGQAIHLPPRQQDVLAKS

SEQ ID NO: 26656 - protein, 388 aa, Photorhabdus luminescens subsp. laumondii TTO1
MSEQNTMTELTTFKPKKSVALSGVSAGNTALCTVGKTGNDLHYRGYDILDLATQCEFEEVAYLLVHEKLPSRAELAAYKAKLTALRGLPGSVKAALETLPAAAHPMDVMRTGVSVLGCTLPEKDDHNLAGARDIADRLLASLSSILLYWYHYSHNGRRIEVETDDVSIGGHFLHLLHGKKTCESWEKAMHTSLILYAEHEFNASTFTSRVIAGTGTDIYSAIIGAIGALRGPKHGGANEVSFEIQQRYENPDEAERDILARLARKEVIIGFGHPVYTISDPRHKVIKDVALQLSKEAGTTKMFNIADRLEAVMWANKKMFPNLDWFSAVSYHMMGVPTAMFTPLFVIARTAGWAAHIIEQRIDNKIIRPSADYTGPENRVFTPIGKRG

SEQ ID NO: 26657 - protein, 520 aa, Bacillus sp. WCS10
MKGKKWTALALTLPLAASLSTGVHAETVHKGKSPAADKNGVFYEVYVNSFYDANKDGHGDLKGLTQKLDYLNDGNSHTKNDLQVNGIWMMPVNPSPSYHKYDVTDYYNIDPQYGNLQDFRKLMKEADKRDVKVIMDLVVNHTSSEHPWFQAALKDKNSKYRDYYIWADKDTDLNEKGSWGQQVWHKAPNGEYFYGTFWEGMPDLNYDNPEVRKEMINVGKFWLKQGVDGFRLDAALHIFKGQTPEGAKKNLLWWNEFRDAMKKENPNVYLTGEVWDQPEVVAPYYQSLDSLFNFDLAGKIVSSVKAGNDQGIATAAAATDELFKSYNPNKIDGIFLTNHDQNRVMSELSGDVNKAKSAASILLTLPGNPYIYYGEEIGMTGEKPDELIREPFRWYEGNGLGQTSWETPVYNKGGNGVSVEAQTKQKDSLLNHYREMIRVRQQHEELVKGTLQSISVDSKEVVAYSRTYKGNSISVYHNISNQPVKVSVAAKGKLIFASEKGAKKVKNQLVIPANTSVLIK

SEQ ID NO: 26658 - protein, 298 aa, Zea mays
MGRPPCCEKAGLKKGPWSPEEDLLLVSYVQEHGPGNWRAVPCSTGLMRCSKSCRLRWTNYLRPGIKRGSFSDQEEKLIIHLQELLGNKWSAIASYLPERTDNDIKNYWNTHLKKKLAKTGARESGASAKTTKKSDRAAAPKGQWERRLQTNIHTARQALREALSMDDTAPPAIKPEPLPLPLPLGQLPAPASQAMYASSIDNIARLLEGWMRPSVSGNASAESMSSFSAFSGGGDGASASHIGTAHTPEGFTGTRKEEGAGPGPSSLPMFENWLLDDGMGSGDASLICVPLADPCEFF

SEQ ID NO: 26659 - protein, 350 aa, Exiguobacterium sp. 255-15
METEFPIYRILDDAGQVTDTSKTDLLTKDLSLALFTHMNRIRTFDRKAINLQRQGRLGTYAPFEGQEAAQVGSAYALQDKDWVFPTYRDHGATLTFGADMVRTFLYWNGRVEGCVATDELHIFPPAVPIATQIPHAVGAAWAEKRKGSTQVAVAYFGDGATSEGDFHEGMNFASVFQAPVILFNQNNGYAISVPIQKQMHSETIAQKALAYGMPSVRIDGNDVFAVYFTMQKALERARSGGGPTLIEAVTWRFGAHTTADDPSKYRDQERSRDRVDPLERLEAFMKEQGFYDEQEIETIRSRHQEEVEAAVKTMESFPPPDVNDLFDHTFATLPDDLVRQKTDYLTARGN

SEQ ID NO: 26660 - protein, 316 aa, Solibacter usitatus Ellin6076
MPAIGLGTFGSDHVSAEQIADVVRDAAVVGYRHFDCASVYRNEDRIGFAFRDIMKGGIRREDLWITSKLWNDKHGEGDVIASCRQSLADLQLDYLDMYLVHWPFPNFHPPGCDVSSRSPDARPYIHENYMKTWREMERLVELGLVRHIGTSNVTIPKLKLILRDARIRPAVSEMEMHPHFQQRELFEFVRAAGIEPIAYSPIGSPGRPERDRTPEDTVDIEDPVIVAIAKRIGVHPAVVCVKWAEQLGATPIPFSTRRRNYLANLQGVVSDPLTAADMEAIAGIDRNCRLIKGQVFLWKQDQTWEDLWDLKGVIAQ

SEQ ID NO: 26661 - protein, 196 aa, Triticum aestivum
  misc_feature (37)..(37): Xaa can be any naturally occurring amino acid
  misc_feature (56)..(56): Xaa can be any naturally occurring amino acid
  misc_feature (160)..(160): Xaa can be any naturally occurring amino acid
  misc_feature (175)..(175): Xaa can be any naturally occurring amino acid
  unsure (1)..(196): unsure at all Xaa locations
LLLGTIEQASTAGWYRSVPPGISSTHASAATSVAPFXGLKSTAGLPVSRRSNGASXGSVSNGGRIRCMQVWPIEGIKKFETLSYLPPLSTEALLKQVDYLIRSKWVPCLEFSKVGFIFREHHPSPGYYDGRYWTMWKLPMFGCTDATQVINQVEEVKRDXPDAYVPIIGFDNMRXCSAVTFIAFKPTGLARNPGKA

SEQ ID NO: 26662 - protein, 380 aa, Exiguobacterium sp. 255-15
MNMLNPSTNPSLSIMEKISGHEQVVFCNDPVSGLQAIIAIHDTTLGPALGGCRMAPYSTVDEALDDVLRLSRGMTYKCAAADVDFGGGKAVIIGNPATDKTPELFRAFGRFVDSLGGRFYTGTDMGTTMDDFVHASRETSRIVGIPEAFGGSGDSSIPTAEGVIYGLRATVETLYGSDDLSRASYAVQGLGKVGYKVAEQLLSAGANLYVSDLSEAVLAALVEQAEKTPGTVRVIAAHEIHLTDADIFVPCAYGGVIQAANIGQLQCKAICGSANNQLADDALALELQQRGILYAPDYIVNGGGLIQVADELYGANHERVLLKTKHIYDAVLEVFNESHAESITTLEAANRMCNKRIQIRSRHNNIFTNTIKPKWNIRND

SEQ ID NO: 26663 - protein, 469 aa, Zea mays
MLAVSPSPVRCADAEECGGGGASKEMEETAVGPVSDSDLDFDFTVDDIDFGDFFLRLDDGDDALPGLGVDPAEIVFADFEAIATAGGVTDQEVPSVLPFADAAHIGAVDPCCGVLGEDNDAACADVEEGKGECDHADEVAAAAAGNNSDSGEGCGGAFAGEKSPSSTASSSQEAESRRKVSKKHSQGKKKAKVDWTPELHRRFVQAVEELGIDKAVPSRILEIMGIDSLTRHNIASHLQKYRSHRKHMLAREVEAATWTTHRRPMYAAPSGAVKRPDSNAWTVPTIGFPPPAGTPPRPVQHFGRPLHVWGHPTPAVESPRVPMWPRHLAPRAPPPPPWAPPPQADPAFWHHAYMRGPAAQMPDQVAVTPCVAVPMAAARFPAPHVRGSLPWPPPMYRPLVPPALAGKSQQDALFQLQIQPSSESIDAAIGDVLTKPWLPLPLGLKPPSVDSVMGELQRQGVANVPQACG

SEQ ID NO: 26664 - protein, 459 aa, Staphylococcus epidermidis ATCC 12228
MADKLQRELSNRHIQLIAIGGAIGTGLFLGAGQSIHLAGPSILLTYIIVGFVLFMFMRAMGELLLSNLGFKSFGDIAHHHIGSMAGFMVGWTYWLTWIISGMAEVTAVAKYVSFWYPTIPNWLTAAATILVLVALNLFSAKLFGELEFWLSIIKVLTILALIAVGVVMIVFGMKTSYGPATVTNIWKDGGFFPNGAQGFFMSFQMAIFSFIGIELIGITAGETKDPHKTIPQAINNVPFRILLFYIGSLAVIMSVVPWQQLNPADSPYVKMFGLVGIPFAAGIINFVVLTAAASSCNSGIFANSRTMFGLAGRKQGPAFLHRTNKHGVPHYAILVTCGLLSISVVLNAIFKDATKVFVQITTFSTVLNIMIWTIIMIAYLGYLRHEPKQHKESNYKMWGGKYMAYSILGFFAFIFIILLINSATRYAVLSAPVWFVIMLLMYQKYKKESRKAKIKNEEE

SEQ ID NO: 26665 - protein, 525 aa, Hordeum vulgare subsp. vulgare
MDMDQLCLMAVATILLTLILRQVLGGKGTGAKLPPGPWNLPVIGSLHHLVATKLPPHRALLSLSRRYGPVMLLRLGEVPNVIVSTPEAAMLVLKTNDLTFATRTSGPTLDVVGSASEGIIFAPYGEHWRQMRKVCVVELLSAMQVRRIQSIMQAEIAHLLESVAAASSASPSGSAVVDVGKGLARLTNNVIARAVFGGKSRQQEAYLRELDVMAILGGGFSLVDLFPSSRLVRWLSSSGRAMRRLHSRMQRILGDIIQDRKETRAPNGASDAATARDNEDLLDVLLRLGKQDALSFPLTSEIISAVIFDIFSAATDTTAATLEWAMAELVRNPRAMARAKLEVRQMLRHRRSSTITSADLAGLHYLRMVIKETLRLHPSAPLIHRASQENCRVMGYDIPKGTAVMINAFAVGRDPAHWGADAAEFRPERFQGTSVEYSSQGPHMEFVPFGAGRRQCPGALFATTMLELVLANLLYHFDWAIPGGESPETMDMGEVFGIIVHTRSSLHLQASEACHLQDQTTGVVS

SEQ ID NO: 26666 - protein, 482 aa, Debaryomyces hansenii CBS767
MNAEEPLLTGAHSHEQYNSLGHKPSSQKPDFDITPKSELRFILRSSGPLVITFFLQYLLSVTTIFSAGKLGPRELAAASLAVCTFNITGLAVYQGMATSLDSFCSQAYGSGKLHNVGLYFQRCSMMMMAITLFPLVFIWWYSGTLLQHLVPDPELVHLTQTYLRINAIGAPGLILFETSKRFLQAQHCFNAGTWVLLIATPLNFVLNWILVWHPTYGLGFSGAPLAVSIIYWFISFMMLAYVLFVDGKKCWGGLQLYKACKNWSPMLKLALPGVVMVEAEYLAFEILTIFAASFGTNALAAQSIASNAGSLAFQLPFAVAVAISTRIGHFVGMKHIYAAKLVTRITVILSAYIAAINFSLVFFGRHSLGKLFTSSQDVLKISDKILILVAINQIADSFNVLGAGILRGQGRQSIGSILNMISYYVIALPIGYGLAFKLEYGLFGLWTGLILGVLFLAITEFICMCRSDWPRILVESYGRHDN

SEQ ID NO: 26667 - protein, 270 aa, Oryza sativa (japonica cultivar-group)
MRSLDDFTMKALWGFLEALSSSLCMNIYVVGLNQLYDIQIDKVNKPSLPLASGEFSVATGAVLVLTSLIMSIAIGIRSKSAPLLCALFISFFLGSAYSVDAPLLRWKRNAFLAASCILFVRAVLVQLAFFAHMQQHVLKRPLAPTKSVVFATLFMCCFSSVIALFKDIPDIDGDRHFGVESLSVRLGPERVYWLCINILLTAYGAAILAGASSTNLCQMIITVFGHGLLAFALWQRAQHCDVENKAWITSFYMFIWKLFYAEYFLIPFVQ

SEQ ID NO: 26668 - protein, 459 aa, Arabidopsis thaliana
MLKIKRVPTVVSNYQKDDGAEDPVGCGRNCLGACCLNGTFWKPESSFLIMLPLYACKNLVKSGEKLVISHEAIEPPVAFLESLVLGEWEDRFQRGLFRYDVTACETKVIPGKYGFVAQLNEGRHLKKRPTEFRVDKVLQSFDGSKFNFTKVGQEELLFQFEAGEDAQVQFFPCMPIDPENSPSVVAINVKTLVQRACPIEYGHVLLIPRVLDCLPQRIDHKSLLLAVHMAAEAANPYFRLDYNSLGAFATINHLHFQAYYLAMPFPLEKAPTKKITTTVSGVKISELLSYPVRSLLFEGGSSMQELSDTVSDCCVCLQNNNIPFNILISDCGRQIFLMPQCYAEKQALGEVSPEVLETQVNPAVWEISGHMVLKRKEDYEGASEDNAWRLLAEASLSEERFKEVTALAFEAIGCSNQEEDLEGTIVHQQNSSGNVNQKSNRTHGGPITNGTAAECLVLQ

SEQ ID NO: 26669 - protein, 370 aa, Brucella melitensis biovar Abortus
MNTHSVPVTTMDAQLRERAERVIPNGMWGHQRASSLPQGYPQYFASGKDACVTDVDGNSYIDFMCAWGPIILGHRNPLVDAAALSQIELGDSLNGPTAHAVELAELLVATIPHADWALFQKNGTDATTSCVTIARGTTKRRKVLVAKGAYHGAAPWCTPSLVGVTAEDRVHLIHYVYNDVESLTAAAREAGDDLAAILVSAFKHDLAIPQESPTKEFAQAARALCDAAGAALILDDVRGGFRIDLGGSWRGTGIEPDMAAYSKAIANGYALAAVTGSDRFREAARQAYMTGSFWYGGASMAAAVATIKELRRIDGPALMKMRANAFAAALTRRPPDTGSTCFKPARRSCRWCSSPATAMPRLARVFARRR

SEQ ID NO: 26670 - protein, 256 aa, Selaginella remotifolia
ETWLVTTTSSSNPEVGLATGLAATGGAQDLLNPPLNKQKEPPVGRGKIEIKRIENATSRQVTFSKRRGGLLKKAHELSVLCDAQVALIIFSSTGKLFEYASTSMKEILDRYGKYPESVQGGNMASHHEASDFISHEIRRLKQQLQRSQQSRRHLLGDDLSHLPIKDLQNLEQQLEVGLSRVRSRKDQVLMDQVDELRRRELTLHKDNEMLRRRLSDVQGMAESGRSTLIVNPWRQGNLLQTWQMYPCHFLDTKAAA

SEQ ID NO: 26671 - protein, 229 aa, Streptomyces coelicolor A3(2)
MTAVLFDFSGTLFRIESTEAWLRAALDDAGLELAAPELAEKAEALERAGALPGGAPPLRVPEELAEVWEVRDDSSALHRAAYTGLSRQVPLPDPGLHDVLYERHMSPEAWSPYPDAAEVLSALRGRGIAVGVVSNIGWDLRPVFRAHGLDRYVDTYVLSYEHGIRKPDARLFGVACAALGVEPERTLMVGDDRRADGGAAALGCGVHFVDHLPVAERPAGLRPVLELAT

SEQ ID NO: 26672 - protein, 296 aa, Pinus pinea
SAKGFFEVTHDISHLTCADFLRAAGVQTPLIVRFSTVIHERGSPETLRDPRGFAVKFYTREGNFDLVGNNFPVFFVRDGMKFPDMVHALKPNPKSHIQEDWRILDFFSHHPESLHMFTFLFDDLGIPLNYRHMDGSGVHTFTLVNKAGRQTYVKFHWRPTCGVKCLLDDEAVVVGGTNHSHATKDLYDSIAAGNYPEWKLFIQTMDPRDEDKYDFDPLDVTKTWPEDIFPLQPVGRMVLNKNIDNFFAENEQLAFCPALVVPGVYYTEDKLLQTRVFSFADTQRHRLGPNYLMLPA

SEQ ID NO: 26673 - protein, 346 aa, Shigella flexneri 2a str. 301
MKSVVNDTDGIVRVAKSVIPEIKHQDEVRVKIASSGLCGSDLPRIFKNGAHYYPITLGHEFSGYIDAVGSGVDDLHPGDAVACVPLLPCFTCPECLKGFYSQCAKYDFIGSRRDGGFAEYIVVKRKNVFALPTDMPIEDGAFIEPITVGLHAFHLAQGCENKNVIIIGAGTIGLLAIQCAVALGAKSVTAIDISSEKLALAKSFGAMQTFNSSEMSAPQMQSVLRELRFNQLILETAGVPQTVELAVEIAGPHAQLALVGTLHQDLHLTSATFGKILRKELTVIGSWMNYSSPWPGQEWETASRLLTERKLSLEPLIAHRGSFESFTQAVRDIARNAMQGKVLLIP

SEQ ID NO: 26674 - protein, 366 aa, Bacillus cereus ATCC 10987
MTLEIFEYLEKYDYEQVVFCQDKESGLKAIIAIHDTTLGPALGGTRMWTYDSEEAAIEDALRLAKGMTYKNAAAGLNLGGAKTVIIGDPRKDKSEAMFRALGRYIQGLNGRYITAEDVGTTVDDMDIIHEETDFVTGISPSFGSSGNPSPVTAYGVYRGMKAAAKEAFGTDNLEGKVIAVQGVGNVAYHLCKHLHAEGAKLIVTDINKEAVQRAVEEFGATAVEPNEIYGVECDIYAPCALGATVNDETIPQLKAKVIAGSANNQLKEDRHGDIIHEMGIVYAPDYVINAGGVINVADELYGYNRERALKRVESIYDTIAKVIEISKRDGIATYVAADRLAEERIASLKNSRSTYLRNGHDIISRR

SEQ ID NO: 26675 - protein, 216 aa, Lycopersicon esculentum
MAAPPARARADYDYLIKLLLIGDSGVGKSCLLLRFSDGSLTTSFITTIGIDFKIRTIELDGKRIKLQIWDTAGQERFRTITTAYYRGAMGILLVYDVTDESSFNNIRNWIRNIEQHASDNVNKILVGNKADMDESKRAVPTAKGQALADEYGIKFFETSAKTNLNVEQVFFSIARDIKQRLADTDSKAEPSTLKINQPEAGAGGSQTSQKSACCGS

SEQ ID NO: 26676 - protein, 428 aa, Xanthomonas oryzae pv. oryzae KACC10331
MNDRVHGELRAPHISESRSLPVEKHRSDIFFAAVETTRMPMTVTDPHLPDNPIVFANRAFLEMTGYSAEEVIGNNCRFLQGPETDPASISDVRQSIETRSEFATEVLNYRKDGSSFWNALFVSPVFDDHGNLVYFFGSQLDVSRRRDAEDALRQAQKMEALGQLTGGIAHDFNNLLQVMSGHLEVIQMMASAGAGNAERIAFSAEHAAAAAAKAATLTQQLLAFSRKQKLRGRVVNLNGLVSGMNNMAERALGGGITLRQSLEEGLWNCQIDTTQAEVALLNVLINARDAMAQAERKEVTVQTQNVEVTTHDLAMYHQLAPGRYVSIAVSDTGSGMPPEVVSRVMEPFFTTKDEGQGTGLGLSMGMASSNSLAAPCASTAKWAKAPRYGCIFLHPANSKMTCRQPKAAQSTRAATKQFLWWKTSRMWR

SEQ ID NO: 26677 - protein, 58 aa, Zea mays
MSEGTANCVDILIAIILPPLGVFLKYGCGHEFWICLLLTFLGYIPGIIYAIYAITKNT

SEQ ID NO: 26678 - protein, 332 aa, Prochlorococcus marinus subsp. pastoris str. CCMP1986
MKKTKVICIGEALIDRIKNKSNQEFTDFLGGAPANVACALRKLQIDSVFIGRIGSDEFGKKFINQFKELEVNINFLQLDDCLPTRIVKVNRDNSGDRYFSGFDTSLNTFFADEAFDKNEIKKDLKSLENLFSKTKYLVCGTIILSSSISADTINFLLSLANKFDVKIIIDLNWREVFWDFATSSSETNKKERVDLIRNLLNKAHILKLAKEEAILFFENKNPLEISERLLNRPDVIITDGANPICWLINGVQGTTEVSKSLKIIDTTGAGDAFLAGLISQLLSFDYPSNESEIQNCVKFASICGLLTCLGEGAIEQQPDYSKVNKFFGSQIL

SEQ ID NO: 26679 - protein, 304 aa, Prochlorococcus marinus subsp. pastoris str. CCMP1986
MSFKKSENWKWKNWDISWSSTKQSSNNSDLNILLIHGFGASKRHWRHNQDFLGNNHNCYSIDLLGFGESSQPGASLDYESYKDNYVKYSFDLWGSQVATFCNEVIKSPVYLVGNSIGGVVSLKAAEILKENCNGLVLIDCAQRTMDDKRLKRSDVLMNLLRPVIKTLVSKRIISNTLFERAANPAVIKQILKKAYPSGKNIDEELIEILYNPSQRKNSKEAFRGFINLFDDYLATDLFYRVNSPIQLIWGEKDPWESLNEAKSWKKNYKNIKRLDVIKEAGHCPHDENPEETNNLICQFIQETK

SEQ ID NO: 26680 - protein, 333 aa, Prochlorococcus marinus subsp. pastoris str. CCMP1986
MSPETLVENKLATISSLKSSNDVDLVRSYLRDIGRVPLLSHEQEITLGRQVQEYMQVERAEIEIMELTDNKPSPEELAEKLNLSTSQIKKRLRAGQRAKERMVAANLRLVVSVAKKYTKRNMELLDLIQEGTIGLVRGVEKFDPARGYKFSTYAYWWIRQGITRAIAEKSRAIRLPIHITEMLNKLKKGQRELSQEMSRTPTISELAKYVELPEDDVKDLMCKAGQPVSLETKVGDGEDTVLLDLLAGGEDLPDEQIEMDCMRGDLHSLLHQLPDLQCRVLRMRYGMDGDEPMSLTGIGRVLGISRDRVRNLERDGLRGLRRLSESVEAYFVS

SEQ ID NO: 26681 - protein, 241 aa, Caulobacter crescentus CB15
MSRPIELHYWPTPNGWKISIALEEMGLPYEMVPVNIGVGEQFKPEFLAISPNNRMPAIVDPDGPDGQPISIFESGAILQYLARKSGQFYGANERERVDIDQWVMWQMGGLGPMAGQTHHFRQYAPAIIADQRQIAYGVIRYTNETHRLYGVLNKRLEGREFVCGQLSIADFMIWPWIVPWKNQGIILEEFPHLKAWFERVGAREAVQKGFKLGAELRSGGLQASGKAAEDARRVLFGQRAR

SEQ ID NO: 26682 - protein, 90 aa, Lycopersicon esculentum
NRAGKSTYVKFHRKPTCGVMSLLEEEADRVGGANHSHATQDLYDSTAAGNYPEWKIFIQTMDPDHEDRFDFDPLDVTKTWPDDILPLQPD

SEQ ID NO: 26683 - protein, 157 aa, Glycine max
MGRPPCCDKVGIKKGPWTPEEDIILVSYIQEHGPGNWRSVPTNTGLSRCSKSCRLRWTNYLRPGIKRGNFTPHEEGMIIHLQALLGNKWAAIASYLPQRTDNDIKNYWNTHLKKKLKKFQAALDPHSASDSTASGQFLPKSFSDRELAAQYHGSSLG

SEQ ID NO: 26684 - protein, 334 aa, Sinorhizobium meliloti
MTSKKKPTVYITRKLPDVVETRMRELFDAELNIDDTPRSQPELVAAVKRADVLVPTVTDRIDAALIEQAGPQLKLIAAFSNGVDNIDVDAAARKGITVTNTPNVLTEDTADMTMALILAVPRRLAEGAQVLTDRKGEWAGWSPTWMLGRRIAGKRIGIVGMGRIGTAVARRAKAFGLSIHYHNRHRVKPETEEMLEATYWDSLDQMLARVDIVSVNCPSTPATYHLLSARRLALMRPDSYIVNTARGGIIDEAALIKSLREGKIAGAGLDVFENEPCVNPKLIKLAGEGKVVLLPHMSSATLEGRIDMGEKVVINIRTFFDGHRPPDRVLPGRD

SEQ ID NO: 26685 - protein, 426 aa, Actinobacillus pleuropneumoniae serovar 1 str. 4074
MSKSEQLFEKAQKVIPGGVNSPVRAFKGVGGTPVFIQKAEGAYITDSDGKKYIDYVGSWGPMVLGHNHPAIIDAVLKAVPNGLSFGAPTESEITLAELVTKLVPSIELVRMVSSGTEATMSAIRLARGYTGRDKIIKFEGCYHGHSDSLLVKAGSGALTLGQPSGPGVPADFAKHTLTCTYNDLDSVKTAFEQYPNEIACLIVEPVAGNMNCIPPKNDFLKGLRALCDQYGAVFIIDEVMTGFRVALGGAQAYYDVKPDLTTLGKIIGGGMPVGAFGGKKEIMEYIAPTGPVYQAGTLSGNPIAMAAGLACLTELSKAGNEEKLAAQTKTLAEGFKALADKHNVLFTAQYVGGMFGLFFTEQAEITNFQEVMKCDAAKFNRFFHLMLEQGVYLAPSAFEAGFMSLAHSDEDIQATLAAADKAFAQL

SEQ ID NO: 26686 - protein, 282 aa, Arabidopsis thaliana
MGRSPCCEKAHTNKGAWTKEEDERLIAYIKAHGEGCWRSLPKAAGLLRCGKSCRLRWINYLRPDLKRGNFTEEEDELIIKLHSLLGNKWSLIAGRLPGRTDNEIKNYWNTHIRRKLINRGIDPTSHRPIQESSASQDSKPTQLEPVTSNTINISFTSAPKVETFHESISFPGKSEKISMLTFKEEKDECPVQEKFPDLNLELRISLPDDVDRLQGHGKSTTPRCFKCSLGMINGMECRCGRMRCDVVGGSSKGSDMSNGFDFLGLAKKETTSLLGFRSLEMK

SEQ ID NO: 26687 - protein, 256 aa, Jatropha curcas
MSYSNPDPPDPDPNPLPESKWIQFPEFPHPKPTWLNFLGPKPVPMKQVGSPPKPTKLYRGVRQRHWGKWVAEIRLPKNRTRLWLGTFDTAEEAALAYDKAAYKLRGDFARLNFPNLRHQGSHIEGSFGEYKPLHSSVDAKLQAICQSLAESQKQGGKAEKQSNSSAKKKTSVGTTPATAEKVKEAKAPQQVVPDKCCKVETPSSVLTESEASGGSSPLSDLTFPDLEEAPLDVDSGNFNLEKYPSYEIDWASLLSS

SEQ ID NO: 26688 - protein, 177 aa, Oryza sativa
  misc_feature (21)..(21): Xaa can be any naturally occurring amino acid
  misc_feature (115)..(115): Xaa can be any naturally occurring amino acid
  misc_feature (121)..(121): Xaa can be any naturally occurring amino acid
  unsure (1)..(177): unsure at all Xaa locations
MREYRESAYGGEGGGRDAEHXGADHGDGHGDHGIISIHQQRLRVVGLQIVLAQTRHHHRQQHGHVVLKQMQMVSPPPAARHRRRRRPCGDFLSACSLCRRELGPDKDVYMYRGDXGFCTRXEECRWQQIMTDEARERDAMAKKERLGLHHRTPRPPPAAMRGVLRRKGTKLAVPGPA

SEQ ID NO: 26689 - protein, 260 aa, Triticum aestivum
  misc_feature (56)..(56): Xaa can be any naturally occurring amino acid
  unsure (1)..(260): unsure at all Xaa locations
GRPTRPKLGDAFHAREYRSIVFQEPRFVEYFRSATPETEYGRMNIGSRPSKRKPSXGGIESLRAIPWIFAWTQTRFHLPVWLGFGAAFKHIIQKDIRNIHTLKEMYNEWPFFRVTLDLLEMVFAKGDPGIAALYDKLLVAEDLQSFGEQLRQNFEETKQLLLQVAGHKDVLEGDPYLKQRLRLRESYITTLNVCQAYTLKRIRDPSFEVTPQQPPLSKEFCDKEPAELVQLNRGSEYAPGLEDTLILTMKGIAAGMQNTG

SEQ ID NO: 26690 - protein, 213 aa, Zea mays
APMKLYGAVMSWNLTRCATALEEAGSDYEIVPINFATAEHKSPEHLVRNPFGQVPALQDGDLYLFESRAICKYAARKNKPELLREGNLEEAAMVDVWIEVEANQYTAALNPILFQVLISPMLGGTTDQKVVDENLEKLKKVLEVYEARLTKCKYLAGDFLSLADLNHVSVTLCLFATPYASVLDAYPHVKAWWSGLMERPSVQKVAALMKPSA

SEQ ID NO: 26691 - protein, 479 aa, Triticum aestivum
  misc_feature (224)..(224): Xaa can be any naturally occurring amino acid
  unsure (1)..(479): unsure at all Xaa locations
MARNAADKATSIDAQLRMLAPKKLSEDDELVEYDALLIERFLCILQGLQGDKIRETVQECYELAAEYERTLDPKQLDEIGNLLARLDPEDSIVTTKSLSHMLILANLAEEVQIAYRRRQKLKSGDFADENSATTESDIEETLKRLVCQLKKSPLEVFDALKNQTVDLVLTAHPTQSVKEVTCSKNMAGIRSCLTQLYAKDITPDEKQELDEALQREIQAAFRTXDEIRRAPPTPQDEMRAGMSYFHETIWKGVPKFLRRVDTALKNIGIKERVPYNAPLIQFSSWMGGDRDGNPRVTPEVTRDVCLLARMMAANLYYAQIEDLMFELSMWRCSDELRVKADQLHRASKKDTTKHYIEFWKQVPPSEPYRVILSDVRDKLYNTRERSRHLLASGFSEIPDDAIFTDVEQFLEPLELCYRSLCACGDHTIADGNLLDFLRQVSTFGLSLVRLDIRQESERHTDVMDVITKYLGVGSYREWS

SEQ ID NO: 26692 - protein, 341 aa, Oryza sativa
  misc_feature (222)..(222): Xaa can be any naturally occurring amino acid
  misc_feature (248)..(248): Xaa can be any naturally occurring amino acid
  unsure (1)..(341): unsure at all Xaa locations
MVRPPCCDKDGVKKGPWTPEEDLVLVSYVQEHGPGNWRAVPTRTGLMRCSKSCRLRWTNYLRPGIKRGNFTDQEEKLIVHLQALLGNRWAAIASYLPERTDNDIKNYWNTHLKRKLQGGGAGGDGDGGAAGDAVSPKPAAQRPASSSKGQWERRLQTDIDMARRALREALTSLDDVKPPHQPDAANAAAGGGGATTGAAASAGADSPAASSTSGASQCSPSXRGYVLTTENISRMLDGWARKKGGGGXRRAAGSGPATPGATESASGSSEASEVSYGGTALSAAAAPASAFEYETKPTVTAAAAADAGDETQLSAIESWLFADADGIESGSLLDAAMDYTF

SEQ ID NO: 26693 - protein, 640 aa, Gloeobacter violaceus PCC 7421
MWIMTTTTVRFPIDISAYKPLALDFANPVLSAEQRETLRANIQFCRDAIVFFTATGAARGVGGHTGGPYDTVPEVMILEALFRGNPDKFVPIFFDEAGHRVATQYLMAALHGELPFEQLLQYRAADSHLPGHPELGLTPGVKFSSGRLGHMWPYVNGVAMANPDKVVFCLGSDGSQQEGNDAEAARLAVAQGLNVKLIVDDNDVTIAGHPSKYLPGFSVAKTLAGHGLAIDEGDGEDLDGLYARICTAITAAGPVAVVNKRPMCVGIDGLEGSTHGHDVISVDLAVAYLEKRGQSEAVKFLKNVAKPKQSYTFLGSGTQMGSNRNVFGEAVVAVLGRMDAAERKARVMCIDSDLEGSCGLKKIHDTFPEIFVASGIMERGNLSAAAGFGMEKGKQGIFGTFSAFLEMCISEITMARLNYSNVLCHFSHSGIDDMADNTCHFGLNNFFADNGLDDGYETRLYFPADAAQMKACVEAVFHQPGLRFIFSTRSKTPNILDADGKDLHGEGYTFTPGADEVVREGTAGYIVSFGESLYRALDAVERLKEEGIDVGLINKPTLNVIDEKMLAKVGSSPMVLVVESFNRRTGLGSRFGSWLLERGYAPKFAHLGTHKEGCGGLWEQFPHQGIDPVGIIAKVKELVG

SEQ ID NO: 26694 - protein, 344 aa, Glycine max
  misc_feature (82)..(82): Xaa can be any naturally occurring amino acid
  unsure (1)..(344): unsure at all Xaa locations
MSNAAEQARSLFGICLSHRPKWQQFLICSSGFFFGYLVNGICEVLYRVYTQVHVLINWLIFFNIIWWFESVNPLKKKKKILXALFSRLTKGSLAFLNYPAQIMFKSTKVLPVMVMGAFIPGLRRKYPFHEYVSAVLLVIGLILFTLADAQTSPNFSAIGVLMISGALIMDSFLGNLQEAIFTMNPQTTQMEMLFCSTVVGLPFLIPPMLFTGELFKAWTSCSQHLYVYGVLVFEAMATFIGQVSVLSLIAIFGAANTAMITTARKAVTLLLSYLIFTKPLTEQHATGLLLIAMGITMKIFLDDRSNKKALNSSPIASIPKPSEDKELMAQSDYAGEHEERRPLV

SEQ ID NO: 26695 - protein, 424 aa, Debaryomyces hansenii CBS767
MSDSKSYIIVIKLGTSSLVDEVTREPRIANMSLIVETIVKLRRQGHKIVLVSSGAIAFGMKRVGISSKPSKLAAVQALASIGQGRLIGLFDDLFRQMEQTIGQILLTRNDISDFNQYKNAKNTLHELLDMGVIPIVNENDTLSVAEIKFGDNDTLSAITAGMVHADYLFLMTDVQCLYTDNPRSNPDAEPILVVDKVDDLDVKTDTESGGSKVGTGGMTTKLIAAGLATNVGVTTIITLSSQPDSILSIVSNIQSMDKLDLSTEQQTRYIAGEIKKNKIPLHTRFLGLPRATKIISDKRFWLLHGIKTKGTLYIDHLCYEALTRKDRAGLLPVGIVAVEGSFHESECVSIKVIAERSSPLSDGLEVGTCRVNYSAIEINLIKGLHSSEIEPVLGFADSEYVAHRDNLAFQPTLPPSTESLFENN

SEQ ID NO: 26696 - protein, 166 aa, Triticum aestivum
  misc_feature (109)..(109): Xaa can be any naturally occurring amino acid
  misc_feature (123)..(123): Xaa can be any naturally occurring amino acid
  misc_feature (131)..(131): Xaa can be any naturally occurring amino acid
  unsure (1)..(166): unsure at all Xaa locations
MAPAVMASSATTVAPFQGLKSTAGLPVSRRSSGSLGSVSNGGRIRCMQVWPIEGIKKFETLSYLPPLSTEALLKQVDYLIRSKWVPCLEFSKVGFVFREHNSSPGYYDXRYWTMLKLPKFGCXDATQVLNXWRSQEGVPDPMSRIGSQLRKCMRNSLKHGKDPRLT

SEQ ID NO: 26697 - protein, 197 aa, Glycine max
FTLAGLTARSYRYYDPATRGLDFQGLLEDLSSAPSGAIVLLHACAHNPTGVDPTLEQWEQIRQLMRSKALLPFFDSAYQGFASGSLDKDAQSVRMFVADGGELLMAQSYAKNMGLYGERVGALSIVCGSADIAVKVESQLKLVIRPMYSNPPLHGASIVATILKDSAMFDEWTLELKAMADRIISMREQLFNALKIR

SEQ ID NO: 26698 - protein, 611 aa, Bacteroides thetaiotaomicron VPI-5482
MKEFLQLMRRFVSPYKKYIGWAILLNILSAVFNVFSFTLLIPILDILFKTGENNKVYEYMEWGTAGFKDVAINNFYYYVSQMIQDNGPTTALIFLGLFLALMTLFKTSCYFASSAVMIPLRTGVVRDIRIMVYAKVMRLPMGFFSEERKGDIIARMSGDVGEVENSITSSLDMLIKSPIMIILYFITLIATSWKLTLFTVLVLPAMGWLMGKVGRKLKRQSLEAQGKWSDTMSQLEETLGGLRIIKAFIAEDRMIDRFTRCSNELRDAVNKVAMRQALAHPMSEFLGTILIVSVLWFGGALILGHNSSLTAPTFIFYMVILYSVINPLKDFAKAGYNIPKGLASMERVDKILKAENNIKEIPNPKPLTGMNDRIEFKDISFSYDGKREVLKHVNLTVPKGKTVALVGQSGSGKSTLVDLLPRYHDVQGGDITIDGTSIKDVRIADLRSLIGNVNQEAILFNDTFFNNIAFGVENATMEQVIEAAKIANAHDFIMEKPEGYNTNIGDRGGKLSGGQRQRVSIARAILKNPPILILDEATSALDTESERLVQEALERLMKTRTTIAIAHRLSTIKNADEICVLYEGEIVERGRHEELLELDGYYKRLNDMQAL

SEQ ID NO: 26699 - protein, 568 aa, Debaryomyces hansenii CBS767
MTKDYIWWKDASVYQIWPASYKDSNGDGVGDIPGIISTLNYVKSLGTDVIWLSPMYDSPQDDMGYDISNYEKVYPKYGTLEDMDNLIEGTHKRGMKLILDLVINHTSTEHDWFKQSRSSKTDPKRDWYIWKPARYDAEGNRHPPNNWVSHFSGSAWAYDETTDEYYLHLFAESQPDLNWENEETRKAIYKSALSFWFEKGIDGFRIDTAGMYSKVQSFSDAPIVFPDSEWQPCQKYFQNGPRIHEFHKEMFASVTSKYDAMTVGEVGHSPREDSLKYVSAKEKEMNMMFLFDAVEVGSNPSDRFIYDGYKLTDFKKAVQNQSSFIEGTDAWSTVFYENHDQPRSITRFGNDSNKYRVKSGKLLALLQSTLSGTLYIYQGQEIGMTNLPRSWSIDEYLDINTINYYKEFKAKYGDNKEKMDKLMDNINLLARDHARSPVQWDDTENAGFSTGKPWMRVNDNYKEINVASQVNDPNSLFSFWKQSLKIRKEYKDLLIYGSFKILDNENQKIFTYVKEAAGQKAYIVLNFTSESLKFENLDGGKLELLHSNVNVEDEGTLSPYEGRFYLIK

SEQ ID NO: 26700 - protein, 253 aa, Nicotiana tabacum
MALETLNSPTTTTPPTFQFENNGQLRYLENWTKGKRSKRPRSMERQPTEEEYLALCLIMLARSDGSANQEQSLTPPPAPVMKIHAPPEEKMVYKCSVCGKGFGSYQALGGHKASHRKLVAGGGGGDDQSTTSTTTNATGTTSSANGNGNGSGKTHECSICHKCFPTGQALGGHKRCHYDGGNSNASVSVSASVGVTSSEGVGSTVSHRDFDLNIPALPEFWPRFGFGEDEVESPHPAKKSRLSLPPKFELFGE

SEQ ID NO: 26701 - protein, 241 aa, Populus trichocarpa
MEYQNESLESSPLRKLGRGKVEIKRIENTTNRQVTFCKRRSGLLKKAYELSVLCDAEVALIVFSSRGRLYEYSNDSVKSTIERYKKASADSSNTGSVSEANAQYYQQEAAKLRSQIGNLQNSNRHMLGEALSSLSVKELKSLEIRLEKGISRIRSKKNELLFAEIEYMQKREVDLHNNNQLLRAKISENERKRQSMNLMPGGADFEIVQSQPYDSRNYSQVNGLQPASHYSHQDQMALQLV

SEQ ID NO: 26702 - protein, 526 aa, Triticum aestivum
MAMAMRRAAALGARHILAASASASSRVASRRHMGSVDAGAAMDKIRAAGLLRTRGLIGGQWVDAYDGKTTEVQNPATGEVLANVACMGNRETADAITSANTTFYTWSKLTASERSKALRKWHDLLMSHKEELALLMTLEQGKPMKEALGEVNYGASFIEFFAEEAKRVYGDIIPPTLADRRLLVLKQPIGVVGAITPWNFPLAMITRKVGPALACGCTVVVKPSEFTPLTALAAADLALQAGIPAGALNVVMGNAPEIGDELMQSTQVRKITFTGSTAVGKKLMAGSANTVKKVSLELGGNAPCIVFDDADIDVAVKGSLAAKFRNSGQTCVCANRILVQEGIYEKFASAFVKAVQSLQVGNGLEESTSQGPLINEAAVEKVEKFVGDATSKGANIMLGGKRHSLGMSFYEPTVVGNVSNDMLLFREEVFGPVAPLIPFKTEEEAIHLANDTNAGLAAYMFTKSIARSWRVSEALEYGLVGVNEGLISTEVAPFGGVKQSGLGREGSKYGMDDYLEIKYVCMGNLG

SEQ ID NO: 26703 - protein, 238 aa, Populus trichocarpa
MAYQNEPQESSPLRKLGRGKVEIKRIENTTNRQVTFCKRRNGLLKKAYELSVLCDAEVALIVFSSRGRLYEYSNNSVKSTIERYKKACADSSNNGSVSEANAQFYQQEAAKLRSQIGNLQNSNRNMLGESLSALSVKELKSLEIKLEKGIGRIRSKKNELLFAEIEYMQKREIDLHNNNQLLRAKIAENERKRQHMNLMPGGVNFEIMQSQPFDSRNYSQVNGLPPANHYPHEDQLFS

SEQ ID NO: 26704 - protein, 630 aa, Bacteroides thetaiotaomicron VPI-5482
MRKWRIEDSEELYNITGWGTSYFSINDAGHVVVTPRRDGVTVDLKELVDELQLRDVASPMLLRFPDILDNRIEKMSSCFKQAAEEYGYKAENFIIYPIKVNQMRPVVEEIISHGKKFNLGLEAGSKPELHAVIAVNTDSDSLIVCNGYKDESYIELALLAQKMGKRIFLVVEKMNELKLIAKMAKQLNVQPNIGIRIKLASSGSGKWEESGGDASKFGLTSSELLEALDFMESKGLKDCLKLIHFHIGSQVTKIRRIKTALREASQFYVQLHSMGFNVEFVDIGGGLGVDYDGTRSSNSEGSVNYSIQEYVNDSISTLVDVSDKNGIPHPNIITESGRALTAHHSVLIFEVLETATLPEWDDEEEIAPDAHELVQELYSIWDSLNQNKMLEAWHDAQQIREEALDLFSHGIVDLKTRAQIERLYWSITREINQIAGGLKHAPDEFRGLSKLLADKYFCNFSLFQSLPDSWAIDQIFPIMPIQRLDEKPERSATLQDITCDSDGKIANFISTRNVAHYLPVHSLKKTEPYYLAVFLVGAYQEILGDMHNLFGDTNAVHVSVNEKGYNIEQIIDGETVAEVLDYVQYNPKKLVRTLETWVTKSVKEGKISLEEGKEFLSNYRSGLYGYTYLE

SEQ ID NO: 26705 - protein, 211 aa, Zea mays
SRKRKTLVYSKLIYWVPAGREIWLDLLKSMMTEVEWRLSKYVPTEEEYMTNAYLTFALGPIVLPALYFVGPKIPESIVKDPEYDELFKLMSTCGRLLNDVQSFEREHKEGKLNIVSLLVLHGGSTSISDARKKLQKPIDTCRRDLLRLVLREESVVPRPCKELFWKMCKVCYFFYSRIDGFRSPVERAKEVNAVINEPLKLQENHTHMSVL

SEQ ID NO: 26706 - protein, 370 aa, Aspergillus awamori
MSNLPHEPEFEQAYKELASTLENSTLFQKNPEYRKALAVVSVPERVIQFRVVWEDDAGNVQVNRGFRVQFNSALGPYKGGLRFHPSVNLSILQVPWFRADLQECSHWPEHGWWYVEHMIAHATNGQESFKGKRVAISGSGNVAQYAALKVIELGGSVVSLSDTQGSLIINGEGSFTPEEIELIAQTKVERNELASIVGAAPFSDANKFKYIAGARPWVHVGKVDVALPSATQNEVSGEEAQVLINAGCKFIAEGSNMGCTQEAIDTFEAHRTANAGAAAIWYAPGKAANAGGVAVSGLEMAQNSARLSWTSEEVDARLKDIMRDCFKNGLETAQEYATPAEGVLPSLVTGSNIAGFTKVAAAMKDQGDWW

SEQ ID NO: 26707 - protein, 234 aa, Bordetella parapertussis 12822
MQTINAVLLDLDGTLLDSVPDLAIAANAMRRDLGMAQLPEALVATFVGKGVDNLVRRALAGSLDGAAPDEALFARGRLSFFKHYHAVNGAHATVFDGVKAGLAAMREQGLPLAVVTNKPTEFTLPLLERTGLAGFFRLVVCGDTCARRKPDPDQVLHACDRLGVAPAQAVTIGDSVNDALAGRRAGTAVLAVPYGYNEGMDVRSLDVDGIVDTLVDAAHWISQRNAKPQRTTAA

SEQ ID NO: 26708 - protein, 138 aa, Brassica napus
  misc_feature (92)..(92): Xaa can be any naturally occurring amino acid
  unsure (1)..(138): unsure at all Xaa locations
MDSLRFLRILLVSASILLVSLLYTVTAGDIVHQDDLAPKKPGCENDFVLSLVQTWIDGTEDAEFVGVGARFGSWIVLVEKNASGSPPVFGTXNRTLVVFANPRDCCSPLKTKRIGDVVIVDRGNCRFTAKANNAEAAG

SEQ ID NO: 26709 - protein, 329 aa, Escherichia coli K12
MKLAVYSTKQYDKKYLQQVNESFGFELEFFDFLLTEKTAKTANGCEAVCIFVNDDGSRPVLEELKKHGVKYIALRCAGFNNVDLDAAKELGLKVVRVPAYDPEAVAEHAIGMMMTLNRRIHRAYQRTRDANFSLEGLTGFTMYGKTAGVIGTGKIGVAMLRILKGFGMRLLAFDPYPSAAALELGVEYVDLPTLFSESDVISLHCPLTPENYHLLNEAAFEQMKNGVMIVNTSRGALIDSQAAIEALKNQKIGSLGMDVYENERDLFFEDKSNDVIQDDVFRRLSACHNVLFTGHQAFLTAEALTSISQTTLQNLSNLEKGETCPNELV

SEQ ID NO: 26710 - protein, 409 aa, Rubrivivax gelatinosus PM1
MPKPIAKSSKLANVCYDIRGPVLDKARAMEEEGQKIIKLNIGNLAVFGFDPPDEIVQDMIRNLSQTAGYTDSKGLFAPRKAVVHYAQEKAISGVTVDDVYLGNGASELIVMSLNALLDNGDEVLVPAPDYPLWTAAVSLSGGNPVHYLCDEASDWYPDIDDIRRKITPNTRAIVVINPNNPTGALYPESLLREIVELARQHQLIIFADEIYDKTLYDGNTHTSIASLADDVLCVTLNGLSKNYRACGYRAGWMVVSGDKRCAKDYIEGLNMLASMRLCANTPGQLAIQTALGGYQSIKDLVAPGGRLTRQRDMAYELLSQIPGVSVVKPKAALYMFPRLDPKLYPIQDDQQFAYELLAEEKVLIVQGTGFNWPQPDHFRVVFLPNSDDLSDAIGRIARFLDHYRKRHSV

SEQ ID NO: 26711 - protein, 481 aa, Pseudomonas aeruginosa UCBPP-PA14
MNGLPMNLIWFRCDLRTTDNSALLAAADGRPCVALYLLSPAQWREHDDAPCKVDFWLRNLGELQRQLAALNIPLLVRDCGHWRQAPEVIGRLCRELGIGAVHVNQEYGVNEERRDQAVGQRLREQGVAFHSHLDQLFFAPGSVLTRTGGYFQVFSQFRKVCHERLYQALPGVRPRPQPQPPHALASDPLPDAVPAFPRPADSLRRLWPAGEEVAQERLRGFADQHLADYHERRDFPALPGTSQLSPYLAAGVLSPRQCLDAALVANRGEFSGGQQGAATWINELLWREFYKHILVGYPRVSRHRPFREETEALRWRQAPAELEAWQQGRTGIPIIDAAMRQLLATGWMHNRLRMVVAMFLSKNLLIDWREGERWFMRHLIDGDLAANNGGWQWSASTGTDAVPYFRLFNPLSQSERFDPRGEFIRHWLPELAGLERKAIHDPSSLGLFAGVDYPRPMVDLKASRERALAAFRNLPPRDGRA

SEQ ID NO: 26712 - protein, 216 aa, Xanthomonas campestris pv. phaseoli
MLGIGAFKQRMPRPGEALPGREQALPLHNTHLVNGHPLRGEFTGLAQVQFGLGCFWGAERKFWNVPGVYTTAVGYAGGQTPNATYSEVCSGQTGHTEAVLVVFDEQAVSFAQLLRTFWESHDPTQGMQQGNDVGTQYRSAIYCTTQAQYDAALASRDAYQQQLTASGYGDITTEIRFPAPTFYYAEDDHQQYLAKHPNGYCGLGGTGVSCPIGLDA

SEQ ID NO: 26713 - protein, 147 aa, Bacillus clausii KSM-K16
MSSRDLDTLYRQVIMDHYKNPRNRGELEGDTLTVNLNNPTCGDRVQVQMKVEDGKVDRAVFTGEGCSISLASASMMTQAVKGLTVEEALALSKLFSDMMQGKDYDEGKFDLGDIEALTGVTKFPARIKCATLAWKALEKGLNDTHSS

SEQ ID NO: 26714 - protein, 68 aa, Lycopersicon esculentum
AGIGPGVYDIHSPRIPSTEEIAVRVNKMLAVLDTNILWVNPDCGLKTRKYTEVKPALQNMVSAAKTIR

SEQ ID NO: 26715 - protein, 434 aa, Cenarchaeum symbiosum
MDLEREYRAKTRGSAGIFARSRRYHVGGVSHNIRYYEPYPFVTRSARGKHLVDVDGNKYTDYWMGHWSLILGHAPAQVRSAVEGQLRRGWIHGTANEPTMRLSEIIRGAVKAAEKIRYVTSGTEAVMYAARMARARTGKKVIAKVDGGWHGYASGLLKSVNWPYDVPESGGLVDEEHTVSIPYNNLEGSLEALRRAGGDLACVIVEPMLGGGGCIPAEPDYLRGIQEFVHSKGALFILDEIVTGFRFDFGCAYKKMGLDPDVVALGKIVGGGFPIGVVCGKDEVMCISDTGAHARTERAYIGGGTFSANPATMTAGAAALGALRERRGTLYPRINSMGDDARARLSRIFDGRVAVTGRGSLFMTHFTPDGARRISSAADAAACDVHLLHRYHLDMITRDGIFFLPGKLGAISAAHSRADLGAMYSASERFAGGL

SEQ ID NO: 26716 - protein, 168 aa, Lycopersicon esculentum
TRLNCVIVSVDGSEESMNALNWTLDNIKLKPHDPDSPESQGFIVILHVQSPPSIAAGLNPGAIPFGGPSDVEVPAFTAAIEAHQKRITQAILDHALGICAKKNANVKTQVVIGDPKEKICDAVEEMNADLLVMGSRAFGPIKRMFLGSVSNYCTNHAQCPVIIVKATP

SEQ ID NO: 26717 - protein, 226 aa, Hordeum vulgare subsp. vulgare
MAATFNVNAEAGLKKLDGYLLSRSYISGYQASKDDLAVYSEFSVAPPSTCTNVARWYNHIDALLKLSGVTAPGQGVKVLSSIVPETSTTDVAEAPAADDDDDSDVDLFGEETEEEKKAAEERAAKAKASTKKKESGKSSVLLDVKPWDDETDMVKLEEAVRSIKMEGLLWGASKLMPVGYGIKKLQIMMTIIDDLVSVDTLIEDHLCVEPANEYIQSCDIVAFNKI

SEQ ID NO: 26718 - protein, 461 aa, Bradyrhizobium sp. BTAi1
MAEFDVDLFVIGGGSGGVRAARIAAGYGARVMVAEEYRMGGTCVIRGCVPKKLFVIGSHVRQEIADAAGFGWTIPTATFDWKTLIANKDKEIARLEAAYTANVEKSGARIVKTRAVLEDAHTVRLATGETIRAKYILIATGGAPNHGTPIPGIEHVISSNEAFHLEELPRRIVIQGGGYIALEFACIFANFGSDVTVVYRGDNILRGFDEDVRKHVRAEMEKEGITILTGCTVASVDKHGKDYTTHLSNGSSIASDKVMFAIGRHPAVANLGLEKAGVAINPRNGGIAVDAFSQSSVPSIYAIGDVTHRFNLTPVAIREGHAFADTVFGGKTVRVDHADIPTAVFSQPEVGTVGLTETQARELYDRVDIYKTSFRPIKATMSGRDTRVLMKLVVDGASDRVLGCHIVGDMAAEITQAVAIAIKMKATKADFDATVALHPSAAEELVTMRTVTERHVRQAAE

SEQ ID NO: 26719 - protein, 314 aa, Mannheimia succiniciproducens MBEL55E
MIMKKIAILGECMIELNGEPFGRMRQTYGGDSLNTATYLARVSRREQFEISYVSALGKDKLSLGMLAHWRNDGINTDCVLLDEKRQPGLYLIQLDEKGERTFLYWRNQSAARYLLQHEGYTEVLARLATADMIYLSGISLAILPENDRTLLIRQLGNLKKAGVKIAFDSNYRPALWDSFQQTQACYQALLPLVDLALVTFDDEQSLWRDENVQQTISRLVQLGVGTVVVKSGEHGAVFYHNGETQQVATEVVQRVVDTTSAGDAFNAGFLNGYLQQKSLVDCCRQGNKLAGIVIQHKGAIIDKTATQHFIREFN

SEQ ID NO: 26720 - protein, 136 aa, Triticum aestivum
MKRPRGGSPSSLAAMTNPDDDGYGVVGMEAADADADADEEMMACGGGGGEKKRRLSAEQVRALERSFEVENKLEPERKARLARDLGLQPRQVAVWFQNRRARWKTKQLERDYAALRHSYDALRHDHDALRRDKDAL

SEQ ID NO: 26721 - protein, 385 aa, Zea mays
MSGRGKGGKGLGKGTPRVPFSSLFLNVAGAPASCLSPPASDREGIGMASHHSEPLDPADADDPSDNNPELPCPSYHIVTKPGQLPVEFLEPSAAQKLVIGFDCEGVDLCRNGALCIMQLAFPDAVYLVDAIEGGKELIQACKPALESDHITKVIHDCKRDSEALYFQFGIKLHNVMDTQIAYSLIEEQEQEGKKKTSDDYNYISFVSLLADKRYCGILYPEKEEVRTLLRQDPNFWTIRPLSDMMVRAATDDVRFLLSIYAKMMEKLSKVSLWRLAVRSELYCRCFCLSDNQFADWSPLPPVPDDIEADVYVPEADILSVLDVPPGKMGRVIGRKGSTIMAVKECCKVEIHIGGAKGPPDRVFIIGPEKEVRKAEAIFRGRMLEF

SEQ ID NO: 26722 - protein, 176 aa, Exiguobacterium sp. 255-15
MEKATFAGGCFWCMVTPFEELPGIHSIVSGYTGGHVDNPTYEQVKTGTTGHSEVVEITFDPALFSYERLLELYWPQTDPTDAGGQFQDRGTQYAPAIFYHTEEQRLAAIASRDALAATNRFKQPIVTRIEPAHAFYPAEEYHQDFHKKNPAHYKKDRKASGRDAFIDVAWKEEVTV

SEQ ID NO: 26723 - protein, 243 aa, Exiguobacterium sp. 255-15
MIEDGCLDGVDAIFGTHLENDLPVGSIGYHSGHTLCAIDEFEIVVHGQGGHAQAPHRTQDALVAGAQLVCNLQHLVSRRVDPFEPAIVAIGSFHAGTAPNIVTGEARIVGEIRTFNEQLRHQLRQQVDLVARTTCSGVGADYSIDFTTGYPSLWNHPDETQLVQEAAGFLPEAQVREMKPMMAADDFAYYLEKVPGSYFFTGSAKTDGRTIYPQHHPKYEIDERALLIGAKTLGATVLRALQT

SEQ ID NO: 26724 - protein, 432 aa, Zea mays
MDAAADDKPEISDDTAHQISVDPWYQVGFVLTTGVNSAYVLGYSGSIMVPLGWIGGTCGLLLAAAISMYANALLARLHEVGGKRHIRYRDLAGHIYGPKIYGLTWALQYINLFMINTGFIILAGQALKATYGLFSDDGVLKLPYCIAISGFVCALFAIGIPYLSALRIWLGFSTLFSLMYIVIAVVLSSRDGITAPARDYSIPQSSQSTRVFTTIGSIADLVFAYNTGMLPEIQATIRPPVVKNMEKALWFQFTIGSLPLYAVVFVGYWAYGSSTSGYLLNSVTGPVWVKAVANLSAFFQTVIALHIFASPMYEFLDTKYGSGRGGPFEIHNVAFRVAVRGGYLTVNTLVAAVLPFLGDFMSLTGALSTFPLTFVLANHMYLMVKGPKLGAIQKSWHWLNVLGFTALAVAAAVSAIRLIMRDSSTYHFFADL

SEQ ID NO: 26725 - protein, 547 aa, Neurospora crassa
MPPALRPAAPSRSLLRYLRAQSEGLSFAPTCRAAAERHPALQCRHGCTAGGSTRPPRQPSSSTTTRSLSTATPPKRTQLRAGLVDLEAILPKSLRKQRTTKSLLALPPPAGSLRFSSNQSSDCDSKRPKLREWLFGNGEKKGPPDTRLNDDDIRVALEEESGSIFQRRALTAKAAMDPRLRCTEVDENGNVVMVDGELKKSELIAKYGLLPRDLRKIDSSNLPHILIRPSAILLNLLHLKVLIKHDCVLLFDVYGSKSSYPQSAFMYDLQGKLQQKQSSGANSLPYEFRALEAVLMSVTSELEADFEAVRDPVIRILSELEDDIDREKLRVLLVLSKRVSTFEQKAKLVRDAIEELLEADDDLASMYLTEKTHDLYRGEDDHTEIELLLESYNKICDEVVEEASNLVSSIRNTEEIIRAILDANRNSLMLLDLKFSVGTLGLAMGTFLASWYGMNLENFIEETNWGFAMVTSVSTVASLIVCWYGLVKLRKVQRVKMGDLHNRNAPNHWFRDESTDVLLDPSNRERLRRINSMKSAQQKRSTSKKWF

SEQ ID NO: 26726 - protein, 149 aa, Exiguobacterium sp. 255-15
MQENLFTYLTEYESEMIRLRRDFHRHPELSFQEVRTPAKIAAFYDALGIPYRANVGGSGIVATLTGTRPGKTIAIRADFDALPLQEETELSFRSIRPGVMHACGHDGHTAIVLGLAAAFHAIQDELAGTVVFIHQHGEEVFPGGCHPDD

SEQ ID NO: 26727 - protein, 289 aa, Triticum aestivum
  misc_feature (181)..(181): Xaa can be any naturally occurring amino acid
  misc_feature (200)..(200): Xaa can be any naturally occurring amino acid
  unsure (1)..(289): unsure at all Xaa locations
MMMASGPRRTVVCCVLPLLLLLAGAARAAGNFYQDVDITWGDGRGKILGGGDVLTLSLDRASGSGFQSKNQYLYGRFDMQIKLVPGDSAGTVATFYLSSQGSAHDEIDFEFLGNASGQPYTVHTNVYSQGKGGREQQFRMWFDPTADFHTYSVVWNPTHILLYVDGTPIREHRNREAATGXWRTPRSQAMRVYASVWDAXEEWATQGGRVKTDWSRAPFVASYKGFPPSGCASQDAAACARSNGAWMYQELDATALDRLQWVQKNYMIYNYCADTWRFKDGAPPECATK

SEQ ID NO: 26728 - protein, 626 aa, Solibacter usitatus Ellin6076
MVAISLLRRGRLRAAGLIYLLGIWVMSTGIIVLNRGIHSVGLVYYVALPVTGAWLFGFQGALRIAAGCVGSALVLALLEMAGLPLPTYFPERPFGIWTMVAAATVMTTVPVARVLQLLKQTLTMHRAAQKALREYQSRLEEVVQRRTAELVEARDQAQAASRAKSVFLANMSHELRTPLNAILGFSKLVRGGPGLSEVQRKDLDIISRSGAHLLDMIDEVLDRAKIETGGVTTKKTAVDLHRVVHEVVELMRPRAQAKNLEFVFEHPETYPYCIRSDAGKLRQVLLNLTGNAIKFTQRGSVTLRLWLEPMAGDAPGSQMLLTLDVSDTGIGIAPEDQERIFEPFAQAGNGGAARGTGLGLSISREFVRAMGGSLAVQSILRVGSRFHVELPVECAADGVKGEGEAREEVIGLEAGQPEYRTLLVGDEQDNIVLLERLLEDAGFRVCAAESGADGIEVFQIWHPHLILADLRLSGMSSVELARCVRQMEGGQEVKIVALTASLSEAQPGVDETLRNPCESREIFDCIQRMLGVRYRYGTAGASLRATEGEAGLNPAALSAISPGLRDELENALILLDVKRVTTLVQEVAEQAPALGSAMAGLAERLAYTSILQAIAVRKSSALEGQA

SEQ ID NO: 26729 - protein, 430 aa, Shewanella sp. MR-4
MTRSEALFEQAKKTIPGGVNSPVRAFNGVGGSPLFIEKADGAYIYDADGKAYIDYVGSWGPMILGHNHPKIREAVLAAVHNGLSFGAPTELEVQMAEKVIAMVPSIEQVRMVSSGTEATMSAIRLARGFTNRDKILKFEGCYHGHADCLLVKAGSGALTLGQPSSPGIPEDFAKHTLTAVYNDLDSVRTLFEQYPIEIACIIIEPVAGNMNCIPPIPGFLEGLRTMCDEFGALLIIDEVMTGFRVSRSGAQGHYGVTPDLTTLGKVIGGGMPVGAFGGRKDVMQFIAPTGPVYQAGTLSGNPIAMSAGLAQMEALCEEGLYEALSAKTKRIAEGFKAAADKHGIPMAINYVGGMFGFFFTEQEQITRFDQVTKCNIEHFRTFYHGMLDEGVYLAPSAYEAGFLSMAHGEEELRLTLEAADRVLARMKAAM

SEQ ID NO: 26730 - protein, 448 aa, Cyanidioschyzon merolae strain 10D
MREVISLHIGQAGVQVANACWELFCLEHGILPDGTMASRDSAIAAANNASFGTFFSETSSGKHVPRCLFLDLEPSVVDEVRTGPYRQLYHPEQLMSGREDAANNYARGHYTVGKEIVDTALDRIRKLADNCSALQGFLIFNSVGGGTGSGLGSLLLERLSVDYGKKSKLGFTVYPSPQVSTAVVEPYNSVLSTHALLEHTDVAVLLDNEAIYDICRRSLDIERPTYRNLNRLIAQVISSLTASLRFDGALNVDLTEYQTNLVPYPRIHFMLSSYAPVISAEKAHHEQGSVAEITSAAFDPANMMAKCDPRHGKYMACCLMYRGDVQPKDVNSAVKAIKSKRSIQFVDWCPSGFKVGINSQPPTVVPNGDLAKVQRAVCMVSNSTAIAEVFARIDHKFDLMYAKRAFVHWYVGEGMEEGEFSEAREDLAALEKDYIEVAADTNEEEEEY

SEQ ID NO: 26731 - protein, 97 aa, Glycine max
  misc_feature (64)..(64): Xaa can be any naturally occurring amino acid
  misc_feature (76)..(76): Xaa can be any naturally occurring amino acid
  misc_feature (83)..(83): Xaa can be any naturally occurring amino acid
  unsure (1)..(97): unsure at all Xaa locations
IYTLYILTHFDSGFLNRHVGLTYNYGNGDTYGDGYLQVLATTQTSWQASKKSFQGTADAKKQFXWLFYDPRSYDIXDDLILSXDHLSRMDYMDFVQN

SEQ ID NO: 26732 - protein, 651 aa, Brucella melitensis biovar Abortus
MSVLKTDDQINGTHRAHHQVLTKLINAQTPSDFDILQSDFTDGMHDAVYRLMAEIMGLNTGYCGGRGGSMHMRDAASGIAGTSAIVGGNIPHAAGYALADKILNRKGISVAFFGDGASLQGATYEAMNIAALYRLPVIFYVENNLYAVSTHIQDATRETRIASRGPMLGFTGIECDGMDILSVHQAMREACRIIEEEGGPVVIEAQCYRYLHQSGSKSGSDFGYRTREEEEEWKSRDPIALAERRLKELGIAGDAEFLKIDERVTAAVQAAGERLTETAAGSNVLRIPDALWPSASSVDDGILGDGSEFSGAEFREIEDYQPDELEKMRFAAAASDVLGRAMEKDPTIIVMGEDVHRFAGGVSGFTRNALELFPDRVLAMPIAENGFTGVALGAALRGLRPVVEIMFGDFCFVAADQIANGISKVRHMFGDGFPVPIVMRVRVSPHTGYGSQHSGDPSALFGMFPGWRVVSPTNAFDYIGLMNSALKSDDPVAVIEHVEFYQRESLVPRNDRDYCIPLGKAKIVRPGSACTVLATSVMVQASIKAAEEAGIDAEIIDMRSLDMFGIDWALIGASIGKTNRVVIAEQVASGLSLGRHWIAEIQKRFFNDLDHEVLHVTGSMASPVVSLVLNKAALGSADKVRSALEQITHSA

SEQ ID NO: 26733 - protein, 1174 aa, Mycobacterium leprae
MSTITKQEKQLARRVDDLTANDPQFAAAKPDPAVAAALAQPGLRLPQIIQTALDGYAERPALGQRVAEFTKDPKTGRTSMELLPSFETITYRQLGDRVGALARAWRHDLLHAGYRVCVLGFNSVDYAIIDMALGVIGAVAVPLQTSAAITQLQSIVTETEPSMIATSVNQLPDTVELILSGQAPAKLVVFDYHPEVDEQHDAVATARARLADSSVVVESLTEVLGRGKTLPATPIPVADDSADPLALLIYTSGSTGAPKGAMYLQSNVGKMWRRSDGNWFGPTAASITLNFMPMSHVMGRGILYGTLGNGGTAYFAARSDLSTLLEDLKLVRPTELNFVPRIWETLYDESKRAVDRRLANSGSADRAAIKAEVMDEQRQSLLGGRYIAAMTGSAPTSPELKHGVESLLEMHLLEGYGSTEAGMVLFDGEVQRPPVIDYKLVDVPDLGYFSTDQPYPRGELLLKTQNMFPGYYKRPEVTATVFDSDGYYQTGDIVAEVGPDRLVYVDRRNNVLKLAQGQFVTVAKLEAAFSNSPLVRQIYIYGNSAHPYLLAVVVPTEDALATNDIEVLKPLIIDSLQKVAKEADLQSYEVPRDLIVETTPFSLENGLLTGIRKLAWPKLKQHYGARLEQLYADLVEGQANALHVLKQSVANAPVLQTVSRAVGTILGVATTDLPSNAHFTDLGGDSLSALTFGSLLRELFDIDVPVGVIVSPVNNLVAIADYIERERQGTKRPTFIAIHGRDAGKVHASDLTLDKFIDVSTLTAAPVLAQPGTEVRTVLLTGATGFLGRYLALKWLERMDLVEGKVIALVRAKSNEDARARLDKTFDSGDPKLLAHYQELATDHLEVIAGDKGEVDLELDRQTWRRLADTVDLIVDPAALVNHVLPYSELFGPNTLGTAELIRIALTSKQKPYIYVSTIGVGNQIEPAKFTEDSDIRVISPTRNINNNYANGYGNSKWAGEVLLREAHDLCGLPVTVFRCDMILADTSYAGQLNVPDMFTRMMLSLAATGIAPGSFYELDAESNRQRAHYDGLPVEFIAEAISTLGDQSLHDRDGFTTYHVMNPHDDGIGMDEFVDWLIDAGCPIQRINDYDEWLRRFEISLRALPERQRHSSLLPLLHNYQKPEKPLHGSLAPTIRFRTAVQNANIGQDKDIPHISPAIIAKYVSDLQLLGLV

SEQ ID NO: 26734 - protein, 619 aa, Candida albicans SC5314
MYSFTFTITFIYIYKLFTFFEGYFTFIFYVNNPPPSPAMTDYSNSKSLFLGFDLSTQQLKIIITDENLTPLDTYNVEFDSQFKSKYTKINKGVITGDDGEVISPVAMWLDAINYVFDEMQKSKFPFDKVVGISGSGQQHGSVYWSGEANELLNDLIPCKELSSQLQDAFSWGYSPNWQDHSTVKEAEDFHKAIGKEHLAEISGSRAHLRFTGLQIRKFITRSHSKEYESTSRISLVSSFVTSILLGEIAQLEESDACGMNLYDIQKSQYDEELLALAAGVHTEIDNISKEDPKYKKSIDQLKQKLGEISPITYKSSGKISKYFVDTYGFNSDCKIYSFTGDNLATILSLPLQPNDCLISLGTSTTVLIITSNYEPSSQYHLFKHPTLPDHYMGMLCYCNGSLAREKARDQANKKHNVSDNKSWDKFNEILDHNKDFNGKLGIYFPLGEIIPQAPAQTIRAVLEDNGEITPCELDSHGFTVDDDASAIVDSQTLSCRLRAGPMLSKSSTTKNGKTNSSEELQQLYDNLVDKFGELSTDGKKQSFESLTARPNRCYYVGGASNNTSIITKMGSIFGPTNGNYKVEIPNACALGGAYKASWSYKCELENKMIGYDEYIGKII

SEQ ID NO: 26735 - protein, 215 aa, Pseudomonas aeruginosa UCBPP-PA14
MSDLQQLFENNVRWAEAIKQEDPDFFAKLARQQTPEYLWIGCSDARVPANEIVGMLPGDLFVHRNVANVVLHTDLNCLSVIQFAVDVLKVKHILVTGHYGCGGVRASLHNDQLGLIDGWLRSIRDLAYEYREHLEQLPTEEERVDRLCELNVIQQVANVSHTSIVQNAWHRGQSLSVHGCIYGIKDGLWKNLNVTVSGLDQLPPQYRLSPLGGCC

SEQ ID NO: 26736 - protein, 292 aa, Zea mays
FCFALQFRPSSSHDTTVTTTNAGAPVWNDNEALTVGPRGPILLEDYHLIEKVAHFARERIPERVVHARGASAKGFFECTHDVTSLTCADFLRAPGVRTPVIVRFSTVIHERGSPETIRDPRGFAVKFYTREGNWDLLGNNFPVFFIRDGIKFPDVIHAFKPNPRSHVQEYWRVFDFLSHLPESLHTLFFLFDDVGVPSDYRHMEGFGVNTYTFVSAAEKATIRKPNDFKQPGERYRSWDADRQDRFVRRFADSLGHPKVSQELRSIWIDLLAKCDASLGMKIATRLNMKPNM

SEQ ID NO: 26737 - protein, 478 aa, Xanthomonas campestris pv. vesicatoria str. 85-10
MRPLPTLLTLSLAAAFGGFAATGINAWLDNRAEATPPSNAAFTLPTAAALPAAVAGQPVPSLAPMLQQAMPAVVSVNTKQVVRVRNPFFNDPILRRLFPQVPQDRINESLGSGVIIDAQKGYVLTNHHVIENADDVQVTLGDGRTVKAEFIGSDADTDIALIRIKADNLTDIKLADSNALRVGDFVVAIGNPFGFTQTVTSGIVSAVGRSGIRGLGYQNFIQTDASINPGNSGGALVNLQGQLVGINTASFNPQGSMAGNIGLGLAIPSNLARNVVEQLVTKGVVVRGTLGLETQNLTQQMLQGLGVDSLRGALVTRVLPGSAAAAAGVQPGDVVVAANDQRVDSAEALHNYEGLQAVGSAVTLDIRRDGKPLKLKATLKEQDRAVTGDMLDPRLTGATFVDLPESLRQSGITGVMVSEVKRGGRAAANGLVAGDVIVASSVGEFADLASWRANFQRKPQQLVVRILRGNAQYDALMR

SEQ ID NO: 26738 - protein, 341 aa, Idiomarina loihiensis L2TR
MKALSKLHAKPGIWMTDVEKPECGYNDLLIKIKKTAICGTDVHIYKWDDWSQKTIPVPMVVGHEYVGEVAAMGDGVRGFEIGDRVSGEGHITCGHCRNCRAGRRHLCRNTYGVGVNRPGAFAEYLALPAENAFKLPDDVTDEMAAVFDPFGNAVHTALAFDLVGEDVLITGAGPIGIMAAAVARHVGARHVVITDVNEYRLDLARKMGVTRAVDVSKEKLSDVMTELGMKEGFDVGLEMSGVPSAFSQMLETMNHGGKIAMLGIPPENIAIDWNQVIFKGLVIKGIYGREMFETWYKMASLLQSGLDISPILTHEMPIDDFEKGFETMISGQSGKVILNWD

SEQ ID NO: 26739 - protein, 396 aa, Idiomarina loihiensis L2TR
MSSAFYQQLADQLAETKAEGLYKKERIISSDQSSEITVNNRKVLNFCANNYLGLANHPDLIKAAKQGLDEHGFGTASVRFICGTQDIHKTLEQKLSEFLGTEDTILYSSCFDANGGLFETLMGPEDAIISDELNHASIIDGIRLSKAKRFRYKNNNLEDLEAQLKQADADGARHKLIATDGVFSMDGVIANLKGICDLADKYDALVMMDDCHATGFLGENGKGTHEYCDVIGRVDIITGTLGKALGGASGGYTSGKKEVIDWLRQRSRPYLFSNSVAPAIVQASIRVLDMLAEGGKLRSQLWENASYFREQMTNAGFTLSGADHAIIPVMVGDAKLASEMSDRLLEEDIYVIGFSFPVVPKGKARIRTQMSAAHTREQLDRTIEAFTRIGKELGVI

SEQ ID NO: 26740 - protein, 671 aa, Vigna aconitifolia
MESAVDPSRGFMKDVKRVIIKVGTAVVTREEGRLAVGRLGALCEQIKQLNSLGYDIILVSSGPVGIGRQRLRFRKLINSSFADLQKPQLELDGKACAAVGQNSLMALYDTLFTQLDVTSAQLLVTDNDFRDKDFRKQLTETVKSLLALKVIPVFNENDAVSTRKAPYEDSSGIFWDNDSLSALLALELKADLLVLLSDVEGLYSGPPSDPHSKLIYTYNKEKHQNEITFGDKSRVGRGGMTAKVKAAVHAAEAGIPVVITSGFAPENIINVLQGQRIGTLFHKDAHEWAQVKEVDAREMAVAAGNVREGSRRYLQRKGNKILLKIADALEANEKIIRIENEADVTAAQEAGYEKSLVARLALKPGKIASLANNMRIIANMEDPIGRVLKRTELSDGLILEKTSSPLGVLLIVFESRPDALVQIASLAIRSGNGLLLKGGKEAKRSNAILHKVIIEAIPDNVGGKLIGLVTSREEIPELLKLDDVIDLVIPRGSNKLVSQIKSSTKIPVLGHADGICHVYVDKSANVEMAKRIVLDAKVDYPAACNAMETLLIHKDLIEKGWLKEIILDLRTEGVILYGGPVASSLLNIPQAHSFHHEYSSLACTAEIVDDVYAAIDHINLYGSAHTDSIVAEDNEVANVFLRQVDSAAVFHNASTRFSDGARFETRRRGWN

SEQ ID NO: 26741 - protein, 360 aa, Medicago truncatula
MEVGVSFKCTAYSVTIHKAIFIVFILITFLTSQALADCESESTNSCNNKEKAQPLKLIAIFSILATSVIGVCLPLATRSIPALSPEGDLFIIVKCFAAGIILGTGFMHVLPDSYEMLWSDCLDEKPWHEFPFSGLVAMFSAVVTMMVDSIATSYYSKKGKSGVVIPESHGGDDQEIGHSHGGHHHIHNGFKTEESDEPQLLRYRVVVMVLELGIVVHSVVIGLGMGASNNTCSIKGILSAALCFHQMFEGMGLGGCILQAKYKFLKNAMLVFFFSITTPLGIAIGLAMSTSYKENSPVALITVGLLNASSAGLLIYMALVDLLAADFMSKRMQSSIKLQLKSYVAVFLGAGGMSLMAKWA

SEQ ID NO: 26742 - protein, 435 aa, Mannheimia succiniciproducens MBEL55E
MNNNLLYSVEDKPPFGLSLLLAAQHLLAALGGIIAVPLVIGNVLKLPTEDTITLVNAALLISGVVTIIQCRGIGPIGIRLPSVMGTSFTFVAAALAIGFSEYGVAGIMGASLVGSLVMIIGSFFMPYIRKLFPPVVTGTVVMMIGLSLIPVAVDWFAGGQVGDENYATPENLLMATFVLVIVVTLVQWGKGIFSAAAIVIGMMTGYVVALCLGWVSFDGVNNAQTFAVPQPLHFGLAFPISGIIGMSIAYLVTIVESSGNFLALGNATQTEITGKHLRGGVLCDGLGSALAAIMSTTPFSSFSQNIGVISLTGVASRHVVALTGVLLALAGLFPVFGALIVSIPLPVLGGAGLMMFAMIIAAGIQMLDNIPRSKRNGLIIAISIGCGLAVTTRPELLDKLPHFFKEVLGSGITVGSLLALILNLILPEDKIPENH

SEQ ID NO: 26743 - protein, 245 aa, Xanthomonas campestris pv. vesicatoria str. 85-10
MSFHIRAITLDLDDTLWPFAPIGARIDQVLYDWMREHSPVTAERFPVEAMRQLRERSFADNPHLHHDLSALRRLTLEMALRESGGDLALLEPAYEVFYAARNQVECYPDALDALARIAAHVPVAALSNGNADLQRIGLMHHFAFQLGSREHGSAKPDPSIFLAACARLEVPPSEVLHVGDHVRMDVLGALDAGLRACWINREGAVWSHPTQQPDLEFDSMTGLADWLDAQQPHPGPMNAGITLPA

SEQ ID NO: 26744 - protein, 512 aa, Arabidopsis thaliana
MEISVASVTVSVAVVVVSWWVWRTLQWVWFKPKMLESYLRRQGLAGTPYTPLVGDLKKNFSMRAEARSKPINLTDDITPRIVPYPLQMLKTHGRTFFTWFGAIPTITIMDPEQITEVLNKVYDFQKAHTFPLGRLIATGVLSYDGDKWAKHRRIINPAFHLEKIKNMVPAFHQSCSEIVCKWDKLVSDKESSCEVDVWPGLVSMTADVISRTAFGSSCVEGQRIFELQAELAQLIIQTVRKAFIPGYSYLPTKGNRRMKAKAREIQVILRGIVNKRLRAREAGEAPNDDLLGILLESNLGQTKGNGMSTEDLMEECKLFYFVGQETTSVLLVWTMVLLSQHQDWQARAREEVKQVFGDKEPDAEGLNQLKVMTMILYEVLRLYPPIPQLSRAIHKEMELGDLTLPGGVLINLPILLVQRDTELWGNDAGEFKPDRFKDGLSKATKNQASFFPFAWGSRICIGQNFALLEAKMAMALILQRFSFELSPSYVHAPYTVFTIHPQFGAPLIMHKL

SEQ ID NO: 26745 - protein, 272 aa, Vibrio fischeri ES114
MSKVGIVQMTSGAEPDENIKQLKLKLKGLQLQGAKLVLTPENCIVFGQKDDYERYAEPVGKGVLQDQLSALARHYQLWLVIGSFPTRNENGSLSTTSLVFDDNGHLVEHYNKLHMFDVDVEDRHQSYRESDTFTAGNDIKIVDTPIGKVGLSICYDVRFPQLYSELRKQGAEIILVPAAFTKVTGYAHWDILLRSRAIETQCWVLAAGQWGKHGAGRETWGHSMIIDPWGNKVTAQQEGTGVIIADIDLEQMNQIRKKMPVAQHARLISYLP

SEQ ID NO: 26746 - protein, 313 aa, Gloeobacter violaceus PCC 7421
MQAVIVAGGKGTRLRPLTYRTPKPMLPIFERPFLCLLVERCRAAGIVDILMNVHYQAGQIQDYFGDGGAFGVRIRYSVEQNPLDTAGAVKLAEPYFTGAPLVVFNADILTDLDLTALVAAHRQAGAAATLALTRVLDPTAFGLVQLTDHNQVAAFREKPTAEEAARLGIDTINAGTYVLDPRIFADVPAQTPWSFERQLFPNLLAQRQKVLGFVSDTYWLDIGNPAKYWQAHLDILSGRMPLPLPAQQIAPGIWVAEGAAVDAAARLEAPCYIGGCCCVGPEAAIAPGTVLGSASLVNRPLSPGIYPPGTMVP

SEQ ID NO: 26747 - protein, 512 aa, Arabidopsis thaliana
MEISVASVTISVVLAVVSWWIWRTLQWVWFKPKMLEHYLRRQGLAGTPYTPLVGDLKKNFTMLSEARSKPLKLTDDISPRVVPYPLQMFKTYGRTYFTWFGPIPTITIMDPEQIKEVFNKVYDFQKPHTFPLATIIAKGLANYDGDKWAKHRRIINPAFHIEKIKNMVPAFHQSCREVVGEWDQLVSDKGSSCEVDVWPGLVSMTADVISRTAFGSSYKEGQRIFELQAELAQLIIQAFRKAFIPGYSYLPTKSNRRMKAAAREIQVILRGIVNKRLRAREAGEAPSDDLLGILLESNLRQTEGNGMSTEDLMEECKLFYFAGQETTSVLLVWTMVLLSQHQDWQARAREEVKQVFGDKEPDAEGLNQLKVMTMILYEVLRLYPPVTQLTRAIHKELKLGDLTLPGGVQISLPILLVQHDIELWGNDAAEFNPDRFKDGLSKATKSQVSFFPFAWGPRICIGQNFALLEAKMAMALILRRFSFEISPSYVHAPYTVITIHPQFGAQLIMHKL

SEQ ID NO: 26748 - protein, 461 aa, Cyanidioschyzon merolae strain 10D
MREILHIQVGQCGNQIGRKFWEVISEEHGVDAQGFYHGDSEQQLERISVYYNEASTGRYVPRAVLVDLEPGTMDAVRASEYGTLFRPDNFVYGQSGAGNNWAKGHYTEGAELVDAVMDVVRKECESCECLQGFQVTHSLGGGTGSGLGTLLISKIREEYPDRMMCTYSVMPSPKVSDTVVEPYNATLSIHQLVENADEVFCIDNEALYDICQRTLKLTNPSYADLNKLVSGVMSGITCSLRFPGQLNSDLRKLAVNLIPFPRLHFFSVSLAPLTATASTAYRHLSIADLTQQMFDAKNQFVACDPRQGRYLTAAAYFRGSRISTKDVDEQMSMVQSKNSAYFVEWIPHNIKSSVCGVPPKGLDMSCVFVGNTTAVQEIFKRVGEQFSAMFRRKAFLHWYTGEGMDPMEFTEAESNMNDLVSEYQQYEQAVAEDEDEDVEQEFGAYRTGEEDRTAIESSIMS

SEQ ID NO: 26749 - protein, 120 aa, Taraxacum officinale
SKHQEWQLRAREEVLNVLGDKKMDLDGLNHLKVVNMIFHEVLRLYPPIVGLARKIDKDIKLGEFALPSGIQIGLPIMNIHYDEEAWGPDAKKFGPNRFSEGISKATKNQVIYFPFGWGLR

SEQ ID NO: 26750 - protein, 503 aa, Zea mays
MMLAILARRRAAEAVLRRPQAAAGAAVSAWRAYAAAGEESDVVVVGGGPGGYVAAIKAAQLGLKTTCIEKRGTLGGTCLNVGCIPSKALLHSSHMYHEAKSSFAHHGVKFSNLEVDLPAMMAQKDKAVAGLTKGIEGLFKKNKVTYVKGFGKLSSPSEVSVDLIDGGSTVVKGKNIIIATGSDVKSLPGITIDEKKVVSSTGALCLSEIPKKLVVIGAGYIGLEMGSVWNRLGSEVTVVEFAPDIVPSMDGEVRKQFQRMLEKQKFKFMLKTKVVGCDPCGDGVKLTLEPAAGGEQNILEADVVLVSAGRTPFTSGIGLETLGVETDKAGRILVDKRFMTNVKGVYAIGDAIPGPMLAHKAEEDGVACVEFIAGKEGHVDYDTVPGVVYTHPEVASVGKTEEQVTALGIPYRVGKFPLLANSRAKAIDDAEGVVKVIAEKETDKILGVHIMAPNAGEIIHEAVIALQYGASSEDVARTCHAHPTVSEALKEACLQTFNKAIHI

SEQ ID NO: 26751 - protein, 450 aa, Cyanidioschyzon merolae strain 10D
MGKEKTHVSVVVIGHVDSGKSTTTGHLIYKCGGIDKRTIEKFEKEANEMGKGSFKYAWVLDKLKAERERGITIDIALWKFETDKYYFTIIDAPGHRDFIKNMITGTSQADLAILVVASPPGEFEAGISSNGQTREHALLAYTLGVKQMIVAVNKMDDKNVNWSQSRYDEITKELNLYLKKVGYNPDKVPKVPISGWTGDNLFERVPSDHPLAKWYKGPALLEALDAIEPPKRPTEKPLRLPLQDVYKIGGIGTVPVGRVETGILRPGMVVTFAPTGLTTEVKSVEMHHESLPEAGPGDNVGFNVKNVSVKELKRGFVCGDSKNDPPKAAEDFKAQVIILNHPGEIRAGYAPVVDCHTAHIACRFAELLEKIDRRTGKKIEENPEKVKAGDACMVRMIPSKPMCVETFSEYPPLGRFAVRDMRQTVAVGVIKEVNKKEAEGKVTKAAAKKA

SEQ ID NO: 26752 - protein, 734 aa, Bacteroides thetaiotaomicron VPI-5482
MDSILFWLVPVASVLALCFAYYFHKQMMKESEGTPQMIKIAAAVRKGAMSYLKQQYKIVGCVFLGLVILFSIMAYGFHVQNVWVPIAFLTGGFFSGLSGFLGMKTATYASARTANAARNSLNSGLRIAFRSGAVMGLVVVGLGLLDISFWYLLLNAVIPADALTPTHKLCVITTTMLTFGMGASTQALFARVGGGIYTKAADVGADLVGKVEAGIPEDDPRNPATIADNVGDNVGDVAGMGADLYESYCGSILATAALGAAAFIHSADTVMQFKAVIAPMLIAAVGILLSIIGIFSVRTKENATVKDLLGSLAFGTNLSSVLIVAATFLILWLLQLDNWIWISCAVVVGLLVGIVIGRSTEYYTSQSYRPTQKLSESGKTGPATVIISGIGLGMLSTAIPVIAVVVGIIASFLLASGFDFSNVGMGLYGIGIAAVGMLSTLGITLATDAYGPIADNAGGNAEMAGLGAEVRKRTDALDSLGNTTAATGKGFAIGSAALTGLALLASYIEEIRIGLTRLGTVDLSMPNGDVVSTANATFVDFMNYYDVTLMNPKVLSGMFLGSMMAFLFCGLTMNAVGRAAGHMVDEVRRQFREIKGILTGEAEPDYERCVAISTKGAQREMVIPSLIAILAPIATGLIFGVTGVLGLLIGGLSTGFVLAIFMANAGGAWDNAKKYVEEGNFGGKGGEVHKATVVGDTVGDPFKDTSGPSLNILIKLMSMVAIVMAGLTVAWSLF

SEQ ID NO: 26753 - protein, 599 aa, Candida albicans SC5314
MSDENEITPLLPFTSHRSRRSSKCSEIDENEIVSYVQQRRQSIASVGHDKIPKSFALPVTTAATGVTSGGVGVVTGGGTSGVASPRLARSISRSSLISGKSYSINDIIEIHQQEIDPEPKTTILNEIKVIIKYSLPLIVTFLLQYSLTVASVFSVGRLGSTELAAVSLSSMTANISGYAMIQGVSTCLDTLCAQAFGRKDYNSVGVHFIRCNYLLLLLYIPMAIFWVFGAEPLLVTIIGQDSIAMCQLAGKYLRILTIGLPGFILFENAKHFLQTQGIFHASTLVLIICAPLNAFLNYLLVWNKSIGLGFIGAPISVVITNWIMCFMLYGYIFCIDGYQCWPQREYRKLYHKIFFKHWNKMIKLSVPGVLMVEAEWLAFEIITFQAAKFGTEVLAAQSIINTTCVIFYQIPFALSIAAGTRIAWYIGAASETAAKKSTYAVLYAATFIGLFNCGFMLTFRHSLASLYTEDNAVIELAAKVLIVGSIYQINDCLSCATAGVLRGQGRQMIGGIVNLIGYYLIALPFAYTLAFIFQFGLLGLWFGMIIALIFVSFTQTFFVISSNWQKIIDDCIEEAIIEDGNLNIDAHSILPSMSNSIVV

SEQ ID NO: 26754 - protein, 463 aa, Arabidopsis thaliana
  misc_feature (288)..(288): Xaa can be any naturally occurring amino acid
  unsure (1)..(463): unsure at all Xaa locations
MAGIVTEPWSVAENGNPSITAKGSSRELRLGRTAHNMSSSSLRKKSDLRVIQKVPYKGLKDFLSNLQEVILGTKLAILFPAIPAAIICTYCGVSQPWIFGLSLLGLTPLAERVSFLTEQLAFYTGPTLGGLLNATCGNATELIIAILALTNNKVAVVKYSLLGSILSNLLLVLGTSLFCGGIANIRREQRFDRKQADVNFFLLLLGFLCHLLPLLVGYLRNGEASAAVLSDMQLSISRGFSIVMLISYIAYLVFQLWTHRQLFDAQEQEDEYDDDVEQETAVISFWSXFAWLVGMTLVIALLSEYVVATIEEASDKWNLSVSLISIILLPIVGNAAEHAGAVIFAFKNKLDISLGVALGSATQIGLFVVPLTIIVAWILGINMDLNFGPLETGCLAVSIIITAFTLQDGSSHYMKGLVLLLCYFIIAICFFVDKLPQKQNAIHLGHQAMNNVVTATGGGVFSS

SEQ ID NO: 26755 - protein, 340 aa, Cyanidioschyzon merolae strain 10D
MAVPKVGINGLGRIGRLVLRAAVEKGTVEIVAVNDPFIFSDVSYAAYSLKYDSTHGAFPGEIGTDGEHLVINGKKITCFAIRDPADIPWASTGAEYVVESSGAFTTAEKASLHLKGGAKKVVVSAPAKDVPMFVMGVNHDSYTKDLQVVSNASCTTNCLAPLVKILDEAFGIENGLMSTIHAVTATQRTVDGPSNKDWRRGRSAMLSIIPSSTGAAKAVGKVYPKLDGKLTGMAFRIPVALVSVVDLTANLKTPTTYEEIKHVMKAAAENPEFKGIFGYTEDPIVSADLAHSSYSSVFDAQAGIMLSPTFVKLVSWYDNEWGYSNRVVDLITHMAKVDAA

SEQ ID NO: 26756 - protein, 386 aa, Bacillus clausii KSM-K16
MAGARTPVGKANRGSFKHVRSDDLGAIAVKETLRRAKQVEPEEIDDCLIGCAMPEAEQGMNMARNVSVLAGIPQSVPAVTINRYCASGLQTIAYGAERIMLGHAKAIIAGGAESMSMIPMGGHVVKPNPTLIDEAPEYYMSMGYTAEEVARQYGISREDQDAFAVESHKRAAAALANQRFNDEIVPVPVVEQHFGADGTVQTTERLVEMDEGVRADTTIAALSKLKPAFQLKGTVTAGNSSQMSDGAAAVLLMDKEEAEARGLEPLVTFKSFAVAGVAPEVMGVGPIEAIPKAVRLAGLQLEEIGLFELNEAFASQALAVIRELGLDYDKVNVNGGAIALGHPLGCTGTKLTLSLIHEMRRRDERFGVVTMCIGGGMGAAAVFERH

SEQ ID NO: 26757 - protein, 411 aa, Glycine max
MAELDLSKKVADRYLKREVLGEGTYGVVYKAIDTKTGQTVAIKKIRLGKQKEGVNFTALREIKLLKELKDPNIIELIDAFPHKGNLHLVFEFMETDLEAVIRDRNIVLSPSDIKSYLQMTLKGLAICHKKWVLHRDMKPNNLLIGSNGQLKLADFGLARVFGSPDRRFTHQVFARWYRAPELLFGTKQYGPGVDVWAAACIFAEFLLRRPFLQGSSDIDQLGKIFAAFGTPSASQWPDMIFLPDYVEYQHVPAPPLRSLFPMASDDALDLLSKMFTYDPKARISVPQALEHRYFSSAPLPTDPVKLSRPAPKKESKVSDVISNEGPTVLSPPRKSRRVMPGRDGSEGNSLQGDKFDDSVVSVRQAAGDNMGKNEPAPMSLDFSLFGLKPPNRPTITSADRSHLKRKLDLEF

SEQ ID NO: 26758 - protein, 298 aa, Candida glabrata CBS138
MSSELANYKRLEKVGEGTYGVVYKALDLRPGKGQRVVALKKIRLESEDEGVPSTAIREISLLKELKDDNIVRLYDIVHSDAHKLYLVLEFLDLDLKRYMESIPKDQPLGVNIIKKFMVQLCKGIAYCHAHRILHRDLKPQNLLIDKEGNLKLGDFGLARAFGVPLRAYTHEIVTLWYRAPEVLLGGKQYSTGVDTWSIGCIFAEMCNRKPIFSGDSEIDQIFKIFRILGTPSEAVWPDIVYLPDFKPSFPQWRRKDLAEVVPSLDPHGIDLLDKLLAYDPINRISARRAANHPYFHEQ

SEQ ID NO: 26759 - protein, 295 aa, Lactobacillus plantarum WCFS1
MAHSHQIQQQTSAFKIGVALNTAFIVLEAGYGFASGSLALVADAGHNLSDVLGLLISWLAIWLGQKSANDKYTYGYKSSSILAALFNAVFLLVAIGAISVEAIQRLSNPGPVAEWDVIIVAAVGVVINGFTALLFMKGQKHDLNIKGAFLHMAADAGVSIGVVIAGFIILKTGWFWLDPVVSLLIAVVILIGTWGLLRDAMNYSLEAVPNNVDRQAIADYLTSQPTVNQIHDLHIWGMSTTETAMTVHLCRSTLADNNAFLEQLNKDLSAQFPLTHITIQIELGKVDYETTDSSI

SEQ ID NO: 26760 - protein, 399 aa, Xanthomonas axonopodis pv. citri str. 306
MAPVAVTAFTSTTALGAGLAAQAAALTARRSGLRRNDFGPQPLLPCWVGRVDGVEDVVLPDSLQEWDCRNNRLAWLALQQDGMAQAVQAAAQRCGAERVAVIIGTSTSSIGASEEAYTRLVDDADGARFPEDLNRPIVHTPHSLGDFVQHATGLRGPCVTVATACSSSAKVFAQAARLMDAGVIDAALVGGVDTLCGSVLFGFNSLQVVAPEMCQPFDARRVGLSLGEAGGFALLERPAAAPDATLWLYGYGESSDAHHMSAPHPQGLGAQLAMRGALDRAGLEPAAVGYLNLHGTATPANDSVEAAAVAAIFPGTLHASSTKAWTGHTLGAAGIVESVIALLALRDDVLPGTLNSDIPDPACGPQIRFDNAHARIDYAMNNSFGFGGNNCSLLFGRAR

SEQ ID NO: 26761 - protein, 459 aa, Arabidopsis thaliana
MDYSFLLIILLLTISTSCCAAPSSYVEEQLRDRISNLPGQPSNVDFRQYSGYVTVHEERGRALFYWLVESPLARDPKSRPLVLWLNGGPGCSSVAYGAAEEIGPFRVGSDGKTLHSKLYAWNKLANLLFLESPAGVGFSYSNTTSDLYTTGDQRTAEDSYIFLVNWFERFPQYKHREFYIVGESYAGHFVPQLSKLVHERNKGFKNPAINLKGFMVGNAVTDDYHDYIGTFEYWWNHGLISDSTYHQLKTACYSVSSQHPSMQCMVALRNAELEQGNIDPYSIFTKPCNSTVALKRFLKGRYPWMSRAYDPCTERYSNVYFNRLDVQKALHANVTRLSYPWKACSDIVGSYWDDSPLSMLPIYKELITAGLKIWVFSGDTDAVVPITATRYSVDALKLATITNWYPWYDHGKVGGWSQVYKGLTLVTVAGAGHEVPLHRPRQAFILFRSFLESKPMPMT

SEQ ID NO: 26762 - protein, 111 aa, Brassica napus
MALEKEQEESQTGQNAAFCALDELYCEEECGFAEEDLVGLDENVVKFQFLPLKDMFLWDDDELQSLISKENEANHHPYQTLDECLVSRRKEALDWVLRVKSHYGFASSTAL

SEQ ID NO: 26763 - protein, 620 aa, Xanthomonas campestris pv. campestris str. ATCC 33913
MVYRHGVQSPNAQWQAATLAGRRPHTGAVRSARNAARPTAAVASPGTPLLPLHRLPRRHTHASAAACGPFRTSNPVPRDGGQQAAAGTIGLVFCSTGLPLTTSTLPAPAADARLPRQIPFIIGNEACERFSFYGMRNILVQFLITSLLLQEVGAPERDAEAKHILHSFMIGVFFFPLLGGWLADRFFGKYTTIIWFSLIYCAGHACLALFEDSRSGFFVGLGLIAFGAGGIKPLVASFMGDQFDQSNKHRAKVVFDAFYWIINFGSLFASLLIPLALKHLGPSWAFGIPGILMFIATAVFWLGRKRYVRVPLPPKDPHGFGAVVRSALLAHAPGQGRPGLALAAISVLLALACLGLTEQLGLVICLCMALVLLLAGIGGGTWWQLERARGTHPDAAVDGVRALLRVLVIFALVTPFFSLFDQKASTWVLQGREMRMPAWFTASQMQALNPLLVMLLIPFNNLVLYPLLRRLGWEPTSLRRMTSGIAFSGVAWIAVGAIQVAMDGGEPMHIAWQILPYALLTFGEVLVSATGIEFAYSQAPPSMKGVVMSFWYLTTTVGNLWVLLSNVAVRNATVTSHIADTGLSEAAFLMFFFAAFAFLAALAFGLYARRYRMVDNYRPA

SEQ ID NO: 26764 - protein, 217 aa, Sinorhizobium meliloti
MFLIDMFNKKTILPDAATALPGREEEIPTATTHFVSGRPLQGPYPEGMKKVLFGMGCFWGAERLLWEIPGVYVTAAGYSGGLTPNPTYQETTTGLTGHTEVVLVVYDPAKVSLQRLLKTFFEEHDPTQGMRQGNDVGTTYRSAIYVYDEEQLAEANAARNAFQKALRVYNHDREITTEIAKAGPFYFAEDYHQQYLAKNPDGYCGLRGTGVSCPIGA

SEQ ID NO: 26765 - protein, 429 aa, Agrobacterium tumefaciens str. C58
MTEKSATVTLGEKQVELPVREGTIGPSVVDIATLYKHTGSFTYDPGFTSTASCESKITYIDGDEGVLLHRGFPIEQLAEQGDFLETCYLLLYGELPTAAQKKDFDTRVTRHTMVHEQMSRFFTGYRRDAHPMAVMCGTVGALSAFYHDSTDITDPHQRMVASLRMIAKMPTIAAMAYKYHIGQPFVYPKNDLDYASNFLHMCFAVPCEDYKVDPVLARAMDRIFILHADHEQNASTSTVRLAGSSGANPFACIAAGIACLWGPAHGGANEAALNMLNEIGSVDRIPEYIARAKDKNDPFRLMGFGHRVYKNYDPRAKIMQKTMYEVLEATGNSDDPIMQVALELEKIALSDPYFVEKKLYPNVDFYSGITLKALGFPTTMFTVLFALARTVGWIAQWNEMIEDPQQRIGRPRQLYTGAGKRDYVPVSKR

SEQ ID NO: 26766 - protein, 391 aa, Staphylococcus epidermidis ATCC 12228
MNQTLVQHLREKEQRMKEIRRYLHENPELSFEENETSKYIANFYKDKDCLVETNVGPNGIKVTIAGKHPGKTIAIRADFDALPIKEETELPYASKNEGVMHACGHDAHTAYMLILGETLIEMKDQLRGNVVIIHQPAEEMPPGGAKGMIDDGVLEGVDHVLGAHVMSMMETGKIYYREGFVQTGRAYFRLVVKGQGGHGSSPHTSNDAIVAGAHFVTTAQTIVSRRLNPFETGVVTIGSFDGKGQFNVIKDTITIEGDVRALTDDTRDNIQNEMTRLVRGLEEMFGVICDFEFKKDYPALYNDPEFTSYVATTLKNAKLDDIKAIDICEPQPPSEDFAFYALERPSTFIYSGAAPEDGPMYPHHHPKFNINETSMLVVAEAVGTIVLDYLK

SEQ ID NO: 26767 - protein, 605 aa, Gloeobacter violaceus PCC 7421
MRVGADVFVLDANAQQTTAAPSERARFRRTKIVATIGPAVDDPQALRKLIQAGATTLRLNFSHGNHEEHRRRIGLIRQISFELNQPVAILQDLQGPKIRLGKFADGPIVLKHGDPFILTSHDVPANQHISPITYSRLIQEVPTGATILLDDGRVELVVERVDLEAQYLHCRTVGGGKLSNSKGVNFPGVTLSVPAMTEKDREDLLFGLNQGVDWVALSFVRTPSDLLELKELIAQSGKRVPVIAKIEKFEAFENLDAVIAACDGLMVARGDLGVEMPAEEVPLLQKRLIASANRAGKPVITATQMLDSMVSNSRPTRAEVSDVANAILDGTDAVMLSNETAVGEHPILAVETMARIADRIERSMPQRTWVDTGRSIPNAISQAVGSVAQQLGAQAILTLTKSGATARNVSKYRPRVPIIAITPSVSVARELQMVWGVYPLMVLDLPSTRQTFQAAISAAQDENLVLEGDLVVMTAGTIQGLSGSTDLIKVEVVTAILGRGLGLGQNAVSGRARIVRHSDEAAALSPGDILIAPRTDANFIEAIKLAGGIVTEESGLTSHAAIIGLRLGLPVLLGVKDCTTRIPDGVVLTLDPQKGVIFSGAASAV

SEQ ID NO: 26768 - protein, 418 aa, Lotus corniculatus var. japonicus
MDSQNISPSPTASSGSVFAHLVRAPEDPILGVTVAFNKDPSPVKLNLGVGAYRTEEGKPLVLNVVRKAQHQIVNDPSRNKEYLPIVGLADFNKLSAKLIFGADSPAIQENRITTVQCLSGTGSLRVGGEFLAKHYHQRIIYLPKPTWGNHTKVFTLAGLSVKTYRYYAPATRGLDFQGLLEDLGSAPSGSIVLLHACAHNPTGVDPTPEQWEQIRQLIRSKALLPFFDSAYQGFASGNLDADAHSVRSFVADGGELLAAQSYAKNMGLYGERVGALSIVSKSADVASLVESQLKLVIRPMYSNPPLHGASIVATILKDRDLYNEWTIELKGMADRIISMRQQLFDALRSRGTPGDWSHIIKSIGMFTFTGLNPEQVSFMTKEYHIYLTSDGRISMAGLSSKTVPHLADAIHAAVTRAS

SEQ ID NO: 26769 - protein, 187 aa, Triticum aestivum
MGASESVPETSVHEFTVKDCNGKEVCLDTYKGKVLLIVNVASKCGFTETNYTQLTELYQKYREKDFEILAFPCNQFLRQEPGSDQQIQDFACTRFKAEYPVFQKVRVNGPDAAPLYKFLKASKPGLFGSRIKWNFTKFLVDKNGKVINRYATATTPFSFEKDIQKALEEEPSESQTKKEEESSDSQK

SEQ ID NO: 26770 - protein, 376 aa, Synechococcus elongatus PCC 6301
MRGDFAPNDRTQTTEAARLNKGLFASQIMSQGQQSDRRFPAEWEAQDGVLIAWPHADSDWRSLLDQVDRVYRDLAEAVTRFEQLLIVTPEPDRVAEQLAQTTANCDRIQIVELPTNDTWSRDFGPLTVETPAGLRLLDWGFNGWGLKFAANHDNQVTRRLWQQGIFGTTPLETVPLIFEGGSIESDGRGTLLTTSQCLLEANRNPGLSREAIAQIIQRQLGGDRLLWLEHGHLEGDDTDAHIDTLVRIAPNDTLIYVACDDPSDSHAAELTALEAELKALRAADGQPYHLIPLPWPQPCFDADGQRLPTTYANYLVINGAVLVPTYNDPADEAAIAAIAAAFPDRLAIGINCRPLLEQHGSLHCITMQLPAGLLSR

SEQ ID NO: 26771 - protein, 610 aa, Zea mays
MADSPNPSSGDLPAGPGGSPEKPVLADRRVAALAGAGARYKAMSPARLPISREPCLTIPAGFSPGALLESPVLLNNFKVEPSPTTGTLSMAAIINKSTHMDIMPSPRDNSAGSGQEDGGSRDFEFKPHLNSHLAAPSVNNQNHHDTMQKYSSNHTTPSSNLKTENKPLCSRESSHTAHASIAPNQTVSIVCPSDNMPAEVGTSEMHQINSSENATQETQIENVAEKSAEDGYNWRKYGQKHVKGSENPRSYYKCTHPNCEVKKLLERSLDGQVTEVVYKGRHNHSKPQPNRRLAAGAVPSSQGEERYDGVATIEDKPSNIYSNLCNQVHSAGMIDTVPGPASDDDVDAGGGRSYPGDDANDDDLDSKRRKMESTGIDAALMGKPNREPRVVVQTVSEVDILDDGYRWRKYGQKVVKGNPNPRSYYKCTNTGCPVRKHVERASHDPKSVITTYEGKHNHEVPVSRNASHEMSTAPMKPAVHPINSNMPGLGGMMRACDARAFTNQYSQAAESDTISLDLGVGISPTHSDATNQMQPSVPESMQYQMQHMAPVYGSMGLPGMPVTAVPGNSASSIYGSREENGNEGFTFKAAPLDRSTNLCYSSAGNLVMGP

SEQ ID NO: 26772 - protein, 457 aa, Escherichia coli CFT073
MQKYISEARLLLALAIPVILAQIAQTAMGFVDTVMAGGYSATDMAAVAIGTSIWLPAILFGHGLLLALTPVIAQLNGSGRRERIAHQVRQGFWLAGFVSVLIMLVLWNAGYIIRSMQNIDPALADKAVGYLRALLWGAPGYLFFQVARNQCEGLAKTKPGMVMGFIGLLVNIPVNYIFIYGHFGMPELGGVGCGVATAAVYWVMFLAMVSYIKRARSMRDIRNEKGTAKPDPAVMKRLIQLGLPIALALFFEVTLFAVVALLVSPLGIVDVAGHQIALNFSSLMFVLPMSLAAAVTIRVGYRLGQGSTLDAQTAARTGLMVGVCMATLTAIFTVSLREQIALLYNDNPEVVTLAAHLMLLAAVYQISDSIQVIGSGILRGYKDTRSIFYITFTAYWVLGLPSGYILALTDLVVEPMGPAGFWIGFIIGLTSAAIMMMLRMRFLQRLPSAIILQRAAR

SEQ ID NO: 26773 - protein, 496 aa, Oryza sativa
MARKMLKDEEVEVAVTDGGSYDYDLFVIGAVSGGVRGSRTSASFGAKFAICELPFHPISSDWQGGHGGTCVIRGCVPKKILVYGSSFRGEFEDAKNLGWEINGDINFNWKRLLENKTQEIVRLNGVYQRILGNSGVTMIEGAGSLVDAHTVEVTKPDGSKQRYTAKHILIATGSRAQRVNIPGKELAITSDEALSLEELPKRAVILGGGYIAVEFASIWKGMGAHVDLFYRKELPLRGFDDEMRTVVASNLEGRGIRLHPGTNLSELSKTADGIKVVTDKGEEIIADVVLFATGRTPNSQRLNLEAAGVEVDNIGAIKVDDYSRTSVPNIWAVGDVTNRINLTPVALMEATCFSKTVFGGQPTKPDYRDVPCAVFSIPPLSVVGLSEQQALEEAKSDVLVYTSSFNPMKNSISKRQEKTVMKLVVDSETDKVLGASMCGPDAPEIIQGMAVALKCGATKATFDSTVGIHPSAAEEFVTMRTLTRRVSPSSKPKTNL

SEQ ID NO: 26774 - protein, 73 aa, Triticum aestivum
MASRSCTFVEILLAVILPPLGVFLRYGCCSMEFLICLLLTILGYIPGIIYAIYVLVAHGSASEESGKDYDALA

SEQ ID NO: 26775 - protein, 594 aa, Ralstonia solanacearum
MSVVEIKVPDIGDYKDVDVIEVMVKAGDVVAVDQSLITLETDKATMDVPADVAGRIVEVKIKVGDKASQGTVIATVEAGAAAAAPAPTQAPAPAAAPAAAPAASAPAPQAAKHGGSADLECDMLVLGSGPGGYSAAFRSADLGMNTVLVERFGTLGGVCLNVGCIPSKALLHTAAIMDEVKAMASHGIVYSEPKVDLDQLRKHKETVVGKLTGGLAGMAKSRKVQVVRGVGTFLDPNHLEVQLTSGEGKQATGEKKVIRFAKAIIAAGSESVKLPFIPEDPRIVDSTGALELRQVPGKMLVIGGGIIGLEMATVYSTLGARIDVVEMLDSLMNGADRDLVKVWDKMNKSRFDKVMLKTKTVGVEAKPDGIYVRFEGEQAPAEPQRYDMVLVAVGRSPNGKRIGAEKAGVAVTDRGFIDVDKQQRTNVPHIYAIGDIVGQPMLAHKAVHEAHVAAEAAHGEKAYFDAKQIPSVAFTDPEVAWAGLTEDQCKAQGIKYGKGVFPWAASGRAIANGRDEGFTKVIFDEETHRIIGGGIVGTHAGDLISEICLAIEMGADAIDIGKTIHPHPTLGESVGMAAEIYEGVCTDVPPARKR

SEQ ID NO: 26776 - protein, 516 aa, Glycine max
PRDHWWRRLERCSSRLADSKGDCTAAVKVVPSMEAVVKVFCVHTEPNFSLPWQRKRQYSSSSSGLIVGGRRVLTNAHSVEHHTQVKLKKRGSDTKYLATVACYPYGDGSAMLTVSDDEFWEGVSPVEFGDLPALQDAVTVVGYPIGGDTISVTSGVVSRMEILSYVHGSTELLGLQIDAAINSGNSGGPAFNDKGKCVGIAFQSLKHEDVENIGYVIPTPVILHFIRDYEKNGAYTGFPILGVEWQKMENPDLRMSMGMGPDQKGVRIRRIEPTAPESHVLKPSDVILSFDGVNISNDGTVIIHYIAATFDLVRENIQGGGPIRHGERIGFSYLVSQKYTGDRALVKVFRNLQILEFNVKLATHKRLVPAHIKGRPPSYYIIAGFVFTAVSVPYLRSEYGKDYEFDAPVKLLEKHLHSMAQSVDEQLVVVSQVLVSDINIGYEEIVNTQVLAFNDKPVKNLKSLANMVESCDDDYLKFDLEYQQKVVLKTSTAKAATLDILTTHCIPSAMSDDLKT

SEQ ID NO: 26777 - protein, 477 aa, Helicobacter hepaticus ATCC 51449
MKYASIYFFVSALFMTHILAIEFQEAPTIQKRVNPQQNSDTLYSFNSSIESAKKAVVNISTQKNVSNQLPNHPMFNDPFFKQFFGDIYGQIPKERVERSLGSGVIISNDGYIITNNHVIEDADKVLVSLSDSTKEYTAKVIGTDARSDLAVIKIEQKNLSPITFAQSSNVLIGDVVFAIGNPFGVGETITQGIVSALNKSGIGINDYENFIQTDASINPGNSGGALVDSRGALIGINTAILSRTGGNHGVGFAIPSDMAKKIAKELIEKGGIKRGFLGVGIQDINNDIKESYGDNSGAVVISLEPQSPAAKAGLMVWDLITHVNGKKISNAAELKNLIGMLSPNEKVVVKFIRDKQERVTQITLGELPDTKSNQTSSQNTPNGSASSVEGLSVESLNQAQRQRYRVPNNIDGVVVTRVNPNSKAQQAGFEVGDIIAQVENIAIKKPTDLTNAFTRFKGKNKRILVYSANGTKTIMMK

SEQ ID NO: 26778 - protein, 365 aa, Thiobacillus denitrificans ATCC 25259
MGPGPSDVPQRVLDAMARPTIGHLDPAFVDLMEQIKAMLRMAFRTENALTFPVSAPGSAGMEMCFVNLVEPGDKVIVCRNGVFGGRMLENVKRTGGVPVVVDDAWGAAVDPQKVRDAFKSNPDAKVLAFVHAETSTGAQSDAAALAKIAQEAGALTILDCVTSLGGTPVLLDQWRIDAAYSGSQKCLSCTPGLSPVSFSERAIEKIKARKTPVQSWFLDLNLVLGYWQSAGKRTYHHTAPINPMYGLHESLVMLEEEGLENSWARHRAMHEKLKAGLEGLGLRYVVEESARLPQLNSIYVPEGVDEAAIRSRLLSEFNLEIGAGLGDMAGKIWRIGLMGYSAKQANIDLCLQALSACLEKSAAGA

SEQ ID NO: 26779 - protein, 335 aa, Pseudomonas syringae pv. phaseolicola 1448A
MALGNEAPEFDIDDEVLLMEAGIVLKEASNEKQPPAASGRTKVKHSTSLKQHKYIDYTRALDATQLYLNEIGFSPLLSPEEEVHFARLSQSGDPAGRKRMIESNLRLVVKIARRYVNRGLSLLDLIEEGNLGLIRAVEKFDPERGFRFSTYATWWIRQTIERAIMNQTRTIRLPIHVVKELNVYLRAARELTQKLDHEPSPEEIANLLEKPVGEVKRMLGLNERVSSVDVSLGPDSDKTLLDTLTDDRPTDPCELLQDDDLSQSIDQWLSELTEKQREVVIRRFGLRGYESSTLEDVGLEIGLTRERVRQIQVEGLKRLREILEKNGLSSESLFQ

SEQ ID NO: 26780 - protein, 95 aa, Rickettsia rickettsii
MSFKPLHDRIAIKPIEQEEKTKGGIIIPDTVKEKPMQGEVVAVGNGIRNQKGEIHPLELKVGDKVLYGKWAGTEIEIKGTKLIVMKESDVFGIIN

SEQ ID NO: 26781 - protein, 220 aa, Bacillus cereus ATCC 10987
MKAIIFDFDGLIVDTETIWFHSFRDAVREYGGELPLEEFAKCIGTTDDVLYAYLNEQLKEKFNKHALKEKVKILHKEKMKTPEARDGVKEYLQEAKEMGLKIALASSSSREWVIPFLEELQIRDYFEVIKTREDVEKVKPDPALYQIAIEDLGIDPSEAVVFEDSLNGLKAAIAAGLTCVVVPNDVTRNLPFANHHLRIESMKDKSLKEVLQNIKKDRIS

SEQ ID NO: 26782 - protein, 273 aa, Nicotiana tabacum
MTLEALKSPTAATPTLPPRYEDDDEIHNLDSWAKGKRSKRPRIDAPPTEEEYLALCLIMLARSGTGTRTGLTDATTSQQPADKKTAELPPVHKKEVATEQAEQSYKCSVCDKAFSSYQALGGHKASHRKTTTTATAASDDNNPSTSTSTGAVNISALNPTGRSHVCSICHKAFPTGQALGGHKRRHYEGKLGGNSRDLGGGGGGGHSGSVLTTSDGGASTHTLRDFDLNMPASPELQLGLSIDCGRKSQLLPMVQEVESPMPAKKPRLLFSLG

SEQ ID NO: 26783 - protein, 1482 aa, Ustilago maydis 521
MNVGRVAQEWLLLRCSCPLYSRLLGWGASSPSTAVIVHLASDQTRPSSFSRRAALHFLALCRPDSTASDWSAPFLFTNPSQPSSVQRYSSSSNSGVSPTSVTIPAPPARQDPSQHPPSRKRPIKEPSGDTSVPSQAASQATQPAQAAPAAASSSTKRARFESSSGGAPFTPSSSTASTLIHTSAPLTPFQDALAGPHYVPLPPTRAISTSRAYPPPQSASSTGSQSHLPTDPLAPHSNPESPATSSSAPAPRQSSSTRMLISDESVRALYFAPTPMLVLDHNRRIRMMNRPCESIFLMTGVSCMGQMMEKLIIENHRADFYTAIQEASQVRATAAWAPPVLTRLTFLQDDQKMFSADMAISAWHPTDEVFSETFNSHFAKSLTSDAEKQAGNEQPPFTTPNRSDSIESRGAPLPHESYFTISIVPTRLAERRMSPADLQLSKAEQLKEGVFHTIETAIMALSSDGSTVIRNRACDEMLKMFEKKNPQDKPKKQEQPKPHKEGVEVDLSWLSDVMVCYTEDFSEPFPEQNWPIYRAAILGQFTKPVRIGCVATDTGVRRVYEIVAKPIRDAGGFGHHIGGVITLVDVTDTEKKYRLEVEKKGEEYFRTICDSMPQMLWTAGPDGTVDWFNEGWYRFTGLDSQTLFSLGWQQCFHEDDMAETNAHWSHSLRTGEPYQVMYRARRHDGVWKWMLGRALPVREPGSNKVIKWYGSCTDCDSEVKALEASRKSQTQLTSVINHAHVTIWAIDLDAIITIAEGPGVRSLRLAPGTPNGSDGDGSGSGSGNSLSGSLGAGTVNARSDESKDAESQTNSQSVVSGPGKRAAQRSMIGRSIYEVWDSPGIREAIGRALNGESVVQEMEIEGRWFRTQYTPQREESYDHEANEGTIIGVVGASMDITDRRRAELKLEESMHERSRALAAETAAKEASRIKSEFLANMSHEIRTPIAGVIGLSELLCDTQLSQEQRDFAENIQRSADALLTVINDILDFEKLELGKMDLEKTAFNLNVVIMDTQKMLTFATQKKGLEFRNECQLNFTGQIVGDAGRLRQVLTNLLTNAIKFTAVGSITLRVIETYEDQKSLHVHFEVRDTGCGISQATLKRLFQPFSQADPSFARRFGGTGLGLSICKNLVDLMGGTIGLESVENKGSNAWFSIPFEKVQTLESSGDSSPDEEAIPEIQMDEATSTLGVSENPLQRPRKDIWILVAEDNLINAQIALRTLKKMGFSCKVAKDGLEAIDEVGKRSYDLILMDCHMPNCDGYEATKRLRKSDSVDIRTTPIIAMTASAIRGDREKCLAAGMSDYLSKPVKSAALESTLVKWLFDPSTRQSLSRYVAPPMHGDYFGSKRPGGGLEITIPGPGEPGSPPRLIERDSTETVMGPHSIQSGRRGSFNPIAEREAVAAEIAASATPVGGVSSRSVEFASLSSEAGSATPEVISHEGHSAISASDEDGASGAEEQQASTVAQRTSQGDRRGCRTDQASTGT

SEQ ID NO: 26784 - protein, 270 aa, Magnaporthe grisea 70-15
MALSPILRNHGTAALAELVGTFLFLFFAFSAAGVANAVPPEFSDGIAVPNIAALLYISFAFGISLMVNVFAFYRISGGQFNPAVSTALCLVGAIPPLRAGFCIVGQIVGGIIAAAAVDGLYPTFLNVETTLGSGVSPAQGVFIEMFLTTQLILVILLLAVEKHRLTYLAPLGIGFALFVTHLAGVYFTGASLNPARSLGPAVINRSFPSYHWIYWIGPMLGALLASGFYTLLDFCKWKQVNPGQDWDGIGEKEAQRDDFDGARDPLTRVA

SEQ ID NO: 26785 - protein, 486 aa, Candida glabrata CBS138
MVHLGPKKPPARKGSMVDMPKDLLDEIKKFEDMFSVDAATLQKVTKHFISELSKGLSKEGGNIPMIPAWVMENPTGKEKGDFLAIDLGGTNLRVVLVKLGGDRTFDTTQSKYKLPGPMRTTKDPEEIWSFIADSLETFIKEQFPEGCNETLPLGFTFSFPASQDKINQGVLQRWTKGFDIPNIEGHDVIPMLQKQIEKRNLPIDIVALINDTTGTLVASLYTDGETKMGVIFGTGVNGAYYDVVSDIPKLEGKLADDIPSSSLMAINCEYGSFDNEHVVLPRNKYDIAIDEESPRPGQQTFEKMSSGYYLGELLRLALLDLYNQGLIFKGQDVQKLKEAYIMDTSYPSRIEDDPFENLEDTDELFQADLGIQTTVQERKLIRRLCELIGTRSARLSVCGIAAICQKRGYETAHIAADGSVFNKYPGFQQRAAEGLRDIYGWKEDKPQNYPIVIVAAEDGSGAGAAIIAALAQKRIAEGKSLGVIGA

SEQ ID NO: 26786 - protein, 214 aa, Zea mays
MASSASRFIKCVTVGDGAVGKTCMLICYTSNKFPTDYIPTVFDNFSANVVVDGTTVNLGLWDTAGQEDYNRLRPLSYRGADVFVLAFSLVSRASYENIMKKWIPELQHYAPGVPVVLAGTKLDLREDKHYLMDHPGLVPVTTAQGEELRRQIGAMYYIECSSKTQQNVKAVFDAAIKVVIQPPTKIREKKKKKSRKGCSMMNIFGGIKMLCFKS

SEQ ID NO: 26787 - protein, 658 aa, Xanthomonas oryzae pv. oryzae
MGSDSGVGIRDSQEQFAASGKIDGSALANPHSPLLTPGTIGAYLQQHESKPLLRFITCGSVDDGKSTLIGRLLYDSKRLFDDQLAALESDSRRHGTQGESIDYALLMDGLAAEREQGITIDVAYRYFDTDRRKFIVADCPGHEQYTRNMATGASTADVAVVLVDARKGLLAQTRRHSYIVSLLGIRHVVLAVNKMDLVDYDAQVFADIAQGYAALAAQLGIADVQCIPLSALAGENLSSASTRMPWYSGPHLLQHLDTVQLEPPEAGSGLRLPVQWVNRPNAQFRGYAGTIAAGQVQVGDAVVVVPSGRRTQVARVLDANGEVDSARAGQAVTLTLRNEIDISRGDIIAAVDDPPEVADQFAGHLLWMDDAALLPGRPYWLKIGTRTVTASISEIKHKVDVNTQERLAAKRLELNEVGYCNLALDEPIAFSPYARNRVLGGFILIDRQSNATVAAGTLEFALRRAGNVHWQHLDVDRSARARIKGQAPRVLWFTGLSGAGKSTVANLVDKRLHALGYHTFILDGDNVRHGLNRDLGFTDEDRVENIRRVAEVARLMADAGLIVLVSFISPFRAERQLARERFDQGEFVEVFVDVPLAVAESRDVKGLYRKARAGQIPNFTGIDSPYEAPETPEIHLHADGENVEALARHVLEYLGLER

SEQ ID NO: 26788 - protein, 127 aa, Halobacterium salinarum
MADDTKWGIAHVHASFNNTIMTVTDQTGAETLAKSSGGSVVKQNRDEASPYAAMQMAEQLAEEVLDQGIEKVHVRVRGPGGNLQRSPGPGAQAAIRALARAGLEIGRIEDVTPIPHDGTRPPKNSGY

SEQ ID NO: 26789 - protein, 546 aa, Streptococcus agalactiae 2603V/R
MNKFKVNISGMTCTGCEKHVESALEKIGAKNIESSYRRGEAVFELPDDIEVESAIKAIDEANYQAGEIEEVSSLENVALINEDNYDLLIIGSGAAAFSSAIKAIEYGAKVGMIERGTVGGTCVNIGCVPSKTLLRAGEINHLSKDNPFIGLQTSAGEVDLASLITQKDKLVSELRNQKYMDLIDEYNFDLIKGEAKFVDASTVEVNGTKLSAKRFLIATGASPSLPQISGLEKMDYLTSTTLLELKKIPKRLTVIGSGYIGMELGQLFHHLGSEITLMQRSERLLKEYDPEISESVEKALIEQGINLVKGATFERVEQSGEIKRVYVTVNGSREVIESDQLLVATGRKPNTDSLNLSAAGVETGKNNEILINDFGQTSNEKIYAAGDVTLGPQFVYVAAYEGGIITDNAIGGLNKKIDLSVVPAVTFTNPTVATVGLTEEQAKEKGYDVKTSVLPLGAVPRAIVNRETTGVFKLVADAETLKVLGVHIVSENAGDVIYAASLAVKFGLTIEDLTETLAPYLTMAEGLKLVALTFDKDISKLSCCAG

SEQ ID NO: 26790 - protein, 447 aa, Hordeum vulgare
MGKEKIHISIVVIGHVDSGKSTTTGHLIYKLGGIDKRVIERFEKEAAEMNKRSFKYAWVLDKLKAERERGITIDIALWKFETTKYSCTVIDAPGHRDFIKNMITGTSQADCAVLIIDSTTGVFQAGISKDGQTREHALLAFTLGVKQMICCCNKMDATTPKYSKSRYDEIVKEVSSYLKKVGYNPDKVPFVPISGFEGDNMIERSSNLDWYKGPTLLEALDQINEPKRPSDKPLHLPLQDVYKIGGIGTVPVGRVETGVIKPGMVVTFGPTGLTTEVKSVEVHHESLLEALPGDNVGFNVKNVAVKDLKRGYVASNSKDDPAKEAANFTAQVIIMNHPGQISNGYAPVLDCHTSHIAVKFAEIQTKIDRRSGKELEAAPKFLKNGDAGFVKMIPTKPMVVETFAQYPPLGRFAVRDMRQTVAVGVIKSVEKKEPTGAKVTKAAIKKK

SEQ ID NO: 26791 - protein, 479 aa, Escherichia coli K12
MSVPVQHPMYIDGQFVTWRGDAWIDVVNPATEAVISRIPDGQAEDARKAIDAAERAQPEWEALPAIERASWLRKISAGIRERASEISALIVEEGGKIQQLAEVEVAFTADYIDYMAEWARRYEGEIIQSDRPGENILLFKRALGVTTGILPWNFPFFLIARKMAPALLTGNTIVIKPSEFTPNNAIAFAKIVDEIGLPRGVFNLVLGRGETVGQELAGNPKVAMVSMTGSVSAGEKIMATAAKNITKVCLELGGKAPAIVMDDADLELAVKAIVDSRVINSGQVCNCAERVYVQKGIYDQFVNRLGEAMQAVQFGNPAERNDIAMGPLINAAALERVEQKVARAVEEGARVAFGGKAVEGKGYYYPPTLLLDVRQEMSIMHEETFGPVLPVVAFDTLEDAISMANDSDYGLTSSIYTQNLNVAMKAIKGLKFGETYINRENFEAMQGFHAGWRKSGIGGADGKHGLHEYLQTQVVYLQS

SEQ ID NO: 26792 - protein, 339 aa, Parachlamydia sp. UWE25
MAVNIAINGFGRIGRLVCRLAIEREDIRIIAINDLVPADNLAYLLKFDSTHGRFKGEIKVEENAIHVNGKKILIFSEKDPQNLPWNDLKIDYVVESTGLFTTSELAGKHLIAGAQRVVISAPAKGDVPTFVMGVNEKNYNPATDRIVSNASCTTNCLAPITKVLLDNFGIDEGLMTTIHAVTASQPTVDGPSKKDWRGGRGASQNIIPASTGAAKAVALCLPQVKGKLTGMAFRVPNADVSAIDLTVRLSKETSYEDICQAMKNASEGAMKGILAFCDEQVVSSDFISSPYSAIFDKDAGITLNSKFYKLIAWYDNEMGYACRVIDLVSYMNCCNNNSL

SEQ ID NO: 26793 - protein, 236 aa, Escherichia coli O157:H7 EDL933
MGYRSFDTAAAYKNEEGVGKALKNASVNREELFITTKLWNDDHNRPREALLDSLKKLQLDYIDLYLMHWPVPAIDHYVEAWKGMIELQKEGLIKSIGVCNFQIHHLQRLIDETGVTPVINQIELHPLMQQRQLHAWNATHKIQTESWSPLAQGGKGVFDQKVIRDLADKYGKTPAQIVIRWHLDSGLVVIPKSVTPSRIAENFDVWDFRLDKDELGEIAKLDQGKRLGPDPDQFGG

SEQ ID NO: 26794 - protein, 109 aa, Glycine max
  misc_feature (28)..(28): Xaa can be any naturally occurring amino acid
  misc_feature (44)..(44): Xaa can be any naturally occurring amino acid
  misc_feature (80)..(81): Xaa can be any naturally occurring amino acid
  unsure (1)..(109): unsure at all Xaa locations
EIFGGYLYFHKAPNKEEFHIETYHKIKXLHQYNYLRANKSTFTXNLEAHIPFLDKAFINTTISINPKSKIIKRNKRRIKXXILKRAFNNKEHPYLPKHILYRQKKQFSN

SEQ ID NO: 26795 - protein, 199 aa, Staphylococcus epidermidis ATCC 12228
MSESNHITWHDSEVTKKQRQHKNGHKSAVIWFTGLSGSGKSTVSVALEKELFNEGKQTYRLDGDNVRHGLNKNLGFSPEDRSENIRRIGEVAKLMVDAGALTVTAFISPYKEDREGVRALLEDNEFIEVYTKCSVEECEKRDPKGLYKKARSGEIPEFTGISAPYQAPENPEITIDTEHDTIEQSVEQIIRYLKEHEYI

SEQ ID NO: 26796 - protein, 131 aa, Rickettsia akari str. Hartford
MAYSTKVIDHYENPRNVGSLDKEKKNVGTGLVGAPACGDVMKLQIEVDDDGIITDAKFKTFGCGSAIASSSLVTEWVKGRSINDAGEIKNTEIAKELSLPPVKLHCSLLAEDAIKAAIADYKQKKESKKDS

SEQ ID NO: 26797 - protein, 164 aa, Saccharomyces cerevisiae
KIEFRVVNNDNTKENMMVLTGLKNIFQKQLPKMPKEYIARLVYDRSHLSMAVIRKPLTVVGGITYRPFDKREFAEIVFCAISSTEQVRGYGAHLMNHLKDYVRNTSNIKYFLTYADNYAIGYFKKQGFTKEITLDKSIWMGYIKDYEGGTLMQCSMLPRIRYLD

SEQ ID NO: 26798 - protein, 601 aa, Oryza sativa (japonica cultivar-group)
MASTFGATSTVGLMAAPTGIVSDKKPSSLSSVSSVSVASRPRNARLQRKCNFRVKAAKELYFNKDGSAIKKLQTGVNKLADLVGVTLGPKGRNVVLESKYGSPRIVNDGVTVAREVELEDPVENIGAKLVRQAAAKTNDLAGDGTTTSVVLAQGLIAEGVKVVAAGANPVQITRGIEKTAKALVEELKKLSKEVEDSELADVAAVSAGNNYEIGNMIAEAMSKVGRKGVVTLEEGRSSENNLYVVEGMQFERGYISPYFVTDSEKMSAEYENCKLLLVDKKITNARDLINVLEEAIRGAYPILIIAEDIEQEALATLVVNKLRGSLKIAAIKAPGFGERKTQYLDDIAILTGATVIRDEVGLSLDKADKSVLGTAAKVVLNKESTTIVGDGSTQEEVTKRVAQIKNLIEAAEQEYEKEKLNERIAKLAGGVAVIQVGAQTETELKEKKLRVEDALNATKAAVEEGIVVGGGCTLLRLAARVDAIKDNLENDEQKVGAEIVRRALSYPLKLIAKNAGVNGSVVTEKVLSNDNFKFGYNAATGQYEDLMAAGIIDPTKVVRCCLEHAASVAKTFLTSDVVVVEIKEPEPAPVTNPMDNSGYGY

SEQ ID NO: 26799 - protein, 103 aa, Taraxacum officinale
KQMGFSSDARSHYKTHKLFLISNYILLGAASSCIFLTLSLRLFPSVAGGLLVLLHIITIAGAISDCNAVSAGSGKWYAAHMVATVLTAIFQGSVSVLIFTTTS

SEQ ID NO: 26800 - protein, 370 aa, Arabidopsis thaliana
MKGGSMEKIKPILAIISLQFGYAGMYIITMVSFKHGMDHWVLATYRHIVATVVMAPFALMFERKIRPKMTLAIFWRLLALGILEPLMDQNLYYIGLKNTSASYTSAFTNALPAVTFILALIFRLETVNFRKVHSVAKVVGTVITVGGAMIMTLYKGPAIEIVKAAHNSFHGGSSSTPTGQHWVLGTIAIMGSISTWAAFFILQSYTLKVYPAELSLVTLICGIGTILNAIASLIMVRDPSAWKIGMDSGTLAAVYSGVVCSGIAYYIQSIVIKQRGPVFTTSFSPMCMIITAFLGALVLAEKIHLGSIIGAVFIVVGLYSVVWGKSKDEVNPLDEKIVAKNQELPITNVVKQTNGHDVAGAPTNGVVTST

SEQ ID NO: 26801 - protein, 323 aa, Ralstonia solanacearum
MLMQAFYTDHFVLPLPPGHRFPMRKYSLLRERALAEVPGLVMHEAPRAGDDALLLAHAPDYVSAVGAGRLDPARQREIGFPWSPEMVERSRRSAGATMAACEAAMADGIAVNLAGGTHHAYADKGGGFCVFNDAAIASRWMQRRPGRTPEHFPVAIVDLDVHQGNGTASILRDDASVFTLSEHGEKNYPFRKEASDLDVGLPDGCGDAAYLEALAGALDTLAARFAPRLIIYLAGADPHEGDRLGRLRLTMDGLARRDRQVFDFAFLRRIPIAVTMAGGYGNNIDDTVAVHAQTIALAALHAARWAAGEAATSVSSSSLPLSA

SEQ ID NO: 26802 - protein, 560 aa, Oryza sativa
MADDSLLDNFLEELQVRKDDVSDTRIAFNKDPFLDDAVLSNPSTSNGNKLTSLVVLNLVSLVHHNLPGILPVAKKNKAKRNFVDVCDRDYGIWMGGFEEWMALVRKRNGSGTPSSSSPQQPRSGGFAAQSSVSYVHGSPLLENTMPFDSHDSAEKTAEALGRVLILDLVLRNEDRLRCRPLGWRGNYANLLVADRNAYANLDSLDDVYDSAIIRYKPEIIRSPQNRKPRRAVSISGSIGSDTSDLMLPDNPSQPEISSFHIIAIDSDGELCKEIEQWNDMLRTEVVKLCQDNSFNTGFFEGIDNSIAVDAYELKVRLEHILERISLISDAASTERPSQITDYLYIGGALAARSTYTLKHLGITHVLCLCANEIGQAESQQPDRFDYQNFSINDDENADISDVFQDASDFIDYVQHLHGKVLVHCFEGKSRSATVVLAYLMLRKKFTLLEAWNMLKKVHRRAHPNDGFAKVLLDLDKKLHGKISMEWHHRRPAMKVCPICGKNAGLSSSSLKLHLQKAHRKISSGSVDTAMSLEIQKAVEAIKAGRGGGDSPTHSAEKVTS

SEQ ID NO: 26803 - protein, 502 aa, Brassica rapa
MARKMLSDGELNKAAAAGEEATTETHYDFDLFVIGAGSGGVRAARFSANNGAKVGICELPFHPISSEEIGGVGGTCVIRGCVPKKILVYGATYGGELEDARNYGWEINGNVDFNWKKLLQKKTDEILRLNNIYKRLLANAAVKLYEGEGRIVGPNEVEVRQIDGTKISYTAKHILIRTGSRAQKPNIPGHELAITSDEALSLEEFPKRAIVLGGGYIAVEFASIWRGMGATVDLFFRKELPLRAFDDEMRELVARNLEGRGINLHPQTSWHELIKTDDGIKVISSHGEEFVADVVLFATGRIPNTKRLNLEAVGVELDQAGAVKVDEYSRTNIPSIWAVGDATNRINLTPVALMEATCFANTVFGGKLRKADYTNVACAVFCIPPLAVVGLSEEEAVEKATGDILVFTSGFNPMKNTISGRQEESLMKLIVDEKTDKVIGASMCGPDAAEIMQGIAIALKCGATKAQFDSTVGIHPSSAEEFVTMRTVTRRIANKAKPQTSL

SEQ ID NO: 26804 - protein, 97 aa, Taraxacum officinale
EVQPALSGVAIGAGWQAVIAYINIACYYIFGVPLGLFFGFVLDWGVKGIWVGMLTGTVVQTIILVWICYRTNWDKEASLAEERIRKWSGQKKVVEEA

SEQ ID NO: 26805 - protein, 332 aa, Chromobacterium violaceum ATCC 12472
MAIKVGINGFGRIGRMVFRAIAKDFPELEVVGINDLLDPEYLAYMLKYDSVHGRFQGDVKVEGGSLVVNGKTIRLTAEKDPANLKWNEVNAEIVIDCTGFFLTKEGCQKHIDAGAKKVVQSAPSKDDTPMFVYGVNHDKYAGETIVSAASCTTNCLAPVAKVLHDNWGIKRGLMSTVHAATATQKTVDGPSSKDWRGGRGILENIIPSSTGAAKAVGKVIPELNKKLTGMAFRVPTSDVSVVDLTVELEKEADYADICKAMKAASEGELKGVLGYTDEKVVSTDFVGNTAPSTFDADAGIALDKTFIKVVAWYDNEYGYTCNMLRFVKHVAG

SEQ ID NO: 26806 - protein, 311 aa, Triticum aestivum
MDNYTGIPGSDVLRSRADSQLVAVTYIPRGEQVDEAVRREILRHRSLRHPSVVRLRELVLTPTHLAVVSEHAPDLHRRVRDAGRFSEDEARLLFRQLVSGVSYCHSMQVCHRDLKLENILLDGSCAGPPRLKICGPGVSKRQSQPGAPRASDQTRVYIAPEVFQQREYDGKIADVWSCGMTLYAMLVGAYPFQCPDDEPINFRKIIQRIQSVEYSVPDDLHISAECRDLISKIFVADPAARITVPEIRNHPWFLMNLPADDSTMSTEEAEQPVQSMDEIMQILALAEAPGDTGDDMEEFVDSDPCIDITTC

SEQ ID NO: 26807 - protein, 453 aa, Nostoc punctiforme PCC 73102
AVKVQRPDLRERITIDLYILRNIAAWVQKTVKRVRSDLVGILDELGDRIFEEMDYIHEGENAERFFELYGHIKDIYVPKIYWEYTNRRVLTMEWINGIKLTQTEEISAQGIDARYLIEVGVQCSLRQLLEHGFFHADPHPGNLLATPDGKLAYLDFGMMSEIKPPQRYGLIEAIVHVVNRDFEGLAKDYVKLDFLSPETDLTPIIPAFARVFADAQGASVADLNIKSITDELSALMYEYPFRVPPYYALIIRSLVTLEGIAIFIDPNFKVLSEAYPYVSKRLLTDQAPQLRASLQDLLFKDGRFRWNRLENLLRNARNSQDYDFNLVLNQGIEFLSSERGAFILDKLVDESVNGLDALSKNVLHNFTSLLRERVGLTAVNEAPAATVEQQQTLEHIKHILGILRETRGFDPLQLATQISQLLVNSDVQRLGQQIANRFTQKAIARLIRQLLAS

SEQ ID NO: 26808 - protein, 542 aa, Escherichia coli CFT073
MVSALWTVELNDSKTGTHVGLRHKHTFLCTLFRCHLSLERGTTTFVIPDSLSGSAPRKQVSPILLNLKTKTVMKKTKIVCTIGPKTESEEMLAKMLDAGMNVMRLNFSHGDYAEHGQRIQNLRNVMSKTGKTAAILLDTKGPEIRTMKLEGGNDVSLKAGQSFTFTTDKSVIGNSEMVAVTYEGFTTDLSVGNTVLVDDGLIGMEVTAIEGNKVICKVLNNGDLGENKGVNLPGVSIALPALAEKDKQDLIFGCEQGVDFVAASFIRKRSDVIEIREHLKAHGGENIHIISKIENQEGLNNFDEILEASDGIMVARGDLGVEIPVEEVIFAQKMMIEKCIRARKVVITATQMLDSMIKNPRPTRAEAGDVANAILDGTDAVMLSGESAKGKYPLEAVSIMATICERTDRVMNSRLEFNNDNRKLRITEAVCRGAVETAEKLDAPLIVVATQGGKSARAVRKYFPDATILALTTNEKTAHQLVLSKGVVPQLVKEITSTDDFYRLGKELALQSGLAHKGDVVVMVSGALVPSGTTNTASVHVL

SEQ ID NO: 26809 - protein, 353 aa, Chromobacterium violaceum ATCC 12472
MNRLQAIRPFGQRIWLDNLSRELIASGELARLLADDGIAGVTSNPAIFYKAISSDASYQGELAVLKQDASLSAEARYEKLVVADIQAACDLLLPQYEASQGNDGYVSLEVSPELSRDEAGTLAAARRLWAEIGRANAMIKIPATAEGIRAFQALTREGVNVNITLLFSLPQVEAVWDAYIAGLSARLADGQPVAGVKAVASFFLSRVDSLLDPQVAEPHQGKVAIALSKAAYARYQERFHGEAFAKLRAAGARPQFLLWASTGTKNPAYRDVLYVESLIGDETVNTVPDATMAAFRDHGEAALTLPVDMDAAQALLAEVEATGIDLAAAGEKLQQDGLKLFEDAFAQLLKLTA

SEQ ID NO: 26810 - protein, 262 aa, Glycine max
MVSISDHELVLIFGLLGNIVSFMVFLAPLPTFYTIYKKKSSEGFQSIPYAVALLSALLLLYYGFIKTNATLIITINCIGCVIEVSYLAMYIIYAPRKQKISTLVMILIADIGGFGLTMLITTFAVKGINRVHAVGWICAIFNIAVFAAPLSIMRRVIKTKSVEFMPFSLSLFLTLCATMWFFYGFFDKDNFIMLPNVLGFLFGISQMILYMIYKNAKKNGEINCTEQQERDGTVNSKQHSCNGNKLDFPSLVEMKENQLNQV

SEQ ID NO: 26811 - protein, 590 aa, Haloarcula marismortui ATCC 43049
MACNRAIHRRSPWLLYRSTFNHRLTMAQQQMGNQPMIVLSEESQRTSGKDAQSMNITAGTAVAEAVRTTLGPKGMDKMLVDNSGSVVVTNDGVTILDEMDIEHPAANMIVEVAQTQEDEVGDGTTTAVVMAGELLSKAEELLDQDIHASILAQGYRQAAEKAKEILEDNAIDVDADDTETLEKVAATAMTGKGAESSKDVLAELVVRAAQSVVDDDGSVDTDNIQIETVVGGATDESELVEGVIVDKERVHDNMPFAVEDADVALLDTAIEVPETELDTEVNVTDPDQLQQFLDQEEEQLKEMVDQLAEAGADVVFCQKGIDDMAQHYLAQEGILAVRRAKKSDIEALSRSTGARIISNIDDIEADDLGFAGSVAQKDIAGDERIFVEDVEDARAVTMILRGGTEHVVDEVERAIEDSLGVVAATLEDGKVLPGGGAPETQLALGLRDHADSVGGREQLAVEAFADAIDVIPRTLAENAGLDPIDSLVDLRSKHDGGAVTSGLDAYTGEVVDMEEDGVVEPLRVKTQAVESATEAAVMILRIDDVIAAGDLKGGQGDDDEDEGGPGGPGGAPGGMGGGMGGMGGGMGGMM

SEQ ID NO: 26812 - protein, 513 aa, Schizosaccharomyces pombe
MSDAHDTIKSLTGDASNSRRLIVVSNRLPITIKRKDNGTYDFSMSSGGLVSALSGLKKLMTFQWLGWCGQEIPEDEKPMIIQRLQDECSAIPVFLDDETADRHYNGFSNSILWPLFHYHPGEINFDEENWEAYRAANYAFAEAIVKNLQDGDLIWVQDYHLMVLPQMLRELIGDKFKDIKIGFFLHTPFPSSEIYRVLPVRNEILEGVLNCDLVGFHTYDYARHFLSACSRILNLSTLPNGVEYNGQMVSVGTFPIGIDPEKFSDALKSDVVKDRIASIERRLQGVKVIVGVDRLDYIKGVPQKFHAFEVFLEQYPEWVGKVVLVQVAVPSRQDVEEYQNLRAVVNELVGRINGRFGTVEYTPIHFLHKSVRFEELVALYNVSDVCLITSTRDGMNLVSYEYICTQQERHGALILSEFAGAAQSLNGSIVINPWNTEELANSIHDALTMPEKQREANENKLFRYVNKYTSQFWGQSFVGELQRIQHYSHPHPRRTNPILRTKSAQVLSMNSSS

SEQ ID NO: 26813 - protein, 331 aa, Vibrio vulnificus CMCP6
MIKIAFFSAKSYDEASFNKVNGNKEYEFHYHDFRLRLKTSKMAQGCDVVCAFVNDDLSSPVLEQLALGGTKLIAMRCAGFDKVDLQAAKELGLQVVRVPAYSPEAVAEHAVGMMMCLNRRLHKAYQRTRDANFSLEGLVGFNFYGKTVGVIGTGKIGLATMRILKGLGMEILCYDPYENPLAIEMGARYTTLQEIYQSADVISLHCPMSKENFHLLNEHSFEQMKDGVMIINTSRGELLDSAAAIEALKKGKIGALGLDVYDNEKDLFFQDKSNDVIVDDVFRRLSACHNVLFTGHQAFLTHEALNNIASVTLNNVEAFFAGNTSGNELVE

SEQ ID NO: 26814 - protein, 398 aa, Bordetella parapertussis 12822
MFALNPHPSGRHFLQIPGPTNVPDRVLRAIDQPTIDHRGPAFGQLGLAVLAGLKHVFRTESPVLIFPASGTGAWEAALVNTLSPGDTVLMAETGHFASLWRRLAGRLGLEVDCLESDWRHPADPQAIGARLAQDTQHRIKAVCVVHNETSTGVTSDIAAVRAAIDQAGHPALLMVDTISSLGSIDYRYDEWGVDVTVAGSQKGLMLPPGLSFNAIGPRALAAAGQARLPRSYWDWREMLAANERGYFPYTPATNLLYGLHEALAMLREEGLPQVYARHRRHAHATRLAVAAWELELLCLDPAQCSPALTAVLMPGGHSADAFRQRALERFDISLGQGLGKLADRVFRIGHLGYFNDLMLCGTLAGVEMGLAAAGVPHRAGGVQAAMAFLAQTPSGQPA

SEQ ID NO: 26815 - protein, 302 aa, Arabidopsis thaliana
MATVANFLAKPISTVVPRPSSAVASTSSFVFFNHKTNPLFRRKNLPKRLFSAVKIKAGAASPGKVGTPPANDEKVQKIHSGEEFDEALKNAKSRLVVAEFATSKSDQSNKIYPFMVELSRTCNDVVFLLVMGDESDKTRELCRREKIEKVPHFSFYKSMEKIHEEEGIEPDQLMGDVLYYGDNHSTVVQLHGRPDVEKLIDENRTGGKLIVLDVGLKHCGPCVKVYPTVLKLSRSMSETVVFARMNGDENDSCMEFLKDMNVIEVPTFLFIRDGEIRGRYVGSGKGELIGEILRYSGVRVTY

SEQ ID NO: 26816 - protein, 344 aa, Magnaporthe grisea 70-15
MSSQSAAGKITDWVKPGDTSGEFKRQVSSFRNWVSSEAGAQFPAEKGRYHLYVSYACPWATRVLIARKLKGLEDVISFSSVHWHLGENGWRFPTAEEAAHPDGENVTPDPCPGHEAFTHLRQVYFAAEPEYEGRFTVPVLWDKVQKTIVSNESSEILRMFGSAFDGIVEDKFKGVNLYPESLRVQIEEAHGWQYDLINNGVYKSGFATTQEAYERNVTALFEALDRAEEHLAGAEGPYWFGKDITEVDIRLFVTLIRFDPVYVQHFKCNIRDIRSGYPHLHKWMRNLYWNVPAFKDTCNFLHIKNHYTKSHKQINPFSITPVGPLPDILPLDDEVPAVKAAKSA

SEQ ID NO: 26817 - protein, 185 aa, Zea mays
MAEAPASPGGGGGSHESGSPRGGGGGGSVREQDRFLPIANISRIMKKAIPANGKTIPANGKIAKDAKETVQECVSEFISFITSEASDKCQREKRKTINGDDLLWAMATLGFEDYIEPLKVYLQKYREMEGDSKLTAKSSDGSIKKDALGHVGASSSAAQGMGQQGAYNQGMGYMQPQYHNGDISN

SEQ ID NO: 26818 - protein, 205 aa, Volvox carteri
MSTKKRRVLKIIILGDSGVGKTSLMNQYVQKKFTKEYKATIGADFLTKEIEVDDKKVTMQIWDTAGQERFQSLGSAFYRGADCCMLVFDVNNAKSFDDLDNWRDEFIIQAGPSDPDNFPFVVLGNKIDEVGVNRQVTEKKAKAWCASKGSIPYFETSAKEDINVEAAFTCITRNALRNEKEEELFVPDAVDMNTSATQRKRGGCC

SEQ ID NO: 26819 - protein, 427 aa, Bacillus anthracis str. 'Ames Ancestor'
MEQKPVLDVNEVPKPGKWLFLSIQHLFAMFGSTVLVPFLTGLNPSVALISSGLGTLAFLLITKGQVPAYLGSSFAFIAPIITAKTAGGPGAAMLGGLLAGLVYILISLGIKKSGSKWIMKLLPPIVVGPVVMVIGLALAHTAVNMAMNGADGKYSFTHFSVALVTLAITIICSIFGRGFFSIIPVLLGIIGGYIFAYFQGLVDLKPVAEAKWFVVPDFTVPFVTYTPEFSWKIVLLMVPVALVTISEHIGHQIVLGNVIKRDLIEKPGLHRSIFGDGVATLIASLIGGPPNTTYGENIGVLAITRAYSVYLFIGSAVFAIMFGFIGKISALIHSIPTPVMGGVSILLFGVIASSGLRMMVDDKTDLSDKRNLMIASVILVIGIGGAVLHVGESFQVEGMALAAIVGVLLNLLLPETKQIKQSKQIAS

SEQ ID NO: 26820 - protein, 338 aa, Escherichia coli
MRVLVTGGSGYIGSHTCVQLLQNGHDVIILDNLCNSKRSVLPVIERLGGKHPTFVEGDIRNEALMTEILHDHAIDTVIHFAGLKAVGESVQKPLEYYDNNVNGTLRLISAMRAANVKNFIFSSAATVYGDQPKIPYVESFPTGTPQSPFGKSKLMVEQILTDLQKAQPDWSIALLRYFNPVGAHPSGDMGEDPQGIPNNLMPYIAQVAVGRRDSLAIFGNDYPTEDGTGVRDYIHVMDLADGHVVAMEKLANKPGVHIYNLGAGVGNSVLDVVNAFSKACGKPVNYHFAPRREGDLPAYWADASKADRELNWRVTRTLDEMAQDTWHWQSRHPQGYPD

SEQ ID NO: 26821 - protein, 342 aa, Kineococcus radiotolerans SRS30216
MAEMFYDDDADLSTITGKKVAVLGFGSQGHAHALSLRDSGVDVVVGLKEGSKSRAKAEEQGLTVLTPFEASKAADVIMVLVPDHLQRGLYAEAIEPNLTAGKALFFSHGFNIRFGYIKPPADVDVVMVAPKGPGHLVRREYVDGRGVPVIVAVEQDATGQAWALALAYAKAIGGLRAGGIKTTFTEETETDLFGEQAVLCGGASALVQTGFEVLTEAGYQPEVAYFECLHELKLIVDLMYEGGIAKQRWSVSDTAEWGDYVSGPRVIDASVKERMKDVLKDIQDGTFARNFIEDQDAGAPKFKELRAKAEQHPIEATGRELRKLMAWVKSDDSDYVEGSAAR

SEQ ID NO: 26822 - protein, 338 aa, Escherichia coli
MRVLVTGGSGYIGSHTCVQLLQNGHDVIILDNLCNSKRSVLPVIERLGGKHPTFVEGDIRNEALMTEILHDHAIDTVIHFAGLKAVGESVQKPLEYYDNNVNGTLRLISAMRAANVKNFIFSSAATVYGDNPKIPYVESFPTGTPQSPFGKSKLMVEQILTDLQKAQPDWSIALLRYFNPVGAHPSGDMGEDPQGIPNNLMPYIAQVAVGRRDSLAIFGNDYPTEDGTGVRDYIHVMDLADGHVVAMEKLANKPGVHIYNLGAGVGNSVLDVVNAFSKACGKPVNYHFAPRREGDLPAYWADASKADRELNWRVTRTLDEMAQDTWHWQSRHPQGYPD

SEQ ID NO: 26823 - protein, 460 aa, Schizosaccharomyces pombe
MEEPEEATQATQEAPLHVSQNIAKQVVNNENVFMKLVMTRMLDGKTEVIPLTTDVHNGFWGFGRHKSCEVVLNGPRVSNFHFEIYQGHRNDSDESENVVFLHDHSSNGTFLNFERLAKNSRTILSNGDEIRIGLGVPKDEISFLCQVPVKHSRDSQKNMIKSENSHYEIIRTLGSGTFAVVKLAVEVNSGKWYAIKIINKRKILLTSSEKRATEMFQREIDILKSLHHPGVVQCHEICENDDELFIVMEYVEGGDLMDFLIANGSIDEQDCKPLLKQLLETLLHLHKQGVTHRDIKPENILITNDFHLKISDFGLAKVIHGTGTFLETFCGTMGYLAPEVLKSKNVNLDGGYDDKVDIWSLGCVLYVMLTASIPFASSSQAKCIELISKGAYPIEPLLENEISEEGIDLINRMLEINPEKRISESEALQHPWFYTVSTHEHRTPPSSSEHEATEQLNSSS

SEQ ID NO: 26824 - protein, 206 aa, Oryza sativa
MAEVEAAPIAAAETPEVAAAEGAAAAKAPHKLHRQWAFWYDIQSKPKPGAAWGTSLRKAYTFDTVEEFWGLYDQIFRPSKVTVNADFHLFKAGVEPKWEDPECANGGKWTVPCSRKTTLENMWLETLMALIGEQFDESEEICGVVASVRQRGDKLALWTRTASNEAVQVNIGKKWKEIVDYNDKMVYSFHDDAKREKPSRGGRYNV

SEQ ID NO: 26825 - protein, 399 aa, Glycine max
  misc_feature (261)..(261): Xaa can be any naturally occurring amino acid
  unsure (1)..(399): unsure at all Xaa locations
MPMELEQELGSTTIQRSFDARYTRHARDSLGELPDSFTITDPSIPGHPIVFASPGFLKLTGYSLREVLGRPAAIFQGPRTSRKSVIEIREAVREERNAQVVLLNYRRDGTPFWMLFRVSPVFSSDGGAVVHFVAVQVPLQKKEGSGVRDFGFGCCRKEVCVDSLAEIDRVCSLEQVLEPDVRALWDAEVEREEPCEASDDEKRSAVTAMDSIFSVLTHYSEATGRLVCRKRSSIPDVGLLSTSLIISLGRIKQSFVFFHAXTNPHLPDMPIVYASDAFLKLTGYAKNEVLGHNCRFLGGTDTDTSTLHLIRESIKTEQPCTVRILNYRKDKSSFWNFLHISPVRDASGKVAYFVGVQIEDNNKNDDSHCLSPEKRQLSVVGVVKVAVRSLSMTAGSSES

SEQ ID NO: 26826 - protein, 184 aa, Medicago sativa
LTGPVTILNWSFVRNDQPRSETTYQIALSIKDEVEDLEKAGITVIQIDEAALREGLPLRKSEQAHYLDWAVHAFRITNVGVQDTTQIHTHMCYSNFNDIIHSIIDMDADVITIENSRSDEKLLSVFREGVKYGAGIGPGVYDIHSPRIPPTEEIADRINKMLAVLEKNILWVNPDCGLKTRKYT

SEQ ID NO: 26827 - protein, 588 aa, Zea mays
  misc_feature (560)..(560): Xaa can be any naturally occurring amino acid
  misc_feature (572)..(572): Xaa can be any naturally occurring amino acid
  unsure (1)..(588): unsure at all Xaa locations
MCGILAVLGCSDCSQARRARILACSRRLKHRGPDWSGLYQHEGNFLAQQRLAIVSPLSGDQPLFNEDRTVVVVANGEIYNHKNVRKQFTGAHSFSTGSDCEVIIPLYEKYGENFVDMLDGVFAFVLYDTRDRTYVAARDAIGVNPLYIGWGSDGSVWMSSEMKALNEDCVRFEIFPPGHLYSSAAGAGFRRWYTPHWFQEQVPRTPYQPLVLREAFEKAVIKRLMTDVPFGVLLSGGLDSSLVASVTKRHLVKTDAAEKFGTELHSFVVGLEGSPDLKAAREVADYLGTTHHEFHFTVQDGIDAIEEVIYHDETYDVTTIRASTPMFLMARKIKSLGVKMVLSGEGSDELLGGYLYFHFAPNREELHRETCRKVKALHQYDCLRANKATSAWGLEVRVPFLDKEFVDVAMGMDPEWKMYDKNLGRIEKWVLRKAFDDEEHPYLPEHILYRQKEQFSDGVGYNWIDGLKAFTEQQVTDEMMNSAAQMFPYNTPVNKEAYYYRMIFERLFPQDSARETVPWGPSIACSTPAAIEWVEQWKASNDPSGRFISSHDSAATDRTXTSWRWSTATGTXANGTVNGNDVAVAIAV

SEQ ID NO: 26828 - protein, 203 aa, Spirulina platensis
VQSNLRLVVSIAKKYMNRGLSFQDLIQEGSLGLIRAAEKLDHEKGYKFSTYATWWIRQAITRAIADQSRTIRLPVLLYETISRIKKTTKLLSQEMGRKPTEEEIATRMEMTIEKLRFIAKSAQLPISLETPIGKEEDSRLGDFIESDGETPEDQVSKNLLREDLESVLDTLSPRERDVLRLRYGLDDGRMKTLEEIGQIFNVT

SEQ ID NO: 26829 - protein, 589 aa, Lactobacillus johnsonii NCC 533
MKKTKIVSTLGPASNDVETITKLAEAGANVFRFNFSHGDHEEHRARMNMVREVEKKTGKLLGIALDTKGAEIRTTEQEGGKFTINTGDTIRISMDDTKKGNKDMIHVTYDGLYDDTHVGGHVLIDDGLVDLLIKDKDDAKRELVCEAQNTGVIGSKKGVNAPGVEIRLPGITEKDTNDIKFGLKEGINFIFASFVRKAQDVLDIRQLLEEAHCEYVKIFPKIESQEGIDNIDEILKVSDGLMVARGDMGVEIPFINVPFVQKELIKRCNALGKPVITATQMLDSMQENPRPTRAEVTDVANAVLDGTDATMLSGESANGLYPVKAVKAMAEIDMRTEKQLAKRNKLALQRFEEYKGSNVTEAIGESVVRTAEELGVKTIIAATESGYTARMISKYRPNADIIAMTFNDKIQHSLGVVWGVKPMLTEKPKSTEEMFEKAAELAKETGLAKDGDLVIIVAGVPLGETGTTNLMKLQLIGTQLVKGLGVGEQSVIGKAVVATSAEEANSKVQDGDILVAKTTDKDYLPAIKKASGMVVEASGLTSHAAVVGLSLGIPVIVGATDAVEKIKDGSKITVDARRGAVYQGEATNL

SEQ ID NO: 26830 - protein, 317 aa, Treponema denticola ATCC 35405
MIKEIYLAGGCFWGVEGYFRQIPGVKETDTGYANGKNDSANYKGLHQSDHAETVKIVYDSSVVSLQELLAHYFRIIDPTSLNKQGNDAGRQYRTGIYYVDDSMIKEINSFVKFMQKKYSRPIVVEVEKLKHFILAEDYHQDYLQKNPGGYCHIDLTLALKPLYDESKFKVPSKEELKKSLKPIQFSVTQEKATERPFTSEYDKFDAEGIYVDITTGKPLFSSLNKYDAGCGWPSFTKAITTQALQYLEDKSLGMNRTEVVSKTGGAHLGHVFDDGPADAGGLRYCINGAALRFIPYDKMEKEGYGDYLPYVKPTGNF

SEQ ID NO: 26831 - protein, 347 aa, Mycosphaerella fijiensis
IQTISGEHGLDGAGVYNGTSDLQLERMNVYFNEASGNKYVPRAVLVDLEPGTMDAVRAGPFGQLFRPDNFVFGQSGAGNNWAKGHYTEGAELVDQVLDVVRREAEGCDCLQGFQITHSLGGGTGAGMGTLLISKIREEFPDRMMATFSVMPSPKVSDTVVEPYNATLSVHQLVENSDETFCIDNEALYDICMRTLKLNNPSYGDLNHLVSAVMSGVTTCLRFPGQLNSDLRKLAVNMVPFPRLHFFMVGFAPLTSRGAYSFRAVTVPELTQQIFDPKNMMAASDFRNGRYLTCSAIYRGKVSMKEVEDQIRNVQNKNTAYFVEWIPNNVQTALCSIPPRGLKMSSKS

SEQ ID NO: 26832 - protein, 643 aa, Rhodopseudomonas palustris CGA009
MMDYAGRVAAADTFPKLLRLNAREFGTEIALREKDLGLWRVFTWADYQARVHDFALGMVELGLKRGDVIGIIGDNRPDWVSAEIATHAIGGLSLGLYRDVLDEEADYLLNYGEAKLVFAEDEEQVDKLLGLADRAPHLKHIVYSDPRGMRKYDDPRLLPADQLAKLGRDRASREPGLYDRLVDATQGEDVAILCTTSGTTAHPKLAMLASGRVLKHCATYLSFDPKGPDDEYVSVLPLPWIMEQVYALGKGLLCRMTVNFVEEPDTMMNDFREIAPTFVLFAPRVWEGIAADVRARVMDASPLKQRLYNAGMRAGLAALDHGQHSAFADAVLFRALRDRLGFTRLRSAATGGAALGPDTFRFFRAMGVPLRTLYGQTELLGAYTLHKPDAVDPDTTGVPMGAEIEIKVLNPDVQGIGEVVVRHPNMFLGYYKNPEASTADIKDGWMHSGDAGYFNGAGQLVIIDRIKDLAELSHGERFSPQYIENKLKFSPYVAEAVILGAGRDMLAAMICIRYSIISKWAEKKRIAFTTYSDLASRPEVYELLRREVASVNATLPPAQRISRFLLLYKELDADDGELTRTRKVRRSVINEKYGDIIDGIYSGRSDISVDTAIKFQDGTTQRIRTTLRVVDLGAGHAHAEAAE

SEQ ID NO: 26833 - protein, 492 aa, Zea mays
MAMKKNQDSQLVMGRYRLGQLLGSGNFAKVYKAHKVATGEAVAVKVLDKDAVHRSGMAEKVKTEVDVMRRVRHPNVVRLHEMMATRSKIYFVMEYASGGELFARLAQSTRFPEPVARRYFQQLMTAVEFCHSRGVYHRDLKPENLLLDARGDLKVSDFGLSALQDGRGGRQLRGDGLLHTACGTPAYVAPEVLLKTGYDGAKADIWSCGVILFVLLAGYLPFNDTNLILVYRKITQSNYKCPPWFSVEARKLLARLLDPNPRTRITISKVTANPWFQKGLCPLTTDKPLDLWETSEVLGKEKACRCRHHQRDDADADADADDEENTRKRKRSKVTVSSPPTVAVRPSSMNAFDIISRSSGLDLSKMFDEEHRSEARFSSRESTPRVRPRVRPRVRTRNLDIKLNKRGRVEMEGGQYCRRGTLVIEAEIFEVAPSVRVVEMRKIGGDSPEFREFYRQELKPSLGDIVWSWQGSDSPPVPLLPPAPRQATNQRS

SEQ ID NO: 26834 - protein, 442 aa, Arabidopsis thaliana
MTATEAKNRKINVGDGDDVVDIEIPDTAHQISSDSWFQVAFVLTTGINSAYVLGYSGTIMVPLGWIGGVVGLLIATAISLYANTLIAKLHEFGGRRHIRYRDLAGFIYGRKAYHLTWGLQYVNLFMINCGFIILAGSALKAVYVLFKDDHTMKLPHFIAIAGLICAIFAIGIPHLSALGVWLGVSTFLSLIYIVVAIVLSVRDGVKTPSRDYEIQGSSLSKLFTITGAAANLVFAFNTGMLPEIQATVRQPVVKNMMKALYFQFTAGVLPMYAVTFIGYWAYGSSTSTYLLNSVNGPLWVKALANVSAILQSVISLHIFASPTYEYMDTKYGIKGNPFAIKNLLFRIMARGGYIAVSTLISALLPFLGDFMSLTGAVSTFPLTFILANHMYYKAKNNKLNAMQKLWHWLNVVFFSLMSVAAAIAAVRLIAVDSKNFHVFADL

SEQ ID NO: 26835 - protein, 335 aa, Shewanella sp. MR-7
MRNRVLCFGEALIDFLTIGNSEDDGLKLPSFRQYPGGAPANAAVAVAKLGGDARFAGLVGNDKFGDFLAEALARYGVDISLLGRHDTAPTSLAFVHLDDTGERSFSFYRDGGADTLFDATTVDSNWFENTSILHLCSNTLTTTQCAETTLEIAERAVTTGVTLCVDVNLRHNLWSQGKACKETVMRLVSKAHVLKFAKEELEYLAGKEATQFIDMLLSLGCRLVLVTDGGNPISAYANQRSLTLTPPKVKVADTTAGGDGFIGGLLYRISSCGLDALLADETALKQALTFAIACGALAVSRPGAFPALPVLAEAEGFSTELGALFADKTFTDFIF

SEQ ID NO: 26836 - protein, 415 aa, Streptomyces griseus subsp. griseus
MTIDQTPRATGSTTDVCVIGGGPAGLTLALLLLRSGVQVTLVERATSMSREYRGEILQPGGLALLDQLGVLAPAAARGGYWLDGFQLVERERVLLDIAYDRLPAPYNRLLSVPQRHVLAELLDRCHGFDGFRYLDGHRLSALVEEDGAVRGAVAEGRAGPHTVRAGWVVGADGRFSKTRRLAGIGADRQDVFAFDVLWFKLPQEEPPGRHVRVFRAAGRPVLVYPSYPGTVQLGWTLPHKGYAEMATLGVETIRSEIARAVPAYADRLARHVHALSDFTLLDVFAGRAREWVRDGLVLIGDSAHTHSPLGAQGINLALQDAALLHPVLVEALRDGDFSAGRLDAYALPRSRDIDQVMKTQTMQAKAMLSQGRVARVVRPRLAGLVQRTPIGPKITRHIALGNPAARVRSDLFAPG

SEQ ID NO: 26837 - protein, 346 aa, Silicibacter sp. TM1040
MSQELIDGLLAAFPMPAVLIDQTERLIAANVEGATLLGPQVIGRHFATILRQPNVTTAIEACLLDRKPRTARHLSNDGAQDTTFEVTLRYVPGVGAVNGGAVLLCFDDITDREQASQMRRDFVANVSHELRTPLTALMGFIETLRGAARNDAAARDRFLEIMEGEASRMNRLVGDLLSLNRVESEERVRPKERIDLLAHLQSTIKSLAPLAESGGTQLTLDAPAGAVEIPADPDQLQQVFTNLIENALKYGGDNVTVSLMALERDPALRCPAVRVQVIDDGPGIDPVHLPRLTERFYRADNHRSRELGGTGLGLAIVKHIINRHRGRLRVESDLGKGATFTVILPQ

SEQ ID NO: 26838 - protein, 509 aa, Sorghum bicolor
MQRSEQLRELYEALLSGECDRRAAPARPVGSLSPEDLGDTEWYYVICMTYAFRPGQGLPGRSFASNEHVWLCNAQLAASKAFPRALLAKSIICIPLMGGVLELGTTDTVLEDPDLVSRATAAFWEPQCPTYLEEQEPSPSSNTPSANETSEAAADADDIVVFEDLDHNAMEMETITAVVEGHGQELREAESLSNASLEHITKEIDEFYSLCEEMDVQPLEDGWIMDGSNFEVPSSPQPTPPGNLADGSRATSFMAWTRSSQSCSDEAVAAVPVIEEPQKLLKKVVAGGGAWANCGGGGVGTSTTGAAQESGVKNHVMSERKRREKLNEMFLILKSLVPSIHKVDKASILAETIAYLKELQRRVQELESSRELTSRPSETTRPITRQHGNKESVRKKLCAGSKRKSPEFGGDAEKEHDPWVLPKDGTSNVTVAVSDRDVLLEVQCRWEELLMTRVFDAIKGLHLDVLSVQASAPDGFMGLKIRAQVPRAGRDSLLMSTKALKRLMCEAVD

SEQ ID NO: 26839 - protein, 639 aa, Triticum aestivum
  misc_feature (285)..(285): Xaa can be any naturally occurring amino acid
  misc_feature (361)..(361): Xaa can be any naturally occurring amino acid
  misc_feature (373)..(373): Xaa can be any naturally occurring amino acid
  misc_feature (404)..(404): Xaa can be any naturally occurring amino acid
  unsure (1)..(639): unsure at all Xaa locations
ARSRDGLRHAIFSDTIEYSSYASNALGALPYGRPAGGRASDFDGRPGRSPATPSAPSPSPPATPSPPSDTPSPPSPEGRAPPSPGGGGRSPFTPGHRGPSPKSPPHSSGGGGGGSGVSTSVVVGVAVGGFVLLLLATFVCLCCLRKKRRRQPPPLHYGYPPPPPPQYKEDHYGATYQNWQNNAPPPPPDHVVKMHPSPPPAYANRPPQAPPPPPPPMINSSGGSVSNYSGGEILPPPSPGTALGFSNSKSTFTYDELVRATDGFSDANLLGQGGFGYVHKGVLPXGKEIAVKQLKLGSGQGEREFQAEVEIISRVHHKHLVSLVGYCISGGKRLLVYEFVTNNTLEFHLHGKGRPTLEWPXALRIALGAAKGXLAYIHEDCRPKIIHRDIKSSNILLDFKFEAXVADFGLAKFTSDYNTHVSTRVMGTFGYLAPEYASSGKLTEKSDVFSFGVMLLELITGRRPVDSTQTYMDDSLVDWARPLLMRALEDGNYDELVDARLGKDFNPNEIARMIACAAACVRHSARRRPRMSQVVRALEGDVSLEDLNEGVRPGHSRFFGSYSSSDYDSGQYNEDMKKFKKMAFTTNDYTSSQYSAPTSEYGQIPSASSSEGQQTQEIETGTMKKGGHSGYSSGYSGPS

SEQ ID NO: 26840 - protein, 162 aa, Francisella tularensis subsp. tularensis SCHU S4
MRNITNFLKTFLLWELLKGLKVTGKHFFTRKVTVQYPDEKTPISNRFRGLHALRRYENGEERCIACKLCEVVCPALAITINSTEREDGTRRTSSYEMDLFKCIFCGYCEESCPVDSIVETNILEYHFEERGENIMTKAKLLAIGDKYEAQIAADRLQDKDFR

SEQ ID NO: 26841 - protein, 585 aa, Sorghum bicolor
MALSASQVQEELQQAAERQLMRNQLAAAARSINWTYALFWSISSTRPGVLTWTDGFYNGEVKTRKISNSVELTADQLVMQRSEQLRELYEALLSGECDRRAARPVGSLSPEDLGDTEWYYVVCMTYAFQPGQGLPGRSFGGNEHVWLRNAHLADSKAFPRAVLAKSIICIPLMGGVLELGTTDTVPEDPDLISRATAAFWEPQCPTYSEEPTSNPSANEAGEAADIVVFEDQLGHSAMKTTTAAGNEPVSLFNASLDHITDEIDDFYSLLEEMVVRPLPLEDSLIMVDGSNNFEVPSSPEPPSPGATTNNNGADTSSSPADGSRATSFMAWTRSSQSCSDEAVAAVPVIEEPQKLLKKVVAGGEAWANCGGGGTAGTAQESGIKNHVMSERKRREKINEMFLILKSLVPSIHKAMKIHVDKASILTETIAYLKELQRRVQELESSRELTTPSETTTRTTRPRGISNESARKKLCAGSKRESPALEVDGDVVNKEHPWVLPKDGTSNVTVTVANTDVLLEVQCRWEELLMTRVFDAIKSLHLDVLSVQASTPDGFMGLKIRAQFAGSGAVVPWMISEALHKAIGKR

SEQ ID NO: 26842 - protein, 422 aa, Streptomyces griseus subsp. griseus
MNRRVVLTGIGVVAPGGTGTKAFWELITSGGTATRPISLFDASPFRSRIAAECDFDPAAHGLTHKETRRMDRAAQFAAVATDEAVADAGLEFHRTDPARVGVTVGSAVGCTTSLEREYTAVSDGGRDWLVDHTYAVPHLYDHLVPSSMAAEVAWRVRAEGPASVVSTGCTSGLDAVAHARGLILEGSADVMVAGATDAPISPITLACFDAIKATTPRNDDPEHASRPFDATRNGFVLGEGSAMFVLEEYEHAVRRGARPYAEITGFASRCNAFHMTGLRPDGREMAEAIGRALAEAGARPDDIDYVNAHGSGTKQNDRHETAAFKAALGEHAYAVPVSSIKSMVGHSLGAIGAIEIAACALAVRHGVVPPTANLHEPDPECDLDYVPLRARHRALDRVLTVGSGFGGFQSAMVLAAPEERAS

SEQ ID NO: 26843 - protein, 460 aa, Lactobacillus plantarum WCFS1
MKITNADGTIRALSNRHVQMIAIGGTIGTGLFLGSGSTISKTGPSVMWVYLVLGFFFFLMMRAIGEMFYSDPTQHTFVAFISRYLGPSVGYFTGWTYWIGLIFVCMAELTATATYVKFWLPNVPAWLIEISFLLILAGVNLTAARLFGEAEFWFAMIKIVAIIALIITGIFMMVGHHPTPLGQASIGNLFHNYQVFPNGIANFISAFPMVFFAFQGIEFVSITIGEAKNPHRVIKKAVNETLLRILLFYIGALIVIMGIIPWTSLSPDSSPFVQVFKLAGYPAAAAIINFVVLTSAASSLNSCLFSAGRHFYQLATEMPVTSRMHQIFGQISKSGVPAAAIVLSAILVLVTPIMSLSAATTAVFTVVTGISSDMYLIVYTLAMLAHRKYRLSNDYLADGFKMPAYRITSPLTIAFFVLIFASLFFIQADIVGAIGAIIWTLLFGGITFAHQARLRAVTRS

SEQ ID NO: 26844 - protein, 229 aa, Rhodospirillum rubrum
MYDLYYWPTPNGFKISILLEELGQPYTLKPVNIAKGEQFAPEFLAISPNNRMPALVDHAPSDGGAAIALFESGAILEYLATKHGAFLPSDIRGRTETMVWLFWQVGGLGPMAGQAHHFRQYAPEPVPYAIERYTNEVNRLYGVMNKRLADRDYLAGAYSIADMASWPWVVSHANQGQSLDDFPNLKRWFDAIGARPAVQRGMALGADLREANANTTPEARAVLFGQKAR

SEQ ID NO: 26845 - protein, 231 aa, Streptococcus pyogenes M1 GAS
MVKLVFARHGESEWNKANLFTGWADVDLSEKGTQQAIDAGKLIKEAGIEFDLAFTSVLTRAIKTTNLALENAGQLWVPTEKSWRLNERHYGALTGKNKAEAAEQFCDEQVHIWRRSYDVLPPAMAKDDEYSAHKDRRYADLDPALIPDAENLKVTLERAMPYWEEKIAPALLDGKNVFVGAHGNSIRALVKHIKGLSDDEIMDVEIPNFPPLVFELDEKLNIVKEYYLGGE

SEQ ID NO: 26846 - protein, 338 aa, Glycine max
MEGYEILKDIGSGNFAVAKLVRDNCTNELFAVKFIERGQKIDEHVQREIMNHRSLKHPNIIRFKEVLLTPTHLAIVMEYASGGELFERICNAGRFSEDEARFFFQQLVSGVSYCHSMQICHRDLKLENTLLDGSTAPRVKICDFGYSKSSVLHSQPKSTVGTPAYIAPEVLTRKEYDGKVADVWSCGVTLYVMLVGAYPFEDPEDPRNFKKTIGKILSVQYSVPDYVRVSMECRHLLSQIFVASPEKRIKIPEIKNHPWFLRNLPIEQMEGGSWQMNDVNNPSQSVEEVLSIIQEARKSLNVPKVGGLLIGGSMDLDDLDADEDLEDLQTSGEFVCPI

SEQ ID NO: 26847 - protein, 355 aa, Streptomyces griseus subsp. griseus
MKALVLAGGMGTRLRPLTHSMPKQLVPLANKPVLCHALEDIARAGVTDVGIIVGDWHKEIEEAVGDGGRFGLRITYLPQEAPFGLAHCVLVAREFLADDDFLMYLGDNVFADGVHALADAFRRDRPAAQVAVTAVDSPQEYGVAVTTSDGRVLGLQEKPREPRSDLAVTGAYFFTPEIHDAIARIRPSTRGEWEITDAIQALIDRGSEVRAVRLSDWWKDTGRVEDILDCNQLLLDHVTTSVRGSVDAASTVLGPVVVEPGARIIRSHLRGPLIVGAGCVVEDSYVGPYSAVGANCALTDAGISHSIMLQDATVTDVNGIHRSVIGRSARVGAPVNGTGRHRLVVGDHTELEVVA

SEQ ID NO: 26848 - protein, 480 aa, Frankia sp. CcI3
MRPQLCETHDDRPGPAPPRPPPSTGVGESGEVTPRSTIAVPPPALTPRPQTPVADVGDLVARDRRVVWHPYASVSGSTPLFPVASAAGTRLTLTDGRELIDGMSSWWAAIHGYRHPVLDEAVRGQLETMSHVMFGGLTHEPAVALAETLVAITPDPLRRVFPCDSGSVAVEVAIKMALQYWTGRGRPGRTRLLTIRRGYHGDTSGAMAVCDPDAGMHHLFSHLLPRHLFASAPACAFDEPCEDAHVAEIEGLLAGHADEIAAVICEPVVQGTGAMRWYAPGWLARLRELCDHYGVLLIADEIAVGFGRSGELFGCDHAGISPDIMCVGKAMTGGYLSMAATLCTDEVAAGVCDSPAGVFMHGPTFMGNPLASAVANASIDLLLSSPWQARVREISAGLAAGLAPAADLPGVADVRVLGAIGVIETREPVDMTVIQPLLVDLGVWVRPFGRLVYTMPPFIISPADVATLAAAMVEAVARTI

SEQ ID NO: 26849 - protein, 146 aa, Zea mays
MAAATTPEEDAASAAAVDAITETTNRFTVNTDAAGADAGPLKLDDVDGNVYSCKRCGTLLAVADDIVSKSFHCKNGKAYLFDNVVNVTVGEKEDRMTITGMYSVSDIFCVGCGEIVGWKYEAAHERSQKYKEGKFVLERYQLLGAE

SEQ ID NO: 26850 - protein, 507 aa, Xanthomonas campestris pv. vesicatoria str. 85-10
MRPGHLMVLALLAPTLIAPPVFAQSVLTRDNGAKVGDNQNSQTAGATGPTLLQDVQLIQKLQRFDRERIPERVVHARGTGVKGEFTATADLSSLTKAKVFSAGEKTPVFVRFSSVVHGNHSPETLRDPHGFATKFYTSEGNWDLVGNNFPTFFIRDAIKFPDMVHAFKPDPRTNLDDDSRRFDFFSHVPEATRTLTLLYSNEGTPAGYRFMDGNGVHAYKLVNAQGEVHYVKFHWKTLQGIKNLDPKQVAAVQAKDYSHLTNDLVAAIKKGDYPKWDLYVQVLKPEDLAKFDFDPLDATKIWPDVPEQKVGQMVLNKNVDNFFQETEQVAMAPANLVPGIEPSEDRLLQGRIFSYADTQLYRIGANGLSLPVNRPRVAVNNGNQDGQGNIGQTTSGVNYEPSRLEPRPQDTAARYSELPLSGTTQQAKITREQNFKQAGELYRSYSKKDRADLVQSFGESLATTDPESKHLMLSFLYKADPEYGTGVTRVAKGDLARVKQLASSLQD

SEQ ID NO: 26851 - protein, 476 aa, Photorhabdus luminescens subsp. laumondii TTO1
MMSTEIKAQVVVLGAGPAGYSAAFRCADLGLETVLVERYSTLGGVCLNVGCIPSKALLHVAKVIEEAKALADHGIVFGEPKTDIEKVRVWKEKVINQLTGGLAGMAKGRKVKVVNGFGKFTGANTLVVEGEGGATTINFDNAIIAAGSRPIQLPFIPHDDPRVWDSTDALALTTVPGRLLVMGGGIIGLEMGTVYHALGSQIDVVEMLDQVIPAADKDVVKVFTKRISKQFNLMLETKVTVVEAKEDGIYVTMEGKNAPAEPQRYDAVLVAIGRVPNGKMLDAGKAGVDVDDRGFIHVDKQMRTNVPHIFAIGDIVGQPMLAHKGVHEGHVAAEVISGKKHYFDPKVIPSIAYTEPEVAWVGLTEKEAKEKGISYETATFPWAASGRAIASDCADGMTKLIFDKESNRIIGGAIVGTNGGELLGEIGLAIEMGCDAEDIALTIHAHPTLHESVGLAAEVFEGSITDLPNAKAKKKK

SEQ ID NO: 26852 - protein, 409 aa, Oryza sativa
MGPGSDSRDLMGRPPCCEKEGVKKGPWTPEEDMVLASYVQEHGPGNWRAVPPRTGLLRCSKSCRLRWTNYLRPGIRRGGFSHHEERLILHLQALLGNRWAAIASYLPHRTDNDVKNFWNTHLKKKLALTSSSSSPPTPTTPLVARGQWERKLQTDIDLARRALRDALSVDDAASPAMISSGPPAPAAAAAYALSERNISVMLSGWAAPPPARKGLSACNPAAATTTPGGAAAESASTAGTSLELTADCCSGGGDSSASNCLPSSMLLACDDGDATATAAGVAPLSAIESWLLLDDSGEPQLALDEQLLDKQVKEIDWADTFQPLVPKPHGTIYANIEQGLAATRSRRAARRCADSRRAARHEAPRSAAAPQRRPPPRGRRPGLCPSACRREAAGRRPPDGMMEGEGEEL

SEQ ID NO: 26853 - protein, 510 aa, Frankia sp. CcI3
MSDFNPLDLSLDLPLVLLSNRGPVRFDRDATGRTVTRGAGGLVSALSGLAEHLDDAVWVCGAASEEDVAVAGESAGSSILVQTYPSPRLVEGDPDGPAIRVRLVVTDPTAYADFYSVWSNPVLWFIQHGLYGRSLSPVFTRAEHDAFENGYAAVNRAYADAVVDEVRARGGKALVLLQDYHFYLVADWVREQCPDAVLTHFIHIPWPGPDEWRILPADIRERLLRGLLGSDVVGFHTRRYARNFVLCAQELLGLPIDLEQLTVTVADRVVRARYHPISVDPAALDATQASEEVAAHVAMLRYIFLDDDRQLILRVDRTDPSKNVVRGFLAFGTLLDQHPELVGKVSFLALLQPSRTDVPEYADYIALIGAVVAEINARHTKEGRQPIDLRMVEDFPLAVAAYSICDVLIVNAIADGMNLVAKEVAVVNRRGGVLALSEMAGAHEELGEFAVTLHPFDVQQMADALYTALTMPMEERHRRLAAAARQVRTHDVRRWLDDQLVDLRRVAGFG

SEQ ID NO: 26854 - protein, 313 aa, Triticum aestivum
WIPRAAGIRPPAAVADALAPLTDVTHVFYVAWDPRPTHAEGREANGAMLRNVLSALVPNCPGLLHVCLQTGRKHYVDPFEPLTDVPLALRPYSEDLPRLDYPDLEDVLLDGLASNNRVTWSVHRPTTIFGFSPRSARNVVASLCVYAAICGKEGLVLRWPGSRVAWEGFSDASDAELVAEHALWAAMEPNGRNEPFNCSNGDLFKWQQLWPILASQFGVKWTGYQGEDQRFMLEEAMAGKEGVWSEIVNENGLVETELNDITNWFCVDAMVNVERENLDTMNKSKEYGFFGFRNTVRSFNTWINKMKVDKIVP

SEQ ID NO: 26855 - protein, 468 aa, Pseudomonas fluorescens PfO-1
MGLNNQWMQRDLAVLWHPCTQMKDHEQLPLIPIKRGEGVWLEDFEGKRYLDAVSSWWVNVFGHANPRINQRIKDQVDQLEHVILAGFSHQPVIELSERLVKMTPEGLNRVFYADNGSSCIEVALKMSFHYWLNRGQPNKKRFVTLTNSYHGETMAAMAVGDVPLFTETYKALLMDTIKVPSPDCYLRPQGMSWEEHSRNMFAAMEQTLAENHDSVAAVIVEPLIQGAGGMRMYHPVYLKLLREACDRYGVHLIHDEIAVGFGRTGTMFACEQAGIRPDFLCLSKALTGGYLPLAACLTTDEVYSAFYDDYPTLRAFLHSHSYTGNPLACAAALATLDIFEQDNVIENNRALAQRMASATAHLVDHANVSEVRQTGMVLAIEMVKDKATKEAYPWQERRGLKVFQHALERGALLRPLGSVVYFLPPYVITPEQIDFLAEVASEGIDIATRDSVSVAVPKDFHPGFRDPG

SEQ ID NO: 26856 - protein, 591 aa, Bacillus cereus E33L
MLWRSVVGKLWMTILLLVSFVLGFVAILLSQFFRTYYVDMSEARLQKVATSVSELIEEGADVKTIENIAYKFSDPLSRIIIVEDGKEISSSPKQEGLVTLTMDDLKEDKELAAVFTDKKEIKNNIRKASNSRKNKNTENDIMIVGKPVQSKNQSAVFVYESLQVPIQGMERTTDFIFLSAGIAIILTTFFAFFLSTRITAPLRKMREVAFEVSRGKFDAKAPMVSQDEIGELATALNQMGKQLKFNMNALQQEKEQLASILSSMADGVITLNQEGEVVVINPPAEHFLQVWQEEKEIELSKKLPSELVELFHLVVESEQQQVVEINLQKGNYVVLMTPLYNQTKIRGAVAVLRDMTEERRLEKMRQDFIANVSHELRTPMVMLQGYSEAILDDIVQTKEEINEFVQIIYDESVRLGKLVNELLDLARMESGNVELHIGEVDIHPFVEKIGRKFQGIAKDKEVALTVDFKDSIEQYPFDADRMEQVLTNLIDNAIRHTNAGGHVTLVIDTKNNGLIFEVQDSGAGIPEEDIPFLFDRFYKADKARTRGKKGGTGLGLAIAKNIVQGHDGKIAVSSVVGEGTTFSVYLPNRII

SEQ ID NO: 26857 - protein, 329 aa, Mycobacterium avium subsp. paratuberculosis K-10
MSASPLKVAVTGAAGQIGYSLLFRLASGSLLGPDRPIELRLLEIEPALKALEGVVMELDDCAFPLLSGVEIGADPNKIFDGANLALLVGARPRGPGMERSDLLEANGAIFTAQGKALNEVAADDIRVGVTGNPANTNALIAMSNAPDIPRERFSALTRLDHNRAISQLAKKTGAKVTDIKKMTIWGNHSATQYPDIFHAEVKGKNAAEVVGDQNWIENDFIPTVAKRGAAIIDARGASSAASAASATTDAARDWLLGTPAGDWVSMAVISDGSYGVPEGLISSFPVTTKDGDWTIVQGLEIDEFSRSRIDKTTAELADERNAVTQLGLI

SEQ ID NO: 26858 - protein, 778 aa, Vibrio vulnificus CMCP6
MTTTTHILGYPRIGEKRELKFAQEKYWRGEIDQAELKKVGAELRHKNWQTQASAGLSFAVAGDFAWYDHVLTTTLLLGHVPKRHRHGFPDLDTLFRVGRGQSQSSCACHGAAASDMTKWFNTNYHYIVPEFSKEDTFEVSWPQLFEEVNEAVQAGHNVKPVLLGPLSYLYLGKEIEDGFDRLTLLPRLLTAYQAILAKLAKQGVEWVQIDEPILALELEKPWLDAFKLAYQVIRSDVKVLLTTYFDSVVDSLDRIVELSVDGLHVDLSAAPEQLDAVLAKLPQNWVLSLGVVNGRNVWRSDVKAQLERLQPVKAALGERLWVASSCSLLHSPVDLELEAGLSAEVRSWFAFAKQKVSEVVLLGKALDGDAAAIAQCEAYSQPIQARKSAAHVHKATVQSRVNAITAELAQRSVPYAERARHQAEVLQLPLLPTTTIGSFPQTSEIRVQRSAYRSGQLSSAEYEQALKGHIADAVKRQEALDLDVLVHGEAERNDMVEYFAENLAGFQTTQFGWVQSYGSRCVKPAIVVADIEREQPITVGWSTYAQSLTSKQMKGMLTGPVTILCWTFPREDISRKAIAQQLALALRDEVSDLQDAGINIIQIDEPAIREGLPLKKRDHQNYLDWAVEAFRISAASARPETQIHTHMCYSEFNEIIESVAALDADVITIETSRSNMELLKAFEEFNYPNEIGPGVYDIHSPNIPSEEWIVDLVKKAAQKIPVERLWVNPDCGLKTRNWPETEAALANLVSAAKRLRKEFAKETTAVNSEAVADVETEA

SEQ ID NO: 26859 - protein, 609 aa, Geobacillus kaustophilus HTA426
MKKVGPFRSIHFKFVIIYVLLILVAMQIIGVYFVRKLETELVQNFKNSLNERVTLLAYNVEQAMNRERDEKSPTLEEDIRSLLHDFVSQDISEVRVIDEKGKVLATSNPYMQNIVGKRTTEIYVKRSLVTGEIVDRMLLDSKTGHRMYISSTPIKTSGEIKGVIYVIASMENVFSQMRQINMILATGTGIALAITAVLGIFLSRTITRPISDMRRQALAMTRGDFSRKVKVYGYDEIGQLAMTFNNLTKKLQEAQATTEGERRKLESVLTHMTDGVIATDRRGRVILINDAALNILNVSRETVLSSSIVDVLGIADQYTFETLLEERDSLILDFSTDEELYILRASLSVIQKEGGFVNGLIVVLHDITEQEKIDRERRQFVANVSHELRTPLTTMKSYLEALADGAWQDKDIAPRFIQVVQNETERMIRLVNDLLHLSKLDSKDYKLKKTWINFSAYFHKVIDRFELTKSDNIRFVRKIPREAIFIEVDEDKITQVLDNIISNALKYSPQGGTITFRVRKLADEIIVSVSDEGVGIPKADLAKIFERFYRVDKARSRKLGGTGLGLAIAKEVVLAHGGTIWAESKEHKGTTIYFTLPLEREQKDDWCDV

SEQ ID NO: 26860 - protein, 596 aa, Sorghum bicolor
MAEGEERPSGGGDDENGEERPSGGGDDENGKYPIGFRFEPTTEELVEFYLLPRLLGEPTVPNEFVIEADAYGCDPEILTEKYKESGVDDTWYFLSPRYRKYRGGDRPVRRTADDRGRWKPSTGQSKPPEDEDDDDASTSRHSKAKKKQAAFSENTLAYYVGSTKDETKTKWLMHELVVPVTPDNGFHSKSKSAAAEPRNDMLVSSRRARRSNSAVFECLRWWIYKSPLRKWKEIDEAAAAAEVPTSSHSSWPAPECVIGEAAARATSSRQQPPAKRPAVGRPAAASGHTGAPNKGVSVSQSTLFPGGCSAPPTRGNGRGSSVRMPPIVVGAGAAGHHGPGLPALMHLLRPPVQVQQTPLVYGYGNRAAGMPNVNGQAAPRWQGPPPHRAAATTPNSLGPEMMTRPPNLAAGQPAWLPSPRRQQQQQQQQQQQQQQPPPETEEAYRNRVYARLIAEMKLQKKAEQDSAARAGQQQISQTASASAKPACFHDEGGDRPAGVEAMVRPAQFPAPHGGYPYGSSSSSNNLAQRPQRQQSTSSAALAPALAAVEKAPAAENVPSNQPVPPAPGANEGSCKGDAPTATIADNIILQILTTDC

SEQ ID NO: 26861 - protein, 289 aa, Oryza sativa (japonica cultivar-group)
MAPPCGDAAAAASAAPGLANLLIREGAGLPSRPEREGDDIPPQKKSVSLRSGGGGNAAEREEGGANRNGKKEKTGAQRITGWGLLSKKVEAKGRTTYNEIMVQTSNDEVYTSSGELIVADEIFAELKSITQNGLEFDEKNIRRRVYDAFNVLIAIRVIAKDKKEIKWMGLTNYRYEKIQKLEEVHKELITRIKNKKKLLQEIEKQFDDLQNITLRNQASQRPAESVNGILLPFLLIKTSRKARVEIEISEDSKFARFDFNGAPFTMHDDVSILEAIRRNKGRAGLSIHP

SEQ ID NO: 26862 - protein, 452 aa, Cryptococcus neoformans var. neoformans JEC21
MGREIINVSVGQAGNQIGTAFWENILQEHGLDRSGKATTDDPHILDKVDVYFTEASNKKYVPRSIQVDLEPGVVDLVRSGPLANLFRPDTFVHGESGAGNNWAKGYYTEGAELVDPVLDVLRQQAENSDSLQGFQLLHSLGGGTGSGLGALLLGKIREEYPDRMLATFSIFPSPKVSETVVEPYNAVLSTHNLVENSDITCCIDNEALYNICVSDLKIQSPEYKDLNSLIAKVMTGFTTTLRFPGVLNSDLRKLAVNMVPFPRLHFFTAGYAPLVANASKSYTASNVHELTAAIFQKRSLLAAIDPLFGKYLTVSVAYRGKLSMRDIENAVWDFHNKNSEHFVPWIPNSSLTTLCTVPPLGQTAAATLVANTTAISEVFKRSHTQFRSLFRRRAFTHWYTGEGMDEQEFTEAEANLSDLCIEYDQYASADLEEEEYELEGEEHVEEGENYEE

SEQ ID NO: 26863 - protein, 134 aa, Glycine max
KKTSHARVRKLGIRLEKDNTAKLFDSTSLEHQKTFRTERPVNSAALSPNYDHVVLGGGQEAMDVTTTSTRIGKFEARFFHLAFEEEFGRVKGHFGPINSVAFHPDGKSYSSGGEDGYVRIHYFDPQYFEFEFEA

SEQ ID NO: 26864 - protein, 229 aa, Zea mays
  misc_feature (79)..(79): Xaa can be any naturally occurring amino acid
  misc_feature (88)..(88): Xaa can be any naturally occurring amino acid
  misc_feature (120)..(120): Xaa can be any naturally occurring amino acid
  misc_feature (127)..(127): Xaa can be any naturally occurring amino acid
  misc_feature (176)..(176): Xaa can be any naturally occurring amino acid
  misc_feature (190)..(190): Xaa can be any naturally occurring amino acid
  misc_feature (216)..(216): Xaa can be any naturally occurring amino acid
  unsure (1)..(229): unsure at all Xaa locations
IGTLEAGRDPLASSQHGPLYASTSLDSFLVHRLATASSPAQGRTTWREILARQEAQELHARQTGESCQQRQPIDHHLRXTYMNAAIPXRVYQDTSKTNIWHNISYYMWNAGVETSINTLXMTEMRQXDLRITLKNFCQRSGTINYPSERAPLSARFAGQCTLSEDTHAGPHQGLGXTLCEDIWPAHAITXEAEDHLPLRRRTTTYDIDLTSCLYCXGLCQHACPVSSYC

SEQ ID NO: 26865 - protein, 168 aa, Sorghum bicolor
MAAASSATSVHDFTVKDASGKDVDLSTYKGKVLLIVNVASQCGLTNSNYTELAQLYEKYKDQGFEILAFPCNQFGGQEPGTNEEIVQFACTRFKAEYPIFDKVDVNGNNAAPIYKFLKSSKGGLFGDSIKWNFSKFLVDKEGRVVDRYAPTTSPLSIEKDIKKLLGSS

SEQ ID NO: 26866 - protein, 147 aa, Lactobacillus plantarum WCFS1
MANDMMNWHNDLFDRLNDWTKMDDLVNGFGRTFLNAGSHGSVLKTDIKENDDQYTMKVDIPGIDKQNIALKYRDGTLSIAVKRDSISDESDKDGNIIASERQTGRFGRQYSLPDVDVDKIEARYENGVLQLTLPKKAAADTHHIEIQ

SEQ ID NO: 26867 - protein, 406 aa, Sinorhizobium meliloti
MRRVVVTGLGIVSSIGSDADEVTASLRDARSGITFSPDFAEHGFKCQVWGAPTLDPSDLVDRRAMRFLSQGGAWNHVAMKQAIADSGLEAGDITNERTGIIMGSGGPSTRAIVEAAEITRKNNSPKRIGPFVVPKAMSSTASATLATWFQIHGVNYSISSACSTSAHCIGNAAEMIQWGKQDVMFAGGHEDLDWTMSNLFDAMGAMSSKYNDTPSVASRAYDANRDGFVIAGGAGVLVLEELEHAKARGAKIYAEIVGYGATSDGYDMVAPSGEGAVRCMRQALATVKGEVDYINTHGTSTPVGDQKEIGAIREVFGEKMPHVQSTKSLTGHSLGAAGVQESIYGLLMMQAGFIGESAHITELDPEFEGVPIVRKRIDNAKIDTVLSNSFGFGGTNATLVFQRYNG

SEQ ID NO: 26868 - protein, 356 aa, Haematonectria haematococca
MATSAPVTSRTETLAKYLKLDQKGQIMAEYVWVDAAGETRSKSRTLPEKDYKAEDLPVWNFDGSSTNQAPGDNSDVYLRPCAVYPDPFRGSPNIIVLAECWNAGGTPNKFNFRHDCVKVMDTYAEDEPWFGLEQEYTLLGPDNRPYGWPTGGFPAPQGEYYCGVGTGKVVQRDIVEAHYKACLYAGIQISGTNAEVMPAQWEYQVGPCLGIEMGDQLWVSRFFLARITEEFGAKVSLHPKPIAGDWNGAGLHSNFSTKAMREEGGMKVIEEALKKLEPHHAECIAEYGEDNELRLTGRHETGSIDSFSWGVANRGTSIRAPRETAAKGYGYFEDRRPASNADPYRVTKALLQFSLA

SEQ ID NO: 26869 - protein, 275 aa, Salmonella typhimurium LT2
MANPTIIRLQDGNVMPQLGLGVWKASNEEVIAAIHKALEVGYRSIDTATAYQNEEGVGKALKAASVAREELFITTKLWNDDQKRPREALQESLKKLQLDYLDLYLMHWPVPAIDHYVDAWKGMIALQKEGLVKSIGVCNFQIHHLQRLIDETGVTPVINQIELHPLMQQRQLHAWNATHKIQTESWSPLAQGGEGVFDQKVIRELADKYGKTPAQIVIRWHLDCGLVVIPKSVTPSRIAENFAVWDFRLDKDELGEIAKLDQGKRLGPDPDQFGG

SEQ ID NO: 26870 - protein, 419 aa, Novosphingobium aromaticivorans DSM 12444
MRDTYSQPLARDAMAYVLAGGRGSRLKELTDNRAKPAVYFGGKSRIIDFALSNAINSGIRRIGVATQYKAHSLIRHMQRAWNFMRPERNESFDILPASQRVSEHQWYEGTADAVYQNLDIIASYAPKYMVILAGDHIYKMDYELMLRQHVESGADVTIGCLVVPRIEATGFGVMAVDTSDTITAFVEKPANPPGIPGNEDMALASMGIYVFDTKFLFDILREDAADPSSSRDFGNDIIPKIVRNGKAVAHRFTASCIRAAEEIEEYWRDVGTLDAYFEANLDLTDVVPKLNMYDRDWPIWTDQIIAAPAKFVHDEDGRRGMAISSLISQDCIVSGAIARRSLLFTGVKMGSFSSCEEAVILPYCNIGRGARLSRVILDSGVRIPEGLVVGEDPELDARRFQRTESGVCLITKRMIDQLA

SEQ ID NO: 26871 - protein, 485 aa, Novosphingobium aromaticivorans DSM 12444
MTIKVLSVASEAVPLVKTGGLADVAGALPSAVAPHGVGMTTILPGYPAVMKALARPRALHTWNSLLGEKARLVSGKIDGHPLLVLDAPAFFQRDGTPYVDSSGRDWADNWRRFAAFGRAAADVAGGAVKGRAFDLVHAHDWQAAMALAYLRFAPPPGGRRVPSVMTIHNMAFQGHYGADLFPALGLPPQAWAMDGVEYHGGVGYLKAGLEAASAITTVSPTYAREIRTPEFGMGLEGLVVSRGNRVSGIVNGIDTAQWNPETDPALAARFGVKSLARRVTNKRALEAEFALEADDGPLFVVITRLTWQKGIDVLLECIDHLVGIGGRLALLGSGDKAMENAFHAAATRHPGKVGVRIGYDEALSHRMQAGGDAILVPSRFEPCGLTQLYGLAYGCVPVVARTGGLADTVIDANLAAVMAGVATGVQFEGVNYPSVSDAISRAVTLYRQPDVWRAMQRAGMKTDFSWSRSGKAYADLYAALIAEDQ

SEQ ID NO: 26872 - protein, 111 aa, Taraxacum officinale
KKRGHAHGNRSWIKIEENGNSKVVELDKASVMRQCCLPARDLRLLDPLFIYPSTILGREKAIVVSLEQIRCIITADEVFLMNSLDASVVQYKSELCKRLQEEKCHSDDLPF

SEQ ID NO: 26873 - protein, 286 aa, Lactobacillus gasseri
MDKIKMKSISKELISEVIKKRKSATHKGNYGRVLLIGGSKKYGGALIMSAEGALNSGAGLTTVATDSVNISALHTRDPEIMALDWKKRDELKNLIVSSDVVVCGMGLGLDDQARDILALIRDSITLKQTLILDASALDLISQQKDILPVNSKLVIFTPHQMEWQRLSKIKIADQTDQLNQAFLNELVPRKNAILVLKSNHTKVYDQAGNIYQNPFGNPGMAIDGMGDTLAGIIGGFCGQFTPNLATVAGAVGLHSITADEIAVKQYIVRPTQLSALIPAMMRKYEK

SEQ ID NO: 26874 - protein, 459 aa, Rickettsia akari str. Hartford
MQEFDLVVIGSGPAGYTGSIRAAQLGMKVVCVEKNDTLGGTCLNIGCIPSKALLNSSEKYEEALKHFESIGITADVKLDLQKMIANKDKVVSDLTKGIESLFAKNKITRIKGEAKIIASNIVEVNNEQIKAKNILITTGSSVIEIPNIKIDEEFIVSSTGALKLSKVPETLIVVGGGYIGLELGSVWRRLGAKVTVIEYAPSIVPMLDKEIATQFMKLQQKQGIEFKLNTRVLSAEVKSGKVNLTIEEGGKSAVVTSDVILMAVGRKAYTQNLGLESVGIITDKQGRIEINDRFQTAISNIYAVGDVVKGAMLAHKAEEEAVAAVEIMAGQAGHVNYNLIPSVIYTYPEVASVGETEEQLKAKGINYKVGKFPFLANSRARAIGSTEGLVKILADSKTDRVLGAHIIGANAGTLIAELTAYMEFGAASEDIARTCHAHPTLSEAIKEAALSVDKRSINM

SEQ ID NO: 26875 - protein, 320 aa, Escherichia coli
MNIWTLGDAVVDLLPLTDMQFRACAGGAPFNVAIGTAQLKCRTGFIGRVGDDDFGHFLRKTLEDSGVSTQCIQMDKYHRTSTVLVSLKDQGERGFTFLTNPSADQFLTQDALPAFSDDILHFCSLALVAADCRTTLTKAVQEVIDHGGLISFDVNLRDQMWRDKEEMFATVSQFAEKADILKLSEEEWYWLMGTHDYTEALEALKTHPARLKVVTFGARGSLVLWQDMVIHFRGFNVKSIDTTGAGDAFMAGLLASIANKGLPMNFPELQLAITQASATGALATTKKGALTALPDTAALETFINHFPLPGYEILGATATV

SEQ ID NO: 26876 - protein, 338 aa, Chromobacterium violaceum ATCC 12472
MKVYYDKDADLSIIKGKKVAIIGYGSQGHAHAQNLKESGVDVIVGLRKDGASWKKAEAAGHKVKEVAEAVKKADVVMILLPDESQPEVYHKDIAPNLKKGAALAFAHGFNIHYNQIVPPADVDVIMVAPKGPGHTVRSEYLKGGGVPTLIAVYQDKTGKARDVALSYAAANGGTKGGVIETNFREETETDLFGEQAVLCGGAVELVKAGFETLVEAGYAPEMAYFECLHELKLIVDLMYEGGIANMNYSISNNAEYGEYVTGPEVVTAATKEAMKKALYRIQSGEYAKMFILEGKTNYPSMTARRRLTAAHPIEKVGAELRAMMPWIAKNKLVDQSKN

SEQ ID NO: 26877 - protein, 276 aa, Synechococcus elongatus PCC 6301
MKSYLAAAVQMTSLPDLEKNLTQAEEWIDLAVRRGAELVGLPENFSFLGEEAQKVQQAPEIAERTEKFLKTMAQRYQITLLGGGFPVPAEHNHVTNTLLLVGPDGQTLAQYNKVHLFDVDLPDGNTYQESATVLAGREYPPVYDSERFGRLGFSICYDVRFPELYRHLANQSAEVIFVPAAFTAFTGKDHWQVLLQARAIENTAYIIAPAQTGVHYGRRQTHGHAMIVDPWGIVLANAGREPGLAIAEISPRRLATVRQQMPCLQHRVLSTTVPSA

SEQ ID NO: 26878 - protein, 596 aa, Arabidopsis thaliana
MSPPSATAGDINHREVDPTIWRACAGASVQIPVLHSRVYYFPQGHVEHCCPLLSTLPSSTSPVPCIITSIQLLADPVTDEVFAHLILQPMTQQQFTPTNYSRFGRFDGDVDDNNKVTTFAKILTPSDANNGGGFSVPRFCADSVFPLLNFQIDPPVQKLYVTDIHGAVWDFRHIYRGTPRRHLLTTGWSKFVNSKKLIAGDSVVFMRKSADEMFIGVRRTPISSSDGGSSYYGGDEYNGYYSQSSVAKEDDGSPKKTFRRSGNGKLTAEAVTDAINRASQGLPFEVVFYPAAGWSEFVVRAEDVESSMSMYWTPGTRVKMAMETEDSSRITWFQGIVSSTYQETGPWRGSPWKQLQITWDEPEILQNVKRVNPWQVEIAAHATQLHTPFPPAKRLKYPQPGGGFLSGDDGEILYPQSGLSSAAAPDPSPSMFSYSTFPAGMQGARQYDFGSFNPTGFIGGNPPQLFTNNFLSPLPDLGKVSTEMMNFGSPPSDNLSPNSNTTNLSSGNDLVGNRGPLSKKVNSIQLFGKIITVEEHSESGPAESGLCEEDGSKESSDNETQLSLSHAPPSVPKHSNSNAGSSSQGIFRSLSSTIIN

SEQ ID NO: 26879 - protein, 591 aa, Bacillus cereus ATCC 14579
MLWRSVVGKLWMTILLLVSFVLGFVAILLSQFFRTYYVDMSEARLQKVATSVSELIEEGADVKTIENIAYKFSDPLSRIIIVEDGKEISSSPKQEGLVTLTMDDLKEDKELAAVFTDKKEIKNNIRKASNSRKNKNTENDIMIVGKPVQSKNQSAVFVYESLQVPIQGMERTTDFIFLSAGIAIILTTFFAFFLSTRITAPLRKMREVAFEVSRGKFDAKAPMVSQDEIGELATALNQMGKQLKFNMNALQQEKEQLASILSSMADGVITLNQEGEVVVINPPAEHFLQVWQEEKEIELSKKLPSELVELFHLVVESEQQQVVEINLQKGNYVVLMTPLYNQTKIRGAVAVLRDMTEERRLEKMRQDFIANVSHELRTPMVMLQGYSEAILDDIVQTKEEIDEFVQIIYDESVRLGKLVNELLDLARMESGHVELHIGEVDIHPFVEKIGRKFQGIAKDKEVALTVDFKGPIEQYPFDADRMEQVLTNLIDNAIRHTNAGGHVTLVIDTKNNGLIFEVQDSGAGIPEEDIPFLFDRFYKADKARTRGKKGGTGLGLAIAKNIVQGHDGKISVSSVVGEGTTFSVYLPNRII

SEQ ID NO: 26880 - protein, 358 aa, Campylobacter jejuni subsp. jejuni NCTC 11168
MQYKILENNRIASKGYAMLSKDAKFTPFEFSRHAIGDNDILIKILYAGICHSDIHTARSEWGEATYPCVPGHEIAGEVIAVGKNVSKFKVGDYAGVGCMVNSCGECDACKRSQEQFCENGKTIFTYNSCDVFHGNENTYGGYSNNIVVSEKFAVCVPKDAPMEKVAPLLCAGITTYSPLKFSNIKEGSSVAVAGFGGLGMMAVKYAVKMGAKVSVFARNENKKADALAMGVSSFYTSCDKNAVKERFDLIISTIPTPYNPAIYLDLLKFGGEMAIVGLPPHEVAPSISVITFVHKAGKKVYGSLIGGIAETQEMLDFSLKHGIYPETELITPQEIDKAYENLTSGKAKFRYVIDMTKE

SEQ ID NO: 26881 - protein, 612 aa, Vibrio vulnificus CMCP6
MTLPFLFHAQTPDYFRVENQIAHVTLRTQPEGIQAVYLRHEPDNEEYLVEMQRVSKLGELDGWQASFPLNKDREITQYVFKVITEGATVWLDARGVQKRMPGSEYHFKYNQSHQPPEWVSEQIFYQIFPDRFCNGNPEISVKSGEYSVKNGTRPVVAKEWGAAVDKHNGYGGCEFYGGDLAGIRSKLDYLQTLGVTALYLNPIFSAPSNHKYDTTDYLTIDPHLGSNQEFAELSEALHQRGMKIVLDAVFNHTSCEHPWFDKNGVGEIGAYHHIESPYRHYYFFEDGSQNYIGWKGVDSLPVLNFENAEVRNYIYASEHAAIRHWLKAPYRIDGWRFDVIHMLGEGEGARNNAYYVKQFRNATKQENPQAYVLGEHFFEASKWLQGDQEDGSMNYYGFAHPVRALLAQKDIAYHPIEIDCIDFVDWLNESRAKVPWLNQLSQFNQLDSHDTARFITLLENDQARMNIALGLLFTYVGTPCIYYGSEVGLEGENDPDNRRCFPWERVGHVETFQYHQRLIELRKTSKALQQGSIQFLHVEPTSFSFARQYGEDTLLVMVNLDSKACSMTLPIWQLGKPQGRLVSLLGNESALQVNSKVVVNISSESIQIWKLE

SEQ ID NO: 26882 - protein, 143 aa, Lactobacillus gasseri
MANEMMKNRNNDNMMDQLSDWFSFPKDFFDDSSIKNIMQSDVAETDKDYIVKVDMPGMDKKDIKVSYKDGILNVSGSRDSFDNLDDKNGNLIHRERSVGHIQRSYRIPDVDSKEISAKDIDGVLTITLPKLTEEDKENTITIE

SEQ ID NO: 26883 - protein, 302 aa, Synechocystis sp. PCC 6803
MGEEPVPADKALGKKFKKKNASWSIEESEALYRVEAWGAPYFAINAAGNITVSPNGDRGGSLDLLELVEALRQRKLGLPLLIRFSDILADRLERLNSCFAKAIARYNYPNTYQAVYPVKCNQQRHLVEALVRFGQTSQCGLEAGSKPELMIALATLPPPLDRQDKHTKPLIICNGYKDQDYLETALLAKRLGHRPIIIIEQLRELEWVLHISQQLNIKPMLGVRARLSCQSLKSSEISSGNGDRAKLGLTMPDIVTVIHRLEENNCLDCLKMLHFHLGTQVSDIALIKEAMREASQLYVELV

SEQ ID NO: 26884 - protein, 264 aa, Haloarcula marismortui ATCC 43049
MVGVGTWDIDGDTVQKSVRAGLNVGYAHVDTAEGYKNESEIGEALADYDREDVFLTSKVLPKHLDYESVIEACEASLDRLGTDYLDLYLVHWPNPATSIRETMNAMATLHDQGKIRNVGVSNFSAYQLGAAQHVADVPIAVNQIEYHPWNTQDQVVEFCRDTDTVVEAAAPLGRTKVFADDIIQDLSEKYDRSPAQIVLKWAVENNVVVLPKSSSPEHVRQNFDLFDWELDATDRERIDAIEREQAVYDTGINDWDNDTYGISQ

SEQ ID NO: 26885 - protein, 429 aa, Bacillus cereus G9241
MKKFDKSIAAFEEAQDLMPGGVNSPVRAFKSVGMNPLFMERGKGSKVYDIDGNEYIDYVLSWGPLIHGHANDRVVEALKAVAERGTSFGAPTEIENKLAKLVIERVPSIEIVRMVNSGTEATMSALRLARGYTGRNKILKFIGCYHGHGDSLLIKAGSGVATLGLPDSPGVPEGVAKNTITVAYNDLESVKYAFEQFGDDIACVIVEPVAGNMGVVPPQPGFLEGLREVTEQNGALLIFDEVMTGFRVAYNCGQGYYGVTPDLTCLGKVIGGGLPVGAYGGKAEIMRQVAPSGPIYQAGTLSGNPLAMAAGYETLVQLTPESYVEFERKAEMLEAGLRKAAEKHGIPHHINRAGSMIGIFFTDEPVINYDAAKSSNLEFFAAYYREMVEQGVFLPPSQFEGLFLSTAHSDADIEATIAAAEIAMSKLKA

SEQ ID NO: 26886 - protein, 715 aa, Cryptococcus neoformans var. neoformans JEC21
MAEQLKQVYADKKAQDQAAFVTFLTAGFPTRDATVPLMLALEAGGADIIELGVPFSDPVADGPVIQKANNVAIENNVHYSDCIEYVRQARAQGLKAPVLFMGYYNPIIAYGEERAVKDAREAGANGYIVVDLPPTEAVDFRNTCTKAGMSYIPLVAPSTSIDRVKFLTSIADSFIYVVSKMGVTGSSSSENISASLPELVKRIRTFTTIPLAVGFGIDNRTHFDYVTSSGADAVVVGSKIIKLIFEHADDGLAPKVVEDYCREITLKGQNPPPLGRKNAAAPPPANGGDVSPPLPIPSGSPLGESQVKVTAAGKLPSRFGLFGGAYVAESLVDCLNELEAAYAEAKEDPAFWKEFEDMFGYINRPSELYLAERLTEEMGGARIWLKREDLNHTGSHKINNAVGQILLAKRLGKRRIIAETGAGQHGVATATVCAKFGMECDIFMGAEDVRRQELNVFRIKMLGGRVIPVTAGSQTLKDAVNEAMRDWVTRLDSTHYLIGSAIGPHPFPTIVRDFQRVIGREIKSQMHEKMGKLPDAVVACVGGGSNAIGTFYDFIEDPSVRLVGVEAGGHGIDTEAHSATLTKGVMGVVHGAASYIIQSKEGQLTPTHSISAGLDYNSVGPEHSHLKYSGRAEYVVADDLQCLKAFKMCTELEGIIPALESSHGLWGGMQLAKSLPKDKDIVICLSGNGAKDVAEVLLTLKNKEWADKLDWHVAQ

SEQ ID NO: 26887 - protein, 250 aa, Bacillus cereus G9241
MNALAGKTVLVTRAQHQAKQMSVAVKEMSGIPLEIPLLRMEGMSHRQIQHIAEQLHSYDWVIFTSKNGVAFFLDRLRQKLPVTTKIAAVGVKTKLELEKRGYEVDFVPTSFVAEVFAEEFVKRLSGNECILFPKGNLARDVIPVALREIGVSLDELIVYGTKENVEKKRELIEALEVGKVDIITFTSPSTVTSFVRLLEGTNWREWTKKCTIACIGPITEKEASLYFPHIIMPKEYTVEALLQCICESIK

SEQ ID NO: 26888 - protein, 659 aa, Magnaporthe grisea 70-15
MSASRPIPGGSSKNPGSSSHDFPASFVASFRSSSPIAQEVIARDLAACSDDEDFDPEADGPGLGASDSVVDGDNPLMYRRPSGIAFGTARPVLAAQNVEDSILTREEWKQSLDAERSLLRDNHILPPKHAHPEQLGLLGRLRKRFFSTKVPRPSGSDEEAGPDLDGIPTEESPLLAGDGNDAPRRHSSSAAAAETGHLSETWEAAVAAGHIKTTWQREAKTLAVYSRSLVVTFLLQYSVNITSILAVGRIGKVELGAVSLATMSANILCYAPIQGLATSLDTLCAQAYGSGHKHLVGLQLQRMTAFLLLLLFPIGVLWLHAAELLVKFGIARPSAELAGLYLRICIFSMPAYAIFEASKRFVQAQGLFHATTYCLMISAPLNVLINWLLVWKLGWGFVGAPVSVVITQNLQPILLFLYVRFVDGYQCWGGFSKRAFSNWGPMIRLAIPGMIMVEAEWLAFEILTLTSGRFGTSQLAAQSVIVTLAATTYQIPFPLSVAVSTRVANLIGAKLADAAKTSAKVAIVAGIIIGLFNTTVLSVFRWKLPLLFTKDPEVIEIVARTMPILVVLQFFDAVCAISQGLLRGLGQQEFAGYSNIISYYAIALPISFATALGLGWELKGLWFGVTIGLAVVMVVEYSYLRWYDWNRAVRDAENRNASN

SEQ ID NO: 26889 - protein, 336 aa, Glycine max
MAMRGQQDKEIEIPTTTTLGYNLPNRDSSSSSSKLSSPTVGERSSSDHDQQHHQPTHQTRTLIFNETPHHNLYPPPPPPPPALAPHRPTSDPDLSTPIAPTSNPSRTAPPQTTTTTTSTPSIRYRECLRNHAASMGSHVVDGCGEFMASGEEGTPESLRCAACECHRNFHRKEVEGELRPQPQPQPQTHVPNYHSYYTNKHNGHLHYPTPSSSSLHHRLVTPTSLVSPVMMAFGGPAESSSEDLNMFQSNTGGAQLISVQQHAPLLSSSKKRFRTKFSQHQKDRMMEFADKIDWKIHKHNEQEVQQFCSQVGVKRQVFKVWMHNNKQTTSSKKQQM

SEQ ID NO: 26890 - protein, 535 aa, Magnaporthe grisea 70-15
MASSTISPQTTTTDLDSLETFLKPLQIDRPLVHRLAQDLCSNFTDLAAQSDDQFLPTPISESLLLQRAAVDSKDPGPHLAIDIGGTNLRVAFVELSHVRKDGHNETTLPLRRHLEHSWPIDSQLKNENHAVLFAWIGACIAEVVSKACAQFGITATTELPLGITFSFPMVQESLEKATLLQMGKGFGITSDLDLGCHLVDGYEKSRGDMPRIRVAAITNDAVATLVSFMHQFPTTADTNGTTAIDVDRRPAMGLICGTGSNATVFMDLESLKESKRPRRVQTLPGQNGGPASIRIAVNTEWSINGTAAPLRAHNLITSWDDHLSGAVERPGFQPLEYMTAGRYLGELGRLILVDYMTKVLGLDSTTLPAKLLRSFEPQNTTFLSHFRPEGNDWSMLVARLTNEFPSGPAFCWTEGLAQALYRIARLIEYRAAGIIAASTLALLKCSGALPSAEALASMYDRPTELQLGVGYTGGCITNFQDYLQHCQQLLDDLAVREYPEAASGGSRLRVVLQPCHDGGIDGAAVLVPAAVATGI

SEQ ID NO: 26891 - protein, 138 aa, Rhodopseudomonas palustris CGA009
MSDTKTTSPGKIEKSEAEWRKELTPMQYAVLREKATERPYTGEYEYETRPGTYVCAGCGQTLFESDTKFDSGCGWPSFTAPAQASSIDEERDVSHGMIRTEVLCSRCSGHLGHVFPDGPGPTGLRYCINSAALKLQPK

SEQ ID NO: 26892 - protein, 438 aa, Azospirillum brasilense
MSRLFTLAAPTMAAILGLAGLPAAALAQESAAAAAEPTLSSGDTAWMLVATALVLFMTIPGLALFYGGMVRKMNVLSVVMQSFAICCLVSILWFFAGYSIAFTEGTPYFGSLSKFMLAGITKDSLTGVIPETIFVVFQMTFAIITPALITGAFADRMKFSSMLVFTGLWSLIVYAPITHWVWGPGGYLAGDGVLDYAGGTVVHINAGVAGLVAAIVLGKRKGYPNENFAPHNLVLSLIGASMLWVGWFGFNAGSAVAADGRAGMAMLVTQIAAATAAMSWLLVEWATKGKGSVLGIISGAIAGLVAITPASGFVGPTGALVIGLAAGVICYWGATGLKRALGYDDSLDAFGVHGVGGIVGAILTGVFAQEAIGGTAGALEGNVGQIWTQVYGILATIVYSAVGSFIILKVIDVVMGLRVDEDVERDGLDLALHGETIH

SEQ ID NO: 26893 - protein, 175 aa, Rhodospirillum rubrum
MLSKIKEALICLRAGRVTLPYPFVPLKAPPRFRGRPTIDGAKCIGCGACAEVCPPRLIEVNDAASTRTVELNYSRCTYCARCQEICPTGAMTCTEDFEMATADRKNLTVSVQLDMVHCETCGKAFMTKRMLDKMLTEFCPPWMNKKIDVPKWLWQCPQCRLDKTGSVIEGSIKNG

SEQ ID NO: 26894 - protein, 407 aa, Thiobacillus denitrificans ATCC 25259
MNSPVRAFRSVGGTPVFFSRARGSRVWDADGREYIDYVGSWGPAILGHAHPGTVKAVQDAAANGLSFGAPSEAELTIATRITELLPSVEKVRLVSSGTEATMSAIRLARGFTGRSKFIKFEGCYHGHADFLLVKAGSGALTFGNPTSAGVPPEVAAQTIVLDYNDVAGLERTFAEIGDEIACIIVEPFAGNMNLVKPSAEFMAAMRRLCDEHGALLIFDEVMTGFRVDLGCAQKLLGIRPDLTTLGKVIGGGMPVGAFGGRADVMDALAPVGPVYQAGTLSGNPVAVAAGLATLASVSEPGFYPALAARTEKLVKGLTAAAREAGVTFCADSVGGMFGLYFAAEPPASFAEVMRCDKEKFNRFFHAMLDHGVYLAPSAFEAGFVSAAHSDADIDATVAAAREVFRTL

SEQ ID NO: 26895 - protein, 472 aa, Glycine max
MAFFRSVSALSRLRSRVGQQSNLANSVRWLQTPSSSNTDLYSELKELVPEYQERVKKLKKDHGSVELGKITVDMVLGGMRGMTALVWLGSAVDPDEGIRFRGMSIPECQKKLPGAFTGGEPLPEAVLWLLLTGKIPSKAQVDSLSKELRSRATIPDYAYKAIDALPVSAHPMTQFTTGVMALQVQSEFQKAYEGGIAKARYWEPTYEDTMNLIARLPAIAAYIYRRKYKDGKIIPLDDSLDYGANYAHMLGFDDPEMLEFMRLYISIHSDHEGGNVSSHTAHLVASPLSDPYLAFAAALNGLAGPLHGLANQEVLRWIRSIVAEFGTPNISTEQLADYINKTLSRGQVVPGYGHGVLRQTDPRYTCQREFALKHLPNDPYFQLVSKIKEVVPPILTKLGKVKNPWPNVDAHSGVLLNYYGLTEENYYTVLFGVSRSFGVGPQLIWDRALGMPLERPKSVTLEKLEQLVAKSS

SEQ ID NO: 26896 - protein, 483 aa, Streptomyces avermitilis MA-4680
MTSSQVDKQYDGNGAVGGDAPEEGYERGLGSRQVQMIAIGGAIGVGLFLGAGANIAKAGPSLILMYALAGVIIFFIMRALGELLLYRPVSGSFAEYSREFLGPFFGYFTGWTYWLMWVVTGMAELTAAAIYVHYWFPAVPQWVTALVFLVVLFVANLISVKLFGEIEFWFSMVKVTALIGMIVIGLGVLTFGFSSAGDTASVANLWQFDGFFPKGIGSSLMTLQGVMFAYLAVELVGVTAGESEDPEKTLPKAINTLPWRIALFYVGALTVILCVVKWTEFAPGVSPFVKAFAMIGIPAGAGIVNFVVLTAALSSCNSGMYSTGRMLRTLADNGEAPRVFSKLSASKTPAFGITISVLFMGIGVILNYVVPEKAFGYVTSVATAAGIWTWLMILVSHVLYRRAVDAGRLPASSFPAPGGAKCSWVAIVFLLFVTGLIAYDADSRVCLYVMAVWAAALAIGWYVLKARNPQVAERHEPKFEKVG

SEQ ID NO: 26897 - protein, 828 aa, Frankia sp. CcI3
MAGGEGTRLRPLTANLPKPLLPVVNRPIMEHVLRLLKRHGFDETVVTVQFLASMIRTYFGSGDELGMHLSYATETTPLGTAGSVKNAEDALRDEAFLVISGDALTDIDLTDLVAFHRRQGALVTVALKSVPDPLEFGIVITGEDGRIQRFLEKPTWGQVFSDTVNTGIYVMEPEVLAQVPPGEAVDWSGDIFPRLVEAGAPVYGYVASGYWEDVGTIASFQRAQADVLNRQVDVEIGGFEVSPGVWIGEDAEVHPEAILKGPLVVGDYSKVEAGAELREFSVLGSNVLVKSGAFLHRAIVQDNALIGPQTNLRGCVIGKSTDVLRAARIEEGAVVGDECVVREEAFVSHDVKVYPFKTIEAGAVVNTSVIWESRGQRTLFGPRGVSGLVNAEITPELVVRLAGAYATTLKKGATVTTARDGSRAARALKRAVISALTAGAINVRDLEVAPMPVTRFDVRSSNAAGGIMLRTTPGDPERIDIIFLDADGDDLSPVAQRKLDRVFSRQEFRRAFPGEIGDLRFPARTMDLYIQDLLDRVDTAGVAEADLKIVVDSSGGSASLVLPTLLGRLGVDVLTVNGRVDETIPPRSALEDLRATDRLGALVASSGAAFGVRFDHVGERVTIVDERGDLIDDDRALLVFLDLVAAENPGAEVALPVTITRVADQVTRFHGLTVRRTSLSAAALTGVARDDGIVFAADGRGGFIVPEFAPAIDGIAAFVKLLALVARTRLTLSTIDARIPSVAILRRSVPTPWAVKGTVMRRVVESVDPDTGYVIDTTDGVRIVGPDGSWILVLPDPSEAVTHLWSEGADIEEAHVLLRRWVEVVEAR

SEQ ID NO: 26898 - protein, 164 aa, Magnetospirillum magnetotacticum MS-1
MIPWGRSNGNQVPSVLRDGDRDPFLSLHREVNRLFDDVFRGFGSNLPSLVGASAFSGGWPNVEISDGEKEIKVTAEVPGLEEKDIEVLLDDGVLTLKGEKRSETEDKDRQFSERFYGRFERRIPLGYEVKDDKVDARFRNGVLTVTLPKSEKAQSQVKRIAIKS

SEQ ID NO: 26899 - protein, 369 aa, Arabidopsis thaliana
MMHEMAYKVCVEKVKSLGIEFTTPIEETLRDTIVSLMEDYKERSKEIMNGGGKLVCVTGASGYIASWIVKLLLLRGYTVKATVRDLTDRKKTEHLLALDGAKERLKLFKADLLEESSFEQAIEGCDAVFHTASPVFFTVKDPQTELIDPALKGTMNVLNTCKETPSVRRVILTSSTAAVLFRQPPVEASDVVDETFFSDPSLCRETKNWYPLSKILAENAAWEFAKDNGIDMVVLNPGFIFGPLLQPTLNFSVELIVDFINGKNPFNSRFYRFVDVRDVALAHIKALETPSANGRYIIDGPIMSVSDIIDILRELLPDLCIADTNEESVMNEMLCKVCVEKVKNLGVEFTPMKSSLRDTIVSLKEKCLL

SEQ ID NO: 26900 - protein, 294 aa, Saccharomyces cerevisiae
TTPLVHVASVEKGRSYEDFQKVYNAIALKLREDDEYDNYIGYGPVLVRLAWHTSGTWDKHDNTGGSYGGTYRFKKEFNDPSNAGLQNGFKFLEPIHKEFPWISSGDLFSLGGVTAVQEMQGPKIPWRCGRVDTPEDTTPDNGRLPDADKDADYVRTFFQRLNMNDREVVALMGAHTLGKTHLKNSGYEGPWDATNNVFDNSFYLNLLNEDWKLEKNDANNEQWDSKSGYMMLPTDYSLIQDPKYLSIVKEYANDQDKFFKDFSKAFEKLLENGITFPKDAPSPFIFKTLEEQGL

SEQ ID NO: 26901 - protein, 113 aa, Pelargonium x hortorum
WRKYGQKMAKGNPCPRAYYRCTMAVGCPVRKQVQRCADDRSILITTYEGNHNHPLPPAAMAMASTTTAAASMLLSGSMPSADGIMNPNLLARAMLPCSSSMATISASAPFPTV

SEQ ID NO: 26902 - protein, 243 aa, Sulfolobus solfataricus
MGKMLVVYMTLGYPNVQSFKDFIIGAVENGADILELGIPPKYAKYDGPVIRKSYDKVKGLDIWPLIEDIRKDVGVPIIALTYLEDWVDQLENFLNMIKDVKLDGILFPDLLIDYIDDLDKIDGIIKNKGLKNVIFTSPSVPDLLIHKVSKISDLFLYYGVRPTTGVPIPVSVKQLINRVRNLVENKLIVGFGLSSESDLRDALSAGADGIAIGTVFIEEIERNGVKSAINLVKKFRAILDEYK

SEQ ID NO: 26903 - protein, 356 aa, Oryza sativa (japonica cultivar-group)
MLSSSPSAAAPGIGGYQPQRGAAVFTAAQWAELEQQALIYKYLVAGVPVPGDLLLPIRPHSSAAATYSFANPAAAPFYHHHHHPSLSYYAYYGKKLDPEPWRCRRTDGKKWRCSKEAHPDSKYCERHMHRGRNRSRKPVESKTAAPAPQSQPQLSNVTTATHDTDAPLPSLTVGAKTHGLSLGGAGSSQFHVDAPSYGSKYSLGAKADVGELSFFSGASGNTRGFTIDSPTDSSWHSLPSSVPPYPMSKPRDSGLLPGAYSYSHLEPSQELGQVTIASLSQEQERRSFGGGAGGMLGNVKHENQPLRPFFDEWPGRRDSWSEMDEERSNQTSFSTTQLSISIPMPRCGSPIGPRLP

SEQ ID NO: 26904 - protein, 607 aa, Arabidopsis thaliana
MVHPLVDRATSDMLIGPDWAMNLEICDMLNHEPGQTREVVSGIKKRLTSRTSKVQLLALTLLETIITNCGELIHMQVAEKDILHKMVKMAKRKPNIQVKEKILILIDTWQESFSGPQGRHPQYYAAYQELLRAGIVFPQRPQITPSSGQNGPSTRYPQNSRNARQEAIDTSTESEFPTLSLTEIQNARGIMDVLAEMMNAIDGNNKEGLKQEVVVDLVSQCRTYKQRVVHLVNSTSDESMLCQGLALNDDLQRLLAKHEAIASGNSMIKKEEKSKKEVPKDTTQIIDVGSSETKNGSVVAYTTNGPKIDLLSGDDFETPNADNSLALVPLGPPQPSSPVAKPDNSIVLIDMLSDNNCESSTPTSNPHANHQKVQQNYSNGFGPGHQEQSYYGQGSSAPVWNLQITQQPSSPAYGNQPFSPNFSPPASPHYGGQNNNVLALPPPPWEAQSPSSSPQYSPTHPMQVTQVVITTHTHQPLGYNPQGGSPHATNNNNNNMFGMFLPPMTGGHMPPPFGHNGHVTNNNYNPNMYGGYGGQAQPPQQYLVEQQMYGMSLQDNGNNNTNPYQVSSHQPPPMMKPMNKKPEDKLFGDLVELSKFKKPTSGRAGSM

SEQ ID NO: 26905 - protein, 267 aa, Alpinia hainanensis
MEHKADQDRLLGFKGGKLEPPVAAVGRMGRGKIEIKRIENTTSRQVTFCKRRNGLLKKAYELSLLCDAEVALVVFSCRGRLYEYASSSVKSTIEKYKKACKDTTNDGFVSEANAQYYQQEASKLRQQINSIQISNRNLMGESLHSMNLRDLKQLESRLEKGIGKIRNKKNELLFAEIEYMQRREMELQSDNIFLRNKIAETDRVHQQMSMLPSTGATVAYEAMPTYYSGNFMQCKNRSQTNIYPQQRQRTFTSTPMRSKHGAWVLRG

SEQ ID NO: 26906 - protein, 318 aa, Triticum aestivum
MAFALNASCYPSSFSSLLPWRMAAAVMIPRRRNVLPVIKAVAVAPPAPAPAKPAAVRSRPVSVTMAKLMAKGKTALIPYITAGDPDLATTAEALRLLDACGADVIELGVPCSDPYVDGPIIQASSARALAGGATMDGVLAMLKEVTPELSCPVVLFSYYRPILCRGLAEIKEAGVHGLIVPDLPYVAAHALWSEAKKNNLELVLLTTPAIPEERMKEITKASEGFIYLVTVNGVTGPRENVNLRVESLIQEIKKVTDKPVAVGFGISKPEHVKQIARWGADGVIIGSAMVRQLGEAASPREGLKRLEAYARSMKNALP

SEQ ID NO: 26907 - protein, 504 aa, Mycobacterium avium subsp. paratuberculosis K-10
MTSDPGYDQAKDSANRLAPRPISRPPVDPASRREFGRPAGLRGSFVAERVRPKKYREQSEFRPSEQPADPVLQEAFSRPDGSPETLQRHPVDSGALAAEKDGVEPDHADDPWRDPGAPAALGTPAVAPSPSRSALGYGGKLGVRDVLFGGKVSYLALLVLLLIALVIGLIGGVVGRKTAEVAEAFTTSKVTLSTNGNGEAPAGRFAKVAAATAGAVVTIESKSDQEGMQGSGVVIDGRGYIVTNNHVISEAANNPSQFKTTVVFNDGKEVPANLVGRDPKTDLAVLKVDNVDNLSVARLGDSDKVRVGDEVLAAGAPLGLRSTVTHGIVSALHRPVPLSGEGSDTDTVIDAVQTDASINHGNSGGPLIDMNSQVIGIDTAGKSLSDSASGLGFAIPINEAKEVAQTLIRDGKIVHPTLGVSTRSVSNAIASGAQVANVKAGSPAQKGGVLENDVVVKVGNRKVADADEFVVAVRQLTIGQDSPIEVVRDGRHVTLTVKPDPDGS

SEQ ID NO: 26908 - protein, 183 aa, Escherichia coli CFT073
MQDSILTTVVKDIDGEVTTLEKYAGNVLLIVNVASKCGLTPQYEQLENIQKAWADRGFVVLGFPCNQFLEQEPGSDEEIKTYCTTTWGVTFPMFSKIEVNGEGRHPLYQKLIAAAPTAVAPEESGFYARMVSKGRAPLYPDDILWNFEKFLVGRDGKVIQRFSPDMTPEDPIVMESIKLALAK

SEQ ID NO: 26909 - protein, 377 aa, Zea mays
MWATSPPPLPLQLRRPPHPRFIARRRNKRLDRIAASQDPLTALTRVLWGGALPPAQLVVAVRHGWTTAWQLLMRQLAPSDPATGGFARAPARFPAVVGKPSSRLHLYVGLPCPWAHRALVVRALLGLEARLPVSVAVPGDDGAWSFTPGSPDLLYGKRKLREVYALRGGGFEGRASVPMLWDAERCEVVCNESIEIVKFLCDLAGDGAGDLDLWPPELRQDIDRWYSIIYPSVNNGSQEAYDAAASELFGALDRLEAHLAGCRYLCGDRLTLADVCLFTTLIRFDLVYNTLFRCTRRKLAEYPSLHAYTRDIYQMPKVAETCDMEAIMAGYFKTLFPLNPGGIQPHPPATCDRESLLRPHGREALSSAAGTPLEAAA

SEQ ID NO: 26910 - protein, 203 aa, Rhodopseudomonas palustris CGA009
MIPPPQLDAKEAGGIQTAVFAGGCFWGVQGVFQHTAGVVNALSGYAGGSKASASYPLVSTGTTGHAEAVEVKYDPKRISYGKLLQIYFSVAHDPTQLDRQGPDTGPQYRSAIFTTSDEQKRIADAYIAQLDAAKVFGAPIVTKVGPLKGFYAAEAYHQDYLTLHPTQPYIAYNDLPKIEALKKLFPTEYLDKPTLVSSVKATN

SEQ ID NO: 26911 - protein, 379 aa, Bacillus cereus ATCC 14579
MVAEKGTQTKTQQQREQHFELLNSTQIVISEALEKLGYPNEVYELLKEPIRMMTVKIPVRMDDGTVKIFTGYRAQHNDAVGPTKGGIRFHPNVTENEVKALSIWMSLKCGIVDLPYGGGKGGIICDPREMSFRELERLSRGYVRAISQIVGPTKDIPAPDVFTNSQIMAWMMDEYSRIDEFNSPGFITGKPLVLGGSHGRETATAKGVTICIREAAKKRGIDIKGARVVVQGFGNAGSFLAKFMHDAGAKVIAISDAYGALHDPNGLDIDYLLDRRDSFGTVTKLFNNTISNKELLELDCDILVPAAIENQITEENANDIKAKIVVEAANGPTTLEATKILTDRGILLVPDVLASAVWLPVSTLSGSKTPKVTTGLRRK

SEQ ID NO: 26912 - protein, 215 aa, Glycine max
MAKKRKSVATRLDEVDRTMYSTFCSTANSLSHLYTHAMNQQKLSFQAGERHALEKLYQWILRQQQEGSRVATIDIVTHLQNELEYGGEEAPVSPRQPMHQQNSQTAMHNTNFGASIPSNAFGATVAGQGIRAGQPDQQPKNSVFSNALSSPIRRSLQPYHLAQGSFPSCNIMSSGNGTRNSDMTYPNGQNRDTNSSNSSDCMDMHSDSPGHDFSY

SEQ ID NO: 26913 - protein, 258 aa, Oryza sativa (japonica cultivar-group)
MDGGSGGPYTSRTAEEVFRDFRGRRAGMIKALTTDVEKFYQLCDPEKENLCLYGYPNETWEVTLPAEEVPPEIPEPALGINFARDGMNEKDWLALVAVHSDSWLLAVAFYFAARFGFDKEARRRLFNMINNLPTIFEVVTGAAKKQTKEKAPNSTNKPNKPSSKMQPRPESHSKAPKPPAPPKDDDESGDEYADEEEEERDNTLCGSCGTNDGKDEFWICCDSCERWYHGKCVKITPARAEHIKHYKCPDCGNKRARA

SEQ ID NO: 26914 - protein, 154 aa, Ipomoea batatas
MALQLAAHSDARSGPVGSNGGQFWSFRPVRPLNKIVLSFSGSPDQTLNLISITFSSNPTDIITVGGVGPEPLTYTETVNIDGDIIEISGMIANYKGYNVIRSIKFTTNKKEYGPYGANAGTPFNIKIPDGNKIVGFFGNSGWYVDAIGAYYTAK

SEQ ID NO: 26915 - protein, 641 aa, Prochlorococcus marinus subsp. pastoris str. CCMP1986
MKELAYWPAAKSLSKNEKFTSTRKDINNLDHVDQIWEYLKLRCGNTIAINDLRGKNKEKISYSELADLITKVSNSFKNYGLVKGDVVTLISENSPRWLIADQGLMRLGAINAVRGINSPSVELEYIIEHSNSVGLIVQSKEVWLKLNKKNELKKRFKFIINLEDEQFEDLINWPEFIKAGEENLLKNNSFEKYNHQINDIASILYTSGTTGKPKGVPLTHANFLHQIINLANIADPEPGTSVLSVLPIWHSYERSAEYFFFSCGCTQFYTNPKFLKDDIKQVKPVVMATVPRLWEAIHDGFFLALKKMPPKKQKIIKILIKNSSIFKRNLRKIRNLEINQVSSLAKISLTISVIGRFFIHKISSTFLWPSILKQLCGEKLKFPINGGGALPEHVDLFFESLGIDVLVGYGLTETSPVLTCRRRELNVRGSSGQPLAFTEIKIMNEEKDKILKFKEIGKILVKGPQVMKGYLNNISATKDVLSKDGWFDTGDLGFLIPNGSLVITGRAKDTIVLSSGENIEPNPLETEILSSEFINQVQLVGQDKKCLTALVAPNIELVENKFFENDISKLNSNKKIGLFFKSQINNLLKNRLGARFEEQILECYFVDAFTLENGLLTQTLKQKRREIVDLYSTHIEEMYKK

SEQ ID NO: 26916 - protein, 927 aa, Bacillus anthracis str. A2012
  misc_feature (278)..(278): Xaa can be any naturally occurring amino acid
  misc_feature (650)..(650): Xaa can be any naturally occurring amino acid
  unsure (1)..(927): unsure at all Xaa locations
MLNSSNDVKTKFINDLVKQVEKNQFAGINIDFEAVPESDRENLTNFMKELTMVFHKHDLLVTQDVPANDKAFDYSALAKIIDRMIVMMYDEHYGAGEPGPIASNKWFQHTLKELNIPSNKLIVAFGNYGYDWKVNSKEPAKSLTFSEVMAMAHNSDINIQWDKMSGNPYFRYKTGDKEHTAWFLDGVTLYNQVKIAMDNNAKGFALWRLGAEDPTIWKVLKNPIEAQKNPDVLHKITSLDEVNYSGQGEILQIENEKQNGLRDFKVGKDGYLTDEVYXSLPSAYEVQRYGKPKGKQVVLTFDDGPDPKYTPEILDILKENKIKAAFFVLGENAQLNPSIVKRIYDEGHEIGNHTFKHPNVADTSLLRTKVELNTTQRLIQEITGHSTVLFRPPYEADANPDSSNEILPILRAQNMNYTMVAEKVDPEDWATPSTNELVKRALNPVYKGEGNIILLHDAGGNRTHTVEALPIIIKELKKHGYSFVTISDLMNKERDEIMPPVSSEGKQYLLYNKAVFSGAGYFKHILTTIFYIAIGLGIFRFLFLIYFAWKQKRKTLSRTIHSSYQPFVSVVIAAYNEEKVIAKTIRSILDSKYGEFEVIVVDDGSTDGTSKVMQETFYKHPKVRFIQKENGGKSSAMNLGFQQSRGEIIXTLDADTIIAQDAISLMVRHFEDQNVAAVSGNVKVGNRRNLLTTWQHVEYITGFNLERRAFDELNCITVVPGAIGAWRKKNVVESGYLSEDTLAEDTDLTITFLRQGHRIVYEEKAYAFTESPEDVKSLIKQRYRWSYGTLQCLWKHRKALCNSKHKTLGFIALPNMWLFQYVLQFIAPFADILMIIGLFSSDPLKVLGFYFVFFLMDLLASLFAFKLEEENPKPLVWLILQRFIYRQFMTYVVVKSIFSSIRGVAVGWNKLKRVGSVEHSTEHKEAS

SEQ ID NO: 26917 - protein, 515 aa, Arabidopsis thaliana
MDGADGTVRVKPGRGFETETDVAVSSPVTRQKAAAAKQFIENHYKNYLQGLHERMERRREFQRKVQEAQLPVEEQDEMMRNLARRETEYMRLQRRKIGIDDFELLTVIGKGAFGEVRLCRLRSTSEVYAMKKLKKTEMLSRGQVEHVRSERNLLAEVDSRYIVKLFYSFQDSECLYLIMEYLPGGDIMTLLMREDILSEDVARFYIAESILAIHSIHQHNYVHRDIKPDNLILDKSGHLKLSDFGLCKPLDDKYSSLLLEDDEMLSQDSENQSGKSDADKAPWQMPKEQLLQWKRNRRALAYSTVGTLDYMAPEVLLKKGYGMECDWWSLGAILYEMLVGYPPFCSDDPRITCRKIINWRVCLKFPEQPKISDEARDLICRLLCDVDSRLGTRGVEEIKSHPWFKGTPWDKLYDMEAAYRPIVDGELDTQNFEKFPEVEGSPSEAPQVGPWRKMLTSKDTNFIGFTFKKSDITRSMESSGADMKSNGSGEAPSLISLLGRINMEEGEGGELNHKT

SEQ ID NO: 26918 - protein, 478 aa, Rubrivivax gelatinosus PM1
MTMHRATKIVATLGPASSTPDVLERMITAGVDVVRLNFSHGSAQDHIARAALVREVAQRAGKEVAIMADLQGPKIRVGKFAQGKVMLEPGAAFVLDAARSEPGDLQAVGLDYKSLPRDVKPGDTLLLNDGLIVLTVDKVIGEAVHTVVKIGGELSNNKGINKQGGGLTAPALTAKDMEDIKTAMSFQCEYLAVSFPKSATDMEMARQLANVAGEPWRHKPALIAKIERSEAIPVLEQILKASDGIMVARGDLAVEVGNAAVPALQKKMIKLARELDKVVITATQMMESMIVNPVPTRAEVSDVANAVLDGTDAVMLSAETAAGKYPVETIEQMAAIALAAERAEDVALDADFTNKRFGRIDQSIAMGALFTAHHLGCKAIVALTESGSTALWMSRHKIHVPIFALTSQQTSQRKMTLYRNVRPLLMPSYTDRDEALAKAEALLVDGGVLKPGDTYAITCGEPMGYPGGTNMLKVCRVA

SEQ ID NO: 26919 - protein, 508 aa, Gloeobacter violaceus PCC 7421
MSGLCACTLVGAAQVQQLEAALFAAGMPVEALMEKAGLRLAAAIAADYPAGGYPRVGVLVGPGHNGGDALVVARELWLVGRSVQVFCPRPPIKPLARAHLDYFQSLGGRVHTGAVPEEPGVDLWVDGLFGFGLERPVAEPYAGLMAQVNASGVPVAAVDLPSGLSSETGEALGGLAVRAARTYCLGLWKRGLWQDAALDWLGVPVRLEIGFSEAQVRSVLGEDHRSARLLLPDAARAGLPLARPATAHKYSVGTLLAVAGSRQYGGAATLVALGARSGGPGMLYLALPESLADRVAARLPEAIVHPCPQAENGALADLPGVDLEKFDAVVCGPGLGKAEQALVLRLAREAAGALVLDADGLNLIAGQLEVLAQRAAPTVLTPHPGEFKRLFPDIALADRQGAARTAALRSHAWIVLKGARTVVASPSGQVWVNPGGSPALARGGSGDVLAGLLGALLAQCENPEPAVLGAVWWHAAAGEWLAARHTVLGVDAETLALGLLPFLAADGP

SEQ ID NO: 26920 - protein, 144 aa, Zea mays
  misc_feature (77)..(77): Xaa can be any naturally occurring amino acid
  misc_feature (117)..(117): Xaa can be any naturally occurring amino acid
  misc_feature (124)..(124): Xaa can be any naturally occurring amino acid
  unsure (1)..(144): unsure at all Xaa locations
GVHACIHTGYWEDGGTIRSFFDANLALTEPSYKFDWYEPKTPFFTARGCLPASLLGKCYINEASISNGCLPREGLVXHSATGACSLANPGCELEYFKMTGAATLETDQEASKLLLFXAGSLVGXYARNTTITNCLIDMTAPIGK

SEQ ID NO: 26921 - protein, 491 aa, Glycine max
MFGQSMDSARNAGGVAGTVLIPMRFVWPYGGRSVFLSGSFTRWLELLPMSPVEGCPTVFQVIYNLPPGYHQYKFFVDGEWRHDEHQPYVPGDYGIVNTVFLATDPNYIPVLPPDVASGNSMDVDNDAFRRMVRLTDGTLSEVLPRISDTDVQISRQRISAFLSSHTAYELLPESGKVVALDVDLPVKQAFHILHEQGIFMAPLWDFCKGQFVGVLSALDFILILRELGNHGSNLTEEELETHTISAWKEGKSYLNRQNNGHGTMFSRRFIHAGPYDNLKDIAMKILQKEVSTVPIIHSSSEDASFPQLLHLASLSGILKCICRYFRHCSSSLPVLQLPICAIPVGTWVPKIGESNRQPLAMLRPTASLASALNLLVQAQVSSIPIVDDNDSLLDIYCRSDITALAKNRAYAHINLDEMTVHQALQLGQDAYSPYELRSQRCQMCLRSDPLHKVMERLANPGVRRLVIVEAGSKRVEGIVSLRDIFKFFIGD

SEQ ID NO: 26922 - protein, 1173 aa, Crocosphaera watsonii WH 8501
MTANIQKSYSYKVGGSLGFAHPTYVERQADQTLLTALTAGKFCYVFNCRQMGKSSLRVRAMHQLQAKGMSCASVDITSLGSDISQKQWYSGIITQLFLGFNLIGKVNLKVWLREREELSGIQKFSEFLEEVLLVHCLGEKVYIFIDEIDKILSLNFSLDDFFSVIRFFYNQRAENPKFNRLVFSLFGVATPTDLIQDKTQTPFNIGFPIELTGFTSKEIEPLAPGLTSITDHPQKVLETILDWTGGQPFLTQKVCDLLLTQGKIIPAGQEKEWVNKLIREFIVENWESHDEPVHLKTIRERIFRQEKRAGRLLGMYQQILQEGFLKSDESSEQTELRLSGLVVKKDGNLVAYNKIYQSVFNEEWVKKELEKIRPYSEMLTGWMNSNYEDDSRLLRGKLLKDALSWAMDKSLSDLDYRFLTESQNLDKREAEINLKAQQKANEILTRANQKAQRMIRLGMTILGVSVVGATFAFTQARIAFQKQREAQIGTQLERSGDSAWRQFEFEQLDGLVSAIEANQELKTIVKDQRLLEDYPATSPISALEQILNRIQEKNKLIGHQDAVNSVTFSRDGQWIATASSDGTIRLWNRQGQQKAVLRGHEGNIYGVAFSPDSQTLATAAQDDTARVWNLQGKQLALLKGHDASVYSVTFSPDGQRLATTSRDNTARVWDKQGNSLLVLKGHKKSVDDVAFSPDGQYIATASRDGTAKLWDSQGNLRKTLQEKATPLFSISFSLDSQRIAAGARDGTIYIWDKQGNLTLNLNGHQELVNSVVFSQDGNLIASGSSDGTARLWSTEGEEITVLKGHQDPIYDVALNYQSTELATASSDGKVKLWAVKQTLNNGFNTLDSYVTSADFSEDGKFLAIADERGQVYTWNLQGKNLEKFEAHGSGINAIRIAPNGQIMATTANNGVVKIWDLQGNLLGNLRDNKVRIYSLDFSSDSKKLVLANRSGEVELWDLEKQPYQLIKKFQAHEDTINHIVFNQNSTKIATASADKTVKVWDKQGNLERLLSGHQERVNWLSFAPNSNYLATASEDSTIKLWDSKGELITTLKSDLFPISRVNFSSDGEYFVTASQDGTVRLWDREGKLHTKMKGYQESLESVKFTPDNQTILTVARDGTVKMWPLESEFVRLSSLLEQGCHWLKDYLISHPSEQPKLSSCPHSNDAKKPLTQY

SEQ ID NO: 26923 - protein, 427 aa, Escherichia coli O157:H7
MADTKAKLTLNGDTAVELDVLKGTLGQDVIDIRTLGSKGVFTFDPGFTSTASCESKITFIDGDEGILLHRGFPIDQLATDSNYLEVCYILLNGEKPTQEQYDEFKTTVTRHTMIHEQITRLFHAFRRDSHPMAVMCGITGALAAFYHDSLDVNNPRHREIAAFRLLSKMPTMAAMCYKYSIGQPFVYPRNDLSYAGNFLNMMFSTPCEPYEVNPILERAMDRILILHADHEQNASTSTVRTAGSSGANPFACIAAGIASLWGPAHGGANEAALKMLEEISSVKHIPEFVRRAKDKNDSFRLMGFGHRVYKNYDPRATVMRETCHEVLKELGTKDDLLEVAMELENIALNDPYFIEKKLYPNVDFYSGIILKAMGIPSSMFTVIFAMARTVGWIAHWSEMHSDGMKIARPRQLYTGYEKRDFKSDVKH

SEQ ID NO: 26924 - protein, 493 aa, Glycine max
TQRFLSVQSWKTSRTSRNLRNSKPGSGIAHAVLTSDIDEDSMAFQGVPTFEKPEVDPKSVASIILGGGAGTRLFPLTGRRAKPAVPIGGCYRLIDIPMSNCINSGIRKIFILTQFNSFSLNRHLSRAYSFGNGMTFGDGFVEVLAATQTPGEAGKKWFQGTADAVRQFIWVFEDAKNKNVEHILILSGDHLYRMDYMDFVQRHVDTNADITVSCVPMDDSRASDYGLMKIDKTGRIIQFAEKPKGSDLKAMRVDTTLLGLLPQEAEKHPYIASMGVYVFRTETLLQLLRWKCSSCNDFGSEIIPSAVNEHNVQAYLFNDYWEDIGTIKSFFDANLALTEQPPKFEFYDPKTPFFTSPRFLPPTKVEKCKIVDAIISHGCFLRECSVQHSIVGVRSRLESGVELQDTMMMGADYYQTEYEIASLVAEGKVPIGVGANTKIRNCIIDKNAKIGRNVIIANTDGVQEADRAKEGFYIRSGITVTLKNATIKDGTVI

SEQ ID NO: 26925 - protein, 411 aa, Moorella thermoacetica ATCC 39073
MQKRVVITGLAAISPVGTGKDKFWRALVAGQSGIGPITRFDAAAMPVRFAGEVKDFDAGLFFDRKEARRMDRFAQYAVAGARMAVEDAALDLDKENRDRVGVIFATGIGGMETFEEQTRVLLERGPNRVSPFFVPMMIANMAAGQISINLGTRGVNFTVVNACASGTNAVGEAFRALQRGDADVVITGGSEASVTPLAVAGFAALKALSVRNDDPTRASRPFDRGRDGFVLGEGAGVLVLETLEHARARGARIYAEVAGYGCTADAYHITAPAPDGSAASRAMALALEDAGLKPGDVDYINAHGTSTELNDRQETLAIKNLFGADAYRVAISSTKSMIGHLLGAAGAIELVATALTIATGVIPPTINYEEPDPECDLDYVPNVARERQVAVAMSNSFGFGGHNAAIVLRKL

SEQ ID NO: 26926 - protein, 404 aa, Mycobacterium avium subsp. paratuberculosis K-10
MREAPHVLGIVLAGGEGKRLYPLTADRAKPAVPFGGAYRLIDFVLSNLVNARYLRICVLTQYKSHSLDRHISQNWRLSGLAGEYITPVPAQQRLGPRWYTGSADAIYQSLNLIYDEDPDYIVVFGADHVYRMDPEQMVRLHIDSGAGATVAGIRVPRSEATAFGCIDSDESGRIRKFVEKPLDPPGTPDDPETTFVSMGNYIFTTKVLIDAIRADADDDHSDHDMGGDIIPRLVDDGMAAVYDFSDNEVPGATDRDRGYWRDVGTLDAFYDAHMDLVSVHPVFNLYNKRWPIRGESENLAPAKFVNGGSAQESVVGAGSIISAASVRNSVLSSNVVVDDGAIVEGSVIMPGARVGRGAVVRHAILDKNVVVGPGEMVGVDLERDRERFAISAGGVVAVGKGVWI

SEQ ID NO: 26927 - protein, 399 aa, Vibrio vulnificus CMCP6
MKIMFEKVVAAPADPILGLTEEFKKDPRAEKINLGVGIYKTEQGETPVLATVKKAEAALVETEKTKSYLTIEGTAEYALAVQKLLFGADAELINAQRAKTAQAPGGTGALRVAGEFIKRQLGDVKIWISNPTWANHHGVFRAAGLETVEYAYYNPETKDKDFAAMLADLEKASAGDVVLLHGCCHNPTGIDPTAQEWEALAKLVADKGLLPLFDFAYQGFAKGVEEDAQGLRTFAKFNKEILVASSFSKNFGLYNERVGAFTLVAESQEIAETAFSQVKAIIRSIYSNPPAHGSAVVTHILNDAALRAEWEAEVAEMRDRIQEMRELFVTTLKEEGVAADFSFIQRQNGMFSFSGLNKDQVARLKEEFAIYIVGSGRISVAGMTKSNMGPLCKAIAAVL

SEQ ID NO: 26928 - protein, 213 aa, Campylobacter jejuni subsp. jejuni NCTC 11168
MKNYYLVDEKRKTPVSTWEKISQALRRSVKLELFVGLFVMMRELLKRNNSATIKYPFEKVKLDNRYRAVHRLMRFIESENERCIGCGLCEKICISNCIRMETSLDENGRKKVENYSINLGRCIYCGFCAEVCPELAIVHGTEYENAAEQRSYFGYKQDFLTPIDKLKNQVEFEGAGSLRKDANLWVKKTPNYYDVMIERALENQNTQEQGENK

SEQ ID NO: 26929 - protein, 356 aa, Triticum aestivum
MGSIAAGADEDACMYALQLVSSSILPMTLKNAIELGLLETLMAAGGKFLTPAEVAAKLPSAANPEAPDMVDRMLRLLASYNVVSCRTEDGKDGRLSRRYGAAPVCKYLTPNEDGVSMSALALMNQDKVLMESWYYLKDAVLDGGIPFNKAYGMSAFEYHGTDPRFNRVFNEGMKNHSIIITKKLLESYKGFEGLGTLVDVGGGVGATVAAITAHYPTIKGINFDLPHVISEAPPFPGVTHVGGDMFQKVPSGDAILMKWILHDWSDEHCATLLKNCYDALPAHGKVVLVECILPVNPEATPKAQGVFHVDMIMLAHNPGGRERYEREFEALAKGAGFAAMKTTYIYANAWAIEFTK

SEQ ID NO: 26930 - protein, 472 aa, Haloarcula marismortui ATCC 43049
MVVGDVTTGTELLVIGGGPGGYVAAIRGAQLGLDTTLVERDAYGGTCLNHGCIPSKALISASDVAHDARQAESMGVFADPAVDMAGMTEWKDGVVTRLTRGVESLCKNAGVNLVEGTAEFVDDGTVRVAHGGEGQGSESLSFEHAIVATGSRPMAVPGFEFDGEHILSSKDALALESVPEKLLVVGAGYIGMELSTVFAKLGAEVTVVEMLDDVLPGYEDDIATVVRDRAEELGIDFNFGEAADNWEETDEGIRVQTVDEDEVVTEYNAEKCLVAVGREPVTDTLALDNIDLQTDENGVIPTDDQCRTAFESVFAVGDVAGEPMLAHKAMAEGEVAARAAAGEPAAFDHQAIPAAVFTDPEIATVGMTESEAEAAGFEPVIGQMPVRANGRALTVNEKEGFVRVVADADEEFLLGAQIVGPEASELIAELGLGIEMGARLEDIAGTIHTHPTLSEAVHEAAAAARGEAVHTR

SEQ ID NO: 26931 - protein, 468 aa, Vibrio vulnificus CMCP6
MNRYRQLAQSFRQQIESKTWRAGEKLPSVRMACKHHGVSAGTVLQAYQLLEAQGWVIAKPQSGYFVTSDFQRLTAPREPSVSALPSFSDELYDFLKDQSERQAVKLGSAFPDVHLFPLEALNRNLASAGRKMSANDLLNNLPPGNEALRRLIAQRYIQQGMDLTHHDIVMTSGAMEALNLSLQVVTKPGDTIIVESPCFYGALQAAQRLGLNIIEVDVDECDGLNLEQFEHVLANNEVKACWLMSNFQNPTGVTLSEQKKQAVVELVHRYQLYLIEDDVYSELYYSQDKPSSFKTYDREDCVLHCGSLSKSLCPGYRLGWVVTRRFNHAIQKLQLTSTLSGSAPIQQGVAYYLQNDGYDKHLRKLRSTLKQRQQWMMNELRRQLPDTVQFSSPTGGYFLWLKLPESIQAHQVYTHLKQQGVLSAYGGLFSQTKRFEHYLRINCSLPESDDLVQAIRCLAVTINRLATD

SEQ ID NO: 26932 - protein, 424 aa, Francisella tularensis subsp. tularensis SCHU S4
MEVMLMSKYATLKYADKNIEIELPVYSPSLGNDCIDVSSLVKHGIFTYDPGFMSTAACESKITYIDGGKGVLLHRGYPIEEWTQKSNYRTLCYALIYGELPTDEQVKSFRQEIINKMPVCEHVKAAIAAMPQHTHPMSSLIAGVNVLAAEHIHNGQKESQDEVAKNIVAKIATIAAMAYRHNHGKKFLEPKMEYGYAENFLYMMFADDESYKPDELHIKAMDTIFMLHADHEQNASTSTVRLSGSTGNSPYAAIIAGITALWGPAHGGANEAVLKMLSEIGSTENIDKYIAKAKDKDDPFRLMGFGHRVYKNTDPRATAMKKNCEEILAKLGHSDNPLLTVAKKLEEIALQDEFFIERKLFSNVDFYSGIILKAMGIPEDMFTAIFALARTSGWISQWIEMVNDPAQKIGRPRQLYTGATNRNF

SEQ ID NO: 26933 - protein, 665 aa, Chlamydophila abortus S26/3
MVNREVDIDILEKISGTLKQLSIEIIQKAGSGHPGLPLGCAELAAYLYSYVLRHNPKDPLWIDRDRFVLSAGHGSALLYACLHLAGYDVSLEDLQQFRQLHSRTPGHPEFGETEGVEATTGPLGQGLGNAVGMALSMKMLGVRFNRPEHEIFNGKVYCLAGDGCMMEGVSHEVCSFAGTLGLDNLVVIYDYNNIVLDGFLGEVSSEDVKKRFESYGWEIYEVDGYDFLGIHEIFVKVKQSQQRPVLIIAHTVIGHGSPKEGSHKAHGSPLGEAGVEQTKRFWHLPEEKFFISPVVKSFFSNKLHEDRKVQEEWQDNFRVWSRLFPDLYQEFLSLKSPLSSEQLEIILDGVVMPDNIAGRAASNKIIQDLAKNIPSLIGGSADLSSSDGTWITDAKDMNSHDFSGRNIKYGVREFGMGAIMNGLAYSQVFRPFGGTFLVFSDYLRNAIRLAALAKLPVIYQFTHDSIFVGEDGPTHQPIEQIMSLRAIPGLQVIRPGDANEVKGAWHAALRYAGPTALILSRQNLPTLAQTHRPFKEGVGRGAYIVLKETQGKPDYTLFATGSELHLALAVAQELIHLDKKVRVISFPCWELFEQQDFEYRESVIGGDSGLRVSIEAGSALGWYKYIGANGLAIAMDRFGYSGAPADVAEACGFTADCILQRILSQ

SEQ ID NO: 26934 - protein, 597 aa, Francisella tularensis subsp. tularensis SCHU S4
MSIATQEFDAIVIGAGGAGLRASFQLSQSGFKTAVVSKVFPTRSHTVAAQGGIAAALGNIEFDDGLPSDDWKWHMYDTVKGSDYIGDQDAIEYMCEHAPQSIIELEHMGMPFSRLKNGKIYQRAFGGMSRNYDPANQAERTCAAADRTGHALLHTLYQGNLAHKTDFYTEWFAVDLVKADDGSIAGVIALCIETGETVFLKAKITILATGGAGRIYESSTNAYINTGDGMGLALRAGLPLQDMEFWQFHPTGIAGAGVLVTEGCRGEGGVLRNKDGERFMERYAPNAKDLACRDVVSRASQQEIMEGRGDTFSGTSCVWLDLTHLGEDVINERLPTVRELGRTFAGIDPVEKPIPVVPTCHYQMGGIPTNKHGQVITQVDGKDKVIGGLYAVGECASVSVHGANRLGSNSLLDLVVFGRAAGMHAEQSLKEGMPMKEVSQENIEKATARITKWDTSEQRGCKEKISELRKELQRVMQQYFSVFRQESTMKEGLDKLFNIRERLDNAVLEDNSRIFNMMRIEALELDNLVLTAIATAKLALERKESRGAHSRVDYPERDDKNWMKHTLYFLEGDRTSLRDVNMSPTKVKAFQPAERKY

SEQ ID NO: 26935 - protein, 135 aa, Brassica napus
  misc_feature (117)..(117): Xaa can be any naturally occurring amino acid
  unsure (1)..(135): unsure at all Xaa locations
CCATIENASDSWGLSVSFISIILLPIVGNAAEHAGAIIFAFKNKLGISLGVALGSATQISLFVVPLSVIVAWIMGIKMDVNFNILETSCLALAIIITAFTLQDGTSHYMKGLVLMLXYLIIAACFLVDQIPQPKG

SEQ ID NO: 26936 - protein, 128 aa, Glycine max
MPPPTPLSSASAALRRRLQQSLRTRGGAESGPSRWTSPGHEERPKGYLFNRTPPPPGQSRKWEDWELPCYVTSFLTIVILGVGLNAKPDLTIETWAHEKALERLKIENSLAAAATNNNSESSSYDESD

SEQ ID NO: 26937 - protein, 322 aa, Arabidopsis thaliana
MIGTSFPEDLDCGNFFDNMDDLMDFPGGDIDVGFGIGDSDSFPTIWTTHHDTWPAASDPLFSSNTNSDSSPELYVPFEDIVKVERPPSFVEETLVEKKEDSFSTNTDSSSSHSQFRSSSPVSVLESSSSSSQTTNTTSLVLPGKHGRPRTKRPRPPVQDKDRVKDNVCGGDSRLIIRIPKQFLSDHNKMINKKKKKKAKITSSSSSSGIDLEVNGNNVDSYSSEQYPLRKCMHCEVTKTPQWRLGPMGPKTLCNACGVRYKSGRLFPEYRPAASPTFTPALHSNSHKKVAEMRNKRCSDGSYITEENDLQGLIPNNAYIGVD

SEQ ID NO: 26938 - protein, 125 aa, GIBBERELLA ZEAE PH-1
MNEEVIDIGVDGSLVEHYPFFRDMIYEALASVDGIGPKGVEKIRIGIAKDGSGVGAALIALVAAGREKPEDYLTNLRSESNRARKASDPFLESSPVSNQALLAGGVVGVLALAALWYMSNPALSP

SEQ ID NO: 26939 - protein, 1721 aa, Gloeobacter violaceus PCC 7421
MPQGIRVSRTIRALTTGEGKLWLLLVGVNQYQDRALPPLRFCAPDCQGIGEALLEATRTFPNKQLLWHHDYATDLPTRKAVDASLERLIAEAGPQDTVLFYFCGHGAIDAASRQAVLCLADTRLADLCGSGLTMRRLLESLGRCRAAQQLVWLDACHSGGLSLRNREQTAEALPAGTILGMEELLRERAAQSRGFYALLACEQSQQSWEFPGLGHGVFTYFLIRGLRGEAANARGLIEMDGLYRYVYHQTLRYIDNINQQSRLENLQKLRRGGELHPEYALQVPKRIVEGVGELILGVRPTDPQPLHLRRALVINGLAGEEETPLALSKLLSQQGGFEVKYWNRRSGADPAQVREMLRSGLRLNSTLPTFASSAETLLIYLRGRLETSAEGESWLVLGDGVRVSLLWLRRQMHGQGGGQQLVVLDCPGSIEILEQWVEVLRVAPQRTQCLIAGAAADPEAFSRALLDALEASEPQGGLSAAKWASQLQQAVAGTGTGLFVELSGPPGVIEVLPTNLAASGEGVPMDLGVCPYMGLRAFGEEDAPYFYGRETLTQELLQHLAGESFLAVVGASGSGKSSVVHAGLVAQLRLGRQLPGSQSWWVQGFRPGAHPLEALSWRLADATDQHERHRRQQQIEGLLHLGADGLVQWLRTRPEPMVVLVVDQFEELFTLASATDRQIFLDVLLGALACAADRFKLVITVRADFIAPCLEVAALAPLVQAASALVPPCLSEEEYRSLIVKPAHKVGLGVEPELVEVLLQELNQSPGELPLLEFVLEQLWEKRQNSQLTLSAYQQEIGGLKGALETKAQAIYGALGPEGQACARWIFLSLTQLGEGTEDTRRRILRSELVVARYPEQLVSQTLQALTAAKLVVVGLSESTPAGRSRGSAPAAEPEPLDAFKQQVTVEVAHEVLIRYWSTLRWWLEENRARLRLQRQIEQAAALWKQRDQQPDFLLRGVRLAEAEEIYTHHSDELSHEVQAFIEACLEEKHKQKQQEKNQLRRAQMVALVMVVLGITASSFAALAYWQTQKSQLSEIAALNASAEGYLASHRELESLIASIKAEKLLQKTIGANEELRVQTESTLQGILGNISEFNRLVGHKSWISSIAHSPDGKAIASASADKTVKIWNSNGTSFKTLFTDTSDVRAVSYSPDGRLIATGNLNGGLNLWLAEGKWLRFIPAHVQRITGLSFSPDGQKIVTSSYDGTIKVWRINGKLIKTLTGHNDKVIDVAFSPDGKWIASASADKTVKVWRDDGILSKTLKGHTEQIESVTFSPNSQMIATASVDKTVKLWQLNGVLIRTVRGHTDGVYDVVFSQDGQTFATGSSDRTIMLWHVDGTLIRTLRGHSASVNSLSFGRSDRTLVTGGDDSNLRIWKLSNFNTSFQAFENPVRSIALGPQEQFLIAGGSDGTIKIWGNNGRQISTLRGHIRTVHDISISPDKKMIASAGWDKTIKLWHTSGELIQTLREHSRPVFSVAISPNGQYLVSAGADKNIIVWKADGTKLRVLKGHSSEVNRVFFTASGQEIISGGADGKLILWNIDGSKKRTIEDRGNSLRSLSISPDGRIIAVGSVDGHFKLWHKDGRLLWQTVAHETEIRSIAYSPDGALIATAAGNDIKLWKPNGTLFRILKSRAEAVNSVLFSSNSKIIYASDEKGQIITFSNWESRPDILIERGCEWLTNYLHSQRIAAKGDERLCKDSVAKQAAQSNPRFASTTFRSSAES

SEQ ID NO: 26940 - protein, 318 aa, Zea mays
RTRGPSNKSLFAPAPTRTLSPSLPFPLPGSHSHPFRLPTQTAHELTATSHVPHPLVHVLLLPMSPPLELDYIGLSPPAAAAAAENDELKGTELRLGLPGSGSPDRRVVAATATTLDLLPAKGAKRGFSDEAPPPSPVAAAGKGKKVAEEEYDEKKVAATPQPAAKAQVVGWPPVCNYRKNTMTATQLKGSKEDGDAKQGQGFLYVKVSMDGAPYLRKIDLKTYKNYKDLSTALEKMFSGFSTGKDGSSEYRKDGEYVLTYEDKDGDWMLVGDVPWDCHIVFRSNCRMFAGSCRRLRIMKGSDAIGLAPRAADKSKNRN

SEQ ID NO: 26941 - protein, 510 aa, Solanum tuberosum
MANIDIAGIMKDLPNDGRIPKTKIVCTLGPSSRTVPMLEKLLRAGMNVARFNFSHGTHEYHQETLDNLKIAMQNTQILCAVMLDTKGPEIRTGFLTDGKPIQLKEGQEITVSTDYTIKGNEEMISMSYKKLVVDLKPGNTILCADGTITLTVLSCDPPSGTVRCRCENSATLGERKNVNLPGVVVDLPTLTEKDKEDILEWGVPNNIDMIALSFVRKGSDLVNVRKALGPHAKRIQLMSKVENQEGVINFDEILRETDSFMVARGDLGMEIPVEKIFLAQKMMIYKCNLAGKAVVTATQMLESMIKSPRPTRAEATDVANAVLDGTDCVMLSGESAAGAYPELAVKIMSRICIEAESSLDNEAIFKEMIRCTPLPMSPLESLASSAVRTANKARAKLIVVLTRGGSTAKLVAKYRPAVPILSVVVPVLTTDSFDWSISDETPARHSLVYRGLIPLLGEGSAKATDSESTEVILEAALKSAVTRGLCKPGDAVVALHRIGSASVIKICVLK

SEQ ID NO: 26942 - protein, 658 aa, Lactococcus lactis subsp. lactis Il1403
MFDTTDQLAVNTIRTLSLDAIQKANSGHPGLPMGSAPMAYVLWSKFLNVNPKTSRKWSNRDRFVLSAGHGSAMLYSLLHLAGYNVTTDDLKGFRQWQSKTPGHPEVNHTDGVEATTGPLGQGIANAVGMAMAEAHLAAQYNKPGFDIVDHYTYALNGDGDLMEGVSQEAASLAGKLKLGKLILFYDSNNISLDGDLSMSFIDDIQKRFESYGWQHLLVKDGNDLEEIAAAVEVAKAEKSKPTIIEVKTVIGFGAEKQGTSAVHGAPLGAEGVAFAKKAYGWDYPEFTVPEEVSKRFLETTVARGEAMEQVWRSTFDDYSEKYPELAEQYAKAFENETPELTLTKHEMETSKASRVTSQEAIQELSAQMPNLWGGSADLSASNNTMVKVEEDFMPDNYAGRNIWFGVREFAMGAIMNGIALHGGTRVYGGTFFVFSNYMLPSVRMAALQSLPVTYVWTHDSIAVGEDGPTHEPVEQLASVRSIPNLDVIRPADGNEVVAAWRRAASSKSRPTALILTRQNLPVLPDTYELAEEGLNRGAYILSKEEGKLEGIIIATGSEVALALEAKKTLGSGIRVVSMPSMNIFDEQEAAYREEILPKDVRRRLAIEAGTSYGWGKYVGLDGATVTVDTWGASAPANIVLPAYGFTAENVVKAYKELD

SEQ ID NO: 26943 - protein, 704 aa, Bacillus sp.
MKNLTVLLKTIPLALLLFILLSLPTAAQADVTNKVNYTRDVIYQIVTDRFSDGDPSNNPTGAIYSQDCSDLHKYCGGDWQGIIDKINDGYLTDLGITAIWISQPVENVYALHPSGYTSYHGYWARDYKRTNPFYGDFSDFDRLMDTAHSNGIKVIMDFTPNHSSPALETDPSYAENGAVYNDGVLIGNYSNDPNNLFHHNGGTDFSSYEDSIYRNLYDLADYDLNNTVMDQYLKESIKLWLDKGIDGIRVDAVKHMSEGWQTSLMSDIYAHEPVFTFGEWFLGSGEVDPQNHHFANESGMSLLDFQFGQTIRDVLMDGSSNWYDFNEMIVSTEEDYDEVIDQVTFIDNHDMSRFSFEQSSNRHTDIALAVLLTSRGVPTIYYGTEQYLTGGNDPENRKPMSDFDRTTNSYQIISTLASLRQSNPALGYGNTSERWINSDVYIYERAFGDSVVLTAVNSGDTSYTINNLNTSLPQGQYTDELQQLLDGNEITVNSNGSVDSFQLSANGVSVWQVTEEHASPLIGHVGPMMGKHGNTVTITGEGFGDNEGSVLFDSDSSDVLSWSNTKIEVSVPDVTAGHYNISVVNAGDSQSPTYDKFEVLTGDQVSIRFAVNNATTSLGTNLYIVGNVNELGNWDPDQAIGPMFNQVMYQYPTWYYDISVPAEENLEYKFIKKDSSGNVVWESGNNHTYTTPATGTDTVLVDWQ

SEQ ID NO: 26944 - protein, 316 aa, Lactococcus lactis subsp. lactis Il1403
MTEFITLGEPLVVLASENQDISLDVAEHFSKYLAGAELNVAIGLSRLGHKGIYLSKVGEDSFGNFIIESVKKAEIETTYLTKDKNYSTGFYLKQKVSEGDPKVDYYRKNSAAANLSIAELKALDLSGIKIAHLSGIFPALSETSLKTFQAFNQKLNEADILTIFDPNLRPVLWDNQEKMIRTINDLAKQSQIILPGINEGEILTGSSEPEKIANFYLEQSPLTKIVVVKLGADGAFVKLKNGEQYFVSGFKVAKVVDTVGAGDGFAVGLESALLEGKTLKEAVKRACAVGALAVQSSGDSEGYPTKEELKAFYKEM

SEQ ID NO: 26945 - protein, 83 aa, Gibberella zeae
LEKAGLSLTSMDDQGVRVETIELKDHPFFVGLQAHPEYKSKTLAPAPSLLGLVAASSGCLDEIIEAAHKKQSSSNGVSDVTNF

SEQ ID NO: 26946 - protein, 462 aa, Burkholderia vietnamiensis G4
MSHSGLTRTAAAPPSLSRHAVDTARLAAPLAIAQLSQMAMSVTDTVLLGSLGPDSLAAGGLGANFFFVIVTVLQGVLSSVSVSVAHARGAQAEHRVPHIYWTGFVLSVLLAIPAVVALSLSEPLLLMFHEPPTLAQHVGEYTGILRFAALGSLIGVGLMRAFLPAIGAARRLLWVSIGGIGVNAVLNYGLIHGAYGLPRLGFLGSAVATTITIWLTAFALIWLLHGRARFRHFVSAARPKLPMMGELIGIGWPVAITYGVESTLFLATGLTVGVLGATALAAHQIALNVASVAFMVPLAIGQAANVRVGYWIGAGDPVAARHAGFVALGLGVAFMSLSGLVLILAPHAIVGLYLHLDDPANAATVSLAASLLGIAAVFQIVDGMQTVGSGALRGLRDTRIPMLAATFGYWGIGFPTGYWLAFHAGLGARGLWWGLAAGLASVAVLMAWRFHLKTSSLIAAPR

SEQ ID NO: 26947 - protein, 234 aa, Listeria monocytogenes EGD-e
MSAYLAEFIGTMVLIMFGNGLLAGLTLNKSLSQGANWVVVTFGWGFAVMIGIYVAGAYSGAHLNPAVTIALAVGGSFPWADVVPYIIAQIAGAFVGASIVILHYYPHFKATPPEIDTHGIFSTGPAIRNTPFNLISEIIATFAFIFGLLMIGANSFTDGLNPLILGFLVVAIGMSFGPTTGYAINPARDLGPRLAYFLLPVPNKSGSDWRYAWIPIVGPIIGGLLAIGLFNILL

SEQ ID NO: 26948 - protein, 338 aa, Morganella morganii
MIMKALVLEKAGKIAIQDWQSNEVLGDDDVEIKIHTVGICGSDVHYYQHGRIGPFVVDEPMVLGHEASGVITAAGKNVKHLKVGDRVCMEPGIPDLQSPQSRAGIYNLDPAVRFWATPPIDGCLRESVIHPAAFTFKLPDNVSFAQGAMVEPLAIGMQSATKAGIKPGDIGLVIGAGTIGIITQSALAGGCSDVIICDVFDEKLKVAEKYQGLHAVNSKDQQALADKVRELTGGEGVNVLFECSGAKPVIASISDHIAPGGTAVLVGMPIDPAPLDIVAAQAKEVTFKTILRYANMYPRTIRLLSSGKLNVAPLLSATYKFKDSVEAYERAAEPVRLM

SEQ ID NO: 26949 - protein, 161 aa, Pseudomonas aeruginosa UCBPP-PA14
MSDSLLSIPCTTIKGEQKTLADFGGKALLVVNTASKCGFTPQYQGLEALWEKYRERGLVVLGFPCNQFGKQEPGDEGEISQFCELNYGVSFPLFRKIEVNGAGAHPLFVSLKKRALGLLGSQGIKWNFTKFLIGRDGQVVKRYAPTTKPEELSSAIEALLE

SEQ ID NO: 26950 - protein, 246 aa, Glycine max
MAKIALGSTREATQPDCIQALIVEFIATFLFVFVGVGSSMVVDKLGGDALVGLFAVAVAHALVVAVMISAAHISGGHLNPAVTLGLLAGGHITIFRSMLYWIDQLVAAATASYLLYYLSGGQATPVHTLASGVGYGQGVVWEIVLTFSLLFTVYATMVDPKKGALAGLGPTLVGFVVGANILAGGAYSAASMNPARSFGPALVTGNWTDHWVYWVGPLIGGGLAGFIYETFFIDRSHVPLPRDEES

SEQ ID NO: 26951 - protein, 330 aa, Bacillus licheniformis ATCC 14580
MIMPITKKKIPVAILTGYLGAGKTTLLNRILTEKHNQKIAVIVNEYGEVGIDNQLVVDSEEEILEMNNGCICCTVRGDLIRILRTLVFSMDQGKVAFDRVLIETTGLADPAPVAQTFFMDELLSEIFEVDSIVTVVDSKHVTRHLDDQDEAQEQIAFADVIILNKTDLVSNNELKSLEQRLVNINPTAKRLYARDCKVNLRDILGINTFDVNRKIEIDPHFLEDHHHHHHDDKVSSIAFREEKPLDLAKVDHWMSYLVREKGEDLLRYKGILYIKGEEYRIVFQGLHMLFSGRPDRKWNENEKKQSELVFIGKDLDKEELERQFKNCIAK

SEQ ID NO: 26952 - protein, 368 aa, Haloarcula marismortui ATCC 43049
MSVLQRDPTDRVQILDEDGTVVDGATVPDLSDDELVEMYRYLKLGRHFDQRAVSLQRQGRMGTYPPMSGQEASQVGSAFALRDGDWAFPSYREHLAMYVKGWPLSDDLLYWMGSESGNSPPEDVQAFSFAVPIATQIPHATGAAWASKLKGDDTAALVYFGDGATSEGDFHEGLNFAGVFDVPAVFFCNNNQWAISVPRERQSASETLAQKANAYGFDGVQVDGMDPLAVYQVTREAVDKAHDPPAGELRPTMIEAVQYRFGAHTTADDPSVYRDDSEVERWKQKDPIPRMEAFLRDRGLLDDERVDAIDESVQDEVATAIDEAEATERPKPEEMFADVYAEMPQRLEQQLDYLEELRARHGDEVLLE

SEQ ID NO: 26953 - protein, 554 aa, Lactobacillus gasseri
MILTKNKRKERKHGMTKYIFVTGGVVSSLGKGISASSLGRLLKNRGLKVTMQKFDPYINIDPGTMNPYQHGEVYVTDDGTEADLDLGHYERIVDVRTSKYSNVTTGKIYQEVLDKERRGDYHGATVQVIPHITDMIKKKIMRAALTTDSDVIISEIGGTVGDIESTPFMEAIRQMRREVGEENVMYIHCTLVPYLHAAHEMKTKPTQHSVAELRSIGIQPNMLVLRAEKPVPQDLKNKISTFTDVPVDRIIESIDAPSLFDLPLAFQAQGMDQKVCDFLHLESPKPEADMEAWKKLDERAKNLKHETTITLVGKYVELEDAYISVTDALQHAGYLYDTKIKVNKVQAEDITEDNIAEIMKGSDGLIVPGGFGTRGLEGMITSIKYAREHDIPFLGICLGMQMASVEFARDVLGLKDANSAEADPETKNNIIDIMADKRDEENIGGTLRLGLYPATLKKGTKTRAAYDDQDVIQERHRHRYEFNNDYREAFEKAGMVFSGVSPDNHLVEIIEIPDKKFFIAAQYHPEFLSRPQRPEGLFKAFIGAASGLPAQHFN

SEQ ID NO: 26954 - protein, 753 aa, Escherichia coli CFT073
MSQHNEKNPHQHQSPLHDSSEAKPGMDSLAPEDGSHRPAAEPTPPGAQPTAPGSLKAPDTRNEKLNSLEDVRKGSENYALTTNQGVRIADDQNSLRAGSRGPTLLEDFILREKITHFDHERIPERIVHARGSAAHGYFQPYKSLSDITKADFLSDTNKITPVFVRFSTVQGGAGSADTVRDIRGFATKFYTEEGIFDLVGNNTPIFFIQDAHKFPDFVHAVKPEPHWAIPQGQSAHDTFWDYVSLQPETLHNVMWAMSDRGIPRSYRTMEGFGIHTFRLINAEGKATFVRFHWKPLAGKASLVWDEAQKLTGRDPDFHRRELWEAIEAGDFPEYELGFQLIPEEDEFKFDFDLLDPTKLIPEELVPVQRVGKMVLNRNPDNFFAENEQVAFHPGHIVPGLDFTNDPLLQGRLFSYTDTQISRLGGPNFHEIPINRPTCPYHNFQRDGMHRMGIDTNPANYEPNSINDNWPRETPPGPKRGGFESYQERVEGNKVRERSPSFGEYYSHPRLFWLSQTPFEQHHIVDGFSFELSKVVRPYIRERVVDQLAHIDLTLAQAVAKNLGIELTDDQLNITPPPDVNGLKKDPSLSLYAIPDGDVKGRVVAILLNDEVRSADLLAILKALKAKGVHAKLLYSRMGEVTADDGTVLPIAATFAGAPSLTVDAVIVPCGNIADIANNGDANYYLMEAYKHLKPIALAGDARKFKATIKVADQGEEGIAEADSADGSFMDELLTLMTAHRVWSRIPKIDKIPA

SEQ ID NO: 26955 - protein, 415 aa, Arabidopsis thaliana
MSPAIKAPLLPNQEPSSSSSENHGSFAGAVFNISTSIVGAGIMAIPAAFKVLAGFLMKSSLAGESTTYAGVMKESFGKSGAVAVTVVTMVVTFGSMIIFSIIIGDVISGNEKDGIIHLGLLQEWFGSHWWNTRFFERLAFSSAISFLLALLFVVISSVLAIIALVQGKTKPPRLFPELNDGGLSFFSLFTASPVIVTAFTFHFNGKKPRTKNFMVIAVHPVAFELKDPLNVLSATRISVILCATIYSATGLFCYLLFGDSTMTDVLMNFDQSTSSSVGSLLNDIVRLSYAIHLMLVFPLLNFSLRANLDELLFPMKLSLVEDNKRFFALTFPLLISCFLGAIAIPDIWYFFQFLGSTSTVSIAFIFPAAIVLRNVNGFSTLREKIVASVMLVLAVATSIIAISTNIYTFTATEET

SEQ ID NO: 26956 - protein, 507 aa, Populus tremula x Populus tremuloides
MACSASDLAPLLSSTVNSTEAATYLCSQFTSISNHLSDTSYAVNNTYLLFSAYLVFAMQLGFAMLCAGSVRAKNTMNIMLTNVLDAAAGGLSYYLFGYAFAFGSPSNGFIGRHFFGLGDFPSPQADYSFFLYQWAFAIAAAGITSGSIAERTQFVAYLIYSTFLTGFVYPVVSHWLWSGDGWANPAKSDNNLLFGSGAIDFAGSGVVHMVGGIAGLWGALIEGPRIGRFDHNGRSVALRGHSASLVVLGSFLLWFGWYGFNPGSFLIILKSYGGGAGGYYGQWSAVGRTAVTTTLAGSTAALTTLFGKRLLSGHWNVIDVCNGLLRGFAAITAGCSVVEPWAAIICGFVAAWVLIGCNKLAEKLQYDDPLEAAQLHGGCGMWGLLFTGLFAKKAYVNEVYSNKPGRPYGLFMGGGGKLLAAQIIEILVIVGWVSATMGPLFYGLHKLKLLRISSEDEMAGMDLTRHGGFAYAYDAEDDVSGKPSFMMRKVLPANNTTPNENSPSINV

SEQ ID NO: 26957 - protein, 218 aa, Haloarcula marismortui ATCC 43049
MSVPPAAVCFDMDGVLVQSEDHWVRAQREDILPTAAPNDDIPLSAITGRNYREVYPDLNAEYDLEISREVFEGLFEEHGERIYGDEATFLDGAHDLLNDLRDAGVALALTTSAPWAWIDVADERFDLLSKFDVAISAGDIDGPGKPEPDIYERGAAELGVAPEDCWAVEDSTAGARAAVAAGMTTVGFRGDGDETDLSMVHETADDAASLRQVLLGGV

SEQ ID NO: 26958 - protein, 1859 aa, Cryptococcus neoformans var. grubii
MLPSSQQTTVAGPLPATPDQLSLRRRHPSSKQGTPRNLDSPSRCKPSPSEPARRGKPTFFSSMHFSQALPQPIPSMIPDEPRSELQRSQRRSKVEALTKIDRTGTPIQSAAGPAATSFVPHTIQKSTSSPSAPHYLRNPLHRPKVFNQPFSIDSVRTKAPRHPHPRTEPRLFGLEDCPTFYPTPEQFKDPMAYIDSIAQQGKKYGMCKVVPPEGWHMPFRLETETFRFKARLQRLNQLEAASRAKLNFLEQLSMYHMQQGDSKIHIPLIDRQPLDLWKLRREVNRSGGNLELDRTKGWSKITETLGHKPSWTPHVRAAYMNIVLPFDNWAVRAKSASVSPLARLNPRTSGSPSKPPPPFVNDNFSASPVKQGRGISRRDITPYHPTLKIRSNGMPFVSPPDNGRPLSKRASVNCGSALADAIEIDQPSSLSTAPSATPNTPTTLRINVPGFSDLEGSDSELSDEDSALSSPSIRKALSEAEYQKGEVCEICKAEHDADKILLCDGCDRGFHIYCLDPPLASVPTNEEWYCTSCLLSQGEDFGFEEGDEHSVASFQARDAAFSYAWWNRHVQHNSSWTSINEAQPTDNGDSERIKPRQLGKVTVSEDDVEREFWRLTESSLDTVDVEYGADIHSTSHGSAGPTLETHPLDPYSRDPWNLNNISILPDSLLRYIKSDISGMTVPWIYIGMMFSTFCWHNEDHYTYSINYMYWGETKTWYGIPGSDAEKFETAIKSEAPDLFEQQPGLLFQLITMMNPGRLSDAGVKVVACDQRPNEFVITFPKAYHCGFNHGINMNEAVNFALPDWLPDGKDSVRRYREHNKAPVFSHNELLITITLFSETIRTALWLKNALIEMVEEESARRGALRAKHPKLVEDLIEEDCPEEQYQCAVCKAFCYLAQVTCSCTSQVSCLSHADQLCTCGKPRKVLRMRYSEAQLEDIRDVVVHRAALPEQWRLRFLSLMGSPRPQLKSLRILVSEGERIAHPIPDLGPLKRFVDVATSLIQHIMAVTARKSGGRRKKASRGDGNRKGKRTRAERDDGEDDGIDRGPDVLTSLLKQADRLAFDAPELPQLRQLMLTIEDFRTEASSLLVTPEDQLDRQRCKNALILGQSFGLNFPELPPLERLVQRQEWFRQLEEEVDDANMEYDDVVALLEESLECQIPQDHVMVKELRVREGKGKQWLESVEKLLASSQITIDDISALIEARQHVPVSIDILRKLESLRKSAVSWQTSARNVFATNRSSVAAFRLCKSIAAASKPLSNVVIPEIRELQAELEHHALWREEASKVLGVPVASLVSTIDYIRSEFENSLAPDDDAHNNQRVCFCRSSPTDNMIMCKICQHSYHPRCVDVSLRHVPEEFKCAMCQRLPNDDGPSLDAFIGLISTQRWNFLISPSEFEPAQYIASAAIRYAPQAFRLADPLNLSPPCRDLELLRHTIRKIYTLPLVFDAHNSQTNERCVFVNWLFRRMQDAVRMETKEIPMLAVGLQSKIGRRPSVALAAEQFTLVNSENGTPSRRARPRRRARIILAESHPHEFHCLCGMPSADENTSAQIECPKCGQGYHAGCVKVTEELAGKSIWACPCCTVRDGRHYQKGAEVRVQLSSHRGTDQFLDYRTIINDFAERLIVVTKPISAGAITLECIDFVPAHIPNDVKTVEERENSLNRIKKRKFGGVNGVFRNEQATNNLVAHGLNTVATKGFMGPPSTILNPKQTTSSGISDSSVAMSALSDIQTKSSAVPRTIYTAAESDANTSVPWLTPTIQNRSTFDLRSDFGLESCSSSTPVAVGASTTSVVRQNGGTPSAATICCEGRVTPVVGKSVHDDNIDSRAGYKERYSYSDMEELIAVKEGRHVVDEDVTMENQ

SEQ ID NO: 26959 - protein, 246 aa, Triticum aestivum
  misc_feature (148)..(148): Xaa can be any naturally occurring amino acid
  unsure (1)..(246): unsure at all Xaa locations
MSPPLELDYIGLSAAAGGRPDDDLKGTELRLGLPGCESPDRRPVAATTTLELLPAKGAKRGFSDEVVPPAPISAAGKGKEASGDEKDKKVAAPPQPAAKAQVVGWPPVRSYRKNTMATTTNQLKSSKEDSDTKQGQEFLYVKVSMDGXAPYLRKVDLKTYKNYKDMVVALGKMFIGFRTGKDGASENRKDGEYVMTYEDKDGDWMLVGDVPWEMFTEACRRIRVMKSSDVVGLGVTRAGVKSKNKN

SEQ ID NO: 26960 - protein, 411 aa, Vitis vinifera
MNALAATNRNFRHASRILGLDSKLEKSLLIPFREIKVECTIPKDDGSLATYVGFRVQHDNARGPMKGGIRYHPEVDPDEVNALAQLMTWKTAVVDIPYGGAKGGIGCTPKDLSMSELERLTRVFTQKIHDLIGTHTDVPAPDMGTNAQTMAWILDEYSKFHGHSPAVVTGKPIALGGSLGREAATGRGVVFATEALLAQHGKSIKGLTFVIQGFGNVGSWVARLIGERGGKIIAVSDVTGAVKNQNGLDIVDLLRHKEETGCLTNFSGGDHMDPNELLTHECDVLIPCALGGVLNKENAADVKAKFIIEAANHPTDPEADEILSKKGVVILPDIYANAGGVTVSYFEWVQNIQGFMWEEEKVNNELQKYMTKAFHNIKAMCQSHNCSLRMGAFTLAVNRVACATTLRGWEA

SEQ ID NO: 26961 - protein, 247 aa, Zea mays
MMDHQLFDDPFGSSISSLEAEIFSAAAQLPPSPPWPDIDLDDDYDIHDLSAPAANAATSSGGGYGSGGSGGHRKLSHNAYERGRRKQLNELYSSLRSLLPDADQTKKLSIPTTVSRVLKYIPELQKQVDNLERRKKELTNANCKPGVLKTTKAVTPIVSATCLNDTEIMVQVSLHSDVAATALPLSKCIKVLENEGLHLVSSSTYSSAFENKTFYSLHLQRSQRTMKEECPAFCEQLEKIVRKKAGA

SEQ ID NO: 26962 - protein, 436 aa, Bordetella pertussis Tohama I
MIWLRTLFMIAFWAVMALLAQWLIGDPAGWLLFGAATAAMLLWRSWRLHLVSRWAHDPESAPPAAVGPWDDILAPLYRYTRARARELAETRETMQSMLAAAQALPDGVVTLNEDFQIDWANRMARRHLGLRLPADRGHNLLNLLRAPEFVAYAHRGHWPEPILVRLSLNGQERVMMIHLAGYASNQRLLISRDVTQIERLETTRRDFVANVSHELRTPLTVLAGFLETLRELPAEALPAEQRDQYMAMMHEQARRMQAIVEDLLTLSTLESSPEADPLAVDVGALLRTARQQVEALSNGRHVFEWQIEEGLDVLGSGTELASALSNLLTNAVRYTPDGGRIIVRWRRGADGEALYSVQDTGIGIPARHLPRLTERFYRVDRGRSRAAGGTGLGLAITKHIAMRHDADLLIDSELGKGSTFTLRFPAERVTGEDPDR

SEQ ID NO: 26963 - protein, 545 aa, Desulfurococcus
MAQLAGQPVVILPEGTQRYVGRDAQRLNILAARIVAETIRTTLGPKGMDKMLVDSLGDIVITNDGATILDEMDIQHPAAKMMVEVAKTQDKEAGDGTTTAVVIAGELLKKAEELLDQNIHPSIIIKGYALAAEKAQEILEGIAKEVSPDDVETLKKAAVTSITGKAAEEEREYLAEIAVEAVRQVAEKVGDKYKVDLDNIKFEKKEGASVHETQLIRGVVIDKEVVHPGMPKRVENAKIALINDALEVKETETDAEIRITSPEQLQAFLEQEERMLREMVDKIKEVGANVVFVQKGIDDLAQHYLAKYGIMAVRRVKKSDMEKLAKATGAKIVTNVRDLTPEDLGEAELVEQRKVAGENMIFVEGCKNPKAVTILIRGGTEHVVDEVERALEDAVKVVKDIVEDGKILPAGGAPEIELAIKLDEYAKEVGGKEQLAIEAFAEALKVIPRTLAENAGLDPVETLVKVIAAHKEKGPTIGVDVFEGEPADMMEKGVIAPLRVPKQAIKSASEAAIMILRIDDVIAASKLEKDKEDKGGSNDFGSDLD

SEQ ID NO: 26964 - protein, 387 aa, Methylococcus capsulatus str. Bath
MTFDPASALAEIKARDAYRWRRIVESPQDTRVVIDGAPRVNFCSNDYLGLANHPAVREAFRRGVDRWGVGSGASHLVCGHSAAHHALEEELAEFTGRPRALLFSTGYMANLGVVSALAGRGDTVFEDRLNHASLLDGGLLSGARFRRYRHADARALEAALAESRAETRLVVTDGVFSMDGDLAPLPELARVARDGRAWLMVDDAHGLGVLGAEGRGTLEHFGLGAPEVPVLVGTLGKALGTFGAFVAGSESLIDYLIQRARTYVYTTALPPAVAEATRVSLRLVREEPERRERLRCNVRRFRAGAASLGFGLGDLPGPIQPLVIGANADALEASRRLGERGFLVSAIRPPTVQAGTARLRITLSAAHSNEQIDGLLEALADAVPQEA

SEQ ID NO: 26965 - protein, 1017 aa, Alkalilimnicola ehrlichei MLHE-1
MPESLRVVIAEPDPAIQERITRALQGPGHTVVGRASHPLELIAEVERSAPDVVLARDTWPAEGDEHRGPLPCAPHVPVVVWVPEPDARPPDRDYPPEGAAAVLAGALEEDALAAALATAVARGREQHRWRRHALALTRENTLLRVLARCNQAVIRARSEQTLLQEATHLLARDAGYELVCVLGAGRAGGPVERLAAAGEEQGYLDCLTGDQGFNVRSHGPAGAALRSGQTTVLRELAQRRSPRPWRIEAVRCGFSAICALPLVAGRGGEGPVFGVLVIHSRDPSALDAAAVRVLDNLAANLSHGVWAQRLRGRQRRMRSELRKHARATENSPVSVLITDAEARIEYVNPSFTRLTGYAPEEVIGRDPRMLGSGHTPPEVYRELWETVRAGRTWQGTVQNRRKDGQLIWERQVISPLRAADGTITHFVAVREDITESKRAESAIRLRERALESTANGILISDLRLRDNPIVYVNPAFERITGYPRDEVVGRNGRFLVRDDKDQPGLEEIRSALRSRREAHAVIRNYRKDGTLFWNELFVAPVREDDGAVHYMVSVINDVTERKRYQAELEQRTHYDALTGLPNRNLLVDRLHQALLYARRSGRHVALLNVDLDRFQIINESLGHAAGDQLLRTVADRLTAALRGFDTVARMGGDEFNIVLTELRNTRDAELLAGELQEALAPSISVTGQDVFLSVSVGYTVFPDDGDGPEDLIRRASVAMHEAKRQGGGVIIRYSERSEPRQINRLTLESDLQRAIERGELRLHLQPQVDLDTGAMSGAEALLRWEHPRHGLVSPMQFIPLAEEVGLIIPMGRWVLETVATQLAHWQQQGLPVVPVALNISARQFLHAELVEDVRQILEGHGVAPSLLELELTESLMARNPEVAVQILRELKAMGLRLALDDFGTGYSSLAHLKRFPIDTLKIDQSFVRHVNEDGDDAAIINATIRMAHSLGLNVVAEGVEREDQLEHLKRQRCDYAQGYFFSRPLSLERFAARLAGDESGPDPAPAEAGAPGARTMP

SEQ ID NO: 26966 - protein, 160 aa, Oryza sativa (japonica cultivar-group)
MGAASSSSSSSSSSPSPQGQAQAQAQGKPNYSTSLTDEEWRKRLTKDQYYITRQKGTERAFTGEYWNTKTPGIYHCVCCDTPLFESSTKFDSGTGWPSYYQPIGDNVKCKLDMSIIFMPRTEVLCAVCDAHLGHVFDDGPRPTGKRYCINSASLKLKKTQ

SEQ ID NO: 26967 - protein, 159 aa, Clostridium histolyticum
MNHKKEKEYKKLDTEKLKENLTELQYNVTQRNATEKPFLNKYDKHFEDGIYVDIVSGEPLFLSIDKFNSGCGWPAFSKPISRKYIKERADFSHGMSRIEVRSKNADSHLGHVFNDGPIENGGMRYCINSASLKFIAKDKLKEEGYEEFLPLFEKDKQEL

SEQ ID NO: 26968 - protein, 350 aa, Novosphingobium aromaticivorans DSM 12444
MIFDGSSERRGSILVTGGAGYIGSHAVLALLDAGWPVIVLDNLTTGFRWAVDPRASFVEGDVTDSALVRSILTYHEVAAIMHFAGSVVVPESVVDPLKYYGNNTAATCSLLRNAVDCGVPHIVFSSTAATYGSPDVAQVCENTPTRPINPYGRSKLVVEAMLADAAAAYPINYCALRYFNVAGADPAGRTGQSTAGATHLIKVCVEAALGRRELVEVYGTDYDTHDGTGVRDYIHVSDLADAHVHALHLLMDDPEASHTMNCGYGTGFSVLDVLDAVERISGREIRRVMRPRRPGDPAALIADNNLILSRTRWRPRHARLGDIVRHALAWEDQLARRKPGQPVGQREIAA

SEQ ID NO: 26969 - protein, 257 aa, Zea mays
MQIFVKTLTGKTITLEVESSDTIDNVKAKIQDKEGIPPDQQRLIFAGKQLEDGRTLADYNIQKESTLHLVLRLRGGMQIFVKTLTGKTITLEVESSDTIDNVKAKIQDKEGIPPDQQRLIFAGKQLEDGRTLADYNIQKESTLHLVLRLRGGMQIFVKTLTGKTITLEVESSDTIDNVKAKIQDKEGIPPDQQRLIFAGKQLEDGRTLADYNIQKESTLHLVLRLRGGMQIFVKTLTGKTSRWEVESSGHIDTSRAD

SEQ ID NO: 26970 - protein, 561 aa, Magnaporthe grisea 70-15
MTSLRDIIIAAFKSLTRGKSFIRALLAFWISPNVIKECQESNDGSSSPRLLEDFLLEVEHLLSQPIEPAALLGFSGNLKKQFRQRLWSNRACMLPSYNYQLPNGSEQGRYLSVDVGGSTLRVALVELKGLEEGGYDGCSRIVRIDNFRIDVGVKALVGRAFFDWMAARILETLKSASEGGQNNKEEFNGSPQAPIPMGLAWSFPIEQTSLKGGLLQNMGKGFLAADGLLGQDLGEIVKQACSGHNLHVEVAAIINDSSAALLSESYRRPSTRFGLILGTGFNIAAYMPVTTIERPKFGVRPASWFEKASHVIVNTEMGMFGQGFLPMTRWDEQLKAAHPKPEFQPLEHFVAGLYIGELARLIMIDAIETTGLFGGVVPPSLVGPYTLETETLSILESDDSVNLENALAAFTSRHPSSQKPIVSDILALRTISKLVTRRSAALVAAALYGLWELKRETENEYLEPQETVKSTDMPFAQETRAELDLGRVVVGFNGSVIEQYPGYRTNCQIYIDALFKRSQEQLSQGGGLSREEALIELVPAKESSLLGAAVALACLERGKAN

SEQ ID NO: 26971 - protein, 157 aa, Aquifex aeolicus VF5
MSFEYNEKVLDHFLNPRNVGVLEDANGVGQCGNPACGDAMLFTIKVNPENDVIEDVRFKTFGCGSAIAVSSMLTEMVKGKPIQYALNLTYKDIFEELGGLPPQKIHCTNLGLETLHVAIKDYLMKQGRVEEASKIPDCYEEEEEQEESKEFEFLSGT

SEQ ID NO: 26972 - protein, 183 aa, Glycine max
MGSKKTYEEEESTALFSHSQTQTDLLLPFNENDPQDMVIYQVLHEANALTNTFLPQPTRNITKKHYRGVRRRPWGKYAAEIRDSARHGARIWLGTFQTAEEAAMAYDRAAFKMRGSKALLNFPAEIVAAATATELSFKSSSNNNNNNNNNNPDAVSDSSAGSSCTNNSTWVNRNQSEITSGTG

SEQ ID NO: 26973 - protein, 294 aa, Zea mays
MEQYEKVEKIGEGTYGVVYKALDKTANETIALKKIRLEQEDEGVPSTAIREISLLKEMNHGNIVRLHDVVHSEKRIYLVFEYLDLDLKKFMDSCPEFAKNPTLIKSYLYQILHGVAYCHSHRVLHRDLKPQNLLIDRRTNALKLADFGLARAFGIPVRTFTHEVVTLWYRAPEILLGARQYSTPVDVWSVGCIFAEMVNQKPLFPGDSEIDELFKIFRILGTPNEQSWPGVSCLPDFKTAFPRWQAQDLATVVPNLDPAGLDLLSKMLRYEPSKRITARQALEHEYFKDLEVVQ

SEQ ID NO: 26974 - protein, 271 aa, Oryza sativa (japonica cultivar-group)
MKIQCDACESAAAAVVCCADEAALCAACDVEVHAANKLAGKHQRLPLEALSARLPRCDVCQEKAAFIFCVEDRALFCRDCDEPIHVPGTLSGNHQRYLATGIRVGFASASPCDGGSDAHDSDHHAPPMGSSEHHHHHQQPAPTVAVDTPSPQFLPQGWAVDELLQFSDYETGDKLQKESSPPLGFQELEWFADIDLFHNQAPKGGAAAGRTTAEVPELFASQAANDVAYYRPPTRTAAAAFTAATGFRQSKKARVELPDDEEDYLIVPDLG

SEQ ID NO: 26975 - protein, 698 aa, Arabidopsis thaliana
MDMNDSQKKYSFLLMIFCLGSEIGFQREQTRPSLNTVLKNVRRGLKKPLSFGSHNKKRDSNSSTTTQKNIINPQGSFLQNWNKIFLFASVIALAIDPLFFYIPIVDGERHCLNLHRNLEIAASVLRTFIDAFYIIHIVFQFRTAYISPSSRVFGRGELVDDPKAIAIKYLSSYFIIDLLSILPLPQLVVLAVIPNVNKPVSLITKDYLITVIFTQYIPRILRIYPLYTEVTRTSGIVTETAWAGAAWNLSLYMLASHVFGALWYLISVEREDRCWREACEKIPEVCNFRFLYCDGNSSVRNDFLTTSCPFINPDDITNSTVFNFGIFTDALKSGIVESDDFWKKFFYCFWWGLRNLSALGQNLNTSKFVGEIIFAVSICISGLVLFALLIGNMQKYLESTTVREEEMRVRKRDAEQWMSHRMLPDDLRKRIRRYEQYKWQETRGVEEENLLRNLPKDLRRDIKRHFCLDLLKKVPLFEIMDEQLLDAVCDKLKPVLYTENSYAIREGDPVEEMLFVMRGKLMSATTNGGRTGFFNAVYLKPSDFCGEDLLTWALDPQSSSHFPISTRTVQALTEVEAFALAADDLKLVASQFRRLHSKQLQHTFRFYSVQWRTWGASFIQAAWRRHCRRKLARSLTEEEDRFRNAITKRERNAASSSSLVATLYASRFASNALRNLRTNNLPLLPPKPSEPDFSLRNP

SEQ ID NO: 26976 - protein, 294 aa, Zea mays
MEQYEKVEKIGEGTYGVVYKALDKTANETIALKKIRLEQEDEGVPSTAIREISLLKEMNHGNIVRLHDVVHSEKRIYLVFEYLDLDLKKFMDSCPEFAKNPTLIKSYLYQILRGVAYCHSHRVLHRDLKPQNLLIDRRNNALKLADFGLARAFGIPVRTFTHEVVTLWYRAPEILLGARQYSTPVDVWSVGCIFAEMVNQKPLFPGDSEIDELFKIFRVLGTPNEQGWPGVSCLPDFKTAFPRWQAQDLATIVPNLEPAGLDLLSKMLRYEPSKRITARQALEHEYFKDLEMVQ

SEQ ID NO: 26977 - protein, 710 aa, Thermoanaerobacterium thermosulfurigenes
MKKTFKLILVLMLSLTLVFGLTAPIQAASDTAVSNVVNYSTDVIYQIVTDRFVDGNTSNNPTGDLYDPTHTSLKKYFGGDWQGIINKINDGYLTGMGVTAIWISQPVENIYAVLPDSTFGGSTSYHGYWARDFKRTNPYFGSFTDFQNLINTAHAHNIKVIIDFAPNHTSPASETDPTYAENGRLYDNGTLLGGYTNDTNGYFHHYGGTDFSSYEDGIYRNLFDLADLNQQNSTIDSYLKSAIKVWLDMGIDGIRLDAVKHMPFGWQKNFMDSILSYRPVFTFGEWFLGTNEIDVNNTYFANESGMSLLDFRFSQKVRQVFRDNTDTMYGLDSMIQSTASDYNFINDMVTFIDNHDMDRFYNGGSTRPVEQALAFTLTSRGVPAIYYGTEQYMTGNGDPYNRAMMTSFNTSTTAYNVIKKLAPLRKSNPAIAYGTTQQRWINNDVYIYERKFGNNVALVAINRNLSTSYNITGLYTALPAGTYTDVLGGLLNGNSISVASDGSVTPFTLSAGEVAVWQYVSSSNSPLIGHVGPTMTKAGQTITIDGRGFGTTSGQVLFGSTAGTIVSWDDTEVKVKVPSVTPGKYNISLKTSSGATSNTYNNINILTGNQICVRFVVNNASTVYGENVYLTGNVAELGNWDTSKAIGPMFNQVVYQYPTWYYDVSVPAGTTIQFKFIKKNGNTITWEGGSNHTYTVPSSSTGTVIVNWQQ

SEQ ID NO: 26978 - protein, 325 aa, Ralstonia eutropha JMP134
MTKAIRIEQTGGPEVMQWVDVEVGEPGPGEVRVRHEAVGLNFIDVYFRTGLYKQPLPGGLGMEGAGVVEAVGEGVAHLSVGDRVAYAGRPNGAYSQVRVMPADIVVRLPESISFEQGAAMMLQGLTVQYLIRDSYRVQAGDTVLLHAAAGGVGLIACQWLKALGVTVIGTVGSDEKAELARAHGCTHTVVYTRESFVDRVKEITGGKGVPAVYDSIGADTFRGSLDCLAPRGTMVSFGSASGPVPPFDISVLGNKGSLRLTRPTLMTYVVHRELLEPMVADLFDVVSSGKVKIDVRQRYALADVAQAHRDLESRKTTGSTILLPR

SEQ ID NO: 26979 - protein, 513 aa, Brassica napus
QTLSQLLDPTTAILIIVSLFIFIGLITRRRRSYPPGPRGWPIIGNMLMMDQLTHRGLANLAKKYGGLCHLRMGFLHMYAVSSPHVARQVLQVQDSIFSNRPATIAISYLTYDRADMAFAHYGPFWRQMRKVCVMKVFSRKRAESWASVRDEVDKMIRSVSSNVGKSINVGEQIFALTRNITYRAAFGSACEKGQDEFIRILQEFSKLFGAFNVADFIPYFGWIDPQGISKRLVKARNDLDGFIDDIIDEHMKKKENQNTVDDGDVGDTDMVDDLLAFYSEEAKLVSETTDLQNSIKLTRDNIKAIIMDVMFGGTETVASAIEWALTELLRSPEDLKRVQQELAEVVGLDRRVEESDIEKLTFLKCTLKETLRLHPPIPLLLHETAEDTEIDGYFVPKKSRVMINAFAIGRDPKSWPDAETFRPSRFLEPGVADFKGSNFEFIPFGSGRKSCPGMQLGLYALELAVAHILHCFTWKLPDGMKASELDMNDVFGLTAPKATRLFAVPSTRLICAV

SEQ ID NO: 26980 - protein, 660 aa, Salmonella typhimurium LT2
MPHIDREAPDSRSERQRPKYKYALALNVDSYTVDTNQTNKCGYRLMEQNPQSQLKLLVTRGKEQGYLTYAEVNDHLPEDIVDSDQIEDIIQMINDMGIQVMEEAPDADDLLLAENTTSTDEDAEEAAAQVLSSVESEIGRTTDPVRMYMREMGTVELLTREGEIDIAKRIEDGINQVQCSVAEYPEAITYLLEQYDRVEAEEARLSDLITGFVDPNAEEEMAPTATHVGSELSQEDLDDDEDEDEEDGDDDAADDDNSIDPELAREKFAELRAQYVVTRDTIKAKGRSHAAAQEEILKLSEVFKQFRLVPKQFDYLVNSMRVMMDRVRTQERLIMKLCVEQCKMPKKNFITLFTGNETSETWFNAAIAMNKPWSEKLHDVAEEVQRCLQKLRQIEEETGLTIEQVKDINRRMSIGEAKARRAKKEMVEANLRLVISIAKKYTNRGLQFLDLIQEGNIGLMKAVDKFEYRRGYKFSTYATWWIRQAITRSIADQARTIRIPVHMIETINKLNRISRQMLQEMGREPTPEELAERMLMPEDKIRKVLKIAKEPISMETPIGDDEDSHLGDFIEDTTLELPLDSATTESLRAATHDVLAGLTAREAKVLRMRFGIDMNTDHTLEEVGKQFDVTRERIRQIEAKALRKLRHPSRSEVLRSFLDD

SEQ ID NO: 26981 - protein, 374 aa, Oryza sativa (japonica cultivar-group)
MATPRTLVPILPPVAALLLLFVAASSIPILAAAQPADACGGAPDQAAADGACHDVPRALRLKLIAIPTILVSSVVGVCLPLLSRSVPALRPDGGLFAVVKAFASGVILATGYMHVLPDAFNNLTSPCLPRKPWSEFPFAAFVAMLAAVSTLMADSLMLTYYKRSKPRPSSGGDVAAVADHGESPDQGHRHGHGHGHGHGMAVAKPDDVEATQVQLRRNRVVVQVLEIGIVVHSVVIGLGMGASQNVCTIRPLVAAMCFHQMFEGMGLGGCIVQAEYGRRMRSVLVFFFSTTTPFGIALGLALTRVYRDNSPTALIVVGLLNAASAGLLHYMALVELLAADFMGPKLQGNVRLQLAAFLAVLLGAGGMSVMAKWA

SEQ ID NO: 26982 - protein, 387 aa, Bacillus subtilis subsp. subtilis str. 168
MRDSVFIYSPSYQTYMFHQEHPFNQQRVLLTYDLLKTINAFDDGDIVTPRLASEEELSLVHTDDYIQAVKLAGAGKLPAEEGESYGLGTEDTPVFAGMHEAASLLVGGTLTAADWVMSGQALHAANLGGGLHHGFRGRASGFCIYNDSAVAIQYIQKKYSARVLYIDTDAHHGDGVQFTFYDNPDVCTLSIHETGRYLFPGTGQIQEKGSGKGYGYSFNIPLDAFTEDDSFLEAYRTAASEVAAYFEPDVIISQNGADAHYYDPLTHLSATINIYEEIPRLAHTLAHQYCGGKWIAVGGGGYDIWRVVPRAWARIWLEMKGIDPGHEIPPEWIVKWQKQCPVALPSSWSDPADLYPPIPRKPEITEKNAQTVSKALYAIRSEQQRTK

SEQ ID NO: 26983 - protein, 260 aa, Arabidopsis thaliana
MGRAPCCEKVGIKRGRWTAEEDQILSNYIQSNGEGSWRSLPKNAGLKRCGKSCRLRWINYLRSDLKRGNITPEEEELVVKLHSTLGNRWSLIAGHLPGRTDNEIKNYWNSHLSRKLHNFIRKPSISQDVSAVIMTNASSAPPPPQAKRRLGRTSRSAMKPKIHRTKTRKTKKTSAPPEPNADVAGADKEALMVESSGAEAELGRPCDYYGDDCNKNLMSINGDNGVLTFDDDIIDLLLDESDPGHLYTNTTCGVMGSCIT

SEQ ID NO: 26984 - protein, 148 aa, Bacillus cereus ATCC 14579
MEKTFLMVKPDGVQRAFIGEIVARFEKKGFQLVGAKLMQVTPEIAGQHYAEHKEKPFFGELVDFITSGPVFAMVWQGEGVVDTARNMMGKTRPHEAAPGTIRGDFGVTVAKNIIHGSDSLESAEREIAIFFKEEELVDYSKLMNEWIY

SEQ ID NO: 26985 - protein, 99 aa, Zea mays
VKDVVSSVATVLSDLCGPGEWMPMAKLHNELLEQFGNVWHPSRVRKYLTQDDWSPTETKGRPWFGLLALLRKYPEHFVINTRSKGRMTSEFVSLVSLLS

SEQ ID NO: 26986 - protein, 369 aa, Averrhoa carambola
PDQMGLAENQLCFDLIEDWVKNNPKASICTPQGVDKFKEIANFQDYHGLPEFRQAVAKFMGRVRGNKVTFDPNRIVMSGGATGANETIIFCLADPGDAFLVPSPYYPAFNRDLGWRTRVQLIPAECDVSNGFKITRSALEAAYQKAQEANVNVKGLIITNPSNPLGTTLDRDTLKSLVSFINDKNIHLVCDEIYVATVFSSPRFISVAEVIEEMDCNRDLIHIVYSLSKDMGFPGFRVGIVYSYNDAVVSCARKMSSFGLVSAQTQYMLASMLSDEIFVEKFLAESPKRLAKRYNKFTKGFEEVGINCLNSNAGLYFWMDLRWLLKEQSNKGEIDLWRIIVNDVKLNVSPGSSSHCNEPGWFRVCFAAE

SEQ ID NO: 26987 - protein, 103 aa, Synechococcus elongatus PCC 6301
MAAVSLSVSTVTPLGDRVFVKVAEAEEKTAGGIILPDNAKEKPQVGEIVAVGPGKRNDDGSRQAPEVKIGDKVLYSKYAGTDIKLGNDDYVLLSEKDILAVVA

SEQ ID NO: 26988 - protein, 500 aa, Triticum aestivum
FNPTKGNKSWSSTACGGRSRTSGSPGLQEFGTSAATGAQCVLTSDASPADTLVLRTSFRRNYADPNEVAAVILGGGTGTQLFPLTSTRATPAVPIGGCYRLIDIPMSNCFNSGINKIFVMTQFNSASLNRHIHRTYLGGGINFTDGSVEVLAATQMPGEAAGWFRGTADAVRKFIWVLEDYYKNKSIEHILILSGDQLYRMDYMELVQKHVDDNADITLSCAPVGESRASEYGLVKFDSSGRVVQFSEKPKGDDLEAMKVDTSFLNFAIDDPAKYPYIASMGVYVFKRDVLLNLLKSRYAELHDFGSEILPRALHDHNVQAYVFTDYWEDIGTIRSFFDANMALCEQPPKFEFYDPKTPFFTSPRYLPPTKSDKCRIKEAIISHGCFLRECKIEHSIIGVRSRLNSGSELKNAMMMGADSYETEDEISRLMSEGKVPIGVGENTKISNCIIDMNARIGRDVVISNKEGVQEADRPEEGYYIRSGIVVIQKNATIKDGTVV

SEQ ID NO: 26989 - protein, 1230 aa, Cryptococcus neoformans var. grubii
MNGFMPALRLHHTHSSSVSPTASNDAASSSPTSSQPHQLAAYSPLYATSPNRGSKITKGSSLSSSTAHHGLKYVRPSTSPLLKPPKGKSFSEYLGDWGSQELFTFLDIHKCGQYLAIFQENDINGKILLDLDVTALKSMGIDKISERVRLIGGIKDLRKRIADETIRAPFIQRCYPPERTLLPSLPSHSNVFLDKWDYSSSASRLGKGQIAFRPPPLDLQGHMPRKLLPHASQGIATIDTHDIRTTKPKIEAYIQQNPLGQPQSVPTKRSDSLTLCAPPSRNVRRRSPSSRHFEGRESQTDGFTILNMASDRQVPSSTMNSVTLGEDCHLQREEGLPLFLKVPQFRNTFASSHKTLIAGRGPLTRGDTISHQPSGPAIAGQDSPVNYRISKTVTTTKEASQGDLEHPFAVKSIGSQLGLLVGVSGMAHDPVTDGSKSKGKTSVPLTGTSSSDISAVNANSAALSLADLRRQLVKFINTEDDTIRTVNVMHVTSGEEILERALKKFGKWGTGMHSSPDVYGDEDGDETLEIDGWEVYTERTPDESSKPLSESSLLKTCTFHREGTAIQDKGLFLRKKQRLQKRKNIQHFFGETLPPPMSPTSPTLITGPHLGIVQGKSQLASEPAFSSSNRLSTLTNKGPNRASMISVMSGLGVPVINTLPSPQGNGLCPTGSVHSHKKKSMYNFFGHRPPSELISNHLADYFPSAKKSDVEKARHSLLRLSGDTVAYKKNGIDEGDNAPDHWSKPGNNQPPSLPPFEPSQDTLSDSLQAYASSTPVYLSRPKHNVALRRRRDSDSSSRSHTSVLMQTRRNRDRSDTASLLTVDEITAEVENRRASTIPKGDYIEETEDSSFIEGDTLPEYEESKGLLRTVCSDSNSIVDSGKSFQRDSDVDQQQELEDEEEDELDDEEEEEEEEKEDEDEQGKAFTSTGSKRIIKWIKGALIGAGSFGSVYLGMDAQSGLLMAVKQVELSAGSVKSEDRKKSMLSALEHEIELLKELQHENIVQYLDSSVDTNHLNIFLEYVPGGSVAALLNNYGAFEEGLVRNFVRQILTGLNYLHMRGIVHRDIKGANILVDNKGGIKISDFGISKKVENSLISGLRTNRPSLQGSVFWMAPEVVKQTSYSPKADIWSVGCLVVEMLTGTHPWADLTQMQAIFRIGSLARPAPPSDISVQADEFLRKTFEIEHAKRPTAAQLLKDPFIDSPRVRTTASNFISEAIVSEKMEVQVVEEM

SEQ ID NO: 26990 - protein, 1049 aa, Emericella nidulans
MGGDVLRQTPSSLPRAPDAPVGQRIRSIYTDRLNQFTSRGQYQNQNLIGKLFEATNSDEDHVKISVYSVPDLQRPSFEEATSNEFQPTHIGASFGPSWSTHWFGIRLTIPEDMRERERLEFHWDANNEGLVWTEDGHPLQGLTGGGERIEWIIPDAWADGNEHVFYIEMACNGMFGNAPGGDSIQPPAPDKYYTLTTARITAVNLEARALFYDFWIISDAAREFPAEGWESHEANMVANSIIDAFIAGNGSLESIKEGRRIAQKYLGDKVDCSEVYDSGTQPIVYGIGHCHIDTCWLWPWAETKRKVARSWSNQCDLMDRYPEHRFTCSQAQQFKWLKQYYPSVFDRVKGWVKKGHFQPIGGSWVEHDTNMPSGESLVRQFIYGQRLFESKFGERCTTFWLPDTFGYSTQIPQLCRLAGMSRFFTQKLSWNNINNFPHTTFQWVALDGSQVMCHMPPSETYTAEAHFGDLKRSITQHKSLDKDNTSLLVFGKGDGGGGPTFEHLEKLRRCRGLSDKTGLLPRATMGTSVDDFFAKLEKKAADGTKFATWYGELYFELHRGTYTTQANNKRNNRRAEFLLRELEFLATIASITRSDYEYPKKDIDEMWEGVLLCQFHDCLPGSSIEMCYDDSDELYAQIFETGLRAREAALEALGFSMAGRVPVAINTLPWNRSEVVRLPADMATNGSMHALLNGGPGVIPHSQAIARVPEVSVTEIKPGVFRLNNGKLRVDVEDGLITYLYDIEADREVIAADGRAGQLVIFDDKPLYWQAWDVEVFHLDSRKELQSGKTTIAENNPYRVSVVTETKISEKSWVKTTISLAATEGNRPSYVELESEVEWQETMKFLKVEFPVDITNTEASYETQYGIIRRPTHYNTSWDMAKFEVCAHKWADLSENGYGVSILNDSKYGFATCGNLMRLSLLRAPKAPDAHADMGRHTIRYRIFPHSGPLDFRTVRAGYEFNHPLILDTSLALPDEQSVNAVSALFVKLNYRLSIFDLDVVKRGEDDEDIDGDPDISLPSSKRSGQSIILRIYESLGGKSRGAIRTALL

SEQ ID NO: 26991 - protein, 520 aa, Bordetella pertussis Tohama I
MNAMLTFLRLLRILLVSLRYGLDELVLSSLNHPLATCLLRIMRLGTRPRAPRGARLRMALESLGPIFVKFGQVLSTRRDLIPADIANELALLQDRVPPFPSAQAAACIEAALGAPPAQLFAQFDVDPVASASIAQVHFAVLHDGREVAVKVLRPGMLNVIEKDLALLRVVAGVIERLGADGRRLKPREVVAEFDKYLHDELDLVREASNCSQLRRNFGPESGRGEMLIVPEVVWEYTASTVFTMQRMYGIPVGQVDRLRAAGIDIPTLARSGVEIFFTQVFTDGFFHADMHPGNIYVSDAPQTLGRYIALDFGIVGSLSEFDKNYLAQNFLAFFHRDYRRVAQLHIESGWVPPETREEELEGAVRAVCEPYFDRPLAEISLGQVLLRLFQTSRRFNVEIQPQLVLLQKTLLNVEGLGRQLDPNLDLWKTAKPYLEHWMRQRIGLTGLRQSLAKEAGQWSQMLPSLPRLVHEHFSRPNLTPHLLAEMNRLRRAQEQGNRLTAALTAVLAVAVAVALWALSR

SEQ ID NO: 26992 - protein, 533 aa, Ustilago maydis 521
MVTGAACPPVDDLIRNNMPADPFWQPDFVSQRNESSPSRSVSSKSKLDLSSTLPSLAASPALSPKGSVFFLRSDAESLHDALTVSSYDNDYPPPPMSTPAASQTFASSSKQPTSTVSPTRLSACTETREGASTMAAPTLTSSPSSINGLTESLPRRPARPGRPTLTRLNTSEIMRTHTNTAALEPPSVHSIPSRRSPTALKLQLDTSVPRRSATLSSYPHCKKMNYPTPLYSTLTLPSPTTSTRSDFATIKDGSARLTNGDVEDRAGAGESSYANSPAARPDSVNLAGDNFSFEGIDFEVSTILPDFLYLGPDVQSEQAVTELKAMGVRRILNVACEIDDRGPLRLRDRFDRYLKVPMLDSVEAKGVQDSIEQACSFLDDARLRSEPVYVHCKAGKSRSVTIVIAYLIHALGWTLRRSYSHVSEKRAAICPNIGFVAELMQFEEKELKLARSTGIYGDPADVPLASASSPQLLPGWQQGQTRLDSPRNDSSPIPSTLARQGVLMHMTTSLNSSLGGSLSKSSPDLPSLTSGCT

SEQ ID NO: 26993 - protein, 511 aa, Cryptococcus neoformans var. grubii
MFARQPLSQNLLRPLSRPSSSFCRTSTIPKLAFLQSARGFASASEPYDVVIIGGGPGGYVAAIKAAQLGFKTACIEKRGALGGTCLNVGCIPSKAMLNNSHIFHQTQHDLKNRGIDVSDIQLNLPKMLAAKEASVKALTGGIETYLFKKNGIDYIKGEASFETANKLSVKLLEGGETQVEAKNVIIATGSEVTPFPGLEIDEERIVSSTGALELKEVPKKMVVIGGGVIGLELGSVWSRLGAEVTVVEYLGAIGAGMDGEVGKQFQKILTKQGFKFKLNTKVVSGHREGDIVKLKVDSAKGGREETIEADVVLVAIGRRPVTTGLNLEAIGVETDKRGRIIIDDEFNTSAKGVKCIGDVTFGPMLAHKAEEEGIAAVEILKTGHGHVNYDAIPSVVYTHPEVAWVGKNEEELKAAGVQYKIGKFPFAANSRAKTNQDSEGFVKFIVEKETDQVLGCHIIGPNAGEMIASATLALEYKASAEDIARTCHAHPTLSEAFKEAALASYDKTINF

SEQ ID NO: 26994 - protein, 842 aa, Oryza sativa
MAFSPRSPWSRSRKPDVYSTVVVHGDDDDDDARGGGGGGRHALAEDDEEEDPSSLPPLLQRLPKDFGGGASFDEYDDPYSSDLDDASLSATVVVKRGAPASTSASSRSPFLDLRRSSPRAAEVDPYSTFVVHGTARSGGASSPRESASGTFVRRSGGSSSPRESVSGTFIRRTGSPSSPHESISGTFIHHTSGASSPRDTAQGGGGFGSSFWSPAVGQSEELRQPALLVQQQHQQQQNSRRKPSVSSVPESVTREDPSTKYELLHELGKGSYGAVYKARDLRTQELVAIKIISLTEGEEGYEDIRGEIEMLQQCSHPNVVRYFGSYQGEEYLWIVMEYCGGGSVADLIGITEEPLDESQIAYICREALKGLAYLHSIFKVHRDIKGGNILLTEQGEVKLGDFGVAAQLTRTMSKRNTFIGTPHWMAPEVIQESRYDGKVDVWALGVSAIEMAEGMPPRSTVHPMRVIFMISSEPAPMLEDKEKWSLLFHDFIAKCLTKDPRLRPAASEMLKHKFIEKCNPGASKMLAKIKEAKKIRAKVAAETELSGPDSTMQDATVRINDDFGETVPTNPQQQTNHETYDGGAGDFGTMIVHPEDGDEVDESPIFPSSEFIPGLGSINSFTHDPKRAELISNFWAENTADIEANKEQYLDEHPDMQEAKTMPPSTGTVKKLKVAEGTMPRHGNQVSSASPGVASTMTKLNSSPSRKAFSVQDKLWSIYAAGNTVPIPFLKAIDISPLALVSDSVVGNGLAGSNRTDALEAVRELFSGDGQTKKGRKGQNEVPLPPGVHHRLTTSPTLMNLAQALAYHKTCYEDMPLQDSQATQEQQTIQNLCDTLRTILRL

SEQ ID NO: 26995 - protein, 477 aa, Ashbya gossypii ATCC 10895
MSSMMKLGSATRSHLVRSLARNTFARVGGASACRAYSNGEKSLKERFAEIFPAKAEEIKQFKKQHGKVVIGEVLLEQAYGGMRGIPGVVWEGSVLDPHEGIRFRGRTIPEVQKELPKAPNGREPLPEALFWLLLTGEVPTETQTKALSADLMSRSELPGHVEQLLDSLPRDLHPMAQFSVAVTALESESKFAKAYAQGVSKKDYWNYTFEDSLDLLGKLPVIASKIYRNVFKDGKMGKIDVDADYGKNLGHLLGFENPEFVELMRLYLTVHSDHEGGNVSAHTTHLVGSALSSPYLAFAAGMNGLAGPLHGRANQEVLEWLFKLREEVKGDYSPETIRQYLWDTLKGGRVIPGYGHAVLRKTDPRYTAQREFALRHFPDYDLFKLVSTVYEIAPKVLTEHGKTKNPWPNVDSHSGVLLQYYGLTEASFYTVLFGVSRAFGVLPQLIIDRAVGAPIERPKSFSTEKFKELVASKASKA

SEQ ID NO: 26996 - protein, 327 aa, Triticum aestivum
  misc_feature (126)..(126): Xaa can be any naturally occurring amino acid
  misc_feature (174)..(174): Xaa can be any naturally occurring amino acid
  misc_feature (176)..(176): Xaa can be any naturally occurring amino acid
  unsure (1)..(327): unsure at all Xaa locations
GRVGGRVGGRVGGRVGKNEGFVEVLAAQQSPDNPDWFQGTADAVRQYLWLFEEHNVMEYLILAGDHLYRMDYEKFIQAHRETDADITVAALPMDEERATAFGLMKIDEEGRIIEFAEKPKGEQLKXMMVDTTILGLDDARAKEMPYIASMGIYVISKHVMLQLLREQFPGANAXGXEGYFYDRSAPIYTQPRHLPPSKVLDADVTDSVIGEGCVIKNCKIHHSVVGLRSCISEGAIIEDTLLMGADYYETEADKKLLAEKGGIPIGIGKNSHIKRAIIDKNARIGDNVMIINVDNVQEAARETDGYFIKSGIVTVIKDALLPSGTVI

SEQ ID NO: 26997 - protein, 403 aa, Sisymbrium altissimum
YQGVYPVKCNQDRFIIEDIVRFGSSFGFGLEAGSKPEILLAMSCFCKGNPEAFLVCNGFKDSEYVSFALLGRKLELNTVIVLEQEEELDLVIDLSQKMNVRPVIGLRAKLRTKHSGHFGSTSGEKGKFGLTTIQILRVVRNLRQLGMLDCLQLLHFHIGSQIPSTALLSDGVAEAAQLYCELVRLGAHMKVIDIGGGLGIDYDGSKSGESDLSVAYTLEEYAEAVVASVRFVCDQKSVKHPVICSESGRAIVSHHSVLIFEAVSAVKQHANPDDIQFLLEGEEVRAEYEDLYAAVMRGDRESCFLYVDQLKQRCVEGFKDGSLSIEQLVSVDGLCESVLKAIGASDPVQTYNINLSVFTSIPDFWGIDQLFPIVPIHKHDQRPGARGILSDFTCDSDGKIDKF

SEQ ID NO: 26998 - protein, 463 aa, Bacillus anthracis str. A2012
MANKELKRGLEARHIQMIALGGTIGVGLFMGSASTIKWTGPSVMLAYAIAGIFIFFIMRAMGEMLYMEPSTGSFATFGHKYIHPLAGYMTAWSNWFQWVIVGMSEIIAVGAYMQYWFPDLPAWIPGVIAMVILGAANLISVKSFGEFEFWFAMIKIVTILLMIIAGFGLIFFGIGNGGEAIGISNLWSNGGFFTGGFSGFFFALSLVVGAYQGVELIGITAGEAKDPKKTLTRAIQSTIWRILIFYIGAIFVIVTVYPWDQLSTIGSPFVATFAKVGITAAAGLINFVVITAAMSGCNSGIYSAGRMLYTLGVNGQAPKYFTKLSGNGVPLFGTVGVIIGLAVGVVLSYIAPKNLFVYVYSASVLPGMVPWFVILISQINFRKEKGAEMKDHPFKMPFAPVTNYLTIAFLIMVLVGMWFNDDTRISLVVGIVFLAIVTISFYAFGIGKRPPLDVPNDQEISSK

SEQ ID NO: 26999 - protein, 300 aa, Lactococcus lactis subsp. lactis Il1403
MTKVSVIGSISMDLVTRTNRVPNAGETVFGEDFAMVPGGKGANQAVAFARLSPNEVSMIGAVGKDAFGESILQNFKENAVLFENVGTVPQTTGIAQITLYDDDNRIIIIPGANNEVLPSYLADLWEKIKESQLVILQNEIPHETNLAIAKFCKENAIKVLYNPAPARKTDLEMIDFVDYITPNEHECKELFPNLALEEILKKYSNRLIVTLGSEGVIFHDGETLQKIPAIKAKVVDTTGAGDTFNGAFAFGLTENLSISDSIRLAVVASHLSIQKFGAQGGMPKLSEVKAKLKELEINLY

SEQ ID NO: 27000 - protein, 53 aa, Magnetospirillum magnetotacticum MS-1
MVIVSLISPFRAERQTARAIAGDIPFLEVFIDTPLAICEARDPKGLYDRARRI

SEQ ID NO: 27001 - protein, 447 aa, Ralstonia eutropha JMP134
MNSPSLDAFLAGVARRDPGQPEFLQAVKEVMMTLWPFVERHPRYADQALLERLVEPERVIQFRVAWTDDQNRVQVNRAFRVQHSSAIGPYKGGMRFHPTVNLSVLKFLGFEQTFKNALTTLPMGGGKGGSDFDPKGKSDAEVMRFCQALVTELYRHLGPDTDIPAGDIGVGAREVGFMAGMMKKLSNQSACVFTGKGLAFGGSLMRPEATGYGTVYFAQEMLHRRGMDFDGLRVLLSGSGNVAQYAAEKAIELGAKVLTLTDSGGVLHYPEGMTTEQLAEVMAFKNEERGRLSDFAARHGMKFEAGRTPWHVPADVALPCATQNELDGNDAETLLGNGVICVAEGANMPSTLEAVDRFVDAKILYAPGKASNAGGVATSGLEMSQNAMRLSWHHAEVDEKLHAIMKDIHQNCIHHGQKDGGYVNYVEGANIAGFVKVADAMLAQGVI

SEQ ID NO: 27002 - protein, 403 aa, Stanleya pinnata
YQGVYPVKCNQDRFIIEDIVRFGSSFGFGLEAGSKPEILLAMSCFCKGNPEAFLVCNGFKDSEYVSFALLGRKLELNTVIVLEQEEELDLVIDLSQKMNVRPVIGLRAKLRTKHSGHFGSTSGEKGKFGLTTIQILRVVRNLRQLGMLDCLQLLHFHIGSQIPSTALLSDGVAEAAQLYCELVRLGAHMKVIDIGGGLGIDYDGSKSGESDLSVAYTLEEYAEAVVASVRFVCDQKSVKHPVICSESGRAIVSHHSVLIFEAVSAVKQHANPDDIQFLLEGEEVRAEYEDLYAAVMRGDRESCFLYVDQLKQRCVEGFKDGSLSIEQLVSVDGLCESVLKAIGASDPVQTYNINLSVFTSIPDFWGIDQLFPIVPIHKQDQRPGARGILSDFTCDSDGKIDKF

SEQ ID NO: 27003 - protein, 529 aa, Arabidopsis thaliana [sequence omitted]

SEQ ID NO: 27004 - protein, 1479 aa, Burkholderia fungorum LB400
MRRALERVRLCLLAWCLIAAAQTATAAQLFDNRSNSQVVAAFPAKLTVGVLAGGWLPLDALQDGRLTGMSVDYLRALVGPNVVIEAKAFPDVSQLLAAACAGNVDLLTSVARTPERERCLSFTAPYFRSSSSAVVRRDGDSYASPALIAGARIAVEKGFALERVARERFPHAQISAFATTHAALSAVVRGDADVYLGFTPAVQYALATEEFRGLHVAFEESSRTANLRFAVPRSHAALRDQLDEALASMNPADEAAIRVRWLSGNFDAKPVPTAPRLVLTPQEQAWLRSLPPLQIGFDNGWSPFSYVDSSGRPAGIAADYLAYLSRTLGVVFNRARTADWPTAIESFQRGELAILATASIHDPRLKGARHTVAYESYPLVIVGREDEPAARSLSDFASRRVVVSSHVAGSIPLAFERIPADHVVIAPSLDDALDMVAAGEADVLVGNVAAIDILLKQRYDSVLKILGTVGESDALDFAVRTDLSPLAGLIDRALLAMPPAEKQRIRQKWVTGNSPESGLWSVTAVRLLPLLIGIGVALLITLRAYLLLQREVRLRKKTELELELQLNFQETMMKMVPYPLVAIDLDGRYIAVNEAYEQACGMSREAVIGRNTVDVQTWGEANSRILTDMTREMLNGRETAQLELQFERGAGNVRHGLFWASVCRDGDGQPACVLGTVVDITDIRRAEMRARETERRLFDVTRSLPAVVFQLRRTSDGAYSFPYIGGDTRHLLGGKDGSLNRSDHVDFQRVCEEDRAFVLAELERSALCETPVNMEFRFEGDEEIKWARAELVPRREADDSVVWSGYWVDASVEHARSDELARARDLAEAAARAKDDFFAMMSHEIRTPMNGVLGLVEVLERTPLNTDQGEMLGMIHESAGALLQILDDLLDYSKIEAGRLTIEAESIDIRELVDNAVGLLAGRAHEKGLKVRVDIAPDVAATLRGDSVRLRQILFNLLGNAIKFTPQGEVDVRVSVFAQADGVQTLEMTVEDTGIGIAPEVQNRLFEPFVQAESSTTRRFGGTGLGLTICRKLIDLMGGSLALHSEPGSGTRMTVRLDMAVETQRYSVNGLRGKRGLVATGDARVAQALMHFGEALGLTLRRVPPDAPELRDRVALANLDLLFVNEDVTLPADVRPRTRVICLTEKPKPTGYRILDDNVRLSINPISWRGLGAACAAAMTGLPSVPRSAGTPRAPEGGPPPPDRERAIASGRLILVAEDHPVNQELIRHQLALLGFACDVTNDGAEALAALQRTSYGCLITDCHMPNVSGYELTRRIREGEEGGAHRLPILGITANTAPEDLNLCRDAGMDDSLVKPTRLATLRDYLSRWFGSDSAAHAAPSESVGAPAIAATDVQGGADPFVPVDLGHMTQLWGSESTVKALLDSFVSSVREDVQSLSPLLERVGSERTELERVREWLHRVAGAASVLQYPPLLMALEDYRREINVKPPERVRNDGMVLIDKCNAMLDGIEQQAALLV

SEQ ID NO: 27005 - protein, 197 aa, Bacillus cereus E33L
MDTNITWHTASVSKDERRVKNGHHSFVIWFTGLSASGKSTVANAVARKLFEKNIGNYVLDGDNIRHGLNKDLGFSESDRMENIRRIGEVAKLFVDQGTVVLTAFISPFRVDRKQVRDLLAADEFIEVFVKCPIEECEKRDPKGLYKKARNGDIKDFTGIDSPYEEPEKAELIVQTHKYSIEECAEQIVKYLQERSFI

SEQ ID NO: 27006 - protein, 309 aa, Oenococcus oeni PSU-1
MDNEEYYKILGVAKSASQDEIKHAYRKMSKKYHPDLNHQPGAEDKYKQVQEAYETLGDPQKRAAYDQYGKAGANANNGQGGFGGFQQSGFNFNGQDFGDFSDIFSQMFGGSFNPNAPRKGRDLQYRINLTFEEAVFGKETEIKYVRQESGGNSKEHTVKVTIPAGVETGQQMRLAGQGEAGTHGGPYGDLYVEFIVGKSKDGFERQGANIYLEEPINFVQAALGDKIKVKTVHGDVELTIPAGTQTDTEFRLRGKGAPYVNSSRIGDEYVKVIVQVPKRLNEKEKKALKTYADLRGENVNPQKRRGLFG

SEQ ID NO: 27007 - protein, 395 aa, Haemophilus somnus 2336
MSYLERARELFDEAKAVRRQIHQHPEVGFELPDTMALIKKKLDEHNIQYRQLDDAYALVGTLGDPSKGKTLLLRADMDGLPMVEEANLEFAAKNQCAHLCGHDIHATSLLVALIMLKEDEDKLQGQIKFLFQPAEETLNGGKLMIEKGVLENPKPDAGLALHMWPNGEKPGILINKEAALASALNFKIEIKGKGAHGAMPYNGVDPVFVASQIINGANGILARELPSSKGASLSIGSISAPGGAINIVPPNAYLEGTSRSLYDDSAKHMAKRLPEIVEHIGKAFRAETVYEEVANVPALVNTPTMSELVKASAEEALGSEYTVKYIDPILASEDYAHIASQLPESCYFFVSCPQPDADGNVYAVHHPKVVFNEEALIIGPATMAQAAVNWLASHR

SEQ ID NO: 27008 - protein, 134 aa, Moorella thermoacetica ATCC 39073
MFGQGLLKGLSITWHFCFGKAVTEQYPERRPNLPPASHGSFRLEREKCIACGICANACPNHVITVESERDEQKKRHLTGYRVKLGQCLFCGLCVESCPQGALHWQPDFELACYRHEDTEQDLLVGQAVEVKKGA

SEQ ID NO: 27009 - protein, 168 aa, Triticum aestivum
MMLRAAGKRLIGAPGIRPAAAGDSSGAAMAVAARRGYHERVVDHYSNPRNVGAFDKDDADVGTGLVGAPACGDVMKMQIRVDQASGRIVDACFKTFGCGSAIASSSVATEWVKGKQMEEVIAIKNTEIAKHLSLPPVKLHCSMLAEDAIKAAVKDYEAKKTKAAKAEE

SEQ ID NO: 27010 - protein, 230 aa, Mycobacterium avium subsp. paratuberculosis K-10
MSNNITWHEHKISRGEREQLNGHKGCVIWFTGLSGSGKSTVANVVEQKLYERGIRSYLLDGDNVRYGLNAGPDLLEERHGPEFAQRFGLGFSAQDREENIRRIGAVAKLFCEAGIIALTAFISPYVRDRDAIRATLDDGDFQEIFIDTPIEICEKRDPKGLYKKARAGEIKGFTGIDDPYEAPPRPELRLDGAAKDAETLAEEVIAHLERVGVIATDGLAHTRGRDEVTA

SEQ ID NO: 27011 - protein, 403 aa, Bacillus licheniformis ATCC 14580
MEFNHDEEKFVREKPVRSWRSFLFSSLVGAVIGALLTVFALPYLSQQGWLPYNLQVIEARGGQGAQQGGTVRNVSVNVNNEVTQMVSKVSDSVVGVINIQKTGVWDGDSEAGTGSGVIYKKDGNTSHIVTNHHVIEGASQIEISLNDGTRIPAKLIGSDKLMDLAVLQVNSNKIKAAAEFGDSDKVKTGEPVIAIGNPLGLQFSGSVTQGIISGTERAVPVDSNGDGQPDWNAEVLQTDAAINPGNSGGGLFNIDGKVIGINSMKIAESAVEGIGLSIPANLAIPVIEDLETYGEVRRPYLGIEMKSLGDIASYHWQETLKLPKNVTSGVVVMGVQPVSPAGRAGLKELDVIVEFNGDRVYDIVDLRKKLYTKNVGDKVKIKYLRGGKEKTTEVKLTRSQLGS

SEQ ID NO: 27012 - protein, 623 aa, Helicobacter hepaticus ATCC 51449
MSEKSDKVSKKSKEVNAELESLFKEEDSDYITYEKIAQIILKAPTAAQVKKIKDLSKKYKKQLLSSSEIAKMLNTQEQIKRQADKKKMLNEELEDEFDFMKDKELLEWSRSDSPVRMYLREMGQISLLTKEEEISLSKKIELGENTILDAICSVPYLIDFIYDYKDALINRERRVKELFKSFDDEEEENEEEEEEFDMLDDEEASRKSNSKKDQKRIEKVMESFKALDKAKKEWLKVLETPIVEGEDELAHILLLSHKKHILKMKLLDLGPTSKLIGELVKAMENTLKSGDGFERELKRLEYKLPLFNDMLVENHQKILANITTMSRDEIAAMVPETTMVSVYVELKKLFQTKEASEGGFNLEPEKLKEILEQIKRGKSISDKAKAKMAKSNLRLVVSIAKRYTNRGLPFLDLIQEGNIGLMKAVDKFEYKKGFKFSTYATWWIRQAISRAIADQARTIRIPIHMIETINRIHKIMRKHVQETGKEPDIDFIAKEVGLPIDKVKNVIKITKEPVSLDAPIGSDDDGKFGDFVEDKSSVGPMDYILKEDLKVQIDEVLEQLNDREKAVIRMRFGLLDDESDRTLEEIGKELNVTRERVRQIESSAIKKLKHPKVGRKLKNYIEE

SEQ ID NO: 27013 - protein, 366 aa, Populus tremula x Populus tremuloides
QMGLAENQLCFDLIQDWLKKNPKASICSPEGLNEFREIAIFQDYHGLPEFRSAVANFMEKVRGNRVTFDPDRIVMSGGATGAHETVAFCLADPGEAFLVPAPYYPGFDRDLRWRTGVKLIPVDSDSSNSFMVTREALENAYEKAQLDNIKVKGLLITNPSNPLGTILDRETLRSIVRFINEKNIHLVCDEIYAATVFSQPDFISVAEILQEDIECNLDLVHIVYSLSKDMGFPGLRVGIIYSYNDAVVSCARKMSSFGLVSTQTQYLIASMLSDNEFVEMFIRESKSRLAARYRVFTRGLDQVGIECLKTSNAGLFLWMDLSRLLKEQTFKAEMGLWRVIIHEVKLNVSPGCSFHCSKPGWFRVCF

SEQ ID NO: 27014 - protein, 442 aa, Desulfovibrio desulfuricans G20
MKRLRAMQAERRVVITGAGAVTPLGHTPQDIRQSVLTGRTVFEPTSVPAGYAQAPAQFDADDALRGWRHRRYLNRGAAMAVHAARQAAGAAGFAAGLPGYCGIFAGSGPHLDMDSDYAQPQHLPQRHDTLCALWMLRYLPNTAASAISQLLGARGESLVTGTACAASLQAVGEAFRRIRHGVLPVALAGGGDSRLSYGGLLAYAKAGALAPCSEDTHAAAAAACRPFDTGRQGFAAGEGAAFFVLESLDHAQKRGAVPLAEVCGYGCSMDGHAMTAPHPQGMHAEQAVRTALHEAGAGPADVTAVCAHGTGTRRNDTAESVMLTRLFAPTGHRPPVLALKSWTGHCASACGAVELAVLLACARHGFLPPVRNLQTPLCDSLSFVRRIHPCTAAELYAAGRPEKLSALTLLQSFGFGGQNAALAVRPFRASTAAAIQDDNIPA

SEQ ID NO: 27015 - protein, 703 aa, Ashbya gossypii ATCC 10895
MTRDIQNHLLFETATEVANKVGGIYSVLKSNAPVTCAQYKDHYHCIGPLNPDSVQIEVEALDWEDDSVWSREMLPVKRSLQHMRERGVNFVYGRWLVEGAPRVILFDLVSVTHHLNEWKADLWNSCGIPSPQDDQETNNSILLGYTVAWFLGELTAQDQQHAIVAHFHEWLAGVALPLCRKRRIDVVTIFTTHATLLGRHLCAGNADFYNNLDKFDVDAEAGKRGIYHCYCIERAAAHTADVFTTVSQITAYESEHLLKRKADGILPNGLNVIKFQTVHEFQNLHALKKERIHDFVRGHFHWNYDFDLDKTLYFFIAGRYEYRNKGADMFIEALARLNYRLKAAGSKMTVIAFIIMPAKTRSYTVEALKGQAVVKALESTVKDVTTSIGHRLFEHAMRYPRSGKSEIPTDLGELLKPSDTVLLKKRVFALRRPESSLPPIVTHNMVDDASDPILNQIRRVQLFNNSSDRVKIIFHPEFLNANNPILSLDYDEFVRGCHLGVFPSYYEPWGYTPAECTVMGVPSITTNLSGFGAYMEDLIERDQAKDYGIYIVDRRFKNPDESVEQLVDYLDDFCKKTRRQRINQRNRTERLSDLLDWRRMGLEYVKARQLALRRAYPEEFRALVGEDLDDHDMDSLAGGQKFKVARPLSVPGSPRDRSSSMSAILMTPGDLGTLQDANNANDYFHLSMQTDDDEEGEDGREDD

SEQ ID NO: 27016 - protein, 205 aa, Prunus persica
KFLGQIPMVFNVVILSPHGYFASRQCLGYPDTGGQVVYILDQVRALETEMLKRIKQQGLDITPRIIILTRLLPDAVGTTCGERLEKVYNTEYSHILRVPFRTEKGIVRRWISRFEVWPYLETYAEDAIQELSKELHGKPDLIIIGNYSDGNIVASLMAHKLGVTQCTIAHALEKTKYPDSDLYWKKLDDKYHFSSQFTADLIAMN

SEQ ID NO: 27017 - protein, 453 aa, Ashbya gossypii ATCC 10895
MAVFTSSTGKLGKGVGEHDEDASKPQDRPPSQANMLTKFFHKVTGQPASYVNKADYIFGKTLGAGAFGVVRQARNSKQNQNVAIKILLKRALKGNELQMLYDELSILQKLDHPNIVKFKDWFESREKFYIVTQLATGGELFDRILKKGKFTETDAVKIVVQMLTAVEYMHSQNVVHRDLKPENVLYLDPSDESQLVISDFGIAKQLSSESQLIHRAAGSMGYVAPEVLTTSGHGKPCDIWSLGVITYTLLCGYSPFIAESTEGFLEEVFSGSDPVTFHSPYWNNISKEAKQFILRALTLTPARRPTAAELLTDRWIVSKQSNTADLLPTIREGFNASKKFRDAMQVVILNNRIKKLKQMYGHDESDTDLEENSASTDRRKVGLEVLQNALRSLSLKGSQESPEQKQLKSQVTQQAFVQLVLAAKENKERIREYQSQQSLDSVAAHQNTTDAPQ

SEQ ID NO: 27018 - protein, 365 aa, Populus tremula x Populus tremuloides
QMGLAENQLSVDSIIDWIEKHPEASICNPEGVHMFKDIANFQDYHGLPEFRQAIAKFMGRVRGGRVAFDPDRIVMSGGATGANELIMFCLADPGDAFLVPSPYYPAFYRDLGWRTGVQIVPVDCDSSNNFQITKGALEAAYDKAQQNGINVKGLIITNPSNPLGTTLDRETLKSLLSFINEKNIHIVCDEIYAATIFGSENFVSISEVVEEVMDCNRDLIHIVYSLSKDMGLPGFRVGIVYSYNDAVVNCGRKMSSFGLVSSQTQYLLASMLSDEEFVEDFLAGSSKRLKKRHGVFTKGLEQIGISCLESKAGLFVWMNLRHLLKEQTNDGEMALWRVIVNDVKLNVSPGSSFHCVEPGWFSVSS

SEQ ID NO: 27019 - protein, 227 aa, Chlamydophila abortus S26/3
MAFLILLRHGKSVWNEKNLFTGWVDIPLSQKGIDEAMLAGEAIKDLPIDCIFTSSLVRSLMTALLAMTHHNSKKIPYIVHDDPEQKHMSKIYSDEVNHMIPLYRSSALNERMYGELQGKNKKKTAEQFGEEQVKLWRRSYKTAPPNGESLYDTGQRTIPYFQETIFPLLQNSKNVFVSAHGNSLRSLIMDIEKLSEEEVHSLELPTGKPIVYLWTGHTFERHPELFG

SEQ ID NO: 27020 - protein, 385 aa, Desulfovibrio desulfuricans G20
MAYAALNARLRALTAAGLYRRRICQESRQGKWVTVDGRQLLNFASNDYLGLAADTDWQAQVARCFAQHPPSASASALAGGHSRTIRAAEESLAEYFGYAECVLLPSGYQANLALLQALAFCGDTVLYDKRIHASTAAAVRAGAATPCGFRHNDTRHLTRRLEKTDKPDSTGTKVILVESLYSMDGDSPDFAALRRIKERHNAILVADEAHAFGVLGTEGRGLATGSADMAVGTLGKALGLFGAFILLPRGGTELLCNLASPFIHSTALPDAHAACAAMLPRRIARMEEQRDRVARLSRLMRTELQELGLPVHGTAHIITLETGDEALTSRTAAALRQHGILALAARHPTVPARRAVIRLGMTALHSARDVEVCVRSLTTILRGIV

SEQ ID NO: 27021 - protein, 609 aa, Francisella tularensis subsp. tularensis SCHU S4
MANMIDKIDLKSQGSSNLSGEMTNHQKVGTLYKRLLLQVKHLWHFLLLAAIGSIFFSAADASMIYLINPILNYGFGPGGGITKQSATILMLMGVGMVGLLALRSVGSFVSQYFIGSLGQKVVYKFRKDIYKRLMDLPASFFDKHSTGQIISRLLYNVDQVIEATSTAIITVVQDGTFVIGLIVVMFVSSWQLSLFLIVVGPFLGLFISIINKKFRNLSRNTQSSMGNVTHTAEETIRNYKEIRIFGAQQKQQNKFFKNLDYTYSQQIRTIALDALTSPVIQIIASLVLAFSLFTIAIFGTNEGDGSSWLTAGSFASFFAAAAAILKPIKNLTKVNVVIQKAVAATEDIFYILDYPAEKETGSKELAKVDGNVTIKDLSFAFGEHKVLSGVSVDIKAGQTVAFVGKSGSGKTTLTSIISRFYTQHEGEILLDGVDTRELTLENLRSHLSIVSQNVHLFDDTVYNNIAFGLSREVSEEEVIDALKRANAYEFVQELSDGINTNIGNNGSKLSGGQRQRISIARALLKNAPVLIFDEATSALDNESERVVQQALESLTKSCTTIVIAHRLSTVENADKIVVMDGGRVVESGKHQELLEQGGLYTRLYQSGLQ

SEQ ID NO: 27022 - protein, 224 aa, Prunus persica
MTVEMHAGLASEGGSKLKMLISYVDNLPTGDEQGLFYALDLGGTNFRVIRVQLGGKEKRVVKQEFDEVSIPPNLMTGTSEALFDFIAEALAKFVATEGEGFHPAPGRQRELGFTFSFPVWQTSIASGTLIRWTKGFNIEDAVEQDVVGELTKSVEKIGLDMRVTALVNDTIGTLAGGRYHNQDVIAAVILGTGTNAAYVERAHAIPKWHGLLPKSGEMVINMEW

SEQ ID NO: 27023 - protein, 150 aa, Arabidopsis thaliana
  misc_feature (112)..(112): Xaa can be any naturally occurring amino acid
  unsure (1)..(150): unsure at all Xaa locations
MAPKAEKKPAEKKPASEKPVEEKSKAEKAPAEKKPKAGKKLPKEAGAGGDKKKKMKKKSVETYKIYIFKVLKQVHPDIGISSKAMGIMNSFINDIFEKLAQEASKLARYNKXPTITSREIQTAVRLVLPGELAKHAVSEGTKAVTKFTSS

SEQ ID NO: 27024 - protein, 437 aa, Neurospora crassa
MAPSAGCEHTPMHLPALSTASSINASVLHGPRDLRLERRTIEEPELGELQVAVKTTGICGSDVSYYKKFANGDLCACMPLSLGHESSGVVVAIGPQVSGFSLGDRVALEVGVACGQCTICRKGRYNLCKKMRFRSSAKSVPHYQGTLQERINHPAIWCHILPDHISFDAAALLEPLSVGIHAVNRASPAPGSTALVLGAGTVGLLTAAMARQAGCTQVTITDVDQGRVDHAIFKGFATHGYLVPRSHHISSSSSSMFPNSNSNSSSGSSTPSDGIATPPSTLSFRSSLDSAKALAADVLTQTQNPVLDRDDEDIGVDVTFECTGKEVCMHTALYATRPGGKVIMVGMGTPIQTLPLSVAHLREIDILGVFRYANTYATGIRMLCNQKGSGAGFTLPSLDDMVTHRFKGLENAKGAFELASRTMDNEGNLVLKVVIEA

SEQ ID NO: 27025 - protein, 404 aa, Desulfovibrio desulfuricans G20
MQHPVHESTIAAQTAAILPQVISWRHDLHRIPEPGQAEEKTARYVSACLESLGITHSTGIAGHGICGIIDTGRPGPTVLLRADMDALPVTELADVPFRSAHDGFMHACGHDCHMAMLLGAAGILRHLADEPHSGMCGAVKLIFQPAEEYPGGAKPMIEAGVMQNPAVDYCLGAHVWPTLPEGTVSACSGPVMAAMDRFDITIRGRGGHAAKPHHCVDALETATQVVSAMQRIISRKVDPLKPALLTVGQFNAGTAFNVIPGEAFISGTLRTFDADIRKQWEPLLRQVTQGVCSSMGATADILFSPGYPAVVNNATVTDIVRQAAAHTDGVICPDRHEQSMGGEDMAYFLQRAPGCFFFIGSGFEGCAPAHNAHFQVHDHILAHGIEIFCRATLRLLLDKPAATA

SEQ ID NO: 27026 - protein, 255 aa, Magnetospirillum magnetotacticum MS-1
NQLGPARLWLGEHIGLAALTFAIVILLSKVGSGTISRLSILIAIVVGTLIALALGKADFSGVGDGPVAAFPSFLGFGAPTFEIAAIISMLIVILVTLTETTADIIAVGEIVGTKVNRKRIADGLRADMASSIVSPFFGSFTQSAFAQNVGLVAITGVKSRFVVGAGGAILVILGLLPVLGRVVAAVPTPVLGGAGVVLFGSVAASGIRTLAKVDYSRPMNLIIVAASISFGMIPIAKPDFYDQFPTWFGIIFHSG

SEQ ID NO: 27027 - protein, 403 aa, Thellungiella salsuginea
YQGVYPVKCNQDRFIIEDIVKFGSSFRFGLEAGSKPEILLAMSCLCKGNPEAFLVCNGFKDSEYISLALLGRKLELNTVIVLEQEEELDLVIDLSQKMNVRPVIGLRAKLRTKHSGHFGSTSGEKGKFGLTTIQILRVVRNLRQAGMLDCLQLLHFHIGSQIPSTALLSDGVAEAAQLYCELVRLGAHMKVIDIGGGLGIDYDGSKSGESDLSVAYTLEEYAEAVVASVRFVCDQKSVKHPVICSESGRAIVSHHSVLIFEAVSAVKQHANPDDIQFLLEGEEVRADYEDLYAAVMRGDRESCFLYVDQLKQRCVEGFKDGSLSIEQLASVDGLCESVLKAIGASDPVHTYNINLSVFTSIPDFWGIDQLFPIVPIHKLDQRPGARGILSDFTCDSDGKIDKF

SEQ ID NO: 27028 - protein, 406 aa, Ajellomyces capsulatus
MPWSLASRTPPSLWIISLLSTFAGFILFGYTLLILVAPRPRPPLPPEEKYKTIAQDGSITEPQLLPCWQDSLGNPTTDNTKEMEKAELFMSVVVPAFNEEDRLGGMLEEAVNYLERTYGKLAECQQDGTLLHEVTKCERTRRRKLDGGANGSANRSADMPVRGWEILVVSDGSTDGTVETALAFAKDHQLSPHPKSHPGPWSTVADADGVHTPPGTIRVITLTKNRGKGGAVTHGMRHVRGQYVIFADADGASRFDDLGKLVSACQRIEDVQSRGLAVGSRAHLVGSEAVVKRSKLRNFLMHSFHLILRILTPPATASIKDTQCGFKLFSRASLPYIIPYMHSEGWIFDVEMLMLAEFAGIPVAEVPVGWREVKGSKLNVVWDSLGMAWGLAILRMAWGFGVYRRT

SEQ ID NO: 27029 - protein, 405 aa, Nasturtium officinale
YQGVYPVKCNQDRFIIEDIVEFGSKFRFGLEAGSKPEILLAMSCLCKGNPEAFLVCNGFKDSEYISLALLGKKLELNTVIVLEQEEELDLVIDLSQKMNVRPVIGLRAKLRTKHSGHFGSTSGEKGKFGLTTIQILRVVRKLRQVGMLDCLQLLHFHIGSQIPSTALLSDGVAEAAQLYCELVRLGANMKVIEIGGGLGIDYDGSKSGESDLSVAYTLEEYAAAVVASVRFVCDQKSVKHPVICSESGRAIVSHHSVLIFEAVSAGQQHETPSDVQFMLEGYSEEVRADYENLYGAAMRGDRESCLLYVDQLKQRCVEGFKEGSLSIEQLAGVDGLCESVIKAIGASDPVLTYNINLSVFTSIPDFWGIDQLFPIVPIHKLDQRPVARGILSDLTCDSDGKMDKF

SEQ ID NO: 27030 - protein, 175 aa, uncultured archaeon GZfos26D8
MGKKPARKYTKVTGHAYVRKKYMGGIPGSKIALFDMGNLSMGMDFPVALSLVAKEACQIRHNALEAARIFANRYLVKEVGRNNFYLKIRPYPHHVLRENKIASGAGADRVSSGMRHAFGKAVSSAARVKPGQRILSVGVEAQNFDDAKEALRRASYKLPTPCRFIIDKGEELLGV

SEQ ID NO: 27031 - protein, 376 aa, Exiguobacterium sp. 255-15
MAGKTRQLLPGLTGGIIGAVLTATVAFPILMDQEQQVADTPLSNGMPKQISTTTSDPVTNAVATAQKSVVTVTNYQSGNSMSQEEAAAGSGSGVIYKKTDSKAYIITNHHVVDGASKLEVTLNNGKTLSAKLLGSDETYDLAVLEVNASDVPSVITLGKSADLKAGQTVLAIGNPLGEFQNSVTRGIVSSNDRTVPVDTNKDGQDDFNTTVIQTDAAINPGNSGGALINEQGQLVGINSMKIAETGVEGVGFSIPIDDALPILKQLETNGEVKHPTLGVALQDVSAFPAGYLLDQVKLPESQKTGVVVMSVEPNSPAASAKLKTGDVITKINNEEIKSFVDIKTALIKSDGNVTLNIIRDGKQMTVSTKTTTTDQL

SEQ ID NO: 27032 - protein, 213 aa, Zea mays
LDEYLLTRSYITGYQASKDDLAVYTSFSSAPSSKYINVARWFNHIDALVRLSGITAEGQGVKVESSAVPSAPTPDVAEAQAPAAEEEDGDDVGPFGEETEDEKKAAEERAAAAKASGKKKESGKSSVLLDVKPWDDETDMAKLEEAVRSVQMEGLLWGASKLVPVGYGIKKLQIMMTIVDDLVSVDTLIEDHLCAEPVSEYVQSCDIVAFNKI

SEQ ID NO: 27033 - protein, 566 aa, Bacillus subtilis subsp. subtilis str. 168
MKQFRVTNEGDIQTTLRGLEVLSVPFLNKGVAFTEEERKELGLKGFLPPKVLTIDDQAKRAYEQYSAQPDDLSKNVYLTALHDRNETLFYRLLNDHLGEMLPIVYTPTVGTAIQRYSHEYRKPRGLYLSIDDPDGMKEAFKQYKDQSDTIDLIVATDAEGILGIGDWGVGGIAISIGKLAVYTAAAGIDPSRVLAVVLDAGTNQESLLNDPLYVGNQHSRVRGERYDQFIDDYVALARETFPNALLHWEDFGAKNARSILKRYKDKVCTFNDDIQGTGAVSLAAVLSCAKASKVPLRDHRVVIFGAGTAGIGIAEQLREALVREGLSEEESYKRFWCIDRNGLLTDDMDQLLDFQKPYARSADEVKDYQRNGDGGGIDLLEVVRQAKPTILIGTSTVSGAFTEEIVKEMASHVKRPAILPMSNPTTLSEAKPEDLIEWTEGRALITTGSPFPPVEYNGVTYHIGQANNALVFPGLGLGTIVTKSKLITDGMFEACARAIAGMVNVGVPGAPMLPKVEDLRTVSATVAVEVAKTAMKEGVATEEPEDIIQAVQDAMWYPVYKPIRAI

SEQ ID NO: 27034 - protein, 570 aa, Exiguobacterium sp. 255-15
MLKRFYHYYIPHKRLFWLDFSSALFVGLLELAFPLAVKWFIDSLLPDGELNWIILVSVGLLGLYVISTLMQFVVNYFGHKLGINIETDMRRQLFGHVQKQSFRFFDNTKTGHIMSRITNDLFDIGELAHHGPEDAFIAVMTLLGAFSIMMTINVPLALVTIIAVPFLIWLISYANVRMNRSWDRMYGNIAEVNSRVEDSVSGIRVVQSFTNEAHEVARFEKDNATFRQSKINAYKVMGTSLSGIYLTTRLMTLAVLVVGAYLSYQNKLSYGELVGFILYMNILLKPIDKITALLELYPKGMAGFKRFLEMIDHDEELKDAPDAIHVSALRGAIRFDDVSFGYEAERLILKDISLSVEPGQTIAFVGTSGAGKTTICSLIPRFYDVTDGAITIDGIDIRQMTKTSLRQQIGIVQQDVFLFSGTIADNIAYGDLSADRADIVEAAERAHLGQMIADLPDGYDTEIGERGLKLSGGQKQRLAIARMFLKNPPILILDEATSALDTETEAIIQESLAELSKNRTTLIIAHRLATIRQADRILVVTKDGIVEDGTHEELVENGGYFARLLDRQRV

SEQ ID NO: 27035 - protein, 170 aa, Campylobacter jejuni
MINSPYIIWLTGLAGSGKTTIGQALYEKLKLKYKNLIYLDGDELREILGHYAYDRQGRIDMALKRAKFAKFLNDQGMMVIVTTISMFNEIYDYNRKQLKNYYEIYIECDMHELMQRDQKGLYTKALNKEIDNVVGVDIEFDKPEADLVINNSCRNNLEEKVELIIKKLAL

SEQ ID NO: 27036 - protein, 485 aa, Zea mays
MATNSALAKLAPLEAILFDIDGTLCDSDPIHFCAFRELLQQAGFNGGVPITEEFYSANISGGHNDDLARSLFPGMDHQKAMRFMDDKEAMFRKLAPGQLKPVDGLQELCGWMEGRDLKRAAVTSRPAGVSLSSLVLMPSPLGGRIQFGPGKAGMPSASLARRLLSTISSPAISSRSTSSSNSNSCGFSTRARKKRSCVSWMVSAATPADMATNRCTTEARVLSCSPPETRDTAHLLRSCLLNSESGSALAKLAPLEAILFDIDGTLCDSDPIHFCAFRELLQQAGFNGGVPITEEFYSANISGGHNDDLARSLFPGMDHQKAMRFMDDKEAMFRKLAPGQLKPVDGLQELCGWMEGRDMKRAAVTNAPRANAELMLSLLGLTDFFPVLVIGSECDRAKPFPDPYLKALQLIDASPQHTFIFEDSASGVRAGVAAGVPVVGLTTRNPGKVLKDAGASLLVKDFQDPELLSVLQQVEVEPAAENAQG

SEQ ID NO: 27037 - protein, 614 aa, Bacillus licheniformis ATCC 14580
MNKVSFFRSIHFKFTLIYVLLIIVAMQIIGVYFVNEMEKSLLKSYNDSLDQRVNNLSYYLEQEMTKDRSTSSSSTLKEDAERILNDFSKEGEILEVSLIDKSYEVIATSNPYNREVAGKKTTEGIIKRTLLVGIPYENKFFDPERDSKVRISVTPIKKSNQETIGAIYVVASMDNVYNQIRTINTILASGTFIALGITAFLGIFVARTITHPLSDMRKQAIELAKGNFSRKVRKYGNDEIGQLATTFNYLTRELKEAQSMTEGERKKLSSVIAYMTDGVIATNRNGAIILLNTPALELLNVSRETALEMPITSLLGLEDEYTFEDLVEQQDSLLLEIEQEERTSVLRVNFSVIQKEHGKIDGLIAVIYDVTEQEQIDQERREFVANVSHELRTPLTTMRSYLEALAEGAWQDPNIAPRFLNVTQNETERMIRLVNDLLQLSKFDSKDYQFNKEWIHFIRFFSLIIERFEMTKEQHVEFISNLPDRELYVEIDPDKITQVLDNIISNALKYSPEGGHITFSVDVNEEEELLYVSVKDEGVGIPRKDVEKIFERFYRVDKARTRRLGGTGLGLAIAKEMVQAHSGDIWADSIEGKGTTITFTLPYKEEQEDDWDEA

SEQ ID NO: 27038 - protein, 706 aa, Mycobacterium avium
MATDHTSDAPDPKQRDLESARFRRDTGYLTTQQGVRVDHTDDALTVGERGPTLLEDFHAREKITHFDHERIPERVVHARGAGAYGYFEPYDDRLAQYTAAKFLTSPGTRTPVFVRFSTVAGSRGSADTVRDVRGFATKFYTEQGNYDLVGNNFPVFFIQDGIKFPVLVHAVKPEPHNEIPQAQSAHDTLWDFVSLQPETLHAIMWLMSDRALPRSYRMMQGFGVHTFRLVNARGRGTFVKFHWKPRLGVHSLIWDECQKIAGKDPDYNRRDLWEAIESGQYPEWELGVQLVAEDDEFSFDFDLLDATKIIPEEQVPVLPVGKMVLNRNPDNFFAETEQVAFHTANVVPGIDFTNDPLLQFRNFSYLDTQLIRLGGPNFAQLPVNRPVAQVRTNQHDGYAQHAIPQGRSSYFKNSIGGGCPALADEDVFRHYTQRVDGQTIGKRAEAFQNHYGQARMFFKSMSPVEAEHIVAAFAFELGKVEMPEIRSAVVAQLARVDDQLAAQVAAKLGLPEPPEEQVDESAPVSPALSQVTDGGDTIASRRIAVLAADGVDVVGTQRFTELMEQRGAVVEVLAPVAGGTLAGGSGGELRVDRSFTTMASVLYDAVVVACGPRSVSTLSDDGYAVHFVTEAYKHLKPIGAYGAGVDLLRKAGIDNRLAEDTDVLNDQAVVTTKAAADELPERFAEEFAAALAQHRCWQRRTDAVPA

SEQ ID NO: 27039 - protein, 62 aa, Protea pruinosa
MPGQWEYQVGPSVGIEAGDHIWCSRYLLERITEQAGVVLTLDPKPIEGDWNGAGCHTNYSTK

SEQ ID NO: 27040 - protein, 224 aa, Prunus persica
  misc_feature (100)..(100): Xaa can be any naturally occurring amino acid
  unsure (1)..(224): unsure at all Xaa locations
MTVEMHAGLASEGGSKLKMIISYVDNLPTGTEKGLFYALDLGGTNFRVLRVQLGGKVRGIISQEFTEVSIPENLMVGTSDALFDYIAAEVAKFVAKEGQXYQLPPGRQRELGFTFSFPVLQSSINSGTLIKWTKGFSIDDAVGQDVVAELSKAIEKQGLDMRVSALVNDTVGTLAGGRYVNGDVVAAVILGTGTNAAYVERAHAIPKWHGLLPKSGEMVINMEW

SEQ ID NO: 27041 - protein, 225 aa, Zea mays
MDSEHWISRLAAAKRFYAAQLGHSDRAGMEELDMDEEVRPEFACPYCYEDHDVGSLCAHLEEEHPFEPQAAACPVCSEMVTKDMVNHITMQHGYLFKNRRRLRRFIIPGSQALSLLSRDLREAHLQVLLGGGHRSSNNNSTTNISADPLLSSFGLSFPTSDAEQTSKSTLSIPDDATMIKETPAQARKLSIDSSLTSEEREQKRKQASVRATFVQDLLLSTLFGD

SEQ ID NO: 27042 - protein, 261 aa, Zea mays
MTKKLVSISTMAGKQGCKEQSNDRRIQASIQGDAKSVVVGFGGRLVSREQEDAIIVAALRHVVSGYSTPPPEVVVTVAGGEACGTCGIDGCLGCDFFGAPELAQEAVSCGTGQVATTASVGGGAAAAALRPRRRRNRNMYRGVRQRPWGKWAAEIRDPRRAARVWLGTFDTAEEAARAYDCAAVEFRGPRAKLNFPGHEALFQGHGDTAAAADTETLTPSPGEWQLGGGAGDELWEGLQDLMKQDEVDRWLAPVFGAASSF

SEQ ID NO: 27043 - protein, 171 aa, Methylococcus capsulatus str. Bath
MISQLRTLWIVLKHTFSRADTVQYPEQRPKLYPRYRGRIVLTRDPDGEERCVACNLCAAVCPVDCIALQKTEDVDGRWYPEFFRINFSRCILCGLCEEACPTYAIQLTPDFELCEYDRRNLVYEKEHLLIQGTGKYPGYSFYRVAGKAIAGKDKGQAENEAPPIDVHSLLP

SEQ ID NO: 27044 - protein, 136 aa, Prunus persica
GGHVNPAVTFGAFIGGNISLVRSVLYWIAQLLGAVIACLLLRFATGGLETSAFSLSSGVSVWNAVVLEIVITFGLVYTVYATALDPKKGNIGIIAPIVIGFIVGANILVAGAFDGASMNPAVSFGPAVVSWTWTNH

SEQ ID NO: 27045 - protein, 69 aa, Zea mays
ADIYETEEEASKLLLAGKVPVGIGRNTKIRNCIIDMNARIGKNVVITNSKGIQEADHPEEGYYIRSGIV

SEQ ID NO: 27046 - protein, 331 aa, Corynebacterium glutamicum ATCC 13032
MTAPSTQDLATTEREVDPGSRRGQTNDNPSQDLVRVYLNGIGKTALLTAEDEVELAQTIEVGLYAEHLLKNSEEPLTRAMKRDLKVLAKDGKKARSHLLEANLRLVVSLAKRYTGRGMPLLDLIQEGNLGLIRAMEKFDYSKGFKFSTYATWWIRQAITRGMADQSRTIRLPVHLVEQVNKLSRIKRELYQHLGREATNEELAEESGIEESKIEMLLRQSRDPVSLDMPVGADEEAPLGDFIEDSEATDAESAVVASMRHSDIRAVLNTLEPREQDVIRLRYGLDDGVPRTLDQIGRRFGLSRERVRQIEREVMSKLRDGERASRLREYAQ

SEQ ID NO: 27047 - protein, 322 aa, Ashbya gossypii ATCC 10895
MSGMGESRTELLGWLNDLLRLDYTKVEQCGTGAAYCQIMDSIYGDLPMHRVKFDARAEYESLTNFKILQSCFTKHKIEKTVFVDRLIKCRFQDNLEFLQWMRRFWIQNKDESPYDPESRRKSVRPVSMRAPAQAPPSHAPKRRSLATFAATGTAAAPRPLQKARAAAGGAGGAVATRVPSGGAPARGTATAGAGEQVAALQGELSAAEHKINKLTQEMVQYQDAMSLMERERDFYFGKLRDIEILVQSTQDLFKEGVYNDDPQELNRLLGKVSQILYSTEEGFEVANGADGNEEYDVEAGTRMENCVEGQVLHNLITDDETF

SEQ ID NO: 27048 - protein, 329 aa, Corynebacterium glutamicum ATCC 13032
MKLLVTGGAGYVGSVAAAVLLEHGHDVTIIDNFSTGNREAVPADARLIEGDVNDVVEEVLSEGGFEGVVHFAARSLVGESVEKPNEYWHDNVVTALTLLDAMRAHGVNNLVFSSTAATYGEPDVVPITEDMPTQPTNAYGATKLSIDYAITSYAAAFGLAATSLRYFNVAGAYGNIGENREVETHLIPLVLQVATGHREKTFMFGDDWPTPDGTAVRDYIHILDLAKAHVLALESNEAGKHRIFNLGSGDGYSVKQVVEMCREVTGHPIPAEVAPRRAGDPATLIASSEKAKQELGWTPEHTDLRTIVEDAWAFTSALGDRSHAAKKKA

SEQ ID NO: 27049 - protein, 153 aa, Brassica napus
VHNRCPTCRQELGDIRCLALEKVAESLELPCKFYNLGCPEIFPYYSKLKHESLCNFRPYGCPYAGSECGVVGDIPFLVSHLRDDHKVDMHAGSTFNHRYVKSNPREVENATWMLTVFHCFGQYFCLHFEAFQLGMGPVYMAFLRFMGDEEEAR

SEQ ID NO: 27050 - protein, 480 aa, GIBBERELLA ZEAE PH-1
MHIGTSDRRSRSTNHKRQDADEAIAVRLENKDFFYSTDIEIGTPPQKVTVLLDTGSNELWVNPDCQEAQSSLQYNQCLDFGQYDPDKSDPIGPYGGETLNYGDASDSSTHTSVQITYYADSFRFGSEVLKNQTFGVMVESNGISQGILGLAPDLRGGYDSNEPYSLLLTSMADQGLINSRVFALDLRHSDDTEGALIYGGIDRSKYIGELETVDIIRGEGGEYRLATNLDSLGVTINGKTSNIRVPRADSNVMLDSGTTLSRMHMSVARPILEELGAQNDGEGFYMTDCQNRKLDATVDFGFGNKIIKVALTDFILELGPGSCYIGLVPTTDQQILGDSVLRAGYFVFDWDNEKIHLAQAADCGDEDIVAVGSGSDAVPSETGKCKSSDITATGGGGATRTGNSFPTGAYTTTYTITSCPDFERECVTGVVTTQTFSDRPTVTVTAGAGDGDDDNAAWQPTPLGWMFAVVGGFALGLNLV

SEQ ID NO: 27051 - protein, 667 aa, Bacillus subtilis subsp. subtilis str. 168
MDTIEKKSVATIRTLSIDAIEKANSGHPGMPMGAAPMAYTLWTKFMNVSPANPGWFNRDRFVLSAGHGSALLYSMLHLSGFDLSIEDLKGFRQWGSKTPGHPEFGHTAGVDATTGPLGQGIAMAVGMAIAERHLAETYNRDSFNVVDHYTYSICGDGDLMEGISSEAASLAGHLQLGRLIVLYDSNDISLDGDLDRSFSENVKQRFEAMNWEVLYVEDGNNIEELTAAIEKARQNEKKPTLIEVKTTIGFGSPNRAGTSGVHGAPLGKEESKLTKEAYAWTYEEDFYVPSEVYEHFAVAVKESGEKKEQEWNAQFAKYKEVYPELAEQLELAIKGELPKDWDQEVPVYEKGSSLASRASSGEVLNGLAKKIPFFVGGSADLAGSNKTTIKNAGDFTAVDYSGKNFWFGVREFAMGAALNGMALHGGLRVFGGTFFVFSDYLRPAIRLAALMGLPVTYVFTHDSIAVGEDGPTHEPVEQLASLRAMPNLSLIRPADGNETAAAWKLAVQSTDHPTALVLTRQNLPTIDQTSEEALAGVEKGAYVVSKSKNETPDALLIASGSEVGLAIEAQAELAKENIDVSVVSMPSMDRFEKQSDEYKNEVLPADVKKRLAIEMGSSFGWGKYTGLEGDVLGIDRFGASAPGETIINEYGFSVPNVVNRVKALINK

SEQ ID NO: 27052 - protein, 326 aa, Bacillus anthracis str. A2012
MEVFHMKALCFETFGNADVLQYKEIPDPIINPNEILVRTKAIGLNFADIYRRRGDYHLAGNPPYILGYEGAGIVEEIGTNVTTIKPGDRIAFADVPFANAELVAVPSKKTIQLPNSISFETAASVLLQGLTAHYLTKDSYQIKQGDIALVHAAAGGVGQLLIQIIKLLGGTAIGLTSSNEKAKVATLAGADHVFLYSEKWHSKVLEITNGTGVNVVYESVGSTLEESFNATKIGGTVVFYGMAGGNPAPVDPRMLMDTSKTLTGGDLWNVLTTFEERKQRSTQLFDWIASGKLNIASPTTFSLQDGAHAHKLLESRKSTGKILLIP

SEQ ID NO: 27053 - protein, 328 aa, Salmonella typhimurium LT2
MGQLIDGVWHDTWYDTKSSGGKFQRSASAFRNWLTADGAPGPSGEGGFAAEKDRYHLYVSLACPWAHRTLIFRKLKGLEPFIPVSVVNPLMLENGWTFDDTFPAATGDTLYQHEFLYQLYLHADPHYSGRVTVPVLWDKKNHTIVSNESAEIIRMFNSAFDGLGAKAGDYYPPALQSKIDELNGWIYDNVNNGVYKAGFATSQQAYDEAVDKVFTALARLEQILGQHRYLTGDQLTEADIRLWTTLVRFDPVYVTHFKCDKYRISDYLNLYGFLRDIYQISGIAETVNMDHIRHHYFRSHKTINPTGIISVGPWQDLLEPHGRDVRFG

SEQ ID NO: 27054 - protein, 525 aa, Burkholderia fungorum LB400
MRFLRFLKIFFTVIRFGLDEMMLSRVNDRRVRLLLRITTIGRKFDAPPGVRLRLALESLGPIFVKFGQVLSTRRDLLPVDIANELAKLQDQVPPFDSAVAIGLVEKSLGAPVDVLFDDFERVPVASASIAQVHFATVKAGQHAGKAVAVKVLRPNMLPVIDSDLALLRDIAVWAERLWADGKRLKPREVVAEFDKYLHDELDLMREAANGSQLRRNFAGLDLLLVPEMYWEFCTPTVLVMERMVGVPISQVETLRAAGVDIPKLAREGVEIFFTQVFRDGFFHADMHPGNIQVSLDPAHFGRYIALDFGIIGALSDFDKNYLAQNFLAFFKRDYHRVATLHLESGWVPPTTRVEELESAIRAVCEPYFDRALKDISLGQVLMRLFSTSRRFNVEIQPQLVLLQKTMLNVEGLGRSLDPELDLWKTAKPYLERWMNEQIGLRGWYERLKIEAPQWSKTLPQLPRLIHHALAERHDHTRGANDEMIRQILLEQKRTNRLLQGLLLFGVAVGVGAALARVFLALAYGG

SEQ ID NO: 27055 - protein, 227 aa, Haemophilus somnus 2336
MELVFIRHGFSEWNAKNLFTGWRDVNLTERGIEEAKAAGKKLLEAGYEFDIAFTSVLTRAIKTCNIVLEESNQLWIPQVKHWRLNERHYGALQGLDKKATAEQYGDEQVHIWRRSYDVSPPDLDPQDPNSAHNDRRYALLPKDVVPNAENLKITLERVLPFWEDQIAPALLSGKRVLVTAHGNSLRALAKHIIGISDEEIMAFEIPTGQPLVLKLDEQLNFVEKFYL

SEQ ID NO: 27056 - protein, 500 aa, Oryza sativa
MAMMAMGAASWAPIPAPARAAAAFYPGRDLAAARRRRGAAARRPFVFTPRAVSDSRSSQTCLDPDASTSVLGIILGGGAGTRLYPLTKKRAKPAVPLGANYRLIDIPVSNCLNSNVSKIYVLTQFNSASLNGHLSRAYGNNIGGYKNEGFVEVLAAQQSPENPNWFQGTADAVRQYLWLFEEHNVMEFLILAGDHLYRMDYQKFIQAHRETNADITVAALPMDEERATAFGLMKIDDEGRIIEFAEKPKGEKLKSMMVDTTILGLDTERAKELPYIASMGIYVFSKDVMLKLLRQNFPAANDFGSEVIPGATEIGMRVQAYLYDGYWEDIGTIEAFYNANLGITKKPVPDFSFYDRSAAIYTQPRYLPPSKVLDADVTDSVIGEGCVIRHCTINHSVVGLRSCISEGAVIEDSLLMGADYYETETDKKALSETGGIPIGIGKNAHIRKAIIDKNARIGENVKIINVDNIQEASRETDGYFIKSGIVTVIKDALIPSGTVI

SEQ ID NO: 27057 - protein, 198 aa, Griffithsia japonica
TDAQPPQTTSNEPHPLQFKWTLWHDVFVKGKGAYAANLREVASFDTVEDFWALFNNLKEPSQLKPGNTYNLFKAGIEPKWEDPHNDAGGEWRVSLPSTRREVLDEYWINTVLTVIGEGFGPDESDDIAGIVLNIKRGNDRIAIWTKTALNEQLQDRIGKRWRETANIVTIRMEYTVFKDSLMATSKNSNKKARVRYLI

SEQ ID NO: 27058 - protein, 225 aa, Zea mays
RRTNLSSPARPRCIGRRQAPRRIERTRSGVAAGGAGGMCDLVARTGRHQQRYEDGRRLVAGCIPFRYRANNDETSGDKTKKVVEVLMINSQSGPGLLFPKGGWENDETVEEAAAREAIEEAGVRGDIVHFLGSYDFKSKTHQDACCPEGMCRAAVFALHVKEELNSWPEQSTRQRTWLTVPEAASRCRYQWMEEALLTGFSDWHDKWSIGDGGGGGANCVTRPNC

SEQ ID NO: 27059 - protein, 395 aa, Glycine max
MPMELEQELGSTTIQRSFDARYTRHARDSLGELPDSFTITDPSIPGHPIVFASPGFLKLTGYSLREVLGRPAAIFQGPRTSRKSVIEIREAVREERNAQVVLLNYRRDGTPFWMLFRVSPVFSSDGGAVVHFVAVQVPLQKKEGSGVRDFGFGCCRKEVCVDSLAEIDRVCSLEQVLEPDVRALWDAEVEREEPCEASDDEKRSAVTAMDSIFSVLTHYSEATGRLVCRKRSSIPDVGLLSTSLIISLGRIKQSFVLTNPHLPDMPIVYASDAFLKLTGYAKNEVLGHNCRFLGGTDTDTSTLHLIRESIKTEQPCTVRILNYRKDKSSFWNFLHISPVRDASGKVAYFVGVQIEDNNKNDDSHCLSPEKRQLSVVGVVKVAVRSLSMTAGSSES

SEQ ID NO: 27060 - protein, 106 aa, Triticum aestivum
MASETVVLKVAMSCGGCSGAVKRVLTKMEGVESFDIDMEQQKVTVKGNVKPEDVFQTVSKTGKKTAFWEAEATPAPEATPAADAAPAPEAAPAADAAPAPEATPAN

SEQ ID NO: 27061 - protein, 145 aa, Schizosaccharomyces pombe
MSEQGDQIEQVDVVEEVEVEAAAPETVSVEDALKEVLKRALVHDGLARGIREASKALDRRQAHLCVLCESCDQEAYVKLVEALCAESETPLIKVADPKVLGEWAGLCVLDRDGNARKVVGCSCVAVTDYGEDSAALQKLLESFSA

SEQ ID NO: 27062 - protein, 446 aa, Piromyces sp. E2
AKSIELEDKFENLGARIVQDVAIKTNDEAGDGTTTATVLARAIFAEGLKNVSAGVNPVELRRGVQKAVDVVVDFLKEKAHPISTFEEIAQVGTISANGDKHIGDLLAEAMKKVGKEGVINIHEGKTLEDELTITEGMKFENGYLSPHFITDNKGKKCELENPYILIIADDIQGDALATCVLNKIRGQVQVCCIKAPGYGDHRKNNLGDIACLTNATVMSANVELTLDKLKEEHLGTCERITVTREDTVFLNGAGDKAKIAERCNQIRSVIKEADLSVYEKERHEERLAKLTGGVAVIKVGGVSEVEVGEKKDRFVDALHATRAAIEEGIVPGGGTALLKASKVLTNLKADTFDQQLGVDLVKKAIQEPCKTIVNNAGGEGAVVVGRLYNSFEVKGVEDKAVSKKDYKPFAYGFDAYKGEYCDMIKAGIIDPVKVVRTAILDASGVA

SEQ ID NO: 27063 - protein, 162 aa, Brassica napus
MGQVFDKLRGKEWRHKQVQAICDRVFDRFKLETGRANLTFEELYIAVLLVYNDINKRLPGPHFDPPSKDLVRSMMAECDMNLDGEIDREEFVKFIELLTTDTLAVVSQGLIISLIVAPTVAIATKKATEGVPGVGKVVHKLPTSVYATLVTLAVVWVNSDTS

SEQ ID NO: 27064 - protein, 253 aa, Glycine max
LGHVIDKLSVSFGLEILKVVPGYVSTEVDARLSFDTAATIARAHRIIDLYEKAGIKKDRVLIKIASTWEGIQACKHLQKEGISCNMTLLFGFAQAVGCAEAGATLISPFVGRILDWHKAKTGKSSYESHEDPGVVSVTKIYQYYKKYDYKTIVMGASFRNTGEITELAGCDRLTISPGLLEELAKSTSKLDKKLDPETAAKAYTGEKVSYDEKGFRLSMNEDAMATEKLAEGIRGFSADIVKLEQILKAKLSA

SEQ ID NO: 27065 - protein, 464 aa, Magnetospirillum magnetotacticum MS-1
MTQTNTLNIQTFLNESRFSPYQWAVFALCFFVVLLDGFDTAAIGYIAPSLLKEWGIAKPALGPVLSAALFGLAAGALSAGPLADRFGRRLVLTGATLLFALASLGSSYAGSLDALTVLRFVTGIGLGAAMPNAVTLISEYCPDQRRSLLTNAMFAGFPLGAALGGFLAAWMIPQWGWRSVLVLGGIAPLALVVLMLTALPESIRYMVARKKPTEHIRKVLARISAAAAAAQDFVMTETAAKTPAGKAGLGVVLSRSYLVGSMMMWLAYFMGLVIFYGLINWMPLLLKDAGLDPKSATLISALFPLGGVGAIFFGWLMDRANGNKVIAAGYVLTALLIFGIGQAVGNVGILVALVLVAGTLMNTAQSSMPALAAGFYPTSGRATGVAWMLGMGRFGGIAGSTLVAELSRRQMSFSEMFTIIAIPGLIAAAGLIIKQMAHPETPAEHDVAVSEAHEHAQEAQLGGH

SEQ ID NO: 27066 - protein, 294 aa, Arabidopsis thaliana
  misc_feature (122)..(122): Xaa can be any naturally occurring amino acid
  unsure (1)..(294): unsure at all Xaa locations
MALTNNLWAFVFGILGNIISFVVFLAPVPTFVRICKKKSTEGFQSLPYVSALFSAMLWIYYAMQKDGTAFLLITINAFGCVIETIYIVLFVSYANKKTRISTLKVLGLLNFLGFAAIVLVCXLLTKGSTREKVLGGICVGFSVSVFAAPLSIMRVVVRTRSVEFMPFSLSLFLTISAVTWLFYGLAIKDFYVALPNVLGAFLGAVQMILYIIFKYYKTPVAQKTDKSKDVSDHSIDIAKLTTVIPGAVLDSAVHQPPALHNVPETKIQLTEVKSQNMTDPKDQINKDVQKQSQV

SEQ ID NO: 27067 - protein, 256 aa, Botrytis aclada
AYMLKYDSTHGQFKGDIKVLSDGLEVNGKKVKFYTERDPANIPWAESEAYYVVESTGVFTTTEKAKAHLKGGAKKVVISAPSADAPMYVMGVNNETYKGDVDVISNASCTTNCLAPLAKVINDEFTIIEGLMTTIHSYTATQKTVDGPSAKDWRGGRTAAQNIIPSSTGAAKAVGKVIPELNGKLTGMSMRVPTANVSVVDLTVRIEKGASYDEIKAVIKKAADGPLKGILGYTEDDVVSTDMNGDNHSSIFDAKA

SEQ ID NO: 27068 - protein, 338 aa, Blumeria graminis f. sp. hordei
MAPIKVGINGFGRIGRIVFRNAAQSCEVEVVAVNDPFIEPEYAAYMLKYDSTHGQFNGDIQTVEDGLVVNSRNVKFYNKRNPEEIPWAETGAEYIVESTGVFTTTEKAKAHLKGGAKKVIISAPSADAPMFVMGVNHKSYTTDLEVISNASCTTNCLAPLAKVINDEFTIIEGLMTTIHSYTATQKTVDGPSAKDWRGGRTAAQNIIPSSTGAAKAVGKVIPALNGKLTGMAMRVPTANVSVVDLTCRIEKSATYDEIKKAIKIAAGNELQGILSYTEDEIVSTDLIGNNHSSIFDAKAGISLNDNFVKLVAWYDNEWAYSRRVIDLISYIAGKDGSK

SEQ ID NO: 27069 - protein, 634 aa, Ustilago maydis 521
MLRSSNRHMAATLRYAASTEWYQAAAFTEGLAGPSVARRAGSASRHSSSRHRSSLRKGLTAPFSTSSCTARSSQLADHRIISDPFPNQDTGFSYEKRDQLGLRGLLPPAKQSLNTQVLRVLHQLRSKSTPLEKHVMLASLRQTNTRLYYATILANKEEILPLIYTPTVGEACQKFSHIYRRPEGLSISLEDKGKIASIVENWPVPAGSPRIAVITDGSRILGLGDLGWNGQGISIGKLSLYVAGAGIHPRATLPIVVDLGTNNKKNLEDPLYLGLRRERASTEEYIEFMDEVMHALHTRYPNLIIQFEDFTSENAFRFLERYQGKYPMFNDDIQGTGSVILAGFTNAARIASKESGRPLHDHRILMAGAGSAAVGVGKQLMSFFTRQGLSADEARERIFITDSKGLVTKDRGDKLAEHKVFFARDDNAGKQIKDLGEIIDYVKPTAILGLSTIKGTFDENVIRKMATLNKRPIIFPLSNPTDNSECTFEEAVKYTEGRVLFAAGSPFAEIDAASSPTGKRMIPGQGNNFLVFPGIGLCAALCKAGRVTNEMITESALALSDALTDQERAEGRLYPNTERIREISRDIAVKCIQMANKQGVTRDGGKTAAMDEEQLRDWVQGEMWTPKYDTAEDA

SEQ ID NO: 27070 - protein, 90 aa, Kluyveromyces lactis
PAFVNKLWSMVNDKSNEKFIHWSTSGESIVVPNRERFVQEVLPKYFKHSNFASFVRQLNMYGWHKVQDVKSGSMLSNNDSRWEFENERHA

SEQ ID NO: 27071 - protein, 490 aa, Rhizobium etli
MTVMESTRTEADGQVFAEEDLGYHKALKPRQIQMIAIGGAIGTGLFLGAGGRLAAAGPALVLVYALCGFFAFLVLRALGELIVHRPTSGSFVSYAREFYGEKLAFAVGWMYWLTWAMTAVADVTAVALYMNFFKAYVPWIAMIDQWVFAFAALVLVLSMNLLSVKVFGELEFWFSLVKVLALLIFLIVGVYFVVTGTPIDGHVPGLNTITDFGGMFPNSVLPALVVIQGVVFAYASIELIGTAAGETENARKVMPRAIRTVVLRLVVFYVGSVLLLSLLLPYTAYKGGESPFVTFFGKIGIQGADVVMNLVVLTAVLSSLNAGLYSTGRILHSMAVSGSAPAALAKMNRSGVPYGGIAVTAVVTAFGVVLNAVVPAEAFEIGLNVAALGIIAAWGVIVLCQLKLWQLSRQGKLARPEFRMFGAPYTGLLTLGFLAIVVILMALDYPVGTYTVASLLLIIPALVVGWLLMRERIHMIAAEQGDERGGFDLA

SEQ ID NO: 27072 - protein, 462 aa, Chlamydophila abortus S26/3
MSTDFDCVVIGAGPGGYVAAITAAQQGLKTALIEEQQAGGTCLNRGCIPSKALLVGAGIVSQIKHANQFGIHIDGYSIDYPAMVQRKNTVINGIRQGLEGLIRSNKITVLHGRGSLISSTEVRVKGQDTSVTKSQYIIIATGSESRPFPGVPFSSRILCSTGILNLTELPKKLAIIGGGVIGCEFASLFHTLGVEITIIEVAEQILSVNNADISKTMLDKFSRQGIRIITKASIHALEDLGDRVRITVNEQTEEYDYVLVAIGRQFNTTDIGLDNAGVIRDNRGIIPVDETMRTNVANIFAIGDITGKWLLAHVASHQGIVAGKNAASHNEIMDYSAVPAVIFTLPEVAMVGLSLEAAQQQGIPVKLTKFPFKAIGKAVAMAEADGFAAIISHETTQQILGAYVVGPHAASLIAEMTLAVRNELTLPCIYETIHAHPTLAEVWAESALLATNHPLHLPPPKL

SEQ ID NO: 27073 - protein, 478 aa, Ralstonia eutropha JMP134
MTQTPQPSSGLSHGLKQRHMTMIALGGVIGAGLFVGSGVVIKSAGPAAVLSFLITGLLVVLVMRMLGELACAMPGGGSFYEYAREAWSDRPAVGNLASFLTGWMYWYFWVIVVALEAVAGADLVRYWLPDVPNWTISLVLLVMLTLTNLISVKSFGEFEFWFASIKVAAIMVFLFVAGVYVLGLAPGAHGMNVANLTANGGFMPNGIVPVLTGAVAATGFYFGAEIVTIAAAETAEPQKAVARATNSVITRVLVFYVGSVLLVVCLVPWNATGIATPYVSALNVMGIPAAAQIMNAIVLTAVLSALNSGLYASSRMLFALTKRGDAPRSLARVSRNGVPTRAILVATLFGYGAVVMSYVSPDKVFAFLVNSYGTVAIFVYILIAVSQLRLRARLEREAPHLLKVRMWCYPYLTWLAIFGMLAIVVAMAFIPDQRTPLALGVASLGLLVSAYIVRHLFRRGVQQVVPLAEMPRPDLHEY

SEQ ID NO: 27074 - protein, 340 aa, Lactococcus lactis
MDELSVKFGIVDDALEDLFKQIQDAGISIVDKDGNPSPLALVTDEIEKEEVSDTAMDEIVTNVRIDDPVRMYLKEIGRYPLISLDEETKLAEAIIAGGEGAEFAKQMLAEANLRLVVSIAKRYSGRGMQFLDLIQEGNMGLMKAVDKFDQTKGFKFSTYATWWIRQAITRAIADQARTIRIPVHMVETINKLIRVQRNLLQELGRDPSPEEIGKELHMAPDKVREVLKIAQEPVSLETPIGEEDDSHLGDFIEDDVIESPVDYTNRILLREQLDEVMDTLTDREENVLRMRFGLDDGRMHTLEDVGKQFKVTRERIRQIEAKAIKKLRHPRRSKPLRDFM

SEQ ID NO: 27075 - protein, 459 aa, Rickettsia rickettsii
MEQYDVAVIGGGPGGYVAAIRAAQLKKKVVLIEKEHLGGVCLNWGCIPTKSLLKSAEVFEYIKHAKDYGIDAKGAEINIKKIVERSREISNKLAGGVKLLLKKNKVTVIDGVASLAGNKVININDKPTVKAGNIIIATGARSRVLKGFKPDGKQIWTSKEAMIPQHVPKSMIIVGSGAIGIEFASFYNSIGVDVTVIEAHNRILPAEDMEISGIAHKNFEKKGIKIITNAKLIKQTKSKDKIEVELELADKTQKLQAEILLMAVGITANTENLGLEKTKIKVENGYITTNGLMQTAVSGIYAIGDVAGVPCLAHKASHEGIIAAESIAGLKPHTINKHNIPGCTYSSPQIASVGLTEEAATTLGYELKIGRFPFIANGKALVSGDSDGLIKTIFDAKTGELLGAHMIGSEVTELIQGYVVSKNLEGTELDLINTIFPHPTLSEMMHESVFSAYDRAIHI

SEQ ID NO: 27076 - protein, 670 aa, Gloeobacter violaceus PCC 7421
MTGTLLDKTAAQLDELSVNTIRFLAVDAVQKANSGHPGLPMGAAPMAYVIWTKFLKHNPTNPKWFDRDRFILSAGHGSMLLYALLHLTGYDLAIDDLKQFRQLHSRTPGHPENFMTPGVEVTTGPLGQGLGNGIGIAVAEAHLAARYNRPGHEIIDHTTYAIVSDGDLMEGVASEAASLGGHLGLGKVIYLYDDNHISIDGETELSFTEDRMQRFDAYGWHTQAVADGNDIAAIEQAIHNARAVTDKPSIIAVRTIIGYGSPNKANSHDVHGSPLGGDEVKATKENLKWPLEPEFYIPEETLAQFRKAVEAGKEAEADWNARFAAYKAEFPELAAELESLIEGRLPEGWESSLPSFSPADKPLATRAASGKVLNAVTAALPGLIGGSADLAPSNNTYVKAFVDFQKATPEGRNFHFGVREHGMGAVMNGMAMHGGLKVYGGTFLIFMDYMKGAVRVAALSHSPVVYVFTHDSIGLGEDGPTHQPVEQILTLRATPQLTVIRPGDAVETVGAWKVAIESNRDPVALILTRQNLPIQPGSTVEAVAKGAYTLVEADNPEIILIGTGSEVQLVVEAQKQLAEQGIAARVVSFPSWELFEAQPQEYKDSVLTPGVKRLAVEAGTSLGWHKYVGLEGAVIGVDRYGASAPIKAVMPEYGFTIDNVVAHALKVLGR

SEQ ID NO: 27077 - protein, 154 aa, Herrania mariae
VLDTDGDELRTGVQYYIVSSIWGAGGGGVALGRTSGQSCPEIVVQRRSDLDNGTPVIFSNADSEDGVVRVSTDLNIEFVPIRDRLCTTSTVWKLDNYDHSAGKWWVTTDGVRGDPGASTLTSWFKIEHAGAIGHTLKFCPSVCDSCTTLCSDIG

SEQ ID NO: 27078 - protein, 362 aa, Cicer arietinum
MDRSFLLALLLFSVVATATKDDNNDDFLIRQVTDHEDDQLLNAEHHFTTFKSKFSKSYATKEEHDYRFGVFKSNLKKAKLHQKLDPSAEHGVTKFSDLTASEFRRQFLGLKKRLRLPAHAQKAPILPTNNLPEDFDWREKGAVTPVKDQGSCGSCWAFSTTGALEGANYLATGKLVSLSEQQLVDCDHVCDPDEYNSCDSGCNGGLMNNAFEYLLQSGGVVREQDYSYTGRDGSCKFDKSKIAASVSNFSVVSVDEDQIAANLVKNGPLAVAINAAWMQTYMSGVSCPYICAKSRLDHGVLLVGFGNGFAPIRLKEKPYWIIKNSWGQNWGEEGYYKICRGRNICGVDSMVSTVAAVHASNN

SEQ ID NO: 27079 - protein, 330 aa, Bacillus pumilus
MTSIYPKFRAAAVQAAPIYLNLEATVQKSCELIDEAASNGAKLVAFPEAFLPGYPWFAFIGHPEYTRKFYHELYKNAVEIPSLAIQKISEAAKRNETYVCISCSEKDGGSLYLAQLWFNPNGDLIGKHRKMRASVAERLIWGDGSGSMMPVFQTEIGNLGGLMCWEHQVPLDLMAMNAQNEQVHVASWPGYFDDEISSRYYAIATQTFVLMTSSIYTEEMKEMICLTQEQRDYFETFKSGHTCIYGPDGEPISDMVPAETEGIAYADIDVERVIDYKYYIDPAGHYSNQSLSMNFNQQPTPVVKQLNDNKNEVLTYEAIQYQNGMLEEKV

SEQ ID NO: 27080 - protein, 330 aa, Bacillus pumilus
MTSIYPKFRAAAVQAAPIYLNLEASVEKSCELIDEAASNGAKLVAFPEAFLPGYPWFAFIGHPEYTRKFYHELYKNAVEIPSLAIQKISEAAKRNETYVCISCSEKDGGSLYLAQLWFNPNGDLIGKHRKMRASVAERLIWGDGSGSMMPVFQTEIGNLGGLMCWEHQVPLDLMAMNAQNEQVHVASWPGYFDDEISSRYYAIATQTFVLMTSSIYTEEMKEMICLTQEQRDYFETFKSGHTCIYGPDGEPISDMVPAETEGIAYAEIDVERVIDYKYYIDPAGHYSNQSLSMNFNQQPTPVVKHLNHQKNEVFTYEDIQYQHGILEEKV

SEQ ID NO: 27081 - protein, 399 aa, Burkholderia fungorum LB400
MAKQLQDAYIVAASRTPIGKAPRGMFRNTRPDELLVHAIRSAVAQVPGLDTKVIEDAIIGCAIPEAEQGLNVARMGALLAGLPNTVGGVTVNRFCASGLTALAMAADRIRVGESDAMIAGGCESMSMVPMMGNKPSMSPHIFDRNEDIGIAYGMGLTAEKVAERWKISREAQDAFSVESHRRAIAAQQAGEFNDEIAAYTITERFPDLATGEVRVKTREVSLDEGPRAETSLEGLAKLRAVFANKGSVTAGNSSQTSDGAGALIVVSEKMLKEFNLTPLARFVSFAVRGVPPEIMGIGPKEAIPAALKAAGLKIDDLDWIELNEAFAAQSLAVIQDLGLDPAKINPLGGAIALGHPLGATGAIRASTVVHGLRRRNYKYGMVTMCVGTGMGAAGIIERL

SEQ ID NO: 27082 - protein, 237 aa, Oenococcus oeni PSU-1
MAKLVFIRHGQSEWNALNLFNGWVDTKLSEEGIRQAKEAGELLAEKGIQFDQAYTSVLTRAIQTLHIALEEIDQLWIPEEKSWRLNERHYGALQGLNKKASAEKWGDEQVHIWRRSYDTLPPLQDEIQKSITVNGKTYPALDRRYAELDPKTLPLGENLKVTLERVMPFWEDKIAPDLRAGKNVIIAAHGNSLRALSKYIENISDADIMGLEIANGQPIIYDFDENLKFTNKELLSK

SEQ ID NO: 27083 - protein, 587 aa, Schizosaccharomyces pombe
MLNSRSVGSTGSNNTPLGRRRFDEKPDSLPPLPDANGMSNGYRDSYKSNSRMDHRPDGYHDGRGRRAYRKHYWGHPTPIEEMLPSQMELETAVKSCMTMEQLELYSLNVRLEEITQKLRTGDVVPHHRERSPSPPPQYDNHGRRLNTREIRYKKKLEDERHRIIERAMKMVPGFRAPSDYRRPAKTQEKVYVPVKDYPEINFIGLLIGPRGHTLKDMEAKSGAKIAIRGKGSVKEGKGRSDPSVRGNMEEDLHCLVTADSEDKINHAIKLIDNVIQTAASVPEGQNDLKRNQLRQLATLNGTLRDDENQVCQNCGNVGHRRFDCPERINHTMNIVCRHCGSIGHIARDCPVRDQQPPMADSTADREYQSLMQELGGGSAISNGNGEPQKSIEFSESGAASPQAGHPPPWAAASTSVSSSTSSPAPWAKPASSAAPSNPAPWQQPAAPQSAPALSMNPSSLPPWQQPTQQSAVQPSNLVPSQNAPFIPGTSAPLPPTTFAPPGVPLPPIPGAPGMPNLNMSQPPMVPPGMALPPGMPAPFPGYPAVPAMPGIPGATAPPGAPGSYNTSESSNLNAPPGVSMPNGYSNR

SEQ ID NO: 27084 - protein, 1036 aa, Burkholderia fungorum LB400
MTPFLSKRLLINLAVVAAAVGANAFVAYAQICGQRDADARMLRSTSVRQNLDAYQSALDGGLAALGRFETSGESAPAGAATSMAATLTRLESDLRGELAGDPAMLDALARLSADSHALQHDIDDALLRSADSGASASRPWAASTYTHLGLGMHRVEAALAALRGEENRALRASLAASASETQRAMFLLIVTMLAGSVLLIYTFGARESSAREKLRTVRALGRNDERFRGLFDDHPVPMYIVDRETLRFLAVNAAAIQQYGYSESEFLGMTIRAIRPKAEISRLESHLQRSDATHHGRTMAGIWHHRRKDGSTISADISYHALNFMGRAAFFVLADDVTDQINAEAEAQRSNQMLEAVIDNIPQRIFWKDLESRYLGCNMAFARDAGLAYPEQVVGKSDADMPWRDFSSLLNDHDREVASTGVPKMNFEVDLMIDGVHRTTVTSKLPFTDGDGRVIGVLGSYTDITERKRADLALRLQSRALDASVNAILITAPSPAGNLIEYVNPAFMRITGYDAAEAIGHDCRLLQRDDRDQEGVALIRQALAANREVSAVVRNYRKDGALFWNQLFIAPVPDQDGVITHHIGVINDVTDLMRYQEQLEYQANYDSLTRLPNRNLLRDRLQHALIVAQRHHKGVAVVFIDLDGFKNVNDSLGHSVGDRLLSVVAERLARCTRTSDTVARHGGDEFVIVMTDTVDEKSLIAWMERVRVSISEPVWLDGTELYVGCSMGASLFPQDGEDAETLMKKADLAMYRAKDMGRNTFQFYQPEMNASAGTRLNLERRLRRALRDNQFLLHYQPQVDIVSGQIVGTEALVRWRDPEVGLVPPSSFIPVAEESGLIGPLSEWVLREACRQNKAWQDEGLPPARVSVNLSARVFQQRDIAKLVMQVLDETGLEPQYLELELTESTIMRNAEEAVSMLNELHALGIGLAIDDFGTGYSSLSYLKRFPVDRLKIDRSFVSDIGISGDDETITSAIIALAHSLKLQVIAEGVETSAQLDFLKERACDEMQGFYFAKPLSTDAISELLQGGVGRELATV

SEQ ID NO: 27085 - protein, 195 aa, Glycine max
SAYEEALKTNPVLAKMMISGIVYSIGDWIAQCFEGKPLFEFDRARMFRSGLVGFTLHGSLSHFYYQFCEELFPYKEWWVVPAKVAFDQTAWSALWNSIYYTVVALLRRDPPMSILNELKATFFPMLTAGWKLWPFAHLITYGVIPVEQRLLWVDTIELIWVTILSTFSNEKSEARNSQSMVPSEVKSTSVYPPEE

SEQ ID NO: 27086 - protein, 256 aa, Botrytis aclada
AYMLKYDSTHGQFKGDIKVLSDGLEVNGKKVKFYTERDPANIPWAESEAYYVVESTGVFTTTEKAKAHLKGGAKKVVISAPSADAPMYVMGVNNETYKGDVDVISNASCTNNCLAPLAKVINDEFTIIEGLMTTIHSYTATQKTVDGPSAKDWRGGRTAAQNIIPSSTGAAKAVGKVIPELNGKLTGMSMRVPTANVSVVDLTVRIEKGASYDEIKAVIKKAADGPLKGILGYTEDDVVSTDMNGDNHSSIFDAKA

SEQ ID NO: 27087 - protein, 330 aa, Saccharomyces cerevisiae
MSSPANLLPGLNDITDVLEEFPLATSRYLTLLHEVDAKCVHSMPNLNERIDKFLKKDFNKDHQTQVRLLNNINKIYEELMPSLEEKMHVSSIMLDNLDRLTSRLELAYEVAIKNTEIPRGLRLGVDNHPAMHLHHELMEKIESKSNSKSSQALKSESRREAMAANRRQGEHYSASTHQQDDSKNDANYGGSRHESQDHTGNNTNSRKRANAANTNNADPETKKRKRRVATTAVSPSTISTATAVNNGRIGTSTASRGVSSVGNSNNSRISRPKTNDYGEPLYCYCNQVAYGEMVGCDGADCELEWFHLPCIGLETLPKGKWYCDDCKKKL

SEQ ID NO: 27088 - protein, 256 aa, Botryotinia calthae
AYMLKYDSTHGQFKGDIKVLADGLEVNGKKVKFYTERDPANIPWAESEAYYVVESTGVFTTTEKAKAHLKGGAKKVVISAPSADAPMYVMGVNNETYKGDVDVISNASCTTNCLAPLAKVINDEFTIIEGLMTTIHSYTATQKTVDGPSAKDWRGGRTAAQNIIPSSTGAAKAVGKVIPELNGKLTGMSMRVPTANVSVVDLTVRIEKGASYDEIKAVIKKAADGPLKGILAYTEDDVVSTDMNGDNHSSIFESKA

SEQ ID NO: 27089 - protein, 379 aa, Desulfovibrio desulfuricans G20
MDWQTERGQVLDSARRVVIKVGSAVLTSGNGLDVGVVDNLVAQIADLHGRGVDVVLVSSGAVSAGRAVLRRCCEIKGMPHKQAASAVGQSRLMHYYDEAFGRHGIISAQILLTKDDLRSRHRFLNARNTFAALMDWHAVPIVNENDTVAVRELEFGDNDSLASLLLNVVDADLFINLTSAGGVYADNPDTNPDARVMECIENVHGLNLDVMCGGKTAVGSGGMYSKLLAARRAAQLGVPTLILPGRKPDAMLRAFAGDEPGTWVRPEKKTVSARKFWLAYHADPTGSVVVDDGAVKALEAGKSLLPAGIIGVEGGFGRGALVRVTSAAGAVVAVGLSNYPAADLRRIMGHRTAELTAILGDNQYPEAIHRDNMLMDAVV

SEQ ID NO: 27090 - protein, 766 aa, Oryza sativa (japonica cultivar-group)
MASHIVGYPRMGPKRELKFALESFWDGKSSAEDLEKVATDLRASIWKQMADAGIKYIPSNTFSYYDQVLDTTAMLGAVPERYSWTGGEIGFSTYFSMARGNATVPAMEMTKWFDTNYHFIVPELGPNTKFSYSSHKAVNEYKEAKALGVDTVPVLVGPVSYLLLSKPAKGVEKSFALLSLLSSILPVYKEVIAELKAAGATWIQFDEPTLVLDLDSHQLAAFSAAYTELESALSGLNVLIETYFADIPAESYKTLTSLNSVTAYGFDLIRGSKTLDLVKSAGFPSGKYLFAGVVDGRNIWADDLAASLTTLESLEAIVGKDKLVVSTSCSLMHTAVDLVNETKLDSEIKSWLAFAAQKVVEVNALAKALAGQKDEAYFAANTAAQASRRSSPRVTNEEVQKAAAALRGSDHRRATNVSARLDAQQKKLNLPVLPTTTIGSFPQTVELRRVRREYKAKKISEDEYVSAIKEEISKVVKIQEELDIDVLVHGEPERNDMVEYFGEQLSGFAFTANGWVQSYGSRCVKPPIIYGDVSRPNAMTVFWSKMAQSMTSRPMKGMLTGPVTILNWSFVRNDQPRFETCYQIALAIKKEVEDLEAGGIQVIQIDEAALREGLPLRKAEHAFYLDWAVHSFRITNCGVQDTTQIHTHMCYSNFNDIIHSIINMDADVITIENSRSDEKLLSVFREGVKYGAGIGPGVYDIHSPRIPSTEEIADRINKMLAVLDTNILWVNPDCGLKTRKYTEVKPALTNMVLAAKLIRTQLASAK

SEQ ID NO: 27091 - protein, 256 aa, Botryotinia calthae
AYMLKYDSTHGQFKGDIKVLADGLEVNGKKVKFYTERDPANIPWAESEAYYVVESTGVFTTTEKAKAHLKGGAKKVVISAPSADAPMYVMGVNNETYKGDVDVISNASCTTNCLAPLAKVINDEFTIIEGLMTTIHSYTATQKTVDGPSAKDWRGGRTAAQNIIPSSTGAAKAVGKVIPELNGKLTGMSMRVPTANVSVVDLTVRIEKGASYDEIKAVIKKAADGPLKGILAYTEDDVVSTDMNGDNHSSIFDAKA

SEQ ID NO: 27092 - protein, 429 aa, Corynebacterium glutamicum ATCC 13032
MLVTSTWGWTVHGDGKKIEPGAVVAPKERLSWGRTIGIGMQHVIAMFGATLLVPTLTGFPVNTTLLFSGLGTILFLLITRNRLPSYLGSSFAFIAPLTATQVHGIGVQIGGILVAGLVLVAIGFVVKAAGKRVIDAVMPPAVTGAIVALIGLNLAPTAAGNFSSQPLVATATLFAILIATVAGRGMIARLGILIGVVIGWVFAAITGNLSEGAADTIREAAWFGLPQFHKPEFQLSAILVTLPVIIVLIAENVGHVKAVSEMTGEDLDDLAGDALIADGFGTTLAGAFGGSGTTTYAENIGVMAATRVYSTAAYWVAACTAIALAFIPKFGALIFTIPAGVLGGACLVLYGLIGMLGIRIWQDNKVNFNNPVNLTMAAVALVAGIGNLTLTVFGVTLEGIAWGSVGIIVLYPIMKRLYLSIGEGKNAKF

SEQ ID NO: 27093 - protein, 410 aa, Ashbya gossypii ATCC 10895
MPLKNFQYREDEDGELPPLVTGLEENIQELLSELKPDGGLNIVNERKIEQANKQHQGAGSQKKIPVTVITGYLGSGKSTLLEEITKRGSDMRIAVILNEFGDSSEIEKSLTIKNNGKAYEEWLDLGNGCLCCSLKDVGVKAIEAMVSRSPGKIDYIILETSGIADPVPIVKMFWQDEGLNSCIYIDGIVTVLDAEHVMTWLDEVAPPRQWRGDQVLMENQMTVAHLQLAMADAVVLNKIDRLEGLDDEIAVVEEKVRSINAVAPIYRTKFGDLEINKVLNLHAFGASDIPDAHVAYHDPRLSTVTLTCRPLRDKAELEWFEEHFLQALLWKDFGRGELTQGQEFEIHRTKALLLVGSEFKIVQGVRDTYEVLRGEPVPGVKQCKLVFIGVHLDKQYIQGIMESALNARIE

SEQ ID NO: 27094 - protein, 980 aa, Bordetella pertussis Tohama I
MAAYNAPVSNCQFRLTHILPIPQRHGAPTDPFQMNAIRQQSDSAEPLRHDIRLLGRCLGEVIQACEGKRVYDTIETLRRTAVRFRRAGDPADDKLLQARVKQLRGNDPNSVARAFSYFLHLSNIAEDRDQNRRQRERALAGAGPERGSLRQAIESLKAQGVNNARIRRLLSEACVMPVLTAHPTEVQRKSTLDVHREISSLLVQRERELTADELSELDLALIGQVATLWQTRMLRYTRLTVADEIENALSYYRSTFLNVIPRVYGDLARLLNREPVKPFTPPPPPLEPFLRMGSWIGGDRDGNPNVDAATLERALLRQATVLFEHYLQEVHALGAELSASTLLIEADPALLALADAGGDDSPHRRDEPYRRALIGIYARLAATARHLTGQKLARRATVPAAPYDTPDALAADLAVIAASLSARHGAPIARLRLSGLQQAVTVFGFHLATVDLRQSSDVHERVLAELFARAGDGIDGQAVDYLALDEAARVAGRELAHARPLASPWIAYSEETASELAVLRAAAAGRARYGRQAVLQSIVSHTETLSDLLEVLVLQKEAGLIAPPGETIAPGDGLMVVPLFETIPDLQRGPEIMAAWLDLPEVRQRVRLAQGDTQEVMLGYSDSNKDGGFLTSNWSLYQAERALVDVFSARSVRLRMFHGRGDSVGRGGGSSYDAILAQPPGTVAGQLRLTEQGEVIQSKYKDAEVGRWHLELLVAATLESSLAPQAAATSAEDAHMQQHAPAMSFMSELAQRTYRGLVYDTPGFADYFFAATPISEIAGLNIGSRPASRKKGQHIEDLRAIPWGFSWAQCRLMLTGWYGMGSAIEAYLETGAQGAPRSRRARLAQLREMASDWPAFRTLLSNMEMVLAKSDLAIAAGYAQLVPRRGLRERVFGAITAEHGRTLAMLRLLTRRDLLADNPGLMASLRERFAYIDPLNYLQIELIKRHRAAQRRAGDDADIRVPRAIHLTINGIAAGLRNSG

SEQ ID NO: 27095 - protein, 545 aa, Lactococcus lactis subsp. lactis Il1403
MKKIKTNDFHKMVGYQIYPKSFKDTNGDGIGDINGIIEKIPYLRELGIDFIWINPIYKSPQVDGGYDISDYQVIDEMFGSLEDFKKLLDKAHENGLKVIMDLVVNHTSDQHPWFLESQKSKDNPYRDYYLWEDASPNQMPNDWISFFGDSTWAYDEKTKQAYFHVFAKEQPDLNWKNPKVRQEIYDMIRWWLDLGIDGFRLDAISHIQKMPWNYKIKSWKGDGPWVPFMNVAGIETYMSDLKAIFDEYGALTVGEASGVRSKQAPDWTDEAGYINMIFELEHNVRKSNGNGQGSIYGYKKVIMRWQEDLLERGWNALYIENHDQPRSIDTFGDGSIESAKALAVSYMLLRGTPFIYQGQEFGMTNFPFTDAKQLRADEIKKKYEMLMTELSANQALAEVTQNSREHSRTPMQWDNSKNAGFTSGQAWMEINPNFSVISSRTNQELIELYKKLIELRHQEPAISEGSIKFHFKRHPQVLVYERAEFLIIVNLADKKAHLDFTKIDSFTDSSAESSVINYQQVLGSSNQKFQEKMVLSAWEYRVYKK

SEQ ID NO: 27096 - protein, 206 aa, Triticum aestivum
MSTSRRRTLLKVIVLGDSGVGKTSLMNQYVHNKFSQQYKATIGADFVTKEVLIEDRLVTLQIWDTAGQERFQSLGVAFYRGADCCVLVYDVNVNKSFDTLNTWHDEFLNQASPSDPKTFPFILLGNKIDVDGGKSRVVSEKKAMEWCSSKGNIPYYETSAKEDYNVDEAFLSVAKLALEHERDQDIYFQTVADPVPETEQRGGCAC

SEQ ID NO: 27097 - protein, 524 aa, Lactococcus lactis subsp. lactis Il1403
MKNKLLLLLVTLLATCALSACQKANSKDSSVKKAAVSQKVDRSLYRNFYEIFTSSFADSNHDGEGDLNGVTQHLDYLNTGKSNSTTDLKVQGLWMTPIFASPSYHGYDVTNYEEINPKFGTMADFENLIAQAKKRGIAVILDMPFNHTATDNIWFQKALSGDKKYVDYYNWSDTAEEGYSLASNGKYYESEFDKSMPDLNLANPEVKKEIAKITKLWLDKGVSGFRLDAVGFYFSNDDKKTTAFTKWLTDTVKKQNPKAYLVGEVFSTASAIDDIYQSGIDSLFDFPNALQSSSSPINSALVLGEGSLFGQQIEAWDQEIHADNPKAIDAPFLSNHDTDRSATLLSSLSMQKMAAQTYLLMPGNPFIYYGEELGLTGSGIDQNKRLPMPWNAAGTDSPKADISVPGATEIATTDGGSVAQQEANPNSLLNWYKKILRVKAKYPEIATDRLKNISVSEESLSVINYGKDLTIINNFSDTENVTMKLPKSVVGTKITDQLSVSSSQAKLTDGKLTIPAYSTVILKK

SEQ ID NO: 27098 - protein, 153 aa, Theobroma speciosum
VLDTDGDDLRTGVQYYVVSSIWGAGGGGLALGRATGQSCPEIVVQRLSDRDNGTPVIFSNAASKDGVVRVSTDINIEFVPIRDRLCSTSTVWKLDNYDNSAGKWWVTTDGVKGEPGPDTLTSWFKIEEAGGIGYKFRFCPVCDSCTTLCSDIG

SEQ ID NO: 27099 - protein, 541 aa, Lactococcus lactis subsp. lactis Il1403
MNSHLNGVVNMKENWWQKTVVYQIYPRSFMDANGDGVGDLQGIISKLDYLEKLGIGAIWLSPVYQSPMDDNGYDISDYQAIADVFGTMADMDELLMEAKKRNIQIVMDLVVNHTSDEHKWFVEARKSKDNAYRDYYIWADEPNGLQSTFSGSAWEFDEESGQYFLHLFSKRQPDLNWGNPQVHQEVYDMMNFWIDKGIGGFRMDVIDLIGKEIDQEITGNGPKLHEYLHEMNQATFGQKNLLTVGETWGATPEIAELYSDPKRQELSMVFQFEHITNAYLDEGEKWDKKEFSVSKLKEILAKWQALEKGWNSLFWNNHDLPRIVSNWGNDGKYRLKSAKTFAILLHLMKGTPYIYQGEELGMTNYSFELIEEVNDIESRNMFAERLAAGHSENEIMDSIRRVGRDNARTPMQWTAGENAGFTDGKPWLAVNPNHEEINADQAMSDPDSVFYTYQKLIELRKQHDWVIYGDFKLIDSEADVFAYLRTYKGKKYLVVANLSDEENQFKTGFVCRDLLIHNENFLPELSQIKLKAWEAFACEVE

SEQ ID NO: 27100 - protein, 154 aa, Theobroma angustifolium
VLDTDGDELRTGVQYYVVSTIWGAGGGGLDLGRATNQKCPEIVVQRRSDLDNGTPVIFSNADSEDDVVRVSTDINIEFVPIRDRLCSTSTVWKLDDYDNSAGKWWVTTDGVKGEPGPNTLSNWFKIEEAGGTLYKFRFCPSVCDSCATLCSDIG

SEQ ID NO: 27101 - protein, 401 aa, Nicotiana tabacum
MESRVLTGATAIRGLPLLRKPVVKLTAASFPTVAKPIGAVSGGANLIWGRQLRPDILLEASPKRESMKPCFTAASSPAEGSDSAGDAKVGFFNKATLITGFFFFMWYFLNVIFNILNKKIYNYFPYPYFVSVIHLAVGVVYCLISWTVGLPKRAPIDSTQLKLLTPVAFCHALGHVTSNVSFAAVAVSFTHTIKALEPFFNASASQFILGQQIPLALWLSLAPVVLGVSMASLTELSFNWLGFISAMISNISFTYRSIYSKKAMTDMDSTNVYAYISIIALIVCIPPAIIIEGPQLLQHGFADAIAKVGLTKFVTDLFWVGMFYHLYNQVATNTLERVAPLTHAVGNVLKRVFVIGFSIIVFGNKISTQTGIGTCIAIAGVALYSFIKAKMEEEKRQKKAA

SEQ ID NO: 27102 - protein, 584 aa, Lactococcus lactis subsp. lactis Il1403
MNKAAIYHRPESEFAYLYAKNLMHVRLQTQKSDVEKVELFYGDPYSWEGLDNPETQYWASQKVEMKKYLSTNISDYFEAEITVATKRVDYLFVITGLDGEKVVYTDQGMFDYDESLVTKKYGAFRLPYFHESDRFKAPEWVKETVWYQIFPERFANGDTSNDPEGTKAWNPQDVPDRQDFYGGDLQGVIDHLEHLTELGVNGIYFTPIFQAFSNHKYDTEDYMEIDKQFGDKELFKTLVKEAHARGIKVMLDAVFNHIGDTSAQWQDVLKNQEKSKFADWFHVNSWPATYTPTDDFENAENATYDTFAFTPHMPKLNTANPEVEAYLLKVADYWISEFDIDAWRLDVADEVDHTFWKKFRTTCDAAKDDFYILGEVWHSAQPWLVGDEFSAVMNYAYTDAIKDGLITKKISLEQMVSNINTQLTLYRKQVNQMMFNVLDSHDTPRILTVAKNNKNLMKLVETFTFMQPGVPCIYYGDEYAVTGGMDPECRKVMPWEEKDQDLEMFDFFKNLIALRKQYQGILSDSEVEWKIVDSENGIVKFERGSLKAIFNIGEKPAYFSADEVVFSNLVDQNNILQYGFVIYK

SEQ ID NO: 27103 - protein, 154 aa, Theobroma subincanum
VLDTDGDELRTGVQYYVMSAIWGAGGGGLALGRATDQKCPEIVVQRRSDLDNGTPVIFSNADSEDDVVRVSTDINIEFVPIRDRLCSTSTVWKLDDYDNSAGKWWVTTGGVKGEPGPNTLSNWFKIEEAGGNVYKFRFCPSVCDSCATLCSDIG

SEQ ID NO: 27104 - protein, 386 aa, Vitis vinifera
MESTLAFNSGSNSMNQSFSSSAEFNSPVPETIPKSEEDTFVFATLLTSASVLPMALKSALELDLLEIIAKAGPGAFVSTSEIAAKITKRNPKAPVMLDRILRLLATYDVVKCSLRDSPDGGVERLYGLGPVCKYFTTNEDGVSVAPLLLMNQDKVPMQSKRYHLKDAVLDGGIPFNKAYGMTDFEYHGTEPRFNKVFNNGVSGHPTITMKKILEAYKGFEGLTSIVDVGGGTGATLNMIISKYPTIKGINFDLPHVIDDAPSYPGVEHVGGDMFVSVPKGDAIFMKWMCYEWDDAHCLKFLENCYQALPDNGKVIVAECILPVVPDTSLATKSAVHIDVIMLAYNTGGKARTEKEFEALAKGAGFQGFKVVCCAFNSWIMEFCKTA

SEQ ID NO: 27105 - protein, 274 aa, Staphylococcus epidermidis ATCC 12228
MNAYLAEFLGTAILILFGGGVCANVNLKRSAGNGADWIVIAFGWGLAVTMGVYAVGTFSGAHLNPAVTVALAMDGGFSWAQVPGYIVCQMLGGIVGGVFVWLMYLPHWKVTEDPAVKLGVFSTAPAIKNYFANFLSEIIGTMALTLGILFIGVNKIADGLNPIIVGSLIIAIGLSLGGTTGYAINPARDLAPRIAHAILPIHGKGKSNWSYAIVPVLGPMAGGMLGAIVYEVFYKQTFNFSCFIGLIVLIFTLILGVILNKISQNKNNDIESIY

SEQ ID NO: 27106 - protein, 411 aa, Hordeum vulgare
MGALKANGLDVPNGVLRSSMIPSWNLHTIVKRVLQSIRTVIFTSKLNLLMPFGPATIVLYYTTNWHGVIFLFSMLGITPLAERLGYATEQLAVYTGPTLGGLLNATFGNATEMIIAIYALKNGMIRVVQQSLLGSILSNMLLVVGCAFFAGGIIHRNKDQVFSKATAVVNSGLLLMAVMGLMFPAVLHFTHSEIQQGASELALSRFSSGIMLVAYASYLYFQLSSRNSSYSQIGSEEVPNEDATEEDEEVEISMWEAIAWLAVLTIWISVLSEYLVNAIEGASDSLNLPVAFISVILLPIVGNAAEHASAIMFAMKDKLDITIGVAIGSSTQISMFVIPFCVVVGWMMGQKMDLNFQLFETATLFITVLVVAFMLQDGVANYLKGLMLVLCYLIVAASFFVHVDPQASDDD

SEQ ID NO: 27107 - protein, 244 aa, Zea mays
MEVITHPTPRTVDEVFTDFRGRRAGLIKALTTDMVKFYQTCDPEKENLCLYGLPNETWEVNLPVEEVPPELPEPALGINFARDGMQEKDWVSLVAVHSDSWLLSVAFYFGARFGFGKNERKKLFQMINELPTIFEIVTGNAKQSKDLSGNNNTSSKSKSNGLKVPKMSSPPPKEEDESEDEDEDDEQGAVCGACGDSDGTDEFWICCDACEKWFHGKCVKITPAKAEHIKHYKCPSCSNKRARP

SEQ ID NO: 27108 - protein, 136 aa, Brassica napus
  misc_feature (21)..(21): Xaa can be any naturally occurring amino acid
  unsure (1)..(136): unsure at all Xaa locations
MLEKKAETFNMNRVIDDFDEXTRNADQVQKQTLKEILHKNKSAIYLRNFGINGDTTTDPEGDFKALVPLVTDSELEPYIKRMVDGDTSPILTGHPVPAISLSSGTSQGRPKFVPFTDELMENTLQLFRTAFAFRNR

SEQ ID NO: 27109 - protein, 292 aa, Lolium multiflorum
IELGLLEILVAAGGKSLTPTEVAAKLPSAANPEAPDMVDRMLRLLASYNVVSCLVEEGKDGRLSRSYGAAPVCKFLTPNEDGVSMAALALMNQDKVLMESWYYLKDAVLDGGIPFNKAYGMSAFEYHGTDPRFNRVFNEGMKNHSIIITKKLLELYHGFQGLGTLVDVGGGVGATVAAITAHYPAIKGVNFDLPHVISEAPPFPGVTHVGGDMFKEVLSGDAILMKWILHDWSDQHCATLLKNCYDALPAHGKVVLVECILPVNPEAKPSSQGVFHVDMIMLAHNPGGSQRY

SEQ ID NO: 27110 - protein, 406 aa, Nocardia farcinica IFM 10152
MPEAVIVSTARSPIGRARKGSLVDMRPDDLASQIVRAALDKVPALDPTQIDDLILGCGSPAGEQGFNIARNVAVMLGYDTLPGTTVHRYCASSLQSTRMAFHAIKAGEGHAFISAGVETVSRYVHGSADSWPNTQNPIFADAQARTAKAAEGGAGIWHDPREDGLLPDVYIAMGQTAENVASFTGITREDQDRWGVRSQNRAEEAINNGFFEREITPVTLPDGTVVSKDDGPRAGVTYEAVSQLKPVFRPDGTVTAGNCCPLNDGAAALVIMSDVRAKELGLTPLARIVSTGVSGLSPEIMGLGPIESVKNALALANMSVDDIDLFEINEAFAVQVLGSARELKIDEDKLNVSGGAIALGHPFGMTGARITATLINNLQTYDKQFGVETMCVGGGQGMAMVLERLS

SEQ ID NO: 27111 - protein, 292 aa, Festuca arundinacea
IELGLLEILVAAGGKSLTPTEVAAKLPSAANPEAPDMVDRILRLLASYDVVTCLVEEGKDGRLSRSYGAAPVCKFLTPNEDGVSMAALALMNQDKVLMESWYYLKDAVLDGGIPFNKAYGMSAFEYHGTDPRFNRVFNEGMKNHSIIITKKLLELYHGFEGLGSLVDVGGGVGATVAAIAAHYPTIKGVNFDLPHVISEAPQFPGVTHVGGDMFKEVPSGDAILMKWILHDWSDQHCATLLKNCYDALPAHGKVVLVKCILPVNPEANPSSQGVFHVDMIMLAHNPGGNQRY

SEQ ID NO: 27112 - protein, 291 aa, Yersinia pestis biovar Medievalis str. 91001
MGLLVVLRTHDVFNPPHMRDVTGNIKNQTGTEKILRRQYRVITETTVPISKSESLPYIILSQPEHYRLFTLMKEIEKLIANNRTWSNTICKDDPGFFEHLAQSQKPRFLWIGCSDSRVPAEQLTGLKSGELFVHRNVANLVIHTDLNCLSVVQYAIDVLQVEHIIICGHLGCGGVEAAIKGEEMGLIDNWLLHIRDLWYKHSSLLGELPQEERSNVLCQINVVEQVYNLGHSTIVRSAWKRGQKAMIHGWVYGIENGLLRDLEVSATSLGSLEMVYRKAMAELLQNNKEDH

SEQ ID NO: 27113 - protein, 320 aa, Oenococcus oeni PSU-1
MSEFITIGEPIVTFASTDADADLVHAENFKKIVGGAELNVAIGVSRLGHSTQYISRVGNDPLGTFVKNEIKSNQVGADYVSSDNDNWTAFQLKEKVTVGDPLTFNFRRNSAAAHLSSGIIDRVDLSDVKIAHMSGIFPAISKTAQTSFRHLFERLNQRNIFTTFDPNLRPSLWPNEKTMIKTINELAAFADVVLPGTNEGEILIGSKDPETIADFYLQADKTKTVIVKVGPQGAYVKNKGQSGYYVNGFKVGKVVDTVGAGDGFALGYITATLEGKSQKSAVMRGNAVGALQVQTPGDNDGYPTVKKLADFYAKEGVSEK

SEQ ID NO: 27114 - protein, 389 aa, Bacillus subtilis subsp. subtilis str. 168
MKIDSWLNERLDRMKEAGVHRNLRSMDGAPVPERNIDGENQTVWSSNNYLGLASDRRLIDAAQTALQQFGTGSSGSRLTTGNSVWHEKLEKKIASFKLTEAALLFSSGYLANVGVLSSLPEKEDVILSDQLNHASMIDGCRLSKADTVVYRHIDMNDLENKLNETQRYQRRFIVTDGVFSMDGTIAPLDQIISLAKRYHAFVVVDDAHATGVLGDSGQGTSEYFGVCPDIVIGTLSKAVGAEGGFAAGSAVFIDFLLNHARTFIFQTAIPPASCAAAHEAFNIIEASREKRQLLFSYISMIRTSLKNMGYVVKGDHTPIIPVVIGDAHKTVLFAEKLQGKGIYAPAIRPPTVAPGESRIRITITSDHSMGDIDHLLQTFHSIGKELHII

SEQ ID NO: 27115 - protein, 255 aa, Triticum aestivum
  misc_feature (150)..(150): Xaa can be any naturally occurring amino acid
  misc_feature (161)..(161): Xaa can be any naturally occurring amino acid
  misc_feature (169)..(169): Xaa can be any naturally occurring amino acid
  misc_feature (176)..(176): Xaa can be any naturally occurring amino acid
  misc_feature (187)..(187): Xaa can be any naturally occurring amino acid
  misc_feature (190)..(190): Xaa can be any naturally occurring amino acid
  misc_feature (192)..(192): Xaa can be any naturally occurring amino acid
  misc_feature (201)..(201): Xaa can be any naturally occurring amino acid
  misc_feature (203)..(203): Xaa can be any naturally occurring amino acid
  misc_feature (209)..(209): Xaa can be any naturally occurring amino acid
  misc_feature (213)..(213): Xaa can be any naturally occurring amino acid
  misc_feature (219)..(219): Xaa can be any naturally occurring amino acid
  misc_feature (222)..(222): Xaa can be any naturally occurring amino acid
  unsure (1)..(255): unsure at all Xaa locations
MAMDAERRQAELIAQFSAQAAALSSAPQLAALVLEATSHPALFAFSELLTLPALSKLTGTQYASSLDLLRLFAYGTLNDYKSNSGFLPALLPDQVRKLKQLSVLTLAESTKILPYDQLMQELDVSNVRELEDFLINECMYSGIVRGKLGXLRKCFEVQLAXGRDLTPDXLKNMIEXLPDWWGTSDRXLHXIXRKQWADTMXRXEQEHQXDFRXMEEAKXNKXLTFNQTLRRQFPPGRKRSQKGHGYYYLQQTRTY

SEQ ID NO: 27116 - protein, 448 aa, Bacillus subtilis subsp. subtilis str. 168
MTHDLIEKSKKHLWLPFTQMKDYDENPLIIESGTGIKVKDINGKEYYDGFSSVWLNVHGHRKKELDDAIKKQLGKIAHSTLLGMTNVPATQLAETLIDISPKKLTRVFYSDSGAEAMEIALKMAFQYWKNIGKPEKQKFIAMKNGYHGDTIGAVSVGSIELFHHVYGPLMFESYKAPIPYVYRSESGDPDECRDQCLRELAQLLEEHHEEIAALSIESMVQGASGMIVMPEGYLAGVRELCTTYDVLMIVDEVATGFGRTGKMFACEHENVQPDLMAAGKGITGGYLPIAVTFATEDIYKAFYDDYENLKTFFHGHSYTGNQLGCAVALENLALFESENIVEQVAEKSKKLHFLLQDLHALPHVGDIRQLGFMCGAELVRSKETKEPYPADRRIGYKVSLKMRELGMLTRPLGDVIAFLPPLASTAEELSEMVAIMKQAIHEVTSLED

SEQ ID NO: 27117 - protein, 527 aa, Oryza sativa (japonica cultivar-group)
MLPMLPPPALRAPSAWEQATTSSSIGRSAMEESCSSNWPATPCAAATTADKSNCTVGSTNNSPSEQVGHGDSLIYSLPYLPEDIWRHIHSLMPMSAAARAACLSHSFLNSWRFHPNLSLNFKTLCPRTSRGNFKCKIDSILRNHLGTAKILKLNVADEDSTYPYIDRWLEVAVTPGIEELTLTLHKKYIFACSLLSDGVRDSIRCLQLTFCAFHPMAELGPLRSLTKLHLCGVHITGDELESLLLNSLVLEQLRLNVCNKISFLKIPCVLQHLSCLSVMACRRMQVIVCEAPNLSSISLSGGIKFSLGETLTMKVLSMIRPNVVCYARAQLPSIMPNLESMVLSSDSEAVNIPMLPTKFLCLKHLTIQIARGTFSPSYDYFFLVSFLHASPSLETLYLDVFQEDMRHESIVEDSSAHLRQLPELSHECLKSVEIIGFNSAKSLVELTCCIVKAAASLERLVLDTLRGGDRCSGESNGKICWPVSNAVLKESARAAIAVRRYIEDKVAPTTTLTLVGTCTRCHSLAFG

SEQ ID NO: 27118 - protein, 93 aa, Malus x domestica
KSVETYKIYIFKVLKQVHPDIGISSKAMGIMNSFINDIFEKLAQESSRLARYNKKPTITSREIQTSVRLVLPGELAKHAVSEGTKAVTKFTSS

SEQ ID NO: 27119 - protein, 275 aa, Burkholderia sp. 383
MTDHTRSATPFQVAALQMVSTPDVARNLAEARRLIAEAAGEGAQLVLLPEYFCFMGHRDTDKLALAEPYQDGPIQHFLADAARRHGIWVIGGTLPLKAPEPDRVLNTTLVFDPSGNEAARYDKIHLFNFEKGDESFDEARTIRAGDTVVAFDAPFGRVGLSVCYDLRFPELYRRLGDCALIVVPSAFTYTTGRAHWETLLRARAVENQCYVLAAAQGGKHENGRRTWGHSMLIDPWGEIVAVRDVGASVVLGAIDPQRIADVRQSLPAWRHRVLT

SEQ ID NO: 27120 - protein, 508 aa, Zea mays
  misc_feature (208)..(208): Xaa can be any naturally occurring amino acid
  unsure (1)..(508): unsure at all Xaa locations
MAAPGRAALLAAALLFGTFFPSASSASSYPARIAGRLLSTTASAVAKQLWSLKSAATKTATTAVTGRSMVRYEGGYAVDTVFDGSKLGIEPHAVEITPAGNLLVLDSINSNIYRVQLPLSPYSRPKLLAGSPKGLSGHVDGRLREARMNHPKGFTVDDRGNIYVADGMNMAIRKISDTGVTTIAGGKSIRGGHIDGPSDDAKFSTDSXIKYISSSCSLLVIDRGNQAIREIPLNDDDCAYQYEAGFPLGFALLCAAGFFGYMLAMLQRRLLGMSSTTDDPQAPPRPSIASIPPSYQKPLNPYIRHPFIPREETAKQETGEGFFTTAGKLMGGAKSSVGEIFGFKKKRLSSPYHHQQQQQRRANPWPVQESYAMTHDEPPPALDTRAPTPQKNYSLMRKEPEKTHYVRHGHPYFNSWDGHCHPQQQPDQQLYRQQQHLQQHRQYSAGPQTFYEQSCEPTKEIVFGAVQEVDSKRRMVEIKAVNYGDTFYERYGMRYRNNFIGYNNNNNY

SEQ ID NO: 27121 - protein, 1164 aa, Arabidopsis thaliana
MEVEGEVREKEARVKGRQPETEVLHGLPQEQSIFNNMQHNHQPDSDRRRLSLENLPGLYNMSCTQLLALANATVATGSSIGASSSSLSSQHPTDSWINSWKMDSNPWTLSKMQKQQCEENLTDTTLGMFGHVPKGRRGQRRSNGFKKTDNDCLSSMLSLVNTGPGSFMESEEDRPSDSQISLGRQRSIMATRPRNFRSLKKLLQRIIPSKRDRKGCKLPRGLPKLTVASKLQLKVFRKKRSQRNRVASQFNARILDLQWRRQNPTGTSLADIWERSLTIDAITKLFEELDINKEGLCLPHNRETALILYKKSYEEQKAIVKYSKKQKPKVQLDPETSRVWKLLMSSIDCDGVDGSDEEKRKWWEEERNMFHGRANSFIARMRVVQGNRTFSPWKGSVVDSVVGVFLTQNVADHSSSSAYMDLAAEFPVEWNFNKGSCHEEWGSSVTQETILNLDPRTGVSTPRIRNPTRVIIEEIDDDENDIDAVCSQESSKTSDSSITSADQSKTMLLDPFNTVLMNEQVDSQMVKGKGHIPYTDDLNDLSQGISMVSSASTHCELNLNEVPPEVELCSHQQDPESTIQTQDQQESTRTEDVKKNRKKPTTSKPKKKSKESAKSTQKKSVDWDSLRKEAESGGRKRERTERTMDTVDWDALRCTDVHKIANIIIKRGMNNMLAERIKAFLNRLVKKHGSIDLEWLRDVPPDKAKEYLLSINGLGLKSVECVRLLSLHQIAFPVDTNVGRIAVRLGWVPLQPLPDELQMHLLELYPVLESVQKYLWPRLCKLDQKTLYELHYHMITFGKVFCTKVKPNCNACPMKAECRHYSSARASARLALPEPEESDRTSVMIHERRSKRKPVVVNFRPSLFLYQEKEQEAQRSQNCEPIIEEPASPEPEYIEHDIEDYPRDKNNVGTSEDPWENKDVIPTIILNKEAGTSHDLVVNKEAGTSHDLVVLSTYAAAIPRRKLKIKEKLRTEHHVFELPDHHSILEGFERREAEDIVPYLLAIWTPGETVNSIQPPKQRCALFESNNTLCNENKCFQCNKTREEESQTVRGTILIPCRTAMRGGFPLNGTYFQTNEVFADHDSSINPIDVPTELIWDLKRRVAYLGSSVSSICKGLSVEAIKYNFQEGYVCVRGFDRENRKPKSLVKRLHCSHVAIRTKEKTEE

SEQ ID NO: 27122 - protein, 226 aa, Zea mays
  misc_feature (148)..(148): Xaa can be any naturally occurring amino acid
  unsure (1)..(226): unsure at all Xaa locations
MAALAAASTAAFAAKPRARLSVACSAATGDSSSVSLASSVKTFSAALALSSVLLSSAATSPPPAAADIAGLTPCKESKAFAKREKNSIKKLTASLKKYAPDSAPALAINATIEKTKRRFENYGKFGLLCGADGLPHLIVSGDQRHWGXEFVTPGLLFLYIAGWIGWVGRSYLIAISGEKKPAMREIIIDVELATRLLPRGFIWPVAAYRELINGDLVVDDKDIGYY

SEQ ID NO: 27123 - protein, 486 aa, Candida albicans SC5314
MTKKYSSTDLKSSKLLHRDLNSPPIVIDHANGNNLFTQDHHQLFDSVGGAAVISVGHNNKEVIDAITTQLQKVSYLHTGEFTVPIAEELAHELINNLDSSSGYSGGDVDPSKKIAKVYFANSGSEANEAAIKLVMQYFYEQGKHTKTQFISRHQSYHGNCLGGMSLSGHIARRKPYESIIDQSRFHKVDPCYEFRYKQSNDESNESSDQYVKRLLEQLENKILQIGPENVAAFFAETIVGATTGCVPATPGYFKGVREICDKYDILLVLDEIMCGSGRTGTFFAWQQEQEGEEQGGKSIIPDITTCGKAITSGYCPLSCVFFNKKILDVLSNGSSCFNCGHTYQSFPIACAAAHAVQKIIKRDNLLDNVVKMGVILQELLMMKIDPLEIVANIRGRGLFWGIEFCKNKSTLEPFNPSCNVSIKIGEYTKRNGVVVYPGKGTIDGIKGDHILIAPSFTITKEEIEFIVDIVAKSIKEFIANEVDLFK

SEQ ID NO: 27124 - protein, 162 aa, Glycine max
MNREKLMKMAGSVRTGGKGTVRRKKKAVHKTTTTDDKRLQSTLKRIGVNAIPAIEEVNIFKDDVVIQFLNPKVQASIAANTWVVSGSPQTKKLQDILPSIIHQLGPDNLENLKKLAEQFQKQAPEGATGSTTAQEENDDDDVPELVPGQDFETAAEETKAAS

SEQ ID NO: 27125 - protein, 430 aa, Frankia sp. CcI3
MSIETTDPTANGRTTARQAVGRQAARQVVVTGLGATTPLGGDVASTWSGVLAGRSGIRRLDEPWAQSLPVRIAAPVAVEPQLGRVEARTLDRGQRLALVAAREAWADAGTPTPEPERFAVVVGSGVGGLTTLLDQYDVFRERGARQVSPHLVPMLMPNGPAAAVGLALGARAGVHAPVSACASGAEAIATAVDLIQAGRADVAVAGGTEAAVHPLPLVGFAQMQALSRREDPPESASRPFDKVRDGFVLGEGAGMFVLEAAEHARARGARVYTTVAGAGVSADAYHVAAPDPTGAGAARAVRRALHAAGLDPADVVHVNAHASGTPAGDLAESRALRGALGAALDGVAVTSTKSMTGHLLGAAGAVEALLCVLTLRERTVPATRNLEAIDDEITLDVVTMDNRPIRTGAALSTSFGFGGHDVCLAFTPWP

SEQ ID NO: 27126 - protein, 639 aa, Lactuca sativa
MMMDSCDCFETQWPADELLVKYQYISDFFIAFAYFSIPLELIYFVQKSAFFPYRWVLMQFGAFIVLCGATHFINLWTFSSHSKTVAIVMTIAKLSTAFVSCVTALMLVHIIPDLLSVKTRELFLKQRAEDLDREMGLIIKQEETGRHVRMLTHEIRSTLDRHTILKTTLIELGRTLDLEECVLWMPSRKGMILQLSHSLHNLIPFASTVPINLPIITEVFNSAEAIRIPHNCPLARIRTPVGSYIPPEVVAVRVPLLHLSNFEIDNWPDHSAKSYAVMVLILPLNGVRKWRDHELELVTVVADQVAVALSHASILEESMRARDQLMDQNFALNVARQEAEMAIHARNDFLAVMNHEMRTPMHAIIALSSLLLETELTPDQRAMIETILKSSNLLATLVNDVLDLSRLEDGSLELESEVFNLHGLLREVVRLINPIASVKNTSMTLNCDVDLPNFGVGDEKRLMQIILNVVGNAVKFTKGGHVSIQASVLNPEYLQEWQTPEFCPTFTQGLFYLLVQVKDSGSGIKQQDIPHIFTKFSEPRSASNRSGDGAGLGLAICKRFVDMMGGHIWIESGGLGKGTTVAFLVKVGECNYQNDLSIVRPKARTRPHQGSGELIKHRGDESYRGGGTASFPAHDHNSF

SEQ ID NO: 27127 - protein, 590 aa, Frankia sp. CcI3
MNILRVPGGTELPADRGLAAAVLTEVAMVADRPVLAHQVDGGWRDVTAGRFCFDVAAVARGLVAHDVGVGDRVAIMGRTGYGWAVADFAIWSIGAVTVPVYPTSSAHQVDHIIGDSKASWCFVETPDHERLVLSAGLPATRVWSLDEAVSALGTAGQSVAESEVLRRRDAVRADDLATIVYTSGTTGVPKGCLLTHANVFSAAVNSVERLDPVMRPATGSASTILFLPLSHVFGRVTMIGCLWAGVRTALLPDPGGLVPALRTFRPTFLITVPSALEKMRKGARAAAAGGLSGRLFAAAERTACVLGRARRGQGGLGLVTRLQAPLFDRLVYRRLRAAFGGRLRHVVCGGATLDPSTAEFLTGVGVHVLGAYGLTEASTAVSISAPGLDRPGSTGRPLPATTVAISDEGEVLVAGPQVSPGYWPDRTGAHEPWLRTGDLGRLDDDGYLHITGRIKEIIITTGGKNVSPAPLEDRIRLHPLVSNAIVIGENRPFVTALVTLDRAAVQAWARRGGHKLDEAAAHTDPRLVAEVSAAVDAANAQVSRAESVRKFRLLSHDFTIQGGQLTPSLKLRRAVIEEENAKEIEELYAS

SEQ ID NO: 27128 - protein, 737 aa, Lactuca sativa
MDSCNCIEPQWPADELLMKYQYISDFFIALAYFSIPLELIYFVKKSAVFPYRWVLVQFGAFIVLCGATHLINLWTFNAHTRTVAIVMTTAKVLTAAVSCATALMLVHIIPDLLSVKTRELFLKNKAAQLDREMGIIRTQEETGRHVRMLTHEIRSTLNRHTILKTTLVELGRTLGLEECALWMPTRSGLELQLSYTLRHQNPVGFTVPIQSPAINQVFSTNRAVKISPTSPVARLRPASGKYMLGEVVAVRVPLLHLNNFQIYDWPELSTKRYALMVLMLPSDSARQWHVHELELVEVVADQVAVALSHAAILEESMRARDLLMEQNVALDLARREAETAVRARNDFLAVMNHEMRTPMHAIIALSSLLQETDLTPEQRLMVETILKSSNLLATLINDVLDLSRLEDGSLELDTTTFNLHALFKEVLNLIRPVASVKRLFVTLSLSSDLPEYAVGDEKRLMQIILNIIGNAVKFSKEGSISISAIMAKPDSLRDPRAPDFFPLLSDNNFFLRVQVKDTGMGISQQDMPKLFTKFAESQSPATRNPGGSGLGLAICKRFVNLMEGNIWIESEGLGKGSTAIFFVKLGFPSRLNGSRLPHMRVPAKLGQTKFPGLKVVVVDDNGVSRTATKGLLVHLGCDVTTVSSGEECLQAITKDSYKVVFIDVSLSSDAYNVARLVHEKLPKRHEKPPPLIVGLTGNTDKAMKESLLRAGMDGLVLKPVSVEKMRLALSELLEHNT

SEQ ID NO: 27129 - protein, 357 aa, Vibrio cholerae
ASLAAILEARGLKVTMMKLDPYINVDPGTMSPTQHGEVFVTEDGAETDLDLGHYERFIRTKMTKRNNFTAGRVYADVLRKERRGDYLGATIQVIPHITNAIKDRVIAGSEGHDIAIVEVGGTVGDIESLPFMEAIRQLAIEVGREHAMFMHLTLVPYLAAAGEVKTKPTQHSVKELLSIGIQPDILVCRSDRMIPANERKKIALFCNVPEKAVISMKDVDSIYKIPQLIRSQGLDDLVCARFGINAPEADLSEWEQVIYEDANPTGEVTIGMVGKYTELPDAYKSVNEALKHAGLKNRLSVTIKYVDSQDVETKGTDVLNGLDAILVPGGFGDRGIEGKIRAAQYARENKIPYLGIC

SEQ ID NO: 27130 - protein, 758 aa, Lactuca sativa
MSKTLASLGLISLLLVGVLAVDDDGSENGFGGCNCEVEGFFGYRNIMETQRVSDFLIAVAYFSIPIELLYFVSCSNVPFKWVLFQFIAFIVLCGMTHLLNGWTYEPHPFQLMLALTIFKFLTALVSFATAITLVTLIPLLLKVKVREFMLRKKTWDLGVEMGMIKKQKEAGWHVRMLTQEIRKSLDRHTILYTTLDKLSEILDLQNCAIWMPDNTKTVMNLTHQLKGGQSSTIIPIQNPEVQEIKQSEVVKLLDHESELGTLSSGGSEPPGAVAAIRMPMLRVSDFKGGTPEMIQACYAILVLVLPGGQIRSWTGPELEIVKVVADQVAVALSHAAVLEESQLMRDKLAEQNRALQQAKHDAMRASQARNLFQTVMSKSLRKPMHSIVGLLSLIQDDNLMNQQKVLIDSMVKTSNVLSMLIDDVMDDSSKERFPLEMRSFRLHSLIKEAAHLAKCLCVYKGYEFVMDVDKSLPDNVMGDERRVFQVILHMVGYLLNRGNGGGGMVLRILKESGSYGRNDQRWASWRSNSGDGYVSVKFEIGINDHDTKLERSFADERIRSGGVEQSLSFGMCRKLVEMMQGKIWVVPNPVGFDQAMSLILRFQLRPSIVIGISEAGESSDHNPLSNSIFRNLQVLLADEDDMNRAVTRKQLEKLGCIVSTVASGSDCIMALNQPVSSYQIILLDLHMSDVDGFEVAARIRKSRSRNWPLIVALTASGDADVWERCLQMGINGVIQKPVVLQGISDELRRVMVHTNKVH

SEQ ID NO: 27131 - protein, 372 aa, Triticum aestivum
GPECSGYRRPTRPNIFLTDGASPAVHMMMQLLIRSEKDGILCPLPQYPLYSASIALHGGAFVPYFLDEEAGWGLEVDELKKQVDEARSKGITVRALVVINPGNPTGQVLAEENQKKIVEFCKNEGLVLLADEVYQENIYVEDKQFHSFKKIARSMGYTDDDLPLVSFQSVSKGYYGECGKRGGYMEVTGFNADVREQIYKVASVNLCSNISGQILSSLIMNPPKVGDESYESFMVERDGIISSLARRAKALEEAFNSLEGITCNKAEGAMYLFPRLHLPQKAIGAAQAAGAAPDAYYALRLLQATGIVVVPGSGFGQAPGTYHFRCTILPQEDKIPAIISRFKEFHEKFMDEFRDVSRDEAPTGTTIESGGD

SEQ ID NO: 27132 - protein, 189 aa, Oryza sativa
MGRGKIEIKRIDNATSRQVTFSKRRSGLFKKARELSILCDAEVGLLVFSSTSRLYDFASSSMKSIIERYNETKEDPHQTMNASSEAKLWQQEAASLRQQLHNLQEYHRQLLGQQLSGLDVEDLQNLESKLEMSLKNIRLRKDNVMMDQIQELSRKGSLIHQENMELHKKVSLVHQENINLQKKVAVPTA

SEQ ID NO: 27133 - protein, 763 aa, Lactuca sativa
MSKSLVIGFLIASLILTVSLANENEFAHCHCDDEGSWNAHIIESQRVSDFLIAIAYFSIPLELLYFLSCSNVPFKWVLVQFIAFIVLCGLTHLINGWGYYGNQTFQLMMALTVAKLLTALVSCATAITLLTLIPLLLKFKVRELFLKQNVLELDQEVGIMKKQKEAGWHVRMLTHEIRKSLDRHTILYTTLVELSNTLVLQNCAVWMLNDAKTEMNLTHELRPNSSGYHSSIPKNDPDVLEITGKKGVTMLRVDSELAVKSRGGIAESGPVAAIRMPMLHVSNFKGGTPELVDTCYAILVLVLPDSDRKWSFDEMAIVEVVADQVAVALSHAAVLEESQTMRDQLVEQNRVLQHAKENAMMASQARNSFQKVMSHGMRRPMHSIMGLLSILQDDQKNTNQTNIIDTISKTSSVLSTLINDVMEISAKDTGRLPLEIRPFQLHSMVKEACCLVKCLCIYQGFGFSMEVPSSIPNLVMGDEMRTFQVLLHMVGHLLDVSEEGRLVMFRVSLENGNEGRNDKVWGTGRSGSVDFVNVKFEIGTGDGGFQSELAIPSMHSGVKRQNAGGVKDSLSFSMCKKLVQMMQGKIWMSSNSKGNIQSTTLVLKFQIQHAFKRPPHFDLTNYVDQPKSNSIFRGLQVILADDDGVNRMVTKKLLEKLGCHVTTVSSGFECLSSLGPTTTPFHIVILDLHMPEMDGYEVATRIRKFRSRNRPLIVALTASAEEQVWERCLQVGMNGVIRKPVLLRGLENELRTVLQRAGERLSS

SEQ ID NO: 27134 - protein, 385 aa, Gloeobacter violaceus PCC 7421
MDDKLFLMIPGPTPMPERALLAMAKAPIGHRSGEFAKIMAEVSENLKWLHQTASEVLMLSSSGTGALEAAIINACSPGDRVLVGANGKFGERWVEVAQAFGLDVEVIFAPYGQPLSTDAFKAALEADTDKTIKAVVVTHSESSTGVINDLETIVGYIRAHGEALSIVDAVTSLGATSVPVDAWGLDFVGSGSQKAYMIPPGLGFLAVSERGWAACERSTMPRYYFDLRKYRKALKKNNTPFTTPVNLVFALQTTLQMLRAEGLDALFARHARLRDATRAALRALGLALFNPDDHSASPAITAVVPPEGIACDKLRATLKKHYDIVIAGGQGEMEGQIVRIGHLGFVGERDVLTAIAALEGALRTLGYDGFTPGSGVAAASAVLFG

SEQ ID NO: 27135 - protein, 366 aa, Lactococcus lactis subsp. lactis Il1403
MAKRIIGTTPKEDGFRMPGEFEAQDQIFMIWPERPDNWRDGAKPVQIAFTNVAKAISRFTPVTMLVSQSQYQNARYQLPADVRVLEVSNNDSWVRDCGPSFVINDKGELRANDWTFNAWGGLVDGLYFPWDQDDLVAQKVCELERVDSYRTDDFVLEGGSFHVDGQGTVLTTEMCLLSEGRNPHMSKEDIENKLKEHLNAEKILWLGDGIDPEETNGHVDDVACFVAPGEVACIYTEDEKSPFYEAAQDAYKRLNQMTDAKGRQLKVHKLTCPAKNVTIKKQFRIDTVEGTMPREDGDICIASYMNFLITNKGVIVPQYGDENDALALKQVQEMFPDREIVGVNTVEVVYGGGNIHCITQQQPKAK

SEQ ID NO: 27136 - protein, 129 aa, Chlamydomonas reinhardtii
MGGCLEEQYLEVLAALHSDAVAAATLCRVFSSRERTEEVAFGLNTVFMLFSAALVFIMHGGFAMLEAGAIRSKNAMNILLQTVLDGAASAVMWYLVGFGFAYGIGDNPNGFIGDALFGLSRYSSHNTGT

SEQ ID NO: 27137 - protein, 277 aa, Desulfitobacterium hafniense DCB-2
MVRVLELKRMANQIRQDIITMLVPAKSGHPGGSLSAADILAALYFYEMKVNPEDPHWAERDRFVLAKGHAAPVLYAALAEKGYFPKEEILGLRQTGRILQGHPDMRKVPGVDMSTGSLGQGLSAANGMALAGKADKKDFRVYVVLGDGEMAEGQVWEAAMAAAHYKLDNVTAVLDYNGLQIDGTTDNVMASDPLDDKWRAFGWHVIEVDGHNMEELLAAFAEAKTIKGKPTILIARTVKGKGVSFMENQVGWHGNAPSAEQAEQALKELREEAARLG

SEQ ID NO: 27138 - protein, 810 aa, Triticum aestivum
  misc_feature (65)..(65): Xaa can be any naturally occurring amino acid
  misc_feature (94)..(94): Xaa can be any naturally occurring amino acid
  unsure (1)..(810): unsure at all Xaa locations
MAAKLTRLHSLRERLGATFSSHPNELIALFSRYVHQGKGMLQRHQLLAEFDALFESDKEKYAPFXEDILRAAQEAIVLPPWVALAIRPRPGCLXDYIRVNVSELAVEELTVSEYLAFKEQLVDEHASSKFVLELDFEPFNASFPRPSMSKSIGNGVQFLNRHLSSKLFQDKESLYPLLNFLKAHNYKGTTMMLNDRIQSLRGLQSALRKAEEYLVSIPEDTPSSEFNHRFQELGLEKGWGDTAKRVHDTIHLLLDLLEAPDPASLEKFLGTIPMMFNVVILSPHGYFAQSNVLGYPDTGGQVVYILDQVRALENEMLLRIKQQGLDITPKILIVTRLLPDAVGTTCGQRLEKVIGTEHTDILRVPFRTENGILRKWISRFDVWPYLETYTEDVANELMREMQTKPDLIIGNYSDGNLVATLLAHKLGVTQCTIAHALEKTKYPNSDIYLDKFDSQYHFSCQFTADLIAMNHTDFIITSTFQEIAGSKDSVGQYESHIAFTLPDLYRVVHGIDVFDPKFNIVSPGADMTVYFPYTETDKRLTAFHSEIEELLYSDVENDEHKFVLKDRNKPIIFSMARLDRVKNMTGLVEMYGKNAHLKDLANLVIVAGDHGKESKDREEQAEFKRMYSLIEEYKLKGHIRWISAQMNRVRNGELYRYICDTKGAFVQPAFYEAFGLTVIEAMTCGLPTIATCHGGPAEIIVNGVSGLHIDPYHSDKAADILVNFFEKCSEDPSYWDKMSEGGLKRIYEKYTWKLYSERLMTLTGVYGFWKYVSNLERRETRRYLEMFYALKYRSLAAAVPLAVDGESSDN

SEQ ID NO: 27139 - protein, 311 aa, Desulfitobacterium hafniense DCB-2
MAKQATRDAYGKTLVALGAENKDIVVLDADLSKSTKTADFAKHYPERFFNMGIAEANLMGTAAGLAAAGKIPFASTFAIFATGRAFEQIRNSIAYPKLNVKIAATHAGVTVGEDGGSHQAVEDVAIMRAVPNMTVLVPADGVETQQAIRAAAAYEGPVYIRMGRLDVPLLFDDQYQFEIGKANVLREGSDCVVFANGVMVAAALEAAQDLEQENIRVAVVNVASVKPLDVQTIVACAQKTGAAVTAEEHNIIGGLGSAVAEALSEQAPTPLVRVGIKDTFGESGRPLELLEKYGLTKKEVVAAVKVAIARK

SEQ ID NO: 27140 - protein, 314 aa, Pirellula sp. 1
MTDTMTRPKITVVGSANVDLTFRTPRLPVPGETFAGHSLHQGMGGKGANQAVVAARLGAEVAFVARVGNDGFATQAIDAYQTDGINTSFVQHSKDQPTGTAAILVDDDAENCIIVVAGANAELNADDVRSAKDVIAFSDVVICQLETPVEAALEAFKLARAANVLTMLTPAPAELVSDELLSLCDVCVPNKTEIAAITGCSVETQADCAAAAEQLRQRGVRQVALTMGGEGVLVLDRSGMSLIPASPVKAVDTTGAGDAFTGALAVSLAEGMSLADAATRAGIVAAISVTRVGTQTSFPSLDEINRWKQAENTA

SEQ ID NO: 27141 - protein, 181 aa, Physcomitrella patens subsp. patens
MFTMVNGFRNYSEQAIQAARYIGQGFMVTLDHMNRLPMTIQYPYEKLIPSERFRGRIHFEFDKCIACEVCVRVCPINLPVVDWELKKDVKKKQLKSYSIDFGVCIFCGNCVEYCPTNCLSMTEEYELSIYDRHDLNYDQIALGRLPISVIEDSTIKTISNLSYLSKGSIEGHSNSRNVTNF

SEQ ID NO: 27142 - protein, 178 aa, Nicotiana tabacum
MRIQSITMAANNPCTNMSYGSFRSLDSPDSDFSNQLINFELSDIFELDNWPVHDDPTSVVSDPSQYSNYAANEVVTTERSRSYQDGPTNNVGSSSEKKEVKDKVAFKTLSQIEILDDGYKWRKYGKKMVKDSPNPRNYYRCSVEGCPVKKRVERDKEDCRYVITTYEGVHNHQGPSQF

SEQ ID NO: 27143 - protein, 75 aa, Pseudomonas aeruginosa
MSLFSAVEMAPRDPILGLNEAFNADTRPGKINLGVGVYYNEEGRIPLLRAVQAAEKARIEAHAPRGYLPIEGIAA

SEQ ID NO: 27144 - protein, 972 aa, Vibrio fischeri ES114
MIPALLLFPKCFNIMLFASTGIGRKLLITFMVMIALMAFGSVVGVLGFSYVEKTERTVIDSAIPAVIEARYISDLSTKIISTSQLLSQVDSEDDRKKYGKDLFESIESLYHRLKGLGVYPFDKALLARLDLQVQDIVDNLATMGESVGEKVVLHRTIQEKSQKLTETALRLEELSRSQVLNSNTVTIANVVKIYDLVENGEKEAVYKALDTLVETDLDLAERLHELRLLTFKVVNTIDDARNSHNIKKIEKLRQDFTRDMTIITRRVQAVEDPSRTKQMLDLANDLTKSERLFNELIQLVNINQKLKLLGDENVHKFQELNLTISQLLEQANDVTQQAVADVNFVLKVVQQLLISITMLGLCLVIYIMWRYVYARVITRLNQYEEAITNVANGQLDIELDTTGDDELARMGRSILIARDTAQELKEYKDSLELQIAQRTQELKSSNERLNVEIINHDKARDLAEQANRAKSAFLATMSHEIRTPLNGVLGTGELLRGSGLTAQQKQYVDIINRSGENLLDLLNDILDYSKIEAGHLSIRKKNFSVQSMITDVHHLFSSRAQQKGITLSVNVPVDTPEWWSGDCSRIRQVLNNFVGNAIKFTHTGSVTIQLSLILDTTLLFEVIDTGVGIAEHEIDTLFDVFTQAEEGMKVSGGTGLGLAISQRLIEAMDGEIGVESIEGQGSTFWFSLELDEGQPVESLSDDKTAIDIAPVNILLVEDNPVNQMVAIGFLERLGHHVIAVDTGKKAEEAIEKHQFDLLLLDINLPDTDGVTLQKRLREIYATKDDHQDELPMLAVSAHVFHEDVESYLSAGFNGFLAKPLVENQLVSTLNRILNDGKSNLKAPVIIPSLQLEMEAGIETEENEMILNEKVLQGDINVLGEDRMRKIVGVFKTSSKENLEELQTAISNQDCYQVNQLAHKLKGSAGSMGLMQLHTLCHQYEQYGKNNDISLCRNDEISQVYGAAILALDAFFK

SEQ ID NO: 27145 - protein, 175 aa, Nicotiana tabacum
MRIQSITMAANNPSANMSDGSFRSLDSPDSDFSNQLINFELSDIFELDNWPVHDDPTFVVSGPSQYSGNEVVVTERSRSYHEGSSNNIGSSRERKEVKDKVAFKTLSQIEILDDGYKWRKYGKKMVKDSPNPRNYYRCSIESCPVKKRVERDKEDCRYVITTYEGVHNHQGPSQF

SEQ ID NO: 27146 - protein, 261 aa, Bacillus subtilis subsp. subtilis str. 168
MASFQSFGIPGQLEVIKKALDHVRVGVVITDPALEDNPIVYVNQGFVQMTGYETEEILGKNCRFLQGKHTDPAEVDNIRTALQNKEPVTVQIQNYKKDGTMFWNELNIDPMEIEDKTYFVGIQNDITKQKEYEKLLEDSLTEITALSTPIVPIRNGISALPLVGNLTEERFNSIVCTLTNILSTSKDDYLIIDLSGLAQVNEQTADQIFKLSHLLKLTGTELIITGIKPELAMKMNKLDANFSSLKTYSNVKDAVKVLPIM

SEQ ID NO: 27147 - protein, 660 aa, Salmonella enterica subsp. enterica serovar Typhi Ty2
MPHIVREAPDSRSERQRPKYKYALALNVDSYTVDTNQTNKCGYRLMEQNPQSQLKLLVTRGKEQGYLTYAEVNDHLPEDIVDSDQIEDIIQMINDMGIQVMEEAPDADDLLLAENTTSTDEDAEEAAAQVLSSVESEIGRTTDPVRMYMREMGTVELLTREGEIDIAKRIEDGINQVQCSVAEYPEAITYLLEQYDRVEAEEARLSDLITGFVDPNAEEEMAPTATHVGSELSQEDLDDDEDEDEEDGDDDAADDDNSIDPELAREKFAELRAQYVVTRDTIKAKGRSHAAAQEEILKLSEVFKQFRLVPKQFDYLVNSMRVMMDRVRTQERLIMKLCVEQCKMPKKNFITLFTGNETSETWFNAAIAMNKPWSEKLHDVAEEVQRCLQKLRQIEEETGLTIEQVKDINRRMSIGEAKARRAKKEMVEANLRLVISIAKKYTNRGLQFLDLIQEGNIGLMKAVDKFEYRRGYKFSTYATWWIRQAITRSIADQARTIRIPVHMIETINKLNRISRQMLQEMGREPTPEELAERMLMPEDKIRKVLKIAKEPISMETPIGDDEDSHLGDFIEDTTLELPLDSATTESLRAATHDVLAGLTAREAKVLRMRFGIDMNTDHTLEEVGKQFDVTRERIRQIEAKALRKLRHPSRSEVLRSFLDD

SEQ ID NO: 27148 - protein, 368 aa, Arabidopsis thaliana
MDPIKHISLPVLVLFLLLSVSAGQPGTPDQRHDPYAYSGSLSPAMAVVVVVVIAALFFMGFFTVYIRHCTGAVDGSVTPAGGARRRVTNATVARGLDAETIETFPTFVYSEVKTQKIGKGALECAICLNEFEDDETLRLLPKCDHVFHPHCIGAWLQGHVTCPVCRTNLAEQTPEPEVVVETDLEAQQQSAVPVPVVELPRVKFPRSHTTGHSVVLPGESTDRFTLRVPEELRKKIMANWKLNRSNSVFVLPRGGSSRSGKQVDRSRAKSDRWLFRKTPSFLWRNRDDGSIRLGGTGSVRGNSVTSPSGDSVRADRWAFLRNPSFLWRNTTPVPSPRVEVNNKDGEGTSSVQHIGTVGSTSGSLRLPV

SEQ ID NO: 27149 - protein, 184 aa, Moorella thermoacetica ATCC 39073
MLKLLKKALQVGEATVEYPFKPVEVAPGFRGKPEYNFDRCIACGACATACPPNAITMEYDLKQGTKTWNIFYGRCIFCGRCEEVCPTGAIALTTEFELAVASKEDLYYRAEVQLRKCSCCGEYFAPSRELEYVMSTLEQSGLPEGDRQGWRQLLEKCPQCRRRQAAVSVAEATGSRDRVQGGGQ

SEQ ID NO: 27150 - protein, 168 aa, Chlamydomonas moewusii
MASIAAKSVSLRAATRRAAPVAAPADARFKVWQPVNNKQYETFSYLPPLTNQKIGRQVDYIINNGWTPCLEFADPSTSFVSNANAVRLQGVSAGYYDNRYWTMWKLPMFGCTDPSQVLREVSACQVAFPNVYIRLVAFDNVKQVQCMGFLVQRPRNAAEYCPLEKRSV

SEQ ID NO: 27151 - protein, 246 aa, Glycine max
  misc_feature (234)..(234): Xaa can be any naturally occurring amino acid
  unsure (1)..(246): unsure at all Xaa locations
MESSEEEDDFPSIESIIPQSKVDSLYQSHTEKGIRKLCCELLDLKDSVENLCGNMHSKFLAFLRISEEAVEVKHELIELQKHISAQGILVQDLMTGVCRELEEWNQSSNDVAEIQQEPELPELLEPLPNERNDQKILFLETIDVLLAEHKFEEALEALDAEEINSAELKGSGNNSSDDVSLYKSSLLERKAMLEDQLAGIAEQPSVSFPELKTALNCLIKLGKGPLAHQLWLKXYQSHLQKRMEAL

SEQ ID NO: 27152 - protein, 966 aa, Mesembryanthemum crystallinum
MSTVKLDRLTSIDAQLRLLAPKKVSEDDKLIEYDALLLDRFLDILQNLHGEDIKETVQELYEQSAEYERTHDPKKLEELGSMVTSLDAGDSIVVAKSFSHMLNLANLAEEVQISRRKRVKKVKKGDFMDENTAMTESDMEETLRRLIVDLKKSPQEIFETLKNQTVDLVFTAHPTQSVRRSLLQKHGRIRDCLAQLYAKDITPDDKQELDEALQREIQAAFRTDEIRRTQPTPQDEMRAGMSYFHETIWNGVPKFLRRLDTALKNIGITERVPYNAPLIQFSSWMGGDRDGNPRVTPEVTRDVCLLARMMAANMYFSQIDELMFELSMWRCTDELRERAEELHKYSKRDSKHYIEFWKQIPSSEPYRVILADVRDKLYYTRERSRQLLASEVSEIPVEATFTEIDQFLEPLELCYRSLCACGDRPVADGSLLDFMRQVATFGLCLVKLDIRQESERHTDVMDAITTHLGIGSYRDWTEEKRQDWLLSELRGKRPLFGPDLPRTDEIADVLDTINVIAELPSDSFGAYVISMATAPSDVLAVELLQRECKVKKPLRVVPLFEKLADLEAAPASMTRLFSVDWYKNRIDGKQEVMIGYSDSGKDAGRLSAAWQMYKVQEELLKVSKKFGVKLTMFHGRGGTVGRGGGPTHLAILAQPAETIGGSLRVTIQGEVIEQSFGEQHLCFRTLQRYTAATLEHGMNPPKSPKPEWRALLDQMAVVATEEYRSIVFKEPRFVEYFRLATPETEYGRMNIGSRPSKRKPSGGIESLRAIPWIFAWTQTRFHLPVWLGVGGALKHVLEKDIRNHNMLRDMYNNFPFFRVTIDLLEMVFAKGDPEIAALYDKLLVSEELQSFGERLRANYEDTKRRLLEVAGHKDLLEGDPYLKQRLRLRDPYITTLNVCQAYTLKRIRDPDFKVTERPHLSKEIMDAHKAAAELVKLNPTSEYAPGLEDTLILTMKGVAAGLQNTG

SEQ ID NO: 27153 - protein, 504 aa, Candida albicans SC5314
MSHSSLSWLSNFNVETVPSKYLRRSSIIGTIGPKTNNVDVLVKLRKAGLNVVRMNFSHGSYEYHQSVIDNARKSEEVYKGRPLAIALDTKGPEIRTGTTIGDKDYPIPPNHEMIFTTDDAYKTKCDDKVMYIDYKNITKVIAPGKIIYVDDGVLSFEVISVDDEQTLKVRSLNAGKISSHKGVNLPGTDVDLPALSEKDIADIKFGVKNKVHMIFASFIRTANDVLEIRKVLGEEGKDIQIISKIENQQGVNNFDEILEVTDGVMVARGDLGIEIPAPQVFVVQKQLIAKCNLAAKPVICATQMLESMTYNPRPTRAEVSDVGNAILDGADCVMLSGETAKGNYPVEAVSMMHNTCLTAEKAIAYPQLFNELRSLAKKPTATTETCAVAAVSAAYEQDAKAIVVLSTSGLSARLVSKYKPDVPILMVTRNERAAKFSHLYRGVYPFIYDKPSIENWQEDVENRLRWAVSEAVELGIISKGDSIVTVQGWTRGSGHSNTVRIVQA

SEQ ID NO: 27154 - protein, 408 aa, Coix lacryma-jobi
MEHVISMEEILGPFWDLPPSPPPLPLPEQQPLVTDTGSVVIDGVVTQGGGDGEGGDMMGQNTTEWTFERLLEEEILINKTTLVTNSSCSTLNIDPVVEVDQGTMASGAVSAVGDPMEYNAILKRKLEVDLVAFKMWRASSVVNSERSQDSNNHNGGSKNVVQNKLNGEDPINNHAQNVDLRVRLATSSSSRDPSPSDEDMDGEVEILGFKMPTEERVRKRKESNRESARRSRYRKAAHLKELEDQVEQLKAENSCLLRRLAALNQKYNEANVDNRVLRADMETLRAKVKMGEDSLKRVMEMSSLPPSMPIPALPSSSDASVPIQDDIINYFSTTPAADEDAPVDNNSFIIMPMADPLQLVQAEDQPTMGAMELIQKTMGAMPTSPGSALQESQLLGLGPDETINMDMY

SEQ ID NO: 27155 - protein, 73 aa, Oryza sativa
AMGVAVGICGFQFFRNITGNPEVRVNKVGRAAGVLENHEEGRRYAEHGLRNYVRDKTPEIMPAINKFFIEPTK

SEQ ID NO: 27156 - protein, 246 aa, Rubrobacter xylanophilus DSM 9941
MGLQEPRLDGGFTGGLKEKILLVDDDAALLEVTSILLVSEGYEVLAAEDGIEALETLDREEPDLVVLDIMMPRLSGFEVLKKIRERSDVPVILLTAKSQSVDKVVGLELGADDYITKPFDTKELLARIKAILRRLGRREGGRRDGVLRLGPLEMDTNAYTVTRDGEPLDLTPTEFKILALLLRRPGQAFTRAQISEAVSTGSHYLASRYIDVHISRLRSKIERDPSRPEIIQTVPSVGYRAARLEG

SEQ ID NO: 27157 - protein, 964 aa, Arabidopsis thaliana
  misc_feature (441)..(441): Xaa can be any naturally occurring amino acid
  unsure (1)..(964): unsure at all Xaa locations
MAARNLEKMASIDAQLRLLAPGKVSEDDKLIEYDALLLDRFLDILQDLHGEDVREFVQECYEVAADYDGNRNTEKLEELGNMLTSLDPGDSIVVTKSFSNMLSLANLAEEVQIAYRRRIKKLKKGDFADEASATTESDIEETLKRLLQLNKTPEEVFDALKNQTVDLVLTAHPTQSVRRSLLQKFGRIRDCLTQLYAKDITPDDKQELDEALQREIQAAFRTDEIRRTPPTPQDEMRAGMSYFHETIWKGVPKFLRRVDTALKNIGINERVPYNAPLIQFSSWMGGDRDGNPRVTPEVTRDVCLLARMMAANLYFSQIEDLMFEMSMWRCNEELRVRAERQRCAKRDAKHYIEFWKQIPANEPYRAILGDVRDKLYNTRERARQLLSSGVSDVPEDAVFTSVDQFLEPLELCYRSLCDCGDRPIADGSLLDFLRQVSTFGXLALVKLDIRQESERHSDVLDAITTHLGIGSYKEWSEDKRQEWLLSELSGKRPLFGPDLPKTEEVADVLDTFKVISELPSDSFGAYIISMATAPSDVLAVELLQRECGITDPLRVVPLFEKLADLESAPAAVARLFSIEWYRNRINGKQEVMIGYSDSGKDAGRLSAAWQLYKTQEELVKVAKEYGVKLTMFHGRGGTVGRGGGPTHLAILSQPPDTIHGQLRVTVQGEVIEQSFGEEHLCFRTLQRFTAATLEHGMHPPVSPKPEWRVLMDEMAIIATEEYRSVVFKEPRFVEYFRLATPELEYGRMNIGSRPSKRKPSGGIESLRAIPWIFAWTQTRFHLPVWLGFGGAFKRVIQKDSKNLNMLKEMYNQWPFFRVTIDLVEMVFAKGDPGIAALYDRLLVSEELQPFGEQLRVNYQETRRLLLQVAGHKDILEGDPYLRQRLQLRDPYITTLNVCQAYTLKQIRDPSFHVKVRPHLSKDYMESSPAAELVKLNPKSEYAPGLEDTVILTMKGIAAGMQNTG

SEQ ID NO: 27158 - protein, 463 aa, Bacillus subtilis subsp. subtilis str. 168
METSQEPLVTQKKSKPSVWRSMSLFLVPLLLSNVLQSVGQLVGMMAVGRWLGVDAVAAVSSFFPLFFLLISFTIGIGSGSSILIGQAYGAKNEERLKAVVGTTLTFTFLLGVVLAVIGSIFTLDILRLMGTPENVIHVSANYARILFYAMPFMFLYFAYTTFLRGTGDSKTPFYTLIVSTVINIALLPVLILGMFGFPKLGIYGSAYATVISTIATFLVLMVYLRKRKHPLQFDKTVRRYLKMDKELLVLLLRLGVPASINMILVSLSEIAVISFVNHYGSNATAAYGVVNQVASYVQMPAVSLGIAVSIFAAQSIGANEFDRLKQVIRVGIWLNYIIGGVLIILIYVFSHQILSLFLTEQESLYIAHRLLMTTLWSYLLFGNAQIISATMRASGTVLWPTVISIFAIWGVEVPVAFVLSHYTKLEILGVWVGYPAAFAVSLLLIYGYYQFVWKKKQITRLIQ

SEQ ID NO: 27159 - protein, 1255 aa, Ustilago maydis 521
MKRSTLSSVLALFAAATATLAYEYPHVPADKTTPSQIRLSFKSLNAVSVAWNTYEKINKPCVAYGTSASNLNKRACSSTSETYPTSRTWFNNVILDNLAPSTTYFYSIDSSNSSTQSFKSARRPGDTSPFACNAVIDMGVYGLDGYTTTKKRDIPFIPPSLTHSTIDQLAQSVDLYDFVIHPGDFAYADDWFLRPQNLLNGKDAYAAITELFFNQLSSISSVKPYMAGPGNHEAACQEVLYYQGACPEGQYNFTDFSHRFAPNMPTTFVSQSKVSAAKASATLARSLALPPFWYSFDYGMVHFISIDTETDFPSAPDTPKLGAGPYGRANQQLDFLKADLASVDRKVTPWVVAMGHRPWYSTGGNDNICSECQAAFEDLFYQYGVDLFVAGHVHNLQRHQPIYKGTVDAANLNDPKAPWYIVAGAAGNIEGLEGFNTQPSYTVFADNVHNGYARLTFQDVNHLKVEMIHSTDGGVLDSAILYKKHADQFVRQPLPASTKKRSLLNSLFNIGGSSIRRDSIWCNAFCDAVNAFVLQLTTVCAVAVRLSSRTPLSPTPRAATPARLIASSSTKREQLQACKTHNHQEPPQSAVLSEEPQKLGKRARKALKARERQEQGSIAKAAKESARSEALEMESARLNQQGDTIAVHVKPVLKVKHVMNAAEHTMPETATQDKELELRRVKMETQYHGDPTTRWSGSLFRSHISSLLSGFGTSPSTRPLQENDLPTASSATVPWASLDSTSKDSDTNRSDIDNSSTSSRFRKDMPSSSTSMSKSERMESQARVIFHAIREARERGMVDEDESFFYPYPEGVPPKDLDGKDTVWLNLGPDPEAWGRELPQVKDKWLEVLSLGLAKEINDQASTPSSAPFEDADGGQEGEEQHPREDQIAFNDLVEDYDLEDHERLEQLGDSIVNMSSRLLAYLSYPDVNEGSLTRLSNYPTQNNFLALLFRECGLAARRDELCRELRGQHGHDDDASTTQKQACRKCTRTRQTDEEMAQLPLLIKRDADMFEAYAAAVFLSHGNDFNVVHNWLCHLFRPFQDQAYRFMVQRSEALARMQANRAAAAAASAAEASLALRSRNSIAGSPTNLAADGLGLNSATIDPSSVRFSSLFPDFSRGSEKKSAIPAYALANTDQAFITDEFLTVAARARRQREERLREELRLQDQQELMKMGWFRKGFLNLRTGFRQYVMGKDMVKEQEARLKRKINEQRGMSEKNRQRLRARERSEAGVSVKSTASKMKEKIFEANANQENQ

SEQ ID NO: 27160 - protein, 243 aa, Triticum aestivum
MATDRVKASVLHGEKDLRLEERELPKPSSNEVQVAVQSTGLCGSDLHYYNHFRNGDIIVREPLTLGHESAGTVVAVGSEVTHLKPGDHVALEVGLPCETCELCDEGRYNICRGMKFRSSAKANPHAQGTLQERINHPAKWCHKMPEHVTLDLGALVEPLSVAMHARDRASLPKGSTVLVLGAGAVGLLAAAVAKADQAKTVIIADILKDRLDFATSNGFADASVVGPMEPQLSRTAGFRSKVA

SEQ ID NO: 27161 - protein, 576 aa, Solibacter usitatus Ellin6076
MAAGFVSTIPFAPMSFPRIFNSLVLEVCYATALVLLRLGHFRRASRAYLAGTWIWATLVCSSYGGVRSPGALLYVSMPASAAWLLGSTAAIRTAGGCLLSALVFTVLEMTHGLPLQRMATPLGTWNIVVQAVLINAIPVGEIIGRLRETLQELQRHQQHLASLVDQRTQQVVEARDQAESANRAKSAFLANMSHELRTPLSVILASSDLLNESDPTPDQREDIARISHSGKHLLGLIDDVLDVAKIEAGKEDLAIAASDLISTVRTVVEMMRVRAEEKCLSLVYYQAPDVPRYVRVDAPKLRQILINLLGNAIKFTRKGTVKLQLSAKTGAEPGLARFSFDIEDSGVGMPQHHLGRIFEPFEVSNPGPQTGTGLGLTITQRFVELMGGTLVVKSDVGRGSRFEVELPLELAKESETYGAELAPGHAFILESGQPEWRVLIVEDDLESATVLRKMLTRAGFQVRVADNGALGIEAFQEWRPHFIWMDLDLAEASGTEATRRIRLLDGGADVKIAAITAAADASDRDEVMHAGFDDFTFKPFRQTTIFFCIARHLGVRYASSEGAGNESRQQAGGRPG

SEQ ID NO: 27162 - protein, 320 aa, Prochlorococcus marinus str. MIT 9313
MAPLAVLSDVDLVRSYLRDIGRVPLLSHEQEITLGRQVQELMSLEQLESELEGQTGEPASRKELAKAAGLSELQLKKKLQSGRRAKERMVSANLRLVVSVAKKYTKRNMELLDLIQEGTIGLVRGVEKFDPTRGYKFSTYAYWWIRQGITRAIAEKSRTIRLPIHITEMLNKLKKGQRELSQEMGRTPTVSELAEFVELPEEEVKDLMCRARQPMSLEMKVGDGDETELLELLAGEEELPSEKVEVDCMKGDLRTLLEKLPELQGRVLRMRYGIDGGEPMNLTGIAKTLGMSRDRTRRLEREGLALMRTSSFELEAYMAV

SEQ ID NO: 27163 - protein, 268 aa, Escherichia coli
MERYESLFAQLKERKEGAFVPFVTLGDPGIEQSLKIIDTLIEAGADALELGIPFSDPLADGPTIQNATLRAFAAGVTPAQCFEMLALIREKHPTIPIGLLMYANLVFNKGIDEFYARCEKVGVDSVLVADVPVEESAPFRQAALRHNVAPIFICPPNADDDLLRQIASYGRGYTYLLSRAGVTGAENRAALPLNHLVAKLKEYNAAPPLQGFGISAPDQVKAAIDAGAAGAISGSAIVKIIEQHINEPEKMLAALKVFVQPMKAATRS

SEQ ID NO: 27164 - protein, 970 aa, Zea mays
MASTKAPGPGEKHHSIDAQLRQLVPGKVSEDDKLIEYDALLVDRFLNILQDLHGPSLREFVQECYEVSADYEGKGDTTKLGELGAKLTGLAPADAILVASSILHMLNLANLAEEVQIAHRRRNSKLKKGGFADEGSATTESDIEETLKRLVSEVGKSPEEVFEALKNQTVDLVFTAHPTQSARRSLLQKNARIRNCLTQLNAKDITDDDKQELDEALQREIQAAFRTDEIRRAQPTPQAEMRYGMSYIHETVWKGVPKFLRRVDTALKNIGINERLPYNVSLIRFSSWMGGDRDGNPRVTPEVTRDVCLLARMMAANLYIDQIEELMFELSMWRCNDELRVRAEELHSSSGSKVTKYYIEFWKQIPPNEPYRVILGHVRDKLYNTRERARHLLASGVSEISAESSFTSIEEFLEPLELCYKSLCDCGDKAIADGSLLDLLRQVFTFGLSLVKLDIRQESERHTDVIDAITTHLGIGSYREWPEDKRQEWLLSELRGKRPLLPPDLPQTDEIADVIGAFHVLAELPPDSFGPYIISMATAPSDVLAVELLQRECGVRQPLPVVPLFERLADLQSAPASVERLFSVDWYMDRIKGKQQVMVGYSDSGKDAGRLSAAWQLYRAQEEMAQVAKRYGVKLTLFHGRGGTVGRGGGPTHLAILSQPPDTINGSIRVTVQGEVIEFCFGEEHLCFQTLQRFTAATLEHGMHPPVSPKPEWRKLMDEMAVVATEEYRSVVVKEARFVEYFRSATPETEYGRMNIGSRPAKRRPGGGITTLRAIPWIFSWTQTRFHLPVWLGVGAAFKFAIDKDVRNFQVLKEMYNEWPFFRVTLDLLEMVFAKGDPGIAGLYDELLVAEELKPFGKQLRDKYVETQQLLLQIAGHKDILEGDPFLKQGLVLRNPYITTLNVFQAYTLKRIRDPNFKVTPQPPLSKEFADENKPAGLVKLNPASEYPPGLEDTLILTMKGIAAGMQNTG

SEQ ID NO: 27165 - protein, 635 aa, GIBBERELLA ZEAE PH-1
MLGRSNSDINLILSLRVLQSSLRSQLQTPRNTAFLSLAKFTTMPSKRLKRESSSPSAGGTAKKAKTSKMNGSGSSDALRRPHHKAQEAEENGIAIRKFYPAEMSNARARAYNNNEIPRPIEDLVDALEVTAKERKSIDVKDAVVHWFKMDLRISDNRALALASDKAKEAGVPLIALYIISPQDYEAHLRAPVRIDFMLRTLSVIKEDLAKLDIPLYVETVEKRKHLPDRILELMDEWGASHLYANMEYEVDELRREAAMIKDFAENGKAFEVVHDTCIVPPGELHTGAGKQYAVYTPWFKTWIAHIHENLDLLELYEPPEKNPDSARKKFKKLFNAEIPEAPKSKRLGDEEKERLRSLWPCGEHEAKKRLDKFCEERIGNYHEKRNIPADAATSSLSVHLASGTISARTCVRTARDRNKTKKLNGGNDGIQTWISEVAWRDFYKHVLVNWPYVCMNKPFKPEYSNISWSYDNDHFAAWCEGRTGFPIVDAAMRQMNTIGYMHNRCRMIVASFLAKDLLLDWRKGEKYFMEHLVDGDFASNNGGWGFSASVGVDPQPYFRIFNPLLQSEKFDPDGDYIRKWVPELKDLDNKAIHDPYNRKAGPQAKKKGYPEPIVTHKDCRERALAAYKEGLAIDE

SEQ ID NO: 27166 - protein, 154 aa, Thermoplasma volcanium GSS1
MGRLPNIRGDIVIEVKEPKRIPFVGMLQGMFTVFKHLFKKPITVQYPEEKAYTPPRFKFRIFLSMDDCVGCTLCEQVCPNLSIRMIVVERNNPHNKRNLYPQVNFGTCTVCRNCEEICPTEAIYLTHELETARTRNNFFYSPQELEKTEEEVKK

SEQ ID NO: 27167 - protein, 268 aa, Escherichia coli
MERYESLFAQLKERKEGAFVPFVTLGDLGIEQSLKIIDTLIEAGADALELGIPFSDPLADGPTIQNATLRAFAAGVTPAQCFEMLAIIREKHPTIPIGLLMYANLVFNKGIDEFYARCEKVGVDSVLVADVPVEESAPFRQAALRHNVAPIFICPPNADDDLLRQIASYGRGFTYLLSRAGVTGAENRAALPLNHLVAKLKEYNAAPPLQGFGISAPDQVKAAIDAGAAGAISGSAIVKIIEQHINEPEKMLAALKVFVQPMKAATRS

SEQ ID NO: 27168 - protein, 234 aa, Brucella suis 1330
MTDIPDRAAFAHVTDWVFDLDNTLYPHAANLFAQIDVKMTSYVEALLKLPRDEARKVQKQFYLEYGTTLKGLMECHQIDPDDFLQKVHNIDYTWLKPDPALGQAIKALPGRRFIFTNGDRGHAERAARRLGILDNFDDIFDIVAAGLTPKPERATYDRFLGAFGVDATRAVMFEDLARNLVVPKALGMKTVLVVPNNFEPAFSEIWESDPEFTDQVDYVTDNLTRFLEQISPDR

SEQ ID NO: 27169 - protein, 256 aa, Botryotinia ficariarum
AYMLKYDSTHGQFKGDIKVLSDGLEVNGKKVKFYTERDPANIPWAESEAYYVVESTGVFTTTEKAKAHLKGGAKKVVISAPSADAPMYVMGVNNETYKGDVDVISNASCTTNCLAPLAKVINDEFTIIEGLMTTIHSYTATQKTVDGPSAKDWRGGRTAAQNIIPSSTGAAKAVGKVIPELNGKLTGMSMRVPTANVSVVDLTVRIEKGASYDEIKAVIKKAADGPLKGILAYTEDDVVSTDMNGDNHSSIFDRKA

SEQ ID NO: 27170 - protein, 357 aa, Vibrio cholerae
ASLAAILEARGLKVTMMKLDPYINVDPGTMSPTQHGEVFVTEDGAETDLDLGHYERFIRTKMTKRNNFTAGRVYADVLRKERRGDYLGATIQVIPHITNAIKDRVIAGSEGHDIAIVEVGGTVGDIESLPFMEAIRQLAIEVGREHAMFMHLTLVPYLAAAGEVKTKPTQHSVKELLSIGIQPDILVCRSDRMIPANERKKIALFCNVPEKAVISMKDVDSIYKIPQLIRSQGLDDLVCARFGINAPEADLSEWEQVIYEEANPTGEVTIGMVGKYTELPDAYKSVNEALKHAGLKNRLSVTIKYVDSQDVETKGTDVLNGLDAILVPGGFGDRGIEGKIRAAQYARENKIPYLGIC

SEQ ID NO: 27171 - protein, 230 aa, Triticum aestivum
  misc_feature (108)..(108): Xaa can be any naturally occurring amino acid
  unsure (1)..(230): unsure at all Xaa locations
MQIFVKTLTGKTITLEVESSDTIDNVKAKIQDKEGIPPDQQRLIFAGKQLEDGRTLADYNIQKESTLHLVLRLRGGMQIFVKTLTGKTITLEVDSSDTIDNVQAKIQXDKEGIPPDQQRLIFAGKQLEDGRTLADYNIQKESTLHLVLRLRGGMQIFVKTLTGKTITLEVESSDTIDNVKAKIQDKEGIPPDQQRLIFAGKQLEDGRTLADYNIQKESTLHLVLRLRGGQ
